United States Patent Application Publication US 2025/0297309 A1 - sequence listing, part 2

SEQ ID NO: 29134 - RNA, 27 nt, Synthetic Construct
  source 1..27: mol_type = other RNA
gctttacattggactttgaacagatct

SEQ ID NO: 29135 - RNA, 22 nt, Synthetic Construct
  source 1..22: mol_type = other RNA
cccataaagtagaaagcactac

SEQ ID NO: 29136 - RNA, 23 nt, Synthetic Construct
  source 1..23: mol_type = other RNA
tggtaatacgacgtactttgtgt

SEQ ID NO: 29137 - RNA, 16 nt, Synthetic Construct
  source 1..16: mol_type = other RNA
atagggaacgtgagct

SEQ ID NO: 29138 - RNA, 16 nt, Synthetic Construct
  source 1..16: mol_type = other RNA
atagggaacgtgagct

SEQ ID NO: 29139 - RNA, 43 nt, Synthetic Construct; identical to SEQ ID NO: 6535
  source 1..43: mol_type = other RNA

SEQ ID NO: 29140 - RNA, 43 nt, Synthetic Construct; identical to SEQ ID NO: 6535
  source 1..43: mol_type = other RNA

SEQ ID NO: 29141 - RNA, 22 nt, Synthetic Construct
  source 1..22: mol_type = other RNA
tcctgtaccgagctgccccgag

SEQ ID NO: 29142 - RNA, 22 nt, Synthetic Construct
  source 1..22: mol_type = other RNA
tcctgtaccgagctgccccgag

SEQ ID NO: 29143 - RNA, 30 nt, Synthetic Construct; identical to SEQ ID NO: 2353
  source 1..30: mol_type = other RNA

SEQ ID NO: 29144 - RNA, 30 nt, Synthetic Construct; identical to SEQ ID NO: 2353
  source 1..30: mol_type = other RNA

SEQ ID NO: 29145 - RNA, 20 nt, Synthetic Construct
  source 1..20: mol_type = other RNA
tgaggtagaaggttgtatag

SEQ ID NO: 29146 - RNA, 20 nt, Synthetic Construct
  source 1..20: mol_type = other RNA
tgaggtagaaggttgtatag

SEQ ID NO: 29147 - RNA, 18 nt, Synthetic Construct
  source 1..18: mol_type = other RNA
gctgtgatggccgagtgg

SEQ ID NO: 29148 - RNA, 15 nt, Synthetic Construct
  source 1..15: mol_type = other RNA
ggtggctgtagctca

SEQ ID NO: 29149 - RNA, 21 nt, Synthetic Construct
  source 1..21: mol_type = other RNA
gtagtgtttcctactttatgg

SEQ ID NO: 29150 - RNA, 23 nt, Synthetic Construct
  source 1..23: mol_type = other RNA
caaagtgcttacagtgcaggtag

SEQ ID NO: 29151 - RNA, 23 nt, Synthetic Construct
  source 1..23: mol_type = other RNA
caaagtgcttacagtgcaggtag

SEQ ID NO: 29152 - RNA, 22 nt, Synthetic Construct
  source 1..22: mol_type = other RNA
ccccttggggttgtaggaccac

SEQ ID NO: 29153 - RNA, 22 nt, Synthetic Construct
  source 1..22: mol_type = other RNA
ccccttggggttgtaggaccac

SEQ ID NO: 29154 - RNA, 23 nt, Synthetic Construct
  source 1..23: mol_type = other RNA
tgaggggaagagagcgagacttt

SEQ ID NO: 29155 - RNA, 23 nt, Synthetic Construct
  source 1..23: mol_type = other RNA
tgaggggaagagagcgagacttt

SEQ ID NO: 29156 - RNA, 23 nt, Synthetic Construct
  source 1..23: mol_type = other RNA
tcctgtactgagctgcctcgaga

SEQ ID NO: 29157 - RNA, 23 nt, Synthetic Construct
  source 1..23: mol_type = other RNA
tcctgtactgagctgcctcgaga

SEQ ID NO: 29158 - RNA, 24 nt, Synthetic Construct
  source 1..24: mol_type = other RNA
gggttgtaaaccgcttttgtcagg

SEQ ID NO: 29159 - RNA, 24 nt, Synthetic Construct
  source 1..24: mol_type = other RNA
gggttgtaaaccgcttttgtcagg

SEQ ID NO: 29160 - RNA, 20 nt, Synthetic Construct
  source 1..20: mol_type = other RNA
cggcggggacggcgattggt

SEQ ID NO: 29161 - RNA, 20 nt, Synthetic Construct
  source 1..20: mol_type = other RNA
cggcggggacggcgattggt

SEQ ID NO: 29162 - RNA, 19 nt, Synthetic Construct
  source 1..19: mol_type = other RNA
ggctggtccgaaggtagtg

SEQ ID NO: 29163 - RNA, 19 nt, Synthetic Construct
  source 1..19: mol_type = other RNA
ggctggtccgaaggtagtg

SEQ ID NO: 29164 - RNA, 18 nt, Synthetic Construct
  source 1..18: mol_type = other RNA
tcccaagggtatggctgt

SEQ ID NO: 29165 - RNA, 22 nt, Synthetic Construct
  source 1..22: mol_type = other RNA
gtcagtttgtcaaataccccat

SEQ ID NO: 29166 - RNA, 22 nt, Synthetic Construct
  source 1..22: mol_type = other RNA
gtcagtttgtcaaataccccat

SEQ ID NO: 29167 - RNA, 22 nt, Synthetic Construct
  source 1..22: mol_type = other RNA
tattgcacttgtcccggtctgt

SEQ ID NO: 29168 - RNA, 22 nt, Synthetic Construct
  source 1..22: mol_type = other RNA
tattgcacttgtcccggtctgt

SEQ ID NO: 29169 - RNA, 27 nt, Synthetic Construct
  source 1..27: mol_type = other RNA
gactcttagcggtggatcactcggctc

SEQ ID NO: 29170 - RNA, 21 nt, Synthetic Construct
  source 1..21: mol_type = other RNA
ctggacttggagtcagaaggc

SEQ ID NO: 29171 - RNA, 20 nt, Synthetic Construct
  source 1..20: mol_type = other RNA
tgaggcagtaggttgtatag

SEQ ID NO: 29172 - RNA, 20 nt, Synthetic Construct
  source 1..20: mol_type = other RNA
tgaggcagtaggttgtatag

SEQ ID NO: 29173 - RNA, 19 nt, Synthetic Construct
  source 1..19: mol_type = other RNA
caagcggtggatgatgtgg

SEQ ID NO: 29174 - RNA, 19 nt, Synthetic Construct
  source 1..19: mol_type = other RNA
caagcggtggatgatgtgg

SEQ ID NO: 29175 - RNA, 23 nt, Synthetic Construct
  source 1..23: mol_type = other RNA
ggatatcatcatatactgtaagt

SEQ ID NO: 29176 - RNA, 23 nt, Synthetic Construct
  source 1..23: mol_type = other RNA
ggatatcatcatatactgtaagt

SEQ ID NO: 29177 - RNA, 36 nt, Synthetic Construct; identical to SEQ ID NO: 752
  source 1..36: mol_type = other RNA

SEQ ID NO: 29178 - RNA, 36 nt, Synthetic Construct; identical to SEQ ID NO: 752
  source 1..36: mol_type = other RNA

SEQ ID NO: 29179 - RNA, 17 nt, Synthetic Construct
  source 1..17: mol_type = other RNA
ccagtaaacggcggccg

SEQ ID NO: 29180 - RNA, 23 nt, Synthetic Construct
  source 1..23: mol_type = other RNA
tgaggtagtaggctgtgtggttt

SEQ ID NO: 29181 - RNA, 23 nt, Synthetic Construct
  source 1..23: mol_type = other RNA
tgaggtagtaggctgtgtggttt

SEQ ID NO: 29182 - RNA, 21 nt, Synthetic Construct
  source 1..21: mol_type = other RNA
tgaggggcagggagcgagact

SEQ ID NO: 29183 - RNA, 21 nt, Synthetic Construct
  source 1..21: mol_type = other RNA
tgaggggcagggagcgagact

SEQ ID NO: 29184 - RNA, 31 nt, Synthetic Construct; identical to SEQ ID NO: 13805
  source 1..31: mol_type = other RNA

SEQ ID NO: 29185 - RNA, 31 nt, Synthetic Construct; identical to SEQ ID NO: 13805
  source 1..31: mol_type = other RNA

SEQ ID NO: 29186 - RNA, 21 nt, Synthetic Construct
  source 1..21: mol_type = other RNA
ggagtatgcagagcaagatca

SEQ ID NO: 29187 - RNA, 15 nt, Synthetic Construct
  source 1..15: mol_type = other RNA
gctttgatccggaga

SEQ ID NO: 29188 - RNA, 15 nt, Synthetic Construct
  source 1..15: mol_type = other RNA
cctcgcgcgattgga

SEQ ID NO: 29189 - RNA, 15 nt, Synthetic Construct
  source 1..15: mol_type = other RNA
cctcgcgcgattgga

SEQ ID NO: 29190 - RNA, 26 nt, Synthetic Construct
  source 1..26: mol_type = other RNA
gaggaacactagtggcgtaggcgaga

SEQ ID NO: 29191 - RNA, 26 nt, Synthetic Construct
  source 1..26: mol_type = other RNA
gaggaacactagtggcgtaggcgaga

SEQ ID NO: 29192 - RNA, 22 nt, Synthetic Construct
  source 1..22: mol_type = other RNA
acagtagtctgcacattggttt

SEQ ID NO: 29193 - RNA, 22 nt, Synthetic Construct
  source 1..22: mol_type = other RNA
acagtagtctgcacattggttt

SEQ ID NO: 29194 - RNA, 22 nt, Synthetic Construct
  source 1..22: mol_type = other RNA
ccggtcccaagggtatggctgt

SEQ ID NO: 29195 - RNA, 22 nt, Synthetic Construct
  source 1..22: mol_type = other RNA
ccggtcccaagggtatggctgt

SEQ ID NO: 29196 - RNA, 15 nt, Synthetic Construct
  source 1..15: mol_type = other RNA
cgagtgacgtagtgt

SEQ ID NO: 29197 - RNA, 15 nt, Synthetic Construct
  source 1..15: mol_type = other RNA
cgagtgacgtagtgt

SEQ ID NO: 29198 - RNA, 23 nt, Synthetic Construct
  source 1..23: mol_type = other RNA
tgtagtgtttcctactttatggt

SEQ ID NO: 29199 - RNA, 15 nt, Synthetic Construct
  source 1..15: mol_type = other RNA
cgactcttagcggtg

SEQ ID NO: 29200 - RNA, 15 nt, Synthetic Construct
  source 1..15: mol_type = other RNA
cgactcttagcggtg

SEQ ID NO: 29201 - RNA, 23 nt, Synthetic Construct
  source 1..23: mol_type = other RNA
ggaggggcagagagcgagacttt

SEQ ID NO: 29202 - RNA, 22 nt, Synthetic Construct
  source 1..22: mol_type = other RNA
ctttgttcgattccgttgagta

SEQ ID NO: 29203 - RNA, 25 nt, Synthetic Construct
  source 1..25: mol_type = other RNA
gcgccgctggtgtagtggtatcatg

SEQ ID NO: 29204 - RNA, 25 nt, Synthetic Construct
  source 1..25: mol_type = other RNA
gcgccgctggtgtagtggtatcatg

SEQ ID NO: 29205 - RNA, 17 nt, Synthetic Construct
  source 1..17: mol_type = other RNA
tgccagcagccgcggta

SEQ ID NO: 29206 - RNA, 23 nt, Synthetic Construct
  source 1..23: mol_type = other RNA
taaggggcagagagcgagacttt

SEQ ID NO: 29207 - RNA, 23 nt, Synthetic Construct
  source 1..23: mol_type = other RNA
taaggggcagagagcgagacttt

SEQ ID NO: 29208 - RNA, 36 nt, Synthetic Construct; identical to SEQ ID NO: 2344
  source 1..36: mol_type = other RNA

SEQ ID NO: 29209 - RNA, 36 nt, Synthetic Construct; identical to SEQ ID NO: 2344
  source 1..36: mol_type = other RNA

SEQ ID NO: 29210 - RNA, 21 nt, Synthetic Construct
  source 1..21: mol_type = other RNA
ctagactgaggctccttgagg

SEQ ID NO: 29211 - RNA, 22 nt, Synthetic Construct
  source 1..22: mol_type = other RNA
tgaggtagaagtttgtgctgtt

SEQ ID NO: 29212 - RNA, 22 nt, Synthetic Construct
  source 1..22: mol_type = other RNA
cgactcttagcggtggatcact

SEQ ID NO: 29213 - RNA, 22 nt, Synthetic Construct
  source 1..22: mol_type = other RNA
cgactcttagcggtggatcact

SEQ ID NO: 29214 - RNA, 20 nt, Synthetic Construct
  source 1..20: mol_type = other RNA
tgaggtagtgggttgtatag

SEQ ID NO: 29215 - RNA, 20 nt, Synthetic Construct
  source 1..20: mol_type = other RNA
tgaggtagtgggttgtatag

SEQ ID NO: 29216 - RNA, 23 nt, Synthetic Construct
  source 1..23: mol_type = other RNA
taaggggcagagagcgagacttt

SEQ ID NO: 29217 - RNA, 21 nt, Synthetic Construct
  source 1..21: mol_type = other RNA
cgaggtagtagtttgtgctgt

SEQ ID NO: 29218 - RNA, 21 nt, Synthetic Construct
  source 1..21: mol_type = other RNA
cgaggtagtagtttgtgctgt

SEQ ID NO: 29219 - RNA, 21 nt, Synthetic Construct
  source 1..21: mol_type = other RNA
tgaggggcagagagcgagact

SEQ ID NO: 29220 - RNA, 21 nt, Synthetic Construct
  source 1..21: mol_type = other RNA
tgaggggcagagagcgagact

SEQ ID NO: 29221 - RNA, 20 nt, Synthetic Construct
  source 1..20: mol_type = other RNA
tgaggtagtaagttgtattg

SEQ ID NO: 29222 - RNA, 20 nt, Synthetic Construct
  source 1..20: mol_type = other RNA
tgaggtagtaagttgtattg

SEQ ID NO: 29223 - RNA, 31 nt, Synthetic Construct; identical to SEQ ID NO: 7160
  source 1..31: mol_type = other RNA

SEQ ID NO: 29224 - RNA, 31 nt, Synthetic Construct; identical to SEQ ID NO: 7160
  source 1..31: mol_type = other RNA

SEQ ID NO: 29225 - RNA, 21 nt, Synthetic Construct
  source 1..21: mol_type = other RNA
cgaggtagtaggttgtgtggt

SEQ ID NO: 29226 - RNA, 22 nt, Synthetic Construct
  source 1..22: mol_type = other RNA
acagtagtctgcacattggtta

SEQ ID NO: 29227 - RNA, 22 nt, Synthetic Construct
  source 1..22: mol_type = other RNA
acagtagtctgcacattggtta

SEQ ID NO: 29228 - RNA, 22 nt, Synthetic Construct
  source 1..22: mol_type = other RNA
tcctgtactgtgctgccccgag

SEQ ID NO: 29229 - RNA, 22 nt, Synthetic Construct
  source 1..22: mol_type = other RNA
tcctgtactgtgctgccccgag

SEQ ID NO: 29230 - RNA, 22 nt, Synthetic Construct
  source 1..22: mol_type = other RNA
tgaggtagtagattgtatagtc

SEQ ID NO: 29231 - RNA, 22 nt, Synthetic Construct
  source 1..22: mol_type = other RNA
tgaggtagtagattgtatagtc

SEQ ID NO: 29232 - RNA, 24 nt, Synthetic Construct
  source 1..24: mol_type = other RNA
tagcagcacgtaaatattggcgtt

SEQ ID NO: 29233 - RNA, 23 nt, Synthetic Construct
  source 1..23: mol_type = other RNA
tagcagcacgtaaatattggcgt

SEQ ID NO: 29234 - RNA, 22 nt, Synthetic Construct
  source 1..22: mol_type = other RNA
actcggcgtggcgtcggtcgtg

SEQ ID NO: 29235 - RNA, 22 nt, Synthetic Construct
  source 1..22: mol_type = other RNA
actcggcgtggcgtcggtcgtg

SEQ ID NO: 29236 - RNA, 23 nt, Synthetic Construct
  source 1..23: mol_type = other RNA
tgagaactgaattccatgggtta

SEQ ID NO: 29237 - RNA, 23 nt, Synthetic Construct
  source 1..23: mol_type = other RNA
tgagaactgaattccatgggtta

SEQ ID NO: 29238 - RNA, 19 nt, Synthetic Construct
  source 1..19: mol_type = other RNA
agcgaaattccttgtcggg

SEQ ID NO: 29239 - RNA, 19 nt, Synthetic Construct
  source 1..19: mol_type = other RNA
agcgaaattccttgtcggg

SEQ ID NO: 29240 - RNA, 28 nt, Synthetic Construct
  source 1..28: mol_type = other RNA
gctttacattggactttgaacagatctg

SEQ ID NO: 29241 - RNA, 21 nt, Synthetic Construct
  source 1..21: mol_type = other RNA
tgaggggcagagagcgaggct

SEQ ID NO: 29242 - RNA, 21 nt, Synthetic Construct
  source 1..21: mol_type = other RNA
tgaggggcagagagcgaggct

SEQ ID NO: 29243 - RNA, 22 nt, Synthetic Construct
  source 1..22: mol_type = other RNA
tggaatgtgaagaagtatgtat

SEQ ID NO: 29244 - RNA, 22 nt, Synthetic Construct
  source 1..22: mol_type = other RNA
tggaatgtgaagaagtatgtat

SEQ ID NO: 29245 - RNA, 24 nt, Synthetic Construct
  source 1..24: mol_type = other RNA
tttccccttggggttgtaggacca

SEQ ID NO: 29246 - RNA, 24 nt, Synthetic Construct
  source 1..24: mol_type = other RNA
tttccccttggggttgtaggacca

SEQ ID NO: 29247 - RNA, 23 nt, Synthetic Construct
  source 1..23: mol_type = other RNA
tgaggggcagagagcgggacttt

SEQ ID NO: 29248 - RNA, 23 nt, Synthetic Construct
  source 1..23: mol_type = other RNA
tgaggggcagagagcgggacttt

SEQ ID NO: 29249 - RNA, 23 nt, Synthetic Construct
  source 1..23: mol_type = other RNA
tgaggagcagagagcgagacttt

SEQ ID NO: 29250 - RNA, 16 nt, Synthetic Construct
  source 1..16: mol_type = other RNA
gcctacggccatacca

SEQ ID NO: 29251 - RNA, 23 nt, Synthetic Construct
  source 1..23: mol_type = other RNA
tccccttggggttgtaggaccac

SEQ ID NO: 29252 - RNA, 23 nt, Synthetic Construct
  source 1..23: mol_type = other RNA
tccccttggggttgtaggaccac

SEQ ID NO: 29253 - RNA, 23 nt, Synthetic Construct
  source 1..23: mol_type = other RNA
atcacattgccagggatttccat

SEQ ID NO: 29254 - RNA, 22 nt, Synthetic Construct
  source 1..22: mol_type = other RNA
tgaggtagtaggttgtgtgatt

SEQ ID NO: 29255 - RNA, 22 nt, Synthetic Construct
  source 1..22: mol_type = other RNA
tgaggtagtaggttgtgtgatt

SEQ ID NO: 29256 - RNA, 21 nt, Synthetic Construct
  source 1..21: mol_type = other RNA
tcctgtaccgagctgccccga

SEQ ID NO: 29257 - RNA, 21 nt, Synthetic Construct
  source 1..21: mol_type = other RNA
tgtagtgtttcctactttatg

SEQ ID NO: 29258 - RNA, 21 nt, Synthetic Construct
  source 1..21: mol_type = other RNA
tgtagtgtttcctactttatg

SEQ ID NO: 29259 - RNA, 23 nt, Synthetic Construct
  source 1..23: mol_type = other RNA
taaggggcagagagcgagacttt

SEQ ID NO: 29260 - RNA, 23 nt, Synthetic Construct
  source 1..23: mol_type = other RNA
taaggggcagagagcgagacttt

SEQ ID NO: 29261 - RNA, 22 nt, Synthetic Construct
  source 1..22: mol_type = other RNA
caaagtgctgttcgtgcaggta

SEQ ID NO: 29262 - RNA, 22 nt, Synthetic Construct
  source 1..22: mol_type = other RNA
caaagtgctgttcgtgcaggta

SEQ ID NO: 29263 - RNA, 25 nt, Synthetic Construct
  source 1..25: mol_type = other RNA
aaaccgttaccattactgagtttag

SEQ ID NO: 29264 - RNA, 25 nt, Synthetic Construct
  source 1..25: mol_type = other RNA
aaaccgttaccattactgagtttag

SEQ ID NO: 29265 - RNA, 22 nt, Synthetic Construct
  source 1..22: mol_type = other RNA
tagcagcacgtaaatatcggcg

SEQ ID NO: 29266 - RNA, 22 nt, Synthetic Construct
  source 1..22: mol_type = other RNA
tagcagcacgtaaatatcggcg

SEQ ID NO: 29267 - RNA, 23 nt, Synthetic Construct
  source 1..23: mol_type = other RNA
tggtaatacgacgtacttagagt

SEQ ID NO: 29268 - RNA, 22 nt, Synthetic Construct
  source 1..22: mol_type = other RNA
tgaagtagtaggttgtgtggtt

SEQ ID NO: 29269 - RNA, 22 nt, Synthetic Construct
  source 1..22: mol_type = other RNA
tgaggtagtagtttgtggtgtt

SEQ ID NO: 29270 - RNA, 21 nt, Synthetic Construct
  source 1..21: mol_type = other RNA
tgaggtagtagtttgtgccgt

SEQ ID NO: 29271 - RNA, 21 nt, Synthetic Construct
  source 1..21: mol_type = other RNA
tgaggtagtagtttgtgccgt

SEQ ID NO: 29272 - RNA, 21 nt, Synthetic Construct
  source 1..21: mol_type = other RNA
tgaggtagtaggttgtgtggt

SEQ ID NO: 29273 - RNA, 21 nt, Synthetic Construct
  source 1..21: mol_type = other RNA
tgaggtagtaggttgtgtggt

SEQ ID NO: 29274 - RNA, 21 nt, Synthetic Construct
  source 1..21: mol_type = other RNA
cattattacttttggtacgcg

SEQ ID NO: 29275 - RNA, 21 nt, Synthetic Construct
  source 1..21: mol_type = other RNA
gtagtgtttcctactttatgg

SEQ ID NO: 29276 - RNA, 23 nt, Synthetic Construct
  source 1..23: mol_type = other RNA
tggggggcagagagcgagacttt

SEQ ID NO: 29277 - RNA, 15 nt, Synthetic Construct
  source 1..15: mol_type = other RNA
gtcgacgtatagggt

SEQ ID NO: 29278 - RNA, 24 nt, Synthetic Construct
  source 1..24: mol_type = other RNA
tgtaaacacccccgactggaagct

SEQ ID NO: 29279 - RNA, 23 nt, Synthetic Construct
  source 1..23: mol_type = other RNA
taccctgtagaaccgaatttgtg

SEQ ID NO: 29280 - RNA, 23 nt, Synthetic Construct
  source 1..23: mol_type = other RNA
tgaggggcagagagtgagacttt

SEQ ID NO: 29281 - RNA, 39 nt, Synthetic Construct; identical to SEQ ID NO: 759
  source 1..39: mol_type = other RNA

SEQ ID NO: 29282 - RNA, 39 nt, Synthetic Construct; identical to SEQ ID NO: 759
  source 1..39: mol_type = other RNA

SEQ ID NO: 29283 - RNA, 23 nt, Synthetic Construct
  source 1..23: mol_type = other RNA
tgaggtagtaggctgtgtggttt

SEQ ID NO: 29284 - RNA, 23 nt, Synthetic Construct
  source 1..23: mol_type = other RNA
tcctgtactgagctgccctgagt

SEQ ID NO: 29285 - RNA, 23 nt, Synthetic Construct
  source 1..23: mol_type = other RNA
tcctgtactgagctgccctgagt

SEQ ID NO: 29286 - RNA, 20 nt, Synthetic Construct
  source 1..20: mol_type = other RNA
tggaatgtaaagaagtatgt

SEQ ID NO: 29287 - RNA, 20 nt, Synthetic Construct
  source 1..20: mol_type = other RNA
tggaatgtaaagaagtatgt

SEQ ID NO: 29288 - RNA, 19 nt, Synthetic Construct
  source 1..19: mol_type = other RNA
gtactgacgctcatgcacg

SEQ ID NO: 29289 - RNA, 19 nt, Synthetic Construct
  source 1..19: mol_type = other RNA
gtactgacgctcatgcacg

SEQ ID NO: 29290 - RNA, 23 nt, Synthetic Construct
  source 1..23: mol_type = other RNA
tcctatactgagctgccccgaga

SEQ ID NO: 29291 - RNA, 21 nt, Synthetic Construct
  source 1..21: mol_type = other RNA
tgaggtagtagtttgtgccgt

SEQ ID NO: 29292 - RNA, 18 nt, Synthetic Construct
  source 1..18: mol_type = other RNA
gtccggatcgtagtctgc

SEQ ID NO: 29293 - RNA, 22 nt, Synthetic Construct
  source 1..22: mol_type = other RNA
tgggatgtaaagaagtatgtat

SEQ ID NO: 29294 - RNA, 15 nt, Synthetic Construct
  source 1..15: mol_type = other RNA
cccagaaacccggtc

SEQ ID NO: 29295 - RNA, 19 nt, Synthetic Construct
  source 1..19: mol_type = other RNA
cctcgtcatctaattagtg

SEQ ID NO: 29296 - RNA, 19 nt, Synthetic Construct
  source 1..19: mol_type = other RNA
cctcgtcatctaattagtg

SEQ ID NO: 29297 - RNA, 21 nt, Synthetic Construct
  source 1..21: mol_type = other RNA
tgaggtagtagattgtatagc

SEQ ID NO: 29298 - RNA, 21 nt, Synthetic Construct
  source 1..21: mol_type = other RNA
tgaggtagtagattgtatagc

SEQ ID NO: 29299 - RNA, 22 nt, Synthetic Construct
  source 1..22: mol_type = other RNA
tcctgtactgagttgccccgag

SEQ ID NO: 29300 - RNA, 22 nt, Synthetic Construct
  source 1..22: mol_type = other RNA
tgaggtagtagtttgtgctgtg

SEQ ID NO: 29301 - RNA, 20 nt, Synthetic Construct
  source 1..20: mol_type = other RNA
tgaggtagtaggttgtgagg

SEQ ID NO: 29302 - RNA, 20 nt, Synthetic Construct
  source 1..20: mol_type = other RNA
tgaggtagtaggttgtgagg

SEQ ID NO: 29303 - RNA, 21 nt, Synthetic Construct
  source 1..21: mol_type = other RNA
ttatggtttgcctgggactga

SEQ ID NO: 29304 - RNA, 21 nt, Synthetic Construct
  source 1..21: mol_type = other RNA
ttatggtttgcctgggactga

SEQ ID NO: 29305 - RNA, 36 nt, Synthetic Construct; identical to SEQ ID NO: 2366
  source 1..36: mol_type = other RNA

SEQ ID NO: 29306 - RNA, 36 nt, Synthetic Construct; identical to SEQ ID NO: 2366
  source 1..36: mol_type = other RNA

SEQ ID NO: 29307 - RNA, 25 nt, Synthetic Construct
  source 1..25: mol_type = other RNA
ggtaaaatagctgagtgaagcattg

SEQ ID NO: 29308 - RNA, 25 nt, Synthetic Construct
  source 1..25: mol_type = other RNA
ggtaaaatagctgagtgaagcattg

SEQ ID NO: 29309 - RNA, 21 nt, Synthetic Construct
  source 1..21: mol_type = other RNA
tgaggaagtaggttgtatagt

SEQ ID NO: 29310 - RNA, 21 nt, Synthetic Construct
  source 1..21: mol_type = other RNA
tgaggaagtaggttgtatagt

SEQ ID NO: 29311 - RNA, 24 nt, Synthetic Construct
  source 1..24: mol_type = other RNA
gcgagagtaggacgttgccaggtt

SEQ ID NO: 29312 - RNA, 24 nt, Synthetic Construct
  source 1..24: mol_type = other RNA
gcgagagtaggacgttgccaggtt

SEQ ID NO: 29313 - RNA, 22 nt, Synthetic Construct
  source 1..22: mol_type = other RNA
tcttgtactgagctgccccgag

SEQ ID NO: 29314 - RNA, 20 nt, Synthetic Construct
  source 1..20: mol_type = other RNA
tgaggtagtaggctgtatag

SEQ ID NO: 29315 - RNA, 20 nt, Synthetic Construct
  source 1..20: mol_type = other RNA
tgaggtagtaggctgtatag

SEQ ID NO: 29316 - RNA, 22 nt, Synthetic Construct
  source 1..22: mol_type = other RNA
tggggtagtaggttgtatagtt

SEQ ID NO: 29317 - RNA, 22 nt, Synthetic Construct
  source 1..22: mol_type = other RNA
tggggtagtaggttgtatagtt

SEQ ID NO: 29318 - RNA, 16 nt, Synthetic Construct
  source 1..16: mol_type = other RNA
gtcaacggccatacca

SEQ ID NO: 29319 - RNA, 16 nt, Synthetic Construct
  source 1..16: mol_type = other RNA
gtcaacggccatacca

SEQ ID NO: 29320 - RNA, 28 nt, Synthetic Construct
  source 1..28: mol_type = other RNA
cgactcttagcggtggatcactcggctc

SEQ ID NO: 29321 - RNA, 15 nt, Synthetic Construct
  source 1..15: mol_type = other RNA
tgcaagtcgaacggt

SEQ ID NO: 29322 - RNA, 23 nt, Synthetic Construct
  source 1..23: mol_type = other RNA
tcctgaactgagctgccccgagt

SEQ ID NO: 29323 - RNA, 23 nt, Synthetic Construct
  source 1..23: mol_type = other RNA
tcctgaactgagctgccccgagt

SEQ ID NO: 29324 - RNA, 23 nt, Synthetic Construct
  source 1..23: mol_type = other RNA
tgtgcaaatctatgcaaaactga

SEQ ID NO: 29325 - RNA, 23 nt, Synthetic Construct
  source 1..23: mol_type = other RNA
tgtgcaaatctatgcaaaactga

SEQ ID NO: 29326 - RNA, 22 nt, Synthetic Construct
  source 1..22: mol_type = other RNA
tggaatgtaaagaagtatgtgt

SEQ ID NO: 29327 - RNA, 23 nt, Synthetic Construct
  source 1..23: mol_type = other RNA
tggaaatacgacgtacttagtgt

SEQ ID NO: 29328 - RNA, 23 nt, Synthetic Construct
  source 1..23: mol_type = other RNA
ctcactgatcgagtcgtcctgcg

SEQ ID NO: 29329 - RNA, 22 nt, Synthetic Construct
  source 1..22: mol_type = other RNA
cattgcacttgtcccggtctga

SEQ ID NO: 29330 - RNA, 21 nt, Synthetic Construct
  source 1..21: mol_type = other RNA
cggagtgtgacaatggtgttt

SEQ ID NO: 29331 - RNA, 21 nt, Synthetic Construct
  source 1..21: mol_type = other RNA
cgaggtagtaggttgtgtggt

SEQ ID NO: 29332 - RNA, 21 nt, Synthetic Construct
  source 1..21: mol_type = other RNA
cgaggtagtaggttgtgtggt

SEQ ID NO: 29333 - RNA, 16 nt, Synthetic Construct
  source 1..16: mol_type = other RNA
ctctacggccatacca

SEQ ID NO: 29334 - RNA, 16 nt, Synthetic Construct
  source 1..16: mol_type = other RNA
ctctacggccatacca

SEQ ID NO: 29335 - RNA, 23 nt, Synthetic Construct
  source 1..23: mol_type = other RNA
tcctgcactgagctgccccgagt

SEQ ID NO: 29336 - RNA, 22 nt, Synthetic Construct
  source 1..22: mol_type = other RNA
ttatcagaatctccaggggtac

SEQ ID NO: 29337 - RNA, 23 nt, Synthetic Construct
  source 1..23: mol_type = other RNA
tggtaatacgacgtactttgtgt

SEQ ID NO: 29338 - RNA, 23 nt, Synthetic Construct
  source 1..23: mol_type = other RNA
tggtaatacgacgtactttgtgt

SEQ ID NO: 29339 - RNA, 25 nt, Synthetic Construct
  source 1..25: mol_type = other RNA
tgcgagagtaggacgttgccaggtt

SEQ ID NO: 29340 - RNA, 25 nt, Synthetic Construct
  source 1..25: mol_type = other RNA
tgcgagagtaggacgttgccaggtt

SEQ ID NO: 29341 - RNA, 21 nt, Synthetic Construct
  source 1..21: mol_type = other RNA
tcctgtactgagctgccccaa

SEQ ID NO: 29342 - RNA, 21 nt, Synthetic Construct
  source 1..21: mol_type = other RNA
tcctgtactgagctgccccaa

SEQ ID NO: 29343 - RNA, 26 nt, Synthetic Construct
  source 1..26: mol_type = other RNA
gatttccccttggggttgtaggacca

SEQ ID NO: 29344 - RNA, 26 nt, Synthetic Construct
  source 1..26: mol_type = other RNA
gatttccccttggggttgtaggacca

SEQ ID NO: 29345 - RNA, 18 nt, Synthetic Construct
  source 1..18: mol_type = other RNA
ggtagcgtggccgagcgg

SEQ ID NO: 29346 - RNA, 18 nt, Synthetic Construct
  source 1..18: mol_type = other RNA
ggtagcgtggccgagcgg

SEQ ID NO: 29347 - RNA, 18 nt, Synthetic Construct
  source 1..18: mol_type = other RNA
ccagtaaacggcggccgt

SEQ ID NO: 29348 - RNA, 21 nt, Synthetic Construct
  source 1..21: mol_type = other RNA
tcctgaactgagctgccccga

SEQ ID NO: 29349 - RNA, 21 nt, Synthetic Construct
  source 1..21: mol_type = other RNA
tcctgaactgagctgccccga

SEQ ID NO: 29350 - RNA, 19 nt, Synthetic Construct
  source 1..19: mol_type = other RNA
agctacattgtctgctggg

SEQ ID NO: 29351 - RNA, 36 nt, Synthetic Construct; identical to SEQ ID NO: 2248
  source 1..36: mol_type = other RNA

SEQ ID NO: 29352 - RNA, 36 nt, Synthetic Construct; identical to SEQ ID NO: 2248
  source 1..36: mol_type = other RNA

SEQ ID NO: 29353 - RNA, 29 nt, Synthetic Construct
  source 1..29: mol_type = other RNA
gcattggtggttcagtggtagaattctcg

SEQ ID NO: 29354 - RNA, 29 nt, Synthetic Construct
  source 1..29: mol_type = other RNA
gcattggtggttcagtggtagaattctcg

SEQ ID NO: 29355 - RNA, 22 nt, Synthetic Construct
  source 1..22: mol_type = other RNA
tgaggtagtagattgtatagta

SEQ ID NO: 29356 - RNA, 22 nt, Synthetic Construct
  source 1..22: mol_type = other RNA
tgaggtagtagattgtatagta

SEQ ID NO: 29357 - RNA, 21 nt, Synthetic Construct
  source 1..21: mol_type = other RNA
tgaggtagtaggctgtgtggt

SEQ ID NO: 29358 - RNA, 21 nt, Synthetic Construct
  source 1..21: mol_type = other RNA
tgaggtagtaggctgtgtggt

SEQ ID NO: 29359 - RNA, 21 nt, Synthetic Construct
  source 1..21: mol_type = other RNA
cattattacttttggtacgcg

SEQ ID NO: 29360 - RNA, 28 nt, Synthetic Construct
  source 1..28: mol_type = other RNA
ccccccgctgctaaatttgactggcttt

SEQ ID NO: 29361 - RNA, 28 nt, Synthetic Construct
  source 1..28: mol_type = other RNA
ccccccgctgctaaatttgactggcttt

SEQ ID NO: 29362 - RNA, 21 nt, Synthetic Construct
  source 1..21: mol_type = other RNA
taaggtagtaggttgtgtggt

SEQ ID NO: 29363 - RNA, 22 nt, Synthetic Construct
  source 1..22: mol_type = other RNA
ttctgtactgagctgccccgag

SEQ ID NO: 29364 - RNA, 22 nt, Synthetic Construct
  source 1..22: mol_type = other RNA
ttctgtactgagctgccccgag

SEQ ID NO: 29365 - RNA, 23 nt, Synthetic Construct
  source 1..23: mol_type = other RNA
tgtcagtttgtcaaataccccat

SEQ ID NO: 29366 - RNA, 24 nt, Synthetic Construct
  source 1..24: mol_type = other RNA
tagtgcaatattgcttatagggtt

SEQ ID NO: 29367 - RNA, 33 nt, Synthetic Construct; identical to SEQ ID NO: 2395
  source 1..33: mol_type = other RNA

SEQ ID NO: 29368 - RNA, 33 nt, Synthetic Construct; identical to SEQ ID NO: 2395
  source 1..33: mol_type = other RNA

SEQ ID NO: 29369 - RNA, 22 nt, Synthetic Construct
  source 1..22: mol_type = other RNA
tcctgtacagagctgccccgag

SEQ ID NO: 29370 - RNA, 22 nt, Synthetic Construct
  source 1..22: mol_type = other RNA
tcctgtacagagctgccccgag

SEQ ID NO: 29371 - RNA, 23 nt, Synthetic Construct
  source 1..23: mol_type = other RNA
tcaagagcaataacgaaaaatgt

SEQ ID NO: 29372 - RNA, 21 nt, Synthetic Construct
  source 1..21: mol_type = other RNA
cgaggtagtagtttgtgctgt

SEQ ID NO: 29373 - RNA, 20 nt, Synthetic Construct
  source 1..20: mol_type = other RNA
ctgacctatgaattgacagc

SEQ ID NO: 29374 - RNA, 20 nt, Synthetic Construct
  source 1..20: mol_type = other RNA
ctgacctatgaattgacagc

SEQ ID NO: 29375 - RNA, 22 nt, Synthetic Construct
  source 1..22: mol_type = other RNA
tggaatgtaaagaagtatgcat

SEQ ID NO: 29376 - RNA, 22 nt, Synthetic Construct
  source 1..22: mol_type = other RNA
tggaatgtaaagaagtatgcat

SEQ ID NO: 29377 - RNA, 15 nt, Synthetic Construct
  source 1..15: mol_type = other RNA
gcgtagatatgcgga

SEQ ID NO: 29378 - RNA, 15 nt, Synthetic Construct
  source 1..15: mol_type = other RNA
gcgtagatatgcgga

SEQ ID NO: 29379 - RNA, 16 nt, Synthetic Construct
  source 1..16: mol_type = other RNA
gcggctgtagctcagt

SEQ ID NO: 29380 - RNA, 24 nt, Synthetic Construct
  source 1..24: mol_type = other RNA
tgtaaacatccccgactggaggct

SEQ ID NO: 29381 - RNA, 27 nt, Synthetic Construct
  source 1..27: mol_type = other RNA
ncccccactgctaaatttgactggctt

SEQ ID NO: 29382 - RNA, 23 nt, Synthetic Construct
  source 1..23: mol_type = other RNA
tgaggggcagagagcgagacctt

SEQ ID NO: 29383 - RNA, 36 nt, Synthetic Construct; identical to SEQ ID NO: 744
  source 1..36: mol_type = other RNA

SEQ ID NO: 29384 - RNA, 36 nt, Synthetic Construct; identical to SEQ ID NO: 744
  source 1..36: mol_type = other RNA

SEQ ID NO: 29385 - RNA, 22 nt, Synthetic Construct
  source 1..22: mol_type = other RNA
tgttgcacttgtcccggcctgt

SEQ ID NO: 29386 - RNA, 22 nt, Synthetic Construct
  source 1..22: mol_type = other RNA
tgaggtagaaggttgtgtggtt

SEQ ID NO: 29387 - RNA, 21 nt, Synthetic Construct
  source 1..21: mol_type = other RNA
tgaggtagtagattgtataga

SEQ ID NO: 29388 - RNA, 21 nt, Synthetic Construct
  source 1..21: mol_type = other RNA
tgaggtagtagattgtataga

SEQ ID NO: 29389 - RNA, 20 nt, Synthetic Construct
  source 1..20: mol_type = other RNA
tcccgggtttcggcaccatt

SEQ ID NO: 29390 - RNA, 27 nt, Synthetic Construct
  source 1..27: mol_type = other RNA
catgcgagagtaggacgttgccaggtt

SEQ ID NO: 29391 - RNA, 27 nt, Synthetic Construct
  source 1..27: mol_type = other RNA
catgcgagagtaggacgttgccaggtt

SEQ ID NO: 29392 - RNA, 30 nt, Synthetic Construct; identical to SEQ ID NO: 1079
  source 1..30: mol_type = other RNA

SEQ ID NO: 29393 - RNA, 30 nt, Synthetic Construct; identical to SEQ ID NO: 1079
  source 1..30: mol_type = other RNA

SEQ ID NO: 29394 - RNA, 15 nt, Synthetic Construct
  source 1..15: mol_type = other RNA
ggtggctgtagctca

SEQ ID NO: 29395 - RNA, 15 nt, Synthetic Construct
  source 1..15: mol_type = other RNA
ggtggctgtagctca

SEQ ID NO: 29396 - RNA, 24 nt, Synthetic Construct
  source 1..24: mol_type = other RNA
tgtagacatccccgactggaagct

SEQ ID NO: 29397 - RNA, 19 nt, Synthetic Construct
  source 1..19: mol_type = other RNA
cagcactctgcaaagacga

SEQ ID NO: 29398 - RNA, 20 nt, Synthetic Construct
  source 1..20: mol_type = other RNA
gtcagtttgtcaaatacccc

SEQ ID NO: 29399 - RNA, 20 nt, Synthetic Construct
  source 1..20: mol_type = other RNA
gtcagtttgtcaaatacccc

SEQ ID NO: 29400 - RNA, 17 nt, Synthetic Construct
  source 1..17: mol_type = other RNA
gtcgacgtatagggtgt

SEQ ID NO: 29401 - RNA, 23 nt, Synthetic Construct
  source 1..23: mol_type = other RNA
tcctgtactgagctaccccgaga

SEQ ID NO: 29402 - RNA, 25 nt, Synthetic Construct
  source 1..25: mol_type = other RNA
ggtaaaatggctgagtgaagcattg

SEQ ID NO: 29403 - RNA, 15 nt, Synthetic Construct
  source 1..15: mol_type = other RNA
gtcgtcctgcgcgga

SEQ ID NO: 29404 - RNA, 22 nt, Synthetic Construct
  source 1..22: mol_type = other RNA
cggaatgtaaagaagtatgtat

SEQ ID NO: 29405 - RNA, 22 nt, Synthetic Construct
  source 1..22: mol_type = other RNA
cggaatgtaaagaagtatgtat

SEQ ID NO: 29406 - RNA, 22 nt, Synthetic Construct
  source 1..22: mol_type = other RNA
tggaatgtaaagaagtatgcat

SEQ ID NO: 29407 - RNA, 23 nt, Synthetic Construct
  source 1..23: mol_type = other RNA
tcccacatggtctagcggttagg

SEQ ID NO: 29408 - RNA, 23 nt, Synthetic Construct
  source 1..23: mol_type = other RNA
tcccacatggtctagcggttagg

SEQ ID NO: 29409 - RNA, 21 nt, Synthetic Construct
  source 1..21: mol_type = other RNA
agccatcatttaaagaaagcg

SEQ ID NO: 29410 - RNA, 22 nt, Synthetic Construct
  source 1..22: mol_type = other RNA
tgaggtagtaggttgagtggtt

SEQ ID NO: 29411 - RNA, 25 nt, Synthetic Construct
  source 1..25: mol_type = other RNA
aaaccgttaccattactgagtttag

SEQ ID NO: 29412 - RNA, 25 nt, Synthetic Construct
  source 1..25: mol_type = other RNA
aaaccgttaccattactgagtttag

SEQ ID NO: 29413 - RNA, 20 nt, Synthetic Construct
  source 1..20: mol_type = other RNA
gcaataacaggtctgtgatg

SEQ ID NO: 29414 - RNA, 20 nt, Synthetic Construct
  source 1..20: mol_type = other RNA
gcaataacaggtctgtgatg

SEQ ID NO: 29415 - RNA, 24 nt, Synthetic Construct
  source 1..24: mol_type = other RNA
tcactgatcgagtcgtcctgcgcg

SEQ ID NO: 29416 - RNA, 22 nt, Synthetic Construct
  source 1..22: mol_type = other RNA
tgaggtagtaggttgtgaggtt

SEQ ID NO: 29417 - RNA, 22 nt, Synthetic Construct
  source 1..22: mol_type = other RNA
tgaggtagtaggttgtgaggtt

SEQ ID NO: 29418 - RNA, 19 nt, Synthetic Construct
  source 1..19: mol_type = other RNA
gcgaaattccttgtcgggt

SEQ ID NO: 29419 - RNA, 44 nt, Synthetic Construct; identical to SEQ ID NO: 722
  source 1..44: mol_type = other RNA

SEQ ID NO: 29420 - RNA, 44 nt, Synthetic Construct; identical to SEQ ID NO: 722
  source 1..44: mol_type = other RNA

SEQ ID NO: 29421 - RNA, 21 nt, Synthetic Construct
  source 1..21: mol_type = other RNA
ttcaagtaattcaggataggt

SEQ ID NO: 29422 - RNA, 21 nt, Synthetic Construct
  source 1..21: mol_type = other RNA
tatgtctgctgaccatcacct

SEQ ID NO: 29423 - RNA, 25 nt, Synthetic Construct
  source 1..25: mol_type = other RNA
gtcaggatggccgagcggtctaagg

SEQ ID NO: 29424 - RNA, 25 nt, Synthetic Construct
  source 1..25: mol_type = other RNA
gtcaggatggccgagcggtctaagg

SEQ ID NO: 29425 - RNA, 43 nt, Synthetic Construct; identical to SEQ ID NO: 6202
  source 1..43: mol_type = other RNA

SEQ ID NO: 29426 - RNA, 21 nt, Synthetic Construct
  source 1..21: mol_type = other RNA
tggagtgtgacagtggtgttt

SEQ ID NO: 29427 - RNA, 21 nt, Synthetic Construct
  source 1..21: mol_type = other RNA
tggagtgtgacagtggtgttt

SEQ ID NO: 29428 - RNA, 18 nt, Synthetic Construct
  source 1..18: mol_type = other RNA
gctattgacgaccgtacc

SEQ ID NO: 29429 - RNA, 17 nt, Synthetic Construct
  source 1..17: mol_type = other RNA
cgactcttagcggtgga

SEQ ID NO: 29430 - RNA, 21 nt, Synthetic Construct
  source 1..21: mol_type = other RNA
tgaggggcagggagcgagact

SEQ ID NO: 29431 - RNA, 21 nt, Synthetic Construct
  source 1..21: mol_type = other RNA
tgaggggcagggagcgagact

SEQ ID NO: 29432 - RNA, 22 nt, Synthetic Construct
  source 1..22: mol_type = other RNA
ccggtcccaagggtatggctgt

SEQ ID NO: 29433 - RNA, 22 nt, Synthetic Construct
  source 1..22: mol_type = other RNA
tgaagtagtaggttgtgtggtt

SEQ ID NO: 29434 - RNA, 22 nt, Synthetic Construct
  source 1..22: mol_type = other RNA
tgaagtagtaggttgtgtggtt

SEQ ID NO: 29435 - RNA, 16 nt, Synthetic Construct
  source 1..16: mol_type = other RNA
gccagcagccgcggta

SEQ ID NO: 29436 - RNA, 22 nt, Synthetic Construct
  source 1..22: mol_type = other RNA
tgaggtggtagattgtatagtt

SEQ ID NO: 29437 - RNA, 22 nt, Synthetic Construct
  source 1..22: mol_type = other RNA
tgaggtggtagattgtatagtt

SEQ ID NO: 29438 - RNA, 22 nt, Synthetic Construct
  source 1..22: mol_type = other RNA
tagcagcacgtaaatataggcg

SEQ ID NO: 29439 - RNA, 23 nt, Synthetic Construct
  source 1..23: mol_type = other RNA
tccagtactgagctgccccgaga

SEQ ID NO: 29440 - RNA, 23 nt, Synthetic Construct
  source 1..23: mol_type = other RNA
tccagtactgagctgccccgaga

SEQ ID NO: 29441 - RNA, 37 nt, Synthetic Construct; identical to SEQ ID NO: 2365
  source 1..37: mol_type = other RNA

SEQ ID NO: 29442 - RNA, 37 nt, Synthetic Construct; identical to SEQ ID NO: 2365
  source 1..37: mol_type = other RNA

SEQ ID NO: 29443 - RNA, 25 nt, Synthetic Construct
  source 1..25: mol_type = other RNA
tgtaaacatccttgactggaagctt

SEQ ID NO: 29444 - RNA, 32 nt, Synthetic Construct; identical to SEQ ID NO: 770
  source 1..32: mol_type = other RNA

SEQ ID NO: 29445 - RNA, 24 nt, Synthetic Construct
  source 1..24: mol_type = other RNA
gctcactgatcgagtcgtcctgcg

SEQ ID NO: 29446 - RNA, 22 nt, Synthetic Construct
  source 1..22: mol_type = other RNA
tagcagcgcgtaaatattggcg

SEQ ID NO: 29447 - RNA, 22 nt, Synthetic Construct
  source 1..22: mol_type = other RNA
tagcagcgcgtaaatattggcg

SEQ ID NO: 29448 - RNA, 35 nt, Synthetic Construct; identical to SEQ ID NO: 9871
  source 1..35: mol_type = other RNA

SEQ ID NO: 29449 - RNA, 35 nt, Synthetic Construct; identical to SEQ ID NO: 9871
  source 1..35: mol_type = other RNA

SEQ ID NO: 29450 - RNA, 32 nt, Synthetic Construct; identical to SEQ ID NO: 18425
  source 1..32: mol_type = other RNA

SEQ ID NO: 29451 - RNA, 21 nt, Synthetic Construct
  source 1..21: mol_type = other RNA
ttcaagtaattcaggataggt

SEQ ID NO: 29452 - RNA, 21 nt, Synthetic Construct
  source 1..21: mol_type = other RNA
ttcaagtaattcaggataggt

SEQ ID NO: 29453 - RNA, 22 nt, Synthetic Construct
  source 1..22: mol_type = other RNA
cccagtgttcagactacctgtt

SEQ ID NO: 29454 - RNA, 22 nt, Synthetic Construct
  source 1..22: mol_type = other RNA
cccagtgttcagactacctgtt

SEQ ID NO: 29455 - RNA, 24 nt, Synthetic Construct
  source 1..24: mol_type = other RNA
tgtaaacgtccccgactggaagct

SEQ ID NO: 29456 - RNA, 15 nt, Synthetic Construct
  source 1..15: mol_type = other RNA
acctgcatcgagggt

SEQ ID NO: 29457 - RNA, 23 nt, Synthetic Construct
  source 1..23: mol_type = other RNA
tccagtactgagctgccccgaga

SEQ ID NO: 29458 - RNA, 21 nt, Synthetic Construct
  source 1..21: mol_type = other RNA
tgaggtagtaggttgtgtgat

SEQ ID NO: 29459 - RNA, 21 nt, Synthetic Construct
  source 1..21: mol_type = other RNA
tgaggtagtaggttgtgtgat

SEQ ID NO: 29460 - RNA, 19 nt, Synthetic Construct
  source 1..19: mol_type = other RNA
aacagtcaggatgttggct

SEQ ID NO: 29461 - RNA, 19 nt, Synthetic Construct
  source 1..19: mol_type = other RNA
gctattgacgaccgtaccg

SEQ ID NO: 29462 - RNA, 16 nt, Synthetic Construct
  source 1..16: mol_type = other RNA
gtcgacgtatagggtg

SEQ ID NO: 29463 - RNA, 24 nt, Synthetic Construct
  source 1..24: mol_type = other RNA
agctacatctggctactgggtctc

SEQ ID NO: 29464 - RNA, 24 nt, Synthetic Construct
  source 1..24: mol_type = other RNA
agctacatctggctactgggtctc

SEQ ID NO: 29465 - RNA, 22 nt, Synthetic Construct
  source 1..22: mol_type = other RNA
tgaggtagtagattgtatagta

SEQ ID NO: 29466 - RNA, 22 nt, Synthetic Construct
  source 1..22: mol_type = other RNA
tgaggtagtagattgtatagta

SEQ ID NO: 29467 - RNA, 23 nt, Synthetic Construct
  source 1..23: mol_type = other RNA
tggtaatacgacgtacttagagt

SEQ ID NO: 29468 - RNA, 23 nt, Synthetic Construct
  source 1..23: mol_type = other RNA
tggtaatacgacgtacttagagt

SEQ ID NO: 29469 - RNA, 22 nt, Synthetic Construct
  source 1..22: mol_type = other RNA
tgaggtagtaggttgtatagtg

SEQ ID NO: 29470 - RNA, 21 nt, Synthetic Construct
  source 1..21: mol_type = other RNA
cctctgggcccttcctccagt

SEQ ID NO: 29471 - RNA, 21 nt, Synthetic Construct
  source 1..21: mol_type = other RNA
cctctgggcccttcctccagt

SEQ ID NO: 29472 - RNA, 22 nt, Synthetic Construct
  source 1..22: mol_type = other RNA
tgaggtagtaggttgcgtggtt

SEQ ID NO: 29473 - RNA, 22 nt, Synthetic Construct
  source 1..22: mol_type = other RNA
tgaggtagtaggttgcgtggtt

SEQ ID NO: 29474 - RNA, 23 nt, Synthetic Construct
  source 1..23: mol_type = other RNA
tggtaatacgacgcacttagtgt

SEQ ID NO: 29475 - RNA, 22 nt, Synthetic Construct
  source 1..22: mol_type = other RNA
tgaggtagtagattgtatagtc

SEQ ID NO: 29476 - RNA, 22 nt, Synthetic Construct
  source 1..22: mol_type = other RNA
tattgcacttgtcccggtctgt

SEQ ID NO: 29477 - RNA, 22 nt, Synthetic Construct
  source 1..22: mol_type = other RNA
tattgcacttgtcccggtctgt

SEQ ID NO: 29478 - RNA, 22 nt, Synthetic Construct
  source 1..22: mol_type = other RNA
tattgcacttatcccggcctgt

SEQ ID NO: 29479 - RNA, 22 nt, Synthetic Construct
  source 1..22: mol_type = other RNA
tattgcacttatcccggcctgt

SEQ ID NO: 29480 - RNA, 22 nt, Synthetic Construct
  source 1..22: mol_type = other RNA
tgaggtagtagttcgtgctgtt

SEQ ID NO: 29481 - RNA, 22 nt, Synthetic Construct
  source 1..22: mol_type = other RNA
tgaggtagtagttcgtgctgtt

SEQ ID NO: 29482 - RNA, 23 nt, Synthetic Construct
  source 1..23: mol_type = other RNA
tgaggtagtaggttgtgtggtct

SEQ ID NO: 29483 - RNA, 25 nt, Synthetic Construct
  source 1..25: mol_type = other RNA
tgtcagtttgtcaaataccccaatt

SEQ ID NO: 29484 - RNA, 25 nt, Synthetic Construct
  source 1..25: mol_type = other RNA
tgtcagtttgtcaaataccccaatt

SEQ ID NO: 29485 - RNA, 24 nt, Synthetic Construct
  source 1..24: mol_type = other RNA
tgtaaacatccccgaccggaagct

SEQ ID NO: 29486 - RNA, 22 nt, Synthetic Construct
  source 1..22: mol_type = other RNA
cgaggtagtagtttgtgctgtt

SEQ ID NO: 29487 - RNA, 22 nt, Synthetic Construct
  source 1..22: mol_type = other RNA
cgaggtagtagtttgtgctgtt

SEQ ID NO: 29488 - RNA, 22 nt, Synthetic Construct
  source 1..22: mol_type = other RNA
caacggaatcccaaaagcagca

SEQ ID NO: 29489 - RNA, 22 nt, Synthetic Construct
  source 1..22: mol_type = other RNA
tgaggtagtaggatgtgtggtt

SEQ ID NO: 29490 - RNA, 22 nt, Synthetic Construct
  source 1..22: mol_type = other RNA
tgaggtagtaggatgtgtggtt

SEQ ID NO: 29491 - RNA, 21 nt, Synthetic Construct
  source 1..21: mol_type = other RNA
tccagtactgagctgccccga

SEQ ID NO: 29492 - RNA, 15 nt, Synthetic Construct
  source 1..15: mol_type = other RNA
gtcgacgtatagggt

SEQ ID NO: 29493 - RNA, 15 nt, Synthetic Construct
  source 1..15: mol_type = other RNA
gtcgacgtatagggt

SEQ ID NO: 29494 - RNA, 24 nt, Synthetic Construct
  source 1..24: mol_type = other RNA
tgtaaacacccccgactggaagct

SEQ ID NO: 29495 - RNA, 21 nt, Synthetic Construct
  source 1..21: mol_type = other RNA
atcggaacgtgcccagtcgtg

SEQ ID NO: 29496 - RNA, 21 nt, Synthetic Construct
  source 1..21: mol_type = other RNA
atcggaacgtgcccagtcgtg

SEQ ID NO: 29497 - RNA, 22 nt, Synthetic Construct
  source 1..22: mol_type = other RNA
gtcagtttgtcaaataccccaa

SEQ ID NO: 29498 - RNA, 24 nt, Synthetic Construct
  source 1..24: mol_type = other RNA
aaaagctgggttgagagggcgaaa

SEQ ID NO: 29499 - RNA, 24 nt, Synthetic Construct
  source 1..24: mol_type = other RNA
aaaagctgggttgagagggcgaaa

SEQ ID NO: 29500 - RNA, 16 nt, Synthetic Construct
  source 1..16: mol_type = other RNA
gactacggccatacca

SEQ ID NO: 29501 - RNA, 16 nt, Synthetic Construct
  source 1..16: mol_type = other RNA
gactacggccatacca

SEQ ID NO: 29502 - RNA, 18 nt, Synthetic Construct
  source 1..18: mol_type = other RNA
tccgacatgcgagggttc

SEQ ID NO: 29503 - RNA, 23 nt, Synthetic Construct
  source 1..23: mol_type = other RNA
tgagaggcagagagcgagacttt

SEQ ID NO: 29504 - RNA, 24 nt, Synthetic Construct
  source 1..24: mol_type = other RNA
tgagaactgaattccatgggttgt

SEQ ID NO: 29505 - RNA, 15 nt, Synthetic Construct
  source 1..15: mol_type = other RNA
agttgaccgcctggg

SEQ ID NO: 29506 - RNA, 32 nt, Synthetic Construct; identical to SEQ ID NO: 1128
  source 1..32: mol_type = other RNA

SEQ ID NO: 29507 - RNA, 34 nt, Synthetic Construct; identical to SEQ ID NO: 385
  source 1..34: mol_type = other RNA

SEQ ID NO: 29508 - RNA, 34 nt, Synthetic Construct; identical to SEQ ID NO: 385
  source 1..34: mol_type = other RNA

SEQ ID NO: 29509 - RNA, 23 nt, Synthetic Construct
  source 1..23: mol_type = other RNA
gtcagtttgtcaaataccccaat

SEQ ID NO: 29510 - RNA, 18 nt, Synthetic Construct
  source 1..18: mol_type = other RNA
tcgacgctagcggatcct

SEQ ID NO: 29511 - RNA, 18 nt, Synthetic Construct
  source 1..18: mol_type = other RNA
tcgacgctagcggatcct

SEQ ID NO: 29512 - RNA, 20 nt, Synthetic Construct
  source 1..20: mol_type = other RNA
tgaggtagtgggttgtatag

SEQ ID NO: 29513 - RNA, 20 nt, Synthetic Construct
  source 1..20: mol_type = other RNA
tgaggtagtgggttgtatag

SEQ ID NO: 29514 - RNA, 20 nt, Synthetic Construct
  source 1..20: mol_type = other RNA
tacagtatagatgatgtact

SEQ ID NO: 29515 - RNA, 20 nt, Synthetic Construct
  source 1..20: mol_type = other RNA
tacagtatagatgatgtact

SEQ ID NO: 29516 - RNA, 23 nt, Synthetic Construct
  source 1..23: mol_type = other RNA
tggtaatacggcgtacttagtgt

SEQ ID NO: 29517 - RNA, 16 nt, Synthetic Construct
  source 1..16: mol_type = other RNA
gtctgcggccatacca

SEQ ID NO: 29518 - RNA, 22 nt, Synthetic Construct
  source 1..22: mol_type = other RNA
ccactgccccaggtgctgctgg

SEQ ID NO: 29519 - RNA, 22 nt, Synthetic Construct
  source 1..22: mol_type = other RNA
ccactgccccaggtgctgctgg

SEQ ID NO: 29520 - RNA, 20 nt, Synthetic Construct
  source 1..20: mol_type = other RNA
cccagtaaacggcggccgta

SEQ ID NO: 29521 - RNA, 21 nt, Synthetic Construct
  source 1..21: mol_type = other RNA
ggagtatgcagagcaagatca

SEQ ID NO: 29522 - RNA, 18 nt, Synthetic Construct
  source 1..18: mol_type = other RNA
ggtgcaagcgttaatcgg

SEQ ID NO: 29523 - RNA, 16 nt, Synthetic Construct
  source 1..16: mol_type = other RNA
gtctacggccatacta

SEQ ID NO: 29524 - RNA, 20 nt, Synthetic Construct
  source 1..20: mol_type = other RNA
tgaggtagtaggttgtgtgt

SEQ ID NO: 29525 - RNA, 20 nt, Synthetic Construct
  source 1..20: mol_type = other RNA
tgaggtagtaggttgtgtgt

SEQ ID NO: 29526 - RNA, 22 nt, Synthetic Construct
  source 1..22: mol_type = other RNA
tgaggtagtagtttgtgctggt

SEQ ID NO: 29527 - RNA, 22 nt, Synthetic Construct
  source 1..22: mol_type = other RNA
gtcagtttgtcaaataccccaa

SEQ ID NO: 29528 - RNA, 16 nt, Synthetic Construct
  source 1..16: mol_type = other RNA
tggccgtcgtcagctc

SEQ ID NO: 29529 - RNA, 23 nt, Synthetic Construct
  source 1..23: mol_type = other RNA
caaagaattctccttttgggctt

SEQ ID NO: 29530 - RNA, 23 nt, Synthetic Construct
  source 1..23: mol_type = other RNA
caaagaattctccttttgggctt

SEQ ID NO: 29531 - RNA, 16 nt, Synthetic Construct
  source 1..16: mol_type = other RNA
gtctacggccgtacca

SEQ ID NO: 29532 - RNA, 23 nt, Synthetic Construct
  source 1..23: mol_type = other RNA
gactatagaactttccccctcaa

SEQ ID NO: 29533 - RNA, 23 nt, Synthetic Construct
  source 1..23: mol_type = other RNA
gactatagaactttccccctcaa

SEQ ID NO: 29534 - RNA, 22 nt, Synthetic Construct
  source 1..22: mol_type = other RNA
tggaatgtaaaggagtatgtat

SEQ ID NO: 29535 - RNA, 30 nt, Synthetic Construct; identical to SEQ ID NO: 10539
  source 1..30: mol_type = other RNA

SEQ ID NO: 29536 - RNA, 30 nt, Synthetic Construct; identical to SEQ ID NO: 10539
  source 1..30: mol_type = other RNA

SEQ ID NO: 29537 - RNA, 25 nt, Synthetic Construct
  source 1..25: mol_type = other RNA
ttcaagtaatccaggataggctttt

SEQ ID NO: 29538 - RNA, 29 nt, Synthetic Construct
  source 1..29: mol_type = other RNA
gcattggtggttcagtggtagaattctcg

SEQ ID NO: 29539 - RNA, 29 nt, Synthetic Construct
  source 1..29: mol_type = other RNA
gcattggtggttcagtggtagaattctcg

SEQ ID NO: 29540 - RNA, 21 nt, Synthetic Construct
  source 1..21: mol_type = other RNA
caatggccgggacagagggct

SEQ ID NO: 29541 - RNA, 23 nt, Synthetic Construct
  source 1..23: mol_type = other RNA
caaagtgctgttcgtgcaggtgg

SEQ ID NO: 29542 - RNA, 23 nt, Synthetic Construct
  source 1..23: mol_type = other RNA
caaagtgctgttcgtgcaggtgg

SEQ ID NO: 29543 - RNA, 16 nt, Synthetic Construct
  source 1..16: mol_type = other RNA
gcagacgaagtgagtg

SEQ ID NO: 29544 - RNA, 22 nt, Synthetic Construct
  source 1..22: mol_type = other RNA
tgtggtagtaggttgtgtggtt

SEQ ID NO: 29545 - RNA, 22 nt, Synthetic Construct
  source 1..22: mol_type = other RNA
tgtggtagtaggttgtgtggtt

SEQ ID NO: 29546 - RNA, 22 nt, Synthetic Construct
  source 1..22: mol_type = other RNA
cagagttctacagtccgacgat

SEQ ID NO: 29547 - RNA, 22 nt, Synthetic Construct
  source 1..22: mol_type = other RNA
cagagttctacagtccgacgat

SEQ ID NO: 29548 - RNA, 16 nt, Synthetic Construct
  source 1..16: mol_type = other RNA
ttggcctcaagtcagg

SEQ ID NO: 29549 - RNA, 16 nt, Synthetic Construct
  source 1..16: mol_type = other RNA
ttggcctcaagtcagg

SEQ ID NO: 29550 - RNA, 24 nt, Synthetic Construct
  source 1..24: mol_type = other RNA
tcctgtactgagctgccccgagat

SEQ ID NO: 29551 - RNA, 23 nt, Synthetic Construct
  source 1..23: mol_type = other RNA
taaggtgcatctagtgcagatag

SEQ ID NO: 29552 - RNA, 23 nt, Synthetic Construct
  source 1..23: mol_type = other RNA
taaggtgcatctagtgcagatag

SEQ ID NO: 29553 - RNA, 15 nt, Synthetic Construct
  source 1..15: mol_type = other RNA
gtcgacgtatagggt

SEQ ID NO: 29554 - RNA, 15 nt, Synthetic Construct
  source 1..15: mol_type = other RNA
gtcgacgtatagggt

SEQ ID NO: 29555 - RNA, 22 nt, Synthetic Construct
  source 1..22: mol_type = other RNA
tcctgtactgagctgccctgag

SEQ ID NO: 29556 - RNA, 27 nt, Synthetic Construct
  source 1..27: mol_type = other RNA
tcctgagtagctcagcggcagagcggg

SEQ ID NO: 29557 - RNA, 27 nt, Synthetic Construct
  source 1..27: mol_type = other RNA
tcctgagtagctcagcggcagagcggg

SEQ ID NO: 29558 - RNA, 22 nt, Synthetic Construct
  source 1..22: mol_type = other RNA
catcgcacttgtctcggtctga

SEQ ID NO: 29559 - RNA, 22 nt, Synthetic Construct
  source 1..22: mol_type = other RNA
catcgcacttgtctcggtctga

SEQ ID NO: 29560 - RNA, 22 nt, Synthetic Construct
  source 1..22: mol_type = other RNA
tatcgcacttgtcccggcctgt

SEQ ID NO: 29561 - RNA, 24 nt, Synthetic Construct
  source 1..24: mol_type = other RNA
tgtaaacatccttgactggaagct

SEQ ID NO: 29562 - RNA, 21 nt, Synthetic Construct
  source 1..21: mol_type = other RNA
tcctgtaccgagctgccccga

SEQ ID NO: 29563 - RNA, 30 nt, Synthetic Construct; identical to SEQ ID NO: 768
  source 1..30: mol_type = other RNA

SEQ ID NO: 29564 - RNA, 30 nt, Synthetic Construct; identical to SEQ ID NO: 768
  source 1..30: mol_type = other RNA

SEQ ID NO: 29565 - RNA, 24 nt, Synthetic Construct
  source 1..24: mol_type = other RNA
caacggaatcccaaaagcagctgc

SEQ ID NO: 29566 - RNA, 23 nt, Synthetic Construct
  source 1..23: mol_type = other RNA
tgaggtagtaggttgcgtggttt

SEQ ID NO: 29567 - RNA, 23 nt, Synthetic Construct
  source 1..23: mol_type = other RNA
tgaggtagtaggttgcgtggttt

SEQ ID NO: 29568 - RNA, 23 nt, Synthetic Construct
  source 1..23: mol_type = other RNA
tgaggtaggaggttgtatagtta

SEQ ID NO: 29569 - RNA, 22 nt, Synthetic Construct
  source 1..22: mol_type = other RNA
tcctgtactgagctgctccgag

SEQ ID NO: 29570 - RNA, 29 nt, Synthetic Construct
  source 1..29: mol_type = other RNA
gtaatggcgggaactctggacagactgcc

SEQ ID NO: 29571 - RNA, 29 nt, Synthetic Construct
  source 1..29: mol_type = other RNA
gtaatggcgggaactctggacagactgcc

SEQ ID NO: 29572 - RNA, 16 nt, Synthetic Construct
  source 1..16: mol_type = other RNA
gtctacggccatgcca

SEQ ID NO: 29573 - RNA, 16 nt, Synthetic Construct
  source 1..16: mol_type = other RNA
gtctacggccatgcca

SEQ ID NO: 29574 - RNA, 22 nt, Synthetic Construct
  source 1..22: mol_type = other RNA
tgaggtagtagattgtatagta

SEQ ID NO: 29575 - RNA, 31 nt, Synthetic Construct; identical to SEQ ID NO: 2278
  source 1..31: mol_type = other RNA

SEQ ID NO: 29576 - RNA, 31 nt, Synthetic Construct; identical to SEQ ID NO: 2278
  source 1..31: mol_type = other RNA

SEQ ID NO: 29577 - RNA, 23 nt, Synthetic Construct
  source 1..23: mol_type = other RNA
tagcagcacataatggtttgtgg

SEQ ID NO: 29578 - RNA, 22 nt, Synthetic Construct
  source 1..22: mol_type = other RNA
tggggtagtaggttgtgtggtt

SEQ ID NO: 29579 - RNA, 22 nt, Synthetic Construct
  source 1..22: mol_type = other RNA
tggggtagtaggttgtgtggtt

SEQ ID NO: 29580 - RNA, 22 nt, Synthetic Construct
  source 1..22: mol_type = other RNA
tgaggtagtgggttgtgtggtt

SEQ ID NO: 29581 - RNA, 22 nt, Synthetic Construct
  source 1..22: mol_type = other RNA
tgaggtagtgggttgtgtggtt

SEQ ID NO: 29582 - RNA, 20 nt, Synthetic Construct
  source 1..20: mol_type = other RNA
tgaggtagtaggttgcatag

SEQ ID NO: 29583 - RNA, 20 nt, Synthetic Construct
  source 1..20: mol_type = other RNA
tgaggtagtaggttgcatag

SEQ ID NO: 29584 - RNA, 22 nt, Synthetic Construct
  source 1..22: mol_type = other RNA
tattgcacttgtcccgacctgt

SEQ ID NO: 29585 - RNA, 22 nt, Synthetic Construct
  source 1..22: mol_type = other RNA
tattgcacttgtcccgacctgt

SEQ ID NO: 29586 - RNA, 17 nt, Synthetic Construct
  source 1..17: mol_type = other RNA
accaaggggtcgtgggt

SEQ ID NO: 29587 - RNA, 27 nt, Synthetic Construct
  source 1..27: mol_type = other RNA
ccccccactgctaaatttaactggctt

SEQ ID NO: 29588 - RNA, 23 nt, Synthetic Construct
  source 1..23: mol_type = other RNA
tcctgtgctgagctgccccgaga

SEQ ID NO: 29589 - RNA, 23 nt, Synthetic Construct
  source 1..23: mol_type = other RNA
tcctgtgctgagctgccccgaga

SEQ ID NO: 29590 - RNA, 23 nt, Synthetic Construct
  source 1..23: mol_type = other RNA
tgaggtagtaggtcgtgtggttt

SEQ ID NO: 29591 - RNA, 23 nt, Synthetic Construct
  source 1..23: mol_type = other RNA
tgaggtagtaggtcgtgtggttt

SEQ ID NO: 29592 - RNA, 18 nt, Synthetic Construct
  source 1..18: mol_type = other RNA
ggtagcgtggccgagcgg

SEQ ID NO: 29593 - RNA, 18 nt, Synthetic Construct
  source 1..18: mol_type = other RNA
ggtagcgtggccgagcgg

SEQ ID NO: 29594 - RNA, 22 nt, Synthetic Construct
  source 1..22: mol_type = other RNA
tgaggtagtagtttgtgctgtc

SEQ ID NO: 29595 - RNA, 23 nt, Synthetic Construct
  source 1..23: mol_type = other RNA
tggtaatacgacgtactaagtgt

SEQ ID NO: 29596 - RNA, 23 nt, Synthetic Construct
  source 1..23: mol_type = other RNA
ttcaagtaattcaggataggttt

SEQ ID NO: 29597 - RNA, 23 nt, Synthetic Construct
  source 1..23: mol_type = other RNA
ttcaagtaattcaggataggttt

SEQ ID NO: 29598 - RNA, 23 nt, Synthetic Construct
  source 1..23: mol_type = other RNA
agcagcattgtacagggctatga

SEQ ID NO: 29599 - RNA, 23 nt, Synthetic Construct
  source 1..23: mol_type = other RNA
agcagcattgtacagggctatga

SEQ ID NO: 29600 - RNA, 22 nt, Synthetic Construct
  source 1..22: mol_type = other RNA
gtgccgaagctgtgggattgat

SEQ ID NO: 29601 - RNA, 22 nt, Synthetic Construct
  source 1..22: mol_type = other RNA
gtgccgaagctgtgggattgat

SEQ ID NO: 29602 - RNA, 24 nt, Synthetic Construct
  source 1..24: mol_type = other RNA
cgggcctggttagtacttggatgg

SEQ ID NO: 29603 - RNA, 23 nt, Synthetic Construct
  source 1..23: mol_type = other RNA
nggtaatacgacgtacttagtgt

SEQ ID NO: 29604 - RNA, 21 nt, Synthetic Construct
  source 1..21: mol_type = other RNA
tgaggtagtagattgtataga

SEQ ID NO: 29605 - RNA, 21 nt, Synthetic Construct
  source 1..21: mol_type = other RNA
tgaggtagtagattgtataga

SEQ ID NO: 29606 - RNA, 21 nt, Synthetic Construct
  source 1..21: mol_type = other RNA
ctaatcccagaaacccggtcg

SEQ ID NO: 29607 - RNA, 21 nt, Synthetic Construct
  source 1..21: mol_type = other RNA
ctaatcccagaaacccggtcg

SEQ ID NO: 29608 - RNA, 18 nt, Synthetic Construct
  source 1..18: mol_type = other RNA
cctgtaccgatcaatagt

SEQ ID NO: 29609 - RNA, 21 nt, Synthetic Construct
  source 1..21: mol_type = other RNA
tgaggtagtaggttgtatagc

SEQ ID NO: 29610 - RNA, 21 nt, Synthetic Construct
  source 1..21: mol_type = other RNA
tgaggtagtaggttgtatagc

SEQ ID NO: 29611 - RNA, 23 nt, Synthetic Construct
  source 1..23: mol_type = other RNA
tccagtactgagctgccccgaga

SEQ ID NO: 29612 - RNA, 23 nt, Synthetic Construct
  source 1..23: mol_type = other RNA
tccagtactgagctgccccgaga

SEQ ID NO: 29613 - RNA, 21 nt, Synthetic Construct
  source 1..21: mol_type = other RNA
tgaggtagtagattgtatagc

SEQ ID NO: 29614 - RNA, 21 nt, Synthetic Construct
  source 1..21: mol_type = other RNA
tgaggtagtagattgtatagc

SEQ ID NO: 29615 - RNA, 21 nt, Synthetic Construct
  source 1..21: mol_type = other RNA
tgagaactgaattccatgggt

SEQ ID NO: 29616 - RNA, 21 nt, Synthetic Construct
  source 1..21: mol_type = other RNA
tgagaactgaattccatgggt

SEQ ID NO: 29617 - RNA, 22 nt, Synthetic Construct
  source 1..22: mol_type = other RNA
tattgcacttgtcccgacctgt

SEQ ID NO: 29618 - RNA, 22 nt, Synthetic Construct
  source 1..22: mol_type = other RNA
tattgcacttgtcccgacctgt

SEQ ID NO: 29619 - RNA, 22 nt, Synthetic Construct
  source 1..22: mol_type = other RNA
tagcagcacgtaaatactggcg

SEQ ID NO: 29620 - RNA, 22 nt, Synthetic Construct
  source 1..22: mol_type = other RNA
tcctatactgagctgccccgag

SEQ ID NO: 29621 - RNA, 22 nt, Synthetic Construct
  source 1..22: mol_type = other RNA
tcctatactgagctgccccgag

SEQ ID NO: 29622 - RNA, 23 nt, Synthetic Construct
  source 1..23: mol_type = other RNA
tcactgatcgagtcgtcctgcgc

SEQ ID NO: 29623 - RNA, 23 nt, Synthetic Construct
  source 1..23: mol_type = other RNA
tcctgtactgggctgccccgaga

SEQ ID NO: 29624 - RNA, 23 nt, Synthetic Construct
  source 1..23: mol_type = other RNA
tcctgtactgggctgccccgaga

SEQ ID NO: 29625 - RNA, 22 nt, Synthetic Construct
  source 1..22: mol_type = other RNA
tagcagcacgtaaatatcggcg

SEQ ID NO: 29626 - RNA, 21 nt, Synthetic Construct
  source 1..21: mol_type = other RNA
tcctgtactgagttgccccga

SEQ ID NO: 29627 - RNA, 21 nt, Synthetic Construct
  source 1..21: mol_type = other RNA
tcctgtactgagttgccccga

SEQ ID NO: 29628 - RNA, 22 nt, Synthetic Construct
  source 1..22: mol_type = other RNA
tcccgtactgagctgccccgag

SEQ ID NO: 29629 - RNA, 22 nt, Synthetic Construct
  source 1..22: mol_type = other RNA
tcccgtactgagctgccccgag

SEQ ID NO: 29630 - RNA, 16 nt, Synthetic Construct
  source 1..16: mol_type = other RNA
accgcttttgtcaggg

SEQ ID NO: 29631 - RNA, 17 nt, Synthetic Construct
  source 1..17: mol_type = other RNA
gggtctgtagctcagtc

SEQ ID NO: 29632 - RNA, 18 nt, Synthetic Construct
  source 1..18: mol_type = other RNA
accggaggaaggtgggga

SEQ ID NO: 29633 - RNA, 18 nt, Synthetic Construct
  source 1..18: mol_type = other RNA
accggaggaaggtgggga

SEQ ID NO: 29634 - RNA, 15 nt, Synthetic Construct
  source 1..15: mol_type = other RNA
gcaagtcgaacggta

SEQ ID NO: 29635 - RNA, 22 nt, Synthetic Construct
  source 1..22: mol_type = other RNA
tgaggtagtaggttgtgtgatt

SEQ ID NO: 29636 - RNA, 22 nt, Synthetic Construct
  source 1..22: mol_type = other RNA
caacggaatcccaaaagcagct

SEQ ID NO: 29637 - RNA, 22 nt, Synthetic Construct
  source 1..22: mol_type = other RNA
caacggaatcccaaaagcagct

SEQ ID NO: 29638 - RNA, 24 nt, Synthetic Construct
  source 1..24: mol_type = other RNA
aacattcattgctgtcggtgggtt

SEQ ID NO: 29639 - RNA, 16 nt, Synthetic Construct
  source 1..16: mol_type = other RNA
gtctacgaccatacca

SEQ ID NO: 29640 - RNA, 31 nt, Synthetic Construct; identical to SEQ ID NO: 1881
  source 1..31: mol_type = other RNA

SEQ ID NO: 29641 - RNA, 22 nt, Synthetic Construct
  source 1..22: mol_type = other RNA
tgaggtagtaggttgtgtggct

SEQ ID NO: 29642 - RNA, 22 nt, Synthetic Construct
  source 1..22: mol_type = other RNA
tgaggtagtaggttgtgtggct

SEQ ID NO: 29643 - RNA, 22 nt, Synthetic Construct
  source 1..22: mol_type = other RNA
cgttgcacttgtctcggtctga

SEQ ID NO: 29644 - RNA, 18 nt, Synthetic Construct
  source 1..18: mol_type = other RNA
atggccgggacagagggc

SEQ ID NO: 29645 - RNA, 18 nt, Synthetic Construct
  source 1..18: mol_type = other RNA
tcccaagggtatggctgt

SEQ ID NO: 29646 - RNA, 20 nt, Synthetic Construct
  source 1..20: mol_type = other RNA
tggggtagtaggttgtgtgg

SEQ ID NO: 29647 - RNA, 20 nt, Synthetic Construct
  source 1..20: mol_type = other RNA
tggggtagtaggttgtgtgg

SEQ ID NO: 29648 - RNA, 18 nt, Synthetic Construct
  source 1..18: mol_type = other RNA
tcgacgctagcggatcct

SEQ ID NO: 29649 - RNA, 18 nt, Synthetic Construct
  source 1..18: mol_type = other RNA
tcgacgctagcggatcct

SEQ ID NO: 29650 - RNA, 27 nt, Synthetic Construct
  source 1..27: mol_type = other RNA
cgtgtgaaagtaggtcatcgtcaggct

SEQ ID NO: 29651 - RNA, 22 nt, Synthetic Construct
  source 1..22: mol_type = other RNA
tcgtaccgtgagtaataatgca

SEQ ID NO: 29652 - RNA, 22 nt, Synthetic Construct
  source 1..22: mol_type = other RNA
tcctgtactgagctgtcccgag

SEQ ID NO: 29653 - RNA, 22 nt, Synthetic Construct
  source 1..22: mol_type = other RNA
tcctgtactgagctgtcccgag

SEQ ID NO: 29654 - RNA, 23 nt, Synthetic Construct
  source 1..23: mol_type = other RNA
tcccacatggtctagcggttagg

SEQ ID NO: 29655 - RNA, 23 nt, Synthetic Construct
  source 1..23: mol_type = other RNA
tcccacatggtctagcggttagg

SEQ ID NO: 29656 - RNA, 16 nt, Synthetic Construct
  source 1..16: mol_type = other RNA
gtccacggccatacca

SEQ ID NO: 29657 - RNA, 23 nt, Synthetic Construct
  source 1..23: mol_type = other RNA
gcctgtactgagctgccccgaga

SEQ ID NO: 29658 - RNA, 23 nt, Synthetic Construct
  source 1..23: mol_type = other RNA
gcctgtactgagctgccccgaga

SEQ ID NO: 29659 - RNA, 20 nt, Synthetic Construct
  source 1..20: mol_type = other RNA
atcacattgccagggatttc

SEQ ID NO: 29660 - RNA, 20 nt, Synthetic Construct
  source 1..20: mol_type = other RNA
atcacattgccagggatttc

SEQ ID NO: 29661 - RNA, 23 nt, Synthetic Construct
  source 1..23: mol_type = other RNA
tccagcatcagtgattttgttga

SEQ ID NO: 29662 - RNA, 20 nt, Synthetic Construct
  source 1..20: mol_type = other RNA
acagtagtctgcacattggt

SEQ ID NO: 29663 - RNA, 20 nt, Synthetic Construct
  source 1..20: mol_type = other RNA
acagtagtctgcacattggt

SEQ ID NO: 29664 - RNA, 18 nt, Synthetic Construct
  source 1..18: mol_type = other RNA
gctgtgatggccgagtgg

SEQ ID NO: 29665 - RNA, 18 nt, Synthetic Construct
  source 1..18: mol_type = other RNA
gctgtgatggccgagtgg

SEQ ID NO: 29666 - RNA, 22 nt, Synthetic Construct
  source 1..22: mol_type = other RNA
tggggtagtaggttgtgtggtt

SEQ ID NO: 29667 - RNA, 22 nt, Synthetic Construct
  source 1..22: mol_type = other RNA
tggggtagtaggttgtgtggtt

SEQ ID NO: 29668 - RNA, 18 nt, Synthetic Construct
  source 1..18: mol_type = other RNA
cataaagtagaaagcact

SEQ ID NO: 29669 - RNA, 22 nt, Synthetic Construct
  source 1..22: mol_type = other RNA
tagcagcacgtgaatattggcg

SEQ ID NO: 29670 - RNA, 23 nt, Synthetic Construct
  source 1..23: mol_type = other RNA
tggtaatacgacgtacttagagt

SEQ ID NO: 29671 - RNA, 23 nt, Synthetic Construct
  source 1..23: mol_type = other RNA
tggtaatacgacgtacttagagt

SEQ ID NO: 29672 - RNA, 16 nt, Synthetic Construct
  source 1..16: mol_type = other RNA
gtctatggccatacca

SEQ ID NO: 29673 - RNA, 16 nt, Synthetic Construct
  source 1..16: mol_type = other RNA
gtctatggccatacca

SEQ ID NO: 29674 - RNA, 21 nt, Synthetic Construct
  source 1..21: mol_type = other RNA
agctacattgtctgctgggtt

SEQ ID NO: 29675 - RNA, 21 nt, Synthetic Construct
  source 1..21: mol_type = other RNA
agctacattgtctgctgggtt

SEQ ID NO: 29676 - RNA, 22 nt, Synthetic Construct
  source 1..22: mol_type = other RNA
cgttgcacttgtctcggtctga

SEQ ID NO: 29677 - RNA, 22 nt, Synthetic Construct
  source 1..22: mol_type = other RNA
cgttgcacttgtctcggtctga

SEQ ID NO: 29678 - RNA, 22 nt, Synthetic Construct
  source 1..22: mol_type = other RNA
tagcagcacgtaaatattggtg

SEQ ID NO: 29679 - RNA, 22 nt, Synthetic Construct
  source 1..22: mol_type = other RNA
tagcagcacgtaaatattggtg

SEQ ID NO: 29680 - RNA, 36 nt, Synthetic Construct; identical to SEQ ID NO: 2248
  source 1..36: mol_type = other RNA

SEQ ID NO: 29681 - RNA, 36 nt, Synthetic Construct; identical to SEQ ID NO: 2248
  source 1..36: mol_type = other RNA

SEQ ID NO: 29682 - RNA, 23 nt, Synthetic Construct
  source 1..23: mol_type = other RNA
tgaggtagcaggttgtgtggttt

SEQ ID NO: 29683 - RNA, 22 nt, Synthetic Construct
  source 1..22: mol_type = other RNA
tagcagcacgtaaacattggcg

SEQ ID NO: 29684 - RNA, 22 nt, Synthetic Construct
  source 1..22: mol_type = other RNA
tagcagcacgtaaacattggcg

SEQ ID NO: 29685 - RNA, 18 nt, Synthetic Construct
  source 1..18: mol_type = other RNA
gtcaggatggccgagcgg

SEQ ID NO: 29686 - RNA, 18 nt, Synthetic Construct
  source 1..18: mol_type = other RNA
gtcaggatggccgagcgg

SEQ ID NO: 29687 - RNA, 21 nt, Synthetic Construct
  source 1..21: mol_type = other RNA
cctctgggcccttcctccagt

SEQ ID NO: 29688 - RNA, 22 nt, Synthetic Construct
  source 1..22: mol_type = other RNA
tgaggtagtaggttatgtggtt

SEQ ID NO: 29689 - RNA, 22 nt, Synthetic Construct
  source 1..22: mol_type = other RNA
tgaggtagtaggttatgtggtt

SEQ ID NO: 29690 - RNA, 16 nt, Synthetic Construct
  source 1..16: mol_type = other RNA
gcaagaggtcagcggt

SEQ ID NO: 29691 - RNA, 20 nt, Synthetic Construct
  source 1..20: mol_type = other RNA
tgaggtagtaggttgtgtga

SEQ ID NO: 29692 - RNA, 21 nt, Synthetic Construct
  source 1..21: mol_type = other RNA
tagcagcacatcatggtttac

SEQ ID NO: 29693 - RNA, 22 nt, Synthetic Construct
  source 1..22: mol_type = other RNA
nagcagcacgtaaatattggcg

SEQ ID NO: 29694 - RNA, 22 nt, Synthetic Construct
  source 1..22: mol_type = other RNA
nagcagcacgtaaatattggcg

SEQ ID NO: 29695 - RNA, 16 nt, Synthetic Construct
  source 1..16: mol_type = other RNA
gatttgggagtgctcg

SEQ ID NO: 29696 - RNA, 39 nt, Synthetic Construct; identical to SEQ ID NO: 2980
  source 1..39: mol_type = other RNA

SEQ ID NO: 29697 - RNA, 39 nt, Synthetic Construct; identical to SEQ ID NO: 2980
  source 1..39: mol_type = other RNA

SEQ ID NO: 29698 - RNA, 22 nt, Synthetic Construct
  source 1..22: mol_type = other RNA
tcctgtactgagttgccccgag

SEQ ID NO: 29699 - RNA, 22 nt, Synthetic Construct
  source 1..22: mol_type = other RNA
tcctgtactgagttgccccgag

SEQ ID NO: 29700 - RNA, 22 nt, Synthetic Construct
  source 1..22: mol_type = other RNA
tattgcacttgtcccggcccgt

SEQ ID NO: 29701 - RNA, 22 nt, Synthetic Construct
  source 1..22: mol_type = other RNA
tattgcacttgtcccggcccgt

SEQ ID NO: 29702 - RNA, 21 nt, Synthetic Construct
  source 1..21: mol_type = other RNA
tccagtactgagctgccccga

SEQ ID NO: 29703 - RNA, 21 nt, Synthetic Construct
  source 1..21: mol_type = other RNA
tccagtactgagctgccccga

SEQ ID NO: 29704 - RNA, 23 nt, Synthetic Construct
  source 1..23: mol_type = other RNA
tgaggggcagagagcgagactta

SEQ ID NO: 29705 - RNA, 23 nt, Synthetic Construct
  source 1..23: mol_type = other RNA
tgaggggcagagagcgagactta

SEQ ID NO: 29706 - RNA, 43 nt, Synthetic Construct; identical to SEQ ID NO: 1204
  source 1..43: mol_type = other RNA

SEQ ID NO: 29707 - RNA, 43 nt, Synthetic Construct; identical to SEQ ID NO: 1204
  source 1..43: mol_type = other RNA

SEQ ID NO: 29708 - RNA, 21 nt, Synthetic Construct
  source 1..21: mol_type = other RNA
tgaggtagtagattgtatagc

SEQ ID NO: 29709 - RNA, 21 nt, Synthetic Construct
  source 1..21: mol_type = other RNA
tgaggtagtagattgtatagc

SEQ ID NO: 29710 - RNA, 24 nt, Synthetic Construct
  source 1..24: mol_type = other RNA
gggttgtaaaccgcttttgtcagg

SEQ ID NO: 29711 - RNA, 24 nt, Synthetic Construct
  source 1..24: mol_type = other RNA
gggttgtaaaccgcttttgtcagg

SEQ ID NO: 29712 - RNA, 15 nt, Synthetic Construct
  source 1..15: mol_type = other RNA
cgatatggcatgaga

SEQ ID NO: 29713 - RNA, 15 nt, Synthetic Construct
  source 1..15: mol_type = other RNA
cgatatggcatgaga

SEQ ID NO: 29714 - RNA, 21 nt, Synthetic Construct
  source 1..21: mol_type = other RNA
gtagcgaaattccttgtcggg

SEQ ID NO: 29715 - RNA, 17 nt, Synthetic Construct
  source 1..17: mol_type = other RNA
gcggctgtagctcagtt

SEQ ID NO: 29716 - RNA, 34 nt, Synthetic Construct; identical to SEQ ID NO: 2317
  source 1..34: mol_type = other RNA

SEQ ID NO: 29717 - RNA, 34 nt, Synthetic Construct; identical to SEQ ID NO: 2317
  source 1..34: mol_type = other RNA

SEQ ID NO: 29718 - RNA, 31 nt, Synthetic Construct; identical to SEQ ID NO: 758
  source 1..31: mol_type = other RNA

SEQ ID NO: 29719 - RNA, 31 nt, Synthetic Construct; identical to SEQ ID NO: 758
  source 1..31: mol_type = other RNA

SEQ ID NO: 29720 - RNA, 17 nt, Synthetic Construct
  source 1..17: mol_type = other RNA
ccgtgtgaaagtaggtc

SEQ ID NO: 29721 - RNA, 20 nt, Synthetic Construct
  source 1..20: mol_type = other RNA
tgaggcagtaggttgtgtgg

SEQ ID NO: 29722 - RNA, 20 nt, Synthetic Construct
  source 1..20: mol_type = other RNA
tgaggcagtaggttgtgtgg

SEQ ID NO: 29723 - RNA, 18 nt, Synthetic Construct
  source 1..18: mol_type = other RNA
gtccggatcgtagtctgc

SEQ ID NO: 29724 - RNA, 18 nt, Synthetic Construct
  source 1..18: mol_type = other RNA
ctaatgagactgccggtg

SEQ ID NO: 29725 - RNA, 15 nt, Synthetic Construct
  source 1..15: mol_type = other RNA
ggccgtcgtcagctc

SEQ ID NO: 29726 - RNA, 22 nt, Synthetic Construct
  source 1..22: mol_type = other RNA
tgtggtagtaggttgtatagtt

SEQ ID NO: 29727 - RNA, 23 nt, Synthetic Construct
  source 1..23: mol_type = other RNA
tgtagtgtttcctactttatgga

SEQ ID NO: 29728 - RNA, 20 nt, Synthetic Construct
  source 1..20: mol_type = other RNA
tgaggtagtaggtcgtgtgg

SEQ ID NO: 29729 - RNA, 36 nt, Synthetic Construct; identical to SEQ ID NO: 11035
  source 1..36: mol_type = other RNA

SEQ ID NO: 29730 - RNA, 22 nt, Synthetic Construct
  source 1..22: mol_type = other RNA
tattgcacttgccccggcctgt

SEQ ID NO: 29731 - RNA, 22 nt, Synthetic Construct
  source 1..22: mol_type = other RNA
tattgcacttgccccggcctgt

SEQ ID NO: 29732 - RNA, 22 nt, Synthetic Construct
  source 1..22: mol_type = other RNA
tattgcacctgtcccggcctgt

SEQ ID NO: 29733 - RNA, 22 nt, Synthetic Construct
  source 1..22: mol_type = other RNA
tattgcacctgtcccggcctgt

SEQ ID NO: 29734 - RNA, 22 nt, Synthetic Construct
  source 1..22: mol_type = other RNA
tcttggagtaggtcattgggtg

SEQ ID NO: 29735 - RNA, 25 nt, Synthetic Construct
  source 1..25: mol_type = other RNA
ttgaggatatgagatcgggacgaca

SEQ ID NO: 29736 - RNA, 25 nt, Synthetic Construct
  source 1..25: mol_type = other RNA
ttgaggatatgagatcgggacgaca

SEQ ID NO: 29737 - RNA, 16 nt, Synthetic Construct
  source 1..16: mol_type = other RNA
cgactcttagcggtgg

SEQ ID NO: 29738 - RNA, 16 nt, Synthetic Construct
  source 1..16: mol_type = other RNA
cgactcttagcggtgg

SEQ ID NO: 29739 - RNA, 15 nt, Synthetic Construct
  source 1..15: mol_type = other RNA
tggccgtcgtcagct

SEQ ID NO: 29740 - RNA, 22 nt, Synthetic Construct
  source 1..22: mol_type = other RNA
tcctgaactgagctgccccgag

SEQ ID NO: 29741 - RNA, 15 nt, Synthetic Construct
  source 1..15: mol_type = other RNA
cgccatttaaagagg

SEQ ID NO: 29742 - RNA, 24 nt, Synthetic Construct
  source 1..24: mol_type = other RNA
tgtaagcatccccgactggaagct

SEQ ID NO: 29743 - RNA, 37 nt, Synthetic Construct; identical to SEQ ID NO: 2365
  source 1..37: mol_type = other RNA

SEQ ID NO: 29744 - RNA, 37 nt, Synthetic Construct; identical to SEQ ID NO: 2365
  source 1..37: mol_type = other RNA

SEQ ID NO: 29745 - RNA, 22 nt, Synthetic Construct
  source 1..22: mol_type = other RNA
tagcagcacgcaaatattggcg

SEQ ID NO: 29746 - RNA, 22 nt, Synthetic Construct
  source 1..22: mol_type = other RNA
tgaggtagtaggttatgtggtt

SEQ ID NO: 29747 - RNA, 22 nt, Synthetic Construct
  source 1..22: mol_type = other RNA
tgaggtagtaggttatgtggtt

SEQ ID NO: 29748 - RNA, 24 nt, Synthetic Construct
  source 1..24: mol_type = other RNA
gaaagattaaggcaagaggttagc

SEQ ID NO: 29749 - RNA, 24 nt, Synthetic Construct
  source 1..24: mol_type = other RNA
gaaagattaaggcaagaggttagc

SEQ ID NO: 29750 - RNA, 21 nt, Synthetic Construct
  source 1..21: mol_type = other RNA
tcctgtactgagctgcccgag

SEQ ID NO: 29751 - RNA, 22 nt, Synthetic Construct
  source 1..22: mol_type = other RNA
tgagatagtagtttgtgctgtt

SEQ ID NO: 29752 - RNA, 17 nt, Synthetic Construct
  source 1..17: mol_type = other RNA
gtcgacgtatagggtgt

SEQ ID NO: 29753 - RNA, 17 nt, Synthetic Construct
  source 1..17: mol_type = other RNA
gtcgacgtatagggtgt

SEQ ID NO: 29754 - RNA, 15 nt, Synthetic Construct
  source 1..15: mol_type = other RNA
aggtgggaggctttg

SEQ ID NO: 29755 - RNA, 23 nt, Synthetic Construct
  source 1..23: mol_type = other RNA
tgaggtagtaggtcgtgtggttt

SEQ ID NO: 29756 - RNA, 23 nt, Synthetic Construct
  source 1..23: mol_type = other RNA
tgaggtagtaggtcgtgtggttt

SEQ ID NO: 29757 - RNA, 23 nt, Synthetic Construct
  source 1..23: mol_type = other RNA
tgaggaagtaggttgtgtggttt

SEQ ID NO: 29758 - RNA, 23 nt, Synthetic Construct
  source 1..23: mol_type = other RNA
tgaggaagtaggttgtgtggttt

SEQ ID NO: 29759 - RNA, 21 nt, Synthetic Construct
  source 1..21: mol_type = other RNA
tgaggcagtaggttgtgtggt

SEQ ID NO: 29760 - RNA, 21 nt, Synthetic Construct
  source 1..21: mol_type = other RNA
tgaggcagtaggttgtgtggt

SEQ ID NO: 29761 - RNA, 23 nt, Synthetic Construct
  source 1..23: mol_type = other RNA
tcctgaactgagctgccccgaga

SEQ ID NO: 29762 - RNA, 23 nt, Synthetic Construct
  source 1..23: mol_type = other RNA
tcctgaactgagctgccccgaga

SEQ ID NO: 29763 - RNA, 20 nt, Synthetic Construct
  source 1..20: mol_type = other RNA
tccctgtcctccaggagctc

SEQ ID NO: 29764 - RNA, 20 nt, Synthetic Construct
  source 1..20: mol_type = other RNA
tccctgtcctccaggagctc

SEQ ID NO: 29765 - RNA, 23 nt, Synthetic Construct
  source 1..23: mol_type = other RNA
tcctgtacagagctgccccgaga

SEQ ID NO: 29766 - RNA, 23 nt, Synthetic Construct
  source 1..23: mol_type = other RNA
tcctgtacagagctgccccgaga

SEQ ID NO: 29767 - RNA, 22 nt, Synthetic Construct
  source 1..22: mol_type = other RNA
tgaggtagtagtttgtgcggtt

SEQ ID NO: 29768 - RNA, 22 nt, Synthetic Construct
  source 1..22: mol_type = other RNA
tgaggtagtagtttgtgcggtt

SEQ ID NO: 29769 - RNA, 22 nt, Synthetic Construct
  source 1..22: mol_type = other RNA
tgttgcacttgtcccggcctgt

SEQ ID NO: 29770 - RNA, 22 nt, Synthetic Construct
  source 1..22: mol_type = other RNA
tgttgcacttgtcccggcctgt

SEQ ID NO: 29771 - RNA, 21 nt, Synthetic Construct
  source 1..21: mol_type = other RNA
tgaggtagtgggttgtgtggt

SEQ ID NO: 29772 - RNA, 21 nt, Synthetic Construct
  source 1..21: mol_type = other RNA
tgaggtagtgggttgtgtggt

SEQ ID NO: 29773 - RNA, 25 nt, Synthetic Construct
  source 1..25: mol_type = other RNA
caaagtgctgttcgtgcaggtagtt

SEQ ID NO: 29774 - RNA, 23 nt, Synthetic Construct
  source 1..23: mol_type = other RNA
taaggtgcatctagtgcagatag

SEQ ID NO: 29775 - RNA, 16 nt, Synthetic Construct
  source 1..16: mol_type = other RNA
cccagaaacccggtcg

SEQ ID NO: 29776 - RNA, 23 nt, Synthetic Construct
  source 1..23: mol_type = other RNA
tggcagtgtcttagctggttgtt

SEQ ID NO: 29777 - RNA, 23 nt, Synthetic Construct
  source 1..23: mol_type = other RNA
tggcagtgtcttagctggttgtt

SEQ ID NO: 29778 - RNA, 22 nt, Synthetic Construct
  source 1..22: mol_type = other RNA
cctctgggcccttcctccagtt

SEQ ID NO: 29779 - RNA, 21 nt, Synthetic Construct
  source 1..21: mol_type = other RNA
cccataaagtagaaagcacta

SEQ ID NO: 29780 - RNA, 34 nt, Synthetic Construct; identical to SEQ ID NO: 2186
  source 1..34: mol_type = other RNA

SEQ ID NO: 29781 - RNA, 34 nt, Synthetic Construct; identical to SEQ ID NO: 2186
  source 1..34: mol_type = other RNA

SEQ ID NO: 29782 - RNA, 20 nt, Synthetic Construct
  source 1..20: mol_type = other RNA
tgaggaagtaggttgtatag

SEQ ID NO: 29783 - RNA, 20 nt, Synthetic Construct
  source 1..20: mol_type = other RNA
tgaggaagtaggttgtatag

SEQ ID NO: 29784 - RNA, 22 nt, Synthetic Construct
  source 1..22: mol_type = other RNA
cagggctggcagtgacatgggt

SEQ ID NO: 29785 - RNA, 22 nt, Synthetic Construct
  source 1..22: mol_type = other RNA
ccccttggggttgtaggaccac

SEQ ID NO: 29786 - RNA, 22 nt, Synthetic Construct
  source 1..22: mol_type = other RNA
ccccttggggttgtaggaccac

SEQ ID NO: 29787 - RNA, 22 nt, Synthetic Construct
  source 1..22: mol_type = other RNA
cattgcacttgtctcggtctgg

SEQ ID NO: 29788 - RNA, 22 nt, Synthetic Construct
  source 1..22: mol_type = other RNA
cattgcacttgtctcggtctgg

SEQ ID NO: 29789 - RNA, 20 nt, Synthetic Construct
  source 1..20: mol_type = other RNA
cataaagtagaaagcactac

SEQ ID NO: 29790 - RNA, 20 nt, Synthetic Construct
  source 1..20: mol_type = other RNA
cataaagtagaaagcactac

SEQ ID NO: 29791 - RNA, 22 nt, Synthetic Construct
  source 1..22: mol_type = other RNA
cagggctggcagtgacatgggt

SEQ ID NO: 29792 - RNA, 22 nt, Synthetic Construct
  source 1..22: mol_type = other RNA
tagcagcacgtaaatactggcg

SEQ ID NO: 29793 - RNA, 26 nt, Synthetic Construct
  source 1..26: mol_type = other RNA
tgtaaacatccttgactggaagcttt

SEQ ID NO: 29794 - RNA, 34 nt, Synthetic Construct; identical to SEQ ID NO: 2553
  source 1..34: mol_type = other RNA

SEQ ID NO: 29795 - RNA, 34 nt, Synthetic Construct; identical to SEQ ID NO: 2553
  source 1..34: mol_type = other RNA

SEQ ID NO: 29796 - RNA, 23 nt, Synthetic Construct
  source 1..23: mol_type = other RNA
tcctgtactgagctgccccggga

SEQ ID NO: 29797 - RNA, 23 nt, Synthetic Construct
  source 1..23: mol_type = other RNA
tcctgtactgagctgccccggga

SEQ ID NO: 29798 - RNA, 16 nt, Synthetic Construct
  source 1..16: mol_type = other RNA
caggacggtggccatg

SEQ ID NO: 29799 - RNA, 16 nt, Synthetic Construct
  source 1..16: mol_type = other RNA
caggacggtggccatg

SEQ ID NO: 29800 - RNA, 22 nt, Synthetic Construct
  source 1..22: mol_type = other RNA
atggatttttggagcagggaga

SEQ ID NO: 29801 - RNA, 22 nt, Synthetic Construct
  source 1..22: mol_type = other RNA
tcctgtactgagctaccccgag

SEQ ID NO: 29802 - RNA, 16 nt, Synthetic Construct
  source 1..16: mol_type = other RNA
gcgtagatatgcggag

SEQ ID NO: 29803 - RNA, 16 nt, Synthetic Construct
  source 1..16: mol_type = other RNA
gcgtagatatgcggag

SEQ ID NO: 29804 - RNA, 22 nt, Synthetic Construct
  source 1..22: mol_type = other RNA
tcctgtactgggctgccccgag

SEQ ID NO: 29805 - RNA, 22 nt, Synthetic Construct
  source 1..22: mol_type = other RNA
tcctgtactgggctgccccgag

SEQ ID NO: 29806 - RNA, 24 nt, Synthetic Construct
  source 1..24: mol_type = other RNA
actcggcgtggcgtcggtcgtggt

SEQ ID NO: 29807 - RNA, 24 nt, Synthetic Construct
  source 1..24: mol_type = other RNA
actcggcgtggcgtcggtcgtggt

SEQ ID NO: 29808 - RNA, 25 nt, Synthetic Construct
  source 1..25: mol_type = other RNA
gcgccgctggtgtagtggtatcatg

SEQ ID NO: 29809 - RNA, 18 nt, Synthetic Construct
  source 1..18: mol_type = other RNA
ggacgttgataggctggg

SEQ ID NO: 29810 - RNA, 18 nt, Synthetic Construct
  source 1..18: mol_type = other RNA
ggacgttgataggctggg

SEQ ID NO: 29811 - RNA, 25 nt, Synthetic Construct
  source 1..25: mol_type = other RNA
tgtcagtttgtcaaataccccattt

SEQ ID NO: 29812 - RNA, 39 nt, Synthetic Construct; identical to SEQ ID NO: 804
  source 1..39: mol_type = other RNA

SEQ ID NO: 29813 - RNA, 39 nt, Synthetic Construct; identical to SEQ ID NO: 804
  source 1..39: mol_type = other RNA

SEQ ID NO: 29814 - RNA, 22 nt, Synthetic Construct
  source 1..22: mol_type = other RNA
aggaatgtaaagaagtatgtat

SEQ ID NO: 29815 - RNA, 43 nt, Synthetic Construct; identical to SEQ ID NO: 2315
  source 1..43: mol_type = other RNA

SEQ ID NO: 29816 - RNA, 22 nt, Synthetic Construct
  source 1..22: mol_type = other RNA
tgaggtagtagattgtatagtc

SEQ ID NO: 29817 - RNA, 22 nt, Synthetic Construct
  source 1..22: mol_type = other RNA
tgaggtagtagattgtatagtc

SEQ ID NO: 29818 - RNA, 35 nt, Synthetic Construct; identical to SEQ ID NO: 9871
  source 1..35: mol_type = other RNA

SEQ ID NO: 29819 - RNA, 23 nt, Synthetic Construct
  source 1..23: mol_type = other RNA
cctccctcgggagggcgcgcggg

SEQ ID NO: 29820 - RNA, 23 nt, Synthetic Construct
  source 1..23: mol_type = other RNA
cctccctcgggagggcgcgcggg

SEQ ID NO: 29821 - RNA, 23 nt, Synthetic Construct
  source 1..23: mol_type = other RNA
tcctgtactgagctgccccgggt

SEQ ID NO: 29822 - RNA, 31 nt, Synthetic Construct; identical to SEQ ID NO: 285
  source 1..31: mol_type = other RNA

SEQ ID NO: 29823 - RNA, 23 nt, Synthetic Construct
  source 1..23: mol_type = other RNA
tcctgtacagagctgccccgaga

SEQ ID NO: 29824 - RNA, 21 nt, Synthetic Construct
  source 1..21: mol_type = other RNA
tacctggttgatcctgccagt

SEQ ID NO: 29825 - RNA, 21 nt, Synthetic Construct
  source 1..21: mol_type = other RNA
tacctggttgatcctgccagt

SEQ ID NO: 29826 - RNA, 36 nt, Synthetic Construct; identical to SEQ ID NO: 752
  source 1..36: mol_type = other RNA

SEQ ID NO: 29827 - RNA, 36 nt, Synthetic Construct; identical to SEQ ID NO: 752
  source 1..36: mol_type = other RNA

SEQ ID NO: 29828 - RNA, 20 nt, Synthetic Construct
  source 1..20: mol_type = other RNA
tgaggtagtaggtcgtgtgg

SEQ ID NO: 29829 - RNA, 20 nt, Synthetic Construct
  source 1..20: mol_type = other RNA
tgaggtagtaggtcgtgtgg

SEQ ID NO: 29830 - RNA, 17 nt, Synthetic Construct
  source 1..17: mol_type = other RNA
tggccgggacagagggc

SEQ ID NO: 29831 - RNA, 22 nt, Synthetic Construct
  source 1..22: mol_type = other RNA
tgaggtagtaggttgcgtggtt

SEQ ID NO: 29832 - RNA, 22 nt, Synthetic Construct
  source 1..22: mol_type = other RNA
tgaggtagtaggttgcgtggtt

SEQ ID NO: 29833 - RNA, 27 nt, Synthetic Construct
  source 1..27: mol_type = other RNA
ccctccactgctaaatttgactggctt

SEQ ID NO: 29834 - RNA, 22 nt, Synthetic Construct
  source 1..22: mol_type = other RNA
tagcagcacgtaaatattggca

SEQ ID NO: 29835 - RNA, 22 nt, Synthetic Construct
  source 1..22: mol_type = other RNA
tagcagcacgtaaatattggca

SEQ ID NO: 29836 - RNA, 21 nt, Synthetic Construct
  source 1..21: mol_type = other RNA
aatggcgccactagggttgtg

SEQ ID NO: 29837 - RNA, 21 nt, Synthetic Construct
  source 1..21: mol_type = other RNA
aatggcgccactagggttgtg

SEQ ID NO: 29838 - RNA, 27 nt, Synthetic Construct
  source 1..27: mol_type = other RNA
cagagttctacagtccgacgatcgatc

SEQ ID NO: 29839 - RNA, 27 nt, Synthetic Construct
  source 1..27: mol_type = other RNA
cagagttctacagtccgacgatcgatc

SEQ ID NO: 29840 - RNA, 30 nt, Synthetic Construct; identical to SEQ ID NO: 10539
  source 1..30: mol_type = other RNA

SEQ ID NO: 29841 - RNA, 22 nt, Synthetic Construct
  source 1..22: mol_type = other RNA
cactgcacttgtctcggtctga

SEQ ID NO: 29842 - RNA, 22 nt, Synthetic Construct
  source 1..22: mol_type = other RNA
cactgcacttgtctcggtctga

SEQ ID NO: 29843 - RNA, 22 nt, Synthetic Construct
  source 1..22: mol_type = other RNA
tcctgtgctgagctgccccgag

SEQ ID NO: 29844 - RNA, 17 nt, Synthetic Construct
  source 1..17: mol_type = other RNA
ctaatgagactgccggt

SEQ ID NO: 29845 - RNA, 22 nt, Synthetic Construct
  source 1..22: mol_type = other RNA
tccagtactgagctgccccgag

SEQ ID NO: 29846 - RNA, 22 nt, Synthetic Construct
  source 1..22: mol_type = other RNA
tccagtactgagctgccccgag

SEQ ID NO: 29847 - RNA, 21 nt, Synthetic Construct
  source 1..21: mol_type = other RNA
tgaggtagtagtttgcgctgt

SEQ ID NO: 29848 - RNA, 21 nt, Synthetic Construct
  source 1..21: mol_type = other RNA
tgaggtagtagtttgcgctgt

SEQ ID NO: 29849 - RNA, 15 nt, Synthetic Construct
  source 1..15: mol_type = other RNA
tgcaagtcgaacggt

SEQ ID NO: 29850 - RNA, 22 nt, Synthetic Construct
  source 1..22: mol_type = other RNA
tgtgcaaatccatgcaaaactg

SEQ ID NO: 29851 - RNA, 22 nt, Synthetic Construct
  source 1..22: mol_type = other RNA
tgtgcaaatccatgcaaaactg

SEQ ID NO: 29852 - RNA, 23 nt, Synthetic Construct
  source 1..23: mol_type = other RNA
tcctgtactgagctgccccgagc

SEQ ID NO: 29853 - RNA, 23 nt, Synthetic Construct
  source 1..23: mol_type = other RNA
tcctgtactgagctgccccgagc

SEQ ID NO: 29854 - RNA, 25 nt, Synthetic Construct
  source 1..25: mol_type = other RNA
ttgagggtatgagatcgagacgaca

SEQ ID NO: 29855 - RNA, 21 nt, Synthetic Construct
  source 1..21: mol_type = other RNA
tcctgtactgagctgcccgag

SEQ ID NO: 29856 - RNA, 16 nt, Synthetic Construct
  source 1..16: mol_type = other RNA
ccctttgtacacaccg

SEQ ID NO: 29857 - RNA, 16 nt, Synthetic Construct
  source 1..16: mol_type = other RNA
ccctttgtacacaccg

SEQ ID NO: 29858 - RNA, 23 nt, Synthetic Construct
  source 1..23: mol_type = other RNA
tcctgtactgggctgccccgagt

SEQ ID NO: 29859 - RNA, 20 nt, Synthetic Construct
  source 1..20: mol_type = other RNA
tgaggtagtaggtcgtatag

SEQ ID NO: 29860 - RNA, 20 nt, Synthetic Construct
  source 1..20: mol_type = other RNA
tgaggtagtaggtcgtatag

SEQ ID NO: 29861 - RNA, 22 nt, Synthetic Construct
  source 1..22: mol_type = other RNA
tgaggtagtaggctgtgtggtt

SEQ ID NO: 29862 - RNA, 16 nt, Synthetic Construct
  source 1..16: mol_type = other RNA
ctctacggccatacca

SEQ ID NO: 29863 - RNA, 36 nt, Synthetic Construct; identical to SEQ ID NO: 2366
  source 1..36: mol_type = other RNA

SEQ ID NO: 29864 - RNA, 36 nt, Synthetic Construct; identical to SEQ ID NO: 2366
  source 1..36: mol_type = other RNA

SEQ ID NO: 29865 - RNA, 22 nt, Synthetic Construct
  source 1..22: mol_type = other RNA
tcctgtaccgagctgccccgag

SEQ ID NO: 29866 - RNA, 22 nt, Synthetic Construct
  source 1..22: mol_type = other RNA
tcctgtaccgagctgccccgag

SEQ ID NO: 29867 - RNA, 22 nt, Synthetic Construct
  source 1..22: mol_type = other RNA
ttcaagtaattcaggataggtt

SEQ ID NO: 29868 - RNA, 22 nt, Synthetic Construct
  source 1..22: mol_type = other RNA
ttcaagtaattcaggataggtt

SEQ ID NO: 29869 - RNA, 22 nt, Synthetic Construct
  source 1..22: mol_type = other RNA
tagcagcacgtaaatactggcg

SEQ ID NO: 29870 - RNA, 22 nt, Synthetic Construct
  source 1..22: mol_type = other RNA
tagcagcacgtaaatactggcg

SEQ ID NO: 29871 - RNA, 25 nt, Synthetic Construct
  source 1..25: mol_type = other RNA
ttgaggatatgagatagagacgaca

SEQ ID NO: 29872 - RNA, 20 nt, Synthetic Construct
  source 1..20: mol_type = other RNA
tgagatagtaggttgtgtgg

SEQ ID NO: 29873 - RNA, 20 nt, Synthetic Construct
  source 1..20: mol_type = other RNA
tgagatagtaggttgtgtgg

SEQ ID NO: 29874 - RNA, 18 nt, Synthetic Construct
  source 1..18: mol_type = other RNA
cgactcttagcggtggat

SEQ ID NO: 29875 - RNA, 18 nt, Synthetic Construct
  source 1..18: mol_type = other RNA
cgactcttagcggtggat

SEQ ID NO: 29876 - RNA, 21 nt, Synthetic Construct
  source 1..21: mol_type = other RNA
tcctatactgagctgccccga

SEQ ID NO: 29877 - RNA, 21 nt, Synthetic Construct
  source 1..21: mol_type = other RNA
tcctatactgagctgccccga

SEQ ID NO: 29878 - RNA, 22 nt, Synthetic Construct
  source 1..22: mol_type = other RNA
cactgcacttgtctcggtctga

SEQ ID NO: 29879 - RNA, 22 nt, Synthetic Construct
  source 1..22: mol_type = other RNA
cattgcacttgtcccggcctgt

SEQ ID NO: 29880 - RNA, 22 nt, Synthetic Construct
  source 1..22: mol_type = other RNA
cattgcacttgtcccggcctgt

SEQ ID NO: 29881 - RNA, 22 nt, Synthetic Construct
  source 1..22: mol_type = other RNA
ggcagggttcgtgactggggtg

SEQ ID NO: 29882 - RNA, 22 nt, Synthetic Construct
  source 1..22: mol_type = other RNA
ggcagggttcgtgactggggtg

SEQ ID NO: 29883 - RNA, 16 nt, Synthetic Construct
  source 1..16: mol_type = other RNA
gtctacggccataccg

SEQ ID NO: 29884 - RNA, 22 nt, Synthetic Construct
  source 1..22: mol_type = other RNA
taaggtagtagtttgtgctgtt

SEQ ID NO: 29885 - RNA, 23 nt, Synthetic Construct
  source 1..23: mol_type = other RNA
caaagaattctccttttgggctt

SEQ ID NO: 29886 - RNA, 23 nt, Synthetic Construct
  source 1..23: mol_type = other RNA
tcctgtgctgagctgccccgagt

SEQ ID NO: 29887 - RNA, 23 nt, Synthetic Construct
  source 1..23: mol_type = other RNA
tcctgtgctgagctgccccgagt

SEQ ID NO: 29888 - RNA, 21 nt, Synthetic Construct
  source 1..21: mol_type = other RNA
tgtagtgtttcctactttatg

SEQ ID NO: 29889 - RNA, 21 nt, Synthetic Construct
  source 1..21: mol_type = other RNA
tgtagtgtttcctactttatg

SEQ ID NO: 29890 - RNA, 20 nt, Synthetic Construct
  source 1..20: mol_type = other RNA
tgagatagtaggttgtgtgg

SEQ ID NO: 29891 - RNA, 22 nt, Synthetic Construct
  source 1..22: mol_type = other RNA
cgaggtagtaggttgtgtggtt

SEQ ID NO: 29892 - RNA, 22 nt, Synthetic Construct
  source 1..22: mol_type = other RNA
cgaggtagtaggttgtgtggtt

SEQ ID NO: 29893 - RNA, 20 nt, Synthetic Construct
  source 1..20: mol_type = other RNA
tgaggtagcaggttgtgtgg

SEQ ID NO: 29894 - RNA, 20 nt, Synthetic Construct
  source 1..20: mol_type = other RNA
tgaggtagcaggttgtgtgg

SEQ ID NO: 29895 - RNA, 19 nt, Synthetic Construct
  source 1..19: mol_type = other RNA
tccctgttcgggcgccatt

SEQ ID NO: 29896 - RNA, 35 nt, Synthetic Construct; identical to SEQ ID NO: 2269
  source 1..35: mol_type = other RNA

SEQ ID NO: 29897 - RNA, 35 nt, Synthetic Construct; identical to SEQ ID NO: 2269
  source 1..35: mol_type = other RNA

SEQ ID NO: 29898 - RNA, 22 nt, Synthetic Construct
  source 1..22: mol_type = other RNA
tgaggtagtaggttgtgaggtt

SEQ ID NO: 29899 - RNA, 32 nt, Synthetic Construct; identical to SEQ ID NO: 1238
  source 1..32: mol_type = other RNA

SEQ ID NO: 29900 - RNA, 22 nt, Synthetic Construct
  source 1..22: mol_type = other RNA
catagcacttgtctcggtctga

SEQ ID NO: 29901 - RNA, 22 nt, Synthetic Construct
  source 1..22: mol_type = other RNA
catagcacttgtctcggtctga

SEQ ID NO: 29902 - RNA, 24 nt, Synthetic Construct
  source 1..24: mol_type = other RNA
aaaccgttaccattactgagttta

SEQ ID NO: 29903 - RNA, 24 nt, Synthetic Construct
  source 1..24: mol_type = other RNA
aaaccgttaccattactgagttta

SEQ ID NO: 29904 - RNA, 21 nt, Synthetic Construct
  source 1..21: mol_type = other RNA
tggggggcagagagcgagact

SEQ ID NO: 29905 - RNA, 21 nt, Synthetic Construct
  source 1..21: mol_type = other RNA
tggggggcagagagcgagact

SEQ ID NO: 29906 - RNA, 22 nt, Synthetic Construct
  source 1..22: mol_type = other RNA
actggacttggagtcagaaggc

SEQ ID NO: 29907 - RNA, 22 nt, Synthetic Construct
  source 1..22: mol_type = other RNA
actggacttggagtcagaaggc

SEQ ID NO: 29908 - RNA, 24 nt, Synthetic Construct
  source 1..24: mol_type = other RNA
tgtaaacatccccgactgggagct

SEQ ID NO: 29909 - RNA, 16 nt, Synthetic Construct
  source 1..16: mol_type = other RNA
ggccgttcttagttgg

SEQ ID NO: 29910 - RNA, 21 nt, Synthetic Construct
  source 1..21: mol_type = other RNA
agcagcattgtacagggctat

SEQ ID NO: 29911 - RNA, 21 nt, Synthetic Construct
  source 1..21: mol_type = other RNA
agcagcattgtacagggctat

SEQ ID NO: 29912 - RNA, 37 nt, Synthetic Construct; identical to SEQ ID NO: 2482
  source 1..37: mol_type = other RNA

SEQ ID NO: 29913 - RNA, 23 nt, Synthetic Construct
  source 1..23: mol_type = other RNA
cgaggtagtaggttgtgtggttt

SEQ ID NO: 29914 - RNA, 22 nt, Synthetic Construct
  source 1..22: mol_type = other RNA
tggctcagttcagcaggaacag

SEQ ID NO: 29915 - RNA, 22 nt, Synthetic Construct
  source 1..22: mol_type = other RNA
tggctcagttcagcaggaacag

SEQ ID NO: 29916 - RNA, 22 nt, Synthetic Construct
  source 1..22: mol_type = other RNA
cattgcacctgtctcggtctga

SEQ ID NO: 29917 - RNA, 22 nt, Synthetic Construct
  source 1..22: mol_type = other RNA
cattgcacctgtctcggtctga

SEQ ID NO: 29918 - RNA, 24 nt, Synthetic Construct
  source 1..24: mol_type = other RNA
tgtaaacatccccgactggaggct

SEQ ID NO: 29919 - RNA, 15 nt, Synthetic Construct
  source 1..15: mol_type = other RNA
gagagcctggacaca

SEQ ID NO: 29920 - RNA, 15 nt, Synthetic Construct
  source 1..15: mol_type = other RNA
gagagcctggacaca

SEQ ID NO: 29921 - RNA, 22 nt, Synthetic Construct
  source 1..22: mol_type = other RNA
ggtagcgaaattccttgtcggg

SEQ ID NO: 29922 - RNA, 24 nt, Synthetic Construct
  source 1..24: mol_type = other RNA
tcggatccgtctgagcttggcttt

SEQ ID NO: 29923 - RNA, 21 nt, Synthetic Construct
  source 1..21: mol_type = other RNA
ngaggtagtaggttgtgtggt

SEQ ID NO: 29924 - RNA, 21 nt, Synthetic Construct
  source 1..21: mol_type = other RNA
ngaggtagtaggttgtgtggt

SEQ ID NO: 29925 - RNA, 23 nt, Synthetic Construct
  source 1..23: mol_type = other RNA
ttcaagtaatccaggataggctt

SEQ ID NO: 29926 - RNA, 22 nt, Synthetic Construct
  source 1..22: mol_type = other RNA
tgaggtagtagtttgtggtgtt

SEQ ID NO: 29927 - RNA, 22 nt, Synthetic Construct
  source 1..22: mol_type = other RNA
tgaggtagtaggttgtgtggtt

SEQ ID NO: 29928 - RNA, 22 nt, Synthetic Construct
  source 1..22: mol_type = other RNA
tcgaaaccatcctctgctacca

SEQ ID NO: 29929 - RNA, 22 nt, Synthetic Construct
  source 1..22: mol_type = other RNA
tcgaaaccatcctctgctacca

SEQ ID NO: 29930 - RNA, 23 nt, Synthetic Construct
  source 1..23: mol_type = other RNA
tcctgtactgagctgctccgaga

SEQ ID NO: 29931 - RNA, 23 nt, Synthetic Construct
  source 1..23: mol_type = other RNA
tcctgtactgagctgctccgaga

SEQ ID NO: 29932 - RNA, 23 nt, Synthetic Construct
  source 1..23: mol_type = other RNA
gtctttgttcgattccgttgagt

SEQ ID NO: 29933 - RNA, 24 nt, Synthetic Construct
  source 1..24: mol_type = other RNA
tgagaactgaattccatgggttat

SEQ ID NO: 29934 - RNA, 23 nt, Synthetic Construct
  source 1..23: mol_type = other RNA
tggtaatacgacgtacttagagt

SEQ ID NO: 29935 - RNA, 34 nt, Synthetic Construct; identical to SEQ ID NO: 2019
  source 1..34: mol_type = other RNA

SEQ ID NO: 29936 - RNA, 34 nt, Synthetic Construct; identical to SEQ ID NO: 2019
  source 1..34: mol_type = other RNA

SEQ ID NO: 29937 - RNA, 17 nt, Synthetic Construct
  source 1..17: mol_type = other RNA
agtccggatcgtagtct

SEQ ID NO: 29938 - RNA, 23 nt, Synthetic Construct
  source 1..23: mol_type = other RNA
tctttggttatctagctgtatga

SEQ ID NO: 29939 - RNA, 23 nt, Synthetic Construct
  source 1..23: mol_type = other RNA
tctttggttatctagctgtatga

SEQ ID NO: 29940 - RNA, 22 nt, Synthetic Construct
  source 1..22: mol_type = other RNA
tgaggtagtagtttgtgctgct

SEQ ID NO: 29941 - RNA, 22 nt, Synthetic Construct
  source 1..22: mol_type = other RNA
tgaggtagtagtttgtgctgct

SEQ ID NO: 29942 - RNA, 21 nt, Synthetic Construct
  source 1..21: mol_type = other RNA
accctgtagatccgaatttgt

SEQ ID NO: 29943 - RNA, 25 nt, Synthetic Construct
  source 1..25: mol_type = other RNA
ttgaggatatgagatcgggacgaca

SEQ ID NO: 29944 - RNA, 25 nt, Synthetic Construct
  source 1..25: mol_type = other RNA
ttgaggatatgagatcgggacgaca

SEQ ID NO: 29945 - RNA, 21 nt, Synthetic Construct
  source 1..21: mol_type = other RNA
tggagtgtgacaatggcgttt

SEQ ID NO: 29946 - RNA, 23 nt, Synthetic Construct
  source 1..23: mol_type = other RNA
tgagaactgaattccatgggttg

SEQ ID NO: 29947 - RNA, 23 nt, Synthetic Construct
  source 1..23: mol_type = other RNA
tggtaatacgacgtacatagtgt

SEQ ID NO: 29948 - RNA, 16 nt, Synthetic Construct
  source 1..16: mol_type = other RNA
gtctacggccgtacca

SEQ ID NO: 29949 - RNA, 16 nt, Synthetic Construct
  source 1..16: mol_type = other RNA
gtctacggccgtacca

SEQ ID NO: 29950 - RNA, 27 nt, Synthetic Construct
  source 1..27: mol_type = other RNA
atagtctttgttcgattccgttgagta

SEQ ID NO: 29951 - RNA, 23 nt, Synthetic Construct
  source 1..23: mol_type = other RNA
tgaggggcagagagcgagacttc

SEQ ID NO: 29952 - RNA, 22 nt, Synthetic Construct
  source 1..22: mol_type = other RNA
acagtagtctgcacattggttt

SEQ ID NO: 29953 - RNA, 23 nt, Synthetic Construct
  source 1..23: mol_type = other RNA
tcctgtaccgagctgccccgagt

SEQ ID NO: 29954 - RNA, 21 nt, Synthetic Construct
  source 1..21: mol_type = other RNA
tgaggtagtaggtcgtgtggt

SEQ ID NO: 29955 - RNA, 21 nt, Synthetic Construct
  source 1..21: mol_type = other RNA
tgaggtagtaggtcgtgtggt

SEQ ID NO: 29956 - RNA, 22 nt, Synthetic Construct
  source 1..22: mol_type = other RNA
tagcagcacgtaaacattggcg

SEQ ID NO: 29957 - RNA, 20 nt, Synthetic Construct
  source 1..20: mol_type = other RNA
tgaggtaggaggttgtatag

SEQ ID NO: 29958 - RNA, 22 nt, Synthetic Construct
  source 1..22: mol_type = other RNA
cggctctgggtctgtggggagt

SEQ ID NO: 29959 - RNA, 22 nt, Synthetic Construct
  source 1..22: mol_type = other RNA
tattgcacttgtcccggcctgc

SEQ ID NO: 29960 - RNA, 21 nt, Synthetic Construct
  source 1..21: mol_type = other RNA
tcctgtactgagctaccccga

SEQ ID NO: 29961 - RNA, 21 nt, Synthetic Construct
  source 1..21: mol_type = other RNA
tcctgtactgagctaccccga

SEQ ID NO: 29962 - RNA, 17 nt, Synthetic Construct
  source 1..17: mol_type = other RNA
cccctggacctgtactg

SEQ ID NO: 29963 - RNA, 24 nt, Synthetic Construct
  source 1..24: mol_type = other RNA
tgtaaacacccccgactggaagct

SEQ ID NO: 29964 - RNA, 21 nt, Synthetic Construct
  source 1..21: mol_type = other RNA
ccctgtactgagctgccccga

SEQ ID NO: 29965 - RNA, 21 nt, Synthetic Construct
  source 1..21: mol_type = other RNA
ccctgtactgagctgccccga

SEQ ID NO: 29966 - RNA, 20 nt, Synthetic Construct
  source 1..20: mol_type = other RNA
tgaggtggtaggttgtatag

SEQ ID NO: 29967 - RNA, 20 nt, Synthetic Construct
  source 1..20: mol_type = other RNA
tgaggtggtaggttgtatag

SEQ ID NO: 29968 - RNA, 22 nt, Synthetic Construct
  source 1..22: mol_type = other RNA
tgaggtagtagttcgtgctgtt

SEQ ID NO: 29969 - RNA, 22 nt, Synthetic Construct
  source 1..22: mol_type = other RNA
tgaggtagcaggttgtgtggtt

SEQ ID NO: 29970 - RNA, 22 nt, Synthetic Construct
  source 1..22: mol_type = other RNA
tgaggtagtagattgtgtggtt

SEQ ID NO: 29971 - RNA, 22 nt, Synthetic Construct
  source 1..22: mol_type = other RNA
tgaggtagtagattgtgtggtt

SEQ ID NO: 29972 - RNA, 20 nt, Synthetic Construct
  source 1..20: mol_type = other RNA
taaggtagtaggttgtgtgg

SEQ ID NO: 29973 - RNA, 20 nt, Synthetic Construct
  source 1..20: mol_type = other RNA
taaggtagtaggttgtgtgg

SEQ ID NO: 29974 - RNA, 22 nt, Synthetic Construct
  source 1..22: mol_type = other RNA
tattgtacttgtcccggcctgt

SEQ ID NO: 29975 - RNA, 23 nt, Synthetic Construct
  source 1..23: mol_type = other RNA
cgactcttagcggtggatcactc

SEQ ID NO: 29976 - RNA, 23 nt, Synthetic Construct
  source 1..23: mol_type = other RNA
cgactcttagcggtggatcactc

SEQ ID NO: 29977 - RNA, 22 nt, Synthetic Construct
  source 1..22: mol_type = other RNA
tgaggtagtaggttgtgtagtt

SEQ ID NO: 29978 - RNA, 22 nt, Synthetic Construct
  source 1..22: mol_type = other RNA
tgaggtagtaggttgtgtagtt

SEQ ID NO: 29979 - RNA, 30 nt, Synthetic Construct; identical to SEQ ID NO: 1236
  source 1..30: mol_type = other RNA

SEQ ID NO: 29980 - RNA, 22 nt, Synthetic Construct
  source 1..22: mol_type = other RNA
tgaggtagtaagttgtgtggtt

SEQ ID NO: 29981 - RNA, 23 nt, Synthetic Construct
  source 1..23: mol_type = other RNA
tcctgtactgagttgccccgaga

SEQ ID NO: 29982 - RNA, 22 nt, Synthetic Construct
  source 1..22: mol_type = other RNA
ngaggtagtaggttgtgtggtt

SEQ ID NO: 29983 - RNA, 34 nt, Synthetic Construct; identical to SEQ ID NO: 6594
  source 1..34: mol_type = other RNA

SEQ ID NO: 29984 - RNA, 34 nt, Synthetic Construct; identical to SEQ ID NO: 6594
  source 1..34: mol_type = other RNA

SEQ ID NO: 29985 - RNA, 21 nt, Synthetic Construct
  source 1..21: mol_type = other RNA
tgtcttgcaggccgtcatgca

SEQ ID NO: 29986 - RNA, 21 nt, Synthetic Construct
  source 1..21: mol_type = other RNA
tgtcttgcaggccgtcatgca

SEQ ID NO: 29987 - RNA, 29 nt, Synthetic Construct
  source 1..29: mol_type = other RNA
gagcgctgagaagacggtcgaacttgact

SEQ ID NO: 29988 - RNA, 22 nt, Synthetic Construct
  source 1..22: mol_type = other RNA
tgaggtagtaggtcgtgtggtt

SEQ ID NO: 29989 - RNA, 22 nt, Synthetic Construct
  source 1..22: mol_type = other RNA
tgaggtagtaggtcgtgtggtt

SEQ ID NO: 29990 - RNA, 20 nt, Synthetic Construct
  source 1..20: mol_type = other RNA
tgaggtagtaggttgtgtgg

SEQ ID NO: 29991 - RNA, 23 nt, Synthetic Construct
  source 1..23: mol_type = other RNA
tgaggggcagagagcgggacttt

SEQ ID NO: 29992 - RNA, 23 nt, Synthetic Construct
  source 1..23: mol_type = other RNA
tcctgtactgagctgccacgagt

SEQ ID NO: 29993 - RNA, 23 nt, Synthetic Construct
  source 1..23: mol_type = other RNA
tcctgtactgagctgccacgagt

SEQ ID NO: 29994 - RNA, 22 nt, Synthetic Construct
  source 1..22: mol_type = other RNA
ccggtcccaagggtatggctgt

SEQ ID NO: 29995 - RNA, 22 nt, Synthetic Construct
  source 1..22: mol_type = other RNA
ccggtcccaagggtatggctgt

SEQ ID NO: 29996 - RNA, 21 nt, Synthetic Construct
  source 1..21: mol_type = other RNA
tggagtgtgacaatggtgctt

SEQ ID NO: 29997 - RNA, 21 nt, Synthetic Construct
  source 1..21: mol_type = other RNA
tggagtgtgacaatggtgctt

SEQ ID NO: 29998 - RNA, 18 nt, Synthetic Construct
  source 1..18: mol_type = other RNA
agtgacgcgcatgaatgg

SEQ ID NO: 29999 - RNA, 18 nt, Synthetic Construct
  source 1..18: mol_type = other RNA
agtgacgcgcatgaatgg

SEQ ID NO: 30000 - RNA, 21 nt, Synthetic Construct
  source 1..21: mol_type = other RNA
tgaggggcagagagcgagact

SEQ ID NO: 30001 - RNA, 21 nt, Synthetic Construct
  source 1..21: mol_type = other RNA
tgaggggcagagagcgagact

SEQ ID NO: 30002 - RNA, 22 nt, Synthetic Construct
  source 1..22: mol_type = other RNA
tgaggtagaaggttgtgtggtt

SEQ ID NO: 30003 - RNA, 16 nt, Synthetic Construct
  source 1..16: mol_type = other RNA
gtctacggacatacca

SEQ ID NO: 30004 - RNA, 16 nt, Synthetic Construct
  source 1..16: mol_type = other RNA
gtctacggacatacca

SEQ ID NO: 30005 - RNA, 35 nt, Synthetic Construct; identical to SEQ ID NO: 2069
  source 1..35: mol_type = other RNA

SEQ ID NO: 30006 - RNA, 21 nt, Synthetic Construct
  source 1..21: mol_type = other RNA
agagtaggacgttgccaggtt

SEQ ID NO: 30007 - RNA, 21 nt, Synthetic Construct
  source 1..21: mol_type = other RNA
agagtaggacgttgccaggtt

SEQ ID NO: 30008 - RNA, 20 nt, Synthetic Construct
  source 1..20: mol_type = other RNA
tgaagtagtaggttgtgtgg

SEQ ID NO: 30009 - RNA, 15 nt, Synthetic Construct
  source 1..15: mol_type = other RNA
cgactcttagcggtg

SEQ ID NO: 30010 - RNA, 15 nt, Synthetic Construct
  source 1..15: mol_type = other RNA
cgactcttagcggtg

SEQ ID NO: 30011 - RNA, 21 nt, Synthetic Construct
  source 1..21: mol_type = other RNA
gctttgatccggagatttccg

SEQ ID NO: 30012 - RNA, 21 nt, Synthetic Construct
  source 1..21: mol_type = other RNA
gctttgatccggagatttccg

SEQ ID NO: 30013 - RNA, 21 nt, Synthetic Construct
  source 1..21: mol_type = other RNA
taaggtagtaggttgtgtggt

SEQ ID NO: 30014 - RNA, 21 nt, Synthetic Construct
  source 1..21: mol_type = other RNA
taaggtagtaggttgtgtggt

SEQ ID NO: 30015 - RNA, 22 nt, Synthetic Construct
  source 1..22: mol_type = other RNA
tgaggtggtaggttgtgtggtt

SEQ ID NO: 30016 - RNA, 19 nt, Synthetic Construct
  source 1..19: mol_type = other RNA
caagcggtggatgatgtgg

SEQ ID NO: 30017 - RNA, 19 nt, Synthetic Construct
  source 1..19: mol_type = other RNA
caagcggtggatgatgtgg

SEQ ID NO: 30018 - RNA, 22 nt, Synthetic Construct
  source 1..22: mol_type = other RNA
tattgcacttgtcccggcctgc

SEQ ID NO: 30019 - RNA, 18 nt, Synthetic Construct
  source 1..18: mol_type = other RNA
cgcgacctcagatcagac

SEQ ID NO: 30020 - RNA, 18 nt, Synthetic Construct
  source 1..18: mol_type = other RNA
cgcgacctcagatcagac

SEQ ID NO: 30021 - RNA, 16 nt, Synthetic Construct
  source 1..16: mol_type = other RNA
gtctacggccataccg

SEQ ID NO: 30022 - RNA, 16 nt, Synthetic Construct
  source 1..16: mol_type = other RNA
gtctacggccataccg

SEQ ID NO: 30023 - RNA, 17 nt, Synthetic Construct
  source 1..17: mol_type = other RNA
atcgtgacgatagtgca

SEQ ID NO: 30024 - RNA, 20 nt, Synthetic Construct
  source 1..20: mol_type = other RNA
tgaggtagcaggttgtatag

SEQ ID NO: 30025 - RNA, 20 nt, Synthetic Construct
  source 1..20: mol_type = other RNA
tgaggtagcaggttgtatag

SEQ ID NO: 30026 - RNA, 23 nt, Synthetic Construct
  source 1..23: mol_type = other RNA
aatgacacgatcactcccgttga

SEQ ID NO: 30027 - RNA, 23 nt, Synthetic Construct
  source 1..23: mol_type = other RNA
aatgacacgatcactcccgttga

SEQ ID NO: 30028 - RNA, 25 nt, Synthetic Construct
  source 1..25: mol_type = other RNA
caaagaattctccttttgggctttt

SEQ ID NO: 30029 - RNA, 21 nt, Synthetic Construct
  source 1..21: mol_type = other RNA
acagtagcctgcacattggtt

SEQ ID NO: 30030 - RNA, 19 nt, Synthetic Construct
  source 1..19: mol_type = other RNA
cggaagaaggggtgcctgg

SEQ ID NO: 30031 - RNA, 19 nt, Synthetic Construct
  source 1..19: mol_type = other RNA
cggaagaaggggtgcctgg

SEQ ID NO: 30032 - RNA, 23 nt, Synthetic Construct
  source 1..23: mol_type = other RNA
tcccacatggtctagcggttagg

SEQ ID NO: 30033 - RNA, 16 nt, Synthetic Construct
  source 1..16: mol_type = other RNA
cacaccgcccgtcgct

SEQ ID NO: 30034 - RNA, 16 nt, Synthetic Construct
  source 1..16: mol_type = other RNA
cacaccgcccgtcgct

SEQ ID NO: 30035 - RNA, 22 nt, Synthetic Construct
  source 1..22: mol_type = other RNA
tggaatgtaaagaagtatgtac

SEQ ID NO: 30036 - RNA, 22 nt, Synthetic Construct
  source 1..22: mol_type = other RNA
tggaatgtaaagaagtatgtac

SEQ ID NO: 30037 - RNA, 22 nt, Synthetic Construct
  source 1..22: mol_type = other RNA
tggggtagtagtttgtgctgtt

SEQ ID NO: 30038 - RNA, 22 nt, Synthetic Construct
  source 1..22: mol_type = other RNA
tggggtagtagtttgtgctgtt

SEQ ID NO: 30039 - RNA, 20 nt, Synthetic Construct
  source 1..20: mol_type = other RNA
ctctaatgagactgccggtg

SEQ ID NO: 30040 - RNA, 34 nt, Synthetic Construct; identical to SEQ ID NO: 2317
  source 1..34: mol_type = other RNA

SEQ ID NO: 30041 - RNA, 34 nt, Synthetic Construct; identical to SEQ ID NO: 2317
  source 1..34: mol_type = other RNA

SEQ ID NO: 30042 - RNA, 33 nt, Synthetic Construct; identical to SEQ ID NO: 2395
  source 1..33: mol_type = other RNA

SEQ ID NO: 30043 - RNA, 33 nt, Synthetic Construct; identical to SEQ ID NO: 2395
  source 1..33: mol_type = other RNA

SEQ ID NO: 30044 - RNA, 22 nt, Synthetic Construct
  source 1..22: mol_type = other RNA
ggcagggttcgtgactggggtg

SEQ ID NO: 30045 - RNA, 22 nt, Synthetic Construct
  source 1..22: mol_type = other RNA
ggcagggttcgtgactggggtg

SEQ ID NO: 30046 - RNA, 22 nt, Synthetic Construct
  source 1..22: mol_type = other RNA
tcctgtactaagctgccccgag

SEQ ID NO: 30047 - RNA, 22 nt, Synthetic Construct
  source 1..22: mol_type = other RNA
tcctgtactaagctgccccgag

SEQ ID NO: 30048 - RNA, 23 nt, Synthetic Construct
  source 1..23: mol_type = other RNA
cgactcttagcggtggatcactc

SEQ ID NO: 30049 - RNA, 22 nt, Synthetic Construct
  source 1..22: mol_type = other RNA
tgaggtagtaggttgtgtagtt

SEQ ID NO: 30050 - RNA, 22 nt, Synthetic Construct
  source 1..22: mol_type = other RNA
tgaggtagtaggttgtgtagtt

SEQ ID NO: 30051 - RNA, 22 nt, Synthetic Construct
  source 1..22: mol_type = other RNA
tattgcacttgtcccggcccgt

SEQ ID NO: 30052 - RNA, 22 nt, Synthetic Construct
  source 1..22: mol_type = other RNA
tattgcacttgtcccggcccgt

SEQ ID NO: 30053 - RNA, 22 nt, Synthetic Construct
  source 1..22: mol_type = other RNA
tgaggtagtagtttgcgctgtt

SEQ ID NO: 30054 - RNA, 22 nt, Synthetic Construct
  source 1..22: mol_type = other RNA
tgaggtagtagtttgcgctgtt

SEQ ID NO: 30055 - RNA, 23 nt, Synthetic Construct
  source 1..23: mol_type = other RNA
gcgtggtaggagagcgttctgta

SEQ ID NO: 30056 - RNA, 22 nt, Synthetic Construct
  source 1..22: mol_type = other RNA
tgaggtagtaggttgtgcggtt

SEQ ID NO: 30057 - RNA, 23 nt, Synthetic Construct
  source 1..23: mol_type = other RNA
tgtcagtttgtcaaataccccaa

SEQ ID NO: 30058 - RNA, 19 nt, Synthetic Construct
  source 1..19: mol_type = other RNA
aaaccgttaccattactga

SEQ ID NO: 30059 - RNA, 19 nt, Synthetic Construct
  source 1..19: mol_type = other RNA
aaaccgttaccattactga

SEQ ID NO: 30060 - RNA, 22 nt, Synthetic Construct
  source 1..22: mol_type = other RNA
tgaggtagtaggttgtgcggtt

SEQ ID NO: 30061 - RNA, 22 nt, Synthetic Construct
  source 1..22: mol_type = other RNA
tgaggtagtaggttgtgcggtt

SEQ ID NO: 30062 - RNA, 23 nt, Synthetic Construct
  source 1..23: mol_type = other RNA
tgaggggcagagagtgagacttt

SEQ ID NO: 30063 - RNA, 23 nt, Synthetic Construct
  source 1..23: mol_type = other RNA
tgaggggcagagagtgagacttt

SEQ ID NO: 30064 - RNA, 23 nt, Synthetic Construct
  source 1..23: mol_type = other RNA
tgtgcaaatctatgcaaaactga

SEQ ID NO: 30065 - RNA, 23 nt, Synthetic Construct
  source 1..23: mol_type = other RNA
tgtgcaaatctatgcaaaactga

SEQ ID NO: 30066 - RNA, 21 nt, Synthetic Construct
  source 1..21: mol_type = other RNA
cattattacttttggtacgcg

SEQ ID NO: 30067 - RNA, 21 nt, Synthetic Construct
  source 1..21: mol_type = other RNA
cattattacttttggtacgcg

SEQ ID NO: 30068 - RNA, 25 nt, Synthetic Construct
  source 1..25: mol_type = other RNA
ggtaaaattgctgagtgaagcattg

SEQ ID NO: 30069 - RNA, 25 nt, Synthetic Construct
  source 1..25: mol_type = other RNA
ggtaaaattgctgagtgaagcattg

SEQ ID NO: 30070 - RNA, 22 nt, Synthetic Construct
  source 1..22: mol_type = other RNA
ggaggtagtaggttgtgtggtt

SEQ ID NO: 30071 - RNA, 24 nt, Synthetic Construct
  source 1..24: mol_type = other RNA
tgtaaacacccccgactggaagct

SEQ ID NO: 30072 - RNA, 15 nt, Synthetic Construct
  source 1..15: mol_type = other RNA
gagctgtggataggg

SEQ ID NO: 30073 - RNA, 15 nt, Synthetic Construct
  source 1..15: mol_type = other RNA
gagctgtggataggg

SEQ ID NO: 30074 - RNA, 27 nt, Synthetic Construct
  source 1..27: mol_type = other RNA
ccccccactgctaaacttgactggctt

SEQ ID NO: 30075 - RNA, 21 nt, Synthetic Construct
  source 1..21: mol_type = other RNA
cccataaagtagaaagcacta

SEQ ID NO: 30076 - RNA, 20 nt, Synthetic Construct
  source 1..20: mol_type = other RNA
tgaggtagtaggttgtgcgg

SEQ ID NO: 30077 - RNA, 22 nt, Synthetic Construct
  source 1..22: mol_type = other RNA
tgaggtagtggtttgtgctgtt

SEQ ID NO: 30078 - RNA, 22 nt, Synthetic Construct
  source 1..22: mol_type = other RNA
tgaggtagtggtttgtgctgtt

SEQ ID NO: 30079 - RNA, 27 nt, Synthetic Construct
  source 1..27: mol_type = other RNA
ccccccaccgctaaatttgactggctt

SEQ ID NO: 30080 - RNA, 20 nt, Synthetic Construct
  source 1..20: mol_type = other RNA
tgaggtagtaggttgtgtga

SEQ ID NO: 30081 - RNA, 20 nt, Synthetic Construct
  source 1..20: mol_type = other RNA
tgaggtagtaggttgtgtga

SEQ ID NO: 30082 - RNA, 16 nt, Synthetic Construct
  source 1..16: mol_type = other RNA
gtctacgaccatacca

SEQ ID NO: 30083 - RNA, 24 nt, Synthetic Construct
  source 1..24: mol_type = other RNA
tcggatccgtctgagcttggcttt

SEQ ID NO: 30084 - RNA, 23 nt, Synthetic Construct
  source 1..23: mol_type = other RNA
ccctgtactgagctgccccgagt

SEQ ID NO: 30085 - RNA, 23 nt, Synthetic Construct
  source 1..23: mol_type = other RNA
ccctgtactgagctgccccgagt

SEQ ID NO: 30086 - RNA, 22 nt, Synthetic Construct
  source 1..22: mol_type = other RNA
tcctgtactgaactgccccgag

SEQ ID NO: 30087 - RNA, 15 nt, Synthetic Construct
  source 1..15: mol_type = other RNA
gtcaggatgttggct

SEQ ID NO: 30088 - RNA, 23 nt, Synthetic Construct
  source 1..23: mol_type = other RNA
tgaggggcagggagcgagacttt

SEQ ID NO: 30089 - RNA, 18 nt, Synthetic Construct
  source 1..18: mol_type = other RNA
agttggtccgagtgttgt

SEQ ID NO: 30090 - RNA, 34 nt, Synthetic Construct; identical to SEQ ID NO: 2186
  source 1..34: mol_type = other RNA

SEQ ID NO: 30091 - RNA, 34 nt, Synthetic Construct; identical to SEQ ID NO: 2186
  source 1..34: mol_type = other RNA

SEQ ID NO: 30092 - RNA, 15 nt, Synthetic Construct
  source 1..15: mol_type = other RNA
gcaagtcgaacggta

SEQ ID NO: 30093 - RNA, 23 nt, Synthetic Construct
  source 1..23: mol_type = other RNA
taatactgccgggtaatgatgga

SEQ ID NO: 30094 - RNA, 16 nt, Synthetic Construct
  source 1..16: mol_type = other RNA
gtcgacgtatagggtg

SEQ ID NO: 30095 - RNA, 16 nt, Synthetic Construct
  source 1..16: mol_type = other RNA
gtcgacgtatagggtg

SEQ ID NO: 30096 - RNA, 22 nt, Synthetic Construct
  source 1..22: mol_type = other RNA
tgcggggctagggctaacagct

SEQ ID NO: 30097 - RNA, 22 nt, Synthetic Construct
  source 1..22: mol_type = other RNA
tgcggggctagggctaacagct

SEQ ID NO: 30098 - RNA, 23 nt, Synthetic Construct
  source 1..23: mol_type = other RNA
caaagtgcttacagtgcaggtag

SEQ ID NO: 30099 - RNA, 23 nt, Synthetic Construct
  source 1..23: mol_type = other RNA
caaagtgcttacagtgcaggtag

SEQ ID NO: 30100 - RNA, 32 nt, Synthetic Construct; identical to SEQ ID NO: 5582
  source 1..32: mol_type = other RNA

SEQ ID NO: 30101 - RNA, 22 nt, Synthetic Construct
  source 1..22: mol_type = other RNA
tagcagcacgtaaatataggcg

SEQ ID NO: 30102 - RNA, 22 nt, Synthetic Construct
  source 1..22: mol_type = other RNA
tagcagcacgtaaatataggcg

SEQ ID NO: 30103 - RNA, 22 nt, Synthetic Construct
  source 1..22: mol_type = other RNA
cgaggtagtagtttgtgctgtt

SEQ ID NO: 30104 - RNA, 22 nt, Synthetic Construct
  source 1..22: mol_type = other RNA
tcctgtactgagctgctccgag

SEQ ID NO: 30105 - RNA, 22 nt, Synthetic Construct
  source 1..22: mol_type = other RNA
taacagtctacagccatggtcg

SEQ ID NO: 30106 - RNA, 23 nt, Synthetic Construct
  source 1..23: mol_type = other RNA
tctttgttcgattccgttgagta

SEQ ID NO: 30107 - RNA, 22 nt, Synthetic Construct
  source 1..22: mol_type = other RNA
tcggatccgtctgagcttggct

SEQ ID NO: 30108 - RNA, 22 nt, Synthetic Construct
  source 1..22: mol_type = other RNA
tcggatccgtctgagcttggct

SEQ ID NO: 30109 - RNA, 27 nt, Synthetic Construct
  source 1..27: mol_type = other RNA
cagagttctacagtccgacgatcgatc

SEQ ID NO: 30110 - RNA, 27 nt, Synthetic Construct
  source 1..27: mol_type = other RNA
cagagttctacagtccgacgatcgatc

SEQ ID NO: 30111 - RNA, 22 nt, Synthetic Construct
  source 1..22: mol_type = other RNA
tcagtgcactacagagctttgt

SEQ ID NO: 30112 - RNA, 24 nt, Synthetic Construct
  source 1..24: mol_type = other RNA
tgagaactgaattccatgggttga

SEQ ID NO: 30113 - RNA, 24 nt, Synthetic Construct
  source 1..24: mol_type = other RNA
tgagaactgaattccatgggttga

SEQ ID NO: 30114 - RNA, 21 nt, Synthetic Construct
  source 1..21: mol_type = other RNA
tgaggaagtaggttgtatagt

SEQ ID NO: 30115 - RNA, 22 nt, Synthetic Construct
  source 1..22: mol_type = other RNA
tcgtaccgtgagtaataatgcg

SEQ ID NO: 30116 - RNA, 22 nt, Synthetic Construct
  source 1..22: mol_type = other RNA
tcgtaccgtgagtaataatgcg

SEQ ID NO: 30117 - RNA, 22 nt, Synthetic Construct
  source 1..22: mol_type = other RNA
tggaatgcaaagaagtatgtat

SEQ ID NO: 30118 - RNA, 22 nt, Synthetic Construct
  source 1..22: mol_type = other RNA
tatcgcacttgtcccggcctgt

SEQ ID NO: 30119 - RNA, 22 nt, Synthetic Construct
  source 1..22: mol_type = other RNA
tatcgcacttgtcccggcctgt

SEQ ID NO: 30120 - RNA, 22 nt, Synthetic Construct
  source 1..22: mol_type = other RNA
cgcgacctcagatcagacgtgg

SEQ ID NO: 30121 - RNA, 22 nt, Synthetic Construct
  source 1..22: mol_type = other RNA
cgcgacctcagatcagacgtgg

SEQ ID NO: 30122 - RNA, 32 nt, Synthetic Construct; identical to SEQ ID NO: 18425
  source 1..32: mol_type = other RNA

SEQ ID NO: 30123 - RNA, 20 nt, Synthetic Construct
  source 1..20: mol_type = other RNA
tgaagtagtaggttgtgtgg

SEQ ID NO: 30124 - RNA, 23 nt, Synthetic Construct
  source 1..23: mol_type = other RNA
tgaggggcagagagcgagacttc

SEQ ID NO: 30125 - RNA, 23 nt, Synthetic Construct
  source 1..23: mol_type = other RNA
tgaggggcagagagcgagacttc

SEQ ID NO: 30126 - RNA, 23 nt, Synthetic Construct
  source 1..23: mol_type = other RNA
taccctgtagaaccgaatttgtg

SEQ ID NO: 30127 - RNA, 23 nt, Synthetic Construct
  source 1..23: mol_type = other RNA
taccctgtagaaccgaatttgtg

SEQ ID NO: 30128 - RNA, 23 nt, Synthetic Construct
  source 1..23: mol_type = other RNA
tgggctaagggagatgattgggt

SEQ ID NO: 30129 - RNA, 27 nt, Synthetic Construct
  source 1..27: mol_type = other RNA
ccccccactgctaaatttggctggcta

SEQ ID NO: 30130 - RNA, 27 nt, Synthetic Construct
  source 1..27: mol_type = other RNA
ccccccactgctaaatttggctggcta

SEQ ID NO: 30131 - RNA, 19 nt, Synthetic Construct
  source 1..19: mol_type = other RNA
agctacattgtctgctggg

SEQ ID NO: 30132 - RNA, 19 nt, Synthetic Construct
  source 1..19: mol_type = other RNA
agctacattgtctgctggg

SEQ ID NO: 30133 - RNA, 20 nt, Synthetic Construct
  source 1..20: mol_type = other RNA
atcacattgccagggatttc

SEQ ID NO: 30134 - RNA, 20 nt, Synthetic Construct
  source 1..20: mol_type = other RNA
atcacattgccagggatttc

SEQ ID NO: 30135 - RNA, 22 nt, Synthetic Construct
  source 1..22: mol_type = other RNA
tggaatgtaaagaagcatgtat

SEQ ID NO: 30136 - RNA, 22 nt, Synthetic Construct
  source 1..22: mol_type = other RNA
tggaatgtaaagaagcatgtat

SEQ ID NO: 30137 - RNA, 20 nt, Synthetic Construct
  source 1..20: mol_type = other RNA
tgagatagtaggttgtgtgg

SEQ ID NO: 30138 - RNA, 20 nt, Synthetic Construct
  source 1..20: mol_type = other RNA
tgagatagtaggttgtgtgg

SEQ ID NO: 30139 - RNA, 19 nt, Synthetic Construct
  source 1..19: mol_type = other RNA
tcagtagctcgaggaaaag

SEQ ID NO: 30140 - RNA, 21 nt, Synthetic Construct
  source 1..21: mol_type = other RNA
ctaatcccagaaacccggtcg

SEQ ID NO: 30141 - RNA, 21 nt, Synthetic Construct
  source 1..21: mol_type = other RNA
ctaatcccagaaacccggtcg

SEQ ID NO: 30142 - RNA, 16 nt, Synthetic Construct
  source 1..16: mol_type = other RNA
tgcaagtcgaacggta

SEQ ID NO: 30143 - RNA, 22 nt, Synthetic Construct
  source 1..22: mol_type = other RNA
tattgcacttgtcccagcctgt

SEQ ID NO: 30144 - RNA, 22 nt, Synthetic Construct
  source 1..22: mol_type = other RNA
tattgcacttgtcccagcctgt

SEQ ID NO: 30145 - RNA, 23 nt, Synthetic Construct
  source 1..23: mol_type = other RNA
tcctgcactgagctgccccgaga

SEQ ID NO: 30146 - RNA, 22 nt, Synthetic Construct
  source 1..22: mol_type = other RNA
tcctgtacagagctgccccgag

SEQ ID NO: 30147 - RNA, 22 nt, Synthetic Construct
  source 1..22: mol_type = other RNA
tcctgtacagagctgccccgag

SEQ ID NO: 30148 - RNA, 22 nt, Synthetic Construct
  source 1..22: mol_type = other RNA
tcctgtactgaactgccccgag

SEQ ID NO: 30149 - RNA, 26 nt, Synthetic Construct
  source 1..26: mol_type = other RNA
ccccccactgctaatttgactggctt

SEQ ID NO: 30150 - RNA, 26 nt, Synthetic Construct
  source 1..26: mol_type = other RNA
ccccccactgctaatttgactggctt

SEQ ID NO: 30151 - RNA, 17 nt, Synthetic Construct
  source 1..17: mol_type = other RNA
tcccagaaacccggtcg

SEQ ID NO: 30152 - RNA, 35 nt, Synthetic Construct; identical to SEQ ID NO: 1095
  source 1..35: mol_type = other RNA

SEQ ID NO: 30153 - RNA, 16 nt, Synthetic Construct
  source 1..16: mol_type = other RNA
gtctacagccatacca

SEQ ID NO: 30154 - RNA, 28 nt, Synthetic Construct
  source 1..28: mol_type = other RNA
gtggcattgccgagtagctaagtgcgga

SEQ ID NO: 30155 - RNA, 28 nt, Synthetic Construct
  source 1..28: mol_type = other RNA
gtggcattgccgagtagctaagtgcgga

SEQ ID NO: 30156 - RNA, 23 nt, Synthetic Construct
  source 1..23: mol_type = other RNA
tggtagtacgacgtacttagtgt

SEQ ID NO: 30157 - RNA, 15 nt, Synthetic Construct
  source 1..15: mol_type = other RNA
gctagtaatcgcgga

SEQ ID NO: 30158 - RNA, 15 nt, Synthetic Construct
  source 1..15: mol_type = other RNA
gctagtaatcgcgga

SEQ ID NO: 30159 - RNA, 22 nt, Synthetic Construct
  source 1..22: mol_type = other RNA
tgaggtggtaggttgtatagtt

SEQ ID NO: 30160 - RNA, 22 nt, Synthetic Construct
  source 1..22: mol_type = other RNA
tgaggtggtaggttgtatagtt

SEQ ID NO: 30161 - RNA, 21 nt, Synthetic Construct
  source 1..21: mol_type = other RNA
tgaggtagtaggttgtgtggc

SEQ ID NO: 30162 - RNA, 21 nt, Synthetic Construct
  source 1..21: mol_type = other RNA
tgaggtagtaggttgtgtggc

SEQ ID NO: 30163 - RNA, 24 nt, Synthetic Construct
  source 1..24: mol_type = other RNA
agcaacattgtctgctgggtttct

SEQ ID NO: 30164 - RNA, 21 nt, Synthetic Construct
  source 1..21: mol_type = other RNA
tgaggtagtaggttgtataga

SEQ ID NO: 30165 - RNA, 21 nt, Synthetic Construct
  source 1..21: mol_type = other RNA
tgaggtagtaggttgtataga

SEQ ID NO: 30166 - RNA, 27 nt, Synthetic Construct
  source 1..27: mol_type = other RNA
ccccccactgctaaatctgactggctt

SEQ ID NO: 30167 - RNA, 23 nt, Synthetic Construct
  source 1..23: mol_type = other RNA
tgaggggcagggagcgagacttt

SEQ ID NO: 30168 - RNA, 23 nt, Synthetic Construct
  source 1..23: mol_type = other RNA
tgaggggcagggagcgagacttt

SEQ ID NO: 30169 - RNA, 22 nt, Synthetic Construct
  source 1..22: mol_type = other RNA
caacggaatcccaaaagcagct

SEQ ID NO: 30170 - RNA, 22 nt, Synthetic Construct
  source 1..22: mol_type = other RNA
tattgcgcttgtcccggcctgt

SEQ ID NO: 30171 - RNA, 31 nt, Synthetic Construct; identical to SEQ ID NO: 2310
  source 1..31: mol_type = other RNA

SEQ ID NO: 30172 - RNA, 31 nt, Synthetic Construct; identical to SEQ ID NO: 2310
  source 1..31: mol_type = other RNA

SEQ ID NO: 30173 - RNA, 34 nt, Synthetic Construct; identical to SEQ ID NO: 2183
  source 1..34: mol_type = other RNA

SEQ ID NO: 30174 - RNA, 31 nt, Synthetic Construct; identical to SEQ ID NO: 2507
  source 1..31: mol_type = other RNA

SEQ ID NO: 30175 - RNA, 31 nt, Synthetic Construct; identical to SEQ ID NO: 2507
  source 1..31: mol_type = other RNA

SEQ ID NO: 30176 - RNA, 20 nt, Synthetic Construct
  source 1..20: mol_type = other RNA
tgaggtggtaggttgtgtgg

SEQ ID NO: 30177 - RNA, 22 nt, Synthetic Construct
  source 1..22: mol_type = other RNA
tcctgtactgagctgccccgtg

SEQ ID NO: 30178 - RNA, 22 nt, Synthetic Construct
  source 1..22: mol_type = other RNA
tcctgtactgagctgccccgtg

SEQ ID NO: 30179 - RNA, 21 nt, Synthetic Construct
  source 1..21: mol_type = other RNA
ctagactgaggctccttgagg

SEQ ID NO: 30180 - RNA, 21 nt, Synthetic Construct
  source 1..21: mol_type = other RNA
tcctgtaccgagctgccccga

SEQ ID NO: 30181 - RNA, 21 nt, Synthetic Construct
  source 1..21: mol_type = other RNA
tcctgtaccgagctgccccga

SEQ ID NO: 30182 - RNA, 17 nt, Synthetic Construct
  source 1..17: mol_type = other RNA
taggtcatcgtcaggct

SEQ ID NO: 30183 - RNA, 21 nt, Synthetic Construct
  source 1..21: mol_type = other RNA
tgaagtagtaggttgtgtggt

SEQ ID NO: 30184 - RNA, 21 nt, Synthetic Construct
  source 1..21: mol_type = other RNA
cctctgggcccttcctccagt

SEQ ID NO: 30185 - RNA, 21 nt, Synthetic Construct
  source 1..21: mol_type = other RNA
cctctgggcccttcctccagt

SEQ ID NO: 30186 - RNA, 21 nt, Synthetic Construct
  source 1..21: mol_type = other RNA
tcctgtactgagccgccccga

SEQ ID NO: 30187 - RNA, 21 nt, Synthetic Construct
  source 1..21: mol_type = other RNA
tcctgtactgagccgccccga

SEQ ID NO: 30188 - RNA, 20 nt, Synthetic Construct
  source 1..20: mol_type = other RNA
ttcacagtggctaagttctg

SEQ ID NO: 30189 - RNA, 22 nt, Synthetic Construct
  source 1..22: mol_type = other RNA
aatggcgccactagggttgtgt

SEQ ID NO: 30190 - RNA, 22 nt, Synthetic Construct
  source 1..22: mol_type = other RNA
tgaggtagtagtttgtgctgtc

SEQ ID NO: 30191 - RNA, 22 nt, Synthetic Construct
  source 1..22: mol_type = other RNA
tgaggtagtagtttgtgctgtc

SEQ ID NO: 30192 - RNA, 19 nt, Synthetic Construct
  source 1..19: mol_type = other RNA
cctgtaccgatcaatagtg

SEQ ID NO: 30193 - RNA, 32 nt, Synthetic Construct; identical to SEQ ID NO: 770
  source 1..32: mol_type = other RNA

SEQ ID NO: 30194 - RNA, 15 nt, Synthetic Construct
  source 1..15: mol_type = other RNA
tcagtagctcgagga

SEQ ID NO: 30195 - RNA, 22 nt, Synthetic Construct
  source 1..22: mol_type = other RNA
tggaatgtaaagaagtatgtaa

SEQ ID NO: 30196 - RNA, 22 nt, Synthetic Construct
  source 1..22: mol_type = other RNA
tggaatgtaaagaagtatgtaa

SEQ ID NO: 30197 - RNA, 22 nt, Synthetic Construct
  source 1..22: mol_type = other RNA
tgaggtagtaggttgcgtggtt

SEQ ID NO: 30198 - RNA, 22 nt, Synthetic Construct
  source 1..22: mol_type = other RNA
tgaggtagtaggttgcgtggtt

SEQ ID NO: 30199 - RNA, 22 nt, Synthetic Construct
  source 1..22: mol_type = other RNA
ttcaagtaattaaggataggtt

SEQ ID NO: 30200 - RNA, 23 nt, Synthetic Construct
  source 1..23: mol_type = other RNA
tgaggggcagagagcgagacttc

SEQ ID NO: 30201 - RNA, 15 nt, Synthetic Construct
  source 1..15: mol_type = other RNA
gtccggatcgtagtc

SEQ ID NO: 30202 - RNA, 25 nt, Synthetic Construct
  source 1..25: mol_type = other RNA
gggttgtaaaccgcttttgtcaggg

SEQ ID NO: 30203 - RNA, 25 nt, Synthetic Construct
  source 1..25: mol_type = other RNA
gggttgtaaaccgcttttgtcaggg

SEQ ID NO: 30204 - RNA, 24 nt, Synthetic Construct
  source 1..24: mol_type = other RNA
tggaagactagtgattttgttgtt

SEQ ID NO: 30205 - RNA, 34 nt, Synthetic Construct; identical to SEQ ID NO: 2291
  source 1..34: mol_type = other RNA

SEQ ID NO: 30206 - RNA, 34 nt, Synthetic Construct; identical to SEQ ID NO: 2291
  source 1..34: mol_type = other RNA

SEQ ID NO: 30207 - RNA, 21 nt, Synthetic Construct
  source 1..21: mol_type = other RNA
tcatgtactgagctgccccga

SEQ ID NO: 30208 - RNA, 21 nt, Synthetic Construct
  source 1..21: mol_type = other RNA
tcatgtactgagctgccccga

SEQ ID NO: 30209 - RNA, 23 nt, Synthetic Construct
  source 1..23: mol_type = other RNA
tgaggtagtagtttgtacagttg

SEQ ID NO: 30210 - RNA, 23 nt, Synthetic Construct
  source 1..23: mol_type = other RNA
tgaggtagtagtttgtacagttg

SEQ ID NO: 30211 - RNA, 17 nt, Synthetic Construct
  source 1..17: mol_type = other RNA
atgcaagtcgaacggta

SEQ ID NO: 30212 - RNA, 23 nt, Synthetic Construct
  source 1..23: mol_type = other RNA
tgaggtagtagtttgtacagttg

SEQ ID NO: 30213 - RNA, 23 nt, Synthetic Construct
  source 1..23: mol_type = other RNA
tgaggtagtagtttgtacagttg

SEQ ID NO: 30214 - RNA, 22 nt, Synthetic Construct
  source 1..22: mol_type = other RNA
cactgcacttgtctcggtctga

SEQ ID NO: 30215 - RNA, 22 nt, Synthetic Construct
  source 1..22: mol_type = other RNA
cactgcacttgtctcggtctga

SEQ ID NO: 30216 - RNA, 16 nt, Synthetic Construct
  source 1..16: mol_type = other RNA
cccagaaacccggtcg

SEQ ID NO: 30217 - RNA, 22 nt, Synthetic Construct
  source 1..22: mol_type = other RNA
tgaggtagtagtctgtgctgtt

SEQ ID NO: 30218 - RNA, 22 nt, Synthetic Construct
  source 1..22: mol_type = other RNA
tgagatagtaggttgtgtggtt

SEQ ID NO: 30219 - RNA, 22 nt, Synthetic Construct
  source 1..22: mol_type = other RNA
tgagatagtaggttgtgtggtt

SEQ ID NO: 30220 - RNA, 24 nt, Synthetic Construct
  source 1..24: mol_type = other RNA
gtctttgttcgattccgttgagta

SEQ ID NO: 30221 - RNA, 20 nt, Synthetic Construct
  source 1..20: mol_type = other RNA
tgaggtagtaggttgcatag

SEQ ID NO: 30222 - RNA, 20 nt, Synthetic Construct
  source 1..20: mol_type = other RNA
tgaggtagtaggttgcatag

SEQ ID NO: 30223 - RNA, 22 nt, Synthetic Construct
  source 1..22: mol_type = other RNA
ngaggtagtagattgtatagtt

SEQ ID NO: 30224 - RNA, 22 nt, Synthetic Construct
  source 1..22: mol_type = other RNA
ngaggtagtagattgtatagtt

SEQ ID NO: 30225 - RNA, 30 nt, Synthetic Construct; identical to SEQ ID NO: 1535
  source 1..30: mol_type = other RNA

SEQ ID NO: 30226 - RNA, 29 nt, Synthetic Construct
  source 1..29: mol_type = other RNA
gtgcatgcactctggggttgtgggacagc

SEQ ID NO: 30227 - RNA, 29 nt, Synthetic Construct
  source 1..29: mol_type = other RNA
gtgcatgcactctggggttgtgggacagc

SEQ ID NO: 30228 - RNA, 17 nt, Synthetic Construct
  source 1..17: mol_type = other RNA
accggaggaaggtgggg

SEQ ID NO: 30229 - RNA, 17 nt, Synthetic Construct
  source 1..17: mol_type = other RNA
accggaggaaggtgggg

SEQ ID NO: 30230 - RNA, 20 nt, Synthetic Construct
  source 1..20: mol_type = other RNA
cccataaagtagaaagcact

SEQ ID NO: 30231 - RNA, 20 nt, Synthetic Construct
  source 1..20: mol_type = other RNA
cccataaagtagaaagcact

SEQ ID NO: 30232 - RNA, 23 nt, Synthetic Construct
  source 1..23: mol_type = other RNA
tcctgcactgagctgccccgaga

SEQ ID NO: 30233 - RNA, 23 nt, Synthetic Construct
  source 1..23: mol_type = other RNA
tcctgcactgagctgccccgaga

SEQ ID NO: 30234 - RNA, 22 nt, Synthetic Construct
  source 1..22: mol_type = other RNA
tagcttatcagactgatgttgg

SEQ ID NO: 30235 - RNA, 22 nt, Synthetic Construct
  source 1..22: mol_type = other RNA
tgaggtagtaggatgtgtggtt

SEQ ID NO: 30236 - RNA, 22 nt, Synthetic Construct
  source 1..22: mol_type = other RNA
tcctgtactgagcagccccgag

SEQ ID NO: 30237 - RNA, 22 nt, Synthetic Construct
  source 1..22: mol_type = other RNA
tcctgtactgagcagccccgag

SEQ ID NO: 30238 - RNA, 22 nt, Synthetic Construct
  source 1..22: mol_type = other RNA
tccctgagaccctaacttgtgt

SEQ ID NO: 30239 - RNA, 23 nt, Synthetic Construct
  source 1..23: mol_type = other RNA
tacagtagtctgcacattggtta

SEQ ID NO: 30240 - RNA, 23 nt, Synthetic Construct
  source 1..23: mol_type = other RNA
tggtaatacgacgtacatagtgt

SEQ ID NO: 30241 - RNA, 23 nt, Synthetic Construct
  source 1..23: mol_type = other RNA
tggtaatacgacgtacatagtgt

SEQ ID NO: 30242 - RNA, 21 nt, Synthetic Construct
  source 1..21: mol_type = other RNA
tggcagtgtcttagctggttg

SEQ ID NO: 30243 - RNA, 22 nt, Synthetic Construct
  source 1..22: mol_type = other RNA
tgaggcagtaggttgtgtggtt

SEQ ID NO: 30244 - RNA, 28 nt, Synthetic Construct
  source 1..28: mol_type = other RNA
gtggcattgccgagtagctaagtgcgga

SEQ ID NO: 30245 - RNA, 28 nt, Synthetic Construct
  source 1..28: mol_type = other RNA
gtggcattgccgagtagctaagtgcgga

SEQ ID NO: 30246 - RNA, 21 nt, Synthetic Construct
  source 1..21: mol_type = other RNA
tgaggtagtagtttgtgccgt

SEQ ID NO: 30247 - RNA, 21 nt, Synthetic Construct
  source 1..21: mol_type = other RNA
tgaggtagtagtttgtgccgt

SEQ ID NO: 30248 - RNA, 22 nt, Synthetic Construct
  source 1..22: mol_type = other RNA
tcaagagcaataacgaaaaatg

SEQ ID NO: 30249 - RNA, 22 nt, Synthetic Construct
  source 1..22: mol_type = other RNA
tgaggtagcaggttgtgtggtt

SEQ ID NO: 30250 - RNA, 21 nt, Synthetic Construct
  source 1..21: mol_type = other RNA
tcctgtactgagttgccccga

SEQ ID NO: 30251 - RNA, 21 nt, Synthetic Construct
  source 1..21: mol_type = other RNA
tcctgtactgagttgccccga

SEQ ID NO: 30252 - RNA, 15 nt, Synthetic Construct
  source 1..15: mol_type = other RNA
gtctcgccgacggca

SEQ ID NO: 30253 - RNA, 15 nt, Synthetic Construct
  source 1..15: mol_type = other RNA
tcagtagctcgagga

SEQ ID NO: 30254 - RNA, 36 nt, Synthetic Construct; identical to SEQ ID NO: 744
  source 1..36: mol_type = other RNA

SEQ ID NO: 30255 - RNA, 36 nt, Synthetic Construct; identical to SEQ ID NO: 744
  source 1..36: mol_type = other RNA

SEQ ID NO: 30256 - RNA, 23 nt, Synthetic Construct
  source 1..23: mol_type = other RNA
tcctgtactgagctgccccgagc

SEQ ID NO: 30257 - RNA, 23 nt, Synthetic Construct
  source 1..23: mol_type = other RNA
tcctgtactgagctgccccgagc

SEQ ID NO: 30258 - RNA, 23 nt, Synthetic Construct
  source 1..23: mol_type = other RNA
tgtcagtttgtcaaataccccaa

SEQ ID NO: 30259 - RNA, 16 nt, Synthetic Construct
  source 1..16: mol_type = other RNA
tccggatcgtagtctg

SEQ ID NO: 30260 - RNA, 23 nt, Synthetic Construct
  source 1..23: mol_type = other RNA
aggtaatacgacgtacttagtgt

SEQ ID NO: 30261 - RNA, 23 nt, Synthetic Construct
  source 1..23: mol_type = other RNA
tgaggtggtaggttgtgtggttt

SEQ ID NO: 30262 - RNA, 23 nt, Synthetic Construct
  source 1..23: mol_type = other RNA
aacggaatcccaaaagcagctgt

SEQ ID NO: 30263 - RNA, 23 nt, Synthetic Construct
  source 1..23: mol_type = other RNA
aacggaatcccaaaagcagctgt

SEQ ID NO: 30264 - RNA, 29 nt, Synthetic Construct
  source 1..29: mol_type = other RNA
cgggatggggacagtgtatggtgggcagt

SEQ ID NO: 30265 - RNA, 29 nt, Synthetic Construct
  source 1..29: mol_type = other RNA
cgggatggggacagtgtatggtgggcagt

SEQ ID NO: 30266 - RNA, 23 nt, Synthetic Construct
  source 1..23: mol_type = other RNA
tggtaatacgacgtactaagtgt

SEQ ID NO: 30267 - RNA, 23 nt, Synthetic Construct
  source 1..23: mol_type = other RNA
tggtaatacgacgtactaagtgt

SEQ ID NO: 30268 - RNA, 23 nt, Synthetic Construct
  source 1..23: mol_type = other RNA
tcccacatggtctagcggttagg

SEQ ID NO: 30269 - RNA, 16 nt, Synthetic Construct
  source 1..16: mol_type = other RNA
acggcgggagtaacta

SEQ ID NO: 30270 - RNA, 16 nt, Synthetic Construct
  source 1..16: mol_type = other RNA
acggcgggagtaacta

SEQ ID NO: 30271 - RNA, 23 nt, Synthetic Construct
  source 1..23: mol_type = other RNA
taactccttaagcgaatctcggc

SEQ ID NO: 30272 - RNA, 24 nt, Synthetic Construct
  source 1..24: mol_type = other RNA
tgtaaacatccccggctggaagct

SEQ ID NO: 30273 - RNA, 22 nt, Synthetic Construct
  source 1..22: mol_type = other RNA
tacgcctgtctgagcgtcgctt

SEQ ID NO: 30274 - RNA, 22 nt, Synthetic Construct
  source 1..22: mol_type = other RNA
tacgcctgtctgagcgtcgctt

SEQ ID NO: 30275 - RNA, 24 nt, Synthetic Construct
  source 1..24: mol_type = other RNA
tgaggtagtaggttgtgtggttaa

SEQ ID NO: 30276 - RNA, 24 nt, Synthetic Construct
  source 1..24: mol_type = other RNA
tgaggtagtaggttgtgtggttaa

SEQ ID NO: 30277 - RNA, 24 nt, Synthetic Construct
  source 1..24: mol_type = other RNA
cgactcttagcggtggatcactcg

SEQ ID NO: 30278 - RNA, 31 nt, Synthetic Construct; identical to SEQ ID NO: 2427
  source 1..31: mol_type = other RNA

SEQ ID NO: 30279 - RNA, 31 nt, Synthetic Construct; identical to SEQ ID NO: 2427
  source 1..31: mol_type = other RNA

SEQ ID NO: 30280 - RNA, 23 nt, Synthetic Construct
  source 1..23: mol_type = other RNA
tgaggtagtaggttgtgtggtct

SEQ ID NO: 30281 - RNA, 23 nt, Synthetic Construct
  source 1..23: mol_type = other RNA
tgaggtagtaggttgtgtggtct

SEQ ID NO: 30282 - RNA, 44 nt, Synthetic Construct; identical to SEQ ID NO: 722
  source 1..44: mol_type = other RNA

SEQ ID NO: 30283 - RNA, 44 nt, Synthetic Construct; identical to SEQ ID NO: 722
  source 1..44: mol_type = other RNA

SEQ ID NO: 30284 - RNA, 21 nt, Synthetic Construct
  source 1..21: mol_type = other RNA
tcctgtactgagctgcctcga

SEQ ID NO: 30285 - RNA, 22 nt, Synthetic Construct
  source 1..22: mol_type = other RNA
tgaggtagtaggttgtgtggct

SEQ ID NO: 30286 - RNA, 28 nt, Synthetic Construct
  source 1..28: mol_type = other RNA
tcccacatggtctagcggttaggattcc

SEQ ID NO: 30287 - RNA, 24 nt, Synthetic Construct
  source 1..24: mol_type = other RNA
cgaatgttgctcggtgaacccctt

SEQ ID NO: 30288 - RNA, 24 nt, Synthetic Construct
  source 1..24: mol_type = other RNA
cgaatgttgctcggtgaacccctt

SEQ ID NO: 30289 - RNA, 21 nt, Synthetic Construct
  source 1..21: mol_type = other RNA
ggaggggcagagagcgagact

SEQ ID NO: 30290 - RNA, 15 nt, Synthetic Construct
  source 1..15: mol_type = other RNA
tcctgacggccatag

SEQ ID NO: 30291 - RNA, 15 nt, Synthetic Construct
  source 1..15: mol_type = other RNA
tgcaagtcgaacggt

SEQ ID NO: 30292 - RNA, 39 nt, Synthetic Construct; identical to SEQ ID NO: 2398
  source 1..39: mol_type = other RNA

SEQ ID NO: 30293 - RNA, 39 nt, Synthetic Construct; identical to SEQ ID NO: 2398
  source 1..39: mol_type = other RNA

SEQ ID NO: 30294 - RNA, 23 nt, Synthetic Construct
  source 1..23: mol_type = other RNA
tcctatactgagctgccccgaga

SEQ ID NO: 30295 - RNA, 23 nt, Synthetic Construct
  source 1..23: mol_type = other RNA
tcctatactgagctgccccgaga

SEQ ID NO: 30296 - RNA, 22 nt, Synthetic Construct
  source 1..22: mol_type = other RNA
tcctgtactgagccgccccgag

SEQ ID NO: 30297 - RNA, 22 nt, Synthetic Construct
  source 1..22: mol_type = other RNA
tagcagcacgtagatattggcg

SEQ ID NO: 30298 - RNA, 22 nt, Synthetic Construct
  source 1..22: mol_type = other RNA
tagcagcacgtagatattggcg

SEQ ID NO: 30299 - RNA, 21 nt, Synthetic Construct
  source 1..21: mol_type = other RNA
tgaggtagtagtttgtgctga

SEQ ID NO: 30300 - RNA, 39 nt, Synthetic Construct; identical to SEQ ID NO: 804
  source 1..39: mol_type = other RNA

SEQ ID NO: 30301 - RNA, 39 nt, Synthetic Construct; identical to SEQ ID NO: 804
  source 1..39: mol_type = other RNA

SEQ ID NO: 30302 - RNA, 22 nt, Synthetic Construct
  source 1..22: mol_type = other RNA
tgaggaagtagtttgtgctgtt

SEQ ID NO: 30303 - RNA, 27 nt, Synthetic Construct
  source 1..27: mol_type = other RNA
tcggctgttaaccgaaaggttggtggt

SEQ ID NO: 30304 - RNA, 24 nt, Synthetic Construct
  source 1..24: mol_type = other RNA
acctggcatacaatgtagatttct

SEQ ID NO: 30305 - RNA, 22 nt, Synthetic Construct
  source 1..22: mol_type = other RNA
tgaggtagtaggctgtgtggtt

SEQ ID NO: 30306 - RNA, 22 nt, Synthetic Construct
  source 1..22: mol_type = other RNA
tgaggtagtaggctgtgtggtt

SEQ ID NO: 30307 - RNA, 23 nt, Synthetic Construct
  source 1..23: mol_type = other RNA
tcatgtactgagctgccccgaga

SEQ ID NO: 30308 - RNA, 23 nt, Synthetic Construct
  source 1..23: mol_type = other RNA
tcatgtactgagctgccccgaga

SEQ ID NO: 30309 - RNA, 23 nt, Synthetic Construct
  source 1..23: mol_type = other RNA
aacggaatcccaaaagcagctgt

SEQ ID NO: 30310 - RNA, 22 nt, Synthetic Construct
  source 1..22: mol_type = other RNA
atataatacaacctgctaagtg

SEQ ID NO: 30311 - RNA, 22 nt, Synthetic Construct
  source 1..22: mol_type = other RNA
atataatacaacctgctaagtg

SEQ ID NO: 30312 - RNA, 24 nt, Synthetic Construct
  source 1..24: mol_type = other RNA
aaaagctgggttgagagggcgaaa

SEQ ID NO: 30313 - RNA, 24 nt, Synthetic Construct
  source 1..24: mol_type = other RNA
aaaagctgggttgagagggcgaaa

SEQ ID NO: 30314 - RNA, 23 nt, Synthetic Construct
  source 1..23: mol_type = other RNA
cgaggggcagagagcgagacttt

SEQ ID NO: 30315 - RNA, 23 nt, Synthetic Construct
  source 1..23: mol_type = other RNA
tgaggcagtaggttgtgtggttt

SEQ ID NO: 30316 - RNA, 22 nt, Synthetic Construct
  source 1..22: mol_type = other RNA
tacagtagtctgcacattggtt

SEQ ID NO: 30317 - RNA, 22 nt, Synthetic Construct
  source 1..22: mol_type = other RNA
tccccttggggttgtaggacca

SEQ ID NO: 30318 - RNA, 22 nt, Synthetic Construct
  source 1..22: mol_type = other RNA
tccccttggggttgtaggacca

SEQ ID NO: 30319 - RNA, 20 nt, Synthetic Construct
  source 1..20: mol_type = other RNA
tgaggtagtaggttgcgtgg

SEQ ID NO: 30320 - RNA, 22 nt, Synthetic Construct
  source 1..22: mol_type = other RNA
gagagcctggacacaggtgctg

SEQ ID NO: 30321 - RNA, 22 nt, Synthetic Construct
  source 1..22: mol_type = other RNA
gagagcctggacacaggtgctg

SEQ ID NO: 30322 - RNA, 20 nt, Synthetic Construct
  source 1..20: mol_type = other RNA
cgaggtagtaggttgtatag

SEQ ID NO: 30323 - RNA, 20 nt, Synthetic Construct
  source 1..20: mol_type = other RNA
cgaggtagtaggttgtatag

SEQ ID NO: 30324 - RNA, 20 nt, Synthetic Construct
  source 1..20: mol_type = other RNA
cccataaagtagaaagcact

SEQ ID NO: 30325 - RNA, 20 nt, Synthetic Construct
  source 1..20: mol_type = other RNA
cccataaagtagaaagcact

SEQ ID NO: 30326 - RNA, 15 nt, Synthetic Construct
  source 1..15: mol_type = other RNA
gagctgtggataggg

SEQ ID NO: 30327 - RNA, 15 nt, Synthetic Construct
  source 1..15: mol_type = other RNA
gagctgtggataggg

SEQ ID NO: 30328 - RNA, 23 nt, Synthetic Construct
  source 1..23: mol_type = other RNA
caaagtgctgttcgtgcaggtgg

SEQ ID NO: 30329 - RNA, 23 nt, Synthetic Construct
  source 1..23: mol_type = other RNA
caaagtgctgttcgtgcaggtgg

SEQ ID NO: 30330 - RNA, 18 nt, Synthetic Construct
  source 1..18: mol_type = other RNA
gctgtgatggccgagtgg

SEQ ID NO: 30331 - RNA, 18 nt, Synthetic Construct
  source 1..18: mol_type = other RNA
gctgtgatggccgagtgg

SEQ ID NO: 30332 - RNA, 22 nt, Synthetic Construct
  source 1..22: mol_type = other RNA
tcctgtactgagctaccccgag

SEQ ID NO: 30333 - RNA, 22 nt, Synthetic Construct
  source 1..22: mol_type = other RNA
tcctgtactgagctaccccgag

SEQ ID NO: 30334 - RNA, 23 nt, Synthetic Construct
  source 1..23: mol_type = other RNA
tcccgtactgagctgccccgagt

SEQ ID NO: 30335 - RNA, 23 nt, Synthetic Construct
  source 1..23: mol_type = other RNA
tcccgtactgagctgccccgagt

SEQ ID NO: 30336 - RNA, 21 nt, Synthetic Construct
  source 1..21: mol_type = other RNA
tagcagcacgtaatattggcg

SEQ ID NO: 30337 - RNA, 22 nt, Synthetic Construct
  source 1..22: mol_type = other RNA
tggagtgtggcaatggtgtttg

SEQ ID NO: 30338 - RNA, 16 nt, Synthetic Construct
  source 1..16: mol_type = other RNA
gtctacggccgtacca

SEQ ID NO: 30339 - RNA, 16 nt, Synthetic Construct
  source 1..16: mol_type = other RNA
gtctacggccgtacca

SEQ ID NO: 30340 - RNA, 18 nt, Synthetic Construct
  source 1..18: mol_type = other RNA
aagaccctgttgagcttg

SEQ ID NO: 30341 - RNA, 18 nt, Synthetic Construct
  source 1..18: mol_type = other RNA
aagaccctgttgagcttg

SEQ ID NO: 30342 - RNA, 22 nt, Synthetic Construct
  source 1..22: mol_type = other RNA
cgttgcacttgtctcggtctga

SEQ ID NO: 30343 - RNA, 23 nt, Synthetic Construct
  source 1..23: mol_type = other RNA
tcggatccgtctgagcttggctt

SEQ ID NO: 30344 - RNA, 20 nt, Synthetic Construct
  source 1..20: mol_type = other RNA
ctctaatgagactgccggtg

SEQ ID NO: 30345 - RNA, 22 nt, Synthetic Construct
  source 1..22: mol_type = other RNA
tcctgtactgagccgccccgag

SEQ ID NO: 30346 - RNA, 21 nt, Synthetic Construct
  source 1..21: mol_type = other RNA
tgaggggcagagggcgagact

SEQ ID NO: 30347 - RNA, 41 nt, Synthetic Construct; identical to SEQ ID NO: 10630
  source 1..41: mol_type = other RNA

SEQ ID NO: 30348 - RNA, 41 nt, Synthetic Construct; identical to SEQ ID NO: 10630
  source 1..41: mol_type = other RNA

SEQ ID NO: 30349 - RNA, 35 nt, Synthetic Construct; identical to SEQ ID NO: 2269
  source 1..35: mol_type = other RNA

SEQ ID NO: 30350 - RNA, 35 nt, Synthetic Construct; identical to SEQ ID NO: 2269
  source 1..35: mol_type = other RNA

SEQ ID NO: 30351 - RNA, 32 nt, Synthetic Construct; identical to SEQ ID NO: 2850
  source 1..32: mol_type = other RNA

SEQ ID NO: 30352 - RNA, 32 nt, Synthetic Construct; identical to SEQ ID NO: 2850
  source 1..32: mol_type = other RNA

SEQ ID NO: 30353 - RNA, 22 nt, Synthetic Construct
  source 1..22: mol_type = other RNA
tgaggtagtaggttgtgtgatt

SEQ ID NO: 30354 - RNA, 22 nt, Synthetic Construct
  source 1..22: mol_type = other RNA
tgaggtagtaggttgtgtgatt

SEQ ID NO: 30355 - RNA, 32 nt, Synthetic Construct; identical to SEQ ID NO: 2850
  source 1..32: mol_type = other RNA

SEQ ID NO: 30356 - RNA, 32 nt, Synthetic Construct; identical to SEQ ID NO: 2850
  source 1..32: mol_type = other RNA

SEQ ID NO: 30357 - RNA, 22 nt, Synthetic Construct
  source 1..22: mol_type = other RNA
tagcagcacgcaaatattggcg

SEQ ID NO: 30358 - RNA, 22 nt, Synthetic Construct
  source 1..22: mol_type = other RNA
tagcagcacgcaaatattggcg

SEQ ID NO: 30359 - RNA, 39 nt, Synthetic Construct; identical to SEQ ID NO: 2398
  source 1..39: mol_type = other RNA

SEQ ID NO: 30360 - RNA, 39 nt, Synthetic Construct; identical to SEQ ID NO: 2398
  source 1..39: mol_type = other RNA

SEQ ID NO: 30361 - RNA, 23 nt, Synthetic Construct
  source 1..23: mol_type = other RNA
taatactgccgggtaatgatgga

SEQ ID NO: 30362 - RNA, 23 nt, Synthetic Construct
  source 1..23: mol_type = other RNA
taatactgccgggtaatgatgga

SEQ ID NO: 30363 - RNA, 21 nt, Synthetic Construct
  source 1..21: mol_type = other RNA
tccctgagaccctaacttgtg

SEQ ID NO: 30364 - RNA, 21 nt, Synthetic Construct
  source 1..21: mol_type = other RNA
tccctgagaccctaacttgtg

SEQ ID NO: 30365 - RNA, 22 nt, Synthetic Construct
  source 1..22: mol_type = other RNA
ctgggtcggtcgggctggggcg

SEQ ID NO: 30366 - RNA, 22 nt, Synthetic Construct
  source 1..22: mol_type = other RNA
ctgggtcggtcgggctggggcg

SEQ ID NO: 30367 - RNA, 33 nt, Synthetic Construct; identical to SEQ ID NO: 2266
  source 1..33: mol_type = other RNA

SEQ ID NO: 30368 - RNA, 33 nt, Synthetic Construct; identical to SEQ ID NO: 2266
  source 1..33: mol_type = other RNA

SEQ ID NO: 30369 - RNA, 21 nt, Synthetic Construct
  source 1..21: mol_type = other RNA
cggagtgtgacaatggtgttt

SEQ ID NO: 30370 - RNA, 21 nt, Synthetic Construct
  source 1..21: mol_type = other RNA
cggagtgtgacaatggtgttt

SEQ ID NO: 30371 - RNA, 34 nt, Synthetic Construct; identical to SEQ ID NO: 2553
  source 1..34: mol_type = other RNA

SEQ ID NO: 30372 - RNA, 22 nt, Synthetic Construct
  source 1..22: mol_type = other RNA
tcctgtaccgagctgccccgag

SEQ ID NO: 30373 - RNA, 22 nt, Synthetic Construct
  source 1..22: mol_type = other RNA
tcctgtaccgagctgccccgag

SEQ ID NO: 30374 - RNA, 20 nt, Synthetic Construct
  source 1..20: mol_type = other RNA
cacatgcaagtcgaacggta

SEQ ID NO: 30375 - RNA, 20 nt, Synthetic Construct
  source 1..20: mol_type = other RNA
gccatcatttaaagaaagcg

SEQ ID NO: 30376 - RNA, 18 nt, Synthetic Construct
  source 1..18: mol_type = other RNA
ggtagcgtggccgagcgg

SEQ ID NO: 30377 - RNA, 18 nt, Synthetic Construct
  source 1..18: mol_type = other RNA
ggtagcgtggccgagcgg

SEQ ID NO: 30378 - RNA, 23 nt, Synthetic Construct
  source 1..23: mol_type = other RNA
taaggggcagagagcgagacttt

SEQ ID NO: 30379 - RNA, 22 nt, Synthetic Construct
  source 1..22: mol_type = other RNA
tgaggtagtagtttgtgctgtc

SEQ ID NO: 30380 - RNA, 18 nt, Synthetic Construct
  source 1..18: mol_type = other RNA
caacggaatcccaaaagc

SEQ ID NO: 30381 - RNA, 18 nt, Synthetic Construct
  source 1..18: mol_type = other RNA
gtcaggatggccgagcgg

SEQ ID NO: 30382 - RNA, 21 nt, Synthetic Construct
  source 1..21: mol_type = other RNA
tctttggttatctagctgtat

SEQ ID NO: 30383 - RNA, 19 nt, Synthetic Construct
  source 1..19: mol_type = other RNA
cagcactctgcaaagacga

SEQ ID NO: 30384 - RNA, 21 nt, Synthetic Construct
  source 1..21: mol_type = other RNA
ccctgtactgagctgccccga

SEQ ID NO: 30385 - RNA, 21 nt, Synthetic Construct
  source 1..21: mol_type = other RNA
ccctgtactgagctgccccga

SEQ ID NO: 30386 - RNA, 36 nt, Synthetic Construct; identical to SEQ ID NO: 744
  source 1..36: mol_type = other RNA

SEQ ID NO: 30387 - RNA, 29 nt, Synthetic Construct
  source 1..29: mol_type = other RNA
ttacaggggttcgaatcccctaggggacg

SEQ ID NO: 30388 - RNA, 22 nt, Synthetic Construct
  source 1..22: mol_type = other RNA
tattgcacttgtcccggtctgt

SEQ ID NO: 30389 - RNA, 22 nt, Synthetic Construct
  source 1..22: mol_type = other RNA
tattgcacttgtcccggtctgt

SEQ ID NO: 30390 - RNA, 23 nt, Synthetic Construct
  source 1..23: mol_type = other RNA
ctcgtaccgtgagtaataatgcg

SEQ ID NO: 30391 - RNA, 32 nt, Synthetic Construct; identical to SEQ ID NO: 1237
  source 1..32: mol_type = other RNA

SEQ ID NO: 30392 - RNA, 18 nt, Synthetic Construct
  source 1..18: mol_type = other RNA
accggaggaaggtgggga

SEQ ID NO: 30393 - RNA, 18 nt, Synthetic Construct
  source 1..18: mol_type = other RNA
accggaggaaggtgggga

SEQ ID NO: 30394 - RNA, 22 nt, Synthetic Construct
  source 1..22: mol_type = other RNA
tgaggtagtaggttgtgcggtt

SEQ ID NO: 30395 - RNA, 22 nt, Synthetic Construct
  source 1..22: mol_type = other RNA
tgaggtagtaggttgtgcggtt

SEQ ID NO: 30396 - RNA, 22 nt, Synthetic Construct
  source 1..22: mol_type = other RNA
tccccttggggttgtaggacca

SEQ ID NO: 30397 - RNA, 22 nt, Synthetic Construct
  source 1..22: mol_type = other RNA
tccccttggggttgtaggacca

SEQ ID NO: 30398 - RNA, 21 nt, Synthetic Construct
  source 1..21: mol_type = other RNA
ctagactgaagctccttgaga

SEQ ID NO: 30399 - RNA, 18 nt, Synthetic Construct
  source 1..18: mol_type = other RNA
catgcaagtcgaacggta

SEQ ID NO: 30400 - RNA, 34 nt, Synthetic Construct; identical to SEQ ID NO: 2298
  source 1..34: mol_type = other RNA

SEQ ID NO: 30401 - RNA, 22 nt, Synthetic Construct
  source 1..22: mol_type = other RNA
tattgcacttgtcccggcccgt

SEQ ID NO: 30402 - RNA, 29 nt, Synthetic Construct
  source 1..29: mol_type = other RNA
gtgcatgcactctggggttgtgggacagc

SEQ ID NO: 30403 - RNA, 29 nt, Synthetic Construct
  source 1..29: mol_type = other RNA
gtgcatgcactctggggttgtgggacagc

SEQ ID NO: 30404 - RNA, 23 nt, Synthetic Construct
  source 1..23: mol_type = other RNA
tcgaccggacctcgaccggctcg

SEQ ID NO: 30405 - RNA, 23 nt, Synthetic Construct
  source 1..23: mol_type = other RNA
tcgaccggacctcgaccggctcg

SEQ ID NO: 30406 - RNA, 21 nt, Synthetic Construct
  source 1..21: mol_type = other RNA
cgaggtagtagtttgtgctgt

SEQ ID NO: 30407 - RNA, 21 nt, Synthetic Construct
  source 1..21: mol_type = other RNA
cgaggtagtagtttgtgctgt

SEQ ID NO: 30408 - RNA, 15 nt, Synthetic Construct
  source 1..15: mol_type = other RNA
cctcgcgcgattgga

SEQ ID NO: 30409 - RNA, 15 nt, Synthetic Construct
  source 1..15: mol_type = other RNA
cctcgcgcgattgga

SEQ ID NO: 30410 - RNA, 21 nt, Synthetic Construct
  source 1..21: mol_type = other RNA
gcagtagtctgcacattggtt

SEQ ID NO: 30411 - RNA, 23 nt, Synthetic Construct
  source 1..23: mol_type = other RNA
tgtagtgtttcctactttatgga

SEQ ID NO: 30412 - RNA, 29 nt, Synthetic Construct
  source 1..29: mol_type = other RNA
ccccccccactgctaaatttgactggctt

SEQ ID NO: 30413 - RNA, 20 nt, Synthetic Construct
  source 1..20: mol_type = other RNA
atcaagtaatccaggatagg

SEQ ID NO: 30414 - RNA, 15 nt, Synthetic Construct
  source 1..15: mol_type = other RNA
ggtcatcgtcaggct

SEQ ID NO: 30415 - RNA, 15 nt, Synthetic Construct
  source 1..15: mol_type = other RNA
ggtcatcgtcaggct

SEQ ID NO: 30416 - RNA, 21 nt, Synthetic Construct
  source 1..21: mol_type = other RNA
ttctgtactgagctgccccga

SEQ ID NO: 30417 - RNA, 21 nt, Synthetic Construct
  source 1..21: mol_type = other RNA
ttctgtactgagctgccccga

SEQ ID NO: 30418 - RNA, 23 nt, Synthetic Construct
  source 1..23: mol_type = other RNA
tggcagtgtcttagctggttgtt

SEQ ID NO: 30419 - RNA, 37 nt, Synthetic Construct; identical to SEQ ID NO: 2482
  source 1..37: mol_type = other RNA

SEQ ID NO: 30420 - RNA, 21 nt, Synthetic Construct
  source 1..21: mol_type = other RNA
tcctgcactgagctgccccga

SEQ ID NO: 30421 - RNA, 21 nt, Synthetic Construct
  source 1..21: mol_type = other RNA
tcctgcactgagctgccccga

SEQ ID NO: 30422 - RNA, 22 nt, Synthetic Construct
  source 1..22: mol_type = other RNA
tgaggtagtaggtcgtatagtt

SEQ ID NO: 30423 - RNA, 22 nt, Synthetic Construct
  source 1..22: mol_type = other RNA
tgaggtagtaggtcgtatagtt

SEQ ID NO: 30424 - RNA, 21 nt, Synthetic Construct
  source 1..21: mol_type = other RNA
tagcttatcagactgatgttg

SEQ ID NO: 30425 - RNA, 21 nt, Synthetic Construct
  source 1..21: mol_type = other RNA
tagcttatcagactgatgttg

SEQ ID NO: 30426 - RNA, 15 nt, Synthetic Construct
  source 1..15: mol_type = other RNA
accgcttttgtcagg

SEQ ID NO: 30427 - RNA, 21 nt, Synthetic Construct
  source 1..21: mol_type = other RNA
aggggcagagagcgagacttt

SEQ ID NO: 30428 - RNA, 20 nt, Synthetic Construct
  source 1..20: mol_type = other RNA
tgaggtagtaggttatgtgg

SEQ ID NO: 30429 - RNA, 21 nt, Synthetic Construct
  source 1..21: mol_type = other RNA
gctattgacgaccgtaccgca

SEQ ID NO: 30430 - RNA, 23 nt, Synthetic Construct
  source 1..23: mol_type = other RNA
taaggggcagagagcgagacttt

SEQ ID NO: 30431 - RNA, 31 nt, Synthetic Construct; identical to SEQ ID NO: 2333
  source 1..31: mol_type = other RNA

SEQ ID NO: 30432 - RNA, 31 nt, Synthetic Construct; identical to SEQ ID NO: 2333
  source 1..31: mol_type = other RNA

SEQ ID NO: 30433 - RNA, 21 nt, Synthetic Construct
  source 1..21: mol_type = other RNA
tatgtctgctgaccatcacct

SEQ ID NO: 30434 - RNA, 21 nt, Synthetic Construct
  source 1..21: mol_type = other RNA
tatgtctgctgaccatcacct

SEQ ID NO: 30435 - RNA, 17 nt, Synthetic Construct
  source 1..17: mol_type = other RNA
aggaattgacggaaggg

SEQ ID NO: 30436 - RNA, 17 nt, Synthetic Construct
  source 1..17: mol_type = other RNA
aggaattgacggaaggg

SEQ ID NO: 30437 - RNA, 22 nt, Synthetic Construct
  source 1..22: mol_type = other RNA
tgagaactgaattccataggct

SEQ ID NO: 30438 - RNA, 22 nt, Synthetic Construct
  source 1..22: mol_type = other RNA
tgagaactgaattccataggct

SEQ ID NO: 30439 - RNA, 21 nt, Synthetic Construct
  source 1..21: mol_type = other RNA
atcggaacgtgcccagtcgtg

SEQ ID NO: 30440 - RNA, 21 nt, Synthetic Construct
  source 1..21: mol_type = other RNA
atcggaacgtgcccagtcgtg

SEQ ID NO: 30441 - RNA, 24 nt, Synthetic Construct
  source 1..24: mol_type = other RNA
actcacacagaaatcgcacccgtc

SEQ ID NO: 30442 - RNA, 22 nt, Synthetic Construct
  source 1..22: mol_type = other RNA
tgtggtagtagtttgtgctgtt

SEQ ID NO: 30443 - RNA, 23 nt, Synthetic Construct
  source 1..23: mol_type = other RNA
caaagtgctgtttgtgcaggtag

SEQ ID NO: 30444 - RNA, 23 nt, Synthetic Construct
  source 1..23: mol_type = other RNA
caaagtgctgtttgtgcaggtag

SEQ ID NO: 30445 - RNA, 23 nt, Synthetic Construct
  source 1..23: mol_type = other RNA
aacattcaacgctgtcggtgaga

SEQ ID NO: 30446 - RNA, 19 nt, Synthetic Construct
  source 1..19: mol_type = other RNA
ccagtaaacggcggccgta

SEQ ID NO: 30447 - RNA, 23 nt, Synthetic Construct
  source 1..23: mol_type = other RNA
tcagtgcatgacagaacttgggt

SEQ ID NO: 30448 - RNA, 22 nt, Synthetic Construct
  source 1..22: mol_type = other RNA
gtaaacggcgggagtaactatg

SEQ ID NO: 30449 - RNA, 20 nt, Synthetic Construct
  source 1..20: mol_type = other RNA
tgtcagtttgtcaaataccc

SEQ ID NO: 30450 - RNA, 21 nt, Synthetic Construct
  source 1..21: mol_type = other RNA
tgaggtagaaggttgtgtggt

SEQ ID NO: 30451 - RNA, 21 nt, Synthetic Construct
  source 1..21: mol_type = other RNA
tgaggtagaaggttgtgtggt

SEQ ID NO: 30452 - RNA, 27 nt, Synthetic Construct
  source 1..27: mol_type = other RNA
gcccaggtggcggaattggtagacgca

SEQ ID NO: 30453 - RNA, 27 nt, Synthetic Construct
  source 1..27: mol_type = other RNA
gcccaggtggcggaattggtagacgca

SEQ ID NO: 30454 - RNA, 22 nt, Synthetic Construct
  source 1..22: mol_type = other RNA
tattgcacttgtcccagcctgt

SEQ ID NO: 30455 - RNA, 22 nt, Synthetic Construct
  source 1..22: mol_type = other RNA
tattgcacttgtcccagcctgt

SEQ ID NO: 30456 - RNA, 22 nt, Synthetic Construct
  source 1..22: mol_type = other RNA
ctttcagtcggatgtttacagt

SEQ ID NO: 30457 - RNA, 22 nt, Synthetic Construct
  source 1..22: mol_type = other RNA
ctttcagtcggatgtttacagt

SEQ ID NO: 30458 - RNA, 23 nt, Synthetic Construct
  source 1..23: mol_type = other RNA
tcctgcactgagctgccccgagt

SEQ ID NO: 30459 - RNA, 23 nt, Synthetic Construct
  source 1..23: mol_type = other RNA
tcctgcactgagctgccccgagt

SEQ ID NO: 30460 - RNA, 22 nt, Synthetic Construct
  source 1..22: mol_type = other RNA
tctttgttcgattccgttgagt

SEQ ID NO: 30461 - RNA, 22 nt, Synthetic Construct
  source 1..22: mol_type = other RNA
tgaggtagtaggatgtgtggtt

SEQ ID NO: 30462 - RNA, 21 nt, Synthetic Construct
  source 1..21: mol_type = other RNA
aacggaatcccaaaagcagct

SEQ ID NO: 30463 - RNA, 21 nt, Synthetic Construct
  source 1..21: mol_type = other RNA
aacggaatcccaaaagcagct

SEQ ID NO: 30464 - RNA, 16 nt, Synthetic Construct
  source 1..16: mol_type = other RNA
cagtcaggatgttggc

SEQ ID NO: 30465 - RNA, 24 nt, Synthetic Construct
  source 1..24: mol_type = other RNA
tgtaaacatccccgactggaagcc

SEQ ID NO: 30466 - RNA, 24 nt, Synthetic Construct
  source 1..24: mol_type = other RNA
tgtaaacatccccgactggaagcc

SEQ ID NO: 30467 - RNA, 22 nt, Synthetic Construct
  source 1..22: mol_type = other RNA
gggagtgtgacaatggtgtttg

SEQ ID NO: 30468 - RNA, 20 nt, Synthetic Construct
  source 1..20: mol_type = other RNA
tgaggtagaaggttgtgtgg

SEQ ID NO: 30469 - RNA, 20 nt, Synthetic Construct
  source 1..20: mol_type = other RNA
tgaggtagaaggttgtgtgg

SEQ ID NO: 30470 - RNA, 22 nt, Synthetic Construct
  source 1..22: mol_type = other RNA
cgactcttagcggtggatcact

SEQ ID NO: 30471 - RNA, 22 nt, Synthetic Construct
  source 1..22: mol_type = other RNA
tatatatatatatgtacgtatg

SEQ ID NO: 30472 - RNA, 22 nt, Synthetic Construct
  source 1..22: mol_type = other RNA
tatatatatatatgtacgtatg

SEQ ID NO: 30473 - RNA, 21 nt, Synthetic Construct
  source 1..21: mol_type = other RNA
ccccttggggttgtaggacca

SEQ ID NO: 30474 - RNA, 21 nt, Synthetic Construct
  source 1..21: mol_type = other RNA
ccccttggggttgtaggacca

SEQ ID NO: 30475 - RNA, 22 nt, Synthetic Construct
  source 1..22: mol_type = other RNA
tgaagtagtagtttgtgctgtt

SEQ ID NO: 30476 - RNA, 19 nt, Synthetic Construct
  source 1..19: mol_type = other RNA
acatgcaagtcgaacggta

SEQ ID NO: 30477 - RNA, 23 nt, Synthetic Construct
  source 1..23: mol_type = other RNA
tcctgtactgagctaccccgaga

SEQ ID NO: 30478 - RNA, 16 nt, Synthetic Construct
  source 1..16: mol_type = other RNA
atctacggccatacca

SEQ ID NO: 30479 - RNA, 18 nt, Synthetic Construct
  source 1..18: mol_type = other RNA
tcccaagggtatggctgt

SEQ ID NO: 30480 - RNA, 18 nt, Synthetic Construct
  source 1..18: mol_type = other RNA
tcccaagggtatggctgt

SEQ ID NO: 30481 - RNA, 22 nt, Synthetic Construct
  source 1..22: mol_type = other RNA
tcctgtgctgagctgccccgag

SEQ ID NO: 30482 - RNA, 22 nt, Synthetic Construct
  source 1..22: mol_type = other RNA
tagcagcacatcatggtttaca

SEQ ID NO: 30483 - RNA, 22 nt, Synthetic Construct
  source 1..22: mol_type = other RNA
tagcagcacatcatggtttaca

SEQ ID NO: 30484 - RNA, 24 nt, Synthetic Construct
  source 1..24: mol_type = other RNA
tgtaaacatccccgaccggaagct

SEQ ID NO: 30485 - RNA, 21 nt, Synthetic Construct
  source 1..21: mol_type = other RNA
ctttgttcgattccgttgagt

SEQ ID NO: 30486 - RNA, 17 nt, Synthetic Construct
  source 1..17: mol_type = other RNA
taggtcatcgtcaggct

SEQ ID NO: 30487 - RNA, 17 nt, Synthetic Construct
  source 1..17: mol_type = other RNA
taggtcatcgtcaggct

SEQ ID NO: 30488 - RNA, 23 nt, Synthetic Construct
  source 1..23: mol_type = other RNA
tgaggtagtaggttgtgtggtta

SEQ ID NO: 30489 - RNA, 26 nt, Synthetic Construct
  source 1..26: mol_type = other RNA
gatgcgtggtaggagagcgttctgta

SEQ ID NO: 30490 - RNA, 26 nt, Synthetic Construct
  source 1..26: mol_type = other RNA
gatgcgtggtaggagagcgttctgta

SEQ ID NO: 30491 - RNA, 24 nt, Synthetic Construct
  source 1..24: mol_type = other RNA
tgtgatttctgcccagtgctctga

SEQ ID NO: 30492 - RNA, 24 nt, Synthetic Construct
  source 1..24: mol_type = other RNA
tgtgatttctgcccagtgctctga

SEQ ID NO: 30493 - RNA, 21 nt, Synthetic Construct
  source 1..21: mol_type = other RNA
tcctgtactgagctgcaccga

SEQ ID NO: 30494 - RNA, 21 nt, Synthetic Construct
  source 1..21: mol_type = other RNA
tcctgtactgagctgcaccga

SEQ ID NO: 30495 - RNA, 18 nt, Synthetic Construct
  source 1..18: mol_type = other RNA
gtccggatcgtagtctgc

SEQ ID NO: 30496 - RNA, 16 nt, Synthetic Construct
  source 1..16: mol_type = other RNA
gcgtagatatgcggag

SEQ ID NO: 30497 - RNA, 21 nt, Synthetic Construct
  source 1..21: mol_type = other RNA
tgaggggcagagggcgagact

SEQ ID NO: 30498 - RNA, 22 nt, Synthetic Construct
  source 1..22: mol_type = other RNA
tcggatccgtctgagcttggct

SEQ ID NO: 30499 - RNA, 22 nt, Synthetic Construct
  source 1..22: mol_type = other RNA
tcctgtactgagctaccccgag

SEQ ID NO: 30500 - RNA, 20 nt, Synthetic Construct
  source 1..20: mol_type = other RNA
tgaggtagtaggttgtacag

SEQ ID NO: 30501 - RNA, 20 nt, Synthetic Construct
  source 1..20: mol_type = other RNA
tgaggtagtaggttgtacag

SEQ ID NO: 30502 - RNA, 27 nt, Synthetic Construct
  source 1..27: mol_type = other RNA
gactcttagcggtggatcactcggctc

SEQ ID NO: 30503 - RNA, 18 nt, Synthetic Construct
  source 1..18: mol_type = other RNA
cccttgtcattagttgct

SEQ ID NO: 30504 - RNA, 24 nt, Synthetic Construct
  source 1..24: mol_type = other RNA
tgatatgtttgatatattaggttg

SEQ ID NO: 30505 - RNA, 23 nt, Synthetic Construct
  source 1..23: mol_type = other RNA
agcagcattgtacagggctatga

SEQ ID NO: 30506 - RNA, 23 nt, Synthetic Construct
  source 1..23: mol_type = other RNA
agcagcattgtacagggctatga

SEQ ID NO: 30507 - RNA, 15 nt, Synthetic Construct
  source 1..15: mol_type = other RNA
aaattccttgtcggg

SEQ ID NO: 30508 - RNA, 15 nt, Synthetic Construct
  source 1..15: mol_type = other RNA
aaattccttgtcggg

SEQ ID NO: 30509 - RNA, 18 nt, Synthetic Construct
  source 1..18: mol_type = other RNA
accggaggaaggtgggga

SEQ ID NO: 30510 - RNA, 23 nt, Synthetic Construct
  source 1..23: mol_type = other RNA
tggggggcagagagcgagacttt

SEQ ID NO: 30511 - RNA, 23 nt, Synthetic Construct
  source 1..23: mol_type = other RNA
tggggggcagagagcgagacttt

SEQ ID NO: 30512 - RNA, 15 nt, Synthetic Construct
  source 1..15: mol_type = other RNA
gcaagtcgaacggta

SEQ ID NO: 30513 - RNA, 36 nt, Synthetic Construct; identical to SEQ ID NO: 2506
  source 1..36: mol_type = other RNA

SEQ ID NO: 30514 - RNA, 36 nt, Synthetic Construct; identical to SEQ ID NO: 2506
  source 1..36: mol_type = other RNA

SEQ ID NO: 30515 - RNA, 23 nt, Synthetic Construct
  source 1..23: mol_type = other RNA
tcctgaactgagctgccccgagt

SEQ ID NO: 30516 - RNA, 23 nt, Synthetic Construct
  source 1..23: mol_type = other RNA
tcctgaactgagctgccccgagt

SEQ ID NO: 30517 - RNA, 23 nt, Synthetic Construct
  source 1..23: mol_type = other RNA
cgaggggcagagagcgagacttt

SEQ ID NO: 30518 - RNA, 23 nt, Synthetic Construct
  source 1..23: mol_type = other RNA
cgaggggcagagagcgagacttt

SEQ ID NO: 30519 - RNA, 23 nt, Synthetic Construct
  source 1..23: mol_type = other RNA
taatactgccgggtaatgatgga

SEQ ID NO: 30520 - RNA, 31 nt, Synthetic Construct; identical to SEQ ID NO: 2427
  source 1..31: mol_type = other RNA

SEQ ID NO: 30521 - RNA, 31 nt, Synthetic Construct; identical to SEQ ID NO: 2427
  source 1..31: mol_type = other RNA

SEQ ID NO: 30522 - RNA, 20 nt, Synthetic Construct
  source 1..20: mol_type = other RNA
cacatgcaagtcgaacggta

SEQ ID NO: 30523 - RNA, 25 nt, Synthetic Construct
  source 1..25: mol_type = other RNA
ttgaggatatgagatcgagacgacg

SEQ ID NO: 30524 - RNA, 24 nt, Synthetic Construct
  source 1..24: mol_type = other RNA
cgggcctggttagtacttggatgg

SEQ ID NO: 30525 - RNA, 20 nt, Synthetic Construct
  source 1..20: mol_type = other RNA
taaggtagtaggttgtgtgg

SEQ ID NO: 30526 - RNA, 20 nt, Synthetic Construct
  source 1..20: mol_type = other RNA
gtcagtttgtcaaatacccc

SEQ ID NO: 30527 - RNA, 22 nt, Synthetic Construct
  source 1..22: mol_type = other RNA
tgaggtagtaggctgtgtggtt

SEQ ID NO: 30528 - RNA, 22 nt, Synthetic Construct
  source 1..22: mol_type = other RNA
tgaggtagtaggctgtgtggtt

SEQ ID NO: 30529 - RNA, 22 nt, Synthetic Construct
  source 1..22: mol_type = other RNA
nattgcacttgtcccggcctgt

SEQ ID NO: 30530 - RNA, 22 nt, Synthetic Construct
  source 1..22: mol_type = other RNA
nattgcacttgtcccggcctgt

SEQ ID NO: 30531 - RNA, 22 nt, Synthetic Construct
  source 1..22: mol_type = other RNA
cgaggtagtaggttgtgtggtt

SEQ ID NO: 30532 - RNA, 21 nt, Synthetic Construct
  source 1..21: mol_type = other RNA
tgaggtagtaggttgtgtgga

SEQ ID NO: 30533 - RNA, 21 nt, Synthetic Construct
  source 1..21: mol_type = other RNA
tgaggtagtaggttgtgtgga

SEQ ID NO: 30534 - RNA, 25 nt, Synthetic Construct
  source 1..25: mol_type = other RNA
tgtcagtttgtcaaataccccattt

SEQ ID NO: 30535 - RNA, 25 nt, Synthetic Construct
  source 1..25: mol_type = other RNA
tgtcagtttgtcaaataccccattt

SEQ ID NO: 30536 - RNA, 22 nt, Synthetic Construct
  source 1..22: mol_type = other RNA
cgactggtaactgggatgaagt

SEQ ID NO: 30537 - RNA, 22 nt, Synthetic Construct
  source 1..22: mol_type = other RNA
cgactggtaactgggatgaagt

SEQ ID NO: 30538 - RNA, 35 nt, Synthetic Construct; identical to SEQ ID NO: 2069
  source 1..35: mol_type = other RNA

SEQ ID NO: 30539 - RNA, 35 nt, Synthetic Construct; identical to SEQ ID NO: 2069
  source 1..35: mol_type = other RNA

SEQ ID NO: 30540 - RNA, 21 nt, Synthetic Construct
  source 1..21: mol_type = other RNA
tacctggttgatcctgccagt

SEQ ID NO: 30541 - RNA, 21 nt, Synthetic Construct
  source 1..21: mol_type = other RNA
tacctggttgatcctgccagt

SEQ ID NO: 30542 - RNA, 23 nt, Synthetic Construct
  source 1..23: mol_type = other RNA
caaagagctgttcgtgcaggtag

SEQ ID NO: 30543 - RNA, 24 nt, Synthetic Construct
  source 1..24: mol_type = other RNA
tcagtgcatcacagaactttgttt

SEQ ID NO: 30544 - RNA, 23 nt, Synthetic Construct
  source 1..23: mol_type = other RNA
agcaacattgtctgctgggtttc

SEQ ID NO: 30545 - RNA, 23 nt, Synthetic Construct
  source 1..23: mol_type = other RNA
agcaacattgtctgctgggtttc

SEQ ID NO: 30546 - RNA, 27 nt, Synthetic Construct
  source 1..27: mol_type = other RNA
ccctccactgctaaatttgactggctt

SEQ ID NO: 30547 - RNA, 17 nt, Synthetic Construct
  source 1..17: mol_type = other RNA
acagtcaggatgttggc

SEQ ID NO: 30548 - RNA, 19 nt, Synthetic Construct
  source 1..19: mol_type = other RNA
cttggggttgtaggaccac

SEQ ID NO: 30549 - RNA, 19 nt, Synthetic Construct
  source 1..19: mol_type = other RNA
cttggggttgtaggaccac

SEQ ID NO: 30550 - RNA, 22 nt, Synthetic Construct
  source 1..22: mol_type = other RNA
actcggcgtggcgtcggtcgtg

SEQ ID NO: 30551 - RNA, 22 nt, Synthetic Construct
  source 1..22: mol_type = other RNA
actcggcgtggcgtcggtcgtg

SEQ ID NO: 30552 - RNA, 25 nt, Synthetic Construct
  source 1..25: mol_type = other RNA
ccccactgctaaatttgactggctt

SEQ ID NO: 30553 - RNA, 22 nt, Synthetic Construct
  source 1..22: mol_type = other RNA
tcgtaccgtgagtaataacgcg

SEQ ID NO: 30554 - RNA, 23 nt, Synthetic Construct
  source 1..23: mol_type = other RNA
tgagaggcagagagcgagacttt

SEQ ID NO: 30555 - RNA, 23 nt, Synthetic Construct
  source 1..23: mol_type = other RNA
tgagaggcagagagcgagacttt

SEQ ID NO: 30556 - RNA, 23 nt, Synthetic Construct
  source 1..23: mol_type = other RNA
taaagtgcttatagtgcaggtag

SEQ ID NO: 30557 - RNA, 23 nt, Synthetic Construct
  source 1..23: mol_type = other RNA
tgaggggcagggagcgagacttt

SEQ ID NO: 30558 - RNA, 19 nt, Synthetic Construct
  source 1..19: mol_type = other RNA
tagcagcacgtaaatattg

SEQ ID NO: 30559 - RNA, 19 nt, Synthetic Construct
  source 1..19: mol_type = other RNA
tagcagcacgtaaatattg

SEQ ID NO: 30560 - RNA, 22 nt, Synthetic Construct
  source 1..22: mol_type = other RNA
tgaggtggtaggttgtgtggtt

SEQ ID NO: 30561 - RNA, 22 nt, Synthetic Construct
  source 1..22: mol_type = other RNA
tgaggtggtaggttgtgtggtt

SEQ ID NO: 30562 - RNA, 19 nt, Synthetic Construct
  source 1..19: mol_type = other RNA
tctaatgagactgccggtg

SEQ ID NO: 30563 - RNA, 22 nt, Synthetic Construct
  source 1..22: mol_type = other RNA
tgaggtagtaggttgcgtggtt

SEQ ID NO: 30564 - RNA, 23 nt, Synthetic Construct
  source 1..23: mol_type = other RNA
tcctgtactgagctgccctgagt

SEQ ID NO: 30565 - RNA, 23 nt, Synthetic Construct
  source 1..23: mol_type = other RNA
tcctgtactgagctgccctgagt

SEQ ID NO: 30566 - RNA, 32 nt, Synthetic Construct; identical to SEQ ID NO: 753
  source 1..32: mol_type = other RNA

SEQ ID NO: 30567 - RNA, 32 nt, Synthetic Construct; identical to SEQ ID NO: 753
  source 1..32: mol_type = other RNA

SEQ ID NO: 30568 - RNA, 22 nt, Synthetic Construct
  source 1..22: mol_type = other RNA
tgaggtagtaggttgtgtggtg

SEQ ID NO: 30569 - RNA, 22 nt, Synthetic Construct
  source 1..22: mol_type = other RNA
tgaggtagtaggttgtgtggtg

SEQ ID NO: 30570 - RNA, 22 nt, Synthetic Construct
  source 1..22: mol_type = other RNA
cattgcacttgtctcagtctga

SEQ ID NO: 30571 - RNA, 18 nt, Synthetic Construct
  source 1..18: mol_type = other RNA
atggccgggacagagggc

SEQ ID NO: 30572 - RNA, 34 nt, Synthetic Construct; identical to SEQ ID NO: 2183
  source 1..34: mol_type = other RNA

SEQ ID NO: 30573 - RNA, 34 nt, Synthetic Construct; identical to SEQ ID NO: 2183
  source 1..34: mol_type = other RNA

SEQ ID NO: 30574 - RNA, 23 nt, Synthetic Construct
  source 1..23: mol_type = other RNA
tccagtactgagctgccccgagt

SEQ ID NO: 30575 - RNA, 21 nt, Synthetic Construct
  source 1..21: mol_type = other RNA
tcctgtactgagctgccctga

SEQ ID NO: 30576 - RNA, 21 nt, Synthetic Construct
  source 1..21: mol_type = other RNA
caaagtgctgttcgtgcaggt

SEQ ID NO: 30577 - RNA, 21 nt, Synthetic Construct
  source 1..21: mol_type = other RNA
caaagtgctgttcgtgcaggt

SEQ ID NO: 30578 - RNA, 16 nt, Synthetic Construct
  source 1..16: mol_type = other RNA
gccagcagccgcggta

SEQ ID NO: 30579 - RNA, 25 nt, Synthetic Construct
  source 1..25: mol_type = other RNA
gtgaggatatgagatcgagacgaca

SEQ ID NO: 30580 - RNA, 21 nt, Synthetic Construct
  source 1..21: mol_type = other RNA
ttctgtactgagctgccccga

SEQ ID NO: 30581 - RNA, 21 nt, Synthetic Construct
  source 1..21: mol_type = other RNA
ttctgtactgagctgccccga

SEQ ID NO: 30582 - RNA, 22 nt, Synthetic Construct
  source 1..22: mol_type = other RNA
tgaggtagtagtttgtgcggtt

SEQ ID NO: 30583 - RNA, 16 nt, Synthetic Construct
  source 1..16: mol_type = other RNA
cgctagtaatcgcgga

SEQ ID NO: 30584 - RNA, 16 nt, Synthetic Construct
  source 1..16: mol_type = other RNA
cgctagtaatcgcgga

SEQ ID NO: 30585 - RNA, 22 nt, Synthetic Construct
  source 1..22: mol_type = other RNA
agtagtgtttcctactttatgg

SEQ ID NO: 30586 - RNA, 22 nt, Synthetic Construct
  source 1..22: mol_type = other RNA
cactgcacttgtctcggtctga

SEQ ID NO: 30587 - RNA, 22 nt, Synthetic Construct
  source 1..22: mol_type = other RNA
cactgcacttgtctcggtctga

SEQ ID NO: 30588 - RNA, 22 nt, Synthetic Construct
  source 1..22: mol_type = other RNA
tgaggtagtaggttgtatagta

SEQ ID NO: 30589 - RNA, 22 nt, Synthetic Construct
  source 1..22: mol_type = other RNA
tgaggtagtaggttgtatagta

SEQ ID NO: 30590 - RNA, 34 nt, Synthetic Construct; identical to SEQ ID NO: 2183
  source 1..34: mol_type = other RNA

SEQ ID NO: 30591 - RNA, 34 nt, Synthetic Construct; identical to SEQ ID NO: 2183
  source 1..34: mol_type = other RNA

SEQ ID NO: 30592 - RNA, 22 nt, Synthetic Construct
  source 1..22: mol_type = other RNA
tggctcagttcagcaggaacag

SEQ ID NO: 30593 - RNA, 22 nt, Synthetic Construct
  source 1..22: mol_type = other RNA
tggctcagttcagcaggaacag

SEQ ID NO: 30594 - RNA, 22 nt, Synthetic Construct
  source 1..22: mol_type = other RNA
tcctgtactgagctgcctcgag

SEQ ID NO: 30595 - RNA, 22 nt, Synthetic Construct
  source 1..22: mol_type = other RNA
tcctgtactgagctgcctcgag

SEQ ID NO: 30596 - RNA, 16 nt, Synthetic Construct
  source 1..16: mol_type = other RNA
gtctacggctatacca

SEQ ID NO: 30597 - RNA, 23 nt, Synthetic Construct
  source 1..23: mol_type = other RNA
tgaggtagtaggttgcgtggttt

SEQ ID NO: 30598 - RNA, 23 nt, Synthetic Construct
  source 1..23: mol_type = other RNA
tgaggtagtaggttgcgtggttt

SEQ ID NO: 30599 - RNA, 20 nt, Synthetic Construct
  source 1..20: mol_type = other RNA
tgaggtagtaagttgtattg

SEQ ID NO: 30600 - RNA, 22 nt, Synthetic Construct
  source 1..22: mol_type = other RNA
cggaatgtaaagaagtatgtat

SEQ ID NO: 30601 - RNA, 22 nt, Synthetic Construct
  source 1..22: mol_type = other RNA
cggaatgtaaagaagtatgtat

SEQ ID NO: 30602 - RNA, 23 nt, Synthetic Construct
  source 1..23: mol_type = other RNA
tcctgaactgagctgccccgagt

SEQ ID NO: 30603 - RNA, 23 nt, Synthetic Construct
  source 1..23: mol_type = other RNA
tcctgaactgagctgccccgagt

SEQ ID NO: 30604 - RNA, 21 nt, Synthetic Construct
  source 1..21: mol_type = other RNA
aacattcattgctgtcggtgg

SEQ ID NO: 30605 - RNA, 26 nt, Synthetic Construct
  source 1..26: mol_type = other RNA
ttaagtgacgatagcctaggagatac

SEQ ID NO: 30606 - RNA, 26 nt, Synthetic Construct
  source 1..26: mol_type = other RNA
ttaagtgacgatagcctaggagatac

SEQ ID NO: 30607 - RNA, 25 nt, Synthetic Construct
  source 1..25: mol_type = other RNA
ttgaggatatgagatcgaggcgaca

SEQ ID NO: 30608 - RNA, 15 nt, Synthetic Construct
  source 1..15: mol_type = other RNA
gctttgatccggaga

SEQ ID NO: 30609 - RNA, 15 nt, Synthetic Construct
  source 1..15: mol_type = other RNA
gctttgatccggaga

SEQ ID NO: 30610 - RNA, 21 nt, Synthetic Construct
  source 1..21: mol_type = other RNA
taactccttaagcgaatctgc

SEQ ID NO: 30611 - RNA, 21 nt, Synthetic Construct
  source 1..21: mol_type = other RNA
taactccttaagcgaatctgc

SEQ ID NO: 30612 - RNA, 18 nt, Synthetic Construct
  source 1..18: mol_type = other RNA
caacggaatcccaaaagc

SEQ ID NO: 30613 - RNA, 23 nt, Synthetic Construct
  source 1..23: mol_type = other RNA
cccagtgttcagactacctgttc

SEQ ID NO: 30614 - RNA, 23 nt, Synthetic Construct
  source 1..23: mol_type = other RNA
tcccgtactgagctgccccgagt

SEQ ID NO: 30615 - RNA, 23 nt, Synthetic Construct
  source 1..23: mol_type = other RNA
tcccgtactgagctgccccgagt

SEQ ID NO: 30616 - RNA, 23 nt, Synthetic Construct
  source 1..23: mol_type = other RNA
tcctgtacagagctgccccgaga

SEQ ID NO: 30617 - RNA, 23 nt, Synthetic Construct
  source 1..23: mol_type = other RNA
tcctgtacagagctgccccgaga

SEQ ID NO: 30618 - RNA, 23 nt, Synthetic Construct
  source 1..23: mol_type = other RNA
tgagaactgaattccatgggttt

SEQ ID NO: 30619 - RNA, 23 nt, Synthetic Construct
  source 1..23: mol_type = other RNA
tgagaactgaattccatgggttt

SEQ ID NO: 30620 - RNA, 21 nt, Synthetic Construct
  source 1..21: mol_type = other RNA
acagtagcctgcacattggtt

SEQ ID NO: 30621 - RNA, 21 nt, Synthetic Construct
  source 1..21: mol_type = other RNA
tgaggtagtaggttgtgtagt

SEQ ID NO: 30622 - RNA, 21 nt, Synthetic Construct
  source 1..21: mol_type = other RNA
tgaggtagtaggttgtgtagt

SEQ ID NO: 30623 - RNA, 22 nt, Synthetic Construct
  source 1..22: mol_type = other RNA
tgaggtagtaaattgtatagtt

SEQ ID NO: 30624 - RNA, 17 nt, Synthetic Construct
  source 1..17: mol_type = other RNA
agtccggatcgtagtct

SEQ ID NO: 30625 - RNA, 21 nt, Synthetic Construct
  source 1..21: mol_type = other RNA
ccctgtactgagctgccccga

SEQ ID NO: 30626 - RNA, 26 nt, Synthetic Construct
  source 1..26: mol_type = other RNA
aatgacacgatcactcccgttgagtt

SEQ ID NO: 30627 - RNA, 20 nt, Synthetic Construct
  source 1..20: mol_type = other RNA
tgaggtagtaggttgtgagg

SEQ ID NO: 30628 - RNA, 20 nt, Synthetic Construct
  source 1..20: mol_type = other RNA
tgaggtagtaggttgtgagg

SEQ ID NO: 30629 - RNA, 22 nt, Synthetic Construct
  source 1..22: mol_type = other RNA
tagcagcacgtaagtattggcg

SEQ ID NO: 30630 - RNA, 21 nt, Synthetic Construct
  source 1..21: mol_type = other RNA
ctagactgaggctccttgagg

SEQ ID NO: 30631 - RNA, 23 nt, Synthetic Construct
  source 1..23: mol_type = other RNA
atgacacgatcactcccgttgag

SEQ ID NO: 30632 - RNA, 23 nt, Synthetic Construct
  source 1..23: mol_type = other RNA
atgacacgatcactcccgttgag

SEQ ID NO: 30633 - RNA, 21 nt, Synthetic Construct
  source 1..21: mol_type = other RNA
tggagcgtgacaatggtgttt

SEQ ID NO: 30634 - RNA, 21 nt, Synthetic Construct
  source 1..21: mol_type = other RNA
tggagcgtgacaatggtgttt

SEQ ID NO: 30635 - RNA, 20 nt, Synthetic Construct
  source 1..20: mol_type = other RNA
tgaggtggtaggttgtgtgg

SEQ ID NO: 30636 - RNA, 20 nt, Synthetic Construct
  source 1..20: mol_type = other RNA
tgaggtggtaggttgtgtgg

SEQ ID NO: 30637 - RNA, 22 nt, Synthetic Construct
  source 1..22: mol_type = other RNA
tgagaactgaattccatgggtt

SEQ ID NO: 30638 - RNA, 22 nt, Synthetic Construct
  source 1..22: mol_type = other RNA
tgagaactgaattccatgggtt

SEQ ID NO: 30639 - RNA, 17 nt, Synthetic Construct
  source 1..17: mol_type = other RNA
gcgtagatatgcggagg

SEQ ID NO: 30640 - RNA, 16 nt, Synthetic Construct
  source 1..16: mol_type = other RNA
tgcaagtcgaacggta

SEQ ID NO: 30641 - RNA, 24 nt, Synthetic Construct
  source 1..24: mol_type = other RNA
tagtgcaatattgcttatagggtt

SEQ ID NO: 30642 - RNA, 20 nt, Synthetic Construct
  source 1..20: mol_type = other RNA
cccttggggttgtaggacca

SEQ ID NO: 30643 - RNA, 20 nt, Synthetic Construct
  source 1..20: mol_type = other RNA
cccttggggttgtaggacca

SEQ ID NO: 30644 - RNA, 22 nt, Synthetic Construct
  source 1..22: mol_type = other RNA
tcctgtgctgagctgccccgag

SEQ ID NO: 30645 - RNA, 22 nt, Synthetic Construct
  source 1..22: mol_type = other RNA
tcctgtgctgagctgccccgag

SEQ ID NO: 30646 - RNA, 21 nt, Synthetic Construct
  source 1..21: mol_type = other RNA
tgaggaagtagattgtatagt

SEQ ID NO: 30647 - RNA, 22 nt, Synthetic Construct
  source 1..22: mol_type = other RNA
tgaagtagtagtttgtgctgtt

SEQ ID NO: 30648 - RNA, 22 nt, Synthetic Construct
  source 1..22: mol_type = other RNA
tgaagtagtagtttgtgctgtt

SEQ ID NO: 30649 - RNA, 22 nt, Synthetic Construct
  source 1..22: mol_type = other RNA
nagcagcacgtaaatattggcg

SEQ ID NO: 30650 - RNA, 22 nt, Synthetic Construct
  source 1..22: mol_type = other RNA
nagcagcacgtaaatattggcg

SEQ ID NO: 30651 - RNA, 23 nt, Synthetic Construct
  source 1..23: mol_type = other RNA
tgaggggcagagagcgagactct

SEQ ID NO: 30652 - RNA, 23 nt, Synthetic Construct
  source 1..23: mol_type = other RNA
tacagtagtctgcacattggtta

SEQ ID NO: 30653 - RNA, 23 nt, Synthetic Construct
  source 1..23: mol_type = other RNA
tacagtagtctgcacattggtta

SEQ ID NO: 30654 - RNA, 22 nt, Synthetic Construct
  source 1..22: mol_type = other RNA
gggagtgtgacaatggtgtttg

SEQ ID NO: 30655 - RNA, 26 nt, Synthetic Construct
  source 1..26: mol_type = other RNA
cgactcttagcggtggatcactcggc

SEQ ID NO: 30656 - RNA, 26 nt, Synthetic Construct
  source 1..26: mol_type = other RNA
cgactcttagcggtggatcactcggc

SEQ ID NO: 30657 - RNA, 22 nt, Synthetic Construct
  source 1..22: mol_type = other RNA
tcctgtactgtgctgccccgag

SEQ ID NO: 30658 - RNA, 21 nt, Synthetic Construct
  source 1..21: mol_type = other RNA
tgaggtagtagattgtataga

SEQ ID NO: 30659 - RNA, 22 nt, Synthetic Construct
  source 1..22: mol_type = other RNA
tagcagcacgtgaatattggcg

SEQ ID NO: 30660 - RNA, 15 nt, Synthetic Construct
  source 1..15: mol_type = other RNA
gtcgacgtatagggt

SEQ ID NO: 30661 - RNA, 23 nt, Synthetic Construct
  source 1..23: mol_type = other RNA
tggtaatacgacgtacttaatgt

SEQ ID NO: 30662 - RNA, 23 nt, Synthetic Construct
  source 1..23: mol_type = other RNA
tggtaatacgacgtacttaatgt

SEQ ID NO: 30663 - RNA, 20 nt, Synthetic Construct
  source 1..20: mol_type = other RNA
gggttcgattccggagaggg

SEQ ID NO: 30664 - RNA, 20 nt, Synthetic Construct
  source 1..20: mol_type = other RNA
gggttcgattccggagaggg

SEQ ID NO: 30665 - RNA, 16 nt, Synthetic Construct
  source 1..16: mol_type = other RNA
acggcgggagtaacta

SEQ ID NO: 30666 - RNA, 16 nt, Synthetic Construct
  source 1..16: mol_type = other RNA
acggcgggagtaacta

SEQ ID NO: 30667 - RNA, 22 nt, Synthetic Construct
  source 1..22: mol_type = other RNA
taccctgtagatccgaatttgt

SEQ ID NO: 30668 - RNA, 23 nt, Synthetic Construct
  source 1..23: mol_type = other RNA
atcacattgccagggatttccaa

SEQ ID NO: 30669 - RNA, 23 nt, Synthetic Construct
  source 1..23: mol_type = other RNA
atcacattgccagggatttccaa

SEQ ID NO: 30670 - RNA, 30 nt, Synthetic Construct; identical to SEQ ID NO: 751
  source 1..30: mol_type = other RNA

SEQ ID NO: 30671 - RNA, 30 nt, Synthetic Construct; identical to SEQ ID NO: 751
  source 1..30: mol_type = other RNA

SEQ ID NO: 30672 - RNA, 42 nt, Synthetic Construct; identical to SEQ ID NO: 8009
  source 1..42: mol_type = other RNA

SEQ ID NO: 30673 - RNA, 15 nt, Synthetic Construct
  source 1..15: mol_type = other RNA
ccagaaacccggtcg

SEQ ID NO: 30674 - RNA, 21 nt, Synthetic Construct
  source 1..21: mol_type = other RNA
taactccttagcgaatctcgc

SEQ ID NO: 30675 - RNA, 21 nt, Synthetic Construct
  source 1..21: mol_type = other RNA
taactccttagcgaatctcgc

SEQ ID NO: 30676 - RNA, 22 nt, Synthetic Construct
  source 1..22: mol_type = other RNA
ncgtaccgtgagtaataatgcg

SEQ ID NO: 30677 - RNA, 22 nt, Synthetic Construct
  source 1..22: mol_type = other RNA
tcagtgcactacagagctttgt

SEQ ID NO: 30678 - RNA, 31 nt, Synthetic Construct; identical to SEQ ID NO: 2310
  source 1..31: mol_type = other RNA

SEQ ID NO: 30679 - RNA, 31 nt, Synthetic Construct; identical to SEQ ID NO: 2310
  source 1..31: mol_type = other RNA

SEQ ID NO: 30680 - RNA, 22 nt, Synthetic Construct
  source 1..22: mol_type = other RNA
tcctgtactgagctgacccgag

SEQ ID NO: 30681 - RNA, 22 nt, Synthetic Construct
  source 1..22: mol_type = other RNA
tcctgtactgagctgacccgag

SEQ ID NO: 30682 - RNA, 22 nt, Synthetic Construct
  source 1..22: mol_type = other RNA
tggaatgtaaagaagcatgtat

SEQ ID NO: 30683 - RNA, 22 nt, Synthetic Construct
  source 1..22: mol_type = other RNA
cccataaagtagaaagcactac

SEQ ID NO: 30684 - RNA, 25 nt, Synthetic Construct
  source 1..25: mol_type = other RNA
tgagaactgaattccataggctgtt

SEQ ID NO: 30685 - RNA, 25 nt, Synthetic Construct
  source 1..25: mol_type = other RNA
tgagaactgaattccataggctgtt

SEQ ID NO: 30686 - RNA, 22 nt, Synthetic Construct
  source 1..22: mol_type = other RNA
tcctgtacagagctgccccgag

SEQ ID NO: 30687 - RNA, 29 nt, Synthetic Construct
  source 1..29: mol_type = other RNA
gtaatggcgggaactctggacagactgcc

SEQ ID NO: 30688 - RNA, 29 nt, Synthetic Construct
  source 1..29: mol_type = other RNA
gtaatggcgggaactctggacagactgcc

SEQ ID NO: 30689 - RNA, 21 nt, Synthetic Construct
  source 1..21: mol_type = other RNA
tgaggggcagagagcgggact

SEQ ID NO: 30690 - RNA, 21 nt, Synthetic Construct
  source 1..21: mol_type = other RNA
caacggaatcccaaaagcagc

SEQ ID NO: 30691 - RNA, 21 nt, Synthetic Construct
  source 1..21: mol_type = other RNA
caacggaatcccaaaagcagc

SEQ ID NO: 30692 - RNA, 27 nt, Synthetic Construct
  source 1..27: mol_type = other RNA
cgactcttagcggtggatcactcggct

SEQ ID NO: 30693 - RNA, 22 nt, Synthetic Construct
  source 1..22: mol_type = other RNA
cataaagtagaaagcactacta

SEQ ID NO: 30694 - RNA, 22 nt, Synthetic Construct
  source 1..22: mol_type = other RNA
cataaagtagaaagcactacta

SEQ ID NO: 30695 - RNA, 17 nt, Synthetic Construct
  source 1..17: mol_type = other RNA
tcccagaaacccggtcg

SEQ ID NO: 30696 - RNA, 21 nt, Synthetic Construct
  source 1..21: mol_type = other RNA
tgaggtagtaggttgtgtgat

SEQ ID NO: 30697 - RNA, 21 nt, Synthetic Construct
  source 1..21: mol_type = other RNA
tgaggtagtaggttgtgtgat

SEQ ID NO: 30698 - RNA, 18 nt, Synthetic Construct
  source 1..18: mol_type = other RNA
catgcaagtcgaacggta

SEQ ID NO: 30699 - RNA, 15 nt, Synthetic Construct
  source 1..15: mol_type = other RNA
gtctcgccgacggca

SEQ ID NO: 30700 - RNA, 23 nt, Synthetic Construct
  source 1..23: mol_type = other RNA
tcctgtactgagttgccccgaga

SEQ ID NO: 30701 - RNA, 23 nt, Synthetic Construct
  source 1..23: mol_type = other RNA
tcctgtactgagttgccccgaga

SEQ ID NO: 30702 - RNA, 21 nt, Synthetic Construct
  source 1..21: mol_type = other RNA
tgaggtagtagtttgcgctgt

SEQ ID NO: 30703 - RNA, 22 nt, Synthetic Construct
  source 1..22: mol_type = other RNA
tgaggtagtggtttgtgctgtt

SEQ ID NO: 30704 - RNA, 32 nt, Synthetic Construct; identical to SEQ ID NO: 14097
  source 1..32: mol_type = other RNA

SEQ ID NO: 30705 - RNA, 32 nt, Synthetic Construct; identical to SEQ ID NO: 14097
  source 1..32: mol_type = other RNA

SEQ ID NO: 30706 - RNA, 16 nt, Synthetic Construct
  source 1..16: mol_type = other RNA
tgcaagtcgaacggta

SEQ ID NO: 30707 - RNA, 23 nt, Synthetic Construct
  source 1..23: mol_type = other RNA
atcacattgccagggatttccaa

SEQ ID NO: 30708 - RNA, 22 nt, Synthetic Construct
  source 1..22: mol_type = other RNA
tcctgtactgagctgccccgat

SEQ ID NO: 30709 - RNA, 22 nt, Synthetic Construct
  source 1..22: mol_type = other RNA
tcctgtactgagctgccccgat

SEQ ID NO: 30710 - RNA, 24 nt, Synthetic Construct
  source 1..24: mol_type = other RNA
tgtaaacatccctgactggaagct

SEQ ID NO: 30711 - RNA, 24 nt, Synthetic Construct
  source 1..24: mol_type = other RNA
tgtaaacatccctgactggaagct

SEQ ID NO: 30712 - RNA, 27 nt, Synthetic Construct
  source 1..27: mol_type = other RNA
tcggctgttaaccgaaaggttggtggt

SEQ ID NO: 30713 - RNA, 24 nt, Synthetic Construct
  source 1..24: mol_type = other RNA
tgcaaacatccccgactggaagct

SEQ ID NO: 30714 - RNA, 22 nt, Synthetic Construct
  source 1..22: mol_type = other RNA
tgaggtagtaggttgtgtggtc

SEQ ID NO: 30715 - RNA, 22 nt, Synthetic Construct
  source 1..22: mol_type = other RNA
tgaggtagtaggttgtgtggtc

SEQ ID NO: 30716 - RNA, 21 nt, Synthetic Construct
  source 1..21: mol_type = other RNA
tgaggtagtaggttgtgtgga

SEQ ID NO: 30717 - RNA, 22 nt, Synthetic Construct
  source 1..22: mol_type = other RNA
cattgcacttgtctcggtctgg

SEQ ID NO: 30718 - RNA, 22 nt, Synthetic Construct
  source 1..22: mol_type = other RNA
cattgcacttgtctcggtctgg

SEQ ID NO: 30719 - RNA, 22 nt, Synthetic Construct
  source 1..22: mol_type = other RNA
tgaggtagaaggttgtgtggtt

SEQ ID NO: 30720 - RNA, 22 nt, Synthetic Construct
  source 1..22: mol_type = other RNA
tgaggtagaaggttgtgtggtt

SEQ ID NO: 30721 - RNA, 32 nt, Synthetic Construct; identical to SEQ ID NO: 2296
  source 1..32: mol_type = other RNA

SEQ ID NO: 30722 - RNA, 32 nt, Synthetic Construct; identical to SEQ ID NO: 2296
  source 1..32: mol_type = other RNA

SEQ ID NO: 30723 - RNA, 22 nt, Synthetic Construct
  source 1..22: mol_type = other RNA
tttttcattattgctcctgacc

SEQ ID NO: 30724 - RNA, 22 nt, Synthetic Construct
  source 1..22: mol_type = other RNA
tttttcattattgctcctgacc

SEQ ID NO: 30725 - RNA, 23 nt, Synthetic Construct
  source 1..23: mol_type = other RNA
agcaggacggtggccatggaagt

SEQ ID NO: 30726 - RNA, 21 nt, Synthetic Construct
  source 1..21: mol_type = other RNA
tgaggtagtaggttgtacagt

SEQ ID NO: 30727 - RNA, 21 nt, Synthetic Construct
  source 1..21: mol_type = other RNA
tgaggtagtaggttgtacagt

SEQ ID NO: 30728 - RNA, 21 nt, Synthetic Construct
  source 1..21: mol_type = other RNA
tcctgtactgagccgccccga

SEQ ID NO: 30729 - RNA, 21 nt, Synthetic Construct
  source 1..21: mol_type = other RNA
ttaatgctaatcgtgataggg

SEQ ID NO: 30730 - RNA, 21 nt, Synthetic Construct
  source 1..21: mol_type = other RNA
ttaatgctaatcgtgataggg

SEQ ID NO: 30731 - RNA, 22 nt, Synthetic Construct
  source 1..22: mol_type = other RNA
tgaggtagtagtttgtgctgta

SEQ ID NO: 30732 - RNA, 22 nt, Synthetic Construct
  source 1..22: mol_type = other RNA
tgaggtagtgggttgtgtggtt

SEQ ID NO: 30733 - RNA, 22 nt, Synthetic Construct
  source 1..22: mol_type = other RNA
tgaggtagtgggttgtgtggtt

SEQ ID NO: 30734 - RNA, 24 nt, Synthetic Construct
  source 1..24: mol_type = other RNA
ggctacattgtctgctgggtttct

SEQ ID NO: 30735 - RNA, 23 nt, Synthetic Construct
  source 1..23: mol_type = other RNA
tgaggggcagagagcaagacttt

SEQ ID NO: 30736 - RNA, 22 nt, Synthetic Construct
  source 1..22: mol_type = other RNA
tgaggtagtagtttgtgctgtt

SEQ ID NO: 30737 - RNA, 21 nt, Synthetic Construct
  source 1..21: mol_type = other RNA
tgaggggcagagagcgagact

SEQ ID NO: 30738 - RNA, 20 nt, Synthetic Construct
  source 1..20: mol_type = other RNA
tgaggaagtaggttgtatag

SEQ ID NO: 30739 - RNA, 22 nt, Synthetic Construct
  source 1..22: mol_type = other RNA
gcgtaccgtgagtaataatgcg

SEQ ID NO: 30740 - RNA, 26 nt, Synthetic Construct
  source 1..26: mol_type = other RNA
tgtccccgcgaggggcccggggcggg

SEQ ID NO: 30741 - RNA, 21 nt, Synthetic Construct
  source 1..21: mol_type = other RNA
tcctgaactgagctgccccga

SEQ ID NO: 30742 - RNA, 35 nt, Synthetic Construct; identical to SEQ ID NO: 2354
  source 1..35: mol_type = other RNA

SEQ ID NO: 30743 - RNA, 35 nt, Synthetic Construct; identical to SEQ ID NO: 2354
  source 1..35: mol_type = other RNA

SEQ ID NO: 30744 - RNA, 22 nt, Synthetic Construct
  source 1..22: mol_type = other RNA
actctttccctgttgcactact

SEQ ID NO: 30745 - RNA, 22 nt, Synthetic Construct
  source 1..22: mol_type = other RNA
actctttccctgttgcactact

SEQ ID NO: 30746 - RNA, 32 nt, Synthetic Construct; identical to SEQ ID NO: 4509
  source 1..32: mol_type = other RNA

SEQ ID NO: 30747 - RNA, 32 nt, Synthetic Construct; identical to SEQ ID NO: 4509
  source 1..32: mol_type = other RNA

SEQ ID NO: 30748 - RNA, 32 nt, Synthetic Construct
  source 1..32: mol_type = other RNA
cgtggggggcccaagtccttctgatcgaggcc

SEQ ID NO: 30749 - RNA, 22 nt, Synthetic Construct
  source 1..22: mol_type = other RNA
tgaggtagtagtttgtgctgta

SEQ ID NO: 30750 - RNA, 22 nt, Synthetic Construct
  source 1..22: mol_type = other RNA
tgaggtagtagtttgtgctgta

SEQ ID NO: 30751 - RNA, 22 nt, Synthetic Construct
  source 1..22: mol_type = other RNA
cattgcgcttgtctcggtctga

SEQ ID NO: 30752 - RNA, 21 nt, Synthetic Construct
  source 1..21: mol_type = other RNA
tgaggggcagagagcgagacc

SEQ ID NO: 30753 - RNA, 29 nt, Synthetic Construct
  source 1..29: mol_type = other RNA
cgactcttagcggtggatcactcggctcg

SEQ ID NO: 30754 - RNA, 25 nt, Synthetic Construct
  source 1..25: mol_type = other RNA
gtgaggatatgagatcgagacgaca

SEQ ID NO: 30755 - RNA, 27 nt, Synthetic Construct
  source 1..27: mol_type = other RNA
gcccaggtggcggaattggtagacgca

SEQ ID NO: 30756 - RNA, 27 nt, Synthetic Construct
  source 1..27: mol_type = other RNA
gcccaggtggcggaattggtagacgca

SEQ ID NO: 30757 - RNA, 22 nt, Synthetic Construct
  source 1..22: mol_type = other RNA
tgaggtagtaggttgtgtagtt

SEQ ID NO: 30758 - RNA, 26 nt, Synthetic Construct
  source 1..26: mol_type = other RNA
gacttaccaaacctatgcaaactccg

SEQ ID NO: 30759 - RNA, 18 nt, Synthetic Construct
  source 1..18: mol_type = other RNA
tcccaagggtatggctgt

SEQ ID NO: 30760 - RNA, 17 nt, Synthetic Construct
  source 1..17: mol_type = other RNA
caggacggtggccatgg

SEQ ID NO: 30761 - RNA, 17 nt, Synthetic Construct
  source 1..17: mol_type = other RNA
caggacggtggccatgg

SEQ ID NO: 30762 - RNA, 21 nt, Synthetic Construct
  source 1..21: mol_type = other RNA
tgaggaagtagattgtatagt

SEQ ID NO: 30763 - RNA, 23 nt, Synthetic Construct
  source 1..23: mol_type = other RNA
tcctgtgctgagctgccccgaga

SEQ ID NO: 30764 - RNA, 22 nt, Synthetic Construct
  source 1..22: mol_type = other RNA
atcacattgccagggatttcca

SEQ ID NO: 30765 - RNA, 21 nt, Synthetic Construct
  source 1..21: mol_type = other RNA
taactccttagcgaatctcgc

SEQ ID NO: 30766 - RNA, 21 nt, Synthetic Construct
  source 1..21: mol_type = other RNA
taactccttagcgaatctcgc

SEQ ID NO: 30767 - RNA, 16 nt, Synthetic Construct
  source 1..16: mol_type = other RNA
ggaattgacggaaggg

SEQ ID NO: 30768 - RNA, 16 nt, Synthetic Construct
  source 1..16: mol_type = other RNA
ggaattgacggaaggg

SEQ ID NO: 30769 - RNA, 20 nt, Synthetic Construct
  source 1..20: mol_type = other RNA
tgaggcagtaggttgtatag

SEQ ID NO: 30770 - RNA, 20 nt, Synthetic Construct
  source 1..20: mol_type = other RNA
tgaggcagtaggttgtatag

SEQ ID NO: 30771 - RNA, 22 nt, Synthetic Construct
  source 1..22: mol_type = other RNA
tgaggtagtagtttgtgctgtc

SEQ ID NO: 30772 - RNA, 22 nt, Synthetic Construct
  source 1..22: mol_type = other RNA
tgaggtagtagtttgtgctgtc

SEQ ID NO: 30773 - RNA, 22 nt, Synthetic Construct
  source 1..22: mol_type = other RNA
tcctgtattgagctgccccgag

SEQ ID NO: 30774 - RNA, 22 nt, Synthetic Construct
  source 1..22: mol_type = other RNA
tcctgtattgagctgccccgag

SEQ ID NO: 30775 - RNA, 22 nt, Synthetic Construct
  source 1..22: mol_type = other RNA
acagtagtctgcacattggttt

SEQ ID NO: 30776 - RNA, 32 nt, Synthetic Construct; identical to SEQ ID NO: 1238
  source 1..32: mol_type = other RNA

SEQ ID NO: 30777 - RNA, 32 nt, Synthetic Construct; identical to SEQ ID NO: 1238
  source 1..32: mol_type = other RNA

SEQ ID NO: 30778 - RNA, 23 nt, Synthetic Construct
  source 1..23: mol_type = other RNA
ttcaagtaattcaggataggttt

SEQ ID NO: 30779 - RNA, 35 nt, Synthetic Construct; identical to SEQ ID NO: 2069
  source 1..35: mol_type = other RNA

SEQ ID NO: 30780 - RNA, 35 nt, Synthetic Construct; identical to SEQ ID NO: 2069
  source 1..35: mol_type = other RNA

SEQ ID NO: 30781 - RNA, 21 nt, Synthetic Construct
  source 1..21: mol_type = other RNA
tgaggtagtaggttgtgcggt

SEQ ID NO: 30782 - RNA, 21 nt, Synthetic Construct
  source 1..21: mol_type = other RNA
tgaggtagtaggttgtgcggt

SEQ ID NO: 30783 - RNA, 22 nt, Synthetic Construct
  source 1..22: mol_type = other RNA
tgcagtgtttcctactttatgg

SEQ ID NO: 30784 - RNA, 22 nt, Synthetic Construct
  source 1..22: mol_type = other RNA
tgcagtgtttcctactttatgg

SEQ ID NO: 30785 - RNA, 21 nt, Synthetic Construct
  source 1..21: mol_type = other RNA
taactccttaagcaatctcgc

SEQ ID NO: 30786 - RNA, 21 nt, Synthetic Construct
  source 1..21: mol_type = other RNA
taactccttaagcaatctcgc

SEQ ID NO: 30787 - RNA, 21 nt, Synthetic Construct
  source 1..21: mol_type = other RNA
tggagtgtgacaatggtgctt

SEQ ID NO: 30788 - RNA, 21 nt, Synthetic Construct
  source 1..21: mol_type = other RNA
tggagtgtgacaatggtgctt

SEQ ID NO: 30789 - RNA, 23 nt, Synthetic Construct
  source 1..23: mol_type = other RNA
ggatatcatcatatactgtaagt

SEQ ID NO: 30790 - RNA, 23 nt, Synthetic Construct
  source 1..23: mol_type = other RNA
ggatatcatcatatactgtaagt

SEQ ID NO: 30791 - RNA, 21 nt, Synthetic Construct
  source 1..21: mol_type = other RNA
tgaggtagtaggttgtataga

SEQ ID NO: 30792 - RNA, 18 nt, Synthetic Construct
  source 1..18: mol_type = other RNA
gttcgattccggagaggg

SEQ ID NO: 30793 - RNA, 18 nt, Synthetic Construct
  source 1..18: mol_type = other RNA
gttcgattccggagaggg

SEQ ID NO: 30794 - RNA, 23 nt, Synthetic Construct
  source 1..23: mol_type = other RNA
tgggctaagggagatgattgggt

SEQ ID NO: 30795 - RNA, 29 nt, Synthetic Construct
  source 1..29: mol_type = other RNA
ttacaggggttcgaatcccctaggggacg

SEQ ID NO: 30796 - RNA, 29 nt, Synthetic Construct
  source 1..29: mol_type = other RNA
ttacaggggttcgaatcccctaggggacg

SEQ ID NO: 30797 - RNA, 22 nt, Synthetic Construct
  source 1..22: mol_type = other RNA
tgaggtagtaggatgtgtggtt

SEQ ID NO: 30798 - RNA, 22 nt, Synthetic Construct
  source 1..22: mol_type = other RNA
tgaggtagtaggatgtgtggtt

SEQ ID NO: 30799 - RNA, 23 nt, Synthetic Construct
  source 1..23: mol_type = other RNA
tgaagggcagagagcgagacttt

SEQ ID NO: 30800 - RNA, 23 nt, Synthetic Construct
  source 1..23: mol_type = other RNA
tgaagggcagagagcgagacttt

SEQ ID NO: 30801 - RNA, 34 nt, Synthetic Construct; identical to SEQ ID NO: 2298
  source 1..34: mol_type = other RNA

SEQ ID NO: 30802 - RNA, 23 nt, Synthetic Construct
  source 1..23: mol_type = other RNA
caaagtgcttacagtgcaggtag

SEQ ID NO: 30803 - RNA, 24 nt, Synthetic Construct
  source 1..24: mol_type = other RNA
caacggaatcccaaaagcagctgt

SEQ ID NO: 30804 - RNA, 24 nt, Synthetic Construct
  source 1..24: mol_type = other RNA
caacggaatcccaaaagcagctgt

SEQ ID NO: 30805 - RNA, 22 nt, Synthetic Construct
  source 1..22: mol_type = other RNA
tggagagaaaggcagttcctga

SEQ ID NO: 30806 - RNA, 22 nt, Synthetic Construct
  source 1..22: mol_type = other RNA
tcctgtactgagctgccctgag

SEQ ID NO: 30807 - RNA, 29 nt, Synthetic Construct
  source 1..29: mol_type = other RNA
cgcgacctcagatcagacgtggcgacccg

SEQ ID NO: 30808 - RNA, 29 nt, Synthetic Construct
  source 1..29: mol_type = other RNA
cgcgacctcagatcagacgtggcgacccg

SEQ ID NO: 30809 - RNA, 20 nt, Synthetic Construct
  source 1..20: mol_type = other RNA
tgaggtagtaggttgtacag

SEQ ID NO: 30810 - RNA, 23 nt, Synthetic Construct
  source 1..23: mol_type = other RNA
agggctgggtcggtcgggctggg

SEQ ID NO: 30811 - RNA, 23 nt, Synthetic Construct
  source 1..23: mol_type = other RNA
agggctgggtcggtcgggctggg

SEQ ID NO: 30812 - RNA, 33 nt, Synthetic Construct; identical to SEQ ID NO: 2395
  source 1..33: mol_type = other RNA

SEQ ID NO: 30813 - RNA, 20 nt, Synthetic Construct
  source 1..20: mol_type = other RNA
tcagtagctcgaggaaaaga

SEQ ID NO: 30814 - RNA, 27 nt, Synthetic Construct
  source 1..27: mol_type = other RNA
ggggagctaatcccagaaacccggtcg

SEQ ID NO: 30815 - RNA, 22 nt, Synthetic Construct
  source 1..22: mol_type = other RNA
tcctgtgctgagctgccccgag

SEQ ID NO: 30816 - RNA, 22 nt, Synthetic Construct
  source 1..22: mol_type = other RNA
tcctgtgctgagctgccccgag

SEQ ID NO: 30817 - RNA, 18 nt, Synthetic Construct
  source 1..18: mol_type = other RNA
agcaggacggtggccatg

SEQ ID NO: 30818 - RNA, 22 nt, Synthetic Construct
  source 1..22: mol_type = other RNA
actctttccctgttgcactact

SEQ ID NO: 30819 - RNA, 22 nt, Synthetic Construct
  source 1..22: mol_type = other RNA
actctttccctgttgcactact

SEQ ID NO: 30820 - RNA, 23 nt, Synthetic Construct
  source 1..23: mol_type = other RNA
tagcttatcagactgatgttgac

SEQ ID NO: 30821 - RNA, 23 nt, Synthetic Construct
  source 1..23: mol_type = other RNA
tagcttatcagactgatgttgac

SEQ ID NO: 30822 - RNA, 16 nt, Synthetic Construct
  source 1..16: mol_type = other RNA
cgctagtaatcgcgga

SEQ ID NO: 30823 - RNA, 16 nt, Synthetic Construct
  source 1..16: mol_type = other RNA
cgctagtaatcgcgga

SEQ ID NO: 30824 - RNA, 21 nt, Synthetic Construct
  source 1..21: mol_type = other RNA
tgaggtagtaggttgtatggt

SEQ ID NO: 30825 - RNA, 21 nt, Synthetic Construct
  source 1..21: mol_type = other RNA
tggggtgtgacaatggtgttt

SEQ ID NO: 30826 - RNA, 21 nt, Synthetic Construct
  source 1..21: mol_type = other RNA
tggggtgtgacaatggtgttt

SEQ ID NO: 30827 - RNA, 21 nt, Synthetic Construct
  source 1..21: mol_type = other RNA
tggagtgtgacaatggtgttc

SEQ ID NO: 30828 - RNA, 17 nt, Synthetic Construct
  source 1..17: mol_type = other RNA
catgcaagtcgaacggt

SEQ ID NO: 30829 - RNA, 33 nt, Synthetic Construct; identical to SEQ ID NO: 10461
  source 1..33: mol_type = other RNA

SEQ ID NO: 30830 - RNA, 18 nt, Synthetic Construct
  source 1..18: mol_type = other RNA
ggacgttgataggctggg

SEQ ID NO: 30831 - RNA, 18 nt, Synthetic Construct
  source 1..18: mol_type = other RNA
ggacgttgataggctggg

SEQ ID NO: 30832 - RNA, 36 nt, Synthetic Construct; identical to SEQ ID NO: 2506
  source 1..36: mol_type = other RNA

SEQ ID NO: 30833 - RNA, 36 nt, Synthetic Construct; identical to SEQ ID NO: 2506
  source 1..36: mol_type = other RNA

SEQ ID NO: 30834 - RNA, 18 nt, Synthetic Construct
  source 1..18: mol_type = other RNA
gctgtgatggccgagtgg

SEQ ID NO: 30835 - RNA, 22 nt, Synthetic Construct
  source 1..22: mol_type = other RNA
tgaggtggtagtttgtgctgtt

SEQ ID NO: 30836 - RNA, 22 nt, Synthetic Construct
  source 1..22: mol_type = other RNA
tgaggtagtgggttgtatagtt

SEQ ID NO: 30837 - RNA, 22 nt, Synthetic Construct
  source 1..22: mol_type = other RNA
tgaggtagtgggttgtatagtt

SEQ ID NO: 30838 - RNA, 21 nt, Synthetic Construct
  source 1..21: mol_type = other RNA
tggagagtgacaatggtgttt

SEQ ID NO: 30839 - RNA, 21 nt, Synthetic Construct
  source 1..21: mol_type = other RNA
tggagagtgacaatggtgttt

SEQ ID NO: 30840 - RNA, 16 nt, Synthetic Construct
  source 1..16: mol_type = other RNA
gtctacggctatacca

SEQ ID NO: 30841 - RNA, 23 nt, Synthetic Construct
  source 1..23: mol_type = other RNA
tcggatccgtctgagcttggctt

SEQ ID NO: 30842 - RNA, 21 nt, Synthetic Construct
  source 1..21: mol_type = other RNA
tgaggaagtaggttgtatagt

SEQ ID NO: 30843 - RNA, 21 nt, Synthetic Construct
  source 1..21: mol_type = other RNA
tgaggaagtaggttgtatagt

SEQ ID NO: 30844 - RNA, 18 nt, Synthetic Construct
  source 1..18: mol_type = other RNA
cccttgtcattagttgct

SEQ ID NO: 30845 - RNA, 34 nt, Synthetic Construct; identical to SEQ ID NO: 2553
  source 1..34: mol_type = other RNA

SEQ ID NO: 30846 - RNA, 34 nt, Synthetic Construct; identical to SEQ ID NO: 2553
  source 1..34: mol_type = other RNA

SEQ ID NO: 30847 - RNA, 23 nt, Synthetic Construct
  source 1..23: mol_type = other RNA
tgaggggcagagagcgagactat

SEQ ID NO: 30848 - RNA, 23 nt, Synthetic Construct
  source 1..23: mol_type = other RNA
tgaggggcagagagcgagactat

SEQ ID NO: 30849 - RNA, 21 nt, Synthetic Construct
  source 1..21: mol_type = other RNA
aatggcgccactagggttgtg

SEQ ID NO: 30850 - RNA, 24 nt, Synthetic Construct
  source 1..24: mol_type = other RNA
tgaggggcagagagcgagacttta

SEQ ID NO: 30851 - RNA, 24 nt, Synthetic Construct
  source 1..24: mol_type = other RNA
tgaggggcagagagcgagacttta

SEQ ID NO: 30852 - RNA, 21 nt, Synthetic Construct
  source 1..21: mol_type = other RNA
tcctgtactgggctgccccga

SEQ ID NO: 30853 - RNA, 34 nt, Synthetic Construct; identical to SEQ ID NO: 803
  source 1..34: mol_type = other RNA

SEQ ID NO: 30854 - RNA, 22 nt, Synthetic Construct
  source 1..22: mol_type = other RNA
tcctgtaccgagctgccccgag

SEQ ID NO: 30855 - RNA, 22 nt, Synthetic Construct
  source 1..22: mol_type = other RNA
tcctgtaccgagctgccccgag

SEQ ID NO: 30856 - RNA, 22 nt, Synthetic Construct
  source 1..22: mol_type = other RNA
tgaggtagtaggctgtgtggtt

SEQ ID NO: 30857 - RNA, 22 nt, Synthetic Construct
  source 1..22: mol_type = other RNA
tgaggtagtaggctgtgtggtt

SEQ ID NO: 30858 - RNA, 22 nt, Synthetic Construct
  source 1..22: mol_type = other RNA
tgaggtagtagtttgtgctgtg

SEQ ID NO: 30859 - RNA, 22 nt, Synthetic Construct
  source 1..22: mol_type = other RNA
ttcaagtaatccaggataggct

SEQ ID NO: 30860 - RNA, 21 nt, Synthetic Construct
  source 1..21: mol_type = other RNA
cgcatcccctagggcattggt

SEQ ID NO: 30861 - RNA, 21 nt, Synthetic Construct
  source 1..21: mol_type = other RNA
cgcatcccctagggcattggt

SEQ ID NO: 30862 - RNA, 22 nt, Synthetic Construct
  source 1..22: mol_type = other RNA
tcgaaccgtgagtaataatgcg

SEQ ID NO: 30863 - RNA, 22 nt, Synthetic Construct
  source 1..22: mol_type = other RNA
tcgaaccgtgagtaataatgcg

SEQ ID NO: 30864 - RNA, 21 nt, Synthetic Construct
  source 1..21: mol_type = other RNA
aggggcagagagcgagacttt

SEQ ID NO: 30865 - RNA, 23 nt, Synthetic Construct
  source 1..23: mol_type = other RNA
acagtagtctgcacattggttat

SEQ ID NO: 30866 - RNA, 21 nt, Synthetic Construct
  source 1..21: mol_type = other RNA
tgaggtagtagtctgtgctgt

SEQ ID NO: 30867 - RNA, 21 nt, Synthetic Construct
  source 1..21: mol_type = other RNA
tgaggtagtagtctgtgctgt

SEQ ID NO: 30868 - RNA, 23 nt, Synthetic Construct
  source 1..23: mol_type = other RNA
agcagcattgtacagggctatga

SEQ ID NO: 30869 - RNA, 23 nt, Synthetic Construct
  source 1..23: mol_type = other RNA
gtaaacatccttgactggaagct

SEQ ID NO: 30870 - RNA, 22 nt, Synthetic Construct
  source 1..22: mol_type = other RNA
tcctgtactgagctgccccaag

SEQ ID NO: 30871 - RNA, 22 nt, Synthetic Construct
  source 1..22: mol_type = other RNA
tcctgtactgagctgccccaag

SEQ ID NO: 30872 - RNA, 21 nt, Synthetic Construct
  source 1..21: mol_type = other RNA
tgaggtagtagtttgtgctgc

SEQ ID NO: 30873 - RNA, 21 nt, Synthetic Construct
  source 1..21: mol_type = other RNA
tgaggaagtaggttgtgtggt

SEQ ID NO: 30874 - RNA, 21 nt, Synthetic Construct
  source 1..21: mol_type = other RNA
tgaggaagtaggttgtgtggt

SEQ ID NO: 30875 - RNA, 25 nt, Synthetic Construct
  source 1..25: mol_type = other RNA
tcgaggatatgagatcgagacgaca

SEQ ID NO: 30876 - RNA, 24 nt, Synthetic Construct
  source 1..24: mol_type = other RNA
tgtaaacatccccgactggaggct

SEQ ID NO: 30877 - RNA, 21 nt, Synthetic Construct
  source 1..21: mol_type = other RNA
ttataatacaacctgataagt

SEQ ID NO: 30878 - RNA, 21 nt, Synthetic Construct
  source 1..21: mol_type = other RNA
ttataatacaacctgataagt

SEQ ID NO: 30879 - RNA, 34 nt, Synthetic Construct; identical to SEQ ID NO: 2291
  source 1..34: mol_type = other RNA

SEQ ID NO: 30880 - RNA, 34 nt, Synthetic Construct; identical to SEQ ID NO: 2291
  source 1..34: mol_type = other RNA

SEQ ID NO: 30881 - RNA, 22 nt, Synthetic Construct
  source 1..22: mol_type = other RNA
tatcggaacgtgcccagtcgtg

SEQ ID NO: 30882 - RNA, 22 nt, Synthetic Construct
  source 1..22: mol_type = other RNA
tatcggaacgtgcccagtcgtg

SEQ ID NO: 30883 - RNA, 23 nt, Synthetic Construct
  source 1..23: mol_type = other RNA
aatgacacgatcactcccgttga

SEQ ID NO: 30884 - RNA, 30 nt, Synthetic Construct; identical to SEQ ID NO: 2274
  source 1..30: mol_type = other RNA

SEQ ID NO: 30885 - RNA, 30 nt, Synthetic Construct; identical to SEQ ID NO: 2274
  source 1..30: mol_type = other RNA

SEQ ID NO: 30886 - RNA, 21 nt, Synthetic Construct
  source 1..21: mol_type = other RNA
ggctggtccgaaggtagtgag

SEQ ID NO: 30887 - RNA, 21 nt, Synthetic Construct
  source 1..21: mol_type = other RNA
ggctggtccgaaggtagtgag

SEQ ID NO: 30888 - RNA, 25 nt, Synthetic Construct
  source 1..25: mol_type = other RNA
tgtaaacatccttgactggaagctt

SEQ ID NO: 30889 - RNA, 16 nt, Synthetic Construct
  source 1..16: mol_type = other RNA
tggccgtcgtcagctc

SEQ ID NO: 30890 - RNA, 20 nt, Synthetic Construct
  source 1..20: mol_type = other RNA
tgaggtagtaggttgtgtgt

SEQ ID NO: 30891 - RNA, 23 nt, Synthetic Construct
  source 1..23: mol_type = other RNA
tggaatgtaaagaagtatgtata

SEQ ID NO: 30892 - RNA, 23 nt, Synthetic Construct
  source 1..23: mol_type = other RNA
tggaatgtaaagaagtatgtata

SEQ ID NO: 30893 - RNA, 22 nt, Synthetic Construct
  source 1..22: mol_type = other RNA
tgtgcaaatctatgcaaaactg

SEQ ID NO: 30894 - RNA, 19 nt, Synthetic Construct
  source 1..19: mol_type = other RNA
agcgaaattccttgtcggg

SEQ ID NO: 30895 - RNA, 21 nt, Synthetic Construct
  source 1..21: mol_type = other RNA
ggaggggcagagagcgagact

SEQ ID NO: 30896 - RNA, 23 nt, Synthetic Construct
  source 1..23: mol_type = other RNA
tggtaatacgacgtactaagtgt

SEQ ID NO: 30897 - RNA, 23 nt, Synthetic Construct
  source 1..23: mol_type = other RNA
tgaggggaagagagcgagacttt

SEQ ID NO: 30898 - RNA, 23 nt, Synthetic Construct
  source 1..23: mol_type = other RNA
tgaggggaagagagcgagacttt

SEQ ID NO: 30899 - RNA, 21 nt, Synthetic Construct
  source 1..21: mol_type = other RNA
tcctgtacagagctgccccga

SEQ ID NO: 30900 - RNA, 21 nt, Synthetic Construct
  source 1..21: mol_type = other RNA
tcctgtacagagctgccccga

SEQ ID NO: 30901 - RNA, 22 nt, Synthetic Construct
  source 1..22: mol_type = other RNA
ncgtaccgtgagtaataatgcg

SEQ ID NO: 30902 - RNA, 22 nt, Synthetic Construct
  source 1..22: mol_type = other RNA
tcctgtactgagctgccccaag

SEQ ID NO: 30903 - RNA, 22 nt, Synthetic Construct
  source 1..22: mol_type = other RNA
tgtaaacatccccgactggagg

SEQ ID NO: 30904 - RNA, 23 nt, Synthetic Construct
  source 1..23: mol_type = other RNA
tgtcagtttgtcaaataccccat

SEQ ID NO: 30905 - RNA, 21 nt, Synthetic Construct
  source 1..21: mol_type = other RNA
tcctgtgctgagctgccccga

SEQ ID NO: 30906 - RNA, 18 nt, Synthetic Construct
  source 1..18: mol_type = other RNA
atcccactcctgacacca

SEQ ID NO: 30907 - RNA, 18 nt, Synthetic Construct
  source 1..18: mol_type = other RNA
atcccactcctgacacca

SEQ ID NO: 30908 - RNA, 22 nt, Synthetic Construct
  source 1..22: mol_type = other RNA
tgttgcacttgtcccggcctgt

SEQ ID NO: 30909 - RNA, 23 nt, Synthetic Construct
  source 1..23: mol_type = other RNA
caaagtgccgttcgtgcaggtag

SEQ ID NO: 30910 - RNA, 23 nt, Synthetic Construct
  source 1..23: mol_type = other RNA
caaagtgccgttcgtgcaggtag

SEQ ID NO: 30911 - RNA, 33 nt, Synthetic Construct; identical to SEQ ID NO: 3082
  source 1..33: mol_type = other RNA

SEQ ID NO: 30912 - RNA, 33 nt, Synthetic Construct; identical to SEQ ID NO: 3082
  source 1..33: mol_type = other RNA

SEQ ID NO: 30913 - RNA, 23 nt, Synthetic Construct
  source 1..23: mol_type = other RNA
tgaggtagtaggttgtgcggttt

SEQ ID NO: 30914 - RNA, 23 nt, Synthetic Construct
  source 1..23: mol_type = other RNA
tcctgtacagagctgccccgaga

SEQ ID NO: 30915 - RNA, 27 nt, Synthetic Construct
  source 1..27: mol_type = other RNA
gacttaccaaacctatgcaaactccga

SEQ ID NO: 30916 - RNA, 22 nt, Synthetic Construct
  source 1..22: mol_type = other RNA
tgaggtagtaggttgtatagtc

SEQ ID NO: 30917 - RNA, 22 nt, Synthetic Construct
  source 1..22: mol_type = other RNA
tgaggtagtaggttgtatagtc

SEQ ID NO: 30918 - RNA, 22 nt, Synthetic Construct
  source 1..22: mol_type = other RNA
tgaggtagtagtttgtgctgta

SEQ ID NO: 30919 - RNA, 22 nt, Synthetic Construct
  source 1..22: mol_type = other RNA
tgaggtagtagtttgtgctgta

SEQ ID NO: 30920 - RNA, 25 nt, Synthetic Construct
  source 1..25: mol_type = other RNA
ggtaaaatcgctgagtgaagcattg

SEQ ID NO: 30921 - RNA, 25 nt, Synthetic Construct
  source 1..25: mol_type = other RNA
ggtaaaatcgctgagtgaagcattg

SEQ ID NO: 30922 - RNA, 20 nt, Synthetic Construct
  source 1..20: mol_type = other RNA
tgaggtagtaggttgtatgg

SEQ ID NO: 30923 - RNA, 20 nt, Synthetic Construct
  source 1..20: mol_type = other RNA
tgaggtagtaggttgtatgg

SEQ ID NO: 30924 - RNA, 22 nt, Synthetic Construct
  source 1..22: mol_type = other RNA
tgaggtagtaggttgtgtggta

SEQ ID NO: 30925 - RNA, 22 nt, Synthetic Construct
  source 1..22: mol_type = other RNA
tgaggtagtaggttgtgtggta

SEQ ID NO: 30926 - RNA, 23 nt, Synthetic Construct
  source 1..23: mol_type = other RNA
tcactgatcgagtcgtcctgcgc

SEQ ID NO: 30927 - RNA, 16 nt, Synthetic Construct
  source 1..16: mol_type = other RNA
cccagaaacccggtcg

SEQ ID NO: 30928 - RNA, 20 nt, Synthetic Construct
  source 1..20: mol_type = other RNA
tagcagcacatcatggttta

SEQ ID NO: 30929 - RNA, 20 nt, Synthetic Construct
  source 1..20: mol_type = other RNA
tagcagcacatcatggttta

SEQ ID NO: 30930 - RNA, 25 nt, Synthetic Construct
  source 1..25: mol_type = other RNA
ggtaaaattgctgagtgaagcattg

SEQ ID NO: 30931 - RNA, 25 nt, Synthetic Construct
  source 1..25: mol_type = other RNA
ggtaaaattgctgagtgaagcattg

SEQ ID NO: 30932 - RNA, 17 nt, Synthetic Construct
  source 1..17: mol_type = other RNA
gtccggatcgtagtctg

SEQ ID NO: 30933 - RNA, 17 nt, Synthetic Construct
  source 1..17: mol_type = other RNA
gtccggatcgtagtctg

SEQ ID NO: 30934 - RNA, 27 nt, Synthetic Construct
  source 1..27: mol_type = other RNA
ccccccactgctaaatttgacaggctt

SEQ ID NO: 30935 - RNA, 17 nt, Synthetic Construct
  source 1..17: mol_type = other RNA
tcccagaaacccggtcg

SEQ ID NO: 30936 - RNA, 18 nt, Synthetic Construct
  source 1..18: mol_type = other RNA
gctattgacgaccgtacc

SEQ ID NO: 30937 - RNA, 22 nt, Synthetic Construct
  source 1..22: mol_type = other RNA
tcctgtactgagcagccccgag

SEQ ID NO: 30938 - RNA, 22 nt, Synthetic Construct
  source 1..22: mol_type = other RNA
tcctgtactgagcagccccgag

SEQ ID NO: 30939 - RNA, 22 nt, Synthetic Construct
  source 1..22: mol_type = other RNA
tgaggtagtaggttgtatggtt

SEQ ID NO: 30940 - RNA, 22 nt, Synthetic Construct
  source 1..22: mol_type = other RNA
tgaggtagtaggttgtatggtt

SEQ ID NO: 30941 - RNA, 22 nt, Synthetic Construct
  source 1..22: mol_type = other RNA
tattgcacttgtcctggcctgt

SEQ ID NO: 30942 - RNA, 22 nt, Synthetic Construct
  source 1..22: mol_type = other RNA
tattgcacttgtcctggcctgt

SEQ ID NO: 30943 - RNA, 22 nt, Synthetic Construct
  source 1..22: mol_type = other RNA
tggaatgtaaagaagtatgtat

SEQ ID NO: 30944 - RNA, 22 nt, Synthetic Construct
  source 1..22: mol_type = other RNA
tggaatgtaaagaagtatgtat

SEQ ID NO: 30945 - RNA, 23 nt, Synthetic Construct
  source 1..23: mol_type = other RNA
ttcaagtaatccaggataggctt

SEQ ID NO: 30946 - RNA, 23 nt, Synthetic Construct
  source 1..23: mol_type = other RNA
ttcaagtaatccaggataggctt

SEQ ID NO: 30947 - RNA, 21 nt, Synthetic Construct
  source 1..21: mol_type = other RNA
aatggcgccactagggttgtg

SEQ ID NO: 30948 - RNA, 26 nt, Synthetic Construct
  source 1..26: mol_type = other RNA
aatgacacgatcactcccgttgagtt

SEQ ID NO: 30949 - RNA, 23 nt, Synthetic Construct
  source 1..23: mol_type = other RNA
tggagacgcggccctgttggagt

SEQ ID NO: 30950 - RNA, 21 nt, Synthetic Construct
  source 1..21: mol_type = other RNA
cgcgacctcagatcagacgtg

SEQ ID NO: 30951 - RNA, 21 nt, Synthetic Construct
  source 1..21: mol_type = other RNA
cgcgacctcagatcagacgtg

SEQ ID NO: 30952 - RNA, 27 nt, Synthetic Construct
  source 1..27: mol_type = other RNA
tcccccactgctaaatttgactggctt

SEQ ID NO: 30953 - RNA, 22 nt, Synthetic Construct
  source 1..22: mol_type = other RNA
ncgtaccgtgagtaataatgcg

SEQ ID NO: 30954 - RNA, 16 nt, Synthetic Construct
  source 1..16: mol_type = other RNA
atctacggccatacca

SEQ ID NO: 30955 - RNA, 23 nt, Synthetic Construct
  source 1..23: mol_type = other RNA
tcctgtactgagctaccccgaga

SEQ ID NO: 30956 - RNA, 23 nt, Synthetic Construct
  source 1..23: mol_type = other RNA
tcctgtactgagctaccccgaga

SEQ ID NO: 30957 - RNA, 20 nt, Synthetic Construct
  source 1..20: mol_type = other RNA
tgaggtagcaggttgtatag

SEQ ID NO: 30958 - RNA, 20 nt, Synthetic Construct
  source 1..20: mol_type = other RNA
tgaggtagcaggttgtatag

SEQ ID NO: 30959 - RNA, 15 nt, Synthetic Construct
  source 1..15: mol_type = other RNA
gctttgatccggaga

SEQ ID NO: 30960 - RNA, 15 nt, Synthetic Construct
  source 1..15: mol_type = other RNA
gctttgatccggaga

SEQ ID NO: 30961 - RNA, 22 nt, Synthetic Construct
  source 1..22: mol_type = other RNA
ccggtcccaagggtatggctgt

SEQ ID NO: 30962 - RNA, 17 nt, Synthetic Construct
  source 1..17: mol_type = other RNA
cgtgagctgggtttaga

SEQ ID NO: 30963 - RNA, 17 nt, Synthetic Construct
  source 1..17: mol_type = other RNA
cgtgagctgggtttaga

SEQ ID NO: 30964 - RNA, 16 nt, Synthetic Construct
  source 1..16: mol_type = other RNA
gtctacggccatacta

SEQ ID NO: 30965 - RNA, 16 nt, Synthetic Construct
  source 1..16: mol_type = other RNA
gtctacggccatacta

SEQ ID NO: 30966 - RNA, 27 nt, Synthetic Construct
  source 1..27: mol_type = other RNA
ccccccgctgctaaatttgactggctt

SEQ ID NO: 30967 - RNA, 16 nt, Synthetic Construct
  source 1..16: mol_type = other RNA
gctattgacgaccgta

SEQ ID NO: 30968 - RNA, 23 nt, Synthetic Construct
  source 1..23: mol_type = other RNA
agcaggacggtggccatggaagt

SEQ ID NO: 30969 - RNA, 23 nt, Synthetic Construct
  source 1..23: mol_type = other RNA
agcaggacggtggccatggaagt

SEQ ID NO: 30970 - RNA, 29 nt, Synthetic Construct
  source 1..29: mol_type = other RNA
gatgcgaaagcaggtcaaagtgatccggc

SEQ ID NO: 30971 - RNA, 29 nt, Synthetic Construct
  source 1..29: mol_type = other RNA
gatgcgaaagcaggtcaaagtgatccggc

SEQ ID NO: 30972 - RNA, 23 nt, Synthetic Construct
  source 1..23: mol_type = other RNA
ggaggggcagagagcgagacttt

SEQ ID NO: 30973 - RNA, 25 nt, Synthetic Construct
  source 1..25: mol_type = other RNA
cgtgtatttgacaagctgagttggt

SEQ ID NO: 30974 - RNA, 25 nt, Synthetic Construct
  source 1..25: mol_type = other RNA
cgtgtatttgacaagctgagttggt

SEQ ID NO: 30975 - RNA, 20 nt, Synthetic Construct
  source 1..20: mol_type = other RNA
tgaggaagtaggttgtatag

SEQ ID NO: 30976 - RNA, 20 nt, Synthetic Construct
  source 1..20: mol_type = other RNA
tgaggaagtaggttgtatag

SEQ ID NO: 30977 - RNA, 31 nt, Synthetic Construct; identical to SEQ ID NO: 2507
  source 1..31: mol_type = other RNA

SEQ ID NO: 30978 - RNA, 31 nt, Synthetic Construct; identical to SEQ ID NO: 2507
  source 1..31: mol_type = other RNA

SEQ ID NO: 30979 - RNA, 22 nt, Synthetic Construct
  source 1..22: mol_type = other RNA
tagcagcacgtagatattggcg

SEQ ID NO: 30980 - RNA, 24 nt, Synthetic Construct
  source 1..24: mol_type = other RNA
tgtaaacatccccgactggaagcc

SEQ ID NO: 30981 - RNA, 24 nt, Synthetic Construct
  source 1..24: mol_type = other RNA
tgtaaacatccccgactggaagcc

SEQ ID NO: 30982 - RNA, 21 nt, Synthetic Construct
  source 1..21: mol_type = other RNA
cgtaccgtgagtaataatgcg

SEQ ID NO: 30983 - RNA, 21 nt, Synthetic Construct
  source 1..21: mol_type = other RNA
cgtaccgtgagtaataatgcg

SEQ ID NO: 30984 - RNA, 23 nt, Synthetic Construct
  source 1..23: mol_type = other RNA
tggtaatacgacgtactttgtgt

SEQ ID NO: 30985 - RNA, 21 nt, Synthetic Construct
  source 1..21: mol_type = other RNA
tgaggggcagggagcgagact

SEQ ID NO: 30986 - RNA, 19 nt, Synthetic Construct
  source 1..19: mol_type = other RNA
cgcgacctcagatcagacg

SEQ ID NO: 30987 - RNA, 19 nt, Synthetic Construct
  source 1..19: mol_type = other RNA
cgcgacctcagatcagacg

SEQ ID NO: 30988 - RNA, 23 nt, Synthetic Construct
  source 1..23: mol_type = other RNA
atgacacgatcactcccgttgag

SEQ ID NO: 30989 - RNA, 23 nt, Synthetic Construct
  source 1..23: mol_type = other RNA
atgacacgatcactcccgttgag

SEQ ID NO: 30990 - RNA, 17 nt, Synthetic Construct
  source 1..17: mol_type = other RNA
agtccggatcgtagtct

SEQ ID NO: 30991 - RNA, 17 nt, Synthetic Construct
  source 1..17: mol_type = other RNA
agtccggatcgtagtct

SEQ ID NO: 30992 - RNA, 18 nt, Synthetic Construct
  source 1..18: mol_type = other RNA
cgcgacctcagatcagac

SEQ ID NO: 30993 - RNA, 22 nt, Synthetic Construct
  source 1..22: mol_type = other RNA
tcctgtactgagctgccccgtg

SEQ ID NO: 30994 - RNA, 22 nt, Synthetic Construct
  source 1..22: mol_type = other RNA
tcctgtactgagctgccccgtg

SEQ ID NO: 30995 - RNA, 15 nt, Synthetic Construct
  source 1..15: mol_type = other RNA
tccggatcgtagtct

SEQ ID NO: 30996 - RNA, 23 nt, Synthetic Construct
  source 1..23: mol_type = other RNA
tcggatccgtctgagcttggctt

SEQ ID NO: 30997 - RNA, 16 nt, Synthetic Construct
  source 1..16: mol_type = other RNA
gtctacggacatacca

SEQ ID NO: 30998 - RNA, 16 nt, Synthetic Construct
  source 1..16: mol_type = other RNA
gtctacggacatacca

SEQ ID NO: 30999 - RNA, 23 nt, Synthetic Construct
  source 1..23: mol_type = other RNA
tgaggtagtaggctgtgtggttt

SEQ ID NO: 31000 - RNA, 23 nt, Synthetic Construct
  source 1..23: mol_type = other RNA
tgaggtagtaggctgtgtggttt

SEQ ID NO: 31001 - RNA, 21 nt, Synthetic Construct
  source 1..21: mol_type = other RNA
caaagtgctgttcgtgcaggt

SEQ ID NO: 31002 - RNA, 21 nt, Synthetic Construct
  source 1..21: mol_type = other RNA
caaagtgctgttcgtgcaggt

SEQ ID NO: 31003 - RNA, 21 nt, Synthetic Construct
  source 1..21: mol_type = other RNA
ttataatacaacctgataagt

SEQ ID NO: 31004 - RNA, 19 nt, Synthetic Construct
  source 1..19: mol_type = other RNA
agtaggtcatcgtcaggct

SEQ ID NO: 31005 - RNA, 19 nt, Synthetic Construct
  source 1..19: mol_type = other RNA
agtaggtcatcgtcaggct

SEQ ID NO: 31006 - RNA, 22 nt, Synthetic Construct
  source 1..22: mol_type = other RNA
tattgcacttgtcccggcctat

SEQ ID NO: 31007 - RNA, 22 nt, Synthetic Construct
  source 1..22: mol_type = other RNA
tgaggtagtagtttgtgctgta

SEQ ID NO: 31008 - RNA, 25 nt, Synthetic Construct
  source 1..25: mol_type = other RNA
ttgcagctgcctgggagtgacttca

SEQ ID NO: 31009 - RNA, 25 nt, Synthetic Construct
  source 1..25: mol_type = other RNA
ttgcagctgcctgggagtgacttca

SEQ ID NO: 31010 - RNA, 22 nt, Synthetic Construct
  source 1..22: mol_type = other RNA
tattgcactcgtcccggcctgt

SEQ ID NO: 31011 - RNA, 22 nt, Synthetic Construct
  source 1..22: mol_type = other RNA
tattgcactcgtcccggcctgt

SEQ ID NO: 31012 - RNA, 23 nt, Synthetic Construct
  source 1..23: mol_type = other RNA
tcctgcactgagctgccccgaga

SEQ ID NO: 31013 - RNA, 23 nt, Synthetic Construct
  source 1..23: mol_type = other RNA
tcctgcactgagctgccccgaga

SEQ ID NO: 31014 - RNA, 35 nt, Synthetic Construct; identical to SEQ ID NO: 2069
  source 1..35: mol_type = other RNA

SEQ ID NO: 31015 - RNA, 29 nt, Synthetic Construct
  source 1..29: mol_type = other RNA
gcatgggtggttcagtggtagaattctcg

SEQ ID NO: 31016 - RNA, 29 nt, Synthetic Construct
  source 1..29: mol_type = other RNA
gcatgggtggttcagtggtagaattctcg

SEQ ID NO: 31017 - RNA, 16 nt, Synthetic Construct
  source 1..16: mol_type = other RNA
acggcccagactccta

SEQ ID NO: 31018 - RNA, 22 nt, Synthetic Construct
  source 1..22: mol_type = other RNA
cattgcgcttgtctcggtctga

SEQ ID NO: 31019 - RNA, 22 nt, Synthetic Construct
  source 1..22: mol_type = other RNA
tagcagcacgcaaatattggcg

SEQ ID NO: 31020 - RNA, 22 nt, Synthetic Construct
  source 1..22: mol_type = other RNA
tgaggaagtaggttgtatagtt

SEQ ID NO: 31021 - RNA, 22 nt, Synthetic Construct
  source 1..22: mol_type = other RNA
tcgaatccgagtcacggcacca

SEQ ID NO: 31022 - RNA, 22 nt, Synthetic Construct
  source 1..22: mol_type = other RNA
tcgaatccgagtcacggcacca

SEQ ID NO: 31023 - RNA, 23 nt, Synthetic Construct
  source 1..23: mol_type = other RNA
tggtaatacgacatacttagtgt

SEQ ID NO: 31024 - RNA, 23 nt, Synthetic Construct
  source 1..23: mol_type = other RNA
tggtaatacgacatacttagtgt

SEQ ID NO: 31025 - RNA, 22 nt, Synthetic Construct
  source 1..22: mol_type = other RNA
tgagatagtaggttgtgtggtt

SEQ ID NO: 31026 - RNA, 23 nt, Synthetic Construct
  source 1..23: mol_type = other RNA
tgaggtagtaggttgtgtggtaa

SEQ ID NO: 31027 - RNA, 23 nt, Synthetic Construct
  source 1..23: mol_type = other RNA
tgaggtagtaggttgtgtggtaa

SEQ ID NO: 31028 - RNA, 40 nt, Synthetic Construct; identical to SEQ ID NO: 2684
  source 1..40: mol_type = other RNA

SEQ ID NO: 31029 - RNA, 40 nt, Synthetic Construct; identical to SEQ ID NO: 2684
  source 1..40: mol_type = other RNA

SEQ ID NO: 31030 - RNA, 23 nt, Synthetic Construct
  source 1..23: mol_type = other RNA
tctacagtgcacgtgtctccagt

SEQ ID NO: 31031 - RNA, 21 nt, Synthetic Construct
  source 1..21: mol_type = other RNA
agaggggcagagagcgagact

SEQ ID NO: 31032 - RNA, 21 nt, Synthetic Construct
  source 1..21: mol_type = other RNA
cggagtgtgacaatggtgttt

SEQ ID NO: 31033 - RNA, 21 nt, Synthetic Construct
  source 1..21: mol_type = other RNA
cggagtgtgacaatggtgttt

SEQ ID NO: 31034 - RNA, 24 nt, Synthetic Construct
  source 1..24: mol_type = other RNA
tgagaactgaattccatgggtttt

SEQ ID NO: 31035 - RNA, 24 nt, Synthetic Construct
  source 1..24: mol_type = other RNA
tgagaactgaattccatgggtttt

SEQ ID NO: 31036 - RNA, 34 nt, Synthetic Construct; identical to SEQ ID NO: 2529
  source 1..34: mol_type = other RNA

SEQ ID NO: 31037 - RNA, 34 nt, Synthetic Construct; identical to SEQ ID NO: 2529
  source 1..34: mol_type = other RNA

SEQ ID NO: 31038 - RNA, 16 nt, Synthetic Construct
  source 1..16: mol_type = other RNA
gcaagaggtcagcggt

SEQ ID NO: 31039 - RNA, 22 nt, Synthetic Construct
  source 1..22: mol_type = other RNA
tgaggtagtagattgtgtggtt

SEQ ID NO: 31040 - RNA, 22 nt, Synthetic Construct
  source 1..22: mol_type = other RNA
tgaggtagtagattgtgtggtt

SEQ ID NO: 31041 - RNA, 23 nt, Synthetic Construct
  source 1..23: mol_type = other RNA
caaagagctgttcgtgcaggtag

SEQ ID NO: 31042 - RNA, 22 nt, Synthetic Construct
  source 1..22: mol_type = other RNA
tattgcacttgtcccagcctgt

SEQ ID NO: 31043 - RNA, 22 nt, Synthetic Construct
  source 1..22: mol_type = other RNA
tattgcacttgtcccagcctgt

SEQ ID NO: 31044 - RNA, 23 nt, Synthetic Construct
  source 1..23: mol_type = other RNA
ggcagggttcgtgactggggtga

SEQ ID NO: 31045 - RNA, 23 nt, Synthetic Construct
  source 1..23: mol_type = other RNA
ggcagggttcgtgactggggtga

SEQ ID NO: 31046 - RNA, 22 nt, Synthetic Construct
  source 1..22: mol_type = other RNA
taaggtagtaggttgtatagtt

SEQ ID NO: 31047 - RNA, 22 nt, Synthetic Construct
  source 1..22: mol_type = other RNA
taaggtagtaggttgtatagtt

SEQ ID NO: 31048 - RNA, 19 nt, Synthetic Construct
  source 1..19: mol_type = other RNA
cctcgtcatctaattagtg

SEQ ID NO: 31049 - RNA, 19 nt, Synthetic Construct
  source 1..19: mol_type = other RNA
cctcgtcatctaattagtg

SEQ ID NO: 31050 - RNA, 22 nt, Synthetic Construct
  source 1..22: mol_type = other RNA
tgtgcaaatctatgcaaaactg

SEQ ID NO: 31051 - RNA, 22 nt, Synthetic Construct
  source 1..22: mol_type = other RNA
tgtgcaaatctatgcaaaactg

SEQ ID NO: 31052 - RNA, 22 nt, Synthetic Construct
  source 1..22: mol_type = other RNA
aagacgggaggaaagaagggag

SEQ ID NO: 31053 - RNA, 22 nt, Synthetic Construct
  source 1..22: mol_type = other RNA
aagacgggaggaaagaagggag

SEQ ID NO: 31054 - RNA, 21 nt, Synthetic Construct
  source 1..21: mol_type = other RNA
tgaggggcagagagcgagacc

SEQ ID NO: 31055 - RNA, 18 nt, Synthetic Construct
  source 1..18: mol_type = other RNA
tcttcggtagtatagtgg

SEQ ID NO: 31056 - RNA, 18 nt, Synthetic Construct
  source 1..18: mol_type = other RNA
tcttcggtagtatagtgg

SEQ ID NO: 31057 - RNA, 22 nt, Synthetic Construct
  source 1..22: mol_type = other RNA
tgaggtagtagtttgtgcggtt

SEQ ID NO: 31058 - RNA, 21 nt, Synthetic Construct
  source 1..21: mol_type = other RNA
gcagtagtctgcacattggtt

SEQ ID NO: 31059 - RNA, 39 nt, Synthetic Construct; identical to SEQ ID NO: 759
  source 1..39: mol_type = other RNA

SEQ ID NO: 31060 - RNA, 39 nt, Synthetic Construct; identical to SEQ ID NO: 759
  source 1..39: mol_type = other RNA

SEQ ID NO: 31061 - RNA, 19 nt, Synthetic Construct
  source 1..19: mol_type = other RNA
tagcttatcagactgatgt

SEQ ID NO: 31062 - RNA, 19 nt, Synthetic Construct
  source 1..19: mol_type = other RNA
tagcttatcagactgatgt

SEQ ID NO: 31063 - RNA, 24 nt, Synthetic Construct
  source 1..24: mol_type = other RNA
gttgaattgtggtctgtggacgtg

SEQ ID NO: 31064 - RNA, 24 nt, Synthetic Construct
  source 1..24: mol_type = other RNA
gttgaattgtggtctgtggacgtg

SEQ ID NO: 31065 - RNA, 19 nt, Synthetic Construct
  source 1..19: mol_type = other RNA
gggataactggcttgtggc

SEQ ID NO: 31066 - RNA, 19 nt, Synthetic Construct
  source 1..19: mol_type = other RNA
gggataactggcttgtggc

SEQ ID NO: 31067 - RNA, 21 nt, Synthetic Construct
  source 1..21: mol_type = other RNA
tgagatagtaggttgtgtggt

SEQ ID NO: 31068 - RNA, 21 nt, Synthetic Construct
  source 1..21: mol_type = other RNA
tgagatagtaggttgtgtggt

SEQ ID NO: 31069 - RNA, 21 nt, Synthetic Construct
  source 1..21: mol_type = other RNA
cgaggggcagagagcgagact

SEQ ID NO: 31070 - RNA, 21 nt, Synthetic Construct
  source 1..21: mol_type = other RNA
cgaggggcagagagcgagact

SEQ ID NO: 31071 - RNA, 29 nt, Synthetic Construct
  source 1..29: mol_type = other RNA
gcattgtggttcagtggtagaattctcgc

SEQ ID NO: 31072 - RNA, 29 nt, Synthetic Construct
  source 1..29: mol_type = other RNA
gcattgtggttcagtggtagaattctcgc

SEQ ID NO: 31073 - RNA, 19 nt, Synthetic Construct
  source 1..19: mol_type = other RNA
tgtcagtttgtcaaatacc

SEQ ID NO: 31074 - RNA, 19 nt, Synthetic Construct
  source 1..19: mol_type = other RNA
tgtcagtttgtcaaatacc

SEQ ID NO: 31075 - RNA, 22 nt, Synthetic Construct
  source 1..22: mol_type = other RNA
tgaggaagtagattgtatagtt

SEQ ID NO: 31076 - RNA, 35 nt, Synthetic Construct; identical to SEQ ID NO: 2269
  source 1..35: mol_type = other RNA

SEQ ID NO: 31077 - RNA, 26 nt, Synthetic Construct
  source 1..26: mol_type = other RNA
cgactcttagcggtggatcactcggc

SEQ ID NO: 31078 - RNA, 24 nt, Synthetic Construct
  source 1..24: mol_type = other RNA
tgtgatttctgcccagtgctctga

SEQ ID NO: 31079 - RNA, 24 nt, Synthetic Construct
  source 1..24: mol_type = other RNA
tgtgatttctgcccagtgctctga

SEQ ID NO: 31080 - RNA, 20 nt, Synthetic Construct
  source 1..20: mol_type = other RNA
tgaggcagtaggttgtatag

SEQ ID NO: 31081 - RNA, 20 nt, Synthetic Construct
  source 1..20: mol_type = other RNA
tgaggcagtaggttgtatag

SEQ ID NO: 31082 - RNA, 23 nt, Synthetic Construct
  source 1..23: mol_type = other RNA
aacattcaacgctgtcggtgaga

SEQ ID NO: 31083 - RNA, 20 nt, Synthetic Construct
  source 1..20: mol_type = other RNA
tgaggtagtaggctgtgtgg

SEQ ID NO: 31084 - RNA, 31 nt, Synthetic Construct; identical to SEQ ID NO: 758
  source 1..31: mol_type = other RNA

SEQ ID NO: 31085 - RNA, 21 nt, Synthetic Construct
  source 1..21: mol_type = other RNA
gaagaggacttggaactcgat

SEQ ID NO: 31086 - RNA, 21 nt, Synthetic Construct
  source 1..21: mol_type = other RNA
gaagaggacttggaactcgat

SEQ ID NO: 31087 - RNA, 31 nt, Synthetic Construct; identical to SEQ ID NO: 2215
  source 1..31: mol_type = other RNA

SEQ ID NO: 31088 - RNA, 31 nt, Synthetic Construct; identical to SEQ ID NO: 2215
  source 1..31: mol_type = other RNA

SEQ ID NO: 31089 - RNA, 16 nt, Synthetic Construct
  source 1..16: mol_type = other RNA
cccaaaggtcgtcggt

SEQ ID NO: 31090 - RNA, 25 nt, Synthetic Construct
  source 1..25: mol_type = other RNA
ccccactgctaaatttgactggctt

SEQ ID NO: 31091 - RNA, 27 nt, Synthetic Construct
  source 1..27: mol_type = other RNA
cgtgtgaaagtaggtcatcgtcaggct

SEQ ID NO: 31092 - RNA, 27 nt, Synthetic Construct
  source 1..27: mol_type = other RNA
cgtgtgaaagtaggtcatcgtcaggct

SEQ ID NO: 31093 - RNA, 22 nt, Synthetic Construct
  source 1..22: mol_type = other RNA
tattgcacttgtcccggcctgc

SEQ ID NO: 31094 - RNA, 20 nt, Synthetic Construct
  source 1..20: mol_type = other RNA
tcgcgccgtcgggcccgggg

SEQ ID NO: 31095 - RNA, 20 nt, Synthetic Construct
  source 1..20: mol_type = other RNA
tcgcgccgtcgggcccgggg

SEQ ID NO: 31096 - RNA, 27 nt, Synthetic Construct
  source 1..27: mol_type = other RNA
gcatgggtggttcagtggtagaattct

SEQ ID NO: 31097 - RNA, 27 nt, Synthetic Construct
  source 1..27: mol_type = other RNA
gcatgggtggttcagtggtagaattct

SEQ ID NO: 31098 - RNA, 22 nt, Synthetic Construct
  source 1..22: mol_type = other RNA
cgaggtagtaggttgtgtggtt

SEQ ID NO: 31099 - RNA, 22 nt, Synthetic Construct
  source 1..22: mol_type = other RNA
cgaggtagtaggttgtgtggtt

SEQ ID NO: 31100 - RNA, 22 nt, Synthetic Construct
  source 1..22: mol_type = other RNA
tgaggtagtagattgtatagct

SEQ ID NO: 31101 - RNA, 22 nt, Synthetic Construct
  source 1..22: mol_type = other RNA
tgaggtagtagattgtatagct

SEQ ID NO: 31102 - RNA, 23 nt, Synthetic Construct
  source 1..23: mol_type = other RNA
ggaggggcagagagcgagacttt

SEQ ID NO: 31103 - RNA, 23 nt, Synthetic Construct
  source 1..23: mol_type = other RNA
ggaggggcagagagcgagacttt

SEQ ID NO: 31104 - RNA, 22 nt, Synthetic Construct
  source 1..22: mol_type = other RNA
tggagtgtgacaatggcgtttg

SEQ ID NO: 31105 - RNA, 19 nt, Synthetic Construct
  source 1..19: mol_type = other RNA
agcagcattgtacagggct

SEQ ID NO: 31106 - RNA, 19 nt, Synthetic Construct
  source 1..19: mol_type = other RNA
agcagcattgtacagggct

SEQ ID NO: 31107 - RNA, 27 nt, Synthetic Construct
  source 1..27: mol_type = other RNA
gactcttagcggtggatcactcggctc

SEQ ID NO: 31108 - RNA, 27 nt, Synthetic Construct
  source 1..27: mol_type = other RNA
gactcttagcggtggatcactcggctc

SEQ ID NO: 31109 - RNA, 21 nt, Synthetic Construct
  source 1..21: mol_type = other RNA
tgaggtagtaggtcgtatagt

SEQ ID NO: 31110 - RNA, 21 nt, Synthetic Construct
  source 1..21: mol_type = other RNA
tgaggtagtaggtcgtatagt

SEQ ID NO: 31111 - RNA, 27 nt, Synthetic Construct
  source 1..27: mol_type = other RNA
ccccccactgctaagtttgactggctt

SEQ ID NO: 31112 - RNA, 27 nt, Synthetic Construct
  source 1..27: mol_type = other RNA
ccccccactgctaagtttgactggctt

SEQ ID NO: 31113 - RNA, 22 nt, Synthetic Construct
  source 1..22: mol_type = other RNA
tcctgtactgagctgccccgac

SEQ ID NO: 31114 - RNA, 22 nt, Synthetic Construct
  source 1..22: mol_type = other RNA
tcctgtactgagctgccccgac

SEQ ID NO: 31115 - RNA, 22 nt, Synthetic Construct
  source 1..22: mol_type = other RNA
tgaggtagtaggttgtgttgtt

SEQ ID NO: 31116 - RNA, 22 nt, Synthetic Construct
  source 1..22: mol_type = other RNA
tgaggtagtaggttgtgttgtt

SEQ ID NO: 31117 - RNA, 15 nt, Synthetic Construct
  source 1..15: mol_type = other RNA
cagtgaaacgagtca

SEQ ID NO: 31118 - RNA, 35 nt, Synthetic Construct; identical to SEQ ID NO: 2397
  source 1..35: mol_type = other RNA

SEQ ID NO: 31119 - RNA, 35 nt, Synthetic Construct; identical to SEQ ID NO: 2397
  source 1..35: mol_type = other RNA

SEQ ID NO: 31120 - RNA, 27 nt, Synthetic Construct
  source 1..27: mol_type = other RNA
ccccccgctgctaaatttgactggcta

SEQ ID NO: 31121 - RNA, 22 nt, Synthetic Construct
  source 1..22: mol_type = other RNA
tgaggtagtaggttgtgtggtt

SEQ ID NO: 31122 - RNA, 22 nt, Synthetic Construct
  source 1..22: mol_type = other RNA
tgaggtagtaggttgtgtggtt

SEQ ID NO: 31123 - RNA, 19 nt, Synthetic Construct
  source 1..19: mol_type = other RNA
tcctgtaccgatcaatagt

SEQ ID NO: 31124 - RNA, 22 nt, Synthetic Construct
  source 1..22: mol_type = other RNA
tattgcacctgtcccggcctgt

SEQ ID NO: 31125 - RNA, 22 nt, Synthetic Construct
  source 1..22: mol_type = other RNA
tattgcacctgtcccggcctgt

SEQ ID NO: 31126 - RNA, 21 nt, Synthetic Construct
  source 1..21: mol_type = other RNA
tgaggtagtaggttatgtggt

SEQ ID NO: 31127 - RNA, 21 nt, Synthetic Construct
  source 1..21: mol_type = other RNA
tgaggtagtaggttatgtggt

SEQ ID NO: 31128 - RNA, 15 nt, Synthetic Construct
  source 1..15: mol_type = other RNA
cgatatggcatgaga

SEQ ID NO: 31129 - RNA, 15 nt, Synthetic Construct
  source 1..15: mol_type = other RNA
cgatatggcatgaga

SEQ ID NO: 31130 - RNA, 32 nt, Synthetic Construct; identical to SEQ ID NO: 14097
  source 1..32: mol_type = other RNA

SEQ ID NO: 31131 - RNA, 23 nt, Synthetic Construct
  source 1..23: mol_type = other RNA
tgaggggcagggagcgagacttt

SEQ ID NO: 31132 - RNA, 23 nt, Synthetic Construct
  source 1..23: mol_type = other RNA
tgaggggcagggagcgagacttt

SEQ ID NO: 31133 - RNA, 15 nt, Synthetic Construct
  source 1..15: mol_type = other RNA
tccggatcgtagtct

SEQ ID NO: 31134 - RNA, 15 nt, Synthetic Construct
  source 1..15: mol_type = other RNA
tccggatcgtagtct

SEQ ID NO: 31135 - RNA, 22 nt, Synthetic Construct
  source 1..22: mol_type = other RNA
tggggtagtaggttgtgtggtt

SEQ ID NO: 31136 - RNA, 22 nt, Synthetic Construct
  source 1..22: mol_type = other RNA
tggggtagtaggttgtgtggtt

SEQ ID NO: 31137 - RNA, 31 nt, Synthetic Construct; identical to SEQ ID NO: 9212
  source 1..31: mol_type = other RNA

SEQ ID NO: 31138 - RNA, 31 nt, Synthetic Construct; identical to SEQ ID NO: 9212
  source 1..31: mol_type = other RNA

SEQ ID NO: 31139 - RNA, 22 nt, Synthetic Construct
  source 1..22: mol_type = other RNA
tgtaaacatccccgactggagg

SEQ ID NO: 31140 - RNA, 27 nt, Synthetic Construct
  source 1..27: mol_type = other RNA
cggtataccgaagctctaggtgcggca

SEQ ID NO: 31141 - RNA, 27 nt, Synthetic Construct
  source 1..27: mol_type = other RNA
cggtataccgaagctctaggtgcggca

SEQ ID NO: 31142 - RNA, 16 nt, Synthetic Construct
  source 1..16: mol_type = other RNA
taacaggtctgtgatg

SEQ ID NO: 31143 - RNA, 16 nt, Synthetic Construct
  source 1..16: mol_type = other RNA
taacaggtctgtgatg

SEQ ID NO: 31144 - RNA, 25 nt, Synthetic Construct
  source 1..25: mol_type = other RNA
gggttgtaaaccgcttttgtcaggg

SEQ ID NO: 31145 - RNA, 23 nt, Synthetic Construct
  source 1..23: mol_type = other RNA
ttcaagtaattcaggataggtta

SEQ ID NO: 31146 - RNA, 22 nt, Synthetic Construct
  source 1..22: mol_type = other RNA
tagcagcacgtaaatatcggcg

SEQ ID NO: 31147 - RNA, 22 nt, Synthetic Construct
  source 1..22: mol_type = other RNA
ngaggtagtagtttgtgctgtt

SEQ ID NO: 31148 - RNA, 22 nt, Synthetic Construct
  source 1..22: mol_type = other RNA
ngaggtagtagtttgtgctgtt

SEQ ID NO: 31149 - RNA, 23 nt, Synthetic Construct
  source 1..23: mol_type = other RNA
tcctgtactgagctgccctgaga

SEQ ID NO: 31150 - RNA, 23 nt, Synthetic Construct
  source 1..23: mol_type = other RNA
tcctgtactgagctgccctgaga

SEQ ID NO: 31151 - RNA, 22 nt, Synthetic Construct
  source 1..22: mol_type = other RNA
tgaggtagtagtttgcgctgtt

SEQ ID NO: 31152 - RNA, 23 nt, Synthetic Construct
  source 1..23: mol_type = other RNA
tgaggggcagagagcgggacttt

SEQ ID NO: 31153 - RNA, 20 nt, Synthetic Construct
  source 1..20: mol_type = other RNA
tgaggtagtaggttgtgagg

SEQ ID NO: 31154 - RNA, 20 nt, Synthetic Construct
  source 1..20: mol_type = other RNA
tgaggtagtaggttgtgagg

SEQ ID NO: 31155 - RNA, 18 nt, Synthetic Construct
  source 1..18: mol_type = other RNA
tgcgtagatatgcggagg

SEQ ID NO: 31156 - RNA, 21 nt, Synthetic Construct
  source 1..21: mol_type = other RNA
tgaggtagtagattgtatagc

SEQ ID NO: 31157 - RNA, 21 nt, Synthetic Construct
  source 1..21: mol_type = other RNA
tgaggtagtagattgtatagc

SEQ ID NO: 31158 - RNA, 30 nt, Synthetic Construct; identical to SEQ ID NO: 1641
  source 1..30: mol_type = other RNA

SEQ ID NO: 31159 - RNA, 30 nt, Synthetic Construct; identical to SEQ ID NO: 1641
  source 1..30: mol_type = other RNA

SEQ ID NO: 31160 - RNA, 23 nt, Synthetic Construct
  source 1..23: mol_type = other RNA
tgaggggcagagagcgagacttc

SEQ ID NO: 31161 - RNA, 23 nt, Synthetic Construct
  source 1..23: mol_type = other RNA
tgaggggcagagagcgagacttc

SEQ ID NO: 31162 - RNA, 28 nt, Synthetic Construct
  source 1..28: mol_type = other RNA
ccccccactgctaaatttggctggcttt

SEQ ID NO: 31163 - RNA, 28 nt, Synthetic Construct
  source 1..28: mol_type = other RNA
ccccccactgctaaatttggctggcttt

SEQ ID NO: 31164 - RNA, 22 nt, Synthetic Construct
  source 1..22: mol_type = other RNA
taaggtagtaggttgtatagtt

SEQ ID NO: 31165 - RNA, 22 nt, Synthetic Construct
  source 1..22: mol_type = other RNA
tgaggtagtagattgtgtggtt

SEQ ID NO: 31166 - RNA, 16 nt, Synthetic Construct
  source 1..16: mol_type = other RNA
acggcccagactccta

SEQ ID NO: 31167 - RNA, 22 nt, Synthetic Construct
  source 1..22: mol_type = other RNA
tcccgtactgagctgccccgag

SEQ ID NO: 31168 - RNA, 21 nt, Synthetic Construct
  source 1..21: mol_type = other RNA
tcctgtactgggctgccccga

SEQ ID NO: 31169 - RNA, 20 nt, Synthetic Construct
  source 1..20: mol_type = other RNA
tgaggtagtaggttgtacag

SEQ ID NO: 31170 - RNA, 20 nt, Synthetic Construct
  source 1..20: mol_type = other RNA
tgaggtagtaggttgtacag

SEQ ID NO: 31171 - RNA, 22 nt, Synthetic Construct
  source 1..22: mol_type = other RNA
tcttgtactgagctgccccgag

SEQ ID NO: 31172 - RNA, 22 nt, Synthetic Construct
  source 1..22: mol_type = other RNA
tcttgtactgagctgccccgag

SEQ ID NO: 31173 - RNA, 22 nt, Synthetic Construct
  source 1..22: mol_type = other RNA
tatcgcacttgtcccggcctgt

SEQ ID NO: 31174 - RNA, 22 nt, Synthetic Construct
  source 1..22: mol_type = other RNA
tatcgcacttgtcccggcctgt

SEQ ID NO: 31175 - RNA, 27 nt, Synthetic Construct
  source 1..27: mol_type = other RNA
tcggctgttaaccgaaaggttggtggt

SEQ ID NO: 31176 - RNA, 27 nt, Synthetic Construct
  source 1..27: mol_type = other RNA
gcgggtgatgcgaactggagtctgagc

SEQ ID NO: 31177 - RNA, 27 nt, Synthetic Construct
  source 1..27: mol_type = other RNA
gcgggtgatgcgaactggagtctgagc

SEQ ID NO: 31178 - RNA, 16 nt, Synthetic Construct
  source 1..16: mol_type = other RNA
caggacggtggccatg

SEQ ID NO: 31179 - RNA, 22 nt, Synthetic Construct
  source 1..22: mol_type = other RNA
caaagtgctgttcgtgcaggta

SEQ ID NO: 31180 - RNA, 22 nt, Synthetic Construct
  source 1..22: mol_type = other RNA
caaagtgctgttcgtgcaggta

SEQ ID NO: 31181 - RNA, 22 nt, Synthetic Construct
  source 1..22: mol_type = other RNA
tgaggtggtaggttgtgtggtt

SEQ ID NO: 31182 - RNA, 22 nt, Synthetic Construct
  source 1..22: mol_type = other RNA
tgaggtggtaggttgtgtggtt

SEQ ID NO: 31183 - RNA, 15 nt, Synthetic Construct
  source 1..15: mol_type = other RNA
gtctcgccgacggca

SEQ ID NO: 31184 - RNA, 23 nt, Synthetic Construct
  source 1..23: mol_type = other RNA
atcacattgccagggatttccat

SEQ ID NO: 31185 - RNA, 23 nt, Synthetic Construct
  source 1..23: mol_type = other RNA
cctccctcgggagggcgcgcggg

SEQ ID NO: 31186 - RNA, 23 nt, Synthetic Construct
  source 1..23: mol_type = other RNA
cctccctcgggagggcgcgcggg

SEQ ID NO: 31187 - RNA, 22 nt, Synthetic Construct
  source 1..22: mol_type = other RNA
tattgcacttgtcccggcctat

SEQ ID NO: 31188 - RNA, 22 nt, Synthetic Construct
  source 1..22: mol_type = other RNA
tattgcacttgtcccggcctat

SEQ ID NO: 31189 - RNA, 22 nt, Synthetic Construct
  source 1..22: mol_type = other RNA
tcctgtactgagctgccccaag

SEQ ID NO: 31190 - RNA, 22 nt, Synthetic Construct
  source 1..22: mol_type = other RNA
tggggtagtaggttgtatagtt

SEQ ID NO: 31191 - RNA, 22 nt, Synthetic Construct
  source 1..22: mol_type = other RNA
tggggtagtaggttgtatagtt

SEQ ID NO: 31192 - RNA, 21 nt, Synthetic Construct
  source 1..21: mol_type = other RNA
agggctgggtcggtcgggctg

SEQ ID NO: 31193 - RNA, 21 nt, Synthetic Construct
  source 1..21: mol_type = other RNA
agggctgggtcggtcgggctg

SEQ ID NO: 31194 - RNA, 22 nt, Synthetic Construct
  source 1..22: mol_type = other RNA
tagcagcacgtaaatattggtg

SEQ ID NO: 31195 - RNA, 18 nt, Synthetic Construct
  source 1..18: mol_type = other RNA
aagaccctgttgagcttg

SEQ ID NO: 31196 - RNA, 18 nt, Synthetic Construct
  source 1..18: mol_type = other RNA
aagaccctgttgagcttg

SEQ ID NO: 31197 - RNA, 15 nt, Synthetic Construct
  source 1..15: mol_type = other RNA
ccagaaacccggtcg

SEQ ID NO: 31198 - RNA, 21 nt, Synthetic Construct
  source 1..21: mol_type = other RNA
atcacattgccagggatttcc

SEQ ID NO: 31199 - RNA, 21 nt, Synthetic Construct
  source 1..21: mol_type = other RNA
atcacattgccagggatttcc

SEQ ID NO: 31200 - RNA, 23 nt, Synthetic Construct
  source 1..23: mol_type = other RNA
tcctgtactgagctgccacgaga

SEQ ID NO: 31201 - RNA, 23 nt, Synthetic Construct
  source 1..23: mol_type = other RNA
tcctgtactgagctgccacgaga

SEQ ID NO: 31202 - RNA, 22 nt, Synthetic Construct
  source 1..22: mol_type = other RNA
tatatatatatatgtacgtatg

SEQ ID NO: 31203 - RNA, 22 nt, Synthetic Construct
  source 1..22: mol_type = other RNA
tatatatatatatgtacgtatg

SEQ ID NO: 31204 - RNA, 17 nt, Synthetic Construct
  source 1..17: mol_type = other RNA
cgcgacctcagatcaga

SEQ ID NO: 31205 - RNA, 22 nt, Synthetic Construct
  source 1..22: mol_type = other RNA
tattgcacttgtcccgacctgt

SEQ ID NO: 31206 - RNA, 29 nt, Synthetic Construct
  source 1..29: mol_type = other RNA
gatgcgaaagcaggtcaaagtgatccggc

SEQ ID NO: 31207 - RNA, 29 nt, Synthetic Construct
  source 1..29: mol_type = other RNA
gatgcgaaagcaggtcaaagtgatccggc

SEQ ID NO: 31208 - RNA, 22 nt, Synthetic Construct
  source 1..22: mol_type = other RNA
ngaggtagtagattgtatagtt

SEQ ID NO: 31209 - RNA, 22 nt, Synthetic Construct
  source 1..22: mol_type = other RNA
ngaggtagtagattgtatagtt

SEQ ID NO: 31210 - RNA, 26 nt, Synthetic Construct
  source 1..26: mol_type = other RNA
gatgcgtggtaggagagcgttctgta

SEQ ID NO: 31211 - RNA, 22 nt, Synthetic Construct
  source 1..22: mol_type = other RNA
tattgtacttgtcccggcctgt

SEQ ID NO: 31212 - RNA, 22 nt, Synthetic Construct
  source 1..22: mol_type = other RNA
cataaagtagaaagcactacta

SEQ ID NO: 31213 - RNA, 22 nt, Synthetic Construct
  source 1..22: mol_type = other RNA
cataaagtagaaagcactacta

SEQ ID NO: 31214 - RNA, 22 nt, Synthetic Construct
  source 1..22: mol_type = other RNA
taactccttaagcgaatctcgc

SEQ ID NO: 31215 - RNA, 22 nt, Synthetic Construct
  source 1..22: mol_type = other RNA
taactccttaagcgaatctcgc

SEQ ID NO: 31216 - RNA, 21 nt, Synthetic Construct
  source 1..21: mol_type = other RNA
tggagtgtgacagtggtgttt

SEQ ID NO: 31217 - RNA, 22 nt, Synthetic Construct
  source 1..22: mol_type = other RNA
tcctgcactgagctgccccgag

SEQ ID NO: 31218 - RNA, 22 nt, Synthetic Construct
  source 1..22: mol_type = other RNA
tcctgcactgagctgccccgag

SEQ ID NO: 31219 - RNA, 32 nt, Synthetic Construct; identical to SEQ ID NO: 3092
  source 1..32: mol_type = other RNA

SEQ ID NO: 31220 - RNA, 32 nt, Synthetic Construct; identical to SEQ ID NO: 3092
  source 1..32: mol_type = other RNA

SEQ ID NO: 31221 - RNA, 22 nt, Synthetic Construct
  source 1..22: mol_type = other RNA
atcgggaatgtcgtgtccgccc

SEQ ID NO: 31222 - RNA, 30 nt, Synthetic Construct; identical to SEQ ID NO: 1220
  source 1..30: mol_type = other RNA

SEQ ID NO: 31223 - RNA, 30 nt, Synthetic Construct; identical to SEQ ID NO: 1220
  source 1..30: mol_type = other RNA

SEQ ID NO: 31224 - RNA, 23 nt, Synthetic Construct
  source 1..23: mol_type = other RNA
ttatggtttgcctgggactgaaa

SEQ ID NO: 31225 - RNA, 23 nt, Synthetic Construct
  source 1..23: mol_type = other RNA
ttatggtttgcctgggactgaaa

SEQ ID NO: 31226 - RNA, 22 nt, Synthetic Construct
  source 1..22: mol_type = other RNA
tatagcacttgtcccggcctgt

SEQ ID NO: 31227 - RNA, 21 nt, Synthetic Construct
  source 1..21: mol_type = other RNA
ggaggtagtaggttgtgtggt

SEQ ID NO: 31228 - RNA, 21 nt, Synthetic Construct
  source 1..21: mol_type = other RNA
ggaggtagtaggttgtgtggt

SEQ ID NO: 31229 - RNA, 21 nt, Synthetic Construct
  source 1..21: mol_type = other RNA
cccttggggttgtaggaccac

SEQ ID NO: 31230 - RNA, 21 nt, Synthetic Construct
  source 1..21: mol_type = other RNA
cccttggggttgtaggaccac

SEQ ID NO: 31231 - RNA, 22 nt, Synthetic Construct
  source 1..22: mol_type = other RNA
agggctgggtcggtcgggctgg

SEQ ID NO: 31232 - RNA, 22 nt, Synthetic Construct
  source 1..22: mol_type = other RNA
agggctgggtcggtcgggctgg

SEQ ID NO: 31233 - RNA, 22 nt, Synthetic Construct
  source 1..22: mol_type = other RNA
atgctgacatatttactagagg

SEQ ID NO: 31234 - RNA, 19 nt, Synthetic Construct
  source 1..19: mol_type = other RNA
tgaggtagtagattgtata

SEQ ID NO: 31235 - RNA, 18 nt, Synthetic Construct
  source 1..18: mol_type = other RNA
accctgctcgctgcgcca

SEQ ID NO: 31236 - RNA, 18 nt, Synthetic Construct
  source 1..18: mol_type = other RNA
accctgctcgctgcgcca

SEQ ID NO: 31237 - RNA, 24 nt, Synthetic Construct
  source 1..24: mol_type = other RNA
atcacattgccagggatttccaat

SEQ ID NO: 31238 - RNA, 24 nt, Synthetic Construct
  source 1..24: mol_type = other RNA
tgaggtagtaggttgtgtggttaa

SEQ ID NO: 31239 - RNA, 16 nt, Synthetic Construct
  source 1..16: mol_type = other RNA
gtctacggccatacca

SEQ ID NO: 31240 - RNA, 16 nt, Synthetic Construct
  source 1..16: mol_type = other RNA
gtctacggccatacca

SEQ ID NO: 31241 - RNA, 22 nt, Synthetic Construct
  source 1..22: mol_type = other RNA
ccccccactgctaaatttgact

SEQ ID NO: 31242 - RNA, 22 nt, Synthetic Construct
  source 1..22: mol_type = other RNA
ccccccactgctaaatttgact

SEQ ID NO: 31243 - RNA, 22 nt, Synthetic Construct
  source 1..22: mol_type = other RNA
tgaggtagaaggttgtgtggtt

SEQ ID NO: 31244 - RNA, 22 nt, Synthetic Construct
  source 1..22: mol_type = other RNA
tgaggtagaaggttgtgtggtt

SEQ ID NO: 31245 - RNA, 21 nt, Synthetic Construct
  source 1..21: mol_type = other RNA
aacggaatcccaaaagcagct

SEQ ID NO: 31246 - RNA, 16 nt, Synthetic Construct
  source 1..16: mol_type = other RNA
gggtgaaagcggggga

SEQ ID NO: 31247 - RNA, 16 nt, Synthetic Construct
  source 1..16: mol_type = other RNA
gggtgaaagcggggga

SEQ ID NO: 31248 - RNA, 22 nt, Synthetic Construct
  source 1..22: mol_type = other RNA
tattgcacttgtcccggcctat

SEQ ID NO: 31249 - RNA, 22 nt, Synthetic Construct
  source 1..22: mol_type = other RNA
tattgcacttgtcccggcctat

SEQ ID NO: 31250 - RNA, 22 nt, Synthetic Construct
  source 1..22: mol_type = other RNA
tgaggtagtaggttgtgaggtt

SEQ ID NO: 31251 - RNA, 22 nt, Synthetic Construct
  source 1..22: mol_type = other RNA
tgaggtagtaggttgtgaggtt

SEQ ID NO: 31252 - RNA, 23 nt, Synthetic Construct
  source 1..23: mol_type = other RNA
gactatagaactttccccctcat

SEQ ID NO: 31253 - RNA, 23 nt, Synthetic Construct
  source 1..23: mol_type = other RNA
gactatagaactttccccctcat

SEQ ID NO: 31254 - RNA, 23 nt, Synthetic Construct
  source 1..23: mol_type = other RNA
tgaggggcagagagcgagacttt

SEQ ID NO: 31255 - RNA, 23 nt, Synthetic Construct
  source 1..23: mol_type = other RNA
tgaggggcagagagcgagacttt

SEQ ID NO: 31256 - RNA, 20 nt, Synthetic Construct
  source 1..20: mol_type = other RNA
tcgcgccgtcgggcccgggg

SEQ ID NO: 31257 - RNA, 20 nt, Synthetic Construct
  source 1..20: mol_type = other RNA
tcgcgccgtcgggcccgggg

SEQ ID NO: 31258 - RNA, 22 nt, Synthetic Construct
  source 1..22: mol_type = other RNA
tgaggaagtaggttgtgtggtt

SEQ ID NO: 31259 - RNA, 22 nt, Synthetic Construct
  source 1..22: mol_type = other RNA
tgaggaagtaggttgtgtggtt

SEQ ID NO: 31260 - RNA, 24 nt, Synthetic Construct
  source 1..24: mol_type = other RNA
ttcaagtaatccaggataggcttt

SEQ ID NO: 31261 - RNA, 22 nt, Synthetic Construct
  source 1..22: mol_type = other RNA
ccctgtactgagctgccccgag

SEQ ID NO: 31262 - RNA, 23 nt, Synthetic Construct
  source 1..23: mol_type = other RNA
tgaggggaagagagcgagacttt

SEQ ID NO: 31263 - RNA, 23 nt, Synthetic Construct
  source 1..23: mol_type = other RNA
tggtaataagacgtacttagtgt

SEQ ID NO: 31264 - RNA, 15 nt, Synthetic Construct
  source 1..15: mol_type = other RNA
gagagcctggacaca

SEQ ID NO: 31265 - RNA, 21 nt, Synthetic Construct
  source 1..21: mol_type = other RNA
ccctgtactgagctgccccga

SEQ ID NO: 31266 - RNA, 22 nt, Synthetic Construct
  source 1..22: mol_type = other RNA
tgaggtagaagtttgtgctgtt

SEQ ID NO: 31267 - RNA, 22 nt, Synthetic Construct
  source 1..22: mol_type = other RNA
tcccgtactgagctgccccgag

SEQ ID NO: 31268 - RNA, 21 nt, Synthetic Construct
  source 1..21: mol_type = other RNA
agccatcatttaaagaaagcg

SEQ ID NO: 31269 - RNA, 22 nt, Synthetic Construct
  source 1..22: mol_type = other RNA
tgtcagtttgtcaaatacccca

SEQ ID NO: 31270 - RNA, 22 nt, Synthetic Construct
  source 1..22: mol_type = other RNA
tgtcagtttgtcaaatacccca

SEQ ID NO: 31271 - RNA, 32 nt, Synthetic Construct; identical to SEQ ID NO: 1128
  source 1..32: mol_type = other RNA

SEQ ID NO: 31272 - RNA, 22 nt, Synthetic Construct
  source 1..22: mol_type = other RNA
tcctgtactaagctgccccgag

SEQ ID NO: 31273 - RNA, 21 nt, Synthetic Construct
  source 1..21: mol_type = other RNA
tggagtgtgacaatggtgctt

SEQ ID NO: 31274 - RNA, 20 nt, Synthetic Construct
  source 1..20: mol_type = other RNA
tcccgggtttcggcaccatt

SEQ ID NO: 31275 - RNA, 20 nt, Synthetic Construct
  source 1..20: mol_type = other RNA
tcccgggtttcggcaccatt

SEQ ID NO: 31276 - RNA, 27 nt, Synthetic Construct
  source 1..27: mol_type = other RNA
ccccccactgctaaatttggctggcta

SEQ ID NO: 31277 - RNA, 34 nt, Synthetic Construct; identical to SEQ ID NO: 490
  source 1..34: mol_type = other RNA

SEQ ID NO: 31278 - RNA, 21 nt, Synthetic Construct
  source 1..21: mol_type = other RNA
tgaggtagtagcttgtgctgt

SEQ ID NO: 31279 - RNA, 21 nt, Synthetic Construct
  source 1..21: mol_type = other RNA
tcctgtactgagctgccccaa

SEQ ID NO: 31280 - RNA, 22 nt, Synthetic Construct
  source 1..22: mol_type = other RNA
tgaggtagtaggttgtgcggtt

SEQ ID NO: 31281 - RNA, 22 nt, Synthetic Construct
  source 1..22: mol_type = other RNA
tgaggtagtaggttgtgcggtt

SEQ ID NO: 31282 - RNA, 16 nt, Synthetic Construct
  source 1..16: mol_type = other RNA
gtctacggccatgcca

SEQ ID NO: 31283 - RNA, 19 nt, Synthetic Construct
  source 1..19: mol_type = other RNA
tgaggtagtaggttgtata

SEQ ID NO: 31284 - RNA, 19 nt, Synthetic Construct
  source 1..19: mol_type = other RNA
tgaggtagtaggttgtata

SEQ ID NO: 31285 - RNA, 23 nt, Synthetic Construct
  source 1..23: mol_type = other RNA
tgaggtagtaggtcgtgtggttt

SEQ ID NO: 31286 - RNA, 23 nt, Synthetic Construct
  source 1..23: mol_type = other RNA
tcctgaactgagctgccccgagt

SEQ ID NO: 31287 - RNA, 36 nt, Synthetic Construct; identical to SEQ ID NO: 6739
  source 1..36: mol_type = other RNA

SEQ ID NO: 31288 - RNA, 36 nt, Synthetic Construct; identical to SEQ ID NO: 6739
  source 1..36: mol_type = other RNA

SEQ ID NO: 31289 - RNA, 22 nt, Synthetic Construct
  source 1..22: mol_type = other RNA
ggaggtagtaggttgtgtggtt

SEQ ID NO: 31290 - RNA, 22 nt, Synthetic Construct
  source 1..22: mol_type = other RNA
ggaggtagtaggttgtgtggtt

SEQ ID NO: 31291 - RNA, 24 nt, Synthetic Construct
  source 1..24: mol_type = other RNA
ctcactgatcgagtcgtcctgcgc

SEQ ID NO: 31292 - RNA, 18 nt, Synthetic Construct
  source 1..18: mol_type = other RNA
gtctgcctcagcgtcggt

SEQ ID NO: 31293 - RNA, 18 nt, Synthetic Construct
  source 1..18: mol_type = other RNA
gtctgcctcagcgtcggt

SEQ ID NO: 31294 - RNA, 23 nt, Synthetic Construct
  source 1..23: mol_type = other RNA
agctacattgtctgctgggttcc

SEQ ID NO: 31295 - RNA, 22 nt, Synthetic Construct
  source 1..22: mol_type = other RNA
tgaggtagtgggttgtgtggtt

SEQ ID NO: 31296 - RNA, 23 nt, Synthetic Construct
  source 1..23: mol_type = other RNA
tcctgtactgagctgccctgagt

SEQ ID NO: 31297 - RNA, 23 nt, Synthetic Construct
  source 1..23: mol_type = other RNA
tcctgtactgagccgccccgagt

SEQ ID NO: 31298 - RNA, 22 nt, Synthetic Construct
  source 1..22: mol_type = other RNA
tgagatagtagtttgtgctgtt

SEQ ID NO: 31299 - RNA, 22 nt, Synthetic Construct
  source 1..22: mol_type = other RNA
tgagatagtagtttgtgctgtt

SEQ ID NO: 31300 - RNA, 21 nt, Synthetic Construct
  source 1..21: mol_type = other RNA
gctattgacgaccgtaccgca

SEQ ID NO: 31301 - RNA, 34 nt, Synthetic Construct; identical to SEQ ID NO: 749
  source 1..34: mol_type = other RNA

SEQ ID NO: 31302 - RNA, 34 nt, Synthetic Construct; identical to SEQ ID NO: 749
  source 1..34: mol_type = other RNA

SEQ ID NO: 31303 - RNA, 22 nt, Synthetic Construct
  source 1..22: mol_type = other RNA
ngaggtagtaggttgtgtggtt

SEQ ID NO: 31304 - RNA, 22 nt, Synthetic Construct
  source 1..22: mol_type = other RNA
ngaggtagtaggttgtgtggtt

SEQ ID NO: 31305 - RNA, 17 nt, Synthetic Construct
  source 1..17: mol_type = other RNA
tgccagcagccgcggta

SEQ ID NO: 31306 - RNA, 16 nt, Synthetic Construct
  source 1..16: mol_type = other RNA
gtctgcggccatacca

SEQ ID NO: 31307 - RNA, 23 nt, Synthetic Construct
  source 1..23: mol_type = other RNA
gcctgtactgagctgccccgaga

SEQ ID NO: 31308 - RNA, 23 nt, Synthetic Construct
  source 1..23: mol_type = other RNA
gcctgtactgagctgccccgaga

SEQ ID NO: 31309 - RNA, 22 nt, Synthetic Construct
  source 1..22: mol_type = other RNA
tcctgtactaagctgccccgag

SEQ ID NO: 31310 - RNA, 22 nt, Synthetic Construct
  source 1..22: mol_type = other RNA
tcctgtactaagctgccccgag

SEQ ID NO: 31311 - RNA, 22 nt, Synthetic Construct
  source 1..22: mol_type = other RNA
tcaggtagtagattgtatagtt

SEQ ID NO: 31312 - RNA, 19 nt, Synthetic Construct
  source 1..19: mol_type = other RNA
gtccggatcgtagtctgca

SEQ ID NO: 31313 - RNA, 22 nt, Synthetic Construct
  source 1..22: mol_type = other RNA
tgtgcaaatccatgcaaaactg

SEQ ID NO: 31314 - RNA, 21 nt, Synthetic Construct
  source 1..21: mol_type = other RNA
tggagtgcgacaatggtgttt

SEQ ID NO: 31315 - RNA, 21 nt, Synthetic Construct
  source 1..21: mol_type = other RNA
tggagtgcgacaatggtgttt

SEQ ID NO: 31316 - RNA, 15 nt, Synthetic Construct
  source 1..15: mol_type = other RNA
aaattccttgtcggg

SEQ ID NO: 31317 - RNA, 16 nt, Synthetic Construct
  source 1..16: mol_type = other RNA
gcctacggccatacca

SEQ ID NO: 31318 - RNA, 23 nt, Synthetic Construct
  source 1..23: mol_type = other RNA
tgaggggcagagagcgagacttc

SEQ ID NO: 31319 - RNA, 19 nt, Synthetic Construct
  source 1..19: mol_type = other RNA
atcccactcctgacaccat

SEQ ID NO: 31320 - RNA, 19 nt, Synthetic Construct
  source 1..19: mol_type = other RNA
atcccactcctgacaccat

SEQ ID NO: 31321 - RNA, 22 nt, Synthetic Construct
  source 1..22: mol_type = other RNA
atataatacaacctgctaagtg

SEQ ID NO: 31322 - RNA, 22 nt, Synthetic Construct
  source 1..22: mol_type = other RNA
atataatacaacctgctaagtg

SEQ ID NO: 31323 - RNA, 22 nt, Synthetic Construct
  source 1..22: mol_type = other RNA
tgaggtagtaggttgtgtggat

SEQ ID NO: 31324 - RNA, 29 nt, Synthetic Construct
  source 1..29: mol_type = other RNA
cccgtgtgaaagtaggtcatcgtcaggct

SEQ ID NO: 31325 - RNA, 29 nt, Synthetic Construct
  source 1..29: mol_type = other RNA
cccgtgtgaaagtaggtcatcgtcaggct

SEQ ID NO: 31326 - RNA, 24 nt, Synthetic Construct
  source 1..24: mol_type = other RNA
tcctgtactgagctgccccgagtt

SEQ ID NO: 31327 - RNA, 22 nt, Synthetic Construct
  source 1..22: mol_type = other RNA
nattgcacttgtcccggcctgt

SEQ ID NO: 31328 - RNA, 22 nt, Synthetic Construct
  source 1..22: mol_type = other RNA
nattgcacttgtcccggcctgt

SEQ ID NO: 31329 - RNA, 23 nt, Synthetic Construct
  source 1..23: mol_type = other RNA
tctcccaacccttgtaccagtga

SEQ ID NO: 31330 - RNA, 23 nt, Synthetic Construct
  source 1..23: mol_type = other RNA
tctcccaacccttgtaccagtga

SEQ ID NO: 31331 - RNA, 19 nt, Synthetic Construct
  source 1..19: mol_type = other RNA
ggctggtccgaaggtagtg

SEQ ID NO: 31332 - RNA, 19 nt, Synthetic Construct
  source 1..19: mol_type = other RNA
ggctggtccgaaggtagtg

SEQ ID NO: 31333 - RNA, 32 nt, Synthetic Construct; identical to SEQ ID NO: 14097
  source 1..32: mol_type = other RNA

SEQ ID NO: 31334 - RNA, 32 nt, Synthetic Construct; identical to SEQ ID NO: 14097
  source 1..32: mol_type = other RNA

SEQ ID NO: 31335 - RNA, 18 nt, Synthetic Construct
  source 1..18: mol_type = other RNA
catgcaagtcgaacggta

SEQ ID NO: 31336 - RNA, 24 nt, Synthetic Construct
  source 1..24: mol_type = other RNA
aaaccgttaccattactgagttta

SEQ ID NO: 31337 - RNA, 24 nt, Synthetic Construct
  source 1..24: mol_type = other RNA
aaaccgttaccattactgagttta

SEQ ID NO: 31338 - RNA, 22 nt, Synthetic Construct
  source 1..22: mol_type = other RNA
ttcaagtaatccaggataggct

SEQ ID NO: 31339 - RNA, 22 nt, Synthetic Construct
  source 1..22: mol_type = other RNA
ttcaagtaatccaggataggct

SEQ ID NO: 31340 - RNA, 20 nt, Synthetic Construct
  source 1..20: mol_type = other RNA
tgaggtagtaggttgtgtgg

SEQ ID NO: 31341 - RNA, 20 nt, Synthetic Construct
  source 1..20: mol_type = other RNA
tgaggtagtaggttgtgtgg

SEQ ID NO: 31342 - RNA, 16 nt, Synthetic Construct
  source 1..16: mol_type = other RNA
cacaccgcccgtcgct

SEQ ID NO: 31343 - RNA, 16 nt, Synthetic Construct
  source 1..16: mol_type = other RNA
cacaccgcccgtcgct

SEQ ID NO: 31344 - RNA, 20 nt, Synthetic Construct
  source 1..20: mol_type = other RNA
tatgtctgctgaccatcacc

SEQ ID NO: 31345 - RNA, 22 nt, Synthetic Construct
  source 1..22: mol_type = other RNA
cattgcactcgtctcggtctga

SEQ ID NO: 31346 - RNA, 21 nt, Synthetic Construct
  source 1..21: mol_type = other RNA
cagtgcaatgttaaaagggca

SEQ ID NO: 31347 - RNA, 21 nt, Synthetic Construct
  source 1..21: mol_type = other RNA
cagtgcaatgttaaaagggca

SEQ ID NO: 31348 - RNA, 21 nt, Synthetic Construct
  source 1..21: mol_type = other RNA
tcctgtactgagctgccccgg

SEQ ID NO: 31349 - RNA, 21 nt, Synthetic Construct
  source 1..21: mol_type = other RNA
tcctgtactgagctgccccgg

SEQ ID NO: 31350 - RNA, 22 nt, Synthetic Construct
  source 1..22: mol_type = other RNA
tagcagcacgtaaatgttggcg

SEQ ID NO: 31351 - RNA, 21 nt, Synthetic Construct
  source 1..21: mol_type = other RNA
ttctgtactgagctgccccga

SEQ ID NO: 31352 - RNA, 23 nt, Synthetic Construct
  source 1..23: mol_type = other RNA
tgaggtagtaggttgtgcggttt

SEQ ID NO: 31353 - RNA, 23 nt, Synthetic Construct
  source 1..23: mol_type = other RNA
tgaggtagtaggttgtgcggttt

SEQ ID NO: 31354 - RNA, 22 nt, Synthetic Construct
  source 1..22: mol_type = other RNA
tgaggtagtaggttgtatagtc

SEQ ID NO: 31355 - RNA, 22 nt, Synthetic Construct
  source 1..22: mol_type = other RNA
tgaggtagtaggttgtatagtc

SEQ ID NO: 31356 - RNA, 23 nt, Synthetic Construct
  source 1..23: mol_type = other RNA
cgaggggcagagagcgagacttt

SEQ ID NO: 31357 - RNA, 23 nt, Synthetic Construct
  source 1..23: mol_type = other RNA
cgaggggcagagagcgagacttt

SEQ ID NO: 31358 - RNA, 27 nt, Synthetic Construct
  source 1..27: mol_type = other RNA
cagagttctacagtccgacgatcgatc

SEQ ID NO: 31359 - RNA, 27 nt, Synthetic Construct
  source 1..27: mol_type = other RNA
cagagttctacagtccgacgatcgatc

SEQ ID NO: 31360 - RNA, 29 nt, Synthetic Construct
  source 1..29: mol_type = other RNA
gcatgggtggttcagtggtagaattctcg

SEQ ID NO: 31361 - RNA, 17 nt, Synthetic Construct
  source 1..17: mol_type = other RNA
accggaggaaggtgggg

SEQ ID NO: 31362 - RNA, 17 nt, Synthetic Construct
  source 1..17: mol_type = other RNA
accggaggaaggtgggg

SEQ ID NO: 31363 - RNA, 22 nt, Synthetic Construct
  source 1..22: mol_type = other RNA
cattgcacttgtcccggtctga

SEQ ID NO: 31364 - RNA, 22 nt, Synthetic Construct
  source 1..22: mol_type = other RNA
cattgcacttgtcccggtctga

SEQ ID NO: 31365 - RNA, 22 nt, Synthetic Construct
  source 1..22: mol_type = other RNA
tcagtgcactacagagctttgt

SEQ ID NO: 31366 - RNA, 20 nt, Synthetic Construct
  source 1..20: mol_type = other RNA
tcgcgccgtcgggcccgggg

SEQ ID NO: 31367 - RNA, 20 nt, Synthetic Construct
  source 1..20: mol_type = other RNA
tcgcgccgtcgggcccgggg

SEQ ID NO: 31368 - RNA, 23 nt, Synthetic Construct
  source 1..23: mol_type = other RNA
ttccccttggggttgtaggacca

SEQ ID NO: 31369 - RNA, 23 nt, Synthetic Construct
  source 1..23: mol_type = other RNA
ttccccttggggttgtaggacca

SEQ ID NO: 31370 - RNA, 22 nt, Synthetic Construct
  source 1..22: mol_type = other RNA
tcgtaccgtgagtaataatgca

SEQ ID NO: 31371 - RNA, 22 nt, Synthetic Construct
  source 1..22: mol_type = other RNA
tcaggtagtagattgtatagtt

SEQ ID NO: 31372 - RNA, 23 nt, Synthetic Construct
  source 1..23: mol_type = other RNA
tgtcagtttgtcaaataccccat

SEQ ID NO: 31373 - RNA, 22 nt, Synthetic Construct
  source 1..22: mol_type = other RNA
cagtgcaatgttaaaagggcat

SEQ ID NO: 31374 - RNA, 23 nt, Synthetic Construct
  source 1..23: mol_type = other RNA
caaagtgctgtttgtgcaggtag

SEQ ID NO: 31375 - RNA, 23 nt, Synthetic Construct
  source 1..23: mol_type = other RNA
caaagtgctgtttgtgcaggtag

SEQ ID NO: 31376 - RNA, 24 nt, Synthetic Construct
  source 1..24: mol_type = other RNA
agcaacattgtctgctgggtttct

SEQ ID NO: 31377 - RNA, 18 nt, Synthetic Construct
  source 1..18: mol_type = other RNA
gctgtgatggccgagtgg

SEQ ID NO: 31378 - RNA, 18 nt, Synthetic Construct
  source 1..18: mol_type = other RNA
gctgtgatggccgagtgg

SEQ ID NO: 31379 - RNA, 23 nt, Synthetic Construct
  source 1..23: mol_type = other RNA
tgaagggcagagagcgagacttt

SEQ ID NO: 31380 - RNA, 23 nt, Synthetic Construct
  source 1..23: mol_type = other RNA
tgaagggcagagagcgagacttt

SEQ ID NO: 31381 - RNA, 21 nt, Synthetic Construct
  source 1..21: mol_type = other RNA
acagtagtctgcacattggtt

SEQ ID NO: 31382 - RNA, 21 nt, Synthetic Construct
  source 1..21: mol_type = other RNA
acagtagtctgcacattggtt

SEQ ID NO: 31383 - RNA, 22 nt, Synthetic Construct
  source 1..22: mol_type = other RNA
tgtggtagtaggttgtgtggtt

SEQ ID NO: 31384 - RNA, 22 nt, Synthetic Construct
  source 1..22: mol_type = other RNA
tgtggtagtaggttgtgtggtt

SEQ ID NO: 31385 - RNA, 22 nt, Synthetic Construct
  source 1..22: mol_type = other RNA
tattgcatttgtcccggcctgt

SEQ ID NO: 31386 - RNA, 22 nt, Synthetic Construct
  source 1..22: mol_type = other RNA
tattgcatttgtcccggcctgt

SEQ ID NO: 31387 - RNA, 22 nt, Synthetic Construct
  source 1..22: mol_type = other RNA
ccctgtactgagctgccccgag

SEQ ID NO: 31388 - RNA, 22 nt, Synthetic Construct
  source 1..22: mol_type = other RNA
ccctgtactgagctgccccgag

SEQ ID NO: 31389 - RNA, 29 nt, Synthetic Construct
  source 1..29: mol_type = other RNA
cgcgacctcagatcagacgtggcgacccg

SEQ ID NO: 31390 - RNA, 29 nt, Synthetic Construct
  source 1..29: mol_type = other RNA
cgcgacctcagatcagacgtggcgacccg

SEQ ID NO: 31391 - RNA, 42 nt, Synthetic Construct; identical to SEQ ID NO: 8009
  source 1..42: mol_type = other RNA

SEQ ID NO: 31392 - RNA, 42 nt, Synthetic Construct; identical to SEQ ID NO: 8009
  source 1..42: mol_type = other RNA

SEQ ID NO: 31393 - RNA, 22 nt, Synthetic Construct
  source 1..22: mol_type = other RNA
tcctgtactgagctgccccggg

SEQ ID NO: 31394 - RNA, 21 nt, Synthetic Construct
  source 1..21: mol_type = other RNA
ctagactgaagctccttgggg

SEQ ID NO: 31395 - RNA, 23 nt, Synthetic Construct
  source 1..23: mol_type = other RNA
tgaggggtagagagcgagacttt

SEQ ID NO: 31396 - RNA, 22 nt, Synthetic Construct
  source 1..22: mol_type = other RNA
tgaggtagtgggttgtgtggtt

SEQ ID NO: 31397 - RNA, 15 nt, Synthetic Construct
  source 1..15: mol_type = other RNA
cggcccagactccta

SEQ ID NO: 31398 - RNA, 16 nt, Synthetic Construct
  source 1..16: mol_type = other RNA
gatttgggagtgctcg

SEQ ID NO: 31399 - RNA, 16 nt, Synthetic Construct
  source 1..16: mol_type = other RNA
gatttgggagtgctcg

SEQ ID NO: 31400 - RNA, 16 nt, Synthetic Construct
  source 1..16: mol_type = other RNA
caggacggtggccatg

SEQ ID NO: 31401 - RNA, 16 nt, Synthetic Construct
  source 1..16: mol_type = other RNA
caggacggtggccatg

SEQ ID NO: 31402 - RNA, 19 nt, Synthetic Construct
  source 1..19: mol_type = other RNA
tgaggtagtaggttgtata

SEQ ID NO: 31403 - RNA, 19 nt, Synthetic Construct
  source 1..19: mol_type = other RNA
tgaggtagtaggttgtata

SEQ ID NO: 31404 - RNA, 22 nt, Synthetic Construct
  source 1..22: mol_type = other RNA
aaagtgctgttcgtgcaggtag

SEQ ID NO: 31405 - RNA, 21 nt, Synthetic Construct
  source 1..21: mol_type = other RNA
caaagtgctgttcgtgcaggt

SEQ ID NO: 31406 - RNA, 21 nt, Synthetic Construct
  source 1..21: mol_type = other RNA
caaagtgctgttcgtgcaggt

SEQ ID NO: 31407 - RNA, 31 nt, Synthetic Construct; identical to SEQ ID NO: 2215
  source 1..31: mol_type = other RNA

SEQ ID NO: 31408 - RNA, 31 nt, Synthetic Construct; identical to SEQ ID NO: 2215
  source 1..31: mol_type = other RNA

SEQ ID NO: 31409 - RNA, 27 nt, Synthetic Construct
  source 1..27: mol_type = other RNA
tcggctgttaaccgaaaggttggtggt

SEQ ID NO: 31410 - RNA, 20 nt, Synthetic Construct
  source 1..20: mol_type = other RNA
tgaggtagtgggttgtgtgg

SEQ ID NO: 31411 - RNA, 20 nt, Synthetic Construct
  source 1..20: mol_type = other RNA
tgaggtagtgggttgtgtgg

SEQ ID NO: 31412 - RNA, 21 nt, Synthetic Construct
  source 1..21: mol_type = other RNA
tcctgtactgagccgccccga

SEQ ID NO: 31413 - RNA, 21 nt, Synthetic Construct
  source 1..21: mol_type = other RNA
tcctgtactgagccgccccga

SEQ ID NO: 31414 - RNA, 23 nt, Synthetic Construct
  source 1..23: mol_type = other RNA
ggcagggttcgtgactggggtga

SEQ ID NO: 31415 - RNA, 23 nt, Synthetic Construct
  source 1..23: mol_type = other RNA
ggcagggttcgtgactggggtga

SEQ ID NO: 31416 - RNA, 16 nt, Synthetic Construct
  source 1..16: mol_type = other RNA
gtctacagccatacca

SEQ ID NO: 31417 - RNA, 23 nt, Synthetic Construct
  source 1..23: mol_type = other RNA
cggtaatacgacgtacttagtgt

SEQ ID NO: 31418 - RNA, 21 nt, Synthetic Construct
  source 1..21: mol_type = other RNA
tcctgtgctgagctgccccga

SEQ ID NO: 31419 - RNA, 22 nt, Synthetic Construct
  source 1..22: mol_type = other RNA
tatatatatatatgtacgtatg

SEQ ID NO: 31420 - RNA, 22 nt, Synthetic Construct
  source 1..22: mol_type = other RNA
tatatatatatatgtacgtatg

SEQ ID NO: 31421 - RNA, 21 nt, Synthetic Construct
  source 1..21: mol_type = other RNA
tactccttaagcgaatctcgc

SEQ ID NO: 31422 - RNA, 21 nt, Synthetic Construct
  source 1..21: mol_type = other RNA
tactccttaagcgaatctcgc

SEQ ID NO: 31423 - RNA, 22 nt, Synthetic Construct
  source 1..22: mol_type = other RNA
tggagagaaaggcagttcctga

SEQ ID NO: 31424 - RNA, 20 nt, Synthetic Construct
  source 1..20: mol_type = other RNA
tgaggtagtaggttgtatgg

SEQ ID NO: 31425 - RNA, 20 nt, Synthetic Construct
  source 1..20: mol_type = other RNA
tgaggtagtaggttgtatgg

SEQ ID NO: 31426 - RNA, 19 nt, Synthetic Construct
  source 1..19: mol_type = other RNA
cacatgcaagtcgaacggt

SEQ ID NO: 31427 - RNA, 22 nt, Synthetic Construct
  source 1..22: mol_type = other RNA
tgaggtagtaggttatgtggtt

SEQ ID NO: 31428 - RNA, 22 nt, Synthetic Construct
  source 1..22: mol_type = other RNA
tgaggtagtaggttatgtggtt

SEQ ID NO: 31429 - RNA, 25 nt, Synthetic Construct
  source 1..25: mol_type = other RNA
ggtaaaatcgctgagtgaagcattg

SEQ ID NO: 31430 - RNA, 22 nt, Synthetic Construct
  source 1..22: mol_type = other RNA
tgaggaagtaggttgtgtggtt

SEQ ID NO: 31431 - RNA, 22 nt, Synthetic Construct
  source 1..22: mol_type = other RNA
tgaggaagtaggttgtgtggtt

SEQ ID NO: 31432 - RNA, 23 nt, Synthetic Construct
  source 1..23: mol_type = other RNA
caaagagctgttcgtgcaggtag

SEQ ID NO: 31433 - RNA, 22 nt, Synthetic Construct
  source 1..22: mol_type = other RNA
tgaggtagtaggctgtatagtt

SEQ ID NO: 31434 - RNA, 22 nt, Synthetic Construct
  source 1..22: mol_type = other RNA
tgaggtagtaggctgtatagtt

SEQ ID NO: 31435 - RNA, 22 nt, Synthetic Construct
  source 1..22: mol_type = other RNA
taaggtagtagtttgtgctgtt

SEQ ID NO: 31436 - RNA, 22 nt, Synthetic Construct
  source 1..22: mol_type = other RNA
taaggtagtagtttgtgctgtt

SEQ ID NO: 31437 - RNA, 22 nt, Synthetic Construct
  source 1..22: mol_type = other RNA
tacagtagtctgcacattggtt

SEQ ID NO: 31438 - RNA, 30 nt, Synthetic Construct; identical to SEQ ID NO: 2274
  source 1..30: mol_type = other RNA

SEQ ID NO: 31439 - RNA, 30 nt, Synthetic Construct; identical to SEQ ID NO: 2274
  source 1..30: mol_type = other RNA

SEQ ID NO: 31440 - RNA, 20 nt, Synthetic Construct
  source 1..20: mol_type = other RNA
gggttcgattccggagaggg

SEQ ID NO: 31441 - RNA, 20 nt, Synthetic Construct
  source 1..20: mol_type = other RNA
gggttcgattccggagaggg

SEQ ID NO: 31442 - RNA, 23 nt, Synthetic Construct
  source 1..23: mol_type = other RNA
tgaggtagtaggttgtatggtta

SEQ ID NO: 31443 - RNA, 23 nt, Synthetic Construct
  source 1..23: mol_type = other RNA
tgaggtagtaggttgtatggtta

SEQ ID NO: 31444 - RNA, 21 nt, Synthetic Construct
  source 1..21: mol_type = other RNA
acagtagtctgcacattggtt

SEQ ID NO: 31445 - RNA, 21 nt, Synthetic Construct
  source 1..21: mol_type = other RNA
cgtaccgtgagtaataatgcg

SEQ ID NO: 31446 - RNA, 31 nt, Synthetic Construct; identical to SEQ ID NO: 2293
  source 1..31: mol_type = other RNA

SEQ ID NO: 31447 - RNA, 21 nt, Synthetic Construct
  source 1..21: mol_type = other RNA
tacgcctgtctgagcgtcgct

SEQ ID NO: 31448 - RNA, 22 nt, Synthetic Construct
  source 1..22: mol_type = other RNA
tgaggtagtaggttgtgtggct

SEQ ID NO: 31449 - RNA, 22 nt, Synthetic Construct
  source 1..22: mol_type = other RNA
tgaggtagtagtttgtgctgct

SEQ ID NO: 31450 - RNA, 27 nt, Synthetic Construct
  source 1..27: mol_type = other RNA
ccccccactgctaagtttgactggctt

SEQ ID NO: 31451 - RNA, 27 nt, Synthetic Construct
  source 1..27: mol_type = other RNA
ccccccactgctaagtttgactggctt

SEQ ID NO: 31452 - RNA, 22 nt, Synthetic Construct
  source 1..22: mol_type = other RNA
tcctgtactgagctgccccgat

SEQ ID NO: 31453 - RNA, 22 nt, Synthetic Construct
  source 1..22: mol_type = other RNA
tcctgtactgagctgccccgat

SEQ ID NO: 31454 - RNA, 22 nt, Synthetic Construct
  source 1..22: mol_type = other RNA
tcagtgcatcacagaactttgt

SEQ ID NO: 31455 - RNA, 22 nt, Synthetic Construct
  source 1..22: mol_type = other RNA
tcagtgcatcacagaactttgt

SEQ ID NO: 31456 - RNA, 22 nt, Synthetic Construct
  source 1..22: mol_type = other RNA
tgaggtagtaggtcgtgtggtt

SEQ ID NO: 31457 - RNA, 22 nt, Synthetic Construct
  source 1..22: mol_type = other RNA
tgaggtagtaggtcgtgtggtt

SEQ ID NO: 31458 - RNA, 22 nt, Synthetic Construct
  source 1..22: mol_type = other RNA
tgaggtggtaggttgtgtggtt

SEQ ID NO: 31459 - RNA, 22 nt, Synthetic Construct
  source 1..22: mol_type = other RNA
cggaatcgctagtaatcgcgga

SEQ ID NO: 31460 - RNA, 22 nt, Synthetic Construct
  source 1..22: mol_type = other RNA
cggaatcgctagtaatcgcgga

SEQ ID NO: 31461 - RNA, 16 nt, Synthetic Construct
  source 1..16: mol_type = other RNA
gccagcagccgcggta

SEQ ID NO: 31462 - RNA, 25 nt, Synthetic Construct
  source 1..25: mol_type = other RNA
atgaggatatgagatcgagacgaca

SEQ ID NO: 31463 - RNA, 18 nt, Synthetic Construct
  source 1..18: mol_type = other RNA
caacggaatcccaaaagc

SEQ ID NO: 31464 - RNA, 23 nt, Synthetic Construct
  source 1..23: mol_type = other RNA
cgaggggcagagagcgagacttt

SEQ ID NO: 31465 - RNA, 23 nt, Synthetic Construct
  source 1..23: mol_type = other RNA
cgaggggcagagagcgagacttt

SEQ ID NO: 31466 - RNA, 19 nt, Synthetic Construct
  source 1..19: mol_type = other RNA
atcccactcctgacaccat

SEQ ID NO: 31467 - RNA, 19 nt, Synthetic Construct
  source 1..19: mol_type = other RNA
atcccactcctgacaccat

SEQ ID NO: 31468 - RNA, 21 nt, Synthetic Construct
  source 1..21: mol_type = other RNA
tgagatagtaggttgtgtggt

SEQ ID NO: 31469 - RNA, 21 nt, Synthetic Construct
  source 1..21: mol_type = other RNA
tgagatagtaggttgtgtggt

SEQ ID NO: 31470 - RNA, 22 nt, Synthetic Construct
  source 1..22: mol_type = other RNA
ccccttggggttgtaggaccac

SEQ ID NO: 31471 - RNA, 22 nt, Synthetic Construct
  source 1..22: mol_type = other RNA
ccccttggggttgtaggaccac

SEQ ID NO: 31472 - RNA, 19 nt, Synthetic Construct
  source 1..19: mol_type = other RNA
ccttggggttgtaggacca

SEQ ID NO: 31473 - RNA, 19 nt, Synthetic Construct
  source 1..19: mol_type = other RNA
ccttggggttgtaggacca

SEQ ID NO: 31474 - RNA, 23 nt, Synthetic Construct
  source 1..23: mol_type = other RNA
cgaggggcagagagcgagacttt

SEQ ID NO: 31475 - RNA, 23 nt, Synthetic Construct
  source 1..23: mol_type = other RNA
cgaggggcagagagcgagacttt

SEQ ID NO: 31476 - RNA, 21 nt, Synthetic Construct
  source 1..21: mol_type = other RNA
tgaggaagtaggttgtgtggt

SEQ ID NO: 31477 - RNA, 21 nt, Synthetic Construct
  source 1..21: mol_type = other RNA
tgaggaagtaggttgtgtggt

SEQ ID NO: 31478 - RNA, 21 nt, Synthetic Construct
  source 1..21: mol_type = other RNA
tgaggaagtaggttgtgtggt

SEQ ID NO: 31479 - RNA, 23 nt, Synthetic Construct
  source 1..23: mol_type = other RNA
tcctgtactgggctgccccgaga

SEQ ID NO: 31480 - RNA, 23 nt, Synthetic Construct
  source 1..23: mol_type = other RNA
tcctgtactgggctgccccgaga

SEQ ID NO: 31481 - RNA, 23 nt, Synthetic Construct
  source 1..23: mol_type = other RNA
tgaggggcagagagcgagacttc

SEQ ID NO: 31482 - RNA, 23 nt, Synthetic Construct
  source 1..23: mol_type = other RNA
tgaggggcagagagcgagacttc

SEQ ID NO: 31483 - RNA, 20 nt, Synthetic Construct
  source 1..20: mol_type = other RNA
tgaggaagtaggttgtgtgg

SEQ ID NO: 31484 - RNA, 16 nt, Synthetic Construct
  source 1..16: mol_type = other RNA
gtctacggccacacca

SEQ ID NO: 31485 - RNA, 21 nt, Synthetic Construct
  source 1..21: mol_type = other RNA
tgaggtagtagtttgtgctgc

SEQ ID NO: 31486 - RNA, 31 nt, Synthetic Construct; identical to SEQ ID NO: 2333
  source 1..31: mol_type = other RNA

SEQ ID NO: 31487 - RNA, 31 nt, Synthetic Construct; identical to SEQ ID NO: 2333
  source 1..31: mol_type = other RNA

SEQ ID NO: 31488 - RNA, 29 nt, Synthetic Construct
  source 1..29: mol_type = other RNA
gtgcatgcactctggggttgtgggacagc

SEQ ID NO: 31489 - RNA, 29 nt, Synthetic Construct
  source 1..29: mol_type = other RNA
gtgcatgcactctggggttgtgggacagc

SEQ ID NO: 31490 - RNA, 21 nt, Synthetic Construct
  source 1..21: mol_type = other RNA
tggagagtgacaatggtgttt

SEQ ID NO: 31491 - RNA, 24 nt, Synthetic Construct
  source 1..24: mol_type = other RNA
agctacattgtctgctgggtttcg

SEQ ID NO: 31492 - RNA, 24 nt, Synthetic Construct
  source 1..24: mol_type = other RNA
agctacattgtctgctgggtttcg

SEQ ID NO: 31493 - RNA, 24 nt, Synthetic Construct
  source 1..24: mol_type = other RNA
tgtaaacatccccgactggaagcg

SEQ ID NO: 31494 - RNA, 32 nt, Synthetic Construct; identical to SEQ ID NO: 2296
  source 1..32: mol_type = other RNA

SEQ ID NO: 31495 - RNA, 32 nt, Synthetic Construct; identical to SEQ ID NO: 2296
  source 1..32: mol_type = other RNA

SEQ ID NO: 31496 - RNA, 24 nt, Synthetic Construct
  source 1..24: mol_type = other RNA
agctacatctggctactgggtctc

SEQ ID NO: 31497 - RNA, 24 nt, Synthetic Construct
  source 1..24: mol_type = other RNA
agctacatctggctactgggtctc

SEQ ID NO: 31498 - RNA, 20 nt, Synthetic Construct
  source 1..20: mol_type = other RNA
caaagtgctgttcgtgcagg

SEQ ID NO: 31499 - RNA, 20 nt, Synthetic Construct
  source 1..20: mol_type = other RNA
caaagtgctgttcgtgcagg

SEQ ID NO: 31500 - RNA, 27 nt, Synthetic Construct
  source 1..27: mol_type = other RNA
ccccccactgctaaatttggctggctt

SEQ ID NO: 31501 - RNA, 16 nt, Synthetic Construct
  source 1..16: mol_type = other RNA
gtctacggccacacca

SEQ ID NO: 31502 - RNA, 16 nt, Synthetic Construct
  source 1..16: mol_type = other RNA
gtctacggccacacca

SEQ ID NO: 31503 - RNA, 22 nt, Synthetic Construct
  source 1..22: mol_type = other RNA
aggttccggataagtaagagcc

SEQ ID NO: 31504 - RNA, 22 nt, Synthetic Construct
  source 1..22: mol_type = other RNA
aggttccggataagtaagagcc

SEQ ID NO: 31505 - RNA, 21 nt, Synthetic Construct
  source 1..21: mol_type = other RNA
tgaggggcagggagcgagact

SEQ ID NO: 31506 - RNA, 22 nt, Synthetic Construct
  source 1..22: mol_type = other RNA
tgaggtagtagttcgtgctgtt

SEQ ID NO: 31507 - RNA, 21 nt, Synthetic Construct
  source 1..21: mol_type = other RNA
taaggtagtaggttgtgtggt

SEQ ID NO: 31508 - RNA, 21 nt, Synthetic Construct
  source 1..21: mol_type = other RNA
taaggtagtaggttgtgtggt

SEQ ID NO: 31509 - RNA, 23 nt, Synthetic Construct
  source 1..23: mol_type = other RNA
tgaggggcagagagagagacttt

SEQ ID NO: 31510 - RNA, 30 nt, Synthetic Construct; identical to SEQ ID NO: 1958
  source 1..30: mol_type = other RNA

SEQ ID NO: 31511 - RNA, 30 nt, Synthetic Construct; identical to SEQ ID NO: 1958
  source 1..30: mol_type = other RNA

SEQ ID NO: 31512 - RNA, 22 nt, Synthetic Construct
  source 1..22: mol_type = other RNA
aggagtgtgacaatggtgtttg

SEQ ID NO: 31513 - RNA, 29 nt, Synthetic Construct
  source 1..29: mol_type = other RNA
cgggatggggacagtgtatggtgggcagt

SEQ ID NO: 31514 - RNA, 29 nt, Synthetic Construct
  source 1..29: mol_type = other RNA
cgggatggggacagtgtatggtgggcagt

SEQ ID NO: 31515 - RNA, 23 nt, Synthetic Construct
  source 1..23: mol_type = other RNA
tgaggtagtaggttgtgtggttc

SEQ ID NO: 31516 - RNA, 23 nt, Synthetic Construct
  source 1..23: mol_type = other RNA
tgaggtagtaggttgtgtggttc

SEQ ID NO: 31517 - RNA, 24 nt, Synthetic Construct
  source 1..24: mol_type = other RNA
gaaagattaaggcaagaggttagc

SEQ ID NO: 31518 - RNA, 24 nt, Synthetic Construct
  source 1..24: mol_type = other RNA
gaaagattaaggcaagaggttagc

SEQ ID NO: 31519 - RNA, 27 nt, Synthetic Construct
  source 1..27: mol_type = other RNA
ccccccactgctaaatttgattggctt

SEQ ID NO: 31520 - RNA, 27 nt, Synthetic Construct
  source 1..27: mol_type = other RNA
ccccccactgctaaatttgattggctt

SEQ ID NO: 31521 - RNA, 19 nt, Synthetic Construct
  source 1..19: mol_type = other RNA
aaaccgttaccattactga

SEQ ID NO: 31522 - RNA, 19 nt, Synthetic Construct
  source 1..19: mol_type = other RNA
aaaccgttaccattactga

SEQ ID NO: 31523 - RNA, 15 nt, Synthetic Construct
  source 1..15: mol_type = other RNA
aaattccttgtcggg

SEQ ID NO: 31524 - RNA, 15 nt, Synthetic Construct
  source 1..15: mol_type = other RNA
aaattccttgtcggg

SEQ ID NO: 31525 - RNA, 16 nt, Synthetic Construct
  source 1..16: mol_type = other RNA
gtctacagccatacca

SEQ ID NO: 31526 - RNA, 22 nt, Synthetic Construct
  source 1..22: mol_type = other RNA
tcctgtactgagctaccccgag

SEQ ID NO: 31527 - RNA, 22 nt, Synthetic Construct
  source 1..22: mol_type = other RNA
tcctgtactgagctaccccgag

SEQ ID NO: 31528 - RNA, 21 nt, Synthetic Construct
  source 1..21: mol_type = other RNA
tagcagcacgtaatattggcg

SEQ ID NO: 31529 - RNA, 21 nt, Synthetic Construct
  source 1..21: mol_type = other RNA
tagcagcacgtaatattggcg

SEQ ID NO: 31530 - RNA, 22 nt, Synthetic Construct
  source 1..22: mol_type = other RNA
gaagaggacttggagctcgatc

SEQ ID NO: 31531 - RNA, 22 nt, Synthetic Construct
  source 1..22: mol_type = other RNA
gaagaggacttggagctcgatc

SEQ ID NO: 31532 - RNA, 23 nt, Synthetic Construct
  source 1..23: mol_type = other RNA
gactatagaactttccccctcaa

SEQ ID NO: 31533 - RNA, 23 nt, Synthetic Construct
  source 1..23: mol_type = other RNA
gactatagaactttccccctcaa

SEQ ID NO: 31534 - RNA, 22 nt, Synthetic Construct
  source 1..22: mol_type = other RNA
tattgcacttgtcctggcctgt

SEQ ID NO: 31535 - RNA, 22 nt, Synthetic Construct
  source 1..22: mol_type = other RNA
tggagtgtggcaatggtgtttg

SEQ ID NO: 31536 - RNA, 22 nt, Synthetic Construct
  source 1..22: mol_type = other RNA
aggagtgtgacaatggtgtttg

SEQ ID NO: 31537 - RNA, 23 nt, Synthetic Construct
  source 1..23: mol_type = other RNA
tcctgtactgagctgccccgggt

SEQ ID NO: 31538 - RNA, 21 nt, Synthetic Construct
  source 1..21: mol_type = other RNA
tgaggggcggagagcgagact

SEQ ID NO: 31539 - RNA, 43 nt, Synthetic Construct; identical to SEQ ID NO: 6535
  source 1..43: mol_type = other RNA

SEQ ID NO: 31540 - RNA, 43 nt, Synthetic Construct; identical to SEQ ID NO: 6535
  source 1..43: mol_type = other RNA

SEQ ID NO: 31541 - RNA, 22 nt, Synthetic Construct
  source 1..22: mol_type = other RNA
tagcttatcagactgatgttga

SEQ ID NO: 31542 - RNA, 20 nt, Synthetic Construct
  source 1..20: mol_type = other RNA
ggaggtagtaggttgtgtgg

SEQ ID NO: 31543 - RNA, 20 nt, Synthetic Construct
  source 1..20: mol_type = other RNA
ggaggtagtaggttgtgtgg

SEQ ID NO: 31544 - RNA, 22 nt, Synthetic Construct
  source 1..22: mol_type = other RNA
tgaggtagtaggtcgtgtggtt

SEQ ID NO: 31545 - RNA, 22 nt, Synthetic Construct
  source 1..22: mol_type = other RNA
tgaggtagtaggtcgtgtggtt

SEQ ID NO: 31546 - RNA, 16 nt, Synthetic Construct
  source 1..16: mol_type = other RNA
tacctggttgatcctg

SEQ ID NO: 31547 - RNA, 16 nt, Synthetic Construct
  source 1..16: mol_type = other RNA
tacctggttgatcctg

SEQ ID NO: 31548 - RNA, 22 nt, Synthetic Construct
  source 1..22: mol_type = other RNA
tgaggtagtagcttgtgctgtt

SEQ ID NO: 31549 - RNA, 22 nt, Synthetic Construct
  source 1..22: mol_type = other RNA
tgaggtagtagcttgtgctgtt

SEQ ID NO: 31550 - RNA, 23 nt, Synthetic Construct
  source 1..23: mol_type = other RNA
tgaggggcagagagagagacttt

SEQ ID NO: 31551 - RNA, 16 nt, Synthetic Construct
  source 1..16: mol_type = other RNA
gggtgaaagcggggga

SEQ ID NO: 31552 - RNA, 16 nt, Synthetic Construct
  source 1..16: mol_type = other RNA
gggtgaaagcggggga

SEQ ID NO: 31553 - RNA, 24 nt, Synthetic Construct
  source 1..24: mol_type = other RNA
tgtcagtttgtcaaataccccatt

SEQ ID NO: 31554 - RNA, 24 nt, Synthetic Construct
  source 1..24: mol_type = other RNA
tgtcagtttgtcaaataccccatt

SEQ ID NO: 31555 - RNA, 22 nt, Synthetic Construct
  source 1..22: mol_type = other RNA
tgaggtagtagatcgtatagtt

SEQ ID NO: 31556 - RNA, 22 nt, Synthetic Construct
  source 1..22: mol_type = other RNA
tgaggtagtagatcgtatagtt

SEQ ID NO: 31557 - RNA, 22 nt, Synthetic Construct
  source 1..22: mol_type = other RNA
tagcagcacgtaaatgttggcg

SEQ ID NO: 31558 - RNA, 21 nt, Synthetic Construct
  source 1..21: mol_type = other RNA
tgaggaagtaggttgtgtggt

SEQ ID NO: 31559 - RNA, 24 nt, Synthetic Construct
  source 1..24: mol_type = other RNA
ggctacattgtctgctgggtttct

SEQ ID NO: 31560 - RNA, 18 nt, Synthetic Construct
  source 1..18: mol_type = other RNA
caacggaatcccaaaagc

SEQ ID NO: 31561 - RNA, 18 nt, Synthetic Construct
  source 1..18: mol_type = other RNA
caacggaatcccaaaagc

SEQ ID NO: 31562 - RNA, 24 nt, Synthetic Construct
  source 1..24: mol_type = other RNA
tgaggtagtaggttgtgtggtttc

SEQ ID NO: 31563 - RNA, 22 nt, Synthetic Construct
  source 1..22: mol_type = other RNA
tggctcagttcagcaggaacag

SEQ ID NO: 31564 - RNA, 17 nt, Synthetic Construct
  source 1..17: mol_type = other RNA
accggaggaaggtgggg

SEQ ID NO: 31565 - RNA, 24 nt, Synthetic Construct
  source 1..24: mol_type = other RNA
tgtaaacatccccgactggaagtt

SEQ ID NO: 31566 - RNA, 22 nt, Synthetic Construct
  source 1..22: mol_type = other RNA
tagcagcacgtaaatattggca

SEQ ID NO: 31567 - RNA, 22 nt, Synthetic Construct
  source 1..22: mol_type = other RNA
tagcagcacgtaaatattggca

SEQ ID NO: 31568 - RNA, 22 nt, Synthetic Construct
  source 1..22: mol_type = other RNA
taaggtagtagtttgtgctgtt

SEQ ID NO: 31569 - RNA, 22 nt, Synthetic Construct
  source 1..22: mol_type = other RNA
tcctgtactgtgctgccccgag

SEQ ID NO: 31570 - RNA, 23 nt, Synthetic Construct
  source 1..23: mol_type = other RNA
ggatatcatcatatactgtaagt

SEQ ID NO: 31571 - RNA, 23 nt, Synthetic Construct
  source 1..23: mol_type = other RNA
ggatatcatcatatactgtaagt

SEQ ID NO: 31572 - RNA, 23 nt, Synthetic Construct
  source 1..23: mol_type = other RNA
tggtaatatgacgtacttagtgt

SEQ ID NO: 31573 - RNA, 21 nt, Synthetic Construct
  source 1..21: mol_type = other RNA
aacggaatcccaaaagcagct

SEQ ID NO: 31574 - RNA, 21 nt, Synthetic Construct
  source 1..21: mol_type = other RNA
aacggaatcccaaaagcagct

SEQ ID NO: 31575 - RNA, 32 nt, Synthetic Construct; identical to SEQ ID NO: 8547
  source 1..32: mol_type = other RNA

SEQ ID NO: 31576 - RNA, 32 nt, Synthetic Construct; identical to SEQ ID NO: 2318
  source 1..32: mol_type = other RNA

SEQ ID NO: 31577 - RNA, 32 nt, Synthetic Construct; identical to SEQ ID NO: 2318
  source 1..32: mol_type = other RNA

SEQ ID NO: 31578 - RNA, 20 nt, Synthetic Construct
  source 1..20: mol_type = other RNA
tggggtagtaggttgtgtgg

SEQ ID NO: 31579 - RNA, 22 nt, Synthetic Construct
  source 1..22: mol_type = other RNA
tgaggtagtagtttgtgcggtt

SEQ ID NO: 31580 - RNA, 22 nt, Synthetic Construct
  source 1..22: mol_type = other RNA
tgaggtagtagtttgtgcggtt

SEQ ID NO: 31581 - RNA, 24 nt, Synthetic Construct
  source 1..24: mol_type = other RNA
cggagaaggttagctcagccaact

SEQ ID NO: 31582 - RNA, 16 nt, Synthetic Construct
  source 1..16: mol_type = other RNA
gtctacggccatacca

SEQ ID NO: 31583 - RNA, 16 nt, Synthetic Construct
  source 1..16: mol_type = other RNA
gtctacggccatacca

SEQ ID NO: 31584 - RNA, 27 nt, Synthetic Construct
  source 1..27: mol_type = other RNA
ggggagctaatcccagaaacccggtcg

SEQ ID NO: 31585 - RNA, 23 nt, Synthetic Construct
  source 1..23: mol_type = other RNA
tgaggtagtaggttgtgtggtct

SEQ ID NO: 31586 - RNA, 23 nt, Synthetic Construct
  source 1..23: mol_type = other RNA
tgaggtagtaggttgtgtggtct

SEQ ID NO: 31587 - RNA, 23 nt, Synthetic Construct
  source 1..23: mol_type = other RNA
ttcaagtaatccaggataggctt

SEQ ID NO: 31588 - RNA, 25 nt, Synthetic Construct
  source 1..25: mol_type = other RNA
ttgaggatgtgagatcgagacgaca

SEQ ID NO: 31589 - RNA, 22 nt, Synthetic Construct
  source 1..22: mol_type = other RNA
tcgaatccgagtcacggcacca

SEQ ID NO: 31590 - RNA, 24 nt, Synthetic Construct
  source 1..24: mol_type = other RNA
tcctgtactgagctgccccgagat

SEQ ID NO: 31591 - RNA, 30 nt, Synthetic Construct; identical to SEQ ID NO: 1771
  source 1..30: mol_type = other RNA

SEQ ID NO: 31592 - RNA, 30 nt, Synthetic Construct; identical to SEQ ID NO: 1771
  source 1..30: mol_type = other RNA

SEQ ID NO: 31593 - RNA, 24 nt, Synthetic Construct
  source 1..24: mol_type = other RNA
tgtaaacatccccgactgggagct

SEQ ID NO: 31594 - RNA, 19 nt, Synthetic Construct
  source 1..19: mol_type = other RNA
gagaaagctcacaagaact

SEQ ID NO: 31595 - RNA, 19 nt, Synthetic Construct
  source 1..19: mol_type = other RNA
gagaaagctcacaagaact

SEQ ID NO: 31596 - RNA, 16 nt, Synthetic Construct
  source 1..16: mol_type = other RNA
ggccgttcttagttgg

SEQ ID NO: 31597 - RNA, 15 nt, Synthetic Construct
  source 1..15: mol_type = other RNA
ggccgtcgtcagctc

SEQ ID NO: 31598 - RNA, 21 nt, Synthetic Construct
  source 1..21: mol_type = other RNA
agcaggacggtggccatggaa

SEQ ID NO: 31599 - RNA, 21 nt, Synthetic Construct
  source 1..21: mol_type = other RNA
agcaggacggtggccatggaa

SEQ ID NO: 31600 - RNA, 22 nt, Synthetic Construct
  source 1..22: mol_type = other RNA
tcagcgccgatgatagtgcgga

SEQ ID NO: 31601 - RNA, 23 nt, Synthetic Construct
  source 1..23: mol_type = other RNA
atgacacgatcactcccgttgag

SEQ ID NO: 31602 - RNA, 18 nt, Synthetic Construct
  source 1..18: mol_type = other RNA
atcgctagtaatcgcgga

SEQ ID NO: 31603 - RNA, 18 nt, Synthetic Construct
  source 1..18: mol_type = other RNA
atcgctagtaatcgcgga

SEQ ID NO: 31604 - RNA, 20 nt, Synthetic Construct
  source 1..20: mol_type = other RNA
tgaggtagtaggttgtgagg

SEQ ID NO: 31605 - RNA, 15 nt, Synthetic Construct
  source 1..15: mol_type = other RNA
cggcccagactccta

SEQ ID NO: 31606 - RNA, 22 nt, Synthetic Construct
  source 1..22: mol_type = other RNA
aattgcacggtatccatctgta

SEQ ID NO: 31607 - RNA, 22 nt, Synthetic Construct
  source 1..22: mol_type = other RNA
aattgcacggtatccatctgta

SEQ ID NO: 31608 - RNA, 21 nt, Synthetic Construct
  source 1..21: mol_type = other RNA
tgaggaagtagattgtatagt

SEQ ID NO: 31609 - RNA, 25 nt, Synthetic Construct
  source 1..25: mol_type = other RNA
aaaccgttaccattactgagtttag

SEQ ID NO: 31610 - RNA, 25 nt, Synthetic Construct
  source 1..25: mol_type = other RNA
aaaccgttaccattactgagtttag

SEQ ID NO: 31611 - RNA, 22 nt, Synthetic Construct
  source 1..22: mol_type = other RNA
cattgcacttgtctcggtctgg

SEQ ID NO: 31612 - RNA, 25 nt, Synthetic Construct
  source 1..25: mol_type = other RNA
ggtaaaatagctgagtgaagcattg

SEQ ID NO: 31613 - RNA, 25 nt, Synthetic Construct
  source 1..25: mol_type = other RNA
ggtaaaatagctgagtgaagcattg

SEQ ID NO: 31614 - RNA, 22 nt, Synthetic Construct
  source 1..22: mol_type = other RNA
tgaggaagtagattgtatagtt

SEQ ID NO: 31615 - RNA, 23 nt, Synthetic Construct
  source 1..23: mol_type = other RNA
tgaggggcagagagcgagacttg

SEQ ID NO: 31616 - RNA, 22 nt, Synthetic Construct
  source 1..22: mol_type = other RNA
nagcagcacgtaaatattggcg

SEQ ID NO: 31617 - RNA, 22 nt, Synthetic Construct
  source 1..22: mol_type = other RNA
acagtagtctgcacattggttg

SEQ ID NO: 31618 - RNA, 22 nt, Synthetic Construct
  source 1..22: mol_type = other RNA
tgaggtagtaggttgcgtggtt

SEQ ID NO: 31619 - RNA, 22 nt, Synthetic Construct
  source 1..22: mol_type = other RNA
tgaggtagtaggttgcgtggtt

SEQ ID NO: 31620 - RNA, 24 nt, Synthetic Construct
  source 1..24: mol_type = other RNA
taccacagggtagaaccacggatt

SEQ ID NO: 31621 - RNA, 24 nt, Synthetic Construct
  source 1..24: mol_type = other RNA
taccacagggtagaaccacggatt

SEQ ID NO: 31622 - RNA, 22 nt, Synthetic Construct
  source 1..22: mol_type = other RNA
tagcagcacgtaaatgttggcg

SEQ ID NO: 31623 - RNA, 22 nt, Synthetic Construct
  source 1..22: mol_type = other RNA
tagcagcacgtaaatgttggcg

SEQ ID NO: 31624 - RNA, 34 nt, Synthetic Construct; identical to SEQ ID NO: 5595
  source 1..34: mol_type = other RNA

SEQ ID NO: 31625 - RNA, 34 nt, Synthetic Construct; identical to SEQ ID NO: 5595
  source 1..34: mol_type = other RNA

SEQ ID NO: 31626 - RNA, 15 nt, Synthetic Construct
  source 1..15: mol_type = other RNA
cctcgcgcgattgga

SEQ ID NO: 31627 - RNA, 18 nt, Synthetic Construct
  source 1..18: mol_type = other RNA
gctgtgatggccgagtgg

SEQ ID NO: 31628 - RNA, 17 nt, Synthetic Construct
  source 1..17: mol_type = other RNA
caggacggtggccatgg

SEQ ID NO: 31629 - RNA, 17 nt, Synthetic Construct
  source 1..17: mol_type = other RNA
caggacggtggccatgg

SEQ ID NO: 31630 - RNA, 22 nt, Synthetic Construct
  source 1..22: mol_type = other RNA
ggcagcattgtacagggctatg

SEQ ID NO: 31631 - RNA, 32 nt, Synthetic Construct; identical to SEQ ID NO: 8371
  source 1..32: mol_type = other RNA

SEQ ID NO: 31632 - RNA, 32 nt, Synthetic Construct; identical to SEQ ID NO: 8371
  source 1..32: mol_type = other RNA

SEQ ID NO: 31633 - RNA, 39 nt, Synthetic Construct; identical to SEQ ID NO: 759
  source 1..39: mol_type = other RNA

SEQ ID NO: 31634 - RNA, 22 nt, Synthetic Construct
  source 1..22: mol_type = other RNA
tcagcgccgatgatagtgcgga

SEQ ID NO: 31635 - RNA, 35 nt, Synthetic Construct; identical to SEQ ID NO: 2548
  source 1..35: mol_type = other RNA

SEQ ID NO: 31636 - RNA, 35 nt, Synthetic Construct; identical to SEQ ID NO: 2548
  source 1..35: mol_type = other RNA

SEQ ID NO: 31637 - RNA, 34 nt, Synthetic Construct; identical to SEQ ID NO: 2265
  source 1..34: mol_type = other RNA

SEQ ID NO: 31638 - RNA, 34 nt, Synthetic Construct; identical to SEQ ID NO: 2265
  source 1..34: mol_type = other RNA

SEQ ID NO: 31639 - RNA, 21 nt, Synthetic Construct
  source 1..21: mol_type = other RNA
ccccttggggttgtaggacca

SEQ ID NO: 31640 - RNA, 21 nt, Synthetic Construct
  source 1..21: mol_type = other RNA
ccccttggggttgtaggacca

SEQ ID NO: 31641 - RNA, 22 nt, Synthetic Construct
  source 1..22: mol_type = other RNA
ngaggtagtaggttgtgtggtt

SEQ ID NO: 31642 - RNA, 22 nt, Synthetic Construct
  source 1..22: mol_type = other RNA
ngaggtagtaggttgtgtggtt

SEQ ID NO: 31643 - RNA, 21 nt, Synthetic Construct
  source 1..21: mol_type = other RNA
tgaggtagaaggttgtgtggt

SEQ ID NO: 31644 - RNA, 21 nt, Synthetic Construct
  source 1..21: mol_type = other RNA
tgaggtagaaggttgtgtggt

SEQ ID NO: 31645 - RNA, 19 nt, Synthetic Construct
  source 1..19: mol_type = other RNA
agcaggacggtggccatgg

SEQ ID NO: 31646 - RNA, 21 nt, Synthetic Construct
  source 1..21: mol_type = other RNA
taaggtagtaggttgtgtggt

SEQ ID NO: 31647 - RNA, 22 nt, Synthetic Construct
  source 1..22: mol_type = other RNA
tcacagtgaaccggtctcttta

SEQ ID NO: 31648 - RNA, 27 nt, Synthetic Construct
  source 1..27: mol_type = other RNA
gcattggtggttcagtggtagaattct

SEQ ID NO: 31649 - RNA, 23 nt, Synthetic Construct
  source 1..23: mol_type = other RNA
tggtaatacaacgtacttagtgt

SEQ ID NO: 31650 - RNA, 23 nt, Synthetic Construct
  source 1..23: mol_type = other RNA
tggtaatacaacgtacttagtgt

SEQ ID NO: 31651 - RNA, 20 nt, Synthetic Construct
  source 1..20: mol_type = other RNA
tgaggtagtgggttgtatag

SEQ ID NO: 31652 - RNA, 20 nt, Synthetic Construct
  source 1..20: mol_type = other RNA
tgaggtagtgggttgtatag

SEQ ID NO: 31653 - RNA, 16 nt, Synthetic Construct
  source 1..16: mol_type = other RNA
agcaagtcgaacggta

SEQ ID NO: 31654 - RNA, 19 nt, Synthetic Construct
  source 1..19: mol_type = other RNA
acatgcaagtcgaacggta

SEQ ID NO: 31655 - RNA, 17 nt, Synthetic Construct
  source 1..17: mol_type = other RNA
agtccggatcgtagtct

SEQ ID NO: 31656 - RNA, 17 nt, Synthetic Construct
  source 1..17: mol_type = other RNA
agtccggatcgtagtct

SEQ ID NO: 31657 - RNA, 18 nt, Synthetic Construct
  source 1..18: mol_type = other RNA
cctgtaccgatcaatagt

SEQ ID NO: 31658 - RNA, 20 nt, Synthetic Construct
  source 1..20: mol_type = other RNA
tgaggcagtaggttgtgtgg

SEQ ID NO: 31659 - RNA, 16 nt, Synthetic Construct
  source 1..16: mol_type = other RNA
cccctggacctgtact

SEQ ID NO: 31660 - RNA, 22 nt, Synthetic Construct
  source 1..22: mol_type = other RNA
tcagtagctcgaggaaaagaca

SEQ ID NO: 31661 - RNA, 22 nt, Synthetic Construct
  source 1..22: mol_type = other RNA
tgagatagtagtttgtgctgtt

SEQ ID NO: 31662 - RNA, 23 nt, Synthetic Construct
  source 1..23: mol_type = other RNA
tccctgtcctccaggagctcacg

SEQ ID NO: 31663 - RNA, 23 nt, Synthetic Construct
  source 1..23: mol_type = other RNA
tccctgtcctccaggagctcacg

SEQ ID NO: 31664 - RNA, 21 nt, Synthetic Construct
  source 1..21: mol_type = other RNA
tgaggtagtaggttgtatagc

SEQ ID NO: 31665 - RNA, 21 nt, Synthetic Construct
  source 1..21: mol_type = other RNA
tgaggtagtaggttgtatagc

SEQ ID NO: 31666 - RNA, 19 nt, Synthetic Construct
  source 1..19: mol_type = other RNA
tgtcagtttgtcaaatacc

SEQ ID NO: 31667 - RNA, 19 nt, Synthetic Construct
  source 1..19: mol_type = other RNA
tgtcagtttgtcaaatacc

SEQ ID NO: 31668 - RNA, 20 nt, Synthetic Construct
  source 1..20: mol_type = other RNA
cataaagtagaaagcactac

SEQ ID NO: 31669 - RNA, 16 nt, Synthetic Construct
  source 1..16: mol_type = other RNA
ggaattgacggaaggg

SEQ ID NO: 31670 - RNA, 16 nt, Synthetic Construct
  source 1..16: mol_type = other RNA
ggaattgacggaaggg

SEQ ID NO: 31671 - RNA, 22 nt, Synthetic Construct
  source 1..22: mol_type = other RNA
tgaggcagtagattgtatagtt

SEQ ID NO: 31672 - RNA, 22 nt, Synthetic Construct
  source 1..22: mol_type = other RNA
tgaggcagtagattgtatagtt

SEQ ID NO: 31673 - RNA, 21 nt, Synthetic Construct
  source 1..21: mol_type = other RNA
tggagtgcgacaatggtgttt

SEQ ID NO: 31674 - RNA, 21 nt, Synthetic Construct
  source 1..21: mol_type = other RNA
tggagtgcgacaatggtgttt

SEQ ID NO: 31675 - RNA, 23 nt, Synthetic Construct
  source 1..23: mol_type = other RNA
aatgacacgatcactcccgttgt

SEQ ID NO: 31676 - RNA, 23 nt, Synthetic Construct
  source 1..23: mol_type = other RNA
aatgacacgatcactcccgttgt

SEQ ID NO: 31677 - RNA, 22 nt, Synthetic Construct
  source 1..22: mol_type = other RNA
tgaggtagtaggttgtggggtt

SEQ ID NO: 31678 - RNA, 23 nt, Synthetic Construct
  source 1..23: mol_type = other RNA
gtaaacatccttgactggaagct

SEQ ID NO: 31679 - RNA, 23 nt, Synthetic Construct
  source 1..23: mol_type = other RNA
gtaaacatccttgactggaagct

SEQ ID NO: 31680 - RNA, 16 nt, Synthetic Construct
  source 1..16: mol_type = other RNA
gtctacagccatacca

SEQ ID NO: 31681 - RNA, 15 nt, Synthetic Construct
  source 1..15: mol_type = other RNA
gcaagtcgagcggta

SEQ ID NO: 31682 - RNA, 22 nt, Synthetic Construct
  source 1..22: mol_type = other RNA
tgaggtagtaggatgtgtggtt

SEQ ID NO: 31683 - RNA, 22 nt, Synthetic Construct
  source 1..22: mol_type = other RNA
tgaggtagtaggatgtgtggtt

SEQ ID NO: 31684 - RNA, 22 nt, Synthetic Construct
  source 1..22: mol_type = other RNA
tcgaatccgagtcacggcacca

SEQ ID NO: 31685 - RNA, 21 nt, Synthetic Construct
  source 1..21: mol_type = other RNA
tggagtgtgacaacggtgttt

SEQ ID NO: 31686 - RNA, 21 nt, Synthetic Construct
  source 1..21: mol_type = other RNA
tggagtgtgacaacggtgttt

SEQ ID NO: 31687 - RNA, 28 nt, Synthetic Construct
  source 1..28: mol_type = other RNA
ccccccactgctaaatttgactggcctt

SEQ ID NO: 31688 - RNA, 32 nt, Synthetic Construct; identical to SEQ ID NO: 161
  source 1..32: mol_type = other RNA

SEQ ID NO: 31689 - RNA, 30 nt, Synthetic Construct; identical to SEQ ID NO: 6467
  source 1..30: mol_type = other RNA

SEQ ID NO: 31690 - RNA, 30 nt, Synthetic Construct; identical to SEQ ID NO: 6467
  source 1..30: mol_type = other RNA

SEQ ID NO: 31691 - RNA, 22 nt, Synthetic Construct
  source 1..22: mol_type = other RNA
tcctgtactgagctgccccggg

SEQ ID NO: 31692 - RNA, 22 nt, Synthetic Construct
  source 1..22: mol_type = other RNA
tcctgtactgagctgccccggg

SEQ ID NO: 31693 - RNA, 23 nt, Synthetic Construct
  source 1..23: mol_type = other RNA
accattcgtagacgacctgcttc

SEQ ID NO: 31694 - RNA, 21 nt, Synthetic Construct
  source 1..21: mol_type = other RNA
tgaggggcagagagcgagaca

SEQ ID NO: 31695 - RNA, 21 nt, Synthetic Construct
  source 1..21: mol_type = other RNA
tgaggggcagagagcgagaca

SEQ ID NO: 31696 - RNA, 21 nt, Synthetic Construct
  source 1..21: mol_type = other RNA
tccttcattccaccggagtct

SEQ ID NO: 31697 - RNA, 23 nt, Synthetic Construct
  source 1..23: mol_type = other RNA
tcctgaactgagctgccccgagt

SEQ ID NO: 31698 - RNA, 23 nt, Synthetic Construct
  source 1..23: mol_type = other RNA
tcctgaactgagctgccccgagt

SEQ ID NO: 31699 - RNA, 34 nt, Synthetic Construct; identical to SEQ ID NO: 2529
  source 1..34: mol_type = other RNA

SEQ ID NO: 31700 - RNA, 34 nt, Synthetic Construct; identical to SEQ ID NO: 2529
  source 1..34: mol_type = other RNA

SEQ ID NO: 31701 - RNA, 27 nt, Synthetic Construct
  source 1..27: mol_type = other RNA
ccccccactgctaaatctgactggctt

SEQ ID NO: 31702 - RNA, 21 nt, Synthetic Construct
  source 1..21: mol_type = other RNA
cagtgcaatgttaaaagggca

SEQ ID NO: 31703 - RNA, 21 nt, Synthetic Construct
  source 1..21: mol_type = other RNA
cagtgcaatgttaaaagggca

SEQ ID NO: 31704 - RNA, 23 nt, Synthetic Construct
  source 1..23: mol_type = other RNA
tgaggggcagagagcgagactta

SEQ ID NO: 31705 - RNA, 23 nt, Synthetic Construct
  source 1..23: mol_type = other RNA
tgaggggcagagagcgagactta

SEQ ID NO: 31706 - RNA, 20 nt, Synthetic Construct
  source 1..20: mol_type = other RNA
cgaggtagtaggttgtatag

SEQ ID NO: 31707 - RNA, 20 nt, Synthetic Construct
  source 1..20: mol_type = other RNA
cgaggtagtaggttgtatag

SEQ ID NO: 31708 - RNA, 32 nt, Synthetic Construct; identical to SEQ ID NO: 2582
  source 1..32: mol_type = other RNA

SEQ ID NO: 31709 - RNA, 32 nt, Synthetic Construct; identical to SEQ ID NO: 2582
  source 1..32: mol_type = other RNA

SEQ ID NO: 31710 - RNA, 23 nt, Synthetic Construct
  source 1..23: mol_type = other RNA
cgaggtagtaggttgtgtggttt

SEQ ID NO: 31711 - RNA, 23 nt, Synthetic Construct
  source 1..23: mol_type = other RNA
cgaggtagtaggttgtgtggttt

SEQ ID NO: 31712 - RNA, 23 nt, Synthetic Construct
  source 1..23: mol_type = other RNA
atgtcccacccccactcctgttt

SEQ ID NO: 31713 - RNA, 23 nt, Synthetic Construct
  source 1..23: mol_type = other RNA
atgtcccacccccactcctgttt

SEQ ID NO: 31714 - RNA, 18 nt, Synthetic Construct
  source 1..18: mol_type = other RNA
ggtagcgtggccgagtgg

SEQ ID NO: 31715 - RNA, 22 nt, Synthetic Construct
  source 1..22: mol_type = other RNA
tgaggtggtagtttgtgctgtt

SEQ ID NO: 31716 - RNA, 22 nt, Synthetic Construct
  source 1..22: mol_type = other RNA
tgaggtggtagtttgtgctgtt

SEQ ID NO: 31717 - RNA, 16 nt, Synthetic Construct
  source 1..16: mol_type = other RNA
ctgcctcagcgtcggt

SEQ ID NO: 31718 - RNA, 16 nt, Synthetic Construct
  source 1..16: mol_type = other RNA
ctgcctcagcgtcggt

SEQ ID NO: 31719 - RNA, 20 nt, Synthetic Construct
  source 1..20: mol_type = other RNA
aatgacacgatcactcccgt

SEQ ID NO: 31720 - RNA, 20 nt, Synthetic Construct
  source 1..20: mol_type = other RNA
aatgacacgatcactcccgt

SEQ ID NO: 31721 - RNA, 22 nt, Synthetic Construct
  source 1..22: mol_type = other RNA
tgaggtagtagtttgtggtgtt

SEQ ID NO: 31722 - RNA, 22 nt, Synthetic Construct
  source 1..22: mol_type = other RNA
tgaggtagtagtttgtggtgtt

SEQ ID NO: 31723 - RNA, 22 nt, Synthetic Construct
  source 1..22: mol_type = other RNA
tattgcacttgtcccggcccgt

SEQ ID NO: 31724 - RNA, 22 nt, Synthetic Construct
  source 1..22: mol_type = other RNA
ctttcagtcggatgtttacagt

SEQ ID NO: 31725 - RNA, 22 nt, Synthetic Construct
  source 1..22: mol_type = other RNA
ctttcagtcggatgtttacagt

SEQ ID NO: 31726 - RNA, 21 nt, Synthetic Construct
  source 1..21: mol_type = other RNA
tgaggtagtaggttgtgtagt

SEQ ID NO: 31727 - RNA, 18 nt, Synthetic Construct
  source 1..18: mol_type = other RNA
gtcgacgtatagggtgtg

SEQ ID NO: 31728 - RNA, 18 nt, Synthetic Construct
  source 1..18: mol_type = other RNA
gtcgacgtatagggtgtg

SEQ ID NO: 31729 - RNA, 20 nt, Synthetic Construct
  source 1..20: mol_type = other RNA
aatgacacgatcactcccgt

SEQ ID NO: 31730 - RNA, 20 nt, Synthetic Construct
  source 1..20: mol_type = other RNA
aatgacacgatcactcccgt

SEQ ID NO: 31731 - RNA, 27 nt, Synthetic Construct
  source 1..27: mol_type = other RNA
ccccccactgctagatttgactggctt

SEQ ID NO: 31732 - RNA, 23 nt, Synthetic Construct
  source 1..23: mol_type = other RNA
tgagaactgaattccatgggttt

SEQ ID NO: 31733 - RNA, 16 nt, Synthetic Construct
  source 1..16: mol_type = other RNA
gtctacggccataccg

SEQ ID NO: 31734 - RNA, 23 nt, Synthetic Construct
  source 1..23: mol_type = other RNA
cgaggggcagagagcgagacttt

SEQ ID NO: 31735 - RNA, 21 nt, Synthetic Construct
  source 1..21: mol_type = other RNA
tgaggtagtaggttgtgaggt

SEQ ID NO: 31736 - RNA, 21 nt, Synthetic Construct
  source 1..21: mol_type = other RNA
tgaggtagtaggttgtgaggt

SEQ ID NO: 31737 - RNA, 23 nt, Synthetic Construct
  source 1..23: mol_type = other RNA
tcctgtactgagccgccccgaga

SEQ ID NO: 31738 - RNA, 23 nt, Synthetic Construct
  source 1..23: mol_type = other RNA
tgtgcaaatctatgcaaaactga

SEQ ID NO: 31739 - RNA, 22 nt, Synthetic Construct
  source 1..22: mol_type = other RNA
ccctgtactgagctgccccgag

SEQ ID NO: 31740 - RNA, 21 nt, Synthetic Construct
  source 1..21: mol_type = other RNA
tcctgtactgagctgccctga

SEQ ID NO: 31741 - RNA, 22 nt, Synthetic Construct
  source 1..22: mol_type = other RNA
nagcagcacgtaaatattggcg

SEQ ID NO: 31742 - RNA, 25 nt, Synthetic Construct
  source 1..25: mol_type = other RNA
ttgaggatgtgagatcgagacgaca

SEQ ID NO: 31743 - RNA, 25 nt, Synthetic Construct
  source 1..25: mol_type = other RNA
ttgaggatgtgagatcgagacgaca

SEQ ID NO: 31744 - RNA, 21 nt, Synthetic Construct
  source 1..21: mol_type = other RNA
cgaggtagtaggttgtatagt

SEQ ID NO: 31745 - RNA, 21 nt, Synthetic Construct
  source 1..21: mol_type = other RNA
cgaggtagtaggttgtatagt

SEQ ID NO: 31746 - RNA, 25 nt, Synthetic Construct
  source 1..25: mol_type = other RNA
aatgacacgatcactcccgttgagt

SEQ ID NO: 31747 - RNA, 25 nt, Synthetic Construct
  source 1..25: mol_type = other RNA
aatgacacgatcactcccgttgagt

SEQ ID NO: 31748 - RNA, 22 nt, Synthetic Construct
  source 1..22: mol_type = other RNA
tgaggtagtaggttgtgcggtt

SEQ ID NO: 31749 - RNA, 22 nt, Synthetic Construct
  source 1..22: mol_type = other RNA
tgaggtagtaggttgtgcggtt

SEQ ID NO: 31750 - RNA, 23 nt, Synthetic Construct
  source 1..23: mol_type = other RNA
ggcagcattgtacagggctatga

SEQ ID NO: 31751 - RNA, 21 nt, Synthetic Construct
  source 1..21: mol_type = other RNA
tgaggtagtagtttgcgctgt

SEQ ID NO: 31752 - RNA, 36 nt, Synthetic Construct; identical to SEQ ID NO: 744
  source 1..36: mol_type = other RNA

SEQ ID NO: 31753 - RNA, 36 nt, Synthetic Construct; identical to SEQ ID NO: 744
  source 1..36: mol_type = other RNA

SEQ ID NO: 31754 - RNA, 24 nt, Synthetic Construct
  source 1..24: mol_type = other RNA
tgtaaacatccccgactggaagcc

SEQ ID NO: 31755 - RNA, 24 nt, Synthetic Construct
  source 1..24: mol_type = other RNA
tgtaaacatccccgactggaagcc

SEQ ID NO: 31756 - RNA, 21 nt, Synthetic Construct
  source 1..21: mol_type = other RNA
cgtaccgtgagtaataatgcg

SEQ ID NO: 31757 - RNA, 21 nt, Synthetic Construct
  source 1..21: mol_type = other RNA
cgtaccgtgagtaataatgcg

SEQ ID NO: 31758 - RNA, 31 nt, Synthetic Construct; identical to SEQ ID NO: 285
  source 1..31: mol_type = other RNA

SEQ ID NO: 31759 - RNA, 30 nt, Synthetic Construct; identical to SEQ ID NO: 6405
  source 1..30: mol_type = other RNA

SEQ ID NO: 31760 - RNA, 28 nt, Synthetic Construct
  source 1..28: mol_type = other RNA
gcatgggtggttcagtggtagaattctc

SEQ ID NO: 31761 - RNA, 28 nt, Synthetic Construct
  source 1..28: mol_type = other RNA
gcatgggtggttcagtggtagaattctc

SEQ ID NO: 31762 - RNA, 21 nt, Synthetic Construct
  source 1..21: mol_type = other RNA
tagcaccatctgaaatcggta

SEQ ID NO: 31763 - RNA, 22 nt, Synthetic Construct
  source 1..22: mol_type = other RNA
tcctgcactgagctgccccgag

SEQ ID NO: 31764 - RNA, 23 nt, Synthetic Construct
  source 1..23: mol_type = other RNA
tggggggcagagagcgagacttt

SEQ ID NO: 31765 - RNA, 19 nt, Synthetic Construct
  source 1..19: mol_type = other RNA
agtcgacgtatagggtgtg

SEQ ID NO: 31766 - RNA, 19 nt, Synthetic Construct
  source 1..19: mol_type = other RNA
agtcgacgtatagggtgtg

SEQ ID NO: 31767 - RNA, 21 nt, Synthetic Construct
  source 1..21: mol_type = other RNA
atcacattgccagggatttcc

SEQ ID NO: 31768 - RNA, 21 nt, Synthetic Construct
  source 1..21: mol_type = other RNA
atcacattgccagggatttcc

SEQ ID NO: 31769 - RNA, 21 nt, Synthetic Construct
  source 1..21: mol_type = other RNA
ctagactgaagctccttgggg

SEQ ID NO: 31770 - RNA, 23 nt, Synthetic Construct
  source 1..23: mol_type = other RNA
tgaggtagtaggttgtgtggttc

SEQ ID NO: 31771 - RNA, 23 nt, Synthetic Construct
  source 1..23: mol_type = other RNA
tgaggtagtaggttgtgtggttc

SEQ ID NO: 31772 - RNA, 23 nt, Synthetic Construct
  source 1..23: mol_type = other RNA
gtgcagatcttggtggtagtagc

SEQ ID NO: 31773 - RNA, 23 nt, Synthetic Construct
  source 1..23: mol_type = other RNA
gtgcagatcttggtggtagtagc

SEQ ID NO: 31774 - RNA, 20 nt, Synthetic Construct
  source 1..20: mol_type = other RNA
tgaggaagtaggttgtgtgg

SEQ ID NO: 31775 - RNA, 20 nt, Synthetic Construct
  source 1..20: mol_type = other RNA
tgaggaagtaggttgtgtgg

SEQ ID NO: 31776 - RNA, 15 nt, Synthetic Construct
  source 1..15: mol_type = other RNA
cagtgaaacgagtca

SEQ ID NO: 31777 - RNA, 25 nt, Synthetic Construct
  source 1..25: mol_type = other RNA
ttcaagtaatccaggataggctttt

SEQ ID NO: 31778 - RNA, 25 nt, Synthetic Construct
  source 1..25: mol_type = other RNA
ttcaagtaatccaggataggctttt

SEQ ID NO: 31779 - RNA, 24 nt, Synthetic Construct
  source 1..24: mol_type = other RNA
aaaccgttaccattactgagttta

SEQ ID NO: 31780 - RNA, 24 nt, Synthetic Construct
  source 1..24: mol_type = other RNA
aaaccgttaccattactgagttta

SEQ ID NO: 31781 - RNA, 21 nt, Synthetic Construct
  source 1..21: mol_type = other RNA
ttcaagtaattcaggataggt

SEQ ID NO: 31782 - RNA, 21 nt, Synthetic Construct
  source 1..21: mol_type = other RNA
ttcaagtaattcaggataggt

SEQ ID NO: 31783 - RNA, 20 nt, Synthetic Construct
  source 1..20: mol_type = other RNA
tgaggtagtaggttgtgagg

SEQ ID NO: 31784 - RNA, 22 nt, Synthetic Construct
  source 1..22: mol_type = other RNA
tgaggtagtaggttgtgtgatt

SEQ ID NO: 31785 - RNA, 24 nt, Synthetic Construct
  source 1..24: mol_type = other RNA
tgaggtagtaggttgtgtggttaa

SEQ ID NO: 31786 - RNA, 24 nt, Synthetic Construct
  source 1..24: mol_type = other RNA
tgaggtagtaggttgtgtggttaa

SEQ ID NO: 31787 - RNA, 22 nt, Synthetic Construct
  source 1..22: mol_type = other RNA
tgtgcaaatctatgcaaaactg

SEQ ID NO: 31788 - RNA, 22 nt, Synthetic Construct
  source 1..22: mol_type = other RNA
tgtgcaaatctatgcaaaactg

SEQ ID NO: 31789 - RNA, 18 nt, Synthetic Construct
  source 1..18: mol_type = other RNA
agcaggacggtggccatg

SEQ ID NO: 31790 - RNA, 18 nt, Synthetic Construct
  source 1..18: mol_type = other RNA
agcaggacggtggccatg

SEQ ID NO: 31791 - RNA, 20 nt, Synthetic Construct
  source 1..20: mol_type = other RNA
tgaggtagaaggttgtgtgg

SEQ ID NO: 31792 - RNA, 20 nt, Synthetic Construct
  source 1..20: mol_type = other RNA
tgaggtagaaggttgtgtgg

SEQ ID NO: 31793 - RNA, 22 nt, Synthetic Construct
  source 1..22: mol_type = other RNA
tgaggcagtagtttgtgctgtt

SEQ ID NO: 31794 - RNA, 22 nt, Synthetic Construct
  source 1..22: mol_type = other RNA
tgaggcagtagtttgtgctgtt

SEQ ID NO: 31795 - RNA, 18 nt, Synthetic Construct
  source 1..18: mol_type = other RNA
gtaggtcatcgtcaggct

SEQ ID NO: 31796 - RNA, 18 nt, Synthetic Construct
  source 1..18: mol_type = other RNA
gtaggtcatcgtcaggct

SEQ ID NO: 31797 - RNA, 22 nt, Synthetic Construct
  source 1..22: mol_type = other RNA
cattgcgcttgtctcggtctga

SEQ ID NO: 31798 - RNA, 22 nt, Synthetic Construct
  source 1..22: mol_type = other RNA
ttcaagtaatccaggataggtt

SEQ ID NO: 31799 - RNA, 22 nt, Synthetic Construct
  source 1..22: mol_type = other RNA
tgaggtaggaggttgtatagtt

SEQ ID NO: 31800 - RNA, 21 nt, Synthetic Construct
  source 1..21: mol_type = other RNA
tcctgtactgagctgcccgag

SEQ ID NO: 31801 - RNA, 22 nt, Synthetic Construct
  source 1..22: mol_type = other RNA
cggaatcgctagtaatcgcgga

SEQ ID NO: 31802 - RNA, 22 nt, Synthetic Construct
  source 1..22: mol_type = other RNA
cggaatcgctagtaatcgcgga

SEQ ID NO: 31803 - RNA, 15 nt, Synthetic Construct
  source 1..15: mol_type = other RNA
gctatgggatttgtt

SEQ ID NO: 31804 - RNA, 15 nt, Synthetic Construct
  source 1..15: mol_type = other RNA
gctatgggatttgtt

SEQ ID NO: 31805 - RNA, 21 nt, Synthetic Construct
  source 1..21: mol_type = other RNA
agcagcattgtacagggctat

SEQ ID NO: 31806 - RNA, 22 nt, Synthetic Construct
  source 1..22: mol_type = other RNA
tgaggtagtaggttgtgtggta

SEQ ID NO: 31807 - RNA, 42 nt, Synthetic Construct; identical to SEQ ID NO: 8009
  source 1..42: mol_type = other RNA

SEQ ID NO: 31808 - RNA, 42 nt, Synthetic Construct; identical to SEQ ID NO: 8009
  source 1..42: mol_type = other RNA

SEQ ID NO: 31809 - RNA, 22 nt, Synthetic Construct
  source 1..22: mol_type = other RNA
tccctgagaccctttaacctgt

SEQ ID NO: 31810 - RNA, 27 nt, Synthetic Construct
  source 1..27: mol_type = other RNA
ccccccactactaaatttgactggctt

SEQ ID NO: 31811 - RNA, 24 nt, Synthetic Construct
  source 1..24: mol_type = other RNA
cgtaaacatccccgactggaagct

SEQ ID NO: 31812 - RNA, 21 nt, Synthetic Construct
  source 1..21: mol_type = other RNA
atcacattgccagggatttcc

SEQ ID NO: 31813 - RNA, 16 nt, Synthetic Construct
  source 1..16: mol_type = other RNA
gaacgtgagctgggtt

SEQ ID NO: 31814 - RNA, 16 nt, Synthetic Construct
  source 1..16: mol_type = other RNA
gaacgtgagctgggtt

SEQ ID NO: 31815 - RNA, 23 nt, Synthetic Construct
  source 1..23: mol_type = other RNA
tgaggggcagagagcgagacttc

SEQ ID NO: 31816 - RNA, 23 nt, Synthetic Construct
  source 1..23: mol_type = other RNA
tgaggggcagagagcgagacttc

SEQ ID NO: 31817 - RNA, 18 nt, Synthetic Construct
  source 1..18: mol_type = other RNA
atagggaacgtgagctgg

SEQ ID NO: 31818 - RNA, 18 nt, Synthetic Construct
  source 1..18: mol_type = other RNA
atagggaacgtgagctgg

SEQ ID NO: 31819 - RNA, 23 nt, Synthetic Construct
  source 1..23: mol_type = other RNA
tgaggtagtaggttgtgtggttc

SEQ ID NO: 31820 - RNA, 23 nt, Synthetic Construct
  source 1..23: mol_type = other RNA
tgaggtagtaggttgtgtggttc

SEQ ID NO: 31821 - RNA, 22 nt, Synthetic Construct
  source 1..22: mol_type = other RNA
tcaagagcaataacgaaaaatg

SEQ ID NO: 31822 - RNA, 21 nt, Synthetic Construct
  source 1..21: mol_type = other RNA
gcagatcttggtggtagtagc

SEQ ID NO: 31823 - RNA, 21 nt, Synthetic Construct
  source 1..21: mol_type = other RNA
gcagatcttggtggtagtagc

SEQ ID NO: 31824 - RNA, 24 nt, Synthetic Construct
  source 1..24: mol_type = other RNA
caacggaatcccaaaagcagctgc

SEQ ID NO: 31825 - RNA, 22 nt, Synthetic Construct
  source 1..22: mol_type = other RNA
cgactggtaactgggatgaagt

SEQ ID NO: 31826 - RNA, 22 nt, Synthetic Construct
  source 1..22: mol_type = other RNA
cgactggtaactgggatgaagt

SEQ ID NO: 31827 - RNA, 22 nt, Synthetic Construct
  source 1..22: mol_type = other RNA
catagcacttgtctcggtctga

SEQ ID NO: 31828 - RNA, 32 nt, Synthetic Construct; identical to SEQ ID NO: 3092
  source 1..32: mol_type = other RNA

SEQ ID NO: 31829 - RNA, 32 nt, Synthetic Construct; identical to SEQ ID NO: 3092
  source 1..32: mol_type = other RNA

SEQ ID NO: 31830 - RNA, 22 nt, Synthetic Construct
  source 1..22: mol_type = other RNA
tgaggtagtagtatgtgctgtt

SEQ ID NO: 31831 - RNA, 22 nt, Synthetic Construct
  source 1..22: mol_type = other RNA
tcctgtactgagctgccccgtg

SEQ ID NO: 31832 - RNA, 22 nt, Synthetic Construct
  source 1..22: mol_type = other RNA
tcctgtactgagctgccccgtg

SEQ ID NO: 31833 - RNA, 22 nt, Synthetic Construct
  source 1..22: mol_type = other RNA
tgaggaagtaggttgtatagtt

SEQ ID NO: 31834 - RNA, 22 nt, Synthetic Construct
  source 1..22: mol_type = other RNA
tgaggaagtaggttgtatagtt

SEQ ID NO: 31835 - RNA, 21 nt, Synthetic Construct
  source 1..21: mol_type = other RNA
tgaggtagtaggctgtatagt

SEQ ID NO: 31836 - RNA, 21 nt, Synthetic Construct
  source 1..21: mol_type = other RNA
tgaggtagtaggctgtatagt

SEQ ID NO: 31837 - RNA, 23 nt, Synthetic Construct
  source 1..23: mol_type = other RNA
taaggtgcatctagtgcagatag

SEQ ID NO: 31838 - RNA, 22 nt, Synthetic Construct
  source 1..22: mol_type = other RNA
tgaggtagtaggttgtgtggta

SEQ ID NO: 31839 - RNA, 22 nt, Synthetic Construct
  source 1..22: mol_type = other RNA
tgaggtagtaggttgtgtggta

SEQ ID NO: 31840 - RNA, 22 nt, Synthetic Construct
  source 1..22: mol_type = other RNA
tcggatccgtctgagcttggct

SEQ ID NO: 31841 - RNA, 22 nt, Synthetic Construct
  source 1..22: mol_type = other RNA
tcggatccgtctgagcttggct

SEQ ID NO: 31842 - RNA, 15 nt, Synthetic Construct
  source 1..15: mol_type = other RNA
cggcccagactccta

SEQ ID NO: 31843 - RNA, 21 nt, Synthetic Construct
  source 1..21: mol_type = other RNA
acagtagtctgcacattggtt

SEQ ID NO: 31844 - RNA, 21 nt, Synthetic Construct
  source 1..21: mol_type = other RNA
acagtagtctgcacattggtt

SEQ ID NO: 31845 - RNA, 36 nt, Synthetic Construct; identical to SEQ ID NO: 10982
  source 1..36: mol_type = other RNA

SEQ ID NO: 31846 - RNA, 21 nt, Synthetic Construct
  source 1..21: mol_type = other RNA
ggaggggcagagagcgagact

SEQ ID NO: 31847 - RNA, 22 nt, Synthetic Construct
  source 1..22: mol_type = other RNA
ggtcggcccacggccctggcgg

SEQ ID NO: 31848 - RNA, 22 nt, Synthetic Construct
  source 1..22: mol_type = other RNA
ggtcggcccacggccctggcgg

SEQ ID NO: 31849 - RNA, 22 nt, Synthetic Construct
  source 1..22: mol_type = other RNA
gggagtgtgacaatggtgtttg

SEQ ID NO: 31850 - RNA, 22 nt, Synthetic Construct
  source 1..22: mol_type = other RNA
gggagtgtgacaatggtgtttg

SEQ ID NO: 31851 - RNA, 24 nt, Synthetic Construct
  source 1..24: mol_type = other RNA
gaggtgtagaataggtgggagctt

SEQ ID NO: 31852 - RNA, 20 nt, Synthetic Construct
  source 1..20: mol_type = other RNA
cgcgacctcagatcagacgt

SEQ ID NO: 31853 - RNA, 23 nt, Synthetic Construct
  source 1..23: mol_type = other RNA
tccccttggggttgtaggaccac

SEQ ID NO: 31854 - RNA, 23 nt, Synthetic Construct
  source 1..23: mol_type = other RNA
tccccttggggttgtaggaccac

SEQ ID NO: 31855 - RNA, 23 nt, Synthetic Construct
  source 1..23: mol_type = other RNA
tcctgtgctgagctgccccgagt

SEQ ID NO: 31856 - RNA, 23 nt, Synthetic Construct
  source 1..23: mol_type = other RNA
tggtaatgcgacgtacttagtgt

SEQ ID NO: 31857 - RNA, 22 nt, Synthetic Construct
  source 1..22: mol_type = other RNA
nattgcacttgtcccggcctgt

SEQ ID NO: 31858 - RNA, 30 nt, Synthetic Construct; identical to SEQ ID NO: 1220
  source 1..30: mol_type = other RNA

SEQ ID NO: 31859 - RNA, 33 nt, Synthetic Construct; identical to SEQ ID NO: 3082
  source 1..33: mol_type = other RNA

SEQ ID NO: 31860 - RNA, 33 nt, Synthetic Construct; identical to SEQ ID NO: 3082
  source 1..33: mol_type = other RNA

SEQ ID NO: 31861 - RNA, 24 nt, Synthetic Construct
  source 1..24: mol_type = other RNA
tgtaaacatccccgactggaggct

SEQ ID NO: 31862 - RNA, 24 nt, Synthetic Construct
  source 1..24: mol_type = other RNA
tgtaaacatccccgactggaggct

SEQ ID NO: 31863 - RNA, 37 nt, Synthetic Construct; identical to SEQ ID NO: 7503
  source 1..37: mol_type = other RNA

SEQ ID NO: 31864 - RNA, 37 nt, Synthetic Construct; identical to SEQ ID NO: 7503
  source 1..37: mol_type = other RNA

SEQ ID NO: 31865 - RNA, 23 nt, Synthetic Construct
  source 1..23: mol_type = other RNA
tcctatactgagctgccccgaga

SEQ ID NO: 31866 - RNA, 23 nt, Synthetic Construct
  source 1..23: mol_type = other RNA
tcctatactgagctgccccgaga

SEQ ID NO: 31867 - RNA, 22 nt, Synthetic Construct
  source 1..22: mol_type = other RNA
tattgcacttgccccggcctgt

SEQ ID NO: 31868 - RNA, 22 nt, Synthetic Construct
  source 1..22: mol_type = other RNA
tattgcacttgccccggcctgt

SEQ ID NO: 31869 - RNA, 24 nt, Synthetic Construct
  source 1..24: mol_type = other RNA
agctcggtctgaggcccctcagtt

SEQ ID NO: 31870 - RNA, 24 nt, Synthetic Construct
  source 1..24: mol_type = other RNA
agctcggtctgaggcccctcagtt

SEQ ID NO: 31871 - RNA, 23 nt, Synthetic Construct
  source 1..23: mol_type = other RNA
tcctgtactgagctaccccgaga

SEQ ID NO: 31872 - RNA, 23 nt, Synthetic Construct
  source 1..23: mol_type = other RNA
tcctgtactgagctaccccgaga

SEQ ID NO: 31873 - RNA, 35 nt, Synthetic Construct; identical to SEQ ID NO: 2615
  source 1..35: mol_type = other RNA

SEQ ID NO: 31874 - RNA, 35 nt, Synthetic Construct; identical to SEQ ID NO: 2615
  source 1..35: mol_type = other RNA

SEQ ID NO: 31875 - RNA, 34 nt, Synthetic Construct; identical to SEQ ID NO: 8274
  source 1..34: mol_type = other RNA

SEQ ID NO: 31876 - RNA, 34 nt, Synthetic Construct; identical to SEQ ID NO: 8274
  source 1..34: mol_type = other RNA

SEQ ID NO: 31877 - RNA, 43 nt, Synthetic Construct; identical to SEQ ID NO: 2315
  source 1..43: mol_type = other RNA

SEQ ID NO: 31878 - RNA, 43 nt, Synthetic Construct; identical to SEQ ID NO: 2315
  source 1..43: mol_type = other RNA

SEQ ID NO: 31879 - RNA, 24 nt, Synthetic Construct
  source 1..24: mol_type = other RNA
tgtcagtttgtcaaataccccaaa

SEQ ID NO: 31880 - RNA, 24 nt, Synthetic Construct
  source 1..24: mol_type = other RNA
tgtcagtttgtcaaataccccaaa

SEQ ID NO: 31881 - RNA, 23 nt, Synthetic Construct
  source 1..23: mol_type = other RNA
tgaggggaagagagcgagacttt

SEQ ID NO: 31882 - RNA, 23 nt, Synthetic Construct
  source 1..23: mol_type = other RNA
tgaggggaagagagcgagacttt

SEQ ID NO: 31883 - RNA, 22 nt, Synthetic Construct
  source 1..22: mol_type = other RNA
tagcttatcagactgatgttga

SEQ ID NO: 31884 - RNA, 22 nt, Synthetic Construct
  source 1..22: mol_type = other RNA
tagcttatcagactgatgttga

SEQ ID NO: 31885 - RNA, 35 nt, Synthetic Construct; identical to SEQ ID NO: 1490
  source 1..35: mol_type = other RNA

SEQ ID NO: 31886 - RNA, 35 nt, Synthetic Construct; identical to SEQ ID NO: 1490
  source 1..35: mol_type = other RNA

SEQ ID NO: 31887 - RNA, 20 nt, Synthetic Construct
  source 1..20: mol_type = other RNA
agctacattgtctgctgggt

SEQ ID NO: 31888 - RNA, 20 nt, Synthetic Construct
  source 1..20: mol_type = other RNA
agctacattgtctgctgggt

SEQ ID NO: 31889 - RNA, 22 nt, Synthetic Construct
  source 1..22: mol_type = other RNA
tacccattgcatatcggagttg

SEQ ID NO: 31890 - RNA, 22 nt, Synthetic Construct
  source 1..22: mol_type = other RNA
tacccattgcatatcggagttg

SEQ ID NO: 31891 - RNA, 34 nt, Synthetic Construct; identical to SEQ ID NO: 490
  source 1..34: mol_type = other RNA

SEQ ID NO: 31892 - RNA, 34 nt, Synthetic Construct; identical to SEQ ID NO: 490
  source 1..34: mol_type = other RNA

SEQ ID NO: 31893 - RNA, 22 nt, Synthetic Construct
  source 1..22: mol_type = other RNA
ttcaagtaattcaggataggtt

SEQ ID NO: 31894 - RNA, 21 nt, Synthetic Construct
  source 1..21: mol_type = other RNA
tgaggtagtagtttgtgctga

SEQ ID NO: 31895 - RNA, 22 nt, Synthetic Construct
  source 1..22: mol_type = other RNA
tgaggtagtaggttgtggggtt

SEQ ID NO: 31896 - RNA, 22 nt, Synthetic Construct
  source 1..22: mol_type = other RNA
tgaggtagtaggttgtggggtt

SEQ ID NO: 31897 - RNA, 22 nt, Synthetic Construct
  source 1..22: mol_type = other RNA
taggtagtttcctgttgttggg

SEQ ID NO: 31898 - RNA, 22 nt, Synthetic Construct
  source 1..22: mol_type = other RNA
taggtagtttcctgttgttggg

SEQ ID NO: 31899 - RNA, 23 nt, Synthetic Construct
  source 1..23: mol_type = other RNA
attctaatttctccacgtctttg

SEQ ID NO: 31900 - RNA, 23 nt, Synthetic Construct
  source 1..23: mol_type = other RNA
attctaatttctccacgtctttg

SEQ ID NO: 31901 - RNA, 21 nt, Synthetic Construct
  source 1..21: mol_type = other RNA
tgaggtagtagtctgtgctgt

SEQ ID NO: 31902 - RNA, 21 nt, Synthetic Construct
  source 1..21: mol_type = other RNA
tgaggtagtagtctgtgctgt

SEQ ID NO: 31903 - RNA, 20 nt, Synthetic Construct
  source 1..20: mol_type = other RNA
ttggcctcaagtcaggcagg

SEQ ID NO: 31904 - RNA, 20 nt, Synthetic Construct
  source 1..20: mol_type = other RNA
ttggcctcaagtcaggcagg

SEQ ID NO: 31905 - RNA, 22 nt, Synthetic Construct
  source 1..22: mol_type = other RNA
ttcaagtaatccaggataggtt

SEQ ID NO: 31906 - RNA, 22 nt, Synthetic Construct
  source 1..22: mol_type = other RNA
tcctgtactgagttgccccgag

SEQ ID NO: 31907 - RNA, 23 nt, Synthetic Construct
  source 1..23: mol_type = other RNA
tcctgtactgggctgccccgagt

SEQ ID NO: 31908 - RNA, 23 nt, Synthetic Construct
  source 1..23: mol_type = other RNA
tcctgtactgggctgccccgagt

SEQ ID NO: 31909 - RNA, 21 nt, Synthetic Construct
  source 1..21: mol_type = other RNA
tggagtgtgacaatggcgttt

SEQ ID NO: 31910 - RNA, 21 nt, Synthetic Construct
  source 1..21: mol_type = other RNA
tggagtgtgacaatggcgttt

SEQ ID NO: 31911 - RNA, 23 nt, Synthetic Construct
  source 1..23: mol_type = other RNA
caagtcactagtggttccgttta

SEQ ID NO: 31912 - RNA, 23 nt, Synthetic Construct
  source 1..23: mol_type = other RNA
caagtcactagtggttccgttta

SEQ ID NO: 31913 - RNA, 22 nt, Synthetic Construct
  source 1..22: mol_type = other RNA
tgaggtagtaggttgtgtagtt

SEQ ID NO: 31914 - RNA, 22 nt, Synthetic Construct
  source 1..22: mol_type = other RNA
tgaggtagtaggttgtgtagtt

SEQ ID NO: 31915 - RNA, 20 nt, Synthetic Construct
  source 1..20: mol_type = other RNA
tagcagcacatcatggttta

SEQ ID NO: 31916 - RNA, 20 nt, Synthetic Construct
  source 1..20: mol_type = other RNA
tagcagcacatcatggttta

SEQ ID NO: 31917 - RNA, 20 nt, Synthetic Construct
  source 1..20: mol_type = other RNA
taaggtagtaggttgtatag

SEQ ID NO: 31918 - RNA, 20 nt, Synthetic Construct
  source 1..20: mol_type = other RNA
taaggtagtaggttgtatag

SEQ ID NO: 31919 - RNA, 31 nt, Synthetic Construct; identical to SEQ ID NO: 2893
  source 1..31: mol_type = other RNA

SEQ ID NO: 31920 - RNA, 31 nt, Synthetic Construct; identical to SEQ ID NO: 2893
  source 1..31: mol_type = other RNA

SEQ ID NO: 31921 - RNA, 22 nt, Synthetic Construct
  source 1..22: mol_type = other RNA
tattgcactcgtcccggcctgt

SEQ ID NO: 31922 - RNA, 21 nt, Synthetic Construct
  source 1..21: mol_type = other RNA
tactccttaagcgaatctcgc

SEQ ID NO: 31923 - RNA, 21 nt, Synthetic Construct
  source 1..21: mol_type = other RNA
tactccttaagcgaatctcgc

SEQ ID NO: 31924 - RNA, 23 nt, Synthetic Construct
  source 1..23: mol_type = other RNA
tcctgtactgggctgccccgagt

SEQ ID NO: 31925 - RNA, 22 nt, Synthetic Construct
  source 1..22: mol_type = other RNA
tgaggtagtaggttgtacagtt

SEQ ID NO: 31926 - RNA, 22 nt, Synthetic Construct
  source 1..22: mol_type = other RNA
tgaggtagtaggttgtacagtt

SEQ ID NO: 31927 - RNA, 20 nt, Synthetic Construct
  source 1..20: mol_type = other RNA
tgaggtaggaggttgtatag

SEQ ID NO: 31928 - RNA, 20 nt, Synthetic Construct
  source 1..20: mol_type = other RNA
tgaggtagtaagttgtattg

SEQ ID NO: 31929 - RNA, 21 nt, Synthetic Construct
  source 1..21: mol_type = other RNA
tttggcactagcacatttttg

SEQ ID NO: 31930 - RNA, 21 nt, Synthetic Construct
  source 1..21: mol_type = other RNA
tttggcactagcacatttttg

SEQ ID NO: 31931 - RNA, 22 nt, Synthetic Construct
  source 1..22: mol_type = other RNA
tgaggtagtaggttatgtggtt

SEQ ID NO: 31932 - RNA, 18 nt, Synthetic Construct
  source 1..18: mol_type = other RNA
atcccactcctgacacca

SEQ ID NO: 31933 - RNA, 22 nt, Synthetic Construct
  source 1..22: mol_type = other RNA
tgaggtagtagattgtatagtc

SEQ ID NO: 31934 - RNA, 22 nt, Synthetic Construct
  source 1..22: mol_type = other RNA
tgaggtagtagattgtatagtc

SEQ ID NO: 31935 - RNA, 22 nt, Synthetic Construct
  source 1..22: mol_type = other RNA
tgaagtagtaggttgtgtggtt

SEQ ID NO: 31936 - RNA, 22 nt, Synthetic Construct
  source 1..22: mol_type = other RNA
cgaggtagtaggttgtgtggtt

SEQ ID NO: 31937 - RNA, 22 nt, Synthetic Construct
  source 1..22: mol_type = other RNA
tgaggtggtaggttgtgtggtt

SEQ ID NO: 31938 - RNA, 22 nt, Synthetic Construct
  source 1..22: mol_type = other RNA
tgaggtggtaggttgtgtggtt

SEQ ID NO: 31939 - RNA, 22 nt, Synthetic Construct
  source 1..22: mol_type = other RNA
cagtgcaatgttaaaagggcat

SEQ ID NO: 31940 - RNA, 22 nt, Synthetic Construct
  source 1..22: mol_type = other RNA
cagtgcaatgttaaaagggcat

SEQ ID NO: 31941 - RNA, 23 nt, Synthetic Construct
  source 1..23: mol_type = other RNA
tagcttatcagactgatgttgac

SEQ ID NO: 31942 - RNA, 22 nt, Synthetic Construct
  source 1..22: mol_type = other RNA
ggaggtagtaggttgtgtggtt

SEQ ID NO: 31943 - RNA, 21 nt, Synthetic Construct
  source 1..21: mol_type = other RNA
tgtagtgtttcctactttatg

SEQ ID NO: 31944 - RNA, 21 nt, Synthetic Construct
  source 1..21: mol_type = other RNA
tgtagtgtttcctactttatg

SEQ ID NO: 31945 - RNA, 23 nt, Synthetic Construct
  source 1..23: mol_type = other RNA
actggacttggagtcagaaggca

SEQ ID NO: 31946 - RNA, 23 nt, Synthetic Construct
  source 1..23: mol_type = other RNA
actggacttggagtcagaaggca

SEQ ID NO: 31947 - RNA, 27 nt, Synthetic Construct
  source 1..27: mol_type = other RNA
ccccccactgctaaatttaactggctt

SEQ ID NO: 31948 - RNA, 28 nt, Synthetic Construct
  source 1..28: mol_type = other RNA
ccccccactgctaaatttggctggcttt

SEQ ID NO: 31949 - RNA, 25 nt, Synthetic Construct
  source 1..25: mol_type = other RNA
ttcaagtaatccaggataggctttt

SEQ ID NO: 31950 - RNA, 19 nt, Synthetic Construct
  source 1..19: mol_type = other RNA
agtcgacgtatagggtgtg

SEQ ID NO: 31951 - RNA, 19 nt, Synthetic Construct
  source 1..19: mol_type = other RNA
agtcgacgtatagggtgtg

SEQ ID NO: 31952 - RNA, 22 nt, Synthetic Construct
  source 1..22: mol_type = other RNA
ngaggtagtaggttgtgtggtt

SEQ ID NO: 31953 - RNA, 22 nt, Synthetic Construct
  source 1..22: mol_type = other RNA
ngaggtagtaggttgtgtggtt

SEQ ID NO: 31954 - RNA, 20 nt, Synthetic Construct
  source 1..20: mol_type = other RNA
tccctgtcctccaggagctc

SEQ ID NO: 31955 - RNA, 22 nt, Synthetic Construct
  source 1..22: mol_type = other RNA
tattgcatttgtcccggcctgt

SEQ ID NO: 31956 - RNA, 22 nt, Synthetic Construct
  source 1..22: mol_type = other RNA
tattgcatttgtcccggcctgt

SEQ ID NO: 31957 - RNA, 31 nt, Synthetic Construct; identical to SEQ ID NO: 9212
  source 1..31: mol_type = other RNA

SEQ ID NO: 31958 - RNA, 22 nt, Synthetic Construct
  source 1..22: mol_type = other RNA
actggacttggagtcagaaggc

SEQ ID NO: 31959 - RNA, 22 nt, Synthetic Construct
  source 1..22: mol_type = other RNA
actggacttggagtcagaaggc

SEQ ID NO: 31960 - RNA, 24 nt, Synthetic Construct
  source 1..24: mol_type = other RNA
gggttgtaaaccgcttttgtcagg

SEQ ID NO: 31961 - RNA, 22 nt, Synthetic Construct
  source 1..22: mol_type = other RNA
cgttgcacttgtctcggtctga

SEQ ID NO: 31962 - RNA, 22 nt, Synthetic Construct
  source 1..22: mol_type = other RNA
cgttgcacttgtctcggtctga

SEQ ID NO: 31963 - RNA, 35 nt, Synthetic Construct; identical to SEQ ID NO: 1095
  source 1..35: mol_type = other RNA

SEQ ID NO: 31964 - RNA, 21 nt, Synthetic Construct
  source 1..21: mol_type = other RNA
aacggaatcccaaaagcagct

SEQ ID NO: 31965 - RNA, 21 nt, Synthetic Construct
  source 1..21: mol_type = other RNA
aacggaatcccaaaagcagct

SEQ ID NO: 31966 - RNA, 23 nt, Synthetic Construct
  source 1..23: mol_type = other RNA
tcctgtactgagctgccccgagg

SEQ ID NO: 31967 - RNA, 21 nt, Synthetic Construct
  source 1..21: mol_type = other RNA
cggagtgtgacaatggtgttt

SEQ ID NO: 31968 - RNA, 23 nt, Synthetic Construct
  source 1..23: mol_type = other RNA
tggcaatacgacgtacttagtgt

SEQ ID NO: 31969 - RNA, 21 nt, Synthetic Construct
  source 1..21: mol_type = other RNA
tccctgtcctccaggagctct

SEQ ID NO: 31970 - RNA, 29 nt, Synthetic Construct
  source 1..29: mol_type = other RNA
cccccccactgctaaatttgactggcttt

SEQ ID NO: 31971 - RNA, 25 nt, Synthetic Construct
  source 1..25: mol_type = other RNA
cgactcttagcggtggatcactcgg

SEQ ID NO: 31972 - RNA, 23 nt, Synthetic Construct
  source 1..23: mol_type = other RNA
tgagaactgaattccatgggtta

SEQ ID NO: 31973 - RNA, 23 nt, Synthetic Construct
  source 1..23: mol_type = other RNA
tagcaccatttgaaatcagtgtt

SEQ ID NO: 31974 - RNA, 23 nt, Synthetic Construct
  source 1..23: mol_type = other RNA
tagcaccatttgaaatcagtgtt

SEQ ID NO: 31975 - RNA, 21 nt, Synthetic Construct
  source 1..21: mol_type = other RNA
aacggaatcccaaaagcagct

SEQ ID NO: 31976 - RNA, 36 nt, Synthetic Construct; identical to SEQ ID NO: 2520
  source 1..36: mol_type = other RNA

SEQ ID NO: 31977 - RNA, 36 nt, Synthetic Construct; identical to SEQ ID NO: 2520
  source 1..36: mol_type = other RNA

SEQ ID NO: 31978 - RNA, 27 nt, Synthetic Construct
  source 1..27: mol_type = other RNA
ccccccactgctaaatttgactggctc

SEQ ID NO: 31979 - RNA, 23 nt, Synthetic Construct
  source 1..23: mol_type = other RNA
tggtaatacaacgtacttagtgt

SEQ ID NO: 31980 - RNA, 23 nt, Synthetic Construct
  source 1..23: mol_type = other RNA
tggtaatacaacgtacttagtgt

SEQ ID NO: 31981 - RNA, 23 nt, Synthetic Construct
  source 1..23: mol_type = other RNA
agaggggcagagagcgagacttt

SEQ ID NO: 31982 - RNA, 23 nt, Synthetic Construct
  source 1..23: mol_type = other RNA
tgaggggcagagagcgagactct

SEQ ID NO: 31983 - RNA, 37 nt, Synthetic Construct; identical to SEQ ID NO: 2482
  source 1..37: mol_type = other RNA

SEQ ID NO: 31984 - RNA, 16 nt, Synthetic Construct
  source 1..16: mol_type = other RNA
cccaaaggtcgtcggt

SEQ ID NO: 31985 - RNA, 22 nt, Synthetic Construct
  source 1..22: mol_type = other RNA
tcctgtactgagcagccccgag

SEQ ID NO: 31986 - RNA, 22 nt, Synthetic Construct
  source 1..22: mol_type = other RNA
tcctgtactgagcagccccgag

SEQ ID NO: 31987 - RNA, 16 nt, Synthetic Construct
  source 1..16: mol_type = other RNA
cagtcaggatgttggc

SEQ ID NO: 31988 - RNA, 23 nt, Synthetic Construct
  source 1..23: mol_type = other RNA
tgaggtagtagtttgtgctgttg

SEQ ID NO: 31989 - RNA, 21 nt, Synthetic Construct
  source 1..21: mol_type = other RNA
tcccagtaaacggcggccgta

SEQ ID NO: 31990 - RNA, 21 nt, Synthetic Construct
  source 1..21: mol_type = other RNA
tcccagtaaacggcggccgta

SEQ ID NO: 31991 - RNA, 22 nt, Synthetic Construct
  source 1..22: mol_type = other RNA
cattgcactcgtctcggtctga

SEQ ID NO: 31992 - RNA, 43 nt, Synthetic Construct; identical to SEQ ID NO: 2315
  source 1..43: mol_type = other RNA

SEQ ID NO: 31993 - RNA, 43 nt, Synthetic Construct; identical to SEQ ID NO: 2315
  source 1..43: mol_type = other RNA

SEQ ID NO: 31994 - RNA, 22 nt, Synthetic Construct
  source 1..22: mol_type = other RNA
ccactgccccaggtgctgctgg

SEQ ID NO: 31995 - RNA, 21 nt, Synthetic Construct
  source 1..21: mol_type = other RNA
tggaatgtaaagaagtatgta

SEQ ID NO: 31996 - RNA, 21 nt, Synthetic Construct
  source 1..21: mol_type = other RNA
tggaatgtaaagaagtatgta

SEQ ID NO: 31997 - RNA, 35 nt, Synthetic Construct; identical to SEQ ID NO: 1490
  source 1..35: mol_type = other RNA

SEQ ID NO: 31998 - RNA, 22 nt, Synthetic Construct
  source 1..22: mol_type = other RNA
ccactgccccaggtgctgctgg

SEQ ID NO: 31999 - RNA, 22 nt, Synthetic Construct
  source 1..22: mol_type = other RNA
tagcagcacgtagatattggcg

SEQ ID NO: 32000 - RNA, 22 nt, Synthetic Construct
  source 1..22: mol_type = other RNA
tgaggtagtaggttgtggggtt

SEQ ID NO: 32001 - RNA, 22 nt, Synthetic Construct
  source 1..22: mol_type = other RNA
tgaggtagtaggttgtggggtt

SEQ ID NO: 32002 - RNA, 22 nt, Synthetic Construct
  source 1..22: mol_type = other RNA
tagcagcacgtaaacattggcg

SEQ ID NO: 32003 - RNA, 21 nt, Synthetic Construct
  source 1..21: mol_type = other RNA
tcctgtactgagctgccccaa

SEQ ID NO: 32004 - RNA, 32 nt, Synthetic Construct; identical to SEQ ID NO: 2435
  source 1..32: mol_type = other RNA

SEQ ID NO: 32005 - RNA, 32 nt, Synthetic Construct; identical to SEQ ID NO: 2435
  source 1..32: mol_type = other RNA

SEQ ID NO: 32006 - RNA, 22 nt, Synthetic Construct
  source 1..22: mol_type = other RNA
tattgcgcttgtcccggcctgt

SEQ ID NO: 32007 - RNA, 22 nt, Synthetic Construct
  source 1..22: mol_type = other RNA
tattgcgcttgtcccggcctgt

SEQ ID NO: 32008 - RNA, 18 nt, Synthetic Construct
  source 1..18: mol_type = other RNA
gtaggtcatcgtcaggct

SEQ ID NO: 32009 - RNA, 18 nt, Synthetic Construct
  source 1..18: mol_type = other RNA
gtaggtcatcgtcaggct

SEQ ID NO: 32010 - RNA, 22 nt, Synthetic Construct
  source 1..22: mol_type = other RNA
tgaggtggtagtttgtgctgtt

SEQ ID NO: 32011 - RNA, 22 nt, Synthetic Construct
  source 1..22: mol_type = other RNA
tagcagcacgtaaatataggcg

SEQ ID NO: 32012 - RNA, 22 nt, Synthetic Construct
  source 1..22: mol_type = other RNA
tagcagcacgtaaatataggcg

SEQ ID NO: 32013 - RNA, 29 nt, Synthetic Construct
  source 1..29: mol_type = other RNA
tccctggtggtctagtggttaggattcgg

SEQ ID NO: 32014 - RNA, 29 nt, Synthetic Construct
  source 1..29: mol_type = other RNA
tccctggtggtctagtggttaggattcgg

SEQ ID NO: 32015 - RNA, 22 nt, Synthetic Construct
  source 1..22: mol_type = other RNA
tgaagtagtagtttgtgctgtt

SEQ ID NO: 32016 - RNA, 22 nt, Synthetic Construct
  source 1..22: mol_type = other RNA
tgaagtagtagtttgtgctgtt

SEQ ID NO: 32017 - RNA, 15 nt, Synthetic Construct
  source 1..15: mol_type = other RNA
acctgcatcgagggt

SEQ ID NO: 32018 - RNA, 20 nt, Synthetic Construct
  source 1..20: mol_type = other RNA
tccctgtcctccaggagctc

SEQ ID NO: 32019 - RNA, 20 nt, Synthetic Construct
  source 1..20: mol_type = other RNA
tccctgtcctccaggagctc

SEQ ID NO: 32020 - RNA, 22 nt, Synthetic Construct
  source 1..22: mol_type = other RNA
tcaagagcaataacgaaaaatg

SEQ ID NO: 32021 - RNA, 22 nt, Synthetic Construct
  source 1..22: mol_type = other RNA
tcaagagcaataacgaaaaatg

SEQ ID NO: 32022 - RNA, 33 nt, Synthetic Construct; identical to SEQ ID NO: 7469
  source 1..33: mol_type = other RNA

SEQ ID NO: 32023 - RNA, 33 nt, Synthetic Construct; identical to SEQ ID NO: 7469
  source 1..33: mol_type = other RNA

SEQ ID NO: 32024 - RNA, 22 nt, Synthetic Construct
  source 1..22: mol_type = other RNA
tcctgtactgagttgccccgag

SEQ ID NO: 32025 - RNA, 22 nt, Synthetic Construct
  source 1..22: mol_type = other RNA
tcctgtactgagttgccccgag

SEQ ID NO: 32026 - RNA, 22 nt, Synthetic Construct
  source 1..22: mol_type = other RNA
tggcagcacgtaaatattggcg

SEQ ID NO: 32027 - RNA, 22 nt, Synthetic Construct
  source 1..22: mol_type = other RNA
tggcagcacgtaaatattggcg

SEQ ID NO: 32028 - RNA, 22 nt, Synthetic Construct
  source 1..22: mol_type = other RNA
cgaggtagtaggttgtatagtt

SEQ ID NO: 32029 - RNA, 22 nt, Synthetic Construct
  source 1..22: mol_type = other RNA
cgaggtagtaggttgtatagtt

SEQ ID NO: 32030 - RNA, 16 nt, Synthetic Construct
  source 1..16: mol_type = other RNA
gtctacggccataccg

SEQ ID NO: 32031 - RNA, 16 nt, Synthetic Construct
  source 1..16: mol_type = other RNA
gtctacggccataccg

SEQ ID NO: 32032 - RNA, 20 nt, Synthetic Construct
  source 1..20: mol_type = other RNA
tattgcactcgtcccggcct

SEQ ID NO: 32033 - RNA, 20 nt, Synthetic Construct
  source 1..20: mol_type = other RNA
tattgcactcgtcccggcct

SEQ ID NO: 32034 - RNA, 24 nt, Synthetic Construct
  source 1..24: mol_type = other RNA
ttcaagtaattcaggataggttgt

SEQ ID NO: 32035 - RNA, 22 nt, Synthetic Construct
  source 1..22: mol_type = other RNA
ngaggtagtaggttgtatagtt

SEQ ID NO: 32036 - RNA, 22 nt, Synthetic Construct
  source 1..22: mol_type = other RNA
ngaggtagtaggttgtatagtt

SEQ ID NO: 32037 - RNA, 25 nt, Synthetic Construct
  source 1..25: mol_type = other RNA
agctacattgtctgctgggtttctt

SEQ ID NO: 32038 - RNA, 25 nt, Synthetic Construct
  source 1..25: mol_type = other RNA
agctacattgtctgctgggtttctt

SEQ ID NO: 32039 - RNA, 24 nt, Synthetic Construct
  source 1..24: mol_type = other RNA
tgtaaacatccccgaccggaagct

SEQ ID NO: 32040 - RNA, 24 nt, Synthetic Construct
  source 1..24: mol_type = other RNA
tgtaaacatccccgaccggaagct

SEQ ID NO: 32041 - RNA, 22 nt, Synthetic Construct
  source 1..22: mol_type = other RNA
tattgcactcgtcccggcctgt

SEQ ID NO: 32042 - RNA, 22 nt, Synthetic Construct
  source 1..22: mol_type = other RNA
tcctgtactaagctgccccgag

SEQ ID NO: 32043 - RNA, 20 nt, Synthetic Construct
  source 1..20: mol_type = other RNA
tgaggtagtaggttatgtgg

SEQ ID NO: 32044 - RNA, 21 nt, Synthetic Construct
  source 1..21: mol_type = other RNA
tcctgtactgagctgccccgg

SEQ ID NO: 32045 - RNA, 18 nt, Synthetic Construct
  source 1..18: mol_type = other RNA
cgccgatgatagtgcgga

SEQ ID NO: 32046 - RNA, 22 nt, Synthetic Construct
  source 1..22: mol_type = other RNA
cagtgcaatgttaaaagggcat

SEQ ID NO: 32047 - RNA, 24 nt, Synthetic Construct
  source 1..24: mol_type = other RNA
tgtaaacgtccccgactggaagct

SEQ ID NO: 32048 - RNA, 24 nt, Synthetic Construct
  source 1..24: mol_type = other RNA
tgtaaacgtccccgactggaagct

SEQ ID NO: 32049 - RNA, 35 nt, Synthetic Construct; identical to SEQ ID NO: 1490
  source 1..35: mol_type = other RNA

SEQ ID NO: 32050 - RNA, 35 nt, Synthetic Construct; identical to SEQ ID NO: 1490
  source 1..35: mol_type = other RNA

SEQ ID NO: 32051 - RNA, 26 nt, Synthetic Construct
  source 1..26: mol_type = other RNA
ccccccactgctaatttgactggctt

SEQ ID NO: 32052 - RNA, 33 nt, Synthetic Construct; identical to SEQ ID NO: 3082
  source 1..33: mol_type = other RNA

SEQ ID NO: 32053 - RNA, 22 nt, Synthetic Construct
  source 1..22: mol_type = other RNA
tggaatgtaaagaagtatgtaa

SEQ ID NO: 32054 - RNA, 18 nt, Synthetic Construct
  source 1..18: mol_type = other RNA
gcaggacggtggccatgg

SEQ ID NO: 32055 - RNA, 18 nt, Synthetic Construct
  source 1..18: mol_type = other RNA
gcaggacggtggccatgg

SEQ ID NO: 32056 - RNA, 16 nt, Synthetic Construct
  source 1..16: mol_type = other RNA
taacaggtctgtgatg

SEQ ID NO: 32057 - RNA, 16 nt, Synthetic Construct
  source 1..16: mol_type = other RNA
taacaggtctgtgatg

SEQ ID NO: 32058 - RNA, 21 nt, Synthetic Construct
  source 1..21: mol_type = other RNA
tcctgtactgagctgcctcga

SEQ ID NO: 32059 - RNA, 21 nt, Synthetic Construct
  source 1..21: mol_type = other RNA
tcctgtactgagctgcctcga

SEQ ID NO: 32060 - RNA, 27 nt, Synthetic Construct
  source 1..27: mol_type = other RNA
ccccctactgctaaatttgactggctt

SEQ ID NO: 32061 - RNA, 22 nt, Synthetic Construct
  source 1..22: mol_type = other RNA
tgaggtagtagattgtatagta

SEQ ID NO: 32062 - RNA, 22 nt, Synthetic Construct
  source 1..22: mol_type = other RNA
tggagtgtgacaatggcgtttg

SEQ ID NO: 32063 - RNA, 20 nt, Synthetic Construct
  source 1..20: mol_type = other RNA
cgaggtagtaggttgtgtgg

SEQ ID NO: 32064 - RNA, 23 nt, Synthetic Construct
  source 1..23: mol_type = other RNA
tctcccaacccttgtaccagtga

SEQ ID NO: 32065 - RNA, 23 nt, Synthetic Construct
  source 1..23: mol_type = other RNA
tctcccaacccttgtaccagtga

SEQ ID NO: 32066 - RNA, 21 nt, Synthetic Construct
  source 1..21: mol_type = other RNA
tgaggtagtaggttgtgtggt

SEQ ID NO: 32067 - RNA, 32 nt, Synthetic Construct; identical to SEQ ID NO: 2318
  source 1..32: mol_type = other RNA

SEQ ID NO: 32068 - RNA, 32 nt, Synthetic Construct; identical to SEQ ID NO: 2318
  source 1..32: mol_type = other RNA

SEQ ID NO: 32069 - RNA, 31 nt, Synthetic Construct; identical to SEQ ID NO: 2442
  source 1..31: mol_type = other RNA

SEQ ID NO: 32070 - RNA, 31 nt, Synthetic Construct; identical to SEQ ID NO: 2442
  source 1..31: mol_type = other RNA

SEQ ID NO: 32071 - RNA, 23 nt, Synthetic Construct
  source 1..23: mol_type = other RNA
tggtaatacgacgtgcttagtgt

SEQ ID NO: 32072 - RNA, 21 nt, Synthetic Construct
  source 1..21: mol_type = other RNA
tcctgtactgagccgccccga

SEQ ID NO: 32073 - RNA, 23 nt, Synthetic Construct
  source 1..23: mol_type = other RNA
ttcaagtaattcaggataggttt

SEQ ID NO: 32074 - RNA, 23 nt, Synthetic Construct
  source 1..23: mol_type = other RNA
ttcaagtaattcaggataggttt

SEQ ID NO: 32075 - RNA, 22 nt, Synthetic Construct
  source 1..22: mol_type = other RNA
taactccttaagcgaatctcgc

SEQ ID NO: 32076 - RNA, 22 nt, Synthetic Construct
  source 1..22: mol_type = other RNA
taactccttaagcgaatctcgc

SEQ ID NO: 32077 - RNA, 20 nt, Synthetic Construct
  source 1..20: mol_type = other RNA
tacagtatagatgatgtact

SEQ ID NO: 32078 - RNA, 20 nt, Synthetic Construct
  source 1..20: mol_type = other RNA
tacagtatagatgatgtact

SEQ ID NO: 32079 - RNA, 22 nt, Synthetic Construct
  source 1..22: mol_type = other RNA
tagctgcacgtaaatattggcg

SEQ ID NO: 32080 - RNA, 22 nt, Synthetic Construct
  source 1..22: mol_type = other RNA
tagctgcacgtaaatattggcg

SEQ ID NO: 32081 - RNA, 23 nt, Synthetic Construct
  source 1..23: mol_type = other RNA
caagtcactagtggttccgttta

SEQ ID NO: 32082 - RNA, 23 nt, Synthetic Construct
  source 1..23: mol_type = other RNA
caagtcactagtggttccgttta

SEQ ID NO: 32083 - RNA, 22 nt, Synthetic Construct
  source 1..22: mol_type = other RNA
atcacattgccagggatttcca

SEQ ID NO: 32084 - RNA, 25 nt, Synthetic Construct
  source 1..25: mol_type = other RNA
ggtaaaatagctgagtgaagcattg

SEQ ID NO: 32085 - RNA, 19 nt, Synthetic Construct
  source 1..19: mol_type = other RNA
gctattgacgaccgtaccg

SEQ ID NO: 32086 - RNA, 30 nt, Synthetic Construct; identical to SEQ ID NO: 5879
  source 1..30: mol_type = other RNA

SEQ ID NO: 32087 - RNA, 30 nt, Synthetic Construct; identical to SEQ ID NO: 5879
  source 1..30: mol_type = other RNA

SEQ ID NO: 32088 - RNA, 21 nt, Synthetic Construct
  source 1..21: mol_type = other RNA
tcctgtactgagctgccctga

SEQ ID NO: 32089 - RNA, 21 nt, Synthetic Construct
  source 1..21: mol_type = other RNA
tcctgtactgagctgccctga

SEQ ID NO: 32090 - RNA, 33 nt, Synthetic Construct; identical to SEQ ID NO: 2386
  source 1..33: mol_type = other RNA

SEQ ID NO: 32091 - RNA, 16 nt, Synthetic Construct
  source 1..16: mol_type = other RNA
tcgtgacgatagtgca

SEQ ID NO: 32092 - RNA, 31 nt, Synthetic Construct; identical to SEQ ID NO: 2758
  source 1..31: mol_type = other RNA

SEQ ID NO: 32093 - RNA, 31 nt, Synthetic Construct; identical to SEQ ID NO: 2758
  source 1..31: mol_type = other RNA

SEQ ID NO: 32094 - RNA, 23 nt, Synthetic Construct
  source 1..23: mol_type = other RNA
agcagcattgtacagggctatga

SEQ ID NO: 32095 - RNA, 20 nt, Synthetic Construct
  source 1..20: mol_type = other RNA
tgaggtagtaggttgtgtgt

SEQ ID NO: 32096 - RNA, 23 nt, Synthetic Construct
  source 1..23: mol_type = other RNA
acagtagtctgcacattggttaa

SEQ ID NO: 32097 - RNA, 23 nt, Synthetic Construct
  source 1..23: mol_type = other RNA
tcctgtactgagctgccccgagg

SEQ ID NO: 32098 - RNA, 22 nt, Synthetic Construct
  source 1..22: mol_type = other RNA
tggaatgtaaggaagtgtgtgt

SEQ ID NO: 32099 - RNA, 16 nt, Synthetic Construct
  source 1..16: mol_type = other RNA
gatttgggagtgctcg

SEQ ID NO: 32100 - RNA, 21 nt, Synthetic Construct
  source 1..21: mol_type = other RNA
taactccttaagcgatctcgc

SEQ ID NO: 32101 - RNA, 21 nt, Synthetic Construct
  source 1..21: mol_type = other RNA
taactccttaagcgatctcgc

SEQ ID NO: 32102 - RNA, 25 nt, Synthetic Construct
  source 1..25: mol_type = other RNA
tgtaaacatccccgactggaagctt

SEQ ID NO: 32103 - RNA, 25 nt, Synthetic Construct
  source 1..25: mol_type = other RNA
tgtaaacatccccgactggaagctt

SEQ ID NO: 32104 - RNA, 27 nt, Synthetic Construct
  source 1..27: mol_type = other RNA
ggggagctaatcccagaaacccggtcg

SEQ ID NO: 32105 - RNA, 22 nt, Synthetic Construct
  source 1..22: mol_type = other RNA
tgtagtgcttcctactttatgg

SEQ ID NO: 32106 - RNA, 22 nt, Synthetic Construct
  source 1..22: mol_type = other RNA
tgtagtgcttcctactttatgg

SEQ ID NO: 32107 - RNA, 20 nt, Synthetic Construct
  source 1..20: mol_type = other RNA
gagtaggacgttgccaggtt

SEQ ID NO: 32108 - RNA, 20 nt, Synthetic Construct
  source 1..20: mol_type = other RNA
gagtaggacgttgccaggtt

SEQ ID NO: 32109 - RNA, 22 nt, Synthetic Construct
  source 1..22: mol_type = other RNA
tgaggtagtagtttgtgctgtg

SEQ ID NO: 32110 - RNA, 22 nt, Synthetic Construct
  source 1..22: mol_type = other RNA
tgaggtagtagtttgtgctgtg

SEQ ID NO: 32111 - RNA, 28 nt, Synthetic Construct
  source 1..28: mol_type = other RNA
cccccccactgctaaatttgactggcta

SEQ ID NO: 32112 - RNA, 23 nt, Synthetic Construct
  source 1..23: mol_type = other RNA
tggtaatacgacgtacttagtgt

SEQ ID NO: 32113 - RNA, 22 nt, Synthetic Construct
  source 1..22: mol_type = other RNA
tgaggtagtagattgtatggtt

SEQ ID NO: 32114 - RNA, 22 nt, Synthetic Construct
  source 1..22: mol_type = other RNA
tgaggtagtagattgtatggtt

SEQ ID NO: 32115 - RNA, 27 nt, Synthetic Construct
  source 1..27: mol_type = other RNA
ccccccactgctaaattcgactggctt

SEQ ID NO: 32116 - RNA, 22 nt, Synthetic Construct
  source 1..22: mol_type = other RNA
accactgaccgttgactgtacc

SEQ ID NO: 32117 - RNA, 22 nt, Synthetic Construct
  source 1..22: mol_type = other RNA
accactgaccgttgactgtacc

SEQ ID NO: 32118 - RNA, 22 nt, Synthetic Construct
  source 1..22: mol_type = other RNA
gtcagtttgtcaaataccccaa

SEQ ID NO: 32119 - RNA, 21 nt, Synthetic Construct
  source 1..21: mol_type = other RNA
tggagtgcgacaatggtgttt

SEQ ID NO: 32120 - RNA, 22 nt, Synthetic Construct
  source 1..22: mol_type = other RNA
tgaggtagtaggttgtgtgatt

SEQ ID NO: 32121 - RNA, 22 nt, Synthetic Construct
  source 1..22: mol_type = other RNA
tgaggtagtaggttgtgtgatt

SEQ ID NO: 32122 - RNA, 18 nt, Synthetic Construct
  source 1..18: mol_type = other RNA
atcccactcctgacacca

SEQ ID NO: 32123 - RNA, 18 nt, Synthetic Construct
  source 1..18: mol_type = other RNA
gtctgcctcagcgtcggt

SEQ ID NO: 32124 - RNA, 18 nt, Synthetic Construct
  source 1..18: mol_type = other RNA
gtctgcctcagcgtcggt

SEQ ID NO: 32125 - RNA, 27 nt, Synthetic Construct
  source 1..27: mol_type = other RNA
ccccccactgctaaatttgactggcct

SEQ ID NO: 32126 - RNA, 27 nt, Synthetic Construct
  source 1..27: mol_type = other RNA
ccccccactgctaaatttgactggcct

SEQ ID NO: 32127 - RNA, 22 nt, Synthetic Construct
  source 1..22: mol_type = other RNA
tcctgtactgtgctgccccgag

SEQ ID NO: 32128 - RNA, 22 nt, Synthetic Construct
  source 1..22: mol_type = other RNA
tcctgtactgtgctgccccgag

SEQ ID NO: 32129 - RNA, 23 nt, Synthetic Construct
  source 1..23: mol_type = other RNA
gcctgtactgagctgccccgaga

SEQ ID NO: 32130 - RNA, 24 nt, Synthetic Construct
  source 1..24: mol_type = other RNA
gaggtgtagaataggtgggagctt

SEQ ID NO: 32131 - RNA, 22 nt, Synthetic Construct
  source 1..22: mol_type = other RNA
tcctgtactgagcagccccgag

SEQ ID NO: 32132 - RNA, 22 nt, Synthetic Construct
  source 1..22: mol_type = other RNA
tcctgtactgagcagccccgag

SEQ ID NO: 32133 - RNA, 19 nt, Synthetic Construct
  source 1..19: mol_type = other RNA
atccctgcggcgtctccat

SEQ ID NO: 32134 - RNA, 22 nt, Synthetic Construct
  source 1..22: mol_type = other RNA
tattgcgcttgtcccggcctgt

SEQ ID NO: 32135 - RNA, 23 nt, Synthetic Construct
  source 1..23: mol_type = other RNA
cattgcacttgtctcggtctgaa

SEQ ID NO: 32136 - RNA, 23 nt, Synthetic Construct
  source 1..23: mol_type = other RNA
cattgcacttgtctcggtctgaa

SEQ ID NO: 32137 - RNA, 24 nt, Synthetic Construct
  source 1..24: mol_type = other RNA
caacggaatcccaaaagcagctgt

SEQ ID NO: 32138 - RNA, 24 nt, Synthetic Construct
  source 1..24: mol_type = other RNA
caacggaatcccaaaagcagctgt

SEQ ID NO: 32139 - RNA, 22 nt, Synthetic Construct
  source 1..22: mol_type = other RNA
tgaggtagcagtttgtgctgtt

SEQ ID NO: 32140 - RNA, 22 nt, Synthetic Construct
  source 1..22: mol_type = other RNA
tgaggtagcagtttgtgctgtt

SEQ ID NO: 32141 - RNA, 21 nt, Synthetic Construct
  source 1..21: mol_type = other RNA
gagttctacagtccgacgatc

SEQ ID NO: 32142 - RNA, 21 nt, Synthetic Construct
  source 1..21: mol_type = other RNA
gagttctacagtccgacgatc

SEQ ID NO: 32143 - RNA, 20 nt, Synthetic Construct
  source 1..20: mol_type = other RNA
tgaggtagtagtttgtacag

SEQ ID NO: 32144 - RNA, 20 nt, Synthetic Construct
  source 1..20: mol_type = other RNA
tgaggtagtagtttgtacag

SEQ ID NO: 32145 - RNA, 22 nt, Synthetic Construct
  source 1..22: mol_type = other RNA
ncgtaccgtgagtaataatgcg

SEQ ID NO: 32146 - RNA, 22 nt, Synthetic Construct
  source 1..22: mol_type = other RNA
ncgtaccgtgagtaataatgcg

SEQ ID NO: 32147 - RNA, 23 nt, Synthetic Construct
  source 1..23: mol_type = other RNA
tcctgtactgagctgccctgaga

SEQ ID NO: 32148 - RNA, 23 nt, Synthetic Construct
  source 1..23: mol_type = other RNA
tcctgtactgagctgccctgaga

SEQ ID NO: 32149 - RNA, 22 nt, Synthetic Construct
  source 1..22: mol_type = other RNA
tgaggcagtagtttgtgctgtt

SEQ ID NO: 32150 - RNA, 22 nt, Synthetic Construct
  source 1..22: mol_type = other RNA
gggagtgtgacaatggtgtttg

SEQ ID NO: 32151 - RNA, 23 nt, Synthetic Construct
  source 1..23: mol_type = other RNA
tgaggtagtaggttgtatggtta

SEQ ID NO: 32152 - RNA, 23 nt, Synthetic Construct
  source 1..23: mol_type = other RNA
tgaggtagtaggttgtatggtta

SEQ ID NO: 32153 - RNA, 33 nt, Synthetic Construct; identical to SEQ ID NO: 2253
  source 1..33: mol_type = other RNA

SEQ ID NO: 32154 - RNA, 33 nt, Synthetic Construct; identical to SEQ ID NO: 2253
  source 1..33: mol_type = other RNA

SEQ ID NO: 32155 - RNA, 21 nt, Synthetic Construct
  source 1..21: mol_type = other RNA
ngaggtagtaggttgtgtggt

SEQ ID NO: 32156 - RNA, 21 nt, Synthetic Construct
  source 1..21: mol_type = other RNA
ngaggtagtaggttgtgtggt

SEQ ID NO: 32157 - RNA, 16 nt, Synthetic Construct
  source 1..16: mol_type = other RNA
tcagtagctcgaggaa

SEQ ID NO: 32158 - RNA, 21 nt, Synthetic Construct
  source 1..21: mol_type = other RNA
tcctgtacagagctgccccga

SEQ ID NO: 32159 - RNA, 24 nt, Synthetic Construct
  source 1..24: mol_type = other RNA
ttcaagtaatccaggataggcttt

SEQ ID NO: 32160 - RNA, 23 nt, Synthetic Construct
  source 1..23: mol_type = other RNA
caaagtgctgctcgtgcaggtag

SEQ ID NO: 32161 - RNA, 23 nt, Synthetic Construct
  source 1..23: mol_type = other RNA
caaagtgctgctcgtgcaggtag

SEQ ID NO: 32162 - RNA, 25 nt, Synthetic Construct
  source 1..25: mol_type = other RNA
atttccccttggggttgtaggacca

SEQ ID NO: 32163 - RNA, 25 nt, Synthetic Construct
  source 1..25: mol_type = other RNA
atttccccttggggttgtaggacca

SEQ ID NO: 32164 - RNA, 21 nt, Synthetic Construct
  source 1..21: mol_type = other RNA
acagtagtctgcacattggtt

SEQ ID NO: 32165 - RNA, 34 nt, Synthetic Construct; identical to SEQ ID NO: 16999
  source 1..34: mol_type = other RNA

SEQ ID NO: 32166 - RNA, 35 nt, Synthetic Construct; identical to SEQ ID NO: 2615
  source 1..35: mol_type = other RNA

SEQ ID NO: 32167 - RNA, 35 nt, Synthetic Construct; identical to SEQ ID NO: 2615
  source 1..35: mol_type = other RNA

SEQ ID NO: 32168 - RNA, 28 nt, Synthetic Construct
  source 1..28: mol_type = other RNA
ccgtgtgaaagtaggtcatcgtcaggct

SEQ ID NO: 32169 - RNA, 28 nt, Synthetic Construct
  source 1..28: mol_type = other RNA
ccgtgtgaaagtaggtcatcgtcaggct

SEQ ID NO: 32170 - RNA, 22 nt, Synthetic Construct
  source 1..22: mol_type = other RNA
ctggctagggaaaatgattgga

SEQ ID NO: 32171 - RNA, 22 nt, Synthetic Construct
  source 1..22: mol_type = other RNA
ctggctagggaaaatgattgga

SEQ ID NO: 32172 - RNA, 22 nt, Synthetic Construct
  source 1..22: mol_type = other RNA
tcctgtactgagctgccccgac

SEQ ID NO: 32173 - RNA, 22 nt, Synthetic Construct
  source 1..22: mol_type = other RNA
tcctgtactgagctgccccgac

SEQ ID NO: 32174 - RNA, 21 nt, Synthetic Construct
  source 1..21: mol_type = other RNA
ttcaagtaattcaggataggt

SEQ ID NO: 32175 - RNA, 22 nt, Synthetic Construct
  source 1..22: mol_type = other RNA
tattgcacttgtcctggcctgt

SEQ ID NO: 32176 - RNA, 22 nt, Synthetic Construct
  source 1..22: mol_type = other RNA
tgaggtagtaggttgtgtggct

SEQ ID NO: 32177 - RNA, 22 nt, Synthetic Construct
  source 1..22: mol_type = other RNA
tgaggtagtaggttgtgtggct

SEQ ID NO: 32178 - RNA, 22 nt, Synthetic Construct
  source 1..22: mol_type = other RNA
tggctcagttcagcaggaacag

SEQ ID NO: 32179 - RNA, 22 nt, Synthetic Construct
  source 1..22: mol_type = other RNA
cataaagtagaaagcactacta

SEQ ID NO: 32180 - RNA, 20 nt, Synthetic Construct
  source 1..20: mol_type = other RNA
tcccgggtttcggcaccatt

SEQ ID NO: 32181 - RNA, 21 nt, Synthetic Construct
  source 1..21: mol_type = other RNA
tggggtagtagattgtatagt

SEQ ID NO: 32182 - RNA, 21 nt, Synthetic Construct
  source 1..21: mol_type = other RNA
tggggtagtagattgtatagt

SEQ ID NO: 32183 - RNA, 22 nt, Synthetic Construct
  source 1..22: mol_type = other RNA
tgaggtagtgggttgtgtggtt

SEQ ID NO: 32184 - RNA, 22 nt, Synthetic Construct
  source 1..22: mol_type = other RNA
tgaggtagtgggttgtgtggtt

SEQ ID NO: 32185 - RNA, 22 nt, Synthetic Construct
  source 1..22: mol_type = other RNA
tgaggtagtaggttgtgtggtg

SEQ ID NO: 32186 - RNA, 22 nt, Synthetic Construct
  source 1..22: mol_type = other RNA
tgaggtagtaggttgtgtggtg

SEQ ID NO: 32187 - RNA, 21 nt, Synthetic Construct
  source 1..21: mol_type = other RNA
tcctgtactgagttgccccga

SEQ ID NO: 32188 - RNA, 21 nt, Synthetic Construct
  source 1..21: mol_type = other RNA
tggggtagtagtttgtgctgt

SEQ ID NO: 32189 - RNA, 22 nt, Synthetic Construct
  source 1..22: mol_type = other RNA
taggtagtttcctgttgttggg

SEQ ID NO: 32190 - RNA, 22 nt, Synthetic Construct
  source 1..22: mol_type = other RNA
tagcagcgcgtaaatattggcg

SEQ ID NO: 32191 - RNA, 22 nt, Synthetic Construct
  source 1..22: mol_type = other RNA
tagcagcgcgtaaatattggcg

SEQ ID NO: 32192 - RNA, 20 nt, Synthetic Construct
  source 1..20: mol_type = other RNA
cgtaccgtgagtaataatgc

SEQ ID NO: 32193 - RNA, 22 nt, Synthetic Construct
  source 1..22: mol_type = other RNA
tgaggtagtagtttgtgccgtt

SEQ ID NO: 32194 - RNA, 22 nt, Synthetic Construct
  source 1..22: mol_type = other RNA
tgaggtagtagtttgtgccgtt

SEQ ID NO: 32195 - RNA, 27 nt, Synthetic Construct
  source 1..27: mol_type = other RNA
ccccccactgctaaatttgaccggctt

SEQ ID NO: 32196 - RNA, 24 nt, Synthetic Construct
  source 1..24: mol_type = other RNA
agctcggtctgaggcccctcagtt

SEQ ID NO: 32197 - RNA, 24 nt, Synthetic Construct
  source 1..24: mol_type = other RNA
agctcggtctgaggcccctcagtt

SEQ ID NO: 32198 - RNA, 23 nt, Synthetic Construct
  source 1..23: mol_type = other RNA
tggagacgcggccctgttggagt

SEQ ID NO: 32199 - RNA, 21 nt, Synthetic Construct
  source 1..21: mol_type = other RNA
cagcattgtacagggctatga

SEQ ID NO: 32200 - RNA, 20 nt, Synthetic Construct
  source 1..20: mol_type = other RNA
tgaggtagtaggttgtgtgt

SEQ ID NO: 32201 - RNA, 20 nt, Synthetic Construct
  source 1..20: mol_type = other RNA
tgaggtagtaggttgtgtgt

SEQ ID NO: 32202 - RNA, 22 nt, Synthetic Construct
  source 1..22: mol_type = other RNA
tgaggcagtaggttgtgtggtt

SEQ ID NO: 32203 - RNA, 22 nt, Synthetic Construct
  source 1..22: mol_type = other RNA
tgaggcagtaggttgtgtggtt

SEQ ID NO: 32204 - RNA, 23 nt, Synthetic Construct
  source 1..23: mol_type = other RNA
gcctgctggggtggaacctggtt

SEQ ID NO: 32205 - RNA, 23 nt, Synthetic Construct
  source 1..23: mol_type = other RNA
gcctgctggggtggaacctggtt

SEQ ID NO: 32206 - RNA, 18 nt, Synthetic Construct
  source 1..18: mol_type = other RNA
caacggaatcccaaaagc

SEQ ID NO: 32207 - RNA, 28 nt, Synthetic Construct
  source 1..28: mol_type = other RNA
ggtggctgtagctcagttggtagagtcc

SEQ ID NO: 32208 - RNA, 28 nt, Synthetic Construct
  source 1..28: mol_type = other RNA
ggtggctgtagctcagttggtagagtcc

SEQ ID NO: 32209 - RNA, 22 nt, Synthetic Construct
  source 1..22: mol_type = other RNA
tgagacctctgggttctgagct

SEQ ID NO: 32210 - RNA, 22 nt, Synthetic Construct
  source 1..22: mol_type = other RNA
tgagacctctgggttctgagct

SEQ ID NO: 32211 - RNA, 23 nt, Synthetic Construct
  source 1..23: mol_type = other RNA
cgactcttagcggtggatcactc

SEQ ID NO: 32212 - RNA, 22 nt, Synthetic Construct
  source 1..22: mol_type = other RNA
tcttgtactgagctgccccgag

SEQ ID NO: 32213 - RNA, 16 nt, Synthetic Construct
  source 1..16: mol_type = other RNA
tcagtagctcgaggaa

SEQ ID NO: 32214 - RNA, 22 nt, Synthetic Construct
  source 1..22: mol_type = other RNA
tagcagcacataaatattggcg

SEQ ID NO: 32215 - RNA, 24 nt, Synthetic Construct
  source 1..24: mol_type = other RNA
atcacattgccagggatttccaat

SEQ ID NO: 32216 - RNA, 24 nt, Synthetic Construct
  source 1..24: mol_type = other RNA
atcacattgccagggatttccaat

SEQ ID NO: 32217 - RNA, 22 nt, Synthetic Construct
  source 1..22: mol_type = other RNA
caacggaatcccaaaagcagct

SEQ ID NO: 32218 - RNA, 22 nt, Synthetic Construct
  source 1..22: mol_type = other RNA
caacggaatcccaaaagcagct

SEQ ID NO: 32219 - RNA, 25 nt, Synthetic Construct
  source 1..25: mol_type = other RNA
ttgaggatatgagatcgagacgaca

SEQ ID NO: 32220 - RNA, 22 nt, Synthetic Construct
  source 1..22: mol_type = other RNA
tgaggtaataggttgtgtggtt

SEQ ID NO: 32221 - RNA, 23 nt, Synthetic Construct
  source 1..23: mol_type = other RNA
tgagatgaagcactgtagctctt

SEQ ID NO: 32222 - RNA, 35 nt, Synthetic Construct; identical to SEQ ID NO: 9871
  source 1..35: mol_type = other RNA

SEQ ID NO: 32223 - RNA, 35 nt, Synthetic Construct; identical to SEQ ID NO: 9871
  source 1..35: mol_type = other RNA

SEQ ID NO: 32224 - RNA, 22 nt, Synthetic Construct
  source 1..22: mol_type = other RNA
cataaagtagaaagcactacta

SEQ ID NO: 32225 - RNA, 22 nt, Synthetic Construct
  source 1..22: mol_type = other RNA
cataaagtagaaagcactacta

SEQ ID NO: 32226 - RNA, 24 nt, Synthetic Construct
  source 1..24: mol_type = other RNA
agcagcattgtacagggctatgag

SEQ ID NO: 32227 - RNA, 21 nt, Synthetic Construct
  source 1..21: mol_type = other RNA
gtagtgtttcctactttatgg

SEQ ID NO: 32228 - RNA, 21 nt, Synthetic Construct
  source 1..21: mol_type = other RNA
gtagtgtttcctactttatgg

SEQ ID NO: 32229 - RNA, 21 nt, Synthetic Construct
  source 1..21: mol_type = other RNA
tggagtgtgacagtggtgttt

SEQ ID NO: 32230 - RNA, 21 nt, Synthetic Construct
  source 1..21: mol_type = other RNA
tggagtgtgacagtggtgttt

SEQ ID NO: 32231 - RNA, 22 nt, Synthetic Construct
  source 1..22: mol_type = other RNA
ttgcagcacgtaaatattggcg

SEQ ID NO: 32232 - RNA, 22 nt, Synthetic Construct
  source 1..22: mol_type = other RNA
ngaggtagtagattgtatagtt

SEQ ID NO: 32233 - RNA, 22 nt, Synthetic Construct
  source 1..22: mol_type = other RNA
ngaggtagtagattgtatagtt

SEQ ID NO: 32234 - RNA, 21 nt, Synthetic Construct
  source 1..21: mol_type = other RNA
tcctgtactgagctgccacga

SEQ ID NO: 32235 - RNA, 21 nt, Synthetic Construct
  source 1..21: mol_type = other RNA
tcctgtactgagctgccacga

SEQ ID NO: 32236 - RNA, 20 nt, Synthetic Construct
  source 1..20: mol_type = other RNA
agttctacagtccgacgatc

SEQ ID NO: 32237 - RNA, 20 nt, Synthetic Construct
  source 1..20: mol_type = other RNA
agttctacagtccgacgatc

SEQ ID NO: 32238 - RNA, 23 nt, Synthetic Construct
  source 1..23: mol_type = other RNA
ttatggtttgcctgggactgatt

SEQ ID NO: 32239 - RNA, 23 nt, Synthetic Construct
  source 1..23: mol_type = other RNA
ttatggtttgcctgggactgatt

SEQ ID NO: 32240 - RNA, 22 nt, Synthetic Construct
  source 1..22: mol_type = other RNA
tgaggtagtagttcgtgctgtt

SEQ ID NO: 32241 - RNA, 22 nt, Synthetic Construct
  source 1..22: mol_type = other RNA
tgaggtagtagttcgtgctgtt

SEQ ID NO: 32242 - RNA, 23 nt, Synthetic Construct
  source 1..23: mol_type = other RNA
tggtaatacgacgtacatagtgt

SEQ ID NO: 32243 - RNA, 23 nt, Synthetic Construct
  source 1..23: mol_type = other RNA
cgaatgttgctcggtgaacccct

SEQ ID NO: 32244 - RNA, 23 nt, Synthetic Construct
  source 1..23: mol_type = other RNA
cgaatgttgctcggtgaacccct

SEQ ID NO: 32245 - RNA, 23 nt, Synthetic Construct
  source 1..23: mol_type = other RNA
aatgacacgatcactcccgttga

SEQ ID NO: 32246 - RNA, 23 nt, Synthetic Construct
  source 1..23: mol_type = other RNA
aatgacacgatcactcccgttga

SEQ ID NO: 32247 - RNA, 23 nt, Synthetic Construct
  source 1..23: mol_type = other RNA
tcagtgcatgacagaacttggga

SEQ ID NO: 32248 - RNA, 22 nt, Synthetic Construct
  source 1..22: mol_type = other RNA
tgaggtagtagtttgtgctgta

SEQ ID NO: 32249 - RNA, 23 nt, Synthetic Construct
  source 1..23: mol_type = other RNA
tcggatccgtctgagcttggctt

SEQ ID NO: 32250 - RNA, 23 nt, Synthetic Construct
  source 1..23: mol_type = other RNA
tcggatccgtctgagcttggctt

SEQ ID NO: 32251 - RNA, 23 nt, Synthetic Construct
  source 1..23: mol_type = other RNA
tggtaatacgacatacttagtgt

SEQ ID NO: 32252 - RNA, 23 nt, Synthetic Construct
  source 1..23: mol_type = other RNA
tggtaatacgacatacttagtgt

SEQ ID NO: 32253 - RNA, 21 nt, Synthetic Construct
  source 1..21: mol_type = other RNA
cgaggtagtagtttgtgctgt

SEQ ID NO: 32254 - RNA, 21 nt, Synthetic Construct
  source 1..21: mol_type = other RNA
cgaggtagtagtttgtgctgt

SEQ ID NO: 32255 - RNA, 21 nt, Synthetic Construct
  source 1..21: mol_type = other RNA
tgaggtagaaggttgtgtggt

SEQ ID NO: 32256 - RNA, 21 nt, Synthetic Construct
  source 1..21: mol_type = other RNA
tgaggtagaaggttgtgtggt

SEQ ID NO: 32257 - RNA, 23 nt, Synthetic Construct
  source 1..23: mol_type = other RNA
tggcagtgtcttagctggttgtt

SEQ ID NO: 32258 - RNA, 23 nt, Synthetic Construct
  source 1..23: mol_type = other RNA
tggcagtgtcttagctggttgtt

SEQ ID NO: 32259 - RNA, 22 nt, Synthetic Construct
  source 1..22: mol_type = other RNA
tcagtgcatcacagaactttgt

SEQ ID NO: 32260 - RNA, 20 nt, Synthetic Construct
  source 1..20: mol_type = other RNA
agaggtagtaggttgtgtgg

SEQ ID NO: 32261 - RNA, 20 nt, Synthetic Construct
  source 1..20: mol_type = other RNA
agaggtagtaggttgtgtgg

SEQ ID NO: 32262 - RNA, 23 nt, Synthetic Construct
  source 1..23: mol_type = other RNA
atgacacgatcactcccgttgag

SEQ ID NO: 32263 - RNA, 22 nt, Synthetic Construct
  source 1..22: mol_type = other RNA
acagtagtctgcacattggtta

SEQ ID NO: 32264 - RNA, 22 nt, Synthetic Construct
  source 1..22: mol_type = other RNA
acagtagtctgcacattggtta

SEQ ID NO: 32265 - RNA, 22 nt, Synthetic Construct
  source 1..22: mol_type = other RNA
nattgcacttgtcccggcctgt

SEQ ID NO: 32266 - RNA, 23 nt, Synthetic Construct
  source 1..23: mol_type = other RNA
tgaggagcagagagcgagacttt

SEQ ID NO: 32267 - RNA, 23 nt, Synthetic Construct
  source 1..23: mol_type = other RNA
acagtagtctgcacattggttat

SEQ ID NO: 32268 - RNA, 22 nt, Synthetic Construct
  source 1..22: mol_type = other RNA
tagcagcacgtaaatactggcg

SEQ ID NO: 32269 - RNA, 22 nt, Synthetic Construct
  source 1..22: mol_type = other RNA
tattgcacttgttccggcctgt

SEQ ID NO: 32270 - RNA, 22 nt, Synthetic Construct
  source 1..22: mol_type = other RNA
tattgcacttgttccggcctgt

SEQ ID NO: 32271 - RNA, 20 nt, Synthetic Construct
  source 1..20: mol_type = other RNA
tgaggtagtaggttgtataa

SEQ ID NO: 32272 - RNA, 22 nt, Synthetic Construct
  source 1..22: mol_type = other RNA
tgaggtagtagcttgtgctgtt

SEQ ID NO: 32273 - RNA, 22 nt, Synthetic Construct
  source 1..22: mol_type = other RNA
actggacttggagtcagaaggc

SEQ ID NO: 32274 - RNA, 22 nt, Synthetic Construct
  source 1..22: mol_type = other RNA
actggacttggagtcagaaggc

SEQ ID NO: 32275 - RNA, 23 nt, Synthetic Construct
  source 1..23: mol_type = other RNA
tcctatactgagctgccccgaga

SEQ ID NO: 32276 - RNA, 25 nt, Synthetic Construct
  source 1..25: mol_type = other RNA
ggtaaaatagctgagtgaagcattg

SEQ ID NO: 32277 - RNA, 23 nt, Synthetic Construct
  source 1..23: mol_type = other RNA
tgaggggcagagagcgagacttg

SEQ ID NO: 32278 - RNA, 23 nt, Synthetic Construct
  source 1..23: mol_type = other RNA
tgaggggcagagagcgagacttg

SEQ ID NO: 32279 - RNA, 22 nt, Synthetic Construct
  source 1..22: mol_type = other RNA
tcctgtattgagctgccccgag

SEQ ID NO: 32280 - RNA, 20 nt, Synthetic Construct
  source 1..20: mol_type = other RNA
ggaggtagtaggttgtgtgg

SEQ ID NO: 32281 - RNA, 25 nt, Synthetic Construct
  source 1..25: mol_type = other RNA
gagaaagctcacaagaactgctaac

SEQ ID NO: 32282 - RNA, 21 nt, Synthetic Construct
  source 1..21: mol_type = other RNA
tcctgtactgagctgctccga

SEQ ID NO: 32283 - RNA, 21 nt, Synthetic Construct
  source 1..21: mol_type = other RNA
tcctgtactgagctgctccga

SEQ ID NO: 32284 - RNA, 22 nt, Synthetic Construct
  source 1..22: mol_type = other RNA
atataatacaacctgctaagtg

SEQ ID NO: 32285 - RNA, 23 nt, Synthetic Construct
  source 1..23: mol_type = other RNA
tggtaaaacgacgtacttagtgt

SEQ ID NO: 32286 - RNA, 20 nt, Synthetic Construct
  source 1..20: mol_type = other RNA
tgaggtagcaggttgtgtgg

SEQ ID NO: 32287 - RNA, 20 nt, Synthetic Construct
  source 1..20: mol_type = other RNA
tgaggtagcaggttgtgtgg

SEQ ID NO: 32288 - RNA, 21 nt, Synthetic Construct
  source 1..21: mol_type = other RNA
attagtgacgcgcatgaatgg

SEQ ID NO: 32289 - RNA, 21 nt, Synthetic Construct
  source 1..21: mol_type = other RNA
attagtgacgcgcatgaatgg

SEQ ID NO: 32290 - RNA, 20 nt, Synthetic Construct
  source 1..20: mol_type = other RNA
tagcgaaattccttgtcggg

SEQ ID NO: 32291 - RNA, 22 nt, Synthetic Construct
  source 1..22: mol_type = other RNA
tgaagtagtaggttgtgtggtt

SEQ ID NO: 32292 - RNA, 22 nt, Synthetic Construct
  source 1..22: mol_type = other RNA
tgaagtagtaggttgtgtggtt

SEQ ID NO: 32293 - RNA, 27 nt, Synthetic Construct
  source 1..27: mol_type = other RNA
ccccccactgctaaatttgactgactt

SEQ ID NO: 32294 - RNA, 21 nt, Synthetic Construct
  source 1..21: mol_type = other RNA
tgaggtagtagtctgtgctgt

SEQ ID NO: 32295 - RNA, 26 nt, Synthetic Construct
  source 1..26: mol_type = other RNA
tccctggtggtctagtggttaggatt

SEQ ID NO: 32296 - RNA, 26 nt, Synthetic Construct
  source 1..26: mol_type = other RNA
tccctggtggtctagtggttaggatt

SEQ ID NO: 32297 - RNA, 22 nt, Synthetic Construct
  source 1..22: mol_type = other RNA
tgaggtagtggtttgtgctgtt

SEQ ID NO: 32298 - RNA, 36 nt, Synthetic Construct; identical to SEQ ID NO: 2444
  source 1..36: mol_type = other RNA

SEQ ID NO: 32299 - RNA, 36 nt, Synthetic Construct; identical to SEQ ID NO: 2444
  source 1..36: mol_type = other RNA

SEQ ID NO: 32300 - RNA, 24 nt, Synthetic Construct
  source 1..24: mol_type = other RNA
tgagaactgaattccatgggttgt

SEQ ID NO: 32301 - RNA, 20 nt, Synthetic Construct
  source 1..20: mol_type = other RNA
tcgcgccgtcgggcccgggg

SEQ ID NO: 32302 - RNA, 20 nt, Synthetic Construct
  source 1..20: mol_type = other RNA
tcgcgccgtcgggcccgggg

SEQ ID NO: 32303 - RNA, 20 nt, Synthetic Construct
  source 1..20: mol_type = other RNA
ctctaatgagactgccggtg

SEQ ID NO: 32304 - RNA, 36 nt, Synthetic Construct; identical to SEQ ID NO: 2520
  source 1..36: mol_type = other RNA

SEQ ID NO: 32305 - RNA, 36 nt, Synthetic Construct; identical to SEQ ID NO: 2520
  source 1..36: mol_type = other RNA

SEQ ID NO: 32306 - RNA, 22 nt, Synthetic Construct
  source 1..22: mol_type = other RNA
ggcagcattgtacagggctatg

SEQ ID NO: 32307 - RNA, 22 nt, Synthetic Construct
  source 1..22: mol_type = other RNA
ggcagcattgtacagggctatg

SEQ ID NO: 32308 - RNA, 22 nt, Synthetic Construct
  source 1..22: mol_type = other RNA
tgtggtagtaggttgtatagtt

SEQ ID NO: 32309 - RNA, 22 nt, Synthetic Construct
  source 1..22: mol_type = other RNA
tgtggtagtaggttgtatagtt

SEQ ID NO: 32310 - RNA, 22 nt, Synthetic Construct
  source 1..22: mol_type = other RNA
tcgtaccgtgagtgataatgcg

SEQ ID NO: 32311 - RNA, 24 nt, Synthetic Construct
  source 1..24: mol_type = other RNA
tgtaaacacccccgactggaagct

SEQ ID NO: 32312 - RNA, 24 nt, Synthetic Construct
  source 1..24: mol_type = other RNA
tgtaaacacccccgactggaagct

SEQ ID NO: 32313 - RNA, 19 nt, Synthetic Construct
  source 1..19: mol_type = other RNA
atcacattgccagggattt

SEQ ID NO: 32314 - RNA, 19 nt, Synthetic Construct
  source 1..19: mol_type = other RNA
atcacattgccagggattt

SEQ ID NO: 32315 - RNA, 25 nt, Synthetic Construct
  source 1..25: mol_type = other RNA
ggtaaaatggctgagtgaagcattg

SEQ ID NO: 32316 - RNA, 25 nt, Synthetic Construct
  source 1..25: mol_type = other RNA
ggtaaaatggctgagtgaagcattg

SEQ ID NO: 32317 - RNA, 22 nt, Synthetic Construct
  source 1..22: mol_type = other RNA
tattgtacttgtcccggcctgt

SEQ ID NO: 32318 - RNA, 22 nt, Synthetic Construct
  source 1..22: mol_type = other RNA
tattgtacttgtcccggcctgt

SEQ ID NO: 32319 - RNA, 16 nt, Synthetic Construct
  source 1..16: mol_type = other RNA
ctctacggccatacca

SEQ ID NO: 32320 - RNA, 16 nt, Synthetic Construct
  source 1..16: mol_type = other RNA
ctctacggccatacca

SEQ ID NO: 32321 - RNA, 25 nt, Synthetic Construct
  source 1..25: mol_type = other RNA
tgtaaacatccccgactggaagctt

SEQ ID NO: 32322 - RNA, 25 nt, Synthetic Construct
  source 1..25: mol_type = other RNA
tgtaaacatccccgactggaagctt

SEQ ID NO: 32323 - RNA, 17 nt, Synthetic Construct
  source 1..17: mol_type = other RNA
gtccggatcgtagtctg

SEQ ID NO: 32324 - RNA, 17 nt, Synthetic Construct
  source 1..17: mol_type = other RNA
gtccggatcgtagtctg

SEQ ID NO: 32325 - RNA, 23 nt, Synthetic Construct
  source 1..23: mol_type = other RNA
agctcggtctgaggcccctcagt

SEQ ID NO: 32326 - RNA, 23 nt, Synthetic Construct
  source 1..23: mol_type = other RNA
agctcggtctgaggcccctcagt

SEQ ID NO: 32327 - RNA, 26 nt, Synthetic Construct
  source 1..26: mol_type = other RNA
gacttaccaaacctatgcaaactccg

SEQ ID NO: 32328 - RNA, 35 nt, Synthetic Construct; identical to SEQ ID NO: 2399
  source 1..35: mol_type = other RNA

SEQ ID NO: 32329 - RNA, 35 nt, Synthetic Construct; identical to SEQ ID NO: 2399
  source 1..35: mol_type = other RNA

SEQ ID NO: 32330 - RNA, 17 nt, Synthetic Construct
  source 1..17: mol_type = other RNA
ttggagggcaagtctgg

SEQ ID NO: 32331 - RNA, 17 nt, Synthetic Construct
  source 1..17: mol_type = other RNA
ttggagggcaagtctgg

SEQ ID NO: 32332 - RNA, 18 nt, Synthetic Construct
  source 1..18: mol_type = other RNA
tctaatgagactgccggt

SEQ ID NO: 32333 - RNA, 22 nt, Synthetic Construct
  source 1..22: mol_type = other RNA
tcgtaccgtgagtaataatgcg

SEQ ID NO: 32334 - RNA, 22 nt, Synthetic Construct
  source 1..22: mol_type = other RNA
tgaggtagtaggttgcatagtt

SEQ ID NO: 32335 - RNA, 22 nt, Synthetic Construct
  source 1..22: mol_type = other RNA
tgaggtagtaggttgcatagtt

SEQ ID NO: 32336 - RNA, 22 nt, Synthetic Construct
  source 1..22: mol_type = other RNA
tgaggtagtaggctgtgtggtt

SEQ ID NO: 32337 - RNA, 18 nt, Synthetic Construct
  source 1..18: mol_type = other RNA
cgtgttcggaagattttc

SEQ ID NO: 32338 - RNA, 18 nt, Synthetic Construct
  source 1..18: mol_type = other RNA
cgtgttcggaagattttc

SEQ ID NO: 32339 - RNA, 21 nt, Synthetic Construct
  source 1..21: mol_type = other RNA
taactccttaagcgaattcgc

SEQ ID NO: 32340 - RNA, 21 nt, Synthetic Construct
  source 1..21: mol_type = other RNA
taactccttaagcgaattcgc

SEQ ID NO: 32341 - RNA, 24 nt, Synthetic Construct
  source 1..24: mol_type = other RNA
tgtaaacatccccgactggaagcc

SEQ ID NO: 32342 - RNA, 24 nt, Synthetic Construct
  source 1..24: mol_type = other RNA
tgtaaacatccccgactggaagcc

SEQ ID NO: 32343 - RNA, 22 nt, Synthetic Construct
  source 1..22: mol_type = other RNA
tagcatatcgagcctgagaaca

SEQ ID NO: 32344 - RNA, 22 nt, Synthetic Construct
  source 1..22: mol_type = other RNA
tagcatatcgagcctgagaaca

SEQ ID NO: 32345 - RNA, 22 nt, Synthetic Construct
  source 1..22: mol_type = other RNA
tcctgtattgagctgccccgag

SEQ ID NO: 32346 - RNA, 22 nt, Synthetic Construct
  source 1..22: mol_type = other RNA
tcctgtattgagctgccccgag

SEQ ID NO: 32347 - RNA, 27 nt, Synthetic Construct
  source 1..27: mol_type = other RNA
ccccccattgctaaatttgactggctt

SEQ ID NO: 32348 - RNA, 25 nt, Synthetic Construct
  source 1..25: mol_type = other RNA
ttgaggatatgagatcgagacaaca

SEQ ID NO: 32349 - RNA, 23 nt, Synthetic Construct
  source 1..23: mol_type = other RNA
tgagaactgaattccatgggttt

SEQ ID NO: 32350 - RNA, 23 nt, Synthetic Construct
  source 1..23: mol_type = other RNA
tgagaactgaattccatgggttt

SEQ ID NO: 32351 - RNA, 22 nt, Synthetic Construct
  source 1..22: mol_type = other RNA
tcctgtaatgagctgccccgag

SEQ ID NO: 32352 - RNA, 22 nt, Synthetic Construct
  source 1..22: mol_type = other RNA
tcctgtaatgagctgccccgag

SEQ ID NO: 32353 - RNA, 27 nt, Synthetic Construct
  source 1..27: mol_type = other RNA
ccccccactgctaaatctgactggctt

SEQ ID NO: 32354 - RNA, 27 nt, Synthetic Construct
  source 1..27: mol_type = other RNA
ccccccactgctaaatctgactggctt

SEQ ID NO: 32355 - RNA, 22 nt, Synthetic Construct
  source 1..22: mol_type = other RNA
tattgtacttgtcccggcctgt

SEQ ID NO: 32356 - RNA, 22 nt, Synthetic Construct
  source 1..22: mol_type = other RNA
tattgtacttgtcccggcctgt

SEQ ID NO: 32357 - RNA, 19 nt, Synthetic Construct
  source 1..19: mol_type = other RNA
agttggtccgagtgttgtg

SEQ ID NO: 32358 - RNA, 22 nt, Synthetic Construct
  source 1..22: mol_type = other RNA
tgtggtagtagtttgtgctgtt

SEQ ID NO: 32359 - RNA, 22 nt, Synthetic Construct
  source 1..22: mol_type = other RNA
tgtggtagtagtttgtgctgtt

SEQ ID NO: 32360 - RNA, 20 nt, Synthetic Construct
  source 1..20: mol_type = other RNA
tgaggtagcaggttgtatag

SEQ ID NO: 32361 - RNA, 20 nt, Synthetic Construct
  source 1..20: mol_type = other RNA
tgaggtagcaggttgtatag

SEQ ID NO: 32362 - RNA, 20 nt, Synthetic Construct
  source 1..20: mol_type = other RNA
tgaggtagtaggttgtgtgt

SEQ ID NO: 32363 - RNA, 20 nt, Synthetic Construct
  source 1..20: mol_type = other RNA
tgaggtagtaggttgtgtgt

SEQ ID NO: 32364 - RNA, 22 nt, Synthetic Construct
  source 1..22: mol_type = other RNA
tgagatagtaggttgtgtggtt

SEQ ID NO: 32365 - RNA, 22 nt, Synthetic Construct
  source 1..22: mol_type = other RNA
tgagatagtaggttgtgtggtt

SEQ ID NO: 32366 - RNA, 19 nt, Synthetic Construct
  source 1..19: mol_type = other RNA
atagggaacgtgagctggg

SEQ ID NO: 32367 - RNA, 19 nt, Synthetic Construct
  source 1..19: mol_type = other RNA
atagggaacgtgagctggg

SEQ ID NO: 32368 - RNA, 33 nt, Synthetic Construct; identical to SEQ ID NO: 7224
  source 1..33: mol_type = other RNA

SEQ ID NO: 32369 - RNA, 33 nt, Synthetic Construct; identical to SEQ ID NO: 7224
  source 1..33: mol_type = other RNA

SEQ ID NO: 32370 - RNA, 21 nt, Synthetic Construct
  source 1..21: mol_type = other RNA
tcctgcactgagctgccccga

SEQ ID NO: 32371 - RNA, 23 nt, Synthetic Construct
  source 1..23: mol_type = other RNA
tcccgtactgagctgccccgaga

SEQ ID NO: 32372 - RNA, 21 nt, Synthetic Construct
  source 1..21: mol_type = other RNA
actcggcgtggcgtcggtcgt

SEQ ID NO: 32373 - RNA, 22 nt, Synthetic Construct
  source 1..22: mol_type = other RNA
tatatatatatatgtacgtatg

SEQ ID NO: 32374 - RNA, 22 nt, Synthetic Construct
  source 1..22: mol_type = other RNA
tcttgtactgagctgccccgag

SEQ ID NO: 32375 - RNA, 22 nt, Synthetic Construct
  source 1..22: mol_type = other RNA
ggtcggcccacggccctggcgg

SEQ ID NO: 32376 - RNA, 22 nt, Synthetic Construct
  source 1..22: mol_type = other RNA
ggtcggcccacggccctggcgg

SEQ ID NO: 32377 - RNA, 24 nt, Synthetic Construct
  source 1..24: mol_type = other RNA
tgaggtagtaggttgtgtggtttc

SEQ ID NO: 32378 - RNA, 22 nt, Synthetic Construct
  source 1..22: mol_type = other RNA
tcctgtactgagctgtcccgag

SEQ ID NO: 32379 - RNA, 32 nt, Synthetic Construct; identical to SEQ ID NO: 2582
  source 1..32: mol_type = other RNA

SEQ ID NO: 32380 - RNA, 32 nt, Synthetic Construct; identical to SEQ ID NO: 2582
  source 1..32: mol_type = other RNA

SEQ ID NO: 32381 - RNA, 23 nt, Synthetic Construct
  source 1..23: mol_type = other RNA
atgacacgatcactcccgttgag

SEQ ID NO: 32382 - RNA, 23 nt, Synthetic Construct
  source 1..23: mol_type = other RNA
atgacacgatcactcccgttgag

SEQ ID NO: 32383 - RNA, 22 nt, Synthetic Construct
  source 1..22: mol_type = other RNA
tgaggaagtagtttgtgctgtt

SEQ ID NO: 32384 - RNA, 22 nt, Synthetic Construct
  source 1..22: mol_type = other RNA
tagcagcacgtaaatattggca

SEQ ID NO: 32385 - RNA, 23 nt, Synthetic Construct
  source 1..23: mol_type = other RNA
tgaagggcagagagcgagacttt

SEQ ID NO: 32386 - RNA, 23 nt, Synthetic Construct
  source 1..23: mol_type = other RNA
tgaagggcagagagcgagacttt

SEQ ID NO: 32387 - RNA, 22 nt, Synthetic Construct
  source 1..22: mol_type = other RNA
tgaggtagtaggttgtggggtt

SEQ ID NO: 32388 - RNA, 22 nt, Synthetic Construct
  source 1..22: mol_type = other RNA
tgaggtagtaggttgtggggtt

SEQ ID NO: 32389 - RNA, 22 nt, Synthetic Construct
  source 1..22: mol_type = other RNA
tgaggtagtaggtcgtgtggtt

SEQ ID NO: 32390 - RNA, 36 nt, Synthetic Construct; identical to SEQ ID NO: 2469
  source 1..36: mol_type = other RNA

SEQ ID NO: 32391 - RNA, 36 nt, Synthetic Construct; identical to SEQ ID NO: 2469
  source 1..36: mol_type = other RNA

SEQ ID NO: 32392 - RNA, 23 nt, Synthetic Construct
  source 1..23: mol_type = other RNA
tagcaccatttgaaatcagtgtt

SEQ ID NO: 32393 - RNA, 23 nt, Synthetic Construct
  source 1..23: mol_type = other RNA
tagcaccatttgaaatcagtgtt

SEQ ID NO: 32394 - RNA, 22 nt, Synthetic Construct
  source 1..22: mol_type = other RNA
tcctgtactgagctgcctcgag

SEQ ID NO: 32395 - RNA, 16 nt, Synthetic Construct
  source 1..16: mol_type = other RNA
ctctacggccatacca

SEQ ID NO: 32396 - RNA, 16 nt, Synthetic Construct
  source 1..16: mol_type = other RNA
ctctacggccatacca

SEQ ID NO: 32397 - RNA, 21 nt, Synthetic Construct
  source 1..21: mol_type = other RNA
caaagtgctgttcgtgcaggt

SEQ ID NO: 32398 - RNA, 21 nt, Synthetic Construct
  source 1..21: mol_type = other RNA
caaagtgctgttcgtgcaggt

SEQ ID NO: 32399 - RNA, 22 nt, Synthetic Construct
  source 1..22: mol_type = other RNA
ggtcggcccacggccctggcgg

SEQ ID NO: 32400 - RNA, 22 nt, Synthetic Construct
  source 1..22: mol_type = other RNA
ggtcggcccacggccctggcgg

SEQ ID NO: 32401 - RNA, 21 nt, Synthetic Construct
  source 1..21: mol_type = other RNA
tccctgtcctccaggagctca

SEQ ID NO: 32402 - RNA, 32 nt, Synthetic Construct; identical to SEQ ID NO: 7323
  source 1..32: mol_type = other RNA

SEQ ID NO: 32403 - RNA, 20 nt, Synthetic Construct
  source 1..20: mol_type = other RNA
tgaggtggtaggttgtgtgg

SEQ ID NO: 32404 - RNA, 22 nt, Synthetic Construct
  source 1..22: mol_type = other RNA
tgaggtagtagtttgtgctgtg

SEQ ID NO: 32405 - RNA, 22 nt, Synthetic Construct
  source 1..22: mol_type = other RNA
tgaggtagtagtttgtgctgtg

SEQ ID NO: 32406 - RNA, 23 nt, Synthetic Construct
  source 1..23: mol_type = other RNA
tggaatgtaaagaagtatgtatt

SEQ ID NO: 32407 - RNA, 22 nt, Synthetic Construct
  source 1..22: mol_type = other RNA
gaagcacattcgcacatcatat

SEQ ID NO: 32408 - RNA, 22 nt, Synthetic Construct
  source 1..22: mol_type = other RNA
gaagcacattcgcacatcatat

SEQ ID NO: 32409 - RNA, 24 nt, Synthetic Construct
  source 1..24: mol_type = other RNA
tgtaaacaaccccgactggaagct

SEQ ID NO: 32410 - RNA, 22 nt, Synthetic Construct
  source 1..22: mol_type = other RNA
tggaatgtaaagaagtatgtat

SEQ ID NO: 32411 - RNA, 33 nt, Synthetic Construct; identical to SEQ ID NO: 2638
  source 1..33: mol_type = other RNA

SEQ ID NO: 32412 - RNA, 22 nt, Synthetic Construct
  source 1..22: mol_type = other RNA
aggaatgtaaagaagtatgtat

SEQ ID NO: 32413 - RNA, 24 nt, Synthetic Construct
  source 1..24: mol_type = other RNA
tgtaaacacccccgactggaagct

SEQ ID NO: 32414 - RNA, 24 nt, Synthetic Construct
  source 1..24: mol_type = other RNA
tgtaaacacccccgactggaagct

SEQ ID NO: 32415 - RNA, 20 nt, Synthetic Construct
  source 1..20: mol_type = other RNA
tcagtagctcgaggaaaaga

SEQ ID NO: 32416 - RNA, 20 nt, Synthetic Construct
  source 1..20: mol_type = other RNA
tcagtagctcgaggaaaaga

SEQ ID NO: 32417 - RNA, 21 nt, Synthetic Construct
  source 1..21: mol_type = other RNA
agcagcattgtacagggctat

SEQ ID NO: 32418 - RNA, 21 nt, Synthetic Construct
  source 1..21: mol_type = other RNA
agcagcattgtacagggctat

SEQ ID NO: 32419 - RNA, 28 nt, Synthetic Construct
  source 1..28: mol_type = other RNA
agcgctgagaagacggtcgaacttgact

SEQ ID NO: 32420 - RNA, 21 nt, Synthetic Construct
  source 1..21: mol_type = other RNA
tggagagtgacaatggtgttt

SEQ ID NO: 32421 - RNA, 22 nt, Synthetic Construct
  source 1..22: mol_type = other RNA
tcaggctcagtcccctcccgat

SEQ ID NO: 32422 - RNA, 22 nt, Synthetic Construct
  source 1..22: mol_type = other RNA
tcaggctcagtcccctcccgat

SEQ ID NO: 32423 - RNA, 21 nt, Synthetic Construct
  source 1..21: mol_type = other RNA
tgaggtagtaggttgtgtggt

SEQ ID NO: 32424 - RNA, 21 nt, Synthetic Construct
  source 1..21: mol_type = other RNA
tgaggtagtaggttgtgtggt

SEQ ID NO: 32425 - RNA, 22 nt, Synthetic Construct
  source 1..22: mol_type = other RNA
tagcagcacataatggtttgtg

SEQ ID NO: 32426 - RNA, 22 nt, Synthetic Construct
  source 1..22: mol_type = other RNA
tagcagcacataatggtttgtg

SEQ ID NO: 32427 - RNA, 22 nt, Synthetic Construct
  source 1..22: mol_type = other RNA
tgaggtagtagtctgtgctgtt

SEQ ID NO: 32428 - RNA, 22 nt, Synthetic Construct
  source 1..22: mol_type = other RNA
tgaggtagtagtctgtgctgtt

SEQ ID NO: 32429 - RNA, 23 nt, Synthetic Construct
  source 1..23: mol_type = other RNA
cgagagtaggacgttgccaggtt

SEQ ID NO: 32430 - RNA, 23 nt, Synthetic Construct
  source 1..23: mol_type = other RNA
cgagagtaggacgttgccaggtt

SEQ ID NO: 32431 - RNA, 21 nt, Synthetic Construct
  source 1..21: mol_type = other RNA
ttataatacaacctgataagt

SEQ ID NO: 32432 - RNA, 21 nt, Synthetic Construct
  source 1..21: mol_type = other RNA
ttataatacaacctgataagt

SEQ ID NO: 32433 - RNA, 23 nt, Synthetic Construct
  source 1..23: mol_type = other RNA
tggaatgtaaagaagtatgtatt

SEQ ID NO: 32434 - RNA, 23 nt, Synthetic Construct
  source 1..23: mol_type = other RNA
tggaatgtaaagaagtatgtatt

SEQ ID NO: 32435 - RNA, 20 nt, Synthetic Construct
  source 1..20: mol_type = other RNA
taaggtagtaggttgtgtgg

SEQ ID NO: 32436 - RNA, 21 nt, Synthetic Construct
  source 1..21: mol_type = other RNA
tgaggtagtaggtcgtgtggt

SEQ ID NO: 32437 - RNA, 23 nt, Synthetic Construct
  source 1..23: mol_type = other RNA
tcccgtactgagctgccccgagt

SEQ ID NO: 32438 - RNA, 21 nt, Synthetic Construct
  source 1..21: mol_type = other RNA
tcctgtactgagctgccctga

SEQ ID NO: 32439 - RNA, 21 nt, Synthetic Construct
  source 1..21: mol_type = other RNA
tcctgtactgagctgccctga

SEQ ID NO: 32440 - RNA, 31 nt, Synthetic Construct; identical to SEQ ID NO: 2442
  source 1..31: mol_type = other RNA

SEQ ID NO: 32441 - RNA, 31 nt, Synthetic Construct; identical to SEQ ID NO: 2442
  source 1..31: mol_type = other RNA

SEQ ID NO: 32442 - RNA, 16 nt, Synthetic Construct
  source 1..16: mol_type = other RNA
gtctacggccataccc

SEQ ID NO: 32443 - RNA, 16 nt, Synthetic Construct
  source 1..16: mol_type = other RNA
gtctacggccataccc

SEQ ID NO: 32444 - RNA, 30 nt, Synthetic Construct; identical to SEQ ID NO: 6405
  source 1..30: mol_type = other RNA

SEQ ID NO: 32445 - RNA, 30 nt, Synthetic Construct; identical to SEQ ID NO: 6405
  source 1..30: mol_type = other RNA

SEQ ID NO: 32446 - RNA, 34 nt, Synthetic Construct; identical to SEQ ID NO: 2291
  source 1..34: mol_type = other RNA

SEQ ID NO: 32447 - RNA, 21 nt, Synthetic Construct
  source 1..21: mol_type = other RNA
aagacgggaggaaagaaggga

SEQ ID NO: 32448 - RNA, 27 nt, Synthetic Construct
  source 1..27: mol_type = other RNA
ncccccactgctaaatttgactggctt

SEQ ID NO: 32449 - RNA, 22 nt, Synthetic Construct
  source 1..22: mol_type = other RNA
tcagtagctcgaggaaaagaca

SEQ ID NO: 32450 - RNA, 23 nt, Synthetic Construct
  source 1..23: mol_type = other RNA
aatgacacgatcactcccgttga

SEQ ID NO: 32451 - RNA, 22 nt, Synthetic Construct
  source 1..22: mol_type = other RNA
tgaggtagtagtctgtgctgtt

SEQ ID NO: 32452 - RNA, 22 nt, Synthetic Construct
  source 1..22: mol_type = other RNA
tattgcacttgtcccggcctat

SEQ ID NO: 32453 - RNA, 22 nt, Synthetic Construct
  source 1..22: mol_type = other RNA
tattgcacttgtcccggcctat

SEQ ID NO: 32454 - RNA, 22 nt, Synthetic Construct
  source 1..22: mol_type = other RNA
agggggaaagttctatagtcct

SEQ ID NO: 32455 - RNA, 22 nt, Synthetic Construct
  source 1..22: mol_type = other RNA
agggggaaagttctatagtcct

SEQ ID NO: 32456 - RNA, 28 nt, Synthetic Construct
  source 1..28: mol_type = other RNA
ccgtgtgaaagtaggtcatcgtcaggct

SEQ ID NO: 32457 - RNA, 28 nt, Synthetic Construct
  source 1..28: mol_type = other RNA
ccgtgtgaaagtaggtcatcgtcaggct

SEQ ID NO: 32458 - RNA, 21 nt, Synthetic Construct
  source 1..21: mol_type = other RNA
gggagtgtgacaatggtgttt

SEQ ID NO: 32459 - RNA, 21 nt, Synthetic Construct
  source 1..21: mol_type = other RNA
gggagtgtgacaatggtgttt

SEQ ID NO: 32460 - RNA, 21 nt, Synthetic Construct
  source 1..21: mol_type = other RNA
tcctgtactgagctgccccgg

SEQ ID NO: 32461 - RNA, 21 nt, Synthetic Construct
  source 1..21: mol_type = other RNA
tcctgtactgagctgccccgg

SEQ ID NO: 32462 - RNA, 20 nt, Synthetic Construct
  source 1..20: mol_type = other RNA
gctattgacgaccgtaccgc

SEQ ID NO: 32463 - RNA, 22 nt, Synthetic Construct
  source 1..22: mol_type = other RNA
aggggcagagagcgagactttt

SEQ ID NO: 32464 - RNA, 22 nt, Synthetic Construct
  source 1..22: mol_type = other RNA
aggggcagagagcgagactttt

SEQ ID NO: 32465 - RNA, 34 nt, Synthetic Construct; identical to SEQ ID NO: 2183
  source 1..34: mol_type = other RNA

SEQ ID NO: 32466 - RNA, 19 nt, Synthetic Construct
  source 1..19: mol_type = other RNA
aaaccgttaccattactga

SEQ ID NO: 32467 - RNA, 19 nt, Synthetic Construct
  source 1..19: mol_type = other RNA
aaaccgttaccattactga

SEQ ID NO: 32468 - RNA, 19 nt, Synthetic Construct
  source 1..19: mol_type = other RNA
acatgcaagtcgaacggta

SEQ ID NO: 32469 - RNA, 30 nt, Synthetic Construct; identical to SEQ ID NO: 1958
  source 1..30: mol_type = other RNA

SEQ ID NO: 32470 - RNA, 30 nt, Synthetic Construct; identical to SEQ ID NO: 1958
  source 1..30: mol_type = other RNA

SEQ ID NO: 32471 - RNA, 22 nt, Synthetic Construct
  source 1..22: mol_type = other RNA
tgaggaagtaggttgtgtggtt

SEQ ID NO: 32472 - RNA, 18 nt, Synthetic Construct
  source 1..18: mol_type = other RNA
cgactcttagcggtggat

SEQ ID NO: 32473 - RNA, 18 nt, Synthetic Construct
  source 1..18: mol_type = other RNA
cgactcttagcggtggat

SEQ ID NO: 32474 - RNA, 22 nt, Synthetic Construct
  source 1..22: mol_type = other RNA
tgagatgaagcactgtagctct

SEQ ID NO: 32475 - RNA, 33 nt, Synthetic Construct; identical to SEQ ID NO: 2395
  source 1..33: mol_type = other RNA

SEQ ID NO: 32476 - RNA, 19 nt, Synthetic Construct
  source 1..19: mol_type = other RNA
aggacagtgaaacgagtca

SEQ ID NO: 32477 - RNA, 22 nt, Synthetic Construct
  source 1..22: mol_type = other RNA
gaactccttaagcgaatctcgc

SEQ ID NO: 32478 - RNA, 16 nt, Synthetic Construct
  source 1..16: mol_type = other RNA
gcctacggccatacca

SEQ ID NO: 32479 - RNA, 23 nt, Synthetic Construct
  source 1..23: mol_type = other RNA
tgtagtgtttcctactttatgga

SEQ ID NO: 32480 - RNA, 23 nt, Synthetic Construct
  source 1..23: mol_type = other RNA
tgtagtgtttcctactttatgga

SEQ ID NO: 32481 - RNA, 21 nt, Synthetic Construct
  source 1..21: mol_type = other RNA
cataaagtagaaagcactact

SEQ ID NO: 32482 - RNA, 24 nt, Synthetic Construct
  source 1..24: mol_type = other RNA
caaagaattctccttttgggcttt

SEQ ID NO: 32483 - RNA, 23 nt, Synthetic Construct
  source 1..23: mol_type = other RNA
tggtaatacaacgtacttagtgt

SEQ ID NO: 32484 - RNA, 22 nt, Synthetic Construct
  source 1..22: mol_type = other RNA
tcctgtactgagctgcctcgag

SEQ ID NO: 32485 - RNA, 22 nt, Synthetic Construct
  source 1..22: mol_type = other RNA
tcctgtactgagctgcctcgag

SEQ ID NO: 32486 - RNA, 22 nt, Synthetic Construct
  source 1..22: mol_type = other RNA
cattgcacttgtctcggtctgg

SEQ ID NO: 32487 - RNA, 22 nt, Synthetic Construct
  source 1..22: mol_type = other RNA
cattgcacttgtctcggtctgg

SEQ ID NO: 32488 - RNA, 25 nt, Synthetic Construct
  source 1..25: mol_type = other RNA
tgcgagagtaggacgttgccaggtt

SEQ ID NO: 32489 - RNA, 25 nt, Synthetic Construct
  source 1..25: mol_type = other RNA
tgcgagagtaggacgttgccaggtt

SEQ ID NO: 32490 - RNA, 27 nt, Synthetic Construct
  source 1..27: mol_type = other RNA
ccccccactgctaaattcgactggctt

SEQ ID NO: 32491 - RNA, 24 nt, Synthetic Construct
  source 1..24: mol_type = other RNA
ctcactgatcgagtcgtcctgcgc

SEQ ID NO: 32492 - RNA, 22 nt, Synthetic Construct
  source 1..22: mol_type = other RNA
caaagaattctccttttgggct

SEQ ID NO: 32493 - RNA, 23 nt, Synthetic Construct
  source 1..23: mol_type = other RNA
tgacctatgaattgacagccagt

SEQ ID NO: 32494 - RNA, 23 nt, Synthetic Construct
  source 1..23: mol_type = other RNA
tgacctatgaattgacagccagt

SEQ ID NO: 32495 - RNA, 22 nt, Synthetic Construct
  source 1..22: mol_type = other RNA
tgaggtagtagtttgtgctgtc

SEQ ID NO: 32496 - RNA, 22 nt, Synthetic Construct
  source 1..22: mol_type = other RNA
tgaggtagtagtttgtgctgct

SEQ ID NO: 32497 - RNA, 21 nt, Synthetic Construct
  source 1..21: mol_type = other RNA
cgaggtagtagattgtatagt

SEQ ID NO: 32498 - RNA, 21 nt, Synthetic Construct
  source 1..21: mol_type = other RNA
cgaggtagtagattgtatagt

SEQ ID NO: 32499 - RNA, 22 nt, Synthetic Construct
  source 1..22: mol_type = other RNA
tattgcacttgtcccgacctgt

SEQ ID NO: 32500 - RNA, 21 nt, Synthetic Construct
  source 1..21: mol_type = other RNA
ttaatgctaatcgtgataggg

SEQ ID NO: 32501 - RNA, 21 nt, Synthetic Construct
  source 1..21: mol_type = other RNA
ttaatgctaatcgtgataggg

SEQ ID NO: 32502 - RNA, 33 nt, Synthetic Construct; identical to SEQ ID NO: 7224
  source 1..33: mol_type = other RNA

SEQ ID NO: 32503 - RNA, 33 nt, Synthetic Construct; identical to SEQ ID NO: 7224
  source 1..33: mol_type = other RNA

SEQ ID NO: 32504 - RNA, 25 nt, Synthetic Construct
  source 1..25: mol_type = other RNA
gtcaggatggccgagcggtctaagg

SEQ ID NO: 32505 - RNA, 25 nt, Synthetic Construct
  source 1..25: mol_type = other RNA
gtcaggatggccgagcggtctaagg

SEQ ID NO: 32506 - RNA, 21 nt, Synthetic Construct
  source 1..21: mol_type = other RNA
tccctgtcctccaggagctct

SEQ ID NO: 32507 - RNA, 21 nt, Synthetic Construct
  source 1..21: mol_type = other RNA
tccctgtcctccaggagctct

SEQ ID NO: 32508 - RNA, 22 nt, Synthetic Construct
  source 1..22: mol_type = other RNA
agctacattgtctgctgggttt

SEQ ID NO: 32509 - RNA, 22 nt, Synthetic Construct
  source 1..22: mol_type = other RNA
tattgcatttgtcccggcctgt

SEQ ID NO: 32510 - RNA, 22 nt, Synthetic Construct
  source 1..22: mol_type = other RNA
tattgcacttgtcccgacctgt

SEQ ID NO: 32511 - RNA, 23 nt, Synthetic Construct
  source 1..23: mol_type = other RNA
tggtaatacgacgtacttagagt

SEQ ID NO: 32512 - RNA, 23 nt, Synthetic Construct
  source 1..23: mol_type = other RNA
tggtaatacgacgtacttagagt

SEQ ID NO: 32513 - RNA, 22 nt, Synthetic Construct
  source 1..22: mol_type = other RNA
tgaggtggtaggttgtgtggtt

SEQ ID NO: 32514 - RNA, 22 nt, Synthetic Construct
  source 1..22: mol_type = other RNA
tgaggtggtaggttgtgtggtt

SEQ ID NO: 32515 - RNA, 20 nt, Synthetic Construct
  source 1..20: mol_type = other RNA
tggctcagttcagcaggaaa

SEQ ID NO: 32516 - RNA, 20 nt, Synthetic Construct
  source 1..20: mol_type = other RNA
tggctcagttcagcaggaaa

SEQ ID NO: 32517 - RNA, 22 nt, Synthetic Construct
  source 1..22: mol_type = other RNA
tcggatccgtctgagcttggct

SEQ ID NO: 32518 - RNA, 22 nt, Synthetic Construct
  source 1..22: mol_type = other RNA
tcggatccgtctgagcttggct

SEQ ID NO: 32519 - RNA, 20 nt, Synthetic Construct
  source 1..20: mol_type = other RNA
tcagtagctcgaggaaaaga

SEQ ID NO: 32520 - RNA, 29 nt, Synthetic Construct
  source 1..29: mol_type = other RNA
ccccccccactgctaaatttgactggctt

SEQ ID NO: 32521 - RNA, 22 nt, Synthetic Construct
  source 1..22: mol_type = other RNA
agggctgggtcggtcgggctgg

SEQ ID NO: 32522 - RNA, 22 nt, Synthetic Construct
  source 1..22: mol_type = other RNA
agggctgggtcggtcgggctgg

SEQ ID NO: 32523 - RNA, 22 nt, Synthetic Construct
  source 1..22: mol_type = other RNA
tagcagcacgtaaacattggcg

SEQ ID NO: 32524 - RNA, 22 nt, Synthetic Construct
  source 1..22: mol_type = other RNA
tagcagcacgtaaacattggcg

SEQ ID NO: 32525 - RNA, 22 nt, Synthetic Construct
  source 1..22: mol_type = other RNA
tgaggtagtaggttgtatagct

SEQ ID NO: 32526 - RNA, 22 nt, Synthetic Construct
  source 1..22: mol_type = other RNA
tgaggtagtaggttgtatagct

SEQ ID NO: 32527 - RNA, 23 nt, Synthetic Construct
  source 1..23: mol_type = other RNA
tgaggtagtaggttgtgtggtat

SEQ ID NO: 32528 - RNA, 18 nt, Synthetic Construct
  source 1..18: mol_type = other RNA
gcaggacggtggccatgg

SEQ ID NO: 32529 - RNA, 18 nt, Synthetic Construct
  source 1..18: mol_type = other RNA
gcaggacggtggccatgg

SEQ ID NO: 32530 - RNA, 20 nt, Synthetic Construct
  source 1..20: mol_type = other RNA
caaagtgctgttcgtgcagg

SEQ ID NO: 32531 - RNA, 20 nt, Synthetic Construct
  source 1..20: mol_type = other RNA
caaagtgctgttcgtgcagg

SEQ ID NO: 32532 - RNA, 22 nt, Synthetic Construct
  source 1..22: mol_type = other RNA
tgtgcaaatccatgcaaaactg

SEQ ID NO: 32533 - RNA, 22 nt, Synthetic Construct
  source 1..22: mol_type = other RNA
tgtgcaaatccatgcaaaactg

SEQ ID NO: 32534 - RNA, 22 nt, Synthetic Construct
  source 1..22: mol_type = other RNA
tgaggtagtaggttgtgtggtg

SEQ ID NO: 32535 - RNA, 26 nt, Synthetic Construct
  source 1..26: mol_type = other RNA
aatgacacgatcactcccgttgagtt

SEQ ID NO: 32536 - RNA, 27 nt, Synthetic Construct
  source 1..27: mol_type = other RNA
ccccccacagctaaatttgactggcta

SEQ ID NO: 32537 - RNA, 20 nt, Synthetic Construct
  source 1..20: mol_type = other RNA
gccatcatttaaagaaagcg

SEQ ID NO: 32538 - RNA, 16 nt, Synthetic Construct
  source 1..16: mol_type = other RNA
atctacggccatacca

SEQ ID NO: 32539 - RNA, 16 nt, Synthetic Construct
  source 1..16: mol_type = other RNA
gtctacggccatgcca

SEQ ID NO: 32540 - RNA, 16 nt, Synthetic Construct
  source 1..16: mol_type = other RNA
gtctacggccatgcca

SEQ ID NO: 32541 - RNA, 23 nt, Synthetic Construct
  source 1..23: mol_type = other RNA
tggtaatacgtcgtacttagtgt

SEQ ID NO: 32542 - RNA, 24 nt, Synthetic Construct
  source 1..24: mol_type = other RNA
tgtaaacatccccggctggaagct

SEQ ID NO: 32543 - RNA, 24 nt, Synthetic Construct
  source 1..24: mol_type = other RNA
gaatgttgctcggtgaaccccttt

SEQ ID NO: 32544 - RNA, 24 nt, Synthetic Construct
  source 1..24: mol_type = other RNA
gaatgttgctcggtgaaccccttt

SEQ ID NO: 32545 - RNA, 21 nt, Synthetic Construct
  source 1..21: mol_type = other RNA
cccaatacacggtcgacctct

SEQ ID NO: 32546 - RNA, 21 nt, Synthetic Construct
  source 1..21: mol_type = other RNA
cccaatacacggtcgacctct

SEQ ID NO: 32547 - RNA, 22 nt, Synthetic Construct
  source 1..22: mol_type = other RNA
tcctgcactgagctgccccgag

SEQ ID NO: 32548 - RNA, 16 nt, Synthetic Construct
  source 1..16: mol_type = other RNA
atctacggccatacca

SEQ ID NO: 32549 - RNA, 16 nt, Synthetic Construct
  source 1..16: mol_type = other RNA
gtccggatcgtagtct

SEQ ID NO: 32550 - RNA, 16 nt, Synthetic Construct
  source 1..16: mol_type = other RNA
gtccggatcgtagtct

SEQ ID NO: 32551 - RNA, 32 nt, Synthetic Construct; identical to SEQ ID NO: 2435
  source 1..32: mol_type = other RNA

SEQ ID NO: 32552 - RNA, 32 nt, Synthetic Construct; identical to SEQ ID NO: 2435
  source 1..32: mol_type = other RNA

SEQ ID NO: 32553 - RNA, 27 nt, Synthetic Construct
  source 1..27: mol_type = other RNA
ccccccactgctaaatttggctggcta

SEQ ID NO: 32554 - RNA, 27 nt, Synthetic Construct
  source 1..27: mol_type = other RNA
ccccccactgctagatttgactggctt

SEQ ID NO: 32555 - RNA, 27 nt, Synthetic Construct
  source 1..27: mol_type = other RNA
ccccccactgctagatttgactggctt

SEQ ID NO: 32556 - RNA, 23 nt, Synthetic Construct
  source 1..23: mol_type = other RNA
tcctgtactgagctgccccgagc

SEQ ID NO: 32557 - RNA, 23 nt, Synthetic Construct
  source 1..23: mol_type = other RNA
tcctgtactgagctgccccgagc

SEQ ID NO: 32558 - RNA, 27 nt, Synthetic Construct
  source 1..27: mol_type = other RNA
ccgtgtgaaagtaggtcatcgtcaggc

SEQ ID NO: 32559 - RNA, 27 nt, Synthetic Construct
  source 1..27: mol_type = other RNA
ccgtgtgaaagtaggtcatcgtcaggc

SEQ ID NO: 32560 - RNA, 31 nt, Synthetic Construct
  source 1..31: mol_type = other RNA
gcatgggtggttcagtggtagaattctcgcc

SEQ ID NO: 32561 - RNA, 23 nt, Synthetic Construct
  source 1..23: mol_type = other RNA
tgaggggcagagagtgagacttt

SEQ ID NO: 32562 - RNA, 23 nt, Synthetic Construct
  source 1..23: mol_type = other RNA
tgaggggcagagagtgagacttt

SEQ ID NO: 32563 - RNA, 24 nt, Synthetic Construct
  source 1..24: mol_type = other RNA
tgtaaacatccccgactggaagcc

SEQ ID NO: 32564 - RNA, 16 nt, Synthetic Construct
  source 1..16: mol_type = other RNA
gaacgtgagctgggtt

SEQ ID NO: 32565 - RNA, 16 nt, Synthetic Construct
  source 1..16: mol_type = other RNA
gaacgtgagctgggtt

SEQ ID NO: 32566 - RNA, 23 nt, Synthetic Construct
  source 1..23: mol_type = other RNA
agctacattgtctgctgggtttt

SEQ ID NO: 32567 - RNA, 23 nt, Synthetic Construct
  source 1..23: mol_type = other RNA
tgaggtagtaggttgtgtggtaa

SEQ ID NO: 32568 - RNA, 23 nt, Synthetic Construct
  source 1..23: mol_type = other RNA
tgaggtagtaggttgtgtggtaa

SEQ ID NO: 32569 - RNA, 22 nt, Synthetic Construct
  source 1..22: mol_type = other RNA
tcagtgcactacagaactttga

SEQ ID NO: 32570 - RNA, 21 nt, Synthetic Construct
  source 1..21: mol_type = other RNA
cagcattgtacagggctatga

SEQ ID NO: 32571 - RNA, 20 nt, Synthetic Construct
  source 1..20: mol_type = other RNA
tgagatagtaggttgtgtgg

SEQ ID NO: 32572 - RNA, 27 nt, Synthetic Construct
  source 1..27: mol_type = other RNA
catgcgagagtaggacgttgccaggtt

SEQ ID NO: 32573 - RNA, 27 nt, Synthetic Construct
  source 1..27: mol_type = other RNA
catgcgagagtaggacgttgccaggtt

SEQ ID NO: 32574 - RNA, 20 nt, Synthetic Construct
  source 1..20: mol_type = other RNA
tcagtagctcgaggaaaaga

SEQ ID NO: 32575 - RNA, 30 nt, Synthetic Construct; identical to SEQ ID NO: 1771
  source 1..30: mol_type = other RNA

SEQ ID NO: 32576 - RNA, 30 nt, Synthetic Construct; identical to SEQ ID NO: 1771
  source 1..30: mol_type = other RNA

SEQ ID NO: 32577 - RNA, 20 nt, Synthetic Construct
  source 1..20: mol_type = other RNA
tgaggtagtgggttgtgtgg

SEQ ID NO: 32578 - RNA, 22 nt, Synthetic Construct
  source 1..22: mol_type = other RNA
cccagtgttcagactacctgtt

SEQ ID NO: 32579 - RNA, 22 nt, Synthetic Construct
  source 1..22: mol_type = other RNA
cccagtgttcagactacctgtt

SEQ ID NO: 32580 - RNA, 23 nt, Synthetic Construct
  source 1..23: mol_type = other RNA
tagcaccatttgaaatcagtgtt

SEQ ID NO: 32581 - RNA, 21 nt, Synthetic Construct
  source 1..21: mol_type = other RNA
tgaggtagtaggttgtgcggt

SEQ ID NO: 32582 - RNA, 22 nt, Synthetic Construct
  source 1..22: mol_type = other RNA
tgaggtagtaggttgtgtggct

SEQ ID NO: 32583 - RNA, 22 nt, Synthetic Construct
  source 1..22: mol_type = other RNA
tgaggtagtaggttgtgtggct

SEQ ID NO: 32584 - RNA, 22 nt, Synthetic Construct
  source 1..22: mol_type = other RNA
ttctgtactgagctgccccgag

SEQ ID NO: 32585 - RNA, 20 nt, Synthetic Construct
  source 1..20: mol_type = other RNA
tggggtagtaggttgtatag

SEQ ID NO: 32586 - RNA, 20 nt, Synthetic Construct
  source 1..20: mol_type = other RNA
tggggtagtaggttgtatag

SEQ ID NO: 32587 - RNA, 25 nt, Synthetic Construct
  source 1..25: mol_type = other RNA
gtgaggatatgagatcgagacgaca

SEQ ID NO: 32588 - RNA, 22 nt, Synthetic Construct
  source 1..22: mol_type = other RNA
tattgcaattgtcccggcctgt

SEQ ID NO: 32589 - RNA, 22 nt, Synthetic Construct
  source 1..22: mol_type = other RNA
tattgcaattgtcccggcctgt

SEQ ID NO: 32590 - RNA, 22 nt, Synthetic Construct
  source 1..22: mol_type = other RNA
tagcagcacataaatattggcg

SEQ ID NO: 32591 - RNA, 22 nt, Synthetic Construct
  source 1..22: mol_type = other RNA
tagcagcacataaatattggcg

SEQ ID NO: 32592 - RNA, 23 nt, Synthetic Construct
  source 1..23: mol_type = other RNA
tgaagggcagagagcgagacttt

SEQ ID NO: 32593 - RNA, 16 nt, Synthetic Construct
  source 1..16: mol_type = other RNA
gtccggatcgtagtct

SEQ ID NO: 32594 - RNA, 16 nt, Synthetic Construct
  source 1..16: mol_type = other RNA
gtccggatcgtagtct

SEQ ID NO: 32595 - RNA, 21 nt, Synthetic Construct
  source 1..21: mol_type = other RNA
tgaggtagtagcttgtgctgt

SEQ ID NO: 32596 - RNA, 21 nt, Synthetic Construct
  source 1..21: mol_type = other RNA
tgaggtagtagcttgtgctgt

SEQ ID NO: 32597 - RNA, 24 nt, Synthetic Construct
  source 1..24: mol_type = other RNA
tgaggtagtagattgtatagtttt

SEQ ID NO: 32598 - RNA, 24 nt, Synthetic Construct
  source 1..24: mol_type = other RNA
tgaggtagtagattgtatagtttt

SEQ ID NO: 32599 - RNA, 27 nt, Synthetic Construct
  source 1..27: mol_type = other RNA
ccccccactgctaaatctgactggctt

SEQ ID NO: 32600 - RNA, 27 nt, Synthetic Construct
  source 1..27: mol_type = other RNA
ccccccactgctaaatctgactggctt

SEQ ID NO: 32601 - RNA, 23 nt, Synthetic Construct
  source 1..23: mol_type = other RNA
tcctgtactgagctgctccgaga

SEQ ID NO: 32602 - RNA, 18 nt, Synthetic Construct
  source 1..18: mol_type = other RNA
gttctacagtccgacgat

SEQ ID NO: 32603 - RNA, 18 nt, Synthetic Construct
  source 1..18: mol_type = other RNA
gttctacagtccgacgat

SEQ ID NO: 32604 - RNA, 21 nt, Synthetic Construct
  source 1..21: mol_type = other RNA
tgaggtagtagattgtatagc

SEQ ID NO: 32605 - RNA, 22 nt, Synthetic Construct
  source 1..22: mol_type = other RNA
tcagtagctcgaggaaaagaca

SEQ ID NO: 32606 - RNA, 23 nt, Synthetic Construct
  source 1..23: mol_type = other RNA
cgagagtaggacgttgccaggtt

SEQ ID NO: 32607 - RNA, 23 nt, Synthetic Construct
  source 1..23: mol_type = other RNA
cgagagtaggacgttgccaggtt

SEQ ID NO: 32608 - RNA, 22 nt, Synthetic Construct
  source 1..22: mol_type = other RNA
tggagtgtgacaatggcgtttg

SEQ ID NO: 32609 - RNA, 22 nt, Synthetic Construct
  source 1..22: mol_type = other RNA
tggagtgtgacaatggcgtttg

SEQ ID NO: 32610 - RNA, 21 nt, Synthetic Construct
  source 1..21: mol_type = other RNA
tgaggtggtaggttgtatagt

SEQ ID NO: 32611 - RNA, 21 nt, Synthetic Construct
  source 1..21: mol_type = other RNA
tgaggtggtaggttgtatagt

SEQ ID NO: 32612 - RNA, 23 nt, Synthetic Construct
  source 1..23: mol_type = other RNA
agctacattgtctgctgggttcc

SEQ ID NO: 32613 - RNA, 23 nt, Synthetic Construct
  source 1..23: mol_type = other RNA
tcccgtactgagctgccccgaga

SEQ ID NO: 32614 - RNA, 16 nt, Synthetic Construct
  source 1..16: mol_type = other RNA
tgcgtagatatgcgga

SEQ ID NO: 32615 - RNA, 16 nt, Synthetic Construct
  source 1..16: mol_type = other RNA
tgcgtagatatgcgga

SEQ ID NO: 32616 - RNA, 17 nt, Synthetic Construct
  source 1..17: mol_type = other RNA
tcgctagtaatcgcgga

SEQ ID NO: 32617 - RNA, 17 nt, Synthetic Construct
  source 1..17: mol_type = other RNA
tcgctagtaatcgcgga

SEQ ID NO: 32618 - RNA, 22 nt, Synthetic Construct
  source 1..22: mol_type = other RNA
tgtagtgtttcctactatatgg

SEQ ID NO: 32619 - RNA, 28 nt, Synthetic Construct
  source 1..28: mol_type = other RNA
cttctcactactgcacttgactagtctt

SEQ ID NO: 32620 - RNA, 33 nt, Synthetic Construct; identical to SEQ ID NO: 2253
  source 1..33: mol_type = other RNA

SEQ ID NO: 32621 - RNA, 33 nt, Synthetic Construct; identical to SEQ ID NO: 2253
  source 1..33: mol_type = other RNA

SEQ ID NO: 32622 - RNA, 20 nt, Synthetic Construct
  source 1..20: mol_type = other RNA
tgaggtagcaggttgtgtgg

SEQ ID NO: 32623 - RNA, 23 nt, Synthetic Construct
  source 1..23: mol_type = other RNA
tagtaatacgacgtacttagtgt

SEQ ID NO: 32624 - RNA, 21 nt, Synthetic Construct
  source 1..21: mol_type = other RNA
tgtcttgcaggccgtcatgca

SEQ ID NO: 32625 - RNA, 21 nt, Synthetic Construct
  source 1..21: mol_type = other RNA
tgtcttgcaggccgtcatgca

SEQ ID NO: 32626 - RNA, 22 nt, Synthetic Construct
  source 1..22: mol_type = other RNA
tcctgcactgagctgccccgag

SEQ ID NO: 32627 - RNA, 22 nt, Synthetic Construct
  source 1..22: mol_type = other RNA
tcctgcactgagctgccccgag

SEQ ID NO: 32628 - RNA, 24 nt, Synthetic Construct
  source 1..24: mol_type = other RNA
tgggtaatacgacgtacttagtgt

SEQ ID NO: 32629 - RNA, 19 nt, Synthetic Construct
  source 1..19: mol_type = other RNA
ggctggtccgaaggtagtg

SEQ ID NO: 32630 - RNA, 25 nt, Synthetic Construct
  source 1..25: mol_type = other RNA
tgtcagtttgtcaaataccccattt

SEQ ID NO: 32631 - RNA, 22 nt, Synthetic Construct
  source 1..22: mol_type = other RNA
taggtagtttcctgttgttggg

SEQ ID NO: 32632 - RNA, 23 nt, Synthetic Construct
  source 1..23: mol_type = other RNA
gtaaacatccttgactggaagct

SEQ ID NO: 32633 - RNA, 15 nt, Synthetic Construct
  source 1..15: mol_type = other RNA
gctagtaatcgcgga

SEQ ID NO: 32634 - RNA, 21 nt, Synthetic Construct
  source 1..21: mol_type = other RNA
aatggcgccactagggttgtg

SEQ ID NO: 32635 - RNA, 21 nt, Synthetic Construct
  source 1..21: mol_type = other RNA
aatggcgccactagggttgtg

SEQ ID NO: 32636 - RNA, 22 nt, Synthetic Construct
  source 1..22: mol_type = other RNA
gtaaacggcgggagtaactatg

SEQ ID NO: 32637 - RNA, 17 nt, Synthetic Construct
  source 1..17: mol_type = other RNA
cagagacgagtcgacca

SEQ ID NO: 32638 - RNA, 23 nt, Synthetic Construct
  source 1..23: mol_type = other RNA
agaggggcagagagcgagacttt

SEQ ID NO: 32639 - RNA, 15 nt, Synthetic Construct
  source 1..15: mol_type = other RNA
gtctcgccgacggca

SEQ ID NO: 32640 - RNA, 23 nt, Synthetic Construct
  source 1..23: mol_type = other RNA
tagcttatcagactgatgttgaa

SEQ ID NO: 32641 - RNA, 23 nt, Synthetic Construct
  source 1..23: mol_type = other RNA
tagcttatcagactgatgttgaa

SEQ ID NO: 32642 - RNA, 20 nt, Synthetic Construct
  source 1..20: mol_type = other RNA
tgaggtagtaggtcgtgtgg

SEQ ID NO: 32643 - RNA, 22 nt, Synthetic Construct
  source 1..22: mol_type = other RNA
tgaggtagcagtttgtgctgtt

SEQ ID NO: 32644 - RNA, 19 nt, Synthetic Construct
  source 1..19: mol_type = other RNA
tagcagcacgtaaatattg

SEQ ID NO: 32645 - RNA, 19 nt, Synthetic Construct
  source 1..19: mol_type = other RNA
tagcagcacgtaaatattg

SEQ ID NO: 32646 - RNA, 22 nt, Synthetic Construct
  source 1..22: mol_type = other RNA
tgaggtagcaggttgtgtggtt

SEQ ID NO: 32647 - RNA, 22 nt, Synthetic Construct
  source 1..22: mol_type = other RNA
tgaggtagcaggttgtgtggtt

SEQ ID NO: 32648 - RNA, 35 nt, Synthetic Construct; identical to SEQ ID NO: 12948
  source 1..35: mol_type = other RNA

SEQ ID NO: 32649 - RNA, 35 nt, Synthetic Construct; identical to SEQ ID NO: 12948
  source 1..35: mol_type = other RNA

SEQ ID NO: 32650 - RNA, 23 nt, Synthetic Construct
  source 1..23: mol_type = other RNA
taatactgccgggtaatgatgga

SEQ ID NO: 32651 - RNA, 23 nt, Synthetic Construct
  source 1..23: mol_type = other RNA
taatactgccgggtaatgatgga

SEQ ID NO: 32652 - RNA, 24 nt, Synthetic Construct
  source 1..24: mol_type = other RNA
agcagcattgtacagggctatgtt

SEQ ID NO: 32653 - RNA, 23 nt, Synthetic Construct
  source 1..23: mol_type = other RNA
tggaatgtaaagaagtatgtata

SEQ ID NO: 32654 - RNA, 22 nt, Synthetic Construct
  source 1..22: mol_type = other RNA
tattgcacttgtctcggcctgt

SEQ ID NO: 32655 - RNA, 22 nt, Synthetic Construct
  source 1..22: mol_type = other RNA
tattgcacttgtctcggcctgt

SEQ ID NO: 32656 - RNA, 23 nt, Synthetic Construct
  source 1..23: mol_type = other RNA
tgaggtagtaggttgtgtggtta

SEQ ID NO: 32657 - RNA, 25 nt, Synthetic Construct
  source 1..25: mol_type = other RNA
ttgaggatatgagatcgagacggca

SEQ ID NO: 32658 - RNA, 22 nt, Synthetic Construct
  source 1..22: mol_type = other RNA
tgtggtagtaggttgtgtggtt

SEQ ID NO: 32659 - RNA, 23 nt, Synthetic Construct
  source 1..23: mol_type = other RNA
tgaggaagtaggttgtgtggttt

SEQ ID NO: 32660 - RNA, 23 nt, Synthetic Construct
  source 1..23: mol_type = other RNA
aagcagcacgtaaatattggcgt

SEQ ID NO: 32661 - RNA, 20 nt, Synthetic Construct
  source 1..20: mol_type = other RNA
tgaggtagtaggttgtatgg

SEQ ID NO: 32662 - RNA, 20 nt, Synthetic Construct
  source 1..20: mol_type = other RNA
tgaggtagtaggttgtatgg

SEQ ID NO: 32663 - RNA, 23 nt, Synthetic Construct
  source 1..23: mol_type = other RNA
tgaggtagtgggttgtgtggttt

SEQ ID NO: 32664 - RNA, 23 nt, Synthetic Construct
  source 1..23: mol_type = other RNA
tgaggtagtgggttgtgtggttt

SEQ ID NO: 32665 - RNA, 24 nt, Synthetic Construct
  source 1..24: mol_type = other RNA
gttcgattccggagagggagcctg

SEQ ID NO: 32666 - RNA, 24 nt, Synthetic Construct
  source 1..24: mol_type = other RNA
gttcgattccggagagggagcctg

SEQ ID NO: 32667 - RNA, 16 nt, Synthetic Construct
  source 1..16: mol_type = other RNA
gtctacggccgtacca

SEQ ID NO: 32668 - RNA, 21 nt, Synthetic Construct
  source 1..21: mol_type = other RNA
tgtcagtttgtcaaatacccc

SEQ ID NO: 32669 - RNA, 22 nt, Synthetic Construct
  source 1..22: mol_type = other RNA
gcgtaccgtgagtaataatgcg

SEQ ID NO: 32670 - RNA, 22 nt, Synthetic Construct
  source 1..22: mol_type = other RNA
tgaggtagtagtttgtgccgtt

SEQ ID NO: 32671 - RNA, 20 nt, Synthetic Construct
  source 1..20: mol_type = other RNA
gcatggccgttcttagttgg

SEQ ID NO: 32672 - RNA, 22 nt, Synthetic Construct
  source 1..22: mol_type = other RNA
tcaggtagtaggttgtatagtt

SEQ ID NO: 32673 - RNA, 22 nt, Synthetic Construct
  source 1..22: mol_type = other RNA
tgaggtagtagtttgcgctgtt

SEQ ID NO: 32674 - RNA, 21 nt, Synthetic Construct
  source 1..21: mol_type = other RNA
tggctcagttcagcaggaaca

SEQ ID NO: 32675 - RNA, 21 nt, Synthetic Construct
  source 1..21: mol_type = other RNA
tgaggtagtagattgtgtggt

SEQ ID NO: 32676 - RNA, 21 nt, Synthetic Construct
  source 1..21: mol_type = other RNA
tgaggtagtagattgtgtggt

SEQ ID NO: 32677 - RNA, 23 nt, Synthetic Construct
  source 1..23: mol_type = other RNA
tcctgtactgagctgccccggga

SEQ ID NO: 32678 - RNA, 25 nt, Synthetic Construct
  source 1..25: mol_type = other RNA
tttccccttggggttgtaggaccac

SEQ ID NO: 32679 - RNA, 25 nt, Synthetic Construct
  source 1..25: mol_type = other RNA
tttccccttggggttgtaggaccac

SEQ ID NO: 32680 - RNA, 27 nt, Synthetic Construct
  source 1..27: mol_type = other RNA
ctccccactgctaaatttgactggctt

SEQ ID NO: 32681 - RNA, 24 nt, Synthetic Construct
  source 1..24: mol_type = other RNA
tcctgtactgagctgccccgagat

SEQ ID NO: 32682 - RNA, 24 nt, Synthetic Construct
  source 1..24: mol_type = other RNA
tcctgtactgagctgccccgagat

SEQ ID NO: 32683 - RNA, 26 nt, Synthetic Construct
  source 1..26: mol_type = other RNA
agggctgggtcggtcgggctggggcg

SEQ ID NO: 32684 - RNA, 26 nt, Synthetic Construct
  source 1..26: mol_type = other RNA
agggctgggtcggtcgggctggggcg

SEQ ID NO: 32685 - RNA, 23 nt, Synthetic Construct
  source 1..23: mol_type = other RNA
ccctgtactgagctgccccgaga

SEQ ID NO: 32686 - RNA, 24 nt, Synthetic Construct
  source 1..24: mol_type = other RNA
tttccccttggggttgtaggacca

SEQ ID NO: 32687 - RNA, 24 nt, Synthetic Construct
  source 1..24: mol_type = other RNA
tttccccttggggttgtaggacca

SEQ ID NO: 32688 - RNA, 22 nt, Synthetic Construct
  source 1..22: mol_type = other RNA
ttcaagtaatccaggataggct

SEQ ID NO: 32689 - RNA, 25 nt, Synthetic Construct
  source 1..25: mol_type = other RNA
ttggggatatgagatcgagacgaca

SEQ ID NO: 32690 - RNA, 23 nt, Synthetic Construct
  source 1..23: mol_type = other RNA
tcccgtactgagctgccccgaga

SEQ ID NO: 32691 - RNA, 34 nt, Synthetic Construct; identical to SEQ ID NO: 749
  source 1..34: mol_type = other RNA

SEQ ID NO: 32692 - RNA, 18 nt, Synthetic Construct
  source 1..18: mol_type = other RNA
gtcgacgtatagggtgtg

SEQ ID NO: 32693 - RNA, 18 nt, Synthetic Construct
  source 1..18: mol_type = other RNA
gtcgacgtatagggtgtg

SEQ ID NO: 32694 - RNA, 22 nt, Synthetic Construct
  source 1..22: mol_type = other RNA
tgaggtagtagtttgtgctggt

SEQ ID NO: 32695 - RNA, 22 nt, Synthetic Construct
  source 1..22: mol_type = other RNA
tgaggtagtagtttgtgctggt

SEQ ID NO: 32696 - RNA, 22 nt, Synthetic Construct
  source 1..22: mol_type = other RNA
tgaggtagtaggttgtgaggtt

SEQ ID NO: 32697 - RNA, 23 nt, Synthetic Construct
  source 1..23: mol_type = other RNA
tgaggggcagagagcgggacttt

SEQ ID NO: 32698 - RNA, 23 nt, Synthetic Construct
  source 1..23: mol_type = other RNA
tgaggggcagagagcgggacttt

SEQ ID NO: 32699 - RNA, 21 nt, Synthetic Construct
  source 1..21: mol_type = other RNA
taggtagtttcctgttgttgg

SEQ ID NO: 32700 - RNA, 22 nt, Synthetic Construct
  source 1..22: mol_type = other RNA
gtcagtttgtcaaataccccat

SEQ ID NO: 32701 - RNA, 22 nt, Synthetic Construct
  source 1..22: mol_type = other RNA
tgaggtagtgggttgtgtggtt

SEQ ID NO: 32702 - RNA, 22 nt, Synthetic Construct
  source 1..22: mol_type = other RNA
tgaggtagtgggttgtgtggtt

SEQ ID NO: 32703 - RNA, 21 nt, Synthetic Construct
  source 1..21: mol_type = other RNA
agagttctacagtccgacgat

SEQ ID NO: 32704 - RNA, 21 nt, Synthetic Construct
  source 1..21: mol_type = other RNA
agagttctacagtccgacgat

SEQ ID NO: 32705 - RNA, 23 nt, Synthetic Construct
  source 1..23: mol_type = other RNA
agcagcattgtacagggctatgc

SEQ ID NO: 32706 - RNA, 19 nt, Synthetic Construct
  source 1..19: mol_type = other RNA
atcacattgccagggattt

SEQ ID NO: 32707 - RNA, 19 nt, Synthetic Construct
  source 1..19: mol_type = other RNA
atcacattgccagggattt

SEQ ID NO: 32708 - RNA, 18 nt, Synthetic Construct
  source 1..18: mol_type = other RNA
accggaggaaggtgggga

SEQ ID NO: 32709 - RNA, 23 nt, Synthetic Construct
  source 1..23: mol_type = other RNA
tcctgtactgagctgtcccgaga

SEQ ID NO: 32710 - RNA, 23 nt, Synthetic Construct
  source 1..23: mol_type = other RNA
tcctgtactgagctgtcccgaga

SEQ ID NO: 32711 - RNA, 23 nt, Synthetic Construct
  source 1..23: mol_type = other RNA
ttatggtttgcctgggactgagg

SEQ ID NO: 32712 - RNA, 22 nt, Synthetic Construct
  source 1..22: mol_type = other RNA
tcctgtactgagctgccccaag

SEQ ID NO: 32713 - RNA, 22 nt, Synthetic Construct
  source 1..22: mol_type = other RNA
tcctgtactgagctgccccaag

SEQ ID NO: 32714 - RNA, 23 nt, Synthetic Construct
  source 1..23: mol_type = other RNA
gtcagtttgtcaaataccccatt

SEQ ID NO: 32715 - RNA, 23 nt, Synthetic Construct
  source 1..23: mol_type = other RNA
gtcagtttgtcaaataccccatt

SEQ ID NO: 32716 - RNA, 21 nt, Synthetic Construct
  source 1..21: mol_type = other RNA
tcatgtactgagctgccccga

SEQ ID NO: 32717 - RNA, 21 nt, Synthetic Construct
  source 1..21: mol_type = other RNA
tcatgtactgagctgccccga

SEQ ID NO: 32718 - RNA, 23 nt, Synthetic Construct
  source 1..23: mol_type = other RNA
gactcttagcggtggatcactcg

SEQ ID NO: 32719 - RNA, 24 nt, Synthetic Construct
  source 1..24: mol_type = other RNA
tgagaactgaattccatgggttga

SEQ ID NO: 32720 - RNA, 24 nt, Synthetic Construct
  source 1..24: mol_type = other RNA
tgagaactgaattccatgggttga

SEQ ID NO: 32721 - RNA, 21 nt, Synthetic Construct
  source 1..21: mol_type = other RNA
tgaggggcagagagcgagaca

SEQ ID NO: 32722 - RNA, 24 nt, Synthetic Construct
  source 1..24: mol_type = other RNA
tacagtagtctgcacattggttat

SEQ ID NO: 32723 - RNA, 22 nt, Synthetic Construct
  source 1..22: mol_type = other RNA
tgtggtagtaggttgtatagtt

SEQ ID NO: 32724 - RNA, 22 nt, Synthetic Construct
  source 1..22: mol_type = other RNA
tgtggtagtaggttgtatagtt

SEQ ID NO: 32725 - RNA, 30 nt, Synthetic Construct; identical to SEQ ID NO: 1194
  source 1..30: mol_type = other RNA

SEQ ID NO: 32726 - RNA, 30 nt, Synthetic Construct; identical to SEQ ID NO: 1194
  source 1..30: mol_type = other RNA

SEQ ID NO: 32727 - RNA, 24 nt, Synthetic Construct
  source 1..24: mol_type = other RNA
tgtcagtttgtcaaataccccaac

SEQ ID NO: 32728 - RNA, 17 nt, Synthetic Construct
  source 1..17: mol_type = other RNA
gcagatcttggtggtag

SEQ ID NO: 32729 - RNA, 17 nt, Synthetic Construct
  source 1..17: mol_type = other RNA
gcagatcttggtggtag

SEQ ID NO: 32730 - RNA, 21 nt, Synthetic Construct
  source 1..21: mol_type = other RNA
cggcggggacggcgattggtc

SEQ ID NO: 32731 - RNA, 21 nt, Synthetic Construct
  source 1..21: mol_type = other RNA
cggcggggacggcgattggtc

SEQ ID NO: 32732 - RNA, 31 nt, Synthetic Construct; identical to SEQ ID NO: 4881
  source 1..31: mol_type = other RNA

SEQ ID NO: 32733 - RNA, 31 nt, Synthetic Construct; identical to SEQ ID NO: 4881
  source 1..31: mol_type = other RNA

SEQ ID NO: 32734 - RNA, 27 nt, Synthetic Construct
  source 1..27: mol_type = other RNA
ccccccactgttaaatttgactggctt

SEQ ID NO: 32735 - RNA, 22 nt, Synthetic Construct
  source 1..22: mol_type = other RNA
tgaggtaatagtttgtgctgtt

SEQ ID NO: 32736 - RNA, 34 nt, Synthetic Construct; identical to SEQ ID NO: 2364
  source 1..34: mol_type = other RNA

SEQ ID NO: 32737 - RNA, 34 nt, Synthetic Construct; identical to SEQ ID NO: 2364
  source 1..34: mol_type = other RNA

SEQ ID NO: 32738 - RNA, 22 nt, Synthetic Construct
  source 1..22: mol_type = other RNA
gaagaggacttggaactcgatc

SEQ ID NO: 32739 - RNA, 22 nt, Synthetic Construct
  source 1..22: mol_type = other RNA
gaagaggacttggaactcgatc

SEQ ID NO: 32740 - RNA, 22 nt, Synthetic Construct
  source 1..22: mol_type = other RNA
tggagtgtgacaatggtgcttg

SEQ ID NO: 32741 - RNA, 22 nt, Synthetic Construct
  source 1..22: mol_type = other RNA
tggagtgtgacaatggtgcttg

SEQ ID NO: 32742 - RNA, 22 nt, Synthetic Construct
  source 1..22: mol_type = other RNA
ttatggtttgcctgggactgaa

SEQ ID NO: 32743 - RNA, 22 nt, Synthetic Construct
  source 1..22: mol_type = other RNA
ttatggtttgcctgggactgaa

SEQ ID NO: 32744 - RNA, 21 nt, Synthetic Construct
  source 1..21: mol_type = other RNA
tcctgtgctgagctgccccga

SEQ ID NO: 32745 - RNA, 21 nt, Synthetic Construct
  source 1..21: mol_type = other RNA
tcctgtgctgagctgccccga

SEQ ID NO: 32746 - RNA, 22 nt, Synthetic Construct
  source 1..22: mol_type = other RNA
taaggtagtaggttgtatagtt

SEQ ID NO: 32747 - RNA, 22 nt, Synthetic Construct
  source 1..22: mol_type = other RNA
cattgcacttgtctcagtctga

SEQ ID NO: 32748 - RNA, 21 nt, Synthetic Construct
  source 1..21: mol_type = other RNA
tgaggtagtagattgtacagt

SEQ ID NO: 32749 - RNA, 21 nt, Synthetic Construct
  source 1..21: mol_type = other RNA
tgaggtagtagattgtacagt

SEQ ID NO: 32750 - RNA, 25 nt, Synthetic Construct
  source 1..25: mol_type = other RNA
ttgaggatatgagatagagacgaca

SEQ ID NO: 32751 - RNA, 25 nt, Synthetic Construct
  source 1..25: mol_type = other RNA
atttccccttggggttgtaggacca

SEQ ID NO: 32752 - RNA, 25 nt, Synthetic Construct
  source 1..25: mol_type = other RNA
atttccccttggggttgtaggacca

SEQ ID NO: 32753 - RNA, 22 nt, Synthetic Construct
  source 1..22: mol_type = other RNA
tgggtttacgttgggagaactt

SEQ ID NO: 32754 - RNA, 22 nt, Synthetic Construct
  source 1..22: mol_type = other RNA
tgggtttacgttgggagaactt

SEQ ID NO: 32755 - RNA, 20 nt, Synthetic Construct
  source 1..20: mol_type = other RNA
tagcagcacataatggtttg

SEQ ID NO: 32756 - RNA, 20 nt, Synthetic Construct
  source 1..20: mol_type = other RNA
tagcagcacataatggtttg

SEQ ID NO: 32757 - RNA, 20 nt, Synthetic Construct
  source 1..20: mol_type = other RNA
tgaagtagtaggttgtgtgg

SEQ ID NO: 32758 - RNA, 20 nt, Synthetic Construct
  source 1..20: mol_type = other RNA
tgaagtagtaggttgtgtgg

SEQ ID NO: 32759 - RNA, 15 nt, Synthetic Construct
  source 1..15: mol_type = other RNA
gcagagcgtcggtct

SEQ ID NO: 32760 - RNA, 22 nt, Synthetic Construct
  source 1..22: mol_type = other RNA
caaagtgcttacagtgcaggta

SEQ ID NO: 32761 - RNA, 22 nt, Synthetic Construct
  source 1..22: mol_type = other RNA
caaagtgcttacagtgcaggta

SEQ ID NO: 32762 - RNA, 21 nt, Synthetic Construct
  source 1..21: mol_type = other RNA
tcctgcactgagctgccccga

SEQ ID NO: 32763 - RNA, 22 nt, Synthetic Construct
  source 1..22: mol_type = other RNA
tgaggtagcaggttgtatagtt

SEQ ID NO: 32764 - RNA, 22 nt, Synthetic Construct
  source 1..22: mol_type = other RNA
tgaggtagcaggttgtatagtt

SEQ ID NO: 32765 - RNA, 20 nt, Synthetic Construct
  source 1..20: mol_type = other RNA
tgaggtagtaggctgtgtgg

SEQ ID NO: 32766 - RNA, 33 nt, Synthetic Construct; identical to SEQ ID NO: 2126
  source 1..33: mol_type = other RNA

SEQ ID NO: 32767 - RNA, 33 nt, Synthetic Construct; identical to SEQ ID NO: 2126
  source 1..33: mol_type = other RNA

SEQ ID NO: 32768 - RNA, 23 nt, Synthetic Construct
  source 1..23: mol_type = other RNA
caaagtgctgttcgcgcaggtag

SEQ ID NO: 32769 - RNA, 23 nt, Synthetic Construct
  source 1..23: mol_type = other RNA
caaagtgctgttcgcgcaggtag

SEQ ID NO: 32770 - RNA, 23 nt, Synthetic Construct
  source 1..23: mol_type = other RNA
tgaggggcagagagcgaggcttt

SEQ ID NO: 32771 - RNA, 23 nt, Synthetic Construct
  source 1..23: mol_type = other RNA
tggagtgtgacaatggtgtttgg

SEQ ID NO: 32772 - RNA, 22 nt, Synthetic Construct
  source 1..22: mol_type = other RNA
tagcaccatttgaaatcggtta

SEQ ID NO: 32773 - RNA, 22 nt, Synthetic Construct
  source 1..22: mol_type = other RNA
catagcacttgtctcggtctga

SEQ ID NO: 32774 - RNA, 20 nt, Synthetic Construct
  source 1..20: mol_type = other RNA
tggaatgtaaagaagtatgt

SEQ ID NO: 32775 - RNA, 20 nt, Synthetic Construct
  source 1..20: mol_type = other RNA
tggaatgtaaagaagtatgt

SEQ ID NO: 32776 - RNA, 24 nt, Synthetic Construct
  source 1..24: mol_type = other RNA
tgtaaacatccttgactggaagct

SEQ ID NO: 32777 - RNA, 26 nt, Synthetic Construct
  source 1..26: mol_type = other RNA
gcgggcgtagctcaggggtagagcgc

SEQ ID NO: 32778 - RNA, 26 nt, Synthetic Construct
  source 1..26: mol_type = other RNA
gcgggcgtagctcaggggtagagcgc

SEQ ID NO: 32779 - RNA, 29 nt, Synthetic Construct
  source 1..29: mol_type = other RNA
tgaaggtgggttgtgaagcctgctggagg

SEQ ID NO: 32780 - RNA, 29 nt, Synthetic Construct
  source 1..29: mol_type = other RNA
tgaaggtgggttgtgaagcctgctggagg

SEQ ID NO: 32781 - RNA, 27 nt, Synthetic Construct
  source 1..27: mol_type = other RNA
ccccccattgctaaatttgactggctt

SEQ ID NO: 32782 - RNA, 27 nt, Synthetic Construct
  source 1..27: mol_type = other RNA
ccccccattgctaaatttgactggctt

SEQ ID NO: 32783 - RNA, 22 nt, Synthetic Construct
  source 1..22: mol_type = other RNA
tcctgtactgtgctgccccgag

SEQ ID NO: 32784 - RNA, 21 nt, Synthetic Construct
  source 1..21: mol_type = other RNA
tcctgtactgagttgccccga

SEQ ID NO: 32785 - RNA, 35 nt, Synthetic Construct; identical to SEQ ID NO: 730
  source 1..35: mol_type = other RNA

SEQ ID NO: 32786 - RNA, 35 nt, Synthetic Construct; identical to SEQ ID NO: 730
  source 1..35: mol_type = other RNA

SEQ ID NO: 32787 - RNA, 23 nt, Synthetic Construct
  source 1..23: mol_type = other RNA
tggcagtgtcttagctggttgtt

SEQ ID NO: 32788 - RNA, 23 nt, Synthetic Construct
  source 1..23: mol_type = other RNA
tggcagtgtcttagctggttgtt

SEQ ID NO: 32789 - RNA, 22 nt, Synthetic Construct
  source 1..22: mol_type = other RNA
tcggatccgtctgagcttggct

SEQ ID NO: 32790 - RNA, 18 nt, Synthetic Construct
  source 1..18: mol_type = other RNA
accctgctcgctgcgcca

SEQ ID NO: 32791 - RNA, 18 nt, Synthetic Construct
  source 1..18: mol_type = other RNA
accctgctcgctgcgcca

SEQ ID NO: 32792 - RNA, 22 nt, Synthetic Construct
  source 1..22: mol_type = other RNA
ggcagcattgtacagggctatg

SEQ ID NO: 32793 - RNA, 22 nt, Synthetic Construct
  source 1..22: mol_type = other RNA
tgaggtagcagattgtatagtt

SEQ ID NO: 32794 - RNA, 22 nt, Synthetic Construct
  source 1..22: mol_type = other RNA
tgaggtagcagattgtatagtt

SEQ ID NO: 32795 - RNA, 18 nt, Synthetic Construct
  source 1..18: mol_type = other RNA
atcgctagtaatcgcgga

SEQ ID NO: 32796 - RNA, 18 nt, Synthetic Construct
  source 1..18: mol_type = other RNA
atcgctagtaatcgcgga

SEQ ID NO: 32797 - RNA, 23 nt, Synthetic Construct
  source 1..23: mol_type = other RNA
ttatggtttgcctgggactgaaa

SEQ ID NO: 32798 - RNA, 23 nt, Synthetic Construct
  source 1..23: mol_type = other RNA
ttatggtttgcctgggactgaaa

SEQ ID NO: 32799 - RNA, 21 nt, Synthetic Construct
  source 1..21: mol_type = other RNA
tgagatgaagcactgtagctc

SEQ ID NO: 32800 - RNA, 35 nt, Synthetic Construct; identical to SEQ ID NO: 2354
  source 1..35: mol_type = other RNA

SEQ ID NO: 32801 - RNA, 27 nt, Synthetic Construct
  source 1..27: mol_type = other RNA
ccccccactgctgaatttgactggctt

SEQ ID NO: 32802 - RNA, 27 nt, Synthetic Construct
  source 1..27: mol_type = other RNA
ccccccactgctgaatttgactggctt

SEQ ID NO: 32803 - RNA, 21 nt, Synthetic Construct
  source 1..21: mol_type = other RNA
tgaggggcagagagcgggact

SEQ ID NO: 32804 - RNA, 42 nt, Synthetic Construct; identical to SEQ ID NO: 8009
  source 1..42: mol_type = other RNA

SEQ ID NO: 32805 - RNA, 15 nt, Synthetic Construct
  source 1..15: mol_type = other RNA
gtcaggatgttggct

SEQ ID NO: 32806 - RNA, 24 nt, Synthetic Construct
  source 1..24: mol_type = other RNA
tgtaaacatccctgactggaagct

SEQ ID NO: 32807 - RNA, 24 nt, Synthetic Construct
  source 1..24: mol_type = other RNA
tgtaaacatccctgactggaagct

SEQ ID NO: 32808 - RNA, 22 nt, Synthetic Construct
  source 1..22: mol_type = other RNA
tgaggtagtaggttgtgtgatt

SEQ ID NO: 32809 - RNA, 22 nt, Synthetic Construct
  source 1..22: mol_type = other RNA
taactacttaagcgaatctcgc

SEQ ID NO: 32810 - RNA, 22 nt, Synthetic Construct
  source 1..22: mol_type = other RNA
taactacttaagcgaatctcgc

SEQ ID NO: 32811 - RNA, 23 nt, Synthetic Construct
  source 1..23: mol_type = other RNA
caaagtgctgttcgtgcgggtag

SEQ ID NO: 32812 - RNA, 23 nt, Synthetic Construct
  source 1..23: mol_type = other RNA
caaagtgctgttcgtgcgggtag

SEQ ID NO: 32813 - RNA, 19 nt, Synthetic Construct
  source 1..19: mol_type = other RNA
gcgaaattccttgtcgggt

SEQ ID NO: 32814 - RNA, 19 nt, Synthetic Construct
  source 1..19: mol_type = other RNA
gcgaaattccttgtcgggt

SEQ ID NO: 32815 - RNA, 21 nt, Synthetic Construct
  source 1..21: mol_type = other RNA
tgaggtagtaggttgcgtggt

SEQ ID NO: 32816 - RNA, 22 nt, Synthetic Construct
  source 1..22: mol_type = other RNA
nagcagcacgtaaatattggcg

SEQ ID NO: 32817 - RNA, 23 nt, Synthetic Construct
  source 1..23: mol_type = other RNA
tcctgtactgagctgctccgaga

SEQ ID NO: 32818 - RNA, 23 nt, Synthetic Construct
  source 1..23: mol_type = other RNA
tcctgtactgagctgctccgaga

SEQ ID NO: 32819 - RNA, 35 nt, Synthetic Construct; identical to SEQ ID NO: 787
  source 1..35: mol_type = other RNA

SEQ ID NO: 32820 - RNA, 35 nt, Synthetic Construct; identical to SEQ ID NO: 787
  source 1..35: mol_type = other RNA

SEQ ID NO: 32821 - RNA, 18 nt, Synthetic Construct
  source 1..18: mol_type = other RNA
gggagtatggtcgcaagg

SEQ ID NO: 32822 - RNA, 18 nt, Synthetic Construct
  source 1..18: mol_type = other RNA
gggagtatggtcgcaagg

SEQ ID NO: 32823 - RNA, 22 nt, Synthetic Construct
  source 1..22: mol_type = other RNA
ncgtaccgtgagtaataatgcg

SEQ ID NO: 32824 - RNA, 22 nt, Synthetic Construct
  source 1..22: mol_type = other RNA
ncgtaccgtgagtaataatgcg

SEQ ID NO: 32825 - RNA, 22 nt, Synthetic Construct
  source 1..22: mol_type = other RNA
tcctgtactgaactgccccgag

SEQ ID NO: 32826 - RNA, 20 nt, Synthetic Construct
  source 1..20: mol_type = other RNA
agaggtagtaggttgtgtgg

SEQ ID NO: 32827 - RNA, 20 nt, Synthetic Construct
  source 1..20: mol_type = other RNA
agaggtagtaggttgtgtgg

SEQ ID NO: 32828 - RNA, 17 nt, Synthetic Construct
  source 1..17: mol_type = other RNA
ccagtaaacggcggccg

SEQ ID NO: 32829 - RNA, 22 nt, Synthetic Construct
  source 1..22: mol_type = other RNA
tgaggtagtagattgtgtggtt

SEQ ID NO: 32830 - RNA, 22 nt, Synthetic Construct
  source 1..22: mol_type = other RNA
tagcggcacgtaaatattggcg

SEQ ID NO: 32831 - RNA, 22 nt, Synthetic Construct
  source 1..22: mol_type = other RNA
tagcggcacgtaaatattggcg

SEQ ID NO: 32832 - RNA, 22 nt, Synthetic Construct
  source 1..22: mol_type = other RNA
tcgtaccgtgagcaataatgcg

SEQ ID NO: 32833 - RNA, 22 nt, Synthetic Construct
  source 1..22: mol_type = other RNA
tcgtaccgtgagcaataatgcg

SEQ ID NO: 32834 - RNA, 21 nt, Synthetic Construct
  source 1..21: mol_type = other RNA
cgaggtagtagtttgtgctgt

SEQ ID NO: 32835 - RNA, 22 nt, Synthetic Construct
  source 1..22: mol_type = other RNA
tgtggtagtaggttgtatagtt

SEQ ID NO: 32836 - RNA, 16 nt, Synthetic Construct
  source 1..16: mol_type = other RNA
ctctacggccatacca

SEQ ID NO: 32837 - RNA, 28 nt, Synthetic Construct
  source 1..28: mol_type = other RNA
ccccccactgctaaatttgaccggcttt

SEQ ID NO: 32838 - RNA, 28 nt, Synthetic Construct
  source 1..28: mol_type = other RNA
ccccccactgctaaatttgaccggcttt

SEQ ID NO: 32839 - RNA, 30 nt, Synthetic Construct; identical to SEQ ID NO: 5879
  source 1..30: mol_type = other RNA

SEQ ID NO: 32840 - RNA, 30 nt, Synthetic Construct; identical to SEQ ID NO: 5879
  source 1..30: mol_type = other RNA

SEQ ID NO: 32841 - RNA, 19 nt, Synthetic Construct
  source 1..19: mol_type = other RNA
tccctgttcgggcgccatt

SEQ ID NO: 32842 - RNA, 23 nt, Synthetic Construct
  source 1..23: mol_type = other RNA
tggtaatacgacatacttagtgt

SEQ ID NO: 32843 - RNA, 22 nt, Synthetic Construct
  source 1..22: mol_type = other RNA
ggaggtagtaggttgtgtggtt

SEQ ID NO: 32844 - RNA, 22 nt, Synthetic Construct
  source 1..22: mol_type = other RNA
ggaggtagtaggttgtgtggtt

SEQ ID NO: 32845 - RNA, 23 nt, Synthetic Construct
  source 1..23: mol_type = other RNA
tgaggtagcaggttgtgtggttt

SEQ ID NO: 32846 - RNA, 21 nt, Synthetic Construct
  source 1..21: mol_type = other RNA
tgaggggcggagagcgagact

SEQ ID NO: 32847 - RNA, 22 nt, Synthetic Construct
  source 1..22: mol_type = other RNA
ngaggtagtagtttgtgctgtt

SEQ ID NO: 32848 - RNA, 22 nt, Synthetic Construct
  source 1..22: mol_type = other RNA
catcgcacttgtctcggtctga

SEQ ID NO: 32849 - RNA, 22 nt, Synthetic Construct
  source 1..22: mol_type = other RNA
tgaggtagtaggttgtatggtt

SEQ ID NO: 32850 - RNA, 21 nt, Synthetic Construct
  source 1..21: mol_type = other RNA
tcctgtactgagctaccccga

SEQ ID NO: 32851 - RNA, 22 nt, Synthetic Construct
  source 1..22: mol_type = other RNA
tgagaactgaattccataggct

SEQ ID NO: 32852 - RNA, 22 nt, Synthetic Construct
  source 1..22: mol_type = other RNA
tgagaactgaattccataggct

SEQ ID NO: 32853 - RNA, 33 nt, Synthetic Construct; identical to SEQ ID NO: 10232
  source 1..33: mol_type = other RNA

SEQ ID NO: 32854 - RNA, 22 nt, Synthetic Construct
  source 1..22: mol_type = other RNA
tgtaaacatccccgactggaaa

SEQ ID NO: 32855 - RNA, 21 nt, Synthetic Construct
  source 1..21: mol_type = other RNA
tgaggcagtagattgtatagt

SEQ ID NO: 32856 - RNA, 21 nt, Synthetic Construct
  source 1..21: mol_type = other RNA
tgaggcagtagattgtatagt

SEQ ID NO: 32857 - RNA, 22 nt, Synthetic Construct
  source 1..22: mol_type = other RNA
tgaggtagtagtttgtggtgtt

SEQ ID NO: 32858 - RNA, 21 nt, Synthetic Construct
  source 1..21: mol_type = other RNA
ccccttggggttgtaggacca

SEQ ID NO: 32859 - RNA, 21 nt, Synthetic Construct
  source 1..21: mol_type = other RNA
ccccttggggttgtaggacca

SEQ ID NO: 32860 - RNA, 23 nt, Synthetic Construct
  source 1..23: mol_type = other RNA
atgacacgatcactcccgttgag

SEQ ID NO: 32861 - RNA, 23 nt, Synthetic Construct
  source 1..23: mol_type = other RNA
atgacacgatcactcccgttgag

SEQ ID NO: 32862 - RNA, 15 nt, Synthetic Construct
  source 1..15: mol_type = other RNA
gtccggatcgtagtc

SEQ ID NO: 32863 - RNA, 15 nt, Synthetic Construct
  source 1..15: mol_type = other RNA
gtccggatcgtagtc

SEQ ID NO: 32864 - RNA, 35 nt, Synthetic Construct; identical to SEQ ID NO: 2762
  source 1..35: mol_type = other RNA

SEQ ID NO: 32865 - RNA, 35 nt, Synthetic Construct; identical to SEQ ID NO: 2762
  source 1..35: mol_type = other RNA

SEQ ID NO: 32866 - RNA, 21 nt, Synthetic Construct
  source 1..21: mol_type = other RNA
tgaggtagtaagttgtgtggt

SEQ ID NO: 32867 - RNA, 21 nt, Synthetic Construct
  source 1..21: mol_type = other RNA
tgaggtagtaagttgtgtggt

SEQ ID NO: 32868 - RNA, 23 nt, Synthetic Construct
  source 1..23: mol_type = other RNA
acagtagtctgcacattggttat

SEQ ID NO: 32869 - RNA, 22 nt, Synthetic Construct
  source 1..22: mol_type = other RNA
taccctgtagaaccgaatttgt

SEQ ID NO: 32870 - RNA, 17 nt, Synthetic Construct
  source 1..17: mol_type = other RNA
agtgggttatcagaact

SEQ ID NO: 32871 - RNA, 22 nt, Synthetic Construct
  source 1..22: mol_type = other RNA
tattgcacttgtcccgacctgt

SEQ ID NO: 32872 - RNA, 24 nt, Synthetic Construct
  source 1..24: mol_type = other RNA
taccacagggtagaaccacggatt

SEQ ID NO: 32873 - RNA, 24 nt, Synthetic Construct
  source 1..24: mol_type = other RNA
taccacagggtagaaccacggatt

SEQ ID NO: 32874 - RNA, 22 nt, Synthetic Construct
  source 1..22: mol_type = other RNA
tgaggtagaagtttgtgctgtt

SEQ ID NO: 32875 - RNA, 22 nt, Synthetic Construct
  source 1..22: mol_type = other RNA
tgaggtagaagtttgtgctgtt

SEQ ID NO: 32876 - RNA, 22 nt, Synthetic Construct
  source 1..22: mol_type = other RNA
tgaggtagtagtttgtgctgct

SEQ ID NO: 32877 - RNA, 22 nt, Synthetic Construct
  source 1..22: mol_type = other RNA
tgaggtagtagtttgtgctgct

SEQ ID NO: 32878 - RNA, 15 nt, Synthetic Construct
  source 1..15: mol_type = other RNA
ccagaaacccggtcg

SEQ ID NO: 32879 - RNA, 22 nt, Synthetic Construct
  source 1..22: mol_type = other RNA
acagtagtctgcacattggtta

SEQ ID NO: 32880 - RNA, 23 nt, Synthetic Construct
  source 1..23: mol_type = other RNA
tgtcagtttgtcaaataccccaa

SEQ ID NO: 32881 - RNA, 25 nt, Synthetic Construct
  source 1..25: mol_type = other RNA
tagtgcaatattgcttatagggttt

SEQ ID NO: 32882 - RNA, 22 nt, Synthetic Construct
  source 1..22: mol_type = other RNA
tattgcactcgtcccggcctgt

SEQ ID NO: 32883 - RNA, 23 nt, Synthetic Construct
  source 1..23: mol_type = other RNA
tgaggtagtaggttgcgtggttt

SEQ ID NO: 32884 - RNA, 23 nt, Synthetic Construct
  source 1..23: mol_type = other RNA
tgtcagtttgccaaataccccaa

SEQ ID NO: 32885 - RNA, 23 nt, Synthetic Construct
  source 1..23: mol_type = other RNA
caaagaattctccttttgggctt

SEQ ID NO: 32886 - RNA, 23 nt, Synthetic Construct
  source 1..23: mol_type = other RNA
caaagaattctccttttgggctt

SEQ ID NO: 32887 - RNA, 16 nt, Synthetic Construct
  source 1..16: mol_type = other RNA
gcggtggatgatgtgg

SEQ ID NO: 32888 - RNA, 16 nt, Synthetic Construct
  source 1..16: mol_type = other RNA
gcggtggatgatgtgg

SEQ ID NO: 32889 - RNA, 23 nt, Synthetic Construct
  source 1..23: mol_type = other RNA
tgaggggcagagagcgggacttt

SEQ ID NO: 32890 - RNA, 23 nt, Synthetic Construct
  source 1..23: mol_type = other RNA
tgaggggcagagagcgggacttt

SEQ ID NO: 32891 - RNA, 15 nt, Synthetic Construct
  source 1..15: mol_type = other RNA
gcgtagatatgcgga

SEQ ID NO: 32892 - RNA, 16 nt, Synthetic Construct
  source 1..16: mol_type = other RNA
gtctacggccatacta

SEQ ID NO: 32893 - RNA, 32 nt, Synthetic Construct; identical to SEQ ID NO: 2086
  source 1..32: mol_type = other RNA

SEQ ID NO: 32894 - RNA, 32 nt, Synthetic Construct; identical to SEQ ID NO: 2086
  source 1..32: mol_type = other RNA

SEQ ID NO: 32895 - RNA, 31 nt, Synthetic Construct; identical to SEQ ID NO: 2278
  source 1..31: mol_type = other RNA

SEQ ID NO: 32896 - RNA, 31 nt, Synthetic Construct; identical to SEQ ID NO: 2278
  source 1..31: mol_type = other RNA

SEQ ID NO: 32897 - RNA, 21 nt, Synthetic Construct
  source 1..21: mol_type = other RNA
tggggtagtaggttgtatagt

SEQ ID NO: 32898 - RNA, 21 nt, Synthetic Construct
  source 1..21: mol_type = other RNA
tggggtagtaggttgtatagt

SEQ ID NO: 32899 - RNA, 23 nt, Synthetic Construct
  source 1..23: mol_type = other RNA
tgaaacatacacgggaaacctct

SEQ ID NO: 32900 - RNA, 23 nt, Synthetic Construct
  source 1..23: mol_type = other RNA
tgaaacatacacgggaaacctct

SEQ ID NO: 32901 - RNA, 27 nt, Synthetic Construct
  source 1..27: mol_type = other RNA
ccccccactgctaagtttgactggctt

SEQ ID NO: 32902 - RNA, 22 nt, Synthetic Construct
  source 1..22: mol_type = other RNA
tgcagtgtttcctactttatgg

SEQ ID NO: 32903 - RNA, 18 nt, Synthetic Construct
  source 1..18: mol_type = other RNA
gctgtgatggccgagtgg

SEQ ID NO: 32904 - RNA, 18 nt, Synthetic Construct
  source 1..18: mol_type = other RNA
gctgtgatggccgagtgg

SEQ ID NO: 32905 - RNA, 22 nt, Synthetic Construct
  source 1..22: mol_type = other RNA
tgaggcagtaggttgtgtggtt

SEQ ID NO: 32906 - RNA, 22 nt, Synthetic Construct
  source 1..22: mol_type = other RNA
tgaggcagtaggttgtgtggtt

SEQ ID NO: 32907 - RNA, 27 nt, Synthetic Construct
  source 1..27: mol_type = other RNA
gctttacattggactttgaacagatct

SEQ ID NO: 32908 - RNA, 22 nt, Synthetic Construct
  source 1..22: mol_type = other RNA
tgaggtagtaggttgtgtggtc

SEQ ID NO: 32909 - RNA, 25 nt, Synthetic Construct
  source 1..25: mol_type = other RNA
gggttgtaaaccgcttttgtcaggg

SEQ ID NO: 32910 - RNA, 16 nt, Synthetic Construct
  source 1..16: mol_type = other RNA
aggtcatcgtcaggct

SEQ ID NO: 32911 - RNA, 16 nt, Synthetic Construct
  source 1..16: mol_type = other RNA
aggtcatcgtcaggct

SEQ ID NO: 32912 - RNA, 29 nt, Synthetic Construct
  source 1..29: mol_type = other RNA
gcattggtggttcagtggtagaattctcg

SEQ ID NO: 32913 - RNA, 22 nt, Synthetic Construct
  source 1..22: mol_type = other RNA
tacagtagtctgcacattggtt

SEQ ID NO: 32914 - RNA, 21 nt, Synthetic Construct
  source 1..21: mol_type = other RNA
agagtaggacgttgccaggtt

SEQ ID NO: 32915 - RNA, 21 nt, Synthetic Construct
  source 1..21: mol_type = other RNA
agagtaggacgttgccaggtt

SEQ ID NO: 32916 - RNA, 22 nt, Synthetic Construct
  source 1..22: mol_type = other RNA
gtagtgtttcctactttatgga

SEQ ID NO: 32917 - RNA, 21 nt, Synthetic Construct
  source 1..21: mol_type = other RNA
tgaggtaggaggttgtatagt

SEQ ID NO: 32918 - RNA, 21 nt, Synthetic Construct
  source 1..21: mol_type = other RNA
tagcagcacgtaaatattggc

SEQ ID NO: 32919 - RNA, 21 nt, Synthetic Construct
  source 1..21: mol_type = other RNA
tagcagcacgtaaatattggc

SEQ ID NO: 32920 - RNA, 23 nt, Synthetic Construct
  source 1..23: mol_type = other RNA
tcctgtgctgagctgccccgaga

SEQ ID NO: 32921 - RNA, 23 nt, Synthetic Construct
  source 1..23: mol_type = other RNA
tcctgtactgagttgccccgaga

SEQ ID NO: 32922 - RNA, 19 nt, Synthetic Construct
  source 1..19: mol_type = other RNA
tcagtagctcgaggaaaag

SEQ ID NO: 32923 - RNA, 21 nt, Synthetic Construct
  source 1..21: mol_type = other RNA
gctaaacctagccccaaaccc

SEQ ID NO: 32924 - RNA, 21 nt, Synthetic Construct
  source 1..21: mol_type = other RNA
tgaggtagaaggttgtgtggt

SEQ ID NO: 32925 - RNA, 21 nt, Synthetic Construct
  source 1..21: mol_type = other RNA
tgaggtagaaggttgtgtggt

SEQ ID NO: 32926 - RNA, 25 nt, Synthetic Construct
  source 1..25: mol_type = other RNA
tgtcagtttgtcaaataccccattt

SEQ ID NO: 32927 - RNA, 25 nt, Synthetic Construct
  source 1..25: mol_type = other RNA
tgtcagtttgtcaaataccccattt

SEQ ID NO: 32928 - RNA, 16 nt, Synthetic Construct
  source 1..16: mol_type = other RNA
atgcaagtcgaacggt

SEQ ID NO: 32929 - RNA, 24 nt, Synthetic Construct
  source 1..24: mol_type = other RNA
cgtaaacatccccgactggaagct

SEQ ID NO: 32930 - RNA, 21 nt, Synthetic Construct
  source 1..21: mol_type = other RNA
tgaggtagtagattgtataga

SEQ ID NO: 32931 - RNA, 19 nt, Synthetic Construct
  source 1..19: mol_type = other RNA
agctacattgtctgctggg

SEQ ID NO: 32932 - RNA, 19 nt, Synthetic Construct
  source 1..19: mol_type = other RNA
agctacattgtctgctggg

SEQ ID NO: 32933 - RNA, 23 nt, Synthetic Construct
  source 1..23: mol_type = other RNA
cctccctcgggagggcgcgcggg

SEQ ID NO: 32934 - RNA, 23 nt, Synthetic Construct
  source 1..23: mol_type = other RNA
cctccctcgggagggcgcgcggg

SEQ ID NO: 32935 - RNA, 25 nt, Synthetic Construct
  source 1..25: mol_type = other RNA
ccccactgctaaatttgactggctt

SEQ ID NO: 32936 - RNA, 23 nt, Synthetic Construct
  source 1..23: mol_type = other RNA
tcctgaactgagctgccccgaga

SEQ ID NO: 32937 - RNA, 23 nt, Synthetic Construct
  source 1..23: mol_type = other RNA
agcagcattgtacagggctatgg

SEQ ID NO: 32938 - RNA, 22 nt, Synthetic Construct
  source 1..22: mol_type = other RNA
tactgcacttgtcccggcctgt

SEQ ID NO: 32939 - RNA, 22 nt, Synthetic Construct
  source 1..22: mol_type = other RNA
tactgcacttgtcccggcctgt

SEQ ID NO: 32940 - RNA, 21 nt, Synthetic Construct
  source 1..21: mol_type = other RNA
cccttggggttgtaggaccac

SEQ ID NO: 32941 - RNA, 21 nt, Synthetic Construct
  source 1..21: mol_type = other RNA
cccttggggttgtaggaccac

SEQ ID NO: 32942 - RNA, 23 nt, Synthetic Construct
  source 1..23: mol_type = other RNA
tggtaatacgacgtacttggtgt

SEQ ID NO: 32943 - RNA, 26 nt, Synthetic Construct
  source 1..26: mol_type = other RNA
cgactcttagcggtggatcactcggc

SEQ ID NO: 32944 - RNA, 26 nt, Synthetic Construct
  source 1..26: mol_type = other RNA
ccccccactgctaatttgactggctt

SEQ ID NO: 32945 - RNA, 42 nt, Synthetic Construct; identical to SEQ ID NO: 8009
  source 1..42: mol_type = other RNA

SEQ ID NO: 32946 - RNA, 21 nt, Synthetic Construct
  source 1..21: mol_type = other RNA
tcccagtaaacggcggccgta

SEQ ID NO: 32947 - RNA, 25 nt, Synthetic Construct
  source 1..25: mol_type = other RNA
ttgaggatatgagatcgggacgaca

SEQ ID NO: 32948 - RNA, 23 nt, Synthetic Construct
  source 1..23: mol_type = other RNA
tgaggggcagagagcgagacttg

SEQ ID NO: 32949 - RNA, 23 nt, Synthetic Construct
  source 1..23: mol_type = other RNA
tgaggggcagagagcgagacttg

SEQ ID NO: 32950 - RNA, 27 nt, Synthetic Construct
  source 1..27: mol_type = other RNA
ccccccactgctaaacttgactggctt

SEQ ID NO: 32951 - RNA, 22 nt, Synthetic Construct
  source 1..22: mol_type = other RNA
caaagaattctccttttgggct

SEQ ID NO: 32952 - RNA, 21 nt, Synthetic Construct
  source 1..21: mol_type = other RNA
cgaggtagtagtttgtgctgt

SEQ ID NO: 32953 - RNA, 23 nt, Synthetic Construct
  source 1..23: mol_type = other RNA
ctcgtaccgtgagtaataatgcg

SEQ ID NO: 32954 - RNA, 22 nt, Synthetic Construct
  source 1..22: mol_type = other RNA
tggagtgtggcaatggtgtttg

SEQ ID NO: 32955 - RNA, 22 nt, Synthetic Construct
  source 1..22: mol_type = other RNA
tggagtgtggcaatggtgtttg

SEQ ID NO: 32956 - RNA, 24 nt, Synthetic Construct
  source 1..24: mol_type = other RNA
tgtaaacatccccgactgggagct

SEQ ID NO: 32957 - RNA, 16 nt, Synthetic Construct
  source 1..16: mol_type = other RNA
gtgacgcgcatgaatg

SEQ ID NO: 32958 - RNA, 16 nt, Synthetic Construct
  source 1..16: mol_type = other RNA
gtgacgcgcatgaatg

SEQ ID NO: 32959 - RNA, 25 nt, Synthetic Construct
  source 1..25: mol_type = other RNA
ttgaggatatgaggtcgagacgaca

SEQ ID NO: 32960 - RNA, 23 nt, Synthetic Construct
  source 1..23: mol_type = other RNA
tcctgtgctgagctgccccgaga

SEQ ID NO: 32961 - RNA, 22 nt, Synthetic Construct
  source 1..22: mol_type = other RNA
tgaggtagtaggttgagtggtt

SEQ ID NO: 32962 - RNA, 22 nt, Synthetic Construct
  source 1..22: mol_type = other RNA
tgaggtagtaggttgagtggtt

SEQ ID NO: 32963 - RNA, 22 nt, Synthetic Construct
  source 1..22: mol_type = other RNA
tattgcacttatcccggcctgt

SEQ ID NO: 32964 - RNA, 22 nt, Synthetic Construct
  source 1..22: mol_type = other RNA
tattgcacttatcccggcctgt

SEQ ID NO: 32965 - RNA, 25 nt, Synthetic Construct
  source 1..25: mol_type = other RNA
ttgaggatacgagatcgagacgaca

SEQ ID NO: 32966 - RNA, 28 nt, Synthetic Construct
  source 1..28: mol_type = other RNA
ccccccactgctaaatttgaccggcttt

SEQ ID NO: 32967 - RNA, 21 nt, Synthetic Construct
  source 1..21: mol_type = other RNA
actcggcgtggcgtcggtcgt

SEQ ID NO: 32968 - RNA, 17 nt, Synthetic Construct
  source 1..17: mol_type = other RNA
cacggcccagactccta

SEQ ID NO: 32969 - RNA, 23 nt, Synthetic Construct
  source 1..23: mol_type = other RNA
tgaggtagtaggctgtgtggttt

SEQ ID NO: 32970 - RNA, 23 nt, Synthetic Construct
  source 1..23: mol_type = other RNA
tggggtagtaggttgtgtggttt

SEQ ID NO: 32971 - RNA, 21 nt, Synthetic Construct
  source 1..21: mol_type = other RNA
cgtaccgtgagtaataatgca

SEQ ID NO: 32972 - RNA, 24 nt, Synthetic Construct
  source 1..24: mol_type = other RNA
tgtaaacatccccgactggaagtt

SEQ ID NO: 32973 - RNA, 23 nt, Synthetic Construct
  source 1..23: mol_type = other RNA
ttcaagtaattcaggataggttt

SEQ ID NO: 32974 - RNA, 22 nt, Synthetic Construct
  source 1..22: mol_type = other RNA
aagcagcacgtaaatattggag

SEQ ID NO: 32975 - RNA, 21 nt, Synthetic Construct
  source 1..21: mol_type = other RNA
gcagtagtctgcacattggtt

SEQ ID NO: 32976 - RNA, 22 nt, Synthetic Construct
  source 1..22: mol_type = other RNA
tgtaaacatcctacactctcag

SEQ ID NO: 32977 - RNA, 22 nt, Synthetic Construct
  source 1..22: mol_type = other RNA
tgtaaacatcctacactctcag

SEQ ID NO: 32978 - RNA, 26 nt, Synthetic Construct
  source 1..26: mol_type = other RNA
ccccccactgctaatttgactggctt

SEQ ID NO: 32979 - RNA, 26 nt, Synthetic Construct
  source 1..26: mol_type = other RNA
ccccccactgctaatttgactggctt

SEQ ID NO: 32980 - RNA, 21 nt, Synthetic Construct
  source 1..21: mol_type = other RNA
tgaggggcagagagcgagacc

SEQ ID NO: 32981 - RNA, 21 nt, Synthetic Construct
  source 1..21: mol_type = other RNA
tgaggggcagagagcgagacc

SEQ ID NO: 32982 - RNA, 22 nt, Synthetic Construct
  source 1..22: mol_type = other RNA
tcctgtactgagctgccccggg

SEQ ID NO: 32983 - RNA, 22 nt, Synthetic Construct
  source 1..22: mol_type = other RNA
tcctgtactgagctgccccggg

SEQ ID NO: 32984 - RNA, 20 nt, Synthetic Construct
  source 1..20: mol_type = other RNA
tgaggtagtgggttgtatag

SEQ ID NO: 32985 - RNA, 20 nt, Synthetic Construct
  source 1..20: mol_type = other RNA
tgaggtagtgggttgtatag

SEQ ID NO: 32986 - RNA, 21 nt, Synthetic Construct
  source 1..21: mol_type = other RNA
caatggccgggacagagggct

SEQ ID NO: 32987 - RNA, 21 nt, Synthetic Construct
  source 1..21: mol_type = other RNA
tggctcagttcagcaggaaca

SEQ ID NO: 32988 - RNA, 22 nt, Synthetic Construct
  source 1..22: mol_type = other RNA
aggggcagagagcgagactttt

SEQ ID NO: 32989 - RNA, 22 nt, Synthetic Construct
  source 1..22: mol_type = other RNA
aggggcagagagcgagactttt

SEQ ID NO: 32990 - RNA, 23 nt, Synthetic Construct
  source 1..23: mol_type = other RNA
tcctgtactgggctgccccgaga

SEQ ID NO: 32991 - RNA, 23 nt, Synthetic Construct
  source 1..23: mol_type = other RNA
taccacagggtagaaccacggaa

SEQ ID NO: 32992 - RNA, 23 nt, Synthetic Construct
  source 1..23: mol_type = other RNA
taccacagggtagaaccacggaa

SEQ ID NO: 32993 - RNA, 30 nt, Synthetic Construct; identical to SEQ ID NO: 739
  source 1..30: mol_type = other RNA

SEQ ID NO: 32994 - RNA, 20 nt, Synthetic Construct
  source 1..20: mol_type = other RNA
tgaggtagtaggttgcgtgg

SEQ ID NO: 32995 - RNA, 22 nt, Synthetic Construct
  source 1..22: mol_type = other RNA
tgaggaagtagtttgtgctgtt

SEQ ID NO: 32996 - RNA, 22 nt, Synthetic Construct
  source 1..22: mol_type = other RNA
tgaggaagtagtttgtgctgtt

SEQ ID NO: 32997 - RNA, 35 nt, Synthetic Construct; identical to SEQ ID NO: 2269
  source 1..35: mol_type = other RNA

SEQ ID NO: 32998 - RNA, 35 nt, Synthetic Construct; identical to SEQ ID NO: 2399
  source 1..35: mol_type = other RNA

SEQ ID NO: 32999 - RNA, 35 nt, Synthetic Construct; identical to SEQ ID NO: 2399
  source 1..35: mol_type = other RNA

SEQ ID NO: 33000 - RNA, 22 nt, Synthetic Construct
  source 1..22: mol_type = other RNA
tagcagcacgtaaatattggtg

SEQ ID NO: 33001 - RNA, 22 nt, Synthetic Construct
  source 1..22: mol_type = other RNA
tgaggtagtagtttgtgctgta

SEQ ID NO: 33002 - RNA, 21 nt, Synthetic Construct
  source 1..21: mol_type = other RNA
acacatgcaagtcgaacggta

SEQ ID NO: 33003 - RNA, 23 nt, Synthetic Construct
  source 1..23: mol_type = other RNA
tgaagggcagagagcgagacttt

SEQ ID NO: 33004 - RNA, 23 nt, Synthetic Construct
  source 1..23: mol_type = other RNA
tgaagggcagagagcgagacttt

SEQ ID NO: 33005 - RNA, 16 nt, Synthetic Construct
  source 1..16: mol_type = other RNA
ccggaggaaggtgggg

SEQ ID NO: 33006 - RNA, 15 nt, Synthetic Construct
  source 1..15: mol_type = other RNA
gtccggatcgtagtc

SEQ ID NO: 33007 - RNA, 15 nt, Synthetic Construct
  source 1..15: mol_type = other RNA
gtccggatcgtagtc

SEQ ID NO: 33008 - RNA, 22 nt, Synthetic Construct
  source 1..22: mol_type = other RNA
tgaggaagtagattgtatagtt

SEQ ID NO: 33009 - RNA, 22 nt, Synthetic Construct
  source 1..22: mol_type = other RNA
tgaggaagtagattgtatagtt

SEQ ID NO: 33010 - RNA, 23 nt, Synthetic Construct
  source 1..23: mol_type = other RNA
tcctgaactgagctgccccgaga

SEQ ID NO: 33011 - RNA, 20 nt, Synthetic Construct
  source 1..20: mol_type = other RNA
tgaggtagtgggttgtgtgg

SEQ ID NO: 33012 - RNA, 35 nt, Synthetic Construct; identical to SEQ ID NO: 2762
  source 1..35: mol_type = other RNA

SEQ ID NO: 33013 - RNA, 35 nt, Synthetic Construct; identical to SEQ ID NO: 2762
  source 1..35: mol_type = other RNA

SEQ ID NO: 33014 - RNA, 23 nt, Synthetic Construct
  source 1..23: mol_type = other RNA
tgacctatgaattgacagccagt

SEQ ID NO: 33015 - RNA, 23 nt, Synthetic Construct
  source 1..23: mol_type = other RNA
tgacctatgaattgacagccagt

SEQ ID NO: 33016 - RNA, 22 nt, Synthetic Construct
  source 1..22: mol_type = other RNA
tattgcacttatcccggcctgt

SEQ ID NO: 33017 - RNA, 23 nt, Synthetic Construct
  source 1..23: mol_type = other RNA
ggctcggtctgaggcccctcagt

SEQ ID NO: 33018 - RNA, 23 nt, Synthetic Construct
  source 1..23: mol_type = other RNA
ggctcggtctgaggcccctcagt

SEQ ID NO: 33019 - RNA, 23 nt, Synthetic Construct
  source 1..23: mol_type = other RNA
cctcgcgcgattggagcggccga

SEQ ID NO: 33020 - RNA, 23 nt, Synthetic Construct
  source 1..23: mol_type = other RNA
agctcggtctgaggcccctcaga

SEQ ID NO: 33021 - RNA, 23 nt, Synthetic Construct
  source 1..23: mol_type = other RNA
agctcggtctgaggcccctcaga

SEQ ID NO: 33022 - RNA, 25 nt, Synthetic Construct
  source 1..25: mol_type = other RNA
ctgaggatatgagatcgagacgaca

SEQ ID NO: 33023 - RNA, 18 nt, Synthetic Construct
  source 1..18: mol_type = other RNA
gctgtgatggccgagtgg

SEQ ID NO: 33024 - RNA, 18 nt, Synthetic Construct
  source 1..18: mol_type = other RNA
gctgtgatggccgagtgg

SEQ ID NO: 33025 - RNA, 27 nt, Synthetic Construct
  source 1..27: mol_type = other RNA
ccccccactgctaaatttgaccggctt

SEQ ID NO: 33026 - RNA, 27 nt, Synthetic Construct
  source 1..27: mol_type = other RNA
ccccccactgctaaatttgaccggctt

SEQ ID NO: 33027 - RNA, 22 nt, Synthetic Construct
  source 1..22: mol_type = other RNA
tgaggtagtaggttgtgtggtc

SEQ ID NO: 33028 - RNA, 22 nt, Synthetic Construct
  source 1..22: mol_type = other RNA
aattgcacggtatccatctgta

SEQ ID NO: 33029 - RNA, 22 nt, Synthetic Construct
  source 1..22: mol_type = other RNA
aattgcacggtatccatctgta

SEQ ID NO: 33030 - RNA, 21 nt, Synthetic Construct
  source 1..21: mol_type = other RNA
acacatgcaagtcgaacggta

SEQ ID NO: 33031 - RNA, 24 nt, Synthetic Construct
  source 1..24: mol_type = other RNA
tagtgcaatattgcttatagggtt

SEQ ID NO: 33032 - RNA, 31 nt, Synthetic Construct; identical to SEQ ID NO: 774
  source 1..31: mol_type = other RNA

SEQ ID NO: 33033 - RNA, 31 nt, Synthetic Construct; identical to SEQ ID NO: 774
  source 1..31: mol_type = other RNA

SEQ ID NO: 33034 - RNA, 22 nt, Synthetic Construct
  source 1..22: mol_type = other RNA
tgaggtagtagtatgtgctgtt

SEQ ID NO: 33035 - RNA, 22 nt, Synthetic Construct
  source 1..22: mol_type = other RNA
tagcttatcagactgatgttgg

SEQ ID NO: 33036 - RNA, 21 nt, Synthetic Construct
  source 1..21: mol_type = other RNA
ctagactgaagctccttgaga

SEQ ID NO: 33037 - RNA, 23 nt, Synthetic Construct
  source 1..23: mol_type = other RNA
acagtagtctgcacattggttaa

SEQ ID NO: 33038 - RNA, 24 nt, Synthetic Construct
  source 1..24: mol_type = other RNA
ttcaagtaattcaggataggttgt

SEQ ID NO: 33039 - RNA, 17 nt, Synthetic Construct
  source 1..17: mol_type = other RNA
cacggcccagactccta

SEQ ID NO: 33040 - RNA, 23 nt, Synthetic Construct
  source 1..23: mol_type = other RNA
ttatggtttgcctgggactgagg

SEQ ID NO: 33041 - RNA, 22 nt, Synthetic Construct
  source 1..22: mol_type = other RNA
tagcagcacgtaaaaattggcg

SEQ ID NO: 33042 - RNA, 22 nt, Synthetic Construct
  source 1..22: mol_type = other RNA
tagcagcacgtaaaaattggcg

SEQ ID NO: 33043 - RNA, 23 nt, Synthetic Construct
  source 1..23: mol_type = other RNA
tgaggtagtaggttgtatggttt

SEQ ID NO: 33044 - RNA, 23 nt, Synthetic Construct
  source 1..23: mol_type = other RNA
tgaggtagtaggttgtatggttt

SEQ ID NO: 33045 - RNA, 21 nt, Synthetic Construct
  source 1..21: mol_type = other RNA
tgaggtagtaggttatgtggt

SEQ ID NO: 33046 - RNA, 21 nt, Synthetic Construct
  source 1..21: mol_type = other RNA
tgaggtagtaggttatgtggt

SEQ ID NO: 33047 - RNA, 25 nt, Synthetic Construct
  source 1..25: mol_type = other RNA
caaagaattctccttttgggctttt

SEQ ID NO: 33048 - RNA, 25 nt, Synthetic Construct
  source 1..25: mol_type = other RNA
caaagaattctccttttgggctttt

SEQ ID NO: 33049 - RNA, 36 nt, Synthetic Construct; identical to SEQ ID NO: 2248
  source 1..36: mol_type = other RNA

SEQ ID NO: 33050 - RNA, 24 nt, Synthetic Construct
  source 1..24: mol_type = other RNA
atcacattgccagggatttccaat

SEQ ID NO: 33051 - RNA, 21 nt, Synthetic Construct
  source 1..21: mol_type = other RNA
cggtcccaagggtatggctgt

SEQ ID NO: 33052 - RNA, 21 nt, Synthetic Construct
  source 1..21: mol_type = other RNA
tgaggtagtaggttgtatggt

SEQ ID NO: 33053 - RNA, 22 nt, Synthetic Construct
  source 1..22: mol_type = other RNA
tcctgtactgggctgccccgag

SEQ ID NO: 33054 - RNA, 23 nt, Synthetic Construct
  source 1..23: mol_type = other RNA
ggaggggcagagagcgagacttt

SEQ ID NO: 33055 - RNA, 23 nt, Synthetic Construct
  source 1..23: mol_type = other RNA
ggaggggcagagagcgagacttt

SEQ ID NO: 33056 - RNA, 23 nt, Synthetic Construct
  source 1..23: mol_type = other RNA
ttccccttggggttgtaggacca

SEQ ID NO: 33057 - RNA, 23 nt, Synthetic Construct
  source 1..23: mol_type = other RNA
ttccccttggggttgtaggacca

SEQ ID NO: 33058 - RNA, 22 nt, Synthetic Construct
  source 1..22: mol_type = other RNA
tagcagcacgtaaatactggcg

SEQ ID NO: 33059 - RNA, 22 nt, Synthetic Construct
  source 1..22: mol_type = other RNA
tagcagcacgtaaatactggcg

SEQ ID NO: 33060 - RNA, 22 nt, Synthetic Construct
  source 1..22: mol_type = other RNA
tagcagcacgtaaacattggcg

SEQ ID NO: 33061 - RNA, 23 nt, Synthetic Construct
  source 1..23: mol_type = other RNA
tcctgtactgagctgccccgaaa

SEQ ID NO: 33062 - RNA, 23 nt, Synthetic Construct
  source 1..23: mol_type = other RNA
tcctgtactgagctgccccgaaa

SEQ ID NO: 33063 - RNA, 21 nt, Synthetic Construct
  source 1..21: mol_type = other RNA
gggagtgtgacaatggtgttt

SEQ ID NO: 33064 - RNA, 21 nt, Synthetic Construct
  source 1..21: mol_type = other RNA
gggagtgtgacaatggtgttt

SEQ ID NO: 33065 - RNA, 32 nt, Synthetic Construct; identical to SEQ ID NO: 2582
  source 1..32: mol_type = other RNA

SEQ ID NO: 33066 - RNA, 23 nt, Synthetic Construct
  source 1..23: mol_type = other RNA
tcctgaactgagctgccccgagt

SEQ ID NO: 33067 - RNA, 15 nt, Synthetic Construct
  source 1..15: mol_type = other RNA
gagtagggcgggaca

SEQ ID NO: 33068 - RNA, 15 nt, Synthetic Construct
  source 1..15: mol_type = other RNA
gagtagggcgggaca

SEQ ID NO: 33069 - RNA, 25 nt, Synthetic Construct
  source 1..25: mol_type = other RNA
ttgaggatatgagatcgaggcgaca

SEQ ID NO: 33070 - RNA, 18 nt, Synthetic Construct
  source 1..18: mol_type = other RNA
gtccggatcgtagtctgc

SEQ ID NO: 33071 - RNA, 36 nt, Synthetic Construct; identical to SEQ ID NO: 3596
  source 1..36: mol_type = other RNA

SEQ ID NO: 33072 - RNA, 36 nt, Synthetic Construct; identical to SEQ ID NO: 3596
  source 1..36: mol_type = other RNA

SEQ ID NO: 33073 - RNA, 23 nt, Synthetic Construct
  source 1..23: mol_type = other RNA
tgaggggcagagagcgagacttg

SEQ ID NO: 33074 - RNA, 22 nt, Synthetic Construct
  source 1..22: mol_type = other RNA
tgaggggcagagagcgagactt

SEQ ID NO: 33075 - RNA, 23 nt, Synthetic Construct
  source 1..23: mol_type = other RNA
caacggaatcccaaaagcagccg

SEQ ID NO: 33076 - RNA, 22 nt, Synthetic Construct
  source 1..22: mol_type = other RNA
ttatggtttgcctgggactgaa

SEQ ID NO: 33077 - RNA, 22 nt, Synthetic Construct
  source 1..22: mol_type = other RNA
ttatggtttgcctgggactgaa

SEQ ID NO: 33078 - RNA, 16 nt, Synthetic Construct
  source 1..16: mol_type = other RNA
ctgcctcagcgtcggt

SEQ ID NO: 33079 - RNA, 16 nt, Synthetic Construct
  source 1..16: mol_type = other RNA
ctgcctcagcgtcggt

SEQ ID NO: 33080 - RNA, 17 nt, Synthetic Construct
  source 1..17: mol_type = other RNA
aggaattgacggaaggg

SEQ ID NO: 33081 - RNA, 17 nt, Synthetic Construct
  source 1..17: mol_type = other RNA
aggaattgacggaaggg

SEQ ID NO: 33082 - RNA, 21 nt, Synthetic Construct
  source 1..21: mol_type = other RNA
tgaggtagtaggttgtgtggc

SEQ ID NO: 33083 - RNA, 21 nt, Synthetic Construct
  source 1..21: mol_type = other RNA
tgaggtagtaggttgtgtggc

SEQ ID NO: 33084 - RNA, 34 nt, Synthetic Construct; identical to SEQ ID NO: 2298
  source 1..34: mol_type = other RNA

SEQ ID NO: 33085 - RNA, 23 nt, Synthetic Construct
  source 1..23: mol_type = other RNA
aaaagctgggttgagagggcgat

SEQ ID NO: 33086 - RNA, 27 nt, Synthetic Construct
  source 1..27: mol_type = other RNA
ccccccgctgctaaatttgactggcta

SEQ ID NO: 33087 - RNA, 27 nt, Synthetic Construct
  source 1..27: mol_type = other RNA
ccccccgctgctaaatttgactggcta

SEQ ID NO: 33088 - RNA, 21 nt, Synthetic Construct
  source 1..21: mol_type = other RNA
aatggcgccactagggttgtg

SEQ ID NO: 33089 - RNA, 23 nt, Synthetic Construct
  source 1..23: mol_type = other RNA
tgaggtagtaggttgtatggttt

SEQ ID NO: 33090 - RNA, 23 nt, Synthetic Construct
  source 1..23: mol_type = other RNA
tgaggtagtaggttgtatggttt

SEQ ID NO: 33091 - RNA, 15 nt, Synthetic Construct
  source 1..15: mol_type = other RNA
cggcccagactccta

SEQ ID NO: 33092 - RNA, 15 nt, Synthetic Construct
  source 1..15: mol_type = other RNA
cggcccagactccta

SEQ ID NO: 33093 - RNA, 21 nt, Synthetic Construct
  source 1..21: mol_type = other RNA
tgaggtagtagcttgtgctgt

SEQ ID NO: 33094 - RNA, 21 nt, Synthetic Construct
  source 1..21: mol_type = other RNA
tgaggtagtagcttgtgctgt

SEQ ID NO: 33095 - RNA, 21 nt, Synthetic Construct
  source 1..21: mol_type = other RNA
tgaggtagcaggttgtgtggt

SEQ ID NO: 33096 - RNA, 22 nt, Synthetic Construct
  source 1..22: mol_type = other RNA
tcccgtactgagctgccccgag

SEQ ID NO: 33097 - RNA, 22 nt, Synthetic Construct
  source 1..22: mol_type = other RNA
tcccgtactgagctgccccgag

SEQ ID NO: 33098 - RNA, 21 nt, Synthetic Construct
  source 1..21: mol_type = other RNA
taactccttaagcgaactcgc

SEQ ID NO: 33099 - RNA, 21 nt, Synthetic Construct
  source 1..21: mol_type = other RNA
taactccttaagcgaactcgc

SEQ ID NO: 33100 - RNA, 23 nt, Synthetic Construct
  source 1..23: mol_type = other RNA
gtaaacatccttgactggaagct

SEQ ID NO: 33101 - RNA, 23 nt, Synthetic Construct
  source 1..23: mol_type = other RNA
gtaaacatccttgactggaagct

SEQ ID NO: 33102 - RNA, 22 nt, Synthetic Construct
  source 1..22: mol_type = other RNA
tcctgtactgagccgccccgag

SEQ ID NO: 33103 - RNA, 22 nt, Synthetic Construct
  source 1..22: mol_type = other RNA
tcctgtactgagccgccccgag

SEQ ID NO: 33104 - RNA, 22 nt, Synthetic Construct
  source 1..22: mol_type = other RNA
acagtagtctgcacattggtta

SEQ ID NO: 33105 - RNA, 23 nt, Synthetic Construct
  source 1..23: mol_type = other RNA
tgaggtagtaggttgtgtagttt

SEQ ID NO: 33106 - RNA, 23 nt, Synthetic Construct
  source 1..23: mol_type = other RNA
tgaggtagtaggttgtgtagttt

SEQ ID NO: 33107 - RNA, 20 nt, Synthetic Construct
  source 1..20: mol_type = other RNA
tgaggtagtaggttgtgtgg

SEQ ID NO: 33108 - RNA, 21 nt, Synthetic Construct
  source 1..21: mol_type = other RNA
tcctgtactgagctgccctga

SEQ ID NO: 33109 - RNA, 21 nt, Synthetic Construct
  source 1..21: mol_type = other RNA
tcctgtactgagctgccctga

SEQ ID NO: 33110 - RNA, 23 nt, Synthetic Construct
  source 1..23: mol_type = other RNA
tggaatgtaaagaagtatgtacc

SEQ ID NO: 33111 - RNA, 23 nt, Synthetic Construct
  source 1..23: mol_type = other RNA
tggaatgtaaagaagtatgtacc

SEQ ID NO: 33112 - RNA, 21 nt, Synthetic Construct
  source 1..21: mol_type = other RNA
tgaggaagtagattgtatagt

SEQ ID NO: 33113 - RNA, 21 nt, Synthetic Construct
  source 1..21: mol_type = other RNA
tgaggaagtagattgtatagt

SEQ ID NO: 33114 - RNA, 23 nt, Synthetic Construct
  source 1..23: mol_type = other RNA
cgaggtagtaggttgtgtggttt

SEQ ID NO: 33115 - RNA, 23 nt, Synthetic Construct
  source 1..23: mol_type = other RNA
cgaggtagtaggttgtgtggttt

SEQ ID NO: 33116 - RNA, 23 nt, Synthetic Construct
  source 1..23: mol_type = other RNA
ccctgtactgagctgccccgaga

SEQ ID NO: 33117 - RNA, 23 nt, Synthetic Construct
  source 1..23: mol_type = other RNA
tgaggggcagggagcgagacttt

SEQ ID NO: 33118 - RNA, 23 nt, Synthetic Construct
  source 1..23: mol_type = other RNA
tgaggggcagggagcgagacttt

SEQ ID NO: 33119 - RNA, 22 nt, Synthetic Construct
  source 1..22: mol_type = other RNA
tattgcatttgtcccggcctgt

SEQ ID NO: 33120 - RNA, 22 nt, Synthetic Construct
  source 1..22: mol_type = other RNA
tattgcatttgtcccggcctgt

SEQ ID NO: 33121 - RNA, 32 nt, Synthetic Construct; identical to SEQ ID NO: 2086
  source 1..32: mol_type = other RNA

SEQ ID NO: 33122 - RNA, 32 nt, Synthetic Construct; identical to SEQ ID NO: 2086
  source 1..32: mol_type = other RNA

SEQ ID NO: 33123 - RNA, 22 nt, Synthetic Construct
  source 1..22: mol_type = other RNA
ttgcagcacgtaaatattggcg

SEQ ID NO: 33124 - RNA, 22 nt, Synthetic Construct
  source 1..22: mol_type = other RNA
ttgcagcacgtaaatattggcg

SEQ ID NO: 33125 - RNA, 21 nt, Synthetic Construct
  source 1..21: mol_type = other RNA
tcctgtgctgagctgccccga

SEQ ID NO: 33126 - RNA, 21 nt, Synthetic Construct
  source 1..21: mol_type = other RNA
tcctgtgctgagctgccccga

SEQ ID NO: 33127 - RNA, 22 nt, Synthetic Construct
  source 1..22: mol_type = other RNA
tatcgcacttgtcccggcctgt

SEQ ID NO: 33128 - RNA, 17 nt, Synthetic Construct
  source 1..17: mol_type = other RNA
tcccggacgagccccca

SEQ ID NO: 33129 - RNA, 17 nt, Synthetic Construct
  source 1..17: mol_type = other RNA
tcccggacgagccccca

SEQ ID NO: 33130 - RNA, 27 nt, Synthetic Construct
  source 1..27: mol_type = other RNA
ccccccactgccaaatttgactggctt

SEQ ID NO: 33131 - RNA, 22 nt, Synthetic Construct
  source 1..22: mol_type = other RNA
ncctgtactgagctgccccgag

SEQ ID NO: 33132 - RNA, 22 nt, Synthetic Construct
  source 1..22: mol_type = other RNA
ncctgtactgagctgccccgag

SEQ ID NO: 33133 - RNA, 34 nt, Synthetic Construct; identical to SEQ ID NO: 2367
  source 1..34: mol_type = other RNA

SEQ ID NO: 33134 - RNA, 34 nt, Synthetic Construct; identical to SEQ ID NO: 2367
  source 1..34: mol_type = other RNA

SEQ ID NO: 33135 - RNA, 18 nt, Synthetic Construct
  source 1..18: mol_type = other RNA
tcttcggtagtatagtgg

SEQ ID NO: 33136 - RNA, 18 nt, Synthetic Construct
  source 1..18: mol_type = other RNA
tcttcggtagtatagtgg

SEQ ID NO: 33137 - RNA, 21 nt, Synthetic Construct
  source 1..21: mol_type = other RNA
tggagtgtgacgatggtgttt

SEQ ID NO: 33138 - RNA, 17 nt, Synthetic Construct
  source 1..17: mol_type = other RNA
ccgtgtgaaagtaggtc

SEQ ID NO: 33139 - RNA, 19 nt, Synthetic Construct
  source 1..19: mol_type = other RNA
aggacagtgaaacgagtca

SEQ ID NO: 33140 - RNA, 18 nt, Synthetic Construct
  source 1..18: mol_type = other RNA
cctcgcgcgattggagcg

SEQ ID NO: 33141 - RNA, 22 nt, Synthetic Construct
  source 1..22: mol_type = other RNA
tcctgtactgagttgccccgag

SEQ ID NO: 33142 - RNA, 22 nt, Synthetic Construct
  source 1..22: mol_type = other RNA
tatcagcacgtaaatattggcg

SEQ ID NO: 33143 - RNA, 22 nt, Synthetic Construct
  source 1..22: mol_type = other RNA
tatcagcacgtaaatattggcg

SEQ ID NO: 33144 - RNA, 16 nt, Synthetic Construct
  source 1..16: mol_type = other RNA
aggtcatcgtcaggct

SEQ ID NO: 33145 - RNA, 16 nt, Synthetic Construct
  source 1..16: mol_type = other RNA
aggtcatcgtcaggct

SEQ ID NO: 33146 - RNA, 23 nt, Synthetic Construct
  source 1..23: mol_type = other RNA
ttggtccccttcaaccagctgtt

SEQ ID NO: 33147 - RNA, 23 nt, Synthetic Construct
  source 1..23: mol_type = other RNA
ttggtccccttcaaccagctgtt

SEQ ID NO: 33148 - RNA, 21 nt, Synthetic Construct
  source 1..21: mol_type = other RNA
tggagtgtgacagtggtgttt

SEQ ID NO: 33149 - RNA, 21 nt, Synthetic Construct
  source 1..21: mol_type = other RNA
tggagtgtgacagtggtgttt

SEQ ID NO: 33150 - RNA, 27 nt, Synthetic Construct
  source 1..27: mol_type = other RNA
tcctgagtagctcagcggcagagcggg

SEQ ID NO: 33151 - RNA, 27 nt, Synthetic Construct
  source 1..27: mol_type = other RNA
tcctgagtagctcagcggcagagcggg

SEQ ID NO: 33152 - RNA, 24 nt, Synthetic Construct
  source 1..24: mol_type = other RNA
agcagcattgtacagggctatgtt

SEQ ID NO: 33153 - RNA, 24 nt, Synthetic Construct
  source 1..24: mol_type = other RNA
agcagcattgtacagggctatgtt

SEQ ID NO: 33154 - RNA, 23 nt, Synthetic Construct
  source 1..23: mol_type = other RNA
ttatcagaatctccaggggtact

SEQ ID NO: 33155 - RNA, 23 nt, Synthetic Construct
  source 1..23: mol_type = other RNA
ttatcagaatctccaggggtact

SEQ ID NO: 33156 - RNA, 24 nt, Synthetic Construct
  source 1..24: mol_type = other RNA
actcggcgtggcgtcggtcgtggt

SEQ ID NO: 33157 - RNA, 24 nt, Synthetic Construct
  source 1..24: mol_type = other RNA
actcggcgtggcgtcggtcgtggt

SEQ ID NO: 33158 - RNA, 23 nt, Synthetic Construct
  source 1..23: mol_type = other RNA
aaggtagatagaacaggtcttgt

SEQ ID NO: 33159 - RNA, 22 nt, Synthetic Construct
  source 1..22: mol_type = other RNA
tcctgtactgagccgccccgag

SEQ ID NO: 33160 - RNA, 22 nt, Synthetic Construct
  source 1..22: mol_type = other RNA
tcctgtactgagccgccccgag

SEQ ID NO: 33161 - RNA, 23 nt, Synthetic Construct
  source 1..23: mol_type = other RNA
tcctgtactgggctgccccgagt

SEQ ID NO: 33162 - RNA, 23 nt, Synthetic Construct
  source 1..23: mol_type = other RNA
tcctgtactgggctgccccgagt

SEQ ID NO: 33163 - RNA, 22 nt, Synthetic Construct
  source 1..22: mol_type = other RNA
tgaggtaataggttgtgtggtt

SEQ ID NO: 33164 - RNA, 22 nt, Synthetic Construct
  source 1..22: mol_type = other RNA
tgaggtaataggttgtgtggtt

SEQ ID NO: 33165 - RNA, 22 nt, Synthetic Construct
  source 1..22: mol_type = other RNA
aaactccttaagcgaatctcgc

SEQ ID NO: 33166 - RNA, 22 nt, Synthetic Construct
  source 1..22: mol_type = other RNA
aaactccttaagcgaatctcgc

SEQ ID NO: 33167 - RNA, 31 nt, Synthetic Construct; identical to SEQ ID NO: 2333
  source 1..31: mol_type = other RNA

SEQ ID NO: 33168 - RNA, 27 nt, Synthetic Construct
  source 1..27: mol_type = other RNA
ccccccactgctaaatttgacaggctt

SEQ ID NO: 33169 - RNA, 23 nt, Synthetic Construct
  source 1..23: mol_type = other RNA
tcctgtactgagttgccccgaga

SEQ ID NO: 33170 - RNA, 23 nt, Synthetic Construct
  source 1..23: mol_type = other RNA
tcctgtactgagttgccccgaga

SEQ ID NO: 33171 - RNA, 23 nt, Synthetic Construct
  source 1..23: mol_type = other RNA
tccagtactgagctgccccgagt

SEQ ID NO: 33172 - RNA, 22 nt, Synthetic Construct
  source 1..22: mol_type = other RNA
cattgcgcttgtctcggtctga

SEQ ID NO: 33173 - RNA, 22 nt, Synthetic Construct
  source 1..22: mol_type = other RNA
cattgcgcttgtctcggtctga

SEQ ID NO: 33174 - RNA, 21 nt, Synthetic Construct
  source 1..21: mol_type = other RNA
tcctgtactgagctgccacga

SEQ ID NO: 33175 - RNA, 21 nt, Synthetic Construct
  source 1..21: mol_type = other RNA
tcctgtactgagctgccacga

SEQ ID NO: 33176 - RNA, 16 nt, Synthetic Construct
  source 1..16: mol_type = other RNA
gcggtggatgatgtgg

SEQ ID NO: 33177 - RNA, 16 nt, Synthetic Construct
  source 1..16: mol_type = other RNA
gcggtggatgatgtgg

SEQ ID NO: 33178 - RNA, 19 nt, Synthetic Construct
  source 1..19: mol_type = other RNA
tgagatgaagcactgtagc

SEQ ID NO: 33179 - RNA, 23 nt, Synthetic Construct
  source 1..23: mol_type = other RNA
tgaggtagtaggttgtgtggctt

SEQ ID NO: 33180 - RNA, 19 nt, Synthetic Construct
  source 1..19: mol_type = other RNA
tagcttatcagactgatgt

SEQ ID NO: 33181 - RNA, 17 nt, Synthetic Construct
  source 1..17: mol_type = other RNA
cagtcaggatgttggct

SEQ ID NO: 33182 - RNA, 21 nt, Synthetic Construct
  source 1..21: mol_type = other RNA
ggaggtagtagtttgtgctgt

SEQ ID NO: 33183 - RNA, 22 nt, Synthetic Construct
  source 1..22: mol_type = other RNA
tatagcacttgtcccggcctgt

SEQ ID NO: 33184 - RNA, 23 nt, Synthetic Construct
  source 1..23: mol_type = other RNA
tggaatgtaaagaagtatgtata

SEQ ID NO: 33185 - RNA, 23 nt, Synthetic Construct
  source 1..23: mol_type = other RNA
tggaatgtaaagaagtatgtata

SEQ ID NO: 33186 - RNA, 23 nt, Synthetic Construct
  source 1..23: mol_type = other RNA
tggtaatacgacgtactaagtgt

SEQ ID NO: 33187 - RNA, 22 nt, Synthetic Construct
  source 1..22: mol_type = other RNA
tatcgcacttgtcccggcctgt

SEQ ID NO: 33188 - RNA, 22 nt, Synthetic Construct
  source 1..22: mol_type = other RNA
tatcgcacttgtcccggcctgt

SEQ ID NO: 33189 - RNA, 35 nt, Synthetic Construct; identical to SEQ ID NO: 1095
  source 1..35: mol_type = other RNA

SEQ ID NO: 33190 - RNA, 35 nt, Synthetic Construct; identical to SEQ ID NO: 1095
  source 1..35: mol_type = other RNA

SEQ ID NO: 33191 - RNA, 20 nt, Synthetic Construct
  source 1..20: mol_type = other RNA
tacagtatagatgatgtact

SEQ ID NO: 33192 - RNA, 34 nt, Synthetic Construct; identical to SEQ ID NO: 5595
  source 1..34: mol_type = other RNA

SEQ ID NO: 33193 - RNA, 34 nt, Synthetic Construct; identical to SEQ ID NO: 5595
  source 1..34: mol_type = other RNA

SEQ ID NO: 33194 - RNA, 18 nt, Synthetic Construct
  source 1..18: mol_type = other RNA
atcccactcctgacacca

SEQ ID NO: 33195 - RNA, 22 nt, Synthetic Construct
  source 1..22: mol_type = other RNA
atcacattgccagggatttcca

SEQ ID NO: 33196 - RNA, 23 nt, Synthetic Construct
  source 1..23: mol_type = other RNA
taccctgtagaaccgaatttgtg

SEQ ID NO: 33197 - RNA, 23 nt, Synthetic Construct
  source 1..23: mol_type = other RNA
taccctgtagaaccgaatttgtg

SEQ ID NO: 33198 - RNA, 21 nt, Synthetic Construct
  source 1..21: mol_type = other RNA
tgaggtagtaggttgtgtggc

SEQ ID NO: 33199 - RNA, 15 nt, Synthetic Construct
  source 1..15: mol_type = other RNA
gagtagggcgggaca

SEQ ID NO: 33200 - RNA, 15 nt, Synthetic Construct
  source 1..15: mol_type = other RNA
gagtagggcgggaca

SEQ ID NO: 33201 - RNA, 22 nt, Synthetic Construct
  source 1..22: mol_type = other RNA
tattgcacttgtcccggcctgc

SEQ ID NO: 33202 - RNA, 22 nt, Synthetic Construct
  source 1..22: mol_type = other RNA
tattgcacttgtcccggcctgc

SEQ ID NO: 33203 - RNA, 16 nt, Synthetic Construct
  source 1..16: mol_type = other RNA
atgcaagtcgaacggt

SEQ ID NO: 33204 - RNA, 21 nt, Synthetic Construct
  source 1..21: mol_type = other RNA
tgaggcagtaggttgtatagt

SEQ ID NO: 33205 - RNA, 21 nt, Synthetic Construct
  source 1..21: mol_type = other RNA
tgaggcagtaggttgtatagt

SEQ ID NO: 33206 - RNA, 21 nt, Synthetic Construct
  source 1..21: mol_type = other RNA
tgaggtagtagtttgtgccgt

SEQ ID NO: 33207 - RNA, 35 nt, Synthetic Construct
  source 1..35: mol_type = other RNA
tccctggtggtctagtggttaggattcggcgctct

SEQ ID NO: 33208 - RNA, 35 nt, Synthetic Construct; identical to SEQ ID NO: 33207
  source 1..35: mol_type = other RNA

SEQ ID NO: 33209 - RNA, 22 nt, Synthetic Construct
  source 1..22: mol_type = other RNA
tgaggaagtagattgtatagtt

SEQ ID NO: 33210 - RNA, 22 nt, Synthetic Construct
  source 1..22: mol_type = other RNA
tgaggtagtggattgtatagtt

SEQ ID NO: 33211 - RNA, 22 nt, Synthetic Construct
  source 1..22: mol_type = other RNA
tgaggtagtggattgtatagtt

SEQ ID NO: 33212 - RNA, 24 nt, Synthetic Construct
  source 1..24: mol_type = other RNA
tgagaactgaattccatgggttga

SEQ ID NO: 33213 - RNA, 22 nt, Synthetic Construct
  source 1..22: mol_type = other RNA
ttcaagtaattcaggataggtc

SEQ ID NO: 33214 - RNA, 36 nt, Synthetic Construct; identical to SEQ ID NO: 10982
  source 1..36: mol_type = other RNA

SEQ ID NO: 33215 - RNA, 36 nt, Synthetic Construct; identical to SEQ ID NO: 10982
  source 1..36: mol_type = other RNA

SEQ ID NO: 33216 - RNA, 21 nt, Synthetic Construct
  source 1..21: mol_type = other RNA
tgaggtagtagattgcatagt

SEQ ID NO: 33217 - RNA, 21 nt, Synthetic Construct
  source 1..21: mol_type = other RNA
tgaggtagtagattgcatagt

SEQ ID NO: 33218 - RNA, 23 nt, Synthetic Construct
  source 1..23: mol_type = other RNA
tcctgtactgagctgtcccgaga

SEQ ID NO: 33219 - RNA, 23 nt, Synthetic Construct
  source 1..23: mol_type = other RNA
tcctgtactgagctgtcccgaga

SEQ ID NO: 33220 - RNA, 23 nt, Synthetic Construct
  source 1..23: mol_type = other RNA
tggtaatacgacgtacttagcgt

SEQ ID NO: 33221 - RNA, 22 nt, Synthetic Construct
  source 1..22: mol_type = other RNA
tcaagagcaataacgaaaaatg

SEQ ID NO: 33222 - RNA, 22 nt, Synthetic Construct
  source 1..22: mol_type = other RNA
tcaagagcaataacgaaaaatg

SEQ ID NO: 33223 - RNA, 21 nt, Synthetic Construct
  source 1..21: mol_type = other RNA
gcagatcttggtggtagtagc

SEQ ID NO: 33224 - RNA, 21 nt, Synthetic Construct
  source 1..21: mol_type = other RNA
gcagatcttggtggtagtagc

SEQ ID NO: 33225 - RNA, 23 nt, Synthetic Construct
  source 1..23: mol_type = other RNA
tacagtactgtgataactgaaga

SEQ ID NO: 33226 - RNA, 23 nt, Synthetic Construct
  source 1..23: mol_type = other RNA
tacagtactgtgataactgaaga

SEQ ID NO: 33227 - RNA, 18 nt, Synthetic Construct
  source 1..18: mol_type = other RNA
acagtcaggatgttggct

SEQ ID NO: 33228 - RNA, 34 nt, Synthetic Construct; identical to SEQ ID NO: 2019
  source 1..34: mol_type = other RNA

SEQ ID NO: 33229 - RNA, 34 nt, Synthetic Construct; identical to SEQ ID NO: 2019
  source 1..34: mol_type = other RNA

SEQ ID NO: 33230 - RNA, 31 nt, Synthetic Construct; identical to SEQ ID NO: 2427
  source 1..31: mol_type = other RNA

SEQ ID NO: 33231 - RNA, 22 nt, Synthetic Construct
  source 1..22: mol_type = other RNA
tcctgtactgagctgcctcgag

SEQ ID NO: 33232 - RNA, 22 nt, Synthetic Construct
  source 1..22: mol_type = other RNA
tcctgtactgagctgcctcgag

SEQ ID NO: 33233 - RNA, 22 nt, Synthetic Construct
  source 1..22: mol_type = other RNA
tgaggtagtaggttgtgtggtt

SEQ ID NO: 33234 - RNA, 21 nt, Synthetic Construct
  source 1..21: mol_type = other RNA
tatgtctgctgaccatcacct

SEQ ID NO: 33235 - RNA, 21 nt, Synthetic Construct
  source 1..21: mol_type = other RNA
tatgtctgctgaccatcacct

SEQ ID NO: 33236 - RNA, 16 nt, Synthetic Construct
  source 1..16: mol_type = other RNA
tccggatcgtagtctg

SEQ ID NO: 33237 - RNA, 26 nt, Synthetic Construct
  source 1..26: mol_type = other RNA
gcgggcgtagctcaggggtagagcgc

SEQ ID NO: 33238 - RNA, 26 nt, Synthetic Construct
  source 1..26: mol_type = other RNA
gcgggcgtagctcaggggtagagcgc

SEQ ID NO: 33239 - RNA, 24 nt, Synthetic Construct
  source 1..24: mol_type = other RNA
tagtgcaatattgcttatagggtt

SEQ ID NO: 33240 - RNA, 22 nt, Synthetic Construct
  source 1..22: mol_type = other RNA
tgaggtagtagattgtatagtc

SEQ ID NO: 33241 - RNA, 22 nt, Synthetic Construct
  source 1..22: mol_type = other RNA
tgaggtagtagattgtatagtc

SEQ ID NO: 33242 - RNA, 25 nt, Synthetic Construct
  source 1..25: mol_type = other RNA
ttgaggatatgggatcgagacgaca

SEQ ID NO: 33243 - RNA, 27 nt, Synthetic Construct
  source 1..27: mol_type = other RNA
ccccccactgctaaattcgactggctt

SEQ ID NO: 33244 - RNA, 27 nt, Synthetic Construct
  source 1..27: mol_type = other RNA
ccccccactgctaaattcgactggctt

SEQ ID NO: 33245 - RNA, 23 nt, Synthetic Construct
  source 1..23: mol_type = other RNA
tagcttatcagactgatgttgaa

SEQ ID NO: 33246 - RNA, 20 nt, Synthetic Construct
  source 1..20: mol_type = other RNA
taaggtagtaggttgtatag

SEQ ID NO: 33247 - RNA, 20 nt, Synthetic Construct
  source 1..20: mol_type = other RNA
taaggtagtaggttgtatag

SEQ ID NO: 33248 - RNA, 22 nt, Synthetic Construct
  source 1..22: mol_type = other RNA
tgaggtagtggtttgtgctgtt

SEQ ID NO: 33249 - RNA, 22 nt, Synthetic Construct
  source 1..22: mol_type = other RNA
tgaggtagtggtttgtgctgtt

SEQ ID NO: 33250 - RNA, 22 nt, Synthetic Construct
  source 1..22: mol_type = other RNA
tttttcattattgctcctgacc

SEQ ID NO: 33251 - RNA, 22 nt, Synthetic Construct
  source 1..22: mol_type = other RNA
tttttcattattgctcctgacc

SEQ ID NO: 33252 - RNA, 21 nt, Synthetic Construct
  source 1..21: mol_type = other RNA
tggagtgtgacaatggtgtct

SEQ ID NO: 33253 - RNA, 22 nt, Synthetic Construct
  source 1..22: mol_type = other RNA
acagtagcctgcacattggtta

SEQ ID NO: 33254 - RNA, 15 nt, Synthetic Construct
  source 1..15: mol_type = other RNA
gggtgaaagcggggg

SEQ ID NO: 33255 - RNA, 15 nt, Synthetic Construct
  source 1..15: mol_type = other RNA
gggtgaaagcggggg

SEQ ID NO: 33256 - RNA, 22 nt, Synthetic Construct
  source 1..22: mol_type = other RNA
tatatatatatatgtacgtatg

SEQ ID NO: 33257 - RNA, 31 nt, Synthetic Construct; identical to SEQ ID NO: 9212
  source 1..31: mol_type = other RNA

SEQ ID NO: 33258 - RNA, 31 nt, Synthetic Construct; identical to SEQ ID NO: 9212
  source 1..31: mol_type = other RNA

SEQ ID NO: 33259 - RNA, 20 nt, Synthetic Construct
  source 1..20: mol_type = other RNA
tgaggaagtaggttgtatag

SEQ ID NO: 33260 - RNA, 24 nt, Synthetic Construct
  source 1..24: mol_type = other RNA
gatgaggcgtgataacgagtctgc

SEQ ID NO: 33261 - RNA, 24 nt, Synthetic Construct
  source 1..24: mol_type = other RNA
gatgaggcgtgataacgagtctgc

SEQ ID NO: 33262 - RNA, 21 nt, Synthetic Construct
  source 1..21: mol_type = other RNA
tacctggttgatcctgccagt

SEQ ID NO: 33263 - RNA, 21 nt, Synthetic Construct
  source 1..21: mol_type = other RNA
tacctggttgatcctgccagt

SEQ ID NO: 33264 - RNA, 35 nt, Synthetic Construct; identical to SEQ ID NO: 757
  source 1..35: mol_type = other RNA

SEQ ID NO: 33265 - RNA, 23 nt, Synthetic Construct
  source 1..23: mol_type = other RNA
tgaggtagtaggttgtatagttg

SEQ ID NO: 33266 - RNA, 26 nt, Synthetic Construct
  source 1..26: mol_type = other RNA
gactcttagcggtggatcactcggct

SEQ ID NO: 33267 - RNA, 26 nt, Synthetic Construct
  source 1..26: mol_type = other RNA
gactcttagcggtggatcactcggct

SEQ ID NO: 33268 - RNA, 23 nt, Synthetic Construct
  source 1..23: mol_type = other RNA
cagagttctacagtccgacgatc

SEQ ID NO: 33269 - RNA, 23 nt, Synthetic Construct
  source 1..23: mol_type = other RNA
cagagttctacagtccgacgatc

SEQ ID NO: 33270 - RNA, 36 nt, Synthetic Construct; identical to SEQ ID NO: 2469
  source 1..36: mol_type = other RNA

SEQ ID NO: 33271 - RNA, 36 nt, Synthetic Construct; identical to SEQ ID NO: 2469
  source 1..36: mol_type = other RNA

SEQ ID NO: 33272 - RNA, 23 nt, Synthetic Construct
  source 1..23: mol_type = other RNA
caaagtgctgtccgtgcaggtag

SEQ ID NO: 33273 - RNA, 23 nt, Synthetic Construct
  source 1..23: mol_type = other RNA
caaagtgctgtccgtgcaggtag

SEQ ID NO: 33274 - RNA, 22 nt, Synthetic Construct
  source 1..22: mol_type = other RNA
tcctgtactgagctgtcccgag

SEQ ID NO: 33275 - RNA, 20 nt, Synthetic Construct
  source 1..20: mol_type = other RNA
tgaggaagtaggttgtgtgg

SEQ ID NO: 33276 - RNA, 20 nt, Synthetic Construct
  source 1..20: mol_type = other RNA
tgaggaagtaggttgtgtgg

SEQ ID NO: 33277 - RNA, 20 nt, Synthetic Construct
  source 1..20: mol_type = other RNA
tgaggtagtagtttgtacag

SEQ ID NO: 33278 - RNA, 20 nt, Synthetic Construct
  source 1..20: mol_type = other RNA
tgaggtagtagtttgtacag

SEQ ID NO: 33279 - RNA, 36 nt, Synthetic Construct; identical to SEQ ID NO: 777
  source 1..36: mol_type = other RNA

SEQ ID NO: 33280 - RNA, 16 nt, Synthetic Construct
  source 1..16: mol_type = other RNA
gcaagaggtcagcggt

SEQ ID NO: 33281 - RNA, 17 nt, Synthetic Construct
  source 1..17: mol_type = other RNA
agtgacgcgcatgaatg

SEQ ID NO: 33282 - RNA, 17 nt, Synthetic Construct
  source 1..17: mol_type = other RNA
agtgacgcgcatgaatg

SEQ ID NO: 33283 - RNA, 22 nt, Synthetic Construct
  source 1..22: mol_type = other RNA
tacgcctgtctgagcgtcgctt

SEQ ID NO: 33284 - RNA, 21 nt, Synthetic Construct
  source 1..21: mol_type = other RNA
tgaggggcagagagcgaggct

SEQ ID NO: 33285 - RNA, 22 nt, Synthetic Construct
  source 1..22: mol_type = other RNA
tgaggtagtaggttgtgtggta

SEQ ID NO: 33286 - RNA, 21 nt, Synthetic Construct
  source 1..21: mol_type = other RNA
tcctgtactgagctgcctcga

SEQ ID NO: 33287 - RNA, 21 nt, Synthetic Construct
  source 1..21: mol_type = other RNA
tcctgtactgagctgcctcga

SEQ ID NO: 33288 - RNA, 22 nt, Synthetic Construct
  source 1..22: mol_type = other RNA
tggggtagtaggttgtgtggtt

SEQ ID NO: 33289 - RNA, 22 nt, Synthetic Construct
  source 1..22: mol_type = other RNA
tcctgtactgggctgccccgag

SEQ ID NO: 33290 - RNA, 17 nt, Synthetic Construct
  source 1..17: mol_type = other RNA
cacggcccagactccta

SEQ ID NO: 33291 - RNA, 20 nt, Synthetic Construct
  source 1..20: mol_type = other RNA
tgaggtagtaggttgtgtag

SEQ ID NO: 33292 - RNA, 20 nt, Synthetic Construct
  source 1..20: mol_type = other RNA
tgaggtagtaggttgtgtag

SEQ ID NO: 33293 - RNA, 23 nt, Synthetic Construct
  source 1..23: mol_type = other RNA
tcctgtactgagctgccctgagt

SEQ ID NO: 33294 - RNA, 31 nt, Synthetic Construct; identical to SEQ ID NO: 2758
  source 1..31: mol_type = other RNA

SEQ ID NO: 33295 - RNA, 31 nt, Synthetic Construct; identical to SEQ ID NO: 2758
  source 1..31: mol_type = other RNA

SEQ ID NO: 33296 - RNA, 22 nt, Synthetic Construct
  source 1..22: mol_type = other RNA
tattgcacttgtcctggcctgt

SEQ ID NO: 33297 - RNA, 22 nt, Synthetic Construct
  source 1..22: mol_type = other RNA
tattgcacttgtcctggcctgt

SEQ ID NO: 33298 - RNA, 22 nt, Synthetic Construct
  source 1..22: mol_type = other RNA
actggacttggagtcagaaggc

SEQ ID NO: 33299 - RNA, 27 nt, Synthetic Construct
  source 1..27: mol_type = other RNA
tcccccactgctaaatttgactggctt

SEQ ID NO: 33300 - RNA, 32 nt, Synthetic Construct; identical to SEQ ID NO: 2798
  source 1..32: mol_type = other RNA

SEQ ID NO: 33301 - RNA, 32 nt, Synthetic Construct; identical to SEQ ID NO: 2798
  source 1..32: mol_type = other RNA

SEQ ID NO: 33302 - RNA, 23 nt, Synthetic Construct
  source 1..23: mol_type = other RNA
agcaacattgtctgctgggtttc

SEQ ID NO: 33303 - RNA, 20 nt, Synthetic Construct
  source 1..20: mol_type = other RNA
tgtcagtttgtcaaataccc

SEQ ID NO: 33304 - RNA, 22 nt, Synthetic Construct
  source 1..22: mol_type = other RNA
tgaggtagtggtttgtgctgtt

SEQ ID NO: 33305 - RNA, 22 nt, Synthetic Construct
  source 1..22: mol_type = other RNA
tgaggtagtggtttgtgctgtt

SEQ ID NO: 33306 - RNA, 22 nt, Synthetic Construct
  source 1..22: mol_type = other RNA
tgaggtagtaggttgcgtggtt

SEQ ID NO: 33307 - RNA, 21 nt, Synthetic Construct
  source 1..21: mol_type = other RNA
taactccttaagcgaatctcc

SEQ ID NO: 33308 - RNA, 21 nt, Synthetic Construct
  source 1..21: mol_type = other RNA
taactccttaagcgaatctcc

SEQ ID NO: 33309 - RNA, 21 nt, Synthetic Construct
  source 1..21: mol_type = other RNA
taactccttaagcgaatctcg

SEQ ID NO: 33310 - RNA, 21 nt, Synthetic Construct
  source 1..21: mol_type = other RNA
taactccttaagcgaatctcg

SEQ ID NO: 33311 - RNA, 21 nt, Synthetic Construct
  source 1..21: mol_type = other RNA
tcctgtactgagctgctccga

SEQ ID NO: 33312 - RNA, 21 nt, Synthetic Construct
  source 1..21: mol_type = other RNA
tcctgtactgagctgctccga

SEQ ID NO: 33313 - RNA, 22 nt, Synthetic Construct
  source 1..22: mol_type = other RNA
tcctgtattgagctgccccgag

SEQ ID NO: 33314 - RNA, 22 nt, Synthetic Construct
  source 1..22: mol_type = other RNA
tagcagcacgtgaatattggcg

SEQ ID NO: 33315 - RNA, 22 nt, Synthetic Construct
  source 1..22: mol_type = other RNA
tagcagcacgtgaatattggcg

SEQ ID NO: 33316 - RNA, 21 nt, Synthetic Construct
  source 1..21: mol_type = other RNA
ttctgtactgagctgccccga

SEQ ID NO: 33317 - RNA, 22 nt, Synthetic Construct
  source 1..22: mol_type = other RNA
tcgtaccgtgggtaataatgcg

SEQ ID NO: 33318 - RNA, 25 nt, Synthetic Construct
  source 1..25: mol_type = other RNA
tagtgcaatattgcttatagggttt

SEQ ID NO: 33319 - RNA, 25 nt, Synthetic Construct
  source 1..25: mol_type = other RNA
tagtgcaatattgcttatagggttt

SEQ ID NO: 33320 - RNA, 23 nt, Synthetic Construct
  source 1..23: mol_type = other RNA
tgaggtagtgggttgtgtggttt

SEQ ID NO: 33321 - RNA, 21 nt, Synthetic Construct
  source 1..21: mol_type = other RNA
agtcagtttgtcaaatacccc

SEQ ID NO: 33322 - RNA, 21 nt, Synthetic Construct
  source 1..21: mol_type = other RNA
tgaggtagtaggttgtatagc

SEQ ID NO: 33323 - RNA, 21 nt, Synthetic Construct
  source 1..21: mol_type = other RNA
tgaggtagtaggttgtatagc

SEQ ID NO: 33324 - RNA, 22 nt, Synthetic Construct
  source 1..22: mol_type = other RNA
aagctgccagttgaagaactgt

SEQ ID NO: 33325 - RNA, 22 nt, Synthetic Construct
  source 1..22: mol_type = other RNA
aagctgccagttgaagaactgt

SEQ ID NO: 33326 - RNA, 23 nt, Synthetic Construct
  source 1..23: mol_type = other RNA
tgtaaacatcctcgactggaagc

SEQ ID NO: 33327 - RNA, 18 nt, Synthetic Construct
  source 1..18: mol_type = other RNA
gctgtgatggccgagtgg

SEQ ID NO: 33328 - RNA, 18 nt, Synthetic Construct
  source 1..18: mol_type = other RNA
gctgtgatggccgagtgg

SEQ ID NO: 33329 - RNA, 31 nt, Synthetic Construct; identical to SEQ ID NO: 6001
  source 1..31: mol_type = other RNA

SEQ ID NO: 33330 - RNA, 31 nt, Synthetic Construct; identical to SEQ ID NO: 6001
  source 1..31: mol_type = other RNA

SEQ ID NO: 33331 - RNA, 21 nt, Synthetic Construct
  source 1..21: mol_type = other RNA
tgaggtagtagatcgtatagt

SEQ ID NO: 33332 - RNA, 21 nt, Synthetic Construct
  source 1..21: mol_type = other RNA
tgaggtagtagatcgtatagt

SEQ ID NO: 33333 - RNA, 22 nt, Synthetic Construct
  source 1..22: mol_type = other RNA
tgaagtagtaggttgtatagtt

SEQ ID NO: 33334 - RNA, 20 nt, Synthetic Construct
  source 1..20: mol_type = other RNA
ccgcagagtacagcttggga

SEQ ID NO: 33335 - RNA, 22 nt, Synthetic Construct
  source 1..22: mol_type = other RNA
tgaggtagtagtttgtgctgtc

SEQ ID NO: 33336 - RNA, 22 nt, Synthetic Construct
  source 1..22: mol_type = other RNA
tgaggtagtagtttgtgctgtc

SEQ ID NO: 33337 - RNA, 22 nt, Synthetic Construct
  source 1..22: mol_type = other RNA
cggaatgtaaagaagtatgtat

SEQ ID NO: 33338 - RNA, 22 nt, Synthetic Construct
  source 1..22: mol_type = other RNA
caaagtgctgttcgtgcaggta

SEQ ID NO: 33339 - RNA, 31 nt, Synthetic Construct; identical to SEQ ID NO: 2295
  source 1..31: mol_type = other RNA

SEQ ID NO: 33340 - RNA, 31 nt, Synthetic Construct; identical to SEQ ID NO: 2295
  source 1..31: mol_type = other RNA

SEQ ID NO: 33341 - RNA, 23 nt, Synthetic Construct
  source 1..23: mol_type = other RNA
tcctgtactgagccgccccgaga

SEQ ID NO: 33342 - RNA, 19 nt, Synthetic Construct
  source 1..19: mol_type = other RNA
cctgtctgaatatgggggg

SEQ ID NO: 33343 - RNA, 22 nt, Synthetic Construct
  source 1..22: mol_type = other RNA
tattgcacttgtcccggcctat

SEQ ID NO: 33344 - RNA, 22 nt, Synthetic Construct
  source 1..22: mol_type = other RNA
tacaagtaatccaggataggct

SEQ ID NO: 33345 - RNA, 23 nt, Synthetic Construct
  source 1..23: mol_type = other RNA
ttatggtttgcctgggactgatt

SEQ ID NO: 33346 - RNA, 23 nt, Synthetic Construct
  source 1..23: mol_type = other RNA
ttatggtttgcctgggactgatt

SEQ ID NO: 33347 - RNA, 22 nt, Synthetic Construct
  source 1..22: mol_type = other RNA
tatatatatatatgtacgtatg

SEQ ID NO: 33348 - RNA, 31 nt, Synthetic Construct; identical to SEQ ID NO: 2293
  source 1..31: mol_type = other RNA

SEQ ID NO: 33349 - RNA, 31 nt, Synthetic Construct; identical to SEQ ID NO: 2293
  source 1..31: mol_type = other RNA

SEQ ID NO: 33350 - RNA, 17 nt, Synthetic Construct
  source 1..17: mol_type = other RNA
gggaacgtgagctgggt

SEQ ID NO: 33351 - RNA, 17 nt, Synthetic Construct
  source 1..17: mol_type = other RNA
gggaacgtgagctgggt

SEQ ID NO: 33352 - RNA, 31 nt, Synthetic Construct; identical to SEQ ID NO: 4881
  source 1..31: mol_type = other RNA

SEQ ID NO: 33353 - RNA, 31 nt, Synthetic Construct; identical to SEQ ID NO: 4881
  source 1..31: mol_type = other RNA

SEQ ID NO: 33354 - RNA, 21 nt, Synthetic Construct
  source 1..21: mol_type = other RNA
tgtagtgtttcctactttatg

SEQ ID NO: 33355 - RNA, 21 nt, Synthetic Construct
  source 1..21: mol_type = other RNA
tgtagtgtttcctactttatg

SEQ ID NO: 33356 - RNA, 21 nt, Synthetic Construct
  source 1..21: mol_type = other RNA
cggtcccaagggtatggctgt

SEQ ID NO: 33357 - RNA, 21 nt, Synthetic Construct
  source 1..21: mol_type = other RNA
cggtcccaagggtatggctgt

SEQ ID NO: 33358 - RNA, 24 nt, Synthetic Construct
  source 1..24: mol_type = other RNA
tgtaaacatccttgactggaagct

SEQ ID NO: 33359 - RNA, 29 nt, Synthetic Construct
  source 1..29: mol_type = other RNA
ccccccccactgctaaatttgactggctt

SEQ ID NO: 33360 - RNA, 29 nt, Synthetic Construct
  source 1..29: mol_type = other RNA
ccccccccactgctaaatttgactggctt

SEQ ID NO: 33361 - RNA, 21 nt, Synthetic Construct
  source 1..21: mol_type = other RNA
tggagtgtgacaatggtgctt

SEQ ID NO: 33362 - RNA, 21 nt, Synthetic Construct
  source 1..21: mol_type = other RNA
tggagtgtgacaatggtgctt

SEQ ID NO: 33363 - RNA, 22 nt, Synthetic Construct
  source 1..22: mol_type = other RNA
tggaatgtaaagaagtatgtac

SEQ ID NO: 33364 - RNA, 22 nt, Synthetic Construct
  source 1..22: mol_type = other RNA
tggaatgtaaagaagtatgtac

SEQ ID NO: 33365 - RNA, 21 nt, Synthetic Construct
  source 1..21: mol_type = other RNA
agcagcattgtacagggctat

SEQ ID NO: 33366 - RNA, 22 nt, Synthetic Construct
  source 1..22: mol_type = other RNA
tgaggtagtagattgcatagtt

SEQ ID NO: 33367 - RNA, 22 nt, Synthetic Construct
  source 1..22: mol_type = other RNA
tgaggtagtagattgcatagtt

SEQ ID NO: 33368 - RNA, 22 nt, Synthetic Construct
  source 1..22: mol_type = other RNA
ctgggtcggtcgggctggggcg

SEQ ID NO: 33369 - RNA, 22 nt, Synthetic Construct
  source 1..22: mol_type = other RNA
ctgggtcggtcgggctggggcg

SEQ ID NO: 33370 - RNA, 23 nt, Synthetic Construct
  source 1..23: mol_type = other RNA
ggctcggtctgaggcccctcagt

SEQ ID NO: 33371 - RNA, 23 nt, Synthetic Construct
  source 1..23: mol_type = other RNA
tgaggtagtgggttgtgtggttt

SEQ ID NO: 33372 - RNA, 23 nt, Synthetic Construct
  source 1..23: mol_type = other RNA
tgaggtagtgggttgtgtggttt

SEQ ID NO: 33373 - RNA, 21 nt, Synthetic Construct
  source 1..21: mol_type = other RNA
tggagtgtgacaatggtgtct

SEQ ID NO: 33374 - RNA, 21 nt, Synthetic Construct
  source 1..21: mol_type = other RNA
tggagtgtgacaatggtgtct

SEQ ID NO: 33375 - RNA, 32 nt, Synthetic Construct; identical to SEQ ID NO: 753
  source 1..32: mol_type = other RNA

SEQ ID NO: 33376 - RNA, 32 nt, Synthetic Construct; identical to SEQ ID NO: 753
  source 1..32: mol_type = other RNA

SEQ ID NO: 33377 - RNA, 33 nt, Synthetic Construct
  source 1..33: mol_type = other RNA
tcccacatggtctagcggttaggattcctggtt

SEQ ID NO: 33378 - RNA, 23 nt, Synthetic Construct
  source 1..23: mol_type = other RNA
tagcagcacgtaaatattggcgt

SEQ ID NO: 33379 - RNA, 23 nt, Synthetic Construct
  source 1..23: mol_type = other RNA
ggaggggcagagagcgagacttt

SEQ ID NO: 33380 - RNA, 22 nt, Synthetic Construct
  source 1..22: mol_type = other RNA
tcagtgcactacagagctttgt

SEQ ID NO: 33381 - RNA, 22 nt, Synthetic Construct
  source 1..22: mol_type = other RNA
tgaggtagtaggtcgtgtggtt

SEQ ID NO: 33382 - RNA, 22 nt, Synthetic Construct
  source 1..22: mol_type = other RNA
tgaggtagtaggtcgtgtggtt

SEQ ID NO: 33383 - RNA, 19 nt, Synthetic Construct
  source 1..19: mol_type = other RNA
ccttggggttgtaggacca

SEQ ID NO: 33384 - RNA, 19 nt, Synthetic Construct
  source 1..19: mol_type = other RNA
ccttggggttgtaggacca

SEQ ID NO: 33385 - RNA, 27 nt, Synthetic Construct
  source 1..27: mol_type = other RNA
gaaaaagtcatggaggccatggggttg

SEQ ID NO: 33386 - RNA, 27 nt, Synthetic Construct
  source 1..27: mol_type = other RNA
gaaaaagtcatggaggccatggggttg

SEQ ID NO: 33387 - RNA, 27 nt, Synthetic Construct
  source 1..27: mol_type = other RNA
gcatgggtggttcagtggtagaattct

SEQ ID NO: 33388 - RNA, 27 nt, Synthetic Construct
  source 1..27: mol_type = other RNA
gcatgggtggttcagtggtagaattct

SEQ ID NO: 33389 - RNA, 20 nt, Synthetic Construct
  source 1..20: mol_type = other RNA
tgaggtagaaggttgtgtgg

SEQ ID NO: 33390 - RNA, 22 nt, Synthetic Construct
  source 1..22: mol_type = other RNA
cattgcacttgtctcggtccga

SEQ ID NO: 33391 - RNA, 22 nt, Synthetic Construct
  source 1..22: mol_type = other RNA
cattgcacttgtctcggtccga

SEQ ID NO: 33392 - RNA, 22 nt, Synthetic Construct
  source 1..22: mol_type = other RNA
tgaggtagtaggttgtgttgtt

SEQ ID NO: 33393 - RNA, 34 nt, Synthetic Construct; identical to SEQ ID NO: 2553
  source 1..34: mol_type = other RNA

SEQ ID NO: 33394 - RNA, 23 nt, Synthetic Construct
  source 1..23: mol_type = other RNA
tccctgtcctccaggagctcacg

SEQ ID NO: 33395 - RNA, 23 nt, Synthetic Construct
  source 1..23: mol_type = other RNA
tccctgtcctccaggagctcacg

SEQ ID NO: 33396 - RNA, 21 nt, Synthetic Construct
  source 1..21: mol_type = other RNA
tgaggaagtagattgtatagt

SEQ ID NO: 33397 - RNA, 37 nt, Synthetic Construct; identical to SEQ ID NO: 743
  source 1..37: mol_type = other RNA

SEQ ID NO: 33398 - RNA, 37 nt, Synthetic Construct; identical to SEQ ID NO: 743
  source 1..37: mol_type = other RNA

SEQ ID NO: 33399 - RNA, 18 nt, Synthetic Construct
  source 1..18: mol_type = other RNA
cataaagtagaaagcact

SEQ ID NO: 33400 - RNA, 22 nt, Synthetic Construct
  source 1..22: mol_type = other RNA
tgaggtagtagtttgtgctgat

SEQ ID NO: 33401 - RNA, 23 nt, Synthetic Construct
  source 1..23: mol_type = other RNA
gtcagtttgtcaaataccccaat

SEQ ID NO: 33402 - RNA, 27 nt, Synthetic Construct
  source 1..27: mol_type = other RNA
ttcaacttaacttgaccgctctgacca

SEQ ID NO: 33403 - RNA, 27 nt, Synthetic Construct
  source 1..27: mol_type = other RNA
ttcaacttaacttgaccgctctgacca

SEQ ID NO: 33404 - RNA, 21 nt, Synthetic Construct
  source 1..21: mol_type = other RNA
tgaggtagtagattgtacagt

SEQ ID NO: 33405 - RNA, 23 nt, Synthetic Construct
  source 1..23: mol_type = other RNA
agcagcattgtacagggctatct

SEQ ID NO: 33406 - RNA, 18 nt, Synthetic Construct
  source 1..18: mol_type = other RNA
tcctgtactgagctgccc

SEQ ID NO: 33407 - RNA, 18 nt, Synthetic Construct
  source 1..18: mol_type = other RNA
tcctgtactgagctgccc

SEQ ID NO: 33408 - RNA, 27 nt, Synthetic Construct
  source 1..27: mol_type = other RNA
ccccccaccgctaaatttgactggctt

SEQ ID NO: 33409 - RNA, 22 nt, Synthetic Construct
  source 1..22: mol_type = other RNA
catagcacttgtctcggtctga

SEQ ID NO: 33410 - RNA, 22 nt, Synthetic Construct
  source 1..22: mol_type = other RNA
catagcacttgtctcggtctga

SEQ ID NO: 33411 - RNA, 23 nt, Synthetic Construct
  source 1..23: mol_type = other RNA
tgaggggcggagagcgagacttt

SEQ ID NO: 33412 - RNA, 15 nt, Synthetic Construct
  source 1..15: mol_type = other RNA
ggtggctgtagctca

SEQ ID NO: 33413 - RNA, 21 nt, Synthetic Construct
  source 1..21: mol_type = other RNA
tgagaactgaattccatgggt

SEQ ID NO: 33414 - RNA, 23 nt, Synthetic Construct
  source 1..23: mol_type = other RNA
tcctgtactgagctgcctcgaga

SEQ ID NO: 33415 - RNA, 21 nt, Synthetic Construct
  source 1..21: mol_type = other RNA
tggagtgtgacaatggcgttt

SEQ ID NO: 33416 - RNA, 20 nt, Synthetic Construct
  source 1..20: mol_type = other RNA
cccagtaaacggcggccgta

SEQ ID NO: 33417 - RNA, 26 nt, Synthetic Construct
  source 1..26: mol_type = other RNA
ttaagtgacgatagcctaggagatac

SEQ ID NO: 33418 - RNA, 26 nt, Synthetic Construct
  source 1..26: mol_type = other RNA
ttaagtgacgatagcctaggagatac

SEQ ID NO: 33419 - RNA, 22 nt, Synthetic Construct
  source 1..22: mol_type = other RNA
ttcaagtaattcaggataggta

SEQ ID NO: 33420 - RNA, 25 nt, Synthetic Construct
  source 1..25: mol_type = other RNA
ttgaggatatgagatagagacgaca

SEQ ID NO: 33421 - RNA, 21 nt, Synthetic Construct
  source 1..21: mol_type = other RNA
taactccttaagcgaatctcg

SEQ ID NO: 33422 - RNA, 21 nt, Synthetic Construct
  source 1..21: mol_type = other RNA
taactccttaagcgaatctcg

SEQ ID NO: 33423 - RNA, 20 nt, Synthetic Construct
  source 1..20: mol_type = other RNA
gcgtgcttgactgcgagact

SEQ ID NO: 33424 - RNA, 23 nt, Synthetic Construct
  source 1..23: mol_type = other RNA
tcggatccgtctgagcttggctt

SEQ ID NO: 33425 - RNA, 21 nt, Synthetic Construct
  source 1..21: mol_type = other RNA
tcccgtactgagctgccccga

SEQ ID NO: 33426 - RNA, 23 nt, Synthetic Construct
  source 1..23: mol_type = other RNA
ggctcggtctgaggcccctcagt

SEQ ID NO: 33427 - RNA, 21 nt, Synthetic Construct
  source 1..21: mol_type = other RNA
tggagcgtgacaatggtgttt

SEQ ID NO: 33428 - RNA, 21 nt, Synthetic Construct
  source 1..21: mol_type = other RNA
tggagcgtgacaatggtgttt

SEQ ID NO: 33429 - RNA, 22 nt, Synthetic Construct
  source 1..22: mol_type = other RNA
tccagtactgagctgccccgag

SEQ ID NO: 33430 - RNA, 22 nt, Synthetic Construct
  source 1..22: mol_type = other RNA
tccagtactgagctgccccgag

SEQ ID NO: 33431 - RNA, 23 nt, Synthetic Construct
  source 1..23: mol_type = other RNA
tcacacagaaatcgcacccgtct

SEQ ID NO: 33432 - RNA, 23 nt, Synthetic Construct
  source 1..23: mol_type = other RNA
tcacacagaaatcgcacccgtct

SEQ ID NO: 33433 - RNA, 20 nt, Synthetic Construct
  source 1..20: mol_type = other RNA
cagagttctacagtccgacg

SEQ ID NO: 33434 - RNA, 20 nt, Synthetic Construct
  source 1..20: mol_type = other RNA
cagagttctacagtccgacg

SEQ ID NO: 33435 - RNA, 22 nt, Synthetic Construct
  source 1..22: mol_type = other RNA
tgtagtgtttcctactttatgg

SEQ ID NO: 33436 - RNA, 22 nt, Synthetic Construct
  source 1..22: mol_type = other RNA
tgtagtgtttcctactttatgg

SEQ ID NO: 33437 - RNA, 19 nt, Synthetic Construct
  source 1..19: mol_type = other RNA
cccttgtcattagttgcta

SEQ ID NO: 33438 - RNA, 21 nt, Synthetic Construct
  source 1..21: mol_type = other RNA
atcacattgccagggatttcc

SEQ ID NO: 33439 - RNA, 21 nt, Synthetic Construct
  source 1..21: mol_type = other RNA
atcacattgccagggatttcc

SEQ ID NO: 33440 - RNA, 24 nt, Synthetic Construct
  source 1..24: mol_type = other RNA
tgtaagcatccccgactggaagct

SEQ ID NO: 33441 - RNA, 23 nt, Synthetic Construct
  source 1..23: mol_type = other RNA
tcctgcactgagctgccccgaga

SEQ ID NO: 33442 - RNA, 37 nt, Synthetic Construct; identical to SEQ ID NO: 7503
  source 1..37: mol_type = other RNA

SEQ ID NO: 33443 - RNA, 37 nt, Synthetic Construct; identical to SEQ ID NO: 7503
  source 1..37: mol_type = other RNA

SEQ ID NO: 33444 - RNA, 20 nt, Synthetic Construct
  source 1..20: mol_type = other RNA
tagcagcacataatggtttg

SEQ ID NO: 33445 - RNA, 20 nt, Synthetic Construct
  source 1..20: mol_type = other RNA
tagcagcacataatggtttg

SEQ ID NO: 33446 - RNA, 21 nt, Synthetic Construct
  source 1..21: mol_type = other RNA
taaggtagtaggttgtgtggt

SEQ ID NO: 33447 - RNA, 23 nt, Synthetic Construct
  source 1..23: mol_type = other RNA
tcctgtactgagctgccccgagc

SEQ ID NO: 33448 - RNA, 23 nt, Synthetic Construct
  source 1..23: mol_type = other RNA
tcctgtactgagctgccccgagc

SEQ ID NO: 33449 - RNA, 22 nt, Synthetic Construct
  source 1..22: mol_type = other RNA
tgaggtagtagtttgtggtgtt

SEQ ID NO: 33450 - RNA, 26 nt, Synthetic Construct
  source 1..26: mol_type = other RNA
gactcttagcggtggatcactcggct

SEQ ID NO: 33451 - RNA, 23 nt, Synthetic Construct
  source 1..23: mol_type = other RNA
taactccttaagcgaatctcggc

SEQ ID NO: 33452 - RNA, 23 nt, Synthetic Construct
  source 1..23: mol_type = other RNA
taactccttaagcgaatctcggc

SEQ ID NO: 33453 - RNA, 21 nt, Synthetic Construct
  source 1..21: mol_type = other RNA
tgaggtggtaggttgtgtggt

SEQ ID NO: 33454 - RNA, 22 nt, Synthetic Construct
  source 1..22: mol_type = other RNA
tcctgtactgagctgccccgac

SEQ ID NO: 33455 - RNA, 22 nt, Synthetic Construct
  source 1..22: mol_type = other RNA
tgagaactgaattccatgggtt

SEQ ID NO: 33456 - RNA, 22 nt, Synthetic Construct
  source 1..22: mol_type = other RNA
catagcacttgtctcggtctga

SEQ ID NO: 33457 - RNA, 22 nt, Synthetic Construct
  source 1..22: mol_type = other RNA
catagcacttgtctcggtctga

SEQ ID NO: 33458 - RNA, 19 nt, Synthetic Construct
  source 1..19: mol_type = other RNA
ggctggtccgaaggtagtg

SEQ ID NO: 33459 - RNA, 19 nt, Synthetic Construct
  source 1..19: mol_type = other RNA
ggctggtccgaaggtagtg

SEQ ID NO: 33460 - RNA, 20 nt, Synthetic Construct
  source 1..20: mol_type = other RNA
ctgacctatgaattgacagc

SEQ ID NO: 33461 - RNA, 20 nt, Synthetic Construct
  source 1..20: mol_type = other RNA
ctgacctatgaattgacagc

SEQ ID NO: 33462 - RNA, 22 nt, Synthetic Construct
  source 1..22: mol_type = other RNA
cgcgacctcagatcagacgtgg

SEQ ID NO: 33463 - RNA, 22 nt, Synthetic Construct
  source 1..22: mol_type = other RNA
cgcgacctcagatcagacgtgg

SEQ ID NO: 33464 - RNA, 24 nt, Synthetic Construct
  source 1..24: mol_type = other RNA
tgtaaacatccccgactggaagcg

SEQ ID NO: 33465 - RNA, 16 nt, Synthetic Construct
  source 1..16: mol_type = other RNA
gtctacggccatacca

SEQ ID NO: 33466 - RNA, 18 nt, Synthetic Construct
  source 1..18: mol_type = other RNA
tgcgtagatatgcggagg

SEQ ID NO: 33467 - RNA, 18 nt, Synthetic Construct
  source 1..18: mol_type = other RNA
tgcgtagatatgcggagg

SEQ ID NO: 33468 - RNA, 22 nt, Synthetic Construct
  source 1..22: mol_type = other RNA
tagcagcacataaatattggcg

SEQ ID NO: 33469 - RNA, 22 nt, Synthetic Construct
  source 1..22: mol_type = other RNA
tgaggcagtaggttgtgtggtt

SEQ ID NO: 33470 - RNA, 22 nt, Synthetic Construct
  source 1..22: mol_type = other RNA
tgaggcagtaggttgtgtggtt

SEQ ID NO: 33471 - RNA, 15 nt, Synthetic Construct
  source 1..15: mol_type = other RNA
ggtgaaagcggggga

SEQ ID NO: 33472 - RNA, 22 nt, Synthetic Construct
  source 1..22: mol_type = other RNA
tcgtaacgtgagtaataatgcg

SEQ ID NO: 33473 - RNA, 17 nt, Synthetic Construct
  source 1..17: mol_type = other RNA
cagagacgagtcgacca

SEQ ID NO: 33474 - RNA, 22 nt, Synthetic Construct
  source 1..22: mol_type = other RNA
caacggaatcccaaaagcagct

SEQ ID NO: 33475 - RNA, 22 nt, Synthetic Construct
  source 1..22: mol_type = other RNA
caacggaatcccaaaagcagct

SEQ ID NO: 33476 - RNA, 26 nt, Synthetic Construct
  source 1..26: mol_type = other RNA
ttaagtgacgatagcctaggagatac

SEQ ID NO: 33477 - RNA, 15 nt, Synthetic Construct
  source 1..15: mol_type = other RNA
tccggatcgtagtct

SEQ ID NO: 33478 - RNA, 20 nt, Synthetic Construct
  source 1..20: mol_type = other RNA
caggacagtgaaacgagtca

SEQ ID NO: 33479 - RNA, 31 nt, Synthetic Construct; identical to SEQ ID NO: 960
  source 1..31: mol_type = other RNA

SEQ ID NO: 33480 - RNA, 24 nt, Synthetic Construct
  source 1..24: mol_type = other RNA
tcctgtactgagctgccccgagtt

SEQ ID NO: 33481 - RNA, 24 nt, Synthetic Construct
  source 1..24: mol_type = other RNA
tcctgtactgagctgccccgagtt

SEQ ID NO: 33482 - RNA, 20 nt, Synthetic Construct
  source 1..20: mol_type = other RNA
tgaggcagtaggttgtatag

SEQ ID NO: 33483 - RNA, 20 nt, Synthetic Construct
  source 1..20: mol_type = other RNA
taaggtagtaggttgtgtgg

SEQ ID NO: 33484 - RNA, 23 nt, Synthetic Construct
  source 1..23: mol_type = other RNA
gactcttagcggtggatcactcg

SEQ ID NO: 33485 - RNA, 23 nt, Synthetic Construct
  source 1..23: mol_type = other RNA
gactcttagcggtggatcactcg

SEQ ID NO: 33486 - RNA, 19 nt, Synthetic Construct
  source 1..19: mol_type = other RNA
ccagtaaacggcggccgta

SEQ ID NO: 33487 - RNA, 19 nt, Synthetic Construct
  source 1..19: mol_type = other RNA
ccagtaaacggcggccgta

SEQ ID NO: 33488 - RNA, 27 nt, Synthetic Construct
  source 1..27: mol_type = other RNA
ccgtgtgaaagtaggtcatcgtcaggc

SEQ ID NO: 33489 - RNA, 27 nt, Synthetic Construct
  source 1..27: mol_type = other RNA
ccgtgtgaaagtaggtcatcgtcaggc

SEQ ID NO: 33490 - RNA, 22 nt, Synthetic Construct
  source 1..22: mol_type = other RNA
tcctgtactgggctgccccgag

SEQ ID NO: 33491 - RNA, 22 nt, Synthetic Construct
  source 1..22: mol_type = other RNA
tcctgtactgggctgccccgag

SEQ ID NO: 33492 - RNA, 23 nt, Synthetic Construct
  source 1..23: mol_type = other RNA
tcatgtactgagctgccccgaga

SEQ ID NO: 33493 - RNA, 23 nt, Synthetic Construct
  source 1..23: mol_type = other RNA
tcatgtactgagctgccccgaga

SEQ ID NO: 33494 - RNA, 20 nt, Synthetic Construct
  source 1..20: mol_type = other RNA
caaagtgctgttcgtgcagg

SEQ ID NO: 33495 - RNA, 20 nt, Synthetic Construct
  source 1..20: mol_type = other RNA
caaagtgctgttcgtgcagg

SEQ ID NO: 33496 - RNA, 19 nt, Synthetic Construct
  source 1..19: mol_type = other RNA
cagagttctacagtccgac

SEQ ID NO: 33497 - RNA, 19 nt, Synthetic Construct
  source 1..19: mol_type = other RNA
cagagttctacagtccgac

SEQ ID NO: 33498 - RNA, 36 nt, Synthetic Construct; identical to SEQ ID NO: 2366
  source 1..36: mol_type = other RNA

SEQ ID NO: 33499 - RNA, 23 nt, Synthetic Construct
  source 1..23: mol_type = other RNA
tgaggtggtaggttgtgtggttt

SEQ ID NO: 33500 - RNA, 23 nt, Synthetic Construct
  source 1..23: mol_type = other RNA
tgaggtggtaggttgtgtggttt

SEQ ID NO: 33501 - RNA, 16 nt, Synthetic Construct
  source 1..16: mol_type = other RNA
gccagcagccgcggta

SEQ ID NO: 33502 - RNA, 16 nt, Synthetic Construct
  source 1..16: mol_type = other RNA
gccagcagccgcggta

SEQ ID NO: 33503 - RNA, 22 nt, Synthetic Construct
  source 1..22: mol_type = other RNA
tgaggtagtaggttgtgtggat

SEQ ID NO: 33504 - RNA, 30 nt, Synthetic Construct; identical to SEQ ID NO: 1641
  source 1..30: mol_type = other RNA

SEQ ID NO: 33505 - RNA, 30 nt, Synthetic Construct; identical to SEQ ID NO: 1641
  source 1..30: mol_type = other RNA

SEQ ID NO: 33506 - RNA, 23 nt, Synthetic Construct
  source 1..23: mol_type = other RNA
tgaggtagtaggttgtgtagttt

SEQ ID NO: 33507 - RNA, 22 nt, Synthetic Construct
  source 1..22: mol_type = other RNA
tattgcacttatcccggcctgt

SEQ ID NO: 33508 - RNA, 17 nt, Synthetic Construct
  source 1..17: mol_type = other RNA
cgcgacctcagatcaga

SEQ ID NO: 33509 - RNA, 23 nt, Synthetic Construct
  source 1..23: mol_type = other RNA
aggggtgctatctgtgattgagg

SEQ ID NO: 33510 - RNA, 23 nt, Synthetic Construct
  source 1..23: mol_type = other RNA
atcacattgccagggatttccat

SEQ ID NO: 33511 - RNA, 23 nt, Synthetic Construct
  source 1..23: mol_type = other RNA
caaagaattctccttttgggctt

SEQ ID NO: 33512 - RNA, 23 nt, Synthetic Construct
  source 1..23: mol_type = other RNA
caaagaattctccttttgggctt

SEQ ID NO: 33513 - RNA, 22 nt, Synthetic Construct
  source 1..22: mol_type = other RNA
tgaggtagtaagttgtgtggtt

SEQ ID NO: 33514 - RNA, 22 nt, Synthetic Construct
  source 1..22: mol_type = other RNA
tgaggtagtaagttgtgtggtt

SEQ ID NO: 33515 - RNA, 21 nt, Synthetic Construct
  source 1..21: mol_type = other RNA
atcacattgccagggatttcc

SEQ ID NO: 33516 - RNA, 31 nt, Synthetic Construct; identical to SEQ ID NO: 758
  source 1..31: mol_type = other RNA

SEQ ID NO: 33517 - RNA, 31 nt, Synthetic Construct; identical to SEQ ID NO: 758
  source 1..31: mol_type = other RNA

SEQ ID NO: 33518 - RNA, 22 nt, Synthetic Construct
  source 1..22: mol_type = other RNA
tatagcacttgtcccggcctgt

SEQ ID NO: 33519 - RNA, 22 nt, Synthetic Construct
  source 1..22: mol_type = other RNA
tatagcacttgtcccggcctgt

SEQ ID NO: 33520 - RNA, 23 nt, Synthetic Construct
  source 1..23: mol_type = other RNA
tgaggtggtaggttgtgtggttt

SEQ ID NO: 33521 - RNA, 23 nt, Synthetic Construct
  source 1..23: mol_type = other RNA
tgaggtggtaggttgtgtggttt

SEQ ID NO: 33522 - RNA, 22 nt, Synthetic Construct
  source 1..22: mol_type = other RNA
ngaggtagtagtttgtgctgtt

SEQ ID NO: 33523 - RNA, 22 nt, Synthetic Construct
  source 1..22: mol_type = other RNA
tagcagcaggtaaatattggcg

SEQ ID NO: 33524 - RNA, 24 nt, Synthetic Construct
  source 1..24: mol_type = other RNA
tgaggtagtaggttgtgtggtttt

SEQ ID NO: 33525 - RNA, 31 nt, Synthetic Construct; identical to SEQ ID NO: 2423
  source 1..31: mol_type = other RNA

SEQ ID NO: 33526 - RNA, 31 nt, Synthetic Construct; identical to SEQ ID NO: 2423
  source 1..31: mol_type = other RNA

SEQ ID NO: 33527 - RNA, 19 nt, Synthetic Construct
  source 1..19: mol_type = other RNA
gtacagtactgtgataact

SEQ ID NO: 33528 - RNA, 19 nt, Synthetic Construct
  source 1..19: mol_type = other RNA
gtacagtactgtgataact

SEQ ID NO: 33529 - RNA, 27 nt, Synthetic Construct
  source 1..27: mol_type = other RNA
ccccccactgcaaaatttgactggctt

SEQ ID NO: 33530 - RNA, 23 nt, Synthetic Construct
  source 1..23: mol_type = other RNA
tgagcgcctcgacgacagagccg

SEQ ID NO: 33531 - RNA, 24 nt, Synthetic Construct
  source 1..24: mol_type = other RNA
caacggaatcccaaaagcagctgt

SEQ ID NO: 33532 - RNA, 21 nt, Synthetic Construct
  source 1..21: mol_type = other RNA
ggaggtagtaggttgtgtggt

SEQ ID NO: 33533 - RNA, 21 nt, Synthetic Construct
  source 1..21: mol_type = other RNA
ggaggtagtaggttgtgtggt

SEQ ID NO: 33534 - RNA, 21 nt, Synthetic Construct
  source 1..21: mol_type = other RNA
cgtacagtgagtaataatgcg

SEQ ID NO: 33535 - RNA, 21 nt, Synthetic Construct
  source 1..21: mol_type = other RNA
ggaggtagtaggttgtgtggt

SEQ ID NO: 33536 - RNA, 21 nt, Synthetic Construct
  source 1..21: mol_type = other RNA
ggaggtagtaggttgtgtggt

SEQ ID NO: 33537 - RNA, 20 nt, Synthetic Construct
  source 1..20: mol_type = other RNA
cccagtaaacggcggccgta

SEQ ID NO: 33538 - RNA, 20 nt, Synthetic Construct
  source 1..20: mol_type = other RNA
cccagtaaacggcggccgta

SEQ ID NO: 33539 - RNA, 21 nt, Synthetic Construct
  source 1..21: mol_type = other RNA
cgtaccgtgagtaataatgcg

SEQ ID NO: 33540 - RNA, 21 nt, Synthetic Construct
  source 1..21: mol_type = other RNA
tcctgtactgagctgccccgg

SEQ ID NO: 33541 - RNA, 20 nt, Synthetic Construct
  source 1..20: mol_type = other RNA
tgaggtagcaggttgtatag

SEQ ID NO: 33542 - RNA, 20 nt, Synthetic Construct
  source 1..20: mol_type = other RNA
tgaggtagtaggttgtataa

SEQ ID NO: 33543 - RNA, 32 nt, Synthetic Construct; identical to SEQ ID NO: 770
  source 1..32: mol_type = other RNA

SEQ ID NO: 33544 - RNA, 32 nt, Synthetic Construct; identical to SEQ ID NO: 770
  source 1..32: mol_type = other RNA

SEQ ID NO: 33545 - RNA, 22 nt, Synthetic Construct
  source 1..22: mol_type = other RNA
tcaagagcaataacgaaaaatg

SEQ ID NO: 33546 - RNA, 22 nt, Synthetic Construct
  source 1..22: mol_type = other RNA
tcaagagcaataacgaaaaatg

SEQ ID NO: 33547 - RNA, 23 nt, Synthetic Construct
  source 1..23: mol_type = other RNA
gtgcagatcttggtggtagtagc

SEQ ID NO: 33548 - RNA, 23 nt, Synthetic Construct
  source 1..23: mol_type = other RNA
gtgcagatcttggtggtagtagc

SEQ ID NO: 33549 - RNA, 21 nt, Synthetic Construct
  source 1..21: mol_type = other RNA
taatactgcctggtaatgatg

SEQ ID NO: 33550 - RNA, 21 nt, Synthetic Construct
  source 1..21: mol_type = other RNA
taatactgcctggtaatgatg

SEQ ID NO: 33551 - RNA, 21 nt, Synthetic Construct
  source 1..21: mol_type = other RNA
tcctatactgagctgccccga

SEQ ID NO: 33552 - RNA, 21 nt, Synthetic Construct
  source 1..21: mol_type = other RNA
tcctatactgagctgccccga

SEQ ID NO: 33553 - RNA, 27 nt, Synthetic Construct
  source 1..27: mol_type = other RNA
ccccccactgctgaatttgactggctt

SEQ ID NO: 33554 - RNA, 27 nt, Synthetic Construct
  source 1..27: mol_type = other RNA
ccccccactgctgaatttgactggctt

SEQ ID NO: 33555 - RNA, 21 nt, Synthetic Construct
  source 1..21: mol_type = other RNA
cggtcccaagggtatggctgt

SEQ ID NO: 33556 - RNA, 21 nt, Synthetic Construct
  source 1..21: mol_type = other RNA
cggtcccaagggtatggctgt

SEQ ID NO: 33557 - RNA, 22 nt, Synthetic Construct
  source 1..22: mol_type = other RNA
ctcgtaccgtgagtaataatgc

SEQ ID NO: 33558 - RNA, 22 nt, Synthetic Construct
  source 1..22: mol_type = other RNA
ncgtaccgtgagtaataatgcg

SEQ ID NO: 33559 - RNA, 22 nt, Synthetic Construct
  source 1..22: mol_type = other RNA
ncgtaccgtgagtaataatgcg

SEQ ID NO: 33560 - RNA, 21 nt, Synthetic Construct
  source 1..21: mol_type = other RNA
tggagtgtgacgatggtgttt

SEQ ID NO: 33561 - RNA, 15 nt, Synthetic Construct
  source 1..15: mol_type = other RNA
gggtgaaagcggggg

SEQ ID NO: 33562 - RNA, 15 nt, Synthetic Construct
  source 1..15: mol_type = other RNA
gggtgaaagcggggg

SEQ ID NO: 33563 - RNA, 22 nt, Synthetic Construct
  source 1..22: mol_type = other RNA
atggatttttggagcagggaga

SEQ ID NO: 33564 - RNA, 21 nt, Synthetic Construct
  source 1..21: mol_type = other RNA
tgaggtagtaggttgtatagc

SEQ ID NO: 33565 - RNA, 25 nt, Synthetic Construct
  source 1..25: mol_type = other RNA
ggtaaaattgctgagtgaagcattg

SEQ ID NO: 33566 - RNA, 25 nt, Synthetic Construct
  source 1..25: mol_type = other RNA
ggtaaaattgctgagtgaagcattg

SEQ ID NO: 33567 - RNA, 22 nt, Synthetic Construct
  source 1..22: mol_type = other RNA
tgaggtagtagtttgtgctatt

SEQ ID NO: 33568 - RNA, 22 nt, Synthetic Construct
  source 1..22: mol_type = other RNA
cgaggtagtaggttgtatagtt

SEQ ID NO: 33569 - RNA, 22 nt, Synthetic Construct
  source 1..22: mol_type = other RNA
taactcattaagcgaatctcgc

SEQ ID NO: 33570 - RNA, 22 nt, Synthetic Construct
  source 1..22: mol_type = other RNA
taactcattaagcgaatctcgc

SEQ ID NO: 33571 - RNA, 25 nt, Synthetic Construct
  source 1..25: mol_type = other RNA
atgaggatatgagatcgagacgaca

SEQ ID NO: 33572 - RNA, 24 nt, Synthetic Construct
  source 1..24: mol_type = other RNA
ggctacattgtctgctgggtttct

SEQ ID NO: 33573 - RNA, 24 nt, Synthetic Construct
  source 1..24: mol_type = other RNA
tctcacacagaaatcgcacccgta

SEQ ID NO: 33574 - RNA, 28 nt, Synthetic Construct
  source 1..28: mol_type = other RNA
ccccccaccgctaaatttgactggcttt

SEQ ID NO: 33575 - RNA, 20 nt, Synthetic Construct
  source 1..20: mol_type = other RNA
tgaggtagtaggctgtatag

SEQ ID NO: 33576 - RNA, 20 nt, Synthetic Construct
  source 1..20: mol_type = other RNA
tgaggtagtaggctgtatag

SEQ ID NO: 33577 - RNA, 34 nt, Synthetic Construct; identical to SEQ ID NO: 385
  source 1..34: mol_type = other RNA

SEQ ID NO: 33578 - RNA, 34 nt, Synthetic Construct; identical to SEQ ID NO: 385
  source 1..34: mol_type = other RNA

SEQ ID NO: 33579 - RNA, 21 nt, Synthetic Construct
  source 1..21: mol_type = other RNA
cgcatcccctagggcattggt

SEQ ID NO: 33580 - RNA, 21 nt, Synthetic Construct
  source 1..21: mol_type = other RNA
cgcatcccctagggcattggt

SEQ ID NO: 33581 - RNA, 20 nt, Synthetic Construct
  source 1..20: mol_type = other RNA
tgaggtagtgggttgtgtgg

SEQ ID NO: 33582 - RNA, 20 nt, Synthetic Construct
  source 1..20: mol_type = other RNA
tgaggtagtgggttgtgtgg

SEQ ID NO: 33583 - RNA, 22 nt, Synthetic Construct
  source 1..22: mol_type = other RNA
cgaggtagtaggttgtgtggtt

SEQ ID NO: 33584 - RNA, 15 nt, Synthetic Construct
  source 1..15: mol_type = other RNA
gtagctcgttgggct

SEQ ID NO: 33585 - RNA, 22 nt, Synthetic Construct
  source 1..22: mol_type = other RNA
tgaggtagtagtttgcgctgtt

SEQ ID NO: 33586 - RNA, 22 nt, Synthetic Construct
  source 1..22: mol_type = other RNA
tgaggtagtagtttgcgctgtt

SEQ ID NO: 33587 - RNA, 36 nt, Synthetic Construct; identical to SEQ ID NO: 2366
  source 1..36: mol_type = other RNA

SEQ ID NO: 33588 - RNA, 16 nt, Synthetic Construct
  source 1..16: mol_type = other RNA
aggtcatcgtcaggct

SEQ ID NO: 33589 - RNA, 16 nt, Synthetic Construct
  source 1..16: mol_type = other RNA
aggtcatcgtcaggct

SEQ ID NO: 33590 - RNA, 27 nt, Synthetic Construct
  source 1..27: mol_type = other RNA
cttctcactactgcacttgactagtct

SEQ ID NO: 33591 - RNA, 23 nt, Synthetic Construct
  source 1..23: mol_type = other RNA
gttctacagtccgacgatcgatc

SEQ ID NO: 33592 - RNA, 23 nt, Synthetic Construct
  source 1..23: mol_type = other RNA
gttctacagtccgacgatcgatc

SEQ ID NO: 33593 - RNA, 22 nt, Synthetic Construct
  source 1..22: mol_type = other RNA
aggttccggataagtaagagcc

SEQ ID NO: 33594 - RNA, 22 nt, Synthetic Construct
  source 1..22: mol_type = other RNA
aggttccggataagtaagagcc

SEQ ID NO: 33595 - RNA, 21 nt, Synthetic Construct
  source 1..21: mol_type = other RNA
gcagatcttggtggtagtagc

SEQ ID NO: 33596 - RNA, 21 nt, Synthetic Construct
  source 1..21: mol_type = other RNA
gcagatcttggtggtagtagc

SEQ ID NO: 33597 - RNA, 22 nt, Synthetic Construct
  source 1..22: mol_type = other RNA
ctagcaccatctgaaatcggtt

SEQ ID NO: 33598 - RNA, 18 nt, Synthetic Construct
  source 1..18: mol_type = other RNA
gtcgacgtatagggtgtg

SEQ ID NO: 33599 - RNA, 18 nt, Synthetic Construct
  source 1..18: mol_type = other RNA
gcaggacggtggccatgg

SEQ ID NO: 33600 - RNA, 18 nt, Synthetic Construct
  source 1..18: mol_type = other RNA
gcaggacggtggccatgg

SEQ ID NO: 33601 - RNA, 24 nt, Synthetic Construct
  source 1..24: mol_type = other RNA
gttgaattgtggtctgtggacgtg

SEQ ID NO: 33602 - RNA, 24 nt, Synthetic Construct
  source 1..24: mol_type = other RNA
gttgaattgtggtctgtggacgtg

SEQ ID NO: 33603 - RNA, 22 nt, Synthetic Construct
  source 1..22: mol_type = other RNA
tgaggtagtagtttgtgttgtt

SEQ ID NO: 33604 - RNA, 19 nt, Synthetic Construct
  source 1..19: mol_type = other RNA
ggtggggagtttggctggg

SEQ ID NO: 33605 - RNA, 19 nt, Synthetic Construct
  source 1..19: mol_type = other RNA
ggtggggagtttggctggg

SEQ ID NO: 33606 - RNA, 25 nt, Synthetic Construct
  source 1..25: mol_type = other RNA
tgagaactgaattccataggctgtt

SEQ ID NO: 33607 - RNA, 25 nt, Synthetic Construct
  source 1..25: mol_type = other RNA
tgagaactgaattccataggctgtt

SEQ ID NO: 33608 - RNA, 23 nt, Synthetic Construct
  source 1..23: mol_type = other RNA
tgaggggcagagagcgagactct

SEQ ID NO: 33609 - RNA, 23 nt, Synthetic Construct
  source 1..23: mol_type = other RNA
tgaggggcagagagcgagactct

SEQ ID NO: 33610 - RNA, 21 nt, Synthetic Construct
  source 1..21: mol_type = other RNA
taactccttaagcaatctcgc

SEQ ID NO: 33611 - RNA, 21 nt, Synthetic Construct
  source 1..21: mol_type = other RNA
taactccttaagcaatctcgc

SEQ ID NO: 33612 - RNA, 21 nt, Synthetic Construct
  source 1..21: mol_type = other RNA
tgaggggcagagagcgagact

SEQ ID NO: 33613 - RNA, 21 nt, Synthetic Construct
  source 1..21: mol_type = other RNA
cccataaagtagaaagcacta

SEQ ID NO: 33614 - RNA, 21 nt, Synthetic Construct
  source 1..21: mol_type = other RNA
cccataaagtagaaagcacta

SEQ ID NO: 33615 - RNA, 23 nt, Synthetic Construct
  source 1..23: mol_type = other RNA
cattgcacttgtctcggtctgaa

SEQ ID NO: 33616 - RNA, 23 nt, Synthetic Construct
  source 1..23: mol_type = other RNA
cattgcacttgtctcggtctgaa

SEQ ID NO: 33617 - RNA, 20 nt, Synthetic Construct
  source 1..20: mol_type = other RNA
tagaattctcgcctgccacg

SEQ ID NO: 33618 - RNA, 20 nt, Synthetic Construct
  source 1..20: mol_type = other RNA
aaccgggcggaaacaccatt

SEQ ID NO: 33619 - RNA, 20 nt, Synthetic Construct
  source 1..20: mol_type = other RNA
aaccgggcggaaacaccatt

SEQ ID NO: 33620 - RNA, 23 nt, Synthetic Construct
  source 1..23: mol_type = other RNA
aacggaatcccaaaagcagctgt

SEQ ID NO: 33621 - RNA, 21 nt, Synthetic Construct
  source 1..21: mol_type = other RNA
cggcggggacggcgattggtc

SEQ ID NO: 33622 - RNA, 21 nt, Synthetic Construct
  source 1..21: mol_type = other RNA
cggcggggacggcgattggtc

SEQ ID NO: 33623 - RNA, 21 nt, Synthetic Construct
  source 1..21: mol_type = other RNA
tagcagcacgtaaatattggc

SEQ ID NO: 33624 - RNA, 21 nt, Synthetic Construct
  source 1..21: mol_type = other RNA
tagcagcacgtaaatattggc

SEQ ID NO: 33625 - RNA, 23 nt, Synthetic Construct
  source 1..23: mol_type = other RNA
tgaagggcagagagcgagacttt

SEQ ID NO: 33626 - RNA, 23 nt, Synthetic Construct
  source 1..23: mol_type = other RNA
tgacctatgaattgacagccagt

SEQ ID NO: 33627 - RNA, 23 nt, Synthetic Construct
  source 1..23: mol_type = other RNA
tgacctatgaattgacagccagt

SEQ ID NO: 33628 - RNA, 23 nt, Synthetic Construct
  source 1..23: mol_type = other RNA
actggacttggagtcagaaggca

SEQ ID NO: 33629 - RNA, 22 nt, Synthetic Construct
  source 1..22: mol_type = other RNA
tcctgtactgagctgccccgtg

SEQ ID NO: 33630 - RNA, 22 nt, Synthetic Construct
  source 1..22: mol_type = other RNA
tcctgtactgagctgccccgtg

SEQ ID NO: 33631 - RNA, 18 nt, Synthetic Construct
  source 1..18: mol_type = other RNA
gctgtgatggccgagtgg

SEQ ID NO: 33632 - RNA, 18 nt, Synthetic Construct
  source 1..18: mol_type = other RNA
gtcacggtggccgagtgg

SEQ ID NO: 33633 - RNA, 22 nt, Synthetic Construct
  source 1..22: mol_type = other RNA
tagcagcacgtaaatactggcg

SEQ ID NO: 33634 - RNA, 24 nt, Synthetic Construct
  source 1..24: mol_type = other RNA
taccacagggtagaaccacggatt

SEQ ID NO: 33635 - RNA, 24 nt, Synthetic Construct
  source 1..24: mol_type = other RNA
taccacagggtagaaccacggatt

SEQ ID NO: 33636 - RNA, 18 nt, Synthetic Construct
  source 1..18: mol_type = other RNA
cagcactctgcaaagacg

SEQ ID NO: 33637 - RNA, 25 nt, Synthetic Construct
  source 1..25: mol_type = other RNA
tgtaaacatccttgactggaagctt

SEQ ID NO: 33638 - RNA, 25 nt, Synthetic Construct
  source 1..25: mol_type = other RNA
tgtaaacatccttgactggaagctt

SEQ ID NO: 33639 - RNA, 23 nt, Synthetic Construct
  source 1..23: mol_type = other RNA
agcagcattgtacagggctatgg

SEQ ID NO: 33640 - RNA, 15 nt, Synthetic Construct
  source 1..15: mol_type = other RNA
cgagtgacgtagtgt

SEQ ID NO: 33641 - RNA, 15 nt, Synthetic Construct
  source 1..15: mol_type = other RNA
cgagtgacgtagtgt

SEQ ID NO: 33642 - RNA, 31 nt, Synthetic Construct; identical to SEQ ID NO: 15910
  source 1..31: mol_type = other RNA

SEQ ID NO: 33643 - RNA, 31 nt, Synthetic Construct; identical to SEQ ID NO: 15910
  source 1..31: mol_type = other RNA

SEQ ID NO: 33644 - RNA, 22 nt, Synthetic Construct
  source 1..22: mol_type = other RNA
tggagagaaaggcagttcctga

SEQ ID NO: 33645 - RNA, 22 nt, Synthetic Construct
  source 1..22: mol_type = other RNA
tggagagaaaggcagttcctga

SEQ ID NO: 33646 - RNA, 24 nt, Synthetic Construct
  source 1..24: mol_type = other RNA
gcgagagtaggacgttgccaggtt

SEQ ID NO: 33647 - RNA, 24 nt, Synthetic Construct
  source 1..24: mol_type = other RNA
gcgagagtaggacgttgccaggtt

SEQ ID NO: 33648 - RNA, 30 nt, Synthetic Construct; identical to SEQ ID NO: 1122
  source 1..30: mol_type = other RNA

SEQ ID NO: 33649 - RNA, 21 nt, Synthetic Construct
  source 1..21: mol_type = other RNA
tgaggtagtaggttgtgtgat

SEQ ID NO: 33650 - RNA, 21 nt, Synthetic Construct
  source 1..21: mol_type = other RNA
tgaggtagtaggttgtgtgat

SEQ ID NO: 33651 - RNA, 22 nt, Synthetic Construct
  source 1..22: mol_type = other RNA
ttcaagtaattcaggataggtt

SEQ ID NO: 33652 - RNA, 22 nt, Synthetic Construct
  source 1..22: mol_type = other RNA
ttcaagtaattcaggataggtt

SEQ ID NO: 33653 - RNA, 22 nt, Synthetic Construct
  source 1..22: mol_type = other RNA
tgaggtagtaggttgtggggtt

SEQ ID NO: 33654 - RNA, 21 nt, Synthetic Construct
  source 1..21: mol_type = other RNA
tcctgtactgagctgcaccga

SEQ ID NO: 33655 - RNA, 21 nt, Synthetic Construct
  source 1..21: mol_type = other RNA
tcctgtactgagctgcaccga

SEQ ID NO: 33656 - RNA, 22 nt, Synthetic Construct
  source 1..22: mol_type = other RNA
ttgtacatggtaggctttcatt

SEQ ID NO: 33657 - RNA, 22 nt, Synthetic Construct
  source 1..22: mol_type = other RNA
tgaggtagtagtttgtgttgtt

SEQ ID NO: 33658 - RNA, 22 nt, Synthetic Construct
  source 1..22: mol_type = other RNA
tgaggtagtagtttgtgttgtt

SEQ ID NO: 33659 - RNA, 20 nt, Synthetic Construct
  source 1..20: mol_type = other RNA
tgaggtagtaggttgtatgg

SEQ ID NO: 33660 - RNA, 20 nt, Synthetic Construct
  source 1..20: mol_type = other RNA
tgaggtagtaggttgtatgg

SEQ ID NO: 33661 - RNA, 27 nt, Synthetic Construct
  source 1..27: mol_type = other RNA
ccccccactgctaaacttgactggctt

SEQ ID NO: 33662 - RNA, 26 nt, Synthetic Construct
  source 1..26: mol_type = other RNA
aaaccgttaccattactgagtttagt

SEQ ID NO: 33663 - RNA, 26 nt, Synthetic Construct
  source 1..26: mol_type = other RNA
aaaccgttaccattactgagtttagt

SEQ ID NO: 33664 - RNA, 21 nt, Synthetic Construct
  source 1..21: mol_type = other RNA
acagtagcctgcacattggtt

SEQ ID NO: 33665 - RNA, 20 nt, Synthetic Construct
  source 1..20: mol_type = other RNA
tgaggtagtaggttgtgagg

SEQ ID NO: 33666 - RNA, 22 nt, Synthetic Construct
  source 1..22: mol_type = other RNA
tggcagtgtcttagctggttgt

SEQ ID NO: 33667 - RNA, 22 nt, Synthetic Construct
  source 1..22: mol_type = other RNA
atataatacaacctgctaagtg

SEQ ID NO: 33668 - RNA, 22 nt, Synthetic Construct
  source 1..22: mol_type = other RNA
atataatacaacctgctaagtg

SEQ ID NO: 33669 - RNA, 23 nt, Synthetic Construct
  source 1..23: mol_type = other RNA
ttatggtttgcctgggactgagg

SEQ ID NO: 33670 - RNA, 21 nt, Synthetic Construct
  source 1..21: mol_type = other RNA
actcggcgtggcgtcggtcgt

SEQ ID NO: 33671 - RNA, 22 nt, Synthetic Construct
  source 1..22: mol_type = other RNA
actccagccccacagcctcagc

SEQ ID NO: 33672 - RNA, 22 nt, Synthetic Construct
  source 1..22: mol_type = other RNA
actccagccccacagcctcagc

SEQ ID NO: 33673 - RNA, 22 nt, Synthetic Construct
  source 1..22: mol_type = other RNA
tgaggtggtaggttgtgtggtt

SEQ ID NO: 33674 - RNA, 44 nt, Synthetic Construct; identical to SEQ ID NO: 5536
  source 1..44: mol_type = other RNA

SEQ ID NO: 33675 - RNA, 21 nt, Synthetic Construct
  source 1..21: mol_type = other RNA
tggggtagtagtttgtgctgt

SEQ ID NO: 33676 - RNA, 21 nt, Synthetic Construct
  source 1..21: mol_type = other RNA
tggggtagtagtttgtgctgt

SEQ ID NO: 33677 - RNA, 22 nt, Synthetic Construct
  source 1..22: mol_type = other RNA
tgaggtagtagtttgtgctgtt

SEQ ID NO: 33678 - RNA, 17 nt, Synthetic Construct
  source 1..17: mol_type = other RNA
acagtcaggatgttggc

SEQ ID NO: 33679 - RNA, 21 nt, Synthetic Construct
  source 1..21: mol_type = other RNA
tgaggtagcaggttgtatagt

SEQ ID NO: 33680 - RNA, 21 nt, Synthetic Construct
  source 1..21: mol_type = other RNA
tgaggtagcaggttgtatagt

SEQ ID NO: 33681 - RNA, 29 nt, Synthetic Construct
  source 1..29: mol_type = other RNA
cccgtgtgaaagtaggtcatcgtcaggct

SEQ ID NO: 33682 - RNA, 29 nt, Synthetic Construct
  source 1..29: mol_type = other RNA
cccgtgtgaaagtaggtcatcgtcaggct

SEQ ID NO: 33683 - RNA, 24 nt, Synthetic Construct
  source 1..24: mol_type = other RNA
ttccccttggggttgtaggaccac

SEQ ID NO: 33684 - RNA, 24 nt, Synthetic Construct
  source 1..24: mol_type = other RNA
ttccccttggggttgtaggaccac

SEQ ID NO: 33685 - RNA, 23 nt, Synthetic Construct
  source 1..23: mol_type = other RNA
tgcggggctagggctaacagcaa

SEQ ID NO: 33686 - RNA, 23 nt, Synthetic Construct
  source 1..23: mol_type = other RNA
tgcggggctagggctaacagcaa

SEQ ID NO: 33687 - RNA, 24 nt, Synthetic Construct
  source 1..24: mol_type = other RNA
tgtaaacatccccggctggaagct

SEQ ID NO: 33688 - RNA, 23 nt, Synthetic Construct
  source 1..23: mol_type = other RNA
taaggtgcatctagtgcagatag

SEQ ID NO: 33689 - RNA, 25 nt, Synthetic Construct
  source 1..25: mol_type = other RNA
atgaggatatgagatcgagacgaca

SEQ ID NO: 33690 - RNA, 36 nt, Synthetic Construct; identical to SEQ ID NO: 2506
  source 1..36: mol_type = other RNA

SEQ ID NO: 33691 - RNA, 19 nt, Synthetic Construct
  source 1..19: mol_type = other RNA
cctcgtcatctaattagtg

SEQ ID NO: 33692 - RNA, 19 nt, Synthetic Construct
  source 1..19: mol_type = other RNA
cctcgtcatctaattagtg

SEQ ID NO: 33693 - RNA, 22 nt, Synthetic Construct
  source 1..22: mol_type = other RNA
tgaggtagtaggatgtgtggtt

SEQ ID NO: 33694 - RNA, 30 nt, Synthetic Construct; identical to SEQ ID NO: 2578
  source 1..30: mol_type = other RNA

SEQ ID NO: 33695 - RNA, 21 nt, Synthetic Construct
  source 1..21: mol_type = other RNA
tggctcagttcagcaggaaca

SEQ ID NO: 33696 - RNA, 21 nt, Synthetic Construct
  source 1..21: mol_type = other RNA
tggctcagttcagcaggaaca

SEQ ID NO: 33697 - RNA, 22 nt, Synthetic Construct
  source 1..22: mol_type = other RNA
tgaggtaataggttgtgtggtt

SEQ ID NO: 33698 - RNA, 22 nt, Synthetic Construct
  source 1..22: mol_type = other RNA
tgaggtaataggttgtgtggtt

SEQ ID NO: 33699 - RNA, 22 nt, Synthetic Construct
  source 1..22: mol_type = other RNA
cattgcacttgtcccggcctgt

SEQ ID NO: 33700 - RNA, 16 nt, Synthetic Construct
  source 1..16: mol_type = other RNA
atgcaagtcgaacggt

SEQ ID NO: 33701 - RNA, 17 nt, Synthetic Construct
  source 1..17: mol_type = other RNA
agacagcaggacggtgg

SEQ ID NO: 33702 - RNA, 17 nt, Synthetic Construct
  source 1..17: mol_type = other RNA
agacagcaggacggtgg

SEQ ID NO: 33703 - RNA, 19 nt, Synthetic Construct
  source 1..19: mol_type = other RNA
tggagtgtgacaatggtgt

SEQ ID NO: 33704 - RNA, 21 nt, Synthetic Construct
  source 1..21: mol_type = other RNA
tgaggtagtagattgtgtggt

SEQ ID NO: 33705 - RNA, 21 nt, Synthetic Construct
  source 1..21: mol_type = other RNA
tgaggtagtagattgtgtggt

SEQ ID NO: 33706 - RNA, 18 nt, Synthetic Construct
  source 1..18: mol_type = other RNA
cttggggttgtaggacca

SEQ ID NO: 33707 - RNA, 18 nt, Synthetic Construct
  source 1..18: mol_type = other RNA
cttggggttgtaggacca

SEQ ID NO: 33708 - RNA, 21 nt, Synthetic Construct
  source 1..21: mol_type = other RNA
tgaggtagtgggttgtgtggt

SEQ ID NO: 33709 - RNA, 22 nt, Synthetic Construct
  source 1..22: mol_type = other RNA
gggagtgtgacaatggtgtttg

SEQ ID NO: 33710 - RNA, 22 nt, Synthetic Construct
  source 1..22: mol_type = other RNA
gggagtgtgacaatggtgtttg

SEQ ID NO: 33711 - RNA, 21 nt, Synthetic Construct
  source 1..21: mol_type = other RNA
atcggaacgtgcccagtcgtg

SEQ ID NO: 33712 - RNA, 25 nt, Synthetic Construct
  source 1..25: mol_type = other RNA
ggtaaaattgctgagtgaagcattg

SEQ ID NO: 33713 - RNA, 21 nt, Synthetic Construct
  source 1..21: mol_type = other RNA
tcccgtactgagctgccccga

SEQ ID NO: 33714 - RNA, 18 nt, Synthetic Construct
  source 1..18: mol_type = other RNA
cctgaagaataagcaccg

SEQ ID NO: 33715 - RNA, 21 nt, Synthetic Construct
  source 1..21: mol_type = other RNA
tggagtgtgacaacggtgttt

SEQ ID NO: 33716 - RNA, 21 nt, Synthetic Construct
  source 1..21: mol_type = other RNA
tggagtgtgacaacggtgttt

SEQ ID NO: 33717 - RNA, 23 nt, Synthetic Construct
  source 1..23: mol_type = other RNA
caaagtgctgttcgtgcaggtgg

SEQ ID NO: 33718 - RNA, 19 nt, Synthetic Construct
  source 1..19: mol_type = other RNA
aacagtcaggatgttggct

SEQ ID NO: 33719 - RNA, 23 nt, Synthetic Construct
  source 1..23: mol_type = other RNA
tgaggtagtaggttgtgtagttt

SEQ ID NO: 33720 - RNA, 22 nt, Synthetic Construct
  source 1..22: mol_type = other RNA
cattgcacttgtctcggtctgg

SEQ ID NO: 33721 - RNA, 24 nt, Synthetic Construct
  source 1..24: mol_type = other RNA
tcccacatggtctagcggttagga

SEQ ID NO: 33722 - RNA, 16 nt, Synthetic Construct
  source 1..16: mol_type = other RNA
gcctacggccatacca

SEQ ID NO: 33723 - RNA, 16 nt, Synthetic Construct
  source 1..16: mol_type = other RNA
gcctacggccatacca

SEQ ID NO: 33724 - RNA, 21 nt, Synthetic Construct
  source 1..21: mol_type = other RNA
tgaggtagtaagttgtgtggt

SEQ ID NO: 33725 - RNA, 21 nt, Synthetic Construct
  source 1..21: mol_type = other RNA
tgaggtagtaagttgtgtggt

SEQ ID NO: 33726 - RNA, 23 nt, Synthetic Construct
  source 1..23: mol_type = other RNA
tcctgtactgagctgccccggga

SEQ ID NO: 33727 - RNA, 22 nt, Synthetic Construct
  source 1..22: mol_type = other RNA
tcaggtagtagtttgtgctgtt

SEQ ID NO: 33728 - RNA, 15 nt, Synthetic Construct
  source 1..15: mol_type = other RNA
tcagtagctcgagga

SEQ ID NO: 33729 - RNA, 24 nt, Synthetic Construct
  source 1..24: mol_type = other RNA
aaaagctgggttgagagggcgaaa

SEQ ID NO: 33730 - RNA, 24 nt, Synthetic Construct
  source 1..24: mol_type = other RNA
aaaagctgggttgagagggcgaaa

SEQ ID NO: 33731 - RNA, 22 nt, Synthetic Construct
  source 1..22: mol_type = other RNA
tgaggtagtaggtcgtgtggtt

SEQ ID NO: 33732 - RNA, 22 nt, Synthetic Construct
  source 1..22: mol_type = other RNA
cgaggtagtagtttgtgctgtt

SEQ ID NO: 33733 - RNA, 22 nt, Synthetic Construct
  source 1..22: mol_type = other RNA
cgaggtagtagtttgtgctgtt

SEQ ID NO: 33734 - RNA, 22 nt, Synthetic Construct
  source 1..22: mol_type = other RNA
tgaggtagtaggttgtgtggat

SEQ ID NO: 33735 - RNA, 23 nt, Synthetic Construct
  source 1..23: mol_type = other RNA
tcaagagcaataacgaaaaatgt

SEQ ID NO: 33736 - RNA, 23 nt, Synthetic Construct
  source 1..23: mol_type = other RNA
tcaagagcaataacgaaaaatgt

SEQ ID NO: 33737 - RNA, 23 nt, Synthetic Construct
  source 1..23: mol_type = other RNA
tgaggtagtaggttgtgtggtct

SEQ ID NO: 33738 - RNA, 34 nt, Synthetic Construct; identical to SEQ ID NO: 1111
  source 1..34: mol_type = other RNA

SEQ ID NO: 33739 - RNA, 23 nt, Synthetic Construct
  source 1..23: mol_type = other RNA
tcccgtactgagctgccccgaga

SEQ ID NO: 33740 - RNA, 36 nt, Synthetic Construct; identical to SEQ ID NO: 10333
  source 1..36: mol_type = other RNA

SEQ ID NO: 33741 - RNA, 21 nt, Synthetic Construct
  source 1..21: mol_type = other RNA
gtacagtactgtgataactga

SEQ ID NO: 33742 - RNA, 21 nt, Synthetic Construct
  source 1..21: mol_type = other RNA
gtacagtactgtgataactga

SEQ ID NO: 33743 - RNA, 23 nt, Synthetic Construct
  source 1..23: mol_type = other RNA
gtcagtttgtcaaataccccatt

SEQ ID NO: 33744 - RNA, 23 nt, Synthetic Construct
  source 1..23: mol_type = other RNA
gtcagtttgtcaaataccccatt

SEQ ID NO: 33745 - RNA, 22 nt, Synthetic Construct
  source 1..22: mol_type = other RNA
tgaggtagtaggttgtatagtc

SEQ ID NO: 33746 - RNA, 21 nt, Synthetic Construct
  source 1..21: mol_type = other RNA
tggagtgtgacaatggtgctt

SEQ ID NO: 33747 - RNA, 20 nt, Synthetic Construct
  source 1..20: mol_type = other RNA
atccctgcggcgtctccatt

SEQ ID NO: 33748 - RNA, 22 nt, Synthetic Construct
  source 1..22: mol_type = other RNA
tgaggtagtagtttgtgctgtc

SEQ ID NO: 33749 - RNA, 22 nt, Synthetic Construct
  source 1..22: mol_type = other RNA
tgaggtagtagtttgtgctgtc

SEQ ID NO: 33750 - RNA, 22 nt, Synthetic Construct
  source 1..22: mol_type = other RNA
ggtcggcccacggccctggcgg

SEQ ID NO: 33751 - RNA, 22 nt, Synthetic Construct
  source 1..22: mol_type = other RNA
ggtcggcccacggccctggcgg

SEQ ID NO: 33752 - RNA, 23 nt, Synthetic Construct
  source 1..23: mol_type = other RNA
tgagcgcctcgacgacagagccg

SEQ ID NO: 33753 - RNA, 17 nt, Synthetic Construct
  source 1..17: mol_type = other RNA
ctaatgagactgccggt

SEQ ID NO: 33754 - RNA, 22 nt, Synthetic Construct
  source 1..22: mol_type = other RNA
gtgcatggccgttcttagttgg

SEQ ID NO: 33755 - RNA, 22 nt, Synthetic Construct
  source 1..22: mol_type = other RNA
tgaggtagtaggttgtatggtt

SEQ ID NO: 33756 - RNA, 19 nt, Synthetic Construct
  source 1..19: mol_type = other RNA
gcgccgatgatagtgcgga

SEQ ID NO: 33757 - RNA, 22 nt, Synthetic Construct
  source 1..22: mol_type = other RNA
tgaggtagtaggttgtatagta

SEQ ID NO: 33758 - RNA, 21 nt, Synthetic Construct
  source 1..21: mol_type = other RNA
tgaggtaataggttgtgtggt

SEQ ID NO: 33759 - RNA, 21 nt, Synthetic Construct
  source 1..21: mol_type = other RNA
tgaggtaataggttgtgtggt

SEQ ID NO: 33760 - RNA, 23 nt, Synthetic Construct
  source 1..23: mol_type = other RNA
ccctgtactgagctgccccgagt

SEQ ID NO: 33761 - RNA, 21 nt, Synthetic Construct
  source 1..21: mol_type = other RNA
tgaagtagtaggttgtgtggt

SEQ ID NO: 33762 - RNA, 22 nt, Synthetic Construct
  source 1..22: mol_type = other RNA
tcctgaactgagctgccccgag

SEQ ID NO: 33763 - RNA, 22 nt, Synthetic Construct
  source 1..22: mol_type = other RNA
tcctgaactgagctgccccgag

SEQ ID NO: 33764 - RNA, 21 nt, Synthetic Construct
  source 1..21: mol_type = other RNA
tgaggggcagagagcgaggct

SEQ ID NO: 33765 - RNA, 27 nt, Synthetic Construct
  source 1..27: mol_type = other RNA
ccccccactgctagatttgactggctt

SEQ ID NO: 33766 - RNA, 27 nt, Synthetic Construct
  source 1..27: mol_type = other RNA
ccccccactgctagatttgactggctt

SEQ ID NO: 33767 - RNA, 22 nt, Synthetic Construct
  source 1..22: mol_type = other RNA
aggagtgtgacaatggtgtttg

SEQ ID NO: 33768 - RNA, 18 nt, Synthetic Construct
  source 1..18: mol_type = other RNA
aaccgggcggaaacacca

SEQ ID NO: 33769 - RNA, 22 nt, Synthetic Construct
  source 1..22: mol_type = other RNA
tattgcacttgtcctggcctgt

SEQ ID NO: 33770 - RNA, 21 nt, Synthetic Construct
  source 1..21: mol_type = other RNA
tgaggtagtagatcgtatagt

SEQ ID NO: 33771 - RNA, 30 nt, Synthetic Construct; identical to SEQ ID NO: 1079
  source 1..30: mol_type = other RNA

SEQ ID NO: 33772 - RNA, 30 nt, Synthetic Construct; identical to SEQ ID NO: 1079
  source 1..30: mol_type = other RNA

SEQ ID NO: 33773 - RNA, 27 nt, Synthetic Construct
  source 1..27: mol_type = other RNA
ttcaacttaacttgaccgctctgacca

SEQ ID NO: 33774 - RNA, 27 nt, Synthetic Construct
  source 1..27: mol_type = other RNA
ttcaacttaacttgaccgctctgacca

SEQ ID NO: 33775 - RNA, 22 nt, Synthetic Construct
  source 1..22: mol_type = other RNA
cattgcacttgtctcggtccga

SEQ ID NO: 33776 - RNA, 21 nt, Synthetic Construct
  source 1..21: mol_type = other RNA
tgaggtagtaggttgtatggt

SEQ ID NO: 33777 - RNA, 21 nt, Synthetic Construct
  source 1..21: mol_type = other RNA
tgaggtagtaggttgtatggt

SEQ ID NO: 33778 - RNA, 17 nt, Synthetic Construct
  source 1..17: mol_type = other RNA
cccctggacctgtactg

SEQ ID NO: 33779 - RNA, 21 nt, Synthetic Construct
  source 1..21: mol_type = other RNA
tgagaactgaattccatgggt

SEQ ID NO: 33780 - RNA, 20 nt, Synthetic Construct
  source 1..20: mol_type = other RNA
tgaggtagaaggttgtatag

SEQ ID NO: 33781 - RNA, 24 nt, Synthetic Construct
  source 1..24: mol_type = other RNA
atcacattgccagggatttccaat

SEQ ID NO: 33782 - RNA, 22 nt, Synthetic Construct
  source 1..22: mol_type = other RNA
tgaggtagtaggttgtatagta

SEQ ID NO: 33783 - RNA, 23 nt, Synthetic Construct
  source 1..23: mol_type = other RNA
ccctgtactgagctgccccgaga

SEQ ID NO: 33784 - RNA, 22 nt, Synthetic Construct
  source 1..22: mol_type = other RNA
tgaggtagaagtttgtgctgtt

SEQ ID NO: 33785 - RNA, 33 nt, Synthetic Construct; identical to SEQ ID NO: 7224
  source 1..33: mol_type = other RNA

SEQ ID NO: 33786 - RNA, 22 nt, Synthetic Construct
  source 1..22: mol_type = other RNA
tacccattgcatatcggagttg

SEQ ID NO: 33787 - RNA, 22 nt, Synthetic Construct
  source 1..22: mol_type = other RNA
tacccattgcatatcggagttg

SEQ ID NO: 33788 - RNA, 22 nt, Synthetic Construct
  source 1..22: mol_type = other RNA
tgaggtagtagtttatgctgtt

SEQ ID NO: 33789 - RNA, 23 nt, Synthetic Construct
  source 1..23: mol_type = other RNA
tcctgtactgagctgccacgaga

SEQ ID NO: 33790 - RNA, 23 nt, Synthetic Construct
  source 1..23: mol_type = other RNA
tcctgtactgagctgccacgaga

SEQ ID NO: 33791 - RNA, 16 nt, Synthetic Construct
  source 1..16: mol_type = other RNA
cccagaaacccggtcg

SEQ ID NO: 33792 - RNA, 22 nt, Synthetic Construct
  source 1..22: mol_type = other RNA
tcccgtactgagctgccccgag

SEQ ID NO: 33793 - RNA, 22 nt, Synthetic Construct
  source 1..22: mol_type = other RNA
tcccgtactgagctgccccgag

SEQ ID NO: 33794 - RNA, 34 nt, Synthetic Construct; identical to SEQ ID NO: 2186
  source 1..34: mol_type = other RNA

SEQ ID NO: 33795 - RNA, 24 nt, Synthetic Construct
  source 1..24: mol_type = other RNA
tcccacatggtctagcggttagga

SEQ ID NO: 33796 - RNA, 24 nt, Synthetic Construct
  source 1..24: mol_type = other RNA
tcccacatggtctagcggttagga

SEQ ID NO: 33797 - RNA, 24 nt, Synthetic Construct
  source 1..24: mol_type = other RNA
ttcaagtaattcaggataggttgt

SEQ ID NO: 33798 - RNA, 22 nt, Synthetic Construct
  source 1..22: mol_type = other RNA
tgttggttcaagcgtgtagtcg

SEQ ID NO: 33799 - RNA, 22 nt, Synthetic Construct
  source 1..22: mol_type = other RNA
tgttggttcaagcgtgtagtcg

SEQ ID NO: 33800 - RNA, 22 nt, Synthetic Construct
  source 1..22: mol_type = other RNA
ttgcagcacgtaaatattggcg

SEQ ID NO: 33801 - RNA, 22 nt, Synthetic Construct
  source 1..22: mol_type = other RNA
tgagaactgaattccatgggtc

SEQ ID NO: 33802 - RNA, 21 nt, Synthetic Construct
  source 1..21: mol_type = other RNA
tgaggtagtagattgtatagc

SEQ ID NO: 33803 - RNA, 21 nt, Synthetic Construct
  source 1..21: mol_type = other RNA
tgtaaacatcctcgactggaa

SEQ ID NO: 33804 - RNA, 24 nt, Synthetic Construct
  source 1..24: mol_type = other RNA
gtcagtttgtcaaataccccaatt

SEQ ID NO: 33805 - RNA, 24 nt, Synthetic Construct
  source 1..24: mol_type = other RNA
gtcagtttgtcaaataccccaatt

SEQ ID NO: 33806 - RNA, 18 nt, Synthetic Construct
  source 1..18: mol_type = other RNA
cgtgttcggaagattttc

SEQ ID NO: 33807 - RNA, 18 nt, Synthetic Construct
  source 1..18: mol_type = other RNA
cgtgttcggaagattttc

SEQ ID NO: 33808 - RNA, 22 nt, Synthetic Construct
  source 1..22: mol_type = other RNA
taccctgtagaaccgaatttgt

SEQ ID NO: 33809 - RNA, 22 nt, Synthetic Construct
  source 1..22: mol_type = other RNA
taccctgtagaaccgaatttgt

SEQ ID NO: 33810 - RNA, 23 nt, Synthetic Construct
  source 1..23: mol_type = other RNA
tcagtgcatcacagaactttgtt

SEQ ID NO: 33811 - RNA, 23 nt, Synthetic Construct
  source 1..23: mol_type = other RNA
tcagtgcatcacagaactttgtt

SEQ ID NO: 33812 - RNA, 33 nt, Synthetic Construct; identical to SEQ ID NO: 7469
  source 1..33: mol_type = other RNA

SEQ ID NO: 33813 - RNA, 20 nt, Synthetic Construct
  source 1..20: mol_type = other RNA
cccttggggttgtaggacca

SEQ ID NO: 33814 - RNA, 20 nt, Synthetic Construct
  source 1..20: mol_type = other RNA
cccttggggttgtaggacca

SEQ ID NO: 33815 - RNA, 32 nt, Synthetic Construct; identical to SEQ ID NO: 30748
  source 1..32: mol_type = other RNA

SEQ ID NO: 33816 - RNA, 34 nt, Synthetic Construct; identical to SEQ ID NO: 490
  source 1..34: mol_type = other RNA

SEQ ID NO: 33817 - RNA, 34 nt, Synthetic Construct; identical to SEQ ID NO: 490
  source 1..34: mol_type = other RNA

SEQ ID NO: 33818 - RNA, 24 nt, Synthetic Construct
  source 1..24: mol_type = other RNA
tgtaagcatccccgactggaagct

SEQ ID NO: 33819 - RNA, 27 nt, Synthetic Construct
  source 1..27: mol_type = other RNA
cccctcactgctaaatttgactggctt

SEQ ID NO: 33820 - RNA, 18 nt, Synthetic Construct
  source 1..18: mol_type = other RNA
accctgctcgctgcgcca

SEQ ID NO: 33821 - RNA, 18 nt, Synthetic Construct
  source 1..18: mol_type = other RNA
accctgctcgctgcgcca

SEQ ID NO: 33822 - RNA, 22 nt, Synthetic Construct
  source 1..22: mol_type = other RNA
tccagtactgagctgccccgag

SEQ ID NO: 33823 - RNA, 24 nt, Synthetic Construct
  source 1..24: mol_type = other RNA
tgaggtagtaggttgtgtggtttc

SEQ ID NO: 33824 - RNA, 16 nt, Synthetic Construct
  source 1..16: mol_type = other RNA
agggaacgtgagctgg

SEQ ID NO: 33825 - RNA, 16 nt, Synthetic Construct
  source 1..16: mol_type = other RNA
agggaacgtgagctgg

SEQ ID NO: 33826 - RNA, 26 nt, Synthetic Construct
  source 1..26: mol_type = other RNA
aacattcaacgctgtcggtgagtttt

SEQ ID NO: 33827 - RNA, 25 nt, Synthetic Construct
  source 1..25: mol_type = other RNA
tattgcacttgtcccggcctgtttt

SEQ ID NO: 33828 - RNA, 25 nt, Synthetic Construct
  source 1..25: mol_type = other RNA
tattgcacttgtcccggcctgtttt

SEQ ID NO: 33829 - RNA, 21 nt, Synthetic Construct
  source 1..21: mol_type = other RNA
tggggtgtgacaatggtgttt

SEQ ID NO: 33830 - RNA, 23 nt, Synthetic Construct
  source 1..23: mol_type = other RNA
tacagtagtctgcacattggtta

SEQ ID NO: 33831 - RNA, 22 nt, Synthetic Construct
  source 1..22: mol_type = other RNA
tattgcacttgtcccggcctgc

SEQ ID NO: 33832 - RNA, 20 nt, Synthetic Construct
  source 1..20: mol_type = other RNA
cccgtgttcggaagattttc

SEQ ID NO: 33833 - RNA, 20 nt, Synthetic Construct
  source 1..20: mol_type = other RNA
cccgtgttcggaagattttc

SEQ ID NO: 33834 - RNA, 27 nt, Synthetic Construct
  source 1..27: mol_type = other RNA
cgactcttagcggtggatcactcggct

SEQ ID NO: 33835 - RNA, 27 nt, Synthetic Construct
  source 1..27: mol_type = other RNA
cgactcttagcggtggatcactcggct

SEQ ID NO: 33836 - RNA, 36 nt, Synthetic Construct; identical to SEQ ID NO: 3596
  source 1..36: mol_type = other RNA

SEQ ID NO: 33837 - RNA, 36 nt, Synthetic Construct; identical to SEQ ID NO: 3596
  source 1..36: mol_type = other RNA

SEQ ID NO: 33838 - RNA, 23 nt, Synthetic Construct
  source 1..23: mol_type = other RNA
tgaggtagtaggttgtgtggctt

SEQ ID NO: 33839 - RNA, 23 nt, Synthetic Construct
  source 1..23: mol_type = other RNA
tgaggtagtaggttgtgtggctt

SEQ ID NO: 33840 - RNA, 24 nt, Synthetic Construct
  source 1..24: mol_type = other RNA
tcagtgcatcacagaactttgttt

SEQ ID NO: 33841 - RNA, 24 nt, Synthetic Construct
  source 1..24: mol_type = other RNA
tcagtgcatcacagaactttgttt

SEQ ID NO: 33842 - RNA, 23 nt, Synthetic Construct
  source 1..23: mol_type = other RNA
aacggaatcccaaaagcagctgt

SEQ ID NO: 33843 - RNA, 23 nt, Synthetic Construct
  source 1..23: mol_type = other RNA
aacggaatcccaaaagcagctgt

SEQ ID NO: 33844 - RNA, 22 nt, Synthetic Construct
  source 1..22: mol_type = other RNA
ttaatgctaatcgtgataggga

SEQ ID NO: 33845 - RNA, 22 nt, Synthetic Construct
  source 1..22: mol_type = other RNA
ttaatgctaatcgtgataggga

SEQ ID NO: 33846 - RNA, 21 nt, Synthetic Construct
  source 1..21: mol_type = other RNA
tgagaactgaattccatgggt

SEQ ID NO: 33847 - RNA, 31 nt, Synthetic Construct; identical to SEQ ID NO: 2423
  source 1..31: mol_type = other RNA

SEQ ID NO: 33848 - RNA, 31 nt, Synthetic Construct; identical to SEQ ID NO: 2423
  source 1..31: mol_type = other RNA

SEQ ID NO: 33849 - RNA, 27 nt, Synthetic Construct
  source 1..27: mol_type = other RNA
ccccccactgctaaatctgactggctt

SEQ ID NO: 33850 - RNA, 20 nt, Synthetic Construct
  source 1..20: mol_type = other RNA
cgtaccgtgagtaataatgc

SEQ ID NO: 33851 - RNA, 21 nt, Synthetic Construct
  source 1..21: mol_type = other RNA
tggagtgtgacaacggtgttt

SEQ ID NO: 33852 - RNA, 19 nt, Synthetic Construct
  source 1..19: mol_type = other RNA
ctgatcgagtcgtcctgcg

SEQ ID NO: 33853 - RNA, 25 nt, Synthetic Construct
  source 1..25: mol_type = other RNA
gagaaagctcacaagaactgctaac

SEQ ID NO: 33854 - RNA, 22 nt, Synthetic Construct
  source 1..22: mol_type = other RNA
actccagccccacagcctcagc

SEQ ID NO: 33855 - RNA, 22 nt, Synthetic Construct
  source 1..22: mol_type = other RNA
actccagccccacagcctcagc

SEQ ID NO: 33856 - RNA, 21 nt, Synthetic Construct
  source 1..21: mol_type = other RNA
tgtcccacccccactcctgtt

SEQ ID NO: 33857 - RNA, 21 nt, Synthetic Construct
  source 1..21: mol_type = other RNA
tgtcccacccccactcctgtt

SEQ ID NO: 33858 - RNA, 32 nt, Synthetic Construct; identical to SEQ ID NO: 2798
  source 1..32: mol_type = other RNA

SEQ ID NO: 33859 - RNA, 32 nt, Synthetic Construct; identical to SEQ ID NO: 2798
  source 1..32: mol_type = other RNA

SEQ ID NO: 33860 - RNA, 21 nt, Synthetic Construct
  source 1..21: mol_type = other RNA
acacatgcaagtcgaacggta

SEQ ID NO: 33861 - RNA, 16 nt, Synthetic Construct
  source 1..16: mol_type = other RNA
ccctttgtacacaccg

SEQ ID NO: 33862 - RNA, 16 nt, Synthetic Construct
  source 1..16: mol_type = other RNA
ccctttgtacacaccg

SEQ ID NO: 33863 - RNA, 22 nt, Synthetic Construct
  source 1..22: mol_type = other RNA
ttatcagaatctccaggggtat

SEQ ID NO: 33864 - RNA, 21 nt, Synthetic Construct
  source 1..21: mol_type = other RNA
agcagcattgtacagggctat

SEQ ID NO: 33865 - RNA, 21 nt, Synthetic Construct
  source 1..21: mol_type = other RNA
agcagcattgtacagggctat

SEQ ID NO: 33866 - RNA, 23 nt, Synthetic Construct
  source 1..23: mol_type = other RNA
tgaggtaggaggttgtatagttg

SEQ ID NO: 33867 - RNA, 17 nt, Synthetic Construct
  source 1..17: mol_type = other RNA
gaagttgaccgcctggg

SEQ ID NO: 33868 - RNA, 20 nt, Synthetic Construct
  source 1..20: mol_type = other RNA
tggggtagtaggttgtatag

SEQ ID NO: 33869 - RNA, 20 nt, Synthetic Construct
  source 1..20: mol_type = other RNA
tggggtagtaggttgtatag

SEQ ID NO: 33870 - RNA, 21 nt, Synthetic Construct
  source 1..21: mol_type = other RNA
agaggggcagagagcgagact

SEQ ID NO: 33871 - RNA, 23 nt, Synthetic Construct
  source 1..23: mol_type = other RNA
tgaggtagtaggttgtgtggttc

SEQ ID NO: 33872 - RNA, 20 nt, Synthetic Construct
  source 1..20: mol_type = other RNA
tgaggtagtaggttgtgtag

SEQ ID NO: 33873 - RNA, 22 nt, Synthetic Construct
  source 1..22: mol_type = other RNA
tgaggtagtaggttgtgtggat

SEQ ID NO: 33874 - RNA, 22 nt, Synthetic Construct
  source 1..22: mol_type = other RNA
tgaggtagtaggttgtgtggat

SEQ ID NO: 33875 - RNA, 22 nt, Synthetic Construct
  source 1..22: mol_type = other RNA
tagcagcgcgtaaatattggcg

SEQ ID NO: 33876 - RNA, 41 nt, Synthetic Construct; identical to SEQ ID NO: 491
  source 1..41: mol_type = other RNA

SEQ ID NO: 33877 - RNA, 23 nt, Synthetic Construct
  source 1..23: mol_type = other RNA
tacagtagtctgcacattggttt

SEQ ID NO: 33878 - RNA, 23 nt, Synthetic Construct
  source 1..23: mol_type = other RNA
tacagtagtctgcacattggttt

SEQ ID NO: 33879 - RNA, 22 nt, Synthetic Construct
  source 1..22: mol_type = other RNA
tgaggtagtagcttgtgctgtt

SEQ ID NO: 33880 - RNA, 22 nt, Synthetic Construct
  source 1..22: mol_type = other RNA
taactcctcaagcgaatctcgc

SEQ ID NO: 33881 - RNA, 21 nt, Synthetic Construct
  source 1..21: mol_type = other RNA
tgaggtagtagtttgtgccgt

SEQ ID NO: 33882 - RNA, 21 nt, Synthetic Construct
  source 1..21: mol_type = other RNA
tgaggtagtagtttgtgccgt

SEQ ID NO: 33883 - RNA, 22 nt, Synthetic Construct
  source 1..22: mol_type = other RNA
tattgcatttgtcccggcctgt

SEQ ID NO: 33884 - RNA, 16 nt, Synthetic Construct
  source 1..16: mol_type = other RNA
acggcccagactccta

SEQ ID NO: 33885 - RNA, 22 nt, Synthetic Construct
  source 1..22: mol_type = other RNA
actctttccctgttgcactact

SEQ ID NO: 33886 - RNA, 22 nt, Synthetic Construct
  source 1..22: mol_type = other RNA
actctttccctgttgcactact

SEQ ID NO: 33887 - RNA, 23 nt, Synthetic Construct
  source 1..23: mol_type = other RNA
tcccacatggtctagcggttagg

SEQ ID NO: 33888 - RNA, 22 nt, Synthetic Construct
  source 1..22: mol_type = other RNA
tgaggaagtaggttgtgtggtt

SEQ ID NO: 33889 - RNA, 19 nt, Synthetic Construct
  source 1..19: mol_type = other RNA
cgcgacctcagatcagacg

SEQ ID NO: 33890 - RNA, 19 nt, Synthetic Construct
  source 1..19: mol_type = other RNA
cgcgacctcagatcagacg

SEQ ID NO: 33891 - RNA, 16 nt, Synthetic Construct
  source 1..16: mol_type = other RNA
agtcaggatgttggct

SEQ ID NO: 33892 - RNA, 27 nt, Synthetic Construct
  source 1..27: mol_type = other RNA
ccccccactgctaaatttgacgggctt

SEQ ID NO: 33893 - RNA, 23 nt, Synthetic Construct
  source 1..23: mol_type = other RNA
tgaggggcagggagcgagacttt

SEQ ID NO: 33894 - RNA, 18 nt, Synthetic Construct
  source 1..18: mol_type = other RNA
cccaaaggtcgtcggttc

SEQ ID NO: 33895 - RNA, 22 nt, Synthetic Construct
  source 1..22: mol_type = other RNA
tccagtactgagctgccccgag

SEQ ID NO: 33896 - RNA, 22 nt, Synthetic Construct
  source 1..22: mol_type = other RNA
taaggtagtagtttgtgctgtt

SEQ ID NO: 33897 - RNA, 21 nt, Synthetic Construct
  source 1..21: mol_type = other RNA
aagctgccagttgaagaactg

SEQ ID NO: 33898 - RNA, 21 nt, Synthetic Construct
  source 1..21: mol_type = other RNA
aagctgccagttgaagaactg

SEQ ID NO: 33899 - RNA, 22 nt, Synthetic Construct
  source 1..22: mol_type = other RNA
tatatatatatatgtacgtatg

SEQ ID NO: 33900 - RNA, 25 nt, Synthetic Construct
  source 1..25: mol_type = other RNA
aacattcaacgctgtcggtgagttt

SEQ ID NO: 33901 - RNA, 25 nt, Synthetic Construct
  source 1..25: mol_type = other RNA
aacattcaacgctgtcggtgagttt

SEQ ID NO: 33902 - RNA, 31 nt, Synthetic Construct; identical to SEQ ID NO: 1881
  source 1..31: mol_type = other RNA

SEQ ID NO: 33903 - RNA, 31 nt, Synthetic Construct; identical to SEQ ID NO: 1881
  source 1..31: mol_type = other RNA

SEQ ID NO: 33904 - RNA, 22 nt, Synthetic Construct
  source 1..22: mol_type = other RNA
tcctgtactgggctgccccgag

SEQ ID NO: 33905 - RNA, 22 nt, Synthetic Construct
  source 1..22: mol_type = other RNA
tcctgtactgggctgccccgag

SEQ ID NO: 33906 - RNA, 22 nt, Synthetic Construct
  source 1..22: mol_type = other RNA
tcctgtactgagctgccccgtg

SEQ ID NO: 33907 - RNA, 23 nt, Synthetic Construct
  source 1..23: mol_type = other RNA
aggggtgctatctgtgattgagg

SEQ ID NO: 33908 - RNA, 16 nt, Synthetic Construct
  source 1..16: mol_type = other RNA
gtctgcggccatacca

SEQ ID NO: 33909 - RNA, 16 nt, Synthetic Construct
  source 1..16: mol_type = other RNA
gtctgcggccatacca

SEQ ID NO: 33910 - RNA, 17 nt, Synthetic Construct
  source 1..17: mol_type = other RNA
tggccgttcttagttgg

SEQ ID NO: 33911 - RNA, 22 nt, Synthetic Construct
  source 1..22: mol_type = other RNA
tgaagtagtaggttgtatagtt

SEQ ID NO: 33912 - RNA, 22 nt, Synthetic Construct
  source 1..22: mol_type = other RNA
tcgtaccgtgagtaataatgca

SEQ ID NO: 33913 - RNA, 22 nt, Synthetic Construct
  source 1..22: mol_type = other RNA
tcgtaccgtgagtaataatgca

SEQ ID NO: 33914 - RNA, 22 nt, Synthetic Construct
  source 1..22: mol_type = other RNA
gcgtaccgtgagtaataatgcg

SEQ ID NO: 33915 - RNA, 21 nt, Synthetic Construct
  source 1..21: mol_type = other RNA
tgaggtagtagattgtatggt

SEQ ID NO: 33916 - RNA, 20 nt, Synthetic Construct
  source 1..20: mol_type = other RNA
cccagtaaacggcggccgta

SEQ ID NO: 33917 - RNA, 20 nt, Synthetic Construct
  source 1..20: mol_type = other RNA
cccagtaaacggcggccgta

SEQ ID NO: 33918 - RNA, 23 nt, Synthetic Construct
  source 1..23: mol_type = other RNA
tggtaatacggcgtacttagtgt

SEQ ID NO: 33919 - RNA, 23 nt, Synthetic Construct
  source 1..23: mol_type = other RNA
tggtaatacggcgtacttagtgt

SEQ ID NO: 33920 - RNA, 21 nt, Synthetic Construct
  source 1..21: mol_type = other RNA
tggagtgtgacaatggtgttc

SEQ ID NO: 33921 - RNA, 35 nt, Synthetic Construct; identical to SEQ ID NO: 2450
  source 1..35: mol_type = other RNA

SEQ ID NO: 33922 - RNA, 35 nt, Synthetic Construct; identical to SEQ ID NO: 2450
  source 1..35: mol_type = other RNA

SEQ ID NO: 33923 - RNA, 20 nt, Synthetic Construct
  source 1..20: mol_type = other RNA
tggagtgtgacaatggtgtt

SEQ ID NO: 33924 - RNA, 20 nt, Synthetic Construct
  source 1..20: mol_type = other RNA
tggagtgtgacaatggtgtt

SEQ ID NO: 33925 - RNA, 23 nt, Synthetic Construct
  source 1..23: mol_type = other RNA
gtgaggtagtaggttgtatagtt

SEQ ID NO: 33926 - RNA, 23 nt, Synthetic Construct
  source 1..23: mol_type = other RNA
gtgaggtagtaggttgtatagtt

SEQ ID NO: 33927 - RNA, 21 nt, Synthetic Construct
  source 1..21: mol_type = other RNA
caaagtgctgttcgtgcaggt

SEQ ID NO: 33928 - RNA, 21 nt, Synthetic Construct
  source 1..21: mol_type = other RNA
tgaggaagtaggttgtatagt

SEQ ID NO: 33929 - RNA, 21 nt, Synthetic Construct
  source 1..21: mol_type = other RNA
tgaggaagtaggttgtatagt

SEQ ID NO: 33930 - RNA, 23 nt, Synthetic Construct
  source 1..23: mol_type = other RNA
tggaatgtaaagaagtatgtacc

SEQ ID NO: 33931 - RNA, 23 nt, Synthetic Construct
  source 1..23: mol_type = other RNA
tggaatgtaaagaagtatgtacc

SEQ ID NO: 33932 - RNA, 17 nt, Synthetic Construct
  source 1..17: mol_type = other RNA
agcggtggatgatgtgg

SEQ ID NO: 33933 - RNA, 17 nt, Synthetic Construct
  source 1..17: mol_type = other RNA
agcggtggatgatgtgg

SEQ ID NO: 33934 - RNA, 22 nt, Synthetic Construct
  source 1..22: mol_type = other RNA
tgagacctctgggttctgagct

SEQ ID NO: 33935 - RNA, 22 nt, Synthetic Construct
  source 1..22: mol_type = other RNA
tgagacctctgggttctgagct

SEQ ID NO: 33936 - RNA, 19 nt, Synthetic Construct
  source 1..19: mol_type = other RNA
cgactcttagcggtggatc

SEQ ID NO: 33937 - RNA, 19 nt, Synthetic Construct
  source 1..19: mol_type = other RNA
cgactcttagcggtggatc

SEQ ID NO: 33938 - RNA, 23 nt, Synthetic Construct
  source 1..23: mol_type = other RNA
tggaatgtaaagaagtatgtatt

SEQ ID NO: 33939 - RNA, 23 nt, Synthetic Construct
  source 1..23: mol_type = other RNA
tggaatgtaaagaagtatgtatt

SEQ ID NO: 33940 - RNA, 18 nt, Synthetic Construct
  source 1..18: mol_type = other RNA
tcttcggtagtatagtgg

SEQ ID NO: 33941 - RNA, 18 nt, Synthetic Construct
  source 1..18: mol_type = other RNA
tcttcggtagtatagtgg

SEQ ID NO: 33942 - RNA, 24 nt, Synthetic Construct
  source 1..24: mol_type = other RNA
ttcaagtaattcaggataggttgt

SEQ ID NO: 33943 - RNA, 24 nt, Synthetic Construct
  source 1..24: mol_type = other RNA
ttcaagtaattcaggataggttgt

SEQ ID NO: 33944 - RNA, 23 nt, Synthetic Construct
  source 1..23: mol_type = other RNA
tggtaatacgacgtacttagcgt

SEQ ID NO: 33945 - RNA, 23 nt, Synthetic Construct
  source 1..23: mol_type = other RNA
tggtaatacgacgtacttagcgt

SEQ ID NO: 33946 - RNA, 15 nt, Synthetic Construct
  source 1..15: mol_type = other RNA
tcgagtcgtcctgcg

SEQ ID NO: 33947 - RNA, 21 nt, Synthetic Construct
  source 1..21: mol_type = other RNA
tgtcttgcaggccgtcatgca

SEQ ID NO: 33948 - RNA, 25 nt, Synthetic Construct
  source 1..25: mol_type = other RNA
ctgaggatatgagatcgagacgaca

SEQ ID NO: 33949 - RNA, 20 nt, Synthetic Construct
  source 1..20: mol_type = other RNA
cgcgacctcagatcagacgt

SEQ ID NO: 33950 - RNA, 20 nt, Synthetic Construct
  source 1..20: mol_type = other RNA
cgcgacctcagatcagacgt

SEQ ID NO: 33951 - RNA, 22 nt, Synthetic Construct
  source 1..22: mol_type = other RNA
gtccagttttcccaggaatccc

SEQ ID NO: 33952 - RNA, 22 nt, Synthetic Construct
  source 1..22: mol_type = other RNA
gtccagttttcccaggaatccc

SEQ ID NO: 33953 - RNA, 22 nt, Synthetic Construct
  source 1..22: mol_type = other RNA
tcgtacagtgagtaataatgcg

SEQ ID NO: 33954 - RNA, 21 nt, Synthetic Construct
  source 1..21: mol_type = other RNA
taaggtagtaggttgtatagt

SEQ ID NO: 33955 - RNA, 20 nt, Synthetic Construct
  source 1..20: mol_type = other RNA
atcacattgccagggatttc

SEQ ID NO: 33956 - RNA, 23 nt, Synthetic Construct
  source 1..23: mol_type = other RNA
naaagtgctgttcgtgcaggtag

SEQ ID NO: 33957 - RNA, 23 nt, Synthetic Construct
  source 1..23: mol_type = other RNA
naaagtgctgttcgtgcaggtag

SEQ ID NO: 33958 - RNA, 20 nt, Synthetic Construct
  source 1..20: mol_type = other RNA
agctacattgtctgctgggt

SEQ ID NO: 33959 - RNA, 20 nt, Synthetic Construct
  source 1..20: mol_type = other RNA
agctacattgtctgctgggt

SEQ ID NO: 33960 - RNA, 24 nt, Synthetic Construct
  source 1..24: mol_type = other RNA
tgtaaacatccctgactggaagct

SEQ ID NO: 33961 - RNA, 22 nt, Synthetic Construct
  source 1..22: mol_type = other RNA
tcctgtactgaactgccccgag

SEQ ID NO: 33962 - RNA, 18 nt, Synthetic Construct
  source 1..18: mol_type = other RNA
atcccacttctgacacca

SEQ ID NO: 33963 - RNA, 18 nt, Synthetic Construct
  source 1..18: mol_type = other RNA
atcccacttctgacacca

SEQ ID NO: 33964 - RNA, 21 nt, Synthetic Construct
  source 1..21: mol_type = other RNA
tggagcgtgacaatggtgttt

SEQ ID NO: 33965 - RNA, 24 nt, Synthetic Construct
  source 1..24: mol_type = other RNA
tgtaaacatccccgactgggagct

SEQ ID NO: 33966 - RNA, 24 nt, Synthetic Construct
  source 1..24: mol_type = other RNA
tgtaaacatccccgactgggagct

SEQ ID NO: 33967 - RNA, 21 nt, Synthetic Construct
  source 1..21: mol_type = other RNA
tgaggtagtaggttgtataga

SEQ ID NO: 33968 - RNA, 25 nt, Synthetic Construct
  source 1..25: mol_type = other RNA
aaaagctgggttgagagggcgaatt

SEQ ID NO: 33969 - RNA, 25 nt, Synthetic Construct
  source 1..25: mol_type = other RNA
aaaagctgggttgagagggcgaatt

SEQ ID NO: 33970 - RNA, 22 nt, Synthetic Construct
  source 1..22: mol_type = other RNA
tcgtaccgtgggtaataatgcg

SEQ ID NO: 33971 - RNA, 22 nt, Synthetic Construct
  source 1..22: mol_type = other RNA
tcgtaccgtgggtaataatgcg

SEQ ID NO: 33972 - RNA, 22 nt, Synthetic Construct
  source 1..22: mol_type = other RNA
tgaggaagtagtttgtgctgtt

SEQ ID NO: 33973 - RNA, 22 nt, Synthetic Construct
  source 1..22: mol_type = other RNA
tgaggtagcaggttgtgtggtt

SEQ ID NO: 33974 - RNA, 22 nt, Synthetic Construct
  source 1..22: mol_type = other RNA
tgaggtagcaggttgtgtggtt

SEQ ID NO: 33975 - RNA, 22 nt, Synthetic Construct
  source 1..22: mol_type = other RNA
tgaggtagtaatttgtgctgtt

SEQ ID NO: 33976 - RNA, 22 nt, Synthetic Construct
  source 1..22: mol_type = other RNA
tgaggtagtaggttgtgtggct

SEQ ID NO: 33977 - RNA, 16 nt, Synthetic Construct
  source 1..16: mol_type = other RNA
gtctacggccgtacca

SEQ ID NO: 33978 - RNA, 23 nt, Synthetic Construct
  source 1..23: mol_type = other RNA
tgaggggcagggagcgagacttt

SEQ ID NO: 33979 - RNA, 23 nt, Synthetic Construct
  source 1..23: mol_type = other RNA
tgaggggcagggagcgagacttt

SEQ ID NO: 33980 - RNA, 27 nt, Synthetic Construct
  source 1..27: mol_type = other RNA
cccccccactgctaaatttgactggct

SEQ ID NO: 33981 - RNA, 25 nt, Synthetic Construct
  source 1..25: mol_type = other RNA
caacggaatcccaaaagcagctgtt

SEQ ID NO: 33982 - RNA, 25 nt, Synthetic Construct
  source 1..25: mol_type = other RNA
caacggaatcccaaaagcagctgtt

SEQ ID NO: 33983 - RNA, 27 nt, Synthetic Construct
  source 1..27: mol_type = other RNA
ncccccactgctaaatttgactggctt

SEQ ID NO: 33984 - RNA, 27 nt, Synthetic Construct
  source 1..27: mol_type = other RNA
ncccccactgctaaatttgactggctt

SEQ ID NO: 33985 - RNA, 21 nt, Synthetic Construct
  source 1..21: mol_type = other RNA
tgaggtagtaggttgagtggt

SEQ ID NO: 33986 - RNA, 21 nt, Synthetic Construct
  source 1..21: mol_type = other RNA
tgaggtagtaggttgagtggt

SEQ ID NO: 33987 - RNA, 23 nt, Synthetic Construct
  source 1..23: mol_type = other RNA
ggctcggtctgaggcccctcagt

SEQ ID NO: 33988 - RNA, 23 nt, Synthetic Construct
  source 1..23: mol_type = other RNA
ggctcggtctgaggcccctcagt

SEQ ID NO: 33989 - RNA, 23 nt, Synthetic Construct
  source 1..23: mol_type = other RNA
caaagtgctgtttgtgcaggtag

SEQ ID NO: 33990 - RNA, 22 nt, Synthetic Construct
  source 1..22: mol_type = other RNA
tcgtaccgtgagtaacaatgcg

SEQ ID NO: 33991 - RNA, 23 nt, Synthetic Construct
  source 1..23: mol_type = other RNA
tgggctaagggagatgattgggt

SEQ ID NO: 33992 - RNA, 33 nt, Synthetic Construct; identical to SEQ ID NO: 7224
  source 1..33: mol_type = other RNA

SEQ ID NO: 33993 - RNA, 33 nt, Synthetic Construct; identical to SEQ ID NO: 7224
  source 1..33: mol_type = other RNA

SEQ ID NO: 33994 - RNA, 17 nt, Synthetic Construct
  source 1..17: mol_type = other RNA
gtccggatcgtagtctg

SEQ ID NO: 33995 - RNA, 23 nt, Synthetic Construct
  source 1..23: mol_type = other RNA
agctacattgtctgctgggttcc

SEQ ID NO: 33996 - RNA, 23 nt, Synthetic Construct
  source 1..23: mol_type = other RNA
agctacattgtctgctgggttcc

SEQ ID NO: 33997 - RNA, 22 nt, Synthetic Construct
  source 1..22: mol_type = other RNA
tgaggtagtaggttgtatggta

SEQ ID NO: 33998 - RNA, 23 nt, Synthetic Construct
  source 1..23: mol_type = other RNA
tgaggtagcaggttgtgtggttt

SEQ ID NO: 33999 - RNA, 23 nt, Synthetic Construct
  source 1..23: mol_type = other RNA
tgaggtagcaggttgtgtggttt

SEQ ID NO: 34000 - RNA, 22 nt, Synthetic Construct
  source 1..22: mol_type = other RNA
tagcagcacgtaaatattagcg

SEQ ID NO: 34001 - RNA, 22 nt, Synthetic Construct
  source 1..22: mol_type = other RNA
tagcagcacgtaaatattagcg

SEQ ID NO: 34002 - RNA, 22 nt, Synthetic Construct
  source 1..22: mol_type = other RNA
tcgtaccgtgagcaataatgcg

SEQ ID NO: 34003 - RNA, 23 nt, Synthetic Construct
  source 1..23: mol_type = other RNA
tgaggggcagagagtgagacttt

SEQ ID NO: 34004 - RNA, 23 nt, Synthetic Construct
  source 1..23: mol_type = other RNA
tgaggggcagagagtgagacttt

SEQ ID NO: 34005 - RNA, 25 nt, Synthetic Construct
  source 1..25: mol_type = other RNA
ttcaagtaatccaggataggctttt

SEQ ID NO: 34006 - RNA, 23 nt, Synthetic Construct
  source 1..23: mol_type = other RNA
cgcagcattgtacagggctatga

SEQ ID NO: 34007 - RNA, 21 nt, Synthetic Construct
  source 1..21: mol_type = other RNA
tggagtgtgacaatggcgttt

SEQ ID NO: 34008 - RNA, 21 nt, Synthetic Construct
  source 1..21: mol_type = other RNA
tggagtgtgacaatggcgttt

SEQ ID NO: 34009 - RNA, 22 nt, Synthetic Construct
  source 1..22: mol_type = other RNA
cgtaccgtgagtaataatgcgt

SEQ ID NO: 34010 - RNA, 22 nt, Synthetic Construct
  source 1..22: mol_type = other RNA
cgtaccgtgagtaataatgcgt

SEQ ID NO: 34011 - RNA, 37 nt, Synthetic Construct; identical to SEQ ID NO: 715
  source 1..37: mol_type = other RNA

SEQ ID NO: 34012 - RNA, 22 nt, Synthetic Construct
  source 1..22: mol_type = other RNA
tcctgtacagagctgccccgag

SEQ ID NO: 34013 - RNA, 22 nt, Synthetic Construct
  source 1..22: mol_type = other RNA
tcgtaccgtgagtaatgatgcg

SEQ ID NO: 34014 - RNA, 17 nt, Synthetic Construct
  source 1..17: mol_type = other RNA
tcccagaaacccggtcg

SEQ ID NO: 34015 - RNA, 21 nt, Synthetic Construct
  source 1..21: mol_type = other RNA
tgaggcagtaggttgtgtggt

SEQ ID NO: 34016 - RNA, 35 nt, Synthetic Construct; identical to SEQ ID NO: 1160
  source 1..35: mol_type = other RNA

SEQ ID NO: 34017 - RNA, 35 nt, Synthetic Construct; identical to SEQ ID NO: 1160
  source 1..35: mol_type = other RNA

SEQ ID NO: 34018 - RNA, 22 nt, Synthetic Construct
  source 1..22: mol_type = other RNA
tgtagcgtttcctactttatgg

SEQ ID NO: 34019 - RNA, 22 nt, Synthetic Construct
  source 1..22: mol_type = other RNA
tgtagcgtttcctactttatgg

SEQ ID NO: 34020 - RNA, 22 nt, Synthetic Construct
  source 1..22: mol_type = other RNA
tcgtaccgtgagtagtaatgcg

SEQ ID NO: 34021 - RNA, 21 nt, Synthetic Construct
  source 1..21: mol_type = other RNA
tggaatgtaaagaagtatgta

SEQ ID NO: 34022 - RNA, 21 nt, Synthetic Construct
  source 1..21: mol_type = other RNA
tggaatgtaaagaagtatgta

SEQ ID NO: 34023 - RNA, 22 nt, Synthetic Construct
  source 1..22: mol_type = other RNA
tagcagcacgtaaatattagcg

SEQ ID NO: 34024 - RNA, 23 nt, Synthetic Construct
  source 1..23: mol_type = other RNA
tcggaatcgctagtaatcgcgga

SEQ ID NO: 34025 - RNA, 23 nt, Synthetic Construct
  source 1..23: mol_type = other RNA
tcggaatcgctagtaatcgcgga

SEQ ID NO: 34026 - RNA, 20 nt, Synthetic Construct
  source 1..20: mol_type = other RNA
tagcagcacataatggtttg

SEQ ID NO: 34027 - RNA, 20 nt, Synthetic Construct
  source 1..20: mol_type = other RNA
tagcagcacataatggtttg

SEQ ID NO: 34028 - RNA, 23 nt, Synthetic Construct
  source 1..23: mol_type = other RNA
caaagtgctgtccgtgcaggtag

SEQ ID NO: 34029 - RNA, 23 nt, Synthetic Construct
  source 1..23: mol_type = other RNA
agaagcattgtacagggctatga

SEQ ID NO: 34030 - RNA, 22 nt, Synthetic Construct
  source 1..22: mol_type = other RNA
tactgcacttgtcccggcctgt

SEQ ID NO: 34031 - RNA, 22 nt, Synthetic Construct
  source 1..22: mol_type = other RNA
tactgcacttgtcccggcctgt

SEQ ID NO: 34032 - RNA, 21 nt, Synthetic Construct
  source 1..21: mol_type = other RNA
gggagtgtgacaatggtgttt

SEQ ID NO: 34033 - RNA, 17 nt, Synthetic Construct
  source 1..17: mol_type = other RNA
tcagtagctcgaggaaa

SEQ ID NO: 34034 - RNA, 17 nt, Synthetic Construct
  source 1..17: mol_type = other RNA
taggtcatcgtcaggct

SEQ ID NO: 34035 - RNA, 17 nt, Synthetic Construct
  source 1..17: mol_type = other RNA
taggtcatcgtcaggct

SEQ ID NO: 34036 - RNA, 20 nt, Synthetic Construct
  source 1..20: mol_type = other RNA
tggggtagtaggttgtgtgg

SEQ ID NO: 34037 - RNA, 44 nt, Synthetic Construct; identical to SEQ ID NO: 5536
  source 1..44: mol_type = other RNA

SEQ ID NO: 34038 - RNA, 31 nt, Synthetic Construct; identical to SEQ ID NO: 2263
  source 1..31: mol_type = other RNA

SEQ ID NO: 34039 - RNA, 31 nt, Synthetic Construct; identical to SEQ ID NO: 2263
  source 1..31: mol_type = other RNA

SEQ ID NO: 34040 - RNA, 20 nt, Synthetic Construct
  source 1..20: mol_type = other RNA
tggaatgtaaagaagtatgt

SEQ ID NO: 34041 - RNA, 20 nt, Synthetic Construct
  source 1..20: mol_type = other RNA
tggaatgtaaagaagtatgt

SEQ ID NO: 34042 - RNA, 24 nt, Synthetic Construct
  source 1..24: mol_type = other RNA
tgtcagtttgtcaaataccccaat

SEQ ID NO: 34043 - RNA, 18 nt, Synthetic Construct
  source 1..18: mol_type = other RNA
agcagcattgtacagggc

SEQ ID NO: 34044 - RNA, 18 nt, Synthetic Construct
  source 1..18: mol_type = other RNA
agcagcattgtacagggc

SEQ ID NO: 34045 - RNA, 24 nt, Synthetic Construct
  source 1..24: mol_type = other RNA
gaatgttgctcggtgaaccccttt

SEQ ID NO: 34046 - RNA, 24 nt, Synthetic Construct
  source 1..24: mol_type = other RNA
gaatgttgctcggtgaaccccttt

SEQ ID NO: 34047 - RNA, 21 nt, Synthetic Construct
  source 1..21: mol_type = other RNA
ttcaagtaatccaggataggc

SEQ ID NO: 34048 - RNA, 16 nt, Synthetic Construct
  source 1..16: mol_type = other RNA
gtctacggccatgcca

SEQ ID NO: 34049 - RNA, 20 nt, Synthetic Construct
  source 1..20: mol_type = other RNA
tatgtctgctgaccatcacc

SEQ ID NO: 34050 - RNA, 20 nt, Synthetic Construct
  source 1..20: mol_type = other RNA
tatgtctgctgaccatcacc

SEQ ID NO: 34051 - RNA, 25 nt, Synthetic Construct
  source 1..25: mol_type = other RNA
gagaaagctcacaagaactgctaac

SEQ ID NO: 34052 - RNA, 25 nt, Synthetic Construct
  source 1..25: mol_type = other RNA
gagaaagctcacaagaactgctaac

SEQ ID NO: 34053 - RNA, 18 nt, Synthetic Construct
  source 1..18: mol_type = other RNA
cccaaaggtcgtcggttc

SEQ ID NO: 34054 - RNA, 24 nt, Synthetic Construct
  source 1..24: mol_type = other RNA
tgaggtagtaggttgtgtggttta

SEQ ID NO: 34055 - RNA, 23 nt, Synthetic Construct
  source 1..23: mol_type = other RNA
tcctgtactgagccgccccgaga

SEQ ID NO: 34056 - RNA, 23 nt, Synthetic Construct
  source 1..23: mol_type = other RNA
tccagtactgagctgccccgaga

SEQ ID NO: 34057 - RNA, 27 nt, Synthetic Construct
  source 1..27: mol_type = other RNA
ccccccactgctaaatttgacgggctt

SEQ ID NO: 34058 - RNA, 22 nt, Synthetic Construct
  source 1..22: mol_type = other RNA
tgaggtagtaggtcgtatagtt

SEQ ID NO: 34059 - RNA, 22 nt, Synthetic Construct
  source 1..22: mol_type = other RNA
tgaggtagtaggtcgtatagtt

SEQ ID NO: 34060 - RNA, 22 nt, Synthetic Construct
  source 1..22: mol_type = other RNA
tgaggtagtagactgtatagtt

SEQ ID NO: 34061 - RNA, 22 nt, Synthetic Construct
  source 1..22: mol_type = other RNA
tgaggtagtagactgtatagtt

SEQ ID NO: 34062 - RNA, 22 nt, Synthetic Construct
  source 1..22: mol_type = other RNA
tcgtatcgtgagtaataatgcg

SEQ ID NO: 34063 - RNA, 22 nt, Synthetic Construct
  source 1..22: mol_type = other RNA
tcgtatcgtgagtaataatgcg

SEQ ID NO: 34064 - RNA, 22 nt, Synthetic Construct
  source 1..22: mol_type = other RNA
tcgaatccgagtcacggcacca

SEQ ID NO: 34065 - RNA, 19 nt, Synthetic Construct
  source 1..19: mol_type = other RNA
agctacattgtctgctggg

SEQ ID NO: 34066 - RNA, 18 nt, Synthetic Construct
  source 1..18: mol_type = other RNA
catgcaagtcgaacggta

SEQ ID NO: 34067 - RNA, 24 nt, Synthetic Construct
  source 1..24: mol_type = other RNA
gctaaacctagccccaaacccact

SEQ ID NO: 34068 - RNA, 22 nt, Synthetic Construct
  source 1..22: mol_type = other RNA
tcgtaccatgagtaataatgcg

SEQ ID NO: 34069 - RNA, 22 nt, Synthetic Construct
  source 1..22: mol_type = other RNA
aattgcacggtatccatctgta

SEQ ID NO: 34070 - RNA, 22 nt, Synthetic Construct
  source 1..22: mol_type = other RNA
aattgcacggtatccatctgta

SEQ ID NO: 34071 - RNA, 23 nt, Synthetic Construct
  source 1..23: mol_type = other RNA
atatcggaacgtgcccagtcgtg

SEQ ID NO: 34072 - RNA, 23 nt, Synthetic Construct
  source 1..23: mol_type = other RNA
atatcggaacgtgcccagtcgtg

SEQ ID NO: 34073 - RNA, 23 nt, Synthetic Construct
  source 1..23: mol_type = other RNA
tgaggggcagagagagagacttt

SEQ ID NO: 34074 - RNA, 23 nt, Synthetic Construct
  source 1..23: mol_type = other RNA
tgaggggcagagagcgagactat

SEQ ID NO: 34075 - RNA, 23 nt, Synthetic Construct
  source 1..23: mol_type = other RNA
tgaggggcagagagcgagactat

SEQ ID NO: 34076 - RNA, 22 nt, Synthetic Construct
  source 1..22: mol_type = other RNA
tggggtagtagtttgtgctgtt

SEQ ID NO: 34077 - RNA, 20 nt, Synthetic Construct
  source 1..20: mol_type = other RNA
tagaattctcgcctgccacg

SEQ ID NO: 34078 - RNA, 20 nt, Synthetic Construct
  source 1..20: mol_type = other RNA
tagaattctcgcctgccacg

SEQ ID NO: 34079 - RNA, 21 nt, Synthetic Construct
  source 1..21: mol_type = other RNA
tgaggtagtaggttgagtggt

SEQ ID NO: 34080 - RNA, 21 nt, Synthetic Construct
  source 1..21: mol_type = other RNA
tgaggtagtaggttgagtggt

SEQ ID NO: 34081 - RNA, 23 nt, Synthetic Construct
  source 1..23: mol_type = other RNA
gtcagtttgtcaaataccccaat

SEQ ID NO: 34082 - RNA, 23 nt, Synthetic Construct
  source 1..23: mol_type = other RNA
gtcagtttgtcaaataccccaat

SEQ ID NO: 34083 - RNA, 17 nt, Synthetic Construct
  source 1..17: mol_type = other RNA
atgcaagtcgaacggta

SEQ ID NO: 34084 - RNA, 16 nt, Synthetic Construct
  source 1..16: mol_type = other RNA
gcctacggccatacca

SEQ ID NO: 34085 - RNA, 23 nt, Synthetic Construct
  source 1..23: mol_type = other RNA
tgaggggtagagagcgagacttt

SEQ ID NO: 34086 - RNA, 23 nt, Synthetic Construct
  source 1..23: mol_type = other RNA
tgaggggtagagagcgagacttt

SEQ ID NO: 34087 - RNA, 22 nt, Synthetic Construct
  source 1..22: mol_type = other RNA
tgaggtagaaggttgtgtggtt

SEQ ID NO: 34088 - RNA, 16 nt, Synthetic Construct
  source 1..16: mol_type = other RNA
gtctacggccatacaa

SEQ ID NO: 34089 - RNA, 16 nt, Synthetic Construct
  source 1..16: mol_type = other RNA
gtctacggccatacaa

SEQ ID NO: 34090 - RNA, 21 nt, Synthetic Construct
  source 1..21: mol_type = other RNA
tcctgtactgagctaccccga

SEQ ID NO: 34091 - RNA, 21 nt, Synthetic Construct
  source 1..21: mol_type = other RNA
tcctgtactgagctaccccga

SEQ ID NO: 34092 - RNA, 24 nt, Synthetic Construct
  source 1..24: mol_type = other RNA
agctacatctggctactgggtctc

SEQ ID NO: 34093 - RNA, 24 nt, Synthetic Construct
  source 1..24: mol_type = other RNA
agctacatctggctactgggtctc

SEQ ID NO: 34094 - RNA, 22 nt, Synthetic Construct
  source 1..22: mol_type = other RNA
tagcatatcgagcctgagaaca

SEQ ID NO: 34095 - RNA, 22 nt, Synthetic Construct
  source 1..22: mol_type = other RNA
tagcatatcgagcctgagaaca

SEQ ID NO: 34096 - RNA, 21 nt, Synthetic Construct
  source 1..21: mol_type = other RNA
agtaccgtgagtaataatgcg

SEQ ID NO: 34097 - RNA, 23 nt, Synthetic Construct
  source 1..23: mol_type = other RNA
naaagtgctgttcgtgcaggtag

SEQ ID NO: 34098 - RNA, 23 nt, Synthetic Construct
  source 1..23: mol_type = other RNA
naaagtgctgttcgtgcaggtag

SEQ ID NO: 34099 - RNA, 22 nt, Synthetic Construct
  source 1..22: mol_type = other RNA
tccagtactgagctgccccgag

SEQ ID NO: 34100 - RNA, 24 nt, Synthetic Construct
  source 1..24: mol_type = other RNA
tgatatgtttgatatattaggttg

SEQ ID NO: 34101 - RNA, 19 nt, Synthetic Construct
  source 1..19: mol_type = other RNA
atctgctggaactgcaact

SEQ ID NO: 34102 - RNA, 19 nt, Synthetic Construct
  source 1..19: mol_type = other RNA
atctgctggaactgcaact

SEQ ID NO: 34103 - RNA, 23 nt, Synthetic Construct
  source 1..23: mol_type = other RNA
tgaggggcagagagtgagacttt

SEQ ID NO: 34104 - RNA, 23 nt, Synthetic Construct
  source 1..23: mol_type = other RNA
tgaggggcagagagtgagacttt

SEQ ID NO: 34105 - RNA, 22 nt, Synthetic Construct
  source 1..22: mol_type = other RNA
tgaggtagtagattgtgtagtt

SEQ ID NO: 34106 - RNA, 22 nt, Synthetic Construct
  source 1..22: mol_type = other RNA
tgaggtagtagattgtgtagtt

SEQ ID NO: 34107 - RNA, 20 nt, Synthetic Construct
  source 1..20: mol_type = other RNA
atcaagtaatccaggatagg

SEQ ID NO: 34108 - RNA, 22 nt, Synthetic Construct
  source 1..22: mol_type = other RNA
gtcagtttgtcaaataccccat

SEQ ID NO: 34109 - RNA, 16 nt, Synthetic Construct
  source 1..16: mol_type = other RNA
gtctacggccatgcca

SEQ ID NO: 34110 - RNA, 22 nt, Synthetic Construct
  source 1..22: mol_type = other RNA
tgaggtagtaaattgtatagtt

SEQ ID NO: 34111 - RNA, 17 nt, Synthetic Construct
  source 1..17: mol_type = other RNA
atcgtgacgatagtgca

SEQ ID NO: 34112 - RNA, 20 nt, Synthetic Construct
  source 1..20: mol_type = other RNA
tgaggtggtaggttgtatag

SEQ ID NO: 34113 - RNA, 20 nt, Synthetic Construct
  source 1..20: mol_type = other RNA
tgaggtggtaggttgtatag

SEQ ID NO: 34114 - RNA, 22 nt, Synthetic Construct
  source 1..22: mol_type = other RNA
cggctctgggtctgtggggagt

SEQ ID NO: 34115 - RNA, 27 nt, Synthetic Construct
  source 1..27: mol_type = other RNA
ccccccactgctaaatttgactagctt

SEQ ID NO: 34116 - RNA, 22 nt, Synthetic Construct
  source 1..22: mol_type = other RNA
tgaggtagtagtttgtgctgtc

SEQ ID NO: 34117 - RNA, 17 nt, Synthetic Construct
  source 1..17: mol_type = other RNA
gaagcggggctgggcgc

SEQ ID NO: 34118 - RNA, 20 nt, Synthetic Construct
  source 1..20: mol_type = other RNA
caggacagtgaaacgagtca

SEQ ID NO: 34119 - RNA, 20 nt, Synthetic Construct
  source 1..20: mol_type = other RNA
tgaggtagtaggttgtgtag

SEQ ID NO: 34120 - RNA, 22 nt, Synthetic Construct
  source 1..22: mol_type = other RNA
tgaggtagtaggttgtgtggtc

SEQ ID NO: 34121 - RNA, 24 nt, Synthetic Construct
  source 1..24: mol_type = other RNA
tcctgtactgagctgccccgagtt

SEQ ID NO: 34122 - RNA, 24 nt, Synthetic Construct
  source 1..24: mol_type = other RNA
tcctgtactgagctgccccgagtt

SEQ ID NO: 34123 - RNA, 20 nt, Synthetic Construct
  source 1..20: mol_type = other RNA
tgaggtagcaggttgtgtgg

SEQ ID NO: 34124 - RNA, 20 nt, Synthetic Construct
  source 1..20: mol_type = other RNA
atcacattgccagggatttc

SEQ ID NO: 34125 - RNA, 17 nt, Synthetic Construct
  source 1..17: mol_type = other RNA
cgcgacctcagatcaga

SEQ ID NO: 34126 - RNA, 17 nt, Synthetic Construct
  source 1..17: mol_type = other RNA
cgcgacctcagatcaga

SEQ ID NO: 34127 - RNA, 43 nt, Synthetic Construct; identical to SEQ ID NO: 2315
  source 1..43: mol_type = other RNA

SEQ ID NO: 34128 - RNA, 23 nt, Synthetic Construct
  source 1..23: mol_type = other RNA
aatgacacgatcactcccgttgt

SEQ ID NO: 34129 - RNA, 23 nt, Synthetic Construct
  source 1..23: mol_type = other RNA
aatgacacgatcactcccgttgt

SEQ ID NO: 34130 - RNA, 35 nt, Synthetic Construct; identical to SEQ ID NO: 757
  source 1..35: mol_type = other RNA

SEQ ID NO: 34131 - RNA, 35 nt, Synthetic Construct; identical to SEQ ID NO: 737
  source 1..35: mol_type = other RNA

SEQ ID NO: 34132 - RNA, 35 nt, Synthetic Construct; identical to SEQ ID NO: 737
  source 1..35: mol_type = other RNA

SEQ ID NO: 34133 - RNA, 23 nt, Synthetic Construct
  source 1..23: mol_type = other RNA
tgagaactgaattccatgggttg

SEQ ID NO: 34134 - RNA, 23 nt, Synthetic Construct
  source 1..23: mol_type = other RNA
tgagaactgaattccatgggttg

SEQ ID NO: 34135 - RNA, 22 nt, Synthetic Construct
  source 1..22: mol_type = other RNA
tattgcacttgtcccgacctgt

SEQ ID NO: 34136 - RNA, 22 nt, Synthetic Construct
  source 1..22: mol_type = other RNA
tattgcacttgtcccgacctgt

SEQ ID NO: 34137 - RNA, 15 nt, Synthetic Construct
  source 1..15: mol_type = other RNA
cagtgaaacgagtca

SEQ ID NO: 34138 - RNA, 22 nt, Synthetic Construct
  source 1..22: mol_type = other RNA
tattgcacttgtcccggcccgt

SEQ ID NO: 34139 - RNA, 22 nt, Synthetic Construct
  source 1..22: mol_type = other RNA
tattgcacttgtcccggcccgt

SEQ ID NO: 34140 - RNA, 23 nt, Synthetic Construct
  source 1..23: mol_type = other RNA
tcctgtgctgagctgccccgaga

SEQ ID NO: 34141 - RNA, 23 nt, Synthetic Construct
  source 1..23: mol_type = other RNA
tcctgtactgagctgccccgagt

SEQ ID NO: 34142 - RNA, 23 nt, Synthetic Construct
  source 1..23: mol_type = other RNA
tcctgtactgagctgccccgagt

SEQ ID NO: 34143 - RNA, 20 nt, Synthetic Construct
  source 1..20: mol_type = other RNA
tggctcagttcagcaggaaa

SEQ ID NO: 34144 - RNA, 20 nt, Synthetic Construct
  source 1..20: mol_type = other RNA
tggctcagttcagcaggaaa

SEQ ID NO: 34145 - RNA, 22 nt, Synthetic Construct
  source 1..22: mol_type = other RNA
atggatttttggagcagggaga

SEQ ID NO: 34146 - RNA, 22 nt, Synthetic Construct
  source 1..22: mol_type = other RNA
atggatttttggagcagggaga

SEQ ID NO: 34147 - RNA, 24 nt, Synthetic Construct
  source 1..24: mol_type = other RNA
ggtaaacatccccgactggaagct

SEQ ID NO: 34148 - RNA, 22 nt, Synthetic Construct
  source 1..22: mol_type = other RNA
tgagaactgaattccatgggtt

SEQ ID NO: 34149 - RNA, 22 nt, Synthetic Construct
  source 1..22: mol_type = other RNA
tgagaactgaattccatgggtt

SEQ ID NO: 34150 - RNA, 22 nt, Synthetic Construct
  source 1..22: mol_type = other RNA
tagcagcacataatggtttgtg

SEQ ID NO: 34151 - RNA, 23 nt, Synthetic Construct
  source 1..23: mol_type = other RNA
tcctgtactgagctgctccgaga

SEQ ID NO: 34152 - RNA, 23 nt, Synthetic Construct
  source 1..23: mol_type = other RNA
tcctgtactgagctgctccgaga

SEQ ID NO: 34153 - RNA, 22 nt, Synthetic Construct
  source 1..22: mol_type = other RNA
tggagagaaaggcagttcctga

SEQ ID NO: 34154 - RNA, 22 nt, Synthetic Construct
  source 1..22: mol_type = other RNA
tggagagaaaggcagttcctga

SEQ ID NO: 34155 - RNA, 24 nt, Synthetic Construct
  source 1..24: mol_type = other RNA
tgtagacatccccgactggaagct

SEQ ID NO: 34156 - RNA, 24 nt, Synthetic Construct
  source 1..24: mol_type = other RNA
tgtagacatccccgactggaagct

SEQ ID NO: 34157 - RNA, 23 nt, Synthetic Construct
  source 1..23: mol_type = other RNA
caaagtgctgctcgtgcaggtag

SEQ ID NO: 34158 - RNA, 22 nt, Synthetic Construct
  source 1..22: mol_type = other RNA
tgaggaagtaggttgtatagtt

SEQ ID NO: 34159 - RNA, 23 nt, Synthetic Construct
  source 1..23: mol_type = other RNA
tcctgtactgagctgccctgagt

SEQ ID NO: 34160 - RNA, 21 nt, Synthetic Construct
  source 1..21: mol_type = other RNA
cagtgcaatgttaaaagggca

SEQ ID NO: 34161 - RNA, 21 nt, Synthetic Construct
  source 1..21: mol_type = other RNA
cagtgcaatgttaaaagggca

SEQ ID NO: 34162 - RNA, 34 nt, Synthetic Construct; identical to SEQ ID NO: 1526
  source 1..34: mol_type = other RNA

SEQ ID NO: 34163 - RNA, 23 nt, Synthetic Construct
  source 1..23: mol_type = other RNA
tgaggtaggaggttgtatagtta

SEQ ID NO: 34164 - RNA, 27 nt, Synthetic Construct
  source 1..27: mol_type = other RNA
ctccccactgctaaatttgactggctt

SEQ ID NO: 34165 - RNA, 23 nt, Synthetic Construct
  source 1..23: mol_type = other RNA
tcctgtacagagctgccccgaga

SEQ ID NO: 34166 - RNA, 23 nt, Synthetic Construct
  source 1..23: mol_type = other RNA
tcctgtacagagctgccccgaga

SEQ ID NO: 34167 - RNA, 27 nt, Synthetic Construct
  source 1..27: mol_type = other RNA
ttctcactactgcacttgactagtctt

SEQ ID NO: 34168 - RNA, 39 nt, Synthetic Construct; identical to SEQ ID NO: 4939
  source 1..39: mol_type = other RNA

SEQ ID NO: 34169 - RNA, 39 nt, Synthetic Construct; identical to SEQ ID NO: 4939
  source 1..39: mol_type = other RNA

SEQ ID NO: 34170 - RNA, 21 nt, Synthetic Construct
  source 1..21: mol_type = other RNA
tcctatactgagctgccccga

SEQ ID NO: 34171 - RNA, 15 nt, Synthetic Construct
  source 1..15: mol_type = other RNA
gctatgggatttgtt

SEQ ID NO: 34172 - RNA, 15 nt, Synthetic Construct
  source 1..15: mol_type = other RNA
gctatgggatttgtt

SEQ ID NO: 34173 - RNA, 23 nt, Synthetic Construct
  source 1..23: mol_type = other RNA
cgaggtagtaggttgtgtggttt

SEQ ID NO: 34174 - RNA, 23 nt, Synthetic Construct
  source 1..23: mol_type = other RNA
agcagcattgtacagggctatgg

SEQ ID NO: 34175 - RNA, 21 nt, Synthetic Construct
  source 1..21: mol_type = other RNA
caacggaatcccaaaagcagc

SEQ ID NO: 34176 - RNA, 21 nt, Synthetic Construct
  source 1..21: mol_type = other RNA
caacggaatcccaaaagcagc

SEQ ID NO: 34177 - RNA, 16 nt, Synthetic Construct
  source 1..16: mol_type = other RNA
gctattgacgaccgta

SEQ ID NO: 34178 - RNA, 21 nt, Synthetic Construct
  source 1..21: mol_type = other RNA
cgaggtagtagtttgtgctgt

SEQ ID NO: 34179 - RNA, 21 nt, Synthetic Construct
  source 1..21: mol_type = other RNA
cgaggtagtagtttgtgctgt

SEQ ID NO: 34180 - RNA, 18 nt, Synthetic Construct
  source 1..18: mol_type = other RNA
agcaggacggtggccatg

SEQ ID NO: 34181 - RNA, 26 nt, Synthetic Construct
  source 1..26: mol_type = other RNA
tgtaaacatccttgactggaagcttt

SEQ ID NO: 34182 - RNA, 23 nt, Synthetic Construct
  source 1..23: mol_type = other RNA
tcctgtactgagctgctccgaga

SEQ ID NO: 34183 - RNA, 23 nt, Synthetic Construct
  source 1..23: mol_type = other RNA
tcctgtactgagctgctccgaga

SEQ ID NO: 34184 - RNA, 21 nt, Synthetic Construct
  source 1..21: mol_type = other RNA
acagcaggacggtggccatgg

SEQ ID NO: 34185 - RNA, 22 nt, Synthetic Construct
  source 1..22: mol_type = other RNA
gaagaggacttggaactcgatc

SEQ ID NO: 34186 - RNA, 22 nt, Synthetic Construct
  source 1..22: mol_type = other RNA
gaagaggacttggaactcgatc

SEQ ID NO: 34187 - RNA, 20 nt, Synthetic Construct
  source 1..20: mol_type = other RNA
tagcttatcagactgatgtt

SEQ ID NO: 34188 - RNA, 22 nt, Synthetic Construct
  source 1..22: mol_type = other RNA
taggtagtttcctgttgttggg

SEQ ID NO: 34189 - RNA, 22 nt, Synthetic Construct
  source 1..22: mol_type = other RNA
taggtagtttcctgttgttggg

SEQ ID NO: 34190 - RNA, 21 nt, Synthetic Construct
  source 1..21: mol_type = other RNA
tggggtagtagtttgtgctgt

SEQ ID NO: 34191 - RNA, 21 nt, Synthetic Construct
  source 1..21: mol_type = other RNA
tggggtagtagtttgtgctgt

SEQ ID NO: 34192 - RNA, 22 nt, Synthetic Construct
  source 1..22: mol_type = other RNA
tattgcacttgtcccggcccgt

SEQ ID NO: 34193 - RNA, 24 nt, Synthetic Construct
  source 1..24: mol_type = other RNA
tgtaagcatccccgactggaagct

SEQ ID NO: 34194 - RNA, 23 nt, Synthetic Construct
  source 1..23: mol_type = other RNA
tcctgtactgagctgccccgatt

SEQ ID NO: 34195 - RNA, 15 nt, Synthetic Construct
  source 1..15: mol_type = other RNA
tcctgacggccatag

SEQ ID NO: 34196 - RNA, 15 nt, Synthetic Construct
  source 1..15: mol_type = other RNA
tcctgacggccatag

SEQ ID NO: 34197 - RNA, 21 nt, Synthetic Construct
  source 1..21: mol_type = other RNA
gtagtgtttcctactttatgg

SEQ ID NO: 34198 - RNA, 21 nt, Synthetic Construct
  source 1..21: mol_type = other RNA
gtagtgtttcctactttatgg

SEQ ID NO: 34199 - RNA, 17 nt, Synthetic Construct
  source 1..17: mol_type = other RNA
accggaggaaggtgggg

SEQ ID NO: 34200 - RNA, 24 nt, Synthetic Construct
  source 1..24: mol_type = other RNA
gaggtgtagaataggtgggagctt

SEQ ID NO: 34201 - RNA, 22 nt, Synthetic Construct
  source 1..22: mol_type = other RNA
tagcagcatgtaaatattggcg

SEQ ID NO: 34202 - RNA, 22 nt, Synthetic Construct
  source 1..22: mol_type = other RNA
tagcagcatgtaaatattggcg

SEQ ID NO: 34203 - RNA, 28 nt, Synthetic Construct
  source 1..28: mol_type = other RNA
ggtggctgtagctcagttggtagagtcc

SEQ ID NO: 34204 - RNA, 28 nt, Synthetic Construct
  source 1..28: mol_type = other RNA
ggtggctgtagctcagttggtagagtcc

SEQ ID NO: 34205 - RNA, 27 nt, Synthetic Construct
  source 1..27: mol_type = other RNA
ccccccactgcaaaatttgactggctt

SEQ ID NO: 34206 - RNA, 16 nt, Synthetic Construct
  source 1..16: mol_type = other RNA
gatttgggagtgctcg

SEQ ID NO: 34207 - RNA, 16 nt, Synthetic Construct
  source 1..16: mol_type = other RNA
gatttgggagtgctcg

SEQ ID NO: 34208 - RNA, 22 nt, Synthetic Construct
  source 1..22: mol_type = other RNA
tatcgcacttgtcccggcctgt

SEQ ID NO: 34209 - RNA, 23 nt, Synthetic Construct
  source 1..23: mol_type = other RNA
tggaatgtaaagaagtatgtata

SEQ ID NO: 34210 - RNA, 23 nt, Synthetic Construct
  source 1..23: mol_type = other RNA
tggaatgtaaagaagtatgtata

SEQ ID NO: 34211 - RNA, 39 nt, Synthetic Construct; identical to SEQ ID NO: 1521
  source 1..39: mol_type = other RNA

SEQ ID NO: 34212 - RNA, 35 nt, Synthetic Construct; identical to SEQ ID NO: 1160
  source 1..35: mol_type = other RNA

SEQ ID NO: 34213 - RNA, 35 nt, Synthetic Construct; identical to SEQ ID NO: 1160
  source 1..35: mol_type = other RNA

SEQ ID NO: 34214 - RNA, 22 nt, Synthetic Construct
  source 1..22: mol_type = other RNA
tagcagcacgtaaaaattggcg

SEQ ID NO: 34215 - RNA, 23 nt, Synthetic Construct
  source 1..23: mol_type = other RNA
taccctgtagaaccgaatttgtg

SEQ ID NO: 34216 - RNA, 23 nt, Synthetic Construct
  source 1..23: mol_type = other RNA
taccctgtagaaccgaatttgtg

SEQ ID NO: 34217 - RNA, 22 nt, Synthetic Construct
  source 1..22: mol_type = other RNA
gtcatacacggctctcctctct

SEQ ID NO: 34218 - RNA, 22 nt, Synthetic Construct
  source 1..22: mol_type = other RNA
gtcatacacggctctcctctct

SEQ ID NO: 34219 - RNA, 21 nt, Synthetic Construct
  source 1..21: mol_type = other RNA
actcggcgtggcgtcggtcgt

SEQ ID NO: 34220 - RNA, 21 nt, Synthetic Construct
  source 1..21: mol_type = other RNA
actcggcgtggcgtcggtcgt

SEQ ID NO: 34221 - RNA, 37 nt, Synthetic Construct; identical to SEQ ID NO: 2211
  source 1..37: mol_type = other RNA

SEQ ID NO: 34222 - RNA, 37 nt, Synthetic Construct; identical to SEQ ID NO: 2211
  source 1..37: mol_type = other RNA

SEQ ID NO: 34223 - RNA, 22 nt, Synthetic Construct
  source 1..22: mol_type = other RNA
agggctgggtcggtcgggctgg

SEQ ID NO: 34224 - RNA, 22 nt, Synthetic Construct
  source 1..22: mol_type = other RNA
agggctgggtcggtcgggctgg

SEQ ID NO: 34225 - RNA, 30 nt, Synthetic Construct; identical to SEQ ID NO: 11302
  source 1..30: mol_type = other RNA

SEQ ID NO: 34226 - RNA, 21 nt, Synthetic Construct
  source 1..21: mol_type = other RNA
ttcggaagaaggggtgcctgg

SEQ ID NO: 34227 - RNA, 21 nt, Synthetic Construct
  source 1..21: mol_type = other RNA
ttcggaagaaggggtgcctgg

SEQ ID NO: 34228 - RNA, 22 nt, Synthetic Construct
  source 1..22: mol_type = other RNA
tcctgtactgagttgccccgag

SEQ ID NO: 34229 - RNA, 22 nt, Synthetic Construct
  source 1..22: mol_type = other RNA
tcctgtactgagttgccccgag

SEQ ID NO: 34230 - RNA, 24 nt, Synthetic Construct
  source 1..24: mol_type = other RNA
gaggtgtagaataggtgggagctt

SEQ ID NO: 34231 - RNA, 23 nt, Synthetic Construct
  source 1..23: mol_type = other RNA
ttcaagtaattcaggataggttg

SEQ ID NO: 34232 - RNA, 23 nt, Synthetic Construct
  source 1..23: mol_type = other RNA
ttcaagtaattcaggataggttg

SEQ ID NO: 34233 - RNA, 23 nt, Synthetic Construct
  source 1..23: mol_type = other RNA
tgtgcaaatctatgcaaaactga

SEQ ID NO: 34234 - RNA, 23 nt, Synthetic Construct
  source 1..23: mol_type = other RNA
tgtgcaaatctatgcaaaactga

SEQ ID NO: 34235 - RNA, 23 nt, Synthetic Construct
  source 1..23: mol_type = other RNA
attctaatttctccacgtctttg

SEQ ID NO: 34236 - RNA, 23 nt, Synthetic Construct
  source 1..23: mol_type = other RNA
attctaatttctccacgtctttg

SEQ ID NO: 34237 - RNA, 34 nt, Synthetic Construct; identical to SEQ ID NO: 2291
  source 1..34: mol_type = other RNA

SEQ ID NO: 34238 - RNA, 39 nt, Synthetic Construct
  source 1..39: mol_type = other RNA
ttgtaaaccggagatgaaaacctttttccaaggacacca

SEQ ID NO: 34239 - RNA, 17 nt, Synthetic Construct
  source 1..17: mol_type = other RNA
agcggtggatgatgtgg

SEQ ID NO: 34240 - RNA, 17 nt, Synthetic Construct
  source 1..17: mol_type = other RNA
agcggtggatgatgtgg

SEQ ID NO: 34241 - RNA, 22 nt, Synthetic Construct
  source 1..22: mol_type = other RNA
tgagaactgaattccatgggtc

SEQ ID NO: 34242 - RNA, 19 nt, Synthetic Construct
  source 1..19: mol_type = other RNA
gggataactggcttgtggc

SEQ ID NO: 34243 - RNA, 19 nt, Synthetic Construct
  source 1..19: mol_type = other RNA
gggataactggcttgtggc

SEQ ID NO: 34244 - RNA, 22 nt, Synthetic Construct
  source 1..22: mol_type = other RNA
aggaatgtaaagaagtatgtat

SEQ ID NO: 34245 - RNA, 22 nt, Synthetic Construct
  source 1..22: mol_type = other RNA
aggaatgtaaagaagtatgtat

SEQ ID NO: 34246 - RNA, 24 nt, Synthetic Construct
  source 1..24: mol_type = other RNA
gtcagtttgtcaaataccccaatt

SEQ ID NO: 34247 - RNA, 24 nt, Synthetic Construct
  source 1..24: mol_type = other RNA
gtcagtttgtcaaataccccaatt

SEQ ID NO: 34248 - RNA, 20 nt, Synthetic Construct
  source 1..20: mol_type = other RNA
tagaattctcgcctgccacg

SEQ ID NO: 34249 - RNA, 22 nt, Synthetic Construct
  source 1..22: mol_type = other RNA
tgtcagtttgtcaaatacccct

SEQ ID NO: 34250 - RNA, 22 nt, Synthetic Construct
  source 1..22: mol_type = other RNA
tgtcagtttgtcaaatacccct

SEQ ID NO: 34251 - RNA, 25 nt, Synthetic Construct
  source 1..25: mol_type = other RNA
tgtaaacatccttgactggaagctt

SEQ ID NO: 34252 - RNA, 25 nt, Synthetic Construct
  source 1..25: mol_type = other RNA
tgtaaacatccttgactggaagctt

SEQ ID NO: 34253 - RNA, 20 nt, Synthetic Construct
  source 1..20: mol_type = other RNA
tgaggtagtaggttatgtgg

SEQ ID NO: 34254 - RNA, 32 nt, Synthetic Construct; identical to SEQ ID NO: 2052
  source 1..32: mol_type = other RNA

SEQ ID NO: 34255 - RNA, 32 nt, Synthetic Construct; identical to SEQ ID NO: 2052
  source 1..32: mol_type = other RNA

SEQ ID NO: 34256 - RNA, 23 nt, Synthetic Construct
  source 1..23: mol_type = other RNA
tggtaatacgacgtacttagtgc

SEQ ID NO: 34257 - RNA, 26 nt, Synthetic Construct
  source 1..26: mol_type = other RNA
gatttccccttggggttgtaggacca

SEQ ID NO: 34258 - RNA, 26 nt, Synthetic Construct
  source 1..26: mol_type = other RNA
gatttccccttggggttgtaggacca

SEQ ID NO: 34259 - RNA, 21 nt, Synthetic Construct
  source 1..21: mol_type = other RNA
tagcagcacgtaatattggcg

SEQ ID NO: 34260 - RNA, 23 nt, Synthetic Construct
  source 1..23: mol_type = other RNA
tgtgcaaatccatgcaaaactga

SEQ ID NO: 34261 - RNA, 22 nt, Synthetic Construct
  source 1..22: mol_type = other RNA
tcctgtactgagctgacccgag

SEQ ID NO: 34262 - RNA, 22 nt, Synthetic Construct
  source 1..22: mol_type = other RNA
tcctgtactgagctgacccgag

SEQ ID NO: 34263 - RNA, 22 nt, Synthetic Construct
  source 1..22: mol_type = other RNA
tggggtagtagtttgtgctgtt

SEQ ID NO: 34264 - RNA, 23 nt, Synthetic Construct
  source 1..23: mol_type = other RNA
tggggtagtaggttgtgtggttt

SEQ ID NO: 34265 - RNA, 23 nt, Synthetic Construct
  source 1..23: mol_type = other RNA
tggggtagtaggttgtgtggttt

SEQ ID NO: 34266 - RNA, 22 nt, Synthetic Construct
  source 1..22: mol_type = other RNA
tcgtaccgtgagtaatgatgcg

SEQ ID NO: 34267 - RNA, 22 nt, Synthetic Construct
  source 1..22: mol_type = other RNA
cgtaccgtgagtaataatgcgt

SEQ ID NO: 34268 - RNA, 22 nt, Synthetic Construct
  source 1..22: mol_type = other RNA
cgtaccgtgagtaataatgcgt

SEQ ID NO: 34269 - RNA, 23 nt, Synthetic Construct
  source 1..23: mol_type = other RNA
tcactgatcgagtcgtcctgcgc

SEQ ID NO: 34270 - RNA, 22 nt, Synthetic Construct
  source 1..22: mol_type = other RNA
tattgcacttgtcccagcctgt

SEQ ID NO: 34271 - RNA, 19 nt, Synthetic Construct
  source 1..19: mol_type = other RNA
cgactcttagcggtggatc

SEQ ID NO: 34272 - RNA, 22 nt, Synthetic Construct
  source 1..22: mol_type = other RNA
taccagcacgtaaatattggcg

SEQ ID NO: 34273 - RNA, 23 nt, Synthetic Construct
  source 1..23: mol_type = other RNA
aatgacacgatcactcccgttga

SEQ ID NO: 34274 - RNA, 22 nt, Synthetic Construct
  source 1..22: mol_type = other RNA
tgaggtagtagtttgtgccgtt

SEQ ID NO: 34275 - RNA, 23 nt, Synthetic Construct
  source 1..23: mol_type = other RNA
tgagaactgaattccatgggtta

SEQ ID NO: 34276 - RNA, 21 nt, Synthetic Construct
  source 1..21: mol_type = other RNA
tagcagcacgtaatattggcg

SEQ ID NO: 34277 - RNA, 21 nt, Synthetic Construct
  source 1..21: mol_type = other RNA
tgaggtagtagcttgtgctgt

SEQ ID NO: 34278 - RNA, 22 nt, Synthetic Construct
  source 1..22: mol_type = other RNA
tgaggtagcagtttgtgctgtt

SEQ ID NO: 34279 - RNA, 25 nt, Synthetic Construct
  source 1..25: mol_type = other RNA
tgcgagagtaggacgttgccaggtt

SEQ ID NO: 34280 - RNA, 25 nt, Synthetic Construct
  source 1..25: mol_type = other RNA
tgcgagagtaggacgttgccaggtt

SEQ ID NO: 34281 - RNA, 22 nt, Synthetic Construct
  source 1..22: mol_type = other RNA
tgtaaacatcctacactctcag

SEQ ID NO: 34282 - RNA, 22 nt, Synthetic Construct
  source 1..22: mol_type = other RNA
tgtaaacatcctacactctcag

SEQ ID NO: 34283 - RNA, 21 nt, Synthetic Construct
  source 1..21: mol_type = other RNA
cagtagtctgcacattggtta

SEQ ID NO: 34284 - RNA, 24 nt, Synthetic Construct
  source 1..24: mol_type = other RNA
tgtaaacatccccgactggaagtt

SEQ ID NO: 34285 - RNA, 20 nt, Synthetic Construct
  source 1..20: mol_type = other RNA
cgaggtagtaggttgtatag

SEQ ID NO: 34286 - RNA, 23 nt, Synthetic Construct
  source 1..23: mol_type = other RNA
tgaggtagtaggttgtgtggtat

SEQ ID NO: 34287 - RNA, 22 nt, Synthetic Construct
  source 1..22: mol_type = other RNA
tgagatagtaggttgtgtggtt

SEQ ID NO: 34288 - RNA, 22 nt, Synthetic Construct
  source 1..22: mol_type = other RNA
tgagatagtaggttgtgtggtt

SEQ ID NO: 34289 - RNA, 20 nt, Synthetic Construct
  source 1..20: mol_type = other RNA
tgaggtagtaggttatgtgg

SEQ ID NO: 34290 - RNA, 20 nt, Synthetic Construct
  source 1..20: mol_type = other RNA
tgaggtagtaggttatgtgg

SEQ ID NO: 34291 - RNA, 23 nt, Synthetic Construct
  source 1..23: mol_type = other RNA
caaagtgctgtttgtgcaggtag

SEQ ID NO: 34292 - RNA, 36 nt, Synthetic Construct; identical to SEQ ID NO: 2248
  source 1..36: mol_type = other RNA

SEQ ID NO: 34293 - RNA, 21 nt, Synthetic Construct
  source 1..21: mol_type = other RNA
tcctgtactgagctgccccgg

SEQ ID NO: 34294 - RNA, 22 nt, Synthetic Construct
  source 1..22: mol_type = other RNA
tagcagcacgtaaatataggcg

SEQ ID NO: 34295 - RNA, 22 nt, Synthetic Construct
  source 1..22: mol_type = other RNA
tagcagcacgtaaatataggcg

SEQ ID NO: 34296 - RNA, 33 nt, Synthetic Construct; identical to SEQ ID NO: 2126
  source 1..33: mol_type = other RNA

SEQ ID NO: 34297 - RNA, 33 nt, Synthetic Construct; identical to SEQ ID NO: 2126
  source 1..33: mol_type = other RNA

SEQ ID NO: 34298 - RNA, 25 nt, Synthetic Construct
  source 1..25: mol_type = other RNA
ttgaggatatgagatcgagacggca

SEQ ID NO: 34299 - RNA, 27 nt, Synthetic Construct
  source 1..27: mol_type = other RNA
ggggagctaatcccagaaacccggtcg

SEQ ID NO: 34300 - RNA, 22 nt, Synthetic Construct
  source 1..22: mol_type = other RNA
cattgcacttgtcccggtctga

SEQ ID NO: 34301 - RNA, 20 nt, Synthetic Construct
  source 1..20: mol_type = other RNA
tgaggtagtaggttgtgtga

SEQ ID NO: 34302 - RNA, 20 nt, Synthetic Construct
  source 1..20: mol_type = other RNA
tgaggtagtaggttgtgtga

SEQ ID NO: 34303 - RNA, 23 nt, Synthetic Construct
  source 1..23: mol_type = other RNA
tgaggggcagagagcgagacttt

SEQ ID NO: 34304 - RNA, 20 nt, Synthetic Construct
  source 1..20: mol_type = other RNA
tgaggggcagagagcgagac

SEQ ID NO: 34305 - RNA, 21 nt, Synthetic Construct
  source 1..21: mol_type = other RNA
tggggtagtagtttgtgctgt

SEQ ID NO: 34306 - RNA, 21 nt, Synthetic Construct
  source 1..21: mol_type = other RNA
tggggtagtagtttgtgctgt

SEQ ID NO: 34307 - RNA, 16 nt, Synthetic Construct
  source 1..16: mol_type = other RNA
taacaggtctgtgatg

SEQ ID NO: 34308 - RNA, 16 nt, Synthetic Construct
  source 1..16: mol_type = other RNA
taacaggtctgtgatg

SEQ ID NO: 34309 - RNA, 18 nt, Synthetic Construct
  source 1..18: mol_type = other RNA
caacggaatcccaaaagc

SEQ ID NO: 34310 - RNA, 18 nt, Synthetic Construct
  source 1..18: mol_type = other RNA
caacggaatcccaaaagc

SEQ ID NO: 34311 - RNA, 23 nt, Synthetic Construct
  source 1..23: mol_type = other RNA
tgtcagtttgtcaaatacccctt

SEQ ID NO: 34312 - RNA, 23 nt, Synthetic Construct
  source 1..23: mol_type = other RNA
tgtcagtttgtcaaatacccctt

SEQ ID NO: 34313 - RNA, 34 nt, Synthetic Construct; identical to SEQ ID NO: 385
  source 1..34: mol_type = other RNA

SEQ ID NO: 34314 - RNA, 34 nt, Synthetic Construct; identical to SEQ ID NO: 385
  source 1..34: mol_type = other RNA

SEQ ID NO: 34315 - RNA, 24 nt, Synthetic Construct
  source 1..24: mol_type = other RNA
atcacattgccagggatttccaat

SEQ ID NO: 34316 - RNA, 24 nt, Synthetic Construct
  source 1..24: mol_type = other RNA
atcacattgccagggatttccaat

SEQ ID NO: 34317 - RNA, 15 nt, Synthetic Construct
  source 1..15: mol_type = other RNA
gtacgtgagctgggt

SEQ ID NO: 34318 - RNA, 15 nt, Synthetic Construct
  source 1..15: mol_type = other RNA
gtacgtgagctgggt

SEQ ID NO: 34319 - RNA, 20 nt, Synthetic Construct
  source 1..20: mol_type = other RNA
ttggcctcaagtcaggcagg

SEQ ID NO: 34320 - RNA, 20 nt, Synthetic Construct
  source 1..20: mol_type = other RNA
ttggcctcaagtcaggcagg

SEQ ID NO: 34321 - RNA, 22 nt, Synthetic Construct
  source 1..22: mol_type = other RNA
ttcaagtaattcaggataggtc

SEQ ID NO: 34322 - RNA, 23 nt, Synthetic Construct
  source 1..23: mol_type = other RNA
tggtaatacggcgtacttagtgt

SEQ ID NO: 34323 - RNA, 23 nt, Synthetic Construct
  source 1..23: mol_type = other RNA
tggtaatacggcgtacttagtgt

SEQ ID NO: 34324 - RNA, 20 nt, Synthetic Construct
  source 1..20: mol_type = other RNA
cccttggggttgtaggacca

SEQ ID NO: 34325 - RNA, 20 nt, Synthetic Construct
  source 1..20: mol_type = other RNA
cccttggggttgtaggacca

SEQ ID NO: 34326 - RNA, 18 nt, Synthetic Construct
  source 1..18: mol_type = other RNA
gtcacggtggccgagtgg

SEQ ID NO: 34327 - RNA, 27 nt, Synthetic Construct
  source 1..27: mol_type = other RNA
cctcccactgctaaatttgactggctt

SEQ ID NO: 34328 - RNA, 22 nt, Synthetic Construct
  source 1..22: mol_type = other RNA
tcctgtactgagctgcctcgag

SEQ ID NO: 34329 - RNA, 22 nt, Synthetic Construct
  source 1..22: mol_type = other RNA
tgaggcagtagtttgtgctgtt

SEQ ID NO: 34330 - RNA, 22 nt, Synthetic Construct
  source 1..22: mol_type = other RNA
gcctgctggggtggaacctggt

SEQ ID NO: 34331 - RNA, 22 nt, Synthetic Construct
  source 1..22: mol_type = other RNA
gcctgctggggtggaacctggt

SEQ ID NO: 34332 - RNA, 27 nt, Synthetic Construct
  source 1..27: mol_type = other RNA
cgtgtgaaagtaggtcatcgtcaggct

SEQ ID NO: 34333 - RNA, 27 nt, Synthetic Construct
  source 1..27: mol_type = other RNA
cgtgtgaaagtaggtcatcgtcaggct

SEQ ID NO: 34334 - RNA, 23 nt, Synthetic Construct
  source 1..23: mol_type = other RNA
tggtagtacgacgtacttagtgt

SEQ ID NO: 34335 - RNA, 23 nt, Synthetic Construct
  source 1..23: mol_type = other RNA
tggtagtacgacgtacttagtgt

SEQ ID NO: 34336 - RNA, 24 nt, Synthetic Construct
  source 1..24: mol_type = other RNA
tgtaaacatccccgactggaagca

SEQ ID NO: 34337 - RNA, 25 nt, Synthetic Construct
  source 1..25: mol_type = other RNA
ttgagggtatgagatcgagacgaca

SEQ ID NO: 34338 - RNA, 20 nt, Synthetic Construct
  source 1..20: mol_type = other RNA
ctgacctatgaattgacagc

SEQ ID NO: 34339 - RNA, 21 nt, Synthetic Construct
  source 1..21: mol_type = other RNA
tgaggtagtaggttgtgtgga

SEQ ID NO: 34340 - RNA, 23 nt, Synthetic Construct
  source 1..23: mol_type = other RNA
gcctgtactgagctgccccgagt

SEQ ID NO: 34341 - RNA, 21 nt, Synthetic Construct
  source 1..21: mol_type = other RNA
ttagtgacgcgcatgaatgga

SEQ ID NO: 34342 - RNA, 21 nt, Synthetic Construct
  source 1..21: mol_type = other RNA
ttagtgacgcgcatgaatgga

SEQ ID NO: 34343 - RNA, 18 nt, Synthetic Construct
  source 1..18: mol_type = other RNA
agcagcattgtacagggc

SEQ ID NO: 34344 - RNA, 18 nt, Synthetic Construct
  source 1..18: mol_type = other RNA
agcagcattgtacagggc

SEQ ID NO: 34345 - RNA, 20 nt, Synthetic Construct
  source 1..20: mol_type = other RNA
acagtagtctgcacattggt

SEQ ID NO: 34346 - RNA, 21 nt, Synthetic Construct
  source 1..21: mol_type = other RNA
agctacattgtctgctgggtt

SEQ ID NO: 34347 - RNA, 21 nt, Synthetic Construct
  source 1..21: mol_type = other RNA
agctacattgtctgctgggtt

SEQ ID NO: 34348 - RNA, 22 nt, Synthetic Construct
  source 1..22: mol_type = other RNA
tattgcacttgacccggcctgt

SEQ ID NO: 34349 - RNA, 22 nt, Synthetic Construct
  source 1..22: mol_type = other RNA
tattgcacttgacccggcctgt

SEQ ID NO: 34350 - RNA, 21 nt, Synthetic Construct
  source 1..21: mol_type = other RNA
ngaggtagtaggttgtgtggt

SEQ ID NO: 34351 - RNA, 21 nt, Synthetic Construct
  source 1..21: mol_type = other RNA
ngaggtagtaggttgtgtggt

SEQ ID NO: 34352 - RNA, 22 nt, Synthetic Construct
  source 1..22: mol_type = other RNA
ctccctcgggagggcgcgcggg

SEQ ID NO: 34353 - RNA, 21 nt, Synthetic Construct
  source 1..21: mol_type = other RNA
gcctgctggggtggaacctgg

SEQ ID NO: 34354 - RNA, 21 nt, Synthetic Construct
  source 1..21: mol_type = other RNA
gcctgctggggtggaacctgg

SEQ ID NO: 34355 - RNA, 21 nt, Synthetic Construct
  source 1..21: mol_type = other RNA
tgaggtagtagattgtataga

SEQ ID NO: 34356 - RNA, 21 nt, Synthetic Construct
  source 1..21: mol_type = other RNA
tgaggtagtagattgtataga

SEQ ID NO: 34357 - RNA, 20 nt, Synthetic Construct
  source 1..20: mol_type = other RNA
tagcagcacataatggtttg

SEQ ID NO: 34358 - RNA, 20 nt, Synthetic Construct
  source 1..20: mol_type = other RNA
tagcagcacataatggtttg

SEQ ID NO: 34359 - RNA, 25 nt, Synthetic Construct
  source 1..25: mol_type = other RNA
gactcttagcggtggatcactcggc

SEQ ID NO: 34360 - RNA, 16 nt, Synthetic Construct
  source 1..16: mol_type = other RNA
cgactcttagcggtgg

SEQ ID NO: 34361 - RNA, 16 nt, Synthetic Construct
  source 1..16: mol_type = other RNA
cgactcttagcggtgg

SEQ ID NO: 34362 - RNA, 21 nt, Synthetic Construct
  source 1..21: mol_type = other RNA
tgaggtagtagattgtatggt

SEQ ID NO: 34363 - RNA, 22 nt, Synthetic Construct
  source 1..22: mol_type = other RNA
tgtggtagtaggttgtgtggtt

SEQ ID NO: 34364 - RNA, 22 nt, Synthetic Construct
  source 1..22: mol_type = other RNA
tgaggtagtaggttgtatagtc

SEQ ID NO: 34365 - RNA, 37 nt, Synthetic Construct; identical to SEQ ID NO: 2211
  source 1..37: mol_type = other RNA

SEQ ID NO: 34366 - RNA, 37 nt, Synthetic Construct; identical to SEQ ID NO: 2211
  source 1..37: mol_type = other RNA

SEQ ID NO: 34367 - RNA, 21 nt, Synthetic Construct
  source 1..21: mol_type = other RNA
tgaggggcagagagcgagaca

SEQ ID NO: 34368 - RNA, 22 nt, Synthetic Construct
  source 1..22: mol_type = other RNA
tgtgcaaatctatgcaaaactg

SEQ ID NO: 34369 - RNA, 23 nt, Synthetic Construct
  source 1..23: mol_type = other RNA
gtcagtttgtcaaataccccaaa

SEQ ID NO: 34370 - RNA, 21 nt, Synthetic Construct
  source 1..21: mol_type = other RNA
tcctgtactgagctgcaccga

SEQ ID NO: 34371 - RNA, 21 nt, Synthetic Construct
  source 1..21: mol_type = other RNA
tcctgtactgagctgcaccga

SEQ ID NO: 34372 - RNA, 22 nt, Synthetic Construct
  source 1..22: mol_type = other RNA
ccactgccccaggtgctgctgg

SEQ ID NO: 34373 - RNA, 22 nt, Synthetic Construct
  source 1..22: mol_type = other RNA
ccactgccccaggtgctgctgg

SEQ ID NO: 34374 - RNA, 24 nt, Synthetic Construct
  source 1..24: mol_type = other RNA
tgaggtagtaggttgtgtggttta

SEQ ID NO: 34375 - RNA, 19 nt, Synthetic Construct
  source 1..19: mol_type = other RNA
tgaggtagtaggttgtgtg

SEQ ID NO: 34376 - RNA, 23 nt, Synthetic Construct
  source 1..23: mol_type = other RNA
caaagtgctgctcgtgcaggtag

SEQ ID NO: 34377 - RNA, 23 nt, Synthetic Construct
  source 1..23: mol_type = other RNA
caaagtgctgctcgtgcaggtag

SEQ ID NO: 34378 - RNA, 22 nt, Synthetic Construct
  source 1..22: mol_type = other RNA
tagcagcacgcaaatattggcg

SEQ ID NO: 34379 - RNA, 22 nt, Synthetic Construct
  source 1..22: mol_type = other RNA
tgaggtagtagtttgtgctgtg

SEQ ID NO: 34380 - RNA, 23 nt, Synthetic Construct
  source 1..23: mol_type = other RNA
tcgaccggacctcgaccggctcg

SEQ ID NO: 34381 - RNA, 22 nt, Synthetic Construct
  source 1..22: mol_type = other RNA
tgaggtggtaggttgtatagtt

SEQ ID NO: 34382 - RNA, 22 nt, Synthetic Construct
  source 1..22: mol_type = other RNA
tgaggtggtaggttgtatagtt

SEQ ID NO: 34383 - RNA, 23 nt, Synthetic Construct
  source 1..23: mol_type = other RNA
tcccgtactgagctgccccgagt

SEQ ID NO: 34384 - RNA, 22 nt, Synthetic Construct
  source 1..22: mol_type = other RNA
tgagaactgaattccatgggtc

SEQ ID NO: 34385 - RNA, 23 nt, Synthetic Construct
  source 1..23: mol_type = other RNA
ccctgtactgagctgccccgaga

SEQ ID NO: 34386 - RNA, 22 nt, Synthetic Construct
  source 1..22: mol_type = other RNA
ggcagcattgtacagggctatg

SEQ ID NO: 34387 - RNA, 22 nt, Synthetic Construct
  source 1..22: mol_type = other RNA
tgaggtagtaagttgtgtggtt

SEQ ID NO: 34388 - RNA, 22 nt, Synthetic Construct
  source 1..22: mol_type = other RNA
tgaggtagtaagttgtgtggtt

SEQ ID NO: 34389 - RNA, 20 nt, Synthetic Construct
  source 1..20: mol_type = other RNA
tgaagtagtaggttgtgtgg

SEQ ID NO: 34390 - RNA, 20 nt, Synthetic Construct
  source 1..20: mol_type = other RNA
tgaagtagtaggttgtgtgg

SEQ ID NO: 34391 - RNA, 21 nt, Synthetic Construct
  source 1..21: mol_type = other RNA
tccctgagaccctaacttgtg

SEQ ID NO: 34392 - RNA, 21 nt, Synthetic Construct
  source 1..21: mol_type = other RNA
tccctgagaccctaacttgtg

SEQ ID NO: 34393 - RNA, 22 nt, Synthetic Construct
  source 1..22: mol_type = other RNA
acagtagtctgcacattggttt

SEQ ID NO: 34394 - RNA, 21 nt, Synthetic Construct
  source 1..21: mol_type = other RNA
cattattacttttggtacgcg

SEQ ID NO: 34395 - RNA, 21 nt, Synthetic Construct
  source 1..21: mol_type = other RNA
cattattacttttggtacgcg

SEQ ID NO: 34396 - RNA, 21 nt, Synthetic Construct
  source 1..21: mol_type = other RNA
gctttgatccggagatttccg

SEQ ID NO: 34397 - RNA, 23 nt, Synthetic Construct
  source 1..23: mol_type = other RNA
tggtaatacgacgtacttagcgt

SEQ ID NO: 34398 - RNA, 23 nt, Synthetic Construct
  source 1..23: mol_type = other RNA
tggtaatacgacgtacttagcgt

SEQ ID NO: 34399 - RNA, 23 nt, Synthetic Construct
  source 1..23: mol_type = other RNA
tcctgtactgagctgctccgaga

SEQ ID NO: 34400 - RNA, 23 nt, Synthetic Construct
  source 1..23: mol_type = other RNA
agcaacattgtctgctgggtttc

SEQ ID NO: 34401 - RNA, 23 nt, Synthetic Construct
  source 1..23: mol_type = other RNA
agcaacattgtctgctgggtttc

SEQ ID NO: 34402 - RNA, 16 nt, Synthetic Construct
  source 1..16: mol_type = other RNA
tacctggttgatcctg

SEQ ID NO: 34403 - RNA, 16 nt, Synthetic Construct
  source 1..16: mol_type = other RNA
tacctggttgatcctg

SEQ ID NO: 34404 - RNA, 19 nt, Synthetic Construct
  source 1..19: mol_type = other RNA
ccagtaaacggcggccgta

SEQ ID NO: 34405 - RNA, 19 nt, Synthetic Construct
  source 1..19: mol_type = other RNA
ccagtaaacggcggccgta

SEQ ID NO: 34406 - RNA, 19 nt, Synthetic Construct
  source 1..19: mol_type = other RNA
tccccggcatctccaccaa

SEQ ID NO: 34407 - RNA, 16 nt, Synthetic Construct
  source 1..16: mol_type = other RNA
gtctacggacatacca

SEQ ID NO: 34408 - RNA, 16 nt, Synthetic Construct
  source 1..16: mol_type = other RNA
gtctacggacatacca

SEQ ID NO: 34409 - RNA, 21 nt, Synthetic Construct
  source 1..21: mol_type = other RNA
tgaggtagtagcttgtgctgt

SEQ ID NO: 34410 - RNA, 21 nt, Synthetic Construct
  source 1..21: mol_type = other RNA
tgaggtagtagcttgtgctgt

SEQ ID NO: 34411 - RNA, 22 nt, Synthetic Construct
  source 1..22: mol_type = other RNA
cgttgcacttgtctcggtctga

SEQ ID NO: 34412 - RNA, 22 nt, Synthetic Construct
  source 1..22: mol_type = other RNA
cgttgcacttgtctcggtctga

SEQ ID NO: 34413 - RNA, 22 nt, Synthetic Construct
  source 1..22: mol_type = other RNA
ttaatgctaatcgtgataggga

SEQ ID NO: 34414 - RNA, 22 nt, Synthetic Construct
  source 1..22: mol_type = other RNA
ttaatgctaatcgtgataggga

SEQ ID NO: 34415 - RNA, 25 nt, Synthetic Construct
  source 1..25: mol_type = other RNA
ccccactgctaaatttgactggctt

SEQ ID NO: 34416 - RNA, 22 nt, Synthetic Construct
  source 1..22: mol_type = other RNA
tgaggtagtagtttgtgctgtg

SEQ ID NO: 34417 - RNA, 21 nt, Synthetic Construct
  source 1..21: mol_type = other RNA
taactccttaagcgatctcgc

SEQ ID NO: 34418 - RNA, 21 nt, Synthetic Construct
  source 1..21: mol_type = other RNA
taactccttaagcgatctcgc

SEQ ID NO: 34419 - RNA, 22 nt, Synthetic Construct
  source 1..22: mol_type = other RNA
tatatatatatatgtacgtatg

SEQ ID NO: 34420 - RNA, 22 nt, Synthetic Construct
  source 1..22: mol_type = other RNA
tatatatatatatgtacgtatg

SEQ ID NO: 34421 - RNA, 26 nt, Synthetic Construct
  source 1..26: mol_type = other RNA
ttaagtgacgatagcctaggagatac

SEQ ID NO: 34422 - RNA, 21 nt, Synthetic Construct
  source 1..21: mol_type = other RNA
cctctgggcccttcctccagt

SEQ ID NO: 34423 - RNA, 20 nt, Synthetic Construct
  source 1..20: mol_type = other RNA
gcatggccgttcttagttgg

SEQ ID NO: 34424 - RNA, 21 nt, Synthetic Construct
  source 1..21: mol_type = other RNA
tggagtgtgacagtggtgttt

SEQ ID NO: 34425 - RNA, 21 nt, Synthetic Construct
  source 1..21: mol_type = other RNA
tgaggtagtagtttgtgctgc

SEQ ID NO: 34426 - RNA, 21 nt, Synthetic Construct
  source 1..21: mol_type = other RNA
tgaggtagtagtttgtgctgc

SEQ ID NO: 34427 - RNA, 22 nt, Synthetic Construct
  source 1..22: mol_type = other RNA
tagcagcacgtaaatattggca

SEQ ID NO: 34428 - RNA, 22 nt, Synthetic Construct
  source 1..22: mol_type = other RNA
tacagtagtctgcacattggtt

SEQ ID NO: 34429 - RNA, 16 nt, Synthetic Construct
  source 1..16: mol_type = other RNA
gtctacggctatacca

SEQ ID NO: 34430 - RNA, 21 nt, Synthetic Construct
  source 1..21: mol_type = other RNA
tggagtgtgacagtggtgttt

SEQ ID NO: 34431 - RNA, 21 nt, Synthetic Construct
  source 1..21: mol_type = other RNA
tggagtgtgacagtggtgttt

SEQ ID NO: 34432 - RNA, 22 nt, Synthetic Construct
  source 1..22: mol_type = other RNA
tagcagcacgtaaacattggcg

SEQ ID NO: 34433 - RNA, 23 nt, Synthetic Construct
  source 1..23: mol_type = other RNA
tgtagtgtttcctactttatggt

SEQ ID NO: 34434 - RNA, 22 nt, Synthetic Construct
  source 1..22: mol_type = other RNA
tgaggtagtaggttgtgcggtt

SEQ ID NO: 34435 - RNA, 27 nt, Synthetic Construct
  source 1..27: mol_type = other RNA
ccccccgctgctaaatttgactggctt

SEQ ID NO: 34436 - RNA, 27 nt, Synthetic Construct
  source 1..27: mol_type = other RNA
ccccccgctgctaaatttgactggctt

SEQ ID NO: 34437 - RNA, 21 nt, Synthetic Construct
  source 1..21: mol_type = other RNA
cgaggggcagagagcgagact

SEQ ID NO: 34438 - RNA, 23 nt, Synthetic Construct
  source 1..23: mol_type = other RNA
cgaagtgctgttcgtgcaggtag

SEQ ID NO: 34439 - RNA, 23 nt, Synthetic Construct
  source 1..23: mol_type = other RNA
cgaagtgctgttcgtgcaggtag

SEQ ID NO: 34440 - RNA, 21 nt, Synthetic Construct
  source 1..21: mol_type = other RNA
aacattcaacgctgtcggtga

SEQ ID NO: 34441 - RNA, 22 nt, Synthetic Construct
  source 1..22: mol_type = other RNA
tcgtaccgtgagtgataatgcg

SEQ ID NO: 34442 - RNA, 22 nt, Synthetic Construct
  source 1..22: mol_type = other RNA
tcgtaccgtgagtgataatgcg

SEQ ID NO: 34443 - RNA, 19 nt, Synthetic Construct
  source 1..19: mol_type = other RNA
atcacattgccagggattt

SEQ ID NO: 34444 - RNA, 20 nt, Synthetic Construct
  source 1..20: mol_type = other RNA
tagcaccatctgaaatcggt

SEQ ID NO: 34445 - RNA, 20 nt, Synthetic Construct
  source 1..20: mol_type = other RNA
gagtaggacgttgccaggtt

SEQ ID NO: 34446 - RNA, 20 nt, Synthetic Construct
  source 1..20: mol_type = other RNA
gagtaggacgttgccaggtt

SEQ ID NO: 34447 - RNA, 24 nt, Synthetic Construct
  source 1..24: mol_type = other RNA
tgtgatttctgcccagtgctctga

SEQ ID NO: 34448 - RNA, 24 nt, Synthetic Construct
  source 1..24: mol_type = other RNA
tgtgatttctgcccagtgctctga

SEQ ID NO: 34449 - RNA, 17 nt, Synthetic Construct
  source 1..17: mol_type = other RNA
agtgacgcgcatgaatg

SEQ ID NO: 34450 - RNA, 17 nt, Synthetic Construct
  source 1..17: mol_type = other RNA
agtgacgcgcatgaatg

SEQ ID NO: 34451 - RNA, 21 nt, Synthetic Construct
  source 1..21: mol_type = other RNA
tacagtagtctgcacattggt

SEQ ID NO: 34452 - RNA, 21 nt, Synthetic Construct
  source 1..21: mol_type = other RNA
tacagtagtctgcacattggt

SEQ ID NO: 34453 - RNA, 34 nt, Synthetic Construct; identical to SEQ ID NO: 2265
  source 1..34: mol_type = other RNA

SEQ ID NO: 34454 - RNA, 34 nt, Synthetic Construct; identical to SEQ ID NO: 2265
  source 1..34: mol_type = other RNA

SEQ ID NO: 34455 - RNA, 23 nt, Synthetic Construct
  source 1..23: mol_type = other RNA
tgaggcagtaggttgtgtggttt

SEQ ID NO: 34456 - RNA, 21 nt, Synthetic Construct
  source 1..21: mol_type = other RNA
cgaggtagtagattgtatagt

SEQ ID NO: 34457 - RNA, 23 nt, Synthetic Construct
  source 1..23: mol_type = other RNA
tggtaatacgacgtacttagtga

SEQ ID NO: 34458 - RNA, 22 nt, Synthetic Construct
  source 1..22: mol_type = other RNA
tagcagcacttaaatattggcg

SEQ ID NO: 34459 - RNA, 22 nt, Synthetic Construct
  source 1..22: mol_type = other RNA
tagcagcacttaaatattggcg

SEQ ID NO: 34460 - RNA, 25 nt, Synthetic Construct
  source 1..25: mol_type = other RNA
ggtaaaatcgctgagtgaagcattg

SEQ ID NO: 34461 - RNA, 25 nt, Synthetic Construct
  source 1..25: mol_type = other RNA
ggtaaaatcgctgagtgaagcattg

SEQ ID NO: 34462 - RNA, 23 nt, Synthetic Construct
  source 1..23: mol_type = other RNA
tggaagactagtgattttgttgt

SEQ ID NO: 34463 - RNA, 27 nt, Synthetic Construct
  source 1..27: mol_type = other RNA
ccccccactgctaaatttgactggcct

SEQ ID NO: 34464 - RNA, 22 nt, Synthetic Construct
  source 1..22: mol_type = other RNA
tattgcacttgtcccagcctgt

SEQ ID NO: 34465 - RNA, 22 nt, Synthetic Construct
  source 1..22: mol_type = other RNA
tattgcacttgtcccagcctgt

SEQ ID NO: 34466 - RNA, 20 nt, Synthetic Construct
  source 1..20: mol_type = other RNA
gctattgacgaccgtaccgc

SEQ ID NO: 34467 - RNA, 15 nt, Synthetic Construct
  source 1..15: mol_type = other RNA
cgagtgacgtagtgt

SEQ ID NO: 34468 - RNA, 15 nt, Synthetic Construct
  source 1..15: mol_type = other RNA
cgagtgacgtagtgt

SEQ ID NO: 34469 - RNA, 23 nt, Synthetic Construct
  source 1..23: mol_type = other RNA
tcggatccgtctgagcttggctt

SEQ ID NO: 34470 - RNA, 23 nt, Synthetic Construct
  source 1..23: mol_type = other RNA
tcggatccgtctgagcttggctt

SEQ ID NO: 34471 - RNA, 24 nt, Synthetic Construct
  source 1..24: mol_type = other RNA
gatgaggcgtgataacgagtctgc

SEQ ID NO: 34472 - RNA, 24 nt, Synthetic Construct
  source 1..24: mol_type = other RNA
gatgaggcgtgataacgagtctgc

SEQ ID NO: 34473 - RNA, 20 nt, Synthetic Construct
  source 1..20: mol_type = other RNA
ggggatgtagctcagatggt

SEQ ID NO: 34474 - RNA, 20 nt, Synthetic Construct
  source 1..20: mol_type = other RNA
ggggatgtagctcagatggt

SEQ ID NO: 34475 - RNA, 20 nt, Synthetic Construct
  source 1..20: mol_type = other RNA
tgtcagtttgtcaaataccc

SEQ ID NO: 34476 - RNA, 20 nt, Synthetic Construct
  source 1..20: mol_type = other RNA
tgtcagtttgtcaaataccc

SEQ ID NO: 34477 - RNA, 22 nt, Synthetic Construct
  source 1..22: mol_type = other RNA
agtggggaacccttccatgagg

SEQ ID NO: 34478 - RNA, 35 nt, Synthetic Construct; identical to SEQ ID NO: 1501
  source 1..35: mol_type = other RNA

SEQ ID NO: 34479 - RNA, 22 nt, Synthetic Construct
  source 1..22: mol_type = other RNA
tattgcacttgtcccgacctgt

SEQ ID NO: 34480 - RNA, 22 nt, Synthetic Construct
  source 1..22: mol_type = other RNA
tattgcacttgtcccgacctgt

SEQ ID NO: 34481 - RNA, 30 nt, Synthetic Construct; identical to SEQ ID NO: 10539
  source 1..30: mol_type = other RNA

SEQ ID NO: 34482 - RNA, 30 nt, Synthetic Construct; identical to SEQ ID NO: 10539
  source 1..30: mol_type = other RNA

SEQ ID NO: 34483 - RNA, 36 nt, Synthetic Construct; identical to SEQ ID NO: 777
  source 1..36: mol_type = other RNA

SEQ ID NO: 34484 - RNA, 27 nt, Synthetic Construct
  source 1..27: mol_type = other RNA
gcatgggtggttcagtggtagaattct

SEQ ID NO: 34485 - RNA, 23 nt, Synthetic Construct
  source 1..23: mol_type = other RNA
tgaggtagtaggttgtgtggtta

SEQ ID NO: 34486 - RNA, 23 nt, Synthetic Construct
  source 1..23: mol_type = other RNA
tgaggtagtaggttgtgtggtta

SEQ ID NO: 34487 - RNA, 17 nt, Synthetic Construct
  source 1..17: mol_type = other RNA
gccatgccgcgtgcggg

SEQ ID NO: 34488 - RNA, 21 nt, Synthetic Construct
  source 1..21: mol_type = other RNA
tacagtagtctgcacattggt

SEQ ID NO: 34489 - RNA, 21 nt, Synthetic Construct
  source 1..21: mol_type = other RNA
tacagtagtctgcacattggt

SEQ ID NO: 34490 - RNA, 33 nt, Synthetic Construct; identical to SEQ ID NO: 2266
  source 1..33: mol_type = other RNA

SEQ ID NO: 34491 - RNA, 33 nt, Synthetic Construct; identical to SEQ ID NO: 2266
  source 1..33: mol_type = other RNA

SEQ ID NO: 34492 - RNA, 21 nt, Synthetic Construct
  source 1..21: mol_type = other RNA
ctaatcccagaaacccggtcg

SEQ ID NO: 34493 - RNA, 17 nt, Synthetic Construct
  source 1..17: mol_type = other RNA
ccgtgtgaaagtaggtc

SEQ ID NO: 34494 - RNA, 21 nt, Synthetic Construct
  source 1..21: mol_type = other RNA
tccctgtcctccaggagctct

SEQ ID NO: 34495 - RNA, 21 nt, Synthetic Construct
  source 1..21: mol_type = other RNA
tccctgtcctccaggagctct

SEQ ID NO: 34496 - RNA, 16 nt, Synthetic Construct
  source 1..16: mol_type = other RNA
gtccacggccatacca

SEQ ID NO: 34497 - RNA, 22 nt, Synthetic Construct
  source 1..22: mol_type = other RNA
tagcagcacgcaaatattggcg

SEQ ID NO: 34498 - RNA, 22 nt, Synthetic Construct
  source 1..22: mol_type = other RNA
tagcagcacgcaaatattggcg

SEQ ID NO: 34499 - RNA, 22 nt, Synthetic Construct
  source 1..22: mol_type = other RNA
tattgcacttgtctcggcctgt

SEQ ID NO: 34500 - RNA, 16 nt, Synthetic Construct
  source 1..16: mol_type = other RNA
gtctacggccataccg

SEQ ID NO: 34501 - RNA, 20 nt, Synthetic Construct
  source 1..20: mol_type = other RNA
tgaggtagtaggttgtgtag

SEQ ID NO: 34502 - RNA, 20 nt, Synthetic Construct
  source 1..20: mol_type = other RNA
tgaggtagtaggttgtgtag

SEQ ID NO: 34503 - RNA, 15 nt, Synthetic Construct
  source 1..15: mol_type = other RNA
gagtagggcgggaca

SEQ ID NO: 34504 - RNA, 24 nt, Synthetic Construct
  source 1..24: mol_type = other RNA
acagtagtctgcacattggttatt

SEQ ID NO: 34505 - RNA, 24 nt, Synthetic Construct
  source 1..24: mol_type = other RNA
acagtagtctgcacattggttatt

SEQ ID NO: 34506 - RNA, 23 nt, Synthetic Construct
  source 1..23: mol_type = other RNA
agcagcattgtacagggctatgg

SEQ ID NO: 34507 - RNA, 23 nt, Synthetic Construct
  source 1..23: mol_type = other RNA
agcagcattgtacagggctatgg

SEQ ID NO: 34508 - RNA, 36 nt, Synthetic Construct; identical to SEQ ID NO: 744
  source 1..36: mol_type = other RNA

SEQ ID NO: 34509 - RNA, 22 nt, Synthetic Construct
  source 1..22: mol_type = other RNA
tcttgtactgagctgccccgag

SEQ ID NO: 34510 - RNA, 22 nt, Synthetic Construct
  source 1..22: mol_type = other RNA
tcttgtactgagctgccccgag

SEQ ID NO: 34511 - RNA, 28 nt, Synthetic Construct
  source 1..28: mol_type = other RNA
tccctggtggtctagtggttaggattcg

SEQ ID NO: 34512 - RNA, 28 nt, Synthetic Construct
  source 1..28: mol_type = other RNA
tccctggtggtctagtggttaggattcg

SEQ ID NO: 34513 - RNA, 21 nt, Synthetic Construct
  source 1..21: mol_type = other RNA
cattattacttttggtacgcg

SEQ ID NO: 34514 - RNA, 22 nt, Synthetic Construct
  source 1..22: mol_type = other RNA
gaagaggacttggagctcgatc

SEQ ID NO: 34515 - RNA, 22 nt, Synthetic Construct
  source 1..22: mol_type = other RNA
gaagaggacttggagctcgatc

SEQ ID NO: 34516 - RNA, 41 nt, Synthetic Construct; identical to SEQ ID NO: 8929
  source 1..41: mol_type = other RNA

SEQ ID NO: 34517 - RNA, 41 nt, Synthetic Construct; identical to SEQ ID NO: 8929
  source 1..41: mol_type = other RNA

SEQ ID NO: 34518 - RNA, 24 nt, Synthetic Construct
  source 1..24: mol_type = other RNA
acagtagtctgcacattggttatt

SEQ ID NO: 34519 - RNA, 27 nt, Synthetic Construct
  source 1..27: mol_type = other RNA
ccccccactgctaaacttgactggctt

SEQ ID NO: 34520 - RNA, 27 nt, Synthetic Construct
  source 1..27: mol_type = other RNA
ccccccactgctaaacttgactggctt

SEQ ID NO: 34521 - RNA, 24 nt, Synthetic Construct
  source 1..24: mol_type = other RNA
gaggtgtagaataggtgggagctt

SEQ ID NO: 34522 - RNA, 24 nt, Synthetic Construct
  source 1..24: mol_type = other RNA
gaggtgtagaataggtgggagctt

SEQ ID NO: 34523 - RNA, 16 nt, Synthetic Construct
  source 1..16: mol_type = other RNA
gtctacgaccatacca

SEQ ID NO: 34524 - RNA, 21 nt, Synthetic Construct
  source 1..21: mol_type = other RNA
tcctgtactgagctgctccga

SEQ ID NO: 34525 - RNA, 21 nt, Synthetic Construct
  source 1..21: mol_type = other RNA
tcctgtactgagctgctccga

SEQ ID NO: 34526 - RNA, 31 nt, Synthetic Construct; identical to SEQ ID NO: 2893
  source 1..31: mol_type = other RNA

SEQ ID NO: 34527 - RNA, 31 nt, Synthetic Construct; identical to SEQ ID NO: 2893
  source 1..31: mol_type = other RNA

SEQ ID NO: 34528 - RNA, 33 nt, Synthetic Construct; identical to SEQ ID NO: 4947
  source 1..33: mol_type = other RNA

SEQ ID NO: 34529 - RNA, 33 nt, Synthetic Construct; identical to SEQ ID NO: 4947
  source 1..33: mol_type = other RNA

SEQ ID NO: 34530 - RNA, 41 nt, Synthetic Construct; identical to SEQ ID NO: 10630
  source 1..41: mol_type = other RNA

SEQ ID NO: 34531 - RNA, 25 nt, Synthetic Construct
  source 1..25: mol_type = other RNA
ttgaggatatgagatcgagacgacg

SEQ ID NO: 34532 - RNA, 23 nt, Synthetic Construct
  source 1..23: mol_type = other RNA
tcctgtactgagctaccccgaga

SEQ ID NO: 34533 - RNA, 23 nt, Synthetic Construct
  source 1..23: mol_type = other RNA
tggtaatacgacgtacctagtgt

SEQ ID NO: 34534 - RNA, 22 nt, Synthetic Construct
  source 1..22: mol_type = other RNA
tgaggtagtaggttgtgtggtc

SEQ ID NO: 34535 - RNA, 22 nt, Synthetic Construct
  source 1..22: mol_type = other RNA
tgaggtagtaggttgtgtggtc

SEQ ID NO: 34536 - RNA, 20 nt, Synthetic Construct
  source 1..20: mol_type = other RNA
gcatggccgttcttagttgg

SEQ ID NO: 34537 - RNA, 20 nt, Synthetic Construct
  source 1..20: mol_type = other RNA
gcatggccgttcttagttgg

SEQ ID NO: 34538 - RNA, 22 nt, Synthetic Construct
  source 1..22: mol_type = other RNA
atggatttttggagcagggaga

SEQ ID NO: 34539 - RNA, 23 nt, Synthetic Construct
  source 1..23: mol_type = other RNA
taactccttaagcgaatctcggc

SEQ ID NO: 34540 - RNA, 21 nt, Synthetic Construct
  source 1..21: mol_type = other RNA
tgacctatgaattgacagcca

SEQ ID NO: 34541 - RNA, 21 nt, Synthetic Construct
  source 1..21: mol_type = other RNA
tgacctatgaattgacagcca

SEQ ID NO: 34542 - RNA, 21 nt, Synthetic Construct
  source 1..21: mol_type = other RNA
tggagtgtggcaatggtgttt

SEQ ID NO: 34543 - RNA, 22 nt, Synthetic Construct
  source 1..22: mol_type = other RNA
acagtagtctgcacattggttg

SEQ ID NO: 34544 - RNA, 21 nt, Synthetic Construct
  source 1..21: mol_type = other RNA
tgaggtagtaggttgtatggt

SEQ ID NO: 34545 - RNA, 21 nt, Synthetic Construct
  source 1..21: mol_type = other RNA
tgaggtagtaggttgtatggt

SEQ ID NO: 34546 - RNA, 20 nt, Synthetic Construct
  source 1..20: mol_type = other RNA
cacatgcaagtcgaacggta

SEQ ID NO: 34547 - RNA, 22 nt, Synthetic Construct
  source 1..22: mol_type = other RNA
atgtcccacccccactcctgtt

SEQ ID NO: 34548 - RNA, 22 nt, Synthetic Construct
  source 1..22: mol_type = other RNA
atgtcccacccccactcctgtt

SEQ ID NO: 34549 - RNA, 23 nt, Synthetic Construct
  source 1..23: mol_type = other RNA
caaagtgctgttcgtgcaggtaa

SEQ ID NO: 34550 - RNA, 21 nt, Synthetic Construct
  source 1..21: mol_type = other RNA
tgagatagtaggttgtgtggt

SEQ ID NO: 34551 - RNA, 21 nt, Synthetic Construct
  source 1..21: mol_type = other RNA
tgagatagtaggttgtgtggt

SEQ ID NO: 34552 - RNA, 26 nt, Synthetic Construct
  source 1..26: mol_type = other RNA
tgaggtagtaggttgtgtggtttttt

SEQ ID NO: 34553 - RNA, 22 nt, Synthetic Construct
  source 1..22: mol_type = other RNA
tgaggtagcaggttgtgtggtt

SEQ ID NO: 34554 - RNA, 17 nt, Synthetic Construct
  source 1..17: mol_type = other RNA
tcagtagctcgaggaaa

SEQ ID NO: 34555 - RNA, 20 nt, Synthetic Construct
  source 1..20: mol_type = other RNA
tgaggtagtaggctgtatag

SEQ ID NO: 34556 - RNA, 20 nt, Synthetic Construct
  source 1..20: mol_type = other RNA
tattgcacattactaagttg

SEQ ID NO: 34557 - RNA, 20 nt, Synthetic Construct
  source 1..20: mol_type = other RNA
tattgcacattactaagttg

SEQ ID NO: 34558 - RNA, 21 nt, Synthetic Construct
  source 1..21: mol_type = other RNA
tcctgtactgagctgccccaa

SEQ ID NO: 34559 - RNA, 21 nt, Synthetic Construct
  source 1..21: mol_type = other RNA
tcctgtactgagctgccccaa

SEQ ID NO: 34560 - RNA, 22 nt, Synthetic Construct
  source 1..22: mol_type = other RNA
attgcacttgtcccggcctgtt

SEQ ID NO: 34561 - RNA, 22 nt, Synthetic Construct
  source 1..22: mol_type = other RNA
attgcacttgtcccggcctgtt

SEQ ID NO: 34562 - RNA, 22 nt, Synthetic Construct
  source 1..22: mol_type = other RNA
catagcacttgtctcggtctga

SEQ ID NO: 34563 - RNA, 22 nt, Synthetic Construct
  source 1..22: mol_type = other RNA
catagcacttgtctcggtctga

SEQ ID NO: 34564 - RNA, 22 nt, Synthetic Construct
  source 1..22: mol_type = other RNA
tagcagcacgtaagtattggcg

SEQ ID NO: 34565 - RNA, 22 nt, Synthetic Construct
  source 1..22: mol_type = other RNA
tagcagcacgtaagtattggcg

SEQ ID NO: 34566 - RNA, 19 nt, Synthetic Construct
  source 1..19: mol_type = other RNA
acatgcaagtcgaacggta

SEQ ID NO: 34567 - RNA, 23 nt, Synthetic Construct
  source 1..23: mol_type = other RNA
gtcagtttgtcaaataccccaat

SEQ ID NO: 34568 - RNA, 23 nt, Synthetic Construct
  source 1..23: mol_type = other RNA
agcagcattgtacagggctataa

SEQ ID NO: 34569 - RNA, 22 nt, Synthetic Construct
  source 1..22: mol_type = other RNA
tggggtagtagattgtatagtt

SEQ ID NO: 34570 - RNA, 22 nt, Synthetic Construct
  source 1..22: mol_type = other RNA
tggggtagtagattgtatagtt

SEQ ID NO: 34571 - RNA, 24 nt, Synthetic Construct
  source 1..24: mol_type = other RNA
gttgaattgtggtctgtggacgtg

SEQ ID NO: 34572 - RNA, 24 nt, Synthetic Construct
  source 1..24: mol_type = other RNA
gttgaattgtggtctgtggacgtg

SEQ ID NO: 34573 - RNA, 35 nt, Synthetic Construct; identical to SEQ ID NO: 730
  source 1..35: mol_type = other RNA

SEQ ID NO: 34574 - RNA, 35 nt, Synthetic Construct; identical to SEQ ID NO: 730
  source 1..35: mol_type = other RNA

SEQ ID NO: 34575 - RNA, 23 nt, Synthetic Construct
  source 1..23: mol_type = other RNA
tcctgtgctgagctgccccgagt

SEQ ID NO: 34576 - RNA, 22 nt, Synthetic Construct
  source 1..22: mol_type = other RNA
cgtagtgtttcctactttatgg

SEQ ID NO: 34577 - RNA, 22 nt, Synthetic Construct
  source 1..22: mol_type = other RNA
agaggtagtaggttgtgtggtt

SEQ ID NO: 34578 - RNA, 25 nt, Synthetic Construct
  source 1..25: mol_type = other RNA
cgaatgttgctcggtgaaccccttt

SEQ ID NO: 34579 - RNA, 25 nt, Synthetic Construct
  source 1..25: mol_type = other RNA
cgaatgttgctcggtgaaccccttt

SEQ ID NO: 34580 - RNA, 22 nt, Synthetic Construct
  source 1..22: mol_type = other RNA
cgttgcacttgtctcggtctga

SEQ ID NO: 34581 - RNA, 22 nt, Synthetic Construct
  source 1..22: mol_type = other RNA
cgttgcacttgtctcggtctga

SEQ ID NO: 34582 - RNA, 23 nt, Synthetic Construct
  source 1..23: mol_type = other RNA
tcgaccggacctcgaccggctcg

SEQ ID NO: 34583 - RNA, 23 nt, Synthetic Construct
  source 1..23: mol_type = other RNA
tcgaccggacctcgaccggctcg

SEQ ID NO: 34584 - RNA, 22 nt, Synthetic Construct
  source 1..22: mol_type = other RNA
tagcagcacgtacatattggcg

SEQ ID NO: 34585 - RNA, 22 nt, Synthetic Construct
  source 1..22: mol_type = other RNA
tagcagcacgtacatattggcg

SEQ ID NO: 34586 - RNA, 23 nt, Synthetic Construct
  source 1..23: mol_type = other RNA
tgaggcagtaggttgtgtggttt

SEQ ID NO: 34587 - RNA, 23 nt, Synthetic Construct
  source 1..23: mol_type = other RNA
tgaggcagtaggttgtgtggttt

SEQ ID NO: 34588 - RNA, 22 nt, Synthetic Construct
  source 1..22: mol_type = other RNA
tattgcacttgtcccggcccgt

SEQ ID NO: 34589 - RNA, 23 nt, Synthetic Construct
  source 1..23: mol_type = other RNA
naaagtgctgttcgtgcaggtag

SEQ ID NO: 34590 - RNA, 23 nt, Synthetic Construct
  source 1..23: mol_type = other RNA
naaagtgctgttcgtgcaggtag

SEQ ID NO: 34591 - RNA, 21 nt, Synthetic Construct
  source 1..21: mol_type = other RNA
gcagatcttggtggtagtagc

SEQ ID NO: 34592 - RNA, 21 nt, Synthetic Construct
  source 1..21: mol_type = other RNA
gcagatcttggtggtagtagc

SEQ ID NO: 34593 - RNA, 22 nt, Synthetic Construct
  source 1..22: mol_type = other RNA
tagcagcacgtaaatataggcg

SEQ ID NO: 34594 - RNA, 23 nt, Synthetic Construct
  source 1..23: mol_type = other RNA
tccagtactgagctgccccgagt

SEQ ID NO: 34595 - RNA, 21 nt, Synthetic Construct
  source 1..21: mol_type = other RNA
caacggaatcccaaaagcagc

SEQ ID NO: 34596 - RNA, 26 nt, Synthetic Construct
  source 1..26: mol_type = other RNA
aatgacacgatcactcccgttgagtt

SEQ ID NO: 34597 - RNA, 26 nt, Synthetic Construct
  source 1..26: mol_type = other RNA
ggtggctgtagctcagttggtagagt

SEQ ID NO: 34598 - RNA, 26 nt, Synthetic Construct
  source 1..26: mol_type = other RNA
ggtggctgtagctcagttggtagagt

SEQ ID NO: 34599 - RNA, 22 nt, Synthetic Construct
  source 1..22: mol_type = other RNA
catcgcacttgtctcggtctga

SEQ ID NO: 34600 - RNA, 22 nt, Synthetic Construct
  source 1..22: mol_type = other RNA
cactgcacttgtctcggtctga

SEQ ID NO: 34601 - RNA, 25 nt, Synthetic Construct
  source 1..25: mol_type = other RNA
cctcgcgcgattggagcggccgata

SEQ ID NO: 34602 - RNA, 27 nt, Synthetic Construct
  source 1..27: mol_type = other RNA
ccccccacagctaaatttgactggctt

SEQ ID NO: 34603 - RNA, 21 nt, Synthetic Construct
  source 1..21: mol_type = other RNA
agggctgggtcggtcgggctg

SEQ ID NO: 34604 - RNA, 21 nt, Synthetic Construct
  source 1..21: mol_type = other RNA
agggctgggtcggtcgggctg

SEQ ID NO: 34605 - RNA, 23 nt, Synthetic Construct
  source 1..23: mol_type = other RNA
tgaggtagtagattgtatagttc

SEQ ID NO: 34606 - RNA, 24 nt, Synthetic Construct
  source 1..24: mol_type = other RNA
tcccccaggtgtgattctgatttg

SEQ ID NO: 34607 - RNA, 22 nt, Synthetic Construct
  source 1..22: mol_type = other RNA
taaggtagtaggttgtgtggtt

SEQ ID NO: 34608 - RNA, 22 nt, Synthetic Construct
  source 1..22: mol_type = other RNA
taaggtagtaggttgtgtggtt

SEQ ID NO: 34609 - RNA, 20 nt, Synthetic Construct
  source 1..20: mol_type = other RNA
tattgcactcgtcccggcct

SEQ ID NO: 34610 - RNA, 20 nt, Synthetic Construct
  source 1..20: mol_type = other RNA
tattgcactcgtcccggcct

SEQ ID NO: 34611 - RNA, 19 nt, Synthetic Construct
  source 1..19: mol_type = other RNA
atcccactcctgacaccat

SEQ ID NO: 34612 - RNA, 19 nt, Synthetic Construct
  source 1..19: mol_type = other RNA
atcccactcctgacaccat

SEQ ID NO: 34613 - RNA, 32 nt, Synthetic Construct; identical to SEQ ID NO: 1128
  source 1..32: mol_type = other RNA

SEQ ID NO: 34614 - RNA, 32 nt, Synthetic Construct; identical to SEQ ID NO: 1128
  source 1..32: mol_type = other RNA

SEQ ID NO: 34615 - RNA, 19 nt, Synthetic Construct
  source 1..19: mol_type = other RNA
tgaggtagtaggttgtgtg

SEQ ID NO: 34616 - RNA, 19 nt, Synthetic Construct
  source 1..19: mol_type = other RNA
tgaggtagtaggttgtgtg

SEQ ID NO: 34617 - RNA, 16 nt, Synthetic Construct
  source 1..16: mol_type = other RNA
aggtcatcgtcaggct

SEQ ID NO: 34618 - RNA, 23 nt, Synthetic Construct
  source 1..23: mol_type = other RNA
acagtagtctgcacattggttaa

SEQ ID NO: 34619 - RNA, 23 nt, Synthetic Construct
  source 1..23: mol_type = other RNA
acagtagtctgcacattggttaa

SEQ ID NO: 34620 - RNA, 22 nt, Synthetic Construct
  source 1..22: mol_type = other RNA
tgagatagtaggttgtatagtt

SEQ ID NO: 34621 - RNA, 22 nt, Synthetic Construct
  source 1..22: mol_type = other RNA
tgagatagtaggttgtatagtt

SEQ ID NO: 34622 - RNA, 23 nt, Synthetic Construct
  source 1..23: mol_type = other RNA
tcctgtactgagctgccccggga

SEQ ID NO: 34623 - RNA, 16 nt, Synthetic Construct
  source 1..16: mol_type = other RNA
tgcacgaaagcgtggg

SEQ ID NO: 34624 - RNA, 23 nt, Synthetic Construct
  source 1..23: mol_type = other RNA
tgaggtagtaggttgtatagttg

SEQ ID NO: 34625 - RNA, 22 nt, Synthetic Construct
  source 1..22: mol_type = other RNA
caaagtgcttacagtgcaggta

SEQ ID NO: 34626 - RNA, 22 nt, Synthetic Construct
  source 1..22: mol_type = other RNA
caaagtgcttacagtgcaggta

SEQ ID NO: 34627 - RNA, 40 nt, Synthetic Construct; identical to SEQ ID NO: 2684
  source 1..40: mol_type = other RNA

SEQ ID NO: 34628 - RNA, 40 nt, Synthetic Construct; identical to SEQ ID NO: 2684
  source 1..40: mol_type = other RNA

SEQ ID NO: 34629 - RNA, 22 nt, Synthetic Construct
  source 1..22: mol_type = other RNA
tactagactgaagctccttgag

SEQ ID NO: 34630 - RNA, 22 nt, Synthetic Construct
  source 1..22: mol_type = other RNA
tactagactgaagctccttgag

SEQ ID NO: 34631 - RNA, 25 nt, Synthetic Construct
  source 1..25: mol_type = other RNA
ttgaggatatgagatcgagacaaca

SEQ ID NO: 34632 - RNA, 20 nt, Synthetic Construct
  source 1..20: mol_type = other RNA
cccataaagtagaaagcact

SEQ ID NO: 34633 - RNA, 20 nt, Synthetic Construct
  source 1..20: mol_type = other RNA
cccataaagtagaaagcact

SEQ ID NO: 34634 - RNA, 27 nt, Synthetic Construct
  source 1..27: mol_type = other RNA
ccccccactgctagatttgactggctt

SEQ ID NO: 34635 - RNA, 21 nt, Synthetic Construct
  source 1..21: mol_type = other RNA
ggctggtccgaaggtagtgag

SEQ ID NO: 34636 - RNA, 21 nt, Synthetic Construct
  source 1..21: mol_type = other RNA
ggctggtccgaaggtagtgag

SEQ ID NO: 34637 - RNA, 21 nt, Synthetic Construct
  source 1..21: mol_type = other RNA
cgaggggcagagagcgagact

SEQ ID NO: 34638 - RNA, 22 nt, Synthetic Construct
  source 1..22: mol_type = other RNA
tgaggtagtaggttgtgttgtt

SEQ ID NO: 34639 - RNA, 22 nt, Synthetic Construct
  source 1..22: mol_type = other RNA
tgaggtagtaggttgtgttgtt

SEQ ID NO: 34640 - RNA, 23 nt, Synthetic Construct
  source 1..23: mol_type = other RNA
agcaacattgtctgctgggtttc

SEQ ID NO: 34641 - RNA, 36 nt, Synthetic Construct; identical to SEQ ID NO: 2506
  source 1..36: mol_type = other RNA

SEQ ID NO: 34642 - RNA, 21 nt, Synthetic Construct
  source 1..21: mol_type = other RNA
tgaggaagtaggttgtatagt

SEQ ID NO: 34643 - RNA, 16 nt, Synthetic Construct
  source 1..16: mol_type = other RNA
gtctatggccatacca

SEQ ID NO: 34644 - RNA, 20 nt, Synthetic Construct
  source 1..20: mol_type = other RNA
tccccggcatctccaccaaa

SEQ ID NO: 34645 - RNA, 20 nt, Synthetic Construct
  source 1..20: mol_type = other RNA
tccccggcatctccaccaaa

SEQ ID NO: 34646 - RNA, 36 nt, Synthetic Construct; identical to SEQ ID NO: 6739
  source 1..36: mol_type = other RNA

SEQ ID NO: 34647 - RNA, 36 nt, Synthetic Construct; identical to SEQ ID NO: 6739
  source 1..36: mol_type = other RNA

SEQ ID NO: 34648 - RNA, 20 nt, Synthetic Construct
  source 1..20: mol_type = other RNA
tgaggtagtaggttgtgtgt

SEQ ID NO: 34649 - RNA, 22 nt, Synthetic Construct
  source 1..22: mol_type = other RNA
tcgtaccgtgagtagtaatgcg

SEQ ID NO: 34650 - RNA, 22 nt, Synthetic Construct
  source 1..22: mol_type = other RNA
tcgtaccgtgagtagtaatgcg

SEQ ID NO: 34651 - RNA, 23 nt, Synthetic Construct
  source 1..23: mol_type = other RNA
tgaggtagtaggttgtgtggtta

SEQ ID NO: 34652 - RNA, 21 nt, Synthetic Construct
  source 1..21: mol_type = other RNA
tcctgaactgagctgccccga

SEQ ID NO: 34653 - RNA, 23 nt, Synthetic Construct
  source 1..23: mol_type = other RNA
tgaggggcagagagcgagactct

SEQ ID NO: 34654 - RNA, 23 nt, Synthetic Construct
  source 1..23: mol_type = other RNA
tgaggggcagagagcgagactct

SEQ ID NO: 34655 - RNA, 17 nt, Synthetic Construct
  source 1..17: mol_type = other RNA
atagggaacgtgagctg

SEQ ID NO: 34656 - RNA, 17 nt, Synthetic Construct
  source 1..17: mol_type = other RNA
atagggaacgtgagctg

SEQ ID NO: 34657 - RNA, 21 nt, Synthetic Construct
  source 1..21: mol_type = other RNA
taacactgtctggtaacgatg

SEQ ID NO: 34658 - RNA, 21 nt, Synthetic Construct
  source 1..21: mol_type = other RNA
taacactgtctggtaacgatg

SEQ ID NO: 34659 - RNA, 22 nt, Synthetic Construct
  source 1..22: mol_type = other RNA
tagcagcacgtgaatattggcg

SEQ ID NO: 34660 - RNA, 22 nt, Synthetic Construct
  source 1..22: mol_type = other RNA
tagcagcacgtgaatattggcg

SEQ ID NO: 34661 - RNA, 24 nt, Synthetic Construct
  source 1..24: mol_type = other RNA
tgtaaacatccccgactggaagcc

SEQ ID NO: 34662 - RNA, 23 nt, Synthetic Construct
  source 1..23: mol_type = other RNA
tcctgcactgagctgccccgagt

SEQ ID NO: 34663 - RNA, 23 nt, Synthetic Construct
  source 1..23: mol_type = other RNA
tcctgcactgagctgccccgagt

SEQ ID NO: 34664 - RNA, 23 nt, Synthetic Construct
  source 1..23: mol_type = other RNA
caaggtgctgttcgtgcaggtag

SEQ ID NO: 34665 - RNA, 23 nt, Synthetic Construct
  source 1..23: mol_type = other RNA
caaggtgctgttcgtgcaggtag

SEQ ID NO: 34666 - RNA, 35 nt, Synthetic Construct; identical to SEQ ID NO: 757
  source 1..35: mol_type = other RNA

SEQ ID NO: 34667 - RNA, 22 nt, Synthetic Construct
  source 1..22: mol_type = other RNA
ttcaagtaattcaggataggtc

SEQ ID NO: 34668 - RNA, 21 nt, Synthetic Construct
  source 1..21: mol_type = other RNA
tgaggtagtagattgtatggt

SEQ ID NO: 34669 - RNA, 21 nt, Synthetic Construct
  source 1..21: mol_type = other RNA
tgaggtagtagattgtatggt

SEQ ID NO: 34670 - RNA, 22 nt, Synthetic Construct
  source 1..22: mol_type = other RNA
tagcagcacgtaagtattggcg

SEQ ID NO: 34671 - RNA, 26 nt, Synthetic Construct
  source 1..26: mol_type = other RNA
ggtggctgtagctcagttggtagagt

SEQ ID NO: 34672 - RNA, 26 nt, Synthetic Construct
  source 1..26: mol_type = other RNA
ggtggctgtagctcagttggtagagt

SEQ ID NO: 34673 - RNA, 22 nt, Synthetic Construct
  source 1..22: mol_type = other RNA
tgaggtagtaggttgtgcggtt

SEQ ID NO: 34674 - RNA, 23 nt, Synthetic Construct
  source 1..23: mol_type = other RNA
tcctgtactgggctgccccgaga

SEQ ID NO: 34675 - RNA, 23 nt, Synthetic Construct
  source 1..23: mol_type = other RNA
caaagtgccgttcgtgcaggtag

SEQ ID NO: 34676 - RNA, 24 nt, Synthetic Construct
  source 1..24: mol_type = other RNA
tgggtaatacgacgtacttagtgt

SEQ ID NO: 34677 - RNA, 24 nt, Synthetic Construct
  source 1..24: mol_type = other RNA
tgggtaatacgacgtacttagtgt

SEQ ID NO: 34678 - RNA, 23 nt, Synthetic Construct
  source 1..23: mol_type = other RNA
atgtcccacccccactcctgtta

SEQ ID NO: 34679 - RNA, 23 nt, Synthetic Construct
  source 1..23: mol_type = other RNA
atgtcccacccccactcctgtta

SEQ ID NO: 34680 - RNA, 16 nt, Synthetic Construct
  source 1..16: mol_type = other RNA
aggtcatcattatctg

SEQ ID NO: 34681 - RNA, 16 nt, Synthetic Construct
  source 1..16: mol_type = other RNA
aggtcatcattatctg

SEQ ID NO: 34682 - RNA, 22 nt, Synthetic Construct
  source 1..22: mol_type = other RNA
tgtgactggttgaccagagggt

SEQ ID NO: 34683 - RNA, 32 nt, Synthetic Construct; identical to SEQ ID NO: 770
  source 1..32: mol_type = other RNA

SEQ ID NO: 34684 - RNA, 32 nt, Synthetic Construct; identical to SEQ ID NO: 770
  source 1..32: mol_type = other RNA

SEQ ID NO: 34685 - RNA, 20 nt, Synthetic Construct
  source 1..20: mol_type = other RNA
acctgtactgagctgccccg

SEQ ID NO: 34686 - RNA, 20 nt, Synthetic Construct
  source 1..20: mol_type = other RNA
acctgtactgagctgccccg

SEQ ID NO: 34687 - RNA, 26 nt, Synthetic Construct
  source 1..26: mol_type = other RNA
gagcagctaataccgcatacgacctg

SEQ ID NO: 34688 - RNA, 26 nt, Synthetic Construct
  source 1..26: mol_type = other RNA
gagcagctaataccgcatacgacctg

SEQ ID NO: 34689 - RNA, 30 nt, Synthetic Construct; identical to SEQ ID NO: 6467
  source 1..30: mol_type = other RNA

SEQ ID NO: 34690 - RNA, 27 nt, Synthetic Construct
  source 1..27: mol_type = other RNA
ccccccactgttaaatttgactggctt

SEQ ID NO: 34691 - RNA, 39 nt, Synthetic Construct; identical to SEQ ID NO: 759
  source 1..39: mol_type = other RNA

SEQ ID NO: 34692 - RNA, 20 nt, Synthetic Construct
  source 1..20: mol_type = other RNA
tgaggtagtaggttgcatag

SEQ ID NO: 34693 - RNA, 30 nt, Synthetic Construct; identical to SEQ ID NO: 768
  source 1..30: mol_type = other RNA

SEQ ID NO: 34694 - RNA, 30 nt, Synthetic Construct; identical to SEQ ID NO: 768
  source 1..30: mol_type = other RNA

SEQ ID NO: 34695 - RNA, 23 nt, Synthetic Construct
  source 1..23: mol_type = other RNA
tggtaacacgacgtacttagtgt

SEQ ID NO: 34696 - RNA, 21 nt, Synthetic Construct
  source 1..21: mol_type = other RNA
tgaggggcagagggcgagact

SEQ ID NO: 34697 - RNA, 21 nt, Synthetic Construct
  source 1..21: mol_type = other RNA
tgaggggcagagggcgagact

SEQ ID NO: 34698 - RNA, 22 nt, Synthetic Construct
  source 1..22: mol_type = other RNA
tattgcactcgtcccggcctgt

SEQ ID NO: 34699 - RNA, 23 nt, Synthetic Construct
  source 1..23: mol_type = other RNA
tggaatgtaaagaagtatgtatt

SEQ ID NO: 34700 - RNA, 23 nt, Synthetic Construct
  source 1..23: mol_type = other RNA
tggaatgtaaagaagtatgtatt

SEQ ID NO: 34701 - RNA, 30 nt, Synthetic Construct; identical to SEQ ID NO: 1194
  source 1..30: mol_type = other RNA

SEQ ID NO: 34702 - RNA, 30 nt, Synthetic Construct; identical to SEQ ID NO: 1194
  source 1..30: mol_type = other RNA

SEQ ID NO: 34703 - RNA, 22 nt, Synthetic Construct
  source 1..22: mol_type = other RNA
tattgcacttgacccggcctgt

SEQ ID NO: 34704 - RNA, 22 nt, Synthetic Construct
  source 1..22: mol_type = other RNA
tattgcacttgacccggcctgt

SEQ ID NO: 34705 - RNA, 15 nt, Synthetic Construct
  source 1..15: mol_type = other RNA
acggtcctaaggtag

SEQ ID NO: 34706 - RNA, 19 nt, Synthetic Construct
  source 1..19: mol_type = other RNA
tgtcagtttgtcaaatacc

SEQ ID NO: 34707 - RNA, 19 nt, Synthetic Construct
  source 1..19: mol_type = other RNA
tgtcagtttgtcaaatacc

SEQ ID NO: 34708 - RNA, 20 nt, Synthetic Construct
  source 1..20: mol_type = other RNA
tgaggtagtaggttgtgtga

SEQ ID NO: 34709 - RNA, 20 nt, Synthetic Construct
  source 1..20: mol_type = other RNA
tgaggtagtaggttgtgtga

SEQ ID NO: 34710 - RNA, 22 nt, Synthetic Construct
  source 1..22: mol_type = other RNA
tcctgtactgagctgccccggg

SEQ ID NO: 34711 - RNA, 16 nt, Synthetic Construct
  source 1..16: mol_type = other RNA
caggacggtggccatg

SEQ ID NO: 34712 - RNA, 16 nt, Synthetic Construct
  source 1..16: mol_type = other RNA
caggacggtggccatg

SEQ ID NO: 34713 - RNA, 23 nt, Synthetic Construct
  source 1..23: mol_type = other RNA
tcctgtactgagctaccccgaga

SEQ ID NO: 34714 - RNA, 27 nt, Synthetic Construct
  source 1..27: mol_type = other RNA
ccccccactgctaaattagactggctt

SEQ ID NO: 34715 - RNA, 23 nt, Synthetic Construct
  source 1..23: mol_type = other RNA
tcctgtactgggctgccccgaga

SEQ ID NO: 34716 - RNA, 21 nt, Synthetic Construct
  source 1..21: mol_type = other RNA
tgaggtagtaagttgtgtggt

SEQ ID NO: 34717 - RNA, 30 nt, Synthetic Construct; identical to SEQ ID NO: 768
  source 1..30: mol_type = other RNA

SEQ ID NO: 34718 - RNA, 22 nt, Synthetic Construct
  source 1..22: mol_type = other RNA
tagcagcacgtaaatattagcg

SEQ ID NO: 34719 - RNA, 22 nt, Synthetic Construct
  source 1..22: mol_type = other RNA
tagcagcacgtaaatatcggcg

SEQ ID NO: 34720 - RNA, 32 nt, Synthetic Construct; identical to SEQ ID NO: 1237
  source 1..32: mol_type = other RNA

SEQ ID NO: 34721 - RNA, 32 nt, Synthetic Construct; identical to SEQ ID NO: 1237
  source 1..32: mol_type = other RNA

SEQ ID NO: 34722 - RNA, 21 nt, Synthetic Construct
  source 1..21: mol_type = other RNA
gactatagaactttccccctc

SEQ ID NO: 34723 - RNA, 21 nt, Synthetic Construct
  source 1..21: mol_type = other RNA
gactatagaactttccccctc

SEQ ID NO: 34724 - RNA, 22 nt, Synthetic Construct
  source 1..22: mol_type = other RNA
ctcgtaccgtgagtaataatgc

SEQ ID NO: 34725 - RNA, 22 nt, Synthetic Construct
  source 1..22: mol_type = other RNA
ctcgtaccgtgagtaataatgc

SEQ ID NO: 34726 - RNA, 22 nt, Synthetic Construct
  source 1..22: mol_type = other RNA
cagcagcacgtaaatattggcg

SEQ ID NO: 34727 - RNA, 22 nt, Synthetic Construct
  source 1..22: mol_type = other RNA
cagcagcacgtaaatattggcg

SEQ ID NO: 34728 - RNA, 16 nt, Synthetic Construct
  source 1..16: mol_type = other RNA
tcgtgacgatagtgca

SEQ ID NO: 34729 - RNA, 18 nt, Synthetic Construct
  source 1..18: mol_type = other RNA
ggtagcgtggccgagtgg

SEQ ID NO: 34730 - RNA, 18 nt, Synthetic Construct
  source 1..18: mol_type = other RNA
ggtagcgtggccgagtgg

SEQ ID NO: 34731 - RNA, 27 nt, Synthetic Construct
  source 1..27: mol_type = other RNA
ccccccactgctaaatttgactggcct

SEQ ID NO: 34732 - RNA, 24 nt, Synthetic Construct
  source 1..24: mol_type = other RNA
gaggtgtagaataggtgggagctt

SEQ ID NO: 34733 - RNA, 24 nt, Synthetic Construct
  source 1..24: mol_type = other RNA
gaggtgtagaataggtgggagctt

SEQ ID NO: 34734 - RNA, 17 nt, Synthetic Construct
  source 1..17: mol_type = other RNA
cgactcttagcggtgga

SEQ ID NO: 34735 - RNA, 17 nt, Synthetic Construct
  source 1..17: mol_type = other RNA
cgactcttagcggtgga

SEQ ID NO: 34736 - RNA, 23 nt, Synthetic Construct
  source 1..23: mol_type = other RNA
tgaggcagtaggttgtgtggttt

SEQ ID NO: 34737 - RNA, 23 nt, Synthetic Construct
  source 1..23: mol_type = other RNA
tgaggcagtaggttgtgtggttt

SEQ ID NO: 34738 - RNA, 22 nt, Synthetic Construct
  source 1..22: mol_type = other RNA
ngaggtagtaggttgtatagtt

SEQ ID NO: 34739 - RNA, 21 nt, Synthetic Construct
  source 1..21: mol_type = other RNA
tcctatactgagctgccccga

SEQ ID NO: 34740 - RNA, 15 nt, Synthetic Construct
  source 1..15: mol_type = other RNA
tcctgacggccatag

SEQ ID NO: 34741 - RNA, 22 nt, Synthetic Construct
  source 1..22: mol_type = other RNA
tcaaatcccggacgagccccca

SEQ ID NO: 34742 - RNA, 22 nt, Synthetic Construct
  source 1..22: mol_type = other RNA
tcaaatcccggacgagccccca

SEQ ID NO: 34743 - RNA, 23 nt, Synthetic Construct
  source 1..23: mol_type = other RNA
tcctgtactgagctgccctgaga

SEQ ID NO: 34744 - RNA, 22 nt, Synthetic Construct
  source 1..22: mol_type = other RNA
tagcttatcagactgatgttga

SEQ ID NO: 34745 - RNA, 22 nt, Synthetic Construct
  source 1..22: mol_type = other RNA
ttcaagtaatccaggataggcc

SEQ ID NO: 34746 - RNA, 22 nt, Synthetic Construct
  source 1..22: mol_type = other RNA
ttcaagtaatccaggataggcc

SEQ ID NO: 34747 - RNA, 23 nt, Synthetic Construct
  source 1..23: mol_type = other RNA
tggtgatacgacgtacttagtgt

SEQ ID NO: 34748 - RNA, 22 nt, Synthetic Construct
  source 1..22: mol_type = other RNA
tcgtaccgtgagtaatgatgcg

SEQ ID NO: 34749 - RNA, 22 nt, Synthetic Construct
  source 1..22: mol_type = other RNA
tcgtaccgtgagtaatgatgcg

SEQ ID NO: 34750 - RNA, 22 nt, Synthetic Construct
  source 1..22: mol_type = other RNA
tactgcacttgtcccggcctgt

SEQ ID NO: 34751 - RNA, 22 nt, Synthetic Construct
  source 1..22: mol_type = other RNA
ccagtgcactacagaactttgt

SEQ ID NO: 34752 - RNA, 22 nt, Synthetic Construct
  source 1..22: mol_type = other RNA
ttctgtactgagctgccccgag

SEQ ID NO: 34753 - RNA, 22 nt, Synthetic Construct
  source 1..22: mol_type = other RNA
tattgcacttgtcccggtctgt

SEQ ID NO: 34754 - RNA, 21 nt, Synthetic Construct
  source 1..21: mol_type = other RNA
atggcactggtagaattcact

SEQ ID NO: 34755 - RNA, 21 nt, Synthetic Construct
  source 1..21: mol_type = other RNA
atggcactggtagaattcact

SEQ ID NO: 34756 - RNA, 22 nt, Synthetic Construct
  source 1..22: mol_type = other RNA
ttcaagtaatccaggataggct

SEQ ID NO: 34757 - RNA, 22 nt, Synthetic Construct
  source 1..22: mol_type = other RNA
ttcaagtaatccaggataggct

SEQ ID NO: 34758 - RNA, 20 nt, Synthetic Construct
  source 1..20: mol_type = other RNA
tattgcacattactaagttg

SEQ ID NO: 34759 - RNA, 20 nt, Synthetic Construct
  source 1..20: mol_type = other RNA
tattgcacattactaagttg

SEQ ID NO: 34760 - RNA, 22 nt, Synthetic Construct
  source 1..22: mol_type = other RNA
tgaggtagtagtttatgctgtt

SEQ ID NO: 34761 - RNA, 22 nt, Synthetic Construct
  source 1..22: mol_type = other RNA
tgaggtagtagtttatgctgtt

SEQ ID NO: 34762 - RNA, 22 nt, Synthetic Construct
  source 1..22: mol_type = other RNA
tcctgtaatgagctgccccgag

SEQ ID NO: 34763 - RNA, 22 nt, Synthetic Construct
  source 1..22: mol_type = other RNA
tcctgtaatgagctgccccgag

SEQ ID NO: 34764 - RNA, 22 nt, Synthetic Construct
  source 1..22: mol_type = other RNA
agcaggacggtggccatggaag

SEQ ID NO: 34765 - RNA, 22 nt, Synthetic Construct
  source 1..22: mol_type = other RNA
agcaggacggtggccatggaag

SEQ ID NO: 34766 - RNA, 31 nt, Synthetic Construct; identical to SEQ ID NO: 2263
  source 1..31: mol_type = other RNA

SEQ ID NO: 34767 - RNA, 31 nt, Synthetic Construct; identical to SEQ ID NO: 2263
  source 1..31: mol_type = other RNA

SEQ ID NO: 34768 - RNA, 21 nt, Synthetic Construct
  source 1..21: mol_type = other RNA
atgtcccacccccactcctgt

SEQ ID NO: 34769 - RNA, 21 nt, Synthetic Construct
  source 1..21: mol_type = other RNA
atgtcccacccccactcctgt

SEQ ID NO: 34770 - RNA, 19 nt, Synthetic Construct
  source 1..19: mol_type = other RNA
ccagtaaacggcggccgta

SEQ ID NO: 34771 - RNA, 25 nt, Synthetic Construct
  source 1..25: mol_type = other RNA
ttgaggatatgggatcgagacgaca

SEQ ID NO: 34772 - RNA, 23 nt, Synthetic Construct
  source 1..23: mol_type = other RNA
tggggtagtaggttgtgtggttt

SEQ ID NO: 34773 - RNA, 17 nt, Synthetic Construct
  source 1..17: mol_type = other RNA
atgcaagtcgaacggta

SEQ ID NO: 34774 - RNA, 23 nt, Synthetic Construct
  source 1..23: mol_type = other RNA
tcctgtactgagctgccctgagt

SEQ ID NO: 34775 - RNA, 23 nt, Synthetic Construct
  source 1..23: mol_type = other RNA
tcctgtactgagctgccctgagt

SEQ ID NO: 34776 - RNA, 23 nt, Synthetic Construct
  source 1..23: mol_type = other RNA
ggaggggcagagagcgagacttt

SEQ ID NO: 34777 - RNA, 23 nt, Synthetic Construct
  source 1..23: mol_type = other RNA
ggaggggcagagagcgagacttt

SEQ ID NO: 34778 - RNA, 25 nt, Synthetic Construct
  source 1..25: mol_type = other RNA
atttccccttggggttgtaggacca

SEQ ID NO: 34779 - RNA, 25 nt, Synthetic Construct
  source 1..25: mol_type = other RNA
atttccccttggggttgtaggacca

SEQ ID NO: 34780 - RNA, 31 nt, Synthetic Construct; identical to SEQ ID NO: 13805
  source 1..31: mol_type = other RNA

SEQ ID NO: 34781 - RNA, 17 nt, Synthetic Construct
  source 1..17: mol_type = other RNA
tcccggacgagccccca

SEQ ID NO: 34782 - RNA, 17 nt, Synthetic Construct
  source 1..17: mol_type = other RNA
tcccggacgagccccca

SEQ ID NO: 34783 - RNA, 29 nt, Synthetic Construct
  source 1..29: mol_type = other RNA
gctaaacctagccccaaacccactccacc

SEQ ID NO: 34784 - RNA, 22 nt, Synthetic Construct
  source 1..22: mol_type = other RNA
tgaagtagtagtttgtgctgtt

SEQ ID NO: 34785 - RNA, 22 nt, Synthetic Construct
  source 1..22: mol_type = other RNA
tgaagtagtagtttgtgctgtt

SEQ ID NO: 34786 - RNA, 15 nt, Synthetic Construct
  source 1..15: mol_type = other RNA
aaattccttgtcggg

SEQ ID NO: 34787 - RNA, 22 nt, Synthetic Construct
  source 1..22: mol_type = other RNA
tgaggtagtaggttgtgtagtt

SEQ ID NO: 34788 - RNA, 22 nt, Synthetic Construct
  source 1..22: mol_type = other RNA
tgaggtagtaggttgtgtagtt

SEQ ID NO: 34789 - RNA, 23 nt, Synthetic Construct
  source 1..23: mol_type = other RNA
tggagacgcggccctgttggagt

SEQ ID NO: 34790 - RNA, 23 nt, Synthetic Construct
  source 1..23: mol_type = other RNA
tgggtttacgttgggagaactta

SEQ ID NO: 34791 - RNA, 22 nt, Synthetic Construct
  source 1..22: mol_type = other RNA
ttcaagtaatccaggataggcc

SEQ ID NO: 34792 - RNA, 22 nt, Synthetic Construct
  source 1..22: mol_type = other RNA
ttcaagtaatccaggataggcc

SEQ ID NO: 34793 - RNA, 23 nt, Synthetic Construct
  source 1..23: mol_type = other RNA
aacggaatcccaaaagcagctgt

SEQ ID NO: 34794 - RNA, 23 nt, Synthetic Construct
  source 1..23: mol_type = other RNA
aacggaatcccaaaagcagctgt

SEQ ID NO: 34795 - RNA, 16 nt, Synthetic Construct
  source 1..16: mol_type = other RNA
gactacggccatacca

SEQ ID NO: 34796 - RNA, 16 nt, Synthetic Construct
  source 1..16: mol_type = other RNA
gactacggccatacca

SEQ ID NO: 34797 - RNA, 16 nt, Synthetic Construct
  source 1..16: mol_type = other RNA
gccagcagccgcggta

SEQ ID NO: 34798 - RNA, 21 nt, Synthetic Construct
  source 1..21: mol_type = other RNA
tgaagtagtaggttgtgtggt

SEQ ID NO: 34799 - RNA, 21 nt, Synthetic Construct
  source 1..21: mol_type = other RNA
tgaagtagtaggttgtgtggt

SEQ ID NO: 34800 - RNA, 23 nt, Synthetic Construct
  source 1..23: mol_type = other RNA
tgaggtagtaggttgtatagtta

SEQ ID NO: 34801 - RNA, 25 nt, Synthetic Construct
  source 1..25: mol_type = other RNA
ttgaggatgtgagatcgagacgaca

SEQ ID NO: 34802 - RNA, 22 nt, Synthetic Construct
  source 1..22: mol_type = other RNA
tgaggtagtaggttgtacagtt

SEQ ID NO: 34803 - RNA, 22 nt, Synthetic Construct
  source 1..22: mol_type = other RNA
tgaggtagtaggttgtacagtt

SEQ ID NO: 34804 - RNA, 27 nt, Synthetic Construct
  source 1..27: mol_type = other RNA
ncccccactgctaaatttgactggctt

SEQ ID NO: 34805 - RNA, 27 nt, Synthetic Construct
  source 1..27: mol_type = other RNA
ncccccactgctaaatttgactggctt

SEQ ID NO: 34806 - RNA, 22 nt, Synthetic Construct
  source 1..22: mol_type = other RNA
tgagatagtaggttgtgtggtt

SEQ ID NO: 34807 - RNA, 25 nt, Synthetic Construct
  source 1..25: mol_type = other RNA
tcggatccgtctgagcttggctttt

SEQ ID NO: 34808 - RNA, 16 nt, Synthetic Construct
  source 1..16: mol_type = other RNA
tgcgtagatatgcgga

SEQ ID NO: 34809 - RNA, 23 nt, Synthetic Construct
  source 1..23: mol_type = other RNA
tgaggtggtaggttgtgtggttt

SEQ ID NO: 34810 - RNA, 25 nt, Synthetic Construct
  source 1..25: mol_type = other RNA
tcggatccgtctgagcttggctttt

SEQ ID NO: 34811 - RNA, 34 nt, Synthetic Construct; identical to SEQ ID NO: 2298
  source 1..34: mol_type = other RNA

SEQ ID NO: 34812 - RNA, 24 nt, Synthetic Construct
  source 1..24: mol_type = other RNA
gctaaacctagccccaaacccact

SEQ ID NO: 34813 - RNA, 21 nt, Synthetic Construct
  source 1..21: mol_type = other RNA
ctagcaccatctgaaatcggt

SEQ ID NO: 34814 - RNA, 22 nt, Synthetic Construct
  source 1..22: mol_type = other RNA
tcctgtactgagctgccccgac

SEQ ID NO: 34815 - RNA, 24 nt, Synthetic Construct
  source 1..24: mol_type = other RNA
tgatatgtttgatatattaggttg

SEQ ID NO: 34816 - RNA, 24 nt, Synthetic Construct
  source 1..24: mol_type = other RNA
tgatatgtttgatatattaggttg

SEQ ID NO: 34817 - RNA, 23 nt, Synthetic Construct
  source 1..23: mol_type = other RNA
tcctgcactgagctgccccgaga

SEQ ID NO: 34818 - RNA, 19 nt, Synthetic Construct
  source 1..19: mol_type = other RNA
tagcagcacatcatggttt

SEQ ID NO: 34819 - RNA, 19 nt, Synthetic Construct
  source 1..19: mol_type = other RNA
tagcagcacatcatggttt

SEQ ID NO: 34820 - RNA, 23 nt, Synthetic Construct
  source 1..23: mol_type = other RNA
tggtaaaacgacgtacttagtgt

SEQ ID NO: 34821 - RNA, 18 nt, Synthetic Construct
  source 1..18: mol_type = other RNA
aagcggtggatgatgtgg

SEQ ID NO: 34822 - RNA, 20 nt, Synthetic Construct
  source 1..20: mol_type = other RNA
gtcagtttgtcaaatacccc

SEQ ID NO: 34823 - RNA, 27 nt, Synthetic Construct
  source 1..27: mol_type = other RNA
ccccccactgctaaatttgattggctt

SEQ ID NO: 34824 - RNA, 25 nt, Synthetic Construct
  source 1..25: mol_type = other RNA
ttgagggtatgagatcgagacgaca

SEQ ID NO: 34825 - RNA, 24 nt, Synthetic Construct
  source 1..24: mol_type = other RNA
ggtaaacatccccgactggaagct

SEQ ID NO: 34826 - RNA, 17 nt, Synthetic Construct
  source 1..17: mol_type = other RNA
ttggagggcaagtctgg

SEQ ID NO: 34827 - RNA, 17 nt, Synthetic Construct
  source 1..17: mol_type = other RNA
ttggagggcaagtctgg

SEQ ID NO: 34828 - RNA, 22 nt, Synthetic Construct
  source 1..22: mol_type = other RNA
atataatacaacctgctaagtg

SEQ ID NO: 34829 - RNA, 22 nt, Synthetic Construct
  source 1..22: mol_type = other RNA
tagcagcacgtaaatatcggcg

SEQ ID NO: 34830 - RNA, 22 nt, Synthetic Construct
  source 1..22: mol_type = other RNA
tagcagcacgtaaatatcggcg

SEQ ID NO: 34831 - RNA, 16 nt, Synthetic Construct
  source 1..16: mol_type = other RNA
ccggaggaaggtgggg

SEQ ID NO: 34832 - RNA, 18 nt, Synthetic Construct
  source 1..18: mol_type = other RNA
tcagtagctcgaggaaaa

SEQ ID NO: 34833 - RNA, 23 nt, Synthetic Construct
  source 1..23: mol_type = other RNA
tgagaactgaattccatgggttt

SEQ ID NO: 34834 - RNA, 23 nt, Synthetic Construct
  source 1..23: mol_type = other RNA
tgaggtagtaggtcgtgtggttt

SEQ ID NO: 34835 - RNA, 21 nt, Synthetic Construct
  source 1..21: mol_type = other RNA
tggagtgtgacaatggcgttt

SEQ ID NO: 34836 - RNA, 21 nt, Synthetic Construct
  source 1..21: mol_type = other RNA
tgaggggcagggagcgagact

SEQ ID NO: 34837 - RNA, 22 nt, Synthetic Construct
  source 1..22: mol_type = other RNA
tgaagtagtagtttgtgctgtt

SEQ ID NO: 34838 - RNA, 22 nt, Synthetic Construct
  source 1..22: mol_type = other RNA
caaagtgcttacagtgcaggta

SEQ ID NO: 34839 - RNA, 22 nt, Synthetic Construct
  source 1..22: mol_type = other RNA
caaagtgcttacagtgcaggta

SEQ ID NO: 34840 - RNA, 23 nt, Synthetic Construct
  source 1..23: mol_type = other RNA
tgaggggcagagagcgagacctt

SEQ ID NO: 34841 - RNA, 32 nt, Synthetic Construct
  source 1..32: mol_type = other RNA
tccctggtggtctagtggttaggattcggcgc

SEQ ID NO: 34842 - RNA, 32 nt, Synthetic Construct; identical to SEQ ID NO: 34841
  source 1..32: mol_type = other RNA

SEQ ID NO: 34843 - RNA, 27 nt, Synthetic Construct
  source 1..27: mol_type = other RNA
ccccccactgctaagtttgactggctt

SEQ ID NO: 34844 - RNA, 27 nt, Synthetic Construct
  source 1..27: mol_type = other RNA
ccccccactgctaagtttgactggctt

SEQ ID NO: 34845 - RNA, 19 nt, Synthetic Construct
  source 1..19: mol_type = other RNA
cagcactctgcaaagacga

SEQ ID NO: 34846 - RNA, 21 nt, Synthetic Construct
  source 1..21: mol_type = other RNA
taacactgtctggtaacgatg

SEQ ID NO: 34847 - RNA, 21 nt, Synthetic Construct
  source 1..21: mol_type = other RNA
taacactgtctggtaacgatg

SEQ ID NO: 34848 - RNA, 33 nt, Synthetic Construct
  source 1..33: mol_type = other RNA
tccctggtggtctagtggttaggattcggcgct

SEQ ID NO: 34849 - RNA, 33 nt, Synthetic Construct; identical to SEQ ID NO: 34848
  source 1..33: mol_type = other RNA

SEQ ID NO: 34850 - RNA, 23 nt, Synthetic Construct
  source 1..23: mol_type = other RNA
gcctgtactgagctgccccgagt

SEQ ID NO: 34851 - RNA, 16 nt, Synthetic Construct
  source 1..16: mol_type = other RNA
cgcgacctcagatcag

SEQ ID NO: 34852 - RNA, 16 nt, Synthetic Construct
  source 1..16: mol_type = other RNA
cgcgacctcagatcag

SEQ ID NO: 34853 - RNA, 24 nt, Synthetic Construct
  source 1..24: mol_type = other RNA
ttcaagtaatccaggataggcttt

SEQ ID NO: 34854 - RNA, 23 nt, Synthetic Construct
  source 1..23: mol_type = other RNA
actcggcgtggcgtcggtcgtgt

SEQ ID NO: 34855 - RNA, 23 nt, Synthetic Construct
  source 1..23: mol_type = other RNA
actcggcgtggcgtcggtcgtgt

SEQ ID NO: 34856 - RNA, 22 nt, Synthetic Construct
  source 1..22: mol_type = other RNA
agtggggaacccttccatgagg

SEQ ID NO: 34857 - RNA, 22 nt, Synthetic Construct
  source 1..22: mol_type = other RNA
tattgtacttgtcccggcctgt

SEQ ID NO: 34858 - RNA, 22 nt, Synthetic Construct
  source 1..22: mol_type = other RNA
tattgtacttgtcccggcctgt

SEQ ID NO: 34859 - RNA, 25 nt, Synthetic Construct
  source 1..25: mol_type = other RNA
tcgaggatatgagatcgagacgaca

SEQ ID NO: 34860 - RNA, 19 nt, Synthetic Construct
  source 1..19: mol_type = other RNA
agcaggacggtggccatgg

SEQ ID NO: 34861 - RNA, 19 nt, Synthetic Construct
  source 1..19: mol_type = other RNA
agcaggacggtggccatgg

SEQ ID NO: 34862 - RNA, 22 nt, Synthetic Construct
  source 1..22: mol_type = other RNA
tcgtgccgtgagtaataatgcg

SEQ ID NO: 34863 - RNA, 22 nt, Synthetic Construct
  source 1..22: mol_type = other RNA
tcgtgccgtgagtaataatgcg

SEQ ID NO: 34864 - RNA, 18 nt, Synthetic Construct
  source 1..18: mol_type = other RNA
tcctgtactgagctgccc

SEQ ID NO: 34865 - RNA, 18 nt, Synthetic Construct
  source 1..18: mol_type = other RNA
tcctgtactgagctgccc

SEQ ID NO: 34866 - RNA, 31 nt, Synthetic Construct; identical to SEQ ID NO: 960
  source 1..31: mol_type = other RNA

SEQ ID NO: 34867 - RNA, 40 nt, Synthetic Construct; identical to SEQ ID NO: 2684
  source 1..40: mol_type = other RNA

SEQ ID NO: 34868 - RNA, 16 nt, Synthetic Construct
  source 1..16: mol_type = other RNA
tcagtagctcgaggaa

SEQ ID NO: 34869 - RNA, 34 nt, Synthetic Construct; identical to SEQ ID NO: 2317
  source 1..34: mol_type = other RNA

SEQ ID NO: 34870 - RNA, 21 nt, Synthetic Construct
  source 1..21: mol_type = other RNA
tgaggtagtaggttgtgtgga

SEQ ID NO: 34871 - RNA, 21 nt, Synthetic Construct
  source 1..21: mol_type = other RNA
tgaggtagtaggttgtgtgga

SEQ ID NO: 34872 - RNA, 22 nt, Synthetic Construct
  source 1..22: mol_type = other RNA
ggaggtagtagtttgtgctgtt

SEQ ID NO: 34873 - RNA, 23 nt, Synthetic Construct
  source 1..23: mol_type = other RNA
gactcttagcggtggatcactcg

SEQ ID NO: 34874 - RNA, 23 nt, Synthetic Construct
  source 1..23: mol_type = other RNA
gactcttagcggtggatcactcg

SEQ ID NO: 34875 - RNA, 20 nt, Synthetic Construct
  source 1..20: mol_type = other RNA
aaaccgttaccattactgag

SEQ ID NO: 34876 - RNA, 20 nt, Synthetic Construct
  source 1..20: mol_type = other RNA
aaaccgttaccattactgag

SEQ ID NO: 34877 - RNA, 18 nt, Synthetic Construct
  source 1..18: mol_type = other RNA
gctattgacgaccgtacc

SEQ ID NO: 34878 - RNA, 22 nt, Synthetic Construct
  source 1..22: mol_type = other RNA
tattgcacttatcccggcctgt

SEQ ID NO: 34879 - RNA, 22 nt, Synthetic Construct
  source 1..22: mol_type = other RNA
cattgcacctgtctcggtctga

SEQ ID NO: 34880 - RNA, 22 nt, Synthetic Construct
  source 1..22: mol_type = other RNA
tgcagtgtttcctactttatgg

SEQ ID NO: 34881 - RNA, 22 nt, Synthetic Construct
  source 1..22: mol_type = other RNA
tgcagtgtttcctactttatgg

SEQ ID NO: 34882 - RNA, 22 nt, Synthetic Construct
  source 1..22: mol_type = other RNA
tgaggtagtaggttgtatagta

SEQ ID NO: 34883 - RNA, 22 nt, Synthetic Construct
  source 1..22: mol_type = other RNA
tgaggtagtaggttgtatagta

SEQ ID NO: 34884 - RNA, 24 nt, Synthetic Construct
  source 1..24: mol_type = other RNA
tgcaaacatccccgactggaagct

SEQ ID NO: 34885 - RNA, 21 nt, Synthetic Construct
  source 1..21: mol_type = other RNA
tgaggtagtagattgtataga

SEQ ID NO: 34886 - RNA, 21 nt, Synthetic Construct
  source 1..21: mol_type = other RNA
tgaggtagtagattgtataga

SEQ ID NO: 34887 - RNA, 21 nt, Synthetic Construct
  source 1..21: mol_type = other RNA
aggttccggataagtaagagc

SEQ ID NO: 34888 - RNA, 18 nt, Synthetic Construct
  source 1..18: mol_type = other RNA
cttggggttgtaggacca

SEQ ID NO: 34889 - RNA, 18 nt, Synthetic Construct
  source 1..18: mol_type = other RNA
cttggggttgtaggacca

SEQ ID NO: 34890 - RNA, 21 nt, Synthetic Construct
  source 1..21: mol_type = other RNA
tatgtctgctgaccatcacct

SEQ ID NO: 34891 - RNA, 22 nt, Synthetic Construct
  source 1..22: mol_type = other RNA
tattgcaattgtcccggcctgt

SEQ ID NO: 34892 - RNA, 16 nt, Synthetic Construct
  source 1..16: mol_type = other RNA
cgactcttagcggtgg

SEQ ID NO: 34893 - RNA, 31 nt, Synthetic Construct; identical to SEQ ID NO: 2293
  source 1..31: mol_type = other RNA

SEQ ID NO: 34894 - RNA, 31 nt, Synthetic Construct; identical to SEQ ID NO: 2293
  source 1..31: mol_type = other RNA

SEQ ID NO: 34895 - RNA, 23 nt, Synthetic Construct
  source 1..23: mol_type = other RNA
caaagaattctccttttgggctt

SEQ ID NO: 34896 - RNA, 23 nt, Synthetic Construct
  source 1..23: mol_type = other RNA
tccagcatcagtgattttgttga

SEQ ID NO: 34897 - RNA, 32 nt, Synthetic Construct; identical to SEQ ID NO: 3092
  source 1..32: mol_type = other RNA

SEQ ID NO: 34898 - RNA, 22 nt, Synthetic Construct
  source 1..22: mol_type = other RNA
tattgcatttgtcccggcctgt

SEQ ID NO: 34899 - RNA, 22 nt, Synthetic Construct
  source 1..22: mol_type = other RNA
tattgcatttgtcccggcctgt

SEQ ID NO: 34900 - RNA, 22 nt, Synthetic Construct
  source 1..22: mol_type = other RNA
tgaggcagtaggttgtgtggtt

SEQ ID NO: 34901 - RNA, 21 nt, Synthetic Construct
  source 1..21: mol_type = other RNA
tgaggggcagagagcgagaca

SEQ ID NO: 34902 - RNA, 21 nt, Synthetic Construct
  source 1..21: mol_type = other RNA
tgaggggcagagagcgagaca

SEQ ID NO: 34903 - RNA, 20 nt, Synthetic Construct
  source 1..20: mol_type = other RNA
ctgacctatgaattgacagc

SEQ ID NO: 34904 - RNA, 25 nt, Synthetic Construct
  source 1..25: mol_type = other RNA
aaaagctgggttgagagggcgaatt

SEQ ID NO: 34905 - RNA, 25 nt, Synthetic Construct
  source 1..25: mol_type = other RNA
aaaagctgggttgagagggcgaatt

SEQ ID NO: 34906 - RNA, 23 nt, Synthetic Construct
  source 1..23: mol_type = other RNA
ttcaagtaatccaggataggctt

SEQ ID NO: 34907 - RNA, 23 nt, Synthetic Construct
  source 1..23: mol_type = other RNA
tgagaactgaattccatgggttt

SEQ ID NO: 34908 - RNA, 21 nt, Synthetic Construct
  source 1..21: mol_type = other RNA
tcctgtactgagctgccccaa

SEQ ID NO: 34909 - RNA, 21 nt, Synthetic Construct
  source 1..21: mol_type = other RNA
tcctgtactgagctgccccaa

SEQ ID NO: 34910 - RNA, 27 nt, Synthetic Construct
  source 1..27: mol_type = other RNA
ccccctactgctaaatttgactggctt

SEQ ID NO: 34911 - RNA, 22 nt, Synthetic Construct
  source 1..22: mol_type = other RNA
tcgtaccgtgagtaataacgcg

SEQ ID NO: 34912 - RNA, 19 nt, Synthetic Construct
  source 1..19: mol_type = other RNA
tccctgttcgggcgccatt

SEQ ID NO: 34913 - RNA, 19 nt, Synthetic Construct
  source 1..19: mol_type = other RNA
tccctgttcgggcgccatt

SEQ ID NO: 34914 - RNA, 18 nt, Synthetic Construct
  source 1..18: mol_type = other RNA
gaagttgaccgcctgggg

SEQ ID NO: 34915 - RNA, 22 nt, Synthetic Construct
  source 1..22: mol_type = other RNA
tagcagcacataaatattggcg

SEQ ID NO: 34916 - RNA, 35 nt, Synthetic Construct; identical to SEQ ID NO: 737
  source 1..35: mol_type = other RNA

SEQ ID NO: 34917 - RNA, 35 nt, Synthetic Construct; identical to SEQ ID NO: 737
  source 1..35: mol_type = other RNA

SEQ ID NO: 34918 - RNA, 21 nt, Synthetic Construct
  source 1..21: mol_type = other RNA
tggaatgtaaagaagtatgta

SEQ ID NO: 34919 - RNA, 21 nt, Synthetic Construct
  source 1..21: mol_type = other RNA
tggaatgtaaagaagtatgta

SEQ ID NO: 34920 - RNA, 22 nt, Synthetic Construct
  source 1..22: mol_type = other RNA
tgaggtagtaggttatgtggtt

SEQ ID NO: 34921 - RNA, 17 nt, Synthetic Construct
  source 1..17: mol_type = other RNA
ccagtaaacggcggccg

SEQ ID NO: 34922 - RNA, 18 nt, Synthetic Construct
  source 1..18: mol_type = other RNA
ggttcgattccggagagg

SEQ ID NO: 34923 - RNA, 18 nt, Synthetic Construct
  source 1..18: mol_type = other RNA
ggttcgattccggagagg

SEQ ID NO: 34924 - RNA, 22 nt, Synthetic Construct
  source 1..22: mol_type = other RNA
tgaggtagtagtatgtgctgtt

SEQ ID NO: 34925 - RNA, 22 nt, Synthetic Construct
  source 1..22: mol_type = other RNA
tgaggtagtagtatgtgctgtt

SEQ ID NO: 34926 - RNA, 36 nt, Synthetic Construct; identical to SEQ ID NO: 10333
  source 1..36: mol_type = other RNA

SEQ ID NO: 34927 - RNA, 22 nt, Synthetic Construct
  source 1..22: mol_type = other RNA
tgaggtagtagtctgtgctgtt

SEQ ID NO: 34928 - RNA, 22 nt, Synthetic Construct
  source 1..22: mol_type = other RNA
tgaggtagtagtctgtgctgtt

SEQ ID NO: 34929 - RNA, 22 nt, Synthetic Construct
  source 1..22: mol_type = other RNA
tattgtacttgtcccggcctgt

SEQ ID NO: 34930 - RNA, 22 nt, Synthetic Construct
  source 1..22: mol_type = other RNA
caacggaatcccaaaagcagct

SEQ ID NO: 34931 - RNA, 21 nt, Synthetic Construct
  source 1..21: mol_type = other RNA
tcctatactgagctgccccga

SEQ ID NO: 34932 - RNA, 22 nt, Synthetic Construct
  source 1..22: mol_type = other RNA
tactagactgaagctccttgag

SEQ ID NO: 34933 - RNA, 23 nt, Synthetic Construct
  source 1..23: mol_type = other RNA
tgaagggcagagagcgagacttt

SEQ ID NO: 34934 - RNA, 23 nt, Synthetic Construct
  source 1..23: mol_type = other RNA
ggctacattgtctgctgggtttc

SEQ ID NO: 34935 - RNA, 23 nt, Synthetic Construct
  source 1..23: mol_type = other RNA
tgataatacgacgtacttagtgt

SEQ ID NO: 34936 - RNA, 22 nt, Synthetic Construct
  source 1..22: mol_type = other RNA
tgaagtagtaggttgtgtggtt

SEQ ID NO: 34937 - RNA, 20 nt, Synthetic Construct
  source 1..20: mol_type = other RNA
acctgtactgagctgccccg

SEQ ID NO: 34938 - RNA, 20 nt, Synthetic Construct
  source 1..20: mol_type = other RNA
acctgtactgagctgccccg

SEQ ID NO: 34939 - RNA, 18 nt, Synthetic Construct
  source 1..18: mol_type = other RNA
atggccgttcttagttgg

SEQ ID NO: 34940 - RNA, 24 nt, Synthetic Construct
  source 1..24: mol_type = other RNA
agcagcattgtacagggctatgat

SEQ ID NO: 34941 - RNA, 22 nt, Synthetic Construct
  source 1..22: mol_type = other RNA
taactccttaagcgaacctcgc

SEQ ID NO: 34942 - RNA, 22 nt, Synthetic Construct
  source 1..22: mol_type = other RNA
taaggtagtagattgtatagtt

SEQ ID NO: 34943 - RNA, 22 nt, Synthetic Construct
  source 1..22: mol_type = other RNA
taaggtagtagattgtatagtt

SEQ ID NO: 34944 - RNA, 24 nt, Synthetic Construct
  source 1..24: mol_type = other RNA
tcctgtactgagctgccccgagat

SEQ ID NO: 34945 - RNA, 23 nt, Synthetic Construct
  source 1..23: mol_type = other RNA
tgaggggcagagagcgagactat

SEQ ID NO: 34946 - RNA, 16 nt, Synthetic Construct
  source 1..16: mol_type = other RNA
gtctacggccacacca

SEQ ID NO: 34947 - RNA, 22 nt, Synthetic Construct
  source 1..22: mol_type = other RNA
tcgtaccatgagtaataatgcg

SEQ ID NO: 34948 - RNA, 23 nt, Synthetic Construct
  source 1..23: mol_type = other RNA
tacagtactgtgataactgaaga

SEQ ID NO: 34949 - RNA, 23 nt, Synthetic Construct
  source 1..23: mol_type = other RNA
tacagtactgtgataactgaaga

SEQ ID NO: 34950 - RNA, 16 nt, Synthetic Construct
  source 1..16: mol_type = other RNA
gtctatggccatacca

SEQ ID NO: 34951 - RNA, 24 nt, Synthetic Construct
  source 1..24: mol_type = other RNA
cgactcttagcggtggatcactcg

SEQ ID NO: 34952 - RNA, 21 nt, Synthetic Construct
  source 1..21: mol_type = other RNA
agggctgggtcggtcgggctg

SEQ ID NO: 34953 - RNA, 21 nt, Synthetic Construct
  source 1..21: mol_type = other RNA
agggctgggtcggtcgggctg

SEQ ID NO: 34954 - RNA, 21 nt, Synthetic Construct
  source 1..21: mol_type = other RNA
ngaggtagtaggttgtgtggt

SEQ ID NO: 34955 - RNA, 21 nt, Synthetic Construct
  source 1..21: mol_type = other RNA
ngaggtagtaggttgtgtggt

SEQ ID NO: 34956 - RNA, 22 nt, Synthetic Construct
  source 1..22: mol_type = other RNA
tggcagcacgtaaatattggcg

SEQ ID NO: 34957 - RNA, 22 nt, Synthetic Construct
  source 1..22: mol_type = other RNA
tggcagcacgtaaatattggcg

SEQ ID NO: 34958 - RNA, 21 nt, Synthetic Construct
  source 1..21: mol_type = other RNA
tcctgtactgagctgcctcga

SEQ ID NO: 34959 - RNA, 21 nt, Synthetic Construct
  source 1..21: mol_type = other RNA
tcctgtactgagctgcctcga

SEQ ID NO: 34960 - RNA, 22 nt, Synthetic Construct
  source 1..22: mol_type = other RNA
tcaagagcaataacgaaaaatg

SEQ ID NO: 34961 - RNA, 22 nt, Synthetic Construct
  source 1..22: mol_type = other RNA
tcacacagaaatcgcacccgtc

SEQ ID NO: 34962 - RNA, 22 nt, Synthetic Construct
  source 1..22: mol_type = other RNA
tgtggtagtaggttgtatagtt

SEQ ID NO: 34963 - RNA, 22 nt, Synthetic Construct
  source 1..22: mol_type = other RNA
tgtggtagtaggttgtatagtt

SEQ ID NO: 34964 - RNA, 23 nt, Synthetic Construct
  source 1..23: mol_type = other RNA
ttcaagtaattcaggataggtta

SEQ ID NO: 34965 - RNA, 22 nt, Synthetic Construct
  source 1..22: mol_type = other RNA
tgggatgagggattgaagtgga

SEQ ID NO: 34966 - RNA, 22 nt, Synthetic Construct
  source 1..22: mol_type = other RNA
tacgtcatcgttgtcatcgtca

SEQ ID NO: 34967 - RNA, 22 nt, Synthetic Construct
  source 1..22: mol_type = other RNA
tacgtcatcgttgtcatcgtca

SEQ ID NO: 34968 - RNA, 23 nt, Synthetic Construct
  source 1..23: mol_type = other RNA
tgagaactgaattccatgggttg

SEQ ID NO: 34969 - RNA, 23 nt, Synthetic Construct
  source 1..23: mol_type = other RNA
tcagtgcatcacagaactttgtt

SEQ ID NO: 34970 - RNA, 23 nt, Synthetic Construct
  source 1..23: mol_type = other RNA
tcagtgcatcacagaactttgtt

SEQ ID NO: 34971 - RNA, 23 nt, Synthetic Construct
  source 1..23: mol_type = other RNA
tggtaatacgacgtacctagtgt

SEQ ID NO: 34972 - RNA, 23 nt, Synthetic Construct
  source 1..23: mol_type = other RNA
tggtaatacgacgtacctagtgt

SEQ ID NO: 34973 - RNA, 19 nt, Synthetic Construct
  source 1..19: mol_type = other RNA
cgactcttagcggtggatc

SEQ ID NO: 34974 - RNA, 19 nt, Synthetic Construct
  source 1..19: mol_type = other RNA
cgactcttagcggtggatc

SEQ ID NO: 34975 - RNA, 18 nt, Synthetic Construct
  source 1..18: mol_type = other RNA
cataaagtagaaagcact

SEQ ID NO: 34976 - RNA, 31 nt, Synthetic Construct; identical to SEQ ID NO: 6001
  source 1..31: mol_type = other RNA

SEQ ID NO: 34977 - RNA, 31 nt, Synthetic Construct; identical to SEQ ID NO: 6001
  source 1..31: mol_type = other RNA

SEQ ID NO: 34978 - RNA, 35 nt, Synthetic Construct
  source 1..35: mol_type = other RNA
cattggtcgtggttgtagtccgtgcgagaatacca

SEQ ID NO: 34979 - RNA, 27 nt, Synthetic Construct
  source 1..27: mol_type = other RNA
ccccccactgccaaatttgactggctt

SEQ ID NO: 34980 - RNA, 16 nt, Synthetic Construct
  source 1..16: mol_type = other RNA
gtctacggccatgcca

SEQ ID NO: 34981 - RNA, 22 nt, Synthetic Construct
  source 1..22: mol_type = other RNA
tgaggtagtgggttgtatagtt

SEQ ID NO: 34982 - RNA, 22 nt, Synthetic Construct
  source 1..22: mol_type = other RNA
tgaggtagtgggttgtatagtt

SEQ ID NO: 34983 - RNA, 16 nt, Synthetic Construct
  source 1..16: mol_type = other RNA
gcctacggccatacca

SEQ ID NO: 34984 - RNA, 16 nt, Synthetic Construct
  source 1..16: mol_type = other RNA
gcctacggccatacca

SEQ ID NO: 34985 - RNA, 22 nt, Synthetic Construct
  source 1..22: mol_type = other RNA
tgaggtagtaggttgtatagtg

SEQ ID NO: 34986 - RNA, 22 nt, Synthetic Construct
  source 1..22: mol_type = other RNA
tgaggtagtaggttgtggggtt

SEQ ID NO: 34987 - RNA, 22 nt, Synthetic Construct
  source 1..22: mol_type = other RNA
tgaggtagtaggttgtggggtt

SEQ ID NO: 34988 - RNA, 19 nt, Synthetic Construct
  source 1..19: mol_type = other RNA
cagcactctgcaaagacga

SEQ ID NO: 34989 - RNA, 22 nt, Synthetic Construct
  source 1..22: mol_type = other RNA
tcggatccgtctgagcttggct

SEQ ID NO: 34990 - RNA, 22 nt, Synthetic Construct
  source 1..22: mol_type = other RNA
tcggatccgtctgagcttggct

SEQ ID NO: 34991 - RNA, 22 nt, Synthetic Construct
  source 1..22: mol_type = other RNA
tacccattgcatatcggagttg

SEQ ID NO: 34992 - RNA, 22 nt, Synthetic Construct
  source 1..22: mol_type = other RNA
tacccattgcatatcggagttg

SEQ ID NO: 34993 - RNA, 22 nt, Synthetic Construct
  source 1..22: mol_type = other RNA
tgaggtagtaggttgtgtggat

SEQ ID NO: 34994 - RNA, 22 nt, Synthetic Construct
  source 1..22: mol_type = other RNA
tgaggtagtaggttgtgtggat

SEQ ID NO: 34995 - RNA, 15 nt, Synthetic Construct
  source 1..15: mol_type = other RNA
tgcctcagcgtcggt

SEQ ID NO: 34996 - RNA, 15 nt, Synthetic Construct
  source 1..15: mol_type = other RNA
tgcctcagcgtcggt

SEQ ID NO: 34997 - RNA, 23 nt, Synthetic Construct
  source 1..23: mol_type = other RNA
tgaggggcagagagtgagacttt

SEQ ID NO: 34998 - RNA, 17 nt, Synthetic Construct
  source 1..17: mol_type = other RNA
ggctggtccgatggtag

SEQ ID NO: 34999 - RNA, 22 nt, Synthetic Construct
  source 1..22: mol_type = other RNA
ccctgtactgagctgccccgag

SEQ ID NO: 35000 - RNA, 22 nt, Synthetic Construct
  source 1..22: mol_type = other RNA
ccctgtactgagctgccccgag

SEQ ID NO: 35001 - RNA, 24 nt, Synthetic Construct
  source 1..24: mol_type = other RNA
tcccacatggtctagcggttagga

SEQ ID NO: 35002 - RNA, 25 nt, Synthetic Construct
  source 1..25: mol_type = other RNA
ggtaaaatcgctgagtgaagcattg

SEQ ID NO: 35003 - RNA, 21 nt, Synthetic Construct
  source 1..21: mol_type = other RNA
tggggtagtaggttgtgtggt

SEQ ID NO: 35004 - RNA, 17 nt, Synthetic Construct
  source 1..17: mol_type = other RNA
atgcaagtcgaacggta

SEQ ID NO: 35005 - RNA, 31 nt, Synthetic Construct; identical to SEQ ID NO: 2507
  source 1..31: mol_type = other RNA

SEQ ID NO: 35006 - RNA, 21 nt, Synthetic Construct
  source 1..21: mol_type = other RNA
tttggcactagcacatttttg

SEQ ID NO: 35007 - RNA, 21 nt, Synthetic Construct
  source 1..21: mol_type = other RNA
tttggcactagcacatttttg

SEQ ID NO: 35008 - RNA, 23 nt, Synthetic Construct
  source 1..23: mol_type = other RNA
tgtgcaaatctatgcaaaactga

SEQ ID NO: 35009 - RNA, 23 nt, Synthetic Construct
  source 1..23: mol_type = other RNA
ggcagcattgtacagggctatgt

SEQ ID NO: 35010 - RNA, 21 nt, Synthetic Construct
  source 1..21: mol_type = other RNA
tgaggtagtagatcgtatagt

SEQ ID NO: 35011 - RNA, 22 nt, Synthetic Construct
  source 1..22: mol_type = other RNA
tgaggtagtaggttgtgtggtg

SEQ ID NO: 35012 - RNA, 36 nt, Synthetic Construct; identical to SEQ ID NO: 10982
  source 1..36: mol_type = other RNA

SEQ ID NO: 35013 - RNA, 21 nt, Synthetic Construct
  source 1..21: mol_type = other RNA
agcaggacggtggccatggaa

SEQ ID NO: 35014 - RNA, 21 nt, Synthetic Construct
  source 1..21: mol_type = other RNA
agcaggacggtggccatggaa

SEQ ID NO: 35015 - RNA, 23 nt, Synthetic Construct
  source 1..23: mol_type = other RNA
tcatgtactgagctgccccgaga

SEQ ID NO: 35016 - RNA, 23 nt, Synthetic Construct
  source 1..23: mol_type = other RNA
tcatgtactgagctgccccgaga

SEQ ID NO: 35017 - RNA, 22 nt, Synthetic Construct
  source 1..22: mol_type = other RNA
tgaggtagtgggttgtatagtt

SEQ ID NO: 35018 - RNA, 35 nt, Synthetic Construct; identical to SEQ ID NO: 2354
  source 1..35: mol_type = other RNA

SEQ ID NO: 35019 - RNA, 35 nt, Synthetic Construct; identical to SEQ ID NO: 2354
  source 1..35: mol_type = other RNA

SEQ ID NO: 35020 - RNA, 20 nt, Synthetic Construct
  source 1..20: mol_type = other RNA
aaaagctgggttgagaggga

SEQ ID NO: 35021 - RNA, 20 nt, Synthetic Construct
  source 1..20: mol_type = other RNA
aaaagctgggttgagaggga

SEQ ID NO: 35022 - RNA, 21 nt, Synthetic Construct
  source 1..21: mol_type = other RNA
tgaggtagtagcttgtgctgt

SEQ ID NO: 35023 - RNA, 21 nt, Synthetic Construct
  source 1..21: mol_type = other RNA
tgaggtagtagcttgtgctgt

SEQ ID NO: 35024 - RNA, 23 nt, Synthetic Construct
  source 1..23: mol_type = other RNA
tgtcagtttgccaaataccccaa

SEQ ID NO: 35025 - RNA, 28 nt, Synthetic Construct
  source 1..28: mol_type = other RNA
ccccccgctgctaaatttgactggcttt

SEQ ID NO: 35026 - RNA, 23 nt, Synthetic Construct
  source 1..23: mol_type = other RNA
gactatagaactttccccctcat

SEQ ID NO: 35027 - RNA, 23 nt, Synthetic Construct
  source 1..23: mol_type = other RNA
gactatagaactttccccctcat

SEQ ID NO: 35028 - RNA, 23 nt, Synthetic Construct
  source 1..23: mol_type = other RNA
tcctgtactgggctgccccgaga

SEQ ID NO: 35029 - RNA, 25 nt, Synthetic Construct
  source 1..25: mol_type = other RNA
ttgaggatacgagatcgagacgaca

SEQ ID NO: 35030 - RNA, 19 nt, Synthetic Construct
  source 1..19: mol_type = other RNA
tgtcaactggttgttggga

SEQ ID NO: 35031 - RNA, 22 nt, Synthetic Construct
  source 1..22: mol_type = other RNA
tatcggaacgtgcccagtcgtg

SEQ ID NO: 35032 - RNA, 22 nt, Synthetic Construct
  source 1..22: mol_type = other RNA
tatcggaacgtgcccagtcgtg

SEQ ID NO: 35033 - RNA, 35 nt, Synthetic Construct; identical to SEQ ID NO: 2397
  source 1..35: mol_type = other RNA

SEQ ID NO: 35034 - RNA, 35 nt, Synthetic Construct; identical to SEQ ID NO: 2397
  source 1..35: mol_type = other RNA

SEQ ID NO: 35035 - RNA, 23 nt, Synthetic Construct
  source 1..23: mol_type = other RNA
tgaggtagtaggttgtgtggtta

SEQ ID NO: 35036 - RNA, 23 nt, Synthetic Construct
  source 1..23: mol_type = other RNA
tgaggtagtaggttgtgtggtta

SEQ ID NO: 35037 - RNA, 16 nt, Synthetic Construct
  source 1..16: mol_type = other RNA
cccgtcgctactaccg

SEQ ID NO: 35038 - RNA, 16 nt, Synthetic Construct
  source 1..16: mol_type = other RNA
cccgtcgctactaccg

SEQ ID NO: 35039 - RNA, 22 nt, Synthetic Construct
  source 1..22: mol_type = other RNA
caacggaatcccaaaagcagct

SEQ ID NO: 35040 - RNA, 22 nt, Synthetic Construct
  source 1..22: mol_type = other RNA
caacggaatcccaaaagcagct

SEQ ID NO: 35041 - RNA, 30 nt, Synthetic Construct; identical to SEQ ID NO: 1220
  source 1..30: mol_type = other RNA

SEQ ID NO: 35042 - RNA, 30 nt, Synthetic Construct; identical to SEQ ID NO: 1220
  source 1..30: mol_type = other RNA

SEQ ID NO: 35043 - RNA, 23 nt, Synthetic Construct
  source 1..23: mol_type = other RNA
ggctcggtctgaggcccctcagt

SEQ ID NO: 35044 - RNA, 24 nt, Synthetic Construct
  source 1..24: mol_type = other RNA
tgtagacatccccgactggaagct

SEQ ID NO: 35045 - RNA, 24 nt, Synthetic Construct
  source 1..24: mol_type = other RNA
tgtagacatccccgactggaagct

SEQ ID NO: 35046 - RNA, 42 nt, Synthetic Construct; identical to SEQ ID NO: 8009
  source 1..42: mol_type = other RNA

SEQ ID NO: 35047 - RNA, 42 nt, Synthetic Construct; identical to SEQ ID NO: 8009
  source 1..42: mol_type = other RNA

SEQ ID NO: 35048 - RNA, 22 nt, Synthetic Construct
  source 1..22: mol_type = other RNA
ctagcaccatttgaaatcagtg

SEQ ID NO: 35049 - RNA, 23 nt, Synthetic Construct
  source 1..23: mol_type = other RNA
caaagaattctccttttgggctt

SEQ ID NO: 35050 - RNA, 22 nt, Synthetic Construct
  source 1..22: mol_type = other RNA
aattgcacggtatccatctgta

SEQ ID NO: 35051 - RNA, 22 nt, Synthetic Construct
  source 1..22: mol_type = other RNA
aattgcacggtatccatctgta

SEQ ID NO: 35052 - RNA, 22 nt, Synthetic Construct
  source 1..22: mol_type = other RNA
taccctgtagaaccgaatttgt

SEQ ID NO: 35053 - RNA, 22 nt, Synthetic Construct
  source 1..22: mol_type = other RNA
taccctgtagaaccgaatttgt

SEQ ID NO: 35054 - RNA, 22 nt, Synthetic Construct
  source 1..22: mol_type = other RNA
tattgcacttgttccggcctgt

SEQ ID NO: 35055 - RNA, 22 nt, Synthetic Construct
  source 1..22: mol_type = other RNA
tattgcacttgttccggcctgt

SEQ ID NO: 35056 - RNA, 23 nt, Synthetic Construct
  source 1..23: mol_type = other RNA
tgaggtagtaggctgtgtggttt

SEQ ID NO: 35057 - RNA, 23 nt, Synthetic Construct
  source 1..23: mol_type = other RNA
tgaggtagtaggctgtgtggttt

SEQ ID NO: 35058 - RNA, 23 nt, Synthetic Construct
  source 1..23: mol_type = other RNA
tgaggtagcaggttgtgtggttt

SEQ ID NO: 35059 - RNA, 23 nt, Synthetic Construct
  source 1..23: mol_type = other RNA
tgaggtagcaggttgtgtggttt

SEQ ID NO: 35060 - RNA, 23 nt, Synthetic Construct
  source 1..23: mol_type = other RNA
tagcaccatttgaaatcagtgtt

SEQ ID NO: 35061 - RNA, 23 nt, Synthetic Construct
  source 1..23: mol_type = other RNA
tagcaccatttgaaatcagtgtt

SEQ ID NO: 35062 - RNA, 23 nt, Synthetic Construct
  source 1..23: mol_type = other RNA
cggtaatacgacgtacttagtgt

SEQ ID NO: 35063 - RNA, 23 nt, Synthetic Construct
  source 1..23: mol_type = other RNA
cggtaatacgacgtacttagtgt

SEQ ID NO: 35064 - RNA, 22 nt, Synthetic Construct
  source 1..22: mol_type = other RNA
tgtcagtttgtcaaatacacca

SEQ ID NO: 35065 - RNA, 26 nt, Synthetic Construct
  source 1..26: mol_type = other RNA
gatgcgtggtaggagagcgttctgta

SEQ ID NO: 35066 - RNA, 23 nt, Synthetic Construct
  source 1..23: mol_type = other RNA
tcagtgcatgacagaacttgggt

SEQ ID NO: 35067 - RNA, 28 nt, Synthetic Construct
  source 1..28: mol_type = other RNA
cccccccactgctaaatttgactggctt

SEQ ID NO: 35068 - RNA, 28 nt, Synthetic Construct
  source 1..28: mol_type = other RNA
cccccccactgctaaatttgactggctt

SEQ ID NO: 35069 - RNA, 22 nt, Synthetic Construct
  source 1..22: mol_type = other RNA
taactccttaagcgaatctcgc

SEQ ID NO: 35070 - RNA, 22 nt, Synthetic Construct
  source 1..22: mol_type = other RNA
taactccttaagcgaatctcgc

SEQ ID NO: 35071 - RNA, 23 nt, Synthetic Construct
  source 1..23: mol_type = other RNA
tgaggtagtaggttgtgtggctt

SEQ ID NO: 35072 - RNA, 23 nt, Synthetic Construct
  source 1..23: mol_type = other RNA
tgaggtagtaggttgtgtggctt

SEQ ID NO: 35073 - RNA, 21 nt, Synthetic Construct
  source 1..21: mol_type = other RNA
tgtcagtttgtcaaatacccc

SEQ ID NO: 35074 - RNA, 21 nt, Synthetic Construct
  source 1..21: mol_type = other RNA
tcctgtactgagccgccccga

SEQ ID NO: 35075 - RNA, 21 nt, Synthetic Construct
  source 1..21: mol_type = other RNA
tgaggtagcagattgtatagt

SEQ ID NO: 35076 - RNA, 21 nt, Synthetic Construct
  source 1..21: mol_type = other RNA
tgaggtagcagattgtatagt

SEQ ID NO: 35077 - RNA, 31 nt, Synthetic Construct; identical to SEQ ID NO: 15910
  source 1..31: mol_type = other RNA

SEQ ID NO: 35078 - RNA, 22 nt, Synthetic Construct
  source 1..22: mol_type = other RNA
tattgtacttgtcccggcctgt

SEQ ID NO: 35079 - RNA, 25 nt, Synthetic Construct
  source 1..25: mol_type = other RNA
ttgaggatatgagatcgagacgaca

SEQ ID NO: 35080 - RNA, 22 nt, Synthetic Construct
  source 1..22: mol_type = other RNA
tattgcacttgtcccggtctgt

SEQ ID NO: 35081 - RNA, 20 nt, Synthetic Construct
  source 1..20: mol_type = other RNA
tacagtatagatgatgtact

SEQ ID NO: 35082 - RNA, 22 nt, Synthetic Construct
  source 1..22: mol_type = other RNA
cgtaccgtgagtaataatgcgt

SEQ ID NO: 35083 - RNA, 21 nt, Synthetic Construct
  source 1..21: mol_type = other RNA
cgaggtagtaggttgtgtggt

SEQ ID NO: 35084 - RNA, 21 nt, Synthetic Construct
  source 1..21: mol_type = other RNA
cataaagtagaaagcactact

SEQ ID NO: 35085 - RNA, 21 nt, Synthetic Construct
  source 1..21: mol_type = other RNA
cataaagtagaaagcactact

SEQ ID NO: 35086 - RNA, 23 nt, Synthetic Construct
  source 1..23: mol_type = other RNA
acagtagtctgcacattggttaa

SEQ ID NO: 35087 - RNA, 34 nt, Synthetic Construct; identical to SEQ ID NO: 1111
  source 1..34: mol_type = other RNA

SEQ ID NO: 35088 - RNA, 16 nt, Synthetic Construct
  source 1..16: mol_type = other RNA
gaacgtgagctgggtt

SEQ ID NO: 35089 - RNA, 16 nt, Synthetic Construct
  source 1..16: mol_type = other RNA
gaacgtgagctgggtt

SEQ ID NO: 35090 - RNA, 21 nt, Synthetic Construct
  source 1..21: mol_type = other RNA
ggctggtccgaaggtagtgag

SEQ ID NO: 35091 - RNA, 21 nt, Synthetic Construct
  source 1..21: mol_type = other RNA
ggctggtccgaaggtagtgag

SEQ ID NO: 35092 - RNA, 22 nt, Synthetic Construct
  source 1..22: mol_type = other RNA
tggggtagtagtttgtgctgtt

SEQ ID NO: 35093 - RNA, 22 nt, Synthetic Construct
  source 1..22: mol_type = other RNA
tggggtagtagtttgtgctgtt

SEQ ID NO: 35094 - RNA, 22 nt, Synthetic Construct
  source 1..22: mol_type = other RNA
aattgcacggtatccatctgta

SEQ ID NO: 35095 - RNA, 26 nt, Synthetic Construct
  source 1..26: mol_type = other RNA
tgtccccgcgaggggcccggggcggg

SEQ ID NO: 35096 - RNA, 25 nt, Synthetic Construct
  source 1..25: mol_type = other RNA
ttgaggatatgagatcgagacgacg

SEQ ID NO: 35097 - RNA, 23 nt, Synthetic Construct
  source 1..23: mol_type = other RNA
tggagtgtgacaatggtgtttgg

SEQ ID NO: 35098 - RNA, 23 nt, Synthetic Construct
  source 1..23: mol_type = other RNA
tggagtgtgacaatggtgtttgg

SEQ ID NO: 35099 - RNA, 15 nt, Synthetic Construct
  source 1..15: mol_type = other RNA
gcagagcgtcggtct

SEQ ID NO: 35100 - RNA, 21 nt, Synthetic Construct
  source 1..21: mol_type = other RNA
tcctgtactgagttgccccga

SEQ ID NO: 35101 - RNA, 21 nt, Synthetic Construct
  source 1..21: mol_type = other RNA
tcctgtactgagttgccccga

SEQ ID NO: 35102 - RNA, 23 nt, Synthetic Construct
  source 1..23: mol_type = other RNA
tgaggtagtaggttgtatggtta

SEQ ID NO: 35103 - RNA, 23 nt, Synthetic Construct
  source 1..23: mol_type = other RNA
tgaggtagtaggttgtatggtta

SEQ ID NO: 35104 - RNA, 22 nt, Synthetic Construct
  source 1..22: mol_type = other RNA
actctttccctgttgcactact

SEQ ID NO: 35105 - RNA, 22 nt, Synthetic Construct
  source 1..22: mol_type = other RNA
actctttccctgttgcactact

SEQ ID NO: 35106 - RNA, 27 nt, Synthetic Construct
  source 1..27: mol_type = other RNA
ccccccgctgctaaatttgactggctt

SEQ ID NO: 35107 - RNA, 22 nt, Synthetic Construct
  source 1..22: mol_type = other RNA
tattgcacttgtcccggtctgt

SEQ ID NO: 35108 - RNA, 22 nt, Synthetic Construct
  source 1..22: mol_type = other RNA
tattgcacttgtcccggtctgt

SEQ ID NO: 35109 - RNA, 22 nt, Synthetic Construct
  source 1..22: mol_type = other RNA
tgagaactgaattccatgggtc

SEQ ID NO: 35110 - RNA, 22 nt, Synthetic Construct
  source 1..22: mol_type = other RNA
tgagaactgaattccatgggtc

SEQ ID NO: 35111 - RNA, 19 nt, Synthetic Construct
  source 1..19: mol_type = other RNA
tcagtagctcgaggaaaag

SEQ ID NO: 35112 - RNA, 26 nt, Synthetic Construct
  source 1..26: mol_type = other RNA
gagcagctaataccgcatacgacctg

SEQ ID NO: 35113 - RNA, 26 nt, Synthetic Construct
  source 1..26: mol_type = other RNA
gagcagctaataccgcatacgacctg

SEQ ID NO: 35114 - RNA, 23 nt, Synthetic Construct
  source 1..23: mol_type = other RNA
tcctgtaccgagctgccccgaga

SEQ ID NO: 35115 - RNA, 23 nt, Synthetic Construct
  source 1..23: mol_type = other RNA
tgaggaagtaggttgtgtggttt

SEQ ID NO: 35116 - RNA, 23 nt, Synthetic Construct
  source 1..23: mol_type = other RNA
tgaggaagtaggttgtgtggttt

SEQ ID NO: 35117 - RNA, 23 nt, Synthetic Construct
  source 1..23: mol_type = other RNA
tgtgcaaatctatgcaaaactga

SEQ ID NO: 35118 - RNA, 21 nt, Synthetic Construct
  source 1..21: mol_type = other RNA
aagacgggaggaaagaaggga

SEQ ID NO: 35119 - RNA, 18 nt, Synthetic Construct
  source 1..18: mol_type = other RNA
ggttcgattccggagagg

SEQ ID NO: 35120 - RNA, 18 nt, Synthetic Construct
  source 1..18: mol_type = other RNA
ggttcgattccggagagg

SEQ ID NO: 35121 - RNA, 33 nt, Synthetic Construct
  source 1..33: mol_type = other RNA
cgcgacctcagatcagacgtggcgacccgctga

SEQ ID NO: 35122 - RNA, 33 nt, Synthetic Construct; identical to SEQ ID NO: 35121
  source 1..33: mol_type = other RNA

SEQ ID NO: 35123 - RNA, 32 nt, Synthetic Construct; identical to SEQ ID NO: 1128
  source 1..32: mol_type = other RNA

SEQ ID NO: 35124 - RNA, 32 nt, Synthetic Construct; identical to SEQ ID NO: 1128
  source 1..32: mol_type = other RNA

SEQ ID NO: 35125 - RNA, 22 nt, Synthetic Construct
  source 1..22: mol_type = other RNA
tgaggtagtaggttgtggggtt

SEQ ID NO: 35126 - RNA, 21 nt, Synthetic Construct
  source 1..21: mol_type = other RNA
tcagtgcatcacagaactttg

SEQ ID NO: 35127 - RNA, 21 nt, Synthetic Construct
  source 1..21: mol_type = other RNA
tcagtgcatcacagaactttg

SEQ ID NO: 35128 - RNA, 21 nt, Synthetic Construct
  source 1..21: mol_type = other RNA
ctagaccgaagctccttgagg

SEQ ID NO: 35129 - RNA, 22 nt, Synthetic Construct
  source 1..22: mol_type = other RNA
tcagtgcatcacagaactttgt

SEQ ID NO: 35130 - RNA, 27 nt, Synthetic Construct
  source 1..27: mol_type = other RNA
ccccccactgctaaattcgactggctt

SEQ ID NO: 35131 - RNA, 34 nt, Synthetic Construct; identical to SEQ ID NO: 2317
  source 1..34: mol_type = other RNA

SEQ ID NO: 35132 - RNA, 32 nt, Synthetic Construct; identical to SEQ ID NO: 8371
  source 1..32: mol_type = other RNA

SEQ ID NO: 35133 - RNA, 32 nt, Synthetic Construct; identical to SEQ ID NO: 8371
  source 1..32: mol_type = other RNA

SEQ ID NO: 35134 - RNA, 22 nt, Synthetic Construct
  source 1..22: mol_type = other RNA
tgaggtagtaggttgtgtgatt

SEQ ID NO: 35135 - RNA, 22 nt, Synthetic Construct
  source 1..22: mol_type = other RNA
tgaggtagtaggttgtgtgatt

SEQ ID NO: 35136 - RNA, 21 nt, Synthetic Construct
  source 1..21: mol_type = other RNA
ggaggtagtagtttgtgctgt

SEQ ID NO: 35137 - RNA, 23 nt, Synthetic Construct
  source 1..23: mol_type = other RNA
agggctgggtcggtcgggctggg

SEQ ID NO: 35138 - RNA, 23 nt, Synthetic Construct
  source 1..23: mol_type = other RNA
agggctgggtcggtcgggctggg

SEQ ID NO: 35139 - RNA, 23 nt, Synthetic Construct
  source 1..23: mol_type = other RNA
aatgacacgatcactcccgttga

SEQ ID NO: 35140 - RNA, 23 nt, Synthetic Construct
  source 1..23: mol_type = other RNA
aatgacacgatcactcccgttga

SEQ ID NO: 35141 - RNA, 22 nt, Synthetic Construct
  source 1..22: mol_type = other RNA
tccttcattccaccggagtctg

SEQ ID NO: 35142 - RNA, 22 nt, Synthetic Construct
  source 1..22: mol_type = other RNA
tccttcattccaccggagtctg

SEQ ID NO: 35143 - RNA, 17 nt, Synthetic Construct
  source 1..17: mol_type = other RNA
tggccgttcttagttgg

SEQ ID NO: 35144 - RNA, 17 nt, Synthetic Construct
  source 1..17: mol_type = other RNA
tggccgttcttagttgg

SEQ ID NO: 35145 - RNA, 23 nt, Synthetic Construct
  source 1..23: mol_type = other RNA
cgaatgttgctcggtgaacccct

SEQ ID NO: 35146 - RNA, 23 nt, Synthetic Construct
  source 1..23: mol_type = other RNA
cgaatgttgctcggtgaacccct

SEQ ID NO: 35147 - RNA, 30 nt, Synthetic Construct; identical to SEQ ID NO: 1641
  source 1..30: mol_type = other RNA

SEQ ID NO: 35148 - RNA, 30 nt, Synthetic Construct; identical to SEQ ID NO: 1641
  source 1..30: mol_type = other RNA

SEQ ID NO: 35149 - RNA, 23 nt, Synthetic Construct
  source 1..23: mol_type = other RNA
agctacattgtctgctgggttcc

SEQ ID NO: 35150 - RNA, 23 nt, Synthetic Construct
  source 1..23: mol_type = other RNA
agctacattgtctgctgggttcc

SEQ ID NO: 35151 - RNA, 27 nt, Synthetic Construct
  source 1..27: mol_type = other RNA
cggtataccgaagctctaggtgcggca

SEQ ID NO: 35152 - RNA, 27 nt, Synthetic Construct
  source 1..27: mol_type = other RNA
cggtataccgaagctctaggtgcggca

SEQ ID NO: 35153 - RNA, 22 nt, Synthetic Construct
  source 1..22: mol_type = other RNA
tagcagcacataatggtttgtg

SEQ ID NO: 35154 - RNA, 22 nt, Synthetic Construct
  source 1..22: mol_type = other RNA
ctccctcgggagggcgcgcggg

SEQ ID NO: 35155 - RNA, 22 nt, Synthetic Construct
  source 1..22: mol_type = other RNA
tgaggtagtaggttatgtggtt

SEQ ID NO: 35156 - RNA, 16 nt, Synthetic Construct
  source 1..16: mol_type = other RNA
gtgacgcgcatgaatg

SEQ ID NO: 35157 - RNA, 16 nt, Synthetic Construct
  source 1..16: mol_type = other RNA
gtgacgcgcatgaatg

SEQ ID NO: 35158 - RNA, 22 nt, Synthetic Construct
  source 1..22: mol_type = other RNA
tggagtgtggcaatggtgtttg

SEQ ID NO: 35159 - RNA, 22 nt, Synthetic Construct
  source 1..22: mol_type = other RNA
tggagtgtggcaatggtgtttg

SEQ ID NO: 35160 - RNA, 21 nt, Synthetic Construct
  source 1..21: mol_type = other RNA
cgaggtagtaggttgtatagt

SEQ ID NO: 35161 - RNA, 21 nt, Synthetic Construct
  source 1..21: mol_type = other RNA
cgaggtagtaggttgtatagt

SEQ ID NO: 35162 - RNA, 20 nt, Synthetic Construct
  source 1..20: mol_type = other RNA
caaagaattctccttttggg

SEQ ID NO: 35163 - RNA, 20 nt, Synthetic Construct
  source 1..20: mol_type = other RNA
caaagaattctccttttggg

SEQ ID NO: 35164 - RNA, 27 nt, Synthetic Construct
  source 1..27: mol_type = other RNA
ccccccactgctaaatttgaccggctt

SEQ ID NO: 35165 - RNA, 22 nt, Synthetic Construct
  source 1..22: mol_type = other RNA
tgtcagtttgtcaaataccccg

SEQ ID NO: 35166 - RNA, 22 nt, Synthetic Construct
  source 1..22: mol_type = other RNA
taactccttgagcgaatctcgc

SEQ ID NO: 35167 - RNA, 23 nt, Synthetic Construct
  source 1..23: mol_type = other RNA
tgaggggcagagagcgagacctt

SEQ ID NO: 35168 - RNA, 23 nt, Synthetic Construct
  source 1..23: mol_type = other RNA
tgaggggcagagagcgagacctt

SEQ ID NO: 35169 - RNA, 27 nt, Synthetic Construct
  source 1..27: mol_type = other RNA
ccccccaccgctaaatttgactggctt

SEQ ID NO: 35170 - RNA, 27 nt, Synthetic Construct
  source 1..27: mol_type = other RNA
ccccccaccgctaaatttgactggctt

SEQ ID NO: 35171 - RNA, 19 nt, Synthetic Construct
  source 1..19: mol_type = other RNA
tctaatgagactgccggtg

SEQ ID NO: 35172 - RNA, 21 nt, Synthetic Construct
  source 1..21: mol_type = other RNA
cccaatacacggtcgacctct

SEQ ID NO: 35173 - RNA, 21 nt, Synthetic Construct
  source 1..21: mol_type = other RNA
cccaatacacggtcgacctct

SEQ ID NO: 35174 - RNA, 24 nt, Synthetic Construct
  source 1..24: mol_type = other RNA
gttgaattgtggtctgtggacgtg

SEQ ID NO: 35175 - RNA, 24 nt, Synthetic Construct
  source 1..24: mol_type = other RNA
gttgaattgtggtctgtggacgtg

SEQ ID NO: 35176 - RNA, 17 nt, Synthetic Construct
  source 1..17: mol_type = other RNA
tggccgttcttagttgg

SEQ ID NO: 35177 - RNA, 23 nt, Synthetic Construct
  source 1..23: mol_type = other RNA
gggagccaggaagtattgatgtt

SEQ ID NO: 35178 - RNA, 23 nt, Synthetic Construct
  source 1..23: mol_type = other RNA
gggagccaggaagtattgatgtt

SEQ ID NO: 35179 - RNA, 24 nt, Synthetic Construct
  source 1..24: mol_type = other RNA
tgtaaacatccctgactggaagct

SEQ ID NO: 35180 - RNA, 24 nt, Synthetic Construct
  source 1..24: mol_type = other RNA
tgtaaacatccctgactggaagct

SEQ ID NO: 35181 - RNA, 23 nt, Synthetic Construct
  source 1..23: mol_type = other RNA
agaggggcagagagcgagacttt

SEQ ID NO: 35182 - RNA, 21 nt, Synthetic Construct
  source 1..21: mol_type = other RNA
cataattacttttggtacgcg

SEQ ID NO: 35183 - RNA, 16 nt, Synthetic Construct
  source 1..16: mol_type = other RNA
gtctacggccatgcca

SEQ ID NO: 35184 - RNA, 16 nt, Synthetic Construct
  source 1..16: mol_type = other RNA
gtctacggccatgcca

SEQ ID NO: 35185 - RNA, 20 nt, Synthetic Construct
  source 1..20: mol_type = other RNA
gtcagtttgtcaaatacccc

SEQ ID NO: 35186 - RNA, 20 nt, Synthetic Construct
  source 1..20: mol_type = other RNA
gtcagtttgtcaaatacccc

SEQ ID NO: 35187 - RNA, 15 nt, Synthetic Construct
  source 1..15: mol_type = other RNA
ggtcatcgtcaggct

SEQ ID NO: 35188 - RNA, 35 nt, Synthetic Construct; identical to SEQ ID NO: 12948
  source 1..35: mol_type = other RNA

SEQ ID NO: 35189 - RNA, 35 nt, Synthetic Construct; identical to SEQ ID NO: 12948
  source 1..35: mol_type = other RNA

SEQ ID NO: 35190 - RNA, 20 nt, Synthetic Construct
  source 1..20: mol_type = other RNA
gtcagtttgtcaaatacccc

SEQ ID NO: 35191 - RNA, 20 nt, Synthetic Construct
  source 1..20: mol_type = other RNA
tgaggtagtaggttatgtgg

SEQ ID NO: 35192 - RNA, 20 nt, Synthetic Construct
  source 1..20: mol_type = other RNA
tgaggtagtaggttatgtgg

SEQ ID NO: 35193 - RNA, 22 nt, Synthetic Construct
  source 1..22: mol_type = other RNA
tgtgcaaatccatgcaaaactg

SEQ ID NO: 35194 - RNA, 22 nt, Synthetic Construct
  source 1..22: mol_type = other RNA
taaggtagtaggttgtatagtt

SEQ ID NO: 35195 - RNA, 17 nt, Synthetic Construct
  source 1..17: mol_type = other RNA
cagtagctcgaggaaaa

SEQ ID NO: 35196 - RNA, 22 nt, Synthetic Construct
  source 1..22: mol_type = other RNA
tgaggtagtaggttgtatggta

SEQ ID NO: 35197 - RNA, 22 nt, Synthetic Construct
  source 1..22: mol_type = other RNA
tgaggtagtaggttgtatggta

SEQ ID NO: 35198 - RNA, 28 nt, Synthetic Construct
  source 1..28: mol_type = other RNA
cgactcttagcggtggatcactcggctc

SEQ ID NO: 35199 - RNA, 21 nt, Synthetic Construct
  source 1..21: mol_type = other RNA
tggagtgtgacaatggtgttc

SEQ ID NO: 35200 - RNA, 22 nt, Synthetic Construct
  source 1..22: mol_type = other RNA
tggagtgtgacaatggtgcttg

SEQ ID NO: 35201 - RNA, 23 nt, Synthetic Construct
  source 1..23: mol_type = other RNA
ggatatcatcatatactgtaagt

SEQ ID NO: 35202 - RNA, 23 nt, Synthetic Construct
  source 1..23: mol_type = other RNA
tccagtactgagctgccccgaga

SEQ ID NO: 35203 - RNA, 22 nt, Synthetic Construct
  source 1..22: mol_type = other RNA
tgaggtagtagtttgtggtgtt

SEQ ID NO: 35204 - RNA, 22 nt, Synthetic Construct
  source 1..22: mol_type = other RNA
tgaggtagtagtttgtggtgtt

SEQ ID NO: 35205 - RNA, 23 nt, Synthetic Construct
  source 1..23: mol_type = other RNA
cactagattgtgagctcctggaa

SEQ ID NO: 35206 - RNA, 23 nt, Synthetic Construct
  source 1..23: mol_type = other RNA
cactagattgtgagctcctggaa

SEQ ID NO: 35207 - RNA, 32 nt, Synthetic Construct; identical to SEQ ID NO: 4509
  source 1..32: mol_type = other RNA

SEQ ID NO: 35208 - RNA, 32 nt, Synthetic Construct; identical to SEQ ID NO: 4509
  source 1..32: mol_type = other RNA

SEQ ID NO: 35209 - RNA, 18 nt, Synthetic Construct
  source 1..18: mol_type = other RNA
tgaggtagtagattgtat

SEQ ID NO: 35210 - RNA, 16 nt, Synthetic Construct
  source 1..16: mol_type = other RNA
gtctgcggccatacca

SEQ ID NO: 35211 - RNA, 16 nt, Synthetic Construct
  source 1..16: mol_type = other RNA
gtctgcggccatacca

SEQ ID NO: 35212 - RNA, 22 nt, Synthetic Construct
  source 1..22: mol_type = other RNA
tacgcctgtctgagcgtcgctt

SEQ ID NO: 35213 - RNA, 22 nt, Synthetic Construct
  source 1..22: mol_type = other RNA
tacgcctgtctgagcgtcgctt

SEQ ID NO: 35214 - RNA, 22 nt, Synthetic Construct
  source 1..22: mol_type = other RNA
tgtgcaaatccatgcaaaactg

SEQ ID NO: 35215 - RNA, 22 nt, Synthetic Construct
  source 1..22: mol_type = other RNA
tgtgcaaatccatgcaaaactg

SEQ ID NO: 35216 - RNA, 21 nt, Synthetic Construct
  source 1..21: mol_type = other RNA
tgaggaagtaggttgtatagt

SEQ ID NO: 35217 - RNA, 18 nt, Synthetic Construct
  source 1..18: mol_type = other RNA
cgactcttagcggtggat

SEQ ID NO: 35218 - RNA, 18 nt, Synthetic Construct
  source 1..18: mol_type = other RNA
cgactcttagcggtggat

SEQ ID NO: 35219 - RNA, 22 nt, Synthetic Construct
  source 1..22: mol_type = other RNA
tgaggcagtaggttgtgtggtt

SEQ ID NO: 35220 - RNA, 30 nt, Synthetic Construct; identical to SEQ ID NO: 751
  source 1..30: mol_type = other RNA

SEQ ID NO: 35221 - RNA, 30 nt, Synthetic Construct; identical to SEQ ID NO: 751
  source 1..30: mol_type = other RNA

SEQ ID NO: 35222 - RNA, 21 nt, Synthetic Construct
  source 1..21: mol_type = other RNA
ctagactggagctccttgagg

SEQ ID NO: 35223 - RNA, 27 nt, Synthetic Construct
  source 1..27: mol_type = other RNA
ccccccactgctaaacttgactggctt

SEQ ID NO: 35224 - RNA, 27 nt, Synthetic Construct
  source 1..27: mol_type = other RNA
ccccccactgctaaacttgactggctt

SEQ ID NO: 35225 - RNA, 21 nt, Synthetic Construct
  source 1..21: mol_type = other RNA
agcaggacggtggccatggaa

SEQ ID NO: 35226 - RNA, 21 nt, Synthetic Construct
  source 1..21: mol_type = other RNA
agcaggacggtggccatggaa

SEQ ID NO: 35227 - RNA, 21 nt, Synthetic Construct
  source 1..21: mol_type = other RNA
tagcagcacatcatggtttac

SEQ ID NO: 35228 - RNA, 20 nt, Synthetic Construct
  source 1..20: mol_type = other RNA
tgaggcagtaggttgtgtgg

SEQ ID NO: 35229 - RNA, 27 nt, Synthetic Construct
  source 1..27: mol_type = other RNA
gcatgggtggttcagtggtagaattct

SEQ ID NO: 35230 - RNA, 27 nt, Synthetic Construct
  source 1..27: mol_type = other RNA
gcatgggtggttcagtggtagaattct

SEQ ID NO: 35231 - RNA, 22 nt, Synthetic Construct
  source 1..22: mol_type = other RNA
ggaggtagtaggttgtgtggtt

SEQ ID NO: 35232 - RNA, 22 nt, Synthetic Construct
  source 1..22: mol_type = other RNA
ggaggtagtaggttgtgtggtt

SEQ ID NO: 35233 - RNA, 20 nt, Synthetic Construct
  source 1..20: mol_type = other RNA
ttagtgacgcgcatgaatgg

SEQ ID NO: 35234 - RNA, 23 nt, Synthetic Construct
  source 1..23: mol_type = other RNA
gggtaatacgacgtacttagtgt

SEQ ID NO: 35235 - RNA, 20 nt, Synthetic Construct
  source 1..20: mol_type = other RNA
tgtaaacatcctcgactgga

SEQ ID NO: 35236 - RNA, 19 nt, Synthetic Construct
  source 1..19: mol_type = other RNA
gtggtacgatcatacctgg

SEQ ID NO: 35237 - RNA, 19 nt, Synthetic Construct
  source 1..19: mol_type = other RNA
gtggtacgatcatacctgg

SEQ ID NO: 35238 - RNA, 23 nt, Synthetic Construct
  source 1..23: mol_type = other RNA
ggctacattgtctgctgggtttc

SEQ ID NO: 35239 - RNA, 23 nt, Synthetic Construct
  source 1..23: mol_type = other RNA
ggctacattgtctgctgggtttc

SEQ ID NO: 35240 - RNA, 20 nt, Synthetic Construct
  source 1..20: mol_type = other RNA
caaagaattctccttttggg

SEQ ID NO: 35241 - RNA, 20 nt, Synthetic Construct
  source 1..20: mol_type = other RNA
caaagaattctccttttggg

SEQ ID NO: 35242 - RNA, 23 nt, Synthetic Construct
  source 1..23: mol_type = other RNA
tgaggtggtaggttgtgtggttt

SEQ ID NO: 35243 - RNA, 22 nt, Synthetic Construct
  source 1..22: mol_type = other RNA
tcgaatccgagtcacggcacca

SEQ ID NO: 35244 - RNA, 22 nt, Synthetic Construct
  source 1..22: mol_type = other RNA
tcgaatccgagtcacggcacca

SEQ ID NO: 35245 - RNA, 22 nt, Synthetic Construct
  source 1..22: mol_type = other RNA
cgaggtagtaggttgtatagtt

SEQ ID NO: 35246 - RNA, 22 nt, Synthetic Construct
  source 1..22: mol_type = other RNA
cgaggtagtaggttgtatagtt

SEQ ID NO: 35247 - RNA, 21 nt, Synthetic Construct
  source 1..21: mol_type = other RNA
tgaggtagtagtttgtgctgc

SEQ ID NO: 35248 - RNA, 21 nt, Synthetic Construct
  source 1..21: mol_type = other RNA
tgaggtagtagtttgtgctgc

SEQ ID NO: 35249 - RNA, 24 nt, Synthetic Construct
  source 1..24: mol_type = other RNA
gcgagagtaggacgttgccaggtt

SEQ ID NO: 35250 - RNA, 24 nt, Synthetic Construct
  source 1..24: mol_type = other RNA
gcgagagtaggacgttgccaggtt

SEQ ID NO: 35251 - RNA, 20 nt, Synthetic Construct
  source 1..20: mol_type = other RNA
tgaagtagtaggttgtgtgg

SEQ ID NO: 35252 - RNA, 18 nt, Synthetic Construct
  source 1..18: mol_type = other RNA
ggtagcgtggccgagtgg

SEQ ID NO: 35253 - RNA, 22 nt, Synthetic Construct
  source 1..22: mol_type = other RNA
cgactcttagcggtggatcact

SEQ ID NO: 35254 - RNA, 22 nt, Synthetic Construct
  source 1..22: mol_type = other RNA
cgactcttagcggtggatcact

SEQ ID NO: 35255 - RNA, 21 nt, Synthetic Construct
  source 1..21: mol_type = other RNA
taactccttaagcgaattcgc

SEQ ID NO: 35256 - RNA, 21 nt, Synthetic Construct
  source 1..21: mol_type = other RNA
taactccttaagcgaattcgc

SEQ ID NO: 35257 - RNA, 22 nt, Synthetic Construct
  source 1..22: mol_type = other RNA
tgaggtagtagattgtatagta

SEQ ID NO: 35258 - RNA, 22 nt, Synthetic Construct
  source 1..22: mol_type = other RNA
tgaggtagtagattgtatagta

SEQ ID NO: 35259 - RNA, 21 nt, Synthetic Construct
  source 1..21: mol_type = other RNA
tgaagtagtaggttgtgtggt

SEQ ID NO: 35260 - RNA, 22 nt, Synthetic Construct
  source 1..22: mol_type = other RNA
tcctgaactgagctgccccgag

SEQ ID NO: 35261 - RNA, 28 nt, Synthetic Construct
  source 1..28: mol_type = other RNA
ccccccactgctaaatttgaccggcttt

SEQ ID NO: 35262 - RNA, 32 nt, Synthetic Construct; identical to SEQ ID NO: 161
  source 1..32: mol_type = other RNA

SEQ ID NO: 35263 - RNA, 32 nt, Synthetic Construct; identical to SEQ ID NO: 14967
  source 1..32: mol_type = other RNA

SEQ ID NO: 35264 - RNA, 18 nt, Synthetic Construct
  source 1..18: mol_type = other RNA
atcgctagtaatcgcgga

SEQ ID NO: 35265 - RNA, 21 nt, Synthetic Construct
  source 1..21: mol_type = other RNA
tggagtgcgacaatggtgttt

SEQ ID NO: 35266 - RNA, 21 nt, Synthetic Construct
  source 1..21: mol_type = other RNA
tggagtgcgacaatggtgttt

SEQ ID NO: 35267 - RNA, 19 nt, Synthetic Construct
  source 1..19: mol_type = other RNA
atcacattgccagggattt

SEQ ID NO: 35268 - RNA, 19 nt, Synthetic Construct
  source 1..19: mol_type = other RNA
atcacattgccagggattt

SEQ ID NO: 35269 - RNA, 20 nt, Synthetic Construct
  source 1..20: mol_type = other RNA
tgaggtagaaggttgtatag

SEQ ID NO: 35270 - RNA, 20 nt, Synthetic Construct
  source 1..20: mol_type = other RNA
tgaggtagaaggttgtatag

SEQ ID NO: 35271 - RNA, 24 nt, Synthetic Construct
  source 1..24: mol_type = other RNA
tttccccttggggttgtaggacca

SEQ ID NO: 35272 - RNA, 24 nt, Synthetic Construct
  source 1..24: mol_type = other RNA
tttccccttggggttgtaggacca

SEQ ID NO: 35273 - RNA, 21 nt, Synthetic Construct
  source 1..21: mol_type = other RNA
tggagtgtgacaatggtgtta

SEQ ID NO: 35274 - RNA, 21 nt, Synthetic Construct
  source 1..21: mol_type = other RNA
tggagtgtgacaatggtgtta

SEQ ID NO: 35275 - RNA, 22 nt, Synthetic Construct
  source 1..22: mol_type = other RNA
actcggcgtggcgtcggtcgtg

SEQ ID NO: 35276 - RNA, 22 nt, Synthetic Construct
  source 1..22: mol_type = other RNA
actcggcgtggcgtcggtcgtg

SEQ ID NO: 35277 - RNA, 22 nt, Synthetic Construct
  source 1..22: mol_type = other RNA
tgaggtagtaggctgtatagtt

SEQ ID NO: 35278 - RNA, 22 nt, Synthetic Construct
  source 1..22: mol_type = other RNA
tgaggtagtaggctgtatagtt

SEQ ID NO: 35279 - RNA, 21 nt, Synthetic Construct
  source 1..21: mol_type = other RNA
tcctgtacagagctgccccga

SEQ ID NO: 35280 - RNA, 22 nt, Synthetic Construct
  source 1..22: mol_type = other RNA
tgaggtggtagattgtatagtt

SEQ ID NO: 35281 - RNA, 22 nt, Synthetic Construct
  source 1..22: mol_type = other RNA
tgaggtggtagattgtatagtt

SEQ ID NO: 35282 - RNA, 20 nt, Synthetic Construct
  source 1..20: mol_type = other RNA
cccgtgttcggaagattttc

SEQ ID NO: 35283 - RNA, 20 nt, Synthetic Construct
  source 1..20: mol_type = other RNA
cccgtgttcggaagattttc

SEQ ID NO: 35284 - RNA, 23 nt, Synthetic Construct
  source 1..23: mol_type = other RNA
aatgacacgatcactcccgttgt

SEQ ID NO: 35285 - RNA, 22 nt, Synthetic Construct
  source 1..22: mol_type = other RNA
cgaggtagtagattgtatagtt

SEQ ID NO: 35286 - RNA, 22 nt, Synthetic Construct
  source 1..22: mol_type = other RNA
cgaggtagtagattgtatagtt

SEQ ID NO: 35287 - RNA, 22 nt, Synthetic Construct
  source 1..22: mol_type = other RNA
tagcagcatgtaaatattggcg

SEQ ID NO: 35288 - RNA, 17 nt, Synthetic Construct
  source 1..17: mol_type = other RNA
tgccagcagccgcggta

SEQ ID NO: 35289 - RNA, 17 nt, Synthetic Construct
  source 1..17: mol_type = other RNA
tgccagcagccgcggta

SEQ ID NO: 35290 - RNA, 23 nt, Synthetic Construct
  source 1..23: mol_type = other RNA
atatcggaacgtgcccagtcgtg

SEQ ID NO: 35291 - RNA, 23 nt, Synthetic Construct
  source 1..23: mol_type = other RNA
atatcggaacgtgcccagtcgtg

SEQ ID NO: 35292 - RNA, 21 nt, Synthetic Construct
  source 1..21: mol_type = other RNA
ctttgttcgattccgttgagt

SEQ ID NO: 35293 - RNA, 20 nt, Synthetic Construct
  source 1..20: mol_type = other RNA
ctagactgaagctccttgag

SEQ ID NO: 35294 - RNA, 20 nt, Synthetic Construct
  source 1..20: mol_type = other RNA
ctagactgaagctccttgag

SEQ ID NO: 35295 - RNA, 22 nt, Synthetic Construct
  source 1..22: mol_type = other RNA
tagcagcacgtaaatataggcg

SEQ ID NO: 35296 - RNA, 22 nt, Synthetic Construct
  source 1..22: mol_type = other RNA
tagcagcacgtaaatataggcg

SEQ ID NO: 35297 - RNA, 24 nt, Synthetic Construct
  source 1..24: mol_type = other RNA
aagctcggtctgaggcccctcagt

SEQ ID NO: 35298 - RNA, 24 nt, Synthetic Construct
  source 1..24: mol_type = other RNA
aagctcggtctgaggcccctcagt

SEQ ID NO: 35299 - RNA, 21 nt, Synthetic Construct
  source 1..21: mol_type = other RNA
tgaggtagtagtttgtacagt

SEQ ID NO: 35300 - RNA, 21 nt, Synthetic Construct
  source 1..21: mol_type = other RNA
tgaggtagtagtttgtacagt

SEQ ID NO: 35301 - RNA, 34 nt, Synthetic Construct
  source 1..34: mol_type = other RNA
gcccggctagctcagtcggtagagcatgagactc

SEQ ID NO: 35302 - RNA, 21 nt, Synthetic Construct
  source 1..21: mol_type = other RNA
tgaagtagtaggttgtatagt

SEQ ID NO: 35303 - RNA, 21 nt, Synthetic Construct
  source 1..21: mol_type = other RNA
tgaagtagtaggttgtatagt

SEQ ID NO: 35304 - RNA, 22 nt, Synthetic Construct
  source 1..22: mol_type = other RNA
gtcagtttgtcaaataccccaa

SEQ ID NO: 35305 - RNA, 22 nt, Synthetic Construct
  source 1..22: mol_type = other RNA
ncctgtactgagctgccccgag

SEQ ID NO: 35306 - RNA, 22 nt, Synthetic Construct
  source 1..22: mol_type = other RNA
ncctgtactgagctgccccgag

SEQ ID NO: 35307 - RNA, 23 nt, Synthetic Construct
  source 1..23: mol_type = other RNA
agctcggtctgaggcccctcagt

SEQ ID NO: 35308 - RNA, 23 nt, Synthetic Construct
  source 1..23: mol_type = other RNA
agctcggtctgaggcccctcagt

SEQ ID NO: 35309 - RNA, 23 nt, Synthetic Construct
  source 1..23: mol_type = other RNA
ttcaagtaattcaggataggttg

SEQ ID NO: 35310 - RNA, 25 nt, Synthetic Construct
  source 1..25: mol_type = other RNA
ggtaaaatagctgagtgaagcattg

SEQ ID NO: 35311 - RNA, 27 nt, Synthetic Construct
  source 1..27: mol_type = other RNA
ccccccactgctaaatttggctggctt

SEQ ID NO: 35312 - RNA, 22 nt, Synthetic Construct
  source 1..22: mol_type = other RNA
cattgcacttgtctcggtctgg

SEQ ID NO: 35313 - RNA, 21 nt, Synthetic Construct
  source 1..21: mol_type = other RNA
tgacctatgaattgacagcca

SEQ ID NO: 35314 - RNA, 21 nt, Synthetic Construct
  source 1..21: mol_type = other RNA
tgacctatgaattgacagcca

SEQ ID NO: 35315 - RNA, 21 nt, Synthetic Construct
  source 1..21: mol_type = other RNA
taactcctaagcgaatctcgc

SEQ ID NO: 35316 - RNA, 21 nt, Synthetic Construct
  source 1..21: mol_type = other RNA
taactcctaagcgaatctcgc

SEQ ID NO: 35317 - RNA, 24 nt, Synthetic Construct
  source 1..24: mol_type = other RNA
cgggcctggttagtacttggatgg

SEQ ID NO: 35318 - RNA, 23 nt, Synthetic Construct
  source 1..23: mol_type = other RNA
tcctgtactgagctgccacgagt

SEQ ID NO: 35319 - RNA, 23 nt, Synthetic Construct
  source 1..23: mol_type = other RNA
tcctgtactgagctgccacgagt

SEQ ID NO: 35320 - RNA, 23 nt, Synthetic Construct
  source 1..23: mol_type = other RNA
tcctgtactgagctgccacgaga

SEQ ID NO: 35321 - RNA, 23 nt, Synthetic Construct
  source 1..23: mol_type = other RNA
tcctgtactgagctgccacgaga

SEQ ID NO: 35322 - RNA, 21 nt, Synthetic Construct
  source 1..21: mol_type = other RNA
gggagtgtgacaatggtgttt

SEQ ID NO: 35323 - RNA, 23 nt, Synthetic Construct
  source 1..23: mol_type = other RNA
cagagtgctgttcgtgcaggtag

SEQ ID NO: 35324 - RNA, 23 nt, Synthetic Construct
  source 1..23: mol_type = other RNA
cagagtgctgttcgtgcaggtag

SEQ ID NO: 35325 - RNA, 23 nt, Synthetic Construct
  source 1..23: mol_type = other RNA
tccctggtggtctagtggttagg

SEQ ID NO: 35326 - RNA, 41 nt, Synthetic Construct; identical to SEQ ID NO: 10630
  source 1..41: mol_type = other RNA

SEQ ID NO: 35327 - RNA, 29 nt, Synthetic Construct
  source 1..29: mol_type = other RNA
gcattggtggttcagtggtagaattctcg

SEQ ID NO: 35328 - RNA, 29 nt, Synthetic Construct
  source 1..29: mol_type = other RNA
gcattggtggttcagtggtagaattctcg

SEQ ID NO: 35329 - RNA, 15 nt, Synthetic Construct
  source 1..15: mol_type = other RNA
gggtgaaagcggggg

SEQ ID NO: 35330 - RNA, 22 nt, Synthetic Construct
  source 1..22: mol_type = other RNA
caaagtgctgttcgtgcaggta

SEQ ID NO: 35331 - RNA, 23 nt, Synthetic Construct
  source 1..23: mol_type = other RNA
cactagattgtgagctcctggaa

SEQ ID NO: 35332 - RNA, 23 nt, Synthetic Construct
  source 1..23: mol_type = other RNA
cactagattgtgagctcctggaa

SEQ ID NO: 35333 - RNA, 22 nt, Synthetic Construct
  source 1..22: mol_type = other RNA
atataatacaacctgctaagtg

SEQ ID NO: 35334 - RNA, 26 nt, Synthetic Construct
  source 1..26: mol_type = other RNA
gacttaccaaacctatgcaaactccg

SEQ ID NO: 35335 - RNA, 18 nt, Synthetic Construct
  source 1..18: mol_type = other RNA
gtcaggatggccgagcgg

SEQ ID NO: 35336 - RNA, 18 nt, Synthetic Construct
  source 1..18: mol_type = other RNA
gtcaggatggccgagcgg

SEQ ID NO: 35337 - RNA, 19 nt, Synthetic Construct
  source 1..19: mol_type = other RNA
aaaccgttaccattactga

SEQ ID NO: 35338 - RNA, 19 nt, Synthetic Construct
  source 1..19: mol_type = other RNA
aaaccgttaccattactga

SEQ ID NO: 35339 - RNA, 15 nt, Synthetic Construct
  source 1..15: mol_type = other RNA
gagagcctggacaca

SEQ ID NO: 35340 - RNA, 21 nt, Synthetic Construct
  source 1..21: mol_type = other RNA
actggacttggagtcagaagg

SEQ ID NO: 35341 - RNA, 21 nt, Synthetic Construct
  source 1..21: mol_type = other RNA
actggacttggagtcagaagg

SEQ ID NO: 35342 - RNA, 22 nt, Synthetic Construct
  source 1..22: mol_type = other RNA
tatagcacttgtcccggcctgt

SEQ ID NO: 35343 - RNA, 15 nt, Synthetic Construct
  source 1..15: mol_type = other RNA
acggtcctaaggtag

SEQ ID NO: 35344 - RNA, 15 nt, Synthetic Construct
  source 1..15: mol_type = other RNA
acggtcctaaggtag

SEQ ID NO: 35345 - RNA, 18 nt, Synthetic Construct
  source 1..18: mol_type = other RNA
tcagtagctcgaggaaaa

SEQ ID NO: 35346 - RNA, 16 nt, Synthetic Construct
  source 1..16: mol_type = other RNA
gtctgcggccatacca

SEQ ID NO: 35347 - RNA, 22 nt, Synthetic Construct
  source 1..22: mol_type = other RNA
taactccttaagcgaatctcgt

SEQ ID NO: 35348 - RNA, 22 nt, Synthetic Construct
  source 1..22: mol_type = other RNA
tgaggtagtagtttgtgctgta

SEQ ID NO: 35349 - RNA, 22 nt, Synthetic Construct
  source 1..22: mol_type = other RNA
tgaggtagtagtttgtgctgta

SEQ ID NO: 35350 - RNA, 27 nt, Synthetic Construct
  source 1..27: mol_type = other RNA
ccccccactgctaaattagactggctt

SEQ ID NO: 35351 - RNA, 22 nt, Synthetic Construct
  source 1..22: mol_type = other RNA
tgaggtagtgggttgtatagtt

SEQ ID NO: 35352 - RNA, 22 nt, Synthetic Construct
  source 1..22: mol_type = other RNA
tgaggtagtgggttgtatagtt

SEQ ID NO: 35353 - RNA, 22 nt, Synthetic Construct
  source 1..22: mol_type = other RNA
ttgtaccgtgagtaataatgcg

SEQ ID NO: 35354 - RNA, 22 nt, Synthetic Construct
  source 1..22: mol_type = other RNA
agaggtagtaggttgtgtggtt

SEQ ID NO: 35355 - RNA, 27 nt, Synthetic Construct
  source 1..27: mol_type = other RNA
ccctccactgctaaatttgactggctt

SEQ ID NO: 35356 - RNA, 15 nt, Synthetic Construct
  source 1..15: mol_type = other RNA
gcagagcgtcggtct

SEQ ID NO: 35357 - RNA, 16 nt, Synthetic Construct
  source 1..16: mol_type = other RNA
cccaaaggtcgtcggt

SEQ ID NO: 35358 - RNA, 22 nt, Synthetic Construct
  source 1..22: mol_type = other RNA
tattgcacttgtctcggcctgt

SEQ ID NO: 35359 - RNA, 23 nt, Synthetic Construct
  source 1..23: mol_type = other RNA
tcagtgcatcacagaactttgtt

SEQ ID NO: 35360 - RNA, 21 nt, Synthetic Construct
  source 1..21: mol_type = other RNA
tagcaccatttgaaatcggtt

SEQ ID NO: 35361 - RNA, 22 nt, Synthetic Construct
  source 1..22: mol_type = other RNA
tagcaacacgtaaatattggcg

SEQ ID NO: 35362 - RNA, 16 nt, Synthetic Construct
  source 1..16: mol_type = other RNA
ggcgggagtaactatg

SEQ ID NO: 35363 - RNA, 16 nt, Synthetic Construct
  source 1..16: mol_type = other RNA
ggcgggagtaactatg

SEQ ID NO: 35364 - RNA, 20 nt, Synthetic Construct
  source 1..20: mol_type = other RNA
tagcttatcagactgatgtt

SEQ ID NO: 35365 - RNA, 20 nt, Synthetic Construct
  source 1..20: mol_type = other RNA
tagcttatcagactgatgtt

SEQ ID NO: 35366 - RNA, 21 nt, Synthetic Construct
  source 1..21: mol_type = other RNA
tcttggagtaggtcattgggt

SEQ ID NO: 35367 - RNA, 24 nt, Synthetic Construct
  source 1..24: mol_type = other RNA
tcctgtactgagctgccccgagat

SEQ ID NO: 35368 - RNA, 24 nt, Synthetic Construct
  source 1..24: mol_type = other RNA
tcctgtactgagctgccccgagat

SEQ ID NO: 35369 - RNA, 22 nt, Synthetic Construct
  source 1..22: mol_type = other RNA
tagcagcacgcaaatattggcg

SEQ ID NO: 35370 - RNA, 22 nt, Synthetic Construct
  source 1..22: mol_type = other RNA
tagcagcacgcaaatattggcg

SEQ ID NO: 35371 - RNA, 23 nt, Synthetic Construct
  source 1..23: mol_type = other RNA
agctcggtctgaggcccctcagt

SEQ ID NO: 35372 - RNA, 23 nt, Synthetic Construct
  source 1..23: mol_type = other RNA
agctcggtctgaggcccctcagt

SEQ ID NO: 35373 - RNA, 23 nt, Synthetic Construct
  source 1..23: mol_type = other RNA
gtcagtttgtcaaataccccaat

SEQ ID NO: 35374 - RNA, 20 nt, Synthetic Construct
  source 1..20: mol_type = other RNA
actggacttggagtcagaag

SEQ ID NO: 35375 - RNA, 23 nt, Synthetic Construct
  source 1..23: mol_type = other RNA
tcctgtactgagctgccctgaga

SEQ ID NO: 35376 - RNA, 18 nt, Synthetic Construct
  source 1..18: mol_type = other RNA
gtcgacgtatagggtgtg

SEQ ID NO: 35377 - RNA, 23 nt, Synthetic Construct
  source 1..23: mol_type = other RNA
tgaggtagtaggttgtgtggtat

SEQ ID NO: 35378 - RNA, 25 nt, Synthetic Construct
  source 1..25: mol_type = other RNA
ttggggatatgagatcgagacgaca

SEQ ID NO: 35379 - RNA, 23 nt, Synthetic Construct
  source 1..23: mol_type = other RNA
tcctgtactgagctgccccggga

SEQ ID NO: 35380 - RNA, 21 nt, Synthetic Construct
  source 1..21: mol_type = other RNA
tagcagcacgtaatattggcg

SEQ ID NO: 35381 - RNA, 21 nt, Synthetic Construct
  source 1..21: mol_type = other RNA
tagcagcacgtaatattggcg

SEQ ID NO: 35382 - RNA, 22 nt, Synthetic Construct
  source 1..22: mol_type = other RNA
tggaatgtaaagaagtatgtac

SEQ ID NO: 35383 - RNA, 22 nt, Synthetic Construct
  source 1..22: mol_type = other RNA
tggaatgtaaagaagtatgtac

SEQ ID NO: 35384 - RNA, 28 nt, Synthetic Construct
  source 1..28: mol_type = other RNA
ggatttccccttggggttgtaggaccac

SEQ ID NO: 35385 - RNA, 28 nt, Synthetic Construct
  source 1..28: mol_type = other RNA
ggatttccccttggggttgtaggaccac

SEQ ID NO: 35386 - RNA, 21 nt, Synthetic Construct
  source 1..21: mol_type = other RNA
tggagtgcgacaatggtgttt

SEQ ID NO: 35387 - RNA, 35 nt, Synthetic Construct; identical to SEQ ID NO: 34978
  source 1..35: mol_type = other RNA

SEQ ID NO: 35388 - RNA, 15 nt, Synthetic Construct
  source 1..15: mol_type = other RNA
gcagagcgtcggtct

SEQ ID NO: 35389 - RNA, 21 nt, Synthetic Construct
  source 1..21: mol_type = other RNA
tgaggtagtaagttgtgtggt

SEQ ID NO: 35390 - RNA, 21 nt, Synthetic Construct
  source 1..21: mol_type = other RNA
tgaggtagtaagttgtgtggt

SEQ ID NO: 35391 - RNA, 19 nt, Synthetic Construct
  source 1..19: mol_type = other RNA
agcagcattgtacagggct

SEQ ID NO: 35392 - RNA, 19 nt, Synthetic Construct
  source 1..19: mol_type = other RNA
agcagcattgtacagggct

SEQ ID NO: 35393 - RNA, 21 nt, Synthetic Construct
  source 1..21: mol_type = other RNA
acagcaggacggtggccatgg

SEQ ID NO: 35394 - RNA, 22 nt, Synthetic Construct
  source 1..22: mol_type = other RNA
tcgtaccgtgagtaataatgca

SEQ ID NO: 35395 - RNA, 22 nt, Synthetic Construct
  source 1..22: mol_type = other RNA
tcgtaccgtgagtaataatgca

SEQ ID NO: 35396 - RNA, 24 nt, Synthetic Construct
  source 1..24: mol_type = other RNA
agcagcattgtacagggctatgtt

SEQ ID NO: 35397 - RNA, 23 nt, Synthetic Construct
  source 1..23: mol_type = other RNA
acagtagtctgcacattggttaa

SEQ ID NO: 35398 - RNA, 23 nt, Synthetic Construct
  source 1..23: mol_type = other RNA
acagtagtctgcacattggttaa

SEQ ID NO: 35399 - RNA, 23 nt, Synthetic Construct
  source 1..23: mol_type = other RNA
tgaggtagtaggttgtgcggttt

SEQ ID NO: 35400 - RNA, 23 nt, Synthetic Construct
  source 1..23: mol_type = other RNA
tgaggtagtaggttgtgcggttt

SEQ ID NO: 35401 - RNA, 20 nt, Synthetic Construct
  source 1..20: mol_type = other RNA
tgaggtggtaggttgtatag

SEQ ID NO: 35402 - RNA, 20 nt, Synthetic Construct
  source 1..20: mol_type = other RNA
tgaggtggtaggttgtatag

SEQ ID NO: 35403 - RNA, 18 nt, Synthetic Construct
  source 1..18: mol_type = other RNA
tcgacgctagcggatcct

SEQ ID NO: 35404 - RNA, 18 nt, Synthetic Construct
  source 1..18: mol_type = other RNA
tcgacgctagcggatcct

SEQ ID NO: 35405 - RNA, 22 nt, Synthetic Construct
  source 1..22: mol_type = other RNA
tcctgtactgagcagccccgag

SEQ ID NO: 35406 - RNA, 21 nt, Synthetic Construct
  source 1..21: mol_type = other RNA
cgaggtagtaggttgtgtggt

SEQ ID NO: 35407 - RNA, 22 nt, Synthetic Construct
  source 1..22: mol_type = other RNA
tcgtaccgtgagtaataacgcg

SEQ ID NO: 35408 - RNA, 20 nt, Synthetic Construct
  source 1..20: mol_type = other RNA
tgaggtagaaggttgtatag

SEQ ID NO: 35409 - RNA, 20 nt, Synthetic Construct
  source 1..20: mol_type = other RNA
tgaggtagaaggttgtatag

SEQ ID NO: 35410 - RNA, 21 nt, Synthetic Construct
  source 1..21: mol_type = other RNA
tgaggtagtaggctgtgtggt

SEQ ID NO: 35411 - RNA, 22 nt, Synthetic Construct
  source 1..22: mol_type = other RNA
cattgcacttgcctcggtctga

SEQ ID NO: 35412 - RNA, 22 nt, Synthetic Construct
  source 1..22: mol_type = other RNA
tcctgtactgagctgcctcgag

SEQ ID NO: 35413 - RNA, 15 nt, Synthetic Construct
  source 1..15: mol_type = other RNA
tacctggttgatcct

SEQ ID NO: 35414 - RNA, 23 nt, Synthetic Construct
  source 1..23: mol_type = other RNA
tcctgcactgagctgccccgagt

SEQ ID NO: 35415 - RNA, 23 nt, Synthetic Construct
  source 1..23: mol_type = other RNA
tcctgcactgagctgccccgagt

SEQ ID NO: 35416 - RNA, 16 nt, Synthetic Construct
  source 1..16: mol_type = other RNA
atagggaacgtgagct

SEQ ID NO: 35417 - RNA, 16 nt, Synthetic Construct
  source 1..16: mol_type = other RNA
atagggaacgtgagct

SEQ ID NO: 35418 - RNA, 23 nt, Synthetic Construct
  source 1..23: mol_type = other RNA
tgaggtagtaggttgtgtagttt

SEQ ID NO: 35419 - RNA, 23 nt, Synthetic Construct
  source 1..23: mol_type = other RNA
tgaggtagtaggttgtgtagttt

SEQ ID NO: 35420 - RNA, 18 nt, Synthetic Construct
  source 1..18: mol_type = other RNA
atcccactcctgacacca

SEQ ID NO: 35421 - RNA, 18 nt, Synthetic Construct
  source 1..18: mol_type = other RNA
atcccactcctgacacca

SEQ ID NO: 35422 - RNA, 20 nt, Synthetic Construct
  source 1..20: mol_type = other RNA
tgaggtagaaggttgtgtgg

SEQ ID NO: 35423 - RNA, 24 nt, Synthetic Construct
  source 1..24: mol_type = other RNA
agcagcattgtacagggctatgag

SEQ ID NO: 35424 - RNA, 24 nt, Synthetic Construct
  source 1..24: mol_type = other RNA
gctcactgatcgagtcgtcctgcg

SEQ ID NO: 35425 - RNA, 38 nt, Synthetic Construct; identical to SEQ ID NO: 7148
  source 1..38: mol_type = other RNA

SEQ ID NO: 35426 - RNA, 38 nt, Synthetic Construct; identical to SEQ ID NO: 7148
  source 1..38: mol_type = other RNA

SEQ ID NO: 35427 - RNA, 28 nt, Synthetic Construct
  source 1..28: mol_type = other RNA
cccccccactgctaaatttgactggctt

SEQ ID NO: 35428 - RNA, 22 nt, Synthetic Construct
  source 1..22: mol_type = other RNA
tattgcgcttgtcccggcctgt

SEQ ID NO: 35429 - RNA, 22 nt, Synthetic Construct
  source 1..22: mol_type = other RNA
tattgcgcttgtcccggcctgt

SEQ ID NO: 35430 - RNA, 32 nt, Synthetic Construct; identical to SEQ ID NO: 5582
  source 1..32: mol_type = other RNA

SEQ ID NO: 35431 - RNA, 19 nt, Synthetic Construct
  source 1..19: mol_type = other RNA
cttggggttgtaggaccac

SEQ ID NO: 35432 - RNA, 19 nt, Synthetic Construct
  source 1..19: mol_type = other RNA
cttggggttgtaggaccac

SEQ ID NO: 35433 - RNA, 23 nt, Synthetic Construct
  source 1..23: mol_type = other RNA
tgggtttacgttgggagaactta

SEQ ID NO: 35434 - RNA, 21 nt, Synthetic Construct
  source 1..21: mol_type = other RNA
tggggtagtagtttgtgctgt

SEQ ID NO: 35435 - RNA, 21 nt, Synthetic Construct
  source 1..21: mol_type = other RNA
tggggtagtagtttgtgctgt

SEQ ID NO: 35436 - RNA, 20 nt, Synthetic Construct
  source 1..20: mol_type = other RNA
tgaggtagtaggttgtgcgg

SEQ ID NO: 35437 - RNA, 24 nt, Synthetic Construct
  source 1..24: mol_type = other RNA
tcctgtactgagctgccccgagat

SEQ ID NO: 35438 - RNA, 23 nt, Synthetic Construct
  source 1..23: mol_type = other RNA
tgaggggtagagagcgagacttt

SEQ ID NO: 35439 - RNA, 23 nt, Synthetic Construct
  source 1..23: mol_type = other RNA
tgagaactgaattccataggctg

SEQ ID NO: 35440 - RNA, 23 nt, Synthetic Construct
  source 1..23: mol_type = other RNA
tgagaactgaattccataggctg

SEQ ID NO: 35441 - RNA, 21 nt, Synthetic Construct
  source 1..21: mol_type = other RNA
agcagcattgtacagggctat

SEQ ID NO: 35442 - RNA, 21 nt, Synthetic Construct
  source 1..21: mol_type = other RNA
agcagcattgtacagggctat

SEQ ID NO: 35443 - RNA, 23 nt, Synthetic Construct
  source 1..23: mol_type = other RNA
tggtagtacgacgtacttagtgt

SEQ ID NO: 35444 - RNA, 23 nt, Synthetic Construct
  source 1..23: mol_type = other RNA
tggtagtacgacgtacttagtgt

SEQ ID NO: 35445 - RNA, 22 nt, Synthetic Construct
  source 1..22: mol_type = other RNA
tgaggtagtaagttgtgtggtt

SEQ ID NO: 35446 - RNA, 16 nt, Synthetic Construct
  source 1..16: mol_type = other RNA
cacaccgcccgtcgct

SEQ ID NO: 35447 - RNA, 16 nt, Synthetic Construct
  source 1..16: mol_type = other RNA
cacaccgcccgtcgct

SEQ ID NO: 35448 - RNA, 22 nt, Synthetic Construct
  source 1..22: mol_type = other RNA
tggggtagtaggttgtatagtt

SEQ ID NO: 35449 - RNA, 22 nt, Synthetic Construct
  source 1..22: mol_type = other RNA
tggggtagtaggttgtatagtt

SEQ ID NO: 35450 - RNA, 22 nt, Synthetic Construct
  source 1..22: mol_type = other RNA
tgagaactgaattccatgggtc

SEQ ID NO: 35451 - RNA, 22 nt, Synthetic Construct
  source 1..22: mol_type = other RNA
tgagaactgaattccatgggtc

SEQ ID NO: 35452 - RNA, 23 nt, Synthetic Construct
  source 1..23: mol_type = other RNA
agaggggcagagagcgagacttt

SEQ ID NO: 35453 - RNA, 23 nt, Synthetic Construct
  source 1..23: mol_type = other RNA
agaggggcagagagcgagacttt

SEQ ID NO: 35454 - RNA, 22 nt, Synthetic Construct
  source 1..22: mol_type = other RNA
tgaggtagtaggttgagtggtt

SEQ ID NO: 35455 - RNA, 30 nt, Synthetic Construct; identical to SEQ ID NO: 739
  source 1..30: mol_type = other RNA

SEQ ID NO: 35456 - RNA, 22 nt, Synthetic Construct
  source 1..22: mol_type = other RNA
cattgcacttgtctcggcctga

SEQ ID NO: 35457 - RNA, 24 nt, Synthetic Construct
  source 1..24: mol_type = other RNA
ggctacattgtctgctgggtttct

SEQ ID NO: 35458 - RNA, 24 nt, Synthetic Construct
  source 1..24: mol_type = other RNA
ggctacattgtctgctgggtttct

SEQ ID NO: 35459 - RNA, 24 nt, Synthetic Construct
  source 1..24: mol_type = other RNA
tgtcagtttgtcaaataccccaat

SEQ ID NO: 35460 - RNA, 22 nt, Synthetic Construct
  source 1..22: mol_type = other RNA
tgaggtagtagattgtatagta

SEQ ID NO: 35461 - RNA, 22 nt, Synthetic Construct
  source 1..22: mol_type = other RNA
tgaggtagtagattgtatagta

SEQ ID NO: 35462 - RNA, 23 nt, Synthetic Construct
  source 1..23: mol_type = other RNA
tgaggggcagagagagagacttt

SEQ ID NO: 35463 - RNA, 19 nt, Synthetic Construct
  source 1..19: mol_type = other RNA
gtacagtactgtgataact

SEQ ID NO: 35464 - RNA, 19 nt, Synthetic Construct
  source 1..19: mol_type = other RNA
gtacagtactgtgataact

SEQ ID NO: 35465 - RNA, 22 nt, Synthetic Construct
  source 1..22: mol_type = other RNA
tagcagcacgtaagtattggcg

SEQ ID NO: 35466 - RNA, 22 nt, Synthetic Construct
  source 1..22: mol_type = other RNA
tagcagcacgtaagtattggcg

SEQ ID NO: 35467 - RNA, 20 nt, Synthetic Construct
  source 1..20: mol_type = other RNA
agcagcattgtacagggcta

SEQ ID NO: 35468 - RNA, 20 nt, Synthetic Construct
  source 1..20: mol_type = other RNA
agcagcattgtacagggcta

SEQ ID NO: 35469 - RNA, 19 nt, Synthetic Construct
  source 1..19: mol_type = other RNA
tccctgttcgggcgccatt

SEQ ID NO: 35470 - RNA, 19 nt, Synthetic Construct
  source 1..19: mol_type = other RNA
tccctgttcgggcgccatt

SEQ ID NO: 35471 - RNA, 21 nt, Synthetic Construct
  source 1..21: mol_type = other RNA
tcctatactgagctgccccga

SEQ ID NO: 35472 - RNA, 21 nt, Synthetic Construct
  source 1..21: mol_type = other RNA
tcctatactgagctgccccga

SEQ ID NO: 35473 - RNA, 23 nt, Synthetic Construct
  source 1..23: mol_type = other RNA
tgaggtagtaggttgtgtggttt

SEQ ID NO: 35474 - RNA, 18 nt, Synthetic Construct
  source 1..18: mol_type = other RNA
atggccgttcttagttgg

SEQ ID NO: 35475 - RNA, 23 nt, Synthetic Construct
  source 1..23: mol_type = other RNA
tgggtttacgttgggagaactta

SEQ ID NO: 35476 - RNA, 22 nt, Synthetic Construct
  source 1..22: mol_type = other RNA
tcaggctcagtcccctcccgat

SEQ ID NO: 35477 - RNA, 22 nt, Synthetic Construct
  source 1..22: mol_type = other RNA
tcaggctcagtcccctcccgat

SEQ ID NO: 35478 - RNA, 27 nt, Synthetic Construct
  source 1..27: mol_type = other RNA
gctttacattggactttgaacagatct

SEQ ID NO: 35479 - RNA, 23 nt, Synthetic Construct
  source 1..23: mol_type = other RNA
cagcccgtgttcggaagattttc

SEQ ID NO: 35480 - RNA, 23 nt, Synthetic Construct
  source 1..23: mol_type = other RNA
cagcccgtgttcggaagattttc

SEQ ID NO: 35481 - RNA, 22 nt, Synthetic Construct
  source 1..22: mol_type = other RNA
tgaggtagtgggttgtgtggtt

SEQ ID NO: 35482 - RNA, 24 nt, Synthetic Construct
  source 1..24: mol_type = other RNA
tataccgaagctctaggtgcggca

SEQ ID NO: 35483 - RNA, 24 nt, Synthetic Construct
  source 1..24: mol_type = other RNA
tataccgaagctctaggtgcggca

SEQ ID NO: 35484 - RNA, 19 nt, Synthetic Construct
  source 1..19: mol_type = other RNA
agtaggtcatcgtcaggct

SEQ ID NO: 35485 - RNA, 19 nt, Synthetic Construct
  source 1..19: mol_type = other RNA
agtaggtcatcgtcaggct

SEQ ID NO: 35486 - RNA, 21 nt, Synthetic Construct
  source 1..21: mol_type = other RNA
tggagtgtgacaacggtgttt

SEQ ID NO: 35487 - RNA, 21 nt, Synthetic Construct
  source 1..21: mol_type = other RNA
tgaggtagtagattgtgtagt

SEQ ID NO: 35488 - RNA, 21 nt, Synthetic Construct
  source 1..21: mol_type = other RNA
tgaggtagtagattgtgtagt

SEQ ID NO: 35489 - RNA, 22 nt, Synthetic Construct
  source 1..22: mol_type = other RNA
tagcagcatgtaaatattggcg

SEQ ID NO: 35490 - RNA, 21 nt, Synthetic Construct
  source 1..21: mol_type = other RNA
tcctatactgagctgccccga

SEQ ID NO: 35491 - RNA, 21 nt, Synthetic Construct
  source 1..21: mol_type = other RNA
tcctatactgagctgccccga

SEQ ID NO: 35492 - RNA, 22 nt, Synthetic Construct
  source 1..22: mol_type = other RNA
tagcagcacgtaagtattggcg

SEQ ID NO: 35493 - RNA, 22 nt, Synthetic Construct
  source 1..22: mol_type = other RNA
tagcagcacgtaagtattggcg

SEQ ID NO: 35494 - RNA, 22 nt, Synthetic Construct
  source 1..22: mol_type = other RNA
aggttccggataagtaagagcc

SEQ ID NO: 35495 - RNA, 22 nt, Synthetic Construct
  source 1..22: mol_type = other RNA
aggttccggataagtaagagcc

SEQ ID NO: 35496 - RNA, 28 nt, Synthetic Construct
  source 1..28: mol_type = other RNA
ccccccactgctaaatttggctggcttt

SEQ ID NO: 35497 - RNA, 28 nt, Synthetic Construct
  source 1..28: mol_type = other RNA
ccccccactgctaaatttggctggcttt

SEQ ID NO: 35498 - RNA, 22 nt, Synthetic Construct
  source 1..22: mol_type = other RNA
taaatccttaagcgaatctcgc

SEQ ID NO: 35499 - RNA, 22 nt, Synthetic Construct
  source 1..22: mol_type = other RNA
taaatccttaagcgaatctcgc

SEQ ID NO: 35500 - RNA, 21 nt, Synthetic Construct
  source 1..21: mol_type = other RNA
tcctgtactgagctaccccga

SEQ ID NO: 35501 - RNA, 22 nt, Synthetic Construct
  source 1..22: mol_type = other RNA
tccagtactgagctgccccgag

SEQ ID NO: 35502 - RNA, 35 nt, Synthetic Construct; identical to SEQ ID NO: 2548
  source 1..35: mol_type = other RNA

SEQ ID NO: 35503 - RNA, 35 nt, Synthetic Construct; identical to SEQ ID NO: 2548
  source 1..35: mol_type = other RNA

SEQ ID NO: 35504 - RNA, 20 nt, Synthetic Construct
  source 1..20: mol_type = other RNA
tgaggtagtaggttgtatag

SEQ ID NO: 35505 - RNA, 20 nt, Synthetic Construct
  source 1..20: mol_type = other RNA
ttggcctcaagtcaggcagg

SEQ ID NO: 35506 - RNA, 20 nt, Synthetic Construct
  source 1..20: mol_type = other RNA
ttggcctcaagtcaggcagg

SEQ ID NO: 35507 - RNA, 24 nt, Synthetic Construct
  source 1..24: mol_type = other RNA
caaagtgcttacagtgcaggtagt

SEQ ID NO: 35508 - RNA, 24 nt, Synthetic Construct
  source 1..24: mol_type = other RNA
caaagtgcttacagtgcaggtagt

SEQ ID NO: 35509 - RNA, 22 nt, Synthetic Construct
  source 1..22: mol_type = other RNA
tgaggtagtaggtcgtgtggtt

SEQ ID NO: 35510 - RNA, 16 nt, Synthetic Construct
  source 1..16: mol_type = other RNA
gggtctgtagctcagt

SEQ ID NO: 35511 - RNA, 23 nt, Synthetic Construct
  source 1..23: mol_type = other RNA
tggagagaaaggcagttcctgaa

SEQ ID NO: 35512 - RNA, 23 nt, Synthetic Construct
  source 1..23: mol_type = other RNA
tggagagaaaggcagttcctgaa

SEQ ID NO: 35513 - RNA, 23 nt, Synthetic Construct
  source 1..23: mol_type = other RNA
tcccccaggtgtgattctgattt

SEQ ID NO: 35514 - RNA, 15 nt, Synthetic Construct
  source 1..15: mol_type = other RNA
tgcctcagcgtcggt

SEQ ID NO: 35515 - RNA, 15 nt, Synthetic Construct
  source 1..15: mol_type = other RNA
tgcctcagcgtcggt

SEQ ID NO: 35516 - RNA, 23 nt, Synthetic Construct
  source 1..23: mol_type = other RNA
tgaggggaagagagcgagacttt

SEQ ID NO: 35517 - RNA, 23 nt, Synthetic Construct
  source 1..23: mol_type = other RNA
tgaggtagtagattgtatagttc

SEQ ID NO: 35518 - RNA, 22 nt, Synthetic Construct
  source 1..22: mol_type = other RNA
tggaatgtaaagaagtatgtat

SEQ ID NO: 35519 - RNA, 22 nt, Synthetic Construct
  source 1..22: mol_type = other RNA
tggaatgtaaagaagtatgtat

SEQ ID NO: 35520 - RNA, 22 nt, Synthetic Construct
  source 1..22: mol_type = other RNA
cactgcacttgtctcggtctga

SEQ ID NO: 35521 - RNA, 21 nt, Synthetic Construct
  source 1..21: mol_type = other RNA
cataattacttttggtacgcg

SEQ ID NO: 35522 - RNA, 36 nt, Synthetic Construct; identical to SEQ ID NO: 744
  source 1..36: mol_type = other RNA

SEQ ID NO: 35523 - RNA, 36 nt, Synthetic Construct; identical to SEQ ID NO: 744
  source 1..36: mol_type = other RNA

SEQ ID NO: 35524 - RNA, 20 nt, Synthetic Construct
  source 1..20: mol_type = other RNA
ttggcctcaagtcaggcagg

SEQ ID NO: 35525 - RNA, 20 nt, Synthetic Construct
  source 1..20: mol_type = other RNA
ttggcctcaagtcaggcagg

SEQ ID NO: 35526 - RNA, 21 nt, Synthetic Construct
  source 1..21: mol_type = other RNA
ttctgtactgagctgccccga

SEQ ID NO: 35527 - RNA, 37 nt, Synthetic Construct; identical to SEQ ID NO: 2447
  source 1..37: mol_type = other RNA

SEQ ID NO: 35528 - RNA, 23 nt, Synthetic Construct
  source 1..23: mol_type = other RNA
ggcagcattgtacagggctatga

SEQ ID NO: 35529 - RNA, 23 nt, Synthetic Construct
  source 1..23: mol_type = other RNA
ggcagcattgtacagggctatga

SEQ ID NO: 35530 - RNA, 22 nt, Synthetic Construct
  source 1..22: mol_type = other RNA
taactccttaagcaaatctcgc

SEQ ID NO: 35531 - RNA, 21 nt, Synthetic Construct
  source 1..21: mol_type = other RNA
tcctgcactgagctgccccga

SEQ ID NO: 35532 - RNA, 20 nt, Synthetic Construct
  source 1..20: mol_type = other RNA
tgaggtagtgggttgtatag

SEQ ID NO: 35533 - RNA, 20 nt, Synthetic Construct
  source 1..20: mol_type = other RNA
tacagtatagatgatgtact

SEQ ID NO: 35534 - RNA, 22 nt, Synthetic Construct
  source 1..22: mol_type = other RNA
tcagtgcatcacagaactttgt

SEQ ID NO: 35535 - RNA, 22 nt, Synthetic Construct
  source 1..22: mol_type = other RNA
tcagtgcatcacagaactttgt

SEQ ID NO: 35536 - RNA, 22 nt, Synthetic Construct
  source 1..22: mol_type = other RNA
tcgcagcacgtaaatattggcg

SEQ ID NO: 35537 - RNA, 22 nt, Synthetic Construct
  source 1..22: mol_type = other RNA
tcgcagcacgtaaatattggcg

SEQ ID NO: 35538 - RNA, 32 nt, Synthetic Construct; identical to SEQ ID NO: 2582
  source 1..32: mol_type = other RNA

SEQ ID NO: 35539 - RNA, 43 nt, Synthetic Construct; identical to SEQ ID NO: 727
  source 1..43: mol_type = other RNA

SEQ ID NO: 35540 - RNA, 16 nt, Synthetic Construct
  source 1..16: mol_type = other RNA
gtctacggccatacca

SEQ ID NO: 35541 - RNA, 23 nt, Synthetic Construct
  source 1..23: mol_type = other RNA
ggcagcattgtacagggctatga

SEQ ID NO: 35542 - RNA, 23 nt, Synthetic Construct
  source 1..23: mol_type = other RNA
gtcagtttgtcaaataccccaat

SEQ ID NO: 35543 - RNA, 23 nt, Synthetic Construct
  source 1..23: mol_type = other RNA
gtcagtttgtcaaataccccaat

SEQ ID NO: 35544 - RNA, 22 nt, Synthetic Construct
  source 1..22: mol_type = other RNA
tgaggtagtagtttgtggtgtt

SEQ ID NO: 35545 - RNA, 22 nt, Synthetic Construct
  source 1..22: mol_type = other RNA
tgaggtagtagtttgtggtgtt

SEQ ID NO: 35546 - RNA, 29 nt, Synthetic Construct
  source 1..29: mol_type = other RNA
gagcgctgagaagacggtcgaacttgact

SEQ ID NO: 35547 - RNA, 29 nt, Synthetic Construct
  source 1..29: mol_type = other RNA
gagcgctgagaagacggtcgaacttgact

SEQ ID NO: 35548 - RNA, 15 nt, Synthetic Construct
  source 1..15: mol_type = other RNA
ttccgaaagtagtgg

SEQ ID NO: 35549 - RNA, 16 nt, Synthetic Construct
  source 1..16: mol_type = other RNA
ccgcttttgtcaggga

SEQ ID NO: 35550 - RNA, 19 nt, Synthetic Construct
  source 1..19: mol_type = other RNA
cagagttctacagtccgac

SEQ ID NO: 35551 - RNA, 19 nt, Synthetic Construct
  source 1..19: mol_type = other RNA
cagagttctacagtccgac

SEQ ID NO: 35552 - RNA, 24 nt, Synthetic Construct
  source 1..24: mol_type = other RNA
tgagaactgaattccataggctgt

SEQ ID NO: 35553 - RNA, 24 nt, Synthetic Construct
  source 1..24: mol_type = other RNA
tgagaactgaattccataggctgt

SEQ ID NO: 35554 - RNA, 22 nt, Synthetic Construct
  source 1..22: mol_type = other RNA
tagctgcacgtaaatattggcg

SEQ ID NO: 35555 - RNA, 15 nt, Synthetic Construct
  source 1..15: mol_type = other RNA
tccggatcgtagtct

SEQ ID NO: 35556 - RNA, 15 nt, Synthetic Construct
  source 1..15: mol_type = other RNA
tccggatcgtagtct

SEQ ID NO: 35557 - RNA, 22 nt, Synthetic Construct
  source 1..22: mol_type = other RNA
ngaggtagtagattgtatagtt

SEQ ID NO: 35558 - RNA, 22 nt, Synthetic Construct
  source 1..22: mol_type = other RNA
ngaggtagtagattgtatagtt

SEQ ID NO: 35559 - RNA, 21 nt, Synthetic Construct
  source 1..21: mol_type = other RNA
cctctgggcccttcctccagt

SEQ ID NO: 35560 - RNA, 21 nt, Synthetic Construct
  source 1..21: mol_type = other RNA
cctctgggcccttcctccagt

SEQ ID NO: 35561 - RNA, 17 nt, Synthetic Construct
  source 1..17: mol_type = other RNA
cctcgcgcgattggagc

SEQ ID NO: 35562 - RNA, 22 nt, Synthetic Construct
  source 1..22: mol_type = other RNA
tcctgaactgagctgccccgag

SEQ ID NO: 35563 - RNA, 24 nt, Synthetic Construct
  source 1..24: mol_type = other RNA
ggtaaacatccccgactggaagct

SEQ ID NO: 35564 - RNA, 22 nt, Synthetic Construct
  source 1..22: mol_type = other RNA
tgaggtagtagattgtacagtt

SEQ ID NO: 35565 - RNA, 22 nt, Synthetic Construct
  source 1..22: mol_type = other RNA
tgaggtagtagattgtacagtt

SEQ ID NO: 35566 - RNA, 22 nt, Synthetic Construct
  source 1..22: mol_type = other RNA
tcttggagtaggtcattgggtg

SEQ ID NO: 35567 - RNA, 22 nt, Synthetic Construct
  source 1..22: mol_type = other RNA
gagagcctggacacaggtgctg

SEQ ID NO: 35568 - RNA, 19 nt, Synthetic Construct
  source 1..19: mol_type = other RNA
tagcttatcagactgatgt

SEQ ID NO: 35569 - RNA, 19 nt, Synthetic Construct
  source 1..19: mol_type = other RNA
tagcttatcagactgatgt

SEQ ID NO: 35570 - RNA, 25 nt, Synthetic Construct
  source 1..25: mol_type = other RNA
ttgaggatacgagatcgagacgaca

SEQ ID NO: 35571 - RNA, 17 nt, Synthetic Construct
  source 1..17: mol_type = other RNA
cgtgagctgggtttaga

SEQ ID NO: 35572 - RNA, 17 nt, Synthetic Construct
  source 1..17: mol_type = other RNA
cgtgagctgggtttaga

SEQ ID NO: 35573 - RNA, 22 nt, Synthetic Construct
  source 1..22: mol_type = other RNA
tgaggggcagagagcgagactt

SEQ ID NO: 35574 - RNA, 22 nt, Synthetic Construct
  source 1..22: mol_type = other RNA
tgaggggcagagagcgagactt

SEQ ID NO: 35575 - RNA, 19 nt, Synthetic Construct
  source 1..19: mol_type = other RNA
tccccggcatctccaccat

SEQ ID NO: 35576 - RNA, 19 nt, Synthetic Construct
  source 1..19: mol_type = other RNA
tccccggcatctccaccat

SEQ ID NO: 35577 - RNA, 22 nt, Synthetic Construct
  source 1..22: mol_type = other RNA
tggaatgtaaagaagtatgtaa

SEQ ID NO: 35578 - RNA, 22 nt, Synthetic Construct
  source 1..22: mol_type = other RNA
tggaatgtaaagaagtatgtaa

SEQ ID NO: 35579 - RNA, 21 nt, Synthetic Construct
  source 1..21: mol_type = other RNA
ggaggggcagagagcgagact

SEQ ID NO: 35580 - RNA, 22 nt, Synthetic Construct
  source 1..22: mol_type = other RNA
tattgcacttgtctcggcctgt

SEQ ID NO: 35581 - RNA, 22 nt, Synthetic Construct
  source 1..22: mol_type = other RNA
tattgcacttgtctcggcctgt

SEQ ID NO: 35582 - RNA, 22 nt, Synthetic Construct
  source 1..22: mol_type = other RNA
aggttccggataagtaagagcc

SEQ ID NO: 35583 - RNA, 22 nt, Synthetic Construct
  source 1..22: mol_type = other RNA
aggttccggataagtaagagcc

SEQ ID NO: 35584 - RNA, 41 nt, Synthetic Construct; identical to SEQ ID NO: 10630
  source 1..41: mol_type = other RNA

SEQ ID NO: 35585 - RNA, 18 nt, Synthetic Construct
  source 1..18: mol_type = other RNA
cgcgacctcagatcagac

SEQ ID NO: 35586 - RNA, 18 nt, Synthetic Construct
  source 1..18: mol_type = other RNA
cgcgacctcagatcagac

SEQ ID NO: 35587 - RNA, 22 nt, Synthetic Construct
  source 1..22: mol_type = other RNA
tattgcactcgtcccggcctgt

SEQ ID NO: 35588 - RNA, 22 nt, Synthetic Construct
  source 1..22: mol_type = other RNA
tattgcactcgtcccggcctgt

SEQ ID NO: 35589 - RNA, 23 nt, Synthetic Construct
  source 1..23: mol_type = other RNA
ctcactgatcgagtcgtcctgcg

SEQ ID NO: 35590 - RNA, 27 nt, Synthetic Construct
  source 1..27: mol_type = other RNA
ccccccactgctaaatttgattggctt

SEQ ID NO: 35591 - RNA, 27 nt, Synthetic Construct
  source 1..27: mol_type = other RNA
ccccccactgctaaatttgattggctt

SEQ ID NO: 35592 - RNA, 35 nt, Synthetic Construct; identical to SEQ ID NO: 2452
  source 1..35: mol_type = other RNA

SEQ ID NO: 35593 - RNA, 35 nt, Synthetic Construct; identical to SEQ ID NO: 2452
  source 1..35: mol_type = other RNA

SEQ ID NO: 35594 - RNA, 31 nt, Synthetic Construct
  source 1..31: mol_type = other RNA
agtaaggtcagctaaataagctatcgggccc

SEQ ID NO: 35595 - RNA, 22 nt, Synthetic Construct
  source 1..22: mol_type = other RNA
catcgcacttgtctcggtctga

SEQ ID NO: 35596 - RNA, 22 nt, Synthetic Construct
  source 1..22: mol_type = other RNA
catcgcacttgtctcggtctga

SEQ ID NO: 35597 - RNA, 23 nt, Synthetic Construct
  source 1..23: mol_type = other RNA
gcctgctggggtggaacctggtt

SEQ ID NO: 35598 - RNA, 23 nt, Synthetic Construct
  source 1..23: mol_type = other RNA
gcctgctggggtggaacctggtt

SEQ ID NO: 35599 - RNA, 23 nt, Synthetic Construct
  source 1..23: mol_type = other RNA
tcctgtactgagctgccccgaga

SEQ ID NO: 35600 - RNA, 23 nt, Synthetic Construct
  source 1..23: mol_type = other RNA
tcctgtactgagctgccccgaga

SEQ ID NO: 35601 - RNA, 21 nt, Synthetic Construct
  source 1..21: mol_type = other RNA
taactccttagcgaatctcgc

SEQ ID NO: 35602 - RNA, 21 nt, Synthetic Construct
  source 1..21: mol_type = other RNA
taactccttagcgaatctcgc

SEQ ID NO: 35603 - RNA, 22 nt, Synthetic Construct
  source 1..22: mol_type = other RNA
cggaatgtaaagaagtatgtat

SEQ ID NO: 35604 - RNA, 22 nt, Synthetic Construct
  source 1..22: mol_type = other RNA
cggaatgtaaagaagtatgtat

SEQ ID NO: 35605 - RNA, 19 nt, Synthetic Construct
  source 1..19: mol_type = other RNA
gcgaaattccttgtcgggt

SEQ ID NO: 35606 - RNA, 22 nt, Synthetic Construct
  source 1..22: mol_type = other RNA
aaaccgttaccattactgagtt

SEQ ID NO: 35607 - RNA, 22 nt, Synthetic Construct
  source 1..22: mol_type = other RNA
aaaccgttaccattactgagtt

SEQ ID NO: 35608 - RNA, 22 nt, Synthetic Construct
  source 1..22: mol_type = other RNA
tgtgcaaatccatgcaaaactg

SEQ ID NO: 35609 - RNA, 22 nt, Synthetic Construct
  source 1..22: mol_type = other RNA
tgtgcaaatccatgcaaaactg

SEQ ID NO: 35610 - RNA, 16 nt, Synthetic Construct
  source 1..16: mol_type = other RNA
gcagacgaagtgagtg

SEQ ID NO: 35611 - RNA, 20 nt, Synthetic Construct
  source 1..20: mol_type = other RNA
ctagactgaagctccttgag

SEQ ID NO: 35612 - RNA, 22 nt, Synthetic Construct
  source 1..22: mol_type = other RNA
tgaggtagtagtttgtggtgtt

SEQ ID NO: 35613 - RNA, 22 nt, Synthetic Construct
  source 1..22: mol_type = other RNA
tgaggtagtagtttgtggtgtt

SEQ ID NO: 35614 - RNA, 23 nt, Synthetic Construct
  source 1..23: mol_type = other RNA
agcagcattgtacagggctatga

SEQ ID NO: 35615 - RNA, 23 nt, Synthetic Construct
  source 1..23: mol_type = other RNA
tcttggagtaggtcattgggtga

SEQ ID NO: 35616 - RNA, 23 nt, Synthetic Construct
  source 1..23: mol_type = other RNA
tgtgcaaatctatgcaaaactga

SEQ ID NO: 35617 - RNA, 17 nt, Synthetic Construct
  source 1..17: mol_type = other RNA
tggccgttcttagttgg

SEQ ID NO: 35618 - RNA, 22 nt, Synthetic Construct
  source 1..22: mol_type = other RNA
tagcagcgcgtaaatattggcg

SEQ ID NO: 35619 - RNA, 16 nt, Synthetic Construct
  source 1..16: mol_type = other RNA
gtctacggacatacca

SEQ ID NO: 35620 - RNA, 16 nt, Synthetic Construct
  source 1..16: mol_type = other RNA
gtctacggacatacca

SEQ ID NO: 35621 - RNA, 21 nt, Synthetic Construct
  source 1..21: mol_type = other RNA
tgaggtagtagattgtatggt

SEQ ID NO: 35622 - RNA, 21 nt, Synthetic Construct
  source 1..21: mol_type = other RNA
tgaggtagtagattgtatggt

SEQ ID NO: 35623 - RNA, 24 nt, Synthetic Construct
  source 1..24: mol_type = other RNA
agcagcattgtacagggctatgat

SEQ ID NO: 35624 - RNA, 15 nt, Synthetic Construct
  source 1..15: mol_type = other RNA
ccagaaacccggtcg

SEQ ID NO: 35625 - RNA, 22 nt, Synthetic Construct
  source 1..22: mol_type = other RNA
cagtgcaatgttaaaagggcat

SEQ ID NO: 35626 - RNA, 22 nt, Synthetic Construct
  source 1..22: mol_type = other RNA
cagtgcaatgttaaaagggcat

SEQ ID NO: 35627 - RNA, 23 nt, Synthetic Construct
  source 1..23: mol_type = other RNA
taccacagggtagaaccacggaa

SEQ ID NO: 35628 - RNA, 23 nt, Synthetic Construct
  source 1..23: mol_type = other RNA
taccacagggtagaaccacggaa

SEQ ID NO: 35629 - RNA, 21 nt, Synthetic Construct
  source 1..21: mol_type = other RNA
cgaggtagtaggttgtatagt

SEQ ID NO: 35630 - RNA, 15 nt, Synthetic Construct
  source 1..15: mol_type = other RNA
tcctgacggccatag

SEQ ID NO: 35631 - RNA, 15 nt, Synthetic Construct
  source 1..15: mol_type = other RNA
tcctgacggccatag

SEQ ID NO: 35632 - RNA, 22 nt, Synthetic Construct
  source 1..22: mol_type = other RNA
cattgcacctgtctcggtctga

SEQ ID NO: 35633 - RNA, 22 nt, Synthetic Construct
  source 1..22: mol_type = other RNA
cattgcacctgtctcggtctga

SEQ ID NO: 35634 - RNA, 22 nt, Synthetic Construct
  source 1..22: mol_type = other RNA
cggaatgtaaagaagtatgtat

SEQ ID NO: 35635 - RNA, 24 nt, Synthetic Construct
  source 1..24: mol_type = other RNA
tgtaaacatccccgactggaagcg

SEQ ID NO: 35636 - RNA, 28 nt, Synthetic Construct
  source 1..28: mol_type = other RNA
gcatgggtggttcagtggtagaattctc

SEQ ID NO: 35637 - RNA, 24 nt, Synthetic Construct
  source 1..24: mol_type = other RNA
tcagtgcatcacagaactttgttt

SEQ ID NO: 35638 - RNA, 24 nt, Synthetic Construct
  source 1..24: mol_type = other RNA
tcagtgcatcacagaactttgttt

SEQ ID NO: 35639 - RNA, 18 nt, Synthetic Construct
  source 1..18: mol_type = other RNA
agtgacgcgcatgaatgg

SEQ ID NO: 35640 - RNA, 18 nt, Synthetic Construct
  source 1..18: mol_type = other RNA
agtgacgcgcatgaatgg

SEQ ID NO: 35641 - RNA, 19 nt, Synthetic Construct
  source 1..19: mol_type = other RNA
accgggtgctgtaggcttt

SEQ ID NO: 35642 - RNA, 19 nt, Synthetic Construct
  source 1..19: mol_type = other RNA
accgggtgctgtaggcttt

SEQ ID NO: 35643 - RNA, 15 nt, Synthetic Construct
  source 1..15: mol_type = other RNA
tctacagtccgacga

SEQ ID NO: 35644 - RNA, 15 nt, Synthetic Construct
  source 1..15: mol_type = other RNA
tctacagtccgacga

SEQ ID NO: 35645 - RNA, 24 nt, Synthetic Construct
  source 1..24: mol_type = other RNA
tgagaactgaattccatgggtttt

SEQ ID NO: 35646 - RNA, 24 nt, Synthetic Construct
  source 1..24: mol_type = other RNA
tgagaactgaattccatgggtttt

SEQ ID NO: 35647 - RNA, 19 nt, Synthetic Construct
  source 1..19: mol_type = other RNA
accgggtgctgtaggcttt

SEQ ID NO: 35648 - RNA, 19 nt, Synthetic Construct
  source 1..19: mol_type = other RNA
accgggtgctgtaggcttt

SEQ ID NO: 35649 - RNA, 22 nt, Synthetic Construct
  source 1..22: mol_type = other RNA
agtagtgtttcctactttatgg

SEQ ID NO: 35650 - RNA, 32 nt, Synthetic Construct; identical to SEQ ID NO: 3092
  source 1..32: mol_type = other RNA

SEQ ID NO: 35651 - RNA, 23 nt, Synthetic Construct
  source 1..23: mol_type = other RNA
tcctatactgagctgccccgaga

SEQ ID NO: 35652 - RNA, 22 nt, Synthetic Construct
  source 1..22: mol_type = other RNA
cattgcacttgtctcggcctga

SEQ ID NO: 35653 - RNA, 22 nt, Synthetic Construct
  source 1..22: mol_type = other RNA
cattgcacttgtctcggcctga

SEQ ID NO: 35654 - RNA, 21 nt, Synthetic Construct
  source 1..21: mol_type = other RNA
aacggaatcccaaaagcagct

SEQ ID NO: 35655 - RNA, 23 nt, Synthetic Construct
  source 1..23: mol_type = other RNA
tcctgtaccgagctgccccgaga

SEQ ID NO: 35656 - RNA, 21 nt, Synthetic Construct
  source 1..21: mol_type = other RNA
tgaggtagtagattgtacagt

SEQ ID NO: 35657 - RNA, 21 nt, Synthetic Construct
  source 1..21: mol_type = other RNA
tgaggtagtagattgtacagt

SEQ ID NO: 35658 - RNA, 21 nt, Synthetic Construct
  source 1..21: mol_type = other RNA
acagtagcctgcacattggtt

SEQ ID NO: 35659 - RNA, 21 nt, Synthetic Construct
  source 1..21: mol_type = other RNA
cgtaccgtgagtaataatgca

SEQ ID NO: 35660 - RNA, 26 nt, Synthetic Construct
  source 1..26: mol_type = other RNA
aatgacacgatcactcccgttgagtt

SEQ ID NO: 35661 - RNA, 26 nt, Synthetic Construct
  source 1..26: mol_type = other RNA
aatgacacgatcactcccgttgagtt

SEQ ID NO: 35662 - RNA, 16 nt, Synthetic Construct
  source 1..16: mol_type = other RNA
cgctagtaatcgcgga

SEQ ID NO: 35663 - RNA, 23 nt, Synthetic Construct
  source 1..23: mol_type = other RNA
ggctacattgtctgctgggtttc

SEQ ID NO: 35664 - RNA, 22 nt, Synthetic Construct
  source 1..22: mol_type = other RNA
tggagtgtgacaatggcgtttg

SEQ ID NO: 35665 - RNA, 22 nt, Synthetic Construct
  source 1..22: mol_type = other RNA
tggagtgtgacaatggcgtttg

SEQ ID NO: 35666 - RNA, 20 nt, Synthetic Construct
  source 1..20: mol_type = other RNA
tgaggtagtaggtcgtatag

SEQ ID NO: 35667 - RNA, 20 nt, Synthetic Construct
  source 1..20: mol_type = other RNA
tgagatagtaggttgtgtgg

SEQ ID NO: 35668 - RNA, 20 nt, Synthetic Construct
  source 1..20: mol_type = other RNA
tgagatagtaggttgtgtgg

SEQ ID NO: 35669 - RNA, 23 nt, Synthetic Construct
  source 1..23: mol_type = other RNA
caaagtgctgttcgtgcgggtag

SEQ ID NO: 35670 - RNA, 22 nt, Synthetic Construct
  source 1..22: mol_type = other RNA
tgaggtagaagtttgtgctgtt

SEQ ID NO: 35671 - RNA, 23 nt, Synthetic Construct
  source 1..23: mol_type = other RNA
tgtcagtttgtcaaatacccctt

SEQ ID NO: 35672 - RNA, 23 nt, Synthetic Construct
  source 1..23: mol_type = other RNA
tgtcagtttgtcaaatacccctt

SEQ ID NO: 35673 - RNA, 16 nt, Synthetic Construct
  source 1..16: mol_type = other RNA
gtctacggctatacca

SEQ ID NO: 35674 - RNA, 22 nt, Synthetic Construct
  source 1..22: mol_type = other RNA
gcctgtactgagctgccccgag

SEQ ID NO: 35675 - RNA, 22 nt, Synthetic Construct
  source 1..22: mol_type = other RNA
gcctgtactgagctgccccgag

SEQ ID NO: 35676 - RNA, 16 nt, Synthetic Construct
  source 1..16: mol_type = other RNA
tccgaaccgactagtg

SEQ ID NO: 35677 - RNA, 20 nt, Synthetic Construct
  source 1..20: mol_type = other RNA
cgaggtagtaggttgtgtgg

SEQ ID NO: 35678 - RNA, 22 nt, Synthetic Construct
  source 1..22: mol_type = other RNA
tgaggtagtagattgtatagtc

SEQ ID NO: 35679 - RNA, 21 nt, Synthetic Construct
  source 1..21: mol_type = other RNA
acctgtactgagctgccccga

SEQ ID NO: 35680 - RNA, 21 nt, Synthetic Construct
  source 1..21: mol_type = other RNA
acctgtactgagctgccccga

SEQ ID NO: 35681 - RNA, 22 nt, Synthetic Construct
  source 1..22: mol_type = other RNA
ctccctcgggagggcgcgcggg

SEQ ID NO: 35682 - RNA, 22 nt, Synthetic Construct
  source 1..22: mol_type = other RNA
tgaggtagtagtttgtgctatt

SEQ ID NO: 35683 - RNA, 23 nt, Synthetic Construct
  source 1..23: mol_type = other RNA
aatgacacgatcactcccgttga

SEQ ID NO: 35684 - RNA, 17 nt, Synthetic Construct
  source 1..17: mol_type = other RNA
agacagcaggacggtgg

SEQ ID NO: 35685 - RNA, 17 nt, Synthetic Construct
  source 1..17: mol_type = other RNA
agacagcaggacggtgg

SEQ ID NO: 35686 - RNA, 40 nt, Synthetic Construct; identical to SEQ ID NO: 1619
  source 1..40: mol_type = other RNA

SEQ ID NO: 35687 - RNA, 22 nt, Synthetic Construct
  source 1..22: mol_type = other RNA
ctcgtaccgtgagtaataatgc

SEQ ID NO: 35688 - RNA, 24 nt, Synthetic Construct
  source 1..24: mol_type = other RNA
tataccgaagctctaggtgcggca

SEQ ID NO: 35689 - RNA, 24 nt, Synthetic Construct
  source 1..24: mol_type = other RNA
tataccgaagctctaggtgcggca

SEQ ID NO: 35690 - RNA, 22 nt, Synthetic Construct
  source 1..22: mol_type = other RNA
tagcttatcagactgatgttgg

SEQ ID NO: 35691 - RNA, 22 nt, Synthetic Construct
  source 1..22: mol_type = other RNA
tagcttatcagactgatgttgg

SEQ ID NO: 35692 - RNA, 23 nt, Synthetic Construct
  source 1..23: mol_type = other RNA
cgaagtgctgttcgtgcaggtag

SEQ ID NO: 35693 - RNA, 22 nt, Synthetic Construct
  source 1..22: mol_type = other RNA
cataaagtagaaagcactacta

SEQ ID NO: 35694 - RNA, 23 nt, Synthetic Construct
  source 1..23: mol_type = other RNA
tgaggggaagagagcgagacttt

SEQ ID NO: 35695 - RNA, 23 nt, Synthetic Construct
  source 1..23: mol_type = other RNA
tgaggggaagagagcgagacttt

SEQ ID NO: 35696 - RNA, 22 nt, Synthetic Construct
  source 1..22: mol_type = other RNA
ttcaagtaatccaggataggct

SEQ ID NO: 35697 - RNA, 29 nt, Synthetic Construct
  source 1..29: mol_type = other RNA
gcatgggtggttcagtggtagaattctcg

SEQ ID NO: 35698 - RNA, 29 nt, Synthetic Construct
  source 1..29: mol_type = other RNA
gcatgggtggttcagtggtagaattctcg

SEQ ID NO: 35699 - RNA, 23 nt, Synthetic Construct
  source 1..23: mol_type = other RNA
tggtaatacgacgtacttagtat

SEQ ID NO: 35700 - RNA, 15 nt, Synthetic Construct
  source 1..15: mol_type = other RNA
cgactcttagcggtg

SEQ ID NO: 35701 - RNA, 15 nt, Synthetic Construct
  source 1..15: mol_type = other RNA
cgactcttagcggtg

SEQ ID NO: 35702 - RNA, 21 nt, Synthetic Construct
  source 1..21: mol_type = other RNA
tcccgtactgagctgccccga

SEQ ID NO: 35703 - RNA, 31 nt, Synthetic Construct; identical to SEQ ID NO: 2442
  source 1..31: mol_type = other RNA

SEQ ID NO: 35704 - RNA, 21 nt, Synthetic Construct
  source 1..21: mol_type = other RNA
tgaagtagtaggttgtatagt

SEQ ID NO: 35705 - RNA, 21 nt, Synthetic Construct
  source 1..21: mol_type = other RNA
tgaagtagtaggttgtatagt

SEQ ID NO: 35706 - RNA, 19 nt, Synthetic Construct
  source 1..19: mol_type = other RNA
tgagatgaagcactgtagc

SEQ ID NO: 35707 - RNA, 25 nt, Synthetic Construct
  source 1..25: mol_type = other RNA
gttgaattgtggtctgtggacgtgg

SEQ ID NO: 35708 - RNA, 25 nt, Synthetic Construct
  source 1..25: mol_type = other RNA
gttgaattgtggtctgtggacgtgg

SEQ ID NO: 35709 - RNA, 17 nt, Synthetic Construct
  source 1..17: mol_type = other RNA
tggggagtttggctggg

SEQ ID NO: 35710 - RNA, 17 nt, Synthetic Construct
  source 1..17: mol_type = other RNA
tggggagtttggctggg

SEQ ID NO: 35711 - RNA, 23 nt, Synthetic Construct
  source 1..23: mol_type = other RNA
tgaggtagtaggttgtatggttt

SEQ ID NO: 35712 - RNA, 21 nt, Synthetic Construct
  source 1..21: mol_type = other RNA
tggaatgtaaagaagtatgta

SEQ ID NO: 35713 - RNA, 21 nt, Synthetic Construct
  source 1..21: mol_type = other RNA
tgaggggcagggagcgagact

SEQ ID NO: 35714 - RNA, 21 nt, Synthetic Construct
  source 1..21: mol_type = other RNA
tgaggggcagggagcgagact

SEQ ID NO: 35715 - RNA, 37 nt, Synthetic Construct; identical to SEQ ID NO: 715
  source 1..37: mol_type = other RNA

SEQ ID NO: 35716 - RNA, 22 nt, Synthetic Construct
  source 1..22: mol_type = other RNA
tgaggtagtaggttgtggggtt

SEQ ID NO: 35717 - RNA, 25 nt, Synthetic Construct
  source 1..25: mol_type = other RNA
ttgaggatatgaggtcgagacgaca

SEQ ID NO: 35718 - RNA, 25 nt, Synthetic Construct
  source 1..25: mol_type = other RNA
ttgaggatatgagatcgggacgaca

SEQ ID NO: 35719 - RNA, 23 nt, Synthetic Construct
  source 1..23: mol_type = other RNA
tgaggtagtaggttgtatggttt

SEQ ID NO: 35720 - RNA, 22 nt, Synthetic Construct
  source 1..22: mol_type = other RNA
tcgcagcacgtaaatattggcg

SEQ ID NO: 35721 - RNA, 22 nt, Synthetic Construct
  source 1..22: mol_type = other RNA
tcgcagcacgtaaatattggcg

SEQ ID NO: 35722 - RNA, 16 nt, Synthetic Construct
  source 1..16: mol_type = other RNA
gtctatggccatacca

SEQ ID NO: 35723 - RNA, 33 nt, Synthetic Construct; identical to SEQ ID NO: 4947
  source 1..33: mol_type = other RNA

SEQ ID NO: 35724 - RNA, 33 nt, Synthetic Construct; identical to SEQ ID NO: 4947
  source 1..33: mol_type = other RNA

SEQ ID NO: 35725 - RNA, 22 nt, Synthetic Construct
  source 1..22: mol_type = other RNA
cccagtgttcagactacctgtt

SEQ ID NO: 35726 - RNA, 21 nt, Synthetic Construct
  source 1..21: mol_type = other RNA
tcctgtactgagctgctccga

SEQ ID NO: 35727 - RNA, 21 nt, Synthetic Construct
  source 1..21: mol_type = other RNA
tcctgtactgagctgctccga

SEQ ID NO: 35728 - RNA, 30 nt, Synthetic Construct; identical to SEQ ID NO: 5879
  source 1..30: mol_type = other RNA

SEQ ID NO: 35729 - RNA, 30 nt, Synthetic Construct; identical to SEQ ID NO: 5879
  source 1..30: mol_type = other RNA

SEQ ID NO: 35730 - RNA, 23 nt, Synthetic Construct
  source 1..23: mol_type = other RNA
tgaggcagtaggttgtgtggttt

SEQ ID NO: 35731 - RNA, 22 nt, Synthetic Construct
  source 1..22: mol_type = other RNA
taccctgtagaaccgaatttgt

SEQ ID NO: 35732 - RNA, 22 nt, Synthetic Construct
  source 1..22: mol_type = other RNA
taccctgtagaaccgaatttgt

SEQ ID NO: 35733 - RNA, 22 nt, Synthetic Construct
  source 1..22: mol_type = other RNA
aaggtagatagaacaggtcttg

SEQ ID NO: 35734 - RNA, 27 nt, Synthetic Construct
  source 1..27: mol_type = other RNA
gctttacattggactttgaacagatct

SEQ ID NO: 35735 - RNA, 27 nt, Synthetic Construct
  source 1..27: mol_type = other RNA
ccccccactgctaaatttgacaggctt

SEQ ID NO: 35736 - RNA, 21 nt, Synthetic Construct
  source 1..21: mol_type = other RNA
tcctgtactgagctaccccga

SEQ ID NO: 35737 - RNA, 21 nt, Synthetic Construct
  source 1..21: mol_type = other RNA
tcctgtactgagctaccccga

SEQ ID NO: 35738 - RNA, 21 nt, Synthetic Construct
  source 1..21: mol_type = other RNA
tgaggtagtaggttgcatagt

SEQ ID NO: 35739 - RNA, 21 nt, Synthetic Construct
  source 1..21: mol_type = other RNA
tgaggtagtaggttgcatagt

SEQ ID NO: 35740 - RNA, 25 nt, Synthetic Construct
  source 1..25: mol_type = other RNA
ttgaggatatgagatcgaggcgaca

SEQ ID NO: 35741 - RNA, 22 nt, Synthetic Construct
  source 1..22: mol_type = other RNA
cattgcgcttgtctcggtctga

SEQ ID NO: 35742 - RNA, 22 nt, Synthetic Construct
  source 1..22: mol_type = other RNA
cattgcgcttgtctcggtctga

SEQ ID NO: 35743 - RNA, 21 nt, Synthetic Construct
  source 1..21: mol_type = other RNA
tggagagtgacaatggtgttt

SEQ ID NO: 35744 - RNA, 23 nt, Synthetic Construct
  source 1..23: mol_type = other RNA
tggagtgtgacaatggtgtttgg

SEQ ID NO: 35745 - RNA, 23 nt, Synthetic Construct
  source 1..23: mol_type = other RNA
cctccctcgggagggcgcgcggg

SEQ ID NO: 35746 - RNA, 23 nt, Synthetic Construct
  source 1..23: mol_type = other RNA
cctccctcgggagggcgcgcggg

SEQ ID NO: 35747 - RNA, 23 nt, Synthetic Construct
  source 1..23: mol_type = other RNA
tcctatactgagctgccccgaga

SEQ ID NO: 35748 - RNA, 30 nt, Synthetic Construct; identical to SEQ ID NO: 344
  source 1..30: mol_type = other RNA

SEQ ID NO: 35749 - RNA, 30 nt, Synthetic Construct; identical to SEQ ID NO: 344
  source 1..30: mol_type = other RNA

SEQ ID NO: 35750 - RNA, 22 nt, Synthetic Construct
  source 1..22: mol_type = other RNA
gcctgctggggtggaacctggt

SEQ ID NO: 35751 - RNA, 22 nt, Synthetic Construct
  source 1..22: mol_type = other RNA
gcctgctggggtggaacctggt

SEQ ID NO: 35752 - RNA, 23 nt, Synthetic Construct
  source 1..23: mol_type = other RNA
tggtaatacgacgtacctagtgt

SEQ ID NO: 35753 - RNA, 23 nt, Synthetic Construct
  source 1..23: mol_type = other RNA
tggtaatacgacgtacctagtgt

SEQ ID NO: 35754 - RNA, 21 nt, Synthetic Construct
  source 1..21: mol_type = other RNA
tcctgtactgagctgccccaa

SEQ ID NO: 35755 - RNA, 18 nt, Synthetic Construct
  source 1..18: mol_type = other RNA
tcctgtactgagctgccc

SEQ ID NO: 35756 - RNA, 18 nt, Synthetic Construct
  source 1..18: mol_type = other RNA
tcctgtactgagctgccc

SEQ ID NO: 35757 - RNA, 28 nt, Synthetic Construct
  source 1..28: mol_type = other RNA
gcatgggtggttcagtggtagaattctc

SEQ ID NO: 35758 - RNA, 28 nt, Synthetic Construct
  source 1..28: mol_type = other RNA
gcatgggtggttcagtggtagaattctc

SEQ ID NO: 35759 - RNA, 22 nt, Synthetic Construct
  source 1..22: mol_type = other RNA
tggaatgtaaagaagtatgtac

SEQ ID NO: 35760 - RNA, 22 nt, Synthetic Construct
  source 1..22: mol_type = other RNA
tggaatgtaaagaagtatgtac

SEQ ID NO: 35761 - RNA, 19 nt, Synthetic Construct
  source 1..19: mol_type = other RNA
atctgctggaactgcaact

SEQ ID NO: 35762 - RNA, 19 nt, Synthetic Construct
  source 1..19: mol_type = other RNA
atctgctggaactgcaact

SEQ ID NO: 35763 - RNA, 21 nt, Synthetic Construct
  source 1..21: mol_type = other RNA
tgaggtagtaggttgtgaggt

SEQ ID NO: 35764 - RNA, 17 nt, Synthetic Construct
  source 1..17: mol_type = other RNA
tcgctagtaatcgcgga

SEQ ID NO: 35765 - RNA, 20 nt, Synthetic Construct
  source 1..20: mol_type = other RNA
tgaggaagtaggttgtgtgg

SEQ ID NO: 35766 - RNA, 22 nt, Synthetic Construct
  source 1..22: mol_type = other RNA
ctcgtaccgtgagtaataatgc

SEQ ID NO: 35767 - RNA, 22 nt, Synthetic Construct
  source 1..22: mol_type = other RNA
ctcgtaccgtgagtaataatgc

SEQ ID NO: 35768 - RNA, 22 nt, Synthetic Construct
  source 1..22: mol_type = other RNA
agagaactgaattccatgggtt

SEQ ID NO: 35769 - RNA, 21 nt, Synthetic Construct
  source 1..21: mol_type = other RNA
gcctgctggggtggaacctgg

SEQ ID NO: 35770 - RNA, 21 nt, Synthetic Construct
  source 1..21: mol_type = other RNA
gcctgctggggtggaacctgg

SEQ ID NO: 35771 - RNA, 21 nt, Synthetic Construct
  source 1..21: mol_type = other RNA
ggaggagttcgaaggtacgct

SEQ ID NO: 35772 - RNA, 25 nt, Synthetic Construct
  source 1..25: mol_type = other RNA
ggtaaaattgctgagtgaagcattg

SEQ ID NO: 35773 - RNA, 25 nt, Synthetic Construct
  source 1..25: mol_type = other RNA
ggtaaaattgctgagtgaagcattg

SEQ ID NO: 35774 - RNA, 24 nt, Synthetic Construct
  source 1..24: mol_type = other RNA
agcagcattgtacagggctatgag

SEQ ID NO: 35775 - RNA, 23 nt, Synthetic Construct
  source 1..23: mol_type = other RNA
tggtaatacgacgtacttagtgc

SEQ ID NO: 35776 - RNA, 23 nt, Synthetic Construct
  source 1..23: mol_type = other RNA
tggtaatacgacgtacttagtgc

SEQ ID NO: 35777 - RNA, 22 nt, Synthetic Construct
  source 1..22: mol_type = other RNA
tcgtaccatgagtaataatgcg

SEQ ID NO: 35778 - RNA, 22 nt, Synthetic Construct
  source 1..22: mol_type = other RNA
tcgtaccatgagtaataatgcg

SEQ ID NO: 35779 - RNA, 26 nt, Synthetic Construct
  source 1..26: mol_type = other RNA
tgtaaacatccccgactggaagcttt

SEQ ID NO: 35780 - RNA, 26 nt, Synthetic Construct
  source 1..26: mol_type = other RNA
tgtaaacatccccgactggaagcttt

SEQ ID NO: 35781 - RNA, 25 nt, Synthetic Construct
  source 1..25: mol_type = other RNA
tcggatccgtctgagcttggctttt

SEQ ID NO: 35782 - RNA, 25 nt, Synthetic Construct
  source 1..25: mol_type = other RNA
tcggatccgtctgagcttggctttt

SEQ ID NO: 35783 - RNA, 23 nt, Synthetic Construct
  source 1..23: mol_type = other RNA
caaagtgctgttcgcgcaggtag

SEQ ID NO: 35784 - RNA, 22 nt, Synthetic Construct
  source 1..22: mol_type = other RNA
tagcagcacgtaaatattggtg

SEQ ID NO: 35785 - RNA, 22 nt, Synthetic Construct
  source 1..22: mol_type = other RNA
tagcagcacgtaaatattggtg

SEQ ID NO: 35786 - RNA, 23 nt, Synthetic Construct
  source 1..23: mol_type = other RNA
tcctgtaccgagctgccccgaga

SEQ ID NO: 35787 - RNA, 38 nt, Synthetic Construct
  source 1..38: mol_type = other RNA
gctaaacctagccccaaacccactccaccttactacca

SEQ ID NO: 35788 - RNA, 16 nt, Synthetic Construct
  source 1..16: mol_type = other RNA
cagtcaggatgttggc

SEQ ID NO: 35789 - RNA, 23 nt, Synthetic Construct
  source 1..23: mol_type = other RNA
tcttggagtaggtcattgggtgt

SEQ ID NO: 35790 - RNA, 22 nt, Synthetic Construct
  source 1..22: mol_type = other RNA
tagcagcacgcaaatattggcg

SEQ ID NO: 35791 - RNA, 27 nt, Synthetic Construct
  source 1..27: mol_type = other RNA
ccccccactgctaaatttgtctggctt

SEQ ID NO: 35792 - RNA, 21 nt, Synthetic Construct
  source 1..21: mol_type = other RNA
tgaggtagtgggttgtatagt

SEQ ID NO: 35793 - RNA, 21 nt, Synthetic Construct
  source 1..21: mol_type = other RNA
tgaggtagtgggttgtatagt

SEQ ID NO: 35794 - RNA, 21 nt, Synthetic Construct
  source 1..21: mol_type = other RNA
tcctgtactgagctaccccga

SEQ ID NO: 35795 - RNA, 21 nt, Synthetic Construct
  source 1..21: mol_type = other RNA
tcctgtactgagctaccccga

SEQ ID NO: 35796 - RNA, 22 nt, Synthetic Construct
  source 1..22: mol_type = other RNA
tagcagcacataatggtttgtg

SEQ ID NO: 35797 - RNA, 22 nt, Synthetic Construct
  source 1..22: mol_type = other RNA
tagcagcacataatggtttgtg

SEQ ID NO: 35798 - RNA, 19 nt, Synthetic Construct
  source 1..19: mol_type = other RNA
agtaggtcatcgtcaggct

SEQ ID NO: 35799 - RNA, 19 nt, Synthetic Construct
  source 1..19: mol_type = other RNA
agtaggtcatcgtcaggct

SEQ ID NO: 35800 - RNA, 21 nt, Synthetic Construct
  source 1..21: mol_type = other RNA
tgaggtagtaggttgtgtggc

SEQ ID NO: 35801 - RNA, 21 nt, Synthetic Construct
  source 1..21: mol_type = other RNA
tcccgtactgagctgccccga

SEQ ID NO: 35802 - RNA, 22 nt, Synthetic Construct
  source 1..22: mol_type = other RNA
cgaggtagtagtttgtgctgtt

SEQ ID NO: 35803 - RNA, 22 nt, Synthetic Construct
  source 1..22: mol_type = other RNA
tattgcactcgtcccggcctgt

SEQ ID NO: 35804 - RNA, 22 nt, Synthetic Construct
  source 1..22: mol_type = other RNA
tattgcactcgtcccggcctgt

SEQ ID NO: 35805 - RNA, 22 nt, Synthetic Construct
  source 1..22: mol_type = other RNA
tgaggtagtaggttgtgtggtt

SEQ ID NO: 35806 - RNA, 27 nt, Synthetic Construct
  source 1..27: mol_type = other RNA
ccccccacagctaaatttgactggcta

SEQ ID NO: 35807 - RNA, 27 nt, Synthetic Construct
  source 1..27: mol_type = other RNA
ccccccacagctaaatttgactggcta

SEQ ID NO: 35808 - RNA, 21 nt, Synthetic Construct
  source 1..21: mol_type = other RNA
tgaggtagtaggttgtgtggt

SEQ ID NO: 35809 - RNA, 21 nt, Synthetic Construct
  source 1..21: mol_type = other RNA
tgaggtagtaggttgtgtggt

SEQ ID NO: 35810 - RNA, 23 nt, Synthetic Construct
  source 1..23: mol_type = other RNA
cggtaatacgacgtacttagtgt

SEQ ID NO: 35811 - RNA, 23 nt, Synthetic Construct
  source 1..23: mol_type = other RNA
cggtaatacgacgtacttagtgt

SEQ ID NO: 35812 - RNA, 21 nt, Synthetic Construct
  source 1..21: mol_type = other RNA
tgaggtagtagattgtacagt

SEQ ID NO: 35813 - RNA, 22 nt, Synthetic Construct
  source 1..22: mol_type = other RNA
cgttgcacttgtctcggtctga

SEQ ID NO: 35814 - RNA, 22 nt, Synthetic Construct
  source 1..22: mol_type = other RNA
tgaggtagtagtttgtgctgtg

SEQ ID NO: 35815 - RNA, 22 nt, Synthetic Construct
  source 1..22: mol_type = other RNA
tgaggtagtagtttgtgctgtg

SEQ ID NO: 35816 - RNA, 21 nt, Synthetic Construct
  source 1..21: mol_type = other RNA
tcatgtactgagctgccccga

SEQ ID NO: 35817 - RNA, 21 nt, Synthetic Construct
  source 1..21: mol_type = other RNA
tcatgtactgagctgccccga

SEQ ID NO: 35818 - RNA, 22 nt, Synthetic Construct
  source 1..22: mol_type = other RNA
tgaggtagtaggctgtgtggtt

SEQ ID NO: 35819 - RNA, 22 nt, Synthetic Construct
  source 1..22: mol_type = other RNA
tcgtaccgtgagtgataatgcg

SEQ ID NO: 35820 - RNA, 22 nt, Synthetic Construct
  source 1..22: mol_type = other RNA
taaggtagtaggttgtgtggtt

SEQ ID NO: 35821 - RNA, 18 nt, Synthetic Construct
  source 1..18: mol_type = other RNA
tccgacatgcgagggttc

SEQ ID NO: 35822 - RNA, 22 nt, Synthetic Construct
  source 1..22: mol_type = other RNA
gcctgtactgagctgccccgag

SEQ ID NO: 35823 - RNA, 22 nt, Synthetic Construct
  source 1..22: mol_type = other RNA
gcctgtactgagctgccccgag

SEQ ID NO: 35824 - RNA, 16 nt, Synthetic Construct
  source 1..16: mol_type = other RNA
aggtcatcattatctg

SEQ ID NO: 35825 - RNA, 16 nt, Synthetic Construct
  source 1..16: mol_type = other RNA
aggtcatcattatctg

SEQ ID NO: 35826 - RNA, 33 nt, Synthetic Construct; identical to SEQ ID NO: 3082
  source 1..33: mol_type = other RNA

SEQ ID NO: 35827 - RNA, 23 nt, Synthetic Construct
  source 1..23: mol_type = other RNA
tacagtagtctgcacattggttt

SEQ ID NO: 35828 - RNA, 23 nt, Synthetic Construct
  source 1..23: mol_type = other RNA
tacagtagtctgcacattggttt

SEQ ID NO: 35829 - RNA, 21 nt, Synthetic Construct
  source 1..21: mol_type = other RNA
tcaggctcagtcccctcccga

SEQ ID NO: 35830 - RNA, 21 nt, Synthetic Construct
  source 1..21: mol_type = other RNA
tcaggctcagtcccctcccga

SEQ ID NO: 35831 - RNA, 25 nt, Synthetic Construct
  source 1..25: mol_type = other RNA
aaaccgttaccattactgagtttag

SEQ ID NO: 35832 - RNA, 25 nt, Synthetic Construct
  source 1..25: mol_type = other RNA
aaaccgttaccattactgagtttag

SEQ ID NO: 35833 - RNA, 21 nt, Synthetic Construct
  source 1..21: mol_type = other RNA
agcaggacggtggccatggaa

SEQ ID NO: 35834 - RNA, 21 nt, Synthetic Construct
  source 1..21: mol_type = other RNA
agcaggacggtggccatggaa

SEQ ID NO: 35835 - RNA, 22 nt, Synthetic Construct
  source 1..22: mol_type = other RNA
agggggaaagttctatagtcct

SEQ ID NO: 35836 - RNA, 22 nt, Synthetic Construct
  source 1..22: mol_type = other RNA
agggggaaagttctatagtcct

SEQ ID NO: 35837 - RNA, 20 nt, Synthetic Construct
  source 1..20: mol_type = other RNA
gtacagtactgtgataactg

SEQ ID NO: 35838 - RNA, 20 nt, Synthetic Construct
  source 1..20: mol_type = other RNA
gtacagtactgtgataactg

SEQ ID NO: 35839 - RNA, 16 nt, Synthetic Construct
  source 1..16: mol_type = other RNA
gtaaacggcgggagta

SEQ ID NO: 35840 - RNA, 16 nt, Synthetic Construct
  source 1..16: mol_type = other RNA
gtaaacggcgggagta

SEQ ID NO: 35841 - RNA, 21 nt, Synthetic Construct
  source 1..21: mol_type = other RNA
tactccttaagcgaatctcgc

SEQ ID NO: 35842 - RNA, 21 nt, Synthetic Construct
  source 1..21: mol_type = other RNA
tactccttaagcgaatctcgc

SEQ ID NO: 35843 - RNA, 22 nt, Synthetic Construct
  source 1..22: mol_type = other RNA
tgtcccacccccactcctgttt

SEQ ID NO: 35844 - RNA, 22 nt, Synthetic Construct
  source 1..22: mol_type = other RNA
tgtcccacccccactcctgttt

SEQ ID NO: 35845 - RNA, 16 nt, Synthetic Construct
  source 1..16: mol_type = other RNA
cccctggacctgtact

SEQ ID NO: 35846 - RNA, 16 nt, Synthetic Construct
  source 1..16: mol_type = other RNA
cccctggacctgtact

SEQ ID NO: 35847 - RNA, 21 nt, Synthetic Construct
  source 1..21: mol_type = other RNA
tggagtgtgacagtggtgttt

SEQ ID NO: 35848 - RNA, 22 nt, Synthetic Construct
  source 1..22: mol_type = other RNA
tgaggtggtagtttgtgctgtt

SEQ ID NO: 35849 - RNA, 22 nt, Synthetic Construct
  source 1..22: mol_type = other RNA
tgaggtggtagtttgtgctgtt

SEQ ID NO: 35850 - RNA, 24 nt, Synthetic Construct
  source 1..24: mol_type = other RNA
tgtgaacatccccgactggaagct

SEQ ID NO: 35851 - RNA, 20 nt, Synthetic Construct
  source 1..20: mol_type = other RNA
tgaggtagtaggtcgtgtgg

SEQ ID NO: 35852 - RNA, 24 nt, Synthetic Construct
  source 1..24: mol_type = other RNA
tccctgagaccctttaacctgtgt

SEQ ID NO: 35853 - RNA, 24 nt, Synthetic Construct
  source 1..24: mol_type = other RNA
tccctgagaccctttaacctgtgt

SEQ ID NO: 35854 - RNA, 23 nt, Synthetic Construct
  source 1..23: mol_type = other RNA
tgaggggcagagagcgggacttt

SEQ ID NO: 35855 - RNA, 20 nt, Synthetic Construct
  source 1..20: mol_type = other RNA
caacggaatcccaaaagcag

SEQ ID NO: 35856 - RNA, 20 nt, Synthetic Construct
  source 1..20: mol_type = other RNA
caacggaatcccaaaagcag

SEQ ID NO: 35857 - RNA, 20 nt, Synthetic Construct
  source 1..20: mol_type = other RNA
tggggtagtaggttgtatag

SEQ ID NO: 35858 - RNA, 16 nt, Synthetic Construct
  source 1..16: mol_type = other RNA
gtctacggccataccg

SEQ ID NO: 35859 - RNA, 21 nt, Synthetic Construct
  source 1..21: mol_type = other RNA
atcggaacgtgcccagtcgtg

SEQ ID NO: 35860 - RNA, 23 nt, Synthetic Construct
  source 1..23: mol_type = other RNA
tcggatccgtctgagcttggctt

SEQ ID NO: 35861 - RNA, 23 nt, Synthetic Construct
  source 1..23: mol_type = other RNA
tcggatccgtctgagcttggctt

SEQ ID NO: 35862 - RNA, 19 nt, Synthetic Construct
  source 1..19: mol_type = other RNA
agcgaaattccttgtcggg

SEQ ID NO: 35863 - RNA, 19 nt, Synthetic Construct
  source 1..19: mol_type = other RNA
agcgaaattccttgtcggg

SEQ ID NO: 35864 - RNA, 16 nt, Synthetic Construct
  source 1..16: mol_type = other RNA
cgtgagctgggtttag

SEQ ID NO: 35865 - RNA, 16 nt, Synthetic Construct
  source 1..16: mol_type = other RNA
cgtgagctgggtttag

SEQ ID NO: 35866 - RNA, 29 nt, Synthetic Construct
  source 1..29: mol_type = other RNA
gcccggctagctcagtcggtagagcatgg

SEQ ID NO: 35867 - RNA, 27 nt, Synthetic Construct
  source 1..27: mol_type = other RNA
ccccccactgctaaattcgactggctt

SEQ ID NO: 35868 - RNA, 27 nt, Synthetic Construct
  source 1..27: mol_type = other RNA
ccccccactgctaaattcgactggctt

SEQ ID NO: 35869 - RNA, 22 nt, Synthetic Construct
  source 1..22: mol_type = other RNA
tgtcagtttgtcaaatacccct

SEQ ID NO: 35870 - RNA, 22 nt, Synthetic Construct
  source 1..22: mol_type = other RNA
tgtcagtttgtcaaatacccct

SEQ ID NO: 35871 - RNA, 23 nt, Synthetic Construct
  source 1..23: mol_type = other RNA
tgaggggcagagagcaagacttt

SEQ ID NO: 35872 - RNA, 23 nt, Synthetic Construct
  source 1..23: mol_type = other RNA
tgaggggcagagagcaagacttt

SEQ ID NO: 35873 - RNA, 27 nt, Synthetic Construct
  source 1..27: mol_type = other RNA
ccccccactactaaatttgactggctt

SEQ ID NO: 35874 - RNA, 27 nt, Synthetic Construct
  source 1..27: mol_type = other RNA
ccccccactactaaatttgactggctt

SEQ ID NO: 35875 - RNA, 15 nt, Synthetic Construct
  source 1..15: mol_type = other RNA
cagagttctacagtc

SEQ ID NO: 35876 - RNA, 15 nt, Synthetic Construct
  source 1..15: mol_type = other RNA
cagagttctacagtc

SEQ ID NO: 35877 - RNA, 23 nt, Synthetic Construct
  source 1..23: mol_type = other RNA
tagtgcaatattgcttatagggt

SEQ ID NO: 35878 - RNA, 23 nt, Synthetic Construct
  source 1..23: mol_type = other RNA
tagtgcaatattgcttatagggt

SEQ ID NO: 35879 - RNA, 22 nt, Synthetic Construct
  source 1..22: mol_type = other RNA
tggaatgtaaagaagtatgtaa

SEQ ID NO: 35880 - RNA, 22 nt, Synthetic Construct
  source 1..22: mol_type = other RNA
tggaatgtaaagaagtatgtaa

SEQ ID NO: 35881 - RNA, 22 nt, Synthetic Construct
  source 1..22: mol_type = other RNA
tcgtaccgtgagtaataatgcg

SEQ ID NO: 35882 - RNA, 22 nt, Synthetic Construct
  source 1..22: mol_type = other RNA
tcgtaccgtgagtaataatgcg

SEQ ID NO: 35883 - RNA, 24 nt, Synthetic Construct
  source 1..24: mol_type = other RNA
cgtaaacatccccgactggaagct

SEQ ID NO: 35884 - RNA, 23 nt, Synthetic Construct
  source 1..23: mol_type = other RNA
tggtaatacgacgtgcttagtgt

SEQ ID NO: 35885 - RNA, 23 nt, Synthetic Construct
  source 1..23: mol_type = other RNA
tggtaatacgacgtgcttagtgt

SEQ ID NO: 35886 - RNA, 22 nt, Synthetic Construct
  source 1..22: mol_type = other RNA
tgactccttaagcgaatctcgc

SEQ ID NO: 35887 - RNA, 22 nt, Synthetic Construct
  source 1..22: mol_type = other RNA
aaagtgctgttcgtgcaggtag

SEQ ID NO: 35888 - RNA, 23 nt, Synthetic Construct
  source 1..23: mol_type = other RNA
tgaggggcagagagagagacttt

SEQ ID NO: 35889 - RNA, 23 nt, Synthetic Construct
  source 1..23: mol_type = other RNA
tgaggggcagagagagagacttt

SEQ ID NO: 35890 - RNA, 23 nt, Synthetic Construct
  source 1..23: mol_type = other RNA
taaggggcagagagcgagacttt

SEQ ID NO: 35891 - RNA, 23 nt, Synthetic Construct
  source 1..23: mol_type = other RNA
taaggggcagagagcgagacttt

SEQ ID NO: 35892 - RNA, 20 nt, Synthetic Construct
  source 1..20: mol_type = other RNA
gcatggccgttcttagttgg

SEQ ID NO: 35893 - RNA, 20 nt, Synthetic Construct
  source 1..20: mol_type = other RNA
gcatggccgttcttagttgg

SEQ ID NO: 35894 - RNA, 20 nt, Synthetic Construct
  source 1..20: mol_type = other RNA
caaagaattctccttttggg

SEQ ID NO: 35895 - RNA, 20 nt, Synthetic Construct
  source 1..20: mol_type = other RNA
caaagaattctccttttggg

SEQ ID NO: 35896 - RNA, 36 nt, Synthetic Construct; identical to SEQ ID NO: 777
  source 1..36: mol_type = other RNA

SEQ ID NO: 35897 - RNA, 36 nt, Synthetic Construct; identical to SEQ ID NO: 777
  source 1..36: mol_type = other RNA

SEQ ID NO: 35898 - RNA, 22 nt, Synthetic Construct
  source 1..22: mol_type = other RNA
cattgcacctgtctcggtctga

SEQ ID NO: 35899 - RNA, 22 nt, Synthetic Construct
  source 1..22: mol_type = other RNA
cattgcacctgtctcggtctga

SEQ ID NO: 35900 - RNA, 19 nt, Synthetic Construct
  source 1..19: mol_type = other RNA
tggagtgtgacaatggtgt

SEQ ID NO: 35901 - RNA, 19 nt, Synthetic Construct
  source 1..19: mol_type = other RNA
tggagtgtgacaatggtgt

SEQ ID NO: 35902 - RNA, 21 nt, Synthetic Construct
  source 1..21: mol_type = other RNA
tgaggtaataggttgtgtggt

SEQ ID NO: 35903 - RNA, 21 nt, Synthetic Construct
  source 1..21: mol_type = other RNA
tgaggtaataggttgtgtggt

SEQ ID NO: 35904 - RNA, 22 nt, Synthetic Construct
  source 1..22: mol_type = other RNA
cctctgggcccttcctccagtt

SEQ ID NO: 35905 - RNA, 22 nt, Synthetic Construct
  source 1..22: mol_type = other RNA
cctctgggcccttcctccagtt

SEQ ID NO: 35906 - RNA, 37 nt, Synthetic Construct; identical to SEQ ID NO: 1620
  source 1..37: mol_type = other RNA

SEQ ID NO: 35907 - RNA, 37 nt, Synthetic Construct; identical to SEQ ID NO: 1620
  source 1..37: mol_type = other RNA

SEQ ID NO: 35908 - RNA, 20 nt, Synthetic Construct
  source 1..20: mol_type = other RNA
tgaggtagaaggttgtgtgg

SEQ ID NO: 35909 - RNA, 20 nt, Synthetic Construct
  source 1..20: mol_type = other RNA
tgaggtagaaggttgtgtgg

SEQ ID NO: 35910 - RNA, 22 nt, Synthetic Construct
  source 1..22: mol_type = other RNA
tattgcacttgtcccagcctgt

SEQ ID NO: 35911 - RNA, 22 nt, Synthetic Construct
  source 1..22: mol_type = other RNA
tagcagcacgtaaatatcggcg

SEQ ID NO: 35912 - RNA, 18 nt, Synthetic Construct
  source 1..18: mol_type = other RNA
gttaaaaagctcgtagtt

SEQ ID NO: 35913 - RNA, 18 nt, Synthetic Construct
  source 1..18: mol_type = other RNA
gttaaaaagctcgtagtt

SEQ ID NO: 35914 - RNA, 24 nt, Synthetic Construct
  source 1..24: mol_type = other RNA
tgtcagtttgtcaaataccccaac

SEQ ID NO: 35915 - RNA, 23 nt, Synthetic Construct
  source 1..23: mol_type = other RNA
ctggccctctctgcccttccgta

SEQ ID NO: 35916 - RNA, 23 nt, Synthetic Construct
  source 1..23: mol_type = other RNA
ctggccctctctgcccttccgta

SEQ ID NO: 35917 - RNA, 23 nt, Synthetic Construct
  source 1..23: mol_type = other RNA
ggctcggtctgaggcccctcagt

SEQ ID NO: 35918 - RNA, 23 nt, Synthetic Construct
  source 1..23: mol_type = other RNA
ggctcggtctgaggcccctcagt

SEQ ID NO: 35919 - RNA, 18 nt, Synthetic Construct
  source 1..18: mol_type = other RNA
aagcggtggatgatgtgg

SEQ ID NO: 35920 - RNA, 23 nt, Synthetic Construct
  source 1..23: mol_type = other RNA
aacggaatcccaaaagcagctgt

SEQ ID NO: 35921 - RNA, 23 nt, Synthetic Construct
  source 1..23: mol_type = other RNA
tgaggtggtaggttgtgtggttt

SEQ ID NO: 35922 - RNA, 23 nt, Synthetic Construct
  source 1..23: mol_type = other RNA
tgaggtggtaggttgtgtggttt

SEQ ID NO: 35923 - RNA, 20 nt, Synthetic Construct
  source 1..20: mol_type = other RNA
tccctgtcctccaggagctc

SEQ ID NO: 35924 - RNA, 20 nt, Synthetic Construct
  source 1..20: mol_type = other RNA
tccctgtcctccaggagctc

SEQ ID NO: 35925 - RNA, 22 nt, Synthetic Construct
  source 1..22: mol_type = other RNA
tcaggtagtagattgtatagtt

SEQ ID NO: 35926 - RNA, 21 nt, Synthetic Construct
  source 1..21: mol_type = other RNA
caaagtgctgttcgtgcaggt

SEQ ID NO: 35927 - RNA, 24 nt, Synthetic Construct
  source 1..24: mol_type = other RNA
tcccacatggtctagcggttagga

SEQ ID NO: 35928 - RNA, 24 nt, Synthetic Construct
  source 1..24: mol_type = other RNA
tcccacatggtctagcggttagga

SEQ ID NO: 35929 - RNA, 21 nt, Synthetic Construct
  source 1..21: mol_type = other RNA
taactccttaagcgaatctcc

SEQ ID NO: 35930 - RNA, 21 nt, Synthetic Construct
  source 1..21: mol_type = other RNA
taactccttaagcgaatctcc

SEQ ID NO: 35931 - RNA, 23 nt, Synthetic Construct
  source 1..23: mol_type = other RNA
ggctcggtctgaggcccctcagt

SEQ ID NO: 35932 - RNA, 23 nt, Synthetic Construct
  source 1..23: mol_type = other RNA
ggctcggtctgaggcccctcagt

SEQ ID NO: 35933 - RNA, 43 nt, Synthetic Construct; identical to SEQ ID NO: 1204
  source 1..43: mol_type = other RNA

SEQ ID NO: 35934 - RNA, 43 nt, Synthetic Construct; identical to SEQ ID NO: 1204
  source 1..43: mol_type = other RNA

SEQ ID NO: 35935 - RNA, 22 nt, Synthetic Construct
  source 1..22: mol_type = other RNA
tagcagcaagtaaatattggcg

SEQ ID NO: 35936 - RNA, 22 nt, Synthetic Construct
  source 1..22: mol_type = other RNA
tagcagcaagtaaatattggcg

SEQ ID NO: 35937 - RNA, 22 nt, Synthetic Construct
  source 1..22: mol_type = other RNA
cgaggtagtagtttgtgctgtt

SEQ ID NO: 35938 - RNA, 22 nt, Synthetic Construct
  source 1..22: mol_type = other RNA
cgaggtagtagtttgtgctgtt

SEQ ID NO: 35939 - RNA, 22 nt, Synthetic Construct
  source 1..22: mol_type = other RNA
tgtggtgtttcctactttatgg

SEQ ID NO: 35940 - RNA, 22 nt, Synthetic Construct
  source 1..22: mol_type = other RNA
tgtggtgtttcctactttatgg

SEQ ID NO: 35941 - RNA, 22 nt, Synthetic Construct
  source 1..22: mol_type = other RNA
taactccttaagcgaatctcgc

SEQ ID NO: 35942 - RNA, 22 nt, Synthetic Construct
  source 1..22: mol_type = other RNA
taactccttaagcgaatctcgc

SEQ ID NO: 35943 - RNA, 19 nt, Synthetic Construct
  source 1..19: mol_type = other RNA
atcacattgccagggattt

SEQ ID NO: 35944 - RNA, 19 nt, Synthetic Construct
  source 1..19: mol_type = other RNA
atcacattgccagggattt

SEQ ID NO: 35945 - RNA, 21 nt, Synthetic Construct
  source 1..21: mol_type = other RNA
cccataaagtagaaagcacta

SEQ ID NO: 35946 - RNA, 23 nt, Synthetic Construct
  source 1..23: mol_type = other RNA
tcctgtaccgagctgccccgaga

SEQ ID NO: 35947 - RNA, 19 nt, Synthetic Construct
  source 1..19: mol_type = other RNA
ggtggggagtttggctggg

SEQ ID NO: 35948 - RNA, 19 nt, Synthetic Construct
  source 1..19: mol_type = other RNA
ggtggggagtttggctggg

SEQ ID NO: 35949 - RNA, 23 nt, Synthetic Construct
  source 1..23: mol_type = other RNA
agcagcattgtacagggctatgg

SEQ ID NO: 35950 - RNA, 21 nt, Synthetic Construct
  source 1..21: mol_type = other RNA
tcctgtactgagctgcccaga

SEQ ID NO: 35951 - RNA, 21 nt, Synthetic Construct
  source 1..21: mol_type = other RNA
tcctgtactgagctgcccaga

SEQ ID NO: 35952 - RNA, 22 nt, Synthetic Construct
  source 1..22: mol_type = other RNA
tcgtaccgtgagtaataatgca

SEQ ID NO: 35953 - RNA, 22 nt, Synthetic Construct
  source 1..22: mol_type = other RNA
tcgtaccgtgagtaataatgca

SEQ ID NO: 35954 - RNA, 22 nt, Synthetic Construct
  source 1..22: mol_type = other RNA
ggaggtagtaggttgtgtggtt

SEQ ID NO: 35955 - RNA, 22 nt, Synthetic Construct
  source 1..22: mol_type = other RNA
ggaggtagtaggttgtgtggtt

SEQ ID NO: 35956 - RNA, 22 nt, Synthetic Construct
  source 1..22: mol_type = other RNA
tgaggtaatagtttgtgctgtt

SEQ ID NO: 35957 - RNA, 22 nt, Synthetic Construct
  source 1..22: mol_type = other RNA
ctccctcgggagggcgcgcggg

SEQ ID NO: 35958 - RNA, 36 nt, Synthetic Construct; identical to SEQ ID NO: 777
  source 1..36: mol_type = other RNA

SEQ ID NO: 35959 - RNA, 36 nt, Synthetic Construct; identical to SEQ ID NO: 777
  source 1..36: mol_type = other RNA

SEQ ID NO: 35960 - RNA, 22 nt, Synthetic Construct
  source 1..22: mol_type = other RNA
tagcggcacgtaaatattggcg

SEQ ID NO: 35961 - RNA, 22 nt, Synthetic Construct
  source 1..22: mol_type = other RNA
tagcggcacgtaaatattggcg

SEQ ID NO: 35962 - RNA, 23 nt, Synthetic Construct
  source 1..23: mol_type = other RNA
agcagcattgtacagggctatgc

SEQ ID NO: 35963 - RNA, 22 nt, Synthetic Construct
  source 1..22: mol_type = other RNA
tgggatgagggattgaagtgga

SEQ ID NO: 35964 - RNA, 22 nt, Synthetic Construct
  source 1..22: mol_type = other RNA
tccttcattccaccggagtctg

SEQ ID NO: 35965 - RNA, 30 nt, Synthetic Construct; identical to SEQ ID NO: 1079
  source 1..30: mol_type = other RNA

SEQ ID NO: 35966 - RNA, 30 nt, Synthetic Construct; identical to SEQ ID NO: 1079
  source 1..30: mol_type = other RNA

SEQ ID NO: 35967 - RNA, 24 nt, Synthetic Construct
  source 1..24: mol_type = other RNA
tcccccaggtgtgattctgatttg

SEQ ID NO: 35968 - RNA, 24 nt, Synthetic Construct
  source 1..24: mol_type = other RNA
tcccccaggtgtgattctgatttg

SEQ ID NO: 35969 - RNA, 27 nt, Synthetic Construct
  source 1..27: mol_type = other RNA
ccccccacagctaaatttgactggctt

SEQ ID NO: 35970 - RNA, 27 nt, Synthetic Construct
  source 1..27: mol_type = other RNA
ccccccactgctaaatttggctggctt

SEQ ID NO: 35971 - RNA, 23 nt, Synthetic Construct
  source 1..23: mol_type = other RNA
tggtaatacgacgtacttagtat

SEQ ID NO: 35972 - RNA, 23 nt, Synthetic Construct
  source 1..23: mol_type = other RNA
tggtaatacgacgtacttagtat

SEQ ID NO: 35973 - RNA, 21 nt, Synthetic Construct
  source 1..21: mol_type = other RNA
acctgtactgagctgccccga

SEQ ID NO: 35974 - RNA, 21 nt, Synthetic Construct
  source 1..21: mol_type = other RNA
acctgtactgagctgccccga

SEQ ID NO: 35975 - RNA, 19 nt, Synthetic Construct
  source 1..19: mol_type = other RNA
tgaggtagtaggttgtata

SEQ ID NO: 35976 - RNA, 18 nt, Synthetic Construct
  source 1..18: mol_type = other RNA
cccaaaggtcgtcggttc

SEQ ID NO: 35977 - RNA, 23 nt, Synthetic Construct
  source 1..23: mol_type = other RNA
tgaggggcagagagcgagactat

SEQ ID NO: 35978 - RNA, 31 nt, Synthetic Construct; identical to SEQ ID NO: 4881
  source 1..31: mol_type = other RNA

SEQ ID NO: 35979 - RNA, 31 nt, Synthetic Construct; identical to SEQ ID NO: 4881
  source 1..31: mol_type = other RNA

SEQ ID NO: 35980 - RNA, 22 nt, Synthetic Construct
  source 1..22: mol_type = other RNA
tgaggtagtaggatgtgtggtt

SEQ ID NO: 35981 - RNA, 22 nt, Synthetic Construct
  source 1..22: mol_type = other RNA
gcctgtactgagctgccccgag

SEQ ID NO: 35982 - RNA, 22 nt, Synthetic Construct
  source 1..22: mol_type = other RNA
tggaatgtaaagaagtatgtac

SEQ ID NO: 35983 - RNA, 24 nt, Synthetic Construct
  source 1..24: mol_type = other RNA
gactcttagcggtggatcactcgg

SEQ ID NO: 35984 - RNA, 22 nt, Synthetic Construct
  source 1..22: mol_type = other RNA
tattgcacttgtcccggtctgt

SEQ ID NO: 35985 - RNA, 21 nt, Synthetic Construct
  source 1..21: mol_type = other RNA
cattattacttttggtacgcg

SEQ ID NO: 35986 - RNA, 17 nt, Synthetic Construct
  source 1..17: mol_type = other RNA
agacagcaggacggtgg

SEQ ID NO: 35987 - RNA, 17 nt, Synthetic Construct
  source 1..17: mol_type = other RNA
agacagcaggacggtgg

SEQ ID NO: 35988 - RNA, 23 nt, Synthetic Construct
  source 1..23: mol_type = other RNA
tgaggggcagagagcgaggcttt

SEQ ID NO: 35989 - RNA, 23 nt, Synthetic Construct
  source 1..23: mol_type = other RNA
tgaggggcagagagcgaggcttt

SEQ ID NO: 35990 - RNA, 24 nt, Synthetic Construct
  source 1..24: mol_type = other RNA
taccctgtagatccgaatttgtgt

SEQ ID NO: 35991 - RNA, 21 nt, Synthetic Construct
  source 1..21: mol_type = other RNA
tgaggtagtagtctgtgctgt

SEQ ID NO: 35992 - RNA, 35 nt, Synthetic Construct; identical to SEQ ID NO: 1095
  source 1..35: mol_type = other RNA

SEQ ID NO: 35993 - RNA, 35 nt, Synthetic Construct; identical to SEQ ID NO: 1095
  source 1..35: mol_type = other RNA

SEQ ID NO: 35994 - RNA, 38 nt, Synthetic Construct; identical to SEQ ID NO: 7148
  source 1..38: mol_type = other RNA

SEQ ID NO: 35995 - RNA, 24 nt, Synthetic Construct
  source 1..24: mol_type = other RNA
atgacacgatcactcccgttgagt

SEQ ID NO: 35996 - RNA, 24 nt, Synthetic Construct
  source 1..24: mol_type = other RNA
atgacacgatcactcccgttgagt

SEQ ID NO: 35997 - RNA, 18 nt, Synthetic Construct
  source 1..18: mol_type = other RNA
aatcagcggggaaagaag

SEQ ID NO: 35998 - RNA, 18 nt, Synthetic Construct
  source 1..18: mol_type = other RNA
aatcagcggggaaagaag

SEQ ID NO: 35999 - RNA, 20 nt, Synthetic Construct
  source 1..20: mol_type = other RNA
tgaggtggtaggttgtatag

SEQ ID NO: 36000 - RNA, 27 nt, Synthetic Construct
  source 1..27: mol_type = other RNA
cgactcttagcggtggatcactcggct

SEQ ID NO: 36001 - RNA, 27 nt, Synthetic Construct
  source 1..27: mol_type = other RNA
ccccccgctgctaaatttgactggctt

SEQ ID NO: 36002 - RNA, 22 nt, Synthetic Construct
  source 1..22: mol_type = other RNA
tacaagtaattcaggataggtt

SEQ ID NO: 36003 - RNA, 24 nt, Synthetic Construct
  source 1..24: mol_type = other RNA
tgagaactgaattccatgggttat

SEQ ID NO: 36004 - RNA, 21 nt, Synthetic Construct
  source 1..21: mol_type = other RNA
tccctgtcctccaggagctca

SEQ ID NO: 36005 - RNA, 26 nt, Synthetic Construct
  source 1..26: mol_type = other RNA
tccctggtggtctagtggttaggatt

SEQ ID NO: 36006 - RNA, 26 nt, Synthetic Construct
  source 1..26: mol_type = other RNA
tccctggtggtctagtggttaggatt

SEQ ID NO: 36007 - RNA, 22 nt, Synthetic Construct
  source 1..22: mol_type = other RNA
tcctgtactgagctgccccggg

SEQ ID NO: 36008 - RNA, 22 nt, Synthetic Construct
  source 1..22: mol_type = other RNA
tcctgtactgagctgccccggg

SEQ ID NO: 36009 - RNA, 37 nt, Synthetic Construct; identical to SEQ ID NO: 2365
  source 1..37: mol_type = other RNA

SEQ ID NO: 36010 - RNA, 22 nt, Synthetic Construct
  source 1..22: mol_type = other RNA
tcgcaccgtgagtaataatgcg

SEQ ID NO: 36011 - RNA, 22 nt, Synthetic Construct
  source 1..22: mol_type = other RNA
tcgcaccgtgagtaataatgcg

SEQ ID NO: 36012 - RNA, 17 nt, Synthetic Construct
  source 1..17: mol_type = other RNA
gcgtagatatgcggagg

SEQ ID NO: 36013 - RNA, 16 nt, Synthetic Construct
  source 1..16: mol_type = other RNA
gtgacgcgcatgaatg

SEQ ID NO: 36014 - RNA, 16 nt, Synthetic Construct
  source 1..16: mol_type = other RNA
gtgacgcgcatgaatg

SEQ ID NO: 36015 - RNA, 22 nt, Synthetic Construct
  source 1..22: mol_type = other RNA
actggacttggagtcagaaggc

SEQ ID NO: 36016 - RNA, 22 nt, Synthetic Construct
  source 1..22: mol_type = other RNA
actggacttggagtcagaaggc

SEQ ID NO: 36017 - RNA, 21 nt, Synthetic Construct
  source 1..21: mol_type = other RNA
tgaggtagtagtttgtgctgc

SEQ ID NO: 36018 - RNA, 21 nt, Synthetic Construct
  source 1..21: mol_type = other RNA
tgaggtagtagtttgtgctgc

SEQ ID NO: 36019 - RNA, 18 nt, Synthetic Construct
  source 1..18: mol_type = other RNA
ggtagcgtggccgagtgg

SEQ ID NO: 36020 - RNA, 18 nt, Synthetic Construct
  source 1..18: mol_type = other RNA
ggtagcgtggccgagtgg

SEQ ID NO: 36021 - RNA, 28 nt, Synthetic Construct
  source 1..28: mol_type = other RNA
ccccccactgctaaatttggctggcttt

SEQ ID NO: 36022 - RNA, 28 nt, Synthetic Construct
  source 1..28: mol_type = other RNA
ccccccactgctaaatttggctggcttt

SEQ ID NO: 36023 - RNA, 21 nt, Synthetic Construct
  source 1..21: mol_type = other RNA
aaaagctgggttgagagggcg

SEQ ID NO: 36024 - RNA, 21 nt, Synthetic Construct
  source 1..21: mol_type = other RNA
aaaagctgggttgagagggcg

SEQ ID NO: 36025 - RNA, 23 nt, Synthetic Construct
  source 1..23: mol_type = other RNA
tgaggtagtaggttgtgtggttt

SEQ ID NO: 36026 - RNA, 22 nt, Synthetic Construct
  source 1..22: mol_type = other RNA
tgaggtggtagtttgtgctgtt

SEQ ID NO: 36027 - RNA, 22 nt, Synthetic Construct
  source 1..22: mol_type = other RNA
tgaggtggtagtttgtgctgtt

SEQ ID NO: 36028 - RNA, 21 nt, Synthetic Construct
  source 1..21: mol_type = other RNA
tcccagtaaacggcggccgta

SEQ ID NO: 36029 - RNA, 21 nt, Synthetic Construct
  source 1..21: mol_type = other RNA
tcccagtaaacggcggccgta

SEQ ID NO: 36030 - RNA, 23 nt, Synthetic Construct
  source 1..23: mol_type = other RNA
tgaggtagtaggttgtgtggttg

SEQ ID NO: 36031 - RNA, 23 nt, Synthetic Construct
  source 1..23: mol_type = other RNA
tgaggtagtaggttgtgtggttg

SEQ ID NO: 36032 - RNA, 22 nt, Synthetic Construct
  source 1..22: mol_type = other RNA
ttcaagtaatccaggataggcc

SEQ ID NO: 36033 - RNA, 22 nt, Synthetic Construct
  source 1..22: mol_type = other RNA
ttcaagtaatccaggataggcc

SEQ ID NO: 36034 - RNA, 22 nt, Synthetic Construct
  source 1..22: mol_type = other RNA
cccagtgttcagactacctgtt

SEQ ID NO: 36035 - RNA, 22 nt, Synthetic Construct
  source 1..22: mol_type = other RNA
cccagtgttcagactacctgtt

SEQ ID NO: 36036 - RNA, 27 nt, Synthetic Construct
  source 1..27: mol_type = other RNA
ccccccactgctaaatttggctggctt

SEQ ID NO: 36037 - RNA, 27 nt, Synthetic Construct
  source 1..27: mol_type = other RNA
ccccccactgctaaatttggctggctt

SEQ ID NO: 36038 - RNA, 21 nt, Synthetic Construct
  source 1..21: mol_type = other RNA
tgaggggcagggagcgagact

SEQ ID NO: 36039 - RNA, 21 nt, Synthetic Construct
  source 1..21: mol_type = other RNA
tgaggggcagggagcgagact

SEQ ID NO: 36040 - RNA, 21 nt, Synthetic Construct
  source 1..21: mol_type = other RNA
taaggtagtaggttgtatagt

SEQ ID NO: 36041 - RNA, 21 nt, Synthetic Construct
  source 1..21: mol_type = other RNA
taaggtagtaggttgtatagt

SEQ ID NO: 36042 - RNA, 23 nt, Synthetic Construct
  source 1..23: mol_type = other RNA
tgaggggcagagagcgagactat

SEQ ID NO: 36043 - RNA, 23 nt, Synthetic Construct
  source 1..23: mol_type = other RNA
tgaggggcagagagcgagactat

SEQ ID NO: 36044 - RNA, 17 nt, Synthetic Construct
  source 1..17: mol_type = other RNA
cagagacgagtcgacca

SEQ ID NO: 36045 - RNA, 22 nt, Synthetic Construct
  source 1..22: mol_type = other RNA
tgaggtagtaggttgagtggtt

SEQ ID NO: 36046 - RNA, 22 nt, Synthetic Construct
  source 1..22: mol_type = other RNA
tgaggtagtaggttgagtggtt

SEQ ID NO: 36047 - RNA, 38 nt, Synthetic Construct; identical to SEQ ID NO: 7148
  source 1..38: mol_type = other RNA

SEQ ID NO: 36048 - RNA, 38 nt, Synthetic Construct; identical to SEQ ID NO: 7148
  source 1..38: mol_type = other RNA

SEQ ID NO: 36049 - RNA, 15 nt, Synthetic Construct
  source 1..15: mol_type = other RNA
gctagtaatcgcgga

SEQ ID NO: 36050 - RNA, 28 nt, Synthetic Construct
  source 1..28: mol_type = other RNA
cccccccactgctaaatttgactggcta

SEQ ID NO: 36051 - RNA, 31 nt, Synthetic Construct; identical to SEQ ID NO: 14087
  source 1..31: mol_type = other RNA

SEQ ID NO: 36052 - RNA, 21 nt, Synthetic Construct
  source 1..21: mol_type = other RNA
agaggggcagagagcgagact

SEQ ID NO: 36053 - RNA, 21 nt, Synthetic Construct
  source 1..21: mol_type = other RNA
agaggggcagagagcgagact

SEQ ID NO: 36054 - RNA, 36 nt, Synthetic Construct; identical to SEQ ID NO: 744
  source 1..36: mol_type = other RNA

SEQ ID NO: 36055 - RNA, 22 nt, Synthetic Construct
  source 1..22: mol_type = other RNA
tgaggtagtaggttgtatagtg

SEQ ID NO: 36056 - RNA, 22 nt, Synthetic Construct
  source 1..22: mol_type = other RNA
tgaggtagtaggttgtatagtg

SEQ ID NO: 36057 - RNA, 22 nt, Synthetic Construct
  source 1..22: mol_type = other RNA
tgaggtaatagtttgtgctgtt

SEQ ID NO: 36058 - RNA, 22 nt, Synthetic Construct
  source 1..22: mol_type = other RNA
tgaggtaatagtttgtgctgtt

SEQ ID NO: 36059 - RNA, 22 nt, Synthetic Construct
  source 1..22: mol_type = other RNA
tcagtgcatgacagaacttggg

SEQ ID NO: 36060 - RNA, 22 nt, Synthetic Construct
  source 1..22: mol_type = other RNA
tcagtgcatgacagaacttggg

SEQ ID NO: 36061 - RNA, 16 nt, Synthetic Construct
  source 1..16: mol_type = other RNA
gtctgcggccatacca

SEQ ID NO: 36062 - RNA, 23 nt, Synthetic Construct
  source 1..23: mol_type = other RNA
tcttggagtaggtcattgggtgt

SEQ ID NO: 36063 - RNA, 15 nt, Synthetic Construct
  source 1..15: mol_type = other RNA
cagtgaaacgagtca

SEQ ID NO: 36064 - RNA, 22 nt, Synthetic Construct
  source 1..22: mol_type = other RNA
ttcaagtaatccaggataggca

SEQ ID NO: 36065 - RNA, 22 nt, Synthetic Construct
  source 1..22: mol_type = other RNA
tccttcattccaccggagtctg

SEQ ID NO: 36066 - RNA, 22 nt, Synthetic Construct
  source 1..22: mol_type = other RNA
tccttcattccaccggagtctg

SEQ ID NO: 36067 - RNA, 23 nt, Synthetic Construct
  source 1..23: mol_type = other RNA
tgaggggaagagagcgagacttt

SEQ ID NO: 36068 - RNA, 22 nt, Synthetic Construct
  source 1..22: mol_type = other RNA
cgcatcccctagggcattggtg

SEQ ID NO: 36069 - RNA, 22 nt, Synthetic Construct
  source 1..22: mol_type = other RNA
cgcatcccctagggcattggtg

SEQ ID NO: 36070 - RNA, 22 nt, Synthetic Construct
  source 1..22: mol_type = other RNA
cagcagcacgtaaatattggcg

SEQ ID NO: 36071 - RNA, 22 nt, Synthetic Construct
  source 1..22: mol_type = other RNA
cagcagcacgtaaatattggcg

SEQ ID NO: 36072 - RNA, 32 nt, Synthetic Construct; identical to SEQ ID NO: 1128
  source 1..32: mol_type = other RNA

SEQ ID NO: 36073 - RNA, 32 nt, Synthetic Construct; identical to SEQ ID NO: 1128
  source 1..32: mol_type = other RNA

SEQ ID NO: 36074 - RNA, 34 nt, Synthetic Construct; identical to SEQ ID NO: 2364
  source 1..34: mol_type = other RNA

SEQ ID NO: 36075 - RNA, 22 nt, Synthetic Construct
  source 1..22: mol_type = other RNA
tagcagcacgtagatattggcg

SEQ ID NO: 36076 - RNA, 22 nt, Synthetic Construct
  source 1..22: mol_type = other RNA
tagcagcacgtagatattggcg

SEQ ID NO: 36077 - RNA, 23 nt, Synthetic Construct
  source 1..23: mol_type = other RNA
cgaggtagtaggttgtgtggttt

SEQ ID NO: 36078 - RNA, 23 nt, Synthetic Construct
  source 1..23: mol_type = other RNA
cgaggtagtaggttgtgtggttt

SEQ ID NO: 36079 - RNA, 24 nt, Synthetic Construct
  source 1..24: mol_type = other RNA
ttgcagctgcctgggagtgacttc

SEQ ID NO: 36080 - RNA, 24 nt, Synthetic Construct
  source 1..24: mol_type = other RNA
ttgcagctgcctgggagtgacttc

SEQ ID NO: 36081 - RNA, 24 nt, Synthetic Construct
  source 1..24: mol_type = other RNA
tgcaaacatccccgactggaagct

SEQ ID NO: 36082 - RNA, 18 nt, Synthetic Construct
  source 1..18: mol_type = other RNA
ctaatgagactgccggtg

SEQ ID NO: 36083 - RNA, 22 nt, Synthetic Construct
  source 1..22: mol_type = other RNA
tgtggtagtaggttgtatagtt

SEQ ID NO: 36084 - RNA, 22 nt, Synthetic Construct
  source 1..22: mol_type = other RNA
tgtggtagtaggttgtatagtt

SEQ ID NO: 36085 - RNA, 21 nt, Synthetic Construct
  source 1..21: mol_type = other RNA
agcagcattgtacagggctat

SEQ ID NO: 36086 - RNA, 18 nt, Synthetic Construct
  source 1..18: mol_type = other RNA
gtaggtcatcgtcaggct

SEQ ID NO: 36087 - RNA, 18 nt, Synthetic Construct
  source 1..18: mol_type = other RNA
gtaggtcatcgtcaggct

SEQ ID NO: 36088 - RNA, 24 nt, Synthetic Construct
  source 1..24: mol_type = other RNA
caaagaattctccttttgggcttt

SEQ ID NO: 36089 - RNA, 18 nt, Synthetic Construct
  source 1..18: mol_type = other RNA
agcagcattgtacagggc

SEQ ID NO: 36090 - RNA, 18 nt, Synthetic Construct
  source 1..18: mol_type = other RNA
agcagcattgtacagggc

SEQ ID NO: 36091 - RNA, 22 nt, Synthetic Construct
  source 1..22: mol_type = other RNA
ngaggtagtaggttgtgtggtt

SEQ ID NO: 36092 - RNA, 22 nt, Synthetic Construct
  source 1..22: mol_type = other RNA
tgaggaagtagtttgtgctgtt

SEQ ID NO: 36093 - RNA, 22 nt, Synthetic Construct
  source 1..22: mol_type = other RNA
tgaggaagtagtttgtgctgtt

SEQ ID NO: 36094 - RNA, 22 nt, Synthetic Construct
  source 1..22: mol_type = other RNA
taaggtagtaggttgtgtggtt

SEQ ID NO: 36095 - RNA, 22 nt, Synthetic Construct
  source 1..22: mol_type = other RNA
ttcaagtaattcaggataggtc

SEQ ID NO: 36096 - RNA, 23 nt, Synthetic Construct
  source 1..23: mol_type = other RNA
tggagacgcggccctgttggagt

SEQ ID NO: 36097 - RNA, 21 nt, Synthetic Construct
  source 1..21: mol_type = other RNA
agaggggcagagagcgagact

SEQ ID NO: 36098 - RNA, 18 nt, Synthetic Construct
  source 1..18: mol_type = other RNA
atcccactcctgacacca

SEQ ID NO: 36099 - RNA, 21 nt, Synthetic Construct
  source 1..21: mol_type = other RNA
tgaggtagtaggtcgtatagt

SEQ ID NO: 36100 - RNA, 23 nt, Synthetic Construct
  source 1..23: mol_type = other RNA
agaggtagtaggttgcatagttt

SEQ ID NO: 36101 - RNA, 23 nt, Synthetic Construct
  source 1..23: mol_type = other RNA
agaggtagtaggttgcatagttt

SEQ ID NO: 36102 - RNA, 21 nt, Synthetic Construct
  source 1..21: mol_type = other RNA
tgaggggcagagagcgagacc

SEQ ID NO: 36103 - RNA, 21 nt, Synthetic Construct
  source 1..21: mol_type = other RNA
tgaggggcagagagcgagacc

SEQ ID NO: 36104 - RNA, 20 nt, Synthetic Construct
  source 1..20: mol_type = other RNA
cggcggggacggcgattggt

SEQ ID NO: 36105 - RNA, 20 nt, Synthetic Construct
  source 1..20: mol_type = other RNA
cggcggggacggcgattggt

SEQ ID NO: 36106 - RNA, 23 nt, Synthetic Construct
  source 1..23: mol_type = other RNA
agctacatctggctactgggtct

SEQ ID NO: 36107 - RNA, 23 nt, Synthetic Construct
  source 1..23: mol_type = other RNA
agctacatctggctactgggtct

SEQ ID NO: 36108 - RNA, 18 nt, Synthetic Construct
  source 1..18: mol_type = other RNA
tctaatgagactgccggt

SEQ ID NO: 36109 - RNA, 22 nt, Synthetic Construct
  source 1..22: mol_type = other RNA
tggctcagttcagcaggaacag

SEQ ID NO: 36110 - RNA, 22 nt, Synthetic Construct
  source 1..22: mol_type = other RNA
acctgtactgagctgccccgag

SEQ ID NO: 36111 - RNA, 22 nt, Synthetic Construct
  source 1..22: mol_type = other RNA
acctgtactgagctgccccgag

SEQ ID NO: 36112 - RNA, 22 nt, Synthetic Construct
  source 1..22: mol_type = other RNA
gagaactgaattccatgggttg

SEQ ID NO: 36113 - RNA, 22 nt, Synthetic Construct
  source 1..22: mol_type = other RNA
gagaactgaattccatgggttg

SEQ ID NO: 36114 - RNA, 23 nt, Synthetic Construct
  source 1..23: mol_type = other RNA
cagagtgctgttcgtgcaggtag

SEQ ID NO: 36115 - RNA, 20 nt, Synthetic Construct
  source 1..20: mol_type = other RNA
tatgtctgctgaccatcacc

SEQ ID NO: 36116 - RNA, 20 nt, Synthetic Construct
  source 1..20: mol_type = other RNA
tatgtctgctgaccatcacc

SEQ ID NO: 36117 - RNA, 21 nt, Synthetic Construct
  source 1..21: mol_type = other RNA
tgaggtagtaggttgtataga

SEQ ID NO: 36118 - RNA, 21 nt, Synthetic Construct
  source 1..21: mol_type = other RNA
tgaggtagtaggttgtataga

SEQ ID NO: 36119 - RNA, 27 nt, Synthetic Construct
  source 1..27: mol_type = other RNA
catgcgagagtaggacgttgccaggtt

SEQ ID NO: 36120 - RNA, 27 nt, Synthetic Construct
  source 1..27: mol_type = other RNA
catgcgagagtaggacgttgccaggtt

SEQ ID NO: 36121 - RNA, 24 nt, Synthetic Construct
  source 1..24: mol_type = other RNA
agctcggtctgaggcccctcagtt

SEQ ID NO: 36122 - RNA, 24 nt, Synthetic Construct
  source 1..24: mol_type = other RNA
agctcggtctgaggcccctcagtt

SEQ ID NO: 36123 - RNA, 22 nt, Synthetic Construct
  source 1..22: mol_type = other RNA
tgaggtggtaggttgtatagtt

SEQ ID NO: 36124 - RNA, 22 nt, Synthetic Construct
  source 1..22: mol_type = other RNA
tgaggtggtaggttgtatagtt

SEQ ID NO: 36125 - RNA, 23 nt, Synthetic Construct
  source 1..23: mol_type = other RNA
cccagtgttcagactacctgttc

SEQ ID NO: 36126 - RNA, 22 nt, Synthetic Construct
  source 1..22: mol_type = other RNA
tcgtaccgtgagtgataatgcg

SEQ ID NO: 36127 - RNA, 19 nt, Synthetic Construct
  source 1..19: mol_type = other RNA
ccgtgttcggaagattttc

SEQ ID NO: 36128 - RNA, 19 nt, Synthetic Construct
  source 1..19: mol_type = other RNA
ccgtgttcggaagattttc

SEQ ID NO: 36129 - RNA, 37 nt, Synthetic Construct; identical to SEQ ID NO: 715
  source 1..37: mol_type = other RNA

SEQ ID NO: 36130 - RNA, 21 nt, Synthetic Construct
  source 1..21: mol_type = other RNA
tgaggtagtaggatgtgtggt

SEQ ID NO: 36131 - RNA, 21 nt, Synthetic Construct
  source 1..21: mol_type = other RNA
tgaggtagtaggatgtgtggt

SEQ ID NO: 36132 - RNA, 27 nt, Synthetic Construct
  source 1..27: mol_type = other RNA
ccccccactgctaaatttggctggctt

SEQ ID NO: 36133 - RNA, 27 nt, Synthetic Construct
  source 1..27: mol_type = other RNA
ccccccactgctaaatttggctggctt

SEQ ID NO: 36134 - RNA, 20 nt, Synthetic Construct
  source 1..20: mol_type = other RNA
gtcagtttgtcaaatacccc

SEQ ID NO: 36135 - RNA, 17 nt, Synthetic Construct
  source 1..17: mol_type = other RNA
ctaatgagactgccggt

SEQ ID NO: 36136 - RNA, 23 nt, Synthetic Construct
  source 1..23: mol_type = other RNA
tgaggggcagagagcgaggcttt

SEQ ID NO: 36137 - RNA, 22 nt, Synthetic Construct
  source 1..22: mol_type = other RNA
tagcaacacgtaaatattggcg

SEQ ID NO: 36138 - RNA, 22 nt, Synthetic Construct
  source 1..22: mol_type = other RNA
agctacattgtctgctgggttt

SEQ ID NO: 36139 - RNA, 26 nt, Synthetic Construct
  source 1..26: mol_type = other RNA
ccccccactgctaatttgactggctt

SEQ ID NO: 36140 - RNA, 26 nt, Synthetic Construct
  source 1..26: mol_type = other RNA
ccccccactgctaatttgactggctt

SEQ ID NO: 36141 - RNA, 23 nt, Synthetic Construct
  source 1..23: mol_type = other RNA
caacggaatcccaaaagcagccg

SEQ ID NO: 36142 - RNA, 25 nt, Synthetic Construct
  source 1..25: mol_type = other RNA
tgaggggcagagagcgagacttttt

SEQ ID NO: 36143 - RNA, 15 nt, Synthetic Construct
  source 1..15: mol_type = other RNA
gtttgatcctggctc

SEQ ID NO: 36144 - RNA, 15 nt, Synthetic Construct
  source 1..15: mol_type = other RNA
gtttgatcctggctc

SEQ ID NO: 36145 - RNA, 22 nt, Synthetic Construct
  source 1..22: mol_type = other RNA
cattgcgcttgtctcggtctga

SEQ ID NO: 36146 - RNA, 23 nt, Synthetic Construct
  source 1..23: mol_type = other RNA
taatactgccgggtaatgatgga

SEQ ID NO: 36147 - RNA, 23 nt, Synthetic Construct
  source 1..23: mol_type = other RNA
attctaatttctccacgtctttg

SEQ ID NO: 36148 - RNA, 23 nt, Synthetic Construct
  source 1..23: mol_type = other RNA
attctaatttctccacgtctttg

SEQ ID NO: 36149 - RNA, 24 nt, Synthetic Construct
  source 1..24: mol_type = other RNA
tcctccctcgggagggcgcgcggg

SEQ ID NO: 36150 - RNA, 24 nt, Synthetic Construct
  source 1..24: mol_type = other RNA
tcctccctcgggagggcgcgcggg

SEQ ID NO: 36151 - RNA, 27 nt, Synthetic Construct
  source 1..27: mol_type = other RNA
ccccccactgctaaatttgattggctt

SEQ ID NO: 36152 - RNA, 31 nt, Synthetic Construct; identical to SEQ ID NO: 15910
  source 1..31: mol_type = other RNA

SEQ ID NO: 36153 - RNA, 31 nt, Synthetic Construct; identical to SEQ ID NO: 15910
  source 1..31: mol_type = other RNA

SEQ ID NO: 36154 - RNA, 18 nt, Synthetic Construct
  source 1..18: mol_type = other RNA
ctaatgagactgccggtg

SEQ ID NO: 36155 - RNA, 28 nt, Synthetic Construct
  source 1..28: mol_type = other RNA
ccccccactgctaaatttgactggcctt

SEQ ID NO: 36156 - RNA, 28 nt, Synthetic Construct
  source 1..28: mol_type = other RNA
ccccccactgctaaatttgactggcctt

SEQ ID NO: 36157 - RNA, 22 nt, Synthetic Construct
  source 1..22: mol_type = other RNA
acagtagtctgcacattggtta

SEQ ID NO: 36158 - RNA, 29 nt, Synthetic Construct
  source 1..29: mol_type = other RNA
cccgtgtgaaagtaggtcatcgtcaggct

SEQ ID NO: 36159 - RNA, 21 nt, Synthetic Construct
  source 1..21: mol_type = other RNA
tgaggtagtagtttgtgctga

SEQ ID NO: 36160 - RNA, 23 nt, Synthetic Construct
  source 1..23: mol_type = other RNA
tcctgtactgagctgcctcgaga

SEQ ID NO: 36161 - RNA, 23 nt, Synthetic Construct
  source 1..23: mol_type = other RNA
tcctgtactgagctgcctcgaga

SEQ ID NO: 36162 - RNA, 22 nt, Synthetic Construct
  source 1..22: mol_type = other RNA
ncgtaccgtgagtaataatgcg

SEQ ID NO: 36163 - RNA, 22 nt, Synthetic Construct
  source 1..22: mol_type = other RNA
ncgtaccgtgagtaataatgcg

SEQ ID NO: 36164 - RNA, 27 nt, Synthetic Construct
  source 1..27: mol_type = other RNA
ccccccactactaaatttgactggctt

SEQ ID NO: 36165 - RNA, 23 nt, Synthetic Construct
  source 1..23: mol_type = other RNA
caacgggatcccaaaagcagctg

SEQ ID NO: 36166 - RNA, 22 nt, Synthetic Construct
  source 1..22: mol_type = other RNA
tgaggtagcagtttgtgctgtt

SEQ ID NO: 36167 - RNA, 22 nt, Synthetic Construct
  source 1..22: mol_type = other RNA
tgaggtagcagtttgtgctgtt

SEQ ID NO: 36168 - RNA, 21 nt, Synthetic Construct
  source 1..21: mol_type = other RNA
tgaggtagtggattgtatagt

SEQ ID NO: 36169 - RNA, 21 nt, Synthetic Construct
  source 1..21: mol_type = other RNA
tgaggtagtggattgtatagt

SEQ ID NO: 36170 - RNA, 44 nt, Synthetic Construct; identical to SEQ ID NO: 5536
  source 1..44: mol_type = other RNA

SEQ ID NO: 36171 - RNA, 21 nt, Synthetic Construct
  source 1..21: mol_type = other RNA
tccctgagaccctaacttgtg

SEQ ID NO: 36172 - RNA, 22 nt, Synthetic Construct
  source 1..22: mol_type = other RNA
tattgcacttgacccggcctgt

SEQ ID NO: 36173 - RNA, 22 nt, Synthetic Construct
  source 1..22: mol_type = other RNA
tattgcacttgacccggcctgt

SEQ ID NO: 36174 - RNA, 23 nt, Synthetic Construct
  source 1..23: mol_type = other RNA
caacggaatcccaagagcagctg

SEQ ID NO: 36175 - RNA, 20 nt, Synthetic Construct
  source 1..20: mol_type = other RNA
tgaggtagtaggctgtatag

SEQ ID NO: 36176 - RNA, 20 nt, Synthetic Construct
  source 1..20: mol_type = other RNA
tgaggtagtaggctgtatag

SEQ ID NO: 36177 - RNA, 22 nt, Synthetic Construct
  source 1..22: mol_type = other RNA
taactcattaagcgaatctcgc

SEQ ID NO: 36178 - RNA, 22 nt, Synthetic Construct
  source 1..22: mol_type = other RNA
taactcattaagcgaatctcgc

SEQ ID NO: 36179 - RNA, 22 nt, Synthetic Construct
  source 1..22: mol_type = other RNA
cagcagcacgtaaatattggcg

SEQ ID NO: 36180 - RNA, 22 nt, Synthetic Construct
  source 1..22: mol_type = other RNA
cagcagcacgtaaatattggcg

SEQ ID NO: 36181 - RNA, 16 nt, Synthetic Construct
  source 1..16: mol_type = other RNA
cccagaaacccggtcg

SEQ ID NO: 36182 - RNA, 16 nt, Synthetic Construct
  source 1..16: mol_type = other RNA
cccagaaacccggtcg

SEQ ID NO: 36183 - RNA, 21 nt, Synthetic Construct
  source 1..21: mol_type = other RNA
tggagtgtgacaatggtgtct

SEQ ID NO: 36184 - RNA, 22 nt, Synthetic Construct
  source 1..22: mol_type = other RNA
acagtagtctgcacattggttt

SEQ ID NO: 36185 - RNA, 22 nt, Synthetic Construct
  source 1..22: mol_type = other RNA
acagtagtctgcacattggttt

SEQ ID NO: 36186 - RNA, 22 nt, Synthetic Construct
  source 1..22: mol_type = other RNA
tgaggtagtaggttgtatggta

SEQ ID NO: 36187 - RNA, 21 nt, Synthetic Construct
  source 1..21: mol_type = other RNA
tgaggtagtagactgtatagt

SEQ ID NO: 36188 - RNA, 21 nt, Synthetic Construct
  source 1..21: mol_type = other RNA
tgaggtagtagactgtatagt

SEQ ID NO: 36189 - RNA, 25 nt, Synthetic Construct
  source 1..25: mol_type = other RNA
gcgccgctggtgtagtggtatcatg

SEQ ID NO: 36190 - RNA, 21 nt, Synthetic Construct
  source 1..21: mol_type = other RNA
actcggcgtggcgtcggtcgt

SEQ ID NO: 36191 - RNA, 22 nt, Synthetic Construct
  source 1..22: mol_type = other RNA
tgaggtagtaggttgtatagct

SEQ ID NO: 36192 - RNA, 22 nt, Synthetic Construct
  source 1..22: mol_type = other RNA
tgaggtagtaggttgtatagct

SEQ ID NO: 36193 - RNA, 22 nt, Synthetic Construct
  source 1..22: mol_type = other RNA
tagcagcacgtaaatattgacg

SEQ ID NO: 36194 - RNA, 22 nt, Synthetic Construct
  source 1..22: mol_type = other RNA
tagcagcacgtaaatatcggcg

SEQ ID NO: 36195 - RNA, 22 nt, Synthetic Construct
  source 1..22: mol_type = other RNA
tagcagcacgtaaatatcggcg

SEQ ID NO: 36196 - RNA, 19 nt, Synthetic Construct
  source 1..19: mol_type = other RNA
ggtggggagtttggctggg

SEQ ID NO: 36197 - RNA, 22 nt, Synthetic Construct
  source 1..22: mol_type = other RNA
gggagtgtgacaatggtgtttg

SEQ ID NO: 36198 - RNA, 33 nt, Synthetic Construct; identical to SEQ ID NO: 10461
  source 1..33: mol_type = other RNA

SEQ ID NO: 36199 - RNA, 26 nt, Synthetic Construct
  source 1..26: mol_type = other RNA
gaggaacactagtggcgtaggcgaga

SEQ ID NO: 36200 - RNA, 26 nt, Synthetic Construct
  source 1..26: mol_type = other RNA
gaggaacactagtggcgtaggcgaga

SEQ ID NO: 36201 - RNA, 33 nt, Synthetic Construct; identical to SEQ ID NO: 35121
  source 1..33: mol_type = other RNA

SEQ ID NO: 36202 - RNA, 33 nt, Synthetic Construct; identical to SEQ ID NO: 35121
  source 1..33: mol_type = other RNA

SEQ ID NO: 36203 - RNA, 24 nt, Synthetic Construct
  source 1..24: mol_type = other RNA
tgggtaatacgacgtacttagtgt

SEQ ID NO: 36204 - RNA, 21 nt, Synthetic Construct
  source 1..21: mol_type = other RNA
tggagtgtgacgatggtgttt

SEQ ID NO: 36205 - RNA, 21 nt, Synthetic Construct
  source 1..21: mol_type = other RNA
tggagtgtgacgatggtgttt

SEQ ID NO: 36206 - RNA, 21 nt, Synthetic Construct
  source 1..21: mol_type = other RNA
tgaggggcagagagcgaggct

SEQ ID NO: 36207 - RNA, 21 nt, Synthetic Construct
  source 1..21: mol_type = other RNA
tgaggggcagagagcgaggct

SEQ ID NO: 36208 - RNA, 22 nt, Synthetic Construct
  source 1..22: mol_type = other RNA
ttcaagtaatccaggataggcc

SEQ ID NO: 36209 - RNA, 22 nt, Synthetic Construct
  source 1..22: mol_type = other RNA
ttcaagtaatccaggataggcc

SEQ ID NO: 36210 - RNA, 22 nt, Synthetic Construct
  source 1..22: mol_type = other RNA
tcgcaccgtgagtaataatgcg

SEQ ID NO: 36211 - RNA, 19 nt, Synthetic Construct
  source 1..19: mol_type = other RNA
tgaggtagtagattgtata

SEQ ID NO: 36212 - RNA, 15 nt, Synthetic Construct
  source 1..15: mol_type = other RNA
aaattccttgtcggg

SEQ ID NO: 36213 - RNA, 25 nt, Synthetic Construct
  source 1..25: mol_type = other RNA
ttgaggatatgagatcgaggcgaca

SEQ ID NO: 36214 - RNA, 21 nt, Synthetic Construct
  source 1..21: mol_type = other RNA
taaggtagtaggttgtatagt

SEQ ID NO: 36215 - RNA, 21 nt, Synthetic Construct
  source 1..21: mol_type = other RNA
taaggtagtaggttgtatagt

SEQ ID NO: 36216 - RNA, 22 nt, Synthetic Construct
  source 1..22: mol_type = other RNA
tggaatgtaaagaagtatgtat

SEQ ID NO: 36217 - RNA, 22 nt, Synthetic Construct
  source 1..22: mol_type = other RNA
tggaatgtaaagaagtatgtat

SEQ ID NO: 36218 - RNA, 43 nt, Synthetic Construct; identical to SEQ ID NO: 727
  source 1..43: mol_type = other RNA

SEQ ID NO: 36219 - RNA, 16 nt, Synthetic Construct
  source 1..16: mol_type = other RNA
gctattgacgaccgta

SEQ ID NO: 36220 - RNA, 19 nt, Synthetic Construct
  source 1..19: mol_type = other RNA
atcacattgccagggattt

SEQ ID NO: 36221 - RNA, 20 nt, Synthetic Construct
  source 1..20: mol_type = other RNA
tgtaaacatccttgactgga

SEQ ID NO: 36222 - RNA, 20 nt, Synthetic Construct
  source 1..20: mol_type = other RNA
tgtaaacatccttgactgga

SEQ ID NO: 36223 - RNA, 21 nt, Synthetic Construct
  source 1..21: mol_type = other RNA
tgaggtagtagtttgtgctgc

SEQ ID NO: 36224 - RNA, 21 nt, Synthetic Construct
  source 1..21: mol_type = other RNA
tgaggtagtagtttgtgctgc

SEQ ID NO: 36225 - RNA, 22 nt, Synthetic Construct
  source 1..22: mol_type = other RNA
tattgcacttgtcccggcccgt

SEQ ID NO: 36226 - RNA, 22 nt, Synthetic Construct
  source 1..22: mol_type = other RNA
tattgcacttgtcccggcccgt

SEQ ID NO: 36227 - RNA, 23 nt, Synthetic Construct
  source 1..23: mol_type = other RNA
tgaggtagtaggttgtgtagttt

SEQ ID NO: 36228 - RNA, 23 nt, Synthetic Construct
  source 1..23: mol_type = other RNA
tgaggtagtaggttgtgtagttt

SEQ ID NO: 36229 - RNA, 23 nt, Synthetic Construct
  source 1..23: mol_type = other RNA
tcctgtactgagctgcctcgaga

SEQ ID NO: 36230 - RNA, 23 nt, Synthetic Construct
  source 1..23: mol_type = other RNA
tcctgtactgagctgcctcgaga

SEQ ID NO: 36231 - RNA, 23 nt, Synthetic Construct
  source 1..23: mol_type = other RNA
tgaggtagtagtttgtgctgttc

SEQ ID NO: 36232 - RNA, 16 nt, Synthetic Construct
  source 1..16: mol_type = other RNA
atctacggccatacca

SEQ ID NO: 36233 - RNA, 16 nt, Synthetic Construct
  source 1..16: mol_type = other RNA
atctacggccatacca

SEQ ID NO: 36234 - RNA, 23 nt, Synthetic Construct
  source 1..23: mol_type = other RNA
aatgacacgatcactcccgttgt

SEQ ID NO: 36235 - RNA, 22 nt, Synthetic Construct
  source 1..22: mol_type = other RNA
taaggtagtaggttgtatagtt

SEQ ID NO: 36236 - RNA, 22 nt, Synthetic Construct
  source 1..22: mol_type = other RNA
taaggtagtaggttgtatagtt

SEQ ID NO: 36237 - RNA, 22 nt, Synthetic Construct
  source 1..22: mol_type = other RNA
tgaggtagtaggttgtgtggta

SEQ ID NO: 36238 - RNA, 22 nt, Synthetic Construct
  source 1..22: mol_type = other RNA
tgaggtagtaggttgtgtggta

SEQ ID NO: 36239 - RNA, 23 nt, Synthetic Construct
  source 1..23: mol_type = other RNA
ttatggtttgcctgggactgagg

SEQ ID NO: 36240 - RNA, 22 nt, Synthetic Construct
  source 1..22: mol_type = other RNA
tcctgtactgagctgctccgag

SEQ ID NO: 36241 - RNA, 27 nt, Synthetic Construct
  source 1..27: mol_type = other RNA
ccccccactgctaaatttgaccggctt

SEQ ID NO: 36242 - RNA, 36 nt, Synthetic Construct; identical to SEQ ID NO: 6739
  source 1..36: mol_type = other RNA

SEQ ID NO: 36243 - RNA, 36 nt, Synthetic Construct; identical to SEQ ID NO: 6739
  source 1..36: mol_type = other RNA

SEQ ID NO: 36244 - RNA, 16 nt, Synthetic Construct
  source 1..16: mol_type = other RNA
gactacggccatacca

SEQ ID NO: 36245 - RNA, 16 nt, Synthetic Construct
  source 1..16: mol_type = other RNA
gactacggccatacca

SEQ ID NO: 36246 - RNA, 22 nt, Synthetic Construct
  source 1..22: mol_type = other RNA
cctctgggcccttcctccagtt

SEQ ID NO: 36247 - RNA, 22 nt, Synthetic Construct
  source 1..22: mol_type = other RNA
cctctgggcccttcctccagtt

SEQ ID NO: 36248 - RNA, 22 nt, Synthetic Construct
  source 1..22: mol_type = other RNA
cagtgcaatgttaaaagggcat

SEQ ID NO: 36249 - RNA, 22 nt, Synthetic Construct
  source 1..22: mol_type = other RNA
cagtgcaatgttaaaagggcat

SEQ ID NO: 36250 - RNA, 21 nt, Synthetic Construct
  source 1..21: mol_type = other RNA
ctaatcccagaaacccggtcg

SEQ ID NO: 36251 - RNA, 23 nt, Synthetic Construct
  source 1..23: mol_type = other RNA
caaagtgctgttcgtgcgggtag

SEQ ID NO: 36252 - RNA, 23 nt, Synthetic Construct
  source 1..23: mol_type = other RNA
caaagtgctgttcgtgcgggtag

SEQ ID NO: 36253 - RNA, 23 nt, Synthetic Construct
  source 1..23: mol_type = other RNA
ttcaagtaattcaggataggttg

SEQ ID NO: 36254 - RNA, 23 nt, Synthetic Construct
  source 1..23: mol_type = other RNA
ttcaagtaattcaggataggttg

SEQ ID NO: 36255 - RNA, 24 nt, Synthetic Construct
  source 1..24: mol_type = other RNA
tgtaaacatccctgactggaagct

SEQ ID NO: 36256 - RNA, 19 nt, Synthetic Construct
  source 1..19: mol_type = other RNA
agctacattgtctgctggg

SEQ ID NO: 36257 - RNA, 22 nt, Synthetic Construct
  source 1..22: mol_type = other RNA
tattgcgcttgtcccggcctgt

SEQ ID NO: 36258 - RNA, 19 nt, Synthetic Construct
  source 1..19: mol_type = other RNA
gttctacagtccgacgatc

SEQ ID NO: 36259 - RNA, 19 nt, Synthetic Construct
  source 1..19: mol_type = other RNA
gttctacagtccgacgatc

SEQ ID NO: 36260 - RNA, 22 nt, Synthetic Construct
  source 1..22: mol_type = other RNA
tgaggtagtagtttgtgctgta

SEQ ID NO: 36261 - RNA, 22 nt, Synthetic Construct
  source 1..22: mol_type = other RNA
tgaggtagtagtttgtgctgta

SEQ ID NO: 36262 - RNA, 23 nt, Synthetic Construct
  source 1..23: mol_type = other RNA
acagtagtctgcacattggttaa

SEQ ID NO: 36263 - RNA, 23 nt, Synthetic Construct
  source 1..23: mol_type = other RNA
acagtagtctgcacattggttaa

SEQ ID NO: 36264 - RNA, 25 nt, Synthetic Construct
  source 1..25: mol_type = other RNA
gagaaagctcacaagaactgctaac

SEQ ID NO: 36265 - RNA, 25 nt, Synthetic Construct
  source 1..25: mol_type = other RNA
gagaaagctcacaagaactgctaac

SEQ ID NO: 36266 - RNA, 21 nt, Synthetic Construct
  source 1..21: mol_type = other RNA
tggagtgtgacaatggtgtct

SEQ ID NO: 36267 - RNA, 24 nt, Synthetic Construct
  source 1..24: mol_type = other RNA
tataccgaagctctaggtgcggca

SEQ ID NO: 36268 - RNA, 24 nt, Synthetic Construct
  source 1..24: mol_type = other RNA
tataccgaagctctaggtgcggca

SEQ ID NO: 36269 - RNA, 20 nt, Synthetic Construct
  source 1..20: mol_type = other RNA
agaggtagtaggttgtgtgg

SEQ ID NO: 36270 - RNA, 23 nt, Synthetic Construct
  source 1..23: mol_type = other RNA
tcctgtactgagccgccccgaga

SEQ ID NO: 36271 - RNA, 23 nt, Synthetic Construct
  source 1..23: mol_type = other RNA
tgtcagtttgtcaaatacccctt

SEQ ID NO: 36272 - RNA, 25 nt, Synthetic Construct
  source 1..25: mol_type = other RNA
cgaatgttgctcggtgaaccccttt

SEQ ID NO: 36273 - RNA, 25 nt, Synthetic Construct
  source 1..25: mol_type = other RNA
cgaatgttgctcggtgaaccccttt

SEQ ID NO: 36274 - RNA, 23 nt, Synthetic Construct
  source 1..23: mol_type = other RNA
tagtgcaatattgcttatagggt

SEQ ID NO: 36275 - RNA, 23 nt, Synthetic Construct
  source 1..23: mol_type = other RNA
tagtgcaatattgcttatagggt

SEQ ID NO: 36276 - RNA, 22 nt, Synthetic Construct
  source 1..22: mol_type = other RNA
tgtagtgtttcctactctatgg

SEQ ID NO: 36277 - RNA, 21 nt, Synthetic Construct
  source 1..21: mol_type = other RNA
ttataatacaacctgataagt

SEQ ID NO: 36278 - RNA, 21 nt, Synthetic Construct
  source 1..21: mol_type = other RNA
ttataatacaacctgataagt

SEQ ID NO: 36279 - RNA, 24 nt, Synthetic Construct
  source 1..24: mol_type = other RNA
cggagaaggttagctcagccaact

SEQ ID NO: 36280 - RNA, 24 nt, Synthetic Construct
  source 1..24: mol_type = other RNA
cggagaaggttagctcagccaact

SEQ ID NO: 36281 - RNA, 22 nt, Synthetic Construct
  source 1..22: mol_type = other RNA
tggctcagttcagcaggaacag

SEQ ID NO: 36282 - RNA, 21 nt, Synthetic Construct
  source 1..21: mol_type = other RNA
tggggtagtagattgtatagt

SEQ ID NO: 36283 - RNA, 21 nt, Synthetic Construct
  source 1..21: mol_type = other RNA
tggggtagtagattgtatagt

SEQ ID NO: 36284 - RNA, 21 nt, Synthetic Construct
  source 1..21: mol_type = other RNA
tgaggtaggaggttgtatagt

SEQ ID NO: 36285 - RNA, 22 nt, Synthetic Construct
  source 1..22: mol_type = other RNA
ttcacagtggctaagttccgct

SEQ ID NO: 36286 - RNA, 22 nt, Synthetic Construct
  source 1..22: mol_type = other RNA
ttcacagtggctaagttccgct

SEQ ID NO: 36287 - RNA, 20 nt, Synthetic Construct
  source 1..20: mol_type = other RNA
gctattgacgaccgtaccgc

SEQ ID NO: 36288 - RNA, 23 nt, Synthetic Construct
  source 1..23: mol_type = other RNA
aacattcattgctgtcggtgggt

SEQ ID NO: 36289 - RNA, 22 nt, Synthetic Construct
  source 1..22: mol_type = other RNA
ctcggcgtggcgtcggtcgtgt

SEQ ID NO: 36290 - RNA, 22 nt, Synthetic Construct
  source 1..22: mol_type = other RNA
ctcggcgtggcgtcggtcgtgt

SEQ ID NO: 36291 - RNA, 25 nt, Synthetic Construct
  source 1..25: mol_type = other RNA
ttgcagctgcctgggagtgacttca

SEQ ID NO: 36292 - RNA, 25 nt, Synthetic Construct
  source 1..25: mol_type = other RNA
ttgcagctgcctgggagtgacttca

SEQ ID NO: 36293 - RNA, 21 nt, Synthetic Construct
  source 1..21: mol_type = other RNA
tgaggtagtaggttgtgtagt

SEQ ID NO: 36294 - RNA, 21 nt, Synthetic Construct
  source 1..21: mol_type = other RNA
tgaggtagtagtttgtacagt

SEQ ID NO: 36295 - RNA, 21 nt, Synthetic Construct
  source 1..21: mol_type = other RNA
tgaggtagtagtttgtacagt

SEQ ID NO: 36296 - RNA, 22 nt, Synthetic Construct
  source 1..22: mol_type = other RNA
gattgcacttgtcccggcctgt

SEQ ID NO: 36297 - RNA, 26 nt, Synthetic Construct
  source 1..26: mol_type = other RNA
agggctgggtcggtcgggctggggcg

SEQ ID NO: 36298 - RNA, 26 nt, Synthetic Construct
  source 1..26: mol_type = other RNA
agggctgggtcggtcgggctggggcg

SEQ ID NO: 36299 - RNA, 22 nt, Synthetic Construct
  source 1..22: mol_type = other RNA
tgtggtagtaggttgtatagtt

SEQ ID NO: 36300 - RNA, 23 nt, Synthetic Construct
  source 1..23: mol_type = other RNA
actggacttggagtcagaaggca

SEQ ID NO: 36301 - RNA, 23 nt, Synthetic Construct
  source 1..23: mol_type = other RNA
actggacttggagtcagaaggca

SEQ ID NO: 36302 - RNA, 20 nt, Synthetic Construct
  source 1..20: mol_type = other RNA
tgtaaacatccttgactgga

SEQ ID NO: 36303 - RNA, 20 nt, Synthetic Construct
  source 1..20: mol_type = other RNA
tgtaaacatccttgactgga

SEQ ID NO: 36304 - RNA, 20 nt, Synthetic Construct
  source 1..20: mol_type = other RNA
aatgacacgatcactcccgt

SEQ ID NO: 36305 - RNA, 20 nt, Synthetic Construct
  source 1..20: mol_type = other RNA
aatgacacgatcactcccgt

SEQ ID NO: 36306 - RNA, 23 nt, Synthetic Construct
  source 1..23: mol_type = other RNA
caacggaaccccaaaagcagctg

SEQ ID NO: 36307 - RNA, 22 nt, Synthetic Construct
  source 1..22: mol_type = other RNA
tgaggtagtaggttgtgtggta

SEQ ID NO: 36308 - RNA, 22 nt, Synthetic Construct
  source 1..22: mol_type = other RNA
tgaggtagtaggttgtgtggta

SEQ ID NO: 36309 - RNA, 19 nt, Synthetic Construct
  source 1..19: mol_type = other RNA
tggagtgtgacaatggtgt

SEQ ID NO: 36310 - RNA, 22 nt, Synthetic Construct
  source 1..22: mol_type = other RNA
tgaggtagtagtttgtgttgtt

SEQ ID NO: 36311 - RNA, 19 nt, Synthetic Construct
  source 1..19: mol_type = other RNA
tgtcagtttgtcaaatacc

SEQ ID NO: 36312 - RNA, 19 nt, Synthetic Construct
  source 1..19: mol_type = other RNA
tgtcagtttgtcaaatacc

SEQ ID NO: 36313 - RNA, 21 nt, Synthetic Construct
  source 1..21: mol_type = other RNA
tgagaactgaattccatgggt

SEQ ID NO: 36314 - RNA, 22 nt, Synthetic Construct
  source 1..22: mol_type = other RNA
tgaggcagtaggttgtatagtt

SEQ ID NO: 36315 - RNA, 22 nt, Synthetic Construct
  source 1..22: mol_type = other RNA
tgaggcagtaggttgtatagtt

SEQ ID NO: 36316 - RNA, 15 nt, Synthetic Construct
  source 1..15: mol_type = other RNA
tgcaagtcgaacggt

SEQ ID NO: 36317 - RNA, 15 nt, Synthetic Construct
  source 1..15: mol_type = other RNA
tgcaagtcgaacggt

SEQ ID NO: 36318 - RNA, 23 nt, Synthetic Construct
  source 1..23: mol_type = other RNA
ggctcggtctgaggcccctcagt

SEQ ID NO: 36319 - RNA, 28 nt, Synthetic Construct
  source 1..28: mol_type = other RNA
ccccccgctgctaaatttgactggcttt

SEQ ID NO: 36320 - RNA, 21 nt, Synthetic Construct
  source 1..21: mol_type = other RNA
atcgggaatgtcgtgtccgcc

SEQ ID NO: 36321 - RNA, 21 nt, Synthetic Construct
  source 1..21: mol_type = other RNA
cagcattgtacagggctatga

SEQ ID NO: 36322 - RNA, 23 nt, Synthetic Construct
  source 1..23: mol_type = other RNA
tggaatgtaaagaagtatgtacc

SEQ ID NO: 36323 - RNA, 22 nt, Synthetic Construct
  source 1..22: mol_type = other RNA
aaaagctgggttgagagggcgt

SEQ ID NO: 36324 - RNA, 22 nt, Synthetic Construct
  source 1..22: mol_type = other RNA
aaaagctgggttgagagggcgt

SEQ ID NO: 36325 - RNA, 22 nt, Synthetic Construct
  source 1..22: mol_type = other RNA
tagcagcacgtgaatattggcg

SEQ ID NO: 36326 - RNA, 22 nt, Synthetic Construct
  source 1..22: mol_type = other RNA
tagcagcacgtgaatattggcg

SEQ ID NO: 36327 - RNA, 23 nt, Synthetic Construct
  source 1..23: mol_type = other RNA
tgaggtagtagtttgtgctgttc

SEQ ID NO: 36328 - RNA, 23 nt, Synthetic Construct
  source 1..23: mol_type = other RNA
cgcagcattgtacagggctatga

SEQ ID NO: 36329 - RNA, 18 nt, Synthetic Construct
  source 1..18: mol_type = other RNA
accctgctcgctgcgcca

SEQ ID NO: 36330 - RNA, 22 nt, Synthetic Construct
  source 1..22: mol_type = other RNA
aggtagatagaacaggtcttgt

SEQ ID NO: 36331 - RNA, 22 nt, Synthetic Construct
  source 1..22: mol_type = other RNA
tgaggtagtagtttgtgctggt

SEQ ID NO: 36332 - RNA, 22 nt, Synthetic Construct
  source 1..22: mol_type = other RNA
tgaggtagtagtttgtgctggt

SEQ ID NO: 36333 - RNA, 27 nt, Synthetic Construct
  source 1..27: mol_type = other RNA
cctcccactgctaaatttgactggctt

SEQ ID NO: 36334 - RNA, 21 nt, Synthetic Construct
  source 1..21: mol_type = other RNA
aggttccggataagtaaagcc

SEQ ID NO: 36335 - RNA, 21 nt, Synthetic Construct
  source 1..21: mol_type = other RNA
aggttccggataagtaaagcc

SEQ ID NO: 36336 - RNA, 22 nt, Synthetic Construct
  source 1..22: mol_type = other RNA
tgaggtagtagtttgtgctgtg

SEQ ID NO: 36337 - RNA, 22 nt, Synthetic Construct
  source 1..22: mol_type = other RNA
tgaggtagtagtttgtgctgtg

SEQ ID NO: 36338 - RNA, 23 nt, Synthetic Construct
  source 1..23: mol_type = other RNA
caacgggatcccaaaagcagctg

SEQ ID NO: 36339 - RNA, 23 nt, Synthetic Construct
  source 1..23: mol_type = other RNA
tgaggggcagagagcgagactat

SEQ ID NO: 36340 - RNA, 22 nt, Synthetic Construct
  source 1..22: mol_type = other RNA
tgaggtagtaggttgtgtggat

SEQ ID NO: 36341 - RNA, 22 nt, Synthetic Construct
  source 1..22: mol_type = other RNA
tgaggtagtaggttgtgtggat

SEQ ID NO: 36342 - RNA, 23 nt, Synthetic Construct
  source 1..23: mol_type = other RNA
tgaggtagtaggttgcgtggttt

SEQ ID NO: 36343 - RNA, 23 nt, Synthetic Construct
  source 1..23: mol_type = other RNA
tgaggtagtaggttgcgtggttt

SEQ ID NO: 36344 - RNA, 22 nt, Synthetic Construct
  source 1..22: mol_type = other RNA
tgaggtagtagtttgtgctgct

SEQ ID NO: 36345 - RNA, 22 nt, Synthetic Construct
  source 1..22: mol_type = other RNA
tgaggtagtagtttgtgctgct

SEQ ID NO: 36346 - RNA, 24 nt, Synthetic Construct
  source 1..24: mol_type = other RNA
tttggcaatggtagaactcacact

SEQ ID NO: 36347 - RNA, 24 nt, Synthetic Construct
  source 1..24: mol_type = other RNA
tttggcaatggtagaactcacact

SEQ ID NO: 36348 - RNA, 22 nt, Synthetic Construct
  source 1..22: mol_type = other RNA
agctacattgtctgctgggttt

SEQ ID NO: 36349 - RNA, 22 nt, Synthetic Construct
  source 1..22: mol_type = other RNA
agctacattgtctgctgggttt

SEQ ID NO: 36350 - RNA, 21 nt, Synthetic Construct
  source 1..21: mol_type = other RNA
tggagtgtggcaatggtgttt

SEQ ID NO: 36351 - RNA, 22 nt, Synthetic Construct
  source 1..22: mol_type = other RNA
tcttgtactgagctgccccgag

SEQ ID NO: 36352 - RNA, 22 nt, Synthetic Construct
  source 1..22: mol_type = other RNA
tcttgtactgagctgccccgag

SEQ ID NO: 36353 - RNA, 23 nt, Synthetic Construct
  source 1..23: mol_type = other RNA
tcctgtacagagctgccccgaga

SEQ ID NO: 36354 - RNA, 22 nt, Synthetic Construct
  source 1..22: mol_type = other RNA
accactgaccgttgactgtacc

SEQ ID NO: 36355 - RNA, 22 nt, Synthetic Construct
  source 1..22: mol_type = other RNA
accactgaccgttgactgtacc

SEQ ID NO: 36356 - RNA, 22 nt, Synthetic Construct
  source 1..22: mol_type = other RNA
tgagatagtaggttgtatagtt

SEQ ID NO: 36357 - RNA, 24 nt, Synthetic Construct
  source 1..24: mol_type = other RNA
cggagaaggttagctcagccaact

SEQ ID NO: 36358 - RNA, 39 nt, Synthetic Construct; identical to SEQ ID NO: 2980
  source 1..39: mol_type = other RNA

SEQ ID NO: 36359 - RNA, 39 nt, Synthetic Construct; identical to SEQ ID NO: 2980
  source 1..39: mol_type = other RNA

SEQ ID NO: 36360 - RNA, 22 nt, Synthetic Construct
  source 1..22: mol_type = other RNA
tagcagcacgtaagtattggcg

SEQ ID NO: 36361 - RNA, 22 nt, Synthetic Construct
  source 1..22: mol_type = other RNA
tagcagcacgtaagtattggcg

SEQ ID NO: 36362 - RNA, 22 nt, Synthetic Construct
  source 1..22: mol_type = other RNA
gcctgtactgagctgccccgag

SEQ ID NO: 36363 - RNA, 22 nt, Synthetic Construct
  source 1..22: mol_type = other RNA
gcctgtactgagctgccccgag

SEQ ID NO: 36364 - RNA, 20 nt, Synthetic Construct
  source 1..20: mol_type = other RNA
tgaggtagtaggttgtgagg

SEQ ID NO: 36365 - RNA, 16 nt, Synthetic Construct
  source 1..16: mol_type = other RNA
gtaaacggcgggagta

SEQ ID NO: 36366 - RNA, 16 nt, Synthetic Construct
  source 1..16: mol_type = other RNA
gtaaacggcgggagta

SEQ ID NO: 36367 - RNA, 27 nt, Synthetic Construct
  source 1..27: mol_type = other RNA
ccccccactgcaaaatttgactggctt

SEQ ID NO: 36368 - RNA, 20 nt, Synthetic Construct
  source 1..20: mol_type = other RNA
cacatgcaagtcgaacggta

SEQ ID NO: 36369 - RNA, 20 nt, Synthetic Construct
  source 1..20: mol_type = other RNA
cacatgcaagtcgaacggta

SEQ ID NO: 36370 - RNA, 24 nt, Synthetic Construct
  source 1..24: mol_type = other RNA
ttcaagtaatccaggataggcttt

SEQ ID NO: 36371 - RNA, 24 nt, Synthetic Construct
  source 1..24: mol_type = other RNA
ttcaagtaatccaggataggcttt

SEQ ID NO: 36372 - RNA, 21 nt, Synthetic Construct
  source 1..21: mol_type = other RNA
gctattgacgaccgtaccgca

SEQ ID NO: 36373 - RNA, 21 nt, Synthetic Construct
  source 1..21: mol_type = other RNA
tgaggtagtaggttgtatagc

SEQ ID NO: 36374 - RNA, 16 nt, Synthetic Construct
  source 1..16: mol_type = other RNA
gtctacggccacacca

SEQ ID NO: 36375 - RNA, 22 nt, Synthetic Construct
  source 1..22: mol_type = other RNA
tcaagagcaataacgaaaaatg

SEQ ID NO: 36376 - RNA, 22 nt, Synthetic Construct
  source 1..22: mol_type = other RNA
tcaagagcaataacgaaaaatg

SEQ ID NO: 36377 - RNA, 22 nt, Synthetic Construct
  source 1..22: mol_type = other RNA
tgtgcaaatccatgcaaaactg

SEQ ID NO: 36378 - RNA, 23 nt, Synthetic Construct
  source 1..23: mol_type = other RNA
tgtcagtttgtcaaataccccat

SEQ ID NO: 36379 - RNA, 24 nt, Synthetic Construct
  source 1..24: mol_type = other RNA
acagtagtctgcacattggttatt

SEQ ID NO: 36380 - RNA, 34 nt, Synthetic Construct; identical to SEQ ID NO: 2529
  source 1..34: mol_type = other RNA

SEQ ID NO: 36381 - RNA, 23 nt, Synthetic Construct
  source 1..23: mol_type = other RNA
tgaggtagcaggttgtgtggttt

SEQ ID NO: 36382 - RNA, 23 nt, Synthetic Construct
  source 1..23: mol_type = other RNA
tgaggtagcaggttgtgtggttt

SEQ ID NO: 36383 - RNA, 21 nt, Synthetic Construct
  source 1..21: mol_type = other RNA
tgaggtggtaggttgtatagt

SEQ ID NO: 36384 - RNA, 31 nt, Synthetic Construct; identical to SEQ ID NO: 13805
  source 1..31: mol_type = other RNA

SEQ ID NO: 36385 - RNA, 31 nt, Synthetic Construct; identical to SEQ ID NO: 13805
  source 1..31: mol_type = other RNA

SEQ ID NO: 36386 - RNA, 19 nt, Synthetic Construct
  source 1..19: mol_type = other RNA
tccctgagaccctaacttg

SEQ ID NO: 36387 - RNA, 19 nt, Synthetic Construct
  source 1..19: mol_type = other RNA
tccctgagaccctaacttg

SEQ ID NO: 36388 - RNA, 23 nt, Synthetic Construct
  source 1..23: mol_type = other RNA
tggtaatacgatgtacttagtgt

SEQ ID NO: 36389 - RNA, 27 nt, Synthetic Construct
  source 1..27: mol_type = other RNA
ccccccactgctaaatttgactggcct

SEQ ID NO: 36390 - RNA, 27 nt, Synthetic Construct
  source 1..27: mol_type = other RNA
ccccccactgctaaatttgactggcct

SEQ ID NO: 36391 - RNA, 18 nt, Synthetic Construct
  source 1..18: mol_type = other RNA
agcaggacggtggccatg

SEQ ID NO: 36392 - RNA, 18 nt, Synthetic Construct
  source 1..18: mol_type = other RNA
agcaggacggtggccatg

SEQ ID NO: 36393 - RNA, 22 nt, Synthetic Construct
  source 1..22: mol_type = other RNA
gagagcctggacacaggtgctg

SEQ ID NO: 36394 - RNA, 21 nt, Synthetic Construct
  source 1..21: mol_type = other RNA
acctgtactgagctgccccga

SEQ ID NO: 36395 - RNA, 21 nt, Synthetic Construct
  source 1..21: mol_type = other RNA
acctgtactgagctgccccga

SEQ ID NO: 36396 - RNA, 21 nt, Synthetic Construct
  source 1..21: mol_type = other RNA
cactgatcgagtcgtcctgcg

SEQ ID NO: 36397 - RNA, 22 nt, Synthetic Construct
  source 1..22: mol_type = other RNA
tattgcacttgtcctggcctgt

SEQ ID NO: 36398 - RNA, 22 nt, Synthetic Construct
  source 1..22: mol_type = other RNA
tattgcacttgtcctggcctgt

SEQ ID NO: 36399 - RNA, 15 nt, Synthetic Construct
  source 1..15: mol_type = other RNA
gccgttcttagttgg

SEQ ID NO: 36400 - RNA, 15 nt, Synthetic Construct
  source 1..15: mol_type = other RNA
gccgttcttagttgg

SEQ ID NO: 36401 - RNA, 21 nt, Synthetic Construct
  source 1..21: mol_type = other RNA
ggaggtagtaggttgtgtggt

SEQ ID NO: 36402 - RNA, 21 nt, Synthetic Construct
  source 1..21: mol_type = other RNA
ggaggtagtaggttgtgtggt

SEQ ID NO: 36403 - RNA, 21 nt, Synthetic Construct
  source 1..21: mol_type = other RNA
tccagtactgagctgccccga

SEQ ID NO: 36404 - RNA, 21 nt, Synthetic Construct
  source 1..21: mol_type = other RNA
ttagtgacgcgcatgaatgga

SEQ ID NO: 36405 - RNA, 21 nt, Synthetic Construct
  source 1..21: mol_type = other RNA
ttagtgacgcgcatgaatgga

SEQ ID NO: 36406 - RNA, 22 nt, Synthetic Construct
  source 1..22: mol_type = other RNA
tgaggtagtagtttgtgctgat

SEQ ID NO: 36407 - RNA, 18 nt, Synthetic Construct
  source 1..18: mol_type = other RNA
gctattgacgaccgtacc

SEQ ID NO: 36408 - RNA, 20 nt, Synthetic Construct
  source 1..20: mol_type = other RNA
tacagtatagatgatgtact

SEQ ID NO: 36409 - RNA, 20 nt, Synthetic Construct
  source 1..20: mol_type = other RNA
tacagtatagatgatgtact

SEQ ID NO: 36410 - RNA, 24 nt, Synthetic Construct
  source 1..24: mol_type = other RNA
agctcggtctgaggcccctcagta

SEQ ID NO: 36411 - RNA, 24 nt, Synthetic Construct
  source 1..24: mol_type = other RNA
agctcggtctgaggcccctcagta

SEQ ID NO: 36412 - RNA, 21 nt, Synthetic Construct
  source 1..21: mol_type = other RNA
ccctgtactgagctgccccga

SEQ ID NO: 36413 - RNA, 23 nt, Synthetic Construct
  source 1..23: mol_type = other RNA
ttcaagtaattcaggataggtta

SEQ ID NO: 36414 - RNA, 22 nt, Synthetic Construct
  source 1..22: mol_type = other RNA
aatcgtacagggtcatccactt

SEQ ID NO: 36415 - RNA, 22 nt, Synthetic Construct
  source 1..22: mol_type = other RNA
gattgcacttgtcccggcctgt

SEQ ID NO: 36416 - RNA, 21 nt, Synthetic Construct
  source 1..21: mol_type = other RNA
caaagtgctgttcgtgcaggt

SEQ ID NO: 36417 - RNA, 23 nt, Synthetic Construct
  source 1..23: mol_type = other RNA
cgactcttagcggtggatcactc

SEQ ID NO: 36418 - RNA, 23 nt, Synthetic Construct
  source 1..23: mol_type = other RNA
cgactcttagcggtggatcactc

SEQ ID NO: 36419 - RNA, 20 nt, Synthetic Construct
  source 1..20: mol_type = other RNA
tgaggtggtaggttgtgtgg

SEQ ID NO: 36420 - RNA, 23 nt, Synthetic Construct
  source 1..23: mol_type = other RNA
tggggtagtaggttgtgtggttt

SEQ ID NO: 36421 - RNA, 23 nt, Synthetic Construct
  source 1..23: mol_type = other RNA
tggggtagtaggttgtgtggttt

SEQ ID NO: 36422 - RNA, 30 nt, Synthetic Construct; identical to SEQ ID NO: 2699
  source 1..30: mol_type = other RNA

SEQ ID NO: 36423 - RNA, 30 nt, Synthetic Construct; identical to SEQ ID NO: 2699
  source 1..30: mol_type = other RNA

SEQ ID NO: 36424 - RNA, 30 nt, Synthetic Construct
  source 1..30: mol_type = other RNA
tggggggcccaagtccttctgatcgaggcc

SEQ ID NO: 36425 - RNA, 21 nt, Synthetic Construct
  source 1..21: mol_type = other RNA
taactccttaagcaatctcgc

SEQ ID NO: 36426 - RNA, 21 nt, Synthetic Construct
  source 1..21: mol_type = other RNA
taactccttaagcaatctcgc

SEQ ID NO: 36427 - RNA, 24 nt, Synthetic Construct
  source 1..24: mol_type = other RNA
tgcaaacatccccgactggaagct

SEQ ID NO: 36428 - RNA, 22 nt, Synthetic Construct
  source 1..22: mol_type = other RNA
tgaggtagtagttcgtgctgtt

SEQ ID NO: 36429 - RNA, 22 nt, Synthetic Construct
  source 1..22: mol_type = other RNA
tgaggtagtagttcgtgctgtt

SEQ ID NO: 36430 - RNA, 22 nt, Synthetic Construct
  source 1..22: mol_type = other RNA
aatcgtacagggtcatccactt

SEQ ID NO: 36431 - RNA, 22 nt, Synthetic Construct
  source 1..22: mol_type = other RNA
aatcgtacagggtcatccactt

SEQ ID NO: 36432 - RNA, 19 nt, Synthetic Construct
  source 1..19: mol_type = other RNA
aaccgggcggaaacaccat

SEQ ID NO: 36433 - RNA, 22 nt, Synthetic Construct
  source 1..22: mol_type = other RNA
tgaggtagtagcttgtgctgtt

SEQ ID NO: 36434 - RNA, 22 nt, Synthetic Construct
  source 1..22: mol_type = other RNA
tgaggtagtagcttgtgctgtt

SEQ ID NO: 36435 - RNA, 23 nt, Synthetic Construct
  source 1..23: mol_type = other RNA
caacggaatcccaaaagcagctt

SEQ ID NO: 36436 - RNA, 23 nt, Synthetic Construct
  source 1..23: mol_type = other RNA
caacggaatcccaaaagcagctt

SEQ ID NO: 36437 - RNA, 20 nt, Synthetic Construct
  source 1..20: mol_type = other RNA
tgaggtagtaggttgcgtgg

SEQ ID NO: 36438 - RNA, 21 nt, Synthetic Construct
  source 1..21: mol_type = other RNA
taactccttaagcaatctcgc

SEQ ID NO: 36439 - RNA, 23 nt, Synthetic Construct
  source 1..23: mol_type = other RNA
tgaggtaggaggttgtatagtta

SEQ ID NO: 36440 - RNA, 23 nt, Synthetic Construct
  source 1..23: mol_type = other RNA
tcctgaactgagctgccccgagt

SEQ ID NO: 36441 - RNA, 23 nt, Synthetic Construct
  source 1..23: mol_type = other RNA
tgaggggcagagagcgagacttt

SEQ ID NO: 36442 - RNA, 23 nt, Synthetic Construct
  source 1..23: mol_type = other RNA
tgaggggcagagagcgagacttt

SEQ ID NO: 36443 - RNA, 26 nt, Synthetic Construct
  source 1..26: mol_type = other RNA
agggctgggtcggtcgggctggggcg

SEQ ID NO: 36444 - RNA, 26 nt, Synthetic Construct
  source 1..26: mol_type = other RNA
agggctgggtcggtcgggctggggcg

SEQ ID NO: 36445 - RNA, 25 nt, Synthetic Construct
  source 1..25: mol_type = other RNA
caaagtgctgttcgtgcaggtagtt

SEQ ID NO: 36446 - RNA, 23 nt, Synthetic Construct
  source 1..23: mol_type = other RNA
atcacattgccagggatttccaa

SEQ ID NO: 36447 - RNA, 23 nt, Synthetic Construct
  source 1..23: mol_type = other RNA
atcacattgccagggatttccaa

SEQ ID NO: 36448 - RNA, 22 nt, Synthetic Construct
  source 1..22: mol_type = other RNA
tcctgtactgagctgacccgag

SEQ ID NO: 36449 - RNA, 22 nt, Synthetic Construct
  source 1..22: mol_type = other RNA
tcctgtactgagctgacccgag

SEQ ID NO: 36450 - RNA, 21 nt, Synthetic Construct
  source 1..21: mol_type = other RNA
tgaggtagtagattgtgtagt

SEQ ID NO: 36451 - RNA, 19 nt, Synthetic Construct
  source 1..19: mol_type = other RNA
tggctcagttcagcaggaa

SEQ ID NO: 36452 - RNA, 19 nt, Synthetic Construct
  source 1..19: mol_type = other RNA
tggctcagttcagcaggaa

SEQ ID NO: 36453 - RNA, 21 nt, Synthetic Construct
  source 1..21: mol_type = other RNA
tccctgagaccctttaacctg

SEQ ID NO: 36454 - RNA, 23 nt, Synthetic Construct
  source 1..23: mol_type = other RNA
tgaggtagtaggttgtgtagttt

SEQ ID NO: 36455 - RNA, 23 nt, Synthetic Construct
  source 1..23: mol_type = other RNA
tgaggtagtaggttgtgtagttt

SEQ ID NO: 36456 - RNA, 22 nt, Synthetic Construct
  source 1..22: mol_type = other RNA
tacgcctgtctgagcgtcgctt

SEQ ID NO: 36457 - RNA, 22 nt, Synthetic Construct
  source 1..22: mol_type = other RNA
tacgcctgtctgagcgtcgctt

SEQ ID NO: 36458 - RNA, 25 nt, Synthetic Construct
  source 1..25: mol_type = other RNA
ttgaggatatgagatcgagacaaca

SEQ ID NO: 36459 - RNA, 21 nt, Synthetic Construct
  source 1..21: mol_type = other RNA
ctagactgaggctccttgagg

SEQ ID NO: 36460 - RNA, 21 nt, Synthetic Construct
  source 1..21: mol_type = other RNA
ctagactgaggctccttgagg

SEQ ID NO: 36461 - RNA, 22 nt, Synthetic Construct
  source 1..22: mol_type = other RNA
catagcacttgtctcggtctga

SEQ ID NO: 36462 - RNA, 22 nt, Synthetic Construct
  source 1..22: mol_type = other RNA
catagcacttgtctcggtctga

SEQ ID NO: 36463 - RNA, 22 nt, Synthetic Construct
  source 1..22: mol_type = other RNA
gattgcacttgtcccggcctgt

SEQ ID NO: 36464 - RNA, 23 nt, Synthetic Construct
  source 1..23: mol_type = other RNA
tggtaatacgacgtactttgtgt

SEQ ID NO: 36465 - RNA, 43 nt, Synthetic Construct; identical to SEQ ID NO: 2315
  source 1..43: mol_type = other RNA

SEQ ID NO: 36466 - RNA, 22 nt, Synthetic Construct
  source 1..22: mol_type = other RNA
taactccttaagtgaatctcgc

SEQ ID NO: 36467 - RNA, 22 nt, Synthetic Construct
  source 1..22: mol_type = other RNA
tattacacttgtcccggcctgt

SEQ ID NO: 36468 - RNA, 22 nt, Synthetic Construct
  source 1..22: mol_type = other RNA
tcctgtactgtgctgccccgag

SEQ ID NO: 36469 - RNA, 22 nt, Synthetic Construct
  source 1..22: mol_type = other RNA
atggatttttggagcagggaga

SEQ ID NO: 36470 - RNA, 22 nt, Synthetic Construct
  source 1..22: mol_type = other RNA
atggatttttggagcagggaga

SEQ ID NO: 36471 - RNA, 42 nt, Synthetic Construct; identical to SEQ ID NO: 19836
  source 1..42: mol_type = other RNA

SEQ ID NO: 36472 - RNA, 21 nt, Synthetic Construct
  source 1..21: mol_type = other RNA
tgaggtagaaggttgtatagt

SEQ ID NO: 36473 - RNA, 22 nt, Synthetic Construct
  source 1..22: mol_type = other RNA
ttcaagtaattcaggataggtt

SEQ ID NO: 36474 - RNA, 33 nt, Synthetic Construct; identical to SEQ ID NO: 2638
  source 1..33: mol_type = other RNA

SEQ ID NO: 36475 - RNA, 33 nt, Synthetic Construct; identical to SEQ ID NO: 2638
  source 1..33: mol_type = other RNA

SEQ ID NO: 36476 - RNA, 23 nt, Synthetic Construct
  source 1..23: mol_type = other RNA
acagtagtctgcacattggttat

SEQ ID NO: 36477 - RNA, 23 nt, Synthetic Construct
  source 1..23: mol_type = other RNA
acagtagtctgcacattggttat

SEQ ID NO: 36478 - RNA, 21 nt, Synthetic Construct
  source 1..21: mol_type = other RNA
ttataatacaacctgataagt

SEQ ID NO: 36479 - RNA, 30 nt, Synthetic Construct; identical to SEQ ID NO: 2840
  source 1..30: mol_type = other RNA

SEQ ID NO: 36480 - RNA, 24 nt, Synthetic Construct
  source 1..24: mol_type = other RNA
tgtaaacatccccggctggaagct

SEQ ID NO: 36481 - RNA, 24 nt, Synthetic Construct
  source 1..24: mol_type = other RNA
tgtaaacatccccggctggaagct

SEQ ID NO: 36482 - RNA, 22 nt, Synthetic Construct
  source 1..22: mol_type = other RNA
ttcaccaccttctccacccagc

SEQ ID NO: 36483 - RNA, 22 nt, Synthetic Construct
  source 1..22: mol_type = other RNA
ttcaccaccttctccacccagc

SEQ ID NO: 36484 - RNA, 22 nt, Synthetic Construct
  source 1..22: mol_type = other RNA
tattgcacttgttccggcctgt

SEQ ID NO: 36485 - RNA, 21 nt, Synthetic Construct
  source 1..21: mol_type = other RNA
gtcagtttgtcaaatacccca

SEQ ID NO: 36486 - RNA, 21 nt, Synthetic Construct
  source 1..21: mol_type = other RNA
gtcagtttgtcaaatacccca

SEQ ID NO: 36487 - RNA, 22 nt, Synthetic Construct
  source 1..22: mol_type = other RNA
gcctgtactgagctgccccgag

SEQ ID NO: 36488 - RNA, 22 nt, Synthetic Construct
  source 1..22: mol_type = other RNA
gcctgtactgagctgccccgag

SEQ ID NO: 36489 - RNA, 23 nt, Synthetic Construct
  source 1..23: mol_type = other RNA
actggacttggagtcagaaggca

SEQ ID NO: 36490 - RNA, 23 nt, Synthetic Construct
  source 1..23: mol_type = other RNA
actggacttggagtcagaaggca

SEQ ID NO: 36491 - RNA, 16 nt, Synthetic Construct
  source 1..16: mol_type = other RNA
cccagaaacccggtcg

SEQ ID NO: 36492 - RNA, 16 nt, Synthetic Construct
  source 1..16: mol_type = other RNA
cccagaaacccggtcg

SEQ ID NO: 36493 - RNA, 33 nt, Synthetic Construct; identical to SEQ ID NO: 2266
  source 1..33: mol_type = other RNA

SEQ ID NO: 36494 - RNA, 16 nt, Synthetic Construct
  source 1..16: mol_type = other RNA
ggcgggagtaactatg

SEQ ID NO: 36495 - RNA, 16 nt, Synthetic Construct
  source 1..16: mol_type = other RNA
ggcgggagtaactatg

SEQ ID NO: 36496 - RNA, 21 nt, Synthetic Construct
  source 1..21: mol_type = other RNA
tggagtgtgacaatggtgctt

SEQ ID NO: 36497 - RNA, 22 nt, Synthetic Construct
  source 1..22: mol_type = other RNA
tattgcacttgtcctggcctgt

SEQ ID NO: 36498 - RNA, 22 nt, Synthetic Construct
  source 1..22: mol_type = other RNA
tattgcacttgtcctggcctgt

SEQ ID NO: 36499 - RNA, 22 nt, Synthetic Construct
  source 1..22: mol_type = other RNA
tgaagtagtaggttgtatagtt

SEQ ID NO: 36500 - RNA, 22 nt, Synthetic Construct
  source 1..22: mol_type = other RNA
tgaagtagtaggttgtatagtt

SEQ ID NO: 36501 - RNA, 23 nt, Synthetic Construct
  source 1..23: mol_type = other RNA
tggtaatgcgacgtacttagtgt

SEQ ID NO: 36502 - RNA, 23 nt, Synthetic Construct
  source 1..23: mol_type = other RNA
tggtaatgcgacgtacttagtgt

SEQ ID NO: 36503 - RNA, 22 nt, Synthetic Construct
  source 1..22: mol_type = other RNA
tacgcctgtctgagcgtcgctt

SEQ ID NO: 36504 - RNA, 22 nt, Synthetic Construct
  source 1..22: mol_type = other RNA
tgaggtagtaggttgtatagta

SEQ ID NO: 36505 - RNA, 22 nt, Synthetic Construct
  source 1..22: mol_type = other RNA
tgaggtagtaggttgtatagta

SEQ ID NO: 36506 - RNA, 23 nt, Synthetic Construct
  source 1..23: mol_type = other RNA
tcctgtactgagctgtcccgaga

SEQ ID NO: 36507 - RNA, 23 nt, Synthetic Construct
  source 1..23: mol_type = other RNA
tgaggggcagagagcgagactat

SEQ ID NO: 36508 - RNA, 28 nt, Synthetic Construct
  source 1..28: mol_type = other RNA
cccccccactgctaaatttgactggcta

SEQ ID NO: 36509 - RNA, 28 nt, Synthetic Construct
  source 1..28: mol_type = other RNA
cccccccactgctaaatttgactggcta

SEQ ID NO: 36510 - RNA, 22 nt, Synthetic Construct
  source 1..22: mol_type = other RNA
ggcagcattgtacagggctatg

SEQ ID NO: 36511 - RNA, 21 nt, Synthetic Construct
  source 1..21: mol_type = other RNA
tgaggtagtaggatgtgtggt

SEQ ID NO: 36512 - RNA, 21 nt, Synthetic Construct
  source 1..21: mol_type = other RNA
tgaggtagtaggatgtgtggt

SEQ ID NO: 36513 - RNA, 23 nt, Synthetic Construct
  source 1..23: mol_type = other RNA
tcttggagtaggtcattgggtgg

SEQ ID NO: 36514 - RNA, 20 nt, Synthetic Construct
  source 1..20: mol_type = other RNA
taactccttagcgatctcgc

SEQ ID NO: 36515 - RNA, 16 nt, Synthetic Construct
  source 1..16: mol_type = other RNA
gtctacggccatacta

SEQ ID NO: 36516 - RNA, 23 nt, Synthetic Construct
  source 1..23: mol_type = other RNA
naaagtgctgttcgtgcaggtag

SEQ ID NO: 36517 - RNA, 21 nt, Synthetic Construct
  source 1..21: mol_type = other RNA
cctctgggcccttcctccagt

SEQ ID NO: 36518 - RNA, 21 nt, Synthetic Construct
  source 1..21: mol_type = other RNA
cctctgggcccttcctccagt

SEQ ID NO: 36519 - RNA, 23 nt, Synthetic Construct
  source 1..23: mol_type = other RNA
tgaagggcagagagcgagacttt

SEQ ID NO: 36520 - RNA, 22 nt, Synthetic Construct
  source 1..22: mol_type = other RNA
actagattgtgagctcctggag

SEQ ID NO: 36521 - RNA, 22 nt, Synthetic Construct
  source 1..22: mol_type = other RNA
actagattgtgagctcctggag

SEQ ID NO: 36522 - RNA, 25 nt, Synthetic Construct
  source 1..25: mol_type = other RNA
gtcaggatggccgagcggtctaagg

SEQ ID NO: 36523 - RNA, 25 nt, Synthetic Construct
  source 1..25: mol_type = other RNA
gtcaggatggccgagcggtctaagg

SEQ ID NO: 36524 - RNA, 26 nt, Synthetic Construct
  source 1..26: mol_type = other RNA
cgactcttagcggtggatcactcggc

SEQ ID NO: 36525 - RNA, 26 nt, Synthetic Construct
  source 1..26: mol_type = other RNA
cgactcttagcggtggatcactcggc

SEQ ID NO: 36526 - RNA, 23 nt, Synthetic Construct
  source 1..23: mol_type = other RNA
tcctgtactgagctgccccgagg

SEQ ID NO: 36527 - RNA, 23 nt, Synthetic Construct
  source 1..23: mol_type = other RNA
tcctgtactgagctgccccgagg

SEQ ID NO: 36528 - RNA, 22 nt, Synthetic Construct
  source 1..22: mol_type = other RNA
tagcagcacgtaaatattggtg

SEQ ID NO: 36529 - RNA, 22 nt, Synthetic Construct
  source 1..22: mol_type = other RNA
tagcagcacgtaaatattggtg

SEQ ID NO: 36530 - RNA, 22 nt, Synthetic Construct
  source 1..22: mol_type = other RNA
tggggtagtaggttgtgtggtt

SEQ ID NO: 36531 - RNA, 16 nt, Synthetic Construct
  source 1..16: mol_type = other RNA
tcgtgacgatagtgca

SEQ ID NO: 36532 - RNA, 25 nt, Synthetic Construct
  source 1..25: mol_type = other RNA
ggtaaaatcgctgagtgaagcattg

SEQ ID NO: 36533 - RNA, 18 nt, Synthetic Construct
  source 1..18: mol_type = other RNA
gttaaaaagctcgtagtt

SEQ ID NO: 36534 - RNA, 18 nt, Synthetic Construct
  source 1..18: mol_type = other RNA
gttaaaaagctcgtagtt

SEQ ID NO: 36535 - RNA, 23 nt, Synthetic Construct
  source 1..23: mol_type = other RNA
cgaggtagtaggttgtgtggttt

SEQ ID NO: 36536 - RNA, 20 nt, Synthetic Construct
  source 1..20: mol_type = other RNA
agaggtagtaggttgtgtgg

SEQ ID NO: 36537 - RNA, 20 nt, Synthetic Construct
  source 1..20: mol_type = other RNA
agaggtagtaggttgtgtgg

SEQ ID NO: 36538 - RNA, 23 nt, Synthetic Construct
  source 1..23: mol_type = other RNA
tggcaatacgacgtacttagtgt

SEQ ID NO: 36539 - RNA, 23 nt, Synthetic Construct
  source 1..23: mol_type = other RNA
tggcaatacgacgtacttagtgt

SEQ ID NO: 36540 - RNA, 22 nt, Synthetic Construct
  source 1..22: mol_type = other RNA
tagcagcacttaaatattggcg

SEQ ID NO: 36541 - RNA, 22 nt, Synthetic Construct
  source 1..22: mol_type = other RNA
tagcagcacttaaatattggcg

SEQ ID NO: 36542 - RNA, 23 nt, Synthetic Construct
  source 1..23: mol_type = other RNA
tcctgtactgagctgccccgagc

SEQ ID NO: 36543 - RNA, 20 nt, Synthetic Construct
  source 1..20: mol_type = other RNA
tacagtatagatgatgtact

SEQ ID NO: 36544 - RNA, 19 nt, Synthetic Construct
  source 1..19: mol_type = other RNA
gtacagtactgtgataact

SEQ ID NO: 36545 - RNA, 19 nt, Synthetic Construct
  source 1..19: mol_type = other RNA
gtacagtactgtgataact

SEQ ID NO: 36546 - RNA, 23 nt, Synthetic Construct
  source 1..23: mol_type = other RNA
tcctgtactgagctgacccgaga

SEQ ID NO: 36547 - RNA, 23 nt, Synthetic Construct
  source 1..23: mol_type = other RNA
tcctgtactgagctgacccgaga

SEQ ID NO: 36548 - RNA, 20 nt, Synthetic Construct
  source 1..20: mol_type = other RNA
gtcagtttgtcaaatacccc

SEQ ID NO: 36549 - RNA, 20 nt, Synthetic Construct
  source 1..20: mol_type = other RNA
gtcagtttgtcaaatacccc

SEQ ID NO: 36550 - RNA, 20 nt, Synthetic Construct
  source 1..20: mol_type = other RNA
tcctgtctgaatatgggggg

SEQ ID NO: 36551 - RNA, 22 nt, Synthetic Construct
  source 1..22: mol_type = other RNA
tgaggtagtagtttatgctgtt

SEQ ID NO: 36552 - RNA, 23 nt, Synthetic Construct
  source 1..23: mol_type = other RNA
tcacacagaaatcgcacccgtct

SEQ ID NO: 36553 - RNA, 23 nt, Synthetic Construct
  source 1..23: mol_type = other RNA
tcacacagaaatcgcacccgtct

SEQ ID NO: 36554 - RNA, 23 nt, Synthetic Construct
  source 1..23: mol_type = other RNA
tgagaactgaattccatgggttg

SEQ ID NO: 36555 - RNA, 23 nt, Synthetic Construct
  source 1..23: mol_type = other RNA
tgagaactgaattccatgggttg

SEQ ID NO: 36556 - RNA, 22 nt, Synthetic Construct
  source 1..22: mol_type = other RNA
tggagagaaaggcagttcctga

SEQ ID NO: 36557 - RNA, 22 nt, Synthetic Construct
  source 1..22: mol_type = other RNA
tcgtgccgtgagtaataatgcg

SEQ ID NO: 36558 - RNA, 18 nt, Synthetic Construct
  source 1..18: mol_type = other RNA
cctgtaccgatcaatagt

SEQ ID NO: 36559 - RNA, 24 nt, Synthetic Construct
  source 1..24: mol_type = other RNA
taccacagggtagaaccacggatt

SEQ ID NO: 36560 - RNA, 24 nt, Synthetic Construct
  source 1..24: mol_type = other RNA
taccacagggtagaaccacggatt

SEQ ID NO: 36561 - RNA, 27 nt, Synthetic Construct
  source 1..27: mol_type = other RNA
ccccccacagctaaatttgactggcta

SEQ ID NO: 36562 - RNA, 26 nt, Synthetic Construct
  source 1..26: mol_type = other RNA
caacggaatcccaaaagcagctgttt

SEQ ID NO: 36563 - RNA, 26 nt, Synthetic Construct
  source 1..26: mol_type = other RNA
caacggaatcccaaaagcagctgttt

SEQ ID NO: 36564 - RNA, 17 nt, Synthetic Construct
  source 1..17: mol_type = other RNA
cgaaattccttgtcggg

SEQ ID NO: 36565 - RNA, 24 nt, Synthetic Construct
  source 1..24: mol_type = other RNA
tgaggtagtagattgtatagtttt

SEQ ID NO: 36566 - RNA, 24 nt, Synthetic Construct
  source 1..24: mol_type = other RNA
tgaggtagtagattgtatagtttt

SEQ ID NO: 36567 - RNA, 23 nt, Synthetic Construct
  source 1..23: mol_type = other RNA
tcctgtactgagctgccctgaga

SEQ ID NO: 36568 - RNA, 20 nt, Synthetic Construct
  source 1..20: mol_type = other RNA
tattgcacattactaagttg

SEQ ID NO: 36569 - RNA, 20 nt, Synthetic Construct
  source 1..20: mol_type = other RNA
tattgcacattactaagttg

SEQ ID NO: 36570 - RNA, 23 nt, Synthetic Construct
  source 1..23: mol_type = other RNA
tggtaatacggcgtacttagtgt

SEQ ID NO: 36571 - RNA, 22 nt, Synthetic Construct
  source 1..22: mol_type = other RNA
tggagtgtgacaatggtgcttg

SEQ ID NO: 36572 - RNA, 22 nt, Synthetic Construct
  source 1..22: mol_type = other RNA
tggagtgtgacaatggtgcttg

SEQ ID NO: 36573 - RNA, 23 nt, Synthetic Construct
  source 1..23: mol_type = other RNA
tgaggtagtaggttgtgtggctt

SEQ ID NO: 36574 - RNA, 21 nt, Synthetic Construct
  source 1..21: mol_type = other RNA
ccctgtactgagctgccccga

SEQ ID NO: 36575 - RNA, 29 nt, Synthetic Construct
  source 1..29: mol_type = other RNA
ttacaggggttcgaatcccctaggggacg

SEQ ID NO: 36576 - RNA, 22 nt, Synthetic Construct
  source 1..22: mol_type = other RNA
gagagtaggacgttgccaggtt

SEQ ID NO: 36577 - RNA, 22 nt, Synthetic Construct
  source 1..22: mol_type = other RNA
gagagtaggacgttgccaggtt

SEQ ID NO: 36578 - RNA, 18 nt, Synthetic Construct
  source 1..18: mol_type = other RNA
cgccgatgatagtgcgga

SEQ ID NO: 36579 - RNA, 18 nt, Synthetic Construct
  source 1..18: mol_type = other RNA
cgccgatgatagtgcgga

SEQ ID NO: 36580 - RNA, 23 nt, Synthetic Construct
  source 1..23: mol_type = other RNA
tcctgtactgagctgccctgaga

SEQ ID NO: 36581 - RNA, 24 nt, Synthetic Construct
  source 1..24: mol_type = other RNA
tgaggtaggaggttgtatagttgt

SEQ ID NO: 36582 - RNA, 22 nt, Synthetic Construct
  source 1..22: mol_type = other RNA
tctttggttatctagctgtatg

SEQ ID NO: 36583 - RNA, 22 nt, Synthetic Construct
  source 1..22: mol_type = other RNA
tctttggttatctagctgtatg

SEQ ID NO: 36584 - RNA, 22 nt, Synthetic Construct
  source 1..22: mol_type = other RNA
tcgaaaccatcctctgctacca

SEQ ID NO: 36585 - RNA, 23 nt, Synthetic Construct
  source 1..23: mol_type = other RNA
caaagtgctgtttgtgcaggtag

SEQ ID NO: 36586 - RNA, 23 nt, Synthetic Construct
  source 1..23: mol_type = other RNA
caaagtgctgtttgtgcaggtag

SEQ ID NO: 36587 - RNA, 27 nt, Synthetic Construct
  source 1..27: mol_type = other RNA
ccccccattgctaaatttgactggctt

SEQ ID NO: 36588 - RNA, 27 nt, Synthetic Construct
  source 1..27: mol_type = other RNA
ccccccattgctaaatttgactggctt

SEQ ID NO: 36589 - RNA, 22 nt, Synthetic Construct
  source 1..22: mol_type = other RNA
aagcagcacgtaaatattggag

SEQ ID NO: 36590 - RNA, 22 nt, Synthetic Construct
  source 1..22: mol_type = other RNA
ncgtaccgtgagtaataatgcg

SEQ ID NO: 36591 - RNA, 22 nt, Synthetic Construct
  source 1..22: mol_type = other RNA
gcgtaccgtgagtaataatgcg

SEQ ID NO: 36592 - RNA, 22 nt, Synthetic Construct
  source 1..22: mol_type = other RNA
gcgtaccgtgagtaataatgcg

SEQ ID NO: 36593 - RNA, 35 nt, Synthetic Construct; identical to SEQ ID NO: 1497
  source 1..35: mol_type = other RNA

SEQ ID NO: 36594 - RNA, 24 nt, Synthetic Construct
  source 1..24: mol_type = other RNA
tgggtaatacgacgtacttagtgt

SEQ ID NO: 36595 - RNA, 24 nt, Synthetic Construct
  source 1..24: mol_type = other RNA
tgggtaatacgacgtacttagtgt

SEQ ID NO: 36596 - RNA, 22 nt, Synthetic Construct
  source 1..22: mol_type = other RNA
cattgcacttgtcccggcctgt

SEQ ID NO: 36597 - RNA, 22 nt, Synthetic Construct
  source 1..22: mol_type = other RNA
cattgcacttgtcccggcctgt

SEQ ID NO: 36598 - RNA, 22 nt, Synthetic Construct
  source 1..22: mol_type = other RNA
cattgcacttgtctcggcctga

SEQ ID NO: 36599 - RNA, 22 nt, Synthetic Construct
  source 1..22: mol_type = other RNA
tagctgcacgtaaatattggcg

SEQ ID NO: 36600 - RNA, 22 nt, Synthetic Construct
  source 1..22: mol_type = other RNA
tcgtaccgtgagtaatgatgcg

SEQ ID NO: 36601 - RNA, 22 nt, Synthetic Construct
  source 1..22: mol_type = other RNA
cggaatgtaaagaagtatgtat

SEQ ID NO: 36602 - RNA, 22 nt, Synthetic Construct
  source 1..22: mol_type = other RNA
cggaatgtaaagaagtatgtat

SEQ ID NO: 36603 - RNA, 22 nt, Synthetic Construct
  source 1..22: mol_type = other RNA
tagcagcacgtaaatattgacg

SEQ ID NO: 36604 - RNA, 22 nt, Synthetic Construct
  source 1..22: mol_type = other RNA
tatcgcacttgtcccggcctgt

SEQ ID NO: 36605 - RNA, 22 nt, Synthetic Construct
  source 1..22: mol_type = other RNA
tatcgcacttgtcccggcctgt

SEQ ID NO: 36606 - RNA, 22 nt, Synthetic Construct
  source 1..22: mol_type = other RNA
tgaggtagtaggttgtgaggtt

SEQ ID NO: 36607 - RNA, 18 nt, Synthetic Construct
  source 1..18: mol_type = other RNA
cttggggttgtaggacca

SEQ ID NO: 36608 - RNA, 18 nt, Synthetic Construct
  source 1..18: mol_type = other RNA
cttggggttgtaggacca

SEQ ID NO: 36609 - RNA, 22 nt, Synthetic Construct
  source 1..22: mol_type = other RNA
gagaactgaattccatgggttg

SEQ ID NO: 36610 - RNA, 21 nt, Synthetic Construct
  source 1..21: mol_type = other RNA
tggggtgtgacaatggtgttt

SEQ ID NO: 36611 - RNA, 21 nt, Synthetic Construct
  source 1..21: mol_type = other RNA
tggggtgtgacaatggtgttt

SEQ ID NO: 36612 - RNA, 17 nt, Synthetic Construct
  source 1..17: mol_type = other RNA
cgaaattccttgtcggg

SEQ ID NO: 36613 - RNA, 17 nt, Synthetic Construct
  source 1..17: mol_type = other RNA
cgaaattccttgtcggg

SEQ ID NO: 36614 - RNA, 22 nt, Synthetic Construct
  source 1..22: mol_type = other RNA
cattgcacttgtcccggcctgt

SEQ ID NO: 36615 - RNA, 22 nt, Synthetic Construct
  source 1..22: mol_type = other RNA
cattgcacttgtcccggcctgt

SEQ ID NO: 36616 - RNA, 19 nt, Synthetic Construct
  source 1..19: mol_type = other RNA
tgtaaacatcctcgactgg

SEQ ID NO: 36617 - RNA, 24 nt, Synthetic Construct
  source 1..24: mol_type = other RNA
tgtaaacatcctcgactggaagct

SEQ ID NO: 36618 - RNA, 23 nt, Synthetic Construct
  source 1..23: mol_type = other RNA
tcctgtactgagctgcctcgaga

SEQ ID NO: 36619 - RNA, 23 nt, Synthetic Construct
  source 1..23: mol_type = other RNA
tcctgtactgagctgcctcgaga

SEQ ID NO: 36620 - RNA, 22 nt, Synthetic Construct
  source 1..22: mol_type = other RNA
taactacttaagcgaatctcgc

SEQ ID NO: 36621 - RNA, 22 nt, Synthetic Construct
  source 1..22: mol_type = other RNA
taactacttaagcgaatctcgc

SEQ ID NO: 36622 - RNA, 22 nt, Synthetic Construct
  source 1..22: mol_type = other RNA
acctgtactgagctgccccgag

SEQ ID NO: 36623 - RNA, 22 nt, Synthetic Construct
  source 1..22: mol_type = other RNA
acctgtactgagctgccccgag

SEQ ID NO: 36624 - RNA, 22 nt, Synthetic Construct
  source 1..22: mol_type = other RNA
cattgcacttgtctcggtctgg

SEQ ID NO: 36625 - RNA, 23 nt, Synthetic Construct
  source 1..23: mol_type = other RNA
agcaacattgtctgctgggtttc

SEQ ID NO: 36626 - RNA, 23 nt, Synthetic Construct
  source 1..23: mol_type = other RNA
agcaacattgtctgctgggtttc

SEQ ID NO: 36627 - RNA, 25 nt, Synthetic Construct
  source 1..25: mol_type = other RNA
gttgaattgtggtctgtggacgtgg

SEQ ID NO: 36628 - RNA, 25 nt, Synthetic Construct
  source 1..25: mol_type = other RNA
gttgaattgtggtctgtggacgtgg

SEQ ID NO: 36629 - RNA, 21 nt, Synthetic Construct
  source 1..21: mol_type = other RNA
cagtgcaatgttaaaagggca

SEQ ID NO: 36630 - RNA, 21 nt, Synthetic Construct
  source 1..21: mol_type = other RNA
cagtgcaatgttaaaagggca

SEQ ID NO: 36631 - RNA, 22 nt, Synthetic Construct
  source 1..22: mol_type = other RNA
tgaggtagtagattatatagtt

SEQ ID NO: 36632 - RNA, 22 nt, Synthetic Construct
  source 1..22: mol_type = other RNA
tgaggtagtagattatatagtt

SEQ ID NO: 36633 - RNA, 27 nt, Synthetic Construct
  source 1..27: mol_type = other RNA
ccccccaccgctaaatttgactggctt

SEQ ID NO: 36634 - RNA, 23 nt, Synthetic Construct
  source 1..23: mol_type = other RNA
agcaggacggtggccatggaagt

SEQ ID NO: 36635 - RNA, 21 nt, Synthetic Construct
  source 1..21: mol_type = other RNA
taactccttaagcgatctcgc

SEQ ID NO: 36636 - RNA, 18 nt, Synthetic Construct
  source 1..18: mol_type = other RNA
agtgacgcgcatgaatgg

SEQ ID NO: 36637 - RNA, 18 nt, Synthetic Construct
  source 1..18: mol_type = other RNA
agtgacgcgcatgaatgg

SEQ ID NO: 36638 - RNA, 21 nt, Synthetic Construct
  source 1..21: mol_type = other RNA
tgaggggcagagggcgagact

SEQ ID NO: 36639 - RNA, 22 nt, Synthetic Construct
  source 1..22: mol_type = other RNA
cattgcacttgcctcggtctga

SEQ ID NO: 36640 - RNA, 22 nt, Synthetic Construct
  source 1..22: mol_type = other RNA
cattgcacttgcctcggtctga

SEQ ID NO: 36641 - RNA, 35 nt, Synthetic Construct; identical to SEQ ID NO: 3369
  source 1..35: mol_type = other RNA

SEQ ID NO: 36642 - RNA, 35 nt, Synthetic Construct; identical to SEQ ID NO: 3369
  source 1..35: mol_type = other RNA

SEQ ID NO: 36643 - RNA, 22 nt, Synthetic Construct
  source 1..22: mol_type = other RNA
tactgcacttgtcccggcctgt

SEQ ID NO: 36644 - RNA, 24 nt, Synthetic Construct
  source 1..24: mol_type = other RNA
tcctccctcgggagggcgcgcggg

SEQ ID NO: 36645 - RNA, 24 nt, Synthetic Construct
  source 1..24: mol_type = other RNA
tcctccctcgggagggcgcgcggg

SEQ ID NO: 36646 - RNA, 18 nt, Synthetic Construct
  source 1..18: mol_type = other RNA
ttgggagcgggcgggcgg

SEQ ID NO: 36647 - RNA, 18 nt, Synthetic Construct
  source 1..18: mol_type = other RNA
ttgggagcgggcgggcgg

SEQ ID NO: 36648 - RNA, 23 nt, Synthetic Construct
  source 1..23: mol_type = other RNA
tcctgtactgagctgcctcgaga

SEQ ID NO: 36649 - RNA, 22 nt, Synthetic Construct
  source 1..22: mol_type = other RNA
tcgaaccgtgagtaataatgcg

SEQ ID NO: 36650 - RNA, 36 nt, Synthetic Construct; identical to SEQ ID NO: 2444
  source 1..36: mol_type = other RNA

SEQ ID NO: 36651 - RNA, 36 nt, Synthetic Construct; identical to SEQ ID NO: 2444
  source 1..36: mol_type = other RNA

SEQ ID NO: 36652 - RNA, 24 nt, Synthetic Construct
  source 1..24: mol_type = other RNA
tgtcagtttgtcaaataccccaat

SEQ ID NO: 36653 - RNA, 18 nt, Synthetic Construct
  source 1..18: mol_type = other RNA
gcgccgatgatagtgcgg

SEQ ID NO: 36654 - RNA, 18 nt, Synthetic Construct
  source 1..18: mol_type = other RNA
atcccactcctgacacca

SEQ ID NO: 36655 - RNA, 18 nt, Synthetic Construct
  source 1..18: mol_type = other RNA
atcccactcctgacacca

SEQ ID NO: 36656 - RNA, 35 nt, Synthetic Construct; identical to SEQ ID NO: 787
  source 1..35: mol_type = other RNA

SEQ ID NO: 36657 - RNA, 35 nt, Synthetic Construct; identical to SEQ ID NO: 787
  source 1..35: mol_type = other RNA

SEQ ID NO: 36658 - RNA, 27 nt, Synthetic Construct
  source 1..27: mol_type = other RNA
ccccccactgctaaatttgactggctc

SEQ ID NO: 36659 - RNA, 20 nt, Synthetic Construct
  source 1..20: mol_type = other RNA
tgaggtagtaggttgtgtgg

SEQ ID NO: 36660 - RNA, 22 nt, Synthetic Construct
  source 1..22: mol_type = other RNA
tgaggcagtagtttgtgctgtt

SEQ ID NO: 36661 - RNA, 22 nt, Synthetic Construct
  source 1..22: mol_type = other RNA
tgaggcagtagtttgtgctgtt

SEQ ID NO: 36662 - RNA, 21 nt, Synthetic Construct
  source 1..21: mol_type = other RNA
tgaggtagtaagttgtgtggt

SEQ ID NO: 36663 - RNA, 21 nt, Synthetic Construct
  source 1..21: mol_type = other RNA
tgaggtagtaagttgtgtggt

SEQ ID NO: 36664 - RNA, 21 nt, Synthetic Construct
  source 1..21: mol_type = other RNA
agcgtgcttgactgcgagact

SEQ ID NO: 36665 - RNA, 32 nt, Synthetic Construct
  source 1..32: mol_type = other RNA
attgaaagtcagccctcgacacaagggtttgt

SEQ ID NO: 36666 - RNA, 23 nt, Synthetic Construct
  source 1..23: mol_type = other RNA
tgaggtggtaggttgtgtggttt

SEQ ID NO: 36667 - RNA, 18 nt, Synthetic Construct
  source 1..18: mol_type = other RNA
ttctacagtccgacgatc

SEQ ID NO: 36668 - RNA, 18 nt, Synthetic Construct
  source 1..18: mol_type = other RNA
ttctacagtccgacgatc

SEQ ID NO: 36669 - RNA, 22 nt, Synthetic Construct
  source 1..22: mol_type = other RNA
tcgtaccgtgagtaatagtgcg

SEQ ID NO: 36670 - RNA, 35 nt, Synthetic Construct; identical to SEQ ID NO: 2450
  source 1..35: mol_type = other RNA

SEQ ID NO: 36671 - RNA, 35 nt, Synthetic Construct; identical to SEQ ID NO: 2450
  source 1..35: mol_type = other RNA

SEQ ID NO: 36672 - RNA, 20 nt, Synthetic Construct
  source 1..20: mol_type = other RNA
tagcaccatttgaaatcagt

SEQ ID NO: 36673 - RNA, 34 nt, Synthetic Construct; identical to SEQ ID NO: 6757
  source 1..34: mol_type = other RNA

SEQ ID NO: 36674 - RNA, 22 nt, Synthetic Construct
  source 1..22: mol_type = other RNA
tatgtcccacccccactcctgt

SEQ ID NO: 36675 - RNA, 22 nt, Synthetic Construct
  source 1..22: mol_type = other RNA
tatgtcccacccccactcctgt

SEQ ID NO: 36676 - RNA, 37 nt, Synthetic Construct; identical to SEQ ID NO: 1620
  source 1..37: mol_type = other RNA

SEQ ID NO: 36677 - RNA, 21 nt, Synthetic Construct
  source 1..21: mol_type = other RNA
tgaggtagtagtttgtgccgt

SEQ ID NO: 36678 - RNA, 23 nt, Synthetic Construct
  source 1..23: mol_type = other RNA
ttggtccccttcaaccagctgtt

SEQ ID NO: 36679 - RNA, 23 nt, Synthetic Construct
  source 1..23: mol_type = other RNA
ttggtccccttcaaccagctgtt

SEQ ID NO: 36680 - RNA, 22 nt, Synthetic Construct
  source 1..22: mol_type = other RNA
tgtagtgtttcctaccttatgg

SEQ ID NO: 36681 - RNA, 20 nt, Synthetic Construct
  source 1..20: mol_type = other RNA
tgaggtagtaggttgtatag

SEQ ID NO: 36682 - RNA, 20 nt, Synthetic Construct
  source 1..20: mol_type = other RNA
tgaggtagtaggttgtatag

SEQ ID NO: 36683 - RNA, 23 nt, Synthetic Construct
  source 1..23: mol_type = other RNA
acagtagtctgcacattggttaa

SEQ ID NO: 36684 - RNA, 23 nt, Synthetic Construct
  source 1..23: mol_type = other RNA
caaagtgctgtccgtgcaggtag

SEQ ID NO: 36685 - RNA, 23 nt, Synthetic Construct
  source 1..23: mol_type = other RNA
caaagtgctgtccgtgcaggtag

SEQ ID NO: 36686 - RNA, 31 nt, Synthetic Construct; identical to SEQ ID NO: 4881
  source 1..31: mol_type = other RNA

SEQ ID NO: 36687 - RNA, 31 nt, Synthetic Construct; identical to SEQ ID NO: 4881
  source 1..31: mol_type = other RNA

SEQ ID NO: 36688 - RNA, 26 nt, Synthetic Construct
  source 1..26: mol_type = other RNA
tcccacatggtctagcggttaggatt

SEQ ID NO: 36689 - RNA, 26 nt, Synthetic Construct
  source 1..26: mol_type = other RNA
tcccacatggtctagcggttaggatt

SEQ ID NO: 36690 - RNA, 27 nt, Synthetic Construct
  source 1..27: mol_type = other RNA
ccccctactgctaaatttgactggctt

SEQ ID NO: 36691 - RNA, 22 nt, Synthetic Construct
  source 1..22: mol_type = other RNA
tgaggtagtaggttgtgtggtg

SEQ ID NO: 36692 - RNA, 22 nt, Synthetic Construct
  source 1..22: mol_type = other RNA
tgaggtagtaggttgtgtggtg

SEQ ID NO: 36693 - RNA, 33 nt, Synthetic Construct; identical to SEQ ID NO: 958
  source 1..33: mol_type = other RNA

SEQ ID NO: 36694 - RNA, 23 nt, Synthetic Construct
  source 1..23: mol_type = other RNA
tcctgtactgagctgccccgagg

SEQ ID NO: 36695 - RNA, 23 nt, Synthetic Construct
  source 1..23: mol_type = other RNA
tcctgtactgagctgccccgagg

SEQ ID NO: 36696 - RNA, 21 nt, Synthetic Construct
  source 1..21: mol_type = other RNA
cataattacttttggtacgcg

SEQ ID NO: 36697 - RNA, 23 nt, Synthetic Construct
  source 1..23: mol_type = other RNA
caaagtgctgttcgtgcaggtat

SEQ ID NO: 36698 - RNA, 22 nt, Synthetic Construct
  source 1..22: mol_type = other RNA
ngaggtagtagtttgtgctgtt

SEQ ID NO: 36699 - RNA, 22 nt, Synthetic Construct
  source 1..22: mol_type = other RNA
ngaggtagtagtttgtgctgtt

SEQ ID NO: 36700 - RNA, 20 nt, Synthetic Construct
  source 1..20: mol_type = other RNA
tgtcagtttgtcaaataccc

SEQ ID NO: 36701 - RNA, 20 nt, Synthetic Construct
  source 1..20: mol_type = other RNA
tgtcagtttgtcaaataccc

SEQ ID NO: 36702 - RNA, 23 nt, Synthetic Construct
  source 1..23: mol_type = other RNA
tgaggggcggagagcgagacttt

SEQ ID NO: 36703 - RNA, 22 nt, Synthetic Construct
  source 1..22: mol_type = other RNA
gtagtgtttcctactttatgga

SEQ ID NO: 36704 - RNA, 22 nt, Synthetic Construct
  source 1..22: mol_type = other RNA
gtagtgtttcctactttatgga

SEQ ID NO: 36705 - RNA, 23 nt, Synthetic Construct
  source 1..23: mol_type = other RNA
gtcagtttgtcaaataccccaaa

SEQ ID NO: 36706 - RNA, 23 nt, Synthetic Construct
  source 1..23: mol_type = other RNA
gtcagtttgtcaaataccccaaa

SEQ ID NO: 36707 - RNA, 20 nt, Synthetic Construct
  source 1..20: mol_type = other RNA
ccttggggttgtaggaccac

SEQ ID NO: 36708 - RNA, 20 nt, Synthetic Construct
  source 1..20: mol_type = other RNA
ccttggggttgtaggaccac

SEQ ID NO: 36709 - RNA, 15 nt, Synthetic Construct
  source 1..15: mol_type = other RNA
ccgcttttgtcaggg

SEQ ID NO: 36710 - RNA, 16 nt, Synthetic Construct
  source 1..16: mol_type = other RNA
ttgaccgctctgacca

SEQ ID NO: 36711 - RNA, 17 nt, Synthetic Construct
  source 1..17: mol_type = other RNA
gcggctgtagctcagtt

SEQ ID NO: 36712 - RNA, 24 nt, Synthetic Construct
  source 1..24: mol_type = other RNA
tctcacacagaaatcgcacccgta

SEQ ID NO: 36713 - RNA, 15 nt, Synthetic Construct
  source 1..15: mol_type = other RNA
gtttgatcctggctc

SEQ ID NO: 36714 - RNA, 22 nt, Synthetic Construct
  source 1..22: mol_type = other RNA
tcgtaccgtgagtaataacgcg

SEQ ID NO: 36715 - RNA, 21 nt, Synthetic Construct
  source 1..21: mol_type = other RNA
gcctgtactgagctgccccga

SEQ ID NO: 36716 - RNA, 23 nt, Synthetic Construct
  source 1..23: mol_type = other RNA
agcagcattgtacagggctatct

SEQ ID NO: 36717 - RNA, 34 nt, Synthetic Construct; identical to SEQ ID NO: 2186
  source 1..34: mol_type = other RNA

SEQ ID NO: 36718 - RNA, 22 nt, Synthetic Construct
  source 1..22: mol_type = other RNA
tattacacttgtcccggcctgt

SEQ ID NO: 36719 - RNA, 22 nt, Synthetic Construct
  source 1..22: mol_type = other RNA
cattgcacttgtctcggcctga

SEQ ID NO: 36720 - RNA, 22 nt, Synthetic Construct
  source 1..22: mol_type = other RNA
cgcatcccctagggcattggtg

SEQ ID NO: 36721 - RNA, 22 nt, Synthetic Construct
  source 1..22: mol_type = other RNA
cgcatcccctagggcattggtg

SEQ ID NO: 36722 - RNA, 19 nt, Synthetic Construct
  source 1..19: mol_type = other RNA
cgaagacgatcagataccg

SEQ ID NO: 36723 - RNA, 19 nt, Synthetic Construct
  source 1..19: mol_type = other RNA
cgaagacgatcagataccg

SEQ ID NO: 36724 - RNA, 15 nt, Synthetic Construct
  source 1..15: mol_type = other RNA
gtacgtgagctgggt

SEQ ID NO: 36725 - RNA, 15 nt, Synthetic Construct
  source 1..15: mol_type = other RNA
gtacgtgagctgggt

SEQ ID NO: 36726 - RNA, 21 nt, Synthetic Construct
  source 1..21: mol_type = other RNA
tccagtactgagctgccccga

SEQ ID NO: 36727 - RNA, 21 nt, Synthetic Construct
  source 1..21: mol_type = other RNA
ttcaagtaattcaggataggt

SEQ ID NO: 36728 - RNA, 22 nt, Synthetic Construct
  source 1..22: mol_type = other RNA
tactgcacttgtcccggcctgt

SEQ ID NO: 36729 - RNA, 27 nt, Synthetic Construct
  source 1..27: mol_type = other RNA
ccccccactgctaaatttggctggcta

SEQ ID NO: 36730 - RNA, 27 nt, Synthetic Construct
  source 1..27: mol_type = other RNA
ccccccactgctaaatttggctggcta

SEQ ID NO: 36731 - RNA, 39 nt, Synthetic Construct; identical to SEQ ID NO: 759
  source 1..39: mol_type = other RNA

SEQ ID NO: 36732 - RNA, 22 nt, Synthetic Construct
  source 1..22: mol_type = other RNA
tcctgtaatgagctgccccgag

SEQ ID NO: 36733 - RNA, 22 nt, Synthetic Construct
  source 1..22: mol_type = other RNA
tcctgtaatgagctgccccgag

SEQ ID NO: 36734 - RNA, 21 nt, Synthetic Construct
  source 1..21: mol_type = other RNA
gctttgatccggagatttccg

SEQ ID NO: 36735 - RNA, 29 nt, Synthetic Construct
  source 1..29: mol_type = other RNA
caacgctagacgaactgcatggaaaggca

SEQ ID NO: 36736 - RNA, 29 nt, Synthetic Construct
  source 1..29: mol_type = other RNA
caacgctagacgaactgcatggaaaggca

SEQ ID NO: 36737 - RNA, 21 nt, Synthetic Construct
  source 1..21: mol_type = other RNA
tgaggtagtaggttgtacagt

SEQ ID NO: 36738 - RNA, 21 nt, Synthetic Construct
  source 1..21: mol_type = other RNA
tgaggtagtaggttgtacagt

SEQ ID NO: 36739 - RNA, 21 nt, Synthetic Construct
  source 1..21: mol_type = other RNA
tggggtagtagattgtatagt

SEQ ID NO: 36740 - RNA, 23 nt, Synthetic Construct
  source 1..23: mol_type = other RNA
tggtaatacgacgtactcagtgt

SEQ ID NO: 36741 - RNA, 20 nt, Synthetic Construct
  source 1..20: mol_type = other RNA
tgaggtagaaggttgtatag

SEQ ID NO: 36742 - RNA, 20 nt, Synthetic Construct
  source 1..20: mol_type = other RNA
tgaggtagaaggttgtatag

SEQ ID NO: 36743 - RNA, 22 nt, Synthetic Construct
  source 1..22: mol_type = other RNA
ctgggtcggtcgggctggggcg

SEQ ID NO: 36744 - RNA, 22 nt, Synthetic Construct
  source 1..22: mol_type = other RNA
ctgggtcggtcgggctggggcg

SEQ ID NO: 36745 - RNA, 34 nt, Synthetic Construct; identical to SEQ ID NO: 2375
  source 1..34: mol_type = other RNA

SEQ ID NO: 36746 - RNA, 34 nt, Synthetic Construct; identical to SEQ ID NO: 2375
  source 1..34: mol_type = other RNA

SEQ ID NO: 36747 - RNA, 21 nt, Synthetic Construct
  source 1..21: mol_type = other RNA
tgaggtagtaggttgtgtgga

SEQ ID NO: 36748 - RNA, 25 nt, Synthetic Construct
  source 1..25: mol_type = other RNA
ttgcagctgcctgggagtgacttct

SEQ ID NO: 36749 - RNA, 25 nt, Synthetic Construct
  source 1..25: mol_type = other RNA
ttgcagctgcctgggagtgacttct

SEQ ID NO: 36750 - RNA, 23 nt, Synthetic Construct
  source 1..23: mol_type = other RNA
tggtaatacgacgtgcttagtgt

SEQ ID NO: 36751 - RNA, 23 nt, Synthetic Construct
  source 1..23: mol_type = other RNA
tggtaatacgacgtgcttagtgt

SEQ ID NO: 36752 - RNA, 17 nt, Synthetic Construct
  source 1..17: mol_type = other RNA
tcgctagtaatcgcgga

SEQ ID NO: 36753 - RNA, 17 nt, Synthetic Construct
  source 1..17: mol_type = other RNA
tcgctagtaatcgcgga

SEQ ID NO: 36754 - RNA, 22 nt, Synthetic Construct
  source 1..22: mol_type = other RNA
tgaggtagtagtttgtgctgat

SEQ ID NO: 36755 - RNA, 22 nt, Synthetic Construct
  source 1..22: mol_type = other RNA
tgaggtagtagtttgtgctgat

SEQ ID NO: 36756 - RNA, 28 nt, Synthetic Construct
  source 1..28: mol_type = other RNA
gcattgtggttcagtggtagaattctcg

SEQ ID NO: 36757 - RNA, 28 nt, Synthetic Construct
  source 1..28: mol_type = other RNA
gcattgtggttcagtggtagaattctcg

SEQ ID NO: 36758 - RNA, 22 nt, Synthetic Construct
  source 1..22: mol_type = other RNA
cattgcacttgtctcggtccga

SEQ ID NO: 36759 - RNA, 23 nt, Synthetic Construct
  source 1..23: mol_type = other RNA
ggcagggttcgtgactggggtga

SEQ ID NO: 36760 - RNA, 22 nt, Synthetic Construct
  source 1..22: mol_type = other RNA
tgtcccacccccactcctgttt

SEQ ID NO: 36761 - RNA, 22 nt, Synthetic Construct
  source 1..22: mol_type = other RNA
tgtcccacccccactcctgttt

SEQ ID NO: 36762 - RNA, 24 nt, Synthetic Construct
  source 1..24: mol_type = other RNA
tagcttatcagactgatgttgact

SEQ ID NO: 36763 - RNA, 24 nt, Synthetic Construct
  source 1..24: mol_type = other RNA
tagcttatcagactgatgttgact

SEQ ID NO: 36764 - RNA, 22 nt, Synthetic Construct
  source 1..22: mol_type = other RNA
catcgggaatgtcgtgtccgcc

SEQ ID NO: 36765 - RNA, 22 nt, Synthetic Construct
  source 1..22: mol_type = other RNA
catcgggaatgtcgtgtccgcc

SEQ ID NO: 36766 - RNA, 23 nt, Synthetic Construct
  source 1..23: mol_type = other RNA
tgaggtagtagtttgtgctgttg

SEQ ID NO: 36767 - RNA, 23 nt, Synthetic Construct
  source 1..23: mol_type = other RNA
tgaggtagtagtttgtgctgttg

SEQ ID NO: 36768 - RNA, 26 nt, Synthetic Construct
  source 1..26: mol_type = other RNA
gtgtgaaagtaggtcatcgtcaggct

SEQ ID NO: 36769 - RNA, 26 nt, Synthetic Construct
  source 1..26: mol_type = other RNA
gtgtgaaagtaggtcatcgtcaggct

SEQ ID NO: 36770 - RNA, 19 nt, Synthetic Construct
  source 1..19: mol_type = other RNA
catggccgttcttagttgg

SEQ ID NO: 36771 - RNA, 23 nt, Synthetic Construct
  source 1..23: mol_type = other RNA
tcctgtactgagctgtcccgaga

SEQ ID NO: 36772 - RNA, 23 nt, Synthetic Construct
  source 1..23: mol_type = other RNA
tcctgtactgagctgtcccgaga

SEQ ID NO: 36773 - RNA, 25 nt, Synthetic Construct
  source 1..25: mol_type = other RNA
ccccccactgctaaatttgactgga

SEQ ID NO: 36774 - RNA, 25 nt, Synthetic Construct
  source 1..25: mol_type = other RNA
ccccccactgctaaatttgactgga

SEQ ID NO: 36775 - RNA, 27 nt, Synthetic Construct
  source 1..27: mol_type = other RNA
ccccccactgctaaatttgaccggctt

SEQ ID NO: 36776 - RNA, 27 nt, Synthetic Construct
  source 1..27: mol_type = other RNA
ccccccactgctaaatttgaccggctt

SEQ ID NO: 36777 - RNA, 22 nt, Synthetic Construct
  source 1..22: mol_type = other RNA
tgaggtagtaagttgtgtggtt

SEQ ID NO: 36778 - RNA, 22 nt, Synthetic Construct
  source 1..22: mol_type = other RNA
tgaggtagtaagttgtgtggtt

SEQ ID NO: 36779 - RNA, 25 nt, Synthetic Construct
  source 1..25: mol_type = other RNA
tgaggtagtaggttgtgtggttttt

SEQ ID NO: 36780 - RNA, 20 nt, Synthetic Construct
  source 1..20: mol_type = other RNA
tagcaccatttgaaatcagt

SEQ ID NO: 36781 - RNA, 34 nt, Synthetic Construct; identical to SEQ ID NO: 490
  source 1..34: mol_type = other RNA

SEQ ID NO: 36782 - RNA, 22 nt, Synthetic Construct
  source 1..22: mol_type = other RNA
tgaggtagtagtttgtgctatt

SEQ ID NO: 36783 - RNA, 22 nt, Synthetic Construct
  source 1..22: mol_type = other RNA
tgaggtagtagtttgtgctatt

SEQ ID NO: 36784 - RNA, 22 nt, Synthetic Construct
  source 1..22: mol_type = other RNA
agtagtgtttcctactttatgg

SEQ ID NO: 36785 - RNA, 22 nt, Synthetic Construct
  source 1..22: mol_type = other RNA
agtagtgtttcctactttatgg

SEQ ID NO: 36786 - RNA, 22 nt, Synthetic Construct
  source 1..22: mol_type = other RNA
tcagtgcatgacagaacttggg

SEQ ID NO: 36787 - RNA, 22 nt, Synthetic Construct
  source 1..22: mol_type = other RNA
aaagtgctgttcgtgcaggtag

SEQ ID NO: 36788 - RNA, 23 nt, Synthetic Construct
  source 1..23: mol_type = other RNA
tcctgtacagagctgccccgaga

SEQ ID NO: 36789 - RNA, 25 nt, Synthetic Construct
  source 1..25: mol_type = other RNA
tcgaggatatgagatcgagacgaca

SEQ ID NO: 36790 - RNA, 22 nt, Synthetic Construct
  source 1..22: mol_type = other RNA
tgtgactggttgaccagagggt

SEQ ID NO: 36791 - RNA, 22 nt, Synthetic Construct
  source 1..22: mol_type = other RNA
tagcagcacgtaaatataggcg

SEQ ID NO: 36792 - RNA, 36 nt, Synthetic Construct; identical to SEQ ID NO: 10982
  source 1..36: mol_type = other RNA

SEQ ID NO: 36793 - RNA, 36 nt, Synthetic Construct; identical to SEQ ID NO: 10982
  source 1..36: mol_type = other RNA

SEQ ID NO: 36794 - RNA, 21 nt, Synthetic Construct
  source 1..21: mol_type = other RNA
cattattacttttggtacgcg

SEQ ID NO: 36795 - RNA, 23 nt, Synthetic Construct
  source 1..23: mol_type = other RNA
agcagcattgtacagggctatgg

SEQ ID NO: 36796 - RNA, 23 nt, Synthetic Construct
  source 1..23: mol_type = other RNA
agcagcattgtacagggctatgg

SEQ ID NO: 36797 - RNA, 23 nt, Synthetic Construct
  source 1..23: mol_type = other RNA
caaagtgcttacagtgcaggtag

SEQ ID NO: 36798 - RNA, 23 nt, Synthetic Construct
  source 1..23: mol_type = other RNA
caaagtgcttacagtgcaggtag

SEQ ID NO: 36799 - RNA, 21 nt, Synthetic Construct
  source 1..21: mol_type = other RNA
tcctgtactgagctgcctcga

SEQ ID NO: 36800 - RNA, 21 nt, Synthetic Construct
  source 1..21: mol_type = other RNA
tcctgtactgagctgcctcga

SEQ ID NO: 36801 - RNA, 19 nt, Synthetic Construct
  source 1..19: mol_type = other RNA
gagaaagctcacaagaact

SEQ ID NO: 36802 - RNA, 19 nt, Synthetic Construct
  source 1..19: mol_type = other RNA
gagaaagctcacaagaact

SEQ ID NO: 36803 - RNA, 25 nt, Synthetic Construct
  source 1..25: mol_type = other RNA
ttgaggatatgagatcgagacgaca

SEQ ID NO: 36804 - RNA, 27 nt, Synthetic Construct
  source 1..27: mol_type = other RNA
cgtgtgaaagtaggtcatcgtcaggct

SEQ ID NO: 36805 - RNA, 27 nt, Synthetic Construct
  source 1..27: mol_type = other RNA
cgtgtgaaagtaggtcatcgtcaggct

SEQ ID NO: 36806 - RNA, 17 nt, Synthetic Construct
  source 1..17: mol_type = other RNA
ggagtatggtcgcaagg

SEQ ID NO: 36807 - RNA, 21 nt, Synthetic Construct
  source 1..21: mol_type = other RNA
tggagtgtgacaatggtgtct

SEQ ID NO: 36808 - RNA, 21 nt, Synthetic Construct
  source 1..21: mol_type = other RNA
tggagtgtgacaatggtgtct

SEQ ID NO: 36809 - RNA, 22 nt, Synthetic Construct
  source 1..22: mol_type = other RNA
tgaggtagtaggttgcatagtt

SEQ ID NO: 36810 - RNA, 22 nt, Synthetic Construct
  source 1..22: mol_type = other RNA
tgaggtagtaggttgcatagtt

SEQ ID NO: 36811 - RNA, 22 nt, Synthetic Construct
  source 1..22: mol_type = other RNA
tgaggtggtaggttgtatagtt

SEQ ID NO: 36812 - RNA, 22 nt, Synthetic Construct
  source 1..22: mol_type = other RNA
tcctgtactgtgctgccccgag

SEQ ID NO: 36813 - RNA, 22 nt, Synthetic Construct
  source 1..22: mol_type = other RNA
tcctgtactgtgctgccccgag

SEQ ID NO: 36814 - RNA, 15 nt, Synthetic Construct
  source 1..15: mol_type = other RNA
ggtcatcgtcaggct

SEQ ID NO: 36815 - RNA, 32 nt, Synthetic Construct; identical to SEQ ID NO: 3541
  source 1..32: mol_type = other RNA

SEQ ID NO: 36816 - RNA, 22 nt, Synthetic Construct
  source 1..22: mol_type = other RNA
tagcagcacgtaaatattgggg

SEQ ID NO: 36817 - RNA, 22 nt, Synthetic Construct
  source 1..22: mol_type = other RNA
tagcagcacgtaaatattgggg

SEQ ID NO: 36818 - RNA, 22 nt, Synthetic Construct
  source 1..22: mol_type = other RNA
tagcagcacgtagatattggcg

SEQ ID NO: 36819 - RNA, 22 nt, Synthetic Construct
  source 1..22: mol_type = other RNA
cgtaccgtgagtaataatgcgt

SEQ ID NO: 36820 - RNA, 22 nt, Synthetic Construct
  source 1..22: mol_type = other RNA
cgtaccgtgagtaataatgcgt

SEQ ID NO: 36821 - RNA, 27 nt, Synthetic Construct
  source 1..27: mol_type = other RNA
ccccccactgctagatttgactggctt

SEQ ID NO: 36822 - RNA, 23 nt, Synthetic Construct
  source 1..23: mol_type = other RNA
ttccccttggggttgtaggacca

SEQ ID NO: 36823 - RNA, 23 nt, Synthetic Construct
  source 1..23: mol_type = other RNA
ttccccttggggttgtaggacca

SEQ ID NO: 36824 - RNA, 23 nt, Synthetic Construct
  source 1..23: mol_type = other RNA
tggtaatacgacgtacttagtat

SEQ ID NO: 36825 - RNA, 23 nt, Synthetic Construct
  source 1..23: mol_type = other RNA
tggtaatacgacgtacttagtat

SEQ ID NO: 36826 - RNA, 21 nt, Synthetic Construct
  source 1..21: mol_type = other RNA
cgaggtagtagattgtatagt

SEQ ID NO: 36827 - RNA, 21 nt, Synthetic Construct
  source 1..21: mol_type = other RNA
cgaggtagtagattgtatagt

SEQ ID NO: 36828 - RNA, 18 nt, Synthetic Construct
  source 1..18: mol_type = other RNA
tgaggggcagagagcgag

SEQ ID NO: 36829 - RNA, 21 nt, Synthetic Construct
  source 1..21: mol_type = other RNA
tcctgtactgagctgcctcga

SEQ ID NO: 36830 - RNA, 27 nt, Synthetic Construct
  source 1..27: mol_type = other RNA
ccccccactactaaatttgactggctt

SEQ ID NO: 36831 - RNA, 27 nt, Synthetic Construct
  source 1..27: mol_type = other RNA
ccccccactactaaatttgactggctt

SEQ ID NO: 36832 - RNA, 23 nt, Synthetic Construct
  source 1..23: mol_type = other RNA
tgaggggaagagagcgagacttt

SEQ ID NO: 36833 - RNA, 20 nt, Synthetic Construct
  source 1..20: mol_type = other RNA
tgaggtagtaggttatgtgg

SEQ ID NO: 36834 - RNA, 20 nt, Synthetic Construct
  source 1..20: mol_type = other RNA
tgaggtagtaggttatgtgg

SEQ ID NO: 36835 - RNA, 22 nt, Synthetic Construct
  source 1..22: mol_type = other RNA
ttgcagcacgtaaatattggcg

SEQ ID NO: 36836 - RNA, 22 nt, Synthetic Construct
  source 1..22: mol_type = other RNA
ttgcagcacgtaaatattggcg

SEQ ID NO: 36837 - RNA, 21 nt, Synthetic Construct
  source 1..21: mol_type = other RNA
tggagcgtgacaatggtgttt

SEQ ID NO: 36838 - RNA, 21 nt, Synthetic Construct
  source 1..21: mol_type = other RNA
tggctcagttcagcaggaaca

SEQ ID NO: 36839 - RNA, 21 nt, Synthetic Construct
  source 1..21: mol_type = other RNA
tggctcagttcagcaggaaca

SEQ ID NO: 36840 - RNA, 20 nt, Synthetic Construct
  source 1..20: mol_type = other RNA
tggaatgtaaagaagtatgt

SEQ ID NO: 36841 - RNA, 20 nt, Synthetic Construct
  source 1..20: mol_type = other RNA
tggaatgtaaagaagtatgt

SEQ ID NO: 36842 - RNA, 22 nt, Synthetic Construct
  source 1..22: mol_type = other RNA
tacgtcatcgttgtcatcgtca

SEQ ID NO: 36843 - RNA, 22 nt, Synthetic Construct
  source 1..22: mol_type = other RNA
tacgtcatcgttgtcatcgtca

SEQ ID NO: 36844 - RNA, 34 nt, Synthetic Construct; identical to SEQ ID NO: 6757
  source 1..34: mol_type = other RNA

SEQ ID NO: 36845 - RNA, 23 nt, Synthetic Construct
  source 1..23: mol_type = other RNA
caaagtgctgtttgtgcaggtag

SEQ ID NO: 36846 - RNA, 20 nt, Synthetic Construct
  source 1..20: mol_type = other RNA
tgaggtagaaggttgtgtgg

SEQ ID NO: 36847 - RNA, 20 nt, Synthetic Construct
  source 1..20: mol_type = other RNA
tgaggtagaaggttgtgtgg

SEQ ID NO: 36848 - RNA, 26 nt, Synthetic Construct
  source 1..26: mol_type = other RNA
atgcgagagtaggacgttgccaggtt

SEQ ID NO: 36849 - RNA, 26 nt, Synthetic Construct
  source 1..26: mol_type = other RNA
atgcgagagtaggacgttgccaggtt

SEQ ID NO: 36850 - RNA, 22 nt, Synthetic Construct
  source 1..22: mol_type = other RNA
tagcagcacgtaagtattggcg

SEQ ID NO: 36851 - RNA, 22 nt, Synthetic Construct
  source 1..22: mol_type = other RNA
cagagttctacagtccgacgat

SEQ ID NO: 36852 - RNA, 22 nt, Synthetic Construct
  source 1..22: mol_type = other RNA
cagagttctacagtccgacgat

SEQ ID NO: 36853 - RNA, 16 nt, Synthetic Construct
  source 1..16: mol_type = other RNA
taacaggtctgtgatg

SEQ ID NO: 36854 - RNA, 16 nt, Synthetic Construct
  source 1..16: mol_type = other RNA
taacaggtctgtgatg

SEQ ID NO: 36855 - RNA, 21 nt, Synthetic Construct
  source 1..21: mol_type = other RNA
tgaggtagtaggttatgtggt

SEQ ID NO: 36856 - RNA, 31 nt, Synthetic Construct; identical to SEQ ID NO: 2427
  source 1..31: mol_type = other RNA

SEQ ID NO: 36857 - RNA, 21 nt, Synthetic Construct
  source 1..21: mol_type = other RNA
tggggtgtgacaatggtgttt

SEQ ID NO: 36858 - RNA, 22 nt, Synthetic Construct
  source 1..22: mol_type = other RNA
tgaggtagtaaattgtatagtt

SEQ ID NO: 36859 - RNA, 22 nt, Synthetic Construct
  source 1..22: mol_type = other RNA
tgaggtagtaaattgtatagtt

SEQ ID NO: 36860 - RNA, 22 nt, Synthetic Construct
  source 1..22: mol_type = other RNA
cgaggtagtaggttgtatagtt

SEQ ID NO: 36861 - RNA, 27 nt, Synthetic Construct
  source 1..27: mol_type = other RNA
ccccccactgctagatttgactggctt

SEQ ID NO: 36862 - RNA, 27 nt, Synthetic Construct
  source 1..27: mol_type = other RNA
ccccccactgctagatttgactggctt

SEQ ID NO: 36863 - RNA, 24 nt, Synthetic Construct
  source 1..24: mol_type = other RNA
ggtaaacatccccgactggaagct

SEQ ID NO: 36864 - RNA, 24 nt, Synthetic Construct
  source 1..24: mol_type = other RNA
ggtaaacatccccgactggaagct

SEQ ID NO: 36865 - RNA, 16 nt, Synthetic Construct
  source 1..16: mol_type = other RNA
ccatgccgcgtgcggg

SEQ ID NO: 36866 - RNA, 21 nt, Synthetic Construct
  source 1..21: mol_type = other RNA
tcctgtactgagctaccccga

SEQ ID NO: 36867 - RNA, 21 nt, Synthetic Construct
  source 1..21: mol_type = other RNA
tcctgtactgagctaccccga

SEQ ID NO: 36868 - RNA, 22 nt, Synthetic Construct
  source 1..22: mol_type = other RNA
tgaggtagtaggctgtgtggtt

SEQ ID NO: 36869 - RNA, 23 nt, Synthetic Construct
  source 1..23: mol_type = other RNA
tgaggggcagagagcaagacttt

SEQ ID NO: 36870 - RNA, 23 nt, Synthetic Construct
  source 1..23: mol_type = other RNA
tgaggggcagagagcaagacttt

SEQ ID NO: 36871 - RNA, 23 nt, Synthetic Construct
  source 1..23: mol_type = other RNA
gtcagtttgtcaaataccccatt

SEQ ID NO: 36872 - RNA, 23 nt, Synthetic Construct
  source 1..23: mol_type = other RNA
taccacagggtagaaccacggac

SEQ ID NO: 36873 - RNA, 23 nt, Synthetic Construct
  source 1..23: mol_type = other RNA
taccacagggtagaaccacggac

SEQ ID NO: 36874 - RNA, 22 nt, Synthetic Construct
  source 1..22: mol_type = other RNA
tcctgtactgagctgtcccgag

SEQ ID NO: 36875 - RNA, 25 nt, Synthetic Construct
  source 1..25: mol_type = other RNA
ttgaggatatgagatcgagacgaca

SEQ ID NO: 36876 - RNA, 25 nt, Synthetic Construct
  source 1..25: mol_type = other RNA
ttgaggatatgagatcgagacgaca

SEQ ID NO: 36877 - RNA, 21 nt, Synthetic Construct
  source 1..21: mol_type = other RNA
ttcggaagaaggggtgcctgg

SEQ ID NO: 36878 - RNA, 21 nt, Synthetic Construct
  source 1..21: mol_type = other RNA
ttcggaagaaggggtgcctgg

SEQ ID NO: 36879 - RNA, 17 nt, Synthetic Construct
  source 1..17: mol_type = other RNA
cagtagctcgaggaaaa

SEQ ID NO: 36880 - RNA, 23 nt, Synthetic Construct
  source 1..23: mol_type = other RNA
tgaggtagtgggttgtgtggttt

SEQ ID NO: 36881 - RNA, 21 nt, Synthetic Construct
  source 1..21: mol_type = other RNA
ggaggtagtagtttgtgctgt

SEQ ID NO: 36882 - RNA, 22 nt, Synthetic Construct
  source 1..22: mol_type = other RNA
tagcaccatctgaaatcggtta

SEQ ID NO: 36883 - RNA, 39 nt, Synthetic Construct; identical to SEQ ID NO: 1521
  source 1..39: mol_type = other RNA

SEQ ID NO: 36884 - RNA, 20 nt, Synthetic Construct
  source 1..20: mol_type = other RNA
tgaggtagaaggttgtatag

SEQ ID NO: 36885 - RNA, 20 nt, Synthetic Construct
  source 1..20: mol_type = other RNA
tgaggtagaaggttgtatag

SEQ ID NO: 36886 - RNA, 36 nt, Synthetic Construct; identical to SEQ ID NO: 2660
  source 1..36: mol_type = other RNA

SEQ ID NO: 36887 - RNA, 20 nt, Synthetic Construct
  source 1..20: mol_type = other RNA
tcagtagctcgaggaaaaga

SEQ ID NO: 36888 - RNA, 20 nt, Synthetic Construct
  source 1..20: mol_type = other RNA
tcagtagctcgaggaaaaga

SEQ ID NO: 36889 - RNA, 16 nt, Synthetic Construct
  source 1..16: mol_type = other RNA
gatctgtagctggtct

SEQ ID NO: 36890 - RNA, 21 nt, Synthetic Construct
  source 1..21: mol_type = other RNA
taaggtagtaggttgtatagt

SEQ ID NO: 36891 - RNA, 26 nt, Synthetic Construct
  source 1..26: mol_type = other RNA
agggctgggtcggtcgggctggggcg

SEQ ID NO: 36892 - RNA, 26 nt, Synthetic Construct
  source 1..26: mol_type = other RNA
agggctgggtcggtcgggctggggcg

SEQ ID NO: 36893 - RNA, 35 nt, Synthetic Construct; identical to SEQ ID NO: 2567
  source 1..35: mol_type = other RNA

SEQ ID NO: 36894 - RNA, 22 nt, Synthetic Construct
  source 1..22: mol_type = other RNA
tgtcagtttgtcaaataccccg

SEQ ID NO: 36895 - RNA, 19 nt, Synthetic Construct
  source 1..19: mol_type = other RNA
cgcgcgtcccccgaagagg

SEQ ID NO: 36896 - RNA, 19 nt, Synthetic Construct
  source 1..19: mol_type = other RNA
cgcgcgtcccccgaagagg

SEQ ID NO: 36897 - RNA, 25 nt, Synthetic Construct
  source 1..25: mol_type = other RNA
tgaggggcagagagcgagacttttt

SEQ ID NO: 36898 - RNA, 24 nt, Synthetic Construct
  source 1..24: mol_type = other RNA
tgcggggctagggctaacagcatt

SEQ ID NO: 36899 - RNA, 24 nt, Synthetic Construct
  source 1..24: mol_type = other RNA
tgcggggctagggctaacagcatt

SEQ ID NO: 36900 - RNA, 30 nt, Synthetic Construct; identical to SEQ ID NO: 36424
  source 1..30: mol_type = other RNA

SEQ ID NO: 36901 - RNA, 21 nt, Synthetic Construct
  source 1..21: mol_type = other RNA
ttctgtactgagctgccccga

SEQ ID NO: 36902 - RNA, 21 nt, Synthetic Construct
  source 1..21: mol_type = other RNA
ttctgtactgagctgccccga

SEQ ID NO: 36903 - RNA, 22 nt, Synthetic Construct
  source 1..22: mol_type = other RNA
agggctgggtcggtcgggctgg

SEQ ID NO: 36904 - RNA, 22 nt, Synthetic Construct
  source 1..22: mol_type = other RNA
agggctgggtcggtcgggctgg

SEQ ID NO: 36905 - RNA, 22 nt, Synthetic Construct
  source 1..22: mol_type = other RNA
catcgggaatgtcgtgtccgcc

SEQ ID NO: 36906 - RNA, 22 nt, Synthetic Construct
  source 1..22: mol_type = other RNA
catcgggaatgtcgtgtccgcc

SEQ ID NO: 36907 - RNA, 16 nt, Synthetic Construct
  source 1..16: mol_type = other RNA
tcagtagctcgaggaa

SEQ ID NO: 36908 - RNA, 22 nt, Synthetic Construct
  source 1..22: mol_type = other RNA
ccccccactgctaaatttgact

SEQ ID NO: 36909 - RNA, 22 nt, Synthetic Construct
  source 1..22: mol_type = other RNA
ccccccactgctaaatttgact

SEQ ID NO: 36910 - RNA, 23 nt, Synthetic Construct
  source 1..23: mol_type = other RNA
tcctgtactgagttgccccgaga

SEQ ID NO: 36911 - RNA, 21 nt, Synthetic Construct
  source 1..21: mol_type = other RNA
tggagtgcgacaatggtgttt

SEQ ID NO: 36912 - RNA, 21 nt, Synthetic Construct
  source 1..21: mol_type = other RNA
tggagtgcgacaatggtgttt

SEQ ID NO: 36913 - RNA, 19 nt, Synthetic Construct
  source 1..19: mol_type = other RNA
ccgtgttcggaagattttc

SEQ ID NO: 36914 - RNA, 19 nt, Synthetic Construct
  source 1..19: mol_type = other RNA
ccgtgttcggaagattttc

SEQ ID NO: 36915 - RNA, 20 nt, Synthetic Construct
  source 1..20: mol_type = other RNA
tattgcacattactaagttg

SEQ ID NO: 36916 - RNA, 20 nt, Synthetic Construct
  source 1..20: mol_type = other RNA
tattgcacattactaagttg

SEQ ID NO: 36917 - RNA, 20 nt, Synthetic Construct
  source 1..20: mol_type = other RNA
cacatgcaagtcgaacggta

SEQ ID NO: 36918 - RNA, 20 nt, Synthetic Construct
  source 1..20: mol_type = other RNA
cacatgcaagtcgaacggta

SEQ ID NO: 36919 - RNA, 20 nt, Synthetic Construct
  source 1..20: mol_type = other RNA
tcccgggtttcggcaccatt

SEQ ID NO: 36920 - RNA, 20 nt, Synthetic Construct
  source 1..20: mol_type = other RNA
tcccgggtttcggcaccatt

SEQ ID NO: 36921 - RNA, 23 nt, Synthetic Construct
  source 1..23: mol_type = other RNA
tcctgtactgagctgccccgagc

SEQ ID NO: 36922 - RNA, 22 nt, Synthetic Construct
  source 1..22: mol_type = other RNA
tgaggtagcaggttgtgtggtt

SEQ ID NO: 36923 - RNA, 24 nt, Synthetic Construct
  source 1..24: mol_type = other RNA
ttaatgctaatcgtgataggggtt

SEQ ID NO: 36924 - RNA, 22 nt, Synthetic Construct
  source 1..22: mol_type = other RNA
tagcagcacgtaaaaattggcg

SEQ ID NO: 36925 - RNA, 22 nt, Synthetic Construct
  source 1..22: mol_type = other RNA
tagcagcacgtaaaaattggcg

SEQ ID NO: 36926 - RNA, 21 nt, Synthetic Construct
  source 1..21: mol_type = other RNA
tcctgtactgagctgcaccga

SEQ ID NO: 36927 - RNA, 23 nt, Synthetic Construct
  source 1..23: mol_type = other RNA
tgagaggcagagagcgagacttt

SEQ ID NO: 36928 - RNA, 23 nt, Synthetic Construct
  source 1..23: mol_type = other RNA
tgagaggcagagagcgagacttt

SEQ ID NO: 36929 - RNA, 23 nt, Synthetic Construct
  source 1..23: mol_type = other RNA
ggcagcattgtacagggctatgt

SEQ ID NO: 36930 - RNA, 22 nt, Synthetic Construct
  source 1..22: mol_type = other RNA
tggaatgtaaggaagtatgtat

SEQ ID NO: 36931 - RNA, 22 nt, Synthetic Construct
  source 1..22: mol_type = other RNA
tggaatgtaaggaagtatgtat

SEQ ID NO: 36932 - RNA, 30 nt, Synthetic Construct; identical to SEQ ID NO: 2578
  source 1..30: mol_type = other RNA

SEQ ID NO: 36933 - RNA, 31 nt, Synthetic Construct; identical to SEQ ID NO: 2295
  source 1..31: mol_type = other RNA

SEQ ID NO: 36934 - RNA, 31 nt, Synthetic Construct; identical to SEQ ID NO: 2295
  source 1..31: mol_type = other RNA

SEQ ID NO: 36935 - RNA, 20 nt, Synthetic Construct
  source 1..20: mol_type = other RNA
tgaggtagtaggtcgtatag

SEQ ID NO: 36936 - RNA, 20 nt, Synthetic Construct
  source 1..20: mol_type = other RNA
tgaggtagtaggtcgtatag

SEQ ID NO: 36937 - RNA, 22 nt, Synthetic Construct
  source 1..22: mol_type = other RNA
tggagtgtgacaatggtgcttg

SEQ ID NO: 36938 - RNA, 22 nt, Synthetic Construct
  source 1..22: mol_type = other RNA
tggagtgtgacaatggtgcttg

SEQ ID NO: 36939 - RNA, 16 nt, Synthetic Construct
  source 1..16: mol_type = other RNA
ggcgggagtaactatg

SEQ ID NO: 36940 - RNA, 16 nt, Synthetic Construct
  source 1..16: mol_type = other RNA
ggcgggagtaactatg

SEQ ID NO: 36941 - RNA, 20 nt, Synthetic Construct
  source 1..20: mol_type = other RNA
agcagcattgtacagggcta

SEQ ID NO: 36942 - RNA, 20 nt, Synthetic Construct
  source 1..20: mol_type = other RNA
agcagcattgtacagggcta

SEQ ID NO: 36943 - RNA, 43 nt, Synthetic Construct; identical to SEQ ID NO: 6535
  source 1..43: mol_type = other RNA

SEQ ID NO: 36944 - RNA, 43 nt, Synthetic Construct; identical to SEQ ID NO: 6535
  source 1..43: mol_type = other RNA

SEQ ID NO: 36945 - RNA, 22 nt, Synthetic Construct
  source 1..22: mol_type = other RNA
ttgtacatggtaggctttcatt

SEQ ID NO: 36946 - RNA, 23 nt, Synthetic Construct
  source 1..23: mol_type = other RNA
taaggggcagagagcgagacttt

SEQ ID NO: 36947 - RNA, 16 nt, Synthetic Construct
  source 1..16: mol_type = other RNA
gaaaaagtcatggagg

SEQ ID NO: 36948 - RNA, 22 nt, Synthetic Construct
  source 1..22: mol_type = other RNA
tgaggtagtgggttgtgtggtt

SEQ ID NO: 36949 - RNA, 23 nt, Synthetic Construct
  source 1..23: mol_type = other RNA
caaagagctgttcgtgcaggtag

SEQ ID NO: 36950 - RNA, 23 nt, Synthetic Construct
  source 1..23: mol_type = other RNA
caaagagctgttcgtgcaggtag

SEQ ID NO: 36951 - RNA, 23 nt, Synthetic Construct
  source 1..23: mol_type = other RNA
tgtcagtttgtcaaatacaccaa

SEQ ID NO: 36952 - RNA, 23 nt, Synthetic Construct
  source 1..23: mol_type = other RNA
tgtcagtttgtcaaatacaccaa

SEQ ID NO: 36953 - RNA, 25 nt, Synthetic Construct
  source 1..25: mol_type = other RNA
tcgggcctggttagtacttggatgg

SEQ ID NO: 36954 - RNA, 23 nt, Synthetic Construct
  source 1..23: mol_type = other RNA
tcctgcactgagctgccccgagt

SEQ ID NO: 36955 - RNA, 21 nt, Synthetic Construct
  source 1..21: mol_type = other RNA
tacctggttgatcctgccagt

SEQ ID NO: 36956 - RNA, 21 nt, Synthetic Construct
  source 1..21: mol_type = other RNA
tacctggttgatcctgccagt

SEQ ID NO: 36957 - RNA, 23 nt, Synthetic Construct
  source 1..23: mol_type = other RNA
tggtaatacgacgtacatagtgt

SEQ ID NO: 36958 - RNA, 16 nt, Synthetic Construct
  source 1..16: mol_type = other RNA
ttgaccgctctgacca

SEQ ID NO: 36959 - RNA, 19 nt, Synthetic Construct
  source 1..19: mol_type = other RNA
gcgaaattccttgtcgggt

SEQ ID NO: 36960 - RNA, 19 nt, Synthetic Construct
  source 1..19: mol_type = other RNA
gcgaaattccttgtcgggt

SEQ ID NO: 36961 - RNA, 15 nt, Synthetic Construct
  source 1..15: mol_type = other RNA
cctcgcgcgattgga

SEQ ID NO: 36962 - RNA, 22 nt, Synthetic Construct
  source 1..22: mol_type = other RNA
ngaggtagtaggttgtgtggtt

SEQ ID NO: 36963 - RNA, 25 nt, Synthetic Construct
  source 1..25: mol_type = other RNA
ctgaggatatgagatcgagacgaca

SEQ ID NO: 36964 - RNA, 22 nt, Synthetic Construct
  source 1..22: mol_type = other RNA
tgagatagtagtttgtgctgtt

SEQ ID NO: 36965 - RNA, 22 nt, Synthetic Construct
  source 1..22: mol_type = other RNA
agagttctacagtccgacgatc

SEQ ID NO: 36966 - RNA, 22 nt, Synthetic Construct
  source 1..22: mol_type = other RNA
agagttctacagtccgacgatc

SEQ ID NO: 36967 - RNA, 20 nt, Synthetic Construct
  source 1..20: mol_type = other RNA
ctctaatgagactgccggtg

SEQ ID NO: 36968 - RNA, 20 nt, Synthetic Construct
  source 1..20: mol_type = other RNA
ctctaatgagactgccggtg

SEQ ID NO: 36969 - RNA, 21 nt, Synthetic Construct
  source 1..21: mol_type = other RNA
tgaggtagtaggtcgtatagt

SEQ ID NO: 36970 - RNA, 21 nt, Synthetic Construct
  source 1..21: mol_type = other RNA
tgaggtagtaggtcgtatagt

SEQ ID NO: 36971 - RNA, 16 nt, Synthetic Construct
  source 1..16: mol_type = other RNA
caggacggtggccatg

SEQ ID NO: 36972 - RNA, 16 nt, Synthetic Construct
  source 1..16: mol_type = other RNA
caggacggtggccatg

SEQ ID NO: 36973 - RNA, 22 nt, Synthetic Construct
  source 1..22: mol_type = other RNA
aggggcagagagcgagactttt

SEQ ID NO: 36974 - RNA, 22 nt, Synthetic Construct
  source 1..22: mol_type = other RNA
aggggcagagagcgagactttt

SEQ ID NO: 36975 - RNA, 23 nt, Synthetic Construct
  source 1..23: mol_type = other RNA
tcctgtacagagctgccccgaga

SEQ ID NO: 36976 - RNA, 23 nt, Synthetic Construct
  source 1..23: mol_type = other RNA
tcctgtacagagctgccccgaga

SEQ ID NO: 36977 - RNA, 27 nt, Synthetic Construct
  source 1..27: mol_type = other RNA
gcatgggtggttcagtggtagaattct

SEQ ID NO: 36978 - RNA, 27 nt, Synthetic Construct
  source 1..27: mol_type = other RNA
gcatgggtggttcagtggtagaattct

SEQ ID NO: 36979 - RNA, 22 nt, Synthetic Construct
  source 1..22: mol_type = other RNA
tagcaacacgtaaatattggcg

SEQ ID NO: 36980 - RNA, 22 nt, Synthetic Construct
  source 1..22: mol_type = other RNA
tagcaacacgtaaatattggcg

SEQ ID NO: 36981 - RNA, 20 nt, Synthetic Construct
  source 1..20: mol_type = other RNA
tagaattctcgcctgccacg

SEQ ID NO: 36982 - RNA, 20 nt, Synthetic Construct
  source 1..20: mol_type = other RNA
tagaattctcgcctgccacg

SEQ ID NO: 36983 - RNA, 16 nt, Synthetic Construct
  source 1..16: mol_type = other RNA
caggacggtggccatg

SEQ ID NO: 36984 - RNA, 22 nt, Synthetic Construct
  source 1..22: mol_type = other RNA
tgaggtagtagcttgtgctgtt

SEQ ID NO: 36985 - RNA, 22 nt, Synthetic Construct
  source 1..22: mol_type = other RNA
tgaggtagtagcttgtgctgtt

SEQ ID NO: 36986 - RNA, 21 nt, Synthetic Construct
  source 1..21: mol_type = other RNA
tggctcagttcagcaggaaca

SEQ ID NO: 36987 - RNA, 19 nt, Synthetic Construct
  source 1..19: mol_type = other RNA
tccccggcatctccaccat

SEQ ID NO: 36988 - RNA, 19 nt, Synthetic Construct
  source 1..19: mol_type = other RNA
tccccggcatctccaccat

SEQ ID NO: 36989 - RNA, 21 nt, Synthetic Construct
  source 1..21: mol_type = other RNA
tgaggtagtagtttgtgccgt

SEQ ID NO: 36990 - RNA, 21 nt, Synthetic Construct
  source 1..21: mol_type = other RNA
tgaggtagtagtttgtgccgt

SEQ ID NO: 36991 - RNA, 21 nt, Synthetic Construct
  source 1..21: mol_type = other RNA
tggagtgtgacaatggcgttt

SEQ ID NO: 36992 - RNA, 21 nt, Synthetic Construct
  source 1..21: mol_type = other RNA
tggagtgtgacaatggcgttt

SEQ ID NO: 36993 - RNA, 23 nt, Synthetic Construct
  source 1..23: mol_type = other RNA
taacagtctacagccatggtcgt

SEQ ID NO: 36994 - RNA, 22 nt, Synthetic Construct
  source 1..22: mol_type = other RNA
tggagtgtgacaatggtgcttg

SEQ ID NO: 36995 - RNA, 25 nt, Synthetic Construct
  source 1..25: mol_type = other RNA
tcggatccgtctgagcttggctttt

SEQ ID NO: 36996 - RNA, 25 nt, Synthetic Construct
  source 1..25: mol_type = other RNA
tcggatccgtctgagcttggctttt

SEQ ID NO: 36997 - RNA, 20 nt, Synthetic Construct
  source 1..20: mol_type = other RNA
tgaggtagtaggttgtataa

SEQ ID NO: 36998 - RNA, 20 nt, Synthetic Construct
  source 1..20: mol_type = other RNA
tgaggtagtaggttgtataa

SEQ ID NO: 36999 - RNA, 22 nt, Synthetic Construct
  source 1..22: mol_type = other RNA
tagcagcacgtaaatattagcg

SEQ ID NO: 37000 - RNA, 22 nt, Synthetic Construct
  source 1..22: mol_type = other RNA
tagcagcacgtaaatattagcg

SEQ ID NO: 37001 - RNA, 21 nt, Synthetic Construct
  source 1..21: mol_type = other RNA
tgaagtagtaggttgtgtggt

SEQ ID NO: 37002 - RNA, 21 nt, Synthetic Construct
  source 1..21: mol_type = other RNA
tgaagtagtaggttgtgtggt

SEQ ID NO: 37003 - RNA, 22 nt, Synthetic Construct
  source 1..22: mol_type = other RNA
atcgggaatgtcgtgtccgccc

SEQ ID NO: 37004 - RNA, 22 nt, Synthetic Construct
  source 1..22: mol_type = other RNA
catcgcacttgtctcggtctga

SEQ ID NO: 37005 - RNA, 22 nt, Synthetic Construct
  source 1..22: mol_type = other RNA
catcgcacttgtctcggtctga

SEQ ID NO: 37006 - RNA, 22 nt, Synthetic Construct
  source 1..22: mol_type = other RNA
tgaggtagtaggttgtatagct

SEQ ID NO: 37007 - RNA, 22 nt, Synthetic Construct
  source 1..22: mol_type = other RNA
tgaggtagtaggttgtatagct

SEQ ID NO: 37008 - RNA, 16 nt, Synthetic Construct
  source 1..16: mol_type = other RNA
gcgtagatatgcggag

SEQ ID NO: 37009 - RNA, 22 nt, Synthetic Construct
  source 1..22: mol_type = other RNA
tgaggtggtagtttgtgctgtt

SEQ ID NO: 37010 - RNA, 22 nt, Synthetic Construct
  source 1..22: mol_type = other RNA
tgaggtggtagtttgtgctgtt

SEQ ID NO: 37011 - RNA, 22 nt, Synthetic Construct
  source 1..22: mol_type = other RNA
tagcagcacataaatattggcg

SEQ ID NO: 37012 - RNA, 22 nt, Synthetic Construct
  source 1..22: mol_type = other RNA
tgtggtagtagtttgtgctgtt

SEQ ID NO: 37013 - RNA, 22 nt, Synthetic Construct
  source 1..22: mol_type = other RNA
tgaggtagcaggttgtatagtt

SEQ ID NO: 37014 - RNA, 22 nt, Synthetic Construct
  source 1..22: mol_type = other RNA
tgaggtagcaggttgtatagtt

SEQ ID NO: 37015 - RNA, 22 nt, Synthetic Construct
  source 1..22: mol_type = other RNA
ttcacagtggctaagttctgca

SEQ ID NO: 37016 - RNA, 20 nt, Synthetic Construct
  source 1..20: mol_type = other RNA
tgtaaacatccttgactgga

SEQ ID NO: 37017 - RNA, 20 nt, Synthetic Construct
  source 1..20: mol_type = other RNA
tgtaaacatccttgactgga

SEQ ID NO: 37018 - RNA, 27 nt, Synthetic Construct
  source 1..27: mol_type = other RNA
ccccccaccgctaaatttgactggctt

SEQ ID NO: 37019 - RNA, 21 nt, Synthetic Construct
  source 1..21: mol_type = other RNA
tcctgaactgagctgccccga

SEQ ID NO: 37020 - RNA, 17 nt, Synthetic Construct
  source 1..17: mol_type = other RNA
ccccggcatctccacca

SEQ ID NO: 37021 - RNA, 17 nt, Synthetic Construct
  source 1..17: mol_type = other RNA
ccccggcatctccacca

SEQ ID NO: 37022 - RNA, 21 nt, Synthetic Construct
  source 1..21: mol_type = other RNA
atcacattgccagggatttcc

SEQ ID NO: 37023 - RNA, 29 nt, Synthetic Construct
  source 1..29: mol_type = other RNA
cgactcttagcggtggatcactcggctcg

SEQ ID NO: 37024 - RNA, 29 nt, Synthetic Construct
  source 1..29: mol_type = other RNA
cgactcttagcggtggatcactcggctcg

SEQ ID NO: 37025 - RNA, 22 nt, Synthetic Construct
  source 1..22: mol_type = other RNA
tgaggaagtagtttgtgctgtt

SEQ ID NO: 37026 - RNA, 22 nt, Synthetic Construct
  source 1..22: mol_type = other RNA
tgaggaagtagtttgtgctgtt

SEQ ID NO: 37027 - RNA, 23 nt, Synthetic Construct
  source 1..23: mol_type = other RNA
tgaggtagtaggttgtgtggttg

SEQ ID NO: 37028 - RNA, 20 nt, Synthetic Construct
  source 1..20: mol_type = other RNA
tgaggtagtaggctgtgtgg

SEQ ID NO: 37029 - RNA, 17 nt, Synthetic Construct
  source 1..17: mol_type = other RNA
tgccagcagccgcggta

SEQ ID NO: 37030 - RNA, 17 nt, Synthetic Construct
  source 1..17: mol_type = other RNA
tgccagcagccgcggta

SEQ ID NO: 37031 - RNA, 20 nt, Synthetic Construct
  source 1..20: mol_type = other RNA
cccttggggttgtaggacca

SEQ ID NO: 37032 - RNA, 20 nt, Synthetic Construct
  source 1..20: mol_type = other RNA
cccttggggttgtaggacca

SEQ ID NO: 37033 - RNA, 35 nt, Synthetic Construct; identical to SEQ ID NO: 1490
  source 1..35: mol_type = other RNA

SEQ ID NO: 37034 - RNA, 21 nt, Synthetic Construct
  source 1..21: mol_type = other RNA
tggagtgtgacaatggcgttt

SEQ ID NO: 37035 - RNA, 22 nt, Synthetic Construct
  source 1..22: mol_type = other RNA
tagcttatcagactgatgttga

SEQ ID NO: 37036 - RNA, 18 nt, Synthetic Construct
  source 1..18: mol_type = other RNA
ggtgcaagcgttaatcgg

SEQ ID NO: 37037 - RNA, 24 nt, Synthetic Construct
  source 1..24: mol_type = other RNA
tgtaaacatccccgaccggaagct

SEQ ID NO: 37038 - RNA, 33 nt, Synthetic Construct; identical to SEQ ID NO: 2638
  source 1..33: mol_type = other RNA

SEQ ID NO: 37039 - RNA, 22 nt, Synthetic Construct
  source 1..22: mol_type = other RNA
tcgtaccgtgagtaataatgcg

SEQ ID NO: 37040 - RNA, 22 nt, Synthetic Construct
  source 1..22: mol_type = other RNA
tgaggtagtaggtcgtatagtt

SEQ ID NO: 37041 - RNA, 21 nt, Synthetic Construct
  source 1..21: mol_type = other RNA
taacactgtctggtaaagatg

SEQ ID NO: 37042 - RNA, 16 nt, Synthetic Construct
  source 1..16: mol_type = other RNA
gcaagaggtcagcggt

SEQ ID NO: 37043 - RNA, 16 nt, Synthetic Construct
  source 1..16: mol_type = other RNA
gcaagaggtcagcggt

SEQ ID NO: 37044 - RNA, 21 nt, Synthetic Construct
  source 1..21: mol_type = other RNA
tgaggtagcagattgtatagt

SEQ ID NO: 37045 - RNA, 20 nt, Synthetic Construct
  source 1..20: mol_type = other RNA
tgaggtagtaggttatgtgg

SEQ ID NO: 37046 - RNA, 20 nt, Synthetic Construct
  source 1..20: mol_type = other RNA
tgaggtagtaggttatgtgg

SEQ ID NO: 37047 - RNA, 22 nt, Synthetic Construct
  source 1..22: mol_type = other RNA
tgaggtagtaggttgcgtggtt

SEQ ID NO: 37048 - RNA, 20 nt, Synthetic Construct
  source 1..20: mol_type = other RNA
cccataaagtagaaagcact

SEQ ID NO: 37049 - RNA, 22 nt, Synthetic Construct
  source 1..22: mol_type = other RNA
tattgcacatgtcccggcctgt

SEQ ID NO: 37050 - RNA, 32 nt, Synthetic Construct; identical to SEQ ID NO: 734
  source 1..32: mol_type = other RNA

SEQ ID NO: 37051 - RNA, 23 nt, Synthetic Construct
  source 1..23: mol_type = other RNA
tacagtagtctgcacattggtta

SEQ ID NO: 37052 - RNA, 21 nt, Synthetic Construct
  source 1..21: mol_type = other RNA
taactccttaagcgaatctcg

SEQ ID NO: 37053 - RNA, 17 nt, Synthetic Construct
  source 1..17: mol_type = other RNA
gtgttcggaagattttc

SEQ ID NO: 37054 - RNA, 17 nt, Synthetic Construct
  source 1..17: mol_type = other RNA
gtgttcggaagattttc

SEQ ID NO: 37055 - RNA, 26 nt, Synthetic Construct
  source 1..26: mol_type = other RNA
tgtccccgcgaggggcccggggcggg

SEQ ID NO: 37056 - RNA, 26 nt, Synthetic Construct
  source 1..26: mol_type = other RNA
tgtccccgcgaggggcccggggcggg

SEQ ID NO: 37057 - RNA, 21 nt, Synthetic Construct
  source 1..21: mol_type = other RNA
tggagtgcgacaatggtgttt

SEQ ID NO: 37058 - RNA, 26 nt, Synthetic Construct
  source 1..26: mol_type = other RNA
tgtaaacatccttgactggaagcttt

SEQ ID NO: 37059 - RNA, 26 nt, Synthetic Construct
  source 1..26: mol_type = other RNA
tgtaaacatccttgactggaagcttt

SEQ ID NO: 37060 - RNA, 22 nt, Synthetic Construct
  source 1..22: mol_type = other RNA
tggggtagtaggttgtatagtt

SEQ ID NO: 37061 - RNA, 22 nt, Synthetic Construct
  source 1..22: mol_type = other RNA
tggggtagtaggttgtatagtt

SEQ ID NO: 37062 - RNA, 21 nt, Synthetic Construct
  source 1..21: mol_type = other RNA
tgaggtagtaggttgtataga

SEQ ID NO: 37063 - RNA, 21 nt, Synthetic Construct
  source 1..21: mol_type = other RNA
tgaggtagtaggttgtataga

SEQ ID NO: 37064 - RNA, 20 nt, Synthetic Construct
  source 1..20: mol_type = other RNA
acctgtactgagctgccccg

SEQ ID NO: 37065 - RNA, 20 nt, Synthetic Construct
  source 1..20: mol_type = other RNA
acctgtactgagctgccccg

SEQ ID NO: 37066 - RNA, 22 nt, Synthetic Construct
  source 1..22: mol_type = other RNA
taaggtagtaggttgtgtggtt

SEQ ID NO: 37067 - RNA, 22 nt, Synthetic Construct
  source 1..22: mol_type = other RNA
taaggtagtaggttgtgtggtt

SEQ ID NO: 37068 - RNA, 15 nt, Synthetic Construct
  source 1..15: mol_type = other RNA
cgatatggcatgaga

SEQ ID NO: 37069 - RNA, 21 nt, Synthetic Construct
  source 1..21: mol_type = other RNA
tgagatagtaggttgtgtggt

SEQ ID NO: 37070 - RNA, 21 nt, Synthetic Construct
  source 1..21: mol_type = other RNA
tgagatagtaggttgtgtggt

SEQ ID NO: 37071 - RNA, 23 nt, Synthetic Construct
  source 1..23: mol_type = other RNA
tgaggtagtaggttgtgtggttg

SEQ ID NO: 37072 - RNA, 23 nt, Synthetic Construct
  source 1..23: mol_type = other RNA
tgaggtagtaggttgtgtggttg

SEQ ID NO: 37073 - RNA, 21 nt, Synthetic Construct
  source 1..21: mol_type = other RNA
taactccttaacgaatctcgc

SEQ ID NO: 37074 - RNA, 27 nt, Synthetic Construct
  source 1..27: mol_type = other RNA
ccccccactgctaaatttgacaggctt

SEQ ID NO: 37075 - RNA, 39 nt, Synthetic Construct; identical to SEQ ID NO: 759
  source 1..39: mol_type = other RNA

SEQ ID NO: 37076 - RNA, 39 nt, Synthetic Construct; identical to SEQ ID NO: 759
  source 1..39: mol_type = other RNA

SEQ ID NO: 37077 - RNA, 18 nt, Synthetic Construct
  source 1..18: mol_type = other RNA
cgaggatccattggaggg

SEQ ID NO: 37078 - RNA, 18 nt, Synthetic Construct
  source 1..18: mol_type = other RNA
cgaggatccattggaggg

SEQ ID NO: 37079 - RNA, 22 nt, Synthetic Construct
  source 1..22: mol_type = other RNA
tgaggtagtagattgtatagta

SEQ ID NO: 37080 - RNA, 24 nt, Synthetic Construct
  source 1..24: mol_type = other RNA
atcacattgccagggatttccaat

SEQ ID NO: 37081 - RNA, 21 nt, Synthetic Construct
  source 1..21: mol_type = other RNA
cggagtgtgacaatggtgttt

SEQ ID NO: 37082 - RNA, 21 nt, Synthetic Construct
  source 1..21: mol_type = other RNA
cggagtgtgacaatggtgttt

SEQ ID NO: 37083 - RNA, 24 nt, Synthetic Construct
  source 1..24: mol_type = other RNA
gaaagattaaggcaagaggttagc

SEQ ID NO: 37084 - RNA, 24 nt, Synthetic Construct
  source 1..24: mol_type = other RNA
gaaagattaaggcaagaggttagc

SEQ ID NO: 37085 - RNA, 22 nt, Synthetic Construct
  source 1..22: mol_type = other RNA
ggaggtagtaggttgtgtggtt

SEQ ID NO: 37086 - RNA, 22 nt, Synthetic Construct
  source 1..22: mol_type = other RNA
ggaggtagtaggttgtgtggtt

SEQ ID NO: 37087 - RNA, 16 nt, Synthetic Construct
  source 1..16: mol_type = other RNA
gtccacggccatacca

SEQ ID NO: 37088 - RNA, 16 nt, Synthetic Construct
  source 1..16: mol_type = other RNA
gtccacggccatacca

SEQ ID NO: 37089 - RNA, 22 nt, Synthetic Construct
  source 1..22: mol_type = other RNA
tatcggaacgtgcccagtcgtg

SEQ ID NO: 37090 - RNA, 21 nt, Synthetic Construct
  source 1..21: mol_type = other RNA
cgcgacctcagatcagacgtg

SEQ ID NO: 37091 - RNA, 22 nt, Synthetic Construct
  source 1..22: mol_type = other RNA
tactgcacttgtcccggcctgt

SEQ ID NO: 37092 - RNA, 21 nt, Synthetic Construct
  source 1..21: mol_type = other RNA
taactccttaagcgaatccgc

SEQ ID NO: 37093 - RNA, 21 nt, Synthetic Construct
  source 1..21: mol_type = other RNA
taactccttaagcgaatccgc

SEQ ID NO: 37094 - RNA, 25 nt, Synthetic Construct
  source 1..25: mol_type = other RNA
aatgacacgatcactcccgttgaga

SEQ ID NO: 37095 - RNA, 25 nt, Synthetic Construct
  source 1..25: mol_type = other RNA
aatgacacgatcactcccgttgaga

SEQ ID NO: 37096 - RNA, 23 nt, Synthetic Construct
  source 1..23: mol_type = other RNA
tgaggtagtaggttgtgtggttg

SEQ ID NO: 37097 - RNA, 23 nt, Synthetic Construct
  source 1..23: mol_type = other RNA
tgaggggcagagagcgagacctt

SEQ ID NO: 37098 - RNA, 22 nt, Synthetic Construct
  source 1..22: mol_type = other RNA
tgaggaagtaggttgtatagtt

SEQ ID NO: 37099 - RNA, 22 nt, Synthetic Construct
  source 1..22: mol_type = other RNA
tgaggaagtaggttgtatagtt

SEQ ID NO: 37100 - RNA, 23 nt, Synthetic Construct
  source 1..23: mol_type = other RNA
tgcggggctagggctaacagcat

SEQ ID NO: 37101 - RNA, 23 nt, Synthetic Construct
  source 1..23: mol_type = other RNA
tgcggggctagggctaacagcat

SEQ ID NO: 37102 - RNA, 16 nt, Synthetic Construct
  source 1..16: mol_type = other RNA
cccctggacctgtact

SEQ ID NO: 37103 - RNA, 24 nt, Synthetic Construct
  source 1..24: mol_type = other RNA
acctggcatacaatgtagatttct

SEQ ID NO: 37104 - RNA, 24 nt, Synthetic Construct
  source 1..24: mol_type = other RNA
acctggcatacaatgtagatttct

SEQ ID NO: 37105 - RNA, 24 nt, Synthetic Construct
  source 1..24: mol_type = other RNA
tcttggagtaggtcattgggtggt

SEQ ID NO: 37106 - RNA, 25 nt, Synthetic Construct
  source 1..25: mol_type = other RNA
ttgaggatatgagatcgagacggca

SEQ ID NO: 37107 - RNA, 18 nt, Synthetic Construct
  source 1..18: mol_type = other RNA
gctgtgatggccgagtgg

SEQ ID NO: 37108 - RNA, 25 nt, Synthetic Construct
  source 1..25: mol_type = other RNA
ttgaggatatgagatcgagacgaca

SEQ ID NO: 37109 - RNA, 25 nt, Synthetic Construct
  source 1..25: mol_type = other RNA
ttgaggatatgagatcgagacgaca

SEQ ID NO: 37110 - RNA, 23 nt, Synthetic Construct
  source 1..23: mol_type = other RNA
tgaggtagtaggttgcgtggttt

SEQ ID NO: 37111 - RNA, 23 nt, Synthetic Construct
  source 1..23: mol_type = other RNA
caacggaatcccaaaagcggctg

SEQ ID NO: 37112 - RNA, 36 nt, Synthetic Construct; identical to SEQ ID NO: 3596
  source 1..36: mol_type = other RNA

SEQ ID NO: 37113 - RNA, 36 nt, Synthetic Construct; identical to SEQ ID NO: 3596
  source 1..36: mol_type = other RNA

SEQ ID NO: 37114 - RNA, 16 nt, Synthetic Construct
  source 1..16: mol_type = other RNA
cccctggacctgtact

SEQ ID NO: 37115 - RNA, 16 nt, Synthetic Construct
  source 1..16: mol_type = other RNA
cccctggacctgtact

SEQ ID NO: 37116 - RNA, 22 nt, Synthetic Construct
  source 1..22: mol_type = other RNA
tattgcacttatcccggcctgt

SEQ ID NO: 37117 - RNA, 22 nt, Synthetic Construct
  source 1..22: mol_type = other RNA
tattgcacttatcccggcctgt

SEQ ID NO: 37118 - RNA, 23 nt, Synthetic Construct
  source 1..23: mol_type = other RNA
caaagtgctgtttgtgcaggtag

SEQ ID NO: 37119 - RNA, 23 nt, Synthetic Construct
  source 1..23: mol_type = other RNA
caaagtgctgtttgtgcaggtag

SEQ ID NO: 37120 - RNA, 16 nt, Synthetic Construct
  source 1..16: mol_type = other RNA
gtctacggccatacta

SEQ ID NO: 37121 - RNA, 22 nt, Synthetic Construct
  source 1..22: mol_type = other RNA
tgaggtagtagattgtatagtc

SEQ ID NO: 37122 - RNA, 22 nt, Synthetic Construct
  source 1..22: mol_type = other RNA
tgaggtagtaggttgtgtggtg

SEQ ID NO: 37123 - RNA, 44 nt, Synthetic Construct; identical to SEQ ID NO: 6685
  source 1..44: mol_type = other RNA

SEQ ID NO: 37124 - RNA, 44 nt, Synthetic Construct; identical to SEQ ID NO: 6685
  source 1..44: mol_type = other RNA

SEQ ID NO: 37125 - RNA, 21 nt, Synthetic Construct
  source 1..21: mol_type = other RNA
tggggggcagagagcgagact

SEQ ID NO: 37126 - RNA, 21 nt, Synthetic Construct
  source 1..21: mol_type = other RNA
tggggggcagagagcgagact

SEQ ID NO: 37127 - RNA, 27 nt, Synthetic Construct
  source 1..27: mol_type = other RNA
ccccccactgccaaatttgactggctt

SEQ ID NO: 37128 - RNA, 21 nt, Synthetic Construct
  source 1..21: mol_type = other RNA
cgcatcccctagggcattggt

SEQ ID NO: 37129 - RNA, 21 nt, Synthetic Construct
  source 1..21: mol_type = other RNA
cgcatcccctagggcattggt

SEQ ID NO: 37130 - RNA, 22 nt, Synthetic Construct
  source 1..22: mol_type = other RNA
acctgtactgagctgccccgag

SEQ ID NO: 37131 - RNA, 22 nt, Synthetic Construct
  source 1..22: mol_type = other RNA
acctgtactgagctgccccgag

SEQ ID NO: 37132 - RNA, 25 nt, Synthetic Construct
  source 1..25: mol_type = other RNA
ggtaaaatggctgagtgaagcattg

SEQ ID NO: 37133 - RNA, 25 nt, Synthetic Construct
  source 1..25: mol_type = other RNA
ggtaaaatggctgagtgaagcattg

SEQ ID NO: 37134 - RNA, 22 nt, Synthetic Construct
  source 1..22: mol_type = other RNA
tacaagtaattcaggataggtt

SEQ ID NO: 37135 - RNA, 22 nt, Synthetic Construct
  source 1..22: mol_type = other RNA
tacaagtaattcaggataggtt

SEQ ID NO: 37136 - RNA, 22 nt, Synthetic Construct
  source 1..22: mol_type = other RNA
tgagaactgaattccatgggtc

SEQ ID NO: 37137 - RNA, 20 nt, Synthetic Construct
  source 1..20: mol_type = other RNA
tatgtctgctgaccatcacc

SEQ ID NO: 37138 - RNA, 22 nt, Synthetic Construct
  source 1..22: mol_type = other RNA
tgaggtagaagattgtatagtt

SEQ ID NO: 37139 - RNA, 22 nt, Synthetic Construct
  source 1..22: mol_type = other RNA
tgaggtagaagattgtatagtt

SEQ ID NO: 37140 - RNA, 25 nt, Synthetic Construct
  source 1..25: mol_type = other RNA
gtgaggatatgagatcgagacgaca

SEQ ID NO: 37141 - RNA, 24 nt, Synthetic Construct
  source 1..24: mol_type = other RNA
tgaggtagtaggttgtgtggttaa

SEQ ID NO: 37142 - RNA, 24 nt, Synthetic Construct
  source 1..24: mol_type = other RNA
tgaggtagtaggttgtgtggttaa

SEQ ID NO: 37143 - RNA, 28 nt, Synthetic Construct
  source 1..28: mol_type = other RNA
ccccccgctgctaaatttgactggcttt

SEQ ID NO: 37144 - RNA, 28 nt, Synthetic Construct
  source 1..28: mol_type = other RNA
ccccccgctgctaaatttgactggcttt

SEQ ID NO: 37145 - RNA, 22 nt, Synthetic Construct
  source 1..22: mol_type = other RNA
tagcagcacgtaaatattggtg

SEQ ID NO: 37146 - RNA, 22 nt, Synthetic Construct
  source 1..22: mol_type = other RNA
tagcagcacgtaaatattggtg

SEQ ID NO: 37147 - RNA, 27 nt, Synthetic Construct
  source 1..27: mol_type = other RNA
ncccccactgctaaatttgactggctt

SEQ ID NO: 37148 - RNA, 19 nt, Synthetic Construct
  source 1..19: mol_type = other RNA
tgcggggctagggctaaca

SEQ ID NO: 37149 - RNA, 19 nt, Synthetic Construct
  source 1..19: mol_type = other RNA
tgcggggctagggctaaca

SEQ ID NO: 37150 - RNA, 22 nt, Synthetic Construct
  source 1..22: mol_type = other RNA
tattgcacttgacccggcctgt

SEQ ID NO: 37151 - RNA, 22 nt, Synthetic Construct
  source 1..22: mol_type = other RNA
tattgcacttgacccggcctgt

SEQ ID NO: 37152 - RNA, 22 nt, Synthetic Construct
  source 1..22: mol_type = other RNA
aatggcgccactagggttgtgt

SEQ ID NO: 37153 - RNA, 22 nt, Synthetic Construct
  source 1..22: mol_type = other RNA
tattgcaattgtcccggcctgt

SEQ ID NO: 37154 - RNA, 22 nt, Synthetic Construct
  source 1..22: mol_type = other RNA
tattgcaattgtcccggcctgt

SEQ ID NO: 37155 - RNA, 19 nt, Synthetic Construct
  source 1..19: mol_type = other RNA
catggccgttcttagttgg

SEQ ID NO: 37156 - RNA, 22 nt, Synthetic Construct
  source 1..22: mol_type = other RNA
tagcancacgtaaatattggcg

SEQ ID NO: 37157 - RNA, 22 nt, Synthetic Construct
  source 1..22: mol_type = other RNA
atcacattgccagggatttcca

SEQ ID NO: 37158 - RNA, 35 nt, Synthetic Construct; identical to SEQ ID NO: 737
  source 1..35: mol_type = other RNA

SEQ ID NO: 37159 - RNA, 35 nt, Synthetic Construct; identical to SEQ ID NO: 737
  source 1..35: mol_type = other RNA

SEQ ID NO: 37160 - RNA, 22 nt, Synthetic Construct
  source 1..22: mol_type = other RNA
tggggtagtagtttgtgctgtt

SEQ ID NO: 37161 - RNA, 22 nt, Synthetic Construct
  source 1..22: mol_type = other RNA
tggggtagtagtttgtgctgtt

SEQ ID NO: 37162 - RNA, 22 nt, Synthetic Construct
  source 1..22: mol_type = other RNA
cgcgacctcagatcagacgtgg

SEQ ID NO: 37163 - RNA, 21 nt, Synthetic Construct
  source 1..21: mol_type = other RNA
ttctgtactgagctgccccga

SEQ ID NO: 37164 - RNA, 21 nt, Synthetic Construct
  source 1..21: mol_type = other RNA
ttctgtactgagctgccccga

SEQ ID NO: 37165 - RNA, 27 nt, Synthetic Construct
  source 1..27: mol_type = other RNA
cgactcttagcggtggatcactcggct

SEQ ID NO: 37166 - RNA, 27 nt, Synthetic Construct
  source 1..27: mol_type = other RNA
cgactcttagcggtggatcactcggct

SEQ ID NO: 37167 - RNA, 22 nt, Synthetic Construct
  source 1..22: mol_type = other RNA
tcgtaccgtgagtaacaatgcg

SEQ ID NO: 37168 - RNA, 22 nt, Synthetic Construct
  source 1..22: mol_type = other RNA
gcgtaccgtgagtaataatgcg

SEQ ID NO: 37169 - RNA, 22 nt, Synthetic Construct
  source 1..22: mol_type = other RNA
gcgtaccgtgagtaataatgcg

SEQ ID NO: 37170 - RNA, 22 nt, Synthetic Construct
  source 1..22: mol_type = other RNA
caaagtgctgttcgtgcaggta

SEQ ID NO: 37171 - RNA, 21 nt, Synthetic Construct
  source 1..21: mol_type = other RNA
cgcgacctcagatcagacgtg

SEQ ID NO: 37172 - RNA, 21 nt, Synthetic Construct
  source 1..21: mol_type = other RNA
cgcgacctcagatcagacgtg

SEQ ID NO: 37173 - RNA, 21 nt, Synthetic Construct
  source 1..21: mol_type = other RNA
tcctatactgagctgccccga

SEQ ID NO: 37174 - RNA, 39 nt, Synthetic Construct; identical to SEQ ID NO: 2398
  source 1..39: mol_type = other RNA

SEQ ID NO: 37175 - RNA, 23 nt, Synthetic Construct
  source 1..23: mol_type = other RNA
caaagtgctgttcgtgcaggtaa

SEQ ID NO: 37176 - RNA, 22 nt, Synthetic Construct
  source 1..22: mol_type = other RNA
tgaggtagtaggctgtatagtt

SEQ ID NO: 37177 - RNA, 22 nt, Synthetic Construct
  source 1..22: mol_type = other RNA
tgaggtagtaggctgtatagtt

SEQ ID NO: 37178 - RNA, 21 nt, Synthetic Construct
  source 1..21: mol_type = other RNA
tgaggtagtagattgtgtggt

SEQ ID NO: 37179 - RNA, 21 nt, Synthetic Construct
  source 1..21: mol_type = other RNA
tgaggtagtagattgtgtggt

SEQ ID NO: 37180 - RNA, 23 nt, Synthetic Construct
  source 1..23: mol_type = other RNA
gggtaatacgacgtacttagtgt

SEQ ID NO: 37181 - RNA, 23 nt, Synthetic Construct
  source 1..23: mol_type = other RNA
gggtaatacgacgtacttagtgt

SEQ ID NO: 37182 - RNA, 22 nt, Synthetic Construct
  source 1..22: mol_type = other RNA
tattgcactcgtcccggcctgt

SEQ ID NO: 37183 - RNA, 22 nt, Synthetic Construct
  source 1..22: mol_type = other RNA
tattgcactcgtcccggcctgt

SEQ ID NO: 37184 - RNA, 23 nt, Synthetic Construct
  source 1..23: mol_type = other RNA
tggctcagttcagcaggaacaga

SEQ ID NO: 37185 - RNA, 23 nt, Synthetic Construct
  source 1..23: mol_type = other RNA
agaggctggccgtgatgaattcg

SEQ ID NO: 37186 - RNA, 22 nt, Synthetic Construct
  source 1..22: mol_type = other RNA
cattgcacttgtcccggtctga

SEQ ID NO: 37187 - RNA, 23 nt, Synthetic Construct
  source 1..23: mol_type = other RNA
gcctgtactgagctgccccgaga

SEQ ID NO: 37188 - RNA, 21 nt, Synthetic Construct
  source 1..21: mol_type = other RNA
tccctgagaccctaacttgtg

SEQ ID NO: 37189 - RNA, 21 nt, Synthetic Construct
  source 1..21: mol_type = other RNA
tccctgagaccctaacttgtg

SEQ ID NO: 37190 - RNA, 22 nt, Synthetic Construct
  source 1..22: mol_type = other RNA
tcgtaccgtgggtaataatgcg

SEQ ID NO: 37191 - RNA, 22 nt, Synthetic Construct
  source 1..22: mol_type = other RNA
tgaggaagtagtttgtgctgtt

SEQ ID NO: 37192 - RNA, 19 nt, Synthetic Construct
  source 1..19: mol_type = other RNA
tgaggtagtaggttgtgtg

SEQ ID NO: 37193 - RNA, 19 nt, Synthetic Construct
  source 1..19: mol_type = other RNA
tgaggtagtaggttgtgtg

SEQ ID NO: 37194 - RNA, 22 nt, Synthetic Construct
  source 1..22: mol_type = other RNA
tgaggtagtaggttgtgtgatt

SEQ ID NO: 37195 - RNA, 22 nt, Synthetic Construct
  source 1..22: mol_type = other RNA
cccagtgctctgaatgtcaaag

SEQ ID NO: 37196 - RNA, 22 nt, Synthetic Construct
  source 1..22: mol_type = other RNA
cccagtgctctgaatgtcaaag

SEQ ID NO: 37197 - RNA, 21 nt, Synthetic Construct
  source 1..21: mol_type = other RNA
agaggtagtaggttgtgtggt

SEQ ID NO: 37198 - RNA, 21 nt, Synthetic Construct
  source 1..21: mol_type = other RNA
agaggtagtaggttgtgtggt

SEQ ID NO: 37199 - RNA, 20 nt, Synthetic Construct
  source 1..20: mol_type = other RNA
gtgccgaagctgtgggattg

SEQ ID NO: 37200 - RNA, 20 nt, Synthetic Construct
  source 1..20: mol_type = other RNA
gtgccgaagctgtgggattg

SEQ ID NO: 37201 - RNA, 31 nt, Synthetic Construct; identical to SEQ ID NO: 9212
  source 1..31: mol_type = other RNA

SEQ ID NO: 37202 - RNA, 31 nt, Synthetic Construct; identical to SEQ ID NO: 9212
  source 1..31: mol_type = other RNA

SEQ ID NO: 37203 - RNA, 21 nt, Synthetic Construct
  source 1..21: mol_type = other RNA
tggagtgtgacaatggtgttt

SEQ ID NO: 37204 - RNA, 21 nt, Synthetic Construct
  source 1..21: mol_type = other RNA
tggagtgtgacaatggtgttt

SEQ ID NO: 37205 - RNA, 22 nt, Synthetic Construct
  source 1..22: mol_type = other RNA
tgaggtagtaggttatatagtt

SEQ ID NO: 37206 - RNA, 22 nt, Synthetic Construct
  source 1..22: mol_type = other RNA
tgaggtagtaggttatatagtt

SEQ ID NO: 37207 - RNA, 23 nt, Synthetic Construct
  source 1..23: mol_type = other RNA
tgaggggcagagagcgagacctt

SEQ ID NO: 37208 - RNA, 23 nt, Synthetic Construct
  source 1..23: mol_type = other RNA
tgaggggcagagagcgagacctt

SEQ ID NO: 37209 - RNA, 24 nt, Synthetic Construct
  source 1..24: mol_type = other RNA
agctcggtctgaggcccctcagtt

SEQ ID NO: 37210 - RNA, 24 nt, Synthetic Construct
  source 1..24: mol_type = other RNA
agctcggtctgaggcccctcagtt

SEQ ID NO: 37211 - RNA, 25 nt, Synthetic Construct
  source 1..25: mol_type = other RNA
ttgaggatgtgagatcgagacgaca

SEQ ID NO: 37212 - RNA, 21 nt, Synthetic Construct
  source 1..21: mol_type = other RNA
aggagtgtgacaatggtgttt

SEQ ID NO: 37213 - RNA, 21 nt, Synthetic Construct
  source 1..21: mol_type = other RNA
aggagtgtgacaatggtgttt

SEQ ID NO: 37214 - RNA, 30 nt, Synthetic Construct; identical to SEQ ID NO: 2353
  source 1..30: mol_type = other RNA

SEQ ID NO: 37215 - RNA, 21 nt, Synthetic Construct
  source 1..21: mol_type = other RNA
tgaggggcggagagcgagact

SEQ ID NO: 37216 - RNA, 21 nt, Synthetic Construct
  source 1..21: mol_type = other RNA
tgaggggcggagagcgagact

SEQ ID NO: 37217 - RNA, 24 nt, Synthetic Construct
  source 1..24: mol_type = other RNA
tgaggtagtaggttgtgtggttaa

SEQ ID NO: 37218 - RNA, 23 nt, Synthetic Construct
  source 1..23: mol_type = other RNA
tggtaatacgacgcacttagtgt

SEQ ID NO: 37219 - RNA, 25 nt, Synthetic Construct
  source 1..25: mol_type = other RNA
tagtgcaatattgcttatagggttt

SEQ ID NO: 37220 - RNA, 21 nt, Synthetic Construct
  source 1..21: mol_type = other RNA
tcctgtactgagctgccctga

SEQ ID NO: 37221 - RNA, 23 nt, Synthetic Construct
  source 1..23: mol_type = other RNA
agctacattgtctgctgggtttt

SEQ ID NO: 37222 - RNA, 23 nt, Synthetic Construct
  source 1..23: mol_type = other RNA
agctacattgtctgctgggtttt

SEQ ID NO: 37223 - RNA, 23 nt, Synthetic Construct
  source 1..23: mol_type = other RNA
tggtaatacgacgtacttagagt

SEQ ID NO: 37224 - RNA, 23 nt, Synthetic Construct
  source 1..23: mol_type = other RNA
attctaatttctccacgtctttg

SEQ ID NO: 37225 - RNA, 23 nt, Synthetic Construct
  source 1..23: mol_type = other RNA
attctaatttctccacgtctttg

SEQ ID NO: 37226 - RNA, 23 nt, Synthetic Construct
  source 1..23: mol_type = other RNA
agtcagtttgtcaaataccccat

SEQ ID NO: 37227 - RNA, 24 nt, Synthetic Construct
  source 1..24: mol_type = other RNA
tgtaaacgtccccgactggaagct

SEQ ID NO: 37228 - RNA, 22 nt, Synthetic Construct
  source 1..22: mol_type = other RNA
tagcagcacgtaaaaattggcg

SEQ ID NO: 37229 - RNA, 23 nt, Synthetic Construct
  source 1..23: mol_type = other RNA
tcggatccgtctgagcttggctt

SEQ ID NO: 37230 - RNA, 23 nt, Synthetic Construct
  source 1..23: mol_type = other RNA
tcggatccgtctgagcttggctt

SEQ ID NO: 37231 - RNA, 43 nt, Synthetic Construct; identical to SEQ ID NO: 1204
  source 1..43: mol_type = other RNA

SEQ ID NO: 37232 - RNA, 43 nt, Synthetic Construct; identical to SEQ ID NO: 1204
  source 1..43: mol_type = other RNA

SEQ ID NO: 37233 - RNA, 29 nt, Synthetic Construct
  source 1..29: mol_type = other RNA
tccctggtggtctagtggttaggattcgg

SEQ ID NO: 37234 - RNA, 27 nt, Synthetic Construct
  source 1..27: mol_type = other RNA
gactcttagcggtggatcactcggctc

SEQ ID NO: 37235 - RNA, 21 nt, Synthetic Construct
  source 1..21: mol_type = other RNA
tcctgcactgagctgccccga

SEQ ID NO: 37236 - RNA, 17 nt, Synthetic Construct
  source 1..17: mol_type = other RNA
tctacagtccgacgatc

SEQ ID NO: 37237 - RNA, 17 nt, Synthetic Construct
  source 1..17: mol_type = other RNA
tctacagtccgacgatc

SEQ ID NO: 37238 - RNA, 21 nt, Synthetic Construct
  source 1..21: mol_type = other RNA
tggagtgtggcaatggtgttt

SEQ ID NO: 37239 - RNA, 21 nt, Synthetic Construct
  source 1..21: mol_type = other RNA
tggagtgtggcaatggtgttt

SEQ ID NO: 37240 - RNA, 21 nt, Synthetic Construct
  source 1..21: mol_type = other RNA
tgaggtagtaggttgtgtgat

SEQ ID NO: 37241 - RNA, 30 nt, Synthetic Construct; identical to SEQ ID NO: 768
  source 1..30: mol_type = other RNA

SEQ ID NO: 37242 - RNA, 30 nt, Synthetic Construct; identical to SEQ ID NO: 768
  source 1..30: mol_type = other RNA

SEQ ID NO: 37243 - RNA, 18 nt, Synthetic Construct
  source 1..18: mol_type = other RNA
cataaagtagaaagcact

SEQ ID NO: 37244 - RNA, 18 nt, Synthetic Construct
  source 1..18: mol_type = other RNA
cataaagtagaaagcact

SEQ ID NO: 37245 - RNA, 18 nt, Synthetic Construct
  source 1..18: mol_type = other RNA
accctgctcgctgcgcca

SEQ ID NO: 37246 - RNA, 18 nt, Synthetic Construct
  source 1..18: mol_type = other RNA
accctgctcgctgcgcca

SEQ ID NO: 37247 - RNA, 26 nt, Synthetic Construct
  source 1..26: mol_type = other RNA
ttctcactactgcacttgactagtct

SEQ ID NO: 37248 - RNA, 21 nt, Synthetic Construct
  source 1..21: mol_type = other RNA
tgaggtaataggttgtgtggt

SEQ ID NO: 37249 - RNA, 21 nt, Synthetic Construct
  source 1..21: mol_type = other RNA
tgaggtaataggttgtgtggt

SEQ ID NO: 37250 - RNA, 23 nt, Synthetic Construct
  source 1..23: mol_type = other RNA
tcctgtactgagctgtcccgaga

SEQ ID NO: 37251 - RNA, 23 nt, Synthetic Construct
  source 1..23: mol_type = other RNA
tcctgtactgagctgtcccgaga

SEQ ID NO: 37252 - RNA, 21 nt, Synthetic Construct
  source 1..21: mol_type = other RNA
agaggggcagagagcgagact

SEQ ID NO: 37253 - RNA, 21 nt, Synthetic Construct
  source 1..21: mol_type = other RNA
agaggggcagagagcgagact

SEQ ID NO: 37254 - RNA, 22 nt, Synthetic Construct
  source 1..22: mol_type = other RNA
tgaggtagtagtttgtgcagtt

SEQ ID NO: 37255 - RNA, 22 nt, Synthetic Construct
  source 1..22: mol_type = other RNA
tgaggtagtagtttgtgcagtt

SEQ ID NO: 37256 - RNA, 27 nt, Synthetic Construct
  source 1..27: mol_type = other RNA
gttggttcaagcgtgtagtcgtgctct

SEQ ID NO: 37257 - RNA, 22 nt, Synthetic Construct
  source 1..22: mol_type = other RNA
taactccttaggcgaatctcgc

SEQ ID NO: 37258 - RNA, 22 nt, Synthetic Construct
  source 1..22: mol_type = other RNA
gaatgttgctcggtgaacccct

SEQ ID NO: 37259 - RNA, 22 nt, Synthetic Construct
  source 1..22: mol_type = other RNA
actagattgtgagctcctggag

SEQ ID NO: 37260 - RNA, 22 nt, Synthetic Construct
  source 1..22: mol_type = other RNA
actagattgtgagctcctggag

SEQ ID NO: 37261 - RNA, 21 nt, Synthetic Construct
  source 1..21: mol_type = other RNA
tggagtgtgacaatggtgtct

SEQ ID NO: 37262 - RNA, 21 nt, Synthetic Construct
  source 1..21: mol_type = other RNA
tggagtgtgacaatggtgtct

SEQ ID NO: 37263 - RNA, 22 nt, Synthetic Construct
  source 1..22: mol_type = other RNA
tccccttggggttgtaggacca

SEQ ID NO: 37264 - RNA, 22 nt, Synthetic Construct
  source 1..22: mol_type = other RNA
tccccttggggttgtaggacca

SEQ ID NO: 37265 - RNA, 21 nt, Synthetic Construct
  source 1..21: mol_type = other RNA
cgaggtagtaggttgtatagt

SEQ ID NO: 37266 - RNA, 21 nt, Synthetic Construct
  source 1..21: mol_type = other RNA
cgaggtagtaggttgtatagt

SEQ ID NO: 37267 - RNA, 22 nt, Synthetic Construct
  source 1..22: mol_type = other RNA
tgaggtagtagtttgtgccgtt

SEQ ID NO: 37268 - RNA, 22 nt, Synthetic Construct
  source 1..22: mol_type = other RNA
tgaggtagtagtttgtgccgtt

SEQ ID NO: 37269 - RNA, 42 nt, Synthetic Construct; identical to SEQ ID NO: 733
  source 1..42: mol_type = other RNA

SEQ ID NO: 37270 - RNA, 19 nt, Synthetic Construct
  source 1..19: mol_type = other RNA
atagggaacgtgagctggg

SEQ ID NO: 37271 - RNA, 19 nt, Synthetic Construct
  source 1..19: mol_type = other RNA
atagggaacgtgagctggg

SEQ ID NO: 37272 - RNA, 26 nt, Synthetic Construct
  source 1..26: mol_type = other RNA
ccccccactgctaatttgactggctt

SEQ ID NO: 37273 - RNA, 22 nt, Synthetic Construct
  source 1..22: mol_type = other RNA
cgactggtaactgggatgaagt

SEQ ID NO: 37274 - RNA, 22 nt, Synthetic Construct
  source 1..22: mol_type = other RNA
cgactggtaactgggatgaagt

SEQ ID NO: 37275 - RNA, 25 nt, Synthetic Construct
  source 1..25: mol_type = other RNA
gctcagtggaaaggatgtgaatcta

SEQ ID NO: 37276 - RNA, 25 nt, Synthetic Construct
  source 1..25: mol_type = other RNA
gctcagtggaaaggatgtgaatcta

SEQ ID NO: 37277 - RNA, 22 nt, Synthetic Construct
  source 1..22: mol_type = other RNA
tactgcacttgtcccggcctgt

SEQ ID NO: 37278 - RNA, 22 nt, Synthetic Construct
  source 1..22: mol_type = other RNA
tactgcacttgtcccggcctgt

SEQ ID NO: 37279 - RNA, 22 nt, Synthetic Construct
  source 1..22: mol_type = other RNA
tcgaaaccatcctctgctacca

SEQ ID NO: 37280 - RNA, 22 nt, Synthetic Construct
  source 1..22: mol_type = other RNA
tcgaaaccatcctctgctacca

SEQ ID NO: 37281 - RNA, 22 nt, Synthetic Construct
  source 1..22: mol_type = other RNA
tgaggcagtagtttgtgctgtt

SEQ ID NO: 37282 - RNA, 22 nt, Synthetic Construct
  source 1..22: mol_type = other RNA
tgaggcagtagtttgtgctgtt

SEQ ID NO: 37283 - RNA, 38 nt, Synthetic Construct; identical to SEQ ID NO: 7148
  source 1..38: mol_type = other RNA

SEQ ID NO: 37284 - RNA, 21 nt, Synthetic Construct
  source 1..21: mol_type = other RNA
gaagaggacttggaactcgat

SEQ ID NO: 37285 - RNA, 21 nt, Synthetic Construct
  source 1..21: mol_type = other RNA
gaagaggacttggaactcgat

SEQ ID NO: 37286 - RNA, 22 nt, Synthetic Construct
  source 1..22: mol_type = other RNA
tgaggtagtaggttgtacagtt

SEQ ID NO: 37287 - RNA, 23 nt, Synthetic Construct
  source 1..23: mol_type = other RNA
tgagcgcctcgacgacagagccg

SEQ ID NO: 37288 - RNA, 23 nt, Synthetic Construct
  source 1..23: mol_type = other RNA
tgagcgcctcgacgacagagccg

SEQ ID NO: 37289 - RNA, 22 nt, Synthetic Construct
  source 1..22: mol_type = other RNA
tgaggtagtagtttgtgctggt

SEQ ID NO: 37290 - RNA, 28 nt, Synthetic Construct
  source 1..28: mol_type = other RNA
cccccccactgctaaatttgactggctt

SEQ ID NO: 37291 - RNA, 23 nt, Synthetic Construct
  source 1..23: mol_type = other RNA
tggagtgtgacaatggtgtttgg

SEQ ID NO: 37292 - RNA, 23 nt, Synthetic Construct
  source 1..23: mol_type = other RNA
tggagtgtgacaatggtgtttgg

SEQ ID NO: 37293 - RNA, 23 nt, Synthetic Construct
  source 1..23: mol_type = other RNA
agaggggcagagagcgagacttt

SEQ ID NO: 37294 - RNA, 23 nt, Synthetic Construct
  source 1..23: mol_type = other RNA
agaggggcagagagcgagacttt

SEQ ID NO: 37295 - RNA, 21 nt, Synthetic Construct
  source 1..21: mol_type = other RNA
atcgggaatgtcgtgtccgcc

SEQ ID NO: 37296 - RNA, 21 nt, Synthetic Construct
  source 1..21: mol_type = other RNA
atcgggaatgtcgtgtccgcc

SEQ ID NO: 37297 - RNA, 22 nt, Synthetic Construct
  source 1..22: mol_type = other RNA
tgtgcaaatctatgcaaaactg

SEQ ID NO: 37298 - RNA, 29 nt, Synthetic Construct
  source 1..29: mol_type = other RNA
gcgccgctggtgtagtggtatcatgcaag

SEQ ID NO: 37299 - RNA, 29 nt, Synthetic Construct
  source 1..29: mol_type = other RNA
gcgccgctggtgtagtggtatcatgcaag

SEQ ID NO: 37300 - RNA, 22 nt, Synthetic Construct
  source 1..22: mol_type = other RNA
cgttgcacttgtctcggtctga

SEQ ID NO: 37301 - RNA, 22 nt, Synthetic Construct
  source 1..22: mol_type = other RNA
cgttgcacttgtctcggtctga

SEQ ID NO: 37302 - RNA, 22 nt, Synthetic Construct
  source 1..22: mol_type = other RNA
ttataatacaacctgataagtg

SEQ ID NO: 37303 - RNA, 22 nt, Synthetic Construct
  source 1..22: mol_type = other RNA
ttataatacaacctgataagtg

SEQ ID NO: 37304 - RNA, 23 nt, Synthetic Construct
  source 1..23: mol_type = other RNA
tagcttatcagactgatgttgac

SEQ ID NO: 37305 - RNA, 16 nt, Synthetic Construct
  source 1..16: mol_type = other RNA
atctacggccatacca

SEQ ID NO: 37306 - RNA, 16 nt, Synthetic Construct
  source 1..16: mol_type = other RNA
atctacggccatacca

SEQ ID NO: 37307 - RNA, 15 nt, Synthetic Construct
  source 1..15: mol_type = other RNA
cggcccagactccta

SEQ ID NO: 37308 - RNA, 15 nt, Synthetic Construct
  source 1..15: mol_type = other RNA
cggcccagactccta

SEQ ID NO: 37309 - RNA, 24 nt, Synthetic Construct
  source 1..24: mol_type = other RNA
ttcaagtaatccaggataggcttt

SEQ ID NO: 37310 - RNA, 24 nt, Synthetic Construct
  source 1..24: mol_type = other RNA
ttcaagtaatccaggataggcttt

SEQ ID NO: 37311 - RNA, 31 nt, Synthetic Construct; identical to SEQ ID NO: 5943
  source 1..31: mol_type = other RNA

SEQ ID NO: 37312 - RNA, 16 nt, Synthetic Construct
  source 1..16: mol_type = other RNA
tgacgcgcatgaatgg

SEQ ID NO: 37313 - RNA, 16 nt, Synthetic Construct
  source 1..16: mol_type = other RNA
tgacgcgcatgaatgg

SEQ ID NO: 37314 - RNA, 22 nt, Synthetic Construct
  source 1..22: mol_type = other RNA
tggaatgtaaagaggtatgtat

SEQ ID NO: 37315 - RNA, 22 nt, Synthetic Construct
  source 1..22: mol_type = other RNA
tggaatgtaaagaggtatgtat

SEQ ID NO: 37316 - RNA, 21 nt, Synthetic Construct
  source 1..21: mol_type = other RNA
tgaggtagtagcttgtgctgt

SEQ ID NO: 37317 - RNA, 40 nt, Synthetic Construct; identical to SEQ ID NO: 2684
  source 1..40: mol_type = other RNA

SEQ ID NO: 37318 - RNA, 22 nt, Synthetic Construct
  source 1..22: mol_type = other RNA
tgaggtagtagtttgtgcagtt

SEQ ID NO: 37319 - RNA, 22 nt, Synthetic Construct
  source 1..22: mol_type = other RNA
tgagatagtagtttgtgctgtt

SEQ ID NO: 37320 - RNA, 22 nt, Synthetic Construct
  source 1..22: mol_type = other RNA
tgagatagtagtttgtgctgtt

SEQ ID NO: 37321 - RNA, 23 nt, Synthetic Construct
  source 1..23: mol_type = other RNA
agcagcgttgtacagggctatga

SEQ ID NO: 37322 - RNA, 25 nt, Synthetic Construct
  source 1..25: mol_type = other RNA
ttgaggatgtgagatcgagacgaca

SEQ ID NO: 37323 - RNA, 21 nt, Synthetic Construct
  source 1..21: mol_type = other RNA
tggagagtgacaatggtgttt

SEQ ID NO: 37324 - RNA, 21 nt, Synthetic Construct
  source 1..21: mol_type = other RNA
tggagagtgacaatggtgttt

SEQ ID NO: 37325 - RNA, 23 nt, Synthetic Construct
  source 1..23: mol_type = other RNA
taactccttaagcgaatctcggc

SEQ ID NO: 37326 - RNA, 22 nt, Synthetic Construct
  source 1..22: mol_type = other RNA
tccttcattccaccggagtctg

SEQ ID NO: 37327 - RNA, 22 nt, Synthetic Construct
  source 1..22: mol_type = other RNA
tccttcattccaccggagtctg

SEQ ID NO: 37328 - RNA, 21 nt, Synthetic Construct
  source 1..21: mol_type = other RNA
tgaggtagtaggttgtatggt

SEQ ID NO: 37329 - RNA, 21 nt, Synthetic Construct
  source 1..21: mol_type = other RNA
acacatgcaagtcgaacggta

SEQ ID NO: 37330 - RNA, 34 nt, Synthetic Construct; identical to SEQ ID NO: 2375
  source 1..34: mol_type = other RNA

SEQ ID NO: 37331 - RNA, 34 nt, Synthetic Construct; identical to SEQ ID NO: 2375
  source 1..34: mol_type = other RNA

SEQ ID NO: 37332 - RNA, 20 nt, Synthetic Construct
  source 1..20: mol_type = other RNA
ttatcagaatctccaggggt

SEQ ID NO: 37333 - RNA, 20 nt, Synthetic Construct
  source 1..20: mol_type = other RNA
ttatcagaatctccaggggt

SEQ ID NO: 37334 - RNA, 22 nt, Synthetic Construct
  source 1..22: mol_type = other RNA
tacgcctgtctgagcgtcgctt

SEQ ID NO: 37335 - RNA, 22 nt, Synthetic Construct
  source 1..22: mol_type = other RNA
tgtagtgcttcctactttatgg

SEQ ID NO: 37336 - RNA, 30 nt, Synthetic Construct; identical to SEQ ID NO: 751
  source 1..30: mol_type = other RNA

SEQ ID NO: 37337 - RNA, 22 nt, Synthetic Construct
  source 1..22: mol_type = other RNA
tgaggtagtaatttgtgctgtt

SEQ ID NO: 37338 - RNA, 22 nt, Synthetic Construct
  source 1..22: mol_type = other RNA
tcctgtactgagctgcctcgag

SEQ ID NO: 37339 - RNA, 22 nt, Synthetic Construct
  source 1..22: mol_type = other RNA
tcagtgcactacagagctttgt

SEQ ID NO: 37340 - RNA, 22 nt, Synthetic Construct
  source 1..22: mol_type = other RNA
tcagtgcactacagagctttgt

SEQ ID NO: 37341 - RNA, 23 nt, Synthetic Construct
  source 1..23: mol_type = other RNA
acctgtactgagctgccccgaga

SEQ ID NO: 37342 - RNA, 23 nt, Synthetic Construct
  source 1..23: mol_type = other RNA
acctgtactgagctgccccgaga

SEQ ID NO: 37343 - RNA, 23 nt, Synthetic Construct
  source 1..23: mol_type = other RNA
caaagtgttgttcgtgcaggtag

SEQ ID NO: 37344 - RNA, 23 nt, Synthetic Construct
  source 1..23: mol_type = other RNA
caaagtgttgttcgtgcaggtag

SEQ ID NO: 37345 - RNA, 22 nt, Synthetic Construct
  source 1..22: mol_type = other RNA
tgggatgagggattgaagtgga

SEQ ID NO: 37346 - RNA, 22 nt, Synthetic Construct
  source 1..22: mol_type = other RNA
gagaactgaattccatgggttg

SEQ ID NO: 37347 - RNA, 22 nt, Synthetic Construct
  source 1..22: mol_type = other RNA
gagaactgaattccatgggttg

SEQ ID NO: 37348 - RNA, 25 nt, Synthetic Construct
  source 1..25: mol_type = other RNA
tcggatccgtctgagcttggctttt

SEQ ID NO: 37349 - RNA, 25 nt, Synthetic Construct
  source 1..25: mol_type = other RNA
tcggatccgtctgagcttggctttt

SEQ ID NO: 37350 - RNA, 21 nt, Synthetic Construct
  source 1..21: mol_type = other RNA
tggggggcagagagcgagact

SEQ ID NO: 37351 - RNA, 21 nt, Synthetic Construct
  source 1..21: mol_type = other RNA
tggggggcagagagcgagact

SEQ ID NO: 37352 - RNA, 18 nt, Synthetic Construct
  source 1..18: mol_type = other RNA
cagcactctgcaaagacg

SEQ ID NO: 37353 - RNA, 18 nt, Synthetic Construct
  source 1..18: mol_type = other RNA
cagcactctgcaaagacg

SEQ ID NO: 37354 - RNA, 24 nt, Synthetic Construct
  source 1..24: mol_type = other RNA
cggagaaggttagctcagccaact

SEQ ID NO: 37355 - RNA, 24 nt, Synthetic Construct
  source 1..24: mol_type = other RNA
cggagaaggttagctcagccaact

SEQ ID NO: 37356 - RNA, 22 nt, Synthetic Construct
  source 1..22: mol_type = other RNA
tagctgcacgtaaatattggcg

SEQ ID NO: 37357 - RNA, 22 nt, Synthetic Construct
  source 1..22: mol_type = other RNA
tagctgcacgtaaatattggcg

SEQ ID NO: 37358 - RNA, 24 nt, Synthetic Construct
  source 1..24: mol_type = other RNA
tgtaaacatccccgactggaagct

SEQ ID NO: 37359 - RNA, 24 nt, Synthetic Construct
  source 1..24: mol_type = other RNA
tgtaaacatccccgactggaagct

SEQ ID NO: 37360 - RNA, 21 nt, Synthetic Construct
  source 1..21: mol_type = other RNA
tcgtaccgtgagtaataatga

SEQ ID NO: 37361 - RNA, 26 nt, Synthetic Construct
  source 1..26: mol_type = other RNA
tccctggtggtctagtggttaggatt

SEQ ID NO: 37362 - RNA, 22 nt, Synthetic Construct
  source 1..22: mol_type = other RNA
tattgcacttgtctcggcctgt

SEQ ID NO: 37363 - RNA, 22 nt, Synthetic Construct
  source 1..22: mol_type = other RNA
tattgcacttgtctcggcctgt

SEQ ID NO: 37364 - RNA, 20 nt, Synthetic Construct
  source 1..20: mol_type = other RNA
tgaggtagtaggttgtataa

SEQ ID NO: 37365 - RNA, 26 nt, Synthetic Construct
  source 1..26: mol_type = other RNA
gacttaccaaacctatgcaaactccg

SEQ ID NO: 37366 - RNA, 21 nt, Synthetic Construct
  source 1..21: mol_type = other RNA
cggcggggacggcgattggtc

SEQ ID NO: 37367 - RNA, 21 nt, Synthetic Construct
  source 1..21: mol_type = other RNA
cggcggggacggcgattggtc

SEQ ID NO: 37368 - RNA, 23 nt, Synthetic Construct
  source 1..23: mol_type = other RNA
tggtaatacgacgtacttagtga

SEQ ID NO: 37369 - RNA, 35 nt, Synthetic Construct; identical to SEQ ID NO: 2452
  source 1..35: mol_type = other RNA

SEQ ID NO: 37370 - RNA, 35 nt, Synthetic Construct; identical to SEQ ID NO: 2452
  source 1..35: mol_type = other RNA

SEQ ID NO: 37371 - RNA, 21 nt, Synthetic Construct
  source 1..21: mol_type = other RNA
tggggtagtaggttgtatagt

SEQ ID NO: 37372 - RNA, 22 nt, Synthetic Construct
  source 1..22: mol_type = other RNA
tagcagcacgtacatattggcg

SEQ ID NO: 37373 - RNA, 22 nt, Synthetic Construct
  source 1..22: mol_type = other RNA
tagcagcacgtacatattggcg

SEQ ID NO: 37374 - RNA, 22 nt, Synthetic Construct
  source 1..22: mol_type = other RNA
gggagtgtgacaatggtgtttg

SEQ ID NO: 37375 - RNA, 22 nt, Synthetic Construct
  source 1..22: mol_type = other RNA
gggagtgtgacaatggtgtttg

SEQ ID NO: 37376 - RNA, 22 nt, Synthetic Construct
  source 1..22: mol_type = other RNA
tatggcactggtagaattcact

SEQ ID NO: 37377 - RNA, 22 nt, Synthetic Construct
  source 1..22: mol_type = other RNA
tgtgcaaatctatgcaaaactg

SEQ ID NO: 37378 - RNA, 22 nt, Synthetic Construct
  source 1..22: mol_type = other RNA
tgtgcaaatctatgcaaaactg

SEQ ID NO: 37379 - RNA, 43 nt, Synthetic Construct; identical to SEQ ID NO: 4585
  source 1..43: mol_type = other RNA

SEQ ID NO: 37380 - RNA, 22 nt, Synthetic Construct
  source 1..22: mol_type = other RNA
gaagaggacttggaactcgatc

SEQ ID NO: 37381 - RNA, 15 nt, Synthetic Construct
  source 1..15: mol_type = other RNA
acggtcctaaggtag

SEQ ID NO: 37382 - RNA, 15 nt, Synthetic Construct
  source 1..15: mol_type = other RNA
acggtcctaaggtag

SEQ ID NO: 37383 - RNA, 21 nt, Synthetic Construct
  source 1..21: mol_type = other RNA
aggagtgtgacaatggtgttt

SEQ ID NO: 37384 - RNA, 22 nt, Synthetic Construct
  source 1..22: mol_type = other RNA
tgaggtagtaggttgtgcggtt

SEQ ID NO: 37385 - RNA, 27 nt, Synthetic Construct
  source 1..27: mol_type = other RNA
ccccccgctgctaaatttgactggcta

SEQ ID NO: 37386 - RNA, 27 nt, Synthetic Construct
  source 1..27: mol_type = other RNA
ccccccgctgctaaatttgactggcta

SEQ ID NO: 37387 - RNA, 18 nt, Synthetic Construct
  source 1..18: mol_type = other RNA
cctcgcgcgattggagcg

SEQ ID NO: 37388 - RNA, 18 nt, Synthetic Construct
  source 1..18: mol_type = other RNA
cctcgcgcgattggagcg

SEQ ID NO: 37389 - RNA, 23 nt, Synthetic Construct
  source 1..23: mol_type = other RNA
tggtaatatgacgtacttagtgt

SEQ ID NO: 37390 - RNA, 23 nt, Synthetic Construct
  source 1..23: mol_type = other RNA
caaagtgcttacagtgcaggtag

SEQ ID NO: 37391 - RNA, 35 nt, Synthetic Construct; identical to SEQ ID NO: 2452
  source 1..35: mol_type = other RNA

SEQ ID NO: 37392 - RNA, 22 nt, Synthetic Construct
  source 1..22: mol_type = other RNA
tagcagcacataatggtttgtg

SEQ ID NO: 37393 - RNA, 22 nt, Synthetic Construct
  source 1..22: mol_type = other RNA
tagcagcacataatggtttgtg

SEQ ID NO: 37394 - RNA, 23 nt, Synthetic Construct
  source 1..23: mol_type = other RNA
gtgcagatcttggtggtagtagc

SEQ ID NO: 37395 - RNA, 23 nt, Synthetic Construct
  source 1..23: mol_type = other RNA
gtgcagatcttggtggtagtagc

SEQ ID NO: 37396 - RNA, 26 nt, Synthetic Construct
  source 1..26: mol_type = other RNA
tgtccccgcgaggggcccggggcggg

SEQ ID NO: 37397 - RNA, 23 nt, Synthetic Construct
  source 1..23: mol_type = other RNA
aggtaatacgacgtacttagtgt

SEQ ID NO: 37398 - RNA, 23 nt, Synthetic Construct
  source 1..23: mol_type = other RNA
aggtaatacgacgtacttagtgt

SEQ ID NO: 37399 - RNA, 21 nt, Synthetic Construct
  source 1..21: mol_type = other RNA
cgaggtagtaggttgtatagt

SEQ ID NO: 37400 - RNA, 21 nt, Synthetic Construct
  source 1..21: mol_type = other RNA
cgaggtagtaggttgtatagt

SEQ ID NO: 37401 - RNA, 22 nt, Synthetic Construct
  source 1..22: mol_type = other RNA
tcctgcactgagctgccccgag

SEQ ID NO: 37402 - RNA, 21 nt, Synthetic Construct
  source 1..21: mol_type = other RNA
cgaggtagtagattgtatagt

SEQ ID NO: 37403 - RNA, 21 nt, Synthetic Construct
  source 1..21: mol_type = other RNA
tggagcgtgacaatggtgttt

SEQ ID NO: 37404 - RNA, 22 nt, Synthetic Construct
  source 1..22: mol_type = other RNA
taccagcacgtaaatattggcg

SEQ ID NO: 37405 - RNA, 22 nt, Synthetic Construct
  source 1..22: mol_type = other RNA
taccagcacgtaaatattggcg

SEQ ID NO: 37406 - RNA, 23 nt, Synthetic Construct
  source 1..23: mol_type = other RNA
tcctatactgagctgccccgaga

SEQ ID NO: 37407 - RNA, 23 nt, Synthetic Construct
  source 1..23: mol_type = other RNA
tcctatactgagctgccccgaga

SEQ ID NO: 37408 - RNA, 22 nt, Synthetic Construct
  source 1..22: mol_type = other RNA
tagcagcacgtaaatataggcg

SEQ ID NO: 37409 - RNA, 22 nt, Synthetic Construct
  source 1..22: mol_type = other RNA
tagcagcacgtaaatataggcg

SEQ ID NO: 37410 - RNA, 21 nt, Synthetic Construct
  source 1..21: mol_type = other RNA
tgaggtagtaggttgtatagt

SEQ ID NO: 37411 - RNA, 23 nt, Synthetic Construct
  source 1..23: mol_type = other RNA
agctacattgtctgctgggtttt

SEQ ID NO: 37412 - RNA, 23 nt, Synthetic Construct
  source 1..23: mol_type = other RNA
agctacattgtctgctgggtttt

SEQ ID NO: 37413 - RNA, 23 nt, Synthetic Construct
  source 1..23: mol_type = other RNA
tgagaactgaattccatgggtta

SEQ ID NO: 37414 - RNA, 23 nt, Synthetic Construct
  source 1..23: mol_type = other RNA
tgagaactgaattccatgggtta

SEQ ID NO: 37415 - RNA, 24 nt, Synthetic Construct
  source 1..24: mol_type = other RNA
tccctgagaccctttaacctgtgt

SEQ ID NO: 37416 - RNA, 19 nt, Synthetic Construct
  source 1..19: mol_type = other RNA
tggagtgtgacaatggtga

SEQ ID NO: 37417 - RNA, 19 nt, Synthetic Construct
  source 1..19: mol_type = other RNA
tggagtgtgacaatggtga

SEQ ID NO: 37418 - RNA, 21 nt, Synthetic Construct
  source 1..21: mol_type = other RNA
tcctgtactgagccgccccga

SEQ ID NO: 37419 - RNA, 25 nt, Synthetic Construct
  source 1..25: mol_type = other RNA
tagtgcaatattgcttatagggttt

SEQ ID NO: 37420 - RNA, 22 nt, Synthetic Construct
  source 1..22: mol_type = other RNA
tgaggtaataggttgtgtggtt

SEQ ID NO: 37421 - RNA, 22 nt, Synthetic Construct
  source 1..22: mol_type = other RNA
tgaggtaataggttgtgtggtt

SEQ ID NO: 37422 - RNA, 22 nt, Synthetic Construct
  source 1..22: mol_type = other RNA
tgaggtagtaggttgtgtagtt

SEQ ID NO: 37423 - RNA, 22 nt, Synthetic Construct
  source 1..22: mol_type = other RNA
tgaggtagtagattgtatagct

SEQ ID NO: 37424 - RNA, 22 nt, Synthetic Construct
  source 1..22: mol_type = other RNA
tgaggtagtagattgtatagct

SEQ ID NO: 37425 - RNA, 20 nt, Synthetic Construct
  source 1..20: mol_type = other RNA
cgaggtagtaggttgtatag

SEQ ID NO: 37426 - RNA, 20 nt, Synthetic Construct
  source 1..20: mol_type = other RNA
cgaggtagtaggttgtatag

SEQ ID NO: 37427 - RNA, 23 nt, Synthetic Construct
  source 1..23: mol_type = other RNA
gcctgtactgagctgccccgagt

SEQ ID NO: 37428 - RNA, 22 nt, Synthetic Construct
  source 1..22: mol_type = other RNA
aagcagcacgtaaatattggag

SEQ ID NO: 37429 - RNA, 22 nt, Synthetic Construct
  source 1..22: mol_type = other RNA
aagcagcacgtaaatattggag

SEQ ID NO: 37430 - RNA, 24 nt, Synthetic Construct
  source 1..24: mol_type = other RNA
actcacacagaaatcgcacccgtc

SEQ ID NO: 37431 - RNA, 22 nt, Synthetic Construct
  source 1..22: mol_type = other RNA
tagcagcacataaatattggcg

SEQ ID NO: 37432 - RNA, 22 nt, Synthetic Construct
  source 1..22: mol_type = other RNA
tagcagcacataaatattggcg

SEQ ID NO: 37433 - RNA, 21 nt, Synthetic Construct
  source 1..21: mol_type = other RNA
tggggggcagagagcgagact

SEQ ID NO: 37434 - RNA, 20 nt, Synthetic Construct
  source 1..20: mol_type = other RNA
caacggaatcccaaaagcag

SEQ ID NO: 37435 - RNA, 20 nt, Synthetic Construct
  source 1..20: mol_type = other RNA
caacggaatcccaaaagcag

SEQ ID NO: 37436 - RNA, 29 nt, Synthetic Construct
  source 1..29: mol_type = other RNA
cgactcttagcggtggatcactcggctcg

SEQ ID NO: 37437 - RNA, 21 nt, Synthetic Construct
  source 1..21: mol_type = other RNA
tcaggctcagtcccctcccga

SEQ ID NO: 37438 - RNA, 21 nt, Synthetic Construct
  source 1..21: mol_type = other RNA
tcaggctcagtcccctcccga

SEQ ID NO: 37439 - RNA, 42 nt, Synthetic Construct; identical to SEQ ID NO: 19836
  source 1..42: mol_type = other RNA

SEQ ID NO: 37440 - RNA, 42 nt, Synthetic Construct; identical to SEQ ID NO: 19836
  source 1..42: mol_type = other RNA

SEQ ID NO: 37441 - RNA, 23 nt, Synthetic Construct
  source 1..23: mol_type = other RNA
tgaggggcagagagcgagactct

SEQ ID NO: 37442 - RNA, 23 nt, Synthetic Construct
  source 1..23: mol_type = other RNA
tgaggtaggaggttgtatagtta

SEQ ID NO: 37443 - RNA, 32 nt, Synthetic Construct; identical to SEQ ID NO: 770
  source 1..32: mol_type = other RNA

SEQ ID NO: 37444 - RNA, 32 nt, Synthetic Construct; identical to SEQ ID NO: 770
  source 1..32: mol_type = other RNA

SEQ ID NO: 37445 - RNA, 24 nt, Synthetic Construct
  source 1..24: mol_type = other RNA
tgtgatttctgcccagtgctctga

SEQ ID NO: 37446 - RNA, 24 nt, Synthetic Construct
  source 1..24: mol_type = other RNA
tgtgatttctgcccagtgctctga

SEQ ID NO: 37447 - RNA, 27 nt, Synthetic Construct
  source 1..27: mol_type = other RNA
gcatgggtggttcagtggtagaattct

SEQ ID NO: 37448 - RNA, 24 nt, Synthetic Construct
  source 1..24: mol_type = other RNA
aatgacacgatcactcccgttgag

SEQ ID NO: 37449 - RNA, 24 nt, Synthetic Construct
  source 1..24: mol_type = other RNA
aatgacacgatcactcccgttgag

SEQ ID NO: 37450 - RNA, 32 nt, Synthetic Construct
  source 1..32: mol_type = other RNA
gcccggatagctcagtcggtagagcatcagac

SEQ ID NO: 37451 - RNA, 23 nt, Synthetic Construct
  source 1..23: mol_type = other RNA
tcctgtactgagctgccctgagt

SEQ ID NO: 37452 - RNA, 22 nt, Synthetic Construct
  source 1..22: mol_type = other RNA
tagcagcacgtaaatataggcg

SEQ ID NO: 37453 - RNA, 22 nt, Synthetic Construct
  source 1..22: mol_type = other RNA
ggcagcattgtacagggctatg

SEQ ID NO: 37454 - RNA, 22 nt, Synthetic Construct
  source 1..22: mol_type = other RNA
ggcagcattgtacagggctatg

SEQ ID NO: 37455 - RNA, 27 nt, Synthetic Construct
  source 1..27: mol_type = other RNA
ccccctactgctaaatttgactggctt

SEQ ID NO: 37456 - RNA, 27 nt, Synthetic Construct
  source 1..27: mol_type = other RNA
ccccctactgctaaatttgactggctt

SEQ ID NO: 37457 - RNA, 27 nt, Synthetic Construct
  source 1..27: mol_type = other RNA
ccccccgctgctaaatttgactggctt

SEQ ID NO: 37458 - RNA, 27 nt, Synthetic Construct
  source 1..27: mol_type = other RNA
ccccccgctgctaaatttgactggctt

SEQ ID NO: 37459 - RNA, 30 nt, Synthetic Construct; identical to SEQ ID NO: 1958
  source 1..30: mol_type = other RNA

SEQ ID NO: 37460 - RNA, 23 nt, Synthetic Construct
  source 1..23: mol_type = other RNA
ggaggggcagagagcgagacttt

SEQ ID NO: 37461 - RNA, 23 nt, Synthetic Construct
  source 1..23: mol_type = other RNA
ggaggggcagagagcgagacttt

SEQ ID NO: 37462 - RNA, 18 nt, Synthetic Construct
  source 1..18: mol_type = other RNA
ggctttgaagtaaggtcg

SEQ ID NO: 37463 - RNA, 18 nt, Synthetic Construct
  source 1..18: mol_type = other RNA
ggctttgaagtaaggtcg

SEQ ID NO: 37464 - RNA, 17 nt, Synthetic Construct
  source 1..17: mol_type = other RNA
ctaatgagactgccggt

SEQ ID NO: 37465 - RNA, 22 nt, Synthetic Construct
  source 1..22: mol_type = other RNA
gtgccgaagctgtgggattgat

SEQ ID NO: 37466 - RNA, 22 nt, Synthetic Construct
  source 1..22: mol_type = other RNA
gtgccgaagctgtgggattgat

SEQ ID NO: 37467 - RNA, 22 nt, Synthetic Construct
  source 1..22: mol_type = other RNA
tggagtgtgacaatggtgttta

SEQ ID NO: 37468 - RNA, 21 nt, Synthetic Construct
  source 1..21: mol_type = other RNA
acagcaggacggtggccatgg

SEQ ID NO: 37469 - RNA, 39 nt, Synthetic Construct; identical to SEQ ID NO: 804
  source 1..39: mol_type = other RNA

SEQ ID NO: 37470 - RNA, 21 nt, Synthetic Construct
  source 1..21: mol_type = other RNA
tggggggcagagagcgagact

SEQ ID NO: 37471 - RNA, 22 nt, Synthetic Construct
  source 1..22: mol_type = other RNA
taaggtagtagtttgtgctgtt

SEQ ID NO: 37472 - RNA, 22 nt, Synthetic Construct
  source 1..22: mol_type = other RNA
taaggtagtagtttgtgctgtt

SEQ ID NO: 37473 - RNA, 21 nt, Synthetic Construct
  source 1..21: mol_type = other RNA
aggttccggataagtaaagcc

SEQ ID NO: 37474 - RNA, 22 nt, Synthetic Construct
  source 1..22: mol_type = other RNA
gagagtaggacgttgccaggtt

SEQ ID NO: 37475 - RNA, 22 nt, Synthetic Construct
  source 1..22: mol_type = other RNA
gagagtaggacgttgccaggtt

SEQ ID NO: 37476 - RNA, 23 nt, Synthetic Construct
  source 1..23: mol_type = other RNA
tgaggtagtaggttgtgtggtaa

SEQ ID NO: 37477 - RNA, 22 nt, Synthetic Construct
  source 1..22: mol_type = other RNA
tattgcatttgtcccggcctgt

SEQ ID NO: 37478 - RNA, 21 nt, Synthetic Construct
  source 1..21: mol_type = other RNA
agaggtagtaggttgtgtggt

SEQ ID NO: 37479 - RNA, 21 nt, Synthetic Construct
  source 1..21: mol_type = other RNA
agaggtagtaggttgtgtggt

SEQ ID NO: 37480 - RNA, 20 nt, Synthetic Construct
  source 1..20: mol_type = other RNA
taccacagggtagaaccacg

SEQ ID NO: 37481 - RNA, 20 nt, Synthetic Construct
  source 1..20: mol_type = other RNA
taccacagggtagaaccacg

SEQ ID NO: 37482 - RNA, 19 nt, Synthetic Construct
  source 1..19: mol_type = other RNA
tctaatgagactgccggtg

SEQ ID NO: 37483 - RNA, 16 nt, Synthetic Construct
  source 1..16: mol_type = other RNA
ttaatccagccagtcc

SEQ ID NO: 37484 - RNA, 16 nt, Synthetic Construct
  source 1..16: mol_type = other RNA
ttaatccagccagtcc

SEQ ID NO: 37485 - RNA, 34 nt, Synthetic Construct; identical to SEQ ID NO: 490
  source 1..34: mol_type = other RNA

SEQ ID NO: 37486 - RNA, 34 nt, Synthetic Construct; identical to SEQ ID NO: 490
  source 1..34: mol_type = other RNA

SEQ ID NO: 37487 - RNA, 16 nt, Synthetic Construct
  source 1..16: mol_type = other RNA
ggcgggagtaactatg

SEQ ID NO: 37488 - RNA, 16 nt, Synthetic Construct
  source 1..16: mol_type = other RNA
ggcgggagtaactatg

SEQ ID NO: 37489 - RNA, 23 nt, Synthetic Construct
  source 1..23: mol_type = other RNA
tcctgcactgagctgccccgagt

SEQ ID NO: 37490 - RNA, 19 nt, Synthetic Construct
  source 1..19: mol_type = other RNA
atcacattgccagggattt

SEQ ID NO: 37491 - RNA, 23 nt, Synthetic Construct
  source 1..23: mol_type = other RNA
tgagaactgaattccatgggttt

SEQ ID NO: 37492 - RNA, 37 nt, Synthetic Construct; identical to SEQ ID NO: 2607
  source 1..37: mol_type = other RNA

SEQ ID NO: 37493 - RNA, 22 nt, Synthetic Construct
  source 1..22: mol_type = other RNA
tcgtaccgtgagtgataatgcg

SEQ ID NO: 37494 - RNA, 21 nt, Synthetic Construct
  source 1..21: mol_type = other RNA
cgaggggcagagagcgagact

SEQ ID NO: 37495 - RNA, 24 nt, Synthetic Construct
  source 1..24: mol_type = other RNA
acagtagtctgcacattggttatt

SEQ ID NO: 37496 - RNA, 31 nt, Synthetic Construct
  source 1..31: mol_type = other RNA
tccctggtggtctagtggttaggattcggcg

SEQ ID NO: 37497 - RNA, 31 nt, Synthetic Construct; identical to SEQ ID NO: 37496
  source 1..31: mol_type = other RNA

SEQ ID NO: 37498 - RNA, 16 nt, Synthetic Construct
  source 1..16: mol_type = other RNA
ttgaccgctctgacca

SEQ ID NO: 37499 - RNA, 21 nt, Synthetic Construct
  source 1..21: mol_type = other RNA
tgaggtagtagatcgtatagt

SEQ ID NO: 37500 - RNA, 21 nt, Synthetic Construct
  source 1..21: mol_type = other RNA
tgaggtagtagatcgtatagt

SEQ ID NO: 37501 - RNA, 22 nt, Synthetic Construct
  source 1..22: mol_type = other RNA
catcgggaatgtcgtgtccgcc

SEQ ID NO: 37502 - RNA, 22 nt, Synthetic Construct
  source 1..22: mol_type = other RNA
catcgggaatgtcgtgtccgcc

SEQ ID NO: 37503 - RNA, 17 nt, Synthetic Construct
  source 1..17: mol_type = other RNA
tcagtagctcgaggaaa

SEQ ID NO: 37504 - RNA, 23 nt, Synthetic Construct
  source 1..23: mol_type = other RNA
tggggggcagagagcgagacttt

SEQ ID NO: 37505 - RNA, 23 nt, Synthetic Construct
  source 1..23: mol_type = other RNA
tggggggcagagagcgagacttt

SEQ ID NO: 37506 - RNA, 34 nt, Synthetic Construct; identical to SEQ ID NO: 2367
  source 1..34: mol_type = other RNA

SEQ ID NO: 37507 - RNA, 34 nt, Synthetic Construct; identical to SEQ ID NO: 2367
  source 1..34: mol_type = other RNA

SEQ ID NO: 37508 - RNA, 20 nt, Synthetic Construct
  source 1..20: mol_type = other RNA
tgaggtagtaggttgtgtga

SEQ ID NO: 37509 - RNA, 32 nt, Synthetic Construct; identical to SEQ ID NO: 734
  source 1..32: mol_type = other RNA

SEQ ID NO: 37510 - RNA, 19 nt, Synthetic Construct
  source 1..19: mol_type = other RNA
agcaggacggtggccatgg

SEQ ID NO: 37511 - RNA, 31 nt, Synthetic Construct; identical to SEQ ID NO: 2310
  source 1..31: mol_type = other RNA

SEQ ID NO: 37512 - RNA, 22 nt, Synthetic Construct
  source 1..22: mol_type = other RNA
gtagtgtttcctactttatgga

SEQ ID NO: 37513 - RNA, 23 nt, Synthetic Construct
  source 1..23: mol_type = other RNA
tgtcagtttgtcaaatacccctt

SEQ ID NO: 37514 - RNA, 23 nt, Synthetic Construct
  source 1..23: mol_type = other RNA
tcatgtactgagctgccccgaga

SEQ ID NO: 37515 - RNA, 23 nt, Synthetic Construct
  source 1..23: mol_type = other RNA
tcatgtactgagctgccccgaga

SEQ ID NO: 37516 - RNA, 32 nt, Synthetic Construct; identical to SEQ ID NO: 989
  source 1..32: mol_type = other RNA

SEQ ID NO: 37517 - RNA, 22 nt, Synthetic Construct
  source 1..22: mol_type = other RNA
agcagcattgtacagggctatt

SEQ ID NO: 37518 - RNA, 23 nt, Synthetic Construct
  source 1..23: mol_type = other RNA
tgaggaagtaggttgtgtggttt

SEQ ID NO: 37519 - RNA, 23 nt, Synthetic Construct
  source 1..23: mol_type = other RNA
tgaggaagtaggttgtgtggttt

SEQ ID NO: 37520 - RNA, 21 nt, Synthetic Construct
  source 1..21: mol_type = other RNA
tggagtgtgacgatggtgttt

SEQ ID NO: 37521 - RNA, 19 nt, Synthetic Construct
  source 1..19: mol_type = other RNA
tgtaaacatccttgactgg

SEQ ID NO: 37522 - RNA, 30 nt, Synthetic Construct; identical to SEQ ID NO: 6467
  source 1..30: mol_type = other RNA

SEQ ID NO: 37523 - RNA, 21 nt, Synthetic Construct
  source 1..21: mol_type = other RNA
gggagtgtgacaatggtgttt

SEQ ID NO: 37524 - RNA, 38 nt, Synthetic Construct; identical to SEQ ID NO: 7148
  source 1..38: mol_type = other RNA

SEQ ID NO: 37525 - RNA, 38 nt, Synthetic Construct; identical to SEQ ID NO: 7148
  source 1..38: mol_type = other RNA

SEQ ID NO: 37526 - RNA, 24 nt, Synthetic Construct
  source 1..24: mol_type = other RNA
agtaaacatccttgactggaagct

SEQ ID NO: 37527 - RNA, 22 nt, Synthetic Construct
  source 1..22: mol_type = other RNA
tcgtaccgtgagtaataatgca

SEQ ID NO: 37528 - RNA, 22 nt, Synthetic Construct
  source 1..22: mol_type = other RNA
tcgtaccgtgagtaataatgca

SEQ ID NO: 37529 - RNA, 22 nt, Synthetic Construct
  source 1..22: mol_type = other RNA
tggagtgtgacaatggtgcttg

SEQ ID NO: 37530 - RNA, 22 nt, Synthetic Construct
  source 1..22: mol_type = other RNA
tggagtgtgacaatggtgcttg

SEQ ID NO: 37531 - RNA, 22 nt, Synthetic Construct
  source 1..22: mol_type = other RNA
tcgtaccgtgagtaataatgtg

SEQ ID NO: 37532 - RNA, 23 nt, Synthetic Construct
  source 1..23: mol_type = other RNA
caacggaatcccaagagcagctg

SEQ ID NO: 37533 - RNA, 22 nt, Synthetic Construct
  source 1..22: mol_type = other RNA
atggatttttggagcagggaga

SEQ ID NO: 37534 - RNA, 22 nt, Synthetic Construct
  source 1..22: mol_type = other RNA
atggatttttggagcagggaga

SEQ ID NO: 37535 - RNA, 22 nt, Synthetic Construct
  source 1..22: mol_type = other RNA
tgaagtagtagtttgtgctgtt

SEQ ID NO: 37536 - RNA, 24 nt, Synthetic Construct
  source 1..24: mol_type = other RNA
acagtagtctgcacattggttatt

SEQ ID NO: 37537 - RNA, 24 nt, Synthetic Construct
  source 1..24: mol_type = other RNA
acagtagtctgcacattggttatt

SEQ ID NO: 37538 - RNA, 22 nt, Synthetic Construct
  source 1..22: mol_type = other RNA
tgaggtagcagtttgtgctgtt

SEQ ID NO: 37539 - RNA, 22 nt, Synthetic Construct
  source 1..22: mol_type = other RNA
tgaggtagcagtttgtgctgtt

SEQ ID NO: 37540 - RNA, 23 nt, Synthetic Construct
  source 1..23: mol_type = other RNA
tgaggtagtaggttgtatagttg

SEQ ID NO: 37541 - RNA, 15 nt, Synthetic Construct
  source 1..15: mol_type = other RNA
ccgcttttgtcaggg

SEQ ID NO: 37542 - RNA, 15 nt, Synthetic Construct
  source 1..15: mol_type = other RNA
ccgcttttgtcaggg

SEQ ID NO: 37543 - RNA, 16 nt, Synthetic Construct
  source 1..16: mol_type = other RNA
gtccacggccatacca

SEQ ID NO: 37544 - RNA, 16 nt, Synthetic Construct
  source 1..16: mol_type = other RNA
taactatgactctctt

SEQ ID NO: 37545 - RNA, 33 nt, Synthetic Construct; identical to SEQ ID NO: 1982
  source 1..33: mol_type = other RNA

SEQ ID NO: 37546 - RNA, 33 nt, Synthetic Construct; identical to SEQ ID NO: 1982
  source 1..33: mol_type = other RNA

SEQ ID NO: 37547 - RNA, 22 nt, Synthetic Construct
  source 1..22: mol_type = other RNA
tgaggtagtaggttgtatggtt

SEQ ID NO: 37548 - RNA, 22 nt, Synthetic Construct
  source 1..22: mol_type = other RNA
tgaggtagtaggttgtatggtt

SEQ ID NO: 37549 - RNA, 22 nt, Synthetic Construct
  source 1..22: mol_type = other RNA
cattgcacctgtctcggtctga

SEQ ID NO: 37550 - RNA, 22 nt, Synthetic Construct
  source 1..22: mol_type = other RNA
tcttggagtaggtcattgggtg

SEQ ID NO: 37551 - RNA, 17 nt, Synthetic Construct
  source 1..17: mol_type = other RNA
cccctggacctgtactg

SEQ ID NO: 37552 - RNA, 17 nt, Synthetic Construct
  source 1..17: mol_type = other RNA
cccctggacctgtactg

SEQ ID NO: 37553 - RNA, 21 nt, Synthetic Construct
  source 1..21: mol_type = other RNA
cagcattgtacagggctatga

SEQ ID NO: 37554 - RNA, 23 nt, Synthetic Construct
  source 1..23: mol_type = other RNA
aggtaatacgacgtacttagtgt

SEQ ID NO: 37555 - RNA, 23 nt, Synthetic Construct
  source 1..23: mol_type = other RNA
aggtaatacgacgtacttagtgt

SEQ ID NO: 37556 - RNA, 23 nt, Synthetic Construct
  source 1..23: mol_type = other RNA
tgggtttacgttgggagaactta

SEQ ID NO: 37557 - RNA, 35 nt, Synthetic Construct; identical to SEQ ID NO: 3369
  source 1..35: mol_type = other RNA

SEQ ID NO: 37558 - RNA, 35 nt, Synthetic Construct; identical to SEQ ID NO: 3369
  source 1..35: mol_type = other RNA

SEQ ID NO: 37559 - RNA, 20 nt, Synthetic Construct
  source 1..20: mol_type = other RNA
tgaggtagtaggttgtgtga

SEQ ID NO: 37560 - RNA, 18 nt, Synthetic Construct
  source 1..18: mol_type = other RNA
ggtagcgtggccgagtgg

SEQ ID NO: 37561 - RNA, 19 nt, Synthetic Construct
  source 1..19: mol_type = other RNA
atctgctggaactgcaact

SEQ ID NO: 37562 - RNA, 19 nt, Synthetic Construct
  source 1..19: mol_type = other RNA
atctgctggaactgcaact

SEQ ID NO: 37563 - RNA, 17 nt, Synthetic Construct
  source 1..17: mol_type = other RNA
gggaacgtgagctgggt

SEQ ID NO: 37564 - RNA, 21 nt, Synthetic Construct
  source 1..21: mol_type = other RNA
tgaggaagtagattgtatagt

SEQ ID NO: 37565 - RNA, 21 nt, Synthetic Construct
  source 1..21: mol_type = other RNA
tgaggaagtagattgtatagt

SEQ ID NO: 37566 - RNA, 24 nt, Synthetic Construct
  source 1..24: mol_type = other RNA
gaggtgtagaataggtgggagctt

SEQ ID NO: 37567 - RNA, 24 nt, Synthetic Construct
  source 1..24: mol_type = other RNA
gaggtgtagaataggtgggagctt

SEQ ID NO: 37568 - RNA, 27 nt, Synthetic Construct
  source 1..27: mol_type = other RNA
acccccactgctaaatttgactggctt

SEQ ID NO: 37569 - RNA, 29 nt, Synthetic Construct
  source 1..29: mol_type = other RNA
gagcgctgagaagacggtcgaacttgact

SEQ ID NO: 37570 - RNA, 29 nt, Synthetic Construct
  source 1..29: mol_type = other RNA
gagcgctgagaagacggtcgaacttgact

SEQ ID NO: 37571 - RNA, 24 nt, Synthetic Construct
  source 1..24: mol_type = other RNA
caacggaatcccaaaagcagcttt

SEQ ID NO: 37572 - RNA, 22 nt, Synthetic Construct
  source 1..22: mol_type = other RNA
tgaggaagtagattgtatagtt

SEQ ID NO: 37573 - RNA, 21 nt, Synthetic Construct
  source 1..21: mol_type = other RNA
tggctcagttcagcaggaaca

SEQ ID NO: 37574 - RNA, 24 nt, Synthetic Construct
  source 1..24: mol_type = other RNA
gttcgattccggagagggagcctg

SEQ ID NO: 37575 - RNA, 24 nt, Synthetic Construct
  source 1..24: mol_type = other RNA
gttcgattccggagagggagcctg

SEQ ID NO: 37576 - RNA, 29 nt, Synthetic Construct
  source 1..29: mol_type = other RNA
cccccccactgctaaatttgactggcttt

SEQ ID NO: 37577 - RNA, 33 nt, Synthetic Construct; identical to SEQ ID NO: 2638
  source 1..33: mol_type = other RNA

SEQ ID NO: 37578 - RNA, 33 nt, Synthetic Construct; identical to SEQ ID NO: 2638
  source 1..33: mol_type = other RNA

SEQ ID NO: 37579 - RNA, 18 nt, Synthetic Construct
  source 1..18: mol_type = other RNA
atcccggacgagccccca

SEQ ID NO: 37580 - RNA, 18 nt, Synthetic Construct
  source 1..18: mol_type = other RNA
atcccggacgagccccca

SEQ ID NO: 37581 - RNA, 22 nt, Synthetic Construct
  source 1..22: mol_type = other RNA
tcgaatccgagtcacggcacca

SEQ ID NO: 37582 - RNA, 22 nt, Synthetic Construct
  source 1..22: mol_type = other RNA
tcgaatccgagtcacggcacca

SEQ ID NO: 37583 - RNA, 27 nt, Synthetic Construct
  source 1..27: mol_type = other RNA
ccccccactgctaaatttggctggcta

SEQ ID NO: 37584 - RNA, 17 nt, Synthetic Construct
  source 1..17: mol_type = other RNA
cctcgcgcgattggagc

SEQ ID NO: 37585 - RNA, 17 nt, Synthetic Construct
  source 1..17: mol_type = other RNA
cctcgcgcgattggagc

SEQ ID NO: 37586 - RNA, 23 nt, Synthetic Construct
  source 1..23: mol_type = other RNA
tggagtgtgacaatggtgtttga

SEQ ID NO: 37587 - RNA, 23 nt, Synthetic Construct
  source 1..23: mol_type = other RNA
tggagtgtgacaatggtgtttga

SEQ ID NO: 37588 - RNA, 22 nt, Synthetic Construct
  source 1..22: mol_type = other RNA
tcataccgtgagtaataatgcg

SEQ ID NO: 37589 - RNA, 31 nt, Synthetic Construct; identical to SEQ ID NO: 14087
  source 1..31: mol_type = other RNA

SEQ ID NO: 37590 - RNA, 31 nt, Synthetic Construct; identical to SEQ ID NO: 14087
  source 1..31: mol_type = other RNA

SEQ ID NO: 37591 - RNA, 22 nt, Synthetic Construct
  source 1..22: mol_type = other RNA
taaggtagtagtttgtgctgtt

SEQ ID NO: 37592 - RNA, 22 nt, Synthetic Construct
  source 1..22: mol_type = other RNA
taaggtagtagtttgtgctgtt

SEQ ID NO: 37593 - RNA, 20 nt, Synthetic Construct
  source 1..20: mol_type = other RNA
aaaccgttaccattactgag

SEQ ID NO: 37594 - RNA, 20 nt, Synthetic Construct
  source 1..20: mol_type = other RNA
aaaccgttaccattactgag

SEQ ID NO: 37595 - RNA, 21 nt, Synthetic Construct
  source 1..21: mol_type = other RNA
tgaggtagtaggatgtgtggt

SEQ ID NO: 37596 - RNA, 21 nt, Synthetic Construct
  source 1..21: mol_type = other RNA
tgaggtagtaggatgtgtggt

SEQ ID NO: 37597 - RNA, 21 nt, Synthetic Construct
  source 1..21: mol_type = other RNA
tggaatgtaaagaagtatgta

SEQ ID NO: 37598 - RNA, 21 nt, Synthetic Construct
  source 1..21: mol_type = other RNA
tggaatgtaaagaagtatgta

SEQ ID NO: 37599 - RNA, 21 nt, Synthetic Construct
  source 1..21: mol_type = other RNA
tccagtactgagctgccccga

SEQ ID NO: 37600 - RNA, 22 nt, Synthetic Construct
  source 1..22: mol_type = other RNA
tagcagcacgtaaatatcggcg

SEQ ID NO: 37601 - RNA, 22 nt, Synthetic Construct
  source 1..22: mol_type = other RNA
tagcagcacgtaaatatcggcg

SEQ ID NO: 37602 - RNA, 21 nt, Synthetic Construct
  source 1..21: mol_type = other RNA
tcctgtacagagctgccccga

SEQ ID NO: 37603 - RNA, 21 nt, Synthetic Construct
  source 1..21: mol_type = other RNA
tcctgtacagagctgccccga

SEQ ID NO: 37604 - RNA, 31 nt, Synthetic Construct; identical to SEQ ID NO: 2310
  source 1..31: mol_type = other RNA

SEQ ID NO: 37605 - RNA, 17 nt, Synthetic Construct
  source 1..17: mol_type = other RNA
atcgtgacgatagtgca

SEQ ID NO: 37606 - RNA, 22 nt, Synthetic Construct
  source 1..22: mol_type = other RNA
tgaggtagtaggttgtgtggtt

SEQ ID NO: 37607 - RNA, 22 nt, Synthetic Construct
  source 1..22: mol_type = other RNA
tgaggtagtaggttgtgtggtt

SEQ ID NO: 37608 - RNA, 25 nt, Synthetic Construct
  source 1..25: mol_type = other RNA
ttgaggatatgagatcgggacgaca

SEQ ID NO: 37609 - RNA, 34 nt, Synthetic Construct; identical to SEQ ID NO: 2019
  source 1..34: mol_type = other RNA

SEQ ID NO: 37610 - RNA, 23 nt, Synthetic Construct
  source 1..23: mol_type = other RNA
aagcttatcagactgatgttgac

SEQ ID NO: 37611 - RNA, 21 nt, Synthetic Construct
  source 1..21: mol_type = other RNA
gtcagtttgtcaaatacccca

SEQ ID NO: 37612 - RNA, 22 nt, Synthetic Construct
  source 1..22: mol_type = other RNA
gcctgtactgagctgccccgag

SEQ ID NO: 37613 - RNA, 23 nt, Synthetic Construct
  source 1..23: mol_type = other RNA
tcgtaccgtgagtaataatgcga

SEQ ID NO: 37614 - RNA, 23 nt, Synthetic Construct
  source 1..23: mol_type = other RNA
tggggggcagagagcgagacttt

SEQ ID NO: 37615 - RNA, 19 nt, Synthetic Construct
  source 1..19: mol_type = other RNA
cgaagacgatcagataccg

SEQ ID NO: 37616 - RNA, 19 nt, Synthetic Construct
  source 1..19: mol_type = other RNA
cgaagacgatcagataccg

SEQ ID NO: 37617 - RNA, 22 nt, Synthetic Construct
  source 1..22: mol_type = other RNA
tattgtacttgtcccggcctgt

SEQ ID NO: 37618 - RNA, 22 nt, Synthetic Construct
  source 1..22: mol_type = other RNA
tattgtacttgtcccggcctgt

SEQ ID NO: 37619 - RNA, 21 nt, Synthetic Construct
  source 1..21: mol_type = other RNA
cgaggtagtagattgtatagt

SEQ ID NO: 37620 - RNA, 24 nt, Synthetic Construct
  source 1..24: mol_type = other RNA
ggtaaacatccccgactggaagct

SEQ ID NO: 37621 - RNA, 22 nt, Synthetic Construct
  source 1..22: mol_type = other RNA
tgaggtagtagtttgtgctgtt

SEQ ID NO: 37622 - RNA, 27 nt, Synthetic Construct
  source 1..27: mol_type = other RNA
ccccccattgctaaatttgactggctt

SEQ ID NO: 37623 - RNA, 18 nt, Synthetic Construct
  source 1..18: mol_type = other RNA
gcagcgatggccgagtgg

SEQ ID NO: 37624 - RNA, 18 nt, Synthetic Construct
  source 1..18: mol_type = other RNA
gcagcgatggccgagtgg

SEQ ID NO: 37625 - RNA, 22 nt, Synthetic Construct
  source 1..22: mol_type = other RNA
tgtcagtttgtcaaataccccg

SEQ ID NO: 37626 - RNA, 23 nt, Synthetic Construct
  source 1..23: mol_type = other RNA
tagcagcacgtaaatattggcgt

SEQ ID NO: 37627 - RNA, 23 nt, Synthetic Construct
  source 1..23: mol_type = other RNA
tagcagcacgtaaatattggcgt

SEQ ID NO: 37628 - RNA, 25 nt, Synthetic Construct
  source 1..25: mol_type = other RNA
tgagaactgaattccatgggttgtt

SEQ ID NO: 37629 - RNA, 25 nt, Synthetic Construct
  source 1..25: mol_type = other RNA
tgagaactgaattccatgggttgtt

SEQ ID NO: 37630 - RNA, 31 nt, Synthetic Construct; identical to SEQ ID NO: 2507
  source 1..31: mol_type = other RNA

SEQ ID NO: 37631 - RNA, 20 nt, Synthetic Construct
  source 1..20: mol_type = other RNA
agaggtagtaggttgtgtgg

SEQ ID NO: 37632 - RNA, 20 nt, Synthetic Construct
  source 1..20: mol_type = other RNA
agaggtagtaggttgtgtgg

SEQ ID NO: 37633 - RNA, 25 nt, Synthetic Construct
  source 1..25: mol_type = other RNA
tcggatccgtctgagcttggctttt

SEQ ID NO: 37634 - RNA, 25 nt, Synthetic Construct
  source 1..25: mol_type = other RNA
ttgagggtatgagatcgagacgaca

SEQ ID NO: 37635 - RNA, 33 nt, Synthetic Construct; identical to SEQ ID NO: 7224
  source 1..33: mol_type = other RNA

SEQ ID NO: 37636 - RNA, 33 nt, Synthetic Construct; identical to SEQ ID NO: 7224
  source 1..33: mol_type = other RNA

SEQ ID NO: 37637 - RNA, 23 nt, Synthetic Construct
  source 1..23: mol_type = other RNA
tgtagtgtttcctactttatgga

SEQ ID NO: 37638 - RNA, 23 nt, Synthetic Construct
  source 1..23: mol_type = other RNA
tgtagtgtttcctactttatgga

SEQ ID NO: 37639 - RNA, 22 nt, Synthetic Construct
  source 1..22: mol_type = other RNA
catagcacttgtctcggtctga

SEQ ID NO: 37640 - RNA, 22 nt, Synthetic Construct
  source 1..22: mol_type = other RNA
tggagagaaaggcagttcctga

SEQ ID NO: 37641 - RNA, 18 nt, Synthetic Construct
  source 1..18: mol_type = other RNA
cgcgacctcagatcagac

SEQ ID NO: 37642 - RNA, 18 nt, Synthetic Construct
  source 1..18: mol_type = other RNA
cgcgacctcagatcagac

SEQ ID NO: 37643 - RNA, 20 nt, Synthetic Construct
  source 1..20: mol_type = other RNA
tggaatgtaaagaagtatgt

SEQ ID NO: 37644 - RNA, 23 nt, Synthetic Construct
  source 1..23: mol_type = other RNA
cattgcacttgtctcggtctgaa

SEQ ID NO: 37645 - RNA, 23 nt, Synthetic Construct
  source 1..23: mol_type = other RNA
cattgcacttgtctcggtctgaa

SEQ ID NO: 37646 - RNA, 23 nt, Synthetic Construct
  source 1..23: mol_type = other RNA
tgaggggcggagagcgagacttt

SEQ ID NO: 37647 - RNA, 23 nt, Synthetic Construct
  source 1..23: mol_type = other RNA
tgaggggcggagagcgagacttt

SEQ ID NO: 37648 - RNA, 21 nt, Synthetic Construct
  source 1..21: mol_type = other RNA
tgaggtggtagattgtatagt

SEQ ID NO: 37649 - RNA, 21 nt, Synthetic Construct
  source 1..21: mol_type = other RNA
tgaggtggtagattgtatagt

SEQ ID NO: 37650 - RNA, 22 nt, Synthetic Construct
  source 1..22: mol_type = other RNA
tggagtgtaaagaagtatgtat

SEQ ID NO: 37651 - RNA, 22 nt, Synthetic Construct
  source 1..22: mol_type = other RNA
tggagtgtaaagaagtatgtat

SEQ ID NO: 37652 - RNA, 19 nt, Synthetic Construct
  source 1..19: mol_type = other RNA
atccctgcggcgtctccat

SEQ ID NO: 37653 - RNA, 25 nt, Synthetic Construct
  source 1..25: mol_type = other RNA
tcttggagtaggtcattgggtgttt

SEQ ID NO: 37654 - RNA, 21 nt, Synthetic Construct
  source 1..21: mol_type = other RNA
tgaggtagtagattgtgtagt

SEQ ID NO: 37655 - RNA, 23 nt, Synthetic Construct
  source 1..23: mol_type = other RNA
tgaggtagtagtttgtgctgttg

SEQ ID NO: 37656 - RNA, 22 nt, Synthetic Construct
  source 1..22: mol_type = other RNA
ccactgccccaggtgctgctgg

SEQ ID NO: 37657 - RNA, 22 nt, Synthetic Construct
  source 1..22: mol_type = other RNA
tattgcacttgtcccagcctgt

SEQ ID NO: 37658 - RNA, 21 nt, Synthetic Construct
  source 1..21: mol_type = other RNA
aacggaatcccaaaagcagct

SEQ ID NO: 37659 - RNA, 35 nt, Synthetic Construct; identical to SEQ ID NO: 1160
  source 1..35: mol_type = other RNA

SEQ ID NO: 37660 - RNA, 35 nt, Synthetic Construct; identical to SEQ ID NO: 1160
  source 1..35: mol_type = other RNA

SEQ ID NO: 37661 - RNA, 27 nt, Synthetic Construct
  source 1..27: mol_type = other RNA
ccccccactactaaatttgactggctt

SEQ ID NO: 37662 - RNA, 22 nt, Synthetic Construct
  source 1..22: mol_type = other RNA
acagtagcctgcacattggtta

SEQ ID NO: 37663 - RNA, 19 nt, Synthetic Construct
  source 1..19: mol_type = other RNA
tagcagcacgtaaatattg

SEQ ID NO: 37664 - RNA, 19 nt, Synthetic Construct
  source 1..19: mol_type = other RNA
tagcagcacgtaaatattg

SEQ ID NO: 37665 - RNA, 23 nt, Synthetic Construct
  source 1..23: mol_type = other RNA
tgaggtagtaggtcgtgtggttt

SEQ ID NO: 37666 - RNA, 23 nt, Synthetic Construct
  source 1..23: mol_type = other RNA
tgaggtagtaggtcgtgtggttt

SEQ ID NO: 37667 - RNA, 23 nt, Synthetic Construct
  source 1..23: mol_type = other RNA
tcctgtactgagctgccccgatt

SEQ ID NO: 37668 - RNA, 25 nt, Synthetic Construct
  source 1..25: mol_type = other RNA
atgaggatatgagatcgagacgaca

SEQ ID NO: 37669 - RNA, 25 nt, Synthetic Construct
  source 1..25: mol_type = other RNA
atgaggatatgagatcgagacgaca

SEQ ID NO: 37670 - RNA, 22 nt, Synthetic Construct
  source 1..22: mol_type = other RNA
cattgcacctgtctcggtctga

SEQ ID NO: 37671 - RNA, 23 nt, Synthetic Construct
  source 1..23: mol_type = other RNA
gttctacagtccgacgatcgatc

SEQ ID NO: 37672 - RNA, 23 nt, Synthetic Construct
  source 1..23: mol_type = other RNA
gttctacagtccgacgatcgatc

SEQ ID NO: 37673 - RNA, 22 nt, Synthetic Construct
  source 1..22: mol_type = other RNA
caatgcacttgtctcggtctga

SEQ ID NO: 37674 - RNA, 22 nt, Synthetic Construct
  source 1..22: mol_type = other RNA
cgttgcacttgtctcggtctga

SEQ ID NO: 37675 - RNA, 19 nt, Synthetic Construct
  source 1..19: mol_type = other RNA
atcccactcctgacaccat

SEQ ID NO: 37676 - RNA, 19 nt, Synthetic Construct
  source 1..19: mol_type = other RNA
atcccactcctgacaccat

SEQ ID NO: 37677 - RNA, 34 nt, Synthetic Construct; identical to SEQ ID NO: 6594
  source 1..34: mol_type = other RNA

SEQ ID NO: 37678 - RNA, 22 nt, Synthetic Construct
  source 1..22: mol_type = other RNA
tgaggtagtaggttgtacagtt

SEQ ID NO: 37679 - RNA, 22 nt, Synthetic Construct
  source 1..22: mol_type = other RNA
tgaggtagtaggttgtacagtt

SEQ ID NO: 37680 - RNA, 21 nt, Synthetic Construct
  source 1..21: mol_type = other RNA
tggggtagtagtttgtgctgt

SEQ ID NO: 37681 - RNA, 24 nt, Synthetic Construct
  source 1..24: mol_type = other RNA
tctctcggctcctcgcggctcgct

SEQ ID NO: 37682 - RNA, 24 nt, Synthetic Construct
  source 1..24: mol_type = other RNA
tctctcggctcctcgcggctcgct

SEQ ID NO: 37683 - RNA, 16 nt, Synthetic Construct
  source 1..16: mol_type = other RNA
tccgaaccgactagtg

SEQ ID NO: 37684 - RNA, 23 nt, Synthetic Construct
  source 1..23: mol_type = other RNA
tgaggtagtaggttgtgcggttt

SEQ ID NO: 37685 - RNA, 17 nt, Synthetic Construct
  source 1..17: mol_type = other RNA
caggacggtggccatgg

SEQ ID NO: 37686 - RNA, 17 nt, Synthetic Construct
  source 1..17: mol_type = other RNA
caggacggtggccatgg

SEQ ID NO: 37687 - RNA, 22 nt, Synthetic Construct
  source 1..22: mol_type = other RNA
ccacagggtagaaccacggact

SEQ ID NO: 37688 - RNA, 33 nt, Synthetic Construct; identical to SEQ ID NO: 4947
  source 1..33: mol_type = other RNA

SEQ ID NO: 37689 - RNA, 33 nt, Synthetic Construct; identical to SEQ ID NO: 4947
  source 1..33: mol_type = other RNA

SEQ ID NO: 37690 - RNA, 22 nt, Synthetic Construct
  source 1..22: mol_type = other RNA
tcaggtagtaggttgtatagtt

SEQ ID NO: 37691 - RNA, 22 nt, Synthetic Construct
  source 1..22: mol_type = other RNA
tcaggtagtaggttgtatagtt

SEQ ID NO: 37692 - RNA, 22 nt, Synthetic Construct
  source 1..22: mol_type = other RNA
tgaggttgtagtttgtgctgtt

SEQ ID NO: 37693 - RNA, 23 nt, Synthetic Construct
  source 1..23: mol_type = other RNA
tgaggtagtaggtcgtgtggttt

SEQ ID NO: 37694 - RNA, 23 nt, Synthetic Construct
  source 1..23: mol_type = other RNA
tgaggtagtaggtcgtgtggttt

SEQ ID NO: 37695 - RNA, 35 nt, Synthetic Construct; identical to SEQ ID NO: 1095
  source 1..35: mol_type = other RNA

SEQ ID NO: 37696 - RNA, 35 nt, Synthetic Construct; identical to SEQ ID NO: 1095
  source 1..35: mol_type = other RNA

SEQ ID NO: 37697 - RNA, 17 nt, Synthetic Construct
  source 1..17: mol_type = other RNA
taggtcatcgtcaggct

SEQ ID NO: 37698 - RNA, 23 nt, Synthetic Construct
  source 1..23: mol_type = other RNA
tggtaatgcgacgtacttagtgt

SEQ ID NO: 37699 - RNA, 23 nt, Synthetic Construct
  source 1..23: mol_type = other RNA
tggtaatgcgacgtacttagtgt

SEQ ID NO: 37700 - RNA, 23 nt, Synthetic Construct
  source 1..23: mol_type = other RNA
tggtaatacgacgtacttaatgt

SEQ ID NO: 37701 - RNA, 22 nt, Synthetic Construct
  source 1..22: mol_type = other RNA
tgaggtagaaggttgtatagtt

SEQ ID NO: 37702 - RNA, 23 nt, Synthetic Construct
  source 1..23: mol_type = other RNA
tagtgcaatattgcttatagggt

SEQ ID NO: 37703 - RNA, 23 nt, Synthetic Construct
  source 1..23: mol_type = other RNA
tagtgcaatattgcttatagggt

SEQ ID NO: 37704 - RNA, 22 nt, Synthetic Construct
  source 1..22: mol_type = other RNA
tgaggtagtagtttgcgctgtt

SEQ ID NO: 37705 - RNA, 22 nt, Synthetic Construct
  source 1..22: mol_type = other RNA
tgaggtagtagtttgcgctgtt

SEQ ID NO: 37706 - RNA, 34 nt, Synthetic Construct; identical to SEQ ID NO: 749
  source 1..34: mol_type = other RNA

SEQ ID NO: 37707 - RNA, 34 nt, Synthetic Construct; identical to SEQ ID NO: 749
  source 1..34: mol_type = other RNA

SEQ ID NO: 37708 - RNA, 23 nt, Synthetic Construct
  source 1..23: mol_type = other RNA
caaagtgccgttcgtgcaggtag

SEQ ID NO: 37709 - RNA, 23 nt, Synthetic Construct
  source 1..23: mol_type = other RNA
caaagtgccgttcgtgcaggtag

SEQ ID NO: 37710 - RNA, 15 nt, Synthetic Construct
  source 1..15: mol_type = other RNA
ggtgaaagcggggga

SEQ ID NO: 37711 - RNA, 15 nt, Synthetic Construct
  source 1..15: mol_type = other RNA
ggtgaaagcggggga

SEQ ID NO: 37712 - RNA, 22 nt, Synthetic Construct
  source 1..22: mol_type = other RNA
tgtagtgtatcctactttatgg

SEQ ID NO: 37713 - RNA, 22 nt, Synthetic Construct
  source 1..22: mol_type = other RNA
tgtagtgtatcctactttatgg

SEQ ID NO: 37714 - RNA, 22 nt, Synthetic Construct
  source 1..22: mol_type = other RNA
tgaggtaataggttgtgtggtt

SEQ ID NO: 37715 - RNA, 17 nt, Synthetic Construct
  source 1..17: mol_type = other RNA
agtgggttatcagaact

SEQ ID NO: 37716 - RNA, 34 nt, Synthetic Construct; identical to SEQ ID NO: 749
  source 1..34: mol_type = other RNA

SEQ ID NO: 37717 - RNA, 34 nt, Synthetic Construct; identical to SEQ ID NO: 749
  source 1..34: mol_type = other RNA

SEQ ID NO: 37718 - RNA, 22 nt, Synthetic Construct
  source 1..22: mol_type = other RNA
tagcagcacgtagatattggcg

SEQ ID NO: 37719 - RNA, 22 nt, Synthetic Construct
  source 1..22: mol_type = other RNA
tagcagcacgtagatattggcg

SEQ ID NO: 37720 - RNA, 31 nt, Synthetic Construct; identical to SEQ ID NO: 7160
  source 1..31: mol_type = other RNA

SEQ ID NO: 37721 - RNA, 15 nt, Synthetic Construct
  source 1..15: mol_type = other RNA
gagtagggcgggaca

SEQ ID NO: 37722 - RNA, 18 nt, Synthetic Construct
  source 1..18: mol_type = other RNA
ggtagcgtggccgagcgg

SEQ ID NO: 37723 - RNA, 22 nt, Synthetic Construct
  source 1..22: mol_type = other RNA
tgaggcagtaggttgtatagtt

SEQ ID NO: 37724 - RNA, 22 nt, Synthetic Construct
  source 1..22: mol_type = other RNA
tgaggcagtaggttgtatagtt

SEQ ID NO: 37725 - RNA, 18 nt, Synthetic Construct
  source 1..18: mol_type = other RNA
gttctacagtccgacgat

SEQ ID NO: 37726 - RNA, 18 nt, Synthetic Construct
  source 1..18: mol_type = other RNA
gttctacagtccgacgat

SEQ ID NO: 37727 - RNA, 23 nt, Synthetic Construct
  source 1..23: mol_type = other RNA
tagcttatcagactgatgttgac

SEQ ID NO: 37728 - RNA, 23 nt, Synthetic Construct
  source 1..23: mol_type = other RNA
tggagagaaaggcagttcctgaa

SEQ ID NO: 37729 - RNA, 23 nt, Synthetic Construct
  source 1..23: mol_type = other RNA
tggagagaaaggcagttcctgaa

SEQ ID NO: 37730 - RNA, 24 nt, Synthetic Construct
  source 1..24: mol_type = other RNA
tagtgcaatattgcttatagggtt

SEQ ID NO: 37731 - RNA, 24 nt, Synthetic Construct
  source 1..24: mol_type = other RNA
tagtgcaatattgcttatagggtt

SEQ ID NO: 37732 - RNA, 21 nt, Synthetic Construct
  source 1..21: mol_type = other RNA
tcctgtactgagctaccccga

SEQ ID NO: 37733 - RNA, 24 nt, Synthetic Construct
  source 1..24: mol_type = other RNA
gaaagattaaggcaagaggttagc

SEQ ID NO: 37734 - RNA, 24 nt, Synthetic Construct
  source 1..24: mol_type = other RNA
gaaagattaaggcaagaggttagc

SEQ ID NO: 37735 - RNA, 17 nt, Synthetic Construct
  source 1..17: mol_type = other RNA
gggtctgtagctcagtc

SEQ ID NO: 37736 - RNA, 17 nt, Synthetic Construct
  source 1..17: mol_type = other RNA
gggtctgtagctcagtc

SEQ ID NO: 37737 - RNA, 21 nt, Synthetic Construct
  source 1..21: mol_type = other RNA
gcctgtactgagctgccccga

SEQ ID NO: 37738 - RNA, 21 nt, Synthetic Construct
  source 1..21: mol_type = other RNA
gcctgtactgagctgccccga

SEQ ID NO: 37739 - RNA, 24 nt, Synthetic Construct
  source 1..24: mol_type = other RNA
agcaacattgtctgctgggtttct

SEQ ID NO: 37740 - RNA, 23 nt, Synthetic Construct
  source 1..23: mol_type = other RNA
tgaggggcagagagcaagacttt

SEQ ID NO: 37741 - RNA, 23 nt, Synthetic Construct
  source 1..23: mol_type = other RNA
agcagcattgtacagggctatgc

SEQ ID NO: 37742 - RNA, 20 nt, Synthetic Construct
  source 1..20: mol_type = other RNA
ttatcagaatctccaggggt

SEQ ID NO: 37743 - RNA, 20 nt, Synthetic Construct
  source 1..20: mol_type = other RNA
ttatcagaatctccaggggt

SEQ ID NO: 37744 - RNA, 23 nt, Synthetic Construct
  source 1..23: mol_type = other RNA
tctttggttatctagctgtatgt

SEQ ID NO: 37745 - RNA, 23 nt, Synthetic Construct
  source 1..23: mol_type = other RNA
tctttggttatctagctgtatgt

SEQ ID NO: 37746 - RNA, 22 nt, Synthetic Construct
  source 1..22: mol_type = other RNA
ttcaagtaatccaggataggtt

SEQ ID NO: 37747 - RNA, 27 nt, Synthetic Construct
  source 1..27: mol_type = other RNA
tcctgagtagctcagcggcagagcggg

SEQ ID NO: 37748 - RNA, 27 nt, Synthetic Construct
  source 1..27: mol_type = other RNA
tcctgagtagctcagcggcagagcggg

SEQ ID NO: 37749 - RNA, 22 nt, Synthetic Construct
  source 1..22: mol_type = other RNA
tagcagcacgtaaatattgacg

SEQ ID NO: 37750 - RNA, 22 nt, Synthetic Construct
  source 1..22: mol_type = other RNA
tagcagcacgtaaatattgacg

SEQ ID NO: 37751 - RNA, 22 nt, Synthetic Construct
  source 1..22: mol_type = other RNA
tattgcacttgacccggcctgt

SEQ ID NO: 37752 - RNA, 22 nt, Synthetic Construct
  source 1..22: mol_type = other RNA
cattgcgcttgtctcggtctga

SEQ ID NO: 37753 - RNA, 22 nt, Synthetic Construct
  source 1..22: mol_type = other RNA
cattgcgcttgtctcggtctga

SEQ ID NO: 37754 - RNA, 21 nt, Synthetic Construct
  source 1..21: mol_type = other RNA
tccagtactgagctgccccga

SEQ ID NO: 37755 - RNA, 22 nt, Synthetic Construct
  source 1..22: mol_type = other RNA
tgagatagtaggttgtatagtt

SEQ ID NO: 37756 - RNA, 23 nt, Synthetic Construct
  source 1..23: mol_type = other RNA
tggctcagttcagcaggaacagt

SEQ ID NO: 37757 - RNA, 30 nt, Synthetic Construct; identical to SEQ ID NO: 1079
  source 1..30: mol_type = other RNA

SEQ ID NO: 37758 - RNA, 27 nt, Synthetic Construct
  source 1..27: mol_type = other RNA
ccccccactgctaaatttgactagctt

SEQ ID NO: 37759 - RNA, 22 nt, Synthetic Construct
  source 1..22: mol_type = other RNA
tagcagcacttaaatattggcg

SEQ ID NO: 37760 - RNA, 22 nt, Synthetic Construct
  source 1..22: mol_type = other RNA
tgaggtagcaggttgtatagtt

SEQ ID NO: 37761 - RNA, 18 nt, Synthetic Construct
  source 1..18: mol_type = other RNA
ctaatgagactgccggtg

SEQ ID NO: 37762 - RNA, 25 nt, Synthetic Construct
  source 1..25: mol_type = other RNA
ttggggatatgagatcgagacgaca

SEQ ID NO: 37763 - RNA, 22 nt, Synthetic Construct
  source 1..22: mol_type = other RNA
ttaatgctaatcgtgatagggt

SEQ ID NO: 37764 - RNA, 36 nt, Synthetic Construct; identical to SEQ ID NO: 2344
  source 1..36: mol_type = other RNA

SEQ ID NO: 37765 - RNA, 21 nt, Synthetic Construct
  source 1..21: mol_type = other RNA
tgaggtagtagattgtgtggt

SEQ ID NO: 37766 - RNA, 21 nt, Synthetic Construct
  source 1..21: mol_type = other RNA
tgaggtagtagattgtgtggt

SEQ ID NO: 37767 - RNA, 20 nt, Synthetic Construct
  source 1..20: mol_type = other RNA
agttctacagtccgacgatc

SEQ ID NO: 37768 - RNA, 20 nt, Synthetic Construct
  source 1..20: mol_type = other RNA
agttctacagtccgacgatc

SEQ ID NO: 37769 - RNA, 22 nt, Synthetic Construct
  source 1..22: mol_type = other RNA
tgagctagtagtttgtgctgtt

SEQ ID NO: 37770 - RNA, 23 nt, Synthetic Construct
  source 1..23: mol_type = other RNA
tagtgcaatattgcttatagggt

SEQ ID NO: 37771 - RNA, 23 nt, Synthetic Construct
  source 1..23: mol_type = other RNA
tagtgcaatattgcttatagggt

SEQ ID NO: 37772 - RNA, 23 nt, Synthetic Construct
  source 1..23: mol_type = other RNA
tcttggagtaggtcattgggtga

SEQ ID NO: 37773 - RNA, 25 nt, Synthetic Construct
  source 1..25: mol_type = other RNA
tgaggggcagagagcgagacttttt

SEQ ID NO: 37774 - RNA, 24 nt, Synthetic Construct
  source 1..24: mol_type = other RNA
atgacacgatcactcccgttgagt

SEQ ID NO: 37775 - RNA, 32 nt, Synthetic Construct; identical to SEQ ID NO: 2467
  source 1..32: mol_type = other RNA

SEQ ID NO: 37776 - RNA, 32 nt, Synthetic Construct; identical to SEQ ID NO: 2467
  source 1..32: mol_type = other RNA

SEQ ID NO: 37777 - RNA, 22 nt, Synthetic Construct
  source 1..22: mol_type = other RNA
tcgtatcgtgagtaataatgcg

SEQ ID NO: 37778 - RNA, 21 nt, Synthetic Construct
  source 1..21: mol_type = other RNA
atcacattgccagggatttcc

SEQ ID NO: 37779 - RNA, 21 nt, Synthetic Construct
  source 1..21: mol_type = other RNA
atcacattgccagggatttcc

SEQ ID NO: 37780 - RNA, 23 nt, Synthetic Construct
  source 1..23: mol_type = other RNA
tgagaggcagagagcgagacttt

SEQ ID NO: 37781 - RNA, 21 nt, Synthetic Construct
  source 1..21: mol_type = other RNA
cgaggtagtagtttgtgctgt

SEQ ID NO: 37782 - RNA, 24 nt, Synthetic Construct
  source 1..24: mol_type = other RNA
agcagcattgtacagggctatgat

SEQ ID NO: 37783 - RNA, 24 nt, Synthetic Construct
  source 1..24: mol_type = other RNA
agcagcattgtacagggctatgat

SEQ ID NO: 37784 - RNA, 22 nt, Synthetic Construct
  source 1..22: mol_type = other RNA
cattgcacttgtcccggcctgt

SEQ ID NO: 37785 - RNA, 23 nt, Synthetic Construct
  source 1..23: mol_type = other RNA
ttggtccccttcaaccagctgtt

SEQ ID NO: 37786 - RNA, 21 nt, Synthetic Construct
  source 1..21: mol_type = other RNA
caacggaatcccaaaagcagc

SEQ ID NO: 37787 - RNA, 21 nt, Synthetic Construct
  source 1..21: mol_type = other RNA
caacggaatcccaaaagcagc

SEQ ID NO: 37788 - RNA, 24 nt, Synthetic Construct
  source 1..24: mol_type = other RNA
agcaacattgtctgctgggtttct

SEQ ID NO: 37789 - RNA, 24 nt, Synthetic Construct
  source 1..24: mol_type = other RNA
agcaacattgtctgctgggtttct

SEQ ID NO: 37790 - RNA, 22 nt, Synthetic Construct
  source 1..22: mol_type = other RNA
tatcagcacgtaaatattggcg

SEQ ID NO: 37791 - RNA, 21 nt, Synthetic Construct
  source 1..21: mol_type = other RNA
tgaagtagtaggttgtatagt

SEQ ID NO: 37792 - RNA, 34 nt, Synthetic Construct; identical to SEQ ID NO: 16999
  source 1..34: mol_type = other RNA

SEQ ID NO: 37793 - RNA, 26 nt, Synthetic Construct
  source 1..26: mol_type = other RNA
cgactcttagcggtggatcactcggc

SEQ ID NO: 37794 - RNA, 25 nt, Synthetic Construct
  source 1..25: mol_type = other RNA
catgttggaacaatgtaggtaaggg

SEQ ID NO: 37795 - RNA, 19 nt, Synthetic Construct
  source 1..19: mol_type = other RNA
tccctgagaccctaacttg

SEQ ID NO: 37796 - RNA, 19 nt, Synthetic Construct
  source 1..19: mol_type = other RNA
tccctgagaccctaacttg

SEQ ID NO: 37797 - RNA, 41 nt, Synthetic Construct; identical to SEQ ID NO: 8929
  source 1..41: mol_type = other RNA

SEQ ID NO: 37798 - RNA, 41 nt, Synthetic Construct; identical to SEQ ID NO: 8929
  source 1..41: mol_type = other RNA

SEQ ID NO: 37799 - RNA, 23 nt, Synthetic Construct
  source 1..23: mol_type = other RNA
tgagaggcagagagcgagacttt

SEQ ID NO: 37800 - RNA, 23 nt, Synthetic Construct
  source 1..23: mol_type = other RNA
tgagaggcagagagcgagacttt

SEQ ID NO: 37801 - RNA, 22 nt, Synthetic Construct
  source 1..22: mol_type = other RNA
tgtgactggttgaccagagggt

SEQ ID NO: 37802 - RNA, 20 nt, Synthetic Construct
  source 1..20: mol_type = other RNA
tgaggtagtgggttgtgtgg

SEQ ID NO: 37803 - RNA, 22 nt, Synthetic Construct
  source 1..22: mol_type = other RNA
taactccttaagcgagtctcgc

SEQ ID NO: 37804 - RNA, 23 nt, Synthetic Construct
  source 1..23: mol_type = other RNA
tgaggtagtaggttgcgtggttt

SEQ ID NO: 37805 - RNA, 23 nt, Synthetic Construct
  source 1..23: mol_type = other RNA
tgaggtagtaggttgcgtggttt

SEQ ID NO: 37806 - RNA, 23 nt, Synthetic Construct
  source 1..23: mol_type = other RNA
tgaggtagtaggttgtgtggtat

SEQ ID NO: 37807 - RNA, 23 nt, Synthetic Construct
  source 1..23: mol_type = other RNA
tcctgtactgagctgccccgagt

SEQ ID NO: 37808 - RNA, 23 nt, Synthetic Construct
  source 1..23: mol_type = other RNA
tcctgtactgagctgccccgagt

SEQ ID NO: 37809 - RNA, 21 nt, Synthetic Construct
  source 1..21: mol_type = other RNA
tgaggtagtaggttgtatagc

SEQ ID NO: 37810 - RNA, 22 nt, Synthetic Construct
  source 1..22: mol_type = other RNA
ttatcagaatctccaggggtac

SEQ ID NO: 37811 - RNA, 32 nt, Synthetic Construct; identical to SEQ ID NO: 2467
  source 1..32: mol_type = other RNA

SEQ ID NO: 37812 - RNA, 32 nt, Synthetic Construct; identical to SEQ ID NO: 2467
  source 1..32: mol_type = other RNA

SEQ ID NO: 37813 - RNA, 22 nt, Synthetic Construct
  source 1..22: mol_type = other RNA
tattgcacttgtcccggcctat

SEQ ID NO: 37814 - RNA, 22 nt, Synthetic Construct
  source 1..22: mol_type = other RNA
tattgcacttgtcccggcctat

SEQ ID NO: 37815 - RNA, 21 nt, Synthetic Construct
  source 1..21: mol_type = other RNA
caaagtgctgttcgtgcaggt

SEQ ID NO: 37816 - RNA, 29 nt, Synthetic Construct
  source 1..29: mol_type = other RNA
cccccccactgctaaatttgactggcttt

SEQ ID NO: 37817 - RNA, 23 nt, Synthetic Construct
  source 1..23: mol_type = other RNA
tgaggtagcaggttgtgtggttt

SEQ ID NO: 37818 - RNA, 23 nt, Synthetic Construct
  source 1..23: mol_type = other RNA
tggcaatacgacgtacttagtgt

SEQ ID NO: 37819 - RNA, 23 nt, Synthetic Construct
  source 1..23: mol_type = other RNA
tggcaatacgacgtacttagtgt

SEQ ID NO: 37820 - RNA, 23 nt, Synthetic Construct
  source 1..23: mol_type = other RNA
tggtagtacgacgtacttagtgt

SEQ ID NO: 37821 - RNA, 19 nt, Synthetic Construct
  source 1..19: mol_type = other RNA
cccttgtcattagttgcta

SEQ ID NO: 37822 - RNA, 19 nt, Synthetic Construct
  source 1..19: mol_type = other RNA
cccttgtcattagttgcta

SEQ ID NO: 37823 - RNA, 23 nt, Synthetic Construct
  source 1..23: mol_type = other RNA
agctacattgtctgctgggttcc

SEQ ID NO: 37824 - RNA, 23 nt, Synthetic Construct
  source 1..23: mol_type = other RNA
agctacattgtctgctgggttcc

SEQ ID NO: 37825 - RNA, 23 nt, Synthetic Construct
  source 1..23: mol_type = other RNA
tgaggaagtaggttgtgtggttt

SEQ ID NO: 37826 - RNA, 16 nt, Synthetic Construct
  source 1..16: mol_type = other RNA
agttgaccgcctgggg

SEQ ID NO: 37827 - RNA, 23 nt, Synthetic Construct
  source 1..23: mol_type = other RNA
tcctgaactgagctgccccgaga

SEQ ID NO: 37828 - RNA, 24 nt, Synthetic Construct
  source 1..24: mol_type = other RNA
ttcaagtaatccaggataggcttt

SEQ ID NO: 37829 - RNA, 23 nt, Synthetic Construct
  source 1..23: mol_type = other RNA
gtcagtttgtcaaataccccaaa

SEQ ID NO: 37830 - RNA, 23 nt, Synthetic Construct
  source 1..23: mol_type = other RNA
gtcagtttgtcaaataccccaaa

SEQ ID NO: 37831 - RNA, 22 nt, Synthetic Construct
  source 1..22: mol_type = other RNA
tcagtgcactacagaactttga

SEQ ID NO: 37832 - RNA, 21 nt, Synthetic Construct
  source 1..21: mol_type = other RNA
aggagtgtgacaatggtgttt

SEQ ID NO: 37833 - RNA, 22 nt, Synthetic Construct
  source 1..22: mol_type = other RNA
cttaacttgaccgctctgacca

SEQ ID NO: 37834 - RNA, 22 nt, Synthetic Construct
  source 1..22: mol_type = other RNA
tcctgtactaagctgccccgag

SEQ ID NO: 37835 - RNA, 22 nt, Synthetic Construct
  source 1..22: mol_type = other RNA
tgaggaagtaggttgtatagtt

SEQ ID NO: 37836 - RNA, 22 nt, Synthetic Construct
  source 1..22: mol_type = other RNA
tgaggaagtaggttgtatagtt

SEQ ID NO: 37837 - RNA, 20 nt, Synthetic Construct
  source 1..20: mol_type = other RNA
ggtcccaagggtatggctgt

SEQ ID NO: 37838 - RNA, 22 nt, Synthetic Construct
  source 1..22: mol_type = other RNA
tattgcacttgttccggcctgt

SEQ ID NO: 37839 - RNA, 22 nt, Synthetic Construct
  source 1..22: mol_type = other RNA
tattgcacttgttccggcctgt

SEQ ID NO: 37840 - RNA, 23 nt, Synthetic Construct
  source 1..23: mol_type = other RNA
ttaatgctaatcgtgataggggt

SEQ ID NO: 37841 - RNA, 32 nt, Synthetic Construct; identical to SEQ ID NO: 1238
  source 1..32: mol_type = other RNA

SEQ ID NO: 37842 - RNA, 21 nt, Synthetic Construct
  source 1..21: mol_type = other RNA
taggtagtttcctgttgttgg

SEQ ID NO: 37843 - RNA, 21 nt, Synthetic Construct
  source 1..21: mol_type = other RNA
taggtagtttcctgttgttgg

SEQ ID NO: 37844 - RNA, 36 nt, Synthetic Construct; identical to SEQ ID NO: 2478
  source 1..36: mol_type = other RNA

SEQ ID NO: 37845 - RNA, 40 nt, Synthetic Construct
  source 1..40: mol_type = other RNA
cacgcgggagaccggggttcgattccccgacggggagcca

SEQ ID NO: 37846 - RNA, 40 nt, Synthetic Construct; identical to SEQ ID NO: 37845
  source 1..40: mol_type = other RNA

SEQ ID NO: 37847 - RNA, 31 nt, Synthetic Construct; identical to SEQ ID NO: 2442
  source 1..31: mol_type = other RNA

SEQ ID NO: 37848 - RNA, 41 nt, Synthetic Construct; identical to SEQ ID NO: 10630
  source 1..41: mol_type = other RNA

SEQ ID NO: 37849 - RNA, 20 nt, Synthetic Construct
  source 1..20: mol_type = other RNA
tggagtgtgacaatggtgtt

SEQ ID NO: 37850 - RNA, 20 nt, Synthetic Construct
  source 1..20: mol_type = other RNA
tggagtgtgacaatggtgtt

SEQ ID NO: 37851 - RNA, 22 nt, Synthetic Construct
  source 1..22: mol_type = other RNA
tagcagcacgtaaatataggcg

SEQ ID NO: 37852 - RNA, 28 nt, Synthetic Construct
  source 1..28: mol_type = other RNA
ccgtgtgaaagtaggtcatcgtcaggct

SEQ ID NO: 37853 - RNA, 22 nt, Synthetic Construct
  source 1..22: mol_type = other RNA
tgagatagtaggttgtgtggtt

SEQ ID NO: 37854 - RNA, 24 nt, Synthetic Construct
  source 1..24: mol_type = other RNA
ttcaagtaattcaggataggttgt

SEQ ID NO: 37855 - RNA, 37 nt, Synthetic Construct; identical to SEQ ID NO: 2447
  source 1..37: mol_type = other RNA

SEQ ID NO: 37856 - RNA, 37 nt, Synthetic Construct; identical to SEQ ID NO: 2447
  source 1..37: mol_type = other RNA

SEQ ID NO: 37857 - RNA, 18 nt, Synthetic Construct
  source 1..18: mol_type = other RNA
tcgacgctagcggatcct

SEQ ID NO: 37858 - RNA, 18 nt, Synthetic Construct
  source 1..18: mol_type = other RNA
tcgacgctagcggatcct

SEQ ID NO: 37859 - RNA, 23 nt, Synthetic Construct
  source 1..23: mol_type = other RNA
taccctgtagatccgaatttgtg

SEQ ID NO: 37860 - RNA, 21 nt, Synthetic Construct
  source 1..21: mol_type = other RNA
cctctgggcccttcctccagt

SEQ ID NO: 37861 - RNA, 21 nt, Synthetic Construct
  source 1..21: mol_type = other RNA
cctctgggcccttcctccagt

SEQ ID NO: 37862 - RNA, 22 nt, Synthetic Construct
  source 1..22: mol_type = other RNA
atgacacgatcactcccgttga

SEQ ID NO: 37863 - RNA, 23 nt, Synthetic Construct
  source 1..23: mol_type = other RNA
cgaggtagtaggttgtgtggttt

SEQ ID NO: 37864 - RNA, 25 nt, Synthetic Construct
  source 1..25: mol_type = other RNA
ttgaggatatgggatcgagacgaca

SEQ ID NO: 37865 - RNA, 29 nt, Synthetic Construct
  source 1..29: mol_type = other RNA
cgctaaaccattcgtagacgacctgcttc

SEQ ID NO: 37866 - RNA, 29 nt, Synthetic Construct
  source 1..29: mol_type = other RNA
cgctaaaccattcgtagacgacctgcttc

SEQ ID NO: 37867 - RNA, 21 nt, Synthetic Construct
  source 1..21: mol_type = other RNA
tgaggtagaaggttgtatagt

SEQ ID NO: 37868 - RNA, 25 nt, Synthetic Construct
  source 1..25: mol_type = other RNA
tagtgcaatattgcttatagggttt

SEQ ID NO: 37869 - RNA, 16 nt, Synthetic Construct
  source 1..16: mol_type = other RNA
gtctacggccataccc

SEQ ID NO: 37870 - RNA, 16 nt, Synthetic Construct
  source 1..16: mol_type = other RNA
gtctacggccataccc

SEQ ID NO: 37871 - RNA, 22 nt, Synthetic Construct
  source 1..22: mol_type = other RNA
ttcaagtaatccaggataggct

SEQ ID NO: 37872 - RNA, 22 nt, Synthetic Construct
  source 1..22: mol_type = other RNA
tgaggtagtagtctgtgctgtt

SEQ ID NO: 37873 - RNA, 22 nt, Synthetic Construct
  source 1..22: mol_type = other RNA
tgaggtagtagtctgtgctgtt

SEQ ID NO: 37874 - RNA, 23 nt, Synthetic Construct
  source 1..23: mol_type = other RNA
tggaatgtaaagaagtatgtacc

SEQ ID NO: 37875 - RNA, 21 nt, Synthetic Construct
  source 1..21: mol_type = other RNA
ctagactgaagctccttgaga

SEQ ID NO: 37876 - RNA, 23 nt, Synthetic Construct
  source 1..23: mol_type = other RNA
tgaggtagtaggttgtgcggttt

SEQ ID NO: 37877 - RNA, 21 nt, Synthetic Construct
  source 1..21: mol_type = other RNA
actggacttggagtcagaagg

SEQ ID NO: 37878 - RNA, 21 nt, Synthetic Construct
  source 1..21: mol_type = other RNA
actggacttggagtcagaagg

SEQ ID NO: 37879 - RNA, 22 nt, Synthetic Construct
  source 1..22: mol_type = other RNA
tagcagcacgtaaatgttggcg

SEQ ID NO: 37880 - RNA, 22 nt, Synthetic Construct
  source 1..22: mol_type = other RNA
tagcagcacgtaaatgttggcg

SEQ ID NO: 37881 - RNA, 29 nt, Synthetic Construct
  source 1..29: mol_type = other RNA
cccccccactgctaaatttgactggctta

SEQ ID NO: 37882 - RNA, 22 nt, Synthetic Construct
  source 1..22: mol_type = other RNA
tagcagcgcgtaaatattggcg

SEQ ID NO: 37883 - RNA, 22 nt, Synthetic Construct
  source 1..22: mol_type = other RNA
tagcagcgcgtaaatattggcg

SEQ ID NO: 37884 - RNA, 21 nt, Synthetic Construct
  source 1..21: mol_type = other RNA
tccctgagaccctaacttgtg

SEQ ID NO: 37885 - RNA, 21 nt, Synthetic Construct
  source 1..21: mol_type = other RNA
tccctgagaccctaacttgtg

SEQ ID NO: 37886 - RNA, 23 nt, Synthetic Construct
  source 1..23: mol_type = other RNA
tgaggtagtaggtcgtgtggttt

SEQ ID NO: 37887 - RNA, 23 nt, Synthetic Construct
  source 1..23: mol_type = other RNA
tgaggtagtaggtcgtgtggttt

SEQ ID NO: 37888 - RNA, 20 nt, Synthetic Construct
  source 1..20: mol_type = other RNA
tgaggtagaaggttgtatag

SEQ ID NO: 37889 - RNA, 22 nt, Synthetic Construct
  source 1..22: mol_type = other RNA
tagcagcacgtaaatgttggcg

SEQ ID NO: 37890 - RNA, 23 nt, Synthetic Construct
  source 1..23: mol_type = other RNA
tcaggctcagtcccctcccgttt

SEQ ID NO: 37891 - RNA, 23 nt, Synthetic Construct
  source 1..23: mol_type = other RNA
tcaggctcagtcccctcccgttt

SEQ ID NO: 37892 - RNA, 21 nt, Synthetic Construct
  source 1..21: mol_type = other RNA
cgtaccgtgagtaataaagcg

SEQ ID NO: 37893 - RNA, 24 nt, Synthetic Construct
  source 1..24: mol_type = other RNA
cgaatgttgctcggtgaacccctt

SEQ ID NO: 37894 - RNA, 24 nt, Synthetic Construct
  source 1..24: mol_type = other RNA
cgaatgttgctcggtgaacccctt

SEQ ID NO: 37895 - RNA, 27 nt, Synthetic Construct
  source 1..27: mol_type = other RNA
ccccccactgctaaatttaactggctt

SEQ ID NO: 37896 - RNA, 27 nt, Synthetic Construct
  source 1..27: mol_type = other RNA
ccccccactgctaaatttaactggctt

SEQ ID NO: 37897 - RNA, 23 nt, Synthetic Construct
  source 1..23: mol_type = other RNA
cagagttctacagtccgacgatc

SEQ ID NO: 37898 - RNA, 23 nt, Synthetic Construct
  source 1..23: mol_type = other RNA
cagagttctacagtccgacgatc

SEQ ID NO: 37899 - RNA, 25 nt, Synthetic Construct
  source 1..25: mol_type = other RNA
agctacatctggctactgggtctct

SEQ ID NO: 37900 - RNA, 25 nt, Synthetic Construct
  source 1..25: mol_type = other RNA
agctacatctggctactgggtctct

SEQ ID NO: 37901 - RNA, 27 nt, Synthetic Construct
  source 1..27: mol_type = other RNA
cccctcactgctaaatttgactggctt

SEQ ID NO: 37902 - RNA, 22 nt, Synthetic Construct
  source 1..22: mol_type = other RNA
tagcagcacgaaaatattggcg

SEQ ID NO: 37903 - RNA, 22 nt, Synthetic Construct
  source 1..22: mol_type = other RNA
tagcagcacgaaaatattggcg

SEQ ID NO: 37904 - RNA, 23 nt, Synthetic Construct
  source 1..23: mol_type = other RNA
aatgacacgatcactcccgttgt

SEQ ID NO: 37905 - RNA, 23 nt, Synthetic Construct
  source 1..23: mol_type = other RNA
aatgacacgatcactcccgttgt

SEQ ID NO: 37906 - RNA, 23 nt, Synthetic Construct
  source 1..23: mol_type = other RNA
tcaggctcagtcccctcccgttt

SEQ ID NO: 37907 - RNA, 23 nt, Synthetic Construct
  source 1..23: mol_type = other RNA
tcaggctcagtcccctcccgttt

SEQ ID NO: 37908 - RNA, 22 nt, Synthetic Construct
  source 1..22: mol_type = other RNA
ccgtaccgtgagtaataatgcg

SEQ ID NO: 37909 - RNA, 22 nt, Synthetic Construct
  source 1..22: mol_type = other RNA
ccgtaccgtgagtaataatgcg

SEQ ID NO: 37910 - RNA, 23 nt, Synthetic Construct
  source 1..23: mol_type = other RNA
tcctgaactgagctgccccgagt

SEQ ID NO: 37911 - RNA, 32 nt, Synthetic Construct; identical to SEQ ID NO: 18425
  source 1..32: mol_type = other RNA

SEQ ID NO: 37912 - RNA, 22 nt, Synthetic Construct
  source 1..22: mol_type = other RNA
cggaatcgctagtaatcgcgga

SEQ ID NO: 37913 - RNA, 33 nt, Synthetic Construct; identical to SEQ ID NO: 1982
  source 1..33: mol_type = other RNA

SEQ ID NO: 37914 - RNA, 33 nt, Synthetic Construct; identical to SEQ ID NO: 1982
  source 1..33: mol_type = other RNA

SEQ ID NO: 37915 - RNA, 23 nt, Synthetic Construct
  source 1..23: mol_type = other RNA
tggaatgtaaagaagtatgtata

SEQ ID NO: 37916 - RNA, 23 nt, Synthetic Construct
  source 1..23: mol_type = other RNA
tggaatgtaaagaagtatgtata

SEQ ID NO: 37917 - RNA, 20 nt, Synthetic Construct
  source 1..20: mol_type = other RNA
tgaggaagtaggttgtgtgg

SEQ ID NO: 37918 - RNA, 17 nt, Synthetic Construct
  source 1..17: mol_type = other RNA
agggaacgtgagctggg

SEQ ID NO: 37919 - RNA, 17 nt, Synthetic Construct
  source 1..17: mol_type = other RNA
agggaacgtgagctggg

SEQ ID NO: 37920 - RNA, 21 nt, Synthetic Construct
  source 1..21: mol_type = other RNA
taactccttaagcgatctcgc

SEQ ID NO: 37921 - RNA, 21 nt, Synthetic Construct
  source 1..21: mol_type = other RNA
taactccttaagcgatctcgc

SEQ ID NO: 37922 - RNA, 23 nt, Synthetic Construct
  source 1..23: mol_type = other RNA
tgaggtagtagtttgtgctgtaa

SEQ ID NO: 37923 - RNA, 16 nt, Synthetic Construct
  source 1..16: mol_type = other RNA
cgtgagctgggtttag

SEQ ID NO: 37924 - RNA, 16 nt, Synthetic Construct
  source 1..16: mol_type = other RNA
cgtgagctgggtttag

SEQ ID NO: 37925 - RNA, 18 nt, Synthetic Construct
  source 1..18: mol_type = other RNA
gtcacggtggccgagtgg

SEQ ID NO: 37926 - RNA, 21 nt, Synthetic Construct
  source 1..21: mol_type = other RNA
tcctgtactgagctgcaccga

SEQ ID NO: 37927 - RNA, 22 nt, Synthetic Construct
  source 1..22: mol_type = other RNA
tattgcactcgtcccggcctcc

SEQ ID NO: 37928 - RNA, 21 nt, Synthetic Construct
  source 1..21: mol_type = other RNA
agctacattgtctgctgggtt

SEQ ID NO: 37929 - RNA, 27 nt, Synthetic Construct
  source 1..27: mol_type = other RNA
cgcgggtaaacggcgggagtaactatg

SEQ ID NO: 37930 - RNA, 22 nt, Synthetic Construct
  source 1..22: mol_type = other RNA
tagcagcacgtgaatattggcg

SEQ ID NO: 37931 - RNA, 22 nt, Synthetic Construct
  source 1..22: mol_type = other RNA
tagcagcacgtgaatattggcg

SEQ ID NO: 37932 - RNA, 22 nt, Synthetic Construct
  source 1..22: mol_type = other RNA
tgaggtagcagtttgtgctgtt

SEQ ID NO: 37933 - RNA, 22 nt, Synthetic Construct
  source 1..22: mol_type = other RNA
tgaggtagcagtttgtgctgtt

SEQ ID NO: 37934 - RNA, 23 nt, Synthetic Construct
  source 1..23: mol_type = other RNA
tacagtactgtgataactgaaga

SEQ ID NO: 37935 - RNA, 23 nt, Synthetic Construct
  source 1..23: mol_type = other RNA
tacagtactgtgataactgaaga

SEQ ID NO: 37936 - RNA, 21 nt, Synthetic Construct
  source 1..21: mol_type = other RNA
tcctgtactgagctgcctcga

SEQ ID NO: 37937 - RNA, 20 nt, Synthetic Construct
  source 1..20: mol_type = other RNA
ggaggtagtaggttgtatag

SEQ ID NO: 37938 - RNA, 20 nt, Synthetic Construct
  source 1..20: mol_type = other RNA
ggaggtagtaggttgtatag

SEQ ID NO: 37939 - RNA, 23 nt, Synthetic Construct
  source 1..23: mol_type = other RNA
tgaggggtagagagcgagacttt

SEQ ID NO: 37940 - RNA, 24 nt, Synthetic Construct
  source 1..24: mol_type = other RNA
tccctgagaccctttaacctgtgt

SEQ ID NO: 37941 - RNA, 22 nt, Synthetic Construct
  source 1..22: mol_type = other RNA
tgaggtaggaggttgtatagtt

SEQ ID NO: 37942 - RNA, 22 nt, Synthetic Construct
  source 1..22: mol_type = other RNA
agtggggaacccttccatgagg

SEQ ID NO: 37943 - RNA, 23 nt, Synthetic Construct
  source 1..23: mol_type = other RNA
tgaggtagtaggttgtgtggttt

SEQ ID NO: 37944 - RNA, 15 nt, Synthetic Construct
  source 1..15: mol_type = other RNA
gccgttcttagttgg

SEQ ID NO: 37945 - RNA, 22 nt, Synthetic Construct
  source 1..22: mol_type = other RNA
tgaggtagtagtttgtgctgct

SEQ ID NO: 37946 - RNA, 22 nt, Synthetic Construct
  source 1..22: mol_type = other RNA
tgaggtagtagtttgtgctgct

SEQ ID NO: 37947 - RNA, 20 nt, Synthetic Construct
  source 1..20: mol_type = other RNA
tgtcttgcaggccgtcatgc

SEQ ID NO: 37948 - RNA, 20 nt, Synthetic Construct
  source 1..20: mol_type = other RNA
tgtcttgcaggccgtcatgc

SEQ ID NO: 37949 - RNA, 24 nt, Synthetic Construct
  source 1..24: mol_type = other RNA
taccacagggtagaaccacggact

SEQ ID NO: 37950 - RNA, 24 nt, Synthetic Construct
  source 1..24: mol_type = other RNA
taccacagggtagaaccacggact

SEQ ID NO: 37951 - RNA, 25 nt, Synthetic Construct
  source 1..25: mol_type = other RNA
tcggatccgtctgagcttggctttt

SEQ ID NO: 37952 - RNA, 22 nt, Synthetic Construct
  source 1..22: mol_type = other RNA
cactgcacttgtctcggtctga

SEQ ID NO: 37953 - RNA, 22 nt, Synthetic Construct
  source 1..22: mol_type = other RNA
cactgcacttgtctcggtctga

SEQ ID NO: 37954 - RNA, 18 nt, Synthetic Construct
  source 1..18: mol_type = other RNA
gcaggacggtggccatgg

SEQ ID NO: 37955 - RNA, 18 nt, Synthetic Construct
  source 1..18: mol_type = other RNA
gcaggacggtggccatgg

SEQ ID NO: 37956 - RNA, 22 nt, Synthetic Construct
  source 1..22: mol_type = other RNA
gcacattacacggtcgacctct

SEQ ID NO: 37957 - RNA, 22 nt, Synthetic Construct
  source 1..22: mol_type = other RNA
gcacattacacggtcgacctct

SEQ ID NO: 37958 - RNA, 16 nt, Synthetic Construct
  source 1..16: mol_type = other RNA
ggccgttcttagttgg

SEQ ID NO: 37959 - RNA, 16 nt, Synthetic Construct
  source 1..16: mol_type = other RNA
ggccgttcttagttgg

SEQ ID NO: 37960 - RNA, 24 nt, Synthetic Construct
  source 1..24: mol_type = other RNA
tgtcagtttgtcaaataccccaag

SEQ ID NO: 37961 - RNA, 24 nt, Synthetic Construct
  source 1..24: mol_type = other RNA
tgtcagtttgtcaaataccccaag

SEQ ID NO: 37962 - RNA, 22 nt, Synthetic Construct
  source 1..22: mol_type = other RNA
ggaggtagtaggttgtgtggtt

SEQ ID NO: 37963 - RNA, 22 nt, Synthetic Construct
  source 1..22: mol_type = other RNA
ggaggtagtaggttgtgtggtt

SEQ ID NO: 37964 - RNA, 18 nt, Synthetic Construct
  source 1..18: mol_type = other RNA
agcagcattgtacagggc

SEQ ID NO: 37965 - RNA, 22 nt, Synthetic Construct
  source 1..22: mol_type = other RNA
agcagcattgtacagggctatt

SEQ ID NO: 37966 - RNA, 22 nt, Synthetic Construct
  source 1..22: mol_type = other RNA
tcgtaccgtgagtaacaatgcg

SEQ ID NO: 37967 - RNA, 22 nt, Synthetic Construct
  source 1..22: mol_type = other RNA
tcgtaccgtgagtaacaatgcg

SEQ ID NO: 37968 - RNA, 23 nt, Synthetic Construct
  source 1..23: mol_type = other RNA
tagcttatcagactgatgttgaa

SEQ ID NO: 37969 - RNA, 19 nt, Synthetic Construct
  source 1..19: mol_type = other RNA
gagaaagctcacaagaact

SEQ ID NO: 37970 - RNA, 19 nt, Synthetic Construct
  source 1..19: mol_type = other RNA
gagaaagctcacaagaact

SEQ ID NO: 37971 - RNA, 23 nt, Synthetic Construct
  source 1..23: mol_type = other RNA
gttctacagtccgacgatcgatc

SEQ ID NO: 37972 - RNA, 23 nt, Synthetic Construct
  source 1..23: mol_type = other RNA
gttctacagtccgacgatcgatc

SEQ ID NO: 37973 - RNA, 23 nt, Synthetic Construct
  source 1..23: mol_type = other RNA
tgtcagtttgtcaaatacaccaa

SEQ ID NO: 37974 - RNA, 23 nt, Synthetic Construct
  source 1..23: mol_type = other RNA
caacggaatcccaaaagcggctg

SEQ ID NO: 37975 - RNA, 32 nt, Synthetic Construct; identical to SEQ ID NO: 3541
  source 1..32: mol_type = other RNA

SEQ ID NO: 37976 - RNA, 32 nt, Synthetic Construct; identical to SEQ ID NO: 3541
  source 1..32: mol_type = other RNA

SEQ ID NO: 37977 - RNA, 34 nt, Synthetic Construct; identical to SEQ ID NO: 1111
  source 1..34: mol_type = other RNA

SEQ ID NO: 37978 - RNA, 34 nt, Synthetic Construct; identical to SEQ ID NO: 1111
  source 1..34: mol_type = other RNA

SEQ ID NO: 37979 - RNA, 22 nt, Synthetic Construct
  source 1..22: mol_type = other RNA
ccccccactgctaaatttgact

SEQ ID NO: 37980 - RNA, 22 nt, Synthetic Construct
  source 1..22: mol_type = other RNA
ccccccactgctaaatttgact

SEQ ID NO: 37981 - RNA, 18 nt, Synthetic Construct
  source 1..18: mol_type = other RNA
atcccacttctgacacca

SEQ ID NO: 37982 - RNA, 18 nt, Synthetic Construct
  source 1..18: mol_type = other RNA
atcccacttctgacacca

SEQ ID NO: 37983 - RNA, 18 nt, Synthetic Construct
  source 1..18: mol_type = other RNA
cacagtgtgaatcggcgc

SEQ ID NO: 37984 - RNA, 18 nt, Synthetic Construct
  source 1..18: mol_type = other RNA
cacagtgtgaatcggcgc

SEQ ID NO: 37985 - RNA, 27 nt, Synthetic Construct
  source 1..27: mol_type = other RNA
ncccccactgctaaatttgactggctt

SEQ ID NO: 37986 - RNA, 27 nt, Synthetic Construct
  source 1..27: mol_type = other RNA
ncccccactgctaaatttgactggctt

SEQ ID NO: 37987 - RNA, 16 nt, Synthetic Construct
  source 1..16: mol_type = other RNA
accgcttttgtcaggg

SEQ ID NO: 37988 - RNA, 16 nt, Synthetic Construct
  source 1..16: mol_type = other RNA
gtccacggccatacca

SEQ ID NO: 37989 - RNA, 16 nt, Synthetic Construct
  source 1..16: mol_type = other RNA
gtccacggccatacca

SEQ ID NO: 37990 - RNA, 19 nt, Synthetic Construct
  source 1..19: mol_type = other RNA
aggacagtgaaacgagtca

SEQ ID NO: 37991 - RNA, 25 nt, Synthetic Construct
  source 1..25: mol_type = other RNA
ttgaggatatgagatcgagacgacg

SEQ ID NO: 37992 - RNA, 23 nt, Synthetic Construct
  source 1..23: mol_type = other RNA
agagaactgaattccatgggttg

SEQ ID NO: 37993 - RNA, 23 nt, Synthetic Construct
  source 1..23: mol_type = other RNA
gcctgtactgagctgccccgaga

SEQ ID NO: 37994 - RNA, 23 nt, Synthetic Construct
  source 1..23: mol_type = other RNA
gactcttagcggtggatcactcg

SEQ ID NO: 37995 - RNA, 23 nt, Synthetic Construct
  source 1..23: mol_type = other RNA
gactcttagcggtggatcactcg

SEQ ID NO: 37996 - RNA, 27 nt, Synthetic Construct
  source 1..27: mol_type = other RNA
ttcaacttaacttgaccgctctgacca

SEQ ID NO: 37997 - RNA, 27 nt, Synthetic Construct
  source 1..27: mol_type = other RNA
ttcaacttaacttgaccgctctgacca

SEQ ID NO: 37998 - RNA, 21 nt, Synthetic Construct
  source 1..21: mol_type = other RNA
aagacgggaggaaagaaggga

SEQ ID NO: 37999 - RNA, 21 nt, Synthetic Construct
  source 1..21: mol_type = other RNA
tgaagtagtaggttgtatagt

SEQ ID NO: 38000 - RNA, 24 nt, Synthetic Construct
  source 1..24: mol_type = other RNA
tgatatgtttgatatattaggttg

SEQ ID NO: 38001 - RNA, 25 nt, Synthetic Construct
  source 1..25: mol_type = other RNA
tcggatccgtctgagcttggctttt

SEQ ID NO: 38002 - RNA, 25 nt, Synthetic Construct
  source 1..25: mol_type = other RNA
tcggatccgtctgagcttggctttt

SEQ ID NO: 38003 - RNA, 18 nt, Synthetic Construct
  source 1..18: mol_type = other RNA
gcgaaattccttgtcggg

SEQ ID NO: 38004 - RNA, 18 nt, Synthetic Construct
  source 1..18: mol_type = other RNA
gcgaaattccttgtcggg

SEQ ID NO: 38005 - RNA, 32 nt, Synthetic Construct; identical to SEQ ID NO: 2052
  source 1..32: mol_type = other RNA

SEQ ID NO: 38006 - RNA, 32 nt, Synthetic Construct; identical to SEQ ID NO: 2052
  source 1..32: mol_type = other RNA

SEQ ID NO: 38007 - RNA, 16 nt, Synthetic Construct
  source 1..16: mol_type = other RNA
gggaacgtgagctggg

SEQ ID NO: 38008 - RNA, 16 nt, Synthetic Construct
  source 1..16: mol_type = other RNA
gggaacgtgagctggg

SEQ ID NO: 38009 - RNA, 27 nt, Synthetic Construct
  source 1..27: mol_type = other RNA
gcgggtgatgcgaactggagtctgagc

SEQ ID NO: 38010 - RNA, 27 nt, Synthetic Construct
  source 1..27: mol_type = other RNA
gcgggtgatgcgaactggagtctgagc

SEQ ID NO: 38011 - RNA, 22 nt, Synthetic Construct
  source 1..22: mol_type = other RNA
caaagtgctgttcgtgcaggta

SEQ ID NO: 38012 - RNA, 21 nt, Synthetic Construct
  source 1..21: mol_type = other RNA
ctgtactgagctgccccgaga

SEQ ID NO: 38013 - RNA, 21 nt, Synthetic Construct
  source 1..21: mol_type = other RNA
ctgtactgagctgccccgaga

SEQ ID NO: 38014 - RNA, 23 nt, Synthetic Construct
  source 1..23: mol_type = other RNA
caaggtgctgttcgtgcaggtag

SEQ ID NO: 38015 - RNA, 23 nt, Synthetic Construct
  source 1..23: mol_type = other RNA
caaggtgctgttcgtgcaggtag

SEQ ID NO: 38016 - RNA, 16 nt, Synthetic Construct
  source 1..16: mol_type = other RNA
gtctatggccatacca

SEQ ID NO: 38017 - RNA, 24 nt, Synthetic Construct
  source 1..24: mol_type = other RNA
tgtaaacatccccgaccggaagct

SEQ ID NO: 38018 - RNA, 29 nt, Synthetic Construct
  source 1..29: mol_type = other RNA
gagcgctgagaagacggtcgaacttgact

SEQ ID NO: 38019 - RNA, 23 nt, Synthetic Construct
  source 1..23: mol_type = other RNA
tcaagagcaataacgaaaaatgt

SEQ ID NO: 38020 - RNA, 23 nt, Synthetic Construct
  source 1..23: mol_type = other RNA
tcaagagcaataacgaaaaatgt

SEQ ID NO: 38021 - RNA, 18 nt, Synthetic Construct
  source 1..18: mol_type = other RNA
cgccgatgatagtgcgga

SEQ ID NO: 38022 - RNA, 18 nt, Synthetic Construct
  source 1..18: mol_type = other RNA
cgccgatgatagtgcgga

SEQ ID NO: 38023 - RNA, 21 nt, Synthetic Construct
  source 1..21: mol_type = other RNA
tgaggggcagagggcgagact

SEQ ID NO: 38024 - RNA, 21 nt, Synthetic Construct
  source 1..21: mol_type = other RNA
tgaggggcagagggcgagact

SEQ ID NO: 38025 - RNA, 31 nt, Synthetic Construct; identical to SEQ ID NO: 6001
  source 1..31: mol_type = other RNA

SEQ ID NO: 38026 - RNA, 31 nt, Synthetic Construct; identical to SEQ ID NO: 6001
  source 1..31: mol_type = other RNA

SEQ ID NO: 38027 - RNA, 20 nt, Synthetic Construct
  source 1..20: mol_type = other RNA
caaagaattctccttttggg

SEQ ID NO: 38028 - RNA, 22 nt, Synthetic Construct
  source 1..22: mol_type = other RNA
ggcagggttcgtgactggggtg

SEQ ID NO: 38029 - RNA, 21 nt, Synthetic Construct
  source 1..21: mol_type = other RNA
tgaagtagtaggttgtgtggt

SEQ ID NO: 38030 - RNA, 16 nt, Synthetic Construct
  source 1..16: mol_type = other RNA
taactatgactctctt

SEQ ID NO: 38031 - RNA, 15 nt, Synthetic Construct
  source 1..15: mol_type = other RNA
accggaggaaggtgg

SEQ ID NO: 38032 - RNA, 15 nt, Synthetic Construct
  source 1..15: mol_type = other RNA
accggaggaaggtgg

SEQ ID NO: 38033 - RNA, 22 nt, Synthetic Construct
  source 1..22: mol_type = other RNA
tgaggtagtaggttgtatggta

SEQ ID NO: 38034 - RNA, 22 nt, Synthetic Construct
  source 1..22: mol_type = other RNA
tgaggtagtaggttgtatggta

SEQ ID NO: 38035 - RNA, 22 nt, Synthetic Construct
  source 1..22: mol_type = other RNA
gaagaggacttggagctcgatc

SEQ ID NO: 38036 - RNA, 22 nt, Synthetic Construct
  source 1..22: mol_type = other RNA
gaagaggacttggagctcgatc

SEQ ID NO: 38037 - RNA, 23 nt, Synthetic Construct
  source 1..23: mol_type = other RNA
caaagaattctccttttgggctt

SEQ ID NO: 38038 - RNA, 23 nt, Synthetic Construct
  source 1..23: mol_type = other RNA
tgaaagtaggtcatcgtcaggct

SEQ ID NO: 38039 - RNA, 23 nt, Synthetic Construct
  source 1..23: mol_type = other RNA
tgaaagtaggtcatcgtcaggct

SEQ ID NO: 38040 - RNA, 23 nt, Synthetic Construct
  source 1..23: mol_type = other RNA
gcctgtactgagctgccccgaga

SEQ ID NO: 38041 - RNA, 22 nt, Synthetic Construct
  source 1..22: mol_type = other RNA
tagcagcacgtgaatattggcg

SEQ ID NO: 38042 - RNA, 27 nt, Synthetic Construct
  source 1..27: mol_type = other RNA
gcgggtgatgcgaactggagtctgagc

SEQ ID NO: 38043 - RNA, 27 nt, Synthetic Construct
  source 1..27: mol_type = other RNA
gcgggtgatgcgaactggagtctgagc

SEQ ID NO: 38044 - RNA, 19 nt, Synthetic Construct
  source 1..19: mol_type = other RNA
cctcgtcatctaattagtg

SEQ ID NO: 38045 - RNA, 19 nt, Synthetic Construct
  source 1..19: mol_type = other RNA
cctcgtcatctaattagtg

SEQ ID NO: 38046 - RNA, 22 nt, Synthetic Construct
  source 1..22: mol_type = other RNA
taacactgtctggtaacgatgt

SEQ ID NO: 38047 - RNA, 20 nt, Synthetic Construct
  source 1..20: mol_type = other RNA
tgaggtagtaggttgtacag

SEQ ID NO: 38048 - RNA, 18 nt, Synthetic Construct
  source 1..18: mol_type = other RNA
agcaggacggtggccatg

SEQ ID NO: 38049 - RNA, 22 nt, Synthetic Construct
  source 1..22: mol_type = other RNA
tattgcacttgtcccggcccgt

SEQ ID NO: 38050 - RNA, 22 nt, Synthetic Construct
  source 1..22: mol_type = other RNA
tattgcacttgtcccggcccgt

SEQ ID NO: 38051 - RNA, 23 nt, Synthetic Construct
  source 1..23: mol_type = other RNA
caaggtgctgttcgtgcaggtag

SEQ ID NO: 38052 - RNA, 23 nt, Synthetic Construct
  source 1..23: mol_type = other RNA
caaggtgctgttcgtgcaggtag

SEQ ID NO: 38053 - RNA, 21 nt, Synthetic Construct
  source 1..21: mol_type = other RNA
tgaggtagtaggctgtatagt

SEQ ID NO: 38054 - RNA, 21 nt, Synthetic Construct
  source 1..21: mol_type = other RNA
tcctgtactgggctgccccga

SEQ ID NO: 38055 - RNA, 19 nt, Synthetic Construct
  source 1..19: mol_type = other RNA
tgaggtagtaggttgtata

SEQ ID NO: 38056 - RNA, 22 nt, Synthetic Construct
  source 1..22: mol_type = other RNA
cattgcactcgtctcggtctga

SEQ ID NO: 38057 - RNA, 23 nt, Synthetic Construct
  source 1..23: mol_type = other RNA
ttaatgctaatcgtgataggggt

SEQ ID NO: 38058 - RNA, 18 nt, Synthetic Construct
  source 1..18: mol_type = other RNA
cgactcttagcggtggat

SEQ ID NO: 38059 - RNA, 22 nt, Synthetic Construct
  source 1..22: mol_type = other RNA
tgaggtagtagcttgtgctgtt

SEQ ID NO: 38060 - RNA, 22 nt, Synthetic Construct
  source 1..22: mol_type = other RNA
tgaggtagtagcttgtgctgtt

SEQ ID NO: 38061 - RNA, 22 nt, Synthetic Construct
  source 1..22: mol_type = other RNA
ttataatacaacctgataagtg

SEQ ID NO: 38062 - RNA, 22 nt, Synthetic Construct
  source 1..22: mol_type = other RNA
ttataatacaacctgataagtg

SEQ ID NO: 38063 - RNA, 23 nt, Synthetic Construct
  source 1..23: mol_type = other RNA
tgaggtagtaggttgtgtggtaa

SEQ ID NO: 38064 - RNA, 23 nt, Synthetic Construct
  source 1..23: mol_type = other RNA
tgaggtagtaggttgtgtggtaa

SEQ ID NO: 38065 - RNA, 22 nt, Synthetic Construct
  source 1..22: mol_type = other RNA
tgtagtgtctcctactttatgg

SEQ ID NO: 38066 - RNA, 20 nt, Synthetic Construct
  source 1..20: mol_type = other RNA
agaggtagtaggttgtgtgg

SEQ ID NO: 38067 - RNA, 20 nt, Synthetic Construct
  source 1..20: mol_type = other RNA
agaggtagtaggttgtgtgg

SEQ ID NO: 38068 - RNA, 19 nt, Synthetic Construct
  source 1..19: mol_type = other RNA
aaccgggcggaaacaccat

SEQ ID NO: 38069 - RNA, 19 nt, Synthetic Construct
  source 1..19: mol_type = other RNA
aaccgggcggaaacaccat

SEQ ID NO: 38070 - RNA, 22 nt, Synthetic Construct
  source 1..22: mol_type = other RNA
acagtagtctgcacattggttg

SEQ ID NO: 38071 - RNA, 22 nt, Synthetic Construct
  source 1..22: mol_type = other RNA
tgaggtagtgggttgtatagtt

SEQ ID NO: 38072 - RNA, 22 nt, Synthetic Construct
  source 1..22: mol_type = other RNA
tgaggtagtgggttgtatagtt

SEQ ID NO: 38073 - RNA, 16 nt, Synthetic Construct
  source 1..16: mol_type = other RNA
gcaagaggtcagcggt

SEQ ID NO: 38074 - RNA, 16 nt, Synthetic Construct
  source 1..16: mol_type = other RNA
gcaagaggtcagcggt

SEQ ID NO: 38075 - RNA, 32 nt, Synthetic Construct; identical to SEQ ID NO: 4279
  source 1..32: mol_type = other RNA

SEQ ID NO: 38076 - RNA, 32 nt, Synthetic Construct; identical to SEQ ID NO: 4279
  source 1..32: mol_type = other RNA

SEQ ID NO: 38077 - RNA, 23 nt, Synthetic Construct
  source 1..23: mol_type = other RNA
caaagtgctgtccgtgcaggtag

SEQ ID NO: 38078 - RNA, 19 nt, Synthetic Construct
  source 1..19: mol_type = other RNA
tccctgttcgggcgccatt

SEQ ID NO: 38079 - RNA, 23 nt, Synthetic Construct
  source 1..23: mol_type = other RNA
caaagtgccgttcgtgcaggtag

SEQ ID NO: 38080 - RNA, 21 nt, Synthetic Construct
  source 1..21: mol_type = other RNA
cggagtgtgacaatggtgttt

SEQ ID NO: 38081 - RNA, 21 nt, Synthetic Construct
  source 1..21: mol_type = other RNA
cggagtgtgacaatggtgttt

SEQ ID NO: 38082 - RNA, 23 nt, Synthetic Construct
  source 1..23: mol_type = other RNA
cgagagtaggacgttgccaggtt

SEQ ID NO: 38083 - RNA, 23 nt, Synthetic Construct
  source 1..23: mol_type = other RNA
cgagagtaggacgttgccaggtt

SEQ ID NO: 38084 - RNA, 41 nt, Synthetic Construct; identical to SEQ ID NO: 8929
  source 1..41: mol_type = other RNA

SEQ ID NO: 38085 - RNA, 41 nt, Synthetic Construct; identical to SEQ ID NO: 8929
  source 1..41: mol_type = other RNA

SEQ ID NO: 38086 - RNA, 22 nt, Synthetic Construct
  source 1..22: mol_type = other RNA
taactccttaagcggatctcgc

SEQ ID NO: 38087 - RNA, 22 nt, Synthetic Construct
  source 1..22: mol_type = other RNA
caactccttaagcgaatctcgc

SEQ ID NO: 38088 - RNA, 22 nt, Synthetic Construct
  source 1..22: mol_type = other RNA
tggggtagtagtttgtgctgtt

SEQ ID NO: 38089 - RNA, 22 nt, Synthetic Construct
  source 1..22: mol_type = other RNA
tggggtagtagtttgtgctgtt

SEQ ID NO: 38090 - RNA, 22 nt, Synthetic Construct
  source 1..22: mol_type = other RNA
cgcatcccctagggcattggtg

SEQ ID NO: 38091 - RNA, 22 nt, Synthetic Construct
  source 1..22: mol_type = other RNA
cgcatcccctagggcattggtg

SEQ ID NO: 38092 - RNA, 22 nt, Synthetic Construct
  source 1..22: mol_type = other RNA
atggatttttggagcagggaga

SEQ ID NO: 38093 - RNA, 35 nt, Synthetic Construct; identical to SEQ ID NO: 1497
  source 1..35: mol_type = other RNA

SEQ ID NO: 38094 - RNA, 21 nt, Synthetic Construct
  source 1..21: mol_type = other RNA
tgtcttgcaggccgtcatgca

SEQ ID NO: 38095 - RNA, 21 nt, Synthetic Construct
  source 1..21: mol_type = other RNA
tgtcttgcaggccgtcatgca

SEQ ID NO: 38096 - RNA, 21 nt, Synthetic Construct
  source 1..21: mol_type = other RNA
ccacctcccctgcaaacgtcc

SEQ ID NO: 38097 - RNA, 21 nt, Synthetic Construct
  source 1..21: mol_type = other RNA
ccacctcccctgcaaacgtcc

SEQ ID NO: 38098 - RNA, 18 nt, Synthetic Construct
  source 1..18: mol_type = other RNA
cccaaaggtcgtcggttc

SEQ ID NO: 38099 - RNA, 23 nt, Synthetic Construct
  source 1..23: mol_type = other RNA
agcagcattgtacagggctatct

SEQ ID NO: 38100 - RNA, 23 nt, Synthetic Construct
  source 1..23: mol_type = other RNA
agcagcattgtacagggctatct

SEQ ID NO: 38101 - RNA, 23 nt, Synthetic Construct
  source 1..23: mol_type = other RNA
caaagtgctgttcgtgcgggtag

SEQ ID NO: 38102 - RNA, 23 nt, Synthetic Construct
  source 1..23: mol_type = other RNA
caaagtgctgttcgtgcgggtag

SEQ ID NO: 38103 - RNA, 21 nt, Synthetic Construct
  source 1..21: mol_type = other RNA
actggacttggagtcagaagg

SEQ ID NO: 38104 - RNA, 21 nt, Synthetic Construct
  source 1..21: mol_type = other RNA
actggacttggagtcagaagg

SEQ ID NO: 38105 - RNA, 19 nt, Synthetic Construct
  source 1..19: mol_type = other RNA
agcgaaattccttgtcggg

SEQ ID NO: 38106 - RNA, 29 nt, Synthetic Construct
  source 1..29: mol_type = other RNA
gctaaacctagccccaaacccactccacc

SEQ ID NO: 38107 - RNA, 29 nt, Synthetic Construct
  source 1..29: mol_type = other RNA
gctaaacctagccccaaacccactccacc

SEQ ID NO: 38108 - RNA, 23 nt, Synthetic Construct
  source 1..23: mol_type = other RNA
caaagtgctcatagtgcaggtag

SEQ ID NO: 38109 - RNA, 22 nt, Synthetic Construct
  source 1..22: mol_type = other RNA
tattgcacttgtcccggcctgc

SEQ ID NO: 38110 - RNA, 22 nt, Synthetic Construct
  source 1..22: mol_type = other RNA
tattgcacttgtcccggcctgc

SEQ ID NO: 38111 - RNA, 22 nt, Synthetic Construct
  source 1..22: mol_type = other RNA
agcaggacggtggccatggaag

SEQ ID NO: 38112 - RNA, 22 nt, Synthetic Construct
  source 1..22: mol_type = other RNA
agcaggacggtggccatggaag

SEQ ID NO: 38113 - RNA, 18 nt, Synthetic Construct
  source 1..18: mol_type = other RNA
gtctgcctcagcgtcggt

SEQ ID NO: 38114 - RNA, 18 nt, Synthetic Construct
  source 1..18: mol_type = other RNA
gtctgcctcagcgtcggt

SEQ ID NO: 38115 - RNA, 22 nt, Synthetic Construct
  source 1..22: mol_type = other RNA
tgaggtagaaggttgtgtggtt

SEQ ID NO: 38116 - RNA, 21 nt, Synthetic Construct
  source 1..21: mol_type = other RNA
cggagtgtgacaatggtgttt

SEQ ID NO: 38117 - RNA, 22 nt, Synthetic Construct
  source 1..22: mol_type = other RNA
ctatacgacctgctgcctttct

SEQ ID NO: 38118 - RNA, 22 nt, Synthetic Construct
  source 1..22: mol_type = other RNA
ctatacgacctgctgcctttct

SEQ ID NO: 38119 - RNA, 23 nt, Synthetic Construct
  source 1..23: mol_type = other RNA
ctggccctctctgcccttccgta

SEQ ID NO: 38120 - RNA, 23 nt, Synthetic Construct
  source 1..23: mol_type = other RNA
ctggccctctctgcccttccgta

SEQ ID NO: 38121 - RNA, 21 nt, Synthetic Construct
  source 1..21: mol_type = other RNA
agaggtagtaggttgtgtggt

SEQ ID NO: 38122 - RNA, 21 nt, Synthetic Construct
  source 1..21: mol_type = other RNA
cgtaccgtgagtaataatgag

SEQ ID NO: 38123 - RNA, 22 nt, Synthetic Construct
  source 1..22: mol_type = other RNA
tagcagcacgtaagtattggcg

SEQ ID NO: 38124 - RNA, 31 nt, Synthetic Construct; identical to SEQ ID NO: 960
  source 1..31: mol_type = other RNA

SEQ ID NO: 38125 - RNA, 36 nt, Synthetic Construct; identical to SEQ ID NO: 777
  source 1..36: mol_type = other RNA

SEQ ID NO: 38126 - RNA, 22 nt, Synthetic Construct
  source 1..22: mol_type = other RNA
tggagtgtggcaatggtgtttg

SEQ ID NO: 38127 - RNA, 22 nt, Synthetic Construct
  source 1..22: mol_type = other RNA
tggagtgtggcaatggtgtttg

SEQ ID NO: 38128 - RNA, 31 nt, Synthetic Construct; identical to SEQ ID NO: 1225
  source 1..31: mol_type = other RNA

SEQ ID NO: 38129 - RNA, 31 nt, Synthetic Construct; identical to SEQ ID NO: 1225
  source 1..31: mol_type = other RNA

SEQ ID NO: 38130 - RNA, 29 nt, Synthetic Construct
  source 1..29: mol_type = other RNA
ccccccccactgctaaatttgactggctt

SEQ ID NO: 38131 - RNA, 29 nt, Synthetic Construct
  source 1..29: mol_type = other RNA
ccccccccactgctaaatttgactggctt

SEQ ID NO: 38132 - RNA, 16 nt, Synthetic Construct
  source 1..16: mol_type = other RNA
cccgtcgctactaccg

SEQ ID NO: 38133 - RNA, 16 nt, Synthetic Construct
  source 1..16: mol_type = other RNA
cccgtcgctactaccg

SEQ ID NO: 38134 - RNA, 22 nt, Synthetic Construct
  source 1..22: mol_type = other RNA
ccactgccccaggtgctgctgg

SEQ ID NO: 38135 - RNA, 22 nt, Synthetic Construct
  source 1..22: mol_type = other RNA
ccactgccccaggtgctgctgg

SEQ ID NO: 38136 - RNA, 16 nt, Synthetic Construct
  source 1..16: mol_type = other RNA
gtctacggccatacca

SEQ ID NO: 38137 - RNA, 16 nt, Synthetic Construct
  source 1..16: mol_type = other RNA
gtctacggccatacca

SEQ ID NO: 38138 - RNA, 22 nt, Synthetic Construct
  source 1..22: mol_type = other RNA
tagcagcacgtagatattggcg

SEQ ID NO: 38139 - RNA, 22 nt, Synthetic Construct
  source 1..22: mol_type = other RNA
tagcagcacgtagatattggcg

SEQ ID NO: 38140 - RNA, 22 nt, Synthetic Construct
  source 1..22: mol_type = other RNA
tattgcacttatcccggcctgt

SEQ ID NO: 38141 - RNA, 20 nt, Synthetic Construct
  source 1..20: mol_type = other RNA
agctacattgtctgctgggt

SEQ ID NO: 38142 - RNA, 22 nt, Synthetic Construct
  source 1..22: mol_type = other RNA
atataatacaacctgctaagtg

SEQ ID NO: 38143 - RNA, 22 nt, Synthetic Construct
  source 1..22: mol_type = other RNA
atataatacaacctgctaagtg

SEQ ID NO: 38144 - RNA, 19 nt, Synthetic Construct
  source 1..19: mol_type = other RNA
tgaggtagtaggttgtgtg

SEQ ID NO: 38145 - RNA, 20 nt, Synthetic Construct
  source 1..20: mol_type = other RNA
tgaggtagtaagttgtattg

SEQ ID NO: 38146 - RNA, 20 nt, Synthetic Construct
  source 1..20: mol_type = other RNA
tgaggtagtaagttgtattg

SEQ ID NO: 38147 - RNA, 22 nt, Synthetic Construct
  source 1..22: mol_type = other RNA
tattgcacctgtcccggcctgt

SEQ ID NO: 38148 - RNA, 23 nt, Synthetic Construct
  source 1..23: mol_type = other RNA
atgacacgatcactcccgttgag

SEQ ID NO: 38149 - RNA, 22 nt, Synthetic Construct
  source 1..22: mol_type = other RNA
gtcagtttgtcaaataccccat

SEQ ID NO: 38150 - RNA, 23 nt, Synthetic Construct
  source 1..23: mol_type = other RNA
gcctgtactgagctgccccgaga

SEQ ID NO: 38151 - RNA, 23 nt, Synthetic Construct
  source 1..23: mol_type = other RNA
taactccttaagcgaatctcggc

SEQ ID NO: 38152 - RNA, 23 nt, Synthetic Construct
  source 1..23: mol_type = other RNA
taactccttaagcgaatctcggc

SEQ ID NO: 38153 - RNA, 21 nt, Synthetic Construct
  source 1..21: mol_type = other RNA
aagacgggaggaaagaaggga

SEQ ID NO: 38154 - RNA, 21 nt, Synthetic Construct
  source 1..21: mol_type = other RNA
aagacgggaggaaagaaggga

SEQ ID NO: 38155 - RNA, 22 nt, Synthetic Construct
  source 1..22: mol_type = other RNA
tagcagcacgtagatattggcg

SEQ ID NO: 38156 - RNA, 22 nt, Synthetic Construct
  source 1..22: mol_type = other RNA
tagcagcacgtaaatattggca

SEQ ID NO: 38157 - RNA, 22 nt, Synthetic Construct
  source 1..22: mol_type = other RNA
tagcagcacgtaaatattggca

SEQ ID NO: 38158 - RNA, 21 nt, Synthetic Construct
  source 1..21: mol_type = other RNA
tgaggtagtaggctgtatagt

SEQ ID NO: 38159 - RNA, 21 nt, Synthetic Construct
  source 1..21: mol_type = other RNA
tgaggtagtaggctgtatagt

SEQ ID NO: 38160 - RNA, 22 nt, Synthetic Construct
  source 1..22: mol_type = other RNA
tgaggtagtaggttgcgtggtt

SEQ ID NO: 38161 - RNA, 22 nt, Synthetic Construct
  source 1..22: mol_type = other RNA
aggagtgtgacaatggtgtttg

SEQ ID NO: 38162 - RNA, 22 nt, Synthetic Construct
  source 1..22: mol_type = other RNA
aggagtgtgacaatggtgtttg

SEQ ID NO: 38163 - RNA, 23 nt, Synthetic Construct
  source 1..23: mol_type = other RNA
caacggaaccccaaaagcagctg

SEQ ID NO: 38164 - RNA, 23 nt, Synthetic Construct
  source 1..23: mol_type = other RNA
cactagattgtgagctcctggaa

SEQ ID NO: 38165 - RNA, 23 nt, Synthetic Construct
  source 1..23: mol_type = other RNA
cactagattgtgagctcctggaa

SEQ ID NO: 38166 - RNA, 21 nt, Synthetic Construct
  source 1..21: mol_type = other RNA
caaagaattctccttttgggc

SEQ ID NO: 38167 - RNA, 21 nt, Synthetic Construct
  source 1..21: mol_type = other RNA
caaagaattctccttttgggc

SEQ ID NO: 38168 - RNA, 32 nt, Synthetic Construct; identical to SEQ ID NO: 989
  source 1..32: mol_type = other RNA

SEQ ID NO: 38169 - RNA, 32 nt, Synthetic Construct; identical to SEQ ID NO: 989
  source 1..32: mol_type = other RNA

SEQ ID NO: 38170 - RNA, 20 nt, Synthetic Construct
  source 1..20: mol_type = other RNA
ctctaatgagactgccggtg

SEQ ID NO: 38171 - RNA, 22 nt, Synthetic Construct
  source 1..22: mol_type = other RNA
tgaggaagtagtttgtgctgtt

SEQ ID NO: 38172 - RNA, 22 nt, Synthetic Construct
  source 1..22: mol_type = other RNA
tgaggaagtagtttgtgctgtt

SEQ ID NO: 38173 - RNA, 15 nt, Synthetic Construct
  source 1..15: mol_type = other RNA
gagctgtggataggg

SEQ ID NO: 38174 - RNA, 22 nt, Synthetic Construct
  source 1..22: mol_type = other RNA
tacaagtaattcaggataggtt

SEQ ID NO: 38175 - RNA, 19 nt, Synthetic Construct
  source 1..19: mol_type = other RNA
agtaggtcatcgtcaggct

SEQ ID NO: 38176 - RNA, 19 nt, Synthetic Construct
  source 1..19: mol_type = other RNA
agtaggtcatcgtcaggct

SEQ ID NO: 38177 - RNA, 20 nt, Synthetic Construct
  source 1..20: mol_type = other RNA
tgaggtagtaggttatgtgg

SEQ ID NO: 38178 - RNA, 22 nt, Synthetic Construct
  source 1..22: mol_type = other RNA
atcaagtaattcaggataggtt

SEQ ID NO: 38179 - RNA, 22 nt, Synthetic Construct
  source 1..22: mol_type = other RNA
tggagtgtgacaatggtgtttt

SEQ ID NO: 38180 - RNA, 21 nt, Synthetic Construct
  source 1..21: mol_type = other RNA
agaggggcagagagcgagact

SEQ ID NO: 38181 - RNA, 20 nt, Synthetic Construct
  source 1..20: mol_type = other RNA
caaagtgctgttcgtgcagg

SEQ ID NO: 38182 - RNA, 20 nt, Synthetic Construct
  source 1..20: mol_type = other RNA
caaagtgctgttcgtgcagg

SEQ ID NO: 38183 - RNA, 22 nt, Synthetic Construct
  source 1..22: mol_type = other RNA
tcctgtacagagctgccccgag

SEQ ID NO: 38184 - RNA, 23 nt, Synthetic Construct
  source 1..23: mol_type = other RNA
tgaggagcagagagcgagacttt

SEQ ID NO: 38185 - RNA, 23 nt, Synthetic Construct
  source 1..23: mol_type = other RNA
tgaggagcagagagcgagacttt

SEQ ID NO: 38186 - RNA, 22 nt, Synthetic Construct
  source 1..22: mol_type = other RNA
tgaggtaggaggttgtatagtt

SEQ ID NO: 38187 - RNA, 23 nt, Synthetic Construct
  source 1..23: mol_type = other RNA
tgaaacatacacgggaaacctct

SEQ ID NO: 38188 - RNA, 22 nt, Synthetic Construct
  source 1..22: mol_type = other RNA
tgaggggcagagagcgagactt

SEQ ID NO: 38189 - RNA, 22 nt, Synthetic Construct
  source 1..22: mol_type = other RNA
tgaggggcagagagcgagactt

SEQ ID NO: 38190 - RNA, 20 nt, Synthetic Construct
  source 1..20: mol_type = other RNA
tgaggcagtaggttgtgtgg

SEQ ID NO: 38191 - RNA, 15 nt, Synthetic Construct
  source 1..15: mol_type = other RNA
gcaagtcgagcggta

SEQ ID NO: 38192 - RNA, 22 nt, Synthetic Construct
  source 1..22: mol_type = other RNA
tcctgaactgagctgccccgag

SEQ ID NO: 38193 - RNA, 22 nt, Synthetic Construct
  source 1..22: mol_type = other RNA
tcctgaactgagctgccccgag

SEQ ID NO: 38194 - RNA, 22 nt, Synthetic Construct
  source 1..22: mol_type = other RNA
tgaggtagtaggttgtgtagtt

SEQ ID NO: 38195 - RNA, 39 nt, Synthetic Construct; identical to SEQ ID NO: 2980
  source 1..39: mol_type = other RNA

SEQ ID NO: 38196 - RNA, 23 nt, Synthetic Construct
  source 1..23: mol_type = other RNA
tcttggagtaggtcattgggtgg

SEQ ID NO: 38197 - RNA, 23 nt, Synthetic Construct
  source 1..23: mol_type = other RNA
tcttggagtaggtcattgggtgg

SEQ ID NO: 38198 - RNA, 22 nt, Synthetic Construct
  source 1..22: mol_type = other RNA
taactcctcaagcgaatctcgc

SEQ ID NO: 38199 - RNA, 22 nt, Synthetic Construct
  source 1..22: mol_type = other RNA
atgacacgatcactcccgttga

SEQ ID NO: 38200 - RNA, 23 nt, Synthetic Construct
  source 1..23: mol_type = other RNA
ggcagggttcgtgactggggtga

SEQ ID NO: 38201 - RNA, 23 nt, Synthetic Construct
  source 1..23: mol_type = other RNA
tcttggagtaggtcattgggtgt

SEQ ID NO: 38202 - RNA, 20 nt, Synthetic Construct
  source 1..20: mol_type = other RNA
ggggatgtagctcagatggt

SEQ ID NO: 38203 - RNA, 20 nt, Synthetic Construct
  source 1..20: mol_type = other RNA
ggggatgtagctcagatggt

SEQ ID NO: 38204 - RNA, 17 nt, Synthetic Construct
  source 1..17: mol_type = other RNA
agaccctgttgagcttg

SEQ ID NO: 38205 - RNA, 17 nt, Synthetic Construct
  source 1..17: mol_type = other RNA
agaccctgttgagcttg

SEQ ID NO: 38206 - RNA, 15 nt, Synthetic Construct
  source 1..15: mol_type = other RNA
gcaagccgaacggta

SEQ ID NO: 38207 - RNA, 22 nt, Synthetic Construct
  source 1..22: mol_type = other RNA
catcgcacttgtctcggtctga

SEQ ID NO: 38208 - RNA, 19 nt, Synthetic Construct
  source 1..19: mol_type = other RNA
tccccggcatctccaccaa

SEQ ID NO: 38209 - RNA, 19 nt, Synthetic Construct
  source 1..19: mol_type = other RNA
tccccggcatctccaccaa

SEQ ID NO: 38210 - RNA, 21 nt, Synthetic Construct
  source 1..21: mol_type = other RNA
tgaggggcagagagcgaggct

SEQ ID NO: 38211 - RNA, 21 nt, Synthetic Construct
  source 1..21: mol_type = other RNA
tgaggggcagagagcgaggct

SEQ ID NO: 38212 - RNA, 25 nt, Synthetic Construct
  source 1..25: mol_type = other RNA
tagtgcaatattgcttatagggttt

SEQ ID NO: 38213 - RNA, 21 nt, Synthetic Construct
  source 1..21: mol_type = other RNA
actcggcgtggcgtcggtcgt

SEQ ID NO: 38214 - RNA, 21 nt, Synthetic Construct
  source 1..21: mol_type = other RNA
actcggcgtggcgtcggtcgt

SEQ ID NO: 38215 - RNA, 24 nt, Synthetic Construct
  source 1..24: mol_type = other RNA
tgaggtagtaggttgtgtggtttt

SEQ ID NO: 38216 - RNA, 20 nt, Synthetic Construct
  source 1..20: mol_type = other RNA
tgaagtagtaggttgtgtgg

SEQ ID NO: 38217 - RNA, 20 nt, Synthetic Construct
  source 1..20: mol_type = other RNA
tgaagtagtaggttgtgtgg

SEQ ID NO: 38218 - RNA, 21 nt, Synthetic Construct
  source 1..21: mol_type = other RNA
tgaggggcagagagcgggact

SEQ ID NO: 38219 - RNA, 23 nt, Synthetic Construct
  source 1..23: mol_type = other RNA
agggctgggtcggtcgggctggg

SEQ ID NO: 38220 - RNA, 23 nt, Synthetic Construct
  source 1..23: mol_type = other RNA
agggctgggtcggtcgggctggg

SEQ ID NO: 38221 - RNA, 21 nt, Synthetic Construct
  source 1..21: mol_type = other RNA
tggagagtgacaatggtgttt

SEQ ID NO: 38222 - RNA, 22 nt, Synthetic Construct
  source 1..22: mol_type = other RNA
ngaggtagtagtttgtgctgtt

SEQ ID NO: 38223 - RNA, 22 nt, Synthetic Construct
  source 1..22: mol_type = other RNA
ngaggtagtagtttgtgctgtt

SEQ ID NO: 38224 - RNA, 27 nt, Synthetic Construct
  source 1..27: mol_type = other RNA
ccccccactgctaaatttgacgggctt

SEQ ID NO: 38225 - RNA, 22 nt, Synthetic Construct
  source 1..22: mol_type = other RNA
ctatacgacctgctgcctttct

SEQ ID NO: 38226 - RNA, 22 nt, Synthetic Construct
  source 1..22: mol_type = other RNA
ctatacgacctgctgcctttct

SEQ ID NO: 38227 - RNA, 21 nt, Synthetic Construct
  source 1..21: mol_type = other RNA
ttataatacaacctgataagt

SEQ ID NO: 38228 - RNA, 23 nt, Synthetic Construct
  source 1..23: mol_type = other RNA
tcagtgcatcacagaactttgtt

SEQ ID NO: 38229 - RNA, 22 nt, Synthetic Construct
  source 1..22: mol_type = other RNA
tcagtgcatgacagaacttggg

SEQ ID NO: 38230 - RNA, 22 nt, Synthetic Construct
  source 1..22: mol_type = other RNA
aattgcacggtatccatctgta

SEQ ID NO: 38231 - RNA, 24 nt, Synthetic Construct
  source 1..24: mol_type = other RNA
ttcaagtaattcaggataggttgt

SEQ ID NO: 38232 - RNA, 24 nt, Synthetic Construct
  source 1..24: mol_type = other RNA
ttcaagtaattcaggataggttgt

SEQ ID NO: 38233 - RNA, 24 nt, Synthetic Construct
  source 1..24: mol_type = other RNA
caacggaatcccaaaagcagctgc

SEQ ID NO: 38234 - RNA, 21 nt, Synthetic Construct
  source 1..21: mol_type = other RNA
tgaggtagtagattgtgtggt

SEQ ID NO: 38235 - RNA, 22 nt, Synthetic Construct
  source 1..22: mol_type = other RNA
ngaggtagtaggttgtatagtt

SEQ ID NO: 38236 - RNA, 22 nt, Synthetic Construct
  source 1..22: mol_type = other RNA
ngaggtagtaggttgtatagtt

SEQ ID NO: 38237 - RNA, 24 nt, Synthetic Construct
  source 1..24: mol_type = other RNA
tgtaaacgtccccgactggaagct

SEQ ID NO: 38238 - RNA, 22 nt, Synthetic Construct
  source 1..22: mol_type = other RNA
tgaggcagtagtttgtgctgtt

SEQ ID NO: 38239 - RNA, 22 nt, Synthetic Construct
  source 1..22: mol_type = other RNA
tgaggcagtagtttgtgctgtt

SEQ ID NO: 38240 - RNA, 31 nt, Synthetic Construct; identical to SEQ ID NO: 2278
  source 1..31: mol_type = other RNA

SEQ ID NO: 38241 - RNA, 22 nt, Synthetic Construct
  source 1..22: mol_type = other RNA
tagcagcacgtgaatattggcg

SEQ ID NO: 38242 - RNA, 32 nt, Synthetic Construct; identical to SEQ ID NO: 14097
  source 1..32: mol_type = other RNA

SEQ ID NO: 38243 - RNA, 22 nt, Synthetic Construct
  source 1..22: mol_type = other RNA
taactccttaagcgaatcccgc

SEQ ID NO: 38244 - RNA, 24 nt, Synthetic Construct
  source 1..24: mol_type = other RNA
ggtaaacatccccgactggaagct

SEQ ID NO: 38245 - RNA, 24 nt, Synthetic Construct
  source 1..24: mol_type = other RNA
ggtaaacatccccgactggaagct

SEQ ID NO: 38246 - RNA, 17 nt, Synthetic Construct
  source 1..17: mol_type = other RNA
gggtctgtagctcagtc

SEQ ID NO: 38247 - RNA, 17 nt, Synthetic Construct
  source 1..17: mol_type = other RNA
gggtctgtagctcagtc

SEQ ID NO: 38248 - RNA, 23 nt, Synthetic Construct
  source 1..23: mol_type = other RNA
tggtaatacgacgcacttagtgt

SEQ ID NO: 38249 - RNA, 23 nt, Synthetic Construct
  source 1..23: mol_type = other RNA
tggtaatacgacgcacttagtgt

SEQ ID NO: 38250 - RNA, 23 nt, Synthetic Construct
  source 1..23: mol_type = other RNA
tgaggtagtgggttgtgtggttt

SEQ ID NO: 38251 - RNA, 23 nt, Synthetic Construct
  source 1..23: mol_type = other RNA
tgaggtagtgggttgtgtggttt

SEQ ID NO: 38252 - RNA, 22 nt, Synthetic Construct
  source 1..22: mol_type = other RNA
tggagtgtggcaatggtgtttg

SEQ ID NO: 38253 - RNA, 22 nt, Synthetic Construct
  source 1..22: mol_type = other RNA
tggagtgtggcaatggtgtttg

SEQ ID NO: 38254 - RNA, 17 nt, Synthetic Construct
  source 1..17: mol_type = other RNA
gtgttcggaagattttc

SEQ ID NO: 38255 - RNA, 17 nt, Synthetic Construct
  source 1..17: mol_type = other RNA
gtgttcggaagattttc

SEQ ID NO: 38256 - RNA, 22 nt, Synthetic Construct
  source 1..22: mol_type = other RNA
tagcagcatgtaaatattggcg

SEQ ID NO: 38257 - RNA, 22 nt, Synthetic Construct
  source 1..22: mol_type = other RNA
tagcagcatgtaaatattggcg

SEQ ID NO: 38258 - RNA, 22 nt, Synthetic Construct
  source 1..22: mol_type = other RNA
tcagtagctcgaggaaaagaca

SEQ ID NO: 38259 - RNA, 22 nt, Synthetic Construct
  source 1..22: mol_type = other RNA
tcagtagctcgaggaaaagaca

SEQ ID NO: 38260 - RNA, 25 nt, Synthetic Construct
  source 1..25: mol_type = other RNA
ttctcactactgcacttgactagtc

SEQ ID NO: 38261 - RNA, 25 nt, Synthetic Construct
  source 1..25: mol_type = other RNA
ttctcactactgcacttgactagtc

SEQ ID NO: 38262 - RNA, 25 nt, Synthetic Construct
  source 1..25: mol_type = other RNA
ggtaaaatggctgagtgaagcattg

SEQ ID NO: 38263 - RNA, 25 nt, Synthetic Construct
  source 1..25: mol_type = other RNA
ggtaaaatggctgagtgaagcattg

SEQ ID NO: 38264 - RNA, 23 nt, Synthetic Construct
  source 1..23: mol_type = other RNA
tacagtactgtgataactgaaga

SEQ ID NO: 38265 - RNA, 23 nt, Synthetic Construct
  source 1..23: mol_type = other RNA
tacagtactgtgataactgaaga

SEQ ID NO: 38266 - RNA, 21 nt, Synthetic Construct
  source 1..21: mol_type = other RNA
tgaggtagtaggatgtgtggt

SEQ ID NO: 38267 - RNA, 21 nt, Synthetic Construct
  source 1..21: mol_type = other RNA
tgaggtagtaggatgtgtggt

SEQ ID NO: 38268 - RNA, 20 nt, Synthetic Construct
  source 1..20: mol_type = other RNA
gggttcgattccggagaggg

SEQ ID NO: 38269 - RNA, 20 nt, Synthetic Construct
  source 1..20: mol_type = other RNA
gggttcgattccggagaggg

SEQ ID NO: 38270 - RNA, 23 nt, Synthetic Construct
  source 1..23: mol_type = other RNA
caacggaatcccaagagcagctg

SEQ ID NO: 38271 - RNA, 22 nt, Synthetic Construct
  source 1..22: mol_type = other RNA
taaatccttaagcgaatctcgc

SEQ ID NO: 38272 - RNA, 32 nt, Synthetic Construct; identical to SEQ ID NO: 1237
  source 1..32: mol_type = other RNA

SEQ ID NO: 38273 - RNA, 23 nt, Synthetic Construct
  source 1..23: mol_type = other RNA
agcaacattgtctgctgggtttc

SEQ ID NO: 38274 - RNA, 23 nt, Synthetic Construct
  source 1..23: mol_type = other RNA
agcaacattgtctgctgggtttc

SEQ ID NO: 38275 - RNA, 23 nt, Synthetic Construct
  source 1..23: mol_type = other RNA
tcctgtactgagctgccccgagc

SEQ ID NO: 38276 - RNA, 23 nt, Synthetic Construct
  source 1..23: mol_type = other RNA
tcctgtactgagctgccccgagc

SEQ ID NO: 38277 - RNA, 27 nt, Synthetic Construct
  source 1..27: mol_type = other RNA
ccccccactgctaaatttaactggctt

SEQ ID NO: 38278 - RNA, 23 nt, Synthetic Construct
  source 1..23: mol_type = other RNA
gaatgttgctcggtgaacccctt

SEQ ID NO: 38279 - RNA, 23 nt, Synthetic Construct
  source 1..23: mol_type = other RNA
gaatgttgctcggtgaacccctt

SEQ ID NO: 38280 - RNA, 23 nt, Synthetic Construct
  source 1..23: mol_type = other RNA
tcctgtactgagctgccacgaga

SEQ ID NO: 38281 - RNA, 23 nt, Synthetic Construct
  source 1..23: mol_type = other RNA
tcctgtactgagctgccacgaga

SEQ ID NO: 38282 - RNA, 20 nt, Synthetic Construct
  source 1..20: mol_type = other RNA
tgaggtagtaggtcgtatag

SEQ ID NO: 38283 - RNA, 20 nt, Synthetic Construct
  source 1..20: mol_type = other RNA
tgaggtagtaggtcgtatag

SEQ ID NO: 38284 - RNA, 23 nt, Synthetic Construct
  source 1..23: mol_type = other RNA
tgaggggcagagagcaagacttt

SEQ ID NO: 38285 - RNA, 23 nt, Synthetic Construct
  source 1..23: mol_type = other RNA
tggggtagtaggttgtgtggttt

SEQ ID NO: 38286 - RNA, 23 nt, Synthetic Construct
  source 1..23: mol_type = other RNA
tggggtagtaggttgtgtggttt

SEQ ID NO: 38287 - RNA, 20 nt, Synthetic Construct
  source 1..20: mol_type = other RNA
tagcttatcagactgatgtt

SEQ ID NO: 38288 - RNA, 20 nt, Synthetic Construct
  source 1..20: mol_type = other RNA
tagcttatcagactgatgtt

SEQ ID NO: 38289 - RNA, 25 nt, Synthetic Construct
  source 1..25: mol_type = other RNA
ggtaaaattgctgagtgaagcattg

SEQ ID NO: 38290 - RNA, 15 nt, Synthetic Construct
  source 1..15: mol_type = other RNA
tagagtagggcggga

SEQ ID NO: 38291 - RNA, 28 nt, Synthetic Construct
  source 1..28: mol_type = other RNA
ccgtgtgaaagtaggtcatcgtcaggct

SEQ ID NO: 38292 - RNA, 21 nt, Synthetic Construct
  source 1..21: mol_type = other RNA
tcccagtaaacggcggccgta

SEQ ID NO: 38293 - RNA, 22 nt, Synthetic Construct
  source 1..22: mol_type = other RNA
tgtcagtttgtcaaatacccct

SEQ ID NO: 38294 - RNA, 23 nt, Synthetic Construct
  source 1..23: mol_type = other RNA
tacagtagtctgcacattggtta

SEQ ID NO: 38295 - RNA, 17 nt, Synthetic Construct
  source 1..17: mol_type = other RNA
tggccgtcgtcagctcg

SEQ ID NO: 38296 - RNA, 22 nt, Synthetic Construct
  source 1..22: mol_type = other RNA
aatgacacgatcactcccgttg

SEQ ID NO: 38297 - RNA, 22 nt, Synthetic Construct
  source 1..22: mol_type = other RNA
aatgacacgatcactcccgttg

SEQ ID NO: 38298 - RNA, 23 nt, Synthetic Construct
  source 1..23: mol_type = other RNA
tcaagagcaataacgaaaaatgt

SEQ ID NO: 38299 - RNA, 23 nt, Synthetic Construct
  source 1..23: mol_type = other RNA
tcaagagcaataacgaaaaatgt

SEQ ID NO: 38300 - RNA, 17 nt, Synthetic Construct
  source 1..17: mol_type = other RNA
agtgggttatcagaact

SEQ ID NO: 38301 - RNA, 22 nt, Synthetic Construct
  source 1..22: mol_type = other RNA
tcaagagcaataacgaaaaatg

SEQ ID NO: 38302 - RNA, 16 nt, Synthetic Construct
  source 1..16: mol_type = other RNA
tgcaagtcgaacggta

SEQ ID NO: 38303 - RNA, 16 nt, Synthetic Construct
  source 1..16: mol_type = other RNA
tgcaagtcgaacggta

SEQ ID NO: 38304 - RNA, 16 nt, Synthetic Construct
  source 1..16: mol_type = other RNA
agcaagtcgaacggta

SEQ ID NO: 38305 - RNA, 22 nt, Synthetic Construct
  source 1..22: mol_type = other RNA
ccacctcccctgcaaacgtcca

SEQ ID NO: 38306 - RNA, 22 nt, Synthetic Construct
  source 1..22: mol_type = other RNA
ccacctcccctgcaaacgtcca

SEQ ID NO: 38307 - RNA, 21 nt, Synthetic Construct
  source 1..21: mol_type = other RNA
tcctgtactgagctgccccaa

SEQ ID NO: 38308 - RNA, 27 nt, Synthetic Construct
  source 1..27: mol_type = other RNA
ccccccactgctaaatttgactgactt

SEQ ID NO: 38309 - RNA, 23 nt, Synthetic Construct
  source 1..23: mol_type = other RNA
tagcttatcagactgatgttgaa

SEQ ID NO: 38310 - RNA, 23 nt, Synthetic Construct
  source 1..23: mol_type = other RNA
tagcttatcagactgatgttgaa

SEQ ID NO: 38311 - RNA, 20 nt, Synthetic Construct
  source 1..20: mol_type = other RNA
tcccgggtttcggcaccatt

SEQ ID NO: 38312 - RNA, 22 nt, Synthetic Construct
  source 1..22: mol_type = other RNA
gtcagtttgtcaaataccccaa

SEQ ID NO: 38313 - RNA, 23 nt, Synthetic Construct
  source 1..23: mol_type = other RNA
tggagtgtgacaatggtgtttgg

SEQ ID NO: 38314 - RNA, 20 nt, Synthetic Construct
  source 1..20: mol_type = other RNA
tgtaaacatccttgactgga

SEQ ID NO: 38315 - RNA, 20 nt, Synthetic Construct
  source 1..20: mol_type = other RNA
tgtaaacatccttgactgga

SEQ ID NO: 38316 - RNA, 22 nt, Synthetic Construct
  source 1..22: mol_type = other RNA
tggagtgtggcaatggtgtttg

SEQ ID NO: 38317 - RNA, 22 nt, Synthetic Construct
  source 1..22: mol_type = other RNA
tgaggtagtagtttgtgcggtt

SEQ ID NO: 38318 - RNA, 22 nt, Synthetic Construct
  source 1..22: mol_type = other RNA
tgaggtagtagtttgtgcggtt

SEQ ID NO: 38319 - RNA, 23 nt, Synthetic Construct
  source 1..23: mol_type = other RNA
tgaggggcagagagcgaggcttt

SEQ ID NO: 38320 - RNA, 23 nt, Synthetic Construct
  source 1..23: mol_type = other RNA
tgaggggcagagagcgaggcttt

SEQ ID NO: 38321 - RNA, 21 nt, Synthetic Construct
  source 1..21: mol_type = other RNA
agaggtagtaggttgcatagt

SEQ ID NO: 38322 - RNA, 21 nt, Synthetic Construct
  source 1..21: mol_type = other RNA
agaggtagtaggttgcatagt

SEQ ID NO: 38323 - RNA, 18 nt, Synthetic Construct
  source 1..18: mol_type = other RNA
atcccacttctgacacca

SEQ ID NO: 38324 - RNA, 18 nt, Synthetic Construct
  source 1..18: mol_type = other RNA
atcccacttctgacacca

SEQ ID NO: 38325 - RNA, 22 nt, Synthetic Construct
  source 1..22: mol_type = other RNA
tagcagcacgtaaatactggcg

SEQ ID NO: 38326 - RNA, 22 nt, Synthetic Construct
  source 1..22: mol_type = other RNA
tagcagcacgtaaatactggcg

SEQ ID NO: 38327 - RNA, 19 nt, Synthetic Construct
  source 1..19: mol_type = other RNA
cagagttctacagtccgac

SEQ ID NO: 38328 - RNA, 19 nt, Synthetic Construct
  source 1..19: mol_type = other RNA
cagagttctacagtccgac

SEQ ID NO: 38329 - RNA, 23 nt, Synthetic Construct
  source 1..23: mol_type = other RNA
ttggtccccttcaaccagctgta

SEQ ID NO: 38330 - RNA, 23 nt, Synthetic Construct
  source 1..23: mol_type = other RNA
ttggtccccttcaaccagctgta

SEQ ID NO: 38331 - RNA, 24 nt, Synthetic Construct
  source 1..24: mol_type = other RNA
gtcagtttgtcaaataccccaatt

SEQ ID NO: 38332 - RNA, 16 nt, Synthetic Construct
  source 1..16: mol_type = other RNA
gactacggccatacca

SEQ ID NO: 38333 - RNA, 15 nt, Synthetic Construct
  source 1..15: mol_type = other RNA
catgccgcgtgcggg

SEQ ID NO: 38334 - RNA, 23 nt, Synthetic Construct
  source 1..23: mol_type = other RNA
caacgggatcccaaaagcagctg

SEQ ID NO: 38335 - RNA, 22 nt, Synthetic Construct
  source 1..22: mol_type = other RNA
tgaggtagtaatttgtgctgtt

SEQ ID NO: 38336 - RNA, 22 nt, Synthetic Construct
  source 1..22: mol_type = other RNA
tgaggtagtaatttgtgctgtt

SEQ ID NO: 38337 - RNA, 22 nt, Synthetic Construct
  source 1..22: mol_type = other RNA
cctctgggcccttcctccagtt

SEQ ID NO: 38338 - RNA, 16 nt, Synthetic Construct
  source 1..16: mol_type = other RNA
gtctacggccatacaa

SEQ ID NO: 38339 - RNA, 16 nt, Synthetic Construct
  source 1..16: mol_type = other RNA
gtctacggccatacaa

SEQ ID NO: 38340 - RNA, 21 nt, Synthetic Construct
  source 1..21: mol_type = other RNA
tccttcattccaccggagtct

SEQ ID NO: 38341 - RNA, 24 nt, Synthetic Construct
  source 1..24: mol_type = other RNA
tcctccctcgggagggcgcgcggg

SEQ ID NO: 38342 - RNA, 24 nt, Synthetic Construct
  source 1..24: mol_type = other RNA
tcctccctcgggagggcgcgcggg

SEQ ID NO: 38343 - RNA, 23 nt, Synthetic Construct
  source 1..23: mol_type = other RNA
atcacattgccagggatttccaa

SEQ ID NO: 38344 - RNA, 22 nt, Synthetic Construct
  source 1..22: mol_type = other RNA
catagcacttgtctcggtctga

SEQ ID NO: 38345 - RNA, 23 nt, Synthetic Construct
  source 1..23: mol_type = other RNA
atcacattgccagggatttccaa

SEQ ID NO: 38346 - RNA, 23 nt, Synthetic Construct
  source 1..23: mol_type = other RNA
atcacattgccagggatttccaa

SEQ ID NO: 38347 - RNA, 24 nt, Synthetic Construct
  source 1..24: mol_type = other RNA
tgaggtagtaggttgtgtggttta

SEQ ID NO: 38348 - RNA, 24 nt, Synthetic Construct
  source 1..24: mol_type = other RNA
tgaggtagtaggttgtgtggttta

SEQ ID NO: 38349 - RNA, 21 nt, Synthetic Construct
  source 1..21: mol_type = other RNA
tggagtgtgacaacggtgttt

SEQ ID NO: 38350 - RNA, 23 nt, Synthetic Construct
  source 1..23: mol_type = other RNA
tcctgtactgagctgctccgaga

SEQ ID NO: 38351 - RNA, 21 nt, Synthetic Construct
  source 1..21: mol_type = other RNA
gagttctacagtccgacgatc

SEQ ID NO: 38352 - RNA, 21 nt, Synthetic Construct
  source 1..21: mol_type = other RNA
gagttctacagtccgacgatc

SEQ ID NO: 38353 - RNA, 22 nt, Synthetic Construct
  source 1..22: mol_type = other RNA
cattgcacttgtcccggtctga

SEQ ID NO: 38354 - RNA, 21 nt, Synthetic Construct
  source 1..21: mol_type = other RNA
cgtaccgtgagtaataacgcg

SEQ ID NO: 38355 - RNA, 23 nt, Synthetic Construct
  source 1..23: mol_type = other RNA
tggtaatacgacgtacttagtgc

SEQ ID NO: 38356 - RNA, 23 nt, Synthetic Construct
  source 1..23: mol_type = other RNA
tggtaatacgacgtacttagtgc

SEQ ID NO: 38357 - RNA, 22 nt, Synthetic Construct
  source 1..22: mol_type = other RNA
aagcagcacgtaaatattggag

SEQ ID NO: 38358 - RNA, 22 nt, Synthetic Construct
  source 1..22: mol_type = other RNA
aagcagcacgtaaatattggag

SEQ ID NO: 38359 - RNA, 22 nt, Synthetic Construct
  source 1..22: mol_type = other RNA
ttatggtttgcctgggactgag

SEQ ID NO: 38360 - RNA, 22 nt, Synthetic Construct
  source 1..22: mol_type = other RNA
ttatggtttgcctgggactgag

SEQ ID NO: 38361 - RNA, 22 nt, Synthetic Construct
  source 1..22: mol_type = other RNA
aaaagctgggttgagagggcga

SEQ ID NO: 38362 - RNA, 24 nt, Synthetic Construct
  source 1..24: mol_type = other RNA
agcagcattgtacagggctatgag

SEQ ID NO: 38363 - RNA, 23 nt, Synthetic Construct
  source 1..23: mol_type = other RNA
tgacctatgaattgacagccagt

SEQ ID NO: 38364 - RNA, 23 nt, Synthetic Construct
  source 1..23: mol_type = other RNA
tgacctatgaattgacagccagt

SEQ ID NO: 38365 - RNA, 22 nt, Synthetic Construct
  source 1..22: mol_type = other RNA
tagcagcacgtaaacattggcg

SEQ ID NO: 38366 - RNA, 22 nt, Synthetic Construct
  source 1..22: mol_type = other RNA
tagcagcacgtaaacattggcg

SEQ ID NO: 38367 - RNA, 22 nt, Synthetic Construct
  source 1..22: mol_type = other RNA
tgaggtagtaggttgtgaggtt

SEQ ID NO: 38368 - RNA, 23 nt, Synthetic Construct
  source 1..23: mol_type = other RNA
tgtcagtttgccaaataccccaa

SEQ ID NO: 38369 - RNA, 23 nt, Synthetic Construct
  source 1..23: mol_type = other RNA
tgtcagtttgccaaataccccaa

SEQ ID NO: 38370 - RNA, 19 nt, Synthetic Construct
  source 1..19: mol_type = other RNA
ggctggtccgatggtagtg

SEQ ID NO: 38371 - RNA, 22 nt, Synthetic Construct
  source 1..22: mol_type = other RNA
tattgcacctgtcccggcctgt

SEQ ID NO: 38372 - RNA, 23 nt, Synthetic Construct
  source 1..23: mol_type = other RNA
atgacacgatcactcccgttgag

SEQ ID NO: 38373 - RNA, 31 nt, Synthetic Construct; identical to SEQ ID NO: 2333
  source 1..31: mol_type = other RNA

SEQ ID NO: 38374 - RNA, 22 nt, Synthetic Construct
  source 1..22: mol_type = other RNA
aatggcgccactagggttgtgt

SEQ ID NO: 38375 - RNA, 23 nt, Synthetic Construct
  source 1..23: mol_type = other RNA
caacggaatcccaaaagcagctg

SEQ ID NO: 38376 - RNA, 23 nt, Synthetic Construct
  source 1..23: mol_type = other RNA
caacggaatcccaaaagcagctg

SEQ ID NO: 38377 - RNA, 22 nt, Synthetic Construct
  source 1..22: mol_type = other RNA
acaatgtaggtaagggaagtcg

SEQ ID NO: 38378 - RNA, 22 nt, Synthetic Construct
  source 1..22: mol_type = other RNA
acaatgtaggtaagggaagtcg

SEQ ID NO: 38379 - RNA, 22 nt, Synthetic Construct
  source 1..22: mol_type = other RNA
ctccctcgggagggcgcgcggg

SEQ ID NO: 38380 - RNA, 22 nt, Synthetic Construct
  source 1..22: mol_type = other RNA
ctccctcgggagggcgcgcggg

SEQ ID NO: 38381 - RNA, 22 nt, Synthetic Construct
  source 1..22: mol_type = other RNA
cgttgcacttgtctcggtctga

SEQ ID NO: 38382 - RNA, 19 nt, Synthetic Construct
  source 1..19: mol_type = other RNA
cagcactctgcaaagacga

SEQ ID NO: 38383 - RNA, 22 nt, Synthetic Construct
  source 1..22: mol_type = other RNA
tgaggcagtagattgtatagtt

SEQ ID NO: 38384 - RNA, 22 nt, Synthetic Construct
  source 1..22: mol_type = other RNA
tgaggcagtagattgtatagtt

SEQ ID NO: 38385 - RNA, 22 nt, Synthetic Construct
  source 1..22: mol_type = other RNA
tagcagcacgtaaatattggtg

SEQ ID NO: 38386 - RNA, 22 nt, Synthetic Construct
  source 1..22: mol_type = other RNA
tagcagcacgtaaatattggtg

SEQ ID NO: 38387 - RNA, 24 nt, Synthetic Construct
  source 1..24: mol_type = other RNA
tgtaaacatccccgactggaagct

SEQ ID NO: 38388 - RNA, 24 nt, Synthetic Construct
  source 1..24: mol_type = other RNA
tgtaaacatccccgactggaagct

SEQ ID NO: 38389 - RNA, 21 nt, Synthetic Construct
  source 1..21: mol_type = other RNA
tacagtagtctgcacattggt

SEQ ID NO: 38390 - RNA, 21 nt, Synthetic Construct
  source 1..21: mol_type = other RNA
tacagtagtctgcacattggt

SEQ ID NO: 38391 - RNA, 22 nt, Synthetic Construct
  source 1..22: mol_type = other RNA
tggaatgtaaggaagtgtgtgg

SEQ ID NO: 38392 - RNA, 22 nt, Synthetic Construct
  source 1..22: mol_type = other RNA
tgcagtgtttcctactttatgg

SEQ ID NO: 38393 - RNA, 22 nt, Synthetic Construct
  source 1..22: mol_type = other RNA
ttcaagtaatccaggataggcc

SEQ ID NO: 38394 - RNA, 22 nt, Synthetic Construct
  source 1..22: mol_type = other RNA
tcgtaccgtgagcaataatgcg

SEQ ID NO: 38395 - RNA, 24 nt, Synthetic Construct
  source 1..24: mol_type = other RNA
atgacacgatcactcccgttgagt

SEQ ID NO: 38396 - RNA, 24 nt, Synthetic Construct
  source 1..24: mol_type = other RNA
atgacacgatcactcccgttgagt

SEQ ID NO: 38397 - RNA, 37 nt, Synthetic Construct; identical to SEQ ID NO: 715
  source 1..37: mol_type = other RNA

SEQ ID NO: 38398 - RNA, 18 nt, Synthetic Construct
  source 1..18: mol_type = other RNA
ggctttgaagtaaggtcg

SEQ ID NO: 38399 - RNA, 24 nt, Synthetic Construct
  source 1..24: mol_type = other RNA
tgtaaacatccccgactggaagtt

SEQ ID NO: 38400 - RNA, 24 nt, Synthetic Construct
  source 1..24: mol_type = other RNA
tgtaaacatccccgactggaagtt

SEQ ID NO: 38401 - RNA, 23 nt, Synthetic Construct
  source 1..23: mol_type = other RNA
tcctgcactgagctgccccgagt

SEQ ID NO: 38402 - RNA, 22 nt, Synthetic Construct
  source 1..22: mol_type = other RNA
aggggcagagagcgagactttt

SEQ ID NO: 38403 - RNA, 22 nt, Synthetic Construct
  source 1..22: mol_type = other RNA
aggggcagagagcgagactttt

SEQ ID NO: 38404 - RNA, 22 nt, Synthetic Construct
  source 1..22: mol_type = other RNA
tcctgtactgagctgccccgac

SEQ ID NO: 38405 - RNA, 22 nt, Synthetic Construct
  source 1..22: mol_type = other RNA
tcctgtactgagctgccccgac

SEQ ID NO: 38406 - RNA, 22 nt, Synthetic Construct
  source 1..22: mol_type = other RNA
tagcagcacgtaaatattggct

SEQ ID NO: 38407 - RNA, 22 nt, Synthetic Construct
  source 1..22: mol_type = other RNA
tagcagcacgtaaatattggct

SEQ ID NO: 38408 - RNA, 22 nt, Synthetic Construct
  source 1..22: mol_type = other RNA
tcataccgtgagtaataatgcg

SEQ ID NO: 38409 - RNA, 22 nt, Synthetic Construct
  source 1..22: mol_type = other RNA
tcataccgtgagtaataatgcg

SEQ ID NO: 38410 - RNA, 20 nt, Synthetic Construct
  source 1..20: mol_type = other RNA
aaacggcgggagtaactatg

SEQ ID NO: 38411 - RNA, 29 nt, Synthetic Construct
  source 1..29: mol_type = other RNA
gctaaacctagccccaaacccactccacc

SEQ ID NO: 38412 - RNA, 16 nt, Synthetic Construct
  source 1..16: mol_type = other RNA
gtctacggccataccc

SEQ ID NO: 38413 - RNA, 16 nt, Synthetic Construct
  source 1..16: mol_type = other RNA
cccgtcgctactaccg

SEQ ID NO: 38414 - RNA, 16 nt, Synthetic Construct
  source 1..16: mol_type = other RNA
cccgtcgctactaccg

SEQ ID NO: 38415 - RNA, 22 nt, Synthetic Construct
  source 1..22: mol_type = other RNA
tagcagcacgtaaaaattggcg

SEQ ID NO: 38416 - RNA, 22 nt, Synthetic Construct
  source 1..22: mol_type = other RNA
tagcagcacgtaaaaattggcg

SEQ ID NO: 38417 - RNA, 22 nt, Synthetic Construct
  source 1..22: mol_type = other RNA
tagcagcacgtgaatattggcg

SEQ ID NO: 38418 - RNA, 22 nt, Synthetic Construct
  source 1..22: mol_type = other RNA
gaagttgttcgtggtggattcg

SEQ ID NO: 38419 - RNA, 33 nt, Synthetic Construct; identical to SEQ ID NO: 33377
  source 1..33: mol_type = other RNA

SEQ ID NO: 38420 - RNA, 33 nt, Synthetic Construct; identical to SEQ ID NO: 33377
  source 1..33: mol_type = other RNA

SEQ ID NO: 38421 - RNA, 20 nt, Synthetic Construct
  source 1..20: mol_type = other RNA
agaggtagtaggttgtgtgg

SEQ ID NO: 38422 - RNA, 20 nt, Synthetic Construct
  source 1..20: mol_type = other RNA
agaggtagtaggttgtgtgg

SEQ ID NO: 38423 - RNA, 21 nt, Synthetic Construct
  source 1..21: mol_type = other RNA
ctagactggagctccttgagg

SEQ ID NO: 38424 - RNA, 21 nt, Synthetic Construct
  source 1..21: mol_type = other RNA
ctagactggagctccttgagg

SEQ ID NO: 38425 - RNA, 23 nt, Synthetic Construct
  source 1..23: mol_type = other RNA
tggctcagttcagcaggaacagt

SEQ ID NO: 38426 - RNA, 23 nt, Synthetic Construct
  source 1..23: mol_type = other RNA
tggctcagttcagcaggaacagt

SEQ ID NO: 38427 - RNA, 24 nt, Synthetic Construct
  source 1..24: mol_type = other RNA
tgtaaacatccctgactggaagct

SEQ ID NO: 38428 - RNA, 24 nt, Synthetic Construct
  source 1..24: mol_type = other RNA
tgtaaacatccctgactggaagct

SEQ ID NO: 38429 - RNA, 21 nt, Synthetic Construct
  source 1..21: mol_type = other RNA
tgaggtagtaggttatgtggt

SEQ ID NO: 38430 - RNA, 21 nt, Synthetic Construct
  source 1..21: mol_type = other RNA
tgaggtagtaggttatgtggt

SEQ ID NO: 38431 - RNA, 15 nt, Synthetic Construct
  source 1..15: mol_type = other RNA
tacagtccgacgatc

SEQ ID NO: 38432 - RNA, 15 nt, Synthetic Construct
  source 1..15: mol_type = other RNA
tacagtccgacgatc

SEQ ID NO: 38433 - RNA, 23 nt, Synthetic Construct
  source 1..23: mol_type = other RNA
tgagaactgaattccatgggtta

SEQ ID NO: 38434 - RNA, 25 nt, Synthetic Construct
  source 1..25: mol_type = other RNA
tgaggtagtaggttgtgtggttttt

SEQ ID NO: 38435 - RNA, 20 nt, Synthetic Construct
  source 1..20: mol_type = other RNA
tccccggcatctccaccaaa

SEQ ID NO: 38436 - RNA, 20 nt, Synthetic Construct
  source 1..20: mol_type = other RNA
tccccggcatctccaccaaa

SEQ ID NO: 38437 - RNA, 16 nt, Synthetic Construct
  source 1..16: mol_type = other RNA
agggaacgtgagctgg

SEQ ID NO: 38438 - RNA, 16 nt, Synthetic Construct
  source 1..16: mol_type = other RNA
agggaacgtgagctgg

SEQ ID NO: 38439 - RNA, 21 nt, Synthetic Construct
  source 1..21: mol_type = other RNA
tgaggtagtagactgtatagt

SEQ ID NO: 38440 - RNA, 20 nt, Synthetic Construct
  source 1..20: mol_type = other RNA
cccagtaaacggcggccgta

SEQ ID NO: 38441 - RNA, 27 nt, Synthetic Construct
  source 1..27: mol_type = other RNA
ccccccacagctaaatttgactggctt

SEQ ID NO: 38442 - RNA, 22 nt, Synthetic Construct
  source 1..22: mol_type = other RNA
taggtagtttcctgttgttggg

SEQ ID NO: 38443 - RNA, 23 nt, Synthetic Construct
  source 1..23: mol_type = other RNA
tgtagtgtttcctactttatgga

SEQ ID NO: 38444 - RNA, 23 nt, Synthetic Construct
  source 1..23: mol_type = other RNA
tgtagtgtttcctactttatgga

SEQ ID NO: 38445 - RNA, 19 nt, Synthetic Construct
  source 1..19: mol_type = other RNA
ccgtgttcggaagattttc

SEQ ID NO: 38446 - RNA, 23 nt, Synthetic Construct
  source 1..23: mol_type = other RNA
tggtaataagacgtacttagtgt

SEQ ID NO: 38447 - RNA, 27 nt, Synthetic Construct
  source 1..27: mol_type = other RNA
tcccccactgctaaatttgactggctt

SEQ ID NO: 38448 - RNA, 22 nt, Synthetic Construct
  source 1..22: mol_type = other RNA
cagggctggcagtgacatgggt

SEQ ID NO: 38449 - RNA, 21 nt, Synthetic Construct
  source 1..21: mol_type = other RNA
tggggtagtaggttgtatagt

SEQ ID NO: 38450 - RNA, 21 nt, Synthetic Construct
  source 1..21: mol_type = other RNA
tggggtagtaggttgtatagt

SEQ ID NO: 38451 - RNA, 27 nt, Synthetic Construct
  source 1..27: mol_type = other RNA
ccgtgtgaaagtaggtcatcgtcaggc

SEQ ID NO: 38452 - RNA, 22 nt, Synthetic Construct
  source 1..22: mol_type = other RNA
agcagcattgtacagggctatg

SEQ ID NO: 38453 - RNA, 22 nt, Synthetic Construct
  source 1..22: mol_type = other RNA
agcagcattgtacagggctatg

SEQ ID NO: 38454 - RNA, 15 nt, Synthetic Construct
  source 1..15: mol_type = other RNA
aaattccttgtcggg

SEQ ID NO: 38455 - RNA, 27 nt, Synthetic Construct
  source 1..27: mol_type = other RNA
ccccccactgctaagtttgactggctt

SEQ ID NO: 38456 - RNA, 27 nt, Synthetic Construct
  source 1..27: mol_type = other RNA
ccccccactgctaagtttgactggctt

SEQ ID NO: 38457 - RNA, 18 nt, Synthetic Construct
  source 1..18: mol_type = other RNA
cagcactctgcaaagacg

SEQ ID NO: 38458 - RNA, 18 nt, Synthetic Construct
  source 1..18: mol_type = other RNA
cagcactctgcaaagacg

SEQ ID NO: 38459 - RNA, 30 nt, Synthetic Construct; identical to SEQ ID NO: 2308
  source 1..30: mol_type = other RNA

SEQ ID NO: 38460 - RNA, 42 nt, Synthetic Construct; identical to SEQ ID NO: 8009
  source 1..42: mol_type = other RNA

SEQ ID NO: 38461 - RNA, 42 nt, Synthetic Construct; identical to SEQ ID NO: 8009
  source 1..42: mol_type = other RNA

SEQ ID NO: 38462 - RNA, 22 nt, Synthetic Construct
  source 1..22: mol_type = other RNA
tgaggaagtaggttgtgtggtt

SEQ ID NO: 38463 - RNA, 21 nt, Synthetic Construct
  source 1..21: mol_type = other RNA
tgaggtagtaggttgtgtgga

SEQ ID NO: 38464 - RNA, 21 nt, Synthetic Construct
  source 1..21: mol_type = other RNA
tgaggtagtaggttgtgtgga

SEQ ID NO: 38465 - RNA, 20 nt, Synthetic Construct
  source 1..20: mol_type = other RNA
gaatcgctagtaatcgcgga

SEQ ID NO: 38466 - RNA, 21 nt, Synthetic Construct
  source 1..21: mol_type = other RNA
gaagaggacttggaactcgat

SEQ ID NO: 38467 - RNA, 21 nt, Synthetic Construct
  source 1..21: mol_type = other RNA
gaagaggacttggaactcgat

SEQ ID NO: 38468 - RNA, 22 nt, Synthetic Construct
  source 1..22: mol_type = other RNA
tattgtacttgtcccggcctgt

SEQ ID NO: 38469 - RNA, 22 nt, Synthetic Construct
  source 1..22: mol_type = other RNA
tattgtacttgtcccggcctgt

SEQ ID NO: 38470 - RNA, 20 nt, Synthetic Construct
  source 1..20: mol_type = other RNA
cgtaccgtgagtaataatgc

SEQ ID NO: 38471 - RNA, 20 nt, Synthetic Construct
  source 1..20: mol_type = other RNA
cgtaccgtgagtaataatgc

SEQ ID NO: 38472 - RNA, 16 nt, Synthetic Construct
  source 1..16: mol_type = other RNA
gatctgtagctggtct

SEQ ID NO: 38473 - RNA, 16 nt, Synthetic Construct
  source 1..16: mol_type = other RNA
gatctgtagctggtct

SEQ ID NO: 38474 - RNA, 24 nt, Synthetic Construct
  source 1..24: mol_type = other RNA
acagtagtctgcacattggttatt

SEQ ID NO: 38475 - RNA, 17 nt, Synthetic Construct
  source 1..17: mol_type = other RNA
cttgaccgctctgacca

SEQ ID NO: 38476 - RNA, 25 nt, Synthetic Construct
  source 1..25: mol_type = other RNA
tgaggtagtaggttgtgtggttatt

SEQ ID NO: 38477 - RNA, 42 nt, Synthetic Construct; identical to SEQ ID NO: 6990
  source 1..42: mol_type = other RNA

SEQ ID NO: 38478 - RNA, 42 nt, Synthetic Construct; identical to SEQ ID NO: 6990
  source 1..42: mol_type = other RNA

SEQ ID NO: 38479 - RNA, 23 nt, Synthetic Construct
  source 1..23: mol_type = other RNA
caaagtgccgttcgtgcaggtag

SEQ ID NO: 38480 - RNA, 22 nt, Synthetic Construct
  source 1..22: mol_type = other RNA
tagcaacacgtaaatattggcg

SEQ ID NO: 38481 - RNA, 22 nt, Synthetic Construct
  source 1..22: mol_type = other RNA
ctggctagggaaaatgattgga

SEQ ID NO: 38482 - RNA, 22 nt, Synthetic Construct
  source 1..22: mol_type = other RNA
ctggctagggaaaatgattgga

SEQ ID NO: 38483 - RNA, 27 nt, Synthetic Construct
  source 1..27: mol_type = other RNA
ccccccacagctaaatttgactggcta

SEQ ID NO: 38484 - RNA, 21 nt, Synthetic Construct
  source 1..21: mol_type = other RNA
cataattacttttggtacgcg

SEQ ID NO: 38485 - RNA, 21 nt, Synthetic Construct
  source 1..21: mol_type = other RNA
cataattacttttggtacgcg

SEQ ID NO: 38486 - RNA, 22 nt, Synthetic Construct
  source 1..22: mol_type = other RNA
tgtgcaaatctatgcaaaactg

SEQ ID NO: 38487 - RNA, 21 nt, Synthetic Construct
  source 1..21: mol_type = other RNA
tggggtagtaggttgtatagt

SEQ ID NO: 38488 - RNA, 21 nt, Synthetic Construct
  source 1..21: mol_type = other RNA
tggggtagtaggttgtatagt

SEQ ID NO: 38489 - RNA, 21 nt, Synthetic Construct
  source 1..21: mol_type = other RNA
tgtcttgcaggccgtcatgca

SEQ ID NO: 38490 - RNA, 21 nt, Synthetic Construct
  source 1..21: mol_type = other RNA
tgtcttgcaggccgtcatgca

SEQ ID NO: 38491 - RNA, 23 nt, Synthetic Construct
  source 1..23: mol_type = other RNA
tgaggtagtaggttgtatggttt

SEQ ID NO: 38492 - RNA, 23 nt, Synthetic Construct
  source 1..23: mol_type = other RNA
tgaggtagtaggttgtatggttt

SEQ ID NO: 38493 - RNA, 21 nt, Synthetic Construct
  source 1..21: mol_type = other RNA
cagcattgtacagggctatga

SEQ ID NO: 38494 - RNA, 21 nt, Synthetic Construct
  source 1..21: mol_type = other RNA
cagcattgtacagggctatga

SEQ ID NO: 38495 - RNA, 22 nt, Synthetic Construct
  source 1..22: mol_type = other RNA
catcgggaatgtcgtgtccgcc

SEQ ID NO: 38496 - RNA, 23 nt, Synthetic Construct
  source 1..23: mol_type = other RNA
cgaagtgctgttcgtgcaggtag

SEQ ID NO: 38497 - RNA, 16 nt, Synthetic Construct
  source 1..16: mol_type = other RNA
caggacggtggccatg

SEQ ID NO: 38498 - RNA, 22 nt, Synthetic Construct
  source 1..22: mol_type = other RNA
tattgcacttgtcccggtctgt

SEQ ID NO: 38499 - RNA, 23 nt, Synthetic Construct
  source 1..23: mol_type = other RNA
agtcagtttgtcaaataccccaa

SEQ ID NO: 38500 - RNA, 18 nt, Synthetic Construct
  source 1..18: mol_type = other RNA
atggccgggacagagggc

SEQ ID NO: 38501 - RNA, 18 nt, Synthetic Construct
  source 1..18: mol_type = other RNA
cctcgcgcgattggagcg

SEQ ID NO: 38502 - RNA, 18 nt, Synthetic Construct
  source 1..18: mol_type = other RNA
cctcgcgcgattggagcg

SEQ ID NO: 38503 - RNA, 23 nt, Synthetic Construct
  source 1..23: mol_type = other RNA
cagcccgtgttcggaagattttc

SEQ ID NO: 38504 - RNA, 23 nt, Synthetic Construct
  source 1..23: mol_type = other RNA
cagcccgtgttcggaagattttc

SEQ ID NO: 38505 - RNA, 30 nt, Synthetic Construct; identical to SEQ ID NO: 1236
  source 1..30: mol_type = other RNA

SEQ ID NO: 38506 - RNA, 30 nt, Synthetic Construct; identical to SEQ ID NO: 1236
  source 1..30: mol_type = other RNA

SEQ ID NO: 38507 - RNA, 22 nt, Synthetic Construct
  source 1..22: mol_type = other RNA
tgagatagtagattgtatagtt

SEQ ID NO: 38508 - RNA, 22 nt, Synthetic Construct
  source 1..22: mol_type = other RNA
tgagatagtagattgtatagtt

SEQ ID NO: 38509 - RNA, 17 nt, Synthetic Construct
  source 1..17: mol_type = other RNA
caggacggtggccatgg

SEQ ID NO: 38510 - RNA, 17 nt, Synthetic Construct
  source 1..17: mol_type = other RNA
caggacggtggccatgg

SEQ ID NO: 38511 - RNA, 22 nt, Synthetic Construct
  source 1..22: mol_type = other RNA
tgaggtagaagtttgtgctgtt

SEQ ID NO: 38512 - RNA, 22 nt, Synthetic Construct
  source 1..22: mol_type = other RNA
tgaggtagaagtttgtgctgtt

SEQ ID NO: 38513 - RNA, 20 nt, Synthetic Construct
  source 1..20: mol_type = other RNA
caaagaattctccttttggg

SEQ ID NO: 38514 - RNA, 23 nt, Synthetic Construct
  source 1..23: mol_type = other RNA
actcggcgtggcgtcggtcgtgg

SEQ ID NO: 38515 - RNA, 23 nt, Synthetic Construct
  source 1..23: mol_type = other RNA
actcggcgtggcgtcggtcgtgg

SEQ ID NO: 38516 - RNA, 18 nt, Synthetic Construct
  source 1..18: mol_type = other RNA
gttctacagtccgacgat

SEQ ID NO: 38517 - RNA, 18 nt, Synthetic Construct
  source 1..18: mol_type = other RNA
gttctacagtccgacgat

SEQ ID NO: 38518 - RNA, 21 nt, Synthetic Construct
  source 1..21: mol_type = other RNA
tgaggtagcagattgtatagt

SEQ ID NO: 38519 - RNA, 16 nt, Synthetic Construct
  source 1..16: mol_type = other RNA
gtctacggccatacca

SEQ ID NO: 38520 - RNA, 16 nt, Synthetic Construct
  source 1..16: mol_type = other RNA
gtctacggccatacca

SEQ ID NO: 38521 - RNA, 21 nt, Synthetic Construct
  source 1..21: mol_type = other RNA
ttatcagaatctccaggggta

SEQ ID NO: 38522 - RNA, 23 nt, Synthetic Construct
  source 1..23: mol_type = other RNA
agcagcattgtacagggctatct

SEQ ID NO: 38523 - RNA, 23 nt, Synthetic Construct
  source 1..23: mol_type = other RNA
agcagcattgtacagggctatct

SEQ ID NO: 38524 - RNA, 21 nt, Synthetic Construct
  source 1..21: mol_type = other RNA
cccataaagtagaaagcacta

SEQ ID NO: 38525 - RNA, 21 nt, Synthetic Construct
  source 1..21: mol_type = other RNA
cccataaagtagaaagcacta

SEQ ID NO: 38526 - RNA, 22 nt, Synthetic Construct
  source 1..22: mol_type = other RNA
tcgcagcacgtaaatattggcg

SEQ ID NO: 38527 - RNA, 22 nt, Synthetic Construct
  source 1..22: mol_type = other RNA
tcgcagcacgtaaatattggcg

SEQ ID NO: 38528 - RNA, 23 nt, Synthetic Construct
  source 1..23: mol_type = other RNA
tggaaatacgacgtacttagtgt

SEQ ID NO: 38529 - RNA, 23 nt, Synthetic Construct
  source 1..23: mol_type = other RNA
tggaaatacgacgtacttagtgt

SEQ ID NO: 38530 - RNA, 20 nt, Synthetic Construct
  source 1..20: mol_type = other RNA
attgcacttgtcccggcctg

SEQ ID NO: 38531 - RNA, 20 nt, Synthetic Construct
  source 1..20: mol_type = other RNA
attgcacttgtcccggcctg

SEQ ID NO: 38532 - RNA, 22 nt, Synthetic Construct
  source 1..22: mol_type = other RNA
tcgcagcacgtaaatattggcg

SEQ ID NO: 38533 - RNA, 22 nt, Synthetic Construct
  source 1..22: mol_type = other RNA
tcgcagcacgtaaatattggcg

SEQ ID NO: 38534 - RNA, 16 nt, Synthetic Construct
  source 1..16: mol_type = other RNA
caggacggtggccatg

SEQ ID NO: 38535 - RNA, 17 nt, Synthetic Construct
  source 1..17: mol_type = other RNA
gtccggatcgtagtctg

SEQ ID NO: 38536 - RNA, 22 nt, Synthetic Construct
  source 1..22: mol_type = other RNA
tctgcccagtgctctgaatgtc

SEQ ID NO: 38537 - RNA, 22 nt, Synthetic Construct
  source 1..22: mol_type = other RNA
tctgcccagtgctctgaatgtc

SEQ ID NO: 38538 - RNA, 21 nt, Synthetic Construct
  source 1..21: mol_type = other RNA
tgaggtagaaggttgtgtggt

SEQ ID NO: 38539 - RNA, 22 nt, Synthetic Construct
  source 1..22: mol_type = other RNA
tgaggtagtaggttgtacagtt

SEQ ID NO: 38540 - RNA, 22 nt, Synthetic Construct
  source 1..22: mol_type = other RNA
tgaggtagtaggttgtacagtt

SEQ ID NO: 38541 - RNA, 22 nt, Synthetic Construct
  source 1..22: mol_type = other RNA
tgaggtagaaggttgtatagtt

SEQ ID NO: 38542 - RNA, 32 nt, Synthetic Construct; identical to SEQ ID NO: 34841
  source 1..32: mol_type = other RNA

SEQ ID NO: 38543 - RNA, 22 nt, Synthetic Construct
  source 1..22: mol_type = other RNA
tattgcacttgttccggcctgt

SEQ ID NO: 38544 - RNA, 23 nt, Synthetic Construct
  source 1..23: mol_type = other RNA
aacattcaacgctgtcggtgaga

SEQ ID NO: 38545 - RNA, 21 nt, Synthetic Construct
  source 1..21: mol_type = other RNA
tggagtgtgacaatggcgttt

SEQ ID NO: 38546 - RNA, 21 nt, Synthetic Construct
  source 1..21: mol_type = other RNA
tggagtgtgacaatggcgttt

SEQ ID NO: 38547 - RNA, 23 nt, Synthetic Construct
  source 1..23: mol_type = other RNA
aatgacacgatcactcccgttga

SEQ ID NO: 38548 - RNA, 23 nt, Synthetic Construct
  source 1..23: mol_type = other RNA
aatgacacgatcactcccgttga

SEQ ID NO: 38549 - RNA, 21 nt, Synthetic Construct
  source 1..21: mol_type = other RNA
tcctgtactgagctgccacga

SEQ ID NO: 38550 - RNA, 21 nt, Synthetic Construct
  source 1..21: mol_type = other RNA
tcctgtactgagctgccacga

SEQ ID NO: 38551 - RNA, 23 nt, Synthetic Construct
  source 1..23: mol_type = other RNA
tgaggtagtaggttgtgtggtct

SEQ ID NO: 38552 - RNA, 22 nt, Synthetic Construct
  source 1..22: mol_type = other RNA
tagcagtacgtaaatattggcg

SEQ ID NO: 38553 - RNA, 22 nt, Synthetic Construct
  source 1..22: mol_type = other RNA
tagcagtacgtaaatattggcg

SEQ ID NO: 38554 - RNA, 23 nt, Synthetic Construct
  source 1..23: mol_type = other RNA
agcaacattgtctgctgggtttc

SEQ ID NO: 38555 - RNA, 23 nt, Synthetic Construct
  source 1..23: mol_type = other RNA
ggcagcattgtacagggctatgt

SEQ ID NO: 38556 - RNA, 18 nt, Synthetic Construct
  source 1..18: mol_type = other RNA
gcagcgatggccgagtgg

SEQ ID NO: 38557 - RNA, 27 nt, Synthetic Construct
  source 1..27: mol_type = other RNA
ctccccactgctaaatttgactggctt

SEQ ID NO: 38558 - RNA, 23 nt, Synthetic Construct
  source 1..23: mol_type = other RNA
tgagcgcctcgacgacagagccg

SEQ ID NO: 38559 - RNA, 23 nt, Synthetic Construct
  source 1..23: mol_type = other RNA
tgagcgcctcgacgacagagccg

SEQ ID NO: 38560 - RNA, 27 nt, Synthetic Construct
  source 1..27: mol_type = other RNA
ccccccattgctaaatttgactggctt

SEQ ID NO: 38561 - RNA, 27 nt, Synthetic Construct
  source 1..27: mol_type = other RNA
ccccccattgctaaatttgactggctt

SEQ ID NO: 38562 - RNA, 23 nt, Synthetic Construct
  source 1..23: mol_type = other RNA
tggtgatacgacgtacttagtgt

SEQ ID NO: 38563 - RNA, 23 nt, Synthetic Construct
  source 1..23: mol_type = other RNA
tggtgatacgacgtacttagtgt

SEQ ID NO: 38564 - RNA, 23 nt, Synthetic Construct
  source 1..23: mol_type = other RNA
tctttggttatctagctgtatgt

SEQ ID NO: 38565 - RNA, 23 nt, Synthetic Construct
  source 1..23: mol_type = other RNA
tctttggttatctagctgtatgt

SEQ ID NO: 38566 - RNA, 21 nt, Synthetic Construct
  source 1..21: mol_type = other RNA
agggggaaagttctatagtcc

SEQ ID NO: 38567 - RNA, 21 nt, Synthetic Construct
  source 1..21: mol_type = other RNA
agggggaaagttctatagtcc

SEQ ID NO: 38568 - RNA, 22 nt, Synthetic Construct
  source 1..22: mol_type = other RNA
tgaggtagtaaattgtatagtt

SEQ ID NO: 38569 - RNA, 21 nt, Synthetic Construct
  source 1..21: mol_type = other RNA
tgaggtagtggattgtatagt

SEQ ID NO: 38570 - RNA, 22 nt, Synthetic Construct
  source 1..22: mol_type = other RNA
tattacacttgtcccggcctgt

SEQ ID NO: 38571 - RNA, 23 nt, Synthetic Construct
  source 1..23: mol_type = other RNA
aatgacacgatcactcccgttgt

SEQ ID NO: 38572 - RNA, 23 nt, Synthetic Construct
  source 1..23: mol_type = other RNA
aatgacacgatcactcccgttgt

SEQ ID NO: 38573 - RNA, 22 nt, Synthetic Construct
  source 1..22: mol_type = other RNA
tgaggtagtagtttgtgctgtt

SEQ ID NO: 38574 - RNA, 16 nt, Synthetic Construct
  source 1..16: mol_type = other RNA
gggtctgtagctcagt

SEQ ID NO: 38575 - RNA, 16 nt, Synthetic Construct
  source 1..16: mol_type = other RNA
gggtctgtagctcagt

SEQ ID NO: 38576 - RNA, 21 nt, Synthetic Construct
  source 1..21: mol_type = other RNA
aggttccggataagtagagcc

SEQ ID NO: 38577 - RNA, 22 nt, Synthetic Construct
  source 1..22: mol_type = other RNA
attgcacttgtcccggcctgtt

SEQ ID NO: 38578 - RNA, 23 nt, Synthetic Construct
  source 1..23: mol_type = other RNA
tcctgcactgagctgccccgagt

SEQ ID NO: 38579 - RNA, 32 nt, Synthetic Construct; identical to SEQ ID NO: 14097
  source 1..32: mol_type = other RNA

SEQ ID NO: 38580 - RNA, 19 nt, Synthetic Construct
  source 1..19: mol_type = other RNA
tcctgtaccgatcaatagt

SEQ ID NO: 38581 - RNA, 24 nt, Synthetic Construct
  source 1..24: mol_type = other RNA
ggctacattgtctgctgggtttct

SEQ ID NO: 38582 - RNA, 24 nt, Synthetic Construct
  source 1..24: mol_type = other RNA
ggctacattgtctgctgggtttct

SEQ ID NO: 38583 - RNA, 22 nt, Synthetic Construct
  source 1..22: mol_type = other RNA
tgaggtagaaggttgtatagtt

SEQ ID NO: 38584 - RNA, 21 nt, Synthetic Construct
  source 1..21: mol_type = other RNA
taactccttaagcgaatccgc

SEQ ID NO: 38585 - RNA, 21 nt, Synthetic Construct
  source 1..21: mol_type = other RNA
taactccttaagcgaatccgc

SEQ ID NO: 38586 - RNA, 22 nt, Synthetic Construct
  source 1..22: mol_type = other RNA
tcgtaccgtgagtaatgatgcg

SEQ ID NO: 38587 - RNA, 22 nt, Synthetic Construct
  source 1..22: mol_type = other RNA
tcgtaccgtgagtaatgatgcg

SEQ ID NO: 38588 - RNA, 21 nt, Synthetic Construct
  source 1..21: mol_type = other RNA
aggagtgtgacaatggtgttt

SEQ ID NO: 38589 - RNA, 23 nt, Synthetic Construct
  source 1..23: mol_type = other RNA
tgaggtagtaggttgcgtggttt

SEQ ID NO: 38590 - RNA, 23 nt, Synthetic Construct
  source 1..23: mol_type = other RNA
tagtaatacgacgtacttagtgt

SEQ ID NO: 38591 - RNA, 23 nt, Synthetic Construct
  source 1..23: mol_type = other RNA
tagtaatacgacgtacttagtgt

SEQ ID NO: 38592 - RNA, 21 nt, Synthetic Construct
  source 1..21: mol_type = other RNA
ggctggtccgaaggtagtgag

SEQ ID NO: 38593 - RNA, 21 nt, Synthetic Construct
  source 1..21: mol_type = other RNA
ggctggtccgaaggtagtgag

SEQ ID NO: 38594 - RNA, 22 nt, Synthetic Construct
  source 1..22: mol_type = other RNA
gaagttgttcgtggtggattcg

SEQ ID NO: 38595 - RNA, 21 nt, Synthetic Construct
  source 1..21: mol_type = other RNA
agcagcacgtaaatattggcg

SEQ ID NO: 38596 - RNA, 21 nt, Synthetic Construct
  source 1..21: mol_type = other RNA
agcagcacgtaaatattggcg

SEQ ID NO: 38597 - RNA, 17 nt, Synthetic Construct
  source 1..17: mol_type = other RNA
cgactcttagcggtgga

SEQ ID NO: 38598 - RNA, 17 nt, Synthetic Construct
  source 1..17: mol_type = other RNA
acagtcaggatgttggc

SEQ ID NO: 38599 - RNA, 22 nt, Synthetic Construct
  source 1..22: mol_type = other RNA
tggggtagtaggttgtatagtt

SEQ ID NO: 38600 - RNA, 20 nt, Synthetic Construct
  source 1..20: mol_type = other RNA
taaggtagtaggttgtgtgg

SEQ ID NO: 38601 - RNA, 22 nt, Synthetic Construct
  source 1..22: mol_type = other RNA
taactccctaagcgaatctcgc

SEQ ID NO: 38602 - RNA, 20 nt, Synthetic Construct
  source 1..20: mol_type = other RNA
acccttgtcattagttgcta

SEQ ID NO: 38603 - RNA, 24 nt, Synthetic Construct
  source 1..24: mol_type = other RNA
cccagtgctctgaatgtcaaagtg

SEQ ID NO: 38604 - RNA, 35 nt, Synthetic Construct; identical to SEQ ID NO: 19298
  source 1..35: mol_type = other RNA

SEQ ID NO: 38605 - RNA, 35 nt, Synthetic Construct; identical to SEQ ID NO: 19298
  source 1..35: mol_type = other RNA

SEQ ID NO: 38606 - RNA, 26 nt, Synthetic Construct
  source 1..26: mol_type = other RNA
tgtaaacatccccgactggaagcttt

SEQ ID NO: 38607 - RNA, 26 nt, Synthetic Construct
  source 1..26: mol_type = other RNA
tgtaaacatccccgactggaagcttt

SEQ ID NO: 38608 - RNA, 22 nt, Synthetic Construct
  source 1..22: mol_type = other RNA
cattgcacttgcctcggtctga

SEQ ID NO: 38609 - RNA, 19 nt, Synthetic Construct
  source 1..19: mol_type = other RNA
tagcttatcagactgatgt

SEQ ID NO: 38610 - RNA, 19 nt, Synthetic Construct
  source 1..19: mol_type = other RNA
tagcttatcagactgatgt

SEQ ID NO: 38611 - RNA, 22 nt, Synthetic Construct
  source 1..22: mol_type = other RNA
ggatatcatcatatactgtaag

SEQ ID NO: 38612 - RNA, 22 nt, Synthetic Construct
  source 1..22: mol_type = other RNA
ggatatcatcatatactgtaag

SEQ ID NO: 38613 - RNA, 34 nt, Synthetic Construct; identical to SEQ ID NO: 1526
  source 1..34: mol_type = other RNA

SEQ ID NO: 38614 - RNA, 27 nt, Synthetic Construct
  source 1..27: mol_type = other RNA
ccccccactgctgaatttgactggctt

SEQ ID NO: 38615 - RNA, 27 nt, Synthetic Construct
  source 1..27: mol_type = other RNA
ccccccactgctgaatttgactggctt

SEQ ID NO: 38616 - RNA, 22 nt, Synthetic Construct
  source 1..22: mol_type = other RNA
tgaggtagtagcttgtgctgtt

SEQ ID NO: 38617 - RNA, 22 nt, Synthetic Construct
  source 1..22: mol_type = other RNA
tgaggtagtagcttgtgctgtt

SEQ ID NO: 38618 - RNA, 21 nt, Synthetic Construct
  source 1..21: mol_type = other RNA
tgaggtggtaggttgtatagt

SEQ ID NO: 38619 - RNA, 21 nt, Synthetic Construct
  source 1..21: mol_type = other RNA
tgaggtggtaggttgtatagt

SEQ ID NO: 38620 - RNA, 23 nt, Synthetic Construct
  source 1..23: mol_type = other RNA
tgtcagtttgtcaaataccccaa

SEQ ID NO: 38621 - RNA, 26 nt, Synthetic Construct
  source 1..26: mol_type = other RNA
tcccacatggtctagcggttaggatt

SEQ ID NO: 38622 - RNA, 26 nt, Synthetic Construct
  source 1..26: mol_type = other RNA
tcccacatggtctagcggttaggatt

SEQ ID NO: 38623 - RNA, 20 nt, Synthetic Construct
  source 1..20: mol_type = other RNA
gtacagtactgtgataactg

SEQ ID NO: 38624 - RNA, 20 nt, Synthetic Construct
  source 1..20: mol_type = other RNA
gtacagtactgtgataactg

SEQ ID NO: 38625 - RNA, 28 nt, Synthetic Construct
  source 1..28: mol_type = other RNA
gcggtataccgaagctctaggtgcggca

SEQ ID NO: 38626 - RNA, 28 nt, Synthetic Construct
  source 1..28: mol_type = other RNA
gcggtataccgaagctctaggtgcggca

SEQ ID NO: 38627 - RNA, 20 nt, Synthetic Construct
  source 1..20: mol_type = other RNA
aagctgccagttgaagaact

SEQ ID NO: 38628 - RNA, 20 nt, Synthetic Construct
  source 1..20: mol_type = other RNA
aagctgccagttgaagaact

SEQ ID NO: 38629 - RNA, 20 nt, Synthetic Construct
  source 1..20: mol_type = other RNA
tgaggtagtaggttgtacag

SEQ ID NO: 38630 - RNA, 32 nt, Synthetic Construct; identical to SEQ ID NO: 18425
  source 1..32: mol_type = other RNA

SEQ ID NO: 38631 - RNA, 23 nt, Synthetic Construct
  source 1..23: mol_type = other RNA
tggtaatacgacatacttagtgt

SEQ ID NO: 38632 - RNA, 22 nt, Synthetic Construct
  source 1..22: mol_type = other RNA
ttgcagcacgtaaatattggcg

SEQ ID NO: 38633 - RNA, 22 nt, Synthetic Construct
  source 1..22: mol_type = other RNA
ttgcagcacgtaaatattggcg

SEQ ID NO: 38634 - RNA, 23 nt, Synthetic Construct
  source 1..23: mol_type = other RNA
agcagcattgtacagggctatgg

SEQ ID NO: 38635 - RNA, 23 nt, Synthetic Construct
  source 1..23: mol_type = other RNA
agcagcattgtacagggctatgg

SEQ ID NO: 38636 - RNA, 24 nt, Synthetic Construct
  source 1..24: mol_type = other RNA
tcctgtactgagctgccccgagat

SEQ ID NO: 38637 - RNA, 24 nt, Synthetic Construct
  source 1..24: mol_type = other RNA
tcctgtactgagctgccccgagat

SEQ ID NO: 38638 - RNA, 27 nt, Synthetic Construct
  source 1..27: mol_type = other RNA
ccccccaatgctaaatttgactggctt

SEQ ID NO: 38639 - RNA, 19 nt, Synthetic Construct
  source 1..19: mol_type = other RNA
cgcgacctcagatcagacg

SEQ ID NO: 38640 - RNA, 23 nt, Synthetic Construct
  source 1..23: mol_type = other RNA
tcactgatcgagtcgtcctgcgc

SEQ ID NO: 38641 - RNA, 27 nt, Synthetic Construct
  source 1..27: mol_type = other RNA
ccctccactgctaaatttgactggctt

SEQ ID NO: 38642 - RNA, 22 nt, Synthetic Construct
  source 1..22: mol_type = other RNA
tcctgtactgagctgccccaag

SEQ ID NO: 38643 - RNA, 25 nt, Synthetic Construct
  source 1..25: mol_type = other RNA
gcgccgctggtgtagtggtatcatg

SEQ ID NO: 38644 - RNA, 25 nt, Synthetic Construct
  source 1..25: mol_type = other RNA
gagaaagctcacaagaactgctaac

SEQ ID NO: 38645 - RNA, 25 nt, Synthetic Construct
  source 1..25: mol_type = other RNA
gagaaagctcacaagaactgctaac

SEQ ID NO: 38646 - RNA, 21 nt, Synthetic Construct
  source 1..21: mol_type = other RNA
gactatagaactttccccctc

SEQ ID NO: 38647 - RNA, 21 nt, Synthetic Construct
  source 1..21: mol_type = other RNA
gactatagaactttccccctc

SEQ ID NO: 38648 - RNA, 23 nt, Synthetic Construct
  source 1..23: mol_type = other RNA
tgaggaagtaggttgtgtggttt

SEQ ID NO: 38649 - RNA, 23 nt, Synthetic Construct
  source 1..23: mol_type = other RNA
tggtgatacgacgtacttagtgt

SEQ ID NO: 38650 - RNA, 23 nt, Synthetic Construct
  source 1..23: mol_type = other RNA
tggtgatacgacgtacttagtgt

SEQ ID NO: 38651 - RNA, 22 nt, Synthetic Construct
  source 1..22: mol_type = other RNA
tgttggttcaagcgtgtagtcg

SEQ ID NO: 38652 - RNA, 22 nt, Synthetic Construct
  source 1..22: mol_type = other RNA
tgttggttcaagcgtgtagtcg

SEQ ID NO: 38653 - RNA, 24 nt, Synthetic Construct
  source 1..24: mol_type = other RNA
tgaggtagtaggttgtgtggttaa

SEQ ID NO: 38654 - RNA, 21 nt, Synthetic Construct
  source 1..21: mol_type = other RNA
tgaggtagaaggttgtatagt

SEQ ID NO: 38655 - RNA, 21 nt, Synthetic Construct
  source 1..21: mol_type = other RNA
tgaggtagaaggttgtatagt

SEQ ID NO: 38656 - RNA, 22 nt, Synthetic Construct
  source 1..22: mol_type = other RNA
tcgtactgtgagtaataatgcg

SEQ ID NO: 38657 - RNA, 21 nt, Synthetic Construct
  source 1..21: mol_type = other RNA
cccttggggttgtaggaccac

SEQ ID NO: 38658 - RNA, 21 nt, Synthetic Construct
  source 1..21: mol_type = other RNA
cccttggggttgtaggaccac

SEQ ID NO: 38659 - RNA, 17 nt, Synthetic Construct
  source 1..17: mol_type = other RNA
tgccagcagccgcggta

SEQ ID NO: 38660 - RNA, 21 nt, Synthetic Construct
  source 1..21: mol_type = other RNA
gctattgacgaccgtaccgca

SEQ ID NO: 38661 - RNA, 21 nt, Synthetic Construct
  source 1..21: mol_type = other RNA
gctattgacgaccgtaccgca

SEQ ID NO: 38662 - RNA, 18 nt, Synthetic Construct
  source 1..18: mol_type = other RNA
catgcaagtcgaacggta

SEQ ID NO: 38663 - RNA, 18 nt, Synthetic Construct
  source 1..18: mol_type = other RNA
catgcaagtcgaacggta

SEQ ID NO: 38664 - RNA, 22 nt, Synthetic Construct
  source 1..22: mol_type = other RNA
tattgcacttgccccggcctgt

SEQ ID NO: 38665 - RNA, 22 nt, Synthetic Construct
  source 1..22: mol_type = other RNA
tgaggtagtggattgtatagtt

SEQ ID NO: 38666 - RNA, 22 nt, Synthetic Construct
  source 1..22: mol_type = other RNA
tgaggtagtggattgtatagtt

SEQ ID NO: 38667 - RNA, 21 nt, Synthetic Construct
  source 1..21: mol_type = other RNA
tggagtgtggcaatggtgttt

SEQ ID NO: 38668 - RNA, 21 nt, Synthetic Construct
  source 1..21: mol_type = other RNA
tggagtgtggcaatggtgttt

SEQ ID NO: 38669 - RNA, 17 nt, Synthetic Construct
  source 1..17: mol_type = other RNA
cagagacgagtcgacca

SEQ ID NO: 38670 - RNA, 19 nt, Synthetic Construct
  source 1..19: mol_type = other RNA
cgcgcgtcccccgaagagg

SEQ ID NO: 38671 - RNA, 22 nt, Synthetic Construct
  source 1..22: mol_type = other RNA
tggcagcacgtaaatattggcg

SEQ ID NO: 38672 - RNA, 22 nt, Synthetic Construct
  source 1..22: mol_type = other RNA
tggcagcacgtaaatattggcg

SEQ ID NO: 38673 - RNA, 24 nt, Synthetic Construct
  source 1..24: mol_type = other RNA
tgaggtagtagtttgtgctgttat

SEQ ID NO: 38674 - RNA, 23 nt, Synthetic Construct
  source 1..23: mol_type = other RNA
caaggtgctgttcgtgcaggtag

SEQ ID NO: 38675 - RNA, 34 nt, Synthetic Construct; identical to SEQ ID NO: 13733
  source 1..34: mol_type = other RNA

SEQ ID NO: 38676 - RNA, 23 nt, Synthetic Construct
  source 1..23: mol_type = other RNA
tgaggtaggaggttgtatagttt

SEQ ID NO: 38677 - RNA, 27 nt, Synthetic Construct
  source 1..27: mol_type = other RNA
ttctcactactgcacttgactagtctt

SEQ ID NO: 38678 - RNA, 27 nt, Synthetic Construct
  source 1..27: mol_type = other RNA
ttctcactactgcacttgactagtctt

SEQ ID NO: 38679 - RNA, 24 nt, Synthetic Construct
  source 1..24: mol_type = other RNA
tagtgcaatattgcttatagggtt

SEQ ID NO: 38680 - RNA, 24 nt, Synthetic Construct
  source 1..24: mol_type = other RNA
tagtgcaatattgcttatagggtt

SEQ ID NO: 38681 - RNA, 35 nt, Synthetic Construct; identical to SEQ ID NO: 1095
  source 1..35: mol_type = other RNA

SEQ ID NO: 38682 - RNA, 35 nt, Synthetic Construct; identical to SEQ ID NO: 1095
  source 1..35: mol_type = other RNA

SEQ ID NO: 38683 - RNA, 23 nt, Synthetic Construct
  source 1..23: mol_type = other RNA
agcaggacggtggccatggaagt

SEQ ID NO: 38684 - RNA, 18 nt, Synthetic Construct
  source 1..18: mol_type = other RNA
catgcaagtcgaacggta

SEQ ID NO: 38685 - RNA, 18 nt, Synthetic Construct
  source 1..18: mol_type = other RNA
catgcaagtcgaacggta

SEQ ID NO: 38686 - RNA, 36 nt, Synthetic Construct; identical to SEQ ID NO: 2478
  source 1..36: mol_type = other RNA

SEQ ID NO: 38687 - RNA, 36 nt, Synthetic Construct; identical to SEQ ID NO: 2478
  source 1..36: mol_type = other RNA

SEQ ID NO: 38688 - RNA, 22 nt, Synthetic Construct
  source 1..22: mol_type = other RNA
tgaggtagtagattgtatggtt

SEQ ID NO: 38689 - RNA, 22 nt, Synthetic Construct
  source 1..22: mol_type = other RNA
tgaggtagtagattgtatggtt

SEQ ID NO: 38690 - RNA, 21 nt, Synthetic Construct
  source 1..21: mol_type = other RNA
attagtgacgcgcatgaatgg

SEQ ID NO: 38691 - RNA, 21 nt, Synthetic Construct
  source 1..21: mol_type = other RNA
attagtgacgcgcatgaatgg

SEQ ID NO: 38692 - RNA, 31 nt, Synthetic Construct; identical to SEQ ID NO: 5943
  source 1..31: mol_type = other RNA

SEQ ID NO: 38693 - RNA, 22 nt, Synthetic Construct
  source 1..22: mol_type = other RNA
tctgcccagtgctctgaatgtc

SEQ ID NO: 38694 - RNA, 22 nt, Synthetic Construct
  source 1..22: mol_type = other RNA
tctgcccagtgctctgaatgtc

SEQ ID NO: 38695 - RNA, 23 nt, Synthetic Construct
  source 1..23: mol_type = other RNA
tagcttatcagactgatgttgac

SEQ ID NO: 38696 - RNA, 42 nt, Synthetic Construct; identical to SEQ ID NO: 8009
  source 1..42: mol_type = other RNA

SEQ ID NO: 38697 - RNA, 20 nt, Synthetic Construct
  source 1..20: mol_type = other RNA
tcagtagctcgaggaaaaga

SEQ ID NO: 38698 - RNA, 19 nt, Synthetic Construct
  source 1..19: mol_type = other RNA
tggagtgtgacaatggtgt

SEQ ID NO: 38699 - RNA, 19 nt, Synthetic Construct
  source 1..19: mol_type = other RNA
tggagtgtgacaatggtgt

SEQ ID NO: 38700 - RNA, 23 nt, Synthetic Construct
  source 1..23: mol_type = other RNA
tcctgtactgagctgcctcgaga

SEQ ID NO: 38701 - RNA, 23 nt, Synthetic Construct
  source 1..23: mol_type = other RNA
tcctgtactgagctgcctcgaga

SEQ ID NO: 38702 - RNA, 17 nt, Synthetic Construct
  source 1..17: mol_type = other RNA
ttggagggcaagtctgg

SEQ ID NO: 38703 - RNA, 17 nt, Synthetic Construct
  source 1..17: mol_type = other RNA
ttggagggcaagtctgg

SEQ ID NO: 38704 - RNA, 22 nt, Synthetic Construct
  source 1..22: mol_type = other RNA
agcagcattgtacagggctatg

SEQ ID NO: 38705 - RNA, 22 nt, Synthetic Construct
  source 1..22: mol_type = other RNA
agcagcattgtacagggctatg

SEQ ID NO: 38706 - RNA, 22 nt, Synthetic Construct
  source 1..22: mol_type = other RNA
tgagaactgaattccatgggtt

SEQ ID NO: 38707 - RNA, 31 nt, Synthetic Construct; identical to SEQ ID NO: 9212
  source 1..31: mol_type = other RNA

SEQ ID NO: 38708 - RNA, 31 nt, Synthetic Construct; identical to SEQ ID NO: 9212
  source 1..31: mol_type = other RNA

SEQ ID NO: 38709 - RNA, 23 nt, Synthetic Construct
  source 1..23: mol_type = other RNA
tgaggggcagagagtgagacttt

SEQ ID NO: 38710 - RNA, 22 nt, Synthetic Construct
  source 1..22: mol_type = other RNA
tgaggtagtagttcgtgctgtt

SEQ ID NO: 38711 - RNA, 22 nt, Synthetic Construct
  source 1..22: mol_type = other RNA
tgaggtagtagttcgtgctgtt

SEQ ID NO: 38712 - RNA, 22 nt, Synthetic Construct
  source 1..22: mol_type = other RNA
tggaatgtagagaagtatgtat

SEQ ID NO: 38713 - RNA, 22 nt, Synthetic Construct
  source 1..22: mol_type = other RNA
tggaatgtagagaagtatgtat

SEQ ID NO: 38714 - RNA, 23 nt, Synthetic Construct
  source 1..23: mol_type = other RNA
caaagtgcagttcgtgcaggtag

SEQ ID NO: 38715 - RNA, 22 nt, Synthetic Construct
  source 1..22: mol_type = other RNA
ccctgtactgagctgccccgag

SEQ ID NO: 38716 - RNA, 26 nt, Synthetic Construct
  source 1..26: mol_type = other RNA
aaaccgttaccattactgagtttagt

SEQ ID NO: 38717 - RNA, 26 nt, Synthetic Construct
  source 1..26: mol_type = other RNA
aaaccgttaccattactgagtttagt

SEQ ID NO: 38718 - RNA, 21 nt, Synthetic Construct
  source 1..21: mol_type = other RNA
tacagtagtctgcacattggt

SEQ ID NO: 38719 - RNA, 21 nt, Synthetic Construct
  source 1..21: mol_type = other RNA
tacagtagtctgcacattggt

SEQ ID NO: 38720 - RNA, 23 nt, Synthetic Construct
  source 1..23: mol_type = other RNA
atgtcccacccccactcctgttt

SEQ ID NO: 38721 - RNA, 23 nt, Synthetic Construct
  source 1..23: mol_type = other RNA
atgtcccacccccactcctgttt

SEQ ID NO: 38722 - RNA, 25 nt, Synthetic Construct
  source 1..25: mol_type = other RNA
caaagaattctccttttgggctttt

SEQ ID NO: 38723 - RNA, 25 nt, Synthetic Construct
  source 1..25: mol_type = other RNA
caaagaattctccttttgggctttt

SEQ ID NO: 38724 - RNA, 22 nt, Synthetic Construct
  source 1..22: mol_type = other RNA
tattacacttgtcccggcctgt

SEQ ID NO: 38725 - RNA, 22 nt, Synthetic Construct
  source 1..22: mol_type = other RNA
tattacacttgtcccggcctgt

SEQ ID NO: 38726 - RNA, 21 nt, Synthetic Construct
  source 1..21: mol_type = other RNA
tgaggtagtaggttatgtggt

SEQ ID NO: 38727 - RNA, 21 nt, Synthetic Construct
  source 1..21: mol_type = other RNA
tgaggtagtaggttatgtggt

SEQ ID NO: 38728 - RNA, 21 nt, Synthetic Construct
  source 1..21: mol_type = other RNA
agctacatctggctactgggt

SEQ ID NO: 38729 - RNA, 22 nt, Synthetic Construct
  source 1..22: mol_type = other RNA
tgaggtagtggtttgtgctgtt

SEQ ID NO: 38730 - RNA, 22 nt, Synthetic Construct
  source 1..22: mol_type = other RNA
tgaggtagtggtttgtgctgtt

SEQ ID NO: 38731 - RNA, 21 nt, Synthetic Construct
  source 1..21: mol_type = other RNA
agctacattgtctgctgggtt

SEQ ID NO: 38732 - RNA, 23 nt, Synthetic Construct
  source 1..23: mol_type = other RNA
tcaagagcaataacgaaaaatgt

SEQ ID NO: 38733 - RNA, 17 nt, Synthetic Construct
  source 1..17: mol_type = other RNA
atcgtgacgatagtgca

SEQ ID NO: 38734 - RNA, 17 nt, Synthetic Construct
  source 1..17: mol_type = other RNA
atcgtgacgatagtgca

SEQ ID NO: 38735 - RNA, 22 nt, Synthetic Construct
  source 1..22: mol_type = other RNA
tagcagcacttaaatattggcg

SEQ ID NO: 38736 - RNA, 25 nt, Synthetic Construct
  source 1..25: mol_type = other RNA
tcgaggatatgagatcgagacgaca

SEQ ID NO: 38737 - RNA, 22 nt, Synthetic Construct
  source 1..22: mol_type = other RNA
tcctgtactgggctgccccgag

SEQ ID NO: 38738 - RNA, 23 nt, Synthetic Construct
  source 1..23: mol_type = other RNA
atgacacgatcactcccgttgag

SEQ ID NO: 38739 - RNA, 23 nt, Synthetic Construct
  source 1..23: mol_type = other RNA
tccccttggggttgtaggaccac

SEQ ID NO: 38740 - RNA, 23 nt, Synthetic Construct
  source 1..23: mol_type = other RNA
tccccttggggttgtaggaccac

SEQ ID NO: 38741 - RNA, 22 nt, Synthetic Construct
  source 1..22: mol_type = other RNA
tcagtgcatcacagaactttgt

SEQ ID NO: 38742 - RNA, 22 nt, Synthetic Construct
  source 1..22: mol_type = other RNA
tagcttatcagactgatgttgg

SEQ ID NO: 38743 - RNA, 22 nt, Synthetic Construct
  source 1..22: mol_type = other RNA
acctgtactgagctgccccgag

SEQ ID NO: 38744 - RNA, 22 nt, Synthetic Construct
  source 1..22: mol_type = other RNA
acctgtactgagctgccccgag

SEQ ID NO: 38745 - RNA, 23 nt, Synthetic Construct
  source 1..23: mol_type = other RNA
agctacattgtctgctgggttcc

SEQ ID NO: 38746 - RNA, 19 nt, Synthetic Construct
  source 1..19: mol_type = other RNA
cggaagaaggggtgcctgg

SEQ ID NO: 38747 - RNA, 19 nt, Synthetic Construct
  source 1..19: mol_type = other RNA
cggaagaaggggtgcctgg

SEQ ID NO: 38748 - RNA, 25 nt, Synthetic Construct
  source 1..25: mol_type = other RNA
ttgaggatatgagatcgaggcgaca

SEQ ID NO: 38749 - RNA, 25 nt, Synthetic Construct
  source 1..25: mol_type = other RNA
ttgaggatatgagatcgaggcgaca

SEQ ID NO: 38750 - RNA, 22 nt, Synthetic Construct
  source 1..22: mol_type = other RNA
tattgcgcttgtcccggcctgt

SEQ ID NO: 38751 - RNA, 23 nt, Synthetic Construct
  source 1..23: mol_type = other RNA
tcctgtactgagctgccccgaga

SEQ ID NO: 38752 - RNA, 23 nt, Synthetic Construct
  source 1..23: mol_type = other RNA
tcctgtactgagctgccccgaga

SEQ ID NO: 38753 - RNA, 16 nt, Synthetic Construct
  source 1..16: mol_type = other RNA
gtctacgaccatacca

SEQ ID NO: 38754 - RNA, 22 nt, Synthetic Construct
  source 1..22: mol_type = other RNA
tggagtgtgacaatggcgtttg

SEQ ID NO: 38755 - RNA, 23 nt, Synthetic Construct
  source 1..23: mol_type = other RNA
ggcagcattgtacagggctatga

SEQ ID NO: 38756 - RNA, 23 nt, Synthetic Construct
  source 1..23: mol_type = other RNA
ggcagcattgtacagggctatga

SEQ ID NO: 38757 - RNA, 22 nt, Synthetic Construct
  source 1..22: mol_type = other RNA
tcgtaccatgagtaataatgcg

SEQ ID NO: 38758 - RNA, 22 nt, Synthetic Construct
  source 1..22: mol_type = other RNA
tcgtaccatgagtaataatgcg

SEQ ID NO: 38759 - RNA, 33 nt, Synthetic Construct; identical to SEQ ID NO: 7469
  source 1..33: mol_type = other RNA

SEQ ID NO: 38760 - RNA, 33 nt, Synthetic Construct; identical to SEQ ID NO: 7469
  source 1..33: mol_type = other RNA

SEQ ID NO: 38761 - RNA, 22 nt, Synthetic Construct
  source 1..22: mol_type = other RNA
tgaggtggtagattgtatagtt

SEQ ID NO: 38762 - RNA, 22 nt, Synthetic Construct
  source 1..22: mol_type = other RNA
tgaggtggtagattgtatagtt

SEQ ID NO: 38763 - RNA, 24 nt, Synthetic Construct
  source 1..24: mol_type = other RNA
tgtaaacatccccgactggaagcg

SEQ ID NO: 38764 - RNA, 23 nt, Synthetic Construct
  source 1..23: mol_type = other RNA
tgaggtaggaggttgtatagttg

SEQ ID NO: 38765 - RNA, 22 nt, Synthetic Construct
  source 1..22: mol_type = other RNA
gcagtagtctgcacattggtta

SEQ ID NO: 38766 - RNA, 27 nt, Synthetic Construct
  source 1..27: mol_type = other RNA
ccccccaccgctaaatttgactggctt

SEQ ID NO: 38767 - RNA, 27 nt, Synthetic Construct
  source 1..27: mol_type = other RNA
ccccccaccgctaaatttgactggctt

SEQ ID NO: 38768 - RNA, 22 nt, Synthetic Construct
  source 1..22: mol_type = other RNA
aaactccttaagcgaatctcgc

SEQ ID NO: 38769 - RNA, 22 nt, Synthetic Construct
  source 1..22: mol_type = other RNA
aaactccttaagcgaatctcgc

SEQ ID NO: 38770 - RNA, 22 nt, Synthetic Construct
  source 1..22: mol_type = other RNA
ttgtaccgtgagtaataatgcg

SEQ ID NO: 38771 - RNA, 22 nt, Synthetic Construct
  source 1..22: mol_type = other RNA
ttgtaccgtgagtaataatgcg

SEQ ID NO: 38772 - RNA, 22 nt, Synthetic Construct
  source 1..22: mol_type = other RNA
tcctgaactgagctgccccgag

SEQ ID NO: 38773 - RNA, 18 nt, Synthetic Construct
  source 1..18: mol_type = other RNA
cgactcttagcggtggat

SEQ ID NO: 38774 - RNA, 23 nt, Synthetic Construct
  source 1..23: mol_type = other RNA
agcagcattgtacagggctacga

SEQ ID NO: 38775 - RNA, 23 nt, Synthetic Construct
  source 1..23: mol_type = other RNA
tgaggtagcaggttgtgtggttt

SEQ ID NO: 38776 - RNA, 23 nt, Synthetic Construct
  source 1..23: mol_type = other RNA
tgaggtagcaggttgtgtggttt

SEQ ID NO: 38777 - RNA, 23 nt, Synthetic Construct
  source 1..23: mol_type = other RNA
cgcgacctcagatcagacgtggc

SEQ ID NO: 38778 - RNA, 23 nt, Synthetic Construct
  source 1..23: mol_type = other RNA
aggggtgctatctgtgattgagg

SEQ ID NO: 38779 - RNA, 22 nt, Synthetic Construct
  source 1..22: mol_type = other RNA
tgtggtagtagtttgtgctgtt

SEQ ID NO: 38780 - RNA, 22 nt, Synthetic Construct
  source 1..22: mol_type = other RNA
tgtggtagtagtttgtgctgtt

SEQ ID NO: 38781 - RNA, 27 nt, Synthetic Construct
  source 1..27: mol_type = other RNA
ccccccaccgctaaatttgactggctt

SEQ ID NO: 38782 - RNA, 27 nt, Synthetic Construct
  source 1..27: mol_type = other RNA
ccccccaccgctaaatttgactggctt

SEQ ID NO: 38783 - RNA, 22 nt, Synthetic Construct
  source 1..22: mol_type = other RNA
tgaggtagaagattgtatagtt

SEQ ID NO: 38784 - RNA, 22 nt, Synthetic Construct
  source 1..22: mol_type = other RNA
tgaggtagaagattgtatagtt

SEQ ID NO: 38785 - RNA, 21 nt, Synthetic Construct
  source 1..21: mol_type = other RNA
tgaggtggtagattgtatagt

SEQ ID NO: 38786 - RNA, 35 nt, Synthetic Construct; identical to SEQ ID NO: 1490
  source 1..35: mol_type = other RNA

SEQ ID NO: 38787 - RNA, 35 nt, Synthetic Construct; identical to SEQ ID NO: 1490
  source 1..35: mol_type = other RNA

SEQ ID NO: 38788 - RNA, 23 nt, Synthetic Construct
  source 1..23: mol_type = other RNA
tggtaatacgacgtacttagtgt

SEQ ID NO: 38789 - RNA, 23 nt, Synthetic Construct
  source 1..23: mol_type = other RNA
tggtaatacgacgtacttagtgt

SEQ ID NO: 38790 - RNA, 22 nt, Synthetic Construct
  source 1..22: mol_type = other RNA
cgaggtagtagtttgtgctgtt

SEQ ID NO: 38791 - RNA, 22 nt, Synthetic Construct
  source 1..22: mol_type = other RNA
cgaggtagtagtttgtgctgtt

SEQ ID NO: 38792 - RNA, 20 nt, Synthetic Construct
  source 1..20: mol_type = other RNA
tgaggtagcaggttgtgtgg

SEQ ID NO: 38793 - RNA, 25 nt, Synthetic Construct
  source 1..25: mol_type = other RNA
tgcgagagtaggacgttgccaggtt

SEQ ID NO: 38794 - RNA, 25 nt, Synthetic Construct
  source 1..25: mol_type = other RNA
tgcgagagtaggacgttgccaggtt

SEQ ID NO: 38795 - RNA, 17 nt, Synthetic Construct
  source 1..17: mol_type = other RNA
cctcgcgcgattggagc

SEQ ID NO: 38796 - RNA, 17 nt, Synthetic Construct
  source 1..17: mol_type = other RNA
cctcgcgcgattggagc

SEQ ID NO: 38797 - RNA, 23 nt, Synthetic Construct
  source 1..23: mol_type = other RNA
cctcgcgcgattggagcggccga

SEQ ID NO: 38798 - RNA, 23 nt, Synthetic Construct
  source 1..23: mol_type = other RNA
cctcgcgcgattggagcggccga

SEQ ID NO: 38799 - RNA, 22 nt, Synthetic Construct
  source 1..22: mol_type = other RNA
tgaggtagtagtttgtgccgtt

SEQ ID NO: 38800 - RNA, 22 nt, Synthetic Construct
  source 1..22: mol_type = other RNA
tgaggtagtagtttgtgccgtt

SEQ ID NO: 38801 - RNA, 37 nt, Synthetic Construct; identical to SEQ ID NO: 715
  source 1..37: mol_type = other RNA

SEQ ID NO: 38802 - RNA, 37 nt, Synthetic Construct; identical to SEQ ID NO: 715
  source 1..37: mol_type = other RNA

SEQ ID NO: 38803 - RNA, 32 nt, Synthetic Construct; identical to SEQ ID NO: 8270
  source 1..32: mol_type = other RNA

SEQ ID NO: 38804 - RNA, 32 nt, Synthetic Construct; identical to SEQ ID NO: 8270
  source 1..32: mol_type = other RNA

SEQ ID NO: 38805 - RNA, 29 nt, Synthetic Construct
  source 1..29: mol_type = other RNA
tccctggtggtctagtggttaggattcgg

SEQ ID NO: 38806 - RNA, 29 nt, Synthetic Construct
  source 1..29: mol_type = other RNA
tccctggtggtctagtggttaggattcgg

SEQ ID NO: 38807 - RNA, 22 nt, Synthetic Construct
  source 1..22: mol_type = other RNA
aggttccggataagtaagagcc

SEQ ID NO: 38808 - RNA, 21 nt, Synthetic Construct
  source 1..21: mol_type = other RNA
ccacctcccctgcaaacgtcc

SEQ ID NO: 38809 - RNA, 21 nt, Synthetic Construct
  source 1..21: mol_type = other RNA
ccacctcccctgcaaacgtcc

SEQ ID NO: 38810 - RNA, 18 nt, Synthetic Construct
  source 1..18: mol_type = other RNA
cgcgacctcagatcagac

SEQ ID NO: 38811 - RNA, 21 nt, Synthetic Construct
  source 1..21: mol_type = other RNA
tcctgtaccgagctgccccga

SEQ ID NO: 38812 - RNA, 31 nt, Synthetic Construct; identical to SEQ ID NO: 14087
  source 1..31: mol_type = other RNA

SEQ ID NO: 38813 - RNA, 31 nt, Synthetic Construct; identical to SEQ ID NO: 14087
  source 1..31: mol_type = other RNA

SEQ ID NO: 38814 - RNA, 24 nt, Synthetic Construct
  source 1..24: mol_type = other RNA
tattgcacttgtcccggcctgtta

SEQ ID NO: 38815 - RNA, 24 nt, Synthetic Construct
  source 1..24: mol_type = other RNA
tattgcacttgtcccggcctgtta

SEQ ID NO: 38816 - RNA, 16 nt, Synthetic Construct
  source 1..16: mol_type = other RNA
ccgcttttgtcaggga

SEQ ID NO: 38817 - RNA, 16 nt, Synthetic Construct
  source 1..16: mol_type = other RNA
ccgcttttgtcaggga

SEQ ID NO: 38818 - RNA, 37 nt, Synthetic Construct; identical to SEQ ID NO: 726
  source 1..37: mol_type = other RNA

SEQ ID NO: 38819 - RNA, 37 nt, Synthetic Construct; identical to SEQ ID NO: 726
  source 1..37: mol_type = other RNA

SEQ ID NO: 38820 - RNA, 31 nt, Synthetic Construct; identical to SEQ ID NO: 35594
  source 1..31: mol_type = other RNA

SEQ ID NO: 38821 - RNA, 26 nt, Synthetic Construct
  source 1..26: mol_type = other RNA
tccctggtggtctagtggttaggatt

SEQ ID NO: 38822 - RNA, 26 nt, Synthetic Construct
  source 1..26: mol_type = other RNA
tccctggtggtctagtggttaggatt

SEQ ID NO: 38823 - RNA, 30 nt, Synthetic Construct; identical to SEQ ID NO: 2840
  source 1..30: mol_type = other RNA

SEQ ID NO: 38824 - RNA, 23 nt, Synthetic Construct
  source 1..23: mol_type = other RNA
tgaggtagtaggttgtgtggtaa

SEQ ID NO: 38825 - RNA, 25 nt, Synthetic Construct
  source 1..25: mol_type = other RNA
tgcgagagtaggacgttgccaggtt

SEQ ID NO: 38826 - RNA, 25 nt, Synthetic Construct
  source 1..25: mol_type = other RNA
tgcgagagtaggacgttgccaggtt

SEQ ID NO: 38827 - RNA, 24 nt, Synthetic Construct
  source 1..24: mol_type = other RNA
tgtagacatccccgactggaagct

SEQ ID NO: 38828 - RNA, 24 nt, Synthetic Construct
  source 1..24: mol_type = other RNA
tgtagacatccccgactggaagct

SEQ ID NO: 38829 - RNA, 23 nt, Synthetic Construct
  source 1..23: mol_type = other RNA
tcctgtactgagctgccccgagg

SEQ ID NO: 38830 - RNA, 23 nt, Synthetic Construct
  source 1..23: mol_type = other RNA
tccagtactgagctgccccgagt

SEQ ID NO: 38831 - RNA, 22 nt, Synthetic Construct
  source 1..22: mol_type = other RNA
tagcagcacatcatggtttaca

SEQ ID NO: 38832 - RNA, 22 nt, Synthetic Construct
  source 1..22: mol_type = other RNA
tgaggtagtagactgtatagtt

SEQ ID NO: 38833 - RNA, 22 nt, Synthetic Construct
  source 1..22: mol_type = other RNA
tgaggtagtagactgtatagtt

SEQ ID NO: 38834 - RNA, 23 nt, Synthetic Construct
  source 1..23: mol_type = other RNA
tcttggagtaggtcattgggtga

SEQ ID NO: 38835 - RNA, 34 nt, Synthetic Construct; identical to SEQ ID NO: 1111
  source 1..34: mol_type = other RNA

SEQ ID NO: 38836 - RNA, 34 nt, Synthetic Construct; identical to SEQ ID NO: 1111
  source 1..34: mol_type = other RNA

SEQ ID NO: 38837 - RNA, 32 nt, Synthetic Construct; identical to SEQ ID NO: 1128
  source 1..32: mol_type = other RNA

SEQ ID NO: 38838 - RNA, 32 nt, Synthetic Construct; identical to SEQ ID NO: 1128
  source 1..32: mol_type = other RNA

SEQ ID NO: 38839 - RNA, 16 nt, Synthetic Construct
  source 1..16: mol_type = other RNA
ggtagctcgttgggct

SEQ ID NO: 38840 - RNA, 26 nt, Synthetic Construct
  source 1..26: mol_type = other RNA
gactcttagcggtggatcactcggct

SEQ ID NO: 38841 - RNA, 23 nt, Synthetic Construct
  source 1..23: mol_type = other RNA
tgaggtagtaggttgtgtggttt

SEQ ID NO: 38842 - RNA, 23 nt, Synthetic Construct
  source 1..23: mol_type = other RNA
tgaggtagtaggttgtgtggttt

SEQ ID NO: 38843 - RNA, 22 nt, Synthetic Construct
  source 1..22: mol_type = other RNA
taaatccttaagcgaatctcgc

SEQ ID NO: 38844 - RNA, 22 nt, Synthetic Construct
  source 1..22: mol_type = other RNA
taaatccttaagcgaatctcgc

SEQ ID NO: 38845 - RNA, 37 nt, Synthetic Construct; identical to SEQ ID NO: 2365
  source 1..37: mol_type = other RNA

SEQ ID NO: 38846 - RNA, 18 nt, Synthetic Construct
  source 1..18: mol_type = other RNA
cgccgatgatagtgcgga

SEQ ID NO: 38847 - RNA, 23 nt, Synthetic Construct
  source 1..23: mol_type = other RNA
tcctgtactgagctgccacgaga

SEQ ID NO: 38848 - RNA, 23 nt, Synthetic Construct
  source 1..23: mol_type = other RNA
tcctgtactgagctgccacgaga

SEQ ID NO: 38849 - RNA, 21 nt, Synthetic Construct
  source 1..21: mol_type = other RNA
tggagtgtgacaatggtgtct

SEQ ID NO: 38850 - RNA, 21 nt, Synthetic Construct
  source 1..21: mol_type = other RNA
tggagtgtgacaatggtgtct

SEQ ID NO: 38851 - RNA, 17 nt, Synthetic Construct
  source 1..17: mol_type = other RNA
ggagtatggtcgcaagg

SEQ ID NO: 38852 - RNA, 21 nt, Synthetic Construct
  source 1..21: mol_type = other RNA
gagttctacagtccgacgatc

SEQ ID NO: 38853 - RNA, 21 nt, Synthetic Construct
  source 1..21: mol_type = other RNA
gagttctacagtccgacgatc

SEQ ID NO: 38854 - RNA, 21 nt, Synthetic Construct
  source 1..21: mol_type = other RNA
cgaggtagtagattgtatagt

SEQ ID NO: 38855 - RNA, 21 nt, Synthetic Construct
  source 1..21: mol_type = other RNA
cgaggtagtagattgtatagt

SEQ ID NO: 38856 - RNA, 23 nt, Synthetic Construct
  source 1..23: mol_type = other RNA
tggggtagtaggttgtgtggttt

SEQ ID NO: 38857 - RNA, 20 nt, Synthetic Construct
  source 1..20: mol_type = other RNA
caggacagtgaaacgagtca

SEQ ID NO: 38858 - RNA, 22 nt, Synthetic Construct
  source 1..22: mol_type = other RNA
tcgtaccgtgggtaataatgcg

SEQ ID NO: 38859 - RNA, 20 nt, Synthetic Construct
  source 1..20: mol_type = other RNA
cgtaccgtgagtaataatgc

SEQ ID NO: 38860 - RNA, 20 nt, Synthetic Construct
  source 1..20: mol_type = other RNA
cgtaccgtgagtaataatgc

SEQ ID NO: 38861 - RNA, 20 nt, Synthetic Construct
  source 1..20: mol_type = other RNA
tggggtagtaggttgtgtgg

SEQ ID NO: 38862 - RNA, 22 nt, Synthetic Construct
  source 1..22: mol_type = other RNA
agctacattgtctgctgggttt

SEQ ID NO: 38863 - RNA, 22 nt, Synthetic Construct
  source 1..22: mol_type = other RNA
agctacattgtctgctgggttt

SEQ ID NO: 38864 - RNA, 16 nt, Synthetic Construct
  source 1..16: mol_type = other RNA
gtgacgcgcatgaatg

SEQ ID NO: 38865 - RNA, 16 nt, Synthetic Construct
  source 1..16: mol_type = other RNA
gtgacgcgcatgaatg

SEQ ID NO: 38866 - RNA, 22 nt, Synthetic Construct
  source 1..22: mol_type = other RNA
tagcagcacgtaaatgttggcg

SEQ ID NO: 38867 - RNA, 22 nt, Synthetic Construct
  source 1..22: mol_type = other RNA
tagcagcacgtaaatgttggcg

SEQ ID NO: 38868 - RNA, 22 nt, Synthetic Construct
  source 1..22: mol_type = other RNA
ctttcagtcggatgtttgcagc

SEQ ID NO: 38869 - RNA, 19 nt, Synthetic Construct
  source 1..19: mol_type = other RNA
caataacaggtctgtgatg

SEQ ID NO: 38870 - RNA, 19 nt, Synthetic Construct
  source 1..19: mol_type = other RNA
caataacaggtctgtgatg

SEQ ID NO: 38871 - RNA, 22 nt, Synthetic Construct
  source 1..22: mol_type = other RNA
tacagtactgtgataactgaag

SEQ ID NO: 38872 - RNA, 22 nt, Synthetic Construct
  source 1..22: mol_type = other RNA
tacagtactgtgataactgaag

SEQ ID NO: 38873 - RNA, 22 nt, Synthetic Construct
  source 1..22: mol_type = other RNA
cgaggtagtagtttgtgctgtt

SEQ ID NO: 38874 - RNA, 22 nt, Synthetic Construct
  source 1..22: mol_type = other RNA
cgaggtagtagtttgtgctgtt

SEQ ID NO: 38875 - RNA, 18 nt, Synthetic Construct
  source 1..18: mol_type = other RNA
tgcagatcttggtggtag

SEQ ID NO: 38876 - RNA, 18 nt, Synthetic Construct
  source 1..18: mol_type = other RNA
tgcagatcttggtggtag

SEQ ID NO: 38877 - RNA, 22 nt, Synthetic Construct
  source 1..22: mol_type = other RNA
caagtcactagtggttccgttt

SEQ ID NO: 38878 - RNA, 22 nt, Synthetic Construct
  source 1..22: mol_type = other RNA
caagtcactagtggttccgttt

SEQ ID NO: 38879 - RNA, 23 nt, Synthetic Construct
  source 1..23: mol_type = other RNA
caaagtgctgctcgtgcaggtag

SEQ ID NO: 38880 - RNA, 23 nt, Synthetic Construct
  source 1..23: mol_type = other RNA
caaagtgctgctcgtgcaggtag

SEQ ID NO: 38881 - RNA, 19 nt, Synthetic Construct
  source 1..19: mol_type = other RNA
tagtgacgcgcatgaatgg

SEQ ID NO: 38882 - RNA, 19 nt, Synthetic Construct
  source 1..19: mol_type = other RNA
tagtgacgcgcatgaatgg

SEQ ID NO: 38883 - RNA, 19 nt, Synthetic Construct
  source 1..19: mol_type = other RNA
agtcgacgtatagggtgtg

SEQ ID NO: 38884 - RNA, 18 nt, Synthetic Construct
  source 1..18: mol_type = other RNA
tcttcggtagtatagtgg

SEQ ID NO: 38885 - RNA, 18 nt, Synthetic Construct
  source 1..18: mol_type = other RNA
tcttcggtagtatagtgg

SEQ ID NO: 38886 - RNA, 26 nt, Synthetic Construct
  source 1..26: mol_type = other RNA
aatgacacgatcactcccgttgagtt

SEQ ID NO: 38887 - RNA, 26 nt, Synthetic Construct
  source 1..26: mol_type = other RNA
aatgacacgatcactcccgttgagtt

SEQ ID NO: 38888 - RNA, 28 nt, Synthetic Construct
  source 1..28: mol_type = other RNA
ccccccactgctaaatttgaccggcttt

SEQ ID NO: 38889 - RNA, 21 nt, Synthetic Construct
  source 1..21: mol_type = other RNA
gctattgacgaccgtaccgca

SEQ ID NO: 38890 - RNA, 21 nt, Synthetic Construct
  source 1..21: mol_type = other RNA
gctattgacgaccgtaccgca

SEQ ID NO: 38891 - RNA, 29 nt, Synthetic Construct
  source 1..29: mol_type = other RNA
gcattgtggttcagtggtagaattctcgc

SEQ ID NO: 38892 - RNA, 29 nt, Synthetic Construct
  source 1..29: mol_type = other RNA
gcattgtggttcagtggtagaattctcgc

SEQ ID NO: 38893 - RNA, 24 nt, Synthetic Construct
  source 1..24: mol_type = other RNA
tgggtaatacgacgtacttagtgt

SEQ ID NO: 38894 - RNA, 24 nt, Synthetic Construct
  source 1..24: mol_type = other RNA
tgggtaatacgacgtacttagtgt

SEQ ID NO: 38895 - RNA, 20 nt, Synthetic Construct
  source 1..20: mol_type = other RNA
tggagtgtgacaatggtgtt

SEQ ID NO: 38896 - RNA, 22 nt, Synthetic Construct
  source 1..22: mol_type = other RNA
tagcggcacgtaaatattggcg

SEQ ID NO: 38897 - RNA, 22 nt, Synthetic Construct
  source 1..22: mol_type = other RNA
tagcggcacgtaaatattggcg

SEQ ID NO: 38898 - RNA, 19 nt, Synthetic Construct
  source 1..19: mol_type = other RNA
tagcttatcagactgatgt

SEQ ID NO: 38899 - RNA, 21 nt, Synthetic Construct
  source 1..21: mol_type = other RNA
tggggtagtagattgtatagt

SEQ ID NO: 38900 - RNA, 21 nt, Synthetic Construct
  source 1..21: mol_type = other RNA
tggggtagtagattgtatagt

SEQ ID NO: 38901 - RNA, 22 nt, Synthetic Construct
  source 1..22: mol_type = other RNA
tgagatagtaggttgtatagtt

SEQ ID NO: 38902 - RNA, 22 nt, Synthetic Construct
  source 1..22: mol_type = other RNA
tgagatagtaggttgtatagtt

SEQ ID NO: 38903 - RNA, 22 nt, Synthetic Construct
  source 1..22: mol_type = other RNA
tgaggtagcagtttgtgctgtt

SEQ ID NO: 38904 - RNA, 22 nt, Synthetic Construct
  source 1..22: mol_type = other RNA
tgaggtagcagtttgtgctgtt

SEQ ID NO: 38905 - RNA, 21 nt, Synthetic Construct
  source 1..21: mol_type = other RNA
tcctgtaccgagctgccccga

SEQ ID NO: 38906 - RNA, 16 nt, Synthetic Construct
  source 1..16: mol_type = other RNA
ttaatccagccagtcc

SEQ ID NO: 38907 - RNA, 16 nt, Synthetic Construct
  source 1..16: mol_type = other RNA
ttaatccagccagtcc

SEQ ID NO: 38908 - RNA, 21 nt, Synthetic Construct
  source 1..21: mol_type = other RNA
ctagaccgaagctccttgagg

SEQ ID NO: 38909 - RNA, 22 nt, Synthetic Construct
  source 1..22: mol_type = other RNA
tgaggtagtaggttgtgtggat

SEQ ID NO: 38910 - RNA, 22 nt, Synthetic Construct
  source 1..22: mol_type = other RNA
tgaggtagtaggttgtgtggat

SEQ ID NO: 38911 - RNA, 34 nt, Synthetic Construct; identical to SEQ ID NO: 16999
  source 1..34: mol_type = other RNA

SEQ ID NO: 38912 - RNA, 27 nt, Synthetic Construct
  source 1..27: mol_type = other RNA
ccccccactgctaaatttgactggctc

SEQ ID NO: 38913 - RNA, 21 nt, Synthetic Construct
  source 1..21: mol_type = other RNA
tcctgtactgagctgcaccga

SEQ ID NO: 38914 - RNA, 21 nt, Synthetic Construct
  source 1..21: mol_type = other RNA
tcctgtactgagctgcaccga

SEQ ID NO: 38915 - RNA, 23 nt, Synthetic Construct
  source 1..23: mol_type = other RNA
agcagcattgtacagggctatga

SEQ ID NO: 38916 - RNA, 24 nt, Synthetic Construct
  source 1..24: mol_type = other RNA
ggctacattgtctgctgggtttct

SEQ ID NO: 38917 - RNA, 22 nt, Synthetic Construct
  source 1..22: mol_type = other RNA
ggcagcattgtacagggctatg

SEQ ID NO: 38918 - RNA, 22 nt, Synthetic Construct
  source 1..22: mol_type = other RNA
ggcagcattgtacagggctatg

SEQ ID NO: 38919 - RNA, 23 nt, Synthetic Construct
  source 1..23: mol_type = other RNA
tagtaatacgacgtacttagtgt

SEQ ID NO: 38920 - RNA, 23 nt, Synthetic Construct
  source 1..23: mol_type = other RNA
tagtaatacgacgtacttagtgt

SEQ ID NO: 38921 - RNA, 23 nt, Synthetic Construct
  source 1..23: mol_type = other RNA
gtcagtttgtcaaataccccatt

SEQ ID NO: 38922 - RNA, 22 nt, Synthetic Construct
  source 1..22: mol_type = other RNA
ttgcagcacgtaaatattggcg

SEQ ID NO: 38923 - RNA, 21 nt, Synthetic Construct
  source 1..21: mol_type = other RNA
caacggaatcccaaaagcagc

SEQ ID NO: 38924 - RNA, 22 nt, Synthetic Construct
  source 1..22: mol_type = other RNA
tgaggtagtaggttgtgtggtc

SEQ ID NO: 38925 - RNA, 25 nt, Synthetic Construct
  source 1..25: mol_type = other RNA
gaatgttgctcggtgaacccctttt

SEQ ID NO: 38926 - RNA, 25 nt, Synthetic Construct
  source 1..25: mol_type = other RNA
gaatgttgctcggtgaacccctttt

SEQ ID NO: 38927 - RNA, 21 nt, Synthetic Construct
  source 1..21: mol_type = other RNA
tgaggtagtaggttgtatagc

SEQ ID NO: 38928 - RNA, 22 nt, Synthetic Construct
  source 1..22: mol_type = other RNA
tgaagtagtagattgtatagtt

SEQ ID NO: 38929 - RNA, 22 nt, Synthetic Construct
  source 1..22: mol_type = other RNA
tgaagtagtagattgtatagtt

SEQ ID NO: 38930 - RNA, 22 nt, Synthetic Construct
  source 1..22: mol_type = other RNA
gaaaagctgggttgagagggcg

SEQ ID NO: 38931 - RNA, 22 nt, Synthetic Construct
  source 1..22: mol_type = other RNA
gaaaagctgggttgagagggcg

SEQ ID NO: 38932 - RNA, 23 nt, Synthetic Construct
  source 1..23: mol_type = other RNA
agaggctggccgtgatgaattcg

SEQ ID NO: 38933 - RNA, 20 nt, Synthetic Construct
  source 1..20: mol_type = other RNA
tagcgaaattccttgtcggg

SEQ ID NO: 38934 - RNA, 20 nt, Synthetic Construct
  source 1..20: mol_type = other RNA
tagcgaaattccttgtcggg

SEQ ID NO: 38935 - RNA, 22 nt, Synthetic Construct
  source 1..22: mol_type = other RNA
tgaggtagtaggttgtatagct

SEQ ID NO: 38936 - RNA, 22 nt, Synthetic Construct
  source 1..22: mol_type = other RNA
tagcagcacgcaaatattggcg

SEQ ID NO: 38937 - RNA, 22 nt, Synthetic Construct
  source 1..22: mol_type = other RNA
tagcagcacgcaaatattggcg

SEQ ID NO: 38938 - RNA, 21 nt, Synthetic Construct
  source 1..21: mol_type = other RNA
tggagtgtggcaatggtgttt

SEQ ID NO: 38939 - RNA, 20 nt, Synthetic Construct
  source 1..20: mol_type = other RNA
taaggtagtaggttgtatag

SEQ ID NO: 38940 - RNA, 20 nt, Synthetic Construct
  source 1..20: mol_type = other RNA
taaggtagtaggttgtatag

SEQ ID NO: 38941 - RNA, 23 nt, Synthetic Construct
  source 1..23: mol_type = other RNA
tcctgtactgagctgcaccgaga

SEQ ID NO: 38942 - RNA, 23 nt, Synthetic Construct
  source 1..23: mol_type = other RNA
tcctgtactgagctgcaccgaga

SEQ ID NO: 38943 - RNA, 27 nt, Synthetic Construct
  source 1..27: mol_type = other RNA
ccccccactgctaaatttaactggctt

SEQ ID NO: 38944 - RNA, 27 nt, Synthetic Construct
  source 1..27: mol_type = other RNA
ccccccactgctaaacttgactggctt

SEQ ID NO: 38945 - RNA, 27 nt, Synthetic Construct
  source 1..27: mol_type = other RNA
ccccccactgctaaacttgactggctt

SEQ ID NO: 38946 - RNA, 29 nt, Synthetic Construct
  source 1..29: mol_type = other RNA
cccgtgtgaaagtaggtcatcgtcaggct

SEQ ID NO: 38947 - RNA, 25 nt, Synthetic Construct
  source 1..25: mol_type = other RNA
aaaccgttaccattactgagtttag

SEQ ID NO: 38948 - RNA, 22 nt, Synthetic Construct
  source 1..22: mol_type = other RNA
tgaggtagtagtttgtgcagtt

SEQ ID NO: 38949 - RNA, 22 nt, Synthetic Construct
  source 1..22: mol_type = other RNA
ctttgttcgattccgttgagta

SEQ ID NO: 38950 - RNA, 16 nt, Synthetic Construct
  source 1..16: mol_type = other RNA
gaacgtgagctgggtt

SEQ ID NO: 38951 - RNA, 16 nt, Synthetic Construct
  source 1..16: mol_type = other RNA
gaacgtgagctgggtt

SEQ ID NO: 38952 - RNA, 22 nt, Synthetic Construct
  source 1..22: mol_type = other RNA
tcactgatcgagtcgtcctgcg

SEQ ID NO: 38953 - RNA, 22 nt, Synthetic Construct
  source 1..22: mol_type = other RNA
ttgcagcacgtaaatattggcg

SEQ ID NO: 38954 - RNA, 22 nt, Synthetic Construct
  source 1..22: mol_type = other RNA
ttgcagcacgtaaatattggcg

SEQ ID NO: 38955 - RNA, 22 nt, Synthetic Construct
  source 1..22: mol_type = other RNA
caagtcactagtggttccgttt

SEQ ID NO: 38956 - RNA, 22 nt, Synthetic Construct
  source 1..22: mol_type = other RNA
caagtcactagtggttccgttt

SEQ ID NO: 38957 - RNA, 23 nt, Synthetic Construct
  source 1..23: mol_type = other RNA
tgaggtagtaggctgtgtggttt

SEQ ID NO: 38958 - RNA, 23 nt, Synthetic Construct
  source 1..23: mol_type = other RNA
tgaggtagtaggctgtgtggttt

SEQ ID NO: 38959 - RNA, 21 nt, Synthetic Construct
  source 1..21: mol_type = other RNA
ttcggaagaaggggtgcctgg

SEQ ID NO: 38960 - RNA, 21 nt, Synthetic Construct
  source 1..21: mol_type = other RNA
ttcggaagaaggggtgcctgg

SEQ ID NO: 38961 - RNA, 22 nt, Synthetic Construct
  source 1..22: mol_type = other RNA
tcgtaccgtgagtaatagtgcg

SEQ ID NO: 38962 - RNA, 21 nt, Synthetic Construct
  source 1..21: mol_type = other RNA
agggggaaagttctatagtcc

SEQ ID NO: 38963 - RNA, 21 nt, Synthetic Construct
  source 1..21: mol_type = other RNA
agggggaaagttctatagtcc

SEQ ID NO: 38964 - RNA, 16 nt, Synthetic Construct
  source 1..16: mol_type = other RNA
gggaacgtgagctggg

SEQ ID NO: 38965 - RNA, 16 nt, Synthetic Construct
  source 1..16: mol_type = other RNA
gggaacgtgagctggg

SEQ ID NO: 38966 - RNA, 21 nt, Synthetic Construct
  source 1..21: mol_type = other RNA
cggtcccaagggtatggctgt

SEQ ID NO: 38967 - RNA, 19 nt, Synthetic Construct
  source 1..19: mol_type = other RNA
aggacagtgaaacgagtca

SEQ ID NO: 38968 - RNA, 28 nt, Synthetic Construct
  source 1..28: mol_type = other RNA
cccccccactgctaaatttgactggcta

SEQ ID NO: 38969 - RNA, 21 nt, Synthetic Construct
  source 1..21: mol_type = other RNA
tggggtagtaggttgtatagt

SEQ ID NO: 38970 - RNA, 21 nt, Synthetic Construct
  source 1..21: mol_type = other RNA
tggggtagtaggttgtatagt

SEQ ID NO: 38971 - RNA, 18 nt, Synthetic Construct
  source 1..18: mol_type = other RNA
gcagcgatggccgagtgg

SEQ ID NO: 38972 - RNA, 25 nt, Synthetic Construct
  source 1..25: mol_type = other RNA
ttgaggatatgaggtcgagacgaca

SEQ ID NO: 38973 - RNA, 18 nt, Synthetic Construct
  source 1..18: mol_type = other RNA
gttcgattccggagaggg

SEQ ID NO: 38974 - RNA, 18 nt, Synthetic Construct
  source 1..18: mol_type = other RNA
gttcgattccggagaggg

SEQ ID NO: 38975 - RNA, 21 nt, Synthetic Construct
  source 1..21: mol_type = other RNA
agatcgaccgtgttatattcg

SEQ ID NO: 38976 - RNA, 21 nt, Synthetic Construct
  source 1..21: mol_type = other RNA
agatcgaccgtgttatattcg

SEQ ID NO: 38977 - RNA, 22 nt, Synthetic Construct
  source 1..22: mol_type = other RNA
tgaggtagtagttcgtgctgtt

SEQ ID NO: 38978 - RNA, 22 nt, Synthetic Construct
  source 1..22: mol_type = other RNA
tgaggtagtgggttgtatagtt

SEQ ID NO: 38979 - RNA, 22 nt, Synthetic Construct
  source 1..22: mol_type = other RNA
tagcagcacttaaatattggcg

SEQ ID NO: 38980 - RNA, 23 nt, Synthetic Construct
  source 1..23: mol_type = other RNA
tacagtagtctgcacattggttt

SEQ ID NO: 38981 - RNA, 22 nt, Synthetic Construct
  source 1..22: mol_type = other RNA
gcagtagtctgcacattggtta

SEQ ID NO: 38982 - RNA, 22 nt, Synthetic Construct
  source 1..22: mol_type = other RNA
gcagtagtctgcacattggtta

SEQ ID NO: 38983 - RNA, 23 nt, Synthetic Construct
  source 1..23: mol_type = other RNA
tcctgtactgagttgccccgaga

SEQ ID NO: 38984 - RNA, 23 nt, Synthetic Construct
  source 1..23: mol_type = other RNA
tcctgtactgagttgccccgaga

SEQ ID NO: 38985 - RNA, 23 nt, Synthetic Construct
  source 1..23: mol_type = other RNA
tggggggcagagagcgagacttt

SEQ ID NO: 38986 - RNA, 23 nt, Synthetic Construct
  source 1..23: mol_type = other RNA
tggggggcagagagcgagacttt

SEQ ID NO: 38987 - RNA, 17 nt, Synthetic Construct
  source 1..17: mol_type = other RNA
ccagtaaacggcggccg

SEQ ID NO: 38988 - RNA, 22 nt, Synthetic Construct
  source 1..22: mol_type = other RNA
tggagtgtgacaatggtgcttg

SEQ ID NO: 38989 - RNA, 22 nt, Synthetic Construct
  source 1..22: mol_type = other RNA
tattgcacttgccccggcctgt

SEQ ID NO: 38990 - RNA, 22 nt, Synthetic Construct
  source 1..22: mol_type = other RNA
tattgcacttgccccggcctgt

SEQ ID NO: 38991 - RNA, 23 nt, Synthetic Construct
  source 1..23: mol_type = other RNA
actggacttggagtcagaaggca

SEQ ID NO: 38992 - RNA, 23 nt, Synthetic Construct
  source 1..23: mol_type = other RNA
actggacttggagtcagaaggca

SEQ ID NO: 38993 - RNA, 23 nt, Synthetic Construct
  source 1..23: mol_type = other RNA
caaagtgctgctcgtgcaggtag

SEQ ID NO: 38994 - RNA, 21 nt, Synthetic Construct
  source 1..21: mol_type = other RNA
tcctgtactgagctgcctcga

SEQ ID NO: 38995 - RNA, 15 nt, Synthetic Construct
  source 1..15: mol_type = other RNA
tcctgacggccatag

SEQ ID NO: 38996 - RNA, 27 nt, Synthetic Construct
  source 1..27: mol_type = other RNA
ctccccactgctaaatttgactggctt

SEQ ID NO: 38997 - RNA, 25 nt, Synthetic Construct
  source 1..25: mol_type = other RNA
gctcagtggaaaggatgtgaatcta

SEQ ID NO: 38998 - RNA, 25 nt, Synthetic Construct
  source 1..25: mol_type = other RNA
gctcagtggaaaggatgtgaatcta

SEQ ID NO: 38999 - RNA, 22 nt, Synthetic Construct
  source 1..22: mol_type = other RNA
tagcagcacgtaaaaattggcg

SEQ ID NO: 39000 - RNA, 22 nt, Synthetic Construct
  source 1..22: mol_type = other RNA
caacggaatcccaaaagcagct

SEQ ID NO: 39001 - RNA, 24 nt, Synthetic Construct
  source 1..24: mol_type = other RNA
cgtaaacatccccgactggaagct

SEQ ID NO: 39002 - RNA, 17 nt, Synthetic Construct
  source 1..17: mol_type = other RNA
cgtgagctgggtttaga

SEQ ID NO: 39003 - RNA, 17 nt, Synthetic Construct
  source 1..17: mol_type = other RNA
cgtgagctgggtttaga

SEQ ID NO: 39004 - RNA, 20 nt, Synthetic Construct
  source 1..20: mol_type = other RNA
tgaggtaggaggttgtatag

SEQ ID NO: 39005 - RNA, 20 nt, Synthetic Construct
  source 1..20: mol_type = other RNA
tgaggtaggaggttgtatag

SEQ ID NO: 39006 - RNA, 16 nt, Synthetic Construct
  source 1..16: mol_type = other RNA
tcgtgacgatagtgca

SEQ ID NO: 39007 - RNA, 16 nt, Synthetic Construct
  source 1..16: mol_type = other RNA
tcgtgacgatagtgca

SEQ ID NO: 39008 - RNA, 21 nt, Synthetic Construct
  source 1..21: mol_type = other RNA
tgaggtagcaggttgtatagt

SEQ ID NO: 39009 - RNA, 21 nt, Synthetic Construct
  source 1..21: mol_type = other RNA
ctggccctctctgcccttccg

SEQ ID NO: 39010 - RNA, 21 nt, Synthetic Construct
  source 1..21: mol_type = other RNA
ctggccctctctgcccttccg

SEQ ID NO: 39011 - RNA, 23 nt, Synthetic Construct
  source 1..23: mol_type = other RNA
tcgaccggacctcgaccggctcg

SEQ ID NO: 39012 - RNA, 23 nt, Synthetic Construct
  source 1..23: mol_type = other RNA
tcgaccggacctcgaccggctcg

SEQ ID NO: 39013 - RNA, 22 nt, Synthetic Construct
  source 1..22: mol_type = other RNA
cattgcgcttgtctcggtctga

SEQ ID NO: 39014 - RNA, 22 nt, Synthetic Construct
  source 1..22: mol_type = other RNA
cattgcgcttgtctcggtctga

SEQ ID NO: 39015 - RNA, 22 nt, Synthetic Construct
  source 1..22: mol_type = other RNA
cattgcacttgtctcggtccga

SEQ ID NO: 39016 - RNA, 22 nt, Synthetic Construct
  source 1..22: mol_type = other RNA
cattgcacttgtctcggtccga

SEQ ID NO: 39017 - RNA, 36 nt, Synthetic Construct; identical to SEQ ID NO: 2344
  source 1..36: mol_type = other RNA

SEQ ID NO: 39018 - RNA, 21 nt, Synthetic Construct
  source 1..21: mol_type = other RNA
tggagtgtgacgatggtgttt

SEQ ID NO: 39019 - RNA, 21 nt, Synthetic Construct
  source 1..21: mol_type = other RNA
tggagtgtgacgatggtgttt

SEQ ID NO: 39020 - RNA, 23 nt, Synthetic Construct
  source 1..23: mol_type = other RNA
cggtaatacgacgtacttagtgt

SEQ ID NO: 39021 - RNA, 31 nt, Synthetic Construct; identical to SEQ ID NO: 37496
  source 1..31: mol_type = other RNA

SEQ ID NO: 39022 - RNA, 20 nt, Synthetic Construct
  source 1..20: mol_type = other RNA
tgaggtagtaggttgtgtgg

SEQ ID NO: 39023 - RNA, 20 nt, Synthetic Construct
  source 1..20: mol_type = other RNA
tgaggtagtaggttgtgtgg

SEQ ID NO: 39024 - RNA, 32 nt, Synthetic Construct; identical to SEQ ID NO: 4509
  source 1..32: mol_type = other RNA

SEQ ID NO: 39025 - RNA, 32 nt, Synthetic Construct; identical to SEQ ID NO: 4509
  source 1..32: mol_type = other RNA

SEQ ID NO: 39026 - RNA, 23 nt, Synthetic Construct
  source 1..23: mol_type = other RNA
tgaaagtaggtcatcgtcaggct

SEQ ID NO: 39027 - RNA, 23 nt, Synthetic Construct
  source 1..23: mol_type = other RNA
tgaaagtaggtcatcgtcaggct

SEQ ID NO: 39028 - RNA, 39 nt, Synthetic Construct; identical to SEQ ID NO: 4939
  source 1..39: mol_type = other RNA

SEQ ID NO: 39029 - RNA, 39 nt, Synthetic Construct; identical to SEQ ID NO: 4939
  source 1..39: mol_type = other RNA

SEQ ID NO: 39030 - RNA, 15 nt, Synthetic Construct
  source 1..15: mol_type = other RNA
ccgcttttgtcaggg

SEQ ID NO: 39031 - RNA, 15 nt, Synthetic Construct
  source 1..15: mol_type = other RNA
ccgcttttgtcaggg

SEQ ID NO: 39032 - RNA, 23 nt, Synthetic Construct
  source 1..23: mol_type = other RNA
tagcagcacataatggtttgtgg

SEQ ID NO: 39033 - RNA, 23 nt, Synthetic Construct
  source 1..23: mol_type = other RNA
tagcagcacataatggtttgtgg

SEQ ID NO: 39034 - RNA, 35 nt, Synthetic Construct; identical to SEQ ID NO: 9871
  source 1..35: mol_type = other RNA

SEQ ID NO: 39035 - RNA, 22 nt, Synthetic Construct
  source 1..22: mol_type = other RNA
acagtagtctgcacattggtta

SEQ ID NO: 39036 - RNA, 22 nt, Synthetic Construct
  source 1..22: mol_type = other RNA
acagtagtctgcacattggtta

SEQ ID NO: 39037 - RNA, 34 nt, Synthetic Construct; identical to SEQ ID NO: 8274
  source 1..34: mol_type = other RNA

SEQ ID NO: 39038 - RNA, 34 nt, Synthetic Construct; identical to SEQ ID NO: 8274
  source 1..34: mol_type = other RNA

SEQ ID NO: 39039 - RNA, 40 nt, Synthetic Construct; identical to SEQ ID NO: 2684
  source 1..40: mol_type = other RNA

SEQ ID NO: 39040 - RNA, 22 nt, Synthetic Construct
  source 1..22: mol_type = other RNA
tgaggtagtaggtcgtatagtt

SEQ ID NO: 39041 - RNA, 22 nt, Synthetic Construct
  source 1..22: mol_type = other RNA
tgaggtagtaggtcgtatagtt

SEQ ID NO: 39042 - RNA, 20 nt, Synthetic Construct
  source 1..20: mol_type = other RNA
agaggtagtagtttgtgctg

SEQ ID NO: 39043 - RNA, 22 nt, Synthetic Construct
  source 1..22: mol_type = other RNA
catagcacttgtctcggtctga

SEQ ID NO: 39044 - RNA, 25 nt, Synthetic Construct
  source 1..25: mol_type = other RNA
aaaccgttaccattactgagtttag

SEQ ID NO: 39045 - RNA, 21 nt, Synthetic Construct
  source 1..21: mol_type = other RNA
tggaatgtaaggaagtgtgtg

SEQ ID NO: 39046 - RNA, 22 nt, Synthetic Construct
  source 1..22: mol_type = other RNA
acagtagtctgcacattggtta

SEQ ID NO: 39047 - RNA, 27 nt, Synthetic Construct
  source 1..27: mol_type = other RNA
ttctcactactgcacttgactagtctt

SEQ ID NO: 39048 - RNA, 27 nt, Synthetic Construct
  source 1..27: mol_type = other RNA
ttctcactactgcacttgactagtctt

SEQ ID NO: 39049 - RNA, 22 nt, Synthetic Construct
  source 1..22: mol_type = other RNA
tcctgtactgagctgccccgtg

SEQ ID NO: 39050 - RNA, 25 nt, Synthetic Construct
  source 1..25: mol_type = other RNA
ttgaggatatgaggtcgagacgaca

SEQ ID NO: 39051 - RNA, 25 nt, Synthetic Construct
  source 1..25: mol_type = other RNA
ttgaggatatgaggtcgagacgaca

SEQ ID NO: 39052 - RNA, 22 nt, Synthetic Construct
  source 1..22: mol_type = other RNA
ttcacagtggctaagttccgct

SEQ ID NO: 39053 - RNA, 22 nt, Synthetic Construct
  source 1..22: mol_type = other RNA
ttcacagtggctaagttccgct

SEQ ID NO: 39054 - RNA, 20 nt, Synthetic Construct
  source 1..20: mol_type = other RNA
tgaggtagtaggttgtataa

SEQ ID NO: 39055 - RNA, 23 nt, Synthetic Construct
  source 1..23: mol_type = other RNA
acctgtactgagctgccccgaga

SEQ ID NO: 39056 - RNA, 23 nt, Synthetic Construct
  source 1..23: mol_type = other RNA
acctgtactgagctgccccgaga

SEQ ID NO: 39057 - RNA, 20 nt, Synthetic Construct
  source 1..20: mol_type = other RNA
tggtagactatggaacgtag

SEQ ID NO: 39058 - RNA, 18 nt, Synthetic Construct
  source 1..18: mol_type = other RNA
gtcaggatggccgagcgg

SEQ ID NO: 39059 - RNA, 18 nt, Synthetic Construct
  source 1..18: mol_type = other RNA
gtcaggatggccgagcgg

SEQ ID NO: 39060 - RNA, 23 nt, Synthetic Construct
  source 1..23: mol_type = other RNA
caaagtgctgttcgcgcaggtag

SEQ ID NO: 39061 - RNA, 23 nt, Synthetic Construct
  source 1..23: mol_type = other RNA
caaagtgctgttcgcgcaggtag

SEQ ID NO: 39062 - RNA, 22 nt, Synthetic Construct
  source 1..22: mol_type = other RNA
tgaggtagtagatcgtatagtt

SEQ ID NO: 39063 - RNA, 22 nt, Synthetic Construct
  source 1..22: mol_type = other RNA
tgaggtagtagatcgtatagtt

SEQ ID NO: 39064 - RNA, 15 nt, Synthetic Construct
  source 1..15: mol_type = other RNA
ggagagatggctgag

SEQ ID NO: 39065 - RNA, 15 nt, Synthetic Construct
  source 1..15: mol_type = other RNA
ggagagatggctgag

SEQ ID NO: 39066 - RNA, 21 nt, Synthetic Construct
  source 1..21: mol_type = other RNA
aggagtgtgacaatggtgttt

SEQ ID NO: 39067 - RNA, 21 nt, Synthetic Construct
  source 1..21: mol_type = other RNA
aggagtgtgacaatggtgttt

SEQ ID NO: 39068 - RNA, 21 nt, Synthetic Construct
  source 1..21: mol_type = other RNA
tggggtagtagtttgtgctgt

SEQ ID NO: 39069 - RNA, 22 nt, Synthetic Construct
  source 1..22: mol_type = other RNA
cgtagtgtttcctactttatgg

SEQ ID NO: 39070 - RNA, 22 nt, Synthetic Construct
  source 1..22: mol_type = other RNA
cgtagtgtttcctactttatgg

SEQ ID NO: 39071 - RNA, 23 nt, Synthetic Construct
  source 1..23: mol_type = other RNA
tcaagagcaataacgaaaaatgt

SEQ ID NO: 39072 - RNA, 23 nt, Synthetic Construct
  source 1..23: mol_type = other RNA
gtacagtactgtgataactgaaa

SEQ ID NO: 39073 - RNA, 23 nt, Synthetic Construct
  source 1..23: mol_type = other RNA
gtacagtactgtgataactgaaa

SEQ ID NO: 39074 - RNA, 21 nt, Synthetic Construct
  source 1..21: mol_type = other RNA
ctagactgaagccccttgagg

SEQ ID NO: 39075 - RNA, 31 nt, Synthetic Construct; identical to SEQ ID NO: 10138
  source 1..31: mol_type = other RNA

SEQ ID NO: 39076 - RNA, 25 nt, Synthetic Construct
  source 1..25: mol_type = other RNA
gctcagtggaaaggatgtgaatcta

SEQ ID NO: 39077 - RNA, 25 nt, Synthetic Construct
  source 1..25: mol_type = other RNA
gctcagtggaaaggatgtgaatcta

SEQ ID NO: 39078 - RNA, 25 nt, Synthetic Construct
  source 1..25: mol_type = other RNA
gtgaggatatgagatcgagacgaca

SEQ ID NO: 39079 - RNA, 25 nt, Synthetic Construct
  source 1..25: mol_type = other RNA
gtgaggatatgagatcgagacgaca

SEQ ID NO: 39080 - RNA, 15 nt, Synthetic Construct
  source 1..15: mol_type = other RNA
ggtgaaagcggggga

SEQ ID NO: 39081 - RNA, 35 nt, Synthetic Construct; identical to SEQ ID NO: 1490
  source 1..35: mol_type = other RNA

SEQ ID NO: 39082 - RNA, 35 nt, Synthetic Construct; identical to SEQ ID NO: 1490
  source 1..35: mol_type = other RNA

SEQ ID NO: 39083 - RNA, 19 nt, Synthetic Construct
  source 1..19: mol_type = other RNA
tccccggcatctccaccaa

SEQ ID NO: 39084 - RNA, 19 nt, Synthetic Construct
  source 1..19: mol_type = other RNA
tccccggcatctccaccaa

SEQ ID NO: 39085 - RNA, 22 nt, Synthetic Construct
  source 1..22: mol_type = other RNA
tccctgagaccctaacttgtga

SEQ ID NO: 39086 - RNA, 22 nt, Synthetic Construct
  source 1..22: mol_type = other RNA
tccctgagaccctaacttgtga

SEQ ID NO: 39087 - RNA, 19 nt, Synthetic Construct
  source 1..19: mol_type = other RNA
agcagcattgtacagggct

SEQ ID NO: 39088 - RNA, 19 nt, Synthetic Construct
  source 1..19: mol_type = other RNA
agcagcattgtacagggct

SEQ ID NO: 39089 - RNA, 22 nt, Synthetic Construct
  source 1..22: mol_type = other RNA
gtaaacggcgggagtaactatg

SEQ ID NO: 39090 - RNA, 22 nt, Synthetic Construct
  source 1..22: mol_type = other RNA
tcctgtaatgagctgccccgag

SEQ ID NO: 39091 - RNA, 22 nt, Synthetic Construct
  source 1..22: mol_type = other RNA
tcctgtaatgagctgccccgag

SEQ ID NO: 39092 - RNA, 17 nt, Synthetic Construct
  source 1..17: mol_type = other RNA
ccgtgtgaaagtaggtc

SEQ ID NO: 39093 - RNA, 17 nt, Synthetic Construct
  source 1..17: mol_type = other RNA
ccgtgtgaaagtaggtc

SEQ ID NO: 39094 - RNA, 21 nt, Synthetic Construct
  source 1..21: mol_type = other RNA
ttgttcttctctggccagcct

SEQ ID NO: 39095 - RNA, 21 nt, Synthetic Construct
  source 1..21: mol_type = other RNA
ttgttcttctctggccagcct

SEQ ID NO: 39096 - RNA, 20 nt, Synthetic Construct
  source 1..20: mol_type = other RNA
tgaagtagtaggttgtgtgg

SEQ ID NO: 39097 - RNA, 15 nt, Synthetic Construct
  source 1..15: mol_type = other RNA
gggtgaaagcggggg

SEQ ID NO: 39098 - RNA, 22 nt, Synthetic Construct
  source 1..22: mol_type = other RNA
tcctgtactgagctgtcccgag

SEQ ID NO: 39099 - RNA, 22 nt, Synthetic Construct
  source 1..22: mol_type = other RNA
tattgcacatgtcccggcctgt

SEQ ID NO: 39100 - RNA, 21 nt, Synthetic Construct
  source 1..21: mol_type = other RNA
ctagactgaagctccttgggg

SEQ ID NO: 39101 - RNA, 21 nt, Synthetic Construct
  source 1..21: mol_type = other RNA
ctagactgaagctccttgggg

SEQ ID NO: 39102 - RNA, 23 nt, Synthetic Construct
  source 1..23: mol_type = other RNA
tcctgtactgagctgctccgaga

SEQ ID NO: 39103 - RNA, 23 nt, Synthetic Construct
  source 1..23: mol_type = other RNA
tcctgtactgagctgctccgaga

SEQ ID NO: 39104 - RNA, 22 nt, Synthetic Construct
  source 1..22: mol_type = other RNA
tgaggtagaaggttgtgtggtt

SEQ ID NO: 39105 - RNA, 22 nt, Synthetic Construct
  source 1..22: mol_type = other RNA
tgaggtagaaggttgtgtggtt

SEQ ID NO: 39106 - RNA, 22 nt, Synthetic Construct
  source 1..22: mol_type = other RNA
ngaggtagtaggttgtatagtt

SEQ ID NO: 39107 - RNA, 22 nt, Synthetic Construct
  source 1..22: mol_type = other RNA
ngaggtagtaggttgtatagtt

SEQ ID NO: 39108 - RNA, 21 nt, Synthetic Construct
  source 1..21: mol_type = other RNA
tgaggcagtagattgtatagt

SEQ ID NO: 39109 - RNA, 21 nt, Synthetic Construct
  source 1..21: mol_type = other RNA
tgaggcagtagattgtatagt

SEQ ID NO: 39110 - RNA, 22 nt, Synthetic Construct
  source 1..22: mol_type = other RNA
tggaatgtaaagaagtatgtaa

SEQ ID NO: 39111 - RNA, 22 nt, Synthetic Construct
  source 1..22: mol_type = other RNA
tggaatgtaaagaagtatgtaa

SEQ ID NO: 39112 - RNA, 22 nt, Synthetic Construct
  source 1..22: mol_type = other RNA
tcgtaccgtgagtaataatgtg

SEQ ID NO: 39113 - RNA, 22 nt, Synthetic Construct
  source 1..22: mol_type = other RNA
tcgtaccgtgagtaataatgtg

SEQ ID NO: 39114 - RNA, 21 nt, Synthetic Construct
  source 1..21: mol_type = other RNA
tggggtgtgacaatggtgttt

SEQ ID NO: 39115 - RNA, 24 nt, Synthetic Construct
  source 1..24: mol_type = other RNA
tgtaaacgtccccgactggaagct

SEQ ID NO: 39116 - RNA, 24 nt, Synthetic Construct
  source 1..24: mol_type = other RNA
tgtaaacgtccccgactggaagct

SEQ ID NO: 39117 - RNA, 35 nt, Synthetic Construct; identical to SEQ ID NO: 9871
  source 1..35: mol_type = other RNA

SEQ ID NO: 39118 - RNA, 16 nt, Synthetic Construct
  source 1..16: mol_type = other RNA
gacagcaggacggtgg

SEQ ID NO: 39119 - RNA, 16 nt, Synthetic Construct
  source 1..16: mol_type = other RNA
gacagcaggacggtgg

SEQ ID NO: 39120 - RNA, 22 nt, Synthetic Construct
  source 1..22: mol_type = other RNA
taaggtagtaggttgtgtggtt

SEQ ID NO: 39121 - RNA, 22 nt, Synthetic Construct
  source 1..22: mol_type = other RNA
tagcagcgcgtaaatattggcg

SEQ ID NO: 39122 - RNA, 22 nt, Synthetic Construct
  source 1..22: mol_type = other RNA
tgaggtagtagtttgtgccgtt

SEQ ID NO: 39123 - RNA, 22 nt, Synthetic Construct
  source 1..22: mol_type = other RNA
tgaggtagtagtttgtgccgtt

SEQ ID NO: 39124 - RNA, 28 nt, Synthetic Construct
  source 1..28: mol_type = other RNA
ggatttccccttggggttgtaggaccac

SEQ ID NO: 39125 - RNA, 28 nt, Synthetic Construct
  source 1..28: mol_type = other RNA
ggatttccccttggggttgtaggaccac

SEQ ID NO: 39126 - RNA, 22 nt, Synthetic Construct
  source 1..22: mol_type = other RNA
cattgcacttgcctcggtctga

SEQ ID NO: 39127 - RNA, 18 nt, Synthetic Construct
  source 1..18: mol_type = other RNA
cctgaagaataagcaccg

SEQ ID NO: 39128 - RNA, 18 nt, Synthetic Construct
  source 1..18: mol_type = other RNA
cctgaagaataagcaccg

SEQ ID NO: 39129 - RNA, 25 nt, Synthetic Construct
  source 1..25: mol_type = other RNA
ttgaggatacgagatcgagacgaca

SEQ ID NO: 39130 - RNA, 21 nt, Synthetic Construct
  source 1..21: mol_type = other RNA
tcctgtactgagctgctccga

SEQ ID NO: 39131 - RNA, 21 nt, Synthetic Construct
  source 1..21: mol_type = other RNA
tgaggtagcaggttgtatagt

SEQ ID NO: 39132 - RNA, 21 nt, Synthetic Construct
  source 1..21: mol_type = other RNA
tgaggtagcaggttgtatagt

SEQ ID NO: 39133 - RNA, 31 nt, Synthetic Construct; identical to SEQ ID NO: 774
  source 1..31: mol_type = other RNA

SEQ ID NO: 39134 - RNA, 31 nt, Synthetic Construct; identical to SEQ ID NO: 774
  source 1..31: mol_type = other RNA

SEQ ID NO: 39135 - RNA, 19 nt, Synthetic Construct
  source 1..19: mol_type = other RNA
cgcctgtctgagcgtcgct

SEQ ID NO: 39136 - RNA, 22 nt, Synthetic Construct
  source 1..22: mol_type = other RNA
agaggtagtaggttgtgtggtt

SEQ ID NO: 39137 - RNA, 32 nt, Synthetic Construct; identical to SEQ ID NO: 3541
  source 1..32: mol_type = other RNA

SEQ ID NO: 39138 - RNA, 32 nt, Synthetic Construct; identical to SEQ ID NO: 3541
  source 1..32: mol_type = other RNA

SEQ ID NO: 39139 - RNA, 22 nt, Synthetic Construct
  source 1..22: mol_type = other RNA
tgaggtagtagtttgagctgtt

SEQ ID NO: 39140 - RNA, 20 nt, Synthetic Construct
  source 1..20: mol_type = other RNA
tccctgtcctccaggagctc

SEQ ID NO: 39141 - RNA, 20 nt, Synthetic Construct
  source 1..20: mol_type = other RNA
tccctgtcctccaggagctc

SEQ ID NO: 39142 - RNA, 15 nt, Synthetic Construct
  source 1..15: mol_type = other RNA
tgcaagtcgaacggt

SEQ ID NO: 39143 - RNA, 15 nt, Synthetic Construct
  source 1..15: mol_type = other RNA
tgcaagtcgaacggt

SEQ ID NO: 39144 - RNA, 29 nt, Synthetic Construct
  source 1..29: mol_type = other RNA
gtaatggcgggaactctggacagactgcc

SEQ ID NO: 39145 - RNA, 29 nt, Synthetic Construct
  source 1..29: mol_type = other RNA
gtaatggcgggaactctggacagactgcc

SEQ ID NO: 39146 - RNA, 35 nt, Synthetic Construct; identical to SEQ ID NO: 19298
  source 1..35: mol_type = other RNA

SEQ ID NO: 39147 - RNA, 23 nt, Synthetic Construct
  source 1..23: mol_type = other RNA
caaagtgctgctcgtgcaggtag

SEQ ID NO: 39148 - RNA, 22 nt, Synthetic Construct
  source 1..22: mol_type = other RNA
tgaggaagtagattgtatagtt

SEQ ID NO: 39149 - RNA, 22 nt, Synthetic Construct
  source 1..22: mol_type = other RNA
tgaggaagtagattgtatagtt

SEQ ID NO: 39150 - RNA, 31 nt, Synthetic Construct; identical to SEQ ID NO: 1225
  source 1..31: mol_type = other RNA

SEQ ID NO: 39151 - RNA, 31 nt, Synthetic Construct; identical to SEQ ID NO: 1225
  source 1..31: mol_type = other RNA

SEQ ID NO: 39152 - RNA, 22 nt, Synthetic Construct
  source 1..22: mol_type = other RNA
tgtagtgtttcctactctatgg

SEQ ID NO: 39153 - RNA, 22 nt, Synthetic Construct
  source 1..22: mol_type = other RNA
tgtagtgtttcctactctatgg

SEQ ID NO: 39154 - RNA, 23 nt, Synthetic Construct
  source 1..23: mol_type = other RNA
acctgtactgagctgccccgagt

SEQ ID NO: 39155 - RNA, 23 nt, Synthetic Construct
  source 1..23: mol_type = other RNA
tggcaatacgacgtacttagtgt

SEQ ID NO: 39156 - RNA, 30 nt, Synthetic Construct; identical to SEQ ID NO: 751
  source 1..30: mol_type = other RNA

SEQ ID NO: 39157 - RNA, 25 nt, Synthetic Construct
  source 1..25: mol_type = other RNA
gttgaattgtggtctgtggacgtgg

SEQ ID NO: 39158 - RNA, 25 nt, Synthetic Construct
  source 1..25: mol_type = other RNA
gttgaattgtggtctgtggacgtgg

SEQ ID NO: 39159 - RNA, 19 nt, Synthetic Construct
  source 1..19: mol_type = other RNA
atagggaacgtgagctggg

SEQ ID NO: 39160 - RNA, 19 nt, Synthetic Construct
  source 1..19: mol_type = other RNA
atagggaacgtgagctggg

SEQ ID NO: 39161 - RNA, 22 nt, Synthetic Construct
  source 1..22: mol_type = other RNA
aagacgggaggaaagaagggag

SEQ ID NO: 39162 - RNA, 22 nt, Synthetic Construct
  source 1..22: mol_type = other RNA
aagacgggaggaaagaagggag

SEQ ID NO: 39163 - RNA, 23 nt, Synthetic Construct
  source 1..23: mol_type = other RNA
tgaggcagtaggttgtgtggttt

SEQ ID NO: 39164 - RNA, 22 nt, Synthetic Construct
  source 1..22: mol_type = other RNA
tgtggtagtaggttgtgtggtt

SEQ ID NO: 39165 - RNA, 22 nt, Synthetic Construct
  source 1..22: mol_type = other RNA
tgtggtagtaggttgtgtggtt

SEQ ID NO: 39166 - RNA, 23 nt, Synthetic Construct
  source 1..23: mol_type = other RNA
tcctgtactgagctgtcccgaga

SEQ ID NO: 39167 - RNA, 15 nt, Synthetic Construct
  source 1..15: mol_type = other RNA
gctatgggatttgtt

SEQ ID NO: 39168 - RNA, 15 nt, Synthetic Construct
  source 1..15: mol_type = other RNA
gctatgggatttgtt

SEQ ID NO: 39169 - RNA, 21 nt, Synthetic Construct
  source 1..21: mol_type = other RNA
tcctgtacagagctgccccga

SEQ ID NO: 39170 - RNA, 16 nt, Synthetic Construct
  source 1..16: mol_type = other RNA
tacacaccgcccgtcg

SEQ ID NO: 39171 - RNA, 16 nt, Synthetic Construct
  source 1..16: mol_type = other RNA
tacacaccgcccgtcg

SEQ ID NO: 39172 - RNA, 21 nt, Synthetic Construct
  source 1..21: mol_type = other RNA
taggtagtttcctgttgttgg

SEQ ID NO: 39173 - RNA, 22 nt, Synthetic Construct
  source 1..22: mol_type = other RNA
tgaggtagtagtttgtgctggt

SEQ ID NO: 39174 - RNA, 23 nt, Synthetic Construct
  source 1..23: mol_type = other RNA
acagtagtctgcacattggttat

SEQ ID NO: 39175 - RNA, 23 nt, Synthetic Construct
  source 1..23: mol_type = other RNA
acagtagtctgcacattggttat

SEQ ID NO: 39176 - RNA, 23 nt, Synthetic Construct
  source 1..23: mol_type = other RNA
tggtaatacaacgtacttagtgt

SEQ ID NO: 39177 - RNA, 33 nt, Synthetic Construct; identical to SEQ ID NO: 1982
  source 1..33: mol_type = other RNA

SEQ ID NO: 39178 - RNA, 22 nt, Synthetic Construct
  source 1..22: mol_type = other RNA
tgaggtagtaggttgaatagtt

SEQ ID NO: 39179 - RNA, 22 nt, Synthetic Construct
  source 1..22: mol_type = other RNA
tgaggtagtaggttgaatagtt

SEQ ID NO: 39180 - RNA, 17 nt, Synthetic Construct
  source 1..17: mol_type = other RNA
ggctggtccgaaggtag

SEQ ID NO: 39181 - RNA, 22 nt, Synthetic Construct
  source 1..22: mol_type = other RNA
tcgtaccgtgagtaataacgcg

SEQ ID NO: 39182 - RNA, 22 nt, Synthetic Construct
  source 1..22: mol_type = other RNA
tcgtaccgtgagtaataacgcg

SEQ ID NO: 39183 - RNA, 22 nt, Synthetic Construct
  source 1..22: mol_type = other RNA
taatgcacttgtcccggcctgt

SEQ ID NO: 39184 - RNA, 22 nt, Synthetic Construct
  source 1..22: mol_type = other RNA
gattgcacttgtcccggcctgt

SEQ ID NO: 39185 - RNA, 22 nt, Synthetic Construct
  source 1..22: mol_type = other RNA
gattgcacttgtcccggcctgt

SEQ ID NO: 39186 - RNA, 22 nt, Synthetic Construct
  source 1..22: mol_type = other RNA
tagcatatcgagcctgagaaca

SEQ ID NO: 39187 - RNA, 22 nt, Synthetic Construct
  source 1..22: mol_type = other RNA
tagcatatcgagcctgagaaca

SEQ ID NO: 39188 - RNA, 25 nt, Synthetic Construct
  source 1..25: mol_type = other RNA
cctcgcgcgattggagcggccgata

SEQ ID NO: 39189 - RNA, 22 nt, Synthetic Construct
  source 1..22: mol_type = other RNA
tgtgcaaatccatgcaaaactg

SEQ ID NO: 39190 - RNA, 24 nt, Synthetic Construct
  source 1..24: mol_type = other RNA
tgtaaacatccccgactggaggct

SEQ ID NO: 39191 - RNA, 22 nt, Synthetic Construct
  source 1..22: mol_type = other RNA
tagcagcacgtaaatattggtg

SEQ ID NO: 39192 - RNA, 22 nt, Synthetic Construct
  source 1..22: mol_type = other RNA
tattgtacttgtcccggcctgt

SEQ ID NO: 39193 - RNA, 22 nt, Synthetic Construct
  source 1..22: mol_type = other RNA
tattgtacttgtcccggcctgt

SEQ ID NO: 39194 - RNA, 30 nt, Synthetic Construct; identical to SEQ ID NO: 1535
  source 1..30: mol_type = other RNA

SEQ ID NO: 39195 - RNA, 16 nt, Synthetic Construct
  source 1..16: mol_type = other RNA
ttgaccgctctgacca

SEQ ID NO: 39196 - RNA, 23 nt, Synthetic Construct
  source 1..23: mol_type = other RNA
cgactcttagcggtggatcactc

SEQ ID NO: 39197 - RNA, 21 nt, Synthetic Construct
  source 1..21: mol_type = other RNA
tggagtgtggcaatggtgttt

SEQ ID NO: 39198 - RNA, 21 nt, Synthetic Construct
  source 1..21: mol_type = other RNA
tggagtgtggcaatggtgttt

SEQ ID NO: 39199 - RNA, 21 nt, Synthetic Construct
  source 1..21: mol_type = other RNA
tccctgtcctccaggagctct

SEQ ID NO: 39200 - RNA, 22 nt, Synthetic Construct
  source 1..22: mol_type = other RNA
tccctgagaccctaacttgtga

SEQ ID NO: 39201 - RNA, 18 nt, Synthetic Construct
  source 1..18: mol_type = other RNA
tgcagatcttggtggtag

SEQ ID NO: 39202 - RNA, 18 nt, Synthetic Construct
  source 1..18: mol_type = other RNA
tgcagatcttggtggtag

SEQ ID NO: 39203 - RNA, 21 nt, Synthetic Construct
  source 1..21: mol_type = other RNA
cgtaccgtgggtaataatgcg

SEQ ID NO: 39204 - RNA, 21 nt, Synthetic Construct
  source 1..21: mol_type = other RNA
cgtaccgtgggtaataatgcg

SEQ ID NO: 39205 - RNA, 26 nt, Synthetic Construct
  source 1..26: mol_type = other RNA
tgtccccgcgaggggcccggggcggg

SEQ ID NO: 39206 - RNA, 27 nt, Synthetic Construct
  source 1..27: mol_type = other RNA
ccccccactgctaaatttgattggctt

SEQ ID NO: 39207 - RNA, 27 nt, Synthetic Construct
  source 1..27: mol_type = other RNA
ccccccactgctaaatttgattggctt

SEQ ID NO: 39208 - RNA, 23 nt, Synthetic Construct
  source 1..23: mol_type = other RNA
cctcgcgcgattggagcggccga

SEQ ID NO: 39209 - RNA, 22 nt, Synthetic Construct
  source 1..22: mol_type = other RNA
tcgtaccgcgagtaataatgcg

SEQ ID NO: 39210 - RNA, 22 nt, Synthetic Construct
  source 1..22: mol_type = other RNA
tcgtaccgcgagtaataatgcg

SEQ ID NO: 39211 - RNA, 22 nt, Synthetic Construct
  source 1..22: mol_type = other RNA
tcgaaccgtgagtaataatgcg

SEQ ID NO: 39212 - RNA, 22 nt, Synthetic Construct
  source 1..22: mol_type = other RNA
tcgaaccgtgagtaataatgcg

SEQ ID NO: 39213 - RNA, 21 nt, Synthetic Construct
  source 1..21: mol_type = other RNA
acctgtactgagctgccccga

SEQ ID NO: 39214 - RNA, 21 nt, Synthetic Construct
  source 1..21: mol_type = other RNA
acctgtactgagctgccccga

SEQ ID NO: 39215 - RNA, 22 nt, Synthetic Construct
  source 1..22: mol_type = other RNA
ggcagcattgtacagggctatg

SEQ ID NO: 39216 - RNA, 22 nt, Synthetic Construct
  source 1..22: mol_type = other RNA
ggcagcattgtacagggctatg

SEQ ID NO: 39217 - RNA, 22 nt, Synthetic Construct
  source 1..22: mol_type = other RNA
tgggatgtaaagaagtatgtat

SEQ ID NO: 39218 - RNA, 22 nt, Synthetic Construct
  source 1..22: mol_type = other RNA
tgggatgtaaagaagtatgtat

SEQ ID NO: 39219 - RNA, 30 nt, Synthetic Construct; identical to SEQ ID NO: 1220
  source 1..30: mol_type = other RNA

SEQ ID NO: 39220 - RNA, 30 nt, Synthetic Construct; identical to SEQ ID NO: 1220
  source 1..30: mol_type = other RNA

SEQ ID NO: 39221 - RNA, 21 nt, Synthetic Construct
  source 1..21: mol_type = other RNA
ctttgttcgattccgttgagt

SEQ ID NO: 39222 - RNA, 21 nt, Synthetic Construct
  source 1..21: mol_type = other RNA
ctttgttcgattccgttgagt

SEQ ID NO: 39223 - RNA, 20 nt, Synthetic Construct
  source 1..20: mol_type = other RNA
ggaggtagtaggttgtgtgg

SEQ ID NO: 39224 - RNA, 39 nt, Synthetic Construct; identical to SEQ ID NO: 773
  source 1..39: mol_type = other RNA

SEQ ID NO: 39225 - RNA, 16 nt, Synthetic Construct
  source 1..16: mol_type = other RNA
gcaagaggtcagcggt

SEQ ID NO: 39226 - RNA, 25 nt, Synthetic Construct
  source 1..25: mol_type = other RNA
aacattcaacgctgtcggtgagttt

SEQ ID NO: 39227 - RNA, 25 nt, Synthetic Construct
  source 1..25: mol_type = other RNA
aacattcaacgctgtcggtgagttt

SEQ ID NO: 39228 - RNA, 23 nt, Synthetic Construct
  source 1..23: mol_type = other RNA
tggtaatatgacgtacttagtgt

SEQ ID NO: 39229 - RNA, 23 nt, Synthetic Construct
  source 1..23: mol_type = other RNA
tggtaatatgacgtacttagtgt

SEQ ID NO: 39230 - RNA, 22 nt, Synthetic Construct
  source 1..22: mol_type = other RNA
tgaggtagtagtttgtgatgtt

SEQ ID NO: 39231 - RNA, 22 nt, Synthetic Construct
  source 1..22: mol_type = other RNA
tgaggtagtagtttgtgatgtt

SEQ ID NO: 39232 - RNA, 23 nt, Synthetic Construct
  source 1..23: mol_type = other RNA
tgagcgcctcgacgacagagccg

SEQ ID NO: 39233 - RNA, 23 nt, Synthetic Construct
  source 1..23: mol_type = other RNA
tgagcgcctcgacgacagagccg

SEQ ID NO: 39234 - RNA, 30 nt, Synthetic Construct; identical to SEQ ID NO: 1535
  source 1..30: mol_type = other RNA

SEQ ID NO: 39235 - RNA, 23 nt, Synthetic Construct
  source 1..23: mol_type = other RNA
aggggtgctatctgtgattgagg

SEQ ID NO: 39236 - RNA, 21 nt, Synthetic Construct
  source 1..21: mol_type = other RNA
ggaggtagtaggttgtgtggt

SEQ ID NO: 39237 - RNA, 20 nt, Synthetic Construct
  source 1..20: mol_type = other RNA
tgaggtagtaggttgtgcgg

SEQ ID NO: 39238 - RNA, 21 nt, Synthetic Construct
  source 1..21: mol_type = other RNA
agctacattgtctgctgggtt

SEQ ID NO: 39239 - RNA, 19 nt, Synthetic Construct
  source 1..19: mol_type = other RNA
agcgaaattccttgtcggg

SEQ ID NO: 39240 - RNA, 19 nt, Synthetic Construct
  source 1..19: mol_type = other RNA
agcgaaattccttgtcggg

SEQ ID NO: 39241 - RNA, 21 nt, Synthetic Construct
  source 1..21: mol_type = other RNA
tttgttcgttcggctcgcgtg

SEQ ID NO: 39242 - RNA, 21 nt, Synthetic Construct
  source 1..21: mol_type = other RNA
tttgttcgttcggctcgcgtg

SEQ ID NO: 39243 - RNA, 16 nt, Synthetic Construct
  source 1..16: mol_type = other RNA
ttaatccagccagtcc

SEQ ID NO: 39244 - RNA, 16 nt, Synthetic Construct
  source 1..16: mol_type = other RNA
ttaatccagccagtcc

SEQ ID NO: 39245 - RNA, 24 nt, Synthetic Construct
  source 1..24: mol_type = other RNA
gggttgtaaaccgcttttgtcagg

SEQ ID NO: 39246 - RNA, 23 nt, Synthetic Construct
  source 1..23: mol_type = other RNA
cccagtgttcagactacctgttc

SEQ ID NO: 39247 - RNA, 23 nt, Synthetic Construct
  source 1..23: mol_type = other RNA
cccagtgttcagactacctgttc

SEQ ID NO: 39248 - RNA, 22 nt, Synthetic Construct
  source 1..22: mol_type = other RNA
tgggtttacgttgggagaactt

SEQ ID NO: 39249 - RNA, 22 nt, Synthetic Construct
  source 1..22: mol_type = other RNA
tgggtttacgttgggagaactt

SEQ ID NO: 39250 - RNA, 23 nt, Synthetic Construct
  source 1..23: mol_type = other RNA
caaagtgctgttcgtgcgggtag

SEQ ID NO: 39251 - RNA, 23 nt, Synthetic Construct
  source 1..23: mol_type = other RNA
caaagtgctgttcgtgcgggtag

SEQ ID NO: 39252 - RNA, 20 nt, Synthetic Construct
  source 1..20: mol_type = other RNA
agctacattgtctgctgggt

SEQ ID NO: 39253 - RNA, 20 nt, Synthetic Construct
  source 1..20: mol_type = other RNA
agctacattgtctgctgggt

SEQ ID NO: 39254 - RNA, 30 nt, Synthetic Construct; identical to SEQ ID NO: 1079
  source 1..30: mol_type = other RNA

SEQ ID NO: 39255 - RNA, 31 nt, Synthetic Construct; identical to SEQ ID NO: 285
  source 1..31: mol_type = other RNA

SEQ ID NO: 39256 - RNA, 21 nt, Synthetic Construct
  source 1..21: mol_type = other RNA
ctagactggagctccttgagg

SEQ ID NO: 39257 - RNA, 22 nt, Synthetic Construct
  source 1..22: mol_type = other RNA
tagcagcaagtaaatattggcg

SEQ ID NO: 39258 - RNA, 22 nt, Synthetic Construct
  source 1..22: mol_type = other RNA
tagcagcaagtaaatattggcg

SEQ ID NO: 39259 - RNA, 15 nt, Synthetic Construct
  source 1..15: mol_type = other RNA
tgcctcagcgtcggt

SEQ ID NO: 39260 - RNA, 15 nt, Synthetic Construct
  source 1..15: mol_type = other RNA
tgcctcagcgtcggt

SEQ ID NO: 39261 - RNA, 24 nt, Synthetic Construct
  source 1..24: mol_type = other RNA
tccctgagaccctttaacctgtgt

SEQ ID NO: 39262 - RNA, 23 nt, Synthetic Construct
  source 1..23: mol_type = other RNA
tcggaatcgctagtaatcgcgga

SEQ ID NO: 39263 - RNA, 23 nt, Synthetic Construct
  source 1..23: mol_type = other RNA
tcggaatcgctagtaatcgcgga

SEQ ID NO: 39264 - RNA, 16 nt, Synthetic Construct
  source 1..16: mol_type = other RNA
ttggcctcaagtcagg

SEQ ID NO: 39265 - RNA, 16 nt, Synthetic Construct
  source 1..16: mol_type = other RNA
ttggcctcaagtcagg

SEQ ID NO: 39266 - RNA, 23 nt, Synthetic Construct
  source 1..23: mol_type = other RNA
tgaggggcagagagagagacttt

SEQ ID NO: 39267 - RNA, 23 nt, Synthetic Construct
  source 1..23: mol_type = other RNA
tgaggggcagagagagagacttt

SEQ ID NO: 39268 - RNA, 32 nt, Synthetic Construct; identical to SEQ ID NO: 5582
  source 1..32: mol_type = other RNA

SEQ ID NO: 39269 - RNA, 23 nt, Synthetic Construct
  source 1..23: mol_type = other RNA
gtgcagatcttggtggtagtagc

SEQ ID NO: 39270 - RNA, 23 nt, Synthetic Construct
  source 1..23: mol_type = other RNA
gtgcagatcttggtggtagtagc

SEQ ID NO: 39271 - RNA, 21 nt, Synthetic Construct
  source 1..21: mol_type = other RNA
atggcactggtagaattcact

SEQ ID NO: 39272 - RNA, 21 nt, Synthetic Construct
  source 1..21: mol_type = other RNA
atggcactggtagaattcact

SEQ ID NO: 39273 - RNA, 15 nt, Synthetic Construct
  source 1..15: mol_type = other RNA
acggtcctaaggtag

SEQ ID NO: 39274 - RNA, 22 nt, Synthetic Construct
  source 1..22: mol_type = other RNA
tggggtagtagtttgtgctgtt

SEQ ID NO: 39275 - RNA, 22 nt, Synthetic Construct
  source 1..22: mol_type = other RNA
tggggtagtagtttgtgctgtt

SEQ ID NO: 39276 - RNA, 31 nt, Synthetic Construct; identical to SEQ ID NO: 1881
  source 1..31: mol_type = other RNA

SEQ ID NO: 39277 - RNA, 31 nt, Synthetic Construct; identical to SEQ ID NO: 1881
  source 1..31: mol_type = other RNA

SEQ ID NO: 39278 - RNA, 26 nt, Synthetic Construct
  source 1..26: mol_type = other RNA
tgtcggctcatctcatcctggggctg

SEQ ID NO: 39279 - RNA, 22 nt, Synthetic Construct
  source 1..22: mol_type = other RNA
tgaggtagtagattgtgtggtt

SEQ ID NO: 39280 - RNA, 22 nt, Synthetic Construct
  source 1..22: mol_type = other RNA
tgaggtagtagattgtgtggtt

SEQ ID NO: 39281 - RNA, 22 nt, Synthetic Construct
  source 1..22: mol_type = other RNA
tgaggtagtagtttgagctgtt

SEQ ID NO: 39282 - RNA, 22 nt, Synthetic Construct
  source 1..22: mol_type = other RNA
tgaggtagtagtttgagctgtt

SEQ ID NO: 39283 - RNA, 22 nt, Synthetic Construct
  source 1..22: mol_type = other RNA
gtccagttttcccaggaatccc

SEQ ID NO: 39284 - RNA, 22 nt, Synthetic Construct
  source 1..22: mol_type = other RNA
gtccagttttcccaggaatccc

SEQ ID NO: 39285 - RNA, 23 nt, Synthetic Construct
  source 1..23: mol_type = other RNA
tcccccaggtgtgattctgattt

SEQ ID NO: 39286 - RNA, 23 nt, Synthetic Construct
  source 1..23: mol_type = other RNA
tcccccaggtgtgattctgattt

SEQ ID NO: 39287 - RNA, 22 nt, Synthetic Construct
  source 1..22: mol_type = other RNA
tagcagcacataatggtttgtg

SEQ ID NO: 39288 - RNA, 23 nt, Synthetic Construct
  source 1..23: mol_type = other RNA
caaaagtaattgcggtctttggt

SEQ ID NO: 39289 - RNA, 23 nt, Synthetic Construct
  source 1..23: mol_type = other RNA
caaaagtaattgcggtctttggt

SEQ ID NO: 39290 - RNA, 23 nt, Synthetic Construct
  source 1..23: mol_type = other RNA
tgtagtgtttcctactttatggt

SEQ ID NO: 39291 - RNA, 23 nt, Synthetic Construct
  source 1..23: mol_type = other RNA
tgtagtgtttcctactttatggt

SEQ ID NO: 39292 - RNA, 28 nt, Synthetic Construct
  source 1..28: mol_type = other RNA
ccccccactgctaaatttgactggcctt

SEQ ID NO: 39293 - RNA, 28 nt, Synthetic Construct
  source 1..28: mol_type = other RNA
ccccccactgctaaatttgactggcctt

SEQ ID NO: 39294 - RNA, 22 nt, Synthetic Construct
  source 1..22: mol_type = other RNA
tattgcacttgtcccggcctgc

SEQ ID NO: 39295 - RNA, 22 nt, Synthetic Construct
  source 1..22: mol_type = other RNA
tattgcacttgtcccggcctgc

SEQ ID NO: 39296 - RNA, 22 nt, Synthetic Construct
  source 1..22: mol_type = other RNA
tgaggtagtaagttgtatagtt

SEQ ID NO: 39297 - RNA, 24 nt, Synthetic Construct
  source 1..24: mol_type = other RNA
tgtaaacatccttgactggaagct

SEQ ID NO: 39298 - RNA, 24 nt, Synthetic Construct
  source 1..24: mol_type = other RNA
tgtaaacatccttgactggaagct

SEQ ID NO: 39299 - RNA, 21 nt, Synthetic Construct
  source 1..21: mol_type = other RNA
taactccttagcgaatctcgc

SEQ ID NO: 39300 - RNA, 21 nt, Synthetic Construct
  source 1..21: mol_type = other RNA
taactccttagcgaatctcgc

SEQ ID NO: 39301 - RNA, 21 nt, Synthetic Construct
  source 1..21: mol_type = other RNA
tggggtgtgacaatggtgttt

SEQ ID NO: 39302 - RNA, 21 nt, Synthetic Construct
  source 1..21: mol_type = other RNA
tggggtgtgacaatggtgttt

SEQ ID NO: 39303 - RNA, 31 nt, Synthetic Construct; identical to SEQ ID NO: 7160
  source 1..31: mol_type = other RNA

SEQ ID NO: 39304 - RNA, 23 nt, Synthetic Construct
  source 1..23: mol_type = other RNA
actggctagggaaaatgattgga

SEQ ID NO: 39305 - RNA, 23 nt, Synthetic Construct
  source 1..23: mol_type = other RNA
actggctagggaaaatgattgga

SEQ ID NO: 39306 - RNA, 22 nt, Synthetic Construct
  source 1..22: mol_type = other RNA
tagcagcacgtaaatatcggcg

SEQ ID NO: 39307 - RNA, 22 nt, Synthetic Construct
  source 1..22: mol_type = other RNA
tagcagcacgtaaatatcggcg

SEQ ID NO: 39308 - RNA, 19 nt, Synthetic Construct
  source 1..19: mol_type = other RNA
agctacattgtctgctggg

SEQ ID NO: 39309 - RNA, 19 nt, Synthetic Construct
  source 1..19: mol_type = other RNA
agctacattgtctgctggg

SEQ ID NO: 39310 - RNA, 22 nt, Synthetic Construct
  source 1..22: mol_type = other RNA
cattgcacttgtctcggtccga

SEQ ID NO: 39311 - RNA, 23 nt, Synthetic Construct
  source 1..23: mol_type = other RNA
agcagcatcgtacagggctatga

SEQ ID NO: 39312 - RNA, 42 nt, Synthetic Construct; identical to SEQ ID NO: 19836
  source 1..42: mol_type = other RNA

SEQ ID NO: 39313 - RNA, 28 nt, Synthetic Construct
  source 1..28: mol_type = other RNA
tccctggtggtctagtggttaggattcg

SEQ ID NO: 39314 - RNA, 16 nt, Synthetic Construct
  source 1..16: mol_type = other RNA
ccgcttttgtcaggga

SEQ ID NO: 39315 - RNA, 16 nt, Synthetic Construct
  source 1..16: mol_type = other RNA
ccgcttttgtcaggga

SEQ ID NO: 39316 - RNA, 18 nt, Synthetic Construct
  source 1..18: mol_type = other RNA
gtcaggatggccgagcgg

SEQ ID NO: 39317 - RNA, 18 nt, Synthetic Construct
  source 1..18: mol_type = other RNA
gtcaggatggccgagcgg

SEQ ID NO: 39318 - RNA, 23 nt, Synthetic Construct
  source 1..23: mol_type = other RNA
tcctgtactgagctgcccagagt

SEQ ID NO: 39319 - RNA, 23 nt, Synthetic Construct
  source 1..23: mol_type = other RNA
ggcagcattgtacagggctatga

SEQ ID NO: 39320 - RNA, 21 nt, Synthetic Construct
  source 1..21: mol_type = other RNA
tgaggtagtaggttgcatagt

SEQ ID NO: 39321 - RNA, 21 nt, Synthetic Construct
  source 1..21: mol_type = other RNA
aattgcacggtatccatctgt

SEQ ID NO: 39322 - RNA, 21 nt, Synthetic Construct
  source 1..21: mol_type = other RNA
aattgcacggtatccatctgt

SEQ ID NO: 39323 - RNA, 20 nt, Synthetic Construct
  source 1..20: mol_type = other RNA
gcatggccgttcttagttgg

SEQ ID NO: 39324 - RNA, 20 nt, Synthetic Construct
  source 1..20: mol_type = other RNA
gcatggccgttcttagttgg

SEQ ID NO: 39325 - RNA, 21 nt, Synthetic Construct
  source 1..21: mol_type = other RNA
aacattcattgctgtcggtgg

SEQ ID NO: 39326 - RNA, 19 nt, Synthetic Construct
  source 1..19: mol_type = other RNA
ccagtaaacggcggccgta

SEQ ID NO: 39327 - RNA, 20 nt, Synthetic Construct
  source 1..20: mol_type = other RNA
aaaagctgggttgagaggga

SEQ ID NO: 39328 - RNA, 20 nt, Synthetic Construct
  source 1..20: mol_type = other RNA
aaaagctgggttgagaggga

SEQ ID NO: 39329 - RNA, 27 nt, Synthetic Construct
  source 1..27: mol_type = other RNA
tcggctgttaaccgaaaggttggtggt

SEQ ID NO: 39330 - RNA, 24 nt, Synthetic Construct
  source 1..24: mol_type = other RNA
aaaagctgggttgagagggcgaaa

SEQ ID NO: 39331 - RNA, 24 nt, Synthetic Construct
  source 1..24: mol_type = other RNA
aaaagctgggttgagagggcgaaa

SEQ ID NO: 39332 - RNA, 20 nt, Synthetic Construct
  source 1..20: mol_type = other RNA
ttagtgacgcgcatgaatgg

SEQ ID NO: 39333 - RNA, 24 nt, Synthetic Construct
  source 1..24: mol_type = other RNA
tgtaaacatccccgactggaagca

SEQ ID NO: 39334 - RNA, 15 nt, Synthetic Construct
  source 1..15: mol_type = other RNA
gcgggagtaactatg

SEQ ID NO: 39335 - RNA, 23 nt, Synthetic Construct
  source 1..23: mol_type = other RNA
agcagcattgtacagggctataa

SEQ ID NO: 39336 - RNA, 21 nt, Synthetic Construct
  source 1..21: mol_type = other RNA
tgaggtagaaggttgtgtggt

SEQ ID NO: 39337 - RNA, 34 nt, Synthetic Construct; identical to SEQ ID NO: 1111
  source 1..34: mol_type = other RNA

SEQ ID NO: 39338 - RNA, 27 nt, Synthetic Construct
  source 1..27: mol_type = other RNA
cgactcttagcggtggatcactcggct

SEQ ID NO: 39339 - RNA, 20 nt, Synthetic Construct
  source 1..20: mol_type = other RNA
tgaggtagtaggttgtgtgg

SEQ ID NO: 39340 - RNA, 17 nt, Synthetic Construct
  source 1..17: mol_type = other RNA
cgatctgtagctggtct

SEQ ID NO: 39341 - RNA, 17 nt, Synthetic Construct
  source 1..17: mol_type = other RNA
cgatctgtagctggtct

SEQ ID NO: 39342 - RNA, 22 nt, Synthetic Construct
  source 1..22: mol_type = other RNA
tagcagcacataatggtttgtg

SEQ ID NO: 39343 - RNA, 22 nt, Synthetic Construct
  source 1..22: mol_type = other RNA
tagcagcacataatggtttgtg

SEQ ID NO: 39344 - RNA, 23 nt, Synthetic Construct
  source 1..23: mol_type = other RNA
agctcggtctgaggcccctcagt

SEQ ID NO: 39345 - RNA, 23 nt, Synthetic Construct
  source 1..23: mol_type = other RNA
agctcggtctgaggcccctcagt

SEQ ID NO: 39346 - RNA, 27 nt, Synthetic Construct
  source 1..27: mol_type = other RNA
ccccccactgctaaatttgactggctc

SEQ ID NO: 39347 - RNA, 24 nt, Synthetic Construct
  source 1..24: mol_type = other RNA
ggctacattgtctgctgggtttct

SEQ ID NO: 39348 - RNA, 24 nt, Synthetic Construct
  source 1..24: mol_type = other RNA
ggctacattgtctgctgggtttct

SEQ ID NO: 39349 - RNA, 25 nt, Synthetic Construct
  source 1..25: mol_type = other RNA
tgtaaacatccttgactggaagctt

SEQ ID NO: 39350 - RNA, 23 nt, Synthetic Construct
  source 1..23: mol_type = other RNA
caaagtgttgttcgtgcaggtag

SEQ ID NO: 39351 - RNA, 23 nt, Synthetic Construct
  source 1..23: mol_type = other RNA
tccagtactgagctgccccgaga

SEQ ID NO: 39352 - RNA, 23 nt, Synthetic Construct
  source 1..23: mol_type = other RNA
tgaggggcagagggcgagacttt

SEQ ID NO: 39353 - RNA, 23 nt, Synthetic Construct
  source 1..23: mol_type = other RNA
tgaggggcagagggcgagacttt

SEQ ID NO: 39354 - RNA, 20 nt, Synthetic Construct
  source 1..20: mol_type = other RNA
cccataaagtagaaagcact

SEQ ID NO: 39355 - RNA, 18 nt, Synthetic Construct
  source 1..18: mol_type = other RNA
gcgaaattccttgtcggg

SEQ ID NO: 39356 - RNA, 18 nt, Synthetic Construct
  source 1..18: mol_type = other RNA
gcgaaattccttgtcggg

SEQ ID NO: 39357 - RNA, 32 nt, Synthetic Construct; identical to SEQ ID NO: 1237
  source 1..32: mol_type = other RNA

SEQ ID NO: 39358 - RNA, 32 nt, Synthetic Construct; identical to SEQ ID NO: 1237
  source 1..32: mol_type = other RNA

SEQ ID NO: 39359 - RNA, 22 nt, Synthetic Construct
  source 1..22: mol_type = other RNA
tgagatagtagtttgtgctgtt

SEQ ID NO: 39360 - RNA, 19 nt, Synthetic Construct
  source 1..19: mol_type = other RNA
cgactcttagcggtggatc

SEQ ID NO: 39361 - RNA, 19 nt, Synthetic Construct
  source 1..19: mol_type = other RNA
cgactcttagcggtggatc

SEQ ID NO: 39362 - RNA, 21 nt, Synthetic Construct
  source 1..21: mol_type = other RNA
ngaggtagtaggttgtgtggt

SEQ ID NO: 39363 - RNA, 18 nt, Synthetic Construct
  source 1..18: mol_type = other RNA
atggccgttcttagttgg

SEQ ID NO: 39364 - RNA, 22 nt, Synthetic Construct
  source 1..22: mol_type = other RNA
tattgcacttgtcccggcctat

SEQ ID NO: 39365 - RNA, 17 nt, Synthetic Construct
  source 1..17: mol_type = other RNA
cgactcttagcggtgga

SEQ ID NO: 39366 - RNA, 17 nt, Synthetic Construct
  source 1..17: mol_type = other RNA
cgactcttagcggtgga

SEQ ID NO: 39367 - RNA, 23 nt, Synthetic Construct
  source 1..23: mol_type = other RNA
agcaggacggtggccatggaagt

SEQ ID NO: 39368 - RNA, 23 nt, Synthetic Construct
  source 1..23: mol_type = other RNA
agcaggacggtggccatggaagt

SEQ ID NO: 39369 - RNA, 23 nt, Synthetic Construct
  source 1..23: mol_type = other RNA
tagcagcacataatggtttgtgg

SEQ ID NO: 39370 - RNA, 19 nt, Synthetic Construct
  source 1..19: mol_type = other RNA
tggagtgtgacaatggtgt

SEQ ID NO: 39371 - RNA, 17 nt, Synthetic Construct
  source 1..17: mol_type = other RNA
caggacggtggccatgg

SEQ ID NO: 39372 - RNA, 17 nt, Synthetic Construct
  source 1..17: mol_type = other RNA
caggacggtggccatgg

SEQ ID NO: 39373 - RNA, 22 nt, Synthetic Construct
  source 1..22: mol_type = other RNA
tgaggtagtaaattgtatagtt

SEQ ID NO: 39374 - RNA, 22 nt, Synthetic Construct
  source 1..22: mol_type = other RNA
tgaggtagtaaattgtatagtt

SEQ ID NO: 39375 - RNA, 22 nt, Synthetic Construct
  source 1..22: mol_type = other RNA
tcctgaactgagctgccccgag

SEQ ID NO: 39376 - RNA, 23 nt, Synthetic Construct
  source 1..23: mol_type = other RNA
tgaggtagtagtttgtgctgtta

SEQ ID NO: 39377 - RNA, 18 nt, Synthetic Construct
  source 1..18: mol_type = other RNA
acagtcaggatgttggct

SEQ ID NO: 39378 - RNA, 18 nt, Synthetic Construct
  source 1..18: mol_type = other RNA
acagtcaggatgttggct

SEQ ID NO: 39379 - RNA, 35 nt, Synthetic Construct; identical to SEQ ID NO: 2615
  source 1..35: mol_type = other RNA

SEQ ID NO: 39380 - RNA, 22 nt, Synthetic Construct
  source 1..22: mol_type = other RNA
aatcgtacagggtcatccactt

SEQ ID NO: 39381 - RNA, 22 nt, Synthetic Construct
  source 1..22: mol_type = other RNA
aatcgtacagggtcatccactt

SEQ ID NO: 39382 - RNA, 22 nt, Synthetic Construct
  source 1..22: mol_type = other RNA
caacggaatcccaaaagcagca

SEQ ID NO: 39383 - RNA, 25 nt, Synthetic Construct
  source 1..25: mol_type = other RNA
ttgaggatatgaggtcgagacgaca

SEQ ID NO: 39384 - RNA, 24 nt, Synthetic Construct
  source 1..24: mol_type = other RNA
tcctccctcgggagggcgcgcggg

SEQ ID NO: 39385 - RNA, 24 nt, Synthetic Construct
  source 1..24: mol_type = other RNA
tcctccctcgggagggcgcgcggg

SEQ ID NO: 39386 - RNA, 17 nt, Synthetic Construct
  source 1..17: mol_type = other RNA
cgatctgtagctggtct

SEQ ID NO: 39387 - RNA, 23 nt, Synthetic Construct
  source 1..23: mol_type = other RNA
ttggtccccttcaaccagctgtt

SEQ ID NO: 39388 - RNA, 23 nt, Synthetic Construct
  source 1..23: mol_type = other RNA
ttggtccccttcaaccagctgtt

SEQ ID NO: 39389 - RNA, 33 nt, Synthetic Construct; identical to SEQ ID NO: 7469
  source 1..33: mol_type = other RNA

SEQ ID NO: 39390 - RNA, 22 nt, Synthetic Construct
  source 1..22: mol_type = other RNA
cattgcactcgtctcggtctga

SEQ ID NO: 39391 - RNA, 22 nt, Synthetic Construct
  source 1..22: mol_type = other RNA
cattgcactcgtctcggtctga

SEQ ID NO: 39392 - RNA, 23 nt, Synthetic Construct
  source 1..23: mol_type = other RNA
tgaggtagtaggttgtgtggttc

SEQ ID NO: 39393 - RNA, 23 nt, Synthetic Construct
  source 1..23: mol_type = other RNA
tgaggtagtaggttgtgtggttc

SEQ ID NO: 39394 - RNA, 23 nt, Synthetic Construct
  source 1..23: mol_type = other RNA
caaagtgccgttcgtgcaggtag

SEQ ID NO: 39395 - RNA, 23 nt, Synthetic Construct
  source 1..23: mol_type = other RNA
caaagtgccgttcgtgcaggtag

SEQ ID NO: 39396 - RNA, 22 nt, Synthetic Construct
  source 1..22: mol_type = other RNA
tgaggtagtagattgtatggtt

SEQ ID NO: 39397 - RNA, 22 nt, Synthetic Construct
  source 1..22: mol_type = other RNA
tgaggtagtagattgtatggtt

SEQ ID NO: 39398 - RNA, 22 nt, Synthetic Construct
  source 1..22: mol_type = other RNA
tgaggtagtaagttgtgtggtt

SEQ ID NO: 39399 - RNA, 16 nt, Synthetic Construct
  source 1..16: mol_type = other RNA
gaaaaagtcatggagg

SEQ ID NO: 39400 - RNA, 16 nt, Synthetic Construct
  source 1..16: mol_type = other RNA
gaaaaagtcatggagg

SEQ ID NO: 39401 - RNA, 22 nt, Synthetic Construct
  source 1..22: mol_type = other RNA
agctcggtctgaggcccctcag

SEQ ID NO: 39402 - RNA, 22 nt, Synthetic Construct
  source 1..22: mol_type = other RNA
agctcggtctgaggcccctcag

SEQ ID NO: 39403 - RNA, 22 nt, Synthetic Construct
  source 1..22: mol_type = other RNA
tgaggtggtagtttgtgctgtt

SEQ ID NO: 39404 - RNA, 22 nt, Synthetic Construct
  source 1..22: mol_type = other RNA
tgaggtggtagtttgtgctgtt

SEQ ID NO: 39405 - RNA, 15 nt, Synthetic Construct
  source 1..15: mol_type = other RNA
ggtgaaagcggggga

SEQ ID NO: 39406 - RNA, 15 nt, Synthetic Construct
  source 1..15: mol_type = other RNA
ggtgaaagcggggga

SEQ ID NO: 39407 - RNA, 17 nt, Synthetic Construct
  source 1..17: mol_type = other RNA
gaagttgaccgcctggg

SEQ ID NO: 39408 - RNA, 17 nt, Synthetic Construct
  source 1..17: mol_type = other RNA
gaagttgaccgcctggg

SEQ ID NO: 39409 - RNA, 25 nt, Synthetic Construct
  source 1..25: mol_type = other RNA
ccccccactgctaaatttgactgga

SEQ ID NO: 39410 - RNA, 25 nt, Synthetic Construct
  source 1..25: mol_type = other RNA
ccccccactgctaaatttgactgga

SEQ ID NO: 39411 - RNA, 20 nt, Synthetic Construct
  source 1..20: mol_type = other RNA
actgatcgagtcgtcctgcg

SEQ ID NO: 39412 - RNA, 22 nt, Synthetic Construct
  source 1..22: mol_type = other RNA
cgaggtagtagtttgtgctgtt

SEQ ID NO: 39413 - RNA, 19 nt, Synthetic Construct
  source 1..19: mol_type = other RNA
accgggtgctgtaggcttt

SEQ ID NO: 39414 - RNA, 19 nt, Synthetic Construct
  source 1..19: mol_type = other RNA
accgggtgctgtaggcttt

SEQ ID NO: 39415 - RNA, 27 nt, Synthetic Construct
  source 1..27: mol_type = other RNA
ccccccactgctaaatttggctggcta

SEQ ID NO: 39416 - RNA, 27 nt, Synthetic Construct
  source 1..27: mol_type = other RNA
ccccccactgctaaatttggctggcta

SEQ ID NO: 39417 - RNA, 22 nt, Synthetic Construct
  source 1..22: mol_type = other RNA
tgaggtagtagtttgtgcggtt

SEQ ID NO: 39418 - RNA, 18 nt, Synthetic Construct
  source 1..18: mol_type = other RNA
gctattgacgaccgtacc

SEQ ID NO: 39419 - RNA, 22 nt, Synthetic Construct
  source 1..22: mol_type = other RNA
tattgcacttgtcccggcctat

SEQ ID NO: 39420 - RNA, 22 nt, Synthetic Construct
  source 1..22: mol_type = other RNA
tgaggtagtagtttgtgccgtt

SEQ ID NO: 39421 - RNA, 22 nt, Synthetic Construct
  source 1..22: mol_type = other RNA
tgaggtagtagtttgtgccgtt

SEQ ID NO: 39422 - RNA, 22 nt, Synthetic Construct
  source 1..22: mol_type = other RNA
ccgcactgtgggtacttgctgc

SEQ ID NO: 39423 - RNA, 22 nt, Synthetic Construct
  source 1..22: mol_type = other RNA
ccgcactgtgggtacttgctgc

SEQ ID NO: 39424 - RNA, 17 nt, Synthetic Construct
  source 1..17: mol_type = other RNA
tcagtagctcgaggaaa

SEQ ID NO: 39425 - RNA, 32 nt, Synthetic Construct; identical to SEQ ID NO: 4279
  source 1..32: mol_type = other RNA

SEQ ID NO: 39426 - RNA, 24 nt, Synthetic Construct
  source 1..24: mol_type = other RNA
caacggaatcccaaaagcagctgc

SEQ ID NO: 39427 - RNA, 17 nt, Synthetic Construct
  source 1..17: mol_type = other RNA
atagggaacgtgagctg

SEQ ID NO: 39428 - RNA, 17 nt, Synthetic Construct
  source 1..17: mol_type = other RNA
atagggaacgtgagctg

SEQ ID NO: 39429 - RNA, 25 nt, Synthetic Construct
  source 1..25: mol_type = other RNA
ttgaggatatgagatcgaggcgaca

SEQ ID NO: 39430 - RNA, 25 nt, Synthetic Construct
  source 1..25: mol_type = other RNA
ttgaggatatgagatcgaggcgaca

SEQ ID NO: 39431 - RNA, 22 nt, Synthetic Construct
  source 1..22: mol_type = other RNA
taaggtagtaggttgtatagtt

SEQ ID NO: 39432 - RNA, 22 nt, Synthetic Construct
  source 1..22: mol_type = other RNA
taaggtagtaggttgtatagtt

SEQ ID NO: 39433 - RNA, 22 nt, Synthetic Construct
  source 1..22: mol_type = other RNA
tgaggtggtagattgtatagtt

SEQ ID NO: 39434 - RNA, 22 nt, Synthetic Construct
  source 1..22: mol_type = other RNA
tgaggtggtagattgtatagtt

SEQ ID NO: 39435 - RNA, 23 nt, Synthetic Construct
  source 1..23: mol_type = other RNA
ttaatgctaatcgtgataggggt

SEQ ID NO: 39436 - RNA, 20 nt, Synthetic Construct
  source 1..20: mol_type = other RNA
tccctgtcctccaggagctc

SEQ ID NO: 39437 - RNA, 22 nt, Synthetic Construct
  source 1..22: mol_type = other RNA
cgactcttagcggtggatcact

SEQ ID NO: 39438 - RNA, 24 nt, Synthetic Construct
  source 1..24: mol_type = other RNA
tgtagacatccccgactggaagct

SEQ ID NO: 39439 - RNA, 24 nt, Synthetic Construct
  source 1..24: mol_type = other RNA
tgtagacatccccgactggaagct

SEQ ID NO: 39440 - RNA, 22 nt, Synthetic Construct
  source 1..22: mol_type = other RNA
tagcggcacgtaaatattggcg

SEQ ID NO: 39441 - RNA, 23 nt, Synthetic Construct
  source 1..23: mol_type = other RNA
caaagcgctgttcgtgcaggtag

SEQ ID NO: 39442 - RNA, 24 nt, Synthetic Construct
  source 1..24: mol_type = other RNA
tgtaaacatccccgactggaggct

SEQ ID NO: 39443 - RNA, 24 nt, Synthetic Construct
  source 1..24: mol_type = other RNA
tgtaaacatccccgactggaggct

SEQ ID NO: 39444 - RNA, 23 nt, Synthetic Construct
  source 1..23: mol_type = other RNA
cagtgcaatgttaaaagggcatt

SEQ ID NO: 39445 - RNA, 23 nt, Synthetic Construct
  source 1..23: mol_type = other RNA
cagtgcaatgttaaaagggcatt

SEQ ID NO: 39446 - RNA, 23 nt, Synthetic Construct
  source 1..23: mol_type = other RNA
tggagtgtgacaatggtgtttgg

SEQ ID NO: 39447 - RNA, 22 nt, Synthetic Construct
  source 1..22: mol_type = other RNA
tttgttcgttcggctcgcgtga

SEQ ID NO: 39448 - RNA, 22 nt, Synthetic Construct
  source 1..22: mol_type = other RNA
tttgttcgttcggctcgcgtga

SEQ ID NO: 39449 - RNA, 21 nt, Synthetic Construct
  source 1..21: mol_type = other RNA
aagctgccagttgaagaactg

SEQ ID NO: 39450 - RNA, 21 nt, Synthetic Construct
  source 1..21: mol_type = other RNA
aagctgccagttgaagaactg

SEQ ID NO: 39451 - RNA, 21 nt, Synthetic Construct
  source 1..21: mol_type = other RNA
gcctgtactgagctgccccga

SEQ ID NO: 39452 - RNA, 21 nt, Synthetic Construct
  source 1..21: mol_type = other RNA
gcctgtactgagctgccccga

SEQ ID NO: 39453 - RNA, 17 nt, Synthetic Construct
  source 1..17: mol_type = other RNA
ggataactggcttgtgg

SEQ ID NO: 39454 - RNA, 22 nt, Synthetic Construct
  source 1..22: mol_type = other RNA
tagcagcacttaaatattggcg

SEQ ID NO: 39455 - RNA, 22 nt, Synthetic Construct
  source 1..22: mol_type = other RNA
tagcagcacttaaatattggcg

SEQ ID NO: 39456 - RNA, 21 nt, Synthetic Construct
  source 1..21: mol_type = other RNA
tgaggaagtaggttgtatagt

SEQ ID NO: 39457 - RNA, 22 nt, Synthetic Construct
  source 1..22: mol_type = other RNA
tgaggtagtaggttgtatagtt

SEQ ID NO: 39458 - RNA, 16 nt, Synthetic Construct
  source 1..16: mol_type = other RNA
gagctgtggatagggg

SEQ ID NO: 39459 - RNA, 16 nt, Synthetic Construct
  source 1..16: mol_type = other RNA
gagctgtggatagggg

SEQ ID NO: 39460 - RNA, 32 nt, Synthetic Construct; identical to SEQ ID NO: 1128
  source 1..32: mol_type = other RNA

SEQ ID NO: 39461 - RNA, 19 nt, Synthetic Construct
  source 1..19: mol_type = other RNA
cccttgtcattagttgcta

SEQ ID NO: 39462 - RNA, 15 nt, Synthetic Construct
  source 1..15: mol_type = other RNA
cgagtgacgtagtgt

SEQ ID NO: 39463 - RNA, 15 nt, Synthetic Construct
  source 1..15: mol_type = other RNA
cgagtgacgtagtgt

SEQ ID NO: 39464 - RNA, 21 nt, Synthetic Construct
  source 1..21: mol_type = other RNA
agaggtagtaggttgtgtggt

SEQ ID NO: 39465 - RNA, 21 nt, Synthetic Construct
  source 1..21: mol_type = other RNA
agaggtagtaggttgtgtggt

SEQ ID NO: 39466 - RNA, 22 nt, Synthetic Construct
  source 1..22: mol_type = other RNA
acaatgtaggtaagggaagtcg

SEQ ID NO: 39467 - RNA, 22 nt, Synthetic Construct
  source 1..22: mol_type = other RNA
acaatgtaggtaagggaagtcg

SEQ ID NO: 39468 - RNA, 22 nt, Synthetic Construct
  source 1..22: mol_type = other RNA
ngaggtagtagtttgtgctgtt

SEQ ID NO: 39469 - RNA, 22 nt, Synthetic Construct
  source 1..22: mol_type = other RNA
tgaggtagtaggttgtatagtc

SEQ ID NO: 39470 - RNA, 22 nt, Synthetic Construct
  source 1..22: mol_type = other RNA
tgaggtagtaggttgtatagtc

SEQ ID NO: 39471 - RNA, 22 nt, Synthetic Construct
  source 1..22: mol_type = other RNA
tggaatgtaaggaagtgtgtgg

SEQ ID NO: 39472 - RNA, 22 nt, Synthetic Construct
  source 1..22: mol_type = other RNA
tggaatgtaaggaagtgtgtgg

SEQ ID NO: 39473 - RNA, 15 nt, Synthetic Construct
  source 1..15: mol_type = other RNA
cgatatggcatgaga

SEQ ID NO: 39474 - RNA, 15 nt, Synthetic Construct
  source 1..15: mol_type = other RNA
cgatatggcatgaga

SEQ ID NO: 39475 - RNA, 22 nt, Synthetic Construct
  source 1..22: mol_type = other RNA
tcctgtactgagctgccccgat

SEQ ID NO: 39476 - RNA, 22 nt, Synthetic Construct
  source 1..22: mol_type = other RNA
tcctgtactgagctgccccgat

SEQ ID NO: 39477 - RNA, 22 nt, Synthetic Construct
  source 1..22: mol_type = other RNA
tgaggtagaaggttgtgtggtt

SEQ ID NO: 39478 - RNA, 21 nt, Synthetic Construct
  source 1..21: mol_type = other RNA
tgaggcagtaggttgtatagt

SEQ ID NO: 39479 - RNA, 21 nt, Synthetic Construct
  source 1..21: mol_type = other RNA
tgaggcagtaggttgtatagt

SEQ ID NO: 39480 - RNA, 22 nt, Synthetic Construct
  source 1..22: mol_type = other RNA
tactgcacttgtcccggcctgt

SEQ ID NO: 39481 - RNA, 22 nt, Synthetic Construct
  source 1..22: mol_type = other RNA
tactgcacttgtcccggcctgt

SEQ ID NO: 39482 - RNA, 22 nt, Synthetic Construct
  source 1..22: mol_type = other RNA
taaccccttaagcgaatctcgc

SEQ ID NO: 39483 - RNA, 18 nt, Synthetic Construct
  source 1..18: mol_type = other RNA
cctcgcgcgattggagcg

SEQ ID NO: 39484 - RNA, 34 nt, Synthetic Construct; identical to SEQ ID NO: 2529
  source 1..34: mol_type = other RNA

SEQ ID NO: 39485 - RNA, 22 nt, Synthetic Construct
  source 1..22: mol_type = other RNA
cgactcttagcggtggatcact

SEQ ID NO: 39486 - RNA, 22 nt, Synthetic Construct
  source 1..22: mol_type = other RNA
cgactcttagcggtggatcact

SEQ ID NO: 39487 - RNA, 21 nt, Synthetic Construct
  source 1..21: mol_type = other RNA
ggaatcgctagtaatcgcgga

SEQ ID NO: 39488 - RNA, 21 nt, Synthetic Construct
  source 1..21: mol_type = other RNA
ggaatcgctagtaatcgcgga

SEQ ID NO: 39489 - RNA, 22 nt, Synthetic Construct
  source 1..22: mol_type = other RNA
tgaggtagtagtttgtgctggt

SEQ ID NO: 39490 - RNA, 21 nt, Synthetic Construct
  source 1..21: mol_type = other RNA
taatactgcctggtaatgatg

SEQ ID NO: 39491 - RNA, 21 nt, Synthetic Construct
  source 1..21: mol_type = other RNA
tcctgtactgggctgccccga

SEQ ID NO: 39492 - RNA, 23 nt, Synthetic Construct
  source 1..23: mol_type = other RNA
acctgtactgagctgccccgaga

SEQ ID NO: 39493 - RNA, 25 nt, Synthetic Construct
  source 1..25: mol_type = other RNA
tgaggggcagagagcgagactttta

SEQ ID NO: 39494 - RNA, 25 nt, Synthetic Construct
  source 1..25: mol_type = other RNA
tgaggggcagagagcgagactttta

SEQ ID NO: 39495 - RNA, 22 nt, Synthetic Construct
  source 1..22: mol_type = other RNA
taaggtagtagattgtatagtt

SEQ ID NO: 39496 - RNA, 22 nt, Synthetic Construct
  source 1..22: mol_type = other RNA
taaggtagtagattgtatagtt

SEQ ID NO: 39497 - RNA, 15 nt, Synthetic Construct
  source 1..15: mol_type = other RNA
gcaagtcgaacggta

SEQ ID NO: 39498 - RNA, 15 nt, Synthetic Construct
  source 1..15: mol_type = other RNA
gcaagtcgaacggta

SEQ ID NO: 39499 - RNA, 23 nt, Synthetic Construct
  source 1..23: mol_type = other RNA
tcctgtactgagctgccccgagg

SEQ ID NO: 39500 - RNA, 27 nt, Synthetic Construct
  source 1..27: mol_type = other RNA
ccccccactgctaaatctgactggctt

SEQ ID NO: 39501 - RNA, 27 nt, Synthetic Construct
  source 1..27: mol_type = other RNA
ccccccactgctaaatctgactggctt

SEQ ID NO: 39502 - RNA, 23 nt, Synthetic Construct
  source 1..23: mol_type = other RNA
tccagtactgagctgccccgaga

SEQ ID NO: 39503 - RNA, 21 nt, Synthetic Construct
  source 1..21: mol_type = other RNA
tgaggaagtaggttgtgtggt

SEQ ID NO: 39504 - RNA, 22 nt, Synthetic Construct
  source 1..22: mol_type = other RNA
cagtgcaatgttaaaagggcat

SEQ ID NO: 39505 - RNA, 22 nt, Synthetic Construct
  source 1..22: mol_type = other RNA
cagtgcaatgttaaaagggcat

SEQ ID NO: 39506 - RNA, 23 nt, Synthetic Construct
  source 1..23: mol_type = other RNA
tctcccaacccttgtaccagtgt

SEQ ID NO: 39507 - RNA, 23 nt, Synthetic Construct
  source 1..23: mol_type = other RNA
tctcccaacccttgtaccagtgt

SEQ ID NO: 39508 - RNA, 22 nt, Synthetic Construct
  source 1..22: mol_type = other RNA
cagggctggcagtgacatgggt

SEQ ID NO: 39509 - RNA, 19 nt, Synthetic Construct
  source 1..19: mol_type = other RNA
agctacattgtctgctggg

SEQ ID NO: 39510 - RNA, 19 nt, Synthetic Construct
  source 1..19: mol_type = other RNA
agctacattgtctgctggg

SEQ ID NO: 39511 - RNA, 22 nt, Synthetic Construct
  source 1..22: mol_type = other RNA
tgaggtagtaggttgtatagct

SEQ ID NO: 39512 - RNA, 22 nt, Synthetic Construct
  source 1..22: mol_type = other RNA
tgaggtagtaggttgtatagct

SEQ ID NO: 39513 - RNA, 17 nt, Synthetic Construct
  source 1..17: mol_type = other RNA
cgcgacctcagatcaga

SEQ ID NO: 39514 - RNA, 22 nt, Synthetic Construct
  source 1..22: mol_type = other RNA
tcctgtactgagctgccccgat

SEQ ID NO: 39515 - RNA, 22 nt, Synthetic Construct
  source 1..22: mol_type = other RNA
tcctgtactgagctgccccgat

SEQ ID NO: 39516 - RNA, 22 nt, Synthetic Construct
  source 1..22: mol_type = other RNA
tcctgcactgagctgccccgag

SEQ ID NO: 39517 - RNA, 22 nt, Synthetic Construct
  source 1..22: mol_type = other RNA
atggatttttggagcagggaga

SEQ ID NO: 39518 - RNA, 22 nt, Synthetic Construct
  source 1..22: mol_type = other RNA
atggatttttggagcagggaga

SEQ ID NO: 39519 - RNA, 23 nt, Synthetic Construct
  source 1..23: mol_type = other RNA
agctacattgtctgctgggtttt

SEQ ID NO: 39520 - RNA, 23 nt, Synthetic Construct
  source 1..23: mol_type = other RNA
tgaggtagtaggttgtgtggtaa

SEQ ID NO: 39521 - RNA, 21 nt, Synthetic Construct
  source 1..21: mol_type = other RNA
tcagtgcatcacagaactttg

SEQ ID NO: 39522 - RNA, 22 nt, Synthetic Construct
  source 1..22: mol_type = other RNA
tcttggagtaggtcattgggtg

SEQ ID NO: 39523 - RNA, 27 nt, Synthetic Construct
  source 1..27: mol_type = other RNA
ccccccactgttaaatttgactggctt

SEQ ID NO: 39524 - RNA, 30 nt, Synthetic Construct; identical to SEQ ID NO: 751
  source 1..30: mol_type = other RNA

SEQ ID NO: 39525 - RNA, 22 nt, Synthetic Construct
  source 1..22: mol_type = other RNA
tcctgtactgagctgccccgac

SEQ ID NO: 39526 - RNA, 22 nt, Synthetic Construct
  source 1..22: mol_type = other RNA
tcctgtactgagctgccccgac

SEQ ID NO: 39527 - RNA, 29 nt, Synthetic Construct
  source 1..29: mol_type = other RNA
cgctaaaccattcgtagacgacctgcttc

SEQ ID NO: 39528 - RNA, 29 nt, Synthetic Construct
  source 1..29: mol_type = other RNA
cgctaaaccattcgtagacgacctgcttc

SEQ ID NO: 39529 - RNA, 23 nt, Synthetic Construct
  source 1..23: mol_type = other RNA
agcaacattgtctgctgggtttc

SEQ ID NO: 39530 - RNA, 23 nt, Synthetic Construct
  source 1..23: mol_type = other RNA
agcaacattgtctgctgggtttc

SEQ ID NO: 39531 - RNA, 21 nt, Synthetic Construct
  source 1..21: mol_type = other RNA
tgaggtagtagattgtatggt

SEQ ID NO: 39532 - RNA, 21 nt, Synthetic Construct
  source 1..21: mol_type = other RNA
tgaggtagtagattgtatggt

SEQ ID NO: 39533 - RNA, 21 nt, Synthetic Construct
  source 1..21: mol_type = other RNA
tgaggtagtagcttgtgctgt

SEQ ID NO: 39534 - RNA, 27 nt, Synthetic Construct
  source 1..27: mol_type = other RNA
gcgggtgatgcgaactggagtctgagc

SEQ ID NO: 39535 - RNA, 27 nt, Synthetic Construct
  source 1..27: mol_type = other RNA
gcgggtgatgcgaactggagtctgagc

SEQ ID NO: 39536 - RNA, 23 nt, Synthetic Construct
  source 1..23: mol_type = other RNA
caacggagtcccaaaagcagctg

SEQ ID NO: 39537 - RNA, 25 nt, Synthetic Construct
  source 1..25: mol_type = other RNA
ccccccactgctaaatttgactggc

SEQ ID NO: 39538 - RNA, 25 nt, Synthetic Construct
  source 1..25: mol_type = other RNA
ccccccactgctaaatttgactggc

SEQ ID NO: 39539 - RNA, 21 nt, Synthetic Construct
  source 1..21: mol_type = other RNA
agctacatctggctactgggt

SEQ ID NO: 39540 - RNA, 21 nt, Synthetic Construct
  source 1..21: mol_type = other RNA
agctacatctggctactgggt

SEQ ID NO: 39541 - RNA, 35 nt, Synthetic Construct; identical to SEQ ID NO: 2354
  source 1..35: mol_type = other RNA

SEQ ID NO: 39542 - RNA, 21 nt, Synthetic Construct
  source 1..21: mol_type = other RNA
tgaggaagtaggttgtgtggt

SEQ ID NO: 39543 - RNA, 23 nt, Synthetic Construct
  source 1..23: mol_type = other RNA
tcctgtactgagctgacccgaga

SEQ ID NO: 39544 - RNA, 23 nt, Synthetic Construct
  source 1..23: mol_type = other RNA
tcctgtactgagctgacccgaga

SEQ ID NO: 39545 - RNA, 16 nt, Synthetic Construct
  source 1..16: mol_type = other RNA
cccgtcgctactaccg

SEQ ID NO: 39546 - RNA, 16 nt, Synthetic Construct
  source 1..16: mol_type = other RNA
cccgtcgctactaccg

SEQ ID NO: 39547 - RNA, 21 nt, Synthetic Construct
  source 1..21: mol_type = other RNA
tgaggtagtagattgtatggt

SEQ ID NO: 39548 - RNA, 21 nt, Synthetic Construct
  source 1..21: mol_type = other RNA
tgaggtagtagattgtatggt

SEQ ID NO: 39549 - RNA, 24 nt, Synthetic Construct
  source 1..24: mol_type = other RNA
agcaacattgtctgctgggtttct

SEQ ID NO: 39550 - RNA, 22 nt, Synthetic Construct
  source 1..22: mol_type = other RNA
tactagactgaagctccttgag

SEQ ID NO: 39551 - RNA, 23 nt, Synthetic Construct
  source 1..23: mol_type = other RNA
tgaggtagtaggttgtgcggttt

SEQ ID NO: 39552 - RNA, 23 nt, Synthetic Construct
  source 1..23: mol_type = other RNA
tgaggtagtaggttgtgcggttt

SEQ ID NO: 39553 - RNA, 22 nt, Synthetic Construct
  source 1..22: mol_type = other RNA
tgaggtggtagtttgtgctgtt

SEQ ID NO: 39554 - RNA, 22 nt, Synthetic Construct
  source 1..22: mol_type = other RNA
tgagatagtagtttgtgctgtt

SEQ ID NO: 39555 - RNA, 21 nt, Synthetic Construct
  source 1..21: mol_type = other RNA
tcatgtactgagctgccccga

SEQ ID NO: 39556 - RNA, 21 nt, Synthetic Construct
  source 1..21: mol_type = other RNA
tcatgtactgagctgccccga

SEQ ID NO: 39557 - RNA, 22 nt, Synthetic Construct
  source 1..22: mol_type = other RNA
tgaggtagtaagttgtgtggtt

SEQ ID NO: 39558 - RNA, 22 nt, Synthetic Construct
  source 1..22: mol_type = other RNA
tgaggtagtaagttgtgtggtt

SEQ ID NO: 39559 - RNA, 24 nt, Synthetic Construct
  source 1..24: mol_type = other RNA
gcgagagtaggacgttgccaggtt

SEQ ID NO: 39560 - RNA, 24 nt, Synthetic Construct
  source 1..24: mol_type = other RNA
gcgagagtaggacgttgccaggtt

SEQ ID NO: 39561 - RNA, 22 nt, Synthetic Construct
  source 1..22: mol_type = other RNA
tgaggtagtggtttgtgctgtt

SEQ ID NO: 39562 - RNA, 22 nt, Synthetic Construct
  source 1..22: mol_type = other RNA
tgaggtggtaggttgtgtggtt

SEQ ID NO: 39563 - RNA, 27 nt, Synthetic Construct
  source 1..27: mol_type = other RNA
ccccccactgccaaatttgactggctt

SEQ ID NO: 39564 - RNA, 27 nt, Synthetic Construct
  source 1..27: mol_type = other RNA
ccccccactgccaaatttgactggctt

SEQ ID NO: 39565 - RNA, 21 nt, Synthetic Construct
  source 1..21: mol_type = other RNA
atcgggaatgtcgtgtccgcc

SEQ ID NO: 39566 - RNA, 20 nt, Synthetic Construct
  source 1..20: mol_type = other RNA
tagcaccatttgaaatcagt

SEQ ID NO: 39567 - RNA, 20 nt, Synthetic Construct
  source 1..20: mol_type = other RNA
tagcaccatttgaaatcagt

SEQ ID NO: 39568 - RNA, 22 nt, Synthetic Construct
  source 1..22: mol_type = other RNA
tgaggtagtagtttgagctgtt

SEQ ID NO: 39569 - RNA, 22 nt, Synthetic Construct
  source 1..22: mol_type = other RNA
tgaggtagtagtttgagctgtt

SEQ ID NO: 39570 - RNA, 22 nt, Synthetic Construct
  source 1..22: mol_type = other RNA
gattgcacttgtcccggcctgt

SEQ ID NO: 39571 - RNA, 22 nt, Synthetic Construct
  source 1..22: mol_type = other RNA
gattgcacttgtcccggcctgt

SEQ ID NO: 39572 - RNA, 23 nt, Synthetic Construct
  source 1..23: mol_type = other RNA
tgaggtagtaggtcgtgtggttt

SEQ ID NO: 39573 - RNA, 22 nt, Synthetic Construct
  source 1..22: mol_type = other RNA
tcagtgcatgacagaacttggg

SEQ ID NO: 39574 - RNA, 22 nt, Synthetic Construct
  source 1..22: mol_type = other RNA
tcagtgcatgacagaacttggg

SEQ ID NO: 39575 - RNA, 22 nt, Synthetic Construct
  source 1..22: mol_type = other RNA
tgaggtagtagattgtatagct

SEQ ID NO: 39576 - RNA, 22 nt, Synthetic Construct
  source 1..22: mol_type = other RNA
tgaggtagtagattgtatagct

SEQ ID NO: 39577 - RNA, 18 nt, Synthetic Construct
  source 1..18: mol_type = other RNA
ggtagcgtggccgagcgg

SEQ ID NO: 39578 - RNA, 30 nt, Synthetic Construct; identical to SEQ ID NO: 2353
  source 1..30: mol_type = other RNA

SEQ ID NO: 39579 - RNA, 23 nt, Synthetic Construct
  source 1..23: mol_type = other RNA
cgaagtgctgttcgtgcaggtag

SEQ ID NO: 39580 - RNA, 17 nt, Synthetic Construct
  source 1..17: mol_type = other RNA
cacggcccagactccta

SEQ ID NO: 39581 - RNA, 17 nt, Synthetic Construct
  source 1..17: mol_type = other RNA
cacggcccagactccta

SEQ ID NO: 39582 - RNA, 22 nt, Synthetic Construct
  source 1..22: mol_type = other RNA
tggaatgtaaagaagtatgtac

SEQ ID NO: 39583 - RNA, 35 nt, Synthetic Construct; identical to SEQ ID NO: 2548
  source 1..35: mol_type = other RNA

SEQ ID NO: 39584 - RNA, 22 nt, Synthetic Construct
  source 1..22: mol_type = other RNA
aggaatgtaaagaagtatgtat

SEQ ID NO: 39585 - RNA, 22 nt, Synthetic Construct
  source 1..22: mol_type = other RNA
aggaatgtaaagaagtatgtat

SEQ ID NO: 39586 - RNA, 22 nt, Synthetic Construct
  source 1..22: mol_type = other RNA
tagtagcacgtaaatattggcg

SEQ ID NO: 39587 - RNA, 22 nt, Synthetic Construct
  source 1..22: mol_type = other RNA
tagtagcacgtaaatattggcg

SEQ ID NO: 39588 - RNA, 28 nt, Synthetic Construct
  source 1..28: mol_type = other RNA
tcccacatggtctagcggttaggattcc

SEQ ID NO: 39589 - RNA, 28 nt, Synthetic Construct
  source 1..28: mol_type = other RNA
tcccacatggtctagcggttaggattcc

SEQ ID NO: 39590 - RNA, 19 nt, Synthetic Construct
  source 1..19: mol_type = other RNA
cccttgtcattagttgcta

SEQ ID NO: 39591 - RNA, 19 nt, Synthetic Construct
  source 1..19: mol_type = other RNA
cccttgtcattagttgcta

SEQ ID NO: 39592 - RNA, 19 nt, Synthetic Construct
  source 1..19: mol_type = other RNA
agtcgacgtatagggtgtg

SEQ ID NO: 39593 - RNA, 21 nt, Synthetic Construct
  source 1..21: mol_type = other RNA
cgaggtagtaggttgtgtggt

SEQ ID NO: 39594 - RNA, 23 nt, Synthetic Construct
  source 1..23: mol_type = other RNA
ttccccttggggttgtaggacca

SEQ ID NO: 39595 - RNA, 16 nt, Synthetic Construct
  source 1..16: mol_type = other RNA
tgcacgaaagcgtggg

SEQ ID NO: 39596 - RNA, 16 nt, Synthetic Construct
  source 1..16: mol_type = other RNA
tgcacgaaagcgtggg

SEQ ID NO: 39597 - RNA, 23 nt, Synthetic Construct
  source 1..23: mol_type = other RNA
cgcgacctcagatcagacgtggc

SEQ ID NO: 39598 - RNA, 23 nt, Synthetic Construct
  source 1..23: mol_type = other RNA
cgcgacctcagatcagacgtggc

SEQ ID NO: 39599 - RNA, 22 nt, Synthetic Construct
  source 1..22: mol_type = other RNA
tagcagcacgtaaatactggcg

SEQ ID NO: 39600 - RNA, 22 nt, Synthetic Construct
  source 1..22: mol_type = other RNA
tagcagcacgtaaatactggcg

SEQ ID NO: 39601 - RNA, 22 nt, Synthetic Construct
  source 1..22: mol_type = other RNA
tcctgtacagagctgccccgag

SEQ ID NO: 39602 - RNA, 17 nt, Synthetic Construct
  source 1..17: mol_type = other RNA
cagaactggcgatgcgg

SEQ ID NO: 39603 - RNA, 23 nt, Synthetic Construct
  source 1..23: mol_type = other RNA
tcctgtactgagttgccccgaga

SEQ ID NO: 39604 - RNA, 23 nt, Synthetic Construct
  source 1..23: mol_type = other RNA
tcctgtactgagttgccccgaga

SEQ ID NO: 39605 - RNA, 19 nt, Synthetic Construct
  source 1..19: mol_type = other RNA
tgaggggcagagagcgaga

SEQ ID NO: 39606 - RNA, 37 nt, Synthetic Construct; identical to SEQ ID NO: 726
  source 1..37: mol_type = other RNA

SEQ ID NO: 39607 - RNA, 37 nt, Synthetic Construct; identical to SEQ ID NO: 726
  source 1..37: mol_type = other RNA

SEQ ID NO: 39608 - RNA, 22 nt, Synthetic Construct
  source 1..22: mol_type = other RNA
cattgcacttgtcccggtctga

SEQ ID NO: 39609 - RNA, 22 nt, Synthetic Construct
  source 1..22: mol_type = other RNA
cattgcacttgtcccggtctga

SEQ ID NO: 39610 - RNA, 23 nt, Synthetic Construct
  source 1..23: mol_type = other RNA
tagcttatcagactgatgttgaa

SEQ ID NO: 39611 - RNA, 22 nt, Synthetic Construct
  source 1..22: mol_type = other RNA
atgctgacatatttactagagg

SEQ ID NO: 39612 - RNA, 23 nt, Synthetic Construct
  source 1..23: mol_type = other RNA
aatgacacgatcactcccgttgt

SEQ ID NO: 39613 - RNA, 21 nt, Synthetic Construct
  source 1..21: mol_type = other RNA
agctacattgtctgctgggtt

SEQ ID NO: 39614 - RNA, 21 nt, Synthetic Construct
  source 1..21: mol_type = other RNA
agctacattgtctgctgggtt

SEQ ID NO: 39615 - RNA, 18 nt, Synthetic Construct
  source 1..18: mol_type = other RNA
ggacgttgataggctggg

SEQ ID NO: 39616 - RNA, 23 nt, Synthetic Construct
  source 1..23: mol_type = other RNA
caaggtgctgttcgtgcaggtag

SEQ ID NO: 39617 - RNA, 22 nt, Synthetic Construct
  source 1..22: mol_type = other RNA
tagctccttaagcgaatctcgc

SEQ ID NO: 39618 - RNA, 22 nt, Synthetic Construct
  source 1..22: mol_type = other RNA
tgaggtagcaggttgtatagtt

SEQ ID NO: 39619 - RNA, 22 nt, Synthetic Construct
  source 1..22: mol_type = other RNA
tgaggtagcaggttgtatagtt

SEQ ID NO: 39620 - RNA, 31 nt, Synthetic Construct
  source 1..31: mol_type = other RNA
gcattggtggttcagtggtagaattctcgcc

SEQ ID NO: 39621 - RNA, 22 nt, Synthetic Construct
  source 1..22: mol_type = other RNA
agcagcattgtacagggctatt

SEQ ID NO: 39622 - RNA, 22 nt, Synthetic Construct
  source 1..22: mol_type = other RNA
agcagcattgtacagggctatt

SEQ ID NO: 39623 - RNA, 21 nt, Synthetic Construct
  source 1..21: mol_type = other RNA
tcctgtgctgagctgccccga

SEQ ID NO: 39624 - RNA, 23 nt, Synthetic Construct
  source 1..23: mol_type = other RNA
tggaaatacgacgtacttagtgt

SEQ ID NO: 39625 - RNA, 22 nt, Synthetic Construct
  source 1..22: mol_type = other RNA
tagcagcgcgtaaatattggcg

SEQ ID NO: 39626 - RNA, 22 nt, Synthetic Construct
  source 1..22: mol_type = other RNA
tagcagcgcgtaaatattggcg

SEQ ID NO: 39627 - RNA, 22 nt, Synthetic Construct
  source 1..22: mol_type = other RNA
ttcaagtaatccaggataggca

SEQ ID NO: 39628 - RNA, 23 nt, Synthetic Construct
  source 1..23: mol_type = other RNA
tgaggcagtaggttgtgtggttt

SEQ ID NO: 39629 - RNA, 23 nt, Synthetic Construct
  source 1..23: mol_type = other RNA
tgaggcagtaggttgtgtggttt

SEQ ID NO: 39630 - RNA, 22 nt, Synthetic Construct
  source 1..22: mol_type = other RNA
tcgtaccgtgggtaataatgcg

SEQ ID NO: 39631 - RNA, 22 nt, Synthetic Construct
  source 1..22: mol_type = other RNA
tcgtaccgtgggtaataatgcg

SEQ ID NO: 39632 - RNA, 24 nt, Synthetic Construct
  source 1..24: mol_type = other RNA
tgtaaacatccccgactggaggct

SEQ ID NO: 39633 - RNA, 24 nt, Synthetic Construct
  source 1..24: mol_type = other RNA
tgtaaacatccccgactggaggct

SEQ ID NO: 39634 - RNA, 25 nt, Synthetic Construct
  source 1..25: mol_type = other RNA
ctggccctctctgcccttccgtttt

SEQ ID NO: 39635 - RNA, 22 nt, Synthetic Construct
  source 1..22: mol_type = other RNA
tggagtgtgacaatggtgtttt

SEQ ID NO: 39636 - RNA, 22 nt, Synthetic Construct
  source 1..22: mol_type = other RNA
tgaggtagtaggttgtatggtt

SEQ ID NO: 39637 - RNA, 18 nt, Synthetic Construct
  source 1..18: mol_type = other RNA
gtctgcctcagcgtcggt

SEQ ID NO: 39638 - RNA, 18 nt, Synthetic Construct
  source 1..18: mol_type = other RNA
gtctgcctcagcgtcggt

SEQ ID NO: 39639 - RNA, 20 nt, Synthetic Construct
  source 1..20: mol_type = other RNA
tgagatagtaggttgtgtgg

SEQ ID NO: 39640 - RNA, 22 nt, Synthetic Construct
  source 1..22: mol_type = other RNA
cagagttctacagtccgacgat

SEQ ID NO: 39641 - RNA, 22 nt, Synthetic Construct
  source 1..22: mol_type = other RNA
cagagttctacagtccgacgat

SEQ ID NO: 39642 - RNA, 23 nt, Synthetic Construct
  source 1..23: mol_type = other RNA
tggtaatacgacgtactcagtgt

SEQ ID NO: 39643 - RNA, 23 nt, Synthetic Construct
  source 1..23: mol_type = other RNA
tggtaatacgacgtactcagtgt

SEQ ID NO: 39644 - RNA, 26 nt, Synthetic Construct
  source 1..26: mol_type = other RNA
tccctggtggtctagtggttaggatt

SEQ ID NO: 39645 - RNA, 26 nt, Synthetic Construct
  source 1..26: mol_type = other RNA
tccctggtggtctagtggttaggatt

SEQ ID NO: 39646 - RNA, 22 nt, Synthetic Construct
  source 1..22: mol_type = other RNA
ccagtgcactacagaactttgt

SEQ ID NO: 39647 - RNA, 24 nt, Synthetic Construct
  source 1..24: mol_type = other RNA
gatgaggcgtgataacgagtctgc

SEQ ID NO: 39648 - RNA, 15 nt, Synthetic Construct
  source 1..15: mol_type = other RNA
gcaagtcgaacggta

SEQ ID NO: 39649 - RNA, 15 nt, Synthetic Construct
  source 1..15: mol_type = other RNA
gcaagtcgaacggta

SEQ ID NO: 39650 - RNA, 23 nt, Synthetic Construct
  source 1..23: mol_type = other RNA
tggtaatacgacgtactaagtgt

SEQ ID NO: 39651 - RNA, 21 nt, Synthetic Construct
  source 1..21: mol_type = other RNA
atgtcccacccccactcctgt

SEQ ID NO: 39652 - RNA, 21 nt, Synthetic Construct
  source 1..21: mol_type = other RNA
atgtcccacccccactcctgt

SEQ ID NO: 39653 - RNA, 23 nt, Synthetic Construct
  source 1..23: mol_type = other RNA
tagcaccatttgaaatcagtgtt

SEQ ID NO: 39654 - RNA, 23 nt, Synthetic Construct
  source 1..23: mol_type = other RNA
tagcaccatttgaaatcagtgtt

SEQ ID NO: 39655 - RNA, 32 nt, Synthetic Construct; identical to SEQ ID NO: 734
  source 1..32: mol_type = other RNA

SEQ ID NO: 39656 - RNA, 32 nt, Synthetic Construct; identical to SEQ ID NO: 734
  source 1..32: mol_type = other RNA

SEQ ID NO: 39657 - RNA, 17 nt, Synthetic Construct
  source 1..17: mol_type = other RNA
gcagatcttggtggtag

SEQ ID NO: 39658 - RNA, 17 nt, Synthetic Construct
  source 1..17: mol_type = other RNA
gcagatcttggtggtag

SEQ ID NO: 39659 - RNA, 40 nt, Synthetic Construct; identical to SEQ ID NO: 2684
  source 1..40: mol_type = other RNA

SEQ ID NO: 39660 - RNA, 23 nt, Synthetic Construct
  source 1..23: mol_type = other RNA
tgaggtagtaggttgtgtggctt

SEQ ID NO: 39661 - RNA, 23 nt, Synthetic Construct
  source 1..23: mol_type = other RNA
tgaggtagtaggttgtgtggctt

SEQ ID NO: 39662 - RNA, 23 nt, Synthetic Construct
  source 1..23: mol_type = other RNA
tgacctatgaattgacagccaga

SEQ ID NO: 39663 - RNA, 23 nt, Synthetic Construct
  source 1..23: mol_type = other RNA
tgacctatgaattgacagccaga

SEQ ID NO: 39664 - RNA, 26 nt, Synthetic Construct
  source 1..26: mol_type = other RNA
ttaagtgacgatagcctaggagatac

SEQ ID NO: 39665 - RNA, 23 nt, Synthetic Construct
  source 1..23: mol_type = other RNA
tggtaatatgacgtacttagtgt

SEQ ID NO: 39666 - RNA, 23 nt, Synthetic Construct
  source 1..23: mol_type = other RNA
tggtaatatgacgtacttagtgt

SEQ ID NO: 39667 - RNA, 17 nt, Synthetic Construct
  source 1..17: mol_type = other RNA
cgatctgtagctggtct

SEQ ID NO: 39668 - RNA, 17 nt, Synthetic Construct
  source 1..17: mol_type = other RNA
cgatctgtagctggtct

SEQ ID NO: 39669 - RNA, 27 nt, Synthetic Construct
  source 1..27: mol_type = other RNA
gactcttagcggtggatcactcggctc

SEQ ID NO: 39670 - RNA, 27 nt, Synthetic Construct
  source 1..27: mol_type = other RNA
gactcttagcggtggatcactcggctc

SEQ ID NO: 39671 - RNA, 21 nt, Synthetic Construct
  source 1..21: mol_type = other RNA
tgaggggcagagagcgaggct

SEQ ID NO: 39672 - RNA, 21 nt, Synthetic Construct
  source 1..21: mol_type = other RNA
ctggacttggagtcagaaggc

SEQ ID NO: 39673 - RNA, 23 nt, Synthetic Construct
  source 1..23: mol_type = other RNA
cgaagtgctgttcgtgcaggtag

SEQ ID NO: 39674 - RNA, 23 nt, Synthetic Construct
  source 1..23: mol_type = other RNA
cgaagtgctgttcgtgcaggtag

SEQ ID NO: 39675 - RNA, 25 nt, Synthetic Construct
  source 1..25: mol_type = other RNA
ttgaggatatgagatcgggacgaca

SEQ ID NO: 39676 - RNA, 18 nt, Synthetic Construct
  source 1..18: mol_type = other RNA
ggctttgaagtaaggtcg

SEQ ID NO: 39677 - RNA, 18 nt, Synthetic Construct
  source 1..18: mol_type = other RNA
ggctttgaagtaaggtcg

SEQ ID NO: 39678 - RNA, 22 nt, Synthetic Construct
  source 1..22: mol_type = other RNA
taatgcacttgtcccggcctgt

SEQ ID NO: 39679 - RNA, 22 nt, Synthetic Construct
  source 1..22: mol_type = other RNA
taatgcacttgtcccggcctgt

SEQ ID NO: 39680 - RNA, 22 nt, Synthetic Construct
  source 1..22: mol_type = other RNA
catcgggaatgtcgtgtccgcc

SEQ ID NO: 39681 - RNA, 22 nt, Synthetic Construct
  source 1..22: mol_type = other RNA
catcgggaatgtcgtgtccgcc

SEQ ID NO: 39682 - RNA, 23 nt, Synthetic Construct
  source 1..23: mol_type = other RNA
acagtagtctgcacattggttaa

SEQ ID NO: 39683 - RNA, 23 nt, Synthetic Construct
  source 1..23: mol_type = other RNA
acagtagtctgcacattggttaa

SEQ ID NO: 39684 - RNA, 22 nt, Synthetic Construct
  source 1..22: mol_type = other RNA
tcctgtactgagctgccctgag

SEQ ID NO: 39685 - RNA, 24 nt, Synthetic Construct
  source 1..24: mol_type = other RNA
tacagtagtctgcacattggttat

SEQ ID NO: 39686 - RNA, 18 nt, Synthetic Construct
  source 1..18: mol_type = other RNA
aaccgggcggaaacacca

SEQ ID NO: 39687 - RNA, 18 nt, Synthetic Construct
  source 1..18: mol_type = other RNA
aaccgggcggaaacacca

SEQ ID NO: 39688 - RNA, 43 nt, Synthetic Construct; identical to SEQ ID NO: 1204
  source 1..43: mol_type = other RNA

SEQ ID NO: 39689 - RNA, 43 nt, Synthetic Construct; identical to SEQ ID NO: 1204
  source 1..43: mol_type = other RNA

SEQ ID NO: 39690 - RNA, 24 nt, Synthetic Construct
  source 1..24: mol_type = other RNA
tgtcagtttgtcaaataccccaag

SEQ ID NO: 39691 - RNA, 24 nt, Synthetic Construct
  source 1..24: mol_type = other RNA
tgtcagtttgtcaaataccccaag

SEQ ID NO: 39692 - RNA, 21 nt, Synthetic Construct
  source 1..21: mol_type = other RNA
tccctgtcctccaggagctct

SEQ ID NO: 39693 - RNA, 21 nt, Synthetic Construct
  source 1..21: mol_type = other RNA
tccctgtcctccaggagctct

SEQ ID NO: 39694 - RNA, 22 nt, Synthetic Construct
  source 1..22: mol_type = other RNA
cagcagcacgtaaatattggcg

SEQ ID NO: 39695 - RNA, 21 nt, Synthetic Construct
  source 1..21: mol_type = other RNA
attagtgacgcgcatgaatgg

SEQ ID NO: 39696 - RNA, 21 nt, Synthetic Construct
  source 1..21: mol_type = other RNA
attagtgacgcgcatgaatgg

SEQ ID NO: 39697 - RNA, 22 nt, Synthetic Construct
  source 1..22: mol_type = other RNA
actcggcgtggcgtcggtcgtg

SEQ ID NO: 39698 - RNA, 22 nt, Synthetic Construct
  source 1..22: mol_type = other RNA
actcggcgtggcgtcggtcgtg

SEQ ID NO: 39699 - RNA, 15 nt, Synthetic Construct
  source 1..15: mol_type = other RNA
accggaggaaggtgg

SEQ ID NO: 39700 - RNA, 15 nt, Synthetic Construct
  source 1..15: mol_type = other RNA
accggaggaaggtgg

SEQ ID NO: 39701 - RNA, 22 nt, Synthetic Construct
  source 1..22: mol_type = other RNA
tccctgagaccctaacttgtga

SEQ ID NO: 39702 - RNA, 22 nt, Synthetic Construct
  source 1..22: mol_type = other RNA
tccctgagaccctaacttgtga

SEQ ID NO: 39703 - RNA, 22 nt, Synthetic Construct
  source 1..22: mol_type = other RNA
cagcagcacgtaaatattggcg

SEQ ID NO: 39704 - RNA, 23 nt, Synthetic Construct
  source 1..23: mol_type = other RNA
tgaggggcagagagcgagactct

SEQ ID NO: 39705 - RNA, 24 nt, Synthetic Construct
  source 1..24: mol_type = other RNA
tgtaaacatccccgactggaagca

SEQ ID NO: 39706 - RNA, 21 nt, Synthetic Construct
  source 1..21: mol_type = other RNA
tgaggtagtagattgcatagt

SEQ ID NO: 39707 - RNA, 21 nt, Synthetic Construct
  source 1..21: mol_type = other RNA
tgaggtagtagattgcatagt

SEQ ID NO: 39708 - RNA, 21 nt, Synthetic Construct
  source 1..21: mol_type = other RNA
tgaggtagtagattgtacagt

SEQ ID NO: 39709 - RNA, 22 nt, Synthetic Construct
  source 1..22: mol_type = other RNA
tgaggtagtagtttgtgcggtt

SEQ ID NO: 39710 - RNA, 23 nt, Synthetic Construct
  source 1..23: mol_type = other RNA
tgagcgcctcgacgacagagccg

SEQ ID NO: 39711 - RNA, 23 nt, Synthetic Construct
  source 1..23: mol_type = other RNA
tgagcgcctcgacgacagagccg

SEQ ID NO: 39712 - RNA, 22 nt, Synthetic Construct
  source 1..22: mol_type = other RNA
tagcagcacgtagatattggcg

SEQ ID NO: 39713 - RNA, 22 nt, Synthetic Construct
  source 1..22: mol_type = other RNA
tagcagcacgtagatattggcg

SEQ ID NO: 39714 - RNA, 24 nt, Synthetic Construct
  source 1..24: mol_type = other RNA
tcctgtactgagctgccccgagat

SEQ ID NO: 39715 - RNA, 24 nt, Synthetic Construct
  source 1..24: mol_type = other RNA
tcctgtactgagctgccccgagat

SEQ ID NO: 39716 - RNA, 19 nt, Synthetic Construct
  source 1..19: mol_type = other RNA
cacatgcaagtcgaacggt

SEQ ID NO: 39717 - RNA, 19 nt, Synthetic Construct
  source 1..19: mol_type = other RNA
cacatgcaagtcgaacggt

SEQ ID NO: 39718 - RNA, 21 nt, Synthetic Construct
  source 1..21: mol_type = other RNA
agagttctacagtccgacgat

SEQ ID NO: 39719 - RNA, 21 nt, Synthetic Construct
  source 1..21: mol_type = other RNA
agagttctacagtccgacgat

SEQ ID NO: 39720 - RNA, 27 nt, Synthetic Construct
  source 1..27: mol_type = other RNA
ncccccactgctaaatttgactggctt

SEQ ID NO: 39721 - RNA, 25 nt, Synthetic Construct
  source 1..25: mol_type = other RNA
tgtaaacatccccgactggaagctt

SEQ ID NO: 39722 - RNA, 21 nt, Synthetic Construct
  source 1..21: mol_type = other RNA
ggaatcgctagtaatcgcgga

SEQ ID NO: 39723 - RNA, 21 nt, Synthetic Construct
  source 1..21: mol_type = other RNA
ggaatcgctagtaatcgcgga

SEQ ID NO: 39724 - RNA, 23 nt, Synthetic Construct
  source 1..23: mol_type = other RNA
tgaggtagtaggctgtgtggttt

SEQ ID NO: 39725 - RNA, 21 nt, Synthetic Construct
  source 1..21: mol_type = other RNA
ccacctcccctgcaaacgtcc

SEQ ID NO: 39726 - RNA, 21 nt, Synthetic Construct
  source 1..21: mol_type = other RNA
ccacctcccctgcaaacgtcc

SEQ ID NO: 39727 - RNA, 23 nt, Synthetic Construct
  source 1..23: mol_type = other RNA
caaagtgctgtccgtgcaggtag

SEQ ID NO: 39728 - RNA, 23 nt, Synthetic Construct
  source 1..23: mol_type = other RNA
caaagtgccgttcgtgcaggtag

SEQ ID NO: 39729 - RNA, 22 nt, Synthetic Construct
  source 1..22: mol_type = other RNA
actcggcgtggcgtcggtcgtg

SEQ ID NO: 39730 - RNA, 22 nt, Synthetic Construct
  source 1..22: mol_type = other RNA
actcggcgtggcgtcggtcgtg

SEQ ID NO: 39731 - RNA, 21 nt, Synthetic Construct
  source 1..21: mol_type = other RNA
tgacctatgaattgacagcca

SEQ ID NO: 39732 - RNA, 21 nt, Synthetic Construct
  source 1..21: mol_type = other RNA
tgacctatgaattgacagcca

SEQ ID NO: 39733 - RNA, 29 nt, Synthetic Construct
  source 1..29: mol_type = other RNA
gcccggctagctcagtcggtagagcatgg

SEQ ID NO: 39734 - RNA, 29 nt, Synthetic Construct
  source 1..29: mol_type = other RNA
gcccggctagctcagtcggtagagcatgg

SEQ ID NO: 39735 - RNA, 22 nt, Synthetic Construct
  source 1..22: mol_type = other RNA
tgaggtagtaggttgtatagta

SEQ ID NO: 39736 - RNA, 22 nt, Synthetic Construct
  source 1..22: mol_type = other RNA
tcgaaccgtgagtaataatgcg

SEQ ID NO: 39737 - RNA, 22 nt, Synthetic Construct
  source 1..22: mol_type = other RNA
tcgaaccgtgagtaataatgcg

SEQ ID NO: 39738 - RNA, 27 nt, Synthetic Construct
  source 1..27: mol_type = other RNA
ggatttccccttggggttgtaggacca

SEQ ID NO: 39739 - RNA, 27 nt, Synthetic Construct
  source 1..27: mol_type = other RNA
ggatttccccttggggttgtaggacca

SEQ ID NO: 39740 - RNA, 21 nt, Synthetic Construct
  source 1..21: mol_type = other RNA
tgtcttgcaggccgtcatgca

SEQ ID NO: 39741 - RNA, 21 nt, Synthetic Construct
  source 1..21: mol_type = other RNA
tgaggtagtagattgtgtagt

SEQ ID NO: 39742 - RNA, 21 nt, Synthetic Construct
  source 1..21: mol_type = other RNA
tgaggtagtagattgtgtagt

SEQ ID NO: 39743 - RNA, 16 nt, Synthetic Construct
  source 1..16: mol_type = other RNA
acggcccagactccta

SEQ ID NO: 39744 - RNA, 16 nt, Synthetic Construct
  source 1..16: mol_type = other RNA
acggcccagactccta

SEQ ID NO: 39745 - RNA, 24 nt, Synthetic Construct
  source 1..24: mol_type = other RNA
gtctttgttcgattccgttgagta

SEQ ID NO: 39746 - RNA, 24 nt, Synthetic Construct
  source 1..24: mol_type = other RNA
gtctttgttcgattccgttgagta

SEQ ID NO: 39747 - RNA, 22 nt, Synthetic Construct
  source 1..22: mol_type = other RNA
tgaggtagtagattgtatagtc

SEQ ID NO: 39748 - RNA, 37 nt, Synthetic Construct; identical to SEQ ID NO: 743
  source 1..37: mol_type = other RNA

SEQ ID NO: 39749 - RNA, 37 nt, Synthetic Construct; identical to SEQ ID NO: 743
  source 1..37: mol_type = other RNA

SEQ ID NO: 39750 - RNA, 23 nt, Synthetic Construct
  source 1..23: mol_type = other RNA
tagtaatacgacgtacttagtgt

SEQ ID NO: 39751 - RNA, 22 nt, Synthetic Construct
  source 1..22: mol_type = other RNA
tattgtacttgtcccggcctgt

SEQ ID NO: 39752 - RNA, 35 nt, Synthetic Construct; identical to SEQ ID NO: 19298
  source 1..35: mol_type = other RNA

SEQ ID NO: 39753 - RNA, 35 nt, Synthetic Construct; identical to SEQ ID NO: 19298
  source 1..35: mol_type = other RNA

SEQ ID NO: 39754 - RNA, 22 nt, Synthetic Construct
  source 1..22: mol_type = other RNA
tccaagtaatccaggataggct

SEQ ID NO: 39755 - RNA, 20 nt, Synthetic Construct
  source 1..20: mol_type = other RNA
ttcaagtaatccaggatagg

SEQ ID NO: 39756 - RNA, 23 nt, Synthetic Construct
  source 1..23: mol_type = other RNA
agggctgggtcggtcgggctggg

SEQ ID NO: 39757 - RNA, 23 nt, Synthetic Construct
  source 1..23: mol_type = other RNA
agggctgggtcggtcgggctggg

SEQ ID NO: 39758 - RNA, 27 nt, Synthetic Construct
  source 1..27: mol_type = other RNA
gctttacattggactttgaacagatct

SEQ ID NO: 39759 - RNA, 27 nt, Synthetic Construct
  source 1..27: mol_type = other RNA
gctttacattggactttgaacagatct

SEQ ID NO: 39760 - RNA, 22 nt, Synthetic Construct
  source 1..22: mol_type = other RNA
gactatagaactttccccctca

SEQ ID NO: 39761 - RNA, 22 nt, Synthetic Construct
  source 1..22: mol_type = other RNA
gactatagaactttccccctca

SEQ ID NO: 39762 - RNA, 23 nt, Synthetic Construct
  source 1..23: mol_type = other RNA
tgaggggcagagggcgagacttt

SEQ ID NO: 39763 - RNA, 23 nt, Synthetic Construct
  source 1..23: mol_type = other RNA
tgaggtagtgggttgtgtggttt

SEQ ID NO: 39764 - RNA, 36 nt, Synthetic Construct; identical to SEQ ID NO: 10982
  source 1..36: mol_type = other RNA

SEQ ID NO: 39765 - RNA, 36 nt, Synthetic Construct; identical to SEQ ID NO: 10982
  source 1..36: mol_type = other RNA

SEQ ID NO: 39766 - RNA, 27 nt, Synthetic Construct
  source 1..27: mol_type = other RNA
cgactcttagcggtggatcactcggct

SEQ ID NO: 39767 - RNA, 27 nt, Synthetic Construct
  source 1..27: mol_type = other RNA
cgactcttagcggtggatcactcggct

SEQ ID NO: 39768 - RNA, 23 nt, Synthetic Construct
  source 1..23: mol_type = other RNA
tggtaatacgacgtacttggtgt

SEQ ID NO: 39769 - RNA, 20 nt, Synthetic Construct
  source 1..20: mol_type = other RNA
ctctaatgagactgccggtg

SEQ ID NO: 39770 - RNA, 20 nt, Synthetic Construct
  source 1..20: mol_type = other RNA
ctctaatgagactgccggtg

SEQ ID NO: 39771 - RNA, 22 nt, Synthetic Construct
  source 1..22: mol_type = other RNA
tagcagcacgcaaatattggcg

SEQ ID NO: 39772 - RNA, 27 nt, Synthetic Construct
  source 1..27: mol_type = other RNA
ccccccacagctaaatttgactggcta

SEQ ID NO: 39773 - RNA, 27 nt, Synthetic Construct
  source 1..27: mol_type = other RNA
ccccccacagctaaatttgactggcta

SEQ ID NO: 39774 - RNA, 32 nt, Synthetic Construct; identical to SEQ ID NO: 2318
  source 1..32: mol_type = other RNA

SEQ ID NO: 39775 - RNA, 21 nt, Synthetic Construct
  source 1..21: mol_type = other RNA
ttataaagcaatgagactgat

SEQ ID NO: 39776 - RNA, 21 nt, Synthetic Construct
  source 1..21: mol_type = other RNA
ttataaagcaatgagactgat

SEQ ID NO: 39777 - RNA, 17 nt, Synthetic Construct
  source 1..17: mol_type = other RNA
ccagtaaacggcggccg

SEQ ID NO: 39778 - RNA, 17 nt, Synthetic Construct
  source 1..17: mol_type = other RNA
ccagtaaacggcggccg

SEQ ID NO: 39779 - RNA, 23 nt, Synthetic Construct
  source 1..23: mol_type = other RNA
gtcagtttgtcaaataccccatt

SEQ ID NO: 39780 - RNA, 23 nt, Synthetic Construct
  source 1..23: mol_type = other RNA
gtcagtttgtcaaataccccatt

SEQ ID NO: 39781 - RNA, 23 nt, Synthetic Construct
  source 1..23: mol_type = other RNA
caaggtgctgttcgtgcaggtag

SEQ ID NO: 39782 - RNA, 18 nt, Synthetic Construct
  source 1..18: mol_type = other RNA
ttctacagtccgacgatc

SEQ ID NO: 39783 - RNA, 18 nt, Synthetic Construct
  source 1..18: mol_type = other RNA
ttctacagtccgacgatc

SEQ ID NO: 39784 - RNA, 18 nt, Synthetic Construct
  source 1..18: mol_type = other RNA
tcagtagctcgaggaaaa

SEQ ID NO: 39785 - RNA, 22 nt, Synthetic Construct
  source 1..22: mol_type = other RNA
cattgcgcttgtctcggtctga

SEQ ID NO: 39786 - RNA, 22 nt, Synthetic Construct
  source 1..22: mol_type = other RNA
cattgcgcttgtctcggtctga

SEQ ID NO: 39787 - RNA, 22 nt, Synthetic Construct
  source 1..22: mol_type = other RNA
accatcgaccgttgattgtacc

SEQ ID NO: 39788 - RNA, 18 nt, Synthetic Construct
  source 1..18: mol_type = other RNA
atcccacttctgacacca

SEQ ID NO: 39789 - RNA, 25 nt, Synthetic Construct
  source 1..25: mol_type = other RNA
ttgaggatatgagatcgagacgacg

SEQ ID NO: 39790 - RNA, 25 nt, Synthetic Construct
  source 1..25: mol_type = other RNA
ttgaggatatgagatcgagacgacg

SEQ ID NO: 39791 - RNA, 22 nt, Synthetic Construct
  source 1..22: mol_type = other RNA
cagtgcaatgttaaaagggcat

SEQ ID NO: 39792 - RNA, 21 nt, Synthetic Construct
  source 1..21: mol_type = other RNA
taactccttaagcgaactcgc

SEQ ID NO: 39793 - RNA, 22 nt, Synthetic Construct
  source 1..22: mol_type = other RNA
tgttgcacttgtcccggcctgt

SEQ ID NO: 39794 - RNA, 23 nt, Synthetic Construct
  source 1..23: mol_type = other RNA
tggtaacacgacgtacttagtgt

SEQ ID NO: 39795 - RNA, 23 nt, Synthetic Construct
  source 1..23: mol_type = other RNA
tggtaacacgacgtacttagtgt

SEQ ID NO: 39796 - RNA, 22 nt, Synthetic Construct
  source 1..22: mol_type = other RNA
tgaggtagtagtttgtgcagtt

SEQ ID NO: 39797 - RNA, 22 nt, Synthetic Construct
  source 1..22: mol_type = other RNA
cgaggtagtaggttgtatagtt

SEQ ID NO: 39798 - RNA, 24 nt, Synthetic Construct
  source 1..24: mol_type = other RNA
gctcactgatcgagtcgtcctgcg

SEQ ID NO: 39799 - RNA, 24 nt, Synthetic Construct
  source 1..24: mol_type = other RNA
gctcactgatcgagtcgtcctgcg

SEQ ID NO: 39800 - RNA, 21 nt, Synthetic Construct
  source 1..21: mol_type = other RNA
cagtagtctgcacattggtta

SEQ ID NO: 39801 - RNA, 21 nt, Synthetic Construct
  source 1..21: mol_type = other RNA
cagtagtctgcacattggtta

SEQ ID NO: 39802 - RNA, 23 nt, Synthetic Construct
  source 1..23: mol_type = other RNA
ttccccttggggttgtaggacca

SEQ ID NO: 39803 - RNA, 23 nt, Synthetic Construct
  source 1..23: mol_type = other RNA
ttccccttggggttgtaggacca

SEQ ID NO: 39804 - RNA, 17 nt, Synthetic Construct
  source 1..17: mol_type = other RNA
agtgacgcgcatgaatg

SEQ ID NO: 39805 - RNA, 17 nt, Synthetic Construct
  source 1..17: mol_type = other RNA
agtgacgcgcatgaatg

SEQ ID NO: 39806 - RNA, 20 nt, Synthetic Construct
  source 1..20: mol_type = other RNA
tagcaccatttgaaatcggt

SEQ ID NO: 39807 - RNA, 21 nt, Synthetic Construct
  source 1..21: mol_type = other RNA
ctagaccgaagctccttgagg

SEQ ID NO: 39808 - RNA, 17 nt, Synthetic Construct
  source 1..17: mol_type = other RNA
gcaataacaggtctgtg

SEQ ID NO: 39809 - RNA, 21 nt, Synthetic Construct
  source 1..21: mol_type = other RNA
tagcagcacgtaatattggcg

SEQ ID NO: 39810 - RNA, 21 nt, Synthetic Construct
  source 1..21: mol_type = other RNA
tagcagcacgtaatattggcg

SEQ ID NO: 39811 - RNA, 17 nt, Synthetic Construct
  source 1..17: mol_type = other RNA
tagggaacgtgagctgg

SEQ ID NO: 39812 - RNA, 17 nt, Synthetic Construct
  source 1..17: mol_type = other RNA
tagggaacgtgagctgg

SEQ ID NO: 39813 - RNA, 22 nt, Synthetic Construct
  source 1..22: mol_type = other RNA
acagtagcctgcacattggtta

SEQ ID NO: 39814 - RNA, 23 nt, Synthetic Construct
  source 1..23: mol_type = other RNA
agctacattgtctgctgggttcc

SEQ ID NO: 39815 - RNA, 23 nt, Synthetic Construct
  source 1..23: mol_type = other RNA
agctacattgtctgctgggttcc

SEQ ID NO: 39816 - RNA, 15 nt, Synthetic Construct
  source 1..15: mol_type = other RNA
tcgagtcgtcctgcg

SEQ ID NO: 39817 - RNA, 15 nt, Synthetic Construct
  source 1..15: mol_type = other RNA
tcgagtcgtcctgcg

SEQ ID NO: 39818 - RNA, 22 nt, Synthetic Construct
  source 1..22: mol_type = other RNA
tcctgtactgagctgctccgag

SEQ ID NO: 39819 - RNA, 21 nt, Synthetic Construct
  source 1..21: mol_type = other RNA
acagtagtctgcacattggtt

SEQ ID NO: 39820 - RNA, 22 nt, Synthetic Construct
  source 1..22: mol_type = other RNA
tgaggtagaagtttgtgctgtt

SEQ ID NO: 39821 - RNA, 22 nt, Synthetic Construct
  source 1..22: mol_type = other RNA
tgaggtagaagtttgtgctgtt

SEQ ID NO: 39822 - RNA, 22 nt, Synthetic Construct
  source 1..22: mol_type = other RNA
tggaacgtaaagaagtatgtat

SEQ ID NO: 39823 - RNA, 22 nt, Synthetic Construct
  source 1..22: mol_type = other RNA
tggaacgtaaagaagtatgtat

SEQ ID NO: 39824 - RNA, 25 nt, Synthetic Construct
  source 1..25: mol_type = other RNA
tgaggtagtaggttgtgtggttatt

SEQ ID NO: 39825 - RNA, 20 nt, Synthetic Construct
  source 1..20: mol_type = other RNA
ggggatgtagctcagatggt

SEQ ID NO: 39826 - RNA, 20 nt, Synthetic Construct
  source 1..20: mol_type = other RNA
ggggatgtagctcagatggt

SEQ ID NO: 39827 - RNA, 21 nt, Synthetic Construct
  source 1..21: mol_type = other RNA
cattattacttttggtacgcg

SEQ ID NO: 39828 - RNA, 21 nt, Synthetic Construct
  source 1..21: mol_type = other RNA
cattattacttttggtacgcg

SEQ ID NO: 39829 - RNA, 20 nt, Synthetic Construct
  source 1..20: mol_type = other RNA
ctggacttggagtcagaagg

SEQ ID NO: 39830 - RNA, 21 nt, Synthetic Construct
  source 1..21: mol_type = other RNA
ttataatacaacctgataagt

SEQ ID NO: 39831 - RNA, 22 nt, Synthetic Construct
  source 1..22: mol_type = other RNA
cattgcacttgtctcggtccga

SEQ ID NO: 39832 - RNA, 22 nt, Synthetic Construct
  source 1..22: mol_type = other RNA
cattgcacttgtctcggtccga

SEQ ID NO: 39833 - RNA, 21 nt, Synthetic Construct
  source 1..21: mol_type = other RNA
tgaggtaataggttgtgtggt

SEQ ID NO: 39834 - RNA, 21 nt, Synthetic Construct
  source 1..21: mol_type = other RNA
tgaggtaataggttgtgtggt

SEQ ID NO: 39835 - RNA, 22 nt, Synthetic Construct
  source 1..22: mol_type = other RNA
tagcagcacgtaaatattggca

SEQ ID NO: 39836 - RNA, 22 nt, Synthetic Construct
  source 1..22: mol_type = other RNA
tagcagcacgtaaatattggca

SEQ ID NO: 39837 - RNA, 23 nt, Synthetic Construct
  source 1..23: mol_type = other RNA
tggggtagtaggttgtgtggttt

SEQ ID NO: 39838 - RNA, 23 nt, Synthetic Construct
  source 1..23: mol_type = other RNA
tggggtagtaggttgtgtggttt

SEQ ID NO: 39839 - RNA, 25 nt, Synthetic Construct
  source 1..25: mol_type = other RNA
gcgccgctggtgtagtggtatcatg

SEQ ID NO: 39840 - RNA, 22 nt, Synthetic Construct
  source 1..22: mol_type = other RNA
tgaggaagtaggttgtgtggtt

SEQ ID NO: 39841 - RNA, 22 nt, Synthetic Construct
  source 1..22: mol_type = other RNA
tagcagcacgtacatattggcg

SEQ ID NO: 39842 - RNA, 22 nt, Synthetic Construct
  source 1..22: mol_type = other RNA
gtacagtactgtgataactgaa

SEQ ID NO: 39843 - RNA, 22 nt, Synthetic Construct
  source 1..22: mol_type = other RNA
cggatgagcaaagaaagtggtt

SEQ ID NO: 39844 - RNA, 34 nt, Synthetic Construct
  source 1..34: mol_type = other RNA
cgcgacctcagatcagacgtggcgacccgctgaa

SEQ ID NO: 39845 - RNA, 23 nt, Synthetic Construct
  source 1..23: mol_type = other RNA
caacggaatcccaaaagcagctg

SEQ ID NO: 39846 - RNA, 23 nt, Synthetic Construct
  source 1..23: mol_type = other RNA
caacggaatcccaaaagcagctg

SEQ ID NO: 39847 - RNA, 21 nt, Synthetic Construct
  source 1..21: mol_type = other RNA
tgaggggcagagagcgggact

SEQ ID NO: 39848 - RNA, 21 nt, Synthetic Construct
  source 1..21: mol_type = other RNA
tgaggggcagagagcgggact

SEQ ID NO: 39849 - RNA, 20 nt, Synthetic Construct
  source 1..20: mol_type = other RNA
tattgcactcgtcccggcct

SEQ ID NO: 39850 - RNA, 20 nt, Synthetic Construct
  source 1..20: mol_type = other RNA
tattgcactcgtcccggcct

SEQ ID NO: 39851 - RNA, 19 nt, Synthetic Construct
  source 1..19: mol_type = other RNA
caagcggtggatgatgtgg

SEQ ID NO: 39852 - RNA, 22 nt, Synthetic Construct
  source 1..22: mol_type = other RNA
tagcagcacgtaaacattggcg

SEQ ID NO: 39853 - RNA, 22 nt, Synthetic Construct
  source 1..22: mol_type = other RNA
tagcagcacgtaaacattggcg

SEQ ID NO: 39854 - RNA, 16 nt, Synthetic Construct
  source 1..16: mol_type = other RNA
gtctacggccacacca

SEQ ID NO: 39855 - RNA, 16 nt, Synthetic Construct
  source 1..16: mol_type = other RNA
gtctacggccacacca

SEQ ID NO: 39856 - RNA, 23 nt, Synthetic Construct
  source 1..23: mol_type = other RNA
atcacattgccagggatttccaa

SEQ ID NO: 39857 - RNA, 21 nt, Synthetic Construct
  source 1..21: mol_type = other RNA
aggttccggataagtaaagcc

SEQ ID NO: 39858 - RNA, 21 nt, Synthetic Construct
  source 1..21: mol_type = other RNA
aggttccggataagtaaagcc

SEQ ID NO: 39859 - RNA, 35 nt, Synthetic Construct; identical to SEQ ID NO: 25
  source 1..35: mol_type = other RNA

SEQ ID NO: 39860 - RNA, 22 nt, Synthetic Construct
  source 1..22: mol_type = other RNA
gtgcatggccgttcttagttgg

SEQ ID NO: 39861 - RNA, 32 nt, Synthetic Construct; identical to SEQ ID NO: 4509
  source 1..32: mol_type = other RNA

SEQ ID NO: 39862 - RNA, 32 nt, Synthetic Construct; identical to SEQ ID NO: 4509
  source 1..32: mol_type = other RNA

SEQ ID NO: 39863 - RNA, 31 nt, Synthetic Construct; identical to SEQ ID NO: 1225
  source 1..31: mol_type = other RNA

SEQ ID NO: 39864 - RNA, 23 nt, Synthetic Construct
  source 1..23: mol_type = other RNA
gcctgtactgagctgccccgagt

SEQ ID NO: 39865 - RNA, 30 nt, Synthetic Construct; identical to SEQ ID NO: 10539
  source 1..30: mol_type = other RNA

SEQ ID NO: 39866 - RNA, 22 nt, Synthetic Construct
  source 1..22: mol_type = other RNA
tggaatgtaaagaagtatgtaa

SEQ ID NO: 39867 - RNA, 22 nt, Synthetic Construct
  source 1..22: mol_type = other RNA
tggaatgtaaagaagtatgtaa

SEQ ID NO: 39868 - RNA, 24 nt, Synthetic Construct
  source 1..24: mol_type = other RNA
agcagcattgtacagggctatgat

SEQ ID NO: 39869 - RNA, 18 nt, Synthetic Construct
  source 1..18: mol_type = other RNA
ttgggagcgggcgggcgg

SEQ ID NO: 39870 - RNA, 18 nt, Synthetic Construct
  source 1..18: mol_type = other RNA
ttgggagcgggcgggcgg

SEQ ID NO: 39871 - RNA, 24 nt, Synthetic Construct
  source 1..24: mol_type = other RNA
tgggtaatacgacgtacttagtgt

SEQ ID NO: 39872 - RNA, 19 nt, Synthetic Construct
  source 1..19: mol_type = other RNA
tttgttcgttcggctcgcg

SEQ ID NO: 39873 - RNA, 19 nt, Synthetic Construct
  source 1..19: mol_type = other RNA
tttgttcgttcggctcgcg

SEQ ID NO: 39874 - RNA, 23 nt, Synthetic Construct
  source 1..23: mol_type = other RNA
caaagtgctgttcgtgcaggtat

SEQ ID NO: 39875 - RNA, 22 nt, Synthetic Construct
  source 1..22: mol_type = other RNA
tgaggtagtaggttgtgtggtg

SEQ ID NO: 39876 - RNA, 22 nt, Synthetic Construct
  source 1..22: mol_type = other RNA
tgaggtagtaggttgtgtggtg

SEQ ID NO: 39877 - RNA, 27 nt, Synthetic Construct
  source 1..27: mol_type = other RNA
ccccccattgctaaatttgactggctt

SEQ ID NO: 39878 - RNA, 27 nt, Synthetic Construct
  source 1..27: mol_type = other RNA
ccccccattgctaaatttgactggctt

SEQ ID NO: 39879 - RNA, 21 nt, Synthetic Construct
  source 1..21: mol_type = other RNA
gcctgtactgagctgccccga

SEQ ID NO: 39880 - RNA, 21 nt, Synthetic Construct
  source 1..21: mol_type = other RNA
gcctgtactgagctgccccga

SEQ ID NO: 39881 - RNA, 20 nt, Synthetic Construct
  source 1..20: mol_type = other RNA
tagcgaaattccttgtcggg

SEQ ID NO: 39882 - RNA, 22 nt, Synthetic Construct
  source 1..22: mol_type = other RNA
tggaatgtaaagaagtatgtgt

SEQ ID NO: 39883 - RNA, 22 nt, Synthetic Construct
  source 1..22: mol_type = other RNA
tggaatgtaaagaagtatgtgt

SEQ ID NO: 39884 - RNA, 23 nt, Synthetic Construct
  source 1..23: mol_type = other RNA
gtaaacatccttgactggaagct

SEQ ID NO: 39885 - RNA, 18 nt, Synthetic Construct
  source 1..18: mol_type = other RNA
gcagcgatggccgagtgg

SEQ ID NO: 39886 - RNA, 18 nt, Synthetic Construct
  source 1..18: mol_type = other RNA
gcagcgatggccgagtgg

SEQ ID NO: 39887 - RNA, 23 nt, Synthetic Construct
  source 1..23: mol_type = other RNA
actcggcgtggcgtcggtcgtgg

SEQ ID NO: 39888 - RNA, 23 nt, Synthetic Construct
  source 1..23: mol_type = other RNA
actcggcgtggcgtcggtcgtgg

SEQ ID NO: 39889 - RNA, 23 nt, Synthetic Construct
  source 1..23: mol_type = other RNA
tgaaacatacacgggaaacctct

SEQ ID NO: 39890 - RNA, 23 nt, Synthetic Construct
  source 1..23: mol_type = other RNA
tgaaacatacacgggaaacctct

SEQ ID NO: 39891 - RNA, 16 nt, Synthetic Construct
  source 1..16: mol_type = other RNA
atagggaacgtgagct

SEQ ID NO: 39892 - RNA, 16 nt, Synthetic Construct
  source 1..16: mol_type = other RNA
atagggaacgtgagct

SEQ ID NO: 39893 - RNA, 22 nt, Synthetic Construct
  source 1..22: mol_type = other RNA
tgaggtagtaggttgcatagtt

SEQ ID NO: 39894 - RNA, 22 nt, Synthetic Construct
  source 1..22: mol_type = other RNA
tgaggtagtagtatgtgctgtt

SEQ ID NO: 39895 - RNA, 23 nt, Synthetic Construct
  source 1..23: mol_type = other RNA
agcagcattgtacagggctataa

SEQ ID NO: 39896 - RNA, 17 nt, Synthetic Construct
  source 1..17: mol_type = other RNA
tctacagtccgacgatc

SEQ ID NO: 39897 - RNA, 17 nt, Synthetic Construct
  source 1..17: mol_type = other RNA
tctacagtccgacgatc

SEQ ID NO: 39898 - RNA, 23 nt, Synthetic Construct
  source 1..23: mol_type = other RNA
tcctgtactgagctgcaccgaga

SEQ ID NO: 39899 - RNA, 23 nt, Synthetic Construct
  source 1..23: mol_type = other RNA
tcctgtactgagctgcaccgaga

SEQ ID NO: 39900 - RNA, 21 nt, Synthetic Construct
  source 1..21: mol_type = other RNA
taactccttaagcaatctcgc

SEQ ID NO: 39901 - RNA, 21 nt, Synthetic Construct
  source 1..21: mol_type = other RNA
taactccttaagcaatctcgc

SEQ ID NO: 39902 - RNA, 24 nt, Synthetic Construct
  source 1..24: mol_type = other RNA
cgggcctggttagtacttggatgg

SEQ ID NO: 39903 - RNA, 21 nt, Synthetic Construct
  source 1..21: mol_type = other RNA
acagtagtctgcacattggtt

SEQ ID NO: 39904 - RNA, 23 nt, Synthetic Construct
  source 1..23: mol_type = other RNA
tggtaatacgacgtgcttagtgt

SEQ ID NO: 39905 - RNA, 32 nt, Synthetic Construct; identical to SEQ ID NO: 1238
  source 1..32: mol_type = other RNA

SEQ ID NO: 39906 - RNA, 22 nt, Synthetic Construct
  source 1..22: mol_type = other RNA
tcctgtaatgagctgccccgag

SEQ ID NO: 39907 - RNA, 22 nt, Synthetic Construct
  source 1..22: mol_type = other RNA
tcctgtaatgagctgccccgag

SEQ ID NO: 39908 - RNA, 20 nt, Synthetic Construct
  source 1..20: mol_type = other RNA
agaggtagtaggttgtgtgg

SEQ ID NO: 39909 - RNA, 22 nt, Synthetic Construct
  source 1..22: mol_type = other RNA
tgaggtagtaggctgtatagtt

SEQ ID NO: 39910 - RNA, 22 nt, Synthetic Construct
  source 1..22: mol_type = other RNA
tgaggtagtaggctgtatagtt

SEQ ID NO: 39911 - RNA, 35 nt, Synthetic Construct; identical to SEQ ID NO: 2567
  source 1..35: mol_type = other RNA

SEQ ID NO: 39912 - RNA, 16 nt, Synthetic Construct
  source 1..16: mol_type = other RNA
gatctgtagctggtct

SEQ ID NO: 39913 - RNA, 16 nt, Synthetic Construct
  source 1..16: mol_type = other RNA
gatctgtagctggtct

SEQ ID NO: 39914 - RNA, 18 nt, Synthetic Construct
  source 1..18: mol_type = other RNA
atcccactcctgacacca

SEQ ID NO: 39915 - RNA, 18 nt, Synthetic Construct
  source 1..18: mol_type = other RNA
atcccactcctgacacca

SEQ ID NO: 39916 - RNA, 27 nt, Synthetic Construct
  source 1..27: mol_type = other RNA
tcccccactgctaaatttgactggctt

SEQ ID NO: 39917 - RNA, 22 nt, Synthetic Construct
  source 1..22: mol_type = other RNA
cccagtgttcagactacctgtt

SEQ ID NO: 39918 - RNA, 22 nt, Synthetic Construct
  source 1..22: mol_type = other RNA
cccagtgttcagactacctgtt

SEQ ID NO: 39919 - RNA, 23 nt, Synthetic Construct
  source 1..23: mol_type = other RNA
caaagtgctgttcgcgcaggtag

SEQ ID NO: 39920 - RNA, 23 nt, Synthetic Construct
  source 1..23: mol_type = other RNA
caaagtgctgttcgcgcaggtag

SEQ ID NO: 39921 - RNA, 18 nt, Synthetic Construct
  source 1..18: mol_type = other RNA
atcacattgccagggatt

SEQ ID NO: 39922 - RNA, 18 nt, Synthetic Construct
  source 1..18: mol_type = other RNA
atcacattgccagggatt

SEQ ID NO: 39923 - RNA, 22 nt, Synthetic Construct
  source 1..22: mol_type = other RNA
tgaggtagtagtctgtgctgtt

SEQ ID NO: 39924 - RNA, 22 nt, Synthetic Construct
  source 1..22: mol_type = other RNA
tgaggtagtagtctgtgctgtt

SEQ ID NO: 39925 - RNA, 22 nt, Synthetic Construct
  source 1..22: mol_type = other RNA
tatagcacttgtcccggcctgt

SEQ ID NO: 39926 - RNA, 22 nt, Synthetic Construct
  source 1..22: mol_type = other RNA
tatagcacttgtcccggcctgt

SEQ ID NO: 39927 - RNA, 22 nt, Synthetic Construct
  source 1..22: mol_type = other RNA
tgaggtagcaggttgtatagtt

SEQ ID NO: 39928 - RNA, 22 nt, Synthetic Construct
  source 1..22: mol_type = other RNA
tgaggtagcaggttgtatagtt

SEQ ID NO: 39929 - RNA, 16 nt, Synthetic Construct
  source 1..16: mol_type = other RNA
gaaaaagtcatggagg

SEQ ID NO: 39930 - RNA, 16 nt, Synthetic Construct
  source 1..16: mol_type = other RNA
gaaaaagtcatggagg

SEQ ID NO: 39931 - RNA, 22 nt, Synthetic Construct
  source 1..22: mol_type = other RNA
tagcagcacgtaaatatcggcg

SEQ ID NO: 39932 - RNA, 20 nt, Synthetic Construct
  source 1..20: mol_type = other RNA
acagcaggacggtggccatg

SEQ ID NO: 39933 - RNA, 20 nt, Synthetic Construct
  source 1..20: mol_type = other RNA
acagcaggacggtggccatg

SEQ ID NO: 39934 - RNA, 22 nt, Synthetic Construct
  source 1..22: mol_type = other RNA
tagcagcacataatggtttgtg

SEQ ID NO: 39935 - RNA, 23 nt, Synthetic Construct
  source 1..23: mol_type = other RNA
agcaggacggtggccatggaagt

SEQ ID NO: 39936 - RNA, 23 nt, Synthetic Construct
  source 1..23: mol_type = other RNA
agcaggacggtggccatggaagt

SEQ ID NO: 39937 - RNA, 23 nt, Synthetic Construct
  source 1..23: mol_type = other RNA
caacggagtcccaaaagcagctg

SEQ ID NO: 39938 - RNA, 34 nt, Synthetic Construct; identical to SEQ ID NO: 2019
  source 1..34: mol_type = other RNA

SEQ ID NO: 39939 - RNA, 29 nt, Synthetic Construct
  source 1..29: mol_type = other RNA
ccccccccactgctaaatttgactggctt

SEQ ID NO: 39940 - RNA, 29 nt, Synthetic Construct
  source 1..29: mol_type = other RNA
ccccccccactgctaaatttgactggctt

SEQ ID NO: 39941 - RNA, 22 nt, Synthetic Construct
  source 1..22: mol_type = other RNA
aagcagcacgtaaatattggag

SEQ ID NO: 39942 - RNA, 22 nt, Synthetic Construct
  source 1..22: mol_type = other RNA
aagcagcacgtaaatattggag

SEQ ID NO: 39943 - RNA, 22 nt, Synthetic Construct
  source 1..22: mol_type = other RNA
cgcgacctcagatcagacgtgg

SEQ ID NO: 39944 - RNA, 22 nt, Synthetic Construct
  source 1..22: mol_type = other RNA
cgcgacctcagatcagacgtgg

SEQ ID NO: 39945 - RNA, 35 nt, Synthetic Construct; identical to SEQ ID NO: 737
  source 1..35: mol_type = other RNA

SEQ ID NO: 39946 - RNA, 35 nt, Synthetic Construct; identical to SEQ ID NO: 737
  source 1..35: mol_type = other RNA

SEQ ID NO: 39947 - RNA, 21 nt, Synthetic Construct
  source 1..21: mol_type = other RNA
tgacctatgaattgacagcca

SEQ ID NO: 39948 - RNA, 21 nt, Synthetic Construct
  source 1..21: mol_type = other RNA
tgacctatgaattgacagcca

SEQ ID NO: 39949 - RNA, 22 nt, Synthetic Construct
  source 1..22: mol_type = other RNA
agcagcattgtacagggctatg

SEQ ID NO: 39950 - RNA, 22 nt, Synthetic Construct
  source 1..22: mol_type = other RNA
agcagcattgtacagggctatg

SEQ ID NO: 39951 - RNA, 22 nt, Synthetic Construct
  source 1..22: mol_type = other RNA
tattgcacttgacccggcctgt

SEQ ID NO: 39952 - RNA, 23 nt, Synthetic Construct
  source 1..23: mol_type = other RNA
agcagcattgtacagggctatgc

SEQ ID NO: 39953 - RNA, 22 nt, Synthetic Construct
  source 1..22: mol_type = other RNA
tcgtaccgtgagtgataatgcg

SEQ ID NO: 39954 - RNA, 22 nt, Synthetic Construct
  source 1..22: mol_type = other RNA
tcgtaccgtgagtgataatgcg

SEQ ID NO: 39955 - RNA, 20 nt, Synthetic Construct
  source 1..20: mol_type = other RNA
ttatcagaatctccaggggt

SEQ ID NO: 39956 - RNA, 20 nt, Synthetic Construct
  source 1..20: mol_type = other RNA
ttatcagaatctccaggggt

SEQ ID NO: 39957 - RNA, 21 nt, Synthetic Construct
  source 1..21: mol_type = other RNA
tccctgtcctccaggagctct

SEQ ID NO: 39958 - RNA, 21 nt, Synthetic Construct
  source 1..21: mol_type = other RNA
tccctgtcctccaggagctct

SEQ ID NO: 39959 - RNA, 22 nt, Synthetic Construct
  source 1..22: mol_type = other RNA
taaatccttaagcgaatctcgc

SEQ ID NO: 39960 - RNA, 22 nt, Synthetic Construct
  source 1..22: mol_type = other RNA
taaatccttaagcgaatctcgc

SEQ ID NO: 39961 - RNA, 23 nt, Synthetic Construct
  source 1..23: mol_type = other RNA
ttcaagtaatccaggataggcta

SEQ ID NO: 39962 - RNA, 23 nt, Synthetic Construct
  source 1..23: mol_type = other RNA
ttcaagtaatccaggataggcta

SEQ ID NO: 39963 - RNA, 22 nt, Synthetic Construct
  source 1..22: mol_type = other RNA
tgaggtagtaggttgtgtagtt

SEQ ID NO: 39964 - RNA, 23 nt, Synthetic Construct
  source 1..23: mol_type = other RNA
ggctacattgtctgctgggtttc

SEQ ID NO: 39965 - RNA, 23 nt, Synthetic Construct
  source 1..23: mol_type = other RNA
ggctacattgtctgctgggtttc

SEQ ID NO: 39966 - RNA, 23 nt, Synthetic Construct
  source 1..23: mol_type = other RNA
tgtcagtttgtcaaatacaccaa

SEQ ID NO: 39967 - RNA, 23 nt, Synthetic Construct
  source 1..23: mol_type = other RNA
tgtcagtttgtcaaatacaccaa

SEQ ID NO: 39968 - RNA, 26 nt, Synthetic Construct
  source 1..26: mol_type = other RNA
gtgtgaaagtaggtcatcgtcaggct

SEQ ID NO: 39969 - RNA, 26 nt, Synthetic Construct
  source 1..26: mol_type = other RNA
gtgtgaaagtaggtcatcgtcaggct

SEQ ID NO: 39970 - RNA, 21 nt, Synthetic Construct
  source 1..21: mol_type = other RNA
gtcagtttgtcaaatacccca

SEQ ID NO: 39971 - RNA, 21 nt, Synthetic Construct
  source 1..21: mol_type = other RNA
gtcagtttgtcaaatacccca

SEQ ID NO: 39972 - RNA, 23 nt, Synthetic Construct
  source 1..23: mol_type = other RNA
caaagtgctgttcgtgcaggcag

SEQ ID NO: 39973 - RNA, 22 nt, Synthetic Construct
  source 1..22: mol_type = other RNA
tggaatgtgaagaagtatgtat

SEQ ID NO: 39974 - RNA, 20 nt, Synthetic Construct
  source 1..20: mol_type = other RNA
tgaggtagtaggttgtgtga

SEQ ID NO: 39975 - RNA, 34 nt, Synthetic Construct; identical to SEQ ID NO: 803
  source 1..34: mol_type = other RNA

SEQ ID NO: 39976 - RNA, 22 nt, Synthetic Construct
  source 1..22: mol_type = other RNA
tagcagcacgtacatattggcg

SEQ ID NO: 39977 - RNA, 22 nt, Synthetic Construct
  source 1..22: mol_type = other RNA
tagcagcacgtacatattggcg

SEQ ID NO: 39978 - RNA, 17 nt, Synthetic Construct
  source 1..17: mol_type = other RNA
cttgaccgctctgacca

SEQ ID NO: 39979 - RNA, 21 nt, Synthetic Construct
  source 1..21: mol_type = other RNA
tacctggttgatcctgccagt

SEQ ID NO: 39980 - RNA, 22 nt, Synthetic Construct
  source 1..22: mol_type = other RNA
tgtagtgtttcctactctatgg

SEQ ID NO: 39981 - RNA, 22 nt, Synthetic Construct
  source 1..22: mol_type = other RNA
tgtagtgtttcctactctatgg

SEQ ID NO: 39982 - RNA, 21 nt, Synthetic Construct
  source 1..21: mol_type = other RNA
tgaggtagtagtttgtgctgt

SEQ ID NO: 39983 - RNA, 22 nt, Synthetic Construct
  source 1..22: mol_type = other RNA
aagctgccagttgaagaactgt

SEQ ID NO: 39984 - RNA, 22 nt, Synthetic Construct
  source 1..22: mol_type = other RNA
aagctgccagttgaagaactgt

SEQ ID NO: 39985 - RNA, 22 nt, Synthetic Construct
  source 1..22: mol_type = other RNA
tcccactgcttcacttgactag

SEQ ID NO: 39986 - RNA, 22 nt, Synthetic Construct
  source 1..22: mol_type = other RNA
tcccactgcttcacttgactag

SEQ ID NO: 39987 - RNA, 22 nt, Synthetic Construct
  source 1..22: mol_type = other RNA
tgaggtagtaggttgtgtggta

SEQ ID NO: 39988 - RNA, 22 nt, Synthetic Construct
  source 1..22: mol_type = other RNA
ctatacgacctgctgcctttct

SEQ ID NO: 39989 - RNA, 22 nt, Synthetic Construct
  source 1..22: mol_type = other RNA
ctatacgacctgctgcctttct

SEQ ID NO: 39990 - RNA, 22 nt, Synthetic Construct
  source 1..22: mol_type = other RNA
tgaagtagtaggttgtatagtt

SEQ ID NO: 39991 - RNA, 22 nt, Synthetic Construct
  source 1..22: mol_type = other RNA
tattgcacttgccccggcctgt

SEQ ID NO: 39992 - RNA, 22 nt, Synthetic Construct
  source 1..22: mol_type = other RNA
tattgcacttgtcccagcctgt

SEQ ID NO: 39993 - RNA, 34 nt, Synthetic Construct; identical to SEQ ID NO: 1111
  source 1..34: mol_type = other RNA

SEQ ID NO: 39994 - RNA, 34 nt, Synthetic Construct; identical to SEQ ID NO: 1111
  source 1..34: mol_type = other RNA

SEQ ID NO: 39995 - RNA, 21 nt, Synthetic Construct
  source 1..21: mol_type = other RNA
tcagtgcatcacagaactttg

SEQ ID NO: 39996 - RNA, 21 nt, Synthetic Construct
  source 1..21: mol_type = other RNA
tcagtgcatcacagaactttg

SEQ ID NO: 39997 - RNA, 34 nt, Synthetic Construct; identical to SEQ ID NO: 6594
  source 1..34: mol_type = other RNA

SEQ ID NO: 39998 - RNA, 22 nt, Synthetic Construct
  source 1..22: mol_type = other RNA
aaaagctgggttgagagggcgt

SEQ ID NO: 39999 - RNA, 22 nt, Synthetic Construct
  source 1..22: mol_type = other RNA
aaaagctgggttgagagggcgt

SEQ ID NO: 40000 - RNA, 24 nt, Synthetic Construct
  source 1..24: mol_type = other RNA
gactatagaactttccccctcatt

SEQ ID NO: 40001 - RNA, 24 nt, Synthetic Construct
  source 1..24: mol_type = other RNA
gactatagaactttccccctcatt

SEQ ID NO: 40002 - RNA, 20 nt, Synthetic Construct
  source 1..20: mol_type = other RNA
ggggatgtagctcagatggt

SEQ ID NO: 40003 - RNA, 20 nt, Synthetic Construct
  source 1..20: mol_type = other RNA
ggggatgtagctcagatggt

SEQ ID NO: 40004 - RNA, 17 nt, Synthetic Construct
  source 1..17: mol_type = other RNA
gggtctgtagctcagtc

SEQ ID NO: 40005 - RNA, 25 nt, Synthetic Construct
  source 1..25: mol_type = other RNA
agctacatctggctactgggtctct

SEQ ID NO: 40006 - RNA, 25 nt, Synthetic Construct
  source 1..25: mol_type = other RNA
agctacatctggctactgggtctct

SEQ ID NO: 40007 - RNA, 23 nt, Synthetic Construct
  source 1..23: mol_type = other RNA
caaagtgctgttcgtgcgggtag

SEQ ID NO: 40008 - RNA, 22 nt, Synthetic Construct
  source 1..22: mol_type = other RNA
tggaatgtaaagaagtatgtgt

SEQ ID NO: 40009 - RNA, 22 nt, Synthetic Construct
  source 1..22: mol_type = other RNA
tagcagcacgtaaatgttggcg

SEQ ID NO: 40010 - RNA, 22 nt, Synthetic Construct
  source 1..22: mol_type = other RNA
gggagtgtgacaatggtgtttg

SEQ ID NO: 40011 - RNA, 22 nt, Synthetic Construct
  source 1..22: mol_type = other RNA
gggagtgtgacaatggtgtttg

SEQ ID NO: 40012 - RNA, 22 nt, Synthetic Construct
  source 1..22: mol_type = other RNA
tcccgtactgagctgccccgag

SEQ ID NO: 40013 - RNA, 22 nt, Synthetic Construct
  source 1..22: mol_type = other RNA
cattgcacttgtcccggtctga

SEQ ID NO: 40014 - RNA, 22 nt, Synthetic Construct
  source 1..22: mol_type = other RNA
cattgcacttgtcccggtctga

SEQ ID NO: 40015 - RNA, 21 nt, Synthetic Construct
  source 1..21: mol_type = other RNA
tgaggtagtaggtcgtgtggt

SEQ ID NO: 40016 - RNA, 25 nt, Synthetic Construct
  source 1..25: mol_type = other RNA
ttgaggatatgaggtcgagacgaca

SEQ ID NO: 40017 - RNA, 25 nt, Synthetic Construct
  source 1..25: mol_type = other RNA
ttgaggatatgaggtcgagacgaca

SEQ ID NO: 40018 - RNA, 16 nt, Synthetic Construct
  source 1..16: mol_type = other RNA
gtctacagccatacca

SEQ ID NO: 40019 - RNA, 16 nt, Synthetic Construct
  source 1..16: mol_type = other RNA
gtctacagccatacca

SEQ ID NO: 40020 - RNA, 21 nt, Synthetic Construct
  source 1..21: mol_type = other RNA
taactccttaagcgaatctcg

SEQ ID NO: 40021 - RNA, 21 nt, Synthetic Construct
  source 1..21: mol_type = other RNA
taactccttaagcgaatctcg

SEQ ID NO: 40022 - RNA, 24 nt, Synthetic Construct
  source 1..24: mol_type = other RNA
tgaggtagtagattgtatagtttt

SEQ ID NO: 40023 - RNA, 33 nt, Synthetic Construct; identical to SEQ ID NO: 2479
  source 1..33: mol_type = other RNA

SEQ ID NO: 40024 - RNA, 33 nt, Synthetic Construct; identical to SEQ ID NO: 2479
  source 1..33: mol_type = other RNA

SEQ ID NO: 40025 - RNA, 22 nt, Synthetic Construct
  source 1..22: mol_type = other RNA
tcctgtaatgagctgccccgag

SEQ ID NO: 40026 - RNA, 22 nt, Synthetic Construct
  source 1..22: mol_type = other RNA
tcctgtaatgagctgccccgag

SEQ ID NO: 40027 - RNA, 24 nt, Synthetic Construct
  source 1..24: mol_type = other RNA
gtctttgttcgattccgttgagta

SEQ ID NO: 40028 - RNA, 24 nt, Synthetic Construct
  source 1..24: mol_type = other RNA
gtctttgttcgattccgttgagta

SEQ ID NO: 40029 - RNA, 22 nt, Synthetic Construct
  source 1..22: mol_type = other RNA
tgaggtaggaggttgtatagtt

SEQ ID NO: 40030 - RNA, 25 nt, Synthetic Construct
  source 1..25: mol_type = other RNA
ctgaggatatgagatcgagacgaca

SEQ ID NO: 40031 - RNA, 25 nt, Synthetic Construct
  source 1..25: mol_type = other RNA
ctgaggatatgagatcgagacgaca

SEQ ID NO: 40032 - RNA, 21 nt, Synthetic Construct
  source 1..21: mol_type = other RNA
cagcattgtacagggctatga

SEQ ID NO: 40033 - RNA, 21 nt, Synthetic Construct
  source 1..21: mol_type = other RNA
cagcattgtacagggctatga

SEQ ID NO: 40034 - RNA, 20 nt, Synthetic Construct
  source 1..20: mol_type = other RNA
acctgtactgagctgccccg

SEQ ID NO: 40035 - RNA, 20 nt, Synthetic Construct
  source 1..20: mol_type = other RNA
acctgtactgagctgccccg

SEQ ID NO: 40036 - RNA, 21 nt, Synthetic Construct
  source 1..21: mol_type = other RNA
aacccgtagatccgaacttgt

SEQ ID NO: 40037 - RNA, 25 nt, Synthetic Construct
  source 1..25: mol_type = other RNA
ccccccactgctaaatttgactggc

SEQ ID NO: 40038 - RNA, 25 nt, Synthetic Construct
  source 1..25: mol_type = other RNA
ccccccactgctaaatttgactggc

SEQ ID NO: 40039 - RNA, 21 nt, Synthetic Construct
  source 1..21: mol_type = other RNA
tcctgtacagagctgccccga

SEQ ID NO: 40040 - RNA, 21 nt, Synthetic Construct
  source 1..21: mol_type = other RNA
tcctgtacagagctgccccga

SEQ ID NO: 40041 - RNA, 17 nt, Synthetic Construct
  source 1..17: mol_type = other RNA
cgaaattccttgtcggg

SEQ ID NO: 40042 - RNA, 17 nt, Synthetic Construct
  source 1..17: mol_type = other RNA
cgaaattccttgtcggg

SEQ ID NO: 40043 - RNA, 22 nt, Synthetic Construct
  source 1..22: mol_type = other RNA
tcctgtactgagctgccccgaa

SEQ ID NO: 40044 - RNA, 22 nt, Synthetic Construct
  source 1..22: mol_type = other RNA
tcctgtactgagctgccccgaa

SEQ ID NO: 40045 - RNA, 23 nt, Synthetic Construct
  source 1..23: mol_type = other RNA
tcaagagcaataacgaaaaatgt

SEQ ID NO: 40046 - RNA, 23 nt, Synthetic Construct
  source 1..23: mol_type = other RNA
tcaagagcaataacgaaaaatgt

SEQ ID NO: 40047 - RNA, 22 nt, Synthetic Construct
  source 1..22: mol_type = other RNA
tcacagtgaaccggtctcttta

SEQ ID NO: 40048 - RNA, 41 nt, Synthetic Construct; identical to SEQ ID NO: 1667
  source 1..41: mol_type = other RNA

SEQ ID NO: 40049 - RNA, 41 nt, Synthetic Construct; identical to SEQ ID NO: 1667
  source 1..41: mol_type = other RNA

SEQ ID NO: 40050 - RNA, 23 nt, Synthetic Construct
  source 1..23: mol_type = other RNA
tgaggtagtaggctgtgtggttt

SEQ ID NO: 40051 - RNA, 22 nt, Synthetic Construct
  source 1..22: mol_type = other RNA
taggtagtttcctgttgttggg

SEQ ID NO: 40052 - RNA, 22 nt, Synthetic Construct
  source 1..22: mol_type = other RNA
taggtagtttcctgttgttggg

SEQ ID NO: 40053 - RNA, 19 nt, Synthetic Construct
  source 1..19: mol_type = other RNA
tagcaccatctgaaatcgg

SEQ ID NO: 40054 - RNA, 15 nt, Synthetic Construct
  source 1..15: mol_type = other RNA
cggcccagactccta

SEQ ID NO: 40055 - RNA, 22 nt, Synthetic Construct
  source 1..22: mol_type = other RNA
tgaggcagtagtttgtgctgtt

SEQ ID NO: 40056 - RNA, 22 nt, Synthetic Construct
  source 1..22: mol_type = other RNA
tgaggcagtagtttgtgctgtt

SEQ ID NO: 40057 - RNA, 24 nt, Synthetic Construct
  source 1..24: mol_type = other RNA
tagcttatcagactgatgttgact

SEQ ID NO: 40058 - RNA, 24 nt, Synthetic Construct
  source 1..24: mol_type = other RNA
tagcttatcagactgatgttgact

SEQ ID NO: 40059 - RNA, 21 nt, Synthetic Construct
  source 1..21: mol_type = other RNA
tagcaccatctgaaatcggtt

SEQ ID NO: 40060 - RNA, 32 nt, Synthetic Construct; identical to SEQ ID NO: 14097
  source 1..32: mol_type = other RNA

SEQ ID NO: 40061 - RNA, 34 nt, Synthetic Construct; identical to SEQ ID NO: 16999
  source 1..34: mol_type = other RNA

SEQ ID NO: 40062 - RNA, 34 nt, Synthetic Construct; identical to SEQ ID NO: 16999
  source 1..34: mol_type = other RNA

SEQ ID NO: 40063 - RNA, 24 nt, Synthetic Construct
  source 1..24: mol_type = other RNA
acagtagtctgcacattggttatt

SEQ ID NO: 40064 - RNA, 24 nt, Synthetic Construct
  source 1..24: mol_type = other RNA
acagtagtctgcacattggttatt

SEQ ID NO: 40065 - RNA, 23 nt, Synthetic Construct
  source 1..23: mol_type = other RNA
cgaggtagtaggttgtgtggttt

SEQ ID NO: 40066 - RNA, 23 nt, Synthetic Construct
  source 1..23: mol_type = other RNA
cgaggtagtaggttgtgtggttt

SEQ ID NO: 40067 - RNA, 23 nt, Synthetic Construct
  source 1..23: mol_type = other RNA
tgagcgcctcgacgacagagccg

SEQ ID NO: 40068 - RNA, 25 nt, Synthetic Construct
  source 1..25: mol_type = other RNA
tgaggtagtaggttgtgtggttttt

SEQ ID NO: 40069 - RNA, 25 nt, Synthetic Construct
  source 1..25: mol_type = other RNA
tgaggtagtaggttgtgtggttttt

SEQ ID NO: 40070 - RNA, 22 nt, Synthetic Construct
  source 1..22: mol_type = other RNA
atataatacaacctgctaagtg

SEQ ID NO: 40071 - RNA, 22 nt, Synthetic Construct
  source 1..22: mol_type = other RNA
atataatacaacctgctaagtg

SEQ ID NO: 40072 - RNA, 22 nt, Synthetic Construct
  source 1..22: mol_type = other RNA
tagcagtacgtaaatattggcg

SEQ ID NO: 40073 - RNA, 21 nt, Synthetic Construct
  source 1..21: mol_type = other RNA
tgaggtagtaggttatgtggt

SEQ ID NO: 40074 - RNA, 24 nt, Synthetic Construct
  source 1..24: mol_type = other RNA
tgtaaacacccccgactggaagct

SEQ ID NO: 40075 - RNA, 24 nt, Synthetic Construct
  source 1..24: mol_type = other RNA
tgtaaacacccccgactggaagct

SEQ ID NO: 40076 - RNA, 22 nt, Synthetic Construct
  source 1..22: mol_type = other RNA
tagcagcacgtaaaaattggcg

SEQ ID NO: 40077 - RNA, 22 nt, Synthetic Construct
  source 1..22: mol_type = other RNA
tagcagcacgtaaaaattggcg

SEQ ID NO: 40078 - RNA, 20 nt, Synthetic Construct
  source 1..20: mol_type = other RNA
tgaggtaggaggttgtatag

SEQ ID NO: 40079 - RNA, 20 nt, Synthetic Construct
  source 1..20: mol_type = other RNA
tgaggtaggaggttgtatag

SEQ ID NO: 40080 - RNA, 22 nt, Synthetic Construct
  source 1..22: mol_type = other RNA
tagcagcacgtaaatgttggcg

SEQ ID NO: 40081 - RNA, 22 nt, Synthetic Construct
  source 1..22: mol_type = other RNA
tggcagtgtcttagctggttgt

SEQ ID NO: 40082 - RNA, 22 nt, Synthetic Construct
  source 1..22: mol_type = other RNA
tggcagtgtcttagctggttgt

SEQ ID NO: 40083 - RNA, 21 nt, Synthetic Construct
  source 1..21: mol_type = other RNA
tggagtgtggcaatggtgttt

SEQ ID NO: 40084 - RNA, 21 nt, Synthetic Construct
  source 1..21: mol_type = other RNA
tggagtgtggcaatggtgttt

SEQ ID NO: 40085 - RNA, 18 nt, Synthetic Construct
  source 1..18: mol_type = other RNA
gttctacagtccgacgat

SEQ ID NO: 40086 - RNA, 18 nt, Synthetic Construct
  source 1..18: mol_type = other RNA
gttctacagtccgacgat

SEQ ID NO: 40087 - RNA, 23 nt, Synthetic Construct
  source 1..23: mol_type = other RNA
tgaggtagtaggttgtgtggtaa

SEQ ID NO: 40088 - RNA, 23 nt, Synthetic Construct
  source 1..23: mol_type = other RNA
tgaggtagtaggttgtgtggtaa

SEQ ID NO: 40089 - RNA, 24 nt, Synthetic Construct
  source 1..24: mol_type = other RNA
caacggaatcccaaaagcagctgc

SEQ ID NO: 40090 - RNA, 21 nt, Synthetic Construct
  source 1..21: mol_type = other RNA
ctatacgacctgctgcctttc

SEQ ID NO: 40091 - RNA, 21 nt, Synthetic Construct
  source 1..21: mol_type = other RNA
ctatacgacctgctgcctttc

SEQ ID NO: 40092 - RNA, 18 nt, Synthetic Construct
  source 1..18: mol_type = other RNA
gcgccgatgatagtgcgg

SEQ ID NO: 40093 - RNA, 18 nt, Synthetic Construct
  source 1..18: mol_type = other RNA
gcgccgatgatagtgcgg

SEQ ID NO: 40094 - RNA, 23 nt, Synthetic Construct
  source 1..23: mol_type = other RNA
tgaggggtagagagcgagacttt

SEQ ID NO: 40095 - RNA, 23 nt, Synthetic Construct
  source 1..23: mol_type = other RNA
tgaggggcagagagagagacttt

SEQ ID NO: 40096 - RNA, 23 nt, Synthetic Construct
  source 1..23: mol_type = other RNA
tgaggggcagagagagagacttt

SEQ ID NO: 40097 - RNA, 16 nt, Synthetic Construct
  source 1..16: mol_type = other RNA
gatttgggagtgctcg

SEQ ID NO: 40098 - RNA, 22 nt, Synthetic Construct
  source 1..22: mol_type = other RNA
aaaagctgggttgagagggcgt

SEQ ID NO: 40099 - RNA, 20 nt, Synthetic Construct
  source 1..20: mol_type = other RNA
agttctacagtccgacgatc

SEQ ID NO: 40100 - RNA, 20 nt, Synthetic Construct
  source 1..20: mol_type = other RNA
agttctacagtccgacgatc

SEQ ID NO: 40101 - RNA, 16 nt, Synthetic Construct
  source 1..16: mol_type = other RNA
ccctttgtacacaccg

SEQ ID NO: 40102 - RNA, 16 nt, Synthetic Construct
  source 1..16: mol_type = other RNA
ccctttgtacacaccg

SEQ ID NO: 40103 - RNA, 19 nt, Synthetic Construct
  source 1..19: mol_type = other RNA
tctaatgagactgccggtg

SEQ ID NO: 40104 - RNA, 22 nt, Synthetic Construct
  source 1..22: mol_type = other RNA
tatcagcacgtaaatattggcg

SEQ ID NO: 40105 - RNA, 22 nt, Synthetic Construct
  source 1..22: mol_type = other RNA
tatcagcacgtaaatattggcg

SEQ ID NO: 40106 - RNA, 21 nt, Synthetic Construct
  source 1..21: mol_type = other RNA
ttcacagtggctaagttctga

SEQ ID NO: 40107 - RNA, 21 nt, Synthetic Construct
  source 1..21: mol_type = other RNA
ttcacagtggctaagttctga

SEQ ID NO: 40108 - RNA, 22 nt, Synthetic Construct
  source 1..22: mol_type = other RNA
tggcagcacgtaaatattggcg

SEQ ID NO: 40109 - RNA, 21 nt, Synthetic Construct
  source 1..21: mol_type = other RNA
cccttggggttgtaggaccac

SEQ ID NO: 40110 - RNA, 21 nt, Synthetic Construct
  source 1..21: mol_type = other RNA
cccttggggttgtaggaccac

SEQ ID NO: 40111 - RNA, 21 nt, Synthetic Construct
  source 1..21: mol_type = other RNA
gcctgtactgagctgccccga

SEQ ID NO: 40112 - RNA, 21 nt, Synthetic Construct
  source 1..21: mol_type = other RNA
gcctgtactgagctgccccga

SEQ ID NO: 40113 - RNA, 27 nt, Synthetic Construct
  source 1..27: mol_type = other RNA
atagtctttgttcgattccgttgagta

SEQ ID NO: 40114 - RNA, 27 nt, Synthetic Construct
  source 1..27: mol_type = other RNA
atagtctttgttcgattccgttgagta

SEQ ID NO: 40115 - RNA, 18 nt, Synthetic Construct
  source 1..18: mol_type = other RNA
accaaggggtcgtgggtt

SEQ ID NO: 40116 - RNA, 18 nt, Synthetic Construct
  source 1..18: mol_type = other RNA
accaaggggtcgtgggtt

SEQ ID NO: 40117 - RNA, 19 nt, Synthetic Construct
  source 1..19: mol_type = other RNA
cacatgcaagtcgaacggt

SEQ ID NO: 40118 - RNA, 19 nt, Synthetic Construct
  source 1..19: mol_type = other RNA
cacatgcaagtcgaacggt

SEQ ID NO: 40119 - RNA, 27 nt, Synthetic Construct
  source 1..27: mol_type = other RNA
cttctcactactgcacttgactagtct

SEQ ID NO: 40120 - RNA, 21 nt, Synthetic Construct
  source 1..21: mol_type = other RNA
tcctgtactgagctgccctga

SEQ ID NO: 40121 - RNA, 21 nt, Synthetic Construct
  source 1..21: mol_type = other RNA
tgaggcagtagattgtatagt

SEQ ID NO: 40122 - RNA, 15 nt, Synthetic Construct
  source 1..15: mol_type = other RNA
cagagttctacagtc

SEQ ID NO: 40123 - RNA, 15 nt, Synthetic Construct
  source 1..15: mol_type = other RNA
cagagttctacagtc

SEQ ID NO: 40124 - RNA, 22 nt, Synthetic Construct
  source 1..22: mol_type = other RNA
tgaggtggtagattgtatagtt

SEQ ID NO: 40125 - RNA, 22 nt, Synthetic Construct
  source 1..22: mol_type = other RNA
tgaggtggtagattgtatagtt

SEQ ID NO: 40126 - RNA, 23 nt, Synthetic Construct
  source 1..23: mol_type = other RNA
tctttggttatctagctgtatgt

SEQ ID NO: 40127 - RNA, 23 nt, Synthetic Construct
  source 1..23: mol_type = other RNA
naaagtgctgttcgtgcaggtag

SEQ ID NO: 40128 - RNA, 23 nt, Synthetic Construct
  source 1..23: mol_type = other RNA
naaagtgctgttcgtgcaggtag

SEQ ID NO: 40129 - RNA, 16 nt, Synthetic Construct
  source 1..16: mol_type = other RNA
gagctgtggatagggg

SEQ ID NO: 40130 - RNA, 16 nt, Synthetic Construct
  source 1..16: mol_type = other RNA
gagctgtggatagggg

SEQ ID NO: 40131 - RNA, 22 nt, Synthetic Construct
  source 1..22: mol_type = other RNA
cattgcacttgtcccggtctga

SEQ ID NO: 40132 - RNA, 22 nt, Synthetic Construct
  source 1..22: mol_type = other RNA
cattgcacttgtcccggtctga

SEQ ID NO: 40133 - RNA, 23 nt, Synthetic Construct
  source 1..23: mol_type = other RNA
tggtaatacgacgcacttagtgt

SEQ ID NO: 40134 - RNA, 23 nt, Synthetic Construct
  source 1..23: mol_type = other RNA
tggtaatacgacgcacttagtgt

SEQ ID NO: 40135 - RNA, 23 nt, Synthetic Construct
  source 1..23: mol_type = other RNA
tgtgcaaatccatgcaaaactga

SEQ ID NO: 40136 - RNA, 21 nt, Synthetic Construct
  source 1..21: mol_type = other RNA
tcctgtactgagctgccccgt

SEQ ID NO: 40137 - RNA, 21 nt, Synthetic Construct
  source 1..21: mol_type = other RNA
tcctgtactgagctgccccgt

SEQ ID NO: 40138 - RNA, 21 nt, Synthetic Construct
  source 1..21: mol_type = other RNA
tgtcagtttgtcaaataccca

SEQ ID NO: 40139 - RNA, 23 nt, Synthetic Construct
  source 1..23: mol_type = other RNA
tgagaactgaattccataggctg

SEQ ID NO: 40140 - RNA, 23 nt, Synthetic Construct
  source 1..23: mol_type = other RNA
tgagaactgaattccataggctg

SEQ ID NO: 40141 - RNA, 22 nt, Synthetic Construct
  source 1..22: mol_type = other RNA
tgaggtagtaggttgtataatt

SEQ ID NO: 40142 - RNA, 22 nt, Synthetic Construct
  source 1..22: mol_type = other RNA
tgaggtagtaggttgtataatt

SEQ ID NO: 40143 - RNA, 22 nt, Synthetic Construct
  source 1..22: mol_type = other RNA
tgaagtagtaggttgtatagtt

SEQ ID NO: 40144 - RNA, 22 nt, Synthetic Construct
  source 1..22: mol_type = other RNA
tgaagtagtaggttgtatagtt

SEQ ID NO: 40145 - RNA, 21 nt, Synthetic Construct
  source 1..21: mol_type = other RNA
taactcctaagcgaatctcgc

SEQ ID NO: 40146 - RNA, 22 nt, Synthetic Construct
  source 1..22: mol_type = other RNA
tatcagcacgtaaatattggcg

SEQ ID NO: 40147 - RNA, 19 nt, Synthetic Construct
  source 1..19: mol_type = other RNA
aacagtcaggatgttggct

SEQ ID NO: 40148 - RNA, 19 nt, Synthetic Construct
  source 1..19: mol_type = other RNA
aacagtcaggatgttggct

SEQ ID NO: 40149 - RNA, 21 nt, Synthetic Construct
  source 1..21: mol_type = other RNA
ttcaagtaattcaggataggt

SEQ ID NO: 40150 - RNA, 21 nt, Synthetic Construct
  source 1..21: mol_type = other RNA
ttcaagtaattcaggataggt

SEQ ID NO: 40151 - RNA, 21 nt, Synthetic Construct
  source 1..21: mol_type = other RNA
aggttccggataagtagagcc

SEQ ID NO: 40152 - RNA, 21 nt, Synthetic Construct
  source 1..21: mol_type = other RNA
aggttccggataagtagagcc

SEQ ID NO: 40153 - RNA, 20 nt, Synthetic Construct
  source 1..20: mol_type = other RNA
ccgcagagtacagcttggga

SEQ ID NO: 40154 - RNA, 20 nt, Synthetic Construct
  source 1..20: mol_type = other RNA
ccgcagagtacagcttggga

SEQ ID NO: 40155 - RNA, 22 nt, Synthetic Construct
  source 1..22: mol_type = other RNA
tagcaacacgtaaatattggcg

SEQ ID NO: 40156 - RNA, 21 nt, Synthetic Construct
  source 1..21: mol_type = other RNA
tgaggtagtagtctgtgctgt

SEQ ID NO: 40157 - RNA, 21 nt, Synthetic Construct
  source 1..21: mol_type = other RNA
tgaggtagtagtctgtgctgt

SEQ ID NO: 40158 - RNA, 22 nt, Synthetic Construct
  source 1..22: mol_type = other RNA
cattgcacctgtctcggtctga

SEQ ID NO: 40159 - RNA, 22 nt, Synthetic Construct
  source 1..22: mol_type = other RNA
cattgcacctgtctcggtctga

SEQ ID NO: 40160 - RNA, 17 nt, Synthetic Construct
  source 1..17: mol_type = other RNA
cagaactggcgatgcgg

SEQ ID NO: 40161 - RNA, 21 nt, Synthetic Construct
  source 1..21: mol_type = other RNA
tcctgtactgagctgcctcga

SEQ ID NO: 40162 - RNA, 23 nt, Synthetic Construct
  source 1..23: mol_type = other RNA
gaatgttgctcggtgaacccctt

SEQ ID NO: 40163 - RNA, 23 nt, Synthetic Construct
  source 1..23: mol_type = other RNA
caaagagctgttcgtgcaggtag

SEQ ID NO: 40164 - RNA, 21 nt, Synthetic Construct
  source 1..21: mol_type = other RNA
tgaggggcggagagcgagact

SEQ ID NO: 40165 - RNA, 21 nt, Synthetic Construct
  source 1..21: mol_type = other RNA
tgaggggcggagagcgagact

SEQ ID NO: 40166 - RNA, 23 nt, Synthetic Construct
  source 1..23: mol_type = other RNA
gcctgtactgagctgccccgagt

SEQ ID NO: 40167 - RNA, 19 nt, Synthetic Construct
  source 1..19: mol_type = other RNA
gaaaagctgggttgagagg

SEQ ID NO: 40168 - RNA, 24 nt, Synthetic Construct
  source 1..24: mol_type = other RNA
aacattcattgctgtcggtgggtt

SEQ ID NO: 40169 - RNA, 20 nt, Synthetic Construct
  source 1..20: mol_type = other RNA
caggacagtgaaacgagtca

SEQ ID NO: 40170 - RNA, 20 nt, Synthetic Construct
  source 1..20: mol_type = other RNA
caggacagtgaaacgagtca

SEQ ID NO: 40171 - RNA, 31 nt, Synthetic Construct; identical to SEQ ID NO: 2295
  source 1..31: mol_type = other RNA

SEQ ID NO: 40172 - RNA, 21 nt, Synthetic Construct
  source 1..21: mol_type = other RNA
tagcagcacgtaaatattgga

SEQ ID NO: 40173 - RNA, 22 nt, Synthetic Construct
  source 1..22: mol_type = other RNA
tagcagcacgtaaacattggcg

SEQ ID NO: 40174 - RNA, 22 nt, Synthetic Construct
  source 1..22: mol_type = other RNA
tagcagcacgtaaacattggcg

SEQ ID NO: 40175 - RNA, 16 nt, Synthetic Construct
  source 1..16: mol_type = other RNA
agacgatcagataccg

SEQ ID NO: 40176 - RNA, 16 nt, Synthetic Construct
  source 1..16: mol_type = other RNA
agacgatcagataccg

SEQ ID NO: 40177 - RNA, 22 nt, Synthetic Construct
  source 1..22: mol_type = other RNA
tgaggtagtaggttgcatagtt

SEQ ID NO: 40178 - RNA, 22 nt, Synthetic Construct
  source 1..22: mol_type = other RNA
tgaggtagtaggttgcatagtt

SEQ ID NO: 40179 - RNA, 21 nt, Synthetic Construct
  source 1..21: mol_type = other RNA
tagcaccatttgaaatcagtg

SEQ ID NO: 40180 - RNA, 23 nt, Synthetic Construct
  source 1..23: mol_type = other RNA
actggctagggaaaatgattgga

SEQ ID NO: 40181 - RNA, 23 nt, Synthetic Construct
  source 1..23: mol_type = other RNA
actggctagggaaaatgattgga

SEQ ID NO: 40182 - RNA, 27 nt, Synthetic Construct
  source 1..27: mol_type = other RNA
ccccccactgctaaatttaactggctt

SEQ ID NO: 40183 - RNA, 27 nt, Synthetic Construct
  source 1..27: mol_type = other RNA
ccccccactgctaaatttaactggctt

SEQ ID NO: 40184 - RNA, 36 nt, Synthetic Construct; identical to SEQ ID NO: 744
  source 1..36: mol_type = other RNA

SEQ ID NO: 40185 - RNA, 29 nt, Synthetic Construct
  source 1..29: mol_type = other RNA
agtaaggtcagctaaataagctatcgggc

SEQ ID NO: 40186 - RNA, 21 nt, Synthetic Construct
  source 1..21: mol_type = other RNA
cataaagtagaaagcactact

SEQ ID NO: 40187 - RNA, 23 nt, Synthetic Construct
  source 1..23: mol_type = other RNA
caaagtgctgctcgtgcaggtag

SEQ ID NO: 40188 - RNA, 23 nt, Synthetic Construct
  source 1..23: mol_type = other RNA
caaagtgctgctcgtgcaggtag

SEQ ID NO: 40189 - RNA, 23 nt, Synthetic Construct
  source 1..23: mol_type = other RNA
aacggaatcccaaaagcagctgt

SEQ ID NO: 40190 - RNA, 23 nt, Synthetic Construct
  source 1..23: mol_type = other RNA
aacggaatcccaaaagcagctgt

SEQ ID NO: 40191 - RNA, 23 nt, Synthetic Construct
  source 1..23: mol_type = other RNA
aaaccgttaccattactgagttt

SEQ ID NO: 40192 - RNA, 23 nt, Synthetic Construct
  source 1..23: mol_type = other RNA
aaaccgttaccattactgagttt

SEQ ID NO: 40193 - RNA, 21 nt, Synthetic Construct
  source 1..21: mol_type = other RNA
aggtagatagaacaggtcttg

SEQ ID NO: 40194 - RNA, 22 nt, Synthetic Construct
  source 1..22: mol_type = other RNA
tgaggcagtaggttgtatagtt

SEQ ID NO: 40195 - RNA, 23 nt, Synthetic Construct
  source 1..23: mol_type = other RNA
tggaatgtaaagaagtatgtatt

SEQ ID NO: 40196 - RNA, 23 nt, Synthetic Construct
  source 1..23: mol_type = other RNA
tggaatgtaaagaagtatgtatt

SEQ ID NO: 40197 - RNA, 25 nt, Synthetic Construct
  source 1..25: mol_type = other RNA
ggtaaaattgctgagtgaagcattg

SEQ ID NO: 40198 - RNA, 23 nt, Synthetic Construct
  source 1..23: mol_type = other RNA
tcctgtactgagctgccccgagc

SEQ ID NO: 40199 - RNA, 23 nt, Synthetic Construct
  source 1..23: mol_type = other RNA
tggtaatgcgacgtacttagtgt

SEQ ID NO: 40200 - RNA, 23 nt, Synthetic Construct
  source 1..23: mol_type = other RNA
tgaggcagtaggttgtgtggttt

SEQ ID NO: 40201 - RNA, 23 nt, Synthetic Construct
  source 1..23: mol_type = other RNA
tgaggcagtaggttgtgtggttt

SEQ ID NO: 40202 - RNA, 21 nt, Synthetic Construct
  source 1..21: mol_type = other RNA
aggggcagagagcgagacttt

SEQ ID NO: 40203 - RNA, 22 nt, Synthetic Construct
  source 1..22: mol_type = other RNA
aatgacacgatcactcccgttg

SEQ ID NO: 40204 - RNA, 22 nt, Synthetic Construct
  source 1..22: mol_type = other RNA
aatgacacgatcactcccgttg

SEQ ID NO: 40205 - RNA, 23 nt, Synthetic Construct
  source 1..23: mol_type = other RNA
tccctgagaccctttaacctgtg

SEQ ID NO: 40206 - RNA, 20 nt, Synthetic Construct
  source 1..20: mol_type = other RNA
acctgtactgagctgccccg

SEQ ID NO: 40207 - RNA, 20 nt, Synthetic Construct
  source 1..20: mol_type = other RNA
acctgtactgagctgccccg

SEQ ID NO: 40208 - RNA, 23 nt, Synthetic Construct
  source 1..23: mol_type = other RNA
taccacagggtagaaccacggac

SEQ ID NO: 40209 - RNA, 23 nt, Synthetic Construct
  source 1..23: mol_type = other RNA
taccacagggtagaaccacggac

SEQ ID NO: 40210 - RNA, 15 nt, Synthetic Construct
  source 1..15: mol_type = other RNA
gcgggagtaactatg

SEQ ID NO: 40211 - RNA, 24 nt, Synthetic Construct
  source 1..24: mol_type = other RNA
actcggcgtggcgtcggtcgtggt

SEQ ID NO: 40212 - RNA, 24 nt, Synthetic Construct
  source 1..24: mol_type = other RNA
actcggcgtggcgtcggtcgtggt

SEQ ID NO: 40213 - RNA, 22 nt, Synthetic Construct
  source 1..22: mol_type = other RNA
cattgcacttgtctcggtctgg

SEQ ID NO: 40214 - RNA, 22 nt, Synthetic Construct
  source 1..22: mol_type = other RNA
cattgcacttgtctcggtctgg

SEQ ID NO: 40215 - RNA, 22 nt, Synthetic Construct
  source 1..22: mol_type = other RNA
tagcagcacgtaaatattggtg

SEQ ID NO: 40216 - RNA, 22 nt, Synthetic Construct
  source 1..22: mol_type = other RNA
tctttgttcgattccgttgagt

SEQ ID NO: 40217 - RNA, 22 nt, Synthetic Construct
  source 1..22: mol_type = other RNA
tctttgttcgattccgttgagt

SEQ ID NO: 40218 - RNA, 22 nt, Synthetic Construct
  source 1..22: mol_type = other RNA
cgcatcccctagggcattggtg

SEQ ID NO: 40219 - RNA, 22 nt, Synthetic Construct
  source 1..22: mol_type = other RNA
cgcatcccctagggcattggtg

SEQ ID NO: 40220 - RNA, 18 nt, Synthetic Construct
  source 1..18: mol_type = other RNA
ggttcgattccggagagg

SEQ ID NO: 40221 - RNA, 18 nt, Synthetic Construct
  source 1..18: mol_type = other RNA
ggttcgattccggagagg

SEQ ID NO: 40222 - RNA, 18 nt, Synthetic Construct
  source 1..18: mol_type = other RNA
tcgacgctagcggatcct

SEQ ID NO: 40223 - RNA, 18 nt, Synthetic Construct
  source 1..18: mol_type = other RNA
tcgacgctagcggatcct

SEQ ID NO: 40224 - RNA, 20 nt, Synthetic Construct
  source 1..20: mol_type = other RNA
cagagttctacagtccgacg

SEQ ID NO: 40225 - RNA, 20 nt, Synthetic Construct
  source 1..20: mol_type = other RNA
cagagttctacagtccgacg

SEQ ID NO: 40226 - RNA, 22 nt, Synthetic Construct
  source 1..22: mol_type = other RNA
tgaggtagtaggttgtatagtc

SEQ ID NO: 40227 - RNA, 22 nt, Synthetic Construct
  source 1..22: mol_type = other RNA
tgaggtagtaggttgtatagtc

SEQ ID NO: 40228 - RNA, 18 nt, Synthetic Construct
  source 1..18: mol_type = other RNA
atcccacttctgacacca

SEQ ID NO: 40229 - RNA, 18 nt, Synthetic Construct
  source 1..18: mol_type = other RNA
atcccacttctgacacca

SEQ ID NO: 40230 - RNA, 22 nt, Synthetic Construct
  source 1..22: mol_type = other RNA
tgaggtagaaggttgtatagtt

SEQ ID NO: 40231 - RNA, 22 nt, Synthetic Construct
  source 1..22: mol_type = other RNA
tgaggtagaaggttgtatagtt

SEQ ID NO: 40232 - RNA, 32 nt, Synthetic Construct; identical to SEQ ID NO: 30748
  source 1..32: mol_type = other RNA

SEQ ID NO: 40233 - RNA, 32 nt, Synthetic Construct; identical to SEQ ID NO: 30748
  source 1..32: mol_type = other RNA

SEQ ID NO: 40234 - RNA, 25 nt, Synthetic Construct
  source 1..25: mol_type = other RNA
gagaaagctcacaagaactgctaac

SEQ ID NO: 40235 - RNA, 24 nt, Synthetic Construct
  source 1..24: mol_type = other RNA
tgtaaacacccccgactggaagct

SEQ ID NO: 40236 - RNA, 24 nt, Synthetic Construct
  source 1..24: mol_type = other RNA
tgtaaacacccccgactggaagct

SEQ ID NO: 40237 - RNA, 23 nt, Synthetic Construct
  source 1..23: mol_type = other RNA
tgaggtaggaggttgtatagttg

SEQ ID NO: 40238 - RNA, 22 nt, Synthetic Construct
  source 1..22: mol_type = other RNA
tgaggtagtaggttgtatggtt

SEQ ID NO: 40239 - RNA, 22 nt, Synthetic Construct
  source 1..22: mol_type = other RNA
tgaggtagtaggttgtatggtt

SEQ ID NO: 40240 - RNA, 21 nt, Synthetic Construct
  source 1..21: mol_type = other RNA
tcctgtactgagttgccccga

SEQ ID NO: 40241 - RNA, 22 nt, Synthetic Construct
  source 1..22: mol_type = other RNA
tcgtaccgtgagcaataatgcg

SEQ ID NO: 40242 - RNA, 22 nt, Synthetic Construct
  source 1..22: mol_type = other RNA
tcgtaccgtgagcaataatgcg

SEQ ID NO: 40243 - RNA, 21 nt, Synthetic Construct
  source 1..21: mol_type = other RNA
ggaatcgctagtaatcgcgga

SEQ ID NO: 40244 - RNA, 22 nt, Synthetic Construct
  source 1..22: mol_type = other RNA
tcgtaccgtgagtagtaatgcg

SEQ ID NO: 40245 - RNA, 22 nt, Synthetic Construct
  source 1..22: mol_type = other RNA
tcgtaccgtgagtagtaatgcg

SEQ ID NO: 40246 - RNA, 21 nt, Synthetic Construct
  source 1..21: mol_type = other RNA
ttcaagtaattcaggataggt

SEQ ID NO: 40247 - RNA, 21 nt, Synthetic Construct
  source 1..21: mol_type = other RNA
tgaggtagcagattgtatagt

SEQ ID NO: 40248 - RNA, 21 nt, Synthetic Construct
  source 1..21: mol_type = other RNA
tgaggtagcagattgtatagt

SEQ ID NO: 40249 - RNA, 23 nt, Synthetic Construct
  source 1..23: mol_type = other RNA
tgtcagtttgtcaaatacccctt

SEQ ID NO: 40250 - RNA, 23 nt, Synthetic Construct
  source 1..23: mol_type = other RNA
tggtaacacgacgtacttagtgt

SEQ ID NO: 40251 - RNA, 23 nt, Synthetic Construct
  source 1..23: mol_type = other RNA
tggtaacacgacgtacttagtgt

SEQ ID NO: 40252 - RNA, 26 nt, Synthetic Construct
  source 1..26: mol_type = other RNA
gagcagctaataccgcatacgacctg

SEQ ID NO: 40253 - RNA, 22 nt, Synthetic Construct
  source 1..22: mol_type = other RNA
tagcagcacgtaaatattgggg

SEQ ID NO: 40254 - RNA, 22 nt, Synthetic Construct
  source 1..22: mol_type = other RNA
tagcagcacgtaaatattgggg

SEQ ID NO: 40255 - RNA, 36 nt, Synthetic Construct; identical to SEQ ID NO: 2456
  source 1..36: mol_type = other RNA

SEQ ID NO: 40256 - RNA, 36 nt, Synthetic Construct; identical to SEQ ID NO: 2456
  source 1..36: mol_type = other RNA

SEQ ID NO: 40257 - RNA, 22 nt, Synthetic Construct
  source 1..22: mol_type = other RNA
aacggaatcccaaaagcagctg

SEQ ID NO: 40258 - RNA, 22 nt, Synthetic Construct
  source 1..22: mol_type = other RNA
aacggaatcccaaaagcagctg

SEQ ID NO: 40259 - RNA, 23 nt, Synthetic Construct
  source 1..23: mol_type = other RNA
atcacattgccagggatttccaa

SEQ ID NO: 40260 - RNA, 23 nt, Synthetic Construct
  source 1..23: mol_type = other RNA
atcacattgccagggatttccaa

SEQ ID NO: 40261 - RNA, 22 nt, Synthetic Construct
  source 1..22: mol_type = other RNA
tagcagcgcgtaaatattggcg

SEQ ID NO: 40262 - RNA, 22 nt, Synthetic Construct
  source 1..22: mol_type = other RNA
tagcagcgcgtaaatattggcg

SEQ ID NO: 40263 - RNA, 23 nt, Synthetic Construct
  source 1..23: mol_type = other RNA
caacggaatcccaaaagcagctt

SEQ ID NO: 40264 - RNA, 23 nt, Synthetic Construct
  source 1..23: mol_type = other RNA
gtcagtttgtcaaataccccatt

SEQ ID NO: 40265 - RNA, 22 nt, Synthetic Construct
  source 1..22: mol_type = other RNA
tcagtgcactacagaactttga

SEQ ID NO: 40266 - RNA, 25 nt, Synthetic Construct
  source 1..25: mol_type = other RNA
ttgaggatatgagatagagacgaca

SEQ ID NO: 40267 - RNA, 21 nt, Synthetic Construct
  source 1..21: mol_type = other RNA
cgcatcccctagggcattggt

SEQ ID NO: 40268 - RNA, 22 nt, Synthetic Construct
  source 1..22: mol_type = other RNA
tgaggaagtaggttgtatagtt

SEQ ID NO: 40269 - RNA, 27 nt, Synthetic Construct
  source 1..27: mol_type = other RNA
ccccccaccgctaaatttgactggctt

SEQ ID NO: 40270 - RNA, 27 nt, Synthetic Construct
  source 1..27: mol_type = other RNA
ccccccaccgctaaatttgactggctt

SEQ ID NO: 40271 - RNA, 19 nt, Synthetic Construct
  source 1..19: mol_type = other RNA
ctgatcgagtcgtcctgcg

SEQ ID NO: 40272 - RNA, 19 nt, Synthetic Construct
  source 1..19: mol_type = other RNA
ctgatcgagtcgtcctgcg

SEQ ID NO: 40273 - RNA, 21 nt, Synthetic Construct
  source 1..21: mol_type = other RNA
ctaggctgaagctccttgagg

SEQ ID NO: 40274 - RNA, 23 nt, Synthetic Construct
  source 1..23: mol_type = other RNA
tgaggagcagagagcgagacttt

SEQ ID NO: 40275 - RNA, 23 nt, Synthetic Construct
  source 1..23: mol_type = other RNA
tgaggagcagagagcgagacttt

SEQ ID NO: 40276 - RNA, 22 nt, Synthetic Construct
  source 1..22: mol_type = other RNA
tcctgtactgagcagccccgag

SEQ ID NO: 40277 - RNA, 25 nt, Synthetic Construct
  source 1..25: mol_type = other RNA
agggctgggtcggtcgggctggggc

SEQ ID NO: 40278 - RNA, 25 nt, Synthetic Construct
  source 1..25: mol_type = other RNA
agggctgggtcggtcgggctggggc

SEQ ID NO: 40279 - RNA, 22 nt, Synthetic Construct
  source 1..22: mol_type = other RNA
tgaggtagtaggttgtgtggct

SEQ ID NO: 40280 - RNA, 22 nt, Synthetic Construct
  source 1..22: mol_type = other RNA
tggaatgtaaagaagtatgtgt

SEQ ID NO: 40281 - RNA, 23 nt, Synthetic Construct
  source 1..23: mol_type = other RNA
ttcaagtaattcaggataggttg

SEQ ID NO: 40282 - RNA, 21 nt, Synthetic Construct
  source 1..21: mol_type = other RNA
tgaggtagtaggttgtgcggt

SEQ ID NO: 40283 - RNA, 22 nt, Synthetic Construct
  source 1..22: mol_type = other RNA
tgaggtaataggttgtgtggtt

SEQ ID NO: 40284 - RNA, 22 nt, Synthetic Construct
  source 1..22: mol_type = other RNA
tgaggtaataggttgtgtggtt

SEQ ID NO: 40285 - RNA, 25 nt, Synthetic Construct
  source 1..25: mol_type = other RNA
ttgaggatatgggatcgagacgaca

SEQ ID NO: 40286 - RNA, 21 nt, Synthetic Construct
  source 1..21: mol_type = other RNA
ggaggtagtaggttgtgtggt

SEQ ID NO: 40287 - RNA, 30 nt, Synthetic Construct; identical to SEQ ID NO: 11302
  source 1..30: mol_type = other RNA

SEQ ID NO: 40288 - RNA, 30 nt, Synthetic Construct; identical to SEQ ID NO: 11302
  source 1..30: mol_type = other RNA

SEQ ID NO: 40289 - RNA, 21 nt, Synthetic Construct
  source 1..21: mol_type = other RNA
ctagcaccatctgaaatcggt

SEQ ID NO: 40290 - RNA, 21 nt, Synthetic Construct
  source 1..21: mol_type = other RNA
ctagcaccatctgaaatcggt

SEQ ID NO: 40291 - RNA, 22 nt, Synthetic Construct
  source 1..22: mol_type = other RNA
tctttggttatctagctgtatg

SEQ ID NO: 40292 - RNA, 22 nt, Synthetic Construct
  source 1..22: mol_type = other RNA
cactgcacttgtctcggtctga

SEQ ID NO: 40293 - RNA, 22 nt, Synthetic Construct
  source 1..22: mol_type = other RNA
cactgcacttgtctcggtctga

SEQ ID NO: 40294 - RNA, 21 nt, Synthetic Construct
  source 1..21: mol_type = other RNA
agatcgaccgtgttatattcg

SEQ ID NO: 40295 - RNA, 21 nt, Synthetic Construct
  source 1..21: mol_type = other RNA
agatcgaccgtgttatattcg

SEQ ID NO: 40296 - RNA, 22 nt, Synthetic Construct
  source 1..22: mol_type = other RNA
tcctgtactgagctgacccgag

SEQ ID NO: 40297 - RNA, 22 nt, Synthetic Construct
  source 1..22: mol_type = other RNA
tcctgtactgagctgacccgag

SEQ ID NO: 40298 - RNA, 23 nt, Synthetic Construct
  source 1..23: mol_type = other RNA
gtgcagatcttggtggtagtagc

SEQ ID NO: 40299 - RNA, 23 nt, Synthetic Construct
  source 1..23: mol_type = other RNA
gtgcagatcttggtggtagtagc

SEQ ID NO: 40300 - RNA, 22 nt, Synthetic Construct
  source 1..22: mol_type = other RNA
tgagatagtagtttgtgctgtt

SEQ ID NO: 40301 - RNA, 22 nt, Synthetic Construct
  source 1..22: mol_type = other RNA
tgagatagtagtttgtgctgtt

SEQ ID NO: 40302 - RNA, 22 nt, Synthetic Construct
  source 1..22: mol_type = other RNA
ggtagcgaaattccttgtcggg

SEQ ID NO: 40303 - RNA, 34 nt, Synthetic Construct; identical to SEQ ID NO: 490
  source 1..34: mol_type = other RNA

SEQ ID NO: 40304 - RNA, 34 nt, Synthetic Construct; identical to SEQ ID NO: 490
  source 1..34: mol_type = other RNA

SEQ ID NO: 40305 - RNA, 22 nt, Synthetic Construct
  source 1..22: mol_type = other RNA
tgtggtagtagtttgtgctgtt

SEQ ID NO: 40306 - RNA, 22 nt, Synthetic Construct
  source 1..22: mol_type = other RNA
tgtggtagtagtttgtgctgtt

SEQ ID NO: 40307 - RNA, 20 nt, Synthetic Construct
  source 1..20: mol_type = other RNA
caggacagtgaaacgagtca

SEQ ID NO: 40308 - RNA, 20 nt, Synthetic Construct
  source 1..20: mol_type = other RNA
caggacagtgaaacgagtca

SEQ ID NO: 40309 - RNA, 23 nt, Synthetic Construct
  source 1..23: mol_type = other RNA
ctcactgatcgagtcgtcctgcg

SEQ ID NO: 40310 - RNA, 23 nt, Synthetic Construct
  source 1..23: mol_type = other RNA
ctcactgatcgagtcgtcctgcg

SEQ ID NO: 40311 - RNA, 18 nt, Synthetic Construct
  source 1..18: mol_type = other RNA
gtaggtcatcgtcaggct

SEQ ID NO: 40312 - RNA, 22 nt, Synthetic Construct
  source 1..22: mol_type = other RNA
tcgtactgtgagtaataatgcg

SEQ ID NO: 40313 - RNA, 22 nt, Synthetic Construct
  source 1..22: mol_type = other RNA
tcgtactgtgagtaataatgcg

SEQ ID NO: 40314 - RNA, 22 nt, Synthetic Construct
  source 1..22: mol_type = other RNA
tgaggtagtaggttgtgtggtg

SEQ ID NO: 40315 - RNA, 20 nt, Synthetic Construct
  source 1..20: mol_type = other RNA
tccccggcatctccaccaaa

SEQ ID NO: 40316 - RNA, 20 nt, Synthetic Construct
  source 1..20: mol_type = other RNA
tccccggcatctccaccaaa

SEQ ID NO: 40317 - RNA, 17 nt, Synthetic Construct
  source 1..17: mol_type = other RNA
gaagcggggctgggcgc

SEQ ID NO: 40318 - RNA, 17 nt, Synthetic Construct
  source 1..17: mol_type = other RNA
gaagcggggctgggcgc

SEQ ID NO: 40319 - RNA, 21 nt, Synthetic Construct
  source 1..21: mol_type = other RNA
agcagcattgtacagggctat

SEQ ID NO: 40320 - RNA, 21 nt, Synthetic Construct
  source 1..21: mol_type = other RNA
agcagcattgtacagggctat

SEQ ID NO: 40321 - RNA, 21 nt, Synthetic Construct
  source 1..21: mol_type = other RNA
atggcactggtagaattcact

SEQ ID NO: 40322 - RNA, 21 nt, Synthetic Construct
  source 1..21: mol_type = other RNA
atggcactggtagaattcact

SEQ ID NO: 40323 - RNA, 21 nt, Synthetic Construct
  source 1..21: mol_type = other RNA
tggagtgtgacgatggtgttt

SEQ ID NO: 40324 - RNA, 16 nt, Synthetic Construct
  source 1..16: mol_type = other RNA
ggcgggggtcgctggt

SEQ ID NO: 40325 - RNA, 16 nt, Synthetic Construct
  source 1..16: mol_type = other RNA
ggcgggggtcgctggt

SEQ ID NO: 40326 - RNA, 25 nt, Synthetic Construct
  source 1..25: mol_type = other RNA
ttgaggatatgagatcgagacgacg

SEQ ID NO: 40327 - RNA, 25 nt, Synthetic Construct
  source 1..25: mol_type = other RNA
ttgaggatatgagatcgagacgacg

SEQ ID NO: 40328 - RNA, 22 nt, Synthetic Construct
  source 1..22: mol_type = other RNA
tgaggtagtaggttgtttagtt

SEQ ID NO: 40329 - RNA, 16 nt, Synthetic Construct
  source 1..16: mol_type = other RNA
gtctacagccatacca

SEQ ID NO: 40330 - RNA, 16 nt, Synthetic Construct
  source 1..16: mol_type = other RNA
gtctacagccatacca

SEQ ID NO: 40331 - RNA, 25 nt, Synthetic Construct
  source 1..25: mol_type = other RNA
tttccccttggggttgtaggaccac

SEQ ID NO: 40332 - RNA, 25 nt, Synthetic Construct
  source 1..25: mol_type = other RNA
tttccccttggggttgtaggaccac

SEQ ID NO: 40333 - RNA, 23 nt, Synthetic Construct
  source 1..23: mol_type = other RNA
tcaggctcagtcccctcccgttt

SEQ ID NO: 40334 - RNA, 23 nt, Synthetic Construct
  source 1..23: mol_type = other RNA
tcaggctcagtcccctcccgttt

SEQ ID NO: 40335 - RNA, 22 nt, Synthetic Construct
  source 1..22: mol_type = other RNA
tgaggtagtggattgtatagtt

SEQ ID NO: 40336 - RNA, 22 nt, Synthetic Construct
  source 1..22: mol_type = other RNA
tgaggtagtggattgtatagtt

SEQ ID NO: 40337 - RNA, 25 nt, Synthetic Construct
  source 1..25: mol_type = other RNA
caaagtgctgttcgtgcaggtagtt

SEQ ID NO: 40338 - RNA, 26 nt, Synthetic Construct
  source 1..26: mol_type = other RNA
caacggaatcccaaaagcagctgttt

SEQ ID NO: 40339 - RNA, 26 nt, Synthetic Construct
  source 1..26: mol_type = other RNA
caacggaatcccaaaagcagctgttt

SEQ ID NO: 40340 - RNA, 32 nt, Synthetic Construct; identical to SEQ ID NO: 2296
  source 1..32: mol_type = other RNA

SEQ ID NO: 40341 - RNA, 20 nt, Synthetic Construct
  source 1..20: mol_type = other RNA
acctgtactgagctgccccg

SEQ ID NO: 40342 - RNA, 30 nt, Synthetic Construct; identical to SEQ ID NO: 1771
  source 1..30: mol_type = other RNA

SEQ ID NO: 40343 - RNA, 22 nt, Synthetic Construct
  source 1..22: mol_type = other RNA
tggaatgtaaggaagtgtgtgg

SEQ ID NO: 40344 - RNA, 22 nt, Synthetic Construct
  source 1..22: mol_type = other RNA
tggaatgtaaggaagtgtgtgg

SEQ ID NO: 40345 - RNA, 24 nt, Synthetic Construct
  source 1..24: mol_type = other RNA
tgagaactgaattccataggctgt

SEQ ID NO: 40346 - RNA, 24 nt, Synthetic Construct
  source 1..24: mol_type = other RNA
tgagaactgaattccataggctgt

SEQ ID NO: 40347 - RNA, 16 nt, Synthetic Construct
  source 1..16: mol_type = other RNA
gtctacggccatacca

SEQ ID NO: 40348 - RNA, 22 nt, Synthetic Construct
  source 1..22: mol_type = other RNA
tgaggtagtaggttgtatagtg

SEQ ID NO: 40349 - RNA, 22 nt, Synthetic Construct
  source 1..22: mol_type = other RNA
tagcagcacgtagatattggcg

SEQ ID NO: 40350 - RNA, 23 nt, Synthetic Construct
  source 1..23: mol_type = other RNA
cctccctcgggagggcgcgcggg

SEQ ID NO: 40351 - RNA, 36 nt, Synthetic Construct; identical to SEQ ID NO: 10982
  source 1..36: mol_type = other RNA

SEQ ID NO: 40352 - RNA, 36 nt, Synthetic Construct; identical to SEQ ID NO: 10982
  source 1..36: mol_type = other RNA

SEQ ID NO: 40353 - RNA, 20 nt, Synthetic Construct
  source 1..20: mol_type = other RNA
tattgcactcgtcccggcct

SEQ ID NO: 40354 - RNA, 20 nt, Synthetic Construct
  source 1..20: mol_type = other RNA
tattgcactcgtcccggcct

SEQ ID NO: 40355 - RNA, 20 nt, Synthetic Construct
  source 1..20: mol_type = other RNA
gcatggccgttcttagttgg

SEQ ID NO: 40356 - RNA, 21 nt, Synthetic Construct
  source 1..21: mol_type = other RNA
tgaggtagtaggttgtataga

SEQ ID NO: 40357 - RNA, 22 nt, Synthetic Construct
  source 1..22: mol_type = other RNA
atgctgacatatttactagagg

SEQ ID NO: 40358 - RNA, 22 nt, Synthetic Construct
  source 1..22: mol_type = other RNA
atgctgacatatttactagagg

SEQ ID NO: 40359 - RNA, 24 nt, Synthetic Construct
  source 1..24: mol_type = other RNA
tgaggtagtaggttgtgtggttaa

SEQ ID NO: 40360 - RNA, 24 nt, Synthetic Construct
  source 1..24: mol_type = other RNA
tgaggtagtaggttgtgtggttaa

SEQ ID NO: 40361 - RNA, 33 nt, Synthetic Construct; identical to SEQ ID NO: 35121
  source 1..33: mol_type = other RNA

SEQ ID NO: 40362 - RNA, 20 nt, Synthetic Construct
  source 1..20: mol_type = other RNA
acccttgtcattagttgcta

SEQ ID NO: 40363 - RNA, 20 nt, Synthetic Construct
  source 1..20: mol_type = other RNA
acccttgtcattagttgcta

SEQ ID NO: 40364 - RNA, 22 nt, Synthetic Construct
  source 1..22: mol_type = other RNA
tgtcccacccccactcctgttt

SEQ ID NO: 40365 - RNA, 22 nt, Synthetic Construct
  source 1..22: mol_type = other RNA
tgtcccacccccactcctgttt

SEQ ID NO: 40366 - RNA, 22 nt, Synthetic Construct
  source 1..22: mol_type = other RNA
cattgcacttgtctcagtctga

SEQ ID NO: 40367 - RNA, 23 nt, Synthetic Construct
  source 1..23: mol_type = other RNA
tgaggtagtaggttgtgtggtct

SEQ ID NO: 40368 - RNA, 23 nt, Synthetic Construct
  source 1..23: mol_type = other RNA
tgaggtagtaggttgtgtggtct

SEQ ID NO: 40369 - RNA, 27 nt, Synthetic Construct
  source 1..27: mol_type = other RNA
gcgggtgatgcgaactggagtctgagc

SEQ ID NO: 40370 - RNA, 27 nt, Synthetic Construct
  source 1..27: mol_type = other RNA
gcgggtgatgcgaactggagtctgagc

SEQ ID NO: 40371 - RNA, 22 nt, Synthetic Construct
  source 1..22: mol_type = other RNA
tagcagcacggaaatattggcg

SEQ ID NO: 40372 - RNA, 19 nt, Synthetic Construct
  source 1..19: mol_type = other RNA
cagagttctacagtccgac

SEQ ID NO: 40373 - RNA, 19 nt, Synthetic Construct
  source 1..19: mol_type = other RNA
cagagttctacagtccgac

SEQ ID NO: 40374 - RNA, 22 nt, Synthetic Construct
  source 1..22: mol_type = other RNA
tcagtagctcgaggaaaagaca

SEQ ID NO: 40375 - RNA, 15 nt, Synthetic Construct
  source 1..15: mol_type = other RNA
gccgttcttagttgg

SEQ ID NO: 40376 - RNA, 15 nt, Synthetic Construct
  source 1..15: mol_type = other RNA
gccgttcttagttgg

SEQ ID NO: 40377 - RNA, 23 nt, Synthetic Construct
  source 1..23: mol_type = other RNA
tgaggaagtaggttgtgtggttt

SEQ ID NO: 40378 - RNA, 23 nt, Synthetic Construct
  source 1..23: mol_type = other RNA
tgaggaagtaggttgtgtggttt

SEQ ID NO: 40379 - RNA, 18 nt, Synthetic Construct
  source 1..18: mol_type = other RNA
tgcgtagatatgcggagg

SEQ ID NO: 40380 - RNA, 23 nt, Synthetic Construct
  source 1..23: mol_type = other RNA
caaagcgctgttcgtgcaggtag

SEQ ID NO: 40381 - RNA, 23 nt, Synthetic Construct
  source 1..23: mol_type = other RNA
caaagcgctgttcgtgcaggtag

SEQ ID NO: 40382 - RNA, 16 nt, Synthetic Construct
  source 1..16: mol_type = other RNA
ttcgattccggagagg

SEQ ID NO: 40383 - RNA, 16 nt, Synthetic Construct
  source 1..16: mol_type = other RNA
ttcgattccggagagg

SEQ ID NO: 40384 - RNA, 22 nt, Synthetic Construct
  source 1..22: mol_type = other RNA
tctgcccagtgctctgaatgtc

SEQ ID NO: 40385 - RNA, 22 nt, Synthetic Construct
  source 1..22: mol_type = other RNA
tctgcccagtgctctgaatgtc

SEQ ID NO: 40386 - RNA, 18 nt, Synthetic Construct
  source 1..18: mol_type = other RNA
gcagcgatggccgagtgg

SEQ ID NO: 40387 - RNA, 22 nt, Synthetic Construct
  source 1..22: mol_type = other RNA
tgaggtagtagtttgtgcggtt

SEQ ID NO: 40388 - RNA, 22 nt, Synthetic Construct
  source 1..22: mol_type = other RNA
tgaggtagtagtttgtgcggtt

SEQ ID NO: 40389 - RNA, 22 nt, Synthetic Construct
  source 1..22: mol_type = other RNA
tcgaaaccatcctctgctacca

SEQ ID NO: 40390 - RNA, 21 nt, Synthetic Construct
  source 1..21: mol_type = other RNA
tgaggtagtagattgtatggt

SEQ ID NO: 40391 - RNA, 34 nt, Synthetic Construct; identical to SEQ ID NO: 11269
  source 1..34: mol_type = other RNA

SEQ ID NO: 40392 - RNA, 34 nt, Synthetic Construct; identical to SEQ ID NO: 11269
  source 1..34: mol_type = other RNA

SEQ ID NO: 40393 - RNA, 22 nt, Synthetic Construct
  source 1..22: mol_type = other RNA
tattgcacttgtcccggcccgt

SEQ ID NO: 40394 - RNA, 22 nt, Synthetic Construct
  source 1..22: mol_type = other RNA
tattgcacttgtcccggcccgt

SEQ ID NO: 40395 - RNA, 17 nt, Synthetic Construct
  source 1..17: mol_type = other RNA
accaaggggtcgtgggt

SEQ ID NO: 40396 - RNA, 17 nt, Synthetic Construct
  source 1..17: mol_type = other RNA
accaaggggtcgtgggt

SEQ ID NO: 40397 - RNA, 22 nt, Synthetic Construct
  source 1..22: mol_type = other RNA
tattgcacctgtcccggcctgt

SEQ ID NO: 40398 - RNA, 22 nt, Synthetic Construct
  source 1..22: mol_type = other RNA
tattgcacctgtcccggcctgt

SEQ ID NO: 40399 - RNA, 23 nt, Synthetic Construct
  source 1..23: mol_type = other RNA
tgagaactgaattccatgggtta

SEQ ID NO: 40400 - RNA, 22 nt, Synthetic Construct
  source 1..22: mol_type = other RNA
tgaggtagtagattgtgtggtt

SEQ ID NO: 40401 - RNA, 19 nt, Synthetic Construct
  source 1..19: mol_type = other RNA
gtccggatcgtagtctgca

SEQ ID NO: 40402 - RNA, 19 nt, Synthetic Construct
  source 1..19: mol_type = other RNA
gtccggatcgtagtctgca

SEQ ID NO: 40403 - RNA, 22 nt, Synthetic Construct
  source 1..22: mol_type = other RNA
cgaggtagtagtttgtgctgtt

SEQ ID NO: 40404 - RNA, 27 nt, Synthetic Construct
  source 1..27: mol_type = other RNA
ccccccactgctaaatttgaccggctt

SEQ ID NO: 40405 - RNA, 27 nt, Synthetic Construct
  source 1..27: mol_type = other RNA
ccccccactgctaaatttgaccggctt

SEQ ID NO: 40406 - RNA, 22 nt, Synthetic Construct
  source 1..22: mol_type = other RNA
tcgtaccgtgagtagtaatgcg

SEQ ID NO: 40407 - RNA, 26 nt, Synthetic Construct
  source 1..26: mol_type = other RNA
gcgggcgtagctcaggggtagagcgc

SEQ ID NO: 40408 - RNA, 26 nt, Synthetic Construct
  source 1..26: mol_type = other RNA
gcgggcgtagctcaggggtagagcgc

SEQ ID NO: 40409 - RNA, 22 nt, Synthetic Construct
  source 1..22: mol_type = other RNA
tcctgtactgggctgccccgag

SEQ ID NO: 40410 - RNA, 21 nt, Synthetic Construct
  source 1..21: mol_type = other RNA
taggtagtttcctgttgttgg

SEQ ID NO: 40411 - RNA, 21 nt, Synthetic Construct
  source 1..21: mol_type = other RNA
taggtagtttcctgttgttgg

SEQ ID NO: 40412 - RNA, 22 nt, Synthetic Construct
  source 1..22: mol_type = other RNA
caaagtgcttacagtgcaggta

SEQ ID NO: 40413 - RNA, 22 nt, Synthetic Construct
  source 1..22: mol_type = other RNA
caaagtgcttacagtgcaggta

SEQ ID NO: 40414 - RNA, 20 nt, Synthetic Construct
  source 1..20: mol_type = other RNA
agcagcattgtacagggcta

SEQ ID NO: 40415 - RNA, 16 nt, Synthetic Construct
  source 1..16: mol_type = other RNA
cacaccgcccgtcgct

SEQ ID NO: 40416 - RNA, 16 nt, Synthetic Construct
  source 1..16: mol_type = other RNA
cacaccgcccgtcgct

SEQ ID NO: 40417 - RNA, 19 nt, Synthetic Construct
  source 1..19: mol_type = other RNA
cgcgcgtcccccgaagagg

SEQ ID NO: 40418 - RNA, 20 nt, Synthetic Construct
  source 1..20: mol_type = other RNA
tgagatagtaggttgtgtgg

SEQ ID NO: 40419 - RNA, 20 nt, Synthetic Construct
  source 1..20: mol_type = other RNA
tgagatagtaggttgtgtgg

SEQ ID NO: 40420 - RNA, 21 nt, Synthetic Construct
  source 1..21: mol_type = other RNA
tcctgtactgagctgccccaa

SEQ ID NO: 40421 - RNA, 23 nt, Synthetic Construct
  source 1..23: mol_type = other RNA
tgaggtagtaggttgtgtggtta

SEQ ID NO: 40422 - RNA, 19 nt, Synthetic Construct
  source 1..19: mol_type = other RNA
caataacaggtctgtgatg

SEQ ID NO: 40423 - RNA, 19 nt, Synthetic Construct
  source 1..19: mol_type = other RNA
caataacaggtctgtgatg

SEQ ID NO: 40424 - RNA, 20 nt, Synthetic Construct
  source 1..20: mol_type = other RNA
gctattgacgaccgtaccgc

SEQ ID NO: 40425 - RNA, 27 nt, Synthetic Construct
  source 1..27: mol_type = other RNA
tcggctgttaaccgaaaggttggtggt

SEQ ID NO: 40426 - RNA, 21 nt, Synthetic Construct
  source 1..21: mol_type = other RNA
tcacagtgaaccggtctcttt

SEQ ID NO: 40427 - RNA, 24 nt, Synthetic Construct
  source 1..24: mol_type = other RNA
tatatcggaacgtgcccagtcgtg

SEQ ID NO: 40428 - RNA, 24 nt, Synthetic Construct
  source 1..24: mol_type = other RNA
tatatcggaacgtgcccagtcgtg

SEQ ID NO: 40429 - RNA, 22 nt, Synthetic Construct
  source 1..22: mol_type = other RNA
agtagtgtttcctactttatgg

SEQ ID NO: 40430 - RNA, 22 nt, Synthetic Construct
  source 1..22: mol_type = other RNA
agtagtgtttcctactttatgg

SEQ ID NO: 40431 - RNA, 22 nt, Synthetic Construct
  source 1..22: mol_type = other RNA
tggaatgtaaagaagtacgtat

SEQ ID NO: 40432 - RNA, 19 nt, Synthetic Construct
  source 1..19: mol_type = other RNA
tgtcaactggttgttggga

SEQ ID NO: 40433 - RNA, 19 nt, Synthetic Construct
  source 1..19: mol_type = other RNA
tgtcaactggttgttggga

SEQ ID NO: 40434 - RNA, 21 nt, Synthetic Construct
  source 1..21: mol_type = other RNA
tagcagcacgtaatattggcg

SEQ ID NO: 40435 - RNA, 17 nt, Synthetic Construct
  source 1..17: mol_type = other RNA
gaagcggggctgggcgc

SEQ ID NO: 40436 - RNA, 17 nt, Synthetic Construct
  source 1..17: mol_type = other RNA
gaagcggggctgggcgc

SEQ ID NO: 40437 - RNA, 21 nt, Synthetic Construct
  source 1..21: mol_type = other RNA
agctacattgtctgctgggtt

SEQ ID NO: 40438 - RNA, 21 nt, Synthetic Construct
  source 1..21: mol_type = other RNA
agctacattgtctgctgggtt

SEQ ID NO: 40439 - RNA, 24 nt, Synthetic Construct
  source 1..24: mol_type = other RNA
tgtaaacgtccccgactggaagct

SEQ ID NO: 40440 - RNA, 24 nt, Synthetic Construct
  source 1..24: mol_type = other RNA
tgtaaacgtccccgactggaagct

SEQ ID NO: 40441 - RNA, 20 nt, Synthetic Construct
  source 1..20: mol_type = other RNA
aacattcaacgctgtcggtg

SEQ ID NO: 40442 - RNA, 16 nt, Synthetic Construct
  source 1..16: mol_type = other RNA
ggcgggggtcgctggt

SEQ ID NO: 40443 - RNA, 16 nt, Synthetic Construct
  source 1..16: mol_type = other RNA
ggcgggggtcgctggt

SEQ ID NO: 40444 - RNA, 21 nt, Synthetic Construct
  source 1..21: mol_type = other RNA
tagcaccatttgaaatcagtg

SEQ ID NO: 40445 - RNA, 21 nt, Synthetic Construct
  source 1..21: mol_type = other RNA
tagcaccatttgaaatcagtg

SEQ ID NO: 40446 - RNA, 27 nt, Synthetic Construct
  source 1..27: mol_type = other RNA
ccccccactgctaaatttgactgactt

SEQ ID NO: 40447 - RNA, 23 nt, Synthetic Construct
  source 1..23: mol_type = other RNA
agaggggcagagagcgagacttt

SEQ ID NO: 40448 - RNA, 24 nt, Synthetic Construct
  source 1..24: mol_type = other RNA
aggaagccctggaggggctggagg

SEQ ID NO: 40449 - RNA, 24 nt, Synthetic Construct
  source 1..24: mol_type = other RNA
aggaagccctggaggggctggagg

SEQ ID NO: 40450 - RNA, 22 nt, Synthetic Construct
  source 1..22: mol_type = other RNA
tggagtgtggcaatggtgtttg

SEQ ID NO: 40451 - RNA, 25 nt, Synthetic Construct
  source 1..25: mol_type = other RNA
aatgacacgatcactcccgttgagt

SEQ ID NO: 40452 - RNA, 25 nt, Synthetic Construct
  source 1..25: mol_type = other RNA
aatgacacgatcactcccgttgagt

SEQ ID NO: 40453 - RNA, 22 nt, Synthetic Construct
  source 1..22: mol_type = other RNA
agtcagtttgtcaaatacccca

SEQ ID NO: 40454 - RNA, 24 nt, Synthetic Construct
  source 1..24: mol_type = other RNA
tgtaagcatccccgactggaagct

SEQ ID NO: 40455 - RNA, 24 nt, Synthetic Construct
  source 1..24: mol_type = other RNA
tgtaagcatccccgactggaagct

SEQ ID NO: 40456 - RNA, 23 nt, Synthetic Construct
  source 1..23: mol_type = other RNA
caaagtgctgatcgtgcaggtag

SEQ ID NO: 40457 - RNA, 25 nt, Synthetic Construct
  source 1..25: mol_type = other RNA
caacggaatcccaaaagcagctgtt

SEQ ID NO: 40458 - RNA, 21 nt, Synthetic Construct
  source 1..21: mol_type = other RNA
atgtcccacccccactcctgt

SEQ ID NO: 40459 - RNA, 21 nt, Synthetic Construct
  source 1..21: mol_type = other RNA
atgtcccacccccactcctgt

SEQ ID NO: 40460 - RNA, 21 nt, Synthetic Construct
  source 1..21: mol_type = other RNA
cgaggtagtagtttgtgctgt

SEQ ID NO: 40461 - RNA, 21 nt, Synthetic Construct
  source 1..21: mol_type = other RNA
cgaggtagtagtttgtgctgt

SEQ ID NO: 40462 - RNA, 22 nt, Synthetic Construct
  source 1..22: mol_type = other RNA
tggaatgtaaagaggtatgtat

SEQ ID NO: 40463 - RNA, 22 nt, Synthetic Construct
  source 1..22: mol_type = other RNA
tggaatgtaaagaggtatgtat

SEQ ID NO: 40464 - RNA, 25 nt, Synthetic Construct
  source 1..25: mol_type = other RNA
atgaggatatgagatcgagacgaca

SEQ ID NO: 40465 - RNA, 21 nt, Synthetic Construct
  source 1..21: mol_type = other RNA
tgaggtagtaggttgtacagt

SEQ ID NO: 40466 - RNA, 21 nt, Synthetic Construct
  source 1..21: mol_type = other RNA
tgaggtagtaggttgtacagt

SEQ ID NO: 40467 - RNA, 20 nt, Synthetic Construct
  source 1..20: mol_type = other RNA
tgaggaagtaggttgtatag

SEQ ID NO: 40468 - RNA, 24 nt, Synthetic Construct
  source 1..24: mol_type = other RNA
ggtaaacatccccgactggaagct

SEQ ID NO: 40469 - RNA, 27 nt, Synthetic Construct
  source 1..27: mol_type = other RNA
catgcgagagtaggacgttgccaggtt

SEQ ID NO: 40470 - RNA, 27 nt, Synthetic Construct
  source 1..27: mol_type = other RNA
catgcgagagtaggacgttgccaggtt

SEQ ID NO: 40471 - RNA, 23 nt, Synthetic Construct
  source 1..23: mol_type = other RNA
caaggtgctgttcgtgcaggtag

SEQ ID NO: 40472 - RNA, 23 nt, Synthetic Construct
  source 1..23: mol_type = other RNA
caaggtgctgttcgtgcaggtag

SEQ ID NO: 40473 - RNA, 23 nt, Synthetic Construct
  source 1..23: mol_type = other RNA
tccagtactgagctgccccgagt

SEQ ID NO: 40474 - RNA, 25 nt, Synthetic Construct
  source 1..25: mol_type = other RNA
cctcgcgcgattggagcggccgata

SEQ ID NO: 40475 - RNA, 25 nt, Synthetic Construct
  source 1..25: mol_type = other RNA
cctcgcgcgattggagcggccgata

SEQ ID NO: 40476 - RNA, 22 nt, Synthetic Construct
  source 1..22: mol_type = other RNA
tagcagcacgtaaatgttggcg

SEQ ID NO: 40477 - RNA, 22 nt, Synthetic Construct
  source 1..22: mol_type = other RNA
tagcagcacgtaaatgttggcg

SEQ ID NO: 40478 - RNA, 23 nt, Synthetic Construct
  source 1..23: mol_type = other RNA
tcctgtactgagctgctccgaga

SEQ ID NO: 40479 - RNA, 22 nt, Synthetic Construct
  source 1..22: mol_type = other RNA
caagtcactagtggttccgttt

SEQ ID NO: 40480 - RNA, 22 nt, Synthetic Construct
  source 1..22: mol_type = other RNA
caagtcactagtggttccgttt

SEQ ID NO: 40481 - RNA, 20 nt, Synthetic Construct
  source 1..20: mol_type = other RNA
tggctcagttcagcaggaac

SEQ ID NO: 40482 - RNA, 20 nt, Synthetic Construct
  source 1..20: mol_type = other RNA
tggctcagttcagcaggaac

SEQ ID NO: 40483 - RNA, 22 nt, Synthetic Construct
  source 1..22: mol_type = other RNA
tagcancacgtaaatattggcg

SEQ ID NO: 40484 - RNA, 22 nt, Synthetic Construct
  source 1..22: mol_type = other RNA
ttcaagtaattcaggataggta

SEQ ID NO: 40485 - RNA, 18 nt, Synthetic Construct
  source 1..18: mol_type = other RNA
atcgctagtaatcgcgga

SEQ ID NO: 40486 - RNA, 16 nt, Synthetic Construct
  source 1..16: mol_type = other RNA
ggcgggggtcgctggt

SEQ ID NO: 40487 - RNA, 23 nt, Synthetic Construct
  source 1..23: mol_type = other RNA
cacccgtagaaccgaccttgcgt

SEQ ID NO: 40488 - RNA, 32 nt, Synthetic Construct; identical to SEQ ID NO: 8547
  source 1..32: mol_type = other RNA

SEQ ID NO: 40489 - RNA, 32 nt, Synthetic Construct; identical to SEQ ID NO: 8547
  source 1..32: mol_type = other RNA

SEQ ID NO: 40490 - RNA, 23 nt, Synthetic Construct
  source 1..23: mol_type = other RNA
agaggggcagagagcgagacttt

SEQ ID NO: 40491 - RNA, 23 nt, Synthetic Construct
  source 1..23: mol_type = other RNA
agaggggcagagagcgagacttt

SEQ ID NO: 40492 - RNA, 22 nt, Synthetic Construct
  source 1..22: mol_type = other RNA
agaggtagtaggttgtgtggtt

SEQ ID NO: 40493 - RNA, 22 nt, Synthetic Construct
  source 1..22: mol_type = other RNA
agaggtagtaggttgtgtggtt

SEQ ID NO: 40494 - RNA, 22 nt, Synthetic Construct
  source 1..22: mol_type = other RNA
tagcagcacgtatatattggcg

SEQ ID NO: 40495 - RNA, 18 nt, Synthetic Construct
  source 1..18: mol_type = other RNA
ggtagcgtggccgagtgg

SEQ ID NO: 40496 - RNA, 18 nt, Synthetic Construct
  source 1..18: mol_type = other RNA
ggtagcgtggccgagtgg

SEQ ID NO: 40497 - RNA, 22 nt, Synthetic Construct
  source 1..22: mol_type = other RNA
gagaactgaattccatgggttg

SEQ ID NO: 40498 - RNA, 20 nt, Synthetic Construct
  source 1..20: mol_type = other RNA
tccccggcatctccaccaaa

SEQ ID NO: 40499 - RNA, 20 nt, Synthetic Construct
  source 1..20: mol_type = other RNA
tccccggcatctccaccaaa

SEQ ID NO: 40500 - RNA, 21 nt, Synthetic Construct
  source 1..21: mol_type = other RNA
tgaagtagtaggttgtatagt

SEQ ID NO: 40501 - RNA, 21 nt, Synthetic Construct
  source 1..21: mol_type = other RNA
tgaagtagtaggttgtatagt

SEQ ID NO: 40502 - RNA, 22 nt, Synthetic Construct
  source 1..22: mol_type = other RNA
taaggtagtagtttgtgctgtt

SEQ ID NO: 40503 - RNA, 22 nt, Synthetic Construct
  source 1..22: mol_type = other RNA
tgaggtagcagattgtatagtt

SEQ ID NO: 40504 - RNA, 22 nt, Synthetic Construct
  source 1..22: mol_type = other RNA
tgaggtagcagattgtatagtt

SEQ ID NO: 40505 - RNA, 22 nt, Synthetic Construct
  source 1..22: mol_type = other RNA
agaggtagtaggttgtgtggtt

SEQ ID NO: 40506 - RNA, 22 nt, Synthetic Construct
  source 1..22: mol_type = other RNA
tggaatgtaaagaagtacgtat

SEQ ID NO: 40507 - RNA, 23 nt, Synthetic Construct
  source 1..23: mol_type = other RNA
ttcaagtaattcaggataggtta

SEQ ID NO: 40508 - RNA, 22 nt, Synthetic Construct
  source 1..22: mol_type = other RNA
tcgtaccatgagtaataatgcg

SEQ ID NO: 40509 - RNA, 21 nt, Synthetic Construct
  source 1..21: mol_type = other RNA
tgaggtagtagtttgtgctga

SEQ ID NO: 40510 - RNA, 19 nt, Synthetic Construct
  source 1..19: mol_type = other RNA
aaccgggcggaaacaccat

SEQ ID NO: 40511 - RNA, 22 nt, Synthetic Construct
  source 1..22: mol_type = other RNA
tattgcaattgtcccggcctgt

SEQ ID NO: 40512 - RNA, 23 nt, Synthetic Construct
  source 1..23: mol_type = other RNA
caaagtgctgttcgcgcaggtag

SEQ ID NO: 40513 - RNA, 22 nt, Synthetic Construct
  source 1..22: mol_type = other RNA
tgtcagtttgtcaaatacccca

SEQ ID NO: 40514 - RNA, 21 nt, Synthetic Construct
  source 1..21: mol_type = other RNA
tgaggggcagagagcgagaca

SEQ ID NO: 40515 - RNA, 21 nt, Synthetic Construct
  source 1..21: mol_type = other RNA
tgaggggcagagagcgagaca

SEQ ID NO: 40516 - RNA, 22 nt, Synthetic Construct
  source 1..22: mol_type = other RNA
ttcaagtaattcaggataggtc

SEQ ID NO: 40517 - RNA, 22 nt, Synthetic Construct
  source 1..22: mol_type = other RNA
ttcaagtaattcaggataggtc

SEQ ID NO: 40518 - RNA, 22 nt, Synthetic Construct
  source 1..22: mol_type = other RNA
tcctgtaccgagctgccccgag

SEQ ID NO: 40519 - RNA, 24 nt, Synthetic Construct
  source 1..24: mol_type = other RNA
tgaggtagtaggttgtgtggtttc

SEQ ID NO: 40520 - RNA, 22 nt, Synthetic Construct
  source 1..22: mol_type = other RNA
tattgaacttgtcccggcctgt

SEQ ID NO: 40521 - RNA, 22 nt, Synthetic Construct
  source 1..22: mol_type = other RNA
tattgaacttgtcccggcctgt

SEQ ID NO: 40522 - RNA, 16 nt, Synthetic Construct
  source 1..16: mol_type = other RNA
ctacagtccgacgatc

SEQ ID NO: 40523 - RNA, 16 nt, Synthetic Construct
  source 1..16: mol_type = other RNA
ctacagtccgacgatc

SEQ ID NO: 40524 - RNA, 22 nt, Synthetic Construct
  source 1..22: mol_type = other RNA
tattgcacttgtcccggcctat

SEQ ID NO: 40525 - RNA, 22 nt, Synthetic Construct
  source 1..22: mol_type = other RNA
gagaactgaattccatgggttg

SEQ ID NO: 40526 - RNA, 22 nt, Synthetic Construct
  source 1..22: mol_type = other RNA
gagaactgaattccatgggttg

SEQ ID NO: 40527 - RNA, 23 nt, Synthetic Construct
  source 1..23: mol_type = other RNA
nggtaatacgacgtacttagtgt

SEQ ID NO: 40528 - RNA, 19 nt, Synthetic Construct
  source 1..19: mol_type = other RNA
cctgtctgaatatgggggg

SEQ ID NO: 40529 - RNA, 19 nt, Synthetic Construct
  source 1..19: mol_type = other RNA
cctgtctgaatatgggggg

SEQ ID NO: 40530 - RNA, 25 nt, Synthetic Construct
  source 1..25: mol_type = other RNA
ctgaggatatgagatcgagacgaca

SEQ ID NO: 40531 - RNA, 20 nt, Synthetic Construct
  source 1..20: mol_type = other RNA
acagtagtctgcacattggt

SEQ ID NO: 40532 - RNA, 20 nt, Synthetic Construct
  source 1..20: mol_type = other RNA
acagtagtctgcacattggt

SEQ ID NO: 40533 - RNA, 35 nt, Synthetic Construct; identical to SEQ ID NO: 2514
  source 1..35: mol_type = other RNA

SEQ ID NO: 40534 - RNA, 35 nt, Synthetic Construct; identical to SEQ ID NO: 2514
  source 1..35: mol_type = other RNA

SEQ ID NO: 40535 - RNA, 22 nt, Synthetic Construct
  source 1..22: mol_type = other RNA
tgaggtagtaggttgtattgtt

SEQ ID NO: 40536 - RNA, 22 nt, Synthetic Construct
  source 1..22: mol_type = other RNA
tagcagcatgtaaatattggcg

SEQ ID NO: 40537 - RNA, 24 nt, Synthetic Construct
  source 1..24: mol_type = other RNA
ggctacattgtctgctgggtttct

SEQ ID NO: 40538 - RNA, 24 nt, Synthetic Construct
  source 1..24: mol_type = other RNA
ggctacattgtctgctgggtttct

SEQ ID NO: 40539 - RNA, 17 nt, Synthetic Construct
  source 1..17: mol_type = other RNA
agaccctgttgagcttg

SEQ ID NO: 40540 - RNA, 17 nt, Synthetic Construct
  source 1..17: mol_type = other RNA
agaccctgttgagcttg

SEQ ID NO: 40541 - RNA, 18 nt, Synthetic Construct
  source 1..18: mol_type = other RNA
atggccgttcttagttgg

SEQ ID NO: 40542 - RNA, 23 nt, Synthetic Construct
  source 1..23: mol_type = other RNA
tgaggtagtaggttgtgcggttt

SEQ ID NO: 40543 - RNA, 16 nt, Synthetic Construct
  source 1..16: mol_type = other RNA
tacctggttgatcctg

SEQ ID NO: 40544 - RNA, 16 nt, Synthetic Construct
  source 1..16: mol_type = other RNA
tacctggttgatcctg

SEQ ID NO: 40545 - RNA, 17 nt, Synthetic Construct
  source 1..17: mol_type = other RNA
cagagacgagtcgacca

SEQ ID NO: 40546 - RNA, 17 nt, Synthetic Construct
  source 1..17: mol_type = other RNA
cagagacgagtcgacca

SEQ ID NO: 40547 - RNA, 22 nt, Synthetic Construct
  source 1..22: mol_type = other RNA
tcctgtaccgagctgccccgag

SEQ ID NO: 40548 - RNA, 22 nt, Synthetic Construct
  source 1..22: mol_type = other RNA
tgtagtgcttcctactttatgg

SEQ ID NO: 40549 - RNA, 22 nt, Synthetic Construct
  source 1..22: mol_type = other RNA
tgtagtgcttcctactttatgg

SEQ ID NO: 40550 - RNA, 31 nt, Synthetic Construct; identical to SEQ ID NO: 758
  source 1..31: mol_type = other RNA

SEQ ID NO: 40551 - RNA, 21 nt, Synthetic Construct
  source 1..21: mol_type = other RNA
tgaggcagtagattgtatagt

SEQ ID NO: 40552 - RNA, 22 nt, Synthetic Construct
  source 1..22: mol_type = other RNA
accactgaccgttgactgtacc

SEQ ID NO: 40553 - RNA, 22 nt, Synthetic Construct
  source 1..22: mol_type = other RNA
accactgaccgttgactgtacc

SEQ ID NO: 40554 - RNA, 27 nt, Synthetic Construct
  source 1..27: mol_type = other RNA
ccgtgtgaaagtaggtcatcgtcaggc

SEQ ID NO: 40555 - RNA, 16 nt, Synthetic Construct
  source 1..16: mol_type = other RNA
gctattgacgaccgta

SEQ ID NO: 40556 - RNA, 20 nt, Synthetic Construct
  source 1..20: mol_type = other RNA
taaggtagtaggttgtgtgg

SEQ ID NO: 40557 - RNA, 20 nt, Synthetic Construct
  source 1..20: mol_type = other RNA
taaggtagtaggttgtgtgg

SEQ ID NO: 40558 - RNA, 23 nt, Synthetic Construct
  source 1..23: mol_type = other RNA
tcttggagtaggtcattgggtgg

SEQ ID NO: 40559 - RNA, 28 nt, Synthetic Construct
  source 1..28: mol_type = other RNA
cccccccactgctaaatttgactggcta

SEQ ID NO: 40560 - RNA, 28 nt, Synthetic Construct
  source 1..28: mol_type = other RNA
cccccccactgctaaatttgactggcta

SEQ ID NO: 40561 - RNA, 30 nt, Synthetic Construct; identical to SEQ ID NO: 1958
  source 1..30: mol_type = other RNA

SEQ ID NO: 40562 - RNA, 22 nt, Synthetic Construct
  source 1..22: mol_type = other RNA
tgaggtagtagtttgagctgtt

SEQ ID NO: 40563 - RNA, 20 nt, Synthetic Construct
  source 1..20: mol_type = other RNA
actgatcgagtcgtcctgcg

SEQ ID NO: 40564 - RNA, 20 nt, Synthetic Construct
  source 1..20: mol_type = other RNA
actgatcgagtcgtcctgcg

SEQ ID NO: 40565 - RNA, 17 nt, Synthetic Construct
  source 1..17: mol_type = other RNA
cagtagctcgaggaaaa

SEQ ID NO: 40566 - RNA, 22 nt, Synthetic Construct
  source 1..22: mol_type = other RNA
catcgggaatgtcgtgtccgcc

SEQ ID NO: 40567 - RNA, 36 nt, Synthetic Construct; identical to SEQ ID NO: 6739
  source 1..36: mol_type = other RNA

SEQ ID NO: 40568 - RNA, 36 nt, Synthetic Construct; identical to SEQ ID NO: 6739
  source 1..36: mol_type = other RNA

SEQ ID NO: 40569 - RNA, 22 nt, Synthetic Construct
  source 1..22: mol_type = other RNA
aatcgtacagggtcatccactt

SEQ ID NO: 40570 - RNA, 22 nt, Synthetic Construct
  source 1..22: mol_type = other RNA
gcctgtactgagctgccccgag

SEQ ID NO: 40571 - RNA, 27 nt, Synthetic Construct
  source 1..27: mol_type = other RNA
ccccccaatgctaaatttgactggctt

SEQ ID NO: 40572 - RNA, 22 nt, Synthetic Construct
  source 1..22: mol_type = other RNA
tattgcgcttgtcccggcctgt

SEQ ID NO: 40573 - RNA, 22 nt, Synthetic Construct
  source 1..22: mol_type = other RNA
tattgcgcttgtcccggcctgt

SEQ ID NO: 40574 - RNA, 22 nt, Synthetic Construct
  source 1..22: mol_type = other RNA
cggctctgggtctgtggggagt

SEQ ID NO: 40575 - RNA, 24 nt, Synthetic Construct
  source 1..24: mol_type = other RNA
tcctgtactgagctgccccgagtt

SEQ ID NO: 40576 - RNA, 22 nt, Synthetic Construct
  source 1..22: mol_type = other RNA
tagcagcacgtaaatattagcg

SEQ ID NO: 40577 - RNA, 22 nt, Synthetic Construct
  source 1..22: mol_type = other RNA
tagcagcacgtaaatattagcg

SEQ ID NO: 40578 - RNA, 18 nt, Synthetic Construct
  source 1..18: mol_type = other RNA
agttggtccgagtgttgt

SEQ ID NO: 40579 - RNA, 28 nt, Synthetic Construct
  source 1..28: mol_type = other RNA
cccccccactgctaaatttgactggctt

SEQ ID NO: 40580 - RNA, 28 nt, Synthetic Construct
  source 1..28: mol_type = other RNA
cccccccactgctaaatttgactggctt

SEQ ID NO: 40581 - RNA, 24 nt, Synthetic Construct
  source 1..24: mol_type = other RNA
ggctacattgtctgctgggtttct

SEQ ID NO: 40582 - RNA, 28 nt, Synthetic Construct
  source 1..28: mol_type = other RNA
tccctgtggtctagtggttaggattcgg

SEQ ID NO: 40583 - RNA, 28 nt, Synthetic Construct
  source 1..28: mol_type = other RNA
tccctgtggtctagtggttaggattcgg

SEQ ID NO: 40584 - RNA, 31 nt, Synthetic Construct; identical to SEQ ID NO: 10138
  source 1..31: mol_type = other RNA

SEQ ID NO: 40585 - RNA, 31 nt, Synthetic Construct; identical to SEQ ID NO: 10138
  source 1..31: mol_type = other RNA

SEQ ID NO: 40586 - RNA, 22 nt, Synthetic Construct
  source 1..22: mol_type = other RNA
tggaatgtaaggaagtatgtat

SEQ ID NO: 40587 - RNA, 22 nt, Synthetic Construct
  source 1..22: mol_type = other RNA
tggaatgtaaggaagtatgtat

SEQ ID NO: 40588 - RNA, 16 nt, Synthetic Construct
  source 1..16: mol_type = other RNA
ctgcctcagcgtcggt

SEQ ID NO: 40589 - RNA, 16 nt, Synthetic Construct
  source 1..16: mol_type = other RNA
ctgcctcagcgtcggt

SEQ ID NO: 40590 - RNA, 22 nt, Synthetic Construct
  source 1..22: mol_type = other RNA
tgaggtagtagattgtatagtc

SEQ ID NO: 40591 - RNA, 31 nt, Synthetic Construct; identical to SEQ ID NO: 955
  source 1..31: mol_type = other RNA

SEQ ID NO: 40592 - RNA, 31 nt, Synthetic Construct; identical to SEQ ID NO: 955
  source 1..31: mol_type = other RNA

SEQ ID NO: 40593 - RNA, 27 nt, Synthetic Construct
  source 1..27: mol_type = other RNA
ccccccactgcaaaatttgactggctt

SEQ ID NO: 40594 - RNA, 21 nt, Synthetic Construct
  source 1..21: mol_type = other RNA
tgaggtagtaggttgtgaggt

SEQ ID NO: 40595 - RNA, 23 nt, Synthetic Construct
  source 1..23: mol_type = other RNA
agcagcgttgtacagggctatga

SEQ ID NO: 40596 - RNA, 23 nt, Synthetic Construct
  source 1..23: mol_type = other RNA
tgtcagtttgccaaataccccaa

SEQ ID NO: 40597 - RNA, 23 nt, Synthetic Construct
  source 1..23: mol_type = other RNA
tgtcagtttgccaaataccccaa

SEQ ID NO: 40598 - RNA, 23 nt, Synthetic Construct
  source 1..23: mol_type = other RNA
cagtgcaatagtattgtcaaagc

SEQ ID NO: 40599 - RNA, 21 nt, Synthetic Construct
  source 1..21: mol_type = other RNA
tgaggtagtaggttgtgtgga

SEQ ID NO: 40600 - RNA, 23 nt, Synthetic Construct
  source 1..23: mol_type = other RNA
agcagcattgtacagggatatga

SEQ ID NO: 40601 - RNA, 22 nt, Synthetic Construct
  source 1..22: mol_type = other RNA
tgtagtgcttcctactttatgg

SEQ ID NO: 40602 - RNA, 21 nt, Synthetic Construct
  source 1..21: mol_type = other RNA
tgaggtagtagattgcatagt

SEQ ID NO: 40603 - RNA, 18 nt, Synthetic Construct
  source 1..18: mol_type = other RNA
gcgaaattccttgtcggg

SEQ ID NO: 40604 - RNA, 22 nt, Synthetic Construct
  source 1..22: mol_type = other RNA
ctatacgacctgctgcctttct

SEQ ID NO: 40605 - RNA, 22 nt, Synthetic Construct
  source 1..22: mol_type = other RNA
taatactgccgggtaatgatgg

SEQ ID NO: 40606 - RNA, 22 nt, Synthetic Construct
  source 1..22: mol_type = other RNA
taatactgccgggtaatgatgg

SEQ ID NO: 40607 - RNA, 24 nt, Synthetic Construct
  source 1..24: mol_type = other RNA
tctcacacagaaatcgcacccgta

SEQ ID NO: 40608 - RNA, 20 nt, Synthetic Construct
  source 1..20: mol_type = other RNA
gcatggccgttcttagttgg

SEQ ID NO: 40609 - RNA, 20 nt, Synthetic Construct
  source 1..20: mol_type = other RNA
gcatggccgttcttagttgg

SEQ ID NO: 40610 - RNA, 21 nt, Synthetic Construct
  source 1..21: mol_type = other RNA
attagtgacgcgcatgaatgg

SEQ ID NO: 40611 - RNA, 21 nt, Synthetic Construct
  source 1..21: mol_type = other RNA
attagtgacgcgcatgaatgg

SEQ ID NO: 40612 - RNA, 35 nt, Synthetic Construct; identical to SEQ ID NO: 2615
  source 1..35: mol_type = other RNA

SEQ ID NO: 40613 - RNA, 22 nt, Synthetic Construct
  source 1..22: mol_type = other RNA
tgaggcagtagtttgtgctgtt

SEQ ID NO: 40614 - RNA, 35 nt, Synthetic Construct; identical to SEQ ID NO: 9871
  source 1..35: mol_type = other RNA

SEQ ID NO: 40615 - RNA, 35 nt, Synthetic Construct; identical to SEQ ID NO: 9871
  source 1..35: mol_type = other RNA

SEQ ID NO: 40616 - RNA, 23 nt, Synthetic Construct
  source 1..23: mol_type = other RNA
acctgtactgagctgccccgaga

SEQ ID NO: 40617 - RNA, 25 nt, Synthetic Construct
  source 1..25: mol_type = other RNA
gactcttagcggtggatcactcggc

SEQ ID NO: 40618 - RNA, 39 nt, Synthetic Construct; identical to SEQ ID NO: 804
  source 1..39: mol_type = other RNA

SEQ ID NO: 40619 - RNA, 23 nt, Synthetic Construct
  source 1..23: mol_type = other RNA
tgaggggcggagagcgagacttt

SEQ ID NO: 40620 - RNA, 23 nt, Synthetic Construct
  source 1..23: mol_type = other RNA
tgaggggcggagagcgagacttt

SEQ ID NO: 40621 - RNA, 22 nt, Synthetic Construct
  source 1..22: mol_type = other RNA
tagaagcacgtaaatattggcg

SEQ ID NO: 40622 - RNA, 22 nt, Synthetic Construct
  source 1..22: mol_type = other RNA
tgaggaagtagattgtatagtt

SEQ ID NO: 40623 - RNA, 22 nt, Synthetic Construct
  source 1..22: mol_type = other RNA
tgaggaagtagattgtatagtt

SEQ ID NO: 40624 - RNA, 23 nt, Synthetic Construct
  source 1..23: mol_type = other RNA
caaagtgctgttcgcgcaggtag

SEQ ID NO: 40625 - RNA, 24 nt, Synthetic Construct
  source 1..24: mol_type = other RNA
tctctcggctcctcgcggctcgct

SEQ ID NO: 40626 - RNA, 20 nt, Synthetic Construct
  source 1..20: mol_type = other RNA
cgaggtagtaggttgtatag

SEQ ID NO: 40627 - RNA, 21 nt, Synthetic Construct
  source 1..21: mol_type = other RNA
tcagtgcatcacagaactttg

SEQ ID NO: 40628 - RNA, 17 nt, Synthetic Construct
  source 1..17: mol_type = other RNA
tggggagtttggctggg

SEQ ID NO: 40629 - RNA, 20 nt, Synthetic Construct
  source 1..20: mol_type = other RNA
tcggaagaaggggtgcctgg

SEQ ID NO: 40630 - RNA, 20 nt, Synthetic Construct
  source 1..20: mol_type = other RNA
tcggaagaaggggtgcctgg

SEQ ID NO: 40631 - RNA, 23 nt, Synthetic Construct
  source 1..23: mol_type = other RNA
cgactcttagcggtggatcactc

SEQ ID NO: 40632 - RNA, 23 nt, Synthetic Construct
  source 1..23: mol_type = other RNA
cgactcttagcggtggatcactc

SEQ ID NO: 40633 - RNA, 23 nt, Synthetic Construct
  source 1..23: mol_type = other RNA
tcagtgcatgacagaacttggga

SEQ ID NO: 40634 - RNA, 22 nt, Synthetic Construct
  source 1..22: mol_type = other RNA
gactatagaactttccccctct

SEQ ID NO: 40635 - RNA, 22 nt, Synthetic Construct
  source 1..22: mol_type = other RNA
gactatagaactttccccctct

SEQ ID NO: 40636 - RNA, 22 nt, Synthetic Construct
  source 1..22: mol_type = other RNA
tgaggtaataggttgtgtggtt

SEQ ID NO: 40637 - RNA, 21 nt, Synthetic Construct
  source 1..21: mol_type = other RNA
tgaggtagtaggtcgtatagt

SEQ ID NO: 40638 - RNA, 21 nt, Synthetic Construct
  source 1..21: mol_type = other RNA
tgaggtagtaggtcgtatagt

SEQ ID NO: 40639 - RNA, 24 nt, Synthetic Construct
  source 1..24: mol_type = other RNA
agtcagtttgtcaaataccccaat

SEQ ID NO: 40640 - RNA, 19 nt, Synthetic Construct
  source 1..19: mol_type = other RNA
caagcggtggatgatgtgg

SEQ ID NO: 40641 - RNA, 25 nt, Synthetic Construct
  source 1..25: mol_type = other RNA
cctcgcgcgattggagcggccgata

SEQ ID NO: 40642 - RNA, 25 nt, Synthetic Construct
  source 1..25: mol_type = other RNA
cctcgcgcgattggagcggccgata

SEQ ID NO: 40643 - RNA, 22 nt, Synthetic Construct
  source 1..22: mol_type = other RNA
taaggtagtagtttgtgctgtt

SEQ ID NO: 40644 - RNA, 22 nt, Synthetic Construct
  source 1..22: mol_type = other RNA
taaggtagtagtttgtgctgtt

SEQ ID NO: 40645 - RNA, 23 nt, Synthetic Construct
  source 1..23: mol_type = other RNA
tgaggtagtaggttgtgtggtct

SEQ ID NO: 40646 - RNA, 23 nt, Synthetic Construct
  source 1..23: mol_type = other RNA
tgaggtagtaggttgtgtggtct

SEQ ID NO: 40647 - RNA, 24 nt, Synthetic Construct
  source 1..24: mol_type = other RNA
tcactgatcgagtcgtcctgcgcg

SEQ ID NO: 40648 - RNA, 24 nt, Synthetic Construct
  source 1..24: mol_type = other RNA
tcactgatcgagtcgtcctgcgcg

SEQ ID NO: 40649 - RNA, 25 nt, Synthetic Construct
  source 1..25: mol_type = other RNA
ttgaggatgtgagatcgagacgaca

SEQ ID NO: 40650 - RNA, 25 nt, Synthetic Construct
  source 1..25: mol_type = other RNA
ttgaggatgtgagatcgagacgaca

SEQ ID NO: 40651 - RNA, 22 nt, Synthetic Construct
  source 1..22: mol_type = other RNA
aagcagcacctaaatattggcg

SEQ ID NO: 40652 - RNA, 22 nt, Synthetic Construct
  source 1..22: mol_type = other RNA
tggaatgtaaggaagtatgtat

SEQ ID NO: 40653 - RNA, 24 nt, Synthetic Construct
  source 1..24: mol_type = other RNA
agcaacattgtctgctgggtttct

SEQ ID NO: 40654 - RNA, 21 nt, Synthetic Construct
  source 1..21: mol_type = other RNA
tgaggtagtaggtcgtatagt

SEQ ID NO: 40655 - RNA, 18 nt, Synthetic Construct
  source 1..18: mol_type = other RNA
accaaggggtcgtgggtt

SEQ ID NO: 40656 - RNA, 19 nt, Synthetic Construct
  source 1..19: mol_type = other RNA
gtccggatcgtagtctgca

SEQ ID NO: 40657 - RNA, 25 nt, Synthetic Construct
  source 1..25: mol_type = other RNA
gttgaattgtggtctgtggacgtgg

SEQ ID NO: 40658 - RNA, 25 nt, Synthetic Construct
  source 1..25: mol_type = other RNA
gttgaattgtggtctgtggacgtgg

SEQ ID NO: 40659 - RNA, 22 nt, Synthetic Construct
  source 1..22: mol_type = other RNA
tcgtaccgtgagtaataatacg

SEQ ID NO: 40660 - RNA, 23 nt, Synthetic Construct
  source 1..23: mol_type = other RNA
tcctgtactgagctgcaccgaga

SEQ ID NO: 40661 - RNA, 23 nt, Synthetic Construct
  source 1..23: mol_type = other RNA
tcctgtactgagctgcaccgaga

SEQ ID NO: 40662 - RNA, 21 nt, Synthetic Construct
  source 1..21: mol_type = other RNA
cccttggggttgtaggaccac

SEQ ID NO: 40663 - RNA, 21 nt, Synthetic Construct
  source 1..21: mol_type = other RNA
cccttggggttgtaggaccac

SEQ ID NO: 40664 - RNA, 21 nt, Synthetic Construct
  source 1..21: mol_type = other RNA
tcctgtactgagctgcccaga

SEQ ID NO: 40665 - RNA, 21 nt, Synthetic Construct
  source 1..21: mol_type = other RNA
tcctgtactgagctgcccaga

SEQ ID NO: 40666 - RNA, 34 nt, Synthetic Construct
  source 1..34: mol_type = other RNA
gcggaagtagctcatttggtagagcacgaccttg

SEQ ID NO: 40667 - RNA, 34 nt, Synthetic Construct; identical to SEQ ID NO: 40666
  source 1..34: mol_type = other RNA

SEQ ID NO: 40668 - RNA, 23 nt, Synthetic Construct
  source 1..23: mol_type = other RNA
caaagtgctgtacgtgcaggtag

SEQ ID NO: 40669 - RNA, 18 nt, Synthetic Construct
  source 1..18: mol_type = other RNA
tcctgtactgagctgccc

SEQ ID NO: 40670 - RNA, 18 nt, Synthetic Construct
  source 1..18: mol_type = other RNA
tcctgtactgagctgccc

SEQ ID NO: 40671 - RNA, 22 nt, Synthetic Construct
  source 1..22: mol_type = other RNA
tggaatgtgaagaagtatgtat

SEQ ID NO: 40672 - RNA, 22 nt, Synthetic Construct
  source 1..22: mol_type = other RNA
tggaatgtgaagaagtatgtat

SEQ ID NO: 40673 - RNA, 22 nt, Synthetic Construct
  source 1..22: mol_type = other RNA
tgaggtagtagtctgtgctgtt

SEQ ID NO: 40674 - RNA, 23 nt, Synthetic Construct
  source 1..23: mol_type = other RNA
agcagcaatgtacagggctatga

SEQ ID NO: 40675 - RNA, 24 nt, Synthetic Construct
  source 1..24: mol_type = other RNA
gaatgttgctcggtgaaccccttt

SEQ ID NO: 40676 - RNA, 27 nt, Synthetic Construct
  source 1..27: mol_type = other RNA
ccccccactactaaatttgactggctt

SEQ ID NO: 40677 - RNA, 27 nt, Synthetic Construct
  source 1..27: mol_type = other RNA
ccccccactactaaatttgactggctt

SEQ ID NO: 40678 - RNA, 22 nt, Synthetic Construct
  source 1..22: mol_type = other RNA
tgaggtagtaggttgtatggta

SEQ ID NO: 40679 - RNA, 22 nt, Synthetic Construct
  source 1..22: mol_type = other RNA
tgaggtagtaggttgtatggta

SEQ ID NO: 40680 - RNA, 22 nt, Synthetic Construct
  source 1..22: mol_type = other RNA
tgaggtagtagtttgtactgtt

SEQ ID NO: 40681 - RNA, 18 nt, Synthetic Construct
  source 1..18: mol_type = other RNA
atggccgggacagagggc

SEQ ID NO: 40682 - RNA, 18 nt, Synthetic Construct
  source 1..18: mol_type = other RNA
atggccgggacagagggc

SEQ ID NO: 40683 - RNA, 16 nt, Synthetic Construct
  source 1..16: mol_type = other RNA
ggataactggcttgtg

SEQ ID NO: 40684 - RNA, 16 nt, Synthetic Construct
  source 1..16: mol_type = other RNA
ggataactggcttgtg

SEQ ID NO: 40685 - RNA, 24 nt, Synthetic Construct
  source 1..24: mol_type = other RNA
tattgcacttgtcccggcctgtaa

SEQ ID NO: 40686 - RNA, 24 nt, Synthetic Construct
  source 1..24: mol_type = other RNA
tattgcacttgtcccggcctgtaa

SEQ ID NO: 40687 - RNA, 22 nt, Synthetic Construct
  source 1..22: mol_type = other RNA
tgaggtagtagtttgtgcggtt

SEQ ID NO: 40688 - RNA, 22 nt, Synthetic Construct
  source 1..22: mol_type = other RNA
tgaggtagtagtttgtgcggtt

SEQ ID NO: 40689 - RNA, 24 nt, Synthetic Construct
  source 1..24: mol_type = other RNA
tctcacacagaaatcgcacccgtc

SEQ ID NO: 40690 - RNA, 22 nt, Synthetic Construct
  source 1..22: mol_type = other RNA
cattattacttttggtacgcga

SEQ ID NO: 40691 - RNA, 22 nt, Synthetic Construct
  source 1..22: mol_type = other RNA
cattattacttttggtacgcga

SEQ ID NO: 40692 - RNA, 29 nt, Synthetic Construct
  source 1..29: mol_type = other RNA
gcattgtggttcagtggtagaattctcgc

SEQ ID NO: 40693 - RNA, 29 nt, Synthetic Construct
  source 1..29: mol_type = other RNA
gcattgtggttcagtggtagaattctcgc

SEQ ID NO: 40694 - RNA, 26 nt, Synthetic Construct
  source 1..26: mol_type = other RNA
agggctgggtcggtcgggctggggcg

SEQ ID NO: 40695 - RNA, 39 nt, Synthetic Construct; identical to SEQ ID NO: 804
  source 1..39: mol_type = other RNA

SEQ ID NO: 40696 - RNA, 28 nt, Synthetic Construct
  source 1..28: mol_type = other RNA
tgttggttcaagcgtgtagtcgtgctct

SEQ ID NO: 40697 - RNA, 22 nt, Synthetic Construct
  source 1..22: mol_type = other RNA
gctcacggaaagagaatgaagc

SEQ ID NO: 40698 - RNA, 22 nt, Synthetic Construct
  source 1..22: mol_type = other RNA
gctcacggaaagagaatgaagc

SEQ ID NO: 40699 - RNA, 27 nt, Synthetic Construct
  source 1..27: mol_type = other RNA
cctcccactgctaaatttgactggctt

SEQ ID NO: 40700 - RNA, 21 nt, Synthetic Construct
  source 1..21: mol_type = other RNA
tgaggggcagagagcgggact

SEQ ID NO: 40701 - RNA, 21 nt, Synthetic Construct
  source 1..21: mol_type = other RNA
tgaggggcagagagcgggact

SEQ ID NO: 40702 - RNA, 25 nt, Synthetic Construct
  source 1..25: mol_type = other RNA
tgtaaacatccccgactggaagctt

SEQ ID NO: 40703 - RNA, 16 nt, Synthetic Construct
  source 1..16: mol_type = other RNA
gactacggccatacca

SEQ ID NO: 40704 - RNA, 22 nt, Synthetic Construct
  source 1..22: mol_type = other RNA
tcctgtactaagctgccccgag

SEQ ID NO: 40705 - RNA, 23 nt, Synthetic Construct
  source 1..23: mol_type = other RNA
ttatcagaatctccaggggtact

SEQ ID NO: 40706 - RNA, 23 nt, Synthetic Construct
  source 1..23: mol_type = other RNA
ttatcagaatctccaggggtact

SEQ ID NO: 40707 - RNA, 23 nt, Synthetic Construct
  source 1..23: mol_type = other RNA
tcgaggagctcacagtctagtaa

SEQ ID NO: 40708 - RNA, 23 nt, Synthetic Construct
  source 1..23: mol_type = other RNA
tcgaggagctcacagtctagtaa

SEQ ID NO: 40709 - RNA, 22 nt, Synthetic Construct
  source 1..22: mol_type = other RNA
tgaggtggtagtttgtgctgtt

SEQ ID NO: 40710 - RNA, 24 nt, Synthetic Construct
  source 1..24: mol_type = other RNA
tgggtaatacgacgtacttagtgt

SEQ ID NO: 40711 - RNA, 24 nt, Synthetic Construct
  source 1..24: mol_type = other RNA
tgggtaatacgacgtacttagtgt

SEQ ID NO: 40712 - RNA, 30 nt, Synthetic Construct; identical to SEQ ID NO: 2274
  source 1..30: mol_type = other RNA

SEQ ID NO: 40713 - RNA, 23 nt, Synthetic Construct
  source 1..23: mol_type = other RNA
ctagcaccatctgaaatcggtta

SEQ ID NO: 40714 - RNA, 26 nt, Synthetic Construct
  source 1..26: mol_type = other RNA
atttccccttggggttgtaggaccac

SEQ ID NO: 40715 - RNA, 26 nt, Synthetic Construct
  source 1..26: mol_type = other RNA
atttccccttggggttgtaggaccac

SEQ ID NO: 40716 - RNA, 21 nt, Synthetic Construct
  source 1..21: mol_type = other RNA
gcagtagtctgcacattggtt

SEQ ID NO: 40717 - RNA, 21 nt, Synthetic Construct
  source 1..21: mol_type = other RNA
gcagtagtctgcacattggtt

SEQ ID NO: 40718 - RNA, 23 nt, Synthetic Construct
  source 1..23: mol_type = other RNA
caaagtgctgttcgtgcaggtgg

SEQ ID NO: 40719 - RNA, 21 nt, Synthetic Construct
  source 1..21: mol_type = other RNA
tgaggtagtaggttgtacagt

SEQ ID NO: 40720 - RNA, 23 nt, Synthetic Construct
  source 1..23: mol_type = other RNA
tcctgtactgagctgacccgaga

SEQ ID NO: 40721 - RNA, 23 nt, Synthetic Construct
  source 1..23: mol_type = other RNA
tcctgtactgagctgacccgaga

SEQ ID NO: 40722 - RNA, 22 nt, Synthetic Construct
  source 1..22: mol_type = other RNA
tagcagcacgtaaatattagcg

SEQ ID NO: 40723 - RNA, 23 nt, Synthetic Construct
  source 1..23: mol_type = other RNA
aatgacacgatcactcccgttgt

SEQ ID NO: 40724 - RNA, 36 nt, Synthetic Construct; identical to SEQ ID NO: 6739
  source 1..36: mol_type = other RNA

SEQ ID NO: 40725 - RNA, 36 nt, Synthetic Construct; identical to SEQ ID NO: 6739
  source 1..36: mol_type = other RNA

SEQ ID NO: 40726 - RNA, 23 nt, Synthetic Construct
  source 1..23: mol_type = other RNA
caaagtgctcatagtgcaggtag

SEQ ID NO: 40727 - RNA, 23 nt, Synthetic Construct
  source 1..23: mol_type = other RNA
caaagtgctcatagtgcaggtag

SEQ ID NO: 40728 - RNA, 22 nt, Synthetic Construct
  source 1..22: mol_type = other RNA
tgaggtagtagtatgtgctgtt

SEQ ID NO: 40729 - RNA, 21 nt, Synthetic Construct
  source 1..21: mol_type = other RNA
tggggtagtagattgtatagt

SEQ ID NO: 40730 - RNA, 21 nt, Synthetic Construct
  source 1..21: mol_type = other RNA
tggggtagtagattgtatagt

SEQ ID NO: 40731 - RNA, 21 nt, Synthetic Construct
  source 1..21: mol_type = other RNA
tgaggtagtaggttgtatagt

SEQ ID NO: 40732 - RNA, 23 nt, Synthetic Construct
  source 1..23: mol_type = other RNA
tgaggtagcaggttgtgtggttt

SEQ ID NO: 40733 - RNA, 27 nt, Synthetic Construct
  source 1..27: mol_type = other RNA
ccccccgctgctaaatttgactggcta

SEQ ID NO: 40734 - RNA, 22 nt, Synthetic Construct
  source 1..22: mol_type = other RNA
caacggaatcccaaaagcagct

SEQ ID NO: 40735 - RNA, 21 nt, Synthetic Construct
  source 1..21: mol_type = other RNA
tcctgtactgagctgcccgag

SEQ ID NO: 40736 - RNA, 23 nt, Synthetic Construct
  source 1..23: mol_type = other RNA
ttaatgctaatcgtgataggggt

SEQ ID NO: 40737 - RNA, 23 nt, Synthetic Construct
  source 1..23: mol_type = other RNA
ttaatgctaatcgtgataggggt

SEQ ID NO: 40738 - RNA, 23 nt, Synthetic Construct
  source 1..23: mol_type = other RNA
agcagcattgtacagggctataa

SEQ ID NO: 40739 - RNA, 16 nt, Synthetic Construct
  source 1..16: mol_type = other RNA
cccaaaggtcgtcggt

SEQ ID NO: 40740 - RNA, 16 nt, Synthetic Construct
  source 1..16: mol_type = other RNA
cccaaaggtcgtcggt

SEQ ID NO: 40741 - RNA, 18 nt, Synthetic Construct
  source 1..18: mol_type = other RNA
gtcaggatggccgagcgg

SEQ ID NO: 40742 - RNA, 22 nt, Synthetic Construct
  source 1..22: mol_type = other RNA
tatcagcacgtaaatattggcg

SEQ ID NO: 40743 - RNA, 22 nt, Synthetic Construct
  source 1..22: mol_type = other RNA
tatcagcacgtaaatattggcg

SEQ ID NO: 40744 - RNA, 22 nt, Synthetic Construct
  source 1..22: mol_type = other RNA
tgaggtagtaggttgagtggtt

SEQ ID NO: 40745 - RNA, 22 nt, Synthetic Construct
  source 1..22: mol_type = other RNA
tgaggtagtaggttgagtggtt

SEQ ID NO: 40746 - RNA, 26 nt, Synthetic Construct
  source 1..26: mol_type = other RNA
ggcgcttgagagaactctggagaagg

SEQ ID NO: 40747 - RNA, 26 nt, Synthetic Construct
  source 1..26: mol_type = other RNA
ggcgcttgagagaactctggagaagg

SEQ ID NO: 40748 - RNA, 22 nt, Synthetic Construct
  source 1..22: mol_type = other RNA
tgaggtagtagtctgtgctgtt

SEQ ID NO: 40749 - RNA, 22 nt, Synthetic Construct
  source 1..22: mol_type = other RNA
tgaggtagtagtctgtgctgtt

SEQ ID NO: 40750 - RNA, 22 nt, Synthetic Construct
  source 1..22: mol_type = other RNA
tgaggtggtagtttgtgctgtt

SEQ ID NO: 40751 - RNA, 23 nt, Synthetic Construct
  source 1..23: mol_type = other RNA
tcggaatcgctagtaatcgcgga

SEQ ID NO: 40752 - RNA, 21 nt, Synthetic Construct
  source 1..21: mol_type = other RNA
gtagcgaaattccttgtcggg

SEQ ID NO: 40753 - RNA, 23 nt, Synthetic Construct
  source 1..23: mol_type = other RNA
tcctatactgagctgccccgaga

SEQ ID NO: 40754 - RNA, 23 nt, Synthetic Construct
  source 1..23: mol_type = other RNA
tcctatactgagctgccccgaga

SEQ ID NO: 40755 - RNA, 23 nt, Synthetic Construct
  source 1..23: mol_type = other RNA
caaagtgctgttcgtgcaggtaa

SEQ ID NO: 40756 - RNA, 22 nt, Synthetic Construct
  source 1..22: mol_type = other RNA
tagctgcacgtaaatattggcg

SEQ ID NO: 40757 - RNA, 22 nt, Synthetic Construct
  source 1..22: mol_type = other RNA
tagctgcacgtaaatattggcg

SEQ ID NO: 40758 - RNA, 22 nt, Synthetic Construct
  source 1..22: mol_type = other RNA
cttaacttgaccgctctgacca

SEQ ID NO: 40759 - RNA, 22 nt, Synthetic Construct
  source 1..22: mol_type = other RNA
cgaggtagtagtttgtgctgtt

SEQ ID NO: 40760 - RNA, 23 nt, Synthetic Construct
  source 1..23: mol_type = other RNA
tctttggttatctagctgtatga

SEQ ID NO: 40761 - RNA, 23 nt, Synthetic Construct
  source 1..23: mol_type = other RNA
tctttggttatctagctgtatga

SEQ ID NO: 40762 - RNA, 17 nt, Synthetic Construct
  source 1..17: mol_type = other RNA
gaagttgaccgcctggg

SEQ ID NO: 40763 - RNA, 17 nt, Synthetic Construct
  source 1..17: mol_type = other RNA
gaagttgaccgcctggg

SEQ ID NO: 40764 - RNA, 29 nt, Synthetic Construct
  source 1..29: mol_type = other RNA
ttacaggggttcgaatcccctaggggacg

SEQ ID NO: 40765 - RNA, 21 nt, Synthetic Construct
  source 1..21: mol_type = other RNA
tcctgtactgagctgccacga

SEQ ID NO: 40766 - RNA, 21 nt, Synthetic Construct
  source 1..21: mol_type = other RNA
tcctgtactgagctgccacga

SEQ ID NO: 40767 - RNA, 20 nt, Synthetic Construct
  source 1..20: mol_type = other RNA
acagtagtctgcacattggt

SEQ ID NO: 40768 - RNA, 20 nt, Synthetic Construct
  source 1..20: mol_type = other RNA
acagtagtctgcacattggt

SEQ ID NO: 40769 - RNA, 20 nt, Synthetic Construct
  source 1..20: mol_type = other RNA
caggacagtgaaacgagtca

SEQ ID NO: 40770 - RNA, 20 nt, Synthetic Construct
  source 1..20: mol_type = other RNA
tgaggtagtaggttgtgtga

SEQ ID NO: 40771 - RNA, 23 nt, Synthetic Construct
  source 1..23: mol_type = other RNA
cctcgcgcgattggagcggccga

SEQ ID NO: 40772 - RNA, 23 nt, Synthetic Construct
  source 1..23: mol_type = other RNA
cctcgcgcgattggagcggccga

SEQ ID NO: 40773 - RNA, 21 nt, Synthetic Construct
  source 1..21: mol_type = other RNA
agaggtagtaggttgtgtggt

SEQ ID NO: 40774 - RNA, 22 nt, Synthetic Construct
  source 1..22: mol_type = other RNA
tgtagtgtctcctactttatgg

SEQ ID NO: 40775 - RNA, 23 nt, Synthetic Construct
  source 1..23: mol_type = other RNA
tccctgtcctccaggagctcacg

SEQ ID NO: 40776 - RNA, 22 nt, Synthetic Construct
  source 1..22: mol_type = other RNA
tagcagcacgtaaatattggca

SEQ ID NO: 40777 - RNA, 22 nt, Synthetic Construct
  source 1..22: mol_type = other RNA
tagcagcacgtaaatattggca

SEQ ID NO: 40778 - RNA, 26 nt, Synthetic Construct
  source 1..26: mol_type = other RNA
tgtaaacatccttgactggaagcttt

SEQ ID NO: 40779 - RNA, 22 nt, Synthetic Construct
  source 1..22: mol_type = other RNA
tagcagcacgtaaatattgccg

SEQ ID NO: 40780 - RNA, 22 nt, Synthetic Construct
  source 1..22: mol_type = other RNA
tagcagcacgtaaatattgccg

SEQ ID NO: 40781 - RNA, 22 nt, Synthetic Construct
  source 1..22: mol_type = other RNA
tagcagcacgtaaatactggcg

SEQ ID NO: 40782 - RNA, 22 nt, Synthetic Construct
  source 1..22: mol_type = other RNA
tagcagcacgtaaatactggcg

SEQ ID NO: 40783 - RNA, 23 nt, Synthetic Construct
  source 1..23: mol_type = other RNA
nggtaatacgacgtacttagtgt

SEQ ID NO: 40784 - RNA, 23 nt, Synthetic Construct
  source 1..23: mol_type = other RNA
nggtaatacgacgtacttagtgt

SEQ ID NO: 40785 - RNA, 20 nt, Synthetic Construct
  source 1..20: mol_type = other RNA
acagtagtctgcacattggt

SEQ ID NO: 40786 - RNA, 35 nt, Synthetic Construct; identical to SEQ ID NO: 757
  source 1..35: mol_type = other RNA

SEQ ID NO: 40787 - RNA, 35 nt, Synthetic Construct; identical to SEQ ID NO: 757
  source 1..35: mol_type = other RNA

SEQ ID NO: 40788 - RNA, 21 nt, Synthetic Construct
  source 1..21: mol_type = other RNA
tgaggcagtagattgtatagt

SEQ ID NO: 40789 - RNA, 21 nt, Synthetic Construct
  source 1..21: mol_type = other RNA
tgaggcagtagattgtatagt

SEQ ID NO: 40790 - RNA, 24 nt, Synthetic Construct
  source 1..24: mol_type = other RNA
tgtaaacatccccgaccggaagct

SEQ ID NO: 40791 - RNA, 24 nt, Synthetic Construct
  source 1..24: mol_type = other RNA
tgtaaacatccccgaccggaagct

SEQ ID NO: 40792 - RNA, 21 nt, Synthetic Construct
  source 1..21: mol_type = other RNA
atcgggaatgtcgtgtccgcc

SEQ ID NO: 40793 - RNA, 21 nt, Synthetic Construct
  source 1..21: mol_type = other RNA
atcgggaatgtcgtgtccgcc

SEQ ID NO: 40794 - RNA, 22 nt, Synthetic Construct
  source 1..22: mol_type = other RNA
tagcagcgcgtaaatattggcg

SEQ ID NO: 40795 - RNA, 32 nt, Synthetic Construct; identical to SEQ ID NO: 8270
  source 1..32: mol_type = other RNA

SEQ ID NO: 40796 - RNA, 32 nt, Synthetic Construct; identical to SEQ ID NO: 8270
  source 1..32: mol_type = other RNA

SEQ ID NO: 40797 - RNA, 17 nt, Synthetic Construct
  source 1..17: mol_type = other RNA
acagtcaggatgttggc

SEQ ID NO: 40798 - RNA, 17 nt, Synthetic Construct
  source 1..17: mol_type = other RNA
acagtcaggatgttggc

SEQ ID NO: 40799 - RNA, 22 nt, Synthetic Construct
  source 1..22: mol_type = other RNA
tcgtaccgtgagcaataatgcg

SEQ ID NO: 40800 - RNA, 25 nt, Synthetic Construct
  source 1..25: mol_type = other RNA
tcttggagtaggtcattgggtgttt

SEQ ID NO: 40801 - RNA, 22 nt, Synthetic Construct
  source 1..22: mol_type = other RNA
tcctgtacagagctgccccgag

SEQ ID NO: 40802 - RNA, 25 nt, Synthetic Construct
  source 1..25: mol_type = other RNA
ttgaggatgtgagatcgagacgaca

SEQ ID NO: 40803 - RNA, 25 nt, Synthetic Construct
  source 1..25: mol_type = other RNA
ttgaggatgtgagatcgagacgaca

SEQ ID NO: 40804 - RNA, 23 nt, Synthetic Construct
  source 1..23: mol_type = other RNA
ggctacattgtctgctgggtttc

SEQ ID NO: 40805 - RNA, 18 nt, Synthetic Construct
  source 1..18: mol_type = other RNA
ggtagcgtggccgagtgg

SEQ ID NO: 40806 - RNA, 18 nt, Synthetic Construct
  source 1..18: mol_type = other RNA
ggtagcgtggccgagtgg

SEQ ID NO: 40807 - RNA, 22 nt, Synthetic Construct
  source 1..22: mol_type = other RNA
tgaggtagcaggttgtatagtt

SEQ ID NO: 40808 - RNA, 22 nt, Synthetic Construct
  source 1..22: mol_type = other RNA
tgaggtagcaggttgtatagtt

SEQ ID NO: 40809 - RNA, 24 nt, Synthetic Construct
  source 1..24: mol_type = other RNA
tgagaactgaattccatgggttat

SEQ ID NO: 40810 - RNA, 24 nt, Synthetic Construct
  source 1..24: mol_type = other RNA
tgagaactgaattccatgggttat

SEQ ID NO: 40811 - RNA, 21 nt, Synthetic Construct
  source 1..21: mol_type = other RNA
tgaggcagtagattgtatagt

SEQ ID NO: 40812 - RNA, 18 nt, Synthetic Construct
  source 1..18: mol_type = other RNA
cataaagtagaaagcact

SEQ ID NO: 40813 - RNA, 18 nt, Synthetic Construct
  source 1..18: mol_type = other RNA
cataaagtagaaagcact

SEQ ID NO: 40814 - RNA, 22 nt, Synthetic Construct
  source 1..22: mol_type = other RNA
tgtaaacatcctcgactggaag

SEQ ID NO: 40815 - RNA, 22 nt, Synthetic Construct
  source 1..22: mol_type = other RNA
tgtcagtttgtcaaatacccct

SEQ ID NO: 40816 - RNA, 21 nt, Synthetic Construct
  source 1..21: mol_type = other RNA
caacggaatcccaaaagcagc

SEQ ID NO: 40817 - RNA, 21 nt, Synthetic Construct
  source 1..21: mol_type = other RNA
caacggaatcccaaaagcagc

SEQ ID NO: 40818 - RNA, 27 nt, Synthetic Construct
  source 1..27: mol_type = other RNA
ccccccacagctaaatttgactggcta

SEQ ID NO: 40819 - RNA, 27 nt, Synthetic Construct
  source 1..27: mol_type = other RNA
ccccccacagctaaatttgactggcta

SEQ ID NO: 40820 - RNA, 18 nt, Synthetic Construct
  source 1..18: mol_type = other RNA
cagcactctgcaaagacg

SEQ ID NO: 40821 - RNA, 28 nt, Synthetic Construct
  source 1..28: mol_type = other RNA
tccctggtggtctagtggttaggattcg

SEQ ID NO: 40822 - RNA, 28 nt, Synthetic Construct
  source 1..28: mol_type = other RNA
tccctggtggtctagtggttaggattcg

SEQ ID NO: 40823 - RNA, 20 nt, Synthetic Construct
  source 1..20: mol_type = other RNA
gagtaggacgttgccaggtt

SEQ ID NO: 40824 - RNA, 20 nt, Synthetic Construct
  source 1..20: mol_type = other RNA
gagtaggacgttgccaggtt

SEQ ID NO: 40825 - RNA, 21 nt, Synthetic Construct
  source 1..21: mol_type = other RNA
tagcagcacgtaatattggcg

SEQ ID NO: 40826 - RNA, 32 nt, Synthetic Construct; identical to SEQ ID NO: 1675
  source 1..32: mol_type = other RNA

SEQ ID NO: 40827 - RNA, 32 nt, Synthetic Construct; identical to SEQ ID NO: 1675
  source 1..32: mol_type = other RNA

SEQ ID NO: 40828 - RNA, 15 nt, Synthetic Construct
  source 1..15: mol_type = other RNA
tagagtagggcggga

SEQ ID NO: 40829 - RNA, 15 nt, Synthetic Construct
  source 1..15: mol_type = other RNA
tagagtagggcggga

SEQ ID NO: 40830 - RNA, 19 nt, Synthetic Construct
  source 1..19: mol_type = other RNA
tagcagcacgtaaatattg

SEQ ID NO: 40831 - RNA, 19 nt, Synthetic Construct
  source 1..19: mol_type = other RNA
gcgccgatgatagtgcgga

SEQ ID NO: 40832 - RNA, 19 nt, Synthetic Construct
  source 1..19: mol_type = other RNA
gcgccgatgatagtgcgga

SEQ ID NO: 40833 - RNA, 23 nt, Synthetic Construct
  source 1..23: mol_type = other RNA
tggtaatacgacgtacttagcgt

SEQ ID NO: 40834 - RNA, 22 nt, Synthetic Construct
  source 1..22: mol_type = other RNA
ttaaagtaattcaggataggtt

SEQ ID NO: 40835 - RNA, 21 nt, Synthetic Construct
  source 1..21: mol_type = other RNA
taactccttaagcgaatctgc

SEQ ID NO: 40836 - RNA, 21 nt, Synthetic Construct
  source 1..21: mol_type = other RNA
taactccttaagcgaatctgc

SEQ ID NO: 40837 - RNA, 21 nt, Synthetic Construct
  source 1..21: mol_type = other RNA
tcaggctcagtcccctcccga

SEQ ID NO: 40838 - RNA, 21 nt, Synthetic Construct
  source 1..21: mol_type = other RNA
tcaggctcagtcccctcccga

SEQ ID NO: 40839 - RNA, 21 nt, Synthetic Construct
  source 1..21: mol_type = other RNA
tgaggtagtaggttgtgtggt

SEQ ID NO: 40840 - RNA, 22 nt, Synthetic Construct
  source 1..22: mol_type = other RNA
tgaggtagtagattgtatagct

SEQ ID NO: 40841 - RNA, 22 nt, Synthetic Construct
  source 1..22: mol_type = other RNA
tgaggtagtagattgtatagct

SEQ ID NO: 40842 - RNA, 22 nt, Synthetic Construct
  source 1..22: mol_type = other RNA
tagcagcacgtaaatgttggcg

SEQ ID NO: 40843 - RNA, 22 nt, Synthetic Construct
  source 1..22: mol_type = other RNA
tagcagcacgtaaatgttggcg

SEQ ID NO: 40844 - RNA, 22 nt, Synthetic Construct
  source 1..22: mol_type = other RNA
tgaggtagtagattgtatagct

SEQ ID NO: 40845 - RNA, 22 nt, Synthetic Construct
  source 1..22: mol_type = other RNA
tgaggtagtagattgtatagct

SEQ ID NO: 40846 - RNA, 27 nt, Synthetic Construct
  source 1..27: mol_type = other RNA
cggtataccgaagctctaggtgcggca

SEQ ID NO: 40847 - RNA, 27 nt, Synthetic Construct
  source 1..27: mol_type = other RNA
cggtataccgaagctctaggtgcggca

SEQ ID NO: 40848 - RNA, 20 nt, Synthetic Construct
  source 1..20: mol_type = other RNA
acgcctgtctgagcgtcgct

SEQ ID NO: 40849 - RNA, 22 nt, Synthetic Construct
  source 1..22: mol_type = other RNA
tgaggtagtaggtagtgtggtt

SEQ ID NO: 40850 - RNA, 22 nt, Synthetic Construct
  source 1..22: mol_type = other RNA
tgaggtagtaggtagtgtggtt

SEQ ID NO: 40851 - RNA, 30 nt, Synthetic Construct; identical to SEQ ID NO: 1236
  source 1..30: mol_type = other RNA

SEQ ID NO: 40852 - RNA, 25 nt, Synthetic Construct
  source 1..25: mol_type = other RNA
ttgaggatacgagatcgagacgaca

SEQ ID NO: 40853 - RNA, 25 nt, Synthetic Construct
  source 1..25: mol_type = other RNA
ttgaggatacgagatcgagacgaca

SEQ ID NO: 40854 - RNA, 21 nt, Synthetic Construct
  source 1..21: mol_type = other RNA
tgaggtagcagattgtatagt

SEQ ID NO: 40855 - RNA, 22 nt, Synthetic Construct
  source 1..22: mol_type = other RNA
tgaggtaataggttgtatagtt

SEQ ID NO: 40856 - RNA, 22 nt, Synthetic Construct
  source 1..22: mol_type = other RNA
tgaggtagtaggttatatagtt

SEQ ID NO: 40857 - RNA, 22 nt, Synthetic Construct
  source 1..22: mol_type = other RNA
tgaggtagtagtctgtgctgtt

SEQ ID NO: 40858 - RNA, 21 nt, Synthetic Construct
  source 1..21: mol_type = other RNA
ggaggtagtagattgtatagt

SEQ ID NO: 40859 - RNA, 21 nt, Synthetic Construct
  source 1..21: mol_type = other RNA
ggaggtagtagattgtatagt

SEQ ID NO: 40860 - RNA, 28 nt, Synthetic Construct
  source 1..28: mol_type = other RNA
ccccccactgctaaatttgaccggcttt

SEQ ID NO: 40861 - RNA, 28 nt, Synthetic Construct
  source 1..28: mol_type = other RNA
ccccccactgctaaatttgaccggcttt

SEQ ID NO: 40862 - RNA, 22 nt, Synthetic Construct
  source 1..22: mol_type = other RNA
tgaggtagtagatcgtatagtt

SEQ ID NO: 40863 - RNA, 22 nt, Synthetic Construct
  source 1..22: mol_type = other RNA
tgaggtagtagatcgtatagtt

SEQ ID NO: 40864 - RNA, 22 nt, Synthetic Construct
  source 1..22: mol_type = other RNA
ccactgccccaggtgctgctgg

SEQ ID NO: 40865 - RNA, 23 nt, Synthetic Construct
  source 1..23: mol_type = other RNA
actcggcgtggcgtcggtcgtgt

SEQ ID NO: 40866 - RNA, 23 nt, Synthetic Construct
  source 1..23: mol_type = other RNA
actcggcgtggcgtcggtcgtgt

SEQ ID NO: 40867 - RNA, 22 nt, Synthetic Construct
  source 1..22: mol_type = other RNA
ccactgccccaggtgctgctgg

SEQ ID NO: 40868 - RNA, 22 nt, Synthetic Construct
  source 1..22: mol_type = other RNA
ccactgccccaggtgctgctgg

SEQ ID NO: 40869 - RNA, 22 nt, Synthetic Construct
  source 1..22: mol_type = other RNA
tgaggtagtaggttgtgtggtt

SEQ ID NO: 40870 - RNA, 21 nt, Synthetic Construct
  source 1..21: mol_type = other RNA
gctaaacctagccccaaaccc

SEQ ID NO: 40871 - RNA, 21 nt, Synthetic Construct
  source 1..21: mol_type = other RNA
tggagtgtgacaatggtgttc

SEQ ID NO: 40872 - RNA, 24 nt, Synthetic Construct
  source 1..24: mol_type = other RNA
tagcagcacgtaaatattggcgtt

SEQ ID NO: 40873 - RNA, 20 nt, Synthetic Construct
  source 1..20: mol_type = other RNA
tgaggtagtaggttgtgtgg

SEQ ID NO: 40874 - RNA, 20 nt, Synthetic Construct
  source 1..20: mol_type = other RNA
tgaggtagtaggttgtgtgg

SEQ ID NO: 40875 - RNA, 21 nt, Synthetic Construct
  source 1..21: mol_type = other RNA
tggaatgtaaagaagtatgta

SEQ ID NO: 40876 - RNA, 21 nt, Synthetic Construct
  source 1..21: mol_type = other RNA
ctgtactgagctgccccgaga

SEQ ID NO: 40877 - RNA, 21 nt, Synthetic Construct
  source 1..21: mol_type = other RNA
ctgtactgagctgccccgaga

SEQ ID NO: 40878 - RNA, 27 nt, Synthetic Construct
  source 1..27: mol_type = other RNA
gactcttagcggtggatcactcggctc

SEQ ID NO: 40879 - RNA, 27 nt, Synthetic Construct
  source 1..27: mol_type = other RNA
gactcttagcggtggatcactcggctc

SEQ ID NO: 40880 - RNA, 23 nt, Synthetic Construct
  source 1..23: mol_type = other RNA
cagtgcaatgttaaaagggcatt

SEQ ID NO: 40881 - RNA, 23 nt, Synthetic Construct
  source 1..23: mol_type = other RNA
acctgtactgagctgccccgagt

SEQ ID NO: 40882 - RNA, 23 nt, Synthetic Construct
  source 1..23: mol_type = other RNA
acctgtactgagctgccccgagt

SEQ ID NO: 40883 - RNA, 22 nt, Synthetic Construct
  source 1..22: mol_type = other RNA
tggcagcacgtaaatattggcg

SEQ ID NO: 40884 - RNA, 22 nt, Synthetic Construct
  source 1..22: mol_type = other RNA
tggcagcacgtaaatattggcg

SEQ ID NO: 40885 - RNA, 22 nt, Synthetic Construct
  source 1..22: mol_type = other RNA
atcgggaatgtcgtgtccgccc

SEQ ID NO: 40886 - RNA, 22 nt, Synthetic Construct
  source 1..22: mol_type = other RNA
attgcacttgtcccggcctgta

SEQ ID NO: 40887 - RNA, 22 nt, Synthetic Construct
  source 1..22: mol_type = other RNA
attgcacttgtcccggcctgta

SEQ ID NO: 40888 - RNA, 21 nt, Synthetic Construct
  source 1..21: mol_type = other RNA
cgaggtagtaggttgtatagt

SEQ ID NO: 40889 - RNA, 22 nt, Synthetic Construct
  source 1..22: mol_type = other RNA
tggaatgtgaagaagtatgtat

SEQ ID NO: 40890 - RNA, 24 nt, Synthetic Construct
  source 1..24: mol_type = other RNA
aaaagctgggttgagagggcgaaa

SEQ ID NO: 40891 - RNA, 20 nt, Synthetic Construct
  source 1..20: mol_type = other RNA
caaagaattctccttttggg

SEQ ID NO: 40892 - RNA, 25 nt, Synthetic Construct
  source 1..25: mol_type = other RNA
aaaccgttaccattactgagtttag

SEQ ID NO: 40893 - RNA, 22 nt, Synthetic Construct
  source 1..22: mol_type = other RNA
ngaggtagtagattgtatagtt

SEQ ID NO: 40894 - RNA, 22 nt, Synthetic Construct
  source 1..22: mol_type = other RNA
ctggctagggaaaatgattgga

SEQ ID NO: 40895 - RNA, 22 nt, Synthetic Construct
  source 1..22: mol_type = other RNA
tgaggtggtaggttgtatagtt

SEQ ID NO: 40896 - RNA, 22 nt, Synthetic Construct
  source 1..22: mol_type = other RNA
tgaggtggtaggttgtatagtt

SEQ ID NO: 40897 - RNA, 23 nt, Synthetic Construct
  source 1..23: mol_type = other RNA
caaagagctgttcgtgcaggtag

SEQ ID NO: 40898 - RNA, 15 nt, Synthetic Construct
  source 1..15: mol_type = other RNA
agttgaccgcctggg

SEQ ID NO: 40899 - RNA, 23 nt, Synthetic Construct
  source 1..23: mol_type = other RNA
tggagtgtgacaatggtgtttgg

SEQ ID NO: 40900 - RNA, 23 nt, Synthetic Construct
  source 1..23: mol_type = other RNA
tggagtgtgacaatggtgtttgg

SEQ ID NO: 40901 - RNA, 21 nt, Synthetic Construct
  source 1..21: mol_type = other RNA
tgaggtagtagactgtatagt

SEQ ID NO: 40902 - RNA, 18 nt, Synthetic Construct
  source 1..18: mol_type = other RNA
gggagtatggtcgcaagg

SEQ ID NO: 40903 - RNA, 29 nt, Synthetic Construct
  source 1..29: mol_type = other RNA
gcgccgctggtgtagtggtatcatgcaag

SEQ ID NO: 40904 - RNA, 29 nt, Synthetic Construct
  source 1..29: mol_type = other RNA
gcgccgctggtgtagtggtatcatgcaag

SEQ ID NO: 40905 - RNA, 26 nt, Synthetic Construct
  source 1..26: mol_type = other RNA
tgaggtagtaggttgtgtggtttttt

SEQ ID NO: 40906 - RNA, 23 nt, Synthetic Construct
  source 1..23: mol_type = other RNA
tgaggtagtaggttgtatggttt

SEQ ID NO: 40907 - RNA, 23 nt, Synthetic Construct
  source 1..23: mol_type = other RNA
tgaggtagtaggttgtatggttt

SEQ ID NO: 40908 - RNA, 22 nt, Synthetic Construct
  source 1..22: mol_type = other RNA
tgaggtagtaggttgtgtggat

SEQ ID NO: 40909 - RNA, 23 nt, Synthetic Construct
  source 1..23: mol_type = other RNA
tgaggtagtaggttgtgcggttt

SEQ ID NO: 40910 - RNA, 23 nt, Synthetic Construct
  source 1..23: mol_type = other RNA
tgaggtagtaggttgtgcggttt

SEQ ID NO: 40911 - RNA, 22 nt, Synthetic Construct
  source 1..22: mol_type = other RNA
tgtagtgtctcctactttatgg

SEQ ID NO: 40912 - RNA, 22 nt, Synthetic Construct
  source 1..22: mol_type = other RNA
tgtagtgtctcctactttatgg

SEQ ID NO: 40913 - RNA, 27 nt, Synthetic Construct
  source 1..27: mol_type = other RNA
tcctgagtagctcagcggcagagcggg

SEQ ID NO: 40914 - RNA, 27 nt, Synthetic Construct
  source 1..27: mol_type = other RNA
tcctgagtagctcagcggcagagcggg

SEQ ID NO: 40915 - RNA, 21 nt, Synthetic Construct
  source 1..21: mol_type = other RNA
tgaggtagtagattgtatggt

SEQ ID NO: 40916 - RNA, 22 nt, Synthetic Construct
  source 1..22: mol_type = other RNA
tagcagcacatcatggtttaca

SEQ ID NO: 40917 - RNA, 22 nt, Synthetic Construct
  source 1..22: mol_type = other RNA
tagcagcacatcatggtttaca

SEQ ID NO: 40918 - RNA, 22 nt, Synthetic Construct
  source 1..22: mol_type = other RNA
tgaggtagtagtttgtgctggt

SEQ ID NO: 40919 - RNA, 32 nt, Synthetic Construct; identical to SEQ ID NO: 770
  source 1..32: mol_type = other RNA

SEQ ID NO: 40920 - RNA, 28 nt, Synthetic Construct
  source 1..28: mol_type = other RNA
cccccccactgctaaatttgactggctt

SEQ ID NO: 40921 - RNA, 28 nt, Synthetic Construct
  source 1..28: mol_type = other RNA
cccccccactgctaaatttgactggctt

SEQ ID NO: 40922 - RNA, 18 nt, Synthetic Construct
  source 1..18: mol_type = other RNA
atcccactcctgacacca

SEQ ID NO: 40923 - RNA, 18 nt, Synthetic Construct
  source 1..18: mol_type = other RNA
atcccactcctgacacca

SEQ ID NO: 40924 - RNA, 23 nt, Synthetic Construct
  source 1..23: mol_type = other RNA
caaagtgctgttcgtgcaggtaa

SEQ ID NO: 40925 - RNA, 23 nt, Synthetic Construct
  source 1..23: mol_type = other RNA
caaagtgctgttcgtgcaggtaa

SEQ ID NO: 40926 - RNA, 22 nt, Synthetic Construct
  source 1..22: mol_type = other RNA
ngaggtagtaggttgtatagtt

SEQ ID NO: 40927 - RNA, 15 nt, Synthetic Construct
  source 1..15: mol_type = other RNA
tcctgacggccatag

SEQ ID NO: 40928 - RNA, 22 nt, Synthetic Construct
  source 1..22: mol_type = other RNA
tgaggtagtaaattgtatagtt

SEQ ID NO: 40929 - RNA, 24 nt, Synthetic Construct
  source 1..24: mol_type = other RNA
tgtaaacatccccgactggaggct

SEQ ID NO: 40930 - RNA, 22 nt, Synthetic Construct
  source 1..22: mol_type = other RNA
ttgcagcacgtaaatattggcg

SEQ ID NO: 40931 - RNA, 22 nt, Synthetic Construct
  source 1..22: mol_type = other RNA
tattgcacttgtcccggcctat

SEQ ID NO: 40932 - RNA, 22 nt, Synthetic Construct
  source 1..22: mol_type = other RNA
tattgcacttgtcccggcctat

SEQ ID NO: 40933 - RNA, 31 nt, Synthetic Construct; identical to SEQ ID NO: 2278
  source 1..31: mol_type = other RNA

SEQ ID NO: 40934 - RNA, 22 nt, Synthetic Construct
  source 1..22: mol_type = other RNA
tcgtatcgtgagtaataatgcg

SEQ ID NO: 40935 - RNA, 22 nt, Synthetic Construct
  source 1..22: mol_type = other RNA
tcgtatcgtgagtaataatgcg

SEQ ID NO: 40936 - RNA, 22 nt, Synthetic Construct
  source 1..22: mol_type = other RNA
tggagtgtgacaatggtgcttg

SEQ ID NO: 40937 - RNA, 21 nt, Synthetic Construct
  source 1..21: mol_type = other RNA
tgaggtagtaggttgtgtgat

SEQ ID NO: 40938 - RNA, 25 nt, Synthetic Construct
  source 1..25: mol_type = other RNA
caaagtgctgttcgtgcaggtagtt

SEQ ID NO: 40939 - RNA, 19 nt, Synthetic Construct
  source 1..19: mol_type = other RNA
tagcttatcagactgatgt

SEQ ID NO: 40940 - RNA, 22 nt, Synthetic Construct
  source 1..22: mol_type = other RNA
acctgtactgagctgccccgag

SEQ ID NO: 40941 - RNA, 16 nt, Synthetic Construct
  source 1..16: mol_type = other RNA
agcaagtcgaacggta

SEQ ID NO: 40942 - RNA, 30 nt, Synthetic Construct; identical to SEQ ID NO: 1236
  source 1..30: mol_type = other RNA

SEQ ID NO: 40943 - RNA, 24 nt, Synthetic Construct
  source 1..24: mol_type = other RNA
cgaatgttgctcggtgaacccctt

SEQ ID NO: 40944 - RNA, 18 nt, Synthetic Construct
  source 1..18: mol_type = other RNA
ggtagcgtggccgagtgg

SEQ ID NO: 40945 - RNA, 22 nt, Synthetic Construct
  source 1..22: mol_type = other RNA
tattgcacttgtcccagcctgt

SEQ ID NO: 40946 - RNA, 22 nt, Synthetic Construct
  source 1..22: mol_type = other RNA
tattgcacttgtcccagcctgt

SEQ ID NO: 40947 - RNA, 21 nt, Synthetic Construct
  source 1..21: mol_type = other RNA
atggatttttggagcagggag

SEQ ID NO: 40948 - RNA, 21 nt, Synthetic Construct
  source 1..21: mol_type = other RNA
gggagtgtgacaatggtgttt

SEQ ID NO: 40949 - RNA, 21 nt, Synthetic Construct
  source 1..21: mol_type = other RNA
gggagtgtgacaatggtgttt

SEQ ID NO: 40950 - RNA, 21 nt, Synthetic Construct
  source 1..21: mol_type = other RNA
tgaggtagtaggtcgtgtggt

SEQ ID NO: 40951 - RNA, 22 nt, Synthetic Construct
  source 1..22: mol_type = other RNA
tgaggtagtagtttgtgctgct

SEQ ID NO: 40952 - RNA, 22 nt, Synthetic Construct
  source 1..22: mol_type = other RNA
tggaatgtaaaggagtatgtat

SEQ ID NO: 40953 - RNA, 22 nt, Synthetic Construct
  source 1..22: mol_type = other RNA
tggaatgtaaaggagtatgtat

SEQ ID NO: 40954 - RNA, 28 nt, Synthetic Construct
  source 1..28: mol_type = other RNA
ccgtgtgaaagtaggtcatcgtcaggct

SEQ ID NO: 40955 - RNA, 28 nt, Synthetic Construct
  source 1..28: mol_type = other RNA
ccgtgtgaaagtaggtcatcgtcaggct

SEQ ID NO: 40956 - RNA, 18 nt, Synthetic Construct
  source 1..18: mol_type = other RNA
gtcgacgtatagggtgtg

SEQ ID NO: 40957 - RNA, 18 nt, Synthetic Construct
  source 1..18: mol_type = other RNA
gtcgacgtatagggtgtg

SEQ ID NO: 40958 - RNA, 31 nt, Synthetic Construct; identical to SEQ ID NO: 960
  source 1..31: mol_type = other RNA

SEQ ID NO: 40959 - RNA, 31 nt, Synthetic Construct; identical to SEQ ID NO: 960
  source 1..31: mol_type = other RNA

SEQ ID NO: 40960 - RNA, 29 nt, Synthetic Construct
  source 1..29: mol_type = other RNA
cccgtgtgaaagtaggtcatcgtcaggct

SEQ ID NO: 40961 - RNA, 29 nt, Synthetic Construct
  source 1..29: mol_type = other RNA
cccgtgtgaaagtaggtcatcgtcaggct

SEQ ID NO: 40962 - RNA, 16 nt, Synthetic Construct
  source 1..16: mol_type = other RNA
ccggaggaaggtgggg

SEQ ID NO: 40963 - RNA, 16 nt, Synthetic Construct
  source 1..16: mol_type = other RNA
ccggaggaaggtgggg

SEQ ID NO: 40964 - RNA, 31 nt, Synthetic Construct; identical to SEQ ID NO: 960
  source 1..31: mol_type = other RNA

SEQ ID NO: 40965 - RNA, 31 nt, Synthetic Construct; identical to SEQ ID NO: 960
  source 1..31: mol_type = other RNA

SEQ ID NO: 40966 - RNA, 28 nt, Synthetic Construct
  source 1..28: mol_type = other RNA
ccgtgtgaaagtaggtcatcgtcaggct

SEQ ID NO: 40967 - RNA, 28 nt, Synthetic Construct
  source 1..28: mol_type = other RNA
ccgtgtgaaagtaggtcatcgtcaggct

SEQ ID NO: 40968 - RNA, 18 nt, Synthetic Construct
  source 1..18: mol_type = other RNA
gtcgacgtatagggtgtg

SEQ ID NO: 40969 - RNA, 18 nt, Synthetic Construct
  source 1..18: mol_type = other RNA
gtcgacgtatagggtgtg

SEQ ID NO: 40970 - RNA, 28 nt, Synthetic Construct
  source 1..28: mol_type = other RNA
ccgtgtgaaagtaggtcatcgtcaggct

SEQ ID NO: 40971 - RNA, 28 nt, Synthetic Construct
  source 1..28: mol_type = other RNA
ccgtgtgaaagtaggtcatcgtcaggct

SEQ ID NO: 40972 - RNA, 16 nt, Synthetic Construct
  source 1..16: mol_type = other RNA
cgctagtaatcgcgga

SEQ ID NO: 40973 - RNA, 16 nt, Synthetic Construct
  source 1..16: mol_type = other RNA
cgctagtaatcgcgga

SEQ ID NO: 40974 - RNA, 23 nt, Synthetic Construct
  source 1..23: mol_type = other RNA
tgaggtagtaggttgtgtggttc

SEQ ID NO: 40975 - RNA, 30 nt, Synthetic Construct; identical to SEQ ID NO: 2353
  source 1..30: mol_type = other RNA

SEQ ID NO: 40976 - RNA, 30 nt, Synthetic Construct; identical to SEQ ID NO: 2353
  source 1..30: mol_type = other RNA

SEQ ID NO: 40977 - RNA, 35 nt, Synthetic Construct; identical to SEQ ID NO: 2069
  source 1..35: mol_type = other RNA

SEQ ID NO: 40978 - RNA, 35 nt, Synthetic Construct; identical to SEQ ID NO: 2069
  source 1..35: mol_type = other RNA

SEQ ID NO: 40979 - RNA, 16 nt, Synthetic Construct
  source 1..16: mol_type = other RNA
gcgtagatatgcggag

SEQ ID NO: 40980 - RNA, 16 nt, Synthetic Construct
  source 1..16: mol_type = other RNA
gcgtagatatgcggag

SEQ ID NO: 40981 - RNA, 31 nt, Synthetic Construct; identical to SEQ ID NO: 2758
  source 1..31: mol_type = other RNA

SEQ ID NO: 40982 - RNA, 31 nt, Synthetic Construct; identical to SEQ ID NO: 2758
  source 1..31: mol_type = other RNA

SEQ ID NO: 40983 - RNA, 15 nt, Synthetic Construct
  source 1..15: mol_type = other RNA
tcctgacggccatag

SEQ ID NO: 40984 - RNA, 15 nt, Synthetic Construct
  source 1..15: mol_type = other RNA
tcctgacggccatag

SEQ ID NO: 40985 - RNA, 37 nt, Synthetic Construct; identical to SEQ ID NO: 2365
  source 1..37: mol_type = other RNA

SEQ ID NO: 40986 - RNA, 37 nt, Synthetic Construct; identical to SEQ ID NO: 2365
  source 1..37: mol_type = other RNA

SEQ ID NO: 40987 - RNA, 33 nt, Synthetic Construct; identical to SEQ ID NO: 2253
  source 1..33: mol_type = other RNA

SEQ ID NO: 40988 - RNA, 33 nt, Synthetic Construct; identical to SEQ ID NO: 2253
  source 1..33: mol_type = other RNA

SEQ ID NO: 40989 - RNA, 30 nt, Synthetic Construct; identical to SEQ ID NO: 2308
  source 1..30: mol_type = other RNA

SEQ ID NO: 40990 - RNA, 30 nt, Synthetic Construct; identical to SEQ ID NO: 2308
  source 1..30: mol_type = other RNA

SEQ ID NO: 40991 - RNA, 31 nt, Synthetic Construct; identical to SEQ ID NO: 2427
  source 1..31: mol_type = other RNA

SEQ ID NO: 40992 - RNA, 31 nt, Synthetic Construct; identical to SEQ ID NO: 2427
  source 1..31: mol_type = other RNA

SEQ ID NO: 40993 - RNA, 32 nt, Synthetic Construct; identical to SEQ ID NO: 2318
  source 1..32: mol_type = other RNA

SEQ ID NO: 40994 - RNA, 32 nt, Synthetic Construct; identical to SEQ ID NO: 2318
  source 1..32: mol_type = other RNA

SEQ ID NO: 40995 - RNA, 34 nt, Synthetic Construct; identical to SEQ ID NO: 2183
  source 1..34: mol_type = other RNA

SEQ ID NO: 40996 - RNA, 34 nt, Synthetic Construct; identical to SEQ ID NO: 2183
  source 1..34: mol_type = other RNA

SEQ ID NO: 40997 - RNA, 35 nt, Synthetic Construct; identical to SEQ ID NO: 2762
  source 1..35: mol_type = other RNA

SEQ ID NO: 40998 - RNA, 35 nt, Synthetic Construct; identical to SEQ ID NO: 2762
  source 1..35: mol_type = other RNA

SEQ ID NO: 40999 - RNA, 30 nt, Synthetic Construct; identical to SEQ ID NO: 2840
  source 1..30: mol_type = other RNA

SEQ ID NO: 41000 - RNA, 30 nt, Synthetic Construct; identical to SEQ ID NO: 2840
  source 1..30: mol_type = other RNA

SEQ ID NO: 41001 - RNA, 22 nt, Synthetic Construct
  source 1..22: mol_type = other RNA
cggaatcgctagtaatcgcgga

SEQ ID NO: 41002 - RNA, 22 nt, Synthetic Construct
  source 1..22: mol_type = other RNA
cggaatcgctagtaatcgcgga

SEQ ID NO: 41003 - RNA, 15 nt, Synthetic Construct
  source 1..15: mol_type = other RNA
gcaagtcgaacggta

SEQ ID NO: 41004 - RNA, 15 nt, Synthetic Construct
  source 1..15: mol_type = other RNA
gcaagtcgaacggta

SEQ ID NO: 41005 - RNA, 32 nt, Synthetic Construct; identical to SEQ ID NO: 2850
  source 1..32: mol_type = other RNA

SEQ ID NO: 41006 - RNA, 32 nt, Synthetic Construct; identical to SEQ ID NO: 2850
  source 1..32: mol_type = other RNA

SEQ ID NO: 41007 - RNA, 30 nt, Synthetic Construct; identical to SEQ ID NO: 768
  source 1..30: mol_type = other RNA

SEQ ID NO: 41008 - RNA, 30 nt, Synthetic Construct; identical to SEQ ID NO: 768
  source 1..30: mol_type = other RNA

SEQ ID NO: 41009 - RNA, 18 nt, Synthetic Construct
  source 1..18: mol_type = other RNA
gtcgacgtatagggtgtg

SEQ ID NO: 41010 - RNA, 18 nt, Synthetic Construct
  source 1..18: mol_type = other RNA
gtcgacgtatagggtgtg

SEQ ID NO: 41011 - RNA, 17 nt, Synthetic Construct
  source 1..17: mol_type = other RNA
gcgtagatatgcggagg

SEQ ID NO: 41012 - RNA, 17 nt, Synthetic Construct
  source 1..17: mol_type = other RNA
gcgtagatatgcggagg

SEQ ID NO: 41013 - RNA, 32 nt, Synthetic Construct; identical to SEQ ID NO: 2798
  source 1..32: mol_type = other RNA

SEQ ID NO: 41014 - RNA, 32 nt, Synthetic Construct; identical to SEQ ID NO: 2798
  source 1..32: mol_type = other RNA

SEQ ID NO: 41015 - RNA, 34 nt, Synthetic Construct; identical to SEQ ID NO: 2364
  source 1..34: mol_type = other RNA

SEQ ID NO: 41016 - RNA, 34 nt, Synthetic Construct; identical to SEQ ID NO: 2364
  source 1..34: mol_type = other RNA

SEQ ID NO: 41017 - RNA, 15 nt, Synthetic Construct
  source 1..15: mol_type = other RNA
gcgtagatatgcgga

SEQ ID NO: 41018 - RNA, 15 nt, Synthetic Construct
  source 1..15: mol_type = other RNA
gcgtagatatgcgga

SEQ ID NO: 41019 - RNA, 30 nt, Synthetic Construct; identical to SEQ ID NO: 2578
  source 1..30: mol_type = other RNA

SEQ ID NO: 41020 - RNA, 30 nt, Synthetic Construct; identical to SEQ ID NO: 2578
  source 1..30: mol_type = other RNA

SEQ ID NO: 41021 - RNA, 15 nt, Synthetic Construct
  source 1..15: mol_type = other RNA
ggtcatcgtcaggct

SEQ ID NO: 41022 - RNA, 15 nt, Synthetic Construct
  source 1..15: mol_type = other RNA
ggtcatcgtcaggct

SEQ ID NO: 41023 - RNA, 22 nt, Synthetic Construct
  source 1..22: mol_type = other RNA
ggcagggttcgtgactggggtg

SEQ ID NO: 41024 - RNA, 22 nt, Synthetic Construct
  source 1..22: mol_type = other RNA
ggcagggttcgtgactggggtg

SEQ ID NO: 41025 - RNA, 16 nt, Synthetic Construct
  source 1..16: mol_type = other RNA
gtcgacgtatagggtg

SEQ ID NO: 41026 - RNA, 16 nt, Synthetic Construct
  source 1..16: mol_type = other RNA
gtcgacgtatagggtg

SEQ ID NO: 41027 - RNA, 15 nt, Synthetic Construct
  source 1..15: mol_type = other RNA
gagctgtggataggg

SEQ ID NO: 41028 - RNA, 15 nt, Synthetic Construct
  source 1..15: mol_type = other RNA
gagctgtggataggg

SEQ ID NO: 41029 - RNA, 17 nt, Synthetic Construct
  source 1..17: mol_type = other RNA
gtcgacgtatagggtgt

SEQ ID NO: 41030 - RNA, 17 nt, Synthetic Construct
  source 1..17: mol_type = other RNA
gtcgacgtatagggtgt

SEQ ID NO: 41031 - RNA, 31 nt, Synthetic Construct; identical to SEQ ID NO: 2758
  source 1..31: mol_type = other RNA

SEQ ID NO: 41032 - RNA, 31 nt, Synthetic Construct; identical to SEQ ID NO: 2758
  source 1..31: mol_type = other RNA

SEQ ID NO: 41033 - RNA, 29 nt, Synthetic Construct
  source 1..29: mol_type = other RNA
cccgtgtgaaagtaggtcatcgtcaggct

SEQ ID NO: 41034 - RNA, 29 nt, Synthetic Construct
  source 1..29: mol_type = other RNA
cccgtgtgaaagtaggtcatcgtcaggct

SEQ ID NO: 41035 - RNA, 15 nt, Synthetic Construct
  source 1..15: mol_type = other RNA
cctcgcgcgattgga

SEQ ID NO: 41036 - RNA, 15 nt, Synthetic Construct
  source 1..15: mol_type = other RNA
cctcgcgcgattgga

SEQ ID NO: 41037 - RNA, 21 nt, Synthetic Construct
  source 1..21: mol_type = other RNA
cgaggtagtaggttgtgtggt

SEQ ID NO: 41038 - RNA, 21 nt, Synthetic Construct
  source 1..21: mol_type = other RNA
cgaggtagtaggttgtgtggt

SEQ ID NO: 41039 - RNA, 34 nt, Synthetic Construct; identical to SEQ ID NO: 2317
  source 1..34: mol_type = other RNA

SEQ ID NO: 41040 - RNA, 34 nt, Synthetic Construct; identical to SEQ ID NO: 2317
  source 1..34: mol_type = other RNA

SEQ ID NO: 41041 - RNA, 35 nt, Synthetic Construct; identical to SEQ ID NO: 2450
  source 1..35: mol_type = other RNA

SEQ ID NO: 41042 - RNA, 35 nt, Synthetic Construct; identical to SEQ ID NO: 2450
  source 1..35: mol_type = other RNA

SEQ ID NO: 41043 - RNA, 15 nt, Synthetic Construct
  source 1..15: mol_type = other RNA
gctttgatccggaga

SEQ ID NO: 41044 - RNA, 15 nt, Synthetic Construct
  source 1..15: mol_type = other RNA
gctttgatccggaga

SEQ ID NO: 41045 - RNA, 23 nt, Synthetic Construct
  source 1..23: mol_type = other RNA
tgaggggcagagagcgagactct

SEQ ID NO: 41046 - RNA, 23 nt, Synthetic Construct
  source 1..23: mol_type = other RNA
tgaggggcagagagcgagactct

SEQ ID NO: 41047 - RNA, 17 nt, Synthetic Construct
  source 1..17: mol_type = other RNA
accggaggaaggtgggg

SEQ ID NO: 41048 - RNA, 17 nt, Synthetic Construct
  source 1..17: mol_type = other RNA
accggaggaaggtgggg

SEQ ID NO: 41049 - RNA, 18 nt, Synthetic Construct
  source 1..18: mol_type = other RNA
tcccaagggtatggctgt

SEQ ID NO: 41050 - RNA, 18 nt, Synthetic Construct
  source 1..18: mol_type = other RNA
tcccaagggtatggctgt

SEQ ID NO: 41051 - RNA, 34 nt, Synthetic Construct; identical to SEQ ID NO: 2291
  source 1..34: mol_type = other RNA

SEQ ID NO: 41052 - RNA, 34 nt, Synthetic Construct; identical to SEQ ID NO: 2291
  source 1..34: mol_type = other RNA

SEQ ID NO: 41053 - RNA, 15 nt, Synthetic Construct
  source 1..15: mol_type = other RNA
gcaagtcgaacggta

SEQ ID NO: 41054 - RNA, 15 nt, Synthetic Construct
  source 1..15: mol_type = other RNA
gcaagtcgaacggta

SEQ ID NO: 41055 - RNA, 29 nt, Synthetic Construct
  source 1..29: mol_type = other RNA
ttacaggggttcgaatcccctaggggacg

SEQ ID NO: 41056 - RNA, 29 nt, Synthetic Construct
  source 1..29: mol_type = other RNA
ttacaggggttcgaatcccctaggggacg

SEQ ID NO: 41057 - RNA, 21 nt, Synthetic Construct
  source 1..21: mol_type = other RNA
cggtcccaagggtatggctgt

SEQ ID NO: 41058 - RNA, 21 nt, Synthetic Construct
  source 1..21: mol_type = other RNA
cggtcccaagggtatggctgt

SEQ ID NO: 41059 - RNA, 15 nt, Synthetic Construct
  source 1..15: mol_type = other RNA
gtcgacgtatagggt

SEQ ID NO: 41060 - RNA, 15 nt, Synthetic Construct
  source 1..15: mol_type = other RNA
gtcgacgtatagggt

SEQ ID NO: 41061 - RNA, 21 nt, Synthetic Construct
  source 1..21: mol_type = other RNA
tgaggtagcaggttgtgtggt

SEQ ID NO: 41062 - RNA, 21 nt, Synthetic Construct
  source 1..21: mol_type = other RNA
tgaggtagcaggttgtgtggt

SEQ ID NO: 41063 - RNA, 18 nt, Synthetic Construct
  source 1..18: mol_type = other RNA
accggaggaaggtgggga

SEQ ID NO: 41064 - RNA, 18 nt, Synthetic Construct
  source 1..18: mol_type = other RNA
accggaggaaggtgggga

SEQ ID NO: 41065 - RNA, 16 nt, Synthetic Construct
  source 1..16: mol_type = other RNA
ctgacgctcatgcacg

SEQ ID NO: 41066 - RNA, 16 nt, Synthetic Construct
  source 1..16: mol_type = other RNA
ctgacgctcatgcacg

SEQ ID NO: 41067 - RNA, 32 nt, Synthetic Construct; identical to SEQ ID NO: 2582
  source 1..32: mol_type = other RNA

SEQ ID NO: 41068 - RNA, 32 nt, Synthetic Construct; identical to SEQ ID NO: 2582
  source 1..32: mol_type = other RNA

SEQ ID NO: 41069 - RNA, 36 nt, Synthetic Construct; identical to SEQ ID NO: 2344
  source 1..36: mol_type = other RNA

SEQ ID NO: 41070 - RNA, 36 nt, Synthetic Construct; identical to SEQ ID NO: 2344
  source 1..36: mol_type = other RNA

SEQ ID NO: 41071 - RNA, 15 nt, Synthetic Construct
  source 1..15: mol_type = other RNA
gcaagtcgaacggta

SEQ ID NO: 41072 - RNA, 15 nt, Synthetic Construct
  source 1..15: mol_type = other RNA
gcaagtcgaacggta

SEQ ID NO: 41073 - RNA, 23 nt, Synthetic Construct
  source 1..23: mol_type = other RNA
tgaggggcagagagcgagacttc

SEQ ID NO: 41074 - RNA, 16 nt, Synthetic Construct
  source 1..16: mol_type = other RNA
gggtgaaagcggggga

SEQ ID NO: 41075 - RNA, 16 nt, Synthetic Construct
  source 1..16: mol_type = other RNA
gggtgaaagcggggga

SEQ ID NO: 41076 - RNA, 33 nt, Synthetic Construct; identical to SEQ ID NO: 2126
  source 1..33: mol_type = other RNA

SEQ ID NO: 41077 - RNA, 33 nt, Synthetic Construct; identical to SEQ ID NO: 2126
  source 1..33: mol_type = other RNA

SEQ ID NO: 41078 - RNA, 21 nt, Synthetic Construct
  source 1..21: mol_type = other RNA
atcggaacgtgcccagtcgtg

SEQ ID NO: 41079 - RNA, 21 nt, Synthetic Construct
  source 1..21: mol_type = other RNA
atcggaacgtgcccagtcgtg

SEQ ID NO: 41080 - RNA, 31 nt, Synthetic Construct; identical to SEQ ID NO: 2442
  source 1..31: mol_type = other RNA

SEQ ID NO: 41081 - RNA, 31 nt, Synthetic Construct; identical to SEQ ID NO: 2442
  source 1..31: mol_type = other RNA

SEQ ID NO: 41082 - RNA, 31 nt, Synthetic Construct; identical to SEQ ID NO: 960
  source 1..31: mol_type = other RNA

SEQ ID NO: 41083 - RNA, 31 nt, Synthetic Construct; identical to SEQ ID NO: 960
  source 1..31: mol_type = other RNA

SEQ ID NO: 41084 - RNA, 32 nt, Synthetic Construct; identical to SEQ ID NO: 3092
  source 1..32: mol_type = other RNA

SEQ ID NO: 41085 - RNA, 32 nt, Synthetic Construct; identical to SEQ ID NO: 3092
  source 1..32: mol_type = other RNA

SEQ ID NO: 41086 - RNA, 32 nt, Synthetic Construct; identical to SEQ ID NO: 2435
  source 1..32: mol_type = other RNA

SEQ ID NO: 41087 - RNA, 32 nt, Synthetic Construct; identical to SEQ ID NO: 2435
  source 1..32: mol_type = other RNA

SEQ ID NO: 41088 - RNA, 18 nt, Synthetic Construct
  source 1..18: mol_type = other RNA
tgcgtagatatgcggagg

SEQ ID NO: 41089 - RNA, 18 nt, Synthetic Construct
  source 1..18: mol_type = other RNA
tgcgtagatatgcggagg

SEQ ID NO: 41090 - RNA, 15 nt, Synthetic Construct
  source 1..15: mol_type = other RNA
gggtgaaagcggggg

SEQ ID NO: 41091 - RNA, 15 nt, Synthetic Construct
  source 1..15: mol_type = other RNA
gggtgaaagcggggg

SEQ ID NO: 41092 - RNA, 16 nt, Synthetic Construct
  source 1..16: mol_type = other RNA
gtccggatcgtagtct

SEQ ID NO: 41093 - RNA, 16 nt, Synthetic Construct
  source 1..16: mol_type = other RNA
gtccggatcgtagtct

SEQ ID NO: 41094 - RNA, 19 nt, Synthetic Construct
  source 1..19: mol_type = other RNA
cgactcttagcggtggatc

SEQ ID NO: 41095 - RNA, 19 nt, Synthetic Construct
  source 1..19: mol_type = other RNA
cgactcttagcggtggatc

SEQ ID NO: 41096 - RNA, 35 nt, Synthetic Construct; identical to SEQ ID NO: 2354
  source 1..35: mol_type = other RNA

SEQ ID NO: 41097 - RNA, 35 nt, Synthetic Construct; identical to SEQ ID NO: 2354
  source 1..35: mol_type = other RNA

SEQ ID NO: 41098 - RNA, 30 nt, Synthetic Construct; identical to SEQ ID NO: 2274
  source 1..30: mol_type = other RNA

SEQ ID NO: 41099 - RNA, 30 nt, Synthetic Construct; identical to SEQ ID NO: 2274
  source 1..30: mol_type = other RNA

SEQ ID NO: 41100 - RNA, 36 nt, Synthetic Construct; identical to SEQ ID NO: 2520
  source 1..36: mol_type = other RNA

SEQ ID NO: 41101 - RNA, 36 nt, Synthetic Construct; identical to SEQ ID NO: 2520
  source 1..36: mol_type = other RNA

SEQ ID NO: 41102 - RNA, 39 nt, Synthetic Construct; identical to SEQ ID NO: 2398
  source 1..39: mol_type = other RNA

SEQ ID NO: 41103 - RNA, 39 nt, Synthetic Construct; identical to SEQ ID NO: 2398
  source 1..39: mol_type = other RNA

SEQ ID NO: 41104 - RNA, 15 nt, Synthetic Construct
  source 1..15: mol_type = other RNA
gagtagggcgggaca

SEQ ID NO: 41105 - RNA, 15 nt, Synthetic Construct
  source 1..15: mol_type = other RNA
gagtagggcgggaca

SEQ ID NO: 41106 - RNA, 21 nt, Synthetic Construct
  source 1..21: mol_type = other RNA
tgaggtagtaggttgcgtggt

SEQ ID NO: 41107 - RNA, 21 nt, Synthetic Construct
  source 1..21: mol_type = other RNA
tgaggtagtaggttgcgtggt

SEQ ID NO: 41108 - RNA, 33 nt, Synthetic Construct; identical to SEQ ID NO: 2386
  source 1..33: mol_type = other RNA

SEQ ID NO: 41109 - RNA, 33 nt, Synthetic Construct; identical to SEQ ID NO: 2386
  source 1..33: mol_type = other RNA

SEQ ID NO: 41110 - RNA, 33 nt, Synthetic Construct; identical to SEQ ID NO: 2253
  source 1..33: mol_type = other RNA

SEQ ID NO: 41111 - RNA, 33 nt, Synthetic Construct; identical to SEQ ID NO: 2253
  source 1..33: mol_type = other RNA

SEQ ID NO: 41112 - RNA, 35 nt, Synthetic Construct; identical to SEQ ID NO: 2069
  source 1..35: mol_type = other RNA

SEQ ID NO: 41113 - RNA, 35 nt, Synthetic Construct; identical to SEQ ID NO: 2069
  source 1..35: mol_type = other RNA

SEQ ID NO: 41114 - RNA, 31 nt, Synthetic Construct; identical to SEQ ID NO: 2263
  source 1..31: mol_type = other RNA

SEQ ID NO: 41115 - RNA, 31 nt, Synthetic Construct; identical to SEQ ID NO: 2263
  source 1..31: mol_type = other RNA

SEQ ID NO: 41116 - RNA, 34 nt, Synthetic Construct; identical to SEQ ID NO: 2265
  source 1..34: mol_type = other RNA

SEQ ID NO: 41117 - RNA, 34 nt, Synthetic Construct; identical to SEQ ID NO: 2265
  source 1..34: mol_type = other RNA

SEQ ID NO: 41118 - RNA, 19 nt, Synthetic Construct
  source 1..19: mol_type = other RNA
gtactgacgctcatgcacg

SEQ ID NO: 41119 - RNA, 19 nt, Synthetic Construct
  source 1..19: mol_type = other RNA
gtactgacgctcatgcacg

SEQ ID NO: 41120 - RNA, 24 nt, Synthetic Construct
  source 1..24: mol_type = other RNA
gggttgtaaaccgcttttgtcagg

SEQ ID NO: 41121 - RNA, 24 nt, Synthetic Construct
  source 1..24: mol_type = other RNA
gggttgtaaaccgcttttgtcagg

SEQ ID NO: 41122 - RNA, 34 nt, Synthetic Construct; identical to SEQ ID NO: 2186
  source 1..34: mol_type = other RNA

SEQ ID NO: 41123 - RNA, 34 nt, Synthetic Construct; identical to SEQ ID NO: 2186
  source 1..34: mol_type = other RNA

SEQ ID NO: 41124 - RNA, 31 nt, Synthetic Construct; identical to SEQ ID NO: 2278
  source 1..31: mol_type = other RNA

SEQ ID NO: 41125 - RNA, 31 nt, Synthetic Construct; identical to SEQ ID NO: 2278
  source 1..31: mol_type = other RNA

SEQ ID NO: 41126 - RNA, 31 nt, Synthetic Construct; identical to SEQ ID NO: 2507
  source 1..31: mol_type = other RNA

SEQ ID NO: 41127 - RNA, 31 nt, Synthetic Construct; identical to SEQ ID NO: 2507
  source 1..31: mol_type = other RNA

SEQ ID NO: 41128 - RNA, 36 nt, Synthetic Construct; identical to SEQ ID NO: 2506
  source 1..36: mol_type = other RNA

SEQ ID NO: 41129 - RNA, 36 nt, Synthetic Construct; identical to SEQ ID NO: 2506
  source 1..36: mol_type = other RNA

SEQ ID NO: 41130 - RNA, 33 nt, Synthetic Construct; identical to SEQ ID NO: 2395
  source 1..33: mol_type = other RNA

SEQ ID NO: 41131 - RNA, 33 nt, Synthetic Construct; identical to SEQ ID NO: 2395
  source 1..33: mol_type = other RNA

SEQ ID NO: 41132 - RNA, 16 nt, Synthetic Construct
  source 1..16: mol_type = other RNA
ccggaggaaggtgggg

SEQ ID NO: 41133 - RNA, 16 nt, Synthetic Construct
  source 1..16: mol_type = other RNA
ccggaggaaggtgggg

SEQ ID NO: 41134 - RNA, 16 nt, Synthetic Construct
  source 1..16: mol_type = other RNA
cgctagtaatcgcgga

SEQ ID NO: 41135 - RNA, 16 nt, Synthetic Construct
  source 1..16: mol_type = other RNA
cgctagtaatcgcgga

SEQ ID NO: 41136 - RNA, 21 nt, Synthetic Construct
  source 1..21: mol_type = other RNA
taaggtagtaggttgtgtggt

SEQ ID NO: 41137 - RNA, 21 nt, Synthetic Construct
  source 1..21: mol_type = other RNA
taaggtagtaggttgtgtggt

SEQ ID NO: 41138 - RNA, 23 nt, Synthetic Construct
  source 1..23: mol_type = other RNA
gcgtggtaggagagcgttctgta

SEQ ID NO: 41139 - RNA, 23 nt, Synthetic Construct
  source 1..23: mol_type = other RNA
gcgtggtaggagagcgttctgta

SEQ ID NO: 41140 - RNA, 34 nt, Synthetic Construct; identical to SEQ ID NO: 2553
  source 1..34: mol_type = other RNA

SEQ ID NO: 41141 - RNA, 34 nt, Synthetic Construct; identical to SEQ ID NO: 2553
  source 1..34: mol_type = other RNA

SEQ ID NO: 41142 - RNA, 16 nt, Synthetic Construct
  source 1..16: mol_type = other RNA
tgcgtagatatgcgga

SEQ ID NO: 41143 - RNA, 16 nt, Synthetic Construct
  source 1..16: mol_type = other RNA
tgcgtagatatgcgga

SEQ ID NO: 41144 - RNA, 18 nt, Synthetic Construct
  source 1..18: mol_type = other RNA
gcgaaattccttgtcggg

SEQ ID NO: 41145 - RNA, 18 nt, Synthetic Construct
  source 1..18: mol_type = other RNA
gcgaaattccttgtcggg

SEQ ID NO: 41146 - RNA, 30 nt, Synthetic Construct; identical to SEQ ID NO: 1958
  source 1..30: mol_type = other RNA

SEQ ID NO: 41147 - RNA, 30 nt, Synthetic Construct; identical to SEQ ID NO: 1958
  source 1..30: mol_type = other RNA

SEQ ID NO: 41148 - RNA, 32 nt, Synthetic Construct; identical to SEQ ID NO: 2798
  source 1..32: mol_type = other RNA

SEQ ID NO: 41149 - RNA, 32 nt, Synthetic Construct; identical to SEQ ID NO: 2798
  source 1..32: mol_type = other RNA

SEQ ID NO: 41150 - RNA, 31 nt, Synthetic Construct; identical to SEQ ID NO: 2893
  source 1..31: mol_type = other RNA

SEQ ID NO: 41151 - RNA, 31 nt, Synthetic Construct; identical to SEQ ID NO: 2893
  source 1..31: mol_type = other RNA

SEQ ID NO: 41152 - RNA, 34 nt, Synthetic Construct; identical to SEQ ID NO: 2265
  source 1..34: mol_type = other RNA

SEQ ID NO: 41153 - RNA, 34 nt, Synthetic Construct; identical to SEQ ID NO: 2265
  source 1..34: mol_type = other RNA

SEQ ID NO: 41154 - RNA, 16 nt, Synthetic Construct
  source 1..16: mol_type = other RNA
cccagaaacccggtcg

SEQ ID NO: 41155 - RNA, 16 nt, Synthetic Construct
  source 1..16: mol_type = other RNA
cccagaaacccggtcg

SEQ ID NO: 41156 - RNA, 35 nt, Synthetic Construct; identical to SEQ ID NO: 2615
  source 1..35: mol_type = other RNA

SEQ ID NO: 41157 - RNA, 35 nt, Synthetic Construct; identical to SEQ ID NO: 2615
  source 1..35: mol_type = other RNA

SEQ ID NO: 41158 - RNA, 15 nt, Synthetic Construct
  source 1..15: mol_type = other RNA
tcctgacggccatag

SEQ ID NO: 41159 - RNA, 15 nt, Synthetic Construct
  source 1..15: mol_type = other RNA
tcctgacggccatag

SEQ ID NO: 41160 - RNA, 32 nt, Synthetic Construct; identical to SEQ ID NO: 2296
  source 1..32: mol_type = other RNA

SEQ ID NO: 41161 - RNA, 32 nt, Synthetic Construct; identical to SEQ ID NO: 2296
  source 1..32: mol_type = other RNA

SEQ ID NO: 41162 - RNA, 16 nt, Synthetic Construct
  source 1..16: mol_type = other RNA
gtcgacgtatagggtg

SEQ ID NO: 41163 - RNA, 15 nt, Synthetic Construct
  source 1..15: mol_type = other RNA
tccggatcgtagtct

SEQ ID NO: 41164 - RNA, 15 nt, Synthetic Construct
  source 1..15: mol_type = other RNA
tccggatcgtagtct

SEQ ID NO: 41165 - RNA, 32 nt, Synthetic Construct; identical to SEQ ID NO: 2318
  source 1..32: mol_type = other RNA

SEQ ID NO: 41166 - RNA, 32 nt, Synthetic Construct; identical to SEQ ID NO: 2318
  source 1..32: mol_type = other RNA

SEQ ID NO: 41167 - RNA, 21 nt, Synthetic Construct
  source 1..21: mol_type = other RNA
tgaggtagtagtttgtgctgc

SEQ ID NO: 41168 - RNA, 34 nt, Synthetic Construct; identical to SEQ ID NO: 2183
  source 1..34: mol_type = other RNA

SEQ ID NO: 41169 - RNA, 34 nt, Synthetic Construct; identical to SEQ ID NO: 2183
  source 1..34: mol_type = other RNA

SEQ ID NO: 41170 - RNA, 35 nt, Synthetic Construct; identical to SEQ ID NO: 2762
  source 1..35: mol_type = other RNA

SEQ ID NO: 41171 - RNA, 35 nt, Synthetic Construct; identical to SEQ ID NO: 2762
  source 1..35: mol_type = other RNA

SEQ ID NO: 41172 - RNA, 15 nt, Synthetic Construct
  source 1..15: mol_type = other RNA
gagagcctggacaca

SEQ ID NO: 41173 - RNA, 15 nt, Synthetic Construct
  source 1..15: mol_type = other RNA
gagagcctggacaca

SEQ ID NO: 41174 - RNA, 35 nt, Synthetic Construct; identical to SEQ ID NO: 2269
  source 1..35: mol_type = other RNA

SEQ ID NO: 41175 - RNA, 35 nt, Synthetic Construct; identical to SEQ ID NO: 2269
  source 1..35: mol_type = other RNA

SEQ ID NO: 41176 - RNA, 17 nt, Synthetic Construct
  source 1..17: mol_type = other RNA
gcgtagatatgcggagg

SEQ ID NO: 41177 - RNA, 17 nt, Synthetic Construct
  source 1..17: mol_type = other RNA
gcgtagatatgcggagg

SEQ ID NO: 41178 - RNA, 25 nt, Synthetic Construct
  source 1..25: mol_type = other RNA
gggttgtaaaccgcttttgtcaggg

SEQ ID NO: 41179 - RNA, 25 nt, Synthetic Construct
  source 1..25: mol_type = other RNA
gggttgtaaaccgcttttgtcaggg

SEQ ID NO: 41180 - RNA, 33 nt, Synthetic Construct; identical to SEQ ID NO: 1982
  source 1..33: mol_type = other RNA

SEQ ID NO: 41181 - RNA, 33 nt, Synthetic Construct; identical to SEQ ID NO: 1982
  source 1..33: mol_type = other RNA

SEQ ID NO: 41182 - RNA, 31 nt, Synthetic Construct; identical to SEQ ID NO: 2427
  source 1..31: mol_type = other RNA

SEQ ID NO: 41183 - RNA, 31 nt, Synthetic Construct; identical to SEQ ID NO: 2427
  source 1..31: mol_type = other RNA

SEQ ID NO: 41184 - RNA, 21 nt, Synthetic Construct
  source 1..21: mol_type = other RNA
cgcgacctcagatcagacgtg

SEQ ID NO: 41185 - RNA, 21 nt, Synthetic Construct
  source 1..21: mol_type = other RNA
cgcgacctcagatcagacgtg

SEQ ID NO: 41186 - RNA, 29 nt, Synthetic Construct
  source 1..29: mol_type = other RNA
tgaaggtgggttgtgaagcctgctggagg

SEQ ID NO: 41187 - RNA, 29 nt, Synthetic Construct
  source 1..29: mol_type = other RNA
tgaaggtgggttgtgaagcctgctggagg

SEQ ID NO: 41188 - RNA, 35 nt, Synthetic Construct; identical to SEQ ID NO: 757
  source 1..35: mol_type = other RNA

SEQ ID NO: 41189 - RNA, 35 nt, Synthetic Construct; identical to SEQ ID NO: 757
  source 1..35: mol_type = other RNA

SEQ ID NO: 41190 - RNA, 18 nt, Synthetic Construct
  source 1..18: mol_type = other RNA
cgtgttcggaagattttc

SEQ ID NO: 41191 - RNA, 18 nt, Synthetic Construct
  source 1..18: mol_type = other RNA
cgtgttcggaagattttc

SEQ ID NO: 41192 - RNA, 30 nt, Synthetic Construct; identical to SEQ ID NO: 2353
  source 1..30: mol_type = other RNA

SEQ ID NO: 41193 - RNA, 30 nt, Synthetic Construct; identical to SEQ ID NO: 2353
  source 1..30: mol_type = other RNA

SEQ ID NO: 41194 - RNA, 34 nt, Synthetic Construct; identical to SEQ ID NO: 2529
  source 1..34: mol_type = other RNA

SEQ ID NO: 41195 - RNA, 34 nt, Synthetic Construct; identical to SEQ ID NO: 2529
  source 1..34: mol_type = other RNA

SEQ ID NO: 41196 - RNA, 30 nt, Synthetic Construct; identical to SEQ ID NO: 2308
  source 1..30: mol_type = other RNA

SEQ ID NO: 41197 - RNA, 30 nt, Synthetic Construct; identical to SEQ ID NO: 2308
  source 1..30: mol_type = other RNA

SEQ ID NO: 41198 - RNA, 15 nt, Synthetic Construct
  source 1..15: mol_type = other RNA
gcgtagatatgcgga

SEQ ID NO: 41199 - RNA, 15 nt, Synthetic Construct
  source 1..15: mol_type = other RNA
gcgtagatatgcgga

SEQ ID NO: 41200 - RNA, 16 nt, Synthetic Construct
  source 1..16: mol_type = other RNA
cccagaaacccggtcg

SEQ ID NO: 41201 - RNA, 16 nt, Synthetic Construct
  source 1..16: mol_type = other RNA
cccagaaacccggtcg

SEQ ID NO: 41202 - RNA, 34 nt, Synthetic Construct; identical to SEQ ID NO: 2019
  source 1..34: mol_type = other RNA

SEQ ID NO: 41203 - RNA, 34 nt, Synthetic Construct; identical to SEQ ID NO: 2019
  source 1..34: mol_type = other RNA

SEQ ID NO: 41204 - RNA, 22 nt, Synthetic Construct
  source 1..22: mol_type = other RNA
cggaatcgctagtaatcgcgga

SEQ ID NO: 41205 - RNA, 22 nt, Synthetic Construct
  source 1..22: mol_type = other RNA
cggaatcgctagtaatcgcgga

SEQ ID NO: 41206 - RNA, 22 nt, Synthetic Construct
  source 1..22: mol_type = other RNA
ccggtcccaagggtatggctgt

SEQ ID NO: 41207 - RNA, 22 nt, Synthetic Construct
  source 1..22: mol_type = other RNA
ccggtcccaagggtatggctgt

SEQ ID NO: 41208 - RNA, 22 nt, Synthetic Construct
  source 1..22: mol_type = other RNA
cggaggagttcgaaggtacgct

SEQ ID NO: 41209 - RNA, 22 nt, Synthetic Construct
  source 1..22: mol_type = other RNA
cggaggagttcgaaggtacgct

SEQ ID NO: 41210 - RNA, 17 nt, Synthetic Construct
  source 1..17: mol_type = other RNA
tcgctagtaatcgcgga

SEQ ID NO: 41211 - RNA, 17 nt, Synthetic Construct
  source 1..17: mol_type = other RNA
tcgctagtaatcgcgga

SEQ ID NO: 41212 - RNA, 19 nt, Synthetic Construct
  source 1..19: mol_type = other RNA
ccagtaaacggcggccgta

SEQ ID NO: 41213 - RNA, 19 nt, Synthetic Construct
  source 1..19: mol_type = other RNA
ccagtaaacggcggccgta

SEQ ID NO: 41214 - RNA, 21 nt, Synthetic Construct
  source 1..21: mol_type = other RNA
gctttgatccggagatttccg

SEQ ID NO: 41215 - RNA, 21 nt, Synthetic Construct
  source 1..21: mol_type = other RNA
gctttgatccggagatttccg

SEQ ID NO: 41216 - RNA, 22 nt, Synthetic Construct
  source 1..22: mol_type = other RNA
gagagcctggacacaggtgctg

SEQ ID NO: 41217 - RNA, 22 nt, Synthetic Construct
  source 1..22: mol_type = other RNA
gagagcctggacacaggtgctg

SEQ ID NO: 41218 - RNA, 33 nt, Synthetic Construct; identical to SEQ ID NO: 2266
  source 1..33: mol_type = other RNA

SEQ ID NO: 41219 - RNA, 33 nt, Synthetic Construct; identical to SEQ ID NO: 2266
  source 1..33: mol_type = other RNA

SEQ ID NO: 41220 - RNA, 31 nt, Synthetic Construct; identical to SEQ ID NO: 2295
  source 1..31: mol_type = other RNA

SEQ ID NO: 41221 - RNA, 31 nt, Synthetic Construct; identical to SEQ ID NO: 2295
  source 1..31: mol_type = other RNA

SEQ ID NO: 41222 - RNA, 16 nt, Synthetic Construct
  source 1..16: mol_type = other RNA
tgcaagtcgaacggta

SEQ ID NO: 41223 - RNA, 16 nt, Synthetic Construct
  source 1..16: mol_type = other RNA
tgcaagtcgaacggta

SEQ ID NO: 41224 - RNA, 17 nt, Synthetic Construct
  source 1..17: mol_type = other RNA
gtcgacgtatagggtgt

SEQ ID NO: 41225 - RNA, 36 nt, Synthetic Construct; identical to SEQ ID NO: 2366
  source 1..36: mol_type = other RNA

SEQ ID NO: 41226 - RNA, 36 nt, Synthetic Construct; identical to SEQ ID NO: 2366
  source 1..36: mol_type = other RNA

SEQ ID NO: 41227 - RNA, 37 nt, Synthetic Construct; identical to SEQ ID NO: 2365
  source 1..37: mol_type = other RNA

SEQ ID NO: 41228 - RNA, 37 nt, Synthetic Construct; identical to SEQ ID NO: 2365
  source 1..37: mol_type = other RNA

SEQ ID NO: 41229 - RNA, 31 nt, Synthetic Construct; identical to SEQ ID NO: 2215
  source 1..31: mol_type = other RNA

SEQ ID NO: 41230 - RNA, 31 nt, Synthetic Construct; identical to SEQ ID NO: 2215
  source 1..31: mol_type = other RNA

SEQ ID NO: 41231 - RNA, 23 nt, Synthetic Construct
  source 1..23: mol_type = other RNA
tgaggggcagagagcgagacttc

SEQ ID NO: 41232 - RNA, 34 nt, Synthetic Construct; identical to SEQ ID NO: 2298
  source 1..34: mol_type = other RNA

SEQ ID NO: 41233 - RNA, 34 nt, Synthetic Construct; identical to SEQ ID NO: 2298
  source 1..34: mol_type = other RNA

SEQ ID NO: 41234 - RNA, 23 nt, Synthetic Construct
  source 1..23: mol_type = other RNA
tggtaattcgacgtacttagtgt

SEQ ID NO: 41235 - RNA, 23 nt, Synthetic Construct
  source 1..23: mol_type = other RNA
tggtaattcgacgtacttagtgt

SEQ ID NO: 41236 - RNA, 33 nt, Synthetic Construct; identical to SEQ ID NO: 2126
  source 1..33: mol_type = other RNA

SEQ ID NO: 41237 - RNA, 33 nt, Synthetic Construct; identical to SEQ ID NO: 2126
  source 1..33: mol_type = other RNA

SEQ ID NO: 41238 - RNA, 31 nt, Synthetic Construct; identical to SEQ ID NO: 2310
  source 1..31: mol_type = other RNA

SEQ ID NO: 41239 - RNA, 31 nt, Synthetic Construct; identical to SEQ ID NO: 2310
  source 1..31: mol_type = other RNA

SEQ ID NO: 41240 - RNA, 17 nt, Synthetic Construct
  source 1..17: mol_type = other RNA
accggaggaaggtgggg

SEQ ID NO: 41241 - RNA, 17 nt, Synthetic Construct
  source 1..17: mol_type = other RNA
accggaggaaggtgggg

SEQ ID NO: 41242 - RNA, 20 nt, Synthetic Construct
  source 1..20: mol_type = other RNA
tggggtagtaggttgtgtgg

SEQ ID NO: 41243 - RNA, 20 nt, Synthetic Construct
  source 1..20: mol_type = other RNA
tggggtagtaggttgtgtgg

SEQ ID NO: 41244 - RNA, 21 nt, Synthetic Construct
  source 1..21: mol_type = other RNA
tgaggtagtaggttgtgtagt

SEQ ID NO: 41245 - RNA, 21 nt, Synthetic Construct
  source 1..21: mol_type = other RNA
tgaggtagtaggttgtgtagt

SEQ ID NO: 41246 - RNA, 15 nt, Synthetic Construct
  source 1..15: mol_type = other RNA
gtcgacgtatagggt

SEQ ID NO: 41247 - RNA, 15 nt, Synthetic Construct
  source 1..15: mol_type = other RNA
gtcgacgtatagggt

SEQ ID NO: 41248 - RNA, 19 nt, Synthetic Construct
  source 1..19: mol_type = other RNA
ccgtgttcggaagattttc

SEQ ID NO: 41249 - RNA, 19 nt, Synthetic Construct
  source 1..19: mol_type = other RNA
ccgtgttcggaagattttc

SEQ ID NO: 41250 - RNA, 30 nt, Synthetic Construct; identical to SEQ ID NO: 2578
  source 1..30: mol_type = other RNA

SEQ ID NO: 41251 - RNA, 30 nt, Synthetic Construct; identical to SEQ ID NO: 2578
  source 1..30: mol_type = other RNA

SEQ ID NO: 41252 - RNA, 20 nt, Synthetic Construct
  source 1..20: mol_type = other RNA
tgaggtagtaggttgcgtgg

SEQ ID NO: 41253 - RNA, 20 nt, Synthetic Construct
  source 1..20: mol_type = other RNA
tgaggtagtaggttgcgtgg

SEQ ID NO: 41254 - RNA, 15 nt, Synthetic Construct
  source 1..15: mol_type = other RNA
gagctgtggataggg

SEQ ID NO: 41255 - RNA, 15 nt, Synthetic Construct
  source 1..15: mol_type = other RNA
gagctgtggataggg

SEQ ID NO: 41256 - RNA, 21 nt, Synthetic Construct
  source 1..21: mol_type = other RNA
cgcgacctcagatcagacgtg

SEQ ID NO: 41257 - RNA, 21 nt, Synthetic Construct
  source 1..21: mol_type = other RNA
cgcgacctcagatcagacgtg

SEQ ID NO: 41258 - RNA, 20 nt, Synthetic Construct
  source 1..20: mol_type = other RNA
cccagtaaacggcggccgta

SEQ ID NO: 41259 - RNA, 20 nt, Synthetic Construct
  source 1..20: mol_type = other RNA
cccagtaaacggcggccgta

SEQ ID NO: 41260 - RNA, 34 nt, Synthetic Construct; identical to SEQ ID NO: 2186
  source 1..34: mol_type = other RNA

SEQ ID NO: 41261 - RNA, 34 nt, Synthetic Construct; identical to SEQ ID NO: 2186
  source 1..34: mol_type = other RNA

SEQ ID NO: 41262 - RNA, 19 nt, Synthetic Construct
  source 1..19: mol_type = other RNA
agtcgacgtatagggtgtg

SEQ ID NO: 41263 - RNA, 19 nt, Synthetic Construct
  source 1..19: mol_type = other RNA
agtcgacgtatagggtgtg

SEQ ID NO: 41264 - RNA, 35 nt, Synthetic Construct; identical to SEQ ID NO: 2450
  source 1..35: mol_type = other RNA

SEQ ID NO: 41265 - RNA, 35 nt, Synthetic Construct; identical to SEQ ID NO: 2450
  source 1..35: mol_type = other RNA

SEQ ID NO: 41266 - RNA, 28 nt, Synthetic Construct
  source 1..28: mol_type = other RNA
cgactcttagcggtggatcactcggctc

SEQ ID NO: 41267 - RNA, 28 nt, Synthetic Construct
  source 1..28: mol_type = other RNA
cgactcttagcggtggatcactcggctc

SEQ ID NO: 41268 - RNA, 15 nt, Synthetic Construct
  source 1..15: mol_type = other RNA
gctagtaatcgcgga

SEQ ID NO: 41269 - RNA, 15 nt, Synthetic Construct
  source 1..15: mol_type = other RNA
gctagtaatcgcgga

SEQ ID NO: 41270 - RNA, 31 nt, Synthetic Construct; identical to SEQ ID NO: 2442
  source 1..31: mol_type = other RNA

SEQ ID NO: 41271 - RNA, 31 nt, Synthetic Construct; identical to SEQ ID NO: 2442
  source 1..31: mol_type = other RNA

SEQ ID NO: 41272 - RNA, 18 nt, Synthetic Construct
  source 1..18: mol_type = other RNA
atcgctagtaatcgcgga

SEQ ID NO: 41273 - RNA, 18 nt, Synthetic Construct
  source 1..18: mol_type = other RNA
atcgctagtaatcgcgga

SEQ ID NO: 41274 - RNA, 21 nt, Synthetic Construct
  source 1..21: mol_type = other RNA
cggtcccaagggtatggctgt

SEQ ID NO: 41275 - RNA, 21 nt, Synthetic Construct
  source 1..21: mol_type = other RNA
cggtcccaagggtatggctgt

SEQ ID NO: 41276 - RNA, 30 nt, Synthetic Construct; identical to SEQ ID NO: 1771
  source 1..30: mol_type = other RNA

SEQ ID NO: 41277 - RNA, 30 nt, Synthetic Construct; identical to SEQ ID NO: 1771
  source 1..30: mol_type = other RNA

SEQ ID NO: 41278 - RNA, 30 nt, Synthetic Construct; identical to SEQ ID NO: 768
  source 1..30: mol_type = other RNA

SEQ ID NO: 41279 - RNA, 30 nt, Synthetic Construct; identical to SEQ ID NO: 768
  source 1..30: mol_type = other RNA

SEQ ID NO: 41280 - RNA, 31 nt, Synthetic Construct; identical to SEQ ID NO: 2423
  source 1..31: mol_type = other RNA

SEQ ID NO: 41281 - RNA, 31 nt, Synthetic Construct; identical to SEQ ID NO: 2423
  source 1..31: mol_type = other RNA

SEQ ID NO: 41282 - RNA, 22 nt, Synthetic Construct
  source 1..22: mol_type = other RNA
ggcagggttcgtgactggggtg

SEQ ID NO: 41283 - RNA, 22 nt, Synthetic Construct
  source 1..22: mol_type = other RNA
ggcagggttcgtgactggggtg

SEQ ID NO: 41284 - RNA, 15 nt, Synthetic Construct
  source 1..15: mol_type = other RNA
gggtgaaagcggggg

SEQ ID NO: 41285 - RNA, 15 nt, Synthetic Construct
  source 1..15: mol_type = other RNA
gggtgaaagcggggg

SEQ ID NO: 41286 - RNA, 21 nt, Synthetic Construct
  source 1..21: mol_type = other RNA
ctaatcccagaaacccggtcg

SEQ ID NO: 41287 - RNA, 21 nt, Synthetic Construct
  source 1..21: mol_type = other RNA
ctaatcccagaaacccggtcg

SEQ ID NO: 41288 - RNA, 15 nt, Synthetic Construct
  source 1..15: mol_type = other RNA
ccgcttttgtcaggg

SEQ ID NO: 41289 - RNA, 15 nt, Synthetic Construct
  source 1..15: mol_type = other RNA
ccgcttttgtcaggg

SEQ ID NO: 41290 - RNA, 34 nt, Synthetic Construct; identical to SEQ ID NO: 2364
  source 1..34: mol_type = other RNA

SEQ ID NO: 41291 - RNA, 41 nt, Synthetic Construct; identical to SEQ ID NO: 2441
  source 1..41: mol_type = other RNA

SEQ ID NO: 41292 - RNA, 41 nt, Synthetic Construct; identical to SEQ ID NO: 2441
  source 1..41: mol_type = other RNA

SEQ ID NO: 41293 - RNA, 18 nt, Synthetic Construct
  source 1..18: mol_type = other RNA
accggaggaaggtgggga

SEQ ID NO: 41294 - RNA, 36 nt, Synthetic Construct; identical to SEQ ID NO: 2248
  source 1..36: mol_type = other RNA

SEQ ID NO: 41295 - RNA, 36 nt, Synthetic Construct; identical to SEQ ID NO: 2248
  source 1..36: mol_type = other RNA

SEQ ID NO: 41296 - RNA, 15 nt, Synthetic Construct
  source 1..15: mol_type = other RNA
cctcgcgcgattgga

SEQ ID NO: 41297 - RNA, 15 nt, Synthetic Construct
  source 1..15: mol_type = other RNA
cctcgcgcgattgga

SEQ ID NO: 41298 - RNA, 15 nt, Synthetic Construct
  source 1..15: mol_type = other RNA
gctttgatccggaga

SEQ ID NO: 41299 - RNA, 15 nt, Synthetic Construct
  source 1..15: mol_type = other RNA
gctttgatccggaga

SEQ ID NO: 41300 - RNA, 23 nt, Synthetic Construct
  source 1..23: mol_type = other RNA
cgaggggcagagagcgagacttt

SEQ ID NO: 41301 - RNA, 34 nt, Synthetic Construct; identical to SEQ ID NO: 2291
  source 1..34: mol_type = other RNA

SEQ ID NO: 41302 - RNA, 34 nt, Synthetic Construct; identical to SEQ ID NO: 2291
  source 1..34: mol_type = other RNA

SEQ ID NO: 41303 - RNA, 36 nt, Synthetic Construct; identical to SEQ ID NO: 2506
  source 1..36: mol_type = other RNA

SEQ ID NO: 41304 - RNA, 36 nt, Synthetic Construct; identical to SEQ ID NO: 2506
  source 1..36: mol_type = other RNA

SEQ ID NO: 41305 - RNA, 33 nt, Synthetic Construct; identical to SEQ ID NO: 3082
  source 1..33: mol_type = other RNA

SEQ ID NO: 41306 - RNA, 33 nt, Synthetic Construct; identical to SEQ ID NO: 3082
  source 1..33: mol_type = other RNA

SEQ ID NO: 41307 - RNA, 24 nt, Synthetic Construct
  source 1..24: mol_type = other RNA
gatgaggcgtgataacgagtctgc

SEQ ID NO: 41308 - RNA, 24 nt, Synthetic Construct
  source 1..24: mol_type = other RNA
gatgaggcgtgataacgagtctgc

SEQ ID NO: 41309 - RNA, 35 nt, Synthetic Construct; identical to SEQ ID NO: 2548
  source 1..35: mol_type = other RNA

SEQ ID NO: 41310 - RNA, 35 nt, Synthetic Construct; identical to SEQ ID NO: 2548
  source 1..35: mol_type = other RNA

SEQ ID NO: 41311 - RNA, 22 nt, Synthetic Construct
  source 1..22: mol_type = other RNA
cctcgcgcgattggagcggccg

SEQ ID NO: 41312 - RNA, 22 nt, Synthetic Construct
  source 1..22: mol_type = other RNA
cctcgcgcgattggagcggccg

SEQ ID NO: 41313 - RNA, 16 nt, Synthetic Construct
  source 1..16: mol_type = other RNA
tgcaagtcgaacggta

SEQ ID NO: 41314 - RNA, 16 nt, Synthetic Construct
  source 1..16: mol_type = other RNA
tgcaagtcgaacggta

SEQ ID NO: 41315 - RNA, 32 nt, Synthetic Construct; identical to SEQ ID NO: 2850
  source 1..32: mol_type = other RNA

SEQ ID NO: 41316 - RNA, 32 nt, Synthetic Construct; identical to SEQ ID NO: 2850
  source 1..32: mol_type = other RNA

SEQ ID NO: 41317 - RNA, 22 nt, Synthetic Construct
  source 1..22: mol_type = other RNA
tgtagtgtttcctactttatgg

SEQ ID NO: 41318 - RNA, 22 nt, Synthetic Construct
  source 1..22: mol_type = other RNA
tgtagtgtttcctactttatgg

SEQ ID NO: 41319 - RNA, 34 nt, Synthetic Construct; identical to SEQ ID NO: 2298
  source 1..34: mol_type = other RNA

SEQ ID NO: 41320 - RNA, 34 nt, Synthetic Construct; identical to SEQ ID NO: 2298
  source 1..34: mol_type = other RNA

SEQ ID NO: 41321 - RNA, 31 nt, Synthetic Construct; identical to SEQ ID NO: 2333
  source 1..31: mol_type = other RNA

SEQ ID NO: 41322 - RNA, 31 nt, Synthetic Construct; identical to SEQ ID NO: 2333
  source 1..31: mol_type = other RNA

SEQ ID NO: 41323 - RNA, 28 nt, Synthetic Construct
  source 1..28: mol_type = other RNA
cgactcttagcggtggatcactcggctc

SEQ ID NO: 41324 - RNA, 28 nt, Synthetic Construct
  source 1..28: mol_type = other RNA
cgactcttagcggtggatcactcggctc

SEQ ID NO: 41325 - RNA, 34 nt, Synthetic Construct; identical to SEQ ID NO: 2317
  source 1..34: mol_type = other RNA

SEQ ID NO: 41326 - RNA, 34 nt, Synthetic Construct; identical to SEQ ID NO: 2317
  source 1..34: mol_type = other RNA

SEQ ID NO: 41327 - RNA, 21 nt, Synthetic Construct
  source 1..21: mol_type = other RNA
tggggtagtaggttgtgtggt

SEQ ID NO: 41328 - RNA, 21 nt, Synthetic Construct
  source 1..21: mol_type = other RNA
tggggtagtaggttgtgtggt

SEQ ID NO: 41329 - RNA, 31 nt, Synthetic Construct; identical to SEQ ID NO: 2263
  source 1..31: mol_type = other RNA

SEQ ID NO: 41330 - RNA, 31 nt, Synthetic Construct; identical to SEQ ID NO: 2263
  source 1..31: mol_type = other RNA

SEQ ID NO: 41331 - RNA, 23 nt, Synthetic Construct
  source 1..23: mol_type = other RNA
tcctgtaccgagctgccccgagt

SEQ ID NO: 41332 - RNA, 23 nt, Synthetic Construct
  source 1..23: mol_type = other RNA
tcctgtaccgagctgccccgagt

SEQ ID NO: 41333 - RNA, 16 nt, Synthetic Construct
  source 1..16: mol_type = other RNA
cgctagtaatcgcgga

SEQ ID NO: 41334 - RNA, 16 nt, Synthetic Construct
  source 1..16: mol_type = other RNA
cgctagtaatcgcgga

SEQ ID NO: 41335 - RNA, 23 nt, Synthetic Construct
  source 1..23: mol_type = other RNA
tccctggtggtctagtggttagg

SEQ ID NO: 41336 - RNA, 23 nt, Synthetic Construct
  source 1..23: mol_type = other RNA
cgaggggcagagagcgagacttt

SEQ ID NO: 41337 - RNA, 32 nt, Synthetic Construct; identical to SEQ ID NO: 2435
  source 1..32: mol_type = other RNA

SEQ ID NO: 41338 - RNA, 32 nt, Synthetic Construct; identical to SEQ ID NO: 2435
  source 1..32: mol_type = other RNA

SEQ ID NO: 41339 - RNA, 20 nt, Synthetic Construct
  source 1..20: mol_type = other RNA
caatggccgggacagagggc

SEQ ID NO: 41340 - RNA, 20 nt, Synthetic Construct
  source 1..20: mol_type = other RNA
caatggccgggacagagggc

SEQ ID NO: 41341 - RNA, 16 nt, Synthetic Construct
  source 1..16: mol_type = other RNA
gtcaacggccatacca

SEQ ID NO: 41342 - RNA, 16 nt, Synthetic Construct
  source 1..16: mol_type = other RNA
gtcaacggccatacca

SEQ ID NO: 41343 - RNA, 32 nt, Synthetic Construct; identical to SEQ ID NO: 2582
  source 1..32: mol_type = other RNA

SEQ ID NO: 41344 - RNA, 32 nt, Synthetic Construct; identical to SEQ ID NO: 2582
  source 1..32: mol_type = other RNA

SEQ ID NO: 41345 - RNA, 16 nt, Synthetic Construct
  source 1..16: mol_type = other RNA
gtccggatcgtagtct

SEQ ID NO: 41346 - RNA, 16 nt, Synthetic Construct
  source 1..16: mol_type = other RNA
gtccggatcgtagtct

SEQ ID NO: 41347 - RNA, 16 nt, Synthetic Construct
  source 1..16: mol_type = other RNA
gggtgaaagcggggga

SEQ ID NO: 41348 - RNA, 16 nt, Synthetic Construct
  source 1..16: mol_type = other RNA
gggtgaaagcggggga

SEQ ID NO: 41349 - RNA, 31 nt, Synthetic Construct; identical to SEQ ID NO: 960
  source 1..31: mol_type = other RNA

SEQ ID NO: 41350 - RNA, 31 nt, Synthetic Construct; identical to SEQ ID NO: 960
  source 1..31: mol_type = other RNA

SEQ ID NO: 41351 - RNA, 23 nt, Synthetic Construct
  source 1..23: mol_type = other RNA
tcggaatcgctagtaatcgcgga

SEQ ID NO: 41352 - RNA, 23 nt, Synthetic Construct
  source 1..23: mol_type = other RNA
tcggaatcgctagtaatcgcgga

SEQ ID NO: 41353 - RNA, 30 nt, Synthetic Construct; identical to SEQ ID NO: 2840
  source 1..30: mol_type = other RNA

SEQ ID NO: 41354 - RNA, 30 nt, Synthetic Construct; identical to SEQ ID NO: 2840
  source 1..30: mol_type = other RNA

SEQ ID NO: 41355 - RNA, 35 nt, Synthetic Construct; identical to SEQ ID NO: 2069
  source 1..35: mol_type = other RNA

SEQ ID NO: 41356 - RNA, 22 nt, Synthetic Construct
  source 1..22: mol_type = other RNA
tgttggttcaagcgtgtagtcg

SEQ ID NO: 41357 - RNA, 22 nt, Synthetic Construct
  source 1..22: mol_type = other RNA
tgttggttcaagcgtgtagtcg

SEQ ID NO: 41358 - RNA, 17 nt, Synthetic Construct
  source 1..17: mol_type = other RNA
agcggtggatgatgtgg

SEQ ID NO: 41359 - RNA, 17 nt, Synthetic Construct
  source 1..17: mol_type = other RNA
agcggtggatgatgtgg

SEQ ID NO: 41360 - RNA, 31 nt, Synthetic Construct; identical to SEQ ID NO: 2293
  source 1..31: mol_type = other RNA

SEQ ID NO: 41361 - RNA, 31 nt, Synthetic Construct; identical to SEQ ID NO: 2293
  source 1..31: mol_type = other RNA

SEQ ID NO: 41362 - RNA, 31 nt, Synthetic Construct; identical to SEQ ID NO: 758
  source 1..31: mol_type = other RNA

SEQ ID NO: 41363 - RNA, 31 nt, Synthetic Construct; identical to SEQ ID NO: 758
  source 1..31: mol_type = other RNA

SEQ ID NO: 41364 - RNA, 16 nt, Synthetic Construct
  source 1..16: mol_type = other RNA
tgcaagtcgaacggta

SEQ ID NO: 41365 - RNA, 16 nt, Synthetic Construct
  source 1..16: mol_type = other RNA
tgcaagtcgaacggta

SEQ ID NO: 41366 - RNA, 21 nt, Synthetic Construct
  source 1..21: mol_type = other RNA
tcccagtaaacggcggccgta

SEQ ID NO: 41367 - RNA, 21 nt, Synthetic Construct
  source 1..21: mol_type = other RNA
tcccagtaaacggcggccgta

SEQ ID NO: 41368 - RNA, 16 nt, Synthetic Construct
  source 1..16: mol_type = other RNA
gcgtagatatgcggag

SEQ ID NO: 41369 - RNA, 16 nt, Synthetic Construct
  source 1..16: mol_type = other RNA
gcgtagatatgcggag

SEQ ID NO: 41370 - RNA, 16 nt, Synthetic Construct
  source 1..16: mol_type = other RNA
gtcgacgtatagggtg

SEQ ID NO: 41371 - RNA, 16 nt, Synthetic Construct
  source 1..16: mol_type = other RNA
gtcgacgtatagggtg

SEQ ID NO: 41372 - RNA, 20 nt, Synthetic Construct
  source 1..20: mol_type = other RNA
cgaggtagtaggttgtgtgg

SEQ ID NO: 41373 - RNA, 20 nt, Synthetic Construct
  source 1..20: mol_type = other RNA
cgaggtagtaggttgtgtgg

SEQ ID NO: 41374 - RNA, 28 nt, Synthetic Construct
  source 1..28: mol_type = other RNA
ccgtgtgaaagtaggtcatcgtcaggct

SEQ ID NO: 41375 - RNA, 28 nt, Synthetic Construct
  source 1..28: mol_type = other RNA
ccgtgtgaaagtaggtcatcgtcaggct

SEQ ID NO: 41376 - RNA, 18 nt, Synthetic Construct
  source 1..18: mol_type = other RNA
gtcgacgtatagggtgtg

SEQ ID NO: 41377 - RNA, 16 nt, Synthetic Construct
  source 1..16: mol_type = other RNA
ccggaggaaggtgggg

SEQ ID NO: 41378 - RNA, 16 nt, Synthetic Construct
  source 1..16: mol_type = other RNA
ccggaggaaggtgggg

SEQ ID NO: 41379 - RNA, 36 nt, Synthetic Construct; identical to SEQ ID NO: 2444
  source 1..36: mol_type = other RNA

SEQ ID NO: 41380 - RNA, 36 nt, Synthetic Construct; identical to SEQ ID NO: 2444
  source 1..36: mol_type = other RNA

SEQ ID NO: 41381 - RNA, 31 nt, Synthetic Construct; identical to SEQ ID NO: 2893
  source 1..31: mol_type = other RNA

SEQ ID NO: 41382 - RNA, 31 nt, Synthetic Construct; identical to SEQ ID NO: 2893
  source 1..31: mol_type = other RNA

SEQ ID NO: 41383 - RNA, 32 nt, Synthetic Construct; identical to SEQ ID NO: 3092
  source 1..32: mol_type = other RNA

SEQ ID NO: 41384 - RNA, 32 nt, Synthetic Construct; identical to SEQ ID NO: 3092
  source 1..32: mol_type = other RNA

SEQ ID NO: 41385 - RNA, 19 nt, Synthetic Construct
  source 1..19: mol_type = other RNA
ccagtaaacggcggccgta

SEQ ID NO: 41386 - RNA, 19 nt, Synthetic Construct
  source 1..19: mol_type = other RNA
ccagtaaacggcggccgta

SEQ ID NO: 41387 - RNA, 35 nt, Synthetic Construct; identical to SEQ ID NO: 2397
  source 1..35: mol_type = other RNA

SEQ ID NO: 41388 - RNA, 35 nt, Synthetic Construct; identical to SEQ ID NO: 2397
  source 1..35: mol_type = other RNA

SEQ ID NO: 41389 - RNA, 21 nt, Synthetic Construct
  source 1..21: mol_type = other RNA
tgaggcagtaggttgtgtggt

SEQ ID NO: 41390 - RNA, 21 nt, Synthetic Construct
  source 1..21: mol_type = other RNA
tgaggcagtaggttgtgtggt

SEQ ID NO: 41391 - RNA, 23 nt, Synthetic Construct
  source 1..23: mol_type = other RNA
taaagtgcttatagtgcaggtag

SEQ ID NO: 41392 - RNA, 23 nt, Synthetic Construct
  source 1..23: mol_type = other RNA
taaagtgcttatagtgcaggtag

SEQ ID NO: 41393 - RNA, 17 nt, Synthetic Construct
  source 1..17: mol_type = other RNA
gtcgacgtatagggtgt

SEQ ID NO: 41394 - RNA, 17 nt, Synthetic Construct
  source 1..17: mol_type = other RNA
gtcgacgtatagggtgt

SEQ ID NO: 41395 - RNA, 17 nt, Synthetic Construct
  source 1..17: mol_type = other RNA
accggaggaaggtgggg

SEQ ID NO: 41396 - RNA, 21 nt, Synthetic Construct
  source 1..21: mol_type = other RNA
atcggaacgtgcccagtcgtg

SEQ ID NO: 41397 - RNA, 16 nt, Synthetic Construct
  source 1..16: mol_type = other RNA
gcggtggatgatgtgg

SEQ ID NO: 41398 - RNA, 16 nt, Synthetic Construct
  source 1..16: mol_type = other RNA
gcggtggatgatgtgg

SEQ ID NO: 41399 - RNA, 22 nt, Synthetic Construct
  source 1..22: mol_type = other RNA
tgtagtgtttcctactttatgg

SEQ ID NO: 41400 - RNA, 18 nt, Synthetic Construct
  source 1..18: mol_type = other RNA
accggaggaaggtgggga

SEQ ID NO: 41401 - RNA, 18 nt, Synthetic Construct
  source 1..18: mol_type = other RNA
accggaggaaggtgggga

SEQ ID NO: 41402 - RNA, 15 nt, Synthetic Construct
  source 1..15: mol_type = other RNA
gagtagggcgggaca

SEQ ID NO: 41403 - RNA, 15 nt, Synthetic Construct
  source 1..15: mol_type = other RNA
gagtagggcgggaca

SEQ ID NO: 41404 - RNA, 23 nt, Synthetic Construct
  source 1..23: mol_type = other RNA
tgaggggcagagagcgagactct

SEQ ID NO: 41405 - RNA, 23 nt, Synthetic Construct
  source 1..23: mol_type = other RNA
tgaggggcagagagcgagactct

SEQ ID NO: 41406 - RNA, 27 nt, Synthetic Construct
  source 1..27: mol_type = other RNA
cgactcttagcggtggatcactcggct

SEQ ID NO: 41407 - RNA, 27 nt, Synthetic Construct
  source 1..27: mol_type = other RNA
cgactcttagcggtggatcactcggct

SEQ ID NO: 41408 - RNA, 23 nt, Synthetic Construct
  source 1..23: mol_type = other RNA
ggcagggttcgtgactggggtga

SEQ ID NO: 41409 - RNA, 23 nt, Synthetic Construct
  source 1..23: mol_type = other RNA
ggcagggttcgtgactggggtga

SEQ ID NO: 41410 - RNA, 26 nt, Synthetic Construct
  source 1..26: mol_type = other RNA
gatgcgtggtaggagagcgttctgta

SEQ ID NO: 41411 - RNA, 26 nt, Synthetic Construct
  source 1..26: mol_type = other RNA
gatgcgtggtaggagagcgttctgta

SEQ ID NO: 41412 - RNA, 31 nt, Synthetic Construct; identical to SEQ ID NO: 2427
  source 1..31: mol_type = other RNA

SEQ ID NO: 41413 - RNA, 31 nt, Synthetic Construct; identical to SEQ ID NO: 2427
  source 1..31: mol_type = other RNA

SEQ ID NO: 41414 - RNA, 31 nt, Synthetic Construct; identical to SEQ ID NO: 2427
  source 1..31: mol_type = other RNA

SEQ ID NO: 41415 - RNA, 22 nt, Synthetic Construct
  source 1..22: mol_type = other RNA
ngaggtagtaggttgtgtggtt

SEQ ID NO: 41416 - RNA, 22 nt, Synthetic Construct
  source 1..22: mol_type = other RNA
ngaggtagtaggttgtgtggtt

SEQ ID NO: 41417 - RNA, 15 nt, Synthetic Construct
  source 1..15: mol_type = other RNA
ccgcttttgtcaggg

SEQ ID NO: 41418 - RNA, 15 nt, Synthetic Construct
  source 1..15: mol_type = other RNA
ccgcttttgtcaggg

SEQ ID NO: 41419 - RNA, 27 nt, Synthetic Construct
  source 1..27: mol_type = other RNA
ccgtgtgaaagtaggtcatcgtcaggc

SEQ ID NO: 41420 - RNA, 27 nt, Synthetic Construct
  source 1..27: mol_type = other RNA
ccgtgtgaaagtaggtcatcgtcaggc

SEQ ID NO: 41421 - RNA, 15 nt, Synthetic Construct
  source 1..15: mol_type = other RNA
gcgtagatatgcgga

SEQ ID NO: 41422 - RNA, 20 nt, Synthetic Construct
  source 1..20: mol_type = other RNA
cccagtaaacggcggccgta

SEQ ID NO: 41423 - RNA, 20 nt, Synthetic Construct
  source 1..20: mol_type = other RNA
cccagtaaacggcggccgta

SEQ ID NO: 41424 - RNA, 32 nt, Synthetic Construct; identical to SEQ ID NO: 2086
  source 1..32: mol_type = other RNA

SEQ ID NO: 41425 - RNA, 32 nt, Synthetic Construct; identical to SEQ ID NO: 2086
  source 1..32: mol_type = other RNA

SEQ ID NO: 41426 - RNA, 34 nt, Synthetic Construct; identical to SEQ ID NO: 2364
  source 1..34: mol_type = other RNA

SEQ ID NO: 41427 - RNA, 34 nt, Synthetic Construct; identical to SEQ ID NO: 2364
  source 1..34: mol_type = other RNA

SEQ ID NO: 41428 - RNA, 33 nt, Synthetic Construct; identical to SEQ ID NO: 1982
  source 1..33: mol_type = other RNA

SEQ ID NO: 41429 - RNA, 33 nt, Synthetic Construct; identical to SEQ ID NO: 1982
  source 1..33: mol_type = other RNA

SEQ ID NO: 41430 - RNA, 21 nt, Synthetic Construct
  source 1..21: mol_type = other RNA
tcccgtactgagctgccccga

SEQ ID NO: 41431 - RNA, 21 nt, Synthetic Construct
  source 1..21: mol_type = other RNA
tcccgtactgagctgccccga

SEQ ID NO: 41432 - RNA, 35 nt, Synthetic Construct; identical to SEQ ID NO: 2762
  source 1..35: mol_type = other RNA

SEQ ID NO: 41433 - RNA, 35 nt, Synthetic Construct; identical to SEQ ID NO: 2762
  source 1..35: mol_type = other RNA

SEQ ID NO: 41434 - RNA, 21 nt, Synthetic Construct
  source 1..21: mol_type = other RNA
tgaggtagcaggttgtgtggt

SEQ ID NO: 41435 - RNA, 21 nt, Synthetic Construct
  source 1..21: mol_type = other RNA
tgaggtagcaggttgtgtggt

SEQ ID NO: 41436 - RNA, 21 nt, Synthetic Construct
  source 1..21: mol_type = other RNA
tgaggtagtgggttgtgtggt

SEQ ID NO: 41437 - RNA, 21 nt, Synthetic Construct
  source 1..21: mol_type = other RNA
tgaggtagtgggttgtgtggt

SEQ ID NO: 41438 - RNA, 32 nt, Synthetic Construct; identical to SEQ ID NO: 2052
  source 1..32: mol_type = other RNA

SEQ ID NO: 41439 - RNA, 32 nt, Synthetic Construct; identical to SEQ ID NO: 2052
  source 1..32: mol_type = other RNA

SEQ ID NO: 41440 - RNA, 30 nt, Synthetic Construct; identical to SEQ ID NO: 2274
  source 1..30: mol_type = other RNA

SEQ ID NO: 41441 - RNA, 30 nt, Synthetic Construct; identical to SEQ ID NO: 2274
  source 1..30: mol_type = other RNA

SEQ ID NO: 41442 - RNA, 23 nt, Synthetic Construct
  source 1..23: mol_type = other RNA
tggtaatacgacgcacttagtgt

SEQ ID NO: 41443 - RNA, 23 nt, Synthetic Construct
  source 1..23: mol_type = other RNA
tggtaatacgacgcacttagtgt

SEQ ID NO: 41444 - RNA, 28 nt, Synthetic Construct
  source 1..28: mol_type = other RNA
ggcagggttcgtgactggggtgaagtcg

SEQ ID NO: 41445 - RNA, 15 nt, Synthetic Construct
  source 1..15: mol_type = other RNA
tgcaagtcgaacggt

SEQ ID NO: 41446 - RNA, 15 nt, Synthetic Construct
  source 1..15: mol_type = other RNA
tgcaagtcgaacggt

SEQ ID NO: 41447 - RNA, 20 nt, Synthetic Construct
  source 1..20: mol_type = other RNA
tgaggtagtaggctgtgtgg

SEQ ID NO: 41448 - RNA, 20 nt, Synthetic Construct
  source 1..20: mol_type = other RNA
tgaggtagtaggctgtgtgg

SEQ ID NO: 41449 - RNA, 26 nt, Synthetic Construct
  source 1..26: mol_type = other RNA
gagcagctaataccgcatacgacctg

SEQ ID NO: 41450 - RNA, 26 nt, Synthetic Construct
  source 1..26: mol_type = other RNA
gagcagctaataccgcatacgacctg

SEQ ID NO: 41451 - RNA, 35 nt, Synthetic Construct; identical to SEQ ID NO: 3369
  source 1..35: mol_type = other RNA

SEQ ID NO: 41452 - RNA, 35 nt, Synthetic Construct; identical to SEQ ID NO: 3369
  source 1..35: mol_type = other RNA

SEQ ID NO: 41453 - RNA, 31 nt, Synthetic Construct; identical to SEQ ID NO: 2758
  source 1..31: mol_type = other RNA

SEQ ID NO: 41454 - RNA, 31 nt, Synthetic Construct; identical to SEQ ID NO: 2758
  source 1..31: mol_type = other RNA

SEQ ID NO: 41455 - RNA, 16 nt, Synthetic Construct
  source 1..16: mol_type = other RNA
gaaattccttgtcggg

SEQ ID NO: 41456 - RNA, 16 nt, Synthetic Construct
  source 1..16: mol_type = other RNA
gaaattccttgtcggg

SEQ ID NO: 41457 - RNA, 33 nt, Synthetic Construct; identical to SEQ ID NO: 2253
  source 1..33: mol_type = other RNA

SEQ ID NO: 41458 - RNA, 33 nt, Synthetic Construct; identical to SEQ ID NO: 2253
  source 1..33: mol_type = other RNA

SEQ ID NO: 41459 - RNA, 22 nt, Synthetic Construct
  source 1..22: mol_type = other RNA
ccggtcccaagggtatggctgt

SEQ ID NO: 41460 - RNA, 31 nt, Synthetic Construct; identical to SEQ ID NO: 2507
  source 1..31: mol_type = other RNA

SEQ ID NO: 41461 - RNA, 31 nt, Synthetic Construct; identical to SEQ ID NO: 2507
  source 1..31: mol_type = other RNA

SEQ ID NO: 41462 - RNA, 15 nt, Synthetic Construct
  source 1..15: mol_type = other RNA
ggtcatcgtcaggct

SEQ ID NO: 41463 - RNA, 15 nt, Synthetic Construct
  source 1..15: mol_type = other RNA
ggtcatcgtcaggct

SEQ ID NO: 41464 - RNA, 23 nt, Synthetic Construct
  source 1..23: mol_type = other RNA
tggtaattcgacgtacttagtgt

SEQ ID NO: 41465 - RNA, 23 nt, Synthetic Construct
  source 1..23: mol_type = other RNA
tggtaattcgacgtacttagtgt

SEQ ID NO: 41466 - RNA, 16 nt, Synthetic Construct
  source 1..16: mol_type = other RNA
tgcgtagatatgcgga

SEQ ID NO: 41467 - RNA, 18 nt, Synthetic Construct
  source 1..18: mol_type = other RNA
catgcaagtcgaacggta

SEQ ID NO: 41468 - RNA, 18 nt, Synthetic Construct
  source 1..18: mol_type = other RNA
catgcaagtcgaacggta

SEQ ID NO: 41469 - RNA, 29 nt, Synthetic Construct
  source 1..29: mol_type = other RNA
cccgtgtgaaagtaggtcatcgtcaggct

SEQ ID NO: 41470 - RNA, 29 nt, Synthetic Construct
  source 1..29: mol_type = other RNA
cccgtgtgaaagtaggtcatcgtcaggct

SEQ ID NO: 41471 - RNA, 15 nt, Synthetic Construct
  source 1..15: mol_type = other RNA
gtcgacgtatagggt

SEQ ID NO: 41472 - RNA, 15 nt, Synthetic Construct
  source 1..15: mol_type = other RNA
gtccggatcgtagtc

SEQ ID NO: 41473 - RNA, 15 nt, Synthetic Construct
  source 1..15: mol_type = other RNA
gtccggatcgtagtc

SEQ ID NO: 41474 - RNA, 22 nt, Synthetic Construct
  source 1..22: mol_type = other RNA
tatcggaacgtgcccagtcgtg

SEQ ID NO: 41475 - RNA, 22 nt, Synthetic Construct
  source 1..22: mol_type = other RNA
tatcggaacgtgcccagtcgtg

SEQ ID NO: 41476 - RNA, 18 nt, Synthetic Construct
  source 1..18: mol_type = other RNA
gcgaaattccttgtcggg

SEQ ID NO: 41477 - RNA, 18 nt, Synthetic Construct
  source 1..18: mol_type = other RNA
gcgaaattccttgtcggg

SEQ ID NO: 41478 - RNA, 34 nt, Synthetic Construct; identical to SEQ ID NO: 2367
  source 1..34: mol_type = other RNA

SEQ ID NO: 41479 - RNA, 34 nt, Synthetic Construct; identical to SEQ ID NO: 2367
  source 1..34: mol_type = other RNA

SEQ ID NO: 41480 - RNA, 35 nt, Synthetic Construct; identical to SEQ ID NO: 2450
  source 1..35: mol_type = other RNA

SEQ ID NO: 41481 - RNA, 35 nt, Synthetic Construct; identical to SEQ ID NO: 2450
  source 1..35: mol_type = other RNA

SEQ ID NO: 41482 - RNA, 16 nt, Synthetic Construct
  source 1..16: mol_type = other RNA
ccggaggaaggtgggg

SEQ ID NO: 41483 - RNA, 23 nt, Synthetic Construct
  source 1..23: mol_type = other RNA
nggtaatacgacgtacttagtgt

SEQ ID NO: 41484 - RNA, 23 nt, Synthetic Construct
  source 1..23: mol_type = other RNA
nggtaatacgacgtacttagtgt

SEQ ID NO: 41485 - RNA, 16 nt, Synthetic Construct
  source 1..16: mol_type = other RNA
gtcaacggccatacca

SEQ ID NO: 41486 - RNA, 16 nt, Synthetic Construct
  source 1..16: mol_type = other RNA
gtcaacggccatacca

SEQ ID NO: 41487 - RNA, 21 nt, Synthetic Construct
  source 1..21: mol_type = other RNA
tgaggtggtaggttgtgtggt

SEQ ID NO: 41488 - RNA, 21 nt, Synthetic Construct
  source 1..21: mol_type = other RNA
tgaggtggtaggttgtgtggt

SEQ ID NO: 41489 - RNA, 22 nt, Synthetic Construct
  source 1..22: mol_type = other RNA
cggaatcgctagtaatcgcgga

SEQ ID NO: 41490 - RNA, 22 nt, Synthetic Construct
  source 1..22: mol_type = other RNA
cggaatcgctagtaatcgcgga

SEQ ID NO: 41491 - RNA, 35 nt, Synthetic Construct; identical to SEQ ID NO: 2269
  source 1..35: mol_type = other RNA

SEQ ID NO: 41492 - RNA, 35 nt, Synthetic Construct; identical to SEQ ID NO: 2269
  source 1..35: mol_type = other RNA

SEQ ID NO: 41493 - RNA, 23 nt, Synthetic Construct
  source 1..23: mol_type = other RNA
tggtagtacgacgtacttagtgt

SEQ ID NO: 41494 - RNA, 23 nt, Synthetic Construct
  source 1..23: mol_type = other RNA
tggtagtacgacgtacttagtgt

SEQ ID NO: 41495 - RNA, 39 nt, Synthetic Construct; identical to SEQ ID NO: 2398
  source 1..39: mol_type = other RNA

SEQ ID NO: 41496 - RNA, 39 nt, Synthetic Construct; identical to SEQ ID NO: 2398
  source 1..39: mol_type = other RNA

SEQ ID NO: 41497 - RNA, 20 nt, Synthetic Construct
  source 1..20: mol_type = other RNA
tgaggtagtaggttgtgcgg

SEQ ID NO: 41498 - RNA, 20 nt, Synthetic Construct
  source 1..20: mol_type = other RNA
tgaggtagtaggttgtgcgg

SEQ ID NO: 41499 - RNA, 38 nt, Synthetic Construct; identical to SEQ ID NO: 2492
  source 1..38: mol_type = other RNA

SEQ ID NO: 41500 - RNA, 28 nt, Synthetic Construct
  source 1..28: mol_type = other RNA
cgactcttagcggtggatcactcggctc

SEQ ID NO: 41501 - RNA, 28 nt, Synthetic Construct
  source 1..28: mol_type = other RNA
cgactcttagcggtggatcactcggctc

SEQ ID NO: 41502 - RNA, 35 nt, Synthetic Construct; identical to SEQ ID NO: 2452
  source 1..35: mol_type = other RNA

SEQ ID NO: 41503 - RNA, 35 nt, Synthetic Construct; identical to SEQ ID NO: 2452
  source 1..35: mol_type = other RNA

SEQ ID NO: 41504 - RNA, 34 nt, Synthetic Construct; identical to SEQ ID NO: 2265
  source 1..34: mol_type = other RNA

SEQ ID NO: 41505 - RNA, 34 nt, Synthetic Construct; identical to SEQ ID NO: 2265
  source 1..34: mol_type = other RNA

SEQ ID NO: 41506 - RNA, 36 nt, Synthetic Construct; identical to SEQ ID NO: 2344
  source 1..36: mol_type = other RNA

SEQ ID NO: 41507 - RNA, 36 nt, Synthetic Construct; identical to SEQ ID NO: 2344
  source 1..36: mol_type = other RNA

SEQ ID NO: 41508 - RNA, 17 nt, Synthetic Construct
  source 1..17: mol_type = other RNA
cgcgacctcagatcaga

SEQ ID NO: 41509 - RNA, 17 nt, Synthetic Construct
  source 1..17: mol_type = other RNA
cgcgacctcagatcaga

SEQ ID NO: 41510 - RNA, 21 nt, Synthetic Construct
  source 1..21: mol_type = other RNA
tgaggtagtagtttgtgctgc

SEQ ID NO: 41511 - RNA, 23 nt, Synthetic Construct
  source 1..23: mol_type = other RNA
tggtaattcgacgtacttagtgt

SEQ ID NO: 41512 - RNA, 23 nt, Synthetic Construct
  source 1..23: mol_type = other RNA
tggtaattcgacgtacttagtgt

SEQ ID NO: 41513 - RNA, 21 nt, Synthetic Construct
  source 1..21: mol_type = other RNA
atcggaacgtgcccagtcgtg

SEQ ID NO: 41514 - RNA, 21 nt, Synthetic Construct
  source 1..21: mol_type = other RNA
atcggaacgtgcccagtcgtg

SEQ ID NO: 41515 - RNA, 19 nt, Synthetic Construct
  source 1..19: mol_type = other RNA
gcgaaattccttgtcgggt

SEQ ID NO: 41516 - RNA, 19 nt, Synthetic Construct
  source 1..19: mol_type = other RNA
gcgaaattccttgtcgggt

SEQ ID NO: 41517 - RNA, 22 nt, Synthetic Construct
  source 1..22: mol_type = other RNA
cctcgcgcgattggagcggccg

SEQ ID NO: 41518 - RNA, 32 nt, Synthetic Construct; identical to SEQ ID NO: 3092
  source 1..32: mol_type = other RNA

SEQ ID NO: 41519 - RNA, 33 nt, Synthetic Construct; identical to SEQ ID NO: 2395
  source 1..33: mol_type = other RNA

SEQ ID NO: 41520 - RNA, 33 nt, Synthetic Construct; identical to SEQ ID NO: 2395
  source 1..33: mol_type = other RNA

SEQ ID NO: 41521 - RNA, 36 nt, Synthetic Construct; identical to SEQ ID NO: 2469
  source 1..36: mol_type = other RNA

SEQ ID NO: 41522 - RNA, 36 nt, Synthetic Construct; identical to SEQ ID NO: 2469
  source 1..36: mol_type = other RNA

SEQ ID NO: 41523 - RNA, 17 nt, Synthetic Construct
  source 1..17: mol_type = other RNA
taggtcatcgtcaggct

SEQ ID NO: 41524 - RNA, 17 nt, Synthetic Construct
  source 1..17: mol_type = other RNA
taggtcatcgtcaggct

SEQ ID NO: 41525 - RNA, 19 nt, Synthetic Construct
  source 1..19: mol_type = other RNA
agtcgacgtatagggtgtg

SEQ ID NO: 41526 - RNA, 19 nt, Synthetic Construct
  source 1..19: mol_type = other RNA
agtcgacgtatagggtgtg

SEQ ID NO: 41527 - RNA, 16 nt, Synthetic Construct
  source 1..16: mol_type = other RNA
gaaattccttgtcggg

SEQ ID NO: 41528 - RNA, 16 nt, Synthetic Construct
  source 1..16: mol_type = other RNA
gaaattccttgtcggg

SEQ ID NO: 41529 - RNA, 31 nt, Synthetic Construct; identical to SEQ ID NO: 2442
  source 1..31: mol_type = other RNA

SEQ ID NO: 41530 - RNA, 34 nt, Synthetic Construct; identical to SEQ ID NO: 2553
  source 1..34: mol_type = other RNA

SEQ ID NO: 41531 - RNA, 34 nt, Synthetic Construct; identical to SEQ ID NO: 2553
  source 1..34: mol_type = other RNA

SEQ ID NO: 41532 - RNA, 23 nt, Synthetic Construct
  source 1..23: mol_type = other RNA
tggtaattcgacgtacttagtgt

SEQ ID NO: 41533 - RNA, 23 nt, Synthetic Construct
  source 1..23: mol_type = other RNA
tgaggagcagagagcgagacttt

SEQ ID NO: 41534 - RNA, 23 nt, Synthetic Construct
  source 1..23: mol_type = other RNA
tgaggagcagagagcgagacttt

SEQ ID NO: 41535 - RNA, 20 nt, Synthetic Construct
  source 1..20: mol_type = other RNA
tcagtagctcgaggaaaaga

SEQ ID NO: 41536 - RNA, 20 nt, Synthetic Construct
  source 1..20: mol_type = other RNA
tcagtagctcgaggaaaaga

SEQ ID NO: 41537 - RNA, 23 nt, Synthetic Construct
  source 1..23: mol_type = other RNA
tggtaattcgacgtacttagtgt

SEQ ID NO: 41538 - RNA, 17 nt, Synthetic Construct
  source 1..17: mol_type = other RNA
gtccggatcgtagtctg

SEQ ID NO: 41539 - RNA, 17 nt, Synthetic Construct
  source 1..17: mol_type = other RNA
gtccggatcgtagtctg

SEQ ID NO: 41540 - RNA, 23 nt, Synthetic Construct
  source 1..23: mol_type = other RNA
taaagtgcttatagtgcaggtag

SEQ ID NO: 41541 - RNA, 35 nt, Synthetic Construct; identical to SEQ ID NO: 2399
  source 1..35: mol_type = other RNA

SEQ ID NO: 41542 - RNA, 35 nt, Synthetic Construct; identical to SEQ ID NO: 2399
  source 1..35: mol_type = other RNA

SEQ ID NO: 41543 - RNA, 30 nt, Synthetic Construct; identical to SEQ ID NO: 1958
  source 1..30: mol_type = other RNA

SEQ ID NO: 41544 - RNA, 30 nt, Synthetic Construct; identical to SEQ ID NO: 1958
  source 1..30: mol_type = other RNA

SEQ ID NO: 41545 - RNA, 34 nt, Synthetic Construct; identical to SEQ ID NO: 2529
  source 1..34: mol_type = other RNA

SEQ ID NO: 41546 - RNA, 34 nt, Synthetic Construct; identical to SEQ ID NO: 2529
  source 1..34: mol_type = other RNA

SEQ ID NO: 41547 - RNA, 34 nt, Synthetic Construct; identical to SEQ ID NO: 2375
  source 1..34: mol_type = other RNA

SEQ ID NO: 41548 - RNA, 34 nt, Synthetic Construct; identical to SEQ ID NO: 2375
  source 1..34: mol_type = other RNA

SEQ ID NO: 41549 - RNA, 23 nt, Synthetic Construct
  source 1..23: mol_type = other RNA
tgaggggcggagagcgagacttt

SEQ ID NO: 41550 - RNA, 15 nt, Synthetic Construct
  source 1..15: mol_type = other RNA
gagtagggcgggaca

SEQ ID NO: 41551 - RNA, 23 nt, Synthetic Construct
  source 1..23: mol_type = other RNA
tgaggggtagagagcgagacttt

SEQ ID NO: 41552 - RNA, 23 nt, Synthetic Construct
  source 1..23: mol_type = other RNA
tgaggggtagagagcgagacttt

SEQ ID NO: 41553 - RNA, 21 nt, Synthetic Construct
  source 1..21: mol_type = other RNA
tgaggtagtaggtcgtgtggt

SEQ ID NO: 41554 - RNA, 21 nt, Synthetic Construct
  source 1..21: mol_type = other RNA
tgaggtagtaggtcgtgtggt

SEQ ID NO: 41555 - RNA, 23 nt, Synthetic Construct
  source 1..23: mol_type = other RNA
tggtaatacaacgtacttagtgt

SEQ ID NO: 41556 - RNA, 23 nt, Synthetic Construct
  source 1..23: mol_type = other RNA
tggtaatacaacgtacttagtgt

SEQ ID NO: 41557 - RNA, 21 nt, Synthetic Construct
  source 1..21: mol_type = other RNA
taaggtagtaggttgtgtggt

SEQ ID NO: 41558 - RNA, 21 nt, Synthetic Construct
  source 1..21: mol_type = other RNA
taaggtagtaggttgtgtggt

SEQ ID NO: 41559 - RNA, 24 nt, Synthetic Construct
  source 1..24: mol_type = other RNA
cgactcttagcggtggatcactcg

SEQ ID NO: 41560 - RNA, 24 nt, Synthetic Construct
  source 1..24: mol_type = other RNA
cgactcttagcggtggatcactcg

SEQ ID NO: 41561 - RNA, 33 nt, Synthetic Construct; identical to SEQ ID NO: 3082
  source 1..33: mol_type = other RNA

SEQ ID NO: 41562 - RNA, 33 nt, Synthetic Construct; identical to SEQ ID NO: 3082
  source 1..33: mol_type = other RNA

SEQ ID NO: 41563 - RNA, 32 nt, Synthetic Construct; identical to SEQ ID NO: 2318
  source 1..32: mol_type = other RNA

SEQ ID NO: 41564 - RNA, 32 nt, Synthetic Construct; identical to SEQ ID NO: 2318
  source 1..32: mol_type = other RNA

SEQ ID NO: 41565 - RNA, 18 nt, Synthetic Construct
  source 1..18: mol_type = other RNA
cgccgatgatagtgcgga

SEQ ID NO: 41566 - RNA, 18 nt, Synthetic Construct
  source 1..18: mol_type = other RNA
cgccgatgatagtgcgga

SEQ ID NO: 41567 - RNA, 16 nt, Synthetic Construct
  source 1..16: mol_type = other RNA
cccagaaacccggtcg

SEQ ID NO: 41568 - RNA, 16 nt, Synthetic Construct
  source 1..16: mol_type = other RNA
cccagaaacccggtcg

SEQ ID NO: 41569 - RNA, 16 nt, Synthetic Construct
  source 1..16: mol_type = other RNA
gcgtagatatgcggag

SEQ ID NO: 41570 - RNA, 17 nt, Synthetic Construct
  source 1..17: mol_type = other RNA
gcgtagatatgcggagg

SEQ ID NO: 41571 - RNA, 23 nt, Synthetic Construct
  source 1..23: mol_type = other RNA
tgaggggcagagagcgaggcttt

SEQ ID NO: 41572 - RNA, 23 nt, Synthetic Construct
  source 1..23: mol_type = other RNA
tgaggggcagagagcgaggcttt

SEQ ID NO: 41573 - RNA, 35 nt, Synthetic Construct; identical to SEQ ID NO: 2354
  source 1..35: mol_type = other RNA

SEQ ID NO: 41574 - RNA, 35 nt, Synthetic Construct; identical to SEQ ID NO: 2354
  source 1..35: mol_type = other RNA

SEQ ID NO: 41575 - RNA, 30 nt, Synthetic Construct; identical to SEQ ID NO: 1194
  source 1..30: mol_type = other RNA

SEQ ID NO: 41576 - RNA, 30 nt, Synthetic Construct; identical to SEQ ID NO: 1194
  source 1..30: mol_type = other RNA

SEQ ID NO: 41577 - RNA, 15 nt, Synthetic Construct
  source 1..15: mol_type = other RNA
tcctgacggccatag

SEQ ID NO: 41578 - RNA, 15 nt, Synthetic Construct
  source 1..15: mol_type = other RNA
tcctgacggccatag

SEQ ID NO: 41579 - RNA, 36 nt, Synthetic Construct; identical to SEQ ID NO: 2546
  source 1..36: mol_type = other RNA

SEQ ID NO: 41580 - RNA, 36 nt, Synthetic Construct; identical to SEQ ID NO: 2546
  source 1..36: mol_type = other RNA

SEQ ID NO: 41581 - RNA, 23 nt, Synthetic Construct
  source 1..23: mol_type = other RNA
tgaggggcagggagcgagacttt

SEQ ID NO: 41582 - RNA, 16 nt, Synthetic Construct
  source 1..16: mol_type = other RNA
aggtcatcattatctg

SEQ ID NO: 41583 - RNA, 16 nt, Synthetic Construct
  source 1..16: mol_type = other RNA
aggtcatcattatctg

SEQ ID NO: 41584 - RNA, 35 nt, Synthetic Construct; identical to SEQ ID NO: 2069
  source 1..35: mol_type = other RNA

SEQ ID NO: 41585 - RNA, 35 nt, Synthetic Construct; identical to SEQ ID NO: 2069
  source 1..35: mol_type = other RNA

SEQ ID NO: 41586 - RNA, 20 nt, Synthetic Construct
  source 1..20: mol_type = other RNA
cacatgcaagtcgaacggta

SEQ ID NO: 41587 - RNA, 20 nt, Synthetic Construct
  source 1..20: mol_type = other RNA
cacatgcaagtcgaacggta

SEQ ID NO: 41588 - RNA, 35 nt, Synthetic Construct; identical to SEQ ID NO: 2354
  source 1..35: mol_type = other RNA

SEQ ID NO: 41589 - RNA, 35 nt, Synthetic Construct; identical to SEQ ID NO: 2354
  source 1..35: mol_type = other RNA

SEQ ID NO: 41590 - RNA, 27 nt, Synthetic Construct
  source 1..27: mol_type = other RNA
ncccccactgctaaatttgactggctt

SEQ ID NO: 41591 - RNA, 27 nt, Synthetic Construct
  source 1..27: mol_type = other RNA
ncccccactgctaaatttgactggctt

SEQ ID NO: 41592 - RNA, 32 nt, Synthetic Construct; identical to SEQ ID NO: 2798
  source 1..32: mol_type = other RNA

SEQ ID NO: 41593 - RNA, 32 nt, Synthetic Construct; identical to SEQ ID NO: 2798
  source 1..32: mol_type = other RNA

SEQ ID NO: 41594 - RNA, 22 nt, Synthetic Construct
  source 1..22: mol_type = other RNA
ncctgtactgagctgccccgag

SEQ ID NO: 41595 - RNA, 22 nt, Synthetic Construct
  source 1..22: mol_type = other RNA
ncctgtactgagctgccccgag

SEQ ID NO: 41596 - RNA, 26 nt, Synthetic Construct
  source 1..26: mol_type = other RNA
gagcagctaataccgcatacgacctg

SEQ ID NO: 41597 - RNA, 26 nt, Synthetic Construct
  source 1..26: mol_type = other RNA
gagcagctaataccgcatacgacctg

SEQ ID NO: 41598 - RNA, 18 nt, Synthetic Construct
  source 1..18: mol_type = other RNA
tgcgtagatatgcggagg

SEQ ID NO: 41599 - RNA, 21 nt, Synthetic Construct
  source 1..21: mol_type = other RNA
tcccagtaaacggcggccgta

SEQ ID NO: 41600 - RNA, 21 nt, Synthetic Construct
  source 1..21: mol_type = other RNA
tcccagtaaacggcggccgta

SEQ ID NO: 41601 - RNA, 23 nt, Synthetic Construct
  source 1..23: mol_type = other RNA
tgagaggcagagagcgagacttt

SEQ ID NO: 41602 - RNA, 22 nt, Synthetic Construct
  source 1..22: mol_type = other RNA
tgaggtagtaggttgtgtagtt

SEQ ID NO: 41603 - RNA, 22 nt, Synthetic Construct
  source 1..22: mol_type = other RNA
tgaggtagtaggttgtgtagtt

SEQ ID NO: 41604 - RNA, 18 nt, Synthetic Construct
  source 1..18: mol_type = other RNA
catgcaagtcgaacggta

SEQ ID NO: 41605 - RNA, 18 nt, Synthetic Construct
  source 1..18: mol_type = other RNA
catgcaagtcgaacggta

SEQ ID NO: 41606 - RNA, 23 nt, Synthetic Construct
  source 1..23: mol_type = other RNA
tggtaatacgacgtacttggtgt

SEQ ID NO: 41607 - RNA, 23 nt, Synthetic Construct
  source 1..23: mol_type = other RNA
tggtaatacgacgtacttggtgt

SEQ ID NO: 41608 - RNA, 27 nt, Synthetic Construct
  source 1..27: mol_type = other RNA
cgactcttagcggtggatcactcggct

SEQ ID NO: 41609 - RNA, 27 nt, Synthetic Construct
  source 1..27: mol_type = other RNA
cgactcttagcggtggatcactcggct

SEQ ID NO: 41610 - RNA, 22 nt, Synthetic Construct
  source 1..22: mol_type = other RNA
cggaggagttcgaaggtacgct

SEQ ID NO: 41611 - RNA, 17 nt, Synthetic Construct
  source 1..17: mol_type = other RNA
catgcaagtcgaacggt

SEQ ID NO: 41612 - RNA, 17 nt, Synthetic Construct
  source 1..17: mol_type = other RNA
catgcaagtcgaacggt

SEQ ID NO: 41613 - RNA, 32 nt, Synthetic Construct; identical to SEQ ID NO: 5582
  source 1..32: mol_type = other RNA

SEQ ID NO: 41614 - RNA, 32 nt, Synthetic Construct; identical to SEQ ID NO: 5582
  source 1..32: mol_type = other RNA

SEQ ID NO: 41615 - RNA, 23 nt, Synthetic Construct
  source 1..23: mol_type = other RNA
tggtaattcgacgtacttagtgt

SEQ ID NO: 41616 - RNA, 17 nt, Synthetic Construct
  source 1..17: mol_type = other RNA
gtgttcggaagattttc

SEQ ID NO: 41617 - RNA, 17 nt, Synthetic Construct
  source 1..17: mol_type = other RNA
gtgttcggaagattttc

SEQ ID NO: 41618 - RNA, 17 nt, Synthetic Construct
  source 1..17: mol_type = other RNA
catgcaagtcgaacggt

SEQ ID NO: 41619 - RNA, 17 nt, Synthetic Construct
  source 1..17: mol_type = other RNA
catgcaagtcgaacggt

SEQ ID NO: 41620 - RNA, 34 nt, Synthetic Construct; identical to SEQ ID NO: 2183
  source 1..34: mol_type = other RNA

SEQ ID NO: 41621 - RNA, 23 nt, Synthetic Construct
  source 1..23: mol_type = other RNA
tgagaggcagagagcgagacttt

SEQ ID NO: 41622 - RNA, 23 nt, Synthetic Construct
  source 1..23: mol_type = other RNA
tgagaggcagagagcgagacttt

SEQ ID NO: 41623 - RNA, 36 nt, Synthetic Construct; identical to SEQ ID NO: 2520
  source 1..36: mol_type = other RNA

SEQ ID NO: 41624 - RNA, 36 nt, Synthetic Construct; identical to SEQ ID NO: 2520
  source 1..36: mol_type = other RNA

SEQ ID NO: 41625 - RNA, 23 nt, Synthetic Construct
  source 1..23: mol_type = other RNA
tggtaatacgacgtacttagtgc

SEQ ID NO: 41626 - RNA, 23 nt, Synthetic Construct
  source 1..23: mol_type = other RNA
tggtaatacgacgtacttagtgc

SEQ ID NO: 41627 - RNA, 15 nt, Synthetic Construct
  source 1..15: mol_type = other RNA
acggtcctaaggtag

SEQ ID NO: 41628 - RNA, 15 nt, Synthetic Construct
  source 1..15: mol_type = other RNA
acggtcctaaggtag

SEQ ID NO: 41629 - RNA, 25 nt, Synthetic Construct
  source 1..25: mol_type = other RNA
gtcaggatggccgagcggtctaagg

SEQ ID NO: 41630 - RNA, 25 nt, Synthetic Construct
  source 1..25: mol_type = other RNA
gtcaggatggccgagcggtctaagg

SEQ ID NO: 41631 - RNA, 37 nt, Synthetic Construct; identical to SEQ ID NO: 2365
  source 1..37: mol_type = other RNA

SEQ ID NO: 41632 - RNA, 37 nt, Synthetic Construct; identical to SEQ ID NO: 2365
  source 1..37: mol_type = other RNA

SEQ ID NO: 41633 - RNA, 20 nt, Synthetic Construct
  source 1..20: mol_type = other RNA
tgaggtagcaggttgtgtgg

SEQ ID NO: 41634 - RNA, 20 nt, Synthetic Construct
  source 1..20: mol_type = other RNA
tgaggtagcaggttgtgtgg

SEQ ID NO: 41635 - RNA, 16 nt, Synthetic Construct
  source 1..16: mol_type = other RNA
gatttgggagtgctcg

SEQ ID NO: 41636 - RNA, 16 nt, Synthetic Construct
  source 1..16: mol_type = other RNA
gatttgggagtgctcg

SEQ ID NO: 41637 - RNA, 17 nt, Synthetic Construct
  source 1..17: mol_type = other RNA
gggtctgtagctcagtc

SEQ ID NO: 41638 - RNA, 17 nt, Synthetic Construct
  source 1..17: mol_type = other RNA
gggtctgtagctcagtc

SEQ ID NO: 41639 - RNA, 15 nt, Synthetic Construct
  source 1..15: mol_type = other RNA
gagagcctggacaca

SEQ ID NO: 41640 - RNA, 15 nt, Synthetic Construct
  source 1..15: mol_type = other RNA
gagagcctggacaca

SEQ ID NO: 41641 - RNA, 16 nt, Synthetic Construct
  source 1..16: mol_type = other RNA
ctgacgctcatgcacg

SEQ ID NO: 41642 - RNA, 16 nt, Synthetic Construct
  source 1..16: mol_type = other RNA
ctgacgctcatgcacg

SEQ ID NO: 41643 - RNA, 31 nt, Synthetic Construct; identical to SEQ ID NO: 758
  source 1..31: mol_type = other RNA

SEQ ID NO: 41644 - RNA, 31 nt, Synthetic Construct; identical to SEQ ID NO: 758
  source 1..31: mol_type = other RNA

SEQ ID NO: 41645 - RNA, 31 nt, Synthetic Construct; identical to SEQ ID NO: 2215
  source 1..31: mol_type = other RNA

SEQ ID NO: 41646 - RNA, 31 nt, Synthetic Construct; identical to SEQ ID NO: 2215
  source 1..31: mol_type = other RNA

SEQ ID NO: 41647 - RNA, 18 nt, Synthetic Construct
  source 1..18: mol_type = other RNA
gcgaaattccttgtcggg

SEQ ID NO: 41648 - RNA, 18 nt, Synthetic Construct
  source 1..18: mol_type = other RNA
gcgaaattccttgtcggg

SEQ ID NO: 41649 - RNA, 18 nt, Synthetic Construct
  source 1..18: mol_type = other RNA
cgcgacctcagatcagac

SEQ ID NO: 41650 - RNA, 18 nt, Synthetic Construct
  source 1..18: mol_type = other RNA
cgcgacctcagatcagac

SEQ ID NO: 41651 - RNA, 26 nt, Synthetic Construct
  source 1..26: mol_type = other RNA
gatttccccttggggttgtaggacca

SEQ ID NO: 41652 - RNA, 26 nt, Synthetic Construct
  source 1..26: mol_type = other RNA
gatttccccttggggttgtaggacca

SEQ ID NO: 41653 - RNA, 18 nt, Synthetic Construct
  source 1..18: mol_type = other RNA
gaagttgaccgcctgggg

SEQ ID NO: 41654 - RNA, 18 nt, Synthetic Construct
  source 1..18: mol_type = other RNA
gaagttgaccgcctgggg

SEQ ID NO: 41655 - RNA, 22 nt, Synthetic Construct
  source 1..22: mol_type = other RNA
tgaggtagtaggttgtgtggtc

SEQ ID NO: 41656 - RNA, 22 nt, Synthetic Construct
  source 1..22: mol_type = other RNA
tgaggtagtaggttgtgtggtc

SEQ ID NO: 41657 - RNA, 23 nt, Synthetic Construct
  source 1..23: mol_type = other RNA
atatcggaacgtgcccagtcgtg

SEQ ID NO: 41658 - RNA, 23 nt, Synthetic Construct
  source 1..23: mol_type = other RNA
atatcggaacgtgcccagtcgtg

SEQ ID NO: 41659 - RNA, 18 nt, Synthetic Construct
  source 1..18: mol_type = other RNA
cgccgatgatagtgcgga

SEQ ID NO: 41660 - RNA, 18 nt, Synthetic Construct
  source 1..18: mol_type = other RNA
cgccgatgatagtgcgga

SEQ ID NO: 41661 - RNA, 37 nt, Synthetic Construct; identical to SEQ ID NO: 2211
  source 1..37: mol_type = other RNA

SEQ ID NO: 41662 - RNA, 37 nt, Synthetic Construct; identical to SEQ ID NO: 2211
  source 1..37: mol_type = other RNA

SEQ ID NO: 41663 - RNA, 32 nt, Synthetic Construct; identical to SEQ ID NO: 2296
  source 1..32: mol_type = other RNA

SEQ ID NO: 41664 - RNA, 32 nt, Synthetic Construct; identical to SEQ ID NO: 2296
  source 1..32: mol_type = other RNA

SEQ ID NO: 41665 - RNA, 15 nt, Synthetic Construct
  source 1..15: mol_type = other RNA
tccggatcgtagtct

SEQ ID NO: 41666 - RNA, 15 nt, Synthetic Construct
  source 1..15: mol_type = other RNA
tccggatcgtagtct

SEQ ID NO: 41667 - RNA, 35 nt, Synthetic Construct; identical to SEQ ID NO: 757
  source 1..35: mol_type = other RNA

SEQ ID NO: 41668 - RNA, 35 nt, Synthetic Construct; identical to SEQ ID NO: 757
  source 1..35: mol_type = other RNA

SEQ ID NO: 41669 - RNA, 23 nt, Synthetic Construct
  source 1..23: mol_type = other RNA
tgaggggcagagagcgagacctt

SEQ ID NO: 41670 - RNA, 23 nt, Synthetic Construct
  source 1..23: mol_type = other RNA
tgaggggcagagagcgagacctt

SEQ ID NO: 41671 - RNA, 21 nt, Synthetic Construct
  source 1..21: mol_type = other RNA
tgaggtagtaggttgcgtggt

SEQ ID NO: 41672 - RNA, 21 nt, Synthetic Construct
  source 1..21: mol_type = other RNA
tgaggtagtaggttgcgtggt

SEQ ID NO: 41673 - RNA, 25 nt, Synthetic Construct
  source 1..25: mol_type = other RNA
gggttgtaaaccgcttttgtcaggg

SEQ ID NO: 41674 - RNA, 23 nt, Synthetic Construct
  source 1..23: mol_type = other RNA
taaggggcagagagcgagacttt

SEQ ID NO: 41675 - RNA, 23 nt, Synthetic Construct
  source 1..23: mol_type = other RNA
taaggggcagagagcgagacttt

SEQ ID NO: 41676 - RNA, 16 nt, Synthetic Construct
  source 1..16: mol_type = other RNA
gaaattccttgtcggg

SEQ ID NO: 41677 - RNA, 16 nt, Synthetic Construct
  source 1..16: mol_type = other RNA
gaaattccttgtcggg

SEQ ID NO: 41678 - RNA, 27 nt, Synthetic Construct
  source 1..27: mol_type = other RNA
ccccccactgctgaatttgactggctt

SEQ ID NO: 41679 - RNA, 31 nt, Synthetic Construct; identical to SEQ ID NO: 1881
  source 1..31: mol_type = other RNA

SEQ ID NO: 41680 - RNA, 31 nt, Synthetic Construct; identical to SEQ ID NO: 1881
  source 1..31: mol_type = other RNA

SEQ ID NO: 41681 - RNA, 16 nt, Synthetic Construct
  source 1..16: mol_type = other RNA
gccagcagccgcggta

SEQ ID NO: 41682 - RNA, 16 nt, Synthetic Construct
  source 1..16: mol_type = other RNA
gccagcagccgcggta

SEQ ID NO: 41683 - RNA, 34 nt, Synthetic Construct; identical to SEQ ID NO: 2317
  source 1..34: mol_type = other RNA

SEQ ID NO: 41684 - RNA, 21 nt, Synthetic Construct
  source 1..21: mol_type = other RNA
ggaatcgctagtaatcgcgga

SEQ ID NO: 41685 - RNA, 21 nt, Synthetic Construct
  source 1..21: mol_type = other RNA
ggaatcgctagtaatcgcgga

SEQ ID NO: 41686 - RNA, 24 nt, Synthetic Construct
  source 1..24: mol_type = other RNA
tgtaaacatccccggctggaagct

SEQ ID NO: 41687 - RNA, 20 nt, Synthetic Construct
  source 1..20: mol_type = other RNA
tgaggtggtaggttgtgtgg

SEQ ID NO: 41688 - RNA, 20 nt, Synthetic Construct
  source 1..20: mol_type = other RNA
tgaggtggtaggttgtgtgg

SEQ ID NO: 41689 - RNA, 23 nt, Synthetic Construct
  source 1..23: mol_type = other RNA
nggtaatacgacgtacttagtgt

SEQ ID NO: 41690 - RNA, 23 nt, Synthetic Construct
  source 1..23: mol_type = other RNA
nggtaatacgacgtacttagtgt

SEQ ID NO: 41691 - RNA, 21 nt, Synthetic Construct
  source 1..21: mol_type = other RNA
gctattgacgaccgtaccgca

SEQ ID NO: 41692 - RNA, 21 nt, Synthetic Construct
  source 1..21: mol_type = other RNA
gctattgacgaccgtaccgca

SEQ ID NO: 41693 - RNA, 21 nt, Synthetic Construct
  source 1..21: mol_type = other RNA
ggaatcgctagtaatcgcgga

SEQ ID NO: 41694 - RNA, 21 nt, Synthetic Construct
  source 1..21: mol_type = other RNA
ggaatcgctagtaatcgcgga

SEQ ID NO: 41695 - RNA, 21 nt, Synthetic Construct
  source 1..21: mol_type = other RNA
tggggtagtaggttgtgtggt

SEQ ID NO: 41696 - RNA, 21 nt, Synthetic Construct
  source 1..21: mol_type = other RNA
tggggtagtaggttgtgtggt

SEQ ID NO: 41697 - RNA, 31 nt, Synthetic Construct; identical to SEQ ID NO: 2333
  source 1..31: mol_type = other RNA

SEQ ID NO: 41698 - RNA, 31 nt, Synthetic Construct; identical to SEQ ID NO: 2333
  source 1..31: mol_type = other RNA

SEQ ID NO: 41699 - RNA, 32 nt, Synthetic Construct; identical to SEQ ID NO: 3092
  source 1..32: mol_type = other RNA

SEQ ID NO: 41700 - RNA, 35 nt, Synthetic Construct; identical to SEQ ID NO: 2567
  source 1..35: mol_type = other RNA

SEQ ID NO: 41701 - RNA, 35 nt, Synthetic Construct; identical to SEQ ID NO: 2567
  source 1..35: mol_type = other RNA

SEQ ID NO: 41702 - RNA, 23 nt, Synthetic Construct
  source 1..23: mol_type = other RNA
tggtaatacgacgtgcttagtgt

SEQ ID NO: 41703 - RNA, 23 nt, Synthetic Construct
  source 1..23: mol_type = other RNA
tggtaatacgacgtgcttagtgt

SEQ ID NO: 41704 - RNA, 23 nt, Synthetic Construct
  source 1..23: mol_type = other RNA
tggtaatacgtcgtacttagtgt

SEQ ID NO: 41705 - RNA, 23 nt, Synthetic Construct
  source 1..23: mol_type = other RNA
tggtaatacgtcgtacttagtgt

SEQ ID NO: 41706 - RNA, 30 nt, Synthetic Construct; identical to SEQ ID NO: 2353
  source 1..30: mol_type = other RNA

SEQ ID NO: 41707 - RNA, 30 nt, Synthetic Construct; identical to SEQ ID NO: 2353
  source 1..30: mol_type = other RNA

SEQ ID NO: 41708 - RNA, 17 nt, Synthetic Construct
  source 1..17: mol_type = other RNA
cgatctgtagctggtct

SEQ ID NO: 41709 - RNA, 17 nt, Synthetic Construct
  source 1..17: mol_type = other RNA
cgatctgtagctggtct

SEQ ID NO: 41710 - RNA, 32 nt, Synthetic Construct; identical to SEQ ID NO: 2582
  source 1..32: mol_type = other RNA

SEQ ID NO: 41711 - RNA, 28 nt, Synthetic Construct
  source 1..28: mol_type = other RNA
cgactcttagcggtggatcactcggctc

SEQ ID NO: 41712 - RNA, 28 nt, Synthetic Construct
  source 1..28: mol_type = other RNA
cgactcttagcggtggatcactcggctc

SEQ ID NO: 41713 - RNA, 23 nt, Synthetic Construct
  source 1..23: mol_type = other RNA
tgaggggcagagggcgagacttt

SEQ ID NO: 41714 - RNA, 23 nt, Synthetic Construct
  source 1..23: mol_type = other RNA
taaggggcagagagcgagacttt

SEQ ID NO: 41715 - RNA, 32 nt, Synthetic Construct; identical to SEQ ID NO: 2052
  source 1..32: mol_type = other RNA

SEQ ID NO: 41716 - RNA, 32 nt, Synthetic Construct; identical to SEQ ID NO: 2052
  source 1..32: mol_type = other RNA

SEQ ID NO: 41717 - RNA, 31 nt, Synthetic Construct; identical to SEQ ID NO: 2423
  source 1..31: mol_type = other RNA

SEQ ID NO: 41718 - RNA, 31 nt, Synthetic Construct; identical to SEQ ID NO: 2423
  source 1..31: mol_type = other RNA

SEQ ID NO: 41719 - RNA, 16 nt, Synthetic Construct
  source 1..16: mol_type = other RNA
cgactcttagcggtgg

SEQ ID NO: 41720 - RNA, 16 nt, Synthetic Construct
  source 1..16: mol_type = other RNA
cgactcttagcggtgg

SEQ ID NO: 41721 - RNA, 21 nt, Synthetic Construct
  source 1..21: mol_type = other RNA
tgaggtagtaggtcgtgtggt

SEQ ID NO: 41722 - RNA, 21 nt, Synthetic Construct
  source 1..21: mol_type = other RNA
tgaggtagtaggtcgtgtggt

SEQ ID NO: 41723 - RNA, 33 nt, Synthetic Construct; identical to SEQ ID NO: 2386
  source 1..33: mol_type = other RNA

SEQ ID NO: 41724 - RNA, 33 nt, Synthetic Construct; identical to SEQ ID NO: 2386
  source 1..33: mol_type = other RNA

SEQ ID NO: 41725 - RNA, 16 nt, Synthetic Construct
  source 1..16: mol_type = other RNA
gcggtggatgatgtgg

SEQ ID NO: 41726 - RNA, 16 nt, Synthetic Construct
  source 1..16: mol_type = other RNA
gcggtggatgatgtgg

SEQ ID NO: 41727 - RNA, 18 nt, Synthetic Construct
  source 1..18: mol_type = other RNA
cagcactctgcaaagacg

SEQ ID NO: 41728 - RNA, 18 nt, Synthetic Construct
  source 1..18: mol_type = other RNA
cagcactctgcaaagacg

SEQ ID NO: 41729 - RNA, 20 nt, Synthetic Construct
  source 1..20: mol_type = other RNA
ctgacctatgaattgacagc

SEQ ID NO: 41730 - RNA, 20 nt, Synthetic Construct
  source 1..20: mol_type = other RNA
ctgacctatgaattgacagc

SEQ ID NO: 41731 - RNA, 31 nt, Synthetic Construct; identical to SEQ ID NO: 2278
  source 1..31: mol_type = other RNA

SEQ ID NO: 41732 - RNA, 31 nt, Synthetic Construct; identical to SEQ ID NO: 2278
  source 1..31: mol_type = other RNA

SEQ ID NO: 41733 - RNA, 23 nt, Synthetic Construct
  source 1..23: mol_type = other RNA
tggaaatacgacgtacttagtgt

SEQ ID NO: 41734 - RNA, 23 nt, Synthetic Construct
  source 1..23: mol_type = other RNA
tggaaatacgacgtacttagtgt

SEQ ID NO: 41735 - RNA, 23 nt, Synthetic Construct
  source 1..23: mol_type = other RNA
tcctgtactgagccgccccgaga

SEQ ID NO: 41736 - RNA, 23 nt, Synthetic Construct
  source 1..23: mol_type = other RNA
tcctgtactgagccgccccgaga

SEQ ID NO: 41737 - RNA, 15 nt, Synthetic Construct
  source 1..15: mol_type = other RNA
gcaagtcgaacggta

SEQ ID NO: 41738 - RNA, 15 nt, Synthetic Construct
  source 1..15: mol_type = other RNA
gcaagtcgaacggta

SEQ ID NO: 41739 - RNA, 34 nt, Synthetic Construct; identical to SEQ ID NO: 2553
  source 1..34: mol_type = other RNA

SEQ ID NO: 41740 - RNA, 23 nt, Synthetic Construct
  source 1..23: mol_type = other RNA
tggtagtacgacgtacttagtgt

SEQ ID NO: 41741 - RNA, 23 nt, Synthetic Construct
  source 1..23: mol_type = other RNA
tggtagtacgacgtacttagtgt

SEQ ID NO: 41742 - RNA, 19 nt, Synthetic Construct
  source 1..19: mol_type = other RNA
cgactcttagcggtggatc

SEQ ID NO: 41743 - RNA, 19 nt, Synthetic Construct
  source 1..19: mol_type = other RNA
cgactcttagcggtggatc

SEQ ID NO: 41744 - RNA, 38 nt, Synthetic Construct; identical to SEQ ID NO: 2492
  source 1..38: mol_type = other RNA

SEQ ID NO: 41745 - RNA, 38 nt, Synthetic Construct; identical to SEQ ID NO: 2492
  source 1..38: mol_type = other RNA

SEQ ID NO: 41746 - RNA, 23 nt, Synthetic Construct
  source 1..23: mol_type = other RNA
tgaggggcagagagcgaggcttt

SEQ ID NO: 41747 - RNA, 22 nt, Synthetic Construct
  source 1..22: mol_type = other RNA
tgtgcaaatctatgcaaaactg

SEQ ID NO: 41748 - RNA, 22 nt, Synthetic Construct
  source 1..22: mol_type = other RNA
tgtgcaaatctatgcaaaactg

SEQ ID NO: 41749 - RNA, 20 nt, Synthetic Construct
  source 1..20: mol_type = other RNA
tgaggtagtaggtcgtgtgg

SEQ ID NO: 41750 - RNA, 20 nt, Synthetic Construct
  source 1..20: mol_type = other RNA
tgaggtagtaggtcgtgtgg

SEQ ID NO: 41751 - RNA, 31 nt, Synthetic Construct; identical to SEQ ID NO: 2295
  source 1..31: mol_type = other RNA

SEQ ID NO: 41752 - RNA, 31 nt, Synthetic Construct; identical to SEQ ID NO: 2295
  source 1..31: mol_type = other RNA

SEQ ID NO: 41753 - RNA, 23 nt, Synthetic Construct
  source 1..23: mol_type = other RNA
gcgtggtaggagagcgttctgta

SEQ ID NO: 41754 - RNA, 23 nt, Synthetic Construct
  source 1..23: mol_type = other RNA
gcgtggtaggagagcgttctgta

SEQ ID NO: 41755 - RNA, 21 nt, Synthetic Construct
  source 1..21: mol_type = other RNA
tgaggggcagagggcgagact

SEQ ID NO: 41756 - RNA, 21 nt, Synthetic Construct
  source 1..21: mol_type = other RNA
tgaggggcagagggcgagact

SEQ ID NO: 41757 - RNA, 21 nt, Synthetic Construct
  source 1..21: mol_type = other RNA
gctattgacgaccgtaccgca

SEQ ID NO: 41758 - RNA, 21 nt, Synthetic Construct
  source 1..21: mol_type = other RNA
gctattgacgaccgtaccgca

SEQ ID NO: 41759 - RNA, 33 nt, Synthetic Construct; identical to SEQ ID NO: 1982
  source 1..33: mol_type = other RNA

SEQ ID NO: 41760 - RNA, 33 nt, Synthetic Construct; identical to SEQ ID NO: 1982
  source 1..33: mol_type = other RNA

SEQ ID NO: 41761 - RNA, 17 nt, Synthetic Construct
  source 1..17: mol_type = other RNA
agtccggatcgtagtct

SEQ ID NO: 41762 - RNA, 17 nt, Synthetic Construct
  source 1..17: mol_type = other RNA
agtccggatcgtagtct

SEQ ID NO: 41763 - RNA, 33 nt, Synthetic Construct; identical to SEQ ID NO: 2386
  source 1..33: mol_type = other RNA

SEQ ID NO: 41764 - RNA, 18 nt, Synthetic Construct
  source 1..18: mol_type = other RNA
tgcgtagatatgcggagg

SEQ ID NO: 41765 - RNA, 18 nt, Synthetic Construct
  source 1..18: mol_type = other RNA
tgcgtagatatgcggagg

SEQ ID NO: 41766 - RNA, 32 nt, Synthetic Construct; identical to SEQ ID NO: 2086
  source 1..32: mol_type = other RNA

SEQ ID NO: 41767 - RNA, 32 nt, Synthetic Construct; identical to SEQ ID NO: 2086
  source 1..32: mol_type = other RNA

SEQ ID NO: 41768 - RNA, 22 nt, Synthetic Construct
  source 1..22: mol_type = other RNA
cgactcttagcggtggatcact

SEQ ID NO: 41769 - RNA, 22 nt, Synthetic Construct
  source 1..22: mol_type = other RNA
cgactcttagcggtggatcact

SEQ ID NO: 41770 - RNA, 18 nt, Synthetic Construct
  source 1..18: mol_type = other RNA
atcgctagtaatcgcgga

SEQ ID NO: 41771 - RNA, 18 nt, Synthetic Construct
  source 1..18: mol_type = other RNA
atcgctagtaatcgcgga

SEQ ID NO: 41772 - RNA, 15 nt, Synthetic Construct
  source 1..15: mol_type = other RNA
gttcggaagattttc

SEQ ID NO: 41773 - RNA, 15 nt, Synthetic Construct
  source 1..15: mol_type = other RNA
gttcggaagattttc

SEQ ID NO: 41774 - RNA, 16 nt, Synthetic Construct
  source 1..16: mol_type = other RNA
gatctgtagctggtct

SEQ ID NO: 41775 - RNA, 16 nt, Synthetic Construct
  source 1..16: mol_type = other RNA
gatctgtagctggtct

SEQ ID NO: 41776 - RNA, 32 nt, Synthetic Construct; identical to SEQ ID NO: 2435
  source 1..32: mol_type = other RNA

SEQ ID NO: 41777 - RNA, 32 nt, Synthetic Construct; identical to SEQ ID NO: 2435
  source 1..32: mol_type = other RNA

SEQ ID NO: 41778 - RNA, 18 nt, Synthetic Construct
  source 1..18: mol_type = other RNA
acagtcaggatgttggct

SEQ ID NO: 41779 - RNA, 18 nt, Synthetic Construct
  source 1..18: mol_type = other RNA
acagtcaggatgttggct

SEQ ID NO: 41780 - RNA, 23 nt, Synthetic Construct
  source 1..23: mol_type = other RNA
taaggggcagagagcgagacttt

SEQ ID NO: 41781 - RNA, 23 nt, Synthetic Construct
  source 1..23: mol_type = other RNA
taaggggcagagagcgagacttt

SEQ ID NO: 41782 - RNA, 29 nt, Synthetic Construct
  source 1..29: mol_type = other RNA
ttacaggggttcgaatcccctaggggacg

SEQ ID NO: 41783 - RNA, 29 nt, Synthetic Construct
  source 1..29: mol_type = other RNA
ttacaggggttcgaatcccctaggggacg

SEQ ID NO: 41784 - RNA, 18 nt, Synthetic Construct
  source 1..18: mol_type = other RNA
gaagttgaccgcctgggg

SEQ ID NO: 41785 - RNA, 18 nt, Synthetic Construct
  source 1..18: mol_type = other RNA
gaagttgaccgcctgggg

SEQ ID NO: 41786 - RNA, 17 nt, Synthetic Construct
  source 1..17: mol_type = other RNA
cgatctgtagctggtct

SEQ ID NO: 41787 - RNA, 17 nt, Synthetic Construct
  source 1..17: mol_type = other RNA
cgatctgtagctggtct

SEQ ID NO: 41788 - RNA, 36 nt, Synthetic Construct; identical to SEQ ID NO: 2506
  source 1..36: mol_type = other RNA

SEQ ID NO: 41789 - RNA, 30 nt, Synthetic Construct; identical to SEQ ID NO: 1236
  source 1..30: mol_type = other RNA

SEQ ID NO: 41790 - RNA, 30 nt, Synthetic Construct; identical to SEQ ID NO: 1236
  source 1..30: mol_type = other RNA

SEQ ID NO: 41791 - RNA, 18 nt, Synthetic Construct
  source 1..18: mol_type = other RNA
gtcgacgtatagggtgtg

SEQ ID NO: 41792 - RNA, 34 nt, Synthetic Construct; identical to SEQ ID NO: 2364
  source 1..34: mol_type = other RNA

SEQ ID NO: 41793 - RNA, 34 nt, Synthetic Construct; identical to SEQ ID NO: 2364
  source 1..34: mol_type = other RNA

SEQ ID NO: 41794 - RNA, 22 nt, Synthetic Construct
  source 1..22: mol_type = other RNA
ccggtcccaagggtatggctgt

SEQ ID NO: 41795 - RNA, 22 nt, Synthetic Construct
  source 1..22: mol_type = other RNA
ccggtcccaagggtatggctgt

SEQ ID NO: 41796 - RNA, 17 nt, Synthetic Construct
  source 1..17: mol_type = other RNA
gactcttagcggtggat

SEQ ID NO: 41797 - RNA, 17 nt, Synthetic Construct
  source 1..17: mol_type = other RNA
gactcttagcggtggat

SEQ ID NO: 41798 - RNA, 21 nt, Synthetic Construct
  source 1..21: mol_type = other RNA
ctaatcccagaaacccggtcg

SEQ ID NO: 41799 - RNA, 21 nt, Synthetic Construct
  source 1..21: mol_type = other RNA
ctaatcccagaaacccggtcg

SEQ ID NO: 41800 - RNA, 15 nt, Synthetic Construct
  source 1..15: mol_type = other RNA
gagctgtggataggg

SEQ ID NO: 41801 - RNA, 23 nt, Synthetic Construct
  source 1..23: mol_type = other RNA
tgaggggcagagagcaagacttt

SEQ ID NO: 41802 - RNA, 22 nt, Synthetic Construct
  source 1..22: mol_type = other RNA
gcactctaatgagactgccggt

SEQ ID NO: 41803 - RNA, 22 nt, Synthetic Construct
  source 1..22: mol_type = other RNA
gcactctaatgagactgccggt

SEQ ID NO: 41804 - RNA, 17 nt, Synthetic Construct
  source 1..17: mol_type = other RNA
catgcaagtcgaacggt

SEQ ID NO: 41805 - RNA, 17 nt, Synthetic Construct
  source 1..17: mol_type = other RNA
catgcaagtcgaacggt

SEQ ID NO: 41806 - RNA, 22 nt, Synthetic Construct
  source 1..22: mol_type = other RNA
ggcagggttcgtgactggggtg

SEQ ID NO: 41807 - RNA, 22 nt, Synthetic Construct
  source 1..22: mol_type = other RNA
ggcagggttcgtgactggggtg

SEQ ID NO: 41808 - RNA, 24 nt, Synthetic Construct
  source 1..24: mol_type = other RNA
tgtaaacacccccgactggaagct

SEQ ID NO: 41809 - RNA, 35 nt, Synthetic Construct; identical to SEQ ID NO: 757
  source 1..35: mol_type = other RNA

SEQ ID NO: 41810 - RNA, 31 nt, Synthetic Construct; identical to SEQ ID NO: 2310
  source 1..31: mol_type = other RNA

SEQ ID NO: 41811 - RNA, 31 nt, Synthetic Construct; identical to SEQ ID NO: 2310
  source 1..31: mol_type = other RNA

SEQ ID NO: 41812 - RNA, 20 nt, Synthetic Construct
  source 1..20: mol_type = other RNA
tgtcagtttgtcaaataccc

SEQ ID NO: 41813 - RNA, 20 nt, Synthetic Construct
  source 1..20: mol_type = other RNA
tgtcagtttgtcaaataccc

SEQ ID NO: 41814 - RNA, 23 nt, Synthetic Construct
  source 1..23: mol_type = other RNA
tgaggtagtaggttgtgtggttc

SEQ ID NO: 41815 - RNA, 16 nt, Synthetic Construct
  source 1..16: mol_type = other RNA
gcgtagatatgcggag

SEQ ID NO: 41816 - RNA, 16 nt, Synthetic Construct
  source 1..16: mol_type = other RNA
gcgtagatatgcggag

SEQ ID NO: 41817 - RNA, 21 nt, Synthetic Construct
  source 1..21: mol_type = other RNA
tgaggtagtaggttgtgtggc

SEQ ID NO: 41818 - RNA, 21 nt, Synthetic Construct
  source 1..21: mol_type = other RNA
tgaggtagtaggttgtgtggc

SEQ ID NO: 41819 - RNA, 23 nt, Synthetic Construct
  source 1..23: mol_type = other RNA
tgaggggcagagagtgagacttt

SEQ ID NO: 41820 - RNA, 23 nt, Synthetic Construct
  source 1..23: mol_type = other RNA
tgaggggcagagagtgagacttt

SEQ ID NO: 41821 - RNA, 23 nt, Synthetic Construct
  source 1..23: mol_type = other RNA
tgaggggcagggagcgagacttt

SEQ ID NO: 41822 - RNA, 22 nt, Synthetic Construct
  source 1..22: mol_type = other RNA
cctcgcgcgattggagcggccg

SEQ ID NO: 41823 - RNA, 22 nt, Synthetic Construct
  source 1..22: mol_type = other RNA
cctcgcgcgattggagcggccg

SEQ ID NO: 41824 - RNA, 36 nt, Synthetic Construct; identical to SEQ ID NO: 2248
  source 1..36: mol_type = other RNA

SEQ ID NO: 41825 - RNA, 36 nt, Synthetic Construct; identical to SEQ ID NO: 2248
  source 1..36: mol_type = other RNA

SEQ ID NO: 41826 - RNA, 21 nt, Synthetic Construct
  source 1..21: mol_type = other RNA
cggtcccaagggtatggctgt

SEQ ID NO: 41827 - RNA, 17 nt, Synthetic Construct
  source 1..17: mol_type = other RNA
agcggtggatgatgtgg

SEQ ID NO: 41828 - RNA, 17 nt, Synthetic Construct
  source 1..17: mol_type = other RNA
agcggtggatgatgtgg

SEQ ID NO: 41829 - RNA, 24 nt, Synthetic Construct
  source 1..24: mol_type = other RNA
tgtaaacatccctgactggaagct

SEQ ID NO: 41830 - RNA, 17 nt, Synthetic Construct
  source 1..17: mol_type = other RNA
accggaggaaggtgggg

SEQ ID NO: 41831 - RNA, 23 nt, Synthetic Construct
  source 1..23: mol_type = other RNA
tgaggggcagagagcaagacttt

SEQ ID NO: 41832 - RNA, 23 nt, Synthetic Construct
  source 1..23: mol_type = other RNA
tgaggggcagagagcaagacttt

SEQ ID NO: 41833 - RNA, 22 nt, Synthetic Construct
  source 1..22: mol_type = other RNA
cggaggagttcgaaggtacgct

SEQ ID NO: 41834 - RNA, 22 nt, Synthetic Construct
  source 1..22: mol_type = other RNA
cggaggagttcgaaggtacgct

SEQ ID NO: 41835 - RNA, 15 nt, Synthetic Construct
  source 1..15: mol_type = other RNA
ccgcttttgtcaggg

SEQ ID NO: 41836 - RNA, 15 nt, Synthetic Construct
  source 1..15: mol_type = other RNA
ccgcttttgtcaggg

SEQ ID NO: 41837 - RNA, 24 nt, Synthetic Construct
  source 1..24: mol_type = other RNA
gatgaggcgtgataacgagtctgc

SEQ ID NO: 41838 - RNA, 24 nt, Synthetic Construct
  source 1..24: mol_type = other RNA
gatgaggcgtgataacgagtctgc

SEQ ID NO: 41839 - RNA, 21 nt, Synthetic Construct
  source 1..21: mol_type = other RNA
ggaatcgctagtaatcgcgga

SEQ ID NO: 41840 - RNA, 21 nt, Synthetic Construct
  source 1..21: mol_type = other RNA
ggaatcgctagtaatcgcgga

SEQ ID NO: 41841 - RNA, 15 nt, Synthetic Construct
  source 1..15: mol_type = other RNA
gagagcctggacaca

SEQ ID NO: 41842 - RNA, 30 nt, Synthetic Construct; identical to SEQ ID NO: 1958
  source 1..30: mol_type = other RNA

SEQ ID NO: 41843 - RNA, 22 nt, Synthetic Construct
  source 1..22: mol_type = other RNA
tgaggtagtggtttgtgctgtt

SEQ ID NO: 41844 - RNA, 22 nt, Synthetic Construct
  source 1..22: mol_type = other RNA
tgaggtagtggtttgtgctgtt

SEQ ID NO: 41845 - RNA, 23 nt, Synthetic Construct
  source 1..23: mol_type = other RNA
tgaggggcagagagcgggacttt

SEQ ID NO: 41846 - RNA, 31 nt, Synthetic Construct; identical to SEQ ID NO: 2442
  source 1..31: mol_type = other RNA

SEQ ID NO: 41847 - RNA, 33 nt, Synthetic Construct; identical to SEQ ID NO: 2266
  source 1..33: mol_type = other RNA

SEQ ID NO: 41848 - RNA, 33 nt, Synthetic Construct; identical to SEQ ID NO: 2266
  source 1..33: mol_type = other RNA

SEQ ID NO: 41849 - RNA, 18 nt, Synthetic Construct
  source 1..18: mol_type = other RNA
ggctttgaagtaaggtcg

SEQ ID NO: 41850 - RNA, 18 nt, Synthetic Construct
  source 1..18: mol_type = other RNA
ggctttgaagtaaggtcg

SEQ ID NO: 41851 - RNA, 18 nt, Synthetic Construct
  source 1..18: mol_type = other RNA
cagcactctgcaaagacg

SEQ ID NO: 41852 - RNA, 18 nt, Synthetic Construct
  source 1..18: mol_type = other RNA
cagcactctgcaaagacg

SEQ ID NO: 41853 - RNA, 31 nt, Synthetic Construct; identical to SEQ ID NO: 2427
  source 1..31: mol_type = other RNA

SEQ ID NO: 41854 - RNA, 36 nt, Synthetic Construct; identical to SEQ ID NO: 2366
  source 1..36: mol_type = other RNA

SEQ ID NO: 41855 - RNA, 36 nt, Synthetic Construct; identical to SEQ ID NO: 2366
  source 1..36: mol_type = other RNA

SEQ ID NO: 41856 - RNA, 35 nt, Synthetic Construct; identical to SEQ ID NO: 2548
  source 1..35: mol_type = other RNA

SEQ ID NO: 41857 - RNA, 35 nt, Synthetic Construct; identical to SEQ ID NO: 2548
  source 1..35: mol_type = other RNA

SEQ ID NO: 41858 - RNA, 23 nt, Synthetic Construct
  source 1..23: mol_type = other RNA
tggggggcagagagcgagacttt

SEQ ID NO: 41859 - RNA, 23 nt, Synthetic Construct
  source 1..23: mol_type = other RNA
tggggggcagagagcgagacttt

SEQ ID NO: 41860 - RNA, 34 nt, Synthetic Construct; identical to SEQ ID NO: 2019
  source 1..34: mol_type = other RNA

SEQ ID NO: 41861 - RNA, 34 nt, Synthetic Construct; identical to SEQ ID NO: 2019
  source 1..34: mol_type = other RNA

SEQ ID NO: 41862 - RNA, 34 nt, Synthetic Construct; identical to SEQ ID NO: 2183
  source 1..34: mol_type = other RNA

SEQ ID NO: 41863 - RNA, 34 nt, Synthetic Construct; identical to SEQ ID NO: 2183
  source 1..34: mol_type = other RNA

SEQ ID NO: 41864 - RNA, 21 nt, Synthetic Construct
  source 1..21: mol_type = other RNA
atcggaacgtgcccagtcgtg

SEQ ID NO: 41865 - RNA, 21 nt, Synthetic Construct
  source 1..21: mol_type = other RNA
atcggaacgtgcccagtcgtg

SEQ ID NO: 41866 - RNA, 22 nt, Synthetic Construct
  source 1..22: mol_type = other RNA
nattgcacttgtcccggcctgt

SEQ ID NO: 41867 - RNA, 22 nt, Synthetic Construct
  source 1..22: mol_type = other RNA
nattgcacttgtcccggcctgt

SEQ ID NO: 41868 - RNA, 20 nt, Synthetic Construct
  source 1..20: mol_type = other RNA
caatggccgggacagagggc

SEQ ID NO: 41869 - RNA, 20 nt, Synthetic Construct
  source 1..20: mol_type = other RNA
caatggccgggacagagggc

SEQ ID NO: 41870 - RNA, 26 nt, Synthetic Construct
  source 1..26: mol_type = other RNA
atgcgagagtaggacgttgccaggtt

SEQ ID NO: 41871 - RNA, 26 nt, Synthetic Construct
  source 1..26: mol_type = other RNA
atgcgagagtaggacgttgccaggtt

SEQ ID NO: 41872 - RNA, 18 nt, Synthetic Construct
  source 1..18: mol_type = other RNA
gtcgacgtatagggtgtg

SEQ ID NO: 41873 - RNA, 18 nt, Synthetic Construct
  source 1..18: mol_type = other RNA
gtcgacgtatagggtgtg

SEQ ID NO: 41874 - RNA, 21 nt, Synthetic Construct
  source 1..21: mol_type = other RNA
agcgtgcttgactgcgagact

SEQ ID NO: 41875 - RNA, 21 nt, Synthetic Construct
  source 1..21: mol_type = other RNA
agcgtgcttgactgcgagact

SEQ ID NO: 41876 - RNA, 17 nt, Synthetic Construct
  source 1..17: mol_type = other RNA
gggtctgtagctcagtc

SEQ ID NO: 41877 - RNA, 17 nt, Synthetic Construct
  source 1..17: mol_type = other RNA
gggtctgtagctcagtc

SEQ ID NO: 41878 - RNA, 15 nt, Synthetic Construct
  source 1..15: mol_type = other RNA
gagctgtggataggg

SEQ ID NO: 41879 - RNA, 15 nt, Synthetic Construct
  source 1..15: mol_type = other RNA
gagctgtggataggg

SEQ ID NO: 41880 - RNA, 16 nt, Synthetic Construct
  source 1..16: mol_type = other RNA
ggcgggggtcgctggt

SEQ ID NO: 41881 - RNA, 16 nt, Synthetic Construct
  source 1..16: mol_type = other RNA
ggcgggggtcgctggt

SEQ ID NO: 41882 - RNA, 19 nt, Synthetic Construct
  source 1..19: mol_type = other RNA
gtactgacgctcatgcacg

SEQ ID NO: 41883 - RNA, 19 nt, Synthetic Construct
  source 1..19: mol_type = other RNA
gtactgacgctcatgcacg

SEQ ID NO: 41884 - RNA, 21 nt, Synthetic Construct
  source 1..21: mol_type = other RNA
tgaggtagtaggttgtgcggt

SEQ ID NO: 41885 - RNA, 21 nt, Synthetic Construct
  source 1..21: mol_type = other RNA
tgaggtagtaggttgtgcggt

SEQ ID NO: 41886 - RNA, 31 nt, Synthetic Construct; identical to SEQ ID NO: 2263
  source 1..31: mol_type = other RNA

SEQ ID NO: 41887 - RNA, 31 nt, Synthetic Construct; identical to SEQ ID NO: 2263
  source 1..31: mol_type = other RNA

SEQ ID NO: 41888 - RNA, 23 nt, Synthetic Construct
  source 1..23: mol_type = other RNA
tgaggggcagagagcgaggcttt

SEQ ID NO: 41889 - RNA, 15 nt, Synthetic Construct
  source 1..15: mol_type = other RNA
cctcgcgcgattgga

SEQ ID NO: 41890 - RNA, 20 nt, Synthetic Construct
  source 1..20: mol_type = other RNA
cgcgacctcagatcagacgt

SEQ ID NO: 41891 - RNA, 20 nt, Synthetic Construct
  source 1..20: mol_type = other RNA
cgcgacctcagatcagacgt

SEQ ID NO: 41892 - RNA, 35 nt, Synthetic Construct; identical to SEQ ID NO: 2615
  source 1..35: mol_type = other RNA

SEQ ID NO: 41893 - RNA, 35 nt, Synthetic Construct; identical to SEQ ID NO: 2615
  source 1..35: mol_type = other RNA

SEQ ID NO: 41894 - RNA, 21 nt, Synthetic Construct
  source 1..21: mol_type = other RNA
ngaggtagtaggttgtgtggt

SEQ ID NO: 41895 - RNA, 21 nt, Synthetic Construct
  source 1..21: mol_type = other RNA
ngaggtagtaggttgtgtggt

SEQ ID NO: 41896 - RNA, 18 nt, Synthetic Construct
  source 1..18: mol_type = other RNA
accggaggaaggtgggga

SEQ ID NO: 41897 - RNA, 33 nt, Synthetic Construct; identical to SEQ ID NO: 2126
  source 1..33: mol_type = other RNA

SEQ ID NO: 41898 - RNA, 33 nt, Synthetic Construct; identical to SEQ ID NO: 2126
  source 1..33: mol_type = other RNA

SEQ ID NO: 41899 - RNA, 24 nt, Synthetic Construct
  source 1..24: mol_type = other RNA
tgtagacatccccgactggaagct

SEQ ID NO: 41900 - RNA, 24 nt, Synthetic Construct
  source 1..24: mol_type = other RNA
tgtaaacatccccgactggaagtt

SEQ ID NO: 41901 - RNA, 21 nt, Synthetic Construct
  source 1..21: mol_type = other RNA
cggtcccaagggtatggctgt

SEQ ID NO: 41902 - RNA, 21 nt, Synthetic Construct
  source 1..21: mol_type = other RNA
cggtcccaagggtatggctgt

SEQ ID NO: 41903 - RNA, 16 nt, Synthetic Construct
  source 1..16: mol_type = other RNA
ggccgtcgtcagctcg

SEQ ID NO: 41904 - RNA, 16 nt, Synthetic Construct
  source 1..16: mol_type = other RNA
ggccgtcgtcagctcg

SEQ ID NO: 41905 - RNA, 22 nt, Synthetic Construct
  source 1..22: mol_type = other RNA
nattgcacttgtcccggcctgt

SEQ ID NO: 41906 - RNA, 22 nt, Synthetic Construct
  source 1..22: mol_type = other RNA
nattgcacttgtcccggcctgt

SEQ ID NO: 41907 - RNA, 30 nt, Synthetic Construct; identical to SEQ ID NO: 2407
  source 1..30: mol_type = other RNA

SEQ ID NO: 41908 - RNA, 30 nt, Synthetic Construct; identical to SEQ ID NO: 2407
  source 1..30: mol_type = other RNA

SEQ ID NO: 41909 - RNA, 29 nt, Synthetic Construct
  source 1..29: mol_type = other RNA
tgaaggtgggttgtgaagcctgctggagg

SEQ ID NO: 41910 - RNA, 29 nt, Synthetic Construct
  source 1..29: mol_type = other RNA
tgaaggtgggttgtgaagcctgctggagg

SEQ ID NO: 41911 - RNA, 21 nt, Synthetic Construct
  source 1..21: mol_type = other RNA
cgaggtagtaggttgtgtggt

SEQ ID NO: 41912 - RNA, 21 nt, Synthetic Construct
  source 1..21: mol_type = other RNA
cgaggtagtaggttgtgtggt

SEQ ID NO: 41913 - RNA, 16 nt, Synthetic Construct
  source 1..16: mol_type = other RNA
ggccgtcgtcagctcg

SEQ ID NO: 41914 - RNA, 16 nt, Synthetic Construct
  source 1..16: mol_type = other RNA
ggccgtcgtcagctcg

SEQ ID NO: 41915 - RNA, 34 nt, Synthetic Construct; identical to SEQ ID NO: 2291
  source 1..34: mol_type = other RNA

SEQ ID NO: 41916 - RNA, 27 nt, Synthetic Construct
  source 1..27: mol_type = other RNA
atagtctttgttcgattccgttgagta

SEQ ID NO: 41917 - RNA, 27 nt, Synthetic Construct
  source 1..27: mol_type = other RNA
atagtctttgttcgattccgttgagta

SEQ ID NO: 41918 - RNA, 18 nt, Synthetic Construct
  source 1..18: mol_type = other RNA
gaagttgaccgcctgggg

SEQ ID NO: 41919 - RNA, 18 nt, Synthetic Construct
  source 1..18: mol_type = other RNA
gaagttgaccgcctgggg

SEQ ID NO: 41920 - RNA, 23 nt, Synthetic Construct
  source 1..23: mol_type = other RNA
tggtaatacgacgcacttagtgt

SEQ ID NO: 41921 - RNA, 23 nt, Synthetic Construct
  source 1..23: mol_type = other RNA
tggtaatacgacgcacttagtgt

SEQ ID NO: 41922 - RNA, 20 nt, Synthetic Construct
  source 1..20: mol_type = other RNA
tgaggtagtaggttgcgtgg

SEQ ID NO: 41923 - RNA, 20 nt, Synthetic Construct
  source 1..20: mol_type = other RNA
tgaggtagtaggttgcgtgg

SEQ ID NO: 41924 - RNA, 18 nt, Synthetic Construct
  source 1..18: mol_type = other RNA
gaagttgaccgcctgggg

SEQ ID NO: 41925 - RNA, 30 nt, Synthetic Construct; identical to SEQ ID NO: 2578
  source 1..30: mol_type = other RNA

SEQ ID NO: 41926 - RNA, 41 nt, Synthetic Construct; identical to SEQ ID NO: 2441
  source 1..41: mol_type = other RNA

SEQ ID NO: 41927 - RNA, 41 nt, Synthetic Construct; identical to SEQ ID NO: 2441
  source 1..41: mol_type = other RNA

SEQ ID NO: 41928 - RNA, 23 nt, Synthetic Construct
  source 1..23: mol_type = other RNA
tgaggggcagagagcgagacctt

SEQ ID NO: 41929 - RNA, 16 nt, Synthetic Construct
  source 1..16: mol_type = other RNA
gtcgacgtatagggtg

SEQ ID NO: 41930 - RNA, 27 nt, Synthetic Construct
  source 1..27: mol_type = other RNA
ccgtgtgaaagtaggtcatcgtcaggc

SEQ ID NO: 41931 - RNA, 27 nt, Synthetic Construct
  source 1..27: mol_type = other RNA
ccgtgtgaaagtaggtcatcgtcaggc

SEQ ID NO: 41932 - RNA, 22 nt, Synthetic Construct
  source 1..22: mol_type = other RNA
ncctgtactgagctgccccgag

SEQ ID NO: 41933 - RNA, 22 nt, Synthetic Construct
  source 1..22: mol_type = other RNA
ncctgtactgagctgccccgag

SEQ ID NO: 41934 - RNA, 26 nt, Synthetic Construct
  source 1..26: mol_type = other RNA
gcataagcgtgcttgactgcgagact

SEQ ID NO: 41935 - RNA, 26 nt, Synthetic Construct
  source 1..26: mol_type = other RNA
gcataagcgtgcttgactgcgagact

SEQ ID NO: 41936 - RNA, 36 nt, Synthetic Construct; identical to SEQ ID NO: 2546
  source 1..36: mol_type = other RNA

SEQ ID NO: 41937 - RNA, 36 nt, Synthetic Construct; identical to SEQ ID NO: 2546
  source 1..36: mol_type = other RNA

SEQ ID NO: 41938 - RNA, 23 nt, Synthetic Construct
  source 1..23: mol_type = other RNA
tggtaattcgacgtacttagtgt

SEQ ID NO: 41939 - RNA, 23 nt, Synthetic Construct
  source 1..23: mol_type = other RNA
tggtaattcgacgtacttagtgt

SEQ ID NO: 41940 - RNA, 35 nt, Synthetic Construct; identical to SEQ ID NO: 2399
  source 1..35: mol_type = other RNA

SEQ ID NO: 41941 - RNA, 35 nt, Synthetic Construct; identical to SEQ ID NO: 2399
  source 1..35: mol_type = other RNA

SEQ ID NO: 41942 - RNA, 23 nt, Synthetic Construct
  source 1..23: mol_type = other RNA
ggcagggttcgtgactggggtga

SEQ ID NO: 41943 - RNA, 19 nt, Synthetic Construct
  source 1..19: mol_type = other RNA
agcgaaattccttgtcggg

SEQ ID NO: 41944 - RNA, 19 nt, Synthetic Construct
  source 1..19: mol_type = other RNA
agcgaaattccttgtcggg

SEQ ID NO: 41945 - RNA, 23 nt, Synthetic Construct
  source 1..23: mol_type = other RNA
tgaggggcagagggcgagacttt

SEQ ID NO: 41946 - RNA, 31 nt, Synthetic Construct; identical to SEQ ID NO: 7160
  source 1..31: mol_type = other RNA

SEQ ID NO: 41947 - RNA, 31 nt, Synthetic Construct; identical to SEQ ID NO: 7160
  source 1..31: mol_type = other RNA

SEQ ID NO: 41948 - RNA, 30 nt, Synthetic Construct; identical to SEQ ID NO: 1236
  source 1..30: mol_type = other RNA

SEQ ID NO: 41949 - RNA, 30 nt, Synthetic Construct; identical to SEQ ID NO: 1236
  source 1..30: mol_type = other RNA

SEQ ID NO: 41950 - RNA, 16 nt, Synthetic Construct
  source 1..16: mol_type = other RNA
gtcaacggccatacca

SEQ ID NO: 41951 - RNA, 16 nt, Synthetic Construct
  source 1..16: mol_type = other RNA
gtcaacggccatacca

SEQ ID NO: 41952 - RNA, 15 nt, Synthetic Construct
  source 1..15: mol_type = other RNA
acggtcctaaggtag

SEQ ID NO: 41953 - RNA, 41 nt, Synthetic Construct; identical to SEQ ID NO: 2441
  source 1..41: mol_type = other RNA

SEQ ID NO: 41954 - RNA, 41 nt, Synthetic Construct; identical to SEQ ID NO: 2441
  source 1..41: mol_type = other RNA

SEQ ID NO: 41955 - RNA, 23 nt, Synthetic Construct
  source 1..23: mol_type = other RNA
tgaggggcagagagcgaggcttt

SEQ ID NO: 41956 - RNA, 23 nt, Synthetic Construct
  source 1..23: mol_type = other RNA
tgaggggcagagagcgaggcttt

SEQ ID NO: 41957 - RNA, 31 nt, Synthetic Construct; identical to SEQ ID NO: 7160
  source 1..31: mol_type = other RNA

SEQ ID NO: 41958 - RNA, 31 nt, Synthetic Construct; identical to SEQ ID NO: 7160
  source 1..31: mol_type = other RNA

SEQ ID NO: 41959 - RNA, 33 nt, Synthetic Construct; identical to SEQ ID NO: 2395
  source 1..33: mol_type = other RNA

SEQ ID NO: 41960 - RNA, 24 nt, Synthetic Construct
  source 1..24: mol_type = other RNA
gggttgtaaaccgcttttgtcagg

SEQ ID NO: 41961 - RNA, 24 nt, Synthetic Construct
  source 1..24: mol_type = other RNA
gggttgtaaaccgcttttgtcagg

SEQ ID NO: 41962 - RNA, 20 nt, Synthetic Construct
  source 1..20: mol_type = other RNA
ctgacctatgaattgacagc

SEQ ID NO: 41963 - RNA, 20 nt, Synthetic Construct
  source 1..20: mol_type = other RNA
ctgacctatgaattgacagc

SEQ ID NO: 41964 - RNA, 35 nt, Synthetic Construct; identical to SEQ ID NO: 2269
  source 1..35: mol_type = other RNA

SEQ ID NO: 41965 - RNA, 35 nt, Synthetic Construct; identical to SEQ ID NO: 2450
  source 1..35: mol_type = other RNA

SEQ ID NO: 41966 - RNA, 15 nt, Synthetic Construct
  source 1..15: mol_type = other RNA
gtccggatcgtagtc

SEQ ID NO: 41967 - RNA, 15 nt, Synthetic Construct
  source 1..15: mol_type = other RNA
gtccggatcgtagtc

SEQ ID NO: 41968 - RNA, 15 nt, Synthetic Construct
  source 1..15: mol_type = other RNA
gctagtaatcgcgga

SEQ ID NO: 41969 - RNA, 22 nt, Synthetic Construct
  source 1..22: mol_type = other RNA
ncctgtactgagctgccccgag

SEQ ID NO: 41970 - RNA, 22 nt, Synthetic Construct
  source 1..22: mol_type = other RNA
ncctgtactgagctgccccgag

SEQ ID NO: 41971 - RNA, 38 nt, Synthetic Construct; identical to SEQ ID NO: 2492
  source 1..38: mol_type = other RNA

SEQ ID NO: 41972 - RNA, 38 nt, Synthetic Construct; identical to SEQ ID NO: 2492
  source 1..38: mol_type = other RNA

SEQ ID NO: 41973 - RNA, 25 nt, Synthetic Construct
  source 1..25: mol_type = other RNA
gggttgtaaaccgcttttgtcaggg

SEQ ID NO: 41974 - RNA, 25 nt, Synthetic Construct
  source 1..25: mol_type = other RNA
gggttgtaaaccgcttttgtcaggg

SEQ ID NO: 41975 - RNA, 23 nt, Synthetic Construct
  source 1..23: mol_type = other RNA
tgaggggcagagagcaagacttt

SEQ ID NO: 41976 - RNA, 22 nt, Synthetic Construct
  source 1..22: mol_type = other RNA
ngaggtagtaggttgtgtggtt

SEQ ID NO: 41977 - RNA, 22 nt, Synthetic Construct
  source 1..22: mol_type = other RNA
ngaggtagtaggttgtgtggtt

SEQ ID NO: 41978 - RNA, 22 nt, Synthetic Construct
  source 1..22: mol_type = other RNA
gcactctaatgagactgccggt

SEQ ID NO: 41979 - RNA, 22 nt, Synthetic Construct
  source 1..22: mol_type = other RNA
gcactctaatgagactgccggt

SEQ ID NO: 41980 - RNA, 20 nt, Synthetic Construct
  source 1..20: mol_type = other RNA
tgaggtagtaggttgcatag

SEQ ID NO: 41981 - RNA, 20 nt, Synthetic Construct
  source 1..20: mol_type = other RNA
tgaggtagtaggttgcatag

SEQ ID NO: 41982 - RNA, 29 nt, Synthetic Construct
  source 1..29: mol_type = other RNA
ccccccccactgctaaatttgactggctt

SEQ ID NO: 41983 - RNA, 29 nt, Synthetic Construct
  source 1..29: mol_type = other RNA
ccccccccactgctaaatttgactggctt

SEQ ID NO: 41984 - RNA, 17 nt, Synthetic Construct
  source 1..17: mol_type = other RNA
accggaggaaggtgggg

SEQ ID NO: 41985 - RNA, 17 nt, Synthetic Construct
  source 1..17: mol_type = other RNA
accggaggaaggtgggg

SEQ ID NO: 41986 - RNA, 19 nt, Synthetic Construct
  source 1..19: mol_type = other RNA
ccgtgttcggaagattttc

SEQ ID NO: 41987 - RNA, 19 nt, Synthetic Construct
  source 1..19: mol_type = other RNA
ccgtgttcggaagattttc

SEQ ID NO: 41988 - RNA, 23 nt, Synthetic Construct
  source 1..23: mol_type = other RNA
taaggggcagagagcgagacttt

SEQ ID NO: 41989 - RNA, 31 nt, Synthetic Construct; identical to SEQ ID NO: 2293
  source 1..31: mol_type = other RNA

SEQ ID NO: 41990 - RNA, 31 nt, Synthetic Construct; identical to SEQ ID NO: 2293
  source 1..31: mol_type = other RNA

SEQ ID NO: 41991 - RNA, 35 nt, Synthetic Construct; identical to SEQ ID NO: 2518
  source 1..35: mol_type = other RNA

SEQ ID NO: 41992 - RNA, 35 nt, Synthetic Construct; identical to SEQ ID NO: 2518
  source 1..35: mol_type = other RNA

SEQ ID NO: 41993 - RNA, 17 nt, Synthetic Construct
  source 1..17: mol_type = other RNA
cagtcaggatgttggct

SEQ ID NO: 41994 - RNA, 17 nt, Synthetic Construct
  source 1..17: mol_type = other RNA
cagtcaggatgttggct

SEQ ID NO: 41995 - RNA, 23 nt, Synthetic Construct
  source 1..23: mol_type = other RNA
tggtaatgcgacgtacttagtgt

SEQ ID NO: 41996 - RNA, 23 nt, Synthetic Construct
  source 1..23: mol_type = other RNA
tggtaatgcgacgtacttagtgt

SEQ ID NO: 41997 - RNA, 33 nt, Synthetic Construct; identical to SEQ ID NO: 3082
  source 1..33: mol_type = other RNA

SEQ ID NO: 41998 - RNA, 23 nt, Synthetic Construct
  source 1..23: mol_type = other RNA
ggcagggttcgtgactggggtga

SEQ ID NO: 41999 - RNA, 23 nt, Synthetic Construct
  source 1..23: mol_type = other RNA
ggcagggttcgtgactggggtga

SEQ ID NO: 42000 - RNA, 35 nt, Synthetic Construct; identical to SEQ ID NO: 2452
  source 1..35: mol_type = other RNA

SEQ ID NO: 42001 - RNA, 35 nt, Synthetic Construct; identical to SEQ ID NO: 2452
  source 1..35: mol_type = other RNA

SEQ ID NO: 42002 - RNA, 31 nt, Synthetic Construct; identical to SEQ ID NO: 2423
  source 1..31: mol_type = other RNA

SEQ ID NO: 42003 - RNA, 31 nt, Synthetic Construct; identical to SEQ ID NO: 2423
  source 1..31: mol_type = other RNA

SEQ ID NO: 42004 - RNA, 27 nt, Synthetic Construct
  source 1..27: mol_type = other RNA
cgtgtgaaagtaggtcatcgtcaggct

SEQ ID NO: 42005 - RNA, 27 nt, Synthetic Construct
  source 1..27: mol_type = other RNA
cgtgtgaaagtaggtcatcgtcaggct

SEQ ID NO: 42006 - RNA, 23 nt, Synthetic Construct
  source 1..23: mol_type = other RNA
ccctgtactgagctgccccgaga

SEQ ID NO: 42007 - RNA, 23 nt, Synthetic Construct
  source 1..23: mol_type = other RNA
ccctgtactgagctgccccgaga

SEQ ID NO: 42008 - RNA, 23 nt, Synthetic Construct
  source 1..23: mol_type = other RNA
tcggaatcgctagtaatcgcgga

SEQ ID NO: 42009 - RNA, 23 nt, Synthetic Construct
  source 1..23: mol_type = other RNA
tcggaatcgctagtaatcgcgga

SEQ ID NO: 42010 - RNA, 35 nt, Synthetic Construct; identical to SEQ ID NO: 2505
  source 1..35: mol_type = other RNA

SEQ ID NO: 42011 - RNA, 35 nt, Synthetic Construct; identical to SEQ ID NO: 2505
  source 1..35: mol_type = other RNA

SEQ ID NO: 42012 - RNA, 17 nt, Synthetic Construct
  source 1..17: mol_type = other RNA
cgcgacctcagatcaga

SEQ ID NO: 42013 - RNA, 17 nt, Synthetic Construct
  source 1..17: mol_type = other RNA
cgcgacctcagatcaga

SEQ ID NO: 42014 - RNA, 32 nt, Synthetic Construct; identical to SEQ ID NO: 5582
  source 1..32: mol_type = other RNA

SEQ ID NO: 42015 - RNA, 32 nt, Synthetic Construct; identical to SEQ ID NO: 5582
  source 1..32: mol_type = other RNA

SEQ ID NO: 42016 - RNA, 23 nt, Synthetic Construct
  source 1..23: mol_type = other RNA
tgaggggtagagagcgagacttt

SEQ ID NO: 42017 - RNA, 23 nt, Synthetic Construct
  source 1..23: mol_type = other RNA
tgaggggtagagagcgagacttt

SEQ ID NO: 42018 - RNA, 27 nt, Synthetic Construct
  source 1..27: mol_type = other RNA
atagtctttgttcgattccgttgagta

SEQ ID NO: 42019 - RNA, 27 nt, Synthetic Construct
  source 1..27: mol_type = other RNA
atagtctttgttcgattccgttgagta

SEQ ID NO: 42020 - RNA, 20 nt, Synthetic Construct
  source 1..20: mol_type = other RNA
tggggtagtaggttgtgtgg

SEQ ID NO: 42021 - RNA, 20 nt, Synthetic Construct
  source 1..20: mol_type = other RNA
tggggtagtaggttgtgtgg

SEQ ID NO: 42022 - RNA, 15 nt, Synthetic Construct
  source 1..15: mol_type = other RNA
tagagtagggcggga

SEQ ID NO: 42023 - RNA, 15 nt, Synthetic Construct
  source 1..15: mol_type = other RNA
tagagtagggcggga

SEQ ID NO: 42024 - RNA, 23 nt, Synthetic Construct
  source 1..23: mol_type = other RNA
tgaggggcagagagcgagacctt

SEQ ID NO: 42025 - RNA, 31 nt, Synthetic Construct; identical to SEQ ID NO: 2412
  source 1..31: mol_type = other RNA

SEQ ID NO: 42026 - RNA, 31 nt, Synthetic Construct; identical to SEQ ID NO: 2412
  source 1..31: mol_type = other RNA

SEQ ID NO: 42027 - RNA, 21 nt, Synthetic Construct
  source 1..21: mol_type = other RNA
cgaggggcagagagcgagact

SEQ ID NO: 42028 - RNA, 21 nt, Synthetic Construct
  source 1..21: mol_type = other RNA
cgaggggcagagagcgagact

SEQ ID NO: 42029 - RNA, 34 nt, Synthetic Construct; identical to SEQ ID NO: 2291
  source 1..34: mol_type = other RNA

SEQ ID NO: 42030 - RNA, 34 nt, Synthetic Construct; identical to SEQ ID NO: 2291
  source 1..34: mol_type = other RNA

SEQ ID NO: 42031 - RNA, 21 nt, Synthetic Construct
  source 1..21: mol_type = other RNA
tgaggtagtaggctgtgtggt

SEQ ID NO: 42032 - RNA, 21 nt, Synthetic Construct
  source 1..21: mol_type = other RNA
tgaggtagtaggctgtgtggt

SEQ ID NO: 42033 - RNA, 23 nt, Synthetic Construct
  source 1..23: mol_type = other RNA
tcctgtaccgagctgccccgaga

SEQ ID NO: 42034 - RNA, 23 nt, Synthetic Construct
  source 1..23: mol_type = other RNA
tcctgtaccgagctgccccgaga

SEQ ID NO: 42035 - RNA, 23 nt, Synthetic Construct
  source 1..23: mol_type = other RNA
tgaggggcagagagcgaggcttt

SEQ ID NO: 42036 - RNA, 23 nt, Synthetic Construct
  source 1..23: mol_type = other RNA
tgaggggcagagagcgaggcttt

SEQ ID NO: 42037 - RNA, 36 nt, Synthetic Construct; identical to SEQ ID NO: 2469
  source 1..36: mol_type = other RNA

SEQ ID NO: 42038 - RNA, 36 nt, Synthetic Construct; identical to SEQ ID NO: 2469
  source 1..36: mol_type = other RNA

SEQ ID NO: 42039 - RNA, 27 nt, Synthetic Construct
  source 1..27: mol_type = other RNA
gatttccccttggggttgtaggaccac

SEQ ID NO: 42040 - RNA, 27 nt, Synthetic Construct
  source 1..27: mol_type = other RNA
gatttccccttggggttgtaggaccac

SEQ ID NO: 42041 - RNA, 32 nt, Synthetic Construct; identical to SEQ ID NO: 2467
  source 1..32: mol_type = other RNA

SEQ ID NO: 42042 - RNA, 32 nt, Synthetic Construct; identical to SEQ ID NO: 2467
  source 1..32: mol_type = other RNA

SEQ ID NO: 42043 - RNA, 37 nt, Synthetic Construct; identical to SEQ ID NO: 2211
  source 1..37: mol_type = other RNA

SEQ ID NO: 42044 - RNA, 37 nt, Synthetic Construct; identical to SEQ ID NO: 2211
  source 1..37: mol_type = other RNA

SEQ ID NO: 42045 - RNA, 31 nt, Synthetic Construct; identical to SEQ ID NO: 7160
  source 1..31: mol_type = other RNA

SEQ ID NO: 42046 - RNA, 31 nt, Synthetic Construct; identical to SEQ ID NO: 7160
  source 1..31: mol_type = other RNA

SEQ ID NO: 42047 - RNA, 16 nt, Synthetic Construct
  source 1..16: mol_type = other RNA
gtccccttcgtctaga

SEQ ID NO: 42048 - RNA, 16 nt, Synthetic Construct
  source 1..16: mol_type = other RNA
gtccccttcgtctaga

SEQ ID NO: 42049 - RNA, 35 nt, Synthetic Construct; identical to SEQ ID NO: 2069
  source 1..35: mol_type = other RNA

SEQ ID NO: 42050 - RNA, 16 nt, Synthetic Construct
  source 1..16: mol_type = other RNA
gatctgtagctggtct

SEQ ID NO: 42051 - RNA, 16 nt, Synthetic Construct
  source 1..16: mol_type = other RNA
gatctgtagctggtct

SEQ ID NO: 42052 - RNA, 35 nt, Synthetic Construct; identical to SEQ ID NO: 2402
  source 1..35: mol_type = other RNA

SEQ ID NO: 42053 - RNA, 35 nt, Synthetic Construct; identical to SEQ ID NO: 2402
  source 1..35: mol_type = other RNA

SEQ ID NO: 42054 - RNA, 18 nt, Synthetic Construct
  source 1..18: mol_type = other RNA
tcccaagggtatggctgt

SEQ ID NO: 42055 - RNA, 18 nt, Synthetic Construct
  source 1..18: mol_type = other RNA
tcccaagggtatggctgt

SEQ ID NO: 42056 - RNA, 17 nt, Synthetic Construct
  source 1..17: mol_type = other RNA
gtcgacgtatagggtgt

SEQ ID NO: 42057 - RNA, 20 nt, Synthetic Construct
  source 1..20: mol_type = other RNA
cacatgcaagtcgaacggta

SEQ ID NO: 42058 - RNA, 20 nt, Synthetic Construct
  source 1..20: mol_type = other RNA
cacatgcaagtcgaacggta

SEQ ID NO: 42059 - RNA, 15 nt, Synthetic Construct
  source 1..15: mol_type = other RNA
ggtcatcgtcaggct

SEQ ID NO: 42060 - RNA, 23 nt, Synthetic Construct
  source 1..23: mol_type = other RNA
tggtaatacgacgtactcagtgt

SEQ ID NO: 42061 - RNA, 23 nt, Synthetic Construct
  source 1..23: mol_type = other RNA
tggtaatacgacgtactcagtgt

SEQ ID NO: 42062 - RNA, 35 nt, Synthetic Construct; identical to SEQ ID NO: 2514
  source 1..35: mol_type = other RNA

SEQ ID NO: 42063 - RNA, 35 nt, Synthetic Construct; identical to SEQ ID NO: 2514
  source 1..35: mol_type = other RNA

SEQ ID NO: 42064 - RNA, 27 nt, Synthetic Construct
  source 1..27: mol_type = other RNA
gactcttagcggtggatcactcggctc

SEQ ID NO: 42065 - RNA, 27 nt, Synthetic Construct
  source 1..27: mol_type = other RNA
gactcttagcggtggatcactcggctc

SEQ ID NO: 42066 - RNA, 17 nt, Synthetic Construct
  source 1..17: mol_type = other RNA
cagtcaggatgttggct

SEQ ID NO: 42067 - RNA, 17 nt, Synthetic Construct
  source 1..17: mol_type = other RNA
cagtcaggatgttggct

SEQ ID NO: 42068 - RNA, 21 nt, Synthetic Construct
  source 1..21: mol_type = other RNA
tgaggtagtaggttgtgcggt

SEQ ID NO: 42069 - RNA, 21 nt, Synthetic Construct
  source 1..21: mol_type = other RNA
tgaggtagtaggttgtgcggt

SEQ ID NO: 42070 - RNA, 16 nt, Synthetic Construct
  source 1..16: mol_type = other RNA
gggtgaaagcggggga

SEQ ID NO: 42071 - RNA, 16 nt, Synthetic Construct
  source 1..16: mol_type = other RNA
gggtgaaagcggggga

SEQ ID NO: 42072 - RNA, 22 nt, Synthetic Construct
  source 1..22: mol_type = other RNA
tggggtagtaggttgtgtggtt

SEQ ID NO: 42073 - RNA, 22 nt, Synthetic Construct
  source 1..22: mol_type = other RNA
tggggtagtaggttgtgtggtt

SEQ ID NO: 42074 - RNA, 18 nt, Synthetic Construct
  source 1..18: mol_type = other RNA
ggctttgaagtaaggtcg

SEQ ID NO: 42075 - RNA, 18 nt, Synthetic Construct
  source 1..18: mol_type = other RNA
ggctttgaagtaaggtcg

SEQ ID NO: 42076 - RNA, 23 nt, Synthetic Construct
  source 1..23: mol_type = other RNA
tggtaatacgacgtacttggtgt

SEQ ID NO: 42077 - RNA, 23 nt, Synthetic Construct
  source 1..23: mol_type = other RNA
tggtaatacgacgtacttggtgt

SEQ ID NO: 42078 - RNA, 16 nt, Synthetic Construct
  source 1..16: mol_type = other RNA
ggtgggggtcgttggt

SEQ ID NO: 42079 - RNA, 16 nt, Synthetic Construct
  source 1..16: mol_type = other RNA
ggtgggggtcgttggt

SEQ ID NO: 42080 - RNA, 34 nt, Synthetic Construct; identical to SEQ ID NO: 2375
  source 1..34: mol_type = other RNA

SEQ ID NO: 42081 - RNA, 34 nt, Synthetic Construct; identical to SEQ ID NO: 2375
  source 1..34: mol_type = other RNA

SEQ ID NO: 42082 - RNA, 30 nt, Synthetic Construct; identical to SEQ ID NO: 2407
  source 1..30: mol_type = other RNA

SEQ ID NO: 42083 - RNA, 30 nt, Synthetic Construct; identical to SEQ ID NO: 2407
  source 1..30: mol_type = other RNA

SEQ ID NO: 42084 - RNA, 16 nt, Synthetic Construct
  source 1..16: mol_type = other RNA
ggcgggggtcgctggt

SEQ ID NO: 42085 - RNA, 16 nt, Synthetic Construct
  source 1..16: mol_type = other RNA
ggcgggggtcgctggt

SEQ ID NO: 42086 - RNA, 15 nt, Synthetic Construct
  source 1..15: mol_type = other RNA
accggaggaaggtgg

SEQ ID NO: 42087 - RNA, 15 nt, Synthetic Construct
  source 1..15: mol_type = other RNA
accggaggaaggtgg

SEQ ID NO: 42088 - RNA, 20 nt, Synthetic Construct
  source 1..20: mol_type = other RNA
tgaggtagtaggttgcatag

SEQ ID NO: 42089 - RNA, 20 nt, Synthetic Construct
  source 1..20: mol_type = other RNA
tgaggtagtaggttgcatag

SEQ ID NO: 42090 - RNA, 20 nt, Synthetic Construct
  source 1..20: mol_type = other RNA
tcagtagctcgaggaaaaga

SEQ ID NO: 42091 - RNA, 20 nt, Synthetic Construct
  source 1..20: mol_type = other RNA
tcagtagctcgaggaaaaga

SEQ ID NO: 42092 - RNA, 21 nt, Synthetic Construct
  source 1..21: mol_type = other RNA
gctttgatccggagatttccg

SEQ ID NO: 42093 - RNA, 21 nt, Synthetic Construct
  source 1..21: mol_type = other RNA
gctttgatccggagatttccg

SEQ ID NO: 42094 - RNA, 19 nt, Synthetic Construct
  source 1..19: mol_type = other RNA
gcgaaattccttgtcgggt

SEQ ID NO: 42095 - RNA, 19 nt, Synthetic Construct
  source 1..19: mol_type = other RNA
gcgaaattccttgtcgggt

SEQ ID NO: 42096 - RNA, 17 nt, Synthetic Construct
  source 1..17: mol_type = other RNA
tcccagaaacccggtcg

SEQ ID NO: 42097 - RNA, 17 nt, Synthetic Construct
  source 1..17: mol_type = other RNA
tcccagaaacccggtcg

SEQ ID NO: 42098 - RNA, 17 nt, Synthetic Construct
  source 1..17: mol_type = other RNA
tcgctagtaatcgcgga

SEQ ID NO: 42099 - RNA, 17 nt, Synthetic Construct
  source 1..17: mol_type = other RNA
tcgctagtaatcgcgga

SEQ ID NO: 42100 - RNA, 23 nt, Synthetic Construct
  source 1..23: mol_type = other RNA
tcctgtgctgagctgccccgagt

SEQ ID NO: 42101 - RNA, 23 nt, Synthetic Construct
  source 1..23: mol_type = other RNA
tcctgtgctgagctgccccgagt

SEQ ID NO: 42102 - RNA, 16 nt, Synthetic Construct
  source 1..16: mol_type = other RNA
aggtcatcattatctg

SEQ ID NO: 42103 - RNA, 16 nt, Synthetic Construct
  source 1..16: mol_type = other RNA
aggtcatcattatctg

SEQ ID NO: 42104 - RNA, 35 nt, Synthetic Construct; identical to SEQ ID NO: 3369
  source 1..35: mol_type = other RNA

SEQ ID NO: 42105 - RNA, 35 nt, Synthetic Construct; identical to SEQ ID NO: 3369
  source 1..35: mol_type = other RNA

SEQ ID NO: 42106 - RNA, 31 nt, Synthetic Construct; identical to SEQ ID NO: 2412
  source 1..31: mol_type = other RNA

SEQ ID NO: 42107 - RNA, 31 nt, Synthetic Construct; identical to SEQ ID NO: 2412
  source 1..31: mol_type = other RNA

SEQ ID NO: 42108 - RNA, 27 nt, Synthetic Construct
  source 1..27: mol_type = other RNA
cgactcttagcggtggatcactcggct

SEQ ID NO: 42109 - RNA, 27 nt, Synthetic Construct
  source 1..27: mol_type = other RNA
cgactcttagcggtggatcactcggct

SEQ ID NO: 42110 - RNA, 15 nt, Synthetic Construct
  source 1..15: mol_type = other RNA
accggaggaaggtgg

SEQ ID NO: 42111 - RNA, 15 nt, Synthetic Construct
  source 1..15: mol_type = other RNA
accggaggaaggtgg

SEQ ID NO: 42112 - RNA, 35 nt, Synthetic Construct; identical to SEQ ID NO: 2548
  source 1..35: mol_type = other RNA

SEQ ID NO: 42113 - RNA, 35 nt, Synthetic Construct; identical to SEQ ID NO: 2548
  source 1..35: mol_type = other RNA

SEQ ID NO: 42114 - RNA, 23 nt, Synthetic Construct
  source 1..23: mol_type = other RNA
ggcagggttcgtgactggggtga

SEQ ID NO: 42115 - RNA, 23 nt, Synthetic Construct
  source 1..23: mol_type = other RNA
ggcagggttcgtgactggggtga

SEQ ID NO: 42116 - RNA, 24 nt, Synthetic Construct
  source 1..24: mol_type = other RNA
tgtaaacacccccgactggaagct

SEQ ID NO: 42117 - RNA, 15 nt, Synthetic Construct
  source 1..15: mol_type = other RNA
gagtagggcgggaca

SEQ ID NO: 42118 - RNA, 18 nt, Synthetic Construct
  source 1..18: mol_type = other RNA
acagtcaggatgttggct

SEQ ID NO: 42119 - RNA, 18 nt, Synthetic Construct
  source 1..18: mol_type = other RNA
acagtcaggatgttggct

SEQ ID NO: 42120 - RNA, 32 nt, Synthetic Construct; identical to SEQ ID NO: 3541
  source 1..32: mol_type = other RNA

SEQ ID NO: 42121 - RNA, 32 nt, Synthetic Construct; identical to SEQ ID NO: 3541
  source 1..32: mol_type = other RNA

SEQ ID NO: 42122 - RNA, 24 nt, Synthetic Construct
  source 1..24: mol_type = other RNA
tgtaaacatccccgactggaagcc

SEQ ID NO: 42123 - RNA, 21 nt, Synthetic Construct
  source 1..21: mol_type = other RNA
tgaggaagtaggttgtgtggt

SEQ ID NO: 42124 - RNA, 21 nt, Synthetic Construct
  source 1..21: mol_type = other RNA
tgaggaagtaggttgtgtggt

SEQ ID NO: 42125 - RNA, 39 nt, Synthetic Construct; identical to SEQ ID NO: 2398
  source 1..39: mol_type = other RNA

SEQ ID NO: 42126 - RNA, 39 nt, Synthetic Construct; identical to SEQ ID NO: 2398
  source 1..39: mol_type = other RNA

SEQ ID NO: 42127 - RNA, 18 nt, Synthetic Construct
  source 1..18: mol_type = other RNA
ggctttgaagtaaggtcg

SEQ ID NO: 42128 - RNA, 18 nt, Synthetic Construct
  source 1..18: mol_type = other RNA
ggctttgaagtaaggtcg

SEQ ID NO: 42129 - RNA, 21 nt, Synthetic Construct
  source 1..21: mol_type = other RNA
tcctgtactgagctgccccgg

SEQ ID NO: 42130 - RNA, 21 nt, Synthetic Construct
  source 1..21: mol_type = other RNA
tcctgtactgagctgccccgg

SEQ ID NO: 42131 - RNA, 23 nt, Synthetic Construct
  source 1..23: mol_type = other RNA
caaagtgctgttcgtgcaggtgg

SEQ ID NO: 42132 - RNA, 15 nt, Synthetic Construct
  source 1..15: mol_type = other RNA
cctcgcgcgattgga

SEQ ID NO: 42133 - RNA, 15 nt, Synthetic Construct
  source 1..15: mol_type = other RNA
cctcgcgcgattgga

SEQ ID NO: 42134 - RNA, 15 nt, Synthetic Construct
  source 1..15: mol_type = other RNA
gctagtaatcgcgga

SEQ ID NO: 42135 - RNA, 15 nt, Synthetic Construct
  source 1..15: mol_type = other RNA
gctagtaatcgcgga

SEQ ID NO: 42136 - RNA, 30 nt, Synthetic Construct; identical to SEQ ID NO: 2308
  source 1..30: mol_type = other RNA

SEQ ID NO: 42137 - RNA, 30 nt, Synthetic Construct; identical to SEQ ID NO: 2308
  source 1..30: mol_type = other RNA

SEQ ID NO: 42138 - RNA, 23 nt, Synthetic Construct
  source 1..23: mol_type = other RNA
tgaggggcagagagcgggacttt

SEQ ID NO: 42139 - RNA, 23 nt, Synthetic Construct
  source 1..23: mol_type = other RNA
tgaggggcagagagcgggacttt

SEQ ID NO: 42140 - RNA, 35 nt, Synthetic Construct; identical to SEQ ID NO: 2505
  source 1..35: mol_type = other RNA

SEQ ID NO: 42141 - RNA, 35 nt, Synthetic Construct; identical to SEQ ID NO: 2505
  source 1..35: mol_type = other RNA

SEQ ID NO: 42142 - RNA, 22 nt, Synthetic Construct
  source 1..22: mol_type = other RNA
ggcagggttcgtgactggggtg

SEQ ID NO: 42143 - RNA, 33 nt, Synthetic Construct; identical to SEQ ID NO: 2556
  source 1..33: mol_type = other RNA

SEQ ID NO: 42144 - RNA, 33 nt, Synthetic Construct; identical to SEQ ID NO: 2556
  source 1..33: mol_type = other RNA

SEQ ID NO: 42145 - RNA, 34 nt, Synthetic Construct; identical to SEQ ID NO: 2317
  source 1..34: mol_type = other RNA

SEQ ID NO: 42146 - RNA, 34 nt, Synthetic Construct; identical to SEQ ID NO: 2317
  source 1..34: mol_type = other RNA

SEQ ID NO: 42147 - RNA, 23 nt, Synthetic Construct
  source 1..23: mol_type = other RNA
tgaggggcagggagcgagacttt

SEQ ID NO: 42148 - RNA, 23 nt, Synthetic Construct
  source 1..23: mol_type = other RNA
tgaggggcagggagcgagacttt

SEQ ID NO: 42149 - RNA, 19 nt, Synthetic Construct
  source 1..19: mol_type = other RNA
cacatgcaagtcgaacggt

SEQ ID NO: 42150 - RNA, 19 nt, Synthetic Construct
  source 1..19: mol_type = other RNA
cacatgcaagtcgaacggt

SEQ ID NO: 42151 - RNA, 34 nt, Synthetic Construct; identical to SEQ ID NO: 2375
  source 1..34: mol_type = other RNA

SEQ ID NO: 42152 - RNA, 34 nt, Synthetic Construct; identical to SEQ ID NO: 2375
  source 1..34: mol_type = other RNA

SEQ ID NO: 42153 - RNA, 17 nt, Synthetic Construct
  source 1..17: mol_type = other RNA
agcggtggatgatgtgg

SEQ ID NO: 42154 - RNA, 23 nt, Synthetic Construct
  source 1..23: mol_type = other RNA
tggtaatacgacgtacttagtgc

SEQ ID NO: 42155 - RNA, 23 nt, Synthetic Construct
  source 1..23: mol_type = other RNA
tggtaatacgacgtacttagtgc

SEQ ID NO: 42156 - RNA, 35 nt, Synthetic Construct; identical to SEQ ID NO: 2354
  source 1..35: mol_type = other RNA

SEQ ID NO: 42157 - RNA, 18 nt, Synthetic Construct
  source 1..18: mol_type = other RNA
agcaggacggtggccatg

SEQ ID NO: 42158 - RNA, 22 nt, Synthetic Construct
  source 1..22: mol_type = other RNA
taggtagtttcctgttgttggg

SEQ ID NO: 42159 - RNA, 26 nt, Synthetic Construct
  source 1..26: mol_type = other RNA
gcataagcgtgcttgactgcgagact

SEQ ID NO: 42160 - RNA, 26 nt, Synthetic Construct
  source 1..26: mol_type = other RNA
gcataagcgtgcttgactgcgagact

SEQ ID NO: 42161 - RNA, 15 nt, Synthetic Construct
  source 1..15: mol_type = other RNA
gtccggatcgtagtc

SEQ ID NO: 42162 - RNA, 15 nt, Synthetic Construct
  source 1..15: mol_type = other RNA
gtccggatcgtagtc

SEQ ID NO: 42163 - RNA, 15 nt, Synthetic Construct
  source 1..15: mol_type = other RNA
tgcaagtcgaacggt

SEQ ID NO: 42164 - RNA, 15 nt, Synthetic Construct
  source 1..15: mol_type = other RNA
tgcaagtcgaacggt

SEQ ID NO: 42165 - RNA, 31 nt, Synthetic Construct; identical to SEQ ID NO: 2442
  source 1..31: mol_type = other RNA

SEQ ID NO: 42166 - RNA, 15 nt, Synthetic Construct
  source 1..15: mol_type = other RNA
gggtgaaagcggggg

SEQ ID NO: 42167 - RNA, 22 nt, Synthetic Construct
  source 1..22: mol_type = other RNA
tgtagtgtttcctactttatgg

SEQ ID NO: 42168 - RNA, 29 nt, Synthetic Construct
  source 1..29: mol_type = other RNA
cccgtgtgaaagtaggtcatcgtcaggct

SEQ ID NO: 42169 - RNA, 21 nt, Synthetic Construct
  source 1..21: mol_type = other RNA
ngaggtagtaggttgtgtggt

SEQ ID NO: 42170 - RNA, 21 nt, Synthetic Construct
  source 1..21: mol_type = other RNA
ngaggtagtaggttgtgtggt

SEQ ID NO: 42171 - RNA, 23 nt, Synthetic Construct
  source 1..23: mol_type = other RNA
tggtaatacgacgtacttagcgt

SEQ ID NO: 42172 - RNA, 23 nt, Synthetic Construct
  source 1..23: mol_type = other RNA
tggtaatacgacgtacttagcgt

SEQ ID NO: 42173 - RNA, 23 nt, Synthetic Construct
  source 1..23: mol_type = other RNA
taaggggcagagagcgagacttt

SEQ ID NO: 42174 - RNA, 23 nt, Synthetic Construct
  source 1..23: mol_type = other RNA
taaggggcagagagcgagacttt

SEQ ID NO: 42175 - RNA, 22 nt, Synthetic Construct
  source 1..22: mol_type = other RNA
ngaggtagtaggttgtatagtt

SEQ ID NO: 42176 - RNA, 22 nt, Synthetic Construct
  source 1..22: mol_type = other RNA
ngaggtagtaggttgtatagtt

SEQ ID NO: 42177 - RNA, 23 nt, Synthetic Construct
  source 1..23: mol_type = other RNA
taaagtgcttatagtgcaggtag

SEQ ID NO: 42178 - RNA, 23 nt, Synthetic Construct
  source 1..23: mol_type = other RNA
taaagtgcttatagtgcaggtag

SEQ ID NO: 42179 - RNA, 28 nt, Synthetic Construct
  source 1..28: mol_type = other RNA
ggatttccccttggggttgtaggaccac

SEQ ID NO: 42180 - RNA, 28 nt, Synthetic Construct
  source 1..28: mol_type = other RNA
ggatttccccttggggttgtaggaccac

SEQ ID NO: 42181 - RNA, 23 nt, Synthetic Construct
  source 1..23: mol_type = other RNA
tgaagggcagagagcgagacttt

SEQ ID NO: 42182 - RNA, 23 nt, Synthetic Construct
  source 1..23: mol_type = other RNA
tgaagggcagagagcgagacttt

SEQ ID NO: 42183 - RNA, 15 nt, Synthetic Construct
  source 1..15: mol_type = other RNA
catgccgcgtgcggg

SEQ ID NO: 42184 - RNA, 19 nt, Synthetic Construct
  source 1..19: mol_type = other RNA
cctgtctgaatatgggggg

SEQ ID NO: 42185 - RNA, 19 nt, Synthetic Construct
  source 1..19: mol_type = other RNA
cctgtctgaatatgggggg

SEQ ID NO: 42186 - RNA, 36 nt, Synthetic Construct; identical to SEQ ID NO: 2520
  source 1..36: mol_type = other RNA

SEQ ID NO: 42187 - RNA, 36 nt, Synthetic Construct; identical to SEQ ID NO: 2520
  source 1..36: mol_type = other RNA

SEQ ID NO: 42188 - RNA, 25 nt, Synthetic Construct
  source 1..25: mol_type = other RNA
cctcgcgcgattggagcggccgata

SEQ ID NO: 42189 - RNA, 25 nt, Synthetic Construct
  source 1..25: mol_type = other RNA
cctcgcgcgattggagcggccgata

SEQ ID NO: 42190 - RNA, 26 nt, Synthetic Construct
  source 1..26: mol_type = other RNA
gatgcgtggtaggagagcgttctgta

SEQ ID NO: 42191 - RNA, 26 nt, Synthetic Construct
  source 1..26: mol_type = other RNA
gatgcgtggtaggagagcgttctgta

SEQ ID NO: 42192 - RNA, 21 nt, Synthetic Construct
  source 1..21: mol_type = other RNA
gctttgatccggagatttccg

SEQ ID NO: 42193 - RNA, 21 nt, Synthetic Construct
  source 1..21: mol_type = other RNA
gctttgatccggagatttccg

SEQ ID NO: 42194 - RNA, 23 nt, Synthetic Construct
  source 1..23: mol_type = other RNA
tggtaatacgacgtacttggtgt

SEQ ID NO: 42195 - RNA, 23 nt, Synthetic Construct
  source 1..23: mol_type = other RNA
tggtaatacgacgtacttggtgt

SEQ ID NO: 42196 - RNA, 16 nt, Synthetic Construct
  source 1..16: mol_type = other RNA
ccatgccgcgtgcggg

SEQ ID NO: 42197 - RNA, 16 nt, Synthetic Construct
  source 1..16: mol_type = other RNA
ccatgccgcgtgcggg

SEQ ID NO: 42198 - RNA, 31 nt, Synthetic Construct; identical to SEQ ID NO: 2295
  source 1..31: mol_type = other RNA

SEQ ID NO: 42199 - RNA, 31 nt, Synthetic Construct; identical to SEQ ID NO: 2295
  source 1..31: mol_type = other RNA

SEQ ID NO: 42200 - RNA, 15 nt, Synthetic Construct
  source 1..15: mol_type = other RNA
gggtgaaagcggggg

SEQ ID NO: 42201 - RNA, 15 nt, Synthetic Construct
  source 1..15: mol_type = other RNA
gggtgaaagcggggg

SEQ ID NO: 42202 - RNA, 22 nt, Synthetic Construct
  source 1..22: mol_type = other RNA
ctttgttcgattccgttgagta

SEQ ID NO: 42203 - RNA, 22 nt, Synthetic Construct
  source 1..22: mol_type = other RNA
ctttgttcgattccgttgagta

SEQ ID NO: 42204 - RNA, 35 nt, Synthetic Construct; identical to SEQ ID NO: 2397
  source 1..35: mol_type = other RNA

SEQ ID NO: 42205 - RNA, 35 nt, Synthetic Construct; identical to SEQ ID NO: 2397
  source 1..35: mol_type = other RNA

SEQ ID NO: 42206 - RNA, 28 nt, Synthetic Construct
  source 1..28: mol_type = other RNA
ggcagggttcgtgactggggtgaagtcg

SEQ ID NO: 42207 - RNA, 28 nt, Synthetic Construct
  source 1..28: mol_type = other RNA
ggcagggttcgtgactggggtgaagtcg

SEQ ID NO: 42208 - RNA, 23 nt, Synthetic Construct
  source 1..23: mol_type = other RNA
tcggaatcgctagtaatcgcgga

SEQ ID NO: 42209 - RNA, 23 nt, Synthetic Construct
  source 1..23: mol_type = other RNA
tcggaatcgctagtaatcgcgga

SEQ ID NO: 42210 - RNA, 23 nt, Synthetic Construct
  source 1..23: mol_type = other RNA
tggtaatacaacgtacttagtgt

SEQ ID NO: 42211 - RNA, 23 nt, Synthetic Construct
  source 1..23: mol_type = other RNA
tggtaatacaacgtacttagtgt

SEQ ID NO: 42212 - RNA, 16 nt, Synthetic Construct
  source 1..16: mol_type = other RNA
ccaaggggtcgtgggt

SEQ ID NO: 42213 - RNA, 16 nt, Synthetic Construct
  source 1..16: mol_type = other RNA
ccaaggggtcgtgggt

SEQ ID NO: 42214 - RNA, 15 nt, Synthetic Construct
  source 1..15: mol_type = other RNA
tagagtagggcggga

SEQ ID NO: 42215 - RNA, 15 nt, Synthetic Construct
  source 1..15: mol_type = other RNA
tagagtagggcggga

SEQ ID NO: 42216 - RNA, 21 nt, Synthetic Construct
  source 1..21: mol_type = other RNA
tgaggtggtaggttgtgtggt

SEQ ID NO: 42217 - RNA, 21 nt, Synthetic Construct
  source 1..21: mol_type = other RNA
tgaggtggtaggttgtgtggt

SEQ ID NO: 42218 - RNA, 21 nt, Synthetic Construct
  source 1..21: mol_type = other RNA
tgaggtagcaggttgtgtggt

SEQ ID NO: 42219 - RNA, 21 nt, Synthetic Construct
  source 1..21: mol_type = other RNA
tgaggtagcaggttgtgtggt

SEQ ID NO: 42220 - RNA, 21 nt, Synthetic Construct
  source 1..21: mol_type = other RNA
atcggaacgtgcccagtcgtg

SEQ ID NO: 42221 - RNA, 17 nt, Synthetic Construct
  source 1..17: mol_type = other RNA
tcccagaaacccggtcg

SEQ ID NO: 42222 - RNA, 17 nt, Synthetic Construct
  source 1..17: mol_type = other RNA
tcccagaaacccggtcg

SEQ ID NO: 42223 - RNA, 32 nt, Synthetic Construct; identical to SEQ ID NO: 2467
  source 1..32: mol_type = other RNA

SEQ ID NO: 42224 - RNA, 32 nt, Synthetic Construct; identical to SEQ ID NO: 2467
  source 1..32: mol_type = other RNA

SEQ ID NO: 42225 - RNA, 17 nt, Synthetic Construct
  source 1..17: mol_type = other RNA
tcccagaaacccggtcg

SEQ ID NO: 42226 - RNA, 17 nt, Synthetic Construct
  source 1..17: mol_type = other RNA
tcccagaaacccggtcg

SEQ ID NO: 42227 - RNA, 16 nt, Synthetic Construct
  source 1..16: mol_type = other RNA
cgctagtaatcgcgga

SEQ ID NO: 42228 - RNA, 20 nt, Synthetic Construct
  source 1..20: mol_type = other RNA
taaggtagtaggttgtgtgg

SEQ ID NO: 42229 - RNA, 20 nt, Synthetic Construct
  source 1..20: mol_type = other RNA
taaggtagtaggttgtgtgg

SEQ ID NO: 42230 - RNA, 15 nt, Synthetic Construct
  source 1..15: mol_type = other RNA
gggtgaaagcggggg

SEQ ID NO: 42231 - RNA, 21 nt, Synthetic Construct
  source 1..21: mol_type = other RNA
tgaagtagtaggttgtgtggt

SEQ ID NO: 42232 - RNA, 21 nt, Synthetic Construct
  source 1..21: mol_type = other RNA
tgaagtagtaggttgtgtggt

SEQ ID NO: 42233 - RNA, 21 nt, Synthetic Construct
  source 1..21: mol_type = other RNA
agcgtgcttgactgcgagact

SEQ ID NO: 42234 - RNA, 21 nt, Synthetic Construct
  source 1..21: mol_type = other RNA
agcgtgcttgactgcgagact

SEQ ID NO: 42235 - RNA, 35 nt, Synthetic Construct; identical to SEQ ID NO: 2505
  source 1..35: mol_type = other RNA

SEQ ID NO: 42236 - RNA, 35 nt, Synthetic Construct; identical to SEQ ID NO: 2505
  source 1..35: mol_type = other RNA

SEQ ID NO: 42237 - RNA, 36 nt, Synthetic Construct; identical to SEQ ID NO: 2506
  source 1..36: mol_type = other RNA

SEQ ID NO: 42238 - RNA, 27 nt, Synthetic Construct
  source 1..27: mol_type = other RNA
ccgtgtgaaagtaggtcatcgtcaggc

SEQ ID NO: 42239 - RNA, 27 nt, Synthetic Construct
  source 1..27: mol_type = other RNA
ccgtgtgaaagtaggtcatcgtcaggc

SEQ ID NO: 42240 - RNA, 23 nt, Synthetic Construct
  source 1..23: mol_type = other RNA
tggtaacacgacgtacttagtgt

SEQ ID NO: 42241 - RNA, 23 nt, Synthetic Construct
  source 1..23: mol_type = other RNA
tggtaacacgacgtacttagtgt

SEQ ID NO: 42242 - RNA, 35 nt, Synthetic Construct; identical to SEQ ID NO: 2399
  source 1..35: mol_type = other RNA

SEQ ID NO: 42243 - RNA, 35 nt, Synthetic Construct; identical to SEQ ID NO: 2399
  source 1..35: mol_type = other RNA

SEQ ID NO: 42244 - RNA, 21 nt, Synthetic Construct
  source 1..21: mol_type = other RNA
tgaagtagtaggttgtgtggt

SEQ ID NO: 42245 - RNA, 21 nt, Synthetic Construct
  source 1..21: mol_type = other RNA
tgaagtagtaggttgtgtggt

SEQ ID NO: 42246 - RNA, 20 nt, Synthetic Construct
  source 1..20: mol_type = other RNA
tgaggtagtaggctgtgtgg

SEQ ID NO: 42247 - RNA, 20 nt, Synthetic Construct
  source 1..20: mol_type = other RNA
tgaggtagtaggctgtgtgg

SEQ ID NO: 42248 - RNA, 33 nt, Synthetic Construct; identical to SEQ ID NO: 2266
  source 1..33: mol_type = other RNA

SEQ ID NO: 42249 - RNA, 33 nt, Synthetic Construct; identical to SEQ ID NO: 2266
  source 1..33: mol_type = other RNA

SEQ ID NO: 42250 - RNA, 34 nt, Synthetic Construct; identical to SEQ ID NO: 2317
  source 1..34: mol_type = other RNA

SEQ ID NO: 42251 - RNA, 30 nt, Synthetic Construct; identical to SEQ ID NO: 2407
  source 1..30: mol_type = other RNA

SEQ ID NO: 42252 - RNA, 30 nt, Synthetic Construct; identical to SEQ ID NO: 2407
  source 1..30: mol_type = other RNA

SEQ ID NO: 42253 - RNA, 18 nt, Synthetic Construct
  source 1..18: mol_type = other RNA
catgcaagtcgaacggta

SEQ ID NO: 42254 - RNA, 18 nt, Synthetic Construct
  source 1..18: mol_type = other RNA
catgcaagtcgaacggta

SEQ ID NO: 42255 - RNA, 21 nt, Synthetic Construct
  source 1..21: mol_type = other RNA
tcctgtaccgagctgccccga

SEQ ID NO: 42256 - RNA, 21 nt, Synthetic Construct
  source 1..21: mol_type = other RNA
tcctgtaccgagctgccccga

SEQ ID NO: 42257 - RNA, 16 nt, Synthetic Construct
  source 1..16: mol_type = other RNA
tgcgtagatatgcgga

SEQ ID NO: 42258 - RNA, 16 nt, Synthetic Construct
  source 1..16: mol_type = other RNA
tgcgtagatatgcgga

SEQ ID NO: 42259 - RNA, 15 nt, Synthetic Construct
  source 1..15: mol_type = other RNA
tgcaagtcgaacggt

SEQ ID NO: 42260 - RNA, 15 nt, Synthetic Construct
  source 1..15: mol_type = other RNA
tgcaagtcgaacggt

SEQ ID NO: 42261 - RNA, 16 nt, Synthetic Construct
  source 1..16: mol_type = other RNA
gtccggatcgtagtct

SEQ ID NO: 42262 - RNA, 16 nt, Synthetic Construct
  source 1..16: mol_type = other RNA
gtccggatcgtagtct

SEQ ID NO: 42263 - RNA, 18 nt, Synthetic Construct
  source 1..18: mol_type = other RNA
accggaggaaggtgggga

SEQ ID NO: 42264 - RNA, 18 nt, Synthetic Construct
  source 1..18: mol_type = other RNA
accggaggaaggtgggga

SEQ ID NO: 42265 - RNA, 36 nt, Synthetic Construct; identical to SEQ ID NO: 2444
  source 1..36: mol_type = other RNA

SEQ ID NO: 42266 - RNA, 36 nt, Synthetic Construct; identical to SEQ ID NO: 2444
  source 1..36: mol_type = other RNA

SEQ ID NO: 42267 - RNA, 36 nt, Synthetic Construct; identical to SEQ ID NO: 2444
  source 1..36: mol_type = other RNA

SEQ ID NO: 42268 - RNA, 36 nt, Synthetic Construct; identical to SEQ ID NO: 2444
  source 1..36: mol_type = other RNA

SEQ ID NO: 42269 - RNA, 23 nt, Synthetic Construct
  source 1..23: mol_type = other RNA
taaagtgcttatagtgcaggtag

SEQ ID NO: 42270 - RNA, 23 nt, Synthetic Construct
  source 1..23: mol_type = other RNA
taaagtgcttatagtgcaggtag

SEQ ID NO: 42271 - RNA, 22 nt, Synthetic Construct
  source 1..22: mol_type = other RNA
tgaagtagtaggttgtgtggtt

SEQ ID NO: 42272 - RNA, 22 nt, Synthetic Construct
  source 1..22: mol_type = other RNA
tgaagtagtaggttgtgtggtt

SEQ ID NO: 42273 - RNA, 23 nt, Synthetic Construct
  source 1..23: mol_type = other RNA
tggtaatacgacgtacttagcgt

SEQ ID NO: 42274 - RNA, 23 nt, Synthetic Construct
  source 1..23: mol_type = other RNA
tggtaatacgacgtacttagcgt

SEQ ID NO: 42275 - RNA, 30 nt, Synthetic Construct; identical to SEQ ID NO: 1958
  source 1..30: mol_type = other RNA

SEQ ID NO: 42276 - RNA, 24 nt, Synthetic Construct
  source 1..24: mol_type = other RNA
tatatcggaacgtgcccagtcgtg

SEQ ID NO: 42277 - RNA, 24 nt, Synthetic Construct
  source 1..24: mol_type = other RNA
tatatcggaacgtgcccagtcgtg

SEQ ID NO: 42278 - RNA, 15 nt, Synthetic Construct
  source 1..15: mol_type = other RNA
tcctgacggccatag

SEQ ID NO: 42279 - RNA, 15 nt, Synthetic Construct
  source 1..15: mol_type = other RNA
tcctgacggccatag

SEQ ID NO: 42280 - RNA, 20 nt, Synthetic Construct
  source 1..20: mol_type = other RNA
tgaggtagtgggttgtgtgg

SEQ ID NO: 42281 - RNA, 20 nt, Synthetic Construct
  source 1..20: mol_type = other RNA
tgaggtagtgggttgtgtgg

SEQ ID NO: 42282 - RNA, 27 nt, Synthetic Construct
  source 1..27: mol_type = other RNA
ccccccactgctaagtttgactggctt

SEQ ID NO: 42283 - RNA, 23 nt, Synthetic Construct
  source 1..23: mol_type = other RNA
tgaggagcagagagcgagacttt

SEQ ID NO: 42284 - RNA, 23 nt, Synthetic Construct
  source 1..23: mol_type = other RNA
tgaggagcagagagcgagacttt

SEQ ID NO: 42285 - RNA, 17 nt, Synthetic Construct
  source 1..17: mol_type = other RNA
cgatctgtagctggtct

SEQ ID NO: 42286 - RNA, 17 nt, Synthetic Construct
  source 1..17: mol_type = other RNA
cgatctgtagctggtct

SEQ ID NO: 42287 - RNA, 36 nt, Synthetic Construct; identical to SEQ ID NO: 2546
  source 1..36: mol_type = other RNA

SEQ ID NO: 42288 - RNA, 36 nt, Synthetic Construct; identical to SEQ ID NO: 2546
  source 1..36: mol_type = other RNA

SEQ ID NO: 42289 - RNA, 23 nt, Synthetic Construct
  source 1..23: mol_type = other RNA
tgaggggcagagagtgagacttt

SEQ ID NO: 42290 - RNA, 23 nt, Synthetic Construct
  source 1..23: mol_type = other RNA
tgaggggcagagagtgagacttt

SEQ ID NO: 42291 - RNA, 31 nt, Synthetic Construct; identical to SEQ ID NO: 2412
  source 1..31: mol_type = other RNA

SEQ ID NO: 42292 - RNA, 31 nt, Synthetic Construct; identical to SEQ ID NO: 2412
  source 1..31: mol_type = other RNA

SEQ ID NO: 42293 - RNA, 15 nt, Synthetic Construct
  source 1..15: mol_type = other RNA
gagtagggcgggaca

SEQ ID NO: 42294 - RNA, 15 nt, Synthetic Construct
  source 1..15: mol_type = other RNA
gagtagggcgggaca

SEQ ID NO: 42295 - RNA, 23 nt, Synthetic Construct
  source 1..23: mol_type = other RNA
tgaggggcggagagcgagacttt

SEQ ID NO: 42296 - RNA, 16 nt, Synthetic Construct
  source 1..16: mol_type = other RNA
gtctacggccgtacca

SEQ ID NO: 42297 - RNA, 21 nt, Synthetic Construct
  source 1..21: mol_type = other RNA
gttggttcaagcgtgtagtcg

SEQ ID NO: 42298 - RNA, 21 nt, Synthetic Construct
  source 1..21: mol_type = other RNA
gttggttcaagcgtgtagtcg

SEQ ID NO: 42299 - RNA, 33 nt, Synthetic Construct; identical to SEQ ID NO: 2126
  source 1..33: mol_type = other RNA

SEQ ID NO: 42300 - RNA, 19 nt, Synthetic Construct
  source 1..19: mol_type = other RNA
cacatgcaagtcgaacggt

SEQ ID NO: 42301 - RNA, 19 nt, Synthetic Construct
  source 1..19: mol_type = other RNA
cacatgcaagtcgaacggt

SEQ ID NO: 42302 - RNA, 35 nt, Synthetic Construct; identical to SEQ ID NO: 2514
  source 1..35: mol_type = other RNA

SEQ ID NO: 42303 - RNA, 35 nt, Synthetic Construct; identical to SEQ ID NO: 2514
  source 1..35: mol_type = other RNA

SEQ ID NO: 42304 - RNA, 19 nt, Synthetic Construct
  source 1..19: mol_type = other RNA
cccttgtcattagttgcta

SEQ ID NO: 42305 - RNA, 19 nt, Synthetic Construct
  source 1..19: mol_type = other RNA
cccttgtcattagttgcta

SEQ ID NO: 42306 - RNA, 31 nt, Synthetic Construct; identical to SEQ ID NO: 2278
  source 1..31: mol_type = other RNA

SEQ ID NO: 42307 - RNA, 31 nt, Synthetic Construct; identical to SEQ ID NO: 2278
  source 1..31: mol_type = other RNA

SEQ ID NO: 42308 - RNA, 21 nt, Synthetic Construct
  source 1..21: mol_type = other RNA
tgaggcagtaggttgtgtggt

SEQ ID NO: 42309 - RNA, 21 nt, Synthetic Construct
  source 1..21: mol_type = other RNA
tgaggcagtaggttgtgtggt

SEQ ID NO: 42310 - RNA, 15 nt, Synthetic Construct
  source 1..15: mol_type = other RNA
gtcgacgtatagggt

SEQ ID NO: 42311 - RNA, 30 nt, Synthetic Construct; identical to SEQ ID NO: 2274
  source 1..30: mol_type = other RNA

SEQ ID NO: 42312 - RNA, 30 nt, Synthetic Construct; identical to SEQ ID NO: 2274
  source 1..30: mol_type = other RNA

SEQ ID NO: 42313 - RNA, 17 nt, Synthetic Construct
  source 1..17: mol_type = other RNA
gcgtagatatgcggagg

SEQ ID NO: 42314 - RNA, 17 nt, Synthetic Construct
  source 1..17: mol_type = other RNA
gcgtagatatgcggagg

SEQ ID NO: 42315 - RNA, 34 nt, Synthetic Construct; identical to SEQ ID NO: 2019
  source 1..34: mol_type = other RNA

SEQ ID NO: 42316 - RNA, 34 nt, Synthetic Construct; identical to SEQ ID NO: 2019
  source 1..34: mol_type = other RNA

SEQ ID NO: 42317 - RNA, 33 nt, Synthetic Construct; identical to SEQ ID NO: 2126
  source 1..33: mol_type = other RNA

SEQ ID NO: 42318 - RNA, 18 nt, Synthetic Construct
  source 1..18: mol_type = other RNA
tgcgtagatatgcggagg

SEQ ID NO: 42319 - RNA, 18 nt, Synthetic Construct
  source 1..18: mol_type = other RNA
tgcgtagatatgcggagg

SEQ ID NO: 42320 - RNA, 35 nt, Synthetic Construct; identical to SEQ ID NO: 2567
  source 1..35: mol_type = other RNA

SEQ ID NO: 42321 - RNA, 35 nt, Synthetic Construct; identical to SEQ ID NO: 2567
  source 1..35: mol_type = other RNA

SEQ ID NO: 42322 - RNA, 21 nt, Synthetic Construct
  source 1..21: mol_type = other RNA
tgaggtagtaggttgtgtagt

SEQ ID NO: 42323 - RNA, 21 nt, Synthetic Construct
  source 1..21: mol_type = other RNA
tgaggtagtaggttgtgtagt

SEQ ID NO: 42324 - RNA, 22 nt, Synthetic Construct
  source 1..22: mol_type = other RNA
tggggtagtaggttgtgtggtt

SEQ ID NO: 42325 - RNA, 22 nt, Synthetic Construct
  source 1..22: mol_type = other RNA
tggggtagtaggttgtgtggtt

SEQ ID NO: 42326 - RNA, 43 nt, Synthetic Construct; identical to SEQ ID NO: 2315
  source 1..43: mol_type = other RNA

SEQ ID NO: 42327 - RNA, 43 nt, Synthetic Construct; identical to SEQ ID NO: 2315
  source 1..43: mol_type = other RNA

SEQ ID NO: 42328 - RNA, 19 nt, Synthetic Construct
  source 1..19: mol_type = other RNA
cacatgcaagtcgaacggt

SEQ ID NO: 42329 - RNA, 19 nt, Synthetic Construct
  source 1..19: mol_type = other RNA
cacatgcaagtcgaacggt

SEQ ID NO: 42330 - RNA, 23 nt, Synthetic Construct
  source 1..23: mol_type = other RNA
tggaaatacgacgtacttagtgt

SEQ ID NO: 42331 - RNA, 23 nt, Synthetic Construct
  source 1..23: mol_type = other RNA
tggaaatacgacgtacttagtgt

SEQ ID NO: 42332 - RNA, 36 nt, Synthetic Construct; identical to SEQ ID NO: 2344
  source 1..36: mol_type = other RNA

SEQ ID NO: 42333 - RNA, 36 nt, Synthetic Construct; identical to SEQ ID NO: 2344
  source 1..36: mol_type = other RNA

SEQ ID NO: 42334 - RNA, 31 nt, Synthetic Construct; identical to SEQ ID NO: 2442
  source 1..31: mol_type = other RNA

SEQ ID NO: 42335 - RNA, 31 nt, Synthetic Construct; identical to SEQ ID NO: 2442
  source 1..31: mol_type = other RNA

SEQ ID NO: 42336 - RNA, 23 nt, Synthetic Construct
  source 1..23: mol_type = other RNA
ggcagggttcgtgactggggtga

SEQ ID NO: 42337 - RNA, 22 nt, Synthetic Construct
  source 1..22: mol_type = other RNA
gcactctaatgagactgccggt

SEQ ID NO: 42338 - RNA, 22 nt, Synthetic Construct
  source 1..22: mol_type = other RNA
gcactctaatgagactgccggt

SEQ ID NO: 42339 - RNA, 15 nt, Synthetic Construct
  source 1..15: mol_type = other RNA
ggtgaaagcggggga

SEQ ID NO: 42340 - RNA, 15 nt, Synthetic Construct
  source 1..15: mol_type = other RNA
ggtgaaagcggggga

SEQ ID NO: 42341 - RNA, 23 nt, Synthetic Construct
  source 1..23: mol_type = other RNA
cgaggggcagagagcgagacttt

SEQ ID NO: 42342 - RNA, 23 nt, Synthetic Construct
  source 1..23: mol_type = other RNA
cgaggggcagagagcgagacttt

SEQ ID NO: 42343 - RNA, 23 nt, Synthetic Construct
  source 1..23: mol_type = other RNA
cgaggggcagagagcgagacttt

SEQ ID NO: 42344 - RNA, 18 nt, Synthetic Construct
  source 1..18: mol_type = other RNA
cgccgatgatagtgcgga

SEQ ID NO: 42345 - RNA, 18 nt, Synthetic Construct
  source 1..18: mol_type = other RNA
cgccgatgatagtgcgga

SEQ ID NO: 42346 - RNA, 36 nt, Synthetic Construct; identical to SEQ ID NO: 2456
  source 1..36: mol_type = other RNA

SEQ ID NO: 42347 - RNA, 36 nt, Synthetic Construct; identical to SEQ ID NO: 2456
  source 1..36: mol_type = other RNA

SEQ ID NO: 42348 - RNA, 29 nt, Synthetic Construct
  source 1..29: mol_type = other RNA
tgaaggtgggttgtgaagcctgctggagg

SEQ ID NO: 42349 - RNA, 29 nt, Synthetic Construct
  source 1..29: mol_type = other RNA
tgaaggtgggttgtgaagcctgctggagg

SEQ ID NO: 42350 - RNA, 15 nt, Synthetic Construct
  source 1..15: mol_type = other RNA
gttgaccgcctgggg

SEQ ID NO: 42351 - RNA, 15 nt, Synthetic Construct
  source 1..15: mol_type = other RNA
gttgaccgcctgggg

SEQ ID NO: 42352 - RNA, 21 nt, Synthetic Construct
  source 1..21: mol_type = other RNA
gttggttcaagcgtgtagtcg

SEQ ID NO: 42353 - RNA, 21 nt, Synthetic Construct
  source 1..21: mol_type = other RNA
gttggttcaagcgtgtagtcg

SEQ ID NO: 42354 - RNA, 25 nt, Synthetic Construct
  source 1..25: mol_type = other RNA
gggttgtaaaccgcttttgtcaggg

SEQ ID NO: 42355 - RNA, 25 nt, Synthetic Construct
  source 1..25: mol_type = other RNA
gggttgtaaaccgcttttgtcaggg

SEQ ID NO: 42356 - RNA, 32 nt, Synthetic Construct; identical to SEQ ID NO: 2582
  source 1..32: mol_type = other RNA

SEQ ID NO: 42357 - RNA, 22 nt, Synthetic Construct
  source 1..22: mol_type = other RNA
ccggtcccaagggtatggctgt

SEQ ID NO: 42358 - RNA, 31 nt, Synthetic Construct; identical to SEQ ID NO: 2507
  source 1..31: mol_type = other RNA

SEQ ID NO: 42359 - RNA, 31 nt, Synthetic Construct; identical to SEQ ID NO: 2507
  source 1..31: mol_type = other RNA

SEQ ID NO: 42360 - RNA, 15 nt, Synthetic Construct
  source 1..15: mol_type = other RNA
ggtgaaagcggggga

SEQ ID NO: 42361 - RNA, 15 nt, Synthetic Construct
  source 1..15: mol_type = other RNA
ggtgaaagcggggga

SEQ ID NO: 42362 - RNA, 16 nt, Synthetic Construct
  source 1..16: mol_type = other RNA
tgcgtagatatgcgga

SEQ ID NO: 42363 - RNA, 16 nt, Synthetic Construct
  source 1..16: mol_type = other RNA
tgcgtagatatgcgga

SEQ ID NO: 42364 - RNA, 23 nt, Synthetic Construct
  source 1..23: mol_type = other RNA
tggtaatacgacgtgcttagtgt

SEQ ID NO: 42365 - RNA, 23 nt, Synthetic Construct
  source 1..23: mol_type = other RNA
tggtaatacgacgtgcttagtgt

SEQ ID NO: 42366 - RNA, 22 nt, Synthetic Construct
  source 1..22: mol_type = other RNA
ngaggtagtagtttgtgctgtt

SEQ ID NO: 42367 - RNA, 22 nt, Synthetic Construct
  source 1..22: mol_type = other RNA
ngaggtagtagtttgtgctgtt

SEQ ID NO: 42368 - RNA, 35 nt, Synthetic Construct; identical to SEQ ID NO: 2567
  source 1..35: mol_type = other RNA

SEQ ID NO: 42369 - RNA, 35 nt, Synthetic Construct; identical to SEQ ID NO: 2567
  source 1..35: mol_type = other RNA

SEQ ID NO: 42370 - RNA, 23 nt, Synthetic Construct
  source 1..23: mol_type = other RNA
tgaggggcagagagcaagacttt

SEQ ID NO: 42371 - RNA, 23 nt, Synthetic Construct
  source 1..23: mol_type = other RNA
tgaggggcagagagcaagacttt

SEQ ID NO: 42372 - RNA, 27 nt, Synthetic Construct
  source 1..27: mol_type = other RNA
ccccccactgctaaatttgactggcct

SEQ ID NO: 42373 - RNA, 17 nt, Synthetic Construct
  source 1..17: mol_type = other RNA
gccatgccgcgtgcggg

SEQ ID NO: 42374 - RNA, 21 nt, Synthetic Construct
  source 1..21: mol_type = other RNA
tggagagtgacaatggtgttt

SEQ ID NO: 42375 - RNA, 21 nt, Synthetic Construct
  source 1..21: mol_type = other RNA
tggagagtgacaatggtgttt

SEQ ID NO: 42376 - RNA, 23 nt, Synthetic Construct
  source 1..23: mol_type = other RNA
tggtaattcgacgtacttagtgt

SEQ ID NO: 42377 - RNA, 25 nt, Synthetic Construct
  source 1..25: mol_type = other RNA
cgactcttagcggtggatcactcgg

SEQ ID NO: 42378 - RNA, 25 nt, Synthetic Construct
  source 1..25: mol_type = other RNA
cgactcttagcggtggatcactcgg

SEQ ID NO: 42379 - RNA, 21 nt, Synthetic Construct
  source 1..21: mol_type = other RNA
tgaggggcagagagcgagacc

SEQ ID NO: 42380 - RNA, 17 nt, Synthetic Construct
  source 1..17: mol_type = other RNA
gaagttgaccgcctggg

SEQ ID NO: 42381 - RNA, 17 nt, Synthetic Construct
  source 1..17: mol_type = other RNA
gaagttgaccgcctggg

SEQ ID NO: 42382 - RNA, 17 nt, Synthetic Construct
  source 1..17: mol_type = other RNA
agtccggatcgtagtct

SEQ ID NO: 42383 - RNA, 17 nt, Synthetic Construct
  source 1..17: mol_type = other RNA
agtccggatcgtagtct

SEQ ID NO: 42384 - RNA, 20 nt, Synthetic Construct
  source 1..20: mol_type = other RNA
tgaagtagtaggttgtgtgg

SEQ ID NO: 42385 - RNA, 20 nt, Synthetic Construct
  source 1..20: mol_type = other RNA
tgaagtagtaggttgtgtgg

SEQ ID NO: 42386 - RNA, 22 nt, Synthetic Construct
  source 1..22: mol_type = other RNA
tgaggtagtagtttgtggtgtt

SEQ ID NO: 42387 - RNA, 22 nt, Synthetic Construct
  source 1..22: mol_type = other RNA
tgaggtagtagtttgtggtgtt

SEQ ID NO: 42388 - RNA, 20 nt, Synthetic Construct
  source 1..20: mol_type = other RNA
tgaggaagtaggttgtgtgg

SEQ ID NO: 42389 - RNA, 20 nt, Synthetic Construct
  source 1..20: mol_type = other RNA
tgaggaagtaggttgtgtgg

SEQ ID NO: 42390 - RNA, 18 nt, Synthetic Construct
  source 1..18: mol_type = other RNA
gtaggtcatcgtcaggct

SEQ ID NO: 42391 - RNA, 18 nt, Synthetic Construct
  source 1..18: mol_type = other RNA
gtaggtcatcgtcaggct

SEQ ID NO: 42392 - RNA, 22 nt, Synthetic Construct
  source 1..22: mol_type = other RNA
ttctgtactgagctgccccgag

SEQ ID NO: 42393 - RNA, 22 nt, Synthetic Construct
  source 1..22: mol_type = other RNA
ttctgtactgagctgccccgag

SEQ ID NO: 42394 - RNA, 23 nt, Synthetic Construct
  source 1..23: mol_type = other RNA
tggtaatgcgacgtacttagtgt

SEQ ID NO: 42395 - RNA, 23 nt, Synthetic Construct
  source 1..23: mol_type = other RNA
tggtaatgcgacgtacttagtgt

SEQ ID NO: 42396 - RNA, 34 nt, Synthetic Construct; identical to SEQ ID NO: 2529
  source 1..34: mol_type = other RNA

SEQ ID NO: 42397 - RNA, 34 nt, Synthetic Construct; identical to SEQ ID NO: 2529
  source 1..34: mol_type = other RNA

SEQ ID NO: 42398 - RNA, 15 nt, Synthetic Construct
  source 1..15: mol_type = other RNA
gagagcctggacaca

SEQ ID NO: 42399 - RNA, 15 nt, Synthetic Construct
  source 1..15: mol_type = other RNA
gagagcctggacaca

SEQ ID NO: 42400 - RNA, 21 nt, Synthetic Construct
  source 1..21: mol_type = other RNA
tgaggtagtgggttgtgtggt

SEQ ID NO: 42401 - RNA, 21 nt, Synthetic Construct
  source 1..21: mol_type = other RNA
tgaggtagtgggttgtgtggt

SEQ ID NO: 42402 - RNA, 27 nt, Synthetic Construct
  source 1..27: mol_type = other RNA
agagcagctaataccgcatacgacctg

SEQ ID NO: 42403 - RNA, 27 nt, Synthetic Construct
  source 1..27: mol_type = other RNA
agagcagctaataccgcatacgacctg

SEQ ID NO: 42404 - RNA, 16 nt, Synthetic Construct
  source 1..16: mol_type = other RNA
gagctgtggatagggg

SEQ ID NO: 42405 - RNA, 16 nt, Synthetic Construct
  source 1..16: mol_type = other RNA
gagctgtggatagggg

SEQ ID NO: 42406 - RNA, 23 nt, Synthetic Construct
  source 1..23: mol_type = other RNA
tgaggggcagagagcgggacttt

SEQ ID NO: 42407 - RNA, 21 nt, Synthetic Construct
  source 1..21: mol_type = other RNA
gtagcgaaattccttgtcggg

SEQ ID NO: 42408 - RNA, 21 nt, Synthetic Construct
  source 1..21: mol_type = other RNA
gtagcgaaattccttgtcggg

SEQ ID NO: 42409 - RNA, 35 nt, Synthetic Construct; identical to SEQ ID NO: 2514
  source 1..35: mol_type = other RNA

SEQ ID NO: 42410 - RNA, 35 nt, Synthetic Construct; identical to SEQ ID NO: 2514
  source 1..35: mol_type = other RNA

SEQ ID NO: 42411 - RNA, 20 nt, Synthetic Construct
  source 1..20: mol_type = other RNA
tgaagtagtaggttgtgtgg

SEQ ID NO: 42412 - RNA, 20 nt, Synthetic Construct
  source 1..20: mol_type = other RNA
tgaagtagtaggttgtgtgg

SEQ ID NO: 42413 - RNA, 19 nt, Synthetic Construct
  source 1..19: mol_type = other RNA
cccttgtcattagttgcta

SEQ ID NO: 42414 - RNA, 19 nt, Synthetic Construct
  source 1..19: mol_type = other RNA
cccttgtcattagttgcta

SEQ ID NO: 42415 - RNA, 16 nt, Synthetic Construct
  source 1..16: mol_type = other RNA
ccgcttttgtcaggga

SEQ ID NO: 42416 - RNA, 16 nt, Synthetic Construct
  source 1..16: mol_type = other RNA
ccgcttttgtcaggga

SEQ ID NO: 42417 - RNA, 36 nt, Synthetic Construct; identical to SEQ ID NO: 2506
  source 1..36: mol_type = other RNA

SEQ ID NO: 42418 - RNA, 36 nt, Synthetic Construct; identical to SEQ ID NO: 2506
  source 1..36: mol_type = other RNA

SEQ ID NO: 42419 - RNA, 30 nt, Synthetic Construct; identical to SEQ ID NO: 751
  source 1..30: mol_type = other RNA

SEQ ID NO: 42420 - RNA, 30 nt, Synthetic Construct; identical to SEQ ID NO: 751
  source 1..30: mol_type = other RNA

SEQ ID NO: 42421 - RNA, 39 nt, Synthetic Construct; identical to SEQ ID NO: 4400
  source 1..39: mol_type = other RNA

SEQ ID NO: 42422 - RNA, 19 nt, Synthetic Construct
  source 1..19: mol_type = other RNA
cctgtctgaatatgggggg

SEQ ID NO: 42423 - RNA, 19 nt, Synthetic Construct
  source 1..19: mol_type = other RNA
cctgtctgaatatgggggg

SEQ ID NO: 42424 - RNA, 16 nt, Synthetic Construct
  source 1..16: mol_type = other RNA
cccctggacctgtact

SEQ ID NO: 42425 - RNA, 16 nt, Synthetic Construct
  source 1..16: mol_type = other RNA
cccctggacctgtact

SEQ ID NO: 42426 - RNA, 22 nt, Synthetic Construct
  source 1..22: mol_type = other RNA
tgaagtagtagtttgtgctgtt

SEQ ID NO: 42427 - RNA, 22 nt, Synthetic Construct
  source 1..22: mol_type = other RNA
tgaagtagtagtttgtgctgtt

SEQ ID NO: 42428 - RNA, 17 nt, Synthetic Construct
  source 1..17: mol_type = other RNA
agcggtggatgatgtgg

SEQ ID NO: 42429 - RNA, 17 nt, Synthetic Construct
  source 1..17: mol_type = other RNA
agcggtggatgatgtgg

SEQ ID NO: 42430 - RNA, 21 nt, Synthetic Construct
  source 1..21: mol_type = other RNA
tccttcattccaccggagtct

SEQ ID NO: 42431 - RNA, 21 nt, Synthetic Construct
  source 1..21: mol_type = other RNA
tccttcattccaccggagtct

SEQ ID NO: 42432 - RNA, 21 nt, Synthetic Construct
  source 1..21: mol_type = other RNA
ctagactgaagctccttgggg

SEQ ID NO: 42433 - RNA, 22 nt, Synthetic Construct
  source 1..22: mol_type = other RNA
ggcagggttcgtgactggggtg

SEQ ID NO: 42434 - RNA, 17 nt, Synthetic Construct
  source 1..17: mol_type = other RNA
tggccgtcgtcagctcg

SEQ ID NO: 42435 - RNA, 17 nt, Synthetic Construct
  source 1..17: mol_type = other RNA
tggccgtcgtcagctcg

SEQ ID NO: 42436 - RNA, 38 nt, Synthetic Construct; identical to SEQ ID NO: 2492
  source 1..38: mol_type = other RNA

SEQ ID NO: 42437 - RNA, 38 nt, Synthetic Construct; identical to SEQ ID NO: 2492
  source 1..38: mol_type = other RNA

SEQ ID NO: 42438 - RNA, 31 nt, Synthetic Construct; identical to SEQ ID NO: 2310
  source 1..31: mol_type = other RNA

SEQ ID NO: 42439 - RNA, 31 nt, Synthetic Construct; identical to SEQ ID NO: 2310
  source 1..31: mol_type = other RNA

SEQ ID NO: 42440 - RNA, 24 nt, Synthetic Construct
  source 1..24: mol_type = other RNA
gggttgtaaaccgcttttgtcagg

SEQ ID NO: 42441 - RNA, 24 nt, Synthetic Construct
  source 1..24: mol_type = other RNA
gggttgtaaaccgcttttgtcagg

SEQ ID NO: 42442 - RNA, 25 nt, Synthetic Construct
  source 1..25: mol_type = other RNA
cctcgcgcgattggagcggccgata

SEQ ID NO: 42443 - RNA, 25 nt, Synthetic Construct
  source 1..25: mol_type = other RNA
cctcgcgcgattggagcggccgata

SEQ ID NO: 42444 - RNA, 15 nt, Synthetic Construct
  source 1..15: mol_type = other RNA
tagagtagggcggga

SEQ ID NO: 42445 - RNA, 17 nt, Synthetic Construct
  source 1..17: mol_type = other RNA
gaagttgaccgcctggg

SEQ ID NO: 42446 - RNA, 17 nt, Synthetic Construct
  source 1..17: mol_type = other RNA
gaagttgaccgcctggg

SEQ ID NO: 42447 - RNA, 20 nt, Synthetic Construct
  source 1..20: mol_type = other RNA
caatggccgggacagagggc

SEQ ID NO: 42448 - RNA, 16 nt, Synthetic Construct
  source 1..16: mol_type = other RNA
gtccccttcgtctaga

SEQ ID NO: 42449 - RNA, 22 nt, Synthetic Construct
  source 1..22: mol_type = other RNA
cctcgcgcgattggagcggccg

SEQ ID NO: 42450 - RNA, 36 nt, Synthetic Construct; identical to SEQ ID NO: 2469
  source 1..36: mol_type = other RNA

SEQ ID NO: 42451 - RNA, 36 nt, Synthetic Construct; identical to SEQ ID NO: 2469
  source 1..36: mol_type = other RNA

SEQ ID NO: 42452 - RNA, 17 nt, Synthetic Construct
  source 1..17: mol_type = other RNA
tcgctagtaatcgcgga

SEQ ID NO: 42453 - RNA, 17 nt, Synthetic Construct
  source 1..17: mol_type = other RNA
tcgctagtaatcgcgga

SEQ ID NO: 42454 - RNA, 16 nt, Synthetic Construct
  source 1..16: mol_type = other RNA
ccgcttttgtcaggga

SEQ ID NO: 42455 - RNA, 16 nt, Synthetic Construct
  source 1..16: mol_type = other RNA
ccgcttttgtcaggga

SEQ ID NO: 42456 - RNA, 20 nt, Synthetic Construct
  source 1..20: mol_type = other RNA
tgaggcagtaggttgtgtgg

SEQ ID NO: 42457 - RNA, 20 nt, Synthetic Construct
  source 1..20: mol_type = other RNA
tgaggcagtaggttgtgtgg

SEQ ID NO: 42458 - RNA, 16 nt, Synthetic Construct
  source 1..16: mol_type = other RNA
gtctgcggccatacca

SEQ ID NO: 42459 - RNA, 23 nt, Synthetic Construct
  source 1..23: mol_type = other RNA
tgagaggcagagagcgagacttt

SEQ ID NO: 42460 - RNA, 23 nt, Synthetic Construct
  source 1..23: mol_type = other RNA
tgagaggcagagagcgagacttt

SEQ ID NO: 42461 - RNA, 33 nt, Synthetic Construct; identical to SEQ ID NO: 2386
  source 1..33: mol_type = other RNA

SEQ ID NO: 42462 - RNA, 33 nt, Synthetic Construct; identical to SEQ ID NO: 2386
  source 1..33: mol_type = other RNA

SEQ ID NO: 42463 - RNA, 18 nt, Synthetic Construct
  source 1..18: mol_type = other RNA
tcccaagggtatggctgt

SEQ ID NO: 42464 - RNA, 16 nt, Synthetic Construct
  source 1..16: mol_type = other RNA
agcaagtcgaacggta

SEQ ID NO: 42465 - RNA, 16 nt, Synthetic Construct
  source 1..16: mol_type = other RNA
agcaagtcgaacggta

SEQ ID NO: 42466 - RNA, 15 nt, Synthetic Construct
  source 1..15: mol_type = other RNA
gtcaggatgttggct

SEQ ID NO: 42467 - RNA, 15 nt, Synthetic Construct
  source 1..15: mol_type = other RNA
gtcaggatgttggct

SEQ ID NO: 42468 - RNA, 27 nt, Synthetic Construct
  source 1..27: mol_type = other RNA
ccccccactgctaaatctgactggctt

SEQ ID NO: 42469 - RNA, 34 nt, Synthetic Construct; identical to SEQ ID NO: 2186
  source 1..34: mol_type = other RNA

SEQ ID NO: 42470 - RNA, 32 nt, Synthetic Construct; identical to SEQ ID NO: 3092
  source 1..32: mol_type = other RNA

SEQ ID NO: 42471 - RNA, 36 nt, Synthetic Construct; identical to SEQ ID NO: 2546
  source 1..36: mol_type = other RNA

SEQ ID NO: 42472 - RNA, 23 nt, Synthetic Construct
  source 1..23: mol_type = other RNA
atatcggaacgtgcccagtcgtg

SEQ ID NO: 42473 - RNA, 23 nt, Synthetic Construct
  source 1..23: mol_type = other RNA
atatcggaacgtgcccagtcgtg

SEQ ID NO: 42474 - RNA, 32 nt, Synthetic Construct; identical to SEQ ID NO: 3541
  source 1..32: mol_type = other RNA

SEQ ID NO: 42475 - RNA, 32 nt, Synthetic Construct; identical to SEQ ID NO: 3541
  source 1..32: mol_type = other RNA

SEQ ID NO: 42476 - RNA, 22 nt, Synthetic Construct
  source 1..22: mol_type = other RNA
cgactcttagcggtggatcact

SEQ ID NO: 42477 - RNA, 22 nt, Synthetic Construct
  source 1..22: mol_type = other RNA
cgactcttagcggtggatcact

SEQ ID NO: 42478 - RNA, 20 nt, Synthetic Construct
  source 1..20: mol_type = other RNA
gtgccgaagctgtgggattg

SEQ ID NO: 42479 - RNA, 20 nt, Synthetic Construct
  source 1..20: mol_type = other RNA
gtgccgaagctgtgggattg

SEQ ID NO: 42480 - RNA, 26 nt, Synthetic Construct
  source 1..26: mol_type = other RNA
ggcgcttgagagaactctggagaagg

SEQ ID NO: 42481 - RNA, 26 nt, Synthetic Construct
  source 1..26: mol_type = other RNA
ggcgcttgagagaactctggagaagg

SEQ ID NO: 42482 - RNA, 18 nt, Synthetic Construct
  source 1..18: mol_type = other RNA
cgactcttagcggtggat

SEQ ID NO: 42483 - RNA, 18 nt, Synthetic Construct
  source 1..18: mol_type = other RNA
cgactcttagcggtggat

SEQ ID NO: 42484 - RNA, 21 nt, Synthetic Construct
  source 1..21: mol_type = other RNA
tgaggggcagagggcgagact

SEQ ID NO: 42485 - RNA, 21 nt, Synthetic Construct
  source 1..21: mol_type = other RNA
tgaggggcagagggcgagact

SEQ ID NO: 42486 - RNA, 20 nt, Synthetic Construct
  source 1..20: mol_type = other RNA
tgaggtagtaggttgtgtgt

SEQ ID NO: 42487 - RNA, 20 nt, Synthetic Construct
  source 1..20: mol_type = other RNA
tgaggtagtaggttgtgtgt

SEQ ID NO: 42488 - RNA, 15 nt, Synthetic Construct
  source 1..15: mol_type = other RNA
acggtcctaaggtag

SEQ ID NO: 42489 - RNA, 15 nt, Synthetic Construct
  source 1..15: mol_type = other RNA
acggtcctaaggtag

SEQ ID NO: 42490 - RNA, 27 nt, Synthetic Construct
  source 1..27: mol_type = other RNA
atagtctttgttcgattccgttgagta

SEQ ID NO: 42491 - RNA, 27 nt, Synthetic Construct
  source 1..27: mol_type = other RNA
atagtctttgttcgattccgttgagta

SEQ ID NO: 42492 - RNA, 34 nt, Synthetic Construct; identical to SEQ ID NO: 2553
  source 1..34: mol_type = other RNA

SEQ ID NO: 42493 - RNA, 34 nt, Synthetic Construct; identical to SEQ ID NO: 2553
  source 1..34: mol_type = other RNA

SEQ ID NO: 42494 - RNA, 15 nt, Synthetic Construct
  source 1..15: mol_type = other RNA
gcgtagatatgcgga

SEQ ID NO: 42495 - RNA, 15 nt, Synthetic Construct
  source 1..15: mol_type = other RNA
gcgtagatatgcgga

SEQ ID NO: 42496 - RNA, 21 nt, Synthetic Construct
  source 1..21: mol_type = other RNA
atcggaacgtgcccagtcgtg

SEQ ID NO: 42497 - RNA, 34 nt, Synthetic Construct; identical to SEQ ID NO: 2364
  source 1..34: mol_type = other RNA

SEQ ID NO: 42498 - RNA, 30 nt, Synthetic Construct; identical to SEQ ID NO: 2578
  source 1..30: mol_type = other RNA

SEQ ID NO: 42499 - RNA, 30 nt, Synthetic Construct; identical to SEQ ID NO: 2578
  source 1..30: mol_type = other RNA

SEQ ID NO: 42500 - RNA, 23 nt, Synthetic Construct
  source 1..23: mol_type = other RNA
tggtaatacggcgtacttagtgt

SEQ ID NO: 42501 - RNA, 23 nt, Synthetic Construct
  source 1..23: mol_type = other RNA
tggtaatacggcgtacttagtgt

SEQ ID NO: 42502 - RNA, 37 nt, Synthetic Construct; identical to SEQ ID NO: 2447
  source 1..37: mol_type = other RNA

SEQ ID NO: 42503 - RNA, 37 nt, Synthetic Construct; identical to SEQ ID NO: 2447
  source 1..37: mol_type = other RNA

SEQ ID NO: 42504 - RNA, 23 nt, Synthetic Construct
  source 1..23: mol_type = other RNA
tcctgtactgagccgccccgagt

SEQ ID NO: 42505 - RNA, 23 nt, Synthetic Construct
  source 1..23: mol_type = other RNA
tcctgtactgagccgccccgagt

SEQ ID NO: 42506 - RNA, 16 nt, Synthetic Construct
  source 1..16: mol_type = other RNA
tgttcggaagattttc

SEQ ID NO: 42507 - RNA, 16 nt, Synthetic Construct
  source 1..16: mol_type = other RNA
tgttcggaagattttc

SEQ ID NO: 42508 - RNA, 21 nt, Synthetic Construct
  source 1..21: mol_type = other RNA
tgaggaagtaggttgtgtggt

SEQ ID NO: 42509 - RNA, 21 nt, Synthetic Construct
  source 1..21: mol_type = other RNA
tgaggaagtaggttgtgtggt

SEQ ID NO: 42510 - RNA, 16 nt, Synthetic Construct
  source 1..16: mol_type = other RNA
cccctggacctgtact

SEQ ID NO: 42511 - RNA, 16 nt, Synthetic Construct
  source 1..16: mol_type = other RNA
cccctggacctgtact

SEQ ID NO: 42512 - RNA, 15 nt, Synthetic Construct
  source 1..15: mol_type = other RNA
ttccgaaagtagtgg

SEQ ID NO: 42513 - RNA, 15 nt, Synthetic Construct
  source 1..15: mol_type = other RNA
ttccgaaagtagtgg

SEQ ID NO: 42514 - RNA, 16 nt, Synthetic Construct
  source 1..16: mol_type = other RNA
ggtgggggtcgttggt

SEQ ID NO: 42515 - RNA, 16 nt, Synthetic Construct
  source 1..16: mol_type = other RNA
ggtgggggtcgttggt

SEQ ID NO: 42516 - RNA, 16 nt, Synthetic Construct
  source 1..16: mol_type = other RNA
ccatgccgcgtgcggg

SEQ ID NO: 42517 - RNA, 16 nt, Synthetic Construct
  source 1..16: mol_type = other RNA
ccatgccgcgtgcggg

SEQ ID NO: 42518 - RNA, 22 nt, Synthetic Construct
  source 1..22: mol_type = other RNA
tatcggaacgtgcccagtcgtg

SEQ ID NO: 42519 - RNA, 22 nt, Synthetic Construct
  source 1..22: mol_type = other RNA
tatcggaacgtgcccagtcgtg

SEQ ID NO: 42520 - RNA, 15 nt, Synthetic Construct
  source 1..15: mol_type = other RNA
tagagtagggcggga

SEQ ID NO: 42521 - RNA, 15 nt, Synthetic Construct
  source 1..15: mol_type = other RNA
tagagtagggcggga

SEQ ID NO: 42522 - RNA, 21 nt, Synthetic Construct
  source 1..21: mol_type = other RNA
tcctgcactgagctgccccga

SEQ ID NO: 42523 - RNA, 21 nt, Synthetic Construct
  source 1..21: mol_type = other RNA
tcctgcactgagctgccccga

SEQ ID NO: 42524 - RNA, 21 nt, Synthetic Construct
  source 1..21: mol_type = other RNA
tgaggtagtaggttgtgtagt

SEQ ID NO: 42525 - RNA, 19 nt, Synthetic Construct
  source 1..19: mol_type = other RNA
gcgccgatgatagtgcgga

SEQ ID NO: 42526 - RNA, 19 nt, Synthetic Construct
  source 1..19: mol_type = other RNA
gcgccgatgatagtgcgga

SEQ ID NO: 42527 - RNA, 22 nt, Synthetic Construct
  source 1..22: mol_type = other RNA
tgaggtagtaggctgtgtggtt

SEQ ID NO: 42528 - RNA, 22 nt, Synthetic Construct
  source 1..22: mol_type = other RNA
tgaggtagtaggctgtgtggtt

SEQ ID NO: 42529 - RNA, 16 nt, Synthetic Construct
  source 1..16: mol_type = other RNA
ctgacgctcatgcacg

SEQ ID NO: 42530 - RNA, 16 nt, Synthetic Construct
  source 1..16: mol_type = other RNA
ctgacgctcatgcacg

SEQ ID NO: 42531 - RNA, 23 nt, Synthetic Construct
  source 1..23: mol_type = other RNA
tcccgtactgagctgccccgaga

SEQ ID NO: 42532 - RNA, 23 nt, Synthetic Construct
  source 1..23: mol_type = other RNA
tcccgtactgagctgccccgaga

SEQ ID NO: 42533 - RNA, 30 nt, Synthetic Construct; identical to SEQ ID NO: 6467
  source 1..30: mol_type = other RNA

SEQ ID NO: 42534 - RNA, 30 nt, Synthetic Construct; identical to SEQ ID NO: 6467
  source 1..30: mol_type = other RNA

SEQ ID NO: 42535 - RNA, 22 nt, Synthetic Construct
  source 1..22: mol_type = other RNA
tatcggaacgtgcccagtcgtg

SEQ ID NO: 42536 - RNA, 22 nt, Synthetic Construct
  source 1..22: mol_type = other RNA
tatcggaacgtgcccagtcgtg

SEQ ID NO: 42537 - RNA, 29 nt, Synthetic Construct
  source 1..29: mol_type = other RNA
ccccccccactgctaaatttgactggctt

SEQ ID NO: 42538 - RNA, 29 nt, Synthetic Construct
  source 1..29: mol_type = other RNA
ccccccccactgctaaatttgactggctt

SEQ ID NO: 42539 - RNA, 16 nt, Synthetic Construct
  source 1..16: mol_type = other RNA
ggtgggggtcgttggt

SEQ ID NO: 42540 - RNA, 16 nt, Synthetic Construct
  source 1..16: mol_type = other RNA
ggtgggggtcgttggt

SEQ ID NO: 42541 - RNA, 32 nt, Synthetic Construct; identical to SEQ ID NO: 2582
  source 1..32: mol_type = other RNA

SEQ ID NO: 42542 - RNA, 32 nt, Synthetic Construct; identical to SEQ ID NO: 2582
  source 1..32: mol_type = other RNA

SEQ ID NO: 42543 - RNA, 15 nt, Synthetic Construct
  source 1..15: mol_type = other RNA
gttgaccgcctgggg

SEQ ID NO: 42544 - RNA, 20 nt, Synthetic Construct
  source 1..20: mol_type = other RNA
tgaggtggtaggttgtgtgg

SEQ ID NO: 42545 - RNA, 20 nt, Synthetic Construct
  source 1..20: mol_type = other RNA
tgaggtggtaggttgtgtgg

SEQ ID NO: 42546 - RNA, 22 nt, Synthetic Construct
  source 1..22: mol_type = other RNA
gagagcctggacacaggtgctg

SEQ ID NO: 42547 - RNA, 22 nt, Synthetic Construct
  source 1..22: mol_type = other RNA
gagagcctggacacaggtgctg

SEQ ID NO: 42548 - RNA, 31 nt, Synthetic Construct; identical to SEQ ID NO: 2293
  source 1..31: mol_type = other RNA

SEQ ID NO: 42549 - RNA, 31 nt, Synthetic Construct; identical to SEQ ID NO: 2293
  source 1..31: mol_type = other RNA

SEQ ID NO: 42550 - RNA, 22 nt, Synthetic Construct
  source 1..22: mol_type = other RNA
ctttgttcgattccgttgagta

SEQ ID NO: 42551 - RNA, 22 nt, Synthetic Construct
  source 1..22: mol_type = other RNA
ctttgttcgattccgttgagta

SEQ ID NO: 42552 - RNA, 20 nt, Synthetic Construct
  source 1..20: mol_type = other RNA
acccttgtcattagttgcta

SEQ ID NO: 42553 - RNA, 20 nt, Synthetic Construct
  source 1..20: mol_type = other RNA
acccttgtcattagttgcta

SEQ ID NO: 42554 - RNA, 17 nt, Synthetic Construct
  source 1..17: mol_type = other RNA
gtccggatcgtagtctg

SEQ ID NO: 42555 - RNA, 17 nt, Synthetic Construct
  source 1..17: mol_type = other RNA
gtccggatcgtagtctg

SEQ ID NO: 42556 - RNA, 18 nt, Synthetic Construct
  source 1..18: mol_type = other RNA
gcgccgatgatagtgcgg

SEQ ID NO: 42557 - RNA, 35 nt, Synthetic Construct; identical to SEQ ID NO: 2397
  source 1..35: mol_type = other RNA

SEQ ID NO: 42558 - RNA, 35 nt, Synthetic Construct; identical to SEQ ID NO: 2397
  source 1..35: mol_type = other RNA

SEQ ID NO: 42559 - RNA, 18 nt, Synthetic Construct
  source 1..18: mol_type = other RNA
ggtgcaagcgttaatcgg

SEQ ID NO: 42560 - RNA, 18 nt, Synthetic Construct
  source 1..18: mol_type = other RNA
ggtgcaagcgttaatcgg

SEQ ID NO: 42561 - RNA, 30 nt, Synthetic Construct; identical to SEQ ID NO: 768
  source 1..30: mol_type = other RNA

SEQ ID NO: 42562 - RNA, 30 nt, Synthetic Construct; identical to SEQ ID NO: 768
  source 1..30: mol_type = other RNA

SEQ ID NO: 42563 - RNA, 21 nt, Synthetic Construct
  source 1..21: mol_type = other RNA
tgaggggcggagagcgagact

SEQ ID NO: 42564 - RNA, 21 nt, Synthetic Construct
  source 1..21: mol_type = other RNA
tgaggggcggagagcgagact

SEQ ID NO: 42565 - RNA, 15 nt, Synthetic Construct
  source 1..15: mol_type = other RNA
gttgaccgcctgggg

SEQ ID NO: 42566 - RNA, 15 nt, Synthetic Construct
  source 1..15: mol_type = other RNA
gttgaccgcctgggg

SEQ ID NO: 42567 - RNA, 33 nt, Synthetic Construct; identical to SEQ ID NO: 2479
  source 1..33: mol_type = other RNA

SEQ ID NO: 42568 - RNA, 33 nt, Synthetic Construct; identical to SEQ ID NO: 2479
  source 1..33: mol_type = other RNA

SEQ ID NO: 42569 - RNA, 37 nt, Synthetic Construct; identical to SEQ ID NO: 2607
  source 1..37: mol_type = other RNA

SEQ ID NO: 42570 - RNA, 37 nt, Synthetic Construct; identical to SEQ ID NO: 2607
  source 1..37: mol_type = other RNA

SEQ ID NO: 42571 - RNA, 24 nt, Synthetic Construct
  source 1..24: mol_type = other RNA
tgtaaacgtccccgactggaagct

SEQ ID NO: 42572 - RNA, 22 nt, Synthetic Construct
  source 1..22: mol_type = other RNA
tgaagtagtaggttgtgtggtt

SEQ ID NO: 42573 - RNA, 22 nt, Synthetic Construct
  source 1..22: mol_type = other RNA
tgaagtagtaggttgtgtggtt

SEQ ID NO: 42574 - RNA, 18 nt, Synthetic Construct
  source 1..18: mol_type = other RNA
acagtcaggatgttggct

SEQ ID NO: 42575 - RNA, 18 nt, Synthetic Construct
  source 1..18: mol_type = other RNA
acagtcaggatgttggct

SEQ ID NO: 42576 - RNA, 23 nt, Synthetic Construct
  source 1..23: mol_type = other RNA
tggaaatacgacgtacttagtgt

SEQ ID NO: 42577 - RNA, 23 nt, Synthetic Construct
  source 1..23: mol_type = other RNA
tggaaatacgacgtacttagtgt

SEQ ID NO: 42578 - RNA, 15 nt, Synthetic Construct
  source 1..15: mol_type = other RNA
tccggatcgtagtct

SEQ ID NO: 42579 - RNA, 15 nt, Synthetic Construct
  source 1..15: mol_type = other RNA
tccggatcgtagtct

SEQ ID NO: 42580 - RNA, 23 nt, Synthetic Construct
  source 1..23: mol_type = other RNA
cgactcttagcggtggatcactc

SEQ ID NO: 42581 - RNA, 23 nt, Synthetic Construct
  source 1..23: mol_type = other RNA
cgactcttagcggtggatcactc

SEQ ID NO: 42582 - RNA, 16 nt, Synthetic Construct
  source 1..16: mol_type = other RNA
ctcagtagctcgagga

SEQ ID NO: 42583 - RNA, 16 nt, Synthetic Construct
  source 1..16: mol_type = other RNA
ctcagtagctcgagga

SEQ ID NO: 42584 - RNA, 27 nt, Synthetic Construct
  source 1..27: mol_type = other RNA
agagcagctaataccgcatacgacctg

SEQ ID NO: 42585 - RNA, 27 nt, Synthetic Construct
  source 1..27: mol_type = other RNA
agagcagctaataccgcatacgacctg

SEQ ID NO: 42586 - RNA, 31 nt, Synthetic Construct; identical to SEQ ID NO: 2427
  source 1..31: mol_type = other RNA

SEQ ID NO: 42587 - RNA, 16 nt, Synthetic Construct
  source 1..16: mol_type = other RNA
gcggtggatgatgtgg

SEQ ID NO: 42588 - RNA, 20 nt, Synthetic Construct
  source 1..20: mol_type = other RNA
tgtcagtttgtcaaataccc

SEQ ID NO: 42589 - RNA, 20 nt, Synthetic Construct
  source 1..20: mol_type = other RNA
tgtcagtttgtcaaataccc

SEQ ID NO: 42590 - RNA, 32 nt, Synthetic Construct; identical to SEQ ID NO: 3092
  source 1..32: mol_type = other RNA

SEQ ID NO: 42591 - RNA, 32 nt, Synthetic Construct; identical to SEQ ID NO: 3092
  source 1..32: mol_type = other RNA

SEQ ID NO: 42592 - RNA, 32 nt, Synthetic Construct; identical to SEQ ID NO: 2296
  source 1..32: mol_type = other RNA

SEQ ID NO: 42593 - RNA, 32 nt, Synthetic Construct; identical to SEQ ID NO: 2296
  source 1..32: mol_type = other RNA

SEQ ID NO: 42594 - RNA, 16 nt, Synthetic Construct
  source 1..16: mol_type = other RNA
cccctggacctgtact

SEQ ID NO: 42595 - RNA, 23 nt, Synthetic Construct
  source 1..23: mol_type = other RNA
tggtaacacgacgtacttagtgt

SEQ ID NO: 42596 - RNA, 23 nt, Synthetic Construct
  source 1..23: mol_type = other RNA
tggtaacacgacgtacttagtgt

SEQ ID NO: 42597 - RNA, 18 nt, Synthetic Construct
  source 1..18: mol_type = other RNA
gcgccgatgatagtgcgg

SEQ ID NO: 42598 - RNA, 18 nt, Synthetic Construct
  source 1..18: mol_type = other RNA
gcgccgatgatagtgcgg

SEQ ID NO: 42599 - RNA, 36 nt, Synthetic Construct; identical to SEQ ID NO: 2366
  source 1..36: mol_type = other RNA

SEQ ID NO: 42600 - RNA, 36 nt, Synthetic Construct; identical to SEQ ID NO: 2366
  source 1..36: mol_type = other RNA

SEQ ID NO: 42601 - RNA, 32 nt, Synthetic Construct; identical to SEQ ID NO: 2052
  source 1..32: mol_type = other RNA

SEQ ID NO: 42602 - RNA, 32 nt, Synthetic Construct; identical to SEQ ID NO: 2052
  source 1..32: mol_type = other RNA

SEQ ID NO: 42603 - RNA, 23 nt, Synthetic Construct
  source 1..23: mol_type = other RNA
tgagaggcagagagcgagacttt

SEQ ID NO: 42604 - RNA, 34 nt, Synthetic Construct; identical to SEQ ID NO: 2186
  source 1..34: mol_type = other RNA

SEQ ID NO: 42605 - RNA, 34 nt, Synthetic Construct; identical to SEQ ID NO: 2186
  source 1..34: mol_type = other RNA

SEQ ID NO: 42606 - RNA, 31 nt, Synthetic Construct; identical to SEQ ID NO: 2310
  source 1..31: mol_type = other RNA

SEQ ID NO: 42607 - RNA, 33 nt, Synthetic Construct; identical to SEQ ID NO: 2556
  source 1..33: mol_type = other RNA

SEQ ID NO: 42608 - RNA, 33 nt, Synthetic Construct; identical to SEQ ID NO: 2556
  source 1..33: mol_type = other RNA

SEQ ID NO: 42609 - RNA, 28 nt, Synthetic Construct
  source 1..28: mol_type = other RNA
ccgtgtgaaagtaggtcatcgtcaggct

SEQ ID NO: 42610 - RNA, 15 nt, Synthetic Construct
  source 1..15: mol_type = other RNA
accggaggaaggtgg

SEQ ID NO: 42611 - RNA, 15 nt, Synthetic Construct
  source 1..15: mol_type = other RNA
accggaggaaggtgg

SEQ ID NO: 42612 - RNA, 34 nt, Synthetic Construct; identical to SEQ ID NO: 2364
  source 1..34: mol_type = other RNA

SEQ ID NO: 42613 - RNA, 37 nt, Synthetic Construct; identical to SEQ ID NO: 7503
  source 1..37: mol_type = other RNA

SEQ ID NO: 42614 - RNA, 37 nt, Synthetic Construct; identical to SEQ ID NO: 7503
  source 1..37: mol_type = other RNA

SEQ ID NO: 42615 - RNA, 23 nt, Synthetic Construct
  source 1..23: mol_type = other RNA
tggaatgtaaagaagtatgtacc

SEQ ID NO: 42616 - RNA, 23 nt, Synthetic Construct
  source 1..23: mol_type = other RNA
tggaatgtaaagaagtatgtacc

SEQ ID NO: 42617 - RNA, 16 nt, Synthetic Construct
  source 1..16: mol_type = other RNA
ctcagtagctcgagga

SEQ ID NO: 42618 - RNA, 16 nt, Synthetic Construct
  source 1..16: mol_type = other RNA
ctcagtagctcgagga

SEQ ID NO: 42619 - RNA, 33 nt, Synthetic Construct; identical to SEQ ID NO: 2556
  source 1..33: mol_type = other RNA

SEQ ID NO: 42620 - RNA, 33 nt, Synthetic Construct; identical to SEQ ID NO: 2556
  source 1..33: mol_type = other RNA

SEQ ID NO: 42621 - RNA, 23 nt, Synthetic Construct
  source 1..23: mol_type = other RNA
tgaggtagtaggttgtgtggttc

SEQ ID NO: 42622 - RNA, 23 nt, Synthetic Construct
  source 1..23: mol_type = other RNA
tgaggtagtaggttgtgtggttc

SEQ ID NO: 42623 - RNA, 23 nt, Synthetic Construct
  source 1..23: mol_type = other RNA
tgaggaagtaggttgtgtggttt

SEQ ID NO: 42624 - RNA, 23 nt, Synthetic Construct
  source 1..23: mol_type = other RNA
tgaggaagtaggttgtgtggttt

SEQ ID NO: 42625 - RNA, 35 nt, Synthetic Construct; identical to SEQ ID NO: 2615
  source 1..35: mol_type = other RNA

SEQ ID NO: 42626 - RNA, 35 nt, Synthetic Construct; identical to SEQ ID NO: 2615
  source 1..35: mol_type = other RNA

SEQ ID NO: 42627 - RNA, 16 nt, Synthetic Construct
  source 1..16: mol_type = other RNA
gtcgacgtatagggtg

SEQ ID NO: 42628 - RNA, 16 nt, Synthetic Construct
  source 1..16: mol_type = other RNA
gtcgacgtatagggtg

SEQ ID NO: 42629 - RNA, 16 nt, Synthetic Construct
  source 1..16: mol_type = other RNA
gtctacggccgtacca

SEQ ID NO: 42630 - RNA, 18 nt, Synthetic Construct
  source 1..18: mol_type = other RNA
ggtgcaagcgttaatcgg

SEQ ID NO: 42631 - RNA, 18 nt, Synthetic Construct
  source 1..18: mol_type = other RNA
ggtgcaagcgttaatcgg

SEQ ID NO: 42632 - RNA, 16 nt, Synthetic Construct
  source 1..16: mol_type = other RNA
gctattgacgaccgta

SEQ ID NO: 42633 - RNA, 16 nt, Synthetic Construct
  source 1..16: mol_type = other RNA
gctattgacgaccgta

SEQ ID NO: 42634 - RNA, 31 nt, Synthetic Construct; identical to SEQ ID NO: 2507
  source 1..31: mol_type = other RNA

SEQ ID NO: 42635 - RNA, 19 nt, Synthetic Construct
  source 1..19: mol_type = other RNA
ccagtaaacggcggccgta

SEQ ID NO: 42636 - RNA, 19 nt, Synthetic Construct
  source 1..19: mol_type = other RNA
ccagtaaacggcggccgta

SEQ ID NO: 42637 - RNA, 20 nt, Synthetic Construct
  source 1..20: mol_type = other RNA
tgaggtagtaggttgtgtag

SEQ ID NO: 42638 - RNA, 20 nt, Synthetic Construct
  source 1..20: mol_type = other RNA
tgaggtagtaggttgtgtag

SEQ ID NO: 42639 - RNA, 16 nt, Synthetic Construct
  source 1..16: mol_type = other RNA
ccatgccgcgtgcggg

SEQ ID NO: 42640 - RNA, 16 nt, Synthetic Construct
  source 1..16: mol_type = other RNA
ccatgccgcgtgcggg

SEQ ID NO: 42641 - RNA, 24 nt, Synthetic Construct
  source 1..24: mol_type = other RNA
tgaggtagtaggttgtgtggtttc

SEQ ID NO: 42642 - RNA, 17 nt, Synthetic Construct
  source 1..17: mol_type = other RNA
gaagttgaccgcctggg

SEQ ID NO: 42643 - RNA, 23 nt, Synthetic Construct
  source 1..23: mol_type = other RNA
tggtaatacgacgtacctagtgt

SEQ ID NO: 42644 - RNA, 23 nt, Synthetic Construct
  source 1..23: mol_type = other RNA
tggtaatacgacgtacctagtgt

SEQ ID NO: 42645 - RNA, 31 nt, Synthetic Construct; identical to SEQ ID NO: 2215
  source 1..31: mol_type = other RNA

SEQ ID NO: 42646 - RNA, 31 nt, Synthetic Construct; identical to SEQ ID NO: 2215
  source 1..31: mol_type = other RNA

SEQ ID NO: 42647 - RNA, 23 nt, Synthetic Construct
  source 1..23: mol_type = other RNA
tgaggggcagagagcgagacttc

SEQ ID NO: 42648 - RNA, 23 nt, Synthetic Construct
  source 1..23: mol_type = other RNA
tgaggggcagagagcgagacttc

SEQ ID NO: 42649 - RNA, 16 nt, Synthetic Construct
  source 1..16: mol_type = other RNA
ctcagtagctcgagga

SEQ ID NO: 42650 - RNA, 16 nt, Synthetic Construct
  source 1..16: mol_type = other RNA
ctcagtagctcgagga

SEQ ID NO: 42651 - RNA, 19 nt, Synthetic Construct
  source 1..19: mol_type = other RNA
cgactcttagcggtggatc

SEQ ID NO: 42652 - RNA, 19 nt, Synthetic Construct
  source 1..19: mol_type = other RNA
cgactcttagcggtggatc

SEQ ID NO: 42653 - RNA, 22 nt, Synthetic Construct
  source 1..22: mol_type = other RNA
tgaggtagtaggttgtgtagtt

SEQ ID NO: 42654 - RNA, 22 nt, Synthetic Construct
  source 1..22: mol_type = other RNA
tgaggtagtaggttgtgtagtt

SEQ ID NO: 42655 - RNA, 21 nt, Synthetic Construct
  source 1..21: mol_type = other RNA
tcctgtactgggctgccccga

SEQ ID NO: 42656 - RNA, 21 nt, Synthetic Construct
  source 1..21: mol_type = other RNA
tcctgtactgggctgccccga

SEQ ID NO: 42657 - RNA, 16 nt, Synthetic Construct
  source 1..16: mol_type = other RNA
gtccccttcgtctaga

SEQ ID NO: 42658 - RNA, 16 nt, Synthetic Construct
  source 1..16: mol_type = other RNA
gtccccttcgtctaga

SEQ ID NO: 42659 - RNA, 22 nt, Synthetic Construct
  source 1..22: mol_type = other RNA
tatcggaacgtgcccagtcgtg

SEQ ID NO: 42660 - RNA, 21 nt, Synthetic Construct
  source 1..21: mol_type = other RNA
tggagagtgacaatggtgttt

SEQ ID NO: 42661 - RNA, 21 nt, Synthetic Construct
  source 1..21: mol_type = other RNA
tggagagtgacaatggtgttt

SEQ ID NO: 42662 - RNA, 22 nt, Synthetic Construct
  source 1..22: mol_type = other RNA
tgaggtagtagtttgtgctgtg

SEQ ID NO: 42663 - RNA, 36 nt, Synthetic Construct; identical to SEQ ID NO: 2366
  source 1..36: mol_type = other RNA

SEQ ID NO: 42664 - RNA, 21 nt, Synthetic Construct
  source 1..21: mol_type = other RNA
ctaatcccagaaacccggtcg

SEQ ID NO: 42665 - RNA, 21 nt, Synthetic Construct
  source 1..21: mol_type = other RNA
ctaatcccagaaacccggtcg

SEQ ID NO: 42666 - RNA, 35 nt, Synthetic Construct; identical to SEQ ID NO: 2548
  source 1..35: mol_type = other RNA

SEQ ID NO: 42667 - RNA, 22 nt, Synthetic Construct
  source 1..22: mol_type = other RNA
ttctgtactgagctgccccgag

SEQ ID NO: 42668 - RNA, 22 nt, Synthetic Construct
  source 1..22: mol_type = other RNA
ttctgtactgagctgccccgag

SEQ ID NO: 42669 - RNA, 16 nt, Synthetic Construct
  source 1..16: mol_type = other RNA
ggccgtcgtcagctcg

SEQ ID NO: 42670 - RNA, 23 nt, Synthetic Construct
  source 1..23: mol_type = other RNA
tggtaatacgatgtacttagtgt

SEQ ID NO: 42671 - RNA, 23 nt, Synthetic Construct
  source 1..23: mol_type = other RNA
tggtaatacgatgtacttagtgt

SEQ ID NO: 42672 - RNA, 16 nt, Synthetic Construct
  source 1..16: mol_type = other RNA
gagctgtggatagggg

SEQ ID NO: 42673 - RNA, 16 nt, Synthetic Construct
  source 1..16: mol_type = other RNA
gagctgtggatagggg

SEQ ID NO: 42674 - RNA, 29 nt, Synthetic Construct
  source 1..29: mol_type = other RNA
ccccccccactgctaaatttgactggctt

SEQ ID NO: 42675 - RNA, 26 nt, Synthetic Construct
  source 1..26: mol_type = other RNA
ggcgcttgagagaactctggagaagg

SEQ ID NO: 42676 - RNA, 26 nt, Synthetic Construct
  source 1..26: mol_type = other RNA
ggcgcttgagagaactctggagaagg

SEQ ID NO: 42677 - RNA, 29 nt, Synthetic Construct
  source 1..29: mol_type = other RNA
ttacaggggttcgaatcccctaggggacg

SEQ ID NO: 42678 - RNA, 29 nt, Synthetic Construct
  source 1..29: mol_type = other RNA
ttacaggggttcgaatcccctaggggacg

SEQ ID NO: 42679 - RNA, 23 nt, Synthetic Construct
  source 1..23: mol_type = other RNA
tggtaatatgacgtacttagtgt

SEQ ID NO: 42680 - RNA, 23 nt, Synthetic Construct
  source 1..23: mol_type = other RNA
tggtaatatgacgtacttagtgt

SEQ ID NO: 42681 - RNA, 21 nt, Synthetic Construct
  source 1..21: mol_type = other RNA
cgaggtagtaggttgtgtggt

SEQ ID NO: 42682 - RNA, 21 nt, Synthetic Construct
  source 1..21: mol_type = other RNA
cgaggtagtaggttgtgtggt

SEQ ID NO: 42683 - RNA, 22 nt, Synthetic Construct
  source 1..22: mol_type = other RNA
tgttggttcaagcgtgtagtcg

SEQ ID NO: 42684 - RNA, 22 nt, Synthetic Construct
  source 1..22: mol_type = other RNA
tgttggttcaagcgtgtagtcg

SEQ ID NO: 42685 - RNA, 21 nt, Synthetic Construct
  source 1..21: mol_type = other RNA
tgaggtagtagtttgtgctgc

SEQ ID NO: 42686 - RNA, 21 nt, Synthetic Construct
  source 1..21: mol_type = other RNA
tgaggtagtagtttgtgctgc

SEQ ID NO: 42687 - RNA, 33 nt, Synthetic Construct; identical to SEQ ID NO: 2266
  source 1..33: mol_type = other RNA

SEQ ID NO: 42688 - RNA, 34 nt, Synthetic Construct; identical to SEQ ID NO: 2317
  source 1..34: mol_type = other RNA

SEQ ID NO: 42689 - RNA, 23 nt, Synthetic Construct
  source 1..23: mol_type = other RNA
cggtaatacgacgtacttagtgt

SEQ ID NO: 42690 - RNA, 23 nt, Synthetic Construct
  source 1..23: mol_type = other RNA
cggtaatacgacgtacttagtgt

SEQ ID NO: 42691 - RNA, 15 nt, Synthetic Construct
  source 1..15: mol_type = other RNA
gctttgatccggaga

SEQ ID NO: 42692 - RNA, 15 nt, Synthetic Construct
  source 1..15: mol_type = other RNA
gctttgatccggaga

SEQ ID NO: 42693 - RNA, 24 nt, Synthetic Construct
  source 1..24: mol_type = other RNA
gatgaggcgtgataacgagtctgc

SEQ ID NO: 42694 - RNA, 24 nt, Synthetic Construct
  source 1..24: mol_type = other RNA
gatgaggcgtgataacgagtctgc

SEQ ID NO: 42695 - RNA, 22 nt, Synthetic Construct
  source 1..22: mol_type = other RNA
ccggtcccaagggtatggctgt

SEQ ID NO: 42696 - RNA, 22 nt, Synthetic Construct
  source 1..22: mol_type = other RNA
ccggtcccaagggtatggctgt

SEQ ID NO: 42697 - RNA, 23 nt, Synthetic Construct
  source 1..23: mol_type = other RNA
gcgtggtaggagagcgttctgta

SEQ ID NO: 42698 - RNA, 23 nt, Synthetic Construct
  source 1..23: mol_type = other RNA
tagcagcacataatggtttgtgg

SEQ ID NO: 42699 - RNA, 16 nt, Synthetic Construct
  source 1..16: mol_type = other RNA
gagctgtggatagggg

SEQ ID NO: 42700 - RNA, 16 nt, Synthetic Construct
  source 1..16: mol_type = other RNA
gagctgtggatagggg

SEQ ID NO: 42701 - RNA, 15 nt, Synthetic Construct
  source 1..15: mol_type = other RNA
catgccgcgtgcggg

SEQ ID NO: 42702 - RNA, 15 nt, Synthetic Construct
  source 1..15: mol_type = other RNA
catgccgcgtgcggg

SEQ ID NO: 42703 - RNA, 22 nt, Synthetic Construct
  source 1..22: mol_type = other RNA
cctcgcgcgattggagcggccg

SEQ ID NO: 42704 - RNA, 22 nt, Synthetic Construct
  source 1..22: mol_type = other RNA
cctcgcgcgattggagcggccg

SEQ ID NO: 42705 - RNA, 20 nt, Synthetic Construct
  source 1..20: mol_type = other RNA
cccagtaaacggcggccgta

SEQ ID NO: 42706 - RNA, 20 nt, Synthetic Construct
  source 1..20: mol_type = other RNA
cccagtaaacggcggccgta

SEQ ID NO: 42707 - RNA, 17 nt, Synthetic Construct
  source 1..17: mol_type = other RNA
gccatgccgcgtgcggg

SEQ ID NO: 42708 - RNA, 17 nt, Synthetic Construct
  source 1..17: mol_type = other RNA
gccatgccgcgtgcggg

SEQ ID NO: 42709 - RNA, 17 nt, Synthetic Construct
  source 1..17: mol_type = other RNA
gccatgccgcgtgcggg

SEQ ID NO: 42710 - RNA, 17 nt, Synthetic Construct
  source 1..17: mol_type = other RNA
gccatgccgcgtgcggg

SEQ ID NO: 42711 - RNA, 15 nt, Synthetic Construct
  source 1..15: mol_type = other RNA
cggcccagactccta

SEQ ID NO: 42712 - RNA, 15 nt, Synthetic Construct
  source 1..15: mol_type = other RNA
cggcccagactccta

SEQ ID NO: 42713 - RNA, 26 nt, Synthetic Construct
  source 1..26: mol_type = other RNA
ccccccactgctaatttgactggctt

SEQ ID NO: 42714 - RNA, 27 nt, Synthetic Construct
  source 1..27: mol_type = other RNA
agagcagctaataccgcatacgacctg

SEQ ID NO: 42715 - RNA, 27 nt, Synthetic Construct
  source 1..27: mol_type = other RNA
agagcagctaataccgcatacgacctg

SEQ ID NO: 42716 - RNA, 36 nt, Synthetic Construct; identical to SEQ ID NO: 2478
  source 1..36: mol_type = other RNA

SEQ ID NO: 42717 - RNA, 36 nt, Synthetic Construct; identical to SEQ ID NO: 2478
  source 1..36: mol_type = other RNA

SEQ ID NO: 42718 - RNA, 15 nt, Synthetic Construct
  source 1..15: mol_type = other RNA
gagctgtggataggg

SEQ ID NO: 42719 - RNA, 20 nt, Synthetic Construct
  source 1..20: mol_type = other RNA
gcgtgcttgactgcgagact

SEQ ID NO: 42720 - RNA, 20 nt, Synthetic Construct
  source 1..20: mol_type = other RNA
gcgtgcttgactgcgagact

SEQ ID NO: 42721 - RNA, 34 nt, Synthetic Construct; identical to SEQ ID NO: 2367
  source 1..34: mol_type = other RNA

SEQ ID NO: 42722 - RNA, 34 nt, Synthetic Construct; identical to SEQ ID NO: 2367
  source 1..34: mol_type = other RNA

SEQ ID NO: 42723 - RNA, 26 nt, Synthetic Construct
  source 1..26: mol_type = other RNA
gacttaccaaacctatgcaaactccg

SEQ ID NO: 42724 - RNA, 26 nt, Synthetic Construct
  source 1..26: mol_type = other RNA
gacttaccaaacctatgcaaactccg

SEQ ID NO: 42725 - RNA, 15 nt, Synthetic Construct
  source 1..15: mol_type = other RNA
ttccgaaagtagtgg

SEQ ID NO: 42726 - RNA, 15 nt, Synthetic Construct
  source 1..15: mol_type = other RNA
ttccgaaagtagtgg

SEQ ID NO: 42727 - RNA, 23 nt, Synthetic Construct
  source 1..23: mol_type = other RNA
tcctgtactgagctgccccggga

SEQ ID NO: 42728 - RNA, 23 nt, Synthetic Construct
  source 1..23: mol_type = other RNA
tcctgtactgagctgccccggga

SEQ ID NO: 42729 - RNA, 23 nt, Synthetic Construct
  source 1..23: mol_type = other RNA
tgaggggcagagagcgagacctt

SEQ ID NO: 42730 - RNA, 23 nt, Synthetic Construct
  source 1..23: mol_type = other RNA
tgaggggcagagagcgagacctt

SEQ ID NO: 42731 - RNA, 30 nt, Synthetic Construct; identical to SEQ ID NO: 1958
  source 1..30: mol_type = other RNA

SEQ ID NO: 42732 - RNA, 30 nt, Synthetic Construct; identical to SEQ ID NO: 1958
  source 1..30: mol_type = other RNA

SEQ ID NO: 42733 - RNA, 24 nt, Synthetic Construct
  source 1..24: mol_type = other RNA
cggagaaggttagctcagccaact

SEQ ID NO: 42734 - RNA, 24 nt, Synthetic Construct
  source 1..24: mol_type = other RNA
cggagaaggttagctcagccaact

SEQ ID NO: 42735 - RNA, 20 nt, Synthetic Construct
  source 1..20: mol_type = other RNA
tgagatagtaggttgtgtgg

SEQ ID NO: 42736 - RNA, 20 nt, Synthetic Construct
  source 1..20: mol_type = other RNA
tgagatagtaggttgtgtgg

SEQ ID NO: 42737 - RNA, 19 nt, Synthetic Construct
  source 1..19: mol_type = other RNA
gcgccgatgatagtgcgga

SEQ ID NO: 42738 - RNA, 19 nt, Synthetic Construct
  source 1..19: mol_type = other RNA
gcgccgatgatagtgcgga

SEQ ID NO: 42739 - RNA, 23 nt, Synthetic Construct
  source 1..23: mol_type = other RNA
tggtaatacgtcgtacttagtgt

SEQ ID NO: 42740 - RNA, 23 nt, Synthetic Construct
  source 1..23: mol_type = other RNA
tggtaatacgtcgtacttagtgt

SEQ ID NO: 42741 - RNA, 17 nt, Synthetic Construct
  source 1..17: mol_type = other RNA
gtccggatcgtagtctg

SEQ ID NO: 42742 - RNA, 20 nt, Synthetic Construct
  source 1..20: mol_type = other RNA
cgaggtagtaggttgtgtgg

SEQ ID NO: 42743 - RNA, 20 nt, Synthetic Construct
  source 1..20: mol_type = other RNA
cgaggtagtaggttgtgtgg

SEQ ID NO: 42744 - RNA, 18 nt, Synthetic Construct
  source 1..18: mol_type = other RNA
cagcactctgcaaagacg

SEQ ID NO: 42745 - RNA, 23 nt, Synthetic Construct
  source 1..23: mol_type = other RNA
tggggggcagagagcgagacttt

SEQ ID NO: 42746 - RNA, 23 nt, Synthetic Construct
  source 1..23: mol_type = other RNA
tggggggcagagagcgagacttt

SEQ ID NO: 42747 - RNA, 17 nt, Synthetic Construct
  source 1..17: mol_type = other RNA
agcggtggatgatgtgg

SEQ ID NO: 42748 - RNA, 30 nt, Synthetic Construct; identical to SEQ ID NO: 1194
  source 1..30: mol_type = other RNA

SEQ ID NO: 42749 - RNA, 30 nt, Synthetic Construct; identical to SEQ ID NO: 1194
  source 1..30: mol_type = other RNA

SEQ ID NO: 42750 - RNA, 16 nt, Synthetic Construct
  source 1..16: mol_type = other RNA
gctattgacgaccgta

SEQ ID NO: 42751 - RNA, 16 nt, Synthetic Construct
  source 1..16: mol_type = other RNA
gctattgacgaccgta

SEQ ID NO: 42752 - RNA, 21 nt, Synthetic Construct
  source 1..21: mol_type = other RNA
tgaggtagtaggttgtatggt

SEQ ID NO: 42753 - RNA, 17 nt, Synthetic Construct
  source 1..17: mol_type = other RNA
cagtcaggatgttggct

SEQ ID NO: 42754 - RNA, 17 nt, Synthetic Construct
  source 1..17: mol_type = other RNA
cagtcaggatgttggct

SEQ ID NO: 42755 - RNA, 16 nt, Synthetic Construct
  source 1..16: mol_type = other RNA
ggccgtcgtcagctcg

SEQ ID NO: 42756 - RNA, 16 nt, Synthetic Construct
  source 1..16: mol_type = other RNA
ggccgtcgtcagctcg

SEQ ID NO: 42757 - RNA, 18 nt, Synthetic Construct
  source 1..18: mol_type = other RNA
cctcgcgcgattggagcg

SEQ ID NO: 42758 - RNA, 18 nt, Synthetic Construct
  source 1..18: mol_type = other RNA
cctcgcgcgattggagcg

SEQ ID NO: 42759 - RNA, 23 nt, Synthetic Construct
  source 1..23: mol_type = other RNA
tgaggggcagagagcgagactat

SEQ ID NO: 42760 - RNA, 22 nt, Synthetic Construct
  source 1..22: mol_type = other RNA
gagagcctggacacaggtgctg

SEQ ID NO: 42761 - RNA, 22 nt, Synthetic Construct
  source 1..22: mol_type = other RNA
gagagcctggacacaggtgctg

SEQ ID NO: 42762 - RNA, 27 nt, Synthetic Construct
  source 1..27: mol_type = other RNA
ccccccactgctgaatttgactggctt

SEQ ID NO: 42763 - RNA, 21 nt, Synthetic Construct
  source 1..21: mol_type = other RNA
gctattgacgaccgtaccgca

SEQ ID NO: 42764 - RNA, 21 nt, Synthetic Construct
  source 1..21: mol_type = other RNA
gctattgacgaccgtaccgca

SEQ ID NO: 42765 - RNA, 17 nt, Synthetic Construct
  source 1..17: mol_type = other RNA
acagtcaggatgttggc

SEQ ID NO: 42766 - RNA, 17 nt, Synthetic Construct
  source 1..17: mol_type = other RNA
acagtcaggatgttggc

SEQ ID NO: 42767 - RNA, 36 nt, Synthetic Construct; identical to SEQ ID NO: 2248
  source 1..36: mol_type = other RNA

SEQ ID NO: 42768 - RNA, 36 nt, Synthetic Construct; identical to SEQ ID NO: 2248
  source 1..36: mol_type = other RNA

SEQ ID NO: 42769 - RNA, 16 nt, Synthetic Construct
  source 1..16: mol_type = other RNA
tgcaagtcgaacggta

SEQ ID NO: 42770 - RNA, 16 nt, Synthetic Construct
  source 1..16: mol_type = other RNA
tgcaagtcgaacggta

SEQ ID NO: 42771 - RNA, 18 nt, Synthetic Construct
  source 1..18: mol_type = other RNA
cctcgcgcgattggagcg

SEQ ID NO: 42772 - RNA, 18 nt, Synthetic Construct
  source 1..18: mol_type = other RNA
cctcgcgcgattggagcg

SEQ ID NO: 42773 - RNA, 34 nt, Synthetic Construct; identical to SEQ ID NO: 2183
  source 1..34: mol_type = other RNA

SEQ ID NO: 42774 - RNA, 16 nt, Synthetic Construct
  source 1..16: mol_type = other RNA
gcaagaggtcagcggt

SEQ ID NO: 42775 - RNA, 16 nt, Synthetic Construct
  source 1..16: mol_type = other RNA
gcaagaggtcagcggt

SEQ ID NO: 42776 - RNA, 20 nt, Synthetic Construct
  source 1..20: mol_type = other RNA
tgaggaagtaggttgtgtgg

SEQ ID NO: 42777 - RNA, 20 nt, Synthetic Construct
  source 1..20: mol_type = other RNA
tgaggaagtaggttgtgtgg

SEQ ID NO: 42778 - RNA, 21 nt, Synthetic Construct
  source 1..21: mol_type = other RNA
tgaggtagtaggctgtgtggt

SEQ ID NO: 42779 - RNA, 21 nt, Synthetic Construct
  source 1..21: mol_type = other RNA
tgaggtagtaggctgtgtggt

SEQ ID NO: 42780 - RNA, 22 nt, Synthetic Construct
  source 1..22: mol_type = other RNA
tgaggtagtaggttatgtggtt

SEQ ID NO: 42781 - RNA, 22 nt, Synthetic Construct
  source 1..22: mol_type = other RNA
tgaggtagtaggttatgtggtt

SEQ ID NO: 42782 - RNA, 20 nt, Synthetic Construct
  source 1..20: mol_type = other RNA
tgaggaagtaggttgtatag

SEQ ID NO: 42783 - RNA, 20 nt, Synthetic Construct
  source 1..20: mol_type = other RNA
tgaggaagtaggttgtatag

SEQ ID NO: 42784 - RNA, 35 nt, Synthetic Construct; identical to SEQ ID NO: 2269
  source 1..35: mol_type = other RNA

SEQ ID NO: 42785 - RNA, 32 nt, Synthetic Construct; identical to SEQ ID NO: 2798
  source 1..32: mol_type = other RNA

SEQ ID NO: 42786 - RNA, 26 nt, Synthetic Construct
  source 1..26: mol_type = other RNA
gatttccccttggggttgtaggacca

SEQ ID NO: 42787 - RNA, 26 nt, Synthetic Construct
  source 1..26: mol_type = other RNA
gatttccccttggggttgtaggacca

SEQ ID NO: 42788 - RNA, 16 nt, Synthetic Construct
  source 1..16: mol_type = other RNA
gatctgtagctggtct

SEQ ID NO: 42789 - RNA, 16 nt, Synthetic Construct
  source 1..16: mol_type = other RNA
gatctgtagctggtct

SEQ ID NO: 42790 - RNA, 26 nt, Synthetic Construct
  source 1..26: mol_type = other RNA
tgtcggctcatctcatcctggggctg

SEQ ID NO: 42791 - RNA, 26 nt, Synthetic Construct
  source 1..26: mol_type = other RNA
tgtcggctcatctcatcctggggctg

SEQ ID NO: 42792 - RNA, 15 nt, Synthetic Construct
  source 1..15: mol_type = other RNA
acggtcctaaggtag

SEQ ID NO: 42793 - RNA, 17 nt, Synthetic Construct
  source 1..17: mol_type = other RNA
cgcgacctcagatcaga

SEQ ID NO: 42794 - RNA, 17 nt, Synthetic Construct
  source 1..17: mol_type = other RNA
cgcgacctcagatcaga

SEQ ID NO: 42795 - RNA, 20 nt, Synthetic Construct
  source 1..20: mol_type = other RNA
ctctaatgagactgccggtg

SEQ ID NO: 42796 - RNA, 20 nt, Synthetic Construct
  source 1..20: mol_type = other RNA
ctctaatgagactgccggtg

SEQ ID NO: 42797 - RNA, 15 nt, Synthetic Construct
  source 1..15: mol_type = other RNA
ggtcatcgtcaggct

SEQ ID NO: 42798 - RNA, 15 nt, Synthetic Construct
  source 1..15: mol_type = other RNA
ggtcatcgtcaggct

SEQ ID NO: 42799 - RNA, 21 nt, Synthetic Construct
  source 1..21: mol_type = other RNA
aagaaagattgcaagaactgc

SEQ ID NO: 42800 - RNA, 21 nt, Synthetic Construct
  source 1..21: mol_type = other RNA
aagaaagattgcaagaactgc

SEQ ID NO: 42801 - RNA, 29 nt, Synthetic Construct
  source 1..29: mol_type = other RNA
gtaatggcgggaactctggacagactgcc

SEQ ID NO: 42802 - RNA, 29 nt, Synthetic Construct
  source 1..29: mol_type = other RNA
gtaatggcgggaactctggacagactgcc

SEQ ID NO: 42803 - RNA, 44 nt, Synthetic Construct; identical to SEQ ID NO: 5536
  source 1..44: mol_type = other RNA

SEQ ID NO: 42804 - RNA, 44 nt, Synthetic Construct; identical to SEQ ID NO: 5536
  source 1..44: mol_type = other RNA

SEQ ID NO: 42805 - RNA, 26 nt, Synthetic Construct
  source 1..26: mol_type = other RNA
tgtcggctcatctcatcctggggctg

SEQ ID NO: 42806 - RNA, 26 nt, Synthetic Construct
  source 1..26: mol_type = other RNA
tgtcggctcatctcatcctggggctg

SEQ ID NO: 42807 - RNA, 16 nt, Synthetic Construct
  source 1..16: mol_type = other RNA
ggcgggggtcgctggt

SEQ ID NO: 42808 - RNA, 16 nt, Synthetic Construct
  source 1..16: mol_type = other RNA
ggcgggggtcgctggt

SEQ ID NO: 42809 - RNA, 27 nt, Synthetic Construct
  source 1..27: mol_type = other RNA
ggatttccccttggggttgtaggacca

SEQ ID NO: 42810 - RNA, 27 nt, Synthetic Construct
  source 1..27: mol_type = other RNA
ggatttccccttggggttgtaggacca

SEQ ID NO: 42811 - RNA, 15 nt, Synthetic Construct
  source 1..15: mol_type = other RNA
gtcaggatgttggct

SEQ ID NO: 42812 - RNA, 15 nt, Synthetic Construct
  source 1..15: mol_type = other RNA
gtcaggatgttggct

SEQ ID NO: 42813 - RNA, 20 nt, Synthetic Construct
  source 1..20: mol_type = other RNA
ctctaatgagactgccggtg

SEQ ID NO: 42814 - RNA, 20 nt, Synthetic Construct
  source 1..20: mol_type = other RNA
ctctaatgagactgccggtg

SEQ ID NO: 42815 - RNA, 30 nt, Synthetic Construct; identical to SEQ ID NO: 1958
  source 1..30: mol_type = other RNA

SEQ ID NO: 42816 - RNA, 33 nt, Synthetic Construct; identical to SEQ ID NO: 2638
  source 1..33: mol_type = other RNA

SEQ ID NO: 42817 - RNA, 33 nt, Synthetic Construct; identical to SEQ ID NO: 2638
  source 1..33: mol_type = other RNA

SEQ ID NO: 42818 - RNA, 21 nt, Synthetic Construct
  source 1..21: mol_type = other RNA
tgaggaagtaggttgtgtggt

SEQ ID NO: 42819 - RNA, 21 nt, Synthetic Construct
  source 1..21: mol_type = other RNA
tgaggaagtaggttgtgtggt

SEQ ID NO: 42820 - RNA, 20 nt, Synthetic Construct
  source 1..20: mol_type = other RNA
gtgccgaagctgtgggattg

SEQ ID NO: 42821 - RNA, 20 nt, Synthetic Construct
  source 1..20: mol_type = other RNA
gtgccgaagctgtgggattg

SEQ ID NO: 42822 - RNA, 23 nt, Synthetic Construct
  source 1..23: mol_type = other RNA
tcctgtactgagctgccccgggt

SEQ ID NO: 42823 - RNA, 23 nt, Synthetic Construct
  source 1..23: mol_type = other RNA
tcctgtactgagctgccccgggt

SEQ ID NO: 42824 - RNA, 23 nt, Synthetic Construct
  source 1..23: mol_type = other RNA
tagtaatacgacgtacttagtgt

SEQ ID NO: 42825 - RNA, 23 nt, Synthetic Construct
  source 1..23: mol_type = other RNA
tagtaatacgacgtacttagtgt

SEQ ID NO: 42826 - RNA, 24 nt, Synthetic Construct
  source 1..24: mol_type = other RNA
cggagaaggttagctcagccaact

SEQ ID NO: 42827 - RNA, 24 nt, Synthetic Construct
  source 1..24: mol_type = other RNA
cggagaaggttagctcagccaact

SEQ ID NO: 42828 - RNA, 21 nt, Synthetic Construct
  source 1..21: mol_type = other RNA
tgaggggcagagagcgggact

SEQ ID NO: 42829 - RNA, 21 nt, Synthetic Construct
  source 1..21: mol_type = other RNA
tgaggggcagagagcgggact

SEQ ID NO: 42830 - RNA, 18 nt, Synthetic Construct
  source 1..18: mol_type = other RNA
cgcgacctcagatcagac

SEQ ID NO: 42831 - RNA, 18 nt, Synthetic Construct
  source 1..18: mol_type = other RNA
cgcgacctcagatcagac

SEQ ID NO: 42832 - RNA, 23 nt, Synthetic Construct
  source 1..23: mol_type = other RNA
tcctgtaccgagctgccccgagt

SEQ ID NO: 42833 - RNA, 23 nt, Synthetic Construct
  source 1..23: mol_type = other RNA
tcctgtaccgagctgccccgagt

SEQ ID NO: 42834 - RNA, 18 nt, Synthetic Construct
  source 1..18: mol_type = other RNA
cctcgcgcgattggagcg

SEQ ID NO: 42835 - RNA, 18 nt, Synthetic Construct
  source 1..18: mol_type = other RNA
cctcgcgcgattggagcg

SEQ ID NO: 42836 - RNA, 27 nt, Synthetic Construct
  source 1..27: mol_type = other RNA
gttggttcaagcgtgtagtcgtgctct

SEQ ID NO: 42837 - RNA, 27 nt, Synthetic Construct
  source 1..27: mol_type = other RNA
gttggttcaagcgtgtagtcgtgctct

SEQ ID NO: 42838 - RNA, 21 nt, Synthetic Construct
  source 1..21: mol_type = other RNA
taacactgtctggtaaagatg

SEQ ID NO: 42839 - RNA, 21 nt, Synthetic Construct
  source 1..21: mol_type = other RNA
taacactgtctggtaaagatg

SEQ ID NO: 42840 - RNA, 23 nt, Synthetic Construct
  source 1..23: mol_type = other RNA
tggtaatacgacgtactcagtgt

SEQ ID NO: 42841 - RNA, 23 nt, Synthetic Construct
  source 1..23: mol_type = other RNA
tggtaatacgacgtactcagtgt

SEQ ID NO: 42842 - RNA, 30 nt, Synthetic Construct; identical to SEQ ID NO: 1771
  source 1..30: mol_type = other RNA

SEQ ID NO: 42843 - RNA, 30 nt, Synthetic Construct; identical to SEQ ID NO: 1771
  source 1..30: mol_type = other RNA

SEQ ID NO: 42844 - RNA, 21 nt, Synthetic Construct
  source 1..21: mol_type = other RNA
tgaggtagtaggttgtgtgat

SEQ ID NO: 42845 - RNA, 21 nt, Synthetic Construct
  source 1..21: mol_type = other RNA
tgaggtagtaggttgtgtgat

SEQ ID NO: 42846 - RNA, 21 nt, Synthetic Construct
  source 1..21: mol_type = other RNA
gtagcgaaattccttgtcggg

SEQ ID NO: 42847 - RNA, 21 nt, Synthetic Construct
  source 1..21: mol_type = other RNA
gtagcgaaattccttgtcggg

SEQ ID NO: 42848 - RNA, 16 nt, Synthetic Construct
  source 1..16: mol_type = other RNA
gcggtggatgatgtgg

SEQ ID NO: 42849 - RNA, 16 nt, Synthetic Construct
  source 1..16: mol_type = other RNA
gcggtggatgatgtgg

SEQ ID NO: 42850 - RNA, 23 nt, Synthetic Construct
  source 1..23: mol_type = other RNA
tggaaatacgacgtacttagtgt

SEQ ID NO: 42851 - RNA, 23 nt, Synthetic Construct
  source 1..23: mol_type = other RNA
tggaaatacgacgtacttagtgt

SEQ ID NO: 42852 - RNA, 17 nt, Synthetic Construct
  source 1..17: mol_type = other RNA
gaagttgaccgcctggg

SEQ ID NO: 42853 - RNA, 17 nt, Synthetic Construct
  source 1..17: mol_type = other RNA
gaagttgaccgcctggg

SEQ ID NO: 42854 - RNA, 23 nt, Synthetic Construct
  source 1..23: mol_type = other RNA
tggtaatacgacgtacctagtgt

SEQ ID NO: 42855 - RNA, 23 nt, Synthetic Construct
  source 1..23: mol_type = other RNA
tggtaatacgacgtacctagtgt

SEQ ID NO: 42856 - RNA, 21 nt, Synthetic Construct
  source 1..21: mol_type = other RNA
tccagtactgagctgccccga

SEQ ID NO: 42857 - RNA, 21 nt, Synthetic Construct
  source 1..21: mol_type = other RNA
tccagtactgagctgccccga

SEQ ID NO: 42858 - RNA, 18 nt, Synthetic Construct
  source 1..18: mol_type = other RNA
atcgctagtaatcgcgga

SEQ ID NO: 42859 - RNA, 18 nt, Synthetic Construct
  source 1..18: mol_type = other RNA
atcgctagtaatcgcgga

SEQ ID NO: 42860 - RNA, 21 nt, Synthetic Construct
  source 1..21: mol_type = other RNA
tgaggtagtagtttgtgctgc

SEQ ID NO: 42861 - RNA, 35 nt, Synthetic Construct; identical to SEQ ID NO: 2452
  source 1..35: mol_type = other RNA

SEQ ID NO: 42862 - RNA, 35 nt, Synthetic Construct; identical to SEQ ID NO: 2452
  source 1..35: mol_type = other RNA

SEQ ID NO: 42863 - RNA, 18 nt, Synthetic Construct
  source 1..18: mol_type = other RNA
ccaaggggtcgtgggttc

SEQ ID NO: 42864 - RNA, 18 nt, Synthetic Construct
  source 1..18: mol_type = other RNA
ccaaggggtcgtgggttc

SEQ ID NO: 42865 - RNA, 21 nt, Synthetic Construct
  source 1..21: mol_type = other RNA
agcgtgcttgactgcgagact

SEQ ID NO: 42866 - RNA, 21 nt, Synthetic Construct
  source 1..21: mol_type = other RNA
agcgtgcttgactgcgagact

SEQ ID NO: 42867 - RNA, 16 nt, Synthetic Construct
  source 1..16: mol_type = other RNA
ccatgccgcgtgcggg

SEQ ID NO: 42868 - RNA, 21 nt, Synthetic Construct
  source 1..21: mol_type = other RNA
tggagagtgacaatggtgttt

SEQ ID NO: 42869 - RNA, 21 nt, Synthetic Construct
  source 1..21: mol_type = other RNA
tggagagtgacaatggtgttt

SEQ ID NO: 42870 - RNA, 15 nt, Synthetic Construct
  source 1..15: mol_type = other RNA
ggtcatcgtcaggct

SEQ ID NO: 42871 - RNA, 16 nt, Synthetic Construct
  source 1..16: mol_type = other RNA
gtccacggccatacca

SEQ ID NO: 42872 - RNA, 22 nt, Synthetic Construct
  source 1..22: mol_type = other RNA
cggaggagttcgaaggtacgct

SEQ ID NO: 42873 - RNA, 22 nt, Synthetic Construct
  source 1..22: mol_type = other RNA
cggaggagttcgaaggtacgct

SEQ ID NO: 42874 - RNA, 20 nt, Synthetic Construct
  source 1..20: mol_type = other RNA
caatggccgggacagagggc

SEQ ID NO: 42875 - RNA, 20 nt, Synthetic Construct
  source 1..20: mol_type = other RNA
caatggccgggacagagggc

SEQ ID NO: 42876 - RNA, 35 nt, Synthetic Construct; identical to SEQ ID NO: 2269
  source 1..35: mol_type = other RNA

SEQ ID NO: 42877 - RNA, 35 nt, Synthetic Construct; identical to SEQ ID NO: 2269
  source 1..35: mol_type = other RNA

SEQ ID NO: 42878 - RNA, 17 nt, Synthetic Construct
  source 1..17: mol_type = other RNA
gtcgacgtatagggtgt

SEQ ID NO: 42879 - RNA, 17 nt, Synthetic Construct
  source 1..17: mol_type = other RNA
gtcgacgtatagggtgt

SEQ ID NO: 42880 - RNA, 33 nt, Synthetic Construct; identical to SEQ ID NO: 2395
  source 1..33: mol_type = other RNA

SEQ ID NO: 42881 - RNA, 33 nt, Synthetic Construct; identical to SEQ ID NO: 2395
  source 1..33: mol_type = other RNA

SEQ ID NO: 42882 - RNA, 15 nt, Synthetic Construct
  source 1..15: mol_type = other RNA
gttgaccgcctgggg

SEQ ID NO: 42883 - RNA, 15 nt, Synthetic Construct
  source 1..15: mol_type = other RNA
gttgaccgcctgggg

SEQ ID NO: 42884 - RNA, 16 nt, Synthetic Construct
  source 1..16: mol_type = other RNA
ccggaggaaggtgggg

SEQ ID NO: 42885 - RNA, 23 nt, Synthetic Construct
  source 1..23: mol_type = other RNA
tggtgatacgacgtacttagtgt

SEQ ID NO: 42886 - RNA, 23 nt, Synthetic Construct
  source 1..23: mol_type = other RNA
tggtgatacgacgtacttagtgt

SEQ ID NO: 42887 - RNA, 23 nt, Synthetic Construct
  source 1..23: mol_type = other RNA
atatcggaacgtgcccagtcgtg

SEQ ID NO: 42888 - RNA, 23 nt, Synthetic Construct
  source 1..23: mol_type = other RNA
atatcggaacgtgcccagtcgtg

SEQ ID NO: 42889 - RNA, 20 nt, Synthetic Construct
  source 1..20: mol_type = other RNA
gaatcgctagtaatcgcgga

SEQ ID NO: 42890 - RNA, 20 nt, Synthetic Construct
  source 1..20: mol_type = other RNA
gaatcgctagtaatcgcgga

SEQ ID NO: 42891 - RNA, 17 nt, Synthetic Construct
  source 1..17: mol_type = other RNA
tcccctggacctgtact

SEQ ID NO: 42892 - RNA, 23 nt, Synthetic Construct
  source 1..23: mol_type = other RNA
tggtaatacgacgtacttggtgt

SEQ ID NO: 42893 - RNA, 23 nt, Synthetic Construct
  source 1..23: mol_type = other RNA
tggtaatacgacgtacttggtgt

SEQ ID NO: 42894 - RNA, 16 nt, Synthetic Construct
  source 1..16: mol_type = other RNA
ccaaggggtcgtgggt

SEQ ID NO: 42895 - RNA, 16 nt, Synthetic Construct
  source 1..16: mol_type = other RNA
ccaaggggtcgtgggt

SEQ ID NO: 42896 - RNA, 21 nt, Synthetic Construct
  source 1..21: mol_type = other RNA
cgcgacctcagatcagacgtg

SEQ ID NO: 42897 - RNA, 21 nt, Synthetic Construct
  source 1..21: mol_type = other RNA
cgcgacctcagatcagacgtg

SEQ ID NO: 42898 - RNA, 18 nt, Synthetic Construct
  source 1..18: mol_type = other RNA
ggccgtcgtcagctcgtg

SEQ ID NO: 42899 - RNA, 18 nt, Synthetic Construct
  source 1..18: mol_type = other RNA
ggccgtcgtcagctcgtg

SEQ ID NO: 42900 - RNA, 23 nt, Synthetic Construct
  source 1..23: mol_type = other RNA
cctcgcgcgattggagcggccga

SEQ ID NO: 42901 - RNA, 23 nt, Synthetic Construct
  source 1..23: mol_type = other RNA
cctcgcgcgattggagcggccga

SEQ ID NO: 42902 - RNA, 23 nt, Synthetic Construct
  source 1..23: mol_type = other RNA
cgcgacctcagatcagacgtggc

SEQ ID NO: 42903 - RNA, 23 nt, Synthetic Construct
  source 1..23: mol_type = other RNA
cgcgacctcagatcagacgtggc

SEQ ID NO: 42904 - RNA, 26 nt, Synthetic Construct
  source 1..26: mol_type = other RNA
gcataagcgtgcttgactgcgagact

SEQ ID NO: 42905 - RNA, 26 nt, Synthetic Construct
  source 1..26: mol_type = other RNA
gcataagcgtgcttgactgcgagact

SEQ ID NO: 42906 - RNA, 20 nt, Synthetic Construct
  source 1..20: mol_type = other RNA
cccagtaaacggcggccgta

SEQ ID NO: 42907 - RNA, 19 nt, Synthetic Construct
  source 1..19: mol_type = other RNA
ctgatcgagtcgtcctgcg

SEQ ID NO: 42908 - RNA, 19 nt, Synthetic Construct
  source 1..19: mol_type = other RNA
ctgatcgagtcgtcctgcg

SEQ ID NO: 42909 - RNA, 22 nt, Synthetic Construct
  source 1..22: mol_type = other RNA
tgaggcagtagtttgtgctgtt

SEQ ID NO: 42910 - RNA, 22 nt, Synthetic Construct
  source 1..22: mol_type = other RNA
tgaggcagtagtttgtgctgtt

SEQ ID NO: 42911 - RNA, 34 nt, Synthetic Construct; identical to SEQ ID NO: 2367
  source 1..34: mol_type = other RNA

SEQ ID NO: 42912 - RNA, 34 nt, Synthetic Construct; identical to SEQ ID NO: 2367
  source 1..34: mol_type = other RNA

SEQ ID NO: 42913 - RNA, 15 nt, Synthetic Construct
  source 1..15: mol_type = other RNA
ggtgaaagcggggga

SEQ ID NO: 42914 - RNA, 17 nt, Synthetic Construct
  source 1..17: mol_type = other RNA
accggaggaaggtgggg

SEQ ID NO: 42915 - RNA, 18 nt, Synthetic Construct
  source 1..18: mol_type = other RNA
gaagttgaccgcctgggg

SEQ ID NO: 42916 - RNA, 25 nt, Synthetic Construct
  source 1..25: mol_type = other RNA
tttccccttggggttgtaggaccac

SEQ ID NO: 42917 - RNA, 25 nt, Synthetic Construct
  source 1..25: mol_type = other RNA
tttccccttggggttgtaggaccac

SEQ ID NO: 42918 - RNA, 23 nt, Synthetic Construct
  source 1..23: mol_type = other RNA
tggcaatacgacgtacttagtgt

SEQ ID NO: 42919 - RNA, 23 nt, Synthetic Construct
  source 1..23: mol_type = other RNA
tggcaatacgacgtacttagtgt

SEQ ID NO: 42920 - RNA, 31 nt, Synthetic Construct; identical to SEQ ID NO: 2758
  source 1..31: mol_type = other RNA

SEQ ID NO: 42921 - RNA, 21 nt, Synthetic Construct
  source 1..21: mol_type = other RNA
tgaggggcggagagcgagact

SEQ ID NO: 42922 - RNA, 21 nt, Synthetic Construct
  source 1..21: mol_type = other RNA
tgaggggcggagagcgagact

SEQ ID NO: 42923 - RNA, 22 nt, Synthetic Construct
  source 1..22: mol_type = other RNA
cggaggagttcgaaggtacgct

SEQ ID NO: 42924 - RNA, 16 nt, Synthetic Construct
  source 1..16: mol_type = other RNA
ccgcttttgtcaggga

SEQ ID NO: 42925 - RNA, 16 nt, Synthetic Construct
  source 1..16: mol_type = other RNA
ccgcttttgtcaggga

SEQ ID NO: 42926 - RNA, 33 nt, Synthetic Construct; identical to SEQ ID NO: 2253
  source 1..33: mol_type = other RNA

SEQ ID NO: 42927 - RNA, 23 nt, Synthetic Construct
  source 1..23: mol_type = other RNA
tggcagtgtcttagctggttgtt

SEQ ID NO: 42928 - RNA, 22 nt, Synthetic Construct
  source 1..22: mol_type = other RNA
tgaggtagtaggttgtgcggtt

SEQ ID NO: 42929 - RNA, 22 nt, Synthetic Construct
  source 1..22: mol_type = other RNA
tgaggtagtaggttgtgcggtt

SEQ ID NO: 42930 - RNA, 23 nt, Synthetic Construct
  source 1..23: mol_type = other RNA
cggtaatacgacgtacttagtgt

SEQ ID NO: 42931 - RNA, 23 nt, Synthetic Construct
  source 1..23: mol_type = other RNA
cggtaatacgacgtacttagtgt

SEQ ID NO: 42932 - RNA, 16 nt, Synthetic Construct
  source 1..16: mol_type = other RNA
gcggtggatgatgtgg

SEQ ID NO: 42933 - RNA, 20 nt, Synthetic Construct
  source 1..20: mol_type = other RNA
tgaggtagtaggttgtatgg

SEQ ID NO: 42934 - RNA, 30 nt, Synthetic Construct; identical to SEQ ID NO: 3933
  source 1..30: mol_type = other RNA

SEQ ID NO: 42935 - RNA, 30 nt, Synthetic Construct; identical to SEQ ID NO: 3933
  source 1..30: mol_type = other RNA

SEQ ID NO: 42936 - RNA, 22 nt, Synthetic Construct
  source 1..22: mol_type = other RNA
tgttggttcaagcgtgtagtcg

SEQ ID NO: 42937 - RNA, 22 nt, Synthetic Construct
  source 1..22: mol_type = other RNA
tgttggttcaagcgtgtagtcg

SEQ ID NO: 42938 - RNA, 20 nt, Synthetic Construct
  source 1..20: mol_type = other RNA
tgaggtagtaggttgtgcgg

SEQ ID NO: 42939 - RNA, 20 nt, Synthetic Construct
  source 1..20: mol_type = other RNA
tgaggtagtaggttgtgcgg

SEQ ID NO: 42940 - RNA, 16 nt, Synthetic Construct
  source 1..16: mol_type = other RNA
agtcaggatgttggct

SEQ ID NO: 42941 - RNA, 16 nt, Synthetic Construct
  source 1..16: mol_type = other RNA
agtcaggatgttggct

SEQ ID NO: 42942 - RNA, 24 nt, Synthetic Construct
  source 1..24: mol_type = other RNA
gtctttgttcgattccgttgagta

SEQ ID NO: 42943 - RNA, 24 nt, Synthetic Construct
  source 1..24: mol_type = other RNA
gtctttgttcgattccgttgagta

SEQ ID NO: 42944 - RNA, 37 nt, Synthetic Construct; identical to SEQ ID NO: 2211
  source 1..37: mol_type = other RNA

SEQ ID NO: 42945 - RNA, 37 nt, Synthetic Construct; identical to SEQ ID NO: 2211
  source 1..37: mol_type = other RNA

SEQ ID NO: 42946 - RNA, 16 nt, Synthetic Construct
  source 1..16: mol_type = other RNA
cccctggacctgtact

SEQ ID NO: 42947 - RNA, 16 nt, Synthetic Construct
  source 1..16: mol_type = other RNA
cccctggacctgtact

SEQ ID NO: 42948 - RNA, 37 nt, Synthetic Construct; identical to SEQ ID NO: 2447
  source 1..37: mol_type = other RNA

SEQ ID NO: 42949 - RNA, 37 nt, Synthetic Construct; identical to SEQ ID NO: 2447
  source 1..37: mol_type = other RNA

SEQ ID NO: 42950 - RNA, 36 nt, Synthetic Construct; identical to SEQ ID NO: 2478
  source 1..36: mol_type = other RNA

SEQ ID NO: 42951 - RNA, 36 nt, Synthetic Construct; identical to SEQ ID NO: 2478
  source 1..36: mol_type = other RNA

SEQ ID NO: 42952 - RNA, 34 nt, Synthetic Construct; identical to SEQ ID NO: 2291
  source 1..34: mol_type = other RNA

SEQ ID NO: 42953 - RNA, 22 nt, Synthetic Construct
  source 1..22: mol_type = other RNA
tgaggaagtaggttgtgtggtt

SEQ ID NO: 42954 - RNA, 22 nt, Synthetic Construct
  source 1..22: mol_type = other RNA
tgaggaagtaggttgtgtggtt

SEQ ID NO: 42955 - RNA, 23 nt, Synthetic Construct
  source 1..23: mol_type = other RNA
tgaggggcagggagcgagacttt

SEQ ID NO: 42956 - RNA, 20 nt, Synthetic Construct
  source 1..20: mol_type = other RNA
tgaggtagcaggttgtgtgg

SEQ ID NO: 42957 - RNA, 20 nt, Synthetic Construct
  source 1..20: mol_type = other RNA
tgaggtagcaggttgtgtgg

SEQ ID NO: 42958 - RNA, 21 nt, Synthetic Construct
  source 1..21: mol_type = other RNA
ctagactgaagctccttgggg

SEQ ID NO: 42959 - RNA, 37 nt, Synthetic Construct; identical to SEQ ID NO: 2607
  source 1..37: mol_type = other RNA

SEQ ID NO: 42960 - RNA, 37 nt, Synthetic Construct; identical to SEQ ID NO: 2607
  source 1..37: mol_type = other RNA

SEQ ID NO: 42961 - RNA, 35 nt, Synthetic Construct; identical to SEQ ID NO: 3369
  source 1..35: mol_type = other RNA

SEQ ID NO: 42962 - RNA, 35 nt, Synthetic Construct; identical to SEQ ID NO: 3369
  source 1..35: mol_type = other RNA

SEQ ID NO: 42963 - RNA, 22 nt, Synthetic Construct
  source 1..22: mol_type = other RNA
tcctatactgagctgccccgag

SEQ ID NO: 42964 - RNA, 22 nt, Synthetic Construct
  source 1..22: mol_type = other RNA
tcctatactgagctgccccgag

SEQ ID NO: 42965 - RNA, 23 nt, Synthetic Construct
  source 1..23: mol_type = other RNA
tgaggggcagagggcgagacttt

SEQ ID NO: 42966 - RNA, 23 nt, Synthetic Construct
  source 1..23: mol_type = other RNA
tgaggggcagagggcgagacttt

SEQ ID NO: 42967 - RNA, 19 nt, Synthetic Construct
  source 1..19: mol_type = other RNA
cctgtctgaatatgggggg

SEQ ID NO: 42968 - RNA, 21 nt, Synthetic Construct
  source 1..21: mol_type = other RNA
gttggttcaagcgtgtagtcg

SEQ ID NO: 42969 - RNA, 21 nt, Synthetic Construct
  source 1..21: mol_type = other RNA
gttggttcaagcgtgtagtcg

SEQ ID NO: 42970 - RNA, 16 nt, Synthetic Construct
  source 1..16: mol_type = other RNA
gtctacggccgtacca

SEQ ID NO: 42971 - RNA, 16 nt, Synthetic Construct
  source 1..16: mol_type = other RNA
gtctacggccgtacca

SEQ ID NO: 42972 - RNA, 31 nt, Synthetic Construct; identical to SEQ ID NO: 758
  source 1..31: mol_type = other RNA

SEQ ID NO: 42973 - RNA, 31 nt, Synthetic Construct; identical to SEQ ID NO: 758
  source 1..31: mol_type = other RNA

SEQ ID NO: 42974 - RNA, 34 nt, Synthetic Construct; identical to SEQ ID NO: 2553
  source 1..34: mol_type = other RNA

SEQ ID NO: 42975 - RNA, 36 nt, Synthetic Construct; identical to SEQ ID NO: 2660
  source 1..36: mol_type = other RNA

SEQ ID NO: 42976 - RNA, 36 nt, Synthetic Construct; identical to SEQ ID NO: 2660
  source 1..36: mol_type = other RNA

SEQ ID NO: 42977 - RNA, 15 nt, Synthetic Construct
  source 1..15: mol_type = other RNA
atccctccgactccg

SEQ ID NO: 42978 - RNA, 15 nt, Synthetic Construct
  source 1..15: mol_type = other RNA
atccctccgactccg

SEQ ID NO: 42979 - RNA, 15 nt, Synthetic Construct
  source 1..15: mol_type = other RNA
gagagcctggacaca

SEQ ID NO: 42980 - RNA, 15 nt, Synthetic Construct
  source 1..15: mol_type = other RNA
acccttgtcattagt

SEQ ID NO: 42981 - RNA, 15 nt, Synthetic Construct
  source 1..15: mol_type = other RNA
acccttgtcattagt

SEQ ID NO: 42982 - RNA, 39 nt, Synthetic Construct; identical to SEQ ID NO: 4400
  source 1..39: mol_type = other RNA

SEQ ID NO: 42983 - RNA, 39 nt, Synthetic Construct; identical to SEQ ID NO: 4400
  source 1..39: mol_type = other RNA

SEQ ID NO: 42984 - RNA, 19 nt, Synthetic Construct
  source 1..19: mol_type = other RNA
cccttgtcattagttgcta

SEQ ID NO: 42985 - RNA, 19 nt, Synthetic Construct
  source 1..19: mol_type = other RNA
cccttgtcattagttgcta

SEQ ID NO: 42986 - RNA, 30 nt, Synthetic Construct; identical to SEQ ID NO: 1236
  source 1..30: mol_type = other RNA

SEQ ID NO: 42987 - RNA, 30 nt, Synthetic Construct; identical to SEQ ID NO: 1236
  source 1..30: mol_type = other RNA

SEQ ID NO: 42988 - RNA, 33 nt, Synthetic Construct; identical to SEQ ID NO: 2638
  source 1..33: mol_type = other RNA

SEQ ID NO: 42989 - RNA, 33 nt, Synthetic Construct; identical to SEQ ID NO: 2638
  source 1..33: mol_type = other RNA

SEQ ID NO: 42990 - RNA, 22 nt, Synthetic Construct
  source 1..22: mol_type = other RNA
tgaggtagtagtttgtgctgtc

SEQ ID NO: 42991 - RNA, 22 nt, Synthetic Construct
  source 1..22: mol_type = other RNA
tgaggtagtagtttgtgctgtc

SEQ ID NO: 42992 - RNA, 23 nt, Synthetic Construct
  source 1..23: mol_type = other RNA
cctcgcgcgattggagcggccga

SEQ ID NO: 42993 - RNA, 20 nt, Synthetic Construct
  source 1..20: mol_type = other RNA
gcgtgcttgactgcgagact

SEQ ID NO: 42994 - RNA, 20 nt, Synthetic Construct
  source 1..20: mol_type = other RNA
gcgtgcttgactgcgagact

SEQ ID NO: 42995 - RNA, 22 nt, Synthetic Construct
  source 1..22: mol_type = other RNA
tgaagtagtaggttgtgtggtt

SEQ ID NO: 42996 - RNA, 17 nt, Synthetic Construct
  source 1..17: mol_type = other RNA
gggtctgtagctcagtc

SEQ ID NO: 42997 - RNA, 17 nt, Synthetic Construct
  source 1..17: mol_type = other RNA
gggtctgtagctcagtc

SEQ ID NO: 42998 - RNA, 17 nt, Synthetic Construct
  source 1..17: mol_type = other RNA
tcccctggacctgtact

SEQ ID NO: 42999 - RNA, 17 nt, Synthetic Construct
  source 1..17: mol_type = other RNA
tcccctggacctgtact

SEQ ID NO: 43000 - RNA, 17 nt, Synthetic Construct
  source 1..17: mol_type = other RNA
tggccgtcgtcagctcg

SEQ ID NO: 43001 - RNA, 17 nt, Synthetic Construct
  source 1..17: mol_type = other RNA
tggccgtcgtcagctcg

SEQ ID NO: 43002 - RNA, 23 nt, Synthetic Construct
  source 1..23: mol_type = other RNA
tgaggggcagagagcgggacttt

SEQ ID NO: 43003 - RNA, 23 nt, Synthetic Construct
  source 1..23: mol_type = other RNA
tgaggggcagagagcgggacttt

SEQ ID NO: 43004 - RNA, 21 nt, Synthetic Construct
  source 1..21: mol_type = other RNA
gcccgtgttcggaagattttc

SEQ ID NO: 43005 - RNA, 21 nt, Synthetic Construct
  source 1..21: mol_type = other RNA
gcccgtgttcggaagattttc

SEQ ID NO: 43006 - RNA, 30 nt, Synthetic Construct; identical to SEQ ID NO: 739
  source 1..30: mol_type = other RNA

SEQ ID NO: 43007 - RNA, 16 nt, Synthetic Construct
  source 1..16: mol_type = other RNA
ctcagtagctcgagga

SEQ ID NO: 43008 - RNA, 18 nt, Synthetic Construct
  source 1..18: mol_type = other RNA
cctgaagaataagcaccg

SEQ ID NO: 43009 - RNA, 18 nt, Synthetic Construct
  source 1..18: mol_type = other RNA
cctgaagaataagcaccg

SEQ ID NO: 43010 - RNA, 37 nt, Synthetic Construct; identical to SEQ ID NO: 7503
  source 1..37: mol_type = other RNA

SEQ ID NO: 43011 - RNA, 37 nt, Synthetic Construct; identical to SEQ ID NO: 7503
  source 1..37: mol_type = other RNA

SEQ ID NO: 43012 - RNA, 17 nt, Synthetic Construct
  source 1..17: mol_type = other RNA
tggccgtcgtcagctcg

SEQ ID NO: 43013 - RNA, 17 nt, Synthetic Construct
  source 1..17: mol_type = other RNA
tggccgtcgtcagctcg

SEQ ID NO: 43014 - RNA, 17 nt, Synthetic Construct
  source 1..17: mol_type = other RNA
tcccctggacctgtact

SEQ ID NO: 43015 - RNA, 17 nt, Synthetic Construct
  source 1..17: mol_type = other RNA
tcccctggacctgtact

SEQ ID NO: 43016 - RNA, 17 nt, Synthetic Construct
  source 1..17: mol_type = other RNA
ggcccttatgggtaggg

SEQ ID NO: 43017 - RNA, 17 nt, Synthetic Construct
  source 1..17: mol_type = other RNA
ggcccttatgggtaggg

SEQ ID NO: 43018 - RNA, 32 nt, Synthetic Construct; identical to SEQ ID NO: 2086
  source 1..32: mol_type = other RNA

SEQ ID NO: 43019 - RNA, 26 nt, Synthetic Construct
  source 1..26: mol_type = other RNA
gacttaccaaacctatgcaaactccg

SEQ ID NO: 43020 - RNA, 26 nt, Synthetic Construct
  source 1..26: mol_type = other RNA
gacttaccaaacctatgcaaactccg

SEQ ID NO: 43021 - RNA, 18 nt, Synthetic Construct
  source 1..18: mol_type = other RNA
cagcactctgcaaagacg

SEQ ID NO: 43022 - RNA, 18 nt, Synthetic Construct
  source 1..18: mol_type = other RNA
cagcactctgcaaagacg

SEQ ID NO: 43023 - RNA, 16 nt, Synthetic Construct
  source 1..16: mol_type = other RNA
gatttgggagtgctcg

SEQ ID NO: 43024 - RNA, 16 nt, Synthetic Construct
  source 1..16: mol_type = other RNA
gatttgggagtgctcg

SEQ ID NO: 43025 - RNA, 16 nt, Synthetic Construct
  source 1..16: mol_type = other RNA
agcaagtcgaacggta

SEQ ID NO: 43026 - RNA, 16 nt, Synthetic Construct
  source 1..16: mol_type = other RNA
agcaagtcgaacggta

SEQ ID NO: 43027 - RNA, 23 nt, Synthetic Construct
  source 1..23: mol_type = other RNA
tgaggaagtaggttgtgtggttt

SEQ ID NO: 43028 - RNA, 23 nt, Synthetic Construct
  source 1..23: mol_type = other RNA
tgaggaagtaggttgtgtggttt

SEQ ID NO: 43029 - RNA, 34 nt, Synthetic Construct; identical to SEQ ID NO: 2265
  source 1..34: mol_type = other RNA

SEQ ID NO: 43030 - RNA, 34 nt, Synthetic Construct; identical to SEQ ID NO: 2265
  source 1..34: mol_type = other RNA

SEQ ID NO: 43031 - RNA, 23 nt, Synthetic Construct
  source 1..23: mol_type = other RNA
tgaggggcagagagcgagactct

SEQ ID NO: 43032 - RNA, 23 nt, Synthetic Construct
  source 1..23: mol_type = other RNA
tgaggggcagagagcgagactct

SEQ ID NO: 43033 - RNA, 23 nt, Synthetic Construct
  source 1..23: mol_type = other RNA
ccctgtactgagctgccccgagt

SEQ ID NO: 43034 - RNA, 23 nt, Synthetic Construct
  source 1..23: mol_type = other RNA
ccctgtactgagctgccccgagt

SEQ ID NO: 43035 - RNA, 30 nt, Synthetic Construct; identical to SEQ ID NO: 3933
  source 1..30: mol_type = other RNA

SEQ ID NO: 43036 - RNA, 30 nt, Synthetic Construct; identical to SEQ ID NO: 3933
  source 1..30: mol_type = other RNA

SEQ ID NO: 43037 - RNA, 30 nt, Synthetic Construct; identical to SEQ ID NO: 751
  source 1..30: mol_type = other RNA

SEQ ID NO: 43038 - RNA, 30 nt, Synthetic Construct; identical to SEQ ID NO: 751
  source 1..30: mol_type = other RNA

SEQ ID NO: 43039 - RNA, 17 nt, Synthetic Construct
  source 1..17: mol_type = other RNA
tggccgggacagagggc

SEQ ID NO: 43040 - RNA, 17 nt, Synthetic Construct
  source 1..17: mol_type = other RNA
tggccgggacagagggc

SEQ ID NO: 43041 - RNA, 16 nt, Synthetic Construct
  source 1..16: mol_type = other RNA
cgactcttagcggtgg

SEQ ID NO: 43042 - RNA, 16 nt, Synthetic Construct
  source 1..16: mol_type = other RNA
cgactcttagcggtgg

SEQ ID NO: 43043 - RNA, 21 nt, Synthetic Construct
  source 1..21: mol_type = other RNA
tggagtgtgacaatggtgttc

SEQ ID NO: 43044 - RNA, 21 nt, Synthetic Construct
  source 1..21: mol_type = other RNA
tggagtgtgacaatggtgttc

SEQ ID NO: 43045 - RNA, 16 nt, Synthetic Construct
  source 1..16: mol_type = other RNA
gcaagaggtcagcggt

SEQ ID NO: 43046 - RNA, 16 nt, Synthetic Construct
  source 1..16: mol_type = other RNA
gcaagaggtcagcggt

SEQ ID NO: 43047 - RNA, 21 nt, Synthetic Construct
  source 1..21: mol_type = other RNA
taatactgcctggtaatgatg

SEQ ID NO: 43048 - RNA, 21 nt, Synthetic Construct
  source 1..21: mol_type = other RNA
taatactgcctggtaatgatg

SEQ ID NO: 43049 - RNA, 19 nt, Synthetic Construct
  source 1..19: mol_type = other RNA
tggccgtcgtcagctcgtg

SEQ ID NO: 43050 - RNA, 19 nt, Synthetic Construct
  source 1..19: mol_type = other RNA
tggccgtcgtcagctcgtg

SEQ ID NO: 43051 - RNA, 23 nt, Synthetic Construct
  source 1..23: mol_type = other RNA
gcgtggtaggagagcgttctgta

SEQ ID NO: 43052 - RNA, 23 nt, Synthetic Construct
  source 1..23: mol_type = other RNA
gcgtggtaggagagcgttctgta

SEQ ID NO: 43053 - RNA, 36 nt, Synthetic Construct; identical to SEQ ID NO: 2660
  source 1..36: mol_type = other RNA

SEQ ID NO: 43054 - RNA, 36 nt, Synthetic Construct; identical to SEQ ID NO: 2660
  source 1..36: mol_type = other RNA

SEQ ID NO: 43055 - RNA, 15 nt, Synthetic Construct
  source 1..15: mol_type = other RNA
catgccgcgtgcggg

SEQ ID NO: 43056 - RNA, 15 nt, Synthetic Construct
  source 1..15: mol_type = other RNA
catgccgcgtgcggg

SEQ ID NO: 43057 - RNA, 16 nt, Synthetic Construct
  source 1..16: mol_type = other RNA
agttgaccgcctgggg

SEQ ID NO: 43058 - RNA, 16 nt, Synthetic Construct
  source 1..16: mol_type = other RNA
agttgaccgcctgggg

SEQ ID NO: 43059 - RNA, 21 nt, Synthetic Construct
  source 1..21: mol_type = other RNA
gtgggcgtttgaagtgaagtg

SEQ ID NO: 43060 - RNA, 21 nt, Synthetic Construct
  source 1..21: mol_type = other RNA
gtgggcgtttgaagtgaagtg

SEQ ID NO: 43061 - RNA, 37 nt, Synthetic Construct; identical to SEQ ID NO: 2447
  source 1..37: mol_type = other RNA

SEQ ID NO: 43062 - RNA, 37 nt, Synthetic Construct; identical to SEQ ID NO: 2447
  source 1..37: mol_type = other RNA

SEQ ID NO: 43063 - RNA, 36 nt, Synthetic Construct; identical to SEQ ID NO: 2506
  source 1..36: mol_type = other RNA

SEQ ID NO: 43064 - RNA, 21 nt, Synthetic Construct
  source 1..21: mol_type = other RNA
aagaaagattgcaagaactgc

SEQ ID NO: 43065 - RNA, 21 nt, Synthetic Construct
  source 1..21: mol_type = other RNA
aagaaagattgcaagaactgc

SEQ ID NO: 43066 - RNA, 21 nt, Synthetic Construct
  source 1..21: mol_type = other RNA
tgaggggcagagagcgagacc

SEQ ID NO: 43067 - RNA, 32 nt, Synthetic Construct; identical to SEQ ID NO: 2318
  source 1..32: mol_type = other RNA

SEQ ID NO: 43068 - RNA, 16 nt, Synthetic Construct
  source 1..16: mol_type = other RNA
ccggaggaaggtgggg

SEQ ID NO: 43069 - RNA, 22 nt, Synthetic Construct
  source 1..22: mol_type = other RNA
tgaggtagtagtttgtgctgtc

SEQ ID NO: 43070 - RNA, 22 nt, Synthetic Construct
  source 1..22: mol_type = other RNA
tgaggtagtagtttgtgctgtc

SEQ ID NO: 43071 - RNA, 28 nt, Synthetic Construct
  source 1..28: mol_type = other RNA
gctttgatccggagatttccgaatgggg

SEQ ID NO: 43072 - RNA, 34 nt, Synthetic Construct; identical to SEQ ID NO: 13733
  source 1..34: mol_type = other RNA

SEQ ID NO: 43073 - RNA, 34 nt, Synthetic Construct; identical to SEQ ID NO: 13733
  source 1..34: mol_type = other RNA

SEQ ID NO: 43074 - RNA, 23 nt, Synthetic Construct
  source 1..23: mol_type = other RNA
tggtaatacggcgtacttagtgt

SEQ ID NO: 43075 - RNA, 23 nt, Synthetic Construct
  source 1..23: mol_type = other RNA
tggtaatacggcgtacttagtgt

SEQ ID NO: 43076 - RNA, 21 nt, Synthetic Construct
  source 1..21: mol_type = other RNA
tcccagtaaacggcggccgta

SEQ ID NO: 43077 - RNA, 21 nt, Synthetic Construct
  source 1..21: mol_type = other RNA
tcccagtaaacggcggccgta

SEQ ID NO: 43078 - RNA, 15 nt, Synthetic Construct
  source 1..15: mol_type = other RNA
gtcgacgtatagggt

SEQ ID NO: 43079 - RNA, 15 nt, Synthetic Construct
  source 1..15: mol_type = other RNA
gtcgacgtatagggt

SEQ ID NO: 43080 - RNA, 17 nt, Synthetic Construct
  source 1..17: mol_type = other RNA
gccatgccgcgtgcggg

SEQ ID NO: 43081 - RNA, 17 nt, Synthetic Construct
  source 1..17: mol_type = other RNA
gccatgccgcgtgcggg

SEQ ID NO: 43082 - RNA, 32 nt, Synthetic Construct; identical to SEQ ID NO: 770
  source 1..32: mol_type = other RNA

SEQ ID NO: 43083 - RNA, 32 nt, Synthetic Construct; identical to SEQ ID NO: 770
  source 1..32: mol_type = other RNA

SEQ ID NO: 43084 - RNA, 22 nt, Synthetic Construct
  source 1..22: mol_type = other RNA
tgaggtagcaggttgtgtggtt

SEQ ID NO: 43085 - RNA, 24 nt, Synthetic Construct
  source 1..24: mol_type = other RNA
gcagctaataccgcatacgacctg

SEQ ID NO: 43086 - RNA, 24 nt, Synthetic Construct
  source 1..24: mol_type = other RNA
gcagctaataccgcatacgacctg

SEQ ID NO: 43087 - RNA, 22 nt, Synthetic Construct
  source 1..22: mol_type = other RNA
atataatacaacctgctaagtg

SEQ ID NO: 43088 - RNA, 22 nt, Synthetic Construct
  source 1..22: mol_type = other RNA
tcagtagctcgaggaaaagaca

SEQ ID NO: 43089 - RNA, 22 nt, Synthetic Construct
  source 1..22: mol_type = other RNA
tcagtagctcgaggaaaagaca

SEQ ID NO: 43090 - RNA, 19 nt, Synthetic Construct
  source 1..19: mol_type = other RNA
agtcgacgtatagggtgtg

SEQ ID NO: 43091 - RNA, 22 nt, Synthetic Construct
  source 1..22: mol_type = other RNA
tgaggtagcaggttgtgtggtt

SEQ ID NO: 43092 - RNA, 22 nt, Synthetic Construct
  source 1..22: mol_type = other RNA
tgaggtagcaggttgtgtggtt

SEQ ID NO: 43093 - RNA, 27 nt, Synthetic Construct
  source 1..27: mol_type = other RNA
ccccctactgctaaatttgactggctt

SEQ ID NO: 43094 - RNA, 33 nt, Synthetic Construct; identical to SEQ ID NO: 2479
  source 1..33: mol_type = other RNA

SEQ ID NO: 43095 - RNA, 33 nt, Synthetic Construct; identical to SEQ ID NO: 2479
  source 1..33: mol_type = other RNA

SEQ ID NO: 43096 - RNA, 23 nt, Synthetic Construct
  source 1..23: mol_type = other RNA
tgaggtggtaggttgtgtggttt

SEQ ID NO: 43097 - RNA, 23 nt, Synthetic Construct
  source 1..23: mol_type = other RNA
tgaggtggtaggttgtgtggttt

SEQ ID NO: 43098 - RNA, 17 nt, Synthetic Construct
  source 1..17: mol_type = other RNA
cgaaattccttgtcggg

SEQ ID NO: 43099 - RNA, 17 nt, Synthetic Construct
  source 1..17: mol_type = other RNA
cgaaattccttgtcggg

SEQ ID NO: 43100 - RNA, 23 nt, Synthetic Construct
  source 1..23: mol_type = other RNA
tgaggtagtaggttgtgcggttt

SEQ ID NO: 43101 - RNA, 23 nt, Synthetic Construct
  source 1..23: mol_type = other RNA
tgaggtagtaggttgtgcggttt

SEQ ID NO: 43102 - RNA, 23 nt, Synthetic Construct
  source 1..23: mol_type = other RNA
tggggggcagagagcgagacttt

SEQ ID NO: 43103 - RNA, 30 nt, Synthetic Construct; identical to SEQ ID NO: 1771
  source 1..30: mol_type = other RNA

SEQ ID NO: 43104 - RNA, 30 nt, Synthetic Construct; identical to SEQ ID NO: 1771
  source 1..30: mol_type = other RNA

SEQ ID NO: 43105 - RNA, 36 nt, Synthetic Construct; identical to SEQ ID NO: 2456
  source 1..36: mol_type = other RNA

SEQ ID NO: 43106 - RNA, 36 nt, Synthetic Construct; identical to SEQ ID NO: 2456
  source 1..36: mol_type = other RNA

SEQ ID NO: 43107 - RNA, 17 nt, Synthetic Construct
  source 1..17: mol_type = other RNA
tggccgggacagagggc

SEQ ID NO: 43108 - RNA, 17 nt, Synthetic Construct
  source 1..17: mol_type = other RNA
tggccgggacagagggc

SEQ ID NO: 43109 - RNA, 19 nt, Synthetic Construct
  source 1..19: mol_type = other RNA
tgtcaactggttgttggga

SEQ ID NO: 43110 - RNA, 32 nt, Synthetic Construct; identical to SEQ ID NO: 2086
  source 1..32: mol_type = other RNA

SEQ ID NO: 43111 - RNA, 32 nt, Synthetic Construct; identical to SEQ ID NO: 2086
  source 1..32: mol_type = other RNA

SEQ ID NO: 43112 - RNA, 21 nt, Synthetic Construct
  source 1..21: mol_type = other RNA
cggtcccaagggtatggctgt

SEQ ID NO: 43113 - RNA, 24 nt, Synthetic Construct
  source 1..24: mol_type = other RNA
cggagaaggttagctcagccaact

SEQ ID NO: 43114 - RNA, 19 nt, Synthetic Construct
  source 1..19: mol_type = other RNA
agcgaaattccttgtcggg

SEQ ID NO: 43115 - RNA, 19 nt, Synthetic Construct
  source 1..19: mol_type = other RNA
agcgaaattccttgtcggg

SEQ ID NO: 43116 - RNA, 22 nt, Synthetic Construct
  source 1..22: mol_type = other RNA
ctttgttcgattccgttgagta

SEQ ID NO: 43117 - RNA, 22 nt, Synthetic Construct
  source 1..22: mol_type = other RNA
ctttgttcgattccgttgagta

SEQ ID NO: 43118 - RNA, 33 nt, Synthetic Construct; identical to SEQ ID NO: 2209
  source 1..33: mol_type = other RNA

SEQ ID NO: 43119 - RNA, 33 nt, Synthetic Construct; identical to SEQ ID NO: 2209
  source 1..33: mol_type = other RNA

SEQ ID NO: 43120 - RNA, 20 nt, Synthetic Construct
  source 1..20: mol_type = other RNA
tcagtagctcgaggaaaaga

SEQ ID NO: 43121 - RNA, 20 nt, Synthetic Construct
  source 1..20: mol_type = other RNA
tcagtagctcgaggaaaaga

SEQ ID NO: 43122 - RNA, 20 nt, Synthetic Construct
  source 1..20: mol_type = other RNA
tagcaccatttgaaatcagt

SEQ ID NO: 43123 - RNA, 21 nt, Synthetic Construct
  source 1..21: mol_type = other RNA
gtgggcgtttgaagtgaagtg

SEQ ID NO: 43124 - RNA, 18 nt, Synthetic Construct
  source 1..18: mol_type = other RNA
tcagtagctcgaggaaaa

SEQ ID NO: 43125 - RNA, 18 nt, Synthetic Construct
  source 1..18: mol_type = other RNA
tcagtagctcgaggaaaa

SEQ ID NO: 43126 - RNA, 22 nt, Synthetic Construct
  source 1..22: mol_type = other RNA
gctcacggaaagagaatgaagc

SEQ ID NO: 43127 - RNA, 22 nt, Synthetic Construct
  source 1..22: mol_type = other RNA
gctcacggaaagagaatgaagc

SEQ ID NO: 43128 - RNA, 15 nt, Synthetic Construct
  source 1..15: mol_type = other RNA
acctgcatcgagggt

SEQ ID NO: 43129 - RNA, 15 nt, Synthetic Construct
  source 1..15: mol_type = other RNA
acctgcatcgagggt

SEQ ID NO: 43130 - RNA, 22 nt, Synthetic Construct
  source 1..22: mol_type = other RNA
tgaggtagtaggttgtatagtg

SEQ ID NO: 43131 - RNA, 20 nt, Synthetic Construct
  source 1..20: mol_type = other RNA
tgaggtagtgggttgtgtgg

SEQ ID NO: 43132 - RNA, 20 nt, Synthetic Construct
  source 1..20: mol_type = other RNA
tgaggtagtgggttgtgtgg

SEQ ID NO: 43133 - RNA, 32 nt, Synthetic Construct; identical to SEQ ID NO: 1238
  source 1..32: mol_type = other RNA

SEQ ID NO: 43134 - RNA, 32 nt, Synthetic Construct; identical to SEQ ID NO: 1238
  source 1..32: mol_type = other RNA

SEQ ID NO: 43135 - RNA, 23 nt, Synthetic Construct
  source 1..23: mol_type = other RNA
ggcagggttcgtgactggggtga

SEQ ID NO: 43136 - RNA, 20 nt, Synthetic Construct
  source 1..20: mol_type = other RNA
tggggtagtaggttgtatag

SEQ ID NO: 43137 - RNA, 20 nt, Synthetic Construct
  source 1..20: mol_type = other RNA
tggggtagtaggttgtatag

SEQ ID NO: 43138 - RNA, 18 nt, Synthetic Construct
  source 1..18: mol_type = other RNA
accggaggaaggtgggga

SEQ ID NO: 43139 - RNA, 33 nt, Synthetic Construct; identical to SEQ ID NO: 3082
  source 1..33: mol_type = other RNA

SEQ ID NO: 43140 - RNA, 25 nt, Synthetic Construct
  source 1..25: mol_type = other RNA
cctcgcgcgattggagcggccgata

SEQ ID NO: 43141 - RNA, 25 nt, Synthetic Construct
  source 1..25: mol_type = other RNA
cctcgcgcgattggagcggccgata

SEQ ID NO: 43142 - RNA, 17 nt, Synthetic Construct
  source 1..17: mol_type = other RNA
gtccggatcgtagtctg

SEQ ID NO: 43143 - RNA, 17 nt, Synthetic Construct
  source 1..17: mol_type = other RNA
gtccggatcgtagtctg

SEQ ID NO: 43144 - RNA, 15 nt, Synthetic Construct
  source 1..15: mol_type = other RNA
ccagaaacccggtcg

SEQ ID NO: 43145 - RNA, 15 nt, Synthetic Construct
  source 1..15: mol_type = other RNA
ccagaaacccggtcg

SEQ ID NO: 43146 - RNA, 23 nt, Synthetic Construct
  source 1..23: mol_type = other RNA
tagtaatacgacgtacttagtgt

SEQ ID NO: 43147 - RNA, 23 nt, Synthetic Construct
  source 1..23: mol_type = other RNA
tagtaatacgacgtacttagtgt

SEQ ID NO: 43148 - RNA, 21 nt, Synthetic Construct
  source 1..21: mol_type = other RNA
tgaggtagtaggttgtgtgat

SEQ ID NO: 43149 - RNA, 21 nt, Synthetic Construct
  source 1..21: mol_type = other RNA
tgaggtagtaggttgtgtgat

SEQ ID NO: 43150 - RNA, 21 nt, Synthetic Construct
  source 1..21: mol_type = other RNA
tccagtactgagctgccccga

SEQ ID NO: 43151 - RNA, 21 nt, Synthetic Construct
  source 1..21: mol_type = other RNA
tccagtactgagctgccccga

SEQ ID NO: 43152 - RNA, 27 nt, Synthetic Construct
  source 1..27: mol_type = other RNA
ncccccactgctaaatttgactggctt

SEQ ID NO: 43153 - RNA, 27 nt, Synthetic Construct
  source 1..27: mol_type = other RNA
ncccccactgctaaatttgactggctt

SEQ ID NO: 43154 - RNA, 23 nt, Synthetic Construct
  source 1..23: mol_type = other RNA
tcctgcactgagctgccccgaga

SEQ ID NO: 43155 - RNA, 23 nt, Synthetic Construct
  source 1..23: mol_type = other RNA
tcctgcactgagctgccccgaga

SEQ ID NO: 43156 - RNA, 26 nt, Synthetic Construct
  source 1..26: mol_type = other RNA
gatgcgtggtaggagagcgttctgta

SEQ ID NO: 43157 - RNA, 26 nt, Synthetic Construct
  source 1..26: mol_type = other RNA
gatgcgtggtaggagagcgttctgta

SEQ ID NO: 43158 - RNA, 21 nt, Synthetic Construct
  source 1..21: mol_type = other RNA
tcccagtaaacggcggccgta

SEQ ID NO: 43159 - RNA, 16 nt, Synthetic Construct
  source 1..16: mol_type = other RNA
agttgaccgcctgggg

SEQ ID NO: 43160 - RNA, 16 nt, Synthetic Construct
  source 1..16: mol_type = other RNA
agttgaccgcctgggg

SEQ ID NO: 43161 - RNA, 18 nt, Synthetic Construct
  source 1..18: mol_type = other RNA
agcagcattgtacagggc

SEQ ID NO: 43162 - RNA, 18 nt, Synthetic Construct
  source 1..18: mol_type = other RNA
agcagcattgtacagggc

SEQ ID NO: 43163 - RNA, 18 nt, Synthetic Construct
  source 1..18: mol_type = other RNA
ggccgtcgtcagctcgtg

SEQ ID NO: 43164 - RNA, 18 nt, Synthetic Construct
  source 1..18: mol_type = other RNA
ggccgtcgtcagctcgtg

SEQ ID NO: 43165 - RNA, 18 nt, Synthetic Construct
  source 1..18: mol_type = other RNA
cctcgcgcgattggagcg

SEQ ID NO: 43166 - RNA, 21 nt, Synthetic Construct
  source 1..21: mol_type = other RNA
tgaggtagtaagttgtgtggt

SEQ ID NO: 43167 - RNA, 21 nt, Synthetic Construct
  source 1..21: mol_type = other RNA
tgaggtagtaagttgtgtggt

SEQ ID NO: 43168 - RNA, 15 nt, Synthetic Construct
  source 1..15: mol_type = other RNA
cggcccagactccta

SEQ ID NO: 43169 - RNA, 15 nt, Synthetic Construct
  source 1..15: mol_type = other RNA
cggcccagactccta

SEQ ID NO: 43170 - RNA, 29 nt, Synthetic Construct
  source 1..29: mol_type = other RNA
cccgtgtgaaagtaggtcatcgtcaggct

SEQ ID NO: 43171 - RNA, 16 nt, Synthetic Construct
  source 1..16: mol_type = other RNA
gcaagaggtcagcggt

SEQ ID NO: 43172 - RNA, 16 nt, Synthetic Construct
  source 1..16: mol_type = other RNA
gcaagaggtcagcggt

SEQ ID NO: 43173 - RNA, 32 nt, Synthetic Construct; identical to SEQ ID NO: 3541
  source 1..32: mol_type = other RNA

SEQ ID NO: 43174 - RNA, 32 nt, Synthetic Construct; identical to SEQ ID NO: 3541
  source 1..32: mol_type = other RNA

SEQ ID NO: 43175 - RNA, 15 nt, Synthetic Construct
  source 1..15: mol_type = other RNA
ccagaaacccggtcg

SEQ ID NO: 43176 - RNA, 15 nt, Synthetic Construct
  source 1..15: mol_type = other RNA
ccagaaacccggtcg

SEQ ID NO: 43177 - RNA, 20 nt, Synthetic Construct
  source 1..20: mol_type = other RNA
tgaggaagtaggttgtatag

SEQ ID NO: 43178 - RNA, 20 nt, Synthetic Construct
  source 1..20: mol_type = other RNA
tgaggaagtaggttgtatag

SEQ ID NO: 43179 - RNA, 21 nt, Synthetic Construct
  source 1..21: mol_type = other RNA
gtgggcgtttgaagtgaagtg

SEQ ID NO: 43180 - RNA, 21 nt, Synthetic Construct
  source 1..21: mol_type = other RNA
gtgggcgtttgaagtgaagtg

SEQ ID NO: 43181 - RNA, 24 nt, Synthetic Construct
  source 1..24: mol_type = other RNA
tatatcggaacgtgcccagtcgtg

SEQ ID NO: 43182 - RNA, 24 nt, Synthetic Construct
  source 1..24: mol_type = other RNA
tatatcggaacgtgcccagtcgtg

SEQ ID NO: 43183 - RNA, 36 nt, Synthetic Construct; identical to SEQ ID NO: 2478
  source 1..36: mol_type = other RNA

SEQ ID NO: 43184 - RNA, 36 nt, Synthetic Construct; identical to SEQ ID NO: 2478
  source 1..36: mol_type = other RNA

SEQ ID NO: 43185 - RNA, 21 nt, Synthetic Construct
  source 1..21: mol_type = other RNA
ctagactgaagctccttgaga

SEQ ID NO: 43186 - RNA, 15 nt, Synthetic Construct
  source 1..15: mol_type = other RNA
gagtagggcgggaca

SEQ ID NO: 43187 - RNA, 20 nt, Synthetic Construct
  source 1..20: mol_type = other RNA
acccttgtcattagttgcta

SEQ ID NO: 43188 - RNA, 20 nt, Synthetic Construct
  source 1..20: mol_type = other RNA
acccttgtcattagttgcta

SEQ ID NO: 43189 - RNA, 23 nt, Synthetic Construct
  source 1..23: mol_type = other RNA
tgaggggcagagagcgagactct

SEQ ID NO: 43190 - RNA, 24 nt, Synthetic Construct
  source 1..24: mol_type = other RNA
gcagctaataccgcatacgacctg

SEQ ID NO: 43191 - RNA, 24 nt, Synthetic Construct
  source 1..24: mol_type = other RNA
gcagctaataccgcatacgacctg

SEQ ID NO: 43192 - RNA, 15 nt, Synthetic Construct
  source 1..15: mol_type = other RNA
ccagaaacccggtcg

SEQ ID NO: 43193 - RNA, 15 nt, Synthetic Construct
  source 1..15: mol_type = other RNA
ccagaaacccggtcg

SEQ ID NO: 43194 - RNA, 16 nt, Synthetic Construct
  source 1..16: mol_type = other RNA
tgcacgaaagcgtggg

SEQ ID NO: 43195 - RNA, 16 nt, Synthetic Construct
  source 1..16: mol_type = other RNA
tgcacgaaagcgtggg

SEQ ID NO: 43196 - RNA, 23 nt, Synthetic Construct
  source 1..23: mol_type = other RNA
taccctgtagaaccgaatttgtg

SEQ ID NO: 43197 - RNA, 24 nt, Synthetic Construct
  source 1..24: mol_type = other RNA
gtctttgttcgattccgttgagta

SEQ ID NO: 43198 - RNA, 24 nt, Synthetic Construct
  source 1..24: mol_type = other RNA
gtctttgttcgattccgttgagta

SEQ ID NO: 43199 - RNA, 34 nt, Synthetic Construct; identical to SEQ ID NO: 2019
  source 1..34: mol_type = other RNA

SEQ ID NO: 43200 - RNA, 23 nt, Synthetic Construct
  source 1..23: mol_type = other RNA
cctcgcgcgattggagcggccga

SEQ ID NO: 43201 - RNA, 23 nt, Synthetic Construct
  source 1..23: mol_type = other RNA
cctcgcgcgattggagcggccga

SEQ ID NO: 43202 - RNA, 21 nt, Synthetic Construct
  source 1..21: mol_type = other RNA
aagaaagattgcaagaactgc

SEQ ID NO: 43203 - RNA, 21 nt, Synthetic Construct
  source 1..21: mol_type = other RNA
aagaaagattgcaagaactgc

SEQ ID NO: 43204 - RNA, 15 nt, Synthetic Construct
  source 1..15: mol_type = other RNA
gcaagtcgagcggta

SEQ ID NO: 43205 - RNA, 15 nt, Synthetic Construct
  source 1..15: mol_type = other RNA
gcaagtcgagcggta

SEQ ID NO: 43206 - RNA, 23 nt, Synthetic Construct
  source 1..23: mol_type = other RNA
cctcgcgcgattggagcggccga

SEQ ID NO: 43207 - RNA, 23 nt, Synthetic Construct
  source 1..23: mol_type = other RNA
cctcgcgcgattggagcggccga

SEQ ID NO: 43208 - RNA, 35 nt, Synthetic Construct; identical to SEQ ID NO: 2402
  source 1..35: mol_type = other RNA

SEQ ID NO: 43209 - RNA, 35 nt, Synthetic Construct; identical to SEQ ID NO: 2402
  source 1..35: mol_type = other RNA

SEQ ID NO: 43210 - RNA, 16 nt, Synthetic Construct
  source 1..16: mol_type = other RNA
aggtcatcattatctg

SEQ ID NO: 43211 - RNA, 16 nt, Synthetic Construct
  source 1..16: mol_type = other RNA
aggtcatcattatctg

SEQ ID NO: 43212 - RNA, 28 nt, Synthetic Construct
  source 1..28: mol_type = other RNA
ggcagggttcgtgactggggtgaagtcg

SEQ ID NO: 43213 - RNA, 28 nt, Synthetic Construct
  source 1..28: mol_type = other RNA
ggcagggttcgtgactggggtgaagtcg

SEQ ID NO: 43214 - RNA, 20 nt, Synthetic Construct
  source 1..20: mol_type = other RNA
tggggtagtaggttgtgtgg

SEQ ID NO: 43215 - RNA, 20 nt, Synthetic Construct
  source 1..20: mol_type = other RNA
tggggtagtaggttgtgtgg

SEQ ID NO: 43216 - RNA, 35 nt, Synthetic Construct; identical to SEQ ID NO: 2354
  source 1..35: mol_type = other RNA

SEQ ID NO: 43217 - RNA, 32 nt, Synthetic Construct; identical to SEQ ID NO: 2798
  source 1..32: mol_type = other RNA

SEQ ID NO: 43218 - RNA, 18 nt, Synthetic Construct
  source 1..18: mol_type = other RNA
atggccgggacagagggc

SEQ ID NO: 43219 - RNA, 18 nt, Synthetic Construct
  source 1..18: mol_type = other RNA
atggccgggacagagggc

SEQ ID NO: 43220 - RNA, 22 nt, Synthetic Construct
  source 1..22: mol_type = other RNA
tcagtagctcgaggaaaagaca

SEQ ID NO: 43221 - RNA, 22 nt, Synthetic Construct
  source 1..22: mol_type = other RNA
tcagtagctcgaggaaaagaca

SEQ ID NO: 43222 - RNA, 21 nt, Synthetic Construct
  source 1..21: mol_type = other RNA
aagaaagattgcaagaactgc

SEQ ID NO: 43223 - RNA, 21 nt, Synthetic Construct
  source 1..21: mol_type = other RNA
aagaaagattgcaagaactgc

SEQ ID NO: 43224 - RNA, 31 nt, Synthetic Construct; identical to SEQ ID NO: 2278
  source 1..31: mol_type = other RNA

SEQ ID NO: 43225 - RNA, 20 nt, Synthetic Construct
  source 1..20: mol_type = other RNA
cacatgcaagtcgaacggta

SEQ ID NO: 43226 - RNA, 20 nt, Synthetic Construct
  source 1..20: mol_type = other RNA
cacatgcaagtcgaacggta

SEQ ID NO: 43227 - RNA, 24 nt, Synthetic Construct
  source 1..24: mol_type = other RNA
gcagctaataccgcatacgacctg

SEQ ID NO: 43228 - RNA, 24 nt, Synthetic Construct
  source 1..24: mol_type = other RNA
gcagctaataccgcatacgacctg

SEQ ID NO: 43229 - RNA, 18 nt, Synthetic Construct
  source 1..18: mol_type = other RNA
ccaaggggtcgtgggttc

SEQ ID NO: 43230 - RNA, 18 nt, Synthetic Construct
  source 1..18: mol_type = other RNA
ccaaggggtcgtgggttc

SEQ ID NO: 43231 - RNA, 16 nt, Synthetic Construct
  source 1..16: mol_type = other RNA
gtctacggccataccg

SEQ ID NO: 43232 - RNA, 16 nt, Synthetic Construct
  source 1..16: mol_type = other RNA
gtctacggccataccg

SEQ ID NO: 43233 - RNA, 21 nt, Synthetic Construct
  source 1..21: mol_type = other RNA
ggaggagttcgaaggtacgct

SEQ ID NO: 43234 - RNA, 21 nt, Synthetic Construct
  source 1..21: mol_type = other RNA
ggaggagttcgaaggtacgct

SEQ ID NO: 43235 - RNA, 25 nt, Synthetic Construct
  source 1..25: mol_type = other RNA
ctgaggatatgagatcgagacgaca

SEQ ID NO: 43236 - RNA, 25 nt, Synthetic Construct
  source 1..25: mol_type = other RNA
ctgaggatatgagatcgagacgaca

SEQ ID NO: 43237 - RNA, 22 nt, Synthetic Construct
  source 1..22: mol_type = other RNA
tgaggtagcaggttgtgtggtt

SEQ ID NO: 43238 - RNA, 22 nt, Synthetic Construct
  source 1..22: mol_type = other RNA
tgaggtagcaggttgtgtggtt

SEQ ID NO: 43239 - RNA, 16 nt, Synthetic Construct
  source 1..16: mol_type = other RNA
aggtcatcgtcaggct

SEQ ID NO: 43240 - RNA, 16 nt, Synthetic Construct
  source 1..16: mol_type = other RNA
aggtcatcgtcaggct

SEQ ID NO: 43241 - RNA, 33 nt, Synthetic Construct; identical to SEQ ID NO: 3082
  source 1..33: mol_type = other RNA

SEQ ID NO: 43242 - RNA, 33 nt, Synthetic Construct; identical to SEQ ID NO: 3082
  source 1..33: mol_type = other RNA

SEQ ID NO: 43243 - RNA, 21 nt, Synthetic Construct
  source 1..21: mol_type = other RNA
atcacattgccagggatttcc

SEQ ID NO: 43244 - RNA, 21 nt, Synthetic Construct
  source 1..21: mol_type = other RNA
agccatcatttaaagaaagcg

SEQ ID NO: 43245 - RNA, 21 nt, Synthetic Construct
  source 1..21: mol_type = other RNA
agccatcatttaaagaaagcg

SEQ ID NO: 43246 - RNA, 18 nt, Synthetic Construct
  source 1..18: mol_type = other RNA
tcagtagctcgaggaaaa

SEQ ID NO: 43247 - RNA, 18 nt, Synthetic Construct
  source 1..18: mol_type = other RNA
tcagtagctcgaggaaaa

SEQ ID NO: 43248 - RNA, 35 nt, Synthetic Construct; identical to SEQ ID NO: 2548
  source 1..35: mol_type = other RNA

SEQ ID NO: 43249 - RNA, 20 nt, Synthetic Construct
  source 1..20: mol_type = other RNA
tgaggtagtaggtcgtgtgg

SEQ ID NO: 43250 - RNA, 20 nt, Synthetic Construct
  source 1..20: mol_type = other RNA
tgaggtagtaggtcgtgtgg

SEQ ID NO: 43251 - RNA, 15 nt, Synthetic Construct
  source 1..15: mol_type = other RNA
ggtgaaagcggggga

SEQ ID NO: 43252 - RNA, 15 nt, Synthetic Construct
  source 1..15: mol_type = other RNA
ggtgaaagcggggga

SEQ ID NO: 43253 - RNA, 19 nt, Synthetic Construct
  source 1..19: mol_type = other RNA
cctgtctgaatatgggggg

SEQ ID NO: 43254 - RNA, 19 nt, Synthetic Construct
  source 1..19: mol_type = other RNA
cctgtctgaatatgggggg

SEQ ID NO: 43255 - RNA, 18 nt, Synthetic Construct
  source 1..18: mol_type = other RNA
cgccgatgatagtgcgga

SEQ ID NO: 43256 - RNA, 23 nt, Synthetic Construct
  source 1..23: mol_type = other RNA
taacactgtctggtaacgatgtt

SEQ ID NO: 43257 - RNA, 23 nt, Synthetic Construct
  source 1..23: mol_type = other RNA
taacactgtctggtaacgatgtt

SEQ ID NO: 43258 - RNA, 18 nt, Synthetic Construct
  source 1..18: mol_type = other RNA
gcgaaattccttgtcggg

SEQ ID NO: 43259 - RNA, 23 nt, Synthetic Construct
  source 1..23: mol_type = other RNA
tgaggggtagagagcgagacttt

SEQ ID NO: 43260 - RNA, 23 nt, Synthetic Construct
  source 1..23: mol_type = other RNA
tggtaatacgacgtacttagtat

SEQ ID NO: 43261 - RNA, 23 nt, Synthetic Construct
  source 1..23: mol_type = other RNA
tggtaatacgacgtacttagtat

SEQ ID NO: 43262 - RNA, 21 nt, Synthetic Construct
  source 1..21: mol_type = other RNA
gtagtgtttcctactttatgg

SEQ ID NO: 43263 - RNA, 21 nt, Synthetic Construct
  source 1..21: mol_type = other RNA
tgaggtagtaggttgtatagc

SEQ ID NO: 43264 - RNA, 23 nt, Synthetic Construct
  source 1..23: mol_type = other RNA
tggtaatacgacatacttagtgt

SEQ ID NO: 43265 - RNA, 23 nt, Synthetic Construct
  source 1..23: mol_type = other RNA
tggtaatacgacatacttagtgt

SEQ ID NO: 43266 - RNA, 20 nt, Synthetic Construct
  source 1..20: mol_type = other RNA
ccgcagagtacagcttggga

SEQ ID NO: 43267 - RNA, 20 nt, Synthetic Construct
  source 1..20: mol_type = other RNA
ccgcagagtacagcttggga

SEQ ID NO: 43268 - RNA, 19 nt, Synthetic Construct
  source 1..19: mol_type = other RNA
cctgtaccgatcaatagtg

SEQ ID NO: 43269 - RNA, 19 nt, Synthetic Construct
  source 1..19: mol_type = other RNA
cctgtaccgatcaatagtg

SEQ ID NO: 43270 - RNA, 19 nt, Synthetic Construct
  source 1..19: mol_type = other RNA
ctgatcgagtcgtcctgcg

SEQ ID NO: 43271 - RNA, 16 nt, Synthetic Construct
  source 1..16: mol_type = other RNA
gggtctgtagctcagt

SEQ ID NO: 43272 - RNA, 16 nt, Synthetic Construct
  source 1..16: mol_type = other RNA
gggtctgtagctcagt

SEQ ID NO: 43273 - RNA, 20 nt, Synthetic Construct
  source 1..20: mol_type = other RNA
gaatcgctagtaatcgcgga

SEQ ID NO: 43274 - RNA, 20 nt, Synthetic Construct
  source 1..20: mol_type = other RNA
gaatcgctagtaatcgcgga

SEQ ID NO: 43275 - RNA, 19 nt, Synthetic Construct
  source 1..19: mol_type = other RNA
agtcgacgtatagggtgtg

SEQ ID NO: 43276 - RNA, 19 nt, Synthetic Construct
  source 1..19: mol_type = other RNA
agtcgacgtatagggtgtg

SEQ ID NO: 43277 - RNA, 20 nt, Synthetic Construct
  source 1..20: mol_type = other RNA
ctctaatgagactgccggtg

SEQ ID NO: 43278 - RNA, 23 nt, Synthetic Construct
  source 1..23: mol_type = other RNA
tgaagggcagagagcgagacttt

SEQ ID NO: 43279 - RNA, 23 nt, Synthetic Construct
  source 1..23: mol_type = other RNA
tgaagggcagagagcgagacttt

SEQ ID NO: 43280 - RNA, 20 nt, Synthetic Construct
  source 1..20: mol_type = other RNA
tgaggtagtaggttgtacag

SEQ ID NO: 43281 - RNA, 20 nt, Synthetic Construct
  source 1..20: mol_type = other RNA
tgaggtagtaggttgtacag

SEQ ID NO: 43282 - RNA, 33 nt, Synthetic Construct; identical to SEQ ID NO: 2638
  source 1..33: mol_type = other RNA

SEQ ID NO: 43283 - RNA, 33 nt, Synthetic Construct; identical to SEQ ID NO: 2638
  source 1..33: mol_type = other RNA

SEQ ID NO: 43284 - RNA, 26 nt, Synthetic Construct
  source 1..26: mol_type = other RNA
gcataagcgtgcttgactgcgagact

SEQ ID NO: 43285 - RNA, 15 nt, Synthetic Construct
  source 1..15: mol_type = other RNA
tcgagtcgtcctgcg

SEQ ID NO: 43286 - RNA, 22 nt, Synthetic Construct
  source 1..22: mol_type = other RNA
ngaggtagtagtttgtgctgtt

SEQ ID NO: 43287 - RNA, 22 nt, Synthetic Construct
  source 1..22: mol_type = other RNA
ngaggtagtagtttgtgctgtt

SEQ ID NO: 43288 - RNA, 17 nt, Synthetic Construct
  source 1..17: mol_type = other RNA
gtgttcggaagattttc

SEQ ID NO: 43289 - RNA, 17 nt, Synthetic Construct
  source 1..17: mol_type = other RNA
gtgttcggaagattttc

SEQ ID NO: 43290 - RNA, 27 nt, Synthetic Construct
  source 1..27: mol_type = other RNA
ccccccactgctaaatttgattggctt

SEQ ID NO: 43291 - RNA, 37 nt, Synthetic Construct; identical to SEQ ID NO: 2607
  source 1..37: mol_type = other RNA

SEQ ID NO: 43292 - RNA, 37 nt, Synthetic Construct; identical to SEQ ID NO: 2607
  source 1..37: mol_type = other RNA

SEQ ID NO: 43293 - RNA, 15 nt, Synthetic Construct
  source 1..15: mol_type = other RNA
catgccgcgtgcggg

SEQ ID NO: 43294 - RNA, 31 nt, Synthetic Construct; identical to SEQ ID NO: 1627
  source 1..31: mol_type = other RNA

SEQ ID NO: 43295 - RNA, 31 nt, Synthetic Construct; identical to SEQ ID NO: 1627
  source 1..31: mol_type = other RNA

SEQ ID NO: 43296 - RNA, 35 nt, Synthetic Construct; identical to SEQ ID NO: 757
  source 1..35: mol_type = other RNA

SEQ ID NO: 43297 - RNA, 35 nt, Synthetic Construct; identical to SEQ ID NO: 757
  source 1..35: mol_type = other RNA

SEQ ID NO: 43298 - RNA, 17 nt, Synthetic Construct
  source 1..17: mol_type = other RNA
gcgtagatatgcggagg

SEQ ID NO: 43299 - RNA, 32 nt, Synthetic Construct; identical to SEQ ID NO: 2086
  source 1..32: mol_type = other RNA

SEQ ID NO: 43300 - RNA, 28 nt, Synthetic Construct
  source 1..28: mol_type = other RNA
ggcagggttcgtgactggggtgaagtcg

SEQ ID NO: 43301 - RNA, 28 nt, Synthetic Construct
  source 1..28: mol_type = other RNA
ggcagggttcgtgactggggtgaagtcg

SEQ ID NO: 43302 - RNA, 23 nt, Synthetic Construct
  source 1..23: mol_type = other RNA
tggtaatacgacatacttagtgt

SEQ ID NO: 43303 - RNA, 17 nt, Synthetic Construct
  source 1..17: mol_type = other RNA
tcgctagtaatcgcgga

SEQ ID NO: 43304 - RNA, 18 nt, Synthetic Construct
  source 1..18: mol_type = other RNA
atcgctagtaatcgcgga

SEQ ID NO: 43305 - RNA, 35 nt, Synthetic Construct; identical to SEQ ID NO: 2069
  source 1..35: mol_type = other RNA

SEQ ID NO: 43306 - RNA, 20 nt, Synthetic Construct
  source 1..20: mol_type = other RNA
ggtcccaagggtatggctgt

SEQ ID NO: 43307 - RNA, 20 nt, Synthetic Construct
  source 1..20: mol_type = other RNA
ggtcccaagggtatggctgt

SEQ ID NO: 43308 - RNA, 16 nt, Synthetic Construct
  source 1..16: mol_type = other RNA
cgctagtaatcgcgga

SEQ ID NO: 43309 - RNA, 20 nt, Synthetic Construct
  source 1..20: mol_type = other RNA
acccttgtcattagttgcta

SEQ ID NO: 43310 - RNA, 20 nt, Synthetic Construct
  source 1..20: mol_type = other RNA
acccttgtcattagttgcta

SEQ ID NO: 43311 - RNA, 31 nt, Synthetic Construct; identical to SEQ ID NO: 2333
  source 1..31: mol_type = other RNA

SEQ ID NO: 43312 - RNA, 31 nt, Synthetic Construct; identical to SEQ ID NO: 2333
  source 1..31: mol_type = other RNA

SEQ ID NO: 43313 - RNA, 33 nt, Synthetic Construct; identical to SEQ ID NO: 2126
  source 1..33: mol_type = other RNA

SEQ ID NO: 43314 - RNA, 35 nt, Synthetic Construct; identical to SEQ ID NO: 2518
  source 1..35: mol_type = other RNA

SEQ ID NO: 43315 - RNA, 35 nt, Synthetic Construct; identical to SEQ ID NO: 2518
  source 1..35: mol_type = other RNA

SEQ ID NO: 43316 - RNA, 31 nt, Synthetic Construct; identical to SEQ ID NO: 2758
  source 1..31: mol_type = other RNA

SEQ ID NO: 43317 - RNA, 31 nt, Synthetic Construct; identical to SEQ ID NO: 2758
  source 1..31: mol_type = other RNA

SEQ ID NO: 43318 - RNA, 25 nt, Synthetic Construct
  source 1..25: mol_type = other RNA
tttccccttggggttgtaggaccac

SEQ ID NO: 43319 - RNA, 25 nt, Synthetic Construct
  source 1..25: mol_type = other RNA
tttccccttggggttgtaggaccac

SEQ ID NO: 43320 - RNA, 36 nt, Synthetic Construct; identical to SEQ ID NO: 2456
  source 1..36: mol_type = other RNA

SEQ ID NO: 43321 - RNA, 36 nt, Synthetic Construct; identical to SEQ ID NO: 2456
  source 1..36: mol_type = other RNA

SEQ ID NO: 43322 - RNA, 22 nt, Synthetic Construct
  source 1..22: mol_type = other RNA
tgaggtagtaagttgtgtggtt

SEQ ID NO: 43323 - RNA, 22 nt, Synthetic Construct
  source 1..22: mol_type = other RNA
tgaggtagtaagttgtgtggtt

SEQ ID NO: 43324 - RNA, 23 nt, Synthetic Construct
  source 1..23: mol_type = other RNA
tggtaatatgacgtacttagtgt

SEQ ID NO: 43325 - RNA, 23 nt, Synthetic Construct
  source 1..23: mol_type = other RNA
tggtaatatgacgtacttagtgt

SEQ ID NO: 43326 - RNA, 24 nt, Synthetic Construct
  source 1..24: mol_type = other RNA
cgactcttagcggtggatcactcg

SEQ ID NO: 43327 - RNA, 24 nt, Synthetic Construct
  source 1..24: mol_type = other RNA
cgactcttagcggtggatcactcg

SEQ ID NO: 43328 - RNA, 27 nt, Synthetic Construct
  source 1..27: mol_type = other RNA
gatttccccttggggttgtaggaccac

SEQ ID NO: 43329 - RNA, 27 nt, Synthetic Construct
  source 1..27: mol_type = other RNA
gatttccccttggggttgtaggaccac

SEQ ID NO: 43330 - RNA, 33 nt, Synthetic Construct; identical to SEQ ID NO: 2479
  source 1..33: mol_type = other RNA

SEQ ID NO: 43331 - RNA, 33 nt, Synthetic Construct; identical to SEQ ID NO: 2479
  source 1..33: mol_type = other RNA

SEQ ID NO: 43332 - RNA, 22 nt, Synthetic Construct
  source 1..22: mol_type = other RNA
tgaggtagtaggctgtgtggtt

SEQ ID NO: 43333 - RNA, 22 nt, Synthetic Construct
  source 1..22: mol_type = other RNA
tgaggtagtaggctgtgtggtt

SEQ ID NO: 43334 - RNA, 35 nt, Synthetic Construct; identical to SEQ ID NO: 2450
  source 1..35: mol_type = other RNA

SEQ ID NO: 43335 - RNA, 35 nt, Synthetic Construct; identical to SEQ ID NO: 2450
  source 1..35: mol_type = other RNA

SEQ ID NO: 43336 - RNA, 20 nt, Synthetic Construct
  source 1..20: mol_type = other RNA
tgaggtagtaggttgtgtga

SEQ ID NO: 43337 - RNA, 20 nt, Synthetic Construct
  source 1..20: mol_type = other RNA
tgaggtagtaggttgtgtga

SEQ ID NO: 43338 - RNA, 16 nt, Synthetic Construct
  source 1..16: mol_type = other RNA
agcaagtcgaacggta

SEQ ID NO: 43339 - RNA, 16 nt, Synthetic Construct
  source 1..16: mol_type = other RNA
agcaagtcgaacggta

SEQ ID NO: 43340 - RNA, 23 nt, Synthetic Construct
  source 1..23: mol_type = other RNA
tgataatacgacgtacttagtgt

SEQ ID NO: 43341 - RNA, 23 nt, Synthetic Construct
  source 1..23: mol_type = other RNA
tgataatacgacgtacttagtgt

SEQ ID NO: 43342 - RNA, 26 nt, Synthetic Construct
  source 1..26: mol_type = other RNA
gagcagctaataccgcatacgacctg

SEQ ID NO: 43343 - RNA, 26 nt, Synthetic Construct
  source 1..26: mol_type = other RNA
gagcagctaataccgcatacgacctg

SEQ ID NO: 43344 - RNA, 21 nt, Synthetic Construct
  source 1..21: mol_type = other RNA
ggaggagttcgaaggtacgct

SEQ ID NO: 43345 - RNA, 21 nt, Synthetic Construct
  source 1..21: mol_type = other RNA
ggaggagttcgaaggtacgct

SEQ ID NO: 43346 - RNA, 32 nt, Synthetic Construct; identical to SEQ ID NO: 4279
  source 1..32: mol_type = other RNA

SEQ ID NO: 43347 - RNA, 32 nt, Synthetic Construct; identical to SEQ ID NO: 4279
  source 1..32: mol_type = other RNA

SEQ ID NO: 43348 - RNA, 22 nt, Synthetic Construct
  source 1..22: mol_type = other RNA
tgtgcaaatctatgcaaaactg

SEQ ID NO: 43349 - RNA, 22 nt, Synthetic Construct
  source 1..22: mol_type = other RNA
tgtgcaaatctatgcaaaactg

SEQ ID NO: 43350 - RNA, 19 nt, Synthetic Construct
  source 1..19: mol_type = other RNA
ccgtgttcggaagattttc

SEQ ID NO: 43351 - RNA, 19 nt, Synthetic Construct
  source 1..19: mol_type = other RNA
ccgtgttcggaagattttc

SEQ ID NO: 43352 - RNA, 27 nt, Synthetic Construct
  source 1..27: mol_type = other RNA
gttggttcaagcgtgtagtcgtgctct

SEQ ID NO: 43353 - RNA, 27 nt, Synthetic Construct
  source 1..27: mol_type = other RNA
gttggttcaagcgtgtagtcgtgctct

SEQ ID NO: 43354 - RNA, 21 nt, Synthetic Construct
  source 1..21: mol_type = other RNA
cactgatcgagtcgtcctgcg

SEQ ID NO: 43355 - RNA, 21 nt, Synthetic Construct
  source 1..21: mol_type = other RNA
cactgatcgagtcgtcctgcg

SEQ ID NO: 43356 - RNA, 23 nt, Synthetic Construct
  source 1..23: mol_type = other RNA
tgaggtagtaggttgtgtggtct

SEQ ID NO: 43357 - RNA, 23 nt, Synthetic Construct
  source 1..23: mol_type = other RNA
tgaggtagtaggttgtgtggtct

SEQ ID NO: 43358 - RNA, 18 nt, Synthetic Construct
  source 1..18: mol_type = other RNA
ggccgtcgtcagctcgtg

SEQ ID NO: 43359 - RNA, 18 nt, Synthetic Construct
  source 1..18: mol_type = other RNA
ggccgtcgtcagctcgtg

SEQ ID NO: 43360 - RNA, 21 nt, Synthetic Construct
  source 1..21: mol_type = other RNA
gtgggcgtttgaagtgaagtg

SEQ ID NO: 43361 - RNA, 21 nt, Synthetic Construct
  source 1..21: mol_type = other RNA
gtgggcgtttgaagtgaagtg

SEQ ID NO: 43362 - RNA, 16 nt, Synthetic Construct
  source 1..16: mol_type = other RNA
gcctacggccatacca

SEQ ID NO: 43363 - RNA, 18 nt, Synthetic Construct
  source 1..18: mol_type = other RNA
acagtcaggatgttggct

SEQ ID NO: 43364 - RNA, 27 nt, Synthetic Construct
  source 1..27: mol_type = other RNA
ccccccactgctaagtttgactggctt

SEQ ID NO: 43365 - RNA, 38 nt, Synthetic Construct; identical to SEQ ID NO: 2492
  source 1..38: mol_type = other RNA

SEQ ID NO: 43366 - RNA, 36 nt, Synthetic Construct; identical to SEQ ID NO: 2248
  source 1..36: mol_type = other RNA

SEQ ID NO: 43367 - RNA, 21 nt, Synthetic Construct
  source 1..21: mol_type = other RNA
cgaggtagtagtttgtgctgt

SEQ ID NO: 43368 - RNA, 27 nt, Synthetic Construct
  source 1..27: mol_type = other RNA
cgtgtgaaagtaggtcatcgtcaggct

SEQ ID NO: 43369 - RNA, 27 nt, Synthetic Construct
  source 1..27: mol_type = other RNA
cgtgtgaaagtaggtcatcgtcaggct

SEQ ID NO: 43370 - RNA, 16 nt, Synthetic Construct
  source 1..16: mol_type = other RNA
agttgaccgcctgggg

SEQ ID NO: 43371 - RNA, 16 nt, Synthetic Construct
  source 1..16: mol_type = other RNA
agttgaccgcctgggg

SEQ ID NO: 43372 - RNA, 20 nt, Synthetic Construct
  source 1..20: mol_type = other RNA
ggtcccaagggtatggctgt

SEQ ID NO: 43373 - RNA, 20 nt, Synthetic Construct
  source 1..20: mol_type = other RNA
ggtcccaagggtatggctgt

SEQ ID NO: 43374 - RNA, 21 nt, Synthetic Construct
  source 1..21: mol_type = other RNA
gctttgatccggagatttccg

SEQ ID NO: 43375 - RNA, 23 nt, Synthetic Construct
  source 1..23: mol_type = other RNA
tccctggtggtctagtggttagg

SEQ ID NO: 43376 - RNA, 23 nt, Synthetic Construct
  source 1..23: mol_type = other RNA
tccctggtggtctagtggttagg

SEQ ID NO: 43377 - RNA, 21 nt, Synthetic Construct
  source 1..21: mol_type = other RNA
tgagatagtaggttgtgtggt

SEQ ID NO: 43378 - RNA, 21 nt, Synthetic Construct
  source 1..21: mol_type = other RNA
tgagatagtaggttgtgtggt

SEQ ID NO: 43379 - RNA, 17 nt, Synthetic Construct
  source 1..17: mol_type = other RNA
cgatctgtagctggtct

SEQ ID NO: 43380 - RNA, 20 nt, Synthetic Construct
  source 1..20: mol_type = other RNA
tgaggtagtaggttgtacag

SEQ ID NO: 43381 - RNA, 20 nt, Synthetic Construct
  source 1..20: mol_type = other RNA
tgaggtagtaggttgtacag

SEQ ID NO: 43382 - RNA, 16 nt, Synthetic Construct
  source 1..16: mol_type = other RNA
ggtagctcgttgggct

SEQ ID NO: 43383 - RNA, 16 nt, Synthetic Construct
  source 1..16: mol_type = other RNA
ggtagctcgttgggct

SEQ ID NO: 43384 - RNA, 24 nt, Synthetic Construct
  source 1..24: mol_type = other RNA
tgtaaacgtccccgactggaagct

SEQ ID NO: 43385 - RNA, 20 nt, Synthetic Construct
  source 1..20: mol_type = other RNA
actgatcgagtcgtcctgcg

SEQ ID NO: 43386 - RNA, 20 nt, Synthetic Construct
  source 1..20: mol_type = other RNA
actgatcgagtcgtcctgcg

SEQ ID NO: 43387 - RNA, 22 nt, Synthetic Construct
  source 1..22: mol_type = other RNA
tgaggtagtagtttgtgctgta

SEQ ID NO: 43388 - RNA, 32 nt, Synthetic Construct; identical to SEQ ID NO: 4734
  source 1..32: mol_type = other RNA

SEQ ID NO: 43389 - RNA, 32 nt, Synthetic Construct; identical to SEQ ID NO: 4734
  source 1..32: mol_type = other RNA

SEQ ID NO: 43390 - RNA, 28 nt, Synthetic Construct
  source 1..28: mol_type = other RNA
ccccccactgctaaatttggctggcttt

SEQ ID NO: 43391 - RNA, 32 nt, Synthetic Construct; identical to SEQ ID NO: 2798
  source 1..32: mol_type = other RNA

SEQ ID NO: 43392 - RNA, 23 nt, Synthetic Construct
  source 1..23: mol_type = other RNA
tagcagcacgtaaatattggcgt

SEQ ID NO: 43393 - RNA, 30 nt, Synthetic Construct; identical to SEQ ID NO: 2407
  source 1..30: mol_type = other RNA

SEQ ID NO: 43394 - RNA, 21 nt, Synthetic Construct
  source 1..21: mol_type = other RNA
tgaggggcagagggcgagact

SEQ ID NO: 43395 - RNA, 23 nt, Synthetic Construct
  source 1..23: mol_type = other RNA
tagtaatacgacgtacttagtgt

SEQ ID NO: 43396 - RNA, 20 nt, Synthetic Construct
  source 1..20: mol_type = other RNA
caggacagtgaaacgagtca

SEQ ID NO: 43397 - RNA, 20 nt, Synthetic Construct
  source 1..20: mol_type = other RNA
caggacagtgaaacgagtca

SEQ ID NO: 43398 - RNA, 19 nt, Synthetic Construct
  source 1..19: mol_type = other RNA
gcgccgatgatagtgcgga

SEQ ID NO: 43399 - RNA, 39 nt, Synthetic Construct; identical to SEQ ID NO: 4400
  source 1..39: mol_type = other RNA

SEQ ID NO: 43400 - RNA, 39 nt, Synthetic Construct; identical to SEQ ID NO: 4400
  source 1..39: mol_type = other RNA

SEQ ID NO: 43401 - RNA, 30 nt, Synthetic Construct; identical to SEQ ID NO: 2578
  source 1..30: mol_type = other RNA

SEQ ID NO: 43402 - RNA, 36 nt, Synthetic Construct; identical to SEQ ID NO: 11035
  source 1..36: mol_type = other RNA

SEQ ID NO: 43403 - RNA, 36 nt, Synthetic Construct; identical to SEQ ID NO: 11035
  source 1..36: mol_type = other RNA

SEQ ID NO: 43404 - RNA, 28 nt, Synthetic Construct
  source 1..28: mol_type = other RNA
ccgtgtgaaagtaggtcatcgtcaggct

SEQ ID NO: 43405 - RNA, 35 nt, Synthetic Construct; identical to SEQ ID NO: 2402
  source 1..35: mol_type = other RNA

SEQ ID NO: 43406 - RNA, 35 nt, Synthetic Construct; identical to SEQ ID NO: 2402
  source 1..35: mol_type = other RNA

SEQ ID NO: 43407 - RNA, 19 nt, Synthetic Construct
  source 1..19: mol_type = other RNA
gggtgcaagcgttaatcgg

SEQ ID NO: 43408 - RNA, 19 nt, Synthetic Construct
  source 1..19: mol_type = other RNA
gggtgcaagcgttaatcgg

SEQ ID NO: 43409 - RNA, 15 nt, Synthetic Construct
  source 1..15: mol_type = other RNA
acccttgtcattagt

SEQ ID NO: 43410 - RNA, 15 nt, Synthetic Construct
  source 1..15: mol_type = other RNA
acccttgtcattagt

SEQ ID NO: 43411 - RNA, 15 nt, Synthetic Construct
  source 1..15: mol_type = other RNA
tcgagtcgtcctgcg

SEQ ID NO: 43412 - RNA, 15 nt, Synthetic Construct
  source 1..15: mol_type = other RNA
tcgagtcgtcctgcg

SEQ ID NO: 43413 - RNA, 24 nt, Synthetic Construct
  source 1..24: mol_type = other RNA
cggagaaggttagctcagccaact

SEQ ID NO: 43414 - RNA, 24 nt, Synthetic Construct
  source 1..24: mol_type = other RNA
cggagaaggttagctcagccaact

SEQ ID NO: 43415 - RNA, 23 nt, Synthetic Construct
  source 1..23: mol_type = other RNA
tgaggggcagagagcgagactct

SEQ ID NO: 43416 - RNA, 16 nt, Synthetic Construct
  source 1..16: mol_type = other RNA
ccaaggggtcgtgggt

SEQ ID NO: 43417 - RNA, 16 nt, Synthetic Construct
  source 1..16: mol_type = other RNA
ccaaggggtcgtgggt

SEQ ID NO: 43418 - RNA, 22 nt, Synthetic Construct
  source 1..22: mol_type = other RNA
ggcagggttcgtgactggggtg

SEQ ID NO: 43419 - RNA, 19 nt, Synthetic Construct
  source 1..19: mol_type = other RNA
cccttgtcattagttgcta

SEQ ID NO: 43420 - RNA, 22 nt, Synthetic Construct
  source 1..22: mol_type = other RNA
cattgcgcttgtctcggtctga

SEQ ID NO: 43421 - RNA, 23 nt, Synthetic Construct
  source 1..23: mol_type = other RNA
tggtaatacgacgtacttagtat

SEQ ID NO: 43422 - RNA, 23 nt, Synthetic Construct
  source 1..23: mol_type = other RNA
tggtaatacgacgtacttagtat

SEQ ID NO: 43423 - RNA, 17 nt, Synthetic Construct
  source 1..17: mol_type = other RNA
cctcgcgcgattggagc

SEQ ID NO: 43424 - RNA, 17 nt, Synthetic Construct
  source 1..17: mol_type = other RNA
cctcgcgcgattggagc

SEQ ID NO: 43425 - RNA, 23 nt, Synthetic Construct
  source 1..23: mol_type = other RNA
ggcggttatgcaagacagaggtg

SEQ ID NO: 43426 - RNA, 23 nt, Synthetic Construct
  source 1..23: mol_type = other RNA
ggcggttatgcaagacagaggtg

SEQ ID NO: 43427 - RNA, 22 nt, Synthetic Construct
  source 1..22: mol_type = other RNA
tgagatagtaggttgtgtggtt

SEQ ID NO: 43428 - RNA, 22 nt, Synthetic Construct
  source 1..22: mol_type = other RNA
tgagatagtaggttgtgtggtt

SEQ ID NO: 43429 - RNA, 31 nt, Synthetic Construct; identical to SEQ ID NO: 285
  source 1..31: mol_type = other RNA

SEQ ID NO: 43430 - RNA, 17 nt, Synthetic Construct
  source 1..17: mol_type = other RNA
acagtcaggatgttggc

SEQ ID NO: 43431 - RNA, 17 nt, Synthetic Construct
  source 1..17: mol_type = other RNA
acagtcaggatgttggc

SEQ ID NO: 43432 - RNA, 18 nt, Synthetic Construct
  source 1..18: mol_type = other RNA
ccaaggggtcgtgggttc

SEQ ID NO: 43433 - RNA, 18 nt, Synthetic Construct
  source 1..18: mol_type = other RNA
ccaaggggtcgtgggttc

SEQ ID NO: 43434 - RNA, 25 nt, Synthetic Construct
  source 1..25: mol_type = other RNA
cctcgcgcgattggagcggccgata

SEQ ID NO: 43435 - RNA, 17 nt, Synthetic Construct
  source 1..17: mol_type = other RNA
gcggctgtagctcagtt

SEQ ID NO: 43436 - RNA, 17 nt, Synthetic Construct
  source 1..17: mol_type = other RNA
gcggctgtagctcagtt

SEQ ID NO: 43437 - RNA, 26 nt, Synthetic Construct
  source 1..26: mol_type = other RNA
tgtcggctcatctcatcctggggctg

SEQ ID NO: 43438 - RNA, 26 nt, Synthetic Construct
  source 1..26: mol_type = other RNA
tgtcggctcatctcatcctggggctg

SEQ ID NO: 43439 - RNA, 15 nt, Synthetic Construct
  source 1..15: mol_type = other RNA
ttccgaaagtagtgg

SEQ ID NO: 43440 - RNA, 15 nt, Synthetic Construct
  source 1..15: mol_type = other RNA
ttccgaaagtagtgg

SEQ ID NO: 43441 - RNA, 23 nt, Synthetic Construct
  source 1..23: mol_type = other RNA
ctcactgatcgagtcgtcctgcg

SEQ ID NO: 43442 - RNA, 23 nt, Synthetic Construct
  source 1..23: mol_type = other RNA
ctcactgatcgagtcgtcctgcg

SEQ ID NO: 43443 - RNA, 33 nt, Synthetic Construct; identical to SEQ ID NO: 2253
  source 1..33: mol_type = other RNA

SEQ ID NO: 43444 - RNA, 17 nt, Synthetic Construct
  source 1..17: mol_type = other RNA
cccctggacctgtactg

SEQ ID NO: 43445 - RNA, 17 nt, Synthetic Construct
  source 1..17: mol_type = other RNA
cccctggacctgtactg

SEQ ID NO: 43446 - RNA, 22 nt, Synthetic Construct
  source 1..22: mol_type = other RNA
tgaggtagtaggttgtgtggtc

SEQ ID NO: 43447 - RNA, 19 nt, Synthetic Construct
  source 1..19: mol_type = other RNA
aacagtcaggatgttggct

SEQ ID NO: 43448 - RNA, 19 nt, Synthetic Construct
  source 1..19: mol_type = other RNA
aacagtcaggatgttggct

SEQ ID NO: 43449 - RNA, 22 nt, Synthetic Construct
  source 1..22: mol_type = other RNA
ttctgtactgagctgccccgag

SEQ ID NO: 43450 - RNA, 22 nt, Synthetic Construct
  source 1..22: mol_type = other RNA
ttctgtactgagctgccccgag

SEQ ID NO: 43451 - RNA, 23 nt, Synthetic Construct
  source 1..23: mol_type = other RNA
tggtaatgcgacgtacttagtgt

SEQ ID NO: 43452 - RNA, 23 nt, Synthetic Construct
  source 1..23: mol_type = other RNA
tggtaatgcgacgtacttagtgt

SEQ ID NO: 43453 - RNA, 18 nt, Synthetic Construct
  source 1..18: mol_type = other RNA
gcgccgatgatagtgcgg

SEQ ID NO: 43454 - RNA, 18 nt, Synthetic Construct
  source 1..18: mol_type = other RNA
gcgccgatgatagtgcgg

SEQ ID NO: 43455 - RNA, 16 nt, Synthetic Construct
  source 1..16: mol_type = other RNA
gctattgacgaccgta

SEQ ID NO: 43456 - RNA, 16 nt, Synthetic Construct
  source 1..16: mol_type = other RNA
gctattgacgaccgta

SEQ ID NO: 43457 - RNA, 18 nt, Synthetic Construct
  source 1..18: mol_type = other RNA
ggctttgaagtaaggtcg

SEQ ID NO: 43458 - RNA, 32 nt, Synthetic Construct; identical to SEQ ID NO: 2467
  source 1..32: mol_type = other RNA

SEQ ID NO: 43459 - RNA, 32 nt, Synthetic Construct; identical to SEQ ID NO: 2467
  source 1..32: mol_type = other RNA

SEQ ID NO: 43460 - RNA, 21 nt, Synthetic Construct
  source 1..21: mol_type = other RNA
tgaggggcagagagcgggact

SEQ ID NO: 43461 - RNA, 21 nt, Synthetic Construct
  source 1..21: mol_type = other RNA
tgaggggcagagagcgggact

SEQ ID NO: 43462 - RNA, 23 nt, Synthetic Construct
  source 1..23: mol_type = other RNA
caaagtgctgtttgtgcaggtag

SEQ ID NO: 43463 - RNA, 31 nt, Synthetic Construct; identical to SEQ ID NO: 5943
  source 1..31: mol_type = other RNA

SEQ ID NO: 43464 - RNA, 31 nt, Synthetic Construct; identical to SEQ ID NO: 5943
  source 1..31: mol_type = other RNA

SEQ ID NO: 43465 - RNA, 16 nt, Synthetic Construct
  source 1..16: mol_type = other RNA
tccgaaccgactagtg

SEQ ID NO: 43466 - RNA, 16 nt, Synthetic Construct
  source 1..16: mol_type = other RNA
tccgaaccgactagtg

SEQ ID NO: 43467 - RNA, 21 nt, Synthetic Construct
  source 1..21: mol_type = other RNA
tgaggtagtaggttgtatggt

SEQ ID NO: 43468 - RNA, 21 nt, Synthetic Construct
  source 1..21: mol_type = other RNA
tgaggtagtaggttgtatggt

SEQ ID NO: 43469 - RNA, 16 nt, Synthetic Construct
  source 1..16: mol_type = other RNA
gtctgcggccatacca

SEQ ID NO: 43470 - RNA, 16 nt, Synthetic Construct
  source 1..16: mol_type = other RNA
gtctgcggccatacca

SEQ ID NO: 43471 - RNA, 21 nt, Synthetic Construct
  source 1..21: mol_type = other RNA
tgaggtagaaggttgtgtggt

SEQ ID NO: 43472 - RNA, 21 nt, Synthetic Construct
  source 1..21: mol_type = other RNA
tgaggtagaaggttgtgtggt

SEQ ID NO: 43473 - RNA, 16 nt, Synthetic Construct
  source 1..16: mol_type = other RNA
agtcaggatgttggct

SEQ ID NO: 43474 - RNA, 16 nt, Synthetic Construct
  source 1..16: mol_type = other RNA
agtcaggatgttggct

SEQ ID NO: 43475 - RNA, 15 nt, Synthetic Construct
  source 1..15: mol_type = other RNA
acccttgtcattagt

SEQ ID NO: 43476 - RNA, 15 nt, Synthetic Construct
  source 1..15: mol_type = other RNA
acccttgtcattagt

SEQ ID NO: 43477 - RNA, 15 nt, Synthetic Construct
  source 1..15: mol_type = other RNA
gcgtagatatgcgga

SEQ ID NO: 43478 - RNA, 15 nt, Synthetic Construct
  source 1..15: mol_type = other RNA
catgccgcgtgcggg

SEQ ID NO: 43479 - RNA, 15 nt, Synthetic Construct
  source 1..15: mol_type = other RNA
catgccgcgtgcggg

SEQ ID NO: 43480 - RNA, 20 nt, Synthetic Construct
  source 1..20: mol_type = other RNA
caatggccgggacagagggc

SEQ ID NO: 43481 - RNA, 19 nt, Synthetic Construct
  source 1..19: mol_type = other RNA
ccagtaaacggcggccgta

SEQ ID NO: 43482 - RNA, 23 nt, Synthetic Construct
  source 1..23: mol_type = other RNA
tgaggggcagagagcgagactat

SEQ ID NO: 43483 - RNA, 23 nt, Synthetic Construct
  source 1..23: mol_type = other RNA
tggtaatacgacgcacttagtgt

SEQ ID NO: 43484 - RNA, 23 nt, Synthetic Construct
  source 1..23: mol_type = other RNA
tggtaatacgacgcacttagtgt

SEQ ID NO: 43485 - RNA, 23 nt, Synthetic Construct
  source 1..23: mol_type = other RNA
taaagtgcttatagtgcaggtag

SEQ ID NO: 43486 - RNA, 23 nt, Synthetic Construct
  source 1..23: mol_type = other RNA
taaagtgcttatagtgcaggtag

SEQ ID NO: 43487 - RNA, 18 nt, Synthetic Construct
  source 1..18: mol_type = other RNA
atggccgggacagagggc

SEQ ID NO: 43488 - RNA, 18 nt, Synthetic Construct
  source 1..18: mol_type = other RNA
atggccgggacagagggc

SEQ ID NO: 43489 - RNA, 20 nt, Synthetic Construct
  source 1..20: mol_type = other RNA
gcgtgcttgactgcgagact

SEQ ID NO: 43490 - RNA, 22 nt, Synthetic Construct
  source 1..22: mol_type = other RNA
tgtagtgtttcctactttatgg

SEQ ID NO: 43491 - RNA, 22 nt, Synthetic Construct
  source 1..22: mol_type = other RNA
tgtagtgtttcctactttatgg

SEQ ID NO: 43492 - RNA, 33 nt, Synthetic Construct; identical to SEQ ID NO: 2209
  source 1..33: mol_type = other RNA

SEQ ID NO: 43493 - RNA, 33 nt, Synthetic Construct; identical to SEQ ID NO: 2209
  source 1..33: mol_type = other RNA

SEQ ID NO: 43494 - RNA, 15 nt, Synthetic Construct
  source 1..15: mol_type = other RNA
ttccgaaagtagtgg

SEQ ID NO: 43495 - RNA, 28 nt, Synthetic Construct
  source 1..28: mol_type = other RNA
gctttgatccggagatttccgaatgggg

SEQ ID NO: 43496 - RNA, 28 nt, Synthetic Construct
  source 1..28: mol_type = other RNA
gctttgatccggagatttccgaatgggg

SEQ ID NO: 43497 - RNA, 37 nt, Synthetic Construct; identical to SEQ ID NO: 5125
  source 1..37: mol_type = other RNA

SEQ ID NO: 43498 - RNA, 37 nt, Synthetic Construct; identical to SEQ ID NO: 5125
  source 1..37: mol_type = other RNA

SEQ ID NO: 43499 - RNA, 29 nt, Synthetic Construct
  source 1..29: mol_type = other RNA
cccgtgtgaaagtaggtcatcgtcaggct

SEQ ID NO: 43500 - RNA, 21 nt, Synthetic Construct
  source 1..21: mol_type = other RNA
acagcaggacggtggccatgg

SEQ ID NO: 43501 - RNA, 21 nt, Synthetic Construct
  source 1..21: mol_type = other RNA
acagcaggacggtggccatgg

SEQ ID NO: 43502 - RNA, 17 nt, Synthetic Construct
  source 1..17: mol_type = other RNA
tgccagcagccgcggta

SEQ ID NO: 43503 - RNA, 17 nt, Synthetic Construct
  source 1..17: mol_type = other RNA
tgccagcagccgcggta

SEQ ID NO: 43504 - RNA, 30 nt, Synthetic Construct; identical to SEQ ID NO: 2578
  source 1..30: mol_type = other RNA

SEQ ID NO: 43505 - RNA, 23 nt, Synthetic Construct
  source 1..23: mol_type = other RNA
tggaaatacgacgtacttagtgt

SEQ ID NO: 43506 - RNA, 30 nt, Synthetic Construct; identical to SEQ ID NO: 751
  source 1..30: mol_type = other RNA

SEQ ID NO: 43507 - RNA, 19 nt, Synthetic Construct
  source 1..19: mol_type = other RNA
gcgaaattccttgtcgggt

SEQ ID NO: 43508 - RNA, 19 nt, Synthetic Construct
  source 1..19: mol_type = other RNA
gcgaaattccttgtcgggt

SEQ ID NO: 43509 - RNA, 16 nt, Synthetic Construct
  source 1..16: mol_type = other RNA
gcagacgaagtgagtg

SEQ ID NO: 43510 - RNA, 35 nt, Synthetic Construct; identical to SEQ ID NO: 2399
  source 1..35: mol_type = other RNA

SEQ ID NO: 43511 - RNA, 31 nt, Synthetic Construct; identical to SEQ ID NO: 2507
  source 1..31: mol_type = other RNA

SEQ ID NO: 43512 - RNA, 16 nt, Synthetic Construct
  source 1..16: mol_type = other RNA
gccagcagccgcggta

SEQ ID NO: 43513 - RNA, 16 nt, Synthetic Construct
  source 1..16: mol_type = other RNA
gccagcagccgcggta

SEQ ID NO: 43514 - RNA, 20 nt, Synthetic Construct
  source 1..20: mol_type = other RNA
tgaggtagtaggttgcgtgg

SEQ ID NO: 43515 - RNA, 20 nt, Synthetic Construct
  source 1..20: mol_type = other RNA
tgaggtagtaggttgcgtgg

SEQ ID NO: 43516 - RNA, 15 nt, Synthetic Construct
  source 1..15: mol_type = other RNA
gagctgtggataggg

SEQ ID NO: 43517 - RNA, 23 nt, Synthetic Construct
  source 1..23: mol_type = other RNA
tccctggtggtctagtggttagg

SEQ ID NO: 43518 - RNA, 23 nt, Synthetic Construct
  source 1..23: mol_type = other RNA
tccctggtggtctagtggttagg

SEQ ID NO: 43519 - RNA, 17 nt, Synthetic Construct
  source 1..17: mol_type = other RNA
cgaaattccttgtcggg

SEQ ID NO: 43520 - RNA, 18 nt, Synthetic Construct
  source 1..18: mol_type = other RNA
cctgaagaataagcaccg

SEQ ID NO: 43521 - RNA, 20 nt, Synthetic Construct
  source 1..20: mol_type = other RNA
taaggtagtaggttgtgtgg

SEQ ID NO: 43522 - RNA, 20 nt, Synthetic Construct
  source 1..20: mol_type = other RNA
taaggtagtaggttgtgtgg

SEQ ID NO: 43523 - RNA, 17 nt, Synthetic Construct
  source 1..17: mol_type = other RNA
ccaaggggtcgtgggtt

SEQ ID NO: 43524 - RNA, 17 nt, Synthetic Construct
  source 1..17: mol_type = other RNA
ccaaggggtcgtgggtt

SEQ ID NO: 43525 - RNA, 22 nt, Synthetic Construct
  source 1..22: mol_type = other RNA
tgaggtagtaggttgtgtggct

SEQ ID NO: 43526 - RNA, 22 nt, Synthetic Construct
  source 1..22: mol_type = other RNA
tgaggtagtaggttgtgtggct

SEQ ID NO: 43527 - RNA, 23 nt, Synthetic Construct
  source 1..23: mol_type = other RNA
tagcttatcagactgatgttgaa

SEQ ID NO: 43528 - RNA, 23 nt, Synthetic Construct
  source 1..23: mol_type = other RNA
tagcttatcagactgatgttgaa

SEQ ID NO: 43529 - RNA, 16 nt, Synthetic Construct
  source 1..16: mol_type = other RNA
gtccccttcgtctaga

SEQ ID NO: 43530 - RNA, 16 nt, Synthetic Construct
  source 1..16: mol_type = other RNA
gtccccttcgtctaga

SEQ ID NO: 43531 - RNA, 19 nt, Synthetic Construct
  source 1..19: mol_type = other RNA
aacagtcaggatgttggct

SEQ ID NO: 43532 - RNA, 19 nt, Synthetic Construct
  source 1..19: mol_type = other RNA
aacagtcaggatgttggct

SEQ ID NO: 43533 - RNA, 22 nt, Synthetic Construct
  source 1..22: mol_type = other RNA
tagcatatcgagcctgagaaca

SEQ ID NO: 43534 - RNA, 22 nt, Synthetic Construct
  source 1..22: mol_type = other RNA
tagcatatcgagcctgagaaca

SEQ ID NO: 43535 - RNA, 15 nt, Synthetic Construct
  source 1..15: mol_type = other RNA
acctgcatcgagggt

SEQ ID NO: 43536 - RNA, 15 nt, Synthetic Construct
  source 1..15: mol_type = other RNA
acctgcatcgagggt

SEQ ID NO: 43537 - RNA, 20 nt, Synthetic Construct
  source 1..20: mol_type = other RNA
cccagtaaacggcggccgta

SEQ ID NO: 43538 - RNA, 15 nt, Synthetic Construct
  source 1..15: mol_type = other RNA
ggtgaaagcggggga

SEQ ID NO: 43539 - RNA, 24 nt, Synthetic Construct
  source 1..24: mol_type = other RNA
tgtaaacatccccgactgggagct

SEQ ID NO: 43540 - RNA, 15 nt, Synthetic Construct
  source 1..15: mol_type = other RNA
cgccatttaaagagg

SEQ ID NO: 43541 - RNA, 15 nt, Synthetic Construct
  source 1..15: mol_type = other RNA
cgccatttaaagagg

SEQ ID NO: 43542 - RNA, 24 nt, Synthetic Construct
  source 1..24: mol_type = other RNA
tatatcggaacgtgcccagtcgtg

SEQ ID NO: 43543 - RNA, 20 nt, Synthetic Construct
  source 1..20: mol_type = other RNA
gcgtgcttgactgcgagact

SEQ ID NO: 43544 - RNA, 20 nt, Synthetic Construct
  source 1..20: mol_type = other RNA
gcgtgcttgactgcgagact

SEQ ID NO: 43545 - RNA, 23 nt, Synthetic Construct
  source 1..23: mol_type = other RNA
tggtaacacgacgtacttagtgt

SEQ ID NO: 43546 - RNA, 23 nt, Synthetic Construct
  source 1..23: mol_type = other RNA
tggtaacacgacgtacttagtgt

SEQ ID NO: 43547 - RNA, 23 nt, Synthetic Construct
  source 1..23: mol_type = other RNA
tggtgatacgacgtacttagtgt

SEQ ID NO: 43548 - RNA, 23 nt, Synthetic Construct
  source 1..23: mol_type = other RNA
tggtgatacgacgtacttagtgt

SEQ ID NO: 43549 - RNA, 24 nt, Synthetic Construct
  source 1..24: mol_type = other RNA
cgtaaacatccccgactggaagct

SEQ ID NO: 43550 - RNA, 18 nt, Synthetic Construct
  source 1..18: mol_type = other RNA
gcgccgatgatagtgcgg

SEQ ID NO: 43551 - RNA, 18 nt, Synthetic Construct
  source 1..18: mol_type = other RNA
gcgccgatgatagtgcgg

SEQ ID NO: 43552 - RNA, 16 nt, Synthetic Construct
  source 1..16: mol_type = other RNA
gtcaacggccatacca

SEQ ID NO: 43553 - RNA, 16 nt, Synthetic Construct
  source 1..16: mol_type = other RNA
gtcaacggccatacca

SEQ ID NO: 43554 - RNA, 23 nt, Synthetic Construct
  source 1..23: mol_type = other RNA
tggtagtacgacgtacttagtgt

SEQ ID NO: 43555 - RNA, 23 nt, Synthetic Construct
  source 1..23: mol_type = other RNA
tggtagtacgacgtacttagtgt

SEQ ID NO: 43556 - RNA, 23 nt, Synthetic Construct
  source 1..23: mol_type = other RNA
tgaggggcagggagcgagacttt

SEQ ID NO: 43557 - RNA, 21 nt, Synthetic Construct
  source 1..21: mol_type = other RNA
tgaggtagtagcttgtgctgt

SEQ ID NO: 43558 - RNA, 21 nt, Synthetic Construct
  source 1..21: mol_type = other RNA
tgaggtagtagcttgtgctgt

SEQ ID NO: 43559 - RNA, 21 nt, Synthetic Construct
  source 1..21: mol_type = other RNA
atcacattgccagggatttcc

SEQ ID NO: 43560 - RNA, 21 nt, Synthetic Construct
  source 1..21: mol_type = other RNA
atcacattgccagggatttcc

SEQ ID NO: 43561 - RNA, 22 nt, Synthetic Construct
  source 1..22: mol_type = other RNA
ngaggtagtaggttgtatagtt

SEQ ID NO: 43562 - RNA, 22 nt, Synthetic Construct
  source 1..22: mol_type = other RNA
ngaggtagtaggttgtatagtt

SEQ ID NO: 43563 - RNA, 19 nt, Synthetic Construct
  source 1..19: mol_type = other RNA
cctgtaccgatcaatagtg

SEQ ID NO: 43564 - RNA, 19 nt, Synthetic Construct
  source 1..19: mol_type = other RNA
cctgtaccgatcaatagtg

SEQ ID NO: 43565 - RNA, 23 nt, Synthetic Construct
  source 1..23: mol_type = other RNA
tgaggagcagagagcgagacttt

SEQ ID NO: 43566 - RNA, 34 nt, Synthetic Construct; identical to SEQ ID NO: 2298
  source 1..34: mol_type = other RNA

SEQ ID NO: 43567 - RNA, 20 nt, Synthetic Construct
  source 1..20: mol_type = other RNA
tcctgtaccgatcaatagtg

SEQ ID NO: 43568 - RNA, 20 nt, Synthetic Construct
  source 1..20: mol_type = other RNA
tcctgtaccgatcaatagtg

SEQ ID NO: 43569 - RNA, 20 nt, Synthetic Construct
  source 1..20: mol_type = other RNA
tgaggtagcaggttgtatag

SEQ ID NO: 43570 - RNA, 20 nt, Synthetic Construct
  source 1..20: mol_type = other RNA
tgaggtagcaggttgtatag

SEQ ID NO: 43571 - RNA, 17 nt, Synthetic Construct
  source 1..17: mol_type = other RNA
cagtcaggatgttggct

SEQ ID NO: 43572 - RNA, 26 nt, Synthetic Construct
  source 1..26: mol_type = other RNA
gagcagctaataccgcatacgacctg

SEQ ID NO: 43573 - RNA, 32 nt, Synthetic Construct; identical to SEQ ID NO: 2318
  source 1..32: mol_type = other RNA

SEQ ID NO: 43574 - RNA, 23 nt, Synthetic Construct
  source 1..23: mol_type = other RNA
tgaggggcagagagcgagacttc

SEQ ID NO: 43575 - RNA, 23 nt, Synthetic Construct
  source 1..23: mol_type = other RNA
tgaggggcagagagcgagacttc

SEQ ID NO: 43576 - RNA, 33 nt, Synthetic Construct; identical to SEQ ID NO: 2638
  source 1..33: mol_type = other RNA

SEQ ID NO: 43577 - RNA, 22 nt, Synthetic Construct
  source 1..22: mol_type = other RNA
tgaggtagtgggttgtgtggtt

SEQ ID NO: 43578 - RNA, 22 nt, Synthetic Construct
  source 1..22: mol_type = other RNA
tgaggtagtgggttgtgtggtt

SEQ ID NO: 43579 - RNA, 34 nt, Synthetic Construct; identical to SEQ ID NO: 2291
  source 1..34: mol_type = other RNA

SEQ ID NO: 43580 - RNA, 37 nt, Synthetic Construct; identical to SEQ ID NO: 5125
  source 1..37: mol_type = other RNA

SEQ ID NO: 43581 - RNA, 37 nt, Synthetic Construct; identical to SEQ ID NO: 5125
  source 1..37: mol_type = other RNA

SEQ ID NO: 43582 - RNA, 20 nt, Synthetic Construct
  source 1..20: mol_type = other RNA
tgaggtagtaggctgtatag

SEQ ID NO: 43583 - RNA, 20 nt, Synthetic Construct
  source 1..20: mol_type = other RNA
tgaggtagtaggctgtatag

SEQ ID NO: 43584 - RNA, 20 nt, Synthetic Construct
  source 1..20: mol_type = other RNA
tgaggtagcaggttgtatag

SEQ ID NO: 43585 - RNA, 20 nt, Synthetic Construct
  source 1..20: mol_type = other RNA
tgaggtagcaggttgtatag

SEQ ID NO: 43586 - RNA, 19 nt, Synthetic Construct
  source 1..19: mol_type = other RNA
atcacattgccagggattt

SEQ ID NO: 43587 - RNA, 19 nt, Synthetic Construct
  source 1..19: mol_type = other RNA
atcacattgccagggattt

SEQ ID NO: 43588 - RNA, 21 nt, Synthetic Construct
  source 1..21: mol_type = other RNA
tgaggtagtagtttgtgctga

SEQ ID NO: 43589 - RNA, 33 nt, Synthetic Construct; identical to SEQ ID NO: 2395
  source 1..33: mol_type = other RNA

SEQ ID NO: 43590 - RNA, 24 nt, Synthetic Construct
  source 1..24: mol_type = other RNA
tgtaaacatccccgactggaagcc

SEQ ID NO: 43591 - RNA, 22 nt, Synthetic Construct
  source 1..22: mol_type = other RNA
tgagatagtaggttgtgtggtt

SEQ ID NO: 43592 - RNA, 19 nt, Synthetic Construct
  source 1..19: mol_type = other RNA
agtcgacgtatagggtgtg

SEQ ID NO: 43593 - RNA, 18 nt, Synthetic Construct
  source 1..18: mol_type = other RNA
gaagttgaccgcctgggg

SEQ ID NO: 43594 - RNA, 23 nt, Synthetic Construct
  source 1..23: mol_type = other RNA
tggtaatacgacgtacttagtgt

SEQ ID NO: 43595 - RNA, 23 nt, Synthetic Construct
  source 1..23: mol_type = other RNA
tggtaatacgacgtacttagtgt

SEQ ID NO: 43596 - RNA, 19 nt, Synthetic Construct
  source 1..19: mol_type = other RNA
accaaggggtcgtgggttc

SEQ ID NO: 43597 - RNA, 19 nt, Synthetic Construct
  source 1..19: mol_type = other RNA
accaaggggtcgtgggttc

SEQ ID NO: 43598 - RNA, 18 nt, Synthetic Construct
  source 1..18: mol_type = other RNA
tgcgtagatatgcggagg

SEQ ID NO: 43599 - RNA, 16 nt, Synthetic Construct
  source 1..16: mol_type = other RNA
gcagacgaagtgagtg

SEQ ID NO: 43600 - RNA, 16 nt, Synthetic Construct
  source 1..16: mol_type = other RNA
gcagacgaagtgagtg

SEQ ID NO: 43601 - RNA, 18 nt, Synthetic Construct
  source 1..18: mol_type = other RNA
gtcgacgtatagggtgtg

SEQ ID NO: 43602 - RNA, 23 nt, Synthetic Construct
  source 1..23: mol_type = other RNA
tggcaatacgacgtacttagtgt

SEQ ID NO: 43603 - RNA, 23 nt, Synthetic Construct
  source 1..23: mol_type = other RNA
tggcaatacgacgtacttagtgt

SEQ ID NO: 43604 - RNA, 21 nt, Synthetic Construct
  source 1..21: mol_type = other RNA
tcctgaactgagctgccccga

SEQ ID NO: 43605 - RNA, 21 nt, Synthetic Construct
  source 1..21: mol_type = other RNA
tcctgaactgagctgccccga

SEQ ID NO: 43606 - RNA, 39 nt, Synthetic Construct; identical to SEQ ID NO: 4400
  source 1..39: mol_type = other RNA

SEQ ID NO: 43607 - RNA, 39 nt, Synthetic Construct; identical to SEQ ID NO: 4400
  source 1..39: mol_type = other RNA

SEQ ID NO: 43608 - RNA, 23 nt, Synthetic Construct
  source 1..23: mol_type = other RNA
tcctgtactgagccgccccgaga

SEQ ID NO: 43609 - RNA, 23 nt, Synthetic Construct
  source 1..23: mol_type = other RNA
tcctgtactgagccgccccgaga

SEQ ID NO: 43610 - RNA, 22 nt, Synthetic Construct
  source 1..22: mol_type = other RNA
cggaatcgctagtaatcgcgga

SEQ ID NO: 43611 - RNA, 23 nt, Synthetic Construct
  source 1..23: mol_type = other RNA
tcctgtactgagccgccccgaga

SEQ ID NO: 43612 - RNA, 23 nt, Synthetic Construct
  source 1..23: mol_type = other RNA
tcctgtactgagccgccccgaga

SEQ ID NO: 43613 - RNA, 22 nt, Synthetic Construct
  source 1..22: mol_type = other RNA
tgagatagtaggttgtgtggtt

SEQ ID NO: 43614 - RNA, 22 nt, Synthetic Construct
  source 1..22: mol_type = other RNA
tgagatagtaggttgtgtggtt

SEQ ID NO: 43615 - RNA, 22 nt, Synthetic Construct
  source 1..22: mol_type = other RNA
ttctgtactgagctgccccgag

SEQ ID NO: 43616 - RNA, 22 nt, Synthetic Construct
  source 1..22: mol_type = other RNA
ttctgtactgagctgccccgag

SEQ ID NO: 43617 - RNA, 17 nt, Synthetic Construct
  source 1..17: mol_type = other RNA
cctcgcgcgattggagc

SEQ ID NO: 43618 - RNA, 17 nt, Synthetic Construct
  source 1..17: mol_type = other RNA
cctcgcgcgattggagc

SEQ ID NO: 43619 - RNA, 22 nt, Synthetic Construct
  source 1..22: mol_type = other RNA
tgaggtagtaggttgtgtggtc

SEQ ID NO: 43620 - RNA, 22 nt, Synthetic Construct
  source 1..22: mol_type = other RNA
tgaggtagtaggttgtgtggtc

SEQ ID NO: 43621 - RNA, 18 nt, Synthetic Construct
  source 1..18: mol_type = other RNA
tctaatgagactgccggt

SEQ ID NO: 43622 - RNA, 18 nt, Synthetic Construct
  source 1..18: mol_type = other RNA
tctaatgagactgccggt

SEQ ID NO: 43623 - RNA, 21 nt, Synthetic Construct
  source 1..21: mol_type = other RNA
tgaggggcagggagcgagact

SEQ ID NO: 43624 - RNA, 21 nt, Synthetic Construct
  source 1..21: mol_type = other RNA
tgaggggcagggagcgagact

SEQ ID NO: 43625 - RNA, 21 nt, Synthetic Construct
  source 1..21: mol_type = other RNA
cataaagtagaaagcactact

SEQ ID NO: 43626 - RNA, 21 nt, Synthetic Construct
  source 1..21: mol_type = other RNA
cataaagtagaaagcactact

SEQ ID NO: 43627 - RNA, 18 nt, Synthetic Construct
  source 1..18: mol_type = other RNA
gtccggatcgtagtctgc

SEQ ID NO: 43628 - RNA, 18 nt, Synthetic Construct
  source 1..18: mol_type = other RNA
gtccggatcgtagtctgc

SEQ ID NO: 43629 - RNA, 28 nt, Synthetic Construct
  source 1..28: mol_type = other RNA
ggatttccccttggggttgtaggaccac

SEQ ID NO: 43630 - RNA, 28 nt, Synthetic Construct
  source 1..28: mol_type = other RNA
ggatttccccttggggttgtaggaccac

SEQ ID NO: 43631 - RNA, 33 nt, Synthetic Construct; identical to SEQ ID NO: 2266
  source 1..33: mol_type = other RNA

SEQ ID NO: 43632 - RNA, 21 nt, Synthetic Construct
  source 1..21: mol_type = other RNA
tgaggtaataggttgtgtggt

SEQ ID NO: 43633 - RNA, 21 nt, Synthetic Construct
  source 1..21: mol_type = other RNA
tgaggtaataggttgtgtggt

SEQ ID NO: 43634 - RNA, 28 nt, Synthetic Construct
  source 1..28: mol_type = other RNA
gctttgatccggagatttccgaatgggg

SEQ ID NO: 43635 - RNA, 28 nt, Synthetic Construct
  source 1..28: mol_type = other RNA
gctttgatccggagatttccgaatgggg

SEQ ID NO: 43636 - RNA, 20 nt, Synthetic Construct
  source 1..20: mol_type = other RNA
tcctgtctgaatatgggggg

SEQ ID NO: 43637 - RNA, 20 nt, Synthetic Construct
  source 1..20: mol_type = other RNA
tcctgtctgaatatgggggg

SEQ ID NO: 43638 - RNA, 37 nt, Synthetic Construct; identical to SEQ ID NO: 2607
  source 1..37: mol_type = other RNA

SEQ ID NO: 43639 - RNA, 19 nt, Synthetic Construct
  source 1..19: mol_type = other RNA
ctgatcgagtcgtcctgcg

SEQ ID NO: 43640 - RNA, 19 nt, Synthetic Construct
  source 1..19: mol_type = other RNA
ctgatcgagtcgtcctgcg

SEQ ID NO: 43641 - RNA, 18 nt, Synthetic Construct
  source 1..18: mol_type = other RNA
cctgaagaataagcaccg

SEQ ID NO: 43642 - RNA, 18 nt, Synthetic Construct
  source 1..18: mol_type = other RNA
cctgaagaataagcaccg

SEQ ID NO: 43643 - RNA, 15 nt, Synthetic Construct
  source 1..15: mol_type = other RNA
acctgcatcgagggt

SEQ ID NO: 43644 - RNA, 15 nt, Synthetic Construct
  source 1..15: mol_type = other RNA
acctgcatcgagggt

SEQ ID NO: 43645 - RNA, 22 nt, Synthetic Construct
  source 1..22: mol_type = other RNA
tcctgtactgaactgccccgag

SEQ ID NO: 43646 - RNA, 22 nt, Synthetic Construct
  source 1..22: mol_type = other RNA
tcctgtactgaactgccccgag

SEQ ID NO: 43647 - RNA, 20 nt, Synthetic Construct
  source 1..20: mol_type = other RNA
gctattgacgaccgtaccgc

SEQ ID NO: 43648 - RNA, 20 nt, Synthetic Construct
  source 1..20: mol_type = other RNA
gctattgacgaccgtaccgc

SEQ ID NO: 43649 - RNA, 23 nt, Synthetic Construct
  source 1..23: mol_type = other RNA
tgaggggcagagagcgagacctt

SEQ ID NO: 43650 - RNA, 22 nt, Synthetic Construct
  source 1..22: mol_type = other RNA
cgaggtagtaggttgtgtggtt

SEQ ID NO: 43651 - RNA, 23 nt, Synthetic Construct
  source 1..23: mol_type = other RNA
naaagtgctgttcgtgcaggtag

SEQ ID NO: 43652 - RNA, 23 nt, Synthetic Construct
  source 1..23: mol_type = other RNA
naaagtgctgttcgtgcaggtag

SEQ ID NO: 43653 - RNA, 16 nt, Synthetic Construct
  source 1..16: mol_type = other RNA
tgttcggaagattttc

SEQ ID NO: 43654 - RNA, 16 nt, Synthetic Construct
  source 1..16: mol_type = other RNA
tgttcggaagattttc

SEQ ID NO: 43655 - RNA, 22 nt, Synthetic Construct
  source 1..22: mol_type = other RNA
tgaggtagtagtttatgctgtt

SEQ ID NO: 43656 - RNA, 22 nt, Synthetic Construct
  source 1..22: mol_type = other RNA
tgaggtagtagtttatgctgtt

SEQ ID NO: 43657 - RNA, 15 nt, Synthetic Construct
  source 1..15: mol_type = other RNA
cagtgaaacgagtca

SEQ ID NO: 43658 - RNA, 15 nt, Synthetic Construct
  source 1..15: mol_type = other RNA
cagtgaaacgagtca

SEQ ID NO: 43659 - RNA, 22 nt, Synthetic Construct
  source 1..22: mol_type = other RNA
tgagaactgaattccatgggtc

SEQ ID NO: 43660 - RNA, 24 nt, Synthetic Construct
  source 1..24: mol_type = other RNA
tgtaaacatccttgactggaagct

SEQ ID NO: 43661 - RNA, 22 nt, Synthetic Construct
  source 1..22: mol_type = other RNA
gcgttgcaaccagtgccggggg

SEQ ID NO: 43662 - RNA, 21 nt, Synthetic Construct
  source 1..21: mol_type = other RNA
tgaggtagaaggttgtgtggt

SEQ ID NO: 43663 - RNA, 21 nt, Synthetic Construct
  source 1..21: mol_type = other RNA
tgaggtagaaggttgtgtggt

SEQ ID NO: 43664 - RNA, 23 nt, Synthetic Construct
  source 1..23: mol_type = other RNA
taaggggcagagagcgagacttt

SEQ ID NO: 43665 - RNA, 35 nt, Synthetic Construct; identical to SEQ ID NO: 2762
  source 1..35: mol_type = other RNA

SEQ ID NO: 43666 - RNA, 35 nt, Synthetic Construct; identical to SEQ ID NO: 2762
  source 1..35: mol_type = other RNA

SEQ ID NO: 43667 - RNA, 24 nt, Synthetic Construct
  source 1..24: mol_type = other RNA
tatatcggaacgtgcccagtcgtg

SEQ ID NO: 43668 - RNA, 24 nt, Synthetic Construct
  source 1..24: mol_type = other RNA
tatatcggaacgtgcccagtcgtg

SEQ ID NO: 43669 - RNA, 23 nt, Synthetic Construct
  source 1..23: mol_type = other RNA
tgaggtagtaggttgtgtagttt

SEQ ID NO: 43670 - RNA, 21 nt, Synthetic Construct
  source 1..21: mol_type = other RNA
tgaggtagtagcttgtgctgt

SEQ ID NO: 43671 - RNA, 21 nt, Synthetic Construct
  source 1..21: mol_type = other RNA
tgaggtagtagcttgtgctgt

SEQ ID NO: 43672 - RNA, 21 nt, Synthetic Construct
  source 1..21: mol_type = other RNA
cactgatcgagtcgtcctgcg

SEQ ID NO: 43673 - RNA, 21 nt, Synthetic Construct
  source 1..21: mol_type = other RNA
cactgatcgagtcgtcctgcg

SEQ ID NO: 43674 - RNA, 34 nt, Synthetic Construct; identical to SEQ ID NO: 2553
  source 1..34: mol_type = other RNA

SEQ ID NO: 43675 - RNA, 23 nt, Synthetic Construct
  source 1..23: mol_type = other RNA
tcctgtaccgagctgccccgagt

SEQ ID NO: 43676 - RNA, 23 nt, Synthetic Construct
  source 1..23: mol_type = other RNA
tcctgtaccgagctgccccgagt

SEQ ID NO: 43677 - RNA, 19 nt, Synthetic Construct
  source 1..19: mol_type = other RNA
atcacattgccagggattt

SEQ ID NO: 43678 - RNA, 19 nt, Synthetic Construct
  source 1..19: mol_type = other RNA
atcacattgccagggattt

SEQ ID NO: 43679 - RNA, 21 nt, Synthetic Construct
  source 1..21: mol_type = other RNA
tcccgtactgagctgccccga

SEQ ID NO: 43680 - RNA, 21 nt, Synthetic Construct
  source 1..21: mol_type = other RNA
tcccgtactgagctgccccga

SEQ ID NO: 43681 - RNA, 15 nt, Synthetic Construct
  source 1..15: mol_type = other RNA
gcaagccgaacggta

SEQ ID NO: 43682 - RNA, 15 nt, Synthetic Construct
  source 1..15: mol_type = other RNA
gcaagccgaacggta

SEQ ID NO: 43683 - RNA, 27 nt, Synthetic Construct
  source 1..27: mol_type = other RNA
ccccccactgccaaatttgactggctt

SEQ ID NO: 43684 - RNA, 21 nt, Synthetic Construct
  source 1..21: mol_type = other RNA
tcctgtctgaatatgggggga

SEQ ID NO: 43685 - RNA, 21 nt, Synthetic Construct
  source 1..21: mol_type = other RNA
tcctgtctgaatatgggggga

SEQ ID NO: 43686 - RNA, 18 nt, Synthetic Construct
  source 1..18: mol_type = other RNA
cgtgttcggaagattttc

SEQ ID NO: 43687 - RNA, 18 nt, Synthetic Construct
  source 1..18: mol_type = other RNA
cgtgttcggaagattttc

SEQ ID NO: 43688 - RNA, 32 nt, Synthetic Construct; identical to SEQ ID NO: 3713
  source 1..32: mol_type = other RNA

SEQ ID NO: 43689 - RNA, 32 nt, Synthetic Construct; identical to SEQ ID NO: 3713
  source 1..32: mol_type = other RNA

SEQ ID NO: 43690 - RNA, 16 nt, Synthetic Construct
  source 1..16: mol_type = other RNA
gggtctgtagctcagt

SEQ ID NO: 43691 - RNA, 16 nt, Synthetic Construct
  source 1..16: mol_type = other RNA
gggtctgtagctcagt

SEQ ID NO: 43692 - RNA, 22 nt, Synthetic Construct
  source 1..22: mol_type = other RNA
tggggtagtagtttgtgctgtt

SEQ ID NO: 43693 - RNA, 22 nt, Synthetic Construct
  source 1..22: mol_type = other RNA
tggggtagtagtttgtgctgtt

SEQ ID NO: 43694 - RNA, 16 nt, Synthetic Construct
  source 1..16: mol_type = other RNA
gtctacggccataccg

SEQ ID NO: 43695 - RNA, 18 nt, Synthetic Construct
  source 1..18: mol_type = other RNA
tcccaagggtatggctgt

SEQ ID NO: 43696 - RNA, 18 nt, Synthetic Construct
  source 1..18: mol_type = other RNA
tcccaagggtatggctgt

SEQ ID NO: 43697 - RNA, 23 nt, Synthetic Construct
  source 1..23: mol_type = other RNA
tcctgtgctgagctgccccgaga

SEQ ID NO: 43698 - RNA, 23 nt, Synthetic Construct
  source 1..23: mol_type = other RNA
tcctgtgctgagctgccccgaga

SEQ ID NO: 43699 - RNA, 23 nt, Synthetic Construct
  source 1..23: mol_type = other RNA
tcctgtactgggctgccccgagt

SEQ ID NO: 43700 - RNA, 23 nt, Synthetic Construct
  source 1..23: mol_type = other RNA
tcctgtactgggctgccccgagt

SEQ ID NO: 43701 - RNA, 15 nt, Synthetic Construct
  source 1..15: mol_type = other RNA
gtcaggatgttggct

SEQ ID NO: 43702 - RNA, 15 nt, Synthetic Construct
  source 1..15: mol_type = other RNA
gtcaggatgttggct

SEQ ID NO: 43703 - RNA, 24 nt, Synthetic Construct
  source 1..24: mol_type = other RNA
tgtaaacatccccgactggaggct

SEQ ID NO: 43704 - RNA, 26 nt, Synthetic Construct
  source 1..26: mol_type = other RNA
aaaccgttaccattactgagtttagt

SEQ ID NO: 43705 - RNA, 26 nt, Synthetic Construct
  source 1..26: mol_type = other RNA
aaaccgttaccattactgagtttagt

SEQ ID NO: 43706 - RNA, 30 nt, Synthetic Construct; identical to SEQ ID NO: 2274
  source 1..30: mol_type = other RNA

SEQ ID NO: 43707 - RNA, 26 nt, Synthetic Construct
  source 1..26: mol_type = other RNA
gacttaccaaacctatgcaaactccg

SEQ ID NO: 43708 - RNA, 26 nt, Synthetic Construct
  source 1..26: mol_type = other RNA
gacttaccaaacctatgcaaactccg

SEQ ID NO: 43709 - RNA, 20 nt, Synthetic Construct
  source 1..20: mol_type = other RNA
tcctgtctgaatatgggggg

SEQ ID NO: 43710 - RNA, 20 nt, Synthetic Construct
  source 1..20: mol_type = other RNA
tcctgtctgaatatgggggg

SEQ ID NO: 43711 - RNA, 23 nt, Synthetic Construct
  source 1..23: mol_type = other RNA
tagcaccatttgaaatcagtgtt

SEQ ID NO: 43712 - RNA, 22 nt, Synthetic Construct
  source 1..22: mol_type = other RNA
tcctgtactgagctgccctgag

SEQ ID NO: 43713 - RNA, 22 nt, Synthetic Construct
  source 1..22: mol_type = other RNA
tcctgtactgagctgccctgag

SEQ ID NO: 43714 - RNA, 22 nt, Synthetic Construct
  source 1..22: mol_type = other RNA
tgaggtagtagtctgtgctgtt

SEQ ID NO: 43715 - RNA, 22 nt, Synthetic Construct
  source 1..22: mol_type = other RNA
tgaggtagtagtctgtgctgtt

SEQ ID NO: 43716 - RNA, 23 nt, Synthetic Construct
  source 1..23: mol_type = other RNA
tgaggggcagggagcgagacttt

SEQ ID NO: 43717 - RNA, 23 nt, Synthetic Construct
  source 1..23: mol_type = other RNA
tgaggggcagggagcgagacttt

SEQ ID NO: 43718 - RNA, 21 nt, Synthetic Construct
  source 1..21: mol_type = other RNA
ctttgttcgattccgttgagt

SEQ ID NO: 43719 - RNA, 21 nt, Synthetic Construct
  source 1..21: mol_type = other RNA
ctttgttcgattccgttgagt

SEQ ID NO: 43720 - RNA, 23 nt, Synthetic Construct
  source 1..23: mol_type = other RNA
tggtaatacgacatacttagtgt

SEQ ID NO: 43721 - RNA, 15 nt, Synthetic Construct
  source 1..15: mol_type = other RNA
ggtggctgtagctca

SEQ ID NO: 43722 - RNA, 34 nt, Synthetic Construct; identical to SEQ ID NO: 2529
  source 1..34: mol_type = other RNA

SEQ ID NO: 43723 - RNA, 37 nt, Synthetic Construct; identical to SEQ ID NO: 2482
  source 1..37: mol_type = other RNA

SEQ ID NO: 43724 - RNA, 37 nt, Synthetic Construct; identical to SEQ ID NO: 2482
  source 1..37: mol_type = other RNA

SEQ ID NO: 43725 - RNA, 23 nt, Synthetic Construct
  source 1..23: mol_type = other RNA
cgactcttagcggtggatcactc

SEQ ID NO: 43726 - RNA, 23 nt, Synthetic Construct
  source 1..23: mol_type = other RNA
cgactcttagcggtggatcactc

SEQ ID NO: 43727 - RNA, 20 nt, Synthetic Construct
  source 1..20: mol_type = other RNA
tgaggaagtaggttgtgtgg

SEQ ID NO: 43728 - RNA, 20 nt, Synthetic Construct
  source 1..20: mol_type = other RNA
tgaggaagtaggttgtgtgg

SEQ ID NO: 43729 - RNA, 17 nt, Synthetic Construct
  source 1..17: mol_type = other RNA
tggccgtcgtcagctcg

SEQ ID NO: 43730 - RNA, 31 nt, Synthetic Construct; identical to SEQ ID NO: 5506
  source 1..31: mol_type = other RNA

SEQ ID NO: 43731 - RNA, 31 nt, Synthetic Construct; identical to SEQ ID NO: 5506
  source 1..31: mol_type = other RNA

SEQ ID NO: 43732 - RNA, 22 nt, Synthetic Construct
  source 1..22: mol_type = other RNA
tcggatccgtctgagcttggct

SEQ ID NO: 43733 - RNA, 22 nt, Synthetic Construct
  source 1..22: mol_type = other RNA
gcactctaatgagactgccggt

SEQ ID NO: 43734 - RNA, 15 nt, Synthetic Construct
  source 1..15: mol_type = other RNA
cccagaaacccggtc

SEQ ID NO: 43735 - RNA, 15 nt, Synthetic Construct
  source 1..15: mol_type = other RNA
cccagaaacccggtc

SEQ ID NO: 43736 - RNA, 33 nt, Synthetic Construct; identical to SEQ ID NO: 2209
  source 1..33: mol_type = other RNA

SEQ ID NO: 43737 - RNA, 33 nt, Synthetic Construct; identical to SEQ ID NO: 2209
  source 1..33: mol_type = other RNA

SEQ ID NO: 43738 - RNA, 23 nt, Synthetic Construct
  source 1..23: mol_type = other RNA
ggaggggcagagagcgagacttt

SEQ ID NO: 43739 - RNA, 29 nt, Synthetic Construct
  source 1..29: mol_type = other RNA
ccccccccactgctaaatttgactggctt

SEQ ID NO: 43740 - RNA, 23 nt, Synthetic Construct
  source 1..23: mol_type = other RNA
tccctggtggtctagtggttagg

SEQ ID NO: 43741 - RNA, 16 nt, Synthetic Construct
  source 1..16: mol_type = other RNA
gtctacggccacacca

SEQ ID NO: 43742 - RNA, 25 nt, Synthetic Construct
  source 1..25: mol_type = other RNA
ttgaggatatgagatcgagacaaca

SEQ ID NO: 43743 - RNA, 25 nt, Synthetic Construct
  source 1..25: mol_type = other RNA
ttgaggatatgagatcgagacaaca

SEQ ID NO: 43744 - RNA, 17 nt, Synthetic Construct
  source 1..17: mol_type = other RNA
cctcgcgcgattggagc

SEQ ID NO: 43745 - RNA, 27 nt, Synthetic Construct
  source 1..27: mol_type = other RNA
ccccccactgctagatttgactggctt

SEQ ID NO: 43746 - RNA, 22 nt, Synthetic Construct
  source 1..22: mol_type = other RNA
tgaggtagtaggttgcgtggtt

SEQ ID NO: 43747 - RNA, 22 nt, Synthetic Construct
  source 1..22: mol_type = other RNA
tgaggtagtaggttgcgtggtt

SEQ ID NO: 43748 - RNA, 23 nt, Synthetic Construct
  source 1..23: mol_type = other RNA
ggcggttatgcaagacagaggtg

SEQ ID NO: 43749 - RNA, 23 nt, Synthetic Construct
  source 1..23: mol_type = other RNA
ggcggttatgcaagacagaggtg

SEQ ID NO: 43750 - RNA, 22 nt, Synthetic Construct
  source 1..22: mol_type = other RNA
cgaggtagtaggttgtgtggtt

SEQ ID NO: 43751 - RNA, 22 nt, Synthetic Construct
  source 1..22: mol_type = other RNA
cgaggtagtaggttgtgtggtt

SEQ ID NO: 43752 - RNA, 21 nt, Synthetic Construct
  source 1..21: mol_type = other RNA
taatactgcctggtaatgatg

SEQ ID NO: 43753 - RNA, 21 nt, Synthetic Construct
  source 1..21: mol_type = other RNA
taatactgcctggtaatgatg

SEQ ID NO: 43754 - RNA, 28 nt, Synthetic Construct
  source 1..28: mol_type = other RNA
gctttgatccggagatttccgaatgggg

SEQ ID NO: 43755 - RNA, 28 nt, Synthetic Construct
  source 1..28: mol_type = other RNA
gctttgatccggagatttccgaatgggg

SEQ ID NO: 43756 - RNA, 16 nt, Synthetic Construct
  source 1..16: mol_type = other RNA
gtctgcggccatacca

SEQ ID NO: 43757 - RNA, 17 nt, Synthetic Construct
  source 1..17: mol_type = other RNA
agcggtggatgatgtgg

SEQ ID NO: 43758 - RNA, 23 nt, Synthetic Construct
  source 1..23: mol_type = other RNA
gggtaatacgacgtacttagtgt

SEQ ID NO: 43759 - RNA, 22 nt, Synthetic Construct
  source 1..22: mol_type = other RNA
tgaggtagtaggttgtgtgatt

SEQ ID NO: 43760 - RNA, 22 nt, Synthetic Construct
  source 1..22: mol_type = other RNA
tgaggtagtaggttgtgtgatt

SEQ ID NO: 43761 - RNA, 19 nt, Synthetic Construct
  source 1..19: mol_type = other RNA
gtccggatcgtagtctgca

SEQ ID NO: 43762 - RNA, 19 nt, Synthetic Construct
  source 1..19: mol_type = other RNA
gtccggatcgtagtctgca

SEQ ID NO: 43763 - RNA, 23 nt, Synthetic Construct
  source 1..23: mol_type = other RNA
ggcggttatgcaagacagaggtg

SEQ ID NO: 43764 - RNA, 23 nt, Synthetic Construct
  source 1..23: mol_type = other RNA
ggcggttatgcaagacagaggtg

SEQ ID NO: 43765 - RNA, 31 nt, Synthetic Construct; identical to SEQ ID NO: 2333
  source 1..31: mol_type = other RNA

SEQ ID NO: 43766 - RNA, 17 nt, Synthetic Construct
  source 1..17: mol_type = other RNA
acagtcaggatgttggc

SEQ ID NO: 43767 - RNA, 17 nt, Synthetic Construct
  source 1..17: mol_type = other RNA
acagtcaggatgttggc

SEQ ID NO: 43768 - RNA, 20 nt, Synthetic Construct
  source 1..20: mol_type = other RNA
tcctgtaccgatcaatagtg

SEQ ID NO: 43769 - RNA, 15 nt, Synthetic Construct
  source 1..15: mol_type = other RNA
cctcgcgcgattgga

SEQ ID NO: 43770 - RNA, 15 nt, Synthetic Construct
  source 1..15: mol_type = other RNA
tcgagtcgtcctgcg

SEQ ID NO: 43771 - RNA, 15 nt, Synthetic Construct
  source 1..15: mol_type = other RNA
tcgagtcgtcctgcg

SEQ ID NO: 43772 - RNA, 21 nt, Synthetic Construct
  source 1..21: mol_type = other RNA
tgaggggcagagagcgaggct

SEQ ID NO: 43773 - RNA, 21 nt, Synthetic Construct
  source 1..21: mol_type = other RNA
tgaggggcagagagcgaggct

SEQ ID NO: 43774 - RNA, 23 nt, Synthetic Construct
  source 1..23: mol_type = other RNA
tgaggtagtaggttgcgtggttt

SEQ ID NO: 43775 - RNA, 23 nt, Synthetic Construct
  source 1..23: mol_type = other RNA
tgaggtagtaggttgcgtggttt

SEQ ID NO: 43776 - RNA, 16 nt, Synthetic Construct
  source 1..16: mol_type = other RNA
gggtgaaagcggggga

SEQ ID NO: 43777 - RNA, 21 nt, Synthetic Construct
  source 1..21: mol_type = other RNA
ttcaagtaattcaggataggt

SEQ ID NO: 43778 - RNA, 21 nt, Synthetic Construct
  source 1..21: mol_type = other RNA
ttcaagtaattcaggataggt

SEQ ID NO: 43779 - RNA, 19 nt, Synthetic Construct
  source 1..19: mol_type = other RNA
gggtgcaagcgttaatcgg

SEQ ID NO: 43780 - RNA, 19 nt, Synthetic Construct
  source 1..19: mol_type = other RNA
gggtgcaagcgttaatcgg

SEQ ID NO: 43781 - RNA, 23 nt, Synthetic Construct
  source 1..23: mol_type = other RNA
tggtaatacgacgtacttagtgc

SEQ ID NO: 43782 - RNA, 23 nt, Synthetic Construct
  source 1..23: mol_type = other RNA
tggtaatacgacgtacttagtgc

SEQ ID NO: 43783 - RNA, 23 nt, Synthetic Construct
  source 1..23: mol_type = other RNA
tccagtactgagctgccccgaga

SEQ ID NO: 43784 - RNA, 23 nt, Synthetic Construct
  source 1..23: mol_type = other RNA
tccagtactgagctgccccgaga

SEQ ID NO: 43785 - RNA, 22 nt, Synthetic Construct
  source 1..22: mol_type = other RNA
caaagtgctgttcgtgcaggta

SEQ ID NO: 43786 - RNA, 22 nt, Synthetic Construct
  source 1..22: mol_type = other RNA
caaagtgctgttcgtgcaggta

SEQ ID NO: 43787 - RNA, 15 nt, Synthetic Construct
  source 1..15: mol_type = other RNA
tagagtagggcggga

SEQ ID NO: 43788 - RNA, 30 nt, Synthetic Construct; identical to SEQ ID NO: 3933
  source 1..30: mol_type = other RNA

SEQ ID NO: 43789 - RNA, 30 nt, Synthetic Construct; identical to SEQ ID NO: 3933
  source 1..30: mol_type = other RNA

SEQ ID NO: 43790 - RNA, 21 nt, Synthetic Construct
  source 1..21: mol_type = other RNA
tcccagtaaacggcggccgta

SEQ ID NO: 43791 - RNA, 17 nt, Synthetic Construct
  source 1..17: mol_type = other RNA
ggcccttatgggtaggg

SEQ ID NO: 43792 - RNA, 18 nt, Synthetic Construct
  source 1..18: mol_type = other RNA
gtccggatcgtagtctgc

SEQ ID NO: 43793 - RNA, 18 nt, Synthetic Construct
  source 1..18: mol_type = other RNA
gtccggatcgtagtctgc

SEQ ID NO: 43794 - RNA, 22 nt, Synthetic Construct
  source 1..22: mol_type = other RNA
tgaggtagtaggttatgtggtt

SEQ ID NO: 43795 - RNA, 22 nt, Synthetic Construct
  source 1..22: mol_type = other RNA
tgaggtagtaggttatgtggtt

SEQ ID NO: 43796 - RNA, 22 nt, Synthetic Construct
  source 1..22: mol_type = other RNA
gctcacggaaagagaatgaagc

SEQ ID NO: 43797 - RNA, 22 nt, Synthetic Construct
  source 1..22: mol_type = other RNA
gctcacggaaagagaatgaagc

SEQ ID NO: 43798 - RNA, 31 nt, Synthetic Construct; identical to SEQ ID NO: 1627
  source 1..31: mol_type = other RNA

SEQ ID NO: 43799 - RNA, 31 nt, Synthetic Construct; identical to SEQ ID NO: 1627
  source 1..31: mol_type = other RNA

SEQ ID NO: 43800 - RNA, 23 nt, Synthetic Construct
  source 1..23: mol_type = other RNA
atatcggaacgtgcccagtcgtg

SEQ ID NO: 43801 - RNA, 21 nt, Synthetic Construct
  source 1..21: mol_type = other RNA
gtagcgaaattccttgtcggg

SEQ ID NO: 43802 - RNA, 21 nt, Synthetic Construct
  source 1..21: mol_type = other RNA
gtagcgaaattccttgtcggg

SEQ ID NO: 43803 - RNA, 21 nt, Synthetic Construct
  source 1..21: mol_type = other RNA
tgaggtagcaggttgtgtggt

SEQ ID NO: 43804 - RNA, 21 nt, Synthetic Construct
  source 1..21: mol_type = other RNA
tgaggtagcaggttgtgtggt

SEQ ID NO: 43805 - RNA, 25 nt, Synthetic Construct
  source 1..25: mol_type = other RNA
gagaaagctcacaagaactgctaac

SEQ ID NO: 43806 - RNA, 25 nt, Synthetic Construct
  source 1..25: mol_type = other RNA
gagaaagctcacaagaactgctaac

SEQ ID NO: 43807 - RNA, 20 nt, Synthetic Construct
  source 1..20: mol_type = other RNA
tgaggtagtaggttgtgtgt

SEQ ID NO: 43808 - RNA, 16 nt, Synthetic Construct
  source 1..16: mol_type = other RNA
gtctacagccatacca

SEQ ID NO: 43809 - RNA, 16 nt, Synthetic Construct
  source 1..16: mol_type = other RNA
gtctacagccatacca

SEQ ID NO: 43810 - RNA, 15 nt, Synthetic Construct
  source 1..15: mol_type = other RNA
aggtgggaggctttg

SEQ ID NO: 43811 - RNA, 15 nt, Synthetic Construct
  source 1..15: mol_type = other RNA
aggtgggaggctttg

SEQ ID NO: 43812 - RNA, 17 nt, Synthetic Construct
  source 1..17: mol_type = other RNA
ccgtgtgaaagtaggtc

SEQ ID NO: 43813 - RNA, 17 nt, Synthetic Construct
  source 1..17: mol_type = other RNA
ccgtgtgaaagtaggtc

SEQ ID NO: 43814 - RNA, 27 nt, Synthetic Construct
  source 1..27: mol_type = other RNA
ccccccactgctaaatttgaccggctt

SEQ ID NO: 43815 - RNA, 25 nt, Synthetic Construct
  source 1..25: mol_type = other RNA
ttgaggatacgagatcgagacgaca

SEQ ID NO: 43816 - RNA, 25 nt, Synthetic Construct
  source 1..25: mol_type = other RNA
ttgaggatacgagatcgagacgaca

SEQ ID NO: 43817 - RNA, 22 nt, Synthetic Construct
  source 1..22: mol_type = other RNA
tgaggaagtaggttgtgtggtt

SEQ ID NO: 43818 - RNA, 22 nt, Synthetic Construct
  source 1..22: mol_type = other RNA
tgaggaagtaggttgtgtggtt

SEQ ID NO: 43819 - RNA, 19 nt, Synthetic Construct
  source 1..19: mol_type = other RNA
tggccgtcgtcagctcgtg

SEQ ID NO: 43820 - RNA, 19 nt, Synthetic Construct
  source 1..19: mol_type = other RNA
tggccgtcgtcagctcgtg

SEQ ID NO: 43821 - RNA, 22 nt, Synthetic Construct
  source 1..22: mol_type = other RNA
tgaggtagtaggttgtgtagtt

SEQ ID NO: 43822 - RNA, 26 nt, Synthetic Construct
  source 1..26: mol_type = other RNA
atgcgagagtaggacgttgccaggtt

SEQ ID NO: 43823 - RNA, 26 nt, Synthetic Construct
  source 1..26: mol_type = other RNA
atgcgagagtaggacgttgccaggtt

SEQ ID NO: 43824 - RNA, 21 nt, Synthetic Construct
  source 1..21: mol_type = other RNA
cactgatcgagtcgtcctgcg

SEQ ID NO: 43825 - RNA, 21 nt, Synthetic Construct
  source 1..21: mol_type = other RNA
cactgatcgagtcgtcctgcg

SEQ ID NO: 43826 - RNA, 22 nt, Synthetic Construct
  source 1..22: mol_type = other RNA
tgaggtagcagtttgtgctgtt

SEQ ID NO: 43827 - RNA, 22 nt, Synthetic Construct
  source 1..22: mol_type = other RNA
tgaggtagcagtttgtgctgtt

SEQ ID NO: 43828 - RNA, 20 nt, Synthetic Construct
  source 1..20: mol_type = other RNA
tgaggcagtaggttgtgtgg

SEQ ID NO: 43829 - RNA, 20 nt, Synthetic Construct
  source 1..20: mol_type = other RNA
tgaggcagtaggttgtgtgg

SEQ ID NO: 43830 - RNA, 21 nt, Synthetic Construct
  source 1..21: mol_type = other RNA
tgaggaagtaggttgtatagt

SEQ ID NO: 43831 - RNA, 21 nt, Synthetic Construct
  source 1..21: mol_type = other RNA
tgaggaagtaggttgtatagt

SEQ ID NO: 43832 - RNA, 20 nt, Synthetic Construct
  source 1..20: mol_type = other RNA
tgaggcagtaggttgtatag

SEQ ID NO: 43833 - RNA, 20 nt, Synthetic Construct
  source 1..20: mol_type = other RNA
tgaggcagtaggttgtatag

SEQ ID NO: 43834 - RNA, 21 nt, Synthetic Construct
  source 1..21: mol_type = other RNA
cgaggggcagagagcgagact

SEQ ID NO: 43835 - RNA, 21 nt, Synthetic Construct
  source 1..21: mol_type = other RNA
cgaggggcagagagcgagact

SEQ ID NO: 43836 - RNA, 18 nt, Synthetic Construct
  source 1..18: mol_type = other RNA
cctgtaccgatcaatagt

SEQ ID NO: 43837 - RNA, 18 nt, Synthetic Construct
  source 1..18: mol_type = other RNA
cctgtaccgatcaatagt

SEQ ID NO: 43838 - RNA, 33 nt, Synthetic Construct; identical to SEQ ID NO: 10232
  source 1..33: mol_type = other RNA

SEQ ID NO: 43839 - RNA, 33 nt, Synthetic Construct; identical to SEQ ID NO: 10232
  source 1..33: mol_type = other RNA

SEQ ID NO: 43840 - RNA, 24 nt, Synthetic Construct
  source 1..24: mol_type = other RNA
tgtaaacatccttgactggaagct

SEQ ID NO: 43841 - RNA, 24 nt, Synthetic Construct
  source 1..24: mol_type = other RNA
tgtaaacatccttgactggaagct

SEQ ID NO: 43842 - RNA, 23 nt, Synthetic Construct
  source 1..23: mol_type = other RNA
cgaggggcagagagcgagacttt

SEQ ID NO: 43843 - RNA, 16 nt, Synthetic Construct
  source 1..16: mol_type = other RNA
gcggtggatgatgtgg

SEQ ID NO: 43844 - RNA, 23 nt, Synthetic Construct
  source 1..23: mol_type = other RNA
tgaggggcagagagcgagacctt

SEQ ID NO: 43845 - RNA, 23 nt, Synthetic Construct
  source 1..23: mol_type = other RNA
tgaggggcagagagcgagacctt

SEQ ID NO: 43846 - RNA, 33 nt, Synthetic Construct; identical to SEQ ID NO: 1982
  source 1..33: mol_type = other RNA

SEQ ID NO: 43847 - RNA, 17 nt, Synthetic Construct
  source 1..17: mol_type = other RNA
ctaatgagactgccggt

SEQ ID NO: 43848 - RNA, 17 nt, Synthetic Construct
  source 1..17: mol_type = other RNA
ctaatgagactgccggt

SEQ ID NO: 43849 - RNA, 20 nt, Synthetic Construct
  source 1..20: mol_type = other RNA
caggacagtgaaacgagtca

SEQ ID NO: 43850 - RNA, 20 nt, Synthetic Construct
  source 1..20: mol_type = other RNA
caggacagtgaaacgagtca

SEQ ID NO: 43851 - RNA, 28 nt, Synthetic Construct
  source 1..28: mol_type = other RNA
gctttacattggactttgaacagatctg

SEQ ID NO: 43852 - RNA, 28 nt, Synthetic Construct
  source 1..28: mol_type = other RNA
gctttacattggactttgaacagatctg

SEQ ID NO: 43853 - RNA, 16 nt, Synthetic Construct
  source 1..16: mol_type = other RNA
gggtctgtagctcagt

SEQ ID NO: 43854 - RNA, 16 nt, Synthetic Construct
  source 1..16: mol_type = other RNA
gggtctgtagctcagt

SEQ ID NO: 43855 - RNA, 21 nt, Synthetic Construct
  source 1..21: mol_type = other RNA
tgaggtagtaggttgtgaggt

SEQ ID NO: 43856 - RNA, 21 nt, Synthetic Construct
  source 1..21: mol_type = other RNA
tgaggtagtaggttgtgaggt

SEQ ID NO: 43857 - RNA, 18 nt, Synthetic Construct
  source 1..18: mol_type = other RNA
tcagtagctcgaggaaaa

SEQ ID NO: 43858 - RNA, 18 nt, Synthetic Construct
  source 1..18: mol_type = other RNA
tcagtagctcgaggaaaa

SEQ ID NO: 43859 - RNA, 35 nt, Synthetic Construct; identical to SEQ ID NO: 2354
  source 1..35: mol_type = other RNA

SEQ ID NO: 43860 - RNA, 22 nt, Synthetic Construct
  source 1..22: mol_type = other RNA
ccggtcccaagggtatggctgt

SEQ ID NO: 43861 - RNA, 33 nt, Synthetic Construct; identical to SEQ ID NO: 2386
  source 1..33: mol_type = other RNA

SEQ ID NO: 43862 - RNA, 16 nt, Synthetic Construct
  source 1..16: mol_type = other RNA
agtcaggatgttggct

SEQ ID NO: 43863 - RNA, 16 nt, Synthetic Construct
  source 1..16: mol_type = other RNA
agtcaggatgttggct

SEQ ID NO: 43864 - RNA, 22 nt, Synthetic Construct
  source 1..22: mol_type = other RNA
tgagatagtagtttgtgctgtt

SEQ ID NO: 43865 - RNA, 22 nt, Synthetic Construct
  source 1..22: mol_type = other RNA
tgagatagtagtttgtgctgtt

SEQ ID NO: 43866 - RNA, 23 nt, Synthetic Construct
  source 1..23: mol_type = other RNA
tctttggttatctagctgtatga

SEQ ID NO: 43867 - RNA, 32 nt, Synthetic Construct; identical to SEQ ID NO: 4710
  source 1..32: mol_type = other RNA

SEQ ID NO: 43868 - RNA, 32 nt, Synthetic Construct; identical to SEQ ID NO: 4710
  source 1..32: mol_type = other RNA

SEQ ID NO: 43869 - RNA, 34 nt, Synthetic Construct; identical to SEQ ID NO: 2186
  source 1..34: mol_type = other RNA

SEQ ID NO: 43870 - RNA, 32 nt, Synthetic Construct; identical to SEQ ID NO: 5582
  source 1..32: mol_type = other RNA

SEQ ID NO: 43871 - RNA, 32 nt, Synthetic Construct; identical to SEQ ID NO: 5582
  source 1..32: mol_type = other RNA

SEQ ID NO: 43872 - RNA, 17 nt, Synthetic Construct
  source 1..17: mol_type = other RNA
gccatgccgcgtgcggg

SEQ ID NO: 43873 - RNA, 30 nt, Synthetic Construct; identical to SEQ ID NO: 2407
  source 1..30: mol_type = other RNA

SEQ ID NO: 43874 - RNA, 27 nt, Synthetic Construct
  source 1..27: mol_type = other RNA
cggtataccgaagctctaggtgcggca

SEQ ID NO: 43875 - RNA, 27 nt, Synthetic Construct
  source 1..27: mol_type = other RNA
cggtataccgaagctctaggtgcggca

SEQ ID NO: 43876 - RNA, 34 nt, Synthetic Construct; identical to SEQ ID NO: 6594
  source 1..34: mol_type = other RNA

SEQ ID NO: 43877 - RNA, 34 nt, Synthetic Construct; identical to SEQ ID NO: 6594
  source 1..34: mol_type = other RNA

SEQ ID NO: 43878 - RNA, 21 nt, Synthetic Construct
  source 1..21: mol_type = other RNA
ctttgttcgattccgttgagt

SEQ ID NO: 43879 - RNA, 21 nt, Synthetic Construct
  source 1..21: mol_type = other RNA
ctttgttcgattccgttgagt

SEQ ID NO: 43880 - RNA, 27 nt, Synthetic Construct
  source 1..27: mol_type = other RNA
ccccccactgctaaacttgactggctt

SEQ ID NO: 43881 - RNA, 20 nt, Synthetic Construct
  source 1..20: mol_type = other RNA
tcctgtctgaatatgggggg

SEQ ID NO: 43882 - RNA, 16 nt, Synthetic Construct
  source 1..16: mol_type = other RNA
ggtagctcgttgggct

SEQ ID NO: 43883 - RNA, 16 nt, Synthetic Construct
  source 1..16: mol_type = other RNA
ggtagctcgttgggct

SEQ ID NO: 43884 - RNA, 22 nt, Synthetic Construct
  source 1..22: mol_type = other RNA
tgaagtagtaggttgtgtggtt

SEQ ID NO: 43885 - RNA, 22 nt, Synthetic Construct
  source 1..22: mol_type = other RNA
tcctgtactgagctgctccgag

SEQ ID NO: 43886 - RNA, 22 nt, Synthetic Construct
  source 1..22: mol_type = other RNA
tcctgtactgagctgctccgag

SEQ ID NO: 43887 - RNA, 22 nt, Synthetic Construct
  source 1..22: mol_type = other RNA
tgtcaactggttgttgggaggg

SEQ ID NO: 43888 - RNA, 22 nt, Synthetic Construct
  source 1..22: mol_type = other RNA
tgtcaactggttgttgggaggg

SEQ ID NO: 43889 - RNA, 23 nt, Synthetic Construct
  source 1..23: mol_type = other RNA
tccagtactgagctgccccgaga

SEQ ID NO: 43890 - RNA, 23 nt, Synthetic Construct
  source 1..23: mol_type = other RNA
tccagtactgagctgccccgaga

SEQ ID NO: 43891 - RNA, 25 nt, Synthetic Construct
  source 1..25: mol_type = other RNA
ttgaggatatgagatcgagacgacg

SEQ ID NO: 43892 - RNA, 25 nt, Synthetic Construct
  source 1..25: mol_type = other RNA
ttgaggatatgagatcgagacgacg

SEQ ID NO: 43893 - RNA, 19 nt, Synthetic Construct
  source 1..19: mol_type = other RNA
tgtcaactggttgttggga

SEQ ID NO: 43894 - RNA, 19 nt, Synthetic Construct
  source 1..19: mol_type = other RNA
tgtcaactggttgttggga

SEQ ID NO: 43895 - RNA, 20 nt, Synthetic Construct
  source 1..20: mol_type = other RNA
tagcgaaattccttgtcggg

SEQ ID NO: 43896 - RNA, 20 nt, Synthetic Construct
  source 1..20: mol_type = other RNA
tagcgaaattccttgtcggg

SEQ ID NO: 43897 - RNA, 19 nt, Synthetic Construct
  source 1..19: mol_type = other RNA
gcgccgatgatagtgcgga

SEQ ID NO: 43898 - RNA, 19 nt, Synthetic Construct
  source 1..19: mol_type = other RNA
gcgccgatgatagtgcgga

SEQ ID NO: 43899 - RNA, 16 nt, Synthetic Construct
  source 1..16: mol_type = other RNA
gtctacagccatacca

SEQ ID NO: 43900 - RNA, 32 nt, Synthetic Construct; identical to SEQ ID NO: 4734
  source 1..32: mol_type = other RNA

SEQ ID NO: 43901 - RNA, 32 nt, Synthetic Construct; identical to SEQ ID NO: 4734
  source 1..32: mol_type = other RNA

SEQ ID NO: 43902 - RNA, 22 nt, Synthetic Construct
  source 1..22: mol_type = other RNA
cctcgcgcgattggagcggccg

SEQ ID NO: 43903 - RNA, 24 nt, Synthetic Construct
  source 1..24: mol_type = other RNA
ggttgtaaaccgcttttgtcaggg

SEQ ID NO: 43904 - RNA, 24 nt, Synthetic Construct
  source 1..24: mol_type = other RNA
ggttgtaaaccgcttttgtcaggg

SEQ ID NO: 43905 - RNA, 20 nt, Synthetic Construct
  source 1..20: mol_type = other RNA
tgaggcagtaggttgtatag

SEQ ID NO: 43906 - RNA, 20 nt, Synthetic Construct
  source 1..20: mol_type = other RNA
tgaggcagtaggttgtatag

SEQ ID NO: 43907 - RNA, 35 nt, Synthetic Construct; identical to SEQ ID NO: 2762
  source 1..35: mol_type = other RNA

SEQ ID NO: 43908 - RNA, 16 nt, Synthetic Construct
  source 1..16: mol_type = other RNA
ggccgtcgtcagctcg

SEQ ID NO: 43909 - RNA, 20 nt, Synthetic Construct
  source 1..20: mol_type = other RNA
tgaggtagtaggttatgtgg

SEQ ID NO: 43910 - RNA, 20 nt, Synthetic Construct
  source 1..20: mol_type = other RNA
tgaggtagtaggttatgtgg

SEQ ID NO: 43911 - RNA, 15 nt, Synthetic Construct
  source 1..15: mol_type = other RNA
gtctcgccgacggca

SEQ ID NO: 43912 - RNA, 15 nt, Synthetic Construct
  source 1..15: mol_type = other RNA
gtctcgccgacggca

SEQ ID NO: 43913 - RNA, 20 nt, Synthetic Construct
  source 1..20: mol_type = other RNA
tagcgaaattccttgtcggg

SEQ ID NO: 43914 - RNA, 20 nt, Synthetic Construct
  source 1..20: mol_type = other RNA
tagcgaaattccttgtcggg

SEQ ID NO: 43915 - RNA, 23 nt, Synthetic Construct
  source 1..23: mol_type = other RNA
tcctgtactgagccgccccgagt

SEQ ID NO: 43916 - RNA, 23 nt, Synthetic Construct
  source 1..23: mol_type = other RNA
tcctgtactgagccgccccgagt

SEQ ID NO: 43917 - RNA, 20 nt, Synthetic Construct
  source 1..20: mol_type = other RNA
tgaggtagtgggttgtgtgg

SEQ ID NO: 43918 - RNA, 20 nt, Synthetic Construct
  source 1..20: mol_type = other RNA
tgaggtagtgggttgtgtgg

SEQ ID NO: 43919 - RNA, 33 nt, Synthetic Construct; identical to SEQ ID NO: 1982
  source 1..33: mol_type = other RNA

SEQ ID NO: 43920 - RNA, 33 nt, Synthetic Construct; identical to SEQ ID NO: 1982
  source 1..33: mol_type = other RNA

SEQ ID NO: 43921 - RNA, 16 nt, Synthetic Construct
  source 1..16: mol_type = other RNA
cgctagtaatcgcgga

SEQ ID NO: 43922 - RNA, 16 nt, Synthetic Construct
  source 1..16: mol_type = other RNA
cgctagtaatcgcgga

SEQ ID NO: 43923 - RNA, 28 nt, Synthetic Construct
  source 1..28: mol_type = other RNA
ccgtgtgaaagtaggtcatcgtcaggct

SEQ ID NO: 43924 - RNA, 19 nt, Synthetic Construct
  source 1..19: mol_type = other RNA
accaaggggtcgtgggttc

SEQ ID NO: 43925 - RNA, 19 nt, Synthetic Construct
  source 1..19: mol_type = other RNA
accaaggggtcgtgggttc

SEQ ID NO: 43926 - RNA, 23 nt, Synthetic Construct
  source 1..23: mol_type = other RNA
tcctgtaccgagctgccccgaga

SEQ ID NO: 43927 - RNA, 23 nt, Synthetic Construct
  source 1..23: mol_type = other RNA
tcctgtaccgagctgccccgaga

SEQ ID NO: 43928 - RNA, 17 nt, Synthetic Construct
  source 1..17: mol_type = other RNA
ccagtaaacggcggccg

SEQ ID NO: 43929 - RNA, 17 nt, Synthetic Construct
  source 1..17: mol_type = other RNA
ccagtaaacggcggccg

SEQ ID NO: 43930 - RNA, 20 nt, Synthetic Construct
  source 1..20: mol_type = other RNA
cgaggtagtaggttgtgtgg

SEQ ID NO: 43931 - RNA, 20 nt, Synthetic Construct
  source 1..20: mol_type = other RNA
cgaggtagtaggttgtgtgg

SEQ ID NO: 43932 - RNA, 32 nt, Synthetic Construct; identical to SEQ ID NO: 3713
  source 1..32: mol_type = other RNA

SEQ ID NO: 43933 - RNA, 32 nt, Synthetic Construct; identical to SEQ ID NO: 3713
  source 1..32: mol_type = other RNA

SEQ ID NO: 43934 - RNA, 33 nt, Synthetic Construct; identical to SEQ ID NO: 2253
  source 1..33: mol_type = other RNA

SEQ ID NO: 43935 - RNA, 33 nt, Synthetic Construct; identical to SEQ ID NO: 2253
  source 1..33: mol_type = other RNA

SEQ ID NO: 43936 - RNA, 16 nt, Synthetic Construct
  source 1..16: mol_type = other RNA
cccctggacctgtact

SEQ ID NO: 43937 - RNA, 31 nt, Synthetic Construct; identical to SEQ ID NO: 2295
  source 1..31: mol_type = other RNA

SEQ ID NO: 43938 - RNA, 22 nt, Synthetic Construct
  source 1..22: mol_type = other RNA
taaggtagtagattgtatagtt

SEQ ID NO: 43939 - RNA, 22 nt, Synthetic Construct
  source 1..22: mol_type = other RNA
taaggtagtagattgtatagtt

SEQ ID NO: 43940 - RNA, 16 nt, Synthetic Construct
  source 1..16: mol_type = other RNA
tgcacgaaagcgtggg

SEQ ID NO: 43941 - RNA, 20 nt, Synthetic Construct
  source 1..20: mol_type = other RNA
actgatcgagtcgtcctgcg

SEQ ID NO: 43942 - RNA, 20 nt, Synthetic Construct
  source 1..20: mol_type = other RNA
actgatcgagtcgtcctgcg

SEQ ID NO: 43943 - RNA, 16 nt, Synthetic Construct
  source 1..16: mol_type = other RNA
ggtagctcgttgggct

SEQ ID NO: 43944 - RNA, 16 nt, Synthetic Construct
  source 1..16: mol_type = other RNA
ggtagctcgttgggct

SEQ ID NO: 43945 - RNA, 30 nt, Synthetic Construct; identical to SEQ ID NO: 1771
  source 1..30: mol_type = other RNA

SEQ ID NO: 43946 - RNA, 27 nt, Synthetic Construct
  source 1..27: mol_type = other RNA
ncccccactgctaaatttgactggctt

SEQ ID NO: 43947 - RNA, 21 nt, Synthetic Construct
  source 1..21: mol_type = other RNA
tgaggtagtaggttgtgaggt

SEQ ID NO: 43948 - RNA, 21 nt, Synthetic Construct
  source 1..21: mol_type = other RNA
tgaggtagtaggttgtgaggt

SEQ ID NO: 43949 - RNA, 20 nt, Synthetic Construct
  source 1..20: mol_type = other RNA
gaatcgctagtaatcgcgga

SEQ ID NO: 43950 - RNA, 20 nt, Synthetic Construct
  source 1..20: mol_type = other RNA
gaatcgctagtaatcgcgga

SEQ ID NO: 43951 - RNA, 23 nt, Synthetic Construct
  source 1..23: mol_type = other RNA
tcctgtgctgagctgccccgagt

SEQ ID NO: 43952 - RNA, 23 nt, Synthetic Construct
  source 1..23: mol_type = other RNA
tcctgtgctgagctgccccgagt

SEQ ID NO: 43953 - RNA, 20 nt, Synthetic Construct
  source 1..20: mol_type = other RNA
ggtcccaagggtatggctgt

SEQ ID NO: 43954 - RNA, 20 nt, Synthetic Construct
  source 1..20: mol_type = other RNA
ggtcccaagggtatggctgt

SEQ ID NO: 43955 - RNA, 34 nt, Synthetic Construct; identical to SEQ ID NO: 1526
  source 1..34: mol_type = other RNA

SEQ ID NO: 43956 - RNA, 20 nt, Synthetic Construct
  source 1..20: mol_type = other RNA
ccgcagagtacagcttggga

SEQ ID NO: 43957 - RNA, 20 nt, Synthetic Construct
  source 1..20: mol_type = other RNA
ccgcagagtacagcttggga

SEQ ID NO: 43958 - RNA, 23 nt, Synthetic Construct
  source 1..23: mol_type = other RNA
tcctgaactgagctgccccgaga

SEQ ID NO: 43959 - RNA, 23 nt, Synthetic Construct
  source 1..23: mol_type = other RNA
tcctgaactgagctgccccgaga

SEQ ID NO: 43960 - RNA, 31 nt, Synthetic Construct; identical to SEQ ID NO: 2215
  source 1..31: mol_type = other RNA

SEQ ID NO: 43961 - RNA, 17 nt, Synthetic Construct
  source 1..17: mol_type = other RNA
accaaggggtcgtgggt

SEQ ID NO: 43962 - RNA, 17 nt, Synthetic Construct
  source 1..17: mol_type = other RNA
accaaggggtcgtgggt

SEQ ID NO: 43963 - RNA, 27 nt, Synthetic Construct
  source 1..27: mol_type = other RNA
ccccccactgctaaattcgactggctt

SEQ ID NO: 43964 - RNA, 22 nt, Synthetic Construct
  source 1..22: mol_type = other RNA
catcgcacttgtctcggtctga

SEQ ID NO: 43965 - RNA, 22 nt, Synthetic Construct
  source 1..22: mol_type = other RNA
catcgcacttgtctcggtctga

SEQ ID NO: 43966 - RNA, 43 nt, Synthetic Construct; identical to SEQ ID NO: 6202
  source 1..43: mol_type = other RNA

SEQ ID NO: 43967 - RNA, 43 nt, Synthetic Construct; identical to SEQ ID NO: 6202
  source 1..43: mol_type = other RNA

SEQ ID NO: 43968 - RNA, 23 nt, Synthetic Construct
  source 1..23: mol_type = other RNA
tcctgtactgagccgccccgagt

SEQ ID NO: 43969 - RNA, 23 nt, Synthetic Construct
  source 1..23: mol_type = other RNA
tcctgtactgagccgccccgagt

SEQ ID NO: 43970 - RNA, 34 nt, Synthetic Construct; identical to SEQ ID NO: 13733
  source 1..34: mol_type = other RNA

SEQ ID NO: 43971 - RNA, 34 nt, Synthetic Construct; identical to SEQ ID NO: 13733
  source 1..34: mol_type = other RNA

SEQ ID NO: 43972 - RNA, 31 nt, Synthetic Construct; identical to SEQ ID NO: 2310
  source 1..31: mol_type = other RNA

SEQ ID NO: 43973 - RNA, 21 nt, Synthetic Construct
  source 1..21: mol_type = other RNA
tccttcattccaccggagtct

SEQ ID NO: 43974 - RNA, 21 nt, Synthetic Construct
  source 1..21: mol_type = other RNA
tccttcattccaccggagtct

SEQ ID NO: 43975 - RNA, 23 nt, Synthetic Construct
  source 1..23: mol_type = other RNA
cgaggggcagagagcgagacttt

SEQ ID NO: 43976 - RNA, 23 nt, Synthetic Construct
  source 1..23: mol_type = other RNA
cgaggggcagagagcgagacttt

SEQ ID NO: 43977 - RNA, 18 nt, Synthetic Construct
  source 1..18: mol_type = other RNA
tctaatgagactgccggt

SEQ ID NO: 43978 - RNA, 18 nt, Synthetic Construct
  source 1..18: mol_type = other RNA
tctaatgagactgccggt

SEQ ID NO: 43979 - RNA, 21 nt, Synthetic Construct
  source 1..21: mol_type = other RNA
tcctgtactgagccgccccga

SEQ ID NO: 43980 - RNA, 21 nt, Synthetic Construct
  source 1..21: mol_type = other RNA
tcctgtactgagccgccccga

SEQ ID NO: 43981 - RNA, 19 nt, Synthetic Construct
  source 1..19: mol_type = other RNA
agcgaaattccttgtcggg

SEQ ID NO: 43982 - RNA, 21 nt, Synthetic Construct
  source 1..21: mol_type = other RNA
tcctgtctgaatatgggggga

SEQ ID NO: 43983 - RNA, 21 nt, Synthetic Construct
  source 1..21: mol_type = other RNA
tcctgtctgaatatgggggga

SEQ ID NO: 43984 - RNA, 22 nt, Synthetic Construct
  source 1..22: mol_type = other RNA
tgtggtagtaggttgtatagtt

SEQ ID NO: 43985 - RNA, 22 nt, Synthetic Construct
  source 1..22: mol_type = other RNA
tgtggtagtaggttgtatagtt

SEQ ID NO: 43986 - RNA, 34 nt, Synthetic Construct; identical to SEQ ID NO: 6757
  source 1..34: mol_type = other RNA

SEQ ID NO: 43987 - RNA, 34 nt, Synthetic Construct; identical to SEQ ID NO: 6757
  source 1..34: mol_type = other RNA

SEQ ID NO: 43988 - RNA, 23 nt, Synthetic Construct
  source 1..23: mol_type = other RNA
gtaaacatccttgactggaagct

SEQ ID NO: 43989 - RNA, 23 nt, Synthetic Construct
  source 1..23: mol_type = other RNA
gtaaacatccttgactggaagct

SEQ ID NO: 43990 - RNA, 28 nt, Synthetic Construct
  source 1..28: mol_type = other RNA
tgttggttcaagcgtgtagtcgtgctct

SEQ ID NO: 43991 - RNA, 28 nt, Synthetic Construct
  source 1..28: mol_type = other RNA
tgttggttcaagcgtgtagtcgtgctct

SEQ ID NO: 43992 - RNA, 22 nt, Synthetic Construct
  source 1..22: mol_type = other RNA
gcgttgcaaccagtgccggggg

SEQ ID NO: 43993 - RNA, 22 nt, Synthetic Construct
  source 1..22: mol_type = other RNA
gcgttgcaaccagtgccggggg

SEQ ID NO: 43994 - RNA, 32 nt, Synthetic Construct; identical to SEQ ID NO: 4734
  source 1..32: mol_type = other RNA

SEQ ID NO: 43995 - RNA, 32 nt, Synthetic Construct; identical to SEQ ID NO: 4734
  source 1..32: mol_type = other RNA

SEQ ID NO: 43996 - RNA, 22 nt, Synthetic Construct
  source 1..22: mol_type = other RNA
cgaggtagtagtttgtgctgtt

SEQ ID NO: 43997 - RNA, 22 nt, Synthetic Construct
  source 1..22: mol_type = other RNA
cgaggtagtagtttgtgctgtt

SEQ ID NO: 43998 - RNA, 21 nt, Synthetic Construct
  source 1..21: mol_type = other RNA
tgaggtagtgggttgtgtggt

SEQ ID NO: 43999 - RNA, 21 nt, Synthetic Construct
  source 1..21: mol_type = other RNA
tgaggtagtgggttgtgtggt

SEQ ID NO: 44000 - RNA, 35 nt, Synthetic Construct; identical to SEQ ID NO: 757
  source 1..35: mol_type = other RNA

SEQ ID NO: 44001 - RNA, 35 nt, Synthetic Construct; identical to SEQ ID NO: 757
  source 1..35: mol_type = other RNA

SEQ ID NO: 44002 - RNA, 37 nt, Synthetic Construct; identical to SEQ ID NO: 4277
  source 1..37: mol_type = other RNA

SEQ ID NO: 44003 - RNA, 37 nt, Synthetic Construct; identical to SEQ ID NO: 4277
  source 1..37: mol_type = other RNA

SEQ ID NO: 44004 - RNA, 17 nt, Synthetic Construct
  source 1..17: mol_type = other RNA
ctaatgagactgccggt

SEQ ID NO: 44005 - RNA, 17 nt, Synthetic Construct
  source 1..17: mol_type = other RNA
ctaatgagactgccggt

SEQ ID NO: 44006 - RNA, 27 nt, Synthetic Construct
  source 1..27: mol_type = other RNA
ccccccactactaaatttgactggctt

SEQ ID NO: 44007 - RNA, 22 nt, Synthetic Construct
  source 1..22: mol_type = other RNA
taaggtagtaggttgtgtggtt

SEQ ID NO: 44008 - RNA, 22 nt, Synthetic Construct
  source 1..22: mol_type = other RNA
taaggtagtaggttgtgtggtt

SEQ ID NO: 44009 - RNA, 17 nt, Synthetic Construct
  source 1..17: mol_type = other RNA
taggtcatcgtcaggct

SEQ ID NO: 44010 - RNA, 17 nt, Synthetic Construct
  source 1..17: mol_type = other RNA
taggtcatcgtcaggct

SEQ ID NO: 44011 - RNA, 16 nt, Synthetic Construct
  source 1..16: mol_type = other RNA
gatctgtagctggtct

SEQ ID NO: 44012 - RNA, 17 nt, Synthetic Construct
  source 1..17: mol_type = other RNA
gcgtagatatgcggagg

SEQ ID NO: 44013 - RNA, 18 nt, Synthetic Construct
  source 1..18: mol_type = other RNA
cgtgttcggaagattttc

SEQ ID NO: 44014 - RNA, 18 nt, Synthetic Construct
  source 1..18: mol_type = other RNA
cgtgttcggaagattttc

SEQ ID NO: 44015 - RNA, 34 nt, Synthetic Construct; identical to SEQ ID NO: 2019
  source 1..34: mol_type = other RNA

SEQ ID NO: 44016 - RNA, 21 nt, Synthetic Construct
  source 1..21: mol_type = other RNA
ggaatcgctagtaatcgcgga

SEQ ID NO: 44017 - RNA, 27 nt, Synthetic Construct
  source 1..27: mol_type = other RNA
ccccccactgctaaatctgactggctt

SEQ ID NO: 44018 - RNA, 22 nt, Synthetic Construct
  source 1..22: mol_type = other RNA
cccataaagtagaaagcactac

SEQ ID NO: 44019 - RNA, 22 nt, Synthetic Construct
  source 1..22: mol_type = other RNA
cccataaagtagaaagcactac

SEQ ID NO: 44020 - RNA, 23 nt, Synthetic Construct
  source 1..23: mol_type = other RNA
tgaagggcagagagcgagacttt

SEQ ID NO: 44021 - RNA, 23 nt, Synthetic Construct
  source 1..23: mol_type = other RNA
tgaagggcagagagcgagacttt

SEQ ID NO: 44022 - RNA, 17 nt, Synthetic Construct
  source 1..17: mol_type = other RNA
tcccctggacctgtact

SEQ ID NO: 44023 - RNA, 17 nt, Synthetic Construct
  source 1..17: mol_type = other RNA
tcccctggacctgtact

SEQ ID NO: 44024 - RNA, 22 nt, Synthetic Construct
  source 1..22: mol_type = other RNA
tgaggtagtaggttgtgtgatt

SEQ ID NO: 44025 - RNA, 22 nt, Synthetic Construct
  source 1..22: mol_type = other RNA
tgaggtagtaggttgtgtgatt

SEQ ID NO: 44026 - RNA, 15 nt, Synthetic Construct
  source 1..15: mol_type = other RNA
cccagaaacccggtc

SEQ ID NO: 44027 - RNA, 15 nt, Synthetic Construct
  source 1..15: mol_type = other RNA
cccagaaacccggtc

SEQ ID NO: 44028 - RNA, 19 nt, Synthetic Construct
  source 1..19: mol_type = other RNA
cctgtaccgatcaatagtg

SEQ ID NO: 44029 - RNA, 19 nt, Synthetic Construct
  source 1..19: mol_type = other RNA
cctgtaccgatcaatagtg

SEQ ID NO: 44030 - RNA, 43 nt, Synthetic Construct; identical to SEQ ID NO: 1204
  source 1..43: mol_type = other RNA

SEQ ID NO: 44031 - RNA, 43 nt, Synthetic Construct; identical to SEQ ID NO: 1204
  source 1..43: mol_type = other RNA

SEQ ID NO: 44032 - RNA, 22 nt, Synthetic Construct
  source 1..22: mol_type = other RNA
tcggatccgtctgagcttggct

SEQ ID NO: 44033 - RNA, 22 nt, Synthetic Construct
  source 1..22: mol_type = other RNA
tcggatccgtctgagcttggct

SEQ ID NO: 44034 - RNA, 30 nt, Synthetic Construct; identical to SEQ ID NO: 3933
  source 1..30: mol_type = other RNA

SEQ ID NO: 44035 - RNA, 17 nt, Synthetic Construct
  source 1..17: mol_type = other RNA
ccaaggggtcgtgggtt

SEQ ID NO: 44036 - RNA, 17 nt, Synthetic Construct
  source 1..17: mol_type = other RNA
ccaaggggtcgtgggtt

SEQ ID NO: 44037 - RNA, 30 nt, Synthetic Construct; identical to SEQ ID NO: 2353
  source 1..30: mol_type = other RNA

SEQ ID NO: 44038 - RNA, 16 nt, Synthetic Construct
  source 1..16: mol_type = other RNA
ggcgggggtcgctggt

SEQ ID NO: 44039 - RNA, 16 nt, Synthetic Construct
  source 1..16: mol_type = other RNA
cccagaaacccggtcg

SEQ ID NO: 44040 - RNA, 16 nt, Synthetic Construct
  source 1..16: mol_type = other RNA
cccagaaacccggtcg

SEQ ID NO: 44041 - RNA, 38 nt, Synthetic Construct; identical to SEQ ID NO: 2492
  source 1..38: mol_type = other RNA

SEQ ID NO: 44042 - RNA, 23 nt, Synthetic Construct
  source 1..23: mol_type = other RNA
tgaagggcagagagcgagacttt

SEQ ID NO: 44043 - RNA, 16 nt, Synthetic Construct
  source 1..16: mol_type = other RNA
accgcttttgtcaggg

SEQ ID NO: 44044 - RNA, 16 nt, Synthetic Construct
  source 1..16: mol_type = other RNA
accgcttttgtcaggg

SEQ ID NO: 44045 - RNA, 18 nt, Synthetic Construct
  source 1..18: mol_type = other RNA
tcccctggacctgtactg

SEQ ID NO: 44046 - RNA, 18 nt, Synthetic Construct
  source 1..18: mol_type = other RNA
tcccctggacctgtactg

SEQ ID NO: 44047 - RNA, 15 nt, Synthetic Construct
  source 1..15: mol_type = other RNA
ggtggctgtagctca

SEQ ID NO: 44048 - RNA, 15 nt, Synthetic Construct
  source 1..15: mol_type = other RNA
ggtggctgtagctca

SEQ ID NO: 44049 - RNA, 15 nt, Synthetic Construct
  source 1..15: mol_type = other RNA
tagagtagggcggga

SEQ ID NO: 44050 - RNA, 19 nt, Synthetic Construct
  source 1..19: mol_type = other RNA
tgtcaactggttgttggga

SEQ ID NO: 44051 - RNA, 19 nt, Synthetic Construct
  source 1..19: mol_type = other RNA
tgtcaactggttgttggga

SEQ ID NO: 44052 - RNA, 23 nt, Synthetic Construct
  source 1..23: mol_type = other RNA
ccctgtactgagctgccccgagt

SEQ ID NO: 44053 - RNA, 23 nt, Synthetic Construct
  source 1..23: mol_type = other RNA
ccctgtactgagctgccccgagt

SEQ ID NO: 44054 - RNA, 16 nt, Synthetic Construct
  source 1..16: mol_type = other RNA
ccggaggaaggtgggg

SEQ ID NO: 44055 - RNA, 16 nt, Synthetic Construct
  source 1..16: mol_type = other RNA
ccggaggaaggtgggg

SEQ ID NO: 44056 - RNA, 21 nt, Synthetic Construct
  source 1..21: mol_type = other RNA
ttcaagtaattcaggataggt

SEQ ID NO: 44057 - RNA, 20 nt, Synthetic Construct
  source 1..20: mol_type = other RNA
gtcagtttgtcaaatacccc

SEQ ID NO: 44058 - RNA, 15 nt, Synthetic Construct
  source 1..15: mol_type = other RNA
gctatgggatttgtt

SEQ ID NO: 44059 - RNA, 15 nt, Synthetic Construct
  source 1..15: mol_type = other RNA
gctatgggatttgtt

SEQ ID NO: 44060 - RNA, 16 nt, Synthetic Construct
  source 1..16: mol_type = other RNA
gcgtagatatgcggag

SEQ ID NO: 44061 - RNA, 20 nt, Synthetic Construct
  source 1..20: mol_type = other RNA
gtgccgaagctgtgggattg

SEQ ID NO: 44062 - RNA, 20 nt, Synthetic Construct
  source 1..20: mol_type = other RNA
gtgccgaagctgtgggattg

SEQ ID NO: 44063 - RNA, 31 nt, Synthetic Construct; identical to SEQ ID NO: 2507
  source 1..31: mol_type = other RNA

SEQ ID NO: 44064 - RNA, 32 nt, Synthetic Construct; identical to SEQ ID NO: 2086
  source 1..32: mol_type = other RNA

SEQ ID NO: 44065 - RNA, 35 nt, Synthetic Construct; identical to SEQ ID NO: 2450
  source 1..35: mol_type = other RNA

SEQ ID NO: 44066 - RNA, 27 nt, Synthetic Construct
  source 1..27: mol_type = other RNA
gctttacattggactttgaacagatct

SEQ ID NO: 44067 - RNA, 27 nt, Synthetic Construct
  source 1..27: mol_type = other RNA
gctttacattggactttgaacagatct

SEQ ID NO: 44068 - RNA, 15 nt, Synthetic Construct
  source 1..15: mol_type = other RNA
agttgaccgcctggg

SEQ ID NO: 44069 - RNA, 15 nt, Synthetic Construct
  source 1..15: mol_type = other RNA
agttgaccgcctggg

SEQ ID NO: 44070 - RNA, 21 nt, Synthetic Construct
  source 1..21: mol_type = other RNA
cggtcccaagggtatggctgt

SEQ ID NO: 44071 - RNA, 31 nt, Synthetic Construct; identical to SEQ ID NO: 5506
  source 1..31: mol_type = other RNA

SEQ ID NO: 44072 - RNA, 31 nt, Synthetic Construct; identical to SEQ ID NO: 5506
  source 1..31: mol_type = other RNA

SEQ ID NO: 44073 - RNA, 27 nt, Synthetic Construct
  source 1..27: mol_type = other RNA
ccccccactgctaaatttaactggctt

SEQ ID NO: 44074 - RNA, 18 nt, Synthetic Construct
  source 1..18: mol_type = other RNA
cgactcttagcggtggat

SEQ ID NO: 44075 - RNA, 18 nt, Synthetic Construct
  source 1..18: mol_type = other RNA
cgactcttagcggtggat

SEQ ID NO: 44076 - RNA, 31 nt, Synthetic Construct; identical to SEQ ID NO: 2310
  source 1..31: mol_type = other RNA

SEQ ID NO: 44077 - RNA, 19 nt, Synthetic Construct
  source 1..19: mol_type = other RNA
ccagtaaacggcggccgta

SEQ ID NO: 44078 - RNA, 21 nt, Synthetic Construct
  source 1..21: mol_type = other RNA
tccagtactgagctgccccga

SEQ ID NO: 44079 - RNA, 21 nt, Synthetic Construct
  source 1..21: mol_type = other RNA
tccagtactgagctgccccga

SEQ ID NO: 44080 - RNA, 21 nt, Synthetic Construct
  source 1..21: mol_type = other RNA
tggggtagtaggttgtgtggt

SEQ ID NO: 44081 - RNA, 21 nt, Synthetic Construct
  source 1..21: mol_type = other RNA
tggggtagtaggttgtgtggt

SEQ ID NO: 44082 - RNA, 21 nt, Synthetic Construct
  source 1..21: mol_type = other RNA
cggagtgtgacaatggtgttt

SEQ ID NO: 44083 - RNA, 21 nt, Synthetic Construct
  source 1..21: mol_type = other RNA
cggagtgtgacaatggtgttt

SEQ ID NO: 44084 - RNA, 31 nt, Synthetic Construct; identical to SEQ ID NO: 2263
  source 1..31: mol_type = other RNA

SEQ ID NO: 44085 - RNA, 23 nt, Synthetic Construct
  source 1..23: mol_type = other RNA
tggggggcagagagcgagacttt

SEQ ID NO: 44086 - RNA, 23 nt, Synthetic Construct
  source 1..23: mol_type = other RNA
tgaggggcagagagcgaggcttt

SEQ ID NO: 44087 - RNA, 28 nt, Synthetic Construct
  source 1..28: mol_type = other RNA
gctttgatccggagatttccgaatgggg

SEQ ID NO: 44088 - RNA, 19 nt, Synthetic Construct
  source 1..19: mol_type = other RNA
gggtgcaagcgttaatcgg

SEQ ID NO: 44089 - RNA, 19 nt, Synthetic Construct
  source 1..19: mol_type = other RNA
gggtgcaagcgttaatcgg

SEQ ID NO: 44090 - RNA, 17 nt, Synthetic Construct
  source 1..17: mol_type = other RNA
cgaaattccttgtcggg

SEQ ID NO: 44091 - RNA, 15 nt, Synthetic Construct
  source 1..15: mol_type = other RNA
cggcccagactccta

SEQ ID NO: 44092 - RNA, 22 nt, Synthetic Construct
  source 1..22: mol_type = other RNA
gcactctaatgagactgccggt

SEQ ID NO: 44093 - RNA, 37 nt, Synthetic Construct; identical to SEQ ID NO: 5125
  source 1..37: mol_type = other RNA

SEQ ID NO: 44094 - RNA, 37 nt, Synthetic Construct; identical to SEQ ID NO: 5125
  source 1..37: mol_type = other RNA

SEQ ID NO: 44095 - RNA, 18 nt, Synthetic Construct
  source 1..18: mol_type = other RNA
ggtgcaagcgttaatcgg

SEQ ID NO: 44096 - RNA, 18 nt, Synthetic Construct
  source 1..18: mol_type = other RNA
ggtgcaagcgttaatcgg

SEQ ID NO: 44097 - RNA, 22 nt, Synthetic Construct
  source 1..22: mol_type = other RNA
tcactgatcgagtcgtcctgcg

SEQ ID NO: 44098 - RNA, 22 nt, Synthetic Construct
  source 1..22: mol_type = other RNA
tcactgatcgagtcgtcctgcg

SEQ ID NO: 44099 - RNA, 26 nt, Synthetic Construct
  source 1..26: mol_type = other RNA
tgtccccgcgaggggcccggggcggg

SEQ ID NO: 44100 - RNA, 26 nt, Synthetic Construct
  source 1..26: mol_type = other RNA
tgtccccgcgaggggcccggggcggg

SEQ ID NO: 44101 - RNA, 22 nt, Synthetic Construct
  source 1..22: mol_type = other RNA
tcctgcactgagctgccccgag

SEQ ID NO: 44102 - RNA, 22 nt, Synthetic Construct
  source 1..22: mol_type = other RNA
tcctgcactgagctgccccgag

SEQ ID NO: 44103 - RNA, 28 nt, Synthetic Construct
  source 1..28: mol_type = other RNA
cccccccactgctaaatttgactggcta

SEQ ID NO: 44104 - RNA, 16 nt, Synthetic Construct
  source 1..16: mol_type = other RNA
ccatgccgcgtgcggg

SEQ ID NO: 44105 - RNA, 22 nt, Synthetic Construct
  source 1..22: mol_type = other RNA
cagggctggcagtgacatgggt

SEQ ID NO: 44106 - RNA, 22 nt, Synthetic Construct
  source 1..22: mol_type = other RNA
tatcggaacgtgcccagtcgtg

SEQ ID NO: 44107 - RNA, 22 nt, Synthetic Construct
  source 1..22: mol_type = other RNA
tgagatagtaggttgtgtggtt

SEQ ID NO: 44108 - RNA, 16 nt, Synthetic Construct
  source 1..16: mol_type = other RNA
gaaattccttgtcggg

SEQ ID NO: 44109 - RNA, 23 nt, Synthetic Construct
  source 1..23: mol_type = other RNA
nggtaatacgacgtacttagtgt

SEQ ID NO: 44110 - RNA, 23 nt, Synthetic Construct
  source 1..23: mol_type = other RNA
nggtaatacgacgtacttagtgt

SEQ ID NO: 44111 - RNA, 16 nt, Synthetic Construct
  source 1..16: mol_type = other RNA
gtccacggccatacca

SEQ ID NO: 44112 - RNA, 22 nt, Synthetic Construct
  source 1..22: mol_type = other RNA
tgaggtggtagtttgtgctgtt

SEQ ID NO: 44113 - RNA, 22 nt, Synthetic Construct
  source 1..22: mol_type = other RNA
tgaggtggtagtttgtgctgtt

SEQ ID NO: 44114 - RNA, 15 nt, Synthetic Construct
  source 1..15: mol_type = other RNA
cgatatggcatgaga

SEQ ID NO: 44115 - RNA, 15 nt, Synthetic Construct
  source 1..15: mol_type = other RNA
cgatatggcatgaga

SEQ ID NO: 44116 - RNA, 15 nt, Synthetic Construct
  source 1..15: mol_type = other RNA
catgccgcgtgcggg

SEQ ID NO: 44117 - RNA, 24 nt, Synthetic Construct
  source 1..24: mol_type = other RNA
tatatcggaacgtgcccagtcgtg

SEQ ID NO: 44118 - RNA, 20 nt, Synthetic Construct
  source 1..20: mol_type = other RNA
gctattgacgaccgtaccgc

SEQ ID NO: 44119 - RNA, 20 nt, Synthetic Construct
  source 1..20: mol_type = other RNA
gctattgacgaccgtaccgc

SEQ ID NO: 44120 - RNA, 31 nt, Synthetic Construct; identical to SEQ ID NO: 5506
  source 1..31: mol_type = other RNA

SEQ ID NO: 44121 - RNA, 31 nt, Synthetic Construct; identical to SEQ ID NO: 5506
  source 1..31: mol_type = other RNA

SEQ ID NO: 44122 - RNA, 23 nt, Synthetic Construct
  source 1..23: mol_type = other RNA
tgaagggcagagagcgagacttt

SEQ ID NO: 44123 - RNA, 21 nt, Synthetic Construct
  source 1..21: mol_type = other RNA
tgaggggcagggagcgagact

SEQ ID NO: 44124 - RNA, 21 nt, Synthetic Construct
  source 1..21: mol_type = other RNA
tgaggggcagggagcgagact

SEQ ID NO: 44125 - RNA, 17 nt, Synthetic Construct
  source 1..17: mol_type = other RNA
gcggctgtagctcagtt

SEQ ID NO: 44126 - RNA, 17 nt, Synthetic Construct
  source 1..17: mol_type = other RNA
gcggctgtagctcagtt

SEQ ID NO: 44127 - RNA, 26 nt, Synthetic Construct
  source 1..26: mol_type = other RNA
gactcttagcggtggatcactcggct

SEQ ID NO: 44128 - RNA, 26 nt, Synthetic Construct
  source 1..26: mol_type = other RNA
gactcttagcggtggatcactcggct

SEQ ID NO: 44129 - RNA, 35 nt, Synthetic Construct; identical to SEQ ID NO: 2518
  source 1..35: mol_type = other RNA

SEQ ID NO: 44130 - RNA, 35 nt, Synthetic Construct; identical to SEQ ID NO: 2518
  source 1..35: mol_type = other RNA

SEQ ID NO: 44131 - RNA, 18 nt, Synthetic Construct
  source 1..18: mol_type = other RNA
accaaggggtcgtgggtt

SEQ ID NO: 44132 - RNA, 18 nt, Synthetic Construct
  source 1..18: mol_type = other RNA
accaaggggtcgtgggtt

SEQ ID NO: 44133 - RNA, 23 nt, Synthetic Construct
  source 1..23: mol_type = other RNA
tggtaatacaacgtacttagtgt

SEQ ID NO: 44134 - RNA, 18 nt, Synthetic Construct
  source 1..18: mol_type = other RNA
tgcgtagatatgcggagg

SEQ ID NO: 44135 - RNA, 28 nt, Synthetic Construct
  source 1..28: mol_type = other RNA
ccccccgctgctaaatttgactggcttt

SEQ ID NO: 44136 - RNA, 15 nt, Synthetic Construct
  source 1..15: mol_type = other RNA
gctttgatccggaga

SEQ ID NO: 44137 - RNA, 16 nt, Synthetic Construct
  source 1..16: mol_type = other RNA
atgcaagtcgaacggt

SEQ ID NO: 44138 - RNA, 16 nt, Synthetic Construct
  source 1..16: mol_type = other RNA
atgcaagtcgaacggt

SEQ ID NO: 44139 - RNA, 24 nt, Synthetic Construct
  source 1..24: mol_type = other RNA
cggagaaggttagctcagccaact

SEQ ID NO: 44140 - RNA, 34 nt, Synthetic Construct; identical to SEQ ID NO: 2298
  source 1..34: mol_type = other RNA

SEQ ID NO: 44141 - RNA, 32 nt, Synthetic Construct; identical to SEQ ID NO: 2798
  source 1..32: mol_type = other RNA

SEQ ID NO: 44142 - RNA, 32 nt, Synthetic Construct; identical to SEQ ID NO: 2798
  source 1..32: mol_type = other RNA

SEQ ID NO: 44143 - RNA, 43 nt, Synthetic Construct; identical to SEQ ID NO: 727
  source 1..43: mol_type = other RNA

SEQ ID NO: 44144 - RNA, 43 nt, Synthetic Construct; identical to SEQ ID NO: 727
  source 1..43: mol_type = other RNA

SEQ ID NO: 44145 - RNA, 18 nt, Synthetic Construct
  source 1..18: mol_type = other RNA
cgcgacctcagatcagac

SEQ ID NO: 44146 - RNA, 18 nt, Synthetic Construct
  source 1..18: mol_type = other RNA
cgcgacctcagatcagac

SEQ ID NO: 44147 - RNA, 25 nt, Synthetic Construct
  source 1..25: mol_type = other RNA
gggttgtaaaccgcttttgtcaggg

SEQ ID NO: 44148 - RNA, 22 nt, Synthetic Construct
  source 1..22: mol_type = other RNA
tgaggtagtaagttgtgtggtt

SEQ ID NO: 44149 - RNA, 22 nt, Synthetic Construct
  source 1..22: mol_type = other RNA
tgaggtagtaagttgtgtggtt

SEQ ID NO: 44150 - RNA, 17 nt, Synthetic Construct
  source 1..17: mol_type = other RNA
tggccgggacagagggc

SEQ ID NO: 44151 - RNA, 17 nt, Synthetic Construct
  source 1..17: mol_type = other RNA
tggccgggacagagggc

SEQ ID NO: 44152 - RNA, 23 nt, Synthetic Construct
  source 1..23: mol_type = other RNA
tcctgtactgggctgccccgagt

SEQ ID NO: 44153 - RNA, 23 nt, Synthetic Construct
  source 1..23: mol_type = other RNA
tcctgtactgggctgccccgagt

SEQ ID NO: 44154 - RNA, 16 nt, Synthetic Construct
  source 1..16: mol_type = other RNA
ggtagctcgttgggct

SEQ ID NO: 44155 - RNA, 34 nt, Synthetic Construct; identical to SEQ ID NO: 2019
  source 1..34: mol_type = other RNA

SEQ ID NO: 44156 - RNA, 18 nt, Synthetic Construct
  source 1..18: mol_type = other RNA
gtccggatcgtagtctgc

SEQ ID NO: 44157 - RNA, 18 nt, Synthetic Construct
  source 1..18: mol_type = other RNA
gtccggatcgtagtctgc

SEQ ID NO: 44158 - RNA, 19 nt, Synthetic Construct
  source 1..19: mol_type = other RNA
aggacagtgaaacgagtca

SEQ ID NO: 44159 - RNA, 19 nt, Synthetic Construct
  source 1..19: mol_type = other RNA
aggacagtgaaacgagtca

SEQ ID NO: 44160 - RNA, 22 nt, Synthetic Construct
  source 1..22: mol_type = other RNA
tagcttatcagactgatgttga

SEQ ID NO: 44161 - RNA, 17 nt, Synthetic Construct
  source 1..17: mol_type = other RNA
agtccggatcgtagtct

SEQ ID NO: 44162 - RNA, 17 nt, Synthetic Construct
  source 1..17: mol_type = other RNA
agtccggatcgtagtct

SEQ ID NO: 44163 - RNA, 15 nt, Synthetic Construct
  source 1..15: mol_type = other RNA
gctagtaatcgcgga

SEQ ID NO: 44164 - RNA, 20 nt, Synthetic Construct
  source 1..20: mol_type = other RNA
ctctaatgagactgccggtg

SEQ ID NO: 44165 - RNA, 32 nt, Synthetic Construct; identical to SEQ ID NO: 2850
  source 1..32: mol_type = other RNA

SEQ ID NO: 44166 - RNA, 21 nt, Synthetic Construct
  source 1..21: mol_type = other RNA
tgaggtagtaagttgtgtggt

SEQ ID NO: 44167 - RNA, 21 nt, Synthetic Construct
  source 1..21: mol_type = other RNA
tgaggtagtaagttgtgtggt

SEQ ID NO: 44168 - RNA, 23 nt, Synthetic Construct
  source 1..23: mol_type = other RNA
tgtcagtttgccaaataccccaa

SEQ ID NO: 44169 - RNA, 15 nt, Synthetic Construct
  source 1..15: mol_type = other RNA
gtctcgccgacggca

SEQ ID NO: 44170 - RNA, 15 nt, Synthetic Construct
  source 1..15: mol_type = other RNA
gtctcgccgacggca

SEQ ID NO: 44171 - RNA, 34 nt, Synthetic Construct; identical to SEQ ID NO: 2298
  source 1..34: mol_type = other RNA

SEQ ID NO: 44172 - RNA, 34 nt, Synthetic Construct; identical to SEQ ID NO: 2298
  source 1..34: mol_type = other RNA

SEQ ID NO: 44173 - RNA, 15 nt, Synthetic Construct
  source 1..15: mol_type = other RNA
gagagcctggacaca

SEQ ID NO: 44174 - RNA, 22 nt, Synthetic Construct
  source 1..22: mol_type = other RNA
tcctgtactgagctaccccgag

SEQ ID NO: 44175 - RNA, 22 nt, Synthetic Construct
  source 1..22: mol_type = other RNA
tcctgtactgagctaccccgag

SEQ ID NO: 44176 - RNA, 18 nt, Synthetic Construct
  source 1..18: mol_type = other RNA
cctgtaccgatcaatagt

SEQ ID NO: 44177 - RNA, 18 nt, Synthetic Construct
  source 1..18: mol_type = other RNA
cctgtaccgatcaatagt

SEQ ID NO: 44178 - RNA, 17 nt, Synthetic Construct
  source 1..17: mol_type = other RNA
cacggcccagactccta

SEQ ID NO: 44179 - RNA, 17 nt, Synthetic Construct
  source 1..17: mol_type = other RNA
cacggcccagactccta

SEQ ID NO: 44180 - RNA, 21 nt, Synthetic Construct
  source 1..21: mol_type = other RNA
tgaggtagtaggttgcgtggt

SEQ ID NO: 44181 - RNA, 21 nt, Synthetic Construct
  source 1..21: mol_type = other RNA
tgaggtagtaggttgcgtggt

SEQ ID NO: 44182 - RNA, 20 nt, Synthetic Construct
  source 1..20: mol_type = other RNA
ccgcagagtacagcttggga

SEQ ID NO: 44183 - RNA, 20 nt, Synthetic Construct
  source 1..20: mol_type = other RNA
ccgcagagtacagcttggga

SEQ ID NO: 44184 - RNA, 35 nt, Synthetic Construct; identical to SEQ ID NO: 2354
  source 1..35: mol_type = other RNA

SEQ ID NO: 44185 - RNA, 35 nt, Synthetic Construct; identical to SEQ ID NO: 2354
  source 1..35: mol_type = other RNA

SEQ ID NO: 44186 - RNA, 15 nt, Synthetic Construct
  source 1..15: mol_type = other RNA
gttcggaagattttc

SEQ ID NO: 44187 - RNA, 15 nt, Synthetic Construct
  source 1..15: mol_type = other RNA
gttcggaagattttc

SEQ ID NO: 44188 - RNA, 17 nt, Synthetic Construct
  source 1..17: mol_type = other RNA
gactcttagcggtggat

SEQ ID NO: 44189 - RNA, 17 nt, Synthetic Construct
  source 1..17: mol_type = other RNA
gactcttagcggtggat

SEQ ID NO: 44190 - RNA, 21 nt, Synthetic Construct
  source 1..21: mol_type = other RNA
ttataatacaacctgataagt

SEQ ID NO: 44191 - RNA, 21 nt, Synthetic Construct
  source 1..21: mol_type = other RNA
ttataatacaacctgataagt

SEQ ID NO: 44192 - RNA, 22 nt, Synthetic Construct
  source 1..22: mol_type = other RNA
tgaggtagtagtttgtgctgta

SEQ ID NO: 44193 - RNA, 32 nt, Synthetic Construct; identical to SEQ ID NO: 2582
  source 1..32: mol_type = other RNA

SEQ ID NO: 44194 - RNA, 21 nt, Synthetic Construct
  source 1..21: mol_type = other RNA
taatactgcctggtaatgatg

SEQ ID NO: 44195 - RNA, 21 nt, Synthetic Construct
  source 1..21: mol_type = other RNA
taatactgcctggtaatgatg

SEQ ID NO: 44196 - RNA, 15 nt, Synthetic Construct
  source 1..15: mol_type = other RNA
atccctccgactccg

SEQ ID NO: 44197 - RNA, 15 nt, Synthetic Construct
  source 1..15: mol_type = other RNA
atccctccgactccg

SEQ ID NO: 44198 - RNA, 22 nt, Synthetic Construct
  source 1..22: mol_type = other RNA
gtgccgaagctgtgggattgat

SEQ ID NO: 44199 - RNA, 22 nt, Synthetic Construct
  source 1..22: mol_type = other RNA
gtgccgaagctgtgggattgat

SEQ ID NO: 44200 - RNA, 24 nt, Synthetic Construct
  source 1..24: mol_type = other RNA
tgtaaacatccccgactggaggct

SEQ ID NO: 44201 - RNA, 17 nt, Synthetic Construct
  source 1..17: mol_type = other RNA
cgaaattccttgtcggg

SEQ ID NO: 44202 - RNA, 17 nt, Synthetic Construct
  source 1..17: mol_type = other RNA
cgaaattccttgtcggg

SEQ ID NO: 44203 - RNA, 36 nt, Synthetic Construct; identical to SEQ ID NO: 2366
  source 1..36: mol_type = other RNA

SEQ ID NO: 44204 - RNA, 23 nt, Synthetic Construct
  source 1..23: mol_type = other RNA
tgaggggcagagagcgagacttt

SEQ ID NO: 44205 - RNA, 23 nt, Synthetic Construct
  source 1..23: mol_type = other RNA
caaagtgctgttcgtgcaggtgg

SEQ ID NO: 44206 - RNA, 21 nt, Synthetic Construct
  source 1..21: mol_type = other RNA
tctttggttatctagctgtat

SEQ ID NO: 44207 - RNA, 24 nt, Synthetic Construct
  source 1..24: mol_type = other RNA
tcggctcatctcatcctggggctg

SEQ ID NO: 44208 - RNA, 24 nt, Synthetic Construct
  source 1..24: mol_type = other RNA
tcggctcatctcatcctggggctg

SEQ ID NO: 44209 - RNA, 15 nt, Synthetic Construct
  source 1..15: mol_type = other RNA
tggccgtcgtcagct

SEQ ID NO: 44210 - RNA, 15 nt, Synthetic Construct
  source 1..15: mol_type = other RNA
tggccgtcgtcagct

SEQ ID NO: 44211 - RNA, 23 nt, Synthetic Construct
  source 1..23: mol_type = other RNA
tggtaatacgacgcacttagtgt

SEQ ID NO: 44212 - RNA, 23 nt, Synthetic Construct
  source 1..23: mol_type = other RNA
tggtaatacgacgcacttagtgt

SEQ ID NO: 44213 - RNA, 22 nt, Synthetic Construct
  source 1..22: mol_type = other RNA
taacactgtctggtaacgatgt

SEQ ID NO: 44214 - RNA, 22 nt, Synthetic Construct
  source 1..22: mol_type = other RNA
taacactgtctggtaacgatgt

SEQ ID NO: 44215 - RNA, 15 nt, Synthetic Construct
  source 1..15: mol_type = other RNA
gtcaggatgttggct

SEQ ID NO: 44216 - RNA, 27 nt, Synthetic Construct
  source 1..27: mol_type = other RNA
ggatttccccttggggttgtaggacca

SEQ ID NO: 44217 - RNA, 27 nt, Synthetic Construct
  source 1..27: mol_type = other RNA
ggatttccccttggggttgtaggacca

SEQ ID NO: 44218 - RNA, 20 nt, Synthetic Construct
  source 1..20: mol_type = other RNA
tcctgtaccgatcaatagtg

SEQ ID NO: 44219 - RNA, 20 nt, Synthetic Construct
  source 1..20: mol_type = other RNA
tcctgtaccgatcaatagtg

SEQ ID NO: 44220 - RNA, 32 nt, Synthetic Construct; identical to SEQ ID NO: 2318
  source 1..32: mol_type = other RNA

SEQ ID NO: 44221 - RNA, 39 nt, Synthetic Construct; identical to SEQ ID NO: 10211
  source 1..39: mol_type = other RNA

SEQ ID NO: 44222 - RNA, 39 nt, Synthetic Construct; identical to SEQ ID NO: 10211
  source 1..39: mol_type = other RNA

SEQ ID NO: 44223 - RNA, 21 nt, Synthetic Construct
  source 1..21: mol_type = other RNA
ggaggagttcgaaggtacgct

SEQ ID NO: 44224 - RNA, 21 nt, Synthetic Construct
  source 1..21: mol_type = other RNA
ggaggagttcgaaggtacgct

SEQ ID NO: 44225 - RNA, 28 nt, Synthetic Construct
  source 1..28: mol_type = other RNA
gctttacattggactttgaacagatctg

SEQ ID NO: 44226 - RNA, 28 nt, Synthetic Construct
  source 1..28: mol_type = other RNA
gctttacattggactttgaacagatctg

SEQ ID NO: 44227 - RNA, 19 nt, Synthetic Construct
  source 1..19: mol_type = other RNA
cctgtaccgatcaatagtg

SEQ ID NO: 44228 - RNA, 27 nt, Synthetic Construct
  source 1..27: mol_type = other RNA
gttggttcaagcgtgtagtcgtgctct

SEQ ID NO: 44229 - RNA, 27 nt, Synthetic Construct
  source 1..27: mol_type = other RNA
gttggttcaagcgtgtagtcgtgctct

SEQ ID NO: 44230 - RNA, 27 nt, Synthetic Construct
  source 1..27: mol_type = other RNA
gttggttcaagcgtgtagtcgtgctct

SEQ ID NO: 44231 - RNA, 33 nt, Synthetic Construct; identical to SEQ ID NO: 3082
  source 1..33: mol_type = other RNA

SEQ ID NO: 44232 - RNA, 31 nt, Synthetic Construct; identical to SEQ ID NO: 2758
  source 1..31: mol_type = other RNA

SEQ ID NO: 44233 - RNA, 16 nt, Synthetic Construct
  source 1..16: mol_type = other RNA
gggtgaaagcggggga

SEQ ID NO: 44234 - RNA, 17 nt, Synthetic Construct
  source 1..17: mol_type = other RNA
cacggcccagactccta

SEQ ID NO: 44235 - RNA, 17 nt, Synthetic Construct
  source 1..17: mol_type = other RNA
cacggcccagactccta

SEQ ID NO: 44236 - RNA, 22 nt, Synthetic Construct
  source 1..22: mol_type = other RNA
tgaggtagtaggctgtgtggtt

SEQ ID NO: 44237 - RNA, 16 nt, Synthetic Construct
  source 1..16: mol_type = other RNA
tgcacgaaagcgtggg

SEQ ID NO: 44238 - RNA, 16 nt, Synthetic Construct
  source 1..16: mol_type = other RNA
tgcacgaaagcgtggg

SEQ ID NO: 44239 - RNA, 26 nt, Synthetic Construct
  source 1..26: mol_type = other RNA
gatttccccttggggttgtaggacca

SEQ ID NO: 44240 - RNA, 26 nt, Synthetic Construct
  source 1..26: mol_type = other RNA
gatttccccttggggttgtaggacca

SEQ ID NO: 44241 - RNA, 22 nt, Synthetic Construct
  source 1..22: mol_type = other RNA
ggaggagttcgaaggtacgcta

SEQ ID NO: 44242 - RNA, 22 nt, Synthetic Construct
  source 1..22: mol_type = other RNA
ggaggagttcgaaggtacgcta

SEQ ID NO: 44243 - RNA, 36 nt, Synthetic Construct; identical to SEQ ID NO: 2248
  source 1..36: mol_type = other RNA

SEQ ID NO: 44244 - RNA, 33 nt, Synthetic Construct; identical to SEQ ID NO: 2253
  source 1..33: mol_type = other RNA

SEQ ID NO: 44245 - RNA, 22 nt, Synthetic Construct
  source 1..22: mol_type = other RNA
tcctgtactgtgctgccccgag

SEQ ID NO: 44246 - RNA, 22 nt, Synthetic Construct
  source 1..22: mol_type = other RNA
tcctgtactgtgctgccccgag

SEQ ID NO: 44247 - RNA, 18 nt, Synthetic Construct
  source 1..18: mol_type = other RNA
gcgaaattccttgtcggg

SEQ ID NO: 44248 - RNA, 16 nt, Synthetic Construct
  source 1..16: mol_type = other RNA
ggcgggggtcgctggt

SEQ ID NO: 44249 - RNA, 24 nt, Synthetic Construct
  source 1..24: mol_type = other RNA
tgtaaacatccctgactggaagct

SEQ ID NO: 44250 - RNA, 21 nt, Synthetic Construct
  source 1..21: mol_type = other RNA
tgaggtaataggttgtgtggt

SEQ ID NO: 44251 - RNA, 21 nt, Synthetic Construct
  source 1..21: mol_type = other RNA
tgaggtaataggttgtgtggt

SEQ ID NO: 44252 - RNA, 21 nt, Synthetic Construct
  source 1..21: mol_type = other RNA
tgaggtagtaggttatgtggt

SEQ ID NO: 44253 - RNA, 21 nt, Synthetic Construct
  source 1..21: mol_type = other RNA
tgaggtagtaggttatgtggt

SEQ ID NO: 44254 - RNA, 26 nt, Synthetic Construct
  source 1..26: mol_type = other RNA
atttccccttggggttgtaggaccac

SEQ ID NO: 44255 - RNA, 26 nt, Synthetic Construct
  source 1..26: mol_type = other RNA
atttccccttggggttgtaggaccac

SEQ ID NO: 44256 - RNA, 43 nt, Synthetic Construct; identical to SEQ ID NO: 2315
  source 1..43: mol_type = other RNA

SEQ ID NO: 44257 - RNA, 43 nt, Synthetic Construct; identical to SEQ ID NO: 2315
  source 1..43: mol_type = other RNA

SEQ ID NO: 44258 - RNA, 15 nt, Synthetic Construct
  source 1..15: mol_type = other RNA
cgccatttaaagagg

SEQ ID NO: 44259 - RNA, 15 nt, Synthetic Construct
  source 1..15: mol_type = other RNA
cgccatttaaagagg

SEQ ID NO: 44260 - RNA, 25 nt, Synthetic Construct
  source 1..25: mol_type = other RNA
gggttgtaaaccgcttttgtcaggg

SEQ ID NO: 44261 - RNA, 15 nt, Synthetic Construct
  source 1..15: mol_type = other RNA
cagtgaaacgagtca

SEQ ID NO: 44262 - RNA, 15 nt, Synthetic Construct
  source 1..15: mol_type = other RNA
cagtgaaacgagtca

SEQ ID NO: 44263 - RNA, 23 nt, Synthetic Construct
  source 1..23: mol_type = other RNA
tgataatacgacgtacttagtgt

SEQ ID NO: 44264 - RNA, 23 nt, Synthetic Construct
  source 1..23: mol_type = other RNA
tgataatacgacgtacttagtgt

SEQ ID NO: 44265 - RNA, 24 nt, Synthetic Construct
  source 1..24: mol_type = other RNA
tgtaaacatccccgactggaagtt

SEQ ID NO: 44266 - RNA, 18 nt, Synthetic Construct
  source 1..18: mol_type = other RNA
ctaatgagactgccggtg

SEQ ID NO: 44267 - RNA, 18 nt, Synthetic Construct
  source 1..18: mol_type = other RNA
ctaatgagactgccggtg

SEQ ID NO: 44268 - RNA, 19 nt, Synthetic Construct
  source 1..19: mol_type = other RNA
ctgatcgagtcgtcctgcg

SEQ ID NO: 44269 - RNA, 19 nt, Synthetic Construct
  source 1..19: mol_type = other RNA
ctgatcgagtcgtcctgcg

SEQ ID NO: 44270 - RNA, 16 nt, Synthetic Construct
  source 1..16: mol_type = other RNA
cgactcttagcggtgg

SEQ ID NO: 44271 - RNA, 16 nt, Synthetic Construct
  source 1..16: mol_type = other RNA
cgactcttagcggtgg

SEQ ID NO: 44272 - RNA, 42 nt, Synthetic Construct; identical to SEQ ID NO: 748
  source 1..42: mol_type = other RNA

SEQ ID NO: 44273 - RNA, 23 nt, Synthetic Construct
  source 1..23: mol_type = other RNA
tggtaatacgacgtactcagtgt

SEQ ID NO: 44274 - RNA, 23 nt, Synthetic Construct
  source 1..23: mol_type = other RNA
tggtaatacgacgtactcagtgt

SEQ ID NO: 44275 - RNA, 22 nt, Synthetic Construct
  source 1..22: mol_type = other RNA
tatcggaacgtgcccagtcgtg

SEQ ID NO: 44276 - RNA, 22 nt, Synthetic Construct
  source 1..22: mol_type = other RNA
gctcacggaaagagaatgaagc

SEQ ID NO: 44277 - RNA, 22 nt, Synthetic Construct
  source 1..22: mol_type = other RNA
gctcacggaaagagaatgaagc

SEQ ID NO: 44278 - RNA, 18 nt, Synthetic Construct
  source 1..18: mol_type = other RNA
gtccccttcgtctagagg

SEQ ID NO: 44279 - RNA, 18 nt, Synthetic Construct
  source 1..18: mol_type = other RNA
gtccccttcgtctagagg

SEQ ID NO: 44280 - RNA, 20 nt, Synthetic Construct
  source 1..20: mol_type = other RNA
tggggtagtaggttgtatag

SEQ ID NO: 44281 - RNA, 20 nt, Synthetic Construct
  source 1..20: mol_type = other RNA
tggggtagtaggttgtatag

SEQ ID NO: 44282 - RNA, 16 nt, Synthetic Construct
  source 1..16: mol_type = other RNA
gcagacgaagtgagtg

SEQ ID NO: 44283 - RNA, 16 nt, Synthetic Construct
  source 1..16: mol_type = other RNA
gcagacgaagtgagtg

SEQ ID NO: 44284 - RNA, 30 nt, Synthetic Construct; identical to SEQ ID NO: 1771
  source 1..30: mol_type = other RNA

SEQ ID NO: 44285 - RNA, 17 nt, Synthetic Construct
  source 1..17: mol_type = other RNA
aagttgaccgcctgggg

SEQ ID NO: 44286 - RNA, 17 nt, Synthetic Construct
  source 1..17: mol_type = other RNA
aagttgaccgcctgggg

SEQ ID NO: 44287 - RNA, 23 nt, Synthetic Construct
  source 1..23: mol_type = other RNA
tggtaatacaacgtacttagtgt

SEQ ID NO: 44288 - RNA, 22 nt, Synthetic Construct
  source 1..22: mol_type = other RNA
tctttggttatctagctgtatg

SEQ ID NO: 44289 - RNA, 22 nt, Synthetic Construct
  source 1..22: mol_type = other RNA
tgtggtagtagtttgtgctgtt

SEQ ID NO: 44290 - RNA, 22 nt, Synthetic Construct
  source 1..22: mol_type = other RNA
tgtggtagtagtttgtgctgtt

SEQ ID NO: 44291 - RNA, 21 nt, Synthetic Construct
  source 1..21: mol_type = other RNA
tgaggtagtaggttgtgtagt

SEQ ID NO: 44292 - RNA, 21 nt, Synthetic Construct
  source 1..21: mol_type = other RNA
tgaggtagtaggttgtgtagt

SEQ ID NO: 44293 - RNA, 15 nt, Synthetic Construct
  source 1..15: mol_type = other RNA
accgcttttgtcagg

SEQ ID NO: 44294 - RNA, 15 nt, Synthetic Construct
  source 1..15: mol_type = other RNA
accgcttttgtcagg

SEQ ID NO: 44295 - RNA, 19 nt, Synthetic Construct
  source 1..19: mol_type = other RNA
tctaatgagactgccggtg

SEQ ID NO: 44296 - RNA, 19 nt, Synthetic Construct
  source 1..19: mol_type = other RNA
tctaatgagactgccggtg

SEQ ID NO: 44297 - RNA, 22 nt, Synthetic Construct
  source 1..22: mol_type = other RNA
tgaggtagtagtttgtgttgtt

SEQ ID NO: 44298 - RNA, 22 nt, Synthetic Construct
  source 1..22: mol_type = other RNA
tgaggtagtagtttgtgttgtt

SEQ ID NO: 44299 - RNA, 19 nt, Synthetic Construct
  source 1..19: mol_type = other RNA
gcgaaattccttgtcgggt

SEQ ID NO: 44300 - RNA, 21 nt, Synthetic Construct
  source 1..21: mol_type = other RNA
cgcgacctcagatcagacgtg

SEQ ID NO: 44301 - RNA, 21 nt, Synthetic Construct
  source 1..21: mol_type = other RNA
cgcgacctcagatcagacgtg

SEQ ID NO: 44302 - RNA, 35 nt, Synthetic Construct; identical to SEQ ID NO: 2069
  source 1..35: mol_type = other RNA

SEQ ID NO: 44303 - RNA, 35 nt, Synthetic Construct; identical to SEQ ID NO: 2069
  source 1..35: mol_type = other RNA

SEQ ID NO: 44304 - RNA, 16 nt, Synthetic Construct
  source 1..16: mol_type = other RNA
gcctacggccatacca

SEQ ID NO: 44305 - RNA, 22 nt, Synthetic Construct
  source 1..22: mol_type = other RNA
taacactgtctggtaacgatgt

SEQ ID NO: 44306 - RNA, 22 nt, Synthetic Construct
  source 1..22: mol_type = other RNA
taacactgtctggtaacgatgt

SEQ ID NO: 44307 - RNA, 21 nt, Synthetic Construct
  source 1..21: mol_type = other RNA
cataaagtagaaagcactact

SEQ ID NO: 44308 - RNA, 21 nt, Synthetic Construct
  source 1..21: mol_type = other RNA
cataaagtagaaagcactact

SEQ ID NO: 44309 - RNA, 20 nt, Synthetic Construct
  source 1..20: mol_type = other RNA
gccatcatttaaagaaagcg

SEQ ID NO: 44310 - RNA, 20 nt, Synthetic Construct
  source 1..20: mol_type = other RNA
gccatcatttaaagaaagcg

SEQ ID NO: 44311 - RNA, 21 nt, Synthetic Construct
  source 1..21: mol_type = other RNA
tgagatagtaggttgtgtggt

SEQ ID NO: 44312 - RNA, 21 nt, Synthetic Construct
  source 1..21: mol_type = other RNA
tgagatagtaggttgtgtggt

SEQ ID NO: 44313 - RNA, 21 nt, Synthetic Construct
  source 1..21: mol_type = other RNA
tgaggggcagagagcgggact

SEQ ID NO: 44314 - RNA, 21 nt, Synthetic Construct
  source 1..21: mol_type = other RNA
tgaggggcagagagcgggact

SEQ ID NO: 44315 - RNA, 37 nt, Synthetic Construct; identical to SEQ ID NO: 5125
  source 1..37: mol_type = other RNA

SEQ ID NO: 44316 - RNA, 21 nt, Synthetic Construct
  source 1..21: mol_type = other RNA
tgaggtagtagattgtgtggt

SEQ ID NO: 44317 - RNA, 21 nt, Synthetic Construct
  source 1..21: mol_type = other RNA
tgaggtagtagattgtgtggt

SEQ ID NO: 44318 - RNA, 20 nt, Synthetic Construct
  source 1..20: mol_type = other RNA
tgaggtggtaggttgtatag

SEQ ID NO: 44319 - RNA, 20 nt, Synthetic Construct
  source 1..20: mol_type = other RNA
tgaggtggtaggttgtatag

SEQ ID NO: 44320 - RNA, 23 nt, Synthetic Construct
  source 1..23: mol_type = other RNA
tgaggggcggagagcgagacttt

SEQ ID NO: 44321 - RNA, 23 nt, Synthetic Construct
  source 1..23: mol_type = other RNA
tgaggggcggagagcgagacttt

SEQ ID NO: 44322 - RNA, 15 nt, Synthetic Construct
  source 1..15: mol_type = other RNA
atccctccgactccg

SEQ ID NO: 44323 - RNA, 15 nt, Synthetic Construct
  source 1..15: mol_type = other RNA
atccctccgactccg

SEQ ID NO: 44324 - RNA, 17 nt, Synthetic Construct
  source 1..17: mol_type = other RNA
atgcaagtcgaacggta

SEQ ID NO: 44325 - RNA, 17 nt, Synthetic Construct
  source 1..17: mol_type = other RNA
atgcaagtcgaacggta

SEQ ID NO: 44326 - RNA, 23 nt, Synthetic Construct
  source 1..23: mol_type = other RNA
tcggatccgtctgagcttggctt

SEQ ID NO: 44327 - RNA, 23 nt, Synthetic Construct
  source 1..23: mol_type = other RNA
tcggatccgtctgagcttggctt

SEQ ID NO: 44328 - RNA, 19 nt, Synthetic Construct
  source 1..19: mol_type = other RNA
ccgtgttcggaagattttc

SEQ ID NO: 44329 - RNA, 19 nt, Synthetic Construct
  source 1..19: mol_type = other RNA
ccgtgttcggaagattttc

SEQ ID NO: 44330 - RNA, 15 nt, Synthetic Construct
  source 1..15: mol_type = other RNA
agttgaccgcctggg

SEQ ID NO: 44331 - RNA, 15 nt, Synthetic Construct
  source 1..15: mol_type = other RNA
agttgaccgcctggg

SEQ ID NO: 44332 - RNA, 23 nt, Synthetic Construct
  source 1..23: mol_type = other RNA
tccccttggggttgtaggaccac

SEQ ID NO: 44333 - RNA, 23 nt, Synthetic Construct
  source 1..23: mol_type = other RNA
tccccttggggttgtaggaccac

SEQ ID NO: 44334 - RNA, 27 nt, Synthetic Construct
  source 1..27: mol_type = other RNA
ccgtgtgaaagtaggtcatcgtcaggc

SEQ ID NO: 44335 - RNA, 28 nt, Synthetic Construct
  source 1..28: mol_type = other RNA
gctttgatccggagatttccgaatgggg

SEQ ID NO: 44336 - RNA, 23 nt, Synthetic Construct
  source 1..23: mol_type = other RNA
naaagtgctgttcgtgcaggtag

SEQ ID NO: 44337 - RNA, 23 nt, Synthetic Construct
  source 1..23: mol_type = other RNA
naaagtgctgttcgtgcaggtag

SEQ ID NO: 44338 - RNA, 16 nt, Synthetic Construct
  source 1..16: mol_type = other RNA
agtcaggatgttggct

SEQ ID NO: 44339 - RNA, 35 nt, Synthetic Construct; identical to SEQ ID NO: 2269
  source 1..35: mol_type = other RNA

SEQ ID NO: 44340 - RNA, 18 nt, Synthetic Construct
  source 1..18: mol_type = other RNA
cgactcttagcggtggat

SEQ ID NO: 44341 - RNA, 18 nt, Synthetic Construct
  source 1..18: mol_type = other RNA
cgactcttagcggtggat

SEQ ID NO: 44342 - RNA, 19 nt, Synthetic Construct
  source 1..19: mol_type = other RNA
tggccgtcgtcagctcgtg

SEQ ID NO: 44343 - RNA, 19 nt, Synthetic Construct
  source 1..19: mol_type = other RNA
tggccgtcgtcagctcgtg

SEQ ID NO: 44344 - RNA, 25 nt, Synthetic Construct
  source 1..25: mol_type = other RNA
gtgaggatatgagatcgagacgaca

SEQ ID NO: 44345 - RNA, 25 nt, Synthetic Construct
  source 1..25: mol_type = other RNA
gtgaggatatgagatcgagacgaca

SEQ ID NO: 44346 - RNA, 17 nt, Synthetic Construct
  source 1..17: mol_type = other RNA
ccaaggggtcgtgggtt

SEQ ID NO: 44347 - RNA, 17 nt, Synthetic Construct
  source 1..17: mol_type = other RNA
ccaaggggtcgtgggtt

SEQ ID NO: 44348 - RNA, 22 nt, Synthetic Construct
  source 1..22: mol_type = other RNA
tgaggtagtaggttgtgtggat

SEQ ID NO: 44349 - RNA, 22 nt, Synthetic Construct
  source 1..22: mol_type = other RNA
tgaggtagtaggttgtgcggtt

SEQ ID NO: 44350 - RNA, 22 nt, Synthetic Construct
  source 1..22: mol_type = other RNA
tgaggtagtaggttgtgcggtt

SEQ ID NO: 44351 - RNA, 23 nt, Synthetic Construct
  source 1..23: mol_type = other RNA
tgaggtagtaggctgtgtggttt

SEQ ID NO: 44352 - RNA, 23 nt, Synthetic Construct
  source 1..23: mol_type = other RNA
tgaggtagtaggctgtgtggttt

SEQ ID NO: 44353 - RNA, 22 nt, Synthetic Construct
  source 1..22: mol_type = other RNA
tggaatgcaaagaagtatgtat

SEQ ID NO: 44354 - RNA, 22 nt, Synthetic Construct
  source 1..22: mol_type = other RNA
tggaatgcaaagaagtatgtat

SEQ ID NO: 44355 - RNA, 23 nt, Synthetic Construct
  source 1..23: mol_type = other RNA
ctcactgatcgagtcgtcctgcg

SEQ ID NO: 44356 - RNA, 23 nt, Synthetic Construct
  source 1..23: mol_type = other RNA
ctcactgatcgagtcgtcctgcg

SEQ ID NO: 44357 - RNA, 15 nt, Synthetic Construct
  source 1..15: mol_type = other RNA
gtccggcccgaggca

SEQ ID NO: 44358 - RNA, 15 nt, Synthetic Construct
  source 1..15: mol_type = other RNA
gtccggcccgaggca

SEQ ID NO: 44359 - RNA, 23 nt, Synthetic Construct
  source 1..23: mol_type = other RNA
caaagtgctgttcgtgcaggtgg

SEQ ID NO: 44360 - RNA, 23 nt, Synthetic Construct
  source 1..23: mol_type = other RNA
caaagtgctgttcgtgcaggtgg

SEQ ID NO: 44361 - RNA, 17 nt, Synthetic Construct
  source 1..17: mol_type = other RNA
ccagtaaacggcggccg

SEQ ID NO: 44362 - RNA, 17 nt, Synthetic Construct
  source 1..17: mol_type = other RNA
ccagtaaacggcggccg

SEQ ID NO: 44363 - RNA, 21 nt, Synthetic Construct
  source 1..21: mol_type = other RNA
taaggtagtaggttgtgtggt

SEQ ID NO: 44364 - RNA, 21 nt, Synthetic Construct
  source 1..21: mol_type = other RNA
taaggtagtaggttgtgtggt

SEQ ID NO: 44365 - RNA, 17 nt, Synthetic Construct
  source 1..17: mol_type = other RNA
ggcccttatgggtaggg

SEQ ID NO: 44366 - RNA, 17 nt, Synthetic Construct
  source 1..17: mol_type = other RNA
ggcccttatgggtaggg

SEQ ID NO: 44367 - RNA, 32 nt, Synthetic Construct; identical to SEQ ID NO: 3713
  source 1..32: mol_type = other RNA

SEQ ID NO: 44368 - RNA, 21 nt, Synthetic Construct
  source 1..21: mol_type = other RNA
tgaggggcagagagcgaggct

SEQ ID NO: 44369 - RNA, 21 nt, Synthetic Construct
  source 1..21: mol_type = other RNA
tgaggggcagagagcgaggct

SEQ ID NO: 44370 - RNA, 22 nt, Synthetic Construct
  source 1..22: mol_type = other RNA
tgaggtagtaggttgtgtggct

SEQ ID NO: 44371 - RNA, 31 nt, Synthetic Construct; identical to SEQ ID NO: 2427
  source 1..31: mol_type = other RNA

SEQ ID NO: 44372 - RNA, 31 nt, Synthetic Construct; identical to SEQ ID NO: 2427
  source 1..31: mol_type = other RNA

SEQ ID NO: 44373 - RNA, 25 nt, Synthetic Construct
  source 1..25: mol_type = other RNA
agctcactgatcgagtcgtcctgcg

SEQ ID NO: 44374 - RNA, 21 nt, Synthetic Construct
  source 1..21: mol_type = other RNA
taactccttaagcgatctcgc

SEQ ID NO: 44375 - RNA, 21 nt, Synthetic Construct
  source 1..21: mol_type = other RNA
taactccttaagcgatctcgc

SEQ ID NO: 44376 - RNA, 16 nt, Synthetic Construct
  source 1..16: mol_type = other RNA
gagctgtggatagggg

SEQ ID NO: 44377 - RNA, 23 nt, Synthetic Construct
  source 1..23: mol_type = other RNA
tgaagggcagagagcgagacttt

SEQ ID NO: 44378 - RNA, 35 nt, Synthetic Construct; identical to SEQ ID NO: 2548
  source 1..35: mol_type = other RNA

SEQ ID NO: 44379 - RNA, 35 nt, Synthetic Construct; identical to SEQ ID NO: 10694
  source 1..35: mol_type = other RNA

SEQ ID NO: 44380 - RNA, 35 nt, Synthetic Construct; identical to SEQ ID NO: 10694
  source 1..35: mol_type = other RNA

SEQ ID NO: 44381 - RNA, 22 nt, Synthetic Construct
  source 1..22: mol_type = other RNA
tctttgttcgattccgttgagt

SEQ ID NO: 44382 - RNA, 22 nt, Synthetic Construct
  source 1..22: mol_type = other RNA
tctttgttcgattccgttgagt

SEQ ID NO: 44383 - RNA, 16 nt, Synthetic Construct
  source 1..16: mol_type = other RNA
gatttgggagtgctcg

SEQ ID NO: 44384 - RNA, 16 nt, Synthetic Construct
  source 1..16: mol_type = other RNA
gatttgggagtgctcg

SEQ ID NO: 44385 - RNA, 17 nt, Synthetic Construct
  source 1..17: mol_type = other RNA
cctcgcgcgattggagc

SEQ ID NO: 44386 - RNA, 17 nt, Synthetic Construct
  source 1..17: mol_type = other RNA
cctcgcgcgattggagc

SEQ ID NO: 44387 - RNA, 23 nt, Synthetic Construct
  source 1..23: mol_type = other RNA
tggggggcagagagcgagacttt

SEQ ID NO: 44388 - RNA, 23 nt, Synthetic Construct
  source 1..23: mol_type = other RNA
tggggggcagagagcgagacttt

SEQ ID NO: 44389 - RNA, 21 nt, Synthetic Construct
  source 1..21: mol_type = other RNA
agagtaggacgttgccaggtt

SEQ ID NO: 44390 - RNA, 21 nt, Synthetic Construct
  source 1..21: mol_type = other RNA
agagtaggacgttgccaggtt

SEQ ID NO: 44391 - RNA, 23 nt, Synthetic Construct
  source 1..23: mol_type = other RNA
tcctgtactgggctgccccgaga

SEQ ID NO: 44392 - RNA, 23 nt, Synthetic Construct
  source 1..23: mol_type = other RNA
tcctgtactgggctgccccgaga

SEQ ID NO: 44393 - RNA, 21 nt, Synthetic Construct
  source 1..21: mol_type = other RNA
cactgatcgagtcgtcctgcg

SEQ ID NO: 44394 - RNA, 21 nt, Synthetic Construct
  source 1..21: mol_type = other RNA
tgaggtagtagtttgtgctgc

SEQ ID NO: 44395 - RNA, 21 nt, Synthetic Construct
  source 1..21: mol_type = other RNA
tgaggtagtagtttgtgctgc

SEQ ID NO: 44396 - RNA, 15 nt, Synthetic Construct
  source 1..15: mol_type = other RNA
cccagaaacccggtc

SEQ ID NO: 44397 - RNA, 15 nt, Synthetic Construct
  source 1..15: mol_type = other RNA
cccagaaacccggtc

SEQ ID NO: 44398 - RNA, 16 nt, Synthetic Construct
  source 1..16: mol_type = other RNA
tcagtagctcgaggaa

SEQ ID NO: 44399 - RNA, 16 nt, Synthetic Construct
  source 1..16: mol_type = other RNA
tcagtagctcgaggaa

SEQ ID NO: 44400 - RNA, 20 nt, Synthetic Construct
  source 1..20: mol_type = other RNA
tcctgtctgaatatgggggg

SEQ ID NO: 44401 - RNA, 20 nt, Synthetic Construct
  source 1..20: mol_type = other RNA
tcctgtctgaatatgggggg

SEQ ID NO: 44402 - RNA, 24 nt, Synthetic Construct
  source 1..24: mol_type = other RNA
tcactgatcgagtcgtcctgcgcg

SEQ ID NO: 44403 - RNA, 24 nt, Synthetic Construct
  source 1..24: mol_type = other RNA
tcactgatcgagtcgtcctgcgcg

SEQ ID NO: 44404 - RNA, 22 nt, Synthetic Construct
  source 1..22: mol_type = other RNA
tgaggtagtaggttgtacagtt

SEQ ID NO: 44405 - RNA, 22 nt, Synthetic Construct
  source 1..22: mol_type = other RNA
tgaggtagtaggttgtacagtt

SEQ ID NO: 44406 - RNA, 21 nt, Synthetic Construct
  source 1..21: mol_type = other RNA
ggaggagttcgaaggtacgct

SEQ ID NO: 44407 - RNA, 15 nt, Synthetic Construct
  source 1..15: mol_type = other RNA
gtagctcgttgggct

SEQ ID NO: 44408 - RNA, 15 nt, Synthetic Construct
  source 1..15: mol_type = other RNA
gtagctcgttgggct

SEQ ID NO: 44409 - RNA, 30 nt, Synthetic Construct; identical to SEQ ID NO: 768
  source 1..30: mol_type = other RNA

SEQ ID NO: 44410 - RNA, 30 nt, Synthetic Construct; identical to SEQ ID NO: 768
  source 1..30: mol_type = other RNA

SEQ ID NO: 44411 - RNA, 21 nt, Synthetic Construct
  source 1..21: mol_type = other RNA
agccatcatttaaagaaagcg

SEQ ID NO: 44412 - RNA, 21 nt, Synthetic Construct
  source 1..21: mol_type = other RNA
agccatcatttaaagaaagcg

SEQ ID NO: 44413 - RNA, 26 nt, Synthetic Construct
  source 1..26: mol_type = other RNA
tgtcggctcatctcatcctggggctg

SEQ ID NO: 44414 - RNA, 22 nt, Synthetic Construct
  source 1..22: mol_type = other RNA
tgaggaagtaggttgtgtggtt

SEQ ID NO: 44415 - RNA, 22 nt, Synthetic Construct
  source 1..22: mol_type = other RNA
tgaggaagtaggttgtgtggtt

SEQ ID NO: 44416 - RNA, 25 nt, Synthetic Construct
  source 1..25: mol_type = other RNA
cgactcttagcggtggatcactcgg

SEQ ID NO: 44417 - RNA, 25 nt, Synthetic Construct
  source 1..25: mol_type = other RNA
cgactcttagcggtggatcactcgg

SEQ ID NO: 44418 - RNA, 19 nt, Synthetic Construct
  source 1..19: mol_type = other RNA
tctaatgagactgccggtg

SEQ ID NO: 44419 - RNA, 19 nt, Synthetic Construct
  source 1..19: mol_type = other RNA
tctaatgagactgccggtg

SEQ ID NO: 44420 - RNA, 15 nt, Synthetic Construct
  source 1..15: mol_type = other RNA
ggccgtcgtcagctc

SEQ ID NO: 44421 - RNA, 15 nt, Synthetic Construct
  source 1..15: mol_type = other RNA
ggccgtcgtcagctc

SEQ ID NO: 44422 - RNA, 24 nt, Synthetic Construct
  source 1..24: mol_type = other RNA
tgtaaacatccccggctggaagct

SEQ ID NO: 44423 - RNA, 18 nt, Synthetic Construct
  source 1..18: mol_type = other RNA
ggtgcaagcgttaatcgg

SEQ ID NO: 44424 - RNA, 30 nt, Synthetic Construct; identical to SEQ ID NO: 3933
  source 1..30: mol_type = other RNA

SEQ ID NO: 44425 - RNA, 16 nt, Synthetic Construct
  source 1..16: mol_type = other RNA
gcagacgaagtgagtg

SEQ ID NO: 44426 - RNA, 16 nt, Synthetic Construct
  source 1..16: mol_type = other RNA
gcagacgaagtgagtg

SEQ ID NO: 44427 - RNA, 21 nt, Synthetic Construct
  source 1..21: mol_type = other RNA
tgaggtagtaggttgtacagt

SEQ ID NO: 44428 - RNA, 21 nt, Synthetic Construct
  source 1..21: mol_type = other RNA
tgaggtagtaggttgtacagt

SEQ ID NO: 44429 - RNA, 24 nt, Synthetic Construct
  source 1..24: mol_type = other RNA
tttccccttggggttgtaggacca

SEQ ID NO: 44430 - RNA, 24 nt, Synthetic Construct
  source 1..24: mol_type = other RNA
tttccccttggggttgtaggacca

SEQ ID NO: 44431 - RNA, 25 nt, Synthetic Construct
  source 1..25: mol_type = other RNA
agctcactgatcgagtcgtcctgcg

SEQ ID NO: 44432 - RNA, 25 nt, Synthetic Construct
  source 1..25: mol_type = other RNA
agctcactgatcgagtcgtcctgcg

SEQ ID NO: 44433 - RNA, 30 nt, Synthetic Construct; identical to SEQ ID NO: 2274
  source 1..30: mol_type = other RNA

SEQ ID NO: 44434 - RNA, 21 nt, Synthetic Construct
  source 1..21: mol_type = other RNA
tgaggtagtagtttgtgctgc

SEQ ID NO: 44435 - RNA, 34 nt, Synthetic Construct; identical to SEQ ID NO: 2364
  source 1..34: mol_type = other RNA

SEQ ID NO: 44436 - RNA, 34 nt, Synthetic Construct; identical to SEQ ID NO: 2364
  source 1..34: mol_type = other RNA

SEQ ID NO: 44437 - RNA, 22 nt, Synthetic Construct
  source 1..22: mol_type = other RNA
cgactcttagcggtggatcact

SEQ ID NO: 44438 - RNA, 23 nt, Synthetic Construct
  source 1..23: mol_type = other RNA
gtaaacatccttgactggaagct

SEQ ID NO: 44439 - RNA, 23 nt, Synthetic Construct
  source 1..23: mol_type = other RNA
gtaaacatccttgactggaagct

SEQ ID NO: 44440 - RNA, 18 nt, Synthetic Construct
  source 1..18: mol_type = other RNA
gcgccgatgatagtgcgg

SEQ ID NO: 44441 - RNA, 22 nt, Synthetic Construct
  source 1..22: mol_type = other RNA
ncctgtactgagctgccccgag

SEQ ID NO: 44442 - RNA, 22 nt, Synthetic Construct
  source 1..22: mol_type = other RNA
ncctgtactgagctgccccgag

SEQ ID NO: 44443 - RNA, 22 nt, Synthetic Construct
  source 1..22: mol_type = other RNA
cggaatcgctagtaatcgcgga

SEQ ID NO: 44444 - RNA, 22 nt, Synthetic Construct
  source 1..22: mol_type = other RNA
cggaatcgctagtaatcgcgga

SEQ ID NO: 44445 - RNA, 23 nt, Synthetic Construct
  source 1..23: mol_type = other RNA
tggtaatacgacgtacttagtgc

SEQ ID NO: 44446 - RNA, 21 nt, Synthetic Construct
  source 1..21: mol_type = other RNA
tgaggtagtagcttgtgctgt

SEQ ID NO: 44447 - RNA, 15 nt, Synthetic Construct
  source 1..15: mol_type = other RNA
gttcggaagattttc

SEQ ID NO: 44448 - RNA, 15 nt, Synthetic Construct
  source 1..15: mol_type = other RNA
gttcggaagattttc

SEQ ID NO: 44449 - RNA, 28 nt, Synthetic Construct
  source 1..28: mol_type = other RNA
tcccacatggtctagcggttaggattcc

SEQ ID NO: 44450 - RNA, 28 nt, Synthetic Construct
  source 1..28: mol_type = other RNA
tcccacatggtctagcggttaggattcc

SEQ ID NO: 44451 - RNA, 18 nt, Synthetic Construct
  source 1..18: mol_type = other RNA
ctaatgagactgccggtg

SEQ ID NO: 44452 - RNA, 18 nt, Synthetic Construct
  source 1..18: mol_type = other RNA
ctaatgagactgccggtg

SEQ ID NO: 44453 - RNA, 15 nt, Synthetic Construct
  source 1..15: mol_type = other RNA
agttgaccgcctggg

SEQ ID NO: 44454 - RNA, 15 nt, Synthetic Construct
  source 1..15: mol_type = other RNA
agttgaccgcctggg

SEQ ID NO: 44455 - RNA, 23 nt, Synthetic Construct
  source 1..23: mol_type = other RNA
tgaggtagtgggttgtgtggttt

SEQ ID NO: 44456 - RNA, 23 nt, Synthetic Construct
  source 1..23: mol_type = other RNA
tgaggtagtgggttgtgtggttt

SEQ ID NO: 44457 - RNA, 23 nt, Synthetic Construct
  source 1..23: mol_type = other RNA
ctcactgatcgagtcgtcctgcg

SEQ ID NO: 44458 - RNA, 23 nt, Synthetic Construct
  source 1..23: mol_type = other RNA
tgaggtagcaggttgtgtggttt

SEQ ID NO: 44459 - RNA, 23 nt, Synthetic Construct
  source 1..23: mol_type = other RNA
tgaggtagcaggttgtgtggttt

SEQ ID NO: 44460 - RNA, 24 nt, Synthetic Construct
  source 1..24: mol_type = other RNA
tcactgatcgagtcgtcctgcgcg

SEQ ID NO: 44461 - RNA, 24 nt, Synthetic Construct
  source 1..24: mol_type = other RNA
tcactgatcgagtcgtcctgcgcg

SEQ ID NO: 44462 - RNA, 22 nt, Synthetic Construct
  source 1..22: mol_type = other RNA
tccagcatcagtgattttgttg

SEQ ID NO: 44463 - RNA, 23 nt, Synthetic Construct
  source 1..23: mol_type = other RNA
tggtaatacgacgtacttagtga

SEQ ID NO: 44464 - RNA, 23 nt, Synthetic Construct
  source 1..23: mol_type = other RNA
tggtaatacgacgtacttagtga

SEQ ID NO: 44465 - RNA, 29 nt, Synthetic Construct
  source 1..29: mol_type = other RNA
cccgtgtgaaagtaggtcatcgtcaggct

SEQ ID NO: 44466 - RNA, 29 nt, Synthetic Construct
  source 1..29: mol_type = other RNA
cccgtgtgaaagtaggtcatcgtcaggct

SEQ ID NO: 44467 - RNA, 31 nt, Synthetic Construct; identical to SEQ ID NO: 1627
  source 1..31: mol_type = other RNA

SEQ ID NO: 44468 - RNA, 31 nt, Synthetic Construct; identical to SEQ ID NO: 1627
  source 1..31: mol_type = other RNA

SEQ ID NO: 44469 - RNA, 25 nt, Synthetic Construct
  source 1..25: mol_type = other RNA
cctcgcgcgattggagcggccgata

SEQ ID NO: 44470 - RNA, 22 nt, Synthetic Construct
  source 1..22: mol_type = other RNA
ctttgttcgattccgttgagta

SEQ ID NO: 44471 - RNA, 16 nt, Synthetic Construct
  source 1..16: mol_type = other RNA
agttgaccgcctgggg

SEQ ID NO: 44472 - RNA, 32 nt, Synthetic Construct; identical to SEQ ID NO: 4279
  source 1..32: mol_type = other RNA

SEQ ID NO: 44473 - RNA, 32 nt, Synthetic Construct; identical to SEQ ID NO: 4279
  source 1..32: mol_type = other RNA

SEQ ID NO: 44474 - RNA, 36 nt, Synthetic Construct; identical to SEQ ID NO: 2660
  source 1..36: mol_type = other RNA

SEQ ID NO: 44475 - RNA, 22 nt, Synthetic Construct
  source 1..22: mol_type = other RNA
tgaggtaataggttgtgtggtt

SEQ ID NO: 44476 - RNA, 22 nt, Synthetic Construct
  source 1..22: mol_type = other RNA
tgaggtaataggttgtgtggtt

SEQ ID NO: 44477 - RNA, 16 nt, Synthetic Construct
  source 1..16: mol_type = other RNA
gcagacgaagtgagtg

SEQ ID NO: 44478 - RNA, 21 nt, Synthetic Construct
  source 1..21: mol_type = other RNA
tgaggggcagggagcgagact

SEQ ID NO: 44479 - RNA, 18 nt, Synthetic Construct
  source 1..18: mol_type = other RNA
ggccgtcgtcagctcgtg

SEQ ID NO: 44480 - RNA, 16 nt, Synthetic Construct
  source 1..16: mol_type = other RNA
tgcacgaaagcgtggg

SEQ ID NO: 44481 - RNA, 16 nt, Synthetic Construct
  source 1..16: mol_type = other RNA
tgcacgaaagcgtggg

SEQ ID NO: 44482 - RNA, 32 nt, Synthetic Construct; identical to SEQ ID NO: 4279
  source 1..32: mol_type = other RNA

SEQ ID NO: 44483 - RNA, 32 nt, Synthetic Construct; identical to SEQ ID NO: 4279
  source 1..32: mol_type = other RNA

SEQ ID NO: 44484 - RNA, 19 nt, Synthetic Construct
  source 1..19: mol_type = other RNA
tgtcaactggttgttggga

SEQ ID NO: 44485 - RNA, 21 nt, Synthetic Construct
  source 1..21: mol_type = other RNA
tggagtgtgacaatggtgctt

SEQ ID NO: 44486 - RNA, 21 nt, Synthetic Construct
  source 1..21: mol_type = other RNA
tggagtgtgacaatggtgctt

SEQ ID NO: 44487 - RNA, 16 nt, Synthetic Construct
  source 1..16: mol_type = other RNA
tcagtagctcgaggaa

SEQ ID NO: 44488 - RNA, 16 nt, Synthetic Construct
  source 1..16: mol_type = other RNA
tcagtagctcgaggaa

SEQ ID NO: 44489 - RNA, 28 nt, Synthetic Construct
  source 1..28: mol_type = other RNA
tgttggttcaagcgtgtagtcgtgctct

SEQ ID NO: 44490 - RNA, 28 nt, Synthetic Construct
  source 1..28: mol_type = other RNA
tgttggttcaagcgtgtagtcgtgctct

SEQ ID NO: 44491 - RNA, 30 nt, Synthetic Construct; identical to SEQ ID NO: 2407
  source 1..30: mol_type = other RNA

SEQ ID NO: 44492 - RNA, 18 nt, Synthetic Construct
  source 1..18: mol_type = other RNA
cagcactctgcaaagacg

SEQ ID NO: 44493 - RNA, 23 nt, Synthetic Construct
  source 1..23: mol_type = other RNA
ggtagcgaaattccttgtcgggt

SEQ ID NO: 44494 - RNA, 23 nt, Synthetic Construct
  source 1..23: mol_type = other RNA
ggtagcgaaattccttgtcgggt

SEQ ID NO: 44495 - RNA, 16 nt, Synthetic Construct
  source 1..16: mol_type = other RNA
accgcttttgtcaggg

SEQ ID NO: 44496 - RNA, 16 nt, Synthetic Construct
  source 1..16: mol_type = other RNA
accgcttttgtcaggg

SEQ ID NO: 44497 - RNA, 23 nt, Synthetic Construct
  source 1..23: mol_type = other RNA
tggtagtacgacgtacttagtgt

SEQ ID NO: 44498 - RNA, 23 nt, Synthetic Construct
  source 1..23: mol_type = other RNA
nggtaatacgacgtacttagtgt

SEQ ID NO: 44499 - RNA, 23 nt, Synthetic Construct
  source 1..23: mol_type = other RNA
nggtaatacgacgtacttagtgt

SEQ ID NO: 44500 - RNA, 18 nt, Synthetic Construct
  source 1..18: mol_type = other RNA
cctgtaccgatcaatagt

SEQ ID NO: 44501 - RNA, 18 nt, Synthetic Construct
  source 1..18: mol_type = other RNA
tctaatgagactgccggt

SEQ ID NO: 44502 - RNA, 18 nt, Synthetic Construct
  source 1..18: mol_type = other RNA
tctaatgagactgccggt

SEQ ID NO: 44503 - RNA, 23 nt, Synthetic Construct
  source 1..23: mol_type = other RNA
agcagcattgtacagggctatgt

SEQ ID NO: 44504 - RNA, 16 nt, Synthetic Construct
  source 1..16: mol_type = other RNA
tcagtagctcgaggaa

SEQ ID NO: 44505 - RNA, 16 nt, Synthetic Construct
  source 1..16: mol_type = other RNA
tcagtagctcgaggaa

SEQ ID NO: 44506 - RNA, 23 nt, Synthetic Construct
  source 1..23: mol_type = other RNA
tgaggggcagagagtgagacttt

SEQ ID NO: 44507 - RNA, 23 nt, Synthetic Construct
  source 1..23: mol_type = other RNA
tctttgttcgattccgttgagta

SEQ ID NO: 44508 - RNA, 23 nt, Synthetic Construct
  source 1..23: mol_type = other RNA
tctttgttcgattccgttgagta

SEQ ID NO: 44509 - RNA, 22 nt, Synthetic Construct
  source 1..22: mol_type = other RNA
tcctgtactaagctgccccgag

SEQ ID NO: 44510 - RNA, 22 nt, Synthetic Construct
  source 1..22: mol_type = other RNA
tcctgtactaagctgccccgag

SEQ ID NO: 44511 - RNA, 22 nt, Synthetic Construct
  source 1..22: mol_type = other RNA
tgaggtaatagtttgtgctgtt

SEQ ID NO: 44512 - RNA, 22 nt, Synthetic Construct
  source 1..22: mol_type = other RNA
tgaggtaatagtttgtgctgtt

SEQ ID NO: 44513 - RNA, 23 nt, Synthetic Construct
  source 1..23: mol_type = other RNA
tcggaatcgctagtaatcgcgga

SEQ ID NO: 44514 - RNA, 21 nt, Synthetic Construct
  source 1..21: mol_type = other RNA
tcctgcactgagctgccccga

SEQ ID NO: 44515 - RNA, 21 nt, Synthetic Construct
  source 1..21: mol_type = other RNA
tcctgcactgagctgccccga

SEQ ID NO: 44516 - RNA, 22 nt, Synthetic Construct
  source 1..22: mol_type = other RNA
tcactgatcgagtcgtcctgcg

SEQ ID NO: 44517 - RNA, 23 nt, Synthetic Construct
  source 1..23: mol_type = other RNA
tctttggttatctagctgtatgt

SEQ ID NO: 44518 - RNA, 35 nt, Synthetic Construct; identical to SEQ ID NO: 2762
  source 1..35: mol_type = other RNA

SEQ ID NO: 44519 - RNA, 27 nt, Synthetic Construct
  source 1..27: mol_type = other RNA
cgactcttagcggtggatcactcggct

SEQ ID NO: 44520 - RNA, 27 nt, Synthetic Construct
  source 1..27: mol_type = other RNA
cgactcttagcggtggatcactcggct

SEQ ID NO: 44521 - RNA, 22 nt, Synthetic Construct
  source 1..22: mol_type = other RNA
gcactctaatgagactgccggt

SEQ ID NO: 44522 - RNA, 15 nt, Synthetic Construct
  source 1..15: mol_type = other RNA
gcaagccgaacggta

SEQ ID NO: 44523 - RNA, 15 nt, Synthetic Construct
  source 1..15: mol_type = other RNA
gcaagccgaacggta

SEQ ID NO: 44524 - RNA, 17 nt, Synthetic Construct
  source 1..17: mol_type = other RNA
cccctggacctgtactg

SEQ ID NO: 44525 - RNA, 17 nt, Synthetic Construct
  source 1..17: mol_type = other RNA
cccctggacctgtactg

SEQ ID NO: 44526 - RNA, 22 nt, Synthetic Construct
  source 1..22: mol_type = other RNA
tcctatactgagctgccccgag

SEQ ID NO: 44527 - RNA, 22 nt, Synthetic Construct
  source 1..22: mol_type = other RNA
tcctatactgagctgccccgag

SEQ ID NO: 44528 - RNA, 23 nt, Synthetic Construct
  source 1..23: mol_type = other RNA
tgaggggcggagagcgagacttt

SEQ ID NO: 44529 - RNA, 23 nt, Synthetic Construct
  source 1..23: mol_type = other RNA
tgaggggcggagagcgagacttt

SEQ ID NO: 44530 - RNA, 25 nt, Synthetic Construct
  source 1..25: mol_type = other RNA
ggtaaaatggctgagtgaagcattg

SEQ ID NO: 44531 - RNA, 25 nt, Synthetic Construct
  source 1..25: mol_type = other RNA
ggtaaaatggctgagtgaagcattg

SEQ ID NO: 44532 - RNA, 22 nt, Synthetic Construct
  source 1..22: mol_type = other RNA
cgaggtagtaggttgtgtggtt

SEQ ID NO: 44533 - RNA, 23 nt, Synthetic Construct
  source 1..23: mol_type = other RNA
tagtaatacgacgtacttagtgt

SEQ ID NO: 44534 - RNA, 18 nt, Synthetic Construct
  source 1..18: mol_type = other RNA
ccagtaaacggcggccgt

SEQ ID NO: 44535 - RNA, 18 nt, Synthetic Construct
  source 1..18: mol_type = other RNA
ccagtaaacggcggccgt

SEQ ID NO: 44536 - RNA, 27 nt, Synthetic Construct
  source 1..27: mol_type = other RNA
gactcttagcggtggatcactcggctc

SEQ ID NO: 44537 - RNA, 27 nt, Synthetic Construct
  source 1..27: mol_type = other RNA
gactcttagcggtggatcactcggctc

SEQ ID NO: 44538 - RNA, 20 nt, Synthetic Construct
  source 1..20: mol_type = other RNA
tgaggtagtaggctgtgtgg

SEQ ID NO: 44539 - RNA, 20 nt, Synthetic Construct
  source 1..20: mol_type = other RNA
tgaggtagtaggctgtgtgg

SEQ ID NO: 44540 - RNA, 15 nt, Synthetic Construct
  source 1..15: mol_type = other RNA
gttgaccgcctgggg

SEQ ID NO: 44541 - RNA, 22 nt, Synthetic Construct
  source 1..22: mol_type = other RNA
tcttggagtaggtcattgggtg

SEQ ID NO: 44542 - RNA, 34 nt, Synthetic Construct; identical to SEQ ID NO: 2183
  source 1..34: mol_type = other RNA

SEQ ID NO: 44543 - RNA, 23 nt, Synthetic Construct
  source 1..23: mol_type = other RNA
tcactgatcgagtcgtcctgcgc

SEQ ID NO: 44544 - RNA, 23 nt, Synthetic Construct
  source 1..23: mol_type = other RNA
tcactgatcgagtcgtcctgcgc

SEQ ID NO: 44545 - RNA, 20 nt, Synthetic Construct
  source 1..20: mol_type = other RNA
tgaggtggtaggttgtgtgg

SEQ ID NO: 44546 - RNA, 20 nt, Synthetic Construct
  source 1..20: mol_type = other RNA
tgaggtggtaggttgtgtgg

SEQ ID NO: 44547 - RNA, 22 nt, Synthetic Construct
  source 1..22: mol_type = other RNA
gtgccgaagctgtgggattgat

SEQ ID NO: 44548 - RNA, 22 nt, Synthetic Construct
  source 1..22: mol_type = other RNA
gtgccgaagctgtgggattgat

SEQ ID NO: 44549 - RNA, 28 nt, Synthetic Construct
  source 1..28: mol_type = other RNA
ggatttccccttggggttgtaggaccac

SEQ ID NO: 44550 - RNA, 28 nt, Synthetic Construct
  source 1..28: mol_type = other RNA
ggatttccccttggggttgtaggaccac

SEQ ID NO: 44551 - RNA, 15 nt, Synthetic Construct
  source 1..15: mol_type = other RNA
gctttgatccggaga

SEQ ID NO: 44552 - RNA, 21 nt, Synthetic Construct
  source 1..21: mol_type = other RNA
agcgtgcttgactgcgagact

SEQ ID NO: 44553 - RNA, 21 nt, Synthetic Construct
  source 1..21: mol_type = other RNA
tgaggtagtaggtcgtgtggt

SEQ ID NO: 44554 - RNA, 21 nt, Synthetic Construct
  source 1..21: mol_type = other RNA
tgaggtagtaggtcgtgtggt

SEQ ID NO: 44555 - RNA, 22 nt, Synthetic Construct
  source 1..22: mol_type = other RNA
tgaggtagtaggttgtgtgatt

SEQ ID NO: 44556 - RNA, 22 nt, Synthetic Construct
  source 1..22: mol_type = other RNA
tgttggttcaagcgtgtagtcg

SEQ ID NO: 44557 - RNA, 34 nt, Synthetic Construct; identical to SEQ ID NO: 2186
  source 1..34: mol_type = other RNA

SEQ ID NO: 44558 - RNA, 17 nt, Synthetic Construct
  source 1..17: mol_type = other RNA
cccctggacctgtactg

SEQ ID NO: 44559 - RNA, 17 nt, Synthetic Construct
  source 1..17: mol_type = other RNA
cccctggacctgtactg

SEQ ID NO: 44560 - RNA, 32 nt, Synthetic Construct; identical to SEQ ID NO: 2318
  source 1..32: mol_type = other RNA

SEQ ID NO: 44561 - RNA, 32 nt, Synthetic Construct; identical to SEQ ID NO: 2318
  source 1..32: mol_type = other RNA

SEQ ID NO: 44562 - RNA, 15 nt, Synthetic Construct
  source 1..15: mol_type = other RNA
ggccgtcgtcagctc

SEQ ID NO: 44563 - RNA, 15 nt, Synthetic Construct
  source 1..15: mol_type = other RNA
ggccgtcgtcagctc

SEQ ID NO: 44564 - RNA, 19 nt, Synthetic Construct
  source 1..19: mol_type = other RNA
aacagtcaggatgttggct

SEQ ID NO: 44565 - RNA, 15 nt, Synthetic Construct
  source 1..15: mol_type = other RNA
tggccgtcgtcagct

SEQ ID NO: 44566 - RNA, 15 nt, Synthetic Construct
  source 1..15: mol_type = other RNA
tggccgtcgtcagct

SEQ ID NO: 44567 - RNA, 18 nt, Synthetic Construct
  source 1..18: mol_type = other RNA
tcccctggacctgtactg

SEQ ID NO: 44568 - RNA, 18 nt, Synthetic Construct
  source 1..18: mol_type = other RNA
tcccctggacctgtactg

SEQ ID NO: 44569 - RNA, 24 nt, Synthetic Construct
  source 1..24: mol_type = other RNA
tgtaaacatccccgaccggaagct

SEQ ID NO: 44570 - RNA, 28 nt, Synthetic Construct
  source 1..28: mol_type = other RNA
cgactcttagcggtggatcactcggctc

SEQ ID NO: 44571 - RNA, 25 nt, Synthetic Construct
  source 1..25: mol_type = other RNA
ttgagggtatgagatcgagacgaca

SEQ ID NO: 44572 - RNA, 25 nt, Synthetic Construct
  source 1..25: mol_type = other RNA
ttgagggtatgagatcgagacgaca

SEQ ID NO: 44573 - RNA, 31 nt, Synthetic Construct; identical to SEQ ID NO: 2295
  source 1..31: mol_type = other RNA

SEQ ID NO: 44574 - RNA, 21 nt, Synthetic Construct
  source 1..21: mol_type = other RNA
agccatcatttaaagaaagcg

SEQ ID NO: 44575 - RNA, 21 nt, Synthetic Construct
  source 1..21: mol_type = other RNA
agccatcatttaaagaaagcg

SEQ ID NO: 44576 - RNA, 20 nt, Synthetic Construct
  source 1..20: mol_type = other RNA
actgatcgagtcgtcctgcg

SEQ ID NO: 44577 - RNA, 20 nt, Synthetic Construct
  source 1..20: mol_type = other RNA
actgatcgagtcgtcctgcg

SEQ ID NO: 44578 - RNA, 26 nt, Synthetic Construct
  source 1..26: mol_type = other RNA
gagcagctaataccgcatacgacctg

SEQ ID NO: 44579 - RNA, 22 nt, Synthetic Construct
  source 1..22: mol_type = other RNA
tcagcgccgatgatagtgcgga

SEQ ID NO: 44580 - RNA, 22 nt, Synthetic Construct
  source 1..22: mol_type = other RNA
tcagcgccgatgatagtgcgga

SEQ ID NO: 44581 - RNA, 15 nt, Synthetic Construct
  source 1..15: mol_type = other RNA
gtcgtcctgcgcgga

SEQ ID NO: 44582 - RNA, 15 nt, Synthetic Construct
  source 1..15: mol_type = other RNA
gtcgtcctgcgcgga

SEQ ID NO: 44583 - RNA, 38 nt, Synthetic Construct; identical to SEQ ID NO: 11817
  source 1..38: mol_type = other RNA

SEQ ID NO: 44584 - RNA, 38 nt, Synthetic Construct; identical to SEQ ID NO: 11817
  source 1..38: mol_type = other RNA

SEQ ID NO: 44585 - RNA, 20 nt, Synthetic Construct
  source 1..20: mol_type = other RNA
tcctgtaccgatcaatagtg

SEQ ID NO: 44586 - RNA, 20 nt, Synthetic Construct
  source 1..20: mol_type = other RNA
tcctgtaccgatcaatagtg

SEQ ID NO: 44587 - RNA, 27 nt, Synthetic Construct
  source 1..27: mol_type = other RNA
ccccccgctgctaaatttgactggcta

SEQ ID NO: 44588 - RNA, 23 nt, Synthetic Construct
  source 1..23: mol_type = other RNA
tggtaatatgacgtacttagtgt

SEQ ID NO: 44589 - RNA, 23 nt, Synthetic Construct
  source 1..23: mol_type = other RNA
tggtaatatgacgtacttagtgt

SEQ ID NO: 44590 - RNA, 21 nt, Synthetic Construct
  source 1..21: mol_type = other RNA
tgaggggcagagggcgagact

SEQ ID NO: 44591 - RNA, 16 nt, Synthetic Construct
  source 1..16: mol_type = other RNA
atgcaagtcgaacggt

SEQ ID NO: 44592 - RNA, 16 nt, Synthetic Construct
  source 1..16: mol_type = other RNA
atgcaagtcgaacggt

SEQ ID NO: 44593 - RNA, 23 nt, Synthetic Construct
  source 1..23: mol_type = other RNA
tgaggtagtaggttgtgcggttt

SEQ ID NO: 44594 - RNA, 17 nt, Synthetic Construct
  source 1..17: mol_type = other RNA
gtgttcggaagattttc

SEQ ID NO: 44595 - RNA, 17 nt, Synthetic Construct
  source 1..17: mol_type = other RNA
gtgttcggaagattttc

SEQ ID NO: 44596 - RNA, 20 nt, Synthetic Construct
  source 1..20: mol_type = other RNA
tgaggtagtaggttgtgtgt

SEQ ID NO: 44597 - RNA, 20 nt, Synthetic Construct
  source 1..20: mol_type = other RNA
tgaggtagtaggttgtgtgt

SEQ ID NO: 44598 - RNA, 23 nt, Synthetic Construct
  source 1..23: mol_type = other RNA
tagcagcacgtaaatattggcgt

SEQ ID NO: 44599 - RNA, 23 nt, Synthetic Construct
  source 1..23: mol_type = other RNA
tagcagcacgtaaatattggcgt

SEQ ID NO: 44600 - RNA, 17 nt, Synthetic Construct
  source 1..17: mol_type = other RNA
gaagttgaccgcctggg

SEQ ID NO: 44601 - RNA, 18 nt, Synthetic Construct
  source 1..18: mol_type = other RNA
ggtgcaagcgttaatcgg

SEQ ID NO: 44602 - RNA, 23 nt, Synthetic Construct
  source 1..23: mol_type = other RNA
cctcgcgcgattggagcggccga

SEQ ID NO: 44603 - RNA, 15 nt, Synthetic Construct
  source 1..15: mol_type = other RNA
aggtgggaggctttg

SEQ ID NO: 44604 - RNA, 15 nt, Synthetic Construct
  source 1..15: mol_type = other RNA
aggtgggaggctttg

SEQ ID NO: 44605 - RNA, 23 nt, Synthetic Construct
  source 1..23: mol_type = other RNA
ccctgtactgagctgccccgaga

SEQ ID NO: 44606 - RNA, 23 nt, Synthetic Construct
  source 1..23: mol_type = other RNA
ccctgtactgagctgccccgaga

SEQ ID NO: 44607 - RNA, 17 nt, Synthetic Construct
  source 1..17: mol_type = other RNA
gaagttgaccgcctggg

SEQ ID NO: 44608 - RNA, 20 nt, Synthetic Construct
  source 1..20: mol_type = other RNA
tcagtagctcgaggaaaaga

SEQ ID NO: 44609 - RNA, 23 nt, Synthetic Construct
  source 1..23: mol_type = other RNA
tggtagtacgacgtacttagtgt

SEQ ID NO: 44610 - RNA, 23 nt, Synthetic Construct
  source 1..23: mol_type = other RNA
tggtagtacgacgtacttagtgt

SEQ ID NO: 44611 - RNA, 16 nt, Synthetic Construct
  source 1..16: mol_type = other RNA
atgcaagtcgaacggt

SEQ ID NO: 44612 - RNA, 16 nt, Synthetic Construct
  source 1..16: mol_type = other RNA
atgcaagtcgaacggt

SEQ ID NO: 44613 - RNA, 22 nt, Synthetic Construct
  source 1..22: mol_type = other RNA
tgaggtagcaggttgtatagtt

SEQ ID NO: 44614 - RNA, 22 nt, Synthetic Construct
  source 1..22: mol_type = other RNA
tgaggtagcaggttgtatagtt

SEQ ID NO: 44615 - RNA, 32 nt, Synthetic Construct; identical to SEQ ID NO: 3713
  source 1..32: mol_type = other RNA

SEQ ID NO: 44616 - RNA, 32 nt, Synthetic Construct; identical to SEQ ID NO: 3713
  source 1..32: mol_type = other RNA

SEQ ID NO: 44617 - RNA, 16 nt, Synthetic Construct
  source 1..16: mol_type = other RNA
gcggctgtagctcagt

SEQ ID NO: 44618 - RNA, 16 nt, Synthetic Construct
  source 1..16: mol_type = other RNA
gcggctgtagctcagt

SEQ ID NO: 44619 - RNA, 17 nt, Synthetic Construct
  source 1..17: mol_type = other RNA
tgccagcagccgcggta

SEQ ID NO: 44620 - RNA, 17 nt, Synthetic Construct
  source 1..17: mol_type = other RNA
tgccagcagccgcggta

SEQ ID NO: 44621 - RNA, 28 nt, Synthetic Construct
  source 1..28: mol_type = other RNA
gctttacattggactttgaacagatctg

SEQ ID NO: 44622 - RNA, 21 nt, Synthetic Construct
  source 1..21: mol_type = other RNA
tgaggggcagagggcgagact

SEQ ID NO: 44623 - RNA, 21 nt, Synthetic Construct
  source 1..21: mol_type = other RNA
tgaggggcagagggcgagact

SEQ ID NO: 44624 - RNA, 24 nt, Synthetic Construct
  source 1..24: mol_type = other RNA
gctcactgatcgagtcgtcctgcg

SEQ ID NO: 44625 - RNA, 24 nt, Synthetic Construct
  source 1..24: mol_type = other RNA
gctcactgatcgagtcgtcctgcg

SEQ ID NO: 44626 - RNA, 17 nt, Synthetic Construct
  source 1..17: mol_type = other RNA
atgcaagtcgaacggta

SEQ ID NO: 44627 - RNA, 17 nt, Synthetic Construct
  source 1..17: mol_type = other RNA
atgcaagtcgaacggta

SEQ ID NO: 44628 - RNA, 19 nt, Synthetic Construct
  source 1..19: mol_type = other RNA
aggacagtgaaacgagtca

SEQ ID NO: 44629 - RNA, 19 nt, Synthetic Construct
  source 1..19: mol_type = other RNA
aggacagtgaaacgagtca

SEQ ID NO: 44630 - RNA, 16 nt, Synthetic Construct
  source 1..16: mol_type = other RNA
gtccggatcgtagtct

SEQ ID NO: 44631 - RNA, 28 nt, Synthetic Construct
  source 1..28: mol_type = other RNA
tgttggttcaagcgtgtagtcgtgctct

SEQ ID NO: 44632 - RNA, 28 nt, Synthetic Construct
  source 1..28: mol_type = other RNA
tgttggttcaagcgtgtagtcgtgctct

SEQ ID NO: 44633 - RNA, 15 nt, Synthetic Construct
  source 1..15: mol_type = other RNA
ccgcttttgtcaggg

SEQ ID NO: 44634 - RNA, 15 nt, Synthetic Construct
  source 1..15: mol_type = other RNA
ccgcttttgtcaggg

SEQ ID NO: 44635 - RNA, 19 nt, Synthetic Construct
  source 1..19: mol_type = other RNA
gtccggatcgtagtctgca

SEQ ID NO: 44636 - RNA, 19 nt, Synthetic Construct
  source 1..19: mol_type = other RNA
gtccggatcgtagtctgca

SEQ ID NO: 44637 - RNA, 23 nt, Synthetic Construct
  source 1..23: mol_type = other RNA
tggaatgtaaagaagtatgtacc

SEQ ID NO: 44638 - RNA, 23 nt, Synthetic Construct
  source 1..23: mol_type = other RNA
tggaatgtaaagaagtatgtacc

SEQ ID NO: 44639 - RNA, 27 nt, Synthetic Construct
  source 1..27: mol_type = other RNA
ggggagctaatcccagaaacccggtcg

SEQ ID NO: 44640 - RNA, 27 nt, Synthetic Construct
  source 1..27: mol_type = other RNA
ggggagctaatcccagaaacccggtcg

SEQ ID NO: 44641 - RNA, 31 nt, Synthetic Construct; identical to SEQ ID NO: 2278
  source 1..31: mol_type = other RNA

SEQ ID NO: 44642 - RNA, 27 nt, Synthetic Construct
  source 1..27: mol_type = other RNA
ggatttccccttggggttgtaggacca

SEQ ID NO: 44643 - RNA, 27 nt, Synthetic Construct
  source 1..27: mol_type = other RNA
ggatttccccttggggttgtaggacca

SEQ ID NO: 44644 - RNA, 23 nt, Synthetic Construct
  source 1..23: mol_type = other RNA
tcctgtactgagctgccccgggt

SEQ ID NO: 44645 - RNA, 23 nt, Synthetic Construct
  source 1..23: mol_type = other RNA
tcctgtactgagctgccccgggt

SEQ ID NO: 44646 - RNA, 23 nt, Synthetic Construct
  source 1..23: mol_type = other RNA
agcagcattgtacagggctatgt

SEQ ID NO: 44647 - RNA, 23 nt, Synthetic Construct
  source 1..23: mol_type = other RNA
tgaggggcagagggcgagacttt

SEQ ID NO: 44648 - RNA, 23 nt, Synthetic Construct
  source 1..23: mol_type = other RNA
tgaggggcagagggcgagacttt

SEQ ID NO: 44649 - RNA, 16 nt, Synthetic Construct
  source 1..16: mol_type = other RNA
ctcagtagctcgagga

SEQ ID NO: 44650 - RNA, 17 nt, Synthetic Construct
  source 1..17: mol_type = other RNA
cagtagctcgaggaaaa

SEQ ID NO: 44651 - RNA, 17 nt, Synthetic Construct
  source 1..17: mol_type = other RNA
cagtagctcgaggaaaa

SEQ ID NO: 44652 - RNA, 15 nt, Synthetic Construct
  source 1..15: mol_type = other RNA
ccgcttttgtcaggg

SEQ ID NO: 44653 - RNA, 18 nt, Synthetic Construct
  source 1..18: mol_type = other RNA
accaaggggtcgtgggtt

SEQ ID NO: 44654 - RNA, 18 nt, Synthetic Construct
  source 1..18: mol_type = other RNA
accaaggggtcgtgggtt

SEQ ID NO: 44655 - RNA, 22 nt, Synthetic Construct
  source 1..22: mol_type = other RNA
gaagaggacttggagctcgatc

SEQ ID NO: 44656 - RNA, 22 nt, Synthetic Construct
  source 1..22: mol_type = other RNA
gaagaggacttggagctcgatc

SEQ ID NO: 44657 - RNA, 22 nt, Synthetic Construct
  source 1..22: mol_type = other RNA
tgaggtggtaggttgtgtggtt

SEQ ID NO: 44658 - RNA, 23 nt, Synthetic Construct
  source 1..23: mol_type = other RNA
tccagtactgagctgccccgaga

SEQ ID NO: 44659 - RNA, 23 nt, Synthetic Construct
  source 1..23: mol_type = other RNA
tccagtactgagctgccccgaga

SEQ ID NO: 44660 - RNA, 23 nt, Synthetic Construct
  source 1..23: mol_type = other RNA
atatcggaacgtgcccagtcgtg

SEQ ID NO: 44661 - RNA, 23 nt, Synthetic Construct
  source 1..23: mol_type = other RNA
tggtaatacgatgtacttagtgt

SEQ ID NO: 44662 - RNA, 23 nt, Synthetic Construct
  source 1..23: mol_type = other RNA
tggtaatacgatgtacttagtgt

SEQ ID NO: 44663 - RNA, 36 nt, Synthetic Construct; identical to SEQ ID NO: 2660
  source 1..36: mol_type = other RNA

SEQ ID NO: 44664 - RNA, 36 nt, Synthetic Construct; identical to SEQ ID NO: 2660
  source 1..36: mol_type = other RNA

SEQ ID NO: 44665 - RNA, 16 nt, Synthetic Construct
  source 1..16: mol_type = other RNA
gtccccttcgtctaga

SEQ ID NO: 44666 - RNA, 21 nt, Synthetic Construct
  source 1..21: mol_type = other RNA
cacgtcatacaatggccggga

SEQ ID NO: 44667 - RNA, 21 nt, Synthetic Construct
  source 1..21: mol_type = other RNA
cacgtcatacaatggccggga

SEQ ID NO: 44668 - RNA, 20 nt, Synthetic Construct
  source 1..20: mol_type = other RNA
tgagatagtaggttgtgtgg

SEQ ID NO: 44669 - RNA, 20 nt, Synthetic Construct
  source 1..20: mol_type = other RNA
tgagatagtaggttgtgtgg

SEQ ID NO: 44670 - RNA, 19 nt, Synthetic Construct
  source 1..19: mol_type = other RNA
tcagtagctcgaggaaaag

SEQ ID NO: 44671 - RNA, 19 nt, Synthetic Construct
  source 1..19: mol_type = other RNA
tcagtagctcgaggaaaag

SEQ ID NO: 44672 - RNA, 23 nt, Synthetic Construct
  source 1..23: mol_type = other RNA
tccccttggggttgtaggaccac

SEQ ID NO: 44673 - RNA, 23 nt, Synthetic Construct
  source 1..23: mol_type = other RNA
tccccttggggttgtaggaccac

SEQ ID NO: 44674 - RNA, 21 nt, Synthetic Construct
  source 1..21: mol_type = other RNA
tgaggggcagagagcgggact

SEQ ID NO: 44675 - RNA, 17 nt, Synthetic Construct
  source 1..17: mol_type = other RNA
gccatgccgcgtgcggg

SEQ ID NO: 44676 - RNA, 21 nt, Synthetic Construct
  source 1..21: mol_type = other RNA
tggagtgtgacgatggtgttt

SEQ ID NO: 44677 - RNA, 21 nt, Synthetic Construct
  source 1..21: mol_type = other RNA
tggagtgtgacgatggtgttt

SEQ ID NO: 44678 - RNA, 22 nt, Synthetic Construct
  source 1..22: mol_type = other RNA
tgtcaactggttgttgggaggg

SEQ ID NO: 44679 - RNA, 22 nt, Synthetic Construct
  source 1..22: mol_type = other RNA
tgtcaactggttgttgggaggg

SEQ ID NO: 44680 - RNA, 32 nt, Synthetic Construct; identical to SEQ ID NO: 4710
  source 1..32: mol_type = other RNA

SEQ ID NO: 44681 - RNA, 32 nt, Synthetic Construct; identical to SEQ ID NO: 4710
  source 1..32: mol_type = other RNA

SEQ ID NO: 44682 - RNA, 23 nt, Synthetic Construct
  source 1..23: mol_type = other RNA
tggtaatacggcgtacttagtgt

SEQ ID NO: 44683 - RNA, 22 nt, Synthetic Construct
  source 1..22: mol_type = other RNA
taaggtagtaggttgtatagtt

SEQ ID NO: 44684 - RNA, 22 nt, Synthetic Construct
  source 1..22: mol_type = other RNA
taaggtagtaggttgtatagtt

SEQ ID NO: 44685 - RNA, 23 nt, Synthetic Construct
  source 1..23: mol_type = other RNA
tcctgtaccgagctgccccgaga

SEQ ID NO: 44686 - RNA, 23 nt, Synthetic Construct
  source 1..23: mol_type = other RNA
tcctgtaccgagctgccccgaga

SEQ ID NO: 44687 - RNA, 31 nt, Synthetic Construct; identical to SEQ ID NO: 5943
  source 1..31: mol_type = other RNA

SEQ ID NO: 44688 - RNA, 31 nt, Synthetic Construct; identical to SEQ ID NO: 5943
  source 1..31: mol_type = other RNA

SEQ ID NO: 44689 - RNA, 22 nt, Synthetic Construct
  source 1..22: mol_type = other RNA
tctttgttcgattccgttgagt

SEQ ID NO: 44690 - RNA, 22 nt, Synthetic Construct
  source 1..22: mol_type = other RNA
tctttgttcgattccgttgagt

SEQ ID NO: 44691 - RNA, 17 nt, Synthetic Construct
  source 1..17: mol_type = other RNA
cgatctgtagctggtct

SEQ ID NO: 44692 - RNA, 23 nt, Synthetic Construct
  source 1..23: mol_type = other RNA
tgaggggcggagagcgagacttt

SEQ ID NO: 44693 - RNA, 23 nt, Synthetic Construct
  source 1..23: mol_type = other RNA
tgaggggcggagagcgagacttt

SEQ ID NO: 44694 - RNA, 33 nt, Synthetic Construct; identical to SEQ ID NO: 2638
  source 1..33: mol_type = other RNA

SEQ ID NO: 44695 - RNA, 20 nt, Synthetic Construct
  source 1..20: mol_type = other RNA
gaatcgctagtaatcgcgga

SEQ ID NO: 44696 - RNA, 22 nt, Synthetic Construct
  source 1..22: mol_type = other RNA
gaagcacattcgcacatcatat

SEQ ID NO: 44697 - RNA, 22 nt, Synthetic Construct
  source 1..22: mol_type = other RNA
gaagcacattcgcacatcatat

SEQ ID NO: 44698 - RNA, 16 nt, Synthetic Construct
  source 1..16: mol_type = other RNA
ggtgggggtcgttggt

SEQ ID NO: 44699 - RNA, 24 nt, Synthetic Construct
  source 1..24: mol_type = other RNA
ttccccttggggttgtaggaccac

SEQ ID NO: 44700 - RNA, 24 nt, Synthetic Construct
  source 1..24: mol_type = other RNA
ttccccttggggttgtaggaccac

SEQ ID NO: 44701 - RNA, 17 nt, Synthetic Construct
  source 1..17: mol_type = other RNA
ccgtgtgaaagtaggtc

SEQ ID NO: 44702 - RNA, 17 nt, Synthetic Construct
  source 1..17: mol_type = other RNA
ccgtgtgaaagtaggtc

SEQ ID NO: 44703 - RNA, 22 nt, Synthetic Construct
  source 1..22: mol_type = other RNA
cgaggtagtaggttgtgtggtt

SEQ ID NO: 44704 - RNA, 22 nt, Synthetic Construct
  source 1..22: mol_type = other RNA
cgaggtagtaggttgtgtggtt

SEQ ID NO: 44705 - RNA, 21 nt, Synthetic Construct
  source 1..21: mol_type = other RNA
tggggtagtagtttgtgctgt

SEQ ID NO: 44706 - RNA, 21 nt, Synthetic Construct
  source 1..21: mol_type = other RNA
tggggtagtagtttgtgctgt

SEQ ID NO: 44707 - RNA, 20 nt, Synthetic Construct
  source 1..20: mol_type = other RNA
tcggaagaaggggtgcctgg

SEQ ID NO: 44708 - RNA, 20 nt, Synthetic Construct
  source 1..20: mol_type = other RNA
tcggaagaaggggtgcctgg

SEQ ID NO: 44709 - RNA, 16 nt, Synthetic Construct
  source 1..16: mol_type = other RNA
gagctgtggatagggg

SEQ ID NO: 44710 - RNA, 22 nt, Synthetic Construct
  source 1..22: mol_type = other RNA
tgaggtagtaggttgtggggtt

SEQ ID NO: 44711 - RNA, 22 nt, Synthetic Construct
  source 1..22: mol_type = other RNA
tgaggtagtaggttgtggggtt

SEQ ID NO: 44712 - RNA, 16 nt, Synthetic Construct
  source 1..16: mol_type = other RNA
acggcccagactccta

SEQ ID NO: 44713 - RNA, 16 nt, Synthetic Construct
  source 1..16: mol_type = other RNA
acggcccagactccta

SEQ ID NO: 44714 - RNA, 22 nt, Synthetic Construct
  source 1..22: mol_type = other RNA
tgaggtagtaggtcgtgtggtt

SEQ ID NO: 44715 - RNA, 22 nt, Synthetic Construct
  source 1..22: mol_type = other RNA
tgaggtagtaggtcgtgtggtt

SEQ ID NO: 44716 - RNA, 16 nt, Synthetic Construct
  source 1..16: mol_type = other RNA
ccatgccgcgtgcggg

SEQ ID NO: 44717 - RNA, 22 nt, Synthetic Construct
  source 1..22: mol_type = other RNA
tcactgatcgagtcgtcctgcg

SEQ ID NO: 44718 - RNA, 22 nt, Synthetic Construct
  source 1..22: mol_type = other RNA
tcactgatcgagtcgtcctgcg

SEQ ID NO: 44719 - RNA, 23 nt, Synthetic Construct
  source 1..23: mol_type = other RNA
tggtaatacgacgtgcttagtgt

SEQ ID NO: 44720 - RNA, 23 nt, Synthetic Construct
  source 1..23: mol_type = other RNA
tggtaatacgacgtgcttagtgt

SEQ ID NO: 44721 - RNA, 23 nt, Synthetic Construct
  source 1..23: mol_type = other RNA
tgaggggcagagggcgagacttt

SEQ ID NO: 44722 - RNA, 23 nt, Synthetic Construct
  source 1..23: mol_type = other RNA
tgaggggcagagggcgagacttt

SEQ ID NO: 44723 - RNA, 18 nt, Synthetic Construct
  source 1..18: mol_type = other RNA
gtctgcctcagcgtcggt

SEQ ID NO: 44724 - RNA, 18 nt, Synthetic Construct
  source 1..18: mol_type = other RNA
gtctgcctcagcgtcggt

SEQ ID NO: 44725 - RNA, 27 nt, Synthetic Construct
  source 1..27: mol_type = other RNA
gctttacattggactttgaacagatct

SEQ ID NO: 44726 - RNA, 27 nt, Synthetic Construct
  source 1..27: mol_type = other RNA
gctttacattggactttgaacagatct

SEQ ID NO: 44727 - RNA, 23 nt, Synthetic Construct
  source 1..23: mol_type = other RNA
tggggtagtaggttgtgtggttt

SEQ ID NO: 44728 - RNA, 23 nt, Synthetic Construct
  source 1..23: mol_type = other RNA
tggggtagtaggttgtgtggttt

SEQ ID NO: 44729 - RNA, 20 nt, Synthetic Construct
  source 1..20: mol_type = other RNA
ccgcagagtacagcttggga

SEQ ID NO: 44730 - RNA, 21 nt, Synthetic Construct
  source 1..21: mol_type = other RNA
tcctgtgctgagctgccccga

SEQ ID NO: 44731 - RNA, 21 nt, Synthetic Construct
  source 1..21: mol_type = other RNA
tcctgtgctgagctgccccga

SEQ ID NO: 44732 - RNA, 23 nt, Synthetic Construct
  source 1..23: mol_type = other RNA
tcccgtactgagctgccccgagt

SEQ ID NO: 44733 - RNA, 23 nt, Synthetic Construct
  source 1..23: mol_type = other RNA
tcccgtactgagctgccccgagt

SEQ ID NO: 44734 - RNA, 23 nt, Synthetic Construct
  source 1..23: mol_type = other RNA
gtctttgttcgattccgttgagt

SEQ ID NO: 44735 - RNA, 23 nt, Synthetic Construct
  source 1..23: mol_type = other RNA
gtctttgttcgattccgttgagt

SEQ ID NO: 44736 - RNA, 17 nt, Synthetic Construct
  source 1..17: mol_type = other RNA
cagtagctcgaggaaaa

SEQ ID NO: 44737 - RNA, 17 nt, Synthetic Construct
  source 1..17: mol_type = other RNA
cagtagctcgaggaaaa

SEQ ID NO: 44738 - RNA, 20 nt, Synthetic Construct
  source 1..20: mol_type = other RNA
tagcgaaattccttgtcggg

SEQ ID NO: 44739 - RNA, 20 nt, Synthetic Construct
  source 1..20: mol_type = other RNA
tagcgaaattccttgtcggg

SEQ ID NO: 44740 - RNA, 18 nt, Synthetic Construct
  source 1..18: mol_type = other RNA
ggctttgaagtaaggtcg

SEQ ID NO: 44741 - RNA, 22 nt, Synthetic Construct
  source 1..22: mol_type = other RNA
cggaatcgctagtaatcgcgga

SEQ ID NO: 44742 - RNA, 22 nt, Synthetic Construct
  source 1..22: mol_type = other RNA
tgtggtagtagtttgtgctgtt

SEQ ID NO: 44743 - RNA, 22 nt, Synthetic Construct
  source 1..22: mol_type = other RNA
tgtggtagtagtttgtgctgtt

SEQ ID NO: 44744 - RNA, 16 nt, Synthetic Construct
  source 1..16: mol_type = other RNA
gtctacggccatgcca

SEQ ID NO: 44745 - RNA, 16 nt, Synthetic Construct
  source 1..16: mol_type = other RNA
gtctacggccatgcca

SEQ ID NO: 44746 - RNA, 18 nt, Synthetic Construct
  source 1..18: mol_type = other RNA
cctcgcgcgattggagcg

SEQ ID NO: 44747 - RNA, 32 nt, Synthetic Construct; identical to SEQ ID NO: 2435
  source 1..32: mol_type = other RNA

SEQ ID NO: 44748 - RNA, 32 nt, Synthetic Construct; identical to SEQ ID NO: 2435
  source 1..32: mol_type = other RNA

SEQ ID NO: 44749 - RNA, 34 nt, Synthetic Construct; identical to SEQ ID NO: 2529
  source 1..34: mol_type = other RNA

SEQ ID NO: 44750 - RNA, 26 nt, Synthetic Construct
  source 1..26: mol_type = other RNA
atttccccttggggttgtaggaccac

SEQ ID NO: 44751 - RNA, 26 nt, Synthetic Construct
  source 1..26: mol_type = other RNA
atttccccttggggttgtaggaccac

SEQ ID NO: 44752 - RNA, 22 nt, Synthetic Construct
  source 1..22: mol_type = other RNA
tgaggaagtagtttgtgctgtt

SEQ ID NO: 44753 - RNA, 22 nt, Synthetic Construct
  source 1..22: mol_type = other RNA
tgaggaagtagtttgtgctgtt

SEQ ID NO: 44754 - RNA, 20 nt, Synthetic Construct
  source 1..20: mol_type = other RNA
tcctgtaccgatcaatagtg

SEQ ID NO: 44755 - RNA, 21 nt, Synthetic Construct
  source 1..21: mol_type = other RNA
cattattacttttggtacgcg

SEQ ID NO: 44756 - RNA, 17 nt, Synthetic Construct
  source 1..17: mol_type = other RNA
tcgctagtaatcgcgga

SEQ ID NO: 44757 - RNA, 16 nt, Synthetic Construct
  source 1..16: mol_type = other RNA
gaaattccttgtcggg

SEQ ID NO: 44758 - RNA, 36 nt, Synthetic Construct; identical to SEQ ID NO: 2366
  source 1..36: mol_type = other RNA

SEQ ID NO: 44759 - RNA, 21 nt, Synthetic Construct
  source 1..21: mol_type = other RNA
tgaggtagtaggttgtgtgga

SEQ ID NO: 44760 - RNA, 21 nt, Synthetic Construct
  source 1..21: mol_type = other RNA
tgaggtagtaggttgtgtgga

SEQ ID NO: 44761 - RNA, 17 nt, Synthetic Construct
  source 1..17: mol_type = other RNA
accggaggaaggtgggg

SEQ ID NO: 44762 - RNA, 17 nt, Synthetic Construct
  source 1..17: mol_type = other RNA
accggaggaaggtgggg

SEQ ID NO: 44763 - RNA, 22 nt, Synthetic Construct
  source 1..22: mol_type = other RNA
cattgcgcttgtctcggtctga

SEQ ID NO: 44764 - RNA, 37 nt, Synthetic Construct; identical to SEQ ID NO: 2447
  source 1..37: mol_type = other RNA

SEQ ID NO: 44765 - RNA, 23 nt, Synthetic Construct
  source 1..23: mol_type = other RNA
caaagtgctgttcgtgcaggtaa

SEQ ID NO: 44766 - RNA, 32 nt, Synthetic Construct; identical to SEQ ID NO: 1238
  source 1..32: mol_type = other RNA

SEQ ID NO: 44767 - RNA, 32 nt, Synthetic Construct; identical to SEQ ID NO: 1238
  source 1..32: mol_type = other RNA

SEQ ID NO: 44768 - RNA, 16 nt, Synthetic Construct
  source 1..16: mol_type = other RNA
cgactcttagcggtgg

SEQ ID NO: 44769 - RNA, 16 nt, Synthetic Construct
  source 1..16: mol_type = other RNA
cgactcttagcggtgg

SEQ ID NO: 44770 - RNA, 18 nt, Synthetic Construct
  source 1..18: mol_type = other RNA
gcgccgatgatagtgcgg

SEQ ID NO: 44771 - RNA, 23 nt, Synthetic Construct
  source 1..23: mol_type = other RNA
tgaggggcagagagcgagactta

SEQ ID NO: 44772 - RNA, 19 nt, Synthetic Construct
  source 1..19: mol_type = other RNA
gtccggatcgtagtctgca

SEQ ID NO: 44773 - RNA, 19 nt, Synthetic Construct
  source 1..19: mol_type = other RNA
gtccggatcgtagtctgca

SEQ ID NO: 44774 - RNA, 23 nt, Synthetic Construct
  source 1..23: mol_type = other RNA
tggtaatacgacgtgcttagtgt

SEQ ID NO: 44775 - RNA, 23 nt, Synthetic Construct
  source 1..23: mol_type = other RNA
tggtaatacgacgtgcttagtgt

SEQ ID NO: 44776 - RNA, 25 nt, Synthetic Construct
  source 1..25: mol_type = other RNA
ttgaggatatgaggtcgagacgaca

SEQ ID NO: 44777 - RNA, 25 nt, Synthetic Construct
  source 1..25: mol_type = other RNA
ttgaggatatgaggtcgagacgaca

SEQ ID NO: 44778 - RNA, 22 nt, Synthetic Construct
  source 1..22: mol_type = other RNA
gagagcctggacacaggtgctg

SEQ ID NO: 44779 - RNA, 43 nt, Synthetic Construct; identical to SEQ ID NO: 3562
  source 1..43: mol_type = other RNA

SEQ ID NO: 44780 - RNA, 18 nt, Synthetic Construct
  source 1..18: mol_type = other RNA
cctgaagaataagcaccg

SEQ ID NO: 44781 - RNA, 18 nt, Synthetic Construct
  source 1..18: mol_type = other RNA
cctgaagaataagcaccg

SEQ ID NO: 44782 - RNA, 25 nt, Synthetic Construct
  source 1..25: mol_type = other RNA
aaaccgttaccattactgagtttag

SEQ ID NO: 44783 - RNA, 25 nt, Synthetic Construct
  source 1..25: mol_type = other RNA
aaaccgttaccattactgagtttag

SEQ ID NO: 44784 - RNA, 23 nt, Synthetic Construct
  source 1..23: mol_type = other RNA
tggtaatacgacgtacctagtgt

SEQ ID NO: 44785 - RNA, 23 nt, Synthetic Construct
  source 1..23: mol_type = other RNA
tggtaatacgacgtacctagtgt

SEQ ID NO: 44786 - RNA, 34 nt, Synthetic Construct; identical to SEQ ID NO: 2291
  source 1..34: mol_type = other RNA

SEQ ID NO: 44787 - RNA, 34 nt, Synthetic Construct; identical to SEQ ID NO: 2291
  source 1..34: mol_type = other RNA

SEQ ID NO: 44788 - RNA, 23 nt, Synthetic Construct
  source 1..23: mol_type = other RNA
gtctttgttcgattccgttgagt

SEQ ID NO: 44789 - RNA, 23 nt, Synthetic Construct
  source 1..23: mol_type = other RNA
gtctttgttcgattccgttgagt

SEQ ID NO: 44790 - RNA, 23 nt, Synthetic Construct
  source 1..23: mol_type = other RNA
tgaggagcagagagcgagacttt

SEQ ID NO: 44791 - RNA, 16 nt, Synthetic Construct
  source 1..16: mol_type = other RNA
gcctacggccatacca

SEQ ID NO: 44792 - RNA, 16 nt, Synthetic Construct
  source 1..16: mol_type = other RNA
gcctacggccatacca

SEQ ID NO: 44793 - RNA, 23 nt, Synthetic Construct
  source 1..23: mol_type = other RNA
tggtaatacgacgtacttagtat

SEQ ID NO: 44794 - RNA, 30 nt, Synthetic Construct; identical to SEQ ID NO: 739
  source 1..30: mol_type = other RNA

SEQ ID NO: 44795 - RNA, 21 nt, Synthetic Construct
  source 1..21: mol_type = other RNA
cgaggtagtagtttgtgctgt

SEQ ID NO: 44796 - RNA, 16 nt, Synthetic Construct
  source 1..16: mol_type = other RNA
gtctacggccacacca

SEQ ID NO: 44797 - RNA, 24 nt, Synthetic Construct
  source 1..24: mol_type = other RNA
gtctttgttcgattccgttgagta

SEQ ID NO: 44798 - RNA, 24 nt, Synthetic Construct
  source 1..24: mol_type = other RNA
gtctttgttcgattccgttgagta

SEQ ID NO: 44799 - RNA, 26 nt, Synthetic Construct
  source 1..26: mol_type = other RNA
ccccccactgctaatttgactggctt

SEQ ID NO: 44800 - RNA, 30 nt, Synthetic Construct; identical to SEQ ID NO: 2274
  source 1..30: mol_type = other RNA

SEQ ID NO: 44801 - RNA, 22 nt, Synthetic Construct
  source 1..22: mol_type = other RNA
tgaggtagtaggttgtatggtt

SEQ ID NO: 44802 - RNA, 19 nt, Synthetic Construct
  source 1..19: mol_type = other RNA
cccttgtcattagttgcta

SEQ ID NO: 44803 - RNA, 21 nt, Synthetic Construct
  source 1..21: mol_type = other RNA
tcctgtaccgagctgccccga

SEQ ID NO: 44804 - RNA, 21 nt, Synthetic Construct
  source 1..21: mol_type = other RNA
tcctgtaccgagctgccccga

SEQ ID NO: 44805 - RNA, 22 nt, Synthetic Construct
  source 1..22: mol_type = other RNA
tgaggtagtaggttgcgtggtt

SEQ ID NO: 44806 - RNA, 22 nt, Synthetic Construct
  source 1..22: mol_type = other RNA
tgaggtagtaggttgcgtggtt

SEQ ID NO: 44807 - RNA, 18 nt, Synthetic Construct
  source 1..18: mol_type = other RNA
atggccgggacagagggc

SEQ ID NO: 44808 - RNA, 18 nt, Synthetic Construct
  source 1..18: mol_type = other RNA
atggccgggacagagggc

SEQ ID NO: 44809 - RNA, 21 nt, Synthetic Construct
  source 1..21: mol_type = other RNA
tgaggtagtaggttgtgtggc

SEQ ID NO: 44810 - RNA, 21 nt, Synthetic Construct
  source 1..21: mol_type = other RNA
tgaggtagtaggttgtgtggc

SEQ ID NO: 44811 - RNA, 17 nt, Synthetic Construct
  source 1..17: mol_type = other RNA
cagagacgagtcgacca

SEQ ID NO: 44812 - RNA, 17 nt, Synthetic Construct
  source 1..17: mol_type = other RNA
cagagacgagtcgacca

SEQ ID NO: 44813 - RNA, 23 nt, Synthetic Construct
  source 1..23: mol_type = other RNA
tcactgatcgagtcgtcctgcgc

SEQ ID NO: 44814 - RNA, 23 nt, Synthetic Construct
  source 1..23: mol_type = other RNA
tcactgatcgagtcgtcctgcgc

SEQ ID NO: 44815 - RNA, 20 nt, Synthetic Construct
  source 1..20: mol_type = other RNA
tgaggtagcaggttgtgtgg

SEQ ID NO: 44816 - RNA, 20 nt, Synthetic Construct
  source 1..20: mol_type = other RNA
tgaggtagcaggttgtgtgg

SEQ ID NO: 44817 - RNA, 17 nt, Synthetic Construct
  source 1..17: mol_type = other RNA
aagttgaccgcctgggg

SEQ ID NO: 44818 - RNA, 17 nt, Synthetic Construct
  source 1..17: mol_type = other RNA
aagttgaccgcctgggg

SEQ ID NO: 44819 - RNA, 22 nt, Synthetic Construct
  source 1..22: mol_type = other RNA
tgaggcagtaggttgtgtggtt

SEQ ID NO: 44820 - RNA, 22 nt, Synthetic Construct
  source 1..22: mol_type = other RNA
tgaggcagtaggttgtgtggtt

SEQ ID NO: 44821 - RNA, 17 nt, Synthetic Construct
  source 1..17: mol_type = other RNA
ggcccttatgggtaggg

SEQ ID NO: 44822 - RNA, 17 nt, Synthetic Construct
  source 1..17: mol_type = other RNA
ggcccttatgggtaggg

SEQ ID NO: 44823 - RNA, 16 nt, Synthetic Construct
  source 1..16: mol_type = other RNA
tgttcggaagattttc

SEQ ID NO: 44824 - RNA, 16 nt, Synthetic Construct
  source 1..16: mol_type = other RNA
tgttcggaagattttc

SEQ ID NO: 44825 - RNA, 23 nt, Synthetic Construct
  source 1..23: mol_type = other RNA
gggtaatacgacgtacttagtgt

SEQ ID NO: 44826 - RNA, 23 nt, Synthetic Construct
  source 1..23: mol_type = other RNA
gggtaatacgacgtacttagtgt

SEQ ID NO: 44827 - RNA, 24 nt, Synthetic Construct
  source 1..24: mol_type = other RNA
gcagctaataccgcatacgacctg

SEQ ID NO: 44828 - RNA, 15 nt, Synthetic Construct
  source 1..15: mol_type = other RNA
gcaagtcgagcggta

SEQ ID NO: 44829 - RNA, 15 nt, Synthetic Construct
  source 1..15: mol_type = other RNA
gcaagtcgagcggta

SEQ ID NO: 44830 - RNA, 21 nt, Synthetic Construct
  source 1..21: mol_type = other RNA
tcccgtactgagctgccccga

SEQ ID NO: 44831 - RNA, 21 nt, Synthetic Construct
  source 1..21: mol_type = other RNA
tcccgtactgagctgccccga

SEQ ID NO: 44832 - RNA, 23 nt, Synthetic Construct
  source 1..23: mol_type = other RNA
tgaggtagtaggtcgtgtggttt

SEQ ID NO: 44833 - RNA, 23 nt, Synthetic Construct
  source 1..23: mol_type = other RNA
tgaggtagtaggtcgtgtggttt

SEQ ID NO: 44834 - RNA, 17 nt, Synthetic Construct
  source 1..17: mol_type = other RNA
gtgttcggaagattttc

SEQ ID NO: 44835 - RNA, 17 nt, Synthetic Construct
  source 1..17: mol_type = other RNA
gtgttcggaagattttc

SEQ ID NO: 44836 - RNA, 22 nt, Synthetic Construct
  source 1..22: mol_type = other RNA
tggaatgtaaagaagtacgtat

SEQ ID NO: 44837 - RNA, 22 nt, Synthetic Construct
  source 1..22: mol_type = other RNA
tggaatgtaaagaagtacgtat

SEQ ID NO: 44838 - RNA, 15 nt, Synthetic Construct
  source 1..15: mol_type = other RNA
gtagctcgttgggct

SEQ ID NO: 44839 - RNA, 15 nt, Synthetic Construct
  source 1..15: mol_type = other RNA
gtagctcgttgggct

SEQ ID NO: 44840 - RNA, 21 nt, Synthetic Construct
  source 1..21: mol_type = other RNA
tgaggtagtaggttgtgtagt

SEQ ID NO: 44841 - RNA, 25 nt, Synthetic Construct
  source 1..25: mol_type = other RNA
tgtcagtttgtcaaataccccaatt

SEQ ID NO: 44842 - RNA, 25 nt, Synthetic Construct
  source 1..25: mol_type = other RNA
tgtcagtttgtcaaataccccaatt

SEQ ID NO: 44843 - RNA, 22 nt, Synthetic Construct
  source 1..22: mol_type = other RNA
tgaggtagtaggttgtgtggct

SEQ ID NO: 44844 - RNA, 22 nt, Synthetic Construct
  source 1..22: mol_type = other RNA
tgaggtagtaggttgtgtggct

SEQ ID NO: 44845 - RNA, 32 nt, Synthetic Construct; identical to SEQ ID NO: 3541
  source 1..32: mol_type = other RNA

SEQ ID NO: 44846 - RNA, 20 nt, Synthetic Construct
  source 1..20: mol_type = other RNA
cgcgacctcagatcagacgt

SEQ ID NO: 44847 - RNA, 20 nt, Synthetic Construct
  source 1..20: mol_type = other RNA
cgcgacctcagatcagacgt

SEQ ID NO: 44848 - RNA, 16 nt, Synthetic Construct
  source 1..16: mol_type = other RNA
gtctacggccataccg

SEQ ID NO: 44849 - RNA, 15 nt, Synthetic Construct
  source 1..15: mol_type = other RNA
gcaagtcgagcggta

SEQ ID NO: 44850 - RNA, 15 nt, Synthetic Construct
  source 1..15: mol_type = other RNA
gcaagtcgagcggta

SEQ ID NO: 44851 - RNA, 15 nt, Synthetic Construct
  source 1..15: mol_type = other RNA
ggtggctgtagctca

SEQ ID NO: 44852 - RNA, 15 nt, Synthetic Construct
  source 1..15: mol_type = other RNA
ggtggctgtagctca

SEQ ID NO: 44853 - RNA, 27 nt, Synthetic Construct
  source 1..27: mol_type = other RNA
gacttaccaaacctatgcaaactccga

SEQ ID NO: 44854 - RNA, 27 nt, Synthetic Construct
  source 1..27: mol_type = other RNA
gacttaccaaacctatgcaaactccga

SEQ ID NO: 44855 - RNA, 23 nt, Synthetic Construct
  source 1..23: mol_type = other RNA
tcctgtactgagctgccccggga

SEQ ID NO: 44856 - RNA, 23 nt, Synthetic Construct
  source 1..23: mol_type = other RNA
tcctgtactgagctgccccggga

SEQ ID NO: 44857 - RNA, 23 nt, Synthetic Construct
  source 1..23: mol_type = other RNA
tggtaatgcgacgtacttagtgt

SEQ ID NO: 44858 - RNA, 23 nt, Synthetic Construct
  source 1..23: mol_type = other RNA
tggtaatgcgacgtacttagtgt

SEQ ID NO: 44859 - RNA, 21 nt, Synthetic Construct
  source 1..21: mol_type = other RNA
taaggtagtaggttgtgtggt

SEQ ID NO: 44860 - RNA, 21 nt, Synthetic Construct
  source 1..21: mol_type = other RNA
taaggtagtaggttgtgtggt

SEQ ID NO: 44861 - RNA, 16 nt, Synthetic Construct
  source 1..16: mol_type = other RNA
ccgcttttgtcaggga

SEQ ID NO: 44862 - RNA, 23 nt, Synthetic Construct
  source 1..23: mol_type = other RNA
tgaggggcagagagtgagacttt

SEQ ID NO: 44863 - RNA, 23 nt, Synthetic Construct
  source 1..23: mol_type = other RNA
tgaggggcagagagtgagacttt

SEQ ID NO: 44864 - RNA, 22 nt, Synthetic Construct
  source 1..22: mol_type = other RNA
tcctgtactgagctgccccggg

SEQ ID NO: 44865 - RNA, 22 nt, Synthetic Construct
  source 1..22: mol_type = other RNA
tcctgtactgagctgccccggg

SEQ ID NO: 44866 - RNA, 19 nt, Synthetic Construct
  source 1..19: mol_type = other RNA
tggccgtcgtcagctcgtg

SEQ ID NO: 44867 - RNA, 15 nt, Synthetic Construct
  source 1..15: mol_type = other RNA
gcgtagatatgcgga

SEQ ID NO: 44868 - RNA, 17 nt, Synthetic Construct
  source 1..17: mol_type = other RNA
tcagtagctcgaggaaa

SEQ ID NO: 44869 - RNA, 17 nt, Synthetic Construct
  source 1..17: mol_type = other RNA
tcagtagctcgaggaaa

SEQ ID NO: 44870 - RNA, 23 nt, Synthetic Construct
  source 1..23: mol_type = other RNA
tggtaatacgacgtacttagtgc

SEQ ID NO: 44871 - RNA, 23 nt, Synthetic Construct
  source 1..23: mol_type = other RNA
tggtaatacgacgtacttagtgc

SEQ ID NO: 44872 - RNA, 24 nt, Synthetic Construct
  source 1..24: mol_type = other RNA
cgactcttagcggtggatcactcg

SEQ ID NO: 44873 - RNA, 24 nt, Synthetic Construct
  source 1..24: mol_type = other RNA
cgactcttagcggtggatcactcg

SEQ ID NO: 44874 - RNA, 25 nt, Synthetic Construct
  source 1..25: mol_type = other RNA
ttgaggatatgagatcgaggcgaca

SEQ ID NO: 44875 - RNA, 25 nt, Synthetic Construct
  source 1..25: mol_type = other RNA
ttgaggatatgagatcgaggcgaca

SEQ ID NO: 44876 - RNA, 22 nt, Synthetic Construct
  source 1..22: mol_type = other RNA
tgaggtggtagattgtatagtt

SEQ ID NO: 44877 - RNA, 22 nt, Synthetic Construct
  source 1..22: mol_type = other RNA
tgaggtggtagattgtatagtt

SEQ ID NO: 44878 - RNA, 23 nt, Synthetic Construct
  source 1..23: mol_type = other RNA
tctttgttcgattccgttgagta

SEQ ID NO: 44879 - RNA, 23 nt, Synthetic Construct
  source 1..23: mol_type = other RNA
tctttgttcgattccgttgagta

SEQ ID NO: 44880 - RNA, 20 nt, Synthetic Construct
  source 1..20: mol_type = other RNA
tgaggtagtaggttgtgcgg

SEQ ID NO: 44881 - RNA, 20 nt, Synthetic Construct
  source 1..20: mol_type = other RNA
tgaggtagtaggttgtgcgg

SEQ ID NO: 44882 - RNA, 22 nt, Synthetic Construct
  source 1..22: mol_type = other RNA
tggcagtgtcttagctggttgt

SEQ ID NO: 44883 - RNA, 22 nt, Synthetic Construct
  source 1..22: mol_type = other RNA
tgaggtagtagtttgtgccgtt

SEQ ID NO: 44884 - RNA, 22 nt, Synthetic Construct
  source 1..22: mol_type = other RNA
tgaggtagtagtttgtgccgtt

SEQ ID NO: 44885 - RNA, 21 nt, Synthetic Construct
  source 1..21: mol_type = other RNA
tgaggaagtaggttgtgtggt

SEQ ID NO: 44886 - RNA, 21 nt, Synthetic Construct
  source 1..21: mol_type = other RNA
tgaggaagtaggttgtgtggt

SEQ ID NO: 44887 - RNA, 15 nt, Synthetic Construct
  source 1..15: mol_type = other RNA
tcgagtcgtcctgcg

SEQ ID NO: 44888 - RNA, 23 nt, Synthetic Construct
  source 1..23: mol_type = other RNA
cagagtgctgttcgtgcaggtag

SEQ ID NO: 44889 - RNA, 23 nt, Synthetic Construct
  source 1..23: mol_type = other RNA
cagagtgctgttcgtgcaggtag

SEQ ID NO: 44890 - RNA, 21 nt, Synthetic Construct
  source 1..21: mol_type = other RNA
ggaatcgctagtaatcgcgga

SEQ ID NO: 44891 - RNA, 23 nt, Synthetic Construct
  source 1..23: mol_type = other RNA
tgaggggcagagagcgggacttt

SEQ ID NO: 44892 - RNA, 19 nt, Synthetic Construct
  source 1..19: mol_type = other RNA
aggacagtgaaacgagtca

SEQ ID NO: 44893 - RNA, 19 nt, Synthetic Construct
  source 1..19: mol_type = other RNA
aggacagtgaaacgagtca

SEQ ID NO: 44894 - RNA, 22 nt, Synthetic Construct
  source 1..22: mol_type = other RNA
tcagtagctcgaggaaaagaca

SEQ ID NO: 44895 - RNA, 22 nt, Synthetic Construct
  source 1..22: mol_type = other RNA
tcagtagctcgaggaaaagaca

SEQ ID NO: 44896 - RNA, 33 nt, Synthetic Construct; identical to SEQ ID NO: 1982
  source 1..33: mol_type = other RNA

SEQ ID NO: 44897 - RNA, 20 nt, Synthetic Construct
  source 1..20: mol_type = other RNA
taaggtagtaggttgtgtgg

SEQ ID NO: 44898 - RNA, 20 nt, Synthetic Construct
  source 1..20: mol_type = other RNA
taaggtagtaggttgtgtgg

SEQ ID NO: 44899 - RNA, 22 nt, Synthetic Construct
  source 1..22: mol_type = other RNA
tcactgatcgagtcgtcctgcg

SEQ ID NO: 44900 - RNA, 22 nt, Synthetic Construct
  source 1..22: mol_type = other RNA
tcactgatcgagtcgtcctgcg

SEQ ID NO: 44901 - RNA, 21 nt, Synthetic Construct
  source 1..21: mol_type = other RNA
tgaggtggtaggttgtatagt

SEQ ID NO: 44902 - RNA, 21 nt, Synthetic Construct
  source 1..21: mol_type = other RNA
tgaggtggtaggttgtatagt

SEQ ID NO: 44903 - RNA, 17 nt, Synthetic Construct
  source 1..17: mol_type = other RNA
accaaggggtcgtgggt

SEQ ID NO: 44904 - RNA, 17 nt, Synthetic Construct
  source 1..17: mol_type = other RNA
accaaggggtcgtgggt

SEQ ID NO: 44905 - RNA, 22 nt, Synthetic Construct
  source 1..22: mol_type = other RNA
tgtcaactggttgttgggaggg

SEQ ID NO: 44906 - RNA, 22 nt, Synthetic Construct
  source 1..22: mol_type = other RNA
tgtcaactggttgttgggaggg

SEQ ID NO: 44907 - RNA, 22 nt, Synthetic Construct
  source 1..22: mol_type = other RNA
tgaggcagtagattgtatagtt

SEQ ID NO: 44908 - RNA, 22 nt, Synthetic Construct
  source 1..22: mol_type = other RNA
tgaggcagtagattgtatagtt

SEQ ID NO: 44909 - RNA, 19 nt, Synthetic Construct
  source 1..19: mol_type = other RNA
tcctgtaccgatcaatagt

SEQ ID NO: 44910 - RNA, 19 nt, Synthetic Construct
  source 1..19: mol_type = other RNA
tcctgtaccgatcaatagt

SEQ ID NO: 44911 - RNA, 20 nt, Synthetic Construct
  source 1..20: mol_type = other RNA
cgaggtagtaggttgtgtgg

SEQ ID NO: 44912 - RNA, 22 nt, Synthetic Construct
  source 1..22: mol_type = other RNA
tgtggtagtaggttgtgtggtt

SEQ ID NO: 44913 - RNA, 22 nt, Synthetic Construct
  source 1..22: mol_type = other RNA
tgtggtagtaggttgtgtggtt

SEQ ID NO: 44914 - RNA, 23 nt, Synthetic Construct
  source 1..23: mol_type = other RNA
taaagtgcttatagtgcaggtag

SEQ ID NO: 44915 - RNA, 43 nt, Synthetic Construct; identical to SEQ ID NO: 2315
  source 1..43: mol_type = other RNA

SEQ ID NO: 44916 - RNA, 43 nt, Synthetic Construct; identical to SEQ ID NO: 2315
  source 1..43: mol_type = other RNA

SEQ ID NO: 44917 - RNA, 15 nt, Synthetic Construct
  source 1..15: mol_type = other RNA
gttgaccgcctgggg

SEQ ID NO: 44918 - RNA, 36 nt, Synthetic Construct; identical to SEQ ID NO: 2546
  source 1..36: mol_type = other RNA

SEQ ID NO: 44919 - RNA, 23 nt, Synthetic Construct
  source 1..23: mol_type = other RNA
tgaggggcagagagcgagactct

SEQ ID NO: 44920 - RNA, 22 nt, Synthetic Construct
  source 1..22: mol_type = other RNA
tggggtagtaggttgtgtggtt

SEQ ID NO: 44921 - RNA, 22 nt, Synthetic Construct
  source 1..22: mol_type = other RNA
tggggtagtaggttgtgtggtt

SEQ ID NO: 44922 - RNA, 31 nt, Synthetic Construct; identical to SEQ ID NO: 2215
  source 1..31: mol_type = other RNA

SEQ ID NO: 44923 - RNA, 16 nt, Synthetic Construct
  source 1..16: mol_type = other RNA
tggccgtcgtcagctc

SEQ ID NO: 44924 - RNA, 16 nt, Synthetic Construct
  source 1..16: mol_type = other RNA
tggccgtcgtcagctc

SEQ ID NO: 44925 - RNA, 24 nt, Synthetic Construct
  source 1..24: mol_type = other RNA
tagcagcacgtaaatattggcgtt

SEQ ID NO: 44926 - RNA, 16 nt, Synthetic Construct
  source 1..16: mol_type = other RNA
ggcgggggtcgctggt

SEQ ID NO: 44927 - RNA, 23 nt, Synthetic Construct
  source 1..23: mol_type = other RNA
cgctcacggaaagagaatgaagc

SEQ ID NO: 44928 - RNA, 23 nt, Synthetic Construct
  source 1..23: mol_type = other RNA
cgctcacggaaagagaatgaagc

SEQ ID NO: 44929 - RNA, 23 nt, Synthetic Construct
  source 1..23: mol_type = other RNA
tgaggggtagagagcgagacttt

SEQ ID NO: 44930 - RNA, 23 nt, Synthetic Construct
  source 1..23: mol_type = other RNA
tggtaatacgacgtacttagtgt

SEQ ID NO: 44931 - RNA, 23 nt, Synthetic Construct
  source 1..23: mol_type = other RNA
tggtaatacgacgtacttagtgt

SEQ ID NO: 44932 - RNA, 21 nt, Synthetic Construct
  source 1..21: mol_type = other RNA
gctattgacgaccgtaccgca

SEQ ID NO: 44933 - RNA, 25 nt, Synthetic Construct
  source 1..25: mol_type = other RNA
ttgaggatatgagatcgaggcgaca

SEQ ID NO: 44934 - RNA, 25 nt, Synthetic Construct
  source 1..25: mol_type = other RNA
ttgaggatatgagatcgaggcgaca

SEQ ID NO: 44935 - RNA, 24 nt, Synthetic Construct
  source 1..24: mol_type = other RNA
gctcactgatcgagtcgtcctgcg

SEQ ID NO: 44936 - RNA, 24 nt, Synthetic Construct
  source 1..24: mol_type = other RNA
gctcactgatcgagtcgtcctgcg

SEQ ID NO: 44937 - RNA, 22 nt, Synthetic Construct
  source 1..22: mol_type = other RNA
tgtagtgtttcctactttatgg

SEQ ID NO: 44938 - RNA, 22 nt, Synthetic Construct
  source 1..22: mol_type = other RNA
tgaggtagtaggttatgtggtt

SEQ ID NO: 44939 - RNA, 41 nt, Synthetic Construct; identical to SEQ ID NO: 2441
  source 1..41: mol_type = other RNA

SEQ ID NO: 44940 - RNA, 22 nt, Synthetic Construct
  source 1..22: mol_type = other RNA
tgaggtagtaggtcgtgtggtt

SEQ ID NO: 44941 - RNA, 23 nt, Synthetic Construct
  source 1..23: mol_type = other RNA
tggtagtacgacgtacttagtgt

SEQ ID NO: 44942 - RNA, 31 nt, Synthetic Construct; identical to SEQ ID NO: 2758
  source 1..31: mol_type = other RNA

SEQ ID NO: 44943 - RNA, 15 nt, Synthetic Construct
  source 1..15: mol_type = other RNA
cctcgcgcgattgga

SEQ ID NO: 44944 - RNA, 22 nt, Synthetic Construct
  source 1..22: mol_type = other RNA
tgaggtagtaggttgtgtggat

SEQ ID NO: 44945 - RNA, 22 nt, Synthetic Construct
  source 1..22: mol_type = other RNA
tgaggtagtaggttgtgtggat

SEQ ID NO: 44946 - RNA, 23 nt, Synthetic Construct
  source 1..23: mol_type = other RNA
tggtaatacgacgtactcagtgt

SEQ ID NO: 44947 - RNA, 23 nt, Synthetic Construct
  source 1..23: mol_type = other RNA
tggtaatacgacgtactcagtgt

SEQ ID NO: 44948 - RNA, 37 nt, Synthetic Construct; identical to SEQ ID NO: 2365
  source 1..37: mol_type = other RNA

SEQ ID NO: 44949 - RNA, 29 nt, Synthetic Construct
  source 1..29: mol_type = other RNA
gcattgtggttcagtggtagaattctcgc

SEQ ID NO: 44950 - RNA, 29 nt, Synthetic Construct
  source 1..29: mol_type = other RNA
gcattgtggttcagtggtagaattctcgc

SEQ ID NO: 44951 - RNA, 23 nt, Synthetic Construct
  source 1..23: mol_type = other RNA
tgaggtggtaggttgtgtggttt

SEQ ID NO: 44952 - RNA, 23 nt, Synthetic Construct
  source 1..23: mol_type = other RNA
tgaggtggtaggttgtgtggttt

SEQ ID NO: 44953 - RNA, 18 nt, Synthetic Construct
  source 1..18: mol_type = other RNA
cctgaagaataagcaccg

SEQ ID NO: 44954 - RNA, 17 nt, Synthetic Construct
  source 1..17: mol_type = other RNA
taggtcatcgtcaggct

SEQ ID NO: 44955 - RNA, 17 nt, Synthetic Construct
  source 1..17: mol_type = other RNA
taggtcatcgtcaggct

SEQ ID NO: 44956 - RNA, 17 nt, Synthetic Construct
  source 1..17: mol_type = other RNA
cccctggacctgtactg

SEQ ID NO: 44957 - RNA, 27 nt, Synthetic Construct
  source 1..27: mol_type = other RNA
ggggagctaatcccagaaacccggtcg

SEQ ID NO: 44958 - RNA, 27 nt, Synthetic Construct
  source 1..27: mol_type = other RNA
ggggagctaatcccagaaacccggtcg

SEQ ID NO: 44959 - RNA, 20 nt, Synthetic Construct
  source 1..20: mol_type = other RNA
tgaggtagtaggttatgtgg

SEQ ID NO: 44960 - RNA, 20 nt, Synthetic Construct
  source 1..20: mol_type = other RNA
tgaggtagtaggttatgtgg

SEQ ID NO: 44961 - RNA, 33 nt, Synthetic Construct; identical to SEQ ID NO: 4947
  source 1..33: mol_type = other RNA

SEQ ID NO: 44962 - RNA, 22 nt, Synthetic Construct
  source 1..22: mol_type = other RNA
tcctgtgctgagctgccccgag

SEQ ID NO: 44963 - RNA, 22 nt, Synthetic Construct
  source 1..22: mol_type = other RNA
tcctgtgctgagctgccccgag

SEQ ID NO: 44964 - RNA, 31 nt, Synthetic Construct; identical to SEQ ID NO: 2442
  source 1..31: mol_type = other RNA

SEQ ID NO: 44965 - RNA, 27 nt, Synthetic Construct
  source 1..27: mol_type = other RNA
ccccccgctgctaaatttgactggctt

SEQ ID NO: 44966 - RNA, 23 nt, Synthetic Construct
  source 1..23: mol_type = other RNA
tgaggtagtgggttgtgtggttt

SEQ ID NO: 44967 - RNA, 22 nt, Synthetic Construct
  source 1..22: mol_type = other RNA
tagcttatcagactgatgttga

SEQ ID NO: 44968 - RNA, 22 nt, Synthetic Construct
  source 1..22: mol_type = other RNA
tagcttatcagactgatgttga

SEQ ID NO: 44969 - RNA, 27 nt, Synthetic Construct
  source 1..27: mol_type = other RNA
gctttacattggactttgaacagatct

SEQ ID NO: 44970 - RNA, 27 nt, Synthetic Construct
  source 1..27: mol_type = other RNA
gctttacattggactttgaacagatct

SEQ ID NO: 44971 - RNA, 27 nt, Synthetic Construct
  source 1..27: mol_type = other RNA
ccccccactgctaaattcgactggctt

SEQ ID NO: 44972 - RNA, 27 nt, Synthetic Construct
  source 1..27: mol_type = other RNA
gatttccccttggggttgtaggaccac

SEQ ID NO: 44973 - RNA, 27 nt, Synthetic Construct
  source 1..27: mol_type = other RNA
gatttccccttggggttgtaggaccac

SEQ ID NO: 44974 - RNA, 23 nt, Synthetic Construct
  source 1..23: mol_type = other RNA
tcctgtactgagctgccccggga

SEQ ID NO: 44975 - RNA, 23 nt, Synthetic Construct
  source 1..23: mol_type = other RNA
tcctgtactgagctgccccggga

SEQ ID NO: 44976 - RNA, 23 nt, Synthetic Construct
  source 1..23: mol_type = other RNA
tgaggggcggagagcgagacttt

SEQ ID NO: 44977 - RNA, 32 nt, Synthetic Construct; identical to SEQ ID NO: 5582
  source 1..32: mol_type = other RNA

SEQ ID NO: 44978 - RNA, 32 nt, Synthetic Construct; identical to SEQ ID NO: 5582
  source 1..32: mol_type = other RNA

SEQ ID NO: 44979 - RNA, 37 nt, Synthetic Construct; identical to SEQ ID NO: 2365
  source 1..37: mol_type = other RNA

SEQ ID NO: 44980 - RNA, 37 nt, Synthetic Construct; identical to SEQ ID NO: 2365
  source 1..37: mol_type = other RNA

SEQ ID NO: 44981 - RNA, 21 nt, Synthetic Construct
  source 1..21: mol_type = other RNA
tgaggtagtaggttgtatagc

SEQ ID NO: 44982 - RNA, 28 nt, Synthetic Construct
  source 1..28: mol_type = other RNA
ggcagggttcgtgactggggtgaagtcg

SEQ ID NO: 44983 - RNA, 16 nt, Synthetic Construct
  source 1..16: mol_type = other RNA
gcgtagatatgcggag

SEQ ID NO: 44984 - RNA, 19 nt, Synthetic Construct
  source 1..19: mol_type = other RNA
tcctgtaccgatcaatagt

SEQ ID NO: 44985 - RNA, 19 nt, Synthetic Construct
  source 1..19: mol_type = other RNA
tcctgtaccgatcaatagt

SEQ ID NO: 44986 - RNA, 16 nt, Synthetic Construct
  source 1..16: mol_type = other RNA
ctgcctcagcgtcggt

SEQ ID NO: 44987 - RNA, 16 nt, Synthetic Construct
  source 1..16: mol_type = other RNA
ctgcctcagcgtcggt

SEQ ID NO: 44988 - RNA, 22 nt, Synthetic Construct
  source 1..22: mol_type = other RNA
tgaggtagtagtttgtgcagtt

SEQ ID NO: 44989 - RNA, 22 nt, Synthetic Construct
  source 1..22: mol_type = other RNA
tgaggtagtagtttgtgcagtt

SEQ ID NO: 44990 - RNA, 17 nt, Synthetic Construct
  source 1..17: mol_type = other RNA
gtccggatcgtagtctg

SEQ ID NO: 44991 - RNA, 23 nt, Synthetic Construct
  source 1..23: mol_type = other RNA
tgaggcagtaggttgtgtggttt

SEQ ID NO: 44992 - RNA, 23 nt, Synthetic Construct
  source 1..23: mol_type = other RNA
tgaggcagtaggttgtgtggttt

SEQ ID NO: 44993 - RNA, 16 nt, Synthetic Construct
  source 1..16: mol_type = other RNA
gtctacagccatacca

SEQ ID NO: 44994 - RNA, 15 nt, Synthetic Construct
  source 1..15: mol_type = other RNA
gtccggcccgaggca

SEQ ID NO: 44995 - RNA, 15 nt, Synthetic Construct
  source 1..15: mol_type = other RNA
gtccggcccgaggca

SEQ ID NO: 44996 - RNA, 15 nt, Synthetic Construct
  source 1..15: mol_type = other RNA
cctcgcgcgattgga

SEQ ID NO: 44997 - RNA, 15 nt, Synthetic Construct
  source 1..15: mol_type = other RNA
cctcgcgcgattgga

SEQ ID NO: 44998 - RNA, 22 nt, Synthetic Construct
  source 1..22: mol_type = other RNA
tggaatgtaaggaagtatgtat

SEQ ID NO: 44999 - RNA, 22 nt, Synthetic Construct
  source 1..22: mol_type = other RNA
tggaatgtaaggaagtatgtat

SEQ ID NO: 45000 - RNA, 21 nt, Synthetic Construct
  source 1..21: mol_type = other RNA
cggagtgtgacaatggtgttt

SEQ ID NO: 45001 - RNA, 21 nt, Synthetic Construct
  source 1..21: mol_type = other RNA
cggagtgtgacaatggtgttt

SEQ ID NO: 45002 - RNA, 34 nt, Synthetic Construct; identical to SEQ ID NO: 2367
  source 1..34: mol_type = other RNA

SEQ ID NO: 45003 - RNA, 33 nt, Synthetic Construct; identical to SEQ ID NO: 2266
  source 1..33: mol_type = other RNA

SEQ ID NO: 45004 - RNA, 23 nt, Synthetic Construct
  source 1..23: mol_type = other RNA
ctcactgatcgagtcgtcctgcg

SEQ ID NO: 45005 - RNA, 23 nt, Synthetic Construct
  source 1..23: mol_type = other RNA
ctcactgatcgagtcgtcctgcg

SEQ ID NO: 45006 - RNA, 17 nt, Synthetic Construct
  source 1..17: mol_type = other RNA
tcagtagctcgaggaaa

SEQ ID NO: 45007 - RNA, 17 nt, Synthetic Construct
  source 1..17: mol_type = other RNA
tcagtagctcgaggaaa

SEQ ID NO: 45008 - RNA, 16 nt, Synthetic Construct
  source 1..16: mol_type = other RNA
gggtgaaagcggggga

SEQ ID NO: 45009 - RNA, 16 nt, Synthetic Construct
  source 1..16: mol_type = other RNA
gggtgaaagcggggga

SEQ ID NO: 45010 - RNA, 36 nt, Synthetic Construct; identical to SEQ ID NO: 2344
  source 1..36: mol_type = other RNA

SEQ ID NO: 45011 - RNA, 23 nt, Synthetic Construct
  source 1..23: mol_type = other RNA
tgaggggcagagagcgaggcttt

SEQ ID NO: 45012 - RNA, 23 nt, Synthetic Construct
  source 1..23: mol_type = other RNA
tgaggggcagagagcgaggcttt

SEQ ID NO: 45013 - RNA, 15 nt, Synthetic Construct
  source 1..15: mol_type = other RNA
acggtcctaaggtag

SEQ ID NO: 45014 - RNA, 15 nt, Synthetic Construct
  source 1..15: mol_type = other RNA
acggtcctaaggtag

SEQ ID NO: 45015 - RNA, 21 nt, Synthetic Construct
  source 1..21: mol_type = other RNA
gtagcgaaattccttgtcggg

SEQ ID NO: 45016 - RNA, 26 nt, Synthetic Construct
  source 1..26: mol_type = other RNA
gcataagcgtgcttgactgcgagact

SEQ ID NO: 45017 - RNA, 21 nt, Synthetic Construct
  source 1..21: mol_type = other RNA
cgaggggcagagagcgagact

SEQ ID NO: 45018 - RNA, 32 nt, Synthetic Construct; identical to SEQ ID NO: 770
  source 1..32: mol_type = other RNA

SEQ ID NO: 45019 - RNA, 34 nt, Synthetic Construct; identical to SEQ ID NO: 2183
  source 1..34: mol_type = other RNA

SEQ ID NO: 45020 - RNA, 34 nt, Synthetic Construct; identical to SEQ ID NO: 2183
  source 1..34: mol_type = other RNA

SEQ ID NO: 45021 - RNA, 26 nt, Synthetic Construct
  source 1..26: mol_type = other RNA
gatgcgtggtaggagagcgttctgta

SEQ ID NO: 45022 - RNA, 15 nt, Synthetic Construct
  source 1..15: mol_type = other RNA
cgccatttaaagagg

SEQ ID NO: 45023 - RNA, 15 nt, Synthetic Construct
  source 1..15: mol_type = other RNA
cgccatttaaagagg

SEQ ID NO: 45024 - RNA, 21 nt, Synthetic Construct
  source 1..21: mol_type = other RNA
gcccgtgttcggaagattttc

SEQ ID NO: 45025 - RNA, 21 nt, Synthetic Construct
  source 1..21: mol_type = other RNA
gcccgtgttcggaagattttc

SEQ ID NO: 45026 - RNA, 22 nt, Synthetic Construct
  source 1..22: mol_type = other RNA
tcagcgccgatgatagtgcgga

SEQ ID NO: 45027 - RNA, 33 nt, Synthetic Construct; identical to SEQ ID NO: 1982
  source 1..33: mol_type = other RNA

SEQ ID NO: 45028 - RNA, 23 nt, Synthetic Construct
  source 1..23: mol_type = other RNA
tgaggggtagagagcgagacttt

SEQ ID NO: 45029 - RNA, 23 nt, Synthetic Construct
  source 1..23: mol_type = other RNA
tgaggggtagagagcgagacttt

SEQ ID NO: 45030 - RNA, 23 nt, Synthetic Construct
  source 1..23: mol_type = other RNA
tgaggggcagagagcgaggcttt

SEQ ID NO: 45031 - RNA, 19 nt, Synthetic Construct
  source 1..19: mol_type = other RNA
cctgtaccgatcaatagtg

SEQ ID NO: 45032 - RNA, 21 nt, Synthetic Construct
  source 1..21: mol_type = other RNA
gtagtgtttcctactttatgg

SEQ ID NO: 45033 - RNA, 27 nt, Synthetic Construct
  source 1..27: mol_type = other RNA
gatttccccttggggttgtaggaccac

SEQ ID NO: 45034 - RNA, 27 nt, Synthetic Construct
  source 1..27: mol_type = other RNA
gatttccccttggggttgtaggaccac

SEQ ID NO: 45035 - RNA, 20 nt, Synthetic Construct
  source 1..20: mol_type = other RNA
cataaagtagaaagcactac

SEQ ID NO: 45036 - RNA, 20 nt, Synthetic Construct
  source 1..20: mol_type = other RNA
cataaagtagaaagcactac

SEQ ID NO: 45037 - RNA, 22 nt, Synthetic Construct
  source 1..22: mol_type = other RNA
tgaggtagtagcttgtgctgtt

SEQ ID NO: 45038 - RNA, 22 nt, Synthetic Construct
  source 1..22: mol_type = other RNA
tgaggtagtagcttgtgctgtt

SEQ ID NO: 45039 - RNA, 24 nt, Synthetic Construct
  source 1..24: mol_type = other RNA
ttccccttggggttgtaggaccac

SEQ ID NO: 45040 - RNA, 24 nt, Synthetic Construct
  source 1..24: mol_type = other RNA
ttccccttggggttgtaggaccac

SEQ ID NO: 45041 - RNA, 21 nt, Synthetic Construct
  source 1..21: mol_type = other RNA
tcctgcactgagctgccccga

SEQ ID NO: 45042 - RNA, 21 nt, Synthetic Construct
  source 1..21: mol_type = other RNA
tcctgcactgagctgccccga

SEQ ID NO: 45043 - RNA, 26 nt, Synthetic Construct
  source 1..26: mol_type = other RNA
gcataagcgtgcttgactgcgagact

SEQ ID NO: 45044 - RNA, 16 nt, Synthetic Construct
  source 1..16: mol_type = other RNA
acggcccagactccta

SEQ ID NO: 45045 - RNA, 16 nt, Synthetic Construct
  source 1..16: mol_type = other RNA
acggcccagactccta

SEQ ID NO: 45046 - RNA, 19 nt, Synthetic Construct
  source 1..19: mol_type = other RNA
cctgtctgaatatgggggg

SEQ ID NO: 45047 - RNA, 20 nt, Synthetic Construct
  source 1..20: mol_type = other RNA
caggacagtgaaacgagtca

SEQ ID NO: 45048 - RNA, 20 nt, Synthetic Construct
  source 1..20: mol_type = other RNA
caggacagtgaaacgagtca

SEQ ID NO: 45049 - RNA, 17 nt, Synthetic Construct
  source 1..17: mol_type = other RNA
atcgtgacgatagtgca

SEQ ID NO: 45050 - RNA, 17 nt, Synthetic Construct
  source 1..17: mol_type = other RNA
atcgtgacgatagtgca

SEQ ID NO: 45051 - RNA, 22 nt, Synthetic Construct
  source 1..22: mol_type = other RNA
tgaggtagtaggttgcgtggtt

SEQ ID NO: 45052 - RNA, 17 nt, Synthetic Construct
  source 1..17: mol_type = other RNA
acagtcaggatgttggc

SEQ ID NO: 45053 - RNA, 23 nt, Synthetic Construct
  source 1..23: mol_type = other RNA
tggtaatacgacgtacttagtga

SEQ ID NO: 45054 - RNA, 23 nt, Synthetic Construct
  source 1..23: mol_type = other RNA
tggtaatacgacgtacttagtga

SEQ ID NO: 45055 - RNA, 18 nt, Synthetic Construct
  source 1..18: mol_type = other RNA
tcccctggacctgtactg

SEQ ID NO: 45056 - RNA, 28 nt, Synthetic Construct
  source 1..28: mol_type = other RNA
ccccccactgctaaatttgaccggcttt

SEQ ID NO: 45057 - RNA, 15 nt, Synthetic Construct
  source 1..15: mol_type = other RNA
ggtcatcgtcaggct

SEQ ID NO: 45058 - RNA, 16 nt, Synthetic Construct
  source 1..16: mol_type = other RNA
tggccgtcgtcagctc

SEQ ID NO: 45059 - RNA, 16 nt, Synthetic Construct
  source 1..16: mol_type = other RNA
tggccgtcgtcagctc

SEQ ID NO: 45060 - RNA, 29 nt, Synthetic Construct
  source 1..29: mol_type = other RNA
gcatgggtggttcagtggtagaattctcg

SEQ ID NO: 45061 - RNA, 29 nt, Synthetic Construct
  source 1..29: mol_type = other RNA
gcatgggtggttcagtggtagaattctcg

SEQ ID NO: 45062 - RNA, 25 nt, Synthetic Construct
  source 1..25: mol_type = other RNA
agctcactgatcgagtcgtcctgcg

SEQ ID NO: 45063 - RNA, 25 nt, Synthetic Construct
  source 1..25: mol_type = other RNA
agctcactgatcgagtcgtcctgcg

SEQ ID NO: 45064 - RNA, 23 nt, Synthetic Construct
  source 1..23: mol_type = other RNA
tggtgatacgacgtacttagtgt

SEQ ID NO: 45065 - RNA, 23 nt, Synthetic Construct
  source 1..23: mol_type = other RNA
tggtgatacgacgtacttagtgt

SEQ ID NO: 45066 - RNA, 18 nt, Synthetic Construct
  source 1..18: mol_type = other RNA
cgccgatgatagtgcgga

SEQ ID NO: 45067 - RNA, 18 nt, Synthetic Construct
  source 1..18: mol_type = other RNA
cgccgatgatagtgcgga

SEQ ID NO: 45068 - RNA, 22 nt, Synthetic Construct
  source 1..22: mol_type = other RNA
gtagtgtttcctactttatgga

SEQ ID NO: 45069 - RNA, 22 nt, Synthetic Construct
  source 1..22: mol_type = other RNA
gtagtgtttcctactttatgga

SEQ ID NO: 45070 - RNA, 16 nt, Synthetic Construct
  source 1..16: mol_type = other RNA
gtctacagccatacca

SEQ ID NO: 45071 - RNA, 16 nt, Synthetic Construct
  source 1..16: mol_type = other RNA
gtctacagccatacca

SEQ ID NO: 45072 - RNA, 27 nt, Synthetic Construct
  source 1..27: mol_type = other RNA
gcgggcgtagctcaggggtagagcgca

SEQ ID NO: 45073 - RNA, 27 nt, Synthetic Construct
  source 1..27: mol_type = other RNA
gcgggcgtagctcaggggtagagcgca

SEQ ID NO: 45074 - RNA, 22 nt, Synthetic Construct
  source 1..22: mol_type = other RNA
tgaggtagtgggttgtgtggtt

SEQ ID NO: 45075 - RNA, 22 nt, Synthetic Construct
  source 1..22: mol_type = other RNA
tgaggtagtgggttgtgtggtt

SEQ ID NO: 45076 - RNA, 27 nt, Synthetic Construct
  source 1..27: mol_type = other RNA
gactcttagcggtggatcactcggctc

SEQ ID NO: 45077 - RNA, 27 nt, Synthetic Construct
  source 1..27: mol_type = other RNA
gactcttagcggtggatcactcggctc

SEQ ID NO: 45078 - RNA, 21 nt, Synthetic Construct
  source 1..21: mol_type = other RNA
gtagcgaaattccttgtcggg

SEQ ID NO: 45079 - RNA, 15 nt, Synthetic Construct
  source 1..15: mol_type = other RNA
ggccgtcgtcagctc

SEQ ID NO: 45080 - RNA, 15 nt, Synthetic Construct
  source 1..15: mol_type = other RNA
ggccgtcgtcagctc

SEQ ID NO: 45081 - RNA, 23 nt, Synthetic Construct
  source 1..23: mol_type = other RNA
tggtaatgcgacgtacttagtgt

SEQ ID NO: 45082 - RNA, 16 nt, Synthetic Construct
  source 1..16: mol_type = other RNA
cccaaaggtcgtcggt

SEQ ID NO: 45083 - RNA, 16 nt, Synthetic Construct
  source 1..16: mol_type = other RNA
cccaaaggtcgtcggt

SEQ ID NO: 45084 - RNA, 18 nt, Synthetic Construct
  source 1..18: mol_type = other RNA
tctaatgagactgccggt

SEQ ID NO: 45085 - RNA, 18 nt, Synthetic Construct
  source 1..18: mol_type = other RNA
gaagttgaccgcctgggg

SEQ ID NO: 45086 - RNA, 18 nt, Synthetic Construct
  source 1..18: mol_type = other RNA
gaagttgaccgcctgggg

SEQ ID NO: 45087 - RNA, 16 nt, Synthetic Construct
  source 1..16: mol_type = other RNA
tgcgtagatatgcgga

SEQ ID NO: 45088 - RNA, 21 nt, Synthetic Construct
  source 1..21: mol_type = other RNA
ctaatcccagaaacccggtcg

SEQ ID NO: 45089 - RNA, 25 nt, Synthetic Construct
  source 1..25: mol_type = other RNA
ttgcagctgcctgggagtgacttca

SEQ ID NO: 45090 - RNA, 25 nt, Synthetic Construct
  source 1..25: mol_type = other RNA
ttgcagctgcctgggagtgacttca

SEQ ID NO: 45091 - RNA, 17 nt, Synthetic Construct
  source 1..17: mol_type = other RNA
cagagacgagtcgacca

SEQ ID NO: 45092 - RNA, 17 nt, Synthetic Construct
  source 1..17: mol_type = other RNA
cagagacgagtcgacca

SEQ ID NO: 45093 - RNA, 35 nt, Synthetic Construct; identical to SEQ ID NO: 2450
  source 1..35: mol_type = other RNA

SEQ ID NO: 45094 - RNA, 21 nt, Synthetic Construct
  source 1..21: mol_type = other RNA
tgaggcagtaggttgtgtggt

SEQ ID NO: 45095 - RNA, 21 nt, Synthetic Construct
  source 1..21: mol_type = other RNA
tgaggcagtaggttgtgtggt

SEQ ID NO: 45096 - RNA, 23 nt, Synthetic Construct
  source 1..23: mol_type = other RNA
tgaggcagtaggttgtgtggttt

SEQ ID NO: 45097 - RNA, 31 nt, Synthetic Construct; identical to SEQ ID NO: 2263
  source 1..31: mol_type = other RNA

SEQ ID NO: 45098 - RNA, 31 nt, Synthetic Construct; identical to SEQ ID NO: 2263
  source 1..31: mol_type = other RNA

SEQ ID NO: 45099 - RNA, 18 nt, Synthetic Construct
  source 1..18: mol_type = other RNA
cgccgatgatagtgcgga

SEQ ID NO: 45100 - RNA, 15 nt, Synthetic Construct
  source 1..15: mol_type = other RNA
ttccgaaagtagtgg

SEQ ID NO: 45101 - RNA, 23 nt, Synthetic Construct
  source 1..23: mol_type = other RNA
tggtaaaacgacgtacttagtgt

SEQ ID NO: 45102 - RNA, 23 nt, Synthetic Construct
  source 1..23: mol_type = other RNA
tggtaaaacgacgtacttagtgt

SEQ ID NO: 45103 - RNA, 23 nt, Synthetic Construct
  source 1..23: mol_type = other RNA
tggtaatacgacgtacttagtat

SEQ ID NO: 45104 - RNA, 22 nt, Synthetic Construct
  source 1..22: mol_type = other RNA
tggaatgtaaggaagtatgtat

SEQ ID NO: 45105 - RNA, 22 nt, Synthetic Construct
  source 1..22: mol_type = other RNA
tggaatgtaaggaagtatgtat

SEQ ID NO: 45106 - RNA, 23 nt, Synthetic Construct
  source 1..23: mol_type = other RNA
tcctgaactgagctgccccgaga

SEQ ID NO: 45107 - RNA, 23 nt, Synthetic Construct
  source 1..23: mol_type = other RNA
tcctgaactgagctgccccgaga

SEQ ID NO: 45108 - RNA, 20 nt, Synthetic Construct
  source 1..20: mol_type = other RNA
tgaggtagtaggttgtatgg

SEQ ID NO: 45109 - RNA, 20 nt, Synthetic Construct
  source 1..20: mol_type = other RNA
tgaggtagtaggttgtatgg

SEQ ID NO: 45110 - RNA, 36 nt, Synthetic Construct; identical to SEQ ID NO: 2469
  source 1..36: mol_type = other RNA

SEQ ID NO: 45111 - RNA, 30 nt, Synthetic Construct; identical to SEQ ID NO: 2353
  source 1..30: mol_type = other RNA

SEQ ID NO: 45112 - RNA, 30 nt, Synthetic Construct; identical to SEQ ID NO: 2353
  source 1..30: mol_type = other RNA

SEQ ID NO: 45113 - RNA, 22 nt, Synthetic Construct
  source 1..22: mol_type = other RNA
tagcagcacgtgaatattggcg

SEQ ID NO: 45114 - RNA, 22 nt, Synthetic Construct
  source 1..22: mol_type = other RNA
tagcagcacgtgaatattggcg

SEQ ID NO: 45115 - RNA, 23 nt, Synthetic Construct
  source 1..23: mol_type = other RNA
tggtaacacgacgtacttagtgt

SEQ ID NO: 45116 - RNA, 23 nt, Synthetic Construct
  source 1..23: mol_type = other RNA
tggtaacacgacgtacttagtgt

SEQ ID NO: 45117 - RNA, 34 nt, Synthetic Construct; identical to SEQ ID NO: 385
  source 1..34: mol_type = other RNA

SEQ ID NO: 45118 - RNA, 34 nt, Synthetic Construct; identical to SEQ ID NO: 385
  source 1..34: mol_type = other RNA

SEQ ID NO: 45119 - RNA, 19 nt, Synthetic Construct
  source 1..19: mol_type = other RNA
gctattgacgaccgtaccg

SEQ ID NO: 45120 - RNA, 19 nt, Synthetic Construct
  source 1..19: mol_type = other RNA
gctattgacgaccgtaccg

SEQ ID NO: 45121 - RNA, 39 nt, Synthetic Construct; identical to SEQ ID NO: 2398
  source 1..39: mol_type = other RNA

SEQ ID NO: 45122 - RNA, 17 nt, Synthetic Construct
  source 1..17: mol_type = other RNA
cagtagctcgaggaaaa

SEQ ID NO: 45123 - RNA, 17 nt, Synthetic Construct
  source 1..17: mol_type = other RNA
cagtagctcgaggaaaa

SEQ ID NO: 45124 - RNA, 22 nt, Synthetic Construct
  source 1..22: mol_type = other RNA
gcgttgcaaccagtgccggggg

SEQ ID NO: 45125 - RNA, 22 nt, Synthetic Construct
  source 1..22: mol_type = other RNA
gcgttgcaaccagtgccggggg

SEQ ID NO: 45126 - RNA, 25 nt, Synthetic Construct
  source 1..25: mol_type = other RNA
cgactcttagcggtggatcactcgg

SEQ ID NO: 45127 - RNA, 25 nt, Synthetic Construct
  source 1..25: mol_type = other RNA
cgactcttagcggtggatcactcgg

SEQ ID NO: 45128 - RNA, 21 nt, Synthetic Construct
  source 1..21: mol_type = other RNA
cggtcccaagggtatggctgt

SEQ ID NO: 45129 - RNA, 21 nt, Synthetic Construct
  source 1..21: mol_type = other RNA
cggtcccaagggtatggctgt

SEQ ID NO: 45130 - RNA, 18 nt, Synthetic Construct
  source 1..18: mol_type = other RNA
cctgtaccgatcaatagt

SEQ ID NO: 45131 - RNA, 18 nt, Synthetic Construct
  source 1..18: mol_type = other RNA
cctgtaccgatcaatagt

SEQ ID NO: 45132 - RNA, 23 nt, Synthetic Construct
  source 1..23: mol_type = other RNA
tcctgcactgagctgccccgaga

SEQ ID NO: 45133 - RNA, 23 nt, Synthetic Construct
  source 1..23: mol_type = other RNA
tcctgcactgagctgccccgaga

SEQ ID NO: 45134 - RNA, 16 nt, Synthetic Construct
  source 1..16: mol_type = other RNA
acggcccagactccta

SEQ ID NO: 45135 - RNA, 28 nt, Synthetic Construct
  source 1..28: mol_type = other RNA
gctttacattggactttgaacagatctg

SEQ ID NO: 45136 - RNA, 28 nt, Synthetic Construct
  source 1..28: mol_type = other RNA
gctttacattggactttgaacagatctg

SEQ ID NO: 45137 - RNA, 16 nt, Synthetic Construct
  source 1..16: mol_type = other RNA
gaaattccttgtcggg

SEQ ID NO: 45138 - RNA, 16 nt, Synthetic Construct
  source 1..16: mol_type = other RNA
gaaattccttgtcggg

SEQ ID NO: 45139 - RNA, 30 nt, Synthetic Construct; identical to SEQ ID NO: 1194
  source 1..30: mol_type = other RNA

SEQ ID NO: 45140 - RNA, 30 nt, Synthetic Construct; identical to SEQ ID NO: 1194
  source 1..30: mol_type = other RNA

SEQ ID NO: 45141 - RNA, 26 nt, Synthetic Construct
  source 1..26: mol_type = other RNA
tgtcggctcatctcatcctggggctg

SEQ ID NO: 45142 - RNA, 19 nt, Synthetic Construct
  source 1..19: mol_type = other RNA
tcagtagctcgaggaaaag

SEQ ID NO: 45143 - RNA, 19 nt, Synthetic Construct
  source 1..19: mol_type = other RNA
tcagtagctcgaggaaaag

SEQ ID NO: 45144 - RNA, 18 nt, Synthetic Construct
  source 1..18: mol_type = other RNA
cccaaaggtcgtcggttc

SEQ ID NO: 45145 - RNA, 18 nt, Synthetic Construct
  source 1..18: mol_type = other RNA
cccaaaggtcgtcggttc

SEQ ID NO: 45146 - RNA, 21 nt, Synthetic Construct
  source 1..21: mol_type = other RNA
tgaggaagtaggttgtatagt

SEQ ID NO: 45147 - RNA, 21 nt, Synthetic Construct
  source 1..21: mol_type = other RNA
tgaggaagtaggttgtatagt

SEQ ID NO: 45148 - RNA, 22 nt, Synthetic Construct
  source 1..22: mol_type = other RNA
tgaggtagtagtttgcgctgtt

SEQ ID NO: 45149 - RNA, 22 nt, Synthetic Construct
  source 1..22: mol_type = other RNA
tgaggtagtagtttgcgctgtt

SEQ ID NO: 45150 - RNA, 15 nt, Synthetic Construct
  source 1..15: mol_type = other RNA
tggccgtcgtcagct

SEQ ID NO: 45151 - RNA, 15 nt, Synthetic Construct
  source 1..15: mol_type = other RNA
tggccgtcgtcagct

SEQ ID NO: 45152 - RNA, 17 nt, Synthetic Construct
  source 1..17: mol_type = other RNA
atcgtgacgatagtgca

SEQ ID NO: 45153 - RNA, 17 nt, Synthetic Construct
  source 1..17: mol_type = other RNA
atcgtgacgatagtgca

SEQ ID NO: 45154 - RNA, 23 nt, Synthetic Construct
  source 1..23: mol_type = other RNA
tgaggtagtaggttgtgtggttc

SEQ ID NO: 45155 - RNA, 21 nt, Synthetic Construct
  source 1..21: mol_type = other RNA
taactccttagcgaatctcgc

SEQ ID NO: 45156 - RNA, 21 nt, Synthetic Construct
  source 1..21: mol_type = other RNA
taactccttagcgaatctcgc

SEQ ID NO: 45157 - RNA, 15 nt, Synthetic Construct
  source 1..15: mol_type = other RNA
gcgtagatatgcgga

SEQ ID NO: 45158 - RNA, 15 nt, Synthetic Construct
  source 1..15: mol_type = other RNA
gcgtagatatgcgga

SEQ ID NO: 45159 - RNA, 21 nt, Synthetic Construct
  source 1..21: mol_type = other RNA
gttggttcaagcgtgtagtcg

SEQ ID NO: 45160 - RNA, 16 nt, Synthetic Construct
  source 1..16: mol_type = other RNA
gatttgggagtgctcg

SEQ ID NO: 45161 - RNA, 21 nt, Synthetic Construct
  source 1..21: mol_type = other RNA
ccctgtactgagctgccccga

SEQ ID NO: 45162 - RNA, 21 nt, Synthetic Construct
  source 1..21: mol_type = other RNA
ccctgtactgagctgccccga

SEQ ID NO: 45163 - RNA, 24 nt, Synthetic Construct
  source 1..24: mol_type = other RNA
tgtaaacatccccgaccggaagct

SEQ ID NO: 45164 - RNA, 23 nt, Synthetic Construct
  source 1..23: mol_type = other RNA
tgaggggcagagagcgggacttt

SEQ ID NO: 45165 - RNA, 23 nt, Synthetic Construct
  source 1..23: mol_type = other RNA
tgaggggcagagagcgggacttt

SEQ ID NO: 45166 - RNA, 18 nt, Synthetic Construct
  source 1..18: mol_type = other RNA
cctgtaccgatcaatagt

SEQ ID NO: 45167 - RNA, 17 nt, Synthetic Construct
  source 1..17: mol_type = other RNA
ccgtgtgaaagtaggtc

SEQ ID NO: 45168 - RNA, 17 nt, Synthetic Construct
  source 1..17: mol_type = other RNA
ccgtgtgaaagtaggtc

SEQ ID NO: 45169 - RNA, 22 nt, Synthetic Construct
  source 1..22: mol_type = other RNA
gctcttgactgaagtcccagta

SEQ ID NO: 45170 - RNA, 22 nt, Synthetic Construct
  source 1..22: mol_type = other RNA
gctcttgactgaagtcccagta

SEQ ID NO: 45171 - RNA, 15 nt, Synthetic Construct
  source 1..15: mol_type = other RNA
gtctcgccgacggca

SEQ ID NO: 45172 - RNA, 15 nt, Synthetic Construct
  source 1..15: mol_type = other RNA
gtctcgccgacggca

SEQ ID NO: 45173 - RNA, 22 nt, Synthetic Construct
  source 1..22: mol_type = other RNA
tgaggtagtaggttgtatagta

SEQ ID NO: 45174 - RNA, 31 nt, Synthetic Construct; identical to SEQ ID NO: 2278
  source 1..31: mol_type = other RNA

SEQ ID NO: 45175 - RNA, 22 nt, Synthetic Construct
  source 1..22: mol_type = other RNA
tgaggtagtagattgtgtggtt

SEQ ID NO: 45176 - RNA, 22 nt, Synthetic Construct
  source 1..22: mol_type = other RNA
tgaggtagtagattgtgtggtt

SEQ ID NO: 45177 - RNA, 22 nt, Synthetic Construct
  source 1..22: mol_type = other RNA
tgaggcagtaggttgtgtggtt

SEQ ID NO: 45178 - RNA, 17 nt, Synthetic Construct
  source 1..17: mol_type = other RNA
taggtcatcgtcaggct

SEQ ID NO: 45179 - RNA, 23 nt, Synthetic Construct
  source 1..23: mol_type = other RNA
atatcggaacgtgcccagtcgtg

SEQ ID NO: 45180 - RNA, 22 nt, Synthetic Construct
  source 1..22: mol_type = other RNA
cggaggagttcgaaggtacgct

SEQ ID NO: 45181 - RNA, 24 nt, Synthetic Construct
  source 1..24: mol_type = other RNA
gatgaggcgtgataacgagtctgc

SEQ ID NO: 45182 - RNA, 15 nt, Synthetic Construct
  source 1..15: mol_type = other RNA
gtccggcccgaggca

SEQ ID NO: 45183 - RNA, 15 nt, Synthetic Construct
  source 1..15: mol_type = other RNA
gtccggcccgaggca

SEQ ID NO: 45184 - RNA, 35 nt, Synthetic Construct; identical to SEQ ID NO: 2567
  source 1..35: mol_type = other RNA

SEQ ID NO: 45185 - RNA, 35 nt, Synthetic Construct; identical to SEQ ID NO: 2567
  source 1..35: mol_type = other RNA

SEQ ID NO: 45186 - RNA, 36 nt, Synthetic Construct; identical to SEQ ID NO: 2660
  source 1..36: mol_type = other RNA

SEQ ID NO: 45187 - RNA, 22 nt, Synthetic Construct
  source 1..22: mol_type = other RNA
tcggatccgtctgagcttggct

SEQ ID NO: 45188 - RNA, 22 nt, Synthetic Construct
  source 1..22: mol_type = other RNA
tcggatccgtctgagcttggct

SEQ ID NO: 45189 - RNA, 23 nt, Synthetic Construct
  source 1..23: mol_type = other RNA
caaagtgctgctcgtgcaggtag

SEQ ID NO: 45190 - RNA, 23 nt, Synthetic Construct
  source 1..23: mol_type = other RNA
caaagtgctgctcgtgcaggtag

SEQ ID NO: 45191 - RNA, 22 nt, Synthetic Construct
  source 1..22: mol_type = other RNA
tcagtagctcgaggaaaagaca

SEQ ID NO: 45192 - RNA, 24 nt, Synthetic Construct
  source 1..24: mol_type = other RNA
tagcagcacgtaaatattggcgtt

SEQ ID NO: 45193 - RNA, 22 nt, Synthetic Construct
  source 1..22: mol_type = other RNA
tgaggtagtaggttgtataatt

SEQ ID NO: 45194 - RNA, 22 nt, Synthetic Construct
  source 1..22: mol_type = other RNA
tgaggtagtaggttgtataatt

SEQ ID NO: 45195 - RNA, 16 nt, Synthetic Construct
  source 1..16: mol_type = other RNA
tgcgtagatatgcgga

SEQ ID NO: 45196 - RNA, 21 nt, Synthetic Construct
  source 1..21: mol_type = other RNA
taactccttaagcaatctcgc

SEQ ID NO: 45197 - RNA, 21 nt, Synthetic Construct
  source 1..21: mol_type = other RNA
taactccttaagcaatctcgc

SEQ ID NO: 45198 - RNA, 23 nt, Synthetic Construct
  source 1..23: mol_type = other RNA
tgaggggcagagagcgagacctt

SEQ ID NO: 45199 - RNA, 22 nt, Synthetic Construct
  source 1..22: mol_type = other RNA
tgaggtggtaggttgtgtggtt

SEQ ID NO: 45200 - RNA, 22 nt, Synthetic Construct
  source 1..22: mol_type = other RNA
tgaggtggtaggttgtgtggtt

SEQ ID NO: 45201 - RNA, 22 nt, Synthetic Construct
  source 1..22: mol_type = other RNA
tcaagagcaataacgaaaaatg

SEQ ID NO: 45202 - RNA, 17 nt, Synthetic Construct
  source 1..17: mol_type = other RNA
tcccctggacctgtact

SEQ ID NO: 45203 - RNA, 15 nt, Synthetic Construct
  source 1..15: mol_type = other RNA
aggtgggaggctttg

SEQ ID NO: 45204 - RNA, 15 nt, Synthetic Construct
  source 1..15: mol_type = other RNA
aggtgggaggctttg

SEQ ID NO: 45205 - RNA, 23 nt, Synthetic Construct
  source 1..23: mol_type = other RNA
tggtaatacgatgtacttagtgt

SEQ ID NO: 45206 - RNA, 23 nt, Synthetic Construct
  source 1..23: mol_type = other RNA
tggtaatacgatgtacttagtgt

SEQ ID NO: 45207 - RNA, 21 nt, Synthetic Construct
  source 1..21: mol_type = other RNA
tcctgtaccgagctgccccga

SEQ ID NO: 45208 - RNA, 21 nt, Synthetic Construct
  source 1..21: mol_type = other RNA
tcctgtaccgagctgccccga

SEQ ID NO: 45209 - RNA, 27 nt, Synthetic Construct
  source 1..27: mol_type = other RNA
ccccccactgctaaatttggctggctt

SEQ ID NO: 45210 - RNA, 19 nt, Synthetic Construct
  source 1..19: mol_type = other RNA
accaaggggtcgtgggttc

SEQ ID NO: 45211 - RNA, 19 nt, Synthetic Construct
  source 1..19: mol_type = other RNA
accaaggggtcgtgggttc

SEQ ID NO: 45212 - RNA, 15 nt, Synthetic Construct
  source 1..15: mol_type = other RNA
ggtggctgtagctca

SEQ ID NO: 45213 - RNA, 15 nt, Synthetic Construct
  source 1..15: mol_type = other RNA
ggtggctgtagctca

SEQ ID NO: 45214 - RNA, 19 nt, Synthetic Construct
  source 1..19: mol_type = other RNA
cgcgacctcagatcagacg

SEQ ID NO: 45215 - RNA, 19 nt, Synthetic Construct
  source 1..19: mol_type = other RNA
cgcgacctcagatcagacg

SEQ ID NO: 45216 - RNA, 25 nt, Synthetic Construct
  source 1..25: mol_type = other RNA
gtgaggatatgagatcgagacgaca

SEQ ID NO: 45217 - RNA, 25 nt, Synthetic Construct
  source 1..25: mol_type = other RNA
gtgaggatatgagatcgagacgaca

SEQ ID NO: 45218 - RNA, 21 nt, Synthetic Construct
  source 1..21: mol_type = other RNA
gttggttcaagcgtgtagtcg

SEQ ID NO: 45219 - RNA, 33 nt, Synthetic Construct; identical to SEQ ID NO: 2209
  source 1..33: mol_type = other RNA

SEQ ID NO: 45220 - RNA, 34 nt, Synthetic Construct; identical to SEQ ID NO: 2529
  source 1..34: mol_type = other RNA

SEQ ID NO: 45221 - RNA, 31 nt, Synthetic Construct; identical to SEQ ID NO: 2263
  source 1..31: mol_type = other RNA

SEQ ID NO: 45222 - RNA, 23 nt, Synthetic Construct
  source 1..23: mol_type = other RNA
tccagtactgagctgccccgaga

SEQ ID NO: 45223 - RNA, 23 nt, Synthetic Construct
  source 1..23: mol_type = other RNA
tccagtactgagctgccccgaga

SEQ ID NO: 45224 - RNA, 16 nt, Synthetic Construct
  source 1..16: mol_type = other RNA
gtctgcggccatacca

SEQ ID NO: 45225 - RNA, 16 nt, Synthetic Construct
  source 1..16: mol_type = other RNA
gtctgcggccatacca

SEQ ID NO: 45226 - RNA, 37 nt, Synthetic Construct; identical to SEQ ID NO: 2607
  source 1..37: mol_type = other RNA

SEQ ID NO: 45227 - RNA, 31 nt, Synthetic Construct; identical to SEQ ID NO: 2412
  source 1..31: mol_type = other RNA

SEQ ID NO: 45228 - RNA, 21 nt, Synthetic Construct
  source 1..21: mol_type = other RNA
tgaggtagtagattgtatagc

SEQ ID NO: 45229 - RNA, 20 nt, Synthetic Construct
  source 1..20: mol_type = other RNA
ccttggggttgtaggaccac

SEQ ID NO: 45230 - RNA, 20 nt, Synthetic Construct
  source 1..20: mol_type = other RNA
ccttggggttgtaggaccac

SEQ ID NO: 45231 - RNA, 23 nt, Synthetic Construct
  source 1..23: mol_type = other RNA
tggtaatgcgacgtacttagtgt

SEQ ID NO: 45232 - RNA, 19 nt, Synthetic Construct
  source 1..19: mol_type = other RNA
tctaatgagactgccggtg

SEQ ID NO: 45233 - RNA, 19 nt, Synthetic Construct
  source 1..19: mol_type = other RNA
tctaatgagactgccggtg

SEQ ID NO: 45234 - RNA, 15 nt, Synthetic Construct
  source 1..15: mol_type = other RNA
tcagtagctcgagga

SEQ ID NO: 45235 - RNA, 15 nt, Synthetic Construct
  source 1..15: mol_type = other RNA
tcagtagctcgagga

SEQ ID NO: 45236 - RNA, 21 nt, Synthetic Construct
  source 1..21: mol_type = other RNA
ggaatcgctagtaatcgcgga

SEQ ID NO: 45237 - RNA, 21 nt, Synthetic Construct
  source 1..21: mol_type = other RNA
ggaatcgctagtaatcgcgga

SEQ ID NO: 45238 - RNA, 23 nt, Synthetic Construct
  source 1..23: mol_type = other RNA
tcctgtactgggctgccccgagt

SEQ ID NO: 45239 - RNA, 23 nt, Synthetic Construct
  source 1..23: mol_type = other RNA
tcctgtactgggctgccccgagt

SEQ ID NO: 45240 - RNA, 21 nt, Synthetic Construct
  source 1..21: mol_type = other RNA
ctaatcccagaaacccggtcg

SEQ ID NO: 45241 - RNA, 17 nt, Synthetic Construct
  source 1..17: mol_type = other RNA
ccagtaaacggcggccg

SEQ ID NO: 45242 - RNA, 17 nt, Synthetic Construct
  source 1..17: mol_type = other RNA
ccagtaaacggcggccg

SEQ ID NO: 45243 - RNA, 22 nt, Synthetic Construct
  source 1..22: mol_type = other RNA
tcctgtactgagctgtcccgag

SEQ ID NO: 45244 - RNA, 22 nt, Synthetic Construct
  source 1..22: mol_type = other RNA
tcctgtactgagctgtcccgag

SEQ ID NO: 45245 - RNA, 22 nt, Synthetic Construct
  source 1..22: mol_type = other RNA
tgaggtagtagtttgtgctgtc

SEQ ID NO: 45246 - RNA, 32 nt, Synthetic Construct; identical to SEQ ID NO: 161
  source 1..32: mol_type = other RNA

SEQ ID NO: 45247 - RNA, 17 nt, Synthetic Construct
  source 1..17: mol_type = other RNA
ccaaggggtcgtgggtt

SEQ ID NO: 45248 - RNA, 23 nt, Synthetic Construct
  source 1..23: mol_type = other RNA
tggtaatacgatgtacttagtgt

SEQ ID NO: 45249 - RNA, 23 nt, Synthetic Construct
  source 1..23: mol_type = other RNA
tggtaatacgatgtacttagtgt

SEQ ID NO: 45250 - RNA, 25 nt, Synthetic Construct
  source 1..25: mol_type = other RNA
ggtaaaatggctgagtgaagcattg

SEQ ID NO: 45251 - RNA, 21 nt, Synthetic Construct
  source 1..21: mol_type = other RNA
tgaggtagtaggttatgtggt

SEQ ID NO: 45252 - RNA, 21 nt, Synthetic Construct
  source 1..21: mol_type = other RNA
tgaggtagtaggttatgtggt

SEQ ID NO: 45253 - RNA, 34 nt, Synthetic Construct; identical to SEQ ID NO: 6594
  source 1..34: mol_type = other RNA

SEQ ID NO: 45254 - RNA, 34 nt, Synthetic Construct; identical to SEQ ID NO: 6594
  source 1..34: mol_type = other RNA

SEQ ID NO: 45255 - RNA, 33 nt, Synthetic Construct; identical to SEQ ID NO: 2126
  source 1..33: mol_type = other RNA

SEQ ID NO: 45256 - RNA, 33 nt, Synthetic Construct; identical to SEQ ID NO: 2126
  source 1..33: mol_type = other RNA

SEQ ID NO: 45257 - RNA, 23 nt, Synthetic Construct
  source 1..23: mol_type = other RNA
tggtaatacgtcgtacttagtgt

SEQ ID NO: 45258 - RNA, 23 nt, Synthetic Construct
  source 1..23: mol_type = other RNA
tggtaatacgtcgtacttagtgt

SEQ ID NO: 45259 - RNA, 29 nt, Synthetic Construct
  source 1..29: mol_type = other RNA
tgaaggtgggttgtgaagcctgctggagg

SEQ ID NO: 45260 - RNA, 29 nt, Synthetic Construct
  source 1..29: mol_type = other RNA
tgaaggtgggttgtgaagcctgctggagg

SEQ ID NO: 45261 - RNA, 23 nt, Synthetic Construct
  source 1..23: mol_type = other RNA
tctttgttcgattccgttgagta

SEQ ID NO: 45262 - RNA, 23 nt, Synthetic Construct
  source 1..23: mol_type = other RNA
tctttgttcgattccgttgagta

SEQ ID NO: 45263 - RNA, 23 nt, Synthetic Construct
  source 1..23: mol_type = other RNA
tgaggggcagagagcgagactat

SEQ ID NO: 45264 - RNA, 23 nt, Synthetic Construct
  source 1..23: mol_type = other RNA
tgaggggcagagagcgagactat

SEQ ID NO: 45265 - RNA, 23 nt, Synthetic Construct
  source 1..23: mol_type = other RNA
cctcgcgcgattggagcggccga

SEQ ID NO: 45266 - RNA, 34 nt, Synthetic Construct; identical to SEQ ID NO: 2364
  source 1..34: mol_type = other RNA

SEQ ID NO: 45267 - RNA, 16 nt, Synthetic Construct
  source 1..16: mol_type = other RNA
gcggctgtagctcagt

SEQ ID NO: 45268 - RNA, 16 nt, Synthetic Construct
  source 1..16: mol_type = other RNA
gcggctgtagctcagt

SEQ ID NO: 45269 - RNA, 27 nt, Synthetic Construct
  source 1..27: mol_type = other RNA
cgtgtgaaagtaggtcatcgtcaggct

SEQ ID NO: 45270 - RNA, 27 nt, Synthetic Construct
  source 1..27: mol_type = other RNA
cgtgtgaaagtaggtcatcgtcaggct

SEQ ID NO: 45271 - RNA, 19 nt, Synthetic Construct
  source 1..19: mol_type = other RNA
ctgatcgagtcgtcctgcg

SEQ ID NO: 45272 - RNA, 20 nt, Synthetic Construct
  source 1..20: mol_type = other RNA
cgcgacctcagatcagacgt

SEQ ID NO: 45273 - RNA, 20 nt, Synthetic Construct
  source 1..20: mol_type = other RNA
cgcgacctcagatcagacgt

SEQ ID NO: 45274 - RNA, 23 nt, Synthetic Construct
  source 1..23: mol_type = other RNA
tagtaatacgacgtacttagtgt

SEQ ID NO: 45275 - RNA, 22 nt, Synthetic Construct
  source 1..22: mol_type = other RNA
tgaggtagcaggttgtgtggtt

SEQ ID NO: 45276 - RNA, 17 nt, Synthetic Construct
  source 1..17: mol_type = other RNA
cgatctgtagctggtct

SEQ ID NO: 45277 - RNA, 21 nt, Synthetic Construct
  source 1..21: mol_type = other RNA
tgaggggcggagagcgagact

SEQ ID NO: 45278 - RNA, 20 nt, Synthetic Construct
  source 1..20: mol_type = other RNA
actgatcgagtcgtcctgcg

SEQ ID NO: 45279 - RNA, 23 nt, Synthetic Construct
  source 1..23: mol_type = other RNA
tgaggggcagagagtgagacttt

SEQ ID NO: 45280 - RNA, 22 nt, Synthetic Construct
  source 1..22: mol_type = other RNA
ttataatacaacctgataagtg

SEQ ID NO: 45281 - RNA, 17 nt, Synthetic Construct
  source 1..17: mol_type = other RNA
tcagtagctcgaggaaa

SEQ ID NO: 45282 - RNA, 17 nt, Synthetic Construct
  source 1..17: mol_type = other RNA
tcagtagctcgaggaaa

SEQ ID NO: 45283 - RNA, 28 nt, Synthetic Construct
  source 1..28: mol_type = other RNA
ccccccactgctaaatttggctggcttt

SEQ ID NO: 45284 - RNA, 28 nt, Synthetic Construct
  source 1..28: mol_type = other RNA
ccccccactgctaaatttggctggcttt

SEQ ID NO: 45285 - RNA, 26 nt, Synthetic Construct
  source 1..26: mol_type = other RNA
gaggaacactagtggcgtaggcgaga

SEQ ID NO: 45286 - RNA, 26 nt, Synthetic Construct
  source 1..26: mol_type = other RNA
gaggaacactagtggcgtaggcgaga

SEQ ID NO: 45287 - RNA, 24 nt, Synthetic Construct
  source 1..24: mol_type = other RNA
tgtaaacatccctgactggaagct

SEQ ID NO: 45288 - RNA, 16 nt, Synthetic Construct
  source 1..16: mol_type = other RNA
cgctagtaatcgcgga

SEQ ID NO: 45289 - RNA, 15 nt, Synthetic Construct
  source 1..15: mol_type = other RNA
cagtgaaacgagtca

SEQ ID NO: 45290 - RNA, 15 nt, Synthetic Construct
  source 1..15: mol_type = other RNA
cagtgaaacgagtca

SEQ ID NO: 45291 - RNA, 28 nt, Synthetic Construct
  source 1..28: mol_type = other RNA
ggcagggttcgtgactggggtgaagtcg

SEQ ID NO: 45292 - RNA, 22 nt, Synthetic Construct
  source 1..22: mol_type = other RNA
gcgttgcaaccagtgccggggg

SEQ ID NO: 45293 - RNA, 22 nt, Synthetic Construct
  source 1..22: mol_type = other RNA
gcgttgcaaccagtgccggggg

SEQ ID NO: 45294 - RNA, 22 nt, Synthetic Construct
  source 1..22: mol_type = other RNA
gctcacggaaagagaatgaagc

SEQ ID NO: 45295 - RNA, 22 nt, Synthetic Construct
  source 1..22: mol_type = other RNA
aacccgtagatccgatcttgtg

SEQ ID NO: 45296 - RNA, 39 nt, Synthetic Construct; identical to SEQ ID NO: 2398
  source 1..39: mol_type = other RNA

SEQ ID NO: 45297 - RNA, 23 nt, Synthetic Construct
  source 1..23: mol_type = other RNA
tcccgtactgagctgccccgagt

SEQ ID NO: 45298 - RNA, 23 nt, Synthetic Construct
  source 1..23: mol_type = other RNA
tcccgtactgagctgccccgagt

SEQ ID NO: 45299 - RNA, 31 nt, Synthetic Construct; identical to SEQ ID NO: 2442
  source 1..31: mol_type = other RNA

SEQ ID NO: 45300 - RNA, 31 nt, Synthetic Construct; identical to SEQ ID NO: 2442
  source 1..31: mol_type = other RNA

SEQ ID NO: 45301 - RNA, 25 nt, Synthetic Construct
  source 1..25: mol_type = other RNA
ttgaggatatgagatagagacgaca

SEQ ID NO: 45302 - RNA, 25 nt, Synthetic Construct
  source 1..25: mol_type = other RNA
ttgaggatatgagatagagacgaca

SEQ ID NO: 45303 - RNA, 20 nt, Synthetic Construct
  source 1..20: mol_type = other RNA
tcgcgccgtcgggcccgggg

SEQ ID NO: 45304 - RNA, 20 nt, Synthetic Construct
  source 1..20: mol_type = other RNA
tcgcgccgtcgggcccgggg

SEQ ID NO: 45305 - RNA, 18 nt, Synthetic Construct
  source 1..18: mol_type = other RNA
gcgaaattccttgtcggg

SEQ ID NO: 45306 - RNA, 22 nt, Synthetic Construct
  source 1..22: mol_type = other RNA
tgggatgtaaagaagtatgtat

SEQ ID NO: 45307 - RNA, 22 nt, Synthetic Construct
  source 1..22: mol_type = other RNA
tgggatgtaaagaagtatgtat

SEQ ID NO: 45308 - RNA, 22 nt, Synthetic Construct
  source 1..22: mol_type = other RNA
gtcagtttgtcaaataccccat

SEQ ID NO: 45309 - RNA, 22 nt, Synthetic Construct
  source 1..22: mol_type = other RNA
gtcagtttgtcaaataccccat

SEQ ID NO: 45310 - RNA, 26 nt, Synthetic Construct
  source 1..26: mol_type = other RNA
ttaagtgacgatagcctaggagatac

SEQ ID NO: 45311 - RNA, 26 nt, Synthetic Construct
  source 1..26: mol_type = other RNA
ttaagtgacgatagcctaggagatac

SEQ ID NO: 45312 - RNA, 26 nt, Synthetic Construct
  source 1..26: mol_type = other RNA
gagcagctaataccgcatacgacctg

SEQ ID NO: 45313 - RNA, 21 nt, Synthetic Construct
  source 1..21: mol_type = other RNA
tgaggtggtaggttgtgtggt

SEQ ID NO: 45314 - RNA, 21 nt, Synthetic Construct
  source 1..21: mol_type = other RNA
tgaggtggtaggttgtgtggt

SEQ ID NO: 45315 - RNA, 23 nt, Synthetic Construct
  source 1..23: mol_type = other RNA
tgaggtagtaggttgtgcggttt

SEQ ID NO: 45316 - RNA, 23 nt, Synthetic Construct
  source 1..23: mol_type = other RNA
tgaggtagtaggttgtgcggttt

SEQ ID NO: 45317 - RNA, 17 nt, Synthetic Construct
  source 1..17: mol_type = other RNA
cacggcccagactccta

SEQ ID NO: 45318 - RNA, 23 nt, Synthetic Construct
  source 1..23: mol_type = other RNA
tgtagtgtttcctactttatggt

SEQ ID NO: 45319 - RNA, 23 nt, Synthetic Construct
  source 1..23: mol_type = other RNA
tgtagtgtttcctactttatggt

SEQ ID NO: 45320 - RNA, 21 nt, Synthetic Construct
  source 1..21: mol_type = other RNA
ctttgttcgattccgttgagt

SEQ ID NO: 45321 - RNA, 24 nt, Synthetic Construct
  source 1..24: mol_type = other RNA
tttccccttggggttgtaggacca

SEQ ID NO: 45322 - RNA, 24 nt, Synthetic Construct
  source 1..24: mol_type = other RNA
tttccccttggggttgtaggacca

SEQ ID NO: 45323 - RNA, 22 nt, Synthetic Construct
  source 1..22: mol_type = other RNA
tgaggcagtaggttgtgtggtt

SEQ ID NO: 45324 - RNA, 22 nt, Synthetic Construct
  source 1..22: mol_type = other RNA
tgaggcagtaggttgtgtggtt

SEQ ID NO: 45325 - RNA, 37 nt, Synthetic Construct; identical to SEQ ID NO: 4277
  source 1..37: mol_type = other RNA

SEQ ID NO: 45326 - RNA, 37 nt, Synthetic Construct; identical to SEQ ID NO: 4277
  source 1..37: mol_type = other RNA

SEQ ID NO: 45327 - RNA, 23 nt, Synthetic Construct
  source 1..23: mol_type = other RNA
aggtaatacgacgtacttagtgt

SEQ ID NO: 45328 - RNA, 23 nt, Synthetic Construct
  source 1..23: mol_type = other RNA
tccagtactgagctgccccgagt

SEQ ID NO: 45329 - RNA, 23 nt, Synthetic Construct
  source 1..23: mol_type = other RNA
tccagtactgagctgccccgagt

SEQ ID NO: 45330 - RNA, 21 nt, Synthetic Construct
  source 1..21: mol_type = other RNA
acagcaggacggtggccatgg

SEQ ID NO: 45331 - RNA, 21 nt, Synthetic Construct
  source 1..21: mol_type = other RNA
acagcaggacggtggccatgg

SEQ ID NO: 45332 - RNA, 21 nt, Synthetic Construct
  source 1..21: mol_type = other RNA
tcctgtactgagctgccctga

SEQ ID NO: 45333 - RNA, 21 nt, Synthetic Construct
  source 1..21: mol_type = other RNA
tcctgtactgagctgccctga

SEQ ID NO: 45334 - RNA, 18 nt, Synthetic Construct
  source 1..18: mol_type = other RNA
tcccctggacctgtactg

SEQ ID NO: 45335 - RNA, 18 nt, Synthetic Construct
  source 1..18: mol_type = other RNA
tcccctggacctgtactg

SEQ ID NO: 45336 - RNA, 23 nt, Synthetic Construct
  source 1..23: mol_type = other RNA
caaagtgctgttcgtgcaggtaa

SEQ ID NO: 45337 - RNA, 23 nt, Synthetic Construct
  source 1..23: mol_type = other RNA
tggtaatacgacatacttagtgt

SEQ ID NO: 45338 - RNA, 21 nt, Synthetic Construct
  source 1..21: mol_type = other RNA
tcctgtctgaatatgggggga

SEQ ID NO: 45339 - RNA, 21 nt, Synthetic Construct
  source 1..21: mol_type = other RNA
tcctgtctgaatatgggggga

SEQ ID NO: 45340 - RNA, 22 nt, Synthetic Construct
  source 1..22: mol_type = other RNA
tgaggtagtagtttgtgcggtt

SEQ ID NO: 45341 - RNA, 22 nt, Synthetic Construct
  source 1..22: mol_type = other RNA
tgaggtagtagtttgtgcggtt

SEQ ID NO: 45342 - RNA, 17 nt, Synthetic Construct
  source 1..17: mol_type = other RNA
tcccctggacctgtact

SEQ ID NO: 45343 - RNA, 16 nt, Synthetic Construct
  source 1..16: mol_type = other RNA
gggtctgtagctcagt

SEQ ID NO: 45344 - RNA, 15 nt, Synthetic Construct
  source 1..15: mol_type = other RNA
tccggatcgtagtct

SEQ ID NO: 45345 - RNA, 22 nt, Synthetic Construct
  source 1..22: mol_type = other RNA
ggcagggttcgtgactggggtg

SEQ ID NO: 45346 - RNA, 22 nt, Synthetic Construct
  source 1..22: mol_type = other RNA
ggcagggttcgtgactggggtg

SEQ ID NO: 45347 - RNA, 37 nt, Synthetic Construct; identical to SEQ ID NO: 2482
  source 1..37: mol_type = other RNA

SEQ ID NO: 45348 - RNA, 37 nt, Synthetic Construct; identical to SEQ ID NO: 2482
  source 1..37: mol_type = other RNA

SEQ ID NO: 45349 - RNA, 21 nt, Synthetic Construct
  source 1..21: mol_type = other RNA
gctttgatccggagatttccg

SEQ ID NO: 45350 - RNA, 26 nt, Synthetic Construct
  source 1..26: mol_type = other RNA
cgactcttagcggtggatcactcggc

SEQ ID NO: 45351 - RNA, 26 nt, Synthetic Construct
  source 1..26: mol_type = other RNA
cgactcttagcggtggatcactcggc

SEQ ID NO: 45352 - RNA, 23 nt, Synthetic Construct
  source 1..23: mol_type = other RNA
tcggatccgtctgagcttggctt

SEQ ID NO: 45353 - RNA, 23 nt, Synthetic Construct
  source 1..23: mol_type = other RNA
tcggatccgtctgagcttggctt

SEQ ID NO: 45354 - RNA, 19 nt, Synthetic Construct
  source 1..19: mol_type = other RNA
acatgcaagtcgaacggta

SEQ ID NO: 45355 - RNA, 19 nt, Synthetic Construct
  source 1..19: mol_type = other RNA
acatgcaagtcgaacggta

SEQ ID NO: 45356 - RNA, 21 nt, Synthetic Construct
  source 1..21: mol_type = other RNA
tgaagtagtaggttgtgtggt

SEQ ID NO: 45357 - RNA, 21 nt, Synthetic Construct
  source 1..21: mol_type = other RNA
tgaagtagtaggttgtgtggt

SEQ ID NO: 45358 - RNA, 16 nt, Synthetic Construct
  source 1..16: mol_type = other RNA
tcgtgacgatagtgca

SEQ ID NO: 45359 - RNA, 16 nt, Synthetic Construct
  source 1..16: mol_type = other RNA
tcgtgacgatagtgca

SEQ ID NO: 45360 - RNA, 19 nt, Synthetic Construct
  source 1..19: mol_type = other RNA
aacagtcaggatgttggct

SEQ ID NO: 45361 - RNA, 19 nt, Synthetic Construct
  source 1..19: mol_type = other RNA
aacagtcaggatgttggct

SEQ ID NO: 45362 - RNA, 22 nt, Synthetic Construct
  source 1..22: mol_type = other RNA
nattgcacttgtcccggcctgt

SEQ ID NO: 45363 - RNA, 22 nt, Synthetic Construct
  source 1..22: mol_type = other RNA
nattgcacttgtcccggcctgt

SEQ ID NO: 45364 - RNA, 27 nt, Synthetic Construct
  source 1..27: mol_type = other RNA
ccctccactgctaaatttgactggctt

SEQ ID NO: 45365 - RNA, 20 nt, Synthetic Construct
  source 1..20: mol_type = other RNA
tgaggaagtaggttgtatag

SEQ ID NO: 45366 - RNA, 20 nt, Synthetic Construct
  source 1..20: mol_type = other RNA
tgaggaagtaggttgtatag

SEQ ID NO: 45367 - RNA, 22 nt, Synthetic Construct
  source 1..22: mol_type = other RNA
atcacattgccagggatttcca

SEQ ID NO: 45368 - RNA, 23 nt, Synthetic Construct
  source 1..23: mol_type = other RNA
tgaggggcagagagcgagactct

SEQ ID NO: 45369 - RNA, 23 nt, Synthetic Construct
  source 1..23: mol_type = other RNA
tgaggggcagagagcgagactct

SEQ ID NO: 45370 - RNA, 15 nt, Synthetic Construct
  source 1..15: mol_type = other RNA
tcgagtcgtcctgcg

SEQ ID NO: 45371 - RNA, 15 nt, Synthetic Construct
  source 1..15: mol_type = other RNA
tcgagtcgtcctgcg

SEQ ID NO: 45372 - RNA, 33 nt, Synthetic Construct; identical to SEQ ID NO: 2266
  source 1..33: mol_type = other RNA

SEQ ID NO: 45373 - RNA, 33 nt, Synthetic Construct; identical to SEQ ID NO: 2266
  source 1..33: mol_type = other RNA

SEQ ID NO: 45374 - RNA, 23 nt, Synthetic Construct
  source 1..23: mol_type = other RNA
gcgtggtaggagagcgttctgta

SEQ ID NO: 45375 - RNA, 17 nt, Synthetic Construct
  source 1..17: mol_type = other RNA
cctcgcgcgattggagc

SEQ ID NO: 45376 - RNA, 23 nt, Synthetic Construct
  source 1..23: mol_type = other RNA
tcggaatcgctagtaatcgcgga

SEQ ID NO: 45377 - RNA, 31 nt, Synthetic Construct; identical to SEQ ID NO: 1881
  source 1..31: mol_type = other RNA

SEQ ID NO: 45378 - RNA, 31 nt, Synthetic Construct; identical to SEQ ID NO: 1881
  source 1..31: mol_type = other RNA

SEQ ID NO: 45379 - RNA, 37 nt, Synthetic Construct; identical to SEQ ID NO: 4277
  source 1..37: mol_type = other RNA

SEQ ID NO: 45380 - RNA, 37 nt, Synthetic Construct; identical to SEQ ID NO: 4277
  source 1..37: mol_type = other RNA

SEQ ID NO: 45381 - RNA, 34 nt, Synthetic Construct; identical to SEQ ID NO: 6757
  source 1..34: mol_type = other RNA

SEQ ID NO: 45382 - RNA, 34 nt, Synthetic Construct; identical to SEQ ID NO: 6757
  source 1..34: mol_type = other RNA

SEQ ID NO: 45383 - RNA, 27 nt, Synthetic Construct
  source 1..27: mol_type = other RNA
ggggagctaatcccagaaacccggtcg

SEQ ID NO: 45384 - RNA, 27 nt, Synthetic Construct
  source 1..27: mol_type = other RNA
ggggagctaatcccagaaacccggtcg

SEQ ID NO: 45385 - RNA, 27 nt, Synthetic Construct
  source 1..27: mol_type = other RNA
gacttaccaaacctatgcaaactccga

SEQ ID NO: 45386 - RNA, 27 nt, Synthetic Construct
  source 1..27: mol_type = other RNA
gacttaccaaacctatgcaaactccga

SEQ ID NO: 45387 - RNA, 25 nt, Synthetic Construct
  source 1..25: mol_type = other RNA
agctcactgatcgagtcgtcctgcg

SEQ ID NO: 45388 - RNA, 25 nt, Synthetic Construct
  source 1..25: mol_type = other RNA
agctcactgatcgagtcgtcctgcg

SEQ ID NO: 45389 - RNA, 19 nt, Synthetic Construct
  source 1..19: mol_type = other RNA
cagcactctgcaaagacga

SEQ ID NO: 45390 - RNA, 19 nt, Synthetic Construct
  source 1..19: mol_type = other RNA
cagcactctgcaaagacga

SEQ ID NO: 45391 - RNA, 23 nt, Synthetic Construct
  source 1..23: mol_type = other RNA
tgaggggaagagagcgagacttt

SEQ ID NO: 45392 - RNA, 28 nt, Synthetic Construct
  source 1..28: mol_type = other RNA
tgttggttcaagcgtgtagtcgtgctct

SEQ ID NO: 45393 - RNA, 23 nt, Synthetic Construct
  source 1..23: mol_type = other RNA
tggtaaaacgacgtacttagtgt

SEQ ID NO: 45394 - RNA, 23 nt, Synthetic Construct
  source 1..23: mol_type = other RNA
tggtaaaacgacgtacttagtgt

SEQ ID NO: 45395 - RNA, 18 nt, Synthetic Construct
  source 1..18: mol_type = other RNA
gcgaaattccttgtcggg

SEQ ID NO: 45396 - RNA, 18 nt, Synthetic Construct
  source 1..18: mol_type = other RNA
gcgaaattccttgtcggg

SEQ ID NO: 45397 - RNA, 33 nt, Synthetic Construct; identical to SEQ ID NO: 2395
  source 1..33: mol_type = other RNA

SEQ ID NO: 45398 - RNA, 31 nt, Synthetic Construct; identical to SEQ ID NO: 2412
  source 1..31: mol_type = other RNA

SEQ ID NO: 45399 - RNA, 31 nt, Synthetic Construct; identical to SEQ ID NO: 2412
  source 1..31: mol_type = other RNA

SEQ ID NO: 45400 - RNA, 21 nt, Synthetic Construct
  source 1..21: mol_type = other RNA
taacactgtctggtaaagatg

SEQ ID NO: 45401 - RNA, 21 nt, Synthetic Construct
  source 1..21: mol_type = other RNA
taacactgtctggtaaagatg

SEQ ID NO: 45402 - RNA, 23 nt, Synthetic Construct
  source 1..23: mol_type = other RNA
ggaggggcagagagcgagacttt

SEQ ID NO: 45403 - RNA, 29 nt, Synthetic Construct
  source 1..29: mol_type = other RNA
gatgcgaaagcaggtcaaagtgatccggc

SEQ ID NO: 45404 - RNA, 29 nt, Synthetic Construct
  source 1..29: mol_type = other RNA
gatgcgaaagcaggtcaaagtgatccggc

SEQ ID NO: 45405 - RNA, 23 nt, Synthetic Construct
  source 1..23: mol_type = other RNA
tgaggggaagagagcgagacttt

SEQ ID NO: 45406 - RNA, 23 nt, Synthetic Construct
  source 1..23: mol_type = other RNA
tccagtactgagctgccccgagt

SEQ ID NO: 45407 - RNA, 23 nt, Synthetic Construct
  source 1..23: mol_type = other RNA
tccagtactgagctgccccgagt

SEQ ID NO: 45408 - RNA, 18 nt, Synthetic Construct
  source 1..18: mol_type = other RNA
cccaaaggtcgtcggttc

SEQ ID NO: 45409 - RNA, 18 nt, Synthetic Construct
  source 1..18: mol_type = other RNA
cccaaaggtcgtcggttc

SEQ ID NO: 45410 - RNA, 20 nt, Synthetic Construct
  source 1..20: mol_type = other RNA
ctctaatgagactgccggtg

SEQ ID NO: 45411 - RNA, 20 nt, Synthetic Construct
  source 1..20: mol_type = other RNA
ctctaatgagactgccggtg

SEQ ID NO: 45412 - RNA, 21 nt, Synthetic Construct
  source 1..21: mol_type = other RNA
tggagtgtgacaatggtgctt

SEQ ID NO: 45413 - RNA, 21 nt, Synthetic Construct
  source 1..21: mol_type = other RNA
tggagtgtgacaatggtgctt

SEQ ID NO: 45414 - RNA, 31 nt, Synthetic Construct; identical to SEQ ID NO: 2427
  source 1..31: mol_type = other RNA

SEQ ID NO: 45415 - RNA, 22 nt, Synthetic Construct
  source 1..22: mol_type = other RNA
catcgcacttgtctcggtctga

SEQ ID NO: 45416 - RNA, 21 nt, Synthetic Construct
  source 1..21: mol_type = other RNA
taacactgtctggtaaagatg

SEQ ID NO: 45417 - RNA, 21 nt, Synthetic Construct
  source 1..21: mol_type = other RNA
taacactgtctggtaaagatg

SEQ ID NO: 45418 - RNA, 22 nt, Synthetic Construct
  source 1..22: mol_type = other RNA
tgaggtagtaggttgtgcggtt

SEQ ID NO: 45419 - RNA, 15 nt, Synthetic Construct
  source 1..15: mol_type = other RNA
gggtgaaagcggggg

SEQ ID NO: 45420 - RNA, 15 nt, Synthetic Construct
  source 1..15: mol_type = other RNA
gggtgaaagcggggg

SEQ ID NO: 45421 - RNA, 23 nt, Synthetic Construct
  source 1..23: mol_type = other RNA
tgaggggcagagagcgggacttt

SEQ ID NO: 45422 - RNA, 23 nt, Synthetic Construct
  source 1..23: mol_type = other RNA
tgataatacgacgtacttagtgt

SEQ ID NO: 45423 - RNA, 23 nt, Synthetic Construct
  source 1..23: mol_type = other RNA
tgataatacgacgtacttagtgt

SEQ ID NO: 45424 - RNA, 16 nt, Synthetic Construct
  source 1..16: mol_type = other RNA
gggtgaaagcggggga

SEQ ID NO: 45425 - RNA, 21 nt, Synthetic Construct
  source 1..21: mol_type = other RNA
tcctgtactgggctgccccga

SEQ ID NO: 45426 - RNA, 21 nt, Synthetic Construct
  source 1..21: mol_type = other RNA
tcctgtactgggctgccccga

SEQ ID NO: 45427 - RNA, 18 nt, Synthetic Construct
  source 1..18: mol_type = other RNA
cataaagtagaaagcact

SEQ ID NO: 45428 - RNA, 18 nt, Synthetic Construct
  source 1..18: mol_type = other RNA
cataaagtagaaagcact

SEQ ID NO: 45429 - RNA, 22 nt, Synthetic Construct
  source 1..22: mol_type = other RNA
tcagcgccgatgatagtgcgga

SEQ ID NO: 45430 - RNA, 22 nt, Synthetic Construct
  source 1..22: mol_type = other RNA
tcagcgccgatgatagtgcgga

SEQ ID NO: 45431 - RNA, 21 nt, Synthetic Construct
  source 1..21: mol_type = other RNA
cgaggtagtaggttgtgtggt

SEQ ID NO: 45432 - RNA, 21 nt, Synthetic Construct
  source 1..21: mol_type = other RNA
cgaggtagtaggttgtgtggt

SEQ ID NO: 45433 - RNA, 22 nt, Synthetic Construct
  source 1..22: mol_type = other RNA
tgaggtagtaggttgagtggtt

SEQ ID NO: 45434 - RNA, 22 nt, Synthetic Construct
  source 1..22: mol_type = other RNA
tgaggtagtaggttgagtggtt

SEQ ID NO: 45435 - RNA, 24 nt, Synthetic Construct
  source 1..24: mol_type = other RNA
tgaggtagtaggttgtgtggttta

SEQ ID NO: 45436 - RNA, 22 nt, Synthetic Construct
  source 1..22: mol_type = other RNA
tgaggtagtgggttgtatagtt

SEQ ID NO: 45437 - RNA, 22 nt, Synthetic Construct
  source 1..22: mol_type = other RNA
tgaggtagtgggttgtatagtt

SEQ ID NO: 45438 - RNA, 37 nt, Synthetic Construct; identical to SEQ ID NO: 2482
  source 1..37: mol_type = other RNA

SEQ ID NO: 45439 - RNA, 37 nt, Synthetic Construct; identical to SEQ ID NO: 2482
  source 1..37: mol_type = other RNA

SEQ ID NO: 45440 - RNA, 27 nt, Synthetic Construct
  source 1..27: mol_type = other RNA
ccccccattgctaaatttgactggctt

SEQ ID NO: 45441 - RNA, 23 nt, Synthetic Construct
  source 1..23: mol_type = other RNA
tggtaatacgacgtacttagagt

SEQ ID NO: 45442 - RNA, 16 nt, Synthetic Construct
  source 1..16: mol_type = other RNA
tggccgtcgtcagctc

SEQ ID NO: 45443 - RNA, 16 nt, Synthetic Construct
  source 1..16: mol_type = other RNA
tggccgtcgtcagctc

SEQ ID NO: 45444 - RNA, 23 nt, Synthetic Construct
  source 1..23: mol_type = other RNA
tggtaatacgacgtacttagtgc

SEQ ID NO: 45445 - RNA, 23 nt, Synthetic Construct
  source 1..23: mol_type = other RNA
tcactgatcgagtcgtcctgcgc

SEQ ID NO: 45446 - RNA, 23 nt, Synthetic Construct
  source 1..23: mol_type = other RNA
tcactgatcgagtcgtcctgcgc

SEQ ID NO: 45447 - RNA, 43 nt, Synthetic Construct; identical to SEQ ID NO: 727
  source 1..43: mol_type = other RNA

SEQ ID NO: 45448 - RNA, 43 nt, Synthetic Construct; identical to SEQ ID NO: 727
  source 1..43: mol_type = other RNA

SEQ ID NO: 45449 - RNA, 17 nt, Synthetic Construct
  source 1..17: mol_type = other RNA
gcgtagatatgcggagg

SEQ ID NO: 45450 - RNA, 17 nt, Synthetic Construct
  source 1..17: mol_type = other RNA
gcgtagatatgcggagg

SEQ ID NO: 45451 - RNA, 22 nt, Synthetic Construct
  source 1..22: mol_type = other RNA
tggaacgtaaagaagtatgtat

SEQ ID NO: 45452 - RNA, 22 nt, Synthetic Construct
  source 1..22: mol_type = other RNA
tggaacgtaaagaagtatgtat

SEQ ID NO: 45453 - RNA, 18 nt, Synthetic Construct
  source 1..18: mol_type = other RNA
tccgacatgcgagggttc

SEQ ID NO: 45454 - RNA, 37 nt, Synthetic Construct; identical to SEQ ID NO: 2607
  source 1..37: mol_type = other RNA

SEQ ID NO: 45455 - RNA, 22 nt, Synthetic Construct
  source 1..22: mol_type = other RNA
tgaggtagtagtttgtggtgtt

SEQ ID NO: 45456 - RNA, 16 nt, Synthetic Construct
  source 1..16: mol_type = other RNA
gtctacggccatgcca

SEQ ID NO: 45457 - RNA, 21 nt, Synthetic Construct
  source 1..21: mol_type = other RNA
tgaggtagtagattgtgtggt

SEQ ID NO: 45458 - RNA, 21 nt, Synthetic Construct
  source 1..21: mol_type = other RNA
tgaggtagtagattgtgtggt

SEQ ID NO: 45459 - RNA, 15 nt, Synthetic Construct
  source 1..15: mol_type = other RNA
cgccatttaaagagg

SEQ ID NO: 45460 - RNA, 21 nt, Synthetic Construct
  source 1..21: mol_type = other RNA
tgaggtagtaggttgtatggt

SEQ ID NO: 45461 - RNA, 21 nt, Synthetic Construct
  source 1..21: mol_type = other RNA
tgaggtagtaggttgtatggt

SEQ ID NO: 45462 - RNA, 21 nt, Synthetic Construct
  source 1..21: mol_type = other RNA
atcggaacgtgcccagtcgtg

SEQ ID NO: 45463 - RNA, 21 nt, Synthetic Construct
  source 1..21: mol_type = other RNA
atcggaacgtgcccagtcgtg

SEQ ID NO: 45464 - RNA, 16 nt, Synthetic Construct
  source 1..16: mol_type = other RNA
tccggatcgtagtctg

SEQ ID NO: 45465 - RNA, 16 nt, Synthetic Construct
  source 1..16: mol_type = other RNA
tccggatcgtagtctg

SEQ ID NO: 45466 - RNA, 18 nt, Synthetic Construct
  source 1..18: mol_type = other RNA
ctaatgagactgccggtg

SEQ ID NO: 45467 - RNA, 18 nt, Synthetic Construct
  source 1..18: mol_type = other RNA
ctaatgagactgccggtg

SEQ ID NO: 45468 - RNA, 17 nt, Synthetic Construct
  source 1..17: mol_type = other RNA
atgcaagtcgaacggta

SEQ ID NO: 45469 - RNA, 17 nt, Synthetic Construct
  source 1..17: mol_type = other RNA
atgcaagtcgaacggta

SEQ ID NO: 45470 - RNA, 15 nt, Synthetic Construct
  source 1..15: mol_type = other RNA
gtccggcccgaggca

SEQ ID NO: 45471 - RNA, 23 nt, Synthetic Construct
  source 1..23: mol_type = other RNA
tcctgtactgagctgccctgaga

SEQ ID NO: 45472 - RNA, 23 nt, Synthetic Construct
  source 1..23: mol_type = other RNA
tcctgtactgagctgccctgaga

SEQ ID NO: 45473 - RNA, 23 nt, Synthetic Construct
  source 1..23: mol_type = other RNA
tcgaccggacctcgaccggctcg

SEQ ID NO: 45474 - RNA, 23 nt, Synthetic Construct
  source 1..23: mol_type = other RNA
tcgaccggacctcgaccggctcg

SEQ ID NO: 45475 - RNA, 21 nt, Synthetic Construct
  source 1..21: mol_type = other RNA
tccttcattccaccggagtct

SEQ ID NO: 45476 - RNA, 21 nt, Synthetic Construct
  source 1..21: mol_type = other RNA
tccttcattccaccggagtct

SEQ ID NO: 45477 - RNA, 21 nt, Synthetic Construct
  source 1..21: mol_type = other RNA
tgaggtagtaggttgtatggt

SEQ ID NO: 45478 - RNA, 21 nt, Synthetic Construct
  source 1..21: mol_type = other RNA
tgaggtagtaggttgtatggt

SEQ ID NO: 45479 - RNA, 18 nt, Synthetic Construct
  source 1..18: mol_type = other RNA
tccgacatgcgagggttc

SEQ ID NO: 45480 - RNA, 18 nt, Synthetic Construct
  source 1..18: mol_type = other RNA
tccgacatgcgagggttc

SEQ ID NO: 45481 - RNA, 23 nt, Synthetic Construct
  source 1..23: mol_type = other RNA
tcctgtgctgagctgccccgagt

SEQ ID NO: 45482 - RNA, 23 nt, Synthetic Construct
  source 1..23: mol_type = other RNA
tcctgtgctgagctgccccgagt

SEQ ID NO: 45483 - RNA, 18 nt, Synthetic Construct
  source 1..18: mol_type = other RNA
accaaggggtcgtgggtt

SEQ ID NO: 45484 - RNA, 18 nt, Synthetic Construct
  source 1..18: mol_type = other RNA
accaaggggtcgtgggtt

SEQ ID NO: 45485 - RNA, 23 nt, Synthetic Construct
  source 1..23: mol_type = other RNA
tgaggcagtaggttgtgtggttt

SEQ ID NO: 45486 - RNA, 23 nt, Synthetic Construct
  source 1..23: mol_type = other RNA
tgaggcagtaggttgtgtggttt

SEQ ID NO: 45487 - RNA, 38 nt, Synthetic Construct; identical to SEQ ID NO: 2492
  source 1..38: mol_type = other RNA

SEQ ID NO: 45488 - RNA, 38 nt, Synthetic Construct; identical to SEQ ID NO: 2492
  source 1..38: mol_type = other RNA

SEQ ID NO: 45489 - RNA, 21 nt, Synthetic Construct
  source 1..21: mol_type = other RNA
gctttgatccggagatttccg

SEQ ID NO: 45490 - RNA, 21 nt, Synthetic Construct
  source 1..21: mol_type = other RNA
gctttgatccggagatttccg

SEQ ID NO: 45491 - RNA, 19 nt, Synthetic Construct
  source 1..19: mol_type = other RNA
gcgccgatgatagtgcgga

SEQ ID NO: 45492 - RNA, 17 nt, Synthetic Construct
  source 1..17: mol_type = other RNA
gcggctgtagctcagtt

SEQ ID NO: 45493 - RNA, 22 nt, Synthetic Construct
  source 1..22: mol_type = other RNA
tagcagcacgtaagtattggcg

SEQ ID NO: 45494 - RNA, 22 nt, Synthetic Construct
  source 1..22: mol_type = other RNA
tagcagcacgtaagtattggcg

SEQ ID NO: 45495 - RNA, 38 nt, Synthetic Construct; identical to SEQ ID NO: 2492
  source 1..38: mol_type = other RNA

SEQ ID NO: 45496 - RNA, 22 nt, Synthetic Construct
  source 1..22: mol_type = other RNA
tgaggtagtaggtcgtgtggtt

SEQ ID NO: 45497 - RNA, 22 nt, Synthetic Construct
  source 1..22: mol_type = other RNA
tgaggtagtaggtcgtgtggtt

SEQ ID NO: 45498 - RNA, 32 nt, Synthetic Construct; identical to SEQ ID NO: 2467
  source 1..32: mol_type = other RNA

SEQ ID NO: 45499 - RNA, 17 nt, Synthetic Construct
  source 1..17: mol_type = other RNA
cgatctgtagctggtct

SEQ ID NO: 45500 - RNA, 17 nt, Synthetic Construct
  source 1..17: mol_type = other RNA
cgatctgtagctggtct

SEQ ID NO: 45501 - RNA, 16 nt, Synthetic Construct
  source 1..16: mol_type = other RNA
gcgtagatatgcggag

SEQ ID NO: 45502 - RNA, 16 nt, Synthetic Construct
  source 1..16: mol_type = other RNA
gcgtagatatgcggag

SEQ ID NO: 45503 - RNA, 15 nt, Synthetic Construct
  source 1..15: mol_type = other RNA
gggtgaaagcggggg

SEQ ID NO: 45504 - RNA, 23 nt, Synthetic Construct
  source 1..23: mol_type = other RNA
tgaggtagtaggttgcgtggttt

SEQ ID NO: 45505 - RNA, 23 nt, Synthetic Construct
  source 1..23: mol_type = other RNA
tgaggtagtaggttgtgtggttc

SEQ ID NO: 45506 - RNA, 19 nt, Synthetic Construct
  source 1..19: mol_type = other RNA
tcctgtaccgatcaatagt

SEQ ID NO: 45507 - RNA, 21 nt, Synthetic Construct
  source 1..21: mol_type = other RNA
acagcaggacggtggccatgg

SEQ ID NO: 45508 - RNA, 21 nt, Synthetic Construct
  source 1..21: mol_type = other RNA
acagcaggacggtggccatgg

SEQ ID NO: 45509 - RNA, 31 nt, Synthetic Construct; identical to SEQ ID NO: 2423
  source 1..31: mol_type = other RNA

SEQ ID NO: 45510 - RNA, 31 nt, Synthetic Construct; identical to SEQ ID NO: 2423
  source 1..31: mol_type = other RNA

SEQ ID NO: 45511 - RNA, 16 nt, Synthetic Construct
  source 1..16: mol_type = other RNA
cagtcaggatgttggc

SEQ ID NO: 45512 - RNA, 16 nt, Synthetic Construct
  source 1..16: mol_type = other RNA
cagtcaggatgttggc

SEQ ID NO: 45513 - RNA, 17 nt, Synthetic Construct
  source 1..17: mol_type = other RNA
ccgtgtgaaagtaggtc

SEQ ID NO: 45514 - RNA, 19 nt, Synthetic Construct
  source 1..19: mol_type = other RNA
tgtcaactggttgttggga

SEQ ID NO: 45515 - RNA, 19 nt, Synthetic Construct
  source 1..19: mol_type = other RNA
tgtcaactggttgttggga

SEQ ID NO: 45516 - RNA, 23 nt, Synthetic Construct
  source 1..23: mol_type = other RNA
tcctgtactgagctgccctgagt

SEQ ID NO: 45517 - RNA, 23 nt, Synthetic Construct
  source 1..23: mol_type = other RNA
tcctgtactgagctgccctgagt

SEQ ID NO: 45518 - RNA, 22 nt, Synthetic Construct
  source 1..22: mol_type = other RNA
aggagtgtgacaatggtgtttg

SEQ ID NO: 45519 - RNA, 22 nt, Synthetic Construct
  source 1..22: mol_type = other RNA
ccccttggggttgtaggaccac

SEQ ID NO: 45520 - RNA, 22 nt, Synthetic Construct
  source 1..22: mol_type = other RNA
ccccttggggttgtaggaccac

SEQ ID NO: 45521 - RNA, 19 nt, Synthetic Construct
  source 1..19: mol_type = other RNA
gctattgacgaccgtaccg

SEQ ID NO: 45522 - RNA, 19 nt, Synthetic Construct
  source 1..19: mol_type = other RNA
gctattgacgaccgtaccg

SEQ ID NO: 45523 - RNA, 23 nt, Synthetic Construct
  source 1..23: mol_type = other RNA
tcctgtaccgagctgccccgagt

SEQ ID NO: 45524 - RNA, 21 nt, Synthetic Construct
  source 1..21: mol_type = other RNA
tgaggtagtaggttgagtggt

SEQ ID NO: 45525 - RNA, 21 nt, Synthetic Construct
  source 1..21: mol_type = other RNA
tgaggtagtaggttgagtggt

SEQ ID NO: 45526 - RNA, 18 nt, Synthetic Construct
  source 1..18: mol_type = other RNA
accaaggggtcgtgggtt

SEQ ID NO: 45527 - RNA, 22 nt, Synthetic Construct
  source 1..22: mol_type = other RNA
tgaggtggtaggttgtatagtt

SEQ ID NO: 45528 - RNA, 22 nt, Synthetic Construct
  source 1..22: mol_type = other RNA
tgaggtggtaggttgtatagtt

SEQ ID NO: 45529 - RNA, 22 nt, Synthetic Construct
  source 1..22: mol_type = other RNA
taaggtagtaggttgtgtggtt

SEQ ID NO: 45530 - RNA, 22 nt, Synthetic Construct
  source 1..22: mol_type = other RNA
taaggtagtaggttgtgtggtt

SEQ ID NO: 45531 - RNA, 16 nt, Synthetic Construct
  source 1..16: mol_type = other RNA
ggccgttcttagttgg

SEQ ID NO: 45532 - RNA, 20 nt, Synthetic Construct
  source 1..20: mol_type = other RNA
tgaggaagtaggttgtgtgg

SEQ ID NO: 45533 - RNA, 20 nt, Synthetic Construct
  source 1..20: mol_type = other RNA
tgaggaagtaggttgtgtgg

SEQ ID NO: 45534 - RNA, 22 nt, Synthetic Construct
  source 1..22: mol_type = other RNA
taaggtagtagtttgtgctgtt

SEQ ID NO: 45535 - RNA, 22 nt, Synthetic Construct
  source 1..22: mol_type = other RNA
taaggtagtagtttgtgctgtt

SEQ ID NO: 45536 - RNA, 15 nt, Synthetic Construct
  source 1..15: mol_type = other RNA
gagctgtggataggg

SEQ ID NO: 45537 - RNA, 15 nt, Synthetic Construct
  source 1..15: mol_type = other RNA
gagctgtggataggg

SEQ ID NO: 45538 - RNA, 24 nt, Synthetic Construct
  source 1..24: mol_type = other RNA
tatatcggaacgtgcccagtcgtg

SEQ ID NO: 45539 - RNA, 25 nt, Synthetic Construct
  source 1..25: mol_type = other RNA
ttgaggatatgggatcgagacgaca

SEQ ID NO: 45540 - RNA, 25 nt, Synthetic Construct
  source 1..25: mol_type = other RNA
ttgaggatatgggatcgagacgaca

SEQ ID NO: 45541 - RNA, 23 nt, Synthetic Construct
  source 1..23: mol_type = other RNA
tccctggtggtctagtggttagg

SEQ ID NO: 45542 - RNA, 16 nt, Synthetic Construct
  source 1..16: mol_type = other RNA
atctacggccatacca

SEQ ID NO: 45543 - RNA, 18 nt, Synthetic Construct
  source 1..18: mol_type = other RNA
atcgctagtaatcgcgga

SEQ ID NO: 45544 - RNA, 32 nt, Synthetic Construct; identical to SEQ ID NO: 753
  source 1..32: mol_type = other RNA

SEQ ID NO: 45545 - RNA, 32 nt, Synthetic Construct; identical to SEQ ID NO: 753
  source 1..32: mol_type = other RNA

SEQ ID NO: 45546 - RNA, 32 nt, Synthetic Construct; identical to SEQ ID NO: 2582
  source 1..32: mol_type = other RNA

SEQ ID NO: 45547 - RNA, 32 nt, Synthetic Construct; identical to SEQ ID NO: 2582
  source 1..32: mol_type = other RNA

SEQ ID NO: 45548 - RNA, 27 nt, Synthetic Construct
  source 1..27: mol_type = other RNA
ccgtgtgaaagtaggtcatcgtcaggc

SEQ ID NO: 45549 - RNA, 27 nt, Synthetic Construct
  source 1..27: mol_type = other RNA
ccgtgtgaaagtaggtcatcgtcaggc

SEQ ID NO: 45550 - RNA, 21 nt, Synthetic Construct
  source 1..21: mol_type = other RNA
tgaggtagtagattgtatggt

SEQ ID NO: 45551 - RNA, 21 nt, Synthetic Construct
  source 1..21: mol_type = other RNA
tgaggtagtagattgtatggt

SEQ ID NO: 45552 - RNA, 17 nt, Synthetic Construct
  source 1..17: mol_type = other RNA
tggccgtcgtcagctcg

SEQ ID NO: 45553 - RNA, 22 nt, Synthetic Construct
  source 1..22: mol_type = other RNA
tgaggtagaaggttgtgtggtt

SEQ ID NO: 45554 - RNA, 22 nt, Synthetic Construct
  source 1..22: mol_type = other RNA
tgaggtagaaggttgtgtggtt

SEQ ID NO: 45555 - RNA, 21 nt, Synthetic Construct
  source 1..21: mol_type = other RNA
ctttgttcgattccgttgagt

SEQ ID NO: 45556 - RNA, 21 nt, Synthetic Construct
  source 1..21: mol_type = other RNA
ctttgttcgattccgttgagt

SEQ ID NO: 45557 - RNA, 24 nt, Synthetic Construct
  source 1..24: mol_type = other RNA
tcactgatcgagtcgtcctgcgcg

SEQ ID NO: 45558 - RNA, 24 nt, Synthetic Construct
  source 1..24: mol_type = other RNA
tcactgatcgagtcgtcctgcgcg

SEQ ID NO: 45559 - RNA, 17 nt, Synthetic Construct
  source 1..17: mol_type = other RNA
gtccggatcgtagtctg

SEQ ID NO: 45560 - RNA, 21 nt, Synthetic Construct
  source 1..21: mol_type = other RNA
tactccttaagcgaatctcgc

SEQ ID NO: 45561 - RNA, 21 nt, Synthetic Construct
  source 1..21: mol_type = other RNA
tactccttaagcgaatctcgc

SEQ ID NO: 45562 - RNA, 21 nt, Synthetic Construct
  source 1..21: mol_type = other RNA
tgaggtagtaggttgcgtggt

SEQ ID NO: 45563 - RNA, 21 nt, Synthetic Construct
  source 1..21: mol_type = other RNA
tgaggtagtaggttgcgtggt

SEQ ID NO: 45564 - RNA, 21 nt, Synthetic Construct
  source 1..21: mol_type = other RNA
tcctgtactgagctgccccgg

SEQ ID NO: 45565 - RNA, 21 nt, Synthetic Construct
  source 1..21: mol_type = other RNA
tcctgtactgagctgccccgg

SEQ ID NO: 45566 - RNA, 22 nt, Synthetic Construct
  source 1..22: mol_type = other RNA
tggaatgtagagaagtatgtat

SEQ ID NO: 45567 - RNA, 22 nt, Synthetic Construct
  source 1..22: mol_type = other RNA
tggaatgtagagaagtatgtat

SEQ ID NO: 45568 - RNA, 37 nt, Synthetic Construct; identical to SEQ ID NO: 5125
  source 1..37: mol_type = other RNA

SEQ ID NO: 45569 - RNA, 20 nt, Synthetic Construct
  source 1..20: mol_type = other RNA
tcgcgccgtcgggcccgggg

SEQ ID NO: 45570 - RNA, 20 nt, Synthetic Construct
  source 1..20: mol_type = other RNA
tcgcgccgtcgggcccgggg

SEQ ID NO: 45571 - RNA, 23 nt, Synthetic Construct
  source 1..23: mol_type = other RNA
tctctcggctcctcgcggctcgt

SEQ ID NO: 45572 - RNA, 23 nt, Synthetic Construct
  source 1..23: mol_type = other RNA
tctctcggctcctcgcggctcgt

SEQ ID NO: 45573 - RNA, 36 nt, Synthetic Construct; identical to SEQ ID NO: 2506
  source 1..36: mol_type = other RNA

SEQ ID NO: 45574 - RNA, 36 nt, Synthetic Construct; identical to SEQ ID NO: 2506
  source 1..36: mol_type = other RNA

SEQ ID NO: 45575 - RNA, 20 nt, Synthetic Construct
  source 1..20: mol_type = other RNA
tgaggtagtaggttgtgtag

SEQ ID NO: 45576 - RNA, 33 nt, Synthetic Construct; identical to SEQ ID NO: 2479
  source 1..33: mol_type = other RNA

SEQ ID NO: 45577 - RNA, 16 nt, Synthetic Construct
  source 1..16: mol_type = other RNA
gcggctgtagctcagt

SEQ ID NO: 45578 - RNA, 16 nt, Synthetic Construct
  source 1..16: mol_type = other RNA
gcggctgtagctcagt

SEQ ID NO: 45579 - RNA, 19 nt, Synthetic Construct
  source 1..19: mol_type = other RNA
cagcactctgcaaagacga

SEQ ID NO: 45580 - RNA, 19 nt, Synthetic Construct
  source 1..19: mol_type = other RNA
cagcactctgcaaagacga

SEQ ID NO: 45581 - RNA, 16 nt, Synthetic Construct
  source 1..16: mol_type = other RNA
gccagcagccgcggta

SEQ ID NO: 45582 - RNA, 22 nt, Synthetic Construct
  source 1..22: mol_type = other RNA
nattgcacttgtcccggcctgt

SEQ ID NO: 45583 - RNA, 22 nt, Synthetic Construct
  source 1..22: mol_type = other RNA
tcctgtacagagctgccccgag

SEQ ID NO: 45584 - RNA, 22 nt, Synthetic Construct
  source 1..22: mol_type = other RNA
tcctgtacagagctgccccgag

SEQ ID NO: 45585 - RNA, 17 nt, Synthetic Construct
  source 1..17: mol_type = other RNA
gcggctgtagctcagtt

SEQ ID NO: 45586 - RNA, 17 nt, Synthetic Construct
  source 1..17: mol_type = other RNA
gcggctgtagctcagtt

SEQ ID NO: 45587 - RNA, 23 nt, Synthetic Construct
  source 1..23: mol_type = other RNA
cggtaatacgacgtacttagtgt

SEQ ID NO: 45588 - RNA, 20 nt, Synthetic Construct
  source 1..20: mol_type = other RNA
cgaggtagtaggttgtgtgg

SEQ ID NO: 45589 - RNA, 20 nt, Synthetic Construct
  source 1..20: mol_type = other RNA
cgaggtagtaggttgtgtgg

SEQ ID NO: 45590 - RNA, 22 nt, Synthetic Construct
  source 1..22: mol_type = other RNA
cgactcttagcggtggatcact

SEQ ID NO: 45591 - RNA, 22 nt, Synthetic Construct
  source 1..22: mol_type = other RNA
cgactcttagcggtggatcact

SEQ ID NO: 45592 - RNA, 18 nt, Synthetic Construct
  source 1..18: mol_type = other RNA
gctattgacgaccgtacc

SEQ ID NO: 45593 - RNA, 18 nt, Synthetic Construct
  source 1..18: mol_type = other RNA
gctattgacgaccgtacc

SEQ ID NO: 45594 - RNA, 34 nt, Synthetic Construct; identical to SEQ ID NO: 6594
  source 1..34: mol_type = other RNA

SEQ ID NO: 45595 - RNA, 34 nt, Synthetic Construct; identical to SEQ ID NO: 6594
  source 1..34: mol_type = other RNA

SEQ ID NO: 45596 - RNA, 23 nt, Synthetic Construct
  source 1..23: mol_type = other RNA
tggtaatacgtcgtacttagtgt

SEQ ID NO: 45597 - RNA, 22 nt, Synthetic Construct
  source 1..22: mol_type = other RNA
tgaggtagtagattgcatagtt

SEQ ID NO: 45598 - RNA, 22 nt, Synthetic Construct
  source 1..22: mol_type = other RNA
tgaggtagtagattgcatagtt

SEQ ID NO: 45599 - RNA, 16 nt, Synthetic Construct
  source 1..16: mol_type = other RNA
gtccacggccatacca

SEQ ID NO: 45600 - RNA, 16 nt, Synthetic Construct
  source 1..16: mol_type = other RNA
gtccacggccatacca

SEQ ID NO: 45601 - RNA, 34 nt, Synthetic Construct; identical to SEQ ID NO: 6757
  source 1..34: mol_type = other RNA

SEQ ID NO: 45602 - RNA, 34 nt, Synthetic Construct; identical to SEQ ID NO: 6757
  source 1..34: mol_type = other RNA

SEQ ID NO: 45603 - RNA, 15 nt, Synthetic Construct
  source 1..15: mol_type = other RNA
accggaggaaggtgg

SEQ ID NO: 45604 - RNA, 15 nt, Synthetic Construct
  source 1..15: mol_type = other RNA
accggaggaaggtgg

SEQ ID NO: 45605 - RNA, 17 nt, Synthetic Construct
  source 1..17: mol_type = other RNA
tgccagcagccgcggta

SEQ ID NO: 45606 - RNA, 17 nt, Synthetic Construct
  source 1..17: mol_type = other RNA
tgccagcagccgcggta

SEQ ID NO: 45607 - RNA, 17 nt, Synthetic Construct
  source 1..17: mol_type = other RNA
cacggcccagactccta

SEQ ID NO: 45608 - RNA, 17 nt, Synthetic Construct
  source 1..17: mol_type = other RNA
cacggcccagactccta

SEQ ID NO: 45609 - RNA, 27 nt, Synthetic Construct
  source 1..27: mol_type = other RNA
gttggttcaagcgtgtagtcgtgctct

SEQ ID NO: 45610 - RNA, 21 nt, Synthetic Construct
  source 1..21: mol_type = other RNA
tcccagtaaacggcggccgta

SEQ ID NO: 45611 - RNA, 21 nt, Synthetic Construct
  source 1..21: mol_type = other RNA
tcccagtaaacggcggccgta

SEQ ID NO: 45612 - RNA, 30 nt, Synthetic Construct; identical to SEQ ID NO: 2840
  source 1..30: mol_type = other RNA

SEQ ID NO: 45613 - RNA, 30 nt, Synthetic Construct; identical to SEQ ID NO: 2840
  source 1..30: mol_type = other RNA

SEQ ID NO: 45614 - RNA, 21 nt, Synthetic Construct
  source 1..21: mol_type = other RNA
tcctgaactgagctgccccga

SEQ ID NO: 45615 - RNA, 21 nt, Synthetic Construct
  source 1..21: mol_type = other RNA
tcctgaactgagctgccccga

SEQ ID NO: 45616 - RNA, 16 nt, Synthetic Construct
  source 1..16: mol_type = other RNA
gtctacggccatacta

SEQ ID NO: 45617 - RNA, 24 nt, Synthetic Construct
  source 1..24: mol_type = other RNA
tgtaagcatccccgactggaagct

SEQ ID NO: 45618 - RNA, 23 nt, Synthetic Construct
  source 1..23: mol_type = other RNA
tgaggggcagagagcaagacttt

SEQ ID NO: 45619 - RNA, 16 nt, Synthetic Construct
  source 1..16: mol_type = other RNA
gtcgacgtatagggtg

SEQ ID NO: 45620 - RNA, 32 nt, Synthetic Construct; identical to SEQ ID NO: 2052
  source 1..32: mol_type = other RNA

SEQ ID NO: 45621 - RNA, 32 nt, Synthetic Construct; identical to SEQ ID NO: 2052
  source 1..32: mol_type = other RNA

SEQ ID NO: 45622 - RNA, 24 nt, Synthetic Construct
  source 1..24: mol_type = other RNA
gctcactgatcgagtcgtcctgcg

SEQ ID NO: 45623 - RNA, 24 nt, Synthetic Construct
  source 1..24: mol_type = other RNA
gctcactgatcgagtcgtcctgcg

SEQ ID NO: 45624 - RNA, 36 nt, Synthetic Construct; identical to SEQ ID NO: 2546
  source 1..36: mol_type = other RNA

SEQ ID NO: 45625 - RNA, 16 nt, Synthetic Construct
  source 1..16: mol_type = other RNA
gtctacggctatacca

SEQ ID NO: 45626 - RNA, 16 nt, Synthetic Construct
  source 1..16: mol_type = other RNA
gtctacggctatacca

SEQ ID NO: 45627 - RNA, 22 nt, Synthetic Construct
  source 1..22: mol_type = other RNA
tggaatgtaaagaagtacgtat

SEQ ID NO: 45628 - RNA, 22 nt, Synthetic Construct
  source 1..22: mol_type = other RNA
tggaatgtaaagaagtacgtat

SEQ ID NO: 45629 - RNA, 21 nt, Synthetic Construct
  source 1..21: mol_type = other RNA
tgaggtagtaggttgtgaggt

SEQ ID NO: 45630 - RNA, 21 nt, Synthetic Construct
  source 1..21: mol_type = other RNA
tgaggtagtaggttgtgaggt

SEQ ID NO: 45631 - RNA, 28 nt, Synthetic Construct
  source 1..28: mol_type = other RNA
ccccccactgctaaatttgactggcctt

SEQ ID NO: 45632 - RNA, 25 nt, Synthetic Construct
  source 1..25: mol_type = other RNA
ttgaggatatgagatcgagacgaca

SEQ ID NO: 45633 - RNA, 25 nt, Synthetic Construct
  source 1..25: mol_type = other RNA
ttgaggatatgagatcgagacgaca

SEQ ID NO: 45634 - RNA, 20 nt, Synthetic Construct
  source 1..20: mol_type = other RNA
tcctgtctgaatatgggggg

SEQ ID NO: 45635 - RNA, 16 nt, Synthetic Construct
  source 1..16: mol_type = other RNA
gaaattccttgtcggg

SEQ ID NO: 45636 - RNA, 23 nt, Synthetic Construct
  source 1..23: mol_type = other RNA
tggtaatacgacgtacttagtat

SEQ ID NO: 45637 - RNA, 23 nt, Synthetic Construct
  source 1..23: mol_type = other RNA
tggtaatacgacgtacttagtat

SEQ ID NO: 45638 - RNA, 34 nt, Synthetic Construct; identical to SEQ ID NO: 2317
  source 1..34: mol_type = other RNA

SEQ ID NO: 45639 - RNA, 34 nt, Synthetic Construct; identical to SEQ ID NO: 2317
  source 1..34: mol_type = other RNA

SEQ ID NO: 45640 - RNA, 33 nt, Synthetic Construct; identical to SEQ ID NO: 2386
  source 1..33: mol_type = other RNA

SEQ ID NO: 45641 - RNA, 33 nt, Synthetic Construct; identical to SEQ ID NO: 2386
  source 1..33: mol_type = other RNA

SEQ ID NO: 45642 - RNA, 30 nt, Synthetic Construct; identical to SEQ ID NO: 1771
  source 1..30: mol_type = other RNA

SEQ ID NO: 45643 - RNA, 22 nt, Synthetic Construct
  source 1..22: mol_type = other RNA
ncgtaccgtgagtaataatgcg

SEQ ID NO: 45644 - RNA, 22 nt, Synthetic Construct
  source 1..22: mol_type = other RNA
tgaggtagtgggttgtgtggtt

SEQ ID NO: 45645 - RNA, 22 nt, Synthetic Construct
  source 1..22: mol_type = other RNA
tgaggtagtagtttgtgctgtc

SEQ ID NO: 45646 - RNA, 19 nt, Synthetic Construct
  source 1..19: mol_type = other RNA
cagcactctgcaaagacga

SEQ ID NO: 45647 - RNA, 19 nt, Synthetic Construct
  source 1..19: mol_type = other RNA
cagcactctgcaaagacga

SEQ ID NO: 45648 - RNA, 20 nt, Synthetic Construct
  source 1..20: mol_type = other RNA
tagcgaaattccttgtcggg

SEQ ID NO: 45649 - RNA, 16 nt, Synthetic Construct
  source 1..16: mol_type = other RNA
gtccggatcgtagtct

SEQ ID NO: 45650 - RNA, 16 nt, Synthetic Construct
  source 1..16: mol_type = other RNA
gtccggatcgtagtct

SEQ ID NO: 45651 - RNA, 25 nt, Synthetic Construct
  source 1..25: mol_type = other RNA
ttgaggatatgagatcgagacaaca

SEQ ID NO: 45652 - RNA, 25 nt, Synthetic Construct
  source 1..25: mol_type = other RNA
ttgaggatatgagatcgagacaaca

SEQ ID NO: 45653 - RNA, 27 nt, Synthetic Construct
  source 1..27: mol_type = other RNA
ccccccactgttaaatttgactggctt

SEQ ID NO: 45654 - RNA, 23 nt, Synthetic Construct
  source 1..23: mol_type = other RNA
tggtaatacgacgtgcttagtgt

SEQ ID NO: 45655 - RNA, 17 nt, Synthetic Construct
  source 1..17: mol_type = other RNA
aagttgaccgcctgggg

SEQ ID NO: 45656 - RNA, 17 nt, Synthetic Construct
  source 1..17: mol_type = other RNA
aagttgaccgcctgggg

SEQ ID NO: 45657 - RNA, 16 nt, Synthetic Construct
  source 1..16: mol_type = other RNA
ctcagtagctcgagga

SEQ ID NO: 45658 - RNA, 16 nt, Synthetic Construct
  source 1..16: mol_type = other RNA
atctacggccatacca

SEQ ID NO: 45659 - RNA, 16 nt, Synthetic Construct
  source 1..16: mol_type = other RNA
atctacggccatacca

SEQ ID NO: 45660 - RNA, 21 nt, Synthetic Construct
  source 1..21: mol_type = other RNA
cataaagtagaaagcactact

SEQ ID NO: 45661 - RNA, 21 nt, Synthetic Construct
  source 1..21: mol_type = other RNA
cataaagtagaaagcactact

SEQ ID NO: 45662 - RNA, 23 nt, Synthetic Construct
  source 1..23: mol_type = other RNA
caaagtgctgttcgtgcaggtgg

SEQ ID NO: 45663 - RNA, 23 nt, Synthetic Construct
  source 1..23: mol_type = other RNA
caaagtgctgttcgtgcaggtgg

SEQ ID NO: 45664 - RNA, 19 nt, Synthetic Construct
  source 1..19: mol_type = other RNA
agcgaaattccttgtcggg

SEQ ID NO: 45665 - RNA, 19 nt, Synthetic Construct
  source 1..19: mol_type = other RNA
agcgaaattccttgtcggg

SEQ ID NO: 45666 - RNA, 30 nt, Synthetic Construct; identical to SEQ ID NO: 2308
  source 1..30: mol_type = other RNA

SEQ ID NO: 45667 - RNA, 33 nt, Synthetic Construct; identical to SEQ ID NO: 2386
  source 1..33: mol_type = other RNA

SEQ ID NO: 45668 - RNA, 23 nt, Synthetic Construct
  source 1..23: mol_type = other RNA
taacactgtctggtaacgatgtt

SEQ ID NO: 45669 - RNA, 23 nt, Synthetic Construct
  source 1..23: mol_type = other RNA
taacactgtctggtaacgatgtt

SEQ ID NO: 45670 - RNA, 25 nt, Synthetic Construct
  source 1..25: mol_type = other RNA
gtcaggatggccgagcggtctaagg

SEQ ID NO: 45671 - RNA, 25 nt, Synthetic Construct
  source 1..25: mol_type = other RNA
gtcaggatggccgagcggtctaagg

SEQ ID NO: 45672 - RNA, 16 nt, Synthetic Construct
  source 1..16: mol_type = other RNA
cagtcaggatgttggc

SEQ ID NO: 45673 - RNA, 16 nt, Synthetic Construct
  source 1..16: mol_type = other RNA
cagtcaggatgttggc

SEQ ID NO: 45674 - RNA, 19 nt, Synthetic Construct
  source 1..19: mol_type = other RNA
gggtgcaagcgttaatcgg

SEQ ID NO: 45675 - RNA, 23 nt, Synthetic Construct
  source 1..23: mol_type = other RNA
tgaggtagcaggttgtgtggttt

SEQ ID NO: 45676 - RNA, 23 nt, Synthetic Construct
  source 1..23: mol_type = other RNA
tacagtagtctgcacattggttt

SEQ ID NO: 45677 - RNA, 27 nt, Synthetic Construct
  source 1..27: mol_type = other RNA
ccccccactgctaaacttgactggctt

SEQ ID NO: 45678 - RNA, 24 nt, Synthetic Construct
  source 1..24: mol_type = other RNA
tgtaaacatccccgactgggagct

SEQ ID NO: 45679 - RNA, 30 nt, Synthetic Construct; identical to SEQ ID NO: 3933
  source 1..30: mol_type = other RNA

SEQ ID NO: 45680 - RNA, 22 nt, Synthetic Construct
  source 1..22: mol_type = other RNA
ngaggtagtaggttgtgtggtt

SEQ ID NO: 45681 - RNA, 22 nt, Synthetic Construct
  source 1..22: mol_type = other RNA
ngaggtagtaggttgtgtggtt

SEQ ID NO: 45682 - RNA, 21 nt, Synthetic Construct
  source 1..21: mol_type = other RNA
gtgggcgtttgaagtgaagtg

SEQ ID NO: 45683 - RNA, 23 nt, Synthetic Construct
  source 1..23: mol_type = other RNA
ttccccttggggttgtaggacca

SEQ ID NO: 45684 - RNA, 23 nt, Synthetic Construct
  source 1..23: mol_type = other RNA
ttccccttggggttgtaggacca

SEQ ID NO: 45685 - RNA, 20 nt, Synthetic Construct
  source 1..20: mol_type = other RNA
taaggtagtaggttgtatag

SEQ ID NO: 45686 - RNA, 20 nt, Synthetic Construct
  source 1..20: mol_type = other RNA
taaggtagtaggttgtatag

SEQ ID NO: 45687 - RNA, 22 nt, Synthetic Construct
  source 1..22: mol_type = other RNA
tggaatgtaaaggagtatgtat

SEQ ID NO: 45688 - RNA, 22 nt, Synthetic Construct
  source 1..22: mol_type = other RNA
tggaatgtaaaggagtatgtat

SEQ ID NO: 45689 - RNA, 16 nt, Synthetic Construct
  source 1..16: mol_type = other RNA
gtccccttcgtctaga

SEQ ID NO: 45690 - RNA, 22 nt, Synthetic Construct
  source 1..22: mol_type = other RNA
ctccctcgggagggcgcgcggg

SEQ ID NO: 45691 - RNA, 22 nt, Synthetic Construct
  source 1..22: mol_type = other RNA
ctccctcgggagggcgcgcggg

SEQ ID NO: 45692 - RNA, 22 nt, Synthetic Construct
  source 1..22: mol_type = other RNA
ggtagcgaaattccttgtcggg

SEQ ID NO: 45693 - RNA, 23 nt, Synthetic Construct
  source 1..23: mol_type = other RNA
cgactcttagcggtggatcactc

SEQ ID NO: 45694 - RNA, 23 nt, Synthetic Construct
  source 1..23: mol_type = other RNA
cgactcttagcggtggatcactc

SEQ ID NO: 45695 - RNA, 17 nt, Synthetic Construct
  source 1..17: mol_type = other RNA
cagagacgagtcgacca

SEQ ID NO: 45696 - RNA, 17 nt, Synthetic Construct
  source 1..17: mol_type = other RNA
cagagacgagtcgacca

SEQ ID NO: 45697 - RNA, 21 nt, Synthetic Construct
  source 1..21: mol_type = other RNA
tggagtgtgacgatggtgttt

SEQ ID NO: 45698 - RNA, 21 nt, Synthetic Construct
  source 1..21: mol_type = other RNA
tggagtgtgacgatggtgttt

SEQ ID NO: 45699 - RNA, 22 nt, Synthetic Construct
  source 1..22: mol_type = other RNA
tgaggtagtagtttgtgctgtg

SEQ ID NO: 45700 - RNA, 22 nt, Synthetic Construct
  source 1..22: mol_type = other RNA
tgaggtagaagtttgtgctgtt

SEQ ID NO: 45701 - RNA, 22 nt, Synthetic Construct
  source 1..22: mol_type = other RNA
tgaggtagaagtttgtgctgtt

SEQ ID NO: 45702 - RNA, 27 nt, Synthetic Construct
  source 1..27: mol_type = other RNA
cggtataccgaagctctaggtgcggca

SEQ ID NO: 45703 - RNA, 27 nt, Synthetic Construct
  source 1..27: mol_type = other RNA
cggtataccgaagctctaggtgcggca

SEQ ID NO: 45704 - RNA, 19 nt, Synthetic Construct
  source 1..19: mol_type = other RNA
aaaccgttaccattactga

SEQ ID NO: 45705 - RNA, 19 nt, Synthetic Construct
  source 1..19: mol_type = other RNA
aaaccgttaccattactga

SEQ ID NO: 45706 - RNA, 22 nt, Synthetic Construct
  source 1..22: mol_type = other RNA
ngaggtagtaggttgtgtggtt

SEQ ID NO: 45707 - RNA, 16 nt, Synthetic Construct
  source 1..16: mol_type = other RNA
ggtagctcgttgggct

SEQ ID NO: 45708 - RNA, 16 nt, Synthetic Construct
  source 1..16: mol_type = other RNA
cccaaaggtcgtcggt

SEQ ID NO: 45709 - RNA, 16 nt, Synthetic Construct
  source 1..16: mol_type = other RNA
cccaaaggtcgtcggt

SEQ ID NO: 45710 - RNA, 16 nt, Synthetic Construct
  source 1..16: mol_type = other RNA
gtctatggccatacca

SEQ ID NO: 45711 - RNA, 16 nt, Synthetic Construct
  source 1..16: mol_type = other RNA
ctgacgctcatgcacg

SEQ ID NO: 45712 - RNA, 16 nt, Synthetic Construct
  source 1..16: mol_type = other RNA
ctgacgctcatgcacg

SEQ ID NO: 45713 - RNA, 16 nt, Synthetic Construct
  source 1..16: mol_type = other RNA
ttggcctcaagtcagg

SEQ ID NO: 45714 - RNA, 16 nt, Synthetic Construct
  source 1..16: mol_type = other RNA
ttggcctcaagtcagg

SEQ ID NO: 45715 - RNA, 17 nt, Synthetic Construct
  source 1..17: mol_type = other RNA
accaaggggtcgtgggt

SEQ ID NO: 45716 - RNA, 17 nt, Synthetic Construct
  source 1..17: mol_type = other RNA
accaaggggtcgtgggt

SEQ ID NO: 45717 - RNA, 34 nt, Synthetic Construct; identical to SEQ ID NO: 2186
  source 1..34: mol_type = other RNA

SEQ ID NO: 45718 - RNA, 34 nt, Synthetic Construct; identical to SEQ ID NO: 2186
  source 1..34: mol_type = other RNA

SEQ ID NO: 45719 - RNA, 20 nt, Synthetic Construct
  source 1..20: mol_type = other RNA
tgaggtaggaggttgtatag

SEQ ID NO: 45720 - RNA, 18 nt, Synthetic Construct
  source 1..18: mol_type = other RNA
tcccaagggtatggctgt

SEQ ID NO: 45721 - RNA, 18 nt, Synthetic Construct
  source 1..18: mol_type = other RNA
tcccaagggtatggctgt

SEQ ID NO: 45722 - RNA, 22 nt, Synthetic Construct
  source 1..22: mol_type = other RNA
tgaggtagtaggttgtgtggat

SEQ ID NO: 45723 - RNA, 17 nt, Synthetic Construct
  source 1..17: mol_type = other RNA
catgcaagtcgaacggt

SEQ ID NO: 45724 - RNA, 17 nt, Synthetic Construct
  source 1..17: mol_type = other RNA
catgcaagtcgaacggt

SEQ ID NO: 45725 - RNA, 32 nt, Synthetic Construct; identical to SEQ ID NO: 1238
  source 1..32: mol_type = other RNA

SEQ ID NO: 45726 - RNA, 32 nt, Synthetic Construct; identical to SEQ ID NO: 1238
  source 1..32: mol_type = other RNA

SEQ ID NO: 45727 - RNA, 23 nt, Synthetic Construct
  source 1..23: mol_type = other RNA
cgctcacggaaagagaatgaagc

SEQ ID NO: 45728 - RNA, 23 nt, Synthetic Construct
  source 1..23: mol_type = other RNA
cgctcacggaaagagaatgaagc

SEQ ID NO: 45729 - RNA, 21 nt, Synthetic Construct
  source 1..21: mol_type = other RNA
tggggtagtagattgtatagt

SEQ ID NO: 45730 - RNA, 21 nt, Synthetic Construct
  source 1..21: mol_type = other RNA
tggggtagtagattgtatagt

SEQ ID NO: 45731 - RNA, 35 nt, Synthetic Construct; identical to SEQ ID NO: 2397
  source 1..35: mol_type = other RNA

SEQ ID NO: 45732 - RNA, 37 nt, Synthetic Construct; identical to SEQ ID NO: 4277
  source 1..37: mol_type = other RNA

SEQ ID NO: 45733 - RNA, 31 nt, Synthetic Construct; identical to SEQ ID NO: 1881
  source 1..31: mol_type = other RNA

SEQ ID NO: 45734 - RNA, 31 nt, Synthetic Construct; identical to SEQ ID NO: 1881
  source 1..31: mol_type = other RNA

SEQ ID NO: 45735 - RNA, 17 nt, Synthetic Construct
  source 1..17: mol_type = other RNA
catgcaagtcgaacggt

SEQ ID NO: 45736 - RNA, 15 nt, Synthetic Construct
  source 1..15: mol_type = other RNA
cgactcttagcggtg

SEQ ID NO: 45737 - RNA, 15 nt, Synthetic Construct
  source 1..15: mol_type = other RNA
cgactcttagcggtg

SEQ ID NO: 45738 - RNA, 28 nt, Synthetic Construct
  source 1..28: mol_type = other RNA
ggatttccccttggggttgtaggaccac

SEQ ID NO: 45739 - RNA, 28 nt, Synthetic Construct
  source 1..28: mol_type = other RNA
ggatttccccttggggttgtaggaccac

SEQ ID NO: 45740 - RNA, 21 nt, Synthetic Construct
  source 1..21: mol_type = other RNA
tctttggttatctagctgtat

SEQ ID NO: 45741 - RNA, 21 nt, Synthetic Construct
  source 1..21: mol_type = other RNA
tctttggttatctagctgtat

SEQ ID NO: 45742 - RNA, 23 nt, Synthetic Construct
  source 1..23: mol_type = other RNA
tctttggttatctagctgtatgt

SEQ ID NO: 45743 - RNA, 23 nt, Synthetic Construct
  source 1..23: mol_type = other RNA
tctttggttatctagctgtatgt

SEQ ID NO: 45744 - RNA, 23 nt, Synthetic Construct
  source 1..23: mol_type = other RNA
tccctggtggtctagtggttagg

SEQ ID NO: 45745 - RNA, 22 nt, Synthetic Construct
  source 1..22: mol_type = other RNA
tcctgtaccgagctgccccgag

SEQ ID NO: 45746 - RNA, 22 nt, Synthetic Construct
  source 1..22: mol_type = other RNA
tcctgtaccgagctgccccgag

SEQ ID NO: 45747 - RNA, 17 nt, Synthetic Construct
  source 1..17: mol_type = other RNA
catgcaagtcgaacggt

SEQ ID NO: 45748 - RNA, 21 nt, Synthetic Construct
  source 1..21: mol_type = other RNA
gctattgacgaccgtaccgca

SEQ ID NO: 45749 - RNA, 18 nt, Synthetic Construct
  source 1..18: mol_type = other RNA
acagtcaggatgttggct

SEQ ID NO: 45750 - RNA, 35 nt, Synthetic Construct; identical to SEQ ID NO: 2399
  source 1..35: mol_type = other RNA

SEQ ID NO: 45751 - RNA, 35 nt, Synthetic Construct; identical to SEQ ID NO: 2399
  source 1..35: mol_type = other RNA

SEQ ID NO: 45752 - RNA, 32 nt, Synthetic Construct; identical to SEQ ID NO: 4279
  source 1..32: mol_type = other RNA

SEQ ID NO: 45753 - RNA, 31 nt, Synthetic Construct; identical to SEQ ID NO: 2412
  source 1..31: mol_type = other RNA

SEQ ID NO: 45754 - RNA, 21 nt, Synthetic Construct
  source 1..21: mol_type = other RNA
tgaggggcggagagcgagact

SEQ ID NO: 45755 - RNA, 21 nt, Synthetic Construct
  source 1..21: mol_type = other RNA
tgaggggcggagagcgagact

SEQ ID NO: 45756 - RNA, 22 nt, Synthetic Construct
  source 1..22: mol_type = other RNA
taccctgtagaaccgaatttgt

SEQ ID NO: 45757 - RNA, 20 nt, Synthetic Construct
  source 1..20: mol_type = other RNA
ctgacctatgaattgacagc

SEQ ID NO: 45758 - RNA, 20 nt, Synthetic Construct
  source 1..20: mol_type = other RNA
ctgacctatgaattgacagc

SEQ ID NO: 45759 - RNA, 22 nt, Synthetic Construct
  source 1..22: mol_type = other RNA
tgggatgtaaagaagtatgtat

SEQ ID NO: 45760 - RNA, 22 nt, Synthetic Construct
  source 1..22: mol_type = other RNA
tgggatgtaaagaagtatgtat

SEQ ID NO: 45761 - RNA, 35 nt, Synthetic Construct; identical to SEQ ID NO: 2615
  source 1..35: mol_type = other RNA

SEQ ID NO: 45762 - RNA, 15 nt, Synthetic Construct
  source 1..15: mol_type = other RNA
cgatatggcatgaga

SEQ ID NO: 45763 - RNA, 15 nt, Synthetic Construct
  source 1..15: mol_type = other RNA
cgatatggcatgaga

SEQ ID NO: 45764 - RNA, 21 nt, Synthetic Construct
  source 1..21: mol_type = other RNA
tcctgaactgagctgccccga

SEQ ID NO: 45765 - RNA, 21 nt, Synthetic Construct
  source 1..21: mol_type = other RNA
tcctgaactgagctgccccga

SEQ ID NO: 45766 - RNA, 21 nt, Synthetic Construct
  source 1..21: mol_type = other RNA
acacatgcaagtcgaacggta

SEQ ID NO: 45767 - RNA, 21 nt, Synthetic Construct
  source 1..21: mol_type = other RNA
acacatgcaagtcgaacggta

SEQ ID NO: 45768 - RNA, 22 nt, Synthetic Construct
  source 1..22: mol_type = other RNA
tgaggtagtagattatatagtt

SEQ ID NO: 45769 - RNA, 22 nt, Synthetic Construct
  source 1..22: mol_type = other RNA
tgaggtagtagattatatagtt

SEQ ID NO: 45770 - RNA, 16 nt, Synthetic Construct
  source 1..16: mol_type = other RNA
gtctacggccataccg

SEQ ID NO: 45771 - RNA, 16 nt, Synthetic Construct
  source 1..16: mol_type = other RNA
gtctacggccataccg

SEQ ID NO: 45772 - RNA, 22 nt, Synthetic Construct
  source 1..22: mol_type = other RNA
tgaggtagtagatcgtatagtt

SEQ ID NO: 45773 - RNA, 22 nt, Synthetic Construct
  source 1..22: mol_type = other RNA
tgaggtagtagatcgtatagtt

SEQ ID NO: 45774 - RNA, 24 nt, Synthetic Construct
  source 1..24: mol_type = other RNA
gctcactgatcgagtcgtcctgcg

SEQ ID NO: 45775 - RNA, 20 nt, Synthetic Construct
  source 1..20: mol_type = other RNA
gcgtgcttgactgcgagact

SEQ ID NO: 45776 - RNA, 21 nt, Synthetic Construct
  source 1..21: mol_type = other RNA
tccagtactgagctgccccga

SEQ ID NO: 45777 - RNA, 21 nt, Synthetic Construct
  source 1..21: mol_type = other RNA
tccagtactgagctgccccga

SEQ ID NO: 45778 - RNA, 19 nt, Synthetic Construct
  source 1..19: mol_type = other RNA
aaaccgttaccattactga

SEQ ID NO: 45779 - RNA, 19 nt, Synthetic Construct
  source 1..19: mol_type = other RNA
aaaccgttaccattactga

SEQ ID NO: 45780 - RNA, 35 nt, Synthetic Construct; identical to SEQ ID NO: 2402
  source 1..35: mol_type = other RNA

SEQ ID NO: 45781 - RNA, 35 nt, Synthetic Construct; identical to SEQ ID NO: 2402
  source 1..35: mol_type = other RNA

SEQ ID NO: 45782 - RNA, 22 nt, Synthetic Construct
  source 1..22: mol_type = other RNA
ngaggtagtaggttgtatagtt

SEQ ID NO: 45783 - RNA, 22 nt, Synthetic Construct
  source 1..22: mol_type = other RNA
ngaggtagtaggttgtatagtt

SEQ ID NO: 45784 - RNA, 23 nt, Synthetic Construct
  source 1..23: mol_type = other RNA
tgaggtagtaggttgtgcggttt

SEQ ID NO: 45785 - RNA, 19 nt, Synthetic Construct
  source 1..19: mol_type = other RNA
agcgaaattccttgtcggg

SEQ ID NO: 45786 - RNA, 31 nt, Synthetic Construct; identical to SEQ ID NO: 2278
  source 1..31: mol_type = other RNA

SEQ ID NO: 45787 - RNA, 31 nt, Synthetic Construct; identical to SEQ ID NO: 2278
  source 1..31: mol_type = other RNA

SEQ ID NO: 45788 - RNA, 32 nt, Synthetic Construct; identical to SEQ ID NO: 4710
  source 1..32: mol_type = other RNA

SEQ ID NO: 45789 - RNA, 32 nt, Synthetic Construct; identical to SEQ ID NO: 4710
  source 1..32: mol_type = other RNA

SEQ ID NO: 45790 - RNA, 20 nt, Synthetic Construct
  source 1..20: mol_type = other RNA
tgaagtagtaggttgtgtgg

SEQ ID NO: 45791 - RNA, 17 nt, Synthetic Construct
  source 1..17: mol_type = other RNA
ctaatgagactgccggt

SEQ ID NO: 45792 - RNA, 17 nt, Synthetic Construct
  source 1..17: mol_type = other RNA
ctaatgagactgccggt

SEQ ID NO: 45793 - RNA, 22 nt, Synthetic Construct
  source 1..22: mol_type = other RNA
ggtagcgaaattccttgtcggg

SEQ ID NO: 45794 - RNA, 22 nt, Synthetic Construct
  source 1..22: mol_type = other RNA
ggtagcgaaattccttgtcggg

SEQ ID NO: 45795 - RNA, 39 nt, Synthetic Construct; identical to SEQ ID NO: 4400
  source 1..39: mol_type = other RNA

SEQ ID NO: 45796 - RNA, 16 nt, Synthetic Construct
  source 1..16: mol_type = other RNA
accgcttttgtcaggg

SEQ ID NO: 45797 - RNA, 16 nt, Synthetic Construct
  source 1..16: mol_type = other RNA
accgcttttgtcaggg

SEQ ID NO: 45798 - RNA, 21 nt, Synthetic Construct
  source 1..21: mol_type = other RNA
agcgtgcttgactgcgagact

SEQ ID NO: 45799 - RNA, 21 nt, Synthetic Construct
  source 1..21: mol_type = other RNA
agcgtgcttgactgcgagact

SEQ ID NO: 45800 - RNA, 30 nt, Synthetic Construct; identical to SEQ ID NO: 2308
  source 1..30: mol_type = other RNA

SEQ ID NO: 45801 - RNA, 30 nt, Synthetic Construct; identical to SEQ ID NO: 2308
  source 1..30: mol_type = other RNA

SEQ ID NO: 45802 - RNA, 22 nt, Synthetic Construct
  source 1..22: mol_type = other RNA
nattgcacttgtcccggcctgt

SEQ ID NO: 45803 - RNA, 22 nt, Synthetic Construct
  source 1..22: mol_type = other RNA
tgaggtagtaggatgtgtggtt

SEQ ID NO: 45804 - RNA, 22 nt, Synthetic Construct
  source 1..22: mol_type = other RNA
tgaggtagtaggatgtgtggtt

SEQ ID NO: 45805 - RNA, 18 nt, Synthetic Construct
  source 1..18: mol_type = other RNA
cccaaaggtcgtcggttc

SEQ ID NO: 45806 - RNA, 18 nt, Synthetic Construct
  source 1..18: mol_type = other RNA
cccaaaggtcgtcggttc

SEQ ID NO: 45807 - RNA, 15 nt, Synthetic Construct
  source 1..15: mol_type = other RNA
gttcggaagattttc

SEQ ID NO: 45808 - RNA, 15 nt, Synthetic Construct
  source 1..15: mol_type = other RNA
gttcggaagattttc

SEQ ID NO: 45809 - RNA, 22 nt, Synthetic Construct
  source 1..22: mol_type = other RNA
tggaatgcaaagaagtatgtat

SEQ ID NO: 45810 - RNA, 22 nt, Synthetic Construct
  source 1..22: mol_type = other RNA
tggaatgcaaagaagtatgtat

SEQ ID NO: 45811 - RNA, 21 nt, Synthetic Construct
  source 1..21: mol_type = other RNA
tcctgtactgagctgcctcga

SEQ ID NO: 45812 - RNA, 21 nt, Synthetic Construct
  source 1..21: mol_type = other RNA
tcctgtactgagctgcctcga

SEQ ID NO: 45813 - RNA, 23 nt, Synthetic Construct
  source 1..23: mol_type = other RNA
tcctgcactgagctgccccgagt

SEQ ID NO: 45814 - RNA, 23 nt, Synthetic Construct
  source 1..23: mol_type = other RNA
tcctgcactgagctgccccgagt

SEQ ID NO: 45815 - RNA, 24 nt, Synthetic Construct
  source 1..24: mol_type = other RNA
cgactcttagcggtggatcactcg

SEQ ID NO: 45816 - RNA, 24 nt, Synthetic Construct
  source 1..24: mol_type = other RNA
cgactcttagcggtggatcactcg

SEQ ID NO: 45817 - RNA, 23 nt, Synthetic Construct
  source 1..23: mol_type = other RNA
cgaggggcagagagcgagacttt

SEQ ID NO: 45818 - RNA, 23 nt, Synthetic Construct
  source 1..23: mol_type = other RNA
cgaggggcagagagcgagacttt

SEQ ID NO: 45819 - RNA, 36 nt, Synthetic Construct; identical to SEQ ID NO: 2546
  source 1..36: mol_type = other RNA

SEQ ID NO: 45820 - RNA, 36 nt, Synthetic Construct; identical to SEQ ID NO: 2546
  source 1..36: mol_type = other RNA

SEQ ID NO: 45821 - RNA, 16 nt, Synthetic Construct
  source 1..16: mol_type = other RNA
agcaagtcgaacggta

SEQ ID NO: 45822 - RNA, 22 nt, Synthetic Construct
  source 1..22: mol_type = other RNA
tagcatatcgagcctgagaaca

SEQ ID NO: 45823 - RNA, 22 nt, Synthetic Construct
  source 1..22: mol_type = other RNA
tagcatatcgagcctgagaaca

SEQ ID NO: 45824 - RNA, 22 nt, Synthetic Construct
  source 1..22: mol_type = other RNA
tgtggtagtaggttgtgtggtt

SEQ ID NO: 45825 - RNA, 22 nt, Synthetic Construct
  source 1..22: mol_type = other RNA
tgtggtagtaggttgtgtggtt

SEQ ID NO: 45826 - RNA, 23 nt, Synthetic Construct
  source 1..23: mol_type = other RNA
tgaggtagtaggttgtgtggttt

SEQ ID NO: 45827 - RNA, 16 nt, Synthetic Construct
  source 1..16: mol_type = other RNA
tgcgtagatatgcgga

SEQ ID NO: 45828 - RNA, 16 nt, Synthetic Construct
  source 1..16: mol_type = other RNA
tgcgtagatatgcgga

SEQ ID NO: 45829 - RNA, 27 nt, Synthetic Construct
  source 1..27: mol_type = other RNA
ccccccactgctagatttgactggctt

SEQ ID NO: 45830 - RNA, 27 nt, Synthetic Construct
  source 1..27: mol_type = other RNA
ccccccactgctagatttgactggctt

SEQ ID NO: 45831 - RNA, 22 nt, Synthetic Construct
  source 1..22: mol_type = other RNA
tgggatgagggattgaagtgga

SEQ ID NO: 45832 - RNA, 16 nt, Synthetic Construct
  source 1..16: mol_type = other RNA
accgcttttgtcaggg

SEQ ID NO: 45833 - RNA, 23 nt, Synthetic Construct
  source 1..23: mol_type = other RNA
tgaggtagtaggttgtgtggttc

SEQ ID NO: 45834 - RNA, 23 nt, Synthetic Construct
  source 1..23: mol_type = other RNA
tgaggtagtaggttgtgtggttc

SEQ ID NO: 45835 - RNA, 35 nt, Synthetic Construct; identical to SEQ ID NO: 2762
  source 1..35: mol_type = other RNA

SEQ ID NO: 45836 - RNA, 21 nt, Synthetic Construct
  source 1..21: mol_type = other RNA
tcctgtactgagccgccccga

SEQ ID NO: 45837 - RNA, 21 nt, Synthetic Construct
  source 1..21: mol_type = other RNA
tcctgtactgagccgccccga

SEQ ID NO: 45838 - RNA, 23 nt, Synthetic Construct
  source 1..23: mol_type = other RNA
cgaggtagtaggttgtgtggttt

SEQ ID NO: 45839 - RNA, 18 nt, Synthetic Construct
  source 1..18: mol_type = other RNA
ggccgtcgtcagctcgtg

SEQ ID NO: 45840 - RNA, 30 nt, Synthetic Construct; identical to SEQ ID NO: 10539
  source 1..30: mol_type = other RNA

SEQ ID NO: 45841 - RNA, 30 nt, Synthetic Construct; identical to SEQ ID NO: 10539
  source 1..30: mol_type = other RNA

SEQ ID NO: 45842 - RNA, 23 nt, Synthetic Construct
  source 1..23: mol_type = other RNA
ggcagggttcgtgactggggtga

SEQ ID NO: 45843 - RNA, 39 nt, Synthetic Construct; identical to SEQ ID NO: 4400
  source 1..39: mol_type = other RNA

SEQ ID NO: 45844 - RNA, 16 nt, Synthetic Construct
  source 1..16: mol_type = other RNA
gtcgacgtatagggtg

SEQ ID NO: 45845 - RNA, 16 nt, Synthetic Construct
  source 1..16: mol_type = other RNA
gtcgacgtatagggtg

SEQ ID NO: 45846 - RNA, 22 nt, Synthetic Construct
  source 1..22: mol_type = other RNA
ggcagcattgtacagggctatg

SEQ ID NO: 45847 - RNA, 16 nt, Synthetic Construct
  source 1..16: mol_type = other RNA
gcaagaggtcagcggt

SEQ ID NO: 45848 - RNA, 35 nt, Synthetic Construct; identical to SEQ ID NO: 2548
  source 1..35: mol_type = other RNA

SEQ ID NO: 45849 - RNA, 35 nt, Synthetic Construct; identical to SEQ ID NO: 2548
  source 1..35: mol_type = other RNA

SEQ ID NO: 45850 - RNA, 16 nt, Synthetic Construct
  source 1..16: mol_type = other RNA
acggcccagactccta

SEQ ID NO: 45851 - RNA, 16 nt, Synthetic Construct
  source 1..16: mol_type = other RNA
acggcccagactccta

SEQ ID NO: 45852 - RNA, 17 nt, Synthetic Construct
  source 1..17: mol_type = other RNA
tggccgtcgtcagctcg

SEQ ID NO: 45853 - RNA, 23 nt, Synthetic Construct
  source 1..23: mol_type = other RNA
atgtcccacccccactcctgttt

SEQ ID NO: 45854 - RNA, 23 nt, Synthetic Construct
  source 1..23: mol_type = other RNA
atgtcccacccccactcctgttt

SEQ ID NO: 45855 - RNA, 24 nt, Synthetic Construct
  source 1..24: mol_type = other RNA
cgggcctggttagtacttggatgg

SEQ ID NO: 45856 - RNA, 15 nt, Synthetic Construct
  source 1..15: mol_type = other RNA
tagagtagggcggga

SEQ ID NO: 45857 - RNA, 15 nt, Synthetic Construct
  source 1..15: mol_type = other RNA
tagagtagggcggga

SEQ ID NO: 45858 - RNA, 23 nt, Synthetic Construct
  source 1..23: mol_type = other RNA
tcggaatcgctagtaatcgcgga

SEQ ID NO: 45859 - RNA, 23 nt, Synthetic Construct
  source 1..23: mol_type = other RNA
tcggaatcgctagtaatcgcgga

SEQ ID NO: 45860 - RNA, 23 nt, Synthetic Construct
  source 1..23: mol_type = other RNA
tagtaatacgacgtacttagtgt

SEQ ID NO: 45861 - RNA, 23 nt, Synthetic Construct
  source 1..23: mol_type = other RNA
tagtaatacgacgtacttagtgt

SEQ ID NO: 45862 - RNA, 23 nt, Synthetic Construct
  source 1..23: mol_type = other RNA
tgaggtagtgggttgtgtggttt

SEQ ID NO: 45863 - RNA, 15 nt, Synthetic Construct
  source 1..15: mol_type = other RNA
gtagctcgttgggct

SEQ ID NO: 45864 - RNA, 15 nt, Synthetic Construct
  source 1..15: mol_type = other RNA
gtagctcgttgggct

SEQ ID NO: 45865 - RNA, 22 nt, Synthetic Construct
  source 1..22: mol_type = other RNA
tgaggtagtggtttgtgctgtt

SEQ ID NO: 45866 - RNA, 22 nt, Synthetic Construct
  source 1..22: mol_type = other RNA
tgaggtagtggtttgtgctgtt

SEQ ID NO: 45867 - RNA, 31 nt, Synthetic Construct; identical to SEQ ID NO: 2423
  source 1..31: mol_type = other RNA

SEQ ID NO: 45868 - RNA, 16 nt, Synthetic Construct
  source 1..16: mol_type = other RNA
gtccggatcgtagtct

SEQ ID NO: 45869 - RNA, 23 nt, Synthetic Construct
  source 1..23: mol_type = other RNA
agcaacattgtctgctgggtttc

SEQ ID NO: 45870 - RNA, 23 nt, Synthetic Construct
  source 1..23: mol_type = other RNA
agcaacattgtctgctgggtttc

SEQ ID NO: 45871 - RNA, 23 nt, Synthetic Construct
  source 1..23: mol_type = other RNA
tggtaatacggcgtacttagtgt

SEQ ID NO: 45872 - RNA, 23 nt, Synthetic Construct
  source 1..23: mol_type = other RNA
tggtaatacggcgtacttagtgt

SEQ ID NO: 45873 - RNA, 22 nt, Synthetic Construct
  source 1..22: mol_type = other RNA
cattgcgcttgtctcggtctga

SEQ ID NO: 45874 - RNA, 22 nt, Synthetic Construct
  source 1..22: mol_type = other RNA
cattgcgcttgtctcggtctga

SEQ ID NO: 45875 - RNA, 15 nt, Synthetic Construct
  source 1..15: mol_type = other RNA
gagagcctggacaca

SEQ ID NO: 45876 - RNA, 15 nt, Synthetic Construct
  source 1..15: mol_type = other RNA
gagagcctggacaca

SEQ ID NO: 45877 - RNA, 21 nt, Synthetic Construct
  source 1..21: mol_type = other RNA
acacatgcaagtcgaacggta

SEQ ID NO: 45878 - RNA, 21 nt, Synthetic Construct
  source 1..21: mol_type = other RNA
acacatgcaagtcgaacggta

SEQ ID NO: 45879 - RNA, 23 nt, Synthetic Construct
  source 1..23: mol_type = other RNA
tggcaatacgacgtacttagtgt

SEQ ID NO: 45880 - RNA, 31 nt, Synthetic Construct; identical to SEQ ID NO: 2295
  source 1..31: mol_type = other RNA

SEQ ID NO: 45881 - RNA, 31 nt, Synthetic Construct; identical to SEQ ID NO: 2295
  source 1..31: mol_type = other RNA

SEQ ID NO: 45882 - RNA, 27 nt, Synthetic Construct
  source 1..27: mol_type = other RNA
ccccccactgctaaatttaactggctt

SEQ ID NO: 45883 - RNA, 22 nt, Synthetic Construct
  source 1..22: mol_type = other RNA
tgagaactgaattccatgggtc

SEQ ID NO: 45884 - RNA, 27 nt, Synthetic Construct
  source 1..27: mol_type = other RNA
ccccccactgctaaatttgactgactt

SEQ ID NO: 45885 - RNA, 16 nt, Synthetic Construct
  source 1..16: mol_type = other RNA
cagtcaggatgttggc

SEQ ID NO: 45886 - RNA, 16 nt, Synthetic Construct
  source 1..16: mol_type = other RNA
cagtcaggatgttggc

SEQ ID NO: 45887 - RNA, 23 nt, Synthetic Construct
  source 1..23: mol_type = other RNA
cgagagtaggacgttgccaggtt

SEQ ID NO: 45888 - RNA, 23 nt, Synthetic Construct
  source 1..23: mol_type = other RNA
cgagagtaggacgttgccaggtt

SEQ ID NO: 45889 - RNA, 18 nt, Synthetic Construct
  source 1..18: mol_type = other RNA
ggtagcgtggccgagcgg

SEQ ID NO: 45890 - RNA, 18 nt, Synthetic Construct
  source 1..18: mol_type = other RNA
ggtagcgtggccgagcgg

SEQ ID NO: 45891 - RNA, 22 nt, Synthetic Construct
  source 1..22: mol_type = other RNA
ngaggtagtagtttgtgctgtt

SEQ ID NO: 45892 - RNA, 22 nt, Synthetic Construct
  source 1..22: mol_type = other RNA
ngaggtagtagtttgtgctgtt

SEQ ID NO: 45893 - RNA, 23 nt, Synthetic Construct
  source 1..23: mol_type = other RNA
tcctgaactgagctgccccgaga

SEQ ID NO: 45894 - RNA, 23 nt, Synthetic Construct
  source 1..23: mol_type = other RNA
tcctgaactgagctgccccgaga

SEQ ID NO: 45895 - RNA, 31 nt, Synthetic Construct; identical to SEQ ID NO: 2507
  source 1..31: mol_type = other RNA

SEQ ID NO: 45896 - RNA, 31 nt, Synthetic Construct; identical to SEQ ID NO: 2507
  source 1..31: mol_type = other RNA

SEQ ID NO: 45897 - RNA, 22 nt, Synthetic Construct
  source 1..22: mol_type = other RNA
gaagaggacttggagctcgatc

SEQ ID NO: 45898 - RNA, 22 nt, Synthetic Construct
  source 1..22: mol_type = other RNA
gaagaggacttggagctcgatc

SEQ ID NO: 45899 - RNA, 22 nt, Synthetic Construct
  source 1..22: mol_type = other RNA
tgttggttcaagcgtgtagtcg

SEQ ID NO: 45900 - RNA, 27 nt, Synthetic Construct
  source 1..27: mol_type = other RNA
ccccccactgctaaatttgtctggctt

SEQ ID NO: 45901 - RNA, 34 nt, Synthetic Construct; identical to SEQ ID NO: 2375
  source 1..34: mol_type = other RNA

SEQ ID NO: 45902 - RNA, 34 nt, Synthetic Construct; identical to SEQ ID NO: 2375
  source 1..34: mol_type = other RNA

SEQ ID NO: 45903 - RNA, 21 nt, Synthetic Construct
  source 1..21: mol_type = other RNA
tcctgtacagagctgccccga

SEQ ID NO: 45904 - RNA, 21 nt, Synthetic Construct
  source 1..21: mol_type = other RNA
tcctgtacagagctgccccga

SEQ ID NO: 45905 - RNA, 24 nt, Synthetic Construct
  source 1..24: mol_type = other RNA
ctcactgatcgagtcgtcctgcgc

SEQ ID NO: 45906 - RNA, 24 nt, Synthetic Construct
  source 1..24: mol_type = other RNA
ctcactgatcgagtcgtcctgcgc

SEQ ID NO: 45907 - RNA, 23 nt, Synthetic Construct
  source 1..23: mol_type = other RNA
tggtaatacgacgtacttagcgt

SEQ ID NO: 45908 - RNA, 23 nt, Synthetic Construct
  source 1..23: mol_type = other RNA
tggtaatacgacgtacttagcgt

SEQ ID NO: 45909 - RNA, 22 nt, Synthetic Construct
  source 1..22: mol_type = other RNA
tctttgttcgattccgttgagt

SEQ ID NO: 45910 - RNA, 22 nt, Synthetic Construct
  source 1..22: mol_type = other RNA
tctttgttcgattccgttgagt

SEQ ID NO: 45911 - RNA, 16 nt, Synthetic Construct
  source 1..16: mol_type = other RNA
gtcaacggccatacca

SEQ ID NO: 45912 - RNA, 39 nt, Synthetic Construct; identical to SEQ ID NO: 2398
  source 1..39: mol_type = other RNA

SEQ ID NO: 45913 - RNA, 16 nt, Synthetic Construct
  source 1..16: mol_type = other RNA
ggtagctcgttgggct

SEQ ID NO: 45914 - RNA, 36 nt, Synthetic Construct; identical to SEQ ID NO: 2478
  source 1..36: mol_type = other RNA

SEQ ID NO: 45915 - RNA, 15 nt, Synthetic Construct
  source 1..15: mol_type = other RNA
gcaagtcgaacggta

SEQ ID NO: 45916 - RNA, 33 nt, Synthetic Construct; identical to SEQ ID NO: 2126
  source 1..33: mol_type = other RNA

SEQ ID NO: 45917 - RNA, 31 nt, Synthetic Construct; identical to SEQ ID NO: 7160
  source 1..31: mol_type = other RNA

SEQ ID NO: 45918 - RNA, 31 nt, Synthetic Construct; identical to SEQ ID NO: 7160
  source 1..31: mol_type = other RNA

SEQ ID NO: 45919 - RNA, 21 nt, Synthetic Construct
  source 1..21: mol_type = other RNA
ttataatacaacctgataagt

SEQ ID NO: 45920 - RNA, 21 nt, Synthetic Construct
  source 1..21: mol_type = other RNA
ttataatacaacctgataagt

SEQ ID NO: 45921 - RNA, 23 nt, Synthetic Construct
  source 1..23: mol_type = other RNA
ggcagggttcgtgactggggtga

SEQ ID NO: 45922 - RNA, 23 nt, Synthetic Construct
  source 1..23: mol_type = other RNA
ggcagggttcgtgactggggtga

SEQ ID NO: 45923 - RNA, 20 nt, Synthetic Construct
  source 1..20: mol_type = other RNA
tgaggtagtaggttgtgagg

SEQ ID NO: 45924 - RNA, 20 nt, Synthetic Construct
  source 1..20: mol_type = other RNA
tgaggtagtaggttgtgagg

SEQ ID NO: 45925 - RNA, 15 nt, Synthetic Construct
  source 1..15: mol_type = other RNA
gcagagcgtcggtct

SEQ ID NO: 45926 - RNA, 15 nt, Synthetic Construct
  source 1..15: mol_type = other RNA
gcagagcgtcggtct

SEQ ID NO: 45927 - RNA, 21 nt, Synthetic Construct
  source 1..21: mol_type = other RNA
gctttgatccggagatttccg

SEQ ID NO: 45928 - RNA, 22 nt, Synthetic Construct
  source 1..22: mol_type = other RNA
tgaggtaataggttgtgtggtt

SEQ ID NO: 45929 - RNA, 22 nt, Synthetic Construct
  source 1..22: mol_type = other RNA
tgaggtaataggttgtgtggtt

SEQ ID NO: 45930 - RNA, 24 nt, Synthetic Construct
  source 1..24: mol_type = other RNA
ggttgtaaaccgcttttgtcaggg

SEQ ID NO: 45931 - RNA, 18 nt, Synthetic Construct
  source 1..18: mol_type = other RNA
ggctttgaagtaaggtcg

SEQ ID NO: 45932 - RNA, 18 nt, Synthetic Construct
  source 1..18: mol_type = other RNA
ggctttgaagtaaggtcg

SEQ ID NO: 45933 - RNA, 31 nt, Synthetic Construct; identical to SEQ ID NO: 2263
  source 1..31: mol_type = other RNA

SEQ ID NO: 45934 - RNA, 20 nt, Synthetic Construct
  source 1..20: mol_type = other RNA
tggggtagtaggttgtgtgg

SEQ ID NO: 45935 - RNA, 20 nt, Synthetic Construct
  source 1..20: mol_type = other RNA
tggggtagtaggttgtgtgg

SEQ ID NO: 45936 - RNA, 21 nt, Synthetic Construct
  source 1..21: mol_type = other RNA
tgaggtagtaggtcgtgtggt

SEQ ID NO: 45937 - RNA, 21 nt, Synthetic Construct
  source 1..21: mol_type = other RNA
tgaggtagtaggtcgtgtggt

SEQ ID NO: 45938 - RNA, 31 nt, Synthetic Construct; identical to SEQ ID NO: 2412
  source 1..31: mol_type = other RNA

SEQ ID NO: 45939 - RNA, 21 nt, Synthetic Construct
  source 1..21: mol_type = other RNA
ttcaagtaattcaggataggt

SEQ ID NO: 45940 - RNA, 21 nt, Synthetic Construct
  source 1..21: mol_type = other RNA
ttcaagtaattcaggataggt

SEQ ID NO: 45941 - RNA, 23 nt, Synthetic Construct
  source 1..23: mol_type = other RNA
tgagaggcagagagcgagacttt

SEQ ID NO: 45942 - RNA, 23 nt, Synthetic Construct
  source 1..23: mol_type = other RNA
tgagaggcagagagcgagacttt

SEQ ID NO: 45943 - RNA, 26 nt, Synthetic Construct
  source 1..26: mol_type = other RNA
ggcgcttgagagaactctggagaagg

SEQ ID NO: 45944 - RNA, 20 nt, Synthetic Construct
  source 1..20: mol_type = other RNA
ccttggggttgtaggaccac

SEQ ID NO: 45945 - RNA, 20 nt, Synthetic Construct
  source 1..20: mol_type = other RNA
ccttggggttgtaggaccac

SEQ ID NO: 45946 - RNA, 23 nt, Synthetic Construct
  source 1..23: mol_type = other RNA
tggtaatacaacgtacttagtgt

SEQ ID NO: 45947 - RNA, 30 nt, Synthetic Construct; identical to SEQ ID NO: 2578
  source 1..30: mol_type = other RNA

SEQ ID NO: 45948 - RNA, 30 nt, Synthetic Construct; identical to SEQ ID NO: 2578
  source 1..30: mol_type = other RNA

SEQ ID NO: 45949 - RNA, 32 nt, Synthetic Construct; identical to SEQ ID NO: 4710
  source 1..32: mol_type = other RNA

SEQ ID NO: 45950 - RNA, 34 nt, Synthetic Construct; identical to SEQ ID NO: 2019
  source 1..34: mol_type = other RNA

SEQ ID NO: 45951 - RNA, 34 nt, Synthetic Construct; identical to SEQ ID NO: 2019
  source 1..34: mol_type = other RNA

SEQ ID NO: 45952 - RNA, 27 nt, Synthetic Construct
  source 1..27: mol_type = other RNA
ccccccactgctagatttgactggctt

SEQ ID NO: 45953 - RNA, 22 nt, Synthetic Construct
  source 1..22: mol_type = other RNA
taacactgtctggtaacgatgt

SEQ ID NO: 45954 - RNA, 22 nt, Synthetic Construct
  source 1..22: mol_type = other RNA
taacactgtctggtaacgatgt

SEQ ID NO: 45955 - RNA, 41 nt, Synthetic Construct; identical to SEQ ID NO: 781
  source 1..41: mol_type = other RNA

SEQ ID NO: 45956 - RNA, 22 nt, Synthetic Construct
  source 1..22: mol_type = other RNA
cccataaagtagaaagcactac

SEQ ID NO: 45957 - RNA, 22 nt, Synthetic Construct
  source 1..22: mol_type = other RNA
cccataaagtagaaagcactac

SEQ ID NO: 45958 - RNA, 31 nt, Synthetic Construct; identical to SEQ ID NO: 2333
  source 1..31: mol_type = other RNA

SEQ ID NO: 45959 - RNA, 17 nt, Synthetic Construct
  source 1..17: mol_type = other RNA
tcccagaaacccggtcg

SEQ ID NO: 45960 - RNA, 17 nt, Synthetic Construct
  source 1..17: mol_type = other RNA
tcccagaaacccggtcg

SEQ ID NO: 45961 - RNA, 15 nt, Synthetic Construct
  source 1..15: mol_type = other RNA
tccggatcgtagtct

SEQ ID NO: 45962 - RNA, 15 nt, Synthetic Construct
  source 1..15: mol_type = other RNA
tccggatcgtagtct

SEQ ID NO: 45963 - RNA, 23 nt, Synthetic Construct
  source 1..23: mol_type = other RNA
tggtaatacgacgtgcttagtgt

SEQ ID NO: 45964 - RNA, 21 nt, Synthetic Construct
  source 1..21: mol_type = other RNA
cattattacttttggtacgcg

SEQ ID NO: 45965 - RNA, 21 nt, Synthetic Construct
  source 1..21: mol_type = other RNA
cattattacttttggtacgcg

SEQ ID NO: 45966 - RNA, 24 nt, Synthetic Construct
  source 1..24: mol_type = other RNA
gatgaggcgtgataacgagtctgc

SEQ ID NO: 45967 - RNA, 35 nt, Synthetic Construct; identical to SEQ ID NO: 10694
  source 1..35: mol_type = other RNA

SEQ ID NO: 45968 - RNA, 21 nt, Synthetic Construct
  source 1..21: mol_type = other RNA
tccctgagaccctaacttgtg

SEQ ID NO: 45969 - RNA, 21 nt, Synthetic Construct
  source 1..21: mol_type = other RNA
tgaggtagtagcttgtgctgt

SEQ ID NO: 45970 - RNA, 15 nt, Synthetic Construct
  source 1..15: mol_type = other RNA
tcagtagctcgagga

SEQ ID NO: 45971 - RNA, 15 nt, Synthetic Construct
  source 1..15: mol_type = other RNA
tcagtagctcgagga

SEQ ID NO: 45972 - RNA, 18 nt, Synthetic Construct
  source 1..18: mol_type = other RNA
tccgacatgcgagggttc

SEQ ID NO: 45973 - RNA, 18 nt, Synthetic Construct
  source 1..18: mol_type = other RNA
tccgacatgcgagggttc

SEQ ID NO: 45974 - RNA, 23 nt, Synthetic Construct
  source 1..23: mol_type = other RNA
tcctgcactgagctgccccgaga

SEQ ID NO: 45975 - RNA, 23 nt, Synthetic Construct
  source 1..23: mol_type = other RNA
tcctgcactgagctgccccgaga

SEQ ID NO: 45976 - RNA, 18 nt, Synthetic Construct
  source 1..18: mol_type = other RNA
accggaggaaggtgggga

SEQ ID NO: 45977 - RNA, 18 nt, Synthetic Construct
  source 1..18: mol_type = other RNA
accggaggaaggtgggga

SEQ ID NO: 45978 - RNA, 28 nt, Synthetic Construct
  source 1..28: mol_type = other RNA
cgactcttagcggtggatcactcggctc

SEQ ID NO: 45979 - RNA, 23 nt, Synthetic Construct
  source 1..23: mol_type = other RNA
cgcgacctcagatcagacgtggc

SEQ ID NO: 45980 - RNA, 23 nt, Synthetic Construct
  source 1..23: mol_type = other RNA
cgcgacctcagatcagacgtggc

SEQ ID NO: 45981 - RNA, 22 nt, Synthetic Construct
  source 1..22: mol_type = other RNA
tgaggtagtaggttatgtggtt

SEQ ID NO: 45982 - RNA, 22 nt, Synthetic Construct
  source 1..22: mol_type = other RNA
tgaggtagtaggttatgtggtt

SEQ ID NO: 45983 - RNA, 27 nt, Synthetic Construct
  source 1..27: mol_type = other RNA
ccccccactgccaaatttgactggctt

SEQ ID NO: 45984 - RNA, 20 nt, Synthetic Construct
  source 1..20: mol_type = other RNA
tgaggtagtaggttgtgtgg

SEQ ID NO: 45985 - RNA, 20 nt, Synthetic Construct
  source 1..20: mol_type = other RNA
tgaggtagtaggttgtgtgg

SEQ ID NO: 45986 - RNA, 20 nt, Synthetic Construct
  source 1..20: mol_type = other RNA
tggggtagtaggttgtatag

SEQ ID NO: 45987 - RNA, 20 nt, Synthetic Construct
  source 1..20: mol_type = other RNA
tggggtagtaggttgtatag

SEQ ID NO: 45988 - RNA, 22 nt, Synthetic Construct
  source 1..22: mol_type = other RNA
caaagtgctgttcgtgcaggta

SEQ ID NO: 45989 - RNA, 22 nt, Synthetic Construct
  source 1..22: mol_type = other RNA
caaagtgctgttcgtgcaggta

SEQ ID NO: 45990 - RNA, 22 nt, Synthetic Construct
  source 1..22: mol_type = other RNA
tgaggtagtaggttgtgtggta

SEQ ID NO: 45991 - RNA, 22 nt, Synthetic Construct
  source 1..22: mol_type = other RNA
tgaggtagtaggttgtgtggta

SEQ ID NO: 45992 - RNA, 22 nt, Synthetic Construct
  source 1..22: mol_type = other RNA
tgaggtagtagttcgtgctgtt

SEQ ID NO: 45993 - RNA, 22 nt, Synthetic Construct
  source 1..22: mol_type = other RNA
tgaggtagtagttcgtgctgtt

SEQ ID NO: 45994 - RNA, 27 nt, Synthetic Construct
  source 1..27: mol_type = other RNA
ccgtgtgaaagtaggtcatcgtcaggc

SEQ ID NO: 45995 - RNA, 30 nt, Synthetic Construct; identical to SEQ ID NO: 2274
  source 1..30: mol_type = other RNA

SEQ ID NO: 45996 - RNA, 30 nt, Synthetic Construct; identical to SEQ ID NO: 2274
  source 1..30: mol_type = other RNA

SEQ ID NO: 45997 - RNA, 30 nt, Synthetic Construct; identical to SEQ ID NO: 1194
  source 1..30: mol_type = other RNA

SEQ ID NO: 45998 - RNA, 30 nt, Synthetic Construct; identical to SEQ ID NO: 1194
  source 1..30: mol_type = other RNA

SEQ ID NO: 45999 - RNA, 22 nt, Synthetic Construct
  source 1..22: mol_type = other RNA
gcgttgcaaccagtgccggggg

SEQ ID NO: 46000 - RNA, 16 nt, Synthetic Construct
  source 1..16: mol_type = other RNA
gcggctgtagctcagt

SEQ ID NO: 46001 - RNA, 21 nt, Synthetic Construct
  source 1..21: mol_type = other RNA
acacatgcaagtcgaacggta

SEQ ID NO: 46002 - RNA, 21 nt, Synthetic Construct
  source 1..21: mol_type = other RNA
acacatgcaagtcgaacggta

SEQ ID NO: 46003 - RNA, 22 nt, Synthetic Construct
  source 1..22: mol_type = other RNA
tgaggtagtaggttgtgtggtc

SEQ ID NO: 46004 - RNA, 22 nt, Synthetic Construct
  source 1..22: mol_type = other RNA
tgaggtagaaggttgtgtggtt

SEQ ID NO: 46005 - RNA, 22 nt, Synthetic Construct
  source 1..22: mol_type = other RNA
tgaggtagaaggttgtgtggtt

SEQ ID NO: 46006 - RNA, 22 nt, Synthetic Construct
  source 1..22: mol_type = other RNA
tgaggtagtaggtcgtatagtt

SEQ ID NO: 46007 - RNA, 22 nt, Synthetic Construct
  source 1..22: mol_type = other RNA
tgaggtagtaggtcgtatagtt

SEQ ID NO: 46008 - RNA, 15 nt, Synthetic Construct
  source 1..15: mol_type = other RNA
gagtagggcgggaca

SEQ ID NO: 46009 - RNA, 15 nt, Synthetic Construct
  source 1..15: mol_type = other RNA
gagtagggcgggaca

SEQ ID NO: 46010 - RNA, 22 nt, Synthetic Construct
  source 1..22: mol_type = other RNA
cgttgcacttgtctcggtctga

SEQ ID NO: 46011 - RNA, 22 nt, Synthetic Construct
  source 1..22: mol_type = other RNA
cgttgcacttgtctcggtctga

SEQ ID NO: 46012 - RNA, 17 nt, Synthetic Construct
  source 1..17: mol_type = other RNA
cagtcaggatgttggct

SEQ ID NO: 46013 - RNA, 17 nt, Synthetic Construct
  source 1..17: mol_type = other RNA
acagtcaggatgttggc

SEQ ID NO: 46014 - RNA, 33 nt, Synthetic Construct; identical to SEQ ID NO: 2638
  source 1..33: mol_type = other RNA

SEQ ID NO: 46015 - RNA, 32 nt, Synthetic Construct; identical to SEQ ID NO: 3092
  source 1..32: mol_type = other RNA

SEQ ID NO: 46016 - RNA, 22 nt, Synthetic Construct
  source 1..22: mol_type = other RNA
tggaatgtgaagaagtatgtat

SEQ ID NO: 46017 - RNA, 22 nt, Synthetic Construct
  source 1..22: mol_type = other RNA
tggaatgtgaagaagtatgtat

SEQ ID NO: 46018 - RNA, 20 nt, Synthetic Construct
  source 1..20: mol_type = other RNA
tgaggtggtaggttgtatag

SEQ ID NO: 46019 - RNA, 20 nt, Synthetic Construct
  source 1..20: mol_type = other RNA
tgaggtggtaggttgtatag

SEQ ID NO: 46020 - RNA, 39 nt, Synthetic Construct; identical to SEQ ID NO: 2398
  source 1..39: mol_type = other RNA

SEQ ID NO: 46021 - RNA, 39 nt, Synthetic Construct; identical to SEQ ID NO: 2398
  source 1..39: mol_type = other RNA

SEQ ID NO: 46022 - RNA, 35 nt, Synthetic Construct; identical to SEQ ID NO: 1095
  source 1..35: mol_type = other RNA

SEQ ID NO: 46023 - RNA, 20 nt, Synthetic Construct
  source 1..20: mol_type = other RNA
tcagtagctcgaggaaaaga

SEQ ID NO: 46024 - RNA, 21 nt, Synthetic Construct
  source 1..21: mol_type = other RNA
ggagtatgcagagcaagatca

SEQ ID NO: 46025 - RNA, 21 nt, Synthetic Construct
  source 1..21: mol_type = other RNA
ggagtatgcagagcaagatca

SEQ ID NO: 46026 - RNA, 16 nt, Synthetic Construct
  source 1..16: mol_type = other RNA
gcctacggccatacca

SEQ ID NO: 46027 - RNA, 16 nt, Synthetic Construct
  source 1..16: mol_type = other RNA
gcctacggccatacca

SEQ ID NO: 46028 - RNA, 24 nt, Synthetic Construct
  source 1..24: mol_type = other RNA
tgtagacatccccgactggaagct

SEQ ID NO: 46029 - RNA, 24 nt, Synthetic Construct
  source 1..24: mol_type = other RNA
tgtagacatccccgactggaagct

SEQ ID NO: 46030 - RNA, 22 nt, Synthetic Construct
  source 1..22: mol_type = other RNA
tggaatgtaaagaggtatgtat

SEQ ID NO: 46031 - RNA, 22 nt, Synthetic Construct
  source 1..22: mol_type = other RNA
tggaatgtaaagaggtatgtat

SEQ ID NO: 46032 - RNA, 21 nt, Synthetic Construct
  source 1..21: mol_type = other RNA
ctagactgaggctccttgagg

SEQ ID NO: 46033 - RNA, 16 nt, Synthetic Construct
  source 1..16: mol_type = other RNA
gtctacggccgtacca

SEQ ID NO: 46034 - RNA, 16 nt, Synthetic Construct
  source 1..16: mol_type = other RNA
gtctacggccgtacca

SEQ ID NO: 46035 - RNA, 32 nt, Synthetic Construct; identical to SEQ ID NO: 3713
  source 1..32: mol_type = other RNA

SEQ ID NO: 46036 - RNA, 15 nt, Synthetic Construct
  source 1..15: mol_type = other RNA
gtcgacgtatagggt

SEQ ID NO: 46037 - RNA, 15 nt, Synthetic Construct
  source 1..15: mol_type = other RNA
gtcgacgtatagggt

SEQ ID NO: 46038 - RNA, 22 nt, Synthetic Construct
  source 1..22: mol_type = other RNA
tgaggtagcagattgtatagtt

SEQ ID NO: 46039 - RNA, 22 nt, Synthetic Construct
  source 1..22: mol_type = other RNA
tgaggtagcagattgtatagtt

SEQ ID NO: 46040 - RNA, 23 nt, Synthetic Construct
  source 1..23: mol_type = other RNA
tgaggggcggagagcgagacttt

SEQ ID NO: 46041 - RNA, 19 nt, Synthetic Construct
  source 1..19: mol_type = other RNA
aaaccgttaccattactga

SEQ ID NO: 46042 - RNA, 19 nt, Synthetic Construct
  source 1..19: mol_type = other RNA
aaaccgttaccattactga

SEQ ID NO: 46043 - RNA, 20 nt, Synthetic Construct
  source 1..20: mol_type = other RNA
tcctgtctgaatatgggggg

SEQ ID NO: 46044 - RNA, 24 nt, Synthetic Construct
  source 1..24: mol_type = other RNA
gcagctaataccgcatacgacctg

SEQ ID NO: 46045 - RNA, 15 nt, Synthetic Construct
  source 1..15: mol_type = other RNA
cggcccagactccta

SEQ ID NO: 46046 - RNA, 21 nt, Synthetic Construct
  source 1..21: mol_type = other RNA
ttcacagtggctaagttctgt

SEQ ID NO: 46047 - RNA, 20 nt, Synthetic Construct
  source 1..20: mol_type = other RNA
tcctgtaccgatcaatagtg

SEQ ID NO: 46048 - RNA, 20 nt, Synthetic Construct
  source 1..20: mol_type = other RNA
tgaagtagtaggttgtgtgg

SEQ ID NO: 46049 - RNA, 21 nt, Synthetic Construct
  source 1..21: mol_type = other RNA
cgtaccgtgagtaataatgca

SEQ ID NO: 46050 - RNA, 23 nt, Synthetic Construct
  source 1..23: mol_type = other RNA
tggaagactagtgattttgttgt

SEQ ID NO: 46051 - RNA, 25 nt, Synthetic Construct
  source 1..25: mol_type = other RNA
tcgaggatatgagatcgagacgaca

SEQ ID NO: 46052 - RNA, 25 nt, Synthetic Construct
  source 1..25: mol_type = other RNA
tcgaggatatgagatcgagacgaca

SEQ ID NO: 46053 - RNA, 16 nt, Synthetic Construct
  source 1..16: mol_type = other RNA
gtctacggctatacca

SEQ ID NO: 46054 - RNA, 22 nt, Synthetic Construct
  source 1..22: mol_type = other RNA
tggaatgtaaagaggtatgtat

SEQ ID NO: 46055 - RNA, 22 nt, Synthetic Construct
  source 1..22: mol_type = other RNA
tggaatgtaaagaggtatgtat

SEQ ID NO: 46056 - RNA, 21 nt, Synthetic Construct
  source 1..21: mol_type = other RNA
cgaggtagtaggttgtgtggt

SEQ ID NO: 46057 - RNA, 21 nt, Synthetic Construct
  source 1..21: mol_type = other RNA
cgaggtagtaggttgtgtggt

SEQ ID NO: 46058 - RNA, 15 nt, Synthetic Construct
  source 1..15: mol_type = other RNA
gcagagcgtcggtct

SEQ ID NO: 46059 - RNA, 15 nt, Synthetic Construct
  source 1..15: mol_type = other RNA
gcagagcgtcggtct

SEQ ID NO: 46060 - RNA, 32 nt, Synthetic Construct; identical to SEQ ID NO: 4509
  source 1..32: mol_type = other RNA

SEQ ID NO: 46061 - RNA, 32 nt, Synthetic Construct; identical to SEQ ID NO: 4509
  source 1..32: mol_type = other RNA

SEQ ID NO: 46062 - RNA, 23 nt, Synthetic Construct
  source 1..23: mol_type = other RNA
tgaggggcagagagcgagacttc

SEQ ID NO: 46063 - RNA, 21 nt, Synthetic Construct
  source 1..21: mol_type = other RNA
tcctgtactgagctgccccgg

SEQ ID NO: 46064 - RNA, 21 nt, Synthetic Construct
  source 1..21: mol_type = other RNA
tcctgtactgagctgccccgg

SEQ ID NO: 46065 - RNA, 21 nt, Synthetic Construct
  source 1..21: mol_type = other RNA
tcttggagtaggtcattgggt

SEQ ID NO: 46066 - RNA, 18 nt, Synthetic Construct
  source 1..18: mol_type = other RNA
gctattgacgaccgtacc

SEQ ID NO: 46067 - RNA, 18 nt, Synthetic Construct
  source 1..18: mol_type = other RNA
gctattgacgaccgtacc

SEQ ID NO: 46068 - RNA, 35 nt, Synthetic Construct; identical to SEQ ID NO: 2514
  source 1..35: mol_type = other RNA

SEQ ID NO: 46069 - RNA, 34 nt, Synthetic Construct; identical to SEQ ID NO: 2317
  source 1..34: mol_type = other RNA

SEQ ID NO: 46070 - RNA, 23 nt, Synthetic Construct
  source 1..23: mol_type = other RNA
taaagtgcttatagtgcaggtag

SEQ ID NO: 46071 - RNA, 22 nt, Synthetic Construct
  source 1..22: mol_type = other RNA
tcagcgccgatgatagtgcgga

SEQ ID NO: 46072 - RNA, 22 nt, Synthetic Construct
  source 1..22: mol_type = other RNA
tcagcgccgatgatagtgcgga

SEQ ID NO: 46073 - RNA, 16 nt, Synthetic Construct
  source 1..16: mol_type = other RNA
ggccgtcgtcagctcg

SEQ ID NO: 46074 - RNA, 41 nt, Synthetic Construct; identical to SEQ ID NO: 2441
  source 1..41: mol_type = other RNA

SEQ ID NO: 46075 - RNA, 41 nt, Synthetic Construct; identical to SEQ ID NO: 2441
  source 1..41: mol_type = other RNA

SEQ ID NO: 46076 - RNA, 23 nt, Synthetic Construct
  source 1..23: mol_type = other RNA
tgaggtagcaggttgtgtggttt

SEQ ID NO: 46077 - RNA, 23 nt, Synthetic Construct
  source 1..23: mol_type = other RNA
tgaggtagcaggttgtgtggttt

SEQ ID NO: 46078 - RNA, 23 nt, Synthetic Construct
  source 1..23: mol_type = other RNA
tggtaatacgtcgtacttagtgt

SEQ ID NO: 46079 - RNA, 36 nt, Synthetic Construct; identical to SEQ ID NO: 2444
  source 1..36: mol_type = other RNA

SEQ ID NO: 46080 - RNA, 36 nt, Synthetic Construct; identical to SEQ ID NO: 2444
  source 1..36: mol_type = other RNA

SEQ ID NO: 46081 - RNA, 18 nt, Synthetic Construct
  source 1..18: mol_type = other RNA
catgcaagtcgaacggta

SEQ ID NO: 46082 - RNA, 18 nt, Synthetic Construct
  source 1..18: mol_type = other RNA
catgcaagtcgaacggta

SEQ ID NO: 46083 - RNA, 23 nt, Synthetic Construct
  source 1..23: mol_type = other RNA
tggtaatacgtcgtacttagtgt

SEQ ID NO: 46084 - RNA, 23 nt, Synthetic Construct
  source 1..23: mol_type = other RNA
tggtaatacgtcgtacttagtgt

SEQ ID NO: 46085 - RNA, 21 nt, Synthetic Construct
  source 1..21: mol_type = other RNA
tgaggtagtagtttgtgccgt

SEQ ID NO: 46086 - RNA, 21 nt, Synthetic Construct
  source 1..21: mol_type = other RNA
tgaggtagtagtttgtgccgt

SEQ ID NO: 46087 - RNA, 27 nt, Synthetic Construct
  source 1..27: mol_type = other RNA
ccccccaccgctaaatttgactggctt

SEQ ID NO: 46088 - RNA, 22 nt, Synthetic Construct
  source 1..22: mol_type = other RNA
tccttcattccaccggagtctg

SEQ ID NO: 46089 - RNA, 22 nt, Synthetic Construct
  source 1..22: mol_type = other RNA
tccttcattccaccggagtctg

SEQ ID NO: 46090 - RNA, 22 nt, Synthetic Construct
  source 1..22: mol_type = other RNA
taactccttaagcgaatctcgc

SEQ ID NO: 46091 - RNA, 22 nt, Synthetic Construct
  source 1..22: mol_type = other RNA
taactccttaagcgaatctcgc

SEQ ID NO: 46092 - RNA, 17 nt, Synthetic Construct
  source 1..17: mol_type = other RNA
accggaggaaggtgggg

SEQ ID NO: 46093 - RNA, 25 nt, Synthetic Construct
  source 1..25: mol_type = other RNA
ctgaggatatgagatcgagacgaca

SEQ ID NO: 46094 - RNA, 25 nt, Synthetic Construct
  source 1..25: mol_type = other RNA
ctgaggatatgagatcgagacgaca

SEQ ID NO: 46095 - RNA, 18 nt, Synthetic Construct
  source 1..18: mol_type = other RNA
gctattgacgaccgtacc

SEQ ID NO: 46096 - RNA, 18 nt, Synthetic Construct
  source 1..18: mol_type = other RNA
gctattgacgaccgtacc

SEQ ID NO: 46097 - RNA, 31 nt, Synthetic Construct; identical to SEQ ID NO: 2215
  source 1..31: mol_type = other RNA

SEQ ID NO: 46098 - RNA, 18 nt, Synthetic Construct
  source 1..18: mol_type = other RNA
cctcgcgcgattggagcg

SEQ ID NO: 46099 - RNA, 21 nt, Synthetic Construct
  source 1..21: mol_type = other RNA
ctaatcccagaaacccggtcg

SEQ ID NO: 46100 - RNA, 21 nt, Synthetic Construct
  source 1..21: mol_type = other RNA
ctaatcccagaaacccggtcg

SEQ ID NO: 46101 - RNA, 22 nt, Synthetic Construct
  source 1..22: mol_type = other RNA
tgaggtagtaggctgtgtggtt

SEQ ID NO: 46102 - RNA, 22 nt, Synthetic Construct
  source 1..22: mol_type = other RNA
tgaggtagtaggctgtgtggtt

SEQ ID NO: 46103 - RNA, 22 nt, Synthetic Construct
  source 1..22: mol_type = other RNA
tgaggtagtaggttgtgtgatt

SEQ ID NO: 46104 - RNA, 15 nt, Synthetic Construct
  source 1..15: mol_type = other RNA
gtccggcccgaggca

SEQ ID NO: 46105 - RNA, 22 nt, Synthetic Construct
  source 1..22: mol_type = other RNA
ncgtaccgtgagtaataatgcg

SEQ ID NO: 46106 - RNA, 23 nt, Synthetic Construct
  source 1..23: mol_type = other RNA
tggtaatatgacgtacttagtgt

SEQ ID NO: 46107 - RNA, 23 nt, Synthetic Construct
  source 1..23: mol_type = other RNA
tggtaatatgacgtacttagtgt

SEQ ID NO: 46108 - RNA, 35 nt, Synthetic Construct; identical to SEQ ID NO: 2518
  source 1..35: mol_type = other RNA

SEQ ID NO: 46109 - RNA, 35 nt, Synthetic Construct; identical to SEQ ID NO: 2518
  source 1..35: mol_type = other RNA

SEQ ID NO: 46110 - RNA, 23 nt, Synthetic Construct
  source 1..23: mol_type = other RNA
tcctgtactgagctgccccgggt

SEQ ID NO: 46111 - RNA, 23 nt, Synthetic Construct
  source 1..23: mol_type = other RNA
tcctgtactgagctgccccgggt

SEQ ID NO: 46112 - RNA, 27 nt, Synthetic Construct
  source 1..27: mol_type = other RNA
ccccctactgctaaatttgactggctt

SEQ ID NO: 46113 - RNA, 23 nt, Synthetic Construct
  source 1..23: mol_type = other RNA
caaagtgctgttcgtgcgggtag

SEQ ID NO: 46114 - RNA, 23 nt, Synthetic Construct
  source 1..23: mol_type = other RNA
caaagtgctgttcgtgcgggtag

SEQ ID NO: 46115 - RNA, 22 nt, Synthetic Construct
  source 1..22: mol_type = other RNA
tgaggtagtaggttgtatagtc

SEQ ID NO: 46116 - RNA, 22 nt, Synthetic Construct
  source 1..22: mol_type = other RNA
tgaggtagtaggttgtatagtc

SEQ ID NO: 46117 - RNA, 19 nt, Synthetic Construct
  source 1..19: mol_type = other RNA
tcctgtaccgatcaatagt

SEQ ID NO: 46118 - RNA, 19 nt, Synthetic Construct
  source 1..19: mol_type = other RNA
tcctgtaccgatcaatagt

SEQ ID NO: 46119 - RNA, 22 nt, Synthetic Construct
  source 1..22: mol_type = other RNA
ggtagcgaaattccttgtcggg

SEQ ID NO: 46120 - RNA, 36 nt, Synthetic Construct; identical to SEQ ID NO: 2344
  source 1..36: mol_type = other RNA

SEQ ID NO: 46121 - RNA, 36 nt, Synthetic Construct; identical to SEQ ID NO: 2344
  source 1..36: mol_type = other RNA

SEQ ID NO: 46122 - RNA, 22 nt, Synthetic Construct
  source 1..22: mol_type = other RNA
tgaggtagtaggctgtgtggtt

SEQ ID NO: 46123 - RNA, 21 nt, Synthetic Construct
  source 1..21: mol_type = other RNA
ggaggagttcgaaggtacgct

SEQ ID NO: 46124 - RNA, 31 nt, Synthetic Construct; identical to SEQ ID NO: 758
  source 1..31: mol_type = other RNA

SEQ ID NO: 46125 - RNA, 31 nt, Synthetic Construct; identical to SEQ ID NO: 758
  source 1..31: mol_type = other RNA

SEQ ID NO: 46126 - RNA, 22 nt, Synthetic Construct
  source 1..22: mol_type = other RNA
tgaggtggtaggttgtgtggtt

SEQ ID NO: 46127 - RNA, 22 nt, Synthetic Construct
  source 1..22: mol_type = other RNA
tgaggtggtaggttgtgtggtt

SEQ ID NO: 46128 - RNA, 23 nt, Synthetic Construct
  source 1..23: mol_type = other RNA
tggtaatacgacgtacttagcgt

SEQ ID NO: 46129 - RNA, 23 nt, Synthetic Construct
  source 1..23: mol_type = other RNA
tgagaggcagagagcgagacttt

SEQ ID NO: 46130 - RNA, 23 nt, Synthetic Construct
  source 1..23: mol_type = other RNA
tgaggggcagagagcgagactct

SEQ ID NO: 46131 - RNA, 23 nt, Synthetic Construct
  source 1..23: mol_type = other RNA
tgaggggcagagagcgagactct

SEQ ID NO: 46132 - RNA, 21 nt, Synthetic Construct
  source 1..21: mol_type = other RNA
cgtaccgtgagtaataatgca

SEQ ID NO: 46133 - RNA, 15 nt, Synthetic Construct
  source 1..15: mol_type = other RNA
gtccggatcgtagtc

SEQ ID NO: 46134 - RNA, 15 nt, Synthetic Construct
  source 1..15: mol_type = other RNA
gtccggatcgtagtc

SEQ ID NO: 46135 - RNA, 41 nt, Synthetic Construct; identical to SEQ ID NO: 2441
  source 1..41: mol_type = other RNA

SEQ ID NO: 46136 - RNA, 20 nt, Synthetic Construct
  source 1..20: mol_type = other RNA
tgaggtagaaggttgtatag

SEQ ID NO: 46137 - RNA, 20 nt, Synthetic Construct
  source 1..20: mol_type = other RNA
tgaggtagaaggttgtatag

SEQ ID NO: 46138 - RNA, 25 nt, Synthetic Construct
  source 1..25: mol_type = other RNA
agctcactgatcgagtcgtcctgcg

SEQ ID NO: 46139 - RNA, 16 nt, Synthetic Construct
  source 1..16: mol_type = other RNA
ccatgccgcgtgcggg

SEQ ID NO: 46140 - RNA, 16 nt, Synthetic Construct
  source 1..16: mol_type = other RNA
ccatgccgcgtgcggg

SEQ ID NO: 46141 - RNA, 22 nt, Synthetic Construct
  source 1..22: mol_type = other RNA
tgaggtagtaagttgtgtggtt

SEQ ID NO: 46142 - RNA, 21 nt, Synthetic Construct
  source 1..21: mol_type = other RNA
tggggggcagagagcgagact

SEQ ID NO: 46143 - RNA, 21 nt, Synthetic Construct
  source 1..21: mol_type = other RNA
tggggggcagagagcgagact

SEQ ID NO: 46144 - RNA, 15 nt, Synthetic Construct
  source 1..15: mol_type = other RNA
cggcccagactccta

SEQ ID NO: 46145 - RNA, 15 nt, Synthetic Construct
  source 1..15: mol_type = other RNA
cggcccagactccta

SEQ ID NO: 46146 - RNA, 20 nt, Synthetic Construct
  source 1..20: mol_type = other RNA
agctacattgtctgctgggt

SEQ ID NO: 46147 - RNA, 20 nt, Synthetic Construct
  source 1..20: mol_type = other RNA
agctacattgtctgctgggt

SEQ ID NO: 46148 - RNA, 23 nt, Synthetic Construct
  source 1..23: mol_type = other RNA
cgctcacggaaagagaatgaagc

SEQ ID NO: 46149 - RNA, 23 nt, Synthetic Construct
  source 1..23: mol_type = other RNA
cgctcacggaaagagaatgaagc

SEQ ID NO: 46150 - RNA, 21 nt, Synthetic Construct
  source 1..21: mol_type = other RNA
tgaggtagtaggttgtatggt

SEQ ID NO: 46151 - RNA, 21 nt, Synthetic Construct
  source 1..21: mol_type = other RNA
tgaggtagtaggttgtatggt

SEQ ID NO: 46152 - RNA, 36 nt, Synthetic Construct; identical to SEQ ID NO: 2248
  source 1..36: mol_type = other RNA

SEQ ID NO: 46153 - RNA, 23 nt, Synthetic Construct
  source 1..23: mol_type = other RNA
tggtaatacgacgtacttggtgt

SEQ ID NO: 46154 - RNA, 22 nt, Synthetic Construct
  source 1..22: mol_type = other RNA
tgagatagtagattgtatagtt

SEQ ID NO: 46155 - RNA, 22 nt, Synthetic Construct
  source 1..22: mol_type = other RNA
tgagatagtagattgtatagtt

SEQ ID NO: 46156 - RNA, 16 nt, Synthetic Construct
  source 1..16: mol_type = other RNA
gtctacggccatgcca

SEQ ID NO: 46157 - RNA, 23 nt, Synthetic Construct
  source 1..23: mol_type = other RNA
cggtaatacgacgtacttagtgt

SEQ ID NO: 46158 - RNA, 23 nt, Synthetic Construct
  source 1..23: mol_type = other RNA
cggtaatacgacgtacttagtgt

SEQ ID NO: 46159 - RNA, 27 nt, Synthetic Construct
  source 1..27: mol_type = other RNA
ncccccactgctaaatttgactggctt

SEQ ID NO: 46160 - RNA, 27 nt, Synthetic Construct
  source 1..27: mol_type = other RNA
ncccccactgctaaatttgactggctt

SEQ ID NO: 46161 - RNA, 22 nt, Synthetic Construct
  source 1..22: mol_type = other RNA
taacagtctacagccatggtcg

SEQ ID NO: 46162 - RNA, 15 nt, Synthetic Construct
  source 1..15: mol_type = other RNA
acggtcctaaggtag

SEQ ID NO: 46163 - RNA, 27 nt, Synthetic Construct
  source 1..27: mol_type = other RNA
gacttaccaaacctatgcaaactccga

SEQ ID NO: 46164 - RNA, 27 nt, Synthetic Construct
  source 1..27: mol_type = other RNA
gacttaccaaacctatgcaaactccga

SEQ ID NO: 46165 - RNA, 20 nt, Synthetic Construct
  source 1..20: mol_type = other RNA
tgaggtagtaggtcgtgtgg

SEQ ID NO: 46166 - RNA, 20 nt, Synthetic Construct
  source 1..20: mol_type = other RNA
tgaggtagtaggtcgtgtgg

SEQ ID NO: 46167 - RNA, 34 nt, Synthetic Construct; identical to SEQ ID NO: 2553
  source 1..34: mol_type = other RNA

SEQ ID NO: 46168 - RNA, 34 nt, Synthetic Construct; identical to SEQ ID NO: 2553
  source 1..34: mol_type = other RNA

SEQ ID NO: 46169 - RNA, 23 nt, Synthetic Construct
  source 1..23: mol_type = other RNA
tgggctaagggagatgattgggt

SEQ ID NO: 46170 - RNA, 21 nt, Synthetic Construct
  source 1..21: mol_type = other RNA
gttggttcaagcgtgtagtcg

SEQ ID NO: 46171 - RNA, 20 nt, Synthetic Construct
  source 1..20: mol_type = other RNA
cataaagtagaaagcactac

SEQ ID NO: 46172 - RNA, 20 nt, Synthetic Construct
  source 1..20: mol_type = other RNA
cataaagtagaaagcactac

SEQ ID NO: 46173 - RNA, 20 nt, Synthetic Construct
  source 1..20: mol_type = other RNA
ggtcccaagggtatggctgt

SEQ ID NO: 46174 - RNA, 23 nt, Synthetic Construct
  source 1..23: mol_type = other RNA
ccctgtactgagctgccccgagt

SEQ ID NO: 46175 - RNA, 23 nt, Synthetic Construct
  source 1..23: mol_type = other RNA
ccctgtactgagctgccccgagt

SEQ ID NO: 46176 - RNA, 20 nt, Synthetic Construct
  source 1..20: mol_type = other RNA
acccttgtcattagttgcta

SEQ ID NO: 46177 - RNA, 18 nt, Synthetic Construct
  source 1..18: mol_type = other RNA
tgcgtagatatgcggagg

SEQ ID NO: 46178 - RNA, 18 nt, Synthetic Construct
  source 1..18: mol_type = other RNA
tgcgtagatatgcggagg

SEQ ID NO: 46179 - RNA, 19 nt, Synthetic Construct
  source 1..19: mol_type = other RNA
gctattgacgaccgtaccg

SEQ ID NO: 46180 - RNA, 19 nt, Synthetic Construct
  source 1..19: mol_type = other RNA
gctattgacgaccgtaccg

SEQ ID NO: 46181 - RNA, 22 nt, Synthetic Construct
  source 1..22: mol_type = other RNA
tcctgtactaagctgccccgag

SEQ ID NO: 46182 - RNA, 22 nt, Synthetic Construct
  source 1..22: mol_type = other RNA
tcctgtactaagctgccccgag

SEQ ID NO: 46183 - RNA, 17 nt, Synthetic Construct
  source 1..17: mol_type = other RNA
gtcgacgtatagggtgt

SEQ ID NO: 46184 - RNA, 17 nt, Synthetic Construct
  source 1..17: mol_type = other RNA
gtcgacgtatagggtgt

SEQ ID NO: 46185 - RNA, 21 nt, Synthetic Construct
  source 1..21: mol_type = other RNA
tggggtagtaggttgtgtggt

SEQ ID NO: 46186 - RNA, 21 nt, Synthetic Construct
  source 1..21: mol_type = other RNA
tggggtagtaggttgtgtggt

SEQ ID NO: 46187 - RNA, 32 nt, Synthetic Construct; identical to SEQ ID NO: 3541
  source 1..32: mol_type = other RNA

SEQ ID NO: 46188 - RNA, 27 nt, Synthetic Construct
  source 1..27: mol_type = other RNA
ccccccactgctaagtttgactggctt

SEQ ID NO: 46189 - RNA, 27 nt, Synthetic Construct
  source 1..27: mol_type = other RNA
ccccccactgctaagtttgactggctt

SEQ ID NO: 46190 - RNA, 23 nt, Synthetic Construct
  source 1..23: mol_type = other RNA
ggatatcatcatatactgtaagt

SEQ ID NO: 46191 - RNA, 23 nt, Synthetic Construct
  source 1..23: mol_type = other RNA
ggatatcatcatatactgtaagt

SEQ ID NO: 46192 - RNA, 21 nt, Synthetic Construct
  source 1..21: mol_type = other RNA
tgaggtagtagattgtatagc

SEQ ID NO: 46193 - RNA, 16 nt, Synthetic Construct
  source 1..16: mol_type = other RNA
gccagcagccgcggta

SEQ ID NO: 46194 - RNA, 16 nt, Synthetic Construct
  source 1..16: mol_type = other RNA
gccagcagccgcggta

SEQ ID NO: 46195 - RNA, 22 nt, Synthetic Construct
  source 1..22: mol_type = other RNA
taacactgtctggtaacgatgt

SEQ ID NO: 46196 - RNA, 22 nt, Synthetic Construct
  source 1..22: mol_type = other RNA
taacactgtctggtaacgatgt

SEQ ID NO: 46197 - RNA, 22 nt, Synthetic Construct
  source 1..22: mol_type = other RNA
ncgtaccgtgagtaataatgcg

SEQ ID NO: 46198 - RNA, 22 nt, Synthetic Construct
  source 1..22: mol_type = other RNA
ncgtaccgtgagtaataatgcg

SEQ ID NO: 46199 - RNA, 20 nt, Synthetic Construct
  source 1..20: mol_type = other RNA
tccctgtcctccaggagctc

SEQ ID NO: 46200 - RNA, 22 nt, Synthetic Construct
  source 1..22: mol_type = other RNA
gcactctaatgagactgccggt

SEQ ID NO: 46201 - RNA, 22 nt, Synthetic Construct
  source 1..22: mol_type = other RNA
gcactctaatgagactgccggt

SEQ ID NO: 46202 - RNA, 21 nt, Synthetic Construct
  source 1..21: mol_type = other RNA
tgaggtagtaggttgcgtggt

SEQ ID NO: 46203 - RNA, 21 nt, Synthetic Construct
  source 1..21: mol_type = other RNA
tgaggtagtaggttgcgtggt

SEQ ID NO: 46204 - RNA, 21 nt, Synthetic Construct
  source 1..21: mol_type = other RNA
tgaggtagtaggttgtgcggt

SEQ ID NO: 46205 - RNA, 21 nt, Synthetic Construct
  source 1..21: mol_type = other RNA
tgaggtagtaggttgtgcggt

SEQ ID NO: 46206 - RNA, 22 nt, Synthetic Construct
  source 1..22: mol_type = other RNA
tccagtactgagctgccccgag

SEQ ID NO: 46207 - RNA, 22 nt, Synthetic Construct
  source 1..22: mol_type = other RNA
tccagtactgagctgccccgag

SEQ ID NO: 46208 - RNA, 21 nt, Synthetic Construct
  source 1..21: mol_type = other RNA
tcctgtgctgagctgccccga

SEQ ID NO: 46209 - RNA, 21 nt, Synthetic Construct
  source 1..21: mol_type = other RNA
tcctgtgctgagctgccccga

SEQ ID NO: 46210 - RNA, 19 nt, Synthetic Construct
  source 1..19: mol_type = other RNA
cctgtctgaatatgggggg

SEQ ID NO: 46211 - RNA, 17 nt, Synthetic Construct
  source 1..17: mol_type = other RNA
cgaaattccttgtcggg

SEQ ID NO: 46212 - RNA, 23 nt, Synthetic Construct
  source 1..23: mol_type = other RNA
naaagtgctgttcgtgcaggtag

SEQ ID NO: 46213 - RNA, 23 nt, Synthetic Construct
  source 1..23: mol_type = other RNA
naaagtgctgttcgtgcaggtag

SEQ ID NO: 46214 - RNA, 20 nt, Synthetic Construct
  source 1..20: mol_type = other RNA
tgaggtagaaggttgtgtgg

SEQ ID NO: 46215 - RNA, 20 nt, Synthetic Construct
  source 1..20: mol_type = other RNA
tgaggtagaaggttgtgtgg

SEQ ID NO: 46216 - RNA, 30 nt, Synthetic Construct; identical to SEQ ID NO: 5879
  source 1..30: mol_type = other RNA

SEQ ID NO: 46217 - RNA, 30 nt, Synthetic Construct; identical to SEQ ID NO: 5879
  source 1..30: mol_type = other RNA

SEQ ID NO: 46218 - RNA, 22 nt, Synthetic Construct
  source 1..22: mol_type = other RNA
tggaatgcaaagaagtatgtat

SEQ ID NO: 46219 - RNA, 22 nt, Synthetic Construct
  source 1..22: mol_type = other RNA
tggaatgcaaagaagtatgtat

SEQ ID NO: 46220 - RNA, 32 nt, Synthetic Construct; identical to SEQ ID NO: 2850
  source 1..32: mol_type = other RNA

SEQ ID NO: 46221 - RNA, 23 nt, Synthetic Construct
  source 1..23: mol_type = other RNA
tggtaatacgacgtacctagtgt

SEQ ID NO: 46222 - RNA, 23 nt, Synthetic Construct
  source 1..23: mol_type = other RNA
tggtaatacgacgtacctagtgt

SEQ ID NO: 46223 - RNA, 20 nt, Synthetic Construct
  source 1..20: mol_type = other RNA
tgaggtagtaggttgcgtgg

SEQ ID NO: 46224 - RNA, 20 nt, Synthetic Construct
  source 1..20: mol_type = other RNA
tgaggtagtaggttgcgtgg

SEQ ID NO: 46225 - RNA, 15 nt, Synthetic Construct
  source 1..15: mol_type = other RNA
agttgaccgcctggg

SEQ ID NO: 46226 - RNA, 21 nt, Synthetic Construct
  source 1..21: mol_type = other RNA
tggagtgtgacaatggtgttc

SEQ ID NO: 46227 - RNA, 21 nt, Synthetic Construct
  source 1..21: mol_type = other RNA
tggagtgtgacaatggtgttc

SEQ ID NO: 46228 - RNA, 29 nt, Synthetic Construct
  source 1..29: mol_type = other RNA
ttacaggggttcgaatcccctaggggacg

SEQ ID NO: 46229 - RNA, 29 nt, Synthetic Construct
  source 1..29: mol_type = other RNA
ttacaggggttcgaatcccctaggggacg

SEQ ID NO: 46230 - RNA, 22 nt, Synthetic Construct
  source 1..22: mol_type = other RNA
ctccctcgggagggcgcgcggg

SEQ ID NO: 46231 - RNA, 22 nt, Synthetic Construct
  source 1..22: mol_type = other RNA
ctccctcgggagggcgcgcggg

SEQ ID NO: 46232 - RNA, 23 nt, Synthetic Construct
  source 1..23: mol_type = other RNA
tgaggtagtaggttgtgtggtaa

SEQ ID NO: 46233 - RNA, 23 nt, Synthetic Construct
  source 1..23: mol_type = other RNA
tgaggtagtaggttgtgtggtaa

SEQ ID NO: 46234 - RNA, 23 nt, Synthetic Construct
  source 1..23: mol_type = other RNA
tccctggtggtctagtggttagg

SEQ ID NO: 46235 - RNA, 23 nt, Synthetic Construct
  source 1..23: mol_type = other RNA
tccctggtggtctagtggttagg

SEQ ID NO: 46236 - RNA, 22 nt, Synthetic Construct
  source 1..22: mol_type = other RNA
tcacagtgaaccggtctctttt

SEQ ID NO: 46237 - RNA, 23 nt, Synthetic Construct
  source 1..23: mol_type = other RNA
tgaggggcagagggcgagacttt

SEQ ID NO: 46238 - RNA, 15 nt, Synthetic Construct
  source 1..15: mol_type = other RNA
tcagtagctcgagga

SEQ ID NO: 46239 - RNA, 15 nt, Synthetic Construct
  source 1..15: mol_type = other RNA
tcagtagctcgagga

SEQ ID NO: 46240 - RNA, 23 nt, Synthetic Construct
  source 1..23: mol_type = other RNA
tggtaatacgacgtacatagtgt

SEQ ID NO: 46241 - RNA, 23 nt, Synthetic Construct
  source 1..23: mol_type = other RNA
tggtaatacgacgtacatagtgt

SEQ ID NO: 46242 - RNA, 25 nt, Synthetic Construct
  source 1..25: mol_type = other RNA
ttgaggatacgagatcgagacgaca

SEQ ID NO: 46243 - RNA, 44 nt, Synthetic Construct; identical to SEQ ID NO: 5536
  source 1..44: mol_type = other RNA

SEQ ID NO: 46244 - RNA, 44 nt, Synthetic Construct; identical to SEQ ID NO: 5536
  source 1..44: mol_type = other RNA

SEQ ID NO: 46245 - RNA, 16 nt, Synthetic Construct
  source 1..16: mol_type = other RNA
cccaaaggtcgtcggt

SEQ ID NO: 46246 - RNA, 16 nt, Synthetic Construct
  source 1..16: mol_type = other RNA
cccaaaggtcgtcggt

SEQ ID NO: 46247 - RNA, 23 nt, Synthetic Construct
  source 1..23: mol_type = other RNA
ggcggttatgcaagacagaggtg

SEQ ID NO: 46248 - RNA, 16 nt, Synthetic Construct
  source 1..16: mol_type = other RNA
cccctggacctgtact

SEQ ID NO: 46249 - RNA, 27 nt, Synthetic Construct
  source 1..27: mol_type = other RNA
ccccccactgctgaatttgactggctt

SEQ ID NO: 46250 - RNA, 27 nt, Synthetic Construct
  source 1..27: mol_type = other RNA
ccccccactgctgaatttgactggctt

SEQ ID NO: 46251 - RNA, 30 nt, Synthetic Construct; identical to SEQ ID NO: 6467
  source 1..30: mol_type = other RNA

SEQ ID NO: 46252 - RNA, 30 nt, Synthetic Construct; identical to SEQ ID NO: 6467
  source 1..30: mol_type = other RNA

SEQ ID NO: 46253 - RNA, 22 nt, Synthetic Construct
  source 1..22: mol_type = other RNA
tcctatactgagctgccccgag

SEQ ID NO: 46254 - RNA, 22 nt, Synthetic Construct
  source 1..22: mol_type = other RNA
tcctatactgagctgccccgag

SEQ ID NO: 46255 - RNA, 34 nt, Synthetic Construct; identical to SEQ ID NO: 2375
  source 1..34: mol_type = other RNA

SEQ ID NO: 46256 - RNA, 17 nt, Synthetic Construct
  source 1..17: mol_type = other RNA
aagttgaccgcctgggg

SEQ ID NO: 46257 - RNA, 18 nt, Synthetic Construct
  source 1..18: mol_type = other RNA
atcgctagtaatcgcgga

SEQ ID NO: 46258 - RNA, 43 nt, Synthetic Construct; identical to SEQ ID NO: 6202
  source 1..43: mol_type = other RNA

SEQ ID NO: 46259 - RNA, 43 nt, Synthetic Construct; identical to SEQ ID NO: 6202
  source 1..43: mol_type = other RNA

SEQ ID NO: 46260 - RNA, 34 nt, Synthetic Construct; identical to SEQ ID NO: 2298
  source 1..34: mol_type = other RNA

SEQ ID NO: 46261 - RNA, 34 nt, Synthetic Construct; identical to SEQ ID NO: 2298
  source 1..34: mol_type = other RNA

SEQ ID NO: 46262 - RNA, 23 nt, Synthetic Construct
  source 1..23: mol_type = other RNA
tcctgtactgagctgccctgagt

SEQ ID NO: 46263 - RNA, 23 nt, Synthetic Construct
  source 1..23: mol_type = other RNA
tcctgtactgagctgccctgagt

SEQ ID NO: 46264 - RNA, 23 nt, Synthetic Construct
  source 1..23: mol_type = other RNA
ttccccttggggttgtaggacca

SEQ ID NO: 46265 - RNA, 23 nt, Synthetic Construct
  source 1..23: mol_type = other RNA
ttccccttggggttgtaggacca

SEQ ID NO: 46266 - RNA, 22 nt, Synthetic Construct
  source 1..22: mol_type = other RNA
tggaatgtagagaagtatgtat

SEQ ID NO: 46267 - RNA, 22 nt, Synthetic Construct
  source 1..22: mol_type = other RNA
tggaatgtagagaagtatgtat

SEQ ID NO: 46268 - RNA, 15 nt, Synthetic Construct
  source 1..15: mol_type = other RNA
gctttgatccggaga

SEQ ID NO: 46269 - RNA, 15 nt, Synthetic Construct
  source 1..15: mol_type = other RNA
gctttgatccggaga

SEQ ID NO: 46270 - RNA, 22 nt, Synthetic Construct
  source 1..22: mol_type = other RNA
tgaggtagtaggttgtatagta

SEQ ID NO: 46271 - RNA, 22 nt, Synthetic Construct
  source 1..22: mol_type = other RNA
tgaggtagtaggttgtatagta

SEQ ID NO: 46272 - RNA, 25 nt, Synthetic Construct
  source 1..25: mol_type = other RNA
ttgaggatatgagatcgagacgaca

SEQ ID NO: 46273 - RNA, 25 nt, Synthetic Construct
  source 1..25: mol_type = other RNA
ttgaggatatgagatcgagacgaca

SEQ ID NO: 46274 - RNA, 24 nt, Synthetic Construct
  source 1..24: mol_type = other RNA
gggttgtaaaccgcttttgtcagg

SEQ ID NO: 46275 - RNA, 24 nt, Synthetic Construct
  source 1..24: mol_type = other RNA
gggttgtaaaccgcttttgtcagg

SEQ ID NO: 46276 - RNA, 16 nt, Synthetic Construct
  source 1..16: mol_type = other RNA
ccaaggggtcgtgggt

SEQ ID NO: 46277 - RNA, 22 nt, Synthetic Construct
  source 1..22: mol_type = other RNA
tgaggtagtagtttgtgctgat

SEQ ID NO: 46278 - RNA, 22 nt, Synthetic Construct
  source 1..22: mol_type = other RNA
tgaggtagtagtttgtgctgat

SEQ ID NO: 46279 - RNA, 22 nt, Synthetic Construct
  source 1..22: mol_type = other RNA
tcctgtactgagccgccccgag

SEQ ID NO: 46280 - RNA, 22 nt, Synthetic Construct
  source 1..22: mol_type = other RNA
tcctgtactgagccgccccgag

SEQ ID NO: 46281 - RNA, 31 nt, Synthetic Construct; identical to SEQ ID NO: 2293
  source 1..31: mol_type = other RNA

SEQ ID NO: 46282 - RNA, 31 nt, Synthetic Construct; identical to SEQ ID NO: 2293
  source 1..31: mol_type = other RNA

SEQ ID NO: 46283 - RNA, 21 nt, Synthetic Construct
  source 1..21: mol_type = other RNA
gctattgacgaccgtaccgca

SEQ ID NO: 46284 - RNA, 21 nt, Synthetic Construct
  source 1..21: mol_type = other RNA
gctattgacgaccgtaccgca

SEQ ID NO: 46285 - RNA, 25 nt, Synthetic Construct
  source 1..25: mol_type = other RNA
gggttgtaaaccgcttttgtcaggg

SEQ ID NO: 46286 - RNA, 25 nt, Synthetic Construct
  source 1..25: mol_type = other RNA
gggttgtaaaccgcttttgtcaggg

SEQ ID NO: 46287 - RNA, 21 nt, Synthetic Construct
  source 1..21: mol_type = other RNA
tggagcgtgacaatggtgttt

SEQ ID NO: 46288 - RNA, 21 nt, Synthetic Construct
  source 1..21: mol_type = other RNA
tggagcgtgacaatggtgttt

SEQ ID NO: 46289 - RNA, 17 nt, Synthetic Construct
  source 1..17: mol_type = other RNA
gggtctgtagctcagtc

SEQ ID NO: 46290 - RNA, 22 nt, Synthetic Construct
  source 1..22: mol_type = other RNA
ttataatacaacctgataagtg

SEQ ID NO: 46291 - RNA, 27 nt, Synthetic Construct
  source 1..27: mol_type = other RNA
agagcagctaataccgcatacgacctg

SEQ ID NO: 46292 - RNA, 21 nt, Synthetic Construct
  source 1..21: mol_type = other RNA
tggctcagttcagcaggaaca

SEQ ID NO: 46293 - RNA, 23 nt, Synthetic Construct
  source 1..23: mol_type = other RNA
tgaggtagtaggttgcgtggttt

SEQ ID NO: 46294 - RNA, 23 nt, Synthetic Construct
  source 1..23: mol_type = other RNA
tgaggtagtaggttgcgtggttt

SEQ ID NO: 46295 - RNA, 34 nt, Synthetic Construct; identical to SEQ ID NO: 2529
  source 1..34: mol_type = other RNA

SEQ ID NO: 46296 - RNA, 34 nt, Synthetic Construct; identical to SEQ ID NO: 2529
  source 1..34: mol_type = other RNA

SEQ ID NO: 46297 - RNA, 21 nt, Synthetic Construct
  source 1..21: mol_type = other RNA
agaggggcagagagcgagact

SEQ ID NO: 46298 - RNA, 21 nt, Synthetic Construct
  source 1..21: mol_type = other RNA
agaggggcagagagcgagact

SEQ ID NO: 46299 - RNA, 22 nt, Synthetic Construct
  source 1..22: mol_type = other RNA
tgaggtagtaggttgtatagtg

SEQ ID NO: 46300 - RNA, 28 nt, Synthetic Construct
  source 1..28: mol_type = other RNA
cccccccactgctaaatttgactggctt

SEQ ID NO: 46301 - RNA, 23 nt, Synthetic Construct
  source 1..23: mol_type = other RNA
tggaatgtaaagaagtatgtacc

SEQ ID NO: 46302 - RNA, 22 nt, Synthetic Construct
  source 1..22: mol_type = other RNA
cctcgcgcgattggagcggccg

SEQ ID NO: 46303 - RNA, 22 nt, Synthetic Construct
  source 1..22: mol_type = other RNA
cctcgcgcgattggagcggccg

SEQ ID NO: 46304 - RNA, 18 nt, Synthetic Construct
  source 1..18: mol_type = other RNA
tctaatgagactgccggt

SEQ ID NO: 46305 - RNA, 21 nt, Synthetic Construct
  source 1..21: mol_type = other RNA
tggagagtgacaatggtgttt

SEQ ID NO: 46306 - RNA, 21 nt, Synthetic Construct
  source 1..21: mol_type = other RNA
tggagagtgacaatggtgttt

SEQ ID NO: 46307 - RNA, 22 nt, Synthetic Construct
  source 1..22: mol_type = other RNA
tgaagtagtagattgtatagtt

SEQ ID NO: 46308 - RNA, 22 nt, Synthetic Construct
  source 1..22: mol_type = other RNA
tgaagtagtagattgtatagtt

SEQ ID NO: 46309 - RNA, 27 nt, Synthetic Construct
  source 1..27: mol_type = other RNA
ccccccgctgctaaatttgactggcta

SEQ ID NO: 46310 - RNA, 27 nt, Synthetic Construct
  source 1..27: mol_type = other RNA
ccccccgctgctaaatttgactggcta

SEQ ID NO: 46311 - RNA, 21 nt, Synthetic Construct
  source 1..21: mol_type = other RNA
tgaggggcagagagcgaggct

SEQ ID NO: 46312 - RNA, 26 nt, Synthetic Construct
  source 1..26: mol_type = other RNA
atgcgagagtaggacgttgccaggtt

SEQ ID NO: 46313 - RNA, 26 nt, Synthetic Construct
  source 1..26: mol_type = other RNA
atgcgagagtaggacgttgccaggtt

SEQ ID NO: 46314 - RNA, 21 nt, Synthetic Construct
  source 1..21: mol_type = other RNA
tgaggtagcaggttgtatagt

SEQ ID NO: 46315 - RNA, 21 nt, Synthetic Construct
  source 1..21: mol_type = other RNA
tgaggtagcaggttgtatagt

SEQ ID NO: 46316 - RNA, 21 nt, Synthetic Construct
  source 1..21: mol_type = other RNA
tgtagtgtttcctactttatg

SEQ ID NO: 46317 - RNA, 24 nt, Synthetic Construct
  source 1..24: mol_type = other RNA
gtcagtttgtcaaataccccaatt

SEQ ID NO: 46318 - RNA, 24 nt, Synthetic Construct
  source 1..24: mol_type = other RNA
gtcagtttgtcaaataccccaatt

SEQ ID NO: 46319 - RNA, 21 nt, Synthetic Construct
  source 1..21: mol_type = other RNA
tgtagtgtttcctactttatg

SEQ ID NO: 46320 - RNA, 23 nt, Synthetic Construct
  source 1..23: mol_type = other RNA
tcccgtactgagctgccccgaga

SEQ ID NO: 46321 - RNA, 23 nt, Synthetic Construct
  source 1..23: mol_type = other RNA
tcccgtactgagctgccccgaga

SEQ ID NO: 46322 - RNA, 21 nt, Synthetic Construct
  source 1..21: mol_type = other RNA
cgaggggcagagagcgagact

SEQ ID NO: 46323 - RNA, 21 nt, Synthetic Construct
  source 1..21: mol_type = other RNA
cgaggggcagagagcgagact

SEQ ID NO: 46324 - RNA, 20 nt, Synthetic Construct
  source 1..20: mol_type = other RNA
tgaggtagtaggttgtgtgt

SEQ ID NO: 46325 - RNA, 20 nt, Synthetic Construct
  source 1..20: mol_type = other RNA
tgaggtagtaggttgcgtgg

SEQ ID NO: 46326 - RNA, 28 nt, Synthetic Construct
  source 1..28: mol_type = other RNA
ggcagggttcgtgactggggtgaagtcg

SEQ ID NO: 46327 - RNA, 32 nt, Synthetic Construct; identical to SEQ ID NO: 2296
  source 1..32: mol_type = other RNA

SEQ ID NO: 46328 - RNA, 20 nt, Synthetic Construct
  source 1..20: mol_type = other RNA
tgaggtagtgggttgtgtgg

SEQ ID NO: 46329 - RNA, 20 nt, Synthetic Construct
  source 1..20: mol_type = other RNA
tgaggtagtgggttgtgtgg

SEQ ID NO: 46330 - RNA, 22 nt, Synthetic Construct
  source 1..22: mol_type = other RNA
tcctgtactgagctgccccaag

SEQ ID NO: 46331 - RNA, 22 nt, Synthetic Construct
  source 1..22: mol_type = other RNA
tcctgtactgagctgccccaag

SEQ ID NO: 46332 - RNA, 23 nt, Synthetic Construct
  source 1..23: mol_type = other RNA
ccctgtactgagctgccccgaga

SEQ ID NO: 46333 - RNA, 23 nt, Synthetic Construct
  source 1..23: mol_type = other RNA
ccctgtactgagctgccccgaga

SEQ ID NO: 46334 - RNA, 19 nt, Synthetic Construct
  source 1..19: mol_type = other RNA
tcctgtaccgatcaatagt

SEQ ID NO: 46335 - RNA, 30 nt, Synthetic Construct; identical to SEQ ID NO: 2407
  source 1..30: mol_type = other RNA

SEQ ID NO: 46336 - RNA, 30 nt, Synthetic Construct; identical to SEQ ID NO: 2407
  source 1..30: mol_type = other RNA

SEQ ID NO: 46337 - RNA, 16 nt, Synthetic Construct
  source 1..16: mol_type = other RNA
tcgtgacgatagtgca

SEQ ID NO: 46338 - RNA, 16 nt, Synthetic Construct
  source 1..16: mol_type = other RNA
tcgtgacgatagtgca

SEQ ID NO: 46339 - RNA, 23 nt, Synthetic Construct
  source 1..23: mol_type = other RNA
cgaagtgctgttcgtgcaggtag

SEQ ID NO: 46340 - RNA, 23 nt, Synthetic Construct
  source 1..23: mol_type = other RNA
cgaagtgctgttcgtgcaggtag

SEQ ID NO: 46341 - RNA, 36 nt, Synthetic Construct; identical to SEQ ID NO: 2520
  source 1..36: mol_type = other RNA

SEQ ID NO: 46342 - RNA, 36 nt, Synthetic Construct; identical to SEQ ID NO: 2520
  source 1..36: mol_type = other RNA

SEQ ID NO: 46343 - RNA, 22 nt, Synthetic Construct
  source 1..22: mol_type = other RNA
cattgcacttgtctcggtccga

SEQ ID NO: 46344 - RNA, 31 nt, Synthetic Construct; identical to SEQ ID NO: 2310
  source 1..31: mol_type = other RNA

SEQ ID NO: 46345 - RNA, 31 nt, Synthetic Construct; identical to SEQ ID NO: 2310
  source 1..31: mol_type = other RNA

SEQ ID NO: 46346 - RNA, 18 nt, Synthetic Construct
  source 1..18: mol_type = other RNA
ccaaggggtcgtgggttc

SEQ ID NO: 46347 - RNA, 19 nt, Synthetic Construct
  source 1..19: mol_type = other RNA
gggtgcaagcgttaatcgg

SEQ ID NO: 46348 - RNA, 21 nt, Synthetic Construct
  source 1..21: mol_type = other RNA
gtagcgaaattccttgtcggg

SEQ ID NO: 46349 - RNA, 21 nt, Synthetic Construct
  source 1..21: mol_type = other RNA
gtagcgaaattccttgtcggg

SEQ ID NO: 46350 - RNA, 23 nt, Synthetic Construct
  source 1..23: mol_type = other RNA
tggtagtacgacgtacttagtgt

SEQ ID NO: 46351 - RNA, 20 nt, Synthetic Construct
  source 1..20: mol_type = other RNA
cccagtaaacggcggccgta

SEQ ID NO: 46352 - RNA, 20 nt, Synthetic Construct
  source 1..20: mol_type = other RNA
cccagtaaacggcggccgta

SEQ ID NO: 46353 - RNA, 23 nt, Synthetic Construct
  source 1..23: mol_type = other RNA
taaagtgcttatagtgcaggtag

SEQ ID NO: 46354 - RNA, 22 nt, Synthetic Construct
  source 1..22: mol_type = other RNA
tgaggtagtggtttgtgctgtt

SEQ ID NO: 46355 - RNA, 22 nt, Synthetic Construct
  source 1..22: mol_type = other RNA
tgaggtagtggtttgtgctgtt

SEQ ID NO: 46356 - RNA, 22 nt, Synthetic Construct
  source 1..22: mol_type = other RNA
tattgcatttgtcccggcctgt

SEQ ID NO: 46357 - RNA, 22 nt, Synthetic Construct
  source 1..22: mol_type = other RNA
tattgcatttgtcccggcctgt

SEQ ID NO: 46358 - RNA, 25 nt, Synthetic Construct
  source 1..25: mol_type = other RNA
ttggggatatgagatcgagacgaca

SEQ ID NO: 46359 - RNA, 25 nt, Synthetic Construct
  source 1..25: mol_type = other RNA
ttggggatatgagatcgagacgaca

SEQ ID NO: 46360 - RNA, 36 nt, Synthetic Construct; identical to SEQ ID NO: 2456
  source 1..36: mol_type = other RNA

SEQ ID NO: 46361 - RNA, 36 nt, Synthetic Construct; identical to SEQ ID NO: 2456
  source 1..36: mol_type = other RNA

SEQ ID NO: 46362 - RNA, 27 nt, Synthetic Construct
  source 1..27: mol_type = other RNA
ggatttccccttggggttgtaggacca

SEQ ID NO: 46363 - RNA, 27 nt, Synthetic Construct
  source 1..27: mol_type = other RNA
ggatttccccttggggttgtaggacca

SEQ ID NO: 46364 - RNA, 28 nt, Synthetic Construct
  source 1..28: mol_type = other RNA
tccctggtggtctagtggttaggattcg

SEQ ID NO: 46365 - RNA, 28 nt, Synthetic Construct
  source 1..28: mol_type = other RNA
tccctggtggtctagtggttaggattcg

SEQ ID NO: 46366 - RNA, 21 nt, Synthetic Construct
  source 1..21: mol_type = other RNA
cataaagtagaaagcactact

SEQ ID NO: 46367 - RNA, 22 nt, Synthetic Construct
  source 1..22: mol_type = other RNA
tgaggtagtagtttgtggtgtt

SEQ ID NO: 46368 - RNA, 21 nt, Synthetic Construct
  source 1..21: mol_type = other RNA
tgaggtagtaggttgtgtagt

SEQ ID NO: 46369 - RNA, 21 nt, Synthetic Construct
  source 1..21: mol_type = other RNA
tgaggtagtaggttgtgtagt

SEQ ID NO: 46370 - RNA, 15 nt, Synthetic Construct
  source 1..15: mol_type = other RNA
tgcaagtcgaacggt

SEQ ID NO: 46371 - RNA, 21 nt, Synthetic Construct
  source 1..21: mol_type = other RNA
taggtagtttcctgttgttgg

SEQ ID NO: 46372 - RNA, 22 nt, Synthetic Construct
  source 1..22: mol_type = other RNA
tggaacgtaaagaagtatgtat

SEQ ID NO: 46373 - RNA, 22 nt, Synthetic Construct
  source 1..22: mol_type = other RNA
tggaacgtaaagaagtatgtat

SEQ ID NO: 46374 - RNA, 21 nt, Synthetic Construct
  source 1..21: mol_type = other RNA
cactgatcgagtcgtcctgcg

SEQ ID NO: 46375 - RNA, 23 nt, Synthetic Construct
  source 1..23: mol_type = other RNA
ggatatcatcatatactgtaagt

SEQ ID NO: 46376 - RNA, 23 nt, Synthetic Construct
  source 1..23: mol_type = other RNA
ggatatcatcatatactgtaagt

SEQ ID NO: 46377 - RNA, 16 nt, Synthetic Construct
  source 1..16: mol_type = other RNA
ccggaggaaggtgggg

SEQ ID NO: 46378 - RNA, 23 nt, Synthetic Construct
  source 1..23: mol_type = other RNA
caaagtgctgctcgtgcaggtag

SEQ ID NO: 46379 - RNA, 23 nt, Synthetic Construct
  source 1..23: mol_type = other RNA
caaagtgctgctcgtgcaggtag

SEQ ID NO: 46380 - RNA, 22 nt, Synthetic Construct
  source 1..22: mol_type = other RNA
tggaatgtaaaggagtatgtat

SEQ ID NO: 46381 - RNA, 22 nt, Synthetic Construct
  source 1..22: mol_type = other RNA
tggaatgtaaaggagtatgtat

SEQ ID NO: 46382 - RNA, 16 nt, Synthetic Construct
  source 1..16: mol_type = other RNA
agttgaccgcctgggg

SEQ ID NO: 46383 - RNA, 22 nt, Synthetic Construct
  source 1..22: mol_type = other RNA
tgaggtagtaggttgtatagtc

SEQ ID NO: 46384 - RNA, 22 nt, Synthetic Construct
  source 1..22: mol_type = other RNA
tagcagcacgtaaatataggcg

SEQ ID NO: 46385 - RNA, 22 nt, Synthetic Construct
  source 1..22: mol_type = other RNA
tagcagcacgtaaatataggcg

SEQ ID NO: 46386 - RNA, 27 nt, Synthetic Construct
  source 1..27: mol_type = other RNA
ccccccactgctaaatttgactggcct

SEQ ID NO: 46387 - RNA, 23 nt, Synthetic Construct
  source 1..23: mol_type = other RNA
caaagtgccgttcgtgcaggtag

SEQ ID NO: 46388 - RNA, 23 nt, Synthetic Construct
  source 1..23: mol_type = other RNA
caaagtgccgttcgtgcaggtag

SEQ ID NO: 46389 - RNA, 21 nt, Synthetic Construct
  source 1..21: mol_type = other RNA
tcctgtgctgagctgccccga

SEQ ID NO: 46390 - RNA, 21 nt, Synthetic Construct
  source 1..21: mol_type = other RNA
tcctgtgctgagctgccccga

SEQ ID NO: 46391 - RNA, 23 nt, Synthetic Construct
  source 1..23: mol_type = other RNA
tagcagcacgtaaatattggcgt

SEQ ID NO: 46392 - RNA, 23 nt, Synthetic Construct
  source 1..23: mol_type = other RNA
tagcagcacgtaaatattggcgt

SEQ ID NO: 46393 - RNA, 21 nt, Synthetic Construct
  source 1..21: mol_type = other RNA
tcctgtactgagctgccccaa

SEQ ID NO: 46394 - RNA, 21 nt, Synthetic Construct
  source 1..21: mol_type = other RNA
tcctgtactgagctgccccaa

SEQ ID NO: 46395 - RNA, 22 nt, Synthetic Construct
  source 1..22: mol_type = other RNA
aggttccggataagtaagagcc

SEQ ID NO: 46396 - RNA, 22 nt, Synthetic Construct
  source 1..22: mol_type = other RNA
aggttccggataagtaagagcc

SEQ ID NO: 46397 - RNA, 15 nt, Synthetic Construct
  source 1..15: mol_type = other RNA
gtcgacgtatagggt

SEQ ID NO: 46398 - RNA, 15 nt, Synthetic Construct
  source 1..15: mol_type = other RNA
gtcgacgtatagggt

SEQ ID NO: 46399 - RNA, 22 nt, Synthetic Construct
  source 1..22: mol_type = other RNA
tgaggtagtaggttgtgtggat

SEQ ID NO: 46400 - RNA, 22 nt, Synthetic Construct
  source 1..22: mol_type = other RNA
tgaggtagtaggttgtgtggat

SEQ ID NO: 46401 - RNA, 15 nt, Synthetic Construct
  source 1..15: mol_type = other RNA
ggtggctgtagctca

SEQ ID NO: 46402 - RNA, 22 nt, Synthetic Construct
  source 1..22: mol_type = other RNA
tgaggtagtaggttgtgtggct

SEQ ID NO: 46403 - RNA, 20 nt, Synthetic Construct
  source 1..20: mol_type = other RNA
tcagtagctcgaggaaaaga

SEQ ID NO: 46404 - RNA, 20 nt, Synthetic Construct
  source 1..20: mol_type = other RNA
tcagtagctcgaggaaaaga

SEQ ID NO: 46405 - RNA, 23 nt, Synthetic Construct
  source 1..23: mol_type = other RNA
agcagcattgtacagggctatgt

SEQ ID NO: 46406 - RNA, 23 nt, Synthetic Construct
  source 1..23: mol_type = other RNA
agcagcattgtacagggctatgt

SEQ ID NO: 46407 - RNA, 22 nt, Synthetic Construct
  source 1..22: mol_type = other RNA
cggaggagttcgaaggtacgct

SEQ ID NO: 46408 - RNA, 22 nt, Synthetic Construct
  source 1..22: mol_type = other RNA
cggaggagttcgaaggtacgct

SEQ ID NO: 46409 - RNA, 19 nt, Synthetic Construct
  source 1..19: mol_type = other RNA
agtcgacgtatagggtgtg

SEQ ID NO: 46410 - RNA, 19 nt, Synthetic Construct
  source 1..19: mol_type = other RNA
agtcgacgtatagggtgtg

SEQ ID NO: 46411 - RNA, 24 nt, Synthetic Construct
  source 1..24: mol_type = other RNA
tgtaaacatccccggctggaagct

SEQ ID NO: 46412 - RNA, 24 nt, Synthetic Construct
  source 1..24: mol_type = other RNA
tgtaaacatccccggctggaagct

SEQ ID NO: 46413 - RNA, 19 nt, Synthetic Construct
  source 1..19: mol_type = other RNA
acatgcaagtcgaacggta

SEQ ID NO: 46414 - RNA, 19 nt, Synthetic Construct
  source 1..19: mol_type = other RNA
acatgcaagtcgaacggta

SEQ ID NO: 46415 - RNA, 36 nt, Synthetic Construct; identical to SEQ ID NO: 2344
  source 1..36: mol_type = other RNA

SEQ ID NO: 46416 - RNA, 15 nt, Synthetic Construct
  source 1..15: mol_type = other RNA
acccttgtcattagt

SEQ ID NO: 46417 - RNA, 23 nt, Synthetic Construct
  source 1..23: mol_type = other RNA
gtctttgttcgattccgttgagt

SEQ ID NO: 46418 - RNA, 23 nt, Synthetic Construct
  source 1..23: mol_type = other RNA
gtctttgttcgattccgttgagt

SEQ ID NO: 46419 - RNA, 36 nt, Synthetic Construct; identical to SEQ ID NO: 2478
  source 1..36: mol_type = other RNA

SEQ ID NO: 46420 - RNA, 17 nt, Synthetic Construct
  source 1..17: mol_type = other RNA
catgcaagtcgaacggt

SEQ ID NO: 46421 - RNA, 22 nt, Synthetic Construct
  source 1..22: mol_type = other RNA
agtagtgtttcctactttatgg

SEQ ID NO: 46422 - RNA, 23 nt, Synthetic Construct
  source 1..23: mol_type = other RNA
tggggtagtaggttgtgtggttt

SEQ ID NO: 46423 - RNA, 23 nt, Synthetic Construct
  source 1..23: mol_type = other RNA
tggggtagtaggttgtgtggttt

SEQ ID NO: 46424 - RNA, 21 nt, Synthetic Construct
  source 1..21: mol_type = other RNA
cgaggggcagagagcgagact

SEQ ID NO: 46425 - RNA, 22 nt, Synthetic Construct
  source 1..22: mol_type = other RNA
tgaggtagaaggttgtgtggtt

SEQ ID NO: 46426 - RNA, 23 nt, Synthetic Construct
  source 1..23: mol_type = other RNA
tcctgtactgagctgccccgagg

SEQ ID NO: 46427 - RNA, 23 nt, Synthetic Construct
  source 1..23: mol_type = other RNA
tcctgtactgagctgccccgagg

SEQ ID NO: 46428 - RNA, 24 nt, Synthetic Construct
  source 1..24: mol_type = other RNA
tgtagacatccccgactggaagct

SEQ ID NO: 46429 - RNA, 20 nt, Synthetic Construct
  source 1..20: mol_type = other RNA
tcgcgccgtcgggcccgggg

SEQ ID NO: 46430 - RNA, 20 nt, Synthetic Construct
  source 1..20: mol_type = other RNA
tcgcgccgtcgggcccgggg

SEQ ID NO: 46431 - RNA, 22 nt, Synthetic Construct
  source 1..22: mol_type = other RNA
tgaggtagaagattgtatagtt

SEQ ID NO: 46432 - RNA, 22 nt, Synthetic Construct
  source 1..22: mol_type = other RNA
tgaggtagaagattgtatagtt

SEQ ID NO: 46433 - RNA, 28 nt, Synthetic Construct
  source 1..28: mol_type = other RNA
tcccacatggtctagcggttaggattcc

SEQ ID NO: 46434 - RNA, 28 nt, Synthetic Construct
  source 1..28: mol_type = other RNA
tcccacatggtctagcggttaggattcc

SEQ ID NO: 46435 - RNA, 20 nt, Synthetic Construct
  source 1..20: mol_type = other RNA
tgaggtagtaggctgtatag

SEQ ID NO: 46436 - RNA, 20 nt, Synthetic Construct
  source 1..20: mol_type = other RNA
tgaggtagtaggctgtatag

SEQ ID NO: 46437 - RNA, 23 nt, Synthetic Construct
  source 1..23: mol_type = other RNA
tggtaatacgatgtacttagtgt

SEQ ID NO: 46438 - RNA, 36 nt, Synthetic Construct; identical to SEQ ID NO: 2469
  source 1..36: mol_type = other RNA

SEQ ID NO: 46439 - RNA, 36 nt, Synthetic Construct; identical to SEQ ID NO: 2469
  source 1..36: mol_type = other RNA

SEQ ID NO: 46440 - RNA, 16 nt, Synthetic Construct
  source 1..16: mol_type = other RNA
gtctacagccatacca

SEQ ID NO: 46441 - RNA, 37 nt, Synthetic Construct; identical to SEQ ID NO: 2211
  source 1..37: mol_type = other RNA

SEQ ID NO: 46442 - RNA, 15 nt, Synthetic Construct
  source 1..15: mol_type = other RNA
ggccgtcgtcagctc

SEQ ID NO: 46443 - RNA, 26 nt, Synthetic Construct
  source 1..26: mol_type = other RNA
gagcagctaataccgcatacgacctg

SEQ ID NO: 46444 - RNA, 26 nt, Synthetic Construct
  source 1..26: mol_type = other RNA
gagcagctaataccgcatacgacctg

SEQ ID NO: 46445 - RNA, 25 nt, Synthetic Construct
  source 1..25: mol_type = other RNA
ttgaggatatgagatcgagacgacg

SEQ ID NO: 46446 - RNA, 25 nt, Synthetic Construct
  source 1..25: mol_type = other RNA
ttgaggatatgagatcgagacgacg

SEQ ID NO: 46447 - RNA, 19 nt, Synthetic Construct
  source 1..19: mol_type = other RNA
gtccggatcgtagtctgca

SEQ ID NO: 46448 - RNA, 37 nt, Synthetic Construct; identical to SEQ ID NO: 2447
  source 1..37: mol_type = other RNA

SEQ ID NO: 46449 - RNA, 36 nt, Synthetic Construct; identical to SEQ ID NO: 2248
  source 1..36: mol_type = other RNA

SEQ ID NO: 46450 - RNA, 36 nt, Synthetic Construct; identical to SEQ ID NO: 2248
  source 1..36: mol_type = other RNA

SEQ ID NO: 46451 - RNA, 39 nt, Synthetic Construct; identical to SEQ ID NO: 759
  source 1..39: mol_type = other RNA

SEQ ID NO: 46452 - RNA, 39 nt, Synthetic Construct; identical to SEQ ID NO: 759
  source 1..39: mol_type = other RNA

SEQ ID NO: 46453 - RNA, 20 nt, Synthetic Construct
  source 1..20: mol_type = other RNA
tgaggtagtgggttgtatag

SEQ ID NO: 46454 - RNA, 20 nt, Synthetic Construct
  source 1..20: mol_type = other RNA
tgaggtagtgggttgtatag

SEQ ID NO: 46455 - RNA, 23 nt, Synthetic Construct
  source 1..23: mol_type = other RNA
tgaggggcagagagcgagacttc

SEQ ID NO: 46456 - RNA, 36 nt, Synthetic Construct; identical to SEQ ID NO: 2344
  source 1..36: mol_type = other RNA

SEQ ID NO: 46457 - RNA, 23 nt, Synthetic Construct
  source 1..23: mol_type = other RNA
tctttggttatctagctgtatgt

SEQ ID NO: 46458 - RNA, 23 nt, Synthetic Construct
  source 1..23: mol_type = other RNA
tctttggttatctagctgtatgt

SEQ ID NO: 46459 - RNA, 33 nt, Synthetic Construct; identical to SEQ ID NO: 2556
  source 1..33: mol_type = other RNA

SEQ ID NO: 46460 - RNA, 33 nt, Synthetic Construct; identical to SEQ ID NO: 2556
  source 1..33: mol_type = other RNA

SEQ ID NO: 46461 - RNA, 35 nt, Synthetic Construct; identical to SEQ ID NO: 2505
  source 1..35: mol_type = other RNA

SEQ ID NO: 46462 - RNA, 35 nt, Synthetic Construct; identical to SEQ ID NO: 2505
  source 1..35: mol_type = other RNA

SEQ ID NO: 46463 - RNA, 35 nt, Synthetic Construct; identical to SEQ ID NO: 2514
  source 1..35: mol_type = other RNA

SEQ ID NO: 46464 - RNA, 35 nt, Synthetic Construct; identical to SEQ ID NO: 2514
  source 1..35: mol_type = other RNA

SEQ ID NO: 46465 - RNA, 19 nt, Synthetic Construct
  source 1..19: mol_type = other RNA
tagcttatcagactgatgt

SEQ ID NO: 46466 - RNA, 19 nt, Synthetic Construct
  source 1..19: mol_type = other RNA
tagcttatcagactgatgt

SEQ ID NO: 46467 - RNA, 25 nt, Synthetic Construct
  source 1..25: mol_type = other RNA
ggtaaaatggctgagtgaagcattg

SEQ ID NO: 46468 - RNA, 22 nt, Synthetic Construct
  source 1..22: mol_type = other RNA
ggcagggttcgtgactggggtg

SEQ ID NO: 46469 - RNA, 31 nt, Synthetic Construct; identical to SEQ ID NO: 15910
  source 1..31: mol_type = other RNA

SEQ ID NO: 46470 - RNA, 31 nt, Synthetic Construct; identical to SEQ ID NO: 15910
  source 1..31: mol_type = other RNA

SEQ ID NO: 46471 - RNA, 23 nt, Synthetic Construct
  source 1..23: mol_type = other RNA
tggtaatacgacgtacttggtgt

SEQ ID NO: 46472 - RNA, 18 nt, Synthetic Construct
  source 1..18: mol_type = other RNA
tccgacatgcgagggttc

SEQ ID NO: 46473 - RNA, 18 nt, Synthetic Construct
  source 1..18: mol_type = other RNA
tccgacatgcgagggttc

SEQ ID NO: 46474 - RNA, 19 nt, Synthetic Construct
  source 1..19: mol_type = other RNA
cacatgcaagtcgaacggt

SEQ ID NO: 46475 - RNA, 19 nt, Synthetic Construct
  source 1..19: mol_type = other RNA
cacatgcaagtcgaacggt

SEQ ID NO: 46476 - RNA, 31 nt, Synthetic Construct; identical to SEQ ID NO: 285
  source 1..31: mol_type = other RNA

SEQ ID NO: 46477 - RNA, 28 nt, Synthetic Construct
  source 1..28: mol_type = other RNA
tgttggttcaagcgtgtagtcgtgctct

SEQ ID NO: 46478 - RNA, 30 nt, Synthetic Construct; identical to SEQ ID NO: 2353
  source 1..30: mol_type = other RNA

SEQ ID NO: 46479 - RNA, 19 nt, Synthetic Construct
  source 1..19: mol_type = other RNA
ccagtaaacggcggccgta

SEQ ID NO: 46480 - RNA, 19 nt, Synthetic Construct
  source 1..19: mol_type = other RNA
ccagtaaacggcggccgta

SEQ ID NO: 46481 - RNA, 21 nt, Synthetic Construct
  source 1..21: mol_type = other RNA
tggagcgtgacaatggtgttt

SEQ ID NO: 46482 - RNA, 21 nt, Synthetic Construct
  source 1..21: mol_type = other RNA
tggagcgtgacaatggtgttt

SEQ ID NO: 46483 - RNA, 31 nt, Synthetic Construct; identical to SEQ ID NO: 2295
  source 1..31: mol_type = other RNA

SEQ ID NO: 46484 - RNA, 16 nt, Synthetic Construct
  source 1..16: mol_type = other RNA
tcgtgacgatagtgca

SEQ ID NO: 46485 - RNA, 16 nt, Synthetic Construct
  source 1..16: mol_type = other RNA
tcgtgacgatagtgca

SEQ ID NO: 46486 - RNA, 33 nt, Synthetic Construct; identical to SEQ ID NO: 3082
  source 1..33: mol_type = other RNA

SEQ ID NO: 46487 - RNA, 33 nt, Synthetic Construct; identical to SEQ ID NO: 3082
  source 1..33: mol_type = other RNA

SEQ ID NO: 46488 - RNA, 27 nt, Synthetic Construct
  source 1..27: mol_type = other RNA
ccccccactgctaaatctgactggctt

SEQ ID NO: 46489 - RNA, 27 nt, Synthetic Construct
  source 1..27: mol_type = other RNA
ccccccactgctaaatctgactggctt

SEQ ID NO: 46490 - RNA, 22 nt, Synthetic Construct
  source 1..22: mol_type = other RNA
cggctctgggtctgtggggagt

SEQ ID NO: 46491 - RNA, 26 nt, Synthetic Construct
  source 1..26: mol_type = other RNA
tgtcggctcatctcatcctggggctg

SEQ ID NO: 46492 - RNA, 17 nt, Synthetic Construct
  source 1..17: mol_type = other RNA
cctcgcgcgattggagc

SEQ ID NO: 46493 - RNA, 29 nt, Synthetic Construct
  source 1..29: mol_type = other RNA
gtaatggcgggaactctggacagactgcc

SEQ ID NO: 46494 - RNA, 29 nt, Synthetic Construct
  source 1..29: mol_type = other RNA
gtaatggcgggaactctggacagactgcc

SEQ ID NO: 46495 - RNA, 19 nt, Synthetic Construct
  source 1..19: mol_type = other RNA
cttggggttgtaggaccac

SEQ ID NO: 46496 - RNA, 19 nt, Synthetic Construct
  source 1..19: mol_type = other RNA
cttggggttgtaggaccac

SEQ ID NO: 46497 - RNA, 21 nt, Synthetic Construct
  source 1..21: mol_type = other RNA
agcgtgcttgactgcgagact

SEQ ID NO: 46498 - RNA, 22 nt, Synthetic Construct
  source 1..22: mol_type = other RNA
ngaggtagtaggttgtgtggtt

SEQ ID NO: 46499 - RNA, 22 nt, Synthetic Construct
  source 1..22: mol_type = other RNA
ngaggtagtaggttgtgtggtt

SEQ ID NO: 46500 - RNA, 18 nt, Synthetic Construct
  source 1..18: mol_type = other RNA
gtaggtcatcgtcaggct

SEQ ID NO: 46501 - RNA, 18 nt, Synthetic Construct
  source 1..18: mol_type = other RNA
gtaggtcatcgtcaggct

SEQ ID NO: 46502 - RNA, 15 nt, Synthetic Construct
  source 1..15: mol_type = other RNA
cgagtgacgtagtgt

SEQ ID NO: 46503 - RNA, 15 nt, Synthetic Construct
  source 1..15: mol_type = other RNA
cgagtgacgtagtgt

SEQ ID NO: 46504 - RNA, 22 nt, Synthetic Construct
  source 1..22: mol_type = other RNA
tgtgcaaatctatgcaaaactg

SEQ ID NO: 46505 - RNA, 22 nt, Synthetic Construct
  source 1..22: mol_type = other RNA
tgtgcaaatctatgcaaaactg

SEQ ID NO: 46506 - RNA, 32 nt, Synthetic Construct; identical to SEQ ID NO: 3092
  source 1..32: mol_type = other RNA

SEQ ID NO: 46507 - RNA, 32 nt, Synthetic Construct; identical to SEQ ID NO: 3092
  source 1..32: mol_type = other RNA

SEQ ID NO: 46508 - RNA, 23 nt, Synthetic Construct
  source 1..23: mol_type = other RNA
tgaggtagtaggttgtgtggtct

SEQ ID NO: 46509 - RNA, 23 nt, Synthetic Construct
  source 1..23: mol_type = other RNA
tgaggtagtaggttgtgtggtct

SEQ ID NO: 46510 - RNA, 21 nt, Synthetic Construct
  source 1..21: mol_type = other RNA
taactccttaagcgaatctcg

SEQ ID NO: 46511 - RNA, 21 nt, Synthetic Construct
  source 1..21: mol_type = other RNA
taactccttaagcgaatctcg

SEQ ID NO: 46512 - RNA, 17 nt, Synthetic Construct
  source 1..17: mol_type = other RNA
gcgtagatatgcggagg

SEQ ID NO: 46513 - RNA, 17 nt, Synthetic Construct
  source 1..17: mol_type = other RNA
gcgtagatatgcggagg

SEQ ID NO: 46514 - RNA, 23 nt, Synthetic Construct
  source 1..23: mol_type = other RNA
tgaggaagtaggttgtgtggttt

SEQ ID NO: 46515 - RNA, 21 nt, Synthetic Construct
  source 1..21: mol_type = other RNA
gtgggcgtttgaagtgaagtg

SEQ ID NO: 46516 - RNA, 23 nt, Synthetic Construct
  source 1..23: mol_type = other RNA
tggtaatgcgacgtacttagtgt

SEQ ID NO: 46517 - RNA, 19 nt, Synthetic Construct
  source 1..19: mol_type = other RNA
tgtcaactggttgttggga

SEQ ID NO: 46518 - RNA, 32 nt, Synthetic Construct; identical to SEQ ID NO: 4710
  source 1..32: mol_type = other RNA

SEQ ID NO: 46519 - RNA, 21 nt, Synthetic Construct
  source 1..21: mol_type = other RNA
tgaggtagaaggttgtgtggt

SEQ ID NO: 46520 - RNA, 21 nt, Synthetic Construct
  source 1..21: mol_type = other RNA
tgaggtagaaggttgtgtggt

SEQ ID NO: 46521 - RNA, 20 nt, Synthetic Construct
  source 1..20: mol_type = other RNA
tagcgaaattccttgtcggg

SEQ ID NO: 46522 - RNA, 15 nt, Synthetic Construct
  source 1..15: mol_type = other RNA
gcagagcgtcggtct

SEQ ID NO: 46523 - RNA, 15 nt, Synthetic Construct
  source 1..15: mol_type = other RNA
gcagagcgtcggtct

SEQ ID NO: 46524 - RNA, 30 nt, Synthetic Construct; identical to SEQ ID NO: 1641
  source 1..30: mol_type = other RNA

SEQ ID NO: 46525 - RNA, 30 nt, Synthetic Construct; identical to SEQ ID NO: 1641
  source 1..30: mol_type = other RNA

SEQ ID NO: 46526 - RNA, 22 nt, Synthetic Construct
  source 1..22: mol_type = other RNA
tccctgagaccctaacttgtga

SEQ ID NO: 46527 - RNA, 19 nt, Synthetic Construct
  source 1..19: mol_type = other RNA
tgtcagtttgtcaaatacc

SEQ ID NO: 46528 - RNA, 19 nt, Synthetic Construct
  source 1..19: mol_type = other RNA
tgtcagtttgtcaaatacc

SEQ ID NO: 46529 - RNA, 15 nt, Synthetic Construct
  source 1..15: mol_type = other RNA
accggaggaaggtgg

SEQ ID NO: 46530 - RNA, 25 nt, Synthetic Construct
  source 1..25: mol_type = other RNA
ttgaggatgtgagatcgagacgaca

SEQ ID NO: 46531 - RNA, 25 nt, Synthetic Construct
  source 1..25: mol_type = other RNA
ttgaggatgtgagatcgagacgaca

SEQ ID NO: 46532 - RNA, 35 nt, Synthetic Construct; identical to SEQ ID NO: 2397
  source 1..35: mol_type = other RNA

SEQ ID NO: 46533 - RNA, 35 nt, Synthetic Construct; identical to SEQ ID NO: 2397
  source 1..35: mol_type = other RNA

SEQ ID NO: 46534 - RNA, 33 nt, Synthetic Construct; identical to SEQ ID NO: 2479
  source 1..33: mol_type = other RNA

SEQ ID NO: 46535 - RNA, 33 nt, Synthetic Construct; identical to SEQ ID NO: 2479
  source 1..33: mol_type = other RNA

SEQ ID NO: 46536 - RNA, 23 nt, Synthetic Construct
  source 1..23: mol_type = other RNA
tggtaatacgacgtactttgtgt

SEQ ID NO: 46537 - RNA, 23 nt, Synthetic Construct
  source 1..23: mol_type = other RNA
tggtaatacgacgtactttgtgt

SEQ ID NO: 46538 - RNA, 19 nt, Synthetic Construct
  source 1..19: mol_type = other RNA
tggccgtcgtcagctcgtg

SEQ ID NO: 46539 - RNA, 23 nt, Synthetic Construct
  source 1..23: mol_type = other RNA
tgaggggcagggagcgagacttt

SEQ ID NO: 46540 - RNA, 23 nt, Synthetic Construct
  source 1..23: mol_type = other RNA
tgaggggcagggagcgagacttt

SEQ ID NO: 46541 - RNA, 24 nt, Synthetic Construct
  source 1..24: mol_type = other RNA
tcggatccgtctgagcttggcttt

SEQ ID NO: 46542 - RNA, 24 nt, Synthetic Construct
  source 1..24: mol_type = other RNA
tcggatccgtctgagcttggcttt

SEQ ID NO: 46543 - RNA, 20 nt, Synthetic Construct
  source 1..20: mol_type = other RNA
tgaggtagaaggttgtgtgg

SEQ ID NO: 46544 - RNA, 20 nt, Synthetic Construct
  source 1..20: mol_type = other RNA
tgaggtagaaggttgtgtgg

SEQ ID NO: 46545 - RNA, 20 nt, Synthetic Construct
  source 1..20: mol_type = other RNA
gaatcgctagtaatcgcgga

SEQ ID NO: 46546 - RNA, 20 nt, Synthetic Construct
  source 1..20: mol_type = other RNA
tcgcgccgtcgggcccgggg

SEQ ID NO: 46547 - RNA, 20 nt, Synthetic Construct
  source 1..20: mol_type = other RNA
tcgcgccgtcgggcccgggg

SEQ ID NO: 46548 - RNA, 21 nt, Synthetic Construct
  source 1..21: mol_type = other RNA
tgaggtagtagtctgtgctgt

SEQ ID NO: 46549 - RNA, 21 nt, Synthetic Construct
  source 1..21: mol_type = other RNA
tgaggtagtagtctgtgctgt

SEQ ID NO: 46550 - RNA, 22 nt, Synthetic Construct
  source 1..22: mol_type = other RNA
tgttggttcaagcgtgtagtcg

SEQ ID NO: 46551 - RNA, 22 nt, Synthetic Construct
  source 1..22: mol_type = other RNA
tggggtagtaggttgtatagtt

SEQ ID NO: 46552 - RNA, 22 nt, Synthetic Construct
  source 1..22: mol_type = other RNA
tggggtagtaggttgtatagtt

SEQ ID NO: 46553 - RNA, 34 nt, Synthetic Construct; identical to SEQ ID NO: 2291
  source 1..34: mol_type = other RNA

SEQ ID NO: 46554 - RNA, 27 nt, Synthetic Construct
  source 1..27: mol_type = other RNA
ccccccactgctaaatttgattggctt

SEQ ID NO: 46555 - RNA, 16 nt, Synthetic Construct
  source 1..16: mol_type = other RNA
acggcccagactccta

SEQ ID NO: 46556 - RNA, 23 nt, Synthetic Construct
  source 1..23: mol_type = other RNA
tgaggagcagagagcgagacttt

SEQ ID NO: 46557 - RNA, 23 nt, Synthetic Construct
  source 1..23: mol_type = other RNA
tgaggagcagagagcgagacttt

SEQ ID NO: 46558 - RNA, 23 nt, Synthetic Construct
  source 1..23: mol_type = other RNA
tcctgtactgagccgccccgaga

SEQ ID NO: 46559 - RNA, 23 nt, Synthetic Construct
  source 1..23: mol_type = other RNA
tcctgtactgagccgccccgaga

SEQ ID NO: 46560 - RNA, 22 nt, Synthetic Construct
  source 1..22: mol_type = other RNA
gctcacggaaagagaatgaagc

SEQ ID NO: 46561 - RNA, 22 nt, Synthetic Construct
  source 1..22: mol_type = other RNA
ttcaagtaattcaggataggtt

SEQ ID NO: 46562 - RNA, 26 nt, Synthetic Construct
  source 1..26: mol_type = other RNA
gatttccccttggggttgtaggacca

SEQ ID NO: 46563 - RNA, 26 nt, Synthetic Construct
  source 1..26: mol_type = other RNA
gatttccccttggggttgtaggacca

SEQ ID NO: 46564 - RNA, 27 nt, Synthetic Construct
  source 1..27: mol_type = other RNA
agagcagctaataccgcatacgacctg

SEQ ID NO: 46565 - RNA, 27 nt, Synthetic Construct
  source 1..27: mol_type = other RNA
agagcagctaataccgcatacgacctg

SEQ ID NO: 46566 - RNA, 23 nt, Synthetic Construct
  source 1..23: mol_type = other RNA
tcctgcactgagctgccccgagt

SEQ ID NO: 46567 - RNA, 23 nt, Synthetic Construct
  source 1..23: mol_type = other RNA
tcctgcactgagctgccccgagt

SEQ ID NO: 46568 - RNA, 24 nt, Synthetic Construct
  source 1..24: mol_type = other RNA
tagcagcacgtaaatattggcgtt

SEQ ID NO: 46569 - RNA, 24 nt, Synthetic Construct
  source 1..24: mol_type = other RNA
tagcagcacgtaaatattggcgtt

SEQ ID NO: 46570 - RNA, 16 nt, Synthetic Construct
  source 1..16: mol_type = other RNA
gtccacggccatacca

SEQ ID NO: 46571 - RNA, 16 nt, Synthetic Construct
  source 1..16: mol_type = other RNA
gtccacggccatacca

SEQ ID NO: 46572 - RNA, 16 nt, Synthetic Construct
  source 1..16: mol_type = other RNA
gagctgtggatagggg

SEQ ID NO: 46573 - RNA, 16 nt, Synthetic Construct
  source 1..16: mol_type = other RNA
gagctgtggatagggg

SEQ ID NO: 46574 - RNA, 26 nt, Synthetic Construct
  source 1..26: mol_type = other RNA
cgactcttagcggtggatcactcggc

SEQ ID NO: 46575 - RNA, 26 nt, Synthetic Construct
  source 1..26: mol_type = other RNA
cgactcttagcggtggatcactcggc

SEQ ID NO: 46576 - RNA, 23 nt, Synthetic Construct
  source 1..23: mol_type = other RNA
cgctcacggaaagagaatgaagc

SEQ ID NO: 46577 - RNA, 35 nt, Synthetic Construct; identical to SEQ ID NO: 1490
  source 1..35: mol_type = other RNA

SEQ ID NO: 46578 - RNA, 21 nt, Synthetic Construct
  source 1..21: mol_type = other RNA
tgaggaagtaggttgtatagt

SEQ ID NO: 46579 - RNA, 23 nt, Synthetic Construct
  source 1..23: mol_type = other RNA
tggtaatacgacatacttagtgt

SEQ ID NO: 46580 - RNA, 23 nt, Synthetic Construct
  source 1..23: mol_type = other RNA
tggtaatacgacatacttagtgt

SEQ ID NO: 46581 - RNA, 20 nt, Synthetic Construct
  source 1..20: mol_type = other RNA
cgaggtagtaggttgtatag

SEQ ID NO: 46582 - RNA, 20 nt, Synthetic Construct
  source 1..20: mol_type = other RNA
cgaggtagtaggttgtatag

SEQ ID NO: 46583 - RNA, 30 nt, Synthetic Construct; identical to SEQ ID NO: 1958
  source 1..30: mol_type = other RNA

SEQ ID NO: 46584 - RNA, 16 nt, Synthetic Construct
  source 1..16: mol_type = other RNA
ggccgtcgtcagctcg

SEQ ID NO: 46585 - RNA, 16 nt, Synthetic Construct
  source 1..16: mol_type = other RNA
ggccgtcgtcagctcg

SEQ ID NO: 46586 - RNA, 23 nt, Synthetic Construct
  source 1..23: mol_type = other RNA
tggtgatacgacgtacttagtgt

SEQ ID NO: 46587 - RNA, 23 nt, Synthetic Construct
  source 1..23: mol_type = other RNA
tggtgatacgacgtacttagtgt

SEQ ID NO: 46588 - RNA, 22 nt, Synthetic Construct
  source 1..22: mol_type = other RNA
tgaggtagtaggttgtgcggtt

SEQ ID NO: 46589 - RNA, 21 nt, Synthetic Construct
  source 1..21: mol_type = other RNA
tgaggtagtagattgtgtggt

SEQ ID NO: 46590 - RNA, 21 nt, Synthetic Construct
  source 1..21: mol_type = other RNA
tgaggtagtagattgtgtggt

SEQ ID NO: 46591 - RNA, 36 nt, Synthetic Construct; identical to SEQ ID NO: 2366
  source 1..36: mol_type = other RNA

SEQ ID NO: 46592 - RNA, 36 nt, Synthetic Construct; identical to SEQ ID NO: 2366
  source 1..36: mol_type = other RNA

SEQ ID NO: 46593 - RNA, 36 nt, Synthetic Construct; identical to SEQ ID NO: 3596
  source 1..36: mol_type = other RNA

SEQ ID NO: 46594 - RNA, 36 nt, Synthetic Construct; identical to SEQ ID NO: 3596
  source 1..36: mol_type = other RNA

SEQ ID NO: 46595 - RNA, 16 nt, Synthetic Construct
  source 1..16: mol_type = other RNA
cccctggacctgtact

SEQ ID NO: 46596 - RNA, 16 nt, Synthetic Construct
  source 1..16: mol_type = other RNA
cccctggacctgtact

SEQ ID NO: 46597 - RNA, 22 nt, Synthetic Construct
  source 1..22: mol_type = other RNA
cggaatcgctagtaatcgcgga

SEQ ID NO: 46598 - RNA, 24 nt, Synthetic Construct
  source 1..24: mol_type = other RNA
tatatcggaacgtgcccagtcgtg

SEQ ID NO: 46599 - RNA, 24 nt, Synthetic Construct
  source 1..24: mol_type = other RNA
tatatcggaacgtgcccagtcgtg

SEQ ID NO: 46600 - RNA, 18 nt, Synthetic Construct
  source 1..18: mol_type = other RNA
cctcgcgcgattggagcg

SEQ ID NO: 46601 - RNA, 18 nt, Synthetic Construct
  source 1..18: mol_type = other RNA
cctcgcgcgattggagcg

SEQ ID NO: 46602 - RNA, 22 nt, Synthetic Construct
  source 1..22: mol_type = other RNA
tatcggaacgtgcccagtcgtg

SEQ ID NO: 46603 - RNA, 22 nt, Synthetic Construct
  source 1..22: mol_type = other RNA
tatcggaacgtgcccagtcgtg

SEQ ID NO: 46604 - RNA, 22 nt, Synthetic Construct
  source 1..22: mol_type = other RNA
tagcagcacgtaaatatcggcg

SEQ ID NO: 46605 - RNA, 22 nt, Synthetic Construct
  source 1..22: mol_type = other RNA
tagcagcacgtaaatatcggcg

SEQ ID NO: 46606 - RNA, 18 nt, Synthetic Construct
  source 1..18: mol_type = other RNA
gtcgacgtatagggtgtg

SEQ ID NO: 46607 - RNA, 20 nt, Synthetic Construct
  source 1..20: mol_type = other RNA
tgaggtagtaggttgtgtgt

SEQ ID NO: 46608 - RNA, 21 nt, Synthetic Construct
  source 1..21: mol_type = other RNA
tgaggtagtaggctgtgtggt

SEQ ID NO: 46609 - RNA, 21 nt, Synthetic Construct
  source 1..21: mol_type = other RNA
tgaggtagtaggctgtgtggt

SEQ ID NO: 46610 - RNA, 23 nt, Synthetic Construct
  source 1..23: mol_type = other RNA
tcctgtactgagctgccctgaga

SEQ ID NO: 46611 - RNA, 23 nt, Synthetic Construct
  source 1..23: mol_type = other RNA
tcctgtactgagctgccctgaga

SEQ ID NO: 46612 - RNA, 18 nt, Synthetic Construct
  source 1..18: mol_type = other RNA
cccttgtcattagttgct

SEQ ID NO: 46613 - RNA, 18 nt, Synthetic Construct
  source 1..18: mol_type = other RNA
cccttgtcattagttgct

SEQ ID NO: 46614 - RNA, 23 nt, Synthetic Construct
  source 1..23: mol_type = other RNA
tgataatacgacgtacttagtgt

SEQ ID NO: 46615 - RNA, 23 nt, Synthetic Construct
  source 1..23: mol_type = other RNA
tgataatacgacgtacttagtgt

SEQ ID NO: 46616 - RNA, 23 nt, Synthetic Construct
  source 1..23: mol_type = other RNA
tggtaatatgacgtacttagtgt

SEQ ID NO: 46617 - RNA, 21 nt, Synthetic Construct
  source 1..21: mol_type = other RNA
tggggtgtgacaatggtgttt

SEQ ID NO: 46618 - RNA, 21 nt, Synthetic Construct
  source 1..21: mol_type = other RNA
tggggtgtgacaatggtgttt

SEQ ID NO: 46619 - RNA, 21 nt, Synthetic Construct
  source 1..21: mol_type = other RNA
gcccgtgttcggaagattttc

SEQ ID NO: 46620 - RNA, 21 nt, Synthetic Construct
  source 1..21: mol_type = other RNA
gcccgtgttcggaagattttc

SEQ ID NO: 46621 - RNA, 22 nt, Synthetic Construct
  source 1..22: mol_type = other RNA
tgaggcagtaggttgtgtggtt

SEQ ID NO: 46622 - RNA, 22 nt, Synthetic Construct
  source 1..22: mol_type = other RNA
tgaggcagtaggttgtgtggtt

SEQ ID NO: 46623 - RNA, 19 nt, Synthetic Construct
  source 1..19: mol_type = other RNA
acatgcaagtcgaacggta

SEQ ID NO: 46624 - RNA, 19 nt, Synthetic Construct
  source 1..19: mol_type = other RNA
acatgcaagtcgaacggta

SEQ ID NO: 46625 - RNA, 27 nt, Synthetic Construct
  source 1..27: mol_type = other RNA
ccgtgtgaaagtaggtcatcgtcaggc

SEQ ID NO: 46626 - RNA, 22 nt, Synthetic Construct
  source 1..22: mol_type = other RNA
tcctgtactgtgctgccccgag

SEQ ID NO: 46627 - RNA, 22 nt, Synthetic Construct
  source 1..22: mol_type = other RNA
tcctgtactgtgctgccccgag

SEQ ID NO: 46628 - RNA, 23 nt, Synthetic Construct
  source 1..23: mol_type = other RNA
ttcaagtaattcaggataggttt

SEQ ID NO: 46629 - RNA, 22 nt, Synthetic Construct
  source 1..22: mol_type = other RNA
tgaggtagtagattgtgtggtt

SEQ ID NO: 46630 - RNA, 21 nt, Synthetic Construct
  source 1..21: mol_type = other RNA
tcctgtactgagctgccccgg

SEQ ID NO: 46631 - RNA, 24 nt, Synthetic Construct
  source 1..24: mol_type = other RNA
tgatatgtttgatatattaggttg

SEQ ID NO: 46632 - RNA, 39 nt, Synthetic Construct; identical to SEQ ID NO: 759
  source 1..39: mol_type = other RNA

SEQ ID NO: 46633 - RNA, 32 nt, Synthetic Construct; identical to SEQ ID NO: 753
  source 1..32: mol_type = other RNA

SEQ ID NO: 46634 - RNA, 32 nt, Synthetic Construct; identical to SEQ ID NO: 753
  source 1..32: mol_type = other RNA

SEQ ID NO: 46635 - RNA, 18 nt, Synthetic Construct
  source 1..18: mol_type = other RNA
cgtgttcggaagattttc

SEQ ID NO: 46636 - RNA, 18 nt, Synthetic Construct
  source 1..18: mol_type = other RNA
cgtgttcggaagattttc

SEQ ID NO: 46637 - RNA, 23 nt, Synthetic Construct
  source 1..23: mol_type = other RNA
tcccgtactgagctgccccgaga

SEQ ID NO: 46638 - RNA, 23 nt, Synthetic Construct
  source 1..23: mol_type = other RNA
tcccgtactgagctgccccgaga

SEQ ID NO: 46639 - RNA, 32 nt, Synthetic Construct; identical to SEQ ID NO: 2296
  source 1..32: mol_type = other RNA

SEQ ID NO: 46640 - RNA, 32 nt, Synthetic Construct; identical to SEQ ID NO: 2296
  source 1..32: mol_type = other RNA

SEQ ID NO: 46641 - RNA, 23 nt, Synthetic Construct
  source 1..23: mol_type = other RNA
tccctggtggtctagtggttagg

SEQ ID NO: 46642 - RNA, 23 nt, Synthetic Construct
  source 1..23: mol_type = other RNA
tccctggtggtctagtggttagg

SEQ ID NO: 46643 - RNA, 23 nt, Synthetic Construct
  source 1..23: mol_type = other RNA
tggtaatacgacgtgcttagtgt

SEQ ID NO: 46644 - RNA, 21 nt, Synthetic Construct
  source 1..21: mol_type = other RNA
taacactgtctggtaaagatg

SEQ ID NO: 46645 - RNA, 21 nt, Synthetic Construct
  source 1..21: mol_type = other RNA
taacactgtctggtaaagatg

SEQ ID NO: 46646 - RNA, 17 nt, Synthetic Construct
  source 1..17: mol_type = other RNA
cgaaattccttgtcggg

SEQ ID NO: 46647 - RNA, 17 nt, Synthetic Construct
  source 1..17: mol_type = other RNA
cgaaattccttgtcggg

SEQ ID NO: 46648 - RNA, 16 nt, Synthetic Construct
  source 1..16: mol_type = other RNA
gtctacggccatacta

SEQ ID NO: 46649 - RNA, 29 nt, Synthetic Construct
  source 1..29: mol_type = other RNA
cccgtgtgaaagtaggtcatcgtcaggct

SEQ ID NO: 46650 - RNA, 29 nt, Synthetic Construct
  source 1..29: mol_type = other RNA
cccgtgtgaaagtaggtcatcgtcaggct

SEQ ID NO: 46651 - RNA, 23 nt, Synthetic Construct
  source 1..23: mol_type = other RNA
tgaggtggtaggttgtgtggttt

SEQ ID NO: 46652 - RNA, 23 nt, Synthetic Construct
  source 1..23: mol_type = other RNA
tgaggtagtaggttgcgtggttt

SEQ ID NO: 46653 - RNA, 23 nt, Synthetic Construct
  source 1..23: mol_type = other RNA
tgaggtagtaggttgcgtggttt

SEQ ID NO: 46654 - RNA, 16 nt, Synthetic Construct
  source 1..16: mol_type = other RNA
agttgaccgcctgggg

SEQ ID NO: 46655 - RNA, 20 nt, Synthetic Construct
  source 1..20: mol_type = other RNA
tacagtatagatgatgtact

SEQ ID NO: 46656 - RNA, 20 nt, Synthetic Construct
  source 1..20: mol_type = other RNA
tacagtatagatgatgtact

SEQ ID NO: 46657 - RNA, 39 nt, Synthetic Construct; identical to SEQ ID NO: 759
  source 1..39: mol_type = other RNA

SEQ ID NO: 46658 - RNA, 39 nt, Synthetic Construct; identical to SEQ ID NO: 759
  source 1..39: mol_type = other RNA

SEQ ID NO: 46659 - RNA, 24 nt, Synthetic Construct
  source 1..24: mol_type = other RNA
gcagctaataccgcatacgacctg

SEQ ID NO: 46660 - RNA, 24 nt, Synthetic Construct
  source 1..24: mol_type = other RNA
gcagctaataccgcatacgacctg

SEQ ID NO: 46661 - RNA, 21 nt, Synthetic Construct
  source 1..21: mol_type = other RNA
tggggtagtagtttgtgctgt

SEQ ID NO: 46662 - RNA, 21 nt, Synthetic Construct
  source 1..21: mol_type = other RNA
tggggtagtagtttgtgctgt

SEQ ID NO: 46663 - RNA, 30 nt, Synthetic Construct; identical to SEQ ID NO: 2308
  source 1..30: mol_type = other RNA

SEQ ID NO: 46664 - RNA, 30 nt, Synthetic Construct; identical to SEQ ID NO: 2308
  source 1..30: mol_type = other RNA

SEQ ID NO: 46665 - RNA, 28 nt, Synthetic Construct
  source 1..28: mol_type = other RNA
ccccccactgctaaatttggctggcttt

SEQ ID NO: 46666 - RNA, 19 nt, Synthetic Construct
  source 1..19: mol_type = other RNA
cccttgtcattagttgcta

SEQ ID NO: 46667 - RNA, 19 nt, Synthetic Construct
  source 1..19: mol_type = other RNA
cccttgtcattagttgcta

SEQ ID NO: 46668 - RNA, 17 nt, Synthetic Construct
  source 1..17: mol_type = other RNA
ccaaggggtcgtgggtt

SEQ ID NO: 46669 - RNA, 27 nt, Synthetic Construct
  source 1..27: mol_type = other RNA
ccccccactgctaaatttgacaggctt

SEQ ID NO: 46670 - RNA, 21 nt, Synthetic Construct
  source 1..21: mol_type = other RNA
tgaggggcagagagcgagacc

SEQ ID NO: 46671 - RNA, 21 nt, Synthetic Construct
  source 1..21: mol_type = other RNA
tgaggggcagagagcgagacc

SEQ ID NO: 46672 - RNA, 21 nt, Synthetic Construct
  source 1..21: mol_type = other RNA
tgaggtggtaggttgtgtggt

SEQ ID NO: 46673 - RNA, 21 nt, Synthetic Construct
  source 1..21: mol_type = other RNA
tgaggtggtaggttgtgtggt

SEQ ID NO: 46674 - RNA, 20 nt, Synthetic Construct
  source 1..20: mol_type = other RNA
tgaggtagtaggtcgtgtgg

SEQ ID NO: 46675 - RNA, 19 nt, Synthetic Construct
  source 1..19: mol_type = other RNA
tagcttatcagactgatgt

SEQ ID NO: 46676 - RNA, 22 nt, Synthetic Construct
  source 1..22: mol_type = other RNA
atcacattgccagggatttcca

SEQ ID NO: 46677 - RNA, 22 nt, Synthetic Construct
  source 1..22: mol_type = other RNA
atcacattgccagggatttcca

SEQ ID NO: 46678 - RNA, 22 nt, Synthetic Construct
  source 1..22: mol_type = other RNA
tggaatgtaaagaagtatgtgt

SEQ ID NO: 46679 - RNA, 22 nt, Synthetic Construct
  source 1..22: mol_type = other RNA
tggaatgtaaagaagtatgtgt

SEQ ID NO: 46680 - RNA, 30 nt, Synthetic Construct; identical to SEQ ID NO: 1236
  source 1..30: mol_type = other RNA

SEQ ID NO: 46681 - RNA, 30 nt, Synthetic Construct; identical to SEQ ID NO: 1236
  source 1..30: mol_type = other RNA

SEQ ID NO: 46682 - RNA, 21 nt, Synthetic Construct
  source 1..21: mol_type = other RNA
ngaggtagtaggttgtgtggt

SEQ ID NO: 46683 - RNA, 21 nt, Synthetic Construct
  source 1..21: mol_type = other RNA
ngaggtagtaggttgtgtggt

SEQ ID NO: 46684 - RNA, 23 nt, Synthetic Construct
  source 1..23: mol_type = other RNA
gcgtggtaggagagcgttctgta

SEQ ID NO: 46685 - RNA, 23 nt, Synthetic Construct
  source 1..23: mol_type = other RNA
gcgtggtaggagagcgttctgta

SEQ ID NO: 46686 - RNA, 15 nt, Synthetic Construct
  source 1..15: mol_type = other RNA
ggtgaaagcggggga

SEQ ID NO: 46687 - RNA, 15 nt, Synthetic Construct
  source 1..15: mol_type = other RNA
ggtgaaagcggggga

SEQ ID NO: 46688 - RNA, 22 nt, Synthetic Construct
  source 1..22: mol_type = other RNA
tcagcgccgatgatagtgcgga

SEQ ID NO: 46689 - RNA, 20 nt, Synthetic Construct
  source 1..20: mol_type = other RNA
acagtagtctgcacattggt

SEQ ID NO: 46690 - RNA, 20 nt, Synthetic Construct
  source 1..20: mol_type = other RNA
acagtagtctgcacattggt

SEQ ID NO: 46691 - RNA, 15 nt, Synthetic Construct
  source 1..15: mol_type = other RNA
accggaggaaggtgg

SEQ ID NO: 46692 - RNA, 21 nt, Synthetic Construct
  source 1..21: mol_type = other RNA
taaggtagtaggttgtgtggt

SEQ ID NO: 46693 - RNA, 21 nt, Synthetic Construct
  source 1..21: mol_type = other RNA
taaggtagtaggttgtgtggt

SEQ ID NO: 46694 - RNA, 22 nt, Synthetic Construct
  source 1..22: mol_type = other RNA
ggtagcgaaattccttgtcggg

SEQ ID NO: 46695 - RNA, 22 nt, Synthetic Construct
  source 1..22: mol_type = other RNA
ggtagcgaaattccttgtcggg

SEQ ID NO: 46696 - RNA, 23 nt, Synthetic Construct
  source 1..23: mol_type = other RNA
tgtgcaaatctatgcaaaactga

SEQ ID NO: 46697 - RNA, 23 nt, Synthetic Construct
  source 1..23: mol_type = other RNA
tgtgcaaatctatgcaaaactga

SEQ ID NO: 46698 - RNA, 27 nt, Synthetic Construct
  source 1..27: mol_type = other RNA
ccccccactgctaaatttgaccggctt

SEQ ID NO: 46699 - RNA, 23 nt, Synthetic Construct
  source 1..23: mol_type = other RNA
atcacattgccagggatttccat

SEQ ID NO: 46700 - RNA, 23 nt, Synthetic Construct
  source 1..23: mol_type = other RNA
cgaggggcagagagcgagacttt

SEQ ID NO: 46701 - RNA, 27 nt, Synthetic Construct
  source 1..27: mol_type = other RNA
cgtgtgaaagtaggtcatcgtcaggct

SEQ ID NO: 46702 - RNA, 21 nt, Synthetic Construct
  source 1..21: mol_type = other RNA
cgaggtagtagtttgtgctgt

SEQ ID NO: 46703 - RNA, 21 nt, Synthetic Construct
  source 1..21: mol_type = other RNA
cgaggtagtagtttgtgctgt

SEQ ID NO: 46704 - RNA, 23 nt, Synthetic Construct
  source 1..23: mol_type = other RNA
tctctcggctcctcgcggctcgt

SEQ ID NO: 46705 - RNA, 23 nt, Synthetic Construct
  source 1..23: mol_type = other RNA
tctctcggctcctcgcggctcgt

SEQ ID NO: 46706 - RNA, 20 nt, Synthetic Construct
  source 1..20: mol_type = other RNA
caatggccgggacagagggc

SEQ ID NO: 46707 - RNA, 20 nt, Synthetic Construct
  source 1..20: mol_type = other RNA
caatggccgggacagagggc

SEQ ID NO: 46708 - RNA, 21 nt, Synthetic Construct
  source 1..21: mol_type = other RNA
taactccttaagcgaattcgc

SEQ ID NO: 46709 - RNA, 21 nt, Synthetic Construct
  source 1..21: mol_type = other RNA
taactccttaagcgaattcgc

SEQ ID NO: 46710 - RNA, 23 nt, Synthetic Construct
  source 1..23: mol_type = other RNA
tggcaatacgacgtacttagtgt

SEQ ID NO: 46711 - RNA, 23 nt, Synthetic Construct
  source 1..23: mol_type = other RNA
tggcaatacgacgtacttagtgt

SEQ ID NO: 46712 - RNA, 22 nt, Synthetic Construct
  source 1..22: mol_type = other RNA
ccggtcccaagggtatggctgt

SEQ ID NO: 46713 - RNA, 22 nt, Synthetic Construct
  source 1..22: mol_type = other RNA
ccggtcccaagggtatggctgt

SEQ ID NO: 46714 - RNA, 22 nt, Synthetic Construct
  source 1..22: mol_type = other RNA
tcctgtactgagctgctccgag

SEQ ID NO: 46715 - RNA, 22 nt, Synthetic Construct
  source 1..22: mol_type = other RNA
tcctgtactgagctgctccgag

SEQ ID NO: 46716 - RNA, 22 nt, Synthetic Construct
  source 1..22: mol_type = other RNA
tcactgatcgagtcgtcctgcg

SEQ ID NO: 46717 - RNA, 23 nt, Synthetic Construct
  source 1..23: mol_type = other RNA
tggtaatacgacgtacttagtat

SEQ ID NO: 46718 - RNA, 23 nt, Synthetic Construct
  source 1..23: mol_type = other RNA
tggtaatacgacgtacttagtat

SEQ ID NO: 46719 - RNA, 21 nt, Synthetic Construct
  source 1..21: mol_type = other RNA
tgaggtagtaggctgtatagt

SEQ ID NO: 46720 - RNA, 21 nt, Synthetic Construct
  source 1..21: mol_type = other RNA
tgaggtagtaggctgtatagt

SEQ ID NO: 46721 - RNA, 20 nt, Synthetic Construct
  source 1..20: mol_type = other RNA
gctattgacgaccgtaccgc

SEQ ID NO: 46722 - RNA, 20 nt, Synthetic Construct
  source 1..20: mol_type = other RNA
gctattgacgaccgtaccgc

SEQ ID NO: 46723 - RNA, 20 nt, Synthetic Construct
  source 1..20: mol_type = other RNA
tgaggtagtaggttgtgcgg

SEQ ID NO: 46724 - RNA, 22 nt, Synthetic Construct
  source 1..22: mol_type = other RNA
cattgcacttgtctcggtccga

SEQ ID NO: 46725 - RNA, 20 nt, Synthetic Construct
  source 1..20: mol_type = other RNA
cgaggtagtaggttgtatag

SEQ ID NO: 46726 - RNA, 20 nt, Synthetic Construct
  source 1..20: mol_type = other RNA
cgaggtagtaggttgtatag

SEQ ID NO: 46727 - RNA, 21 nt, Synthetic Construct
  source 1..21: mol_type = other RNA
cgtaccgtgagtaataatgca

SEQ ID NO: 46728 - RNA, 21 nt, Synthetic Construct
  source 1..21: mol_type = other RNA
ggaatcgctagtaatcgcgga

SEQ ID NO: 46729 - RNA, 21 nt, Synthetic Construct
  source 1..21: mol_type = other RNA
tagcttatcagactgatgttg

SEQ ID NO: 46730 - RNA, 21 nt, Synthetic Construct
  source 1..21: mol_type = other RNA
tagcttatcagactgatgttg

SEQ ID NO: 46731 - RNA, 23 nt, Synthetic Construct
  source 1..23: mol_type = other RNA
tgaggtagtaggtcgtgtggttt

SEQ ID NO: 46732 - RNA, 23 nt, Synthetic Construct
  source 1..23: mol_type = other RNA
tgaggtagtaggtcgtgtggttt

SEQ ID NO: 46733 - RNA, 25 nt, Synthetic Construct
  source 1..25: mol_type = other RNA
gtgaggatatgagatcgagacgaca

SEQ ID NO: 46734 - RNA, 23 nt, Synthetic Construct
  source 1..23: mol_type = other RNA
tcctgtactgagctaccccgaga

SEQ ID NO: 46735 - RNA, 23 nt, Synthetic Construct
  source 1..23: mol_type = other RNA
tcctgtactgagctaccccgaga

SEQ ID NO: 46736 - RNA, 37 nt, Synthetic Construct; identical to SEQ ID NO: 715
  source 1..37: mol_type = other RNA

SEQ ID NO: 46737 - RNA, 37 nt, Synthetic Construct; identical to SEQ ID NO: 715
  source 1..37: mol_type = other RNA

SEQ ID NO: 46738 - RNA, 21 nt, Synthetic Construct
  source 1..21: mol_type = other RNA
tgaggtaggaggttgtatagt

SEQ ID NO: 46739 - RNA, 22 nt, Synthetic Construct
  source 1..22: mol_type = other RNA
tgaggtagtagattgtgtggtt

SEQ ID NO: 46740 - RNA, 22 nt, Synthetic Construct
  source 1..22: mol_type = other RNA
tgaggtagtagattgtgtggtt

SEQ ID NO: 46741 - RNA, 34 nt, Synthetic Construct; identical to SEQ ID NO: 2298
  source 1..34: mol_type = other RNA

SEQ ID NO: 46742 - RNA, 34 nt, Synthetic Construct; identical to SEQ ID NO: 2298
  source 1..34: mol_type = other RNA

SEQ ID NO: 46743 - RNA, 30 nt, Synthetic Construct; identical to SEQ ID NO: 2578
  source 1..30: mol_type = other RNA

SEQ ID NO: 46744 - RNA, 30 nt, Synthetic Construct; identical to SEQ ID NO: 2578
  source 1..30: mol_type = other RNA

SEQ ID NO: 46745 - RNA, 21 nt, Synthetic Construct
  source 1..21: mol_type = other RNA
gttggttcaagcgtgtagtcg

SEQ ID NO: 46746 - RNA, 21 nt, Synthetic Construct
  source 1..21: mol_type = other RNA
gttggttcaagcgtgtagtcg

SEQ ID NO: 46747 - RNA, 32 nt, Synthetic Construct; identical to SEQ ID NO: 2052
  source 1..32: mol_type = other RNA

SEQ ID NO: 46748 - RNA, 44 nt, Synthetic Construct; identical to SEQ ID NO: 3447
  source 1..44: mol_type = other RNA

SEQ ID NO: 46749 - RNA, 21 nt, Synthetic Construct
  source 1..21: mol_type = other RNA
tgaggtagtagtttgtgctga

SEQ ID NO: 46750 - RNA, 15 nt, Synthetic Construct
  source 1..15: mol_type = other RNA
atccctccgactccg

SEQ ID NO: 46751 - RNA, 15 nt, Synthetic Construct
  source 1..15: mol_type = other RNA
atccctccgactccg

SEQ ID NO: 46752 - RNA, 21 nt, Synthetic Construct
  source 1..21: mol_type = other RNA
tgaggtagtaggttgtatagc

SEQ ID NO: 46753 - RNA, 21 nt, Synthetic Construct
  source 1..21: mol_type = other RNA
tgaggtagtaggttgtatagc

SEQ ID NO: 46754 - RNA, 23 nt, Synthetic Construct
  source 1..23: mol_type = other RNA
tggtaatacaacgtacttagtgt

SEQ ID NO: 46755 - RNA, 23 nt, Synthetic Construct
  source 1..23: mol_type = other RNA
tggtaatacaacgtacttagtgt

SEQ ID NO: 46756 - RNA, 39 nt, Synthetic Construct; identical to SEQ ID NO: 10211
  source 1..39: mol_type = other RNA

SEQ ID NO: 46757 - RNA, 20 nt, Synthetic Construct
  source 1..20: mol_type = other RNA
tgaggtagtaggtcgtatag

SEQ ID NO: 46758 - RNA, 20 nt, Synthetic Construct
  source 1..20: mol_type = other RNA
tgaggtagtaggtcgtatag

SEQ ID NO: 46759 - RNA, 15 nt, Synthetic Construct
  source 1..15: mol_type = other RNA
ttccgaaagtagtgg

SEQ ID NO: 46760 - RNA, 22 nt, Synthetic Construct
  source 1..22: mol_type = other RNA
ngaggtagtagattgtatagtt

SEQ ID NO: 46761 - RNA, 22 nt, Synthetic Construct
  source 1..22: mol_type = other RNA
ngaggtagtagattgtatagtt

SEQ ID NO: 46762 - RNA, 37 nt, Synthetic Construct; identical to SEQ ID NO: 2365
  source 1..37: mol_type = other RNA

SEQ ID NO: 46763 - RNA, 22 nt, Synthetic Construct
  source 1..22: mol_type = other RNA
tgaggtagaagtttgtgctgtt

SEQ ID NO: 46764 - RNA, 31 nt, Synthetic Construct; identical to SEQ ID NO: 1627
  source 1..31: mol_type = other RNA

SEQ ID NO: 46765 - RNA, 31 nt, Synthetic Construct; identical to SEQ ID NO: 1627
  source 1..31: mol_type = other RNA

SEQ ID NO: 46766 - RNA, 15 nt, Synthetic Construct
  source 1..15: mol_type = other RNA
ggtgaaagcggggga

SEQ ID NO: 46767 - RNA, 22 nt, Synthetic Construct
  source 1..22: mol_type = other RNA
tgaggtagtaggttatgtggtt

SEQ ID NO: 46768 - RNA, 22 nt, Synthetic Construct
  source 1..22: mol_type = other RNA
ctttgttcgattccgttgagta

SEQ ID NO: 46769 - RNA, 26 nt, Synthetic Construct
  source 1..26: mol_type = other RNA
ggcgcttgagagaactctggagaagg

SEQ ID NO: 46770 - RNA, 23 nt, Synthetic Construct
  source 1..23: mol_type = other RNA
caaagtgctgtttgtgcaggtag

SEQ ID NO: 46771 - RNA, 23 nt, Synthetic Construct
  source 1..23: mol_type = other RNA
agcagcattgtacagggctatgt

SEQ ID NO: 46772 - RNA, 27 nt, Synthetic Construct
  source 1..27: mol_type = other RNA
ccccccactgctaaatttgattggctt

SEQ ID NO: 46773 - RNA, 27 nt, Synthetic Construct
  source 1..27: mol_type = other RNA
ccccccactgctaaatttgattggctt

SEQ ID NO: 46774 - RNA, 23 nt, Synthetic Construct
  source 1..23: mol_type = other RNA
tggtaatacgacgtacttagtgt

SEQ ID NO: 46775 - RNA, 23 nt, Synthetic Construct
  source 1..23: mol_type = other RNA
tggtaatacgacgtacttagtgt

SEQ ID NO: 46776 - RNA, 36 nt, Synthetic Construct; identical to SEQ ID NO: 2444
  source 1..36: mol_type = other RNA

SEQ ID NO: 46777 - RNA, 32 nt, Synthetic Construct; identical to SEQ ID NO: 770
  source 1..32: mol_type = other RNA

SEQ ID NO: 46778 - RNA, 32 nt, Synthetic Construct; identical to SEQ ID NO: 770
  source 1..32: mol_type = other RNA

SEQ ID NO: 46779 - RNA, 18 nt, Synthetic Construct
  source 1..18: mol_type = other RNA
ctaatgagactgccggtg

SEQ ID NO: 46780 - RNA, 35 nt, Synthetic Construct; identical to SEQ ID NO: 9871
  source 1..35: mol_type = other RNA

SEQ ID NO: 46781 - RNA, 35 nt, Synthetic Construct; identical to SEQ ID NO: 9871
  source 1..35: mol_type = other RNA

SEQ ID NO: 46782 - RNA, 23 nt, Synthetic Construct
  source 1..23: mol_type = other RNA
tgtcagtttgccaaataccccaa

SEQ ID NO: 46783 - RNA, 33 nt, Synthetic Construct; identical to SEQ ID NO: 2395
  source 1..33: mol_type = other RNA

SEQ ID NO: 46784 - RNA, 33 nt, Synthetic Construct; identical to SEQ ID NO: 2395
  source 1..33: mol_type = other RNA

SEQ ID NO: 46785 - RNA, 23 nt, Synthetic Construct
  source 1..23: mol_type = other RNA
tggtaatacgacgtacttagcgt

SEQ ID NO: 46786 - RNA, 23 nt, Synthetic Construct
  source 1..23: mol_type = other RNA
tggtaatacgacgtacttagcgt

SEQ ID NO: 46787 - RNA, 16 nt, Synthetic Construct
  source 1..16: mol_type = other RNA
gagctgtggatagggg

SEQ ID NO: 46788 - RNA, 25 nt, Synthetic Construct
  source 1..25: mol_type = other RNA
ttgaggatatgaggtcgagacgaca

SEQ ID NO: 46789 - RNA, 25 nt, Synthetic Construct
  source 1..25: mol_type = other RNA
ttgaggatatgaggtcgagacgaca

SEQ ID NO: 46790 - RNA, 21 nt, Synthetic Construct
  source 1..21: mol_type = other RNA
tgaggtagtgggttgtgtggt

SEQ ID NO: 46791 - RNA, 21 nt, Synthetic Construct
  source 1..21: mol_type = other RNA
tgaggtagtgggttgtgtggt

SEQ ID NO: 46792 - RNA, 21 nt, Synthetic Construct
  source 1..21: mol_type = other RNA
agagtaggacgttgccaggtt

SEQ ID NO: 46793 - RNA, 21 nt, Synthetic Construct
  source 1..21: mol_type = other RNA
agagtaggacgttgccaggtt

SEQ ID NO: 46794 - RNA, 32 nt, Synthetic Construct; identical to SEQ ID NO: 2086
  source 1..32: mol_type = other RNA

SEQ ID NO: 46795 - RNA, 32 nt, Synthetic Construct; identical to SEQ ID NO: 2086
  source 1..32: mol_type = other RNA

SEQ ID NO: 46796 - RNA, 21 nt, Synthetic Construct
  source 1..21: mol_type = other RNA
tgaggtagtagattgtacagt

SEQ ID NO: 46797 - RNA, 21 nt, Synthetic Construct
  source 1..21: mol_type = other RNA
tgaggtagtagattgtacagt

SEQ ID NO: 46798 - RNA, 21 nt, Synthetic Construct
  source 1..21: mol_type = other RNA
tggagtgcgacaatggtgttt

SEQ ID NO: 46799 - RNA, 21 nt, Synthetic Construct
  source 1..21: mol_type = other RNA
tggagtgcgacaatggtgttt

SEQ ID NO: 46800 - RNA, 23 nt, Synthetic Construct
  source 1..23: mol_type = other RNA
tcctgtaccgagctgccccgagt

SEQ ID NO: 46801 - RNA, 23 nt, Synthetic Construct
  source 1..23: mol_type = other RNA
tcctgtaccgagctgccccgagt

SEQ ID NO: 46802 - RNA, 17 nt, Synthetic Construct
  source 1..17: mol_type = other RNA
gtcgacgtatagggtgt

SEQ ID NO: 46803 - RNA, 20 nt, Synthetic Construct
  source 1..20: mol_type = other RNA
tacagtatagatgatgtact

SEQ ID NO: 46804 - RNA, 20 nt, Synthetic Construct
  source 1..20: mol_type = other RNA
tacagtatagatgatgtact

SEQ ID NO: 46805 - RNA, 22 nt, Synthetic Construct
  source 1..22: mol_type = other RNA
tggagagaaaggcagttcctga

SEQ ID NO: 46806 - RNA, 16 nt, Synthetic Construct
  source 1..16: mol_type = other RNA
gtcaacggccatacca

SEQ ID NO: 46807 - RNA, 15 nt, Synthetic Construct
  source 1..15: mol_type = other RNA
ggccgtcgtcagctc

SEQ ID NO: 46808 - RNA, 22 nt, Synthetic Construct
  source 1..22: mol_type = other RNA
gaagaggacttggaactcgatc

SEQ ID NO: 46809 - RNA, 22 nt, Synthetic Construct
  source 1..22: mol_type = other RNA
gaagaggacttggaactcgatc

SEQ ID NO: 46810 - RNA, 26 nt, Synthetic Construct
  source 1..26: mol_type = other RNA
gatgcgtggtaggagagcgttctgta

SEQ ID NO: 46811 - RNA, 35 nt, Synthetic Construct; identical to SEQ ID NO: 2450
  source 1..35: mol_type = other RNA

SEQ ID NO: 46812 - RNA, 21 nt, Synthetic Construct
  source 1..21: mol_type = other RNA
ttataatacaacctgataagt

SEQ ID NO: 46813 - RNA, 21 nt, Synthetic Construct
  source 1..21: mol_type = other RNA
ttataatacaacctgataagt

SEQ ID NO: 46814 - RNA, 23 nt, Synthetic Construct
  source 1..23: mol_type = other RNA
tggtaatacggcgtacttagtgt

SEQ ID NO: 46815 - RNA, 23 nt, Synthetic Construct
  source 1..23: mol_type = other RNA
tggtaatacggcgtacttagtgt

SEQ ID NO: 46816 - RNA, 18 nt, Synthetic Construct
  source 1..18: mol_type = other RNA
ccaaggggtcgtgggttc

SEQ ID NO: 46817 - RNA, 22 nt, Synthetic Construct
  source 1..22: mol_type = other RNA
tgaagtagtagtttgtgctgtt

SEQ ID NO: 46818 - RNA, 22 nt, Synthetic Construct
  source 1..22: mol_type = other RNA
tgaagtagtagtttgtgctgtt

SEQ ID NO: 46819 - RNA, 15 nt, Synthetic Construct
  source 1..15: mol_type = other RNA
gagtagggcgggaca

SEQ ID NO: 46820 - RNA, 19 nt, Synthetic Construct
  source 1..19: mol_type = other RNA
cgcgacctcagatcagacg

SEQ ID NO: 46821 - RNA, 19 nt, Synthetic Construct
  source 1..19: mol_type = other RNA
cgcgacctcagatcagacg

SEQ ID NO: 46822 - RNA, 23 nt, Synthetic Construct
  source 1..23: mol_type = other RNA
tggaatgtaaagaagtatgtata

SEQ ID NO: 46823 - RNA, 23 nt, Synthetic Construct
  source 1..23: mol_type = other RNA
tggaatgtaaagaagtatgtata

SEQ ID NO: 46824 - RNA, 23 nt, Synthetic Construct
  source 1..23: mol_type = other RNA
tgaggggcagggagcgagacttt

SEQ ID NO: 46825 - RNA, 23 nt, Synthetic Construct
  source 1..23: mol_type = other RNA
tgaggggcagggagcgagacttt

SEQ ID NO: 46826 - RNA, 21 nt, Synthetic Construct
  source 1..21: mol_type = other RNA
cgaggtagtagtttgtgctgt

SEQ ID NO: 46827 - RNA, 21 nt, Synthetic Construct
  source 1..21: mol_type = other RNA
cgaggtagtagtttgtgctgt

SEQ ID NO: 46828 - RNA, 18 nt, Synthetic Construct
  source 1..18: mol_type = other RNA
agggaacgtgagctgggt

SEQ ID NO: 46829 - RNA, 18 nt, Synthetic Construct
  source 1..18: mol_type = other RNA
agggaacgtgagctgggt

SEQ ID NO: 46830 - RNA, 34 nt, Synthetic Construct; identical to SEQ ID NO: 2367
  source 1..34: mol_type = other RNA

SEQ ID NO: 46831 - RNA, 21 nt, Synthetic Construct
  source 1..21: mol_type = other RNA
tgaggggcagagagcgagaca

SEQ ID NO: 46832 - RNA, 22 nt, Synthetic Construct
  source 1..22: mol_type = other RNA
tccagtactgagctgccccgag

SEQ ID NO: 46833 - RNA, 22 nt, Synthetic Construct
  source 1..22: mol_type = other RNA
tccagtactgagctgccccgag

SEQ ID NO: 46834 - RNA, 19 nt, Synthetic Construct
  source 1..19: mol_type = other RNA
cacatgcaagtcgaacggt

SEQ ID NO: 46835 - RNA, 22 nt, Synthetic Construct
  source 1..22: mol_type = other RNA
tgaggtagtagattgtatagct

SEQ ID NO: 46836 - RNA, 22 nt, Synthetic Construct
  source 1..22: mol_type = other RNA
tgaggtagtagattgtatagct

SEQ ID NO: 46837 - RNA, 22 nt, Synthetic Construct
  source 1..22: mol_type = other RNA
ctttgttcgattccgttgagta

SEQ ID NO: 46838 - RNA, 18 nt, Synthetic Construct
  source 1..18: mol_type = other RNA
cagcactctgcaaagacg

SEQ ID NO: 46839 - RNA, 26 nt, Synthetic Construct
  source 1..26: mol_type = other RNA
gaggaacactagtggcgtaggcgaga

SEQ ID NO: 46840 - RNA, 26 nt, Synthetic Construct
  source 1..26: mol_type = other RNA
gaggaacactagtggcgtaggcgaga

SEQ ID NO: 46841 - RNA, 17 nt, Synthetic Construct
  source 1..17: mol_type = other RNA
tggccgggacagagggc

SEQ ID NO: 46842 - RNA, 19 nt, Synthetic Construct
  source 1..19: mol_type = other RNA
aacagtcaggatgttggct

SEQ ID NO: 46843 - RNA, 17 nt, Synthetic Construct
  source 1..17: mol_type = other RNA
cacggcccagactccta

SEQ ID NO: 46844 - RNA, 20 nt, Synthetic Construct
  source 1..20: mol_type = other RNA
tgaggtggtaggttgtgtgg

SEQ ID NO: 46845 - RNA, 25 nt, Synthetic Construct
  source 1..25: mol_type = other RNA
cctcgcgcgattggagcggccgata

SEQ ID NO: 46846 - RNA, 25 nt, Synthetic Construct
  source 1..25: mol_type = other RNA
cctcgcgcgattggagcggccgata

SEQ ID NO: 46847 - RNA, 18 nt, Synthetic Construct
  source 1..18: mol_type = other RNA
tcccaagggtatggctgt

SEQ ID NO: 46848 - RNA, 18 nt, Synthetic Construct
  source 1..18: mol_type = other RNA
tcccaagggtatggctgt

SEQ ID NO: 46849 - RNA, 16 nt, Synthetic Construct
  source 1..16: mol_type = other RNA
ctcagtagctcgagga

SEQ ID NO: 46850 - RNA, 16 nt, Synthetic Construct
  source 1..16: mol_type = other RNA
ctcagtagctcgagga

SEQ ID NO: 46851 - RNA, 22 nt, Synthetic Construct
  source 1..22: mol_type = other RNA
tcctgtactgagctgccccaag

SEQ ID NO: 46852 - RNA, 22 nt, Synthetic Construct
  source 1..22: mol_type = other RNA
tcctgtactgagctgccccaag

SEQ ID NO: 46853 - RNA, 26 nt, Synthetic Construct
  source 1..26: mol_type = other RNA
ccccccactgctaatttgactggctt

SEQ ID NO: 46854 - RNA, 26 nt, Synthetic Construct
  source 1..26: mol_type = other RNA
ccccccactgctaatttgactggctt

SEQ ID NO: 46855 - RNA, 15 nt, Synthetic Construct
  source 1..15: mol_type = other RNA
atccctccgactccg

SEQ ID NO: 46856 - RNA, 23 nt, Synthetic Construct
  source 1..23: mol_type = other RNA
caaagtgctgtccgtgcaggtag

SEQ ID NO: 46857 - RNA, 23 nt, Synthetic Construct
  source 1..23: mol_type = other RNA
caaagtgctgtccgtgcaggtag

SEQ ID NO: 46858 - RNA, 22 nt, Synthetic Construct
  source 1..22: mol_type = other RNA
tggagtgtaaagaagtatgtat

SEQ ID NO: 46859 - RNA, 22 nt, Synthetic Construct
  source 1..22: mol_type = other RNA
tggagtgtaaagaagtatgtat

SEQ ID NO: 46860 - RNA, 24 nt, Synthetic Construct
  source 1..24: mol_type = other RNA
tagcagcacgtaaatattggcgtt

SEQ ID NO: 46861 - RNA, 24 nt, Synthetic Construct
  source 1..24: mol_type = other RNA
tagcagcacgtaaatattggcgtt

SEQ ID NO: 46862 - RNA, 23 nt, Synthetic Construct
  source 1..23: mol_type = other RNA
tgaggtagtgggttgtgtggttt

SEQ ID NO: 46863 - RNA, 23 nt, Synthetic Construct
  source 1..23: mol_type = other RNA
tgaggtagtgggttgtgtggttt

SEQ ID NO: 46864 - RNA, 20 nt, Synthetic Construct
  source 1..20: mol_type = other RNA
gctattgacgaccgtaccgc

SEQ ID NO: 46865 - RNA, 32 nt, Synthetic Construct; identical to SEQ ID NO: 2798
  source 1..32: mol_type = other RNA

SEQ ID NO: 46866 - RNA, 19 nt, Synthetic Construct
  source 1..19: mol_type = other RNA
gggtgcaagcgttaatcgg

SEQ ID NO: 46867 - RNA, 23 nt, Synthetic Construct
  source 1..23: mol_type = other RNA
tagcagcacgtaaatattggcgt

SEQ ID NO: 46868 - RNA, 21 nt, Synthetic Construct
  source 1..21: mol_type = other RNA
tgaggtagtaggttgtgtgat

SEQ ID NO: 46869 - RNA, 21 nt, Synthetic Construct
  source 1..21: mol_type = other RNA
tgaggtagtaggttgtgtgat

SEQ ID NO: 46870 - RNA, 17 nt, Synthetic Construct
  source 1..17: mol_type = other RNA
ccagtaaacggcggccg

SEQ ID NO: 46871 - RNA, 17 nt, Synthetic Construct
  source 1..17: mol_type = other RNA
ctaatgagactgccggt

SEQ ID NO: 46872 - RNA, 18 nt, Synthetic Construct
  source 1..18: mol_type = other RNA
atcgctagtaatcgcgga

SEQ ID NO: 46873 - RNA, 18 nt, Synthetic Construct
  source 1..18: mol_type = other RNA
atcgctagtaatcgcgga

SEQ ID NO: 46874 - RNA, 15 nt, Synthetic Construct
  source 1..15: mol_type = other RNA
gtccggcccgaggca

SEQ ID NO: 46875 - RNA, 27 nt, Synthetic Construct
  source 1..27: mol_type = other RNA
gctttacattggactttgaacagatct

SEQ ID NO: 46876 - RNA, 21 nt, Synthetic Construct
  source 1..21: mol_type = other RNA
tgaggtagtgggttgtatagt

SEQ ID NO: 46877 - RNA, 21 nt, Synthetic Construct
  source 1..21: mol_type = other RNA
tgaggtagtgggttgtatagt

SEQ ID NO: 46878 - RNA, 36 nt, Synthetic Construct; identical to SEQ ID NO: 2520
  source 1..36: mol_type = other RNA

SEQ ID NO: 46879 - RNA, 25 nt, Synthetic Construct
  source 1..25: mol_type = other RNA
ttgaggatatgagatcgggacgaca

SEQ ID NO: 46880 - RNA, 15 nt, Synthetic Construct
  source 1..15: mol_type = other RNA
tcctgacggccatag

SEQ ID NO: 46881 - RNA, 23 nt, Synthetic Construct
  source 1..23: mol_type = other RNA
tagtaatacgacgtacttagtgt

SEQ ID NO: 46882 - RNA, 23 nt, Synthetic Construct
  source 1..23: mol_type = other RNA
tagtaatacgacgtacttagtgt

SEQ ID NO: 46883 - RNA, 21 nt, Synthetic Construct
  source 1..21: mol_type = other RNA
tggagtgcgacaatggtgttt

SEQ ID NO: 46884 - RNA, 21 nt, Synthetic Construct
  source 1..21: mol_type = other RNA
tggagtgcgacaatggtgttt

SEQ ID NO: 46885 - RNA, 21 nt, Synthetic Construct
  source 1..21: mol_type = other RNA
tgaggtagtagcttgtgctgt

SEQ ID NO: 46886 - RNA, 17 nt, Synthetic Construct
  source 1..17: mol_type = other RNA
gcggctgtagctcagtt

SEQ ID NO: 46887 - RNA, 21 nt, Synthetic Construct
  source 1..21: mol_type = other RNA
tgaggggcagagagcgagacc

SEQ ID NO: 46888 - RNA, 21 nt, Synthetic Construct
  source 1..21: mol_type = other RNA
tgaggggcagagagcgagacc

SEQ ID NO: 46889 - RNA, 21 nt, Synthetic Construct
  source 1..21: mol_type = other RNA
tgaggtagtaggtcgtatagt

SEQ ID NO: 46890 - RNA, 21 nt, Synthetic Construct
  source 1..21: mol_type = other RNA
tgaggtagtaggtcgtatagt

SEQ ID NO: 46891 - RNA, 21 nt, Synthetic Construct
  source 1..21: mol_type = other RNA
gaagaggacttggaactcgat

SEQ ID NO: 46892 - RNA, 21 nt, Synthetic Construct
  source 1..21: mol_type = other RNA
gaagaggacttggaactcgat

SEQ ID NO: 46893 - RNA, 16 nt, Synthetic Construct
  source 1..16: mol_type = other RNA
ccggaggaaggtgggg

SEQ ID NO: 46894 - RNA, 16 nt, Synthetic Construct
  source 1..16: mol_type = other RNA
ccggaggaaggtgggg

SEQ ID NO: 46895 - RNA, 31 nt, Synthetic Construct; identical to SEQ ID NO: 2215
  source 1..31: mol_type = other RNA

SEQ ID NO: 46896 - RNA, 31 nt, Synthetic Construct; identical to SEQ ID NO: 2215
  source 1..31: mol_type = other RNA

SEQ ID NO: 46897 - RNA, 23 nt, Synthetic Construct
  source 1..23: mol_type = other RNA
tgtagtgtttcctactttatggt

SEQ ID NO: 46898 - RNA, 26 nt, Synthetic Construct
  source 1..26: mol_type = other RNA
ccccccactgctaatttgactggctt

SEQ ID NO: 46899 - RNA, 26 nt, Synthetic Construct
  source 1..26: mol_type = other RNA
ccccccactgctaatttgactggctt

SEQ ID NO: 46900 - RNA, 23 nt, Synthetic Construct
  source 1..23: mol_type = other RNA
ctcactgatcgagtcgtcctgcg

SEQ ID NO: 46901 - RNA, 22 nt, Synthetic Construct
  source 1..22: mol_type = other RNA
ccccttggggttgtaggaccac

SEQ ID NO: 46902 - RNA, 22 nt, Synthetic Construct
  source 1..22: mol_type = other RNA
ccccttggggttgtaggaccac

SEQ ID NO: 46903 - RNA, 16 nt, Synthetic Construct
  source 1..16: mol_type = other RNA
caggacggtggccatg

SEQ ID NO: 46904 - RNA, 16 nt, Synthetic Construct
  source 1..16: mol_type = other RNA
caggacggtggccatg

SEQ ID NO: 46905 - RNA, 23 nt, Synthetic Construct
  source 1..23: mol_type = other RNA
tgaggtagtaggttgtgtggctt

SEQ ID NO: 46906 - RNA, 23 nt, Synthetic Construct
  source 1..23: mol_type = other RNA
tgaggtagtaggttgtgtggctt

SEQ ID NO: 46907 - RNA, 23 nt, Synthetic Construct
  source 1..23: mol_type = other RNA
tggtgatacgacgtacttagtgt

SEQ ID NO: 46908 - RNA, 23 nt, Synthetic Construct
  source 1..23: mol_type = other RNA
taaggggcagagagcgagacttt

SEQ ID NO: 46909 - RNA, 23 nt, Synthetic Construct
  source 1..23: mol_type = other RNA
taaggggcagagagcgagacttt

SEQ ID NO: 46910 - RNA, 22 nt, Synthetic Construct
  source 1..22: mol_type = other RNA
ggcagggttcgtgactggggtg

SEQ ID NO: 46911 - RNA, 22 nt, Synthetic Construct
  source 1..22: mol_type = other RNA
ggcagggttcgtgactggggtg

SEQ ID NO: 46912 - RNA, 35 nt, Synthetic Construct; identical to SEQ ID NO: 2354
  source 1..35: mol_type = other RNA

SEQ ID NO: 46913 - RNA, 24 nt, Synthetic Construct
  source 1..24: mol_type = other RNA
tgtaaacacccccgactggaagct

SEQ ID NO: 46914 - RNA, 24 nt, Synthetic Construct
  source 1..24: mol_type = other RNA
tgtaaacacccccgactggaagct

SEQ ID NO: 46915 - RNA, 23 nt, Synthetic Construct
  source 1..23: mol_type = other RNA
tggtaatacggcgtacttagtgt

SEQ ID NO: 46916 - RNA, 16 nt, Synthetic Construct
  source 1..16: mol_type = other RNA
gtctacggccatacaa

SEQ ID NO: 46917 - RNA, 16 nt, Synthetic Construct
  source 1..16: mol_type = other RNA
gtctacggccatacaa

SEQ ID NO: 46918 - RNA, 35 nt, Synthetic Construct; identical to SEQ ID NO: 3369
  source 1..35: mol_type = other RNA

SEQ ID NO: 46919 - RNA, 23 nt, Synthetic Construct
  source 1..23: mol_type = other RNA
tagcttatcagactgatgttgaa

SEQ ID NO: 46920 - RNA, 23 nt, Synthetic Construct
  source 1..23: mol_type = other RNA
tagcttatcagactgatgttgaa

SEQ ID NO: 46921 - RNA, 22 nt, Synthetic Construct
  source 1..22: mol_type = other RNA
tgaggtagtagtttgtgctatt

SEQ ID NO: 46922 - RNA, 22 nt, Synthetic Construct
  source 1..22: mol_type = other RNA
tgaggtagtagtttgtgctatt

SEQ ID NO: 46923 - RNA, 30 nt, Synthetic Construct; identical to SEQ ID NO: 2840
  source 1..30: mol_type = other RNA

SEQ ID NO: 46924 - RNA, 37 nt, Synthetic Construct; identical to SEQ ID NO: 2211
  source 1..37: mol_type = other RNA

SEQ ID NO: 46925 - RNA, 37 nt, Synthetic Construct; identical to SEQ ID NO: 2211
  source 1..37: mol_type = other RNA

SEQ ID NO: 46926 - RNA, 25 nt, Synthetic Construct
  source 1..25: mol_type = other RNA
aaaccgttaccattactgagtttag

SEQ ID NO: 46927 - RNA, 25 nt, Synthetic Construct
  source 1..25: mol_type = other RNA
aaaccgttaccattactgagtttag

SEQ ID NO: 46928 - RNA, 16 nt, Synthetic Construct
  source 1..16: mol_type = other RNA
gtctacggccatacaa

SEQ ID NO: 46929 - RNA, 16 nt, Synthetic Construct
  source 1..16: mol_type = other RNA
gtctacggccatacaa

SEQ ID NO: 46930 - RNA, 23 nt, Synthetic Construct
  source 1..23: mol_type = other RNA
tggtaatacgacgtacttagtgc

SEQ ID NO: 46931 - RNA, 18 nt, Synthetic Construct
  source 1..18: mol_type = other RNA
tcctgtactgagctgccc

SEQ ID NO: 46932 - RNA, 18 nt, Synthetic Construct
  source 1..18: mol_type = other RNA
tcctgtactgagctgccc

SEQ ID NO: 46933 - RNA, 22 nt, Synthetic Construct
  source 1..22: mol_type = other RNA
ttgtaccgtgagtaataatgcg

SEQ ID NO: 46934 - RNA, 22 nt, Synthetic Construct
  source 1..22: mol_type = other RNA
cgaggtagtaggttgtatagtt

SEQ ID NO: 46935 - RNA, 22 nt, Synthetic Construct
  source 1..22: mol_type = other RNA
cgaggtagtaggttgtatagtt

SEQ ID NO: 46936 - RNA, 23 nt, Synthetic Construct
  source 1..23: mol_type = other RNA
tgaggggcagagagcgagacctt

SEQ ID NO: 46937 - RNA, 23 nt, Synthetic Construct
  source 1..23: mol_type = other RNA
tgaggggcagagagcgagacctt

SEQ ID NO: 46938 - RNA, 16 nt, Synthetic Construct
  source 1..16: mol_type = other RNA
gtctacagccatacca

SEQ ID NO: 46939 - RNA, 16 nt, Synthetic Construct
  source 1..16: mol_type = other RNA
gtctacagccatacca

SEQ ID NO: 46940 - RNA, 18 nt, Synthetic Construct
  source 1..18: mol_type = other RNA
accggaggaaggtgggga

SEQ ID NO: 46941 - RNA, 22 nt, Synthetic Construct
  source 1..22: mol_type = other RNA
tgaggtagtaggttgagtggtt

SEQ ID NO: 46942 - RNA, 22 nt, Synthetic Construct
  source 1..22: mol_type = other RNA
tgaggtagtaggttgagtggtt

SEQ ID NO: 46943 - RNA, 22 nt, Synthetic Construct
  source 1..22: mol_type = other RNA
tggaatgtaaagaagtacgtat

SEQ ID NO: 46944 - RNA, 22 nt, Synthetic Construct
  source 1..22: mol_type = other RNA
tggaatgtaaagaagtacgtat

SEQ ID NO: 46945 - RNA, 23 nt, Synthetic Construct
  source 1..23: mol_type = other RNA
ttcaagtaatccaggataggctt

SEQ ID NO: 46946 - RNA, 23 nt, Synthetic Construct
  source 1..23: mol_type = other RNA
ttcaagtaatccaggataggctt

SEQ ID NO: 46947 - RNA, 23 nt, Synthetic Construct
  source 1..23: mol_type = other RNA
tgagaggcagagagcgagacttt

SEQ ID NO: 46948 - RNA, 23 nt, Synthetic Construct
  source 1..23: mol_type = other RNA
tgagaggcagagagcgagacttt

SEQ ID NO: 46949 - RNA, 20 nt, Synthetic Construct
  source 1..20: mol_type = other RNA
ttggcctcaagtcaggcagg

SEQ ID NO: 46950 - RNA, 20 nt, Synthetic Construct
  source 1..20: mol_type = other RNA
ttggcctcaagtcaggcagg

SEQ ID NO: 46951 - RNA, 24 nt, Synthetic Construct
  source 1..24: mol_type = other RNA
tgtaaacatccccgactggaagtt

SEQ ID NO: 46952 - RNA, 22 nt, Synthetic Construct
  source 1..22: mol_type = other RNA
tgaggtagtgggttgtatagtt

SEQ ID NO: 46953 - RNA, 22 nt, Synthetic Construct
  source 1..22: mol_type = other RNA
tgaggtagtgggttgtatagtt

SEQ ID NO: 46954 - RNA, 23 nt, Synthetic Construct
  source 1..23: mol_type = other RNA
ggaggggcagagagcgagacttt

SEQ ID NO: 46955 - RNA, 23 nt, Synthetic Construct
  source 1..23: mol_type = other RNA
ggaggggcagagagcgagacttt

SEQ ID NO: 46956 - RNA, 28 nt, Synthetic Construct
  source 1..28: mol_type = other RNA
ccccccgctgctaaatttgactggcttt

SEQ ID NO: 46957 - RNA, 28 nt, Synthetic Construct
  source 1..28: mol_type = other RNA
ccccccgctgctaaatttgactggcttt

SEQ ID NO: 46958 - RNA, 35 nt, Synthetic Construct; identical to SEQ ID NO: 2069
  source 1..35: mol_type = other RNA

SEQ ID NO: 46959 - RNA, 22 nt, Synthetic Construct
  source 1..22: mol_type = other RNA
tcctgtacagagctgccccgag

SEQ ID NO: 46960 - RNA, 22 nt, Synthetic Construct
  source 1..22: mol_type = other RNA
tcctgtacagagctgccccgag

SEQ ID NO: 46961 - RNA, 20 nt, Synthetic Construct
  source 1..20: mol_type = other RNA
atcacattgccagggatttc

SEQ ID NO: 46962 - RNA, 20 nt, Synthetic Construct
  source 1..20: mol_type = other RNA
atcacattgccagggatttc

SEQ ID NO: 46963 - RNA, 23 nt, Synthetic Construct
  source 1..23: mol_type = other RNA
tagtgcaatattgcttatagggt

SEQ ID NO: 46964 - RNA, 26 nt, Synthetic Construct
  source 1..26: mol_type = other RNA
gatgcgtggtaggagagcgttctgta

SEQ ID NO: 46965 - RNA, 26 nt, Synthetic Construct
  source 1..26: mol_type = other RNA
gatgcgtggtaggagagcgttctgta

SEQ ID NO: 46966 - RNA, 25 nt, Synthetic Construct
  source 1..25: mol_type = other RNA
ttgaggatatgggatcgagacgaca

SEQ ID NO: 46967 - RNA, 28 nt, Synthetic Construct
  source 1..28: mol_type = other RNA
ggcagggttcgtgactggggtgaagtcg

SEQ ID NO: 46968 - RNA, 28 nt, Synthetic Construct
  source 1..28: mol_type = other RNA
ggcagggttcgtgactggggtgaagtcg

SEQ ID NO: 46969 - RNA, 34 nt, Synthetic Construct; identical to SEQ ID NO: 2317
  source 1..34: mol_type = other RNA

SEQ ID NO: 46970 - RNA, 34 nt, Synthetic Construct; identical to SEQ ID NO: 2317
  source 1..34: mol_type = other RNA

SEQ ID NO: 46971 - RNA, 22 nt, Synthetic Construct
  source 1..22: mol_type = other RNA
tcgaaccgtgagtaataatgcg

SEQ ID NO: 46972 - RNA, 27 nt, Synthetic Construct
  source 1..27: mol_type = other RNA
cgtgtgaaagtaggtcatcgtcaggct

SEQ ID NO: 46973 - RNA, 23 nt, Synthetic Construct
  source 1..23: mol_type = other RNA
tggtaatacgacgtacctagtgt

SEQ ID NO: 46974 - RNA, 17 nt, Synthetic Construct
  source 1..17: mol_type = other RNA
gggtctgtagctcagtc

SEQ ID NO: 46975 - RNA, 17 nt, Synthetic Construct
  source 1..17: mol_type = other RNA
gggtctgtagctcagtc

SEQ ID NO: 46976 - RNA, 35 nt, Synthetic Construct; identical to SEQ ID NO: 730
  source 1..35: mol_type = other RNA

SEQ ID NO: 46977 - RNA, 35 nt, Synthetic Construct; identical to SEQ ID NO: 730
  source 1..35: mol_type = other RNA

SEQ ID NO: 46978 - RNA, 15 nt, Synthetic Construct
  source 1..15: mol_type = other RNA
gtccggatcgtagtc

SEQ ID NO: 46979 - RNA, 22 nt, Synthetic Construct
  source 1..22: mol_type = other RNA
tggaatgtgaagaagtatgtat

SEQ ID NO: 46980 - RNA, 22 nt, Synthetic Construct
  source 1..22: mol_type = other RNA
tggaatgtgaagaagtatgtat

SEQ ID NO: 46981 - RNA, 32 nt, Synthetic Construct; identical to SEQ ID NO: 3092
  source 1..32: mol_type = other RNA

SEQ ID NO: 46982 - RNA, 32 nt, Synthetic Construct; identical to SEQ ID NO: 3092
  source 1..32: mol_type = other RNA

SEQ ID NO: 46983 - RNA, 20 nt, Synthetic Construct
  source 1..20: mol_type = other RNA
tgaggtagtaggctgtatag

SEQ ID NO: 46984 - RNA, 20 nt, Synthetic Construct
  source 1..20: mol_type = other RNA
tgaggtagtaggctgtatag

SEQ ID NO: 46985 - RNA, 25 nt, Synthetic Construct
  source 1..25: mol_type = other RNA
ggtaaaatggctgagtgaagcattg

SEQ ID NO: 46986 - RNA, 25 nt, Synthetic Construct
  source 1..25: mol_type = other RNA
ggtaaaatggctgagtgaagcattg

SEQ ID NO: 46987 - RNA, 19 nt, Synthetic Construct
  source 1..19: mol_type = other RNA
gcgccgatgatagtgcgga

SEQ ID NO: 46988 - RNA, 35 nt, Synthetic Construct; identical to SEQ ID NO: 2269
  source 1..35: mol_type = other RNA

SEQ ID NO: 46989 - RNA, 35 nt, Synthetic Construct; identical to SEQ ID NO: 2269
  source 1..35: mol_type = other RNA

SEQ ID NO: 46990 - RNA, 23 nt, Synthetic Construct
  source 1..23: mol_type = other RNA
cgctcacggaaagagaatgaagc

SEQ ID NO: 46991 - RNA, 22 nt, Synthetic Construct
  source 1..22: mol_type = other RNA
tggagtgtaaagaagtatgtat

SEQ ID NO: 46992 - RNA, 22 nt, Synthetic Construct
  source 1..22: mol_type = other RNA
tggagtgtaaagaagtatgtat

SEQ ID NO: 46993 - RNA, 36 nt, Synthetic Construct; identical to SEQ ID NO: 2520
  source 1..36: mol_type = other RNA

SEQ ID NO: 46994 - RNA, 23 nt, Synthetic Construct
  source 1..23: mol_type = other RNA
caaggtgctgttcgtgcaggtag

SEQ ID NO: 46995 - RNA, 23 nt, Synthetic Construct
  source 1..23: mol_type = other RNA
caaggtgctgttcgtgcaggtag

SEQ ID NO: 46996 - RNA, 23 nt, Synthetic Construct
  source 1..23: mol_type = other RNA
tgaggggtagagagcgagacttt

SEQ ID NO: 46997 - RNA, 23 nt, Synthetic Construct
  source 1..23: mol_type = other RNA
tgaggggtagagagcgagacttt

SEQ ID NO: 46998 - RNA, 27 nt, Synthetic Construct
  source 1..27: mol_type = other RNA
atagtctttgttcgattccgttgagta

SEQ ID NO: 46999 - RNA, 27 nt, Synthetic Construct
  source 1..27: mol_type = other RNA
atagtctttgttcgattccgttgagta

SEQ ID NO: 47000 - RNA, 20 nt, Synthetic Construct
  source 1..20: mol_type = other RNA
tgaggtagtaggttgtgtgt

SEQ ID NO: 47001 - RNA, 20 nt, Synthetic Construct
  source 1..20: mol_type = other RNA
tgaggtagtaggttgtgtgt

SEQ ID NO: 47002 - RNA, 15 nt, Synthetic Construct
  source 1..15: mol_type = other RNA
tgcaagtcgaacggt

SEQ ID NO: 47003 - RNA, 15 nt, Synthetic Construct
  source 1..15: mol_type = other RNA
tgcaagtcgaacggt

SEQ ID NO: 47004 - RNA, 22 nt, Synthetic Construct
  source 1..22: mol_type = other RNA
tgaggtagtaggttgtatagtc

SEQ ID NO: 47005 - RNA, 22 nt, Synthetic Construct
  source 1..22: mol_type = other RNA
tgaggtagtaggttgtatagtc

SEQ ID NO: 47006 - RNA, 23 nt, Synthetic Construct
  source 1..23: mol_type = other RNA
tgaggggcagagagtgagacttt

SEQ ID NO: 47007 - RNA, 29 nt, Synthetic Construct
  source 1..29: mol_type = other RNA
gcatgggtggttcagtggtagaattctcg

SEQ ID NO: 47008 - RNA, 29 nt, Synthetic Construct
  source 1..29: mol_type = other RNA
gcatgggtggttcagtggtagaattctcg

SEQ ID NO: 47009 - RNA, 22 nt, Synthetic Construct
  source 1..22: mol_type = other RNA
tgaggtagtaggttgtggggtt

SEQ ID NO: 47010 - RNA, 22 nt, Synthetic Construct
  source 1..22: mol_type = other RNA
tgaggtagtaggttgtggggtt

SEQ ID NO: 47011 - RNA, 16 nt, Synthetic Construct
  source 1..16: mol_type = other RNA
aggtcatcgtcaggct

SEQ ID NO: 47012 - RNA, 16 nt, Synthetic Construct
  source 1..16: mol_type = other RNA
aggtcatcgtcaggct

SEQ ID NO: 47013 - RNA, 35 nt, Synthetic Construct; identical to SEQ ID NO: 2548
  source 1..35: mol_type = other RNA

SEQ ID NO: 47014 - RNA, 18 nt, Synthetic Construct
  source 1..18: mol_type = other RNA
ggctttgaagtaaggtcg

SEQ ID NO: 47015 - RNA, 36 nt, Synthetic Construct; identical to SEQ ID NO: 2478
  source 1..36: mol_type = other RNA

SEQ ID NO: 47016 - RNA, 36 nt, Synthetic Construct; identical to SEQ ID NO: 2478
  source 1..36: mol_type = other RNA

SEQ ID NO: 47017 - RNA, 43 nt, Synthetic Construct; identical to SEQ ID NO: 725
  source 1..43: mol_type = other RNA

SEQ ID NO: 47018 - RNA, 21 nt, Synthetic Construct
  source 1..21: mol_type = other RNA
tgaggtagtaggttgtgcggt

SEQ ID NO: 47019 - RNA, 21 nt, Synthetic Construct
  source 1..21: mol_type = other RNA
tgaggtagtaggttgtgcggt

SEQ ID NO: 47020 - RNA, 23 nt, Synthetic Construct
  source 1..23: mol_type = other RNA
tgtagtgtttcctactttatgga

SEQ ID NO: 47021 - RNA, 23 nt, Synthetic Construct
  source 1..23: mol_type = other RNA
tgtagtgtttcctactttatgga

SEQ ID NO: 47022 - RNA, 23 nt, Synthetic Construct
  source 1..23: mol_type = other RNA
tggtaatacaacgtacttagtgt

SEQ ID NO: 47023 - RNA, 23 nt, Synthetic Construct
  source 1..23: mol_type = other RNA
tggtaatacaacgtacttagtgt

SEQ ID NO: 47024 - RNA, 21 nt, Synthetic Construct
  source 1..21: mol_type = other RNA
tacctggttgatcctgccagt

SEQ ID NO: 47025 - RNA, 21 nt, Synthetic Construct
  source 1..21: mol_type = other RNA
tacctggttgatcctgccagt

SEQ ID NO: 47026 - RNA, 30 nt, Synthetic Construct; identical to SEQ ID NO: 1958
  source 1..30: mol_type = other RNA

SEQ ID NO: 47027 - RNA, 30 nt, Synthetic Construct; identical to SEQ ID NO: 1958
  source 1..30: mol_type = other RNA

SEQ ID NO: 47028 - RNA, 20 nt, Synthetic Construct
  source 1..20: mol_type = other RNA
taaggtagtaggttgtgtgg

SEQ ID NO: 47029 - RNA, 20 nt, Synthetic Construct
  source 1..20: mol_type = other RNA
taaggtagtaggttgtgtgg

SEQ ID NO: 47030 - RNA, 29 nt, Synthetic Construct
  source 1..29: mol_type = other RNA
ttacaggggttcgaatcccctaggggacg

SEQ ID NO: 47031 - RNA, 29 nt, Synthetic Construct
  source 1..29: mol_type = other RNA
ttacaggggttcgaatcccctaggggacg

SEQ ID NO: 47032 - RNA, 32 nt, Synthetic Construct; identical to SEQ ID NO: 4279
  source 1..32: mol_type = other RNA

SEQ ID NO: 47033 - RNA, 21 nt, Synthetic Construct
  source 1..21: mol_type = other RNA
tgaggtagtaggttgtataga

SEQ ID NO: 47034 - RNA, 27 nt, Synthetic Construct
  source 1..27: mol_type = other RNA
gttggttcaagcgtgtagtcgtgctct

SEQ ID NO: 47035 - RNA, 35 nt, Synthetic Construct; identical to SEQ ID NO: 2397
  source 1..35: mol_type = other RNA

SEQ ID NO: 47036 - RNA, 22 nt, Synthetic Construct
  source 1..22: mol_type = other RNA
tgaggtagtagtttgtgctgct

SEQ ID NO: 47037 - RNA, 22 nt, Synthetic Construct
  source 1..22: mol_type = other RNA
tgaggtagtagtttgtgctgct

SEQ ID NO: 47038 - RNA, 35 nt, Synthetic Construct; identical to SEQ ID NO: 2505
  source 1..35: mol_type = other RNA

SEQ ID NO: 47039 - RNA, 16 nt, Synthetic Construct
  source 1..16: mol_type = other RNA
gtctacagccatacca

SEQ ID NO: 47040 - RNA, 23 nt, Synthetic Construct
  source 1..23: mol_type = other RNA
tgtagtgtttcctactttatggt

SEQ ID NO: 47041 - RNA, 23 nt, Synthetic Construct
  source 1..23: mol_type = other RNA
tgtagtgtttcctactttatggt

SEQ ID NO: 47042 - RNA, 18 nt, Synthetic Construct
  source 1..18: mol_type = other RNA
tcccaagggtatggctgt

SEQ ID NO: 47043 - RNA, 39 nt, Synthetic Construct; identical to SEQ ID NO: 2980
  source 1..39: mol_type = other RNA

SEQ ID NO: 47044 - RNA, 39 nt, Synthetic Construct; identical to SEQ ID NO: 2980
  source 1..39: mol_type = other RNA

SEQ ID NO: 47045 - RNA, 18 nt, Synthetic Construct
  source 1..18: mol_type = other RNA
gttcgattccggagaggg

SEQ ID NO: 47046 - RNA, 18 nt, Synthetic Construct
  source 1..18: mol_type = other RNA
gttcgattccggagaggg

SEQ ID NO: 47047 - RNA, 16 nt, Synthetic Construct
  source 1..16: mol_type = other RNA
tgcaagtcgaacggta

SEQ ID NO: 47048 - RNA, 22 nt, Synthetic Construct
  source 1..22: mol_type = other RNA
ggcagcattgtacagggctatg

SEQ ID NO: 47049 - RNA, 22 nt, Synthetic Construct
  source 1..22: mol_type = other RNA
tgaggtggtaggttgtgtggtt

SEQ ID NO: 47050 - RNA, 23 nt, Synthetic Construct
  source 1..23: mol_type = other RNA
tgaggggcagagagagagacttt

SEQ ID NO: 47051 - RNA, 17 nt, Synthetic Construct
  source 1..17: mol_type = other RNA
cagtcaggatgttggct

SEQ ID NO: 47052 - RNA, 17 nt, Synthetic Construct
  source 1..17: mol_type = other RNA
cagtcaggatgttggct

SEQ ID NO: 47053 - RNA, 20 nt, Synthetic Construct
  source 1..20: mol_type = other RNA
tgaggtaggaggttgtatag

SEQ ID NO: 47054 - RNA, 21 nt, Synthetic Construct
  source 1..21: mol_type = other RNA
ggagtatgcagagcaagatca

SEQ ID NO: 47055 - RNA, 21 nt, Synthetic Construct
  source 1..21: mol_type = other RNA
ggagtatgcagagcaagatca

SEQ ID NO: 47056 - RNA, 34 nt, Synthetic Construct; identical to SEQ ID NO: 2186
  source 1..34: mol_type = other RNA

SEQ ID NO: 47057 - RNA, 34 nt, Synthetic Construct; identical to SEQ ID NO: 2186
  source 1..34: mol_type = other RNA

SEQ ID NO: 47058 - RNA, 22 nt, Synthetic Construct
  source 1..22: mol_type = other RNA
tcagtagctcgaggaaaagaca

SEQ ID NO: 47059 - RNA, 29 nt, Synthetic Construct
  source 1..29: mol_type = other RNA
ccccccccactgctaaatttgactggctt

SEQ ID NO: 47060 - RNA, 29 nt, Synthetic Construct
  source 1..29: mol_type = other RNA
ccccccccactgctaaatttgactggctt

SEQ ID NO: 47061 - RNA, 22 nt, Synthetic Construct
  source 1..22: mol_type = other RNA
tgaggtagtaatttgtgctgtt

SEQ ID NO: 47062 - RNA, 22 nt, Synthetic Construct
  source 1..22: mol_type = other RNA
tgaggtagtaatttgtgctgtt

SEQ ID NO: 47063 - RNA, 22 nt, Synthetic Construct
  source 1..22: mol_type = other RNA
tcctgtactgagctaccccgag

SEQ ID NO: 47064 - RNA, 22 nt, Synthetic Construct
  source 1..22: mol_type = other RNA
tcctgtactgagctaccccgag

SEQ ID NO: 47065 - RNA, 37 nt, Synthetic Construct; identical to SEQ ID NO: 5125
  source 1..37: mol_type = other RNA

SEQ ID NO: 47066 - RNA, 16 nt, Synthetic Construct
  source 1..16: mol_type = other RNA
tgcacgaaagcgtggg

SEQ ID NO: 47067 - RNA, 21 nt, Synthetic Construct
  source 1..21: mol_type = other RNA
tgaggtaggaggttgtatagt

SEQ ID NO: 47068 - RNA, 20 nt, Synthetic Construct
  source 1..20: mol_type = other RNA
taaggtagtaggttgtatag

SEQ ID NO: 47069 - RNA, 20 nt, Synthetic Construct
  source 1..20: mol_type = other RNA
taaggtagtaggttgtatag

SEQ ID NO: 47070 - RNA, 24 nt, Synthetic Construct
  source 1..24: mol_type = other RNA
tcactgatcgagtcgtcctgcgcg

SEQ ID NO: 47071 - RNA, 22 nt, Synthetic Construct
  source 1..22: mol_type = other RNA
tcgtaccgtgagtaataacgcg

SEQ ID NO: 47072 - RNA, 25 nt, Synthetic Construct
  source 1..25: mol_type = other RNA
ttgaggatatgaggtcgagacgaca

SEQ ID NO: 47073 - RNA, 22 nt, Synthetic Construct
  source 1..22: mol_type = other RNA
atataatacaacctgctaagtg

SEQ ID NO: 47074 - RNA, 17 nt, Synthetic Construct
  source 1..17: mol_type = other RNA
cgcgacctcagatcaga

SEQ ID NO: 47075 - RNA, 17 nt, Synthetic Construct
  source 1..17: mol_type = other RNA
cgcgacctcagatcaga

SEQ ID NO: 47076 - RNA, 30 nt, Synthetic Construct; identical to SEQ ID NO: 2840
  source 1..30: mol_type = other RNA

SEQ ID NO: 47077 - RNA, 30 nt, Synthetic Construct; identical to SEQ ID NO: 2840
  source 1..30: mol_type = other RNA

SEQ ID NO: 47078 - RNA, 25 nt, Synthetic Construct
  source 1..25: mol_type = other RNA
tgcgagagtaggacgttgccaggtt

SEQ ID NO: 47079 - RNA, 25 nt, Synthetic Construct
  source 1..25: mol_type = other RNA
tgcgagagtaggacgttgccaggtt

SEQ ID NO: 47080 - RNA, 22 nt, Synthetic Construct
  source 1..22: mol_type = other RNA
tccagtactgagctgccccgag

SEQ ID NO: 47081 - RNA, 22 nt, Synthetic Construct
  source 1..22: mol_type = other RNA
tccagtactgagctgccccgag

SEQ ID NO: 47082 - RNA, 23 nt, Synthetic Construct
  source 1..23: mol_type = other RNA
tgaggtagtaggctgtgtggttt

SEQ ID NO: 47083 - RNA, 21 nt, Synthetic Construct
  source 1..21: mol_type = other RNA
tgaggtagtaggttgtgtggc

SEQ ID NO: 47084 - RNA, 15 nt, Synthetic Construct
  source 1..15: mol_type = other RNA
gttgaccgcctgggg

SEQ ID NO: 47085 - RNA, 15 nt, Synthetic Construct
  source 1..15: mol_type = other RNA
gttgaccgcctgggg

SEQ ID NO: 47086 - RNA, 22 nt, Synthetic Construct
  source 1..22: mol_type = other RNA
tgaggtagtagtttgtactgtt

SEQ ID NO: 47087 - RNA, 22 nt, Synthetic Construct
  source 1..22: mol_type = other RNA
tgaggtagtagtttgtactgtt

SEQ ID NO: 47088 - RNA, 23 nt, Synthetic Construct
  source 1..23: mol_type = other RNA
tgataatacgacgtacttagtgt

SEQ ID NO: 47089 - RNA, 15 nt, Synthetic Construct
  source 1..15: mol_type = other RNA
ggtcatcgtcaggct

SEQ ID NO: 47090 - RNA, 15 nt, Synthetic Construct
  source 1..15: mol_type = other RNA
ggtcatcgtcaggct

SEQ ID NO: 47091 - RNA, 20 nt, Synthetic Construct
  source 1..20: mol_type = other RNA
tgaggtagtaggttgtgtag

SEQ ID NO: 47092 - RNA, 20 nt, Synthetic Construct
  source 1..20: mol_type = other RNA
tgaggtagtaggttgtgtag

SEQ ID NO: 47093 - RNA, 21 nt, Synthetic Construct
  source 1..21: mol_type = other RNA
tggagtgtgacaatggtgtct

SEQ ID NO: 47094 - RNA, 21 nt, Synthetic Construct
  source 1..21: mol_type = other RNA
tggagtgtgacaatggtgtct

SEQ ID NO: 47095 - RNA, 21 nt, Synthetic Construct
  source 1..21: mol_type = other RNA
tggagtgtgacaacggtgttt

SEQ ID NO: 47096 - RNA, 21 nt, Synthetic Construct
  source 1..21: mol_type = other RNA
tggagtgtgacaacggtgttt

SEQ ID NO: 47097 - RNA, 15 nt, Synthetic Construct
  source 1..15: mol_type = other RNA
aggtgggaggctttg

SEQ ID NO: 47098 - RNA, 24 nt, Synthetic Construct
  source 1..24: mol_type = other RNA
gcgagagtaggacgttgccaggtt

SEQ ID NO: 47099 - RNA, 24 nt, Synthetic Construct
  source 1..24: mol_type = other RNA
gcgagagtaggacgttgccaggtt

SEQ ID NO: 47100 - RNA, 24 nt, Synthetic Construct
  source 1..24: mol_type = other RNA
tagcagcacgtaaatattggcgtt

SEQ ID NO: 47101 - RNA, 24 nt, Synthetic Construct
  source 1..24: mol_type = other RNA
tagcagcacgtaaatattggcgtt

SEQ ID NO: 47102 - RNA, 28 nt, Synthetic Construct
  source 1..28: mol_type = other RNA
gtggcattgccgagtagctaagtgcgga

SEQ ID NO: 47103 - RNA, 28 nt, Synthetic Construct
  source 1..28: mol_type = other RNA
gtggcattgccgagtagctaagtgcgga

SEQ ID NO: 47104 - RNA, 15 nt, Synthetic Construct
  source 1..15: mol_type = other RNA
gctttgatccggaga

SEQ ID NO: 47105 - RNA, 15 nt, Synthetic Construct
  source 1..15: mol_type = other RNA
gctttgatccggaga

SEQ ID NO: 47106 - RNA, 28 nt, Synthetic Construct
  source 1..28: mol_type = other RNA
ggtggctgtagctcagttggtagagtcc

SEQ ID NO: 47107 - RNA, 28 nt, Synthetic Construct
  source 1..28: mol_type = other RNA
ggtggctgtagctcagttggtagagtcc

SEQ ID NO: 47108 - RNA, 23 nt, Synthetic Construct
  source 1..23: mol_type = other RNA
tggtaatacgacgtacctagtgt

SEQ ID NO: 47109 - RNA, 21 nt, Synthetic Construct
  source 1..21: mol_type = other RNA
tgaggtagtaggttgtatagc

SEQ ID NO: 47110 - RNA, 21 nt, Synthetic Construct
  source 1..21: mol_type = other RNA
tgaggtagtaggttgtatagc

SEQ ID NO: 47111 - RNA, 19 nt, Synthetic Construct
  source 1..19: mol_type = other RNA
cttggggttgtaggaccac

SEQ ID NO: 47112 - RNA, 19 nt, Synthetic Construct
  source 1..19: mol_type = other RNA
cttggggttgtaggaccac

SEQ ID NO: 47113 - RNA, 21 nt, Synthetic Construct
  source 1..21: mol_type = other RNA
cattattacttttggtacgcg

SEQ ID NO: 47114 - RNA, 21 nt, Synthetic Construct
  source 1..21: mol_type = other RNA
cattattacttttggtacgcg

SEQ ID NO: 47115 - RNA, 24 nt, Synthetic Construct
  source 1..24: mol_type = other RNA
tgtaaacacccccgactggaagct

SEQ ID NO: 47116 - RNA, 24 nt, Synthetic Construct
  source 1..24: mol_type = other RNA
tgtaaacacccccgactggaagct

SEQ ID NO: 47117 - RNA, 24 nt, Synthetic Construct
  source 1..24: mol_type = other RNA
cggagaaggttagctcagccaact

SEQ ID NO: 47118 - RNA, 24 nt, Synthetic Construct
  source 1..24: mol_type = other RNA
cggagaaggttagctcagccaact

SEQ ID NO: 47119 - RNA, 36 nt, Synthetic Construct; identical to SEQ ID NO: 2506
  source 1..36: mol_type = other RNA

SEQ ID NO: 47120 - RNA, 36 nt, Synthetic Construct; identical to SEQ ID NO: 2506
  source 1..36: mol_type = other RNA

SEQ ID NO: 47121 - RNA, 37 nt, Synthetic Construct; identical to SEQ ID NO: 2447
  source 1..37: mol_type = other RNA

SEQ ID NO: 47122 - RNA, 37 nt, Synthetic Construct; identical to SEQ ID NO: 2447
  source 1..37: mol_type = other RNA

SEQ ID NO: 47123 - RNA, 25 nt, Synthetic Construct
  source 1..25: mol_type = other RNA
ccccactgctaaatttgactggctt

SEQ ID NO: 47124 - RNA, 35 nt, Synthetic Construct; identical to SEQ ID NO: 9871
  source 1..35: mol_type = other RNA

SEQ ID NO: 47125 - RNA, 35 nt, Synthetic Construct; identical to SEQ ID NO: 9871
  source 1..35: mol_type = other RNA

SEQ ID NO: 47126 - RNA, 22 nt, Synthetic Construct
  source 1..22: mol_type = other RNA
tgaggtagtagattgtgtggtt

SEQ ID NO: 47127 - RNA, 18 nt, Synthetic Construct
  source 1..18: mol_type = other RNA
tccgacatgcgagggttc

SEQ ID NO: 47128 - RNA, 23 nt, Synthetic Construct
  source 1..23: mol_type = other RNA
tggtaatacgacgtacttagagt

SEQ ID NO: 47129 - RNA, 15 nt, Synthetic Construct
  source 1..15: mol_type = other RNA
tgcctcagcgtcggt

SEQ ID NO: 47130 - RNA, 15 nt, Synthetic Construct
  source 1..15: mol_type = other RNA
tgcctcagcgtcggt

SEQ ID NO: 47131 - RNA, 22 nt, Synthetic Construct
  source 1..22: mol_type = other RNA
tcactgatcgagtcgtcctgcg

SEQ ID NO: 47132 - RNA, 22 nt, Synthetic Construct
  source 1..22: mol_type = other RNA
cccagtgctctgaatgtcaaag

SEQ ID NO: 47133 - RNA, 22 nt, Synthetic Construct
  source 1..22: mol_type = other RNA
cccagtgctctgaatgtcaaag

SEQ ID NO: 47134 - RNA, 22 nt, Synthetic Construct
  source 1..22: mol_type = other RNA
gtcagtttgtcaaataccccat

SEQ ID NO: 47135 - RNA, 22 nt, Synthetic Construct
  source 1..22: mol_type = other RNA
gtcagtttgtcaaataccccat

SEQ ID NO: 47136 - RNA, 16 nt, Synthetic Construct
  source 1..16: mol_type = other RNA
gtcaacggccatacca

SEQ ID NO: 47137 - RNA, 35 nt, Synthetic Construct; identical to SEQ ID NO: 2452
  source 1..35: mol_type = other RNA

SEQ ID NO: 47138 - RNA, 24 nt, Synthetic Construct
  source 1..24: mol_type = other RNA
tgtaaacatccccggctggaagct

SEQ ID NO: 47139 - RNA, 24 nt, Synthetic Construct
  source 1..24: mol_type = other RNA
tgtaaacatccccggctggaagct

SEQ ID NO: 47140 - RNA, 22 nt, Synthetic Construct
  source 1..22: mol_type = other RNA
gtcagtttgtcaaataccccat

SEQ ID NO: 47141 - RNA, 22 nt, Synthetic Construct
  source 1..22: mol_type = other RNA
gtcagtttgtcaaataccccat

SEQ ID NO: 47142 - RNA, 23 nt, Synthetic Construct
  source 1..23: mol_type = other RNA
tgaggtagtaggttgtgtggtta

SEQ ID NO: 47143 - RNA, 16 nt, Synthetic Construct
  source 1..16: mol_type = other RNA
agcaagtcgaacggta

SEQ ID NO: 47144 - RNA, 16 nt, Synthetic Construct
  source 1..16: mol_type = other RNA
agcaagtcgaacggta

SEQ ID NO: 47145 - RNA, 18 nt, Synthetic Construct
  source 1..18: mol_type = other RNA
acagtcaggatgttggct

SEQ ID NO: 47146 - RNA, 22 nt, Synthetic Construct
  source 1..22: mol_type = other RNA
tgaggtagtaggttgtgcggtt

SEQ ID NO: 47147 - RNA, 22 nt, Synthetic Construct
  source 1..22: mol_type = other RNA
tgaggtagtaggttgtgcggtt

SEQ ID NO: 47148 - RNA, 21 nt, Synthetic Construct
  source 1..21: mol_type = other RNA
tcctgtctgaatatgggggga

SEQ ID NO: 47149 - RNA, 25 nt, Synthetic Construct
  source 1..25: mol_type = other RNA
tgtaaacatccttgactggaagctt

SEQ ID NO: 47150 - RNA, 43 nt, Synthetic Construct; identical to SEQ ID NO: 727
  source 1..43: mol_type = other RNA

SEQ ID NO: 47151 - RNA, 43 nt, Synthetic Construct; identical to SEQ ID NO: 727
  source 1..43: mol_type = other RNA

SEQ ID NO: 47152 - RNA, 25 nt, Synthetic Construct
  source 1..25: mol_type = other RNA
ttgaggatatgagatcgagacggca

SEQ ID NO: 47153 - RNA, 25 nt, Synthetic Construct
  source 1..25: mol_type = other RNA
ttgaggatatgagatcgagacggca

SEQ ID NO: 47154 - RNA, 21 nt, Synthetic Construct
  source 1..21: mol_type = other RNA
tcctgtactgagctgcccgag

SEQ ID NO: 47155 - RNA, 21 nt, Synthetic Construct
  source 1..21: mol_type = other RNA
tcctgtactgagctgcccgag

SEQ ID NO: 47156 - RNA, 23 nt, Synthetic Construct
  source 1..23: mol_type = other RNA
tgaggcagtaggttgtgtggttt

SEQ ID NO: 47157 - RNA, 21 nt, Synthetic Construct
  source 1..21: mol_type = other RNA
tgaggtagtagattgcatagt

SEQ ID NO: 47158 - RNA, 21 nt, Synthetic Construct
  source 1..21: mol_type = other RNA
tgaggtagtagattgcatagt

SEQ ID NO: 47159 - RNA, 20 nt, Synthetic Construct
  source 1..20: mol_type = other RNA
tgaggtagtaggtcgtatag

SEQ ID NO: 47160 - RNA, 20 nt, Synthetic Construct
  source 1..20: mol_type = other RNA
tgaggtagtaggtcgtatag

SEQ ID NO: 47161 - RNA, 23 nt, Synthetic Construct
  source 1..23: mol_type = other RNA
caaagtgctgttcgcgcaggtag

SEQ ID NO: 47162 - RNA, 23 nt, Synthetic Construct
  source 1..23: mol_type = other RNA
caaagtgctgttcgcgcaggtag

SEQ ID NO: 47163 - RNA, 25 nt, Synthetic Construct
  source 1..25: mol_type = other RNA
ttgaggatatgagatcgaggcgaca

SEQ ID NO: 47164 - RNA, 21 nt, Synthetic Construct
  source 1..21: mol_type = other RNA
ctagcaccatctgaaatcggt

SEQ ID NO: 47165 - RNA, 29 nt, Synthetic Construct
  source 1..29: mol_type = other RNA
cgggatggggacagtgtatggtgggcagt

SEQ ID NO: 47166 - RNA, 29 nt, Synthetic Construct
  source 1..29: mol_type = other RNA
cgggatggggacagtgtatggtgggcagt

SEQ ID NO: 47167 - RNA, 22 nt, Synthetic Construct
  source 1..22: mol_type = other RNA
tcacagtgaaccggtctcttta

SEQ ID NO: 47168 - RNA, 23 nt, Synthetic Construct
  source 1..23: mol_type = other RNA
tgaggtagtaggttgtatggttt

SEQ ID NO: 47169 - RNA, 23 nt, Synthetic Construct
  source 1..23: mol_type = other RNA
tgaggggcagagagcgagacctt

SEQ ID NO: 47170 - RNA, 23 nt, Synthetic Construct
  source 1..23: mol_type = other RNA
tgaggggcagagagcgagacctt

SEQ ID NO: 47171 - RNA, 22 nt, Synthetic Construct
  source 1..22: mol_type = other RNA
tcgtatcgtgagtaataatgcg

SEQ ID NO: 47172 - RNA, 22 nt, Synthetic Construct
  source 1..22: mol_type = other RNA
tcgtatcgtgagtaataatgcg

SEQ ID NO: 47173 - RNA, 25 nt, Synthetic Construct
  source 1..25: mol_type = other RNA
cctcgcgcgattggagcggccgata

SEQ ID NO: 47174 - RNA, 16 nt, Synthetic Construct
  source 1..16: mol_type = other RNA
ccaaggggtcgtgggt

SEQ ID NO: 47175 - RNA, 16 nt, Synthetic Construct
  source 1..16: mol_type = other RNA
ccaaggggtcgtgggt

SEQ ID NO: 47176 - RNA, 34 nt, Synthetic Construct; identical to SEQ ID NO: 2553
  source 1..34: mol_type = other RNA

SEQ ID NO: 47177 - RNA, 23 nt, Synthetic Construct
  source 1..23: mol_type = other RNA
tggtaacacgacgtacttagtgt

SEQ ID NO: 47178 - RNA, 27 nt, Synthetic Construct
  source 1..27: mol_type = other RNA
ccccccactgctaaatttgactagctt

SEQ ID NO: 47179 - RNA, 21 nt, Synthetic Construct
  source 1..21: mol_type = other RNA
tggagtgtgacaatggcgttt

SEQ ID NO: 47180 - RNA, 21 nt, Synthetic Construct
  source 1..21: mol_type = other RNA
tggagtgtgacaatggcgttt

SEQ ID NO: 47181 - RNA, 37 nt, Synthetic Construct; identical to SEQ ID NO: 2447
  source 1..37: mol_type = other RNA

SEQ ID NO: 47182 - RNA, 25 nt, Synthetic Construct
  source 1..25: mol_type = other RNA
aaaccgttaccattactgagtttag

SEQ ID NO: 47183 - RNA, 25 nt, Synthetic Construct
  source 1..25: mol_type = other RNA
aaaccgttaccattactgagtttag

SEQ ID NO: 47184 - RNA, 21 nt, Synthetic Construct
  source 1..21: mol_type = other RNA
tgaggggcagggagcgagact

SEQ ID NO: 47185 - RNA, 21 nt, Synthetic Construct
  source 1..21: mol_type = other RNA
tgaggggcagggagcgagact

SEQ ID NO: 47186 - RNA, 23 nt, Synthetic Construct
  source 1..23: mol_type = other RNA
tggggggcagagagcgagacttt

SEQ ID NO: 47187 - RNA, 17 nt, Synthetic Construct
  source 1..17: mol_type = other RNA
tgccagcagccgcggta

SEQ ID NO: 47188 - RNA, 16 nt, Synthetic Construct
  source 1..16: mol_type = other RNA
agtcaggatgttggct

SEQ ID NO: 47189 - RNA, 19 nt, Synthetic Construct
  source 1..19: mol_type = other RNA
agtcgacgtatagggtgtg

SEQ ID NO: 47190 - RNA, 32 nt, Synthetic Construct; identical to SEQ ID NO: 2086
  source 1..32: mol_type = other RNA

SEQ ID NO: 47191 - RNA, 23 nt, Synthetic Construct
  source 1..23: mol_type = other RNA
tgaggggcagagagcgagactat

SEQ ID NO: 47192 - RNA, 20 nt, Synthetic Construct
  source 1..20: mol_type = other RNA
tgaggtagtaggttgcatag

SEQ ID NO: 47193 - RNA, 20 nt, Synthetic Construct
  source 1..20: mol_type = other RNA
tgaggtagtaggttgcatag

SEQ ID NO: 47194 - RNA, 22 nt, Synthetic Construct
  source 1..22: mol_type = other RNA
cctcgcgcgattggagcggccg

SEQ ID NO: 47195 - RNA, 29 nt, Synthetic Construct
  source 1..29: mol_type = other RNA
cccccccactgctaaatttgactggcttt

SEQ ID NO: 47196 - RNA, 44 nt, Synthetic Construct; identical to SEQ ID NO: 4262
  source 1..44: mol_type = other RNA

SEQ ID NO: 47197 - RNA, 22 nt, Synthetic Construct
  source 1..22: mol_type = other RNA
catagcacttgtctcggtctga

SEQ ID NO: 47198 - RNA, 22 nt, Synthetic Construct
  source 1..22: mol_type = other RNA
catagcacttgtctcggtctga

SEQ ID NO: 47199 - RNA, 27 nt, Synthetic Construct
  source 1..27: mol_type = other RNA
gcgggcgtagctcaggggtagagcgca

SEQ ID NO: 47200 - RNA, 27 nt, Synthetic Construct
  source 1..27: mol_type = other RNA
gcgggcgtagctcaggggtagagcgca

SEQ ID NO: 47201 - RNA, 27 nt, Synthetic Construct
  source 1..27: mol_type = other RNA
ccccccactgctgaatttgactggctt

SEQ ID NO: 47202 - RNA, 25 nt, Synthetic Construct
  source 1..25: mol_type = other RNA
ttggggatatgagatcgagacgaca

SEQ ID NO: 47203 - RNA, 21 nt, Synthetic Construct
  source 1..21: mol_type = other RNA
tgaggtagtaggttgtgaggt

SEQ ID NO: 47204 - RNA, 21 nt, Synthetic Construct
  source 1..21: mol_type = other RNA
tgaggtagtaggttgtgaggt

SEQ ID NO: 47205 - RNA, 21 nt, Synthetic Construct
  source 1..21: mol_type = other RNA
tgaggtagcaggttgtgtggt

SEQ ID NO: 47206 - RNA, 21 nt, Synthetic Construct
  source 1..21: mol_type = other RNA
tgaggtagcaggttgtgtggt

SEQ ID NO: 47207 - RNA, 23 nt, Synthetic Construct
  source 1..23: mol_type = other RNA
tggggggcagagagcgagacttt

SEQ ID NO: 47208 - RNA, 18 nt, Synthetic Construct
  source 1..18: mol_type = other RNA
cagcactctgcaaagacg

SEQ ID NO: 47209 - RNA, 18 nt, Synthetic Construct
  source 1..18: mol_type = other RNA
cagcactctgcaaagacg

SEQ ID NO: 47210 - RNA, 21 nt, Synthetic Construct
  source 1..21: mol_type = other RNA
tagcagcacgtaaatattggc

SEQ ID NO: 47211 - RNA, 21 nt, Synthetic Construct
  source 1..21: mol_type = other RNA
tagcagcacgtaaatattggc

SEQ ID NO: 47212 - RNA, 25 nt, Synthetic Construct
  source 1..25: mol_type = other RNA
ttgaggatatgagatcgagacaaca

SEQ ID NO: 47213 - RNA, 25 nt, Synthetic Construct
  source 1..25: mol_type = other RNA
ttgaggatatgagatcgagacaaca

SEQ ID NO: 47214 - RNA, 15 nt, Synthetic Construct
  source 1..15: mol_type = other RNA
gtagctcgttgggct

SEQ ID NO: 47215 - RNA, 16 nt, Synthetic Construct
  source 1..16: mol_type = other RNA
gtctatggccatacca

SEQ ID NO: 47216 - RNA, 36 nt, Synthetic Construct; identical to SEQ ID NO: 2506
  source 1..36: mol_type = other RNA

SEQ ID NO: 47217 - RNA, 22 nt, Synthetic Construct
  source 1..22: mol_type = other RNA
tgtggtagtaggttgtatagtt

SEQ ID NO: 47218 - RNA, 22 nt, Synthetic Construct
  source 1..22: mol_type = other RNA
tgtggtagtaggttgtatagtt

SEQ ID NO: 47219 - RNA, 30 nt, Synthetic Construct; identical to SEQ ID NO: 5879
  source 1..30: mol_type = other RNA

SEQ ID NO: 47220 - RNA, 30 nt, Synthetic Construct; identical to SEQ ID NO: 5879
  source 1..30: mol_type = other RNA

SEQ ID NO: 47221 - RNA, 22 nt, Synthetic Construct
  source 1..22: mol_type = other RNA
tgaagtagtagtttgtgctgtt

SEQ ID NO: 47222 - RNA, 22 nt, Synthetic Construct
  source 1..22: mol_type = other RNA
tgaagtagtagtttgtgctgtt

SEQ ID NO: 47223 - RNA, 35 nt, Synthetic Construct; identical to SEQ ID NO: 2615
  source 1..35: mol_type = other RNA

SEQ ID NO: 47224 - RNA, 20 nt, Synthetic Construct
  source 1..20: mol_type = other RNA
tgaggtagtaggctgtgtgg

SEQ ID NO: 47225 - RNA, 22 nt, Synthetic Construct
  source 1..22: mol_type = other RNA
cgaggtagtaggttgtgtggtt

SEQ ID NO: 47226 - RNA, 22 nt, Synthetic Construct
  source 1..22: mol_type = other RNA
cgaggtagtaggttgtgtggtt

SEQ ID NO: 47227 - RNA, 22 nt, Synthetic Construct
  source 1..22: mol_type = other RNA
ngaggtagtagattgtatagtt

SEQ ID NO: 47228 - RNA, 22 nt, Synthetic Construct
  source 1..22: mol_type = other RNA
ngaggtagtagattgtatagtt

SEQ ID NO: 47229 - RNA, 22 nt, Synthetic Construct
  source 1..22: mol_type = other RNA
tgtggtagtaggttgtgtggtt

SEQ ID NO: 47230 - RNA, 27 nt, Synthetic Construct
  source 1..27: mol_type = other RNA
ccccccactgctaaatttgattggctt

SEQ ID NO: 47231 - RNA, 27 nt, Synthetic Construct
  source 1..27: mol_type = other RNA
ccccccactgctaaatttgattggctt

SEQ ID NO: 47232 - RNA, 22 nt, Synthetic Construct
  source 1..22: mol_type = other RNA
nattgcacttgtcccggcctgt

SEQ ID NO: 47233 - RNA, 37 nt, Synthetic Construct; identical to SEQ ID NO: 2365
  source 1..37: mol_type = other RNA

SEQ ID NO: 47234 - RNA, 22 nt, Synthetic Construct
  source 1..22: mol_type = other RNA
tcctatactgagctgccccgag

SEQ ID NO: 47235 - RNA, 22 nt, Synthetic Construct
  source 1..22: mol_type = other RNA
tcctatactgagctgccccgag

SEQ ID NO: 47236 - RNA, 21 nt, Synthetic Construct
  source 1..21: mol_type = other RNA
tgaggggcggagagcgagact

SEQ ID NO: 47237 - RNA, 20 nt, Synthetic Construct
  source 1..20: mol_type = other RNA
tgaggtagtaggttgcgtgg

SEQ ID NO: 47238 - RNA, 20 nt, Synthetic Construct
  source 1..20: mol_type = other RNA
tgaggtagtaggttgcgtgg

SEQ ID NO: 47239 - RNA, 35 nt, Synthetic Construct; identical to SEQ ID NO: 2452
  source 1..35: mol_type = other RNA

SEQ ID NO: 47240 - RNA, 35 nt, Synthetic Construct; identical to SEQ ID NO: 2452
  source 1..35: mol_type = other RNA

SEQ ID NO: 47241 - RNA, 20 nt, Synthetic Construct
  source 1..20: mol_type = other RNA
tgaggtagtgggttgtatag

SEQ ID NO: 47242 - RNA, 20 nt, Synthetic Construct
  source 1..20: mol_type = other RNA
tgaggtagtgggttgtatag

SEQ ID NO: 47243 - RNA, 19 nt, Synthetic Construct
  source 1..19: mol_type = other RNA
cctgtaccgatcaatagtg

SEQ ID NO: 47244 - RNA, 23 nt, Synthetic Construct
  source 1..23: mol_type = other RNA
tgaggtagtaggtcgtgtggttt

SEQ ID NO: 47245 - RNA, 23 nt, Synthetic Construct
  source 1..23: mol_type = other RNA
tgaggtagtaggtcgtgtggttt

SEQ ID NO: 47246 - RNA, 23 nt, Synthetic Construct
  source 1..23: mol_type = other RNA
tggcaatacgacgtacttagtgt

SEQ ID NO: 47247 - RNA, 23 nt, Synthetic Construct
  source 1..23: mol_type = other RNA
gtgcagatcttggtggtagtagc

SEQ ID NO: 47248 - RNA, 23 nt, Synthetic Construct
  source 1..23: mol_type = other RNA
gtgcagatcttggtggtagtagc

SEQ ID NO: 47249 - RNA, 36 nt, Synthetic Construct; identical to SEQ ID NO: 10333
  source 1..36: mol_type = other RNA

SEQ ID NO: 47250 - RNA, 36 nt, Synthetic Construct; identical to SEQ ID NO: 10333
  source 1..36: mol_type = other RNA

SEQ ID NO: 47251 - RNA, 26 nt, Synthetic Construct
  source 1..26: mol_type = other RNA
gcataagcgtgcttgactgcgagact

SEQ ID NO: 47252 - RNA, 26 nt, Synthetic Construct
  source 1..26: mol_type = other RNA
gcataagcgtgcttgactgcgagact

SEQ ID NO: 47253 - RNA, 22 nt, Synthetic Construct
  source 1..22: mol_type = other RNA
tgaagtagtaggttgtgtggtt

SEQ ID NO: 47254 - RNA, 22 nt, Synthetic Construct
  source 1..22: mol_type = other RNA
tgaagtagtaggttgtgtggtt

SEQ ID NO: 47255 - RNA, 26 nt, Synthetic Construct
  source 1..26: mol_type = other RNA
aaaccgttaccattactgagtttagt

SEQ ID NO: 47256 - RNA, 26 nt, Synthetic Construct
  source 1..26: mol_type = other RNA
aaaccgttaccattactgagtttagt

SEQ ID NO: 47257 - RNA, 23 nt, Synthetic Construct
  source 1..23: mol_type = other RNA
cggtaatacgacgtacttagtgt

SEQ ID NO: 47258 - RNA, 23 nt, Synthetic Construct
  source 1..23: mol_type = other RNA
cggtaatacgacgtacttagtgt

SEQ ID NO: 47259 - RNA, 23 nt, Synthetic Construct
  source 1..23: mol_type = other RNA
tgaggtagcaggttgtgtggttt

SEQ ID NO: 47260 - RNA, 25 nt, Synthetic Construct
  source 1..25: mol_type = other RNA
gtcaggatggccgagcggtctaagg

SEQ ID NO: 47261 - RNA, 25 nt, Synthetic Construct
  source 1..25: mol_type = other RNA
gtcaggatggccgagcggtctaagg

SEQ ID NO: 47262 - RNA, 16 nt, Synthetic Construct
  source 1..16: mol_type = other RNA
atctacggccatacca

SEQ ID NO: 47263 - RNA, 26 nt, Synthetic Construct
  source 1..26: mol_type = other RNA
atttccccttggggttgtaggaccac

SEQ ID NO: 47264 - RNA, 26 nt, Synthetic Construct
  source 1..26: mol_type = other RNA
atttccccttggggttgtaggaccac

SEQ ID NO: 47265 - RNA, 25 nt, Synthetic Construct
  source 1..25: mol_type = other RNA
aatgacacgatcactcccgttgagt

SEQ ID NO: 47266 - RNA, 25 nt, Synthetic Construct
  source 1..25: mol_type = other RNA
aatgacacgatcactcccgttgagt

SEQ ID NO: 47267 - RNA, 15 nt, Synthetic Construct
  source 1..15: mol_type = other RNA
ccgcttttgtcaggg

SEQ ID NO: 47268 - RNA, 23 nt, Synthetic Construct
  source 1..23: mol_type = other RNA
nggtaatacgacgtacttagtgt

SEQ ID NO: 47269 - RNA, 21 nt, Synthetic Construct
  source 1..21: mol_type = other RNA
ttcaagtaattcaggataggt

SEQ ID NO: 47270 - RNA, 42 nt, Synthetic Construct; identical to SEQ ID NO: 733
  source 1..42: mol_type = other RNA

SEQ ID NO: 47271 - RNA, 23 nt, Synthetic Construct
  source 1..23: mol_type = other RNA
tggtaatacgacgtacttagtgt

SEQ ID NO: 47272 - RNA, 23 nt, Synthetic Construct
  source 1..23: mol_type = other RNA
ggctacattgtctgctgggtttc

SEQ ID NO: 47273 - RNA, 23 nt, Synthetic Construct
  source 1..23: mol_type = other RNA
ggctacattgtctgctgggtttc

SEQ ID NO: 47274 - RNA, 21 nt, Synthetic Construct
  source 1..21: mol_type = other RNA
ggagtatgcagagcaagatca

SEQ ID NO: 47275 - RNA, 21 nt, Synthetic Construct
  source 1..21: mol_type = other RNA
ggagtatgcagagcaagatca

SEQ ID NO: 47276 - RNA, 17 nt, Synthetic Construct
  source 1..17: mol_type = other RNA
accaaggggtcgtgggt

SEQ ID NO: 47277 - RNA, 22 nt, Synthetic Construct
  source 1..22: mol_type = other RNA
cactgcacttgtctcggtctga

SEQ ID NO: 47278 - RNA, 22 nt, Synthetic Construct
  source 1..22: mol_type = other RNA
cactgcacttgtctcggtctga

SEQ ID NO: 47279 - RNA, 24 nt, Synthetic Construct
  source 1..24: mol_type = other RNA
tgtaaacatccttgactggaagct

SEQ ID NO: 47280 - RNA, 22 nt, Synthetic Construct
  source 1..22: mol_type = other RNA
tggggtagtaggttgtgtggtt

SEQ ID NO: 47281 - RNA, 23 nt, Synthetic Construct
  source 1..23: mol_type = other RNA
agcagcattgtacagggctatgt

SEQ ID NO: 47282 - RNA, 23 nt, Synthetic Construct
  source 1..23: mol_type = other RNA
agcagcattgtacagggctatgt

SEQ ID NO: 47283 - RNA, 22 nt, Synthetic Construct
  source 1..22: mol_type = other RNA
tctttgttcgattccgttgagt

SEQ ID NO: 47284 - RNA, 22 nt, Synthetic Construct
  source 1..22: mol_type = other RNA
tcctgtactgaactgccccgag

SEQ ID NO: 47285 - RNA, 22 nt, Synthetic Construct
  source 1..22: mol_type = other RNA
tcctgtactgaactgccccgag

SEQ ID NO: 47286 - RNA, 20 nt, Synthetic Construct
  source 1..20: mol_type = other RNA
cgaggtagtaggttgtgtgg

SEQ ID NO: 47287 - RNA, 20 nt, Synthetic Construct
  source 1..20: mol_type = other RNA
cgaggtagtaggttgtgtgg

SEQ ID NO: 47288 - RNA, 21 nt, Synthetic Construct
  source 1..21: mol_type = other RNA
cgaggtagtagattgtatagt

SEQ ID NO: 47289 - RNA, 21 nt, Synthetic Construct
  source 1..21: mol_type = other RNA
cgaggtagtagattgtatagt

SEQ ID NO: 47290 - RNA, 15 nt, Synthetic Construct
  source 1..15: mol_type = other RNA
gagctgtggataggg

SEQ ID NO: 47291 - RNA, 15 nt, Synthetic Construct
  source 1..15: mol_type = other RNA
gagctgtggataggg

SEQ ID NO: 47292 - RNA, 23 nt, Synthetic Construct
  source 1..23: mol_type = other RNA
tggtaatacgacgtacttggtgt

SEQ ID NO: 47293 - RNA, 20 nt, Synthetic Construct
  source 1..20: mol_type = other RNA
tgaggtagtaggttgtgcgg

SEQ ID NO: 47294 - RNA, 20 nt, Synthetic Construct
  source 1..20: mol_type = other RNA
tgaggtagtaggttgtgcgg

SEQ ID NO: 47295 - RNA, 36 nt, Synthetic Construct; identical to SEQ ID NO: 10333
  source 1..36: mol_type = other RNA

SEQ ID NO: 47296 - RNA, 36 nt, Synthetic Construct; identical to SEQ ID NO: 10333
  source 1..36: mol_type = other RNA

SEQ ID NO: 47297 - RNA, 23 nt, Synthetic Construct
  source 1..23: mol_type = other RNA
cctcgcgcgattggagcggccga

SEQ ID NO: 47298 - RNA, 23 nt, Synthetic Construct
  source 1..23: mol_type = other RNA
cctcgcgcgattggagcggccga

SEQ ID NO: 47299 - RNA, 22 nt, Synthetic Construct
  source 1..22: mol_type = other RNA
tgaggtagtaggttgtgaggtt

SEQ ID NO: 47300 - RNA, 22 nt, Synthetic Construct
  source 1..22: mol_type = other RNA
tgaggtagtaggttgtgaggtt

SEQ ID NO: 47301 - RNA, 22 nt, Synthetic Construct
  source 1..22: mol_type = other RNA
ggaggagttcgaaggtacgcta

SEQ ID NO: 47302 - RNA, 23 nt, Synthetic Construct
  source 1..23: mol_type = other RNA
tagcttatcagactgatgttgaa

SEQ ID NO: 47303 - RNA, 23 nt, Synthetic Construct
  source 1..23: mol_type = other RNA
tagcttatcagactgatgttgaa

SEQ ID NO: 47304 - RNA, 16 nt, Synthetic Construct
  source 1..16: mol_type = other RNA
ctgacgctcatgcacg

SEQ ID NO: 47305 - RNA, 17 nt, Synthetic Construct
  source 1..17: mol_type = other RNA
tcgctagtaatcgcgga

SEQ ID NO: 47306 - RNA, 17 nt, Synthetic Construct
  source 1..17: mol_type = other RNA
tcgctagtaatcgcgga

SEQ ID NO: 47307 - RNA, 21 nt, Synthetic Construct
  source 1..21: mol_type = other RNA
tctttggttatctagctgtat

SEQ ID NO: 47308 - RNA, 21 nt, Synthetic Construct
  source 1..21: mol_type = other RNA
tctttggttatctagctgtat

SEQ ID NO: 47309 - RNA, 21 nt, Synthetic Construct
  source 1..21: mol_type = other RNA
cacgtcatacaatggccggga

SEQ ID NO: 47310 - RNA, 18 nt, Synthetic Construct
  source 1..18: mol_type = other RNA
tcccaagggtatggctgt

SEQ ID NO: 47311 - RNA, 20 nt, Synthetic Construct
  source 1..20: mol_type = other RNA
agctacattgtctgctgggt

SEQ ID NO: 47312 - RNA, 20 nt, Synthetic Construct
  source 1..20: mol_type = other RNA
agctacattgtctgctgggt

SEQ ID NO: 47313 - RNA, 30 nt, Synthetic Construct; identical to SEQ ID NO: 751
  source 1..30: mol_type = other RNA

SEQ ID NO: 47314 - RNA, 30 nt, Synthetic Construct; identical to SEQ ID NO: 751
  source 1..30: mol_type = other RNA

SEQ ID NO: 47315 - RNA, 21 nt, Synthetic Construct
  source 1..21: mol_type = other RNA
tggggtgtgacaatggtgttt

SEQ ID NO: 47316 - RNA, 23 nt, Synthetic Construct
  source 1..23: mol_type = other RNA
tggcaatacgacgtacttagtgt

SEQ ID NO: 47317 - RNA, 22 nt, Synthetic Construct
  source 1..22: mol_type = other RNA
gtcagtttgtcaaataccccat

SEQ ID NO: 47318 - RNA, 35 nt, Synthetic Construct; identical to SEQ ID NO: 2615
  source 1..35: mol_type = other RNA

SEQ ID NO: 47319 - RNA, 35 nt, Synthetic Construct; identical to SEQ ID NO: 2615
  source 1..35: mol_type = other RNA

SEQ ID NO: 47320 - RNA, 22 nt, Synthetic Construct
  source 1..22: mol_type = other RNA
cgaggtagtagtttgtgctgtt

SEQ ID NO: 47321 - RNA, 22 nt, Synthetic Construct
  source 1..22: mol_type = other RNA
cgaggtagtagtttgtgctgtt

SEQ ID NO: 47322 - RNA, 23 nt, Synthetic Construct
  source 1..23: mol_type = other RNA
ggatatcatcatatactgtaagt

SEQ ID NO: 47323 - RNA, 23 nt, Synthetic Construct
  source 1..23: mol_type = other RNA
ggatatcatcatatactgtaagt

SEQ ID NO: 47324 - RNA, 15 nt, Synthetic Construct
  source 1..15: mol_type = other RNA
acccttgtcattagt

SEQ ID NO: 47325 - RNA, 15 nt, Synthetic Construct
  source 1..15: mol_type = other RNA
acccttgtcattagt

SEQ ID NO: 47326 - RNA, 36 nt, Synthetic Construct; identical to SEQ ID NO: 2456
  source 1..36: mol_type = other RNA

SEQ ID NO: 47327 - RNA, 19 nt, Synthetic Construct
  source 1..19: mol_type = other RNA
tctaatgagactgccggtg

SEQ ID NO: 47328 - RNA, 22 nt, Synthetic Construct
  source 1..22: mol_type = other RNA
tgaggtagtagattgtatagtc

SEQ ID NO: 47329 - RNA, 22 nt, Synthetic Construct
  source 1..22: mol_type = other RNA
tgaggtagtagattgtatagtc

SEQ ID NO: 47330 - RNA, 23 nt, Synthetic Construct
  source 1..23: mol_type = other RNA
tcctgtactgagctgccctgaga

SEQ ID NO: 47331 - RNA, 23 nt, Synthetic Construct
  source 1..23: mol_type = other RNA
tcctgtactgagctgccctgaga

SEQ ID NO: 47332 - RNA, 20 nt, Synthetic Construct
  source 1..20: mol_type = other RNA
tgaggtagtaggctgtgtgg

SEQ ID NO: 47333 - RNA, 20 nt, Synthetic Construct
  source 1..20: mol_type = other RNA
tgaggtagtaggctgtgtgg

SEQ ID NO: 47334 - RNA, 22 nt, Synthetic Construct
  source 1..22: mol_type = other RNA
tgtggtagtaggttgtgtggtt

SEQ ID NO: 47335 - RNA, 27 nt, Synthetic Construct
  source 1..27: mol_type = other RNA
ccccccactgctaaatttgactggcct

SEQ ID NO: 47336 - RNA, 21 nt, Synthetic Construct
  source 1..21: mol_type = other RNA
atcggaacgtgcccagtcgtg

SEQ ID NO: 47337 - RNA, 25 nt, Synthetic Construct
  source 1..25: mol_type = other RNA
tgaggggcagagagcgagacttttt

SEQ ID NO: 47338 - RNA, 22 nt, Synthetic Construct
  source 1..22: mol_type = other RNA
tcctgtactgaactgccccgag

SEQ ID NO: 47339 - RNA, 22 nt, Synthetic Construct
  source 1..22: mol_type = other RNA
tcctgtactgaactgccccgag

SEQ ID NO: 47340 - RNA, 17 nt, Synthetic Construct
  source 1..17: mol_type = other RNA
aagttgaccgcctgggg

SEQ ID NO: 47341 - RNA, 20 nt, Synthetic Construct
  source 1..20: mol_type = other RNA
cggcggggacggcgattggt

SEQ ID NO: 47342 - RNA, 20 nt, Synthetic Construct
  source 1..20: mol_type = other RNA
cggcggggacggcgattggt

SEQ ID NO: 47343 - RNA, 21 nt, Synthetic Construct
  source 1..21: mol_type = other RNA
agcgtgcttgactgcgagact

SEQ ID NO: 47344 - RNA, 24 nt, Synthetic Construct
  source 1..24: mol_type = other RNA
gatgaggcgtgataacgagtctgc

SEQ ID NO: 47345 - RNA, 24 nt, Synthetic Construct
  source 1..24: mol_type = other RNA
gatgaggcgtgataacgagtctgc

SEQ ID NO: 47346 - RNA, 23 nt, Synthetic Construct
  source 1..23: mol_type = other RNA
atatcggaacgtgcccagtcgtg

SEQ ID NO: 47347 - RNA, 23 nt, Synthetic Construct
  source 1..23: mol_type = other RNA
atatcggaacgtgcccagtcgtg

SEQ ID NO: 47348 - RNA, 17 nt, Synthetic Construct
  source 1..17: mol_type = other RNA
tcgctagtaatcgcgga

SEQ ID NO: 47349 - RNA, 17 nt, Synthetic Construct
  source 1..17: mol_type = other RNA
agacagcaggacggtgg

SEQ ID NO: 47350 - RNA, 17 nt, Synthetic Construct
  source 1..17: mol_type = other RNA
agacagcaggacggtgg

SEQ ID NO: 47351 - RNA, 23 nt, Synthetic Construct
  source 1..23: mol_type = other RNA
tggtaatatgacgtacttagtgt

SEQ ID NO: 47352 - RNA, 23 nt, Synthetic Construct
  source 1..23: mol_type = other RNA
tggaatgtaaagaagtatgtatt

SEQ ID NO: 47353 - RNA, 23 nt, Synthetic Construct
  source 1..23: mol_type = other RNA
tggaatgtaaagaagtatgtatt

SEQ ID NO: 47354 - RNA, 26 nt, Synthetic Construct
  source 1..26: mol_type = other RNA
gcgggcgtagctcaggggtagagcgc

SEQ ID NO: 47355 - RNA, 26 nt, Synthetic Construct
  source 1..26: mol_type = other RNA
gcgggcgtagctcaggggtagagcgc

SEQ ID NO: 47356 - RNA, 30 nt, Synthetic Construct; identical to SEQ ID NO: 6405
  source 1..30: mol_type = other RNA

SEQ ID NO: 47357 - RNA, 30 nt, Synthetic Construct; identical to SEQ ID NO: 6405
  source 1..30: mol_type = other RNA

SEQ ID NO: 47358 - RNA, 31 nt, Synthetic Construct; identical to SEQ ID NO: 2333
  source 1..31: mol_type = other RNA

SEQ ID NO: 47359 - RNA, 27 nt, Synthetic Construct
  source 1..27: mol_type = other RNA
ccccccacagctaaatttgactggcta

SEQ ID NO: 47360 - RNA, 28 nt, Synthetic Construct
  source 1..28: mol_type = other RNA
cccccccactgctaaatttgactggcta

SEQ ID NO: 47361 - RNA, 32 nt, Synthetic Construct; identical to SEQ ID NO: 3713
  source 1..32: mol_type = other RNA

SEQ ID NO: 47362 - RNA, 22 nt, Synthetic Construct
  source 1..22: mol_type = other RNA
gagagcctggacacaggtgctg

SEQ ID NO: 47363 - RNA, 22 nt, Synthetic Construct
  source 1..22: mol_type = other RNA
gagagcctggacacaggtgctg

SEQ ID NO: 47364 - RNA, 30 nt, Synthetic Construct; identical to SEQ ID NO: 2353
  source 1..30: mol_type = other RNA

SEQ ID NO: 47365 - RNA, 22 nt, Synthetic Construct
  source 1..22: mol_type = other RNA
tcctgtactgagctaccccgag

SEQ ID NO: 47366 - RNA, 22 nt, Synthetic Construct
  source 1..22: mol_type = other RNA
tcctgtactgagctaccccgag

SEQ ID NO: 47367 - RNA, 17 nt, Synthetic Construct
  source 1..17: mol_type = other RNA
agcggtggatgatgtgg

SEQ ID NO: 47368 - RNA, 17 nt, Synthetic Construct
  source 1..17: mol_type = other RNA
agcggtggatgatgtgg

SEQ ID NO: 47369 - RNA, 33 nt, Synthetic Construct; identical to SEQ ID NO: 2479
  source 1..33: mol_type = other RNA

SEQ ID NO: 47370 - RNA, 23 nt, Synthetic Construct
  source 1..23: mol_type = other RNA
cggtaatacgacgtacttagtgt

SEQ ID NO: 47371 - RNA, 21 nt, Synthetic Construct
  source 1..21: mol_type = other RNA
tgaggtagtagactgtatagt

SEQ ID NO: 47372 - RNA, 21 nt, Synthetic Construct
  source 1..21: mol_type = other RNA
tgaggtagtagactgtatagt

SEQ ID NO: 47373 - RNA, 20 nt, Synthetic Construct
  source 1..20: mol_type = other RNA
tagcttatcagactgatgtt

SEQ ID NO: 47374 - RNA, 20 nt, Synthetic Construct
  source 1..20: mol_type = other RNA
tagcttatcagactgatgtt

SEQ ID NO: 47375 - RNA, 28 nt, Synthetic Construct
  source 1..28: mol_type = other RNA
gctttacattggactttgaacagatctg

SEQ ID NO: 47376 - RNA, 26 nt, Synthetic Construct
  source 1..26: mol_type = other RNA
tgtcggctcatctcatcctggggctg

SEQ ID NO: 47377 - RNA, 26 nt, Synthetic Construct
  source 1..26: mol_type = other RNA
tgtcggctcatctcatcctggggctg

SEQ ID NO: 47378 - RNA, 22 nt, Synthetic Construct
  source 1..22: mol_type = other RNA
tcctgtattgagctgccccgag

SEQ ID NO: 47379 - RNA, 22 nt, Synthetic Construct
  source 1..22: mol_type = other RNA
tcctgtattgagctgccccgag

SEQ ID NO: 47380 - RNA, 34 nt, Synthetic Construct; identical to SEQ ID NO: 2265
  source 1..34: mol_type = other RNA

SEQ ID NO: 47381 - RNA, 34 nt, Synthetic Construct; identical to SEQ ID NO: 2265
  source 1..34: mol_type = other RNA

SEQ ID NO: 47382 - RNA, 34 nt, Synthetic Construct; identical to SEQ ID NO: 2019
  source 1..34: mol_type = other RNA

SEQ ID NO: 47383 - RNA, 22 nt, Synthetic Construct
  source 1..22: mol_type = other RNA
tgaggtggtagattgtatagtt

SEQ ID NO: 47384 - RNA, 22 nt, Synthetic Construct
  source 1..22: mol_type = other RNA
tgaggtggtagattgtatagtt

SEQ ID NO: 47385 - RNA, 19 nt, Synthetic Construct
  source 1..19: mol_type = other RNA
gtacagtactgtgataact

SEQ ID NO: 47386 - RNA, 19 nt, Synthetic Construct
  source 1..19: mol_type = other RNA
gtacagtactgtgataact

SEQ ID NO: 47387 - RNA, 23 nt, Synthetic Construct
  source 1..23: mol_type = other RNA
tggtaatacgtcgtacttagtgt

SEQ ID NO: 47388 - RNA, 21 nt, Synthetic Construct
  source 1..21: mol_type = other RNA
tgaggtagtaggttatgtggt

SEQ ID NO: 47389 - RNA, 21 nt, Synthetic Construct
  source 1..21: mol_type = other RNA
tgaggtagtaggttatgtggt

SEQ ID NO: 47390 - RNA, 21 nt, Synthetic Construct
  source 1..21: mol_type = other RNA
tgaggtagcagattgtatagt

SEQ ID NO: 47391 - RNA, 21 nt, Synthetic Construct
  source 1..21: mol_type = other RNA
tgaggtagcagattgtatagt

SEQ ID NO: 47392 - RNA, 23 nt, Synthetic Construct
  source 1..23: mol_type = other RNA
aggtaatacgacgtacttagtgt

SEQ ID NO: 47393 - RNA, 23 nt, Synthetic Construct
  source 1..23: mol_type = other RNA
aggtaatacgacgtacttagtgt

SEQ ID NO: 47394 - RNA, 22 nt, Synthetic Construct
  source 1..22: mol_type = other RNA
cattgcacttgtcccggtctga

SEQ ID NO: 47395 - RNA, 19 nt, Synthetic Construct
  source 1..19: mol_type = other RNA
cggaagaaggggtgcctgg

SEQ ID NO: 47396 - RNA, 19 nt, Synthetic Construct
  source 1..19: mol_type = other RNA
cggaagaaggggtgcctgg

SEQ ID NO: 47397 - RNA, 23 nt, Synthetic Construct
  source 1..23: mol_type = other RNA
tggtaatacgacgtacttaatgt

SEQ ID NO: 47398 - RNA, 23 nt, Synthetic Construct
  source 1..23: mol_type = other RNA
tggtaatacgacgtacttaatgt

SEQ ID NO: 47399 - RNA, 21 nt, Synthetic Construct
  source 1..21: mol_type = other RNA
tgaggcagtagattgtatagt

SEQ ID NO: 47400 - RNA, 21 nt, Synthetic Construct
  source 1..21: mol_type = other RNA
tgaggcagtagattgtatagt

SEQ ID NO: 47401 - RNA, 21 nt, Synthetic Construct
  source 1..21: mol_type = other RNA
tgaggtagtaggttgcatagt

SEQ ID NO: 47402 - RNA, 21 nt, Synthetic Construct
  source 1..21: mol_type = other RNA
tgaggtagtaggttgcatagt

SEQ ID NO: 47403 - RNA, 22 nt, Synthetic Construct
  source 1..22: mol_type = other RNA
tgaggtagtaggttgtacagtt

SEQ ID NO: 47404 - RNA, 22 nt, Synthetic Construct
  source 1..22: mol_type = other RNA
tgaggtagtaggttgtacagtt

SEQ ID NO: 47405 - RNA, 22 nt, Synthetic Construct
  source 1..22: mol_type = other RNA
tcctgtactgagttgccccgag

SEQ ID NO: 47406 - RNA, 22 nt, Synthetic Construct
  source 1..22: mol_type = other RNA
tcctgtactgagttgccccgag

SEQ ID NO: 47407 - RNA, 21 nt, Synthetic Construct
  source 1..21: mol_type = other RNA
tcctgtctgaatatgggggga

SEQ ID NO: 47408 - RNA, 21 nt, Synthetic Construct
  source 1..21: mol_type = other RNA
ctagactgaagctccttgaga

SEQ ID NO: 47409 - RNA, 17 nt, Synthetic Construct
  source 1..17: mol_type = other RNA
gaagttgaccgcctggg

SEQ ID NO: 47410 - RNA, 17 nt, Synthetic Construct
  source 1..17: mol_type = other RNA
gaagttgaccgcctggg

SEQ ID NO: 47411 - RNA, 22 nt, Synthetic Construct
  source 1..22: mol_type = other RNA
tgaggtaataggttgtgtggtt

SEQ ID NO: 47412 - RNA, 22 nt, Synthetic Construct
  source 1..22: mol_type = other RNA
tgaggtagaaggttgtgtggtt

SEQ ID NO: 47413 - RNA, 29 nt, Synthetic Construct
  source 1..29: mol_type = other RNA
gtaatggcgggaactctggacagactgcc

SEQ ID NO: 47414 - RNA, 29 nt, Synthetic Construct
  source 1..29: mol_type = other RNA
gtaatggcgggaactctggacagactgcc

SEQ ID NO: 47415 - RNA, 21 nt, Synthetic Construct
  source 1..21: mol_type = other RNA
agaggggcagagagcgagact

SEQ ID NO: 47416 - RNA, 21 nt, Synthetic Construct
  source 1..21: mol_type = other RNA
agaggggcagagagcgagact

SEQ ID NO: 47417 - RNA, 17 nt, Synthetic Construct
  source 1..17: mol_type = other RNA
gtcgacgtatagggtgt

SEQ ID NO: 47418 - RNA, 17 nt, Synthetic Construct
  source 1..17: mol_type = other RNA
gtcgacgtatagggtgt

SEQ ID NO: 47419 - RNA, 16 nt, Synthetic Construct
  source 1..16: mol_type = other RNA
tgcacgaaagcgtggg

SEQ ID NO: 47420 - RNA, 21 nt, Synthetic Construct
  source 1..21: mol_type = other RNA
tgaggcagtaggttgtgtggt

SEQ ID NO: 47421 - RNA, 21 nt, Synthetic Construct
  source 1..21: mol_type = other RNA
tgaggcagtaggttgtgtggt

SEQ ID NO: 47422 - RNA, 22 nt, Synthetic Construct
  source 1..22: mol_type = other RNA
cattgcacttgtcccggtctga

SEQ ID NO: 47423 - RNA, 22 nt, Synthetic Construct
  source 1..22: mol_type = other RNA
cattgcacttgtcccggtctga

SEQ ID NO: 47424 - RNA, 44 nt, Synthetic Construct; identical to SEQ ID NO: 5536
  source 1..44: mol_type = other RNA

SEQ ID NO: 47425 - RNA, 44 nt, Synthetic Construct; identical to SEQ ID NO: 5536
  source 1..44: mol_type = other RNA

SEQ ID NO: 47426 - RNA, 21 nt, Synthetic Construct
  source 1..21: mol_type = other RNA
tcctgtactgagctgccctga

SEQ ID NO: 47427 - RNA, 21 nt, Synthetic Construct
  source 1..21: mol_type = other RNA
tcctgtactgagctgccctga

SEQ ID NO: 47428 - RNA, 22 nt, Synthetic Construct
  source 1..22: mol_type = other RNA
tgggatgagggattgaagtgga

SEQ ID NO: 47429 - RNA, 21 nt, Synthetic Construct
  source 1..21: mol_type = other RNA
acagcaggacggtggccatgg

SEQ ID NO: 47430 - RNA, 21 nt, Synthetic Construct
  source 1..21: mol_type = other RNA
acagcaggacggtggccatgg

SEQ ID NO: 47431 - RNA, 22 nt, Synthetic Construct
  source 1..22: mol_type = other RNA
cattgcacctgtctcggtctga

SEQ ID NO: 47432 - RNA, 22 nt, Synthetic Construct
  source 1..22: mol_type = other RNA
cattgcacctgtctcggtctga

SEQ ID NO: 47433 - RNA, 23 nt, Synthetic Construct
  source 1..23: mol_type = other RNA
tgagaggcagagagcgagacttt

SEQ ID NO: 47434 - RNA, 24 nt, Synthetic Construct
  source 1..24: mol_type = other RNA
tgtaaacatccccgactggaggct

SEQ ID NO: 47435 - RNA, 24 nt, Synthetic Construct
  source 1..24: mol_type = other RNA
tgtaaacatccccgactggaggct

SEQ ID NO: 47436 - RNA, 20 nt, Synthetic Construct
  source 1..20: mol_type = other RNA
taaggtagtaggttgtgtgg

SEQ ID NO: 47437 - RNA, 21 nt, Synthetic Construct
  source 1..21: mol_type = other RNA
tcctgtaccgagctgccccga

SEQ ID NO: 47438 - RNA, 17 nt, Synthetic Construct
  source 1..17: mol_type = other RNA
ggcccttatgggtaggg

SEQ ID NO: 47439 - RNA, 28 nt, Synthetic Construct
  source 1..28: mol_type = other RNA
tgttggttcaagcgtgtagtcgtgctct

SEQ ID NO: 47440 - RNA, 31 nt, Synthetic Construct; identical to SEQ ID NO: 2333
  source 1..31: mol_type = other RNA

SEQ ID NO: 47441 - RNA, 31 nt, Synthetic Construct; identical to SEQ ID NO: 2333
  source 1..31: mol_type = other RNA

SEQ ID NO: 47442 - RNA, 23 nt, Synthetic Construct
  source 1..23: mol_type = other RNA
tgaggggcggagagcgagacttt

SEQ ID NO: 47443 - RNA, 23 nt, Synthetic Construct
  source 1..23: mol_type = other RNA
tggaaatacgacgtacttagtgt

SEQ ID NO: 47444 - RNA, 17 nt, Synthetic Construct
  source 1..17: mol_type = other RNA
tggccgggacagagggc

SEQ ID NO: 47445 - RNA, 21 nt, Synthetic Construct
  source 1..21: mol_type = other RNA
tggggtagtaggttgtatagt

SEQ ID NO: 47446 - RNA, 21 nt, Synthetic Construct
  source 1..21: mol_type = other RNA
tggggtagtaggttgtatagt

SEQ ID NO: 47447 - RNA, 20 nt, Synthetic Construct
  source 1..20: mol_type = other RNA
actgatcgagtcgtcctgcg

SEQ ID NO: 47448 - RNA, 16 nt, Synthetic Construct
  source 1..16: mol_type = other RNA
gcaagaggtcagcggt

SEQ ID NO: 47449 - RNA, 16 nt, Synthetic Construct
  source 1..16: mol_type = other RNA
gcaagaggtcagcggt

SEQ ID NO: 47450 - RNA, 16 nt, Synthetic Construct
  source 1..16: mol_type = other RNA
atctacggccatacca

SEQ ID NO: 47451 - RNA, 20 nt, Synthetic Construct
  source 1..20: mol_type = other RNA
gtgccgaagctgtgggattg

SEQ ID NO: 47452 - RNA, 20 nt, Synthetic Construct
  source 1..20: mol_type = other RNA
gtgccgaagctgtgggattg

SEQ ID NO: 47453 - RNA, 25 nt, Synthetic Construct
  source 1..25: mol_type = other RNA
gtgaggatatgagatcgagacgaca

SEQ ID NO: 47454 - RNA, 25 nt, Synthetic Construct
  source 1..25: mol_type = other RNA
gtgaggatatgagatcgagacgaca

SEQ ID NO: 47455 - RNA, 23 nt, Synthetic Construct
  source 1..23: mol_type = other RNA
tcctgtgctgagctgccccgaga

SEQ ID NO: 47456 - RNA, 23 nt, Synthetic Construct
  source 1..23: mol_type = other RNA
tcctgtgctgagctgccccgaga

SEQ ID NO: 47457 - RNA, 20 nt, Synthetic Construct
  source 1..20: mol_type = other RNA
tggctcagttcagcaggaaa

SEQ ID NO: 47458 - RNA, 20 nt, Synthetic Construct
  source 1..20: mol_type = other RNA
tggctcagttcagcaggaaa

SEQ ID NO: 47459 - RNA, 21 nt, Synthetic Construct
  source 1..21: mol_type = other RNA
tggggtagtaggttgtgtggt

SEQ ID NO: 47460 - RNA, 21 nt, Synthetic Construct
  source 1..21: mol_type = other RNA
tggggtagtaggttgtgtggt

SEQ ID NO: 47461 - RNA, 17 nt, Synthetic Construct
  source 1..17: mol_type = other RNA
atcgtgacgatagtgca

SEQ ID NO: 47462 - RNA, 17 nt, Synthetic Construct
  source 1..17: mol_type = other RNA
atcgtgacgatagtgca

SEQ ID NO: 47463 - RNA, 23 nt, Synthetic Construct
  source 1..23: mol_type = other RNA
taaggggcagagagcgagacttt

SEQ ID NO: 47464 - RNA, 23 nt, Synthetic Construct
  source 1..23: mol_type = other RNA
taaggggcagagagcgagacttt

SEQ ID NO: 47465 - RNA, 23 nt, Synthetic Construct
  source 1..23: mol_type = other RNA
tggcaatacgacgtacttagtgt

SEQ ID NO: 47466 - RNA, 23 nt, Synthetic Construct
  source 1..23: mol_type = other RNA
tggcaatacgacgtacttagtgt

SEQ ID NO: 47467 - RNA, 23 nt, Synthetic Construct
  source 1..23: mol_type = other RNA
ggtagcgaaattccttgtcgggt

SEQ ID NO: 47468 - RNA, 15 nt, Synthetic Construct
  source 1..15: mol_type = other RNA
ttccgaaagtagtgg

SEQ ID NO: 47469 - RNA, 15 nt, Synthetic Construct
  source 1..15: mol_type = other RNA
ttccgaaagtagtgg

SEQ ID NO: 47470 - RNA, 41 nt, Synthetic Construct; identical to SEQ ID NO: 2441
  source 1..41: mol_type = other RNA

SEQ ID NO: 47471 - RNA, 29 nt, Synthetic Construct
  source 1..29: mol_type = other RNA
ttacaggggttcgaatcccctaggggacg

SEQ ID NO: 47472 - RNA, 22 nt, Synthetic Construct
  source 1..22: mol_type = other RNA
tgaggtagtagtttgtgctgtc

SEQ ID NO: 47473 - RNA, 22 nt, Synthetic Construct
  source 1..22: mol_type = other RNA
tgaggtagtagtttgtgctgtc

SEQ ID NO: 47474 - RNA, 22 nt, Synthetic Construct
  source 1..22: mol_type = other RNA
tggagtgtgacaatggtgcttg

SEQ ID NO: 47475 - RNA, 22 nt, Synthetic Construct
  source 1..22: mol_type = other RNA
tggagtgtgacaatggtgcttg

SEQ ID NO: 47476 - RNA, 19 nt, Synthetic Construct
  source 1..19: mol_type = other RNA
cacatgcaagtcgaacggt

SEQ ID NO: 47477 - RNA, 22 nt, Synthetic Construct
  source 1..22: mol_type = other RNA
tacagtagtctgcacattggtt

SEQ ID NO: 47478 - RNA, 22 nt, Synthetic Construct
  source 1..22: mol_type = other RNA
tacagtagtctgcacattggtt

SEQ ID NO: 47479 - RNA, 23 nt, Synthetic Construct
  source 1..23: mol_type = other RNA
tcggaatcgctagtaatcgcgga

SEQ ID NO: 47480 - RNA, 20 nt, Synthetic Construct
  source 1..20: mol_type = other RNA
tgaggtggtaggttgtgtgg

SEQ ID NO: 47481 - RNA, 20 nt, Synthetic Construct
  source 1..20: mol_type = other RNA
tgaggtggtaggttgtgtgg

SEQ ID NO: 47482 - RNA, 15 nt, Synthetic Construct
  source 1..15: mol_type = other RNA
gtcgacgtatagggt

SEQ ID NO: 47483 - RNA, 23 nt, Synthetic Construct
  source 1..23: mol_type = other RNA
tggtaatacgacgtacttagtgt

SEQ ID NO: 47484 - RNA, 22 nt, Synthetic Construct
  source 1..22: mol_type = other RNA
ggatatcatcatatactgtaag

SEQ ID NO: 47485 - RNA, 22 nt, Synthetic Construct
  source 1..22: mol_type = other RNA
ggatatcatcatatactgtaag

SEQ ID NO: 47486 - RNA, 16 nt, Synthetic Construct
  source 1..16: mol_type = other RNA
ggcgggggtcgctggt

SEQ ID NO: 47487 - RNA, 16 nt, Synthetic Construct
  source 1..16: mol_type = other RNA
ggcgggggtcgctggt

SEQ ID NO: 47488 - RNA, 16 nt, Synthetic Construct
  source 1..16: mol_type = other RNA
gatctgtagctggtct

SEQ ID NO: 47489 - RNA, 16 nt, Synthetic Construct
  source 1..16: mol_type = other RNA
gatctgtagctggtct

SEQ ID NO: 47490 - RNA, 20 nt, Synthetic Construct
  source 1..20: mol_type = other RNA
tgaagtagtaggttgtgtgg

SEQ ID NO: 47491 - RNA, 20 nt, Synthetic Construct
  source 1..20: mol_type = other RNA
tgaagtagtaggttgtgtgg

SEQ ID NO: 47492 - RNA, 18 nt, Synthetic Construct
  source 1..18: mol_type = other RNA
ggtagcgtggccgagcgg

SEQ ID NO: 47493 - RNA, 18 nt, Synthetic Construct
  source 1..18: mol_type = other RNA
ggtagcgtggccgagcgg

SEQ ID NO: 47494 - RNA, 22 nt, Synthetic Construct
  source 1..22: mol_type = other RNA
tcctgtactgagcagccccgag

SEQ ID NO: 47495 - RNA, 22 nt, Synthetic Construct
  source 1..22: mol_type = other RNA
tcctgtactgagcagccccgag

SEQ ID NO: 47496 - RNA, 25 nt, Synthetic Construct
  source 1..25: mol_type = other RNA
tttccccttggggttgtaggaccac

SEQ ID NO: 47497 - RNA, 25 nt, Synthetic Construct
  source 1..25: mol_type = other RNA
tttccccttggggttgtaggaccac

SEQ ID NO: 47498 - RNA, 16 nt, Synthetic Construct
  source 1..16: mol_type = other RNA
cccagaaacccggtcg

SEQ ID NO: 47499 - RNA, 16 nt, Synthetic Construct
  source 1..16: mol_type = other RNA
gcgtagatatgcggag

SEQ ID NO: 47500 - RNA, 16 nt, Synthetic Construct
  source 1..16: mol_type = other RNA
gcgtagatatgcggag

SEQ ID NO: 47501 - RNA, 35 nt, Synthetic Construct; identical to SEQ ID NO: 730
  source 1..35: mol_type = other RNA

SEQ ID NO: 47502 - RNA, 35 nt, Synthetic Construct; identical to SEQ ID NO: 730
  source 1..35: mol_type = other RNA

SEQ ID NO: 47503 - RNA, 23 nt, Synthetic Construct
  source 1..23: mol_type = other RNA
tcctgtgctgagctgccccgaga

SEQ ID NO: 47504 - RNA, 23 nt, Synthetic Construct
  source 1..23: mol_type = other RNA
tcctgtgctgagctgccccgaga

SEQ ID NO: 47505 - RNA, 20 nt, Synthetic Construct
  source 1..20: mol_type = other RNA
tgaggtagtaggttgtgagg

SEQ ID NO: 47506 - RNA, 20 nt, Synthetic Construct
  source 1..20: mol_type = other RNA
tgaggtagtaggttgtgagg

SEQ ID NO: 47507 - RNA, 23 nt, Synthetic Construct
  source 1..23: mol_type = other RNA
tcccgtactgagctgccccgagt

SEQ ID NO: 47508 - RNA, 23 nt, Synthetic Construct
  source 1..23: mol_type = other RNA
tcccgtactgagctgccccgagt

SEQ ID NO: 47509 - RNA, 35 nt, Synthetic Construct; identical to SEQ ID NO: 2615
  source 1..35: mol_type = other RNA

SEQ ID NO: 47510 - RNA, 23 nt, Synthetic Construct
  source 1..23: mol_type = other RNA
tctttgttcgattccgttgagta

SEQ ID NO: 47511 - RNA, 23 nt, Synthetic Construct
  source 1..23: mol_type = other RNA
tgaggtagtaggtcgtgtggttt

SEQ ID NO: 47512 - RNA, 26 nt, Synthetic Construct
  source 1..26: mol_type = other RNA
gactcttagcggtggatcactcggct

SEQ ID NO: 47513 - RNA, 26 nt, Synthetic Construct
  source 1..26: mol_type = other RNA
gactcttagcggtggatcactcggct

SEQ ID NO: 47514 - RNA, 21 nt, Synthetic Construct
  source 1..21: mol_type = other RNA
tgaggggcggagagcgagact

SEQ ID NO: 47515 - RNA, 21 nt, Synthetic Construct
  source 1..21: mol_type = other RNA
tgaggggcggagagcgagact

SEQ ID NO: 47516 - RNA, 32 nt, Synthetic Construct; identical to SEQ ID NO: 2582
  source 1..32: mol_type = other RNA

SEQ ID NO: 47517 - RNA, 21 nt, Synthetic Construct
  source 1..21: mol_type = other RNA
tgaggtagtaggttgtgtagt

SEQ ID NO: 47518 - RNA, 35 nt, Synthetic Construct; identical to SEQ ID NO: 2402
  source 1..35: mol_type = other RNA

SEQ ID NO: 47519 - RNA, 23 nt, Synthetic Construct
  source 1..23: mol_type = other RNA
tggtaatacgacgtacttagtgt

SEQ ID NO: 47520 - RNA, 20 nt, Synthetic Construct
  source 1..20: mol_type = other RNA
actgatcgagtcgtcctgcg

SEQ ID NO: 47521 - RNA, 22 nt, Synthetic Construct
  source 1..22: mol_type = other RNA
tgaggtagcaggttgtgtggtt

SEQ ID NO: 47522 - RNA, 22 nt, Synthetic Construct
  source 1..22: mol_type = other RNA
tgaggtagcaggttgtgtggtt

SEQ ID NO: 47523 - RNA, 22 nt, Synthetic Construct
  source 1..22: mol_type = other RNA
atataatacaacctgctaagtg

SEQ ID NO: 47524 - RNA, 22 nt, Synthetic Construct
  source 1..22: mol_type = other RNA
atataatacaacctgctaagtg

SEQ ID NO: 47525 - RNA, 26 nt, Synthetic Construct
  source 1..26: mol_type = other RNA
aaaccgttaccattactgagtttagt

SEQ ID NO: 47526 - RNA, 26 nt, Synthetic Construct
  source 1..26: mol_type = other RNA
aaaccgttaccattactgagtttagt

SEQ ID NO: 47527 - RNA, 20 nt, Synthetic Construct
  source 1..20: mol_type = other RNA
tgaggtagtaggttgtacag

SEQ ID NO: 47528 - RNA, 20 nt, Synthetic Construct
  source 1..20: mol_type = other RNA
tgaggtagtaggttgtacag

SEQ ID NO: 47529 - RNA, 16 nt, Synthetic Construct
  source 1..16: mol_type = other RNA
cagtcaggatgttggc

SEQ ID NO: 47530 - RNA, 16 nt, Synthetic Construct
  source 1..16: mol_type = other RNA
gtctacgaccatacca

SEQ ID NO: 47531 - RNA, 21 nt, Synthetic Construct
  source 1..21: mol_type = other RNA
ctagactgaagctccttgggg

SEQ ID NO: 47532 - RNA, 16 nt, Synthetic Construct
  source 1..16: mol_type = other RNA
ccaaggggtcgtgggt

SEQ ID NO: 47533 - RNA, 23 nt, Synthetic Construct
  source 1..23: mol_type = other RNA
tcctgcactgagctgccccgagt

SEQ ID NO: 47534 - RNA, 23 nt, Synthetic Construct
  source 1..23: mol_type = other RNA
tcctgcactgagctgccccgagt

SEQ ID NO: 47535 - RNA, 15 nt, Synthetic Construct
  source 1..15: mol_type = other RNA
gtcaggatgttggct

SEQ ID NO: 47536 - RNA, 20 nt, Synthetic Construct
  source 1..20: mol_type = other RNA
gctattgacgaccgtaccgc

SEQ ID NO: 47537 - RNA, 23 nt, Synthetic Construct
  source 1..23: mol_type = other RNA
tgataatacgacgtacttagtgt

SEQ ID NO: 47538 - RNA, 18 nt, Synthetic Construct
  source 1..18: mol_type = other RNA
caacggaatcccaaaagc

SEQ ID NO: 47539 - RNA, 18 nt, Synthetic Construct
  source 1..18: mol_type = other RNA
caacggaatcccaaaagc

SEQ ID NO: 47540 - RNA, 21 nt, Synthetic Construct
  source 1..21: mol_type = other RNA
tgaggggcagggagcgagact

SEQ ID NO: 47541 - RNA, 29 nt, Synthetic Construct
  source 1..29: mol_type = other RNA
tgaaggtgggttgtgaagcctgctggagg

SEQ ID NO: 47542 - RNA, 17 nt, Synthetic Construct
  source 1..17: mol_type = other RNA
gtccggatcgtagtctg

SEQ ID NO: 47543 - RNA, 17 nt, Synthetic Construct
  source 1..17: mol_type = other RNA
gtccggatcgtagtctg

SEQ ID NO: 47544 - RNA, 34 nt, Synthetic Construct; identical to SEQ ID NO: 2183
  source 1..34: mol_type = other RNA

SEQ ID NO: 47545 - RNA, 34 nt, Synthetic Construct; identical to SEQ ID NO: 2183
  source 1..34: mol_type = other RNA

SEQ ID NO: 47546 - RNA, 25 nt, Synthetic Construct
  source 1..25: mol_type = other RNA
ttgaggatatgagatcgagacaaca

SEQ ID NO: 47547 - RNA, 16 nt, Synthetic Construct
  source 1..16: mol_type = other RNA
tccgaaccgactagtg

SEQ ID NO: 47548 - RNA, 16 nt, Synthetic Construct
  source 1..16: mol_type = other RNA
tccgaaccgactagtg

SEQ ID NO: 47549 - RNA, 30 nt, Synthetic Construct; identical to SEQ ID NO: 1771
  source 1..30: mol_type = other RNA

SEQ ID NO: 47550 - RNA, 30 nt, Synthetic Construct; identical to SEQ ID NO: 1771
  source 1..30: mol_type = other RNA

SEQ ID NO: 47551 - RNA, 15 nt, Synthetic Construct
  source 1..15: mol_type = other RNA
gtccggatcgtagtc

SEQ ID NO: 47552 - RNA, 17 nt, Synthetic Construct
  source 1..17: mol_type = other RNA
tcccctggacctgtact

SEQ ID NO: 47553 - RNA, 17 nt, Synthetic Construct
  source 1..17: mol_type = other RNA
tcccctggacctgtact

SEQ ID NO: 47554 - RNA, 23 nt, Synthetic Construct
  source 1..23: mol_type = other RNA
tgaggggcagagagcaagacttt

SEQ ID NO: 47555 - RNA, 23 nt, Synthetic Construct
  source 1..23: mol_type = other RNA
tgaggggcagagagcaagacttt

SEQ ID NO: 47556 - RNA, 21 nt, Synthetic Construct
  source 1..21: mol_type = other RNA
cgaggtagtagtttgtgctgt

SEQ ID NO: 47557 - RNA, 22 nt, Synthetic Construct
  source 1..22: mol_type = other RNA
tcttgtactgagctgccccgag

SEQ ID NO: 47558 - RNA, 22 nt, Synthetic Construct
  source 1..22: mol_type = other RNA
tcttgtactgagctgccccgag

SEQ ID NO: 47559 - RNA, 20 nt, Synthetic Construct
  source 1..20: mol_type = other RNA
tggggtagtaggttgtgtgg

SEQ ID NO: 47560 - RNA, 20 nt, Synthetic Construct
  source 1..20: mol_type = other RNA
tgaggtagtaggtcgtatag

SEQ ID NO: 47561 - RNA, 20 nt, Synthetic Construct
  source 1..20: mol_type = other RNA
tgaggtagtaggtcgtatag

SEQ ID NO: 47562 - RNA, 21 nt, Synthetic Construct
  source 1..21: mol_type = other RNA
tggagtgtgacagtggtgttt

SEQ ID NO: 47563 - RNA, 21 nt, Synthetic Construct
  source 1..21: mol_type = other RNA
tggagtgtgacagtggtgttt

SEQ ID NO: 47564 - RNA, 23 nt, Synthetic Construct
  source 1..23: mol_type = other RNA
agcagcattgtacagggctacga

SEQ ID NO: 47565 - RNA, 23 nt, Synthetic Construct
  source 1..23: mol_type = other RNA
agcagcattgtacagggctacga

SEQ ID NO: 47566 - RNA, 16 nt, Synthetic Construct
  source 1..16: mol_type = other RNA
gctattgacgaccgta

SEQ ID NO: 47567 - RNA, 16 nt, Synthetic Construct
  source 1..16: mol_type = other RNA
gctattgacgaccgta

SEQ ID NO: 47568 - RNA, 21 nt, Synthetic Construct
  source 1..21: mol_type = other RNA
aacggaatcccaaaagcagct

SEQ ID NO: 47569 - RNA, 21 nt, Synthetic Construct
  source 1..21: mol_type = other RNA
aacggaatcccaaaagcagct

SEQ ID NO: 47570 - RNA, 19 nt, Synthetic Construct
  source 1..19: mol_type = other RNA
cctgtctgaatatgggggg

SEQ ID NO: 47571 - RNA, 19 nt, Synthetic Construct
  source 1..19: mol_type = other RNA
cctgtctgaatatgggggg

SEQ ID NO: 47572 - RNA, 20 nt, Synthetic Construct
  source 1..20: mol_type = other RNA
cccagtaaacggcggccgta

SEQ ID NO: 47573 - RNA, 24 nt, Synthetic Construct
  source 1..24: mol_type = other RNA
atcacattgccagggatttccaat

SEQ ID NO: 47574 - RNA, 24 nt, Synthetic Construct
  source 1..24: mol_type = other RNA
atcacattgccagggatttccaat

SEQ ID NO: 47575 - RNA, 35 nt, Synthetic Construct; identical to SEQ ID NO: 2518
  source 1..35: mol_type = other RNA

SEQ ID NO: 47576 - RNA, 16 nt, Synthetic Construct
  source 1..16: mol_type = other RNA
aggtcatcattatctg

SEQ ID NO: 47577 - RNA, 15 nt, Synthetic Construct
  source 1..15: mol_type = other RNA
aaattccttgtcggg

SEQ ID NO: 47578 - RNA, 15 nt, Synthetic Construct
  source 1..15: mol_type = other RNA
aaattccttgtcggg

SEQ ID NO: 47579 - RNA, 22 nt, Synthetic Construct
  source 1..22: mol_type = other RNA
tgtcaactggttgttgggaggg

SEQ ID NO: 47580 - RNA, 24 nt, Synthetic Construct
  source 1..24: mol_type = other RNA
cgggcctggttagtacttggatgg

SEQ ID NO: 47581 - RNA, 18 nt, Synthetic Construct
  source 1..18: mol_type = other RNA
tcccctggacctgtactg

SEQ ID NO: 47582 - RNA, 31 nt, Synthetic Construct; identical to SEQ ID NO: 2507
  source 1..31: mol_type = other RNA

SEQ ID NO: 47583 - RNA, 21 nt, Synthetic Construct
  source 1..21: mol_type = other RNA
ggaggagttcgaaggtacgct

SEQ ID NO: 47584 - RNA, 15 nt, Synthetic Construct
  source 1..15: mol_type = other RNA
tgcaagtcgaacggt

SEQ ID NO: 47585 - RNA, 18 nt, Synthetic Construct
  source 1..18: mol_type = other RNA
gtcaggatggccgagcgg

SEQ ID NO: 47586 - RNA, 18 nt, Synthetic Construct
  source 1..18: mol_type = other RNA
gtcaggatggccgagcgg

SEQ ID NO: 47587 - RNA, 21 nt, Synthetic Construct
  source 1..21: mol_type = other RNA
tggggtagtagtttgtgctgt

SEQ ID NO: 47588 - RNA, 21 nt, Synthetic Construct
  source 1..21: mol_type = other RNA
tggggtagtagtttgtgctgt

SEQ ID NO: 47589 - RNA, 24 nt, Synthetic Construct
  source 1..24: mol_type = other RNA
ggctacattgtctgctgggtttct

SEQ ID NO: 47590 - RNA, 24 nt, Synthetic Construct
  source 1..24: mol_type = other RNA
ggctacattgtctgctgggtttct

SEQ ID NO: 47591 - RNA, 15 nt, Synthetic Construct
  source 1..15: mol_type = other RNA
ccagaaacccggtcg

SEQ ID NO: 47592 - RNA, 15 nt, Synthetic Construct
  source 1..15: mol_type = other RNA
ccagaaacccggtcg

SEQ ID NO: 47593 - RNA, 16 nt, Synthetic Construct
  source 1..16: mol_type = other RNA
gcgtagatatgcggag

SEQ ID NO: 47594 - RNA, 16 nt, Synthetic Construct
  source 1..16: mol_type = other RNA
gcgtagatatgcggag

SEQ ID NO: 47595 - RNA, 15 nt, Synthetic Construct
  source 1..15: mol_type = other RNA
gagagcctggacaca

SEQ ID NO: 47596 - RNA, 21 nt, Synthetic Construct
  source 1..21: mol_type = other RNA
tcctgtactgagccgccccga

SEQ ID NO: 47597 - RNA, 21 nt, Synthetic Construct
  source 1..21: mol_type = other RNA
tcctgtactgagccgccccga

SEQ ID NO: 47598 - RNA, 22 nt, Synthetic Construct
  source 1..22: mol_type = other RNA
tggggtagtagtttgtgctgtt

SEQ ID NO: 47599 - RNA, 22 nt, Synthetic Construct
  source 1..22: mol_type = other RNA
tggggtagtagtttgtgctgtt

SEQ ID NO: 47600 - RNA, 19 nt, Synthetic Construct
  source 1..19: mol_type = other RNA
agcgaaattccttgtcggg

SEQ ID NO: 47601 - RNA, 22 nt, Synthetic Construct
  source 1..22: mol_type = other RNA
gaagcacattcgcacatcatat

SEQ ID NO: 47602 - RNA, 22 nt, Synthetic Construct
  source 1..22: mol_type = other RNA
gaagcacattcgcacatcatat

SEQ ID NO: 47603 - RNA, 24 nt, Synthetic Construct
  source 1..24: mol_type = other RNA
cggagaaggttagctcagccaact

SEQ ID NO: 47604 - RNA, 20 nt, Synthetic Construct
  source 1..20: mol_type = other RNA
cccgtgttcggaagattttc

SEQ ID NO: 47605 - RNA, 20 nt, Synthetic Construct
  source 1..20: mol_type = other RNA
cccgtgttcggaagattttc

SEQ ID NO: 47606 - RNA, 20 nt, Synthetic Construct
  source 1..20: mol_type = other RNA
ccttggggttgtaggaccac

SEQ ID NO: 47607 - RNA, 20 nt, Synthetic Construct
  source 1..20: mol_type = other RNA
ccttggggttgtaggaccac

SEQ ID NO: 47608 - RNA, 21 nt, Synthetic Construct
  source 1..21: mol_type = other RNA
gaagaggacttggaactcgat

SEQ ID NO: 47609 - RNA, 21 nt, Synthetic Construct
  source 1..21: mol_type = other RNA
gaagaggacttggaactcgat

SEQ ID NO: 47610 - RNA, 23 nt, Synthetic Construct
  source 1..23: mol_type = other RNA
cgagagtaggacgttgccaggtt

SEQ ID NO: 47611 - RNA, 23 nt, Synthetic Construct
  source 1..23: mol_type = other RNA
cgagagtaggacgttgccaggtt

SEQ ID NO: 47612 - RNA, 31 nt, Synthetic Construct; identical to SEQ ID NO: 2423
  source 1..31: mol_type = other RNA

SEQ ID NO: 47613 - RNA, 21 nt, Synthetic Construct
  source 1..21: mol_type = other RNA
tgaggcagtaggttgtgtggt

SEQ ID NO: 47614 - RNA, 21 nt, Synthetic Construct
  source 1..21: mol_type = other RNA
tgaggcagtaggttgtgtggt

SEQ ID NO: 47615 - RNA, 18 nt, Synthetic Construct
  source 1..18: mol_type = other RNA
tcttcggtagtatagtgg

SEQ ID NO: 47616 - RNA, 18 nt, Synthetic Construct
  source 1..18: mol_type = other RNA
tcttcggtagtatagtgg

SEQ ID NO: 47617 - RNA, 23 nt, Synthetic Construct
  source 1..23: mol_type = other RNA
ggcggttatgcaagacagaggtg

SEQ ID NO: 47618 - RNA, 25 nt, Synthetic Construct
  source 1..25: mol_type = other RNA
ttgaggatatgggatcgagacgaca

SEQ ID NO: 47619 - RNA, 25 nt, Synthetic Construct
  source 1..25: mol_type = other RNA
ttgaggatatgggatcgagacgaca

SEQ ID NO: 47620 - RNA, 23 nt, Synthetic Construct
  source 1..23: mol_type = other RNA
tggggggcagagagcgagacttt

SEQ ID NO: 47621 - RNA, 23 nt, Synthetic Construct
  source 1..23: mol_type = other RNA
tggggggcagagagcgagacttt

SEQ ID NO: 47622 - RNA, 26 nt, Synthetic Construct
  source 1..26: mol_type = other RNA
tccctggtggtctagtggttaggatt

SEQ ID NO: 47623 - RNA, 26 nt, Synthetic Construct
  source 1..26: mol_type = other RNA
tccctggtggtctagtggttaggatt

SEQ ID NO: 47624 - RNA, 23 nt, Synthetic Construct
  source 1..23: mol_type = other RNA
tcctgtaccgagctgccccgagt

SEQ ID NO: 47625 - RNA, 22 nt, Synthetic Construct
  source 1..22: mol_type = other RNA
ctttcagtcggatgtttgcagc

SEQ ID NO: 47626 - RNA, 21 nt, Synthetic Construct
  source 1..21: mol_type = other RNA
tgaggcagtaggttgtatagt

SEQ ID NO: 47627 - RNA, 21 nt, Synthetic Construct
  source 1..21: mol_type = other RNA
tgaggcagtaggttgtatagt

SEQ ID NO: 47628 - RNA, 16 nt, Synthetic Construct
  source 1..16: mol_type = other RNA
gatctgtagctggtct

SEQ ID NO: 47629 - RNA, 20 nt, Synthetic Construct
  source 1..20: mol_type = other RNA
tgaggtagcaggttgtgtgg

SEQ ID NO: 47630 - RNA, 34 nt, Synthetic Construct; identical to SEQ ID NO: 2364
  source 1..34: mol_type = other RNA

SEQ ID NO: 47631 - RNA, 34 nt, Synthetic Construct; identical to SEQ ID NO: 2364
  source 1..34: mol_type = other RNA

SEQ ID NO: 47632 - RNA, 22 nt, Synthetic Construct
  source 1..22: mol_type = other RNA
tcctgtgctgagctgccccgag

SEQ ID NO: 47633 - RNA, 22 nt, Synthetic Construct
  source 1..22: mol_type = other RNA
tcctgtgctgagctgccccgag

SEQ ID NO: 47634 - RNA, 27 nt, Synthetic Construct
  source 1..27: mol_type = other RNA
ccccccactgctaaatttgactggctc

SEQ ID NO: 47635 - RNA, 21 nt, Synthetic Construct
  source 1..21: mol_type = other RNA
tgaggggcagagagcgaggct

SEQ ID NO: 47636 - RNA, 18 nt, Synthetic Construct
  source 1..18: mol_type = other RNA
ggccgtcgtcagctcgtg

SEQ ID NO: 47637 - RNA, 27 nt, Synthetic Construct
  source 1..27: mol_type = other RNA
agagcagctaataccgcatacgacctg

SEQ ID NO: 47638 - RNA, 18 nt, Synthetic Construct
  source 1..18: mol_type = other RNA
cgccgatgatagtgcgga

SEQ ID NO: 47639 - RNA, 23 nt, Synthetic Construct
  source 1..23: mol_type = other RNA
ggatatcatcatatactgtaagt

SEQ ID NO: 47640 - RNA, 23 nt, Synthetic Construct
  source 1..23: mol_type = other RNA
ggatatcatcatatactgtaagt

SEQ ID NO: 47641 - RNA, 22 nt, Synthetic Construct
  source 1..22: mol_type = other RNA
tgaggtagtagattgtacagtt

SEQ ID NO: 47642 - RNA, 22 nt, Synthetic Construct
  source 1..22: mol_type = other RNA
tgaggtagtagattgtacagtt

SEQ ID NO: 47643 - RNA, 24 nt, Synthetic Construct
  source 1..24: mol_type = other RNA
tgtaaacacccccgactggaagct

SEQ ID NO: 47644 - RNA, 15 nt, Synthetic Construct
  source 1..15: mol_type = other RNA
cagtgaaacgagtca

SEQ ID NO: 47645 - RNA, 22 nt, Synthetic Construct
  source 1..22: mol_type = other RNA
tacagtagtctgcacattggtt

SEQ ID NO: 47646 - RNA, 15 nt, Synthetic Construct
  source 1..15: mol_type = other RNA
gagctgtggataggg

SEQ ID NO: 47647 - RNA, 22 nt, Synthetic Construct
  source 1..22: mol_type = other RNA
tgaggtagtagattgtatggtt

SEQ ID NO: 47648 - RNA, 22 nt, Synthetic Construct
  source 1..22: mol_type = other RNA
tgaggtagtagattgtatggtt

SEQ ID NO: 47649 - RNA, 37 nt, Synthetic Construct; identical to SEQ ID NO: 2365
  source 1..37: mol_type = other RNA

SEQ ID NO: 47650 - RNA, 37 nt, Synthetic Construct; identical to SEQ ID NO: 2365
  source 1..37: mol_type = other RNA

SEQ ID NO: 47651 - RNA, 35 nt, Synthetic Construct; identical to SEQ ID NO: 2069
  source 1..35: mol_type = other RNA

SEQ ID NO: 47652 - RNA, 35 nt, Synthetic Construct; identical to SEQ ID NO: 2069
  source 1..35: mol_type = other RNA

SEQ ID NO: 47653 - RNA, 23 nt, Synthetic Construct
  source 1..23: mol_type = other RNA
tggtgatacgacgtacttagtgt

SEQ ID NO: 47654 - RNA, 32 nt, Synthetic Construct; identical to SEQ ID NO: 2850
  source 1..32: mol_type = other RNA

SEQ ID NO: 47655 - RNA, 32 nt, Synthetic Construct; identical to SEQ ID NO: 2850
  source 1..32: mol_type = other RNA

SEQ ID NO: 47656 - RNA, 22 nt, Synthetic Construct
  source 1..22: mol_type = other RNA
tgaggtagtaggttgtatggta

SEQ ID NO: 47657 - RNA, 16 nt, Synthetic Construct
  source 1..16: mol_type = other RNA
gcggtggatgatgtgg

SEQ ID NO: 47658 - RNA, 16 nt, Synthetic Construct
  source 1..16: mol_type = other RNA
gcggtggatgatgtgg

SEQ ID NO: 47659 - RNA, 23 nt, Synthetic Construct
  source 1..23: mol_type = other RNA
gtctttgttcgattccgttgagt

SEQ ID NO: 47660 - RNA, 25 nt, Synthetic Construct
  source 1..25: mol_type = other RNA
atgaggatatgagatcgagacgaca

SEQ ID NO: 47661 - RNA, 25 nt, Synthetic Construct
  source 1..25: mol_type = other RNA
atgaggatatgagatcgagacgaca

SEQ ID NO: 47662 - RNA, 37 nt, Synthetic Construct; identical to SEQ ID NO: 2607
  source 1..37: mol_type = other RNA

SEQ ID NO: 47663 - RNA, 37 nt, Synthetic Construct; identical to SEQ ID NO: 2607
  source 1..37: mol_type = other RNA

SEQ ID NO: 47664 - RNA, 17 nt, Synthetic Construct
  source 1..17: mol_type = other RNA
tggccgtcgtcagctcg

SEQ ID NO: 47665 - RNA, 17 nt, Synthetic Construct
  source 1..17: mol_type = other RNA
tggccgtcgtcagctcg

SEQ ID NO: 47666 - RNA, 18 nt, Synthetic Construct
  source 1..18: mol_type = other RNA
ctaatgagactgccggtg

SEQ ID NO: 47667 - RNA, 26 nt, Synthetic Construct
  source 1..26: mol_type = other RNA
gactcttagcggtggatcactcggct

SEQ ID NO: 47668 - RNA, 26 nt, Synthetic Construct
  source 1..26: mol_type = other RNA
gactcttagcggtggatcactcggct

SEQ ID NO: 47669 - RNA, 22 nt, Synthetic Construct
  source 1..22: mol_type = other RNA
gggagtgtgacaatggtgtttg

SEQ ID NO: 47670 - RNA, 22 nt, Synthetic Construct
  source 1..22: mol_type = other RNA
tgaggtagtagtctgtgctgtt

SEQ ID NO: 47671 - RNA, 22 nt, Synthetic Construct
  source 1..22: mol_type = other RNA
tgaggtagtagtctgtgctgtt

SEQ ID NO: 47672 - RNA, 21 nt, Synthetic Construct
  source 1..21: mol_type = other RNA
tggggtgtgacaatggtgttt

SEQ ID NO: 47673 - RNA, 21 nt, Synthetic Construct
  source 1..21: mol_type = other RNA
tggggtgtgacaatggtgttt

SEQ ID NO: 47674 - RNA, 22 nt, Synthetic Construct
  source 1..22: mol_type = other RNA
tagcagcacgtagatattggcg

SEQ ID NO: 47675 - RNA, 22 nt, Synthetic Construct
  source 1..22: mol_type = other RNA
tagcagcacgtagatattggcg

SEQ ID NO: 47676 - RNA, 22 nt, Synthetic Construct
  source 1..22: mol_type = other RNA
tgtcaactggttgttgggaggg

SEQ ID NO: 47677 - RNA, 22 nt, Synthetic Construct
  source 1..22: mol_type = other RNA
gtagtgtttcctactttatgga

SEQ ID NO: 47678 - RNA, 19 nt, Synthetic Construct
  source 1..19: mol_type = other RNA
tggccgtcgtcagctcgtg

SEQ ID NO: 47679 - RNA, 16 nt, Synthetic Construct
  source 1..16: mol_type = other RNA
gtctacggccgtacca

SEQ ID NO: 47680 - RNA, 16 nt, Synthetic Construct
  source 1..16: mol_type = other RNA
gtctacggccgtacca

SEQ ID NO: 47681 - RNA, 22 nt, Synthetic Construct
  source 1..22: mol_type = other RNA
tgtgcaaatccatgcaaaactg

SEQ ID NO: 47682 - RNA, 22 nt, Synthetic Construct
  source 1..22: mol_type = other RNA
tgtgcaaatccatgcaaaactg

SEQ ID NO: 47683 - RNA, 17 nt, Synthetic Construct
  source 1..17: mol_type = other RNA
ccaaggggtcgtgggtt

SEQ ID NO: 47684 - RNA, 33 nt, Synthetic Construct; identical to SEQ ID NO: 2395
  source 1..33: mol_type = other RNA

SEQ ID NO: 47685 - RNA, 33 nt, Synthetic Construct; identical to SEQ ID NO: 2395
  source 1..33: mol_type = other RNA

SEQ ID NO: 47686 - RNA, 21 nt, Synthetic Construct
  source 1..21: mol_type = other RNA
tcctgcactgagctgccccga

SEQ ID NO: 47687 - RNA, 21 nt, Synthetic Construct
  source 1..21: mol_type = other RNA
tcctgcactgagctgccccga

SEQ ID NO: 47688 - RNA, 22 nt, Synthetic Construct
  source 1..22: mol_type = other RNA
cattgcacttgcctcggtctga

SEQ ID NO: 47689 - RNA, 23 nt, Synthetic Construct
  source 1..23: mol_type = other RNA
tgaagggcagagagcgagacttt

SEQ ID NO: 47690 - RNA, 35 nt, Synthetic Construct; identical to SEQ ID NO: 2269
  source 1..35: mol_type = other RNA

SEQ ID NO: 47691 - RNA, 35 nt, Synthetic Construct; identical to SEQ ID NO: 2269
  source 1..35: mol_type = other RNA

SEQ ID NO: 47692 - RNA, 24 nt, Synthetic Construct
  source 1..24: mol_type = other RNA
gtctttgttcgattccgttgagta

SEQ ID NO: 47693 - RNA, 22 nt, Synthetic Construct
  source 1..22: mol_type = other RNA
tgaggtagtagattgtatagtc

SEQ ID NO: 47694 - RNA, 22 nt, Synthetic Construct
  source 1..22: mol_type = other RNA
tgaggtagtagattgtatagtc

SEQ ID NO: 47695 - RNA, 18 nt, Synthetic Construct
  source 1..18: mol_type = other RNA
atggccgggacagagggc

SEQ ID NO: 47696 - RNA, 22 nt, Synthetic Construct
  source 1..22: mol_type = other RNA
tgaggaagtaggttgtatagtt

SEQ ID NO: 47697 - RNA, 22 nt, Synthetic Construct
  source 1..22: mol_type = other RNA
tgaggaagtaggttgtatagtt

SEQ ID NO: 47698 - RNA, 21 nt, Synthetic Construct
  source 1..21: mol_type = other RNA
acagtagtctgcacattggtt

SEQ ID NO: 47699 - RNA, 21 nt, Synthetic Construct
  source 1..21: mol_type = other RNA
acagtagtctgcacattggtt

SEQ ID NO: 47700 - RNA, 23 nt, Synthetic Construct
  source 1..23: mol_type = other RNA
tgaggtagtaggctgtgtggttt

SEQ ID NO: 47701 - RNA, 22 nt, Synthetic Construct
  source 1..22: mol_type = other RNA
tcctgaactgagctgccccgag

SEQ ID NO: 47702 - RNA, 22 nt, Synthetic Construct
  source 1..22: mol_type = other RNA
tcctgaactgagctgccccgag

SEQ ID NO: 47703 - RNA, 15 nt, Synthetic Construct
  source 1..15: mol_type = other RNA
tcagtagctcgagga

SEQ ID NO: 47704 - RNA, 27 nt, Synthetic Construct
  source 1..27: mol_type = other RNA
atagtctttgttcgattccgttgagta

SEQ ID NO: 47705 - RNA, 29 nt, Synthetic Construct
  source 1..29: mol_type = other RNA
gtgcatgcactctggggttgtgggacagc

SEQ ID NO: 47706 - RNA, 29 nt, Synthetic Construct
  source 1..29: mol_type = other RNA
gtgcatgcactctggggttgtgggacagc

SEQ ID NO: 47707 - RNA, 16 nt, Synthetic Construct
  source 1..16: mol_type = other RNA
ccgcttttgtcaggga

SEQ ID NO: 47708 - RNA, 36 nt, Synthetic Construct; identical to SEQ ID NO: 2546
  source 1..36: mol_type = other RNA

SEQ ID NO: 47709 - RNA, 23 nt, Synthetic Construct
  source 1..23: mol_type = other RNA
tgaggtagtaggttgtgtggttc

SEQ ID NO: 47710 - RNA, 16 nt, Synthetic Construct
  source 1..16: mol_type = other RNA
gatctgtagctggtct

SEQ ID NO: 47711 - RNA, 25 nt, Synthetic Construct
  source 1..25: mol_type = other RNA
ccccactgctaaatttgactggctt

SEQ ID NO: 47712 - RNA, 21 nt, Synthetic Construct
  source 1..21: mol_type = other RNA
tgaagtagtaggttgtgtggt

SEQ ID NO: 47713 - RNA, 22 nt, Synthetic Construct
  source 1..22: mol_type = other RNA
cccagtgttcagactacctgtt

SEQ ID NO: 47714 - RNA, 22 nt, Synthetic Construct
  source 1..22: mol_type = other RNA
cccagtgttcagactacctgtt

SEQ ID NO: 47715 - RNA, 18 nt, Synthetic Construct
  source 1..18: mol_type = other RNA
acagtcaggatgttggct

SEQ ID NO: 47716 - RNA, 18 nt, Synthetic Construct
  source 1..18: mol_type = other RNA
acagtcaggatgttggct

SEQ ID NO: 47717 - RNA, 27 nt, Synthetic Construct
  source 1..27: mol_type = other RNA
agagcagctaataccgcatacgacctg

SEQ ID NO: 47718 - RNA, 28 nt, Synthetic Construct
  source 1..28: mol_type = other RNA
ggtggctgtagctcagttggtagagtcc

SEQ ID NO: 47719 - RNA, 28 nt, Synthetic Construct
  source 1..28: mol_type = other RNA
ggtggctgtagctcagttggtagagtcc

SEQ ID NO: 47720 - RNA, 23 nt, Synthetic Construct
  source 1..23: mol_type = other RNA
tgaggaagtaggttgtgtggttt

SEQ ID NO: 47721 - RNA, 23 nt, Synthetic Construct
  source 1..23: mol_type = other RNA
tgaggaagtaggttgtgtggttt

SEQ ID NO: 47722 - RNA, 24 nt, Synthetic Construct
  source 1..24: mol_type = other RNA
tgtaaacatccttgactggaagct

SEQ ID NO: 47723 - RNA, 24 nt, Synthetic Construct
  source 1..24: mol_type = other RNA
tgtaaacatccttgactggaagct

SEQ ID NO: 47724 - RNA, 23 nt, Synthetic Construct
  source 1..23: mol_type = other RNA
ggcggttatgcaagacagaggtg

SEQ ID NO: 47725 - RNA, 20 nt, Synthetic Construct
  source 1..20: mol_type = other RNA
cacatgcaagtcgaacggta

SEQ ID NO: 47726 - RNA, 22 nt, Synthetic Construct
  source 1..22: mol_type = other RNA
tccagtactgagctgccccgag

SEQ ID NO: 47727 - RNA, 22 nt, Synthetic Construct
  source 1..22: mol_type = other RNA
tccagtactgagctgccccgag

SEQ ID NO: 47728 - RNA, 21 nt, Synthetic Construct
  source 1..21: mol_type = other RNA
tgaggtagtaggtcgtgtggt

SEQ ID NO: 47729 - RNA, 21 nt, Synthetic Construct
  source 1..21: mol_type = other RNA
tgaggtagtaggtcgtgtggt

SEQ ID NO: 47730 - RNA, 25 nt, Synthetic Construct
  source 1..25: mol_type = other RNA
ttgaggatgtgagatcgagacgaca

SEQ ID NO: 47731 - RNA, 22 nt, Synthetic Construct
  source 1..22: mol_type = other RNA
tgaggtagtaggtcgtgtggtt

SEQ ID NO: 47732 - RNA, 20 nt, Synthetic Construct
  source 1..20: mol_type = other RNA
caatggccgggacagagggc

SEQ ID NO: 47733 - RNA, 22 nt, Synthetic Construct
  source 1..22: mol_type = other RNA
ctccctcgggagggcgcgcggg

SEQ ID NO: 47734 - RNA, 22 nt, Synthetic Construct
  source 1..22: mol_type = other RNA
ctccctcgggagggcgcgcggg

SEQ ID NO: 47735 - RNA, 24 nt, Synthetic Construct
  source 1..24: mol_type = other RNA
gctcactgatcgagtcgtcctgcg

SEQ ID NO: 47736 - RNA, 22 nt, Synthetic Construct
  source 1..22: mol_type = other RNA
tggaatgtaaagaagcatgtat

SEQ ID NO: 47737 - RNA, 22 nt, Synthetic Construct
  source 1..22: mol_type = other RNA
tggaatgtaaagaagcatgtat

SEQ ID NO: 47738 - RNA, 25 nt, Synthetic Construct
  source 1..25: mol_type = other RNA
gcgccgctggtgtagtggtatcatg

SEQ ID NO: 47739 - RNA, 20 nt, Synthetic Construct
  source 1..20: mol_type = other RNA
cataaagtagaaagcactac

SEQ ID NO: 47740 - RNA, 20 nt, Synthetic Construct
  source 1..20: mol_type = other RNA
cataaagtagaaagcactac

SEQ ID NO: 47741 - RNA, 19 nt, Synthetic Construct
  source 1..19: mol_type = other RNA
cccttgtcattagttgcta

SEQ ID NO: 47742 - RNA, 23 nt, Synthetic Construct
  source 1..23: mol_type = other RNA
tggaatgtaaagaagtatgtatt

SEQ ID NO: 47743 - RNA, 23 nt, Synthetic Construct
  source 1..23: mol_type = other RNA
tggaatgtaaagaagtatgtatt

SEQ ID NO: 47744 - RNA, 19 nt, Synthetic Construct
  source 1..19: mol_type = other RNA
ctgatcgagtcgtcctgcg

SEQ ID NO: 47745 - RNA, 32 nt, Synthetic Construct; identical to SEQ ID NO: 734
  source 1..32: mol_type = other RNA

SEQ ID NO: 47746 - RNA, 16 nt, Synthetic Construct
  source 1..16: mol_type = other RNA
ccaaggggtcgtgggt

SEQ ID NO: 47747 - RNA, 22 nt, Synthetic Construct
  source 1..22: mol_type = other RNA
tgaggtagtaggttgcgtggtt

SEQ ID NO: 47748 - RNA, 43 nt, Synthetic Construct; identical to SEQ ID NO: 6202
  source 1..43: mol_type = other RNA

SEQ ID NO: 47749 - RNA, 43 nt, Synthetic Construct; identical to SEQ ID NO: 6202
  source 1..43: mol_type = other RNA

SEQ ID NO: 47750 - RNA, 22 nt, Synthetic Construct
  source 1..22: mol_type = other RNA
tggctcagttcagcaggaacag

SEQ ID NO: 47751 - RNA, 22 nt, Synthetic Construct
  source 1..22: mol_type = other RNA
tggctcagttcagcaggaacag

SEQ ID NO: 47752 - RNA, 15 nt, Synthetic Construct
  source 1..15: mol_type = other RNA
tcgagtcgtcctgcg

SEQ ID NO: 47753 - RNA, 15 nt, Synthetic Construct
  source 1..15: mol_type = other RNA
agttgaccgcctggg

SEQ ID NO: 47754 - RNA, 21 nt, Synthetic Construct
  source 1..21: mol_type = other RNA
tctttggttatctagctgtat

SEQ ID NO: 47755 - RNA, 21 nt, Synthetic Construct
  source 1..21: mol_type = other RNA
tctttggttatctagctgtat

SEQ ID NO: 47756 - RNA, 21 nt, Synthetic Construct
  source 1..21: mol_type = other RNA
ngaggtagtaggttgtgtggt

SEQ ID NO: 47757 - RNA, 21 nt, Synthetic Construct
  source 1..21: mol_type = other RNA
ngaggtagtaggttgtgtggt

SEQ ID NO: 47758 - RNA, 16 nt, Synthetic Construct
  source 1..16: mol_type = other RNA
gctattgacgaccgta

SEQ ID NO: 47759 - RNA, 18 nt, Synthetic Construct
  source 1..18: mol_type = other RNA
catgcaagtcgaacggta

SEQ ID NO: 47760 - RNA, 18 nt, Synthetic Construct
  source 1..18: mol_type = other RNA
ccagtaaacggcggccgt

SEQ ID NO: 47761 - RNA, 22 nt, Synthetic Construct
  source 1..22: mol_type = other RNA
cggaggagttcgaaggtacgct

SEQ ID NO: 47762 - RNA, 16 nt, Synthetic Construct
  source 1..16: mol_type = other RNA
gggtgaaagcggggga

SEQ ID NO: 47763 - RNA, 16 nt, Synthetic Construct
  source 1..16: mol_type = other RNA
gcaagaggtcagcggt

SEQ ID NO: 47764 - RNA, 23 nt, Synthetic Construct
  source 1..23: mol_type = other RNA
tggtaatacgacgtacttagcgt

SEQ ID NO: 47765 - RNA, 16 nt, Synthetic Construct
  source 1..16: mol_type = other RNA
ggtgggggtcgttggt

SEQ ID NO: 47766 - RNA, 16 nt, Synthetic Construct
  source 1..16: mol_type = other RNA
ggtgggggtcgttggt

SEQ ID NO: 47767 - RNA, 22 nt, Synthetic Construct
  source 1..22: mol_type = other RNA
tgaggtagaagtttgtgctgtt

SEQ ID NO: 47768 - RNA, 23 nt, Synthetic Construct
  source 1..23: mol_type = other RNA
gggtaatacgacgtacttagtgt

SEQ ID NO: 47769 - RNA, 23 nt, Synthetic Construct
  source 1..23: mol_type = other RNA
gggtaatacgacgtacttagtgt

SEQ ID NO: 47770 - RNA, 22 nt, Synthetic Construct
  source 1..22: mol_type = other RNA
tggaatgtaaagaagtatgtgt

SEQ ID NO: 47771 - RNA, 22 nt, Synthetic Construct
  source 1..22: mol_type = other RNA
tggaatgtaaagaagtatgtgt

SEQ ID NO: 47772 - RNA, 18 nt, Synthetic Construct
  source 1..18: mol_type = other RNA
agcagcattgtacagggc

SEQ ID NO: 47773 - RNA, 18 nt, Synthetic Construct
  source 1..18: mol_type = other RNA
agcagcattgtacagggc

SEQ ID NO: 47774 - RNA, 20 nt, Synthetic Construct
  source 1..20: mol_type = other RNA
gagtaggacgttgccaggtt

SEQ ID NO: 47775 - RNA, 20 nt, Synthetic Construct
  source 1..20: mol_type = other RNA
gagtaggacgttgccaggtt

SEQ ID NO: 47776 - RNA, 36 nt, Synthetic Construct; identical to SEQ ID NO: 2660
  source 1..36: mol_type = other RNA

SEQ ID NO: 47777 - RNA, 16 nt, Synthetic Construct
  source 1..16: mol_type = other RNA
ccgcttttgtcaggga

SEQ ID NO: 47778 - RNA, 16 nt, Synthetic Construct
  source 1..16: mol_type = other RNA
ccgcttttgtcaggga

SEQ ID NO: 47779 - RNA, 23 nt, Synthetic Construct
  source 1..23: mol_type = other RNA
caaggtgctgttcgtgcaggtag

SEQ ID NO: 47780 - RNA, 23 nt, Synthetic Construct
  source 1..23: mol_type = other RNA
caaggtgctgttcgtgcaggtag

SEQ ID NO: 47781 - RNA, 24 nt, Synthetic Construct
  source 1..24: mol_type = other RNA
tgtgaacatccccgactggaagct

SEQ ID NO: 47782 - RNA, 24 nt, Synthetic Construct
  source 1..24: mol_type = other RNA
tgtgaacatccccgactggaagct

SEQ ID NO: 47783 - RNA, 16 nt, Synthetic Construct
  source 1..16: mol_type = other RNA
gtctacggctatacca

SEQ ID NO: 47784 - RNA, 23 nt, Synthetic Construct
  source 1..23: mol_type = other RNA
tggtaatacgacgcacttagtgt

SEQ ID NO: 47785 - RNA, 24 nt, Synthetic Construct
  source 1..24: mol_type = other RNA
gggttgtaaaccgcttttgtcagg

SEQ ID NO: 47786 - RNA, 22 nt, Synthetic Construct
  source 1..22: mol_type = other RNA
tcctgtactgagcagccccgag

SEQ ID NO: 47787 - RNA, 22 nt, Synthetic Construct
  source 1..22: mol_type = other RNA
tcctgtactgagcagccccgag

SEQ ID NO: 47788 - RNA, 17 nt, Synthetic Construct
  source 1..17: mol_type = other RNA
agcggtggatgatgtgg

SEQ ID NO: 47789 - RNA, 22 nt, Synthetic Construct
  source 1..22: mol_type = other RNA
tgaggtagtgggttgtgtggtt

SEQ ID NO: 47790 - RNA, 23 nt, Synthetic Construct
  source 1..23: mol_type = other RNA
tggtaatacgatgtacttagtgt

SEQ ID NO: 47791 - RNA, 25 nt, Synthetic Construct
  source 1..25: mol_type = other RNA
cgactcttagcggtggatcactcgg

SEQ ID NO: 47792 - RNA, 25 nt, Synthetic Construct
  source 1..25: mol_type = other RNA
cgactcttagcggtggatcactcgg

SEQ ID NO: 47793 - RNA, 15 nt, Synthetic Construct
  source 1..15: mol_type = other RNA
gctatgggatttgtt

SEQ ID NO: 47794 - RNA, 15 nt, Synthetic Construct
  source 1..15: mol_type = other RNA
gctatgggatttgtt

SEQ ID NO: 47795 - RNA, 18 nt, Synthetic Construct
  source 1..18: mol_type = other RNA
tgcgtagatatgcggagg

SEQ ID NO: 47796 - RNA, 18 nt, Synthetic Construct
  source 1..18: mol_type = other RNA
tgcgtagatatgcggagg

SEQ ID NO: 47797 - RNA, 21 nt, Synthetic Construct
  source 1..21: mol_type = other RNA
tggagcgtgacaatggtgttt

SEQ ID NO: 47798 - RNA, 34 nt, Synthetic Construct; identical to SEQ ID NO: 2367
  source 1..34: mol_type = other RNA

SEQ ID NO: 47799 - RNA, 34 nt, Synthetic Construct; identical to SEQ ID NO: 2367
  source 1..34: mol_type = other RNA

SEQ ID NO: 47800 - RNA, 23 nt, Synthetic Construct
  source 1..23: mol_type = other RNA
tggtaataagacgtacttagtgt

SEQ ID NO: 47801 - RNA, 23 nt, Synthetic Construct
  source 1..23: mol_type = other RNA
tggtaataagacgtacttagtgt

SEQ ID NO: 47802 - RNA, 24 nt, Synthetic Construct
  source 1..24: mol_type = other RNA
tgtaaacatccccgactgggagct

SEQ ID NO: 47803 - RNA, 24 nt, Synthetic Construct
  source 1..24: mol_type = other RNA
tgtaaacatccccgactgggagct

SEQ ID NO: 47804 - RNA, 27 nt, Synthetic Construct
  source 1..27: mol_type = other RNA
ccccccattgctaaatttgactggctt

SEQ ID NO: 47805 - RNA, 15 nt, Synthetic Construct
  source 1..15: mol_type = other RNA
cgatatggcatgaga

SEQ ID NO: 47806 - RNA, 15 nt, Synthetic Construct
  source 1..15: mol_type = other RNA
cgatatggcatgaga

SEQ ID NO: 47807 - RNA, 21 nt, Synthetic Construct
  source 1..21: mol_type = other RNA
cactgatcgagtcgtcctgcg

SEQ ID NO: 47808 - RNA, 20 nt, Synthetic Construct
  source 1..20: mol_type = other RNA
aatgacacgatcactcccgt

SEQ ID NO: 47809 - RNA, 20 nt, Synthetic Construct
  source 1..20: mol_type = other RNA
aatgacacgatcactcccgt

SEQ ID NO: 47810 - RNA, 20 nt, Synthetic Construct
  source 1..20: mol_type = other RNA
tgaggcagtaggttgtatag

SEQ ID NO: 47811 - RNA, 20 nt, Synthetic Construct
  source 1..20: mol_type = other RNA
tgaggcagtaggttgtatag

SEQ ID NO: 47812 - RNA, 24 nt, Synthetic Construct
  source 1..24: mol_type = other RNA
tgtagacatccccgactggaagct

SEQ ID NO: 47813 - RNA, 27 nt, Synthetic Construct
  source 1..27: mol_type = other RNA
ccccccactgctaaatttggctggcta

SEQ ID NO: 47814 - RNA, 21 nt, Synthetic Construct
  source 1..21: mol_type = other RNA
tggagtgtgacaacggtgttt

SEQ ID NO: 47815 - RNA, 16 nt, Synthetic Construct
  source 1..16: mol_type = other RNA
gtcgacgtatagggtg

SEQ ID NO: 47816 - RNA, 21 nt, Synthetic Construct
  source 1..21: mol_type = other RNA
tggagtgtgacaatggcgttt

SEQ ID NO: 47817 - RNA, 18 nt, Synthetic Construct
  source 1..18: mol_type = other RNA
gctgtgatggccgagtgg

SEQ ID NO: 47818 - RNA, 20 nt, Synthetic Construct
  source 1..20: mol_type = other RNA
tcggaagaaggggtgcctgg

SEQ ID NO: 47819 - RNA, 20 nt, Synthetic Construct
  source 1..20: mol_type = other RNA
tcggaagaaggggtgcctgg

SEQ ID NO: 47820 - RNA, 20 nt, Synthetic Construct
  source 1..20: mol_type = other RNA
tacagtatagatgatgtact

SEQ ID NO: 47821 - RNA, 17 nt, Synthetic Construct
  source 1..17: mol_type = other RNA
aagttgaccgcctgggg

SEQ ID NO: 47822 - RNA, 22 nt, Synthetic Construct
  source 1..22: mol_type = other RNA
tcctgtactgagccgccccgag

SEQ ID NO: 47823 - RNA, 22 nt, Synthetic Construct
  source 1..22: mol_type = other RNA
tcctgtactgagccgccccgag

SEQ ID NO: 47824 - RNA, 36 nt, Synthetic Construct; identical to SEQ ID NO: 2469
  source 1..36: mol_type = other RNA

SEQ ID NO: 47825 - RNA, 15 nt, Synthetic Construct
  source 1..15: mol_type = other RNA
gggtgaaagcggggg

SEQ ID NO: 47826 - RNA, 23 nt, Synthetic Construct
  source 1..23: mol_type = other RNA
taaggggcagagagcgagacttt

SEQ ID NO: 47827 - RNA, 23 nt, Synthetic Construct
  source 1..23: mol_type = other RNA
tgaggtagtaggttgtgtggtct

SEQ ID NO: 47828 - RNA, 22 nt, Synthetic Construct
  source 1..22: mol_type = other RNA
tcgtaccgtgagtaataatgca

SEQ ID NO: 47829 - RNA, 36 nt, Synthetic Construct; identical to SEQ ID NO: 2344
  source 1..36: mol_type = other RNA

SEQ ID NO: 47830 - RNA, 36 nt, Synthetic Construct; identical to SEQ ID NO: 2344
  source 1..36: mol_type = other RNA

SEQ ID NO: 47831 - RNA, 22 nt, Synthetic Construct
  source 1..22: mol_type = other RNA
tatcgcacttgtcccggcctgt

SEQ ID NO: 47832 - RNA, 22 nt, Synthetic Construct
  source 1..22: mol_type = other RNA
tatcgcacttgtcccggcctgt

SEQ ID NO: 47833 - RNA, 23 nt, Synthetic Construct
  source 1..23: mol_type = other RNA
tcttggagtaggtcattgggtga

SEQ ID NO: 47834 - RNA, 21 nt, Synthetic Construct
  source 1..21: mol_type = other RNA
tgaggtagtgggttgtgtggt

SEQ ID NO: 47835 - RNA, 21 nt, Synthetic Construct
  source 1..21: mol_type = other RNA
tgaggtagtgggttgtgtggt

SEQ ID NO: 47836 - RNA, 22 nt, Synthetic Construct
  source 1..22: mol_type = other RNA
taaggtagtaggttgtgtggtt

SEQ ID NO: 47837 - RNA, 24 nt, Synthetic Construct
  source 1..24: mol_type = other RNA
tcagtgcatcacagaactttgttt

SEQ ID NO: 47838 - RNA, 23 nt, Synthetic Construct
  source 1..23: mol_type = other RNA
tacagtagtctgcacattggttt

SEQ ID NO: 47839 - RNA, 33 nt, Synthetic Construct; identical to SEQ ID NO: 2386
  source 1..33: mol_type = other RNA

SEQ ID NO: 47840 - RNA, 21 nt, Synthetic Construct
  source 1..21: mol_type = other RNA
tgaggtggtaggttgtgtggt

SEQ ID NO: 47841 - RNA, 21 nt, Synthetic Construct
  source 1..21: mol_type = other RNA
tgaggtggtaggttgtgtggt

SEQ ID NO: 47842 - RNA, 27 nt, Synthetic Construct
  source 1..27: mol_type = other RNA
catgcgagagtaggacgttgccaggtt

SEQ ID NO: 47843 - RNA, 27 nt, Synthetic Construct
  source 1..27: mol_type = other RNA
catgcgagagtaggacgttgccaggtt

SEQ ID NO: 47844 - RNA, 23 nt, Synthetic Construct
  source 1..23: mol_type = other RNA
tgaggggcagagggcgagacttt

SEQ ID NO: 47845 - RNA, 23 nt, Synthetic Construct
  source 1..23: mol_type = other RNA
tgaggggcagagggcgagacttt

SEQ ID NO: 47846 - RNA, 22 nt, Synthetic Construct
  source 1..22: mol_type = other RNA
tggaatgtaaagaagtatgtgt

SEQ ID NO: 47847 - RNA, 22 nt, Synthetic Construct
  source 1..22: mol_type = other RNA
tggaatgtaaagaagtatgtgt

SEQ ID NO: 47848 - RNA, 15 nt, Synthetic Construct
  source 1..15: mol_type = other RNA
gctatgggatttgtt

SEQ ID NO: 47849 - RNA, 15 nt, Synthetic Construct
  source 1..15: mol_type = other RNA
gctatgggatttgtt

SEQ ID NO: 47850 - RNA, 22 nt, Synthetic Construct
  source 1..22: mol_type = other RNA
gtagtgtttcctactttatgga

SEQ ID NO: 47851 - RNA, 22 nt, Synthetic Construct
  source 1..22: mol_type = other RNA
gtagtgtttcctactttatgga

SEQ ID NO: 47852 - RNA, 21 nt, Synthetic Construct
  source 1..21: mol_type = other RNA
tgaggggcagagagcgggact

SEQ ID NO: 47853 - RNA, 21 nt, Synthetic Construct
  source 1..21: mol_type = other RNA
tgaggggcagagagcgggact

SEQ ID NO: 47854 - RNA, 22 nt, Synthetic Construct
  source 1..22: mol_type = other RNA
tggaacgtaaagaagtatgtat

SEQ ID NO: 47855 - RNA, 22 nt, Synthetic Construct
  source 1..22: mol_type = other RNA
tggaacgtaaagaagtatgtat

SEQ ID NO: 47856 - RNA, 20 nt, Synthetic Construct
  source 1..20: mol_type = other RNA
tgaggtagtgggttgtgtgg

SEQ ID NO: 47857 - RNA, 16 nt, Synthetic Construct
  source 1..16: mol_type = other RNA
atctacggccatacca

SEQ ID NO: 47858 - RNA, 23 nt, Synthetic Construct
  source 1..23: mol_type = other RNA
tggtaatacgacgtacctagtgt

SEQ ID NO: 47859 - RNA, 25 nt, Synthetic Construct
  source 1..25: mol_type = other RNA
tcggatccgtctgagcttggctttt

SEQ ID NO: 47860 - RNA, 25 nt, Synthetic Construct
  source 1..25: mol_type = other RNA
tcggatccgtctgagcttggctttt

SEQ ID NO: 47861 - RNA, 20 nt, Synthetic Construct
  source 1..20: mol_type = other RNA
tgaggtagtaggttgtgtag

SEQ ID NO: 47862 - RNA, 31 nt, Synthetic Construct; identical to SEQ ID NO: 2507
  source 1..31: mol_type = other RNA

SEQ ID NO: 47863 - RNA, 31 nt, Synthetic Construct; identical to SEQ ID NO: 2507
  source 1..31: mol_type = other RNA

SEQ ID NO: 47864 - RNA, 17 nt, Synthetic Construct
  source 1..17: mol_type = other RNA
agtccggatcgtagtct

SEQ ID NO: 47865 - RNA, 22 nt, Synthetic Construct
  source 1..22: mol_type = other RNA
catcgcacttgtctcggtctga

SEQ ID NO: 47866 - RNA, 22 nt, Synthetic Construct
  source 1..22: mol_type = other RNA
catcgcacttgtctcggtctga

SEQ ID NO: 47867 - RNA, 23 nt, Synthetic Construct
  source 1..23: mol_type = other RNA
tgaggggcagagagcgaggcttt

SEQ ID NO: 47868 - RNA, 21 nt, Synthetic Construct
  source 1..21: mol_type = other RNA
gcccgtgttcggaagattttc

SEQ ID NO: 47869 - RNA, 21 nt, Synthetic Construct
  source 1..21: mol_type = other RNA
gcccgtgttcggaagattttc

SEQ ID NO: 47870 - RNA, 34 nt, Synthetic Construct; identical to SEQ ID NO: 2265
  source 1..34: mol_type = other RNA

SEQ ID NO: 47871 - RNA, 15 nt, Synthetic Construct
  source 1..15: mol_type = other RNA
acggtcctaaggtag

SEQ ID NO: 47872 - RNA, 15 nt, Synthetic Construct
  source 1..15: mol_type = other RNA
acggtcctaaggtag

SEQ ID NO: 47873 - RNA, 23 nt, Synthetic Construct
  source 1..23: mol_type = other RNA
caaagtgctgttcgtgcgggtag

SEQ ID NO: 47874 - RNA, 23 nt, Synthetic Construct
  source 1..23: mol_type = other RNA
caaagtgctgttcgtgcgggtag

SEQ ID NO: 47875 - RNA, 23 nt, Synthetic Construct
  source 1..23: mol_type = other RNA
tggtaatacgacgtactttgtgt

SEQ ID NO: 47876 - RNA, 23 nt, Synthetic Construct
  source 1..23: mol_type = other RNA
tggtaatacgacgtactttgtgt

SEQ ID NO: 47877 - RNA, 18 nt, Synthetic Construct
  source 1..18: mol_type = other RNA
ggccgtcgtcagctcgtg

SEQ ID NO: 47878 - RNA, 18 nt, Synthetic Construct
  source 1..18: mol_type = other RNA
ggccgtcgtcagctcgtg

SEQ ID NO: 47879 - RNA, 22 nt, Synthetic Construct
  source 1..22: mol_type = other RNA
tagcagcacgcaaatattggcg

SEQ ID NO: 47880 - RNA, 22 nt, Synthetic Construct
  source 1..22: mol_type = other RNA
tagcagcacgcaaatattggcg

SEQ ID NO: 47881 - RNA, 18 nt, Synthetic Construct
  source 1..18: mol_type = other RNA
atggccgggacagagggc

SEQ ID NO: 47882 - RNA, 27 nt, Synthetic Construct
  source 1..27: mol_type = other RNA
tcctgagtagctcagcggcagagcggg

SEQ ID NO: 47883 - RNA, 27 nt, Synthetic Construct
  source 1..27: mol_type = other RNA
tcctgagtagctcagcggcagagcggg

SEQ ID NO: 47884 - RNA, 19 nt, Synthetic Construct
  source 1..19: mol_type = other RNA
accaaggggtcgtgggttc

SEQ ID NO: 47885 - RNA, 22 nt, Synthetic Construct
  source 1..22: mol_type = other RNA
ccggtcccaagggtatggctgt

SEQ ID NO: 47886 - RNA, 16 nt, Synthetic Construct
  source 1..16: mol_type = other RNA
gtctacggccgtacca

SEQ ID NO: 47887 - RNA, 17 nt, Synthetic Construct
  source 1..17: mol_type = other RNA
ctaatgagactgccggt

SEQ ID NO: 47888 - RNA, 22 nt, Synthetic Construct
  source 1..22: mol_type = other RNA
ctttgttcgattccgttgagta

SEQ ID NO: 47889 - RNA, 22 nt, Synthetic Construct
  source 1..22: mol_type = other RNA
ctttgttcgattccgttgagta

SEQ ID NO: 47890 - RNA, 17 nt, Synthetic Construct
  source 1..17: mol_type = other RNA
gccatgccgcgtgcggg

SEQ ID NO: 47891 - RNA, 17 nt, Synthetic Construct
  source 1..17: mol_type = other RNA
gccatgccgcgtgcggg

SEQ ID NO: 47892 - RNA, 22 nt, Synthetic Construct
  source 1..22: mol_type = other RNA
atcacattgccagggatttcca

SEQ ID NO: 47893 - RNA, 22 nt, Synthetic Construct
  source 1..22: mol_type = other RNA
atcacattgccagggatttcca

SEQ ID NO: 47894 - RNA, 24 nt, Synthetic Construct
  source 1..24: mol_type = other RNA
tgatatgtttgatatattaggttg

SEQ ID NO: 47895 - RNA, 24 nt, Synthetic Construct
  source 1..24: mol_type = other RNA
tgatatgtttgatatattaggttg

SEQ ID NO: 47896 - RNA, 23 nt, Synthetic Construct
  source 1..23: mol_type = other RNA
tgaggggcagagagcgagactct

SEQ ID NO: 47897 - RNA, 30 nt, Synthetic Construct; identical to SEQ ID NO: 2578
  source 1..30: mol_type = other RNA

SEQ ID NO: 47898 - RNA, 24 nt, Synthetic Construct
  source 1..24: mol_type = other RNA
tagcagcacgtaaatattggcgtt

SEQ ID NO: 47899 - RNA, 17 nt, Synthetic Construct
  source 1..17: mol_type = other RNA
taggtcatcgtcaggct

SEQ ID NO: 47900 - RNA, 17 nt, Synthetic Construct
  source 1..17: mol_type = other RNA
cgactcttagcggtgga

SEQ ID NO: 47901 - RNA, 17 nt, Synthetic Construct
  source 1..17: mol_type = other RNA
cgactcttagcggtgga

SEQ ID NO: 47902 - RNA, 16 nt, Synthetic Construct
  source 1..16: mol_type = other RNA
ggtgggggtcgttggt

SEQ ID NO: 47903 - RNA, 17 nt, Synthetic Construct
  source 1..17: mol_type = other RNA
cccctggacctgtactg

SEQ ID NO: 47904 - RNA, 22 nt, Synthetic Construct
  source 1..22: mol_type = other RNA
tcagtagctcgaggaaaagaca

SEQ ID NO: 47905 - RNA, 22 nt, Synthetic Construct
  source 1..22: mol_type = other RNA
tcagtagctcgaggaaaagaca

SEQ ID NO: 47906 - RNA, 22 nt, Synthetic Construct
  source 1..22: mol_type = other RNA
ccctgtactgagctgccccgag

SEQ ID NO: 47907 - RNA, 22 nt, Synthetic Construct
  source 1..22: mol_type = other RNA
ccctgtactgagctgccccgag

SEQ ID NO: 47908 - RNA, 16 nt, Synthetic Construct
  source 1..16: mol_type = other RNA
gggtctgtagctcagt

SEQ ID NO: 47909 - RNA, 16 nt, Synthetic Construct
  source 1..16: mol_type = other RNA
gggtctgtagctcagt

SEQ ID NO: 47910 - RNA, 23 nt, Synthetic Construct
  source 1..23: mol_type = other RNA
tggtaatacgacgtactcagtgt

SEQ ID NO: 47911 - RNA, 18 nt, Synthetic Construct
  source 1..18: mol_type = other RNA
ccaaggggtcgtgggttc

SEQ ID NO: 47912 - RNA, 18 nt, Synthetic Construct
  source 1..18: mol_type = other RNA
ccaaggggtcgtgggttc

SEQ ID NO: 47913 - RNA, 23 nt, Synthetic Construct
  source 1..23: mol_type = other RNA
tgaggtagtaggttgtgtggctt

SEQ ID NO: 47914 - RNA, 21 nt, Synthetic Construct
  source 1..21: mol_type = other RNA
tgaggtagtagtttgcgctgt

SEQ ID NO: 47915 - RNA, 21 nt, Synthetic Construct
  source 1..21: mol_type = other RNA
tgaggtagtagtttgcgctgt

SEQ ID NO: 47916 - RNA, 16 nt, Synthetic Construct
  source 1..16: mol_type = other RNA
gtctacggccgtacca

SEQ ID NO: 47917 - RNA, 20 nt, Synthetic Construct
  source 1..20: mol_type = other RNA
gcgtgcttgactgcgagact

SEQ ID NO: 47918 - RNA, 20 nt, Synthetic Construct
  source 1..20: mol_type = other RNA
gcgtgcttgactgcgagact

SEQ ID NO: 47919 - RNA, 15 nt, Synthetic Construct
  source 1..15: mol_type = other RNA
cccagaaacccggtc

SEQ ID NO: 47920 - RNA, 23 nt, Synthetic Construct
  source 1..23: mol_type = other RNA
tcctgtacagagctgccccgaga

SEQ ID NO: 47921 - RNA, 23 nt, Synthetic Construct
  source 1..23: mol_type = other RNA
tcctgtacagagctgccccgaga

SEQ ID NO: 47922 - RNA, 22 nt, Synthetic Construct
  source 1..22: mol_type = other RNA
tggaatgcaaagaagtatgtat

SEQ ID NO: 47923 - RNA, 22 nt, Synthetic Construct
  source 1..22: mol_type = other RNA
tggaatgcaaagaagtatgtat

SEQ ID NO: 47924 - RNA, 30 nt, Synthetic Construct; identical to SEQ ID NO: 2274
  source 1..30: mol_type = other RNA

SEQ ID NO: 47925 - RNA, 30 nt, Synthetic Construct; identical to SEQ ID NO: 2274
  source 1..30: mol_type = other RNA

SEQ ID NO: 47926 - RNA, 20 nt, Synthetic Construct
  source 1..20: mol_type = other RNA
tgaggtagaaggttgtgtgg

SEQ ID NO: 47927 - RNA, 20 nt, Synthetic Construct
  source 1..20: mol_type = other RNA
tgaggtagaaggttgtgtgg

SEQ ID NO: 47928 - RNA, 23 nt, Synthetic Construct
  source 1..23: mol_type = other RNA
tagcagcacataatggtttgtgg

SEQ ID NO: 47929 - RNA, 23 nt, Synthetic Construct
  source 1..23: mol_type = other RNA
tgaggggcagagagcgagactta

SEQ ID NO: 47930 - RNA, 38 nt, Synthetic Construct; identical to SEQ ID NO: 11817
  source 1..38: mol_type = other RNA

SEQ ID NO: 47931 - RNA, 36 nt, Synthetic Construct; identical to SEQ ID NO: 2478
  source 1..36: mol_type = other RNA

SEQ ID NO: 47932 - RNA, 22 nt, Synthetic Construct
  source 1..22: mol_type = other RNA
tggggtagtaggttgtgtggtt

SEQ ID NO: 47933 - RNA, 22 nt, Synthetic Construct
  source 1..22: mol_type = other RNA
tggggtagtaggttgtgtggtt

SEQ ID NO: 47934 - RNA, 21 nt, Synthetic Construct
  source 1..21: mol_type = other RNA
tacctggttgatcctgccagt

SEQ ID NO: 47935 - RNA, 21 nt, Synthetic Construct
  source 1..21: mol_type = other RNA
tacctggttgatcctgccagt

SEQ ID NO: 47936 - RNA, 21 nt, Synthetic Construct
  source 1..21: mol_type = other RNA
atcacattgccagggatttcc

SEQ ID NO: 47937 - RNA, 21 nt, Synthetic Construct
  source 1..21: mol_type = other RNA
atcacattgccagggatttcc

SEQ ID NO: 47938 - RNA, 21 nt, Synthetic Construct
  source 1..21: mol_type = other RNA
tgaggtagtagtttgcgctgt

SEQ ID NO: 47939 - RNA, 21 nt, Synthetic Construct
  source 1..21: mol_type = other RNA
cgaggtagtaggttgtatagt

SEQ ID NO: 47940 - RNA, 21 nt, Synthetic Construct
  source 1..21: mol_type = other RNA
cgaggtagtaggttgtatagt

SEQ ID NO: 47941 - RNA, 26 nt, Synthetic Construct
  source 1..26: mol_type = other RNA
atttccccttggggttgtaggaccac

SEQ ID NO: 47942 - RNA, 26 nt, Synthetic Construct
  source 1..26: mol_type = other RNA
atttccccttggggttgtaggaccac

SEQ ID NO: 47943 - RNA, 22 nt, Synthetic Construct
  source 1..22: mol_type = other RNA
ngaggtagtaggttgtgtggtt

SEQ ID NO: 47944 - RNA, 22 nt, Synthetic Construct
  source 1..22: mol_type = other RNA
ngaggtagtaggttgtgtggtt

SEQ ID NO: 47945 - RNA, 22 nt, Synthetic Construct
  source 1..22: mol_type = other RNA
tgaggtagtagtttgtggtgtt

SEQ ID NO: 47946 - RNA, 21 nt, Synthetic Construct
  source 1..21: mol_type = other RNA
gtagcgaaattccttgtcggg

SEQ ID NO: 47947 - RNA, 23 nt, Synthetic Construct
  source 1..23: mol_type = other RNA
tgaggggcagagggcgagacttt

SEQ ID NO: 47948 - RNA, 32 nt, Synthetic Construct; identical to SEQ ID NO: 2318
  source 1..32: mol_type = other RNA

SEQ ID NO: 47949 - RNA, 32 nt, Synthetic Construct; identical to SEQ ID NO: 2318
  source 1..32: mol_type = other RNA

SEQ ID NO: 47950 - RNA, 21 nt, Synthetic Construct
  source 1..21: mol_type = other RNA
tcctgtgctgagctgccccga

SEQ ID NO: 47951 - RNA, 15 nt, Synthetic Construct
  source 1..15: mol_type = other RNA
ggtggctgtagctca

SEQ ID NO: 47952 - RNA, 20 nt, Synthetic Construct
  source 1..20: mol_type = other RNA
tgaggaagtaggttgtatag

SEQ ID NO: 47953 - RNA, 20 nt, Synthetic Construct
  source 1..20: mol_type = other RNA
tgaggtagtaggttgcatag

SEQ ID NO: 47954 - RNA, 20 nt, Synthetic Construct
  source 1..20: mol_type = other RNA
tgaggtagtaggttgcatag

SEQ ID NO: 47955 - RNA, 33 nt, Synthetic Construct; identical to SEQ ID NO: 2638
  source 1..33: mol_type = other RNA

SEQ ID NO: 47956 - RNA, 33 nt, Synthetic Construct; identical to SEQ ID NO: 2638
  source 1..33: mol_type = other RNA

SEQ ID NO: 47957 - RNA, 19 nt, Synthetic Construct
  source 1..19: mol_type = other RNA
tctaatgagactgccggtg

SEQ ID NO: 47958 - RNA, 25 nt, Synthetic Construct
  source 1..25: mol_type = other RNA
tttccccttggggttgtaggaccac

SEQ ID NO: 47959 - RNA, 25 nt, Synthetic Construct
  source 1..25: mol_type = other RNA
tttccccttggggttgtaggaccac

SEQ ID NO: 47960 - RNA, 21 nt, Synthetic Construct
  source 1..21: mol_type = other RNA
cctctgggcccttcctccagt

SEQ ID NO: 47961 - RNA, 21 nt, Synthetic Construct
  source 1..21: mol_type = other RNA
cctctgggcccttcctccagt

SEQ ID NO: 47962 - RNA, 23 nt, Synthetic Construct
  source 1..23: mol_type = other RNA
tcctgtaccgagctgccccgaga

SEQ ID NO: 47963 - RNA, 23 nt, Synthetic Construct
  source 1..23: mol_type = other RNA
tcctgtaccgagctgccccgaga

SEQ ID NO: 47964 - RNA, 34 nt, Synthetic Construct; identical to SEQ ID NO: 385
  source 1..34: mol_type = other RNA

SEQ ID NO: 47965 - RNA, 34 nt, Synthetic Construct; identical to SEQ ID NO: 385
  source 1..34: mol_type = other RNA

SEQ ID NO: 47966 - RNA, 32 nt, Synthetic Construct; identical to SEQ ID NO: 3541
  source 1..32: mol_type = other RNA

SEQ ID NO: 47967 - RNA, 27 nt, Synthetic Construct
  source 1..27: mol_type = other RNA
ccccccacagctaaatttgactggcta

SEQ ID NO: 47968 - RNA, 27 nt, Synthetic Construct
  source 1..27: mol_type = other RNA
ccccccacagctaaatttgactggcta

SEQ ID NO: 47969 - RNA, 19 nt, Synthetic Construct
  source 1..19: mol_type = other RNA
gcgaaattccttgtcgggt

SEQ ID NO: 47970 - RNA, 22 nt, Synthetic Construct
  source 1..22: mol_type = other RNA
tgaggtagtagatcgtatagtt

SEQ ID NO: 47971 - RNA, 22 nt, Synthetic Construct
  source 1..22: mol_type = other RNA
tgaggtagtagatcgtatagtt

SEQ ID NO: 47972 - RNA, 16 nt, Synthetic Construct
  source 1..16: mol_type = other RNA
aggtcatcattatctg

SEQ ID NO: 47973 - RNA, 15 nt, Synthetic Construct
  source 1..15: mol_type = other RNA
gcaagtcgaacggta

SEQ ID NO: 47974 - RNA, 19 nt, Synthetic Construct
  source 1..19: mol_type = other RNA
gcgaaattccttgtcgggt

SEQ ID NO: 47975 - RNA, 22 nt, Synthetic Construct
  source 1..22: mol_type = other RNA
tgaggaagtaggttgtgtggtt

SEQ ID NO: 47976 - RNA, 22 nt, Synthetic Construct
  source 1..22: mol_type = other RNA
tgaggaagtaggttgtgtggtt

SEQ ID NO: 47977 - RNA, 22 nt, Synthetic Construct
  source 1..22: mol_type = other RNA
tgaggtagtggattgtatagtt

SEQ ID NO: 47978 - RNA, 22 nt, Synthetic Construct
  source 1..22: mol_type = other RNA
tgaggtagtggattgtatagtt

SEQ ID NO: 47979 - RNA, 27 nt, Synthetic Construct
  source 1..27: mol_type = other RNA
atagtctttgttcgattccgttgagta

SEQ ID NO: 47980 - RNA, 19 nt, Synthetic Construct
  source 1..19: mol_type = other RNA
tcagtagctcgaggaaaag

SEQ ID NO: 47981 - RNA, 19 nt, Synthetic Construct
  source 1..19: mol_type = other RNA
tcagtagctcgaggaaaag

SEQ ID NO: 47982 - RNA, 23 nt, Synthetic Construct
  source 1..23: mol_type = other RNA
tgataatacgacgtacttagtgt

SEQ ID NO: 47983 - RNA, 22 nt, Synthetic Construct
  source 1..22: mol_type = other RNA
tgaggtagtagattgtgtagtt

SEQ ID NO: 47984 - RNA, 22 nt, Synthetic Construct
  source 1..22: mol_type = other RNA
tgaggtagtagattgtgtagtt

SEQ ID NO: 47985 - RNA, 32 nt, Synthetic Construct; identical to SEQ ID NO: 2052
  source 1..32: mol_type = other RNA

SEQ ID NO: 47986 - RNA, 31 nt, Synthetic Construct; identical to SEQ ID NO: 2758
  source 1..31: mol_type = other RNA

SEQ ID NO: 47987 - RNA, 22 nt, Synthetic Construct
  source 1..22: mol_type = other RNA
cattgcacttgtcccggcctgt

SEQ ID NO: 47988 - RNA, 22 nt, Synthetic Construct
  source 1..22: mol_type = other RNA
cattgcacttgtcccggcctgt

SEQ ID NO: 47989 - RNA, 35 nt, Synthetic Construct; identical to SEQ ID NO: 3369
  source 1..35: mol_type = other RNA

SEQ ID NO: 47990 - RNA, 35 nt, Synthetic Construct; identical to SEQ ID NO: 3369
  source 1..35: mol_type = other RNA

SEQ ID NO: 47991 - RNA, 27 nt, Synthetic Construct
  source 1..27: mol_type = other RNA
ccccccactgctaaatttggctggctt

SEQ ID NO: 47992 - RNA, 33 nt, Synthetic Construct; identical to SEQ ID NO: 2556
  source 1..33: mol_type = other RNA

SEQ ID NO: 47993 - RNA, 23 nt, Synthetic Construct
  source 1..23: mol_type = other RNA
tggtaatacgacgcacttagtgt

SEQ ID NO: 47994 - RNA, 23 nt, Synthetic Construct
  source 1..23: mol_type = other RNA
ccctgtactgagctgccccgaga

SEQ ID NO: 47995 - RNA, 23 nt, Synthetic Construct
  source 1..23: mol_type = other RNA
ccctgtactgagctgccccgaga

SEQ ID NO: 47996 - RNA, 15 nt, Synthetic Construct
  source 1..15: mol_type = other RNA
gcgtagatatgcgga

SEQ ID NO: 47997 - RNA, 15 nt, Synthetic Construct
  source 1..15: mol_type = other RNA
gcgtagatatgcgga

SEQ ID NO: 47998 - RNA, 30 nt, Synthetic Construct; identical to SEQ ID NO: 6405
  source 1..30: mol_type = other RNA

SEQ ID NO: 47999 - RNA, 30 nt, Synthetic Construct; identical to SEQ ID NO: 6405
  source 1..30: mol_type = other RNA

SEQ ID NO: 48000 - RNA, 27 nt, Synthetic Construct
  source 1..27: mol_type = other RNA
ccccccactgctagatttgactggctt

SEQ ID NO: 48001 - RNA, 27 nt, Synthetic Construct
  source 1..27: mol_type = other RNA
ccccccactgctagatttgactggctt

SEQ ID NO: 48002 - RNA, 23 nt, Synthetic Construct
  source 1..23: mol_type = other RNA
tggggtagtaggttgtgtggttt

SEQ ID NO: 48003 - RNA, 22 nt, Synthetic Construct
  source 1..22: mol_type = other RNA
tgaggtagtaagttgtgtggtt

SEQ ID NO: 48004 - RNA, 23 nt, Synthetic Construct
  source 1..23: mol_type = other RNA
tggtaatacgacgtacttaatgt

SEQ ID NO: 48005 - RNA, 30 nt, Synthetic Construct; identical to SEQ ID NO: 1958
  source 1..30: mol_type = other RNA

SEQ ID NO: 48006 - RNA, 30 nt, Synthetic Construct; identical to SEQ ID NO: 1958
  source 1..30: mol_type = other RNA

SEQ ID NO: 48007 - RNA, 20 nt, Synthetic Construct
  source 1..20: mol_type = other RNA
cgtaccgtgagtaataatgc

SEQ ID NO: 48008 - RNA, 23 nt, Synthetic Construct
  source 1..23: mol_type = other RNA
gtctttgttcgattccgttgagt

SEQ ID NO: 48009 - RNA, 22 nt, Synthetic Construct
  source 1..22: mol_type = other RNA
tgaggtagtaggttgtgtgatt

SEQ ID NO: 48010 - RNA, 22 nt, Synthetic Construct
  source 1..22: mol_type = other RNA
tgaggtagtaggttgtgtgatt

SEQ ID NO: 48011 - RNA, 20 nt, Synthetic Construct
  source 1..20: mol_type = other RNA
tgaggcagtaggttgtgtgg

SEQ ID NO: 48012 - RNA, 18 nt, Synthetic Construct
  source 1..18: mol_type = other RNA
accggaggaaggtgggga

SEQ ID NO: 48013 - RNA, 18 nt, Synthetic Construct
  source 1..18: mol_type = other RNA
accggaggaaggtgggga

SEQ ID NO: 48014 - RNA, 22 nt, Synthetic Construct
  source 1..22: mol_type = other RNA
tccccttggggttgtaggacca

SEQ ID NO: 48015 - RNA, 22 nt, Synthetic Construct
  source 1..22: mol_type = other RNA
tccccttggggttgtaggacca

SEQ ID NO: 48016 - RNA, 27 nt, Synthetic Construct
  source 1..27: mol_type = other RNA
ccccccactgctaaatttggctggcta

SEQ ID NO: 48017 - RNA, 27 nt, Synthetic Construct
  source 1..27: mol_type = other RNA
ccccccactgctaaatttggctggcta

SEQ ID NO: 48018 - RNA, 33 nt, Synthetic Construct; identical to SEQ ID NO: 3082
  source 1..33: mol_type = other RNA

SEQ ID NO: 48019 - RNA, 27 nt, Synthetic Construct
  source 1..27: mol_type = other RNA
ncccccactgctaaatttgactggctt

SEQ ID NO: 48020 - RNA, 15 nt, Synthetic Construct
  source 1..15: mol_type = other RNA
tagagtagggcggga

SEQ ID NO: 48021 - RNA, 16 nt, Synthetic Construct
  source 1..16: mol_type = other RNA
cagtcaggatgttggc

SEQ ID NO: 48022 - RNA, 31 nt, Synthetic Construct; identical to SEQ ID NO: 2278
  source 1..31: mol_type = other RNA

SEQ ID NO: 48023 - RNA, 21 nt, Synthetic Construct
  source 1..21: mol_type = other RNA
tgaggtagtaggttgagtggt

SEQ ID NO: 48024 - RNA, 21 nt, Synthetic Construct
  source 1..21: mol_type = other RNA
tgaggtagtaggttgagtggt

SEQ ID NO: 48025 - RNA, 22 nt, Synthetic Construct
  source 1..22: mol_type = other RNA
tgaggaagtaggttgtgtggtt

SEQ ID NO: 48026 - RNA, 21 nt, Synthetic Construct
  source 1..21: mol_type = other RNA
cactgatcgagtcgtcctgcg

SEQ ID NO: 48027 - RNA, 21 nt, Synthetic Construct
  source 1..21: mol_type = other RNA
cactgatcgagtcgtcctgcg

SEQ ID NO: 48028 - RNA, 22 nt, Synthetic Construct
  source 1..22: mol_type = other RNA
tgaggtagcagtttgtgctgtt

SEQ ID NO: 48029 - RNA, 22 nt, Synthetic Construct
  source 1..22: mol_type = other RNA
tgaggtagcagtttgtgctgtt

SEQ ID NO: 48030 - RNA, 23 nt, Synthetic Construct
  source 1..23: mol_type = other RNA
tgaggtagcaggttgtgtggttt

SEQ ID NO: 48031 - RNA, 23 nt, Synthetic Construct
  source 1..23: mol_type = other RNA
tgaggtagcaggttgtgtggttt

SEQ ID NO: 48032 - RNA, 23 nt, Synthetic Construct
  source 1..23: mol_type = other RNA
tgaggtagtaggttgtatagttg

SEQ ID NO: 48033 - RNA, 22 nt, Synthetic Construct
  source 1..22: mol_type = other RNA
ngaggtagtagattgtatagtt

SEQ ID NO: 48034 - RNA, 22 nt, Synthetic Construct
  source 1..22: mol_type = other RNA
ngaggtagtagattgtatagtt

SEQ ID NO: 48035 - RNA, 22 nt, Synthetic Construct
  source 1..22: mol_type = other RNA
tggagtgtgacaatggtgcttg

SEQ ID NO: 48036 - RNA, 22 nt, Synthetic Construct
  source 1..22: mol_type = other RNA
tggagtgtgacaatggtgcttg

SEQ ID NO: 48037 - RNA, 21 nt, Synthetic Construct
  source 1..21: mol_type = other RNA
tggagtgtgacaatggcgttt

SEQ ID NO: 48038 - RNA, 21 nt, Synthetic Construct
  source 1..21: mol_type = other RNA
tggagtgtgacaatggcgttt

SEQ ID NO: 48039 - RNA, 16 nt, Synthetic Construct
  source 1..16: mol_type = other RNA
gcctacggccatacca

SEQ ID NO: 48040 - RNA, 16 nt, Synthetic Construct
  source 1..16: mol_type = other RNA
gcctacggccatacca

SEQ ID NO: 48041 - RNA, 18 nt, Synthetic Construct
  source 1..18: mol_type = other RNA
atagggaacgtgagctgg

SEQ ID NO: 48042 - RNA, 18 nt, Synthetic Construct
  source 1..18: mol_type = other RNA
atagggaacgtgagctgg

SEQ ID NO: 48043 - RNA, 21 nt, Synthetic Construct
  source 1..21: mol_type = other RNA
tgaggaagtaggttgtatagt

SEQ ID NO: 48044 - RNA, 21 nt, Synthetic Construct
  source 1..21: mol_type = other RNA
tgaggaagtaggttgtatagt

SEQ ID NO: 48045 - RNA, 17 nt, Synthetic Construct
  source 1..17: mol_type = other RNA
agtccggatcgtagtct

SEQ ID NO: 48046 - RNA, 17 nt, Synthetic Construct
  source 1..17: mol_type = other RNA
agtccggatcgtagtct

SEQ ID NO: 48047 - RNA, 25 nt, Synthetic Construct
  source 1..25: mol_type = other RNA
ttgaggatatgagatagagacgaca

SEQ ID NO: 48048 - RNA, 25 nt, Synthetic Construct
  source 1..25: mol_type = other RNA
ttgaggatatgagatagagacgaca

SEQ ID NO: 48049 - RNA, 23 nt, Synthetic Construct
  source 1..23: mol_type = other RNA
tggtaatacgacgtacttagtga

SEQ ID NO: 48050 - RNA, 23 nt, Synthetic Construct
  source 1..23: mol_type = other RNA
tggtaatacgacgtacttagtga

SEQ ID NO: 48051 - RNA, 21 nt, Synthetic Construct
  source 1..21: mol_type = other RNA
tcctgtaccgagctgccccga

SEQ ID NO: 48052 - RNA, 33 nt, Synthetic Construct; identical to SEQ ID NO: 2556
  source 1..33: mol_type = other RNA

SEQ ID NO: 48053 - RNA, 20 nt, Synthetic Construct
  source 1..20: mol_type = other RNA
tcggaagaaggggtgcctgg

SEQ ID NO: 48054 - RNA, 20 nt, Synthetic Construct
  source 1..20: mol_type = other RNA
tcggaagaaggggtgcctgg

SEQ ID NO: 48055 - RNA, 23 nt, Synthetic Construct
  source 1..23: mol_type = other RNA
tggtaatacgatgtacttagtgt

SEQ ID NO: 48056 - RNA, 22 nt, Synthetic Construct
  source 1..22: mol_type = other RNA
ttcaagtaatccaggataggct

SEQ ID NO: 48057 - RNA, 22 nt, Synthetic Construct
  source 1..22: mol_type = other RNA
ttcaagtaatccaggataggct

SEQ ID NO: 48058 - RNA, 24 nt, Synthetic Construct
  source 1..24: mol_type = other RNA
gatgaggcgtgataacgagtctgc

SEQ ID NO: 48059 - RNA, 21 nt, Synthetic Construct
  source 1..21: mol_type = other RNA
tgaggtagtagtttgcgctgt

SEQ ID NO: 48060 - RNA, 21 nt, Synthetic Construct
  source 1..21: mol_type = other RNA
tgaggtagtagtttgcgctgt

SEQ ID NO: 48061 - RNA, 24 nt, Synthetic Construct
  source 1..24: mol_type = other RNA
tcggatccgtctgagcttggcttt

SEQ ID NO: 48062 - RNA, 32 nt, Synthetic Construct; identical to SEQ ID NO: 2296
  source 1..32: mol_type = other RNA

SEQ ID NO: 48063 - RNA, 21 nt, Synthetic Construct
  source 1..21: mol_type = other RNA
tggagtgtgacagtggtgttt

SEQ ID NO: 48064 - RNA, 21 nt, Synthetic Construct
  source 1..21: mol_type = other RNA
tggagtgtgacagtggtgttt

SEQ ID NO: 48065 - RNA, 23 nt, Synthetic Construct
  source 1..23: mol_type = other RNA
aggtaatacgacgtacttagtgt

SEQ ID NO: 48066 - RNA, 23 nt, Synthetic Construct
  source 1..23: mol_type = other RNA
aggtaatacgacgtacttagtgt

SEQ ID NO: 48067 - RNA, 20 nt, Synthetic Construct
  source 1..20: mol_type = other RNA
tgaggaagtaggttgtatag

SEQ ID NO: 48068 - RNA, 20 nt, Synthetic Construct
  source 1..20: mol_type = other RNA
tgaggaagtaggttgtatag

SEQ ID NO: 48069 - RNA, 21 nt, Synthetic Construct
  source 1..21: mol_type = other RNA
agaggggcagagagcgagact

SEQ ID NO: 48070 - RNA, 21 nt, Synthetic Construct
  source 1..21: mol_type = other RNA
agaggggcagagagcgagact

SEQ ID NO: 48071 - RNA, 23 nt, Synthetic Construct
  source 1..23: mol_type = other RNA
cgaggtagtaggttgtgtggttt

SEQ ID NO: 48072 - RNA, 18 nt, Synthetic Construct
  source 1..18: mol_type = other RNA
gaagttgaccgcctgggg

SEQ ID NO: 48073 - RNA, 22 nt, Synthetic Construct
  source 1..22: mol_type = other RNA
tgaggtagtaggttgtgaggtt

SEQ ID NO: 48074 - RNA, 22 nt, Synthetic Construct
  source 1..22: mol_type = other RNA
tgaggtagtaggttgtgaggtt

SEQ ID NO: 48075 - RNA, 21 nt, Synthetic Construct
  source 1..21: mol_type = other RNA
tgaggtagtaggttgtgtggc

SEQ ID NO: 48076 - RNA, 21 nt, Synthetic Construct
  source 1..21: mol_type = other RNA
tgaggtagtaggttgtgtggc

SEQ ID NO: 48077 - RNA, 27 nt, Synthetic Construct
  source 1..27: mol_type = other RNA
ccccccgctgctaaatttgactggctt

SEQ ID NO: 48078 - RNA, 16 nt, Synthetic Construct
  source 1..16: mol_type = other RNA
gtccggatcgtagtct

SEQ ID NO: 48079 - RNA, 26 nt, Synthetic Construct
  source 1..26: mol_type = other RNA
gacttaccaaacctatgcaaactccg

SEQ ID NO: 48080 - RNA, 26 nt, Synthetic Construct
  source 1..26: mol_type = other RNA
gacttaccaaacctatgcaaactccg

SEQ ID NO: 48081 - RNA, 17 nt, Synthetic Construct
  source 1..17: mol_type = other RNA
cagtcaggatgttggct

SEQ ID NO: 48082 - RNA, 24 nt, Synthetic Construct
  source 1..24: mol_type = other RNA
gaggtgtagaataggtgggagctt

SEQ ID NO: 48083 - RNA, 24 nt, Synthetic Construct
  source 1..24: mol_type = other RNA
gaggtgtagaataggtgggagctt

SEQ ID NO: 48084 - RNA, 22 nt, Synthetic Construct
  source 1..22: mol_type = other RNA
tgaggtagtaggttgtatagct

SEQ ID NO: 48085 - RNA, 22 nt, Synthetic Construct
  source 1..22: mol_type = other RNA
tgaggtagtaggttgtatagct

SEQ ID NO: 48086 - RNA, 22 nt, Synthetic Construct
  source 1..22: mol_type = other RNA
cattgcacttgtctcggtctgg

SEQ ID NO: 48087 - RNA, 22 nt, Synthetic Construct
  source 1..22: mol_type = other RNA
tctttggttatctagctgtatg

SEQ ID NO: 48088 - RNA, 22 nt, Synthetic Construct
  source 1..22: mol_type = other RNA
tctttggttatctagctgtatg

SEQ ID NO: 48089 - RNA, 22 nt, Synthetic Construct
  source 1..22: mol_type = other RNA
tgaggtagtaggttgtgtagtt

SEQ ID NO: 48090 - RNA, 27 nt, Synthetic Construct
  source 1..27: mol_type = other RNA
ccccccactactaaatttgactggctt

SEQ ID NO: 48091 - RNA, 20 nt, Synthetic Construct
  source 1..20: mol_type = other RNA
tgaggtagtaggttgcatag

SEQ ID NO: 48092 - RNA, 20 nt, Synthetic Construct
  source 1..20: mol_type = other RNA
tgaggtagtaggttgcatag

SEQ ID NO: 48093 - RNA, 16 nt, Synthetic Construct
  source 1..16: mol_type = other RNA
gccagcagccgcggta

SEQ ID NO: 48094 - RNA, 21 nt, Synthetic Construct
  source 1..21: mol_type = other RNA
cggtcccaagggtatggctgt

SEQ ID NO: 48095 - RNA, 22 nt, Synthetic Construct
  source 1..22: mol_type = other RNA
gaagaggacttggaactcgatc

SEQ ID NO: 48096 - RNA, 22 nt, Synthetic Construct
  source 1..22: mol_type = other RNA
gaagaggacttggaactcgatc

SEQ ID NO: 48097 - RNA, 22 nt, Synthetic Construct
  source 1..22: mol_type = other RNA
tcctgtactgggctgccccgag

SEQ ID NO: 48098 - RNA, 22 nt, Synthetic Construct
  source 1..22: mol_type = other RNA
tcctgtactgggctgccccgag

SEQ ID NO: 48099 - RNA, 23 nt, Synthetic Construct
  source 1..23: mol_type = other RNA
tccagtactgagctgccccgagt

SEQ ID NO: 48100 - RNA, 23 nt, Synthetic Construct
  source 1..23: mol_type = other RNA
tccagtactgagctgccccgagt

SEQ ID NO: 48101 - RNA, 22 nt, Synthetic Construct
  source 1..22: mol_type = other RNA
atcacattgccagggatttcca

SEQ ID NO: 48102 - RNA, 22 nt, Synthetic Construct
  source 1..22: mol_type = other RNA
atcacattgccagggatttcca

SEQ ID NO: 48103 - RNA, 23 nt, Synthetic Construct
  source 1..23: mol_type = other RNA
tgaggtagtaggttgcgtggttt

SEQ ID NO: 48104 - RNA, 18 nt, Synthetic Construct
  source 1..18: mol_type = other RNA
accaaggggtcgtgggtt

SEQ ID NO: 48105 - RNA, 15 nt, Synthetic Construct
  source 1..15: mol_type = other RNA
tggccgtcgtcagct

SEQ ID NO: 48106 - RNA, 23 nt, Synthetic Construct
  source 1..23: mol_type = other RNA
tgaggggcagagagcgagacttc

SEQ ID NO: 48107 - RNA, 23 nt, Synthetic Construct
  source 1..23: mol_type = other RNA
tggtaatacgacgtactttgtgt

SEQ ID NO: 48108 - RNA, 23 nt, Synthetic Construct
  source 1..23: mol_type = other RNA
tggtaatacgacgtactttgtgt

SEQ ID NO: 48109 - RNA, 31 nt, Synthetic Construct; identical to SEQ ID NO: 2427
  source 1..31: mol_type = other RNA

SEQ ID NO: 48110 - RNA, 31 nt, Synthetic Construct; identical to SEQ ID NO: 2427
  source 1..31: mol_type = other RNA

SEQ ID NO: 48111 - RNA, 20 nt, Synthetic Construct
  source 1..20: mol_type = other RNA
cacatgcaagtcgaacggta

SEQ ID NO: 48112 - RNA, 21 nt, Synthetic Construct
  source 1..21: mol_type = other RNA
tggagtgtgacaacggtgttt

SEQ ID NO: 48113 - RNA, 21 nt, Synthetic Construct
  source 1..21: mol_type = other RNA
tggagtgtgacaacggtgttt

SEQ ID NO: 48114 - RNA, 23 nt, Synthetic Construct
  source 1..23: mol_type = other RNA
tggtaacacgacgtacttagtgt

SEQ ID NO: 48115 - RNA, 21 nt, Synthetic Construct
  source 1..21: mol_type = other RNA
ggaggggcagagagcgagact

SEQ ID NO: 48116 - RNA, 22 nt, Synthetic Construct
  source 1..22: mol_type = other RNA
tgaggtagtagtttgtggtgtt

SEQ ID NO: 48117 - RNA, 22 nt, Synthetic Construct
  source 1..22: mol_type = other RNA
tgaggtagtagtttgtggtgtt

SEQ ID NO: 48118 - RNA, 34 nt, Synthetic Construct; identical to SEQ ID NO: 385
  source 1..34: mol_type = other RNA

SEQ ID NO: 48119 - RNA, 33 nt, Synthetic Construct; identical to SEQ ID NO: 2126
  source 1..33: mol_type = other RNA

SEQ ID NO: 48120 - RNA, 33 nt, Synthetic Construct; identical to SEQ ID NO: 2126
  source 1..33: mol_type = other RNA

SEQ ID NO: 48121 - RNA, 23 nt, Synthetic Construct
  source 1..23: mol_type = other RNA
tgaggtagtaggctgtgtggttt

SEQ ID NO: 48122 - RNA, 23 nt, Synthetic Construct
  source 1..23: mol_type = other RNA
tgaggtagtaggctgtgtggttt

SEQ ID NO: 48123 - RNA, 19 nt, Synthetic Construct
  source 1..19: mol_type = other RNA
gggataactggcttgtggc

SEQ ID NO: 48124 - RNA, 19 nt, Synthetic Construct
  source 1..19: mol_type = other RNA
gggataactggcttgtggc

SEQ ID NO: 48125 - RNA, 24 nt, Synthetic Construct
  source 1..24: mol_type = other RNA
tcggatccgtctgagcttggcttt

SEQ ID NO: 48126 - RNA, 24 nt, Synthetic Construct
  source 1..24: mol_type = other RNA
tcggatccgtctgagcttggcttt

SEQ ID NO: 48127 - RNA, 22 nt, Synthetic Construct
  source 1..22: mol_type = other RNA
tggaatgtaaagaagtacgtat

SEQ ID NO: 48128 - RNA, 22 nt, Synthetic Construct
  source 1..22: mol_type = other RNA
tggaatgtaaagaagtacgtat

SEQ ID NO: 48129 - RNA, 22 nt, Synthetic Construct
  source 1..22: mol_type = other RNA
tcgtaccgtgagcaataatgcg

SEQ ID NO: 48130 - RNA, 22 nt, Synthetic Construct
  source 1..22: mol_type = other RNA
tcgtaccgtgagcaataatgcg

SEQ ID NO: 48131 - RNA, 20 nt, Synthetic Construct
  source 1..20: mol_type = other RNA
tgaggcagtaggttgtgtgg

SEQ ID NO: 48132 - RNA, 20 nt, Synthetic Construct
  source 1..20: mol_type = other RNA
tgaggcagtaggttgtgtgg

SEQ ID NO: 48133 - RNA, 22 nt, Synthetic Construct
  source 1..22: mol_type = other RNA
tagcttatcagactgatgttga

SEQ ID NO: 48134 - RNA, 21 nt, Synthetic Construct
  source 1..21: mol_type = other RNA
tgaggggcagagagcgaggct

SEQ ID NO: 48135 - RNA, 21 nt, Synthetic Construct
  source 1..21: mol_type = other RNA
tgaggggcagagagcgaggct

SEQ ID NO: 48136 - RNA, 16 nt, Synthetic Construct
  source 1..16: mol_type = other RNA
tgttcggaagattttc

SEQ ID NO: 48137 - RNA, 16 nt, Synthetic Construct
  source 1..16: mol_type = other RNA
tgttcggaagattttc

SEQ ID NO: 48138 - RNA, 21 nt, Synthetic Construct
  source 1..21: mol_type = other RNA
caaagtgctgttcgtgcaggt

SEQ ID NO: 48139 - RNA, 21 nt, Synthetic Construct
  source 1..21: mol_type = other RNA
caaagtgctgttcgtgcaggt

SEQ ID NO: 48140 - RNA, 22 nt, Synthetic Construct
  source 1..22: mol_type = other RNA
gcagtagtctgcacattggtta

SEQ ID NO: 48141 - RNA, 22 nt, Synthetic Construct
  source 1..22: mol_type = other RNA
gcagtagtctgcacattggtta

SEQ ID NO: 48142 - RNA, 15 nt, Synthetic Construct
  source 1..15: mol_type = other RNA
tggccgtcgtcagct

SEQ ID NO: 48143 - RNA, 22 nt, Synthetic Construct
  source 1..22: mol_type = other RNA
tacagtagtctgcacattggtt

SEQ ID NO: 48144 - RNA, 22 nt, Synthetic Construct
  source 1..22: mol_type = other RNA
tacagtagtctgcacattggtt

SEQ ID NO: 48145 - RNA, 33 nt, Synthetic Construct; identical to SEQ ID NO: 2479
  source 1..33: mol_type = other RNA

SEQ ID NO: 48146 - RNA, 22 nt, Synthetic Construct
  source 1..22: mol_type = other RNA
tagcagcacgtaagtattggcg

SEQ ID NO: 48147 - RNA, 22 nt, Synthetic Construct
  source 1..22: mol_type = other RNA
tagcagcacgtaagtattggcg

SEQ ID NO: 48148 - RNA, 16 nt, Synthetic Construct
  source 1..16: mol_type = other RNA
aggtcatcattatctg

SEQ ID NO: 48149 - RNA, 16 nt, Synthetic Construct
  source 1..16: mol_type = other RNA
aggtcatcattatctg

SEQ ID NO: 48150 - RNA, 22 nt, Synthetic Construct
  source 1..22: mol_type = other RNA
tatagcacttgtcccggcctgt

SEQ ID NO: 48151 - RNA, 22 nt, Synthetic Construct
  source 1..22: mol_type = other RNA
tatagcacttgtcccggcctgt

SEQ ID NO: 48152 - RNA, 16 nt, Synthetic Construct
  source 1..16: mol_type = other RNA
gtctatggccatacca

SEQ ID NO: 48153 - RNA, 16 nt, Synthetic Construct
  source 1..16: mol_type = other RNA
gtctatggccatacca

SEQ ID NO: 48154 - RNA, 34 nt, Synthetic Construct; identical to SEQ ID NO: 385
  source 1..34: mol_type = other RNA

SEQ ID NO: 48155 - RNA, 23 nt, Synthetic Construct
  source 1..23: mol_type = other RNA
tgaggtagtaggttgtgtagttt

SEQ ID NO: 48156 - RNA, 23 nt, Synthetic Construct
  source 1..23: mol_type = other RNA
tgaggtagtaggttgtgtagttt

SEQ ID NO: 48157 - RNA, 22 nt, Synthetic Construct
  source 1..22: mol_type = other RNA
tggaatgtaaaggagtatgtat

SEQ ID NO: 48158 - RNA, 22 nt, Synthetic Construct
  source 1..22: mol_type = other RNA
tggaatgtaaaggagtatgtat

SEQ ID NO: 48159 - RNA, 34 nt, Synthetic Construct; identical to SEQ ID NO: 385
  source 1..34: mol_type = other RNA

SEQ ID NO: 48160 - RNA, 18 nt, Synthetic Construct
  source 1..18: mol_type = other RNA
gtaggtcatcgtcaggct

SEQ ID NO: 48161 - RNA, 18 nt, Synthetic Construct
  source 1..18: mol_type = other RNA
gtaggtcatcgtcaggct

SEQ ID NO: 48162 - RNA, 27 nt, Synthetic Construct
  source 1..27: mol_type = other RNA
ccccccactgctaaatttgactgactt

SEQ ID NO: 48163 - RNA, 21 nt, Synthetic Construct
  source 1..21: mol_type = other RNA
taactccttaagcgaatctcc

SEQ ID NO: 48164 - RNA, 21 nt, Synthetic Construct
  source 1..21: mol_type = other RNA
taactccttaagcgaatctcc

SEQ ID NO: 48165 - RNA, 22 nt, Synthetic Construct
  source 1..22: mol_type = other RNA
tgaggtagtaggctgtatagtt

SEQ ID NO: 48166 - RNA, 22 nt, Synthetic Construct
  source 1..22: mol_type = other RNA
tgaggtagtaggctgtatagtt

SEQ ID NO: 48167 - RNA, 16 nt, Synthetic Construct
  source 1..16: mol_type = other RNA
gtctacggctatacca

SEQ ID NO: 48168 - RNA, 17 nt, Synthetic Construct
  source 1..17: mol_type = other RNA
ccagtaaacggcggccg

SEQ ID NO: 48169 - RNA, 34 nt, Synthetic Construct; identical to SEQ ID NO: 2265
  source 1..34: mol_type = other RNA

SEQ ID NO: 48170 - RNA, 44 nt, Synthetic Construct; identical to SEQ ID NO: 5536
  source 1..44: mol_type = other RNA

SEQ ID NO: 48171 - RNA, 44 nt, Synthetic Construct; identical to SEQ ID NO: 5536
  source 1..44: mol_type = other RNA

SEQ ID NO: 48172 - RNA, 16 nt, Synthetic Construct
  source 1..16: mol_type = other RNA
gtctatggccatacca

SEQ ID NO: 48173 - RNA, 22 nt, Synthetic Construct
  source 1..22: mol_type = other RNA
cattgcgcttgtctcggtctga

SEQ ID NO: 48174 - RNA, 16 nt, Synthetic Construct
  source 1..16: mol_type = other RNA
ccggaggaaggtgggg

SEQ ID NO: 48175 - RNA, 16 nt, Synthetic Construct
  source 1..16: mol_type = other RNA
ccggaggaaggtgggg

SEQ ID NO: 48176 - RNA, 18 nt, Synthetic Construct
  source 1..18: mol_type = other RNA
gtccccttcgtctagagg

SEQ ID NO: 48177 - RNA, 22 nt, Synthetic Construct
  source 1..22: mol_type = other RNA
tgaggtagtaggttgtatagta

SEQ ID NO: 48178 - RNA, 22 nt, Synthetic Construct
  source 1..22: mol_type = other RNA
tgaggtagtaggttgtatagta

SEQ ID NO: 48179 - RNA, 16 nt, Synthetic Construct
  source 1..16: mol_type = other RNA
gtctacggccataccg

SEQ ID NO: 48180 - RNA, 16 nt, Synthetic Construct
  source 1..16: mol_type = other RNA
gtctacggccataccg

SEQ ID NO: 48181 - RNA, 23 nt, Synthetic Construct
  source 1..23: mol_type = other RNA
tcctgtactgagctgccccgggt

SEQ ID NO: 48182 - RNA, 23 nt, Synthetic Construct
  source 1..23: mol_type = other RNA
tcctgtactgggctgccccgaga

SEQ ID NO: 48183 - RNA, 23 nt, Synthetic Construct
  source 1..23: mol_type = other RNA
tcctgtactgggctgccccgaga

SEQ ID NO: 48184 - RNA, 22 nt, Synthetic Construct
  source 1..22: mol_type = other RNA
tgggatgtaaagaagtatgtat

SEQ ID NO: 48185 - RNA, 22 nt, Synthetic Construct
  source 1..22: mol_type = other RNA
tgggatgtaaagaagtatgtat

SEQ ID NO: 48186 - RNA, 24 nt, Synthetic Construct
  source 1..24: mol_type = other RNA
tcggctcatctcatcctggggctg

SEQ ID NO: 48187 - RNA, 16 nt, Synthetic Construct
  source 1..16: mol_type = other RNA
gtctgcggccatacca

SEQ ID NO: 48188 - RNA, 16 nt, Synthetic Construct
  source 1..16: mol_type = other RNA
gtctgcggccatacca

SEQ ID NO: 48189 - RNA, 16 nt, Synthetic Construct
  source 1..16: mol_type = other RNA
tggccgtcgtcagctc

SEQ ID NO: 48190 - RNA, 33 nt, Synthetic Construct; identical to SEQ ID NO: 7469
  source 1..33: mol_type = other RNA

SEQ ID NO: 48191 - RNA, 33 nt, Synthetic Construct; identical to SEQ ID NO: 7469
  source 1..33: mol_type = other RNA

SEQ ID NO: 48192 - RNA, 22 nt, Synthetic Construct
  source 1..22: mol_type = other RNA
tgaggtagtagtttgtgcggtt

SEQ ID NO: 48193 - RNA, 22 nt, Synthetic Construct
  source 1..22: mol_type = other RNA
tgaagtagtaggttgtatagtt

SEQ ID NO: 48194 - RNA, 22 nt, Synthetic Construct
  source 1..22: mol_type = other RNA
tgaagtagtaggttgtatagtt

SEQ ID NO: 48195 - RNA, 27 nt, Synthetic Construct
  source 1..27: mol_type = other RNA
gctttacattggactttgaacagatct

SEQ ID NO: 48196 - RNA, 23 nt, Synthetic Construct
  source 1..23: mol_type = other RNA
tcctgtactgggctgccccgagt

SEQ ID NO: 48197 - RNA, 23 nt, Synthetic Construct
  source 1..23: mol_type = other RNA
tcctgtactgggctgccccgagt

SEQ ID NO: 48198 - RNA, 16 nt, Synthetic Construct
  source 1..16: mol_type = other RNA
agtcaggatgttggct

SEQ ID NO: 48199 - RNA, 23 nt, Synthetic Construct
  source 1..23: mol_type = other RNA
tctttgttcgattccgttgagta

SEQ ID NO: 48200 - RNA, 22 nt, Synthetic Construct
  source 1..22: mol_type = other RNA
tgaggcagtagtttgtgctgtt

SEQ ID NO: 48201 - RNA, 22 nt, Synthetic Construct
  source 1..22: mol_type = other RNA
tgaggcagtagtttgtgctgtt

SEQ ID NO: 48202 - RNA, 16 nt, Synthetic Construct
  source 1..16: mol_type = other RNA
tgcaagtcgaacggta

SEQ ID NO: 48203 - RNA, 18 nt, Synthetic Construct
  source 1..18: mol_type = other RNA
tgcgtagatatgcggagg

SEQ ID NO: 48204 - RNA, 22 nt, Synthetic Construct
  source 1..22: mol_type = other RNA
tcctgtactgagctgcctcgag

SEQ ID NO: 48205 - RNA, 22 nt, Synthetic Construct
  source 1..22: mol_type = other RNA
tcctgtactgagctgcctcgag

SEQ ID NO: 48206 - RNA, 24 nt, Synthetic Construct
  source 1..24: mol_type = other RNA
tgtgaacatccccgactggaagct

SEQ ID NO: 48207 - RNA, 19 nt, Synthetic Construct
  source 1..19: mol_type = other RNA
gcgccgatgatagtgcgga

SEQ ID NO: 48208 - RNA, 19 nt, Synthetic Construct
  source 1..19: mol_type = other RNA
gcgccgatgatagtgcgga

SEQ ID NO: 48209 - RNA, 23 nt, Synthetic Construct
  source 1..23: mol_type = other RNA
tgaggggcagagagcaagacttt

SEQ ID NO: 48210 - RNA, 23 nt, Synthetic Construct
  source 1..23: mol_type = other RNA
tgaggggcagagagcaagacttt

SEQ ID NO: 48211 - RNA, 21 nt, Synthetic Construct
  source 1..21: mol_type = other RNA
tcctgtactgggctgccccga

SEQ ID NO: 48212 - RNA, 21 nt, Synthetic Construct
  source 1..21: mol_type = other RNA
tcctgtactgggctgccccga

SEQ ID NO: 48213 - RNA, 20 nt, Synthetic Construct
  source 1..20: mol_type = other RNA
ggaggtagtaggttgtgtgg

SEQ ID NO: 48214 - RNA, 20 nt, Synthetic Construct
  source 1..20: mol_type = other RNA
ggaggtagtaggttgtgtgg

SEQ ID NO: 48215 - RNA, 24 nt, Synthetic Construct
  source 1..24: mol_type = other RNA
ggtaaacatccccgactggaagct

SEQ ID NO: 48216 - RNA, 34 nt, Synthetic Construct; identical to SEQ ID NO: 2291
  source 1..34: mol_type = other RNA

SEQ ID NO: 48217 - RNA, 34 nt, Synthetic Construct; identical to SEQ ID NO: 2291
  source 1..34: mol_type = other RNA

SEQ ID NO: 48218 - RNA, 23 nt, Synthetic Construct
  source 1..23: mol_type = other RNA
tggtaatacggcgtacttagtgt

SEQ ID NO: 48219 - RNA, 20 nt, Synthetic Construct
  source 1..20: mol_type = other RNA
gaatcgctagtaatcgcgga

SEQ ID NO: 48220 - RNA, 23 nt, Synthetic Construct
  source 1..23: mol_type = other RNA
tgaggtggtaggttgtgtggttt

SEQ ID NO: 48221 - RNA, 23 nt, Synthetic Construct
  source 1..23: mol_type = other RNA
tgaggtagtaggttgtgtggctt

SEQ ID NO: 48222 - RNA, 23 nt, Synthetic Construct
  source 1..23: mol_type = other RNA
tgaggtagtaggttgtgtggctt

SEQ ID NO: 48223 - RNA, 25 nt, Synthetic Construct
  source 1..25: mol_type = other RNA
ttgaggatacgagatcgagacgaca

SEQ ID NO: 48224 - RNA, 25 nt, Synthetic Construct
  source 1..25: mol_type = other RNA
ttgaggatacgagatcgagacgaca

SEQ ID NO: 48225 - RNA, 15 nt, Synthetic Construct
  source 1..15: mol_type = other RNA
gtcaggatgttggct

SEQ ID NO: 48226 - RNA, 15 nt, Synthetic Construct
  source 1..15: mol_type = other RNA
gtcaggatgttggct

SEQ ID NO: 48227 - RNA, 22 nt, Synthetic Construct
  source 1..22: mol_type = other RNA
cattgcgcttgtctcggtctga

SEQ ID NO: 48228 - RNA, 36 nt, Synthetic Construct; identical to SEQ ID NO: 777
  source 1..36: mol_type = other RNA

SEQ ID NO: 48229 - RNA, 36 nt, Synthetic Construct; identical to SEQ ID NO: 777
  source 1..36: mol_type = other RNA

SEQ ID NO: 48230 - RNA, 22 nt, Synthetic Construct
  source 1..22: mol_type = other RNA
tgaggtagtagactgtatagtt

SEQ ID NO: 48231 - RNA, 22 nt, Synthetic Construct
  source 1..22: mol_type = other RNA
tgaggtagtagactgtatagtt

SEQ ID NO: 48232 - RNA, 24 nt, Synthetic Construct
  source 1..24: mol_type = other RNA
tgaggtagtaggttgtgtggtttc

SEQ ID NO: 48233 - RNA, 16 nt, Synthetic Construct
  source 1..16: mol_type = other RNA
gtcgacgtatagggtg

SEQ ID NO: 48234 - RNA, 16 nt, Synthetic Construct
  source 1..16: mol_type = other RNA
gtcgacgtatagggtg

SEQ ID NO: 48235 - RNA, 17 nt, Synthetic Construct
  source 1..17: mol_type = other RNA
agtccggatcgtagtct

SEQ ID NO: 48236 - RNA, 15 nt, Synthetic Construct
  source 1..15: mol_type = other RNA
cccagaaacccggtc

SEQ ID NO: 48237 - RNA, 23 nt, Synthetic Construct
  source 1..23: mol_type = other RNA
tggtaatacgacgtacttagtga

SEQ ID NO: 48238 - RNA, 23 nt, Synthetic Construct
  source 1..23: mol_type = other RNA
tggtaatacgacgtacttagtga

SEQ ID NO: 48239 - RNA, 24 nt, Synthetic Construct
  source 1..24: mol_type = other RNA
tgtaaacgtccccgactggaagct

SEQ ID NO: 48240 - RNA, 22 nt, Synthetic Construct
  source 1..22: mol_type = other RNA
tgaggtaatagattgtatagtt

SEQ ID NO: 48241 - RNA, 22 nt, Synthetic Construct
  source 1..22: mol_type = other RNA
tgaggtaatagattgtatagtt

SEQ ID NO: 48242 - RNA, 23 nt, Synthetic Construct
  source 1..23: mol_type = other RNA
tggaaatacgacgtacttagtgt

SEQ ID NO: 48243 - RNA, 23 nt, Synthetic Construct
  source 1..23: mol_type = other RNA
tggaatgtaaagaagtatgtacc

SEQ ID NO: 48244 - RNA, 23 nt, Synthetic Construct
  source 1..23: mol_type = other RNA
tggaatgtaaagaagtatgtacc

SEQ ID NO: 48245 - RNA, 19 nt, Synthetic Construct
  source 1..19: mol_type = other RNA
agtaggtcatcgtcaggct

SEQ ID NO: 48246 - RNA, 19 nt, Synthetic Construct
  source 1..19: mol_type = other RNA
agtaggtcatcgtcaggct

SEQ ID NO: 48247 - RNA, 23 nt, Synthetic Construct
  source 1..23: mol_type = other RNA
tggtaatacgacgtacttagtgt

SEQ ID NO: 48248 - RNA, 23 nt, Synthetic Construct
  source 1..23: mol_type = other RNA
tggtaatacgacgtacttagtgt

SEQ ID NO: 48249 - RNA, 31 nt, Synthetic Construct; identical to SEQ ID NO: 1881
  source 1..31: mol_type = other RNA

SEQ ID NO: 48250 - RNA, 15 nt, Synthetic Construct
  source 1..15: mol_type = other RNA
tgcaagtcgaacggt

SEQ ID NO: 48251 - RNA, 29 nt, Synthetic Construct
  source 1..29: mol_type = other RNA
gcattggtggttcagtggtagaattctcg

SEQ ID NO: 48252 - RNA, 29 nt, Synthetic Construct
  source 1..29: mol_type = other RNA
gcattggtggttcagtggtagaattctcg

SEQ ID NO: 48253 - RNA, 15 nt, Synthetic Construct
  source 1..15: mol_type = other RNA
acccttgtcattagt

SEQ ID NO: 48254 - RNA, 22 nt, Synthetic Construct
  source 1..22: mol_type = other RNA
tcctgtactgagctgccctgag

SEQ ID NO: 48255 - RNA, 22 nt, Synthetic Construct
  source 1..22: mol_type = other RNA
tcctgtactgagctgccctgag

SEQ ID NO: 48256 - RNA, 27 nt, Synthetic Construct
  source 1..27: mol_type = other RNA
ccccccgctgctaaatttgactggcta

SEQ ID NO: 48257 - RNA, 23 nt, Synthetic Construct
  source 1..23: mol_type = other RNA
ttcaagtaatccaggataggctt

SEQ ID NO: 48258 - RNA, 21 nt, Synthetic Construct
  source 1..21: mol_type = other RNA
tgaggggcagagagcgagact

SEQ ID NO: 48259 - RNA, 21 nt, Synthetic Construct
  source 1..21: mol_type = other RNA
tgaggggcagagagcgagact

SEQ ID NO: 48260 - RNA, 19 nt, Synthetic Construct
  source 1..19: mol_type = other RNA
tgtcagtttgtcaaatacc

SEQ ID NO: 48261 - RNA, 19 nt, Synthetic Construct
  source 1..19: mol_type = other RNA
tgtcagtttgtcaaatacc

SEQ ID NO: 48262 - RNA, 16 nt, Synthetic Construct
  source 1..16: mol_type = other RNA
gatttgggagtgctcg

SEQ ID NO: 48263 - RNA, 16 nt, Synthetic Construct
  source 1..16: mol_type = other RNA
ttggcctcaagtcagg

SEQ ID NO: 48264 - RNA, 16 nt, Synthetic Construct
  source 1..16: mol_type = other RNA
ttggcctcaagtcagg

SEQ ID NO: 48265 - RNA, 15 nt, Synthetic Construct
  source 1..15: mol_type = other RNA
tggccgtcgtcagct

SEQ ID NO: 48266 - RNA, 31 nt, Synthetic Construct; identical to SEQ ID NO: 1881
  source 1..31: mol_type = other RNA

SEQ ID NO: 48267 - RNA, 32 nt, Synthetic Construct; identical to SEQ ID NO: 3541
  source 1..32: mol_type = other RNA

SEQ ID NO: 48268 - RNA, 32 nt, Synthetic Construct; identical to SEQ ID NO: 3541
  source 1..32: mol_type = other RNA

SEQ ID NO: 48269 - RNA, 25 nt, Synthetic Construct
  source 1..25: mol_type = other RNA
ttggggatatgagatcgagacgaca

SEQ ID NO: 48270 - RNA, 25 nt, Synthetic Construct
  source 1..25: mol_type = other RNA
ttggggatatgagatcgagacgaca

SEQ ID NO: 48271 - RNA, 15 nt, Synthetic Construct
  source 1..15: mol_type = other RNA
agttgaccgcctggg

SEQ ID NO: 48272 - RNA, 21 nt, Synthetic Construct
  source 1..21: mol_type = other RNA
tacctggttgatcctgccagt

SEQ ID NO: 48273 - RNA, 21 nt, Synthetic Construct
  source 1..21: mol_type = other RNA
tacctggttgatcctgccagt

SEQ ID NO: 48274 - RNA, 21 nt, Synthetic Construct
  source 1..21: mol_type = other RNA
acagtagtctgcacattggtt

SEQ ID NO: 48275 - RNA, 21 nt, Synthetic Construct
  source 1..21: mol_type = other RNA
ctagactgaagctccttgggg

SEQ ID NO: 48276 - RNA, 22 nt, Synthetic Construct
  source 1..22: mol_type = other RNA
cactgcacttgtctcggtctga

SEQ ID NO: 48277 - RNA, 23 nt, Synthetic Construct
  source 1..23: mol_type = other RNA
tggaatgtaaagaagtatgtata

SEQ ID NO: 48278 - RNA, 23 nt, Synthetic Construct
  source 1..23: mol_type = other RNA
tggaatgtaaagaagtatgtata

SEQ ID NO: 48279 - RNA, 15 nt, Synthetic Construct
  source 1..15: mol_type = other RNA
gagtagggcgggaca

SEQ ID NO: 48280 - RNA, 15 nt, Synthetic Construct
  source 1..15: mol_type = other RNA
gagtagggcgggaca

SEQ ID NO: 48281 - RNA, 22 nt, Synthetic Construct
  source 1..22: mol_type = other RNA
tgaggtagtaggttgtgtagtt

SEQ ID NO: 48282 - RNA, 22 nt, Synthetic Construct
  source 1..22: mol_type = other RNA
tgaggtagtaggttgtgtagtt

SEQ ID NO: 48283 - RNA, 23 nt, Synthetic Construct
  source 1..23: mol_type = other RNA
tgaggtggtaggttgtgtggttt

SEQ ID NO: 48284 - RNA, 23 nt, Synthetic Construct
  source 1..23: mol_type = other RNA
tgaggtggtaggttgtgtggttt

SEQ ID NO: 48285 - RNA, 16 nt, Synthetic Construct
  source 1..16: mol_type = other RNA
gtccccttcgtctaga

SEQ ID NO: 48286 - RNA, 16 nt, Synthetic Construct
  source 1..16: mol_type = other RNA
gtccccttcgtctaga

SEQ ID NO: 48287 - RNA, 20 nt, Synthetic Construct
  source 1..20: mol_type = other RNA
tgaggaagtaggttgtgtgg

SEQ ID NO: 48288 - RNA, 16 nt, Synthetic Construct
  source 1..16: mol_type = other RNA
ccgcttttgtcaggga

SEQ ID NO: 48289 - RNA, 20 nt, Synthetic Construct
  source 1..20: mol_type = other RNA
tgaggtagtaggttatgtgg

SEQ ID NO: 48290 - RNA, 20 nt, Synthetic Construct
  source 1..20: mol_type = other RNA
gcgtgcttgactgcgagact

SEQ ID NO: 48291 - RNA, 16 nt, Synthetic Construct
  source 1..16: mol_type = other RNA
gtcaacggccatacca

SEQ ID NO: 48292 - RNA, 24 nt, Synthetic Construct
  source 1..24: mol_type = other RNA
tgtaaacgtccccgactggaagct

SEQ ID NO: 48293 - RNA, 24 nt, Synthetic Construct
  source 1..24: mol_type = other RNA
tgtaaacgtccccgactggaagct

SEQ ID NO: 48294 - RNA, 21 nt, Synthetic Construct
  source 1..21: mol_type = other RNA
tgaggtagtagatcgtatagt

SEQ ID NO: 48295 - RNA, 21 nt, Synthetic Construct
  source 1..21: mol_type = other RNA
tgaggtagtagatcgtatagt

SEQ ID NO: 48296 - RNA, 18 nt, Synthetic Construct
  source 1..18: mol_type = other RNA
tcagtagctcgaggaaaa

SEQ ID NO: 48297 - RNA, 18 nt, Synthetic Construct
  source 1..18: mol_type = other RNA
tcagtagctcgaggaaaa

SEQ ID NO: 48298 - RNA, 22 nt, Synthetic Construct
  source 1..22: mol_type = other RNA
tcctgtactaagctgccccgag

SEQ ID NO: 48299 - RNA, 22 nt, Synthetic Construct
  source 1..22: mol_type = other RNA
tcctgtactaagctgccccgag

SEQ ID NO: 48300 - RNA, 20 nt, Synthetic Construct
  source 1..20: mol_type = other RNA
tgaggtagtaggttgtgtag

SEQ ID NO: 48301 - RNA, 20 nt, Synthetic Construct
  source 1..20: mol_type = other RNA
tgaggtagtaggttgtgtag

SEQ ID NO: 48302 - RNA, 23 nt, Synthetic Construct
  source 1..23: mol_type = other RNA
tagcttatcagactgatgttgac

SEQ ID NO: 48303 - RNA, 23 nt, Synthetic Construct
  source 1..23: mol_type = other RNA
tagcttatcagactgatgttgac

SEQ ID NO: 48304 - RNA, 22 nt, Synthetic Construct
  source 1..22: mol_type = other RNA
tgaggtaataggttgtgtggtt

SEQ ID NO: 48305 - RNA, 16 nt, Synthetic Construct
  source 1..16: mol_type = other RNA
gcagacgaagtgagtg

SEQ ID NO: 48306 - RNA, 22 nt, Synthetic Construct
  source 1..22: mol_type = other RNA
tcgtaccgtgggtaataatgcg

SEQ ID NO: 48307 - RNA, 22 nt, Synthetic Construct
  source 1..22: mol_type = other RNA
tcgtaccgtgggtaataatgcg

SEQ ID NO: 48308 - RNA, 22 nt, Synthetic Construct
  source 1..22: mol_type = other RNA
ncctgtactgagctgccccgag

SEQ ID NO: 48309 - RNA, 33 nt, Synthetic Construct; identical to SEQ ID NO: 2253
  source 1..33: mol_type = other RNA

SEQ ID NO: 48310 - RNA, 33 nt, Synthetic Construct; identical to SEQ ID NO: 2253
  source 1..33: mol_type = other RNA

SEQ ID NO: 48311 - RNA, 33 nt, Synthetic Construct; identical to SEQ ID NO: 2253
  source 1..33: mol_type = other RNA

SEQ ID NO: 48312 - RNA, 22 nt, Synthetic Construct
  source 1..22: mol_type = other RNA
tgaggcagtagattgtatagtt

SEQ ID NO: 48313 - RNA, 22 nt, Synthetic Construct
  source 1..22: mol_type = other RNA
tgaggcagtagattgtatagtt

SEQ ID NO: 48314 - RNA, 16 nt, Synthetic Construct
  source 1..16: mol_type = other RNA
gtctacggccgtacca

SEQ ID NO: 48315 - RNA, 16 nt, Synthetic Construct
  source 1..16: mol_type = other RNA
gtctacggccgtacca

SEQ ID NO: 48316 - RNA, 20 nt, Synthetic Construct
  source 1..20: mol_type = other RNA
cccagtaaacggcggccgta

SEQ ID NO: 48317 - RNA, 20 nt, Synthetic Construct
  source 1..20: mol_type = other RNA
cccagtaaacggcggccgta

SEQ ID NO: 48318 - RNA, 20 nt, Synthetic Construct
  source 1..20: mol_type = other RNA
cgaggtagtaggttgtgtgg

SEQ ID NO: 48319 - RNA, 23 nt, Synthetic Construct
  source 1..23: mol_type = other RNA
tcctgtactgagctaccccgaga

SEQ ID NO: 48320 - RNA, 23 nt, Synthetic Construct
  source 1..23: mol_type = other RNA
tcctgtactgagctaccccgaga

SEQ ID NO: 48321 - RNA, 18 nt, Synthetic Construct
  source 1..18: mol_type = other RNA
cataaagtagaaagcact

SEQ ID NO: 48322 - RNA, 18 nt, Synthetic Construct
  source 1..18: mol_type = other RNA
cataaagtagaaagcact

SEQ ID NO: 48323 - RNA, 22 nt, Synthetic Construct
  source 1..22: mol_type = other RNA
tgaggtagtaggatgtgtggtt

SEQ ID NO: 48324 - RNA, 23 nt, Synthetic Construct
  source 1..23: mol_type = other RNA
cattgcacttgtctcggtctgaa

SEQ ID NO: 48325 - RNA, 23 nt, Synthetic Construct
  source 1..23: mol_type = other RNA
cattgcacttgtctcggtctgaa

SEQ ID NO: 48326 - RNA, 24 nt, Synthetic Construct
  source 1..24: mol_type = other RNA
gcagctaataccgcatacgacctg

SEQ ID NO: 48327 - RNA, 22 nt, Synthetic Construct
  source 1..22: mol_type = other RNA
tgaggtagtagactgtatagtt

SEQ ID NO: 48328 - RNA, 22 nt, Synthetic Construct
  source 1..22: mol_type = other RNA
tgaggtagtagactgtatagtt

SEQ ID NO: 48329 - RNA, 16 nt, Synthetic Construct
  source 1..16: mol_type = other RNA
agttgaccgcctgggg

SEQ ID NO: 48330 - RNA, 16 nt, Synthetic Construct
  source 1..16: mol_type = other RNA
agttgaccgcctgggg

SEQ ID NO: 48331 - RNA, 33 nt, Synthetic Construct; identical to SEQ ID NO: 2266
  source 1..33: mol_type = other RNA

SEQ ID NO: 48332 - RNA, 29 nt, Synthetic Construct
  source 1..29: mol_type = other RNA
tgaaggtgggttgtgaagcctgctggagg

SEQ ID NO: 48333 - RNA, 21 nt, Synthetic Construct
  source 1..21: mol_type = other RNA
tgaggaagtagattgtatagt

SEQ ID NO: 48334 - RNA, 21 nt, Synthetic Construct
  source 1..21: mol_type = other RNA
tgaggaagtagattgtatagt

SEQ ID NO: 48335 - RNA, 23 nt, Synthetic Construct
  source 1..23: mol_type = other RNA
tggtaatatgacgtacttagtgt

SEQ ID NO: 48336 - RNA, 19 nt, Synthetic Construct
  source 1..19: mol_type = other RNA
gggtgcaagcgttaatcgg

SEQ ID NO: 48337 - RNA, 19 nt, Synthetic Construct
  source 1..19: mol_type = other RNA
gggtgcaagcgttaatcgg

SEQ ID NO: 48338 - RNA, 22 nt, Synthetic Construct
  source 1..22: mol_type = other RNA
tggaatgtaaagaagtatgcat

SEQ ID NO: 48339 - RNA, 22 nt, Synthetic Construct
  source 1..22: mol_type = other RNA
tggaatgtaaagaagtatgcat

SEQ ID NO: 48340 - RNA, 31 nt, Synthetic Construct; identical to SEQ ID NO: 2215
  source 1..31: mol_type = other RNA

SEQ ID NO: 48341 - RNA, 31 nt, Synthetic Construct; identical to SEQ ID NO: 2215
  source 1..31: mol_type = other RNA

SEQ ID NO: 48342 - RNA, 27 nt, Synthetic Construct
  source 1..27: mol_type = other RNA
ccccccaccgctaaatttgactggctt

SEQ ID NO: 48343 - RNA, 23 nt, Synthetic Construct
  source 1..23: mol_type = other RNA
ttcaagtaatccaggataggctt

SEQ ID NO: 48344 - RNA, 23 nt, Synthetic Construct
  source 1..23: mol_type = other RNA
ttcaagtaatccaggataggctt

SEQ ID NO: 48345 - RNA, 22 nt, Synthetic Construct
  source 1..22: mol_type = other RNA
ncctgtactgagctgccccgag

SEQ ID NO: 48346 - RNA, 22 nt, Synthetic Construct
  source 1..22: mol_type = other RNA
tgttggttcaagcgtgtagtcg

SEQ ID NO: 48347 - RNA, 22 nt, Synthetic Construct
  source 1..22: mol_type = other RNA
tgttggttcaagcgtgtagtcg

SEQ ID NO: 48348 - RNA, 21 nt, Synthetic Construct
  source 1..21: mol_type = other RNA
tgaggaagtaggttgtatagt

SEQ ID NO: 48349 - RNA, 22 nt, Synthetic Construct
  source 1..22: mol_type = other RNA
tggaatgtgaagaagtatgtat

SEQ ID NO: 48350 - RNA, 22 nt, Synthetic Construct
  source 1..22: mol_type = other RNA
tggaatgtgaagaagtatgtat

SEQ ID NO: 48351 - RNA, 22 nt, Synthetic Construct
  source 1..22: mol_type = other RNA
tgaggtagtgggttgtgtggtt

SEQ ID NO: 48352 - RNA, 22 nt, Synthetic Construct
  source 1..22: mol_type = other RNA
tgaggtagtgggttgtgtggtt

SEQ ID NO: 48353 - RNA, 23 nt, Synthetic Construct
  source 1..23: mol_type = other RNA
tggtaatacgacgtacatagtgt

SEQ ID NO: 48354 - RNA, 23 nt, Synthetic Construct
  source 1..23: mol_type = other RNA
tggtaatacgacgtacatagtgt

SEQ ID NO: 48355 - RNA, 22 nt, Synthetic Construct
  source 1..22: mol_type = other RNA
nattgcacttgtcccggcctgt

SEQ ID NO: 48356 - RNA, 22 nt, Synthetic Construct
  source 1..22: mol_type = other RNA
nattgcacttgtcccggcctgt

SEQ ID NO: 48357 - RNA, 21 nt, Synthetic Construct
  source 1..21: mol_type = other RNA
tggagtgtgacaatggtgtct

SEQ ID NO: 48358 - RNA, 21 nt, Synthetic Construct
  source 1..21: mol_type = other RNA
tggagtgtgacaatggtgtct

SEQ ID NO: 48359 - RNA, 18 nt, Synthetic Construct
  source 1..18: mol_type = other RNA
ggtagcgtggccgagcgg

SEQ ID NO: 48360 - RNA, 18 nt, Synthetic Construct
  source 1..18: mol_type = other RNA
ggtagcgtggccgagcgg

SEQ ID NO: 48361 - RNA, 22 nt, Synthetic Construct
  source 1..22: mol_type = other RNA
tgtggtagtaggttgtatagtt

SEQ ID NO: 48362 - RNA, 22 nt, Synthetic Construct
  source 1..22: mol_type = other RNA
tgtggtagtaggttgtatagtt

SEQ ID NO: 48363 - RNA, 17 nt, Synthetic Construct
  source 1..17: mol_type = other RNA
gcgtagatatgcggagg

SEQ ID NO: 48364 - RNA, 16 nt, Synthetic Construct
  source 1..16: mol_type = other RNA
gtccacggccatacca

SEQ ID NO: 48365 - RNA, 21 nt, Synthetic Construct
  source 1..21: mol_type = other RNA
tggagagtgacaatggtgttt

SEQ ID NO: 48366 - RNA, 18 nt, Synthetic Construct
  source 1..18: mol_type = other RNA
ggtagcgtggccgagcgg

SEQ ID NO: 48367 - RNA, 18 nt, Synthetic Construct
  source 1..18: mol_type = other RNA
ggtagcgtggccgagcgg

SEQ ID NO: 48368 - RNA, 30 nt, Synthetic Construct; identical to SEQ ID NO: 2308
  source 1..30: mol_type = other RNA

SEQ ID NO: 48369 - RNA, 22 nt, Synthetic Construct
  source 1..22: mol_type = other RNA
tgtggtagtagtttgtgctgtt

SEQ ID NO: 48370 - RNA, 22 nt, Synthetic Construct
  source 1..22: mol_type = other RNA
tgtggtagtagtttgtgctgtt

SEQ ID NO: 48371 - RNA, 16 nt, Synthetic Construct
  source 1..16: mol_type = other RNA
gcctacggccatacca

SEQ ID NO: 48372 - RNA, 15 nt, Synthetic Construct
  source 1..15: mol_type = other RNA
gggtgaaagcggggg

SEQ ID NO: 48373 - RNA, 15 nt, Synthetic Construct
  source 1..15: mol_type = other RNA
gggtgaaagcggggg

SEQ ID NO: 48374 - RNA, 32 nt, Synthetic Construct; identical to SEQ ID NO: 4734
  source 1..32: mol_type = other RNA

SEQ ID NO: 48375 - RNA, 22 nt, Synthetic Construct
  source 1..22: mol_type = other RNA
cgactggtaactgggatgaagt

SEQ ID NO: 48376 - RNA, 22 nt, Synthetic Construct
  source 1..22: mol_type = other RNA
cgactggtaactgggatgaagt

SEQ ID NO: 48377 - RNA, 30 nt, Synthetic Construct; identical to SEQ ID NO: 2353
  source 1..30: mol_type = other RNA

SEQ ID NO: 48378 - RNA, 30 nt, Synthetic Construct; identical to SEQ ID NO: 2353
  source 1..30: mol_type = other RNA

SEQ ID NO: 48379 - RNA, 22 nt, Synthetic Construct
  source 1..22: mol_type = other RNA
tagcagcacgtgaatattggcg

SEQ ID NO: 48380 - RNA, 22 nt, Synthetic Construct
  source 1..22: mol_type = other RNA
tagcagcacgtgaatattggcg

SEQ ID NO: 48381 - RNA, 25 nt, Synthetic Construct
  source 1..25: mol_type = other RNA
caaagtgctgttcgtgcaggtagtt

SEQ ID NO: 48382 - RNA, 21 nt, Synthetic Construct
  source 1..21: mol_type = other RNA
tcacagtgaaccggtctcttt

SEQ ID NO: 48383 - RNA, 21 nt, Synthetic Construct
  source 1..21: mol_type = other RNA
tgaggggcagagagcgggact

SEQ ID NO: 48384 - RNA, 23 nt, Synthetic Construct
  source 1..23: mol_type = other RNA
tgaggggtagagagcgagacttt

SEQ ID NO: 48385 - RNA, 23 nt, Synthetic Construct
  source 1..23: mol_type = other RNA
tgaggggtagagagcgagacttt

SEQ ID NO: 48386 - RNA, 17 nt, Synthetic Construct
  source 1..17: mol_type = other RNA
gggtctgtagctcagtc

SEQ ID NO: 48387 - RNA, 23 nt, Synthetic Construct
  source 1..23: mol_type = other RNA
tggaaatacgacgtacttagtgt

SEQ ID NO: 48388 - RNA, 23 nt, Synthetic Construct
  source 1..23: mol_type = other RNA
tgaggggtagagagcgagacttt

SEQ ID NO: 48389 - RNA, 22 nt, Synthetic Construct
  source 1..22: mol_type = other RNA
tgaggtagcaggttgtatagtt

SEQ ID NO: 48390 - RNA, 22 nt, Synthetic Construct
  source 1..22: mol_type = other RNA
tgaggtagcaggttgtatagtt

SEQ ID NO: 48391 - RNA, 23 nt, Synthetic Construct
  source 1..23: mol_type = other RNA
tgaggtagtaggttgtgcggttt

SEQ ID NO: 48392 - RNA, 23 nt, Synthetic Construct
  source 1..23: mol_type = other RNA
tgaggtagtaggttgtgcggttt

SEQ ID NO: 48393 - RNA, 31 nt, Synthetic Construct; identical to SEQ ID NO: 2758
  source 1..31: mol_type = other RNA

SEQ ID NO: 48394 - RNA, 31 nt, Synthetic Construct; identical to SEQ ID NO: 2758
  source 1..31: mol_type = other RNA

SEQ ID NO: 48395 - RNA, 22 nt, Synthetic Construct
  source 1..22: mol_type = other RNA
taaggtagtaggttgtgtggtt

SEQ ID NO: 48396 - RNA, 22 nt, Synthetic Construct
  source 1..22: mol_type = other RNA
taaggtagtaggttgtgtggtt

SEQ ID NO: 48397 - RNA, 31 nt, Synthetic Construct; identical to SEQ ID NO: 2442
  source 1..31: mol_type = other RNA

SEQ ID NO: 48398 - RNA, 31 nt, Synthetic Construct; identical to SEQ ID NO: 2442
  source 1..31: mol_type = other RNA

SEQ ID NO: 48399 - RNA, 23 nt, Synthetic Construct
  source 1..23: mol_type = other RNA
tgaggagcagagagcgagacttt

SEQ ID NO: 48400 - RNA, 23 nt, Synthetic Construct
  source 1..23: mol_type = other RNA
tgaggagcagagagcgagacttt

SEQ ID NO: 48401 - RNA, 21 nt, Synthetic Construct
  source 1..21: mol_type = other RNA
tgaggtagtaggctgtgtggt

SEQ ID NO: 48402 - RNA, 21 nt, Synthetic Construct
  source 1..21: mol_type = other RNA
tgaggtagtaggctgtgtggt

SEQ ID NO: 48403 - RNA, 20 nt, Synthetic Construct
  source 1..20: mol_type = other RNA
cccataaagtagaaagcact

SEQ ID NO: 48404 - RNA, 20 nt, Synthetic Construct
  source 1..20: mol_type = other RNA
cccataaagtagaaagcact

SEQ ID NO: 48405 - RNA, 20 nt, Synthetic Construct
  source 1..20: mol_type = other RNA
ccgcagagtacagcttggga

SEQ ID NO: 48406 - RNA, 25 nt, Synthetic Construct
  source 1..25: mol_type = other RNA
ttgaggatatgagatcgggacgaca

SEQ ID NO: 48407 - RNA, 25 nt, Synthetic Construct
  source 1..25: mol_type = other RNA
ttgaggatatgagatcgggacgaca

SEQ ID NO: 48408 - RNA, 21 nt, Synthetic Construct
  source 1..21: mol_type = other RNA
tcctgtactgagctgccccgg

SEQ ID NO: 48409 - RNA, 21 nt, Synthetic Construct
  source 1..21: mol_type = other RNA
tcctgtactgagctgccccgg

SEQ ID NO: 48410 - RNA, 17 nt, Synthetic Construct
  source 1..17: mol_type = other RNA
ccgtgtgaaagtaggtc

SEQ ID NO: 48411 - RNA, 23 nt, Synthetic Construct
  source 1..23: mol_type = other RNA
caaagtgctgttcatgcaggtag

SEQ ID NO: 48412 - RNA, 23 nt, Synthetic Construct
  source 1..23: mol_type = other RNA
caaagtgctgttcatgcaggtag

SEQ ID NO: 48413 - RNA, 39 nt, Synthetic Construct; identical to SEQ ID NO: 2398
  source 1..39: mol_type = other RNA

SEQ ID NO: 48414 - RNA, 39 nt, Synthetic Construct; identical to SEQ ID NO: 2398
  source 1..39: mol_type = other RNA

SEQ ID NO: 48415 - RNA, 23 nt, Synthetic Construct
  source 1..23: mol_type = other RNA
tcctatactgagctgccccgaga

SEQ ID NO: 48416 - RNA, 23 nt, Synthetic Construct
  source 1..23: mol_type = other RNA
tcctatactgagctgccccgaga

SEQ ID NO: 48417 - RNA, 21 nt, Synthetic Construct
  source 1..21: mol_type = other RNA
ttcaagtaattcaggataggt

SEQ ID NO: 48418 - RNA, 23 nt, Synthetic Construct
  source 1..23: mol_type = other RNA
tgaggggcagagagtgagacttt

SEQ ID NO: 48419 - RNA, 23 nt, Synthetic Construct
  source 1..23: mol_type = other RNA
tgaggggcagagagtgagacttt

SEQ ID NO: 48420 - RNA, 20 nt, Synthetic Construct
  source 1..20: mol_type = other RNA
acccttgtcattagttgcta

SEQ ID NO: 48421 - RNA, 20 nt, Synthetic Construct
  source 1..20: mol_type = other RNA
acccttgtcattagttgcta

SEQ ID NO: 48422 - RNA, 23 nt, Synthetic Construct
  source 1..23: mol_type = other RNA
tggaatgtaaagaagtatgtacc

SEQ ID NO: 48423 - RNA, 23 nt, Synthetic Construct
  source 1..23: mol_type = other RNA
tggaatgtaaagaagtatgtacc

SEQ ID NO: 48424 - RNA, 20 nt, Synthetic Construct
  source 1..20: mol_type = other RNA
tgaggtagtaggctgtgtgg

SEQ ID NO: 48425 - RNA, 20 nt, Synthetic Construct
  source 1..20: mol_type = other RNA
tgaggtagtaggctgtgtgg

SEQ ID NO: 48426 - RNA, 24 nt, Synthetic Construct
  source 1..24: mol_type = other RNA
gtctttgttcgattccgttgagta

SEQ ID NO: 48427 - RNA, 19 nt, Synthetic Construct
  source 1..19: mol_type = other RNA
cgactcttagcggtggatc

SEQ ID NO: 48428 - RNA, 19 nt, Synthetic Construct
  source 1..19: mol_type = other RNA
cgactcttagcggtggatc

SEQ ID NO: 48429 - RNA, 22 nt, Synthetic Construct
  source 1..22: mol_type = other RNA
tgaggtggtaggttgtatagtt

SEQ ID NO: 48430 - RNA, 22 nt, Synthetic Construct
  source 1..22: mol_type = other RNA
tgaggtggtaggttgtatagtt

SEQ ID NO: 48431 - RNA, 22 nt, Synthetic Construct
  source 1..22: mol_type = other RNA
ngaggtagtagtttgtgctgtt

SEQ ID NO: 48432 - RNA, 22 nt, Synthetic Construct
  source 1..22: mol_type = other RNA
ngaggtagtagtttgtgctgtt

SEQ ID NO: 48433 - RNA, 31 nt, Synthetic Construct; identical to SEQ ID NO: 774
  source 1..31: mol_type = other RNA

SEQ ID NO: 48434 - RNA, 31 nt, Synthetic Construct; identical to SEQ ID NO: 774
  source 1..31: mol_type = other RNA

SEQ ID NO: 48435 - RNA, 22 nt, Synthetic Construct
  source 1..22: mol_type = other RNA
nagcagcacgtaaatattggcg

SEQ ID NO: 48436 - RNA, 35 nt, Synthetic Construct; identical to SEQ ID NO: 2399
  source 1..35: mol_type = other RNA

SEQ ID NO: 48437 - RNA, 20 nt, Synthetic Construct
  source 1..20: mol_type = other RNA
cacatgcaagtcgaacggta

SEQ ID NO: 48438 - RNA, 20 nt, Synthetic Construct
  source 1..20: mol_type = other RNA
cacatgcaagtcgaacggta

SEQ ID NO: 48439 - RNA, 27 nt, Synthetic Construct
  source 1..27: mol_type = other RNA
ccccccactgctaaatttgacaggctt

SEQ ID NO: 48440 - RNA, 28 nt, Synthetic Construct
  source 1..28: mol_type = other RNA
ccgtgtgaaagtaggtcatcgtcaggct

SEQ ID NO: 48441 - RNA, 20 nt, Synthetic Construct
  source 1..20: mol_type = other RNA
cataaagtagaaagcactac

SEQ ID NO: 48442 - RNA, 20 nt, Synthetic Construct
  source 1..20: mol_type = other RNA
cataaagtagaaagcactac

SEQ ID NO: 48443 - RNA, 23 nt, Synthetic Construct
  source 1..23: mol_type = other RNA
ccctgtactgagctgccccgaga

SEQ ID NO: 48444 - RNA, 23 nt, Synthetic Construct
  source 1..23: mol_type = other RNA
ccctgtactgagctgccccgaga

SEQ ID NO: 48445 - RNA, 23 nt, Synthetic Construct
  source 1..23: mol_type = other RNA
tggtaatacgacgtactaagtgt

SEQ ID NO: 48446 - RNA, 16 nt, Synthetic Construct
  source 1..16: mol_type = other RNA
gtctacgaccatacca

SEQ ID NO: 48447 - RNA, 16 nt, Synthetic Construct
  source 1..16: mol_type = other RNA
gtctacgaccatacca

SEQ ID NO: 48448 - RNA, 21 nt, Synthetic Construct
  source 1..21: mol_type = other RNA
tcctgtaccgagctgccccga

SEQ ID NO: 48449 - RNA, 21 nt, Synthetic Construct
  source 1..21: mol_type = other RNA
tcctgtaccgagctgccccga

SEQ ID NO: 48450 - RNA, 23 nt, Synthetic Construct
  source 1..23: mol_type = other RNA
cctcgcgcgattggagcggccga

SEQ ID NO: 48451 - RNA, 18 nt, Synthetic Construct
  source 1..18: mol_type = other RNA
gtcgacgtatagggtgtg

SEQ ID NO: 48452 - RNA, 18 nt, Synthetic Construct
  source 1..18: mol_type = other RNA
gtcgacgtatagggtgtg

SEQ ID NO: 48453 - RNA, 16 nt, Synthetic Construct
  source 1..16: mol_type = other RNA
cgctagtaatcgcgga

SEQ ID NO: 48454 - RNA, 16 nt, Synthetic Construct
  source 1..16: mol_type = other RNA
cgctagtaatcgcgga

SEQ ID NO: 48455 - RNA, 16 nt, Synthetic Construct
  source 1..16: mol_type = other RNA
cccagaaacccggtcg

SEQ ID NO: 48456 - RNA, 22 nt, Synthetic Construct
  source 1..22: mol_type = other RNA
ncgtaccgtgagtaataatgcg

SEQ ID NO: 48457 - RNA, 22 nt, Synthetic Construct
  source 1..22: mol_type = other RNA
ncgtaccgtgagtaataatgcg

SEQ ID NO: 48458 - RNA, 23 nt, Synthetic Construct
  source 1..23: mol_type = other RNA
tgaggggcagagagcgggacttt

SEQ ID NO: 48459 - RNA, 23 nt, Synthetic Construct
  source 1..23: mol_type = other RNA
tgaggggcagagagcgggacttt

SEQ ID NO: 48460 - RNA, 23 nt, Synthetic Construct
  source 1..23: mol_type = other RNA
tcactgatcgagtcgtcctgcgc

SEQ ID NO: 48461 - RNA, 21 nt, Synthetic Construct
  source 1..21: mol_type = other RNA
tgaagtagtaggttgtgtggt

SEQ ID NO: 48462 - RNA, 21 nt, Synthetic Construct
  source 1..21: mol_type = other RNA
tgaagtagtaggttgtgtggt

SEQ ID NO: 48463 - RNA, 33 nt, Synthetic Construct; identical to SEQ ID NO: 2209
  source 1..33: mol_type = other RNA

SEQ ID NO: 48464 - RNA, 34 nt, Synthetic Construct; identical to SEQ ID NO: 2529
  source 1..34: mol_type = other RNA

SEQ ID NO: 48465 - RNA, 34 nt, Synthetic Construct; identical to SEQ ID NO: 2529
  source 1..34: mol_type = other RNA

SEQ ID NO: 48466 - RNA, 22 nt, Synthetic Construct
  source 1..22: mol_type = other RNA
tcctgtgctgagctgccccgag

SEQ ID NO: 48467 - RNA, 22 nt, Synthetic Construct
  source 1..22: mol_type = other RNA
tcctgtgctgagctgccccgag

SEQ ID NO: 48468 - RNA, 22 nt, Synthetic Construct
  source 1..22: mol_type = other RNA
tgaagtagtaggttgtgtggtt

SEQ ID NO: 48469 - RNA, 22 nt, Synthetic Construct
  source 1..22: mol_type = other RNA
tgaagtagtaggttgtgtggtt

SEQ ID NO: 48470 - RNA, 21 nt, Synthetic Construct
  source 1..21: mol_type = other RNA
tgaggtagtagtctgtgctgt

SEQ ID NO: 48471 - RNA, 22 nt, Synthetic Construct
  source 1..22: mol_type = other RNA
acagtagtctgcacattggttt

SEQ ID NO: 48472 - RNA, 22 nt, Synthetic Construct
  source 1..22: mol_type = other RNA
acagtagtctgcacattggttt

SEQ ID NO: 48473 - RNA, 23 nt, Synthetic Construct
  source 1..23: mol_type = other RNA
aggggtgctatctgtgattgagg

SEQ ID NO: 48474 - RNA, 18 nt, Synthetic Construct
  source 1..18: mol_type = other RNA
ggtgcaagcgttaatcgg

SEQ ID NO: 48475 - RNA, 18 nt, Synthetic Construct
  source 1..18: mol_type = other RNA
ggtgcaagcgttaatcgg

SEQ ID NO: 48476 - RNA, 16 nt, Synthetic Construct
  source 1..16: mol_type = other RNA
gtctatggccatacca

SEQ ID NO: 48477 - RNA, 16 nt, Synthetic Construct
  source 1..16: mol_type = other RNA
gtctatggccatacca

SEQ ID NO: 48478 - RNA, 20 nt, Synthetic Construct
  source 1..20: mol_type = other RNA
ccgcagagtacagcttggga

SEQ ID NO: 48479 - RNA, 20 nt, Synthetic Construct
  source 1..20: mol_type = other RNA
ccgcagagtacagcttggga

SEQ ID NO: 48480 - RNA, 15 nt, Synthetic Construct
  source 1..15: mol_type = other RNA
ccgcttttgtcaggg

SEQ ID NO: 48481 - RNA, 22 nt, Synthetic Construct
  source 1..22: mol_type = other RNA
tagcagcacgtaaatgttggcg

SEQ ID NO: 48482 - RNA, 22 nt, Synthetic Construct
  source 1..22: mol_type = other RNA
tagcagcacgtaaatgttggcg

SEQ ID NO: 48483 - RNA, 23 nt, Synthetic Construct
  source 1..23: mol_type = other RNA
tcctgtactgagctaccccgaga

SEQ ID NO: 48484 - RNA, 23 nt, Synthetic Construct
  source 1..23: mol_type = other RNA
tcctgtactgagctaccccgaga

SEQ ID NO: 48485 - RNA, 22 nt, Synthetic Construct
  source 1..22: mol_type = other RNA
tgaggcagtagtttgtgctgtt

SEQ ID NO: 48486 - RNA, 22 nt, Synthetic Construct
  source 1..22: mol_type = other RNA
tgaggcagtagtttgtgctgtt

SEQ ID NO: 48487 - RNA, 23 nt, Synthetic Construct
  source 1..23: mol_type = other RNA
tcctgtactgagctgccctgagt

SEQ ID NO: 48488 - RNA, 23 nt, Synthetic Construct
  source 1..23: mol_type = other RNA
tcctgtactgagctgccctgagt

SEQ ID NO: 48489 - RNA, 22 nt, Synthetic Construct
  source 1..22: mol_type = other RNA
tggctcagttcagcaggaacag

SEQ ID NO: 48490 - RNA, 21 nt, Synthetic Construct
  source 1..21: mol_type = other RNA
tggggggcagagagcgagact

SEQ ID NO: 48491 - RNA, 20 nt, Synthetic Construct
  source 1..20: mol_type = other RNA
tgaggtagtaggttgtgcgg

SEQ ID NO: 48492 - RNA, 20 nt, Synthetic Construct
  source 1..20: mol_type = other RNA
tgaggtagtaggttgtgcgg

SEQ ID NO: 48493 - RNA, 18 nt, Synthetic Construct
  source 1..18: mol_type = other RNA
catgcaagtcgaacggta

SEQ ID NO: 48494 - RNA, 23 nt, Synthetic Construct
  source 1..23: mol_type = other RNA
caacggaatcccgaaagcagctg

SEQ ID NO: 48495 - RNA, 28 nt, Synthetic Construct
  source 1..28: mol_type = other RNA
gctttacattggactttgaacagatctg

SEQ ID NO: 48496 - RNA, 22 nt, Synthetic Construct
  source 1..22: mol_type = other RNA
cgactcttagcggtggatcact

SEQ ID NO: 48497 - RNA, 22 nt, Synthetic Construct
  source 1..22: mol_type = other RNA
cgactcttagcggtggatcact

SEQ ID NO: 48498 - RNA, 22 nt, Synthetic Construct
  source 1..22: mol_type = other RNA
tattgcacctgtcccggcctgt

SEQ ID NO: 48499 - RNA, 22 nt, Synthetic Construct
  source 1..22: mol_type = other RNA
tattgcacctgtcccggcctgt

SEQ ID NO: 48500 - RNA, 27 nt, Synthetic Construct
  source 1..27: mol_type = other RNA
ccccccactgcaaaatttgactggctt

SEQ ID NO: 48501 - RNA, 31 nt, Synthetic Construct; identical to SEQ ID NO: 15910
  source 1..31: mol_type = other RNA

SEQ ID NO: 48502 - RNA, 31 nt, Synthetic Construct; identical to SEQ ID NO: 15910
  source 1..31: mol_type = other RNA

SEQ ID NO: 48503 - RNA, 17 nt, Synthetic Construct
  source 1..17: mol_type = other RNA
gtcgacgtatagggtgt

SEQ ID NO: 48504 - RNA, 20 nt, Synthetic Construct
  source 1..20: mol_type = other RNA
tgaggtagtaggttgtacag

SEQ ID NO: 48505 - RNA, 20 nt, Synthetic Construct
  source 1..20: mol_type = other RNA
tgaggtagtaggttgtacag

SEQ ID NO: 48506 - RNA, 21 nt, Synthetic Construct
  source 1..21: mol_type = other RNA
tcctgtactgagctaccccga

SEQ ID NO: 48507 - RNA, 21 nt, Synthetic Construct
  source 1..21: mol_type = other RNA
tcctgtactgagctaccccga

SEQ ID NO: 48508 - RNA, 31 nt, Synthetic Construct; identical to SEQ ID NO: 2893
  source 1..31: mol_type = other RNA

SEQ ID NO: 48509 - RNA, 31 nt, Synthetic Construct; identical to SEQ ID NO: 2893
  source 1..31: mol_type = other RNA

SEQ ID NO: 48510 - RNA, 22 nt, Synthetic Construct
  source 1..22: mol_type = other RNA
tcctgcactgagctgccccgag

SEQ ID NO: 48511 - RNA, 22 nt, Synthetic Construct
  source 1..22: mol_type = other RNA
tcctgcactgagctgccccgag

SEQ ID NO: 48512 - RNA, 21 nt, Synthetic Construct
  source 1..21: mol_type = other RNA
gctttgatccggagatttccg

SEQ ID NO: 48513 - RNA, 17 nt, Synthetic Construct
  source 1..17: mol_type = other RNA
gtcgacgtatagggtgt

SEQ ID NO: 48514 - RNA, 17 nt, Synthetic Construct
  source 1..17: mol_type = other RNA
gtcgacgtatagggtgt

SEQ ID NO: 48515 - RNA, 20 nt, Synthetic Construct
  source 1..20: mol_type = other RNA
tgaggcagtaggttgtgtgg

SEQ ID NO: 48516 - RNA, 20 nt, Synthetic Construct
  source 1..20: mol_type = other RNA
tgaggcagtaggttgtgtgg

SEQ ID NO: 48517 - RNA, 23 nt, Synthetic Construct
  source 1..23: mol_type = other RNA
gggtaatacgacgtacttagtgt

SEQ ID NO: 48518 - RNA, 23 nt, Synthetic Construct
  source 1..23: mol_type = other RNA
gggtaatacgacgtacttagtgt

SEQ ID NO: 48519 - RNA, 34 nt, Synthetic Construct; identical to SEQ ID NO: 749
  source 1..34: mol_type = other RNA

SEQ ID NO: 48520 - RNA, 34 nt, Synthetic Construct; identical to SEQ ID NO: 749
  source 1..34: mol_type = other RNA

SEQ ID NO: 48521 - RNA, 16 nt, Synthetic Construct
  source 1..16: mol_type = other RNA
gtctacggccatacta

SEQ ID NO: 48522 - RNA, 16 nt, Synthetic Construct
  source 1..16: mol_type = other RNA
gtctacggccatacta

SEQ ID NO: 48523 - RNA, 22 nt, Synthetic Construct
  source 1..22: mol_type = other RNA
tgaggtagcaggttgtgtggtt

SEQ ID NO: 48524 - RNA, 22 nt, Synthetic Construct
  source 1..22: mol_type = other RNA
tgaggtagcaggttgtgtggtt

SEQ ID NO: 48525 - RNA, 33 nt, Synthetic Construct; identical to SEQ ID NO: 4947
  source 1..33: mol_type = other RNA

SEQ ID NO: 48526 - RNA, 32 nt, Synthetic Construct; identical to SEQ ID NO: 2296
  source 1..32: mol_type = other RNA

SEQ ID NO: 48527 - RNA, 24 nt, Synthetic Construct
  source 1..24: mol_type = other RNA
gaaagattaaggcaagaggttagc

SEQ ID NO: 48528 - RNA, 24 nt, Synthetic Construct
  source 1..24: mol_type = other RNA
gaaagattaaggcaagaggttagc

SEQ ID NO: 48529 - RNA, 21 nt, Synthetic Construct
  source 1..21: mol_type = other RNA
cgaggtagtagtttgtgctgt

SEQ ID NO: 48530 - RNA, 22 nt, Synthetic Construct
  source 1..22: mol_type = other RNA
gctcttgactgaagtcccagta

SEQ ID NO: 48531 - RNA, 36 nt, Synthetic Construct; identical to SEQ ID NO: 10982
  source 1..36: mol_type = other RNA

SEQ ID NO: 48532 - RNA, 36 nt, Synthetic Construct; identical to SEQ ID NO: 10982
  source 1..36: mol_type = other RNA

SEQ ID NO: 48533 - RNA, 15 nt, Synthetic Construct
  source 1..15: mol_type = other RNA
acggtcctaaggtag

SEQ ID NO: 48534 - RNA, 21 nt, Synthetic Construct
  source 1..21: mol_type = other RNA
ttcacagtggctaagttctgc

SEQ ID NO: 48535 - RNA, 20 nt, Synthetic Construct
  source 1..20: mol_type = other RNA
tgtcagtttgtcaaataccc

SEQ ID NO: 48536 - RNA, 17 nt, Synthetic Construct
  source 1..17: mol_type = other RNA
gcgtagatatgcggagg

SEQ ID NO: 48537 - RNA, 17 nt, Synthetic Construct
  source 1..17: mol_type = other RNA
gcgtagatatgcggagg

SEQ ID NO: 48538 - RNA, 25 nt, Synthetic Construct
  source 1..25: mol_type = other RNA
ttgaggatatgagatcgagacggca

SEQ ID NO: 48539 - RNA, 25 nt, Synthetic Construct
  source 1..25: mol_type = other RNA
ttgaggatatgagatcgagacggca

SEQ ID NO: 48540 - RNA, 23 nt, Synthetic Construct
  source 1..23: mol_type = other RNA
cgaggtagtaggttgtgtggttt

SEQ ID NO: 48541 - RNA, 23 nt, Synthetic Construct
  source 1..23: mol_type = other RNA
cgaggtagtaggttgtgtggttt

SEQ ID NO: 48542 - RNA, 20 nt, Synthetic Construct
  source 1..20: mol_type = other RNA
tgaggtagcaggttgtgtgg

SEQ ID NO: 48543 - RNA, 20 nt, Synthetic Construct
  source 1..20: mol_type = other RNA
tgaggtagcaggttgtgtgg

SEQ ID NO: 48544 - RNA, 17 nt, Synthetic Construct
  source 1..17: mol_type = other RNA
agtccggatcgtagtct

SEQ ID NO: 48545 - RNA, 23 nt, Synthetic Construct
  source 1..23: mol_type = other RNA
tggtaatacgacgtacttagtat

SEQ ID NO: 48546 - RNA, 15 nt, Synthetic Construct
  source 1..15: mol_type = other RNA
ccagaaacccggtcg

SEQ ID NO: 48547 - RNA, 22 nt, Synthetic Construct
  source 1..22: mol_type = other RNA
tactagactgaagctccttgag

SEQ ID NO: 48548 - RNA, 22 nt, Synthetic Construct
  source 1..22: mol_type = other RNA
tactagactgaagctccttgag

SEQ ID NO: 48549 - RNA, 21 nt, Synthetic Construct
  source 1..21: mol_type = other RNA
tcctgtactgagctgccccaa

SEQ ID NO: 48550 - RNA, 21 nt, Synthetic Construct
  source 1..21: mol_type = other RNA
tcctgtactgagctgccccaa

SEQ ID NO: 48551 - RNA, 19 nt, Synthetic Construct
  source 1..19: mol_type = other RNA
tcagtagctcgaggaaaag

SEQ ID NO: 48552 - RNA, 22 nt, Synthetic Construct
  source 1..22: mol_type = other RNA
nagcagcacgtaaatattggcg

SEQ ID NO: 48553 - RNA, 22 nt, Synthetic Construct
  source 1..22: mol_type = other RNA
nagcagcacgtaaatattggcg

SEQ ID NO: 48554 - RNA, 21 nt, Synthetic Construct
  source 1..21: mol_type = other RNA
tcctgtactgagccgccccga

SEQ ID NO: 48555 - RNA, 28 nt, Synthetic Construct
  source 1..28: mol_type = other RNA
ccccccaccgctaaatttgactggcttt

SEQ ID NO: 48556 - RNA, 21 nt, Synthetic Construct
  source 1..21: mol_type = other RNA
agccatcatttaaagaaagcg

SEQ ID NO: 48557 - RNA, 23 nt, Synthetic Construct
  source 1..23: mol_type = other RNA
tccagtactgagctgccccgagt

SEQ ID NO: 48558 - RNA, 23 nt, Synthetic Construct
  source 1..23: mol_type = other RNA
tccagtactgagctgccccgagt

SEQ ID NO: 48559 - RNA, 22 nt, Synthetic Construct
  source 1..22: mol_type = other RNA
cactgcacttgtctcggtctga

SEQ ID NO: 48560 - RNA, 20 nt, Synthetic Construct
  source 1..20: mol_type = other RNA
tgaggtggtaggttgtatag

SEQ ID NO: 48561 - RNA, 20 nt, Synthetic Construct
  source 1..20: mol_type = other RNA
tgaggtggtaggttgtatag

SEQ ID NO: 48562 - RNA, 22 nt, Synthetic Construct
  source 1..22: mol_type = other RNA
tcgtaccgtgagtaatgatgcg

SEQ ID NO: 48563 - RNA, 22 nt, Synthetic Construct
  source 1..22: mol_type = other RNA
tattgcgcttgtcccggcctgt

SEQ ID NO: 48564 - RNA, 22 nt, Synthetic Construct
  source 1..22: mol_type = other RNA
tattgcgcttgtcccggcctgt

SEQ ID NO: 48565 - RNA, 39 nt, Synthetic Construct; identical to SEQ ID NO: 4400
  source 1..39: mol_type = other RNA

SEQ ID NO: 48566 - RNA, 21 nt, Synthetic Construct
  source 1..21: mol_type = other RNA
tggctcagttcagcaggaaca

SEQ ID NO: 48567 - RNA, 29 nt, Synthetic Construct
  source 1..29: mol_type = other RNA
ccccccccactgctaaatttgactggctt

SEQ ID NO: 48568 - RNA, 29 nt, Synthetic Construct
  source 1..29: mol_type = other RNA
ccccccccactgctaaatttgactggctt

SEQ ID NO: 48569 - RNA, 16 nt, Synthetic Construct
  source 1..16: mol_type = other RNA
gtccggatcgtagtct

SEQ ID NO: 48570 - RNA, 16 nt, Synthetic Construct
  source 1..16: mol_type = other RNA
gtccggatcgtagtct

SEQ ID NO: 48571 - RNA, 21 nt, Synthetic Construct
  source 1..21: mol_type = other RNA
tgaggggcagagggcgagact

SEQ ID NO: 48572 - RNA, 21 nt, Synthetic Construct
  source 1..21: mol_type = other RNA
tgaggggcagagggcgagact

SEQ ID NO: 48573 - RNA, 27 nt, Synthetic Construct
  source 1..27: mol_type = other RNA
ccccccactgctgaatttgactggctt

SEQ ID NO: 48574 - RNA, 27 nt, Synthetic Construct
  source 1..27: mol_type = other RNA
ccccccactgctgaatttgactggctt

SEQ ID NO: 48575 - RNA, 21 nt, Synthetic Construct
  source 1..21: mol_type = other RNA
tcctgtactgggctgccccga

SEQ ID NO: 48576 - RNA, 22 nt, Synthetic Construct
  source 1..22: mol_type = other RNA
tgaggtagtagattgtacagtt

SEQ ID NO: 48577 - RNA, 22 nt, Synthetic Construct
  source 1..22: mol_type = other RNA
tgaggtagtagattgtacagtt

SEQ ID NO: 48578 - RNA, 27 nt, Synthetic Construct
  source 1..27: mol_type = other RNA
gcgggcgtagctcaggggtagagcgca

SEQ ID NO: 48579 - RNA, 27 nt, Synthetic Construct
  source 1..27: mol_type = other RNA
gcgggcgtagctcaggggtagagcgca

SEQ ID NO: 48580 - RNA, 43 nt, Synthetic Construct; identical to SEQ ID NO: 727
  source 1..43: mol_type = other RNA

SEQ ID NO: 48581 - RNA, 43 nt, Synthetic Construct; identical to SEQ ID NO: 727
  source 1..43: mol_type = other RNA

SEQ ID NO: 48582 - RNA, 18 nt, Synthetic Construct
  source 1..18: mol_type = other RNA
cataaagtagaaagcact

SEQ ID NO: 48583 - RNA, 18 nt, Synthetic Construct
  source 1..18: mol_type = other RNA
cataaagtagaaagcact

SEQ ID NO: 48584 - RNA, 21 nt, Synthetic Construct
  source 1..21: mol_type = other RNA
ccctgtactgagctgccccga

SEQ ID NO: 48585 - RNA, 21 nt, Synthetic Construct
  source 1..21: mol_type = other RNA
ccctgtactgagctgccccga

SEQ ID NO: 48586 - RNA, 20 nt, Synthetic Construct
  source 1..20: mol_type = other RNA
ttcaagtaatccaggatagg

SEQ ID NO: 48587 - RNA, 16 nt, Synthetic Construct
  source 1..16: mol_type = other RNA
gcggtggatgatgtgg

SEQ ID NO: 48588 - RNA, 22 nt, Synthetic Construct
  source 1..22: mol_type = other RNA
tcccgtactgagctgccccgag

SEQ ID NO: 48589 - RNA, 22 nt, Synthetic Construct
  source 1..22: mol_type = other RNA
tcccgtactgagctgccccgag

SEQ ID NO: 48590 - RNA, 26 nt, Synthetic Construct
  source 1..26: mol_type = other RNA
atgcgagagtaggacgttgccaggtt

SEQ ID NO: 48591 - RNA, 26 nt, Synthetic Construct
  source 1..26: mol_type = other RNA
atgcgagagtaggacgttgccaggtt

SEQ ID NO: 48592 - RNA, 23 nt, Synthetic Construct
  source 1..23: mol_type = other RNA
tggtaatacgacgtacttaatgt

SEQ ID NO: 48593 - RNA, 23 nt, Synthetic Construct
  source 1..23: mol_type = other RNA
tgaggggcagagagcgagacttt

SEQ ID NO: 48594 - RNA, 22 nt, Synthetic Construct
  source 1..22: mol_type = other RNA
tggctcagttcagcaggaacag

SEQ ID NO: 48595 - RNA, 22 nt, Synthetic Construct
  source 1..22: mol_type = other RNA
tggctcagttcagcaggaacag

SEQ ID NO: 48596 - RNA, 23 nt, Synthetic Construct
  source 1..23: mol_type = other RNA
tgaggggcagagagagagacttt

SEQ ID NO: 48597 - RNA, 23 nt, Synthetic Construct
  source 1..23: mol_type = other RNA
tgaggggcagagagagagacttt

SEQ ID NO: 48598 - RNA, 21 nt, Synthetic Construct
  source 1..21: mol_type = other RNA
taaggtagtaggttgtgtggt

SEQ ID NO: 48599 - RNA, 15 nt, Synthetic Construct
  source 1..15: mol_type = other RNA
cagtgaaacgagtca

SEQ ID NO: 48600 - RNA, 22 nt, Synthetic Construct
  source 1..22: mol_type = other RNA
ggcagcattgtacagggctatg

SEQ ID NO: 48601 - RNA, 22 nt, Synthetic Construct
  source 1..22: mol_type = other RNA
ggcagcattgtacagggctatg

SEQ ID NO: 48602 - RNA, 16 nt, Synthetic Construct
  source 1..16: mol_type = other RNA
aggtcatcgtcaggct

SEQ ID NO: 48603 - RNA, 16 nt, Synthetic Construct
  source 1..16: mol_type = other RNA
aggtcatcgtcaggct

SEQ ID NO: 48604 - RNA, 23 nt, Synthetic Construct
  source 1..23: mol_type = other RNA
tggtaataagacgtacttagtgt

SEQ ID NO: 48605 - RNA, 23 nt, Synthetic Construct
  source 1..23: mol_type = other RNA
tggtaataagacgtacttagtgt

SEQ ID NO: 48606 - RNA, 19 nt, Synthetic Construct
  source 1..19: mol_type = other RNA
gcgaaattccttgtcgggt

SEQ ID NO: 48607 - RNA, 19 nt, Synthetic Construct
  source 1..19: mol_type = other RNA
gcgaaattccttgtcgggt

SEQ ID NO: 48608 - RNA, 23 nt, Synthetic Construct
  source 1..23: mol_type = other RNA
ggctcggtctgaggcccctcagt

SEQ ID NO: 48609 - RNA, 16 nt, Synthetic Construct
  source 1..16: mol_type = other RNA
atgcaagtcgaacggt

SEQ ID NO: 48610 - RNA, 20 nt, Synthetic Construct
  source 1..20: mol_type = other RNA
tagcgaaattccttgtcggg

SEQ ID NO: 48611 - RNA, 22 nt, Synthetic Construct
  source 1..22: mol_type = other RNA
tgaggtagtaggttgtggggtt

SEQ ID NO: 48612 - RNA, 22 nt, Synthetic Construct
  source 1..22: mol_type = other RNA
tgaggaagtagtttgtgctgtt

SEQ ID NO: 48613 - RNA, 32 nt, Synthetic Construct; identical to SEQ ID NO: 4734
  source 1..32: mol_type = other RNA

SEQ ID NO: 48614 - RNA, 23 nt, Synthetic Construct
  source 1..23: mol_type = other RNA
tcctgaactgagctgccccgaga

SEQ ID NO: 48615 - RNA, 23 nt, Synthetic Construct
  source 1..23: mol_type = other RNA
tcctgaactgagctgccccgaga

SEQ ID NO: 48616 - RNA, 22 nt, Synthetic Construct
  source 1..22: mol_type = other RNA
ggtagcgaaattccttgtcggg

SEQ ID NO: 48617 - RNA, 22 nt, Synthetic Construct
  source 1..22: mol_type = other RNA
ggtagcgaaattccttgtcggg

SEQ ID NO: 48618 - RNA, 22 nt, Synthetic Construct
  source 1..22: mol_type = other RNA
tgaggtagaagattgtatagtt

SEQ ID NO: 48619 - RNA, 22 nt, Synthetic Construct
  source 1..22: mol_type = other RNA
tgaggtagaagattgtatagtt

SEQ ID NO: 48620 - RNA, 23 nt, Synthetic Construct
  source 1..23: mol_type = other RNA
tgaggggcagagagcaagacttt

SEQ ID NO: 48621 - RNA, 23 nt, Synthetic Construct
  source 1..23: mol_type = other RNA
tgaggggcagagagcgagactta

SEQ ID NO: 48622 - RNA, 21 nt, Synthetic Construct
  source 1..21: mol_type = other RNA
tgaggggcagagggcgagact

SEQ ID NO: 48623 - RNA, 22 nt, Synthetic Construct
  source 1..22: mol_type = other RNA
cactgcacttgtctcggtctga

SEQ ID NO: 48624 - RNA, 23 nt, Synthetic Construct
  source 1..23: mol_type = other RNA
tggtaatacgacgtacttaatgt

SEQ ID NO: 48625 - RNA, 23 nt, Synthetic Construct
  source 1..23: mol_type = other RNA
tggtaatacgacgtacttaatgt

SEQ ID NO: 48626 - RNA, 21 nt, Synthetic Construct
  source 1..21: mol_type = other RNA
ggaggagttcgaaggtacgct

SEQ ID NO: 48627 - RNA, 21 nt, Synthetic Construct
  source 1..21: mol_type = other RNA
ggaggagttcgaaggtacgct

SEQ ID NO: 48628 - RNA, 20 nt, Synthetic Construct
  source 1..20: mol_type = other RNA
acccttgtcattagttgcta

SEQ ID NO: 48629 - RNA, 34 nt, Synthetic Construct; identical to SEQ ID NO: 749
  source 1..34: mol_type = other RNA

SEQ ID NO: 48630 - RNA, 34 nt, Synthetic Construct; identical to SEQ ID NO: 749
  source 1..34: mol_type = other RNA

SEQ ID NO: 48631 - RNA, 21 nt, Synthetic Construct
  source 1..21: mol_type = other RNA
tgaagtagtaggttgtatagt

SEQ ID NO: 48632 - RNA, 21 nt, Synthetic Construct
  source 1..21: mol_type = other RNA
tgaagtagtaggttgtatagt

SEQ ID NO: 48633 - RNA, 22 nt, Synthetic Construct
  source 1..22: mol_type = other RNA
tcgtgccgtgagtaataatgcg

SEQ ID NO: 48634 - RNA, 22 nt, Synthetic Construct
  source 1..22: mol_type = other RNA
tcgtgccgtgagtaataatgcg

SEQ ID NO: 48635 - RNA, 23 nt, Synthetic Construct
  source 1..23: mol_type = other RNA
tgaggggcagagagcgagacctt

SEQ ID NO: 48636 - RNA, 23 nt, Synthetic Construct
  source 1..23: mol_type = other RNA
tgaggtagtgggttgtgtggttt

SEQ ID NO: 48637 - RNA, 22 nt, Synthetic Construct
  source 1..22: mol_type = other RNA
tctttggttatctagctgtatg

SEQ ID NO: 48638 - RNA, 22 nt, Synthetic Construct
  source 1..22: mol_type = other RNA
tctttggttatctagctgtatg

SEQ ID NO: 48639 - RNA, 36 nt, Synthetic Construct; identical to SEQ ID NO: 2520
  source 1..36: mol_type = other RNA

SEQ ID NO: 48640 - RNA, 20 nt, Synthetic Construct
  source 1..20: mol_type = other RNA
tgaggtagtaggttgtatgg

SEQ ID NO: 48641 - RNA, 25 nt, Synthetic Construct
  source 1..25: mol_type = other RNA
ttgagggtatgagatcgagacgaca

SEQ ID NO: 48642 - RNA, 25 nt, Synthetic Construct
  source 1..25: mol_type = other RNA
ttgagggtatgagatcgagacgaca

SEQ ID NO: 48643 - RNA, 22 nt, Synthetic Construct
  source 1..22: mol_type = other RNA
tggggtagtagattgtatagtt

SEQ ID NO: 48644 - RNA, 22 nt, Synthetic Construct
  source 1..22: mol_type = other RNA
tggggtagtagattgtatagtt

SEQ ID NO: 48645 - RNA, 17 nt, Synthetic Construct
  source 1..17: mol_type = other RNA
ggcccttatgggtaggg

SEQ ID NO: 48646 - RNA, 23 nt, Synthetic Construct
  source 1..23: mol_type = other RNA
tgaggaagtaggttgtgtggttt

SEQ ID NO: 48647 - RNA, 22 nt, Synthetic Construct
  source 1..22: mol_type = other RNA
tggaatgtaaggaagtatgtat

SEQ ID NO: 48648 - RNA, 22 nt, Synthetic Construct
  source 1..22: mol_type = other RNA
tggaatgtaaggaagtatgtat

SEQ ID NO: 48649 - RNA, 22 nt, Synthetic Construct
  source 1..22: mol_type = other RNA
tggaatgtaaagaagtatgtgt

SEQ ID NO: 48650 - RNA, 22 nt, Synthetic Construct
  source 1..22: mol_type = other RNA
tggaatgtaaagaagtatgtgt

SEQ ID NO: 48651 - RNA, 33 nt, Synthetic Construct; identical to SEQ ID NO: 3082
  source 1..33: mol_type = other RNA

SEQ ID NO: 48652 - RNA, 33 nt, Synthetic Construct; identical to SEQ ID NO: 3082
  source 1..33: mol_type = other RNA

SEQ ID NO: 48653 - RNA, 25 nt, Synthetic Construct
  source 1..25: mol_type = other RNA
ttgaggatgtgagatcgagacgaca

SEQ ID NO: 48654 - RNA, 25 nt, Synthetic Construct
  source 1..25: mol_type = other RNA
ttgaggatgtgagatcgagacgaca

SEQ ID NO: 48655 - RNA, 22 nt, Synthetic Construct
  source 1..22: mol_type = other RNA
aattgcacggtatccatctgta

SEQ ID NO: 48656 - RNA, 22 nt, Synthetic Construct
  source 1..22: mol_type = other RNA
aattgcacggtatccatctgta

SEQ ID NO: 48657 - RNA, 23 nt, Synthetic Construct
  source 1..23: mol_type = other RNA
tgaggtaggaggttgtatagtta

SEQ ID NO: 48658 - RNA, 16 nt, Synthetic Construct
  source 1..16: mol_type = other RNA
gtctacggccatgcca

SEQ ID NO: 48659 - RNA, 16 nt, Synthetic Construct
  source 1..16: mol_type = other RNA
gtctacggccatgcca

SEQ ID NO: 48660 - RNA, 32 nt, Synthetic Construct; identical to SEQ ID NO: 2435
  source 1..32: mol_type = other RNA

SEQ ID NO: 48661 - RNA, 16 nt, Synthetic Construct
  source 1..16: mol_type = other RNA
agtcaggatgttggct

SEQ ID NO: 48662 - RNA, 16 nt, Synthetic Construct
  source 1..16: mol_type = other RNA
agtcaggatgttggct

SEQ ID NO: 48663 - RNA, 23 nt, Synthetic Construct
  source 1..23: mol_type = other RNA
ctcactgatcgagtcgtcctgcg

SEQ ID NO: 48664 - RNA, 29 nt, Synthetic Construct
  source 1..29: mol_type = other RNA
cccgtgtgaaagtaggtcatcgtcaggct

SEQ ID NO: 48665 - RNA, 21 nt, Synthetic Construct
  source 1..21: mol_type = other RNA
cggagtgtgacaatggtgttt

SEQ ID NO: 48666 - RNA, 21 nt, Synthetic Construct
  source 1..21: mol_type = other RNA
tgaggtagtagtctgtgctgt

SEQ ID NO: 48667 - RNA, 21 nt, Synthetic Construct
  source 1..21: mol_type = other RNA
tgaggtagtagtctgtgctgt

SEQ ID NO: 48668 - RNA, 22 nt, Synthetic Construct
  source 1..22: mol_type = other RNA
tagcatatcgagcctgagaaca

SEQ ID NO: 48669 - RNA, 22 nt, Synthetic Construct
  source 1..22: mol_type = other RNA
tagcatatcgagcctgagaaca

SEQ ID NO: 48670 - RNA, 34 nt, Synthetic Construct; identical to SEQ ID NO: 2019
  source 1..34: mol_type = other RNA

SEQ ID NO: 48671 - RNA, 34 nt, Synthetic Construct; identical to SEQ ID NO: 2019
  source 1..34: mol_type = other RNA

SEQ ID NO: 48672 - RNA, 16 nt, Synthetic Construct
  source 1..16: mol_type = other RNA
gtctacggccacacca

SEQ ID NO: 48673 - RNA, 19 nt, Synthetic Construct
  source 1..19: mol_type = other RNA
tagcttatcagactgatgt

SEQ ID NO: 48674 - RNA, 19 nt, Synthetic Construct
  source 1..19: mol_type = other RNA
tagcttatcagactgatgt

SEQ ID NO: 48675 - RNA, 29 nt, Synthetic Construct
  source 1..29: mol_type = other RNA
gatgcgaaagcaggtcaaagtgatccggc

SEQ ID NO: 48676 - RNA, 29 nt, Synthetic Construct
  source 1..29: mol_type = other RNA
gatgcgaaagcaggtcaaagtgatccggc

SEQ ID NO: 48677 - RNA, 21 nt, Synthetic Construct
  source 1..21: mol_type = other RNA
taatactgcctggtaatgatg

SEQ ID NO: 48678 - RNA, 21 nt, Synthetic Construct
  source 1..21: mol_type = other RNA
taatactgcctggtaatgatg

SEQ ID NO: 48679 - RNA, 22 nt, Synthetic Construct
  source 1..22: mol_type = other RNA
tgaggtagtggtttgtgctgtt

SEQ ID NO: 48680 - RNA, 22 nt, Synthetic Construct
  source 1..22: mol_type = other RNA
tgaggtagtggtttgtgctgtt

SEQ ID NO: 48681 - RNA, 18 nt, Synthetic Construct
  source 1..18: mol_type = other RNA
accaaggggtcgtgggtt

SEQ ID NO: 48682 - RNA, 25 nt, Synthetic Construct
  source 1..25: mol_type = other RNA
gtgaggatatgagatcgagacgaca

SEQ ID NO: 48683 - RNA, 25 nt, Synthetic Construct
  source 1..25: mol_type = other RNA
gtgaggatatgagatcgagacgaca

SEQ ID NO: 48684 - RNA, 39 nt, Synthetic Construct; identical to SEQ ID NO: 4400
  source 1..39: mol_type = other RNA

SEQ ID NO: 48685 - RNA, 39 nt, Synthetic Construct; identical to SEQ ID NO: 4400
  source 1..39: mol_type = other RNA

SEQ ID NO: 48686 - RNA, 15 nt, Synthetic Construct
  source 1..15: mol_type = other RNA
cctcgcgcgattgga

SEQ ID NO: 48687 - RNA, 15 nt, Synthetic Construct
  source 1..15: mol_type = other RNA
cctcgcgcgattgga

SEQ ID NO: 48688 - RNA, 23 nt, Synthetic Construct
  source 1..23: mol_type = other RNA
tacagtagtctgcacattggttt

SEQ ID NO: 48689 - RNA, 23 nt, Synthetic Construct
  source 1..23: mol_type = other RNA
tacagtagtctgcacattggttt

SEQ ID NO: 48690 - RNA, 20 nt, Synthetic Construct
  source 1..20: mol_type = other RNA
caacggaatcccaaaagcag

SEQ ID NO: 48691 - RNA, 20 nt, Synthetic Construct
  source 1..20: mol_type = other RNA
caacggaatcccaaaagcag

SEQ ID NO: 48692 - RNA, 34 nt, Synthetic Construct; identical to SEQ ID NO: 2553
  source 1..34: mol_type = other RNA

SEQ ID NO: 48693 - RNA, 34 nt, Synthetic Construct; identical to SEQ ID NO: 2553
  source 1..34: mol_type = other RNA

SEQ ID NO: 48694 - RNA, 16 nt, Synthetic Construct
  source 1..16: mol_type = other RNA
gtctacggccacacca

SEQ ID NO: 48695 - RNA, 16 nt, Synthetic Construct
  source 1..16: mol_type = other RNA
gtctacggccacacca

SEQ ID NO: 48696 - RNA, 17 nt, Synthetic Construct
  source 1..17: mol_type = other RNA
tcccagaaacccggtcg

SEQ ID NO: 48697 - RNA, 23 nt, Synthetic Construct
  source 1..23: mol_type = other RNA
tggtaatacgacgtactttgtgt

SEQ ID NO: 48698 - RNA, 27 nt, Synthetic Construct
  source 1..27: mol_type = other RNA
ccctccactgctaaatttgactggctt

SEQ ID NO: 48699 - RNA, 24 nt, Synthetic Construct
  source 1..24: mol_type = other RNA
tgtaaacatccccgactgggagct

SEQ ID NO: 48700 - RNA, 24 nt, Synthetic Construct
  source 1..24: mol_type = other RNA
tgtaaacatccccgactgggagct

SEQ ID NO: 48701 - RNA, 22 nt, Synthetic Construct
  source 1..22: mol_type = other RNA
tgaggtagtagtatgtgctgtt

SEQ ID NO: 48702 - RNA, 22 nt, Synthetic Construct
  source 1..22: mol_type = other RNA
tgaggtagtagtatgtgctgtt

SEQ ID NO: 48703 - RNA, 16 nt, Synthetic Construct
  source 1..16: mol_type = other RNA
tcagtagctcgaggaa

SEQ ID NO: 48704 - RNA, 16 nt, Synthetic Construct
  source 1..16: mol_type = other RNA
tcagtagctcgaggaa

SEQ ID NO: 48705 - RNA, 21 nt, Synthetic Construct
  source 1..21: mol_type = other RNA
tggagagtgacaatggtgttt

SEQ ID NO: 48706 - RNA, 25 nt, Synthetic Construct
  source 1..25: mol_type = other RNA
ctgaggatatgagatcgagacgaca

SEQ ID NO: 48707 - RNA, 21 nt, Synthetic Construct
  source 1..21: mol_type = other RNA
ttataatacaacctgataagt

SEQ ID NO: 48708 - RNA, 21 nt, Synthetic Construct
  source 1..21: mol_type = other RNA
ttataatacaacctgataagt

SEQ ID NO: 48709 - RNA, 23 nt, Synthetic Construct
  source 1..23: mol_type = other RNA
tacagtagtctgcacattggttt

SEQ ID NO: 48710 - RNA, 23 nt, Synthetic Construct
  source 1..23: mol_type = other RNA
tacagtagtctgcacattggttt

SEQ ID NO: 48711 - RNA, 19 nt, Synthetic Construct
  source 1..19: mol_type = other RNA
agtcgacgtatagggtgtg

SEQ ID NO: 48712 - RNA, 19 nt, Synthetic Construct
  source 1..19: mol_type = other RNA
agtcgacgtatagggtgtg

SEQ ID NO: 48713 - RNA, 16 nt, Synthetic Construct
  source 1..16: mol_type = other RNA
tggccgtcgtcagctc

SEQ ID NO: 48714 - RNA, 36 nt, Synthetic Construct; identical to SEQ ID NO: 2444
  source 1..36: mol_type = other RNA

SEQ ID NO: 48715 - RNA, 23 nt, Synthetic Construct
  source 1..23: mol_type = other RNA
tggtaataagacgtacttagtgt

SEQ ID NO: 48716 - RNA, 22 nt, Synthetic Construct
  source 1..22: mol_type = other RNA
tcctgtactgagctgctccgag

SEQ ID NO: 48717 - RNA, 22 nt, Synthetic Construct
  source 1..22: mol_type = other RNA
tcctgtactgagctgctccgag

SEQ ID NO: 48718 - RNA, 20 nt, Synthetic Construct
  source 1..20: mol_type = other RNA
tgaggtagcaggttgtatag

SEQ ID NO: 48719 - RNA, 20 nt, Synthetic Construct
  source 1..20: mol_type = other RNA
tgaggtagcaggttgtatag

SEQ ID NO: 48720 - RNA, 23 nt, Synthetic Construct
  source 1..23: mol_type = other RNA
tgaggggcagagagcgagactat

SEQ ID NO: 48721 - RNA, 23 nt, Synthetic Construct
  source 1..23: mol_type = other RNA
tgaggggcagagagcgagactat

SEQ ID NO: 48722 - RNA, 37 nt, Synthetic Construct; identical to SEQ ID NO: 715
  source 1..37: mol_type = other RNA

SEQ ID NO: 48723 - RNA, 37 nt, Synthetic Construct; identical to SEQ ID NO: 715
  source 1..37: mol_type = other RNA

SEQ ID NO: 48724 - RNA, 27 nt, Synthetic Construct
  source 1..27: mol_type = other RNA
ccccccactgctaagtttgactggctt

SEQ ID NO: 48725 - RNA, 27 nt, Synthetic Construct
  source 1..27: mol_type = other RNA
ccccccactgctaagtttgactggctt

SEQ ID NO: 48726 - RNA, 22 nt, Synthetic Construct
  source 1..22: mol_type = other RNA
tgaggtagtaggttgtgtggct

SEQ ID NO: 48727 - RNA, 22 nt, Synthetic Construct
  source 1..22: mol_type = other RNA
tcgtaccgtgagcaataatgcg

SEQ ID NO: 48728 - RNA, 20 nt, Synthetic Construct
  source 1..20: mol_type = other RNA
tgaggtagtaggttgcatag

SEQ ID NO: 48729 - RNA, 20 nt, Synthetic Construct
  source 1..20: mol_type = other RNA
tgaggtagtaggttgcatag

SEQ ID NO: 48730 - RNA, 30 nt, Synthetic Construct; identical to SEQ ID NO: 2407
  source 1..30: mol_type = other RNA

SEQ ID NO: 48731 - RNA, 32 nt, Synthetic Construct; identical to SEQ ID NO: 2467
  source 1..32: mol_type = other RNA

SEQ ID NO: 48732 - RNA, 17 nt, Synthetic Construct
  source 1..17: mol_type = other RNA
atcgtgacgatagtgca

SEQ ID NO: 48733 - RNA, 23 nt, Synthetic Construct
  source 1..23: mol_type = other RNA
tcctgtgctgagctgccccgagt

SEQ ID NO: 48734 - RNA, 21 nt, Synthetic Construct
  source 1..21: mol_type = other RNA
tcccagtaaacggcggccgta

SEQ ID NO: 48735 - RNA, 23 nt, Synthetic Construct
  source 1..23: mol_type = other RNA
tagtgcaatattgcttatagggt

SEQ ID NO: 48736 - RNA, 22 nt, Synthetic Construct
  source 1..22: mol_type = other RNA
tgaggaagtagattgtatagtt

SEQ ID NO: 48737 - RNA, 22 nt, Synthetic Construct
  source 1..22: mol_type = other RNA
tgaggaagtagattgtatagtt

SEQ ID NO: 48738 - RNA, 15 nt, Synthetic Construct
  source 1..15: mol_type = other RNA
atccctccgactccg

SEQ ID NO: 48739 - RNA, 32 nt, Synthetic Construct; identical to SEQ ID NO: 2296
  source 1..32: mol_type = other RNA

SEQ ID NO: 48740 - RNA, 32 nt, Synthetic Construct; identical to SEQ ID NO: 2296
  source 1..32: mol_type = other RNA

SEQ ID NO: 48741 - RNA, 27 nt, Synthetic Construct
  source 1..27: mol_type = other RNA
gacttaccaaacctatgcaaactccga

SEQ ID NO: 48742 - RNA, 22 nt, Synthetic Construct
  source 1..22: mol_type = other RNA
tattgcacttgtcccggcctgc

SEQ ID NO: 48743 - RNA, 22 nt, Synthetic Construct
  source 1..22: mol_type = other RNA
tattgcacttgtcccggcctgc

SEQ ID NO: 48744 - RNA, 21 nt, Synthetic Construct
  source 1..21: mol_type = other RNA
tagcagcacgtaatattggcg

SEQ ID NO: 48745 - RNA, 31 nt, Synthetic Construct; identical to SEQ ID NO: 2423
  source 1..31: mol_type = other RNA

SEQ ID NO: 48746 - RNA, 21 nt, Synthetic Construct
  source 1..21: mol_type = other RNA
ctttgttcgattccgttgagt

SEQ ID NO: 48747 - RNA, 23 nt, Synthetic Construct
  source 1..23: mol_type = other RNA
tcctgtactgagctgccccgggt

SEQ ID NO: 48748 - RNA, 15 nt, Synthetic Construct
  source 1..15: mol_type = other RNA
gcaagtcgaacggta

SEQ ID NO: 48749 - RNA, 22 nt, Synthetic Construct
  source 1..22: mol_type = other RNA
ttgtaccgtgagtaataatgcg

SEQ ID NO: 48750 - RNA, 22 nt, Synthetic Construct
  source 1..22: mol_type = other RNA
ttgtaccgtgagtaataatgcg

SEQ ID NO: 48751 - RNA, 24 nt, Synthetic Construct
  source 1..24: mol_type = other RNA
tcagcccgtgttcggaagattttc

SEQ ID NO: 48752 - RNA, 24 nt, Synthetic Construct
  source 1..24: mol_type = other RNA
tcagcccgtgttcggaagattttc

SEQ ID NO: 48753 - RNA, 22 nt, Synthetic Construct
  source 1..22: mol_type = other RNA
aattgcacggtatccatctgta

SEQ ID NO: 48754 - RNA, 22 nt, Synthetic Construct
  source 1..22: mol_type = other RNA
aattgcacggtatccatctgta

SEQ ID NO: 48755 - RNA, 15 nt, Synthetic Construct
  source 1..15: mol_type = other RNA
aggtgggaggctttg

SEQ ID NO: 48756 - RNA, 23 nt, Synthetic Construct
  source 1..23: mol_type = other RNA
cgaggggcagagagcgagacttt

SEQ ID NO: 48757 - RNA, 23 nt, Synthetic Construct
  source 1..23: mol_type = other RNA
cgaggggcagagagcgagacttt

SEQ ID NO: 48758 - RNA, 26 nt, Synthetic Construct
  source 1..26: mol_type = other RNA
cgactcttagcggtggatcactcggc

SEQ ID NO: 48759 - RNA, 26 nt, Synthetic Construct
  source 1..26: mol_type = other RNA
cgactcttagcggtggatcactcggc

SEQ ID NO: 48760 - RNA, 22 nt, Synthetic Construct
  source 1..22: mol_type = other RNA
tcctgtactgagccgccccgag

SEQ ID NO: 48761 - RNA, 22 nt, Synthetic Construct
  source 1..22: mol_type = other RNA
tcctgtactgagccgccccgag

SEQ ID NO: 48762 - RNA, 26 nt, Synthetic Construct
  source 1..26: mol_type = other RNA
tgtccccgcgaggggcccggggcggg

SEQ ID NO: 48763 - RNA, 26 nt, Synthetic Construct
  source 1..26: mol_type = other RNA
tgtccccgcgaggggcccggggcggg

SEQ ID NO: 48764 - RNA, 16 nt, Synthetic Construct
  source 1..16: mol_type = other RNA
gtctacggccacacca

SEQ ID NO: 48765 - RNA, 16 nt, Synthetic Construct
  source 1..16: mol_type = other RNA
gctattgacgaccgta

SEQ ID NO: 48766 - RNA, 23 nt, Synthetic Construct
  source 1..23: mol_type = other RNA
tctctcggctcctcgcggctcgt

SEQ ID NO: 48767 - RNA, 23 nt, Synthetic Construct
  source 1..23: mol_type = other RNA
tctctcggctcctcgcggctcgt

SEQ ID NO: 48768 - RNA, 22 nt, Synthetic Construct
  source 1..22: mol_type = other RNA
tcgcaccgtgagtaataatgcg

SEQ ID NO: 48769 - RNA, 19 nt, Synthetic Construct
  source 1..19: mol_type = other RNA
cctgtaccgatcaatagtg

SEQ ID NO: 48770 - RNA, 19 nt, Synthetic Construct
  source 1..19: mol_type = other RNA
cctgtaccgatcaatagtg

SEQ ID NO: 48771 - RNA, 24 nt, Synthetic Construct
  source 1..24: mol_type = other RNA
tcactgatcgagtcgtcctgcgcg

SEQ ID NO: 48772 - RNA, 34 nt, Synthetic Construct; identical to SEQ ID NO: 2183
  source 1..34: mol_type = other RNA

SEQ ID NO: 48773 - RNA, 21 nt, Synthetic Construct
  source 1..21: mol_type = other RNA
tgaggggcagagagcgagacc

SEQ ID NO: 48774 - RNA, 22 nt, Synthetic Construct
  source 1..22: mol_type = other RNA
cggaatcgctagtaatcgcgga

SEQ ID NO: 48775 - RNA, 22 nt, Synthetic Construct
  source 1..22: mol_type = other RNA
cggaatcgctagtaatcgcgga

SEQ ID NO: 48776 - RNA, 16 nt, Synthetic Construct
  source 1..16: mol_type = other RNA
accgcttttgtcaggg

SEQ ID NO: 48777 - RNA, 16 nt, Synthetic Construct
  source 1..16: mol_type = other RNA
atctacggccatacca

SEQ ID NO: 48778 - RNA, 16 nt, Synthetic Construct
  source 1..16: mol_type = other RNA
atctacggccatacca

SEQ ID NO: 48779 - RNA, 16 nt, Synthetic Construct
  source 1..16: mol_type = other RNA
gggtctgtagctcagt

SEQ ID NO: 48780 - RNA, 22 nt, Synthetic Construct
  source 1..22: mol_type = other RNA
tgaggtagtagattgtgctgtt

SEQ ID NO: 48781 - RNA, 22 nt, Synthetic Construct
  source 1..22: mol_type = other RNA
tgaggtagtagattgtgctgtt

SEQ ID NO: 48782 - RNA, 21 nt, Synthetic Construct
  source 1..21: mol_type = other RNA
tggaatgtaaagaagtatgta

SEQ ID NO: 48783 - RNA, 21 nt, Synthetic Construct
  source 1..21: mol_type = other RNA
tggaatgtaaagaagtatgta

SEQ ID NO: 48784 - RNA, 16 nt, Synthetic Construct
  source 1..16: mol_type = other RNA
gcggctgtagctcagt

SEQ ID NO: 48785 - RNA, 22 nt, Synthetic Construct
  source 1..22: mol_type = other RNA
atataatacaacctgctaagtg

SEQ ID NO: 48786 - RNA, 23 nt, Synthetic Construct
  source 1..23: mol_type = other RNA
tggtaataagacgtacttagtgt

SEQ ID NO: 48787 - RNA, 23 nt, Synthetic Construct
  source 1..23: mol_type = other RNA
tggtaataagacgtacttagtgt

SEQ ID NO: 48788 - RNA, 15 nt, Synthetic Construct
  source 1..15: mol_type = other RNA
ggtcatcgtcaggct

SEQ ID NO: 48789 - RNA, 15 nt, Synthetic Construct
  source 1..15: mol_type = other RNA
ggtcatcgtcaggct

SEQ ID NO: 48790 - RNA, 22 nt, Synthetic Construct
  source 1..22: mol_type = other RNA
tgaggcagtaggttgtgtggtt

SEQ ID NO: 48791 - RNA, 22 nt, Synthetic Construct
  source 1..22: mol_type = other RNA
tgagaactgaattccatgggtc

SEQ ID NO: 48792 - RNA, 16 nt, Synthetic Construct
  source 1..16: mol_type = other RNA
gggtgaaagcggggga

SEQ ID NO: 48793 - RNA, 16 nt, Synthetic Construct
  source 1..16: mol_type = other RNA
gggtgaaagcggggga

SEQ ID NO: 48794 - RNA, 23 nt, Synthetic Construct
  source 1..23: mol_type = other RNA
cgaagtgctgttcgtgcaggtag

SEQ ID NO: 48795 - RNA, 23 nt, Synthetic Construct
  source 1..23: mol_type = other RNA
cgaagtgctgttcgtgcaggtag

SEQ ID NO: 48796 - RNA, 21 nt, Synthetic Construct
  source 1..21: mol_type = other RNA
tgaggggcagggagcgagact

SEQ ID NO: 48797 - RNA, 21 nt, Synthetic Construct
  source 1..21: mol_type = other RNA
tgaggggcagggagcgagact

SEQ ID NO: 48798 - RNA, 16 nt, Synthetic Construct
  source 1..16: mol_type = other RNA
tcagtagctcgaggaa

SEQ ID NO: 48799 - RNA, 27 nt, Synthetic Construct
  source 1..27: mol_type = other RNA
ccccccactgctaaatctgactggctt

SEQ ID NO: 48800 - RNA, 27 nt, Synthetic Construct
  source 1..27: mol_type = other RNA
ggggagctaatcccagaaacccggtcg

SEQ ID NO: 48801 - RNA, 27 nt, Synthetic Construct
  source 1..27: mol_type = other RNA
ggggagctaatcccagaaacccggtcg

SEQ ID NO: 48802 - RNA, 22 nt, Synthetic Construct
  source 1..22: mol_type = other RNA
ngaggtagtaggttgtatagtt

SEQ ID NO: 48803 - RNA, 22 nt, Synthetic Construct
  source 1..22: mol_type = other RNA
ngaggtagtaggttgtatagtt

SEQ ID NO: 48804 - RNA, 23 nt, Synthetic Construct
  source 1..23: mol_type = other RNA
tggtaatacgacgtactaagtgt

SEQ ID NO: 48805 - RNA, 23 nt, Synthetic Construct
  source 1..23: mol_type = other RNA
tggtaatacgacgtactaagtgt

SEQ ID NO: 48806 - RNA, 22 nt, Synthetic Construct
  source 1..22: mol_type = other RNA
tgaggtagtaggttgtatagta

SEQ ID NO: 48807 - RNA, 26 nt, Synthetic Construct
  source 1..26: mol_type = other RNA
tccctggtggtctagtggttaggatt

SEQ ID NO: 48808 - RNA, 20 nt, Synthetic Construct
  source 1..20: mol_type = other RNA
tgaggtagtaggtcgtgtgg

SEQ ID NO: 48809 - RNA, 20 nt, Synthetic Construct
  source 1..20: mol_type = other RNA
tgaggtagtaggtcgtgtgg

SEQ ID NO: 48810 - RNA, 32 nt, Synthetic Construct; identical to SEQ ID NO: 2798
  source 1..32: mol_type = other RNA

SEQ ID NO: 48811 - RNA, 32 nt, Synthetic Construct; identical to SEQ ID NO: 2798
  source 1..32: mol_type = other RNA

SEQ ID NO: 48812 - RNA, 22 nt, Synthetic Construct
  source 1..22: mol_type = other RNA
tgaggtagtaggatgtgtggtt

SEQ ID NO: 48813 - RNA, 22 nt, Synthetic Construct
  source 1..22: mol_type = other RNA
tgaggtagtaggatgtgtggtt

SEQ ID NO: 48814 - RNA, 23 nt, Synthetic Construct
  source 1..23: mol_type = other RNA
tgtagtgtttcctactttatgga

SEQ ID NO: 48815 - RNA, 22 nt, Synthetic Construct
  source 1..22: mol_type = other RNA
tgggatgagggattgaagtgga

SEQ ID NO: 48816 - RNA, 16 nt, Synthetic Construct
  source 1..16: mol_type = other RNA
gtctatggccatacca

SEQ ID NO: 48817 - RNA, 24 nt, Synthetic Construct
  source 1..24: mol_type = other RNA
tgtaaacgtccccgactggaagct

SEQ ID NO: 48818 - RNA, 24 nt, Synthetic Construct
  source 1..24: mol_type = other RNA
tgtaaacgtccccgactggaagct

SEQ ID NO: 48819 - RNA, 17 nt, Synthetic Construct
  source 1..17: mol_type = other RNA
gtcgacgtatagggtgt

SEQ ID NO: 48820 - RNA, 23 nt, Synthetic Construct
  source 1..23: mol_type = other RNA
caaagcgctgttcgtgcaggtag

SEQ ID NO: 48821 - RNA, 23 nt, Synthetic Construct
  source 1..23: mol_type = other RNA
caaagcgctgttcgtgcaggtag

SEQ ID NO: 48822 - RNA, 16 nt, Synthetic Construct
  source 1..16: mol_type = other RNA
tgcaagtcgaacggta

SEQ ID NO: 48823 - RNA, 20 nt, Synthetic Construct
  source 1..20: mol_type = other RNA
tgaggtagtaggttgtgtgg

SEQ ID NO: 48824 - RNA, 18 nt, Synthetic Construct
  source 1..18: mol_type = other RNA
ccaaggggtcgtgggttc

SEQ ID NO: 48825 - RNA, 19 nt, Synthetic Construct
  source 1..19: mol_type = other RNA
ccagtaaacggcggccgta

SEQ ID NO: 48826 - RNA, 23 nt, Synthetic Construct
  source 1..23: mol_type = other RNA
tgaggggcagagagcgggacttt

SEQ ID NO: 48827 - RNA, 20 nt, Synthetic Construct
  source 1..20: mol_type = other RNA
tggagtgtgacaatggtgtt

SEQ ID NO: 48828 - RNA, 20 nt, Synthetic Construct
  source 1..20: mol_type = other RNA
tggagtgtgacaatggtgtt

SEQ ID NO: 48829 - RNA, 22 nt, Synthetic Construct
  source 1..22: mol_type = other RNA
tgggaactgaattccatgggtt

SEQ ID NO: 48830 - RNA, 22 nt, Synthetic Construct
  source 1..22: mol_type = other RNA
tgggaactgaattccatgggtt

SEQ ID NO: 48831 - RNA, 22 nt, Synthetic Construct
  source 1..22: mol_type = other RNA
gagagcctggacacaggtgctg

SEQ ID NO: 48832 - RNA, 22 nt, Synthetic Construct
  source 1..22: mol_type = other RNA
cattgcacctgtctcggtctga

SEQ ID NO: 48833 - RNA, 19 nt, Synthetic Construct
  source 1..19: mol_type = other RNA
aggacagtgaaacgagtca

SEQ ID NO: 48834 - RNA, 19 nt, Synthetic Construct
  source 1..19: mol_type = other RNA
aggacagtgaaacgagtca

SEQ ID NO: 48835 - RNA, 21 nt, Synthetic Construct
  source 1..21: mol_type = other RNA
cgcgacctcagatcagacgtg

SEQ ID NO: 48836 - RNA, 21 nt, Synthetic Construct
  source 1..21: mol_type = other RNA
cgcgacctcagatcagacgtg

SEQ ID NO: 48837 - RNA, 15 nt, Synthetic Construct
  source 1..15: mol_type = other RNA
cctcgcgcgattgga

SEQ ID NO: 48838 - RNA, 29 nt, Synthetic Construct
  source 1..29: mol_type = other RNA
ttacaggggttcgaatcccctaggggacg

SEQ ID NO: 48839 - RNA, 29 nt, Synthetic Construct
  source 1..29: mol_type = other RNA
ttacaggggttcgaatcccctaggggacg

SEQ ID NO: 48840 - RNA, 15 nt, Synthetic Construct
  source 1..15: mol_type = other RNA
aaattccttgtcggg

SEQ ID NO: 48841 - RNA, 15 nt, Synthetic Construct
  source 1..15: mol_type = other RNA
aaattccttgtcggg

SEQ ID NO: 48842 - RNA, 23 nt, Synthetic Construct
  source 1..23: mol_type = other RNA
tggtaatacgacgtacttagcgt

SEQ ID NO: 48843 - RNA, 33 nt, Synthetic Construct; identical to SEQ ID NO: 2209
  source 1..33: mol_type = other RNA

SEQ ID NO: 48844 - RNA, 25 nt, Synthetic Construct
  source 1..25: mol_type = other RNA
gagaaagctcacaagaactgctaac

SEQ ID NO: 48845 - RNA, 25 nt, Synthetic Construct
  source 1..25: mol_type = other RNA
gagaaagctcacaagaactgctaac

SEQ ID NO: 48846 - RNA, 23 nt, Synthetic Construct
  source 1..23: mol_type = other RNA
aggtaatacgacgtacttagtgt

SEQ ID NO: 48847 - RNA, 21 nt, Synthetic Construct
  source 1..21: mol_type = other RNA
tcccgtactgagctgccccga

SEQ ID NO: 48848 - RNA, 21 nt, Synthetic Construct
  source 1..21: mol_type = other RNA
tcccgtactgagctgccccga

SEQ ID NO: 48849 - RNA, 22 nt, Synthetic Construct
  source 1..22: mol_type = other RNA
tgaggtagtagtttgtgctggt

SEQ ID NO: 48850 - RNA, 22 nt, Synthetic Construct
  source 1..22: mol_type = other RNA
tgaggtagtagtttgtgctggt

SEQ ID NO: 48851 - RNA, 18 nt, Synthetic Construct
  source 1..18: mol_type = other RNA
gtccggatcgtagtctgc

SEQ ID NO: 48852 - RNA, 18 nt, Synthetic Construct
  source 1..18: mol_type = other RNA
gtccggatcgtagtctgc

SEQ ID NO: 48853 - RNA, 23 nt, Synthetic Construct
  source 1..23: mol_type = other RNA
tcctgtactgagctgccccggga

SEQ ID NO: 48854 - RNA, 23 nt, Synthetic Construct
  source 1..23: mol_type = other RNA
tcctgtactgagctgccccggga

SEQ ID NO: 48855 - RNA, 16 nt, Synthetic Construct
  source 1..16: mol_type = other RNA
gtcgacgtatagggtg

SEQ ID NO: 48856 - RNA, 22 nt, Synthetic Construct
  source 1..22: mol_type = other RNA
tcgtaccgtgggtaataatgcg

SEQ ID NO: 48857 - RNA, 23 nt, Synthetic Construct
  source 1..23: mol_type = other RNA
tcttggagtaggtcattgggtgt

SEQ ID NO: 48858 - RNA, 29 nt, Synthetic Construct
  source 1..29: mol_type = other RNA
ccccccccactgctaaatttgactggctt

SEQ ID NO: 48859 - RNA, 23 nt, Synthetic Construct
  source 1..23: mol_type = other RNA
tgaggtagtaggctgtgtggttt

SEQ ID NO: 48860 - RNA, 23 nt, Synthetic Construct
  source 1..23: mol_type = other RNA
tgaggtagtaggctgtgtggttt

SEQ ID NO: 48861 - RNA, 22 nt, Synthetic Construct
  source 1..22: mol_type = other RNA
tgaggtggtagtttgtgctgtt

SEQ ID NO: 48862 - RNA, 22 nt, Synthetic Construct
  source 1..22: mol_type = other RNA
tgaggtggtagtttgtgctgtt

SEQ ID NO: 48863 - RNA, 23 nt, Synthetic Construct
  source 1..23: mol_type = other RNA
tgagaggcagagagcgagacttt

SEQ ID NO: 48864 - RNA, 24 nt, Synthetic Construct
  source 1..24: mol_type = other RNA
tagcagcacgtaaatattggcgtt

SEQ ID NO: 48865 - RNA, 24 nt, Synthetic Construct
  source 1..24: mol_type = other RNA
tagcagcacgtaaatattggcgtt

SEQ ID NO: 48866 - RNA, 20 nt, Synthetic Construct
  source 1..20: mol_type = other RNA
ggtcccaagggtatggctgt

SEQ ID NO: 48867 - RNA, 20 nt, Synthetic Construct
  source 1..20: mol_type = other RNA
tgaggtagtaggttatgtgg

SEQ ID NO: 48868 - RNA, 20 nt, Synthetic Construct
  source 1..20: mol_type = other RNA
tgaggtagtaggttatgtgg

SEQ ID NO: 48869 - RNA, 20 nt, Synthetic Construct
  source 1..20: mol_type = other RNA
agctacattgtctgctgggt

SEQ ID NO: 48870 - RNA, 23 nt, Synthetic Construct
  source 1..23: mol_type = other RNA
tcctgtaccgagctgccccgagt

SEQ ID NO: 48871 - RNA, 23 nt, Synthetic Construct
  source 1..23: mol_type = other RNA
tcctgtaccgagctgccccgagt

SEQ ID NO: 48872 - RNA, 22 nt, Synthetic Construct
  source 1..22: mol_type = other RNA
tgaggtggtaggttgtgtggtt

SEQ ID NO: 48873 - RNA, 21 nt, Synthetic Construct
  source 1..21: mol_type = other RNA
tcccgtactgagctgccccga

SEQ ID NO: 48874 - RNA, 21 nt, Synthetic Construct
  source 1..21: mol_type = other RNA
tcccgtactgagctgccccga

SEQ ID NO: 48875 - RNA, 23 nt, Synthetic Construct
  source 1..23: mol_type = other RNA
tgaggggcagagagcgaggcttt

SEQ ID NO: 48876 - RNA, 23 nt, Synthetic Construct
  source 1..23: mol_type = other RNA
tgaggggcagagagcgaggcttt

SEQ ID NO: 48877 - RNA, 23 nt, Synthetic Construct
  source 1..23: mol_type = other RNA
caacgggatcccaaaagcagctg

SEQ ID NO: 48878 - RNA, 35 nt, Synthetic Construct; identical to SEQ ID NO: 787
  source 1..35: mol_type = other RNA

SEQ ID NO: 48879 - RNA, 35 nt, Synthetic Construct; identical to SEQ ID NO: 787
  source 1..35: mol_type = other RNA

SEQ ID NO: 48880 - RNA, 21 nt, Synthetic Construct
  source 1..21: mol_type = other RNA
tggagtgtggcaatggtgttt

SEQ ID NO: 48881 - RNA, 18 nt, Synthetic Construct
  source 1..18: mol_type = other RNA
tcttcggtagtatagtgg

SEQ ID NO: 48882 - RNA, 18 nt, Synthetic Construct
  source 1..18: mol_type = other RNA
tcttcggtagtatagtgg

SEQ ID NO: 48883 - RNA, 21 nt, Synthetic Construct
  source 1..21: mol_type = other RNA
cggtcccaagggtatggctgt

SEQ ID NO: 48884 - RNA, 21 nt, Synthetic Construct
  source 1..21: mol_type = other RNA
cggtcccaagggtatggctgt

SEQ ID NO: 48885 - RNA, 15 nt, Synthetic Construct
  source 1..15: mol_type = other RNA
gcaagtcgagcggta

SEQ ID NO: 48886 - RNA, 15 nt, Synthetic Construct
  source 1..15: mol_type = other RNA
gcaagtcgagcggta

SEQ ID NO: 48887 - RNA, 27 nt, Synthetic Construct
  source 1..27: mol_type = other RNA
ccccccactgctaaacttgactggctt

SEQ ID NO: 48888 - RNA, 22 nt, Synthetic Construct
  source 1..22: mol_type = other RNA
tcctgtactgagcagccccgag

SEQ ID NO: 48889 - RNA, 22 nt, Synthetic Construct
  source 1..22: mol_type = other RNA
tcctgtactgagcagccccgag

SEQ ID NO: 48890 - RNA, 15 nt, Synthetic Construct
  source 1..15: mol_type = other RNA
gcgtagatatgcgga

SEQ ID NO: 48891 - RNA, 22 nt, Synthetic Construct
  source 1..22: mol_type = other RNA
tggagagaaaggcagttcctga

SEQ ID NO: 48892 - RNA, 22 nt, Synthetic Construct
  source 1..22: mol_type = other RNA
tggagagaaaggcagttcctga

SEQ ID NO: 48893 - RNA, 22 nt, Synthetic Construct
  source 1..22: mol_type = other RNA
tgaggtagtaggttgtgtagtt

SEQ ID NO: 48894 - RNA, 15 nt, Synthetic Construct
  source 1..15: mol_type = other RNA
acctgcatcgagggt

SEQ ID NO: 48895 - RNA, 27 nt, Synthetic Construct
  source 1..27: mol_type = other RNA
ccccccactgctaagtttgactggctt

SEQ ID NO: 48896 - RNA, 23 nt, Synthetic Construct
  source 1..23: mol_type = other RNA
tgaggggcagagagcgagactat

SEQ ID NO: 48897 - RNA, 23 nt, Synthetic Construct
  source 1..23: mol_type = other RNA
tgaggggcagagagcgagactat

SEQ ID NO: 48898 - RNA, 18 nt, Synthetic Construct
  source 1..18: mol_type = other RNA
tcccctggacctgtactg

SEQ ID NO: 48899 - RNA, 22 nt, Synthetic Construct
  source 1..22: mol_type = other RNA
tggaatgtaaggaagtatgtat

SEQ ID NO: 48900 - RNA, 22 nt, Synthetic Construct
  source 1..22: mol_type = other RNA
tggaatgtaaggaagtatgtat

SEQ ID NO: 48901 - RNA, 23 nt, Synthetic Construct
  source 1..23: mol_type = other RNA
tggtaatacgacgtacttagagt

SEQ ID NO: 48902 - RNA, 23 nt, Synthetic Construct
  source 1..23: mol_type = other RNA
tggtaatacgacgtacttagagt

SEQ ID NO: 48903 - RNA, 18 nt, Synthetic Construct
  source 1..18: mol_type = other RNA
gcgccgatgatagtgcgg

SEQ ID NO: 48904 - RNA, 18 nt, Synthetic Construct
  source 1..18: mol_type = other RNA
gcgccgatgatagtgcgg

SEQ ID NO: 48905 - RNA, 31 nt, Synthetic Construct; identical to SEQ ID NO: 2278
  source 1..31: mol_type = other RNA

SEQ ID NO: 48906 - RNA, 31 nt, Synthetic Construct; identical to SEQ ID NO: 2278
  source 1..31: mol_type = other RNA

SEQ ID NO: 48907 - RNA, 25 nt, Synthetic Construct
  source 1..25: mol_type = other RNA
agctcactgatcgagtcgtcctgcg

SEQ ID NO: 48908 - RNA, 21 nt, Synthetic Construct
  source 1..21: mol_type = other RNA
tgaggtagtaagttgtgtggt

SEQ ID NO: 48909 - RNA, 21 nt, Synthetic Construct
  source 1..21: mol_type = other RNA
tgaggtagtaagttgtgtggt

SEQ ID NO: 48910 - RNA, 20 nt, Synthetic Construct
  source 1..20: mol_type = other RNA
caggacagtgaaacgagtca

SEQ ID NO: 48911 - RNA, 20 nt, Synthetic Construct
  source 1..20: mol_type = other RNA
caggacagtgaaacgagtca

SEQ ID NO: 48912 - RNA, 30 nt, Synthetic Construct; identical to SEQ ID NO: 2308
  source 1..30: mol_type = other RNA

SEQ ID NO: 48913 - RNA, 30 nt, Synthetic Construct; identical to SEQ ID NO: 2308
  source 1..30: mol_type = other RNA

SEQ ID NO: 48914 - RNA, 35 nt, Synthetic Construct; identical to SEQ ID NO: 2269
  source 1..35: mol_type = other RNA

SEQ ID NO: 48915 - RNA, 23 nt, Synthetic Construct
  source 1..23: mol_type = other RNA
tggtaatacgacgtactcagtgt

SEQ ID NO: 48916 - RNA, 19 nt, Synthetic Construct
  source 1..19: mol_type = other RNA
ccagtaaacggcggccgta

SEQ ID NO: 48917 - RNA, 19 nt, Synthetic Construct
  source 1..19: mol_type = other RNA
ccagtaaacggcggccgta

SEQ ID NO: 48918 - RNA, 22 nt, Synthetic Construct
  source 1..22: mol_type = other RNA
tgaggtagtagtttgtgctgtt

SEQ ID NO: 48919 - RNA, 23 nt, Synthetic Construct
  source 1..23: mol_type = other RNA
tggtaatacgacgtacttagagt

SEQ ID NO: 48920 - RNA, 23 nt, Synthetic Construct
  source 1..23: mol_type = other RNA
tggtaatacgacgtacttagagt

SEQ ID NO: 48921 - RNA, 35 nt, Synthetic Construct; identical to SEQ ID NO: 2452
  source 1..35: mol_type = other RNA

SEQ ID NO: 48922 - RNA, 19 nt, Synthetic Construct
  source 1..19: mol_type = other RNA
gctattgacgaccgtaccg

SEQ ID NO: 48923 - RNA, 22 nt, Synthetic Construct
  source 1..22: mol_type = other RNA
tagcagcacgtaaatactggcg

SEQ ID NO: 48924 - RNA, 22 nt, Synthetic Construct
  source 1..22: mol_type = other RNA
tagcagcacgtaaatactggcg

SEQ ID NO: 48925 - RNA, 23 nt, Synthetic Construct
  source 1..23: mol_type = other RNA
tgaggggcagggagcgagacttt

SEQ ID NO: 48926 - RNA, 23 nt, Synthetic Construct
  source 1..23: mol_type = other RNA
tgaggggcagggagcgagacttt

SEQ ID NO: 48927 - RNA, 20 nt, Synthetic Construct
  source 1..20: mol_type = other RNA
tgagatagtaggttgtgtgg

SEQ ID NO: 48928 - RNA, 19 nt, Synthetic Construct
  source 1..19: mol_type = other RNA
tagcttatcagactgatgt

SEQ ID NO: 48929 - RNA, 30 nt, Synthetic Construct; identical to SEQ ID NO: 1641
  source 1..30: mol_type = other RNA

SEQ ID NO: 48930 - RNA, 30 nt, Synthetic Construct; identical to SEQ ID NO: 1641
  source 1..30: mol_type = other RNA

SEQ ID NO: 48931 - RNA, 22 nt, Synthetic Construct
  source 1..22: mol_type = other RNA
tcctgtactgagctgccctgag

SEQ ID NO: 48932 - RNA, 22 nt, Synthetic Construct
  source 1..22: mol_type = other RNA
tcctgtactgagctgccctgag

SEQ ID NO: 48933 - RNA, 22 nt, Synthetic Construct
  source 1..22: mol_type = other RNA
aggagtgtgacaatggtgtttg

SEQ ID NO: 48934 - RNA, 20 nt, Synthetic Construct
  source 1..20: mol_type = other RNA
tagcgaaattccttgtcggg

SEQ ID NO: 48935 - RNA, 20 nt, Synthetic Construct
  source 1..20: mol_type = other RNA
tagcgaaattccttgtcggg

SEQ ID NO: 48936 - RNA, 16 nt, Synthetic Construct
  source 1..16: mol_type = other RNA
gcctacggccatacca

SEQ ID NO: 48937 - RNA, 22 nt, Synthetic Construct
  source 1..22: mol_type = other RNA
nattgcacttgtcccggcctgt

SEQ ID NO: 48938 - RNA, 23 nt, Synthetic Construct
  source 1..23: mol_type = other RNA
tgaagggcagagagcgagacttt

SEQ ID NO: 48939 - RNA, 23 nt, Synthetic Construct
  source 1..23: mol_type = other RNA
tgaagggcagagagcgagacttt

SEQ ID NO: 48940 - RNA, 20 nt, Synthetic Construct
  source 1..20: mol_type = other RNA
tgagatagtaggttgtgtgg

SEQ ID NO: 48941 - RNA, 20 nt, Synthetic Construct
  source 1..20: mol_type = other RNA
tgagatagtaggttgtgtgg

SEQ ID NO: 48942 - RNA, 19 nt, Synthetic Construct
  source 1..19: mol_type = other RNA
cagcactctgcaaagacga

SEQ ID NO: 48943 - RNA, 22 nt, Synthetic Construct
  source 1..22: mol_type = other RNA
ncgtaccgtgagtaataatgcg

SEQ ID NO: 48944 - RNA, 15 nt, Synthetic Construct
  source 1..15: mol_type = other RNA
gctttgatccggaga

SEQ ID NO: 48945 - RNA, 23 nt, Synthetic Construct
  source 1..23: mol_type = other RNA
tgaggggaagagagcgagacttt

SEQ ID NO: 48946 - RNA, 23 nt, Synthetic Construct
  source 1..23: mol_type = other RNA
tgaggggaagagagcgagacttt

SEQ ID NO: 48947 - RNA, 22 nt, Synthetic Construct
  source 1..22: mol_type = other RNA
aattgcacggtatccatctgta

SEQ ID NO: 48948 - RNA, 18 nt, Synthetic Construct
  source 1..18: mol_type = other RNA
gctattgacgaccgtacc

SEQ ID NO: 48949 - RNA, 20 nt, Synthetic Construct
  source 1..20: mol_type = other RNA
tgaggtagtaggttgtgtgt

SEQ ID NO: 48950 - RNA, 20 nt, Synthetic Construct
  source 1..20: mol_type = other RNA
tgaggtagtaggttgtgtgt

SEQ ID NO: 48951 - RNA, 33 nt, Synthetic Construct; identical to SEQ ID NO: 2556
  source 1..33: mol_type = other RNA

SEQ ID NO: 48952 - RNA, 23 nt, Synthetic Construct
  source 1..23: mol_type = other RNA
tagtaatacgacgtacttagtgt

SEQ ID NO: 48953 - RNA, 22 nt, Synthetic Construct
  source 1..22: mol_type = other RNA
tgaggtagtagtttgtgctgta

SEQ ID NO: 48954 - RNA, 22 nt, Synthetic Construct
  source 1..22: mol_type = other RNA
gcgttgcaaccagtgccggggg

SEQ ID NO: 48955 - RNA, 27 nt, Synthetic Construct
  source 1..27: mol_type = other RNA
ccccccactgttaaatttgactggctt

SEQ ID NO: 48956 - RNA, 21 nt, Synthetic Construct
  source 1..21: mol_type = other RNA
ggctggtccgaaggtagtgag

SEQ ID NO: 48957 - RNA, 21 nt, Synthetic Construct
  source 1..21: mol_type = other RNA
ggctggtccgaaggtagtgag

SEQ ID NO: 48958 - RNA, 25 nt, Synthetic Construct
  source 1..25: mol_type = other RNA
gtcaggatggccgagcggtctaagg

SEQ ID NO: 48959 - RNA, 25 nt, Synthetic Construct
  source 1..25: mol_type = other RNA
gtcaggatggccgagcggtctaagg

SEQ ID NO: 48960 - RNA, 20 nt, Synthetic Construct
  source 1..20: mol_type = other RNA
ggtcccaagggtatggctgt

SEQ ID NO: 48961 - RNA, 20 nt, Synthetic Construct
  source 1..20: mol_type = other RNA
ggtcccaagggtatggctgt

SEQ ID NO: 48962 - RNA, 16 nt, Synthetic Construct
  source 1..16: mol_type = other RNA
gtctacgaccatacca

SEQ ID NO: 48963 - RNA, 22 nt, Synthetic Construct
  source 1..22: mol_type = other RNA
tcctgtactgtgctgccccgag

SEQ ID NO: 48964 - RNA, 22 nt, Synthetic Construct
  source 1..22: mol_type = other RNA
tcctgtactgtgctgccccgag

SEQ ID NO: 48965 - RNA, 20 nt, Synthetic Construct
  source 1..20: mol_type = other RNA
tgaggtagtaggttgtataa

SEQ ID NO: 48966 - RNA, 16 nt, Synthetic Construct
  source 1..16: mol_type = other RNA
gactacggccatacca

SEQ ID NO: 48967 - RNA, 16 nt, Synthetic Construct
  source 1..16: mol_type = other RNA
gactacggccatacca

SEQ ID NO: 48968 - RNA, 27 nt, Synthetic Construct
  source 1..27: mol_type = other RNA
cgtgtgaaagtaggtcatcgtcaggct

SEQ ID NO: 48969 - RNA, 22 nt, Synthetic Construct
  source 1..22: mol_type = other RNA
tgagatagtaggttgtatagtt

SEQ ID NO: 48970 - RNA, 22 nt, Synthetic Construct
  source 1..22: mol_type = other RNA
tgagatagtaggttgtatagtt

SEQ ID NO: 48971 - RNA, 23 nt, Synthetic Construct
  source 1..23: mol_type = other RNA
tgaggtagtaggttgtgtggtct

SEQ ID NO: 48972 - RNA, 22 nt, Synthetic Construct
  source 1..22: mol_type = other RNA
tgaggtagtaggttgtgaggtt

SEQ ID NO: 48973 - RNA, 22 nt, Synthetic Construct
  source 1..22: mol_type = other RNA
tgagatagtaggttgtgtggtt

SEQ ID NO: 48974 - RNA, 22 nt, Synthetic Construct
  source 1..22: mol_type = other RNA
tgagatagtaggttgtgtggtt

SEQ ID NO: 48975 - RNA, 24 nt, Synthetic Construct
  source 1..24: mol_type = other RNA
actcacacagaaatcgcacccgtc

SEQ ID NO: 48976 - RNA, 33 nt, Synthetic Construct; identical to SEQ ID NO: 7224
  source 1..33: mol_type = other RNA

SEQ ID NO: 48977 - RNA, 33 nt, Synthetic Construct; identical to SEQ ID NO: 7224
  source 1..33: mol_type = other RNA

SEQ ID NO: 48978 - RNA, 20 nt, Synthetic Construct
  source 1..20: mol_type = other RNA
tggggtagtaggttgtgtgg

SEQ ID NO: 48979 - RNA, 20 nt, Synthetic Construct
  source 1..20: mol_type = other RNA
tggggtagtaggttgtgtgg

SEQ ID NO: 48980 - RNA, 23 nt, Synthetic Construct
  source 1..23: mol_type = other RNA
tgaggggcagagggcgagacttt

SEQ ID NO: 48981 - RNA, 22 nt, Synthetic Construct
  source 1..22: mol_type = other RNA
nattgcacttgtcccggcctgt

SEQ ID NO: 48982 - RNA, 22 nt, Synthetic Construct
  source 1..22: mol_type = other RNA
nattgcacttgtcccggcctgt

SEQ ID NO: 48983 - RNA, 25 nt, Synthetic Construct
  source 1..25: mol_type = other RNA
ttcaagtaatccaggataggctttt

SEQ ID NO: 48984 - RNA, 23 nt, Synthetic Construct
  source 1..23: mol_type = other RNA
tgaggggcagagggcgagacttt

SEQ ID NO: 48985 - RNA, 18 nt, Synthetic Construct
  source 1..18: mol_type = other RNA
cctgaagaataagcaccg

SEQ ID NO: 48986 - RNA, 36 nt, Synthetic Construct; identical to SEQ ID NO: 777
  source 1..36: mol_type = other RNA

SEQ ID NO: 48987 - RNA, 36 nt, Synthetic Construct; identical to SEQ ID NO: 777
  source 1..36: mol_type = other RNA

SEQ ID NO: 48988 - RNA, 25 nt, Synthetic Construct
  source 1..25: mol_type = other RNA
atttccccttggggttgtaggacca

SEQ ID NO: 48989 - RNA, 25 nt, Synthetic Construct
  source 1..25: mol_type = other RNA
atttccccttggggttgtaggacca

SEQ ID NO: 48990 - RNA, 23 nt, Synthetic Construct
  source 1..23: mol_type = other RNA
aatgacacgatcactcccgttga

SEQ ID NO: 48991 - RNA, 23 nt, Synthetic Construct
  source 1..23: mol_type = other RNA
aatgacacgatcactcccgttga

SEQ ID NO: 48992 - RNA, 22 nt, Synthetic Construct
  source 1..22: mol_type = other RNA
cgaggtagtaggttgtgtggtt

SEQ ID NO: 48993 - RNA, 21 nt, Synthetic Construct
  source 1..21: mol_type = other RNA
tgaggtagtaggttgtgtggt

SEQ ID NO: 48994 - RNA, 21 nt, Synthetic Construct
  source 1..21: mol_type = other RNA
tgaggtagtaggttgtgtggt

SEQ ID NO: 48995 - RNA, 23 nt, Synthetic Construct
  source 1..23: mol_type = other RNA
tggtaatacgacgtacttaatgt

SEQ ID NO: 48996 - RNA, 27 nt, Synthetic Construct
  source 1..27: mol_type = other RNA
ccccccactgctaaacttgactggctt

SEQ ID NO: 48997 - RNA, 27 nt, Synthetic Construct
  source 1..27: mol_type = other RNA
ccccccactgctaaacttgactggctt

SEQ ID NO: 48998 - RNA, 25 nt, Synthetic Construct
  source 1..25: mol_type = other RNA
ggtaaaattgctgagtgaagcattg

SEQ ID NO: 48999 - RNA, 25 nt, Synthetic Construct
  source 1..25: mol_type = other RNA
ggtaaaattgctgagtgaagcattg

SEQ ID NO: 49000 - RNA, 22 nt, Synthetic Construct
  source 1..22: mol_type = other RNA
taaggtagtaggttgtgtggtt

SEQ ID NO: 49001 - RNA, 25 nt, Synthetic Construct
  source 1..25: mol_type = other RNA
ttgagggtatgagatcgagacgaca

SEQ ID NO: 49002 - RNA, 23 nt, Synthetic Construct
  source 1..23: mol_type = other RNA
tgaggtagtaggttgtgtggtaa

SEQ ID NO: 49003 - RNA, 23 nt, Synthetic Construct
  source 1..23: mol_type = other RNA
tggtaatacgacgtacttagtgt

SEQ ID NO: 49004 - RNA, 22 nt, Synthetic Construct
  source 1..22: mol_type = other RNA
cattgcacttgtcccggcctgt

SEQ ID NO: 49005 - RNA, 22 nt, Synthetic Construct
  source 1..22: mol_type = other RNA
cattgcacttgtctcagtctga

SEQ ID NO: 49006 - RNA, 18 nt, Synthetic Construct
  source 1..18: mol_type = other RNA
ggtgcaagcgttaatcgg

SEQ ID NO: 49007 - RNA, 28 nt, Synthetic Construct
  source 1..28: mol_type = other RNA
gctttgatccggagatttccgaatgggg

SEQ ID NO: 49008 - RNA, 28 nt, Synthetic Construct
  source 1..28: mol_type = other RNA
gctttgatccggagatttccgaatgggg

SEQ ID NO: 49009 - RNA, 20 nt, Synthetic Construct
  source 1..20: mol_type = other RNA
tagcttatcagactgatgtt

SEQ ID NO: 49010 - RNA, 27 nt, Synthetic Construct
  source 1..27: mol_type = other RNA
gcgggcgtagctcaggggtagagcgca

SEQ ID NO: 49011 - RNA, 27 nt, Synthetic Construct
  source 1..27: mol_type = other RNA
gcgggcgtagctcaggggtagagcgca

SEQ ID NO: 49012 - RNA, 15 nt, Synthetic Construct
  source 1..15: mol_type = other RNA
atccctccgactccg

SEQ ID NO: 49013 - RNA, 16 nt, Synthetic Construct
  source 1..16: mol_type = other RNA
cgcgacctcagatcag

SEQ ID NO: 49014 - RNA, 16 nt, Synthetic Construct
  source 1..16: mol_type = other RNA
cgcgacctcagatcag

SEQ ID NO: 49015 - RNA, 22 nt, Synthetic Construct
  source 1..22: mol_type = other RNA
tgaggtagtaggttgtgtggct

SEQ ID NO: 49016 - RNA, 22 nt, Synthetic Construct
  source 1..22: mol_type = other RNA
tgaggtagtaggttgtgtggct

SEQ ID NO: 49017 - RNA, 17 nt, Synthetic Construct
  source 1..17: mol_type = other RNA
acagtcaggatgttggc

SEQ ID NO: 49018 - RNA, 17 nt, Synthetic Construct
  source 1..17: mol_type = other RNA
acagtcaggatgttggc

SEQ ID NO: 49019 - RNA, 18 nt, Synthetic Construct
  source 1..18: mol_type = other RNA
atagggaacgtgagctgg

SEQ ID NO: 49020 - RNA, 18 nt, Synthetic Construct
  source 1..18: mol_type = other RNA
atagggaacgtgagctgg

SEQ ID NO: 49021 - RNA, 15 nt, Synthetic Construct
  source 1..15: mol_type = other RNA
gtagctcgttgggct

SEQ ID NO: 49022 - RNA, 15 nt, Synthetic Construct
  source 1..15: mol_type = other RNA
tcagtagctcgagga

SEQ ID NO: 49023 - RNA, 23 nt, Synthetic Construct
  source 1..23: mol_type = other RNA
tcctgtactgagctaccccgaga

SEQ ID NO: 49024 - RNA, 23 nt, Synthetic Construct
  source 1..23: mol_type = other RNA
tcctgtactgagctaccccgaga

SEQ ID NO: 49025 - RNA, 34 nt, Synthetic Construct; identical to SEQ ID NO: 2186
  source 1..34: mol_type = other RNA

SEQ ID NO: 49026 - RNA, 20 nt, Synthetic Construct
  source 1..20: mol_type = other RNA
tgaggtagcaggttgtatag

SEQ ID NO: 49027 - RNA, 20 nt, Synthetic Construct
  source 1..20: mol_type = other RNA
tgaggtagcaggttgtatag

SEQ ID NO: 49028 - RNA, 23 nt, Synthetic Construct
  source 1..23: mol_type = other RNA
gggtaatacgacgtacttagtgt

SEQ ID NO: 49029 - RNA, 21 nt, Synthetic Construct
  source 1..21: mol_type = other RNA
tgaggtagtaggttgcgtggt

SEQ ID NO: 49030 - RNA, 21 nt, Synthetic Construct
  source 1..21: mol_type = other RNA
tgaggtagtaggttgcgtggt

SEQ ID NO: 49031 - RNA, 21 nt, Synthetic Construct
  source 1..21: mol_type = other RNA
aacattcattgctgtcggtgg

SEQ ID NO: 49032 - RNA, 22 nt, Synthetic Construct
  source 1..22: mol_type = other RNA
gctcacggaaagagaatgaagc

SEQ ID NO: 49033 - RNA, 27 nt, Synthetic Construct
  source 1..27: mol_type = other RNA
cccctcactgctaaatttgactggctt

SEQ ID NO: 49034 - RNA, 22 nt, Synthetic Construct
  source 1..22: mol_type = other RNA
tggaatgtagagaagtatgtat

SEQ ID NO: 49035 - RNA, 22 nt, Synthetic Construct
  source 1..22: mol_type = other RNA
tggaatgtagagaagtatgtat

SEQ ID NO: 49036 - RNA, 31 nt, Synthetic Construct; identical to SEQ ID NO: 5506
  source 1..31: mol_type = other RNA

SEQ ID NO: 49037 - RNA, 31 nt, Synthetic Construct; identical to SEQ ID NO: 5506
  source 1..31: mol_type = other RNA

SEQ ID NO: 49038 - RNA, 31 nt, Synthetic Construct; identical to SEQ ID NO: 2310
  source 1..31: mol_type = other RNA

SEQ ID NO: 49039 - RNA, 19 nt, Synthetic Construct
  source 1..19: mol_type = other RNA
tgagatgaagcactgtagc

SEQ ID NO: 49040 - RNA, 22 nt, Synthetic Construct
  source 1..22: mol_type = other RNA
ttataatacaacctgataagtg

SEQ ID NO: 49041 - RNA, 24 nt, Synthetic Construct
  source 1..24: mol_type = other RNA
tgaggtagtaggttgtgtggtttt

SEQ ID NO: 49042 - RNA, 23 nt, Synthetic Construct
  source 1..23: mol_type = other RNA
tgaggggcagagagagagacttt

SEQ ID NO: 49043 - RNA, 22 nt, Synthetic Construct
  source 1..22: mol_type = other RNA
tggagtgtggcaatggtgtttg

SEQ ID NO: 49044 - RNA, 22 nt, Synthetic Construct
  source 1..22: mol_type = other RNA
tggagtgtggcaatggtgtttg

SEQ ID NO: 49045 - RNA, 22 nt, Synthetic Construct
  source 1..22: mol_type = other RNA
tgaggtagtagtttgtactgtt

SEQ ID NO: 49046 - RNA, 22 nt, Synthetic Construct
  source 1..22: mol_type = other RNA
tgaggtagtagtttgtactgtt

SEQ ID NO: 49047 - RNA, 43 nt, Synthetic Construct; identical to SEQ ID NO: 1204
  source 1..43: mol_type = other RNA

SEQ ID NO: 49048 - RNA, 43 nt, Synthetic Construct; identical to SEQ ID NO: 1204
  source 1..43: mol_type = other RNA

SEQ ID NO: 49049 - RNA, 24 nt, Synthetic Construct
  source 1..24: mol_type = other RNA
tgtaagcatccccgactggaagct

SEQ ID NO: 49050 - RNA, 19 nt, Synthetic Construct
  source 1..19: mol_type = other RNA
ccttggggttgtaggacca

SEQ ID NO: 49051 - RNA, 19 nt, Synthetic Construct
  source 1..19: mol_type = other RNA
ccttggggttgtaggacca

SEQ ID NO: 49052 - RNA, 19 nt, Synthetic Construct
  source 1..19: mol_type = other RNA
gtccggatcgtagtctgca

SEQ ID NO: 49053 - RNA, 21 nt, Synthetic Construct
  source 1..21: mol_type = other RNA
tcctgtactgggctgccccga

SEQ ID NO: 49054 - RNA, 23 nt, Synthetic Construct
  source 1..23: mol_type = other RNA
tcctgtactgagctgccctgaga

SEQ ID NO: 49055 - RNA, 23 nt, Synthetic Construct
  source 1..23: mol_type = other RNA
tcctgtactgagctgccctgaga

SEQ ID NO: 49056 - RNA, 20 nt, Synthetic Construct
  source 1..20: mol_type = other RNA
attgcacttgtcccggcctg

SEQ ID NO: 49057 - RNA, 20 nt, Synthetic Construct
  source 1..20: mol_type = other RNA
attgcacttgtcccggcctg

SEQ ID NO: 49058 - RNA, 21 nt, Synthetic Construct
  source 1..21: mol_type = other RNA
tcctgtacagagctgccccga

SEQ ID NO: 49059 - RNA, 21 nt, Synthetic Construct
  source 1..21: mol_type = other RNA
tcctgtacagagctgccccga

SEQ ID NO: 49060 - RNA, 22 nt, Synthetic Construct
  source 1..22: mol_type = other RNA
tggaatgtaaagaagcatgtat

SEQ ID NO: 49061 - RNA, 22 nt, Synthetic Construct
  source 1..22: mol_type = other RNA
tggaatgtaaagaagcatgtat

SEQ ID NO: 49062 - RNA, 23 nt, Synthetic Construct
  source 1..23: mol_type = other RNA
cggtaatacgacgtacttagtgt

SEQ ID NO: 49063 - RNA, 23 nt, Synthetic Construct
  source 1..23: mol_type = other RNA
aatgacacgatcactcccgttgt

SEQ ID NO: 49064 - RNA, 23 nt, Synthetic Construct
  source 1..23: mol_type = other RNA
aatgacacgatcactcccgttgt

SEQ ID NO: 49065 - RNA, 30 nt, Synthetic Construct; identical to SEQ ID NO: 2308
  source 1..30: mol_type = other RNA

SEQ ID NO: 49066 - RNA, 25 nt, Synthetic Construct
  source 1..25: mol_type = other RNA
ttgaggatatgagatcgaggcgaca

SEQ ID NO: 49067 - RNA, 21 nt, Synthetic Construct
  source 1..21: mol_type = other RNA
atcacattgccagggatttcc

SEQ ID NO: 49068 - RNA, 35 nt, Synthetic Construct; identical to SEQ ID NO: 3369
  source 1..35: mol_type = other RNA

SEQ ID NO: 49069 - RNA, 17 nt, Synthetic Construct
  source 1..17: mol_type = other RNA
cgatctgtagctggtct

SEQ ID NO: 49070 - RNA, 23 nt, Synthetic Construct
  source 1..23: mol_type = other RNA
tgaggggaagagagcgagacttt

SEQ ID NO: 49071 - RNA, 23 nt, Synthetic Construct
  source 1..23: mol_type = other RNA
tgaggggaagagagcgagacttt

SEQ ID NO: 49072 - RNA, 21 nt, Synthetic Construct
  source 1..21: mol_type = other RNA
tgaggtagtagtctgtgctgt

SEQ ID NO: 49073 - RNA, 37 nt, Synthetic Construct; identical to SEQ ID NO: 5125
  source 1..37: mol_type = other RNA

SEQ ID NO: 49074 - RNA, 37 nt, Synthetic Construct; identical to SEQ ID NO: 5125
  source 1..37: mol_type = other RNA

SEQ ID NO: 49075 - RNA, 32 nt, Synthetic Construct; identical to SEQ ID NO: 2467
  source 1..32: mol_type = other RNA

SEQ ID NO: 49076 - RNA, 32 nt, Synthetic Construct; identical to SEQ ID NO: 2467
  source 1..32: mol_type = other RNA

SEQ ID NO: 49077 - RNA, 22 nt, Synthetic Construct
  source 1..22: mol_type = other RNA
tcgtaccgtgagtaataatgca

SEQ ID NO: 49078 - RNA, 17 nt, Synthetic Construct
  source 1..17: mol_type = other RNA
ccaaggggtcgtgggtt

SEQ ID NO: 49079 - RNA, 17 nt, Synthetic Construct
  source 1..17: mol_type = other RNA
ccaaggggtcgtgggtt

SEQ ID NO: 49080 - RNA, 23 nt, Synthetic Construct
  source 1..23: mol_type = other RNA
tggtaatacgacgtacatagtgt

SEQ ID NO: 49081 - RNA, 21 nt, Synthetic Construct
  source 1..21: mol_type = other RNA
tgaggggcagagggcgagact

SEQ ID NO: 49082 - RNA, 18 nt, Synthetic Construct
  source 1..18: mol_type = other RNA
gtccggatcgtagtctgc

SEQ ID NO: 49083 - RNA, 36 nt, Synthetic Construct; identical to SEQ ID NO: 10333
  source 1..36: mol_type = other RNA

SEQ ID NO: 49084 - RNA, 36 nt, Synthetic Construct; identical to SEQ ID NO: 10333
  source 1..36: mol_type = other RNA

SEQ ID NO: 49085 - RNA, 21 nt, Synthetic Construct
  source 1..21: mol_type = other RNA
gggagtgtgacaatggtgttt

SEQ ID NO: 49086 - RNA, 21 nt, Synthetic Construct
  source 1..21: mol_type = other RNA
gggagtgtgacaatggtgttt

SEQ ID NO: 49087 - RNA, 23 nt, Synthetic Construct
  source 1..23: mol_type = other RNA
tggggggcagagagcgagacttt

SEQ ID NO: 49088 - RNA, 23 nt, Synthetic Construct
  source 1..23: mol_type = other RNA
tggggggcagagagcgagacttt

SEQ ID NO: 49089 - RNA, 31 nt, Synthetic Construct; identical to SEQ ID NO: 2333
  source 1..31: mol_type = other RNA

SEQ ID NO: 49090 - RNA, 31 nt, Synthetic Construct; identical to SEQ ID NO: 2333
  source 1..31: mol_type = other RNA

SEQ ID NO: 49091 - RNA, 23 nt, Synthetic Construct
  source 1..23: mol_type = other RNA
tcctgtactgagctgccccgagg

SEQ ID NO: 49092 - RNA, 23 nt, Synthetic Construct
  source 1..23: mol_type = other RNA
tcctgtactgagctgccccgagg

SEQ ID NO: 49093 - RNA, 23 nt, Synthetic Construct
  source 1..23: mol_type = other RNA
tgaggggcagagagcgagactta

SEQ ID NO: 49094 - RNA, 23 nt, Synthetic Construct
  source 1..23: mol_type = other RNA
tgaggggcagagagcgagactta

SEQ ID NO: 49095 - RNA, 18 nt, Synthetic Construct
  source 1..18: mol_type = other RNA
gtccggatcgtagtctgc

SEQ ID NO: 49096 - RNA, 23 nt, Synthetic Construct
  source 1..23: mol_type = other RNA
tggtaaaacgacgtacttagtgt

SEQ ID NO: 49097 - RNA, 23 nt, Synthetic Construct
  source 1..23: mol_type = other RNA
tggtaaaacgacgtacttagtgt

SEQ ID NO: 49098 - RNA, 21 nt, Synthetic Construct
  source 1..21: mol_type = other RNA
tggagagtgacaatggtgttt

SEQ ID NO: 49099 - RNA, 15 nt, Synthetic Construct
  source 1..15: mol_type = other RNA
ggtcatcgtcaggct

SEQ ID NO: 49100 - RNA, 21 nt, Synthetic Construct
  source 1..21: mol_type = other RNA
tctttggttatctagctgtat

SEQ ID NO: 49101 - RNA, 21 nt, Synthetic Construct
  source 1..21: mol_type = other RNA
tctttggttatctagctgtat

SEQ ID NO: 49102 - RNA, 19 nt, Synthetic Construct
  source 1..19: mol_type = other RNA
cagcactctgcaaagacga

SEQ ID NO: 49103 - RNA, 16 nt, Synthetic Construct
  source 1..16: mol_type = other RNA
caggacggtggccatg

SEQ ID NO: 49104 - RNA, 16 nt, Synthetic Construct
  source 1..16: mol_type = other RNA
caggacggtggccatg

SEQ ID NO: 49105 - RNA, 24 nt, Synthetic Construct
  source 1..24: mol_type = other RNA
cgtaaacatccccgactggaagct

SEQ ID NO: 49106 - RNA, 20 nt, Synthetic Construct
  source 1..20: mol_type = other RNA
tgaggtagtaggttgtacag

SEQ ID NO: 49107 - RNA, 27 nt, Synthetic Construct
  source 1..27: mol_type = other RNA
ccccccattgctaaatttgactggctt

SEQ ID NO: 49108 - RNA, 27 nt, Synthetic Construct
  source 1..27: mol_type = other RNA
ccccccattgctaaatttgactggctt

SEQ ID NO: 49109 - RNA, 25 nt, Synthetic Construct
  source 1..25: mol_type = other RNA
ttgaggatatgagatcgagacggca

SEQ ID NO: 49110 - RNA, 21 nt, Synthetic Construct
  source 1..21: mol_type = other RNA
tgaggtagtagtttgtgccgt

SEQ ID NO: 49111 - RNA, 21 nt, Synthetic Construct
  source 1..21: mol_type = other RNA
tgaggtagtagtttgtgccgt

SEQ ID NO: 49112 - RNA, 22 nt, Synthetic Construct
  source 1..22: mol_type = other RNA
cgcgacctcagatcagacgtgg

SEQ ID NO: 49113 - RNA, 22 nt, Synthetic Construct
  source 1..22: mol_type = other RNA
cgcgacctcagatcagacgtgg

SEQ ID NO: 49114 - RNA, 21 nt, Synthetic Construct
  source 1..21: mol_type = other RNA
tgaggtagtagattgtatagc

SEQ ID NO: 49115 - RNA, 22 nt, Synthetic Construct
  source 1..22: mol_type = other RNA
catcgcacttgtctcggtctga

SEQ ID NO: 49116 - RNA, 22 nt, Synthetic Construct
  source 1..22: mol_type = other RNA
tattgcacctgtcccggcctgt

SEQ ID NO: 49117 - RNA, 21 nt, Synthetic Construct
  source 1..21: mol_type = other RNA
tgaggtagtaggttgtacagt

SEQ ID NO: 49118 - RNA, 21 nt, Synthetic Construct
  source 1..21: mol_type = other RNA
tgaggtagtaggttgtacagt

SEQ ID NO: 49119 - RNA, 16 nt, Synthetic Construct
  source 1..16: mol_type = other RNA
ggtgggggtcgttggt

SEQ ID NO: 49120 - RNA, 21 nt, Synthetic Construct
  source 1..21: mol_type = other RNA
caaagtgctgttcgtgcaggt

SEQ ID NO: 49121 - RNA, 21 nt, Synthetic Construct
  source 1..21: mol_type = other RNA
caaagtgctgttcgtgcaggt

SEQ ID NO: 49122 - RNA, 35 nt, Synthetic Construct; identical to SEQ ID NO: 2762
  source 1..35: mol_type = other RNA

SEQ ID NO: 49123 - RNA, 20 nt, Synthetic Construct
  source 1..20: mol_type = other RNA
tgagatagtaggttgtgtgg

SEQ ID NO: 49124 - RNA, 20 nt, Synthetic Construct
  source 1..20: mol_type = other RNA
tgagatagtaggttgtgtgg

SEQ ID NO: 49125 - RNA, 18 nt, Synthetic Construct
  source 1..18: mol_type = other RNA
tcccaagggtatggctgt

SEQ ID NO: 49126 - RNA, 18 nt, Synthetic Construct
  source 1..18: mol_type = other RNA
tcccaagggtatggctgt

SEQ ID NO: 49127 - RNA, 23 nt, Synthetic Construct
  source 1..23: mol_type = other RNA
caaagtgttgttcgtgcaggtag

SEQ ID NO: 49128 - RNA, 23 nt, Synthetic Construct
  source 1..23: mol_type = other RNA
caaagtgttgttcgtgcaggtag

SEQ ID NO: 49129 - RNA, 16 nt, Synthetic Construct
  source 1..16: mol_type = other RNA
ctgcctcagcgtcggt

SEQ ID NO: 49130 - RNA, 16 nt, Synthetic Construct
  source 1..16: mol_type = other RNA
ctgcctcagcgtcggt

SEQ ID NO: 49131 - RNA, 22 nt, Synthetic Construct
  source 1..22: mol_type = other RNA
tgaggtaggaggttgtatagtt

SEQ ID NO: 49132 - RNA, 22 nt, Synthetic Construct
  source 1..22: mol_type = other RNA
tggaatgtaaagaagtatgcat

SEQ ID NO: 49133 - RNA, 22 nt, Synthetic Construct
  source 1..22: mol_type = other RNA
tggaatgtaaagaagtatgcat

SEQ ID NO: 49134 - RNA, 22 nt, Synthetic Construct
  source 1..22: mol_type = other RNA
tgaggtagtaggttgtgtggtg

SEQ ID NO: 49135 - RNA, 22 nt, Synthetic Construct
  source 1..22: mol_type = other RNA
tgaggtagtaggttgtgtggtg

SEQ ID NO: 49136 - RNA, 21 nt, Synthetic Construct
  source 1..21: mol_type = other RNA
tgaggtagtagattgtgtagt

SEQ ID NO: 49137 - RNA, 21 nt, Synthetic Construct
  source 1..21: mol_type = other RNA
tgaggtagtagattgtgtagt

SEQ ID NO: 49138 - RNA, 23 nt, Synthetic Construct
  source 1..23: mol_type = other RNA
tgtcagtttgtcaaataccccat

SEQ ID NO: 49139 - RNA, 23 nt, Synthetic Construct
  source 1..23: mol_type = other RNA
tgtcagtttgtcaaataccccat

SEQ ID NO: 49140 - RNA, 22 nt, Synthetic Construct
  source 1..22: mol_type = other RNA
tgtggtagtaggttgtgtggtt

SEQ ID NO: 49141 - RNA, 22 nt, Synthetic Construct
  source 1..22: mol_type = other RNA
tgtggtagtaggttgtgtggtt

SEQ ID NO: 49142 - RNA, 32 nt, Synthetic Construct; identical to SEQ ID NO: 2435
  source 1..32: mol_type = other RNA

SEQ ID NO: 49143 - RNA, 32 nt, Synthetic Construct; identical to SEQ ID NO: 2435
  source 1..32: mol_type = other RNA

SEQ ID NO: 49144 - RNA, 23 nt, Synthetic Construct
  source 1..23: mol_type = other RNA
tggtgatacgacgtacttagtgt

SEQ ID NO: 49145 - RNA, 22 nt, Synthetic Construct
  source 1..22: mol_type = other RNA
tggaacgtaaagaagtatgtat

SEQ ID NO: 49146 - RNA, 22 nt, Synthetic Construct
  source 1..22: mol_type = other RNA
tggaacgtaaagaagtatgtat

SEQ ID NO: 49147 - RNA, 30 nt, Synthetic Construct; identical to SEQ ID NO: 2274
  source 1..30: mol_type = other RNA

SEQ ID NO: 49148 - RNA, 27 nt, Synthetic Construct
  source 1..27: mol_type = other RNA
ccccccactgctaaatctgactggctt

SEQ ID NO: 49149 - RNA, 27 nt, Synthetic Construct
  source 1..27: mol_type = other RNA
ccccccactgctaaatctgactggctt

SEQ ID NO: 49150 - RNA, 25 nt, Synthetic Construct
  source 1..25: mol_type = other RNA
gggttgtaaaccgcttttgtcaggg

SEQ ID NO: 49151 - RNA, 21 nt, Synthetic Construct
  source 1..21: mol_type = other RNA
tcctgtactgagttgccccga

SEQ ID NO: 49152 - RNA, 21 nt, Synthetic Construct
  source 1..21: mol_type = other RNA
tcctgtactgagttgccccga

SEQ ID NO: 49153 - RNA, 23 nt, Synthetic Construct
  source 1..23: mol_type = other RNA
ggcggttatgcaagacagaggtg

SEQ ID NO: 49154 - RNA, 23 nt, Synthetic Construct
  source 1..23: mol_type = other RNA
ggcggttatgcaagacagaggtg

SEQ ID NO: 49155 - RNA, 32 nt, Synthetic Construct; identical to SEQ ID NO: 2318
  source 1..32: mol_type = other RNA

SEQ ID NO: 49156 - RNA, 30 nt, Synthetic Construct; identical to SEQ ID NO: 1771
  source 1..30: mol_type = other RNA

SEQ ID NO: 49157 - RNA, 22 nt, Synthetic Construct
  source 1..22: mol_type = other RNA
tgaggtagtaggttgcatagtt

SEQ ID NO: 49158 - RNA, 22 nt, Synthetic Construct
  source 1..22: mol_type = other RNA
tgaggtagtaggttgcatagtt

SEQ ID NO: 49159 - RNA, 19 nt, Synthetic Construct
  source 1..19: mol_type = other RNA
cacatgcaagtcgaacggt

SEQ ID NO: 49160 - RNA, 23 nt, Synthetic Construct
  source 1..23: mol_type = other RNA
caacggaaccccaaaagcagctg

SEQ ID NO: 49161 - RNA, 22 nt, Synthetic Construct
  source 1..22: mol_type = other RNA
tcctgaactgagctgccccgag

SEQ ID NO: 49162 - RNA, 22 nt, Synthetic Construct
  source 1..22: mol_type = other RNA
tcctgaactgagctgccccgag

SEQ ID NO: 49163 - RNA, 23 nt, Synthetic Construct
  source 1..23: mol_type = other RNA
tggtaatacgacgtactcagtgt

SEQ ID NO: 49164 - RNA, 15 nt, Synthetic Construct
  source 1..15: mol_type = other RNA
gtccggatcgtagtc

SEQ ID NO: 49165 - RNA, 20 nt, Synthetic Construct
  source 1..20: mol_type = other RNA
ctctaatgagactgccggtg

SEQ ID NO: 49166 - RNA, 20 nt, Synthetic Construct
  source 1..20: mol_type = other RNA
ctctaatgagactgccggtg

SEQ ID NO: 49167 - RNA, 17 nt, Synthetic Construct
  source 1..17: mol_type = other RNA
tcagtagctcgaggaaa

SEQ ID NO: 49168 - RNA, 17 nt, Synthetic Construct
  source 1..17: mol_type = other RNA
tcagtagctcgaggaaa

SEQ ID NO: 49169 - RNA, 15 nt, Synthetic Construct
  source 1..15: mol_type = other RNA
ggtgaaagcggggga

SEQ ID NO: 49170 - RNA, 21 nt, Synthetic Construct
  source 1..21: mol_type = other RNA
tcctgaactgagctgccccga

SEQ ID NO: 49171 - RNA, 21 nt, Synthetic Construct
  source 1..21: mol_type = other RNA
tcctgaactgagctgccccga

SEQ ID NO: 49172 - RNA, 22 nt, Synthetic Construct
  source 1..22: mol_type = other RNA
cggaatgtaaagaagtatgtat

SEQ ID NO: 49173 - RNA, 22 nt, Synthetic Construct
  source 1..22: mol_type = other RNA
cggaatgtaaagaagtatgtat

SEQ ID NO: 49174 - RNA, 25 nt, Synthetic Construct
  source 1..25: mol_type = other RNA
ctgaggatatgagatcgagacgaca

SEQ ID NO: 49175 - RNA, 25 nt, Synthetic Construct
  source 1..25: mol_type = other RNA
ctgaggatatgagatcgagacgaca

SEQ ID NO: 49176 - RNA, 26 nt, Synthetic Construct
  source 1..26: mol_type = other RNA
gcgggcgtagctcaggggtagagcgc

SEQ ID NO: 49177 - RNA, 26 nt, Synthetic Construct
  source 1..26: mol_type = other RNA
gcgggcgtagctcaggggtagagcgc

SEQ ID NO: 49178 - RNA, 21 nt, Synthetic Construct
  source 1..21: mol_type = other RNA
taaggtagtaggttgtatagt

SEQ ID NO: 49179 - RNA, 21 nt, Synthetic Construct
  source 1..21: mol_type = other RNA
taaggtagtaggttgtatagt

SEQ ID NO: 49180 - RNA, 21 nt, Synthetic Construct
  source 1..21: mol_type = other RNA
aacggaatcccaaaagcagct

SEQ ID NO: 49181 - RNA, 25 nt, Synthetic Construct
  source 1..25: mol_type = other RNA
ttgaggatatgagatcgaggcgaca

SEQ ID NO: 49182 - RNA, 25 nt, Synthetic Construct
  source 1..25: mol_type = other RNA
ttgaggatatgagatcgaggcgaca

SEQ ID NO: 49183 - RNA, 22 nt, Synthetic Construct
  source 1..22: mol_type = other RNA
tgaggtagtagtttgtggtgtt

SEQ ID NO: 49184 - RNA, 22 nt, Synthetic Construct
  source 1..22: mol_type = other RNA
tgaggtagtagtttgtggtgtt

SEQ ID NO: 49185 - RNA, 22 nt, Synthetic Construct
  source 1..22: mol_type = other RNA
tagcagcacgtaaacattggcg

SEQ ID NO: 49186 - RNA, 22 nt, Synthetic Construct
  source 1..22: mol_type = other RNA
tagcagcacgtaaacattggcg

SEQ ID NO: 49187 - RNA, 21 nt, Synthetic Construct
  source 1..21: mol_type = other RNA
tgagatagtaggttgtgtggt

SEQ ID NO: 49188 - RNA, 21 nt, Synthetic Construct
  source 1..21: mol_type = other RNA
tgagatagtaggttgtgtggt

SEQ ID NO: 49189 - RNA, 30 nt, Synthetic Construct; identical to SEQ ID NO: 6467
  source 1..30: mol_type = other RNA

SEQ ID NO: 49190 - RNA, 30 nt, Synthetic Construct; identical to SEQ ID NO: 6467
  source 1..30: mol_type = other RNA

SEQ ID NO: 49191 - RNA, 30 nt, Synthetic Construct; identical to SEQ ID NO: 6467
  source 1..30: mol_type = other RNA

SEQ ID NO: 49192 - RNA, 22 nt, Synthetic Construct
  source 1..22: mol_type = other RNA
cattgcacttgtctcagtctga

SEQ ID NO: 49193 - RNA, 15 nt, Synthetic Construct
  source 1..15: mol_type = other RNA
tccggatcgtagtct

SEQ ID NO: 49194 - RNA, 22 nt, Synthetic Construct
  source 1..22: mol_type = other RNA
tatagcacttgtcccggcctgt

SEQ ID NO: 49195 - RNA, 22 nt, Synthetic Construct
  source 1..22: mol_type = other RNA
tatagcacttgtcccggcctgt

SEQ ID NO: 49196 - RNA, 21 nt, Synthetic Construct
  source 1..21: mol_type = other RNA
tgaggtagtaggttgtataga

SEQ ID NO: 49197 - RNA, 21 nt, Synthetic Construct
  source 1..21: mol_type = other RNA
tgaggtagtaggttgtataga

SEQ ID NO: 49198 - RNA, 21 nt, Synthetic Construct
  source 1..21: mol_type = other RNA
tagcagcacgtaaatattggc

SEQ ID NO: 49199 - RNA, 21 nt, Synthetic Construct
  source 1..21: mol_type = other RNA
tagcagcacgtaaatattggc

SEQ ID NO: 49200 - RNA, 26 nt, Synthetic Construct
  source 1..26: mol_type = other RNA
tgaggtagtaggttgtgtggtttttt

SEQ ID NO: 49201 - RNA, 22 nt, Synthetic Construct
  source 1..22: mol_type = other RNA
ggaggagttcgaaggtacgcta

SEQ ID NO: 49202 - RNA, 22 nt, Synthetic Construct
  source 1..22: mol_type = other RNA
ggaggagttcgaaggtacgcta

SEQ ID NO: 49203 - RNA, 21 nt, Synthetic Construct
  source 1..21: mol_type = other RNA
gtgggcgtttgaagtgaagtg

SEQ ID NO: 49204 - RNA, 21 nt, Synthetic Construct
  source 1..21: mol_type = other RNA
gtgggcgtttgaagtgaagtg

SEQ ID NO: 49205 - RNA, 24 nt, Synthetic Construct
  source 1..24: mol_type = other RNA
tgaggtagtaggttgtgtggttaa

SEQ ID NO: 49206 - RNA, 24 nt, Synthetic Construct
  source 1..24: mol_type = other RNA
tgaggtagtaggttgtgtggttaa

SEQ ID NO: 49207 - RNA, 15 nt, Synthetic Construct
  source 1..15: mol_type = other RNA
catgccgcgtgcggg

SEQ ID NO: 49208 - RNA, 15 nt, Synthetic Construct
  source 1..15: mol_type = other RNA
catgccgcgtgcggg

SEQ ID NO: 49209 - RNA, 15 nt, Synthetic Construct
  source 1..15: mol_type = other RNA
gtagctcgttgggct

SEQ ID NO: 49210 - RNA, 23 nt, Synthetic Construct
  source 1..23: mol_type = other RNA
tggtaatacgacatacttagtgt

SEQ ID NO: 49211 - RNA, 31 nt, Synthetic Construct; identical to SEQ ID NO: 2215
  source 1..31: mol_type = other RNA

SEQ ID NO: 49212 - RNA, 22 nt, Synthetic Construct
  source 1..22: mol_type = other RNA
tcctgtactgagctgtcccgag

SEQ ID NO: 49213 - RNA, 22 nt, Synthetic Construct
  source 1..22: mol_type = other RNA
tcctgtactgagctgtcccgag

SEQ ID NO: 49214 - RNA, 23 nt, Synthetic Construct
  source 1..23: mol_type = other RNA
caaagtgctgctcgtgcaggtag

SEQ ID NO: 49215 - RNA, 23 nt, Synthetic Construct
  source 1..23: mol_type = other RNA
caaagtgctgctcgtgcaggtag

SEQ ID NO: 49216 - RNA, 17 nt, Synthetic Construct
  source 1..17: mol_type = other RNA
cagtagctcgaggaaaa

SEQ ID NO: 49217 - RNA, 17 nt, Synthetic Construct
  source 1..17: mol_type = other RNA
cagtagctcgaggaaaa

SEQ ID NO: 49218 - RNA, 21 nt, Synthetic Construct
  source 1..21: mol_type = other RNA
tgaggtagtaggttgtgtgat

SEQ ID NO: 49219 - RNA, 21 nt, Synthetic Construct
  source 1..21: mol_type = other RNA
tgaggtagtaggttgtgtgat

SEQ ID NO: 49220 - RNA, 23 nt, Synthetic Construct
  source 1..23: mol_type = other RNA
aatgacacgatcactcccgttga

SEQ ID NO: 49221 - RNA, 27 nt, Synthetic Construct
  source 1..27: mol_type = other RNA
ccccccactgctaaatttgtctggctt

SEQ ID NO: 49222 - RNA, 27 nt, Synthetic Construct
  source 1..27: mol_type = other RNA
ccccccactgctaaatttgtctggctt

SEQ ID NO: 49223 - RNA, 22 nt, Synthetic Construct
  source 1..22: mol_type = other RNA
tggaatgtaaaggagtatgtat

SEQ ID NO: 49224 - RNA, 22 nt, Synthetic Construct
  source 1..22: mol_type = other RNA
tggaatgtaaaggagtatgtat

SEQ ID NO: 49225 - RNA, 28 nt, Synthetic Construct
  source 1..28: mol_type = other RNA
gctttgatccggagatttccgaatgggg

SEQ ID NO: 49226 - RNA, 22 nt, Synthetic Construct
  source 1..22: mol_type = other RNA
tgaggttgtaggttgtatagtt

SEQ ID NO: 49227 - RNA, 22 nt, Synthetic Construct
  source 1..22: mol_type = other RNA
tgaggttgtaggttgtatagtt

SEQ ID NO: 49228 - RNA, 22 nt, Synthetic Construct
  source 1..22: mol_type = other RNA
tattgcacttgtcccagcctgt

SEQ ID NO: 49229 - RNA, 22 nt, Synthetic Construct
  source 1..22: mol_type = other RNA
tattgcacttgtcccagcctgt

SEQ ID NO: 49230 - RNA, 21 nt, Synthetic Construct
  source 1..21: mol_type = other RNA
tggagtgtgacgatggtgttt

SEQ ID NO: 49231 - RNA, 21 nt, Synthetic Construct
  source 1..21: mol_type = other RNA
tggagtgtgacgatggtgttt

SEQ ID NO: 49232 - RNA, 22 nt, Synthetic Construct
  source 1..22: mol_type = other RNA
tggagtgtggcaatggtgtttg

SEQ ID NO: 49233 - RNA, 22 nt, Synthetic Construct
  source 1..22: mol_type = other RNA
tggagtgtggcaatggtgtttg

SEQ ID NO: 49234 - RNA, 23 nt, Synthetic Construct
  source 1..23: mol_type = other RNA
caaagtgctgttcgtgcaggcag

SEQ ID NO: 49235 - RNA, 23 nt, Synthetic Construct
  source 1..23: mol_type = other RNA
caaagtgctgttcgtgcaggcag

SEQ ID NO: 49236 - RNA, 19 nt, Synthetic Construct
  source 1..19: mol_type = other RNA
atcacattgccagggattt

SEQ ID NO: 49237 - RNA, 19 nt, Synthetic Construct
  source 1..19: mol_type = other RNA
atcacattgccagggattt

SEQ ID NO: 49238 - RNA, 22 nt, Synthetic Construct
  source 1..22: mol_type = other RNA
tgaggtagtaggttgtgaggtt

SEQ ID NO: 49239 - RNA, 23 nt, Synthetic Construct
  source 1..23: mol_type = other RNA
tggtaatacgacgcacttagtgt

SEQ ID NO: 49240 - RNA, 22 nt, Synthetic Construct
  source 1..22: mol_type = other RNA
cattgcacttgtctcggtctgg

SEQ ID NO: 49241 - RNA, 20 nt, Synthetic Construct
  source 1..20: mol_type = other RNA
actgatcgagtcgtcctgcg

SEQ ID NO: 49242 - RNA, 20 nt, Synthetic Construct
  source 1..20: mol_type = other RNA
actgatcgagtcgtcctgcg

SEQ ID NO: 49243 - RNA, 22 nt, Synthetic Construct
  source 1..22: mol_type = other RNA
tatagcacttgtcccggcctgt

SEQ ID NO: 49244 - RNA, 23 nt, Synthetic Construct
  source 1..23: mol_type = other RNA
caacggaatcccaagagcagctg

SEQ ID NO: 49245 - RNA, 21 nt, Synthetic Construct
  source 1..21: mol_type = other RNA
tgaggtagtagtttgcgctgt

SEQ ID NO: 49246 - RNA, 22 nt, Synthetic Construct
  source 1..22: mol_type = other RNA
tgaggtagtaggttatgtggtt

SEQ ID NO: 49247 - RNA, 34 nt, Synthetic Construct; identical to SEQ ID NO: 2317
  source 1..34: mol_type = other RNA

SEQ ID NO: 49248 - RNA, 34 nt, Synthetic Construct; identical to SEQ ID NO: 2317
  source 1..34: mol_type = other RNA

SEQ ID NO: 49249 - RNA, 22 nt, Synthetic Construct
  source 1..22: mol_type = other RNA
tcgtaccatgagtaataatgcg

SEQ ID NO: 49250 - RNA, 22 nt, Synthetic Construct
  source 1..22: mol_type = other RNA
tgaggtagtaagttgtatagtt

SEQ ID NO: 49251 - RNA, 22 nt, Synthetic Construct
  source 1..22: mol_type = other RNA
tgaggtagtaagttgtatagtt

SEQ ID NO: 49252 - RNA, 31 nt, Synthetic Construct; identical to SEQ ID NO: 2263
  source 1..31: mol_type = other RNA

SEQ ID NO: 49253 - RNA, 31 nt, Synthetic Construct; identical to SEQ ID NO: 2263
  source 1..31: mol_type = other RNA

SEQ ID NO: 49254 - RNA, 35 nt, Synthetic Construct; identical to SEQ ID NO: 757
  source 1..35: mol_type = other RNA

SEQ ID NO: 49255 - RNA, 21 nt, Synthetic Construct
  source 1..21: mol_type = other RNA
cgaggggcagagagcgagact

SEQ ID NO: 49256 - RNA, 21 nt, Synthetic Construct
  source 1..21: mol_type = other RNA
cgaggggcagagagcgagact

SEQ ID NO: 49257 - RNA, 16 nt, Synthetic Construct
  source 1..16: mol_type = other RNA
gggtctgtagctcagt

SEQ ID NO: 49258 - RNA, 32 nt, Synthetic Construct; identical to SEQ ID NO: 4734
  source 1..32: mol_type = other RNA

SEQ ID NO: 49259 - RNA, 23 nt, Synthetic Construct
  source 1..23: mol_type = other RNA
tgaggggcagagagtgagacttt

SEQ ID NO: 49260 - RNA, 22 nt, Synthetic Construct
  source 1..22: mol_type = other RNA
cattgcacttgtctcggtccga

SEQ ID NO: 49261 - RNA, 21 nt, Synthetic Construct
  source 1..21: mol_type = other RNA
tcctgcactgagctgccccga

SEQ ID NO: 49262 - RNA, 33 nt, Synthetic Construct; identical to SEQ ID NO: 10232
  source 1..33: mol_type = other RNA

SEQ ID NO: 49263 - RNA, 33 nt, Synthetic Construct; identical to SEQ ID NO: 10232
  source 1..33: mol_type = other RNA

SEQ ID NO: 49264 - RNA, 22 nt, Synthetic Construct
  source 1..22: mol_type = other RNA
tgaggtagtaggttgtacagtt

SEQ ID NO: 49265 - RNA, 22 nt, Synthetic Construct
  source 1..22: mol_type = other RNA
tgaggtagtaggttgtacagtt

SEQ ID NO: 49266 - RNA, 22 nt, Synthetic Construct
  source 1..22: mol_type = other RNA
tagcagcacgtgaatattggcg

SEQ ID NO: 49267 - RNA, 22 nt, Synthetic Construct
  source 1..22: mol_type = other RNA
tagcagcacgtgaatattggcg

SEQ ID NO: 49268 - RNA, 21 nt, Synthetic Construct
  source 1..21: mol_type = other RNA
tggagtgtgacaatggtgttc

SEQ ID NO: 49269 - RNA, 21 nt, Synthetic Construct
  source 1..21: mol_type = other RNA
tggagtgtgacaatggtgttc

SEQ ID NO: 49270 - RNA, 35 nt, Synthetic Construct; identical to SEQ ID NO: 757
  source 1..35: mol_type = other RNA

SEQ ID NO: 49271 - RNA, 22 nt, Synthetic Construct
  source 1..22: mol_type = other RNA
tggagtgtaaagaagtatgtat

SEQ ID NO: 49272 - RNA, 22 nt, Synthetic Construct
  source 1..22: mol_type = other RNA
tggagtgtaaagaagtatgtat

SEQ ID NO: 49273 - RNA, 21 nt, Synthetic Construct
  source 1..21: mol_type = other RNA
ccctgtactgagctgccccga

SEQ ID NO: 49274 - RNA, 19 nt, Synthetic Construct
  source 1..19: mol_type = other RNA
atcacattgccagggattt

SEQ ID NO: 49275 - RNA, 19 nt, Synthetic Construct
  source 1..19: mol_type = other RNA
atcacattgccagggattt

SEQ ID NO: 49276 - RNA, 15 nt, Synthetic Construct
  source 1..15: mol_type = other RNA
gtcgacgtatagggt

SEQ ID NO: 49277 - RNA, 22 nt, Synthetic Construct
  source 1..22: mol_type = other RNA
ttcaagtaattcaggataggtt

SEQ ID NO: 49278 - RNA, 22 nt, Synthetic Construct
  source 1..22: mol_type = other RNA
ttcaagtaattcaggataggtt

SEQ ID NO: 49279 - RNA, 27 nt, Synthetic Construct
  source 1..27: mol_type = other RNA
cctcccactgctaaatttgactggctt

SEQ ID NO: 49280 - RNA, 21 nt, Synthetic Construct
  source 1..21: mol_type = other RNA
tcctgtctgaatatgggggga

SEQ ID NO: 49281 - RNA, 21 nt, Synthetic Construct
  source 1..21: mol_type = other RNA
tcctgtctgaatatgggggga

SEQ ID NO: 49282 - RNA, 23 nt, Synthetic Construct
  source 1..23: mol_type = other RNA
agctcggtctgaggcccctcaga

SEQ ID NO: 49283 - RNA, 23 nt, Synthetic Construct
  source 1..23: mol_type = other RNA
agctcggtctgaggcccctcaga

SEQ ID NO: 49284 - RNA, 18 nt, Synthetic Construct
  source 1..18: mol_type = other RNA
cacagtgtgaatcggcgc

SEQ ID NO: 49285 - RNA, 18 nt, Synthetic Construct
  source 1..18: mol_type = other RNA
cacagtgtgaatcggcgc

SEQ ID NO: 49286 - RNA, 16 nt, Synthetic Construct
  source 1..16: mol_type = other RNA
gcagacgaagtgagtg

SEQ ID NO: 49287 - RNA, 16 nt, Synthetic Construct
  source 1..16: mol_type = other RNA
gcagacgaagtgagtg

SEQ ID NO: 49288 - RNA, 22 nt, Synthetic Construct
  source 1..22: mol_type = other RNA
tgaggtagcaggttgtgtggtt

SEQ ID NO: 49289 - RNA, 20 nt, Synthetic Construct
  source 1..20: mol_type = other RNA
ggtcccaagggtatggctgt

SEQ ID NO: 49290 - RNA, 22 nt, Synthetic Construct
  source 1..22: mol_type = other RNA
gctcttgactgaagtcccagta

SEQ ID NO: 49291 - RNA, 22 nt, Synthetic Construct
  source 1..22: mol_type = other RNA
gctcttgactgaagtcccagta

SEQ ID NO: 49292 - RNA, 21 nt, Synthetic Construct
  source 1..21: mol_type = other RNA
cgtaccgtgagtaataacgcg

SEQ ID NO: 49293 - RNA, 22 nt, Synthetic Construct
  source 1..22: mol_type = other RNA
tgaggtagtagattgtatggtt

SEQ ID NO: 49294 - RNA, 22 nt, Synthetic Construct
  source 1..22: mol_type = other RNA
tgaggtagtagattgtatggtt

SEQ ID NO: 49295 - RNA, 21 nt, Synthetic Construct
  source 1..21: mol_type = other RNA
taaggtagtaggttgtgtggt

SEQ ID NO: 49296 - RNA, 22 nt, Synthetic Construct
  source 1..22: mol_type = other RNA
tgaggtagtaggctgtgtggtt

SEQ ID NO: 49297 - RNA, 22 nt, Synthetic Construct
  source 1..22: mol_type = other RNA
tgaggtagtaggctgtgtggtt

SEQ ID NO: 49298 - RNA, 17 nt, Synthetic Construct
  source 1..17: mol_type = other RNA
gcggctgtagctcagtt

SEQ ID NO: 49299 - RNA, 17 nt, Synthetic Construct
  source 1..17: mol_type = other RNA
gtcgacgtatagggtgt

SEQ ID NO: 49300 - RNA, 18 nt, Synthetic Construct
  source 1..18: mol_type = other RNA
cctgtaccgatcaatagt

SEQ ID NO: 49301 - RNA, 18 nt, Synthetic Construct
  source 1..18: mol_type = other RNA
cctgtaccgatcaatagt

SEQ ID NO: 49302 - RNA, 21 nt, Synthetic Construct
  source 1..21: mol_type = other RNA
tgaggggcagagagcgagacc

SEQ ID NO: 49303 - RNA, 15 nt, Synthetic Construct
  source 1..15: mol_type = other RNA
cgactcttagcggtg

SEQ ID NO: 49304 - RNA, 15 nt, Synthetic Construct
  source 1..15: mol_type = other RNA
cgactcttagcggtg

SEQ ID NO: 49305 - RNA, 22 nt, Synthetic Construct
  source 1..22: mol_type = other RNA
tgggatgtaaagaagtatgtat

SEQ ID NO: 49306 - RNA, 22 nt, Synthetic Construct
  source 1..22: mol_type = other RNA
tgggatgtaaagaagtatgtat

SEQ ID NO: 49307 - RNA, 20 nt, Synthetic Construct
  source 1..20: mol_type = other RNA
ctgacctatgaattgacagc

SEQ ID NO: 49308 - RNA, 20 nt, Synthetic Construct
  source 1..20: mol_type = other RNA
ctgacctatgaattgacagc

SEQ ID NO: 49309 - RNA, 18 nt, Synthetic Construct
  source 1..18: mol_type = other RNA
gctattgacgaccgtacc

SEQ ID NO: 49310 - RNA, 32 nt, Synthetic Construct; identical to SEQ ID NO: 2052
  source 1..32: mol_type = other RNA

SEQ ID NO: 49311 - RNA, 16 nt, Synthetic Construct
  source 1..16: mol_type = other RNA
gccagcagccgcggta

SEQ ID NO: 49312 - RNA, 16 nt, Synthetic Construct
  source 1..16: mol_type = other RNA
gccagcagccgcggta

SEQ ID NO: 49313 - RNA, 22 nt, Synthetic Construct
  source 1..22: mol_type = other RNA
tgaggtagtaggttgtgcggtt

SEQ ID NO: 49314 - RNA, 22 nt, Synthetic Construct
  source 1..22: mol_type = other RNA
tgaggtagtaggttgtgcggtt

SEQ ID NO: 49315 - RNA, 20 nt, Synthetic Construct
  source 1..20: mol_type = other RNA
tcctgtctgaatatgggggg

SEQ ID NO: 49316 - RNA, 20 nt, Synthetic Construct
  source 1..20: mol_type = other RNA
tcctgtctgaatatgggggg

SEQ ID NO: 49317 - RNA, 20 nt, Synthetic Construct
  source 1..20: mol_type = other RNA
tagaattctcgcctgccacg

SEQ ID NO: 49318 - RNA, 20 nt, Synthetic Construct
  source 1..20: mol_type = other RNA
tagaattctcgcctgccacg

SEQ ID NO: 49319 - RNA, 20 nt, Synthetic Construct
  source 1..20: mol_type = other RNA
tgaggtagtaggttgtgtgg

SEQ ID NO: 49320 - RNA, 20 nt, Synthetic Construct
  source 1..20: mol_type = other RNA
tgaggtagtaggttgtgtgg

SEQ ID NO: 49321 - RNA, 21 nt, Synthetic Construct
  source 1..21: mol_type = other RNA
tgaggtagtaggttgtgtggc

SEQ ID NO: 49322 - RNA, 21 nt, Synthetic Construct
  source 1..21: mol_type = other RNA
tgaggtagtaggttgtgtggc

SEQ ID NO: 49323 - RNA, 16 nt, Synthetic Construct
  source 1..16: mol_type = other RNA
gtcgacgtatagggtg

SEQ ID NO: 49324 - RNA, 24 nt, Synthetic Construct
  source 1..24: mol_type = other RNA
aaaccgttaccattactgagttta

SEQ ID NO: 49325 - RNA, 24 nt, Synthetic Construct
  source 1..24: mol_type = other RNA
aaaccgttaccattactgagttta

SEQ ID NO: 49326 - RNA, 22 nt, Synthetic Construct
  source 1..22: mol_type = other RNA
tcctgtactaagctgccccgag

SEQ ID NO: 49327 - RNA, 22 nt, Synthetic Construct
  source 1..22: mol_type = other RNA
tcctgtactaagctgccccgag

SEQ ID NO: 49328 - RNA, 23 nt, Synthetic Construct
  source 1..23: mol_type = other RNA
gtcagtttgtcaaataccccaat

SEQ ID NO: 49329 - RNA, 23 nt, Synthetic Construct
  source 1..23: mol_type = other RNA
gtcagtttgtcaaataccccaat

SEQ ID NO: 49330 - RNA, 36 nt, Synthetic Construct; identical to SEQ ID NO: 11035
  source 1..36: mol_type = other RNA

SEQ ID NO: 49331 - RNA, 36 nt, Synthetic Construct; identical to SEQ ID NO: 11035
  source 1..36: mol_type = other RNA

SEQ ID NO: 49332 - RNA, 35 nt, Synthetic Construct; identical to SEQ ID NO: 2514
  source 1..35: mol_type = other RNA

SEQ ID NO: 49333 - RNA, 27 nt, Synthetic Construct
  source 1..27: mol_type = other RNA
ncccccactgctaaatttgactggctt

SEQ ID NO: 49334 - RNA, 27 nt, Synthetic Construct
  source 1..27: mol_type = other RNA
ncccccactgctaaatttgactggctt

SEQ ID NO: 49335 - RNA, 22 nt, Synthetic Construct
  source 1..22: mol_type = other RNA
tcgaaccgtgagtaataatgcg

SEQ ID NO: 49336 - RNA, 22 nt, Synthetic Construct
  source 1..22: mol_type = other RNA
tcgaaccgtgagtaataatgcg

SEQ ID NO: 49337 - RNA, 36 nt, Synthetic Construct; identical to SEQ ID NO: 2506
  source 1..36: mol_type = other RNA

SEQ ID NO: 49338 - RNA, 36 nt, Synthetic Construct; identical to SEQ ID NO: 2506
  source 1..36: mol_type = other RNA

SEQ ID NO: 49339 - RNA, 21 nt, Synthetic Construct
  source 1..21: mol_type = other RNA
tgaggggcagagagcgaggct

SEQ ID NO: 49340 - RNA, 21 nt, Synthetic Construct
  source 1..21: mol_type = other RNA
tgaggggcagagagcgaggct

SEQ ID NO: 49341 - RNA, 22 nt, Synthetic Construct
  source 1..22: mol_type = other RNA
tgaggtagtaggttgtgtggct

SEQ ID NO: 49342 - RNA, 22 nt, Synthetic Construct
  source 1..22: mol_type = other RNA
tgaggtagtaggttgtgtggct

SEQ ID NO: 49343 - RNA, 22 nt, Synthetic Construct
  source 1..22: mol_type = other RNA
ttcaagtaatccaggataggct

SEQ ID NO: 49344 - RNA, 22 nt, Synthetic Construct
  source 1..22: mol_type = other RNA
ttcaagtaatccaggataggct

SEQ ID NO: 49345 - RNA, 22 nt, Synthetic Construct
  source 1..22: mol_type = other RNA
tgaggaagtaggttgtgtggtt

SEQ ID NO: 49346 - RNA, 37 nt, Synthetic Construct; identical to SEQ ID NO: 715
  source 1..37: mol_type = other RNA

SEQ ID NO: 49347 - RNA, 37 nt, Synthetic Construct; identical to SEQ ID NO: 715
  source 1..37: mol_type = other RNA

SEQ ID NO: 49348 - RNA, 21 nt, Synthetic Construct
  source 1..21: mol_type = other RNA
tgaggggcagagagcgggact

SEQ ID NO: 49349 - RNA, 18 nt, Synthetic Construct
  source 1..18: mol_type = other RNA
cgtgttcggaagattttc

SEQ ID NO: 49350 - RNA, 18 nt, Synthetic Construct
  source 1..18: mol_type = other RNA
cgtgttcggaagattttc

SEQ ID NO: 49351 - RNA, 22 nt, Synthetic Construct
  source 1..22: mol_type = other RNA
tttgttcgttcggctcgcgtga

SEQ ID NO: 49352 - RNA, 22 nt, Synthetic Construct
  source 1..22: mol_type = other RNA
tttgttcgttcggctcgcgtga

SEQ ID NO: 49353 - RNA, 22 nt, Synthetic Construct
  source 1..22: mol_type = other RNA
tcctgtactgagcagccccgag

SEQ ID NO: 49354 - RNA, 22 nt, Synthetic Construct
  source 1..22: mol_type = other RNA
tcctgtactgagcagccccgag

SEQ ID NO: 49355 - RNA, 22 nt, Synthetic Construct
  source 1..22: mol_type = other RNA
caaagtgctgttcgtgcaggta

SEQ ID NO: 49356 - RNA, 22 nt, Synthetic Construct
  source 1..22: mol_type = other RNA
caaagtgctgttcgtgcaggta

SEQ ID NO: 49357 - RNA, 22 nt, Synthetic Construct
  source 1..22: mol_type = other RNA
tcgaaccgtgagtaataatgcg

SEQ ID NO: 49358 - RNA, 20 nt, Synthetic Construct
  source 1..20: mol_type = other RNA
tgaggtagaaggttgtatag

SEQ ID NO: 49359 - RNA, 21 nt, Synthetic Construct
  source 1..21: mol_type = other RNA
tcctgtactgagccgccccga

SEQ ID NO: 49360 - RNA, 22 nt, Synthetic Construct
  source 1..22: mol_type = other RNA
ttctgtactgagctgccccgag

SEQ ID NO: 49361 - RNA, 22 nt, Synthetic Construct
  source 1..22: mol_type = other RNA
tcgtaccgtgagtgataatgcg

SEQ ID NO: 49362 - RNA, 22 nt, Synthetic Construct
  source 1..22: mol_type = other RNA
tcgtaccgtgagtgataatgcg

SEQ ID NO: 49363 - RNA, 35 nt, Synthetic Construct; identical to SEQ ID NO: 2397
  source 1..35: mol_type = other RNA

SEQ ID NO: 49364 - RNA, 26 nt, Synthetic Construct
  source 1..26: mol_type = other RNA
gagcagctaataccgcatacgacctg

SEQ ID NO: 49365 - RNA, 26 nt, Synthetic Construct
  source 1..26: mol_type = other RNA
gagcagctaataccgcatacgacctg

SEQ ID NO: 49366 - RNA, 17 nt, Synthetic Construct
  source 1..17: mol_type = other RNA
atcgtgacgatagtgca

SEQ ID NO: 49367 - RNA, 22 nt, Synthetic Construct
  source 1..22: mol_type = other RNA
tgaagtagtaggttgtgtggtt

SEQ ID NO: 49368 - RNA, 15 nt, Synthetic Construct
  source 1..15: mol_type = other RNA
gcaagtcgagcggta

SEQ ID NO: 49369 - RNA, 24 nt, Synthetic Construct
  source 1..24: mol_type = other RNA
atcacattgccagggatttccaat

SEQ ID NO: 49370 - RNA, 19 nt, Synthetic Construct
  source 1..19: mol_type = other RNA
ccgtgttcggaagattttc

SEQ ID NO: 49371 - RNA, 19 nt, Synthetic Construct
  source 1..19: mol_type = other RNA
ccgtgttcggaagattttc

SEQ ID NO: 49372 - RNA, 17 nt, Synthetic Construct
  source 1..17: mol_type = other RNA
tcccagaaacccggtcg

SEQ ID NO: 49373 - RNA, 24 nt, Synthetic Construct
  source 1..24: mol_type = other RNA
ggttgtaaaccgcttttgtcaggg

SEQ ID NO: 49374 - RNA, 24 nt, Synthetic Construct
  source 1..24: mol_type = other RNA
ggttgtaaaccgcttttgtcaggg

SEQ ID NO: 49375 - RNA, 23 nt, Synthetic Construct
  source 1..23: mol_type = other RNA
tgaggagcagagagcgagacttt

SEQ ID NO: 49376 - RNA, 27 nt, Synthetic Construct
  source 1..27: mol_type = other RNA
ccccccacagctaaatttgactggctt

SEQ ID NO: 49377 - RNA, 18 nt, Synthetic Construct
  source 1..18: mol_type = other RNA
catgcaagtcgaacggta

SEQ ID NO: 49378 - RNA, 23 nt, Synthetic Construct
  source 1..23: mol_type = other RNA
caaagtgctgtttgtgcaggtag

SEQ ID NO: 49379 - RNA, 23 nt, Synthetic Construct
  source 1..23: mol_type = other RNA
caaagtgctgtttgtgcaggtag

SEQ ID NO: 49380 - RNA, 17 nt, Synthetic Construct
  source 1..17: mol_type = other RNA
tgccagcagccgcggta

SEQ ID NO: 49381 - RNA, 19 nt, Synthetic Construct
  source 1..19: mol_type = other RNA
gtactgacgctcatgcacg

SEQ ID NO: 49382 - RNA, 22 nt, Synthetic Construct
  source 1..22: mol_type = other RNA
tgaagtagtaggttgtgtggtt

SEQ ID NO: 49383 - RNA, 21 nt, Synthetic Construct
  source 1..21: mol_type = other RNA
tgaggggcagggagcgagact

SEQ ID NO: 49384 - RNA, 31 nt, Synthetic Construct; identical to SEQ ID NO: 2263
  source 1..31: mol_type = other RNA

SEQ ID NO: 49385 - RNA, 21 nt, Synthetic Construct
  source 1..21: mol_type = other RNA
tccttcattccaccggagtct

SEQ ID NO: 49386 - RNA, 21 nt, Synthetic Construct
  source 1..21: mol_type = other RNA
tccttcattccaccggagtct

SEQ ID NO: 49387 - RNA, 22 nt, Synthetic Construct
  source 1..22: mol_type = other RNA
gcactctaatgagactgccggt

SEQ ID NO: 49388 - RNA, 21 nt, Synthetic Construct
  source 1..21: mol_type = other RNA
tgaggtagtagtttgtgctga

SEQ ID NO: 49389 - RNA, 22 nt, Synthetic Construct
  source 1..22: mol_type = other RNA
tattgcacttgtcccagcctgt

SEQ ID NO: 49390 - RNA, 22 nt, Synthetic Construct
  source 1..22: mol_type = other RNA
tattgcacttgtcccagcctgt

SEQ ID NO: 49391 - RNA, 16 nt, Synthetic Construct
  source 1..16: mol_type = other RNA
gtctacggccatgcca

SEQ ID NO: 49392 - RNA, 16 nt, Synthetic Construct
  source 1..16: mol_type = other RNA
gtctacggccatgcca

SEQ ID NO: 49393 - RNA, 22 nt, Synthetic Construct
  source 1..22: mol_type = other RNA
tgaggtagtaggttgtatagta

SEQ ID NO: 49394 - RNA, 22 nt, Synthetic Construct
  source 1..22: mol_type = other RNA
tgtagtgtttcctactttatgg

SEQ ID NO: 49395 - RNA, 16 nt, Synthetic Construct
  source 1..16: mol_type = other RNA
aggtcatcattatctg

SEQ ID NO: 49396 - RNA, 21 nt, Synthetic Construct
  source 1..21: mol_type = other RNA
aacggaatcccaaaagcagct

SEQ ID NO: 49397 - RNA, 23 nt, Synthetic Construct
  source 1..23: mol_type = other RNA
caacggaatcccaaaagcagccg

SEQ ID NO: 49398 - RNA, 21 nt, Synthetic Construct
  source 1..21: mol_type = other RNA
tgaagtagtaggttgtatagt

SEQ ID NO: 49399 - RNA, 21 nt, Synthetic Construct
  source 1..21: mol_type = other RNA
tgaagtagtaggttgtatagt

SEQ ID NO: 49400 - RNA, 26 nt, Synthetic Construct
  source 1..26: mol_type = other RNA
gatgcgtggtaggagagcgttctgta

SEQ ID NO: 49401 - RNA, 27 nt, Synthetic Construct
  source 1..27: mol_type = other RNA
ncccccactgctaaatttgactggctt

SEQ ID NO: 49402 - RNA, 27 nt, Synthetic Construct
  source 1..27: mol_type = other RNA
ncccccactgctaaatttgactggctt

SEQ ID NO: 49403 - RNA, 19 nt, Synthetic Construct
  source 1..19: mol_type = other RNA
tcagtagctcgaggaaaag

SEQ ID NO: 49404 - RNA, 22 nt, Synthetic Construct
  source 1..22: mol_type = other RNA
cgtaccgtgagtaataatgcgt

SEQ ID NO: 49405 - RNA, 22 nt, Synthetic Construct
  source 1..22: mol_type = other RNA
cgtaccgtgagtaataatgcgt

SEQ ID NO: 49406 - RNA, 26 nt, Synthetic Construct
  source 1..26: mol_type = other RNA
gagcagctaataccgcatacgacctg

SEQ ID NO: 49407 - RNA, 23 nt, Synthetic Construct
  source 1..23: mol_type = other RNA
nggtaatacgacgtacttagtgt

SEQ ID NO: 49408 - RNA, 27 nt, Synthetic Construct
  source 1..27: mol_type = other RNA
atagtctttgttcgattccgttgagta

SEQ ID NO: 49409 - RNA, 18 nt, Synthetic Construct
  source 1..18: mol_type = other RNA
ccagtaaacggcggccgt

SEQ ID NO: 49410 - RNA, 18 nt, Synthetic Construct
  source 1..18: mol_type = other RNA
ccagtaaacggcggccgt

SEQ ID NO: 49411 - RNA, 16 nt, Synthetic Construct
  source 1..16: mol_type = other RNA
gactacggccatacca

SEQ ID NO: 49412 - RNA, 25 nt, Synthetic Construct
  source 1..25: mol_type = other RNA
atgaggatatgagatcgagacgaca

SEQ ID NO: 49413 - RNA, 25 nt, Synthetic Construct
  source 1..25: mol_type = other RNA
atgaggatatgagatcgagacgaca

SEQ ID NO: 49414 - RNA, 16 nt, Synthetic Construct
  source 1..16: mol_type = other RNA
gtctacggccgtacca

SEQ ID NO: 49415 - RNA, 16 nt, Synthetic Construct
  source 1..16: mol_type = other RNA
gtctacggccgtacca

SEQ ID NO: 49416 - RNA, 16 nt, Synthetic Construct
  source 1..16: mol_type = other RNA
cgctagtaatcgcgga

SEQ ID NO: 49417 - RNA, 20 nt, Synthetic Construct
  source 1..20: mol_type = other RNA
acccttgtcattagttgcta

SEQ ID NO: 49418 - RNA, 22 nt, Synthetic Construct
  source 1..22: mol_type = other RNA
acagtagtctgcacattggttt

SEQ ID NO: 49419 - RNA, 22 nt, Synthetic Construct
  source 1..22: mol_type = other RNA
acagtagtctgcacattggttt

SEQ ID NO: 49420 - RNA, 21 nt, Synthetic Construct
  source 1..21: mol_type = other RNA
tgaggtagtaggctgtgtggt

SEQ ID NO: 49421 - RNA, 21 nt, Synthetic Construct
  source 1..21: mol_type = other RNA
tgaggtagtaggctgtgtggt

SEQ ID NO: 49422 - RNA, 36 nt, Synthetic Construct; identical to SEQ ID NO: 2344
  source 1..36: mol_type = other RNA

SEQ ID NO: 49423 - RNA, 36 nt, Synthetic Construct; identical to SEQ ID NO: 2344
  source 1..36: mol_type = other RNA

SEQ ID NO: 49424 - RNA, 32 nt, Synthetic Construct; identical to SEQ ID NO: 2582
  source 1..32: mol_type = other RNA

SEQ ID NO: 49425 - RNA, 32 nt, Synthetic Construct; identical to SEQ ID NO: 2582
  source 1..32: mol_type = other RNA

SEQ ID NO: 49426 - RNA, 32 nt, Synthetic Construct; identical to SEQ ID NO: 4710
  source 1..32: mol_type = other RNA

SEQ ID NO: 49427 - RNA, 16 nt, Synthetic Construct
  source 1..16: mol_type = other RNA
gtctacggctatacca

SEQ ID NO: 49428 - RNA, 23 nt, Synthetic Construct
  source 1..23: mol_type = other RNA
tgaggggcagagagcgggacttt

SEQ ID NO: 49429 - RNA, 23 nt, Synthetic Construct
  source 1..23: mol_type = other RNA
tgaggggcagagagcgggacttt

SEQ ID NO: 49430 - RNA, 20 nt, Synthetic Construct
  source 1..20: mol_type = other RNA
cgaggtagtaggttgtgtgg

SEQ ID NO: 49431 - RNA, 20 nt, Synthetic Construct
  source 1..20: mol_type = other RNA
cgaggtagtaggttgtgtgg

SEQ ID NO: 49432 - RNA, 20 nt, Synthetic Construct
  source 1..20: mol_type = other RNA
ccttggggttgtaggaccac

SEQ ID NO: 49433 - RNA, 20 nt, Synthetic Construct
  source 1..20: mol_type = other RNA
ccttggggttgtaggaccac

SEQ ID NO: 49434 - RNA, 20 nt, Synthetic Construct
  source 1..20: mol_type = other RNA
ccgcagagtacagcttggga

SEQ ID NO: 49435 - RNA, 17 nt, Synthetic Construct
  source 1..17: mol_type = other RNA
tgccagcagccgcggta

SEQ ID NO: 49436 - RNA, 17 nt, Synthetic Construct
  source 1..17: mol_type = other RNA
tgccagcagccgcggta

SEQ ID NO: 49437 - RNA, 21 nt, Synthetic Construct
  source 1..21: mol_type = other RNA
tgaggtggtaggttgtatagt

SEQ ID NO: 49438 - RNA, 21 nt, Synthetic Construct
  source 1..21: mol_type = other RNA
tgaggtggtaggttgtatagt

SEQ ID NO: 49439 - RNA, 22 nt, Synthetic Construct
  source 1..22: mol_type = other RNA
ggcagggttcgtgactggggtg

SEQ ID NO: 49440 - RNA, 22 nt, Synthetic Construct
  source 1..22: mol_type = other RNA
ggcagggttcgtgactggggtg

SEQ ID NO: 49441 - RNA, 26 nt, Synthetic Construct
  source 1..26: mol_type = other RNA
gcataagcgtgcttgactgcgagact

SEQ ID NO: 49442 - RNA, 23 nt, Synthetic Construct
  source 1..23: mol_type = other RNA
aggtaatacgacgtacttagtgt

SEQ ID NO: 49443 - RNA, 23 nt, Synthetic Construct
  source 1..23: mol_type = other RNA
aggtaatacgacgtacttagtgt

SEQ ID NO: 49444 - RNA, 15 nt, Synthetic Construct
  source 1..15: mol_type = other RNA
cgccatttaaagagg

SEQ ID NO: 49445 - RNA, 22 nt, Synthetic Construct
  source 1..22: mol_type = other RNA
tgaggtagtagtttgtgctgtg

SEQ ID NO: 49446 - RNA, 33 nt, Synthetic Construct; identical to SEQ ID NO: 2266
  source 1..33: mol_type = other RNA

SEQ ID NO: 49447 - RNA, 33 nt, Synthetic Construct; identical to SEQ ID NO: 2266
  source 1..33: mol_type = other RNA

SEQ ID NO: 49448 - RNA, 23 nt, Synthetic Construct
  source 1..23: mol_type = other RNA
caaagtgctgttcgtgtaggtag

SEQ ID NO: 49449 - RNA, 23 nt, Synthetic Construct
  source 1..23: mol_type = other RNA
caaagtgctgttcgtgtaggtag

SEQ ID NO: 49450 - RNA, 36 nt, Synthetic Construct; identical to SEQ ID NO: 2366
  source 1..36: mol_type = other RNA

SEQ ID NO: 49451 - RNA, 23 nt, Synthetic Construct
  source 1..23: mol_type = other RNA
agcagcattgcacagggctatga

SEQ ID NO: 49452 - RNA, 23 nt, Synthetic Construct
  source 1..23: mol_type = other RNA
agcagcattgcacagggctatga

SEQ ID NO: 49453 - RNA, 21 nt, Synthetic Construct
  source 1..21: mol_type = other RNA
tcctatactgagctgccccga

SEQ ID NO: 49454 - RNA, 21 nt, Synthetic Construct
  source 1..21: mol_type = other RNA
tcctatactgagctgccccga

SEQ ID NO: 49455 - RNA, 22 nt, Synthetic Construct
  source 1..22: mol_type = other RNA
tgaggtagtaggttgtggggtt

SEQ ID NO: 49456 - RNA, 28 nt, Synthetic Construct
  source 1..28: mol_type = other RNA
ccccccactgctaaatttggctggcttt

SEQ ID NO: 49457 - RNA, 28 nt, Synthetic Construct
  source 1..28: mol_type = other RNA
ccccccactgctaaatttggctggcttt

SEQ ID NO: 49458 - RNA, 37 nt, Synthetic Construct; identical to SEQ ID NO: 2211
  source 1..37: mol_type = other RNA

SEQ ID NO: 49459 - RNA, 21 nt, Synthetic Construct
  source 1..21: mol_type = other RNA
atcacattgccagggatttcc

SEQ ID NO: 49460 - RNA, 27 nt, Synthetic Construct
  source 1..27: mol_type = other RNA
gttggttcaagcgtgtagtcgtgctct

SEQ ID NO: 49461 - RNA, 27 nt, Synthetic Construct
  source 1..27: mol_type = other RNA
gttggttcaagcgtgtagtcgtgctct

SEQ ID NO: 49462 - RNA, 33 nt, Synthetic Construct; identical to SEQ ID NO: 2395
  source 1..33: mol_type = other RNA

SEQ ID NO: 49463 - RNA, 33 nt, Synthetic Construct; identical to SEQ ID NO: 2395
  source 1..33: mol_type = other RNA

SEQ ID NO: 49464 - RNA, 22 nt, Synthetic Construct
  source 1..22: mol_type = other RNA
tgaggtagtaggttgcgtggtt

SEQ ID NO: 49465 - RNA, 22 nt, Synthetic Construct
  source 1..22: mol_type = other RNA
tgaggtagtaggttgcgtggtt

SEQ ID NO: 49466 - RNA, 23 nt, Synthetic Construct
  source 1..23: mol_type = other RNA
caaagtgctgtccgtgcaggtag

SEQ ID NO: 49467 - RNA, 23 nt, Synthetic Construct
  source 1..23: mol_type = other RNA
caaagtgctgtccgtgcaggtag

SEQ ID NO: 49468 - RNA, 18 nt, Synthetic Construct
  source 1..18: mol_type = other RNA
agcagcattgtacagggc

SEQ ID NO: 49469 - RNA, 18 nt, Synthetic Construct
  source 1..18: mol_type = other RNA
agcagcattgtacagggc

SEQ ID NO: 49470 - RNA, 17 nt, Synthetic Construct
  source 1..17: mol_type = other RNA
tggccgggacagagggc

SEQ ID NO: 49471 - RNA, 23 nt, Synthetic Construct
  source 1..23: mol_type = other RNA
tcccgtactgagctgccccgagt

SEQ ID NO: 49472 - RNA, 23 nt, Synthetic Construct
  source 1..23: mol_type = other RNA
tcccgtactgagctgccccgagt

SEQ ID NO: 49473 - RNA, 20 nt, Synthetic Construct
  source 1..20: mol_type = other RNA
tgaagtagtaggttgtgtgg

SEQ ID NO: 49474 - RNA, 20 nt, Synthetic Construct
  source 1..20: mol_type = other RNA
tgaagtagtaggttgtgtgg

SEQ ID NO: 49475 - RNA, 15 nt, Synthetic Construct
  source 1..15: mol_type = other RNA
gctttgatccggaga

SEQ ID NO: 49476 - RNA, 15 nt, Synthetic Construct
  source 1..15: mol_type = other RNA
gctttgatccggaga

SEQ ID NO: 49477 - RNA, 24 nt, Synthetic Construct
  source 1..24: mol_type = other RNA
tcctgtactgagctgccccgagtt

SEQ ID NO: 49478 - RNA, 24 nt, Synthetic Construct
  source 1..24: mol_type = other RNA
tcctgtactgagctgccccgagtt

SEQ ID NO: 49479 - RNA, 30 nt, Synthetic Construct; identical to SEQ ID NO: 2578
  source 1..30: mol_type = other RNA

SEQ ID NO: 49480 - RNA, 30 nt, Synthetic Construct; identical to SEQ ID NO: 2578
  source 1..30: mol_type = other RNA

SEQ ID NO: 49481 - RNA, 24 nt, Synthetic Construct
  source 1..24: mol_type = other RNA
gatgaggcgtgataacgagtctgc

SEQ ID NO: 49482 - RNA, 24 nt, Synthetic Construct
  source 1..24: mol_type = other RNA
gatgaggcgtgataacgagtctgc

SEQ ID NO: 49483 - RNA, 21 nt, Synthetic Construct
  source 1..21: mol_type = other RNA
attagtgacgcgcatgaatgg

SEQ ID NO: 49484 - RNA, 21 nt, Synthetic Construct
  source 1..21: mol_type = other RNA
attagtgacgcgcatgaatgg

SEQ ID NO: 49485 - RNA, 26 nt, Synthetic Construct
  source 1..26: mol_type = other RNA
aatgacacgatcactcccgttgagtt

SEQ ID NO: 49486 - RNA, 26 nt, Synthetic Construct
  source 1..26: mol_type = other RNA
aatgacacgatcactcccgttgagtt

SEQ ID NO: 49487 - RNA, 31 nt, Synthetic Construct; identical to SEQ ID NO: 2412
  source 1..31: mol_type = other RNA

SEQ ID NO: 49488 - RNA, 33 nt, Synthetic Construct; identical to SEQ ID NO: 4947
  source 1..33: mol_type = other RNA

SEQ ID NO: 49489 - RNA, 33 nt, Synthetic Construct; identical to SEQ ID NO: 4947
  source 1..33: mol_type = other RNA

SEQ ID NO: 49490 - RNA, 22 nt, Synthetic Construct
  source 1..22: mol_type = other RNA
cattgcgcttgtctcggtctga

SEQ ID NO: 49491 - RNA, 22 nt, Synthetic Construct
  source 1..22: mol_type = other RNA
cattgcgcttgtctcggtctga

SEQ ID NO: 49492 - RNA, 32 nt, Synthetic Construct; identical to SEQ ID NO: 4734
  source 1..32: mol_type = other RNA

SEQ ID NO: 49493 - RNA, 32 nt, Synthetic Construct; identical to SEQ ID NO: 4734
  source 1..32: mol_type = other RNA

SEQ ID NO: 49494 - RNA, 22 nt, Synthetic Construct
  source 1..22: mol_type = other RNA
tgagaactgaattccatgggtc

SEQ ID NO: 49495 - RNA, 22 nt, Synthetic Construct
  source 1..22: mol_type = other RNA
tgagaactgaattccatgggtc

SEQ ID NO: 49496 - RNA, 20 nt, Synthetic Construct
  source 1..20: mol_type = other RNA
aaaccgttaccattactgag

SEQ ID NO: 49497 - RNA, 20 nt, Synthetic Construct
  source 1..20: mol_type = other RNA
aaaccgttaccattactgag

SEQ ID NO: 49498 - RNA, 23 nt, Synthetic Construct
  source 1..23: mol_type = other RNA
cgactcttagcggtggatcactc

SEQ ID NO: 49499 - RNA, 23 nt, Synthetic Construct
  source 1..23: mol_type = other RNA
cgactcttagcggtggatcactc

SEQ ID NO: 49500 - RNA, 16 nt, Synthetic Construct
  source 1..16: mol_type = other RNA
gtctgcggccatacca

SEQ ID NO: 49501 - RNA, 16 nt, Synthetic Construct
  source 1..16: mol_type = other RNA
gtctgcggccatacca

SEQ ID NO: 49502 - RNA, 23 nt, Synthetic Construct
  source 1..23: mol_type = other RNA
tggtaatacgacgtactaagtgt

SEQ ID NO: 49503 - RNA, 23 nt, Synthetic Construct
  source 1..23: mol_type = other RNA
tggtaatacgacgtactaagtgt

SEQ ID NO: 49504 - RNA, 16 nt, Synthetic Construct
  source 1..16: mol_type = other RNA
cccctggacctgtact

SEQ ID NO: 49505 - RNA, 23 nt, Synthetic Construct
  source 1..23: mol_type = other RNA
tgaggtagtaggtcgtgtggttt

SEQ ID NO: 49506 - RNA, 27 nt, Synthetic Construct
  source 1..27: mol_type = other RNA
tcccccactgctaaatttgactggctt

SEQ ID NO: 49507 - RNA, 17 nt, Synthetic Construct
  source 1..17: mol_type = other RNA
taggtcatcgtcaggct

SEQ ID NO: 49508 - RNA, 27 nt, Synthetic Construct
  source 1..27: mol_type = other RNA
catgcgagagtaggacgttgccaggtt

SEQ ID NO: 49509 - RNA, 27 nt, Synthetic Construct
  source 1..27: mol_type = other RNA
catgcgagagtaggacgttgccaggtt

SEQ ID NO: 49510 - RNA, 22 nt, Synthetic Construct
  source 1..22: mol_type = other RNA
aggttccggataagtaagagcc

SEQ ID NO: 49511 - RNA, 22 nt, Synthetic Construct
  source 1..22: mol_type = other RNA
aggttccggataagtaagagcc

SEQ ID NO: 49512 - RNA, 15 nt, Synthetic Construct
  source 1..15: mol_type = other RNA
gtcgacgtatagggt

SEQ ID NO: 49513 - RNA, 15 nt, Synthetic Construct
  source 1..15: mol_type = other RNA
gtcgacgtatagggt

SEQ ID NO: 49514 - RNA, 22 nt, Synthetic Construct
  source 1..22: mol_type = other RNA
tgaggtagcaggttgtgtggtt

SEQ ID NO: 49515 - RNA, 17 nt, Synthetic Construct
  source 1..17: mol_type = other RNA
cccctggacctgtactg

SEQ ID NO: 49516 - RNA, 17 nt, Synthetic Construct
  source 1..17: mol_type = other RNA
cccctggacctgtactg

SEQ ID NO: 49517 - RNA, 22 nt, Synthetic Construct
  source 1..22: mol_type = other RNA
tccttcattccaccggagtctg

SEQ ID NO: 49518 - RNA, 22 nt, Synthetic Construct
  source 1..22: mol_type = other RNA
tccttcattccaccggagtctg

SEQ ID NO: 49519 - RNA, 22 nt, Synthetic Construct
  source 1..22: mol_type = other RNA
tgaggtagtagtttgtgctgta

SEQ ID NO: 49520 - RNA, 22 nt, Synthetic Construct
  source 1..22: mol_type = other RNA
tgaggtagtagtttgtgctgta

SEQ ID NO: 49521 - RNA, 22 nt, Synthetic Construct
  source 1..22: mol_type = other RNA
tcgtaccgtgagtaataacgcg

SEQ ID NO: 49522 - RNA, 22 nt, Synthetic Construct
  source 1..22: mol_type = other RNA
tcgtaccgtgagtaataacgcg

SEQ ID NO: 49523 - RNA, 22 nt, Synthetic Construct
  source 1..22: mol_type = other RNA
tatcgcacttgtcccggcctgt

SEQ ID NO: 49524 - RNA, 16 nt, Synthetic Construct
  source 1..16: mol_type = other RNA
ccatgccgcgtgcggg

SEQ ID NO: 49525 - RNA, 35 nt, Synthetic Construct; identical to SEQ ID NO: 2399
  source 1..35: mol_type = other RNA

SEQ ID NO: 49526 - RNA, 23 nt, Synthetic Construct
  source 1..23: mol_type = other RNA
caaagaattctccttttgggctt

SEQ ID NO: 49527 - RNA, 33 nt, Synthetic Construct; identical to SEQ ID NO: 9568
  source 1..33: mol_type = other RNA

SEQ ID NO: 49528 - RNA, 33 nt, Synthetic Construct; identical to SEQ ID NO: 9568
  source 1..33: mol_type = other RNA

SEQ ID NO: 49529 - RNA, 23 nt, Synthetic Construct
  source 1..23: mol_type = other RNA
tgaggggcagggagcgagacttt

SEQ ID NO: 49530 - RNA, 23 nt, Synthetic Construct
  source 1..23: mol_type = other RNA
gggtaatacgacgtacttagtgt

SEQ ID NO: 49531 - RNA, 23 nt, Synthetic Construct
  source 1..23: mol_type = other RNA
gggtaatacgacgtacttagtgt

SEQ ID NO: 49532 - RNA, 22 nt, Synthetic Construct
  source 1..22: mol_type = other RNA
cccagtgttcagactacctgtt

SEQ ID NO: 49533 - RNA, 22 nt, Synthetic Construct
  source 1..22: mol_type = other RNA
cccagtgttcagactacctgtt

SEQ ID NO: 49534 - RNA, 20 nt, Synthetic Construct
  source 1..20: mol_type = other RNA
gccatcatttaaagaaagcg

SEQ ID NO: 49535 - RNA, 20 nt, Synthetic Construct
  source 1..20: mol_type = other RNA
gccatcatttaaagaaagcg

SEQ ID NO: 49536 - RNA, 25 nt, Synthetic Construct
  source 1..25: mol_type = other RNA
gcgccgctggtgtagtggtatcatg

SEQ ID NO: 49537 - RNA, 25 nt, Synthetic Construct
  source 1..25: mol_type = other RNA
gcgccgctggtgtagtggtatcatg

SEQ ID NO: 49538 - RNA, 16 nt, Synthetic Construct
  source 1..16: mol_type = other RNA
tgcgtagatatgcgga

SEQ ID NO: 49539 - RNA, 37 nt, Synthetic Construct; identical to SEQ ID NO: 7503
  source 1..37: mol_type = other RNA

SEQ ID NO: 49540 - RNA, 37 nt, Synthetic Construct; identical to SEQ ID NO: 7503
  source 1..37: mol_type = other RNA

SEQ ID NO: 49541 - RNA, 22 nt, Synthetic Construct
  source 1..22: mol_type = other RNA
tctttggttatctagctgtatg

SEQ ID NO: 49542 - RNA, 22 nt, Synthetic Construct
  source 1..22: mol_type = other RNA
tctttggttatctagctgtatg

SEQ ID NO: 49543 - RNA, 22 nt, Synthetic Construct
  source 1..22: mol_type = other RNA
cgactggtaactgggatgaagt

SEQ ID NO: 49544 - RNA, 22 nt, Synthetic Construct
  source 1..22: mol_type = other RNA
cgactggtaactgggatgaagt

SEQ ID NO: 49545 - RNA, 23 nt, Synthetic Construct
  source 1..23: mol_type = other RNA
tggcagtgtcttagctggttgtt

SEQ ID NO: 49546 - RNA, 23 nt, Synthetic Construct
  source 1..23: mol_type = other RNA
tggcagtgtcttagctggttgtt

SEQ ID NO: 49547 - RNA, 30 nt, Synthetic Construct; identical to SEQ ID NO: 3933
  source 1..30: mol_type = other RNA

SEQ ID NO: 49548 - RNA, 30 nt, Synthetic Construct; identical to SEQ ID NO: 3933
  source 1..30: mol_type = other RNA

SEQ ID NO: 49549 - RNA, 22 nt, Synthetic Construct
  source 1..22: mol_type = other RNA
tcgtactgtgagtaataatgcg

SEQ ID NO: 49550 - RNA, 21 nt, Synthetic Construct
  source 1..21: mol_type = other RNA
tgaggtagtagtttgcgctgt

SEQ ID NO: 49551 - RNA, 21 nt, Synthetic Construct
  source 1..21: mol_type = other RNA
tgaggtagtagtttgcgctgt

SEQ ID NO: 49552 - RNA, 23 nt, Synthetic Construct
  source 1..23: mol_type = other RNA
tgaggggcagagagcgagacttc

SEQ ID NO: 49553 - RNA, 22 nt, Synthetic Construct
  source 1..22: mol_type = other RNA
ttctgtactgagctgccccgag

SEQ ID NO: 49554 - RNA, 16 nt, Synthetic Construct
  source 1..16: mol_type = other RNA
cccaaaggtcgtcggt

SEQ ID NO: 49555 - RNA, 34 nt, Synthetic Construct; identical to SEQ ID NO: 2529
  source 1..34: mol_type = other RNA

SEQ ID NO: 49556 - RNA, 22 nt, Synthetic Construct
  source 1..22: mol_type = other RNA
tcgcaccgtgagtaataatgcg

SEQ ID NO: 49557 - RNA, 22 nt, Synthetic Construct
  source 1..22: mol_type = other RNA
tcgcaccgtgagtaataatgcg

SEQ ID NO: 49558 - RNA, 17 nt, Synthetic Construct
  source 1..17: mol_type = other RNA
tggccgggacagagggc

SEQ ID NO: 49559 - RNA, 17 nt, Synthetic Construct
  source 1..17: mol_type = other RNA
tggccgggacagagggc

SEQ ID NO: 49560 - RNA, 25 nt, Synthetic Construct
  source 1..25: mol_type = other RNA
ctgaggatatgagatcgagacgaca

SEQ ID NO: 49561 - RNA, 22 nt, Synthetic Construct
  source 1..22: mol_type = other RNA
tctttgttcgattccgttgagt

SEQ ID NO: 49562 - RNA, 22 nt, Synthetic Construct
  source 1..22: mol_type = other RNA
tgaggtagtaggttgtgtggtt

SEQ ID NO: 49563 - RNA, 24 nt, Synthetic Construct
  source 1..24: mol_type = other RNA
tcggctcatctcatcctggggctg

SEQ ID NO: 49564 - RNA, 24 nt, Synthetic Construct
  source 1..24: mol_type = other RNA
tcggctcatctcatcctggggctg

SEQ ID NO: 49565 - RNA, 19 nt, Synthetic Construct
  source 1..19: mol_type = other RNA
aggacagtgaaacgagtca

SEQ ID NO: 49566 - RNA, 27 nt, Synthetic Construct
  source 1..27: mol_type = other RNA
ccccccactgctaaatttgactggcct

SEQ ID NO: 49567 - RNA, 27 nt, Synthetic Construct
  source 1..27: mol_type = other RNA
ccccccactgctaaatttgactggcct

SEQ ID NO: 49568 - RNA, 33 nt, Synthetic Construct; identical to SEQ ID NO: 1982
  source 1..33: mol_type = other RNA

SEQ ID NO: 49569 - RNA, 19 nt, Synthetic Construct
  source 1..19: mol_type = other RNA
aacagtcaggatgttggct

SEQ ID NO: 49570 - RNA, 20 nt, Synthetic Construct
  source 1..20: mol_type = other RNA
tgagatagtaggttgtgtgg

SEQ ID NO: 49571 - RNA, 20 nt, Synthetic Construct
  source 1..20: mol_type = other RNA
tgagatagtaggttgtgtgg

SEQ ID NO: 49572 - RNA, 22 nt, Synthetic Construct
  source 1..22: mol_type = other RNA
agggctgggtcggtcgggctgg

SEQ ID NO: 49573 - RNA, 22 nt, Synthetic Construct
  source 1..22: mol_type = other RNA
agggctgggtcggtcgggctgg

SEQ ID NO: 49574 - RNA, 21 nt, Synthetic Construct
  source 1..21: mol_type = other RNA
tgaggtagtaggttgtgcggt

SEQ ID NO: 49575 - RNA, 21 nt, Synthetic Construct
  source 1..21: mol_type = other RNA
tgaggtagtaggttgtgcggt

SEQ ID NO: 49576 - RNA, 16 nt, Synthetic Construct
  source 1..16: mol_type = other RNA
aggtcatcgtcaggct

SEQ ID NO: 49577 - RNA, 21 nt, Synthetic Construct
  source 1..21: mol_type = other RNA
tgaggtagtagattgtatagc

SEQ ID NO: 49578 - RNA, 16 nt, Synthetic Construct
  source 1..16: mol_type = other RNA
ggccgttcttagttgg

SEQ ID NO: 49579 - RNA, 30 nt, Synthetic Construct; identical to SEQ ID NO: 751
  source 1..30: mol_type = other RNA

SEQ ID NO: 49580 - RNA, 30 nt, Synthetic Construct; identical to SEQ ID NO: 751
  source 1..30: mol_type = other RNA

SEQ ID NO: 49581 - RNA, 24 nt, Synthetic Construct
  source 1..24: mol_type = other RNA
tgtaaacatccccgactggaggct

SEQ ID NO: 49582 - RNA, 24 nt, Synthetic Construct
  source 1..24: mol_type = other RNA
tgtaaacatccccgactggaggct

SEQ ID NO: 49583 - RNA, 22 nt, Synthetic Construct
  source 1..22: mol_type = other RNA
tgaggtagtagtctgtgctgtt

SEQ ID NO: 49584 - RNA, 22 nt, Synthetic Construct
  source 1..22: mol_type = other RNA
tgaggtagtagtctgtgctgtt

SEQ ID NO: 49585 - RNA, 22 nt, Synthetic Construct
  source 1..22: mol_type = other RNA
tgaggtagtaaattgtatagtt

SEQ ID NO: 49586 - RNA, 27 nt, Synthetic Construct
  source 1..27: mol_type = other RNA
ccccccactgctaaatttaactggctt

SEQ ID NO: 49587 - RNA, 27 nt, Synthetic Construct
  source 1..27: mol_type = other RNA
ccccccactgctaaatttaactggctt

SEQ ID NO: 49588 - RNA, 27 nt, Synthetic Construct
  source 1..27: mol_type = other RNA
ccccccactgccaaatttgactggctt

SEQ ID NO: 49589 - RNA, 27 nt, Synthetic Construct
  source 1..27: mol_type = other RNA
ccccccactgccaaatttgactggctt

SEQ ID NO: 49590 - RNA, 37 nt, Synthetic Construct; identical to SEQ ID NO: 2482
  source 1..37: mol_type = other RNA

SEQ ID NO: 49591 - RNA, 37 nt, Synthetic Construct; identical to SEQ ID NO: 2482
  source 1..37: mol_type = other RNA

SEQ ID NO: 49592 - RNA, 23 nt, Synthetic Construct
  source 1..23: mol_type = other RNA
cgaggggcagagagcgagacttt

SEQ ID NO: 49593 - RNA, 23 nt, Synthetic Construct
  source 1..23: mol_type = other RNA
cgaggggcagagagcgagacttt

SEQ ID NO: 49594 - RNA, 22 nt, Synthetic Construct
  source 1..22: mol_type = other RNA
tgaggtggtaggttgtgtggtt

SEQ ID NO: 49595 - RNA, 22 nt, Synthetic Construct
  source 1..22: mol_type = other RNA
tgaggtggtaggttgtgtggtt

SEQ ID NO: 49596 - RNA, 22 nt, Synthetic Construct
  source 1..22: mol_type = other RNA
tcctgtactgtgctgccccgag

SEQ ID NO: 49597 - RNA, 23 nt, Synthetic Construct
  source 1..23: mol_type = other RNA
tacagtagtctgcacattggttt

SEQ ID NO: 49598 - RNA, 23 nt, Synthetic Construct
  source 1..23: mol_type = other RNA
tgggctaagggagatgattgggt

SEQ ID NO: 49599 - RNA, 16 nt, Synthetic Construct
  source 1..16: mol_type = other RNA
gtctacgaccatacca

SEQ ID NO: 49600 - RNA, 22 nt, Synthetic Construct
  source 1..22: mol_type = other RNA
aggttccggataagtaagagcc

SEQ ID NO: 49601 - RNA, 22 nt, Synthetic Construct
  source 1..22: mol_type = other RNA
aggttccggataagtaagagcc

SEQ ID NO: 49602 - RNA, 23 nt, Synthetic Construct
  source 1..23: mol_type = other RNA
tgaggggtagagagcgagacttt

SEQ ID NO: 49603 - RNA, 18 nt, Synthetic Construct
  source 1..18: mol_type = other RNA
atggccgggacagagggc

SEQ ID NO: 49604 - RNA, 18 nt, Synthetic Construct
  source 1..18: mol_type = other RNA
atggccgggacagagggc

SEQ ID NO: 49605 - RNA, 19 nt, Synthetic Construct
  source 1..19: mol_type = other RNA
ctgatcgagtcgtcctgcg

SEQ ID NO: 49606 - RNA, 19 nt, Synthetic Construct
  source 1..19: mol_type = other RNA
ctgatcgagtcgtcctgcg

SEQ ID NO: 49607 - RNA, 32 nt, Synthetic Construct; identical to SEQ ID NO: 4279
  source 1..32: mol_type = other RNA

SEQ ID NO: 49608 - RNA, 22 nt, Synthetic Construct
  source 1..22: mol_type = other RNA
tgaggtagtaggtcgtgtggtt

SEQ ID NO: 49609 - RNA, 22 nt, Synthetic Construct
  source 1..22: mol_type = other RNA
tgaggtagtaggtcgtgtggtt

SEQ ID NO: 49610 - RNA, 22 nt, Synthetic Construct
  source 1..22: mol_type = other RNA
tcgtaccgtgagtaacaatgcg

SEQ ID NO: 49611 - RNA, 15 nt, Synthetic Construct
  source 1..15: mol_type = other RNA
catgccgcgtgcggg

SEQ ID NO: 49612 - RNA, 22 nt, Synthetic Construct
  source 1..22: mol_type = other RNA
tggaatgtaaagaggtatgtat

SEQ ID NO: 49613 - RNA, 22 nt, Synthetic Construct
  source 1..22: mol_type = other RNA
tggaatgtaaagaggtatgtat

SEQ ID NO: 49614 - RNA, 20 nt, Synthetic Construct
  source 1..20: mol_type = other RNA
tgaggtagtaggctgtgtgg

SEQ ID NO: 49615 - RNA, 20 nt, Synthetic Construct
  source 1..20: mol_type = other RNA
tgaggtagtaggctgtgtgg

SEQ ID NO: 49616 - RNA, 23 nt, Synthetic Construct
  source 1..23: mol_type = other RNA
tcctgtactgagccgccccgagt

SEQ ID NO: 49617 - RNA, 23 nt, Synthetic Construct
  source 1..23: mol_type = other RNA
tcctgtactgagccgccccgagt

SEQ ID NO: 49618 - RNA, 16 nt, Synthetic Construct
  source 1..16: mol_type = other RNA
gtcgacgtatagggtg

SEQ ID NO: 49619 - RNA, 16 nt, Synthetic Construct
  source 1..16: mol_type = other RNA
gtcgacgtatagggtg

SEQ ID NO: 49620 - RNA, 21 nt, Synthetic Construct
  source 1..21: mol_type = other RNA
gtgggcgtttgaagtgaagtg

SEQ ID NO: 49621 - RNA, 23 nt, Synthetic Construct
  source 1..23: mol_type = other RNA
cgctcacggaaagagaatgaagc

SEQ ID NO: 49622 - RNA, 22 nt, Synthetic Construct
  source 1..22: mol_type = other RNA
tgaagtagtagtttgtgctgtt

SEQ ID NO: 49623 - RNA, 22 nt, Synthetic Construct
  source 1..22: mol_type = other RNA
tgaagtagtagtttgtgctgtt

SEQ ID NO: 49624 - RNA, 16 nt, Synthetic Construct
  source 1..16: mol_type = other RNA
tggccgtcgtcagctc

SEQ ID NO: 49625 - RNA, 16 nt, Synthetic Construct
  source 1..16: mol_type = other RNA
tggccgtcgtcagctc

SEQ ID NO: 49626 - RNA, 15 nt, Synthetic Construct
  source 1..15: mol_type = other RNA
ccagaaacccggtcg

SEQ ID NO: 49627 - RNA, 22 nt, Synthetic Construct
  source 1..22: mol_type = other RNA
atataatacaacctgctaagtg

SEQ ID NO: 49628 - RNA, 22 nt, Synthetic Construct
  source 1..22: mol_type = other RNA
atataatacaacctgctaagtg

SEQ ID NO: 49629 - RNA, 22 nt, Synthetic Construct
  source 1..22: mol_type = other RNA
tgaggtagtagattgtatagtc

SEQ ID NO: 49630 - RNA, 35 nt, Synthetic Construct; identical to SEQ ID NO: 10694
  source 1..35: mol_type = other RNA

SEQ ID NO: 49631 - RNA, 35 nt, Synthetic Construct; identical to SEQ ID NO: 10694
  source 1..35: mol_type = other RNA

SEQ ID NO: 49632 - RNA, 24 nt, Synthetic Construct
  source 1..24: mol_type = other RNA
tgtaaacgtccccgactggaagct

SEQ ID NO: 49633 - RNA, 20 nt, Synthetic Construct
  source 1..20: mol_type = other RNA
tgaggaagtaggttgtatag

SEQ ID NO: 49634 - RNA, 22 nt, Synthetic Construct
  source 1..22: mol_type = other RNA
tgaggtagtagttcgtgctgtt

SEQ ID NO: 49635 - RNA, 22 nt, Synthetic Construct
  source 1..22: mol_type = other RNA
tgaggtagtagttcgtgctgtt

SEQ ID NO: 49636 - RNA, 24 nt, Synthetic Construct
  source 1..24: mol_type = other RNA
tgcaaacatccccgactggaagct

SEQ ID NO: 49637 - RNA, 23 nt, Synthetic Construct
  source 1..23: mol_type = other RNA
taaggggcagagagcgagacttt

SEQ ID NO: 49638 - RNA, 21 nt, Synthetic Construct
  source 1..21: mol_type = other RNA
tgagaactgaattccatgggt

SEQ ID NO: 49639 - RNA, 20 nt, Synthetic Construct
  source 1..20: mol_type = other RNA
tgaggtagtaggttgcgtgg

SEQ ID NO: 49640 - RNA, 20 nt, Synthetic Construct
  source 1..20: mol_type = other RNA
tgaggtagtaggttgcgtgg

SEQ ID NO: 49641 - RNA, 22 nt, Synthetic Construct
  source 1..22: mol_type = other RNA
tctttggttatctagctgtatg

SEQ ID NO: 49642 - RNA, 22 nt, Synthetic Construct
  source 1..22: mol_type = other RNA
tctttggttatctagctgtatg

SEQ ID NO: 49643 - RNA, 17 nt, Synthetic Construct
  source 1..17: mol_type = other RNA
accaaggggtcgtgggt

SEQ ID NO: 49644 - RNA, 21 nt, Synthetic Construct
  source 1..21: mol_type = other RNA
cccataaagtagaaagcacta

SEQ ID NO: 49645 - RNA, 21 nt, Synthetic Construct
  source 1..21: mol_type = other RNA
cccataaagtagaaagcacta

SEQ ID NO: 49646 - RNA, 15 nt, Synthetic Construct
  source 1..15: mol_type = other RNA
gtcgtcctgcgcgga

SEQ ID NO: 49647 - RNA, 23 nt, Synthetic Construct
  source 1..23: mol_type = other RNA
tgaggagcagagagcgagacttt

SEQ ID NO: 49648 - RNA, 23 nt, Synthetic Construct
  source 1..23: mol_type = other RNA
tgaggagcagagagcgagacttt

SEQ ID NO: 49649 - RNA, 35 nt, Synthetic Construct; identical to SEQ ID NO: 2354
  source 1..35: mol_type = other RNA

SEQ ID NO: 49650 - RNA, 35 nt, Synthetic Construct; identical to SEQ ID NO: 2354
  source 1..35: mol_type = other RNA

SEQ ID NO: 49651 - RNA, 23 nt, Synthetic Construct
  source 1..23: mol_type = other RNA
tgtgcaaatctatgcaaaactga

SEQ ID NO: 49652 - RNA, 23 nt, Synthetic Construct
  source 1..23: mol_type = other RNA
tgtgcaaatctatgcaaaactga

SEQ ID NO: 49653 - RNA, 21 nt, Synthetic Construct
  source 1..21: mol_type = other RNA
tggaatgtaaagaagtatgta

SEQ ID NO: 49654 - RNA, 21 nt, Synthetic Construct
  source 1..21: mol_type = other RNA
tggaatgtaaagaagtatgta

SEQ ID NO: 49655 - RNA, 34 nt, Synthetic Construct; identical to SEQ ID NO: 2367
  source 1..34: mol_type = other RNA

SEQ ID NO: 49656 - RNA, 23 nt, Synthetic Construct
  source 1..23: mol_type = other RNA
tgaggggcagagagcaagacttt

SEQ ID NO: 49657 - RNA, 33 nt, Synthetic Construct; identical to SEQ ID NO: 2395
  source 1..33: mol_type = other RNA

SEQ ID NO: 49658 - RNA, 22 nt, Synthetic Construct
  source 1..22: mol_type = other RNA
tattgcacttgccccggcctgt

SEQ ID NO: 49659 - RNA, 22 nt, Synthetic Construct
  source 1..22: mol_type = other RNA
tattgcacttgccccggcctgt

SEQ ID NO: 49660 - RNA, 22 nt, Synthetic Construct
  source 1..22: mol_type = other RNA
tgtgcaaatctatgcaaaactg

SEQ ID NO: 49661 - RNA, 22 nt, Synthetic Construct
  source 1..22: mol_type = other RNA
tgtgcaaatctatgcaaaactg

SEQ ID NO: 49662 - RNA, 15 nt, Synthetic Construct
  source 1..15: mol_type = other RNA
gtccggcccgaggca

SEQ ID NO: 49663 - RNA, 15 nt, Synthetic Construct
  source 1..15: mol_type = other RNA
gtccggcccgaggca

SEQ ID NO: 49664 - RNA, 24 nt, Synthetic Construct
  source 1..24: mol_type = other RNA
tgtaaacatccccgactggaagcc

SEQ ID NO: 49665 - RNA, 34 nt, Synthetic Construct; identical to SEQ ID NO: 2265
  source 1..34: mol_type = other RNA

SEQ ID NO: 49666 - RNA, 22 nt, Synthetic Construct
  source 1..22: mol_type = other RNA
tggaatgtaaagaagcatgtat

SEQ ID NO: 49667 - RNA, 22 nt, Synthetic Construct
  source 1..22: mol_type = other RNA
tggaatgtaaagaagcatgtat

SEQ ID NO: 49668 - RNA, 25 nt, Synthetic Construct
  source 1..25: mol_type = other RNA
atgaggatatgagatcgagacgaca

SEQ ID NO: 49669 - RNA, 25 nt, Synthetic Construct
  source 1..25: mol_type = other RNA
atgaggatatgagatcgagacgaca

SEQ ID NO: 49670 - RNA, 20 nt, Synthetic Construct
  source 1..20: mol_type = other RNA
tgaggtaggaggttgtatag

SEQ ID NO: 49671 - RNA, 18 nt, Synthetic Construct
  source 1..18: mol_type = other RNA
agggaacgtgagctgggt

SEQ ID NO: 49672 - RNA, 18 nt, Synthetic Construct
  source 1..18: mol_type = other RNA
agggaacgtgagctgggt

SEQ ID NO: 49673 - RNA, 23 nt, Synthetic Construct
  source 1..23: mol_type = other RNA
tctctcggctcctcgcggctcgt

SEQ ID NO: 49674 - RNA, 23 nt, Synthetic Construct
  source 1..23: mol_type = other RNA
tctctcggctcctcgcggctcgt

SEQ ID NO: 49675 - RNA, 21 nt, Synthetic Construct
  source 1..21: mol_type = other RNA
tggagtgtgacgatggtgttt

SEQ ID NO: 49676 - RNA, 22 nt, Synthetic Construct
  source 1..22: mol_type = other RNA
tgaggtagtagtttgtgctggt

SEQ ID NO: 49677 - RNA, 20 nt, Synthetic Construct
  source 1..20: mol_type = other RNA
atcacattgccagggatttc

SEQ ID NO: 49678 - RNA, 20 nt, Synthetic Construct
  source 1..20: mol_type = other RNA
atcacattgccagggatttc

SEQ ID NO: 49679 - RNA, 24 nt, Synthetic Construct
  source 1..24: mol_type = other RNA
tgaggtagtaggttgtgtggttta

SEQ ID NO: 49680 - RNA, 24 nt, Synthetic Construct
  source 1..24: mol_type = other RNA
tgaggtagtaggttgtgtggttta

SEQ ID NO: 49681 - RNA, 23 nt, Synthetic Construct
  source 1..23: mol_type = other RNA
caaagcgctgttcgtgcaggtag

SEQ ID NO: 49682 - RNA, 23 nt, Synthetic Construct
  source 1..23: mol_type = other RNA
caaagcgctgttcgtgcaggtag

SEQ ID NO: 49683 - RNA, 22 nt, Synthetic Construct
  source 1..22: mol_type = other RNA
tatcggaacgtgcccagtcgtg

SEQ ID NO: 49684 - RNA, 24 nt, Synthetic Construct
  source 1..24: mol_type = other RNA
tatatcggaacgtgcccagtcgtg

SEQ ID NO: 49685 - RNA, 18 nt, Synthetic Construct
  source 1..18: mol_type = other RNA
gtccccttcgtctagagg

SEQ ID NO: 49686 - RNA, 18 nt, Synthetic Construct
  source 1..18: mol_type = other RNA
gtccccttcgtctagagg

SEQ ID NO: 49687 - RNA, 35 nt, Synthetic Construct; identical to SEQ ID NO: 9871
  source 1..35: mol_type = other RNA

SEQ ID NO: 49688 - RNA, 35 nt, Synthetic Construct; identical to SEQ ID NO: 9871
  source 1..35: mol_type = other RNA

SEQ ID NO: 49689 - RNA, 39 nt, Synthetic Construct; identical to SEQ ID NO: 10211
  source 1..39: mol_type = other RNA

SEQ ID NO: 49690 - RNA, 39 nt, Synthetic Construct; identical to SEQ ID NO: 10211
  source 1..39: mol_type = other RNA

SEQ ID NO: 49691 - RNA, 15 nt, Synthetic Construct
  source 1..15: mol_type = other RNA
gttgaccgcctgggg

SEQ ID NO: 49692 - RNA, 23 nt, Synthetic Construct
  source 1..23: mol_type = other RNA
tgaggggcagagagcgagacttg

SEQ ID NO: 49693 - RNA, 23 nt, Synthetic Construct
  source 1..23: mol_type = other RNA
tggggtagtaggttgtgtggttt

SEQ ID NO: 49694 - RNA, 23 nt, Synthetic Construct
  source 1..23: mol_type = other RNA
tggggtagtaggttgtgtggttt

SEQ ID NO: 49695 - RNA, 21 nt, Synthetic Construct
  source 1..21: mol_type = other RNA
tactccttaagcgaatctcgc

SEQ ID NO: 49696 - RNA, 21 nt, Synthetic Construct
  source 1..21: mol_type = other RNA
tactccttaagcgaatctcgc

SEQ ID NO: 49697 - RNA, 19 nt, Synthetic Construct
  source 1..19: mol_type = other RNA
acatgcaagtcgaacggta

SEQ ID NO: 49698 - RNA, 24 nt, Synthetic Construct
  source 1..24: mol_type = other RNA
tcactgatcgagtcgtcctgcgcg

SEQ ID NO: 49699 - RNA, 31 nt, Synthetic Construct; identical to SEQ ID NO: 2507
  source 1..31: mol_type = other RNA

SEQ ID NO: 49700 - RNA, 31 nt, Synthetic Construct; identical to SEQ ID NO: 2507
  source 1..31: mol_type = other RNA

SEQ ID NO: 49701 - RNA, 22 nt, Synthetic Construct
  source 1..22: mol_type = other RNA
tgaggtagtaggttatgtggtt

SEQ ID NO: 49702 - RNA, 22 nt, Synthetic Construct
  source 1..22: mol_type = other RNA
tgaggtagtaggttatgtggtt

SEQ ID NO: 49703 - RNA, 22 nt, Synthetic Construct
  source 1..22: mol_type = other RNA
tgaggtagtagtttgtatagtt

SEQ ID NO: 49704 - RNA, 22 nt, Synthetic Construct
  source 1..22: mol_type = other RNA
tgaggtagtagtttgtatagtt

SEQ ID NO: 49705 - RNA, 20 nt, Synthetic Construct
  source 1..20: mol_type = other RNA
ctctaatgagactgccggtg

SEQ ID NO: 49706 - RNA, 16 nt, Synthetic Construct
  source 1..16: mol_type = other RNA
gatttgggagtgctcg

SEQ ID NO: 49707 - RNA, 16 nt, Synthetic Construct
  source 1..16: mol_type = other RNA
gatttgggagtgctcg

SEQ ID NO: 49708 - RNA, 16 nt, Synthetic Construct
  source 1..16: mol_type = other RNA
gactacggccatacca

SEQ ID NO: 49709 - RNA, 16 nt, Synthetic Construct
  source 1..16: mol_type = other RNA
gactacggccatacca

SEQ ID NO: 49710 - RNA, 21 nt, Synthetic Construct
  source 1..21: mol_type = other RNA
tgaggtagtagtttgtgctgc

SEQ ID NO: 49711 - RNA, 21 nt, Synthetic Construct
  source 1..21: mol_type = other RNA
tgaggtagtagtttgtgctgc

SEQ ID NO: 49712 - RNA, 23 nt, Synthetic Construct
  source 1..23: mol_type = other RNA
nggtaatacgacgtacttagtgt

SEQ ID NO: 49713 - RNA, 27 nt, Synthetic Construct
  source 1..27: mol_type = other RNA
tcggctgttaaccgaaaggttggtggt

SEQ ID NO: 49714 - RNA, 22 nt, Synthetic Construct
  source 1..22: mol_type = other RNA
tgaggtagaaggttgtgtggtt

SEQ ID NO: 49715 - RNA, 22 nt, Synthetic Construct
  source 1..22: mol_type = other RNA
tgaggtagaaggttgtgtggtt

SEQ ID NO: 49716 - RNA, 31 nt, Synthetic Construct; identical to SEQ ID NO: 13805
  source 1..31: mol_type = other RNA

SEQ ID NO: 49717 - RNA, 31 nt, Synthetic Construct; identical to SEQ ID NO: 13805
  source 1..31: mol_type = other RNA

SEQ ID NO: 49718 - RNA, 21 nt, Synthetic Construct
  source 1..21: mol_type = other RNA
tcctgtactgagttgccccga

SEQ ID NO: 49719 - RNA, 21 nt, Synthetic Construct
  source 1..21: mol_type = other RNA
tcctgtactgagttgccccga

SEQ ID NO: 49720 - RNA, 22 nt, Synthetic Construct
  source 1..22: mol_type = other RNA
tgaggtagcagtttgtgctgtt

SEQ ID NO: 49721 - RNA, 22 nt, Synthetic Construct
  source 1..22: mol_type = other RNA
tgaggtagcagtttgtgctgtt

SEQ ID NO: 49722 - RNA, 22 nt, Synthetic Construct
  source 1..22: mol_type = other RNA
tagcagcacgtaaatataggcg

SEQ ID NO: 49723 - RNA, 23 nt, Synthetic Construct
  source 1..23: mol_type = other RNA
tgaggtagtaggttgtgtagttt

SEQ ID NO: 49724 - RNA, 31 nt, Synthetic Construct; identical to SEQ ID NO: 5943
  source 1..31: mol_type = other RNA

SEQ ID NO: 49725 - RNA, 31 nt, Synthetic Construct; identical to SEQ ID NO: 5943
  source 1..31: mol_type = other RNA

SEQ ID NO: 49726 - RNA, 22 nt, Synthetic Construct
  source 1..22: mol_type = other RNA
cccataaagtagaaagcactac

SEQ ID NO: 49727 - RNA, 22 nt, Synthetic Construct
  source 1..22: mol_type = other RNA
cccataaagtagaaagcactac

SEQ ID NO: 49728 - RNA, 23 nt, Synthetic Construct
  source 1..23: mol_type = other RNA
tggtaaaacgacgtacttagtgt

SEQ ID NO: 49729 - RNA, 23 nt, Synthetic Construct
  source 1..23: mol_type = other RNA
tggtaaaacgacgtacttagtgt

SEQ ID NO: 49730 - RNA, 23 nt, Synthetic Construct
  source 1..23: mol_type = other RNA
tcctgaactgagctgccccgagt

SEQ ID NO: 49731 - RNA, 23 nt, Synthetic Construct
  source 1..23: mol_type = other RNA
tcctgaactgagctgccccgagt

SEQ ID NO: 49732 - RNA, 16 nt, Synthetic Construct
  source 1..16: mol_type = other RNA
gtctacggccataccg

SEQ ID NO: 49733 - RNA, 21 nt, Synthetic Construct
  source 1..21: mol_type = other RNA
tggggggcagagagcgagact

SEQ ID NO: 49734 - RNA, 21 nt, Synthetic Construct
  source 1..21: mol_type = other RNA
tggggggcagagagcgagact

SEQ ID NO: 49735 - RNA, 23 nt, Synthetic Construct
  source 1..23: mol_type = other RNA
tggtaatacgacatacttagtgt

SEQ ID NO: 49736 - RNA, 23 nt, Synthetic Construct
  source 1..23: mol_type = other RNA
tggtaatacgacatacttagtgt

SEQ ID NO: 49737 - RNA, 23 nt, Synthetic Construct
  source 1..23: mol_type = other RNA
tgaggtagtagtttgtgctgttc

SEQ ID NO: 49738 - RNA, 22 nt, Synthetic Construct
  source 1..22: mol_type = other RNA
tggagtgtgacaatggtgcttg

SEQ ID NO: 49739 - RNA, 21 nt, Synthetic Construct
  source 1..21: mol_type = other RNA
tgaggggcagagagcgagact

SEQ ID NO: 49740 - RNA, 21 nt, Synthetic Construct
  source 1..21: mol_type = other RNA
tgaggggcagagagcgagact

SEQ ID NO: 49741 - RNA, 29 nt, Synthetic Construct
  source 1..29: mol_type = other RNA
gcatgggtggttcagtggtagaattctcg

SEQ ID NO: 49742 - RNA, 29 nt, Synthetic Construct
  source 1..29: mol_type = other RNA
gcatgggtggttcagtggtagaattctcg

SEQ ID NO: 49743 - RNA, 16 nt, Synthetic Construct
  source 1..16: mol_type = other RNA
accgcttttgtcaggg

SEQ ID NO: 49744 - RNA, 20 nt, Synthetic Construct
  source 1..20: mol_type = other RNA
tgaggtagcaggttgtatag

SEQ ID NO: 49745 - RNA, 20 nt, Synthetic Construct
  source 1..20: mol_type = other RNA
tgaggtagcaggttgtatag

SEQ ID NO: 49746 - RNA, 22 nt, Synthetic Construct
  source 1..22: mol_type = other RNA
tgaggtagtaggctgtgtggtt

SEQ ID NO: 49747 - RNA, 27 nt, Synthetic Construct
  source 1..27: mol_type = other RNA
ccccccactgctaaatttggctggcta

SEQ ID NO: 49748 - RNA, 27 nt, Synthetic Construct
  source 1..27: mol_type = other RNA
ccccccactgctaaatttggctggcta

SEQ ID NO: 49749 - RNA, 19 nt, Synthetic Construct
  source 1..19: mol_type = other RNA
accaaggggtcgtgggttc

SEQ ID NO: 49750 - RNA, 19 nt, Synthetic Construct
  source 1..19: mol_type = other RNA
accaaggggtcgtgggttc

SEQ ID NO: 49751 - RNA, 24 nt, Synthetic Construct
  source 1..24: mol_type = other RNA
gctcactgatcgagtcgtcctgcg

SEQ ID NO: 49752 - RNA, 22 nt, Synthetic Construct
  source 1..22: mol_type = other RNA
tcctgaactgagctgccccgag

SEQ ID NO: 49753 - RNA, 22 nt, Synthetic Construct
  source 1..22: mol_type = other RNA
tcctgaactgagctgccccgag

SEQ ID NO: 49754 - RNA, 22 nt, Synthetic Construct
  source 1..22: mol_type = other RNA
tggagagaaaggcagttcctga

SEQ ID NO: 49755 - RNA, 22 nt, Synthetic Construct
  source 1..22: mol_type = other RNA
tggagagaaaggcagttcctga

SEQ ID NO: 49756 - RNA, 21 nt, Synthetic Construct
  source 1..21: mol_type = other RNA
tgaggggcagagagcgagaca

SEQ ID NO: 49757 - RNA, 21 nt, Synthetic Construct
  source 1..21: mol_type = other RNA
aacccgtagatccgaacttgt

SEQ ID NO: 49758 - RNA, 15 nt, Synthetic Construct
  source 1..15: mol_type = other RNA
tggccgtcgtcagct

SEQ ID NO: 49759 - RNA, 15 nt, Synthetic Construct
  source 1..15: mol_type = other RNA
tggccgtcgtcagct

SEQ ID NO: 49760 - RNA, 22 nt, Synthetic Construct
  source 1..22: mol_type = other RNA
tcctgtactgtgctgccccgag

SEQ ID NO: 49761 - RNA, 35 nt, Synthetic Construct; identical to SEQ ID NO: 2269
  source 1..35: mol_type = other RNA

SEQ ID NO: 49762 - RNA, 35 nt, Synthetic Construct; identical to SEQ ID NO: 2269
  source 1..35: mol_type = other RNA

SEQ ID NO: 49763 - RNA, 27 nt, Synthetic Construct
  source 1..27: mol_type = other RNA
ccccccactgctaaatttaactggctt

SEQ ID NO: 49764 - RNA, 27 nt, Synthetic Construct
  source 1..27: mol_type = other RNA
ccccccactgctaaatttaactggctt

SEQ ID NO: 49765 - RNA, 22 nt, Synthetic Construct
  source 1..22: mol_type = other RNA
tcctgtacagagctgccccgag

SEQ ID NO: 49766 - RNA, 22 nt, Synthetic Construct
  source 1..22: mol_type = other RNA
tcctgtacagagctgccccgag

SEQ ID NO: 49767 - RNA, 23 nt, Synthetic Construct
  source 1..23: mol_type = other RNA
atcacattgccagggatttccaa

SEQ ID NO: 49768 - RNA, 18 nt, Synthetic Construct
  source 1..18: mol_type = other RNA
gcgccgatgatagtgcgg

SEQ ID NO: 49769 - RNA, 19 nt, Synthetic Construct
  source 1..19: mol_type = other RNA
cagcactctgcaaagacga

SEQ ID NO: 49770 - RNA, 19 nt, Synthetic Construct
  source 1..19: mol_type = other RNA
cagcactctgcaaagacga

SEQ ID NO: 49771 - RNA, 25 nt, Synthetic Construct
  source 1..25: mol_type = other RNA
cctcgcgcgattggagcggccgata

SEQ ID NO: 49772 - RNA, 18 nt, Synthetic Construct
  source 1..18: mol_type = other RNA
cctgaagaataagcaccg

SEQ ID NO: 49773 - RNA, 18 nt, Synthetic Construct
  source 1..18: mol_type = other RNA
cctgaagaataagcaccg

SEQ ID NO: 49774 - RNA, 23 nt, Synthetic Construct
  source 1..23: mol_type = other RNA
tgaggtagtgggttgtgtggttt

SEQ ID NO: 49775 - RNA, 23 nt, Synthetic Construct
  source 1..23: mol_type = other RNA
tgaggtagtgggttgtgtggttt

SEQ ID NO: 49776 - RNA, 31 nt, Synthetic Construct; identical to SEQ ID NO: 5506
  source 1..31: mol_type = other RNA

SEQ ID NO: 49777 - RNA, 21 nt, Synthetic Construct
  source 1..21: mol_type = other RNA
tgaggtggtaggttgtgtggt

SEQ ID NO: 49778 - RNA, 21 nt, Synthetic Construct
  source 1..21: mol_type = other RNA
tgaggtggtaggttgtgtggt

SEQ ID NO: 49779 - RNA, 28 nt, Synthetic Construct
  source 1..28: mol_type = other RNA
gtggcattgccgagtagctaagtgcgga

SEQ ID NO: 49780 - RNA, 28 nt, Synthetic Construct
  source 1..28: mol_type = other RNA
gtggcattgccgagtagctaagtgcgga

SEQ ID NO: 49781 - RNA, 19 nt, Synthetic Construct
  source 1..19: mol_type = other RNA
accaaggggtcgtgggttc

SEQ ID NO: 49782 - RNA, 23 nt, Synthetic Construct
  source 1..23: mol_type = other RNA
tgaggggcagagagcgagacttc

SEQ ID NO: 49783 - RNA, 23 nt, Synthetic Construct
  source 1..23: mol_type = other RNA
tgaggggcagagagcgagacttc

SEQ ID NO: 49784 - RNA, 23 nt, Synthetic Construct
  source 1..23: mol_type = other RNA
caacggaatcccaagagcagctg

SEQ ID NO: 49785 - RNA, 21 nt, Synthetic Construct
  source 1..21: mol_type = other RNA
agccatcatttaaagaaagcg

SEQ ID NO: 49786 - RNA, 21 nt, Synthetic Construct
  source 1..21: mol_type = other RNA
agccatcatttaaagaaagcg

SEQ ID NO: 49787 - RNA, 23 nt, Synthetic Construct
  source 1..23: mol_type = other RNA
aggggtgctatctgtgattgagg

SEQ ID NO: 49788 - RNA, 17 nt, Synthetic Construct
  source 1..17: mol_type = other RNA
gggtctgtagctcagtc

SEQ ID NO: 49789 - RNA, 32 nt, Synthetic Construct; identical to SEQ ID NO: 2086
  source 1..32: mol_type = other RNA

SEQ ID NO: 49790 - RNA, 32 nt, Synthetic Construct; identical to SEQ ID NO: 2086
  source 1..32: mol_type = other RNA

SEQ ID NO: 49791 - RNA, 22 nt, Synthetic Construct
  source 1..22: mol_type = other RNA
tgaggtagtagattgcatagtt

SEQ ID NO: 49792 - RNA, 22 nt, Synthetic Construct
  source 1..22: mol_type = other RNA
tgaggtagtagattgcatagtt

SEQ ID NO: 49793 - RNA, 22 nt, Synthetic Construct
  source 1..22: mol_type = other RNA
tgaggtagtaggttgtatagct

SEQ ID NO: 49794 - RNA, 22 nt, Synthetic Construct
  source 1..22: mol_type = other RNA
tgaggtagtaggttgtatagct

SEQ ID NO: 49795 - RNA, 22 nt, Synthetic Construct
  source 1..22: mol_type = other RNA
ctgggtcggtcgggctggggcg

SEQ ID NO: 49796 - RNA, 22 nt, Synthetic Construct
  source 1..22: mol_type = other RNA
ctgggtcggtcgggctggggcg

SEQ ID NO: 49797 - RNA, 21 nt, Synthetic Construct
  source 1..21: mol_type = other RNA
agaggggcagagagcgagact

SEQ ID NO: 49798 - RNA, 21 nt, Synthetic Construct
  source 1..21: mol_type = other RNA
agaggggcagagagcgagact

SEQ ID NO: 49799 - RNA, 22 nt, Synthetic Construct
  source 1..22: mol_type = other RNA
cgttgcacttgtctcggtctga

SEQ ID NO: 49800 - RNA, 20 nt, Synthetic Construct
  source 1..20: mol_type = other RNA
tagaattctcgcctgccacg

SEQ ID NO: 49801 - RNA, 20 nt, Synthetic Construct
  source 1..20: mol_type = other RNA
tagaattctcgcctgccacg

SEQ ID NO: 49802 - RNA, 23 nt, Synthetic Construct
  source 1..23: mol_type = other RNA
cgaggggcagagagcgagacttt

SEQ ID NO: 49803 - RNA, 22 nt, Synthetic Construct
  source 1..22: mol_type = other RNA
tttgttcgttcggctcgcgtga

SEQ ID NO: 49804 - RNA, 22 nt, Synthetic Construct
  source 1..22: mol_type = other RNA
tttgttcgttcggctcgcgtga

SEQ ID NO: 49805 - RNA, 23 nt, Synthetic Construct
  source 1..23: mol_type = other RNA
tgtagtgtttcctactttatgga

SEQ ID NO: 49806 - RNA, 23 nt, Synthetic Construct
  source 1..23: mol_type = other RNA
tgtagtgtttcctactttatgga

SEQ ID NO: 49807 - RNA, 22 nt, Synthetic Construct
  source 1..22: mol_type = other RNA
tgaggcagtaggttgtatagtt

SEQ ID NO: 49808 - RNA, 22 nt, Synthetic Construct
  source 1..22: mol_type = other RNA
tgaggcagtaggttgtatagtt

SEQ ID NO: 49809 - RNA, 24 nt, Synthetic Construct
  source 1..24: mol_type = other RNA
tgtaaacatccccggctggaagct

SEQ ID NO: 49810 - RNA, 21 nt, Synthetic Construct
  source 1..21: mol_type = other RNA
tgaggtagtgggttgtgtggt

SEQ ID NO: 49811 - RNA, 21 nt, Synthetic Construct
  source 1..21: mol_type = other RNA
tgaggtagtgggttgtgtggt

SEQ ID NO: 49812 - RNA, 18 nt, Synthetic Construct
  source 1..18: mol_type = other RNA
cctcgcgcgattggagcg

SEQ ID NO: 49813 - RNA, 27 nt, Synthetic Construct
  source 1..27: mol_type = other RNA
ccccccactgctaaattcgactggctt

SEQ ID NO: 49814 - RNA, 27 nt, Synthetic Construct
  source 1..27: mol_type = other RNA
ccccccactgctaaattcgactggctt

SEQ ID NO: 49815 - RNA, 22 nt, Synthetic Construct
  source 1..22: mol_type = other RNA
tgaggtagtagattgtgtggtt

SEQ ID NO: 49816 - RNA, 22 nt, Synthetic Construct
  source 1..22: mol_type = other RNA
tgaggtagtagattgtgtggtt

SEQ ID NO: 49817 - RNA, 23 nt, Synthetic Construct
  source 1..23: mol_type = other RNA
tgtcagtttgccaaataccccaa

SEQ ID NO: 49818 - RNA, 21 nt, Synthetic Construct
  source 1..21: mol_type = other RNA
tgaggtagtagtttgtgctgc

SEQ ID NO: 49819 - RNA, 21 nt, Synthetic Construct
  source 1..21: mol_type = other RNA
tgaggtagtagtttgtgctgc

SEQ ID NO: 49820 - RNA, 22 nt, Synthetic Construct
  source 1..22: mol_type = other RNA
tgaggtagtagtttgtgttgtt

SEQ ID NO: 49821 - RNA, 22 nt, Synthetic Construct
  source 1..22: mol_type = other RNA
tgaggtagtagtttgtgttgtt

SEQ ID NO: 49822 - RNA, 22 nt, Synthetic Construct
  source 1..22: mol_type = other RNA
cattgcacttgtcccggcctgt

SEQ ID NO: 49823 - RNA, 22 nt, Synthetic Construct
  source 1..22: mol_type = other RNA
cattgcacttgtcccggcctgt

SEQ ID NO: 49824 - RNA, 24 nt, Synthetic Construct
  source 1..24: mol_type = other RNA
tgtagacatccccgactggaagct

SEQ ID NO: 49825 - RNA, 24 nt, Synthetic Construct
  source 1..24: mol_type = other RNA
tgtagacatccccgactggaagct

SEQ ID NO: 49826 - RNA, 21 nt, Synthetic Construct
  source 1..21: mol_type = other RNA
ggagtatgcagagcaagatca

SEQ ID NO: 49827 - RNA, 17 nt, Synthetic Construct
  source 1..17: mol_type = other RNA
atgcaagtcgaacggta

SEQ ID NO: 49828 - RNA, 23 nt, Synthetic Construct
  source 1..23: mol_type = other RNA
tgaggtagtaggttgtgtggctt

SEQ ID NO: 49829 - RNA, 22 nt, Synthetic Construct
  source 1..22: mol_type = other RNA
taactccttaagcgaatctcgc

SEQ ID NO: 49830 - RNA, 22 nt, Synthetic Construct
  source 1..22: mol_type = other RNA
taactccttaagcgaatctcgc

SEQ ID NO: 49831 - RNA, 22 nt, Synthetic Construct
  source 1..22: mol_type = other RNA
tgaggtagtaggttgtgtggtt

SEQ ID NO: 49832 - RNA, 22 nt, Synthetic Construct
  source 1..22: mol_type = other RNA
tgaggtagtaggttgtgtggtt

SEQ ID NO: 49833 - RNA, 22 nt, Synthetic Construct
  source 1..22: mol_type = other RNA
tgaggtagtaagttgtatagtt

SEQ ID NO: 49834 - RNA, 22 nt, Synthetic Construct
  source 1..22: mol_type = other RNA
tgaggtagtaagttgtatagtt

SEQ ID NO: 49835 - RNA, 25 nt, Synthetic Construct
  source 1..25: mol_type = other RNA
ctgaggatatgagatcgagacgaca

SEQ ID NO: 49836 - RNA, 25 nt, Synthetic Construct
  source 1..25: mol_type = other RNA
ctgaggatatgagatcgagacgaca

SEQ ID NO: 49837 - RNA, 21 nt, Synthetic Construct
  source 1..21: mol_type = other RNA
ctttgttcgattccgttgagt

SEQ ID NO: 49838 - RNA, 21 nt, Synthetic Construct
  source 1..21: mol_type = other RNA
ctttgttcgattccgttgagt

SEQ ID NO: 49839 - RNA, 21 nt, Synthetic Construct
  source 1..21: mol_type = other RNA
tgaggtagtagcttgtgctgt

SEQ ID NO: 49840 - RNA, 21 nt, Synthetic Construct
  source 1..21: mol_type = other RNA
tgaggtagtagcttgtgctgt

SEQ ID NO: 49841 - RNA, 22 nt, Synthetic Construct
  source 1..22: mol_type = other RNA
tgaggtagtggattgtatagtt

SEQ ID NO: 49842 - RNA, 22 nt, Synthetic Construct
  source 1..22: mol_type = other RNA
tgaggtagtggattgtatagtt

SEQ ID NO: 49843 - RNA, 22 nt, Synthetic Construct
  source 1..22: mol_type = other RNA
tcttgtactgagctgccccgag

SEQ ID NO: 49844 - RNA, 22 nt, Synthetic Construct
  source 1..22: mol_type = other RNA
tcttgtactgagctgccccgag

SEQ ID NO: 49845 - RNA, 22 nt, Synthetic Construct
  source 1..22: mol_type = other RNA
cgaggtagtagattgtatagtt

SEQ ID NO: 49846 - RNA, 22 nt, Synthetic Construct
  source 1..22: mol_type = other RNA
cgaggtagtagattgtatagtt

SEQ ID NO: 49847 - RNA, 21 nt, Synthetic Construct
  source 1..21: mol_type = other RNA
tggggtagtagtttgtgctgt

SEQ ID NO: 49848 - RNA, 21 nt, Synthetic Construct
  source 1..21: mol_type = other RNA
tggggtagtagtttgtgctgt

SEQ ID NO: 49849 - RNA, 24 nt, Synthetic Construct
  source 1..24: mol_type = other RNA
atcacattgccagggatttccaat

SEQ ID NO: 49850 - RNA, 24 nt, Synthetic Construct
  source 1..24: mol_type = other RNA
atcacattgccagggatttccaat

SEQ ID NO: 49851 - RNA, 22 nt, Synthetic Construct
  source 1..22: mol_type = other RNA
ctccctcgggagggcgcgcggg

SEQ ID NO: 49852 - RNA, 22 nt, Synthetic Construct
  source 1..22: mol_type = other RNA
ctccctcgggagggcgcgcggg

SEQ ID NO: 49853 - RNA, 24 nt, Synthetic Construct
  source 1..24: mol_type = other RNA
tgtcagtttgtcaaataccccaac

SEQ ID NO: 49854 - RNA, 24 nt, Synthetic Construct
  source 1..24: mol_type = other RNA
atcacattgccagggatttccaat

SEQ ID NO: 49855 - RNA, 21 nt, Synthetic Construct
  source 1..21: mol_type = other RNA
gttggttcaagcgtgtagtcg

SEQ ID NO: 49856 - RNA, 28 nt, Synthetic Construct
  source 1..28: mol_type = other RNA
tgttggttcaagcgtgtagtcgtgctct

SEQ ID NO: 49857 - RNA, 28 nt, Synthetic Construct
  source 1..28: mol_type = other RNA
tgttggttcaagcgtgtagtcgtgctct

SEQ ID NO: 49858 - RNA, 29 nt, Synthetic Construct
  source 1..29: mol_type = other RNA
tccctggtggtctagtggttaggattcgg

SEQ ID NO: 49859 - RNA, 29 nt, Synthetic Construct
  source 1..29: mol_type = other RNA
tccctggtggtctagtggttaggattcgg

SEQ ID NO: 49860 - RNA, 22 nt, Synthetic Construct
  source 1..22: mol_type = other RNA
nagcagcacgtaaatattggcg

SEQ ID NO: 49861 - RNA, 24 nt, Synthetic Construct
  source 1..24: mol_type = other RNA
tgtaaacatccccgaccggaagct

SEQ ID NO: 49862 - RNA, 24 nt, Synthetic Construct
  source 1..24: mol_type = other RNA
tgtaaacatccccgaccggaagct

SEQ ID NO: 49863 - RNA, 22 nt, Synthetic Construct
  source 1..22: mol_type = other RNA
aggagtgtgacaatggtgtttg

SEQ ID NO: 49864 - RNA, 22 nt, Synthetic Construct
  source 1..22: mol_type = other RNA
tgaggtagtagtttgagctgtt

SEQ ID NO: 49865 - RNA, 22 nt, Synthetic Construct
  source 1..22: mol_type = other RNA
tgaggtagtagtttgagctgtt

SEQ ID NO: 49866 - RNA, 34 nt, Synthetic Construct; identical to SEQ ID NO: 2019
  source 1..34: mol_type = other RNA

SEQ ID NO: 49867 - RNA, 34 nt, Synthetic Construct; identical to SEQ ID NO: 2019
  source 1..34: mol_type = other RNA

SEQ ID NO: 49868 - RNA, 22 nt, Synthetic Construct
  source 1..22: mol_type = other RNA
ngaggtagtaggttgtgtggtt

SEQ ID NO: 49869 - RNA, 23 nt, Synthetic Construct
  source 1..23: mol_type = other RNA
tgaggggcagagagtgagacttt

SEQ ID NO: 49870 - RNA, 23 nt, Synthetic Construct
  source 1..23: mol_type = other RNA
tgaggggcagagagtgagacttt

SEQ ID NO: 49871 - RNA, 21 nt, Synthetic Construct
  source 1..21: mol_type = other RNA
ccctgtactgagctgccccga

SEQ ID NO: 49872 - RNA, 21 nt, Synthetic Construct
  source 1..21: mol_type = other RNA
ccctgtactgagctgccccga

SEQ ID NO: 49873 - RNA, 23 nt, Synthetic Construct
  source 1..23: mol_type = other RNA
tggaatgtaaagaagtatgtata

SEQ ID NO: 49874 - RNA, 23 nt, Synthetic Construct
  source 1..23: mol_type = other RNA
tggaatgtaaagaagtatgtata

SEQ ID NO: 49875 - RNA, 21 nt, Synthetic Construct
  source 1..21: mol_type = other RNA
tggagtgtgacaatggtgtct

SEQ ID NO: 49876 - RNA, 22 nt, Synthetic Construct
  source 1..22: mol_type = other RNA
cattgcacttgtcccggtctga

SEQ ID NO: 49877 - RNA, 20 nt, Synthetic Construct
  source 1..20: mol_type = other RNA
gaatcgctagtaatcgcgga

SEQ ID NO: 49878 - RNA, 20 nt, Synthetic Construct
  source 1..20: mol_type = other RNA
gaatcgctagtaatcgcgga

SEQ ID NO: 49879 - RNA, 22 nt, Synthetic Construct
  source 1..22: mol_type = other RNA
tgttgcacttgtcccggcctgt

SEQ ID NO: 49880 - RNA, 22 nt, Synthetic Construct
  source 1..22: mol_type = other RNA
tgttgcacttgtcccggcctgt

SEQ ID NO: 49881 - RNA, 23 nt, Synthetic Construct
  source 1..23: mol_type = other RNA
tgaggtggtaggttgtgtggttt

SEQ ID NO: 49882 - RNA, 23 nt, Synthetic Construct
  source 1..23: mol_type = other RNA
tgaggtggtaggttgtgtggttt

SEQ ID NO: 49883 - RNA, 32 nt, Synthetic Construct; identical to SEQ ID NO: 4710
  source 1..32: mol_type = other RNA

SEQ ID NO: 49884 - RNA, 32 nt, Synthetic Construct; identical to SEQ ID NO: 4710
  source 1..32: mol_type = other RNA

SEQ ID NO: 49885 - RNA, 20 nt, Synthetic Construct
  source 1..20: mol_type = other RNA
tgaggcagtaggttgtatag

SEQ ID NO: 49886 - RNA, 20 nt, Synthetic Construct
  source 1..20: mol_type = other RNA
tgaggcagtaggttgtatag

SEQ ID NO: 49887 - RNA, 22 nt, Synthetic Construct
  source 1..22: mol_type = other RNA
tgaggtagtagttagtgctgtt

SEQ ID NO: 49888 - RNA, 22 nt, Synthetic Construct
  source 1..22: mol_type = other RNA
tgaggtagtagttagtgctgtt

SEQ ID NO: 49889 - RNA, 16 nt, Synthetic Construct
  source 1..16: mol_type = other RNA
gtctacgaccatacca

SEQ ID NO: 49890 - RNA, 22 nt, Synthetic Construct
  source 1..22: mol_type = other RNA
tcgtaccgtgagtagtaatgcg

SEQ ID NO: 49891 - RNA, 22 nt, Synthetic Construct
  source 1..22: mol_type = other RNA
tgaggtagtaggttgtgcggtt

SEQ ID NO: 49892 - RNA, 22 nt, Synthetic Construct
  source 1..22: mol_type = other RNA
tggggtagtagtttgtgctgtt

SEQ ID NO: 49893 - RNA, 22 nt, Synthetic Construct
  source 1..22: mol_type = other RNA
tggggtagtagtttgtgctgtt

SEQ ID NO: 49894 - RNA, 21 nt, Synthetic Construct
  source 1..21: mol_type = other RNA
caacggaatcccaaaagcagc

SEQ ID NO: 49895 - RNA, 21 nt, Synthetic Construct
  source 1..21: mol_type = other RNA
caacggaatcccaaaagcagc

SEQ ID NO: 49896 - RNA, 22 nt, Synthetic Construct
  source 1..22: mol_type = other RNA
tattgcgcttgtcccggcctgt

SEQ ID NO: 49897 - RNA, 22 nt, Synthetic Construct
  source 1..22: mol_type = other RNA
tattgcgcttgtcccggcctgt

SEQ ID NO: 49898 - RNA, 18 nt, Synthetic Construct
  source 1..18: mol_type = other RNA
atcacattgccagggatt

SEQ ID NO: 49899 - RNA, 18 nt, Synthetic Construct
  source 1..18: mol_type = other RNA
atcacattgccagggatt

SEQ ID NO: 49900 - RNA, 15 nt, Synthetic Construct
  source 1..15: mol_type = other RNA
accggaggaaggtgg

SEQ ID NO: 49901 - RNA, 23 nt, Synthetic Construct
  source 1..23: mol_type = other RNA
tcctatactgagctgccccgaga

SEQ ID NO: 49902 - RNA, 23 nt, Synthetic Construct
  source 1..23: mol_type = other RNA
tcctatactgagctgccccgaga

SEQ ID NO: 49903 - RNA, 28 nt, Synthetic Construct
  source 1..28: mol_type = other RNA
gctttacattggactttgaacagatctg

SEQ ID NO: 49904 - RNA, 28 nt, Synthetic Construct
  source 1..28: mol_type = other RNA
gctttacattggactttgaacagatctg

SEQ ID NO: 49905 - RNA, 36 nt, Synthetic Construct; identical to SEQ ID NO: 2469
  source 1..36: mol_type = other RNA

SEQ ID NO: 49906 - RNA, 16 nt, Synthetic Construct
  source 1..16: mol_type = other RNA
gtctacggccatgcca

SEQ ID NO: 49907 - RNA, 20 nt, Synthetic Construct
  source 1..20: mol_type = other RNA
tgaggtagtaggttgtgtga

SEQ ID NO: 49908 - RNA, 20 nt, Synthetic Construct
  source 1..20: mol_type = other RNA
tgaggtagtaggttgtgtga

SEQ ID NO: 49909 - RNA, 22 nt, Synthetic Construct
  source 1..22: mol_type = other RNA
gagagcctggacacaggtgctg

SEQ ID NO: 49910 - RNA, 16 nt, Synthetic Construct
  source 1..16: mol_type = other RNA
gtctacggccatacta

SEQ ID NO: 49911 - RNA, 16 nt, Synthetic Construct
  source 1..16: mol_type = other RNA
gtctacggccatacta

SEQ ID NO: 49912 - RNA, 22 nt, Synthetic Construct
  source 1..22: mol_type = other RNA
tggagtgtgacaatggtgcttg

SEQ ID NO: 49913 - RNA, 32 nt, Synthetic Construct; identical to SEQ ID NO: 161
  source 1..32: mol_type = other RNA

SEQ ID NO: 49914 - RNA, 21 nt, Synthetic Construct
  source 1..21: mol_type = other RNA
tgaggtagtagcttgtgctgt

SEQ ID NO: 49915 - RNA, 21 nt, Synthetic Construct
  source 1..21: mol_type = other RNA
tgaggtagtagcttgtgctgt

SEQ ID NO: 49916 - RNA, 22 nt, Synthetic Construct
  source 1..22: mol_type = other RNA
tgaggtggtagtttgtgctgtt

SEQ ID NO: 49917 - RNA, 22 nt, Synthetic Construct
  source 1..22: mol_type = other RNA
tgaggtggtagtttgtgctgtt

SEQ ID NO: 49918 - RNA, 24 nt, Synthetic Construct
  source 1..24: mol_type = other RNA
tcactgatcgagtcgtcctgcgcg

SEQ ID NO: 49919 - RNA, 24 nt, Synthetic Construct
  source 1..24: mol_type = other RNA
tcactgatcgagtcgtcctgcgcg

SEQ ID NO: 49920 - RNA, 19 nt, Synthetic Construct
  source 1..19: mol_type = other RNA
atcacattgccagggattt

SEQ ID NO: 49921 - RNA, 23 nt, Synthetic Construct
  source 1..23: mol_type = other RNA
tggtaacacgacgtacttagtgt

SEQ ID NO: 49922 - RNA, 21 nt, Synthetic Construct
  source 1..21: mol_type = other RNA
gctattgacgaccgtaccgca

SEQ ID NO: 49923 - RNA, 15 nt, Synthetic Construct
  source 1..15: mol_type = other RNA
tcgagtcgtcctgcg

SEQ ID NO: 49924 - RNA, 15 nt, Synthetic Construct
  source 1..15: mol_type = other RNA
tcgagtcgtcctgcg

SEQ ID NO: 49925 - RNA, 37 nt, Synthetic Construct; identical to SEQ ID NO: 4277
  source 1..37: mol_type = other RNA

SEQ ID NO: 49926 - RNA, 23 nt, Synthetic Construct
  source 1..23: mol_type = other RNA
tcctgcactgagctgccccgaga

SEQ ID NO: 49927 - RNA, 23 nt, Synthetic Construct
  source 1..23: mol_type = other RNA
tcctgcactgagctgccccgaga

SEQ ID NO: 49928 - RNA, 23 nt, Synthetic Construct
  source 1..23: mol_type = other RNA
gggtaatacgacgtacttagtgt

SEQ ID NO: 49929 - RNA, 16 nt, Synthetic Construct
  source 1..16: mol_type = other RNA
gtccacggccatacca

SEQ ID NO: 49930 - RNA, 16 nt, Synthetic Construct
  source 1..16: mol_type = other RNA
gtctgcggccatacca

SEQ ID NO: 49931 - RNA, 22 nt, Synthetic Construct
  source 1..22: mol_type = other RNA
tcctgtaccgagctgccccgag

SEQ ID NO: 49932 - RNA, 22 nt, Synthetic Construct
  source 1..22: mol_type = other RNA
tcctgtaccgagctgccccgag

SEQ ID NO: 49933 - RNA, 36 nt, Synthetic Construct; identical to SEQ ID NO: 2660
  source 1..36: mol_type = other RNA

SEQ ID NO: 49934 - RNA, 36 nt, Synthetic Construct; identical to SEQ ID NO: 2660
  source 1..36: mol_type = other RNA

SEQ ID NO: 49935 - RNA, 22 nt, Synthetic Construct
  source 1..22: mol_type = other RNA
attgcacttgtcccggcctgtt

SEQ ID NO: 49936 - RNA, 21 nt, Synthetic Construct
  source 1..21: mol_type = other RNA
cggagtgtgacaatggtgttt

SEQ ID NO: 49937 - RNA, 19 nt, Synthetic Construct
  source 1..19: mol_type = other RNA
accaaggggtcgtgggttc

SEQ ID NO: 49938 - RNA, 22 nt, Synthetic Construct
  source 1..22: mol_type = other RNA
tgaggtagtaggttgtgtggtc

SEQ ID NO: 49939 - RNA, 22 nt, Synthetic Construct
  source 1..22: mol_type = other RNA
tgaggtagtaggttgtgtggtc

SEQ ID NO: 49940 - RNA, 21 nt, Synthetic Construct
  source 1..21: mol_type = other RNA
ctagactggagctccttgagg

SEQ ID NO: 49941 - RNA, 21 nt, Synthetic Construct
  source 1..21: mol_type = other RNA
ctagactggagctccttgagg

SEQ ID NO: 49942 - RNA, 21 nt, Synthetic Construct
  source 1..21: mol_type = other RNA
cagcattgtacagggctatga

SEQ ID NO: 49943 - RNA, 21 nt, Synthetic Construct
  source 1..21: mol_type = other RNA
cagcattgtacagggctatga

SEQ ID NO: 49944 - RNA, 20 nt, Synthetic Construct
  source 1..20: mol_type = other RNA
tgaggtagtgggttgtatag

SEQ ID NO: 49945 - RNA, 20 nt, Synthetic Construct
  source 1..20: mol_type = other RNA
tgaggtagtgggttgtatag

SEQ ID NO: 49946 - RNA, 16 nt, Synthetic Construct
  source 1..16: mol_type = other RNA
gtctacggccatgcca

SEQ ID NO: 49947 - RNA, 27 nt, Synthetic Construct
  source 1..27: mol_type = other RNA
tcggctgttaaccgaaaggttggtggt

SEQ ID NO: 49948 - RNA, 27 nt, Synthetic Construct
  source 1..27: mol_type = other RNA
gactcttagcggtggatcactcggctc

SEQ ID NO: 49949 - RNA, 27 nt, Synthetic Construct
  source 1..27: mol_type = other RNA
gactcttagcggtggatcactcggctc

SEQ ID NO: 49950 - RNA, 19 nt, Synthetic Construct
  source 1..19: mol_type = other RNA
tgtcaactggttgttggga

SEQ ID NO: 49951 - RNA, 19 nt, Synthetic Construct
  source 1..19: mol_type = other RNA
tgtcaactggttgttggga

SEQ ID NO: 49952 - RNA, 37 nt, Synthetic Construct; identical to SEQ ID NO: 7503
  source 1..37: mol_type = other RNA

SEQ ID NO: 49953 - RNA, 37 nt, Synthetic Construct; identical to SEQ ID NO: 7503
  source 1..37: mol_type = other RNA

SEQ ID NO: 49954 - RNA, 25 nt, Synthetic Construct
  source 1..25: mol_type = other RNA
ttgcagctgcctgggagtgacttca

SEQ ID NO: 49955 - RNA, 25 nt, Synthetic Construct
  source 1..25: mol_type = other RNA
ttgcagctgcctgggagtgacttca

SEQ ID NO: 49956 - RNA, 26 nt, Synthetic Construct
  source 1..26: mol_type = other RNA
gacttaccaaacctatgcaaactccg

SEQ ID NO: 49957 - RNA, 24 nt, Synthetic Construct
  source 1..24: mol_type = other RNA
cgggcctggttagtacttggatgg

SEQ ID NO: 49958 - RNA, 23 nt, Synthetic Construct
  source 1..23: mol_type = other RNA
tgtaaacatccttgactggaagc

SEQ ID NO: 49959 - RNA, 23 nt, Synthetic Construct
  source 1..23: mol_type = other RNA
tgtaaacatccttgactggaagc

SEQ ID NO: 49960 - RNA, 26 nt, Synthetic Construct
  source 1..26: mol_type = other RNA
gatttccccttggggttgtaggacca

SEQ ID NO: 49961 - RNA, 26 nt, Synthetic Construct
  source 1..26: mol_type = other RNA
gatttccccttggggttgtaggacca

SEQ ID NO: 49962 - RNA, 22 nt, Synthetic Construct
  source 1..22: mol_type = other RNA
tgaggtagtaggatgtgtggtt

SEQ ID NO: 49963 - RNA, 21 nt, Synthetic Construct
  source 1..21: mol_type = other RNA
taaggtagtaggttgtgtggt

SEQ ID NO: 49964 - RNA, 21 nt, Synthetic Construct
  source 1..21: mol_type = other RNA
taaggtagtaggttgtgtggt

SEQ ID NO: 49965 - RNA, 24 nt, Synthetic Construct
  source 1..24: mol_type = other RNA
ctcactgatcgagtcgtcctgcgc

SEQ ID NO: 49966 - RNA, 24 nt, Synthetic Construct
  source 1..24: mol_type = other RNA
ctcactgatcgagtcgtcctgcgc

SEQ ID NO: 49967 - RNA, 19 nt, Synthetic Construct
  source 1..19: mol_type = other RNA
gtggtacgatcatacctgg

SEQ ID NO: 49968 - RNA, 19 nt, Synthetic Construct
  source 1..19: mol_type = other RNA
gtggtacgatcatacctgg

SEQ ID NO: 49969 - RNA, 20 nt, Synthetic Construct
  source 1..20: mol_type = other RNA
tgaagtagtaggttgtgtgg

SEQ ID NO: 49970 - RNA, 20 nt, Synthetic Construct
  source 1..20: mol_type = other RNA
tgaagtagtaggttgtgtgg

SEQ ID NO: 49971 - RNA, 22 nt, Synthetic Construct
  source 1..22: mol_type = other RNA
cgaggtagtagtttgtgctgtt

SEQ ID NO: 49972 - RNA, 22 nt, Synthetic Construct
  source 1..22: mol_type = other RNA
cgaggtagtagtttgtgctgtt

SEQ ID NO: 49973 - RNA, 18 nt, Synthetic Construct
  source 1..18: mol_type = other RNA
gtctgcctcagcgtcggt

SEQ ID NO: 49974 - RNA, 18 nt, Synthetic Construct
  source 1..18: mol_type = other RNA
gtctgcctcagcgtcggt

SEQ ID NO: 49975 - RNA, 22 nt, Synthetic Construct
  source 1..22: mol_type = other RNA
tgaggtagtaggttgtgtggtg

SEQ ID NO: 49976 - RNA, 20 nt, Synthetic Construct
  source 1..20: mol_type = other RNA
tgaggtagtaggttgtgtga

SEQ ID NO: 49977 - RNA, 27 nt, Synthetic Construct
  source 1..27: mol_type = other RNA
ccccccactgctaaatttaactggctt

SEQ ID NO: 49978 - RNA, 26 nt, Synthetic Construct
  source 1..26: mol_type = other RNA
ccccccactgctaatttgactggctt

SEQ ID NO: 49979 - RNA, 19 nt, Synthetic Construct
  source 1..19: mol_type = other RNA
tggccgtcgtcagctcgtg

SEQ ID NO: 49980 - RNA, 19 nt, Synthetic Construct
  source 1..19: mol_type = other RNA
tggccgtcgtcagctcgtg

SEQ ID NO: 49981 - RNA, 24 nt, Synthetic Construct
  source 1..24: mol_type = other RNA
tgaggtagtaggttgtgtggttta

SEQ ID NO: 49982 - RNA, 18 nt, Synthetic Construct
  source 1..18: mol_type = other RNA
tcccctggacctgtactg

SEQ ID NO: 49983 - RNA, 18 nt, Synthetic Construct
  source 1..18: mol_type = other RNA
tcccctggacctgtactg

SEQ ID NO: 49984 - RNA, 16 nt, Synthetic Construct
  source 1..16: mol_type = other RNA
acggcccagactccta

SEQ ID NO: 49985 - RNA, 16 nt, Synthetic Construct
  source 1..16: mol_type = other RNA
acggcccagactccta

SEQ ID NO: 49986 - RNA, 22 nt, Synthetic Construct
  source 1..22: mol_type = other RNA
gggagtgtgacaatggtgtttg

SEQ ID NO: 49987 - RNA, 16 nt, Synthetic Construct
  source 1..16: mol_type = other RNA
gagctgtggatagggg

SEQ ID NO: 49988 - RNA, 34 nt, Synthetic Construct; identical to SEQ ID NO: 2375
  source 1..34: mol_type = other RNA

SEQ ID NO: 49989 - RNA, 22 nt, Synthetic Construct
  source 1..22: mol_type = other RNA
tagcagcgcgtaaatattggcg

SEQ ID NO: 49990 - RNA, 22 nt, Synthetic Construct
  source 1..22: mol_type = other RNA
tagcagcgcgtaaatattggcg

SEQ ID NO: 49991 - RNA, 16 nt, Synthetic Construct
  source 1..16: mol_type = other RNA
gtctacggccataccg

SEQ ID NO: 49992 - RNA, 30 nt, Synthetic Construct; identical to SEQ ID NO: 2840
  source 1..30: mol_type = other RNA

SEQ ID NO: 49993 - RNA, 22 nt, Synthetic Construct
  source 1..22: mol_type = other RNA
tattgcgcttgtcccggcctgt

SEQ ID NO: 49994 - RNA, 22 nt, Synthetic Construct
  source 1..22: mol_type = other RNA
tattgcgcttgtcccggcctgt

SEQ ID NO: 49995 - RNA, 18 nt, Synthetic Construct
  source 1..18: mol_type = other RNA
accggaggaaggtgggga

SEQ ID NO: 49996 - RNA, 18 nt, Synthetic Construct
  source 1..18: mol_type = other RNA
accggaggaaggtgggga

SEQ ID NO: 49997 - RNA, 19 nt, Synthetic Construct
  source 1..19: mol_type = other RNA
aaaccgttaccattactga

SEQ ID NO: 49998 - RNA, 19 nt, Synthetic Construct
  source 1..19: mol_type = other RNA
aaaccgttaccattactga

SEQ ID NO: 49999 - RNA, 15 nt, Synthetic Construct
  source 1..15: mol_type = other RNA
acctgcatcgagggt

SEQ ID NO: 50000 - RNA, 15 nt, Synthetic Construct
  source 1..15: mol_type = other RNA
acctgcatcgagggt

SEQ ID NO: 50001 - RNA, 22 nt, Synthetic Construct
  source 1..22: mol_type = other RNA
tggaatgtagagaagtatgtat

SEQ ID NO: 50002 - RNA, 22 nt, Synthetic Construct
  source 1..22: mol_type = other RNA
tggaatgtagagaagtatgtat

SEQ ID NO: 50003 - RNA, 16 nt, Synthetic Construct
  source 1..16: mol_type = other RNA
gtctacggctatacca

SEQ ID NO: 50004 - RNA, 16 nt, Synthetic Construct
  source 1..16: mol_type = other RNA
gtctacggctatacca

SEQ ID NO: 50005 - RNA, 32 nt, Synthetic Construct; identical to SEQ ID NO: 3713
  source 1..32: mol_type = other RNA

SEQ ID NO: 50006 - RNA, 32 nt, Synthetic Construct; identical to SEQ ID NO: 3713
  source 1..32: mol_type = other RNA

SEQ ID NO: 50007 - RNA, 22 nt, Synthetic Construct
  source 1..22: mol_type = other RNA
tggaatgtaaagaggtatgtat

SEQ ID NO: 50008 - RNA, 22 nt, Synthetic Construct
  source 1..22: mol_type = other RNA
tggaatgtaaagaggtatgtat

SEQ ID NO: 50009 - RNA, 21 nt, Synthetic Construct
  source 1..21: mol_type = other RNA
tgaggtagtagattgtgtggt

SEQ ID NO: 50010 - RNA, 21 nt, Synthetic Construct
  source 1..21: mol_type = other RNA
tgaggtagtagattgtgtggt

SEQ ID NO: 50011 - RNA, 16 nt, Synthetic Construct
  source 1..16: mol_type = other RNA
gtctacgaccatacca

SEQ ID NO: 50012 - RNA, 16 nt, Synthetic Construct
  source 1..16: mol_type = other RNA
gtctacgaccatacca

SEQ ID NO: 50013 - RNA, 22 nt, Synthetic Construct
  source 1..22: mol_type = other RNA
ttgtaccgtgagtaataatgcg

SEQ ID NO: 50014 - RNA, 22 nt, Synthetic Construct
  source 1..22: mol_type = other RNA
ttgtaccgtgagtaataatgcg

SEQ ID NO: 50015 - RNA, 23 nt, Synthetic Construct
  source 1..23: mol_type = other RNA
tcggatccgtctgagcttggctt

SEQ ID NO: 50016 - RNA, 18 nt, Synthetic Construct
  source 1..18: mol_type = other RNA
tctaatgagactgccggt

SEQ ID NO: 50017 - RNA, 18 nt, Synthetic Construct
  source 1..18: mol_type = other RNA
tctaatgagactgccggt

SEQ ID NO: 50018 - RNA, 20 nt, Synthetic Construct
  source 1..20: mol_type = other RNA
tgaggtagaaggttgtatag

SEQ ID NO: 50019 - RNA, 20 nt, Synthetic Construct
  source 1..20: mol_type = other RNA
tgaggtagaaggttgtatag

SEQ ID NO: 50020 - RNA, 22 nt, Synthetic Construct
  source 1..22: mol_type = other RNA
cagggctggcagtgacatgggt

SEQ ID NO: 50021 - RNA, 23 nt, Synthetic Construct
  source 1..23: mol_type = other RNA
tagcttatcagactgatgttgaa

SEQ ID NO: 50022 - RNA, 18 nt, Synthetic Construct
  source 1..18: mol_type = other RNA
cccaaaggtcgtcggttc

SEQ ID NO: 50023 - RNA, 18 nt, Synthetic Construct
  source 1..18: mol_type = other RNA
cccaaaggtcgtcggttc

SEQ ID NO: 50024 - RNA, 22 nt, Synthetic Construct
  source 1..22: mol_type = other RNA
tgagatagtagtttgtgctgtt

SEQ ID NO: 50025 - RNA, 22 nt, Synthetic Construct
  source 1..22: mol_type = other RNA
tgagatagtagtttgtgctgtt

SEQ ID NO: 50026 - RNA, 22 nt, Synthetic Construct
  source 1..22: mol_type = other RNA
tcaagagcaataacgaaaaatg

SEQ ID NO: 50027 - RNA, 22 nt, Synthetic Construct
  source 1..22: mol_type = other RNA
tgaggtagcaggttgtatagtt

SEQ ID NO: 50028 - RNA, 22 nt, Synthetic Construct
  source 1..22: mol_type = other RNA
tgaggtagcaggttgtatagtt

SEQ ID NO: 50029 - RNA, 43 nt, Synthetic Construct; identical to SEQ ID NO: 2315
  source 1..43: mol_type = other RNA

SEQ ID NO: 50030 - RNA, 43 nt, Synthetic Construct; identical to SEQ ID NO: 2315
  source 1..43: mol_type = other RNA

SEQ ID NO: 50031 - RNA, 15 nt, Synthetic Construct
  source 1..15: mol_type = other RNA
cctcgcgcgattgga

SEQ ID NO: 50032 - RNA, 15 nt, Synthetic Construct
  source 1..15: mol_type = other RNA
cctcgcgcgattgga

SEQ ID NO: 50033 - RNA, 22 nt, Synthetic Construct
  source 1..22: mol_type = other RNA
taaggtagtaggttgtatagtt

SEQ ID NO: 50034 - RNA, 34 nt, Synthetic Construct; identical to SEQ ID NO: 2186
  source 1..34: mol_type = other RNA

SEQ ID NO: 50035 - RNA, 34 nt, Synthetic Construct; identical to SEQ ID NO: 2186
  source 1..34: mol_type = other RNA

SEQ ID NO: 50036 - RNA, 23 nt, Synthetic Construct
  source 1..23: mol_type = other RNA
agaggggcagagagcgagacttt

SEQ ID NO: 50037 - RNA, 30 nt, Synthetic Construct; identical to SEQ ID NO: 5879
  source 1..30: mol_type = other RNA

SEQ ID NO: 50038 - RNA, 30 nt, Synthetic Construct; identical to SEQ ID NO: 5879
  source 1..30: mol_type = other RNA

SEQ ID NO: 50039 - RNA, 21 nt, Synthetic Construct
  source 1..21: mol_type = other RNA
tggggtagtaggttgtgtggt

SEQ ID NO: 50040 - RNA, 21 nt, Synthetic Construct
  source 1..21: mol_type = other RNA
tggggtagtaggttgtgtggt

SEQ ID NO: 50041 - RNA, 30 nt, Synthetic Construct; identical to SEQ ID NO: 1641
  source 1..30: mol_type = other RNA

SEQ ID NO: 50042 - RNA, 30 nt, Synthetic Construct; identical to SEQ ID NO: 1641
  source 1..30: mol_type = other RNA

SEQ ID NO: 50043 - RNA, 16 nt, Synthetic Construct
  source 1..16: mol_type = other RNA
ggtagctcgttgggct

SEQ ID NO: 50044 - RNA, 16 nt, Synthetic Construct
  source 1..16: mol_type = other RNA
ggtagctcgttgggct

SEQ ID NO: 50045 - RNA, 22 nt, Synthetic Construct
  source 1..22: mol_type = other RNA
tcctgtactgagccgccccgag

SEQ ID NO: 50046 - RNA, 22 nt, Synthetic Construct
  source 1..22: mol_type = other RNA
tcctgtactgagccgccccgag

SEQ ID NO: 50047 - RNA, 22 nt, Synthetic Construct
  source 1..22: mol_type = other RNA
ccctgtactgagctgccccgag

SEQ ID NO: 50048 - RNA, 22 nt, Synthetic Construct
  source 1..22: mol_type = other RNA
ccctgtactgagctgccccgag

SEQ ID NO: 50049 - RNA, 23 nt, Synthetic Construct
  source 1..23: mol_type = other RNA
tagcaccatttgaaatcagtgtt

SEQ ID NO: 50050 - RNA, 23 nt, Synthetic Construct
  source 1..23: mol_type = other RNA
tagcaccatttgaaatcagtgtt

SEQ ID NO: 50051 - RNA, 21 nt, Synthetic Construct
  source 1..21: mol_type = other RNA
tgaggtagtagcttgtgctgt

SEQ ID NO: 50052 - RNA, 21 nt, Synthetic Construct
  source 1..21: mol_type = other RNA
tgaggtagtagcttgtgctgt

SEQ ID NO: 50053 - RNA, 22 nt, Synthetic Construct
  source 1..22: mol_type = other RNA
tggagtgtaaagaagtatgtat

SEQ ID NO: 50054 - RNA, 22 nt, Synthetic Construct
  source 1..22: mol_type = other RNA
tggagtgtaaagaagtatgtat

SEQ ID NO: 50055 - RNA, 23 nt, Synthetic Construct
  source 1..23: mol_type = other RNA
tgaggggcggagagcgagacttt

SEQ ID NO: 50056 - RNA, 23 nt, Synthetic Construct
  source 1..23: mol_type = other RNA
tgaggggcggagagcgagacttt

SEQ ID NO: 50057 - RNA, 36 nt, Synthetic Construct; identical to SEQ ID NO: 2248
  source 1..36: mol_type = other RNA

SEQ ID NO: 50058 - RNA, 23 nt, Synthetic Construct
  source 1..23: mol_type = other RNA
caaagtgctgttcgtgcaggtgg

SEQ ID NO: 50059 - RNA, 23 nt, Synthetic Construct
  source 1..23: mol_type = other RNA
caaagtgctgttcgtgcaggtgg

SEQ ID NO: 50060 - RNA, 19 nt, Synthetic Construct
  source 1..19: mol_type = other RNA
cgactcttagcggtggatc

SEQ ID NO: 50061 - RNA, 17 nt, Synthetic Construct
  source 1..17: mol_type = other RNA
atcgtgacgatagtgca

SEQ ID NO: 50062 - RNA, 17 nt, Synthetic Construct
  source 1..17: mol_type = other RNA
atcgtgacgatagtgca

SEQ ID NO: 50063 - RNA, 17 nt, Synthetic Construct
  source 1..17: mol_type = other RNA
gccatgccgcgtgcggg

SEQ ID NO: 50064 - RNA, 17 nt, Synthetic Construct
  source 1..17: mol_type = other RNA
cctcgcgcgattggagc

SEQ ID NO: 50065 - RNA, 17 nt, Synthetic Construct
  source 1..17: mol_type = other RNA
cctcgcgcgattggagc

SEQ ID NO: 50066 - RNA, 43 nt, Synthetic Construct; identical to SEQ ID NO: 4585
  source 1..43: mol_type = other RNA

SEQ ID NO: 50067 - RNA, 44 nt, Synthetic Construct; identical to SEQ ID NO: 6685
  source 1..44: mol_type = other RNA

SEQ ID NO: 50068 - RNA, 44 nt, Synthetic Construct; identical to SEQ ID NO: 6685
  source 1..44: mol_type = other RNA

SEQ ID NO: 50069 - RNA, 31 nt, Synthetic Construct; identical to SEQ ID NO: 2278
  source 1..31: mol_type = other RNA

SEQ ID NO: 50070 - RNA, 31 nt, Synthetic Construct; identical to SEQ ID NO: 2278
  source 1..31: mol_type = other RNA

SEQ ID NO: 50071 - RNA, 16 nt, Synthetic Construct
  source 1..16: mol_type = other RNA
gcgtagatatgcggag

SEQ ID NO: 50072 - RNA, 31 nt, Synthetic Construct; identical to SEQ ID NO: 5506
  source 1..31: mol_type = other RNA

SEQ ID NO: 50073 - RNA, 17 nt, Synthetic Construct
  source 1..17: mol_type = other RNA
tcccctggacctgtact

SEQ ID NO: 50074 - RNA, 16 nt, Synthetic Construct
  source 1..16: mol_type = other RNA
gtctacggctatacca

SEQ ID NO: 50075 - RNA, 16 nt, Synthetic Construct
  source 1..16: mol_type = other RNA
gtctacggctatacca

SEQ ID NO: 50076 - RNA, 17 nt, Synthetic Construct
  source 1..17: mol_type = other RNA
gaagttgaccgcctggg

SEQ ID NO: 50077 - RNA, 23 nt, Synthetic Construct
  source 1..23: mol_type = other RNA
taccacagggtagaaccacggac

SEQ ID NO: 50078 - RNA, 23 nt, Synthetic Construct
  source 1..23: mol_type = other RNA
taccacagggtagaaccacggac

SEQ ID NO: 50079 - RNA, 20 nt, Synthetic Construct
  source 1..20: mol_type = other RNA
tggggtagtaggttgtatag

SEQ ID NO: 50080 - RNA, 20 nt, Synthetic Construct
  source 1..20: mol_type = other RNA
tggggtagtaggttgtatag

SEQ ID NO: 50081 - RNA, 34 nt, Synthetic Construct; identical to SEQ ID NO: 2553
  source 1..34: mol_type = other RNA

SEQ ID NO: 50082 - RNA, 34 nt, Synthetic Construct; identical to SEQ ID NO: 2553
  source 1..34: mol_type = other RNA

SEQ ID NO: 50083 - RNA, 16 nt, Synthetic Construct
  source 1..16: mol_type = other RNA
gtctgcggccatacca

SEQ ID NO: 50084 - RNA, 23 nt, Synthetic Construct
  source 1..23: mol_type = other RNA
cagcccgtgttcggaagattttc

SEQ ID NO: 50085 - RNA, 23 nt, Synthetic Construct
  source 1..23: mol_type = other RNA
cagcccgtgttcggaagattttc

SEQ ID NO: 50086 - RNA, 21 nt, Synthetic Construct
  source 1..21: mol_type = other RNA
cataaagtagaaagcactact

SEQ ID NO: 50087 - RNA, 21 nt, Synthetic Construct
  source 1..21: mol_type = other RNA
cataaagtagaaagcactact

SEQ ID NO: 50088 - RNA, 38 nt, Synthetic Construct; identical to SEQ ID NO: 11817
  source 1..38: mol_type = other RNA

SEQ ID NO: 50089 - RNA, 38 nt, Synthetic Construct; identical to SEQ ID NO: 11817
  source 1..38: mol_type = other RNA

SEQ ID NO: 50090 - RNA, 20 nt, Synthetic Construct
  source 1..20: mol_type = other RNA
tgaggtagtaggttgtatgg

SEQ ID NO: 50091 - RNA, 15 nt, Synthetic Construct
  source 1..15: mol_type = other RNA
acccttgtcattagt

SEQ ID NO: 50092 - RNA, 21 nt, Synthetic Construct
  source 1..21: mol_type = other RNA
tcctgtgctgagctgccccga

SEQ ID NO: 50093 - RNA, 22 nt, Synthetic Construct
  source 1..22: mol_type = other RNA
tggggtagtaggttgtatagtt

SEQ ID NO: 50094 - RNA, 22 nt, Synthetic Construct
  source 1..22: mol_type = other RNA
tggggtagtaggttgtatagtt

SEQ ID NO: 50095 - RNA, 19 nt, Synthetic Construct
  source 1..19: mol_type = other RNA
atcacattgccagggattt

SEQ ID NO: 50096 - RNA, 23 nt, Synthetic Construct
  source 1..23: mol_type = other RNA
tccccttggggttgtaggaccac

SEQ ID NO: 50097 - RNA, 23 nt, Synthetic Construct
  source 1..23: mol_type = other RNA
tccccttggggttgtaggaccac

SEQ ID NO: 50098 - RNA, 22 nt, Synthetic Construct
  source 1..22: mol_type = other RNA
tgaagtagtaggttgtgtggtt

SEQ ID NO: 50099 - RNA, 22 nt, Synthetic Construct
  source 1..22: mol_type = other RNA
tgaagtagtaggttgtgtggtt

SEQ ID NO: 50100 - RNA, 21 nt, Synthetic Construct
  source 1..21: mol_type = other RNA
tgaggggcagagggcgagact

SEQ ID NO: 50101 - RNA, 21 nt, Synthetic Construct
  source 1..21: mol_type = other RNA
tgaggggcagagggcgagact

SEQ ID NO: 50102 - RNA, 34 nt, Synthetic Construct; identical to SEQ ID NO: 2291
  source 1..34: mol_type = other RNA

SEQ ID NO: 50103 - RNA, 34 nt, Synthetic Construct; identical to SEQ ID NO: 2291
  source 1..34: mol_type = other RNA

SEQ ID NO: 50104 - RNA, 20 nt, Synthetic Construct
  source 1..20: mol_type = other RNA
tgaggcagtaggttgtatag

SEQ ID NO: 50105 - RNA, 20 nt, Synthetic Construct
  source 1..20: mol_type = other RNA
tgaggcagtaggttgtatag

SEQ ID NO: 50106 - RNA, 20 nt, Synthetic Construct
  source 1..20: mol_type = other RNA
tgaggtggtaggttgtgtgg

SEQ ID NO: 50107 - RNA, 20 nt, Synthetic Construct
  source 1..20: mol_type = other RNA
tgaggtggtaggttgtgtgg

SEQ ID NO: 50108 - RNA, 23 nt, Synthetic Construct
  source 1..23: mol_type = other RNA
gtaaacatccttgactggaagct

SEQ ID NO: 50109 - RNA, 23 nt, Synthetic Construct
  source 1..23: mol_type = other RNA
gtaaacatccttgactggaagct

SEQ ID NO: 50110 - RNA, 23 nt, Synthetic Construct
  source 1..23: mol_type = other RNA
tcactgatcgagtcgtcctgcgc

SEQ ID NO: 50111 - RNA, 23 nt, Synthetic Construct
  source 1..23: mol_type = other RNA
tcactgatcgagtcgtcctgcgc

SEQ ID NO: 50112 - RNA, 34 nt, Synthetic Construct; identical to SEQ ID NO: 2375
  source 1..34: mol_type = other RNA

SEQ ID NO: 50113 - RNA, 21 nt, Synthetic Construct
  source 1..21: mol_type = other RNA
tgaggtagtaggatgtgtggt

SEQ ID NO: 50114 - RNA, 21 nt, Synthetic Construct
  source 1..21: mol_type = other RNA
tgaggtagtaggatgtgtggt

SEQ ID NO: 50115 - RNA, 22 nt, Synthetic Construct
  source 1..22: mol_type = other RNA
tcctgtactgagctgccccggg

SEQ ID NO: 50116 - RNA, 22 nt, Synthetic Construct
  source 1..22: mol_type = other RNA
tcctgtactgagctgccccggg

SEQ ID NO: 50117 - RNA, 22 nt, Synthetic Construct
  source 1..22: mol_type = other RNA
taaggtagtaggttgtatagtt

SEQ ID NO: 50118 - RNA, 22 nt, Synthetic Construct
  source 1..22: mol_type = other RNA
taaggtagtaggttgtatagtt

SEQ ID NO: 50119 - RNA, 22 nt, Synthetic Construct
  source 1..22: mol_type = other RNA
tcgtaccgtgagtgataatgcg

SEQ ID NO: 50120 - RNA, 16 nt, Synthetic Construct
  source 1..16: mol_type = other RNA
gtctacggccatacaa

SEQ ID NO: 50121 - RNA, 16 nt, Synthetic Construct
  source 1..16: mol_type = other RNA
gtctacggccatacaa

SEQ ID NO: 50122 - RNA, 23 nt, Synthetic Construct
  source 1..23: mol_type = other RNA
ggtagcgaaattccttgtcgggt

SEQ ID NO: 50123 - RNA, 23 nt, Synthetic Construct
  source 1..23: mol_type = other RNA
ggtagcgaaattccttgtcgggt

SEQ ID NO: 50124 - RNA, 18 nt, Synthetic Construct
  source 1..18: mol_type = other RNA
gtctgcctcagcgtcggt

SEQ ID NO: 50125 - RNA, 18 nt, Synthetic Construct
  source 1..18: mol_type = other RNA
gtctgcctcagcgtcggt

SEQ ID NO: 50126 - RNA, 23 nt, Synthetic Construct
  source 1..23: mol_type = other RNA
aatgacacgatcactcccgttgt

SEQ ID NO: 50127 - RNA, 23 nt, Synthetic Construct
  source 1..23: mol_type = other RNA
aatgacacgatcactcccgttgt

SEQ ID NO: 50128 - RNA, 28 nt, Synthetic Construct
  source 1..28: mol_type = other RNA
ccccccactgctaaatttgaccggcttt

SEQ ID NO: 50129 - RNA, 23 nt, Synthetic Construct
  source 1..23: mol_type = other RNA
tgaggggcggagagcgagacttt

SEQ ID NO: 50130 - RNA, 23 nt, Synthetic Construct
  source 1..23: mol_type = other RNA
tgaggggcggagagcgagacttt

SEQ ID NO: 50131 - RNA, 20 nt, Synthetic Construct
  source 1..20: mol_type = other RNA
tgaggtagtaggtcgtgtgg

SEQ ID NO: 50132 - RNA, 20 nt, Synthetic Construct
  source 1..20: mol_type = other RNA
tgaggtagtaggtcgtgtgg

SEQ ID NO: 50133 - RNA, 32 nt, Synthetic Construct; identical to SEQ ID NO: 2850
  source 1..32: mol_type = other RNA

SEQ ID NO: 50134 - RNA, 32 nt, Synthetic Construct; identical to SEQ ID NO: 2850
  source 1..32: mol_type = other RNA

SEQ ID NO: 50135 - RNA, 24 nt, Synthetic Construct
  source 1..24: mol_type = other RNA
tcctgtactgagctgccccgagat

SEQ ID NO: 50136 - RNA, 22 nt, Synthetic Construct
  source 1..22: mol_type = other RNA
tcctgtactgtgctgccccgag

SEQ ID NO: 50137 - RNA, 22 nt, Synthetic Construct
  source 1..22: mol_type = other RNA
tcctgtactgtgctgccccgag

SEQ ID NO: 50138 - RNA, 25 nt, Synthetic Construct
  source 1..25: mol_type = other RNA
ttgaggatacgagatcgagacgaca

SEQ ID NO: 50139 - RNA, 17 nt, Synthetic Construct
  source 1..17: mol_type = other RNA
ggcccttatgggtaggg

SEQ ID NO: 50140 - RNA, 17 nt, Synthetic Construct
  source 1..17: mol_type = other RNA
ggcccttatgggtaggg

SEQ ID NO: 50141 - RNA, 35 nt, Synthetic Construct; identical to SEQ ID NO: 2548
  source 1..35: mol_type = other RNA

SEQ ID NO: 50142 - RNA, 35 nt, Synthetic Construct; identical to SEQ ID NO: 2548
  source 1..35: mol_type = other RNA

SEQ ID NO: 50143 - RNA, 25 nt, Synthetic Construct
  source 1..25: mol_type = other RNA
tcggatccgtctgagcttggctttt

SEQ ID NO: 50144 - RNA, 25 nt, Synthetic Construct
  source 1..25: mol_type = other RNA
tcggatccgtctgagcttggctttt

SEQ ID NO: 50145 - RNA, 23 nt, Synthetic Construct
  source 1..23: mol_type = other RNA
tggtaatacggcgtacttagtgt

SEQ ID NO: 50146 - RNA, 22 nt, Synthetic Construct
  source 1..22: mol_type = other RNA
tagcagcacgtaaatatcggcg

SEQ ID NO: 50147 - RNA, 22 nt, Synthetic Construct
  source 1..22: mol_type = other RNA
tagcagcacgtaaatatcggcg

SEQ ID NO: 50148 - RNA, 16 nt, Synthetic Construct
  source 1..16: mol_type = other RNA
gcggctgtagctcagt

SEQ ID NO: 50149 - RNA, 22 nt, Synthetic Construct
  source 1..22: mol_type = other RNA
tgaggtagtagtttgcgctgtt

SEQ ID NO: 50150 - RNA, 22 nt, Synthetic Construct
  source 1..22: mol_type = other RNA
tgaggtagtagtttgcgctgtt

SEQ ID NO: 50151 - RNA, 22 nt, Synthetic Construct
  source 1..22: mol_type = other RNA
taaggtagtaggttgtatagtt

SEQ ID NO: 50152 - RNA, 22 nt, Synthetic Construct
  source 1..22: mol_type = other RNA
tgaggaagtagtttgtgctgtt

SEQ ID NO: 50153 - RNA, 22 nt, Synthetic Construct
  source 1..22: mol_type = other RNA
tgaggaagtagtttgtgctgtt

SEQ ID NO: 50154 - RNA, 22 nt, Synthetic Construct
  source 1..22: mol_type = other RNA
gtcagtttgtcaaataccccat

SEQ ID NO: 50155 - RNA, 22 nt, Synthetic Construct
  source 1..22: mol_type = other RNA
gtcagtttgtcaaataccccat

SEQ ID NO: 50156 - RNA, 18 nt, Synthetic Construct
  source 1..18: mol_type = other RNA
cctgtaccgatcaatagt

SEQ ID NO: 50157 - RNA, 23 nt, Synthetic Construct
  source 1..23: mol_type = other RNA
tcggatccgtctgagcttggctt

SEQ ID NO: 50158 - RNA, 23 nt, Synthetic Construct
  source 1..23: mol_type = other RNA
tcactgatcgagtcgtcctgcgc

SEQ ID NO: 50159 - RNA, 22 nt, Synthetic Construct
  source 1..22: mol_type = other RNA
tgtgcaaatctatgcaaaactg

SEQ ID NO: 50160 - RNA, 21 nt, Synthetic Construct
  source 1..21: mol_type = other RNA
tgaggtagtaggttgtgtggc

SEQ ID NO: 50161 - RNA, 20 nt, Synthetic Construct
  source 1..20: mol_type = other RNA
ctgacctatgaattgacagc

SEQ ID NO: 50162 - RNA, 20 nt, Synthetic Construct
  source 1..20: mol_type = other RNA
cccataaagtagaaagcact

SEQ ID NO: 50163 - RNA, 20 nt, Synthetic Construct
  source 1..20: mol_type = other RNA
cccataaagtagaaagcact

SEQ ID NO: 50164 - RNA, 33 nt, Synthetic Construct; identical to SEQ ID NO: 7469
  source 1..33: mol_type = other RNA

SEQ ID NO: 50165 - RNA, 16 nt, Synthetic Construct
  source 1..16: mol_type = other RNA
cccagaaacccggtcg

SEQ ID NO: 50166 - RNA, 16 nt, Synthetic Construct
  source 1..16: mol_type = other RNA
cccagaaacccggtcg

SEQ ID NO: 50167 - RNA, 23 nt, Synthetic Construct
  source 1..23: mol_type = other RNA
tgtagtgtttcctactttatgga

SEQ ID NO: 50168 - RNA, 16 nt, Synthetic Construct
  source 1..16: mol_type = other RNA
atgcaagtcgaacggt

SEQ ID NO: 50169 - RNA, 16 nt, Synthetic Construct
  source 1..16: mol_type = other RNA
atgcaagtcgaacggt

SEQ ID NO: 50170 - RNA, 34 nt, Synthetic Construct; identical to SEQ ID NO: 2364
  source 1..34: mol_type = other RNA

SEQ ID NO: 50171 - RNA, 34 nt, Synthetic Construct; identical to SEQ ID NO: 2364
  source 1..34: mol_type = other RNA

SEQ ID NO: 50172 - RNA, 21 nt, Synthetic Construct
  source 1..21: mol_type = other RNA
tcctgtctgaatatgggggga

SEQ ID NO: 50173 - RNA, 22 nt, Synthetic Construct
  source 1..22: mol_type = other RNA
caaagtgctgttcgtgcaggta

SEQ ID NO: 50174 - RNA, 22 nt, Synthetic Construct
  source 1..22: mol_type = other RNA
tgaggtagtaggttgtatggtt

SEQ ID NO: 50175 - RNA, 22 nt, Synthetic Construct
  source 1..22: mol_type = other RNA
tgaggtagtaggttgtatggtt

SEQ ID NO: 50176 - RNA, 27 nt, Synthetic Construct
  source 1..27: mol_type = other RNA
cctcccactgctaaatttgactggctt

SEQ ID NO: 50177 - RNA, 20 nt, Synthetic Construct
  source 1..20: mol_type = other RNA
cacatgcaagtcgaacggta

SEQ ID NO: 50178 - RNA, 20 nt, Synthetic Construct
  source 1..20: mol_type = other RNA
cacatgcaagtcgaacggta

SEQ ID NO: 50179 - RNA, 22 nt, Synthetic Construct
  source 1..22: mol_type = other RNA
acagtagtctgcacattggttt

SEQ ID NO: 50180 - RNA, 20 nt, Synthetic Construct
  source 1..20: mol_type = other RNA
taaggtagtaggttgtatag

SEQ ID NO: 50181 - RNA, 20 nt, Synthetic Construct
  source 1..20: mol_type = other RNA
taaggtagtaggttgtatag

SEQ ID NO: 50182 - RNA, 22 nt, Synthetic Construct
  source 1..22: mol_type = other RNA
tagcatatcgagcctgagaaca

SEQ ID NO: 50183 - RNA, 22 nt, Synthetic Construct
  source 1..22: mol_type = other RNA
tagcatatcgagcctgagaaca

SEQ ID NO: 50184 - RNA, 20 nt, Synthetic Construct
  source 1..20: mol_type = other RNA
tgaggtaggaggttgtatag

SEQ ID NO: 50185 - RNA, 15 nt, Synthetic Construct
  source 1..15: mol_type = other RNA
gtcaggatgttggct

SEQ ID NO: 50186 - RNA, 23 nt, Synthetic Construct
  source 1..23: mol_type = other RNA
agcagcattgtacagggctatgg

SEQ ID NO: 50187 - RNA, 43 nt, Synthetic Construct; identical to SEQ ID NO: 6202
  source 1..43: mol_type = other RNA

SEQ ID NO: 50188 - RNA, 43 nt, Synthetic Construct; identical to SEQ ID NO: 6202
  source 1..43: mol_type = other RNA

SEQ ID NO: 50189 - RNA, 22 nt, Synthetic Construct
  source 1..22: mol_type = other RNA
gtaaacggcgggagtaactatg

SEQ ID NO: 50190 - RNA, 21 nt, Synthetic Construct
  source 1..21: mol_type = other RNA
tgaggtagtaggttgtgtgga

SEQ ID NO: 50191 - RNA, 21 nt, Synthetic Construct
  source 1..21: mol_type = other RNA
tgaggtagtaggttgtgtgga

SEQ ID NO: 50192 - RNA, 21 nt, Synthetic Construct
  source 1..21: mol_type = other RNA
cccttggggttgtaggaccac

SEQ ID NO: 50193 - RNA, 21 nt, Synthetic Construct
  source 1..21: mol_type = other RNA
cccttggggttgtaggaccac

SEQ ID NO: 50194 - RNA, 22 nt, Synthetic Construct
  source 1..22: mol_type = other RNA
gggagtgtgacaatggtgtttg

SEQ ID NO: 50195 - RNA, 17 nt, Synthetic Construct
  source 1..17: mol_type = other RNA
agcggtggatgatgtgg

SEQ ID NO: 50196 - RNA, 17 nt, Synthetic Construct
  source 1..17: mol_type = other RNA
agcggtggatgatgtgg

SEQ ID NO: 50197 - RNA, 23 nt, Synthetic Construct
  source 1..23: mol_type = other RNA
tgaggtagtagattgtatagttc

SEQ ID NO: 50198 - RNA, 15 nt, Synthetic Construct
  source 1..15: mol_type = other RNA
gagctgtggataggg

SEQ ID NO: 50199 - RNA, 15 nt, Synthetic Construct
  source 1..15: mol_type = other RNA
gagctgtggataggg

SEQ ID NO: 50200 - RNA, 23 nt, Synthetic Construct
  source 1..23: mol_type = other RNA
tgaggtagtaggttgtgtagttt

SEQ ID NO: 50201 - RNA, 25 nt, Synthetic Construct
  source 1..25: mol_type = other RNA
aatgacacgatcactcccgttgagt

SEQ ID NO: 50202 - RNA, 25 nt, Synthetic Construct
  source 1..25: mol_type = other RNA
aatgacacgatcactcccgttgagt

SEQ ID NO: 50203 - RNA, 15 nt, Synthetic Construct
  source 1..15: mol_type = other RNA
gtcgacgtatagggt

SEQ ID NO: 50204 - RNA, 22 nt, Synthetic Construct
  source 1..22: mol_type = other RNA
tgaggtagtaggttgtgtggat

SEQ ID NO: 50205 - RNA, 23 nt, Synthetic Construct
  source 1..23: mol_type = other RNA
tgaggggcagagagcaagacttt

SEQ ID NO: 50206 - RNA, 23 nt, Synthetic Construct
  source 1..23: mol_type = other RNA
tgaggggcagagagcaagacttt

SEQ ID NO: 50207 - RNA, 23 nt, Synthetic Construct
  source 1..23: mol_type = other RNA
tcctgtactgagccgccccgagt

SEQ ID NO: 50208 - RNA, 20 nt, Synthetic Construct
  source 1..20: mol_type = other RNA
tcctgtaccgatcaatagtg

SEQ ID NO: 50209 - RNA, 20 nt, Synthetic Construct
  source 1..20: mol_type = other RNA
tcctgtaccgatcaatagtg

SEQ ID NO: 50210 - RNA, 36 nt, Synthetic Construct; identical to SEQ ID NO: 2456
  source 1..36: mol_type = other RNA

SEQ ID NO: 50211 - RNA, 25 nt, Synthetic Construct
  source 1..25: mol_type = other RNA
tcgaggatatgagatcgagacgaca

SEQ ID NO: 50212 - RNA, 25 nt, Synthetic Construct
  source 1..25: mol_type = other RNA
tcgaggatatgagatcgagacgaca

SEQ ID NO: 50213 - RNA, 19 nt, Synthetic Construct
  source 1..19: mol_type = other RNA
aacagtcaggatgttggct

SEQ ID NO: 50214 - RNA, 19 nt, Synthetic Construct
  source 1..19: mol_type = other RNA
aacagtcaggatgttggct

SEQ ID NO: 50215 - RNA, 22 nt, Synthetic Construct
  source 1..22: mol_type = other RNA
tcctgtacagagctgccccgag

SEQ ID NO: 50216 - RNA, 22 nt, Synthetic Construct
  source 1..22: mol_type = other RNA
tcctgtacagagctgccccgag

SEQ ID NO: 50217 - RNA, 22 nt, Synthetic Construct
  source 1..22: mol_type = other RNA
tgagatagtagtttgtgctgtt

SEQ ID NO: 50218 - RNA, 25 nt, Synthetic Construct
  source 1..25: mol_type = other RNA
ttgaggatatgagatcgagacaaca

SEQ ID NO: 50219 - RNA, 25 nt, Synthetic Construct
  source 1..25: mol_type = other RNA
ttgaggatatgagatcgagacaaca

SEQ ID NO: 50220 - RNA, 22 nt, Synthetic Construct
  source 1..22: mol_type = other RNA
tgaggtagtaggttgagtggtt

SEQ ID NO: 50221 - RNA, 22 nt, Synthetic Construct
  source 1..22: mol_type = other RNA
tgaggtagtaggttgagtggtt

SEQ ID NO: 50222 - RNA, 22 nt, Synthetic Construct
  source 1..22: mol_type = other RNA
tgaggtagtaggttgtgtggtc

SEQ ID NO: 50223 - RNA, 22 nt, Synthetic Construct
  source 1..22: mol_type = other RNA
tgaggtagtaggttgtgtggtc

SEQ ID NO: 50224 - RNA, 23 nt, Synthetic Construct
  source 1..23: mol_type = other RNA
tctttgttcgattccgttgagta

SEQ ID NO: 50225 - RNA, 23 nt, Synthetic Construct
  source 1..23: mol_type = other RNA
tctttgttcgattccgttgagta

SEQ ID NO: 50226 - RNA, 21 nt, Synthetic Construct
  source 1..21: mol_type = other RNA
tgaggggcagagagcgagacc

SEQ ID NO: 50227 - RNA, 23 nt, Synthetic Construct
  source 1..23: mol_type = other RNA
cccagtgttcagactacctgttc

SEQ ID NO: 50228 - RNA, 37 nt, Synthetic Construct; identical to SEQ ID NO: 4277
  source 1..37: mol_type = other RNA

SEQ ID NO: 50229 - RNA, 21 nt, Synthetic Construct
  source 1..21: mol_type = other RNA
tgaggtagcaggttgtgtggt

SEQ ID NO: 50230 - RNA, 21 nt, Synthetic Construct
  source 1..21: mol_type = other RNA
tgaggtagcaggttgtgtggt

SEQ ID NO: 50231 - RNA, 17 nt, Synthetic Construct
  source 1..17: mol_type = other RNA
accggaggaaggtgggg

SEQ ID NO: 50232 - RNA, 17 nt, Synthetic Construct
  source 1..17: mol_type = other RNA
accggaggaaggtgggg

SEQ ID NO: 50233 - RNA, 21 nt, Synthetic Construct
  source 1..21: mol_type = other RNA
cccttggggttgtaggaccac

SEQ ID NO: 50234 - RNA, 21 nt, Synthetic Construct
  source 1..21: mol_type = other RNA
cccttggggttgtaggaccac

SEQ ID NO: 50235 - RNA, 25 nt, Synthetic Construct
  source 1..25: mol_type = other RNA
atgaggatatgagatcgagacgaca

SEQ ID NO: 50236 - RNA, 25 nt, Synthetic Construct
  source 1..25: mol_type = other RNA
atgaggatatgagatcgagacgaca

SEQ ID NO: 50237 - RNA, 23 nt, Synthetic Construct
  source 1..23: mol_type = other RNA
tcctgtactgagctgccctgagt

SEQ ID NO: 50238 - RNA, 23 nt, Synthetic Construct
  source 1..23: mol_type = other RNA
tcctgtactgagctgccctgagt

SEQ ID NO: 50239 - RNA, 35 nt, Synthetic Construct; identical to SEQ ID NO: 787
  source 1..35: mol_type = other RNA

SEQ ID NO: 50240 - RNA, 35 nt, Synthetic Construct; identical to SEQ ID NO: 787
  source 1..35: mol_type = other RNA

SEQ ID NO: 50241 - RNA, 21 nt, Synthetic Construct
  source 1..21: mol_type = other RNA
ctagactgaggctccttgagg

SEQ ID NO: 50242 - RNA, 21 nt, Synthetic Construct
  source 1..21: mol_type = other RNA
ctagactgaggctccttgagg

SEQ ID NO: 50243 - RNA, 17 nt, Synthetic Construct
  source 1..17: mol_type = other RNA
cccctggacctgtactg

SEQ ID NO: 50244 - RNA, 18 nt, Synthetic Construct
  source 1..18: mol_type = other RNA
tgcgtagatatgcggagg

SEQ ID NO: 50245 - RNA, 18 nt, Synthetic Construct
  source 1..18: mol_type = other RNA
tgcgtagatatgcggagg

SEQ ID NO: 50246 - RNA, 23 nt, Synthetic Construct
  source 1..23: mol_type = other RNA
tgaggtagtagattgtatagttc

SEQ ID NO: 50247 - RNA, 21 nt, Synthetic Construct
  source 1..21: mol_type = other RNA
ccctgtactgagctgccccga

SEQ ID NO: 50248 - RNA, 24 nt, Synthetic Construct
  source 1..24: mol_type = other RNA
tgtgaacatccccgactggaagct

SEQ ID NO: 50249 - RNA, 37 nt, Synthetic Construct; identical to SEQ ID NO: 5125
  source 1..37: mol_type = other RNA

SEQ ID NO: 50250 - RNA, 22 nt, Synthetic Construct
  source 1..22: mol_type = other RNA
tcaagagcaataacgaaaaatg

SEQ ID NO: 50251 - RNA, 22 nt, Synthetic Construct
  source 1..22: mol_type = other RNA
tcaagagcaataacgaaaaatg

SEQ ID NO: 50252 - RNA, 25 nt, Synthetic Construct
  source 1..25: mol_type = other RNA
tcgaggatatgagatcgagacgaca

SEQ ID NO: 50253 - RNA, 24 nt, Synthetic Construct
  source 1..24: mol_type = other RNA
tgtaaacacccccgactggaagct

SEQ ID NO: 50254 - RNA, 34 nt, Synthetic Construct; identical to SEQ ID NO: 2298
  source 1..34: mol_type = other RNA

SEQ ID NO: 50255 - RNA, 34 nt, Synthetic Construct; identical to SEQ ID NO: 2298
  source 1..34: mol_type = other RNA

SEQ ID NO: 50256 - RNA, 22 nt, Synthetic Construct
  source 1..22: mol_type = other RNA
tgtggtagtaggttgtatagtt

SEQ ID NO: 50257 - RNA, 35 nt, Synthetic Construct; identical to SEQ ID NO: 2399
  source 1..35: mol_type = other RNA

SEQ ID NO: 50258 - RNA, 24 nt, Synthetic Construct
  source 1..24: mol_type = other RNA
tttccccttggggttgtaggacca

SEQ ID NO: 50259 - RNA, 24 nt, Synthetic Construct
  source 1..24: mol_type = other RNA
tttccccttggggttgtaggacca

SEQ ID NO: 50260 - RNA, 23 nt, Synthetic Construct
  source 1..23: mol_type = other RNA
tggtaatacgacgtacttagagt

SEQ ID NO: 50261 - RNA, 22 nt, Synthetic Construct
  source 1..22: mol_type = other RNA
tcgtgccgtgagtaataatgcg

SEQ ID NO: 50262 - RNA, 20 nt, Synthetic Construct
  source 1..20: mol_type = other RNA
ttggcctcaagtcaggcagg

SEQ ID NO: 50263 - RNA, 20 nt, Synthetic Construct
  source 1..20: mol_type = other RNA
ttggcctcaagtcaggcagg

SEQ ID NO: 50264 - RNA, 21 nt, Synthetic Construct
  source 1..21: mol_type = other RNA
tcctgcactgagctgccccga

SEQ ID NO: 50265 - RNA, 17 nt, Synthetic Construct
  source 1..17: mol_type = other RNA
tcccggacgagccccca

SEQ ID NO: 50266 - RNA, 17 nt, Synthetic Construct
  source 1..17: mol_type = other RNA
tcccggacgagccccca

SEQ ID NO: 50267 - RNA, 25 nt, Synthetic Construct
  source 1..25: mol_type = other RNA
tgtcagtttgtcaaataccccattt

SEQ ID NO: 50268 - RNA, 36 nt, Synthetic Construct; identical to SEQ ID NO: 11035
  source 1..36: mol_type = other RNA

SEQ ID NO: 50269 - RNA, 37 nt, Synthetic Construct; identical to SEQ ID NO: 2211
  source 1..37: mol_type = other RNA

SEQ ID NO: 50270 - RNA, 27 nt, Synthetic Construct
  source 1..27: mol_type = other RNA
gctttacattggactttgaacagatct

SEQ ID NO: 50271 - RNA, 27 nt, Synthetic Construct
  source 1..27: mol_type = other RNA
gctttacattggactttgaacagatct

SEQ ID NO: 50272 - RNA, 21 nt, Synthetic Construct
  source 1..21: mol_type = other RNA
tcctgtgctgagctgccccga

SEQ ID NO: 50273 - RNA, 21 nt, Synthetic Construct
  source 1..21: mol_type = other RNA
tcctgtgctgagctgccccga

SEQ ID NO: 50274 - RNA, 18 nt, Synthetic Construct
  source 1..18: mol_type = other RNA
gctattgacgaccgtacc

SEQ ID NO: 50275 - RNA, 18 nt, Synthetic Construct
  source 1..18: mol_type = other RNA
gctattgacgaccgtacc

SEQ ID NO: 50276 - RNA, 22 nt, Synthetic Construct
  source 1..22: mol_type = other RNA
ngaggtagtaggttgtatagtt

SEQ ID NO: 50277 - RNA, 22 nt, Synthetic Construct
  source 1..22: mol_type = other RNA
ngaggtagtaggttgtatagtt

SEQ ID NO: 50278 - RNA, 15 nt, Synthetic Construct
  source 1..15: mol_type = other RNA
cccagaaacccggtc

SEQ ID NO: 50279 - RNA, 15 nt, Synthetic Construct
  source 1..15: mol_type = other RNA
cccagaaacccggtc

SEQ ID NO: 50280 - RNA, 16 nt, Synthetic Construct
  source 1..16: mol_type = other RNA
tcagtagctcgaggaa

SEQ ID NO: 50281 - RNA, 25 nt, Synthetic Construct
  source 1..25: mol_type = other RNA
agctcactgatcgagtcgtcctgcg

SEQ ID NO: 50282 - RNA, 25 nt, Synthetic Construct
  source 1..25: mol_type = other RNA
agctcactgatcgagtcgtcctgcg

SEQ ID NO: 50283 - RNA, 21 nt, Synthetic Construct
  source 1..21: mol_type = other RNA
ctagactgaagccccttgagg

SEQ ID NO: 50284 - RNA, 21 nt, Synthetic Construct
  source 1..21: mol_type = other RNA
ctagactgaagccccttgagg

SEQ ID NO: 50285 - RNA, 21 nt, Synthetic Construct
  source 1..21: mol_type = other RNA
tgaggtagtaggatgtgtggt

SEQ ID NO: 50286 - RNA, 21 nt, Synthetic Construct
  source 1..21: mol_type = other RNA
tgaggtagtaggatgtgtggt

SEQ ID NO: 50287 - RNA, 22 nt, Synthetic Construct
  source 1..22: mol_type = other RNA
tgaggtagtagattgtgtagtt

SEQ ID NO: 50288 - RNA, 22 nt, Synthetic Construct
  source 1..22: mol_type = other RNA
tgaggtagtagattgtgtagtt

SEQ ID NO: 50289 - RNA, 23 nt, Synthetic Construct
  source 1..23: mol_type = other RNA
tgaggaagtaggttgtgtggttt

SEQ ID NO: 50290 - RNA, 23 nt, Synthetic Construct
  source 1..23: mol_type = other RNA
tgaggaagtaggttgtgtggttt

SEQ ID NO: 50291 - RNA, 19 nt, Synthetic Construct
  source 1..19: mol_type = other RNA
gagaaagctcacaagaact

SEQ ID NO: 50292 - RNA, 19 nt, Synthetic Construct
  source 1..19: mol_type = other RNA
gagaaagctcacaagaact

SEQ ID NO: 50293 - RNA, 16 nt, Synthetic Construct
  source 1..16: mol_type = other RNA
atctacggccatacca

SEQ ID NO: 50294 - RNA, 16 nt, Synthetic Construct
  source 1..16: mol_type = other RNA
atctacggccatacca

SEQ ID NO: 50295 - RNA, 27 nt, Synthetic Construct
  source 1..27: mol_type = other RNA
ccccccactgctaaatttgactggctc

SEQ ID NO: 50296 - RNA, 15 nt, Synthetic Construct
  source 1..15: mol_type = other RNA
accgcttttgtcagg

SEQ ID NO: 50297 - RNA, 22 nt, Synthetic Construct
  source 1..22: mol_type = other RNA
tgaagtagtagtttgtgctgtt

SEQ ID NO: 50298 - RNA, 32 nt, Synthetic Construct; identical to SEQ ID NO: 770
  source 1..32: mol_type = other RNA

SEQ ID NO: 50299 - RNA, 32 nt, Synthetic Construct; identical to SEQ ID NO: 770
  source 1..32: mol_type = other RNA

SEQ ID NO: 50300 - RNA, 24 nt, Synthetic Construct
  source 1..24: mol_type = other RNA
gtctttgttcgattccgttgagta

SEQ ID NO: 50301 - RNA, 22 nt, Synthetic Construct
  source 1..22: mol_type = other RNA
tgaggtagtagtttgtgctgta

SEQ ID NO: 50302 - RNA, 22 nt, Synthetic Construct
  source 1..22: mol_type = other RNA
tgaggtagtagtttgtgctgta

SEQ ID NO: 50303 - RNA, 21 nt, Synthetic Construct
  source 1..21: mol_type = other RNA
ctttgttcgattccgttgagt

SEQ ID NO: 50304 - RNA, 22 nt, Synthetic Construct
  source 1..22: mol_type = other RNA
tcactgatcgagtcgtcctgcg

SEQ ID NO: 50305 - RNA, 22 nt, Synthetic Construct
  source 1..22: mol_type = other RNA
tcactgatcgagtcgtcctgcg

SEQ ID NO: 50306 - RNA, 15 nt, Synthetic Construct
  source 1..15: mol_type = other RNA
cagtgaaacgagtca

SEQ ID NO: 50307 - RNA, 15 nt, Synthetic Construct
  source 1..15: mol_type = other RNA
cagtgaaacgagtca

SEQ ID NO: 50308 - RNA, 22 nt, Synthetic Construct
  source 1..22: mol_type = other RNA
tgaggtagtagattgtatagtc

SEQ ID NO: 50309 - RNA, 16 nt, Synthetic Construct
  source 1..16: mol_type = other RNA
ggccgtcgtcagctcg

SEQ ID NO: 50310 - RNA, 36 nt, Synthetic Construct; identical to SEQ ID NO: 2520
  source 1..36: mol_type = other RNA

SEQ ID NO: 50311 - RNA, 36 nt, Synthetic Construct; identical to SEQ ID NO: 2520
  source 1..36: mol_type = other RNA

SEQ ID NO: 50312 - RNA, 20 nt, Synthetic Construct
  source 1..20: mol_type = other RNA
tgaggaagtaggttgtgtgg

SEQ ID NO: 50313 - RNA, 22 nt, Synthetic Construct
  source 1..22: mol_type = other RNA
tgaggtagtagtttgtgccgtt

SEQ ID NO: 50314 - RNA, 22 nt, Synthetic Construct
  source 1..22: mol_type = other RNA
tgaggtagtagtttgtgccgtt

SEQ ID NO: 50315 - RNA, 21 nt, Synthetic Construct
  source 1..21: mol_type = other RNA
acagtagtctgcacattggtt

SEQ ID NO: 50316 - RNA, 21 nt, Synthetic Construct
  source 1..21: mol_type = other RNA
acagtagtctgcacattggtt

SEQ ID NO: 50317 - RNA, 23 nt, Synthetic Construct
  source 1..23: mol_type = other RNA
tggggggcagagagcgagacttt

SEQ ID NO: 50318 - RNA, 31 nt, Synthetic Construct; identical to SEQ ID NO: 285
  source 1..31: mol_type = other RNA

SEQ ID NO: 50319 - RNA, 24 nt, Synthetic Construct
  source 1..24: mol_type = other RNA
gtcagtttgtcaaataccccaatt

SEQ ID NO: 50320 - RNA, 24 nt, Synthetic Construct
  source 1..24: mol_type = other RNA
gtcagtttgtcaaataccccaatt

SEQ ID NO: 50321 - RNA, 20 nt, Synthetic Construct
  source 1..20: mol_type = other RNA
tgaggtagtaggttgtatgg

SEQ ID NO: 50322 - RNA, 20 nt, Synthetic Construct
  source 1..20: mol_type = other RNA
tgaggtagtaggttgtatgg

SEQ ID NO: 50323 - RNA, 15 nt, Synthetic Construct
  source 1..15: mol_type = other RNA
tcctgacggccatag

SEQ ID NO: 50324 - RNA, 15 nt, Synthetic Construct
  source 1..15: mol_type = other RNA
tcctgacggccatag

SEQ ID NO: 50325 - RNA, 22 nt, Synthetic Construct
  source 1..22: mol_type = other RNA
tgaggtagtaggttgtgtggat

SEQ ID NO: 50326 - RNA, 22 nt, Synthetic Construct
  source 1..22: mol_type = other RNA
tgaggtagtaggttgtgtggat

SEQ ID NO: 50327 - RNA, 18 nt, Synthetic Construct
  source 1..18: mol_type = other RNA
cgactcttagcggtggat

SEQ ID NO: 50328 - RNA, 18 nt, Synthetic Construct
  source 1..18: mol_type = other RNA
cgactcttagcggtggat

SEQ ID NO: 50329 - RNA, 20 nt, Synthetic Construct
  source 1..20: mol_type = other RNA
tgaggtagtaggttgtgcgg

SEQ ID NO: 50330 - RNA, 20 nt, Synthetic Construct
  source 1..20: mol_type = other RNA
tgaggtagtaggttgtgcgg

SEQ ID NO: 50331 - RNA, 22 nt, Synthetic Construct
  source 1..22: mol_type = other RNA
tgtggtagtagtttgtgctgtt

SEQ ID NO: 50332 - RNA, 16 nt, Synthetic Construct
  source 1..16: mol_type = other RNA
ctgacgctcatgcacg

SEQ ID NO: 50333 - RNA, 22 nt, Synthetic Construct
  source 1..22: mol_type = other RNA
tgaggtagtaggttgaatagtt

SEQ ID NO: 50334 - RNA, 22 nt, Synthetic Construct
  source 1..22: mol_type = other RNA
tgaggtagtaggttgaatagtt

SEQ ID NO: 50335 - RNA, 22 nt, Synthetic Construct
  source 1..22: mol_type = other RNA
tgaggtagtaggttgtgtggct

SEQ ID NO: 50336 - RNA, 22 nt, Synthetic Construct
  source 1..22: mol_type = other RNA
tgaggtagtaggttgtgtggct

SEQ ID NO: 50337 - RNA, 24 nt, Synthetic Construct
  source 1..24: mol_type = other RNA
tgtcagtttgtcaaataccccaaa

SEQ ID NO: 50338 - RNA, 24 nt, Synthetic Construct
  source 1..24: mol_type = other RNA
tgtcagtttgtcaaataccccaaa

SEQ ID NO: 50339 - RNA, 22 nt, Synthetic Construct
  source 1..22: mol_type = other RNA
atataatacaacctgctaagtg

SEQ ID NO: 50340 - RNA, 22 nt, Synthetic Construct
  source 1..22: mol_type = other RNA
cgaggtagtaggttgtgtggtt

SEQ ID NO: 50341 - RNA, 22 nt, Synthetic Construct
  source 1..22: mol_type = other RNA
cgaggtagtaggttgtgtggtt

SEQ ID NO: 50342 - RNA, 21 nt, Synthetic Construct
  source 1..21: mol_type = other RNA
tggggggcagagagcgagact

SEQ ID NO: 50343 - RNA, 21 nt, Synthetic Construct
  source 1..21: mol_type = other RNA
tggggggcagagagcgagact

SEQ ID NO: 50344 - RNA, 20 nt, Synthetic Construct
  source 1..20: mol_type = other RNA
tgaggtagtaggttgtacag

SEQ ID NO: 50345 - RNA, 20 nt, Synthetic Construct
  source 1..20: mol_type = other RNA
tgaggtagtaggttgtacag

SEQ ID NO: 50346 - RNA, 19 nt, Synthetic Construct
  source 1..19: mol_type = other RNA
gtccggatcgtagtctgca

SEQ ID NO: 50347 - RNA, 19 nt, Synthetic Construct
  source 1..19: mol_type = other RNA
gtccggatcgtagtctgca

SEQ ID NO: 50348 - RNA, 22 nt, Synthetic Construct
  source 1..22: mol_type = other RNA
tagcagcacgtaagtattggcg

SEQ ID NO: 50349 - RNA, 22 nt, Synthetic Construct
  source 1..22: mol_type = other RNA
tagcagcacgtaagtattggcg

SEQ ID NO: 50350 - RNA, 22 nt, Synthetic Construct
  source 1..22: mol_type = other RNA
tgaggtagtaggttgaatagtt

SEQ ID NO: 50351 - RNA, 22 nt, Synthetic Construct
  source 1..22: mol_type = other RNA
tgaggtagtaggttgaatagtt

SEQ ID NO: 50352 - RNA, 23 nt, Synthetic Construct
  source 1..23: mol_type = other RNA
tgtagtgtttcctactttatggt

SEQ ID NO: 50353 - RNA, 22 nt, Synthetic Construct
  source 1..22: mol_type = other RNA
tagcagcacataatggtttgtg

SEQ ID NO: 50354 - RNA, 22 nt, Synthetic Construct
  source 1..22: mol_type = other RNA
tagcagcacataatggtttgtg

SEQ ID NO: 50355 - RNA, 27 nt, Synthetic Construct
  source 1..27: mol_type = other RNA
ccccccactgctaaattagactggctt

SEQ ID NO: 50356 - RNA, 22 nt, Synthetic Construct
  source 1..22: mol_type = other RNA
aagctgccagttgaagaactgt

SEQ ID NO: 50357 - RNA, 22 nt, Synthetic Construct
  source 1..22: mol_type = other RNA
aagctgccagttgaagaactgt

SEQ ID NO: 50358 - RNA, 22 nt, Synthetic Construct
  source 1..22: mol_type = other RNA
tcctgcactgagctgccccgag

SEQ ID NO: 50359 - RNA, 22 nt, Synthetic Construct
  source 1..22: mol_type = other RNA
tcctgcactgagctgccccgag

SEQ ID NO: 50360 - RNA, 24 nt, Synthetic Construct
  source 1..24: mol_type = other RNA
gcgagagtaggacgttgccaggtt

SEQ ID NO: 50361 - RNA, 24 nt, Synthetic Construct
  source 1..24: mol_type = other RNA
gcgagagtaggacgttgccaggtt

SEQ ID NO: 50362 - RNA, 42 nt, Synthetic Construct; identical to SEQ ID NO: 19836
  source 1..42: mol_type = other RNA

SEQ ID NO: 50363 - RNA, 27 nt, Synthetic Construct
  source 1..27: mol_type = other RNA
ccccccactgctaaatttgattggctt

SEQ ID NO: 50364 - RNA, 27 nt, Synthetic Construct
  source 1..27: mol_type = other RNA
ccccccactgctaaatttgattggctt

SEQ ID NO: 50365 - RNA, 20 nt, Synthetic Construct
  source 1..20: mol_type = other RNA
tgaggtagtaggtcgtatag

SEQ ID NO: 50366 - RNA, 20 nt, Synthetic Construct
  source 1..20: mol_type = other RNA
tgaggtagtaggtcgtatag

SEQ ID NO: 50367 - RNA, 17 nt, Synthetic Construct
  source 1..17: mol_type = other RNA
acagtcaggatgttggc

SEQ ID NO: 50368 - RNA, 20 nt, Synthetic Construct
  source 1..20: mol_type = other RNA
tccctgagaccctaacttgt

SEQ ID NO: 50369 - RNA, 20 nt, Synthetic Construct
  source 1..20: mol_type = other RNA
tgaggtagtaggttgtgagg

SEQ ID NO: 50370 - RNA, 21 nt, Synthetic Construct
  source 1..21: mol_type = other RNA
tgaggaagtaggttgtatagt

SEQ ID NO: 50371 - RNA, 22 nt, Synthetic Construct
  source 1..22: mol_type = other RNA
tggggtagtaggttgtgtggtt

SEQ ID NO: 50372 - RNA, 24 nt, Synthetic Construct
  source 1..24: mol_type = other RNA
gctcactgatcgagtcgtcctgcg

SEQ ID NO: 50373 - RNA, 24 nt, Synthetic Construct
  source 1..24: mol_type = other RNA
gctcactgatcgagtcgtcctgcg

SEQ ID NO: 50374 - RNA, 27 nt, Synthetic Construct
  source 1..27: mol_type = other RNA
ccccccactgctaaatttgactagctt

SEQ ID NO: 50375 - RNA, 15 nt, Synthetic Construct
  source 1..15: mol_type = other RNA
accgcttttgtcagg

SEQ ID NO: 50376 - RNA, 15 nt, Synthetic Construct
  source 1..15: mol_type = other RNA
accgcttttgtcagg

SEQ ID NO: 50377 - RNA, 22 nt, Synthetic Construct
  source 1..22: mol_type = other RNA
tagcttatcagactgatgttga

SEQ ID NO: 50378 - RNA, 22 nt, Synthetic Construct
  source 1..22: mol_type = other RNA
tagcttatcagactgatgttga

SEQ ID NO: 50379 - RNA, 23 nt, Synthetic Construct
  source 1..23: mol_type = other RNA
tggtagtacgacgtacttagtgt

SEQ ID NO: 50380 - RNA, 21 nt, Synthetic Construct
  source 1..21: mol_type = other RNA
atgtcccacccccactcctgt

SEQ ID NO: 50381 - RNA, 21 nt, Synthetic Construct
  source 1..21: mol_type = other RNA
atgtcccacccccactcctgt

SEQ ID NO: 50382 - RNA, 35 nt, Synthetic Construct; identical to SEQ ID NO: 2615
  source 1..35: mol_type = other RNA

SEQ ID NO: 50383 - RNA, 35 nt, Synthetic Construct; identical to SEQ ID NO: 2615
  source 1..35: mol_type = other RNA

SEQ ID NO: 50384 - RNA, 15 nt, Synthetic Construct
  source 1..15: mol_type = other RNA
gcgtagatatgcgga

SEQ ID NO: 50385 - RNA, 15 nt, Synthetic Construct
  source 1..15: mol_type = other RNA
gcgtagatatgcgga

SEQ ID NO: 50386 - RNA, 31 nt, Synthetic Construct; identical to SEQ ID NO: 2295
  source 1..31: mol_type = other RNA

SEQ ID NO: 50387 - RNA, 22 nt, Synthetic Construct
  source 1..22: mol_type = other RNA
tgaggtagtaggttgtgtgatt

SEQ ID NO: 50388 - RNA, 23 nt, Synthetic Construct
  source 1..23: mol_type = other RNA
caaagtgttgttcgtgcaggtag

SEQ ID NO: 50389 - RNA, 23 nt, Synthetic Construct
  source 1..23: mol_type = other RNA
caaagtgttgttcgtgcaggtag

SEQ ID NO: 50390 - RNA, 18 nt, Synthetic Construct
  source 1..18: mol_type = other RNA
atcgctagtaatcgcgga

SEQ ID NO: 50391 - RNA, 18 nt, Synthetic Construct
  source 1..18: mol_type = other RNA
atcgctagtaatcgcgga

SEQ ID NO: 50392 - RNA, 16 nt, Synthetic Construct
  source 1..16: mol_type = other RNA
gtctacggccatacta

SEQ ID NO: 50393 - RNA, 21 nt, Synthetic Construct
  source 1..21: mol_type = other RNA
cacgtcatacaatggccggga

SEQ ID NO: 50394 - RNA, 21 nt, Synthetic Construct
  source 1..21: mol_type = other RNA
cacgtcatacaatggccggga

SEQ ID NO: 50395 - RNA, 23 nt, Synthetic Construct
  source 1..23: mol_type = other RNA
tgaggtagtaggttgtgtggtct

SEQ ID NO: 50396 - RNA, 23 nt, Synthetic Construct
  source 1..23: mol_type = other RNA
tgaggtagtaggttgtgtggtct

SEQ ID NO: 50397 - RNA, 22 nt, Synthetic Construct
  source 1..22: mol_type = other RNA
cattgcgcttgtctcggtctga

SEQ ID NO: 50398 - RNA, 25 nt, Synthetic Construct
  source 1..25: mol_type = other RNA
caacggaatcccaaaagcagctgtt

SEQ ID NO: 50399 - RNA, 25 nt, Synthetic Construct
  source 1..25: mol_type = other RNA
caacggaatcccaaaagcagctgtt

SEQ ID NO: 50400 - RNA, 19 nt, Synthetic Construct
  source 1..19: mol_type = other RNA
agcgaaattccttgtcggg

SEQ ID NO: 50401 - RNA, 19 nt, Synthetic Construct
  source 1..19: mol_type = other RNA
agcgaaattccttgtcggg

SEQ ID NO: 50402 - RNA, 16 nt, Synthetic Construct
  source 1..16: mol_type = other RNA
atgcaagtcgaacggt

SEQ ID NO: 50403 - RNA, 20 nt, Synthetic Construct
  source 1..20: mol_type = other RNA
tgaggcagtaggttgtgtgg

SEQ ID NO: 50404 - RNA, 20 nt, Synthetic Construct
  source 1..20: mol_type = other RNA
tgaggcagtaggttgtgtgg

SEQ ID NO: 50405 - RNA, 22 nt, Synthetic Construct
  source 1..22: mol_type = other RNA
tgaggtagtagattgtatagct

SEQ ID NO: 50406 - RNA, 22 nt, Synthetic Construct
  source 1..22: mol_type = other RNA
tgaggtagtagattgtatagct

SEQ ID NO: 50407 - RNA, 24 nt, Synthetic Construct
  source 1..24: mol_type = other RNA
tcagtgcatcacagaactttgttt

SEQ ID NO: 50408 - RNA, 22 nt, Synthetic Construct
  source 1..22: mol_type = other RNA
tggaatgtgaagaagtatgtat

SEQ ID NO: 50409 - RNA, 22 nt, Synthetic Construct
  source 1..22: mol_type = other RNA
tggaatgtgaagaagtatgtat

SEQ ID NO: 50410 - RNA, 21 nt, Synthetic Construct
  source 1..21: mol_type = other RNA
cgtaccgtgagtaataatgcg

SEQ ID NO: 50411 - RNA, 25 nt, Synthetic Construct
  source 1..25: mol_type = other RNA
ttgaggatatgggatcgagacgaca

SEQ ID NO: 50412 - RNA, 23 nt, Synthetic Construct
  source 1..23: mol_type = other RNA
taaggtgcatctagtgcagatag

SEQ ID NO: 50413 - RNA, 22 nt, Synthetic Construct
  source 1..22: mol_type = other RNA
cattgcacttgtctcggcctga

SEQ ID NO: 50414 - RNA, 27 nt, Synthetic Construct
  source 1..27: mol_type = other RNA
ccccccactgctaaatttggctggctt

SEQ ID NO: 50415 - RNA, 27 nt, Synthetic Construct
  source 1..27: mol_type = other RNA
ccccccactgctaaatttggctggctt

SEQ ID NO: 50416 - RNA, 32 nt, Synthetic Construct; identical to SEQ ID NO: 2467
  source 1..32: mol_type = other RNA

SEQ ID NO: 50417 - RNA, 21 nt, Synthetic Construct
  source 1..21: mol_type = other RNA
ggagtatgcagagcaagatca

SEQ ID NO: 50418 - RNA, 25 nt, Synthetic Construct
  source 1..25: mol_type = other RNA
ttgaggatatgagatcgggacgaca

SEQ ID NO: 50419 - RNA, 25 nt, Synthetic Construct
  source 1..25: mol_type = other RNA
ttgaggatatgagatcgggacgaca

SEQ ID NO: 50420 - RNA, 22 nt, Synthetic Construct
  source 1..22: mol_type = other RNA
tcgtatcgtgagtaataatgcg

SEQ ID NO: 50421 - RNA, 23 nt, Synthetic Construct
  source 1..23: mol_type = other RNA
tcctgtactgggctgccccgaga

SEQ ID NO: 50422 - RNA, 23 nt, Synthetic Construct
  source 1..23: mol_type = other RNA
tcctgtactgggctgccccgaga

SEQ ID NO: 50423 - RNA, 23 nt, Synthetic Construct
  source 1..23: mol_type = other RNA
tggtaataagacgtacttagtgt

SEQ ID NO: 50424 - RNA, 23 nt, Synthetic Construct
  source 1..23: mol_type = other RNA
tggtaataagacgtacttagtgt

SEQ ID NO: 50425 - RNA, 23 nt, Synthetic Construct
  source 1..23: mol_type = other RNA
tggtaatacgacgtacttagagt

SEQ ID NO: 50426 - RNA, 23 nt, Synthetic Construct
  source 1..23: mol_type = other RNA
tggtaatacgacgtacttagagt

SEQ ID NO: 50427 - RNA, 36 nt, Synthetic Construct; identical to SEQ ID NO: 744
  source 1..36: mol_type = other RNA

SEQ ID NO: 50428 - RNA, 36 nt, Synthetic Construct; identical to SEQ ID NO: 744
  source 1..36: mol_type = other RNA

SEQ ID NO: 50429 - RNA, 23 nt, Synthetic Construct
  source 1..23: mol_type = other RNA
tccccttggggttgtaggaccac

SEQ ID NO: 50430 - RNA, 23 nt, Synthetic Construct
  source 1..23: mol_type = other RNA
tccccttggggttgtaggaccac

SEQ ID NO: 50431 - RNA, 23 nt, Synthetic Construct
  source 1..23: mol_type = other RNA
tcttggagtaggtcattgggtgg

SEQ ID NO: 50432 - RNA, 25 nt, Synthetic Construct
  source 1..25: mol_type = other RNA
atttccccttggggttgtaggacca

SEQ ID NO: 50433 - RNA, 25 nt, Synthetic Construct
  source 1..25: mol_type = other RNA
atttccccttggggttgtaggacca

SEQ ID NO: 50434 - RNA, 25 nt, Synthetic Construct
  source 1..25: mol_type = other RNA
ttgaggatacgagatcgagacgaca

SEQ ID NO: 50435 - RNA, 25 nt, Synthetic Construct
  source 1..25: mol_type = other RNA
ttgaggatacgagatcgagacgaca

SEQ ID NO: 50436 - RNA, 22 nt, Synthetic Construct
  source 1..22: mol_type = other RNA
cgttgcacttgtctcggtctga

SEQ ID NO: 50437 - RNA, 22 nt, Synthetic Construct
  source 1..22: mol_type = other RNA
cgttgcacttgtctcggtctga

SEQ ID NO: 50438 - RNA, 16 nt, Synthetic Construct
  source 1..16: mol_type = other RNA
ggcgggggtcgctggt

SEQ ID NO: 50439 - RNA, 23 nt, Synthetic Construct
  source 1..23: mol_type = other RNA
agaggggcagagagcgagacttt

SEQ ID NO: 50440 - RNA, 21 nt, Synthetic Construct
  source 1..21: mol_type = other RNA
tggagtgtggcaatggtgttt

SEQ ID NO: 50441 - RNA, 21 nt, Synthetic Construct
  source 1..21: mol_type = other RNA
tggagtgtggcaatggtgttt

SEQ ID NO: 50442 - RNA, 21 nt, Synthetic Construct
  source 1..21: mol_type = other RNA
tgaggtagtaggttgtgtggt

SEQ ID NO: 50443 - RNA, 21 nt, Synthetic Construct
  source 1..21: mol_type = other RNA
tgaggtagtaggttgtgtggt

SEQ ID NO: 50444 - RNA, 23 nt, Synthetic Construct
  source 1..23: mol_type = other RNA
tgaggtagtaggttgtgcggttt

SEQ ID NO: 50445 - RNA, 26 nt, Synthetic Construct
  source 1..26: mol_type = other RNA
tgtcggctcatctcatcctggggctg

SEQ ID NO: 50446 - RNA, 20 nt, Synthetic Construct
  source 1..20: mol_type = other RNA
tgaggtagtaagttgtattg

SEQ ID NO: 50447 - RNA, 23 nt, Synthetic Construct
  source 1..23: mol_type = other RNA
tgaggtagtaggttgtgtggtta

SEQ ID NO: 50448 - RNA, 23 nt, Synthetic Construct
  source 1..23: mol_type = other RNA
tgaggtagtaggttgtgtggtta

SEQ ID NO: 50449 - RNA, 19 nt, Synthetic Construct
  source 1..19: mol_type = other RNA
acatgcaagtcgaacggta

SEQ ID NO: 50450 - RNA, 28 nt, Synthetic Construct
  source 1..28: mol_type = other RNA
ccccccactgctaaatttggctggcttt

SEQ ID NO: 50451 - RNA, 28 nt, Synthetic Construct
  source 1..28: mol_type = other RNA
ccccccactgctaaatttggctggcttt

SEQ ID NO: 50452 - RNA, 22 nt, Synthetic Construct
  source 1..22: mol_type = other RNA
tgaggtagtaggttgtgtgatt

SEQ ID NO: 50453 - RNA, 22 nt, Synthetic Construct
  source 1..22: mol_type = other RNA
tgaggtagtaggttgtgtgatt

SEQ ID NO: 50454 - RNA, 27 nt, Synthetic Construct
  source 1..27: mol_type = other RNA
ccccccgctgctaaatttgactggcta

SEQ ID NO: 50455 - RNA, 27 nt, Synthetic Construct
  source 1..27: mol_type = other RNA
ccccccgctgctaaatttgactggcta

SEQ ID NO: 50456 - RNA, 34 nt, Synthetic Construct; identical to SEQ ID NO: 11269
  source 1..34: mol_type = other RNA

SEQ ID NO: 50457 - RNA, 34 nt, Synthetic Construct; identical to SEQ ID NO: 11269
  source 1..34: mol_type = other RNA

SEQ ID NO: 50458 - RNA, 19 nt, Synthetic Construct
  source 1..19: mol_type = other RNA
aggacagtgaaacgagtca

SEQ ID NO: 50459 - RNA, 22 nt, Synthetic Construct
  source 1..22: mol_type = other RNA
tcgtaccgtgagtaatagtgcg

SEQ ID NO: 50460 - RNA, 17 nt, Synthetic Construct
  source 1..17: mol_type = other RNA
accaaggggtcgtgggt

SEQ ID NO: 50461 - RNA, 21 nt, Synthetic Construct
  source 1..21: mol_type = other RNA
taaggtagtaggttgtatagt

SEQ ID NO: 50462 - RNA, 21 nt, Synthetic Construct
  source 1..21: mol_type = other RNA
taaggtagtaggttgtatagt

SEQ ID NO: 50463 - RNA, 21 nt, Synthetic Construct
  source 1..21: mol_type = other RNA
cgaggtagtagtttgtgctgt

SEQ ID NO: 50464 - RNA, 20 nt, Synthetic Construct
  source 1..20: mol_type = other RNA
tgaggcagtaggttgtatag

SEQ ID NO: 50465 - RNA, 20 nt, Synthetic Construct
  source 1..20: mol_type = other RNA
tgaggcagtaggttgtatag

SEQ ID NO: 50466 - RNA, 21 nt, Synthetic Construct
  source 1..21: mol_type = other RNA
taatactgcctggtaatgatg

SEQ ID NO: 50467 - RNA, 21 nt, Synthetic Construct
  source 1..21: mol_type = other RNA
taatactgcctggtaatgatg

SEQ ID NO: 50468 - RNA, 21 nt, Synthetic Construct
  source 1..21: mol_type = other RNA
tgaggtagtagtttgtgctgc

SEQ ID NO: 50469 - RNA, 27 nt, Synthetic Construct
  source 1..27: mol_type = other RNA
cggtataccgaagctctaggtgcggca

SEQ ID NO: 50470 - RNA, 27 nt, Synthetic Construct
  source 1..27: mol_type = other RNA
cggtataccgaagctctaggtgcggca

SEQ ID NO: 50471 - RNA, 22 nt, Synthetic Construct
  source 1..22: mol_type = other RNA
tgaggtagtaggttatatagtt

SEQ ID NO: 50472 - RNA, 22 nt, Synthetic Construct
  source 1..22: mol_type = other RNA
tgaggtagtaggttatatagtt

SEQ ID NO: 50473 - RNA, 22 nt, Synthetic Construct
  source 1..22: mol_type = other RNA
tgaggtagtagtttgcgctgtt

SEQ ID NO: 50474 - RNA, 22 nt, Synthetic Construct
  source 1..22: mol_type = other RNA
tgaggtagtagtttgcgctgtt

SEQ ID NO: 50475 - RNA, 22 nt, Synthetic Construct
  source 1..22: mol_type = other RNA
tgaggtagtgggttgtgtggtt

SEQ ID NO: 50476 - RNA, 20 nt, Synthetic Construct
  source 1..20: mol_type = other RNA
tagcttatcagactgatgtt

SEQ ID NO: 50477 - RNA, 20 nt, Synthetic Construct
  source 1..20: mol_type = other RNA
tagcttatcagactgatgtt

SEQ ID NO: 50478 - RNA, 21 nt, Synthetic Construct
  source 1..21: mol_type = other RNA
tggagtgtgacaatggtgttc

SEQ ID NO: 50479 - RNA, 21 nt, Synthetic Construct
  source 1..21: mol_type = other RNA
cgaggtagtaggttgtgtggt

SEQ ID NO: 50480 - RNA, 37 nt, Synthetic Construct; identical to SEQ ID NO: 2482
  source 1..37: mol_type = other RNA

SEQ ID NO: 50481 - RNA, 18 nt, Synthetic Construct
  source 1..18: mol_type = other RNA
accaaggggtcgtgggtt

SEQ ID NO: 50482 - RNA, 18 nt, Synthetic Construct
  source 1..18: mol_type = other RNA
accaaggggtcgtgggtt

SEQ ID NO: 50483 - RNA, 21 nt, Synthetic Construct
  source 1..21: mol_type = other RNA
tgaggggcagagagcgagacc

SEQ ID NO: 50484 - RNA, 21 nt, Synthetic Construct
  source 1..21: mol_type = other RNA
tgaggggcagagagcgagacc

SEQ ID NO: 50485 - RNA, 21 nt, Synthetic Construct
  source 1..21: mol_type = other RNA
tagcagcacgtaatattggcg

SEQ ID NO: 50486 - RNA, 21 nt, Synthetic Construct
  source 1..21: mol_type = other RNA
tagcagcacgtaatattggcg

SEQ ID NO: 50487 - RNA, 31 nt, Synthetic Construct; identical to SEQ ID NO: 5506
  source 1..31: mol_type = other RNA

SEQ ID NO: 50488 - RNA, 23 nt, Synthetic Construct
  source 1..23: mol_type = other RNA
tgaggtagtaggttgtgtagttt

SEQ ID NO: 50489 - RNA, 23 nt, Synthetic Construct
  source 1..23: mol_type = other RNA
tgaggtagtaggttgtgtagttt

SEQ ID NO: 50490 - RNA, 19 nt, Synthetic Construct
  source 1..19: mol_type = other RNA
acatgcaagtcgaacggta

SEQ ID NO: 50491 - RNA, 19 nt, Synthetic Construct
  source 1..19: mol_type = other RNA
acatgcaagtcgaacggta

SEQ ID NO: 50492 - RNA, 21 nt, Synthetic Construct
  source 1..21: mol_type = other RNA
tgaggcagtaggttgtgtggt

SEQ ID NO: 50493 - RNA, 21 nt, Synthetic Construct
  source 1..21: mol_type = other RNA
tgaggcagtaggttgtgtggt

SEQ ID NO: 50494 - RNA, 27 nt, Synthetic Construct
  source 1..27: mol_type = other RNA
ccccccactgctaaattcgactggctt

SEQ ID NO: 50495 - RNA, 22 nt, Synthetic Construct
  source 1..22: mol_type = other RNA
gaagcacattcgcacatcatat

SEQ ID NO: 50496 - RNA, 22 nt, Synthetic Construct
  source 1..22: mol_type = other RNA
gaagcacattcgcacatcatat

SEQ ID NO: 50497 - RNA, 21 nt, Synthetic Construct
  source 1..21: mol_type = other RNA
taactccttagcgaatctcgc

SEQ ID NO: 50498 - RNA, 21 nt, Synthetic Construct
  source 1..21: mol_type = other RNA
taactccttagcgaatctcgc

SEQ ID NO: 50499 - RNA, 21 nt, Synthetic Construct
  source 1..21: mol_type = other RNA
tgaggtagaaggttgtgtggt

SEQ ID NO: 50500 - RNA, 21 nt, Synthetic Construct
  source 1..21: mol_type = other RNA
tgaggtagaaggttgtgtggt

SEQ ID NO: 50501 - RNA, 27 nt, Synthetic Construct
  source 1..27: mol_type = other RNA
gcattggtggttcagtggtagaattct

SEQ ID NO: 50502 - RNA, 19 nt, Synthetic Construct
  source 1..19: mol_type = other RNA
gctattgacgaccgtaccg

SEQ ID NO: 50503 - RNA, 22 nt, Synthetic Construct
  source 1..22: mol_type = other RNA
tcctgtactgggctgccccgag

SEQ ID NO: 50504 - RNA, 22 nt, Synthetic Construct
  source 1..22: mol_type = other RNA
tcctgtactgggctgccccgag

SEQ ID NO: 50505 - RNA, 23 nt, Synthetic Construct
  source 1..23: mol_type = other RNA
gggtaatacgacgtacttagtgt

SEQ ID NO: 50506 - RNA, 21 nt, Synthetic Construct
  source 1..21: mol_type = other RNA
tgaggtagtagtttgtgctgc

SEQ ID NO: 50507 - RNA, 21 nt, Synthetic Construct
  source 1..21: mol_type = other RNA
tgaggtagtagtttgtgctgc

SEQ ID NO: 50508 - RNA, 15 nt, Synthetic Construct
  source 1..15: mol_type = other RNA
ggccgtcgtcagctc

SEQ ID NO: 50509 - RNA, 15 nt, Synthetic Construct
  source 1..15: mol_type = other RNA
ggccgtcgtcagctc

SEQ ID NO: 50510 - RNA, 37 nt, Synthetic Construct; identical to SEQ ID NO: 4277
  source 1..37: mol_type = other RNA

SEQ ID NO: 50511 - RNA, 37 nt, Synthetic Construct; identical to SEQ ID NO: 4277
  source 1..37: mol_type = other RNA

SEQ ID NO: 50512 - RNA, 22 nt, Synthetic Construct
  source 1..22: mol_type = other RNA
tgagacctctgggttctgagct

SEQ ID NO: 50513 - RNA, 22 nt, Synthetic Construct
  source 1..22: mol_type = other RNA
tgagacctctgggttctgagct

SEQ ID NO: 50514 - RNA, 22 nt, Synthetic Construct
  source 1..22: mol_type = other RNA
tattgcactcgtcccggcctgt

SEQ ID NO: 50515 - RNA, 25 nt, Synthetic Construct
  source 1..25: mol_type = other RNA
ttgaggatgtgagatcgagacgaca

SEQ ID NO: 50516 - RNA, 22 nt, Synthetic Construct
  source 1..22: mol_type = other RNA
ggtagcgaaattccttgtcggg

SEQ ID NO: 50517 - RNA, 24 nt, Synthetic Construct
  source 1..24: mol_type = other RNA
gtctttgttcgattccgttgagta

SEQ ID NO: 50518 - RNA, 24 nt, Synthetic Construct
  source 1..24: mol_type = other RNA
gtctttgttcgattccgttgagta

SEQ ID NO: 50519 - RNA, 21 nt, Synthetic Construct
  source 1..21: mol_type = other RNA
tacctggttgatcctgccagt

SEQ ID NO: 50520 - RNA, 21 nt, Synthetic Construct
  source 1..21: mol_type = other RNA
tacctggttgatcctgccagt

SEQ ID NO: 50521 - RNA, 20 nt, Synthetic Construct
  source 1..20: mol_type = other RNA
tgaggtagtaggttgtgagg

SEQ ID NO: 50522 - RNA, 20 nt, Synthetic Construct
  source 1..20: mol_type = other RNA
tgaggtagtaggttgtgagg

SEQ ID NO: 50523 - RNA, 21 nt, Synthetic Construct
  source 1..21: mol_type = other RNA
tcctgtactgagctgccctga

SEQ ID NO: 50524 - RNA, 21 nt, Synthetic Construct
  source 1..21: mol_type = other RNA
tcctgtactgagctgccctga

SEQ ID NO: 50525 - RNA, 22 nt, Synthetic Construct
  source 1..22: mol_type = other RNA
tcccgtactgagctgccccgag

SEQ ID NO: 50526 - RNA, 22 nt, Synthetic Construct
  source 1..22: mol_type = other RNA
tcccgtactgagctgccccgag

SEQ ID NO: 50527 - RNA, 35 nt, Synthetic Construct; identical to SEQ ID NO: 2397
  source 1..35: mol_type = other RNA

SEQ ID NO: 50528 - RNA, 35 nt, Synthetic Construct; identical to SEQ ID NO: 2397
  source 1..35: mol_type = other RNA

SEQ ID NO: 50529 - RNA, 19 nt, Synthetic Construct
  source 1..19: mol_type = other RNA
cgcgacctcagatcagacg

SEQ ID NO: 50530 - RNA, 19 nt, Synthetic Construct
  source 1..19: mol_type = other RNA
cgcgacctcagatcagacg

SEQ ID NO: 50531 - RNA, 21 nt, Synthetic Construct
  source 1..21: mol_type = other RNA
tcctgtactgggctgccccga

SEQ ID NO: 50532 - RNA, 21 nt, Synthetic Construct
  source 1..21: mol_type = other RNA
tcctgtactgggctgccccga

SEQ ID NO: 50533 - RNA, 22 nt, Synthetic Construct
  source 1..22: mol_type = other RNA
ttataatacaacctgataagtg

SEQ ID NO: 50534 - RNA, 22 nt, Synthetic Construct
  source 1..22: mol_type = other RNA
ttataatacaacctgataagtg

SEQ ID NO: 50535 - RNA, 33 nt, Synthetic Construct; identical to SEQ ID NO: 3082
  source 1..33: mol_type = other RNA

SEQ ID NO: 50536 - RNA, 33 nt, Synthetic Construct; identical to SEQ ID NO: 3082
  source 1..33: mol_type = other RNA

SEQ ID NO: 50537 - RNA, 22 nt, Synthetic Construct
  source 1..22: mol_type = other RNA
tgagaactgaatcccatgggtt

SEQ ID NO: 50538 - RNA, 22 nt, Synthetic Construct
  source 1..22: mol_type = other RNA
tgagaactgaatcccatgggtt

SEQ ID NO: 50539 - RNA, 23 nt, Synthetic Construct
  source 1..23: mol_type = other RNA
tggtaatacaacgtacttagtgt

SEQ ID NO: 50540 - RNA, 26 nt, Synthetic Construct
  source 1..26: mol_type = other RNA
aaaccgttaccattactgagtttagt

SEQ ID NO: 50541 - RNA, 26 nt, Synthetic Construct
  source 1..26: mol_type = other RNA
aaaccgttaccattactgagtttagt

SEQ ID NO: 50542 - RNA, 19 nt, Synthetic Construct
  source 1..19: mol_type = other RNA
ccgtgttcggaagattttc

SEQ ID NO: 50543 - RNA, 21 nt, Synthetic Construct
  source 1..21: mol_type = other RNA
tactccttaagcgaatctcgc

SEQ ID NO: 50544 - RNA, 21 nt, Synthetic Construct
  source 1..21: mol_type = other RNA
tactccttaagcgaatctcgc

SEQ ID NO: 50545 - RNA, 22 nt, Synthetic Construct
  source 1..22: mol_type = other RNA
tcctgtactgagctaccccgag

SEQ ID NO: 50546 - RNA, 22 nt, Synthetic Construct
  source 1..22: mol_type = other RNA
tcctgtactgagctaccccgag

SEQ ID NO: 50547 - RNA, 20 nt, Synthetic Construct
  source 1..20: mol_type = other RNA
tgaggtagtaggttgtgtgt

SEQ ID NO: 50548 - RNA, 22 nt, Synthetic Construct
  source 1..22: mol_type = other RNA
aattgcacggtatccatctgta

SEQ ID NO: 50549 - RNA, 22 nt, Synthetic Construct
  source 1..22: mol_type = other RNA
aattgcacggtatccatctgta

SEQ ID NO: 50550 - RNA, 24 nt, Synthetic Construct
  source 1..24: mol_type = other RNA
caacggaatcccaaaagcagctgc

SEQ ID NO: 50551 - RNA, 15 nt, Synthetic Construct
  source 1..15: mol_type = other RNA
gtcgacgtatagggt

SEQ ID NO: 50552 - RNA, 23 nt, Synthetic Construct
  source 1..23: mol_type = other RNA
taccacagggtagaaccacggaa

SEQ ID NO: 50553 - RNA, 23 nt, Synthetic Construct
  source 1..23: mol_type = other RNA
taccacagggtagaaccacggaa

SEQ ID NO: 50554 - RNA, 19 nt, Synthetic Construct
  source 1..19: mol_type = other RNA
tctaatgagactgccggtg

SEQ ID NO: 50555 - RNA, 19 nt, Synthetic Construct
  source 1..19: mol_type = other RNA
tctaatgagactgccggtg

SEQ ID NO: 50556 - RNA, 22 nt, Synthetic Construct
  source 1..22: mol_type = other RNA
ngaggtagtaggttgtgtggtt

SEQ ID NO: 50557 - RNA, 21 nt, Synthetic Construct
  source 1..21: mol_type = other RNA
tgaggtagtagattgtatggt

SEQ ID NO: 50558 - RNA, 21 nt, Synthetic Construct
  source 1..21: mol_type = other RNA
tgaggtagtagattgtatggt

SEQ ID NO: 50559 - RNA, 21 nt, Synthetic Construct
  source 1..21: mol_type = other RNA
tgaggtagtaggtcgtgtggt

SEQ ID NO: 50560 - RNA, 21 nt, Synthetic Construct
  source 1..21: mol_type = other RNA
tgaggtagtaggtcgtgtggt

SEQ ID NO: 50561 - RNA, 22 nt, Synthetic Construct
  source 1..22: mol_type = other RNA
aggagtgtgacaatggtgtttg

SEQ ID NO: 50562 - RNA, 22 nt, Synthetic Construct
  source 1..22: mol_type = other RNA
catagcacttgtctcggtctga

SEQ ID NO: 50563 - RNA, 22 nt, Synthetic Construct
  source 1..22: mol_type = other RNA
tgaggcagtaggttgtatagtt

SEQ ID NO: 50564 - RNA, 22 nt, Synthetic Construct
  source 1..22: mol_type = other RNA
tgaggcagtaggttgtatagtt

SEQ ID NO: 50565 - RNA, 35 nt, Synthetic Construct; identical to SEQ ID NO: 2452
  source 1..35: mol_type = other RNA

SEQ ID NO: 50566 - RNA, 21 nt, Synthetic Construct
  source 1..21: mol_type = other RNA
ctagactgaagctccttgaga

SEQ ID NO: 50567 - RNA, 23 nt, Synthetic Construct
  source 1..23: mol_type = other RNA
tcctgaactgagctgccccgagt

SEQ ID NO: 50568 - RNA, 23 nt, Synthetic Construct
  source 1..23: mol_type = other RNA
tcctgaactgagctgccccgagt

SEQ ID NO: 50569 - RNA, 17 nt, Synthetic Construct
  source 1..17: mol_type = other RNA
taggtcatcgtcaggct

SEQ ID NO: 50570 - RNA, 17 nt, Synthetic Construct
  source 1..17: mol_type = other RNA
taggtcatcgtcaggct

SEQ ID NO: 50571 - RNA, 19 nt, Synthetic Construct
  source 1..19: mol_type = other RNA
atcacattgccagggattt

SEQ ID NO: 50572 - RNA, 23 nt, Synthetic Construct
  source 1..23: mol_type = other RNA
atcacattgccagggatttccat

SEQ ID NO: 50573 - RNA, 21 nt, Synthetic Construct
  source 1..21: mol_type = other RNA
tggagtgtgacaatggtgctt

SEQ ID NO: 50574 - RNA, 21 nt, Synthetic Construct
  source 1..21: mol_type = other RNA
tggagtgtgacaatggtgctt

SEQ ID NO: 50575 - RNA, 22 nt, Synthetic Construct
  source 1..22: mol_type = other RNA
tgaggtagtagcttgtgctgtt

SEQ ID NO: 50576 - RNA, 22 nt, Synthetic Construct
  source 1..22: mol_type = other RNA
tgaggtagtagcttgtgctgtt

SEQ ID NO: 50577 - RNA, 20 nt, Synthetic Construct
  source 1..20: mol_type = other RNA
tcagtagctcgaggaaaaga

SEQ ID NO: 50578 - RNA, 20 nt, Synthetic Construct
  source 1..20: mol_type = other RNA
tcagtagctcgaggaaaaga

SEQ ID NO: 50579 - RNA, 23 nt, Synthetic Construct
  source 1..23: mol_type = other RNA
gactatagaactttccccctcaa

SEQ ID NO: 50580 - RNA, 23 nt, Synthetic Construct
  source 1..23: mol_type = other RNA
gactatagaactttccccctcaa

SEQ ID NO: 50581 - RNA, 27 nt, Synthetic Construct
  source 1..27: mol_type = other RNA
ctccccactgctaaatttgactggctt

SEQ ID NO: 50582 - RNA, 23 nt, Synthetic Construct
  source 1..23: mol_type = other RNA
gtaaacatccttgactggaagct

SEQ ID NO: 50583 - RNA, 23 nt, Synthetic Construct
  source 1..23: mol_type = other RNA
gtaaacatccttgactggaagct

SEQ ID NO: 50584 - RNA, 37 nt, Synthetic Construct; identical to SEQ ID NO: 2607
  source 1..37: mol_type = other RNA

SEQ ID NO: 50585 - RNA, 22 nt, Synthetic Construct
  source 1..22: mol_type = other RNA
gcgttgcaaccagtgccggggg

SEQ ID NO: 50586 - RNA, 22 nt, Synthetic Construct
  source 1..22: mol_type = other RNA
gcgttgcaaccagtgccggggg

SEQ ID NO: 50587 - RNA, 22 nt, Synthetic Construct
  source 1..22: mol_type = other RNA
cgcgacctcagatcagacgtgg

SEQ ID NO: 50588 - RNA, 22 nt, Synthetic Construct
  source 1..22: mol_type = other RNA
cgcgacctcagatcagacgtgg

SEQ ID NO: 50589 - RNA, 15 nt, Synthetic Construct
  source 1..15: mol_type = other RNA
aaattccttgtcggg

SEQ ID NO: 50590 - RNA, 15 nt, Synthetic Construct
  source 1..15: mol_type = other RNA
aaattccttgtcggg

SEQ ID NO: 50591 - RNA, 21 nt, Synthetic Construct
  source 1..21: mol_type = other RNA
caaagtgctgttcgtgcaggt

SEQ ID NO: 50592 - RNA, 21 nt, Synthetic Construct
  source 1..21: mol_type = other RNA
tgaagtagtaggttgtatagt

SEQ ID NO: 50593 - RNA, 23 nt, Synthetic Construct
  source 1..23: mol_type = other RNA
tcctgaactgagctgccccgagt

SEQ ID NO: 50594 - RNA, 23 nt, Synthetic Construct
  source 1..23: mol_type = other RNA
tcctgaactgagctgccccgagt

SEQ ID NO: 50595 - RNA, 21 nt, Synthetic Construct
  source 1..21: mol_type = other RNA
tgaggggcagagagcgagacc

SEQ ID NO: 50596 - RNA, 21 nt, Synthetic Construct
  source 1..21: mol_type = other RNA
tgaggggcagagagcgagacc

SEQ ID NO: 50597 - RNA, 22 nt, Synthetic Construct
  source 1..22: mol_type = other RNA
tgaggtagtaggttgtgttgtt

SEQ ID NO: 50598 - RNA, 22 nt, Synthetic Construct
  source 1..22: mol_type = other RNA
tgaggtagtaggttgtgttgtt

SEQ ID NO: 50599 - RNA, 30 nt, Synthetic Construct; identical to SEQ ID NO: 10539
  source 1..30: mol_type = other RNA

SEQ ID NO: 50600 - RNA, 30 nt, Synthetic Construct; identical to SEQ ID NO: 10539
  source 1..30: mol_type = other RNA

SEQ ID NO: 50601 - RNA, 17 nt, Synthetic Construct
  source 1..17: mol_type = other RNA
cacggcccagactccta

SEQ ID NO: 50602 - RNA, 17 nt, Synthetic Construct
  source 1..17: mol_type = other RNA
cacggcccagactccta

SEQ ID NO: 50603 - RNA, 20 nt, Synthetic Construct
  source 1..20: mol_type = other RNA
tgaggtagaaggttgtgtgg

SEQ ID NO: 50604 - RNA, 20 nt, Synthetic Construct
  source 1..20: mol_type = other RNA
tgaggtagaaggttgtgtgg

SEQ ID NO: 50605 - RNA, 24 nt, Synthetic Construct
  source 1..24: mol_type = other RNA
cggagaaggttagctcagccaact

SEQ ID NO: 50606 - RNA, 26 nt, Synthetic Construct
  source 1..26: mol_type = other RNA
tgtccccgcgaggggcccggggcggg

SEQ ID NO: 50607 - RNA, 26 nt, Synthetic Construct
  source 1..26: mol_type = other RNA
tgtccccgcgaggggcccggggcggg

SEQ ID NO: 50608 - RNA, 15 nt, Synthetic Construct
  source 1..15: mol_type = other RNA
acctgcatcgagggt

SEQ ID NO: 50609 - RNA, 23 nt, Synthetic Construct
  source 1..23: mol_type = other RNA
tcctatactgagctgccccgaga

SEQ ID NO: 50610 - RNA, 23 nt, Synthetic Construct
  source 1..23: mol_type = other RNA
tcctatactgagctgccccgaga

SEQ ID NO: 50611 - RNA, 35 nt, Synthetic Construct; identical to SEQ ID NO: 2518
  source 1..35: mol_type = other RNA

SEQ ID NO: 50612 - RNA, 23 nt, Synthetic Construct
  source 1..23: mol_type = other RNA
aacggaatcccaaaagcagctgt

SEQ ID NO: 50613 - RNA, 23 nt, Synthetic Construct
  source 1..23: mol_type = other RNA
aacggaatcccaaaagcagctgt

SEQ ID NO: 50614 - RNA, 35 nt, Synthetic Construct; identical to SEQ ID NO: 2762
  source 1..35: mol_type = other RNA

SEQ ID NO: 50615 - RNA, 35 nt, Synthetic Construct; identical to SEQ ID NO: 2762
  source 1..35: mol_type = other RNA

SEQ ID NO: 50616 - RNA, 20 nt, Synthetic Construct
  source 1..20: mol_type = other RNA
caacggaatcccaaaagcag

SEQ ID NO: 50617 - RNA, 20 nt, Synthetic Construct
  source 1..20: mol_type = other RNA
caacggaatcccaaaagcag

SEQ ID NO: 50618 - RNA, 15 nt, Synthetic Construct
  source 1..15: mol_type = other RNA
gtcgtcctgcgcgga

SEQ ID NO: 50619 - RNA, 15 nt, Synthetic Construct
  source 1..15: mol_type = other RNA
gtcgtcctgcgcgga

SEQ ID NO: 50620 - RNA, 21 nt, Synthetic Construct
  source 1..21: mol_type = other RNA
tgtcagtttgtcaaatacccc

SEQ ID NO: 50621 - RNA, 21 nt, Synthetic Construct
  source 1..21: mol_type = other RNA
tgtcagtttgtcaaatacccc

SEQ ID NO: 50622 - RNA, 22 nt, Synthetic Construct
  source 1..22: mol_type = other RNA
tgaggtagtaggttgcgtggtt

SEQ ID NO: 50623 - RNA, 22 nt, Synthetic Construct
  source 1..22: mol_type = other RNA
tccccttggggttgtaggacca

SEQ ID NO: 50624 - RNA, 22 nt, Synthetic Construct
  source 1..22: mol_type = other RNA
tccccttggggttgtaggacca

SEQ ID NO: 50625 - RNA, 39 nt, Synthetic Construct; identical to SEQ ID NO: 2398
  source 1..39: mol_type = other RNA

SEQ ID NO: 50626 - RNA, 27 nt, Synthetic Construct
  source 1..27: mol_type = other RNA
ccccccactgcaaaatttgactggctt

SEQ ID NO: 50627 - RNA, 17 nt, Synthetic Construct
  source 1..17: mol_type = other RNA
ccagtaaacggcggccg

SEQ ID NO: 50628 - RNA, 17 nt, Synthetic Construct
  source 1..17: mol_type = other RNA
ccagtaaacggcggccg

SEQ ID NO: 50629 - RNA, 22 nt, Synthetic Construct
  source 1..22: mol_type = other RNA
cgttgcacttgtctcggtctga

SEQ ID NO: 50630 - RNA, 22 nt, Synthetic Construct
  source 1..22: mol_type = other RNA
cgttgcacttgtctcggtctga

SEQ ID NO: 50631 - RNA, 35 nt, Synthetic Construct; identical to SEQ ID NO: 10694
  source 1..35: mol_type = other RNA

SEQ ID NO: 50632 - RNA, 16 nt, Synthetic Construct
  source 1..16: mol_type = other RNA
cagtcaggatgttggc

SEQ ID NO: 50633 - RNA, 16 nt, Synthetic Construct
  source 1..16: mol_type = other RNA
cagtcaggatgttggc

SEQ ID NO: 50634 - RNA, 22 nt, Synthetic Construct
  source 1..22: mol_type = other RNA
tgaggtagtagattgtataatt

SEQ ID NO: 50635 - RNA, 22 nt, Synthetic Construct
  source 1..22: mol_type = other RNA
tgaggtagtagattgtataatt

SEQ ID NO: 50636 - RNA, 17 nt, Synthetic Construct
  source 1..17: mol_type = other RNA
tgccagcagccgcggta

SEQ ID NO: 50637 - RNA, 21 nt, Synthetic Construct
  source 1..21: mol_type = other RNA
tcttggagtaggtcattgggt

SEQ ID NO: 50638 - RNA, 33 nt, Synthetic Construct; identical to SEQ ID NO: 2638
  source 1..33: mol_type = other RNA

SEQ ID NO: 50639 - RNA, 22 nt, Synthetic Construct
  source 1..22: mol_type = other RNA
tcctgtattgagctgccccgag

SEQ ID NO: 50640 - RNA, 22 nt, Synthetic Construct
  source 1..22: mol_type = other RNA
tcctgtattgagctgccccgag

SEQ ID NO: 50641 - RNA, 23 nt, Synthetic Construct
  source 1..23: mol_type = other RNA
aggtaatacgacgtacttagtgt

SEQ ID NO: 50642 - RNA, 23 nt, Synthetic Construct
  source 1..23: mol_type = other RNA
aggtaatacgacgtacttagtgt

SEQ ID NO: 50643 - RNA, 16 nt, Synthetic Construct
  source 1..16: mol_type = other RNA
cgactcttagcggtgg

SEQ ID NO: 50644 - RNA, 16 nt, Synthetic Construct
  source 1..16: mol_type = other RNA
cgactcttagcggtgg

SEQ ID NO: 50645 - RNA, 21 nt, Synthetic Construct
  source 1..21: mol_type = other RNA
ttctgtactgagctgccccga

SEQ ID NO: 50646 - RNA, 22 nt, Synthetic Construct
  source 1..22: mol_type = other RNA
tgtcaactggttgttgggaggg

SEQ ID NO: 50647 - RNA, 23 nt, Synthetic Construct
  source 1..23: mol_type = other RNA
tagtgcaatattgcttatagggt

SEQ ID NO: 50648 - RNA, 20 nt, Synthetic Construct
  source 1..20: mol_type = other RNA
tgaggcagtaggttgtgtgg

SEQ ID NO: 50649 - RNA, 20 nt, Synthetic Construct
  source 1..20: mol_type = other RNA
tgaggcagtaggttgtgtgg

SEQ ID NO: 50650 - RNA, 21 nt, Synthetic Construct
  source 1..21: mol_type = other RNA
ngaggtagtaggttgtgtggt

SEQ ID NO: 50651 - RNA, 21 nt, Synthetic Construct
  source 1..21: mol_type = other RNA
ngaggtagtaggttgtgtggt

SEQ ID NO: 50652 - RNA, 27 nt, Synthetic Construct
  source 1..27: mol_type = other RNA
ccccccactgctagatttgactggctt

SEQ ID NO: 50653 - RNA, 20 nt, Synthetic Construct
  source 1..20: mol_type = other RNA
tgaggtagtaggtcgtgtgg

SEQ ID NO: 50654 - RNA, 17 nt, Synthetic Construct
  source 1..17: mol_type = other RNA
ccgtgtgaaagtaggtc

SEQ ID NO: 50655 - RNA, 17 nt, Synthetic Construct
  source 1..17: mol_type = other RNA
ccgtgtgaaagtaggtc

SEQ ID NO: 50656 - RNA, 23 nt, Synthetic Construct
  source 1..23: mol_type = other RNA
tgaggagcagagagcgagacttt

SEQ ID NO: 50657 - RNA, 22 nt, Synthetic Construct
  source 1..22: mol_type = other RNA
tcaggtagtagattgtatagtt

SEQ ID NO: 50658 - RNA, 22 nt, Synthetic Construct
  source 1..22: mol_type = other RNA
tgtggtagtagtttgtgctgtt

SEQ ID NO: 50659 - RNA, 39 nt, Synthetic Construct; identical to SEQ ID NO: 804
  source 1..39: mol_type = other RNA

SEQ ID NO: 50660 - RNA, 39 nt, Synthetic Construct; identical to SEQ ID NO: 804
  source 1..39: mol_type = other RNA

SEQ ID NO: 50661 - RNA, 22 nt, Synthetic Construct
  source 1..22: mol_type = other RNA
tagcagcacgtaaatattggtg

SEQ ID NO: 50662 - RNA, 22 nt, Synthetic Construct
  source 1..22: mol_type = other RNA
tagcagcacgtaaatattggtg

SEQ ID NO: 50663 - RNA, 22 nt, Synthetic Construct
  source 1..22: mol_type = other RNA
tgaggtagtagttcgtgctgtt

SEQ ID NO: 50664 - RNA, 22 nt, Synthetic Construct
  source 1..22: mol_type = other RNA
tgaggtagtagttcgtgctgtt

SEQ ID NO: 50665 - RNA, 34 nt, Synthetic Construct; identical to SEQ ID NO: 16999
  source 1..34: mol_type = other RNA

SEQ ID NO: 50666 - RNA, 32 nt, Synthetic Construct; identical to SEQ ID NO: 4279
  source 1..32: mol_type = other RNA

SEQ ID NO: 50667 - RNA, 32 nt, Synthetic Construct; identical to SEQ ID NO: 4279
  source 1..32: mol_type = other RNA

SEQ ID NO: 50668 - RNA, 18 nt, Synthetic Construct
  source 1..18: mol_type = other RNA
ggctttgaagtaaggtcg

SEQ ID NO: 50669 - RNA, 22 nt, Synthetic Construct
  source 1..22: mol_type = other RNA
cattgcacttgtcccggcctgt

SEQ ID NO: 50670 - RNA, 22 nt, Synthetic Construct
  source 1..22: mol_type = other RNA
tgaggtagtaggttgcgtggtt

SEQ ID NO: 50671 - RNA, 22 nt, Synthetic Construct
  source 1..22: mol_type = other RNA
tgaggtagtaggttgcgtggtt

SEQ ID NO: 50672 - RNA, 22 nt, Synthetic Construct
  source 1..22: mol_type = other RNA
tgaggtagtagtttgtgctgtc

SEQ ID NO: 50673 - RNA, 22 nt, Synthetic Construct
  source 1..22: mol_type = other RNA
tgaggtagtagtttgtgctgtc

SEQ ID NO: 50674 - RNA, 21 nt, Synthetic Construct
  source 1..21: mol_type = other RNA
taactccttaagcgatctcgc

SEQ ID NO: 50675 - RNA, 21 nt, Synthetic Construct
  source 1..21: mol_type = other RNA
taactccttaagcgatctcgc

SEQ ID NO: 50676 - RNA, 22 nt, Synthetic Construct
  source 1..22: mol_type = other RNA
catcgcacttgtctcggtctga

SEQ ID NO: 50677 - RNA, 29 nt, Synthetic Construct
  source 1..29: mol_type = other RNA
cgggatggggacagtgtatggtgggcagt

SEQ ID NO: 50678 - RNA, 29 nt, Synthetic Construct
  source 1..29: mol_type = other RNA
cgggatggggacagtgtatggtgggcagt

SEQ ID NO: 50679 - RNA, 22 nt, Synthetic Construct
  source 1..22: mol_type = other RNA
tgtaaacatccccgactggagg

SEQ ID NO: 50680 - RNA, 21 nt, Synthetic Construct
  source 1..21: mol_type = other RNA
cgaggggcagagagcgagact

SEQ ID NO: 50681 - RNA, 23 nt, Synthetic Construct
  source 1..23: mol_type = other RNA
tcctgtactgggctgccccgaga

SEQ ID NO: 50682 - RNA, 23 nt, Synthetic Construct
  source 1..23: mol_type = other RNA
tcctgtactgggctgccccgaga

SEQ ID NO: 50683 - RNA, 21 nt, Synthetic Construct
  source 1..21: mol_type = other RNA
taactccttagcgaatctcgc

SEQ ID NO: 50684 - RNA, 21 nt, Synthetic Construct
  source 1..21: mol_type = other RNA
taactccttagcgaatctcgc

SEQ ID NO: 50685 - RNA, 22 nt, Synthetic Construct
  source 1..22: mol_type = other RNA
ngaggtagtagtttgtgctgtt

SEQ ID NO: 50686 - RNA, 22 nt, Synthetic Construct
  source 1..22: mol_type = other RNA
ngaggtagtagtttgtgctgtt

SEQ ID NO: 50687 - RNA, 22 nt, Synthetic Construct
  source 1..22: mol_type = other RNA
tgtggtagtagtttgtgctgtt

SEQ ID NO: 50688 - RNA, 20 nt, Synthetic Construct
  source 1..20: mol_type = other RNA
tgaggtagtaggttgtatgg

SEQ ID NO: 50689 - RNA, 22 nt, Synthetic Construct
  source 1..22: mol_type = other RNA
tgaggcagtaggttgtgtggtt

SEQ ID NO: 50690 - RNA, 34 nt, Synthetic Construct; identical to SEQ ID NO: 2529
  source 1..34: mol_type = other RNA

SEQ ID NO: 50691 - RNA, 34 nt, Synthetic Construct; identical to SEQ ID NO: 2529
  source 1..34: mol_type = other RNA

SEQ ID NO: 50692 - RNA, 21 nt, Synthetic Construct
  source 1..21: mol_type = other RNA
tgaggtagtagtttgtgccgt

SEQ ID NO: 50693 - RNA, 22 nt, Synthetic Construct
  source 1..22: mol_type = other RNA
tccccttggggttgtaggacca

SEQ ID NO: 50694 - RNA, 22 nt, Synthetic Construct
  source 1..22: mol_type = other RNA
tccccttggggttgtaggacca

SEQ ID NO: 50695 - RNA, 16 nt, Synthetic Construct
  source 1..16: mol_type = other RNA
gtctacggccatacca

SEQ ID NO: 50696 - RNA, 21 nt, Synthetic Construct
  source 1..21: mol_type = other RNA
tggggggcagagagcgagact

SEQ ID NO: 50697 - RNA, 23 nt, Synthetic Construct
  source 1..23: mol_type = other RNA
tgaggggcagagagcgaggcttt

SEQ ID NO: 50698 - RNA, 34 nt, Synthetic Construct; identical to SEQ ID NO: 2364
  source 1..34: mol_type = other RNA

SEQ ID NO: 50699 - RNA, 22 nt, Synthetic Construct
  source 1..22: mol_type = other RNA
tagctgcacgtaaatattggcg

SEQ ID NO: 50700 - RNA, 22 nt, Synthetic Construct
  source 1..22: mol_type = other RNA
tagctgcacgtaaatattggcg

SEQ ID NO: 50701 - RNA, 34 nt, Synthetic Construct; identical to SEQ ID NO: 2298
  source 1..34: mol_type = other RNA

SEQ ID NO: 50702 - RNA, 21 nt, Synthetic Construct
  source 1..21: mol_type = other RNA
cgtaccgtgagtaataatgcg

SEQ ID NO: 50703 - RNA, 21 nt, Synthetic Construct
  source 1..21: mol_type = other RNA
cgtaccgtgagtaataatgcg

SEQ ID NO: 50704 - RNA, 22 nt, Synthetic Construct
  source 1..22: mol_type = other RNA
tggggtagtagtttgtgctgtt

SEQ ID NO: 50705 - RNA, 22 nt, Synthetic Construct
  source 1..22: mol_type = other RNA
tggggtagtagtttgtgctgtt

SEQ ID NO: 50706 - RNA, 22 nt, Synthetic Construct
  source 1..22: mol_type = other RNA
tgaggtagtaggttgtgctgtt

SEQ ID NO: 50707 - RNA, 22 nt, Synthetic Construct
  source 1..22: mol_type = other RNA
tgaggtagtaggttgtgctgtt

SEQ ID NO: 50708 - RNA, 23 nt, Synthetic Construct
  source 1..23: mol_type = other RNA
tcctgtactgagccgccccgaga

SEQ ID NO: 50709 - RNA, 23 nt, Synthetic Construct
  source 1..23: mol_type = other RNA
tcctgtactgagccgccccgaga

SEQ ID NO: 50710 - RNA, 16 nt, Synthetic Construct
  source 1..16: mol_type = other RNA
ctgacgctcatgcacg

SEQ ID NO: 50711 - RNA, 32 nt, Synthetic Construct; identical to SEQ ID NO: 2435
  source 1..32: mol_type = other RNA

SEQ ID NO: 50712 - RNA, 22 nt, Synthetic Construct
  source 1..22: mol_type = other RNA
tagcagcacgtaaatataggcg

SEQ ID NO: 50713 - RNA, 22 nt, Synthetic Construct
  source 1..22: mol_type = other RNA
tagcagcacgtaaatataggcg

SEQ ID NO: 50714 - RNA, 23 nt, Synthetic Construct
  source 1..23: mol_type = other RNA
tgtaaacatccttgactggaagc

SEQ ID NO: 50715 - RNA, 23 nt, Synthetic Construct
  source 1..23: mol_type = other RNA
tgtaaacatccttgactggaagc

SEQ ID NO: 50716 - RNA, 20 nt, Synthetic Construct
  source 1..20: mol_type = other RNA
tgaggtagaaggttgtgtgg

SEQ ID NO: 50717 - RNA, 15 nt, Synthetic Construct
  source 1..15: mol_type = other RNA
cgactcttagcggtg

SEQ ID NO: 50718 - RNA, 15 nt, Synthetic Construct
  source 1..15: mol_type = other RNA
cgactcttagcggtg

SEQ ID NO: 50719 - RNA, 29 nt, Synthetic Construct
  source 1..29: mol_type = other RNA
gcgccgctggtgtagtggtatcatgcaag

SEQ ID NO: 50720 - RNA, 29 nt, Synthetic Construct
  source 1..29: mol_type = other RNA
gcgccgctggtgtagtggtatcatgcaag

SEQ ID NO: 50721 - RNA, 19 nt, Synthetic Construct
  source 1..19: mol_type = other RNA
cccttgtcattagttgcta

SEQ ID NO: 50722 - RNA, 23 nt, Synthetic Construct
  source 1..23: mol_type = other RNA
tctttgttcgattccgttgagta

SEQ ID NO: 50723 - RNA, 22 nt, Synthetic Construct
  source 1..22: mol_type = other RNA
tgaggtagtagtttgtgctatt

SEQ ID NO: 50724 - RNA, 22 nt, Synthetic Construct
  source 1..22: mol_type = other RNA
tgaggtagtagtttgtgctatt

SEQ ID NO: 50725 - RNA, 24 nt, Synthetic Construct
  source 1..24: mol_type = other RNA
tcggatccgtctgagcttggcttt

SEQ ID NO: 50726 - RNA, 22 nt, Synthetic Construct
  source 1..22: mol_type = other RNA
tcctgtactgaactgccccgag

SEQ ID NO: 50727 - RNA, 22 nt, Synthetic Construct
  source 1..22: mol_type = other RNA
tcctgtactgaactgccccgag

SEQ ID NO: 50728 - RNA, 22 nt, Synthetic Construct
  source 1..22: mol_type = other RNA
tgaggtagtagtttgtgctgat

SEQ ID NO: 50729 - RNA, 22 nt, Synthetic Construct
  source 1..22: mol_type = other RNA
tgaggtagtagtttgtgctgat

SEQ ID NO: 50730 - RNA, 22 nt, Synthetic Construct
  source 1..22: mol_type = other RNA
gctcacggaaagagaatgaagc

SEQ ID NO: 50731 - RNA, 22 nt, Synthetic Construct
  source 1..22: mol_type = other RNA
gctcacggaaagagaatgaagc

SEQ ID NO: 50732 - RNA, 18 nt, Synthetic Construct
  source 1..18: mol_type = other RNA
ctaatgagactgccggtg

SEQ ID NO: 50733 - RNA, 18 nt, Synthetic Construct
  source 1..18: mol_type = other RNA
ctaatgagactgccggtg

SEQ ID NO: 50734 - RNA, 21 nt, Synthetic Construct
  source 1..21: mol_type = other RNA
cgaggggcagagagcgagact

SEQ ID NO: 50735 - RNA, 21 nt, Synthetic Construct
  source 1..21: mol_type = other RNA
cgaggggcagagagcgagact

SEQ ID NO: 50736 - RNA, 22 nt, Synthetic Construct
  source 1..22: mol_type = other RNA
cgactcttagcggtggatcact

SEQ ID NO: 50737 - RNA, 24 nt, Synthetic Construct
  source 1..24: mol_type = other RNA
acctggcatacaatgtagatttct

SEQ ID NO: 50738 - RNA, 24 nt, Synthetic Construct
  source 1..24: mol_type = other RNA
acctggcatacaatgtagatttct

SEQ ID NO: 50739 - RNA, 27 nt, Synthetic Construct
  source 1..27: mol_type = other RNA
ccccccacagctaaatttgactggcta

SEQ ID NO: 50740 - RNA, 23 nt, Synthetic Construct
  source 1..23: mol_type = other RNA
ctcactgatcgagtcgtcctgcg

SEQ ID NO: 50741 - RNA, 23 nt, Synthetic Construct
  source 1..23: mol_type = other RNA
ctcactgatcgagtcgtcctgcg

SEQ ID NO: 50742 - RNA, 21 nt, Synthetic Construct
  source 1..21: mol_type = other RNA
ctagactggagctccttgagg

SEQ ID NO: 50743 - RNA, 21 nt, Synthetic Construct
  source 1..21: mol_type = other RNA
ctagactggagctccttgagg

SEQ ID NO: 50744 - RNA, 23 nt, Synthetic Construct
  source 1..23: mol_type = other RNA
ttcaagtaatccaggataggctt

SEQ ID NO: 50745 - RNA, 20 nt, Synthetic Construct
  source 1..20: mol_type = other RNA
tgaggtagtaggctgtatag

SEQ ID NO: 50746 - RNA, 20 nt, Synthetic Construct
  source 1..20: mol_type = other RNA
tgaggtagtaggctgtatag

SEQ ID NO: 50747 - RNA, 28 nt, Synthetic Construct
  source 1..28: mol_type = other RNA
ccgtgtgaaagtaggtcatcgtcaggct

SEQ ID NO: 50748 - RNA, 28 nt, Synthetic Construct
  source 1..28: mol_type = other RNA
ccgtgtgaaagtaggtcatcgtcaggct

SEQ ID NO: 50749 - RNA, 31 nt, Synthetic Construct; identical to SEQ ID NO: 7160
  source 1..31: mol_type = other RNA

SEQ ID NO: 50750 - RNA, 31 nt, Synthetic Construct; identical to SEQ ID NO: 7160
  source 1..31: mol_type = other RNA

SEQ ID NO: 50751 - RNA, 24 nt, Synthetic Construct
  source 1..24: mol_type = other RNA
tgtaaacacccccgactggaagct

SEQ ID NO: 50752 - RNA, 22 nt, Synthetic Construct
  source 1..22: mol_type = other RNA
cattgcacttgtctcggtccga

SEQ ID NO: 50753 - RNA, 22 nt, Synthetic Construct
  source 1..22: mol_type = other RNA
tcgtaccgtgagtaatgatgcg

SEQ ID NO: 50754 - RNA, 22 nt, Synthetic Construct
  source 1..22: mol_type = other RNA
tcgtaccgtgagtaatgatgcg

SEQ ID NO: 50755 - RNA, 28 nt, Synthetic Construct
  source 1..28: mol_type = other RNA
cccccccactgctaaatttgactggctt

SEQ ID NO: 50756 - RNA, 22 nt, Synthetic Construct
  source 1..22: mol_type = other RNA
cattgcacttgcctcggtctga

SEQ ID NO: 50757 - RNA, 22 nt, Synthetic Construct
  source 1..22: mol_type = other RNA
cattgcacttgcctcggtctga

SEQ ID NO: 50758 - RNA, 21 nt, Synthetic Construct
  source 1..21: mol_type = other RNA
tcctgtactgggctgccccga

SEQ ID NO: 50759 - RNA, 21 nt, Synthetic Construct
  source 1..21: mol_type = other RNA
tcctgtactgggctgccccga

SEQ ID NO: 50760 - RNA, 24 nt, Synthetic Construct
  source 1..24: mol_type = other RNA
ttgcagctgcctgggagtgacttc

SEQ ID NO: 50761 - RNA, 24 nt, Synthetic Construct
  source 1..24: mol_type = other RNA
ttgcagctgcctgggagtgacttc

SEQ ID NO: 50762 - RNA, 22 nt, Synthetic Construct
  source 1..22: mol_type = other RNA
cattgcacctgtctcggtctga

SEQ ID NO: 50763 - RNA, 23 nt, Synthetic Construct
  source 1..23: mol_type = other RNA
tgaggtagtaggttgtgtggttg

SEQ ID NO: 50764 - RNA, 23 nt, Synthetic Construct
  source 1..23: mol_type = other RNA
tgaggtagtaggttgtgtggttg

SEQ ID NO: 50765 - RNA, 19 nt, Synthetic Construct
  source 1..19: mol_type = other RNA
agtcgacgtatagggtgtg

SEQ ID NO: 50766 - RNA, 17 nt, Synthetic Construct
  source 1..17: mol_type = other RNA
aagttgaccgcctgggg

SEQ ID NO: 50767 - RNA, 17 nt, Synthetic Construct
  source 1..17: mol_type = other RNA
aagttgaccgcctgggg

SEQ ID NO: 50768 - RNA, 17 nt, Synthetic Construct
  source 1..17: mol_type = other RNA
gtccggatcgtagtctg

SEQ ID NO: 50769 - RNA, 22 nt, Synthetic Construct
  source 1..22: mol_type = other RNA
ncctgtactgagctgccccgag

SEQ ID NO: 50770 - RNA, 24 nt, Synthetic Construct
  source 1..24: mol_type = other RNA
tgtaagcatccccgactggaagct

SEQ ID NO: 50771 - RNA, 24 nt, Synthetic Construct
  source 1..24: mol_type = other RNA
tgtaagcatccccgactggaagct

SEQ ID NO: 50772 - RNA, 20 nt, Synthetic Construct
  source 1..20: mol_type = other RNA
taaggtagtaggttgtgtgg

SEQ ID NO: 50773 - RNA, 30 nt, Synthetic Construct; identical to SEQ ID NO: 2353
  source 1..30: mol_type = other RNA

SEQ ID NO: 50774 - RNA, 30 nt, Synthetic Construct; identical to SEQ ID NO: 2353
  source 1..30: mol_type = other RNA

SEQ ID NO: 50775 - RNA, 23 nt, Synthetic Construct
  source 1..23: mol_type = other RNA
tctttggttatctagctgtatga

SEQ ID NO: 50776 - RNA, 23 nt, Synthetic Construct
  source 1..23: mol_type = other RNA
tctttggttatctagctgtatga

SEQ ID NO: 50777 - RNA, 19 nt, Synthetic Construct
  source 1..19: mol_type = other RNA
agctacattgtctgctggg

SEQ ID NO: 50778 - RNA, 19 nt, Synthetic Construct
  source 1..19: mol_type = other RNA
agctacattgtctgctggg

SEQ ID NO: 50779 - RNA, 22 nt, Synthetic Construct
  source 1..22: mol_type = other RNA
tattgcactcgtcccggcctgt

SEQ ID NO: 50780 - RNA, 22 nt, Synthetic Construct
  source 1..22: mol_type = other RNA
tattgcactcgtcccggcctgt

SEQ ID NO: 50781 - RNA, 22 nt, Synthetic Construct
  source 1..22: mol_type = other RNA
tcataccgtgagtaataatgcg

SEQ ID NO: 50782 - RNA, 22 nt, Synthetic Construct
  source 1..22: mol_type = other RNA
tcataccgtgagtaataatgcg

SEQ ID NO: 50783 - RNA, 15 nt, Synthetic Construct
  source 1..15: mol_type = other RNA
agttgaccgcctggg

SEQ ID NO: 50784 - RNA, 15 nt, Synthetic Construct
  source 1..15: mol_type = other RNA
agttgaccgcctggg

SEQ ID NO: 50785 - RNA, 21 nt, Synthetic Construct
  source 1..21: mol_type = other RNA
ggaggagttcgaaggtacgct

SEQ ID NO: 50786 - RNA, 20 nt, Synthetic Construct
  source 1..20: mol_type = other RNA
tgaggtagtaggtcgtgtgg

SEQ ID NO: 50787 - RNA, 20 nt, Synthetic Construct
  source 1..20: mol_type = other RNA
tgaggtagtaggtcgtgtgg

SEQ ID NO: 50788 - RNA, 21 nt, Synthetic Construct
  source 1..21: mol_type = other RNA
taactccttaagcgatctcgc

SEQ ID NO: 50789 - RNA, 21 nt, Synthetic Construct
  source 1..21: mol_type = other RNA
taactccttaagcgatctcgc

SEQ ID NO: 50790 - RNA, 23 nt, Synthetic Construct
  source 1..23: mol_type = other RNA
tctttggttatctagctgtatga

SEQ ID NO: 50791 - RNA, 23 nt, Synthetic Construct
  source 1..23: mol_type = other RNA
tctttggttatctagctgtatga

SEQ ID NO: 50792 - RNA, 20 nt, Synthetic Construct
  source 1..20: mol_type = other RNA
cgaggtagtaggttgtatag

SEQ ID NO: 50793 - RNA, 20 nt, Synthetic Construct
  source 1..20: mol_type = other RNA
cgaggtagtaggttgtatag

SEQ ID NO: 50794 - RNA, 20 nt, Synthetic Construct
  source 1..20: mol_type = other RNA
tcggaagaaggggtgcctgg

SEQ ID NO: 50795 - RNA, 20 nt, Synthetic Construct
  source 1..20: mol_type = other RNA
tcggaagaaggggtgcctgg

SEQ ID NO: 50796 - RNA, 21 nt, Synthetic Construct
  source 1..21: mol_type = other RNA
tggagtgcgacaatggtgttt

SEQ ID NO: 50797 - RNA, 15 nt, Synthetic Construct
  source 1..15: mol_type = other RNA
gtctcgccgacggca

SEQ ID NO: 50798 - RNA, 15 nt, Synthetic Construct
  source 1..15: mol_type = other RNA
gtctcgccgacggca

SEQ ID NO: 50799 - RNA, 22 nt, Synthetic Construct
  source 1..22: mol_type = other RNA
aaaccgttaccattactgagtt

SEQ ID NO: 50800 - RNA, 22 nt, Synthetic Construct
  source 1..22: mol_type = other RNA
aaaccgttaccattactgagtt

SEQ ID NO: 50801 - RNA, 24 nt, Synthetic Construct
  source 1..24: mol_type = other RNA
tgtcagtttgtcaaataccccaat

SEQ ID NO: 50802 - RNA, 24 nt, Synthetic Construct
  source 1..24: mol_type = other RNA
tgtcagtttgtcaaataccccaat

SEQ ID NO: 50803 - RNA, 23 nt, Synthetic Construct
  source 1..23: mol_type = other RNA
tcctgtgctgagctgccccgagt

SEQ ID NO: 50804 - RNA, 22 nt, Synthetic Construct
  source 1..22: mol_type = other RNA
tgtaaacatccccgactggagg

SEQ ID NO: 50805 - RNA, 23 nt, Synthetic Construct
  source 1..23: mol_type = other RNA
tcctgtgctgagctgccccgagt

SEQ ID NO: 50806 - RNA, 23 nt, Synthetic Construct
  source 1..23: mol_type = other RNA
tcctgtgctgagctgccccgagt

SEQ ID NO: 50807 - RNA, 21 nt, Synthetic Construct
  source 1..21: mol_type = other RNA
ccccttggggttgtaggacca

SEQ ID NO: 50808 - RNA, 21 nt, Synthetic Construct
  source 1..21: mol_type = other RNA
ccccttggggttgtaggacca

SEQ ID NO: 50809 - RNA, 18 nt, Synthetic Construct
  source 1..18: mol_type = other RNA
cgcgacctcagatcagac

SEQ ID NO: 50810 - RNA, 18 nt, Synthetic Construct
  source 1..18: mol_type = other RNA
cgcgacctcagatcagac

SEQ ID NO: 50811 - RNA, 21 nt, Synthetic Construct
  source 1..21: mol_type = other RNA
tgaggtagtagtctgtgctgt

SEQ ID NO: 50812 - RNA, 23 nt, Synthetic Construct
  source 1..23: mol_type = other RNA
ggcagcattgtacagggctatga

SEQ ID NO: 50813 - RNA, 23 nt, Synthetic Construct
  source 1..23: mol_type = other RNA
ggcagcattgtacagggctatga

SEQ ID NO: 50814 - RNA, 23 nt, Synthetic Construct
  source 1..23: mol_type = other RNA
naaagtgctgttcgtgcaggtag

SEQ ID NO: 50815 - RNA, 23 nt, Synthetic Construct
  source 1..23: mol_type = other RNA
naaagtgctgttcgtgcaggtag

SEQ ID NO: 50816 - RNA, 21 nt, Synthetic Construct
  source 1..21: mol_type = other RNA
tgaggtagtagtctgtgctgt

SEQ ID NO: 50817 - RNA, 21 nt, Synthetic Construct
  source 1..21: mol_type = other RNA
tgaggtagtagtctgtgctgt

SEQ ID NO: 50818 - RNA, 22 nt, Synthetic Construct
  source 1..22: mol_type = other RNA
cggaatgtaaagaagtatgtat

SEQ ID NO: 50819 - RNA, 22 nt, Synthetic Construct
  source 1..22: mol_type = other RNA
cggaatgtaaagaagtatgtat

SEQ ID NO: 50820 - RNA, 21 nt, Synthetic Construct
  source 1..21: mol_type = other RNA
ngaggtagtaggttgtgtggt

SEQ ID NO: 50821 - RNA, 21 nt, Synthetic Construct
  source 1..21: mol_type = other RNA
ngaggtagtaggttgtgtggt

SEQ ID NO: 50822 - RNA, 25 nt, Synthetic Construct
  source 1..25: mol_type = other RNA
ttgaggatatgagatcgggacgaca

SEQ ID NO: 50823 - RNA, 22 nt, Synthetic Construct
  source 1..22: mol_type = other RNA
taaggtagtaggttgtatagtt

SEQ ID NO: 50824 - RNA, 33 nt, Synthetic Construct; identical to SEQ ID NO: 2209
  source 1..33: mol_type = other RNA

SEQ ID NO: 50825 - RNA, 33 nt, Synthetic Construct; identical to SEQ ID NO: 2209
  source 1..33: mol_type = other RNA

SEQ ID NO: 50826 - RNA, 24 nt, Synthetic Construct
  source 1..24: mol_type = other RNA
tataccgaagctctaggtgcggca

SEQ ID NO: 50827 - RNA, 24 nt, Synthetic Construct
  source 1..24: mol_type = other RNA
tataccgaagctctaggtgcggca

SEQ ID NO: 50828 - RNA, 23 nt, Synthetic Construct
  source 1..23: mol_type = other RNA
tctttggttatctagctgtatgt

SEQ ID NO: 50829 - RNA, 23 nt, Synthetic Construct
  source 1..23: mol_type = other RNA
tctttggttatctagctgtatgt

SEQ ID NO: 50830 - RNA, 29 nt, Synthetic Construct
  source 1..29: mol_type = other RNA
gcattggtggttcagtggtagaattctcg

SEQ ID NO: 50831 - RNA, 29 nt, Synthetic Construct
  source 1..29: mol_type = other RNA
gcattggtggttcagtggtagaattctcg

SEQ ID NO: 50832 - RNA, 32 nt, Synthetic Construct; identical to SEQ ID NO: 770
  source 1..32: mol_type = other RNA

SEQ ID NO: 50833 - RNA, 15 nt, Synthetic Construct
  source 1..15: mol_type = other RNA
gcaagtcgaacggta

SEQ ID NO: 50834 - RNA, 15 nt, Synthetic Construct
  source 1..15: mol_type = other RNA
gcaagtcgaacggta

SEQ ID NO: 50835 - RNA, 24 nt, Synthetic Construct
  source 1..24: mol_type = other RNA
caacggaatcccaaaagcagctat

SEQ ID NO: 50836 - RNA, 15 nt, Synthetic Construct
  source 1..15: mol_type = other RNA
cggcccagactccta

SEQ ID NO: 50837 - RNA, 15 nt, Synthetic Construct
  source 1..15: mol_type = other RNA
cggcccagactccta

SEQ ID NO: 50838 - RNA, 37 nt, Synthetic Construct; identical to SEQ ID NO: 2365
  source 1..37: mol_type = other RNA

SEQ ID NO: 50839 - RNA, 37 nt, Synthetic Construct; identical to SEQ ID NO: 2365
  source 1..37: mol_type = other RNA

SEQ ID NO: 50840 - RNA, 22 nt, Synthetic Construct
  source 1..22: mol_type = other RNA
ttcaagtaattcaggataggtt

SEQ ID NO: 50841 - RNA, 17 nt, Synthetic Construct
  source 1..17: mol_type = other RNA
gcggctgtagctcagtt

SEQ ID NO: 50842 - RNA, 17 nt, Synthetic Construct
  source 1..17: mol_type = other RNA
gcggctgtagctcagtt

SEQ ID NO: 50843 - RNA, 15 nt, Synthetic Construct
  source 1..15: mol_type = other RNA
ggtcatcgtcaggct

SEQ ID NO: 50844 - RNA, 15 nt, Synthetic Construct
  source 1..15: mol_type = other RNA
ggtcatcgtcaggct

SEQ ID NO: 50845 - RNA, 23 nt, Synthetic Construct
  source 1..23: mol_type = other RNA
aggtaatacgacgtacttagtgt

SEQ ID NO: 50846 - RNA, 23 nt, Synthetic Construct
  source 1..23: mol_type = other RNA
gggagccaggaagtattgatgtt

SEQ ID NO: 50847 - RNA, 23 nt, Synthetic Construct
  source 1..23: mol_type = other RNA
gggagccaggaagtattgatgtt

SEQ ID NO: 50848 - RNA, 22 nt, Synthetic Construct
  source 1..22: mol_type = other RNA
gggagtgtgacaatggtgtttg

SEQ ID NO: 50849 - RNA, 22 nt, Synthetic Construct
  source 1..22: mol_type = other RNA
gggagtgtgacaatggtgtttg

SEQ ID NO: 50850 - RNA, 21 nt, Synthetic Construct
  source 1..21: mol_type = other RNA
tcctgtactgagctgctccga

SEQ ID NO: 50851 - RNA, 21 nt, Synthetic Construct
  source 1..21: mol_type = other RNA
tcctgtactgagctgctccga

SEQ ID NO: 50852 - RNA, 19 nt, Synthetic Construct
  source 1..19: mol_type = other RNA
ccttggggttgtaggacca

SEQ ID NO: 50853 - RNA, 19 nt, Synthetic Construct
  source 1..19: mol_type = other RNA
ccttggggttgtaggacca

SEQ ID NO: 50854 - RNA, 30 nt, Synthetic Construct; identical to SEQ ID NO: 1220
  source 1..30: mol_type = other RNA

SEQ ID NO: 50855 - RNA, 30 nt, Synthetic Construct; identical to SEQ ID NO: 1220
  source 1..30: mol_type = other RNA

SEQ ID NO: 50856 - RNA, 18 nt, Synthetic Construct
  source 1..18: mol_type = other RNA
catgcaagtcgaacggta

SEQ ID NO: 50857 - RNA, 18 nt, Synthetic Construct
  source 1..18: mol_type = other RNA
catgcaagtcgaacggta

SEQ ID NO: 50858 - RNA, 22 nt, Synthetic Construct
  source 1..22: mol_type = other RNA
tgaggtagtagtttgtgctgct

SEQ ID NO: 50859 - RNA, 22 nt, Synthetic Construct
  source 1..22: mol_type = other RNA
tgaggtagtagtttgtgctgct

SEQ ID NO: 50860 - RNA, 15 nt, Synthetic Construct
  source 1..15: mol_type = other RNA
aggtgggaggctttg

SEQ ID NO: 50861 - RNA, 15 nt, Synthetic Construct
  source 1..15: mol_type = other RNA
aggtgggaggctttg

SEQ ID NO: 50862 - RNA, 22 nt, Synthetic Construct
  source 1..22: mol_type = other RNA
tattgcgcttgtcccggcctgt

SEQ ID NO: 50863 - RNA, 23 nt, Synthetic Construct
  source 1..23: mol_type = other RNA
tgtcagtttgtcaaataccccat

SEQ ID NO: 50864 - RNA, 23 nt, Synthetic Construct
  source 1..23: mol_type = other RNA
tgtcagtttgtcaaataccccat

SEQ ID NO: 50865 - RNA, 24 nt, Synthetic Construct
  source 1..24: mol_type = other RNA
tgtaaacatccccgactgggagct

SEQ ID NO: 50866 - RNA, 17 nt, Synthetic Construct
  source 1..17: mol_type = other RNA
cagagacgagtcgacca

SEQ ID NO: 50867 - RNA, 21 nt, Synthetic Construct
  source 1..21: mol_type = other RNA
tgaggtagtagattgtatagc

SEQ ID NO: 50868 - RNA, 21 nt, Synthetic Construct
  source 1..21: mol_type = other RNA
tgaggtagtagattgtatagc

SEQ ID NO: 50869 - RNA, 22 nt, Synthetic Construct
  source 1..22: mol_type = other RNA
tgagaactgaactccatgggtt

SEQ ID NO: 50870 - RNA, 22 nt, Synthetic Construct
  source 1..22: mol_type = other RNA
tgagaactgaactccatgggtt

SEQ ID NO: 50871 - RNA, 35 nt, Synthetic Construct; identical to SEQ ID NO: 3369
  source 1..35: mol_type = other RNA

SEQ ID NO: 50872 - RNA, 22 nt, Synthetic Construct
  source 1..22: mol_type = other RNA
ncgtaccgtgagtaataatgcg

SEQ ID NO: 50873 - RNA, 22 nt, Synthetic Construct
  source 1..22: mol_type = other RNA
ncgtaccgtgagtaataatgcg

SEQ ID NO: 50874 - RNA, 17 nt, Synthetic Construct
  source 1..17: mol_type = other RNA
atgcaagtcgaacggta

SEQ ID NO: 50875 - RNA, 35 nt, Synthetic Construct; identical to SEQ ID NO: 2514
  source 1..35: mol_type = other RNA

SEQ ID NO: 50876 - RNA, 20 nt, Synthetic Construct
  source 1..20: mol_type = other RNA
taaggtagtaggttgtatag

SEQ ID NO: 50877 - RNA, 20 nt, Synthetic Construct
  source 1..20: mol_type = other RNA
taaggtagtaggttgtatag

SEQ ID NO: 50878 - RNA, 32 nt, Synthetic Construct; identical to SEQ ID NO: 3748
  source 1..32: mol_type = other RNA

SEQ ID NO: 50879 - RNA, 32 nt, Synthetic Construct; identical to SEQ ID NO: 3748
  source 1..32: mol_type = other RNA

SEQ ID NO: 50880 - RNA, 19 nt, Synthetic Construct
  source 1..19: mol_type = other RNA
tcctgtaccgatcaatagt

SEQ ID NO: 50881 - RNA, 19 nt, Synthetic Construct
  source 1..19: mol_type = other RNA
tcctgtaccgatcaatagt

SEQ ID NO: 50882 - RNA, 23 nt, Synthetic Construct
  source 1..23: mol_type = other RNA
tgaggtagtaggttgtgcggttt

SEQ ID NO: 50883 - RNA, 23 nt, Synthetic Construct
  source 1..23: mol_type = other RNA
tgaggtagtaggttgtgcggttt

SEQ ID NO: 50884 - RNA, 21 nt, Synthetic Construct
  source 1..21: mol_type = other RNA
tcctgtacagagctgccccga

SEQ ID NO: 50885 - RNA, 21 nt, Synthetic Construct
  source 1..21: mol_type = other RNA
tcctgtacagagctgccccga

SEQ ID NO: 50886 - RNA, 21 nt, Synthetic Construct
  source 1..21: mol_type = other RNA
tcctatactgagctgccccga

SEQ ID NO: 50887 - RNA, 21 nt, Synthetic Construct
  source 1..21: mol_type = other RNA
tcctatactgagctgccccga

SEQ ID NO: 50888 - RNA, 28 nt, Synthetic Construct
  source 1..28: mol_type = other RNA
cccccccactgctaaatttgactggcta

SEQ ID NO: 50889 - RNA, 28 nt, Synthetic Construct
  source 1..28: mol_type = other RNA
cccccccactgctaaatttgactggcta

SEQ ID NO: 50890 - RNA, 23 nt, Synthetic Construct
  source 1..23: mol_type = other RNA
tgaggtagtaggttgtgtggctt

SEQ ID NO: 50891 - RNA, 23 nt, Synthetic Construct
  source 1..23: mol_type = other RNA
tgaggtagtaggttgtgtggctt

SEQ ID NO: 50892 - RNA, 21 nt, Synthetic Construct
  source 1..21: mol_type = other RNA
ctaatcccagaaacccggtcg

SEQ ID NO: 50893 - RNA, 21 nt, Synthetic Construct
  source 1..21: mol_type = other RNA
ctaatcccagaaacccggtcg

SEQ ID NO: 50894 - RNA, 30 nt, Synthetic Construct; identical to SEQ ID NO: 3933
  source 1..30: mol_type = other RNA

SEQ ID NO: 50895 - RNA, 18 nt, Synthetic Construct
  source 1..18: mol_type = other RNA
tctaatgagactgccggt

SEQ ID NO: 50896 - RNA, 23 nt, Synthetic Construct
  source 1..23: mol_type = other RNA
caaagtgctgttcgtgcaagtag

SEQ ID NO: 50897 - RNA, 23 nt, Synthetic Construct
  source 1..23: mol_type = other RNA
caaagtgctgttcgtgcaagtag

SEQ ID NO: 50898 - RNA, 22 nt, Synthetic Construct
  source 1..22: mol_type = other RNA
tattgcacttgtctcggcctgt

SEQ ID NO: 50899 - RNA, 22 nt, Synthetic Construct
  source 1..22: mol_type = other RNA
tattgcacttgtctcggcctgt

SEQ ID NO: 50900 - RNA, 31 nt, Synthetic Construct; identical to SEQ ID NO: 2333
  source 1..31: mol_type = other RNA

SEQ ID NO: 50901 - RNA, 31 nt, Synthetic Construct; identical to SEQ ID NO: 2333
  source 1..31: mol_type = other RNA

SEQ ID NO: 50902 - RNA, 21 nt, Synthetic Construct
  source 1..21: mol_type = other RNA
tgagatagtaggttgtgtggt

SEQ ID NO: 50903 - RNA, 21 nt, Synthetic Construct
  source 1..21: mol_type = other RNA
tgagatagtaggttgtgtggt

SEQ ID NO: 50904 - RNA, 22 nt, Synthetic Construct
  source 1..22: mol_type = other RNA
cattgcacttgtcccggcctgt

SEQ ID NO: 50905 - RNA, 22 nt, Synthetic Construct
  source 1..22: mol_type = other RNA
cattgcacttgtcccggcctgt

SEQ ID NO: 50906 - RNA, 24 nt, Synthetic Construct
  source 1..24: mol_type = other RNA
acctggcatacaatgtagatttct

SEQ ID NO: 50907 - RNA, 24 nt, Synthetic Construct
  source 1..24: mol_type = other RNA
acctggcatacaatgtagatttct

SEQ ID NO: 50908 - RNA, 21 nt, Synthetic Construct
  source 1..21: mol_type = other RNA
tggagtgtgacaatggtgttc

SEQ ID NO: 50909 - RNA, 21 nt, Synthetic Construct
  source 1..21: mol_type = other RNA
tggagtgtgacaatggtgttc

SEQ ID NO: 50910 - RNA, 19 nt, Synthetic Construct
  source 1..19: mol_type = other RNA
tcctgtaccgatcaatagt

SEQ ID NO: 50911 - RNA, 23 nt, Synthetic Construct
  source 1..23: mol_type = other RNA
tcctgcactgagctgccccgagt

SEQ ID NO: 50912 - RNA, 23 nt, Synthetic Construct
  source 1..23: mol_type = other RNA
tcctgcactgagctgccccgagt

SEQ ID NO: 50913 - RNA, 22 nt, Synthetic Construct
  source 1..22: mol_type = other RNA
tcctgaactgagctgccccgag

SEQ ID NO: 50914 - RNA, 22 nt, Synthetic Construct
  source 1..22: mol_type = other RNA
tcctgaactgagctgccccgag

SEQ ID NO: 50915 - RNA, 22 nt, Synthetic Construct
  source 1..22: mol_type = other RNA
tgaggtagcaggttgtgtggtt

SEQ ID NO: 50916 - RNA, 22 nt, Synthetic Construct
  source 1..22: mol_type = other RNA
tgaggtagcaggttgtgtggtt

SEQ ID NO: 50917 - RNA, 16 nt, Synthetic Construct
  source 1..16: mol_type = other RNA
gtgacgcgcatgaatg

SEQ ID NO: 50918 - RNA, 16 nt, Synthetic Construct
  source 1..16: mol_type = other RNA
gtgacgcgcatgaatg

SEQ ID NO: 50919 - RNA, 17 nt, Synthetic Construct
  source 1..17: mol_type = other RNA
cgaaattccttgtcggg

SEQ ID NO: 50920 - RNA, 17 nt, Synthetic Construct
  source 1..17: mol_type = other RNA
cgaaattccttgtcggg

SEQ ID NO: 50921 - RNA, 23 nt, Synthetic Construct
  source 1..23: mol_type = other RNA
tcctgtacagagctgccccgaga

SEQ ID NO: 50922 - RNA, 23 nt, Synthetic Construct
  source 1..23: mol_type = other RNA
tcctgtacagagctgccccgaga

SEQ ID NO: 50923 - RNA, 22 nt, Synthetic Construct
  source 1..22: mol_type = other RNA
tcataccgtgagtaataatgcg

SEQ ID NO: 50924 - RNA, 22 nt, Synthetic Construct
  source 1..22: mol_type = other RNA
gtgccgaagctgtgggattgat

SEQ ID NO: 50925 - RNA, 22 nt, Synthetic Construct
  source 1..22: mol_type = other RNA
gtgccgaagctgtgggattgat

SEQ ID NO: 50926 - RNA, 23 nt, Synthetic Construct
  source 1..23: mol_type = other RNA
tagcttatcagactgatgttgac

SEQ ID NO: 50927 - RNA, 23 nt, Synthetic Construct
  source 1..23: mol_type = other RNA
tagcttatcagactgatgttgac

SEQ ID NO: 50928 - RNA, 21 nt, Synthetic Construct
  source 1..21: mol_type = other RNA
acagtagtctgcacattggtt

SEQ ID NO: 50929 - RNA, 21 nt, Synthetic Construct
  source 1..21: mol_type = other RNA
acagtagtctgcacattggtt

SEQ ID NO: 50930 - RNA, 22 nt, Synthetic Construct
  source 1..22: mol_type = other RNA
cgaggtagtagtttgtgctgtt

SEQ ID NO: 50931 - RNA, 22 nt, Synthetic Construct
  source 1..22: mol_type = other RNA
cgaggtagtagtttgtgctgtt

SEQ ID NO: 50932 - RNA, 25 nt, Synthetic Construct
  source 1..25: mol_type = other RNA
ttgaggatatgagatagagacgaca

SEQ ID NO: 50933 - RNA, 21 nt, Synthetic Construct
  source 1..21: mol_type = other RNA
tggaatgtaaagaagtatgta

SEQ ID NO: 50934 - RNA, 21 nt, Synthetic Construct
  source 1..21: mol_type = other RNA
tgaggtagtaggatgtgtggt

SEQ ID NO: 50935 - RNA, 21 nt, Synthetic Construct
  source 1..21: mol_type = other RNA
tgaggtagtaggatgtgtggt

SEQ ID NO: 50936 - RNA, 31 nt, Synthetic Construct; identical to SEQ ID NO: 2293
  source 1..31: mol_type = other RNA

SEQ ID NO: 50937 - RNA, 31 nt, Synthetic Construct; identical to SEQ ID NO: 2293
  source 1..31: mol_type = other RNA

SEQ ID NO: 50938 - RNA, 22 nt, Synthetic Construct
  source 1..22: mol_type = other RNA
tcctgtactgagctgtcccgag

SEQ ID NO: 50939 - RNA, 22 nt, Synthetic Construct
  source 1..22: mol_type = other RNA
tcctgtactgagctgtcccgag

SEQ ID NO: 50940 - RNA, 34 nt, Synthetic Construct; identical to SEQ ID NO: 6757
  source 1..34: mol_type = other RNA

SEQ ID NO: 50941 - RNA, 36 nt, Synthetic Construct; identical to SEQ ID NO: 10333
  source 1..36: mol_type = other RNA

SEQ ID NO: 50942 - RNA, 36 nt, Synthetic Construct; identical to SEQ ID NO: 10333
  source 1..36: mol_type = other RNA

SEQ ID NO: 50943 - RNA, 19 nt, Synthetic Construct
  source 1..19: mol_type = other RNA
cctgtctgaatatgggggg

SEQ ID NO: 50944 - RNA, 22 nt, Synthetic Construct
  source 1..22: mol_type = other RNA
tgaggtagtaggtcgtatagtt

SEQ ID NO: 50945 - RNA, 22 nt, Synthetic Construct
  source 1..22: mol_type = other RNA
tgaggtagtaggtcgtatagtt

SEQ ID NO: 50946 - RNA, 22 nt, Synthetic Construct
  source 1..22: mol_type = other RNA
tgaggcagtaggttgtgtggtt

SEQ ID NO: 50947 - RNA, 27 nt, Synthetic Construct
  source 1..27: mol_type = other RNA
ccccccactgctaaatttgaccggctt

SEQ ID NO: 50948 - RNA, 15 nt, Synthetic Construct
  source 1..15: mol_type = other RNA
ggccgtcgtcagctc

SEQ ID NO: 50949 - RNA, 39 nt, Synthetic Construct; identical to SEQ ID NO: 804
  source 1..39: mol_type = other RNA

SEQ ID NO: 50950 - RNA, 39 nt, Synthetic Construct; identical to SEQ ID NO: 804
  source 1..39: mol_type = other RNA

SEQ ID NO: 50951 - RNA, 22 nt, Synthetic Construct
  source 1..22: mol_type = other RNA
ttcaagtaatccaggataggct

SEQ ID NO: 50952 - RNA, 35 nt, Synthetic Construct; identical to SEQ ID NO: 2505
  source 1..35: mol_type = other RNA

SEQ ID NO: 50953 - RNA, 22 nt, Synthetic Construct
  source 1..22: mol_type = other RNA
tgagaactgaattccatgggtc

SEQ ID NO: 50954 - RNA, 22 nt, Synthetic Construct
  source 1..22: mol_type = other RNA
tgagaactgaattccatgggtc

SEQ ID NO: 50955 - RNA, 21 nt, Synthetic Construct
  source 1..21: mol_type = other RNA
tcctgtactgagctgccccgg

SEQ ID NO: 50956 - RNA, 23 nt, Synthetic Construct
  source 1..23: mol_type = other RNA
tggtaatacgacgtacttagagt

SEQ ID NO: 50957 - RNA, 23 nt, Synthetic Construct
  source 1..23: mol_type = other RNA
tggtaatacgacgtacttagagt

SEQ ID NO: 50958 - RNA, 15 nt, Synthetic Construct
  source 1..15: mol_type = other RNA
ggagagatggctgag

SEQ ID NO: 50959 - RNA, 15 nt, Synthetic Construct
  source 1..15: mol_type = other RNA
ggagagatggctgag

SEQ ID NO: 50960 - RNA, 23 nt, Synthetic Construct
  source 1..23: mol_type = other RNA
tggggtagtaggttgtgtggttt

SEQ ID NO: 50961 - RNA, 20 nt, Synthetic Construct
  source 1..20: mol_type = other RNA
tgaggtggtaggttgtgtgg

SEQ ID NO: 50962 - RNA, 20 nt, Synthetic Construct
  source 1..20: mol_type = other RNA
tgaggtggtaggttgtgtgg

SEQ ID NO: 50963 - RNA, 24 nt, Synthetic Construct
  source 1..24: mol_type = other RNA
gttgaattgtggtctgtggacgtg

SEQ ID NO: 50964 - RNA, 24 nt, Synthetic Construct
  source 1..24: mol_type = other RNA
gttgaattgtggtctgtggacgtg

SEQ ID NO: 50965 - RNA, 31 nt, Synthetic Construct; identical to SEQ ID NO: 2423
  source 1..31: mol_type = other RNA

SEQ ID NO: 50966 - RNA, 18 nt, Synthetic Construct
  source 1..18: mol_type = other RNA
ggtagcgtggccgagcgg

SEQ ID NO: 50967 - RNA, 21 nt, Synthetic Construct
  source 1..21: mol_type = other RNA
gagttctacagtccgacgatc

SEQ ID NO: 50968 - RNA, 21 nt, Synthetic Construct
  source 1..21: mol_type = other RNA
gagttctacagtccgacgatc

SEQ ID NO: 50969 - RNA, 15 nt, Synthetic Construct
  source 1..15: mol_type = other RNA
acctgcatcgagggt

SEQ ID NO: 50970 - RNA, 22 nt, Synthetic Construct
  source 1..22: mol_type = other RNA
tgaggtagtagtttatgctgtt

SEQ ID NO: 50971 - RNA, 22 nt, Synthetic Construct
  source 1..22: mol_type = other RNA
tgaggtagtagtttatgctgtt

SEQ ID NO: 50972 - RNA, 15 nt, Synthetic Construct
  source 1..15: mol_type = other RNA
gtctcgccgacggca

SEQ ID NO: 50973 - RNA, 22 nt, Synthetic Construct
  source 1..22: mol_type = other RNA
tgagatagtagtttgtgctgtt

SEQ ID NO: 50974 - RNA, 22 nt, Synthetic Construct
  source 1..22: mol_type = other RNA
tgagatagtagtttgtgctgtt

SEQ ID NO: 50975 - RNA, 23 nt, Synthetic Construct
  source 1..23: mol_type = other RNA
tcctgtactgagctgccccgggt

SEQ ID NO: 50976 - RNA, 23 nt, Synthetic Construct
  source 1..23: mol_type = other RNA
tcctgtactgagctgccccgggt

SEQ ID NO: 50977 - RNA, 23 nt, Synthetic Construct
  source 1..23: mol_type = other RNA
ggaggggcagagagcgagacttt

SEQ ID NO: 50978 - RNA, 23 nt, Synthetic Construct
  source 1..23: mol_type = other RNA
ggaggggcagagagcgagacttt

SEQ ID NO: 50979 - RNA, 22 nt, Synthetic Construct
  source 1..22: mol_type = other RNA
tgaggtagtaagttgtgtggtt

SEQ ID NO: 50980 - RNA, 22 nt, Synthetic Construct
  source 1..22: mol_type = other RNA
tgaggtagtaagttgtgtggtt

SEQ ID NO: 50981 - RNA, 23 nt, Synthetic Construct
  source 1..23: mol_type = other RNA
naaagtgctgttcgtgcaggtag

SEQ ID NO: 50982 - RNA, 23 nt, Synthetic Construct
  source 1..23: mol_type = other RNA
naaagtgctgttcgtgcaggtag

SEQ ID NO: 50983 - RNA, 15 nt, Synthetic Construct
  source 1..15: mol_type = other RNA
ttccgaaagtagtgg

SEQ ID NO: 50984 - RNA, 24 nt, Synthetic Construct
  source 1..24: mol_type = other RNA
tgtcagtttgtcaaataccccatt

SEQ ID NO: 50985 - RNA, 24 nt, Synthetic Construct
  source 1..24: mol_type = other RNA
tgtcagtttgtcaaataccccatt

SEQ ID NO: 50986 - RNA, 22 nt, Synthetic Construct
  source 1..22: mol_type = other RNA
tggaatgtaaagaagtatgcat

SEQ ID NO: 50987 - RNA, 22 nt, Synthetic Construct
  source 1..22: mol_type = other RNA
tggaatgtaaagaagtatgcat

SEQ ID NO: 50988 - RNA, 17 nt, Synthetic Construct
  source 1..17: mol_type = other RNA
taggtcatcgtcaggct

SEQ ID NO: 50989 - RNA, 17 nt, Synthetic Construct
  source 1..17: mol_type = other RNA
taggtcatcgtcaggct

SEQ ID NO: 50990 - RNA, 27 nt, Synthetic Construct
  source 1..27: mol_type = other RNA
ncccccactgctaaatttgactggctt

SEQ ID NO: 50991 - RNA, 22 nt, Synthetic Construct
  source 1..22: mol_type = other RNA
tgtgcaaatctatgcaaaactg

SEQ ID NO: 50992 - RNA, 22 nt, Synthetic Construct
  source 1..22: mol_type = other RNA
gcgtaccgtgagtaataatgcg

SEQ ID NO: 50993 - RNA, 22 nt, Synthetic Construct
  source 1..22: mol_type = other RNA
gcgtaccgtgagtaataatgcg

SEQ ID NO: 50994 - RNA, 21 nt, Synthetic Construct
  source 1..21: mol_type = other RNA
ggaggggcagagagcgagact

SEQ ID NO: 50995 - RNA, 21 nt, Synthetic Construct
  source 1..21: mol_type = other RNA
tgaggtagtagattgtatagc

SEQ ID NO: 50996 - RNA, 21 nt, Synthetic Construct
  source 1..21: mol_type = other RNA
tgaggtagtagattgtatagc

SEQ ID NO: 50997 - RNA, 22 nt, Synthetic Construct
  source 1..22: mol_type = other RNA
taaggtagtaggttgtatagtt

SEQ ID NO: 50998 - RNA, 22 nt, Synthetic Construct
  source 1..22: mol_type = other RNA
taaggtagtaggttgtatagtt

SEQ ID NO: 50999 - RNA, 27 nt, Synthetic Construct
  source 1..27: mol_type = other RNA
gttggttcaagcgtgtagtcgtgctct

SEQ ID NO: 51000 - RNA, 23 nt, Synthetic Construct
  source 1..23: mol_type = other RNA
gcgtggtaggagagcgttctgta

SEQ ID NO: 51001 - RNA, 30 nt, Synthetic Construct; identical to SEQ ID NO: 6405
  source 1..30: mol_type = other RNA

SEQ ID NO: 51002 - RNA, 30 nt, Synthetic Construct; identical to SEQ ID NO: 6405
  source 1..30: mol_type = other RNA

SEQ ID NO: 51003 - RNA, 16 nt, Synthetic Construct
  source 1..16: mol_type = other RNA
gcagacgaagtgagtg

SEQ ID NO: 51004 - RNA, 21 nt, Synthetic Construct
  source 1..21: mol_type = other RNA
caatggccgggacagagggct

SEQ ID NO: 51005 - RNA, 21 nt, Synthetic Construct
  source 1..21: mol_type = other RNA
caatggccgggacagagggct

SEQ ID NO: 51006 - RNA, 23 nt, Synthetic Construct
  source 1..23: mol_type = other RNA
caacggaatcccgaaagcagctg

SEQ ID NO: 51007 - RNA, 36 nt, Synthetic Construct; identical to SEQ ID NO: 2444
  source 1..36: mol_type = other RNA

SEQ ID NO: 51008 - RNA, 22 nt, Synthetic Construct
  source 1..22: mol_type = other RNA
tgaggtagtagtttgtgcagtt

SEQ ID NO: 51009 - RNA, 22 nt, Synthetic Construct
  source 1..22: mol_type = other RNA
tgaggtagtagtttgtgcagtt

SEQ ID NO: 51010 - RNA, 15 nt, Synthetic Construct
  source 1..15: mol_type = other RNA
cgccatttaaagagg

SEQ ID NO: 51011 - RNA, 15 nt, Synthetic Construct
  source 1..15: mol_type = other RNA
cgccatttaaagagg

SEQ ID NO: 51012 - RNA, 23 nt, Synthetic Construct
  source 1..23: mol_type = other RNA
tggtaatacgacgtactttgtgt

SEQ ID NO: 51013 - RNA, 23 nt, Synthetic Construct
  source 1..23: mol_type = other RNA
tggtaatacgacgtactttgtgt

SEQ ID NO: 51014 - RNA, 28 nt, Synthetic Construct
  source 1..28: mol_type = other RNA
ccccccactgctaaatttgaccggcttt

SEQ ID NO: 51015 - RNA, 28 nt, Synthetic Construct
  source 1..28: mol_type = other RNA
ccccccactgctaaatttgaccggcttt

SEQ ID NO: 51016 - RNA, 30 nt, Synthetic Construct; identical to SEQ ID NO: 2274
  source 1..30: mol_type = other RNA

SEQ ID NO: 51017 - RNA, 30 nt, Synthetic Construct; identical to SEQ ID NO: 2274
  source 1..30: mol_type = other RNA

SEQ ID NO: 51018 - RNA, 31 nt, Synthetic Construct; identical to SEQ ID NO: 2215
  source 1..31: mol_type = other RNA

SEQ ID NO: 51019 - RNA, 31 nt, Synthetic Construct; identical to SEQ ID NO: 2215
  source 1..31: mol_type = other RNA

SEQ ID NO: 51020 - RNA, 22 nt, Synthetic Construct
  source 1..22: mol_type = other RNA
tgaggtagtaggttgtgtgatt

SEQ ID NO: 51021 - RNA, 23 nt, Synthetic Construct
  source 1..23: mol_type = other RNA
taccacagggtagaaccacggaa

SEQ ID NO: 51022 - RNA, 23 nt, Synthetic Construct
  source 1..23: mol_type = other RNA
taccacagggtagaaccacggaa

SEQ ID NO: 51023 - RNA, 17 nt, Synthetic Construct
  source 1..17: mol_type = other RNA
tggccgtcgtcagctcg

SEQ ID NO: 51024 - RNA, 23 nt, Synthetic Construct
  source 1..23: mol_type = other RNA
cagagtgctgttcgtgcaggtag

SEQ ID NO: 51025 - RNA, 23 nt, Synthetic Construct
  source 1..23: mol_type = other RNA
cagagtgctgttcgtgcaggtag

SEQ ID NO: 51026 - RNA, 21 nt, Synthetic Construct
  source 1..21: mol_type = other RNA
tgagatagtaggttgtgtggt

SEQ ID NO: 51027 - RNA, 21 nt, Synthetic Construct
  source 1..21: mol_type = other RNA
tgagatagtaggttgtgtggt

SEQ ID NO: 51028 - RNA, 16 nt, Synthetic Construct
  source 1..16: mol_type = other RNA
gtccccttcgtctaga

SEQ ID NO: 51029 - RNA, 22 nt, Synthetic Construct
  source 1..22: mol_type = other RNA
tgaggaagtagtttgtgctgtt

SEQ ID NO: 51030 - RNA, 23 nt, Synthetic Construct
  source 1..23: mol_type = other RNA
taactccttaagcgaatctcggc

SEQ ID NO: 51031 - RNA, 23 nt, Synthetic Construct
  source 1..23: mol_type = other RNA
taactccttaagcgaatctcggc

SEQ ID NO: 51032 - RNA, 22 nt, Synthetic Construct
  source 1..22: mol_type = other RNA
tcctgtgctgagctgccccgag

SEQ ID NO: 51033 - RNA, 22 nt, Synthetic Construct
  source 1..22: mol_type = other RNA
tcctgtgctgagctgccccgag

SEQ ID NO: 51034 - RNA, 23 nt, Synthetic Construct
  source 1..23: mol_type = other RNA
ggaggggcagagagcgagacttt

SEQ ID NO: 51035 - RNA, 23 nt, Synthetic Construct
  source 1..23: mol_type = other RNA
ggaggggcagagagcgagacttt

SEQ ID NO: 51036 - RNA, 21 nt, Synthetic Construct
  source 1..21: mol_type = other RNA
tcccagtaaacggcggccgta

SEQ ID NO: 51037 - RNA, 21 nt, Synthetic Construct
  source 1..21: mol_type = other RNA
tcccagtaaacggcggccgta

SEQ ID NO: 51038 - RNA, 23 nt, Synthetic Construct
  source 1..23: mol_type = other RNA
tgaggtagtaggttgtatggtta

SEQ ID NO: 51039 - RNA, 23 nt, Synthetic Construct
  source 1..23: mol_type = other RNA
tgaggtagtaggttgtatggtta

SEQ ID NO: 51040 - RNA, 24 nt, Synthetic Construct
  source 1..24: mol_type = other RNA
tgtaaacatccctgactggaagct

SEQ ID NO: 51041 - RNA, 22 nt, Synthetic Construct
  source 1..22: mol_type = other RNA
tgaggtagtagtttatgctgtt

SEQ ID NO: 51042 - RNA, 22 nt, Synthetic Construct
  source 1..22: mol_type = other RNA
tgaggtagtagtttatgctgtt

SEQ ID NO: 51043 - RNA, 22 nt, Synthetic Construct
  source 1..22: mol_type = other RNA
tcgcagcacgtaaatattggcg

SEQ ID NO: 51044 - RNA, 22 nt, Synthetic Construct
  source 1..22: mol_type = other RNA
tcgcagcacgtaaatattggcg

SEQ ID NO: 51045 - RNA, 24 nt, Synthetic Construct
  source 1..24: mol_type = other RNA
agctcggtctgaggcccctcagtt

SEQ ID NO: 51046 - RNA, 24 nt, Synthetic Construct
  source 1..24: mol_type = other RNA
agctcggtctgaggcccctcagtt

SEQ ID NO: 51047 - RNA, 22 nt, Synthetic Construct
  source 1..22: mol_type = other RNA
cactgcacttgtctcggtctga

SEQ ID NO: 51048 - RNA, 22 nt, Synthetic Construct
  source 1..22: mol_type = other RNA
cactgcacttgtctcggtctga

SEQ ID NO: 51049 - RNA, 36 nt, Synthetic Construct; identical to SEQ ID NO: 2478
  source 1..36: mol_type = other RNA

SEQ ID NO: 51050 - RNA, 21 nt, Synthetic Construct
  source 1..21: mol_type = other RNA
tggagtgtgacaacggtgttt

SEQ ID NO: 51051 - RNA, 21 nt, Synthetic Construct
  source 1..21: mol_type = other RNA
tggagtgtgacaacggtgttt

SEQ ID NO: 51052 - RNA, 23 nt, Synthetic Construct
  source 1..23: mol_type = other RNA
tggtaatacgacgtacttagtat

SEQ ID NO: 51053 - RNA, 22 nt, Synthetic Construct
  source 1..22: mol_type = other RNA
tggggtagtaggttgtgtggtt

SEQ ID NO: 51054 - RNA, 28 nt, Synthetic Construct
  source 1..28: mol_type = other RNA
cgactcttagcggtggatcactcggctc

SEQ ID NO: 51055 - RNA, 22 nt, Synthetic Construct
  source 1..22: mol_type = other RNA
tgaggtagaaggttgtatagtt

SEQ ID NO: 51056 - RNA, 23 nt, Synthetic Construct
  source 1..23: mol_type = other RNA
ccctgtactgagctgccccgagt

SEQ ID NO: 51057 - RNA, 23 nt, Synthetic Construct
  source 1..23: mol_type = other RNA
ccctgtactgagctgccccgagt

SEQ ID NO: 51058 - RNA, 22 nt, Synthetic Construct
  source 1..22: mol_type = other RNA
tagcagcacgtaaatactggcg

SEQ ID NO: 51059 - RNA, 23 nt, Synthetic Construct
  source 1..23: mol_type = other RNA
tgaggggcagagagcgagactta

SEQ ID NO: 51060 - RNA, 23 nt, Synthetic Construct
  source 1..23: mol_type = other RNA
tgaggggcagagagcgagactta

SEQ ID NO: 51061 - RNA, 20 nt, Synthetic Construct
  source 1..20: mol_type = other RNA
tggctcagttcagcaggaaa

SEQ ID NO: 51062 - RNA, 20 nt, Synthetic Construct
  source 1..20: mol_type = other RNA
tggctcagttcagcaggaaa

SEQ ID NO: 51063 - RNA, 21 nt, Synthetic Construct
  source 1..21: mol_type = other RNA
caatggccgggacagagggct

SEQ ID NO: 51064 - RNA, 21 nt, Synthetic Construct
  source 1..21: mol_type = other RNA
caatggccgggacagagggct

SEQ ID NO: 51065 - RNA, 23 nt, Synthetic Construct
  source 1..23: mol_type = other RNA
tggcagtgtcttagctggttgtt

SEQ ID NO: 51066 - RNA, 23 nt, Synthetic Construct
  source 1..23: mol_type = other RNA
tggcagtgtcttagctggttgtt

SEQ ID NO: 51067 - RNA, 25 nt, Synthetic Construct
  source 1..25: mol_type = other RNA
ggtaaaatcgctgagtgaagcattg

SEQ ID NO: 51068 - RNA, 25 nt, Synthetic Construct
  source 1..25: mol_type = other RNA
ggtaaaatcgctgagtgaagcattg

SEQ ID NO: 51069 - RNA, 21 nt, Synthetic Construct
  source 1..21: mol_type = other RNA
ggaatcgctagtaatcgcgga

SEQ ID NO: 51070 - RNA, 23 nt, Synthetic Construct
  source 1..23: mol_type = other RNA
tgaggggcagagagcgagactat

SEQ ID NO: 51071 - RNA, 22 nt, Synthetic Construct
  source 1..22: mol_type = other RNA
tggggtagtaggttgtgtggtt

SEQ ID NO: 51072 - RNA, 22 nt, Synthetic Construct
  source 1..22: mol_type = other RNA
tggggtagtaggttgtgtggtt

SEQ ID NO: 51073 - RNA, 22 nt, Synthetic Construct
  source 1..22: mol_type = other RNA
taaggtagtagattgtatagtt

SEQ ID NO: 51074 - RNA, 22 nt, Synthetic Construct
  source 1..22: mol_type = other RNA
taaggtagtagattgtatagtt

SEQ ID NO: 51075 - RNA, 36 nt, Synthetic Construct; identical to SEQ ID NO: 2344
  source 1..36: mol_type = other RNA

SEQ ID NO: 51076 - RNA, 28 nt, Synthetic Construct
  source 1..28: mol_type = other RNA
gcattgtggttcagtggtagaattctcg

SEQ ID NO: 51077 - RNA, 28 nt, Synthetic Construct
  source 1..28: mol_type = other RNA
gcattgtggttcagtggtagaattctcg

SEQ ID NO: 51078 - RNA, 30 nt, Synthetic Construct; identical to SEQ ID NO: 1220
  source 1..30: mol_type = other RNA

SEQ ID NO: 51079 - RNA, 30 nt, Synthetic Construct; identical to SEQ ID NO: 1220
  source 1..30: mol_type = other RNA

SEQ ID NO: 51080 - RNA, 30 nt, Synthetic Construct; identical to SEQ ID NO: 2353
  source 1..30: mol_type = other RNA

SEQ ID NO: 51081 - RNA, 15 nt, Synthetic Construct
  source 1..15: mol_type = other RNA
aggtgggaggctttg

SEQ ID NO: 51082 - RNA, 20 nt, Synthetic Construct
  source 1..20: mol_type = other RNA
tgaggtagtaggttatgtgg

SEQ ID NO: 51083 - RNA, 34 nt, Synthetic Construct; identical to SEQ ID NO: 2183
  source 1..34: mol_type = other RNA

SEQ ID NO: 51084 - RNA, 34 nt, Synthetic Construct; identical to SEQ ID NO: 2183
  source 1..34: mol_type = other RNA

SEQ ID NO: 51085 - RNA, 16 nt, Synthetic Construct
  source 1..16: mol_type = other RNA
ctcagtagctcgagga

SEQ ID NO: 51086 - RNA, 27 nt, Synthetic Construct
  source 1..27: mol_type = other RNA
ctccccactgctaaatttgactggctt

SEQ ID NO: 51087 - RNA, 20 nt, Synthetic Construct
  source 1..20: mol_type = other RNA
gcatggccgttcttagttgg

SEQ ID NO: 51088 - RNA, 22 nt, Synthetic Construct
  source 1..22: mol_type = other RNA
catcgcacttgtctcggtctga

SEQ ID NO: 51089 - RNA, 22 nt, Synthetic Construct
  source 1..22: mol_type = other RNA
catcgcacttgtctcggtctga

SEQ ID NO: 51090 - RNA, 16 nt, Synthetic Construct
  source 1..16: mol_type = other RNA
gtctacggccataccg

SEQ ID NO: 51091 - RNA, 16 nt, Synthetic Construct
  source 1..16: mol_type = other RNA
gtctacggccataccg

SEQ ID NO: 51092 - RNA, 23 nt, Synthetic Construct
  source 1..23: mol_type = other RNA
atatcggaacgtgcccagtcgtg

SEQ ID NO: 51093 - RNA, 21 nt, Synthetic Construct
  source 1..21: mol_type = other RNA
aacggaatcccaaaagcagct

SEQ ID NO: 51094 - RNA, 21 nt, Synthetic Construct
  source 1..21: mol_type = other RNA
aacggaatcccaaaagcagct

SEQ ID NO: 51095 - RNA, 18 nt, Synthetic Construct
  source 1..18: mol_type = other RNA
cagcactctgcaaagacg

SEQ ID NO: 51096 - RNA, 21 nt, Synthetic Construct
  source 1..21: mol_type = other RNA
caacggaatcccaaaagcagc

SEQ ID NO: 51097 - RNA, 36 nt, Synthetic Construct; identical to SEQ ID NO: 2456
  source 1..36: mol_type = other RNA

SEQ ID NO: 51098 - RNA, 24 nt, Synthetic Construct
  source 1..24: mol_type = other RNA
gcagctaataccgcatacgacctg

SEQ ID NO: 51099 - RNA, 21 nt, Synthetic Construct
  source 1..21: mol_type = other RNA
gggagtgtgacaatggtgttt

SEQ ID NO: 51100 - RNA, 18 nt, Synthetic Construct
  source 1..18: mol_type = other RNA
gctgtgatggccgagtgg

SEQ ID NO: 51101 - RNA, 18 nt, Synthetic Construct
  source 1..18: mol_type = other RNA
gctgtgatggccgagtgg

SEQ ID NO: 51102 - RNA, 23 nt, Synthetic Construct
  source 1..23: mol_type = other RNA
caaagtgctgttcgcgcaggtag

SEQ ID NO: 51103 - RNA, 23 nt, Synthetic Construct
  source 1..23: mol_type = other RNA
caaagtgctgttcgcgcaggtag

SEQ ID NO: 51104 - RNA, 19 nt, Synthetic Construct
  source 1..19: mol_type = other RNA
gtccggatcgtagtctgca

SEQ ID NO: 51105 - RNA, 26 nt, Synthetic Construct
  source 1..26: mol_type = other RNA
aatgacacgatcactcccgttgagtt

SEQ ID NO: 51106 - RNA, 22 nt, Synthetic Construct
  source 1..22: mol_type = other RNA
cattgcacttgtctcggtctgg

SEQ ID NO: 51107 - RNA, 22 nt, Synthetic Construct
  source 1..22: mol_type = other RNA
cattgcacttgtctcggtctgg

SEQ ID NO: 51108 - RNA, 31 nt, Synthetic Construct; identical to SEQ ID NO: 2427
  source 1..31: mol_type = other RNA

SEQ ID NO: 51109 - RNA, 31 nt, Synthetic Construct; identical to SEQ ID NO: 2427
  source 1..31: mol_type = other RNA

SEQ ID NO: 51110 - RNA, 21 nt, Synthetic Construct
  source 1..21: mol_type = other RNA
tggagtgtggcaatggtgttt

SEQ ID NO: 51111 - RNA, 21 nt, Synthetic Construct
  source 1..21: mol_type = other RNA
tggagtgtggcaatggtgttt

SEQ ID NO: 51112 - RNA, 22 nt, Synthetic Construct
  source 1..22: mol_type = other RNA
taaatccttaagcgaatctcgc

SEQ ID NO: 51113 - RNA, 22 nt, Synthetic Construct
  source 1..22: mol_type = other RNA
taaatccttaagcgaatctcgc

SEQ ID NO: 51114 - RNA, 21 nt, Synthetic Construct
  source 1..21: mol_type = other RNA
tgaggtagaaggttgtatagt

SEQ ID NO: 51115 - RNA, 21 nt, Synthetic Construct
  source 1..21: mol_type = other RNA
tgaggtagaaggttgtatagt

SEQ ID NO: 51116 - RNA, 39 nt, Synthetic Construct; identical to SEQ ID NO: 2398
  source 1..39: mol_type = other RNA

SEQ ID NO: 51117 - RNA, 39 nt, Synthetic Construct; identical to SEQ ID NO: 2398
  source 1..39: mol_type = other RNA

SEQ ID NO: 51118 - RNA, 22 nt, Synthetic Construct
  source 1..22: mol_type = other RNA
cggaatcgctagtaatcgcgga

SEQ ID NO: 51119 - RNA, 43 nt, Synthetic Construct; identical to SEQ ID NO: 6202
  source 1..43: mol_type = other RNA

SEQ ID NO: 51120 - RNA, 23 nt, Synthetic Construct
  source 1..23: mol_type = other RNA
tcctatactgagctgccccgaga

SEQ ID NO: 51121 - RNA, 23 nt, Synthetic Construct
  source 1..23: mol_type = other RNA
tcctatactgagctgccccgaga

SEQ ID NO: 51122 - RNA, 24 nt, Synthetic Construct
  source 1..24: mol_type = other RNA
tagcagcacgtaaatattggcgtt

SEQ ID NO: 51123 - RNA, 27 nt, Synthetic Construct
  source 1..27: mol_type = other RNA
gacttaccaaacctatgcaaactccga

SEQ ID NO: 51124 - RNA, 27 nt, Synthetic Construct
  source 1..27: mol_type = other RNA
gacttaccaaacctatgcaaactccga

SEQ ID NO: 51125 - RNA, 27 nt, Synthetic Construct
  source 1..27: mol_type = other RNA
tcggctgttaaccgaaaggttggtggt

SEQ ID NO: 51126 - RNA, 21 nt, Synthetic Construct
  source 1..21: mol_type = other RNA
gtagtgtttcctactttatgg

SEQ ID NO: 51127 - RNA, 21 nt, Synthetic Construct
  source 1..21: mol_type = other RNA
gtagtgtttcctactttatgg

SEQ ID NO: 51128 - RNA, 22 nt, Synthetic Construct
  source 1..22: mol_type = other RNA
ggaggagttcgaaggtacgcta

SEQ ID NO: 51129 - RNA, 27 nt, Synthetic Construct
  source 1..27: mol_type = other RNA
ccccccactgctaaattcgactggctt

SEQ ID NO: 51130 - RNA, 27 nt, Synthetic Construct
  source 1..27: mol_type = other RNA
ccccccactgctaaattcgactggctt

SEQ ID NO: 51131 - RNA, 35 nt, Synthetic Construct; identical to SEQ ID NO: 2548
  source 1..35: mol_type = other RNA

SEQ ID NO: 51132 - RNA, 35 nt, Synthetic Construct; identical to SEQ ID NO: 2548
  source 1..35: mol_type = other RNA

SEQ ID NO: 51133 - RNA, 23 nt, Synthetic Construct
  source 1..23: mol_type = other RNA
tggaatgtaaagaagtatgtatt

SEQ ID NO: 51134 - RNA, 23 nt, Synthetic Construct
  source 1..23: mol_type = other RNA
tggaatgtaaagaagtatgtatt

SEQ ID NO: 51135 - RNA, 22 nt, Synthetic Construct
  source 1..22: mol_type = other RNA
tatcgcacttgtcccggcctgt

SEQ ID NO: 51136 - RNA, 22 nt, Synthetic Construct
  source 1..22: mol_type = other RNA
tatcgcacttgtcccggcctgt

SEQ ID NO: 51137 - RNA, 22 nt, Synthetic Construct
  source 1..22: mol_type = other RNA
tagcagcacataatggtttgtg

SEQ ID NO: 51138 - RNA, 22 nt, Synthetic Construct
  source 1..22: mol_type = other RNA
tagcagcacataatggtttgtg

SEQ ID NO: 51139 - RNA, 22 nt, Synthetic Construct
  source 1..22: mol_type = other RNA
tgaggtagtaggtcgtgtggtt

SEQ ID NO: 51140 - RNA, 32 nt, Synthetic Construct; identical to SEQ ID NO: 2467
  source 1..32: mol_type = other RNA

SEQ ID NO: 51141 - RNA, 32 nt, Synthetic Construct; identical to SEQ ID NO: 2467
  source 1..32: mol_type = other RNA

SEQ ID NO: 51142 - RNA, 41 nt, Synthetic Construct; identical to SEQ ID NO: 2441
  source 1..41: mol_type = other RNA

SEQ ID NO: 51143 - RNA, 20 nt, Synthetic Construct
  source 1..20: mol_type = other RNA
tgaggtagtaggctgtgtgg

SEQ ID NO: 51144 - RNA, 22 nt, Synthetic Construct
  source 1..22: mol_type = other RNA
taggtagtttcctgttgttggg

SEQ ID NO: 51145 - RNA, 22 nt, Synthetic Construct
  source 1..22: mol_type = other RNA
taggtagtttcctgttgttggg

SEQ ID NO: 51146 - RNA, 23 nt, Synthetic Construct
  source 1..23: mol_type = other RNA
tgaggggcagagagcgagactct

SEQ ID NO: 51147 - RNA, 23 nt, Synthetic Construct
  source 1..23: mol_type = other RNA
tgaggggcagagagcgagactct

SEQ ID NO: 51148 - RNA, 21 nt, Synthetic Construct
  source 1..21: mol_type = other RNA
tgaggtagtaggttgtataga

SEQ ID NO: 51149 - RNA, 22 nt, Synthetic Construct
  source 1..22: mol_type = other RNA
tcagcgccgatgatagtgcgga

SEQ ID NO: 51150 - RNA, 22 nt, Synthetic Construct
  source 1..22: mol_type = other RNA
tcagcgccgatgatagtgcgga

SEQ ID NO: 51151 - RNA, 28 nt, Synthetic Construct
  source 1..28: mol_type = other RNA
ccccccactgctaaatttgactggcctt

SEQ ID NO: 51152 - RNA, 24 nt, Synthetic Construct
  source 1..24: mol_type = other RNA
tgtaagcatccccgactggaagct

SEQ ID NO: 51153 - RNA, 22 nt, Synthetic Construct
  source 1..22: mol_type = other RNA
tgaggtagtaggttgtgtggct

SEQ ID NO: 51154 - RNA, 22 nt, Synthetic Construct
  source 1..22: mol_type = other RNA
tgaggtagtaggttgtgtggct

SEQ ID NO: 51155 - RNA, 23 nt, Synthetic Construct
  source 1..23: mol_type = other RNA
tggaatgtaaagaagtatgtata

SEQ ID NO: 51156 - RNA, 23 nt, Synthetic Construct
  source 1..23: mol_type = other RNA
tggaatgtaaagaagtatgtata

SEQ ID NO: 51157 - RNA, 23 nt, Synthetic Construct
  source 1..23: mol_type = other RNA
ttcaagtaatccaggataggcta

SEQ ID NO: 51158 - RNA, 23 nt, Synthetic Construct
  source 1..23: mol_type = other RNA
ttcaagtaatccaggataggcta

SEQ ID NO: 51159 - RNA, 20 nt, Synthetic Construct
  source 1..20: mol_type = other RNA
tgaggtagtaggttgcgtgg

SEQ ID NO: 51160 - RNA, 20 nt, Synthetic Construct
  source 1..20: mol_type = other RNA
tgaggtagtaggttgtgagg

SEQ ID NO: 51161 - RNA, 21 nt, Synthetic Construct
  source 1..21: mol_type = other RNA
acacatgcaagtcgaacggta

SEQ ID NO: 51162 - RNA, 21 nt, Synthetic Construct
  source 1..21: mol_type = other RNA
acacatgcaagtcgaacggta

SEQ ID NO: 51163 - RNA, 20 nt, Synthetic Construct
  source 1..20: mol_type = other RNA
tgaggtagcaggttgtgtgg

SEQ ID NO: 51164 - RNA, 20 nt, Synthetic Construct
  source 1..20: mol_type = other RNA
tgaggtagcaggttgtgtgg

SEQ ID NO: 51165 - RNA, 21 nt, Synthetic Construct
  source 1..21: mol_type = other RNA
tgaggggcagagagcgagacc

SEQ ID NO: 51166 - RNA, 20 nt, Synthetic Construct
  source 1..20: mol_type = other RNA
aaaccgttaccattactgag

SEQ ID NO: 51167 - RNA, 20 nt, Synthetic Construct
  source 1..20: mol_type = other RNA
aaaccgttaccattactgag

SEQ ID NO: 51168 - RNA, 37 nt, Synthetic Construct; identical to SEQ ID NO: 715
  source 1..37: mol_type = other RNA

SEQ ID NO: 51169 - RNA, 37 nt, Synthetic Construct; identical to SEQ ID NO: 715
  source 1..37: mol_type = other RNA

SEQ ID NO: 51170 - RNA, 22 nt, Synthetic Construct
  source 1..22: mol_type = other RNA
aacggaatcccaaaagcagctg

SEQ ID NO: 51171 - RNA, 22 nt, Synthetic Construct
  source 1..22: mol_type = other RNA
aacggaatcccaaaagcagctg

SEQ ID NO: 51172 - RNA, 22 nt, Synthetic Construct
  source 1..22: mol_type = other RNA
tgaggtagtaggctgtgtggtt

SEQ ID NO: 51173 - RNA, 22 nt, Synthetic Construct
  source 1..22: mol_type = other RNA
tgaggtagtaggctgtgtggtt

SEQ ID NO: 51174 - RNA, 22 nt, Synthetic Construct
  source 1..22: mol_type = other RNA
tgaagtagtaggttgtatagtt

SEQ ID NO: 51175 - RNA, 22 nt, Synthetic Construct
  source 1..22: mol_type = other RNA
tgtggtagtaggttgtatagtt

SEQ ID NO: 51176 - RNA, 22 nt, Synthetic Construct
  source 1..22: mol_type = other RNA
caaagaattctccttttgggct

SEQ ID NO: 51177 - RNA, 21 nt, Synthetic Construct
  source 1..21: mol_type = other RNA
ccctgtactgagctgccccga

SEQ ID NO: 51178 - RNA, 21 nt, Synthetic Construct
  source 1..21: mol_type = other RNA
ccctgtactgagctgccccga

SEQ ID NO: 51179 - RNA, 35 nt, Synthetic Construct; identical to SEQ ID NO: 3369
  source 1..35: mol_type = other RNA

SEQ ID NO: 51180 - RNA, 35 nt, Synthetic Construct; identical to SEQ ID NO: 3369
  source 1..35: mol_type = other RNA

SEQ ID NO: 51181 - RNA, 16 nt, Synthetic Construct
  source 1..16: mol_type = other RNA
tgcacgaaagcgtggg

SEQ ID NO: 51182 - RNA, 16 nt, Synthetic Construct
  source 1..16: mol_type = other RNA
tgcacgaaagcgtggg

SEQ ID NO: 51183 - RNA, 22 nt, Synthetic Construct
  source 1..22: mol_type = other RNA
cattgcacttgtctcggtccga

SEQ ID NO: 51184 - RNA, 22 nt, Synthetic Construct
  source 1..22: mol_type = other RNA
cattgcacttgtctcggtccga

SEQ ID NO: 51185 - RNA, 21 nt, Synthetic Construct
  source 1..21: mol_type = other RNA
aatgacacgatcactcccgtt

SEQ ID NO: 51186 - RNA, 21 nt, Synthetic Construct
  source 1..21: mol_type = other RNA
aatgacacgatcactcccgtt

SEQ ID NO: 51187 - RNA, 22 nt, Synthetic Construct
  source 1..22: mol_type = other RNA
ggatatcatcatatactgtaag

SEQ ID NO: 51188 - RNA, 22 nt, Synthetic Construct
  source 1..22: mol_type = other RNA
ggatatcatcatatactgtaag

SEQ ID NO: 51189 - RNA, 23 nt, Synthetic Construct
  source 1..23: mol_type = other RNA
taaggtgcatctagtgcagatag

SEQ ID NO: 51190 - RNA, 23 nt, Synthetic Construct
  source 1..23: mol_type = other RNA
taaggtgcatctagtgcagatag

SEQ ID NO: 51191 - RNA, 33 nt, Synthetic Construct; identical to SEQ ID NO: 2479
  source 1..33: mol_type = other RNA

SEQ ID NO: 51192 - RNA, 21 nt, Synthetic Construct
  source 1..21: mol_type = other RNA
agaggggcagagagcgagact

SEQ ID NO: 51193 - RNA, 20 nt, Synthetic Construct
  source 1..20: mol_type = other RNA
taaggtagtaggttgtgtgg

SEQ ID NO: 51194 - RNA, 23 nt, Synthetic Construct
  source 1..23: mol_type = other RNA
caaagtgctgtttgtgcaggtag

SEQ ID NO: 51195 - RNA, 21 nt, Synthetic Construct
  source 1..21: mol_type = other RNA
tgaggtagtaggttgtgtagt

SEQ ID NO: 51196 - RNA, 23 nt, Synthetic Construct
  source 1..23: mol_type = other RNA
tcctgtactgagctgtcccgaga

SEQ ID NO: 51197 - RNA, 23 nt, Synthetic Construct
  source 1..23: mol_type = other RNA
tcctgtactgagctgtcccgaga

SEQ ID NO: 51198 - RNA, 32 nt, Synthetic Construct; identical to SEQ ID NO: 3092
  source 1..32: mol_type = other RNA

SEQ ID NO: 51199 - RNA, 32 nt, Synthetic Construct; identical to SEQ ID NO: 3092
  source 1..32: mol_type = other RNA

SEQ ID NO: 51200 - RNA, 21 nt, Synthetic Construct
  source 1..21: mol_type = other RNA
tgaagtagtaggttgtgtggt

SEQ ID NO: 51201 - RNA, 21 nt, Synthetic Construct
  source 1..21: mol_type = other RNA
tgaagtagtaggttgtgtggt

SEQ ID NO: 51202 - RNA, 22 nt, Synthetic Construct
  source 1..22: mol_type = other RNA
tgagatagtaggttgtatagtt

SEQ ID NO: 51203 - RNA, 22 nt, Synthetic Construct
  source 1..22: mol_type = other RNA
tgagatagtaggttgtatagtt

SEQ ID NO: 51204 - RNA, 21 nt, Synthetic Construct
  source 1..21: mol_type = other RNA
tggggtagtagtttgtgctgt

SEQ ID NO: 51205 - RNA, 21 nt, Synthetic Construct
  source 1..21: mol_type = other RNA
ctaatcccagaaacccggtcg

SEQ ID NO: 51206 - RNA, 21 nt, Synthetic Construct
  source 1..21: mol_type = other RNA
tgaggtagtaggttgtataga

SEQ ID NO: 51207 - RNA, 21 nt, Synthetic Construct
  source 1..21: mol_type = other RNA
tgaggtagtaggttgtataga

SEQ ID NO: 51208 - RNA, 31 nt, Synthetic Construct; identical to SEQ ID NO: 4881
  source 1..31: mol_type = other RNA

SEQ ID NO: 51209 - RNA, 31 nt, Synthetic Construct; identical to SEQ ID NO: 4881
  source 1..31: mol_type = other RNA

SEQ ID NO: 51210 - RNA, 22 nt, Synthetic Construct
  source 1..22: mol_type = other RNA
tccttcattccaccggagtctg

SEQ ID NO: 51211 - RNA, 22 nt, Synthetic Construct
  source 1..22: mol_type = other RNA
tccttcattccaccggagtctg

SEQ ID NO: 51212 - RNA, 23 nt, Synthetic Construct
  source 1..23: mol_type = other RNA
tggagagaaaggcagttcctgaa

SEQ ID NO: 51213 - RNA, 23 nt, Synthetic Construct
  source 1..23: mol_type = other RNA
tggagagaaaggcagttcctgaa

SEQ ID NO: 51214 - RNA, 22 nt, Synthetic Construct
  source 1..22: mol_type = other RNA
tgaggtagtgggttgtgtggtt

SEQ ID NO: 51215 - RNA, 22 nt, Synthetic Construct
  source 1..22: mol_type = other RNA
tgaggtagtgggttgtgtggtt

SEQ ID NO: 51216 - RNA, 23 nt, Synthetic Construct
  source 1..23: mol_type = other RNA
tgaggtagcaggttgtgtggttt

SEQ ID NO: 51217 - RNA, 23 nt, Synthetic Construct
  source 1..23: mol_type = other RNA
tcctgtacagagctgccccgaga

SEQ ID NO: 51218 - RNA, 23 nt, Synthetic Construct
  source 1..23: mol_type = other RNA
tcctgtacagagctgccccgaga

SEQ ID NO: 51219 - RNA, 17 nt, Synthetic Construct
  source 1..17: mol_type = other RNA
aggaattgacggaaggg

SEQ ID NO: 51220 - RNA, 17 nt, Synthetic Construct
  source 1..17: mol_type = other RNA
aggaattgacggaaggg

SEQ ID NO: 51221 - RNA, 23 nt, Synthetic Construct
  source 1..23: mol_type = other RNA
agcagcattgtacagggctatgt

SEQ ID NO: 51222 - RNA, 18 nt, Synthetic Construct
  source 1..18: mol_type = other RNA
tccgacatgcgagggttc

SEQ ID NO: 51223 - RNA, 20 nt, Synthetic Construct
  source 1..20: mol_type = other RNA
tgaggtagtgggttgtatag

SEQ ID NO: 51224 - RNA, 20 nt, Synthetic Construct
  source 1..20: mol_type = other RNA
tgaggtagtgggttgtatag

SEQ ID NO: 51225 - RNA, 22 nt, Synthetic Construct
  source 1..22: mol_type = other RNA
tgaggaagtagtttgtgctgtt

SEQ ID NO: 51226 - RNA, 22 nt, Synthetic Construct
  source 1..22: mol_type = other RNA
tgaggaagtagtttgtgctgtt

SEQ ID NO: 51227 - RNA, 22 nt, Synthetic Construct
  source 1..22: mol_type = other RNA
ggcagcattgtacagggctatg

SEQ ID NO: 51228 - RNA, 27 nt, Synthetic Construct
  source 1..27: mol_type = other RNA
ggggagctaatcccagaaacccggtcg

SEQ ID NO: 51229 - RNA, 21 nt, Synthetic Construct
  source 1..21: mol_type = other RNA
tgaggtagtagtttgcgctgt

SEQ ID NO: 51230 - RNA, 21 nt, Synthetic Construct
  source 1..21: mol_type = other RNA
tgaggtagtagtttgcgctgt

SEQ ID NO: 51231 - RNA, 27 nt, Synthetic Construct
  source 1..27: mol_type = other RNA
cccccccactgctaaatttgactggct

SEQ ID NO: 51232 - RNA, 24 nt, Synthetic Construct
  source 1..24: mol_type = other RNA
gaggtgtagaataggtgggagctt

SEQ ID NO: 51233 - RNA, 24 nt, Synthetic Construct
  source 1..24: mol_type = other RNA
gaggtgtagaataggtgggagctt

SEQ ID NO: 51234 - RNA, 23 nt, Synthetic Construct
  source 1..23: mol_type = other RNA
tgtcagtttgtcaaataccccaa

SEQ ID NO: 51235 - RNA, 23 nt, Synthetic Construct
  source 1..23: mol_type = other RNA
tgtcagtttgtcaaataccccaa

SEQ ID NO: 51236 - RNA, 23 nt, Synthetic Construct
  source 1..23: mol_type = other RNA
agcggcattgtacagggctatga

SEQ ID NO: 51237 - RNA, 23 nt, Synthetic Construct
  source 1..23: mol_type = other RNA
agcggcattgtacagggctatga

SEQ ID NO: 51238 - RNA, 21 nt, Synthetic Construct
  source 1..21: mol_type = other RNA
tgaggtagtaggttatgtggt

SEQ ID NO: 51239 - RNA, 21 nt, Synthetic Construct
  source 1..21: mol_type = other RNA
tgaggtagtaggttatgtggt

SEQ ID NO: 51240 - RNA, 25 nt, Synthetic Construct
  source 1..25: mol_type = other RNA
ttgaggatatgagatcgagacgacg

SEQ ID NO: 51241 - RNA, 25 nt, Synthetic Construct
  source 1..25: mol_type = other RNA
ttgaggatatgagatcgagacgacg

SEQ ID NO: 51242 - RNA, 24 nt, Synthetic Construct
  source 1..24: mol_type = other RNA
tgtaaacacccccgactggaagct

SEQ ID NO: 51243 - RNA, 16 nt, Synthetic Construct
  source 1..16: mol_type = other RNA
tcgtgacgatagtgca

SEQ ID NO: 51244 - RNA, 16 nt, Synthetic Construct
  source 1..16: mol_type = other RNA
tcgtgacgatagtgca

SEQ ID NO: 51245 - RNA, 22 nt, Synthetic Construct
  source 1..22: mol_type = other RNA
cattgcacttgtcccggtctga

SEQ ID NO: 51246 - RNA, 23 nt, Synthetic Construct
  source 1..23: mol_type = other RNA
tggtaatacgacgtacatagtgt

SEQ ID NO: 51247 - RNA, 23 nt, Synthetic Construct
  source 1..23: mol_type = other RNA
tggtaatacgacgtacatagtgt

SEQ ID NO: 51248 - RNA, 23 nt, Synthetic Construct
  source 1..23: mol_type = other RNA
tggtaatacgacgtactaagtgt

SEQ ID NO: 51249 - RNA, 23 nt, Synthetic Construct
  source 1..23: mol_type = other RNA
tggtaatacgacgtactaagtgt

SEQ ID NO: 51250 - RNA, 22 nt, Synthetic Construct
  source 1..22: mol_type = other RNA
tgaggtagtagattgtatagta

SEQ ID NO: 51251 - RNA, 22 nt, Synthetic Construct
  source 1..22: mol_type = other RNA
tgaggtagtagattgtatagta

SEQ ID NO: 51252 - RNA, 20 nt, Synthetic Construct
  source 1..20: mol_type = other RNA
cacatgcaagtcgaacggta

SEQ ID NO: 51253 - RNA, 22 nt, Synthetic Construct
  source 1..22: mol_type = other RNA
tggagtgtgacaatggcgtttg

SEQ ID NO: 51254 - RNA, 17 nt, Synthetic Construct
  source 1..17: mol_type = other RNA
cgaaattccttgtcggg

SEQ ID NO: 51255 - RNA, 23 nt, Synthetic Construct
  source 1..23: mol_type = other RNA
tcctgtactgagccgccccgaga

SEQ ID NO: 51256 - RNA, 23 nt, Synthetic Construct
  source 1..23: mol_type = other RNA
tcctgtactgagccgccccgaga

SEQ ID NO: 51257 - RNA, 24 nt, Synthetic Construct
  source 1..24: mol_type = other RNA
tgtaaacatccccgactggaggct

SEQ ID NO: 51258 - RNA, 27 nt, Synthetic Construct
  source 1..27: mol_type = other RNA
ccccccactgctaaatttgaccggctt

SEQ ID NO: 51259 - RNA, 27 nt, Synthetic Construct
  source 1..27: mol_type = other RNA
ccccccactgctaaatttgaccggctt

SEQ ID NO: 51260 - RNA, 16 nt, Synthetic Construct
  source 1..16: mol_type = other RNA
ctgacgctcatgcacg

SEQ ID NO: 51261 - RNA, 16 nt, Synthetic Construct
  source 1..16: mol_type = other RNA
ctgacgctcatgcacg

SEQ ID NO: 51262 - RNA, 23 nt, Synthetic Construct
  source 1..23: mol_type = other RNA
tggtaatacgacgcacttagtgt

SEQ ID NO: 51263 - RNA, 23 nt, Synthetic Construct
  source 1..23: mol_type = other RNA
tggtaatacgacgcacttagtgt

SEQ ID NO: 51264 - RNA, 23 nt, Synthetic Construct
  source 1..23: mol_type = other RNA
tggtaatgcgacgtacttagtgt

SEQ ID NO: 51265 - RNA, 16 nt, Synthetic Construct
  source 1..16: mol_type = other RNA
tccggatcgtagtctg

SEQ ID NO: 51266 - RNA, 16 nt, Synthetic Construct
  source 1..16: mol_type = other RNA
tccggatcgtagtctg

SEQ ID NO: 51267 - RNA, 25 nt, Synthetic Construct
  source 1..25: mol_type = other RNA
tcgaggatatgagatcgagacgaca

SEQ ID NO: 51268 - RNA, 22 nt, Synthetic Construct
  source 1..22: mol_type = other RNA
tctttgttcgattccgttgagt

SEQ ID NO: 51269 - RNA, 22 nt, Synthetic Construct
  source 1..22: mol_type = other RNA
tctttgttcgattccgttgagt

SEQ ID NO: 51270 - RNA, 32 nt, Synthetic Construct; identical to SEQ ID NO: 161
  source 1..32: mol_type = other RNA

SEQ ID NO: 51271 - RNA, 22 nt, Synthetic Construct
  source 1..22: mol_type = other RNA
tggagtgtggcaatggtgtttg

SEQ ID NO: 51272 - RNA, 20 nt, Synthetic Construct
  source 1..20: mol_type = other RNA
cataaagtagaaagcactac

SEQ ID NO: 51273 - RNA, 24 nt, Synthetic Construct
  source 1..24: mol_type = other RNA
agcagcattgtacagggctatgag

SEQ ID NO: 51274 - RNA, 23 nt, Synthetic Construct
  source 1..23: mol_type = other RNA
tgaggggcagagagcgagactat

SEQ ID NO: 51275 - RNA, 22 nt, Synthetic Construct
  source 1..22: mol_type = other RNA
taggtagtttcctgttgttggg

SEQ ID NO: 51276 - RNA, 22 nt, Synthetic Construct
  source 1..22: mol_type = other RNA
tttgttcgttcggctcgcgtga

SEQ ID NO: 51277 - RNA, 22 nt, Synthetic Construct
  source 1..22: mol_type = other RNA
tttgttcgttcggctcgcgtga

SEQ ID NO: 51278 - RNA, 22 nt, Synthetic Construct
  source 1..22: mol_type = other RNA
tcttgtactgagctgccccgag

SEQ ID NO: 51279 - RNA, 22 nt, Synthetic Construct
  source 1..22: mol_type = other RNA
tcttgtactgagctgccccgag

SEQ ID NO: 51280 - RNA, 20 nt, Synthetic Construct
  source 1..20: mol_type = other RNA
cgaggtagtaggttgtatag

SEQ ID NO: 51281 - RNA, 20 nt, Synthetic Construct
  source 1..20: mol_type = other RNA
cgaggtagtaggttgtatag

SEQ ID NO: 51282 - RNA, 23 nt, Synthetic Construct
  source 1..23: mol_type = other RNA
tggtaatacgacgtacttagagt

SEQ ID NO: 51283 - RNA, 23 nt, Synthetic Construct
  source 1..23: mol_type = other RNA
tggtaatacgtcgtacttagtgt

SEQ ID NO: 51284 - RNA, 23 nt, Synthetic Construct
  source 1..23: mol_type = other RNA
aggtaatacgacgtacttagtgt

SEQ ID NO: 51285 - RNA, 21 nt, Synthetic Construct
  source 1..21: mol_type = other RNA
tgaggtaataggttgtgtggt

SEQ ID NO: 51286 - RNA, 21 nt, Synthetic Construct
  source 1..21: mol_type = other RNA
tgaggtaataggttgtgtggt

SEQ ID NO: 51287 - RNA, 22 nt, Synthetic Construct
  source 1..22: mol_type = other RNA
gtcagtttgtcaaataccccaa

SEQ ID NO: 51288 - RNA, 22 nt, Synthetic Construct
  source 1..22: mol_type = other RNA
cggaatgtaaagaagtatgtat

SEQ ID NO: 51289 - RNA, 22 nt, Synthetic Construct
  source 1..22: mol_type = other RNA
cggaatgtaaagaagtatgtat

SEQ ID NO: 51290 - RNA, 27 nt, Synthetic Construct
  source 1..27: mol_type = other RNA
ccccccactgctaaatttgtctggctt

SEQ ID NO: 51291 - RNA, 22 nt, Synthetic Construct
  source 1..22: mol_type = other RNA
tgaggtagtaggttgagtggtt

SEQ ID NO: 51292 - RNA, 21 nt, Synthetic Construct
  source 1..21: mol_type = other RNA
tggggtagtagtttgtgctgt

SEQ ID NO: 51293 - RNA, 19 nt, Synthetic Construct
  source 1..19: mol_type = other RNA
cggaagaaggggtgcctgg

SEQ ID NO: 51294 - RNA, 19 nt, Synthetic Construct
  source 1..19: mol_type = other RNA
cggaagaaggggtgcctgg

SEQ ID NO: 51295 - RNA, 21 nt, Synthetic Construct
  source 1..21: mol_type = other RNA
tgaggtagtagcttgtgctgt

SEQ ID NO: 51296 - RNA, 22 nt, Synthetic Construct
  source 1..22: mol_type = other RNA
ggtcggcccacggccctggcgg

SEQ ID NO: 51297 - RNA, 22 nt, Synthetic Construct
  source 1..22: mol_type = other RNA
ggtcggcccacggccctggcgg

SEQ ID NO: 51298 - RNA, 33 nt, Synthetic Construct; identical to SEQ ID NO: 2266
  source 1..33: mol_type = other RNA

SEQ ID NO: 51299 - RNA, 33 nt, Synthetic Construct; identical to SEQ ID NO: 2266
  source 1..33: mol_type = other RNA

SEQ ID NO: 51300 - RNA, 15 nt, Synthetic Construct
  source 1..15: mol_type = other RNA
accggaggaaggtgg

SEQ ID NO: 51301 - RNA, 23 nt, Synthetic Construct
  source 1..23: mol_type = other RNA
tgaggcagtaggttgtgtggttt

SEQ ID NO: 51302 - RNA, 26 nt, Synthetic Construct
  source 1..26: mol_type = other RNA
cgactcttagcggtggatcactcggc

SEQ ID NO: 51303 - RNA, 26 nt, Synthetic Construct
  source 1..26: mol_type = other RNA
cgactcttagcggtggatcactcggc

SEQ ID NO: 51304 - RNA, 16 nt, Synthetic Construct
  source 1..16: mol_type = other RNA
gtctacggccatacta

SEQ ID NO: 51305 - RNA, 22 nt, Synthetic Construct
  source 1..22: mol_type = other RNA
tgaggtagtaaattgtatagtt

SEQ ID NO: 51306 - RNA, 22 nt, Synthetic Construct
  source 1..22: mol_type = other RNA
tgaggtagtaaattgtatagtt

SEQ ID NO: 51307 - RNA, 22 nt, Synthetic Construct
  source 1..22: mol_type = other RNA
cagggctggcagtgacatgggt

SEQ ID NO: 51308 - RNA, 20 nt, Synthetic Construct
  source 1..20: mol_type = other RNA
tcctgtctgaatatgggggg

SEQ ID NO: 51309 - RNA, 27 nt, Synthetic Construct
  source 1..27: mol_type = other RNA
ccccccactgctaaatttgactggcct

SEQ ID NO: 51310 - RNA, 27 nt, Synthetic Construct
  source 1..27: mol_type = other RNA
ccccccactgctaaatttgactggcct

SEQ ID NO: 51311 - RNA, 22 nt, Synthetic Construct
  source 1..22: mol_type = other RNA
tgaagtagtaggttgtgtggtt

SEQ ID NO: 51312 - RNA, 22 nt, Synthetic Construct
  source 1..22: mol_type = other RNA
tgaagtagtaggttgtgtggtt

SEQ ID NO: 51313 - RNA, 23 nt, Synthetic Construct
  source 1..23: mol_type = other RNA
tgaggggcagagagcaagacttt

SEQ ID NO: 51314 - RNA, 22 nt, Synthetic Construct
  source 1..22: mol_type = other RNA
tgaggtagtagattgtaaagtt

SEQ ID NO: 51315 - RNA, 22 nt, Synthetic Construct
  source 1..22: mol_type = other RNA
tgaggtagtagattgtaaagtt

SEQ ID NO: 51316 - RNA, 23 nt, Synthetic Construct
  source 1..23: mol_type = other RNA
caaagtgctgttcgtgtaggtag

SEQ ID NO: 51317 - RNA, 23 nt, Synthetic Construct
  source 1..23: mol_type = other RNA
caaagtgctgttcgtgtaggtag

SEQ ID NO: 51318 - RNA, 23 nt, Synthetic Construct
  source 1..23: mol_type = other RNA
tgaggggtagagagcgagacttt

SEQ ID NO: 51319 - RNA, 23 nt, Synthetic Construct
  source 1..23: mol_type = other RNA
tgaggtagtaggttgtgtggttc

SEQ ID NO: 51320 - RNA, 23 nt, Synthetic Construct
  source 1..23: mol_type = other RNA
tgaggtagtaggttgtgtggttc

SEQ ID NO: 51321 - RNA, 16 nt, Synthetic Construct
  source 1..16: mol_type = other RNA
ttggcctcaagtcagg

SEQ ID NO: 51322 - RNA, 16 nt, Synthetic Construct
  source 1..16: mol_type = other RNA
ttggcctcaagtcagg

SEQ ID NO: 51323 - RNA, 23 nt, Synthetic Construct
  source 1..23: mol_type = other RNA
ttcaagtaatccaggataggctt

SEQ ID NO: 51324 - RNA, 23 nt, Synthetic Construct
  source 1..23: mol_type = other RNA
caaagtgctattcgtgcaggtag

SEQ ID NO: 51325 - RNA, 23 nt, Synthetic Construct
  source 1..23: mol_type = other RNA
caaagtgctattcgtgcaggtag

SEQ ID NO: 51326 - RNA, 22 nt, Synthetic Construct
  source 1..22: mol_type = other RNA
tgaggtagtagtttgtgccgtt

SEQ ID NO: 51327 - RNA, 22 nt, Synthetic Construct
  source 1..22: mol_type = other RNA
tgaggtagtagtttgtgccgtt

SEQ ID NO: 51328 - RNA, 22 nt, Synthetic Construct
  source 1..22: mol_type = other RNA
tgaggtagtaggctgtgtggtt

SEQ ID NO: 51329 - RNA, 20 nt, Synthetic Construct
  source 1..20: mol_type = other RNA
tggggtagtaggttgtgtgg

SEQ ID NO: 51330 - RNA, 20 nt, Synthetic Construct
  source 1..20: mol_type = other RNA
tggggtagtaggttgtgtgg

SEQ ID NO: 51331 - RNA, 43 nt, Synthetic Construct; identical to SEQ ID NO: 1204
  source 1..43: mol_type = other RNA

SEQ ID NO: 51332 - RNA, 43 nt, Synthetic Construct; identical to SEQ ID NO: 1204
  source 1..43: mol_type = other RNA

SEQ ID NO: 51333 - RNA, 35 nt, Synthetic Construct; identical to SEQ ID NO: 2397
  source 1..35: mol_type = other RNA

SEQ ID NO: 51334 - RNA, 22 nt, Synthetic Construct
  source 1..22: mol_type = other RNA
tgttggttcaagcgtgtagtcg

SEQ ID NO: 51335 - RNA, 22 nt, Synthetic Construct
  source 1..22: mol_type = other RNA
cgttgcacttgtctcggtctga

SEQ ID NO: 51336 - RNA, 22 nt, Synthetic Construct
  source 1..22: mol_type = other RNA
cgttgcacttgtctcggtctga

SEQ ID NO: 51337 - RNA, 23 nt, Synthetic Construct
  source 1..23: mol_type = other RNA
tgaggggcagggagcgagacttt

SEQ ID NO: 51338 - RNA, 23 nt, Synthetic Construct
  source 1..23: mol_type = other RNA
tgaggggcagggagcgagacttt

SEQ ID NO: 51339 - RNA, 22 nt, Synthetic Construct
  source 1..22: mol_type = other RNA
tcgtaccgcgagtaataatgcg

SEQ ID NO: 51340 - RNA, 28 nt, Synthetic Construct
  source 1..28: mol_type = other RNA
tccctggtggtctagtggttaggattcg

SEQ ID NO: 51341 - RNA, 28 nt, Synthetic Construct
  source 1..28: mol_type = other RNA
tccctggtggtctagtggttaggattcg

SEQ ID NO: 51342 - RNA, 23 nt, Synthetic Construct
  source 1..23: mol_type = other RNA
tgaggcagtaggttgtgtggttt

SEQ ID NO: 51343 - RNA, 23 nt, Synthetic Construct
  source 1..23: mol_type = other RNA
tgaggcagtaggttgtgtggttt

SEQ ID NO: 51344 - RNA, 19 nt, Synthetic Construct
  source 1..19: mol_type = other RNA
cgcgacctcagatcagacg

SEQ ID NO: 51345 - RNA, 19 nt, Synthetic Construct
  source 1..19: mol_type = other RNA
cgcgacctcagatcagacg

SEQ ID NO: 51346 - RNA, 22 nt, Synthetic Construct
  source 1..22: mol_type = other RNA
tggagtgtggcaatggtgtttg

SEQ ID NO: 51347 - RNA, 19 nt, Synthetic Construct
  source 1..19: mol_type = other RNA
atctgctggaactgcaact

SEQ ID NO: 51348 - RNA, 19 nt, Synthetic Construct
  source 1..19: mol_type = other RNA
atctgctggaactgcaact

SEQ ID NO: 51349 - RNA, 18 nt, Synthetic Construct
  source 1..18: mol_type = other RNA
tcagtagctcgaggaaaa

SEQ ID NO: 51350 - RNA, 22 nt, Synthetic Construct
  source 1..22: mol_type = other RNA
tcccgtactgagctgccccgag

SEQ ID NO: 51351 - RNA, 22 nt, Synthetic Construct
  source 1..22: mol_type = other RNA
tcccgtactgagctgccccgag

SEQ ID NO: 51352 - RNA, 22 nt, Synthetic Construct
  source 1..22: mol_type = other RNA
ccccttggggttgtaggaccac

SEQ ID NO: 51353 - RNA, 22 nt, Synthetic Construct
  source 1..22: mol_type = other RNA
ccccttggggttgtaggaccac

SEQ ID NO: 51354 - RNA, 35 nt, Synthetic Construct; identical to SEQ ID NO: 2069
  source 1..35: mol_type = other RNA

SEQ ID NO: 51355 - RNA, 17 nt, Synthetic Construct
  source 1..17: mol_type = other RNA
cgactcttagcggtgga

SEQ ID NO: 51356 - RNA, 17 nt, Synthetic Construct
  source 1..17: mol_type = other RNA
cgactcttagcggtgga

SEQ ID NO: 51357 - RNA, 22 nt, Synthetic Construct
  source 1..22: mol_type = other RNA
tgaggtagtaggttgtgtggat

SEQ ID NO: 51358 - RNA, 28 nt, Synthetic Construct
  source 1..28: mol_type = other RNA
cccccccactgctaaatttgactggcta

SEQ ID NO: 51359 - RNA, 28 nt, Synthetic Construct
  source 1..28: mol_type = other RNA
cccccccactgctaaatttgactggcta

SEQ ID NO: 51360 - RNA, 19 nt, Synthetic Construct
  source 1..19: mol_type = other RNA
gctattgacgaccgtaccg

SEQ ID NO: 51361 - RNA, 19 nt, Synthetic Construct
  source 1..19: mol_type = other RNA
gctattgacgaccgtaccg

SEQ ID NO: 51362 - RNA, 21 nt, Synthetic Construct
  source 1..21: mol_type = other RNA
gctattgacgaccgtaccgca

SEQ ID NO: 51363 - RNA, 21 nt, Synthetic Construct
  source 1..21: mol_type = other RNA
gctattgacgaccgtaccgca

SEQ ID NO: 51364 - RNA, 17 nt, Synthetic Construct
  source 1..17: mol_type = other RNA
ctaatgagactgccggt

SEQ ID NO: 51365 - RNA, 17 nt, Synthetic Construct
  source 1..17: mol_type = other RNA
ctaatgagactgccggt

SEQ ID NO: 51366 - RNA, 36 nt, Synthetic Construct; identical to SEQ ID NO: 744
  source 1..36: mol_type = other RNA

SEQ ID NO: 51367 - RNA, 36 nt, Synthetic Construct; identical to SEQ ID NO: 744
  source 1..36: mol_type = other RNA

SEQ ID NO: 51368 - RNA, 32 nt, Synthetic Construct; identical to SEQ ID NO: 3092
  source 1..32: mol_type = other RNA

SEQ ID NO: 51369 - RNA, 19 nt, Synthetic Construct
  source 1..19: mol_type = other RNA
agtcgacgtatagggtgtg

SEQ ID NO: 51370 - RNA, 19 nt, Synthetic Construct
  source 1..19: mol_type = other RNA
agtcgacgtatagggtgtg

SEQ ID NO: 51371 - RNA, 23 nt, Synthetic Construct
  source 1..23: mol_type = other RNA
tcgaccggacctcgaccggctcg

SEQ ID NO: 51372 - RNA, 23 nt, Synthetic Construct
  source 1..23: mol_type = other RNA
tcgaccggacctcgaccggctcg

SEQ ID NO: 51373 - RNA, 22 nt, Synthetic Construct
  source 1..22: mol_type = other RNA
tgaggtagtagattgtatagta

SEQ ID NO: 51374 - RNA, 23 nt, Synthetic Construct
  source 1..23: mol_type = other RNA
caaagtgctgttcgtacaggtag

SEQ ID NO: 51375 - RNA, 23 nt, Synthetic Construct
  source 1..23: mol_type = other RNA
caaagtgctgttcgtacaggtag

SEQ ID NO: 51376 - RNA, 23 nt, Synthetic Construct
  source 1..23: mol_type = other RNA
tggtaatacgacgtacttaatgt

SEQ ID NO: 51377 - RNA, 23 nt, Synthetic Construct
  source 1..23: mol_type = other RNA
tggtaatacgacgtacttaatgt

SEQ ID NO: 51378 - RNA, 22 nt, Synthetic Construct
  source 1..22: mol_type = other RNA
tgaagtagtagtttgtgctgtt

SEQ ID NO: 51379 - RNA, 22 nt, Synthetic Construct
  source 1..22: mol_type = other RNA
tgaagtagtagtttgtgctgtt

SEQ ID NO: 51380 - RNA, 23 nt, Synthetic Construct
  source 1..23: mol_type = other RNA
tcctgtacagagctgccccgaga

SEQ ID NO: 51381 - RNA, 23 nt, Synthetic Construct
  source 1..23: mol_type = other RNA
tcctgtacagagctgccccgaga

SEQ ID NO: 51382 - RNA, 23 nt, Synthetic Construct
  source 1..23: mol_type = other RNA
caacggaatcccagaagcagctg

SEQ ID NO: 51383 - RNA, 24 nt, Synthetic Construct
  source 1..24: mol_type = other RNA
tcggatccgtctgagcttggcttt

SEQ ID NO: 51384 - RNA, 24 nt, Synthetic Construct
  source 1..24: mol_type = other RNA
tcggatccgtctgagcttggcttt

SEQ ID NO: 51385 - RNA, 23 nt, Synthetic Construct
  source 1..23: mol_type = other RNA
caacggagtcccaaaagcagctg

SEQ ID NO: 51386 - RNA, 23 nt, Synthetic Construct
  source 1..23: mol_type = other RNA
tggagagaaaggcagttcctgaa

SEQ ID NO: 51387 - RNA, 23 nt, Synthetic Construct
  source 1..23: mol_type = other RNA
tggagagaaaggcagttcctgaa

SEQ ID NO: 51388 - RNA, 22 nt, Synthetic Construct
  source 1..22: mol_type = other RNA
tgaggtagtaggatgtatagtt

SEQ ID NO: 51389 - RNA, 22 nt, Synthetic Construct
  source 1..22: mol_type = other RNA
tgaggtagtaggatgtatagtt

SEQ ID NO: 51390 - RNA, 21 nt, Synthetic Construct
  source 1..21: mol_type = other RNA
tggagtgtgacaatggtgctt

SEQ ID NO: 51391 - RNA, 19 nt, Synthetic Construct
  source 1..19: mol_type = other RNA
tgtcaactggttgttggga

SEQ ID NO: 51392 - RNA, 16 nt, Synthetic Construct
  source 1..16: mol_type = other RNA
tgcgtagatatgcgga

SEQ ID NO: 51393 - RNA, 16 nt, Synthetic Construct
  source 1..16: mol_type = other RNA
tgcgtagatatgcgga

SEQ ID NO: 51394 - RNA, 16 nt, Synthetic Construct
  source 1..16: mol_type = other RNA
gtctacggccacacca

SEQ ID NO: 51395 - RNA, 16 nt, Synthetic Construct
  source 1..16: mol_type = other RNA
gtctacggccacacca

SEQ ID NO: 51396 - RNA, 23 nt, Synthetic Construct
  source 1..23: mol_type = other RNA
tggcaatacgacgtacttagtgt

SEQ ID NO: 51397 - RNA, 22 nt, Synthetic Construct
  source 1..22: mol_type = other RNA
tagcagcacgtaaatactggcg

SEQ ID NO: 51398 - RNA, 16 nt, Synthetic Construct
  source 1..16: mol_type = other RNA
gggtgaaagcggggga

SEQ ID NO: 51399 - RNA, 16 nt, Synthetic Construct
  source 1..16: mol_type = other RNA
gggtgaaagcggggga

SEQ ID NO: 51400 - RNA, 17 nt, Synthetic Construct
  source 1..17: mol_type = other RNA
gggtctgtagctcagtc

SEQ ID NO: 51401 - RNA, 17 nt, Synthetic Construct
  source 1..17: mol_type = other RNA
gggtctgtagctcagtc

SEQ ID NO: 51402 - RNA, 24 nt, Synthetic Construct
  source 1..24: mol_type = other RNA
tgtgaacatccccgactggaagct

SEQ ID NO: 51403 - RNA, 24 nt, Synthetic Construct
  source 1..24: mol_type = other RNA
tgtgaacatccccgactggaagct

SEQ ID NO: 51404 - RNA, 31 nt, Synthetic Construct; identical to SEQ ID NO: 6001
  source 1..31: mol_type = other RNA

SEQ ID NO: 51405 - RNA, 31 nt, Synthetic Construct; identical to SEQ ID NO: 6001
  source 1..31: mol_type = other RNA

SEQ ID NO: 51406 - RNA, 18 nt, Synthetic Construct
  source 1..18: mol_type = other RNA
agtgacgcgcatgaatgg

SEQ ID NO: 51407 - RNA, 18 nt, Synthetic Construct
  source 1..18: mol_type = other RNA
agtgacgcgcatgaatgg

SEQ ID NO: 51408 - RNA, 17 nt, Synthetic Construct
  source 1..17: mol_type = other RNA
cagagacgagtcgacca

SEQ ID NO: 51409 - RNA, 17 nt, Synthetic Construct
  source 1..17: mol_type = other RNA
cagagacgagtcgacca

SEQ ID NO: 51410 - RNA, 22 nt, Synthetic Construct
  source 1..22: mol_type = other RNA
tgaggtagtgggttgtatagtt

SEQ ID NO: 51411 - RNA, 22 nt, Synthetic Construct
  source 1..22: mol_type = other RNA
tgaggtagtgggttgtatagtt

SEQ ID NO: 51412 - RNA, 16 nt, Synthetic Construct
  source 1..16: mol_type = other RNA
gccagcagccgcggta

SEQ ID NO: 51413 - RNA, 22 nt, Synthetic Construct
  source 1..22: mol_type = other RNA
tgaggtagtggtttgtgctgtt

SEQ ID NO: 51414 - RNA, 22 nt, Synthetic Construct
  source 1..22: mol_type = other RNA
tgaggtagtggtttgtgctgtt

SEQ ID NO: 51415 - RNA, 20 nt, Synthetic Construct
  source 1..20: mol_type = other RNA
cccagtaaacggcggccgta

SEQ ID NO: 51416 - RNA, 26 nt, Synthetic Construct
  source 1..26: mol_type = other RNA
aatgacacgatcactcccgttgagtt

SEQ ID NO: 51417 - RNA, 25 nt, Synthetic Construct
  source 1..25: mol_type = other RNA
gtgaggatatgagatcgagacgaca

SEQ ID NO: 51418 - RNA, 21 nt, Synthetic Construct
  source 1..21: mol_type = other RNA
tgaggtagtaggttgagtggt

SEQ ID NO: 51419 - RNA, 21 nt, Synthetic Construct
  source 1..21: mol_type = other RNA
tgaggtagtaggttgagtggt

SEQ ID NO: 51420 - RNA, 18 nt, Synthetic Construct
  source 1..18: mol_type = other RNA
gttcgattccggagaggg

SEQ ID NO: 51421 - RNA, 18 nt, Synthetic Construct
  source 1..18: mol_type = other RNA
gttcgattccggagaggg

SEQ ID NO: 51422 - RNA, 20 nt, Synthetic Construct
  source 1..20: mol_type = other RNA
ctgacctatgaattgacagc

SEQ ID NO: 51423 - RNA, 16 nt, Synthetic Construct
  source 1..16: mol_type = other RNA
gatttgggagtgctcg

SEQ ID NO: 51424 - RNA, 16 nt, Synthetic Construct
  source 1..16: mol_type = other RNA
gatttgggagtgctcg

SEQ ID NO: 51425 - RNA, 20 nt, Synthetic Construct
  source 1..20: mol_type = other RNA
gctattgacgaccgtaccgc

SEQ ID NO: 51426 - RNA, 20 nt, Synthetic Construct
  source 1..20: mol_type = other RNA
gctattgacgaccgtaccgc

SEQ ID NO: 51427 - RNA, 22 nt, Synthetic Construct
  source 1..22: mol_type = other RNA
tgaggtagtaggttgtgcggtt

SEQ ID NO: 51428 - RNA, 29 nt, Synthetic Construct
  source 1..29: mol_type = other RNA
gctaaacctagccccaaacccactccacc

SEQ ID NO: 51429 - RNA, 21 nt, Synthetic Construct
  source 1..21: mol_type = other RNA
cgtaccgtgagtaataatgca

SEQ ID NO: 51430 - RNA, 29 nt, Synthetic Construct
  source 1..29: mol_type = other RNA
gcattgtggttcagtggtagaattctcgc

SEQ ID NO: 51431 - RNA, 29 nt, Synthetic Construct
  source 1..29: mol_type = other RNA
gcattgtggttcagtggtagaattctcgc

SEQ ID NO: 51432 - RNA, 24 nt, Synthetic Construct
  source 1..24: mol_type = other RNA
tgtcagtttgtcaaataccccaat

SEQ ID NO: 51433 - RNA, 24 nt, Synthetic Construct
  source 1..24: mol_type = other RNA
tgtcagtttgtcaaataccccaat

SEQ ID NO: 51434 - RNA, 22 nt, Synthetic Construct
  source 1..22: mol_type = other RNA
tgaggtagcagattgtatagtt

SEQ ID NO: 51435 - RNA, 22 nt, Synthetic Construct
  source 1..22: mol_type = other RNA
tgaggtagcagattgtatagtt

SEQ ID NO: 51436 - RNA, 22 nt, Synthetic Construct
  source 1..22: mol_type = other RNA
tgaagtagtaggttgtgtggtt

SEQ ID NO: 51437 - RNA, 16 nt, Synthetic Construct
  source 1..16: mol_type = other RNA
gtctacagccatacca

SEQ ID NO: 51438 - RNA, 16 nt, Synthetic Construct
  source 1..16: mol_type = other RNA
gtctacagccatacca

SEQ ID NO: 51439 - RNA, 22 nt, Synthetic Construct
  source 1..22: mol_type = other RNA
cattgcacttgtctcggtccga

SEQ ID NO: 51440 - RNA, 22 nt, Synthetic Construct
  source 1..22: mol_type = other RNA
cattgcacttgtctcggtccga

SEQ ID NO: 51441 - RNA, 23 nt, Synthetic Construct
  source 1..23: mol_type = other RNA
cgaggggcagagagcgagacttt

SEQ ID NO: 51442 - RNA, 23 nt, Synthetic Construct
  source 1..23: mol_type = other RNA
cgaggggcagagagcgagacttt

SEQ ID NO: 51443 - RNA, 22 nt, Synthetic Construct
  source 1..22: mol_type = other RNA
tgaggtagtagattgtgtggtt

SEQ ID NO: 51444 - RNA, 21 nt, Synthetic Construct
  source 1..21: mol_type = other RNA
atcacattgccagggatttcc

SEQ ID NO: 51445 - RNA, 21 nt, Synthetic Construct
  source 1..21: mol_type = other RNA
atcacattgccagggatttcc

SEQ ID NO: 51446 - RNA, 24 nt, Synthetic Construct
  source 1..24: mol_type = other RNA
ttccccttggggttgtaggaccac

SEQ ID NO: 51447 - RNA, 24 nt, Synthetic Construct
  source 1..24: mol_type = other RNA
ttccccttggggttgtaggaccac

SEQ ID NO: 51448 - RNA, 27 nt, Synthetic Construct
  source 1..27: mol_type = other RNA
ccccccactgctaaatttggctggcta

SEQ ID NO: 51449 - RNA, 31 nt, Synthetic Construct; identical to SEQ ID NO: 2423
  source 1..31: mol_type = other RNA

SEQ ID NO: 51450 - RNA, 31 nt, Synthetic Construct; identical to SEQ ID NO: 2423
  source 1..31: mol_type = other RNA

SEQ ID NO: 51451 - RNA, 20 nt, Synthetic Construct
  source 1..20: mol_type = other RNA
tgaagtagtaggttgtgtgg

SEQ ID NO: 51452 - RNA, 25 nt, Synthetic Construct
  source 1..25: mol_type = other RNA
tcgggcctggttagtacttggatgg

SEQ ID NO: 51453 - RNA, 37 nt, Synthetic Construct; identical to SEQ ID NO: 2447
  source 1..37: mol_type = other RNA

SEQ ID NO: 51454 - RNA, 28 nt, Synthetic Construct
  source 1..28: mol_type = other RNA
tccctgtggtctagtggttaggattcgg

SEQ ID NO: 51455 - RNA, 28 nt, Synthetic Construct
  source 1..28: mol_type = other RNA
tccctgtggtctagtggttaggattcgg

SEQ ID NO: 51456 - RNA, 27 nt, Synthetic Construct
  source 1..27: mol_type = other RNA
ccccccacagctaaatttgactggcta

SEQ ID NO: 51457 - RNA, 27 nt, Synthetic Construct
  source 1..27: mol_type = other RNA
ccccccacagctaaatttgactggcta

SEQ ID NO: 51458 - RNA, 31 nt, Synthetic Construct; identical to SEQ ID NO: 4881
  source 1..31: mol_type = other RNA

SEQ ID NO: 51459 - RNA, 31 nt, Synthetic Construct; identical to SEQ ID NO: 4881
  source 1..31: mol_type = other RNA

SEQ ID NO: 51460 - RNA, 23 nt, Synthetic Construct
  source 1..23: mol_type = other RNA
tcccgtactgagctgccccgaga

SEQ ID NO: 51461 - RNA, 23 nt, Synthetic Construct
  source 1..23: mol_type = other RNA
tcccgtactgagctgccccgaga

SEQ ID NO: 51462 - RNA, 35 nt, Synthetic Construct; identical to SEQ ID NO: 2450
  source 1..35: mol_type = other RNA

SEQ ID NO: 51463 - RNA, 35 nt, Synthetic Construct; identical to SEQ ID NO: 2450
  source 1..35: mol_type = other RNA

SEQ ID NO: 51464 - RNA, 21 nt, Synthetic Construct
  source 1..21: mol_type = other RNA
tcctatactgagctgccccga

SEQ ID NO: 51465 - RNA, 21 nt, Synthetic Construct
  source 1..21: mol_type = other RNA
tcctatactgagctgccccga

SEQ ID NO: 51466 - RNA, 23 nt, Synthetic Construct
  source 1..23: mol_type = other RNA
agctcggtctgaggcccctcagt

SEQ ID NO: 51467 - RNA, 23 nt, Synthetic Construct
  source 1..23: mol_type = other RNA
agctcggtctgaggcccctcagt

SEQ ID NO: 51468 - RNA, 27 nt, Synthetic Construct
  source 1..27: mol_type = other RNA
ccccccactgctgaatttgactggctt

SEQ ID NO: 51469 - RNA, 27 nt, Synthetic Construct
  source 1..27: mol_type = other RNA
ccccccactgctgaatttgactggctt

SEQ ID NO: 51470 - RNA, 34 nt, Synthetic Construct; identical to SEQ ID NO: 2375
  source 1..34: mol_type = other RNA

SEQ ID NO: 51471 - RNA, 16 nt, Synthetic Construct
  source 1..16: mol_type = other RNA
acggcgggagtaacta

SEQ ID NO: 51472 - RNA, 16 nt, Synthetic Construct
  source 1..16: mol_type = other RNA
acggcgggagtaacta

SEQ ID NO: 51473 - RNA, 32 nt, Synthetic Construct; identical to SEQ ID NO: 1238
  source 1..32: mol_type = other RNA

SEQ ID NO: 51474 - RNA, 32 nt, Synthetic Construct; identical to SEQ ID NO: 1238
  source 1..32: mol_type = other RNA

SEQ ID NO: 51475 - RNA, 23 nt, Synthetic Construct
  source 1..23: mol_type = other RNA
tgaggggcagagagcgagactta

SEQ ID NO: 51476 - RNA, 28 nt, Synthetic Construct
  source 1..28: mol_type = other RNA
gcatgggtggttcagtggtagaattctc

SEQ ID NO: 51477 - RNA, 28 nt, Synthetic Construct
  source 1..28: mol_type = other RNA
gcatgggtggttcagtggtagaattctc

SEQ ID NO: 51478 - RNA, 22 nt, Synthetic Construct
  source 1..22: mol_type = other RNA
tgagaactgaattccataggct

SEQ ID NO: 51479 - RNA, 22 nt, Synthetic Construct
  source 1..22: mol_type = other RNA
tgagaactgaattccataggct

SEQ ID NO: 51480 - RNA, 22 nt, Synthetic Construct
  source 1..22: mol_type = other RNA
tcgtaccgtgggtaataatgcg

SEQ ID NO: 51481 - RNA, 22 nt, Synthetic Construct
  source 1..22: mol_type = other RNA
tcgtaccgtgggtaataatgcg

SEQ ID NO: 51482 - RNA, 21 nt, Synthetic Construct
  source 1..21: mol_type = other RNA
taactccttaagcgaatctcg

SEQ ID NO: 51483 - RNA, 21 nt, Synthetic Construct
  source 1..21: mol_type = other RNA
taactccttaagcgaatctcg

SEQ ID NO: 51484 - RNA, 22 nt, Synthetic Construct
  source 1..22: mol_type = other RNA
tggggtagtagattgtatagtt

SEQ ID NO: 51485 - RNA, 22 nt, Synthetic Construct
  source 1..22: mol_type = other RNA
tggggtagtagattgtatagtt

SEQ ID NO: 51486 - RNA, 23 nt, Synthetic Construct
  source 1..23: mol_type = other RNA
caaagagctgttcgtgcaggtag

SEQ ID NO: 51487 - RNA, 23 nt, Synthetic Construct
  source 1..23: mol_type = other RNA
caaagagctgttcgtgcaggtag

SEQ ID NO: 51488 - RNA, 32 nt, Synthetic Construct; identical to SEQ ID NO: 8270
  source 1..32: mol_type = other RNA

SEQ ID NO: 51489 - RNA, 32 nt, Synthetic Construct; identical to SEQ ID NO: 8270
  source 1..32: mol_type = other RNA

SEQ ID NO: 51490 - RNA, 17 nt, Synthetic Construct
  source 1..17: mol_type = other RNA
cagagacgagtcgacca

SEQ ID NO: 51491 - RNA, 22 nt, Synthetic Construct
  source 1..22: mol_type = other RNA
tcagcgccgatgatagtgcgga

SEQ ID NO: 51492 - RNA, 24 nt, Synthetic Construct
  source 1..24: mol_type = other RNA
tcggatccgtctgagcttggcttt

SEQ ID NO: 51493 - RNA, 24 nt, Synthetic Construct
  source 1..24: mol_type = other RNA
tcggatccgtctgagcttggcttt

SEQ ID NO: 51494 - RNA, 23 nt, Synthetic Construct
  source 1..23: mol_type = other RNA
ggctacattgtctgctgggtttc

SEQ ID NO: 51495 - RNA, 23 nt, Synthetic Construct
  source 1..23: mol_type = other RNA
ggctacattgtctgctgggtttc

SEQ ID NO: 51496 - RNA, 21 nt, Synthetic Construct
  source 1..21: mol_type = other RNA
ttcacagtggctaagttctga

SEQ ID NO: 51497 - RNA, 22 nt, Synthetic Construct
  source 1..22: mol_type = other RNA
ctgggtcggtcgggctggggcg

SEQ ID NO: 51498 - RNA, 22 nt, Synthetic Construct
  source 1..22: mol_type = other RNA
ctgggtcggtcgggctggggcg

SEQ ID NO: 51499 - RNA, 22 nt, Synthetic Construct
  source 1..22: mol_type = other RNA
aggttccggataagtaagagcc

SEQ ID NO: 51500 - RNA, 22 nt, Synthetic Construct
  source 1..22: mol_type = other RNA
aggttccggataagtaagagcc

SEQ ID NO: 51501 - RNA, 23 nt, Synthetic Construct
  source 1..23: mol_type = other RNA
tctttggttatctagctgtatgt

SEQ ID NO: 51502 - RNA, 23 nt, Synthetic Construct
  source 1..23: mol_type = other RNA
tctttggttatctagctgtatgt

SEQ ID NO: 51503 - RNA, 23 nt, Synthetic Construct
  source 1..23: mol_type = other RNA
tgaggtggtaggttgtgtggttt

SEQ ID NO: 51504 - RNA, 16 nt, Synthetic Construct
  source 1..16: mol_type = other RNA
cccagaaacccggtcg

SEQ ID NO: 51505 - RNA, 22 nt, Synthetic Construct
  source 1..22: mol_type = other RNA
tgaggtagtagtttgtgatgtt

SEQ ID NO: 51506 - RNA, 22 nt, Synthetic Construct
  source 1..22: mol_type = other RNA
tgaggtagtagtttgtgatgtt

SEQ ID NO: 51507 - RNA, 23 nt, Synthetic Construct
  source 1..23: mol_type = other RNA
caaagtgctgtttgtgcaggtag

SEQ ID NO: 51508 - RNA, 23 nt, Synthetic Construct
  source 1..23: mol_type = other RNA
caaagtgctgtttgtgcaggtag

SEQ ID NO: 51509 - RNA, 22 nt, Synthetic Construct
  source 1..22: mol_type = other RNA
tcgaaccgtgagtaataatgcg

SEQ ID NO: 51510 - RNA, 23 nt, Synthetic Construct
  source 1..23: mol_type = other RNA
caaagtgctgttcgtgcaggtgg

SEQ ID NO: 51511 - RNA, 18 nt, Synthetic Construct
  source 1..18: mol_type = other RNA
gcgaaattccttgtcggg

SEQ ID NO: 51512 - RNA, 32 nt, Synthetic Construct; identical to SEQ ID NO: 4509
  source 1..32: mol_type = other RNA

SEQ ID NO: 51513 - RNA, 32 nt, Synthetic Construct; identical to SEQ ID NO: 4509
  source 1..32: mol_type = other RNA

SEQ ID NO: 51514 - RNA, 20 nt, Synthetic Construct
  source 1..20: mol_type = other RNA
tggtagactatggaacgtag

SEQ ID NO: 51515 - RNA, 21 nt, Synthetic Construct
  source 1..21: mol_type = other RNA
tgaggtagtaggctgtgtggt

SEQ ID NO: 51516 - RNA, 21 nt, Synthetic Construct
  source 1..21: mol_type = other RNA
tgaggtagtaggctgtgtggt

SEQ ID NO: 51517 - RNA, 23 nt, Synthetic Construct
  source 1..23: mol_type = other RNA
ccctgtactgagctgccccgagt

SEQ ID NO: 51518 - RNA, 22 nt, Synthetic Construct
  source 1..22: mol_type = other RNA
tattgcacttgccccggcctgt

SEQ ID NO: 51519 - RNA, 22 nt, Synthetic Construct
  source 1..22: mol_type = other RNA
tattgcacttgccccggcctgt

SEQ ID NO: 51520 - RNA, 23 nt, Synthetic Construct
  source 1..23: mol_type = other RNA
tgaggggcagagagcgagacctt

SEQ ID NO: 51521 - RNA, 24 nt, Synthetic Construct
  source 1..24: mol_type = other RNA
tgaaaacatccccgactggaagct

SEQ ID NO: 51522 - RNA, 22 nt, Synthetic Construct
  source 1..22: mol_type = other RNA
tgaggtagtaggtcgtgtggtt

SEQ ID NO: 51523 - RNA, 22 nt, Synthetic Construct
  source 1..22: mol_type = other RNA
tgaggtagtaggtcgtgtggtt

SEQ ID NO: 51524 - RNA, 19 nt, Synthetic Construct
  source 1..19: mol_type = other RNA
tagcaccatctgaaatcgg

SEQ ID NO: 51525 - RNA, 23 nt, Synthetic Construct
  source 1..23: mol_type = other RNA
tgtagtgtttcctactttatgga

SEQ ID NO: 51526 - RNA, 21 nt, Synthetic Construct
  source 1..21: mol_type = other RNA
agagtaggacgttgccaggtt

SEQ ID NO: 51527 - RNA, 21 nt, Synthetic Construct
  source 1..21: mol_type = other RNA
agagtaggacgttgccaggtt

SEQ ID NO: 51528 - RNA, 22 nt, Synthetic Construct
  source 1..22: mol_type = other RNA
tgaggtagtaggttgtgtagtt

SEQ ID NO: 51529 - RNA, 22 nt, Synthetic Construct
  source 1..22: mol_type = other RNA
tgaggtagtaggttgtgtagtt

SEQ ID NO: 51530 - RNA, 21 nt, Synthetic Construct
  source 1..21: mol_type = other RNA
tcccgtactgagctgccccga

SEQ ID NO: 51531 - RNA, 21 nt, Synthetic Construct
  source 1..21: mol_type = other RNA
ttcaagtaattcaggataggt

SEQ ID NO: 51532 - RNA, 21 nt, Synthetic Construct
  source 1..21: mol_type = other RNA
ttcaagtaattcaggataggt

SEQ ID NO: 51533 - RNA, 20 nt, Synthetic Construct
  source 1..20: mol_type = other RNA
tgaggtagtaggttgtataa

SEQ ID NO: 51534 - RNA, 23 nt, Synthetic Construct
  source 1..23: mol_type = other RNA
caaagtgctgttcgtgcaggtgg

SEQ ID NO: 51535 - RNA, 23 nt, Synthetic Construct
  source 1..23: mol_type = other RNA
gtaaacatccttgactggaagct

SEQ ID NO: 51536 - RNA, 16 nt, Synthetic Construct
  source 1..16: mol_type = other RNA
gcggctgtagctcagt

SEQ ID NO: 51537 - RNA, 16 nt, Synthetic Construct
  source 1..16: mol_type = other RNA
gcggctgtagctcagt

SEQ ID NO: 51538 - RNA, 21 nt, Synthetic Construct
  source 1..21: mol_type = other RNA
cattattacttttggtacgcg

SEQ ID NO: 51539 - RNA, 21 nt, Synthetic Construct
  source 1..21: mol_type = other RNA
tggagtgtgacaatggtgctt

SEQ ID NO: 51540 - RNA, 35 nt, Synthetic Construct; identical to SEQ ID NO: 2354
  source 1..35: mol_type = other RNA

SEQ ID NO: 51541 - RNA, 35 nt, Synthetic Construct; identical to SEQ ID NO: 2354
  source 1..35: mol_type = other RNA

SEQ ID NO: 51542 - RNA, 33 nt, Synthetic Construct; identical to SEQ ID NO: 4947
  source 1..33: mol_type = other RNA

SEQ ID NO: 51543 - RNA, 35 nt, Synthetic Construct; identical to SEQ ID NO: 2069
  source 1..35: mol_type = other RNA

SEQ ID NO: 51544 - RNA, 35 nt, Synthetic Construct; identical to SEQ ID NO: 2069
  source 1..35: mol_type = other RNA

SEQ ID NO: 51545 - RNA, 19 nt, Synthetic Construct
  source 1..19: mol_type = other RNA
gggtgcaagcgttaatcgg

SEQ ID NO: 51546 - RNA, 19 nt, Synthetic Construct
  source 1..19: mol_type = other RNA
agcgaaattccttgtcggg

SEQ ID NO: 51547 - RNA, 19 nt, Synthetic Construct
  source 1..19: mol_type = other RNA
agcgaaattccttgtcggg

SEQ ID NO: 51548 - RNA, 22 nt, Synthetic Construct
  source 1..22: mol_type = other RNA
cgaggtagtaggttgtgtggtt

SEQ ID NO: 51549 - RNA, 22 nt, Synthetic Construct
  source 1..22: mol_type = other RNA
cgaggtagtaggttgtgtggtt

SEQ ID NO: 51550 - RNA, 22 nt, Synthetic Construct
  source 1..22: mol_type = other RNA
tattgcacttgccccggcctgt

SEQ ID NO: 51551 - RNA, 22 nt, Synthetic Construct
  source 1..22: mol_type = other RNA
tattgcacttgccccggcctgt

SEQ ID NO: 51552 - RNA, 22 nt, Synthetic Construct
  source 1..22: mol_type = other RNA
tattgcacctgtcccggcctgt

SEQ ID NO: 51553 - RNA, 29 nt, Synthetic Construct
  source 1..29: mol_type = other RNA
cccgtgtgaaagtaggtcatcgtcaggct

SEQ ID NO: 51554 - RNA, 29 nt, Synthetic Construct
  source 1..29: mol_type = other RNA
cccgtgtgaaagtaggtcatcgtcaggct

SEQ ID NO: 51555 - RNA, 24 nt, Synthetic Construct
  source 1..24: mol_type = other RNA
tcctgtactgagctgccccgagat

SEQ ID NO: 51556 - RNA, 22 nt, Synthetic Construct
  source 1..22: mol_type = other RNA
tcaagagcaataacgaaaaatg

SEQ ID NO: 51557 - RNA, 22 nt, Synthetic Construct
  source 1..22: mol_type = other RNA
tcaagagcaataacgaaaaatg

SEQ ID NO: 51558 - RNA, 22 nt, Synthetic Construct
  source 1..22: mol_type = other RNA
tgaggtagtaggttgtatagtc

SEQ ID NO: 51559 - RNA, 34 nt, Synthetic Construct; identical to SEQ ID NO: 2298
  source 1..34: mol_type = other RNA

SEQ ID NO: 51560 - RNA, 19 nt, Synthetic Construct
  source 1..19: mol_type = other RNA
acatgcaagtcgaacggta

SEQ ID NO: 51561 - RNA, 22 nt, Synthetic Construct
  source 1..22: mol_type = other RNA
tgaggtagtaggttgtgcggtt

SEQ ID NO: 51562 - RNA, 22 nt, Synthetic Construct
  source 1..22: mol_type = other RNA
tgaggtagtaggttgtgcggtt

SEQ ID NO: 51563 - RNA, 20 nt, Synthetic Construct
  source 1..20: mol_type = other RNA
tgtcagtttgtcaaataccc

SEQ ID NO: 51564 - RNA, 27 nt, Synthetic Construct
  source 1..27: mol_type = other RNA
ccccctactgctaaatttgactggctt

SEQ ID NO: 51565 - RNA, 27 nt, Synthetic Construct
  source 1..27: mol_type = other RNA
ccccctactgctaaatttgactggctt

SEQ ID NO: 51566 - RNA, 18 nt, Synthetic Construct
  source 1..18: mol_type = other RNA
tcttcggtagtatagtgg

SEQ ID NO: 51567 - RNA, 18 nt, Synthetic Construct
  source 1..18: mol_type = other RNA
tcttcggtagtatagtgg

SEQ ID NO: 51568 - RNA, 16 nt, Synthetic Construct
  source 1..16: mol_type = other RNA
accgcttttgtcaggg

SEQ ID NO: 51569 - RNA, 16 nt, Synthetic Construct
  source 1..16: mol_type = other RNA
accgcttttgtcaggg

SEQ ID NO: 51570 - RNA, 22 nt, Synthetic Construct
  source 1..22: mol_type = other RNA
tgagaactgaattccatgggtc

SEQ ID NO: 51571 - RNA, 23 nt, Synthetic Construct
  source 1..23: mol_type = other RNA
tggtaataagacgtacttagtgt

SEQ ID NO: 51572 - RNA, 23 nt, Synthetic Construct
  source 1..23: mol_type = other RNA
acagtagtctgcacattggttaa

SEQ ID NO: 51573 - RNA, 23 nt, Synthetic Construct
  source 1..23: mol_type = other RNA
tggtaatacgacgtgcttagtgt

SEQ ID NO: 51574 - RNA, 21 nt, Synthetic Construct
  source 1..21: mol_type = other RNA
tgaagtagtaggttgtatagt

SEQ ID NO: 51575 - RNA, 21 nt, Synthetic Construct
  source 1..21: mol_type = other RNA
tgaagtagtaggttgtatagt

SEQ ID NO: 51576 - RNA, 18 nt, Synthetic Construct
  source 1..18: mol_type = other RNA
tccgacatgcgagggttc

SEQ ID NO: 51577 - RNA, 18 nt, Synthetic Construct
  source 1..18: mol_type = other RNA
tccgacatgcgagggttc

SEQ ID NO: 51578 - RNA, 22 nt, Synthetic Construct
  source 1..22: mol_type = other RNA
tctttgttcgattccgttgagt

SEQ ID NO: 51579 - RNA, 21 nt, Synthetic Construct
  source 1..21: mol_type = other RNA
tggctcagttcagcaggaaca

SEQ ID NO: 51580 - RNA, 21 nt, Synthetic Construct
  source 1..21: mol_type = other RNA
tggctcagttcagcaggaaca

SEQ ID NO: 51581 - RNA, 22 nt, Synthetic Construct
  source 1..22: mol_type = other RNA
tgaggactgaattccatgggtt

SEQ ID NO: 51582 - RNA, 22 nt, Synthetic Construct
  source 1..22: mol_type = other RNA
tgaggactgaattccatgggtt

SEQ ID NO: 51583 - RNA, 22 nt, Synthetic Construct
  source 1..22: mol_type = other RNA
tattgcacctgtcccggcctgt

SEQ ID NO: 51584 - RNA, 22 nt, Synthetic Construct
  source 1..22: mol_type = other RNA
tattgcacctgtcccggcctgt

SEQ ID NO: 51585 - RNA, 22 nt, Synthetic Construct
  source 1..22: mol_type = other RNA
tgaggtagtgggttgtgtggtt

SEQ ID NO: 51586 - RNA, 22 nt, Synthetic Construct
  source 1..22: mol_type = other RNA
tgaggtagtgggttgtgtggtt

SEQ ID NO: 51587 - RNA, 21 nt, Synthetic Construct
  source 1..21: mol_type = other RNA
tgaggtagtagactgtatagt

SEQ ID NO: 51588 - RNA, 21 nt, Synthetic Construct
  source 1..21: mol_type = other RNA
tgaggtagtagactgtatagt

SEQ ID NO: 51589 - RNA, 22 nt, Synthetic Construct
  source 1..22: mol_type = other RNA
tgaggtggtaggttgtgtggtt

SEQ ID NO: 51590 - RNA, 29 nt, Synthetic Construct
  source 1..29: mol_type = other RNA
cgcgacctcagatcagacgtggcgacccg

SEQ ID NO: 51591 - RNA, 29 nt, Synthetic Construct
  source 1..29: mol_type = other RNA
cgcgacctcagatcagacgtggcgacccg

SEQ ID NO: 51592 - RNA, 18 nt, Synthetic Construct
  source 1..18: mol_type = other RNA
ccagtaaacggcggccgt

SEQ ID NO: 51593 - RNA, 15 nt, Synthetic Construct
  source 1..15: mol_type = other RNA
gagagcctggacaca

SEQ ID NO: 51594 - RNA, 15 nt, Synthetic Construct
  source 1..15: mol_type = other RNA
gagagcctggacaca

SEQ ID NO: 51595 - RNA, 20 nt, Synthetic Construct
  source 1..20: mol_type = other RNA
tggggtagtaggttgtatag

SEQ ID NO: 51596 - RNA, 20 nt, Synthetic Construct
  source 1..20: mol_type = other RNA
tggggtagtaggttgtatag

SEQ ID NO: 51597 - RNA, 34 nt, Synthetic Construct; identical to SEQ ID NO: 6594
  source 1..34: mol_type = other RNA

SEQ ID NO: 51598 - RNA, 34 nt, Synthetic Construct; identical to SEQ ID NO: 6594
  source 1..34: mol_type = other RNA

SEQ ID NO: 51599 - RNA, 19 nt, Synthetic Construct
  source 1..19: mol_type = other RNA
ggctggtccgaaggtagtg

SEQ ID NO: 51600 - RNA, 19 nt, Synthetic Construct
  source 1..19: mol_type = other RNA
ggctggtccgaaggtagtg

SEQ ID NO: 51601 - RNA, 15 nt, Synthetic Construct
  source 1..15: mol_type = other RNA
cggcccagactccta

SEQ ID NO: 51602 - RNA, 23 nt, Synthetic Construct
  source 1..23: mol_type = other RNA
ccctgtactgagctgccccgagt

SEQ ID NO: 51603 - RNA, 23 nt, Synthetic Construct
  source 1..23: mol_type = other RNA
ccctgtactgagctgccccgagt

SEQ ID NO: 51604 - RNA, 21 nt, Synthetic Construct
  source 1..21: mol_type = other RNA
cgtaccgtgggtaataatgcg

SEQ ID NO: 51605 - RNA, 21 nt, Synthetic Construct
  source 1..21: mol_type = other RNA
tcctgtactgagctgcccgag

SEQ ID NO: 51606 - RNA, 21 nt, Synthetic Construct
  source 1..21: mol_type = other RNA
tcctgtactgagctgcccgag

SEQ ID NO: 51607 - RNA, 17 nt, Synthetic Construct
  source 1..17: mol_type = other RNA
tcagtagctcgaggaaa

SEQ ID NO: 51608 - RNA, 23 nt, Synthetic Construct
  source 1..23: mol_type = other RNA
tcggaatcgctagtaatcgcgga

SEQ ID NO: 51609 - RNA, 22 nt, Synthetic Construct
  source 1..22: mol_type = other RNA
tgaggtagtaggttgtatggtt

SEQ ID NO: 51610 - RNA, 22 nt, Synthetic Construct
  source 1..22: mol_type = other RNA
tgaggtagtaggttgtatggtt

SEQ ID NO: 51611 - RNA, 22 nt, Synthetic Construct
  source 1..22: mol_type = other RNA
tgaggtagtaggtcgtatagtt

SEQ ID NO: 51612 - RNA, 22 nt, Synthetic Construct
  source 1..22: mol_type = other RNA
tgaggtagtaggtcgtatagtt

SEQ ID NO: 51613 - RNA, 30 nt, Synthetic Construct; identical to SEQ ID NO: 11302
  source 1..30: mol_type = other RNA

SEQ ID NO: 51614 - RNA, 23 nt, Synthetic Construct
  source 1..23: mol_type = other RNA
tcccgtactgagctgccccgaga

SEQ ID NO: 51615 - RNA, 23 nt, Synthetic Construct
  source 1..23: mol_type = other RNA
tcccgtactgagctgccccgaga

SEQ ID NO: 51616 - RNA, 18 nt, Synthetic Construct
  source 1..18: mol_type = other RNA
agcaggacggtggccatg

SEQ ID NO: 51617 - RNA, 23 nt, Synthetic Construct
  source 1..23: mol_type = other RNA
tggtaatacgacgtacttggtgt

SEQ ID NO: 51618 - RNA, 36 nt, Synthetic Construct; identical to SEQ ID NO: 2248
  source 1..36: mol_type = other RNA

SEQ ID NO: 51619 - RNA, 36 nt, Synthetic Construct; identical to SEQ ID NO: 2248
  source 1..36: mol_type = other RNA

SEQ ID NO: 51620 - RNA, 18 nt, Synthetic Construct
  source 1..18: mol_type = other RNA
ggtagcgtggccgagtgg

SEQ ID NO: 51621 - RNA, 23 nt, Synthetic Construct
  source 1..23: mol_type = other RNA
tagcagcacgtaaatattggcgt

SEQ ID NO: 51622 - RNA, 20 nt, Synthetic Construct
  source 1..20: mol_type = other RNA
tggggtagtaggttgtatag

SEQ ID NO: 51623 - RNA, 20 nt, Synthetic Construct
  source 1..20: mol_type = other RNA
tggggtagtaggttgtatag

SEQ ID NO: 51624 - RNA, 23 nt, Synthetic Construct
  source 1..23: mol_type = other RNA
tgaggtagtagtttgtgctgttc

SEQ ID NO: 51625 - RNA, 21 nt, Synthetic Construct
  source 1..21: mol_type = other RNA
tgaggggcagagggcgagact

SEQ ID NO: 51626 - RNA, 21 nt, Synthetic Construct
  source 1..21: mol_type = other RNA
tgaggggcagagggcgagact

SEQ ID NO: 51627 - RNA, 22 nt, Synthetic Construct
  source 1..22: mol_type = other RNA
tcctatactgagctgccccgag

SEQ ID NO: 51628 - RNA, 27 nt, Synthetic Construct
  source 1..27: mol_type = other RNA
tcggctgttaaccgaaaggttggtggt

SEQ ID NO: 51629 - RNA, 23 nt, Synthetic Construct
  source 1..23: mol_type = other RNA
tcctgtactgagctgtcccgaga

SEQ ID NO: 51630 - RNA, 23 nt, Synthetic Construct
  source 1..23: mol_type = other RNA
tcctgtactgagctgtcccgaga

SEQ ID NO: 51631 - RNA, 18 nt, Synthetic Construct
  source 1..18: mol_type = other RNA
cgccgatgatagtgcgga

SEQ ID NO: 51632 - RNA, 23 nt, Synthetic Construct
  source 1..23: mol_type = other RNA
caaagtgctgttcgtgcaggtgg

SEQ ID NO: 51633 - RNA, 23 nt, Synthetic Construct
  source 1..23: mol_type = other RNA
caaagtgctgttcgtgcaggtgg

SEQ ID NO: 51634 - RNA, 20 nt, Synthetic Construct
  source 1..20: mol_type = other RNA
tcagtagctcgaggaaaaga

SEQ ID NO: 51635 - RNA, 21 nt, Synthetic Construct
  source 1..21: mol_type = other RNA
cgaggtagtagtttgtgctgt

SEQ ID NO: 51636 - RNA, 21 nt, Synthetic Construct
  source 1..21: mol_type = other RNA
cgaggtagtagtttgtgctgt

SEQ ID NO: 51637 - RNA, 23 nt, Synthetic Construct
  source 1..23: mol_type = other RNA
tggtaatacgacgtactttgtgt

SEQ ID NO: 51638 - RNA, 25 nt, Synthetic Construct
  source 1..25: mol_type = other RNA
ttgaggatatgagatcgaggcgaca

SEQ ID NO: 51639 - RNA, 25 nt, Synthetic Construct
  source 1..25: mol_type = other RNA
ttgaggatatgagatcgaggcgaca

SEQ ID NO: 51640 - RNA, 21 nt, Synthetic Construct
  source 1..21: mol_type = other RNA
tgtcagtttgtcaaatacccc

SEQ ID NO: 51641 - RNA, 21 nt, Synthetic Construct
  source 1..21: mol_type = other RNA
tgtcagtttgtcaaatacccc

SEQ ID NO: 51642 - RNA, 24 nt, Synthetic Construct
  source 1..24: mol_type = other RNA
agcagcattgtacagggctatgat

SEQ ID NO: 51643 - RNA, 24 nt, Synthetic Construct
  source 1..24: mol_type = other RNA
agcagcattgtacagggctatgat

SEQ ID NO: 51644 - RNA, 22 nt, Synthetic Construct
  source 1..22: mol_type = other RNA
tgaggtagtaggttgtgtggtc

SEQ ID NO: 51645 - RNA, 22 nt, Synthetic Construct
  source 1..22: mol_type = other RNA
tgaggtagtaggttgtgtggtc

SEQ ID NO: 51646 - RNA, 22 nt, Synthetic Construct
  source 1..22: mol_type = other RNA
tcctgtactgagctgctccgag

SEQ ID NO: 51647 - RNA, 22 nt, Synthetic Construct
  source 1..22: mol_type = other RNA
tcctgtactgagctgctccgag

SEQ ID NO: 51648 - RNA, 28 nt, Synthetic Construct
  source 1..28: mol_type = other RNA
tgttggttcaagcgtgtagtcgtgctct

SEQ ID NO: 51649 - RNA, 20 nt, Synthetic Construct
  source 1..20: mol_type = other RNA
caggacagtgaaacgagtca

SEQ ID NO: 51650 - RNA, 21 nt, Synthetic Construct
  source 1..21: mol_type = other RNA
atcggaacgtgcccagtcgtg

SEQ ID NO: 51651 - RNA, 21 nt, Synthetic Construct
  source 1..21: mol_type = other RNA
atcggaacgtgcccagtcgtg

SEQ ID NO: 51652 - RNA, 16 nt, Synthetic Construct
  source 1..16: mol_type = other RNA
acggcccagactccta

SEQ ID NO: 51653 - RNA, 20 nt, Synthetic Construct
  source 1..20: mol_type = other RNA
cccttggggttgtaggacca

SEQ ID NO: 51654 - RNA, 20 nt, Synthetic Construct
  source 1..20: mol_type = other RNA
cccttggggttgtaggacca

SEQ ID NO: 51655 - RNA, 22 nt, Synthetic Construct
  source 1..22: mol_type = other RNA
tattgcacttgccccggcctgt

SEQ ID NO: 51656 - RNA, 23 nt, Synthetic Construct
  source 1..23: mol_type = other RNA
ggatatcatcatatactgtaagt

SEQ ID NO: 51657 - RNA, 21 nt, Synthetic Construct
  source 1..21: mol_type = other RNA
tgaggtagaaggttgtatagt

SEQ ID NO: 51658 - RNA, 21 nt, Synthetic Construct
  source 1..21: mol_type = other RNA
tgaggggcagagagcgaggct

SEQ ID NO: 51659 - RNA, 21 nt, Synthetic Construct
  source 1..21: mol_type = other RNA
tcccagtaaacggcggccgta

SEQ ID NO: 51660 - RNA, 20 nt, Synthetic Construct
  source 1..20: mol_type = other RNA
caatggccgggacagagggc

SEQ ID NO: 51661 - RNA, 27 nt, Synthetic Construct
  source 1..27: mol_type = other RNA
ccccccgctgctaaatttgactggctt

SEQ ID NO: 51662 - RNA, 27 nt, Synthetic Construct
  source 1..27: mol_type = other RNA
ccccccgctgctaaatttgactggctt

SEQ ID NO: 51663 - RNA, 23 nt, Synthetic Construct
  source 1..23: mol_type = other RNA
tggtaatacgacgtacttagcgt

SEQ ID NO: 51664 - RNA, 23 nt, Synthetic Construct
  source 1..23: mol_type = other RNA
gcgtggtaggagagcgttctgta

SEQ ID NO: 51665 - RNA, 23 nt, Synthetic Construct
  source 1..23: mol_type = other RNA
gcgtggtaggagagcgttctgta

SEQ ID NO: 51666 - RNA, 23 nt, Synthetic Construct
  source 1..23: mol_type = other RNA
tcctgtgctgagctgccccgaga

SEQ ID NO: 51667 - RNA, 20 nt, Synthetic Construct
  source 1..20: mol_type = other RNA
tgaggtggtaggttgtgtgg

SEQ ID NO: 51668 - RNA, 27 nt, Synthetic Construct
  source 1..27: mol_type = other RNA
ccccccactgctaaatttggctggcta

SEQ ID NO: 51669 - RNA, 23 nt, Synthetic Construct
  source 1..23: mol_type = other RNA
tcctgtgctgagctgccccgagt

SEQ ID NO: 51670 - RNA, 23 nt, Synthetic Construct
  source 1..23: mol_type = other RNA
tcctgtgctgagctgccccgagt

SEQ ID NO: 51671 - RNA, 18 nt, Synthetic Construct
  source 1..18: mol_type = other RNA
agcagcattgtacagggc

SEQ ID NO: 51672 - RNA, 23 nt, Synthetic Construct
  source 1..23: mol_type = other RNA
cggtaatacgacgtacttagtgt

SEQ ID NO: 51673 - RNA, 16 nt, Synthetic Construct
  source 1..16: mol_type = other RNA
cccaaaggtcgtcggt

SEQ ID NO: 51674 - RNA, 24 nt, Synthetic Construct
  source 1..24: mol_type = other RNA
agctacatctggctactgggtctc

SEQ ID NO: 51675 - RNA, 24 nt, Synthetic Construct
  source 1..24: mol_type = other RNA
agctacatctggctactgggtctc

SEQ ID NO: 51676 - RNA, 27 nt, Synthetic Construct
  source 1..27: mol_type = other RNA
ccccccactgctgaatttgactggctt

SEQ ID NO: 51677 - RNA, 22 nt, Synthetic Construct
  source 1..22: mol_type = other RNA
acagtagcctgcacattggtta

SEQ ID NO: 51678 - RNA, 18 nt, Synthetic Construct
  source 1..18: mol_type = other RNA
gtccggatcgtagtctgc

SEQ ID NO: 51679 - RNA, 21 nt, Synthetic Construct
  source 1..21: mol_type = other RNA
tcctatactgagctgccccga

SEQ ID NO: 51680 - RNA, 22 nt, Synthetic Construct
  source 1..22: mol_type = other RNA
tgaggtagtaggtcgtgtggtt

SEQ ID NO: 51681 - RNA, 22 nt, Synthetic Construct
  source 1..22: mol_type = other RNA
tgaggtagtagtttgtgcggtt

SEQ ID NO: 51682 - RNA, 22 nt, Synthetic Construct
  source 1..22: mol_type = other RNA
tgaggtagtagtttgtgcggtt

SEQ ID NO: 51683 - RNA, 31 nt, Synthetic Construct; identical to SEQ ID NO: 2295
  source 1..31: mol_type = other RNA

SEQ ID NO: 51684 - RNA, 31 nt, Synthetic Construct; identical to SEQ ID NO: 2295
  source 1..31: mol_type = other RNA

SEQ ID NO: 51685 - RNA, 24 nt, Synthetic Construct
  source 1..24: mol_type = other RNA
gaaagattaaggcaagaggttagc

SEQ ID NO: 51686 - RNA, 24 nt, Synthetic Construct
  source 1..24: mol_type = other RNA
gaaagattaaggcaagaggttagc

SEQ ID NO: 51687 - RNA, 22 nt, Synthetic Construct
  source 1..22: mol_type = other RNA
tcctgtactgggctgccccgag

SEQ ID NO: 51688 - RNA, 22 nt, Synthetic Construct
  source 1..22: mol_type = other RNA
tcctgtactgggctgccccgag

SEQ ID NO: 51689 - RNA, 23 nt, Synthetic Construct
  source 1..23: mol_type = other RNA
tgaggtagtaggttgtatagtta

SEQ ID NO: 51690 - RNA, 22 nt, Synthetic Construct
  source 1..22: mol_type = other RNA
cggaatgtaaagaagtatgtat

SEQ ID NO: 51691 - RNA, 22 nt, Synthetic Construct
  source 1..22: mol_type = other RNA
cggaatgtaaagaagtatgtat

SEQ ID NO: 51692 - RNA, 22 nt, Synthetic Construct
  source 1..22: mol_type = other RNA
tgaggtagtagtttgtgctgct

SEQ ID NO: 51693 - RNA, 22 nt, Synthetic Construct
  source 1..22: mol_type = other RNA
tgaggtagtagtttgtgctgct

SEQ ID NO: 51694 - RNA, 15 nt, Synthetic Construct
  source 1..15: mol_type = other RNA
tgcaagtcgaacggt

SEQ ID NO: 51695 - RNA, 15 nt, Synthetic Construct
  source 1..15: mol_type = other RNA
tgcaagtcgaacggt

SEQ ID NO: 51696 - RNA, 24 nt, Synthetic Construct
  source 1..24: mol_type = other RNA
tgtaaacatccccgactggaagcc

SEQ ID NO: 51697 - RNA, 23 nt, Synthetic Construct
  source 1..23: mol_type = other RNA
tcgaccggacctcgaccggctcg

SEQ ID NO: 51698 - RNA, 21 nt, Synthetic Construct
  source 1..21: mol_type = other RNA
tgaggtagtagtttgtgccgt

SEQ ID NO: 51699 - RNA, 21 nt, Synthetic Construct
  source 1..21: mol_type = other RNA
tgaggtagtagtttgtgccgt

SEQ ID NO: 51700 - RNA, 20 nt, Synthetic Construct
  source 1..20: mol_type = other RNA
tgaggtagtaggttgtataa

SEQ ID NO: 51701 - RNA, 27 nt, Synthetic Construct
  source 1..27: mol_type = other RNA
tcctgagtagctcagcggcagagcggg

SEQ ID NO: 51702 - RNA, 27 nt, Synthetic Construct
  source 1..27: mol_type = other RNA
tcctgagtagctcagcggcagagcggg

SEQ ID NO: 51703 - RNA, 22 nt, Synthetic Construct
  source 1..22: mol_type = other RNA
tgaggtagtagtttgtgcagtt

SEQ ID NO: 51704 - RNA, 22 nt, Synthetic Construct
  source 1..22: mol_type = other RNA
tgaggtagtagtttgtgcagtt

SEQ ID NO: 51705 - RNA, 22 nt, Synthetic Construct
  source 1..22: mol_type = other RNA
tagcagcacatcatggtttaca

SEQ ID NO: 51706 - RNA, 22 nt, Synthetic Construct
  source 1..22: mol_type = other RNA
tagcagcacatcatggtttaca

SEQ ID NO: 51707 - RNA, 16 nt, Synthetic Construct
  source 1..16: mol_type = other RNA
atgcaagtcgaacggt

SEQ ID NO: 51708 - RNA, 18 nt, Synthetic Construct
  source 1..18: mol_type = other RNA
acagtcaggatgttggct

SEQ ID NO: 51709 - RNA, 22 nt, Synthetic Construct
  source 1..22: mol_type = other RNA
taaggtagtagattgtatagtt

SEQ ID NO: 51710 - RNA, 22 nt, Synthetic Construct
  source 1..22: mol_type = other RNA
taaggtagtagattgtatagtt

SEQ ID NO: 51711 - RNA, 22 nt, Synthetic Construct
  source 1..22: mol_type = other RNA
tagcagcacgtagatattggcg

SEQ ID NO: 51712 - RNA, 22 nt, Synthetic Construct
  source 1..22: mol_type = other RNA
tagcagcacgtagatattggcg

SEQ ID NO: 51713 - RNA, 23 nt, Synthetic Construct
  source 1..23: mol_type = other RNA
tcctgcactgagctgccccgaga

SEQ ID NO: 51714 - RNA, 22 nt, Synthetic Construct
  source 1..22: mol_type = other RNA
tagcagcacgcaaatattggcg

SEQ ID NO: 51715 - RNA, 22 nt, Synthetic Construct
  source 1..22: mol_type = other RNA
tagcagcacgcaaatattggcg

SEQ ID NO: 51716 - RNA, 22 nt, Synthetic Construct
  source 1..22: mol_type = other RNA
tattgcacttgtcccggcctat

SEQ ID NO: 51717 - RNA, 22 nt, Synthetic Construct
  source 1..22: mol_type = other RNA
tattgcacttgtcccggcctat

SEQ ID NO: 51718 - RNA, 23 nt, Synthetic Construct
  source 1..23: mol_type = other RNA
tgacctatgaattgacagccagt

SEQ ID NO: 51719 - RNA, 23 nt, Synthetic Construct
  source 1..23: mol_type = other RNA
tgacctatgaattgacagccagt

SEQ ID NO: 51720 - RNA, 23 nt, Synthetic Construct
  source 1..23: mol_type = other RNA
agcaacattgtctgctgggtttc

SEQ ID NO: 51721 - RNA, 25 nt, Synthetic Construct
  source 1..25: mol_type = other RNA
ttgagggtatgagatcgagacgaca

SEQ ID NO: 51722 - RNA, 25 nt, Synthetic Construct
  source 1..25: mol_type = other RNA
ttgagggtatgagatcgagacgaca

SEQ ID NO: 51723 - RNA, 25 nt, Synthetic Construct
  source 1..25: mol_type = other RNA
tgtaaacatccttgactggaagctt

SEQ ID NO: 51724 - RNA, 36 nt, Synthetic Construct; identical to SEQ ID NO: 2506
  source 1..36: mol_type = other RNA

SEQ ID NO: 51725 - RNA, 18 nt, Synthetic Construct
  source 1..18: mol_type = other RNA
cgccgatgatagtgcgga

SEQ ID NO: 51726 - RNA, 18 nt, Synthetic Construct
  source 1..18: mol_type = other RNA
cgccgatgatagtgcgga

SEQ ID NO: 51727 - RNA, 30 nt, Synthetic Construct; identical to SEQ ID NO: 2699
  source 1..30: mol_type = other RNA

SEQ ID NO: 51728 - RNA, 30 nt, Synthetic Construct; identical to SEQ ID NO: 2699
  source 1..30: mol_type = other RNA

SEQ ID NO: 51729 - RNA, 23 nt, Synthetic Construct
  source 1..23: mol_type = other RNA
tgtcagtttgtcaaataccccat

SEQ ID NO: 51730 - RNA, 16 nt, Synthetic Construct
  source 1..16: mol_type = other RNA
gatttgggagtgctcg

SEQ ID NO: 51731 - RNA, 16 nt, Synthetic Construct
  source 1..16: mol_type = other RNA
gatttgggagtgctcg

SEQ ID NO: 51732 - RNA, 22 nt, Synthetic Construct
  source 1..22: mol_type = other RNA
tagcagcacgcaaatattggcg

SEQ ID NO: 51733 - RNA, 22 nt, Synthetic Construct
  source 1..22: mol_type = other RNA
tagcagcacgcaaatattggcg

SEQ ID NO: 51734 - RNA, 19 nt, Synthetic Construct
  source 1..19: mol_type = other RNA
gcgccgatgatagtgcgga

SEQ ID NO: 51735 - RNA, 35 nt, Synthetic Construct; identical to SEQ ID NO: 2269
  source 1..35: mol_type = other RNA

SEQ ID NO: 51736 - RNA, 27 nt, Synthetic Construct
  source 1..27: mol_type = other RNA
agagcagctaataccgcatacgacctg

SEQ ID NO: 51737 - RNA, 23 nt, Synthetic Construct
  source 1..23: mol_type = other RNA
tgtaaacatcctacactctcagc

SEQ ID NO: 51738 - RNA, 24 nt, Synthetic Construct
  source 1..24: mol_type = other RNA
tggaagactagtgattttgttgtt

SEQ ID NO: 51739 - RNA, 36 nt, Synthetic Construct; identical to SEQ ID NO: 2444
  source 1..36: mol_type = other RNA

SEQ ID NO: 51740 - RNA, 36 nt, Synthetic Construct; identical to SEQ ID NO: 2444
  source 1..36: mol_type = other RNA

SEQ ID NO: 51741 - RNA, 21 nt, Synthetic Construct
  source 1..21: mol_type = other RNA
ttctgtactgagctgccccga

SEQ ID NO: 51742 - RNA, 21 nt, Synthetic Construct
  source 1..21: mol_type = other RNA
ttctgtactgagctgccccga

SEQ ID NO: 51743 - RNA, 16 nt, Synthetic Construct
  source 1..16: mol_type = other RNA
cgctagtaatcgcgga

SEQ ID NO: 51744 - RNA, 16 nt, Synthetic Construct
  source 1..16: mol_type = other RNA
cgctagtaatcgcgga

SEQ ID NO: 51745 - RNA, 32 nt, Synthetic Construct; identical to SEQ ID NO: 3748
  source 1..32: mol_type = other RNA

SEQ ID NO: 51746 - RNA, 32 nt, Synthetic Construct; identical to SEQ ID NO: 3748
  source 1..32: mol_type = other RNA

SEQ ID NO: 51747 - RNA, 23 nt, Synthetic Construct
  source 1..23: mol_type = other RNA
caaagtgcagttcgtgcaggtag

SEQ ID NO: 51748 - RNA, 26 nt, Synthetic Construct
  source 1..26: mol_type = other RNA
ccccccactgctaatttgactggctt

SEQ ID NO: 51749 - RNA, 26 nt, Synthetic Construct
  source 1..26: mol_type = other RNA
ccccccactgctaatttgactggctt

SEQ ID NO: 51750 - RNA, 25 nt, Synthetic Construct
  source 1..25: mol_type = other RNA
tgaggtagtaggttgtgtggttttt

SEQ ID NO: 51751 - RNA, 22 nt, Synthetic Construct
  source 1..22: mol_type = other RNA
tgaggtagtaggttgtgtggct

SEQ ID NO: 51752 - RNA, 19 nt, Synthetic Construct
  source 1..19: mol_type = other RNA
cggaagaaggggtgcctgg

SEQ ID NO: 51753 - RNA, 19 nt, Synthetic Construct
  source 1..19: mol_type = other RNA
cggaagaaggggtgcctgg

SEQ ID NO: 51754 - RNA, 23 nt, Synthetic Construct
  source 1..23: mol_type = other RNA
tgaggggcagagagtgagacttt

SEQ ID NO: 51755 - RNA, 23 nt, Synthetic Construct
  source 1..23: mol_type = other RNA
tgaggggcagagagtgagacttt

SEQ ID NO: 51756 - RNA, 23 nt, Synthetic Construct
  source 1..23: mol_type = other RNA
caaagtgctgtacgtgcaggtag

SEQ ID NO: 51757 - RNA, 23 nt, Synthetic Construct
  source 1..23: mol_type = other RNA
caaagtgctgtacgtgcaggtag

SEQ ID NO: 51758 - RNA, 27 nt, Synthetic Construct
  source 1..27: mol_type = other RNA
ccctccactgctaaatttgactggctt

SEQ ID NO: 51759 - RNA, 22 nt, Synthetic Construct
  source 1..22: mol_type = other RNA
cgttgcacttgtctcggtctga

SEQ ID NO: 51760 - RNA, 23 nt, Synthetic Construct
  source 1..23: mol_type = other RNA
gtcagtttgtcaaataccccaat

SEQ ID NO: 51761 - RNA, 23 nt, Synthetic Construct
  source 1..23: mol_type = other RNA
gtcagtttgtcaaataccccaat

SEQ ID NO: 51762 - RNA, 22 nt, Synthetic Construct
  source 1..22: mol_type = other RNA
tcctgtactgagctgccccaag

SEQ ID NO: 51763 - RNA, 22 nt, Synthetic Construct
  source 1..22: mol_type = other RNA
tcctgtactgagctgccccaag

SEQ ID NO: 51764 - RNA, 21 nt, Synthetic Construct
  source 1..21: mol_type = other RNA
cggagtgtgacaatggtgttt

SEQ ID NO: 51765 - RNA, 21 nt, Synthetic Construct
  source 1..21: mol_type = other RNA
tgaagtagtaggttgtatagt

SEQ ID NO: 51766 - RNA, 22 nt, Synthetic Construct
  source 1..22: mol_type = other RNA
tgaggtaataggttgtatagtt

SEQ ID NO: 51767 - RNA, 22 nt, Synthetic Construct
  source 1..22: mol_type = other RNA
tgaggtaataggttgtatagtt

SEQ ID NO: 51768 - RNA, 15 nt, Synthetic Construct
  source 1..15: mol_type = other RNA
gtctcgccgacggca

SEQ ID NO: 51769 - RNA, 22 nt, Synthetic Construct
  source 1..22: mol_type = other RNA
tgtcaactggttgttgggaggg

SEQ ID NO: 51770 - RNA, 22 nt, Synthetic Construct
  source 1..22: mol_type = other RNA
tgtcaactggttgttgggaggg

SEQ ID NO: 51771 - RNA, 20 nt, Synthetic Construct
  source 1..20: mol_type = other RNA
tacagtatagatgatgtact

SEQ ID NO: 51772 - RNA, 20 nt, Synthetic Construct
  source 1..20: mol_type = other RNA
tacagtatagatgatgtact

SEQ ID NO: 51773 - RNA, 22 nt, Synthetic Construct
  source 1..22: mol_type = other RNA
tgaggtagtaggttgtatagat

SEQ ID NO: 51774 - RNA, 22 nt, Synthetic Construct
  source 1..22: mol_type = other RNA
tgaggtagtaggttgtatagat

SEQ ID NO: 51775 - RNA, 30 nt, Synthetic Construct; identical to SEQ ID NO: 1194
  source 1..30: mol_type = other RNA

SEQ ID NO: 51776 - RNA, 30 nt, Synthetic Construct; identical to SEQ ID NO: 1194
  source 1..30: mol_type = other RNA

SEQ ID NO: 51777 - RNA, 23 nt, Synthetic Construct
  source 1..23: mol_type = other RNA
cagagtgctgttcgtgcaggtag

SEQ ID NO: 51778 - RNA, 23 nt, Synthetic Construct
  source 1..23: mol_type = other RNA
cagagtgctgttcgtgcaggtag

SEQ ID NO: 51779 - RNA, 22 nt, Synthetic Construct
  source 1..22: mol_type = other RNA
cagggctggcagtgacatgggt

SEQ ID NO: 51780 - RNA, 21 nt, Synthetic Construct
  source 1..21: mol_type = other RNA
aagctgccagttgaagaactg

SEQ ID NO: 51781 - RNA, 21 nt, Synthetic Construct
  source 1..21: mol_type = other RNA
aagctgccagttgaagaactg

SEQ ID NO: 51782 - RNA, 22 nt, Synthetic Construct
  source 1..22: mol_type = other RNA
tggggtagtaggttgtatagtt

SEQ ID NO: 51783 - RNA, 22 nt, Synthetic Construct
  source 1..22: mol_type = other RNA
tggggtagtaggttgtatagtt

SEQ ID NO: 51784 - RNA, 22 nt, Synthetic Construct
  source 1..22: mol_type = other RNA
tgaggtagtaaattgtatagtt

SEQ ID NO: 51785 - RNA, 20 nt, Synthetic Construct
  source 1..20: mol_type = other RNA
gtcagtttgtcaaatacccc

SEQ ID NO: 51786 - RNA, 21 nt, Synthetic Construct
  source 1..21: mol_type = other RNA
tcccgtactgagctgccccga

SEQ ID NO: 51787 - RNA, 21 nt, Synthetic Construct
  source 1..21: mol_type = other RNA
tcccgtactgagctgccccga

SEQ ID NO: 51788 - RNA, 21 nt, Synthetic Construct
  source 1..21: mol_type = other RNA
ctagactgaagctccttgggg

SEQ ID NO: 51789 - RNA, 23 nt, Synthetic Construct
  source 1..23: mol_type = other RNA
caaagtgctgttcgtgcaggcag

SEQ ID NO: 51790 - RNA, 23 nt, Synthetic Construct
  source 1..23: mol_type = other RNA
caaagtgctgttcgtgcaggcag

SEQ ID NO: 51791 - RNA, 22 nt, Synthetic Construct
  source 1..22: mol_type = other RNA
tgtcagtttgtcaaataccccg

SEQ ID NO: 51792 - RNA, 22 nt, Synthetic Construct
  source 1..22: mol_type = other RNA
ngaggtagtaggttgtgtggtt

SEQ ID NO: 51793 - RNA, 22 nt, Synthetic Construct
  source 1..22: mol_type = other RNA
ngaggtagtaggttgtgtggtt

SEQ ID NO: 51794 - RNA, 24 nt, Synthetic Construct
  source 1..24: mol_type = other RNA
gatgaggcgtgataacgagtctgc

SEQ ID NO: 51795 - RNA, 24 nt, Synthetic Construct
  source 1..24: mol_type = other RNA
gatgaggcgtgataacgagtctgc

SEQ ID NO: 51796 - RNA, 17 nt, Synthetic Construct
  source 1..17: mol_type = other RNA
tcgctagtaatcgcgga

SEQ ID NO: 51797 - RNA, 17 nt, Synthetic Construct
  source 1..17: mol_type = other RNA
tcgctagtaatcgcgga

SEQ ID NO: 51798 - RNA, 21 nt, Synthetic Construct
  source 1..21: mol_type = other RNA
tcctgtactgagctgccctga

SEQ ID NO: 51799 - RNA, 27 nt, Synthetic Construct
  source 1..27: mol_type = other RNA
ccgtgtgaaagtaggtcatcgtcaggc

SEQ ID NO: 51800 - RNA, 18 nt, Synthetic Construct
  source 1..18: mol_type = other RNA
cagcactctgcaaagacg

SEQ ID NO: 51801 - RNA, 18 nt, Synthetic Construct
  source 1..18: mol_type = other RNA
cagcactctgcaaagacg

SEQ ID NO: 51802 - RNA, 23 nt, Synthetic Construct
  source 1..23: mol_type = other RNA
atcacattgccagggatttccaa

SEQ ID NO: 51803 - RNA, 22 nt, Synthetic Construct
  source 1..22: mol_type = other RNA
tgaggaagtagtttgtgctgtt

SEQ ID NO: 51804 - RNA, 21 nt, Synthetic Construct
  source 1..21: mol_type = other RNA
tcctgtactgagccgccccga

SEQ ID NO: 51805 - RNA, 21 nt, Synthetic Construct
  source 1..21: mol_type = other RNA
tcctgtactgagccgccccga

SEQ ID NO: 51806 - RNA, 22 nt, Synthetic Construct
  source 1..22: mol_type = other RNA
aaagtgctgttcgtgcaggtag

SEQ ID NO: 51807 - RNA, 21 nt, Synthetic Construct
  source 1..21: mol_type = other RNA
cataattacttttggtacgcg

SEQ ID NO: 51808 - RNA, 21 nt, Synthetic Construct
  source 1..21: mol_type = other RNA
cataattacttttggtacgcg

SEQ ID NO: 51809 - RNA, 24 nt, Synthetic Construct
  source 1..24: mol_type = other RNA
agctacatctggctactgggtctc

SEQ ID NO: 51810 - RNA, 24 nt, Synthetic Construct
  source 1..24: mol_type = other RNA
agctacatctggctactgggtctc

SEQ ID NO: 51811 - RNA, 32 nt, Synthetic Construct; identical to SEQ ID NO: 753
  source 1..32: mol_type = other RNA

SEQ ID NO: 51812 - RNA, 32 nt, Synthetic Construct; identical to SEQ ID NO: 753
  source 1..32: mol_type = other RNA

SEQ ID NO: 51813 - RNA, 16 nt, Synthetic Construct
  source 1..16: mol_type = other RNA
agggaacgtgagctgg

SEQ ID NO: 51814 - RNA, 16 nt, Synthetic Construct
  source 1..16: mol_type = other RNA
agggaacgtgagctgg

SEQ ID NO: 51815 - RNA, 33 nt, Synthetic Construct; identical to SEQ ID NO: 10232
  source 1..33: mol_type = other RNA

SEQ ID NO: 51816 - RNA, 32 nt, Synthetic Construct; identical to SEQ ID NO: 2296
  source 1..32: mol_type = other RNA

SEQ ID NO: 51817 - RNA, 32 nt, Synthetic Construct; identical to SEQ ID NO: 2296
  source 1..32: mol_type = other RNA

SEQ ID NO: 51818 - RNA, 35 nt, Synthetic Construct; identical to SEQ ID NO: 2269
  source 1..35: mol_type = other RNA

SEQ ID NO: 51819 - RNA, 24 nt, Synthetic Construct
  source 1..24: mol_type = other RNA
ggttgtaaaccgcttttgtcaggg

SEQ ID NO: 51820 - RNA, 16 nt, Synthetic Construct
  source 1..16: mol_type = other RNA
aggtcatcgtcaggct

SEQ ID NO: 51821 - RNA, 21 nt, Synthetic Construct
  source 1..21: mol_type = other RNA
cgtaccgtgagtaataatgcg

SEQ ID NO: 51822 - RNA, 23 nt, Synthetic Construct
  source 1..23: mol_type = other RNA
ttcaagtaattcaggataggttt

SEQ ID NO: 51823 - RNA, 18 nt, Synthetic Construct
  source 1..18: mol_type = other RNA
gtcaggatggccgagcgg

SEQ ID NO: 51824 - RNA, 18 nt, Synthetic Construct
  source 1..18: mol_type = other RNA
gtcaggatggccgagcgg

SEQ ID NO: 51825 - RNA, 22 nt, Synthetic Construct
  source 1..22: mol_type = other RNA
tgaggtagtaggttgtatagtc

SEQ ID NO: 51826 - RNA, 36 nt, Synthetic Construct; identical to SEQ ID NO: 2366
  source 1..36: mol_type = other RNA

SEQ ID NO: 51827 - RNA, 36 nt, Synthetic Construct; identical to SEQ ID NO: 2366
  source 1..36: mol_type = other RNA

SEQ ID NO: 51828 - RNA, 22 nt, Synthetic Construct
  source 1..22: mol_type = other RNA
tcgtaccgcgagtaataatgcg

SEQ ID NO: 51829 - RNA, 22 nt, Synthetic Construct
  source 1..22: mol_type = other RNA
tcgtaccgcgagtaataatgcg

SEQ ID NO: 51830 - RNA, 31 nt, Synthetic Construct; identical to SEQ ID NO: 2893
  source 1..31: mol_type = other RNA

SEQ ID NO: 51831 - RNA, 27 nt, Synthetic Construct
  source 1..27: mol_type = other RNA
ccccccactgctaaacttgactggctt

SEQ ID NO: 51832 - RNA, 27 nt, Synthetic Construct
  source 1..27: mol_type = other RNA
ccccccactgctaaacttgactggctt

SEQ ID NO: 51833 - RNA, 21 nt, Synthetic Construct
  source 1..21: mol_type = other RNA
taactccttaagcgaatctgc

SEQ ID NO: 51834 - RNA, 21 nt, Synthetic Construct
  source 1..21: mol_type = other RNA
taactccttaagcgaatctgc

SEQ ID NO: 51835 - RNA, 23 nt, Synthetic Construct
  source 1..23: mol_type = other RNA
tacagtagtctgcacattggttt

SEQ ID NO: 51836 - RNA, 22 nt, Synthetic Construct
  source 1..22: mol_type = other RNA
gtgccgaagctgtgggattgat

SEQ ID NO: 51837 - RNA, 22 nt, Synthetic Construct
  source 1..22: mol_type = other RNA
gtgccgaagctgtgggattgat

SEQ ID NO: 51838 - RNA, 23 nt, Synthetic Construct
  source 1..23: mol_type = other RNA
tcctgtaccgagctgccccgaga

SEQ ID NO: 51839 - RNA, 23 nt, Synthetic Construct
  source 1..23: mol_type = other RNA
tcctgtaccgagctgccccgaga

SEQ ID NO: 51840 - RNA, 25 nt, Synthetic Construct
  source 1..25: mol_type = other RNA
ttgaggatatgaggtcgagacgaca

SEQ ID NO: 51841 - RNA, 25 nt, Synthetic Construct
  source 1..25: mol_type = other RNA
ttgaggatatgaggtcgagacgaca

SEQ ID NO: 51842 - RNA, 20 nt, Synthetic Construct
  source 1..20: mol_type = other RNA
tgtaaacatccttgactgga

SEQ ID NO: 51843 - RNA, 20 nt, Synthetic Construct
  source 1..20: mol_type = other RNA
tgtaaacatccttgactgga

SEQ ID NO: 51844 - RNA, 23 nt, Synthetic Construct
  source 1..23: mol_type = other RNA
agcagcattgtacagggctatgg

SEQ ID NO: 51845 - RNA, 23 nt, Synthetic Construct
  source 1..23: mol_type = other RNA
agcagcattgtacagggctatgg

SEQ ID NO: 51846 - RNA, 28 nt, Synthetic Construct
  source 1..28: mol_type = other RNA
cccccccactgctaaatttgactggctt

SEQ ID NO: 51847 - RNA, 28 nt, Synthetic Construct
  source 1..28: mol_type = other RNA
cccccccactgctaaatttgactggctt

SEQ ID NO: 51848 - RNA, 22 nt, Synthetic Construct
  source 1..22: mol_type = other RNA
cgaggtagtaggttgtatagtt

SEQ ID NO: 51849 - RNA, 22 nt, Synthetic Construct
  source 1..22: mol_type = other RNA
cgaggtagtaggttgtatagtt

SEQ ID NO: 51850 - RNA, 23 nt, Synthetic Construct
  source 1..23: mol_type = other RNA
gactcttagcggtggatcactcg

SEQ ID NO: 51851 - RNA, 23 nt, Synthetic Construct
  source 1..23: mol_type = other RNA
gactcttagcggtggatcactcg

SEQ ID NO: 51852 - RNA, 23 nt, Synthetic Construct
  source 1..23: mol_type = other RNA
tggtaatacgacgtacttaatgt

SEQ ID NO: 51853 - RNA, 23 nt, Synthetic Construct
  source 1..23: mol_type = other RNA
tggtaatacgacgtacttaatgt

SEQ ID NO: 51854 - RNA, 20 nt, Synthetic Construct
  source 1..20: mol_type = other RNA
tgaggtagtaggttgtgcgg

SEQ ID NO: 51855 - RNA, 21 nt, Synthetic Construct
  source 1..21: mol_type = other RNA
ggaggggcagagagcgagact

SEQ ID NO: 51856 - RNA, 21 nt, Synthetic Construct
  source 1..21: mol_type = other RNA
ggaggggcagagagcgagact

SEQ ID NO: 51857 - RNA, 31 nt, Synthetic Construct; identical to SEQ ID NO: 2333
  source 1..31: mol_type = other RNA

SEQ ID NO: 51858 - RNA, 23 nt, Synthetic Construct
  source 1..23: mol_type = other RNA
tgaggggcagagagcgagactct

SEQ ID NO: 51859 - RNA, 28 nt, Synthetic Construct
  source 1..28: mol_type = other RNA
ccccccgctgctaaatttgactggcttt

SEQ ID NO: 51860 - RNA, 22 nt, Synthetic Construct
  source 1..22: mol_type = other RNA
tcttggagtaggtcattgggtg

SEQ ID NO: 51861 - RNA, 16 nt, Synthetic Construct
  source 1..16: mol_type = other RNA
gcaagaggtcagcggt

SEQ ID NO: 51862 - RNA, 16 nt, Synthetic Construct
  source 1..16: mol_type = other RNA
tggccgtcgtcagctc

SEQ ID NO: 51863 - RNA, 24 nt, Synthetic Construct
  source 1..24: mol_type = other RNA
ggctacattgtctgctgggtttct

SEQ ID NO: 51864 - RNA, 24 nt, Synthetic Construct
  source 1..24: mol_type = other RNA
ggctacattgtctgctgggtttct

SEQ ID NO: 51865 - RNA, 23 nt, Synthetic Construct
  source 1..23: mol_type = other RNA
tggtaataagacgtacttagtgt

SEQ ID NO: 51866 - RNA, 15 nt, Synthetic Construct
  source 1..15: mol_type = other RNA
tcgagtcgtcctgcg

SEQ ID NO: 51867 - RNA, 23 nt, Synthetic Construct
  source 1..23: mol_type = other RNA
tggtaatacgacgtacttagtgc

SEQ ID NO: 51868 - RNA, 23 nt, Synthetic Construct
  source 1..23: mol_type = other RNA
tggtaatacgacgtacttagtgc

SEQ ID NO: 51869 - RNA, 22 nt, Synthetic Construct
  source 1..22: mol_type = other RNA
tgaggtagtagtttgtgctgtt

SEQ ID NO: 51870 - RNA, 24 nt, Synthetic Construct
  source 1..24: mol_type = other RNA
ttccccttggggttgtaggaccac

SEQ ID NO: 51871 - RNA, 24 nt, Synthetic Construct
  source 1..24: mol_type = other RNA
ttccccttggggttgtaggaccac

SEQ ID NO: 51872 - RNA, 16 nt, Synthetic Construct
  source 1..16: mol_type = other RNA
gtctacggccataccg

SEQ ID NO: 51873 - RNA, 16 nt, Synthetic Construct
  source 1..16: mol_type = other RNA
gtctacggccataccg

SEQ ID NO: 51874 - RNA, 34 nt, Synthetic Construct; identical to SEQ ID NO: 2367
  source 1..34: mol_type = other RNA

SEQ ID NO: 51875 - RNA, 21 nt, Synthetic Construct
  source 1..21: mol_type = other RNA
tgaggtagtagtttgtgctga

SEQ ID NO: 51876 - RNA, 22 nt, Synthetic Construct
  source 1..22: mol_type = other RNA
tagcagcacgtaaatatcggcg

SEQ ID NO: 51877 - RNA, 22 nt, Synthetic Construct
  source 1..22: mol_type = other RNA
tagcagcacgtaaatatcggcg

SEQ ID NO: 51878 - RNA, 35 nt, Synthetic Construct; identical to SEQ ID NO: 2397
  source 1..35: mol_type = other RNA

SEQ ID NO: 51879 - RNA, 35 nt, Synthetic Construct; identical to SEQ ID NO: 2397
  source 1..35: mol_type = other RNA

SEQ ID NO: 51880 - RNA, 15 nt, Synthetic Construct
  source 1..15: mol_type = other RNA
tcagtagctcgagga

SEQ ID NO: 51881 - RNA, 28 nt, Synthetic Construct
  source 1..28: mol_type = other RNA
ccccccgctgctaaatttgactggcttt

SEQ ID NO: 51882 - RNA, 24 nt, Synthetic Construct
  source 1..24: mol_type = other RNA
tgtaaacacccccgactggaagct

SEQ ID NO: 51883 - RNA, 24 nt, Synthetic Construct
  source 1..24: mol_type = other RNA
tgtaaacacccccgactggaagct

SEQ ID NO: 51884 - RNA, 32 nt, Synthetic Construct; identical to SEQ ID NO: 2435
  source 1..32: mol_type = other RNA

SEQ ID NO: 51885 - RNA, 32 nt, Synthetic Construct; identical to SEQ ID NO: 2435
  source 1..32: mol_type = other RNA

SEQ ID NO: 51886 - RNA, 20 nt, Synthetic Construct
  source 1..20: mol_type = other RNA
tgaggtggtaggttgtatag

SEQ ID NO: 51887 - RNA, 20 nt, Synthetic Construct
  source 1..20: mol_type = other RNA
tgaggtggtaggttgtatag

SEQ ID NO: 51888 - RNA, 22 nt, Synthetic Construct
  source 1..22: mol_type = other RNA
tcgtaccgtgagtaataacgcg

SEQ ID NO: 51889 - RNA, 17 nt, Synthetic Construct
  source 1..17: mol_type = other RNA
accaaggggtcgtgggt

SEQ ID NO: 51890 - RNA, 17 nt, Synthetic Construct
  source 1..17: mol_type = other RNA
accaaggggtcgtgggt

SEQ ID NO: 51891 - RNA, 22 nt, Synthetic Construct
  source 1..22: mol_type = other RNA
tgaggaagtaggttgtatagtt

SEQ ID NO: 51892 - RNA, 20 nt, Synthetic Construct
  source 1..20: mol_type = other RNA
tcagtagctcgaggaaaaga

SEQ ID NO: 51893 - RNA, 20 nt, Synthetic Construct
  source 1..20: mol_type = other RNA
tcagtagctcgaggaaaaga

SEQ ID NO: 51894 - RNA, 16 nt, Synthetic Construct
  source 1..16: mol_type = other RNA
ttggcctcaagtcagg

SEQ ID NO: 51895 - RNA, 16 nt, Synthetic Construct
  source 1..16: mol_type = other RNA
ttggcctcaagtcagg

SEQ ID NO: 51896 - RNA, 22 nt, Synthetic Construct
  source 1..22: mol_type = other RNA
tgaggtagtagattgtatagat

SEQ ID NO: 51897 - RNA, 22 nt, Synthetic Construct
  source 1..22: mol_type = other RNA
tgaggtagtagattgtatagat

SEQ ID NO: 51898 - RNA, 23 nt, Synthetic Construct
  source 1..23: mol_type = other RNA
gtctttgttcgattccgttgagt

SEQ ID NO: 51899 - RNA, 23 nt, Synthetic Construct
  source 1..23: mol_type = other RNA
gtctttgttcgattccgttgagt

SEQ ID NO: 51900 - RNA, 22 nt, Synthetic Construct
  source 1..22: mol_type = other RNA
tgaggcagtagtttgtgctgtt

SEQ ID NO: 51901 - RNA, 22 nt, Synthetic Construct
  source 1..22: mol_type = other RNA
tgaggcagtagtttgtgctgtt

SEQ ID NO: 51902 - RNA, 21 nt, Synthetic Construct
  source 1..21: mol_type = other RNA
ctagactgaggctccttgagg

SEQ ID NO: 51903 - RNA, 27 nt, Synthetic Construct
  source 1..27: mol_type = other RNA
cggtataccgaagctctaggtgcggca

SEQ ID NO: 51904 - RNA, 27 nt, Synthetic Construct
  source 1..27: mol_type = other RNA
cggtataccgaagctctaggtgcggca

SEQ ID NO: 51905 - RNA, 21 nt, Synthetic Construct
  source 1..21: mol_type = other RNA
cgaggtagtaggttgtgtggt

SEQ ID NO: 51906 - RNA, 21 nt, Synthetic Construct
  source 1..21: mol_type = other RNA
cgaggtagtaggttgtgtggt

SEQ ID NO: 51907 - RNA, 25 nt, Synthetic Construct
  source 1..25: mol_type = other RNA
ttggggatatgagatcgagacgaca

SEQ ID NO: 51908 - RNA, 23 nt, Synthetic Construct
  source 1..23: mol_type = other RNA
aatgacacgatcactcccgttga

SEQ ID NO: 51909 - RNA, 27 nt, Synthetic Construct
  source 1..27: mol_type = other RNA
ggggagctaatcccagaaacccggtcg

SEQ ID NO: 51910 - RNA, 16 nt, Synthetic Construct
  source 1..16: mol_type = other RNA
agcaagtcgaacggta

SEQ ID NO: 51911 - RNA, 22 nt, Synthetic Construct
  source 1..22: mol_type = other RNA
taaggtagtagtttgtgctgtt

SEQ ID NO: 51912 - RNA, 22 nt, Synthetic Construct
  source 1..22: mol_type = other RNA
tgagaactgaatcccatgggtt

SEQ ID NO: 51913 - RNA, 22 nt, Synthetic Construct
  source 1..22: mol_type = other RNA
tgagaactgaatcccatgggtt

SEQ ID NO: 51914 - RNA, 21 nt, Synthetic Construct
  source 1..21: mol_type = other RNA
taactccttaagcaatctcgc

SEQ ID NO: 51915 - RNA, 21 nt, Synthetic Construct
  source 1..21: mol_type = other RNA
taactccttaagcaatctcgc

SEQ ID NO: 51916 - RNA, 22 nt, Synthetic Construct
  source 1..22: mol_type = other RNA
tgacgtagtagtttgtgctgtt

SEQ ID NO: 51917 - RNA, 22 nt, Synthetic Construct
  source 1..22: mol_type = other RNA
tgacgtagtagtttgtgctgtt

SEQ ID NO: 51918 - RNA, 21 nt, Synthetic Construct
  source 1..21: mol_type = other RNA
tgaggtagtagcttgtgctgt

SEQ ID NO: 51919 - RNA, 22 nt, Synthetic Construct
  source 1..22: mol_type = other RNA
tgaggtagtagtttgtgctgta

SEQ ID NO: 51920 - RNA, 22 nt, Synthetic Construct
  source 1..22: mol_type = other RNA
tggagtgtgacaatggcgtttg

SEQ ID NO: 51921 - RNA, 23 nt, Synthetic Construct
  source 1..23: mol_type = other RNA
tgaggggcagagagcgagacttc

SEQ ID NO: 51922 - RNA, 23 nt, Synthetic Construct
  source 1..23: mol_type = other RNA
tgaggggcagagagcgagacttc

SEQ ID NO: 51923 - RNA, 20 nt, Synthetic Construct
  source 1..20: mol_type = other RNA
tcctgtaccgatcaatagtg

SEQ ID NO: 51924 - RNA, 22 nt, Synthetic Construct
  source 1..22: mol_type = other RNA
tattgcacttgtcccagcctgt

SEQ ID NO: 51925 - RNA, 22 nt, Synthetic Construct
  source 1..22: mol_type = other RNA
tattgcacttgtcccagcctgt

SEQ ID NO: 51926 - RNA, 31 nt, Synthetic Construct; identical to SEQ ID NO: 1881
  source 1..31: mol_type = other RNA

SEQ ID NO: 51927 - RNA, 23 nt, Synthetic Construct
  source 1..23: mol_type = other RNA
caacggagtcccaaaagcagctg

SEQ ID NO: 51928 - RNA, 27 nt, Synthetic Construct
  source 1..27: mol_type = other RNA
ccccccgctgctaaatttgactggctt

SEQ ID NO: 51929 - RNA, 27 nt, Synthetic Construct
  source 1..27: mol_type = other RNA
ccccccgctgctaaatttgactggctt

SEQ ID NO: 51930 - RNA, 27 nt, Synthetic Construct
  source 1..27: mol_type = other RNA
ccccccactgctaaattcgactggctt

SEQ ID NO: 51931 - RNA, 27 nt, Synthetic Construct
  source 1..27: mol_type = other RNA
ccccccactgctaaattcgactggctt

SEQ ID NO: 51932 - RNA, 20 nt, Synthetic Construct
  source 1..20: mol_type = other RNA
gtcagtttgtcaaatacccc

SEQ ID NO: 51933 - RNA, 20 nt, Synthetic Construct
  source 1..20: mol_type = other RNA
gtcagtttgtcaaatacccc

SEQ ID NO: 51934 - RNA, 22 nt, Synthetic Construct
  source 1..22: mol_type = other RNA
tgaggtaataggttgtgtggtt

SEQ ID NO: 51935 - RNA, 22 nt, Synthetic Construct
  source 1..22: mol_type = other RNA
tgaggtaataggttgtgtggtt

SEQ ID NO: 51936 - RNA, 23 nt, Synthetic Construct
  source 1..23: mol_type = other RNA
tgtcagtttgtcaaataccccaa

SEQ ID NO: 51937 - RNA, 23 nt, Synthetic Construct
  source 1..23: mol_type = other RNA
tgtcagtttgtcaaataccccaa

SEQ ID NO: 51938 - RNA, 20 nt, Synthetic Construct
  source 1..20: mol_type = other RNA
acagtagtctgcacattggt

SEQ ID NO: 51939 - RNA, 20 nt, Synthetic Construct
  source 1..20: mol_type = other RNA
acagtagtctgcacattggt

SEQ ID NO: 51940 - RNA, 18 nt, Synthetic Construct
  source 1..18: mol_type = other RNA
cccttgtcattagttgct

SEQ ID NO: 51941 - RNA, 18 nt, Synthetic Construct
  source 1..18: mol_type = other RNA
cccttgtcattagttgct

SEQ ID NO: 51942 - RNA, 20 nt, Synthetic Construct
  source 1..20: mol_type = other RNA
tgaggtagcaggttgtatag

SEQ ID NO: 51943 - RNA, 20 nt, Synthetic Construct
  source 1..20: mol_type = other RNA
tgaggtagcaggttgtatag

SEQ ID NO: 51944 - RNA, 22 nt, Synthetic Construct
  source 1..22: mol_type = other RNA
tgaagtagtaggttgtatagtt

SEQ ID NO: 51945 - RNA, 22 nt, Synthetic Construct
  source 1..22: mol_type = other RNA
tgaagtagtaggttgtatagtt

SEQ ID NO: 51946 - RNA, 21 nt, Synthetic Construct
  source 1..21: mol_type = other RNA
tgaggtagtaggttgtgtagt

SEQ ID NO: 51947 - RNA, 21 nt, Synthetic Construct
  source 1..21: mol_type = other RNA
tgaggtagtaggttgtgtagt

SEQ ID NO: 51948 - RNA, 21 nt, Synthetic Construct
  source 1..21: mol_type = other RNA
tgaggggcagagagcgaggct

SEQ ID NO: 51949 - RNA, 21 nt, Synthetic Construct
  source 1..21: mol_type = other RNA
gggagtgtgacaatggtgttt

SEQ ID NO: 51950 - RNA, 21 nt, Synthetic Construct
  source 1..21: mol_type = other RNA
gggagtgtgacaatggtgttt

SEQ ID NO: 51951 - RNA, 15 nt, Synthetic Construct
  source 1..15: mol_type = other RNA
cgatatggcatgaga

SEQ ID NO: 51952 - RNA, 15 nt, Synthetic Construct
  source 1..15: mol_type = other RNA
cgatatggcatgaga

SEQ ID NO: 51953 - RNA, 22 nt, Synthetic Construct
  source 1..22: mol_type = other RNA
tcctgtactgagttgccccgag

SEQ ID NO: 51954 - RNA, 22 nt, Synthetic Construct
  source 1..22: mol_type = other RNA
tcctgtactgagttgccccgag

SEQ ID NO: 51955 - RNA, 22 nt, Synthetic Construct
  source 1..22: mol_type = other RNA
cgaggtagtagtttgtgctgtt

SEQ ID NO: 51956 - RNA, 21 nt, Synthetic Construct
  source 1..21: mol_type = other RNA
ccccttggggttgtaggacca

SEQ ID NO: 51957 - RNA, 21 nt, Synthetic Construct
  source 1..21: mol_type = other RNA
ccccttggggttgtaggacca

SEQ ID NO: 51958 - RNA, 22 nt, Synthetic Construct
  source 1..22: mol_type = other RNA
tggggtagtaggttgtgtggtt

SEQ ID NO: 51959 - RNA, 22 nt, Synthetic Construct
  source 1..22: mol_type = other RNA
tggggtagtaggttgtgtggtt

SEQ ID NO: 51960 - RNA, 27 nt, Synthetic Construct
  source 1..27: mol_type = other RNA
tcccccactgctaaatttgactggctt

SEQ ID NO: 51961 - RNA, 22 nt, Synthetic Construct
  source 1..22: mol_type = other RNA
tagcagcacgtgaatattggcg

SEQ ID NO: 51962 - RNA, 17 nt, Synthetic Construct
  source 1..17: mol_type = other RNA
aggaattgacggaaggg

SEQ ID NO: 51963 - RNA, 17 nt, Synthetic Construct
  source 1..17: mol_type = other RNA
aggaattgacggaaggg

SEQ ID NO: 51964 - RNA, 21 nt, Synthetic Construct
  source 1..21: mol_type = other RNA
tgaggtaataggttgtgtggt

SEQ ID NO: 51965 - RNA, 21 nt, Synthetic Construct
  source 1..21: mol_type = other RNA
tgaggtaataggttgtgtggt

SEQ ID NO: 51966 - RNA, 23 nt, Synthetic Construct
  source 1..23: mol_type = other RNA
agcagcactgtacagggctatga

SEQ ID NO: 51967 - RNA, 23 nt, Synthetic Construct
  source 1..23: mol_type = other RNA
agcagcactgtacagggctatga

SEQ ID NO: 51968 - RNA, 21 nt, Synthetic Construct
  source 1..21: mol_type = other RNA
tgaggtagtaggttgtgtggc

SEQ ID NO: 51969 - RNA, 21 nt, Synthetic Construct
  source 1..21: mol_type = other RNA
tgaggtagtaggttgtgtggc

SEQ ID NO: 51970 - RNA, 25 nt, Synthetic Construct
  source 1..25: mol_type = other RNA
ttgagggtatgagatcgagacgaca

SEQ ID NO: 51971 - RNA, 32 nt, Synthetic Construct; identical to SEQ ID NO: 3713
  source 1..32: mol_type = other RNA

SEQ ID NO: 51972 - RNA, 22 nt, Synthetic Construct
  source 1..22: mol_type = other RNA
tgaggtagtaaattgtatagtt

SEQ ID NO: 51973 - RNA, 22 nt, Synthetic Construct
  source 1..22: mol_type = other RNA
tgaggcagtaggttgtgtggtt

SEQ ID NO: 51974 - RNA, 22 nt, Synthetic Construct
  source 1..22: mol_type = other RNA
tgaggcagtaggttgtgtggtt

SEQ ID NO: 51975 - RNA, 22 nt, Synthetic Construct
  source 1..22: mol_type = other RNA
tgagatagtaggttgtgtggtt

SEQ ID NO: 51976 - RNA, 16 nt, Synthetic Construct
  source 1..16: mol_type = other RNA
cagtcaggatgttggc

SEQ ID NO: 51977 - RNA, 22 nt, Synthetic Construct
  source 1..22: mol_type = other RNA
tcctgtactgagctgccccaag

SEQ ID NO: 51978 - RNA, 22 nt, Synthetic Construct
  source 1..22: mol_type = other RNA
tcctgtactgagctgccccaag

SEQ ID NO: 51979 - RNA, 25 nt, Synthetic Construct
  source 1..25: mol_type = other RNA
ttgaggatatgagatcgagacggca

SEQ ID NO: 51980 - RNA, 22 nt, Synthetic Construct
  source 1..22: mol_type = other RNA
tcctgtactgagctgccccggg

SEQ ID NO: 51981 - RNA, 22 nt, Synthetic Construct
  source 1..22: mol_type = other RNA
tcctgtactgagctgccccggg

SEQ ID NO: 51982 - RNA, 22 nt, Synthetic Construct
  source 1..22: mol_type = other RNA
ncctgtactgagctgccccgag

SEQ ID NO: 51983 - RNA, 21 nt, Synthetic Construct
  source 1..21: mol_type = other RNA
acacatgcaagtcgaacggta

SEQ ID NO: 51984 - RNA, 18 nt, Synthetic Construct
  source 1..18: mol_type = other RNA
ggtgcaagcgttaatcgg

SEQ ID NO: 51985 - RNA, 22 nt, Synthetic Construct
  source 1..22: mol_type = other RNA
tcgtactgtgagtaataatgcg

SEQ ID NO: 51986 - RNA, 22 nt, Synthetic Construct
  source 1..22: mol_type = other RNA
tcgtactgtgagtaataatgcg

SEQ ID NO: 51987 - RNA, 36 nt, Synthetic Construct; identical to SEQ ID NO: 2660
  source 1..36: mol_type = other RNA

SEQ ID NO: 51988 - RNA, 17 nt, Synthetic Construct
  source 1..17: mol_type = other RNA
atgcaagtcgaacggta

SEQ ID NO: 51989 - RNA, 15 nt, Synthetic Construct
  source 1..15: mol_type = other RNA
gtccggcccgaggca

SEQ ID NO: 51990 - RNA, 27 nt, Synthetic Construct
  source 1..27: mol_type = other RNA
ccccccattgctaaatttgactggctt

SEQ ID NO: 51991 - RNA, 27 nt, Synthetic Construct
  source 1..27: mol_type = other RNA
ccccccattgctaaatttgactggctt

SEQ ID NO: 51992 - RNA, 24 nt, Synthetic Construct
  source 1..24: mol_type = other RNA
cgggcctggttagtacttggatgg

SEQ ID NO: 51993 - RNA, 22 nt, Synthetic Construct
  source 1..22: mol_type = other RNA
tgtcagtttgtcaaatacccaa

SEQ ID NO: 51994 - RNA, 17 nt, Synthetic Construct
  source 1..17: mol_type = other RNA
cagtagctcgaggaaaa

SEQ ID NO: 51995 - RNA, 22 nt, Synthetic Construct
  source 1..22: mol_type = other RNA
atcacattgccagggatttcca

SEQ ID NO: 51996 - RNA, 22 nt, Synthetic Construct
  source 1..22: mol_type = other RNA
tgaggtggtaggttgtatagtt

SEQ ID NO: 51997 - RNA, 22 nt, Synthetic Construct
  source 1..22: mol_type = other RNA
tgaggtggtaggttgtatagtt

SEQ ID NO: 51998 - RNA, 20 nt, Synthetic Construct
  source 1..20: mol_type = other RNA
ctctaatgagactgccggtg

SEQ ID NO: 51999 - RNA, 32 nt, Synthetic Construct; identical to SEQ ID NO: 2582
  source 1..32: mol_type = other RNA

SEQ ID NO: 52000 - RNA, 32 nt, Synthetic Construct; identical to SEQ ID NO: 2582
  source 1..32: mol_type = other RNA

SEQ ID NO: 52001 - RNA, 21 nt, Synthetic Construct
  source 1..21: mol_type = other RNA
tcctgtactgagctgccccaa

SEQ ID NO: 52002 - RNA, 21 nt, Synthetic Construct
  source 1..21: mol_type = other RNA
tcctgtactgagctgccccaa

SEQ ID NO: 52003 - RNA, 22 nt, Synthetic Construct
  source 1..22: mol_type = other RNA
tgaggtagtagcttgtgctgtt

SEQ ID NO: 52004 - RNA, 22 nt, Synthetic Construct
  source 1..22: mol_type = other RNA
tgaggtagtagcttgtgctgtt

SEQ ID NO: 52005 - RNA, 16 nt, Synthetic Construct
  source 1..16: mol_type = other RNA
gcctacggccatacca

SEQ ID NO: 52006 - RNA, 16 nt, Synthetic Construct
  source 1..16: mol_type = other RNA
gcctacggccatacca

SEQ ID NO: 52007 - RNA, 22 nt, Synthetic Construct
  source 1..22: mol_type = other RNA
tcgtaccgtgagtagtaatgcg

SEQ ID NO: 52008 - RNA, 22 nt, Synthetic Construct
  source 1..22: mol_type = other RNA
tcgtaccgtgagtagtaatgcg

SEQ ID NO: 52009 - RNA, 21 nt, Synthetic Construct
  source 1..21: mol_type = other RNA
taactccttaagcgaatccgc

SEQ ID NO: 52010 - RNA, 21 nt, Synthetic Construct
  source 1..21: mol_type = other RNA
taactccttaagcgaatccgc

SEQ ID NO: 52011 - RNA, 22 nt, Synthetic Construct
  source 1..22: mol_type = other RNA
cccataaagtagaaagcactac

SEQ ID NO: 52012 - RNA, 23 nt, Synthetic Construct
  source 1..23: mol_type = other RNA
ggaggggcagagagcgagacttt

SEQ ID NO: 52013 - RNA, 25 nt, Synthetic Construct
  source 1..25: mol_type = other RNA
gtgaggatatgagatcgagacgaca

SEQ ID NO: 52014 - RNA, 29 nt, Synthetic Construct
  source 1..29: mol_type = other RNA
ttacaggggttcgaatcccctaggggacg

SEQ ID NO: 52015 - RNA, 22 nt, Synthetic Construct
  source 1..22: mol_type = other RNA
ccctgtactgagctgccccgag

SEQ ID NO: 52016 - RNA, 22 nt, Synthetic Construct
  source 1..22: mol_type = other RNA
ccctgtactgagctgccccgag

SEQ ID NO: 52017 - RNA, 31 nt, Synthetic Construct; identical to SEQ ID NO: 2310
  source 1..31: mol_type = other RNA

SEQ ID NO: 52018 - RNA, 31 nt, Synthetic Construct; identical to SEQ ID NO: 2310
  source 1..31: mol_type = other RNA

SEQ ID NO: 52019 - RNA, 25 nt, Synthetic Construct
  source 1..25: mol_type = other RNA
ttgaggatatgagatcgagacgaca

SEQ ID NO: 52020 - RNA, 25 nt, Synthetic Construct
  source 1..25: mol_type = other RNA
ttgaggatatgagatcgagacgaca

SEQ ID NO: 52021 - RNA, 16 nt, Synthetic Construct
  source 1..16: mol_type = other RNA
cccaaaggtcgtcggt

SEQ ID NO: 52022 - RNA, 16 nt, Synthetic Construct
  source 1..16: mol_type = other RNA
cccaaaggtcgtcggt

SEQ ID NO: 52023 - RNA, 21 nt, Synthetic Construct
  source 1..21: mol_type = other RNA
tcccagtaaacggcggccgta

SEQ ID NO: 52024 - RNA, 21 nt, Synthetic Construct
  source 1..21: mol_type = other RNA
tcccagtaaacggcggccgta

SEQ ID NO: 52025 - RNA, 22 nt, Synthetic Construct
  source 1..22: mol_type = other RNA
tgaggtagtaggttgtatagtg

SEQ ID NO: 52026 - RNA, 22 nt, Synthetic Construct
  source 1..22: mol_type = other RNA
cggaatcgctagtaatcgcgga

SEQ ID NO: 52027 - RNA, 22 nt, Synthetic Construct
  source 1..22: mol_type = other RNA
cggaatcgctagtaatcgcgga

SEQ ID NO: 52028 - RNA, 23 nt, Synthetic Construct
  source 1..23: mol_type = other RNA
caaagtgcttacagtgcaggtag

SEQ ID NO: 52029 - RNA, 16 nt, Synthetic Construct
  source 1..16: mol_type = other RNA
gcggtggatgatgtgg

SEQ ID NO: 52030 - RNA, 16 nt, Synthetic Construct
  source 1..16: mol_type = other RNA
gcggtggatgatgtgg

SEQ ID NO: 52031 - RNA, 20 nt, Synthetic Construct
  source 1..20: mol_type = other RNA
agttctacagtccgacgatc

SEQ ID NO: 52032 - RNA, 20 nt, Synthetic Construct
  source 1..20: mol_type = other RNA
agttctacagtccgacgatc

SEQ ID NO: 52033 - RNA, 34 nt, Synthetic Construct; identical to SEQ ID NO: 385
  source 1..34: mol_type = other RNA

SEQ ID NO: 52034 - RNA, 22 nt, Synthetic Construct
  source 1..22: mol_type = other RNA
tcctgtactgtgctgccccgag

SEQ ID NO: 52035 - RNA, 42 nt, Synthetic Construct; identical to SEQ ID NO: 748
  source 1..42: mol_type = other RNA

SEQ ID NO: 52036 - RNA, 21 nt, Synthetic Construct
  source 1..21: mol_type = other RNA
atcacattgccagggatttcc

SEQ ID NO: 52037 - RNA, 21 nt, Synthetic Construct
  source 1..21: mol_type = other RNA
atcacattgccagggatttcc

SEQ ID NO: 52038 - RNA, 22 nt, Synthetic Construct
  source 1..22: mol_type = other RNA
ttgtaccgtgagtaataatgcg

SEQ ID NO: 52039 - RNA, 22 nt, Synthetic Construct
  source 1..22: mol_type = other RNA
tcggatccgtctgagcttggct

SEQ ID NO: 52040 - RNA, 27 nt, Synthetic Construct
  source 1..27: mol_type = other RNA
ccccccactgctaaatctgactggctt

SEQ ID NO: 52041 - RNA, 27 nt, Synthetic Construct
  source 1..27: mol_type = other RNA
ccccccactgctaaatctgactggctt

SEQ ID NO: 52042 - RNA, 22 nt, Synthetic Construct
  source 1..22: mol_type = other RNA
tcctgtactaagctgccccgag

SEQ ID NO: 52043 - RNA, 16 nt, Synthetic Construct
  source 1..16: mol_type = other RNA
gaaattccttgtcggg

SEQ ID NO: 52044 - RNA, 21 nt, Synthetic Construct
  source 1..21: mol_type = other RNA
tcctgtaccgagctgccccga

SEQ ID NO: 52045 - RNA, 23 nt, Synthetic Construct
  source 1..23: mol_type = other RNA
taaggtgcatctagtgcagatag

SEQ ID NO: 52046 - RNA, 22 nt, Synthetic Construct
  source 1..22: mol_type = other RNA
nattgcacttgtcccggcctgt

SEQ ID NO: 52047 - RNA, 22 nt, Synthetic Construct
  source 1..22: mol_type = other RNA
nattgcacttgtcccggcctgt

SEQ ID NO: 52048 - RNA, 23 nt, Synthetic Construct
  source 1..23: mol_type = other RNA
caaagtgctattcgtgcaggtag

SEQ ID NO: 52049 - RNA, 23 nt, Synthetic Construct
  source 1..23: mol_type = other RNA
caaagtgctattcgtgcaggtag

SEQ ID NO: 52050 - RNA, 34 nt, Synthetic Construct; identical to SEQ ID NO: 2298
  source 1..34: mol_type = other RNA

SEQ ID NO: 52051 - RNA, 23 nt, Synthetic Construct
  source 1..23: mol_type = other RNA
tgaggtagcaggttgtgtggttt

SEQ ID NO: 52052 - RNA, 23 nt, Synthetic Construct
  source 1..23: mol_type = other RNA
tgaggtagcaggttgtgtggttt

SEQ ID NO: 52053 - RNA, 17 nt, Synthetic Construct
  source 1..17: mol_type = other RNA
ccaaggggtcgtgggtt

SEQ ID NO: 52054 - RNA, 23 nt, Synthetic Construct
  source 1..23: mol_type = other RNA
caaagtgctgttcgtgcgggtag

SEQ ID NO: 52055 - RNA, 23 nt, Synthetic Construct
  source 1..23: mol_type = other RNA
caaagtgctgttcgtgcgggtag

SEQ ID NO: 52056 - RNA, 22 nt, Synthetic Construct
  source 1..22: mol_type = other RNA
tggaatgtaaagaagcatgtat

SEQ ID NO: 52057 - RNA, 22 nt, Synthetic Construct
  source 1..22: mol_type = other RNA
tggaatgtaaagaagcatgtat

SEQ ID NO: 52058 - RNA, 22 nt, Synthetic Construct
  source 1..22: mol_type = other RNA
tggcagcacgtaaatattggcg

SEQ ID NO: 52059 - RNA, 22 nt, Synthetic Construct
  source 1..22: mol_type = other RNA
tggcagcacgtaaatattggcg

SEQ ID NO: 52060 - RNA, 18 nt, Synthetic Construct
  source 1..18: mol_type = other RNA
gctgtgatggccgagtgg

SEQ ID NO: 52061 - RNA, 18 nt, Synthetic Construct
  source 1..18: mol_type = other RNA
gctgtgatggccgagtgg

SEQ ID NO: 52062 - RNA, 20 nt, Synthetic Construct
  source 1..20: mol_type = other RNA
agctacattgtctgctgggt

SEQ ID NO: 52063 - RNA, 21 nt, Synthetic Construct
  source 1..21: mol_type = other RNA
ttcggaagaaggggtgcctgg

SEQ ID NO: 52064 - RNA, 21 nt, Synthetic Construct
  source 1..21: mol_type = other RNA
ttcggaagaaggggtgcctgg

SEQ ID NO: 52065 - RNA, 22 nt, Synthetic Construct
  source 1..22: mol_type = other RNA
tgtgcaaatccatgcaaaactg

SEQ ID NO: 52066 - RNA, 22 nt, Synthetic Construct
  source 1..22: mol_type = other RNA
tgtgcaaatccatgcaaaactg

SEQ ID NO: 52067 - RNA, 23 nt, Synthetic Construct
  source 1..23: mol_type = other RNA
tacagtactgtgataactgaaga

SEQ ID NO: 52068 - RNA, 23 nt, Synthetic Construct
  source 1..23: mol_type = other RNA
tacagtactgtgataactgaaga

SEQ ID NO: 52069 - RNA, 26 nt, Synthetic Construct
  source 1..26: mol_type = other RNA
tgtccccgcgaggggcccggggcggg

SEQ ID NO: 52070 - RNA, 26 nt, Synthetic Construct
  source 1..26: mol_type = other RNA
tgtccccgcgaggggcccggggcggg

SEQ ID NO: 52071 - RNA, 18 nt, Synthetic Construct
  source 1..18: mol_type = other RNA
atagggaacgtgagctgg

SEQ ID NO: 52072 - RNA, 18 nt, Synthetic Construct
  source 1..18: mol_type = other RNA
atagggaacgtgagctgg

SEQ ID NO: 52073 - RNA, 21 nt, Synthetic Construct
  source 1..21: mol_type = other RNA
tcctgtactgggctgccccga

SEQ ID NO: 52074 - RNA, 21 nt, Synthetic Construct
  source 1..21: mol_type = other RNA
tcctgtactgggctgccccga

SEQ ID NO: 52075 - RNA, 21 nt, Synthetic Construct
  source 1..21: mol_type = other RNA
gctattgacgaccgtaccgca

SEQ ID NO: 52076 - RNA, 22 nt, Synthetic Construct
  source 1..22: mol_type = other RNA
cccagtgttcagactacctgtt

SEQ ID NO: 52077 - RNA, 22 nt, Synthetic Construct
  source 1..22: mol_type = other RNA
cccagtgttcagactacctgtt

SEQ ID NO: 52078 - RNA, 24 nt, Synthetic Construct
  source 1..24: mol_type = other RNA
gttgaattgtggtctgtggacgtg

SEQ ID NO: 52079 - RNA, 24 nt, Synthetic Construct
  source 1..24: mol_type = other RNA
gttgaattgtggtctgtggacgtg

SEQ ID NO: 52080 - RNA, 21 nt, Synthetic Construct
  source 1..21: mol_type = other RNA
ggaggggcagagagcgagact

SEQ ID NO: 52081 - RNA, 21 nt, Synthetic Construct
  source 1..21: mol_type = other RNA
ggaggggcagagagcgagact

SEQ ID NO: 52082 - RNA, 22 nt, Synthetic Construct
  source 1..22: mol_type = other RNA
tgaggtagtgggttgtgtggtt

SEQ ID NO: 52083 - RNA, 25 nt, Synthetic Construct
  source 1..25: mol_type = other RNA
ttcaagtaatccaggataggctttt

SEQ ID NO: 52084 - RNA, 25 nt, Synthetic Construct
  source 1..25: mol_type = other RNA
ttcaagtaatccaggataggctttt

SEQ ID NO: 52085 - RNA, 22 nt, Synthetic Construct
  source 1..22: mol_type = other RNA
tgttggttcaagcgtgtagtcg

SEQ ID NO: 52086 - RNA, 22 nt, Synthetic Construct
  source 1..22: mol_type = other RNA
tgttggttcaagcgtgtagtcg

SEQ ID NO: 52087 - RNA, 25 nt, Synthetic Construct
  source 1..25: mol_type = other RNA
ttcaagtaatccaggataggctttt

SEQ ID NO: 52088 - RNA, 29 nt, Synthetic Construct
  source 1..29: mol_type = other RNA
tgaaggtgggttgtgaagcctgctggagg

SEQ ID NO: 52089 - RNA, 29 nt, Synthetic Construct
  source 1..29: mol_type = other RNA
tgaaggtgggttgtgaagcctgctggagg

SEQ ID NO: 52090 - RNA, 24 nt, Synthetic Construct
  source 1..24: mol_type = other RNA
tgaggtagtaggttgtgtggtttc

SEQ ID NO: 52091 - RNA, 25 nt, Synthetic Construct
  source 1..25: mol_type = other RNA
ggtaaaattgctgagtgaagcattg

SEQ ID NO: 52092 - RNA, 25 nt, Synthetic Construct
  source 1..25: mol_type = other RNA
ggtaaaattgctgagtgaagcattg

SEQ ID NO: 52093 - RNA, 23 nt, Synthetic Construct
  source 1..23: mol_type = other RNA
atgtcccacccccactcctgttt

SEQ ID NO: 52094 - RNA, 23 nt, Synthetic Construct
  source 1..23: mol_type = other RNA
atgtcccacccccactcctgttt

SEQ ID NO: 52095 - RNA, 22 nt, Synthetic Construct
  source 1..22: mol_type = other RNA
tgtggtagtaggttgtatagtt

SEQ ID NO: 52096 - RNA, 22 nt, Synthetic Construct
  source 1..22: mol_type = other RNA
cgaggtagtaggttgtatagtt

SEQ ID NO: 52097 - RNA, 22 nt, Synthetic Construct
  source 1..22: mol_type = other RNA
cgaggtagtaggttgtatagtt

SEQ ID NO: 52098 - RNA, 17 nt, Synthetic Construct
  source 1..17: mol_type = other RNA
agtgacgcgcatgaatg

SEQ ID NO: 52099 - RNA, 17 nt, Synthetic Construct
  source 1..17: mol_type = other RNA
agtgacgcgcatgaatg

SEQ ID NO: 52100 - RNA, 23 nt, Synthetic Construct
  source 1..23: mol_type = other RNA
tgaggtagtaggttgtgtggtct

SEQ ID NO: 52101 - RNA, 23 nt, Synthetic Construct
  source 1..23: mol_type = other RNA
tgaggtagtaggttgtgtggtct

SEQ ID NO: 52102 - RNA, 24 nt, Synthetic Construct
  source 1..24: mol_type = other RNA
tagcttatcagactgatgttgaca

SEQ ID NO: 52103 - RNA, 24 nt, Synthetic Construct
  source 1..24: mol_type = other RNA
tagcttatcagactgatgttgaca

SEQ ID NO: 52104 - RNA, 27 nt, Synthetic Construct
  source 1..27: mol_type = other RNA
gacttaccaaacctatgcaaactccga

SEQ ID NO: 52105 - RNA, 22 nt, Synthetic Construct
  source 1..22: mol_type = other RNA
ncgtaccgtgagtaataatgcg

SEQ ID NO: 52106 - RNA, 23 nt, Synthetic Construct
  source 1..23: mol_type = other RNA
tgaggtagtaggttgtgtggtta

SEQ ID NO: 52107 - RNA, 23 nt, Synthetic Construct
  source 1..23: mol_type = other RNA
tgaggtagtaggttgtgtggtta

SEQ ID NO: 52108 - RNA, 31 nt, Synthetic Construct; identical to SEQ ID NO: 7160
  source 1..31: mol_type = other RNA

SEQ ID NO: 52109 - RNA, 23 nt, Synthetic Construct
  source 1..23: mol_type = other RNA
tcctgtgctgagctgccccgaga

SEQ ID NO: 52110 - RNA, 23 nt, Synthetic Construct
  source 1..23: mol_type = other RNA
tcctgtgctgagctgccccgaga

SEQ ID NO: 52111 - RNA, 22 nt, Synthetic Construct
  source 1..22: mol_type = other RNA
cattgcacctgtctcggtctga

SEQ ID NO: 52112 - RNA, 22 nt, Synthetic Construct
  source 1..22: mol_type = other RNA
cattgcacctgtctcggtctga

SEQ ID NO: 52113 - RNA, 20 nt, Synthetic Construct
  source 1..20: mol_type = other RNA
cgaggtagtaggttgtatag

SEQ ID NO: 52114 - RNA, 20 nt, Synthetic Construct
  source 1..20: mol_type = other RNA
cgaggtagtaggttgtatag

SEQ ID NO: 52115 - RNA, 22 nt, Synthetic Construct
  source 1..22: mol_type = other RNA
catagcacttgtctcggtctga

SEQ ID NO: 52116 - RNA, 22 nt, Synthetic Construct
  source 1..22: mol_type = other RNA
catagcacttgtctcggtctga

SEQ ID NO: 52117 - RNA, 38 nt, Synthetic Construct; identical to SEQ ID NO: 7148
  source 1..38: mol_type = other RNA

SEQ ID NO: 52118 - RNA, 38 nt, Synthetic Construct; identical to SEQ ID NO: 7148
  source 1..38: mol_type = other RNA

SEQ ID NO: 52119 - RNA, 22 nt, Synthetic Construct
  source 1..22: mol_type = other RNA
tgaggtagaaggttgtatagtt

SEQ ID NO: 52120 - RNA, 22 nt, Synthetic Construct
  source 1..22: mol_type = other RNA
tgaggtagaaggttgtatagtt

SEQ ID NO: 52121 - RNA, 18 nt, Synthetic Construct
  source 1..18: mol_type = other RNA
gcaggacggtggccatgg

SEQ ID NO: 52122 - RNA, 18 nt, Synthetic Construct
  source 1..18: mol_type = other RNA
gcaggacggtggccatgg

SEQ ID NO: 52123 - RNA, 22 nt, Synthetic Construct
  source 1..22: mol_type = other RNA
tgaggtagtaatttgtgctgtt

SEQ ID NO: 52124 - RNA, 22 nt, Synthetic Construct
  source 1..22: mol_type = other RNA
tgaggtagtaatttgtgctgtt

SEQ ID NO: 52125 - RNA, 21 nt, Synthetic Construct
  source 1..21: mol_type = other RNA
tggggtagtagattgtatagt

SEQ ID NO: 52126 - RNA, 21 nt, Synthetic Construct
  source 1..21: mol_type = other RNA
tggggtagtagattgtatagt

SEQ ID NO: 52127 - RNA, 16 nt, Synthetic Construct
  source 1..16: mol_type = other RNA
ggtgggggtcgttggt

SEQ ID NO: 52128 - RNA, 16 nt, Synthetic Construct
  source 1..16: mol_type = other RNA
ggtgggggtcgttggt

SEQ ID NO: 52129 - RNA, 15 nt, Synthetic Construct
  source 1..15: mol_type = other RNA
ccgcttttgtcaggg

SEQ ID NO: 52130 - RNA, 15 nt, Synthetic Construct
  source 1..15: mol_type = other RNA
ccgcttttgtcaggg

SEQ ID NO: 52131 - RNA, 22 nt, Synthetic Construct
  source 1..22: mol_type = other RNA
tatcgcacttgtcccggcctgt

SEQ ID NO: 52132 - RNA, 22 nt, Synthetic Construct
  source 1..22: mol_type = other RNA
tatcgcacttgtcccggcctgt

SEQ ID NO: 52133 - RNA, 23 nt, Synthetic Construct
  source 1..23: mol_type = other RNA
ggaggggcagagagcgagacttt

SEQ ID NO: 52134 - RNA, 23 nt, Synthetic Construct
  source 1..23: mol_type = other RNA
atcacattgccagggatttccat

SEQ ID NO: 52135 - RNA, 22 nt, Synthetic Construct
  source 1..22: mol_type = other RNA
tgaggtagtaggtcgtgtggtt

SEQ ID NO: 52136 - RNA, 22 nt, Synthetic Construct
  source 1..22: mol_type = other RNA
tgaggtagtaggtcgtgtggtt

SEQ ID NO: 52137 - RNA, 31 nt, Synthetic Construct; identical to SEQ ID NO: 960
  source 1..31: mol_type = other RNA

SEQ ID NO: 52138 - RNA, 23 nt, Synthetic Construct
  source 1..23: mol_type = other RNA
tgtgcaaatctatgcaaaactga

SEQ ID NO: 52139 - RNA, 23 nt, Synthetic Construct
  source 1..23: mol_type = other RNA
tgtgcaaatctatgcaaaactga

SEQ ID NO: 52140 - RNA, 22 nt, Synthetic Construct
  source 1..22: mol_type = other RNA
tcctgtactgagctgcctcgag

SEQ ID NO: 52141 - RNA, 22 nt, Synthetic Construct
  source 1..22: mol_type = other RNA
tcctgtactgagctgcctcgag

SEQ ID NO: 52142 - RNA, 21 nt, Synthetic Construct
  source 1..21: mol_type = other RNA
tgaggtggtaggttgtatagt

SEQ ID NO: 52143 - RNA, 21 nt, Synthetic Construct
  source 1..21: mol_type = other RNA
tgaggtggtaggttgtatagt

SEQ ID NO: 52144 - RNA, 17 nt, Synthetic Construct
  source 1..17: mol_type = other RNA
accggaggaaggtgggg

SEQ ID NO: 52145 - RNA, 17 nt, Synthetic Construct
  source 1..17: mol_type = other RNA
accggaggaaggtgggg

SEQ ID NO: 52146 - RNA, 23 nt, Synthetic Construct
  source 1..23: mol_type = other RNA
tcctgtactgagctgccccgggt

SEQ ID NO: 52147 - RNA, 22 nt, Synthetic Construct
  source 1..22: mol_type = other RNA
tgaggtagtaggttgtgtagtt

SEQ ID NO: 52148 - RNA, 22 nt, Synthetic Construct
  source 1..22: mol_type = other RNA
tgaggtagtaggttgtgtagtt

SEQ ID NO: 52149 - RNA, 22 nt, Synthetic Construct
  source 1..22: mol_type = other RNA
tattgcacttatcccggcctgt

SEQ ID NO: 52150 - RNA, 22 nt, Synthetic Construct
  source 1..22: mol_type = other RNA
tattgcacttatcccggcctgt

SEQ ID NO: 52151 - RNA, 23 nt, Synthetic Construct
  source 1..23: mol_type = other RNA
caaagtgccgttcgtgcaggtag

SEQ ID NO: 52152 - RNA, 23 nt, Synthetic Construct
  source 1..23: mol_type = other RNA
caaagtgccgttcgtgcaggtag

SEQ ID NO: 52153 - RNA, 21 nt, Synthetic Construct
  source 1..21: mol_type = other RNA
tagcagcacgtaaatattggc

SEQ ID NO: 52154 - RNA, 23 nt, Synthetic Construct
  source 1..23: mol_type = other RNA
tggtaatacgacgtactaagtgt

SEQ ID NO: 52155 - RNA, 23 nt, Synthetic Construct
  source 1..23: mol_type = other RNA
tggtaatacgacgtactaagtgt

SEQ ID NO: 52156 - RNA, 17 nt, Synthetic Construct
  source 1..17: mol_type = other RNA
cctcgcgcgattggagc

SEQ ID NO: 52157 - RNA, 21 nt, Synthetic Construct
  source 1..21: mol_type = other RNA
tcctgtactgagccgccccga

SEQ ID NO: 52158 - RNA, 30 nt, Synthetic Construct; identical to SEQ ID NO: 2407
  source 1..30: mol_type = other RNA

SEQ ID NO: 52159 - RNA, 30 nt, Synthetic Construct; identical to SEQ ID NO: 2407
  source 1..30: mol_type = other RNA

SEQ ID NO: 52160 - RNA, 22 nt, Synthetic Construct
  source 1..22: mol_type = other RNA
tgaggtagtaggttgtgtggtt

SEQ ID NO: 52161 - RNA, 22 nt, Synthetic Construct
  source 1..22: mol_type = other RNA
tgaggtagtaggttgtgtggtt

SEQ ID NO: 52162 - RNA, 25 nt, Synthetic Construct
  source 1..25: mol_type = other RNA
ggtaaaatggctgagtgaagcattg

SEQ ID NO: 52163 - RNA, 28 nt, Synthetic Construct
  source 1..28: mol_type = other RNA
ccccccactgctaaatttgactggcctt

SEQ ID NO: 52164 - RNA, 28 nt, Synthetic Construct
  source 1..28: mol_type = other RNA
ccccccactgctaaatttgactggcctt

SEQ ID NO: 52165 - RNA, 16 nt, Synthetic Construct
  source 1..16: mol_type = other RNA
gtccacggccatacca

SEQ ID NO: 52166 - RNA, 16 nt, Synthetic Construct
  source 1..16: mol_type = other RNA
gtccacggccatacca

SEQ ID NO: 52167 - RNA, 21 nt, Synthetic Construct
  source 1..21: mol_type = other RNA
tgaggtagtaagttgtgtggt

SEQ ID NO: 52168 - RNA, 21 nt, Synthetic Construct
  source 1..21: mol_type = other RNA
tgaggtagtaagttgtgtggt

SEQ ID NO: 52169 - RNA, 22 nt, Synthetic Construct
  source 1..22: mol_type = other RNA
tgttgcacttgtcccggcctgt

SEQ ID NO: 52170 - RNA, 22 nt, Synthetic Construct
  source 1..22: mol_type = other RNA
tgttgcacttgtcccggcctgt

SEQ ID NO: 52171 - RNA, 23 nt, Synthetic Construct
  source 1..23: mol_type = other RNA
aacggaatcccaaaagcagctgt

SEQ ID NO: 52172 - RNA, 32 nt, Synthetic Construct; identical to SEQ ID NO: 14681
  source 1..32: mol_type = other RNA

SEQ ID NO: 52173 - RNA, 32 nt, Synthetic Construct; identical to SEQ ID NO: 14681
  source 1..32: mol_type = other RNA

SEQ ID NO: 52174 - RNA, 21 nt, Synthetic Construct
  source 1..21: mol_type = other RNA
tggctcagttcagcaggaaca

SEQ ID NO: 52175 - RNA, 37 nt, Synthetic Construct; identical to SEQ ID NO: 2211
  source 1..37: mol_type = other RNA

SEQ ID NO: 52176 - RNA, 37 nt, Synthetic Construct; identical to SEQ ID NO: 2211
  source 1..37: mol_type = other RNA

SEQ ID NO: 52177 - RNA, 17 nt, Synthetic Construct
  source 1..17: mol_type = other RNA
tcgctagtaatcgcgga

SEQ ID NO: 52178 - RNA, 21 nt, Synthetic Construct
  source 1..21: mol_type = other RNA
tgaggaagtaggttgtgtggt

SEQ ID NO: 52179 - RNA, 22 nt, Synthetic Construct
  source 1..22: mol_type = other RNA
tgaggtagtagattgtatagta

SEQ ID NO: 52180 - RNA, 22 nt, Synthetic Construct
  source 1..22: mol_type = other RNA
tgaggtagtagattgtatagta

SEQ ID NO: 52181 - RNA, 22 nt, Synthetic Construct
  source 1..22: mol_type = other RNA
cgaggtagtaggttgtgtggtt

SEQ ID NO: 52182 - RNA, 22 nt, Synthetic Construct
  source 1..22: mol_type = other RNA
cgaggtagtaggttgtgtggtt

SEQ ID NO: 52183 - RNA, 22 nt, Synthetic Construct
  source 1..22: mol_type = other RNA
cattgcacctgtctcggtctga

SEQ ID NO: 52184 - RNA, 25 nt, Synthetic Construct
  source 1..25: mol_type = other RNA
tgcgagagtaggacgttgccaggtt

SEQ ID NO: 52185 - RNA, 25 nt, Synthetic Construct
  source 1..25: mol_type = other RNA
tgcgagagtaggacgttgccaggtt

SEQ ID NO: 52186 - RNA, 21 nt, Synthetic Construct
  source 1..21: mol_type = other RNA
tttgttcgttcggctcgcgtg

SEQ ID NO: 52187 - RNA, 21 nt, Synthetic Construct
  source 1..21: mol_type = other RNA
tttgttcgttcggctcgcgtg

SEQ ID NO: 52188 - RNA, 23 nt, Synthetic Construct
  source 1..23: mol_type = other RNA
caaagtgctgttcgtgcagatag

SEQ ID NO: 52189 - RNA, 23 nt, Synthetic Construct
  source 1..23: mol_type = other RNA
caaagtgctgttcgtgcagatag

SEQ ID NO: 52190 - RNA, 23 nt, Synthetic Construct
  source 1..23: mol_type = other RNA
tgaggcagtaggttgtgtggttt

SEQ ID NO: 52191 - RNA, 23 nt, Synthetic Construct
  source 1..23: mol_type = other RNA
tgaggcagtaggttgtgtggttt

SEQ ID NO: 52192 - RNA, 24 nt, Synthetic Construct
  source 1..24: mol_type = other RNA
tctctcggctcctcgcggctcgct

SEQ ID NO: 52193 - RNA, 24 nt, Synthetic Construct
  source 1..24: mol_type = other RNA
tctctcggctcctcgcggctcgct

SEQ ID NO: 52194 - RNA, 25 nt, Synthetic Construct
  source 1..25: mol_type = other RNA
aaaccgttaccattactgagtttag

SEQ ID NO: 52195 - RNA, 16 nt, Synthetic Construct
  source 1..16: mol_type = other RNA
ctgacgctcatgcacg

SEQ ID NO: 52196 - RNA, 16 nt, Synthetic Construct
  source 1..16: mol_type = other RNA
ctgacgctcatgcacg

SEQ ID NO: 52197 - RNA, 18 nt, Synthetic Construct
  source 1..18: mol_type = other RNA
accggaggaaggtgggga

SEQ ID NO: 52198 - RNA, 22 nt, Synthetic Construct
  source 1..22: mol_type = other RNA
taaggtagtaggttgtgtggtt

SEQ ID NO: 52199 - RNA, 22 nt, Synthetic Construct
  source 1..22: mol_type = other RNA
taaggtagtaggttgtgtggtt

SEQ ID NO: 52200 - RNA, 23 nt, Synthetic Construct
  source 1..23: mol_type = other RNA
gactatagaactttccccctcat

SEQ ID NO: 52201 - RNA, 23 nt, Synthetic Construct
  source 1..23: mol_type = other RNA
gactatagaactttccccctcat

SEQ ID NO: 52202 - RNA, 21 nt, Synthetic Construct
  source 1..21: mol_type = other RNA
cgtaccgtgagtaataatgtg

SEQ ID NO: 52203 - RNA, 21 nt, Synthetic Construct
  source 1..21: mol_type = other RNA
cgtaccgtgagtaataatgtg

SEQ ID NO: 52204 - RNA, 22 nt, Synthetic Construct
  source 1..22: mol_type = other RNA
tgagatagtaggttgtgtggtt

SEQ ID NO: 52205 - RNA, 22 nt, Synthetic Construct
  source 1..22: mol_type = other RNA
tgagatagtaggttgtgtggtt

SEQ ID NO: 52206 - RNA, 22 nt, Synthetic Construct
  source 1..22: mol_type = other RNA
agggggaaagttctatagtcct

SEQ ID NO: 52207 - RNA, 22 nt, Synthetic Construct
  source 1..22: mol_type = other RNA
agggggaaagttctatagtcct

SEQ ID NO: 52208 - RNA, 23 nt, Synthetic Construct
  source 1..23: mol_type = other RNA
tgaggtagtaggttgtgtggtaa

SEQ ID NO: 52209 - RNA, 23 nt, Synthetic Construct
  source 1..23: mol_type = other RNA
tgaggtagtaggttgtgtggtaa

SEQ ID NO: 52210 - RNA, 22 nt, Synthetic Construct
  source 1..22: mol_type = other RNA
tattgcatttgtcccggcctgt

SEQ ID NO: 52211 - RNA, 16 nt, Synthetic Construct
  source 1..16: mol_type = other RNA
cacaccgcccgtcgct

SEQ ID NO: 52212 - RNA, 16 nt, Synthetic Construct
  source 1..16: mol_type = other RNA
cacaccgcccgtcgct

SEQ ID NO: 52213 - RNA, 19 nt, Synthetic Construct
  source 1..19: mol_type = other RNA
gtactgacgctcatgcacg

SEQ ID NO: 52214 - RNA, 19 nt, Synthetic Construct
  source 1..19: mol_type = other RNA
gtactgacgctcatgcacg

SEQ ID NO: 52215 - RNA, 24 nt, Synthetic Construct
  source 1..24: mol_type = other RNA
gatgaggcgtgataacgagtctgc

SEQ ID NO: 52216 - RNA, 16 nt, Synthetic Construct
  source 1..16: mol_type = other RNA
gtctacggccacacca

SEQ ID NO: 52217 - RNA, 16 nt, Synthetic Construct
  source 1..16: mol_type = other RNA
gtctacggccacacca

SEQ ID NO: 52218 - RNA, 23 nt, Synthetic Construct
  source 1..23: mol_type = other RNA
tgaggtagtaggttgcgtggttt

SEQ ID NO: 52219 - RNA, 23 nt, Synthetic Construct
  source 1..23: mol_type = other RNA
tgaggtagtaggttgcgtggttt

SEQ ID NO: 52220 - RNA, 22 nt, Synthetic Construct
  source 1..22: mol_type = other RNA
tagcagcacgtaaacattggcg

SEQ ID NO: 52221 - RNA, 22 nt, Synthetic Construct
  source 1..22: mol_type = other RNA
tggaatgtaaagaagtatgtac

SEQ ID NO: 52222 - RNA, 22 nt, Synthetic Construct
  source 1..22: mol_type = other RNA
tggaatgtaaagaagtatgtac

SEQ ID NO: 52223 - RNA, 21 nt, Synthetic Construct
  source 1..21: mol_type = other RNA
ggaggggcagagagcgagact

SEQ ID NO: 52224 - RNA, 21 nt, Synthetic Construct
  source 1..21: mol_type = other RNA
ggaggggcagagagcgagact

SEQ ID NO: 52225 - RNA, 22 nt, Synthetic Construct
  source 1..22: mol_type = other RNA
tacaagtaattcaggataggtt

SEQ ID NO: 52226 - RNA, 16 nt, Synthetic Construct
  source 1..16: mol_type = other RNA
tcgtgacgatagtgca

SEQ ID NO: 52227 - RNA, 22 nt, Synthetic Construct
  source 1..22: mol_type = other RNA
ttcaagtaatccaggataggtt

SEQ ID NO: 52228 - RNA, 21 nt, Synthetic Construct
  source 1..21: mol_type = other RNA
ttcaagtaattcaggataggt

SEQ ID NO: 52229 - RNA, 23 nt, Synthetic Construct
  source 1..23: mol_type = other RNA
tgtcggtttgtcaaataccccaa

SEQ ID NO: 52230 - RNA, 22 nt, Synthetic Construct
  source 1..22: mol_type = other RNA
tgaggtagtaggttgtttagtt

SEQ ID NO: 52231 - RNA, 22 nt, Synthetic Construct
  source 1..22: mol_type = other RNA
tgaggtagtaggttgtttagtt

SEQ ID NO: 52232 - RNA, 18 nt, Synthetic Construct
  source 1..18: mol_type = other RNA
gcgaaattccttgtcggg

SEQ ID NO: 52233 - RNA, 18 nt, Synthetic Construct
  source 1..18: mol_type = other RNA
gcgaaattccttgtcggg

SEQ ID NO: 52234 - RNA, 21 nt, Synthetic Construct
  source 1..21: mol_type = other RNA
tcctgtactgagctgccctga

SEQ ID NO: 52235 - RNA, 34 nt, Synthetic Construct; identical to SEQ ID NO: 6757
  source 1..34: mol_type = other RNA

SEQ ID NO: 52236 - RNA, 34 nt, Synthetic Construct; identical to SEQ ID NO: 6757
  source 1..34: mol_type = other RNA

SEQ ID NO: 52237 - RNA, 22 nt, Synthetic Construct
  source 1..22: mol_type = other RNA
tcctgtactgagctgccctgag

SEQ ID NO: 52238 - RNA, 22 nt, Synthetic Construct
  source 1..22: mol_type = other RNA
tcctgtactgagctgccctgag

SEQ ID NO: 52239 - RNA, 25 nt, Synthetic Construct
  source 1..25: mol_type = other RNA
ttgaggatatgagatcgagacaaca

SEQ ID NO: 52240 - RNA, 18 nt, Synthetic Construct
  source 1..18: mol_type = other RNA
cgactcttagcggtggat

SEQ ID NO: 52241 - RNA, 18 nt, Synthetic Construct
  source 1..18: mol_type = other RNA
cgactcttagcggtggat

SEQ ID NO: 52242 - RNA, 21 nt, Synthetic Construct
  source 1..21: mol_type = other RNA
tcctgtactgagctgcctcga

SEQ ID NO: 52243 - RNA, 21 nt, Synthetic Construct
  source 1..21: mol_type = other RNA
tcctgtactgagctgcctcga

SEQ ID NO: 52244 - RNA, 15 nt, Synthetic Construct
  source 1..15: mol_type = other RNA
gcagagcgtcggtct

SEQ ID NO: 52245 - RNA, 15 nt, Synthetic Construct
  source 1..15: mol_type = other RNA
gcagagcgtcggtct

SEQ ID NO: 52246 - RNA, 22 nt, Synthetic Construct
  source 1..22: mol_type = other RNA
cccataaagtagaaagcactac

SEQ ID NO: 52247 - RNA, 32 nt, Synthetic Construct; identical to SEQ ID NO: 5582
  source 1..32: mol_type = other RNA

SEQ ID NO: 52248 - RNA, 21 nt, Synthetic Construct
  source 1..21: mol_type = other RNA
cggagtgtgacaatggtgttt

SEQ ID NO: 52249 - RNA, 21 nt, Synthetic Construct
  source 1..21: mol_type = other RNA
cggagtgtgacaatggtgttt

SEQ ID NO: 52250 - RNA, 20 nt, Synthetic Construct
  source 1..20: mol_type = other RNA
tgaggtagtgggttgtgtgg

SEQ ID NO: 52251 - RNA, 20 nt, Synthetic Construct
  source 1..20: mol_type = other RNA
tgaggtagtgggttgtgtgg

SEQ ID NO: 52252 - RNA, 25 nt, Synthetic Construct
  source 1..25: mol_type = other RNA
ttgaggatatgagatcgagacgacg

SEQ ID NO: 52253 - RNA, 21 nt, Synthetic Construct
  source 1..21: mol_type = other RNA
tcctgtactgagccgccccga

SEQ ID NO: 52254 - RNA, 21 nt, Synthetic Construct
  source 1..21: mol_type = other RNA
tcctgtactgagccgccccga

SEQ ID NO: 52255 - RNA, 15 nt, Synthetic Construct
  source 1..15: mol_type = other RNA
cccagaaacccggtc

SEQ ID NO: 52256 - RNA, 23 nt, Synthetic Construct
  source 1..23: mol_type = other RNA
tgaggtagtaggttgcgtggttt

SEQ ID NO: 52257 - RNA, 17 nt, Synthetic Construct
  source 1..17: mol_type = other RNA
tcgctagtaatcgcgga

SEQ ID NO: 52258 - RNA, 17 nt, Synthetic Construct
  source 1..17: mol_type = other RNA
tcgctagtaatcgcgga

SEQ ID NO: 52259 - RNA, 15 nt, Synthetic Construct
  source 1..15: mol_type = other RNA
tccggatcgtagtct

SEQ ID NO: 52260 - RNA, 15 nt, Synthetic Construct
  source 1..15: mol_type = other RNA
tccggatcgtagtct

SEQ ID NO: 52261 - RNA, 36 nt, Synthetic Construct; identical to SEQ ID NO: 1213
  source 1..36: mol_type = other RNA

SEQ ID NO: 52262 - RNA, 20 nt, Synthetic Construct
  source 1..20: mol_type = other RNA
cccagtaaacggcggccgta

SEQ ID NO: 52263 - RNA, 20 nt, Synthetic Construct
  source 1..20: mol_type = other RNA
cccagtaaacggcggccgta

SEQ ID NO: 52264 - RNA, 36 nt, Synthetic Construct; identical to SEQ ID NO: 777
  source 1..36: mol_type = other RNA

SEQ ID NO: 52265 - RNA, 27 nt, Synthetic Construct
  source 1..27: mol_type = other RNA
ccccccactgctaaatttgaccggctt

SEQ ID NO: 52266 - RNA, 27 nt, Synthetic Construct
  source 1..27: mol_type = other RNA
ccccccactgctaaatttgaccggctt

SEQ ID NO: 52267 - RNA, 22 nt, Synthetic Construct
  source 1..22: mol_type = other RNA
tgaggtagtagtttgtgttgtt

SEQ ID NO: 52268 - RNA, 22 nt, Synthetic Construct
  source 1..22: mol_type = other RNA
tgaggtagtagtttgtgttgtt

SEQ ID NO: 52269 - RNA, 22 nt, Synthetic Construct
  source 1..22: mol_type = other RNA
gctcttgactgaagtcccagta

SEQ ID NO: 52270 - RNA, 22 nt, Synthetic Construct
  source 1..22: mol_type = other RNA
taactccttaagcgaatctcgc

SEQ ID NO: 52271 - RNA, 22 nt, Synthetic Construct
  source 1..22: mol_type = other RNA
taactccttaagcgaatctcgc

SEQ ID NO: 52272 - RNA, 22 nt, Synthetic Construct
  source 1..22: mol_type = other RNA
tgaggtagtagattgtatagtc

SEQ ID NO: 52273 - RNA, 22 nt, Synthetic Construct
  source 1..22: mol_type = other RNA
tgaggtagtagattgtatagtc

SEQ ID NO: 52274 - RNA, 21 nt, Synthetic Construct
  source 1..21: mol_type = other RNA
ttctgtactgagctgccccga

SEQ ID NO: 52275 - RNA, 35 nt, Synthetic Construct; identical to SEQ ID NO: 2452
  source 1..35: mol_type = other RNA

SEQ ID NO: 52276 - RNA, 35 nt, Synthetic Construct; identical to SEQ ID NO: 2452
  source 1..35: mol_type = other RNA

SEQ ID NO: 52277 - RNA, 28 nt, Synthetic Construct
  source 1..28: mol_type = other RNA
ccgtgtgaaagtaggtcatcgtcaggct

SEQ ID NO: 52278 - RNA, 28 nt, Synthetic Construct
  source 1..28: mol_type = other RNA
ccgtgtgaaagtaggtcatcgtcaggct

SEQ ID NO: 52279 - RNA, 22 nt, Synthetic Construct
  source 1..22: mol_type = other RNA
tgagatagtagtttgtgctgtt

SEQ ID NO: 52280 - RNA, 22 nt, Synthetic Construct
  source 1..22: mol_type = other RNA
tgagatagtagtttgtgctgtt

SEQ ID NO: 52281 - RNA, 23 nt, Synthetic Construct
  source 1..23: mol_type = other RNA
taccacagggtagaaccacggac

SEQ ID NO: 52282 - RNA, 23 nt, Synthetic Construct
  source 1..23: mol_type = other RNA
taccacagggtagaaccacggac

SEQ ID NO: 52283 - RNA, 16 nt, Synthetic Construct
  source 1..16: mol_type = other RNA
ggcgggggtcgctggt

SEQ ID NO: 52284 - RNA, 16 nt, Synthetic Construct
  source 1..16: mol_type = other RNA
ggcgggggtcgctggt

SEQ ID NO: 52285 - RNA, 23 nt, Synthetic Construct
  source 1..23: mol_type = other RNA
tgaggggcagagagcgggacttt

SEQ ID NO: 52286 - RNA, 33 nt, Synthetic Construct; identical to SEQ ID NO: 2386
  source 1..33: mol_type = other RNA

SEQ ID NO: 52287 - RNA, 33 nt, Synthetic Construct; identical to SEQ ID NO: 2386
  source 1..33: mol_type = other RNA

SEQ ID NO: 52288 - RNA, 21 nt, Synthetic Construct
  source 1..21: mol_type = other RNA
tactccttaagcgaatctcgc

SEQ ID NO: 52289 - RNA, 21 nt, Synthetic Construct
  source 1..21: mol_type = other RNA
tactccttaagcgaatctcgc

SEQ ID NO: 52290 - RNA, 19 nt, Synthetic Construct
  source 1..19: mol_type = other RNA
gtacagtactgtgataact

SEQ ID NO: 52291 - RNA, 19 nt, Synthetic Construct
  source 1..19: mol_type = other RNA
gtacagtactgtgataact

SEQ ID NO: 52292 - RNA, 25 nt, Synthetic Construct
  source 1..25: mol_type = other RNA
ttgaggatatgaggtcgagacgaca

SEQ ID NO: 52293 - RNA, 22 nt, Synthetic Construct
  source 1..22: mol_type = other RNA
tgtggtagtaggttgtgtggtt

SEQ ID NO: 52294 - RNA, 23 nt, Synthetic Construct
  source 1..23: mol_type = other RNA
ggcggttatgcaagacagaggtg

SEQ ID NO: 52295 - RNA, 22 nt, Synthetic Construct
  source 1..22: mol_type = other RNA
tagcagcacataaatattggcg

SEQ ID NO: 52296 - RNA, 22 nt, Synthetic Construct
  source 1..22: mol_type = other RNA
tagcagcacataaatattggcg

SEQ ID NO: 52297 - RNA, 33 nt, Synthetic Construct; identical to SEQ ID NO: 2386
  source 1..33: mol_type = other RNA

SEQ ID NO: 52298 - RNA, 33 nt, Synthetic Construct; identical to SEQ ID NO: 2386
  source 1..33: mol_type = other RNA

SEQ ID NO: 52299 - RNA, 21 nt, Synthetic Construct
  source 1..21: mol_type = other RNA
actcggcgtggcgtcggtcgt

SEQ ID NO: 52300 - RNA, 21 nt, Synthetic Construct
  source 1..21: mol_type = other RNA
actcggcgtggcgtcggtcgt

SEQ ID NO: 52301 - RNA, 22 nt, Synthetic Construct
  source 1..22: mol_type = other RNA
tgaggtagtaggtagtgtggtt

SEQ ID NO: 52302 - RNA, 22 nt, Synthetic Construct
  source 1..22: mol_type = other RNA
tgaggtagtaggtagtgtggtt

SEQ ID NO: 52303 - RNA, 34 nt, Synthetic Construct; identical to SEQ ID NO: 749
  source 1..34: mol_type = other RNA

SEQ ID NO: 52304 - RNA, 34 nt, Synthetic Construct; identical to SEQ ID NO: 749
  source 1..34: mol_type = other RNA

SEQ ID NO: 52305 - RNA, 20 nt, Synthetic Construct
  source 1..20: mol_type = other RNA
tagcttatcagactgatgtt

SEQ ID NO: 52306 - RNA, 42 nt, Synthetic Construct; identical to SEQ ID NO: 19836
  source 1..42: mol_type = other RNA

SEQ ID NO: 52307 - RNA, 15 nt, Synthetic Construct
  source 1..15: mol_type = other RNA
gagagcctggacaca

SEQ ID NO: 52308 - RNA, 15 nt, Synthetic Construct
  source 1..15: mol_type = other RNA
gagagcctggacaca

SEQ ID NO: 52309 - RNA, 22 nt, Synthetic Construct
  source 1..22: mol_type = other RNA
taaggtagtagtttgtgctgtt

SEQ ID NO: 52310 - RNA, 22 nt, Synthetic Construct
  source 1..22: mol_type = other RNA
taaggtagtagtttgtgctgtt

SEQ ID NO: 52311 - RNA, 18 nt, Synthetic Construct
  source 1..18: mol_type = other RNA
gtcgacgtatagggtgtg

SEQ ID NO: 52312 - RNA, 23 nt, Synthetic Construct
  source 1..23: mol_type = other RNA
tgaggtagtaggttgtgtggtct

SEQ ID NO: 52313 - RNA, 23 nt, Synthetic Construct
  source 1..23: mol_type = other RNA
tggtaatacgacgtacttagtgc

SEQ ID NO: 52314 - RNA, 20 nt, Synthetic Construct
  source 1..20: mol_type = other RNA
gtcagtttgtcaaatacccc

SEQ ID NO: 52315 - RNA, 20 nt, Synthetic Construct
  source 1..20: mol_type = other RNA
gtcagtttgtcaaatacccc

SEQ ID NO: 52316 - RNA, 22 nt, Synthetic Construct
  source 1..22: mol_type = other RNA
atcacattgccagggatttcca

SEQ ID NO: 52317 - RNA, 19 nt, Synthetic Construct
  source 1..19: mol_type = other RNA
gcgaaattccttgtcgggt

SEQ ID NO: 52318 - RNA, 19 nt, Synthetic Construct
  source 1..19: mol_type = other RNA
gcgaaattccttgtcgggt

SEQ ID NO: 52319 - RNA, 15 nt, Synthetic Construct
  source 1..15: mol_type = other RNA
gctagtaatcgcgga

SEQ ID NO: 52320 - RNA, 15 nt, Synthetic Construct
  source 1..15: mol_type = other RNA
gctagtaatcgcgga

SEQ ID NO: 52321 - RNA, 23 nt, Synthetic Construct
  source 1..23: mol_type = other RNA
tgaagggcagagagcgagacttt

SEQ ID NO: 52322 - RNA, 23 nt, Synthetic Construct
  source 1..23: mol_type = other RNA
tgaagggcagagagcgagacttt

SEQ ID NO: 52323 - RNA, 22 nt, Synthetic Construct
  source 1..22: mol_type = other RNA
tattgcacttgtcccggcccgt

SEQ ID NO: 52324 - RNA, 16 nt, Synthetic Construct
  source 1..16: mol_type = other RNA
gtctgcggccatacca

SEQ ID NO: 52325 - RNA, 16 nt, Synthetic Construct
  source 1..16: mol_type = other RNA
gtctgcggccatacca

SEQ ID NO: 52326 - RNA, 22 nt, Synthetic Construct
  source 1..22: mol_type = other RNA
cattgcacttgcctcggtctga

SEQ ID NO: 52327 - RNA, 22 nt, Synthetic Construct
  source 1..22: mol_type = other RNA
aatggcgccactagggttgtgt

SEQ ID NO: 52328 - RNA, 22 nt, Synthetic Construct
  source 1..22: mol_type = other RNA
tagcagcacgtaaatactggcg

SEQ ID NO: 52329 - RNA, 23 nt, Synthetic Construct
  source 1..23: mol_type = other RNA
caaagagctgttcgtgcaggtag

SEQ ID NO: 52330 - RNA, 23 nt, Synthetic Construct
  source 1..23: mol_type = other RNA
tggtaatacgacgtacttagcgt

SEQ ID NO: 52331 - RNA, 23 nt, Synthetic Construct
  source 1..23: mol_type = other RNA
tggtaatacgacgtacttagcgt

SEQ ID NO: 52332 - RNA, 24 nt, Synthetic Construct
  source 1..24: mol_type = other RNA
ttcaagtaatccaggataggcttt

SEQ ID NO: 52333 - RNA, 15 nt, Synthetic Construct
  source 1..15: mol_type = other RNA
cgagtgacgtagtgt

SEQ ID NO: 52334 - RNA, 15 nt, Synthetic Construct
  source 1..15: mol_type = other RNA
cgagtgacgtagtgt

SEQ ID NO: 52335 - RNA, 15 nt, Synthetic Construct
  source 1..15: mol_type = other RNA
tcagtagctcgagga

SEQ ID NO: 52336 - RNA, 15 nt, Synthetic Construct
  source 1..15: mol_type = other RNA
tcagtagctcgagga

SEQ ID NO: 52337 - RNA, 36 nt, Synthetic Construct; identical to SEQ ID NO: 2444
  source 1..36: mol_type = other RNA

SEQ ID NO: 52338 - RNA, 16 nt, Synthetic Construct
  source 1..16: mol_type = other RNA
aggtcatcgtcaggct

SEQ ID NO: 52339 - RNA, 21 nt, Synthetic Construct
  source 1..21: mol_type = other RNA
tggagcgtgacaatggtgttt

SEQ ID NO: 52340 - RNA, 21 nt, Synthetic Construct
  source 1..21: mol_type = other RNA
tggagcgtgacaatggtgttt

SEQ ID NO: 52341 - RNA, 23 nt, Synthetic Construct
  source 1..23: mol_type = other RNA
agcagcattgtacagggctacga

SEQ ID NO: 52342 - RNA, 23 nt, Synthetic Construct
  source 1..23: mol_type = other RNA
agcagcattgtacagggctacga

SEQ ID NO: 52343 - RNA, 23 nt, Synthetic Construct
  source 1..23: mol_type = other RNA
tgtgcaaatctatgcaaaactga

SEQ ID NO: 52344 - RNA, 23 nt, Synthetic Construct
  source 1..23: mol_type = other RNA
tgtgcaaatctatgcaaaactga

SEQ ID NO: 52345 - RNA, 23 nt, Synthetic Construct
  source 1..23: mol_type = other RNA
tagcttatcagactgatgttgaa

SEQ ID NO: 52346 - RNA, 23 nt, Synthetic Construct
  source 1..23: mol_type = other RNA
tagcttatcagactgatgttgaa

SEQ ID NO: 52347 - RNA, 22 nt, Synthetic Construct
  source 1..22: mol_type = other RNA
catcgcacttgtctcggtctga

SEQ ID NO: 52348 - RNA, 22 nt, Synthetic Construct
  source 1..22: mol_type = other RNA
catcgcacttgtctcggtctga

SEQ ID NO: 52349 - RNA, 21 nt, Synthetic Construct
  source 1..21: mol_type = other RNA
tgaggtagtaggttgtgcggt

SEQ ID NO: 52350 - RNA, 21 nt, Synthetic Construct
  source 1..21: mol_type = other RNA
tgaggtagtaggttgtgcggt

SEQ ID NO: 52351 - RNA, 16 nt, Synthetic Construct
  source 1..16: mol_type = other RNA
aggtcatcattatctg

SEQ ID NO: 52352 - RNA, 16 nt, Synthetic Construct
  source 1..16: mol_type = other RNA
aggtcatcattatctg

SEQ ID NO: 52353 - RNA, 25 nt, Synthetic Construct
  source 1..25: mol_type = other RNA
gagaaagctcacaagaactgctaac

SEQ ID NO: 52354 - RNA, 25 nt, Synthetic Construct
  source 1..25: mol_type = other RNA
gagaaagctcacaagaactgctaac

SEQ ID NO: 52355 - RNA, 22 nt, Synthetic Construct
  source 1..22: mol_type = other RNA
tcctgtactgagttgccccgag

SEQ ID NO: 52356 - RNA, 22 nt, Synthetic Construct
  source 1..22: mol_type = other RNA
tcctgtactgagttgccccgag

SEQ ID NO: 52357 - RNA, 22 nt, Synthetic Construct
  source 1..22: mol_type = other RNA
ggtcggcccacggccctggcgg

SEQ ID NO: 52358 - RNA, 22 nt, Synthetic Construct
  source 1..22: mol_type = other RNA
ggtcggcccacggccctggcgg

SEQ ID NO: 52359 - RNA, 31 nt, Synthetic Construct; identical to SEQ ID NO: 5943
  source 1..31: mol_type = other RNA

SEQ ID NO: 52360 - RNA, 21 nt, Synthetic Construct
  source 1..21: mol_type = other RNA
cgtaccgtgggtaataatgcg

SEQ ID NO: 52361 - RNA, 21 nt, Synthetic Construct
  source 1..21: mol_type = other RNA
cgtaccgtgggtaataatgcg

SEQ ID NO: 52362 - RNA, 20 nt, Synthetic Construct
  source 1..20: mol_type = other RNA
tcagtagctcgaggaaaaga

SEQ ID NO: 52363 - RNA, 22 nt, Synthetic Construct
  source 1..22: mol_type = other RNA
tgaggtaatagtttgtgctgtt

SEQ ID NO: 52364 - RNA, 22 nt, Synthetic Construct
  source 1..22: mol_type = other RNA
tcctgtactgaactgccccgag

SEQ ID NO: 52365 - RNA, 22 nt, Synthetic Construct
  source 1..22: mol_type = other RNA
tattgcacttgtcccggcctgc

SEQ ID NO: 52366 - RNA, 22 nt, Synthetic Construct
  source 1..22: mol_type = other RNA
tattgcacttgtcccggcctgc

SEQ ID NO: 52367 - RNA, 18 nt, Synthetic Construct
  source 1..18: mol_type = other RNA
gtcaggatggccgagcgg

SEQ ID NO: 52368 - RNA, 18 nt, Synthetic Construct
  source 1..18: mol_type = other RNA
gtcaggatggccgagcgg

SEQ ID NO: 52369 - RNA, 27 nt, Synthetic Construct
  source 1..27: mol_type = other RNA
atagtctttgttcgattccgttgagta

SEQ ID NO: 52370 - RNA, 27 nt, Synthetic Construct
  source 1..27: mol_type = other RNA
atagtctttgttcgattccgttgagta

SEQ ID NO: 52371 - RNA, 23 nt, Synthetic Construct
  source 1..23: mol_type = other RNA
cgcgacctcagatcagacgtggc

SEQ ID NO: 52372 - RNA, 23 nt, Synthetic Construct
  source 1..23: mol_type = other RNA
cgcgacctcagatcagacgtggc

SEQ ID NO: 52373 - RNA, 16 nt, Synthetic Construct
  source 1..16: mol_type = other RNA
tggagtgtgacaatgg

SEQ ID NO: 52374 - RNA, 16 nt, Synthetic Construct
  source 1..16: mol_type = other RNA
tggagtgtgacaatgg

SEQ ID NO: 52375 - RNA, 20 nt, Synthetic Construct
  source 1..20: mol_type = other RNA
tgaggtagtaggttgtgtga

SEQ ID NO: 52376 - RNA, 20 nt, Synthetic Construct
  source 1..20: mol_type = other RNA
tgaggtagtaggttgtgtga

SEQ ID NO: 52377 - RNA, 22 nt, Synthetic Construct
  source 1..22: mol_type = other RNA
tatagcacttgtcccggcctgt

SEQ ID NO: 52378 - RNA, 22 nt, Synthetic Construct
  source 1..22: mol_type = other RNA
tatagcacttgtcccggcctgt

SEQ ID NO: 52379 - RNA, 22 nt, Synthetic Construct
  source 1..22: mol_type = other RNA
tgaggcagtagattgtatagtt

SEQ ID NO: 52380 - RNA, 22 nt, Synthetic Construct
  source 1..22: mol_type = other RNA
tgaggcagtagattgtatagtt

SEQ ID NO: 52381 - RNA, 21 nt, Synthetic Construct
  source 1..21: mol_type = other RNA
cataaagtagaaagcactact

SEQ ID NO: 52382 - RNA, 23 nt, Synthetic Construct
  source 1..23: mol_type = other RNA
tgaggggcagagggcgagacttt

SEQ ID NO: 52383 - RNA, 23 nt, Synthetic Construct
  source 1..23: mol_type = other RNA
tgaggggcagagggcgagacttt

SEQ ID NO: 52384 - RNA, 16 nt, Synthetic Construct
  source 1..16: mol_type = other RNA
gtcaacggccatacca

SEQ ID NO: 52385 - RNA, 16 nt, Synthetic Construct
  source 1..16: mol_type = other RNA
gtcaacggccatacca

SEQ ID NO: 52386 - RNA, 22 nt, Synthetic Construct
  source 1..22: mol_type = other RNA
taactccttaagcgaatctcgc

SEQ ID NO: 52387 - RNA, 22 nt, Synthetic Construct
  source 1..22: mol_type = other RNA
taactccttaagcgaatctcgc

SEQ ID NO: 52388 - RNA, 21 nt, Synthetic Construct
  source 1..21: mol_type = other RNA
tgaggtagtggattgtatagt

SEQ ID NO: 52389 - RNA, 21 nt, Synthetic Construct
  source 1..21: mol_type = other RNA
tgaggtagtggattgtatagt

SEQ ID NO: 52390 - RNA, 20 nt, Synthetic Construct
  source 1..20: mol_type = other RNA
tacagtatagatgatgtact

SEQ ID NO: 52391 - RNA, 22 nt, Synthetic Construct
  source 1..22: mol_type = other RNA
tgaggtagtagtttgtggtgtt

SEQ ID NO: 52392 - RNA, 22 nt, Synthetic Construct
  source 1..22: mol_type = other RNA
tgaggtagtagtttgtggtgtt

SEQ ID NO: 52393 - RNA, 20 nt, Synthetic Construct
  source 1..20: mol_type = other RNA
tgaggtagtagtttgtacag

SEQ ID NO: 52394 - RNA, 20 nt, Synthetic Construct
  source 1..20: mol_type = other RNA
tgaggtagtagtttgtacag

SEQ ID NO: 52395 - RNA, 22 nt, Synthetic Construct
  source 1..22: mol_type = other RNA
ttctgtactgagctgccccgag

SEQ ID NO: 52396 - RNA, 21 nt, Synthetic Construct
  source 1..21: mol_type = other RNA
tgaggggcagagagcgaggct

SEQ ID NO: 52397 - RNA, 21 nt, Synthetic Construct
  source 1..21: mol_type = other RNA
tgaggggcagagagcgaggct

SEQ ID NO: 52398 - RNA, 22 nt, Synthetic Construct
  source 1..22: mol_type = other RNA
tgagacctctgggttctgagct

SEQ ID NO: 52399 - RNA, 22 nt, Synthetic Construct
  source 1..22: mol_type = other RNA
tgagacctctgggttctgagct

SEQ ID NO: 52400 - RNA, 22 nt, Synthetic Construct
  source 1..22: mol_type = other RNA
cattgcactcgtctcggtctga

SEQ ID NO: 52401 - RNA, 20 nt, Synthetic Construct
  source 1..20: mol_type = other RNA
ctctaatgagactgccggtg

SEQ ID NO: 52402 - RNA, 22 nt, Synthetic Construct
  source 1..22: mol_type = other RNA
tcctgtaccgagctgccccgag

SEQ ID NO: 52403 - RNA, 22 nt, Synthetic Construct
  source 1..22: mol_type = other RNA
tcctgtaccgagctgccccgag

SEQ ID NO: 52404 - RNA, 22 nt, Synthetic Construct
  source 1..22: mol_type = other RNA
tgaggtagtaggttgtgtggat

SEQ ID NO: 52405 - RNA, 22 nt, Synthetic Construct
  source 1..22: mol_type = other RNA
tgaggtagtaggttgtgtggat

SEQ ID NO: 52406 - RNA, 21 nt, Synthetic Construct
  source 1..21: mol_type = other RNA
tgaggaagtaggttgtgtggt

SEQ ID NO: 52407 - RNA, 22 nt, Synthetic Construct
  source 1..22: mol_type = other RNA
tgaggtggtagtttgtgctgtt

SEQ ID NO: 52408 - RNA, 22 nt, Synthetic Construct
  source 1..22: mol_type = other RNA
tgaggtggtagtttgtgctgtt

SEQ ID NO: 52409 - RNA, 19 nt, Synthetic Construct
  source 1..19: mol_type = other RNA
cttggggttgtaggaccac

SEQ ID NO: 52410 - RNA, 19 nt, Synthetic Construct
  source 1..19: mol_type = other RNA
cttggggttgtaggaccac

SEQ ID NO: 52411 - RNA, 22 nt, Synthetic Construct
  source 1..22: mol_type = other RNA
cgaggtagtaggttgtatagtt

SEQ ID NO: 52412 - RNA, 23 nt, Synthetic Construct
  source 1..23: mol_type = other RNA
tgaggggcagagagcgggacttt

SEQ ID NO: 52413 - RNA, 23 nt, Synthetic Construct
  source 1..23: mol_type = other RNA
tgaggggcagagagcgggacttt

SEQ ID NO: 52414 - RNA, 24 nt, Synthetic Construct
  source 1..24: mol_type = other RNA
agcagcattgtacagggctatgag

SEQ ID NO: 52415 - RNA, 22 nt, Synthetic Construct
  source 1..22: mol_type = other RNA
tgaggtagcaggttgtgtggtt

SEQ ID NO: 52416 - RNA, 19 nt, Synthetic Construct
  source 1..19: mol_type = other RNA
tgaggtagtaggttgtata

SEQ ID NO: 52417 - RNA, 19 nt, Synthetic Construct
  source 1..19: mol_type = other RNA
tgaggtagtaggttgtata

SEQ ID NO: 52418 - RNA, 30 nt, Synthetic Construct; identical to SEQ ID NO: 1079
  source 1..30: mol_type = other RNA

SEQ ID NO: 52419 - RNA, 30 nt, Synthetic Construct; identical to SEQ ID NO: 1079
  source 1..30: mol_type = other RNA

SEQ ID NO: 52420 - RNA, 23 nt, Synthetic Construct
  source 1..23: mol_type = other RNA
cccagtgttcagactacctgttc

SEQ ID NO: 52421 - RNA, 23 nt, Synthetic Construct
  source 1..23: mol_type = other RNA
cccagtgttcagactacctgttc

SEQ ID NO: 52422 - RNA, 21 nt, Synthetic Construct
  source 1..21: mol_type = other RNA
ctaatcccagaaacccggtcg

SEQ ID NO: 52423 - RNA, 23 nt, Synthetic Construct
  source 1..23: mol_type = other RNA
caaagtgctgtccgtgcaggtag

SEQ ID NO: 52424 - RNA, 23 nt, Synthetic Construct
  source 1..23: mol_type = other RNA
caaagtgctgtccgtgcaggtag

SEQ ID NO: 52425 - RNA, 20 nt, Synthetic Construct
  source 1..20: mol_type = other RNA
ctctaatgagactgccggtg

SEQ ID NO: 52426 - RNA, 20 nt, Synthetic Construct
  source 1..20: mol_type = other RNA
ctctaatgagactgccggtg

SEQ ID NO: 52427 - RNA, 36 nt, Synthetic Construct; identical to SEQ ID NO: 2469
  source 1..36: mol_type = other RNA

SEQ ID NO: 52428 - RNA, 22 nt, Synthetic Construct
  source 1..22: mol_type = other RNA
catcgcacttgtctcggtctga

SEQ ID NO: 52429 - RNA, 22 nt, Synthetic Construct
  source 1..22: mol_type = other RNA
cattgcactcgtctcggtctga

SEQ ID NO: 52430 - RNA, 22 nt, Synthetic Construct
  source 1..22: mol_type = other RNA
tcctatactgagctgccccgag

SEQ ID NO: 52431 - RNA, 22 nt, Synthetic Construct
  source 1..22: mol_type = other RNA
tgagaactgaattccataggct

SEQ ID NO: 52432 - RNA, 22 nt, Synthetic Construct
  source 1..22: mol_type = other RNA
tgagaactgaattccataggct

SEQ ID NO: 52433 - RNA, 36 nt, Synthetic Construct; identical to SEQ ID NO: 2660
  source 1..36: mol_type = other RNA

SEQ ID NO: 52434 - RNA, 36 nt, Synthetic Construct; identical to SEQ ID NO: 2660
  source 1..36: mol_type = other RNA

SEQ ID NO: 52435 - RNA, 15 nt, Synthetic Construct
  source 1..15: mol_type = other RNA
cgccatttaaagagg

SEQ ID NO: 52436 - RNA, 22 nt, Synthetic Construct
  source 1..22: mol_type = other RNA
aattgcacggtatccatctgta

SEQ ID NO: 52437 - RNA, 26 nt, Synthetic Construct
  source 1..26: mol_type = other RNA
aatgacacgatcactcccgttgagtt

SEQ ID NO: 52438 - RNA, 20 nt, Synthetic Construct
  source 1..20: mol_type = other RNA
tgaggtggtaggttgtatag

SEQ ID NO: 52439 - RNA, 20 nt, Synthetic Construct
  source 1..20: mol_type = other RNA
tgaggtggtaggttgtatag

SEQ ID NO: 52440 - RNA, 29 nt, Synthetic Construct
  source 1..29: mol_type = other RNA
tgaaggtgggttgtgaagcctgctggagg

SEQ ID NO: 52441 - RNA, 23 nt, Synthetic Construct
  source 1..23: mol_type = other RNA
caaagtgctgctcgtgcaggtag

SEQ ID NO: 52442 - RNA, 23 nt, Synthetic Construct
  source 1..23: mol_type = other RNA
caaagtgctgctcgtgcaggtag

SEQ ID NO: 52443 - RNA, 22 nt, Synthetic Construct
  source 1..22: mol_type = other RNA
tgaggtagaagtttgtgctgtt

SEQ ID NO: 52444 - RNA, 22 nt, Synthetic Construct
  source 1..22: mol_type = other RNA
tgaggtagaagtttgtgctgtt

SEQ ID NO: 52445 - RNA, 23 nt, Synthetic Construct
  source 1..23: mol_type = other RNA
cgaggtagtaggttgtgtggttt

SEQ ID NO: 52446 - RNA, 23 nt, Synthetic Construct
  source 1..23: mol_type = other RNA
cgaggtagtaggttgtgtggttt

SEQ ID NO: 52447 - RNA, 39 nt, Synthetic Construct; identical to SEQ ID NO: 10211
  source 1..39: mol_type = other RNA

SEQ ID NO: 52448 - RNA, 25 nt, Synthetic Construct
  source 1..25: mol_type = other RNA
aaaccgttaccattactgagtttag

SEQ ID NO: 52449 - RNA, 25 nt, Synthetic Construct
  source 1..25: mol_type = other RNA
aaaccgttaccattactgagtttag

SEQ ID NO: 52450 - RNA, 21 nt, Synthetic Construct
  source 1..21: mol_type = other RNA
tggagtgtgacagtggtgttt

SEQ ID NO: 52451 - RNA, 22 nt, Synthetic Construct
  source 1..22: mol_type = other RNA
tcgtgccgtgagtaataatgcg

SEQ ID NO: 52452 - RNA, 22 nt, Synthetic Construct
  source 1..22: mol_type = other RNA
tcgtgccgtgagtaataatgcg

SEQ ID NO: 52453 - RNA, 34 nt, Synthetic Construct; identical to SEQ ID NO: 2265
  source 1..34: mol_type = other RNA

SEQ ID NO: 52454 - RNA, 17 nt, Synthetic Construct
  source 1..17: mol_type = other RNA
atgcaagtcgaacggta

SEQ ID NO: 52455 - RNA, 17 nt, Synthetic Construct
  source 1..17: mol_type = other RNA
atgcaagtcgaacggta

SEQ ID NO: 52456 - RNA, 29 nt, Synthetic Construct
  source 1..29: mol_type = other RNA
tgaaggtgggttgtgaagcctgctggagg

SEQ ID NO: 52457 - RNA, 16 nt, Synthetic Construct
  source 1..16: mol_type = other RNA
ttgaccgctctgacca

SEQ ID NO: 52458 - RNA, 24 nt, Synthetic Construct
  source 1..24: mol_type = other RNA
agcaacattgtctgctgggtttct

SEQ ID NO: 52459 - RNA, 24 nt, Synthetic Construct
  source 1..24: mol_type = other RNA
agcaacattgtctgctgggtttct

SEQ ID NO: 52460 - RNA, 18 nt, Synthetic Construct
  source 1..18: mol_type = other RNA
ttcaagtaatccaggata

SEQ ID NO: 52461 - RNA, 18 nt, Synthetic Construct
  source 1..18: mol_type = other RNA
ttcaagtaatccaggata

SEQ ID NO: 52462 - RNA, 22 nt, Synthetic Construct
  source 1..22: mol_type = other RNA
tgaggtagtagtttgtgctgtg

SEQ ID NO: 52463 - RNA, 22 nt, Synthetic Construct
  source 1..22: mol_type = other RNA
tgaggtagtagtttgtgctgtg

SEQ ID NO: 52464 - RNA, 22 nt, Synthetic Construct
  source 1..22: mol_type = other RNA
tcctgcactgagctgccccgag

SEQ ID NO: 52465 - RNA, 22 nt, Synthetic Construct
  source 1..22: mol_type = other RNA
tcctgcactgagctgccccgag

SEQ ID NO: 52466 - RNA, 27 nt, Synthetic Construct
  source 1..27: mol_type = other RNA
ccccccactgctagatttgactggctt

SEQ ID NO: 52467 - RNA, 27 nt, Synthetic Construct
  source 1..27: mol_type = other RNA
ccccccactgctagatttgactggctt

SEQ ID NO: 52468 - RNA, 19 nt, Synthetic Construct
  source 1..19: mol_type = other RNA
cccttgtcattagttgcta

SEQ ID NO: 52469 - RNA, 19 nt, Synthetic Construct
  source 1..19: mol_type = other RNA
cccttgtcattagttgcta

SEQ ID NO: 52470 - RNA, 23 nt, Synthetic Construct
  source 1..23: mol_type = other RNA
tggaatgtaaagaagtatgtatt

SEQ ID NO: 52471 - RNA, 23 nt, Synthetic Construct
  source 1..23: mol_type = other RNA
tggaatgtaaagaagtatgtatt

SEQ ID NO: 52472 - RNA, 16 nt, Synthetic Construct
  source 1..16: mol_type = other RNA
tgcgtagatatgcgga

SEQ ID NO: 52473 - RNA, 21 nt, Synthetic Construct
  source 1..21: mol_type = other RNA
tgaggtggtagattgtatagt

SEQ ID NO: 52474 - RNA, 21 nt, Synthetic Construct
  source 1..21: mol_type = other RNA
tgaggtggtagattgtatagt

SEQ ID NO: 52475 - RNA, 22 nt, Synthetic Construct
  source 1..22: mol_type = other RNA
tgtaaacatccccgactggagg

SEQ ID NO: 52476 - RNA, 22 nt, Synthetic Construct
  source 1..22: mol_type = other RNA
tatagcacttgtcccggcctgt

SEQ ID NO: 52477 - RNA, 22 nt, Synthetic Construct
  source 1..22: mol_type = other RNA
tatagcacttgtcccggcctgt

SEQ ID NO: 52478 - RNA, 31 nt, Synthetic Construct; identical to SEQ ID NO: 2893
  source 1..31: mol_type = other RNA

SEQ ID NO: 52479 - RNA, 18 nt, Synthetic Construct
  source 1..18: mol_type = other RNA
cgaggatccattggaggg

SEQ ID NO: 52480 - RNA, 18 nt, Synthetic Construct
  source 1..18: mol_type = other RNA
cgaggatccattggaggg

SEQ ID NO: 52481 - RNA, 32 nt, Synthetic Construct; identical to SEQ ID NO: 753
  source 1..32: mol_type = other RNA

SEQ ID NO: 52482 - RNA, 32 nt, Synthetic Construct; identical to SEQ ID NO: 753
  source 1..32: mol_type = other RNA

SEQ ID NO: 52483 - RNA, 26 nt, Synthetic Construct
  source 1..26: mol_type = other RNA
gatttccccttggggttgtaggacca

SEQ ID NO: 52484 - RNA, 26 nt, Synthetic Construct
  source 1..26: mol_type = other RNA
gatttccccttggggttgtaggacca

SEQ ID NO: 52485 - RNA, 24 nt, Synthetic Construct
  source 1..24: mol_type = other RNA
agcagcattgtacagggctatgat

SEQ ID NO: 52486 - RNA, 24 nt, Synthetic Construct
  source 1..24: mol_type = other RNA
agcagcattgtacagggctatgat

SEQ ID NO: 52487 - RNA, 15 nt, Synthetic Construct
  source 1..15: mol_type = other RNA
tccggatcgtagtct

SEQ ID NO: 52488 - RNA, 15 nt, Synthetic Construct
  source 1..15: mol_type = other RNA
tccggatcgtagtct

SEQ ID NO: 52489 - RNA, 18 nt, Synthetic Construct
  source 1..18: mol_type = other RNA
ggtgcaagcgttaatcgg

SEQ ID NO: 52490 - RNA, 18 nt, Synthetic Construct
  source 1..18: mol_type = other RNA
ggtgcaagcgttaatcgg

SEQ ID NO: 52491 - RNA, 23 nt, Synthetic Construct
  source 1..23: mol_type = other RNA
caacggaatcccaaaagcggctg

SEQ ID NO: 52492 - RNA, 24 nt, Synthetic Construct
  source 1..24: mol_type = other RNA
aaaccgttaccattactgagttta

SEQ ID NO: 52493 - RNA, 24 nt, Synthetic Construct
  source 1..24: mol_type = other RNA
aaaccgttaccattactgagttta

SEQ ID NO: 52494 - RNA, 17 nt, Synthetic Construct
  source 1..17: mol_type = other RNA
cagtcaggatgttggct

SEQ ID NO: 52495 - RNA, 22 nt, Synthetic Construct
  source 1..22: mol_type = other RNA
tcctgtaccgagctgccccgag

SEQ ID NO: 52496 - RNA, 16 nt, Synthetic Construct
  source 1..16: mol_type = other RNA
gatttgggagtgctcg

SEQ ID NO: 52497 - RNA, 22 nt, Synthetic Construct
  source 1..22: mol_type = other RNA
tgaggtagtagtttgtgctgtc

SEQ ID NO: 52498 - RNA, 27 nt, Synthetic Construct
  source 1..27: mol_type = other RNA
cccctcactgctaaatttgactggctt

SEQ ID NO: 52499 - RNA, 27 nt, Synthetic Construct
  source 1..27: mol_type = other RNA
ccccccacagctaaatttgactggctt

SEQ ID NO: 52500 - RNA, 23 nt, Synthetic Construct
  source 1..23: mol_type = other RNA
tcctgtaccgagctgccccgagt

SEQ ID NO: 52501 - RNA, 32 nt, Synthetic Construct; identical to SEQ ID NO: 2318
  source 1..32: mol_type = other RNA

SEQ ID NO: 52502 - RNA, 32 nt, Synthetic Construct; identical to SEQ ID NO: 2318
  source 1..32: mol_type = other RNA

SEQ ID NO: 52503 - RNA, 22 nt, Synthetic Construct
  source 1..22: mol_type = other RNA
tgaggtagtagattgtgtggtt

SEQ ID NO: 52504 - RNA, 22 nt, Synthetic Construct
  source 1..22: mol_type = other RNA
tgaggtagtagattgtgtggtt

SEQ ID NO: 52505 - RNA, 21 nt, Synthetic Construct
  source 1..21: mol_type = other RNA
ctagactggagctccttgagg

SEQ ID NO: 52506 - RNA, 27 nt, Synthetic Construct
  source 1..27: mol_type = other RNA
ccccccactgctaagtttgactggctt

SEQ ID NO: 52507 - RNA, 27 nt, Synthetic Construct
  source 1..27: mol_type = other RNA
ccccccactgctaagtttgactggctt

SEQ ID NO: 52508 - RNA, 21 nt, Synthetic Construct
  source 1..21: mol_type = other RNA
cctctgggcccttcctccagt

SEQ ID NO: 52509 - RNA, 22 nt, Synthetic Construct
  source 1..22: mol_type = other RNA
ctcgtaccgtgagtaataatgc

SEQ ID NO: 52510 - RNA, 22 nt, Synthetic Construct
  source 1..22: mol_type = other RNA
ctcgtaccgtgagtaataatgc

SEQ ID NO: 52511 - RNA, 20 nt, Synthetic Construct
  source 1..20: mol_type = other RNA
tgaggtagtaggttgtgagg

SEQ ID NO: 52512 - RNA, 20 nt, Synthetic Construct
  source 1..20: mol_type = other RNA
tgaggtagtaggttgtgagg

SEQ ID NO: 52513 - RNA, 23 nt, Synthetic Construct
  source 1..23: mol_type = other RNA
tgaggtaggaggttgtatagttg

SEQ ID NO: 52514 - RNA, 22 nt, Synthetic Construct
  source 1..22: mol_type = other RNA
aaactccttaagcgaatctcgc

SEQ ID NO: 52515 - RNA, 22 nt, Synthetic Construct
  source 1..22: mol_type = other RNA
aaactccttaagcgaatctcgc

SEQ ID NO: 52516 - RNA, 23 nt, Synthetic Construct
  source 1..23: mol_type = other RNA
gcctgtactgagctgccccgaga

SEQ ID NO: 52517 - RNA, 23 nt, Synthetic Construct
  source 1..23: mol_type = other RNA
gcctgtactgagctgccccgaga

SEQ ID NO: 52518 - RNA, 34 nt, Synthetic Construct; identical to SEQ ID NO: 2183
  source 1..34: mol_type = other RNA

SEQ ID NO: 52519 - RNA, 21 nt, Synthetic Construct
  source 1..21: mol_type = other RNA
tcctgtactgagctgcctcga

SEQ ID NO: 52520 - RNA, 21 nt, Synthetic Construct
  source 1..21: mol_type = other RNA
tcctgtactgagctgcctcga

SEQ ID NO: 52521 - RNA, 22 nt, Synthetic Construct
  source 1..22: mol_type = other RNA
cgaggtagtaggttgtgtggtt

SEQ ID NO: 52522 - RNA, 33 nt, Synthetic Construct; identical to SEQ ID NO: 7224
  source 1..33: mol_type = other RNA

SEQ ID NO: 52523 - RNA, 33 nt, Synthetic Construct; identical to SEQ ID NO: 7224
  source 1..33: mol_type = other RNA

SEQ ID NO: 52524 - RNA, 20 nt, Synthetic Construct
  source 1..20: mol_type = other RNA
tgaggtagtaggttatgtgg

SEQ ID NO: 52525 - RNA, 20 nt, Synthetic Construct
  source 1..20: mol_type = other RNA
tgaggtagtaggttatgtgg

SEQ ID NO: 52526 - RNA, 26 nt, Synthetic Construct
  source 1..26: mol_type = other RNA
ccccccactgctaatttgactggctt

SEQ ID NO: 52527 - RNA, 26 nt, Synthetic Construct
  source 1..26: mol_type = other RNA
ccccccactgctaatttgactggctt

SEQ ID NO: 52528 - RNA, 24 nt, Synthetic Construct
  source 1..24: mol_type = other RNA
tgtaaacatccccgaccggaagct

SEQ ID NO: 52529 - RNA, 28 nt, Synthetic Construct
  source 1..28: mol_type = other RNA
gcattggtggttcagtggtagaattctc

SEQ ID NO: 52530 - RNA, 28 nt, Synthetic Construct
  source 1..28: mol_type = other RNA
gcattggtggttcagtggtagaattctc

SEQ ID NO: 52531 - RNA, 26 nt, Synthetic Construct
  source 1..26: mol_type = other RNA
gatgcgtggtaggagagcgttctgta

SEQ ID NO: 52532 - RNA, 23 nt, Synthetic Construct
  source 1..23: mol_type = other RNA
caacggaaccccaaaagcagctg

SEQ ID NO: 52533 - RNA, 27 nt, Synthetic Construct
  source 1..27: mol_type = other RNA
ccccccactgttaaatttgactggctt

SEQ ID NO: 52534 - RNA, 18 nt, Synthetic Construct
  source 1..18: mol_type = other RNA
ggctttgaagtaaggtcg

SEQ ID NO: 52535 - RNA, 18 nt, Synthetic Construct
  source 1..18: mol_type = other RNA
ggctttgaagtaaggtcg

SEQ ID NO: 52536 - RNA, 20 nt, Synthetic Construct
  source 1..20: mol_type = other RNA
tggaatgtaaagaagtatgt

SEQ ID NO: 52537 - RNA, 18 nt, Synthetic Construct
  source 1..18: mol_type = other RNA
atcgctagtaatcgcgga

SEQ ID NO: 52538 - RNA, 18 nt, Synthetic Construct
  source 1..18: mol_type = other RNA
atcgctagtaatcgcgga

SEQ ID NO: 52539 - RNA, 23 nt, Synthetic Construct
  source 1..23: mol_type = other RNA
tcctgtactgagctgcctcgaga

SEQ ID NO: 52540 - RNA, 23 nt, Synthetic Construct
  source 1..23: mol_type = other RNA
tcctgtactgagctgcctcgaga

SEQ ID NO: 52541 - RNA, 21 nt, Synthetic Construct
  source 1..21: mol_type = other RNA
tgaagtagtaggttgtgtggt

SEQ ID NO: 52542 - RNA, 17 nt, Synthetic Construct
  source 1..17: mol_type = other RNA
agtgacgcgcatgaatg

SEQ ID NO: 52543 - RNA, 17 nt, Synthetic Construct
  source 1..17: mol_type = other RNA
agtgacgcgcatgaatg

SEQ ID NO: 52544 - RNA, 21 nt, Synthetic Construct
  source 1..21: mol_type = other RNA
cactgatcgagtcgtcctgcg

SEQ ID NO: 52545 - RNA, 20 nt, Synthetic Construct
  source 1..20: mol_type = other RNA
ctgacctatgaattgacagc

SEQ ID NO: 52546 - RNA, 20 nt, Synthetic Construct
  source 1..20: mol_type = other RNA
ctgacctatgaattgacagc

SEQ ID NO: 52547 - RNA, 23 nt, Synthetic Construct
  source 1..23: mol_type = other RNA
tcctgtactgagctgccccgagg

SEQ ID NO: 52548 - RNA, 23 nt, Synthetic Construct
  source 1..23: mol_type = other RNA
tcctgtactgagctgccccgagg

SEQ ID NO: 52549 - RNA, 21 nt, Synthetic Construct
  source 1..21: mol_type = other RNA
ccctgtactgagctgccccga

SEQ ID NO: 52550 - RNA, 21 nt, Synthetic Construct
  source 1..21: mol_type = other RNA
ccctgtactgagctgccccga

SEQ ID NO: 52551 - RNA, 17 nt, Synthetic Construct
  source 1..17: mol_type = other RNA
tcccagaaacccggtcg

SEQ ID NO: 52552 - RNA, 20 nt, Synthetic Construct
  source 1..20: mol_type = other RNA
gagtaggacgttgccaggtt

SEQ ID NO: 52553 - RNA, 20 nt, Synthetic Construct
  source 1..20: mol_type = other RNA
gagtaggacgttgccaggtt

SEQ ID NO: 52554 - RNA, 21 nt, Synthetic Construct
  source 1..21: mol_type = other RNA
agcgtgcttgactgcgagact

SEQ ID NO: 52555 - RNA, 24 nt, Synthetic Construct
  source 1..24: mol_type = other RNA
cgtaaacatccccgactggaagct

SEQ ID NO: 52556 - RNA, 24 nt, Synthetic Construct
  source 1..24: mol_type = other RNA
cgtaaacatccccgactggaagct

SEQ ID NO: 52557 - RNA, 19 nt, Synthetic Construct
  source 1..19: mol_type = other RNA
tagcttatcagactgatgt

SEQ ID NO: 52558 - RNA, 19 nt, Synthetic Construct
  source 1..19: mol_type = other RNA
tagcttatcagactgatgt

SEQ ID NO: 52559 - RNA, 18 nt, Synthetic Construct
  source 1..18: mol_type = other RNA
accggaggaaggtgggga

SEQ ID NO: 52560 - RNA, 23 nt, Synthetic Construct
  source 1..23: mol_type = other RNA
tgaggggcggagagcgagacttt

SEQ ID NO: 52561 - RNA, 18 nt, Synthetic Construct
  source 1..18: mol_type = other RNA
ggccgtcgtcagctcgtg

SEQ ID NO: 52562 - RNA, 21 nt, Synthetic Construct
  source 1..21: mol_type = other RNA
tgaggaagtagattgtatagt

SEQ ID NO: 52563 - RNA, 21 nt, Synthetic Construct
  source 1..21: mol_type = other RNA
tgaggaagtagattgtatagt

SEQ ID NO: 52564 - RNA, 22 nt, Synthetic Construct
  source 1..22: mol_type = other RNA
tgaggtagtagttagtgctgtt

SEQ ID NO: 52565 - RNA, 22 nt, Synthetic Construct
  source 1..22: mol_type = other RNA
tgaggtagtagttagtgctgtt

SEQ ID NO: 52566 - RNA, 35 nt, Synthetic Construct; identical to SEQ ID NO: 2615
  source 1..35: mol_type = other RNA

SEQ ID NO: 52567 - RNA, 23 nt, Synthetic Construct
  source 1..23: mol_type = other RNA
tgaggggcagggagcgagacttt

SEQ ID NO: 52568 - RNA, 23 nt, Synthetic Construct
  source 1..23: mol_type = other RNA
agcagcattgtacagggctatgg

SEQ ID NO: 52569 - RNA, 18 nt, Synthetic Construct
  source 1..18: mol_type = other RNA
cctgaagaataagcaccg

SEQ ID NO: 52570 - RNA, 27 nt, Synthetic Construct
  source 1..27: mol_type = other RNA
ccccccactgctaaatttgacaggctt

SEQ ID NO: 52571 - RNA, 22 nt, Synthetic Construct
  source 1..22: mol_type = other RNA
tgaggtagtaggttgtataatt

SEQ ID NO: 52572 - RNA, 22 nt, Synthetic Construct
  source 1..22: mol_type = other RNA
tgaggtagtaggttgtataatt

SEQ ID NO: 52573 - RNA, 22 nt, Synthetic Construct
  source 1..22: mol_type = other RNA
gaagcacattcgcacatcatat

SEQ ID NO: 52574 - RNA, 22 nt, Synthetic Construct
  source 1..22: mol_type = other RNA
gaagcacattcgcacatcatat

SEQ ID NO: 52575 - RNA, 23 nt, Synthetic Construct
  source 1..23: mol_type = other RNA
tgtcagtctgtcaaataccccaa

SEQ ID NO: 52576 - RNA, 22 nt, Synthetic Construct
  source 1..22: mol_type = other RNA
tgagaactgaattccatgggta

SEQ ID NO: 52577 - RNA, 20 nt, Synthetic Construct
  source 1..20: mol_type = other RNA
tagcagcacatcatggttta

SEQ ID NO: 52578 - RNA, 20 nt, Synthetic Construct
  source 1..20: mol_type = other RNA
tagcagcacatcatggttta

SEQ ID NO: 52579 - RNA, 21 nt, Synthetic Construct
  source 1..21: mol_type = other RNA
cctctgggcccttcctccagt

SEQ ID NO: 52580 - RNA, 21 nt, Synthetic Construct
  source 1..21: mol_type = other RNA
cctctgggcccttcctccagt

SEQ ID NO: 52581 - RNA, 25 nt, Synthetic Construct
  source 1..25: mol_type = other RNA
ttgaggatatgagatcgaggcgaca

SEQ ID NO: 52582 - RNA, 34 nt, Synthetic Construct; identical to SEQ ID NO: 385
  source 1..34: mol_type = other RNA

SEQ ID NO: 52583 - RNA, 34 nt, Synthetic Construct; identical to SEQ ID NO: 385
  source 1..34: mol_type = other RNA

SEQ ID NO: 52584 - RNA, 23 nt, Synthetic Construct
  source 1..23: mol_type = other RNA
agcagcattgtacagggctatgt

SEQ ID NO: 52585 - RNA, 23 nt, Synthetic Construct
  source 1..23: mol_type = other RNA
agcagcattgtacagggctatgt

SEQ ID NO: 52586 - RNA, 21 nt, Synthetic Construct
  source 1..21: mol_type = other RNA
tgaggggcagagagcgagaca

SEQ ID NO: 52587 - RNA, 16 nt, Synthetic Construct
  source 1..16: mol_type = other RNA
gccagcagccgcggta

SEQ ID NO: 52588 - RNA, 16 nt, Synthetic Construct
  source 1..16: mol_type = other RNA
gccagcagccgcggta

SEQ ID NO: 52589 - RNA, 15 nt, Synthetic Construct
  source 1..15: mol_type = other RNA
gcaagtcgaacggta

SEQ ID NO: 52590 - RNA, 22 nt, Synthetic Construct
  source 1..22: mol_type = other RNA
tgaggtagtaagttgtgtggtt

SEQ ID NO: 52591 - RNA, 22 nt, Synthetic Construct
  source 1..22: mol_type = other RNA
tgaggtagtaagttgtgtggtt

SEQ ID NO: 52592 - RNA, 23 nt, Synthetic Construct
  source 1..23: mol_type = other RNA
tgagaggcagagagcgagacttt

SEQ ID NO: 52593 - RNA, 23 nt, Synthetic Construct
  source 1..23: mol_type = other RNA
tgagaggcagagagcgagacttt

SEQ ID NO: 52594 - RNA, 27 nt, Synthetic Construct
  source 1..27: mol_type = other RNA
ccccctactgctaaatttgactggctt

SEQ ID NO: 52595 - RNA, 27 nt, Synthetic Construct
  source 1..27: mol_type = other RNA
ccccctactgctaaatttgactggctt

SEQ ID NO: 52596 - RNA, 21 nt, Synthetic Construct
  source 1..21: mol_type = other RNA
tgaggtagtagattgtatagc

SEQ ID NO: 52597 - RNA, 22 nt, Synthetic Construct
  source 1..22: mol_type = other RNA
ccggtcccaagggtatggctgt

SEQ ID NO: 52598 - RNA, 22 nt, Synthetic Construct
  source 1..22: mol_type = other RNA
ccggtcccaagggtatggctgt

SEQ ID NO: 52599 - RNA, 22 nt, Synthetic Construct
  source 1..22: mol_type = other RNA
cattgcgcttgtctcggtctga

SEQ ID NO: 52600 - RNA, 27 nt, Synthetic Construct
  source 1..27: mol_type = other RNA
ccccctactgctaaatttgactggctt

SEQ ID NO: 52601 - RNA, 20 nt, Synthetic Construct
  source 1..20: mol_type = other RNA
cccataaagtagaaagcact

SEQ ID NO: 52602 - RNA, 20 nt, Synthetic Construct
  source 1..20: mol_type = other RNA
cccataaagtagaaagcact

SEQ ID NO: 52603 - RNA, 19 nt, Synthetic Construct
  source 1..19: mol_type = other RNA
gggataactggcttgtggc

SEQ ID NO: 52604 - RNA, 19 nt, Synthetic Construct
  source 1..19: mol_type = other RNA
gggataactggcttgtggc

SEQ ID NO: 52605 - RNA, 20 nt, Synthetic Construct
  source 1..20: mol_type = other RNA
tagcttatcagactgatgtt

SEQ ID NO: 52606 - RNA, 20 nt, Synthetic Construct
  source 1..20: mol_type = other RNA
tagcttatcagactgatgtt

SEQ ID NO: 52607 - RNA, 28 nt, Synthetic Construct
  source 1..28: mol_type = other RNA
cccccccactgctaaatttgactggcta

SEQ ID NO: 52608 - RNA, 22 nt, Synthetic Construct
  source 1..22: mol_type = other RNA
tattgcacctgtcccggcctgt

SEQ ID NO: 52609 - RNA, 22 nt, Synthetic Construct
  source 1..22: mol_type = other RNA
tattgcacctgtcccggcctgt

SEQ ID NO: 52610 - RNA, 29 nt, Synthetic Construct
  source 1..29: mol_type = other RNA
ccccccccactgctaaatttgactggctt

SEQ ID NO: 52611 - RNA, 24 nt, Synthetic Construct
  source 1..24: mol_type = other RNA
tgatatgtttgatatattaggttg

SEQ ID NO: 52612 - RNA, 15 nt, Synthetic Construct
  source 1..15: mol_type = other RNA
gtagctcgttgggct

SEQ ID NO: 52613 - RNA, 15 nt, Synthetic Construct
  source 1..15: mol_type = other RNA
gtagctcgttgggct

SEQ ID NO: 52614 - RNA, 21 nt, Synthetic Construct
  source 1..21: mol_type = other RNA
tgaggtagtagtttgtgccgt

SEQ ID NO: 52615 - RNA, 21 nt, Synthetic Construct
  source 1..21: mol_type = other RNA
tgaggtagtagtttgtgccgt

SEQ ID NO: 52616 - RNA, 28 nt, Synthetic Construct
  source 1..28: mol_type = other RNA
ccccccactgctaaatttggctggcttt

SEQ ID NO: 52617 - RNA, 28 nt, Synthetic Construct
  source 1..28: mol_type = other RNA
ccccccactgctaaatttggctggcttt

SEQ ID NO: 52618 - RNA, 24 nt, Synthetic Construct
  source 1..24: mol_type = other RNA
tgaaaacatccccgactggaagct

SEQ ID NO: 52619 - RNA, 18 nt, Synthetic Construct
  source 1..18: mol_type = other RNA
gtcaggatggccgagcgg

SEQ ID NO: 52620 - RNA, 18 nt, Synthetic Construct
  source 1..18: mol_type = other RNA
gtcaggatggccgagcgg

SEQ ID NO: 52621 - RNA, 31 nt, Synthetic Construct; identical to SEQ ID NO: 2295
  source 1..31: mol_type = other RNA

SEQ ID NO: 52622 - RNA, 31 nt, Synthetic Construct; identical to SEQ ID NO: 2295
  source 1..31: mol_type = other RNA

SEQ ID NO: 52623 - RNA, 22 nt, Synthetic Construct
  source 1..22: mol_type = other RNA
tccttcattccaccggagtctg

SEQ ID NO: 52624 - RNA, 22 nt, Synthetic Construct
  source 1..22: mol_type = other RNA
tccttcattccaccggagtctg

SEQ ID NO: 52625 - RNA, 19 nt, Synthetic Construct
  source 1..19: mol_type = other RNA
cctgtaccgatcaatagtg

SEQ ID NO: 52626 - RNA, 22 nt, Synthetic Construct
  source 1..22: mol_type = other RNA
cgtaccgtgagtaataatgcga

SEQ ID NO: 52627 - RNA, 22 nt, Synthetic Construct
  source 1..22: mol_type = other RNA
cgtaccgtgagtaataatgcga

SEQ ID NO: 52628 - RNA, 20 nt, Synthetic Construct
  source 1..20: mol_type = other RNA
tgaggtagtaggttgtataa

SEQ ID NO: 52629 - RNA, 25 nt, Synthetic Construct
  source 1..25: mol_type = other RNA
ttgaggatatgagatcgagacgacg

SEQ ID NO: 52630 - RNA, 25 nt, Synthetic Construct
  source 1..25: mol_type = other RNA
ttgaggatatgagatcgagacgacg

SEQ ID NO: 52631 - RNA, 22 nt, Synthetic Construct
  source 1..22: mol_type = other RNA
tcctgtactgagctgctccgag

SEQ ID NO: 52632 - RNA, 22 nt, Synthetic Construct
  source 1..22: mol_type = other RNA
tcctgtactgagctgctccgag

SEQ ID NO: 52633 - RNA, 22 nt, Synthetic Construct
  source 1..22: mol_type = other RNA
tgagatagtaggttgtatagtt

SEQ ID NO: 52634 - RNA, 22 nt, Synthetic Construct
  source 1..22: mol_type = other RNA
tagcttatcagactgatgttgg

SEQ ID NO: 52635 - RNA, 22 nt, Synthetic Construct
  source 1..22: mol_type = other RNA
tcctgtactaagctgccccgag

SEQ ID NO: 52636 - RNA, 23 nt, Synthetic Construct
  source 1..23: mol_type = other RNA
aagcttatcagactgatgttgac

SEQ ID NO: 52637 - RNA, 22 nt, Synthetic Construct
  source 1..22: mol_type = other RNA
taaggtagtaggttgtatagtt

SEQ ID NO: 52638 - RNA, 22 nt, Synthetic Construct
  source 1..22: mol_type = other RNA
taaggtagtaggttgtatagtt

SEQ ID NO: 52639 - RNA, 18 nt, Synthetic Construct
  source 1..18: mol_type = other RNA
atcacattgccagggatt

SEQ ID NO: 52640 - RNA, 18 nt, Synthetic Construct
  source 1..18: mol_type = other RNA
atcacattgccagggatt

SEQ ID NO: 52641 - RNA, 20 nt, Synthetic Construct
  source 1..20: mol_type = other RNA
cgaggtagtaggttgtatag

SEQ ID NO: 52642 - RNA, 21 nt, Synthetic Construct
  source 1..21: mol_type = other RNA
acacatgcaagtcgaacggta

SEQ ID NO: 52643 - RNA, 33 nt, Synthetic Construct; identical to SEQ ID NO: 2209
  source 1..33: mol_type = other RNA

SEQ ID NO: 52644 - RNA, 33 nt, Synthetic Construct; identical to SEQ ID NO: 2209
  source 1..33: mol_type = other RNA

SEQ ID NO: 52645 - RNA, 21 nt, Synthetic Construct
  source 1..21: mol_type = other RNA
tgaggtagtagtttgtgctgc

SEQ ID NO: 52646 - RNA, 18 nt, Synthetic Construct
  source 1..18: mol_type = other RNA
tcagtagctcgaggaaaa

SEQ ID NO: 52647 - RNA, 22 nt, Synthetic Construct
  source 1..22: mol_type = other RNA
cattgcacttgtctcagtctga

SEQ ID NO: 52648 - RNA, 22 nt, Synthetic Construct
  source 1..22: mol_type = other RNA
cattgcacttgtctcagtctga

SEQ ID NO: 52649 - RNA, 23 nt, Synthetic Construct
  source 1..23: mol_type = other RNA
gcgtggtaggagagcgttctgta

SEQ ID NO: 52650 - RNA, 23 nt, Synthetic Construct
  source 1..23: mol_type = other RNA
gcgtggtaggagagcgttctgta

SEQ ID NO: 52651 - RNA, 27 nt, Synthetic Construct
  source 1..27: mol_type = other RNA
ccccccactgccaaatttgactggctt

SEQ ID NO: 52652 - RNA, 24 nt, Synthetic Construct
  source 1..24: mol_type = other RNA
tttccccttggggttgtaggacca

SEQ ID NO: 52653 - RNA, 24 nt, Synthetic Construct
  source 1..24: mol_type = other RNA
tttccccttggggttgtaggacca

SEQ ID NO: 52654 - RNA, 30 nt, Synthetic Construct; identical to SEQ ID NO: 1194
  source 1..30: mol_type = other RNA

SEQ ID NO: 52655 - RNA, 30 nt, Synthetic Construct; identical to SEQ ID NO: 1194
  source 1..30: mol_type = other RNA

SEQ ID NO: 52656 - RNA, 17 nt, Synthetic Construct
  source 1..17: mol_type = other RNA
tcagtagctcgaggaaa

SEQ ID NO: 52657 - RNA, 25 nt, Synthetic Construct
  source 1..25: mol_type = other RNA
gcgccgctggtgtagtggtatcatg

SEQ ID NO: 52658 - RNA, 25 nt, Synthetic Construct
  source 1..25: mol_type = other RNA
gcgccgctggtgtagtggtatcatg

SEQ ID NO: 52659 - RNA, 31 nt, Synthetic Construct; identical to SEQ ID NO: 5943
  source 1..31: mol_type = other RNA

SEQ ID NO: 52660 - RNA, 31 nt, Synthetic Construct; identical to SEQ ID NO: 5943
  source 1..31: mol_type = other RNA

SEQ ID NO: 52661 - RNA, 21 nt, Synthetic Construct
  source 1..21: mol_type = other RNA
tgaggtagtaggttgtatagc

SEQ ID NO: 52662 - RNA, 22 nt, Synthetic Construct
  source 1..22: mol_type = other RNA
taaggtagtagtttgtgctgtt

SEQ ID NO: 52663 - RNA, 22 nt, Synthetic Construct
  source 1..22: mol_type = other RNA
taaggtagtagtttgtgctgtt

SEQ ID NO: 52664 - RNA, 22 nt, Synthetic Construct
  source 1..22: mol_type = other RNA
tgaggtagaagtttgtgctgtt

SEQ ID NO: 52665 - RNA, 22 nt, Synthetic Construct
  source 1..22: mol_type = other RNA
tagcagcacgtgaatattggcg

SEQ ID NO: 52666 - RNA, 22 nt, Synthetic Construct
  source 1..22: mol_type = other RNA
tgaggtggtaggttgtgtggtt

SEQ ID NO: 52667 - RNA, 22 nt, Synthetic Construct
  source 1..22: mol_type = other RNA
tgaggtggtaggttgtgtggtt

SEQ ID NO: 52668 - RNA, 22 nt, Synthetic Construct
  source 1..22: mol_type = other RNA
tgaggtaataggttgtgtggtt

SEQ ID NO: 52669 - RNA, 22 nt, Synthetic Construct
  source 1..22: mol_type = other RNA
tgaggtaataggttgtgtggtt

SEQ ID NO: 52670 - RNA, 18 nt, Synthetic Construct
  source 1..18: mol_type = other RNA
atcccacttctgacacca

SEQ ID NO: 52671 - RNA, 18 nt, Synthetic Construct
  source 1..18: mol_type = other RNA
atcccacttctgacacca

SEQ ID NO: 52672 - RNA, 35 nt, Synthetic Construct; identical to SEQ ID NO: 737
  source 1..35: mol_type = other RNA

SEQ ID NO: 52673 - RNA, 35 nt, Synthetic Construct; identical to SEQ ID NO: 737
  source 1..35: mol_type = other RNA

SEQ ID NO: 52674 - RNA, 22 nt, Synthetic Construct
  source 1..22: mol_type = other RNA
tgtcagtttgtcaaataccccg

SEQ ID NO: 52675 - RNA, 21 nt, Synthetic Construct
  source 1..21: mol_type = other RNA
tgaggaagtaggttgtatagt

SEQ ID NO: 52676 - RNA, 21 nt, Synthetic Construct
  source 1..21: mol_type = other RNA
tgaggaagtaggttgtatagt

SEQ ID NO: 52677 - RNA, 22 nt, Synthetic Construct
  source 1..22: mol_type = other RNA
tgaggtagaaggttgtgtggtt

SEQ ID NO: 52678 - RNA, 23 nt, Synthetic Construct
  source 1..23: mol_type = other RNA
ttcaagtaattcaggataggttt

SEQ ID NO: 52679 - RNA, 23 nt, Synthetic Construct
  source 1..23: mol_type = other RNA
ttcaagtaattcaggataggttt

SEQ ID NO: 52680 - RNA, 16 nt, Synthetic Construct
  source 1..16: mol_type = other RNA
tggagtgtgacaatgg

SEQ ID NO: 52681 - RNA, 16 nt, Synthetic Construct
  source 1..16: mol_type = other RNA
tggagtgtgacaatgg

SEQ ID NO: 52682 - RNA, 19 nt, Synthetic Construct
  source 1..19: mol_type = other RNA
tgaggtagtaggttgtata

SEQ ID NO: 52683 - RNA, 19 nt, Synthetic Construct
  source 1..19: mol_type = other RNA
tgaggtagtaggttgtata

SEQ ID NO: 52684 - RNA, 22 nt, Synthetic Construct
  source 1..22: mol_type = other RNA
tgagatagtaggttgtgtggtt

SEQ ID NO: 52685 - RNA, 15 nt, Synthetic Construct
  source 1..15: mol_type = other RNA
gctagtaatcgcgga

SEQ ID NO: 52686 - RNA, 15 nt, Synthetic Construct
  source 1..15: mol_type = other RNA
gctagtaatcgcgga

SEQ ID NO: 52687 - RNA, 22 nt, Synthetic Construct
  source 1..22: mol_type = other RNA
tgagatagtaggttgtgtggtt

SEQ ID NO: 52688 - RNA, 23 nt, Synthetic Construct
  source 1..23: mol_type = other RNA
cgaagtgctgttcgtgcaggtag

SEQ ID NO: 52689 - RNA, 23 nt, Synthetic Construct
  source 1..23: mol_type = other RNA
cgaagtgctgttcgtgcaggtag

SEQ ID NO: 52690 - RNA, 27 nt, Synthetic Construct
  source 1..27: mol_type = other RNA
ccccccactgctaaacttgactggctt

SEQ ID NO: 52691 - RNA, 21 nt, Synthetic Construct
  source 1..21: mol_type = other RNA
taatactgcctggtaatgatg

SEQ ID NO: 52692 - RNA, 21 nt, Synthetic Construct
  source 1..21: mol_type = other RNA
taatactgcctggtaatgatg

SEQ ID NO: 52693 - RNA, 20 nt, Synthetic Construct
  source 1..20: mol_type = other RNA
tgaggtagaaggttgtgtgg

SEQ ID NO: 52694 - RNA, 21 nt, Synthetic Construct
  source 1..21: mol_type = other RNA
tcctgtactgagctaccccga

SEQ ID NO: 52695 - RNA, 21 nt, Synthetic Construct
  source 1..21: mol_type = other RNA
tcctgtactgagctaccccga

SEQ ID NO: 52696 - RNA, 41 nt, Synthetic Construct; identical to SEQ ID NO: 8929
  source 1..41: mol_type = other RNA

SEQ ID NO: 52697 - RNA, 41 nt, Synthetic Construct; identical to SEQ ID NO: 8929
  source 1..41: mol_type = other RNA

SEQ ID NO: 52698 - RNA, 21 nt, Synthetic Construct
  source 1..21: mol_type = other RNA
tgaggtagtaggttgtgtgga

SEQ ID NO: 52699 - RNA, 21 nt, Synthetic Construct
  source 1..21: mol_type = other RNA
tgaggtagtaggttgtacagt

SEQ ID NO: 52700 - RNA, 21 nt, Synthetic Construct
  source 1..21: mol_type = other RNA
tgaggtagtaggttgtacagt

SEQ ID NO: 52701 - RNA, 22 nt, Synthetic Construct
  source 1..22: mol_type = other RNA
tgaggtagtaggttgagtggtt

SEQ ID NO: 52702 - RNA, 22 nt, Synthetic Construct
  source 1..22: mol_type = other RNA
tgaggtagtaggttgagtggtt

SEQ ID NO: 52703 - RNA, 22 nt, Synthetic Construct
  source 1..22: mol_type = other RNA
tcctgtaccgagctgccccgag

SEQ ID NO: 52704 - RNA, 18 nt, Synthetic Construct
  source 1..18: mol_type = other RNA
tcctgtactgagctgccc

SEQ ID NO: 52705 - RNA, 18 nt, Synthetic Construct
  source 1..18: mol_type = other RNA
tcctgtactgagctgccc

SEQ ID NO: 52706 - RNA, 25 nt, Synthetic Construct
  source 1..25: mol_type = other RNA
ggtaaaatggctgagtgaagcattg

SEQ ID NO: 52707 - RNA, 25 nt, Synthetic Construct
  source 1..25: mol_type = other RNA
ggtaaaatggctgagtgaagcattg

SEQ ID NO: 52708 - RNA, 24 nt, Synthetic Construct
  source 1..24: mol_type = other RNA
agcagcattgtacagggctatgag

SEQ ID NO: 52709 - RNA, 16 nt, Synthetic Construct
  source 1..16: mol_type = other RNA
gactacggccatacca

SEQ ID NO: 52710 - RNA, 25 nt, Synthetic Construct
  source 1..25: mol_type = other RNA
ggtaaaattgctgagtgaagcattg

SEQ ID NO: 52711 - RNA, 25 nt, Synthetic Construct
  source 1..25: mol_type = other RNA
ggtaaaattgctgagtgaagcattg

SEQ ID NO: 52712 - RNA, 27 nt, Synthetic Construct
  source 1..27: mol_type = other RNA
cgtgtgaaagtaggtcatcgtcaggct

SEQ ID NO: 52713 - RNA, 27 nt, Synthetic Construct
  source 1..27: mol_type = other RNA
cgtgtgaaagtaggtcatcgtcaggct

SEQ ID NO: 52714 - RNA, 23 nt, Synthetic Construct
  source 1..23: mol_type = other RNA
gtctttgttcgattccgttgagt

SEQ ID NO: 52715 - RNA, 15 nt, Synthetic Construct
  source 1..15: mol_type = other RNA
atccctccgactccg

SEQ ID NO: 52716 - RNA, 22 nt, Synthetic Construct
  source 1..22: mol_type = other RNA
tcactgatcgagtcgtcctgcg

SEQ ID NO: 52717 - RNA, 22 nt, Synthetic Construct
  source 1..22: mol_type = other RNA
tgaggtagtagtttgtgctgat

SEQ ID NO: 52718 - RNA, 20 nt, Synthetic Construct
  source 1..20: mol_type = other RNA
cgaggtagtaggttgtgtgg

SEQ ID NO: 52719 - RNA, 23 nt, Synthetic Construct
  source 1..23: mol_type = other RNA
tcctgtactgggctgccccgagt

SEQ ID NO: 52720 - RNA, 22 nt, Synthetic Construct
  source 1..22: mol_type = other RNA
gaagttgttcgtggtggattcg

SEQ ID NO: 52721 - RNA, 27 nt, Synthetic Construct
  source 1..27: mol_type = other RNA
ccccccactgccaaatttgactggctt

SEQ ID NO: 52722 - RNA, 27 nt, Synthetic Construct
  source 1..27: mol_type = other RNA
ccccccactgccaaatttgactggctt

SEQ ID NO: 52723 - RNA, 22 nt, Synthetic Construct
  source 1..22: mol_type = other RNA
tgaggtagtaggttgcgtggtt

SEQ ID NO: 52724 - RNA, 22 nt, Synthetic Construct
  source 1..22: mol_type = other RNA
tgaggtagtaggttgcgtggtt

SEQ ID NO: 52725 - RNA, 18 nt, Synthetic Construct
  source 1..18: mol_type = other RNA
cataaagtagaaagcact

SEQ ID NO: 52726 - RNA, 18 nt, Synthetic Construct
  source 1..18: mol_type = other RNA
cataaagtagaaagcact

SEQ ID NO: 52727 - RNA, 22 nt, Synthetic Construct
  source 1..22: mol_type = other RNA
gaagttgttcgtggtggattcg

SEQ ID NO: 52728 - RNA, 34 nt, Synthetic Construct; identical to SEQ ID NO: 6594
  source 1..34: mol_type = other RNA

SEQ ID NO: 52729 - RNA, 20 nt, Synthetic Construct
  source 1..20: mol_type = other RNA
tccctgtcctccaggagctc

SEQ ID NO: 52730 - RNA, 20 nt, Synthetic Construct
  source 1..20: mol_type = other RNA
tccctgtcctccaggagctc

SEQ ID NO: 52731 - RNA, 21 nt, Synthetic Construct
  source 1..21: mol_type = other RNA
tgaggtagtaggttgtgtgga

SEQ ID NO: 52732 - RNA, 21 nt, Synthetic Construct
  source 1..21: mol_type = other RNA
tgaggtagtaggttgtgtgga

SEQ ID NO: 52733 - RNA, 23 nt, Synthetic Construct
  source 1..23: mol_type = other RNA
tcctgtactgagccgccccgagt

SEQ ID NO: 52734 - RNA, 23 nt, Synthetic Construct
  source 1..23: mol_type = other RNA
naaagtgctgttcgtgcaggtag

SEQ ID NO: 52735 - RNA, 16 nt, Synthetic Construct
  source 1..16: mol_type = other RNA
gatctgtagctggtct

SEQ ID NO: 52736 - RNA, 16 nt, Synthetic Construct
  source 1..16: mol_type = other RNA
gatctgtagctggtct

SEQ ID NO: 52737 - RNA, 18 nt, Synthetic Construct
  source 1..18: mol_type = other RNA
ccaaggggtcgtgggttc

SEQ ID NO: 52738 - RNA, 15 nt, Synthetic Construct
  source 1..15: mol_type = other RNA
cagtgaaacgagtca

SEQ ID NO: 52739 - RNA, 21 nt, Synthetic Construct
  source 1..21: mol_type = other RNA
tggagtgtgacgatggtgttt

SEQ ID NO: 52740 - RNA, 21 nt, Synthetic Construct
  source 1..21: mol_type = other RNA
tggagtgtgacgatggtgttt

SEQ ID NO: 52741 - RNA, 22 nt, Synthetic Construct
  source 1..22: mol_type = other RNA
cactgcacttgtctcggtctga

SEQ ID NO: 52742 - RNA, 22 nt, Synthetic Construct
  source 1..22: mol_type = other RNA
cactgcacttgtctcggtctga

SEQ ID NO: 52743 - RNA, 32 nt, Synthetic Construct; identical to SEQ ID NO: 1675
  source 1..32: mol_type = other RNA

SEQ ID NO: 52744 - RNA, 32 nt, Synthetic Construct; identical to SEQ ID NO: 1675
  source 1..32: mol_type = other RNA

SEQ ID NO: 52745 - RNA, 21 nt, Synthetic Construct
  source 1..21: mol_type = other RNA
tcccagtaaacggcggccgta

SEQ ID NO: 52746 - RNA, 23 nt, Synthetic Construct
  source 1..23: mol_type = other RNA
tgaggtagtgggttgtgtggttt

SEQ ID NO: 52747 - RNA, 23 nt, Synthetic Construct
  source 1..23: mol_type = other RNA
tgaggtagtgggttgtgtggttt

SEQ ID NO: 52748 - RNA, 33 nt, Synthetic Construct; identical to SEQ ID NO: 7224
  source 1..33: mol_type = other RNA

SEQ ID NO: 52749 - RNA, 33 nt, Synthetic Construct; identical to SEQ ID NO: 7224
  source 1..33: mol_type = other RNA

SEQ ID NO: 52750 - RNA, 15 nt, Synthetic Construct
  source 1..15: mol_type = other RNA
gcaagtcgagcggta

SEQ ID NO: 52751 - RNA, 24 nt, Synthetic Construct
  source 1..24: mol_type = other RNA
tgtaaacatccccgactggaagcc

SEQ ID NO: 52752 - RNA, 20 nt, Synthetic Construct
  source 1..20: mol_type = other RNA
tgaggtagtaagttgtattg

SEQ ID NO: 52753 - RNA, 20 nt, Synthetic Construct
  source 1..20: mol_type = other RNA
tgaggtagtaagttgtattg

SEQ ID NO: 52754 - RNA, 17 nt, Synthetic Construct
  source 1..17: mol_type = other RNA
cacggcccagactccta

SEQ ID NO: 52755 - RNA, 21 nt, Synthetic Construct
  source 1..21: mol_type = other RNA
cgtaccgtgagtaataacgcg

SEQ ID NO: 52756 - RNA, 21 nt, Synthetic Construct
  source 1..21: mol_type = other RNA
cgtaccgtgagtaataacgcg

SEQ ID NO: 52757 - RNA, 22 nt, Synthetic Construct
  source 1..22: mol_type = other RNA
nagcagcacgtaaatattggcg

SEQ ID NO: 52758 - RNA, 22 nt, Synthetic Construct
  source 1..22: mol_type = other RNA
nagcagcacgtaaatattggcg

SEQ ID NO: 52759 - RNA, 22 nt, Synthetic Construct
  source 1..22: mol_type = other RNA
tgaggtaatagtttgtgctgtt

SEQ ID NO: 52760 - RNA, 22 nt, Synthetic Construct
  source 1..22: mol_type = other RNA
tgaggtaatagtttgtgctgtt

SEQ ID NO: 52761 - RNA, 33 nt, Synthetic Construct; identical to SEQ ID NO: 7469
  source 1..33: mol_type = other RNA

SEQ ID NO: 52762 - RNA, 33 nt, Synthetic Construct; identical to SEQ ID NO: 7469
  source 1..33: mol_type = other RNA

SEQ ID NO: 52763 - RNA, 23 nt, Synthetic Construct
  source 1..23: mol_type = other RNA
gtgcagatcttggtggtagtagc

SEQ ID NO: 52764 - RNA, 23 nt, Synthetic Construct
  source 1..23: mol_type = other RNA
gtgcagatcttggtggtagtagc

SEQ ID NO: 52765 - RNA, 16 nt, Synthetic Construct
  source 1..16: mol_type = other RNA
gtctatggccatacca

SEQ ID NO: 52766 - RNA, 16 nt, Synthetic Construct
  source 1..16: mol_type = other RNA
gtctatggccatacca

SEQ ID NO: 52767 - RNA, 19 nt, Synthetic Construct
  source 1..19: mol_type = other RNA
atcacattgccagggattt

SEQ ID NO: 52768 - RNA, 19 nt, Synthetic Construct
  source 1..19: mol_type = other RNA
atcacattgccagggattt

SEQ ID NO: 52769 - RNA, 22 nt, Synthetic Construct
  source 1..22: mol_type = other RNA
tcagtgcactacagagctttgt

SEQ ID NO: 52770 - RNA, 23 nt, Synthetic Construct
  source 1..23: mol_type = other RNA
taaggtgcatctagtgcagatag

SEQ ID NO: 52771 - RNA, 23 nt, Synthetic Construct
  source 1..23: mol_type = other RNA
taaggtgcatctagtgcagatag

SEQ ID NO: 52772 - RNA, 15 nt, Synthetic Construct
  source 1..15: mol_type = other RNA
gagtagggcgggaca

SEQ ID NO: 52773 - RNA, 22 nt, Synthetic Construct
  source 1..22: mol_type = other RNA
ttctgtactgagctgccccgag

SEQ ID NO: 52774 - RNA, 15 nt, Synthetic Construct
  source 1..15: mol_type = other RNA
ggtggctgtagctca

SEQ ID NO: 52775 - RNA, 15 nt, Synthetic Construct
  source 1..15: mol_type = other RNA
ggtggctgtagctca

SEQ ID NO: 52776 - RNA, 19 nt, Synthetic Construct
  source 1..19: mol_type = other RNA
tgaggtagtaggttgtgtg

SEQ ID NO: 52777 - RNA, 19 nt, Synthetic Construct
  source 1..19: mol_type = other RNA
tgaggtagtaggttgtgtg

SEQ ID NO: 52778 - RNA, 22 nt, Synthetic Construct
  source 1..22: mol_type = other RNA
taaggtagtagattgtatagtt

SEQ ID NO: 52779 - RNA, 22 nt, Synthetic Construct
  source 1..22: mol_type = other RNA
taaggtagtagattgtatagtt

SEQ ID NO: 52780 - RNA, 16 nt, Synthetic Construct
  source 1..16: mol_type = other RNA
ggtgggggtcgttggt

SEQ ID NO: 52781 - RNA, 35 nt, Synthetic Construct; identical to SEQ ID NO: 2069
  source 1..35: mol_type = other RNA

SEQ ID NO: 52782 - RNA, 21 nt, Synthetic Construct
  source 1..21: mol_type = other RNA
taaggtagtaggttgtatagt

SEQ ID NO: 52783 - RNA, 22 nt, Synthetic Construct
  source 1..22: mol_type = other RNA
ccgtaccgtgagtaataatgcg

SEQ ID NO: 52784 - RNA, 30 nt, Synthetic Construct; identical to SEQ ID NO: 3933
  source 1..30: mol_type = other RNA

SEQ ID NO: 52785 - RNA, 30 nt, Synthetic Construct; identical to SEQ ID NO: 3933
  source 1..30: mol_type = other RNA

SEQ ID NO: 52786 - RNA, 20 nt, Synthetic Construct
  source 1..20: mol_type = other RNA
ggaggtagtaggttgtgtgg

SEQ ID NO: 52787 - RNA, 20 nt, Synthetic Construct
  source 1..20: mol_type = other RNA
ggaggtagtaggttgtgtgg

SEQ ID NO: 52788 - RNA, 20 nt, Synthetic Construct
  source 1..20: mol_type = other RNA
tgaggtagcaggttgtgtgg

SEQ ID NO: 52789 - RNA, 20 nt, Synthetic Construct
  source 1..20: mol_type = other RNA
tgaggtagcaggttgtgtgg

SEQ ID NO: 52790 - RNA, 22 nt, Synthetic Construct
  source 1..22: mol_type = other RNA
ngaggtagtagtttgtgctgtt

SEQ ID NO: 52791 - RNA, 22 nt, Synthetic Construct
  source 1..22: mol_type = other RNA
ngaggtagtagtttgtgctgtt

SEQ ID NO: 52792 - RNA, 22 nt, Synthetic Construct
  source 1..22: mol_type = other RNA
tgaggtagtagattgtatagta

SEQ ID NO: 52793 - RNA, 19 nt, Synthetic Construct
  source 1..19: mol_type = other RNA
ccagtaaacggcggccgta

SEQ ID NO: 52794 - RNA, 18 nt, Synthetic Construct
  source 1..18: mol_type = other RNA
aagcggtggatgatgtgg

SEQ ID NO: 52795 - RNA, 18 nt, Synthetic Construct
  source 1..18: mol_type = other RNA
aagcggtggatgatgtgg

SEQ ID NO: 52796 - RNA, 19 nt, Synthetic Construct
  source 1..19: mol_type = other RNA
caagcggtggatgatgtgg

SEQ ID NO: 52797 - RNA, 19 nt, Synthetic Construct
  source 1..19: mol_type = other RNA
caagcggtggatgatgtgg

SEQ ID NO: 52798 - RNA, 23 nt, Synthetic Construct
  source 1..23: mol_type = other RNA
tgggctaagggagatgattgggt

SEQ ID NO: 52799 - RNA, 29 nt, Synthetic Construct
  source 1..29: mol_type = other RNA
cccccccactgctaaatttgactggcttt

SEQ ID NO: 52800 - RNA, 25 nt, Synthetic Construct
  source 1..25: mol_type = other RNA
ttgaggatacgagatcgagacgaca

SEQ ID NO: 52801 - RNA, 25 nt, Synthetic Construct
  source 1..25: mol_type = other RNA
ttgaggatacgagatcgagacgaca

SEQ ID NO: 52802 - RNA, 21 nt, Synthetic Construct
  source 1..21: mol_type = other RNA
tgaggtagtaggttgtgtgat

SEQ ID NO: 52803 - RNA, 21 nt, Synthetic Construct
  source 1..21: mol_type = other RNA
tgaggtagtaggttgtgtgat

SEQ ID NO: 52804 - RNA, 25 nt, Synthetic Construct
  source 1..25: mol_type = other RNA
tgtcagtttgtcaaataccccattt

SEQ ID NO: 52805 - RNA, 25 nt, Synthetic Construct
  source 1..25: mol_type = other RNA
tgtcagtttgtcaaataccccattt

SEQ ID NO: 52806 - RNA, 21 nt, Synthetic Construct
  source 1..21: mol_type = other RNA
cagcattgtacagggctatga

SEQ ID NO: 52807 - RNA, 21 nt, Synthetic Construct
  source 1..21: mol_type = other RNA
cagcattgtacagggctatga

SEQ ID NO: 52808 - RNA, 22 nt, Synthetic Construct
  source 1..22: mol_type = other RNA
aatgacacgatcactcccgttg

SEQ ID NO: 52809 - RNA, 22 nt, Synthetic Construct
  source 1..22: mol_type = other RNA
aatgacacgatcactcccgttg

SEQ ID NO: 52810 - RNA, 21 nt, Synthetic Construct
  source 1..21: mol_type = other RNA
tggagtgtgacaatggtgtct

SEQ ID NO: 52811 - RNA, 23 nt, Synthetic Construct
  source 1..23: mol_type = other RNA
caaggtgctgttcgtgcaggtag

SEQ ID NO: 52812 - RNA, 23 nt, Synthetic Construct
  source 1..23: mol_type = other RNA
caaggtgctgttcgtgcaggtag

SEQ ID NO: 52813 - RNA, 22 nt, Synthetic Construct
  source 1..22: mol_type = other RNA
tgaggtagtaggttgtacagtt

SEQ ID NO: 52814 - RNA, 22 nt, Synthetic Construct
  source 1..22: mol_type = other RNA
tgaggtagtaggttgtacagtt

SEQ ID NO: 52815 - RNA, 22 nt, Synthetic Construct
  source 1..22: mol_type = other RNA
tgaggtggtagattgtatagtt

SEQ ID NO: 52816 - RNA, 22 nt, Synthetic Construct
  source 1..22: mol_type = other RNA
tgaggtggtagattgtatagtt

SEQ ID NO: 52817 - RNA, 25 nt, Synthetic Construct
  source 1..25: mol_type = other RNA
ttgaggatatgagatcgagacaaca

SEQ ID NO: 52818 - RNA, 22 nt, Synthetic Construct
  source 1..22: mol_type = other RNA
tggaatgtaaagaagtatgtac

SEQ ID NO: 52819 - RNA, 21 nt, Synthetic Construct
  source 1..21: mol_type = other RNA
ctagactgaagccccttgagg

SEQ ID NO: 52820 - RNA, 30 nt, Synthetic Construct; identical to SEQ ID NO: 751
  source 1..30: mol_type = other RNA

SEQ ID NO: 52821 - RNA, 24 nt, Synthetic Construct
  source 1..24: mol_type = other RNA
actcggcgtggcgtcggtcgtggt

SEQ ID NO: 52822 - RNA, 24 nt, Synthetic Construct
  source 1..24: mol_type = other RNA
actcggcgtggcgtcggtcgtggt

SEQ ID NO: 52823 - RNA, 21 nt, Synthetic Construct
  source 1..21: mol_type = other RNA
ctaggctgaagctccttgagg

SEQ ID NO: 52824 - RNA, 21 nt, Synthetic Construct
  source 1..21: mol_type = other RNA
ctaggctgaagctccttgagg

SEQ ID NO: 52825 - RNA, 15 nt, Synthetic Construct
  source 1..15: mol_type = other RNA
gagtagggcgggaca

SEQ ID NO: 52826 - RNA, 15 nt, Synthetic Construct
  source 1..15: mol_type = other RNA
gagtagggcgggaca

SEQ ID NO: 52827 - RNA, 26 nt, Synthetic Construct
  source 1..26: mol_type = other RNA
gacttaccaaacctatgcaaactccg

SEQ ID NO: 52828 - RNA, 22 nt, Synthetic Construct
  source 1..22: mol_type = other RNA
tgttgcacttgtcccggcctgt

SEQ ID NO: 52829 - RNA, 22 nt, Synthetic Construct
  source 1..22: mol_type = other RNA
tgttgcacttgtcccggcctgt

SEQ ID NO: 52830 - RNA, 23 nt, Synthetic Construct
  source 1..23: mol_type = other RNA
tgtgcaaatctatgcaaaactga

SEQ ID NO: 52831 - RNA, 24 nt, Synthetic Construct
  source 1..24: mol_type = other RNA
tataccgaagctctaggtgcggca

SEQ ID NO: 52832 - RNA, 24 nt, Synthetic Construct
  source 1..24: mol_type = other RNA
tataccgaagctctaggtgcggca

SEQ ID NO: 52833 - RNA, 21 nt, Synthetic Construct
  source 1..21: mol_type = other RNA
agagtaggacgttgccaggtt

SEQ ID NO: 52834 - RNA, 21 nt, Synthetic Construct
  source 1..21: mol_type = other RNA
agagtaggacgttgccaggtt

SEQ ID NO: 52835 - RNA, 25 nt, Synthetic Construct
  source 1..25: mol_type = other RNA
agctcactgatcgagtcgtcctgcg

SEQ ID NO: 52836 - RNA, 31 nt, Synthetic Construct; identical to SEQ ID NO: 15910
  source 1..31: mol_type = other RNA

SEQ ID NO: 52837 - RNA, 31 nt, Synthetic Construct; identical to SEQ ID NO: 15910
  source 1..31: mol_type = other RNA

SEQ ID NO: 52838 - RNA, 23 nt, Synthetic Construct
  source 1..23: mol_type = other RNA
cagagtgctgttcgtgcaggtag

SEQ ID NO: 52839 - RNA, 23 nt, Synthetic Construct
  source 1..23: mol_type = other RNA
cagagtgctgttcgtgcaggtag

SEQ ID NO: 52840 - RNA, 22 nt, Synthetic Construct
  source 1..22: mol_type = other RNA
gtagtgtttcctactttatgga

SEQ ID NO: 52841 - RNA, 23 nt, Synthetic Construct
  source 1..23: mol_type = other RNA
gactatagaactttccccctcaa

SEQ ID NO: 52842 - RNA, 23 nt, Synthetic Construct
  source 1..23: mol_type = other RNA
gactatagaactttccccctcaa

SEQ ID NO: 52843 - RNA, 23 nt, Synthetic Construct
  source 1..23: mol_type = other RNA
tgaggtagtaggctgtgtggttt

SEQ ID NO: 52844 - RNA, 22 nt, Synthetic Construct
  source 1..22: mol_type = other RNA
tgaggtagtaggttgagtggtt

SEQ ID NO: 52845 - RNA, 23 nt, Synthetic Construct
  source 1..23: mol_type = other RNA
agctacattgtctgctgggttcc

SEQ ID NO: 52846 - RNA, 17 nt, Synthetic Construct
  source 1..17: mol_type = other RNA
catgcaagtcgaacggt

SEQ ID NO: 52847 - RNA, 36 nt, Synthetic Construct; identical to SEQ ID NO: 777
  source 1..36: mol_type = other RNA

SEQ ID NO: 52848 - RNA, 36 nt, Synthetic Construct; identical to SEQ ID NO: 777
  source 1..36: mol_type = other RNA

SEQ ID NO: 52849 - RNA, 20 nt, Synthetic Construct
  source 1..20: mol_type = other RNA
tgaggtagtgggttgtgtgg

SEQ ID NO: 52850 - RNA, 20 nt, Synthetic Construct
  source 1..20: mol_type = other RNA
tgaggtagtgggttgtgtgg

SEQ ID NO: 52851 - RNA, 22 nt, Synthetic Construct
  source 1..22: mol_type = other RNA
tgaggtagtaggttgtatagtt

SEQ ID NO: 52852 - RNA, 22 nt, Synthetic Construct
  source 1..22: mol_type = other RNA
tgagctagtagtttgtgctgtt

SEQ ID NO: 52853 - RNA, 22 nt, Synthetic Construct
  source 1..22: mol_type = other RNA
tgagctagtagtttgtgctgtt

SEQ ID NO: 52854 - RNA, 37 nt, Synthetic Construct; identical to SEQ ID NO: 2365
  source 1..37: mol_type = other RNA

SEQ ID NO: 52855 - RNA, 18 nt, Synthetic Construct
  source 1..18: mol_type = other RNA
tcttcggtagtatagtgg

SEQ ID NO: 52856 - RNA, 18 nt, Synthetic Construct
  source 1..18: mol_type = other RNA
tcttcggtagtatagtgg

SEQ ID NO: 52857 - RNA, 23 nt, Synthetic Construct
  source 1..23: mol_type = other RNA
tcctgtactgggctgccccgaga

SEQ ID NO: 52858 - RNA, 23 nt, Synthetic Construct
  source 1..23: mol_type = other RNA
tcctgtactgggctgccccgaga

SEQ ID NO: 52859 - RNA, 20 nt, Synthetic Construct
  source 1..20: mol_type = other RNA
cccagtaaacggcggccgta

SEQ ID NO: 52860 - RNA, 20 nt, Synthetic Construct
  source 1..20: mol_type = other RNA
gcgtgcttgactgcgagact

SEQ ID NO: 52861 - RNA, 18 nt, Synthetic Construct
  source 1..18: mol_type = other RNA
gcaggacggtggccatgg

SEQ ID NO: 52862 - RNA, 18 nt, Synthetic Construct
  source 1..18: mol_type = other RNA
gcaggacggtggccatgg

SEQ ID NO: 52863 - RNA, 19 nt, Synthetic Construct
  source 1..19: mol_type = other RNA
gtactgacgctcatgcacg

SEQ ID NO: 52864 - RNA, 22 nt, Synthetic Construct
  source 1..22: mol_type = other RNA
tcgcagcacgtaaatattggcg

SEQ ID NO: 52865 - RNA, 22 nt, Synthetic Construct
  source 1..22: mol_type = other RNA
tcgcagcacgtaaatattggcg

SEQ ID NO: 52866 - RNA, 23 nt, Synthetic Construct
  source 1..23: mol_type = other RNA
tcctgtactgagctgcctcgaga

SEQ ID NO: 52867 - RNA, 23 nt, Synthetic Construct
  source 1..23: mol_type = other RNA
tcctgtactgagctgcctcgaga

SEQ ID NO: 52868 - RNA, 19 nt, Synthetic Construct
  source 1..19: mol_type = other RNA
agcgaaattccttgtcggg

SEQ ID NO: 52869 - RNA, 19 nt, Synthetic Construct
  source 1..19: mol_type = other RNA
agcgaaattccttgtcggg

SEQ ID NO: 52870 - RNA, 34 nt, Synthetic Construct; identical to SEQ ID NO: 35301
  source 1..34: mol_type = other RNA

SEQ ID NO: 52871 - RNA, 34 nt, Synthetic Construct; identical to SEQ ID NO: 35301
  source 1..34: mol_type = other RNA

SEQ ID NO: 52872 - RNA, 15 nt, Synthetic Construct
  source 1..15: mol_type = other RNA
gctttgatccggaga

SEQ ID NO: 52873 - RNA, 22 nt, Synthetic Construct
  source 1..22: mol_type = other RNA
cccagtgctctgaatgtcaaag

SEQ ID NO: 52874 - RNA, 22 nt, Synthetic Construct
  source 1..22: mol_type = other RNA
cccagtgctctgaatgtcaaag

SEQ ID NO: 52875 - RNA, 22 nt, Synthetic Construct
  source 1..22: mol_type = other RNA
cgcatcccctagggcattggtg

SEQ ID NO: 52876 - RNA, 22 nt, Synthetic Construct
  source 1..22: mol_type = other RNA
cgcatcccctagggcattggtg

SEQ ID NO: 52877 - RNA, 21 nt, Synthetic Construct
  source 1..21: mol_type = other RNA
tacagtagtctgcacattggt

SEQ ID NO: 52878 - RNA, 21 nt, Synthetic Construct
  source 1..21: mol_type = other RNA
tacagtagtctgcacattggt

SEQ ID NO: 52879 - RNA, 24 nt, Synthetic Construct
  source 1..24: mol_type = other RNA
cgggcctggttagtacttggatgg

SEQ ID NO: 52880 - RNA, 21 nt, Synthetic Construct
  source 1..21: mol_type = other RNA
ttctgtactgagctgccccga

SEQ ID NO: 52881 - RNA, 21 nt, Synthetic Construct
  source 1..21: mol_type = other RNA
ttctgtactgagctgccccga

SEQ ID NO: 52882 - RNA, 22 nt, Synthetic Construct
  source 1..22: mol_type = other RNA
tcagtgcactacagagctttgt

SEQ ID NO: 52883 - RNA, 22 nt, Synthetic Construct
  source 1..22: mol_type = other RNA
tcagtgcactacagagctttgt

SEQ ID NO: 52884 - RNA, 18 nt, Synthetic Construct
  source 1..18: mol_type = other RNA
ggacgttgataggctggg

SEQ ID NO: 52885 - RNA, 18 nt, Synthetic Construct
  source 1..18: mol_type = other RNA
ggacgttgataggctggg

SEQ ID NO: 52886 - RNA, 16 nt, Synthetic Construct
  source 1..16: mol_type = other RNA
gtccggatcgtagtct

SEQ ID NO: 52887 - RNA, 22 nt, Synthetic Construct
  source 1..22: mol_type = other RNA
ttgcagcacgtaaatattggcg

SEQ ID NO: 52888 - RNA, 22 nt, Synthetic Construct
  source 1..22: mol_type = other RNA
ttgcagcacgtaaatattggcg

SEQ ID NO: 52889 - RNA, 36 nt, Synthetic Construct; identical to SEQ ID NO: 3596
  source 1..36: mol_type = other RNA

SEQ ID NO: 52890 - RNA, 36 nt, Synthetic Construct; identical to SEQ ID NO: 3596
  source 1..36: mol_type = other RNA

SEQ ID NO: 52891 - RNA, 22 nt, Synthetic Construct
  source 1..22: mol_type = other RNA
ccctgtactgagctgccccgag

SEQ ID NO: 52892 - RNA, 22 nt, Synthetic Construct
  source 1..22: mol_type = other RNA
ccctgtactgagctgccccgag

SEQ ID NO: 52893 - RNA, 33 nt, Synthetic Construct; identical to SEQ ID NO: 1982
  source 1..33: mol_type = other RNA

SEQ ID NO: 52894 - RNA, 33 nt, Synthetic Construct; identical to SEQ ID NO: 1982
  source 1..33: mol_type = other RNA

SEQ ID NO: 52895 - RNA, 21 nt, Synthetic Construct
  source 1..21: mol_type = other RNA
ctggactgaagctccttgagg

SEQ ID NO: 52896 - RNA, 21 nt, Synthetic Construct
  source 1..21: mol_type = other RNA
ctggactgaagctccttgagg

SEQ ID NO: 52897 - RNA, 32 nt, Synthetic Construct; identical to SEQ ID NO: 2052
  source 1..32: mol_type = other RNA

SEQ ID NO: 52898 - RNA, 32 nt, Synthetic Construct; identical to SEQ ID NO: 2052
  source 1..32: mol_type = other RNA

SEQ ID NO: 52899 - RNA, 18 nt, Synthetic Construct
  source 1..18: mol_type = other RNA
atggccgggacagagggc

SEQ ID NO: 52900 - RNA, 16 nt, Synthetic Construct
  source 1..16: mol_type = other RNA
ctgacgctcatgcacg

SEQ ID NO: 52901 - RNA, 22 nt, Synthetic Construct
  source 1..22: mol_type = other RNA
gtcagtttgtcaaataccccaa

SEQ ID NO: 52902 - RNA, 22 nt, Synthetic Construct
  source 1..22: mol_type = other RNA
gtcagtttgtcaaataccccaa

SEQ ID NO: 52903 - RNA, 26 nt, Synthetic Construct
  source 1..26: mol_type = other RNA
aatgacacgatcactcccgttgagtt

SEQ ID NO: 52904 - RNA, 22 nt, Synthetic Construct
  source 1..22: mol_type = other RNA
tgttgcacttgtcccggcctgt

SEQ ID NO: 52905 - RNA, 23 nt, Synthetic Construct
  source 1..23: mol_type = other RNA
tggtaatacgacatacttagtgt

SEQ ID NO: 52906 - RNA, 23 nt, Synthetic Construct
  source 1..23: mol_type = other RNA
tggtaatacgacatacttagtgt

SEQ ID NO: 52907 - RNA, 20 nt, Synthetic Construct
  source 1..20: mol_type = other RNA
atcacattgccagggatttc

SEQ ID NO: 52908 - RNA, 20 nt, Synthetic Construct
  source 1..20: mol_type = other RNA
atcacattgccagggatttc

SEQ ID NO: 52909 - RNA, 21 nt, Synthetic Construct
  source 1..21: mol_type = other RNA
tagcagcacgtaaatattggc

SEQ ID NO: 52910 - RNA, 23 nt, Synthetic Construct
  source 1..23: mol_type = other RNA
tgtaaacatccttgactggaagc

SEQ ID NO: 52911 - RNA, 23 nt, Synthetic Construct
  source 1..23: mol_type = other RNA
tgtaaacatccttgactggaagc

SEQ ID NO: 52912 - RNA, 36 nt, Synthetic Construct; identical to SEQ ID NO: 2444
  source 1..36: mol_type = other RNA

SEQ ID NO: 52913 - RNA, 36 nt, Synthetic Construct; identical to SEQ ID NO: 2444
  source 1..36: mol_type = other RNA

SEQ ID NO: 52914 - RNA, 22 nt, Synthetic Construct
  source 1..22: mol_type = other RNA
ttcaagtaattcaggataggtt

SEQ ID NO: 52915 - RNA, 22 nt, Synthetic Construct
  source 1..22: mol_type = other RNA
ttcaagtaattcaggataggtt

SEQ ID NO: 52916 - RNA, 27 nt, Synthetic Construct
  source 1..27: mol_type = other RNA
ccccccactgctaaatttggctggctt

SEQ ID NO: 52917 - RNA, 27 nt, Synthetic Construct
  source 1..27: mol_type = other RNA
ccccccactgctaaatttggctggctt

SEQ ID NO: 52918 - RNA, 22 nt, Synthetic Construct
  source 1..22: mol_type = other RNA
tcgtaccatgagtaataatgcg

SEQ ID NO: 52919 - RNA, 22 nt, Synthetic Construct
  source 1..22: mol_type = other RNA
tcgtaccatgagtaataatgcg

SEQ ID NO: 52920 - RNA, 35 nt, Synthetic Construct; identical to SEQ ID NO: 2450
  source 1..35: mol_type = other RNA

SEQ ID NO: 52921 - RNA, 35 nt, Synthetic Construct; identical to SEQ ID NO: 2450
  source 1..35: mol_type = other RNA

SEQ ID NO: 52922 - RNA, 20 nt, Synthetic Construct
  source 1..20: mol_type = other RNA
caggacagtgaaacgagtca

SEQ ID NO: 52923 - RNA, 23 nt, Synthetic Construct
  source 1..23: mol_type = other RNA
caaagtgctgttcgtgtaggtag

SEQ ID NO: 52924 - RNA, 22 nt, Synthetic Construct
  source 1..22: mol_type = other RNA
gtcagtttgtcaaataccccat

SEQ ID NO: 52925 - RNA, 22 nt, Synthetic Construct
  source 1..22: mol_type = other RNA
tcgtaccgtgagtaataatgcg

SEQ ID NO: 52926 - RNA, 22 nt, Synthetic Construct
  source 1..22: mol_type = other RNA
tcgtaccgtgagtaataatgcg

SEQ ID NO: 52927 - RNA, 18 nt, Synthetic Construct
  source 1..18: mol_type = other RNA
tcgacgctagcggatcct

SEQ ID NO: 52928 - RNA, 18 nt, Synthetic Construct
  source 1..18: mol_type = other RNA
tcgacgctagcggatcct

SEQ ID NO: 52929 - RNA, 23 nt, Synthetic Construct
  source 1..23: mol_type = other RNA
tgaggggcagagagcgagacttc

SEQ ID NO: 52930 - RNA, 23 nt, Synthetic Construct
  source 1..23: mol_type = other RNA
tgaggggcagagagcgagacttc

SEQ ID NO: 52931 - RNA, 20 nt, Synthetic Construct
  source 1..20: mol_type = other RNA
tgaggtagtaggttgtacag

SEQ ID NO: 52932 - RNA, 20 nt, Synthetic Construct
  source 1..20: mol_type = other RNA
tgaggtagtaggttgtacag

SEQ ID NO: 52933 - RNA, 15 nt, Synthetic Construct
  source 1..15: mol_type = other RNA
ctaccgtgcgtagga

SEQ ID NO: 52934 - RNA, 15 nt, Synthetic Construct
  source 1..15: mol_type = other RNA
ctaccgtgcgtagga

SEQ ID NO: 52935 - RNA, 23 nt, Synthetic Construct
  source 1..23: mol_type = other RNA
tcctgcactgagctgccccgaga

SEQ ID NO: 52936 - RNA, 22 nt, Synthetic Construct
  source 1..22: mol_type = other RNA
tgttgcacttgtcccggcctgt

SEQ ID NO: 52937 - RNA, 22 nt, Synthetic Construct
  source 1..22: mol_type = other RNA
tgaggtagtagtttgtgctgtc

SEQ ID NO: 52938 - RNA, 22 nt, Synthetic Construct
  source 1..22: mol_type = other RNA
tgaggtagtagtttgtgctgtc

SEQ ID NO: 52939 - RNA, 24 nt, Synthetic Construct
  source 1..24: mol_type = other RNA
gggttgtaaaccgcttttgtcagg

SEQ ID NO: 52940 - RNA, 24 nt, Synthetic Construct
  source 1..24: mol_type = other RNA
gggttgtaaaccgcttttgtcagg

SEQ ID NO: 52941 - RNA, 23 nt, Synthetic Construct
  source 1..23: mol_type = other RNA
taatactgccgggtaatgatgga

SEQ ID NO: 52942 - RNA, 22 nt, Synthetic Construct
  source 1..22: mol_type = other RNA
tgaggtagtagtttatgctgtt

SEQ ID NO: 52943 - RNA, 16 nt, Synthetic Construct
  source 1..16: mol_type = other RNA
gtccacggccatacca

SEQ ID NO: 52944 - RNA, 16 nt, Synthetic Construct
  source 1..16: mol_type = other RNA
gtccacggccatacca

SEQ ID NO: 52945 - RNA, 18 nt, Synthetic Construct
  source 1..18: mol_type = other RNA
gctgtgatggccgagtgg

SEQ ID NO: 52946 - RNA, 18 nt, Synthetic Construct
  source 1..18: mol_type = other RNA
gctgtgatggccgagtgg

SEQ ID NO: 52947 - RNA, 25 nt, Synthetic Construct
  source 1..25: mol_type = other RNA
tcgaggatatgagatcgagacgaca

SEQ ID NO: 52948 - RNA, 25 nt, Synthetic Construct
  source 1..25: mol_type = other RNA
tcgaggatatgagatcgagacgaca

SEQ ID NO: 52949 - RNA, 22 nt, Synthetic Construct
  source 1..22: mol_type = other RNA
tcctgtactgagctgccccggg

SEQ ID NO: 52950 - RNA, 22 nt, Synthetic Construct
  source 1..22: mol_type = other RNA
tcctgtactgagctgccccggg

SEQ ID NO: 52951 - RNA, 21 nt, Synthetic Construct
  source 1..21: mol_type = other RNA
cgaggggcagagagcgagact

SEQ ID NO: 52952 - RNA, 27 nt, Synthetic Construct
  source 1..27: mol_type = other RNA
ccccccactgctaaatttggctggctt

SEQ ID NO: 52953 - RNA, 23 nt, Synthetic Construct
  source 1..23: mol_type = other RNA
tggtgatacgacgtacttagtgt

SEQ ID NO: 52954 - RNA, 25 nt, Synthetic Construct
  source 1..25: mol_type = other RNA
aaaccgttaccattactgagtttag

SEQ ID NO: 52955 - RNA, 21 nt, Synthetic Construct
  source 1..21: mol_type = other RNA
tgaggtagtagattgtataga

SEQ ID NO: 52956 - RNA, 21 nt, Synthetic Construct
  source 1..21: mol_type = other RNA
tgaggtagtagattgtataga

SEQ ID NO: 52957 - RNA, 16 nt, Synthetic Construct
  source 1..16: mol_type = other RNA
cgactcttagcggtgg

SEQ ID NO: 52958 - RNA, 23 nt, Synthetic Construct
  source 1..23: mol_type = other RNA
tagcttatcagactgatgttgaa

SEQ ID NO: 52959 - RNA, 22 nt, Synthetic Construct
  source 1..22: mol_type = other RNA
tgaggtagtagttcgtgctgtt

SEQ ID NO: 52960 - RNA, 31 nt, Synthetic Construct; identical to SEQ ID NO: 2442
  source 1..31: mol_type = other RNA

SEQ ID NO: 52961 - RNA, 31 nt, Synthetic Construct; identical to SEQ ID NO: 2442
  source 1..31: mol_type = other RNA

SEQ ID NO: 52962 - RNA, 20 nt, Synthetic Construct
  source 1..20: mol_type = other RNA
tgaggtagtgggttgtatag

SEQ ID NO: 52963 - RNA, 20 nt, Synthetic Construct
  source 1..20: mol_type = other RNA
tgaggtagtgggttgtatag

SEQ ID NO: 52964 - RNA, 22 nt, Synthetic Construct
  source 1..22: mol_type = other RNA
tgaggtagaaggttgtatagtt

SEQ ID NO: 52965 - RNA, 27 nt, Synthetic Construct
  source 1..27: mol_type = other RNA
cgcgggtaaacggcgggagtaactatg

SEQ ID NO: 52966 - RNA, 32 nt, Synthetic Construct; identical to SEQ ID NO: 2435
  source 1..32: mol_type = other RNA

SEQ ID NO: 52967 - RNA, 22 nt, Synthetic Construct
  source 1..22: mol_type = other RNA
tcctgtattgagctgccccgag

SEQ ID NO: 52968 - RNA, 22 nt, Synthetic Construct
  source 1..22: mol_type = other RNA
tcctgtattgagctgccccgag

SEQ ID NO: 52969 - RNA, 22 nt, Synthetic Construct
  source 1..22: mol_type = other RNA
tgaggtagtagtctgtgctgtt

SEQ ID NO: 52970 - RNA, 17 nt, Synthetic Construct
  source 1..17: mol_type = other RNA
cagtagctcgaggaaaa

SEQ ID NO: 52971 - RNA, 31 nt, Synthetic Construct; identical to SEQ ID NO: 15910
  source 1..31: mol_type = other RNA

SEQ ID NO: 52972 - RNA, 31 nt, Synthetic Construct; identical to SEQ ID NO: 15910
  source 1..31: mol_type = other RNA

SEQ ID NO: 52973 - RNA, 22 nt, Synthetic Construct
  source 1..22: mol_type = other RNA
tgaggtagaagtttgtgctgtt

SEQ ID NO: 52974 - RNA, 22 nt, Synthetic Construct
  source 1..22: mol_type = other RNA
tgaggtagaagtttgtgctgtt

SEQ ID NO: 52975 - RNA, 17 nt, Synthetic Construct
  source 1..17: mol_type = other RNA
acagtgtgaatcggcgc

SEQ ID NO: 52976 - RNA, 17 nt, Synthetic Construct
  source 1..17: mol_type = other RNA
acagtgtgaatcggcgc

SEQ ID NO: 52977 - RNA, 27 nt, Synthetic Construct
  source 1..27: mol_type = other RNA
ccccctactgctaaatttgactggctt

SEQ ID NO: 52978 - RNA, 27 nt, Synthetic Construct
  source 1..27: mol_type = other RNA
ccccctactgctaaatttgactggctt

SEQ ID NO: 52979 - RNA, 34 nt, Synthetic Construct; identical to SEQ ID NO: 2298
  source 1..34: mol_type = other RNA

SEQ ID NO: 52980 - RNA, 24 nt, Synthetic Construct
  source 1..24: mol_type = other RNA
agctcggtctgaggcccctcagtt

SEQ ID NO: 52981 - RNA, 24 nt, Synthetic Construct
  source 1..24: mol_type = other RNA
agctcggtctgaggcccctcagtt

SEQ ID NO: 52982 - RNA, 21 nt, Synthetic Construct
  source 1..21: mol_type = other RNA
tggggtgtgacaatggtgttt

SEQ ID NO: 52983 - RNA, 21 nt, Synthetic Construct
  source 1..21: mol_type = other RNA
tggggtgtgacaatggtgttt

SEQ ID NO: 52984 - RNA, 30 nt, Synthetic Construct; identical to SEQ ID NO: 1958
  source 1..30: mol_type = other RNA

SEQ ID NO: 52985 - RNA, 30 nt, Synthetic Construct; identical to SEQ ID NO: 1958
  source 1..30: mol_type = other RNA

SEQ ID NO: 52986 - RNA, 24 nt, Synthetic Construct
  source 1..24: mol_type = other RNA
caacggaatcccaaaagcagctgc

SEQ ID NO: 52987 - RNA, 16 nt, Synthetic Construct
  source 1..16: mol_type = other RNA
tgcaagtcgaacggta

SEQ ID NO: 52988 - RNA, 16 nt, Synthetic Construct
  source 1..16: mol_type = other RNA
tgcaagtcgaacggta

SEQ ID NO: 52989 - RNA, 22 nt, Synthetic Construct
  source 1..22: mol_type = other RNA
tggaatgtaaagaagtatgcat

SEQ ID NO: 52990 - RNA, 22 nt, Synthetic Construct
  source 1..22: mol_type = other RNA
tggaatgtaaagaagtatgcat

SEQ ID NO: 52991 - RNA, 21 nt, Synthetic Construct
  source 1..21: mol_type = other RNA
ctaatcccagaaacccggtcg

SEQ ID NO: 52992 - RNA, 21 nt, Synthetic Construct
  source 1..21: mol_type = other RNA
ctaatcccagaaacccggtcg

SEQ ID NO: 52993 - RNA, 22 nt, Synthetic Construct
  source 1..22: mol_type = other RNA
atcacattgccagggatttcca

SEQ ID NO: 52994 - RNA, 22 nt, Synthetic Construct
  source 1..22: mol_type = other RNA
atcacattgccagggatttcca

SEQ ID NO: 52995 - RNA, 25 nt, Synthetic Construct
  source 1..25: mol_type = other RNA
tcggatccgtctgagcttggctttt

SEQ ID NO: 52996 - RNA, 22 nt, Synthetic Construct
  source 1..22: mol_type = other RNA
tattgcacttgtcccggcccgt

SEQ ID NO: 52997 - RNA, 15 nt, Synthetic Construct
  source 1..15: mol_type = other RNA
ggtgaaagcggggga

SEQ ID NO: 52998 - RNA, 15 nt, Synthetic Construct
  source 1..15: mol_type = other RNA
ggtgaaagcggggga

SEQ ID NO: 52999 - RNA, 20 nt, Synthetic Construct
  source 1..20: mol_type = other RNA
acagtagtctgcacattggt

SEQ ID NO: 53000 - RNA, 21 nt, Synthetic Construct
  source 1..21: mol_type = other RNA
tgaggtagtagtttgcgctgt

SEQ ID NO: 53001 - RNA, 19 nt, Synthetic Construct
  source 1..19: mol_type = other RNA
ctgatcgagtcgtcctgcg

SEQ ID NO: 53002 - RNA, 33 nt, Synthetic Construct; identical to SEQ ID NO: 2556
  source 1..33: mol_type = other RNA

SEQ ID NO: 53003 - RNA, 22 nt, Synthetic Construct
  source 1..22: mol_type = other RNA
tcctgtactgaactgccccgag

SEQ ID NO: 53004 - RNA, 22 nt, Synthetic Construct
  source 1..22: mol_type = other RNA
tcctgtactgaactgccccgag

SEQ ID NO: 53005 - RNA, 21 nt, Synthetic Construct
  source 1..21: mol_type = other RNA
tccttcattccaccggagtct

SEQ ID NO: 53006 - RNA, 23 nt, Synthetic Construct
  source 1..23: mol_type = other RNA
tggtaaaacgacgtacttagtgt

SEQ ID NO: 53007 - RNA, 21 nt, Synthetic Construct
  source 1..21: mol_type = other RNA
ggaatcgctagtaatcgcgga

SEQ ID NO: 53008 - RNA, 21 nt, Synthetic Construct
  source 1..21: mol_type = other RNA
ggaatcgctagtaatcgcgga

SEQ ID NO: 53009 - RNA, 23 nt, Synthetic Construct
  source 1..23: mol_type = other RNA
tgaggtagtagtttgtgctgttc

SEQ ID NO: 53010 - RNA, 25 nt, Synthetic Construct
  source 1..25: mol_type = other RNA
ttgaggatatgaggtcgagacgaca

SEQ ID NO: 53011 - RNA, 25 nt, Synthetic Construct
  source 1..25: mol_type = other RNA
ttgaggatatgaggtcgagacgaca

SEQ ID NO: 53012 - RNA, 23 nt, Synthetic Construct
  source 1..23: mol_type = other RNA
caaagtgctgttcgtacaggtag

SEQ ID NO: 53013 - RNA, 22 nt, Synthetic Construct
  source 1..22: mol_type = other RNA
tgaggtagtaggttgtggggtt

SEQ ID NO: 53014 - RNA, 22 nt, Synthetic Construct
  source 1..22: mol_type = other RNA
tgaggtagtaggttgtggggtt

SEQ ID NO: 53015 - RNA, 29 nt, Synthetic Construct
  source 1..29: mol_type = other RNA
gcattggtggttcagtggtagaattctcg

SEQ ID NO: 53016 - RNA, 29 nt, Synthetic Construct
  source 1..29: mol_type = other RNA
gcattggtggttcagtggtagaattctcg

SEQ ID NO: 53017 - RNA, 33 nt, Synthetic Construct; identical to SEQ ID NO: 2253
  source 1..33: mol_type = other RNA

SEQ ID NO: 53018 - RNA, 33 nt, Synthetic Construct; identical to SEQ ID NO: 2253
  source 1..33: mol_type = other RNA

SEQ ID NO: 53019 - RNA, 24 nt, Synthetic Construct
  source 1..24: mol_type = other RNA
tgtaaacatccccgactggaagcc

SEQ ID NO: 53020 - RNA, 24 nt, Synthetic Construct
  source 1..24: mol_type = other RNA
tgtaaacatccccgactggaagcc

SEQ ID NO: 53021 - RNA, 22 nt, Synthetic Construct
  source 1..22: mol_type = other RNA
tgaggtagtaggatgtgtggtt

SEQ ID NO: 53022 - RNA, 22 nt, Synthetic Construct
  source 1..22: mol_type = other RNA
tgaggtagtaggatgtgtggtt

SEQ ID NO: 53023 - RNA, 22 nt, Synthetic Construct
  source 1..22: mol_type = other RNA
tgaggaagtaggttgtatagtt

SEQ ID NO: 53024 - RNA, 22 nt, Synthetic Construct
  source 1..22: mol_type = other RNA
tgaggaagtaggttgtatagtt

SEQ ID NO: 53025 - RNA, 22 nt, Synthetic Construct
  source 1..22: mol_type = other RNA
tcctgtaccgagctgccccgag

SEQ ID NO: 53026 - RNA, 20 nt, Synthetic Construct
  source 1..20: mol_type = other RNA
tggaatgtaaagaagtatgt

SEQ ID NO: 53027 - RNA, 20 nt, Synthetic Construct
  source 1..20: mol_type = other RNA
tggaatgtaaagaagtatgt

SEQ ID NO: 53028 - RNA, 22 nt, Synthetic Construct
  source 1..22: mol_type = other RNA
tcctgtactgagctgtcccgag

SEQ ID NO: 53029 - RNA, 22 nt, Synthetic Construct
  source 1..22: mol_type = other RNA
tcctgtactgagctgtcccgag

SEQ ID NO: 53030 - RNA, 20 nt, Synthetic Construct
  source 1..20: mol_type = other RNA
tgaggtagtaggttgtgtgg

SEQ ID NO: 53031 - RNA, 22 nt, Synthetic Construct
  source 1..22: mol_type = other RNA
tgaggtagtaggttgtatagat

SEQ ID NO: 53032 - RNA, 22 nt, Synthetic Construct
  source 1..22: mol_type = other RNA
tgaggtagtaggttgtatagat

SEQ ID NO: 53033 - RNA, 21 nt, Synthetic Construct
  source 1..21: mol_type = other RNA
aacggaatcccaaaagcagct

SEQ ID NO: 53034 - RNA, 17 nt, Synthetic Construct
  source 1..17: mol_type = other RNA
cgaaattccttgtcggg

SEQ ID NO: 53035 - RNA, 17 nt, Synthetic Construct
  source 1..17: mol_type = other RNA
cgaaattccttgtcggg

SEQ ID NO: 53036 - RNA, 21 nt, Synthetic Construct
  source 1..21: mol_type = other RNA
cctctgggcccttcctccagt

SEQ ID NO: 53037 - RNA, 21 nt, Synthetic Construct
  source 1..21: mol_type = other RNA
cctctgggcccttcctccagt

SEQ ID NO: 53038 - RNA, 22 nt, Synthetic Construct
  source 1..22: mol_type = other RNA
tgaggtagtagattgtatagta

SEQ ID NO: 53039 - RNA, 21 nt, Synthetic Construct
  source 1..21: mol_type = other RNA
atcggaacgtgcccagtcgtg

SEQ ID NO: 53040 - RNA, 21 nt, Synthetic Construct
  source 1..21: mol_type = other RNA
atcggaacgtgcccagtcgtg

SEQ ID NO: 53041 - RNA, 16 nt, Synthetic Construct
  source 1..16: mol_type = other RNA
gtccggatcgtagtct

SEQ ID NO: 53042 - RNA, 16 nt, Synthetic Construct
  source 1..16: mol_type = other RNA
gtccggatcgtagtct

SEQ ID NO: 53043 - RNA, 16 nt, Synthetic Construct
  source 1..16: mol_type = other RNA
gtctacggccataccg

SEQ ID NO: 53044 - RNA, 16 nt, Synthetic Construct
  source 1..16: mol_type = other RNA
gtctacggccataccg

SEQ ID NO: 53045 - RNA, 23 nt, Synthetic Construct
  source 1..23: mol_type = other RNA
tggtaatacgacgtactttgtgt

SEQ ID NO: 53046 - RNA, 18 nt, Synthetic Construct
  source 1..18: mol_type = other RNA
atcgctagtaatcgcgga

SEQ ID NO: 53047 - RNA, 22 nt, Synthetic Construct
  source 1..22: mol_type = other RNA
ttcaagtaatccaggataggct

SEQ ID NO: 53048 - RNA, 36 nt, Synthetic Construct; identical to SEQ ID NO: 2520
  source 1..36: mol_type = other RNA

SEQ ID NO: 53049 - RNA, 36 nt, Synthetic Construct; identical to SEQ ID NO: 2520
  source 1..36: mol_type = other RNA

SEQ ID NO: 53050 - RNA, 22 nt, Synthetic Construct
  source 1..22: mol_type = other RNA
tcgtaccgtgagtaataatgca

SEQ ID NO: 53051 - RNA, 23 nt, Synthetic Construct
  source 1..23: mol_type = other RNA
agcagcgttgtacagggctatga

SEQ ID NO: 53052 - RNA, 23 nt, Synthetic Construct
  source 1..23: mol_type = other RNA
agcagcgttgtacagggctatga

SEQ ID NO: 53053 - RNA, 16 nt, Synthetic Construct
  source 1..16: mol_type = other RNA
ccaaggggtcgtgggt

SEQ ID NO: 53054 - RNA, 22 nt, Synthetic Construct
  source 1..22: mol_type = other RNA
ttcacagtggctaagttccgct

SEQ ID NO: 53055 - RNA, 22 nt, Synthetic Construct
  source 1..22: mol_type = other RNA
ttcacagtggctaagttccgct

SEQ ID NO: 53056 - RNA, 19 nt, Synthetic Construct
  source 1..19: mol_type = other RNA
cgactcttagcggtggatc

SEQ ID NO: 53057 - RNA, 19 nt, Synthetic Construct
  source 1..19: mol_type = other RNA
cgactcttagcggtggatc

SEQ ID NO: 53058 - RNA, 16 nt, Synthetic Construct
  source 1..16: mol_type = other RNA
gtctacggccatacaa

SEQ ID NO: 53059 - RNA, 16 nt, Synthetic Construct
  source 1..16: mol_type = other RNA
gtctacggccatacaa

SEQ ID NO: 53060 - RNA, 23 nt, Synthetic Construct
  source 1..23: mol_type = other RNA
tgaggtagtaggttgtgtggttg

SEQ ID NO: 53061 - RNA, 23 nt, Synthetic Construct
  source 1..23: mol_type = other RNA
tgaggtagtaggttgtgtggttg

SEQ ID NO: 53062 - RNA, 21 nt, Synthetic Construct
  source 1..21: mol_type = other RNA
tagcagcacgtaatattggcg

SEQ ID NO: 53063 - RNA, 21 nt, Synthetic Construct
  source 1..21: mol_type = other RNA
tagcagcacgtaatattggcg

SEQ ID NO: 53064 - RNA, 22 nt, Synthetic Construct
  source 1..22: mol_type = other RNA
tgaggtagtagattatatagtt

SEQ ID NO: 53065 - RNA, 22 nt, Synthetic Construct
  source 1..22: mol_type = other RNA
tgaggtagtagattatatagtt

SEQ ID NO: 53066 - RNA, 22 nt, Synthetic Construct
  source 1..22: mol_type = other RNA
ttaatgctaatcgtgatagggt

SEQ ID NO: 53067 - RNA, 21 nt, Synthetic Construct
  source 1..21: mol_type = other RNA
ctagactgaggctccttgagg

SEQ ID NO: 53068 - RNA, 22 nt, Synthetic Construct
  source 1..22: mol_type = other RNA
tagcagcatgtaaatattggcg

SEQ ID NO: 53069 - RNA, 22 nt, Synthetic Construct
  source 1..22: mol_type = other RNA
tagcagcatgtaaatattggcg

SEQ ID NO: 53070 - RNA, 22 nt, Synthetic Construct
  source 1..22: mol_type = other RNA
cattgcacttgtctcggtctgg

SEQ ID NO: 53071 - RNA, 22 nt, Synthetic Construct
  source 1..22: mol_type = other RNA
cattgcacttgtctcggtctgg

SEQ ID NO: 53072 - RNA, 23 nt, Synthetic Construct
  source 1..23: mol_type = other RNA
caaagtgctgttcgtacaggtag

SEQ ID NO: 53073 - RNA, 23 nt, Synthetic Construct
  source 1..23: mol_type = other RNA
caaagtgctgttcgtacaggtag

SEQ ID NO: 53074 - RNA, 28 nt, Synthetic Construct
  source 1..28: mol_type = other RNA
ccccccaccgctaaatttgactggcttt

SEQ ID NO: 53075 - RNA, 21 nt, Synthetic Construct
  source 1..21: mol_type = other RNA
agccatcatttaaagaaagcg

SEQ ID NO: 53076 - RNA, 17 nt, Synthetic Construct
  source 1..17: mol_type = other RNA
cgatctgtagctggtct

SEQ ID NO: 53077 - RNA, 17 nt, Synthetic Construct
  source 1..17: mol_type = other RNA
cgatctgtagctggtct

SEQ ID NO: 53078 - RNA, 22 nt, Synthetic Construct
  source 1..22: mol_type = other RNA
taactacttaagcgaatctcgc

SEQ ID NO: 53079 - RNA, 22 nt, Synthetic Construct
  source 1..22: mol_type = other RNA
taactacttaagcgaatctcgc

SEQ ID NO: 53080 - RNA, 22 nt, Synthetic Construct
  source 1..22: mol_type = other RNA
tcagtgcactacagagctttgt

SEQ ID NO: 53081 - RNA, 23 nt, Synthetic Construct
  source 1..23: mol_type = other RNA
taaggtgcatctagtgcagatag

SEQ ID NO: 53082 - RNA, 23 nt, Synthetic Construct
  source 1..23: mol_type = other RNA
taaggtgcatctagtgcagatag

SEQ ID NO: 53083 - RNA, 22 nt, Synthetic Construct
  source 1..22: mol_type = other RNA
tgaggtagtaggttgtgaggtt

SEQ ID NO: 53084 - RNA, 22 nt, Synthetic Construct
  source 1..22: mol_type = other RNA
tgaggtagtaggttgtgaggtt

SEQ ID NO: 53085 - RNA, 22 nt, Synthetic Construct
  source 1..22: mol_type = other RNA
cgaggtagtaggttgtgtggtt

SEQ ID NO: 53086 - RNA, 21 nt, Synthetic Construct
  source 1..21: mol_type = other RNA
tcctatactgagctgccccga

SEQ ID NO: 53087 - RNA, 23 nt, Synthetic Construct
  source 1..23: mol_type = other RNA
tcctgtactgagctgtcccgaga

SEQ ID NO: 53088 - RNA, 23 nt, Synthetic Construct
  source 1..23: mol_type = other RNA
tcctgtactgagctgtcccgaga

SEQ ID NO: 53089 - RNA, 25 nt, Synthetic Construct
  source 1..25: mol_type = other RNA
ttgaggatatgggatcgagacgaca

SEQ ID NO: 53090 - RNA, 25 nt, Synthetic Construct
  source 1..25: mol_type = other RNA
ttgaggatatgggatcgagacgaca

SEQ ID NO: 53091 - RNA, 22 nt, Synthetic Construct
  source 1..22: mol_type = other RNA
tgaggtaatagtttgtgctgtt

SEQ ID NO: 53092 - RNA, 22 nt, Synthetic Construct
  source 1..22: mol_type = other RNA
tgaggtaatagtttgtgctgtt

SEQ ID NO: 53093 - RNA, 22 nt, Synthetic Construct
  source 1..22: mol_type = other RNA
tagcagcacgtaaatgttggcg

SEQ ID NO: 53094 - RNA, 22 nt, Synthetic Construct
  source 1..22: mol_type = other RNA
tagcagcacgtaaatgttggcg

SEQ ID NO: 53095 - RNA, 23 nt, Synthetic Construct
  source 1..23: mol_type = other RNA
tcgaccggacctcgaccggctcg

SEQ ID NO: 53096 - RNA, 23 nt, Synthetic Construct
  source 1..23: mol_type = other RNA
tcgaccggacctcgaccggctcg

SEQ ID NO: 53097 - RNA, 22 nt, Synthetic Construct
  source 1..22: mol_type = other RNA
tgaggtagtagcttgtgctgtt

SEQ ID NO: 53098 - RNA, 22 nt, Synthetic Construct
  source 1..22: mol_type = other RNA
tgaggtagtagcttgtgctgtt

SEQ ID NO: 53099 - RNA, 21 nt, Synthetic Construct
  source 1..21: mol_type = other RNA
tgaggtagtagattgtataga

SEQ ID NO: 53100 - RNA, 20 nt, Synthetic Construct
  source 1..20: mol_type = other RNA
cccgtgttcggaagattttc

SEQ ID NO: 53101 - RNA, 20 nt, Synthetic Construct
  source 1..20: mol_type = other RNA
cccgtgttcggaagattttc

SEQ ID NO: 53102 - RNA, 32 nt, Synthetic Construct; identical to SEQ ID NO: 3541
  source 1..32: mol_type = other RNA

SEQ ID NO: 53103 - RNA, 20 nt, Synthetic Construct
  source 1..20: mol_type = other RNA
cataaagtagaaagcactac

SEQ ID NO: 53104 - RNA, 26 nt, Synthetic Construct
  source 1..26: mol_type = other RNA
aatgacacgatcactcccgttgagtt

SEQ ID NO: 53105 - RNA, 26 nt, Synthetic Construct
  source 1..26: mol_type = other RNA
aatgacacgatcactcccgttgagtt

SEQ ID NO: 53106 - RNA, 22 nt, Synthetic Construct
  source 1..22: mol_type = other RNA
atataatacaacctgctaagtg

SEQ ID NO: 53107 - RNA, 22 nt, Synthetic Construct
  source 1..22: mol_type = other RNA
atataatacaacctgctaagtg

SEQ ID NO: 53108 - RNA, 22 nt, Synthetic Construct
  source 1..22: mol_type = other RNA
nagcagcacgtaaatattggcg

SEQ ID NO: 53109 - RNA, 21 nt, Synthetic Construct
  source 1..21: mol_type = other RNA
tgaggtagtaagttgtgtggt

SEQ ID NO: 53110 - RNA, 21 nt, Synthetic Construct
  source 1..21: mol_type = other RNA
tgaggtagtaagttgtgtggt

SEQ ID NO: 53111 - RNA, 22 nt, Synthetic Construct
  source 1..22: mol_type = other RNA
nagcagcacgtaaatattggcg

SEQ ID NO: 53112 - RNA, 22 nt, Synthetic Construct
  source 1..22: mol_type = other RNA
nagcagcacgtaaatattggcg

SEQ ID NO: 53113 - RNA, 34 nt, Synthetic Construct; identical to SEQ ID NO: 2183
  source 1..34: mol_type = other RNA

SEQ ID NO: 53114 - RNA, 19 nt, Synthetic Construct
  source 1..19: mol_type = other RNA
tccctgagaccctaacttg

SEQ ID NO: 53115 - RNA, 19 nt, Synthetic Construct
  source 1..19: mol_type = other RNA
tccctgagaccctaacttg

SEQ ID NO: 53116 - RNA, 29 nt, Synthetic Construct
  source 1..29: mol_type = other RNA
cgcgacctcagatcagacgtggcgacccg

SEQ ID NO: 53117 - RNA, 29 nt, Synthetic Construct
  source 1..29: mol_type = other RNA
cgcgacctcagatcagacgtggcgacccg

SEQ ID NO: 53118 - RNA, 22 nt, Synthetic Construct
  source 1..22: mol_type = other RNA
tgaggtagtagattgtatagtc

SEQ ID NO: 53119 - RNA, 22 nt, Synthetic Construct
  source 1..22: mol_type = other RNA
tcgtaccgtgagtaatagtgcg

SEQ ID NO: 53120 - RNA, 22 nt, Synthetic Construct
  source 1..22: mol_type = other RNA
tcgtaccgtgagtaatagtgcg

SEQ ID NO: 53121 - RNA, 22 nt, Synthetic Construct
  source 1..22: mol_type = other RNA
tagcagcacgtaaatataggcg

SEQ ID NO: 53122 - RNA, 22 nt, Synthetic Construct
  source 1..22: mol_type = other RNA
tagcagcacgtaaatataggcg

SEQ ID NO: 53123 - RNA, 21 nt, Synthetic Construct
  source 1..21: mol_type = other RNA
tgaagtagtaggttgtgtggt

SEQ ID NO: 53124 - RNA, 22 nt, Synthetic Construct
  source 1..22: mol_type = other RNA
tcggatccgtctgagcttggct

SEQ ID NO: 53125 - RNA, 23 nt, Synthetic Construct
  source 1..23: mol_type = other RNA
tcctgtaccgagctgccccgaga

SEQ ID NO: 53126 - RNA, 23 nt, Synthetic Construct
  source 1..23: mol_type = other RNA
tcctgtaccgagctgccccgaga

SEQ ID NO: 53127 - RNA, 22 nt, Synthetic Construct
  source 1..22: mol_type = other RNA
tgttggttcaagcgtgtagtcg

SEQ ID NO: 53128 - RNA, 22 nt, Synthetic Construct
  source 1..22: mol_type = other RNA
tgttggttcaagcgtgtagtcg

SEQ ID NO: 53129 - RNA, 27 nt, Synthetic Construct
  source 1..27: mol_type = other RNA
ccccccactgctaagtttgactggctt

SEQ ID NO: 53130 - RNA, 27 nt, Synthetic Construct
  source 1..27: mol_type = other RNA
ccccccactgctaagtttgactggctt

SEQ ID NO: 53131 - RNA, 35 nt, Synthetic Construct; identical to SEQ ID NO: 2615
  source 1..35: mol_type = other RNA

SEQ ID NO: 53132 - RNA, 35 nt, Synthetic Construct; identical to SEQ ID NO: 2615
  source 1..35: mol_type = other RNA

SEQ ID NO: 53133 - RNA, 21 nt, Synthetic Construct
  source 1..21: mol_type = other RNA
tgagaactgaattccatgggt

SEQ ID NO: 53134 - RNA, 21 nt, Synthetic Construct
  source 1..21: mol_type = other RNA
tgagaactgaattccatgggt

SEQ ID NO: 53135 - RNA, 22 nt, Synthetic Construct
  source 1..22: mol_type = other RNA
tgaggtggtagtttgtgctgtt

SEQ ID NO: 53136 - RNA, 22 nt, Synthetic Construct
  source 1..22: mol_type = other RNA
aagctgccagttgaagaactgt

SEQ ID NO: 53137 - RNA, 22 nt, Synthetic Construct
  source 1..22: mol_type = other RNA
aagctgccagttgaagaactgt

SEQ ID NO: 53138 - RNA, 29 nt, Synthetic Construct
  source 1..29: mol_type = other RNA
ccccccccactgctaaatttgactggctt

SEQ ID NO: 53139 - RNA, 29 nt, Synthetic Construct
  source 1..29: mol_type = other RNA
ccccccccactgctaaatttgactggctt

SEQ ID NO: 53140 - RNA, 22 nt, Synthetic Construct
  source 1..22: mol_type = other RNA
cattgcacttgtctcggtctgg

SEQ ID NO: 53141 - RNA, 22 nt, Synthetic Construct
  source 1..22: mol_type = other RNA
tagcagcacgtacatattggcg

SEQ ID NO: 53142 - RNA, 22 nt, Synthetic Construct
  source 1..22: mol_type = other RNA
tagcagcacgtacatattggcg

SEQ ID NO: 53143 - RNA, 21 nt, Synthetic Construct
  source 1..21: mol_type = other RNA
tgaggtagtagattgtacagt

SEQ ID NO: 53144 - RNA, 21 nt, Synthetic Construct
  source 1..21: mol_type = other RNA
tgaggtagtagattgtacagt

SEQ ID NO: 53145 - RNA, 16 nt, Synthetic Construct
  source 1..16: mol_type = other RNA
tagggaacgtgagctg

SEQ ID NO: 53146 - RNA, 15 nt, Synthetic Construct
  source 1..15: mol_type = other RNA
cgagtgacgtagtgt

SEQ ID NO: 53147 - RNA, 15 nt, Synthetic Construct
  source 1..15: mol_type = other RNA
cgagtgacgtagtgt

SEQ ID NO: 53148 - RNA, 21 nt, Synthetic Construct
  source 1..21: mol_type = other RNA
taaggtagtaggttgtgtggt

SEQ ID NO: 53149 - RNA, 30 nt, Synthetic Construct; identical to SEQ ID NO: 2699
  source 1..30: mol_type = other RNA

SEQ ID NO: 53150 - RNA, 30 nt, Synthetic Construct; identical to SEQ ID NO: 2699
  source 1..30: mol_type = other RNA

SEQ ID NO: 53151 - RNA, 22 nt, Synthetic Construct
  source 1..22: mol_type = other RNA
cgaggtagtaggttgtatagtt

SEQ ID NO: 53152 - RNA, 22 nt, Synthetic Construct
  source 1..22: mol_type = other RNA
cattgcgcttgtctcggtctga

SEQ ID NO: 53153 - RNA, 22 nt, Synthetic Construct
  source 1..22: mol_type = other RNA
cattgcgcttgtctcggtctga

SEQ ID NO: 53154 - RNA, 18 nt, Synthetic Construct
  source 1..18: mol_type = other RNA
gaagttgaccgcctgggg

SEQ ID NO: 53155 - RNA, 18 nt, Synthetic Construct
  source 1..18: mol_type = other RNA
gaagttgaccgcctgggg

SEQ ID NO: 53156 - RNA, 21 nt, Synthetic Construct
  source 1..21: mol_type = other RNA
tgaggaagtagattgtatagt

SEQ ID NO: 53157 - RNA, 21 nt, Synthetic Construct
  source 1..21: mol_type = other RNA
tcagtgcatcacagaactttg

SEQ ID NO: 53158 - RNA, 21 nt, Synthetic Construct
  source 1..21: mol_type = other RNA
tcagtgcatcacagaactttg

SEQ ID NO: 53159 - RNA, 23 nt, Synthetic Construct
  source 1..23: mol_type = other RNA
ttatggtttgcctgggactgagg

SEQ ID NO: 53160 - RNA, 22 nt, Synthetic Construct
  source 1..22: mol_type = other RNA
tgaggtagtaggtcgtgtggtt

SEQ ID NO: 53161 - RNA, 22 nt, Synthetic Construct
  source 1..22: mol_type = other RNA
tgaggtagtaggtcgtgtggtt

SEQ ID NO: 53162 - RNA, 20 nt, Synthetic Construct
  source 1..20: mol_type = other RNA
ggaggtagtaggttgtgtgg

SEQ ID NO: 53163 - RNA, 20 nt, Synthetic Construct
  source 1..20: mol_type = other RNA
ggaggtagtaggttgtgtgg

SEQ ID NO: 53164 - RNA, 25 nt, Synthetic Construct
  source 1..25: mol_type = other RNA
caaagtgctgttcgtgcaggtagtt

SEQ ID NO: 53165 - RNA, 25 nt, Synthetic Construct
  source 1..25: mol_type = other RNA
ttgaggatatgaggtcgagacgaca

SEQ ID NO: 53166 - RNA, 25 nt, Synthetic Construct
  source 1..25: mol_type = other RNA
ttgaggatatgaggtcgagacgaca

SEQ ID NO: 53167 - RNA, 22 nt, Synthetic Construct
  source 1..22: mol_type = other RNA
tagcagcacataatggtttgtg

SEQ ID NO: 53168 - RNA, 22 nt, Synthetic Construct
  source 1..22: mol_type = other RNA
tagcagcacataatggtttgtg

SEQ ID NO: 53169 - RNA, 22 nt, Synthetic Construct
  source 1..22: mol_type = other RNA
ngaggtagtaggttgtgtggtt

SEQ ID NO: 53170 - RNA, 29 nt, Synthetic Construct
  source 1..29: mol_type = other RNA
gatgcgaaagcaggtcaaagtgatccggc

SEQ ID NO: 53171 - RNA, 29 nt, Synthetic Construct
  source 1..29: mol_type = other RNA
gatgcgaaagcaggtcaaagtgatccggc

SEQ ID NO: 53172 - RNA, 21 nt, Synthetic Construct
  source 1..21: mol_type = other RNA
tcctgtactgagctaccccga

SEQ ID NO: 53173 - RNA, 21 nt, Synthetic Construct
  source 1..21: mol_type = other RNA
tcctgtactgagctaccccga

SEQ ID NO: 53174 - RNA, 22 nt, Synthetic Construct
  source 1..22: mol_type = other RNA
tcgtaccgtgagcaataatgcg

SEQ ID NO: 53175 - RNA, 22 nt, Synthetic Construct
  source 1..22: mol_type = other RNA
tcgtaccgtgagcaataatgcg

SEQ ID NO: 53176 - RNA, 24 nt, Synthetic Construct
  source 1..24: mol_type = other RNA
gtctttgttcgattccgttgagta

SEQ ID NO: 53177 - RNA, 24 nt, Synthetic Construct
  source 1..24: mol_type = other RNA
gtctttgttcgattccgttgagta

SEQ ID NO: 53178 - RNA, 23 nt, Synthetic Construct
  source 1..23: mol_type = other RNA
tcctgtgctgagctgccccgaga

SEQ ID NO: 53179 - RNA, 23 nt, Synthetic Construct
  source 1..23: mol_type = other RNA
tcctgtgctgagctgccccgaga

SEQ ID NO: 53180 - RNA, 20 nt, Synthetic Construct
  source 1..20: mol_type = other RNA
tgaggcagtaggttgtgtgg

SEQ ID NO: 53181 - RNA, 41 nt, Synthetic Construct; identical to SEQ ID NO: 781
  source 1..41: mol_type = other RNA

SEQ ID NO: 53182 - RNA, 23 nt, Synthetic Construct
  source 1..23: mol_type = other RNA
acagtagtctgcacattggttat

SEQ ID NO: 53183 - RNA, 25 nt, Synthetic Construct
  source 1..25: mol_type = other RNA
ttgagggtatgagatcgagacgaca

SEQ ID NO: 53184 - RNA, 25 nt, Synthetic Construct
  source 1..25: mol_type = other RNA
ttgagggtatgagatcgagacgaca

SEQ ID NO: 53185 - RNA, 22 nt, Synthetic Construct
  source 1..22: mol_type = other RNA
acagtagtctgcacattggtta

SEQ ID NO: 53186 - RNA, 22 nt, Synthetic Construct
  source 1..22: mol_type = other RNA
nagcagcacgtaaatattggcg

SEQ ID NO: 53187 - RNA, 22 nt, Synthetic Construct
  source 1..22: mol_type = other RNA
accctgtagatccgaatttgtg

SEQ ID NO: 53188 - RNA, 25 nt, Synthetic Construct
  source 1..25: mol_type = other RNA
ctgaggatatgagatcgagacgaca

SEQ ID NO: 53189 - RNA, 25 nt, Synthetic Construct
  source 1..25: mol_type = other RNA
ctgaggatatgagatcgagacgaca

SEQ ID NO: 53190 - RNA, 21 nt, Synthetic Construct
  source 1..21: mol_type = other RNA
tgaggtagtagtttgtgccgt

SEQ ID NO: 53191 - RNA, 17 nt, Synthetic Construct
  source 1..17: mol_type = other RNA
agcggtggatgatgtgg

SEQ ID NO: 53192 - RNA, 17 nt, Synthetic Construct
  source 1..17: mol_type = other RNA
agcggtggatgatgtgg

SEQ ID NO: 53193 - RNA, 26 nt, Synthetic Construct
  source 1..26: mol_type = other RNA
tgtaaacatccttgactggaagcttt

SEQ ID NO: 53194 - RNA, 18 nt, Synthetic Construct
  source 1..18: mol_type = other RNA
caacggaatcccaaaagc

SEQ ID NO: 53195 - RNA, 18 nt, Synthetic Construct
  source 1..18: mol_type = other RNA
caacggaatcccaaaagc

SEQ ID NO: 53196 - RNA, 21 nt, Synthetic Construct
  source 1..21: mol_type = other RNA
taacactgtctggtaacgatg

SEQ ID NO: 53197 - RNA, 21 nt, Synthetic Construct
  source 1..21: mol_type = other RNA
taacactgtctggtaacgatg

SEQ ID NO: 53198 - RNA, 22 nt, Synthetic Construct
  source 1..22: mol_type = other RNA
tgagagctgaattccatgggtt

SEQ ID NO: 53199 - RNA, 22 nt, Synthetic Construct
  source 1..22: mol_type = other RNA
tgagagctgaattccatgggtt

SEQ ID NO: 53200 - RNA, 20 nt, Synthetic Construct
  source 1..20: mol_type = other RNA
tacagtatagatgatgtact

SEQ ID NO: 53201 - RNA, 15 nt, Synthetic Construct
  source 1..15: mol_type = other RNA
gggtgaaagcggggg

SEQ ID NO: 53202 - RNA, 15 nt, Synthetic Construct
  source 1..15: mol_type = other RNA
gggtgaaagcggggg

SEQ ID NO: 53203 - RNA, 20 nt, Synthetic Construct
  source 1..20: mol_type = other RNA
tgaggtagtaggttgcatag

SEQ ID NO: 53204 - RNA, 25 nt, Synthetic Construct
  source 1..25: mol_type = other RNA
gggttgtaaaccgcttttgtcaggg

SEQ ID NO: 53205 - RNA, 25 nt, Synthetic Construct
  source 1..25: mol_type = other RNA
gggttgtaaaccgcttttgtcaggg

SEQ ID NO: 53206 - RNA, 22 nt, Synthetic Construct
  source 1..22: mol_type = other RNA
ccacagggtagaaccacggact

SEQ ID NO: 53207 - RNA, 21 nt, Synthetic Construct
  source 1..21: mol_type = other RNA
gctttgatccggagatttccg

SEQ ID NO: 53208 - RNA, 21 nt, Synthetic Construct
  source 1..21: mol_type = other RNA
gctttgatccggagatttccg

SEQ ID NO: 53209 - RNA, 21 nt, Synthetic Construct
  source 1..21: mol_type = other RNA
tgaggtagtaagttgtgtggt

SEQ ID NO: 53210 - RNA, 16 nt, Synthetic Construct
  source 1..16: mol_type = other RNA
gtctacggctatacca

SEQ ID NO: 53211 - RNA, 16 nt, Synthetic Construct
  source 1..16: mol_type = other RNA
gtctacggctatacca

SEQ ID NO: 53212 - RNA, 22 nt, Synthetic Construct
  source 1..22: mol_type = other RNA
tcctgtaccgagctgccccgag

SEQ ID NO: 53213 - RNA, 22 nt, Synthetic Construct
  source 1..22: mol_type = other RNA
tgaggtagtaggttgtatggtt

SEQ ID NO: 53214 - RNA, 22 nt, Synthetic Construct
  source 1..22: mol_type = other RNA
tgaggtagtaggttgtatggtt

SEQ ID NO: 53215 - RNA, 23 nt, Synthetic Construct
  source 1..23: mol_type = other RNA
gactcttagcggtggatcactcg

SEQ ID NO: 53216 - RNA, 23 nt, Synthetic Construct
  source 1..23: mol_type = other RNA
gactcttagcggtggatcactcg

SEQ ID NO: 53217 - RNA, 23 nt, Synthetic Construct
  source 1..23: mol_type = other RNA
tcggaatcgctagtaatcgcgga

SEQ ID NO: 53218 - RNA, 23 nt, Synthetic Construct
  source 1..23: mol_type = other RNA
tcggaatcgctagtaatcgcgga

SEQ ID NO: 53219 - RNA, 21 nt, Synthetic Construct
  source 1..21: mol_type = other RNA
actcggcgtggcgtcggtcgt

SEQ ID NO: 53220 - RNA, 21 nt, Synthetic Construct
  source 1..21: mol_type = other RNA
actcggcgtggcgtcggtcgt

SEQ ID NO: 53221 - RNA, 22 nt, Synthetic Construct
  source 1..22: mol_type = other RNA
tgagatagtagattgtatagtt

SEQ ID NO: 53222 - RNA, 22 nt, Synthetic Construct
  source 1..22: mol_type = other RNA
tgagatagtagattgtatagtt

SEQ ID NO: 53223 - RNA, 27 nt, Synthetic Construct
  source 1..27: mol_type = other RNA
cagagttctacagtccgacgatcgatc

SEQ ID NO: 53224 - RNA, 27 nt, Synthetic Construct
  source 1..27: mol_type = other RNA
cagagttctacagtccgacgatcgatc

SEQ ID NO: 53225 - RNA, 22 nt, Synthetic Construct
  source 1..22: mol_type = other RNA
atcaagtaattcaggataggtt

SEQ ID NO: 53226 - RNA, 21 nt, Synthetic Construct
  source 1..21: mol_type = other RNA
tcctgtaccgagctgccccga

SEQ ID NO: 53227 - RNA, 23 nt, Synthetic Construct
  source 1..23: mol_type = other RNA
tgaggggaagagagcgagacttt

SEQ ID NO: 53228 - RNA, 22 nt, Synthetic Construct
  source 1..22: mol_type = other RNA
tgaagtagtaggttgtatagtt

SEQ ID NO: 53229 - RNA, 22 nt, Synthetic Construct
  source 1..22: mol_type = other RNA
tgaggtagtaggttgtgtgatt

SEQ ID NO: 53230 - RNA, 18 nt, Synthetic Construct
  source 1..18: mol_type = other RNA
cgactcttagcggtggat

SEQ ID NO: 53231 - RNA, 22 nt, Synthetic Construct
  source 1..22: mol_type = other RNA
tcagtgcactacagagctttgt

SEQ ID NO: 53232 - RNA, 22 nt, Synthetic Construct
  source 1..22: mol_type = other RNA
tgaggtagtagtttgtgctgta

SEQ ID NO: 53233 - RNA, 23 nt, Synthetic Construct
  source 1..23: mol_type = other RNA
tggtaaaacgacgtacttagtgt

SEQ ID NO: 53234 - RNA, 22 nt, Synthetic Construct
  source 1..22: mol_type = other RNA
tagcagcacgtagatattggcg

SEQ ID NO: 53235 - RNA, 22 nt, Synthetic Construct
  source 1..22: mol_type = other RNA
tagcagcacgtagatattggcg

SEQ ID NO: 53236 - RNA, 19 nt, Synthetic Construct
  source 1..19: mol_type = other RNA
gtacagtactgtgataact

SEQ ID NO: 53237 - RNA, 19 nt, Synthetic Construct
  source 1..19: mol_type = other RNA
gtacagtactgtgataact

SEQ ID NO: 53238 - RNA, 21 nt, Synthetic Construct
  source 1..21: mol_type = other RNA
tcccgtactgagctgccccga

SEQ ID NO: 53239 - RNA, 15 nt, Synthetic Construct
  source 1..15: mol_type = other RNA
cggcccagactccta

SEQ ID NO: 53240 - RNA, 15 nt, Synthetic Construct
  source 1..15: mol_type = other RNA
cggcccagactccta

SEQ ID NO: 53241 - RNA, 23 nt, Synthetic Construct
  source 1..23: mol_type = other RNA
tgaggtagtaggttgcgtggttt

SEQ ID NO: 53242 - RNA, 21 nt, Synthetic Construct
  source 1..21: mol_type = other RNA
ctagactgaagctccttgaga

SEQ ID NO: 53243 - RNA, 21 nt, Synthetic Construct
  source 1..21: mol_type = other RNA
cccataaagtagaaagcacta

SEQ ID NO: 53244 - RNA, 22 nt, Synthetic Construct
  source 1..22: mol_type = other RNA
tagcagcacatcatggtttaca

SEQ ID NO: 53245 - RNA, 22 nt, Synthetic Construct
  source 1..22: mol_type = other RNA
tagcagcacatcatggtttaca

SEQ ID NO: 53246 - RNA, 22 nt, Synthetic Construct
  source 1..22: mol_type = other RNA
atcacattgccagggatttcca

SEQ ID NO: 53247 - RNA, 17 nt, Synthetic Construct
  source 1..17: mol_type = other RNA
catgcaagtcgaacggt

SEQ ID NO: 53248 - RNA, 17 nt, Synthetic Construct
  source 1..17: mol_type = other RNA
catgcaagtcgaacggt

SEQ ID NO: 53249 - RNA, 23 nt, Synthetic Construct
  source 1..23: mol_type = other RNA
tcctgtactgagttgccccgaga

SEQ ID NO: 53250 - RNA, 23 nt, Synthetic Construct
  source 1..23: mol_type = other RNA
tcctgtactgagttgccccgaga

SEQ ID NO: 53251 - RNA, 39 nt, Synthetic Construct; identical to SEQ ID NO: 4939
  source 1..39: mol_type = other RNA

SEQ ID NO: 53252 - RNA, 39 nt, Synthetic Construct; identical to SEQ ID NO: 4939
  source 1..39: mol_type = other RNA

SEQ ID NO: 53253 - RNA, 31 nt, Synthetic Construct; identical to SEQ ID NO: 2293
  source 1..31: mol_type = other RNA

SEQ ID NO: 53254 - RNA, 21 nt, Synthetic Construct
  source 1..21: mol_type = other RNA
cgcgacctcagatcagacgtg

SEQ ID NO: 53255 - RNA, 21 nt, Synthetic Construct
  source 1..21: mol_type = other RNA
cgcgacctcagatcagacgtg

SEQ ID NO: 53256 - RNA, 24 nt, Synthetic Construct
  source 1..24: mol_type = other RNA
tgtaaacaaccccgactggaagct

SEQ ID NO: 53257 - RNA, 25 nt, Synthetic Construct
  source 1..25: mol_type = other RNA
tcccacatggtctagcggttaggat

SEQ ID NO: 53258 - RNA, 25 nt, Synthetic Construct
  source 1..25: mol_type = other RNA
tcccacatggtctagcggttaggat

SEQ ID NO: 53259 - RNA, 23 nt, Synthetic Construct
  source 1..23: mol_type = other RNA
ggctacattgtctgctgggtttc

SEQ ID NO: 53260 - RNA, 38 nt, Synthetic Construct; identical to SEQ ID NO: 7148
  source 1..38: mol_type = other RNA

SEQ ID NO: 53261 - RNA, 38 nt, Synthetic Construct; identical to SEQ ID NO: 7148
  source 1..38: mol_type = other RNA

SEQ ID NO: 53262 - RNA, 22 nt, Synthetic Construct
  source 1..22: mol_type = other RNA
tgaggtagtagtttatgctgtt

SEQ ID NO: 53263 - RNA, 22 nt, Synthetic Construct
  source 1..22: mol_type = other RNA
tgaggtagtagtttatgctgtt

SEQ ID NO: 53264 - RNA, 25 nt, Synthetic Construct
  source 1..25: mol_type = other RNA
ttgaggatatgagatcgagacgaca

SEQ ID NO: 53265 - RNA, 25 nt, Synthetic Construct
  source 1..25: mol_type = other RNA
ttgaggatatgagatcgagacgaca

SEQ ID NO: 53266 - RNA, 20 nt, Synthetic Construct
  source 1..20: mol_type = other RNA
tggaatgtaaagaagtatgt

SEQ ID NO: 53267 - RNA, 20 nt, Synthetic Construct
  source 1..20: mol_type = other RNA
tggaatgtaaagaagtatgt

SEQ ID NO: 53268 - RNA, 21 nt, Synthetic Construct
  source 1..21: mol_type = other RNA
ctaggctgaagctccttgagg

SEQ ID NO: 53269 - RNA, 21 nt, Synthetic Construct
  source 1..21: mol_type = other RNA
ctaggctgaagctccttgagg

SEQ ID NO: 53270 - RNA, 20 nt, Synthetic Construct
  source 1..20: mol_type = other RNA
tgaggtagtaggctgtatag

SEQ ID NO: 53271 - RNA, 22 nt, Synthetic Construct
  source 1..22: mol_type = other RNA
ctttcagtcggatgtttacagt

SEQ ID NO: 53272 - RNA, 22 nt, Synthetic Construct
  source 1..22: mol_type = other RNA
ctttcagtcggatgtttacagt

SEQ ID NO: 53273 - RNA, 21 nt, Synthetic Construct
  source 1..21: mol_type = other RNA
cggagtgtgacaatggtgttt

SEQ ID NO: 53274 - RNA, 21 nt, Synthetic Construct
  source 1..21: mol_type = other RNA
cggagtgtgacaatggtgttt

SEQ ID NO: 53275 - RNA, 21 nt, Synthetic Construct
  source 1..21: mol_type = other RNA
tgtagtgtttcctactttatg

SEQ ID NO: 53276 - RNA, 34 nt, Synthetic Construct; identical to SEQ ID NO: 2375
  source 1..34: mol_type = other RNA

SEQ ID NO: 53277 - RNA, 34 nt, Synthetic Construct; identical to SEQ ID NO: 2375
  source 1..34: mol_type = other RNA

SEQ ID NO: 53278 - RNA, 22 nt, Synthetic Construct
  source 1..22: mol_type = other RNA
tattgcacttgtcccggcctat

SEQ ID NO: 53279 - RNA, 22 nt, Synthetic Construct
  source 1..22: mol_type = other RNA
tattgcacttgtcccggcctat

SEQ ID NO: 53280 - RNA, 22 nt, Synthetic Construct
  source 1..22: mol_type = other RNA
tgaggtagtaggttatgtggtt

SEQ ID NO: 53281 - RNA, 20 nt, Synthetic Construct
  source 1..20: mol_type = other RNA
actgatcgagtcgtcctgcg

SEQ ID NO: 53282 - RNA, 34 nt, Synthetic Construct; identical to SEQ ID NO: 2367
  source 1..34: mol_type = other RNA

SEQ ID NO: 53283 - RNA, 34 nt, Synthetic Construct; identical to SEQ ID NO: 2367
  source 1..34: mol_type = other RNA

SEQ ID NO: 53284 - RNA, 22 nt, Synthetic Construct
  source 1..22: mol_type = other RNA
tcctgtactgagctgccctgag

SEQ ID NO: 53285 - RNA, 22 nt, Synthetic Construct
  source 1..22: mol_type = other RNA
tcctgtactgagctgccctgag

SEQ ID NO: 53286 - RNA, 21 nt, Synthetic Construct
  source 1..21: mol_type = other RNA
gtagcgaaattccttgtcggg

SEQ ID NO: 53287 - RNA, 23 nt, Synthetic Construct
  source 1..23: mol_type = other RNA
tgtcagtttgtcaaataccccat

SEQ ID NO: 53288 - RNA, 28 nt, Synthetic Construct
  source 1..28: mol_type = other RNA
ccccccactgctaaatttggctggcttt

SEQ ID NO: 53289 - RNA, 22 nt, Synthetic Construct
  source 1..22: mol_type = other RNA
tattgcacttgtcccggcccgt

SEQ ID NO: 53290 - RNA, 22 nt, Synthetic Construct
  source 1..22: mol_type = other RNA
tattgcacttgtcccggcccgt

SEQ ID NO: 53291 - RNA, 28 nt, Synthetic Construct
  source 1..28: mol_type = other RNA
gcatgggtggttcagtggtagaattctc

SEQ ID NO: 53292 - RNA, 28 nt, Synthetic Construct
  source 1..28: mol_type = other RNA
gcatgggtggttcagtggtagaattctc

SEQ ID NO: 53293 - RNA, 27 nt, Synthetic Construct
  source 1..27: mol_type = other RNA
ccccccactgctaaattagactggctt

SEQ ID NO: 53294 - RNA, 23 nt, Synthetic Construct
  source 1..23: mol_type = other RNA
aatgacacgatcactcccgttgt

SEQ ID NO: 53295 - RNA, 23 nt, Synthetic Construct
  source 1..23: mol_type = other RNA
aatgacacgatcactcccgttgt

SEQ ID NO: 53296 - RNA, 22 nt, Synthetic Construct
  source 1..22: mol_type = other RNA
tgtagtgtctcctactttatgg

SEQ ID NO: 53297 - RNA, 20 nt, Synthetic Construct
  source 1..20: mol_type = other RNA
tgaggtagcaggttgtatag

SEQ ID NO: 53298 - RNA, 22 nt, Synthetic Construct
  source 1..22: mol_type = other RNA
tgaggtagtggtttgtgctgtt

SEQ ID NO: 53299 - RNA, 22 nt, Synthetic Construct
  source 1..22: mol_type = other RNA
tgaggtagtggtttgtgctgtt

SEQ ID NO: 53300 - RNA, 23 nt, Synthetic Construct
  source 1..23: mol_type = other RNA
tgaggggcagagagcgagacttg

SEQ ID NO: 53301 - RNA, 25 nt, Synthetic Construct
  source 1..25: mol_type = other RNA
ttgagggtatgagatcgagacgaca

SEQ ID NO: 53302 - RNA, 25 nt, Synthetic Construct
  source 1..25: mol_type = other RNA
ttgagggtatgagatcgagacgaca

SEQ ID NO: 53303 - RNA, 23 nt, Synthetic Construct
  source 1..23: mol_type = other RNA
tgaggggcagagagtgagacttt

SEQ ID NO: 53304 - RNA, 22 nt, Synthetic Construct
  source 1..22: mol_type = other RNA
tcggatccgtctgagcttggct

SEQ ID NO: 53305 - RNA, 22 nt, Synthetic Construct
  source 1..22: mol_type = other RNA
tcggatccgtctgagcttggct

SEQ ID NO: 53306 - RNA, 27 nt, Synthetic Construct
  source 1..27: mol_type = other RNA
acccccactgctaaatttgactggctt

SEQ ID NO: 53307 - RNA, 20 nt, Synthetic Construct
  source 1..20: mol_type = other RNA
tgaggtagtaggttgtgagg

SEQ ID NO: 53308 - RNA, 20 nt, Synthetic Construct
  source 1..20: mol_type = other RNA
tgaggtagtaggttgtgagg

SEQ ID NO: 53309 - RNA, 30 nt, Synthetic Construct; identical to SEQ ID NO: 1771
  source 1..30: mol_type = other RNA

SEQ ID NO: 53310 - RNA, 30 nt, Synthetic Construct; identical to SEQ ID NO: 1771
  source 1..30: mol_type = other RNA

SEQ ID NO: 53311 - RNA, 27 nt, Synthetic Construct
  source 1..27: mol_type = other RNA
ggggagctaatcccagaaacccggtcg

SEQ ID NO: 53312 - RNA, 23 nt, Synthetic Construct
  source 1..23: mol_type = other RNA
tcctgtactgagctgccccgggt

SEQ ID NO: 53313 - RNA, 18 nt, Synthetic Construct
  source 1..18: mol_type = other RNA
gcaggacggtggccatgg

SEQ ID NO: 53314 - RNA, 18 nt, Synthetic Construct
  source 1..18: mol_type = other RNA
gcaggacggtggccatgg

SEQ ID NO: 53315 - RNA, 21 nt, Synthetic Construct
  source 1..21: mol_type = other RNA
ctagaccgaagctccttgagg

SEQ ID NO: 53316 - RNA, 21 nt, Synthetic Construct
  source 1..21: mol_type = other RNA
tgaggtagtaggctgtatagt

SEQ ID NO: 53317 - RNA, 21 nt, Synthetic Construct
  source 1..21: mol_type = other RNA
tgaggtagtaggctgtatagt

SEQ ID NO: 53318 - RNA, 26 nt, Synthetic Construct
  source 1..26: mol_type = other RNA
gtgtgaaagtaggtcatcgtcaggct

SEQ ID NO: 53319 - RNA, 26 nt, Synthetic Construct
  source 1..26: mol_type = other RNA
gtgtgaaagtaggtcatcgtcaggct

SEQ ID NO: 53320 - RNA, 23 nt, Synthetic Construct
  source 1..23: mol_type = other RNA
tgaggtagcaggttgtgtggttt

SEQ ID NO: 53321 - RNA, 23 nt, Synthetic Construct
  source 1..23: mol_type = other RNA
tgaggtagcaggttgtgtggttt

SEQ ID NO: 53322 - RNA, 16 nt, Synthetic Construct
  source 1..16: mol_type = other RNA
gtctacggccatacca

SEQ ID NO: 53323 - RNA, 21 nt, Synthetic Construct
  source 1..21: mol_type = other RNA
taactccttaagcaatctcgc

SEQ ID NO: 53324 - RNA, 21 nt, Synthetic Construct
  source 1..21: mol_type = other RNA
taactccttaagcaatctcgc

SEQ ID NO: 53325 - RNA, 23 nt, Synthetic Construct
  source 1..23: mol_type = other RNA
tagcagcacataatggtttgtgg

SEQ ID NO: 53326 - RNA, 22 nt, Synthetic Construct
  source 1..22: mol_type = other RNA
tgtaaacatcctacactctcag

SEQ ID NO: 53327 - RNA, 22 nt, Synthetic Construct
  source 1..22: mol_type = other RNA
tgtaaacatcctacactctcag

SEQ ID NO: 53328 - RNA, 22 nt, Synthetic Construct
  source 1..22: mol_type = other RNA
tgaggtggtaggttgtgtggtt

SEQ ID NO: 53329 - RNA, 22 nt, Synthetic Construct
  source 1..22: mol_type = other RNA
tgaggtggtaggttgtgtggtt

SEQ ID NO: 53330 - RNA, 32 nt, Synthetic Construct; identical to SEQ ID NO: 2086
  source 1..32: mol_type = other RNA

SEQ ID NO: 53331 - RNA, 32 nt, Synthetic Construct; identical to SEQ ID NO: 2086
  source 1..32: mol_type = other RNA

SEQ ID NO: 53332 - RNA, 21 nt, Synthetic Construct
  source 1..21: mol_type = other RNA
tcctgtactgagctgccccaa

SEQ ID NO: 53333 - RNA, 21 nt, Synthetic Construct
  source 1..21: mol_type = other RNA
tcctgtactgagctgccccaa

SEQ ID NO: 53334 - RNA, 31 nt, Synthetic Construct; identical to SEQ ID NO: 1881
  source 1..31: mol_type = other RNA

SEQ ID NO: 53335 - RNA, 31 nt, Synthetic Construct; identical to SEQ ID NO: 1881
  source 1..31: mol_type = other RNA

SEQ ID NO: 53336 - RNA, 23 nt, Synthetic Construct
  source 1..23: mol_type = other RNA
ggtagcgaaattccttgtcgggt

SEQ ID NO: 53337 - RNA, 15 nt, Synthetic Construct
  source 1..15: mol_type = other RNA
acccttgtcattagt

SEQ ID NO: 53338 - RNA, 23 nt, Synthetic Construct
  source 1..23: mol_type = other RNA
caacggaatcccaaaagcagccg

SEQ ID NO: 53339 - RNA, 21 nt, Synthetic Construct
  source 1..21: mol_type = other RNA
gtagtgtttcctactttatgg

SEQ ID NO: 53340 - RNA, 25 nt, Synthetic Construct
  source 1..25: mol_type = other RNA
gcgccgctggtgtagtggtatcatg

SEQ ID NO: 53341 - RNA, 25 nt, Synthetic Construct
  source 1..25: mol_type = other RNA
gcgccgctggtgtagtggtatcatg

SEQ ID NO: 53342 - RNA, 22 nt, Synthetic Construct
  source 1..22: mol_type = other RNA
tgaggtagtaggttgtgctgtt

SEQ ID NO: 53343 - RNA, 22 nt, Synthetic Construct
  source 1..22: mol_type = other RNA
tgaggtagtaggttgtgctgtt

SEQ ID NO: 53344 - RNA, 23 nt, Synthetic Construct
  source 1..23: mol_type = other RNA
cggtaatacgacgtacttagtgt

SEQ ID NO: 53345 - RNA, 23 nt, Synthetic Construct
  source 1..23: mol_type = other RNA
cggtaatacgacgtacttagtgt

SEQ ID NO: 53346 - RNA, 21 nt, Synthetic Construct
  source 1..21: mol_type = other RNA
tgaggtagcaggttgtatagt

SEQ ID NO: 53347 - RNA, 21 nt, Synthetic Construct
  source 1..21: mol_type = other RNA
tgaggtagcaggttgtatagt

SEQ ID NO: 53348 - RNA, 22 nt, Synthetic Construct
  source 1..22: mol_type = other RNA
tcctgtactgaactgccccgag

SEQ ID NO: 53349 - RNA, 22 nt, Synthetic Construct
  source 1..22: mol_type = other RNA
cgaggtagtagattgtatagtt

SEQ ID NO: 53350 - RNA, 22 nt, Synthetic Construct
  source 1..22: mol_type = other RNA
cgaggtagtagattgtatagtt

SEQ ID NO: 53351 - RNA, 20 nt, Synthetic Construct
  source 1..20: mol_type = other RNA
tgaggcagtaggttgtatag

SEQ ID NO: 53352 - RNA, 25 nt, Synthetic Construct
  source 1..25: mol_type = other RNA
ttgaggatatgagatcgagacgacg

SEQ ID NO: 53353 - RNA, 22 nt, Synthetic Construct
  source 1..22: mol_type = other RNA
cattgcacttgtctcagtctga

SEQ ID NO: 53354 - RNA, 28 nt, Synthetic Construct
  source 1..28: mol_type = other RNA
gcggtataccgaagctctaggtgcggca

SEQ ID NO: 53355 - RNA, 28 nt, Synthetic Construct
  source 1..28: mol_type = other RNA
gcggtataccgaagctctaggtgcggca

SEQ ID NO: 53356 - RNA, 24 nt, Synthetic Construct
  source 1..24: mol_type = other RNA
tagtgcaatattgcttatagggtt

SEQ ID NO: 53357 - RNA, 22 nt, Synthetic Construct
  source 1..22: mol_type = other RNA
tcctgcactgagctgccccgag

SEQ ID NO: 53358 - RNA, 22 nt, Synthetic Construct
  source 1..22: mol_type = other RNA
tcctgcactgagctgccccgag

SEQ ID NO: 53359 - RNA, 32 nt, Synthetic Construct; identical to SEQ ID NO: 4509
  source 1..32: mol_type = other RNA

SEQ ID NO: 53360 - RNA, 32 nt, Synthetic Construct; identical to SEQ ID NO: 4509
  source 1..32: mol_type = other RNA

SEQ ID NO: 53361 - RNA, 22 nt, Synthetic Construct
  source 1..22: mol_type = other RNA
tgaggtagtgggttgtgtggtt

SEQ ID NO: 53362 - RNA, 22 nt, Synthetic Construct
  source 1..22: mol_type = other RNA
gaagaggacttggagctcgatc

SEQ ID NO: 53363 - RNA, 22 nt, Synthetic Construct
  source 1..22: mol_type = other RNA
gaagaggacttggagctcgatc

SEQ ID NO: 53364 - RNA, 22 nt, Synthetic Construct
  source 1..22: mol_type = other RNA
cattgcacttgcctcggtctga

SEQ ID NO: 53365 - RNA, 20 nt, Synthetic Construct
  source 1..20: mol_type = other RNA
tgaggtagtaggttgtgtag

SEQ ID NO: 53366 - RNA, 20 nt, Synthetic Construct
  source 1..20: mol_type = other RNA
tgaggtagtaggttgtgtag

SEQ ID NO: 53367 - RNA, 22 nt, Synthetic Construct
  source 1..22: mol_type = other RNA
tcagtgcatgacagaacttggg

SEQ ID NO: 53368 - RNA, 18 nt, Synthetic Construct
  source 1..18: mol_type = other RNA
tgcgtagatatgcggagg

SEQ ID NO: 53369 - RNA, 19 nt, Synthetic Construct
  source 1..19: mol_type = other RNA
gcgaaattccttgtcgggt

SEQ ID NO: 53370 - RNA, 19 nt, Synthetic Construct
  source 1..19: mol_type = other RNA
gcgaaattccttgtcgggt

SEQ ID NO: 53371 - RNA, 32 nt, Synthetic Construct; identical to SEQ ID NO: 1238
  source 1..32: mol_type = other RNA

SEQ ID NO: 53372 - RNA, 22 nt, Synthetic Construct
  source 1..22: mol_type = other RNA
tcctgtactgaactgccccgag

SEQ ID NO: 53373 - RNA, 35 nt, Synthetic Construct; identical to SEQ ID NO: 2505
  source 1..35: mol_type = other RNA

SEQ ID NO: 53374 - RNA, 35 nt, Synthetic Construct; identical to SEQ ID NO: 2505
  source 1..35: mol_type = other RNA

SEQ ID NO: 53375 - RNA, 22 nt, Synthetic Construct
  source 1..22: mol_type = other RNA
tgaggtagtaagttgtgtggtt

SEQ ID NO: 53376 - RNA, 22 nt, Synthetic Construct
  source 1..22: mol_type = other RNA
tgaggtagtaagttgtgtggtt

SEQ ID NO: 53377 - RNA, 24 nt, Synthetic Construct
  source 1..24: mol_type = other RNA
tgatatgtttgatatattaggttg

SEQ ID NO: 53378 - RNA, 24 nt, Synthetic Construct
  source 1..24: mol_type = other RNA
tgatatgtttgatatattaggttg

SEQ ID NO: 53379 - RNA, 22 nt, Synthetic Construct
  source 1..22: mol_type = other RNA
ccgtaccgtgagtaataatgcg

SEQ ID NO: 53380 - RNA, 22 nt, Synthetic Construct
  source 1..22: mol_type = other RNA
ccgtaccgtgagtaataatgcg

SEQ ID NO: 53381 - RNA, 22 nt, Synthetic Construct
  source 1..22: mol_type = other RNA
gggagtgtgacaatggtgtttg

SEQ ID NO: 53382 - RNA, 21 nt, Synthetic Construct
  source 1..21: mol_type = other RNA
cggtcccaagggtatggctgt

SEQ ID NO: 53383 - RNA, 21 nt, Synthetic Construct
  source 1..21: mol_type = other RNA
cggtcccaagggtatggctgt

SEQ ID NO: 53384 - RNA, 24 nt, Synthetic Construct
  source 1..24: mol_type = other RNA
tgtaaacatccccgactggaggct

SEQ ID NO: 53385 - RNA, 23 nt, Synthetic Construct
  source 1..23: mol_type = other RNA
gcgtggtaggagagcgttctgta

SEQ ID NO: 53386 - RNA, 21 nt, Synthetic Construct
  source 1..21: mol_type = other RNA
tgaggtagtagtttgcgctgt

SEQ ID NO: 53387 - RNA, 22 nt, Synthetic Construct
  source 1..22: mol_type = other RNA
tattgcacttgtctcggcctgt

SEQ ID NO: 53388 - RNA, 23 nt, Synthetic Construct
  source 1..23: mol_type = other RNA
tggggtagtaggttgtgtggttt

SEQ ID NO: 53389 - RNA, 22 nt, Synthetic Construct
  source 1..22: mol_type = other RNA
catagcacttgtctcggtctga

SEQ ID NO: 53390 - RNA, 22 nt, Synthetic Construct
  source 1..22: mol_type = other RNA
catagcacttgtctcggtctga

SEQ ID NO: 53391 - RNA, 24 nt, Synthetic Construct
  source 1..24: mol_type = other RNA
tgtaaacaaccccgactggaagct

SEQ ID NO: 53392 - RNA, 17 nt, Synthetic Construct
  source 1..17: mol_type = other RNA
agtccggatcgtagtct

SEQ ID NO: 53393 - RNA, 17 nt, Synthetic Construct
  source 1..17: mol_type = other RNA
agtccggatcgtagtct

SEQ ID NO: 53394 - RNA, 25 nt, Synthetic Construct
  source 1..25: mol_type = other RNA
ttgaggatacgagatcgagacgaca

SEQ ID NO: 53395 - RNA, 25 nt, Synthetic Construct
  source 1..25: mol_type = other RNA
ttgaggatacgagatcgagacgaca

SEQ ID NO: 53396 - RNA, 22 nt, Synthetic Construct
  source 1..22: mol_type = other RNA
tgaggtagtaggttgcgtggtt

SEQ ID NO: 53397 - RNA, 25 nt, Synthetic Construct
  source 1..25: mol_type = other RNA
gagaaagctcacaagaactgctaac

SEQ ID NO: 53398 - RNA, 21 nt, Synthetic Construct
  source 1..21: mol_type = other RNA
tggggtagtagattgtatagt

SEQ ID NO: 53399 - RNA, 21 nt, Synthetic Construct
  source 1..21: mol_type = other RNA
tggggtagtagattgtatagt

SEQ ID NO: 53400 - RNA, 24 nt, Synthetic Construct
  source 1..24: mol_type = other RNA
tgtaagcatccccgactggaagct

SEQ ID NO: 53401 - RNA, 24 nt, Synthetic Construct
  source 1..24: mol_type = other RNA
tgtaagcatccccgactggaagct

SEQ ID NO: 53402 - RNA, 19 nt, Synthetic Construct
  source 1..19: mol_type = other RNA
gctattgacgaccgtaccg

SEQ ID NO: 53403 - RNA, 33 nt, Synthetic Construct; identical to SEQ ID NO: 33377
  source 1..33: mol_type = other RNA

SEQ ID NO: 53404 - RNA, 33 nt, Synthetic Construct; identical to SEQ ID NO: 33377
  source 1..33: mol_type = other RNA

SEQ ID NO: 53405 - RNA, 21 nt, Synthetic Construct
  source 1..21: mol_type = other RNA
tgaggtagtagattgtgtggt

SEQ ID NO: 53406 - RNA, 21 nt, Synthetic Construct
  source 1..21: mol_type = other RNA
tgaggtagtagattgtgtggt

SEQ ID NO: 53407 - RNA, 27 nt, Synthetic Construct
  source 1..27: mol_type = other RNA
ccccccactgctaaatttgtctggctt

SEQ ID NO: 53408 - RNA, 27 nt, Synthetic Construct
  source 1..27: mol_type = other RNA
ccccccactgctaaatttgtctggctt

SEQ ID NO: 53409 - RNA, 21 nt, Synthetic Construct
  source 1..21: mol_type = other RNA
tcctgtactgagctgcccgag

SEQ ID NO: 53410 - RNA, 21 nt, Synthetic Construct
  source 1..21: mol_type = other RNA
tcctgtactgagctgcccgag

SEQ ID NO: 53411 - RNA, 17 nt, Synthetic Construct
  source 1..17: mol_type = other RNA
tggccgttcttagttgg

SEQ ID NO: 53412 - RNA, 22 nt, Synthetic Construct
  source 1..22: mol_type = other RNA
ttataatacaacctgataagtg

SEQ ID NO: 53413 - RNA, 19 nt, Synthetic Construct
  source 1..19: mol_type = other RNA
tttgttcgttcggctcgcg

SEQ ID NO: 53414 - RNA, 19 nt, Synthetic Construct
  source 1..19: mol_type = other RNA
tttgttcgttcggctcgcg

SEQ ID NO: 53415 - RNA, 21 nt, Synthetic Construct
  source 1..21: mol_type = other RNA
tggggggcagagagcgagact

SEQ ID NO: 53416 - RNA, 24 nt, Synthetic Construct
  source 1..24: mol_type = other RNA
tcggatccgtctgagcttggcttt

SEQ ID NO: 53417 - RNA, 16 nt, Synthetic Construct
  source 1..16: mol_type = other RNA
ctctacggccatacca

SEQ ID NO: 53418 - RNA, 38 nt, Synthetic Construct; identical to SEQ ID NO: 2492
  source 1..38: mol_type = other RNA

SEQ ID NO: 53419 - RNA, 38 nt, Synthetic Construct; identical to SEQ ID NO: 2492
  source 1..38: mol_type = other RNA

SEQ ID NO: 53420 - RNA, 31 nt, Synthetic Construct; identical to SEQ ID NO: 758
  source 1..31: mol_type = other RNA

SEQ ID NO: 53421 - RNA, 31 nt, Synthetic Construct; identical to SEQ ID NO: 758
  source 1..31: mol_type = other RNA

SEQ ID NO: 53422 - RNA, 30 nt, Synthetic Construct; identical to SEQ ID NO: 768
  source 1..30: mol_type = other RNA

SEQ ID NO: 53423 - RNA, 30 nt, Synthetic Construct; identical to SEQ ID NO: 768
  source 1..30: mol_type = other RNA

SEQ ID NO: 53424 - RNA, 17 nt, Synthetic Construct
  source 1..17: mol_type = other RNA
ccagtaaacggcggccg

SEQ ID NO: 53425 - RNA, 25 nt, Synthetic Construct
  source 1..25: mol_type = other RNA
gcgccgctggtgtagtggtatcatg

SEQ ID NO: 53426 - RNA, 25 nt, Synthetic Construct
  source 1..25: mol_type = other RNA
gcgccgctggtgtagtggtatcatg

SEQ ID NO: 53427 - RNA, 21 nt, Synthetic Construct
  source 1..21: mol_type = other RNA
tgaggtagtaggttgtgtagt

SEQ ID NO: 53428 - RNA, 21 nt, Synthetic Construct
  source 1..21: mol_type = other RNA
tgaggtagtaggttgtgtagt

SEQ ID NO: 53429 - RNA, 21 nt, Synthetic Construct
  source 1..21: mol_type = other RNA
tcctgtgctgagctgccccga

SEQ ID NO: 53430 - RNA, 25 nt, Synthetic Construct
  source 1..25: mol_type = other RNA
tttccccttggggttgtaggaccac

SEQ ID NO: 53431 - RNA, 25 nt, Synthetic Construct
  source 1..25: mol_type = other RNA
tttccccttggggttgtaggaccac

SEQ ID NO: 53432 - RNA, 29 nt, Synthetic Construct
  source 1..29: mol_type = other RNA
gctaaacctagccccaaacccactccacc

SEQ ID NO: 53433 - RNA, 23 nt, Synthetic Construct
  source 1..23: mol_type = other RNA
tggtaatacaacgtacttagtgt

SEQ ID NO: 53434 - RNA, 23 nt, Synthetic Construct
  source 1..23: mol_type = other RNA
tggtaatacaacgtacttagtgt

SEQ ID NO: 53435 - RNA, 21 nt, Synthetic Construct
  source 1..21: mol_type = other RNA
gggagtgtgacaatggtgttt

SEQ ID NO: 53436 - RNA, 22 nt, Synthetic Construct
  source 1..22: mol_type = other RNA
tcctgtactgagcagccccgag

SEQ ID NO: 53437 - RNA, 16 nt, Synthetic Construct
  source 1..16: mol_type = other RNA
gtctacagccatacca

SEQ ID NO: 53438 - RNA, 16 nt, Synthetic Construct
  source 1..16: mol_type = other RNA
gtctacagccatacca

SEQ ID NO: 53439 - RNA, 22 nt, Synthetic Construct
  source 1..22: mol_type = other RNA
aggggcagagagcgagactttt

SEQ ID NO: 53440 - RNA, 22 nt, Synthetic Construct
  source 1..22: mol_type = other RNA
aggggcagagagcgagactttt

SEQ ID NO: 53441 - RNA, 19 nt, Synthetic Construct
  source 1..19: mol_type = other RNA
tcagtagctcgaggaaaag

SEQ ID NO: 53442 - RNA, 19 nt, Synthetic Construct
  source 1..19: mol_type = other RNA
tcagtagctcgaggaaaag

SEQ ID NO: 53443 - RNA, 18 nt, Synthetic Construct
  source 1..18: mol_type = other RNA
gtcgacgtatagggtgtg

SEQ ID NO: 53444 - RNA, 18 nt, Synthetic Construct
  source 1..18: mol_type = other RNA
gtcgacgtatagggtgtg

SEQ ID NO: 53445 - RNA, 15 nt, Synthetic Construct
  source 1..15: mol_type = other RNA
aaattccttgtcggg

SEQ ID NO: 53446 - RNA, 24 nt, Synthetic Construct
  source 1..24: mol_type = other RNA
tgcaaacatccccgactggaagct

SEQ ID NO: 53447 - RNA, 22 nt, Synthetic Construct
  source 1..22: mol_type = other RNA
tagcagcacgtaagtattggcg

SEQ ID NO: 53448 - RNA, 23 nt, Synthetic Construct
  source 1..23: mol_type = other RNA
tggtaatgcgacgtacttagtgt

SEQ ID NO: 53449 - RNA, 23 nt, Synthetic Construct
  source 1..23: mol_type = other RNA
tggtaatgcgacgtacttagtgt

SEQ ID NO: 53450 - RNA, 16 nt, Synthetic Construct
  source 1..16: mol_type = other RNA
caggacggtggccatg

SEQ ID NO: 53451 - RNA, 16 nt, Synthetic Construct
  source 1..16: mol_type = other RNA
caggacggtggccatg

SEQ ID NO: 53452 - RNA, 19 nt, Synthetic Construct
  source 1..19: mol_type = other RNA
gcgccgatgatagtgcgga

SEQ ID NO: 53453 - RNA, 19 nt, Synthetic Construct
  source 1..19: mol_type = other RNA
gcgccgatgatagtgcgga

SEQ ID NO: 53454 - RNA, 18 nt, Synthetic Construct
  source 1..18: mol_type = other RNA
gtcaggatggccgagcgg

SEQ ID NO: 53455 - RNA, 19 nt, Synthetic Construct
  source 1..19: mol_type = other RNA
gtacagtactgtgataact

SEQ ID NO: 53456 - RNA, 19 nt, Synthetic Construct
  source 1..19: mol_type = other RNA
gtacagtactgtgataact

SEQ ID NO: 53457 - RNA, 36 nt, Synthetic Construct; identical to SEQ ID NO: 2506
  source 1..36: mol_type = other RNA

SEQ ID NO: 53458 - RNA, 22 nt, Synthetic Construct
  source 1..22: mol_type = other RNA
caacggaatcccaaaagcagct

SEQ ID NO: 53459 - RNA, 22 nt, Synthetic Construct
  source 1..22: mol_type = other RNA
caacggaatcccaaaagcagct

SEQ ID NO: 53460 - RNA, 22 nt, Synthetic Construct
  source 1..22: mol_type = other RNA
gcgttgcaaccagtgccggggg

SEQ ID NO: 53461 - RNA, 16 nt, Synthetic Construct
  source 1..16: mol_type = other RNA
ctgcctcagcgtcggt

SEQ ID NO: 53462 - RNA, 16 nt, Synthetic Construct
  source 1..16: mol_type = other RNA
ctgcctcagcgtcggt

SEQ ID NO: 53463 - RNA, 32 nt, Synthetic Construct; identical to SEQ ID NO: 3541
  source 1..32: mol_type = other RNA

SEQ ID NO: 53464 - RNA, 32 nt, Synthetic Construct; identical to SEQ ID NO: 3541
  source 1..32: mol_type = other RNA

SEQ ID NO: 53465 - RNA, 21 nt, Synthetic Construct
  source 1..21: mol_type = other RNA
tgaggggcggagagcgagact

SEQ ID NO: 53466 - RNA, 23 nt, Synthetic Construct
  source 1..23: mol_type = other RNA
caacggaatcccaaaagcagccg

SEQ ID NO: 53467 - RNA, 26 nt, Synthetic Construct
  source 1..26: mol_type = other RNA
agggctgggtcggtcgggctggggcg

SEQ ID NO: 53468 - RNA, 26 nt, Synthetic Construct
  source 1..26: mol_type = other RNA
agggctgggtcggtcgggctggggcg

SEQ ID NO: 53469 - RNA, 23 nt, Synthetic Construct
  source 1..23: mol_type = other RNA
ccctgtactgagctgccccgaga

SEQ ID NO: 53470 - RNA, 23 nt, Synthetic Construct
  source 1..23: mol_type = other RNA
ccctgtactgagctgccccgaga

SEQ ID NO: 53471 - RNA, 23 nt, Synthetic Construct
  source 1..23: mol_type = other RNA
ggcagcattgtacagggctatgt

SEQ ID NO: 53472 - RNA, 23 nt, Synthetic Construct
  source 1..23: mol_type = other RNA
ggcagcattgtacagggctatgt

SEQ ID NO: 53473 - RNA, 35 nt, Synthetic Construct; identical to SEQ ID NO: 2505
  source 1..35: mol_type = other RNA

SEQ ID NO: 53474 - RNA, 30 nt, Synthetic Construct; identical to SEQ ID NO: 1220
  source 1..30: mol_type = other RNA

SEQ ID NO: 53475 - RNA, 30 nt, Synthetic Construct; identical to SEQ ID NO: 1220
  source 1..30: mol_type = other RNA

SEQ ID NO: 53476 - RNA, 18 nt, Synthetic Construct
  source 1..18: mol_type = other RNA
cccttgtcattagttgct

SEQ ID NO: 53477 - RNA, 16 nt, Synthetic Construct
  source 1..16: mol_type = other RNA
gcgtagatatgcggag

SEQ ID NO: 53478 - RNA, 27 nt, Synthetic Construct
  source 1..27: mol_type = other RNA
ccccccactgctaaatctgactggctt

SEQ ID NO: 53479 - RNA, 22 nt, Synthetic Construct
  source 1..22: mol_type = other RNA
tgaagtagtagattgtatagtt

SEQ ID NO: 53480 - RNA, 22 nt, Synthetic Construct
  source 1..22: mol_type = other RNA
tgaagtagtagattgtatagtt

SEQ ID NO: 53481 - RNA, 22 nt, Synthetic Construct
  source 1..22: mol_type = other RNA
aattgcacggtatccatctgta

SEQ ID NO: 53482 - RNA, 22 nt, Synthetic Construct
  source 1..22: mol_type = other RNA
aattgcacggtatccatctgta

SEQ ID NO: 53483 - RNA, 15 nt, Synthetic Construct
  source 1..15: mol_type = other RNA
cggcccagactccta

SEQ ID NO: 53484 - RNA, 31 nt, Synthetic Construct; identical to SEQ ID NO: 1881
  source 1..31: mol_type = other RNA

SEQ ID NO: 53485 - RNA, 31 nt, Synthetic Construct; identical to SEQ ID NO: 1881
  source 1..31: mol_type = other RNA

SEQ ID NO: 53486 - RNA, 15 nt, Synthetic Construct
  source 1..15: mol_type = other RNA
tccggatcgtagtct

SEQ ID NO: 53487 - RNA, 22 nt, Synthetic Construct
  source 1..22: mol_type = other RNA
tattgcgcttgtcccggcctgt

SEQ ID NO: 53488 - RNA, 22 nt, Synthetic Construct
  source 1..22: mol_type = other RNA
tgaggtagtaggctgtgtggtt

SEQ ID NO: 53489 - RNA, 22 nt, Synthetic Construct
  source 1..22: mol_type = other RNA
tgaggtagtaggctgtgtggtt

SEQ ID NO: 53490 - RNA, 17 nt, Synthetic Construct
  source 1..17: mol_type = other RNA
ggcccttatgggtaggg

SEQ ID NO: 53491 - RNA, 27 nt, Synthetic Construct
  source 1..27: mol_type = other RNA
ccccccaccgctaaatttgactggctt

SEQ ID NO: 53492 - RNA, 21 nt, Synthetic Construct
  source 1..21: mol_type = other RNA
tccttcattccaccggagtct

SEQ ID NO: 53493 - RNA, 21 nt, Synthetic Construct
  source 1..21: mol_type = other RNA
tccttcattccaccggagtct

SEQ ID NO: 53494 - RNA, 23 nt, Synthetic Construct
  source 1..23: mol_type = other RNA
aatgacacgatcactcccgttga

SEQ ID NO: 53495 - RNA, 23 nt, Synthetic Construct
  source 1..23: mol_type = other RNA
aatgacacgatcactcccgttga

SEQ ID NO: 53496 - RNA, 28 nt, Synthetic Construct
  source 1..28: mol_type = other RNA
cgactcttagcggtggatcactcggctc

SEQ ID NO: 53497 - RNA, 23 nt, Synthetic Construct
  source 1..23: mol_type = other RNA
tggtaatacgacgtacctagtgt

SEQ ID NO: 53498 - RNA, 21 nt, Synthetic Construct
  source 1..21: mol_type = other RNA
tgagaactgaattccatgggt

SEQ ID NO: 53499 - RNA, 21 nt, Synthetic Construct
  source 1..21: mol_type = other RNA
tgagaactgaattccatgggt

SEQ ID NO: 53500 - RNA, 22 nt, Synthetic Construct
  source 1..22: mol_type = other RNA
catcgcacttgtctcggtctga

SEQ ID NO: 53501 - RNA, 22 nt, Synthetic Construct
  source 1..22: mol_type = other RNA
tgaggtagtaggttgtgtggtc

SEQ ID NO: 53502 - RNA, 32 nt, Synthetic Construct; identical to SEQ ID NO: 2582
  source 1..32: mol_type = other RNA

SEQ ID NO: 53503 - RNA, 34 nt, Synthetic Construct; identical to SEQ ID NO: 2317
  source 1..34: mol_type = other RNA

SEQ ID NO: 53504 - RNA, 27 nt, Synthetic Construct
  source 1..27: mol_type = other RNA
ccccccactgctgaatttgactggctt

SEQ ID NO: 53505 - RNA, 27 nt, Synthetic Construct
  source 1..27: mol_type = other RNA
ccccccactgctgaatttgactggctt

SEQ ID NO: 53506 - RNA, 21 nt, Synthetic Construct
  source 1..21: mol_type = other RNA
tgaggtagtaggtcgtgtggt

SEQ ID NO: 53507 - RNA, 24 nt, Synthetic Construct
  source 1..24: mol_type = other RNA
ttcaagtaattcaggataggttgt

SEQ ID NO: 53508 - RNA, 15 nt, Synthetic Construct
  source 1..15: mol_type = other RNA
tgcaagtcgaacggt

SEQ ID NO: 53509 - RNA, 22 nt, Synthetic Construct
  source 1..22: mol_type = other RNA
tagcagcacgtaaaaattggcg

SEQ ID NO: 53510 - RNA, 22 nt, Synthetic Construct
  source 1..22: mol_type = other RNA
tagcagcacgtaaaaattggcg

SEQ ID NO: 53511 - RNA, 21 nt, Synthetic Construct
  source 1..21: mol_type = other RNA
ggagtatgcagagcaagatca

SEQ ID NO: 53512 - RNA, 21 nt, Synthetic Construct
  source 1..21: mol_type = other RNA
ggagtatgcagagcaagatca

SEQ ID NO: 53513 - RNA, 22 nt, Synthetic Construct
  source 1..22: mol_type = other RNA
tgaggtaggaggttgtatagtt

SEQ ID NO: 53514 - RNA, 22 nt, Synthetic Construct
  source 1..22: mol_type = other RNA
tattgcactcgtcccggcctgt

SEQ ID NO: 53515 - RNA, 21 nt, Synthetic Construct
  source 1..21: mol_type = other RNA
tgaggtagtaggttgtatagc

SEQ ID NO: 53516 - RNA, 21 nt, Synthetic Construct
  source 1..21: mol_type = other RNA
tgaggtagtaggttgtatagc

SEQ ID NO: 53517 - RNA, 23 nt, Synthetic Construct
  source 1..23: mol_type = other RNA
tggtagtacgacgtacttagtgt

SEQ ID NO: 53518 - RNA, 23 nt, Synthetic Construct
  source 1..23: mol_type = other RNA
tggtagtacgacgtacttagtgt

SEQ ID NO: 53519 - RNA, 24 nt, Synthetic Construct
  source 1..24: mol_type = other RNA
cgtaaacatccccgactggaagct

SEQ ID NO: 53520 - RNA, 22 nt, Synthetic Construct
  source 1..22: mol_type = other RNA
tagcagcacgcaaatattggcg

SEQ ID NO: 53521 - RNA, 21 nt, Synthetic Construct
  source 1..21: mol_type = other RNA
cacgtcatacaatggccggga

SEQ ID NO: 53522 - RNA, 31 nt, Synthetic Construct; identical to SEQ ID NO: 4881
  source 1..31: mol_type = other RNA

SEQ ID NO: 53523 - RNA, 31 nt, Synthetic Construct; identical to SEQ ID NO: 4881
  source 1..31: mol_type = other RNA

SEQ ID NO: 53524 - RNA, 24 nt, Synthetic Construct
  source 1..24: mol_type = other RNA
tgaggtagtaggttgtgtggttaa

SEQ ID NO: 53525 - RNA, 24 nt, Synthetic Construct
  source 1..24: mol_type = other RNA
tgaggtagtaggttgtgtggttaa

SEQ ID NO: 53526 - RNA, 22 nt, Synthetic Construct
  source 1..22: mol_type = other RNA
tgtgcaaatccatgcaaaactg

SEQ ID NO: 53527 - RNA, 24 nt, Synthetic Construct
  source 1..24: mol_type = other RNA
agctcggtctgaggcccctcagtt

SEQ ID NO: 53528 - RNA, 24 nt, Synthetic Construct
  source 1..24: mol_type = other RNA
agctcggtctgaggcccctcagtt

SEQ ID NO: 53529 - RNA, 21 nt, Synthetic Construct
  source 1..21: mol_type = other RNA
aggttccggataagtaaagcc

SEQ ID NO: 53530 - RNA, 21 nt, Synthetic Construct
  source 1..21: mol_type = other RNA
aggttccggataagtaaagcc

SEQ ID NO: 53531 - RNA, 23 nt, Synthetic Construct
  source 1..23: mol_type = other RNA
tcctgtactgagctgccccgggt

SEQ ID NO: 53532 - RNA, 23 nt, Synthetic Construct
  source 1..23: mol_type = other RNA
tcctgtactgagctgccccgggt

SEQ ID NO: 53533 - RNA, 35 nt, Synthetic Construct; identical to SEQ ID NO: 9871
  source 1..35: mol_type = other RNA

SEQ ID NO: 53534 - RNA, 27 nt, Synthetic Construct
  source 1..27: mol_type = other RNA
ccccccgctgctaaatttgactggctt

SEQ ID NO: 53535 - RNA, 22 nt, Synthetic Construct
  source 1..22: mol_type = other RNA
tcccgtactgagctgccccgag

SEQ ID NO: 53536 - RNA, 22 nt, Synthetic Construct
  source 1..22: mol_type = other RNA
tcccgtactgagctgccccgag

SEQ ID NO: 53537 - RNA, 18 nt, Synthetic Construct
  source 1..18: mol_type = other RNA
aagcggtggatgatgtgg

SEQ ID NO: 53538 - RNA, 18 nt, Synthetic Construct
  source 1..18: mol_type = other RNA
aagcggtggatgatgtgg

SEQ ID NO: 53539 - RNA, 20 nt, Synthetic Construct
  source 1..20: mol_type = other RNA
tgaggtagaaggttgtatag

SEQ ID NO: 53540 - RNA, 38 nt, Synthetic Construct; identical to SEQ ID NO: 11817
  source 1..38: mol_type = other RNA

SEQ ID NO: 53541 - RNA, 22 nt, Synthetic Construct
  source 1..22: mol_type = other RNA
aattgcacggtatccatctgta

SEQ ID NO: 53542 - RNA, 16 nt, Synthetic Construct
  source 1..16: mol_type = other RNA
agcaagtcgaacggta

SEQ ID NO: 53543 - RNA, 20 nt, Synthetic Construct
  source 1..20: mol_type = other RNA
tgagatagtaggttgtgtgg

SEQ ID NO: 53544 - RNA, 16 nt, Synthetic Construct
  source 1..16: mol_type = other RNA
gtctacggccatacca

SEQ ID NO: 53545 - RNA, 23 nt, Synthetic Construct
  source 1..23: mol_type = other RNA
ggctcggtctgaggcccctcagt

SEQ ID NO: 53546 - RNA, 23 nt, Synthetic Construct
  source 1..23: mol_type = other RNA
ggctcggtctgaggcccctcagt

SEQ ID NO: 53547 - RNA, 21 nt, Synthetic Construct
  source 1..21: mol_type = other RNA
aggagtgtgacaatggtgttt

SEQ ID NO: 53548 - RNA, 19 nt, Synthetic Construct
  source 1..19: mol_type = other RNA
tgtctgcctcagcgtcggt

SEQ ID NO: 53549 - RNA, 19 nt, Synthetic Construct
  source 1..19: mol_type = other RNA
tgtctgcctcagcgtcggt

SEQ ID NO: 53550 - RNA, 22 nt, Synthetic Construct
  source 1..22: mol_type = other RNA
tggagtgtgacaatggcgtttg

SEQ ID NO: 53551 - RNA, 22 nt, Synthetic Construct
  source 1..22: mol_type = other RNA
tggagtgtgacaatggcgtttg

SEQ ID NO: 53552 - RNA, 22 nt, Synthetic Construct
  source 1..22: mol_type = other RNA
tagcagcacgtaaacattggcg

SEQ ID NO: 53553 - RNA, 23 nt, Synthetic Construct
  source 1..23: mol_type = other RNA
tggtaatacgacgtacatagtgt

SEQ ID NO: 53554 - RNA, 26 nt, Synthetic Construct
  source 1..26: mol_type = other RNA
ttaagtgacgatagcctaggagatac

SEQ ID NO: 53555 - RNA, 26 nt, Synthetic Construct
  source 1..26: mol_type = other RNA
ttaagtgacgatagcctaggagatac

SEQ ID NO: 53556 - RNA, 22 nt, Synthetic Construct
  source 1..22: mol_type = other RNA
tagcagcacgtaagtattggcg

SEQ ID NO: 53557 - RNA, 22 nt, Synthetic Construct
  source 1..22: mol_type = other RNA
tagcagcacgtaagtattggcg

SEQ ID NO: 53558 - RNA, 22 nt, Synthetic Construct
  source 1..22: mol_type = other RNA
tgtgactggttgaccagagggt

SEQ ID NO: 53559 - RNA, 15 nt, Synthetic Construct
  source 1..15: mol_type = other RNA
gcaagccgaacggta

SEQ ID NO: 53560 - RNA, 25 nt, Synthetic Construct
  source 1..25: mol_type = other RNA
ttgaggatgtgagatcgagacgaca

SEQ ID NO: 53561 - RNA, 21 nt, Synthetic Construct
  source 1..21: mol_type = other RNA
aaaccgttaccattactgagt

SEQ ID NO: 53562 - RNA, 21 nt, Synthetic Construct
  source 1..21: mol_type = other RNA
aaaccgttaccattactgagt

SEQ ID NO: 53563 - RNA, 22 nt, Synthetic Construct
  source 1..22: mol_type = other RNA
tagcagcacgtaaatatcggcg

SEQ ID NO: 53564 - RNA, 22 nt, Synthetic Construct
  source 1..22: mol_type = other RNA
tgaggcagtagtttgtgctgtt

SEQ ID NO: 53565 - RNA, 16 nt, Synthetic Construct
  source 1..16: mol_type = other RNA
gtctacggccatacta

SEQ ID NO: 53566 - RNA, 16 nt, Synthetic Construct
  source 1..16: mol_type = other RNA
gtctacggccatacta

SEQ ID NO: 53567 - RNA, 22 nt, Synthetic Construct
  source 1..22: mol_type = other RNA
tgaggtagtaggttgtgtggat

SEQ ID NO: 53568 - RNA, 21 nt, Synthetic Construct
  source 1..21: mol_type = other RNA
ctagactgaagctccttgggg

SEQ ID NO: 53569 - RNA, 23 nt, Synthetic Construct
  source 1..23: mol_type = other RNA
tcctgtactgggctgccccgagt

SEQ ID NO: 53570 - RNA, 20 nt, Synthetic Construct
  source 1..20: mol_type = other RNA
tcacagtgaaccggtctctt

SEQ ID NO: 53571 - RNA, 25 nt, Synthetic Construct
  source 1..25: mol_type = other RNA
ccccactgctaaatttgactggctt

SEQ ID NO: 53572 - RNA, 25 nt, Synthetic Construct
  source 1..25: mol_type = other RNA
ccccactgctaaatttgactggctt

SEQ ID NO: 53573 - RNA, 17 nt, Synthetic Construct
  source 1..17: mol_type = other RNA
taggtcatcgtcaggct

SEQ ID NO: 53574 - RNA, 22 nt, Synthetic Construct
  source 1..22: mol_type = other RNA
tactagactgaagctccttgag

SEQ ID NO: 53575 - RNA, 21 nt, Synthetic Construct
  source 1..21: mol_type = other RNA
tgaggtagtagattgtacagt

SEQ ID NO: 53576 - RNA, 21 nt, Synthetic Construct
  source 1..21: mol_type = other RNA
tgaggtagtagattgtacagt

SEQ ID NO: 53577 - RNA, 21 nt, Synthetic Construct
  source 1..21: mol_type = other RNA
ctagactgaagctccttgaga

SEQ ID NO: 53578 - RNA, 22 nt, Synthetic Construct
  source 1..22: mol_type = other RNA
tatcgcacttgtcccggcctgt

SEQ ID NO: 53579 - RNA, 16 nt, Synthetic Construct
  source 1..16: mol_type = other RNA
ccgcttttgtcaggga

SEQ ID NO: 53580 - RNA, 16 nt, Synthetic Construct
  source 1..16: mol_type = other RNA
ccgcttttgtcaggga

SEQ ID NO: 53581 - RNA, 20 nt, Synthetic Construct
  source 1..20: mol_type = other RNA
ttggcctcaagtcaggcagg

SEQ ID NO: 53582 - RNA, 20 nt, Synthetic Construct
  source 1..20: mol_type = other RNA
ttggcctcaagtcaggcagg

SEQ ID NO: 53583 - RNA, 32 nt, Synthetic Construct; identical to SEQ ID NO: 1237
  source 1..32: mol_type = other RNA

SEQ ID NO: 53584 - RNA, 21 nt, Synthetic Construct
  source 1..21: mol_type = other RNA
tggagtgtgacaatggtgctt

SEQ ID NO: 53585 - RNA, 22 nt, Synthetic Construct
  source 1..22: mol_type = other RNA
tgtggtagtaggttgtgtggtt

SEQ ID NO: 53586 - RNA, 22 nt, Synthetic Construct
  source 1..22: mol_type = other RNA
tgtggtagtaggttgtgtggtt

SEQ ID NO: 53587 - RNA, 23 nt, Synthetic Construct
  source 1..23: mol_type = other RNA
tgagaactgaattccatgggttt

SEQ ID NO: 53588 - RNA, 23 nt, Synthetic Construct
  source 1..23: mol_type = other RNA
tctttggttatctagctgtatga

SEQ ID NO: 53589 - RNA, 23 nt, Synthetic Construct
  source 1..23: mol_type = other RNA
tctttggttatctagctgtatga

SEQ ID NO: 53590 - RNA, 27 nt, Synthetic Construct
  source 1..27: mol_type = other RNA
cgtgtgaaagtaggtcatcgtcaggct

SEQ ID NO: 53591 - RNA, 24 nt, Synthetic Construct
  source 1..24: mol_type = other RNA
tgtaaacatccccggctggaagct

SEQ ID NO: 53592 - RNA, 23 nt, Synthetic Construct
  source 1..23: mol_type = other RNA
tcctgtgctgagctgccccgaga

SEQ ID NO: 53593 - RNA, 23 nt, Synthetic Construct
  source 1..23: mol_type = other RNA
tcctgtgctgagctgccccgaga

SEQ ID NO: 53594 - RNA, 21 nt, Synthetic Construct
  source 1..21: mol_type = other RNA
gggagtgtgacaatggtgttt

SEQ ID NO: 53595 - RNA, 31 nt, Synthetic Construct; identical to SEQ ID NO: 2893
  source 1..31: mol_type = other RNA

SEQ ID NO: 53596 - RNA, 31 nt, Synthetic Construct; identical to SEQ ID NO: 2893
  source 1..31: mol_type = other RNA

SEQ ID NO: 53597 - RNA, 28 nt, Synthetic Construct
  source 1..28: mol_type = other RNA
cccccccactgctaaatttgactggcta

SEQ ID NO: 53598 - RNA, 28 nt, Synthetic Construct
  source 1..28: mol_type = other RNA
cccccccactgctaaatttgactggcta

SEQ ID NO: 53599 - RNA, 22 nt, Synthetic Construct
  source 1..22: mol_type = other RNA
ccggtcccaagggtatggctgt

SEQ ID NO: 53600 - RNA, 21 nt, Synthetic Construct
  source 1..21: mol_type = other RNA
tgaggcagtagattgtatagt

SEQ ID NO: 53601 - RNA, 21 nt, Synthetic Construct
  source 1..21: mol_type = other RNA
tgaggcagtagattgtatagt

SEQ ID NO: 53602 - RNA, 17 nt, Synthetic Construct
  source 1..17: mol_type = other RNA
agtccggatcgtagtct

SEQ ID NO: 53603 - RNA, 18 nt, Synthetic Construct
  source 1..18: mol_type = other RNA
cctgtaccgatcaatagt

SEQ ID NO: 53604 - RNA, 21 nt, Synthetic Construct
  source 1..21: mol_type = other RNA
tgaggtagtaggttatgtggt

SEQ ID NO: 53605 - RNA, 21 nt, Synthetic Construct
  source 1..21: mol_type = other RNA
tgaggtagtaggttatgtggt

SEQ ID NO: 53606 - RNA, 22 nt, Synthetic Construct
  source 1..22: mol_type = other RNA
tgtcagtttgccaaatacccca

SEQ ID NO: 53607 - RNA, 21 nt, Synthetic Construct
  source 1..21: mol_type = other RNA
tcctgtactgggctgccccga

SEQ ID NO: 53608 - RNA, 18 nt, Synthetic Construct
  source 1..18: mol_type = other RNA
tgaggtagtagattgtat

SEQ ID NO: 53609 - RNA, 22 nt, Synthetic Construct
  source 1..22: mol_type = other RNA
tgaggtggtaggttgtgtggtt

SEQ ID NO: 53610 - RNA, 22 nt, Synthetic Construct
  source 1..22: mol_type = other RNA
tgaggtggtaggttgtgtggtt

SEQ ID NO: 53611 - RNA, 17 nt, Synthetic Construct
  source 1..17: mol_type = other RNA
ccgtgtgaaagtaggtc

SEQ ID NO: 53612 - RNA, 23 nt, Synthetic Construct
  source 1..23: mol_type = other RNA
tgaggggcagagagcgagacctt

SEQ ID NO: 53613 - RNA, 23 nt, Synthetic Construct
  source 1..23: mol_type = other RNA
tgaggggcagagagcgagacctt

SEQ ID NO: 53614 - RNA, 21 nt, Synthetic Construct
  source 1..21: mol_type = other RNA
ccctgtactgagctgccccga

SEQ ID NO: 53615 - RNA, 32 nt, Synthetic Construct; identical to SEQ ID NO: 1237
  source 1..32: mol_type = other RNA

SEQ ID NO: 53616 - RNA, 32 nt, Synthetic Construct; identical to SEQ ID NO: 1237
  source 1..32: mol_type = other RNA

SEQ ID NO: 53617 - RNA, 22 nt, Synthetic Construct
  source 1..22: mol_type = other RNA
ttcaagtaatccaggataggtt

SEQ ID NO: 53618 - RNA, 21 nt, Synthetic Construct
  source 1..21: mol_type = other RNA
aaaagctgggttgagagggcg

SEQ ID NO: 53619 - RNA, 21 nt, Synthetic Construct
  source 1..21: mol_type = other RNA
aaaagctgggttgagagggcg

SEQ ID NO: 53620 - RNA, 27 nt, Synthetic Construct
  source 1..27: mol_type = other RNA
ccccccactgctaaatttaactggctt

SEQ ID NO: 53621 - RNA, 27 nt, Synthetic Construct
  source 1..27: mol_type = other RNA
ccccccactgctaaatttaactggctt

SEQ ID NO: 53622 - RNA, 31 nt, Synthetic Construct; identical to SEQ ID NO: 2758
  source 1..31: mol_type = other RNA

SEQ ID NO: 53623 - RNA, 31 nt, Synthetic Construct; identical to SEQ ID NO: 2758
  source 1..31: mol_type = other RNA

SEQ ID NO: 53624 - RNA, 26 nt, Synthetic Construct
  source 1..26: mol_type = other RNA
gatgcgtggtaggagagcgttctgta

SEQ ID NO: 53625 - RNA, 26 nt, Synthetic Construct
  source 1..26: mol_type = other RNA
gatgcgtggtaggagagcgttctgta

SEQ ID NO: 53626 - RNA, 15 nt, Synthetic Construct
  source 1..15: mol_type = other RNA
tgcctcagcgtcggt

SEQ ID NO: 53627 - RNA, 15 nt, Synthetic Construct
  source 1..15: mol_type = other RNA
tgcctcagcgtcggt

SEQ ID NO: 53628 - RNA, 22 nt, Synthetic Construct
  source 1..22: mol_type = other RNA
tgaggtagtaggttgtgtggtc

SEQ ID NO: 53629 - RNA, 18 nt, Synthetic Construct
  source 1..18: mol_type = other RNA
cgcgacctcagatcagac

SEQ ID NO: 53630 - RNA, 18 nt, Synthetic Construct
  source 1..18: mol_type = other RNA
cgcgacctcagatcagac

SEQ ID NO: 53631 - RNA, 29 nt, Synthetic Construct
  source 1..29: mol_type = other RNA
cccccccactgctaaatttgactggctta

SEQ ID NO: 53632 - RNA, 23 nt, Synthetic Construct
  source 1..23: mol_type = other RNA
cgaggtagtaggttgtgtggttt

SEQ ID NO: 53633 - RNA, 23 nt, Synthetic Construct
  source 1..23: mol_type = other RNA
cgaggtagtaggttgtgtggttt

SEQ ID NO: 53634 - RNA, 22 nt, Synthetic Construct
  source 1..22: mol_type = other RNA
tattgcacttgtcctggcctgt

SEQ ID NO: 53635 - RNA, 22 nt, Synthetic Construct
  source 1..22: mol_type = other RNA
tattgcacttgtcctggcctgt

SEQ ID NO: 53636 - RNA, 22 nt, Synthetic Construct
  source 1..22: mol_type = other RNA
tgaggtagtaggttgtgtggtc

SEQ ID NO: 53637 - RNA, 22 nt, Synthetic Construct
  source 1..22: mol_type = other RNA
tatcggaacgtgcccagtcgtg

SEQ ID NO: 53638 - RNA, 22 nt, Synthetic Construct
  source 1..22: mol_type = other RNA
tatcggaacgtgcccagtcgtg

SEQ ID NO: 53639 - RNA, 22 nt, Synthetic Construct
  source 1..22: mol_type = other RNA
gtccagttttcccaggaatccc

SEQ ID NO: 53640 - RNA, 22 nt, Synthetic Construct
  source 1..22: mol_type = other RNA
gtccagttttcccaggaatccc

SEQ ID NO: 53641 - RNA, 23 nt, Synthetic Construct
  source 1..23: mol_type = other RNA
tgataatacgacgtacttagtgt

SEQ ID NO: 53642 - RNA, 24 nt, Synthetic Construct
  source 1..24: mol_type = other RNA
tcggctcatctcatcctggggctg

SEQ ID NO: 53643 - RNA, 21 nt, Synthetic Construct
  source 1..21: mol_type = other RNA
caaagtgctgttcgtgcaggt

SEQ ID NO: 53644 - RNA, 20 nt, Synthetic Construct
  source 1..20: mol_type = other RNA
tgaggtagtaggttgtatgg

SEQ ID NO: 53645 - RNA, 20 nt, Synthetic Construct
  source 1..20: mol_type = other RNA
tgaggtagtaggttgtatgg

SEQ ID NO: 53646 - RNA, 23 nt, Synthetic Construct
  source 1..23: mol_type = other RNA
tagcttatcagactgatgttgac

SEQ ID NO: 53647 - RNA, 22 nt, Synthetic Construct
  source 1..22: mol_type = other RNA
tgaggtagtaggctgtatagtt

SEQ ID NO: 53648 - RNA, 22 nt, Synthetic Construct
  source 1..22: mol_type = other RNA
tgaggtagtaggctgtatagtt

SEQ ID NO: 53649 - RNA, 22 nt, Synthetic Construct
  source 1..22: mol_type = other RNA
cattgcactagtctcggtctga

SEQ ID NO: 53650 - RNA, 22 nt, Synthetic Construct
  source 1..22: mol_type = other RNA
tgaggtagtagtttgtgctgtc

SEQ ID NO: 53651 - RNA, 23 nt, Synthetic Construct
  source 1..23: mol_type = other RNA
tagcagcacataatggtttgtgg

SEQ ID NO: 53652 - RNA, 22 nt, Synthetic Construct
  source 1..22: mol_type = other RNA
tgaggtagtagattatatagtt

SEQ ID NO: 53653 - RNA, 22 nt, Synthetic Construct
  source 1..22: mol_type = other RNA
tgaggtagtagattatatagtt

SEQ ID NO: 53654 - RNA, 27 nt, Synthetic Construct
  source 1..27: mol_type = other RNA
ccccccactgctaaatttgactggcct

SEQ ID NO: 53655 - RNA, 18 nt, Synthetic Construct
  source 1..18: mol_type = other RNA
tcccctggacctgtactg

SEQ ID NO: 53656 - RNA, 34 nt, Synthetic Construct; identical to SEQ ID NO: 11269
  source 1..34: mol_type = other RNA

SEQ ID NO: 53657 - RNA, 34 nt, Synthetic Construct; identical to SEQ ID NO: 11269
  source 1..34: mol_type = other RNA

SEQ ID NO: 53658 - RNA, 21 nt, Synthetic Construct
  source 1..21: mol_type = other RNA
aacggaatcccaaaagcagct

SEQ ID NO: 53659 - RNA, 21 nt, Synthetic Construct
  source 1..21: mol_type = other RNA
aacggaatcccaaaagcagct

SEQ ID NO: 53660 - RNA, 16 nt, Synthetic Construct
  source 1..16: mol_type = other RNA
gactacggccatacca

SEQ ID NO: 53661 - RNA, 20 nt, Synthetic Construct
  source 1..20: mol_type = other RNA
agaggtagtagtttgtgctg

SEQ ID NO: 53662 - RNA, 27 nt, Synthetic Construct
  source 1..27: mol_type = other RNA
ccccccactgctagatttgactggctt

SEQ ID NO: 53663 - RNA, 27 nt, Synthetic Construct
  source 1..27: mol_type = other RNA
ccccccactgctagatttgactggctt

SEQ ID NO: 53664 - RNA, 23 nt, Synthetic Construct
  source 1..23: mol_type = other RNA
tcctgtaccgagctgccccgagt

SEQ ID NO: 53665 - RNA, 20 nt, Synthetic Construct
  source 1..20: mol_type = other RNA
tgaggtggtaggttgtatag

SEQ ID NO: 53666 - RNA, 20 nt, Synthetic Construct
  source 1..20: mol_type = other RNA
tgaggtggtaggttgtatag

SEQ ID NO: 53667 - RNA, 21 nt, Synthetic Construct
  source 1..21: mol_type = other RNA
tgaggtagtaggatgtgtggt

SEQ ID NO: 53668 - RNA, 21 nt, Synthetic Construct
  source 1..21: mol_type = other RNA
tgaggtagtaggatgtgtggt

SEQ ID NO: 53669 - RNA, 27 nt, Synthetic Construct
  source 1..27: mol_type = other RNA
ccccccactgctaaatttgattggctt

SEQ ID NO: 53670 - RNA, 22 nt, Synthetic Construct
  source 1..22: mol_type = other RNA
tgaggtagtggtttgtgctgtt

SEQ ID NO: 53671 - RNA, 23 nt, Synthetic Construct
  source 1..23: mol_type = other RNA
taacagtctacagccatggtcgt

SEQ ID NO: 53672 - RNA, 16 nt, Synthetic Construct
  source 1..16: mol_type = other RNA
ggtagctcgttgggct

SEQ ID NO: 53673 - RNA, 22 nt, Synthetic Construct
  source 1..22: mol_type = other RNA
tcctgtactgagctgctccgag

SEQ ID NO: 53674 - RNA, 22 nt, Synthetic Construct
  source 1..22: mol_type = other RNA
tcctgtactgagctgctccgag

SEQ ID NO: 53675 - RNA, 21 nt, Synthetic Construct
  source 1..21: mol_type = other RNA
tgaggtagtagattgtataga

SEQ ID NO: 53676 - RNA, 21 nt, Synthetic Construct
  source 1..21: mol_type = other RNA
tgaggtagtagattgtataga

SEQ ID NO: 53677 - RNA, 21 nt, Synthetic Construct
  source 1..21: mol_type = other RNA
aggagtgtgacaatggtgttt

SEQ ID NO: 53678 - RNA, 32 nt, Synthetic Construct; identical to SEQ ID NO: 2582
  source 1..32: mol_type = other RNA

SEQ ID NO: 53679 - RNA, 25 nt, Synthetic Construct
  source 1..25: mol_type = other RNA
ttgaggatatgagatcgagacgaca

SEQ ID NO: 53680 - RNA, 25 nt, Synthetic Construct
  source 1..25: mol_type = other RNA
ttgaggatatgagatcgagacgaca

SEQ ID NO: 53681 - RNA, 22 nt, Synthetic Construct
  source 1..22: mol_type = other RNA
cgaggtagtaggttgtatagtt

SEQ ID NO: 53682 - RNA, 22 nt, Synthetic Construct
  source 1..22: mol_type = other RNA
tgaggtagtaggttgtggggtt

SEQ ID NO: 53683 - RNA, 22 nt, Synthetic Construct
  source 1..22: mol_type = other RNA
tgaggtagtaggttgtggggtt

SEQ ID NO: 53684 - RNA, 21 nt, Synthetic Construct
  source 1..21: mol_type = other RNA
tgaggtagtagcttgtgctgt

SEQ ID NO: 53685 - RNA, 21 nt, Synthetic Construct
  source 1..21: mol_type = other RNA
tgaggtagtagcttgtgctgt

SEQ ID NO: 53686 - RNA, 23 nt, Synthetic Construct
  source 1..23: mol_type = other RNA
tcctgtactgagccgccccgaga

SEQ ID NO: 53687 - RNA, 19 nt, Synthetic Construct
  source 1..19: mol_type = other RNA
gagaaagctcacaagaact

SEQ ID NO: 53688 - RNA, 19 nt, Synthetic Construct
  source 1..19: mol_type = other RNA
gagaaagctcacaagaact

SEQ ID NO: 53689 - RNA, 21 nt, Synthetic Construct
  source 1..21: mol_type = other RNA
tgaggtagtaggttgtgtggc

SEQ ID NO: 53690 - RNA, 21 nt, Synthetic Construct
  source 1..21: mol_type = other RNA
tgaggtagtaggttgtgtggc

SEQ ID NO: 53691 - RNA, 22 nt, Synthetic Construct
  source 1..22: mol_type = other RNA
tgaggtagtagtatgtgctgtt

SEQ ID NO: 53692 - RNA, 33 nt, Synthetic Construct; identical to SEQ ID NO: 2126
  source 1..33: mol_type = other RNA

SEQ ID NO: 53693 - RNA, 33 nt, Synthetic Construct; identical to SEQ ID NO: 2126
  source 1..33: mol_type = other RNA

SEQ ID NO: 53694 - RNA, 22 nt, Synthetic Construct
  source 1..22: mol_type = other RNA
ggtagcgaaattccttgtcggg

SEQ ID NO: 53695 - RNA, 22 nt, Synthetic Construct
  source 1..22: mol_type = other RNA
ggtagcgaaattccttgtcggg

SEQ ID NO: 53696 - RNA, 27 nt, Synthetic Construct
  source 1..27: mol_type = other RNA
ccccccactactaaatttgactggctt

SEQ ID NO: 53697 - RNA, 27 nt, Synthetic Construct
  source 1..27: mol_type = other RNA
ccccccactactaaatttgactggctt

SEQ ID NO: 53698 - RNA, 35 nt, Synthetic Construct; identical to SEQ ID NO: 2402
  source 1..35: mol_type = other RNA

SEQ ID NO: 53699 - RNA, 36 nt, Synthetic Construct; identical to SEQ ID NO: 2366
  source 1..36: mol_type = other RNA

SEQ ID NO: 53700 - RNA, 36 nt, Synthetic Construct; identical to SEQ ID NO: 2366
  source 1..36: mol_type = other RNA

SEQ ID NO: 53701 - RNA, 27 nt, Synthetic Construct
  source 1..27: mol_type = other RNA
cgactcttagcggtggatcactcggct

SEQ ID NO: 53702 - RNA, 27 nt, Synthetic Construct
  source 1..27: mol_type = other RNA
cgactcttagcggtggatcactcggct

SEQ ID NO: 53703 - RNA, 16 nt, Synthetic Construct
  source 1..16: mol_type = other RNA
tcgtgacgatagtgca

SEQ ID NO: 53704 - RNA, 34 nt, Synthetic Construct; identical to SEQ ID NO: 2553
  source 1..34: mol_type = other RNA

SEQ ID NO: 53705 - RNA, 22 nt, Synthetic Construct
  source 1..22: mol_type = other RNA
tagcggcacgtaaatattggcg

SEQ ID NO: 53706 - RNA, 22 nt, Synthetic Construct
  source 1..22: mol_type = other RNA
tagcggcacgtaaatattggcg

SEQ ID NO: 53707 - RNA, 21 nt, Synthetic Construct
  source 1..21: mol_type = other RNA
tggaatgtaaagaagtatgta

SEQ ID NO: 53708 - RNA, 21 nt, Synthetic Construct
  source 1..21: mol_type = other RNA
tggaatgtaaagaagtatgta

SEQ ID NO: 53709 - RNA, 21 nt, Synthetic Construct
  source 1..21: mol_type = other RNA
tggagtgcgacaatggtgttt

SEQ ID NO: 53710 - RNA, 22 nt, Synthetic Construct
  source 1..22: mol_type = other RNA
tgaggtagtaggttgtgtagtt

SEQ ID NO: 53711 - RNA, 22 nt, Synthetic Construct
  source 1..22: mol_type = other RNA
tgaggtagtaggttgtgtagtt

SEQ ID NO: 53712 - RNA, 25 nt, Synthetic Construct
  source 1..25: mol_type = other RNA
ttgaggatatgggatcgagacgaca

SEQ ID NO: 53713 - RNA, 25 nt, Synthetic Construct
  source 1..25: mol_type = other RNA
ttgaggatatgggatcgagacgaca

SEQ ID NO: 53714 - RNA, 19 nt, Synthetic Construct
  source 1..19: mol_type = other RNA
agtaggtcatcgtcaggct

SEQ ID NO: 53715 - RNA, 19 nt, Synthetic Construct
  source 1..19: mol_type = other RNA
agtaggtcatcgtcaggct

SEQ ID NO: 53716 - RNA, 22 nt, Synthetic Construct
  source 1..22: mol_type = other RNA
tgaggtagtaggttgtgttgtt

SEQ ID NO: 53717 - RNA, 22 nt, Synthetic Construct
  source 1..22: mol_type = other RNA
tattgcacttgtcccggtctgt

SEQ ID NO: 53718 - RNA, 22 nt, Synthetic Construct
  source 1..22: mol_type = other RNA
tattgcacttgtcccggtctgt

SEQ ID NO: 53719 - RNA, 22 nt, Synthetic Construct
  source 1..22: mol_type = other RNA
tgaggtagtaggctgtatagtt

SEQ ID NO: 53720 - RNA, 22 nt, Synthetic Construct
  source 1..22: mol_type = other RNA
tgaggtagtaggctgtatagtt

SEQ ID NO: 53721 - RNA, 24 nt, Synthetic Construct
  source 1..24: mol_type = other RNA
tgtaaacatccccgactggaagcc

SEQ ID NO: 53722 - RNA, 22 nt, Synthetic Construct
  source 1..22: mol_type = other RNA
tcgaaaccatcctctgctacca

SEQ ID NO: 53723 - RNA, 23 nt, Synthetic Construct
  source 1..23: mol_type = other RNA
caaagtgctgttcgtgcaggtaa

SEQ ID NO: 53724 - RNA, 23 nt, Synthetic Construct
  source 1..23: mol_type = other RNA
caaagtgctgttcgtgcaggtaa

SEQ ID NO: 53725 - RNA, 22 nt, Synthetic Construct
  source 1..22: mol_type = other RNA
gagagcctggacacaggtgctg

SEQ ID NO: 53726 - RNA, 22 nt, Synthetic Construct
  source 1..22: mol_type = other RNA
taggtagtttcctgttgttggg

SEQ ID NO: 53727 - RNA, 22 nt, Synthetic Construct
  source 1..22: mol_type = other RNA
taggtagtttcctgttgttggg

SEQ ID NO: 53728 - RNA, 22 nt, Synthetic Construct
  source 1..22: mol_type = other RNA
tgaggtagtagtttgtgctgtg

SEQ ID NO: 53729 - RNA, 22 nt, Synthetic Construct
  source 1..22: mol_type = other RNA
tgaggtagtagtttgtgctgtg

SEQ ID NO: 53730 - RNA, 22 nt, Synthetic Construct
  source 1..22: mol_type = other RNA
tgaggtagtagattgtattgtt

SEQ ID NO: 53731 - RNA, 22 nt, Synthetic Construct
  source 1..22: mol_type = other RNA
tgaggtagtagattgtattgtt

SEQ ID NO: 53732 - RNA, 34 nt, Synthetic Construct; identical to SEQ ID NO: 2265
  source 1..34: mol_type = other RNA

SEQ ID NO: 53733 - RNA, 34 nt, Synthetic Construct; identical to SEQ ID NO: 2265
  source 1..34: mol_type = other RNA

SEQ ID NO: 53734 - RNA, 22 nt, Synthetic Construct
  source 1..22: mol_type = other RNA
caaagtgctgttcgtgcaggta

SEQ ID NO: 53735 - RNA, 22 nt, Synthetic Construct
  source 1..22: mol_type = other RNA
caaagtgctgttcgtgcaggta

SEQ ID NO: 53736 - RNA, 21 nt, Synthetic Construct
  source 1..21: mol_type = other RNA
ctagactggagctccttgagg

SEQ ID NO: 53737 - RNA, 20 nt, Synthetic Construct
  source 1..20: mol_type = other RNA
ccgcagagtacagcttggga

SEQ ID NO: 53738 - RNA, 15 nt, Synthetic Construct
  source 1..15: mol_type = other RNA
ccagaaacccggtcg

SEQ ID NO: 53739 - RNA, 22 nt, Synthetic Construct
  source 1..22: mol_type = other RNA
cattgcacctgtctcggtctga

SEQ ID NO: 53740 - RNA, 22 nt, Synthetic Construct
  source 1..22: mol_type = other RNA
cattgcacctgtctcggtctga

SEQ ID NO: 53741 - RNA, 17 nt, Synthetic Construct
  source 1..17: mol_type = other RNA
agaccctgttgagcttg

SEQ ID NO: 53742 - RNA, 17 nt, Synthetic Construct
  source 1..17: mol_type = other RNA
agaccctgttgagcttg

SEQ ID NO: 53743 - RNA, 20 nt, Synthetic Construct
  source 1..20: mol_type = other RNA
gaatcgctagtaatcgcgga

SEQ ID NO: 53744 - RNA, 20 nt, Synthetic Construct
  source 1..20: mol_type = other RNA
gaatcgctagtaatcgcgga

SEQ ID NO: 53745 - RNA, 23 nt, Synthetic Construct
  source 1..23: mol_type = other RNA
tgaggtaggaggttgtatagttg

SEQ ID NO: 53746 - RNA, 23 nt, Synthetic Construct
  source 1..23: mol_type = other RNA
tggtaatacgacgtacatagtgt

SEQ ID NO: 53747 - RNA, 23 nt, Synthetic Construct
  source 1..23: mol_type = other RNA
tggtaatacgacgtacatagtgt

SEQ ID NO: 53748 - RNA, 27 nt, Synthetic Construct
  source 1..27: mol_type = other RNA
gactcttagcggtggatcactcggctc

SEQ ID NO: 53749 - RNA, 18 nt, Synthetic Construct
  source 1..18: mol_type = other RNA
tcctgtactgagctgccc

SEQ ID NO: 53750 - RNA, 18 nt, Synthetic Construct
  source 1..18: mol_type = other RNA
tcctgtactgagctgccc

SEQ ID NO: 53751 - RNA, 21 nt, Synthetic Construct
  source 1..21: mol_type = other RNA
tcctgtgctgagctgccccga

SEQ ID NO: 53752 - RNA, 23 nt, Synthetic Construct
  source 1..23: mol_type = other RNA
tgaggtagtaggttgtgtggttc

SEQ ID NO: 53753 - RNA, 21 nt, Synthetic Construct
  source 1..21: mol_type = other RNA
tgaggtagtaggttgtgtagt

SEQ ID NO: 53754 - RNA, 23 nt, Synthetic Construct
  source 1..23: mol_type = other RNA
ggcagggttcgtgactggggtga

SEQ ID NO: 53755 - RNA, 23 nt, Synthetic Construct
  source 1..23: mol_type = other RNA
ggcagggttcgtgactggggtga

SEQ ID NO: 53756 - RNA, 21 nt, Synthetic Construct
  source 1..21: mol_type = other RNA
tgaggtagtaggttgtatagc

SEQ ID NO: 53757 - RNA, 22 nt, Synthetic Construct
  source 1..22: mol_type = other RNA
tagcagcacgtaaacattggcg

SEQ ID NO: 53758 - RNA, 22 nt, Synthetic Construct
  source 1..22: mol_type = other RNA
tagcagcacgtaaacattggcg

SEQ ID NO: 53759 - RNA, 36 nt, Synthetic Construct; identical to SEQ ID NO: 2520
  source 1..36: mol_type = other RNA

SEQ ID NO: 53760 - RNA, 21 nt, Synthetic Construct
  source 1..21: mol_type = other RNA
tgtcagtttgtcaaatacccc

SEQ ID NO: 53761 - RNA, 22 nt, Synthetic Construct
  source 1..22: mol_type = other RNA
tactagactgaagctccttgag

SEQ ID NO: 53762 - RNA, 22 nt, Synthetic Construct
  source 1..22: mol_type = other RNA
tactagactgaagctccttgag

SEQ ID NO: 53763 - RNA, 24 nt, Synthetic Construct
  source 1..24: mol_type = other RNA
tgtaaacatccccgaccggaagct

SEQ ID NO: 53764 - RNA, 23 nt, Synthetic Construct
  source 1..23: mol_type = other RNA
caaagtgctgttcgtgcaggtaa

SEQ ID NO: 53765 - RNA, 25 nt, Synthetic Construct
  source 1..25: mol_type = other RNA
tgaggtagtaggttgtgtggttatt

SEQ ID NO: 53766 - RNA, 19 nt, Synthetic Construct
  source 1..19: mol_type = other RNA
cgactcttagcggtggatc

SEQ ID NO: 53767 - RNA, 23 nt, Synthetic Construct
  source 1..23: mol_type = other RNA
tcccgtactgagctgccccgaga

SEQ ID NO: 53768 - RNA, 23 nt, Synthetic Construct
  source 1..23: mol_type = other RNA
tcccgtactgagctgccccgaga

SEQ ID NO: 53769 - RNA, 16 nt, Synthetic Construct
  source 1..16: mol_type = other RNA
ggaattgacggaaggg

SEQ ID NO: 53770 - RNA, 16 nt, Synthetic Construct
  source 1..16: mol_type = other RNA
ggaattgacggaaggg

SEQ ID NO: 53771 - RNA, 23 nt, Synthetic Construct
  source 1..23: mol_type = other RNA
tagcagcacgtaaatattggcgt

SEQ ID NO: 53772 - RNA, 22 nt, Synthetic Construct
  source 1..22: mol_type = other RNA
tagcagcacgtaaatactggcg

SEQ ID NO: 53773 - RNA, 22 nt, Synthetic Construct
  source 1..22: mol_type = other RNA
tagcagcacgtaaatactggcg

SEQ ID NO: 53774 - RNA, 23 nt, Synthetic Construct
  source 1..23: mol_type = other RNA
aggggtgctatctgtgattgagg

SEQ ID NO: 53775 - RNA, 22 nt, Synthetic Construct
  source 1..22: mol_type = other RNA
tgaggtagtaggttgtataatt

SEQ ID NO: 53776 - RNA, 22 nt, Synthetic Construct
  source 1..22: mol_type = other RNA
tgaggtagtaggttgtataatt

SEQ ID NO: 53777 - RNA, 23 nt, Synthetic Construct
  source 1..23: mol_type = other RNA
tgaggtggtaggttgtgtggttt

SEQ ID NO: 53778 - RNA, 22 nt, Synthetic Construct
  source 1..22: mol_type = other RNA
tgaggcagtaggttgtgtggtt

SEQ ID NO: 53779 - RNA, 22 nt, Synthetic Construct
  source 1..22: mol_type = other RNA
tgaggcagtaggttgtgtggtt

SEQ ID NO: 53780 - RNA, 21 nt, Synthetic Construct
  source 1..21: mol_type = other RNA
tggagtgtgacaacggtgttt

SEQ ID NO: 53781 - RNA, 27 nt, Synthetic Construct
  source 1..27: mol_type = other RNA
cccccccactgctaaatttgactggct

SEQ ID NO: 53782 - RNA, 27 nt, Synthetic Construct
  source 1..27: mol_type = other RNA
ccccccactactaaatttgactggctt

SEQ ID NO: 53783 - RNA, 27 nt, Synthetic Construct
  source 1..27: mol_type = other RNA
ccccccactactaaatttgactggctt

SEQ ID NO: 53784 - RNA, 22 nt, Synthetic Construct
  source 1..22: mol_type = other RNA
tggagtgtggcaatggtgtttg

SEQ ID NO: 53785 - RNA, 22 nt, Synthetic Construct
  source 1..22: mol_type = other RNA
tggagtgtggcaatggtgtttg

SEQ ID NO: 53786 - RNA, 22 nt, Synthetic Construct
  source 1..22: mol_type = other RNA
tgaggtagtagtttgtgcggtt

SEQ ID NO: 53787 - RNA, 18 nt, Synthetic Construct
  source 1..18: mol_type = other RNA
cacagtgtgaatcggcgc

SEQ ID NO: 53788 - RNA, 18 nt, Synthetic Construct
  source 1..18: mol_type = other RNA
cacagtgtgaatcggcgc

SEQ ID NO: 53789 - RNA, 22 nt, Synthetic Construct
  source 1..22: mol_type = other RNA
ttcaagtaattcaggataggct

SEQ ID NO: 53790 - RNA, 22 nt, Synthetic Construct
  source 1..22: mol_type = other RNA
ttcaagtaattcaggataggct

SEQ ID NO: 53791 - RNA, 22 nt, Synthetic Construct
  source 1..22: mol_type = other RNA
tcagtgcatcacagaactttgt

SEQ ID NO: 53792 - RNA, 22 nt, Synthetic Construct
  source 1..22: mol_type = other RNA
tcagtgcatcacagaactttgt

SEQ ID NO: 53793 - RNA, 27 nt, Synthetic Construct
  source 1..27: mol_type = other RNA
ccccccactactaaatttgactggctt

SEQ ID NO: 53794 - RNA, 22 nt, Synthetic Construct
  source 1..22: mol_type = other RNA
tcgtaccgtgagtaacaatgcg

SEQ ID NO: 53795 - RNA, 22 nt, Synthetic Construct
  source 1..22: mol_type = other RNA
tcgtaccgtgagtaacaatgcg

SEQ ID NO: 53796 - RNA, 18 nt, Synthetic Construct
  source 1..18: mol_type = other RNA
agcaggacggtggccatg

SEQ ID NO: 53797 - RNA, 21 nt, Synthetic Construct
  source 1..21: mol_type = other RNA
tggagtgtgacaatggtgctt

SEQ ID NO: 53798 - RNA, 21 nt, Synthetic Construct
  source 1..21: mol_type = other RNA
tggagtgtgacaatggtgctt

SEQ ID NO: 53799 - RNA, 21 nt, Synthetic Construct
  source 1..21: mol_type = other RNA
tgaggggcagagagcgagact

SEQ ID NO: 53800 - RNA, 29 nt, Synthetic Construct
  source 1..29: mol_type = other RNA
tccctggtggtctagtggttaggattcgg

SEQ ID NO: 53801 - RNA, 29 nt, Synthetic Construct
  source 1..29: mol_type = other RNA
tccctggtggtctagtggttaggattcgg

SEQ ID NO: 53802 - RNA, 21 nt, Synthetic Construct
  source 1..21: mol_type = other RNA
tgaggtaataggttgtgtggt

SEQ ID NO: 53803 - RNA, 21 nt, Synthetic Construct
  source 1..21: mol_type = other RNA
tgaggtaataggttgtgtggt

SEQ ID NO: 53804 - RNA, 19 nt, Synthetic Construct
  source 1..19: mol_type = other RNA
cggaagaaggggtgcctgg

SEQ ID NO: 53805 - RNA, 19 nt, Synthetic Construct
  source 1..19: mol_type = other RNA
cggaagaaggggtgcctgg

SEQ ID NO: 53806 - RNA, 15 nt, Synthetic Construct
  source 1..15: mol_type = other RNA
tcctgacggccatag

SEQ ID NO: 53807 - RNA, 28 nt, Synthetic Construct
  source 1..28: mol_type = other RNA
tccctggtggtctagtggttaggattcg

SEQ ID NO: 53808 - RNA, 30 nt, Synthetic Construct; identical to SEQ ID NO: 1236
  source 1..30: mol_type = other RNA

SEQ ID NO: 53809 - RNA, 22 nt, Synthetic Construct
  source 1..22: mol_type = other RNA
cgactcttagcggtggatcact

SEQ ID NO: 53810 - RNA, 22 nt, Synthetic Construct
  source 1..22: mol_type = other RNA
cgactcttagcggtggatcact

SEQ ID NO: 53811 - RNA, 26 nt, Synthetic Construct
  source 1..26: mol_type = other RNA
tccctggtggtctagtggttaggatt

SEQ ID NO: 53812 - RNA, 26 nt, Synthetic Construct
  source 1..26: mol_type = other RNA
tccctggtggtctagtggttaggatt

SEQ ID NO: 53813 - RNA, 22 nt, Synthetic Construct
  source 1..22: mol_type = other RNA
tgagaactggattccatgggtt

SEQ ID NO: 53814 - RNA, 22 nt, Synthetic Construct
  source 1..22: mol_type = other RNA
tgagaactggattccatgggtt

SEQ ID NO: 53815 - RNA, 19 nt, Synthetic Construct
  source 1..19: mol_type = other RNA
tggccgtcgtcagctcgtg

SEQ ID NO: 53816 - RNA, 23 nt, Synthetic Construct
  source 1..23: mol_type = other RNA
agcaacattgtctgctgggtttc

SEQ ID NO: 53817 - RNA, 23 nt, Synthetic Construct
  source 1..23: mol_type = other RNA
agcaacattgtctgctgggtttc

SEQ ID NO: 53818 - RNA, 22 nt, Synthetic Construct
  source 1..22: mol_type = other RNA
tagcagcacgtaaatattagcg

SEQ ID NO: 53819 - RNA, 22 nt, Synthetic Construct
  source 1..22: mol_type = other RNA
tagcagcacgtaaatattagcg

SEQ ID NO: 53820 - RNA, 22 nt, Synthetic Construct
  source 1..22: mol_type = other RNA
ncgtaccgtgagtaataatgcg

SEQ ID NO: 53821 - RNA, 22 nt, Synthetic Construct
  source 1..22: mol_type = other RNA
ncgtaccgtgagtaataatgcg

SEQ ID NO: 53822 - RNA, 16 nt, Synthetic Construct
  source 1..16: mol_type = other RNA
gcctacggccatacca

SEQ ID NO: 53823 - RNA, 16 nt, Synthetic Construct
  source 1..16: mol_type = other RNA
gcctacggccatacca

SEQ ID NO: 53824 - RNA, 22 nt, Synthetic Construct
  source 1..22: mol_type = other RNA
acagtagtctgcacattggttt

SEQ ID NO: 53825 - RNA, 22 nt, Synthetic Construct
  source 1..22: mol_type = other RNA
acagtagtctgcacattggttt

SEQ ID NO: 53826 - RNA, 24 nt, Synthetic Construct
  source 1..24: mol_type = other RNA
ggctacattgtctgctgggtttct

SEQ ID NO: 53827 - RNA, 24 nt, Synthetic Construct
  source 1..24: mol_type = other RNA
ggctacattgtctgctgggtttct

SEQ ID NO: 53828 - RNA, 35 nt, Synthetic Construct; identical to SEQ ID NO: 2514
  source 1..35: mol_type = other RNA

SEQ ID NO: 53829 - RNA, 35 nt, Synthetic Construct; identical to SEQ ID NO: 2514
  source 1..35: mol_type = other RNA

SEQ ID NO: 53830 - RNA, 22 nt, Synthetic Construct
  source 1..22: mol_type = other RNA
tttttcattattgctcctgacc

SEQ ID NO: 53831 - RNA, 22 nt, Synthetic Construct
  source 1..22: mol_type = other RNA
tttttcattattgctcctgacc

SEQ ID NO: 53832 - RNA, 22 nt, Synthetic Construct
  source 1..22: mol_type = other RNA
taaggtagtagtttgtgctgtt

SEQ ID NO: 53833 - RNA, 21 nt, Synthetic Construct
  source 1..21: mol_type = other RNA
ttataatacaacctgataagt

SEQ ID NO: 53834 - RNA, 21 nt, Synthetic Construct
  source 1..21: mol_type = other RNA
tcctgtactgggctgccccga

SEQ ID NO: 53835 - RNA, 36 nt, Synthetic Construct; identical to SEQ ID NO: 2248
  source 1..36: mol_type = other RNA

SEQ ID NO: 53836 - RNA, 36 nt, Synthetic Construct; identical to SEQ ID NO: 2248
  source 1..36: mol_type = other RNA

SEQ ID NO: 53837 - RNA, 22 nt, Synthetic Construct
  source 1..22: mol_type = other RNA
tgaggtagtagtttgcgctgtt

SEQ ID NO: 53838 - RNA, 16 nt, Synthetic Construct
  source 1..16: mol_type = other RNA
gccagcagccgcggta

SEQ ID NO: 53839 - RNA, 16 nt, Synthetic Construct
  source 1..16: mol_type = other RNA
gccagcagccgcggta

SEQ ID NO: 53840 - RNA, 22 nt, Synthetic Construct
  source 1..22: mol_type = other RNA
acagtagtctgcacattggttg

SEQ ID NO: 53841 - RNA, 22 nt, Synthetic Construct
  source 1..22: mol_type = other RNA
tcctgtactgaactgccccgag

SEQ ID NO: 53842 - RNA, 23 nt, Synthetic Construct
  source 1..23: mol_type = other RNA
tggtaatacggcgtacttagtgt

SEQ ID NO: 53843 - RNA, 23 nt, Synthetic Construct
  source 1..23: mol_type = other RNA
tggtaatacggcgtacttagtgt

SEQ ID NO: 53844 - RNA, 32 nt, Synthetic Construct; identical to SEQ ID NO: 2052
  source 1..32: mol_type = other RNA

SEQ ID NO: 53845 - RNA, 32 nt, Synthetic Construct; identical to SEQ ID NO: 2052
  source 1..32: mol_type = other RNA

SEQ ID NO: 53846 - RNA, 18 nt, Synthetic Construct
  source 1..18: mol_type = other RNA
tcctgtactgagctgccc

SEQ ID NO: 53847 - RNA, 18 nt, Synthetic Construct
  source 1..18: mol_type = other RNA
tcctgtactgagctgccc

SEQ ID NO: 53848 - RNA, 25 nt, Synthetic Construct
  source 1..25: mol_type = other RNA
ttggggatatgagatcgagacgaca

SEQ ID NO: 53849 - RNA, 25 nt, Synthetic Construct
  source 1..25: mol_type = other RNA
ttggggatatgagatcgagacgaca

SEQ ID NO: 53850 - RNA, 21 nt, Synthetic Construct
  source 1..21: mol_type = other RNA
tgaggtagtaggttgagtggt

SEQ ID NO: 53851 - RNA, 21 nt, Synthetic Construct
  source 1..21: mol_type = other RNA
tgaggtagtaggttgagtggt

SEQ ID NO: 53852 - RNA, 22 nt, Synthetic Construct
  source 1..22: mol_type = other RNA
cattgcacttgtctcggcctga

SEQ ID NO: 53853 - RNA, 22 nt, Synthetic Construct
  source 1..22: mol_type = other RNA
agggctgggtcggtcgggctgg

SEQ ID NO: 53854 - RNA, 22 nt, Synthetic Construct
  source 1..22: mol_type = other RNA
agggctgggtcggtcgggctgg

SEQ ID NO: 53855 - RNA, 26 nt, Synthetic Construct
  source 1..26: mol_type = other RNA
tccctggtggtctagtggttaggatt

SEQ ID NO: 53856 - RNA, 26 nt, Synthetic Construct
  source 1..26: mol_type = other RNA
tccctggtggtctagtggttaggatt

SEQ ID NO: 53857 - RNA, 22 nt, Synthetic Construct
  source 1..22: mol_type = other RNA
tcctgtactgagctgtcccgag

SEQ ID NO: 53858 - RNA, 22 nt, Synthetic Construct
  source 1..22: mol_type = other RNA
tcctgtactgagctgtcccgag

SEQ ID NO: 53859 - RNA, 15 nt, Synthetic Construct
  source 1..15: mol_type = other RNA
acggtcctaaggtag

SEQ ID NO: 53860 - RNA, 15 nt, Synthetic Construct
  source 1..15: mol_type = other RNA
acggtcctaaggtag

SEQ ID NO: 53861 - RNA, 22 nt, Synthetic Construct
  source 1..22: mol_type = other RNA
ttcaccaccttctccacccagc

SEQ ID NO: 53862 - RNA, 22 nt, Synthetic Construct
  source 1..22: mol_type = other RNA
ttcaccaccttctccacccagc

SEQ ID NO: 53863 - RNA, 21 nt, Synthetic Construct
  source 1..21: mol_type = other RNA
tgagatagtaggttgtgtggt

SEQ ID NO: 53864 - RNA, 21 nt, Synthetic Construct
  source 1..21: mol_type = other RNA
tgagatagtaggttgtgtggt

SEQ ID NO: 53865 - RNA, 22 nt, Synthetic Construct
  source 1..22: mol_type = other RNA
ttcaagtaatccaggataggct

SEQ ID NO: 53866 - RNA, 21 nt, Synthetic Construct
  source 1..21: mol_type = other RNA
tgaggtagtaagttgtgtggt

SEQ ID NO: 53867 - RNA, 21 nt, Synthetic Construct
  source 1..21: mol_type = other RNA
tgaggtagtaagttgtgtggt

SEQ ID NO: 53868 - RNA, 20 nt, Synthetic Construct
  source 1..20: mol_type = other RNA
cccttggggttgtaggacca

SEQ ID NO: 53869 - RNA, 20 nt, Synthetic Construct
  source 1..20: mol_type = other RNA
cccttggggttgtaggacca

SEQ ID NO: 53870 - RNA, 23 nt, Synthetic Construct
  source 1..23: mol_type = other RNA
cagagtgctgttcgtgcaggtag

SEQ ID NO: 53871 - RNA, 35 nt, Synthetic Construct; identical to SEQ ID NO: 2762
  source 1..35: mol_type = other RNA

SEQ ID NO: 53872 - RNA, 35 nt, Synthetic Construct; identical to SEQ ID NO: 2762
  source 1..35: mol_type = other RNA

SEQ ID NO: 53873 - RNA, 21 nt, Synthetic Construct
  source 1..21: mol_type = other RNA
gctttgatccggagatttccg

SEQ ID NO: 53874 - RNA, 21 nt, Synthetic Construct
  source 1..21: mol_type = other RNA
gctttgatccggagatttccg

SEQ ID NO: 53875 - RNA, 28 nt, Synthetic Construct
  source 1..28: mol_type = other RNA
ccccccactgctaaatttgactggcctt

SEQ ID NO: 53876 - RNA, 28 nt, Synthetic Construct
  source 1..28: mol_type = other RNA
ccccccactgctaaatttgactggcctt

SEQ ID NO: 53877 - RNA, 23 nt, Synthetic Construct
  source 1..23: mol_type = other RNA
tcctgtactgggctgccccgaga

SEQ ID NO: 53878 - RNA, 23 nt, Synthetic Construct
  source 1..23: mol_type = other RNA
tcctgtactgggctgccccgaga

SEQ ID NO: 53879 - RNA, 23 nt, Synthetic Construct
  source 1..23: mol_type = other RNA
tcctgtactgagctgccccgagc

SEQ ID NO: 53880 - RNA, 23 nt, Synthetic Construct
  source 1..23: mol_type = other RNA
tcctgtactgagctgccccgagc

SEQ ID NO: 53881 - RNA, 21 nt, Synthetic Construct
  source 1..21: mol_type = other RNA
taacactgtctggtaacgatg

SEQ ID NO: 53882 - RNA, 21 nt, Synthetic Construct
  source 1..21: mol_type = other RNA
taacactgtctggtaacgatg

SEQ ID NO: 53883 - RNA, 44 nt, Synthetic Construct; identical to SEQ ID NO: 5536
  source 1..44: mol_type = other RNA

SEQ ID NO: 53884 - RNA, 34 nt, Synthetic Construct; identical to SEQ ID NO: 13733
  source 1..34: mol_type = other RNA

SEQ ID NO: 53885 - RNA, 34 nt, Synthetic Construct; identical to SEQ ID NO: 13733
  source 1..34: mol_type = other RNA

SEQ ID NO: 53886 - RNA, 22 nt, Synthetic Construct
  source 1..22: mol_type = other RNA
tggagtgtgacaatggcgtttg

SEQ ID NO: 53887 - RNA, 22 nt, Synthetic Construct
  source 1..22: mol_type = other RNA
tggagtgtgacaatggcgtttg

SEQ ID NO: 53888 - RNA, 21 nt, Synthetic Construct
  source 1..21: mol_type = other RNA
tgtcagtttgtcaaatacccc

SEQ ID NO: 53889 - RNA, 22 nt, Synthetic Construct
  source 1..22: mol_type = other RNA
tgaggtagtaggttgtgttgtt

SEQ ID NO: 53890 - RNA, 22 nt, Synthetic Construct
  source 1..22: mol_type = other RNA
tgaggtagtaggttgtgttgtt

SEQ ID NO: 53891 - RNA, 21 nt, Synthetic Construct
  source 1..21: mol_type = other RNA
tgaggtagtagattgtataga

SEQ ID NO: 53892 - RNA, 21 nt, Synthetic Construct
  source 1..21: mol_type = other RNA
cagcattgtacagggctatga

SEQ ID NO: 53893 - RNA, 23 nt, Synthetic Construct
  source 1..23: mol_type = other RNA
tcctgtactgagctgccccgagg

SEQ ID NO: 53894 - RNA, 23 nt, Synthetic Construct
  source 1..23: mol_type = other RNA
tcctgtactgagctgccccgagg

SEQ ID NO: 53895 - RNA, 22 nt, Synthetic Construct
  source 1..22: mol_type = other RNA
gtcagtttgtcaaataccccaa

SEQ ID NO: 53896 - RNA, 22 nt, Synthetic Construct
  source 1..22: mol_type = other RNA
gtcagtttgtcaaataccccaa

SEQ ID NO: 53897 - RNA, 32 nt, Synthetic Construct; identical to SEQ ID NO: 2798
  source 1..32: mol_type = other RNA

SEQ ID NO: 53898 - RNA, 32 nt, Synthetic Construct; identical to SEQ ID NO: 2798
  source 1..32: mol_type = other RNA

SEQ ID NO: 53899 - RNA, 23 nt, Synthetic Construct
  source 1..23: mol_type = other RNA
aggggtgctatctgtgattgagg

SEQ ID NO: 53900 - RNA, 22 nt, Synthetic Construct
  source 1..22: mol_type = other RNA
tgaggtagtagtttgtgctatt

SEQ ID NO: 53901 - RNA, 22 nt, Synthetic Construct
  source 1..22: mol_type = other RNA
gaagaggacttggagctcgatc

SEQ ID NO: 53902 - RNA, 22 nt, Synthetic Construct
  source 1..22: mol_type = other RNA
gaagaggacttggagctcgatc

SEQ ID NO: 53903 - RNA, 43 nt, Synthetic Construct; identical to SEQ ID NO: 1204
  source 1..43: mol_type = other RNA

SEQ ID NO: 53904 - RNA, 43 nt, Synthetic Construct; identical to SEQ ID NO: 1204
  source 1..43: mol_type = other RNA

SEQ ID NO: 53905 - RNA, 32 nt, Synthetic Construct; identical to SEQ ID NO: 734
  source 1..32: mol_type = other RNA

SEQ ID NO: 53906 - RNA, 18 nt, Synthetic Construct
  source 1..18: mol_type = other RNA
cccaaaggtcgtcggttc

SEQ ID NO: 53907 - RNA, 35 nt, Synthetic Construct; identical to SEQ ID NO: 3369
  source 1..35: mol_type = other RNA

SEQ ID NO: 53908 - RNA, 35 nt, Synthetic Construct; identical to SEQ ID NO: 3369
  source 1..35: mol_type = other RNA

SEQ ID NO: 53909 - RNA, 22 nt, Synthetic Construct
  source 1..22: mol_type = other RNA
tgaggtagtaggttgtgcggtt

SEQ ID NO: 53910 - RNA, 20 nt, Synthetic Construct
  source 1..20: mol_type = other RNA
tgaggtagcaggttgtgtgg

SEQ ID NO: 53911 - RNA, 21 nt, Synthetic Construct
  source 1..21: mol_type = other RNA
tgaggtagaaggttgtatagt

SEQ ID NO: 53912 - RNA, 21 nt, Synthetic Construct
  source 1..21: mol_type = other RNA
ttctgtactgagctgccccga

SEQ ID NO: 53913 - RNA, 21 nt, Synthetic Construct
  source 1..21: mol_type = other RNA
ttctgtactgagctgccccga

SEQ ID NO: 53914 - RNA, 22 nt, Synthetic Construct
  source 1..22: mol_type = other RNA
tgaggtagtagattatatagtt

SEQ ID NO: 53915 - RNA, 22 nt, Synthetic Construct
  source 1..22: mol_type = other RNA
tgaggtagtagattatatagtt

SEQ ID NO: 53916 - RNA, 21 nt, Synthetic Construct
  source 1..21: mol_type = other RNA
agcagcacgtaaatattggcg

SEQ ID NO: 53917 - RNA, 21 nt, Synthetic Construct
  source 1..21: mol_type = other RNA
agcagcacgtaaatattggcg

SEQ ID NO: 53918 - RNA, 22 nt, Synthetic Construct
  source 1..22: mol_type = other RNA
tgaggtagtaggctgtgtggtt

SEQ ID NO: 53919 - RNA, 18 nt, Synthetic Construct
  source 1..18: mol_type = other RNA
atggccgggacagagggc

SEQ ID NO: 53920 - RNA, 18 nt, Synthetic Construct
  source 1..18: mol_type = other RNA
atggccgggacagagggc

SEQ ID NO: 53921 - RNA, 17 nt, Synthetic Construct
  source 1..17: mol_type = other RNA
ggagtatggtcgcaagg

SEQ ID NO: 53922 - RNA, 22 nt, Synthetic Construct
  source 1..22: mol_type = other RNA
cgttgcacttgtctcggtctga

SEQ ID NO: 53923 - RNA, 21 nt, Synthetic Construct
  source 1..21: mol_type = other RNA
tcctgtactgagctgctccga

SEQ ID NO: 53924 - RNA, 21 nt, Synthetic Construct
  source 1..21: mol_type = other RNA
tcctgtactgagctgctccga

SEQ ID NO: 53925 - RNA, 21 nt, Synthetic Construct
  source 1..21: mol_type = other RNA
ggctggtccgaaggtagtgag

SEQ ID NO: 53926 - RNA, 21 nt, Synthetic Construct
  source 1..21: mol_type = other RNA
ggctggtccgaaggtagtgag

SEQ ID NO: 53927 - RNA, 21 nt, Synthetic Construct
  source 1..21: mol_type = other RNA
tcctgtaccgagctgccccga

SEQ ID NO: 53928 - RNA, 21 nt, Synthetic Construct
  source 1..21: mol_type = other RNA
tcctgtaccgagctgccccga

SEQ ID NO: 53929 - RNA, 31 nt, Synthetic Construct; identical to SEQ ID NO: 2310
  source 1..31: mol_type = other RNA

SEQ ID NO: 53930 - RNA, 31 nt, Synthetic Construct; identical to SEQ ID NO: 2310
  source 1..31: mol_type = other RNA

SEQ ID NO: 53931 - RNA, 27 nt, Synthetic Construct
  source 1..27: mol_type = other RNA
ccccccactgctaagtttgactggctt

SEQ ID NO: 53932 - RNA, 21 nt, Synthetic Construct
  source 1..21: mol_type = other RNA
tcctgcactgagctgccccga

SEQ ID NO: 53933 - RNA, 21 nt, Synthetic Construct
  source 1..21: mol_type = other RNA
tcctgcactgagctgccccga

SEQ ID NO: 53934 - RNA, 22 nt, Synthetic Construct
  source 1..22: mol_type = other RNA
tgtcccacccccactcctgttt

SEQ ID NO: 53935 - RNA, 22 nt, Synthetic Construct
  source 1..22: mol_type = other RNA
tgtcccacccccactcctgttt

SEQ ID NO: 53936 - RNA, 22 nt, Synthetic Construct
  source 1..22: mol_type = other RNA
tgaggtagtaggttgtgcggtt

SEQ ID NO: 53937 - RNA, 22 nt, Synthetic Construct
  source 1..22: mol_type = other RNA
tgaggtagtaggttgtgcggtt

SEQ ID NO: 53938 - RNA, 23 nt, Synthetic Construct
  source 1..23: mol_type = other RNA
ttccccttggggttgtaggacca

SEQ ID NO: 53939 - RNA, 23 nt, Synthetic Construct
  source 1..23: mol_type = other RNA
ttccccttggggttgtaggacca

SEQ ID NO: 53940 - RNA, 21 nt, Synthetic Construct
  source 1..21: mol_type = other RNA
tggggtagtaggttgtatagt

SEQ ID NO: 53941 - RNA, 21 nt, Synthetic Construct
  source 1..21: mol_type = other RNA
tggggtagtaggttgtatagt

SEQ ID NO: 53942 - RNA, 22 nt, Synthetic Construct
  source 1..22: mol_type = other RNA
tgaggtagtaggttgcgtggtt

SEQ ID NO: 53943 - RNA, 22 nt, Synthetic Construct
  source 1..22: mol_type = other RNA
tgaggtagtaggttgcgtggtt

SEQ ID NO: 53944 - RNA, 28 nt, Synthetic Construct
  source 1..28: mol_type = other RNA
cccccccactgctaaatttgactggctt

SEQ ID NO: 53945 - RNA, 28 nt, Synthetic Construct
  source 1..28: mol_type = other RNA
cccccccactgctaaatttgactggctt

SEQ ID NO: 53946 - RNA, 24 nt, Synthetic Construct
  source 1..24: mol_type = other RNA
tgtaaacatccctgactggaagct

SEQ ID NO: 53947 - RNA, 24 nt, Synthetic Construct
  source 1..24: mol_type = other RNA
tgtaaacatccctgactggaagct

SEQ ID NO: 53948 - RNA, 23 nt, Synthetic Construct
  source 1..23: mol_type = other RNA
gtgcagatcttggtggtagtagc

SEQ ID NO: 53949 - RNA, 23 nt, Synthetic Construct
  source 1..23: mol_type = other RNA
gtgcagatcttggtggtagtagc

SEQ ID NO: 53950 - RNA, 22 nt, Synthetic Construct
  source 1..22: mol_type = other RNA
tccaagtaatccaggataggct

SEQ ID NO: 53951 - RNA, 22 nt, Synthetic Construct
  source 1..22: mol_type = other RNA
tccaagtaatccaggataggct

SEQ ID NO: 53952 - RNA, 22 nt, Synthetic Construct
  source 1..22: mol_type = other RNA
cattgcactagtctcggtctga

SEQ ID NO: 53953 - RNA, 22 nt, Synthetic Construct
  source 1..22: mol_type = other RNA
cattgcactagtctcggtctga

SEQ ID NO: 53954 - RNA, 23 nt, Synthetic Construct
  source 1..23: mol_type = other RNA
atgtcccacccccactcctgttt

SEQ ID NO: 53955 - RNA, 22 nt, Synthetic Construct
  source 1..22: mol_type = other RNA
tgtcagtttgtcaaatacccaa

SEQ ID NO: 53956 - RNA, 23 nt, Synthetic Construct
  source 1..23: mol_type = other RNA
caaagtgctgttcatgcaggtag

SEQ ID NO: 53957 - RNA, 23 nt, Synthetic Construct
  source 1..23: mol_type = other RNA
caaagtgctgttcatgcaggtag

SEQ ID NO: 53958 - RNA, 32 nt, Synthetic Construct; identical to SEQ ID NO: 4734
  source 1..32: mol_type = other RNA

SEQ ID NO: 53959 - RNA, 30 nt, Synthetic Construct; identical to SEQ ID NO: 5879
  source 1..30: mol_type = other RNA

SEQ ID NO: 53960 - RNA, 30 nt, Synthetic Construct; identical to SEQ ID NO: 5879
  source 1..30: mol_type = other RNA

SEQ ID NO: 53961 - RNA, 24 nt, Synthetic Construct
  source 1..24: mol_type = other RNA
taccacagggtagaaccacggatt

SEQ ID NO: 53962 - RNA, 24 nt, Synthetic Construct
  source 1..24: mol_type = other RNA
taccacagggtagaaccacggatt

SEQ ID NO: 53963 - RNA, 19 nt, Synthetic Construct
  source 1..19: mol_type = other RNA
gtactgacgctcatgcacg

SEQ ID NO: 53964 - RNA, 19 nt, Synthetic Construct
  source 1..19: mol_type = other RNA
gtactgacgctcatgcacg

SEQ ID NO: 53965 - RNA, 22 nt, Synthetic Construct
  source 1..22: mol_type = other RNA
tgaggtagtagtttgtgttgtt

SEQ ID NO: 53966 - RNA, 22 nt, Synthetic Construct
  source 1..22: mol_type = other RNA
tgaggtagtagtttgtgctgct

SEQ ID NO: 53967 - RNA, 21 nt, Synthetic Construct
  source 1..21: mol_type = other RNA
ggaggggcagagagcgagact

SEQ ID NO: 53968 - RNA, 21 nt, Synthetic Construct
  source 1..21: mol_type = other RNA
ggaggggcagagagcgagact

SEQ ID NO: 53969 - RNA, 21 nt, Synthetic Construct
  source 1..21: mol_type = other RNA
tgaggtagtaggttgtgaggt

SEQ ID NO: 53970 - RNA, 21 nt, Synthetic Construct
  source 1..21: mol_type = other RNA
tgaggtagtaggttgtgaggt

SEQ ID NO: 53971 - RNA, 33 nt, Synthetic Construct; identical to SEQ ID NO: 2395
  source 1..33: mol_type = other RNA

SEQ ID NO: 53972 - RNA, 28 nt, Synthetic Construct
  source 1..28: mol_type = other RNA
ggtggctgtagctcagttggtagagtcc

SEQ ID NO: 53973 - RNA, 28 nt, Synthetic Construct
  source 1..28: mol_type = other RNA
ggtggctgtagctcagttggtagagtcc

SEQ ID NO: 53974 - RNA, 18 nt, Synthetic Construct
  source 1..18: mol_type = other RNA
acagtcaggatgttggct

SEQ ID NO: 53975 - RNA, 18 nt, Synthetic Construct
  source 1..18: mol_type = other RNA
acagtcaggatgttggct

SEQ ID NO: 53976 - RNA, 25 nt, Synthetic Construct
  source 1..25: mol_type = other RNA
ttgaggatatgggatcgagacgaca

SEQ ID NO: 53977 - RNA, 21 nt, Synthetic Construct
  source 1..21: mol_type = other RNA
aacggaatcccaaaagcagct

SEQ ID NO: 53978 - RNA, 21 nt, Synthetic Construct
  source 1..21: mol_type = other RNA
ttcggaagaaggggtgcctgg

SEQ ID NO: 53979 - RNA, 21 nt, Synthetic Construct
  source 1..21: mol_type = other RNA
ttcggaagaaggggtgcctgg

SEQ ID NO: 53980 - RNA, 18 nt, Synthetic Construct
  source 1..18: mol_type = other RNA
gtccccttcgtctagagg

SEQ ID NO: 53981 - RNA, 22 nt, Synthetic Construct
  source 1..22: mol_type = other RNA
aaagtgctgttcgtgcaggtag

SEQ ID NO: 53982 - RNA, 18 nt, Synthetic Construct
  source 1..18: mol_type = other RNA
gtcgacgtatagggtgtg

SEQ ID NO: 53983 - RNA, 23 nt, Synthetic Construct
  source 1..23: mol_type = other RNA
agcagcattgtacagggctatgg

SEQ ID NO: 53984 - RNA, 23 nt, Synthetic Construct
  source 1..23: mol_type = other RNA
agcagcattgtacagggctatgg

SEQ ID NO: 53985 - RNA, 21 nt, Synthetic Construct
  source 1..21: mol_type = other RNA
aagaaagattgcaagaactgc

SEQ ID NO: 53986 - RNA, 37 nt, Synthetic Construct; identical to SEQ ID NO: 2211
  source 1..37: mol_type = other RNA

SEQ ID NO: 53987 - RNA, 21 nt, Synthetic Construct
  source 1..21: mol_type = other RNA
acagtagtctgcacattggtt

SEQ ID NO: 53988 - RNA, 22 nt, Synthetic Construct
  source 1..22: mol_type = other RNA
tgaggtggtaggttgtgtggtt

SEQ ID NO: 53989 - RNA, 18 nt, Synthetic Construct
  source 1..18: mol_type = other RNA
atcccacttctgacacca

SEQ ID NO: 53990 - RNA, 18 nt, Synthetic Construct
  source 1..18: mol_type = other RNA
atcccacttctgacacca

SEQ ID NO: 53991 - RNA, 23 nt, Synthetic Construct
  source 1..23: mol_type = other RNA
tggtaatatgacgtacttagtgt

SEQ ID NO: 53992 - RNA, 19 nt, Synthetic Construct
  source 1..19: mol_type = other RNA
agcgaaattccttgtcggg

SEQ ID NO: 53993 - RNA, 26 nt, Synthetic Construct
  source 1..26: mol_type = other RNA
gaggaacactagtggcgtaggcgaga

SEQ ID NO: 53994 - RNA, 26 nt, Synthetic Construct
  source 1..26: mol_type = other RNA
gaggaacactagtggcgtaggcgaga

SEQ ID NO: 53995 - RNA, 18 nt, Synthetic Construct
  source 1..18: mol_type = other RNA
cgccgatgatagtgcgga

SEQ ID NO: 53996 - RNA, 21 nt, Synthetic Construct
  source 1..21: mol_type = other RNA
tggagtgtgacaatggtgtct

SEQ ID NO: 53997 - RNA, 21 nt, Synthetic Construct
  source 1..21: mol_type = other RNA
tggagtgtgacaatggtgtct

SEQ ID NO: 53998 - RNA, 22 nt, Synthetic Construct
  source 1..22: mol_type = other RNA
cactgcacttgtctcggtctga

SEQ ID NO: 53999 - RNA, 22 nt, Synthetic Construct
  source 1..22: mol_type = other RNA
tgtggtagtagtttgtgctgtt

SEQ ID NO: 54000 - RNA, 22 nt, Synthetic Construct
  source 1..22: mol_type = other RNA
tgtggtagtagtttgtgctgtt

SEQ ID NO: 54001 - RNA, 17 nt, Synthetic Construct
  source 1..17: mol_type = other RNA
tctgcctcagcgtcggt

SEQ ID NO: 54002 - RNA, 17 nt, Synthetic Construct
  source 1..17: mol_type = other RNA
tctgcctcagcgtcggt

SEQ ID NO: 54003 - RNA, 21 nt, Synthetic Construct
  source 1..21: mol_type = other RNA
taactccttaagcaatctcgc

SEQ ID NO: 54004 - RNA, 21 nt, Synthetic Construct
  source 1..21: mol_type = other RNA
taactccttaagcaatctcgc

SEQ ID NO: 54005 - RNA, 21 nt, Synthetic Construct
  source 1..21: mol_type = other RNA
aacggaatcccaaaagcagct

SEQ ID NO: 54006 - RNA, 21 nt, Synthetic Construct
  source 1..21: mol_type = other RNA
aacggaatcccaaaagcagct

SEQ ID NO: 54007 - RNA, 23 nt, Synthetic Construct
  source 1..23: mol_type = other RNA
tgaggtagtaggttgtgtggttt

SEQ ID NO: 54008 - RNA, 24 nt, Synthetic Construct
  source 1..24: mol_type = other RNA
tgtaaacatccttgactggaagct

SEQ ID NO: 54009 - RNA, 32 nt, Synthetic Construct; identical to SEQ ID NO: 2052
  source 1..32: mol_type = other RNA

SEQ ID NO: 54010 - RNA, 24 nt, Synthetic Construct
  source 1..24: mol_type = other RNA
gggttgtaaaccgcttttgtcagg

SEQ ID NO: 54011 - RNA, 16 nt, Synthetic Construct
  source 1..16: mol_type = other RNA
tgcaagtcgaacggta

SEQ ID NO: 54012 - RNA, 22 nt, Synthetic Construct
  source 1..22: mol_type = other RNA
ctttgttcgattccgttgagta

SEQ ID NO: 54013 - RNA, 22 nt, Synthetic Construct
  source 1..22: mol_type = other RNA
ctttgttcgattccgttgagta

SEQ ID NO: 54014 - RNA, 23 nt, Synthetic Construct
  source 1..23: mol_type = other RNA
ccctgtactgagctgccccgaga

SEQ ID NO: 54015 - RNA, 23 nt, Synthetic Construct
  source 1..23: mol_type = other RNA
tcctgcactgagctgccccgaga

SEQ ID NO: 54016 - RNA, 23 nt, Synthetic Construct
  source 1..23: mol_type = other RNA
tcctgtgctgagctgccccgagt

SEQ ID NO: 54017 - RNA, 23 nt, Synthetic Construct
  source 1..23: mol_type = other RNA
tcctgtgctgagctgccccgagt

SEQ ID NO: 54018 - RNA, 22 nt, Synthetic Construct
  source 1..22: mol_type = other RNA
tatagcacttgtcccggcctgt

SEQ ID NO: 54019 - RNA, 15 nt, Synthetic Construct
  source 1..15: mol_type = other RNA
gagtagggcgggaca

SEQ ID NO: 54020 - RNA, 17 nt, Synthetic Construct
  source 1..17: mol_type = other RNA
cgactcttagcggtgga

SEQ ID NO: 54021 - RNA, 32 nt, Synthetic Construct; identical to SEQ ID NO: 4710
  source 1..32: mol_type = other RNA

SEQ ID NO: 54022 - RNA, 21 nt, Synthetic Construct
  source 1..21: mol_type = other RNA
cgtaccgtgagtaataatgcg

SEQ ID NO: 54023 - RNA, 21 nt, Synthetic Construct
  source 1..21: mol_type = other RNA
cgtaccgtgagtaataatgcg

SEQ ID NO: 54024 - RNA, 23 nt, Synthetic Construct
  source 1..23: mol_type = other RNA
tgaggtagtaggtcgtgtggttt

SEQ ID NO: 54025 - RNA, 23 nt, Synthetic Construct
  source 1..23: mol_type = other RNA
tgaggtagtaggtcgtgtggttt

SEQ ID NO: 54026 - RNA, 22 nt, Synthetic Construct
  source 1..22: mol_type = other RNA
agggctgggtcggtcgggctgg

SEQ ID NO: 54027 - RNA, 22 nt, Synthetic Construct
  source 1..22: mol_type = other RNA
agggctgggtcggtcgggctgg

SEQ ID NO: 54028 - RNA, 23 nt, Synthetic Construct
  source 1..23: mol_type = other RNA
tcctgtactgagctgccccgggt

SEQ ID NO: 54029 - RNA, 23 nt, Synthetic Construct
  source 1..23: mol_type = other RNA
tcctgtactgagctgccccgggt

SEQ ID NO: 54030 - RNA, 16 nt, Synthetic Construct
  source 1..16: mol_type = other RNA
ccaaggggtcgtgggt

SEQ ID NO: 54031 - RNA, 16 nt, Synthetic Construct
  source 1..16: mol_type = other RNA
ccaaggggtcgtgggt

SEQ ID NO: 54032 - RNA, 23 nt, Synthetic Construct
  source 1..23: mol_type = other RNA
tgtagtgtttcctactttatggt

SEQ ID NO: 54033 - RNA, 21 nt, Synthetic Construct
  source 1..21: mol_type = other RNA
taactccttaagcgaatctcg

SEQ ID NO: 54034 - RNA, 21 nt, Synthetic Construct
  source 1..21: mol_type = other RNA
taactccttaagcgaatctcg

SEQ ID NO: 54035 - RNA, 21 nt, Synthetic Construct
  source 1..21: mol_type = other RNA
gtgggcgtttgaagtgaagtg

SEQ ID NO: 54036 - RNA, 21 nt, Synthetic Construct
  source 1..21: mol_type = other RNA
gtgggcgtttgaagtgaagtg

SEQ ID NO: 54037 - RNA, 20 nt, Synthetic Construct
  source 1..20: mol_type = other RNA
tgaggtagtaggttatgtgg

SEQ ID NO: 54038 - RNA, 20 nt, Synthetic Construct
  source 1..20: mol_type = other RNA
tgaggtagtaggttatgtgg

SEQ ID NO: 54039 - RNA, 22 nt, Synthetic Construct
  source 1..22: mol_type = other RNA
tgaggtagtaggttgtatagtc

SEQ ID NO: 54040 - RNA, 22 nt, Synthetic Construct
  source 1..22: mol_type = other RNA
tgaggtagtaggttgtatagtc

SEQ ID NO: 54041 - RNA, 20 nt, Synthetic Construct
  source 1..20: mol_type = other RNA
cccttggggttgtaggacca

SEQ ID NO: 54042 - RNA, 20 nt, Synthetic Construct
  source 1..20: mol_type = other RNA
cccttggggttgtaggacca

SEQ ID NO: 54043 - RNA, 22 nt, Synthetic Construct
  source 1..22: mol_type = other RNA
tcgtaccgtgagtaataatgtg

SEQ ID NO: 54044 - RNA, 20 nt, Synthetic Construct
  source 1..20: mol_type = other RNA
tgaggtagtaggttgtgtag

SEQ ID NO: 54045 - RNA, 20 nt, Synthetic Construct
  source 1..20: mol_type = other RNA
tgaggtagtaggttgtgtag

SEQ ID NO: 54046 - RNA, 20 nt, Synthetic Construct
  source 1..20: mol_type = other RNA
agaggtagtaggttgtgtgg

SEQ ID NO: 54047 - RNA, 16 nt, Synthetic Construct
  source 1..16: mol_type = other RNA
gcctacggccatacca

SEQ ID NO: 54048 - RNA, 16 nt, Synthetic Construct
  source 1..16: mol_type = other RNA
gcctacggccatacca

SEQ ID NO: 54049 - RNA, 20 nt, Synthetic Construct
  source 1..20: mol_type = other RNA
cgtaccgtgagtaataatgc

SEQ ID NO: 54050 - RNA, 22 nt, Synthetic Construct
  source 1..22: mol_type = other RNA
cgtaccgtgagtaataatgcga

SEQ ID NO: 54051 - RNA, 22 nt, Synthetic Construct
  source 1..22: mol_type = other RNA
cgtaccgtgagtaataatgcga

SEQ ID NO: 54052 - RNA, 20 nt, Synthetic Construct
  source 1..20: mol_type = other RNA
agaggtagtaggttgtgtgg

SEQ ID NO: 54053 - RNA, 20 nt, Synthetic Construct
  source 1..20: mol_type = other RNA
agaggtagtaggttgtgtgg

SEQ ID NO: 54054 - RNA, 22 nt, Synthetic Construct
  source 1..22: mol_type = other RNA
tagcagcacgtaaatactggcg

SEQ ID NO: 54055 - RNA, 24 nt, Synthetic Construct
  source 1..24: mol_type = other RNA
tgtaaacatccttgactggaagct

SEQ ID NO: 54056 - RNA, 22 nt, Synthetic Construct
  source 1..22: mol_type = other RNA
tcgtaccgtgagtaataatgca

SEQ ID NO: 54057 - RNA, 22 nt, Synthetic Construct
  source 1..22: mol_type = other RNA
tcgtaccgtgagtaataatgca

SEQ ID NO: 54058 - RNA, 23 nt, Synthetic Construct
  source 1..23: mol_type = other RNA
cgagagtaggacgttgccaggtt

SEQ ID NO: 54059 - RNA, 23 nt, Synthetic Construct
  source 1..23: mol_type = other RNA
cgagagtaggacgttgccaggtt

SEQ ID NO: 54060 - RNA, 22 nt, Synthetic Construct
  source 1..22: mol_type = other RNA
tgaggactgaattccatgggtt

SEQ ID NO: 54061 - RNA, 22 nt, Synthetic Construct
  source 1..22: mol_type = other RNA
tgaggactgaattccatgggtt

SEQ ID NO: 54062 - RNA, 15 nt, Synthetic Construct
  source 1..15: mol_type = other RNA
tgcaagtcgaacggt

SEQ ID NO: 54063 - RNA, 15 nt, Synthetic Construct
  source 1..15: mol_type = other RNA
tgcaagtcgaacggt

SEQ ID NO: 54064 - RNA, 35 nt, Synthetic Construct; identical to SEQ ID NO: 787
  source 1..35: mol_type = other RNA

SEQ ID NO: 54065 - RNA, 35 nt, Synthetic Construct; identical to SEQ ID NO: 787
  source 1..35: mol_type = other RNA

SEQ ID NO: 54066 - RNA, 22 nt, Synthetic Construct
  source 1..22: mol_type = other RNA
ctcgtaccgtgagtaataatgc

SEQ ID NO: 54067 - RNA, 22 nt, Synthetic Construct
  source 1..22: mol_type = other RNA
ctcgtaccgtgagtaataatgc

SEQ ID NO: 54068 - RNA, 21 nt, Synthetic Construct
  source 1..21: mol_type = other RNA
tgaggtagtaggttgtgcggt

SEQ ID NO: 54069 - RNA, 21 nt, Synthetic Construct
  source 1..21: mol_type = other RNA
tgaggcagtaggttgtatagt

SEQ ID NO: 54070 - RNA, 21 nt, Synthetic Construct
  source 1..21: mol_type = other RNA
tgaggcagtaggttgtatagt

SEQ ID NO: 54071 - RNA, 21 nt, Synthetic Construct
  source 1..21: mol_type = other RNA
tgaggtagtaggttgtatagc

SEQ ID NO: 54072 - RNA, 32 nt, Synthetic Construct; identical to SEQ ID NO: 18425
  source 1..32: mol_type = other RNA

SEQ ID NO: 54073 - RNA, 32 nt, Synthetic Construct; identical to SEQ ID NO: 14097
  source 1..32: mol_type = other RNA

SEQ ID NO: 54074 - RNA, 32 nt, Synthetic Construct; identical to SEQ ID NO: 14097
  source 1..32: mol_type = other RNA

SEQ ID NO: 54075 - RNA, 22 nt, Synthetic Construct
  source 1..22: mol_type = other RNA
cattgcacctgtctcggtctga

SEQ ID NO: 54076 - RNA, 20 nt, Synthetic Construct
  source 1..20: mol_type = other RNA
tagcgaaattccttgtcggg

SEQ ID NO: 54077 - RNA, 23 nt, Synthetic Construct
  source 1..23: mol_type = other RNA
caaagtgctgttcgtgcgggtag

SEQ ID NO: 54078 - RNA, 23 nt, Synthetic Construct
  source 1..23: mol_type = other RNA
caaagtgctgttcgtgcgggtag

SEQ ID NO: 54079 - RNA, 22 nt, Synthetic Construct
  source 1..22: mol_type = other RNA
cattgcacttgtcccggcctgt

SEQ ID NO: 54080 - RNA, 15 nt, Synthetic Construct
  source 1..15: mol_type = other RNA
tggccgtcgtcagct

SEQ ID NO: 54081 - RNA, 23 nt, Synthetic Construct
  source 1..23: mol_type = other RNA
cgactcttagcggtggatcactc

SEQ ID NO: 54082 - RNA, 23 nt, Synthetic Construct
  source 1..23: mol_type = other RNA
tgaggtagcaggttgtgtggttt

SEQ ID NO: 54083 - RNA, 23 nt, Synthetic Construct
  source 1..23: mol_type = other RNA
caaggtgctgttcgtgcaggtag

SEQ ID NO: 54084 - RNA, 23 nt, Synthetic Construct
  source 1..23: mol_type = other RNA
caaggtgctgttcgtgcaggtag

SEQ ID NO: 54085 - RNA, 22 nt, Synthetic Construct
  source 1..22: mol_type = other RNA
ttcaagtaatccaggataggtt

SEQ ID NO: 54086 - RNA, 17 nt, Synthetic Construct
  source 1..17: mol_type = other RNA
gaagttgaccgcctggg

SEQ ID NO: 54087 - RNA, 17 nt, Synthetic Construct
  source 1..17: mol_type = other RNA
gaagttgaccgcctggg

SEQ ID NO: 54088 - RNA, 22 nt, Synthetic Construct
  source 1..22: mol_type = other RNA
taccagcacgtaaatattggcg

SEQ ID NO: 54089 - RNA, 23 nt, Synthetic Construct
  source 1..23: mol_type = other RNA
tggggggcagagagcgagacttt

SEQ ID NO: 54090 - RNA, 23 nt, Synthetic Construct
  source 1..23: mol_type = other RNA
tggggggcagagagcgagacttt

SEQ ID NO: 54091 - RNA, 23 nt, Synthetic Construct
  source 1..23: mol_type = other RNA
tcctgtactgagctgccccggga

SEQ ID NO: 54092 - RNA, 23 nt, Synthetic Construct
  source 1..23: mol_type = other RNA
gtgcagatcttggtggtagtagc

SEQ ID NO: 54093 - RNA, 23 nt, Synthetic Construct
  source 1..23: mol_type = other RNA
gtgcagatcttggtggtagtagc

SEQ ID NO: 54094 - RNA, 22 nt, Synthetic Construct
  source 1..22: mol_type = other RNA
tgaggtagcagtttgtgctgtt

SEQ ID NO: 54095 - RNA, 22 nt, Synthetic Construct
  source 1..22: mol_type = other RNA
tgaggtagcagtttgtgctgtt

SEQ ID NO: 54096 - RNA, 22 nt, Synthetic Construct
  source 1..22: mol_type = other RNA
tcctgtactaagctgccccgag

SEQ ID NO: 54097 - RNA, 24 nt, Synthetic Construct
  source 1..24: mol_type = other RNA
tcctccctcgggagggcgcgcggg

SEQ ID NO: 54098 - RNA, 24 nt, Synthetic Construct
  source 1..24: mol_type = other RNA
tcctccctcgggagggcgcgcggg

SEQ ID NO: 54099 - RNA, 22 nt, Synthetic Construct
  source 1..22: mol_type = other RNA
tgaggtagtagtttatgctgtt

SEQ ID NO: 54100 - RNA, 22 nt, Synthetic Construct
  source 1..22: mol_type = other RNA
tgaggtagtagtttatgctgtt

SEQ ID NO: 54101 - RNA, 15 nt, Synthetic Construct
  source 1..15: mol_type = other RNA
gctatgggatttgtt

SEQ ID NO: 54102 - RNA, 15 nt, Synthetic Construct
  source 1..15: mol_type = other RNA
gctatgggatttgtt

SEQ ID NO: 54103 - RNA, 22 nt, Synthetic Construct
  source 1..22: mol_type = other RNA
tagcagcacgcaaatattggcg

SEQ ID NO: 54104 - RNA, 23 nt, Synthetic Construct
  source 1..23: mol_type = other RNA
tgaggtagtaggttgtgtggctt

SEQ ID NO: 54105 - RNA, 19 nt, Synthetic Construct
  source 1..19: mol_type = other RNA
agcagcattgtacagggct

SEQ ID NO: 54106 - RNA, 19 nt, Synthetic Construct
  source 1..19: mol_type = other RNA
agcagcattgtacagggct

SEQ ID NO: 54107 - RNA, 23 nt, Synthetic Construct
  source 1..23: mol_type = other RNA
tgaggggcagagagcaagacttt

SEQ ID NO: 54108 - RNA, 23 nt, Synthetic Construct
  source 1..23: mol_type = other RNA
tgaggggcagagagcaagacttt

SEQ ID NO: 54109 - RNA, 20 nt, Synthetic Construct
  source 1..20: mol_type = other RNA
tgaggtagtaggttgtgtga

SEQ ID NO: 54110 - RNA, 19 nt, Synthetic Construct
  source 1..19: mol_type = other RNA
cctcgtcatctaattagtg

SEQ ID NO: 54111 - RNA, 19 nt, Synthetic Construct
  source 1..19: mol_type = other RNA
cctcgtcatctaattagtg

SEQ ID NO: 54112 - RNA, 24 nt, Synthetic Construct
  source 1..24: mol_type = other RNA
tgtaaacatccccgaccggaagct

SEQ ID NO: 54113 - RNA, 24 nt, Synthetic Construct
  source 1..24: mol_type = other RNA
tgtaaacatccccgaccggaagct

SEQ ID NO: 54114 - RNA, 22 nt, Synthetic Construct
  source 1..22: mol_type = other RNA
tgaggtagtaggttgtgtggta

SEQ ID NO: 54115 - RNA, 22 nt, Synthetic Construct
  source 1..22: mol_type = other RNA
tggctcagttcagcaggaacag

SEQ ID NO: 54116 - RNA, 22 nt, Synthetic Construct
  source 1..22: mol_type = other RNA
tgagaaccgaattccatgggtt

SEQ ID NO: 54117 - RNA, 22 nt, Synthetic Construct
  source 1..22: mol_type = other RNA
tgagaaccgaattccatgggtt

SEQ ID NO: 54118 - RNA, 28 nt, Synthetic Construct
  source 1..28: mol_type = other RNA
tccctggtggtctagtggttaggattcg

SEQ ID NO: 54119 - RNA, 28 nt, Synthetic Construct
  source 1..28: mol_type = other RNA
tccctggtggtctagtggttaggattcg

SEQ ID NO: 54120 - RNA, 28 nt, Synthetic Construct
  source 1..28: mol_type = other RNA
gcattggtggttcagtggtagaattctc

SEQ ID NO: 54121 - RNA, 28 nt, Synthetic Construct
  source 1..28: mol_type = other RNA
gcattggtggttcagtggtagaattctc

SEQ ID NO: 54122 - RNA, 21 nt, Synthetic Construct
  source 1..21: mol_type = other RNA
tcctgtactgagctgccccaa

SEQ ID NO: 54123 - RNA, 21 nt, Synthetic Construct
  source 1..21: mol_type = other RNA
cgaggtagtaggttgtatagt

SEQ ID NO: 54124 - RNA, 24 nt, Synthetic Construct
  source 1..24: mol_type = other RNA
ttcaagtaatccaggataggcttt

SEQ ID NO: 54125 - RNA, 24 nt, Synthetic Construct
  source 1..24: mol_type = other RNA
ttcaagtaatccaggataggcttt

SEQ ID NO: 54126 - RNA, 17 nt, Synthetic Construct
  source 1..17: mol_type = other RNA
tcccggacgagccccca

SEQ ID NO: 54127 - RNA, 17 nt, Synthetic Construct
  source 1..17: mol_type = other RNA
tcccggacgagccccca

SEQ ID NO: 54128 - RNA, 23 nt, Synthetic Construct
  source 1..23: mol_type = other RNA
caaagtgctgctcgtgcaggtag

SEQ ID NO: 54129 - RNA, 23 nt, Synthetic Construct
  source 1..23: mol_type = other RNA
caaagtgctgctcgtgcaggtag

SEQ ID NO: 54130 - RNA, 20 nt, Synthetic Construct
  source 1..20: mol_type = other RNA
tgaagtagtaggttgtgtgg

SEQ ID NO: 54131 - RNA, 20 nt, Synthetic Construct
  source 1..20: mol_type = other RNA
tgaagtagtaggttgtgtgg

SEQ ID NO: 54132 - RNA, 21 nt, Synthetic Construct
  source 1..21: mol_type = other RNA
ccccttggggttgtaggacca

SEQ ID NO: 54133 - RNA, 21 nt, Synthetic Construct
  source 1..21: mol_type = other RNA
ccccttggggttgtaggacca

SEQ ID NO: 54134 - RNA, 23 nt, Synthetic Construct
  source 1..23: mol_type = other RNA
tgaggtagtaggtcgtgtggttt

SEQ ID NO: 54135 - RNA, 22 nt, Synthetic Construct
  source 1..22: mol_type = other RNA
tgaggtagtaggttgtatagct

SEQ ID NO: 54136 - RNA, 22 nt, Synthetic Construct
  source 1..22: mol_type = other RNA
tgaggtagtaggttgtatagct

SEQ ID NO: 54137 - RNA, 21 nt, Synthetic Construct
  source 1..21: mol_type = other RNA
tgaggtagcagattgtatagt

SEQ ID NO: 54138 - RNA, 21 nt, Synthetic Construct
  source 1..21: mol_type = other RNA
tgaggtagcagattgtatagt

SEQ ID NO: 54139 - RNA, 23 nt, Synthetic Construct
  source 1..23: mol_type = other RNA
tagcttatcagactgatgttgaa

SEQ ID NO: 54140 - RNA, 23 nt, Synthetic Construct
  source 1..23: mol_type = other RNA
cgctcacggaaagagaatgaagc

SEQ ID NO: 54141 - RNA, 23 nt, Synthetic Construct
  source 1..23: mol_type = other RNA
cgctcacggaaagagaatgaagc

SEQ ID NO: 54142 - RNA, 20 nt, Synthetic Construct
  source 1..20: mol_type = other RNA
tgagatagtaggttgtgtgg

SEQ ID NO: 54143 - RNA, 20 nt, Synthetic Construct
  source 1..20: mol_type = other RNA
tgagatagtaggttgtgtgg

SEQ ID NO: 54144 - RNA, 25 nt, Synthetic Construct
  source 1..25: mol_type = other RNA
ggtaaaatggctgagtgaagcattg

SEQ ID NO: 54145 - RNA, 25 nt, Synthetic Construct
  source 1..25: mol_type = other RNA
ggtaaaatggctgagtgaagcattg

SEQ ID NO: 54146 - RNA, 22 nt, Synthetic Construct
  source 1..22: mol_type = other RNA
tagcagcacgtaaatatcggcg

SEQ ID NO: 54147 - RNA, 23 nt, Synthetic Construct
  source 1..23: mol_type = other RNA
caacgggatcccaaaagcagctg

SEQ ID NO: 54148 - RNA, 21 nt, Synthetic Construct
  source 1..21: mol_type = other RNA
tcctgtactgagctaccccga

SEQ ID NO: 54149 - RNA, 21 nt, Synthetic Construct
  source 1..21: mol_type = other RNA
tcctgtactgagctaccccga

SEQ ID NO: 54150 - RNA, 25 nt, Synthetic Construct
  source 1..25: mol_type = other RNA
tgtcagtttgtcaaataccccattt

SEQ ID NO: 54151 - RNA, 23 nt, Synthetic Construct
  source 1..23: mol_type = other RNA
caaagtgctgttcgtgcaggtgg

SEQ ID NO: 54152 - RNA, 22 nt, Synthetic Construct
  source 1..22: mol_type = other RNA
tgagagctgaattccatgggtt

SEQ ID NO: 54153 - RNA, 22 nt, Synthetic Construct
  source 1..22: mol_type = other RNA
tgagagctgaattccatgggtt

SEQ ID NO: 54154 - RNA, 23 nt, Synthetic Construct
  source 1..23: mol_type = other RNA
caaagtgctgctcgtgcaggtag

SEQ ID NO: 54155 - RNA, 18 nt, Synthetic Construct
  source 1..18: mol_type = other RNA
ggacgttgataggctggg

SEQ ID NO: 54156 - RNA, 18 nt, Synthetic Construct
  source 1..18: mol_type = other RNA
ggacgttgataggctggg

SEQ ID NO: 54157 - RNA, 27 nt, Synthetic Construct
  source 1..27: mol_type = other RNA
ccccccactgcaaaatttgactggctt

SEQ ID NO: 54158 - RNA, 21 nt, Synthetic Construct
  source 1..21: mol_type = other RNA
tggagtgtgacagtggtgttt

SEQ ID NO: 54159 - RNA, 21 nt, Synthetic Construct
  source 1..21: mol_type = other RNA
tggagtgtgacagtggtgttt

SEQ ID NO: 54160 - RNA, 22 nt, Synthetic Construct
  source 1..22: mol_type = other RNA
tgagatagtaggttgtgtggtt

SEQ ID NO: 54161 - RNA, 22 nt, Synthetic Construct
  source 1..22: mol_type = other RNA
tgagatagtaggttgtgtggtt

SEQ ID NO: 54162 - RNA, 22 nt, Synthetic Construct
  source 1..22: mol_type = other RNA
tgaggtagaaggttgtatagtt

SEQ ID NO: 54163 - RNA, 22 nt, Synthetic Construct
  source 1..22: mol_type = other RNA
tgaggtagaaggttgtatagtt

SEQ ID NO: 54164 - RNA, 23 nt, Synthetic Construct
  source 1..23: mol_type = other RNA
tggtaatacaacgtacttagtgt

SEQ ID NO: 54165 - RNA, 23 nt, Synthetic Construct
  source 1..23: mol_type = other RNA
tggtaatacaacgtacttagtgt

SEQ ID NO: 54166 - RNA, 22 nt, Synthetic Construct
  source 1..22: mol_type = other RNA
cattgcacttgcctcggtctga

SEQ ID NO: 54167 - RNA, 25 nt, Synthetic Construct
  source 1..25: mol_type = other RNA
tgtcagtttgtcaaataccccattt

SEQ ID NO: 54168 - RNA, 25 nt, Synthetic Construct
  source 1..25: mol_type = other RNA
tgtcagtttgtcaaataccccattt

SEQ ID NO: 54169 - RNA, 21 nt, Synthetic Construct
  source 1..21: mol_type = other RNA
tgaagtagtaggttgtgtggt

SEQ ID NO: 54170 - RNA, 21 nt, Synthetic Construct
  source 1..21: mol_type = other RNA
tgaagtagtaggttgtgtggt

SEQ ID NO: 54171 - RNA, 22 nt, Synthetic Construct
  source 1..22: mol_type = other RNA
tgtaaacatcctacactctcag

SEQ ID NO: 54172 - RNA, 22 nt, Synthetic Construct
  source 1..22: mol_type = other RNA
tgtaaacatcctacactctcag

SEQ ID NO: 54173 - RNA, 22 nt, Synthetic Construct
  source 1..22: mol_type = other RNA
cattgcacttgtcccggtctga

SEQ ID NO: 54174 - RNA, 22 nt, Synthetic Construct
  source 1..22: mol_type = other RNA
cattgcacttgtcccggtctga

SEQ ID NO: 54175 - RNA, 30 nt, Synthetic Construct; identical to SEQ ID NO: 751
  source 1..30: mol_type = other RNA

SEQ ID NO: 54176 - RNA, 30 nt, Synthetic Construct; identical to SEQ ID NO: 751
  source 1..30: mol_type = other RNA

SEQ ID NO: 54177 - RNA, 22 nt, Synthetic Construct
  source 1..22: mol_type = other RNA
tgaggtagtaggttgtgtggta

SEQ ID NO: 54178 - RNA, 22 nt, Synthetic Construct
  source 1..22: mol_type = other RNA
tgaggtagtaggttgtgtggta

SEQ ID NO: 54179 - RNA, 22 nt, Synthetic Construct
  source 1..22: mol_type = other RNA
tagcagcacgtaaatattggtg

SEQ ID NO: 54180 - RNA, 22 nt, Synthetic Construct
  source 1..22: mol_type = other RNA
tagcagcacgtaaatattggtg

SEQ ID NO: 54181 - RNA, 22 nt, Synthetic Construct
  source 1..22: mol_type = other RNA
gtagtgtttcctactttatgga

SEQ ID NO: 54182 - RNA, 22 nt, Synthetic Construct
  source 1..22: mol_type = other RNA
tgagaactgaattccatgggct

SEQ ID NO: 54183 - RNA, 22 nt, Synthetic Construct
  source 1..22: mol_type = other RNA
tgagaactgaattccatgggct

SEQ ID NO: 54184 - RNA, 26 nt, Synthetic Construct
  source 1..26: mol_type = other RNA
gatgcgtggtaggagagcgttctgta

SEQ ID NO: 54185 - RNA, 26 nt, Synthetic Construct
  source 1..26: mol_type = other RNA
gatgcgtggtaggagagcgttctgta

SEQ ID NO: 54186 - RNA, 22 nt, Synthetic Construct
  source 1..22: mol_type = other RNA
tgaggttgtaggttgtatagtt

SEQ ID NO: 54187 - RNA, 22 nt, Synthetic Construct
  source 1..22: mol_type = other RNA
tgaggttgtaggttgtatagtt

SEQ ID NO: 54188 - RNA, 22 nt, Synthetic Construct
  source 1..22: mol_type = other RNA
cagggctggcagtgacatgggt

SEQ ID NO: 54189 - RNA, 21 nt, Synthetic Construct
  source 1..21: mol_type = other RNA
tcctgtacagagctgccccga

SEQ ID NO: 54190 - RNA, 21 nt, Synthetic Construct
  source 1..21: mol_type = other RNA
tcctgtacagagctgccccga

SEQ ID NO: 54191 - RNA, 21 nt, Synthetic Construct
  source 1..21: mol_type = other RNA
tcctgtactgagctgcctcga

SEQ ID NO: 54192 - RNA, 34 nt, Synthetic Construct; identical to SEQ ID NO: 2367
  source 1..34: mol_type = other RNA

SEQ ID NO: 54193 - RNA, 34 nt, Synthetic Construct; identical to SEQ ID NO: 2367
  source 1..34: mol_type = other RNA

SEQ ID NO: 54194 - RNA, 28 nt, Synthetic Construct
  source 1..28: mol_type = other RNA
ccccccactgctaaatttgaccggcttt

SEQ ID NO: 54195 - RNA, 21 nt, Synthetic Construct
  source 1..21: mol_type = other RNA
cataattacttttggtacgcg

SEQ ID NO: 54196 - RNA, 27 nt, Synthetic Construct
  source 1..27: mol_type = other RNA
gacttaccaaacctatgcaaactccga

SEQ ID NO: 54197 - RNA, 22 nt, Synthetic Construct
  source 1..22: mol_type = other RNA
tggaatgtaaagaagtatgtac

SEQ ID NO: 54198 - RNA, 22 nt, Synthetic Construct
  source 1..22: mol_type = other RNA
tggaatgtaaagaagtatgtac

SEQ ID NO: 54199 - RNA, 21 nt, Synthetic Construct
  source 1..21: mol_type = other RNA
tggagtgtgacagtggtgttt

SEQ ID NO: 54200 - RNA, 21 nt, Synthetic Construct
  source 1..21: mol_type = other RNA
tcctgtactgagctgccctga

SEQ ID NO: 54201 - RNA, 29 nt, Synthetic Construct
  source 1..29: mol_type = other RNA
gatgcgaaagcaggtcaaagtgatccggc

SEQ ID NO: 54202 - RNA, 29 nt, Synthetic Construct
  source 1..29: mol_type = other RNA
gatgcgaaagcaggtcaaagtgatccggc

SEQ ID NO: 54203 - RNA, 23 nt, Synthetic Construct
  source 1..23: mol_type = other RNA
tgtgcaaatccatgcaaaactga

SEQ ID NO: 54204 - RNA, 21 nt, Synthetic Construct
  source 1..21: mol_type = other RNA
tgaggtagtagattgtatagc

SEQ ID NO: 54205 - RNA, 21 nt, Synthetic Construct
  source 1..21: mol_type = other RNA
tgaggtagtagattgtatagc

SEQ ID NO: 54206 - RNA, 25 nt, Synthetic Construct
  source 1..25: mol_type = other RNA
ttgaggatatgagatagagacgaca

SEQ ID NO: 54207 - RNA, 25 nt, Synthetic Construct
  source 1..25: mol_type = other RNA
ttgaggatatgagatagagacgaca

SEQ ID NO: 54208 - RNA, 23 nt, Synthetic Construct
  source 1..23: mol_type = other RNA
agcaacattgtctgctgggtttc

SEQ ID NO: 54209 - RNA, 21 nt, Synthetic Construct
  source 1..21: mol_type = other RNA
tcctgcactgagctgccccga

SEQ ID NO: 54210 - RNA, 21 nt, Synthetic Construct
  source 1..21: mol_type = other RNA
tcctgcactgagctgccccga

SEQ ID NO: 54211 - RNA, 36 nt, Synthetic Construct; identical to SEQ ID NO: 6739
  source 1..36: mol_type = other RNA

SEQ ID NO: 54212 - RNA, 36 nt, Synthetic Construct; identical to SEQ ID NO: 6739
  source 1..36: mol_type = other RNA

SEQ ID NO: 54213 - RNA, 22 nt, Synthetic Construct
  source 1..22: mol_type = other RNA
tgagaactgaattccatgggta

SEQ ID NO: 54214 - RNA, 21 nt, Synthetic Construct
  source 1..21: mol_type = other RNA
taaggtagtaggttgtatagt

SEQ ID NO: 54215 - RNA, 21 nt, Synthetic Construct
  source 1..21: mol_type = other RNA
agaggggcagagagcgagact

SEQ ID NO: 54216 - RNA, 18 nt, Synthetic Construct
  source 1..18: mol_type = other RNA
tcccaagggtatggctgt

SEQ ID NO: 54217 - RNA, 23 nt, Synthetic Construct
  source 1..23: mol_type = other RNA
caaagtgctgttcgtgcagatag

SEQ ID NO: 54218 - RNA, 23 nt, Synthetic Construct
  source 1..23: mol_type = other RNA
caaagtgctgttcgtgcagatag

SEQ ID NO: 54219 - RNA, 20 nt, Synthetic Construct
  source 1..20: mol_type = other RNA
cgcgacctcagatcagacgt

SEQ ID NO: 54220 - RNA, 20 nt, Synthetic Construct
  source 1..20: mol_type = other RNA
cgcgacctcagatcagacgt

SEQ ID NO: 54221 - RNA, 23 nt, Synthetic Construct
  source 1..23: mol_type = other RNA
cgaggtagtaggttgtgtggttt

SEQ ID NO: 54222 - RNA, 22 nt, Synthetic Construct
  source 1..22: mol_type = other RNA
tgagaactgaattccatgggtc

SEQ ID NO: 54223 - RNA, 22 nt, Synthetic Construct
  source 1..22: mol_type = other RNA
tcctgtgctgagctgccccgag

SEQ ID NO: 54224 - RNA, 17 nt, Synthetic Construct
  source 1..17: mol_type = other RNA
cagtcaggatgttggct

SEQ ID NO: 54225 - RNA, 17 nt, Synthetic Construct
  source 1..17: mol_type = other RNA
cagtcaggatgttggct

SEQ ID NO: 54226 - RNA, 23 nt, Synthetic Construct
  source 1..23: mol_type = other RNA
tcctgtgctgagctgccccgaga

SEQ ID NO: 54227 - RNA, 22 nt, Synthetic Construct
  source 1..22: mol_type = other RNA
tgtgactggttgaccagagggt

SEQ ID NO: 54228 - RNA, 20 nt, Synthetic Construct
  source 1..20: mol_type = other RNA
tgaggtagtaggttgtgtag

SEQ ID NO: 54229 - RNA, 16 nt, Synthetic Construct
  source 1..16: mol_type = other RNA
agtcaggatgttggct

SEQ ID NO: 54230 - RNA, 15 nt, Synthetic Construct
  source 1..15: mol_type = other RNA
gcgtagatatgcgga

SEQ ID NO: 54231 - RNA, 31 nt, Synthetic Construct; identical to SEQ ID NO: 2147
  source 1..31: mol_type = other RNA

SEQ ID NO: 54232 - RNA, 31 nt, Synthetic Construct; identical to SEQ ID NO: 2147
  source 1..31: mol_type = other RNA

SEQ ID NO: 54233 - RNA, 24 nt, Synthetic Construct
  source 1..24: mol_type = other RNA
taccacagggtagaaccacggatt

SEQ ID NO: 54234 - RNA, 24 nt, Synthetic Construct
  source 1..24: mol_type = other RNA
taccacagggtagaaccacggatt

SEQ ID NO: 54235 - RNA, 22 nt, Synthetic Construct
  source 1..22: mol_type = other RNA
tgaggtagtgggttgtatagtt

SEQ ID NO: 54236 - RNA, 22 nt, Synthetic Construct
  source 1..22: mol_type = other RNA
tgaggtagtgggttgtatagtt

SEQ ID NO: 54237 - RNA, 27 nt, Synthetic Construct
  source 1..27: mol_type = other RNA
gcccaggtggcggaattggtagacgca

SEQ ID NO: 54238 - RNA, 27 nt, Synthetic Construct
  source 1..27: mol_type = other RNA
gcccaggtggcggaattggtagacgca

SEQ ID NO: 54239 - RNA, 21 nt, Synthetic Construct
  source 1..21: mol_type = other RNA
cgaggtagtagtttgtgctgt

SEQ ID NO: 54240 - RNA, 21 nt, Synthetic Construct
  source 1..21: mol_type = other RNA
cgaggtagtagtttgtgctgt

SEQ ID NO: 54241 - RNA, 24 nt, Synthetic Construct
  source 1..24: mol_type = other RNA
tcttggagtaggtcattgggtggt

SEQ ID NO: 54242 - RNA, 19 nt, Synthetic Construct
  source 1..19: mol_type = other RNA
ccagtaaacggcggccgta

SEQ ID NO: 54243 - RNA, 19 nt, Synthetic Construct
  source 1..19: mol_type = other RNA
ccagtaaacggcggccgta

SEQ ID NO: 54244 - RNA, 22 nt, Synthetic Construct
  source 1..22: mol_type = other RNA
cactgcacttgtctcggtctga

SEQ ID NO: 54245 - RNA, 23 nt, Synthetic Construct
  source 1..23: mol_type = other RNA
tgtcagtttgtcgaataccccaa

SEQ ID NO: 54246 - RNA, 21 nt, Synthetic Construct
  source 1..21: mol_type = other RNA
tacagtagtctgcacattggt

SEQ ID NO: 54247 - RNA, 21 nt, Synthetic Construct
  source 1..21: mol_type = other RNA
tacagtagtctgcacattggt

SEQ ID NO: 54248 - RNA, 22 nt, Synthetic Construct
  source 1..22: mol_type = other RNA
tgaggcagtaggttgtgtggtt

SEQ ID NO: 54249 - RNA, 22 nt, Synthetic Construct
  source 1..22: mol_type = other RNA
tgaggcagtaggttgtgtggtt

SEQ ID NO: 54250 - RNA, 21 nt, Synthetic Construct
  source 1..21: mol_type = other RNA
ctagactgaagctccttgaga

SEQ ID NO: 54251 - RNA, 23 nt, Synthetic Construct
  source 1..23: mol_type = other RNA
tggtaacacgacgtacttagtgt

SEQ ID NO: 54252 - RNA, 22 nt, Synthetic Construct
  source 1..22: mol_type = other RNA
cactgcacttgtctcggtctga

SEQ ID NO: 54253 - RNA, 22 nt, Synthetic Construct
  source 1..22: mol_type = other RNA
cactgcacttgtctcggtctga

SEQ ID NO: 54254 - RNA, 19 nt, Synthetic Construct
  source 1..19: mol_type = other RNA
ccagtaaacggcggccgta

SEQ ID NO: 54255 - RNA, 21 nt, Synthetic Construct
  source 1..21: mol_type = other RNA
cgaggggcagagagcgagact

SEQ ID NO: 54256 - RNA, 21 nt, Synthetic Construct
  source 1..21: mol_type = other RNA
cgaggggcagagagcgagact

SEQ ID NO: 54257 - RNA, 22 nt, Synthetic Construct
  source 1..22: mol_type = other RNA
ggcagcattgtacagggctatg

SEQ ID NO: 54258 - RNA, 32 nt, Synthetic Construct; identical to SEQ ID NO: 3748
  source 1..32: mol_type = other RNA

SEQ ID NO: 54259 - RNA, 32 nt, Synthetic Construct; identical to SEQ ID NO: 3748
  source 1..32: mol_type = other RNA

SEQ ID NO: 54260 - RNA, 23 nt, Synthetic Construct
  source 1..23: mol_type = other RNA
tggtaatacgacgtacttagcgt

SEQ ID NO: 54261 - RNA, 23 nt, Synthetic Construct
  source 1..23: mol_type = other RNA
tggtaatacgacgtacttagcgt

SEQ ID NO: 54262 - RNA, 21 nt, Synthetic Construct
  source 1..21: mol_type = other RNA
tgaggtagaaggttgtatagt

SEQ ID NO: 54263 - RNA, 21 nt, Synthetic Construct
  source 1..21: mol_type = other RNA
tgaggtagaaggttgtatagt

SEQ ID NO: 54264 - RNA, 20 nt, Synthetic Construct
  source 1..20: mol_type = other RNA
tgaggtagtaggtcgtatag

SEQ ID NO: 54265 - RNA, 34 nt, Synthetic Construct
  source 1..34: mol_type = other RNA
taagcagggtcgggcctggttagtacttggatgg

SEQ ID NO: 54266 - RNA, 22 nt, Synthetic Construct
  source 1..22: mol_type = other RNA
ccggtcccaagggtatggctgt

SEQ ID NO: 54267 - RNA, 35 nt, Synthetic Construct; identical to SEQ ID NO: 737
  source 1..35: mol_type = other RNA

SEQ ID NO: 54268 - RNA, 35 nt, Synthetic Construct; identical to SEQ ID NO: 737
  source 1..35: mol_type = other RNA

SEQ ID NO: 54269 - RNA, 20 nt, Synthetic Construct
  source 1..20: mol_type = other RNA
tgaggtagtaggttgtgcgg

SEQ ID NO: 54270 - RNA, 23 nt, Synthetic Construct
  source 1..23: mol_type = other RNA
taccacagggtagaaccacggaa

SEQ ID NO: 54271 - RNA, 23 nt, Synthetic Construct
  source 1..23: mol_type = other RNA
taccacagggtagaaccacggaa

SEQ ID NO: 54272 - RNA, 23 nt, Synthetic Construct
  source 1..23: mol_type = other RNA
cccagtgttcagactacctgttc

SEQ ID NO: 54273 - RNA, 27 nt, Synthetic Construct
  source 1..27: mol_type = other RNA
cgtgtgaaagtaggtcatcgtcaggct

SEQ ID NO: 54274 - RNA, 27 nt, Synthetic Construct
  source 1..27: mol_type = other RNA
cgtgtgaaagtaggtcatcgtcaggct

SEQ ID NO: 54275 - RNA, 23 nt, Synthetic Construct
  source 1..23: mol_type = other RNA
tcctgtaccgagctgccccgagt

SEQ ID NO: 54276 - RNA, 23 nt, Synthetic Construct
  source 1..23: mol_type = other RNA
tcctgtaccgagctgccccgagt

SEQ ID NO: 54277 - RNA, 23 nt, Synthetic Construct
  source 1..23: mol_type = other RNA
tcaagagcaataacgaaaaatgt

SEQ ID NO: 54278 - RNA, 22 nt, Synthetic Construct
  source 1..22: mol_type = other RNA
cccataaagtagaaagcactac

SEQ ID NO: 54279 - RNA, 22 nt, Synthetic Construct
  source 1..22: mol_type = other RNA
cccataaagtagaaagcactac

SEQ ID NO: 54280 - RNA, 21 nt, Synthetic Construct
  source 1..21: mol_type = other RNA
tggagtgtgacaacggtgttt

SEQ ID NO: 54281 - RNA, 21 nt, Synthetic Construct
  source 1..21: mol_type = other RNA
tggagtgtgacaacggtgttt

SEQ ID NO: 54282 - RNA, 32 nt, Synthetic Construct; identical to SEQ ID NO: 770
  source 1..32: mol_type = other RNA

SEQ ID NO: 54283 - RNA, 23 nt, Synthetic Construct
  source 1..23: mol_type = other RNA
tagtgcaatattgcttatagggt

SEQ ID NO: 54284 - RNA, 21 nt, Synthetic Construct
  source 1..21: mol_type = other RNA
tgacctatgaattgacagcca

SEQ ID NO: 54285 - RNA, 21 nt, Synthetic Construct
  source 1..21: mol_type = other RNA
tgacctatgaattgacagcca

SEQ ID NO: 54286 - RNA, 22 nt, Synthetic Construct
  source 1..22: mol_type = other RNA
tatcgcacttgtcccggcctgt

SEQ ID NO: 54287 - RNA, 22 nt, Synthetic Construct
  source 1..22: mol_type = other RNA
tatcgcacttgtcccggcctgt

SEQ ID NO: 54288 - RNA, 23 nt, Synthetic Construct
  source 1..23: mol_type = other RNA
tggtaatacgacgcacttagtgt

SEQ ID NO: 54289 - RNA, 22 nt, Synthetic Construct
  source 1..22: mol_type = other RNA
tcctgtactgagccgccccgag

SEQ ID NO: 54290 - RNA, 21 nt, Synthetic Construct
  source 1..21: mol_type = other RNA
ccctgtactgagctgccccga

SEQ ID NO: 54291 - RNA, 17 nt, Synthetic Construct
  source 1..17: mol_type = other RNA
tggccgggacagagggc

SEQ ID NO: 54292 - RNA, 17 nt, Synthetic Construct
  source 1..17: mol_type = other RNA
tggccgggacagagggc

SEQ ID NO: 54293 - RNA, 32 nt, Synthetic Construct; identical to SEQ ID NO: 5582
  source 1..32: mol_type = other RNA

SEQ ID NO: 54294 - RNA, 21 nt, Synthetic Construct
  source 1..21: mol_type = other RNA
tggagtgtgacgatggtgttt

SEQ ID NO: 54295 - RNA, 22 nt, Synthetic Construct
  source 1..22: mol_type = other RNA
tgaggtagtaggttgtatagta

SEQ ID NO: 54296 - RNA, 23 nt, Synthetic Construct
  source 1..23: mol_type = other RNA
caacggaatcccgaaagcagctg

SEQ ID NO: 54297 - RNA, 23 nt, Synthetic Construct
  source 1..23: mol_type = other RNA
caacggaatcccgaaagcagctg

SEQ ID NO: 54298 - RNA, 29 nt, Synthetic Construct
  source 1..29: mol_type = other RNA
ttacaggggttcgaatcccctaggggacg

SEQ ID NO: 54299 - RNA, 23 nt, Synthetic Construct
  source 1..23: mol_type = other RNA
tagcaccatttgaaatcagtgtt

SEQ ID NO: 54300 - RNA, 23 nt, Synthetic Construct
  source 1..23: mol_type = other RNA
tagcaccatttgaaatcagtgtt

SEQ ID NO: 54301 - RNA, 21 nt, Synthetic Construct
  source 1..21: mol_type = other RNA
tgaggggcggagagcgagact

SEQ ID NO: 54302 - RNA, 18 nt, Synthetic Construct
  source 1..18: mol_type = other RNA
cctgaagaataagcaccg

SEQ ID NO: 54303 - RNA, 24 nt, Synthetic Construct
  source 1..24: mol_type = other RNA
gcgagagtaggacgttgccaggtt

SEQ ID NO: 54304 - RNA, 24 nt, Synthetic Construct
  source 1..24: mol_type = other RNA
gcgagagtaggacgttgccaggtt

SEQ ID NO: 54305 - RNA, 32 nt, Synthetic Construct; identical to SEQ ID NO: 2296
  source 1..32: mol_type = other RNA

SEQ ID NO: 54306 - RNA, 20 nt, Synthetic Construct
  source 1..20: mol_type = other RNA
ctctaatgagactgccggtg

SEQ ID NO: 54307 - RNA, 20 nt, Synthetic Construct
  source 1..20: mol_type = other RNA
ctctaatgagactgccggtg

SEQ ID NO: 54308 - RNA, 16 nt, Synthetic Construct
  source 1..16: mol_type = other RNA
agttgaccgcctgggg

SEQ ID NO: 54309 - RNA, 21 nt, Synthetic Construct
  source 1..21: mol_type = other RNA
tcctgtactgagccgccccga

SEQ ID NO: 54310 - RNA, 25 nt, Synthetic Construct
  source 1..25: mol_type = other RNA
ggtaaaatcgctgagtgaagcattg

SEQ ID NO: 54311 - RNA, 25 nt, Synthetic Construct
  source 1..25: mol_type = other RNA
ggtaaaatcgctgagtgaagcattg

SEQ ID NO: 54312 - RNA, 22 nt, Synthetic Construct
  source 1..22: mol_type = other RNA
tgaggtaataggttgtgtggtt

SEQ ID NO: 54313 - RNA, 22 nt, Synthetic Construct
  source 1..22: mol_type = other RNA
ctcgtaccgtgagtaataatgc

SEQ ID NO: 54314 - RNA, 22 nt, Synthetic Construct
  source 1..22: mol_type = other RNA
tcctgtactgagctaccccgag

SEQ ID NO: 54315 - RNA, 35 nt, Synthetic Construct; identical to SEQ ID NO: 2567
  source 1..35: mol_type = other RNA

SEQ ID NO: 54316 - RNA, 35 nt, Synthetic Construct; identical to SEQ ID NO: 2567
  source 1..35: mol_type = other RNA

SEQ ID NO: 54317 - RNA, 35 nt, Synthetic Construct; identical to SEQ ID NO: 2402
  source 1..35: mol_type = other RNA

SEQ ID NO: 54318 - RNA, 15 nt, Synthetic Construct
  source 1..15: mol_type = other RNA
ggtggctgtagctca

SEQ ID NO: 54319 - RNA, 20 nt, Synthetic Construct
  source 1..20: mol_type = other RNA
acccttgtcattagttgcta

SEQ ID NO: 54320 - RNA, 36 nt, Synthetic Construct; identical to SEQ ID NO: 752
  source 1..36: mol_type = other RNA

SEQ ID NO: 54321 - RNA, 36 nt, Synthetic Construct; identical to SEQ ID NO: 752
  source 1..36: mol_type = other RNA

SEQ ID NO: 54322 - RNA, 22 nt, Synthetic Construct
  source 1..22: mol_type = other RNA
tcctgtactgagctgctccgag

SEQ ID NO: 54323 - RNA, 36 nt, Synthetic Construct; identical to SEQ ID NO: 2456
  source 1..36: mol_type = other RNA

SEQ ID NO: 54324 - RNA, 21 nt, Synthetic Construct
  source 1..21: mol_type = other RNA
tcctgtactgagctgccccgg

SEQ ID NO: 54325 - RNA, 21 nt, Synthetic Construct
  source 1..21: mol_type = other RNA
tgaggtagtagtttgtgccgt

SEQ ID NO: 54326 - RNA, 22 nt, Synthetic Construct
  source 1..22: mol_type = other RNA
tgaggtagtaggttgaatagtt

SEQ ID NO: 54327 - RNA, 15 nt, Synthetic Construct
  source 1..15: mol_type = other RNA
cggcccagactccta

SEQ ID NO: 54328 - RNA, 15 nt, Synthetic Construct
  source 1..15: mol_type = other RNA
cggcccagactccta

SEQ ID NO: 54329 - RNA, 22 nt, Synthetic Construct
  source 1..22: mol_type = other RNA
tgtgcaaatccatgcaaaactg

SEQ ID NO: 54330 - RNA, 22 nt, Synthetic Construct
  source 1..22: mol_type = other RNA
tgtgcaaatccatgcaaaactg

SEQ ID NO: 54331 - RNA, 22 nt, Synthetic Construct
  source 1..22: mol_type = other RNA
catagcacttgtctcggtctga

SEQ ID NO: 54332 - RNA, 22 nt, Synthetic Construct
  source 1..22: mol_type = other RNA
catagcacttgtctcggtctga

SEQ ID NO: 54333 - RNA, 21 nt, Synthetic Construct
  source 1..21: mol_type = other RNA
tggagtgtgacaatggtgttc

SEQ ID NO: 54334 - RNA, 24 nt, Synthetic Construct
  source 1..24: mol_type = other RNA
tgtgatttctgcccagtgctctga

SEQ ID NO: 54335 - RNA, 24 nt, Synthetic Construct
  source 1..24: mol_type = other RNA
tgtgatttctgcccagtgctctga

SEQ ID NO: 54336 - RNA, 24 nt, Synthetic Construct
  source 1..24: mol_type = other RNA
ctcactgatcgagtcgtcctgcgc

SEQ ID NO: 54337 - RNA, 23 nt, Synthetic Construct
  source 1..23: mol_type = other RNA
tgaggggcagagagagagacttt

SEQ ID NO: 54338 - RNA, 23 nt, Synthetic Construct
  source 1..23: mol_type = other RNA
tgaggggcagagagagagacttt

SEQ ID NO: 54339 - RNA, 20 nt, Synthetic Construct
  source 1..20: mol_type = other RNA
tagcagcacatcatggttta

SEQ ID NO: 54340 - RNA, 20 nt, Synthetic Construct
  source 1..20: mol_type = other RNA
tagcagcacatcatggttta

SEQ ID NO: 54341 - RNA, 21 nt, Synthetic Construct
  source 1..21: mol_type = other RNA
ctaatcccagaaacccggtcg

SEQ ID NO: 54342 - RNA, 30 nt, Synthetic Construct; identical to SEQ ID NO: 10539
  source 1..30: mol_type = other RNA

SEQ ID NO: 54343 - RNA, 23 nt, Synthetic Construct
  source 1..23: mol_type = other RNA
tgaggtagtaggttgtatggtta

SEQ ID NO: 54344 - RNA, 24 nt, Synthetic Construct
  source 1..24: mol_type = other RNA
actcacacagaaatcgcacccgtc

SEQ ID NO: 54345 - RNA, 16 nt, Synthetic Construct
  source 1..16: mol_type = other RNA
tgcacgaaagcgtggg

SEQ ID NO: 54346 - RNA, 31 nt, Synthetic Construct; identical to SEQ ID NO: 2423
  source 1..31: mol_type = other RNA

SEQ ID NO: 54347 - RNA, 31 nt, Synthetic Construct; identical to SEQ ID NO: 2423
  source 1..31: mol_type = other RNA

SEQ ID NO: 54348 - RNA, 25 nt, Synthetic Construct
  source 1..25: mol_type = other RNA
ttgaggatatgagatcgagacaaca

SEQ ID NO: 54349 - RNA, 25 nt, Synthetic Construct
  source 1..25: mol_type = other RNA
ttgaggatatgagatcgagacaaca

SEQ ID NO: 54350 - RNA, 27 nt, Synthetic Construct
  source 1..27: mol_type = other RNA
tcggctgttaaccgaaaggttggtggt

SEQ ID NO: 54351 - RNA, 22 nt, Synthetic Construct
  source 1..22: mol_type = other RNA
cattgcacttgtctcggtctgg

SEQ ID NO: 54352 - RNA, 22 nt, Synthetic Construct
  source 1..22: mol_type = other RNA
cattgcacttgtctcggtctgg

SEQ ID NO: 54353 - RNA, 21 nt, Synthetic Construct
  source 1..21: mol_type = other RNA
tcctgtactgagctgctccga

SEQ ID NO: 54354 - RNA, 21 nt, Synthetic Construct
  source 1..21: mol_type = other RNA
tcctgtactgagctgctccga

SEQ ID NO: 54355 - RNA, 20 nt, Synthetic Construct
  source 1..20: mol_type = other RNA
tattgcactcgtcccggcct

SEQ ID NO: 54356 - RNA, 20 nt, Synthetic Construct
  source 1..20: mol_type = other RNA
tattgcactcgtcccggcct

SEQ ID NO: 54357 - RNA, 23 nt, Synthetic Construct
  source 1..23: mol_type = other RNA
tgaggtagtaggctgtgtggttt

SEQ ID NO: 54358 - RNA, 23 nt, Synthetic Construct
  source 1..23: mol_type = other RNA
tgaggtagtaggctgtgtggttt

SEQ ID NO: 54359 - RNA, 27 nt, Synthetic Construct
  source 1..27: mol_type = other RNA
ccccccactgctaaattcgactggctt

SEQ ID NO: 54360 - RNA, 22 nt, Synthetic Construct
  source 1..22: mol_type = other RNA
tgaggtagcaggttgtgtggtt

SEQ ID NO: 54361 - RNA, 22 nt, Synthetic Construct
  source 1..22: mol_type = other RNA
tgaggtagcaggttgtgtggtt

SEQ ID NO: 54362 - RNA, 21 nt, Synthetic Construct
  source 1..21: mol_type = other RNA
tgaggggcagagagcgagaca

SEQ ID NO: 54363 - RNA, 18 nt, Synthetic Construct
  source 1..18: mol_type = other RNA
gctgtgatggccgagtgg

SEQ ID NO: 54364 - RNA, 18 nt, Synthetic Construct
  source 1..18: mol_type = other RNA
gctgtgatggccgagtgg

SEQ ID NO: 54365 - RNA, 21 nt, Synthetic Construct
  source 1..21: mol_type = other RNA
ttctgtactgagctgccccga

SEQ ID NO: 54366 - RNA, 22 nt, Synthetic Construct
  source 1..22: mol_type = other RNA
cattgcacttgtcccggtctga

SEQ ID NO: 54367 - RNA, 25 nt, Synthetic Construct
  source 1..25: mol_type = other RNA
gagaaagctcacaagaactgctaac

SEQ ID NO: 54368 - RNA, 25 nt, Synthetic Construct
  source 1..25: mol_type = other RNA
gagaaagctcacaagaactgctaac

SEQ ID NO: 54369 - RNA, 23 nt, Synthetic Construct
  source 1..23: mol_type = other RNA
tctcccaacccttgtaccagtga

SEQ ID NO: 54370 - RNA, 23 nt, Synthetic Construct
  source 1..23: mol_type = other RNA
tctcccaacccttgtaccagtga

SEQ ID NO: 54371 - RNA, 23 nt, Synthetic Construct
  source 1..23: mol_type = other RNA
tggtaatacgacgtacttagtga

SEQ ID NO: 54372 - RNA, 23 nt, Synthetic Construct
  source 1..23: mol_type = other RNA
caaagtgctgtccgtgcaggtag

SEQ ID NO: 54373 - RNA, 15 nt, Synthetic Construct
  source 1..15: mol_type = other RNA
gtttgatcctggctc

SEQ ID NO: 54374 - RNA, 15 nt, Synthetic Construct
  source 1..15: mol_type = other RNA
gtttgatcctggctc

SEQ ID NO: 54375 - RNA, 22 nt, Synthetic Construct
  source 1..22: mol_type = other RNA
ngaggtagtaggttgtatagtt

SEQ ID NO: 54376 - RNA, 21 nt, Synthetic Construct
  source 1..21: mol_type = other RNA
taaggtagtaggttgtgtggt

SEQ ID NO: 54377 - RNA, 24 nt, Synthetic Construct
  source 1..24: mol_type = other RNA
aaaccgttaccattactgagttta

SEQ ID NO: 54378 - RNA, 24 nt, Synthetic Construct
  source 1..24: mol_type = other RNA
aaaccgttaccattactgagttta

SEQ ID NO: 54379 - RNA, 21 nt, Synthetic Construct
  source 1..21: mol_type = other RNA
atcacattgccagggatttcc

SEQ ID NO: 54380 - RNA, 21 nt, Synthetic Construct
  source 1..21: mol_type = other RNA
atcacattgccagggatttcc

SEQ ID NO: 54381 - RNA, 22 nt, Synthetic Construct
  source 1..22: mol_type = other RNA
tagcagcacggaaatattggcg

SEQ ID NO: 54382 - RNA, 22 nt, Synthetic Construct
  source 1..22: mol_type = other RNA
ngaggtagtagattgtatagtt

SEQ ID NO: 54383 - RNA, 22 nt, Synthetic Construct
  source 1..22: mol_type = other RNA
ngaggtagtagattgtatagtt

SEQ ID NO: 54384 - RNA, 25 nt, Synthetic Construct
  source 1..25: mol_type = other RNA
atttccccttggggttgtaggacca

SEQ ID NO: 54385 - RNA, 25 nt, Synthetic Construct
  source 1..25: mol_type = other RNA
atttccccttggggttgtaggacca

SEQ ID NO: 54386 - RNA, 25 nt, Synthetic Construct
  source 1..25: mol_type = other RNA
ttgaggatatgggatcgagacgaca

SEQ ID NO: 54387 - RNA, 25 nt, Synthetic Construct
  source 1..25: mol_type = other RNA
ttgaggatatgggatcgagacgaca

SEQ ID NO: 54388 - RNA, 18 nt, Synthetic Construct
  source 1..18: mol_type = other RNA
cgccgatgatagtgcgga

SEQ ID NO: 54389 - RNA, 18 nt, Synthetic Construct
  source 1..18: mol_type = other RNA
cgccgatgatagtgcgga

SEQ ID NO: 54390 - RNA, 22 nt, Synthetic Construct
  source 1..22: mol_type = other RNA
ttcaagtaatccagggtaggct

SEQ ID NO: 54391 - RNA, 22 nt, Synthetic Construct
  source 1..22: mol_type = other RNA
ttcaagtaatccagggtaggct

SEQ ID NO: 54392 - RNA, 20 nt, Synthetic Construct
  source 1..20: mol_type = other RNA
tgaggtagtaggttgtgtgg

SEQ ID NO: 54393 - RNA, 20 nt, Synthetic Construct
  source 1..20: mol_type = other RNA
tgaggtagtaggttgtgtgg

SEQ ID NO: 54394 - RNA, 22 nt, Synthetic Construct
  source 1..22: mol_type = other RNA
tacccattgcatatcggagttg

SEQ ID NO: 54395 - RNA, 22 nt, Synthetic Construct
  source 1..22: mol_type = other RNA
tacccattgcatatcggagttg

SEQ ID NO: 54396 - RNA, 17 nt, Synthetic Construct
  source 1..17: mol_type = other RNA
gggtctgtagctcagtc

SEQ ID NO: 54397 - RNA, 22 nt, Synthetic Construct
  source 1..22: mol_type = other RNA
tgaggtagtagtttgtgcggtt

SEQ ID NO: 54398 - RNA, 22 nt, Synthetic Construct
  source 1..22: mol_type = other RNA
tgaggtagtagtttgtgcggtt

SEQ ID NO: 54399 - RNA, 22 nt, Synthetic Construct
  source 1..22: mol_type = other RNA
cattgcgcttgtctcggtctga

SEQ ID NO: 54400 - RNA, 22 nt, Synthetic Construct
  source 1..22: mol_type = other RNA
cattgcgcttgtctcggtctga

SEQ ID NO: 54401 - RNA, 22 nt, Synthetic Construct
  source 1..22: mol_type = other RNA
ccggtcccaagggtatggctgt

SEQ ID NO: 54402 - RNA, 22 nt, Synthetic Construct
  source 1..22: mol_type = other RNA
ccggtcccaagggtatggctgt

SEQ ID NO: 54403 - RNA, 19 nt, Synthetic Construct
  source 1..19: mol_type = other RNA
aacagtcaggatgttggct

SEQ ID NO: 54404 - RNA, 21 nt, Synthetic Construct
  source 1..21: mol_type = other RNA
tcctgtactgagccgccccga

SEQ ID NO: 54405 - RNA, 21 nt, Synthetic Construct
  source 1..21: mol_type = other RNA
tcctgtactgagccgccccga

SEQ ID NO: 54406 - RNA, 22 nt, Synthetic Construct
  source 1..22: mol_type = other RNA
tgaggtagtagtttgtgccgtt

SEQ ID NO: 54407 - RNA, 20 nt, Synthetic Construct
  source 1..20: mol_type = other RNA
taaggtagtaggttgtatag

SEQ ID NO: 54408 - RNA, 21 nt, Synthetic Construct
  source 1..21: mol_type = other RNA
tgaggtagtaggttgtatagt

SEQ ID NO: 54409 - RNA, 22 nt, Synthetic Construct
  source 1..22: mol_type = other RNA
tagcagcacgtaaatattggca

SEQ ID NO: 54410 - RNA, 22 nt, Synthetic Construct
  source 1..22: mol_type = other RNA
tagcagcacgtaaatattggca

SEQ ID NO: 54411 - RNA, 23 nt, Synthetic Construct
  source 1..23: mol_type = other RNA
ttatggtttgcctgggactgagg

SEQ ID NO: 54412 - RNA, 25 nt, Synthetic Construct
  source 1..25: mol_type = other RNA
ggtaaaatcgctgagtgaagcattg

SEQ ID NO: 54413 - RNA, 21 nt, Synthetic Construct
  source 1..21: mol_type = other RNA
ggagtatgcagagcaagatca

SEQ ID NO: 54414 - RNA, 35 nt, Synthetic Construct; identical to SEQ ID NO: 2452
  source 1..35: mol_type = other RNA

SEQ ID NO: 54415 - RNA, 35 nt, Synthetic Construct; identical to SEQ ID NO: 2452
  source 1..35: mol_type = other RNA

SEQ ID NO: 54416 - RNA, 21 nt, Synthetic Construct
  source 1..21: mol_type = other RNA
ctggactgaagctccttgagg

SEQ ID NO: 54417 - RNA, 21 nt, Synthetic Construct
  source 1..21: mol_type = other RNA
ctggactgaagctccttgagg

SEQ ID NO: 54418 - RNA, 27 nt, Synthetic Construct
  source 1..27: mol_type = other RNA
ccccccactgctaaatttgactgactt

SEQ ID NO: 54419 - RNA, 27 nt, Synthetic Construct
  source 1..27: mol_type = other RNA
ccccccactgctaaatttgactgactt

SEQ ID NO: 54420 - RNA, 16 nt, Synthetic Construct
  source 1..16: mol_type = other RNA
gtctgcggccatacca

SEQ ID NO: 54421 - RNA, 16 nt, Synthetic Construct
  source 1..16: mol_type = other RNA
gtctgcggccatacca

SEQ ID NO: 54422 - RNA, 22 nt, Synthetic Construct
  source 1..22: mol_type = other RNA
gagagtaggacgttgccaggtt

SEQ ID NO: 54423 - RNA, 22 nt, Synthetic Construct
  source 1..22: mol_type = other RNA
gagagtaggacgttgccaggtt

SEQ ID NO: 54424 - RNA, 23 nt, Synthetic Construct
  source 1..23: mol_type = other RNA
atatcggaacgtgcccagtcgtg

SEQ ID NO: 54425 - RNA, 23 nt, Synthetic Construct
  source 1..23: mol_type = other RNA
atatcggaacgtgcccagtcgtg

SEQ ID NO: 54426 - RNA, 22 nt, Synthetic Construct
  source 1..22: mol_type = other RNA
tgaggtagtaggttgtgtggtc

SEQ ID NO: 54427 - RNA, 22 nt, Synthetic Construct
  source 1..22: mol_type = other RNA
tgaggtagtaggttgtgtggtc

SEQ ID NO: 54428 - RNA, 19 nt, Synthetic Construct
  source 1..19: mol_type = other RNA
ttcaagtaatccaggatag

SEQ ID NO: 54429 - RNA, 23 nt, Synthetic Construct
  source 1..23: mol_type = other RNA
cgaagtgctgttcgtgcaggtag

SEQ ID NO: 54430 - RNA, 23 nt, Synthetic Construct
  source 1..23: mol_type = other RNA
tcggaatcgctagtaatcgcgga

SEQ ID NO: 54431 - RNA, 23 nt, Synthetic Construct
  source 1..23: mol_type = other RNA
tcggaatcgctagtaatcgcgga

SEQ ID NO: 54432 - RNA, 22 nt, Synthetic Construct
  source 1..22: mol_type = other RNA
caaagtgctgttcgtgcaggta

SEQ ID NO: 54433 - RNA, 23 nt, Synthetic Construct
  source 1..23: mol_type = other RNA
tcaagagcaataacgaaaaatgt

SEQ ID NO: 54434 - RNA, 22 nt, Synthetic Construct
  source 1..22: mol_type = other RNA
cattgcacttgtcccggtctga

SEQ ID NO: 54435 - RNA, 15 nt, Synthetic Construct
  source 1..15: mol_type = other RNA
ccgcttttgtcaggg

SEQ ID NO: 54436 - RNA, 16 nt, Synthetic Construct
  source 1..16: mol_type = other RNA
gtctacggccatgcca

SEQ ID NO: 54437 - RNA, 16 nt, Synthetic Construct
  source 1..16: mol_type = other RNA
gtctacggccatgcca

SEQ ID NO: 54438 - RNA, 22 nt, Synthetic Construct
  source 1..22: mol_type = other RNA
catcgcacttgtctcggtctga

SEQ ID NO: 54439 - RNA, 22 nt, Synthetic Construct
  source 1..22: mol_type = other RNA
tgaggtagtagtttgagctgtt

SEQ ID NO: 54440 - RNA, 22 nt, Synthetic Construct
  source 1..22: mol_type = other RNA
tgaggtagtagtttgagctgtt

SEQ ID NO: 54441 - RNA, 23 nt, Synthetic Construct
  source 1..23: mol_type = other RNA
tcctgaactgagctgccccgagt

SEQ ID NO: 54442 - RNA, 23 nt, Synthetic Construct
  source 1..23: mol_type = other RNA
tcctgaactgagctgccccgagt

SEQ ID NO: 54443 - RNA, 25 nt, Synthetic Construct
  source 1..25: mol_type = other RNA
gggttgtaaaccgcttttgtcaggg

SEQ ID NO: 54444 - RNA, 25 nt, Synthetic Construct
  source 1..25: mol_type = other RNA
gggttgtaaaccgcttttgtcaggg

SEQ ID NO: 54445 - RNA, 21 nt, Synthetic Construct
  source 1..21: mol_type = other RNA
tgtagtgtttcctactttatg

SEQ ID NO: 54446 - RNA, 23 nt, Synthetic Construct
  source 1..23: mol_type = other RNA
ctcactgatcgagtcgtcctgcg

SEQ ID NO: 54447 - RNA, 22 nt, Synthetic Construct
  source 1..22: mol_type = other RNA
tattgcacttgtcccagcctgt

SEQ ID NO: 54448 - RNA, 22 nt, Synthetic Construct
  source 1..22: mol_type = other RNA
tattgcacttgtcccagcctgt

SEQ ID NO: 54449 - RNA, 25 nt, Synthetic Construct
  source 1..25: mol_type = other RNA
ttggggatatgagatcgagacgaca

SEQ ID NO: 54450 - RNA, 25 nt, Synthetic Construct
  source 1..25: mol_type = other RNA
ttggggatatgagatcgagacgaca

SEQ ID NO: 54451 - RNA, 37 nt, Synthetic Construct; identical to SEQ ID NO: 715
  source 1..37: mol_type = other RNA

SEQ ID NO: 54452 - RNA, 37 nt, Synthetic Construct; identical to SEQ ID NO: 715
  source 1..37: mol_type = other RNA

SEQ ID NO: 54453 - RNA, 21 nt, Synthetic Construct
  source 1..21: mol_type = other RNA
tgaggtagtaggttgtataga

SEQ ID NO: 54454 - RNA, 21 nt, Synthetic Construct
  source 1..21: mol_type = other RNA
cgaggtagtaggttgtatagt

SEQ ID NO: 54455 - RNA, 21 nt, Synthetic Construct
  source 1..21: mol_type = other RNA
cgaggtagtaggttgtatagt

SEQ ID NO: 54456 - RNA, 23 nt, Synthetic Construct
  source 1..23: mol_type = other RNA
tggtaatacgacgtactttgtgt

SEQ ID NO: 54457 - RNA, 22 nt, Synthetic Construct
  source 1..22: mol_type = other RNA
tagcagcacgtaaacattggcg

SEQ ID NO: 54458 - RNA, 22 nt, Synthetic Construct
  source 1..22: mol_type = other RNA
tagcagcacgtgaatattggcg

SEQ ID NO: 54459 - RNA, 22 nt, Synthetic Construct
  source 1..22: mol_type = other RNA
tagcagcacgtgaatattggcg

SEQ ID NO: 54460 - RNA, 22 nt, Synthetic Construct
  source 1..22: mol_type = other RNA
tgaggtagtagattgtgtggtt

SEQ ID NO: 54461 - RNA, 24 nt, Synthetic Construct
  source 1..24: mol_type = other RNA
atgacacgatcactcccgttgagt

SEQ ID NO: 54462 - RNA, 24 nt, Synthetic Construct
  source 1..24: mol_type = other RNA
atgacacgatcactcccgttgagt

SEQ ID NO: 54463 - RNA, 22 nt, Synthetic Construct
  source 1..22: mol_type = other RNA
tcctgtactgagctaccccgag

SEQ ID NO: 54464 - RNA, 22 nt, Synthetic Construct
  source 1..22: mol_type = other RNA
tgaggttgtaggttgtatagtt

SEQ ID NO: 54465 - RNA, 22 nt, Synthetic Construct
  source 1..22: mol_type = other RNA
tgaggttgtaggttgtatagtt

SEQ ID NO: 54466 - RNA, 24 nt, Synthetic Construct
  source 1..24: mol_type = other RNA
tcactgatcgagtcgtcctgcgcg

SEQ ID NO: 54467 - RNA, 23 nt, Synthetic Construct
  source 1..23: mol_type = other RNA
taaagtgctgttcgtgcaggtag

SEQ ID NO: 54468 - RNA, 23 nt, Synthetic Construct
  source 1..23: mol_type = other RNA
taaagtgctgttcgtgcaggtag

SEQ ID NO: 54469 - RNA, 21 nt, Synthetic Construct
  source 1..21: mol_type = other RNA
tcctgtactgagttgccccga

SEQ ID NO: 54470 - RNA, 21 nt, Synthetic Construct
  source 1..21: mol_type = other RNA
tcctgtactgagttgccccga

SEQ ID NO: 54471 - RNA, 22 nt, Synthetic Construct
  source 1..22: mol_type = other RNA
tgagatagtaggttgtgtggtt

SEQ ID NO: 54472 - RNA, 22 nt, Synthetic Construct
  source 1..22: mol_type = other RNA
tgagatagtaggttgtgtggtt

SEQ ID NO: 54473 - RNA, 23 nt, Synthetic Construct
  source 1..23: mol_type = other RNA
tgaggggcagagagagagacttt

SEQ ID NO: 54474 - RNA, 23 nt, Synthetic Construct
  source 1..23: mol_type = other RNA
tgaggggcagagagagagacttt

SEQ ID NO: 54475 - RNA, 21 nt, Synthetic Construct
  source 1..21: mol_type = other RNA
taactccttagcgaatctcgc

SEQ ID NO: 54476 - RNA, 21 nt, Synthetic Construct
  source 1..21: mol_type = other RNA
taactccttagcgaatctcgc

SEQ ID NO: 54477 - RNA, 17 nt, Synthetic Construct
  source 1..17: mol_type = other RNA
atgcaagtcgaacggta

SEQ ID NO: 54478 - RNA, 17 nt, Synthetic Construct
  source 1..17: mol_type = other RNA
atgcaagtcgaacggta

SEQ ID NO: 54479 - RNA, 23 nt, Synthetic Construct
  source 1..23: mol_type = other RNA
tgaggtagcaggttgtgtggttt

SEQ ID NO: 54480 - RNA, 22 nt, Synthetic Construct
  source 1..22: mol_type = other RNA
gagagcctggacacaggtgctg

SEQ ID NO: 54481 - RNA, 22 nt, Synthetic Construct
  source 1..22: mol_type = other RNA
gagagcctggacacaggtgctg

SEQ ID NO: 54482 - RNA, 23 nt, Synthetic Construct
  source 1..23: mol_type = other RNA
tggggggcagagagcgagacttt

SEQ ID NO: 54483 - RNA, 22 nt, Synthetic Construct
  source 1..22: mol_type = other RNA
tcagtagctcgaggaaaagaca

SEQ ID NO: 54484 - RNA, 22 nt, Synthetic Construct
  source 1..22: mol_type = other RNA
tcaagagcaataacgaaaaatg

SEQ ID NO: 54485 - RNA, 22 nt, Synthetic Construct
  source 1..22: mol_type = other RNA
tcaagagcaataacgaaaaatg

SEQ ID NO: 54486 - RNA, 17 nt, Synthetic Construct
  source 1..17: mol_type = other RNA
tcccagaaacccggtcg

SEQ ID NO: 54487 - RNA, 17 nt, Synthetic Construct
  source 1..17: mol_type = other RNA
tcccagaaacccggtcg

SEQ ID NO: 54488 - RNA, 15 nt, Synthetic Construct
  source 1..15: mol_type = other RNA
tcgagtcgtcctgcg

SEQ ID NO: 54489 - RNA, 25 nt, Synthetic Construct
  source 1..25: mol_type = other RNA
ctgaggatatgagatcgagacgaca

SEQ ID NO: 54490 - RNA, 23 nt, Synthetic Construct
  source 1..23: mol_type = other RNA
tcactgatcgagtcgtcctgcgc

SEQ ID NO: 54491 - RNA, 25 nt, Synthetic Construct
  source 1..25: mol_type = other RNA
ttgaggatatgagatcgagacggca

SEQ ID NO: 54492 - RNA, 25 nt, Synthetic Construct
  source 1..25: mol_type = other RNA
ttgaggatatgagatcgagacggca

SEQ ID NO: 54493 - RNA, 27 nt, Synthetic Construct
  source 1..27: mol_type = other RNA
agagcagctaataccgcatacgacctg

SEQ ID NO: 54494 - RNA, 27 nt, Synthetic Construct
  source 1..27: mol_type = other RNA
agagcagctaataccgcatacgacctg

SEQ ID NO: 54495 - RNA, 22 nt, Synthetic Construct
  source 1..22: mol_type = other RNA
tgaggtaatagtttgtgctgtt

SEQ ID NO: 54496 - RNA, 22 nt, Synthetic Construct
  source 1..22: mol_type = other RNA
tgaggtaatagtttgtgctgtt

SEQ ID NO: 54497 - RNA, 21 nt, Synthetic Construct
  source 1..21: mol_type = other RNA
atcacattgccagggatttcc

SEQ ID NO: 54498 - RNA, 23 nt, Synthetic Construct
  source 1..23: mol_type = other RNA
tgaggtagtagattgtatagttc

SEQ ID NO: 54499 - RNA, 17 nt, Synthetic Construct
  source 1..17: mol_type = other RNA
gcgtagatatgcggagg

SEQ ID NO: 54500 - RNA, 22 nt, Synthetic Construct
  source 1..22: mol_type = other RNA
tttgttcgttcggctcgcgtga

SEQ ID NO: 54501 - RNA, 22 nt, Synthetic Construct
  source 1..22: mol_type = other RNA
tttgttcgttcggctcgcgtga

SEQ ID NO: 54502 - RNA, 22 nt, Synthetic Construct
  source 1..22: mol_type = other RNA
tcctgtactgagccgccccgag

SEQ ID NO: 54503 - RNA, 21 nt, Synthetic Construct
  source 1..21: mol_type = other RNA
tcagtgcatcacagaactttg

SEQ ID NO: 54504 - RNA, 24 nt, Synthetic Construct
  source 1..24: mol_type = other RNA
gttgaattgtggtctgtggacgtg

SEQ ID NO: 54505 - RNA, 24 nt, Synthetic Construct
  source 1..24: mol_type = other RNA
gttgaattgtggtctgtggacgtg

SEQ ID NO: 54506 - RNA, 18 nt, Synthetic Construct
  source 1..18: mol_type = other RNA
agcaggacggtggccatg

SEQ ID NO: 54507 - RNA, 43 nt, Synthetic Construct; identical to SEQ ID NO: 6202
  source 1..43: mol_type = other RNA

SEQ ID NO: 54508 - RNA, 24 nt, Synthetic Construct
  source 1..24: mol_type = other RNA
acctggcatacaatgtagatttct

SEQ ID NO: 54509 - RNA, 21 nt, Synthetic Construct
  source 1..21: mol_type = other RNA
ggaggtagtaggttgtgtggt

SEQ ID NO: 54510 - RNA, 21 nt, Synthetic Construct
  source 1..21: mol_type = other RNA
ggaggtagtaggttgtgtggt

SEQ ID NO: 54511 - RNA, 23 nt, Synthetic Construct
  source 1..23: mol_type = other RNA
agaggggcagagagcgagacttt

SEQ ID NO: 54512 - RNA, 24 nt, Synthetic Construct
  source 1..24: mol_type = other RNA
tgtaaacatccctgactggaagct

SEQ ID NO: 54513 - RNA, 22 nt, Synthetic Construct
  source 1..22: mol_type = other RNA
tgagaaccgaattccatgggtt

SEQ ID NO: 54514 - RNA, 22 nt, Synthetic Construct
  source 1..22: mol_type = other RNA
tgagaaccgaattccatgggtt

SEQ ID NO: 54515 - RNA, 20 nt, Synthetic Construct
  source 1..20: mol_type = other RNA
gcatggccgttcttagttgg

SEQ ID NO: 54516 - RNA, 15 nt, Synthetic Construct
  source 1..15: mol_type = other RNA
ggtgaaagcggggga

SEQ ID NO: 54517 - RNA, 22 nt, Synthetic Construct
  source 1..22: mol_type = other RNA
tagcttatcagactgatgttga

SEQ ID NO: 54518 - RNA, 20 nt, Synthetic Construct
  source 1..20: mol_type = other RNA
tgaggtagtaggttgtgtag

SEQ ID NO: 54519 - RNA, 27 nt, Synthetic Construct
  source 1..27: mol_type = other RNA
ccccccgctgctaaatttgactggcta

SEQ ID NO: 54520 - RNA, 37 nt, Synthetic Construct; identical to SEQ ID NO: 4277
  source 1..37: mol_type = other RNA

SEQ ID NO: 54521 - RNA, 21 nt, Synthetic Construct
  source 1..21: mol_type = other RNA
tggggtagtaggttgtatagt

SEQ ID NO: 54522 - RNA, 21 nt, Synthetic Construct
  source 1..21: mol_type = other RNA
tggggtagtaggttgtatagt

SEQ ID NO: 54523 - RNA, 23 nt, Synthetic Construct
  source 1..23: mol_type = other RNA
caaagaattctccttttgggctt

SEQ ID NO: 54524 - RNA, 23 nt, Synthetic Construct
  source 1..23: mol_type = other RNA
caaagaattctccttttgggctt

SEQ ID NO: 54525 - RNA, 19 nt, Synthetic Construct
  source 1..19: mol_type = other RNA
caagcggtggatgatgtgg

SEQ ID NO: 54526 - RNA, 19 nt, Synthetic Construct
  source 1..19: mol_type = other RNA
caagcggtggatgatgtgg

SEQ ID NO: 54527 - RNA, 16 nt, Synthetic Construct
  source 1..16: mol_type = other RNA
gtctacggccatgcca

SEQ ID NO: 54528 - RNA, 16 nt, Synthetic Construct
  source 1..16: mol_type = other RNA
gtctacggccatgcca

SEQ ID NO: 54529 - RNA, 23 nt, Synthetic Construct
  source 1..23: mol_type = other RNA
tgaggggcagagagcgagacttc

SEQ ID NO: 54530 - RNA, 23 nt, Synthetic Construct
  source 1..23: mol_type = other RNA
tgaggggcagagagcgagacttc

SEQ ID NO: 54531 - RNA, 18 nt, Synthetic Construct
  source 1..18: mol_type = other RNA
cctgcggaaggatcattg

SEQ ID NO: 54532 - RNA, 18 nt, Synthetic Construct
  source 1..18: mol_type = other RNA
cctgcggaaggatcattg

SEQ ID NO: 54533 - RNA, 23 nt, Synthetic Construct
  source 1..23: mol_type = other RNA
ccctgtactgagctgccccgagt

SEQ ID NO: 54534 - RNA, 15 nt, Synthetic Construct
  source 1..15: mol_type = other RNA
cggcccagactccta

SEQ ID NO: 54535 - RNA, 22 nt, Synthetic Construct
  source 1..22: mol_type = other RNA
tcctgtactgagctgccctgag

SEQ ID NO: 54536 - RNA, 29 nt, Synthetic Construct
  source 1..29: mol_type = other RNA
cccccccactgctaaatttgactggcttt

SEQ ID NO: 54537 - RNA, 29 nt, Synthetic Construct
  source 1..29: mol_type = other RNA
cccccccactgctaaatttgactggcttt

SEQ ID NO: 54538 - RNA, 22 nt, Synthetic Construct
  source 1..22: mol_type = other RNA
tgtaaacatccccgactggagg

SEQ ID NO: 54539 - RNA, 23 nt, Synthetic Construct
  source 1..23: mol_type = other RNA
ctcgtaccgtgagtaataatgcg

SEQ ID NO: 54540 - RNA, 18 nt, Synthetic Construct
  source 1..18: mol_type = other RNA
gctgtgatggccgagtgg

SEQ ID NO: 54541 - RNA, 22 nt, Synthetic Construct
  source 1..22: mol_type = other RNA
tgaggtagtaatttgtgctgtt

SEQ ID NO: 54542 - RNA, 16 nt, Synthetic Construct
  source 1..16: mol_type = other RNA
gtaaacggcgggagta

SEQ ID NO: 54543 - RNA, 16 nt, Synthetic Construct
  source 1..16: mol_type = other RNA
gtaaacggcgggagta

SEQ ID NO: 54544 - RNA, 27 nt, Synthetic Construct
  source 1..27: mol_type = other RNA
ccccccactgttaaatttgactggctt

SEQ ID NO: 54545 - RNA, 27 nt, Synthetic Construct
  source 1..27: mol_type = other RNA
ccccccactgttaaatttgactggctt

SEQ ID NO: 54546 - RNA, 16 nt, Synthetic Construct
  source 1..16: mol_type = other RNA
gtctacgaccatacca

SEQ ID NO: 54547 - RNA, 16 nt, Synthetic Construct
  source 1..16: mol_type = other RNA
gtctacgaccatacca

SEQ ID NO: 54548 - RNA, 22 nt, Synthetic Construct
  source 1..22: mol_type = other RNA
tattgcacttgccccggcctgt

SEQ ID NO: 54549 - RNA, 21 nt, Synthetic Construct
  source 1..21: mol_type = other RNA
caaagtgctgttcgtgcaggt

SEQ ID NO: 54550 - RNA, 21 nt, Synthetic Construct
  source 1..21: mol_type = other RNA
caaagtgctgttcgtgcaggt

SEQ ID NO: 54551 - RNA, 22 nt, Synthetic Construct
  source 1..22: mol_type = other RNA
tgaggtagtagtttgtggtgtt

SEQ ID NO: 54552 - RNA, 22 nt, Synthetic Construct
  source 1..22: mol_type = other RNA
tgaggtagtagtttgtggtgtt

SEQ ID NO: 54553 - RNA, 33 nt, Synthetic Construct; identical to SEQ ID NO: 3082
  source 1..33: mol_type = other RNA

SEQ ID NO: 54554 - RNA, 35 nt, Synthetic Construct; identical to SEQ ID NO: 2402
  source 1..35: mol_type = other RNA

SEQ ID NO: 54555 - RNA, 23 nt, Synthetic Construct
  source 1..23: mol_type = other RNA
caaagtgctgtccgtgcaggtag

SEQ ID NO: 54556 - RNA, 25 nt, Synthetic Construct
  source 1..25: mol_type = other RNA
ggtaaaatagctgagtgaagcattg

SEQ ID NO: 54557 - RNA, 25 nt, Synthetic Construct
  source 1..25: mol_type = other RNA
ggtaaaatagctgagtgaagcattg

SEQ ID NO: 54558 - RNA, 23 nt, Synthetic Construct
  source 1..23: mol_type = other RNA
tgaggtagtaggttgtgtggttc

SEQ ID NO: 54559 - RNA, 23 nt, Synthetic Construct
  source 1..23: mol_type = other RNA
tgaggtagtaggttgtgtggttc

SEQ ID NO: 54560 - RNA, 22 nt, Synthetic Construct
  source 1..22: mol_type = other RNA
cgaggtagtaggttgtgtggtt

SEQ ID NO: 54561 - RNA, 23 nt, Synthetic Construct
  source 1..23: mol_type = other RNA
tggtaatacgacatacttagtgt

SEQ ID NO: 54562 - RNA, 23 nt, Synthetic Construct
  source 1..23: mol_type = other RNA
tggtaatacgacatacttagtgt

SEQ ID NO: 54563 - RNA, 27 nt, Synthetic Construct
  source 1..27: mol_type = other RNA
gctttacattggactttgaacagatct

SEQ ID NO: 54564 - RNA, 21 nt, Synthetic Construct
  source 1..21: mol_type = other RNA
cgaggtagtagtttgtgctgt

SEQ ID NO: 54565 - RNA, 39 nt, Synthetic Construct; identical to SEQ ID NO: 773
  source 1..39: mol_type = other RNA

SEQ ID NO: 54566 - RNA, 39 nt, Synthetic Construct; identical to SEQ ID NO: 773
  source 1..39: mol_type = other RNA

SEQ ID NO: 54567 - RNA, 18 nt, Synthetic Construct
  source 1..18: mol_type = other RNA
tcccaagggtatggctgt

SEQ ID NO: 54568 - RNA, 22 nt, Synthetic Construct
  source 1..22: mol_type = other RNA
tgtgcaaatccatgcaaaactg

SEQ ID NO: 54569 - RNA, 22 nt, Synthetic Construct
  source 1..22: mol_type = other RNA
tagcagcacgtaaatataggcg

SEQ ID NO: 54570 - RNA, 22 nt, Synthetic Construct
  source 1..22: mol_type = other RNA
tagcagcacgtaaatataggcg

SEQ ID NO: 54571 - RNA, 21 nt, Synthetic Construct
  source 1..21: mol_type = other RNA
tgaggtagtagattgtatagc

SEQ ID NO: 54572 - RNA, 23 nt, Synthetic Construct
  source 1..23: mol_type = other RNA
tggtaatacgacatacttagtgt

SEQ ID NO: 54573 - RNA, 23 nt, Synthetic Construct
  source 1..23: mol_type = other RNA
tggtaatacgacatacttagtgt

SEQ ID NO: 54574 - RNA, 22 nt, Synthetic Construct
  source 1..22: mol_type = other RNA
tgaggtagtagtttgtatagtt

SEQ ID NO: 54575 - RNA, 22 nt, Synthetic Construct
  source 1..22: mol_type = other RNA
tgaggtagtagtttgtatagtt

SEQ ID NO: 54576 - RNA, 22 nt, Synthetic Construct
  source 1..22: mol_type = other RNA
ttcaagtaattcaggataggtt

SEQ ID NO: 54577 - RNA, 23 nt, Synthetic Construct
  source 1..23: mol_type = other RNA
tgagaactgaattccatgggttt

SEQ ID NO: 54578 - RNA, 23 nt, Synthetic Construct
  source 1..23: mol_type = other RNA
tgagaactgaattccatgggttt

SEQ ID NO: 54579 - RNA, 19 nt, Synthetic Construct
  source 1..19: mol_type = other RNA
tccctgagaccctaacttg

SEQ ID NO: 54580 - RNA, 19 nt, Synthetic Construct
  source 1..19: mol_type = other RNA
tccctgagaccctaacttg

SEQ ID NO: 54581 - RNA, 20 nt, Synthetic Construct
  source 1..20: mol_type = other RNA
tgaggtagtgggttgtgtgg

SEQ ID NO: 54582 - RNA, 25 nt, Synthetic Construct
  source 1..25: mol_type = other RNA
ggtaaaatagctgagtgaagcattg

SEQ ID NO: 54583 - RNA, 25 nt, Synthetic Construct
  source 1..25: mol_type = other RNA
ggtaaaatagctgagtgaagcattg

SEQ ID NO: 54584 - RNA, 22 nt, Synthetic Construct
  source 1..22: mol_type = other RNA
ggtagcgaaattccttgtcggg

SEQ ID NO: 54585 - RNA, 21 nt, Synthetic Construct
  source 1..21: mol_type = other RNA
aatgacacgatcactcccgtt

SEQ ID NO: 54586 - RNA, 21 nt, Synthetic Construct
  source 1..21: mol_type = other RNA
aatgacacgatcactcccgtt

SEQ ID NO: 54587 - RNA, 22 nt, Synthetic Construct
  source 1..22: mol_type = other RNA
tgaggaagtaggttgtatagtt

SEQ ID NO: 54588 - RNA, 22 nt, Synthetic Construct
  source 1..22: mol_type = other RNA
tgaggaagtaggttgtatagtt

SEQ ID NO: 54589 - RNA, 22 nt, Synthetic Construct
  source 1..22: mol_type = other RNA
cattgcacttgtcccggcctgt

SEQ ID NO: 54590 - RNA, 22 nt, Synthetic Construct
  source 1..22: mol_type = other RNA
cattgcacttgtcccggcctgt

SEQ ID NO: 54591 - RNA, 19 nt, Synthetic Construct
  source 1..19: mol_type = other RNA
agtcgacgtatagggtgtg

SEQ ID NO: 54592 - RNA, 22 nt, Synthetic Construct
  source 1..22: mol_type = other RNA
tcgtaccgtgagtaataatgtg

SEQ ID NO: 54593 - RNA, 22 nt, Synthetic Construct
  source 1..22: mol_type = other RNA
tcgtaccgtgagtaataatgtg

SEQ ID NO: 54594 - RNA, 23 nt, Synthetic Construct
  source 1..23: mol_type = other RNA
agcagcattgtacagggccatga

SEQ ID NO: 54595 - RNA, 23 nt, Synthetic Construct
  source 1..23: mol_type = other RNA
agcagcattgtacagggccatga

SEQ ID NO: 54596 - RNA, 22 nt, Synthetic Construct
  source 1..22: mol_type = other RNA
taactccttaagcgaatctcgc

SEQ ID NO: 54597 - RNA, 22 nt, Synthetic Construct
  source 1..22: mol_type = other RNA
taactccttaagcgaatctcgc

SEQ ID NO: 54598 - RNA, 20 nt, Synthetic Construct
  source 1..20: mol_type = other RNA
acccttgtcattagttgcta

SEQ ID NO: 54599 - RNA, 20 nt, Synthetic Construct
  source 1..20: mol_type = other RNA
acccttgtcattagttgcta

SEQ ID NO: 54600 - RNA, 19 nt, Synthetic Construct
  source 1..19: mol_type = other RNA
tctaatgagactgccggtg

SEQ ID NO: 54601 - RNA, 33 nt, Synthetic Construct; identical to SEQ ID NO: 2126
  source 1..33: mol_type = other RNA

SEQ ID NO: 54602 - RNA, 21 nt, Synthetic Construct
  source 1..21: mol_type = other RNA
taactccttaagcgatctcgc

SEQ ID NO: 54603 - RNA, 21 nt, Synthetic Construct
  source 1..21: mol_type = other RNA
taactccttaagcgatctcgc

SEQ ID NO: 54604 - RNA, 23 nt, Synthetic Construct
  source 1..23: mol_type = other RNA
tggtaatacgacgtacctagtgt

SEQ ID NO: 54605 - RNA, 23 nt, Synthetic Construct
  source 1..23: mol_type = other RNA
tggtaatacgacgtacctagtgt

SEQ ID NO: 54606 - RNA, 23 nt, Synthetic Construct
  source 1..23: mol_type = other RNA
tcctgtactgagttgccccgaga

SEQ ID NO: 54607 - RNA, 23 nt, Synthetic Construct
  source 1..23: mol_type = other RNA
tcctgtactgagttgccccgaga

SEQ ID NO: 54608 - RNA, 29 nt, Synthetic Construct
  source 1..29: mol_type = other RNA
gcccggctagctcagtcggtagagcatgg

SEQ ID NO: 54609 - RNA, 29 nt, Synthetic Construct
  source 1..29: mol_type = other RNA
gcccggctagctcagtcggtagagcatgg

SEQ ID NO: 54610 - RNA, 22 nt, Synthetic Construct
  source 1..22: mol_type = other RNA
tgaggtagtgggttgtgtggtt

SEQ ID NO: 54611 - RNA, 22 nt, Synthetic Construct
  source 1..22: mol_type = other RNA
tgaggtagtgggttgtgtggtt

SEQ ID NO: 54612 - RNA, 16 nt, Synthetic Construct
  source 1..16: mol_type = other RNA
gtctacggacatacca

SEQ ID NO: 54613 - RNA, 24 nt, Synthetic Construct
  source 1..24: mol_type = other RNA
tgtaaacaaccccgactggaagct

SEQ ID NO: 54614 - RNA, 24 nt, Synthetic Construct
  source 1..24: mol_type = other RNA
tgtaaacaaccccgactggaagct

SEQ ID NO: 54615 - RNA, 23 nt, Synthetic Construct
  source 1..23: mol_type = other RNA
ttatggtttgcctgggactgagg

SEQ ID NO: 54616 - RNA, 22 nt, Synthetic Construct
  source 1..22: mol_type = other RNA
ttgcagcacgtaaatattggcg

SEQ ID NO: 54617 - RNA, 22 nt, Synthetic Construct
  source 1..22: mol_type = other RNA
ttgcagcacgtaaatattggcg

SEQ ID NO: 54618 - RNA, 23 nt, Synthetic Construct
  source 1..23: mol_type = other RNA
caaagtgctgctcgtgcaggtag

SEQ ID NO: 54619 - RNA, 23 nt, Synthetic Construct
  source 1..23: mol_type = other RNA
tacagtactgtgataactgaaga

SEQ ID NO: 54620 - RNA, 23 nt, Synthetic Construct
  source 1..23: mol_type = other RNA
tacagtactgtgataactgaaga

SEQ ID NO: 54621 - RNA, 20 nt, Synthetic Construct
  source 1..20: mol_type = other RNA
gaatcgctagtaatcgcgga

SEQ ID NO: 54622 - RNA, 21 nt, Synthetic Construct
  source 1..21: mol_type = other RNA
tgaggtagtagtttgtgctgc

SEQ ID NO: 54623 - RNA, 21 nt, Synthetic Construct
  source 1..21: mol_type = other RNA
tgaggtagtagtttgtgctgc

SEQ ID NO: 54624 - RNA, 21 nt, Synthetic Construct
  source 1..21: mol_type = other RNA
tggggggcagagagcgagact

SEQ ID NO: 54625 - RNA, 21 nt, Synthetic Construct
  source 1..21: mol_type = other RNA
tggggggcagagagcgagact

SEQ ID NO: 54626 - RNA, 22 nt, Synthetic Construct
  source 1..22: mol_type = other RNA
tggagagaaaggcagttcctga

SEQ ID NO: 54627 - RNA, 22 nt, Synthetic Construct
  source 1..22: mol_type = other RNA
nagcagcacgtaaatattggcg

SEQ ID NO: 54628 - RNA, 22 nt, Synthetic Construct
  source 1..22: mol_type = other RNA
nagcagcacgtaaatattggcg

SEQ ID NO: 54629 - RNA, 21 nt, Synthetic Construct
  source 1..21: mol_type = other RNA
cggagtgtgacaatggtgttt

SEQ ID NO: 54630 - RNA, 21 nt, Synthetic Construct
  source 1..21: mol_type = other RNA
cggagtgtgacaatggtgttt

SEQ ID NO: 54631 - RNA, 21 nt, Synthetic Construct
  source 1..21: mol_type = other RNA
ctagactgaggctccttgagg

SEQ ID NO: 54632 - RNA, 30 nt, Synthetic Construct; identical to SEQ ID NO: 751
  source 1..30: mol_type = other RNA

SEQ ID NO: 54633 - RNA, 22 nt, Synthetic Construct
  source 1..22: mol_type = other RNA
ttgcagcacgtaaatattggcg

SEQ ID NO: 54634 - RNA, 22 nt, Synthetic Construct
  source 1..22: mol_type = other RNA
gggagtgtgacaatggtgtttg

SEQ ID NO: 54635 - RNA, 22 nt, Synthetic Construct
  source 1..22: mol_type = other RNA
gggagtgtgacaatggtgtttg

SEQ ID NO: 54636 - RNA, 22 nt, Synthetic Construct
  source 1..22: mol_type = other RNA
tattgcacttgtcccggcccgt

SEQ ID NO: 54637 - RNA, 22 nt, Synthetic Construct
  source 1..22: mol_type = other RNA
tattgcacttgtcccggcccgt

SEQ ID NO: 54638 - RNA, 21 nt, Synthetic Construct
  source 1..21: mol_type = other RNA
cgaggtagtagattgtatagt

SEQ ID NO: 54639 - RNA, 21 nt, Synthetic Construct
  source 1..21: mol_type = other RNA
cgaggtagtagattgtatagt

SEQ ID NO: 54640 - RNA, 17 nt, Synthetic Construct
  source 1..17: mol_type = other RNA
cgcgacctcagatcaga

SEQ ID NO: 54641 - RNA, 17 nt, Synthetic Construct
  source 1..17: mol_type = other RNA
cgcgacctcagatcaga

SEQ ID NO: 54642 - RNA, 20 nt, Synthetic Construct
  source 1..20: mol_type = other RNA
cacatgcaagtcgaacggta

SEQ ID NO: 54643 - RNA, 20 nt, Synthetic Construct
  source 1..20: mol_type = other RNA
cacatgcaagtcgaacggta

SEQ ID NO: 54644 - RNA, 22 nt, Synthetic Construct
  source 1..22: mol_type = other RNA
aaaccgttaccattactgagtt

SEQ ID NO: 54645 - RNA, 22 nt, Synthetic Construct
  source 1..22: mol_type = other RNA
aaaccgttaccattactgagtt

SEQ ID NO: 54646 - RNA, 26 nt, Synthetic Construct
  source 1..26: mol_type = other RNA
gactcttagcggtggatcactcggct

SEQ ID NO: 54647 - RNA, 26 nt, Synthetic Construct
  source 1..26: mol_type = other RNA
gactcttagcggtggatcactcggct

SEQ ID NO: 54648 - RNA, 21 nt, Synthetic Construct
  source 1..21: mol_type = other RNA
tggagtgtgacaatggcgttt

SEQ ID NO: 54649 - RNA, 24 nt, Synthetic Construct
  source 1..24: mol_type = other RNA
cggagaaggttagctcagccaact

SEQ ID NO: 54650 - RNA, 19 nt, Synthetic Construct
  source 1..19: mol_type = other RNA
accaaggggtcgtgggttc

SEQ ID NO: 54651 - RNA, 31 nt, Synthetic Construct; identical to SEQ ID NO: 6001
  source 1..31: mol_type = other RNA

SEQ ID NO: 54652 - RNA, 31 nt, Synthetic Construct; identical to SEQ ID NO: 6001
  source 1..31: mol_type = other RNA

SEQ ID NO: 54653 - RNA, 23 nt, Synthetic Construct
  source 1..23: mol_type = other RNA
taaagtgcttatagtgcaggtag

SEQ ID NO: 54654 - RNA, 24 nt, Synthetic Construct
  source 1..24: mol_type = other RNA
tgtaaacatccccgactggaagcc

SEQ ID NO: 54655 - RNA, 24 nt, Synthetic Construct
  source 1..24: mol_type = other RNA
tgtaaacatccccgactggaagcc

SEQ ID NO: 54656 - RNA, 19 nt, Synthetic Construct
  source 1..19: mol_type = other RNA
ctgatcgagtcgtcctgcg

SEQ ID NO: 54657 - RNA, 22 nt, Synthetic Construct
  source 1..22: mol_type = other RNA
tgaggtagtaggttgtgaggtt

SEQ ID NO: 54658 - RNA, 22 nt, Synthetic Construct
  source 1..22: mol_type = other RNA
tgaggtagtaggttgtacagtt

SEQ ID NO: 54659 - RNA, 22 nt, Synthetic Construct
  source 1..22: mol_type = other RNA
tgaggtagtaggttgtacagtt

SEQ ID NO: 54660 - RNA, 21 nt, Synthetic Construct
  source 1..21: mol_type = other RNA
tggagtgtgacaacggtgttt

SEQ ID NO: 54661 - RNA, 22 nt, Synthetic Construct
  source 1..22: mol_type = other RNA
tgaggtagaagtttgtgctgtt

SEQ ID NO: 54662 - RNA, 22 nt, Synthetic Construct
  source 1..22: mol_type = other RNA
tgaggtagaagtttgtgctgtt

SEQ ID NO: 54663 - RNA, 31 nt, Synthetic Construct; identical to SEQ ID NO: 2263
  source 1..31: mol_type = other RNA

SEQ ID NO: 54664 - RNA, 31 nt, Synthetic Construct; identical to SEQ ID NO: 2263
  source 1..31: mol_type = other RNA

SEQ ID NO: 54665 - RNA, 22 nt, Synthetic Construct
  source 1..22: mol_type = other RNA
cactgcacttgtctcggtctga

SEQ ID NO: 54666 - RNA, 16 nt, Synthetic Construct
  source 1..16: mol_type = other RNA
gcagacgaagtgagtg

SEQ ID NO: 54667 - RNA, 21 nt, Synthetic Construct
  source 1..21: mol_type = other RNA
tgaggtagtaggttgcgtggt

SEQ ID NO: 54668 - RNA, 23 nt, Synthetic Construct
  source 1..23: mol_type = other RNA
caaagtgctgttcgtgtaggtag

SEQ ID NO: 54669 - RNA, 23 nt, Synthetic Construct
  source 1..23: mol_type = other RNA
caaagtgctgttcgtgtaggtag

SEQ ID NO: 54670 - RNA, 23 nt, Synthetic Construct
  source 1..23: mol_type = other RNA
tgaggggcagagagcgagactat

SEQ ID NO: 54671 - RNA, 24 nt, Synthetic Construct
  source 1..24: mol_type = other RNA
gctcactgatcgagtcgtcctgcg

SEQ ID NO: 54672 - RNA, 20 nt, Synthetic Construct
  source 1..20: mol_type = other RNA
tgaggtagaaggttgtatag

SEQ ID NO: 54673 - RNA, 20 nt, Synthetic Construct
  source 1..20: mol_type = other RNA
tgaggtagaaggttgtatag

SEQ ID NO: 54674 - RNA, 23 nt, Synthetic Construct
  source 1..23: mol_type = other RNA
tgaggggcagagagcgaggcttt

SEQ ID NO: 54675 - RNA, 23 nt, Synthetic Construct
  source 1..23: mol_type = other RNA
tgaggggcagagagcgaggcttt

SEQ ID NO: 54676 - RNA, 20 nt, Synthetic Construct
  source 1..20: mol_type = other RNA
tgaggtagtaggttgtgagg

SEQ ID NO: 54677 - RNA, 27 nt, Synthetic Construct
  source 1..27: mol_type = other RNA
gcattggtggttcagtggtagaattct

SEQ ID NO: 54678 - RNA, 30 nt, Synthetic Construct; identical to SEQ ID NO: 2308
  source 1..30: mol_type = other RNA

SEQ ID NO: 54679 - RNA, 23 nt, Synthetic Construct
  source 1..23: mol_type = other RNA
tgaggggcagagagcgagacttt

SEQ ID NO: 54680 - RNA, 23 nt, Synthetic Construct
  source 1..23: mol_type = other RNA
tgaggggcagagagcgagacttt

SEQ ID NO: 54681 - RNA, 23 nt, Synthetic Construct
  source 1..23: mol_type = other RNA
caaagagctgttcgtgcaggtag

SEQ ID NO: 54682 - RNA, 21 nt, Synthetic Construct
  source 1..21: mol_type = other RNA
actggacttggagtcagaagg

SEQ ID NO: 54683 - RNA, 17 nt, Synthetic Construct
  source 1..17: mol_type = other RNA
gtgttcggaagattttc

SEQ ID NO: 54684 - RNA, 17 nt, Synthetic Construct
  source 1..17: mol_type = other RNA
gtgttcggaagattttc

SEQ ID NO: 54685 - RNA, 22 nt, Synthetic Construct
  source 1..22: mol_type = other RNA
gctcacggaaagagaatgaagc

SEQ ID NO: 54686 - RNA, 22 nt, Synthetic Construct
  source 1..22: mol_type = other RNA
gtcagtttgtcaaataccccaa

SEQ ID NO: 54687 - RNA, 29 nt, Synthetic Construct
  source 1..29: mol_type = other RNA
cccccccactgctaaatttgactggcttt

SEQ ID NO: 54688 - RNA, 29 nt, Synthetic Construct
  source 1..29: mol_type = other RNA
cccccccactgctaaatttgactggcttt

SEQ ID NO: 54689 - RNA, 22 nt, Synthetic Construct
  source 1..22: mol_type = other RNA
tgaggtagtaggtagtatagtt

SEQ ID NO: 54690 - RNA, 22 nt, Synthetic Construct
  source 1..22: mol_type = other RNA
tgaggtagtaggtagtatagtt

SEQ ID NO: 54691 - RNA, 23 nt, Synthetic Construct
  source 1..23: mol_type = other RNA
tagcaccatttgaaatcagtgtt

SEQ ID NO: 54692 - RNA, 23 nt, Synthetic Construct
  source 1..23: mol_type = other RNA
tagcaccatttgaaatcagtgtt

SEQ ID NO: 54693 - RNA, 20 nt, Synthetic Construct
  source 1..20: mol_type = other RNA
tgaggtagtaggttatgtgg

SEQ ID NO: 54694 - RNA, 22 nt, Synthetic Construct
  source 1..22: mol_type = other RNA
tgaggtagtaggttgtatggtt

SEQ ID NO: 54695 - RNA, 22 nt, Synthetic Construct
  source 1..22: mol_type = other RNA
tgaggtagtaggttgtatggtt

SEQ ID NO: 54696 - RNA, 22 nt, Synthetic Construct
  source 1..22: mol_type = other RNA
ggtagcgaaattccttgtcggg

SEQ ID NO: 54697 - RNA, 22 nt, Synthetic Construct
  source 1..22: mol_type = other RNA
ggtagcgaaattccttgtcggg

SEQ ID NO: 54698 - RNA, 19 nt, Synthetic Construct
  source 1..19: mol_type = other RNA
agtaggtcatcgtcaggct

SEQ ID NO: 54699 - RNA, 19 nt, Synthetic Construct
  source 1..19: mol_type = other RNA
agtaggtcatcgtcaggct

SEQ ID NO: 54700 - RNA, 21 nt, Synthetic Construct
  source 1..21: mol_type = other RNA
tgaggtagcagattgtatagt

SEQ ID NO: 54701 - RNA, 21 nt, Synthetic Construct
  source 1..21: mol_type = other RNA
tgaggtagcagattgtatagt

SEQ ID NO: 54702 - RNA, 16 nt, Synthetic Construct
  source 1..16: mol_type = other RNA
ctactctcagcaacgg

SEQ ID NO: 54703 - RNA, 16 nt, Synthetic Construct
  source 1..16: mol_type = other RNA
ctactctcagcaacgg

SEQ ID NO: 54704 - RNA, 28 nt, Synthetic Construct
  source 1..28: mol_type = other RNA
cccccccactgctaaatttgactggctt

SEQ ID NO: 54705 - RNA, 28 nt, Synthetic Construct
  source 1..28: mol_type = other RNA
cccccccactgctaaatttgactggctt

SEQ ID NO: 54706 - RNA, 36 nt, Synthetic Construct; identical to SEQ ID NO: 6739
  source 1..36: mol_type = other RNA

SEQ ID NO: 54707 - RNA, 36 nt, Synthetic Construct; identical to SEQ ID NO: 6739
  source 1..36: mol_type = other RNA

SEQ ID NO: 54708 - RNA, 17 nt, Synthetic Construct
  source 1..17: mol_type = other RNA
gtccggatcgtagtctg

SEQ ID NO: 54709 - RNA, 17 nt, Synthetic Construct
  source 1..17: mol_type = other RNA
gtccggatcgtagtctg

SEQ ID NO: 54710 - RNA, 32 nt, Synthetic Construct; identical to SEQ ID NO: 14097
  source 1..32: mol_type = other RNA

SEQ ID NO: 54711 - RNA, 32 nt, Synthetic Construct; identical to SEQ ID NO: 14097
  source 1..32: mol_type = other RNA

SEQ ID NO: 54712 - RNA, 23 nt, Synthetic Construct
  source 1..23: mol_type = other RNA
atcacattgccagggattaccac

SEQ ID NO: 54713 - RNA, 23 nt, Synthetic Construct
  source 1..23: mol_type = other RNA
atcacattgccagggattaccac

SEQ ID NO: 54714 - RNA, 35 nt, Synthetic Construct; identical to SEQ ID NO: 2399
  source 1..35: mol_type = other RNA

SEQ ID NO: 54715 - RNA, 35 nt, Synthetic Construct; identical to SEQ ID NO: 2399
  source 1..35: mol_type = other RNA

SEQ ID NO: 54716 - RNA, 23 nt, Synthetic Construct
  source 1..23: mol_type = other RNA
tgaggtagtaggttgtgtggtta

SEQ ID NO: 54717 - RNA, 23 nt, Synthetic Construct
  source 1..23: mol_type = other RNA
tgaggtagtaggttgtgtggttc

SEQ ID NO: 54718 - RNA, 23 nt, Synthetic Construct
  source 1..23: mol_type = other RNA
tgaggtagtaggttgtgtggttc

SEQ ID NO: 54719 - RNA, 22 nt, Synthetic Construct
  source 1..22: mol_type = other RNA
tagcagcacggaaatattggcg

SEQ ID NO: 54720 - RNA, 35 nt, Synthetic Construct; identical to SEQ ID NO: 737
  source 1..35: mol_type = other RNA

SEQ ID NO: 54721 - RNA, 35 nt, Synthetic Construct; identical to SEQ ID NO: 737
  source 1..35: mol_type = other RNA

SEQ ID NO: 54722 - RNA, 22 nt, Synthetic Construct
  source 1..22: mol_type = other RNA
tattgcacttgtcccggcccgt

SEQ ID NO: 54723 - RNA, 22 nt, Synthetic Construct
  source 1..22: mol_type = other RNA
tattgcacttgtcccggcccgt

SEQ ID NO: 54724 - RNA, 25 nt, Synthetic Construct
  source 1..25: mol_type = other RNA
tcgaggatatgagatcgagacgaca

SEQ ID NO: 54725 - RNA, 25 nt, Synthetic Construct
  source 1..25: mol_type = other RNA
tcgaggatatgagatcgagacgaca

SEQ ID NO: 54726 - RNA, 22 nt, Synthetic Construct
  source 1..22: mol_type = other RNA
tacagtagtctgcacattggtt

SEQ ID NO: 54727 - RNA, 22 nt, Synthetic Construct
  source 1..22: mol_type = other RNA
tgaggtagtaggttgtgaggtt

SEQ ID NO: 54728 - RNA, 22 nt, Synthetic Construct
  source 1..22: mol_type = other RNA
tgaggtagtaggttgtgaggtt

SEQ ID NO: 54729 - RNA, 22 nt, Synthetic Construct
  source 1..22: mol_type = other RNA
tcaagagcaataacgaaaaatg

SEQ ID NO: 54730 - RNA, 22 nt, Synthetic Construct
  source 1..22: mol_type = other RNA
tcgtaccgtaagtaataatgcg

SEQ ID NO: 54731 - RNA, 22 nt, Synthetic Construct
  source 1..22: mol_type = other RNA
tcgtaccgtaagtaataatgcg

SEQ ID NO: 54732 - RNA, 21 nt, Synthetic Construct
  source 1..21: mol_type = other RNA
ggaggtagtaggttgtgtggt

SEQ ID NO: 54733 - RNA, 21 nt, Synthetic Construct
  source 1..21: mol_type = other RNA
ggaggtagtaggttgtgtggt

SEQ ID NO: 54734 - RNA, 22 nt, Synthetic Construct
  source 1..22: mol_type = other RNA
tcctgtactgagctgccccaag

SEQ ID NO: 54735 - RNA, 16 nt, Synthetic Construct
  source 1..16: mol_type = other RNA
gtgacgcgcatgaatg

SEQ ID NO: 54736 - RNA, 16 nt, Synthetic Construct
  source 1..16: mol_type = other RNA
gtgacgcgcatgaatg

SEQ ID NO: 54737 - RNA, 20 nt, Synthetic Construct
  source 1..20: mol_type = other RNA
tgaggtagtaggctgtgtgg

SEQ ID NO: 54738 - RNA, 17 nt, Synthetic Construct
  source 1..17: mol_type = other RNA
acagtgtgaatcggcgc

SEQ ID NO: 54739 - RNA, 17 nt, Synthetic Construct
  source 1..17: mol_type = other RNA
acagtgtgaatcggcgc

SEQ ID NO: 54740 - RNA, 33 nt, Synthetic Construct; identical to SEQ ID NO: 2395
  source 1..33: mol_type = other RNA

SEQ ID NO: 54741 - RNA, 23 nt, Synthetic Construct
  source 1..23: mol_type = other RNA
tggtaatacgacgtgcttagtgt

SEQ ID NO: 54742 - RNA, 23 nt, Synthetic Construct
  source 1..23: mol_type = other RNA
tggtaatacgacgtgcttagtgt

SEQ ID NO: 54743 - RNA, 21 nt, Synthetic Construct
  source 1..21: mol_type = other RNA
tgtcccacccccactcctgtt

SEQ ID NO: 54744 - RNA, 21 nt, Synthetic Construct
  source 1..21: mol_type = other RNA
tgtcccacccccactcctgtt

SEQ ID NO: 54745 - RNA, 21 nt, Synthetic Construct
  source 1..21: mol_type = other RNA
tgaggtagtaggttgcatagt

SEQ ID NO: 54746 - RNA, 22 nt, Synthetic Construct
  source 1..22: mol_type = other RNA
tgaggtagtagattgtgctgtt

SEQ ID NO: 54747 - RNA, 22 nt, Synthetic Construct
  source 1..22: mol_type = other RNA
tgaggtagtagattgtgctgtt

SEQ ID NO: 54748 - RNA, 21 nt, Synthetic Construct
  source 1..21: mol_type = other RNA
tgaggggcagagagcgagact

SEQ ID NO: 54749 - RNA, 23 nt, Synthetic Construct
  source 1..23: mol_type = other RNA
ccctgtactgagctgccccgaga

SEQ ID NO: 54750 - RNA, 21 nt, Synthetic Construct
  source 1..21: mol_type = other RNA
tggagtgtgacaatggcgttt

SEQ ID NO: 54751 - RNA, 23 nt, Synthetic Construct
  source 1..23: mol_type = other RNA
tgaggtagtaggttgcgtggttt

SEQ ID NO: 54752 - RNA, 23 nt, Synthetic Construct
  source 1..23: mol_type = other RNA
caacggaatcccgaaagcagctg

SEQ ID NO: 54753 - RNA, 23 nt, Synthetic Construct
  source 1..23: mol_type = other RNA
caacggaatcccgaaagcagctg

SEQ ID NO: 54754 - RNA, 23 nt, Synthetic Construct
  source 1..23: mol_type = other RNA
tggggtagtaggttgtgtggttt

SEQ ID NO: 54755 - RNA, 23 nt, Synthetic Construct
  source 1..23: mol_type = other RNA
tggggtagtaggttgtgtggttt

SEQ ID NO: 54756 - RNA, 31 nt, Synthetic Construct; identical to SEQ ID NO: 5506
  source 1..31: mol_type = other RNA

SEQ ID NO: 54757 - RNA, 22 nt, Synthetic Construct
  source 1..22: mol_type = other RNA
tgaggtagtaggttgtgtggct

SEQ ID NO: 54758 - RNA, 27 nt, Synthetic Construct
  source 1..27: mol_type = other RNA
ccccccattgctaaatttgactggctt

SEQ ID NO: 54759 - RNA, 27 nt, Synthetic Construct
  source 1..27: mol_type = other RNA
ccccccattgctaaatttgactggctt

SEQ ID NO: 54760 - RNA, 21 nt, Synthetic Construct
  source 1..21: mol_type = other RNA
acagtagtctgcacattggtt

SEQ ID NO: 54761 - RNA, 23 nt, Synthetic Construct
  source 1..23: mol_type = other RNA
tgaggtagtagtttgtgctgttg

SEQ ID NO: 54762 - RNA, 21 nt, Synthetic Construct
  source 1..21: mol_type = other RNA
ttctgtactgagctgccccga

SEQ ID NO: 54763 - RNA, 21 nt, Synthetic Construct
  source 1..21: mol_type = other RNA
ttctgtactgagctgccccga

SEQ ID NO: 54764 - RNA, 25 nt, Synthetic Construct
  source 1..25: mol_type = other RNA
agctcggtctgaggcccctcagttt

SEQ ID NO: 54765 - RNA, 25 nt, Synthetic Construct
  source 1..25: mol_type = other RNA
agctcggtctgaggcccctcagttt

SEQ ID NO: 54766 - RNA, 18 nt, Synthetic Construct
  source 1..18: mol_type = other RNA
gctgtgatggccgagtgg

SEQ ID NO: 54767 - RNA, 18 nt, Synthetic Construct
  source 1..18: mol_type = other RNA
gctgtgatggccgagtgg

SEQ ID NO: 54768 - RNA, 24 nt, Synthetic Construct
  source 1..24: mol_type = other RNA
tgtaaacatccccgactggaagcc

SEQ ID NO: 54769 - RNA, 24 nt, Synthetic Construct
  source 1..24: mol_type = other RNA
tgtaaacatccccgactggaagcc

SEQ ID NO: 54770 - RNA, 22 nt, Synthetic Construct
  source 1..22: mol_type = other RNA
tggaatgtaaagaagtatgtat

SEQ ID NO: 54771 - RNA, 22 nt, Synthetic Construct
  source 1..22: mol_type = other RNA
tggaatgtaaagaagtatgtat

SEQ ID NO: 54772 - RNA, 19 nt, Synthetic Construct
  source 1..19: mol_type = other RNA
ggtggggagtttggctggg

SEQ ID NO: 54773 - RNA, 23 nt, Synthetic Construct
  source 1..23: mol_type = other RNA
tcctgtactgagccgccccgaga

SEQ ID NO: 54774 - RNA, 24 nt, Synthetic Construct
  source 1..24: mol_type = other RNA
tgtaaacatccccgactgggagct

SEQ ID NO: 54775 - RNA, 17 nt, Synthetic Construct
  source 1..17: mol_type = other RNA
ccccggcatctccacca

SEQ ID NO: 54776 - RNA, 20 nt, Synthetic Construct
  source 1..20: mol_type = other RNA
tgagatagtaggttgtgtgg

SEQ ID NO: 54777 - RNA, 21 nt, Synthetic Construct
  source 1..21: mol_type = other RNA
tgaggtaataggttgtgtggt

SEQ ID NO: 54778 - RNA, 21 nt, Synthetic Construct
  source 1..21: mol_type = other RNA
tgaggtaataggttgtgtggt

SEQ ID NO: 54779 - RNA, 21 nt, Synthetic Construct
  source 1..21: mol_type = other RNA
cattattacttttggtacgcg

SEQ ID NO: 54780 - RNA, 21 nt, Synthetic Construct
  source 1..21: mol_type = other RNA
cattattacttttggtacgcg

SEQ ID NO: 54781 - RNA, 22 nt, Synthetic Construct
  source 1..22: mol_type = other RNA
taaggtagtagattgtatagtt

SEQ ID NO: 54782 - RNA, 22 nt, Synthetic Construct
  source 1..22: mol_type = other RNA
taaggtagtagattgtatagtt

SEQ ID NO: 54783 - RNA, 22 nt, Synthetic Construct
  source 1..22: mol_type = other RNA
tcctgtactgagctgccctgag

SEQ ID NO: 54784 - RNA, 22 nt, Synthetic Construct
  source 1..22: mol_type = other RNA
tcctgtactgagccgccccgag

SEQ ID NO: 54785 - RNA, 21 nt, Synthetic Construct
  source 1..21: mol_type = other RNA
tggagtgcgacaatggtgttt

SEQ ID NO: 54786 - RNA, 21 nt, Synthetic Construct
  source 1..21: mol_type = other RNA
tggagtgcgacaatggtgttt

SEQ ID NO: 54787 - RNA, 15 nt, Synthetic Construct
  source 1..15: mol_type = other RNA
gtttgatcctggctc

SEQ ID NO: 54788 - RNA, 22 nt, Synthetic Construct
  source 1..22: mol_type = other RNA
atgtcccacccccactcctgtt

SEQ ID NO: 54789 - RNA, 22 nt, Synthetic Construct
  source 1..22: mol_type = other RNA
atgtcccacccccactcctgtt

SEQ ID NO: 54790 - RNA, 22 nt, Synthetic Construct
  source 1..22: mol_type = other RNA
tcagtagctcgaggaaaagaca

SEQ ID NO: 54791 - RNA, 19 nt, Synthetic Construct
  source 1..19: mol_type = other RNA
gggataactggcttgtggc

SEQ ID NO: 54792 - RNA, 19 nt, Synthetic Construct
  source 1..19: mol_type = other RNA
gggataactggcttgtggc

SEQ ID NO: 54793 - RNA, 18 nt, Synthetic Construct
  source 1..18: mol_type = other RNA
gtaggtcatcgtcaggct

SEQ ID NO: 54794 - RNA, 18 nt, Synthetic Construct
  source 1..18: mol_type = other RNA
gtaggtcatcgtcaggct

SEQ ID NO: 54795 - RNA, 23 nt, Synthetic Construct
  source 1..23: mol_type = other RNA
tctcccaacccttgtaccagtga

SEQ ID NO: 54796 - RNA, 23 nt, Synthetic Construct
  source 1..23: mol_type = other RNA
tctcccaacccttgtaccagtga

SEQ ID NO: 54797 - RNA, 22 nt, Synthetic Construct
  source 1..22: mol_type = other RNA
cattgcacttgtctcggcctga

SEQ ID NO: 54798 - RNA, 25 nt, Synthetic Construct
  source 1..25: mol_type = other RNA
ggtaaaatcgctgagtgaagcattg

SEQ ID NO: 54799 - RNA, 25 nt, Synthetic Construct
  source 1..25: mol_type = other RNA
ggtaaaatcgctgagtgaagcattg

SEQ ID NO: 54800 - RNA, 22 nt, Synthetic Construct
  source 1..22: mol_type = other RNA
tattgcatttgtcccggcctgt

SEQ ID NO: 54801 - RNA, 22 nt, Synthetic Construct
  source 1..22: mol_type = other RNA
tattgcatttgtcccggcctgt

SEQ ID NO: 54802 - RNA, 21 nt, Synthetic Construct
  source 1..21: mol_type = other RNA
acagtagtctgcacattggtt

SEQ ID NO: 54803 - RNA, 21 nt, Synthetic Construct
  source 1..21: mol_type = other RNA
acagtagtctgcacattggtt

SEQ ID NO: 54804 - RNA, 20 nt, Synthetic Construct
  source 1..20: mol_type = other RNA
gtcagtttgtcaaatacccc

SEQ ID NO: 54805 - RNA, 21 nt, Synthetic Construct
  source 1..21: mol_type = other RNA
tgaggcagtaggttgtgtggt

SEQ ID NO: 54806 - RNA, 22 nt, Synthetic Construct
  source 1..22: mol_type = other RNA
tgaggtagtagttcgtgctgtt

SEQ ID NO: 54807 - RNA, 22 nt, Synthetic Construct
  source 1..22: mol_type = other RNA
tgaggtagtagttcgtgctgtt

SEQ ID NO: 54808 - RNA, 26 nt, Synthetic Construct
  source 1..26: mol_type = other RNA
caacggaatcccaaaagcagctgttt

SEQ ID NO: 54809 - RNA, 26 nt, Synthetic Construct
  source 1..26: mol_type = other RNA
caacggaatcccaaaagcagctgttt

SEQ ID NO: 54810 - RNA, 31 nt, Synthetic Construct; identical to SEQ ID NO: 2293
  source 1..31: mol_type = other RNA

SEQ ID NO: 54811 - RNA, 22 nt, Synthetic Construct
  source 1..22: mol_type = other RNA
cattgcacttgtctcggcctga

SEQ ID NO: 54812 - RNA, 20 nt, Synthetic Construct
  source 1..20: mol_type = other RNA
cccagtaaacggcggccgta

SEQ ID NO: 54813 - RNA, 22 nt, Synthetic Construct
  source 1..22: mol_type = other RNA
tattgcacttgtcccggtctgt

SEQ ID NO: 54814 - RNA, 22 nt, Synthetic Construct
  source 1..22: mol_type = other RNA
tattgcacttgtcccggtctgt

SEQ ID NO: 54815 - RNA, 22 nt, Synthetic Construct
  source 1..22: mol_type = other RNA
tgaggtaggaggttgtatagtt

SEQ ID NO: 54816 - RNA, 17 nt, Synthetic Construct
  source 1..17: mol_type = other RNA
cccctggacctgtactg

SEQ ID NO: 54817 - RNA, 24 nt, Synthetic Construct
  source 1..24: mol_type = other RNA
ttcaagtaatccaggataggcttt

SEQ ID NO: 54818 - RNA, 39 nt, Synthetic Construct; identical to SEQ ID NO: 804
  source 1..39: mol_type = other RNA

SEQ ID NO: 54819 - RNA, 39 nt, Synthetic Construct; identical to SEQ ID NO: 804
  source 1..39: mol_type = other RNA

SEQ ID NO: 54820 - RNA, 22 nt, Synthetic Construct
  source 1..22: mol_type = other RNA
tcagtagctcgaggaaaagaca

SEQ ID NO: 54821 - RNA, 22 nt, Synthetic Construct
  source 1..22: mol_type = other RNA
tcagtagctcgaggaaaagaca

SEQ ID NO: 54822 - RNA, 22 nt, Synthetic Construct
  source 1..22: mol_type = other RNA
tcctgtactgagccgccccgag

SEQ ID NO: 54823 - RNA, 19 nt, Synthetic Construct
  source 1..19: mol_type = other RNA
tcagtagctcgaggaaaag

SEQ ID NO: 54824 - RNA, 19 nt, Synthetic Construct
  source 1..19: mol_type = other RNA
tcagtagctcgaggaaaag

SEQ ID NO: 54825 - RNA, 19 nt, Synthetic Construct
  source 1..19: mol_type = other RNA
ccgtgttcggaagattttc

SEQ ID NO: 54826 - RNA, 19 nt, Synthetic Construct
  source 1..19: mol_type = other RNA
ccgtgttcggaagattttc

SEQ ID NO: 54827 - RNA, 24 nt, Synthetic Construct
  source 1..24: mol_type = other RNA
tgtgatttctgcccagtgctctga

SEQ ID NO: 54828 - RNA, 24 nt, Synthetic Construct
  source 1..24: mol_type = other RNA
tgtgatttctgcccagtgctctga

SEQ ID NO: 54829 - RNA, 18 nt, Synthetic Construct
  source 1..18: mol_type = other RNA
ggtagcgtggccgagtgg

SEQ ID NO: 54830 - RNA, 22 nt, Synthetic Construct
  source 1..22: mol_type = other RNA
ccccttggggttgtaggaccac

SEQ ID NO: 54831 - RNA, 22 nt, Synthetic Construct
  source 1..22: mol_type = other RNA
ccccttggggttgtaggaccac

SEQ ID NO: 54832 - RNA, 34 nt, Synthetic Construct; identical to SEQ ID NO: 385
  source 1..34: mol_type = other RNA

SEQ ID NO: 54833 - RNA, 34 nt, Synthetic Construct; identical to SEQ ID NO: 385
  source 1..34: mol_type = other RNA

SEQ ID NO: 54834 - RNA, 21 nt, Synthetic Construct
  source 1..21: mol_type = other RNA
cccataaagtagaaagcacta

SEQ ID NO: 54835 - RNA, 21 nt, Synthetic Construct
  source 1..21: mol_type = other RNA
tcctgtctgaatatgggggga

SEQ ID NO: 54836 - RNA, 35 nt, Synthetic Construct; identical to SEQ ID NO: 2514
  source 1..35: mol_type = other RNA

SEQ ID NO: 54837 - RNA, 23 nt, Synthetic Construct
  source 1..23: mol_type = other RNA
agcaacattgtctgctgggtttc

SEQ ID NO: 54838 - RNA, 23 nt, Synthetic Construct
  source 1..23: mol_type = other RNA
agcaacattgtctgctgggtttc

SEQ ID NO: 54839 - RNA, 22 nt, Synthetic Construct
  source 1..22: mol_type = other RNA
cagtgcaatgttaaaagggcat

SEQ ID NO: 54840 - RNA, 22 nt, Synthetic Construct
  source 1..22: mol_type = other RNA
cagtgcaatgttaaaagggcat

SEQ ID NO: 54841 - RNA, 17 nt, Synthetic Construct
  source 1..17: mol_type = other RNA
agacagcaggacggtgg

SEQ ID NO: 54842 - RNA, 17 nt, Synthetic Construct
  source 1..17: mol_type = other RNA
agacagcaggacggtgg

SEQ ID NO: 54843 - RNA, 17 nt, Synthetic Construct
  source 1..17: mol_type = other RNA
gactcttagcggtggat

SEQ ID NO: 54844 - RNA, 17 nt, Synthetic Construct
  source 1..17: mol_type = other RNA
gactcttagcggtggat

SEQ ID NO: 54845 - RNA, 15 nt, Synthetic Construct
  source 1..15: mol_type = other RNA
gggtgaaagcggggg

SEQ ID NO: 54846 - RNA, 15 nt, Synthetic Construct
  source 1..15: mol_type = other RNA
gtttgatcctggctc

SEQ ID NO: 54847 - RNA, 15 nt, Synthetic Construct
  source 1..15: mol_type = other RNA
gtttgatcctggctc

SEQ ID NO: 54848 - RNA, 25 nt, Synthetic Construct
  source 1..25: mol_type = other RNA
cctcgcgcgattggagcggccgata

SEQ ID NO: 54849 - RNA, 25 nt, Synthetic Construct
  source 1..25: mol_type = other RNA
cctcgcgcgattggagcggccgata

SEQ ID NO: 54850 - RNA, 26 nt, Synthetic Construct
  source 1..26: mol_type = other RNA
aatgacacgatcactcccgttgagtt

SEQ ID NO: 54851 - RNA, 26 nt, Synthetic Construct
  source 1..26: mol_type = other RNA
aatgacacgatcactcccgttgagtt

SEQ ID NO: 54852 - RNA, 23 nt, Synthetic Construct
  source 1..23: mol_type = other RNA
tcctgtactgagctgtcccgaga

SEQ ID NO: 54853 - RNA, 23 nt, Synthetic Construct
  source 1..23: mol_type = other RNA
tcctgtactgagctgtcccgaga

SEQ ID NO: 54854 - RNA, 28 nt, Synthetic Construct
  source 1..28: mol_type = other RNA
gctttacattggactttgaacagatctg

SEQ ID NO: 54855 - RNA, 23 nt, Synthetic Construct
  source 1..23: mol_type = other RNA
tccccttggggttgtaggaccac

SEQ ID NO: 54856 - RNA, 23 nt, Synthetic Construct
  source 1..23: mol_type = other RNA
tccccttggggttgtaggaccac

SEQ ID NO: 54857 - RNA, 30 nt, Synthetic Construct; identical to SEQ ID NO: 10539
  source 1..30: mol_type = other RNA

SEQ ID NO: 54858 - RNA, 30 nt, Synthetic Construct; identical to SEQ ID NO: 10539
  source 1..30: mol_type = other RNA

SEQ ID NO: 54859 - RNA, 23 nt, Synthetic Construct
  source 1..23: mol_type = other RNA
caaggtgctgttcgtgcaggtag

SEQ ID NO: 54860 - RNA, 27 nt, Synthetic Construct
  source 1..27: mol_type = other RNA
gactcttagcggtggatcactcggctc

SEQ ID NO: 54861 - RNA, 27 nt, Synthetic Construct
  source 1..27: mol_type = other RNA
gactcttagcggtggatcactcggctc

SEQ ID NO: 54862 - RNA, 43 nt, Synthetic Construct; identical to SEQ ID NO: 1204
  source 1..43: mol_type = other RNA

SEQ ID NO: 54863 - RNA, 43 nt, Synthetic Construct; identical to SEQ ID NO: 1204
  source 1..43: mol_type = other RNA

SEQ ID NO: 54864 - RNA, 22 nt, Synthetic Construct
  source 1..22: mol_type = other RNA
tggaatgtaaagaagtatgtat

SEQ ID NO: 54865 - RNA, 22 nt, Synthetic Construct
  source 1..22: mol_type = other RNA
tggaatgtaaagaagtatgtat

SEQ ID NO: 54866 - RNA, 16 nt, Synthetic Construct
  source 1..16: mol_type = other RNA
gtctacggacatacca

SEQ ID NO: 54867 - RNA, 23 nt, Synthetic Construct
  source 1..23: mol_type = other RNA
caaagtgcttacagtgcaggtag

SEQ ID NO: 54868 - RNA, 23 nt, Synthetic Construct
  source 1..23: mol_type = other RNA
caaagtgcttacagtgcaggtag

SEQ ID NO: 54869 - RNA, 18 nt, Synthetic Construct
  source 1..18: mol_type = other RNA
tcccaagggtatggctgt

SEQ ID NO: 54870 - RNA, 23 nt, Synthetic Construct
  source 1..23: mol_type = other RNA
ggctcggtctgaggcccctcagt

SEQ ID NO: 54871 - RNA, 22 nt, Synthetic Construct
  source 1..22: mol_type = other RNA
tattgcactcgtcccggcctgt

SEQ ID NO: 54872 - RNA, 22 nt, Synthetic Construct
  source 1..22: mol_type = other RNA
tattgcactcgtcccggcctgt

SEQ ID NO: 54873 - RNA, 22 nt, Synthetic Construct
  source 1..22: mol_type = other RNA
tcgcaccgtgagtaataatgcg

SEQ ID NO: 54874 - RNA, 22 nt, Synthetic Construct
  source 1..22: mol_type = other RNA
tcgcaccgtgagtaataatgcg

SEQ ID NO: 54875 - RNA, 22 nt, Synthetic Construct
  source 1..22: mol_type = other RNA
tagcagcacataaatattggcg

SEQ ID NO: 54876 - RNA, 23 nt, Synthetic Construct
  source 1..23: mol_type = other RNA
cagagttctacagtccgacgatc

SEQ ID NO: 54877 - RNA, 23 nt, Synthetic Construct
  source 1..23: mol_type = other RNA
cagagttctacagtccgacgatc

SEQ ID NO: 54878 - RNA, 23 nt, Synthetic Construct
  source 1..23: mol_type = other RNA
tgaggggcagagagagagacttt

SEQ ID NO: 54879 - RNA, 22 nt, Synthetic Construct
  source 1..22: mol_type = other RNA
tagcagcgcgtaaatattggcg

SEQ ID NO: 54880 - RNA, 22 nt, Synthetic Construct
  source 1..22: mol_type = other RNA
tagcagcgcgtaaatattggcg

SEQ ID NO: 54881 - RNA, 21 nt, Synthetic Construct
  source 1..21: mol_type = other RNA
tgaagtagtaggttgtatagt

SEQ ID NO: 54882 - RNA, 22 nt, Synthetic Construct
  source 1..22: mol_type = other RNA
tcctgtactgggctgccccgag

SEQ ID NO: 54883 - RNA, 22 nt, Synthetic Construct
  source 1..22: mol_type = other RNA
tcctgtactgggctgccccgag

SEQ ID NO: 54884 - RNA, 18 nt, Synthetic Construct
  source 1..18: mol_type = other RNA
tcgacgctagcggatcct

SEQ ID NO: 54885 - RNA, 18 nt, Synthetic Construct
  source 1..18: mol_type = other RNA
tcgacgctagcggatcct

SEQ ID NO: 54886 - RNA, 21 nt, Synthetic Construct
  source 1..21: mol_type = other RNA
tcctgtaccgagctgccccga

SEQ ID NO: 54887 - RNA, 21 nt, Synthetic Construct
  source 1..21: mol_type = other RNA
tcctgtaccgagctgccccga

SEQ ID NO: 54888 - RNA, 35 nt, Synthetic Construct; identical to SEQ ID NO: 2354
  source 1..35: mol_type = other RNA

SEQ ID NO: 54889 - RNA, 26 nt, Synthetic Construct
  source 1..26: mol_type = other RNA
gagcagctaataccgcatacgacctg

SEQ ID NO: 54890 - RNA, 26 nt, Synthetic Construct
  source 1..26: mol_type = other RNA
gagcagctaataccgcatacgacctg

SEQ ID NO: 54891 - RNA, 23 nt, Synthetic Construct
  source 1..23: mol_type = other RNA
tgaggcagtaggttgtgtggttt

SEQ ID NO: 54892 - RNA, 23 nt, Synthetic Construct
  source 1..23: mol_type = other RNA
tgaggcagtaggttgtgtggttt

SEQ ID NO: 54893 - RNA, 25 nt, Synthetic Construct
  source 1..25: mol_type = other RNA
ttgaggatatgagatcgggacgaca

SEQ ID NO: 54894 - RNA, 21 nt, Synthetic Construct
  source 1..21: mol_type = other RNA
ttcaagtaattcaggataggt

SEQ ID NO: 54895 - RNA, 29 nt, Synthetic Construct
  source 1..29: mol_type = other RNA
ccccccccactgctaaatttgactggctt

SEQ ID NO: 54896 - RNA, 29 nt, Synthetic Construct
  source 1..29: mol_type = other RNA
ccccccccactgctaaatttgactggctt

SEQ ID NO: 54897 - RNA, 20 nt, Synthetic Construct
  source 1..20: mol_type = other RNA
tacagtatagatgatgtact

SEQ ID NO: 54898 - RNA, 21 nt, Synthetic Construct
  source 1..21: mol_type = other RNA
tggagcgtgacaatggtgttt

SEQ ID NO: 54899 - RNA, 22 nt, Synthetic Construct
  source 1..22: mol_type = other RNA
tgaggtagtaggttgagtggtt

SEQ ID NO: 54900 - RNA, 23 nt, Synthetic Construct
  source 1..23: mol_type = other RNA
agcagcatcgtacagggctatga

SEQ ID NO: 54901 - RNA, 23 nt, Synthetic Construct
  source 1..23: mol_type = other RNA
agcagcatcgtacagggctatga

SEQ ID NO: 54902 - RNA, 24 nt, Synthetic Construct
  source 1..24: mol_type = other RNA
tcctgtactgagctgccccgagat

SEQ ID NO: 54903 - RNA, 24 nt, Synthetic Construct
  source 1..24: mol_type = other RNA
tcctgtactgagctgccccgagat

SEQ ID NO: 54904 - RNA, 23 nt, Synthetic Construct
  source 1..23: mol_type = other RNA
tcctgtactgagccgccccgagt

SEQ ID NO: 54905 - RNA, 22 nt, Synthetic Construct
  source 1..22: mol_type = other RNA
tgaggtagtaggttgtgtggta

SEQ ID NO: 54906 - RNA, 22 nt, Synthetic Construct
  source 1..22: mol_type = other RNA
tgaggtagtaggttgtgtggta

SEQ ID NO: 54907 - RNA, 23 nt, Synthetic Construct
  source 1..23: mol_type = other RNA
ttatggtttgcctgggactgagg

SEQ ID NO: 54908 - RNA, 23 nt, Synthetic Construct
  source 1..23: mol_type = other RNA
tgagaactgaattccatgggtta

SEQ ID NO: 54909 - RNA, 23 nt, Synthetic Construct
  source 1..23: mol_type = other RNA
tgagaactgaattccatgggtta

SEQ ID NO: 54910 - RNA, 21 nt, Synthetic Construct
  source 1..21: mol_type = other RNA
cgaggtagtagtttgtgctgt

SEQ ID NO: 54911 - RNA, 21 nt, Synthetic Construct
  source 1..21: mol_type = other RNA
cgaggtagtagtttgtgctgt

SEQ ID NO: 54912 - RNA, 23 nt, Synthetic Construct
  source 1..23: mol_type = other RNA
tcagtgcatcacagaactttgtt

SEQ ID NO: 54913 - RNA, 23 nt, Synthetic Construct
  source 1..23: mol_type = other RNA
tcagtgcatcacagaactttgtt

SEQ ID NO: 54914 - RNA, 23 nt, Synthetic Construct
  source 1..23: mol_type = other RNA
tcctgtactgagctgccccggga

SEQ ID NO: 54915 - RNA, 23 nt, Synthetic Construct
  source 1..23: mol_type = other RNA
tcctgtactgagctgccccggga

SEQ ID NO: 54916 - RNA, 24 nt, Synthetic Construct
  source 1..24: mol_type = other RNA
ttccccttggggttgtaggaccac

SEQ ID NO: 54917 - RNA, 24 nt, Synthetic Construct
  source 1..24: mol_type = other RNA
ttccccttggggttgtaggaccac

SEQ ID NO: 54918 - RNA, 21 nt, Synthetic Construct
  source 1..21: mol_type = other RNA
tgaggtaggaggttgtatagt

SEQ ID NO: 54919 - RNA, 19 nt, Synthetic Construct
  source 1..19: mol_type = other RNA
tagcttatcagactgatgt

SEQ ID NO: 54920 - RNA, 44 nt, Synthetic Construct; identical to SEQ ID NO: 722
  source 1..44: mol_type = other RNA

SEQ ID NO: 54921 - RNA, 44 nt, Synthetic Construct; identical to SEQ ID NO: 722
  source 1..44: mol_type = other RNA

SEQ ID NO: 54922 - RNA, 16 nt, Synthetic Construct
  source 1..16: mol_type = other RNA
gtaaacggcgggagta

SEQ ID NO: 54923 - RNA, 16 nt, Synthetic Construct
  source 1..16: mol_type = other RNA
gtaaacggcgggagta

SEQ ID NO: 54924 - RNA, 20 nt, Synthetic Construct
  source 1..20: mol_type = other RNA
ttggcctcaagtcaggcagg

SEQ ID NO: 54925 - RNA, 20 nt, Synthetic Construct
  source 1..20: mol_type = other RNA
ttggcctcaagtcaggcagg

SEQ ID NO: 54926 - RNA, 20 nt, Synthetic Construct
  source 1..20: mol_type = other RNA
taaggtagtaggttgtatag

SEQ ID NO: 54927 - RNA, 20 nt, Synthetic Construct
  source 1..20: mol_type = other RNA
taaggtagtaggttgtatag

SEQ ID NO: 54928 - RNA, 23 nt, Synthetic Construct
  source 1..23: mol_type = other RNA
tggcaatacgacgtacttagtgt

SEQ ID NO: 54929 - RNA, 23 nt, Synthetic Construct
  source 1..23: mol_type = other RNA
tggcaatacgacgtacttagtgt

SEQ ID NO: 54930 - RNA, 23 nt, Synthetic Construct
  source 1..23: mol_type = other RNA
tggggtagtaggttgtgtggttt

SEQ ID NO: 54931 - RNA, 23 nt, Synthetic Construct
  source 1..23: mol_type = other RNA
tggggtagtaggttgtgtggttt

SEQ ID NO: 54932 - RNA, 23 nt, Synthetic Construct
  source 1..23: mol_type = other RNA
tgaggtagtaggttgtatggtta

SEQ ID NO: 54933 - RNA, 23 nt, Synthetic Construct
  source 1..23: mol_type = other RNA
tgaggtagtaggttgtatggtta

SEQ ID NO: 54934 - RNA, 23 nt, Synthetic Construct
  source 1..23: mol_type = other RNA
tgaggtagtaggtcgtgtggttt

SEQ ID NO: 54935 - RNA, 23 nt, Synthetic Construct
  source 1..23: mol_type = other RNA
tgaggtagtaggtcgtgtggttt

SEQ ID NO: 54936 - RNA, 16 nt, Synthetic Construct
  source 1..16: mol_type = other RNA
tccggatcgtagtctg

SEQ ID NO: 54937 - RNA, 22 nt, Synthetic Construct
  source 1..22: mol_type = other RNA
ccctgtactgagctgccccgag

SEQ ID NO: 54938 - RNA, 22 nt, Synthetic Construct
  source 1..22: mol_type = other RNA
tcctgtactgagttgccccgag

SEQ ID NO: 54939 - RNA, 22 nt, Synthetic Construct
  source 1..22: mol_type = other RNA
tcctgtactgagttgccccgag

SEQ ID NO: 54940 - RNA, 19 nt, Synthetic Construct
  source 1..19: mol_type = other RNA
atcccactcctgacaccat

SEQ ID NO: 54941 - RNA, 19 nt, Synthetic Construct
  source 1..19: mol_type = other RNA
atcccactcctgacaccat

SEQ ID NO: 54942 - RNA, 22 nt, Synthetic Construct
  source 1..22: mol_type = other RNA
tgaggtagtaggttgtatagtg

SEQ ID NO: 54943 - RNA, 20 nt, Synthetic Construct
  source 1..20: mol_type = other RNA
gcaataacaggtctgtgatg

SEQ ID NO: 54944 - RNA, 20 nt, Synthetic Construct
  source 1..20: mol_type = other RNA
gcaataacaggtctgtgatg

SEQ ID NO: 54945 - RNA, 21 nt, Synthetic Construct
  source 1..21: mol_type = other RNA
gtagtgtttcctactttatgg

SEQ ID NO: 54946 - RNA, 21 nt, Synthetic Construct
  source 1..21: mol_type = other RNA
gtagtgtttcctactttatgg

SEQ ID NO: 54947 - RNA, 20 nt, Synthetic Construct
  source 1..20: mol_type = other RNA
tgaggtagaaggttgtatag

SEQ ID NO: 54948 - RNA, 20 nt, Synthetic Construct
  source 1..20: mol_type = other RNA
tgaggtagaaggttgtatag

SEQ ID NO: 54949 - RNA, 22 nt, Synthetic Construct
  source 1..22: mol_type = other RNA
ncctgtactgagctgccccgag

SEQ ID NO: 54950 - RNA, 22 nt, Synthetic Construct
  source 1..22: mol_type = other RNA
ncctgtactgagctgccccgag

SEQ ID NO: 54951 - RNA, 21 nt, Synthetic Construct
  source 1..21: mol_type = other RNA
tgaggtagtagattgtataga

SEQ ID NO: 54952 - RNA, 21 nt, Synthetic Construct
  source 1..21: mol_type = other RNA
tccttcattccaccggagtct

SEQ ID NO: 54953 - RNA, 21 nt, Synthetic Construct
  source 1..21: mol_type = other RNA
tccttcattccaccggagtct

SEQ ID NO: 54954 - RNA, 16 nt, Synthetic Construct
  source 1..16: mol_type = other RNA
acggcccagactccta

SEQ ID NO: 54955 - RNA, 21 nt, Synthetic Construct
  source 1..21: mol_type = other RNA
agcagcattgtacagggctat

SEQ ID NO: 54956 - RNA, 29 nt, Synthetic Construct
  source 1..29: mol_type = other RNA
gtgcatgcactctggggttgtgggacagc

SEQ ID NO: 54957 - RNA, 29 nt, Synthetic Construct
  source 1..29: mol_type = other RNA
gtgcatgcactctggggttgtgggacagc

SEQ ID NO: 54958 - RNA, 21 nt, Synthetic Construct
  source 1..21: mol_type = other RNA
attagtgacgcgcatgaatgg

SEQ ID NO: 54959 - RNA, 21 nt, Synthetic Construct
  source 1..21: mol_type = other RNA
attagtgacgcgcatgaatgg

SEQ ID NO: 54960 - RNA, 22 nt, Synthetic Construct
  source 1..22: mol_type = other RNA
tcttggagtaggtcattgggtg

SEQ ID NO: 54961 - RNA, 23 nt, Synthetic Construct
  source 1..23: mol_type = other RNA
gcgtggtaggagagcgttctgta

SEQ ID NO: 54962 - RNA, 23 nt, Synthetic Construct
  source 1..23: mol_type = other RNA
tcccgtactgagctgccccgagt

SEQ ID NO: 54963 - RNA, 17 nt, Synthetic Construct
  source 1..17: mol_type = other RNA
ggctggtccgaaggtag

SEQ ID NO: 54964 - RNA, 25 nt, Synthetic Construct
  source 1..25: mol_type = other RNA
ttggggatatgagatcgagacgaca

SEQ ID NO: 54965 - RNA, 22 nt, Synthetic Construct
  source 1..22: mol_type = other RNA
cgactcttagcggtggatcact

SEQ ID NO: 54966 - RNA, 22 nt, Synthetic Construct
  source 1..22: mol_type = other RNA
tcgtaccgtaagtaataatgcg

SEQ ID NO: 54967 - RNA, 23 nt, Synthetic Construct
  source 1..23: mol_type = other RNA
tgaggaagtaggttgtgtggttt

SEQ ID NO: 54968 - RNA, 19 nt, Synthetic Construct
  source 1..19: mol_type = other RNA
agctacattgtctgctggg

SEQ ID NO: 54969 - RNA, 17 nt, Synthetic Construct
  source 1..17: mol_type = other RNA
ccccggcatctccacca

SEQ ID NO: 54970 - RNA, 16 nt, Synthetic Construct
  source 1..16: mol_type = other RNA
gcggtggatgatgtgg

SEQ ID NO: 54971 - RNA, 16 nt, Synthetic Construct
  source 1..16: mol_type = other RNA
gcggtggatgatgtgg

SEQ ID NO: 54972 - RNA, 18 nt, Synthetic Construct
  source 1..18: mol_type = other RNA
gttcgattccggagaggg

SEQ ID NO: 54973 - RNA, 18 nt, Synthetic Construct
  source 1..18: mol_type = other RNA
gttcgattccggagaggg

SEQ ID NO: 54974 - RNA, 19 nt, Synthetic Construct
  source 1..19: mol_type = other RNA
cccttgtcattagttgcta

SEQ ID NO: 54975 - RNA, 23 nt, Synthetic Construct
  source 1..23: mol_type = other RNA
caaagtgccgttcgtgcaggtag

SEQ ID NO: 54976 - RNA, 23 nt, Synthetic Construct
  source 1..23: mol_type = other RNA
caaagtgccgttcgtgcaggtag

SEQ ID NO: 54977 - RNA, 21 nt, Synthetic Construct
  source 1..21: mol_type = other RNA
tgaggtagtaggttgtatggt

SEQ ID NO: 54978 - RNA, 30 nt, Synthetic Construct; identical to SEQ ID NO: 1771
  source 1..30: mol_type = other RNA

SEQ ID NO: 54979 - RNA, 30 nt, Synthetic Construct; identical to SEQ ID NO: 1771
  source 1..30: mol_type = other RNA

SEQ ID NO: 54980 - RNA, 23 nt, Synthetic Construct
  source 1..23: mol_type = other RNA
tacagtagtctgcacattggtta

SEQ ID NO: 54981 - RNA, 23 nt, Synthetic Construct
  source 1..23: mol_type = other RNA
tacagtagtctgcacattggtta

SEQ ID NO: 54982 - RNA, 22 nt, Synthetic Construct
  source 1..22: mol_type = other RNA
tcgtaccgtgagtaataatgtg

SEQ ID NO: 54983 - RNA, 22 nt, Synthetic Construct
  source 1..22: mol_type = other RNA
tcgtaccgtgagtaataatgtg

SEQ ID NO: 54984 - RNA, 23 nt, Synthetic Construct
  source 1..23: mol_type = other RNA
tgaaagtaggtcatcgtcaggct

SEQ ID NO: 54985 - RNA, 23 nt, Synthetic Construct
  source 1..23: mol_type = other RNA
tgaaagtaggtcatcgtcaggct

SEQ ID NO: 54986 - RNA, 22 nt, Synthetic Construct
  source 1..22: mol_type = other RNA
tgtcagtttgtcaaataccccg

SEQ ID NO: 54987 - RNA, 24 nt, Synthetic Construct
  source 1..24: mol_type = other RNA
tataccgaagctctaggtgcggca

SEQ ID NO: 54988 - RNA, 24 nt, Synthetic Construct
  source 1..24: mol_type = other RNA
tataccgaagctctaggtgcggca

SEQ ID NO: 54989 - RNA, 22 nt, Synthetic Construct
  source 1..22: mol_type = other RNA
tgaggtagtaagttgtgtggtt

SEQ ID NO: 54990 - RNA, 21 nt, Synthetic Construct
  source 1..21: mol_type = other RNA
gtccagttttcccaggaatcc

SEQ ID NO: 54991 - RNA, 21 nt, Synthetic Construct
  source 1..21: mol_type = other RNA
gtccagttttcccaggaatcc

SEQ ID NO: 54992 - RNA, 15 nt, Synthetic Construct
  source 1..15: mol_type = other RNA
cgatatggcatgaga

SEQ ID NO: 54993 - RNA, 15 nt, Synthetic Construct
  source 1..15: mol_type = other RNA
cgatatggcatgaga

SEQ ID NO: 54994 - RNA, 26 nt, Synthetic Construct
  source 1..26: mol_type = other RNA
gaggaacactagtggcgtaggcgaga

SEQ ID NO: 54995 - RNA, 26 nt, Synthetic Construct
  source 1..26: mol_type = other RNA
gaggaacactagtggcgtaggcgaga

SEQ ID NO: 54996 - RNA, 23 nt, Synthetic Construct
  source 1..23: mol_type = other RNA
cgaggtagtaggttgtgtggttt

SEQ ID NO: 54997 - RNA, 21 nt, Synthetic Construct
  source 1..21: mol_type = other RNA
tagcttatcagactgatgttg

SEQ ID NO: 54998 - RNA, 20 nt, Synthetic Construct
  source 1..20: mol_type = other RNA
gctattgacgaccgtaccgc

SEQ ID NO: 54999 - RNA, 20 nt, Synthetic Construct
  source 1..20: mol_type = other RNA
gctattgacgaccgtaccgc

SEQ ID NO: 55000 - RNA, 22 nt, Synthetic Construct
  source 1..22: mol_type = other RNA
tattgcacttgtcccggcctat

SEQ ID NO: 55001 - RNA, 22 nt, Synthetic Construct
  source 1..22: mol_type = other RNA
tattgcacttgtcccggcctat

SEQ ID NO: 55002 - RNA, 24 nt, Synthetic Construct
  source 1..24: mol_type = other RNA
tgaggtagtaggttgtgtggttta

SEQ ID NO: 55003 - RNA, 20 nt, Synthetic Construct
  source 1..20: mol_type = other RNA
tgaggtagtaggttgtatgg

SEQ ID NO: 55004 - RNA, 20 nt, Synthetic Construct
  source 1..20: mol_type = other RNA
tgaggtagtaggttgtatgg

SEQ ID NO: 55005 - RNA, 22 nt, Synthetic Construct
  source 1..22: mol_type = other RNA
taaggtagtagtttgtgctgtt

SEQ ID NO: 55006 - RNA, 21 nt, Synthetic Construct
  source 1..21: mol_type = other RNA
tgaggtagaaggttgtgtggt

SEQ ID NO: 55007 - RNA, 17 nt, Synthetic Construct
  source 1..17: mol_type = other RNA
ccccggcatctccacca

SEQ ID NO: 55008 - RNA, 17 nt, Synthetic Construct
  source 1..17: mol_type = other RNA
ccccggcatctccacca

SEQ ID NO: 55009 - RNA, 20 nt, Synthetic Construct
  source 1..20: mol_type = other RNA
tagcagcacatcatggttta

SEQ ID NO: 55010 - RNA, 20 nt, Synthetic Construct
  source 1..20: mol_type = other RNA
tagcagcacatcatggttta

SEQ ID NO: 55011 - RNA, 15 nt, Synthetic Construct
  source 1..15: mol_type = other RNA
tcctgacggccatag

SEQ ID NO: 55012 - RNA, 23 nt, Synthetic Construct
  source 1..23: mol_type = other RNA
tcctgtactgagctgccccggga

SEQ ID NO: 55013 - RNA, 35 nt, Synthetic Construct; identical to SEQ ID NO: 12948
  source 1..35: mol_type = other RNA

SEQ ID NO: 55014 - RNA, 35 nt, Synthetic Construct; identical to SEQ ID NO: 12948
  source 1..35: mol_type = other RNA

SEQ ID NO: 55015 - RNA, 20 nt, Synthetic Construct
  source 1..20: mol_type = other RNA
acagtagtctgcacattggt

SEQ ID NO: 55016 - RNA, 20 nt, Synthetic Construct
  source 1..20: mol_type = other RNA
acagtagtctgcacattggt

SEQ ID NO: 55017 - RNA, 21 nt, Synthetic Construct
  source 1..21: mol_type = other RNA
tgaggtagtaggttgtgtgat

SEQ ID NO: 55018 - RNA, 21 nt, Synthetic Construct
  source 1..21: mol_type = other RNA
tgaggtagtaggttgtgtgat

SEQ ID NO: 55019 - RNA, 23 nt, Synthetic Construct
  source 1..23: mol_type = other RNA
ttcaagtaattcaggataggtta

SEQ ID NO: 55020 - RNA, 16 nt, Synthetic Construct
  source 1..16: mol_type = other RNA
cccctggacctgtact

SEQ ID NO: 55021 - RNA, 23 nt, Synthetic Construct
  source 1..23: mol_type = other RNA
caaagtgctgttcgtgcaagtag

SEQ ID NO: 55022 - RNA, 32 nt, Synthetic Construct; identical to SEQ ID NO: 770
  source 1..32: mol_type = other RNA

SEQ ID NO: 55023 - RNA, 32 nt, Synthetic Construct; identical to SEQ ID NO: 770
  source 1..32: mol_type = other RNA

SEQ ID NO: 55024 - RNA, 21 nt, Synthetic Construct
  source 1..21: mol_type = other RNA
tgaggtagtagatcgtatagt

SEQ ID NO: 55025 - RNA, 21 nt, Synthetic Construct
  source 1..21: mol_type = other RNA
tgaggtagtagatcgtatagt

SEQ ID NO: 55026 - RNA, 22 nt, Synthetic Construct
  source 1..22: mol_type = other RNA
ctttcagtcggatgtttgcagt

SEQ ID NO: 55027 - RNA, 17 nt, Synthetic Construct
  source 1..17: mol_type = other RNA
accggaggaaggtgggg

SEQ ID NO: 55028 - RNA, 23 nt, Synthetic Construct
  source 1..23: mol_type = other RNA
ctcgtaccgtgagtaataatgcg

SEQ ID NO: 55029 - RNA, 23 nt, Synthetic Construct
  source 1..23: mol_type = other RNA
ctcgtaccgtgagtaataatgcg

SEQ ID NO: 55030 - RNA, 23 nt, Synthetic Construct
  source 1..23: mol_type = other RNA
tgaggggcagagagcgagactct

SEQ ID NO: 55031 - RNA, 23 nt, Synthetic Construct
  source 1..23: mol_type = other RNA
tgaggggcagagagcgagacttt

SEQ ID NO: 55032 - RNA, 22 nt, Synthetic Construct
  source 1..22: mol_type = other RNA
tagcagcacgtaaatgttggcg

SEQ ID NO: 55033 - RNA, 19 nt, Synthetic Construct
  source 1..19: mol_type = other RNA
tcctgtaccgatcaatagt

SEQ ID NO: 55034 - RNA, 22 nt, Synthetic Construct
  source 1..22: mol_type = other RNA
cattgcactcgtctcggtctga

SEQ ID NO: 55035 - RNA, 20 nt, Synthetic Construct
  source 1..20: mol_type = other RNA
tgagatgaagcactgtagct

SEQ ID NO: 55036 - RNA, 22 nt, Synthetic Construct
  source 1..22: mol_type = other RNA
tagcagcacgtaaacattggcg

SEQ ID NO: 55037 - RNA, 18 nt, Synthetic Construct
  source 1..18: mol_type = other RNA
accaaggggtcgtgggtt

SEQ ID NO: 55038 - RNA, 20 nt, Synthetic Construct
  source 1..20: mol_type = other RNA
tgaggtagtgggttgtatag

SEQ ID NO: 55039 - RNA, 20 nt, Synthetic Construct
  source 1..20: mol_type = other RNA
tgaggtagtgggttgtatag

SEQ ID NO: 55040 - RNA, 22 nt, Synthetic Construct
  source 1..22: mol_type = other RNA
tattgcacttgccccggcctgt

SEQ ID NO: 55041 - RNA, 27 nt, Synthetic Construct
  source 1..27: mol_type = other RNA
gttggttcaagcgtgtagtcgtgctct

SEQ ID NO: 55042 - RNA, 27 nt, Synthetic Construct
  source 1..27: mol_type = other RNA
gttggttcaagcgtgtagtcgtgctct

SEQ ID NO: 55043 - RNA, 21 nt, Synthetic Construct
  source 1..21: mol_type = other RNA
tcctgaactgagctgccccga

SEQ ID NO: 55044 - RNA, 17 nt, Synthetic Construct
  source 1..17: mol_type = other RNA
accggaggaaggtgggg

SEQ ID NO: 55045 - RNA, 22 nt, Synthetic Construct
  source 1..22: mol_type = other RNA
tcggatccgtctgagcttggct

SEQ ID NO: 55046 - RNA, 22 nt, Synthetic Construct
  source 1..22: mol_type = other RNA
tcggatccgtctgagcttggct

SEQ ID NO: 55047 - RNA, 21 nt, Synthetic Construct
  source 1..21: mol_type = other RNA
aggagtgtgacaatggtgttt

SEQ ID NO: 55048 - RNA, 21 nt, Synthetic Construct
  source 1..21: mol_type = other RNA
cgaggggcagagagcgagact

SEQ ID NO: 55049 - RNA, 22 nt, Synthetic Construct
  source 1..22: mol_type = other RNA
tgaggtaataggttgtgtggtt

SEQ ID NO: 55050 - RNA, 22 nt, Synthetic Construct
  source 1..22: mol_type = other RNA
tgaggtaataggttgtgtggtt

SEQ ID NO: 55051 - RNA, 22 nt, Synthetic Construct
  source 1..22: mol_type = other RNA
tgaggaagtaggttgtgtggtt

SEQ ID NO: 55052 - RNA, 22 nt, Synthetic Construct
  source 1..22: mol_type = other RNA
tcctgtaccgagctgccccgag

SEQ ID NO: 55053 - RNA, 22 nt, Synthetic Construct
  source 1..22: mol_type = other RNA
tcctgtaccgagctgccccgag

SEQ ID NO: 55054 - RNA, 22 nt, Synthetic Construct
  source 1..22: mol_type = other RNA
tgagatagtagtttgtgctgtt

SEQ ID NO: 55055 - RNA, 21 nt, Synthetic Construct
  source 1..21: mol_type = other RNA
caacggaatcccaaaagcagc

SEQ ID NO: 55056 - RNA, 21 nt, Synthetic Construct
  source 1..21: mol_type = other RNA
caacggaatcccaaaagcagc

SEQ ID NO: 55057 - RNA, 21 nt, Synthetic Construct
  source 1..21: mol_type = other RNA
tgaggtggtaggttgtatagt

SEQ ID NO: 55058 - RNA, 21 nt, Synthetic Construct
  source 1..21: mol_type = other RNA
tgaggtggtaggttgtatagt

SEQ ID NO: 55059 - RNA, 22 nt, Synthetic Construct
  source 1..22: mol_type = other RNA
tcctgtactgagctgccccgtg

SEQ ID NO: 55060 - RNA, 22 nt, Synthetic Construct
  source 1..22: mol_type = other RNA
tcctgtactgagctgccccgtg

SEQ ID NO: 55061 - RNA, 23 nt, Synthetic Construct
  source 1..23: mol_type = other RNA
agctcggtctgaggcccctcagt

SEQ ID NO: 55062 - RNA, 23 nt, Synthetic Construct
  source 1..23: mol_type = other RNA
agctcggtctgaggcccctcagt

SEQ ID NO: 55063 - RNA, 29 nt, Synthetic Construct
  source 1..29: mol_type = other RNA
gtgcatgcactctggggttgtgggacagc

SEQ ID NO: 55064 - RNA, 29 nt, Synthetic Construct
  source 1..29: mol_type = other RNA
gtgcatgcactctggggttgtgggacagc

SEQ ID NO: 55065 - RNA, 22 nt, Synthetic Construct
  source 1..22: mol_type = other RNA
tcagtgcatgacagaacttggg

SEQ ID NO: 55066 - RNA, 33 nt, Synthetic Construct; identical to SEQ ID NO: 15389
  source 1..33: mol_type = other RNA

SEQ ID NO: 55067 - RNA, 33 nt, Synthetic Construct; identical to SEQ ID NO: 15389
  source 1..33: mol_type = other RNA

SEQ ID NO: 55068 - RNA, 22 nt, Synthetic Construct
  source 1..22: mol_type = other RNA
tgtggtagtaggttgtatagtt

SEQ ID NO: 55069 - RNA, 22 nt, Synthetic Construct
  source 1..22: mol_type = other RNA
tgtggtagtaggttgtatagtt

SEQ ID NO: 55070 - RNA, 22 nt, Synthetic Construct
  source 1..22: mol_type = other RNA
tattgcacttgtcctggcctgt

SEQ ID NO: 55071 - RNA, 23 nt, Synthetic Construct
  source 1..23: mol_type = other RNA
tcctgtactgagctgcctcgaga

SEQ ID NO: 55072 - RNA, 23 nt, Synthetic Construct
  source 1..23: mol_type = other RNA
tcctgtactgagctgcctcgaga

SEQ ID NO: 55073 - RNA, 23 nt, Synthetic Construct
  source 1..23: mol_type = other RNA
tgagaactgaattccatgggttt

SEQ ID NO: 55074 - RNA, 23 nt, Synthetic Construct
  source 1..23: mol_type = other RNA
tgagaactgaattccatgggttt

SEQ ID NO: 55075 - RNA, 23 nt, Synthetic Construct
  source 1..23: mol_type = other RNA
agcagcattgtacagggctgtga

SEQ ID NO: 55076 - RNA, 23 nt, Synthetic Construct
  source 1..23: mol_type = other RNA
agcagcattgtacagggctgtga

SEQ ID NO: 55077 - RNA, 22 nt, Synthetic Construct
  source 1..22: mol_type = other RNA
tattgcactcgtcccggcctgt

SEQ ID NO: 55078 - RNA, 22 nt, Synthetic Construct
  source 1..22: mol_type = other RNA
tattgcactcgtcccggcctgt

SEQ ID NO: 55079 - RNA, 22 nt, Synthetic Construct
  source 1..22: mol_type = other RNA
ttcacagtggctaagttccgct

SEQ ID NO: 55080 - RNA, 22 nt, Synthetic Construct
  source 1..22: mol_type = other RNA
ttcacagtggctaagttccgct

SEQ ID NO: 55081 - RNA, 22 nt, Synthetic Construct
  source 1..22: mol_type = other RNA
tgaggtagtaggttgtgtggtg

SEQ ID NO: 55082 - RNA, 22 nt, Synthetic Construct
  source 1..22: mol_type = other RNA
tgaggtagtaggttgtgtggtg

SEQ ID NO: 55083 - RNA, 17 nt, Synthetic Construct
  source 1..17: mol_type = other RNA
cagtcaggatgttggct

SEQ ID NO: 55084 - RNA, 22 nt, Synthetic Construct
  source 1..22: mol_type = other RNA
cggctctgggtctgtggggagt

SEQ ID NO: 55085 - RNA, 15 nt, Synthetic Construct
  source 1..15: mol_type = other RNA
catgccgcgtgcggg

SEQ ID NO: 55086 - RNA, 15 nt, Synthetic Construct
  source 1..15: mol_type = other RNA
catgccgcgtgcggg

SEQ ID NO: 55087 - RNA, 23 nt, Synthetic Construct
  source 1..23: mol_type = other RNA
tcccgtactgagctgccccgaga

SEQ ID NO: 55088 - RNA, 23 nt, Synthetic Construct
  source 1..23: mol_type = other RNA
tctttggttatctagctgtatga

SEQ ID NO: 55089 - RNA, 23 nt, Synthetic Construct
  source 1..23: mol_type = other RNA
tctttggttatctagctgtatga

SEQ ID NO: 55090 - RNA, 20 nt, Synthetic Construct
  source 1..20: mol_type = other RNA
tggggtagtaggttgtatag

SEQ ID NO: 55091 - RNA, 27 nt, Synthetic Construct
  source 1..27: mol_type = other RNA
ccccccactgttaaatttgactggctt

SEQ ID NO: 55092 - RNA, 27 nt, Synthetic Construct
  source 1..27: mol_type = other RNA
ccccccactgttaaatttgactggctt

SEQ ID NO: 55093 - RNA, 25 nt, Synthetic Construct
  source 1..25: mol_type = other RNA
tgaggggcagagagcgagacttttt

SEQ ID NO: 55094 - RNA, 19 nt, Synthetic Construct
  source 1..19: mol_type = other RNA
gcgaaattccttgtcgggt

SEQ ID NO: 55095 - RNA, 25 nt, Synthetic Construct
  source 1..25: mol_type = other RNA
ttgaggatacgagatcgagacgaca

SEQ ID NO: 55096 - RNA, 23 nt, Synthetic Construct
  source 1..23: mol_type = other RNA
tgaggggcagagagcgagactat

SEQ ID NO: 55097 - RNA, 23 nt, Synthetic Construct
  source 1..23: mol_type = other RNA
tgaggggcagagagcgagactat

SEQ ID NO: 55098 - RNA, 21 nt, Synthetic Construct
  source 1..21: mol_type = other RNA
tcctgtactgagctgccctga

SEQ ID NO: 55099 - RNA, 21 nt, Synthetic Construct
  source 1..21: mol_type = other RNA
tcctgtactgagctgccctga

SEQ ID NO: 55100 - RNA, 21 nt, Synthetic Construct
  source 1..21: mol_type = other RNA
tgaggtagtaggtcgtatagt

SEQ ID NO: 55101 - RNA, 21 nt, Synthetic Construct
  source 1..21: mol_type = other RNA
tgaggtagtaggtcgtatagt

SEQ ID NO: 55102 - RNA, 16 nt, Synthetic Construct
  source 1..16: mol_type = other RNA
gggtctgtagctcagt

SEQ ID NO: 55103 - RNA, 22 nt, Synthetic Construct
  source 1..22: mol_type = other RNA
tacagtagtctgcacattggtt

SEQ ID NO: 55104 - RNA, 23 nt, Synthetic Construct
  source 1..23: mol_type = other RNA
tgaggtaggaggttgtatagtta

SEQ ID NO: 55105 - RNA, 17 nt, Synthetic Construct
  source 1..17: mol_type = other RNA
gcggctgtagctcagtt

SEQ ID NO: 55106 - RNA, 22 nt, Synthetic Construct
  source 1..22: mol_type = other RNA
gtagtgtttcctactttatgga

SEQ ID NO: 55107 - RNA, 21 nt, Synthetic Construct
  source 1..21: mol_type = other RNA
gactatagaactttccccctc

SEQ ID NO: 55108 - RNA, 21 nt, Synthetic Construct
  source 1..21: mol_type = other RNA
gactatagaactttccccctc

SEQ ID NO: 55109 - RNA, 20 nt, Synthetic Construct
  source 1..20: mol_type = other RNA
caaagaattctccttttggg

SEQ ID NO: 55110 - RNA, 22 nt, Synthetic Construct
  source 1..22: mol_type = other RNA
tgaggtagtagtatgtgctgtt

SEQ ID NO: 55111 - RNA, 22 nt, Synthetic Construct
  source 1..22: mol_type = other RNA
tgaggtagtagtatgtgctgtt

SEQ ID NO: 55112 - RNA, 22 nt, Synthetic Construct
  source 1..22: mol_type = other RNA
tcctgtactgagctgccccaag

SEQ ID NO: 55113 - RNA, 23 nt, Synthetic Construct
  source 1..23: mol_type = other RNA
tgaggggcagagagcgagacttg

SEQ ID NO: 55114 - RNA, 21 nt, Synthetic Construct
  source 1..21: mol_type = other RNA
tgaggtagtaggttgtgtgga

SEQ ID NO: 55115 - RNA, 21 nt, Synthetic Construct
  source 1..21: mol_type = other RNA
tgaggtagtaggttgtgtgga

SEQ ID NO: 55116 - RNA, 24 nt, Synthetic Construct
  source 1..24: mol_type = other RNA
tagcttatcagactgatgttgaca

SEQ ID NO: 55117 - RNA, 24 nt, Synthetic Construct
  source 1..24: mol_type = other RNA
tagcttatcagactgatgttgaca

SEQ ID NO: 55118 - RNA, 22 nt, Synthetic Construct
  source 1..22: mol_type = other RNA
ctcgtaccgtgagtaataatgc

SEQ ID NO: 55119 - RNA, 15 nt, Synthetic Construct
  source 1..15: mol_type = other RNA
cgagtgacgtagtgt

SEQ ID NO: 55120 - RNA, 15 nt, Synthetic Construct
  source 1..15: mol_type = other RNA
cgagtgacgtagtgt

SEQ ID NO: 55121 - RNA, 21 nt, Synthetic Construct
  source 1..21: mol_type = other RNA
acagtagcctgcacattggtt

SEQ ID NO: 55122 - RNA, 17 nt, Synthetic Construct
  source 1..17: mol_type = other RNA
ttggagggcaagtctgg

SEQ ID NO: 55123 - RNA, 17 nt, Synthetic Construct
  source 1..17: mol_type = other RNA
ttggagggcaagtctgg

SEQ ID NO: 55124 - RNA, 33 nt, Synthetic Construct; identical to SEQ ID NO: 2638
  source 1..33: mol_type = other RNA

SEQ ID NO: 55125 - RNA, 23 nt, Synthetic Construct
  source 1..23: mol_type = other RNA
agcagcattgcacagggctatga

SEQ ID NO: 55126 - RNA, 23 nt, Synthetic Construct
  source 1..23: mol_type = other RNA
agcagcattgcacagggctatga

SEQ ID NO: 55127 - RNA, 16 nt, Synthetic Construct
  source 1..16: mol_type = other RNA
ccgcttttgtcaggga

SEQ ID NO: 55128 - RNA, 22 nt, Synthetic Construct
  source 1..22: mol_type = other RNA
tgaggtagaaggttgtgtggtt

SEQ ID NO: 55129 - RNA, 22 nt, Synthetic Construct
  source 1..22: mol_type = other RNA
tgaggtagaaggttgtgtggtt

SEQ ID NO: 55130 - RNA, 21 nt, Synthetic Construct
  source 1..21: mol_type = other RNA
aatggcgccactagggttgtg

SEQ ID NO: 55131 - RNA, 22 nt, Synthetic Construct
  source 1..22: mol_type = other RNA
acagtagtctgcacattggttt

SEQ ID NO: 55132 - RNA, 20 nt, Synthetic Construct
  source 1..20: mol_type = other RNA
caaagaattctccttttggg

SEQ ID NO: 55133 - RNA, 20 nt, Synthetic Construct
  source 1..20: mol_type = other RNA
caaagaattctccttttggg

SEQ ID NO: 55134 - RNA, 35 nt, Synthetic Construct; identical to SEQ ID NO: 2518
  source 1..35: mol_type = other RNA

SEQ ID NO: 55135 - RNA, 18 nt, Synthetic Construct
  source 1..18: mol_type = other RNA
gaagttgaccgcctgggg

SEQ ID NO: 55136 - RNA, 22 nt, Synthetic Construct
  source 1..22: mol_type = other RNA
tgaggtagtagtttgtgccgtt

SEQ ID NO: 55137 - RNA, 22 nt, Synthetic Construct
  source 1..22: mol_type = other RNA
tgaggtagtagtttgtgccgtt

SEQ ID NO: 55138 - RNA, 22 nt, Synthetic Construct
  source 1..22: mol_type = other RNA
tgaggtagcagtttgtgctgtt

SEQ ID NO: 55139 - RNA, 21 nt, Synthetic Construct
  source 1..21: mol_type = other RNA
tgaggggcagagggcgagact

SEQ ID NO: 55140 - RNA, 19 nt, Synthetic Construct
  source 1..19: mol_type = other RNA
cgcgcgtcccccgaagagg

SEQ ID NO: 55141 - RNA, 22 nt, Synthetic Construct
  source 1..22: mol_type = other RNA
tagcagcacgtaagtattggcg

SEQ ID NO: 55142 - RNA, 21 nt, Synthetic Construct
  source 1..21: mol_type = other RNA
tggagtgtgacaatggtgtct

SEQ ID NO: 55143 - RNA, 22 nt, Synthetic Construct
  source 1..22: mol_type = other RNA
tgaggtagtaggttgtatagtc

SEQ ID NO: 55144 - RNA, 22 nt, Synthetic Construct
  source 1..22: mol_type = other RNA
tgaggtagtaggttgtatagtc

SEQ ID NO: 55145 - RNA, 23 nt, Synthetic Construct
  source 1..23: mol_type = other RNA
caacggaatcccagaagcagctg

SEQ ID NO: 55146 - RNA, 22 nt, Synthetic Construct
  source 1..22: mol_type = other RNA
tagcagcacgtgaatattggcg

SEQ ID NO: 55147 - RNA, 22 nt, Synthetic Construct
  source 1..22: mol_type = other RNA
tagcagcacgtgaatattggcg

SEQ ID NO: 55148 - RNA, 19 nt, Synthetic Construct
  source 1..19: mol_type = other RNA
cagcactctgcaaagacga

SEQ ID NO: 55149 - RNA, 23 nt, Synthetic Construct
  source 1..23: mol_type = other RNA
tgaggtagtaggttgtgcggttt

SEQ ID NO: 55150 - RNA, 23 nt, Synthetic Construct
  source 1..23: mol_type = other RNA
tgaggtagtaggttgtgcggttt

SEQ ID NO: 55151 - RNA, 22 nt, Synthetic Construct
  source 1..22: mol_type = other RNA
tcctgtaccgagctgccccgag

SEQ ID NO: 55152 - RNA, 22 nt, Synthetic Construct
  source 1..22: mol_type = other RNA
tcctgtaccgagctgccccgag

SEQ ID NO: 55153 - RNA, 23 nt, Synthetic Construct
  source 1..23: mol_type = other RNA
tggtgatacgacgtacttagtgt

SEQ ID NO: 55154 - RNA, 23 nt, Synthetic Construct
  source 1..23: mol_type = other RNA
tggtgatacgacgtacttagtgt

SEQ ID NO: 55155 - RNA, 19 nt, Synthetic Construct
  source 1..19: mol_type = other RNA
gagaaagctcacaagaact

SEQ ID NO: 55156 - RNA, 19 nt, Synthetic Construct
  source 1..19: mol_type = other RNA
gagaaagctcacaagaact

SEQ ID NO: 55157 - RNA, 20 nt, Synthetic Construct
  source 1..20: mol_type = other RNA
tgaggtagtaggttgcgtgg

SEQ ID NO: 55158 - RNA, 22 nt, Synthetic Construct
  source 1..22: mol_type = other RNA
tgaggtagtagtttgtgcagtt

SEQ ID NO: 55159 - RNA, 22 nt, Synthetic Construct
  source 1..22: mol_type = other RNA
tgaggtagtagtttgtgcagtt

SEQ ID NO: 55160 - RNA, 22 nt, Synthetic Construct
  source 1..22: mol_type = other RNA
tgagaactgagttccatgggtt

SEQ ID NO: 55161 - RNA, 22 nt, Synthetic Construct
  source 1..22: mol_type = other RNA
tgagaactgagttccatgggtt

SEQ ID NO: 55162 - RNA, 21 nt, Synthetic Construct
  source 1..21: mol_type = other RNA
tgaggtagtagattgtacagt

SEQ ID NO: 55163 - RNA, 22 nt, Synthetic Construct
  source 1..22: mol_type = other RNA
tcctgtattgagctgccccgag

SEQ ID NO: 55164 - RNA, 22 nt, Synthetic Construct
  source 1..22: mol_type = other RNA
tcctgtattgagctgccccgag

SEQ ID NO: 55165 - RNA, 33 nt, Synthetic Construct; identical to SEQ ID NO: 7469
  source 1..33: mol_type = other RNA

SEQ ID NO: 55166 - RNA, 33 nt, Synthetic Construct; identical to SEQ ID NO: 7469
  source 1..33: mol_type = other RNA

SEQ ID NO: 55167 - RNA, 24 nt, Synthetic Construct
  source 1..24: mol_type = other RNA
ggtaaacatccccgactggaagct

SEQ ID NO: 55168 - RNA, 24 nt, Synthetic Construct
  source 1..24: mol_type = other RNA
ggtaaacatccccgactggaagct

SEQ ID NO: 55169 - RNA, 22 nt, Synthetic Construct
  source 1..22: mol_type = other RNA
tattgcgcttgtcccggcctgt

SEQ ID NO: 55170 - RNA, 22 nt, Synthetic Construct
  source 1..22: mol_type = other RNA
ctttgttcgattccgttgagta

SEQ ID NO: 55171 - RNA, 23 nt, Synthetic Construct
  source 1..23: mol_type = other RNA
cgagagtaggacgttgccaggtt

SEQ ID NO: 55172 - RNA, 23 nt, Synthetic Construct
  source 1..23: mol_type = other RNA
cgagagtaggacgttgccaggtt

SEQ ID NO: 55173 - RNA, 22 nt, Synthetic Construct
  source 1..22: mol_type = other RNA
tgaggtagtagtttgtgctgtg

SEQ ID NO: 55174 - RNA, 17 nt, Synthetic Construct
  source 1..17: mol_type = other RNA
cacggcccagactccta

SEQ ID NO: 55175 - RNA, 22 nt, Synthetic Construct
  source 1..22: mol_type = other RNA
tcttgtactgagctgccccgag

SEQ ID NO: 55176 - RNA, 42 nt, Synthetic Construct; identical to SEQ ID NO: 8009
  source 1..42: mol_type = other RNA

SEQ ID NO: 55177 - RNA, 42 nt, Synthetic Construct; identical to SEQ ID NO: 8009
  source 1..42: mol_type = other RNA

SEQ ID NO: 55178 - RNA, 25 nt, Synthetic Construct
  source 1..25: mol_type = other RNA
gagaaagctcacaagaactgctaac

SEQ ID NO: 55179 - RNA, 16 nt, Synthetic Construct
  source 1..16: mol_type = other RNA
gtctacggccatacca

SEQ ID NO: 55180 - RNA, 16 nt, Synthetic Construct
  source 1..16: mol_type = other RNA
gtctacggccatacca

SEQ ID NO: 55181 - RNA, 23 nt, Synthetic Construct
  source 1..23: mol_type = other RNA
tcctgtactgagctaccccgaga

SEQ ID NO: 55182 - RNA, 22 nt, Synthetic Construct
  source 1..22: mol_type = other RNA
tattgcacttgtcctggcctgt

SEQ ID NO: 55183 - RNA, 22 nt, Synthetic Construct
  source 1..22: mol_type = other RNA
tattgcacttgtcctggcctgt

SEQ ID NO: 55184 - RNA, 23 nt, Synthetic Construct
  source 1..23: mol_type = other RNA
caaagtgctgttcgcgcaggtag

SEQ ID NO: 55185 - RNA, 23 nt, Synthetic Construct
  source 1..23: mol_type = other RNA
caaagtgctgttcgcgcaggtag

SEQ ID NO: 55186 - RNA, 22 nt, Synthetic Construct
  source 1..22: mol_type = other RNA
tgaggtagtaggttgcgtggtt

SEQ ID NO: 55187 - RNA, 21 nt, Synthetic Construct
  source 1..21: mol_type = other RNA
tggggtgtgacaatggtgttt

SEQ ID NO: 55188 - RNA, 24 nt, Synthetic Construct
  source 1..24: mol_type = other RNA
ttcaagtaatccaggataggcttt

SEQ ID NO: 55189 - RNA, 24 nt, Synthetic Construct
  source 1..24: mol_type = other RNA
ttcaagtaatccaggataggcttt

SEQ ID NO: 55190 - RNA, 18 nt, Synthetic Construct
  source 1..18: mol_type = other RNA
caacggaatcccaaaagc

SEQ ID NO: 55191 - RNA, 20 nt, Synthetic Construct
  source 1..20: mol_type = other RNA
tggggtagtaggttgtgtgg

SEQ ID NO: 55192 - RNA, 23 nt, Synthetic Construct
  source 1..23: mol_type = other RNA
ttcaagtaattcaggataggttt

SEQ ID NO: 55193 - RNA, 21 nt, Synthetic Construct
  source 1..21: mol_type = other RNA
tcatgtactgagctgccccga

SEQ ID NO: 55194 - RNA, 21 nt, Synthetic Construct
  source 1..21: mol_type = other RNA
tcatgtactgagctgccccga

SEQ ID NO: 55195 - RNA, 23 nt, Synthetic Construct
  source 1..23: mol_type = other RNA
tcctgtactgagctaccccgaga

SEQ ID NO: 55196 - RNA, 15 nt, Synthetic Construct
  source 1..15: mol_type = other RNA
acctgcatcgagggt

SEQ ID NO: 55197 - RNA, 15 nt, Synthetic Construct
  source 1..15: mol_type = other RNA
acctgcatcgagggt

SEQ ID NO: 55198 - RNA, 22 nt, Synthetic Construct
  source 1..22: mol_type = other RNA
tgaggtagtagattgtatagtc

SEQ ID NO: 55199 - RNA, 22 nt, Synthetic Construct
  source 1..22: mol_type = other RNA
tgaggtagtagattgtatagtc

SEQ ID NO: 55200 - RNA, 21 nt, Synthetic Construct
  source 1..21: mol_type = other RNA
atcggaacgtgcccagtcgtg

SEQ ID NO: 55201 - RNA, 22 nt, Synthetic Construct
  source 1..22: mol_type = other RNA
nattgcacttgtcccggcctgt

SEQ ID NO: 55202 - RNA, 17 nt, Synthetic Construct
  source 1..17: mol_type = other RNA
gccatgccgcgtgcggg

SEQ ID NO: 55203 - RNA, 17 nt, Synthetic Construct
  source 1..17: mol_type = other RNA
gccatgccgcgtgcggg

SEQ ID NO: 55204 - RNA, 21 nt, Synthetic Construct
  source 1..21: mol_type = other RNA
ttataaagcaatgagactgat

SEQ ID NO: 55205 - RNA, 21 nt, Synthetic Construct
  source 1..21: mol_type = other RNA
ttataaagcaatgagactgat

SEQ ID NO: 55206 - RNA, 21 nt, Synthetic Construct
  source 1..21: mol_type = other RNA
tgaggtagtagtctgtgctgt

SEQ ID NO: 55207 - RNA, 21 nt, Synthetic Construct
  source 1..21: mol_type = other RNA
tgaggtagtagtctgtgctgt

SEQ ID NO: 55208 - RNA, 23 nt, Synthetic Construct
  source 1..23: mol_type = other RNA
tacagtagtctgcacattggttt

SEQ ID NO: 55209 - RNA, 23 nt, Synthetic Construct
  source 1..23: mol_type = other RNA
tacagtagtctgcacattggttt

SEQ ID NO: 55210 - RNA, 21 nt, Synthetic Construct
  source 1..21: mol_type = other RNA
tcctgtacagagctgccccga

SEQ ID NO: 55211 - RNA, 33 nt, Synthetic Construct; identical to SEQ ID NO: 2209
  source 1..33: mol_type = other RNA

SEQ ID NO: 55212 - RNA, 21 nt, Synthetic Construct
  source 1..21: mol_type = other RNA
tcgtaccgtgagtaataatga

SEQ ID NO: 55213 - RNA, 35 nt, Synthetic Construct; identical to SEQ ID NO: 2567
  source 1..35: mol_type = other RNA

SEQ ID NO: 55214 - RNA, 35 nt, Synthetic Construct; identical to SEQ ID NO: 1160
  source 1..35: mol_type = other RNA

SEQ ID NO: 55215 - RNA, 35 nt, Synthetic Construct; identical to SEQ ID NO: 1160
  source 1..35: mol_type = other RNA

SEQ ID NO: 55216 - RNA, 23 nt, Synthetic Construct
  source 1..23: mol_type = other RNA
caaagtgccgttcgtgcaggtag

SEQ ID NO: 55217 - RNA, 22 nt, Synthetic Construct
  source 1..22: mol_type = other RNA
cattgcacttgtcccggcctgt

SEQ ID NO: 55218 - RNA, 22 nt, Synthetic Construct
  source 1..22: mol_type = other RNA
cattgcacttgtcccggcctgt

SEQ ID NO: 55219 - RNA, 23 nt, Synthetic Construct
  source 1..23: mol_type = other RNA
tgaggggaagagagcgagacttt

SEQ ID NO: 55220 - RNA, 15 nt, Synthetic Construct
  source 1..15: mol_type = other RNA
gggtgaaagcggggg

SEQ ID NO: 55221 - RNA, 23 nt, Synthetic Construct
  source 1..23: mol_type = other RNA
tgacctatgaattgacagccagt

SEQ ID NO: 55222 - RNA, 23 nt, Synthetic Construct
  source 1..23: mol_type = other RNA
tgacctatgaattgacagccagt

SEQ ID NO: 55223 - RNA, 22 nt, Synthetic Construct
  source 1..22: mol_type = other RNA
tgtcccacccccactcctgttt

SEQ ID NO: 55224 - RNA, 22 nt, Synthetic Construct
  source 1..22: mol_type = other RNA
tgtcccacccccactcctgttt

SEQ ID NO: 55225 - RNA, 23 nt, Synthetic Construct
  source 1..23: mol_type = other RNA
tccctggtggtctagtggttagg

SEQ ID NO: 55226 - RNA, 22 nt, Synthetic Construct
  source 1..22: mol_type = other RNA
cgaggtagtagtttgtgctgtt

SEQ ID NO: 55227 - RNA, 22 nt, Synthetic Construct
  source 1..22: mol_type = other RNA
cgaggtagtagtttgtgctgtt

SEQ ID NO: 55228 - RNA, 22 nt, Synthetic Construct
  source 1..22: mol_type = other RNA
tcctatactgagctgccccgag

SEQ ID NO: 55229 - RNA, 22 nt, Synthetic Construct
  source 1..22: mol_type = other RNA
tcctatactgagctgccccgag

SEQ ID NO: 55230 - RNA, 21 nt, Synthetic Construct
  source 1..21: mol_type = other RNA
tcctgtgctgagctgccccga

SEQ ID NO: 55231 - RNA, 21 nt, Synthetic Construct
  source 1..21: mol_type = other RNA
tcctgtgctgagctgccccga

SEQ ID NO: 55232 - RNA, 16 nt, Synthetic Construct
  source 1..16: mol_type = other RNA
gatctgtagctggtct

SEQ ID NO: 55233 - RNA, 22 nt, Synthetic Construct
  source 1..22: mol_type = other RNA
tattgcacttgtcccggcctgc

SEQ ID NO: 55234 - RNA, 23 nt, Synthetic Construct
  source 1..23: mol_type = other RNA
caaagagctgttcgtgcaggtag

SEQ ID NO: 55235 - RNA, 23 nt, Synthetic Construct
  source 1..23: mol_type = other RNA
caaagagctgttcgtgcaggtag

SEQ ID NO: 55236 - RNA, 18 nt, Synthetic Construct
  source 1..18: mol_type = other RNA
gcgaaattccttgtcggg

SEQ ID NO: 55237 - RNA, 18 nt, Synthetic Construct
  source 1..18: mol_type = other RNA
gcgaaattccttgtcggg

SEQ ID NO: 55238 - RNA, 21 nt, Synthetic Construct
  source 1..21: mol_type = other RNA
agcgtgcttgactgcgagact

SEQ ID NO: 55239 - RNA, 21 nt, Synthetic Construct
  source 1..21: mol_type = other RNA
agcgtgcttgactgcgagact

SEQ ID NO: 55240 - RNA, 20 nt, Synthetic Construct
  source 1..20: mol_type = other RNA
agaggtagtagtttgtgctg

SEQ ID NO: 55241 - RNA, 22 nt, Synthetic Construct
  source 1..22: mol_type = other RNA
tgaggtagtagtttgtgctgta

SEQ ID NO: 55242 - RNA, 18 nt, Synthetic Construct
  source 1..18: mol_type = other RNA
cgtgttcggaagattttc

SEQ ID NO: 55243 - RNA, 18 nt, Synthetic Construct
  source 1..18: mol_type = other RNA
cgtgttcggaagattttc

SEQ ID NO: 55244 - RNA, 29 nt, Synthetic Construct
  source 1..29: mol_type = other RNA
cgactcttagcggtggatcactcggctcg

SEQ ID NO: 55245 - RNA, 27 nt, Synthetic Construct
  source 1..27: mol_type = other RNA
cggtataccgaagctctaggtgcggca

SEQ ID NO: 55246 - RNA, 27 nt, Synthetic Construct
  source 1..27: mol_type = other RNA
cggtataccgaagctctaggtgcggca

SEQ ID NO: 55247 - RNA, 31 nt, Synthetic Construct; identical to SEQ ID NO: 960
  source 1..31: mol_type = other RNA

SEQ ID NO: 55248 - RNA, 20 nt, Synthetic Construct
  source 1..20: mol_type = other RNA
cgaggtagtaggttgtgtgg

SEQ ID NO: 55249 - RNA, 17 nt, Synthetic Construct
  source 1..17: mol_type = other RNA
ctaatgagactgccggt

SEQ ID NO: 55250 - RNA, 23 nt, Synthetic Construct
  source 1..23: mol_type = other RNA
tggtaatacgatgtacttagtgt

SEQ ID NO: 55251 - RNA, 23 nt, Synthetic Construct
  source 1..23: mol_type = other RNA
agcagcattgtacggggctatga

SEQ ID NO: 55252 - RNA, 23 nt, Synthetic Construct
  source 1..23: mol_type = other RNA
agcagcattgtacggggctatga

SEQ ID NO: 55253 - RNA, 24 nt, Synthetic Construct
  source 1..24: mol_type = other RNA
tgagaactgaattccatgggttgt

SEQ ID NO: 55254 - RNA, 24 nt, Synthetic Construct
  source 1..24: mol_type = other RNA
tgagaactgaattccatgggttgt

SEQ ID NO: 55255 - RNA, 21 nt, Synthetic Construct
  source 1..21: mol_type = other RNA
cggtcccaagggtatggctgt

SEQ ID NO: 55256 - RNA, 21 nt, Synthetic Construct
  source 1..21: mol_type = other RNA
tgaggtagcaggttgtatagt

SEQ ID NO: 55257 - RNA, 25 nt, Synthetic Construct
  source 1..25: mol_type = other RNA
ttgaggatatgagatagagacgaca

SEQ ID NO: 55258 - RNA, 25 nt, Synthetic Construct
  source 1..25: mol_type = other RNA
ttgaggatatgagatagagacgaca

SEQ ID NO: 55259 - RNA, 35 nt, Synthetic Construct; identical to SEQ ID NO: 3369
  source 1..35: mol_type = other RNA

SEQ ID NO: 55260 - RNA, 22 nt, Synthetic Construct
  source 1..22: mol_type = other RNA
tgaggtagtaggttgtgtgatt

SEQ ID NO: 55261 - RNA, 24 nt, Synthetic Construct
  source 1..24: mol_type = other RNA
tgtagacatccccgactggaagct

SEQ ID NO: 55262 - RNA, 24 nt, Synthetic Construct
  source 1..24: mol_type = other RNA
gggttgtaaaccgcttttgtcagg

SEQ ID NO: 55263 - RNA, 24 nt, Synthetic Construct
  source 1..24: mol_type = other RNA
tgtaaacatccccgactggaagtt

SEQ ID NO: 55264 - RNA, 20 nt, Synthetic Construct
  source 1..20: mol_type = other RNA
tgtcagtttgtcaaataccc

SEQ ID NO: 55265 - RNA, 20 nt, Synthetic Construct
  source 1..20: mol_type = other RNA
tgtcagtttgtcaaataccc

SEQ ID NO: 55266 - RNA, 27 nt, Synthetic Construct
  source 1..27: mol_type = other RNA
ccccccactgccaaatttgactggctt

SEQ ID NO: 55267 - RNA, 27 nt, Synthetic Construct
  source 1..27: mol_type = other RNA
ccccccactgccaaatttgactggctt

SEQ ID NO: 55268 - RNA, 24 nt, Synthetic Construct
  source 1..24: mol_type = other RNA
gggttgtaaaccgcttttgtcagg

SEQ ID NO: 55269 - RNA, 24 nt, Synthetic Construct
  source 1..24: mol_type = other RNA
gggttgtaaaccgcttttgtcagg

SEQ ID NO: 55270 - RNA, 24 nt, Synthetic Construct
  source 1..24: mol_type = other RNA
acctggcatacaatgtagatttct

SEQ ID NO: 55271 - RNA, 21 nt, Synthetic Construct
  source 1..21: mol_type = other RNA
tgaggtagtaggttgtacagt

SEQ ID NO: 55272 - RNA, 21 nt, Synthetic Construct
  source 1..21: mol_type = other RNA
ctagactgaagctccttgggg

SEQ ID NO: 55273 - RNA, 21 nt, Synthetic Construct
  source 1..21: mol_type = other RNA
ctagactgaagctccttgggg

SEQ ID NO: 55274 - RNA, 34 nt, Synthetic Construct; identical to SEQ ID NO: 2553
  source 1..34: mol_type = other RNA

SEQ ID NO: 55275 - RNA, 20 nt, Synthetic Construct
  source 1..20: mol_type = other RNA
gcgtgcttgactgcgagact

SEQ ID NO: 55276 - RNA, 20 nt, Synthetic Construct
  source 1..20: mol_type = other RNA
cccataaagtagaaagcact

SEQ ID NO: 55277 - RNA, 20 nt, Synthetic Construct
  source 1..20: mol_type = other RNA
cccataaagtagaaagcact

SEQ ID NO: 55278 - RNA, 23 nt, Synthetic Construct
  source 1..23: mol_type = other RNA
tggtaatacgacgtacttaatgt

SEQ ID NO: 55279 - RNA, 22 nt, Synthetic Construct
  source 1..22: mol_type = other RNA
tgaagtagtagtttgtgctgtt

SEQ ID NO: 55280 - RNA, 16 nt, Synthetic Construct
  source 1..16: mol_type = other RNA
gtctacggccatacca

SEQ ID NO: 55281 - RNA, 16 nt, Synthetic Construct
  source 1..16: mol_type = other RNA
gtctacggccatacca

SEQ ID NO: 55282 - RNA, 21 nt, Synthetic Construct
  source 1..21: mol_type = other RNA
tcccagtaaacggcggccgta

SEQ ID NO: 55283 - RNA, 23 nt, Synthetic Construct
  source 1..23: mol_type = other RNA
tgaggtagtgggttgtgtggttt

SEQ ID NO: 55284 - RNA, 22 nt, Synthetic Construct
  source 1..22: mol_type = other RNA
tgaggtagtaggttgtgaggtt

SEQ ID NO: 55285 - RNA, 22 nt, Synthetic Construct
  source 1..22: mol_type = other RNA
tgaggtagtaggttgtgaggtt

SEQ ID NO: 55286 - RNA, 15 nt, Synthetic Construct
  source 1..15: mol_type = other RNA
gtcaggatgttggct

SEQ ID NO: 55287 - RNA, 23 nt, Synthetic Construct
  source 1..23: mol_type = other RNA
tgaggtagtaggttgtgtggttt

SEQ ID NO: 55288 - RNA, 19 nt, Synthetic Construct
  source 1..19: mol_type = other RNA
aacagtcaggatgttggct

SEQ ID NO: 55289 - RNA, 19 nt, Synthetic Construct
  source 1..19: mol_type = other RNA
aacagtcaggatgttggct

SEQ ID NO: 55290 - RNA, 22 nt, Synthetic Construct
  source 1..22: mol_type = other RNA
tgaggaagtagattgtatagtt

SEQ ID NO: 55291 - RNA, 22 nt, Synthetic Construct
  source 1..22: mol_type = other RNA
tgaggaagtagattgtatagtt

SEQ ID NO: 55292 - RNA, 23 nt, Synthetic Construct
  source 1..23: mol_type = other RNA
gactcttagcggtggatcactcg

SEQ ID NO: 55293 - RNA, 23 nt, Synthetic Construct
  source 1..23: mol_type = other RNA
gactcttagcggtggatcactcg

SEQ ID NO: 55294 - RNA, 15 nt, Synthetic Construct
  source 1..15: mol_type = other RNA
gtccggatcgtagtc

SEQ ID NO: 55295 - RNA, 22 nt, Synthetic Construct
  source 1..22: mol_type = other RNA
tagcagcacgtaaatgttggcg

SEQ ID NO: 55296 - RNA, 22 nt, Synthetic Construct
  source 1..22: mol_type = other RNA
tagcagcacgtaaatgttggcg

SEQ ID NO: 55297 - RNA, 18 nt, Synthetic Construct
  source 1..18: mol_type = other RNA
cctgtaccgatcaatagt

SEQ ID NO: 55298 - RNA, 22 nt, Synthetic Construct
  source 1..22: mol_type = other RNA
tcctgtactgagctgccctgag

SEQ ID NO: 55299 - RNA, 22 nt, Synthetic Construct
  source 1..22: mol_type = other RNA
tatagcacttgtcccggcctgt

SEQ ID NO: 55300 - RNA, 23 nt, Synthetic Construct
  source 1..23: mol_type = other RNA
tcccgtactgagctgccccgagt

SEQ ID NO: 55301 - RNA, 25 nt, Synthetic Construct
  source 1..25: mol_type = other RNA
tgaggggcagagagcgagacttttt

SEQ ID NO: 55302 - RNA, 22 nt, Synthetic Construct
  source 1..22: mol_type = other RNA
taaggtagtagtttgtgctgtt

SEQ ID NO: 55303 - RNA, 22 nt, Synthetic Construct
  source 1..22: mol_type = other RNA
taaggtagtagtttgtgctgtt

SEQ ID NO: 55304 - RNA, 32 nt, Synthetic Construct; identical to SEQ ID NO: 1237
  source 1..32: mol_type = other RNA

SEQ ID NO: 55305 - RNA, 32 nt, Synthetic Construct; identical to SEQ ID NO: 1237
  source 1..32: mol_type = other RNA

SEQ ID NO: 55306 - RNA, 21 nt, Synthetic Construct
  source 1..21: mol_type = other RNA
tgaggtagtagattgtacagt

SEQ ID NO: 55307 - RNA, 15 nt, Synthetic Construct
  source 1..15: mol_type = other RNA
tcctgacggccatag

SEQ ID NO: 55308 - RNA, 15 nt, Synthetic Construct
  source 1..15: mol_type = other RNA
tcctgacggccatag

SEQ ID NO: 55309 - RNA, 20 nt, Synthetic Construct
  source 1..20: mol_type = other RNA
gctattgacgaccgtaccgc

SEQ ID NO: 55310 - RNA, 22 nt, Synthetic Construct
  source 1..22: mol_type = other RNA
tgaggtagtaatttgtgctgtt

SEQ ID NO: 55311 - RNA, 22 nt, Synthetic Construct
  source 1..22: mol_type = other RNA
tgaggtagtaatttgtgctgtt

SEQ ID NO: 55312 - RNA, 22 nt, Synthetic Construct
  source 1..22: mol_type = other RNA
cattgcacttgtctcagtctga

SEQ ID NO: 55313 - RNA, 22 nt, Synthetic Construct
  source 1..22: mol_type = other RNA
tgaggtagtagtttgtgttgtt

SEQ ID NO: 55314 - RNA, 22 nt, Synthetic Construct
  source 1..22: mol_type = other RNA
tgaggtagtagtttgtgttgtt

SEQ ID NO: 55315 - RNA, 21 nt, Synthetic Construct
  source 1..21: mol_type = other RNA
tgaggtagaaggttgtgtggt

SEQ ID NO: 55316 - RNA, 22 nt, Synthetic Construct
  source 1..22: mol_type = other RNA
tgaggtagtaggatgtatagtt

SEQ ID NO: 55317 - RNA, 22 nt, Synthetic Construct
  source 1..22: mol_type = other RNA
tgaggtagtaggatgtatagtt

SEQ ID NO: 55318 - RNA, 17 nt, Synthetic Construct
  source 1..17: mol_type = other RNA
cgtgagctgggtttaga

SEQ ID NO: 55319 - RNA, 17 nt, Synthetic Construct
  source 1..17: mol_type = other RNA
cgtgagctgggtttaga

SEQ ID NO: 55320 - RNA, 23 nt, Synthetic Construct
  source 1..23: mol_type = other RNA
tggtaatacgacgtactaagtgt

SEQ ID NO: 55321 - RNA, 22 nt, Synthetic Construct
  source 1..22: mol_type = other RNA
tgaggtagtagtctgtgctgtt

SEQ ID NO: 55322 - RNA, 22 nt, Synthetic Construct
  source 1..22: mol_type = other RNA
tgaggtagtagtctgtgctgtt

SEQ ID NO: 55323 - RNA, 23 nt, Synthetic Construct
  source 1..23: mol_type = other RNA
agcagcattgtacagggctatgg

SEQ ID NO: 55324 - RNA, 23 nt, Synthetic Construct
  source 1..23: mol_type = other RNA
agcagcattgtacagggctatgg

SEQ ID NO: 55325 - RNA, 27 nt, Synthetic Construct
  source 1..27: mol_type = other RNA
ccccccaatgctaaatttgactggctt

SEQ ID NO: 55326 - RNA, 22 nt, Synthetic Construct
  source 1..22: mol_type = other RNA
agaggtagtaggttgtgtggtt

SEQ ID NO: 55327 - RNA, 21 nt, Synthetic Construct
  source 1..21: mol_type = other RNA
gcagtagtctgcacattggtt

SEQ ID NO: 55328 - RNA, 21 nt, Synthetic Construct
  source 1..21: mol_type = other RNA
cgtaccgtgagtaataatgcg

SEQ ID NO: 55329 - RNA, 21 nt, Synthetic Construct
  source 1..21: mol_type = other RNA
cgtaccgtgagtaataatgcg

SEQ ID NO: 55330 - RNA, 23 nt, Synthetic Construct
  source 1..23: mol_type = other RNA
cattgcacttgtctcggtctgaa

SEQ ID NO: 55331 - RNA, 23 nt, Synthetic Construct
  source 1..23: mol_type = other RNA
cattgcacttgtctcggtctgaa

SEQ ID NO: 55332 - RNA, 23 nt, Synthetic Construct
  source 1..23: mol_type = other RNA
tgaggtggtaggttgtgtggttt

SEQ ID NO: 55333 - RNA, 23 nt, Synthetic Construct
  source 1..23: mol_type = other RNA
tgaggtggtaggttgtgtggttt

SEQ ID NO: 55334 - RNA, 16 nt, Synthetic Construct
  source 1..16: mol_type = other RNA
gctattgacgaccgta

SEQ ID NO: 55335 - RNA, 25 nt, Synthetic Construct
  source 1..25: mol_type = other RNA
ggtaaaatggctgagtgaagcattg

SEQ ID NO: 55336 - RNA, 25 nt, Synthetic Construct
  source 1..25: mol_type = other RNA
ggtaaaatggctgagtgaagcattg

SEQ ID NO: 55337 - RNA, 29 nt, Synthetic Construct
  source 1..29: mol_type = other RNA
cccgtgtgaaagtaggtcatcgtcaggct

SEQ ID NO: 55338 - RNA, 34 nt, Synthetic Construct; identical to SEQ ID NO: 35301
  source 1..34: mol_type = other RNA

SEQ ID NO: 55339 - RNA, 31 nt, Synthetic Construct; identical to SEQ ID NO: 2412
  source 1..31: mol_type = other RNA

SEQ ID NO: 55340 - RNA, 31 nt, Synthetic Construct; identical to SEQ ID NO: 2412
  source 1..31: mol_type = other RNA

SEQ ID NO: 55341 - RNA, 21 nt, Synthetic Construct
  source 1..21: mol_type = other RNA
tcctgtactgagctgccctga

SEQ ID NO: 55342 - RNA, 22 nt, Synthetic Construct
  source 1..22: mol_type = other RNA
cattgcacctgtctcggtctga

SEQ ID NO: 55343 - RNA, 22 nt, Synthetic Construct
  source 1..22: mol_type = other RNA
cattgcacctgtctcggtctga

SEQ ID NO: 55344 - RNA, 22 nt, Synthetic Construct
  source 1..22: mol_type = other RNA
tgaggtaataggttgtatagtt

SEQ ID NO: 55345 - RNA, 22 nt, Synthetic Construct
  source 1..22: mol_type = other RNA
tgaggtaataggttgtatagtt

SEQ ID NO: 55346 - RNA, 25 nt, Synthetic Construct
  source 1..25: mol_type = other RNA
ttggggatatgagatcgagacgaca

SEQ ID NO: 55347 - RNA, 25 nt, Synthetic Construct
  source 1..25: mol_type = other RNA
ttggggatatgagatcgagacgaca

SEQ ID NO: 55348 - RNA, 16 nt, Synthetic Construct
  source 1..16: mol_type = other RNA
cccaaaggtcgtcggt

SEQ ID NO: 55349 - RNA, 20 nt, Synthetic Construct
  source 1..20: mol_type = other RNA
tattgcacattactaagttg

SEQ ID NO: 55350 - RNA, 20 nt, Synthetic Construct
  source 1..20: mol_type = other RNA
tattgcacattactaagttg

SEQ ID NO: 55351 - RNA, 20 nt, Synthetic Construct
  source 1..20: mol_type = other RNA
tcagtagctcgaggaaaaga

SEQ ID NO: 55352 - RNA, 22 nt, Synthetic Construct
  source 1..22: mol_type = other RNA
attgcacttgtcccggcctgtt

SEQ ID NO: 55353 - RNA, 32 nt, Synthetic Construct; identical to SEQ ID NO: 4279
  source 1..32: mol_type = other RNA

SEQ ID NO: 55354 - RNA, 23 nt, Synthetic Construct
  source 1..23: mol_type = other RNA
aatgacacgatcactcccgttga

SEQ ID NO: 55355 - RNA, 23 nt, Synthetic Construct
  source 1..23: mol_type = other RNA
aatgacacgatcactcccgttga

SEQ ID NO: 55356 - RNA, 18 nt, Synthetic Construct
  source 1..18: mol_type = other RNA
agcaggacggtggccatg

SEQ ID NO: 55357 - RNA, 18 nt, Synthetic Construct
  source 1..18: mol_type = other RNA
agcaggacggtggccatg

SEQ ID NO: 55358 - RNA, 22 nt, Synthetic Construct
  source 1..22: mol_type = other RNA
tgaggtagtagtctgtgctgtt

SEQ ID NO: 55359 - RNA, 22 nt, Synthetic Construct
  source 1..22: mol_type = other RNA
tgaggtagtagtctgtgctgtt

SEQ ID NO: 55360 - RNA, 22 nt, Synthetic Construct
  source 1..22: mol_type = other RNA
tcctgcactgagctgccccgag

SEQ ID NO: 55361 - RNA, 22 nt, Synthetic Construct
  source 1..22: mol_type = other RNA
tcctgcactgagctgccccgag

SEQ ID NO: 55362 - RNA, 21 nt, Synthetic Construct
  source 1..21: mol_type = other RNA
tgaggtagtaggttgtgtggc

SEQ ID NO: 55363 - RNA, 32 nt, Synthetic Construct; identical to SEQ ID NO: 4734
  source 1..32: mol_type = other RNA

SEQ ID NO: 55364 - RNA, 32 nt, Synthetic Construct; identical to SEQ ID NO: 4734
  source 1..32: mol_type = other RNA

SEQ ID NO: 55365 - RNA, 23 nt, Synthetic Construct
  source 1..23: mol_type = other RNA
tggcagtgtcttagctggttgtt

SEQ ID NO: 55366 - RNA, 23 nt, Synthetic Construct
  source 1..23: mol_type = other RNA
tggcagtgtcttagctggttgtt

SEQ ID NO: 55367 - RNA, 23 nt, Synthetic Construct
  source 1..23: mol_type = other RNA
aaaccgttaccattactgagttt

SEQ ID NO: 55368 - RNA, 23 nt, Synthetic Construct
  source 1..23: mol_type = other RNA
aaaccgttaccattactgagttt

SEQ ID NO: 55369 - RNA, 19 nt, Synthetic Construct
  source 1..19: mol_type = other RNA
gcgccgatgatagtgcgga

SEQ ID NO: 55370 - RNA, 21 nt, Synthetic Construct
  source 1..21: mol_type = other RNA
tggggtagtaggttgtatagt

SEQ ID NO: 55371 - RNA, 17 nt, Synthetic Construct
  source 1..17: mol_type = other RNA
ctaatgagactgccggt

SEQ ID NO: 55372 - RNA, 17 nt, Synthetic Construct
  source 1..17: mol_type = other RNA
ctaatgagactgccggt

SEQ ID NO: 55373 - RNA, 19 nt, Synthetic Construct
  source 1..19: mol_type = other RNA
cacatgcaagtcgaacggt

SEQ ID NO: 55374 - RNA, 20 nt, Synthetic Construct
  source 1..20: mol_type = other RNA
agcagcattgtacagggcta

SEQ ID NO: 55375 - RNA, 20 nt, Synthetic Construct
  source 1..20: mol_type = other RNA
agcagcattgtacagggcta

SEQ ID NO: 55376 - RNA, 36 nt, Synthetic Construct; identical to SEQ ID NO: 6739
  source 1..36: mol_type = other RNA

SEQ ID NO: 55377 - RNA, 36 nt, Synthetic Construct; identical to SEQ ID NO: 6739
  source 1..36: mol_type = other RNA

SEQ ID NO: 55378 - RNA, 20 nt, Synthetic Construct
  source 1..20: mol_type = other RNA
tgaggtagtgggttgtatag

SEQ ID NO: 55379 - RNA, 21 nt, Synthetic Construct
  source 1..21: mol_type = other RNA
tggagtgcgacaatggtgttt

SEQ ID NO: 55380 - RNA, 21 nt, Synthetic Construct
  source 1..21: mol_type = other RNA
tggagtgcgacaatggtgttt

SEQ ID NO: 55381 - RNA, 31 nt, Synthetic Construct; identical to SEQ ID NO: 37496
  source 1..31: mol_type = other RNA

SEQ ID NO: 55382 - RNA, 31 nt, Synthetic Construct; identical to SEQ ID NO: 37496
  source 1..31: mol_type = other RNA

SEQ ID NO: 55383 - RNA, 22 nt, Synthetic Construct
  source 1..22: mol_type = other RNA
cccagtgctctgaatgtcaaag

SEQ ID NO: 55384 - RNA, 22 nt, Synthetic Construct
  source 1..22: mol_type = other RNA
cccagtgctctgaatgtcaaag

SEQ ID NO: 55385 - RNA, 21 nt, Synthetic Construct
  source 1..21: mol_type = other RNA
tgaggggcagggagcgagact

SEQ ID NO: 55386 - RNA, 21 nt, Synthetic Construct
  source 1..21: mol_type = other RNA
tgaggggcagggagcgagact

SEQ ID NO: 55387 - RNA, 22 nt, Synthetic Construct
  source 1..22: mol_type = other RNA
tgaggtagtagtttgtgatgtt

SEQ ID NO: 55388 - RNA, 22 nt, Synthetic Construct
  source 1..22: mol_type = other RNA
tgaggtagtagtttgtgatgtt

SEQ ID NO: 55389 - RNA, 24 nt, Synthetic Construct
  source 1..24: mol_type = other RNA
tcggatccgtctgagcttggcttt

SEQ ID NO: 55390 - RNA, 21 nt, Synthetic Construct
  source 1..21: mol_type = other RNA
taactccttaagcgaatctcc

SEQ ID NO: 55391 - RNA, 21 nt, Synthetic Construct
  source 1..21: mol_type = other RNA
taactccttaagcgaatctcc

SEQ ID NO: 55392 - RNA, 22 nt, Synthetic Construct
  source 1..22: mol_type = other RNA
tgaggtagtaggttgtagagtt

SEQ ID NO: 55393 - RNA, 22 nt, Synthetic Construct
  source 1..22: mol_type = other RNA
tgaggtagtaggttgtagagtt

SEQ ID NO: 55394 - RNA, 22 nt, Synthetic Construct
  source 1..22: mol_type = other RNA
tcctgtattgagctgccccgag

SEQ ID NO: 55395 - RNA, 22 nt, Synthetic Construct
  source 1..22: mol_type = other RNA
tcctgtattgagctgccccgag

SEQ ID NO: 55396 - RNA, 15 nt, Synthetic Construct
  source 1..15: mol_type = other RNA
ggtggctgtagctca

SEQ ID NO: 55397 - RNA, 22 nt, Synthetic Construct
  source 1..22: mol_type = other RNA
tgaggtagtaggttgcatagtt

SEQ ID NO: 55398 - RNA, 22 nt, Synthetic Construct
  source 1..22: mol_type = other RNA
tgaggtagtaggttgcatagtt

SEQ ID NO: 55399 - RNA, 24 nt, Synthetic Construct
  source 1..24: mol_type = other RNA
caaagtgctgttcgtgcaggtaga

SEQ ID NO: 55400 - RNA, 21 nt, Synthetic Construct
  source 1..21: mol_type = other RNA
actcggcgtggcgtcggtcgt

SEQ ID NO: 55401 - RNA, 21 nt, Synthetic Construct
  source 1..21: mol_type = other RNA
actcggcgtggcgtcggtcgt

SEQ ID NO: 55402 - RNA, 20 nt, Synthetic Construct
  source 1..20: mol_type = other RNA
agttctacagtccgacgatc

SEQ ID NO: 55403 - RNA, 20 nt, Synthetic Construct
  source 1..20: mol_type = other RNA
agttctacagtccgacgatc

SEQ ID NO: 55404 - RNA, 25 nt, Synthetic Construct
  source 1..25: mol_type = other RNA
ttgaggatatgagatcgggacgaca

SEQ ID NO: 55405 - RNA, 18 nt, Synthetic Construct
  source 1..18: mol_type = other RNA
cataaagtagaaagcact

SEQ ID NO: 55406 - RNA, 41 nt, Synthetic Construct; identical to SEQ ID NO: 1667
  source 1..41: mol_type = other RNA

SEQ ID NO: 55407 - RNA, 41 nt, Synthetic Construct; identical to SEQ ID NO: 1667
  source 1..41: mol_type = other RNA

SEQ ID NO: 55408 - RNA, 23 nt, Synthetic Construct
  source 1..23: mol_type = other RNA
caaagtgctgctcgtgcaggtag

SEQ ID NO: 55409 - RNA, 22 nt, Synthetic Construct
  source 1..22: mol_type = other RNA
tgaggtagtagtttgtgctgct

SEQ ID NO: 55410 - RNA, 22 nt, Synthetic Construct
  source 1..22: mol_type = other RNA
tgaggtagtagtttgtgctgct

SEQ ID NO: 55411 - RNA, 22 nt, Synthetic Construct
  source 1..22: mol_type = other RNA
tgaggtagtaggttgtatagtg

SEQ ID NO: 55412 - RNA, 22 nt, Synthetic Construct
  source 1..22: mol_type = other RNA
tgaggtagtaggttgtatagtg

SEQ ID NO: 55413 - RNA, 22 nt, Synthetic Construct
  source 1..22: mol_type = other RNA
cattgcacttgcctcggtctga

SEQ ID NO: 55414 - RNA, 22 nt, Synthetic Construct
  source 1..22: mol_type = other RNA
cattgcacttgcctcggtctga

SEQ ID NO: 55415 - RNA, 20 nt, Synthetic Construct
  source 1..20: mol_type = other RNA
tagcttatcagactgatgtt

SEQ ID NO: 55416 - RNA, 25 nt, Synthetic Construct
  source 1..25: mol_type = other RNA
ttgaggatacgagatcgagacgaca

SEQ ID NO: 55417 - RNA, 22 nt, Synthetic Construct
  source 1..22: mol_type = other RNA
tgaggtagtagatcgtatagtt

SEQ ID NO: 55418 - RNA, 22 nt, Synthetic Construct
  source 1..22: mol_type = other RNA
tgaggtagtagatcgtatagtt

SEQ ID NO: 55419 - RNA, 25 nt, Synthetic Construct
  source 1..25: mol_type = other RNA
ttgaggatatgagatcgggacgaca

SEQ ID NO: 55420 - RNA, 25 nt, Synthetic Construct
  source 1..25: mol_type = other RNA
ttgaggatatgagatcgggacgaca

SEQ ID NO: 55421 - RNA, 22 nt, Synthetic Construct
  source 1..22: mol_type = other RNA
cgaggtagtagtttgtgctgtt

SEQ ID NO: 55422 - RNA, 21 nt, Synthetic Construct
  source 1..21: mol_type = other RNA
tgaggggcagagagcgagact

SEQ ID NO: 55423 - RNA, 21 nt, Synthetic Construct
  source 1..21: mol_type = other RNA
tgaggggcagagagcgagact

SEQ ID NO: 55424 - RNA, 31 nt, Synthetic Construct; identical to SEQ ID NO: 32560
  source 1..31: mol_type = other RNA

SEQ ID NO: 55425 - RNA, 31 nt, Synthetic Construct; identical to SEQ ID NO: 32560
  source 1..31: mol_type = other RNA

SEQ ID NO: 55426 - RNA, 27 nt, Synthetic Construct
  source 1..27: mol_type = other RNA
ccccccaccgctaaatttgactggctt

SEQ ID NO: 55427 - RNA, 27 nt, Synthetic Construct
  source 1..27: mol_type = other RNA
ccccccaccgctaaatttgactggctt

SEQ ID NO: 55428 - RNA, 22 nt, Synthetic Construct
  source 1..22: mol_type = other RNA
agaggtagtaggttgtgtggtt

SEQ ID NO: 55429 - RNA, 22 nt, Synthetic Construct
  source 1..22: mol_type = other RNA
tcagcgccgatgatagtgcgga

SEQ ID NO: 55430 - RNA, 20 nt, Synthetic Construct
  source 1..20: mol_type = other RNA
tgaggtagtaggttgtgtga

SEQ ID NO: 55431 - RNA, 20 nt, Synthetic Construct
  source 1..20: mol_type = other RNA
tgaggtagtaggttgtgtga

SEQ ID NO: 55432 - RNA, 22 nt, Synthetic Construct
  source 1..22: mol_type = other RNA
ttcaagtaattcaggataggtc

SEQ ID NO: 55433 - RNA, 22 nt, Synthetic Construct
  source 1..22: mol_type = other RNA
ttcaagtaattcaggataggtc

SEQ ID NO: 55434 - RNA, 37 nt, Synthetic Construct; identical to SEQ ID NO: 2211
  source 1..37: mol_type = other RNA

SEQ ID NO: 55435 - RNA, 37 nt, Synthetic Construct; identical to SEQ ID NO: 2211
  source 1..37: mol_type = other RNA

SEQ ID NO: 55436 - RNA, 22 nt, Synthetic Construct
  source 1..22: mol_type = other RNA
aacggaatcccaaaagcagctg

SEQ ID NO: 55437 - RNA, 22 nt, Synthetic Construct
  source 1..22: mol_type = other RNA
aacggaatcccaaaagcagctg

SEQ ID NO: 55438 - RNA, 22 nt, Synthetic Construct
  source 1..22: mol_type = other RNA
tgaggtagtaggttgtataatt

SEQ ID NO: 55439 - RNA, 22 nt, Synthetic Construct
  source 1..22: mol_type = other RNA
tgaggtagtaggttgtataatt

SEQ ID NO: 55440 - RNA, 23 nt, Synthetic Construct
  source 1..23: mol_type = other RNA
ggaggggcagagagcgagacttt

SEQ ID NO: 55441 - RNA, 23 nt, Synthetic Construct
  source 1..23: mol_type = other RNA
ggaggggcagagagcgagacttt

SEQ ID NO: 55442 - RNA, 22 nt, Synthetic Construct
  source 1..22: mol_type = other RNA
tcgtaccgtgagtgataatgcg

SEQ ID NO: 55443 - RNA, 31 nt, Synthetic Construct; identical to SEQ ID NO: 2293
  source 1..31: mol_type = other RNA

SEQ ID NO: 55444 - RNA, 31 nt, Synthetic Construct; identical to SEQ ID NO: 2293
  source 1..31: mol_type = other RNA

SEQ ID NO: 55445 - RNA, 22 nt, Synthetic Construct
  source 1..22: mol_type = other RNA
tcagtagctcgaggaaaagaca

SEQ ID NO: 55446 - RNA, 22 nt, Synthetic Construct
  source 1..22: mol_type = other RNA
tgagatagtaggttgtatagtt

SEQ ID NO: 55447 - RNA, 15 nt, Synthetic Construct
  source 1..15: mol_type = other RNA
cagtgaaacgagtca

SEQ ID NO: 55448 - RNA, 15 nt, Synthetic Construct
  source 1..15: mol_type = other RNA
cagtgaaacgagtca

SEQ ID NO: 55449 - RNA, 23 nt, Synthetic Construct
  source 1..23: mol_type = other RNA
gcgtggtaggagagcgttctgta

SEQ ID NO: 55450 - RNA, 22 nt, Synthetic Construct
  source 1..22: mol_type = other RNA
tcctgtaccgagctgccccgag

SEQ ID NO: 55451 - RNA, 22 nt, Synthetic Construct
  source 1..22: mol_type = other RNA
tcctgtaccgagctgccccgag

SEQ ID NO: 55452 - RNA, 23 nt, Synthetic Construct
  source 1..23: mol_type = other RNA
tcagtgcatcacagaactttgtt

SEQ ID NO: 55453 - RNA, 23 nt, Synthetic Construct
  source 1..23: mol_type = other RNA
tcagtgcatcacagaactttgtt

SEQ ID NO: 55454 - RNA, 23 nt, Synthetic Construct
  source 1..23: mol_type = other RNA
tgagaggcagagagcgagacttt

SEQ ID NO: 55455 - RNA, 23 nt, Synthetic Construct
  source 1..23: mol_type = other RNA
tgagaggcagagagcgagacttt

SEQ ID NO: 55456 - RNA, 28 nt, Synthetic Construct
  source 1..28: mol_type = other RNA
cttctcactactgcacttgactagtctt

SEQ ID NO: 55457 - RNA, 24 nt, Synthetic Construct
  source 1..24: mol_type = other RNA
tgaggtagtaggttgtgtggttaa

SEQ ID NO: 55458 - RNA, 20 nt, Synthetic Construct
  source 1..20: mol_type = other RNA
tagcttatcagactgatgtt

SEQ ID NO: 55459 - RNA, 20 nt, Synthetic Construct
  source 1..20: mol_type = other RNA
tagcttatcagactgatgtt

SEQ ID NO: 55460 - RNA, 20 nt, Synthetic Construct
  source 1..20: mol_type = other RNA
tgaggaagtaggttgtatag

SEQ ID NO: 55461 - RNA, 20 nt, Synthetic Construct
  source 1..20: mol_type = other RNA
tgaggaagtaggttgtatag

SEQ ID NO: 55462 - RNA, 20 nt, Synthetic Construct
  source 1..20: mol_type = other RNA
ggtcccaagggtatggctgt

SEQ ID NO: 55463 - RNA, 15 nt, Synthetic Construct
  source 1..15: mol_type = other RNA
gtttgatcctggctc

SEQ ID NO: 55464 - RNA, 34 nt, Synthetic Construct; identical to SEQ ID NO: 1526
  source 1..34: mol_type = other RNA

SEQ ID NO: 55465 - RNA, 22 nt, Synthetic Construct
  source 1..22: mol_type = other RNA
tattgcacctgtcccggcctgt

SEQ ID NO: 55466 - RNA, 22 nt, Synthetic Construct
  source 1..22: mol_type = other RNA
tattgcacctgtcccggcctgt

SEQ ID NO: 55467 - RNA, 22 nt, Synthetic Construct
  source 1..22: mol_type = other RNA
tcgtaccgtaagtaataatgcg

SEQ ID NO: 55468 - RNA, 22 nt, Synthetic Construct
  source 1..22: mol_type = other RNA
tcgtaccgtaagtaataatgcg

SEQ ID NO: 55469 - RNA, 32 nt, Synthetic Construct; identical to SEQ ID NO: 2467
  source 1..32: mol_type = other RNA

SEQ ID NO: 55470 - RNA, 25 nt, Synthetic Construct
  source 1..25: mol_type = other RNA
ttgaggatatgagatcgagacgacg

SEQ ID NO: 55471 - RNA, 23 nt, Synthetic Construct
  source 1..23: mol_type = other RNA
caaagtgctgttcgtgcaagtag

SEQ ID NO: 55472 - RNA, 23 nt, Synthetic Construct
  source 1..23: mol_type = other RNA
caaagtgctgttcgtgcaagtag

SEQ ID NO: 55473 - RNA, 23 nt, Synthetic Construct
  source 1..23: mol_type = other RNA
ttccccttggggttgtaggacca

SEQ ID NO: 55474 - RNA, 23 nt, Synthetic Construct
  source 1..23: mol_type = other RNA
ttccccttggggttgtaggacca

SEQ ID NO: 55475 - RNA, 22 nt, Synthetic Construct
  source 1..22: mol_type = other RNA
tgaggaagtagtttgtgctgtt

SEQ ID NO: 55476 - RNA, 22 nt, Synthetic Construct
  source 1..22: mol_type = other RNA
tgaggaagtagtttgtgctgtt

SEQ ID NO: 55477 - RNA, 23 nt, Synthetic Construct
  source 1..23: mol_type = other RNA
caacggaatcccaagagcagctg

SEQ ID NO: 55478 - RNA, 21 nt, Synthetic Construct
  source 1..21: mol_type = other RNA
tgaggtagtagattgtgtggt

SEQ ID NO: 55479 - RNA, 21 nt, Synthetic Construct
  source 1..21: mol_type = other RNA
tgaggtagtagattgtgtggt

SEQ ID NO: 55480 - RNA, 21 nt, Synthetic Construct
  source 1..21: mol_type = other RNA
taactccttaagcgaatccgc

SEQ ID NO: 55481 - RNA, 21 nt, Synthetic Construct
  source 1..21: mol_type = other RNA
taactccttaagcgaatccgc

SEQ ID NO: 55482 - RNA, 25 nt, Synthetic Construct
  source 1..25: mol_type = other RNA
ttgaggatatgagatcgaggcgaca

SEQ ID NO: 55483 - RNA, 25 nt, Synthetic Construct
  source 1..25: mol_type = other RNA
ttgaggatatgagatcgaggcgaca

SEQ ID NO: 55484 - RNA, 22 nt, Synthetic Construct
  source 1..22: mol_type = other RNA
ngaggtagtaggttgtatagtt

SEQ ID NO: 55485 - RNA, 22 nt, Synthetic Construct
  source 1..22: mol_type = other RNA
ngaggtagtaggttgtatagtt

SEQ ID NO: 55486 - RNA, 18 nt, Synthetic Construct
  source 1..18: mol_type = other RNA
cccaaaggtcgtcggttc

SEQ ID NO: 55487 - RNA, 23 nt, Synthetic Construct
  source 1..23: mol_type = other RNA
tgaggaagtaggttgtgtggttt

SEQ ID NO: 55488 - RNA, 23 nt, Synthetic Construct
  source 1..23: mol_type = other RNA
tgaggaagtaggttgtgtggttt

SEQ ID NO: 55489 - RNA, 23 nt, Synthetic Construct
  source 1..23: mol_type = other RNA
taccctgtagatccgaatttgtg

SEQ ID NO: 55490 - RNA, 22 nt, Synthetic Construct
  source 1..22: mol_type = other RNA
tcctgcactgagctgccccgag

SEQ ID NO: 55491 - RNA, 22 nt, Synthetic Construct
  source 1..22: mol_type = other RNA
aagcttatcagactgatgttga

SEQ ID NO: 55492 - RNA, 22 nt, Synthetic Construct
  source 1..22: mol_type = other RNA
tcctgtgctgagctgccccgag

SEQ ID NO: 55493 - RNA, 18 nt, Synthetic Construct
  source 1..18: mol_type = other RNA
gctattgacgaccgtacc

SEQ ID NO: 55494 - RNA, 23 nt, Synthetic Construct
  source 1..23: mol_type = other RNA
taaggtgcatctagtgcagatag

SEQ ID NO: 55495 - RNA, 24 nt, Synthetic Construct
  source 1..24: mol_type = other RNA
tgtagacatccccgactggaagct

SEQ ID NO: 55496 - RNA, 24 nt, Synthetic Construct
  source 1..24: mol_type = other RNA
tgtagacatccccgactggaagct

SEQ ID NO: 55497 - RNA, 21 nt, Synthetic Construct
  source 1..21: mol_type = other RNA
ctagactgaggctccttgagg

SEQ ID NO: 55498 - RNA, 21 nt, Synthetic Construct
  source 1..21: mol_type = other RNA
ctagactgaggctccttgagg

SEQ ID NO: 55499 - RNA, 22 nt, Synthetic Construct
  source 1..22: mol_type = other RNA
tagcagcacgtaaatataggcg

SEQ ID NO: 55500 - RNA, 22 nt, Synthetic Construct
  source 1..22: mol_type = other RNA
tagcagcacgtaaatataggcg

SEQ ID NO: 55501 - RNA, 22 nt, Synthetic Construct
  source 1..22: mol_type = other RNA
tgaggtagtaggttgaatagtt

SEQ ID NO: 55502 - RNA, 22 nt, Synthetic Construct
  source 1..22: mol_type = other RNA
tagcagcacgtaaatactggcg

SEQ ID NO: 55503 - RNA, 22 nt, Synthetic Construct
  source 1..22: mol_type = other RNA
tagcagcacgtaaatactggcg

SEQ ID NO: 55504 - RNA, 16 nt, Synthetic Construct
  source 1..16: mol_type = other RNA
tcagtagctcgaggaa

SEQ ID NO: 55505 - RNA, 23 nt, Synthetic Construct
  source 1..23: mol_type = other RNA
tggctcagttcagcaggaacagt

SEQ ID NO: 55506 - RNA, 23 nt, Synthetic Construct
  source 1..23: mol_type = other RNA
tggctcagttcagcaggaacagt

SEQ ID NO: 55507 - RNA, 22 nt, Synthetic Construct
  source 1..22: mol_type = other RNA
tattgcatttgtcccggcctgt

SEQ ID NO: 55508 - RNA, 22 nt, Synthetic Construct
  source 1..22: mol_type = other RNA
tattgcatttgtcccggcctgt

SEQ ID NO: 55509 - RNA, 21 nt, Synthetic Construct
  source 1..21: mol_type = other RNA
tgaggtagtagattgtatggt

SEQ ID NO: 55510 - RNA, 22 nt, Synthetic Construct
  source 1..22: mol_type = other RNA
tgaggtagcagtttgtgctgtt

SEQ ID NO: 55511 - RNA, 22 nt, Synthetic Construct
  source 1..22: mol_type = other RNA
tgaggtagcagtttgtgctgtt

SEQ ID NO: 55512 - RNA, 35 nt, Synthetic Construct; identical to SEQ ID NO: 730
  source 1..35: mol_type = other RNA

SEQ ID NO: 55513 - RNA, 35 nt, Synthetic Construct; identical to SEQ ID NO: 730
  source 1..35: mol_type = other RNA

SEQ ID NO: 55514 - RNA, 16 nt, Synthetic Construct
  source 1..16: mol_type = other RNA
ttaatccagccagtcc

SEQ ID NO: 55515 - RNA, 16 nt, Synthetic Construct
  source 1..16: mol_type = other RNA
ttaatccagccagtcc

SEQ ID NO: 55516 - RNA, 20 nt, Synthetic Construct
  source 1..20: mol_type = other RNA
tgaagtagtaggttgtgtgg

SEQ ID NO: 55517 - RNA, 22 nt, Synthetic Construct
  source 1..22: mol_type = other RNA
tcctgtactgagctgccctgag

SEQ ID NO: 55518 - RNA, 23 nt, Synthetic Construct
  source 1..23: mol_type = other RNA
cccagtgttcagactacctgttc

SEQ ID NO: 55519 - RNA, 23 nt, Synthetic Construct
  source 1..23: mol_type = other RNA
cccagtgttcagactacctgttc

SEQ ID NO: 55520 - RNA, 22 nt, Synthetic Construct
  source 1..22: mol_type = other RNA
tcttgtactgagctgccccgag

SEQ ID NO: 55521 - RNA, 22 nt, Synthetic Construct
  source 1..22: mol_type = other RNA
tcttgtactgagctgccccgag

SEQ ID NO: 55522 - RNA, 25 nt, Synthetic Construct
  source 1..25: mol_type = other RNA
tgtcagtttgtcaaataccccaatt

SEQ ID NO: 55523 - RNA, 25 nt, Synthetic Construct
  source 1..25: mol_type = other RNA
tgtcagtttgtcaaataccccaatt

SEQ ID NO: 55524 - RNA, 22 nt, Synthetic Construct
  source 1..22: mol_type = other RNA
tattgcacttgtcccggcctgc

SEQ ID NO: 55525 - RNA, 22 nt, Synthetic Construct
  source 1..22: mol_type = other RNA
tattgcacttgtcccggcctgc

SEQ ID NO: 55526 - RNA, 23 nt, Synthetic Construct
  source 1..23: mol_type = other RNA
tgaggtagtagtttgtgctgtta

SEQ ID NO: 55527 - RNA, 22 nt, Synthetic Construct
  source 1..22: mol_type = other RNA
tgaggtagtagtttgtgctggt

SEQ ID NO: 55528 - RNA, 22 nt, Synthetic Construct
  source 1..22: mol_type = other RNA
tgaggtagtagtttgtgctggt

SEQ ID NO: 55529 - RNA, 23 nt, Synthetic Construct
  source 1..23: mol_type = other RNA
tgacctatgaattgacagccagt

SEQ ID NO: 55530 - RNA, 23 nt, Synthetic Construct
  source 1..23: mol_type = other RNA
tgacctatgaattgacagccagt

SEQ ID NO: 55531 - RNA, 23 nt, Synthetic Construct
  source 1..23: mol_type = other RNA
tcttggagtaggtcattgggtgg

SEQ ID NO: 55532 - RNA, 23 nt, Synthetic Construct
  source 1..23: mol_type = other RNA
tcttggagtaggtcattgggtgg

SEQ ID NO: 55533 - RNA, 15 nt, Synthetic Construct
  source 1..15: mol_type = other RNA
aaattccttgtcggg

SEQ ID NO: 55534 - RNA, 23 nt, Synthetic Construct
  source 1..23: mol_type = other RNA
tgaggtagtaggttgtgtggtct

SEQ ID NO: 55535 - RNA, 23 nt, Synthetic Construct
  source 1..23: mol_type = other RNA
tgaggtagtaggttgtgtggtct

SEQ ID NO: 55536 - RNA, 22 nt, Synthetic Construct
  source 1..22: mol_type = other RNA
tgaggtagtgggttgtatagtt

SEQ ID NO: 55537 - RNA, 21 nt, Synthetic Construct
  source 1..21: mol_type = other RNA
tgaggtagtagattgtatggt

SEQ ID NO: 55538 - RNA, 21 nt, Synthetic Construct
  source 1..21: mol_type = other RNA
tgaggtagtagattgtatggt

SEQ ID NO: 55539 - RNA, 23 nt, Synthetic Construct
  source 1..23: mol_type = other RNA
agaggtagtaggttgtgtggttt

SEQ ID NO: 55540 - RNA, 22 nt, Synthetic Construct
  source 1..22: mol_type = other RNA
tagcagcacgtaagtattggcg

SEQ ID NO: 55541 - RNA, 22 nt, Synthetic Construct
  source 1..22: mol_type = other RNA
tagcagcacgtaagtattggcg

SEQ ID NO: 55542 - RNA, 31 nt, Synthetic Construct; identical to SEQ ID NO: 2293
  source 1..31: mol_type = other RNA

SEQ ID NO: 55543 - RNA, 24 nt, Synthetic Construct
  source 1..24: mol_type = other RNA
tgtaaacatccccgactggaagtt

SEQ ID NO: 55544 - RNA, 19 nt, Synthetic Construct
  source 1..19: mol_type = other RNA
cctgtctgaatatgggggg

SEQ ID NO: 55545 - RNA, 19 nt, Synthetic Construct
  source 1..19: mol_type = other RNA
cctgtctgaatatgggggg

SEQ ID NO: 55546 - RNA, 23 nt, Synthetic Construct
  source 1..23: mol_type = other RNA
tcctgtactgggctgccccgaga

SEQ ID NO: 55547 - RNA, 22 nt, Synthetic Construct
  source 1..22: mol_type = other RNA
tattgcacttgtcccggtctgt

SEQ ID NO: 55548 - RNA, 22 nt, Synthetic Construct
  source 1..22: mol_type = other RNA
tattgcacttgtcccggtctgt

SEQ ID NO: 55549 - RNA, 21 nt, Synthetic Construct
  source 1..21: mol_type = other RNA
taactccttaagcgaatctcg

SEQ ID NO: 55550 - RNA, 21 nt, Synthetic Construct
  source 1..21: mol_type = other RNA
taactccttaagcgaatctcg

SEQ ID NO: 55551 - RNA, 23 nt, Synthetic Construct
  source 1..23: mol_type = other RNA
tgaggtagtaggctgtgtggttt

SEQ ID NO: 55552 - RNA, 22 nt, Synthetic Construct
  source 1..22: mol_type = other RNA
tcctgtactaagctgccccgag

SEQ ID NO: 55553 - RNA, 22 nt, Synthetic Construct
  source 1..22: mol_type = other RNA
tggagtgtgacaatggtgcttg

SEQ ID NO: 55554 - RNA, 22 nt, Synthetic Construct
  source 1..22: mol_type = other RNA
tggagtgtgacaatggtgcttg

SEQ ID NO: 55555 - RNA, 22 nt, Synthetic Construct
  source 1..22: mol_type = other RNA
tggctcagttcagcaggaacag

SEQ ID NO: 55556 - RNA, 21 nt, Synthetic Construct
  source 1..21: mol_type = other RNA
tgaggtagtagattgtgtagt

SEQ ID NO: 55557 - RNA, 21 nt, Synthetic Construct
  source 1..21: mol_type = other RNA
tgaggtagtagattgtgtagt

SEQ ID NO: 55558 - RNA, 24 nt, Synthetic Construct
  source 1..24: mol_type = other RNA
gaggtgtagaataggtgggagctt

SEQ ID NO: 55559 - RNA, 26 nt, Synthetic Construct
  source 1..26: mol_type = other RNA
tgtccccgcgaggggcccggggcggg

SEQ ID NO: 55560 - RNA, 26 nt, Synthetic Construct
  source 1..26: mol_type = other RNA
tgtccccgcgaggggcccggggcggg

SEQ ID NO: 55561 - RNA, 23 nt, Synthetic Construct
  source 1..23: mol_type = other RNA
tcctgtactgagctgccccggga

SEQ ID NO: 55562 - RNA, 23 nt, Synthetic Construct
  source 1..23: mol_type = other RNA
tcctgtactgagctgccccggga

SEQ ID NO: 55563 - RNA, 23 nt, Synthetic Construct
  source 1..23: mol_type = other RNA
tggtaataagacgtacttagtgt

SEQ ID NO: 55564 - RNA, 20 nt, Synthetic Construct
  source 1..20: mol_type = other RNA
tgaggtagtaggttgtgagg

SEQ ID NO: 55565 - RNA, 20 nt, Synthetic Construct
  source 1..20: mol_type = other RNA
tgaggtagtaggttgtgagg

SEQ ID NO: 55566 - RNA, 33 nt, Synthetic Construct; identical to SEQ ID NO: 1982
  source 1..33: mol_type = other RNA

SEQ ID NO: 55567 - RNA, 33 nt, Synthetic Construct; identical to SEQ ID NO: 1982
  source 1..33: mol_type = other RNA

SEQ ID NO: 55568 - RNA, 21 nt, Synthetic Construct
  source 1..21: mol_type = other RNA
tagcagcacgtaatattggcg

SEQ ID NO: 55569 - RNA, 20 nt, Synthetic Construct
  source 1..20: mol_type = other RNA
gcgtgcttgactgcgagact

SEQ ID NO: 55570 - RNA, 20 nt, Synthetic Construct
  source 1..20: mol_type = other RNA
gcgtgcttgactgcgagact

SEQ ID NO: 55571 - RNA, 23 nt, Synthetic Construct
  source 1..23: mol_type = other RNA
caaagtgctgtccgtgcaggtag

SEQ ID NO: 55572 - RNA, 21 nt, Synthetic Construct
  source 1..21: mol_type = other RNA
tgaggtagtagattgtacagt

SEQ ID NO: 55573 - RNA, 21 nt, Synthetic Construct
  source 1..21: mol_type = other RNA
tgaggtagtagattgtacagt

SEQ ID NO: 55574 - RNA, 26 nt, Synthetic Construct
  source 1..26: mol_type = other RNA
agggctgggtcggtcgggctggggcg

SEQ ID NO: 55575 - RNA, 26 nt, Synthetic Construct
  source 1..26: mol_type = other RNA
agggctgggtcggtcgggctggggcg

SEQ ID NO: 55576 - RNA, 22 nt, Synthetic Construct
  source 1..22: mol_type = other RNA
tcctgtgctgagctgccccgag

SEQ ID NO: 55577 - RNA, 23 nt, Synthetic Construct
  source 1..23: mol_type = other RNA
tgaagggcagagagcgagacttt

SEQ ID NO: 55578 - RNA, 23 nt, Synthetic Construct
  source 1..23: mol_type = other RNA
tgaagggcagagagcgagacttt

SEQ ID NO: 55579 - RNA, 16 nt, Synthetic Construct
  source 1..16: mol_type = other RNA
caggacggtggccatg

SEQ ID NO: 55580 - RNA, 23 nt, Synthetic Construct
  source 1..23: mol_type = other RNA
gactcttagcggtggatcactcg

SEQ ID NO: 55581 - RNA, 23 nt, Synthetic Construct
  source 1..23: mol_type = other RNA
gactcttagcggtggatcactcg

SEQ ID NO: 55582 - RNA, 16 nt, Synthetic Construct
  source 1..16: mol_type = other RNA
tagggaacgtgagctg

SEQ ID NO: 55583 - RNA, 22 nt, Synthetic Construct
  source 1..22: mol_type = other RNA
tcgaatccgagtcacggcacca

SEQ ID NO: 55584 - RNA, 22 nt, Synthetic Construct
  source 1..22: mol_type = other RNA
tcttgtactgagctgccccgag

SEQ ID NO: 55585 - RNA, 23 nt, Synthetic Construct
  source 1..23: mol_type = other RNA
atcacattgccagggatttccaa

SEQ ID NO: 55586 - RNA, 25 nt, Synthetic Construct
  source 1..25: mol_type = other RNA
aaaccgttaccattactgagtttag

SEQ ID NO: 55587 - RNA, 22 nt, Synthetic Construct
  source 1..22: mol_type = other RNA
tcctgtactgagctaccccgag

SEQ ID NO: 55588 - RNA, 24 nt, Synthetic Construct
  source 1..24: mol_type = other RNA
tcctgtactgagctgccccgagat

SEQ ID NO: 55589 - RNA, 18 nt, Synthetic Construct
  source 1..18: mol_type = other RNA
cagcactctgcaaagacg

SEQ ID NO: 55590 - RNA, 18 nt, Synthetic Construct
  source 1..18: mol_type = other RNA
cagcactctgcaaagacg

SEQ ID NO: 55591 - RNA, 22 nt, Synthetic Construct
  source 1..22: mol_type = other RNA
tgaggtagtagtttgtgcagtt

SEQ ID NO: 55592 - RNA, 22 nt, Synthetic Construct
  source 1..22: mol_type = other RNA
tgaggtagtagtttgtgcagtt

SEQ ID NO: 55593 - RNA, 22 nt, Synthetic Construct
  source 1..22: mol_type = other RNA
tagcagcacgtaaacattggcg

SEQ ID NO: 55594 - RNA, 22 nt, Synthetic Construct
  source 1..22: mol_type = other RNA
tagcagcacgtaaacattggcg

SEQ ID NO: 55595 - RNA, 16 nt, Synthetic Construct
  source 1..16: mol_type = other RNA
aggtcatcattatctg

SEQ ID NO: 55596 - RNA, 16 nt, Synthetic Construct
  source 1..16: mol_type = other RNA
aggtcatcattatctg

SEQ ID NO: 55597 - RNA, 18 nt, Synthetic Construct
  source 1..18: mol_type = other RNA
ttctacagtccgacgatc

SEQ ID NO: 55598 - RNA, 18 nt, Synthetic Construct
  source 1..18: mol_type = other RNA
ttctacagtccgacgatc

SEQ ID NO: 55599 - RNA, 20 nt, Synthetic Construct
  source 1..20: mol_type = other RNA
tgaggaagtaggttgtatag

SEQ ID NO: 55600 - RNA, 20 nt, Synthetic Construct
  source 1..20: mol_type = other RNA
tgaggaagtaggttgtatag

SEQ ID NO: 55601 - RNA, 21 nt, Synthetic Construct
  source 1..21: mol_type = other RNA
tccagtactgagctgccccga

SEQ ID NO: 55602 - RNA, 37 nt, Synthetic Construct; identical to SEQ ID NO: 2447
  source 1..37: mol_type = other RNA

SEQ ID NO: 55603 - RNA, 37 nt, Synthetic Construct; identical to SEQ ID NO: 2447
  source 1..37: mol_type = other RNA

SEQ ID NO: 55604 - RNA, 25 nt, Synthetic Construct
  source 1..25: mol_type = other RNA
ttgaggatatgagatcgagacggca

SEQ ID NO: 55605 - RNA, 27 nt, Synthetic Construct
  source 1..27: mol_type = other RNA
ccccccactgctaaatttgaccggctt

SEQ ID NO: 55606 - RNA, 15 nt, Synthetic Construct
  source 1..15: mol_type = other RNA
acggtcctaaggtag

SEQ ID NO: 55607 - RNA, 17 nt, Synthetic Construct
  source 1..17: mol_type = other RNA
agtccggatcgtagtct

SEQ ID NO: 55608 - RNA, 17 nt, Synthetic Construct
  source 1..17: mol_type = other RNA
agtccggatcgtagtct

SEQ ID NO: 55609 - RNA, 21 nt, Synthetic Construct
  source 1..21: mol_type = other RNA
tgtagtgtttcctactttatg

SEQ ID NO: 55610 - RNA, 21 nt, Synthetic Construct
  source 1..21: mol_type = other RNA
tgtagtgtttcctactttatg

SEQ ID NO: 55611 - RNA, 21 nt, Synthetic Construct
  source 1..21: mol_type = other RNA
tgaggtagtaggttgtatagc

SEQ ID NO: 55612 - RNA, 21 nt, Synthetic Construct
  source 1..21: mol_type = other RNA
tgaggtagtaggttgtatagc

SEQ ID NO: 55613 - RNA, 33 nt, Synthetic Construct; identical to SEQ ID NO: 7224
  source 1..33: mol_type = other RNA

SEQ ID NO: 55614 - RNA, 33 nt, Synthetic Construct; identical to SEQ ID NO: 7224
  source 1..33: mol_type = other RNA

SEQ ID NO: 55615 - RNA, 28 nt, Synthetic Construct
  source 1..28: mol_type = other RNA
ccccccactgctaaatttgactggcctt

SEQ ID NO: 55616 - RNA, 28 nt, Synthetic Construct
  source 1..28: mol_type = other RNA
ccccccactgctaaatttgactggcctt

SEQ ID NO: 55617 - RNA, 27 nt, Synthetic Construct
  source 1..27: mol_type = other RNA
ccccccactgctaaatttaactggctt

SEQ ID NO: 55618 - RNA, 22 nt, Synthetic Construct
  source 1..22: mol_type = other RNA
caatgcacttgtctcggtctga

SEQ ID NO: 55619 - RNA, 16 nt, Synthetic Construct
  source 1..16: mol_type = other RNA
gtctacggccatacaa

SEQ ID NO: 55620 - RNA, 27 nt, Synthetic Construct
  source 1..27: mol_type = other RNA
ccctccactgctaaatttgactggctt

SEQ ID NO: 55621 - RNA, 27 nt, Synthetic Construct
  source 1..27: mol_type = other RNA
ccctccactgctaaatttgactggctt

SEQ ID NO: 55622 - RNA, 16 nt, Synthetic Construct
  source 1..16: mol_type = other RNA
atctacggccatacca

SEQ ID NO: 55623 - RNA, 16 nt, Synthetic Construct
  source 1..16: mol_type = other RNA
atctacggccatacca

SEQ ID NO: 55624 - RNA, 22 nt, Synthetic Construct
  source 1..22: mol_type = other RNA
tgaggtagcagattgtatagtt

SEQ ID NO: 55625 - RNA, 22 nt, Synthetic Construct
  source 1..22: mol_type = other RNA
tgaggtagcagattgtatagtt

SEQ ID NO: 55626 - RNA, 24 nt, Synthetic Construct
  source 1..24: mol_type = other RNA
ttaatgctaatcgtgataggggtt

SEQ ID NO: 55627 - RNA, 25 nt, Synthetic Construct
  source 1..25: mol_type = other RNA
tgcgagagtaggacgttgccaggtt

SEQ ID NO: 55628 - RNA, 25 nt, Synthetic Construct
  source 1..25: mol_type = other RNA
tgcgagagtaggacgttgccaggtt

SEQ ID NO: 55629 - RNA, 22 nt, Synthetic Construct
  source 1..22: mol_type = other RNA
tagcatatcgagcctgagaaca

SEQ ID NO: 55630 - RNA, 22 nt, Synthetic Construct
  source 1..22: mol_type = other RNA
tagcatatcgagcctgagaaca

SEQ ID NO: 55631 - RNA, 17 nt, Synthetic Construct
  source 1..17: mol_type = other RNA
tgccagcagccgcggta

SEQ ID NO: 55632 - RNA, 21 nt, Synthetic Construct
  source 1..21: mol_type = other RNA
tgaggtagtaggttgtatagc

SEQ ID NO: 55633 - RNA, 20 nt, Synthetic Construct
  source 1..20: mol_type = other RNA
cggcggggacggcgattggt

SEQ ID NO: 55634 - RNA, 20 nt, Synthetic Construct
  source 1..20: mol_type = other RNA
cggcggggacggcgattggt

SEQ ID NO: 55635 - RNA, 22 nt, Synthetic Construct
  source 1..22: mol_type = other RNA
tattgcacttgtcccggcctgc

SEQ ID NO: 55636 - RNA, 22 nt, Synthetic Construct
  source 1..22: mol_type = other RNA
aatgacacgatcactcccgttg

SEQ ID NO: 55637 - RNA, 22 nt, Synthetic Construct
  source 1..22: mol_type = other RNA
aatgacacgatcactcccgttg

SEQ ID NO: 55638 - RNA, 22 nt, Synthetic Construct
  source 1..22: mol_type = other RNA
tgagatagtagtttgtgctgtt

SEQ ID NO: 55639 - RNA, 22 nt, Synthetic Construct
  source 1..22: mol_type = other RNA
tgagatagtagtttgtgctgtt

SEQ ID NO: 55640 - RNA, 26 nt, Synthetic Construct
  source 1..26: mol_type = other RNA
gcgggcgtagctcaggggtagagcgc

SEQ ID NO: 55641 - RNA, 26 nt, Synthetic Construct
  source 1..26: mol_type = other RNA
gcgggcgtagctcaggggtagagcgc

SEQ ID NO: 55642 - RNA, 22 nt, Synthetic Construct
  source 1..22: mol_type = other RNA
cgactggtaactgggatgaagt

SEQ ID NO: 55643 - RNA, 22 nt, Synthetic Construct
  source 1..22: mol_type = other RNA
cgactggtaactgggatgaagt

SEQ ID NO: 55644 - RNA, 16 nt, Synthetic Construct
  source 1..16: mol_type = other RNA
tgcacgaaagcgtggg

SEQ ID NO: 55645 - RNA, 16 nt, Synthetic Construct
  source 1..16: mol_type = other RNA
tgcacgaaagcgtggg

SEQ ID NO: 55646 - RNA, 23 nt, Synthetic Construct
  source 1..23: mol_type = other RNA
caaaagtaattgcggtctttggt

SEQ ID NO: 55647 - RNA, 23 nt, Synthetic Construct
  source 1..23: mol_type = other RNA
caaaagtaattgcggtctttggt

SEQ ID NO: 55648 - RNA, 23 nt, Synthetic Construct
  source 1..23: mol_type = other RNA
caacggaaccccaaaagcagctg

SEQ ID NO: 55649 - RNA, 37 nt, Synthetic Construct; identical to SEQ ID NO: 2447
  source 1..37: mol_type = other RNA

SEQ ID NO: 55650 - RNA, 37 nt, Synthetic Construct; identical to SEQ ID NO: 2447
  source 1..37: mol_type = other RNA

SEQ ID NO: 55651 - RNA, 36 nt, Synthetic Construct; identical to SEQ ID NO: 3596
  source 1..36: mol_type = other RNA

SEQ ID NO: 55652 - RNA, 36 nt, Synthetic Construct; identical to SEQ ID NO: 3596
  source 1..36: mol_type = other RNA

SEQ ID NO: 55653 - RNA, 32 nt, Synthetic Construct; identical to SEQ ID NO: 4509
  source 1..32: mol_type = other RNA

SEQ ID NO: 55654 - RNA, 32 nt, Synthetic Construct; identical to SEQ ID NO: 4509
  source 1..32: mol_type = other RNA

SEQ ID NO: 55655 - RNA, 21 nt, Synthetic Construct
  source 1..21: mol_type = other RNA
tgaggggcagagagcgagaca

SEQ ID NO: 55656 - RNA, 21 nt, Synthetic Construct
  source 1..21: mol_type = other RNA
tgaggggcagagagcgagaca

SEQ ID NO: 55657 - RNA, 22 nt, Synthetic Construct
  source 1..22: mol_type = other RNA
tcgaaccgtgagtaataatgcg

SEQ ID NO: 55658 - RNA, 27 nt, Synthetic Construct
  source 1..27: mol_type = other RNA
ccgtgtgaaagtaggtcatcgtcaggc

SEQ ID NO: 55659 - RNA, 27 nt, Synthetic Construct
  source 1..27: mol_type = other RNA
ccgtgtgaaagtaggtcatcgtcaggc

SEQ ID NO: 55660 - RNA, 18 nt, Synthetic Construct
  source 1..18: mol_type = other RNA
ctaatgagactgccggtg

SEQ ID NO: 55661 - RNA, 15 nt, Synthetic Construct
  source 1..15: mol_type = other RNA
gagagcctggacaca

SEQ ID NO: 55662 - RNA, 21 nt, Synthetic Construct
  source 1..21: mol_type = other RNA
tggggggcagagagcgagact

SEQ ID NO: 55663 - RNA, 21 nt, Synthetic Construct
  source 1..21: mol_type = other RNA
tggggggcagagagcgagact

SEQ ID NO: 55664 - RNA, 22 nt, Synthetic Construct
  source 1..22: mol_type = other RNA
cattgcacttgtcccggtctga

SEQ ID NO: 55665 - RNA, 22 nt, Synthetic Construct
  source 1..22: mol_type = other RNA
tcgtaccgtgagtaataacgcg

SEQ ID NO: 55666 - RNA, 22 nt, Synthetic Construct
  source 1..22: mol_type = other RNA
tcgtaccgtgagtaataacgcg

SEQ ID NO: 55667 - RNA, 22 nt, Synthetic Construct
  source 1..22: mol_type = other RNA
tgaggtagtagaatgtatagtt

SEQ ID NO: 55668 - RNA, 22 nt, Synthetic Construct
  source 1..22: mol_type = other RNA
tgaggtagtagaatgtatagtt

SEQ ID NO: 55669 - RNA, 21 nt, Synthetic Construct
  source 1..21: mol_type = other RNA
acagcaggacggtggccatgg

SEQ ID NO: 55670 - RNA, 27 nt, Synthetic Construct
  source 1..27: mol_type = other RNA
ccccccaccgctaaatttgactggctt

SEQ ID NO: 55671 - RNA, 27 nt, Synthetic Construct
  source 1..27: mol_type = other RNA
ccccccaccgctaaatttgactggctt

SEQ ID NO: 55672 - RNA, 24 nt, Synthetic Construct
  source 1..24: mol_type = other RNA
aacattcattgctgtcggtgggtt

SEQ ID NO: 55673 - RNA, 24 nt, Synthetic Construct
  source 1..24: mol_type = other RNA
aacattcattgctgtcggtgggtt

SEQ ID NO: 55674 - RNA, 26 nt, Synthetic Construct
  source 1..26: mol_type = other RNA
gcgggcgtagctcaggggtagagcgc

SEQ ID NO: 55675 - RNA, 26 nt, Synthetic Construct
  source 1..26: mol_type = other RNA
gcgggcgtagctcaggggtagagcgc

SEQ ID NO: 55676 - RNA, 22 nt, Synthetic Construct
  source 1..22: mol_type = other RNA
cattgcacttgtcccggtctga

SEQ ID NO: 55677 - RNA, 22 nt, Synthetic Construct
  source 1..22: mol_type = other RNA
cattgcacttgtcccggtctga

SEQ ID NO: 55678 - RNA, 21 nt, Synthetic Construct
  source 1..21: mol_type = other RNA
tcctgtactgagctgcccgag

SEQ ID NO: 55679 - RNA, 21 nt, Synthetic Construct
  source 1..21: mol_type = other RNA
tcctgtactgagctgcccgag

SEQ ID NO: 55680 - RNA, 22 nt, Synthetic Construct
  source 1..22: mol_type = other RNA
ngaggtagtaggttgtatagtt

SEQ ID NO: 55681 - RNA, 22 nt, Synthetic Construct
  source 1..22: mol_type = other RNA
tgaggtagtaagttgtgtggtt

SEQ ID NO: 55682 - RNA, 21 nt, Synthetic Construct
  source 1..21: mol_type = other RNA
tgaggggcagagagcgggact

SEQ ID NO: 55683 - RNA, 23 nt, Synthetic Construct
  source 1..23: mol_type = other RNA
tggtaatacgacgtactaagtgt

SEQ ID NO: 55684 - RNA, 22 nt, Synthetic Construct
  source 1..22: mol_type = other RNA
cattgcacctgtctcggtctga

SEQ ID NO: 55685 - RNA, 19 nt, Synthetic Construct
  source 1..19: mol_type = other RNA
ccttggggttgtaggacca

SEQ ID NO: 55686 - RNA, 19 nt, Synthetic Construct
  source 1..19: mol_type = other RNA
ccttggggttgtaggacca

SEQ ID NO: 55687 - RNA, 21 nt, Synthetic Construct
  source 1..21: mol_type = other RNA
tgaggtagtaggttgtacagt

SEQ ID NO: 55688 - RNA, 16 nt, Synthetic Construct
  source 1..16: mol_type = other RNA
cccagaaacccggtcg

SEQ ID NO: 55689 - RNA, 16 nt, Synthetic Construct
  source 1..16: mol_type = other RNA
cccagaaacccggtcg

SEQ ID NO: 55690 - RNA, 23 nt, Synthetic Construct
  source 1..23: mol_type = other RNA
cgcgacctcagatcagacgtggc

SEQ ID NO: 55691 - RNA, 23 nt, Synthetic Construct
  source 1..23: mol_type = other RNA
cgcgacctcagatcagacgtggc

SEQ ID NO: 55692 - RNA, 22 nt, Synthetic Construct
  source 1..22: mol_type = other RNA
tcctgtgctgagctgccccgag

SEQ ID NO: 55693 - RNA, 20 nt, Synthetic Construct
  source 1..20: mol_type = other RNA
tgaggtagtaggttgtacag

SEQ ID NO: 55694 - RNA, 25 nt, Synthetic Construct
  source 1..25: mol_type = other RNA
ttgaggatgtgagatcgagacgaca

SEQ ID NO: 55695 - RNA, 19 nt, Synthetic Construct
  source 1..19: mol_type = other RNA
tgtcagtttgtcaaatacc

SEQ ID NO: 55696 - RNA, 19 nt, Synthetic Construct
  source 1..19: mol_type = other RNA
tgtcagtttgtcaaatacc

SEQ ID NO: 55697 - RNA, 36 nt, Synthetic Construct; identical to SEQ ID NO: 2248
  source 1..36: mol_type = other RNA

SEQ ID NO: 55698 - RNA, 22 nt, Synthetic Construct
  source 1..22: mol_type = other RNA
tcagtagctcgaggaaaagaca

SEQ ID NO: 55699 - RNA, 22 nt, Synthetic Construct
  source 1..22: mol_type = other RNA
tcagtagctcgaggaaaagaca

SEQ ID NO: 55700 - RNA, 43 nt, Synthetic Construct; identical to SEQ ID NO: 6535
  source 1..43: mol_type = other RNA

SEQ ID NO: 55701 - RNA, 43 nt, Synthetic Construct; identical to SEQ ID NO: 6535
  source 1..43: mol_type = other RNA

SEQ ID NO: 55702 - RNA, 22 nt, Synthetic Construct
  source 1..22: mol_type = other RNA
tgaggtagtaggttgtgtggct

SEQ ID NO: 55703 - RNA, 17 nt, Synthetic Construct
  source 1..17: mol_type = other RNA
atcgtgacgatagtgca

SEQ ID NO: 55704 - RNA, 23 nt, Synthetic Construct
  source 1..23: mol_type = other RNA
aatgacacgatcactcccgttgt

SEQ ID NO: 55705 - RNA, 22 nt, Synthetic Construct
  source 1..22: mol_type = other RNA
tcctgtactgagctgccccaag

SEQ ID NO: 55706 - RNA, 22 nt, Synthetic Construct
  source 1..22: mol_type = other RNA
gcgtaccgtgagtaataatgcg

SEQ ID NO: 55707 - RNA, 20 nt, Synthetic Construct
  source 1..20: mol_type = other RNA
aatgacacgatcactcccgt

SEQ ID NO: 55708 - RNA, 20 nt, Synthetic Construct
  source 1..20: mol_type = other RNA
aatgacacgatcactcccgt

SEQ ID NO: 55709 - RNA, 20 nt, Synthetic Construct
  source 1..20: mol_type = other RNA
atcacattgccagggatttc

SEQ ID NO: 55710 - RNA, 34 nt, Synthetic Construct; identical to SEQ ID NO: 2291
  source 1..34: mol_type = other RNA

SEQ ID NO: 55711 - RNA, 27 nt, Synthetic Construct
  source 1..27: mol_type = other RNA
ccccccgctgctaaatttgactggcta

SEQ ID NO: 55712 - RNA, 27 nt, Synthetic Construct
  source 1..27: mol_type = other RNA
ccccccgctgctaaatttgactggcta

SEQ ID NO: 55713 - RNA, 21 nt, Synthetic Construct
  source 1..21: mol_type = other RNA
agccatcatttaaagaaagcg

SEQ ID NO: 55714 - RNA, 21 nt, Synthetic Construct
  source 1..21: mol_type = other RNA
tcctgcactgagctgccccga

SEQ ID NO: 55715 - RNA, 21 nt, Synthetic Construct
  source 1..21: mol_type = other RNA
ctaggctgaagctccttgagg

SEQ ID NO: 55716 - RNA, 27 nt, Synthetic Construct
  source 1..27: mol_type = other RNA
ccccccactgctaaatttgactggcat

SEQ ID NO: 55717 - RNA, 22 nt, Synthetic Construct
  source 1..22: mol_type = other RNA
tccctgagaccctttaacctgt

SEQ ID NO: 55718 - RNA, 19 nt, Synthetic Construct
  source 1..19: mol_type = other RNA
ccagtaaacggcggccgta

SEQ ID NO: 55719 - RNA, 15 nt, Synthetic Construct
  source 1..15: mol_type = other RNA
cctcgcgcgattgga

SEQ ID NO: 55720 - RNA, 25 nt, Synthetic Construct
  source 1..25: mol_type = other RNA
ttgaggatgtgagatcgagacgaca

SEQ ID NO: 55721 - RNA, 25 nt, Synthetic Construct
  source 1..25: mol_type = other RNA
ttgaggatgtgagatcgagacgaca

SEQ ID NO: 55722 - RNA, 20 nt, Synthetic Construct
  source 1..20: mol_type = other RNA
atcacattgccagggatttc

SEQ ID NO: 55723 - RNA, 30 nt, Synthetic Construct; identical to SEQ ID NO: 1220
  source 1..30: mol_type = other RNA

SEQ ID NO: 55724 - RNA, 22 nt, Synthetic Construct
  source 1..22: mol_type = other RNA
tcctgcactgagctgccccgag

SEQ ID NO: 55725 - RNA, 16 nt, Synthetic Construct
  source 1..16: mol_type = other RNA
gatttgggagtgctcg

SEQ ID NO: 55726 - RNA, 23 nt, Synthetic Construct
  source 1..23: mol_type = other RNA
tcctgtactgagccgccccgagt

SEQ ID NO: 55727 - RNA, 23 nt, Synthetic Construct
  source 1..23: mol_type = other RNA
tcctgtactgagccgccccgagt

SEQ ID NO: 55728 - RNA, 19 nt, Synthetic Construct
  source 1..19: mol_type = other RNA
cccttgtcattagttgcta

SEQ ID NO: 55729 - RNA, 19 nt, Synthetic Construct
  source 1..19: mol_type = other RNA
cccttgtcattagttgcta

SEQ ID NO: 55730 - RNA, 29 nt, Synthetic Construct
  source 1..29: mol_type = other RNA
gtaatggcgggaactctggacagactgcc

SEQ ID NO: 55731 - RNA, 29 nt, Synthetic Construct
  source 1..29: mol_type = other RNA
gtaatggcgggaactctggacagactgcc

SEQ ID NO: 55732 - RNA, 23 nt, Synthetic Construct
  source 1..23: mol_type = other RNA
caaagtgccgttcgtgcaggtag

SEQ ID NO: 55733 - RNA, 22 nt, Synthetic Construct
  source 1..22: mol_type = other RNA
tagcagcacgtaaatatcggcg

SEQ ID NO: 55734 - RNA, 21 nt, Synthetic Construct
  source 1..21: mol_type = other RNA
tgaggtagtagtctgtgctgt

SEQ ID NO: 55735 - RNA, 27 nt, Synthetic Construct
  source 1..27: mol_type = other RNA
tcctgagtagctcagcggcagagcggg

SEQ ID NO: 55736 - RNA, 27 nt, Synthetic Construct
  source 1..27: mol_type = other RNA
tcctgagtagctcagcggcagagcggg

SEQ ID NO: 55737 - RNA, 18 nt, Synthetic Construct
  source 1..18: mol_type = other RNA
acagtcaggatgttggct

SEQ ID NO: 55738 - RNA, 17 nt, Synthetic Construct
  source 1..17: mol_type = other RNA
cgaaattccttgtcggg

SEQ ID NO: 55739 - RNA, 17 nt, Synthetic Construct
  source 1..17: mol_type = other RNA
cgaaattccttgtcggg

SEQ ID NO: 55740 - RNA, 32 nt, Synthetic Construct; identical to SEQ ID NO: 2435
  source 1..32: mol_type = other RNA

SEQ ID NO: 55741 - RNA, 16 nt, Synthetic Construct
  source 1..16: mol_type = other RNA
tggccgtcgtcagctc

SEQ ID NO: 55742 - RNA, 21 nt, Synthetic Construct
  source 1..21: mol_type = other RNA
tgaggcagtaggttgtatagt

SEQ ID NO: 55743 - RNA, 21 nt, Synthetic Construct
  source 1..21: mol_type = other RNA
tgaggcagtaggttgtatagt

SEQ ID NO: 55744 - RNA, 17 nt, Synthetic Construct
  source 1..17: mol_type = other RNA
aagttgaccgcctgggg

SEQ ID NO: 55745 - RNA, 29 nt, Synthetic Construct
  source 1..29: mol_type = other RNA
gcatgggtggttcagtggtagaattctcg

SEQ ID NO: 55746 - RNA, 22 nt, Synthetic Construct
  source 1..22: mol_type = other RNA
cattgcacttgtctcagtctga

SEQ ID NO: 55747 - RNA, 22 nt, Synthetic Construct
  source 1..22: mol_type = other RNA
cattgcacttgtctcagtctga

SEQ ID NO: 55748 - RNA, 25 nt, Synthetic Construct
  source 1..25: mol_type = other RNA
tcgggcctggttagtacttggatgg

SEQ ID NO: 55749 - RNA, 21 nt, Synthetic Construct
  source 1..21: mol_type = other RNA
tggggggcagagagcgagact

SEQ ID NO: 55750 - RNA, 24 nt, Synthetic Construct
  source 1..24: mol_type = other RNA
cgactcttagcggtggatcactcg

SEQ ID NO: 55751 - RNA, 21 nt, Synthetic Construct
  source 1..21: mol_type = other RNA
taactccttaagcgatctcgc

SEQ ID NO: 55752 - RNA, 21 nt, Synthetic Construct
  source 1..21: mol_type = other RNA
taactccttaagcgatctcgc

SEQ ID NO: 55753 - RNA, 23 nt, Synthetic Construct
  source 1..23: mol_type = other RNA
tgaggtaggaggttgtatagtta

SEQ ID NO: 55754 - RNA, 33 nt, Synthetic Construct; identical to SEQ ID NO: 33377
  source 1..33: mol_type = other RNA

SEQ ID NO: 55755 - RNA, 35 nt, Synthetic Construct; identical to SEQ ID NO: 1490
  source 1..35: mol_type = other RNA

SEQ ID NO: 55756 - RNA, 35 nt, Synthetic Construct; identical to SEQ ID NO: 1490
  source 1..35: mol_type = other RNA

SEQ ID NO: 55757 - RNA, 23 nt, Synthetic Construct
  source 1..23: mol_type = other RNA
tggcagtgtcttagctggttgtt

SEQ ID NO: 55758 - RNA, 23 nt, Synthetic Construct
  source 1..23: mol_type = other RNA
tggcagtgtcttagctggttgtt

SEQ ID NO: 55759 - RNA, 21 nt, Synthetic Construct
  source 1..21: mol_type = other RNA
acacatgcaagtcgaacggta

SEQ ID NO: 55760 - RNA, 22 nt, Synthetic Construct
  source 1..22: mol_type = other RNA
tagcagcacgtgaatattggcg

SEQ ID NO: 55761 - RNA, 26 nt, Synthetic Construct
  source 1..26: mol_type = other RNA
gtgtgaaagtaggtcatcgtcaggct

SEQ ID NO: 55762 - RNA, 26 nt, Synthetic Construct
  source 1..26: mol_type = other RNA
gtgtgaaagtaggtcatcgtcaggct

SEQ ID NO: 55763 - RNA, 24 nt, Synthetic Construct
  source 1..24: mol_type = other RNA
aagctcggtctgaggcccctcagt

SEQ ID NO: 55764 - RNA, 24 nt, Synthetic Construct
  source 1..24: mol_type = other RNA
aagctcggtctgaggcccctcagt

SEQ ID NO: 55765 - RNA, 34 nt, Synthetic Construct; identical to SEQ ID NO: 35301
  source 1..34: mol_type = other RNA

SEQ ID NO: 55766 - RNA, 34 nt, Synthetic Construct; identical to SEQ ID NO: 35301
  source 1..34: mol_type = other RNA

SEQ ID NO: 55767 - RNA, 19 nt, Synthetic Construct
  source 1..19: mol_type = other RNA
gggataactggcttgtggc

SEQ ID NO: 55768 - RNA, 19 nt, Synthetic Construct
  source 1..19: mol_type = other RNA
gggataactggcttgtggc

SEQ ID NO: 55769 - RNA, 24 nt, Synthetic Construct
  source 1..24: mol_type = other RNA
tgatatgtttgatatattaggttg

SEQ ID NO: 55770 - RNA, 24 nt, Synthetic Construct
  source 1..24: mol_type = other RNA
tgatatgtttgatatattaggttg

SEQ ID NO: 55771 - RNA, 23 nt, Synthetic Construct
  source 1..23: mol_type = other RNA
tggtaatacgacgtactcagtgt

SEQ ID NO: 55772 - RNA, 22 nt, Synthetic Construct
  source 1..22: mol_type = other RNA
tattgcacttgtcccggcctat

SEQ ID NO: 55773 - RNA, 22 nt, Synthetic Construct
  source 1..22: mol_type = other RNA
tattgcacttgtcccggcctat

SEQ ID NO: 55774 - RNA, 23 nt, Synthetic Construct
  source 1..23: mol_type = other RNA
caacggagtcccaaaagcagctg

SEQ ID NO: 55775 - RNA, 23 nt, Synthetic Construct
  source 1..23: mol_type = other RNA
caacggagtcccaaaagcagctg

SEQ ID NO: 55776 - RNA, 22 nt, Synthetic Construct
  source 1..22: mol_type = other RNA
ngaggtagtagattgtatagtt

SEQ ID NO: 55777 - RNA, 27 nt, Synthetic Construct
  source 1..27: mol_type = other RNA
ccccccactactaaatttgactggctt

SEQ ID NO: 55778 - RNA, 27 nt, Synthetic Construct
  source 1..27: mol_type = other RNA
ccccccactactaaatttgactggctt

SEQ ID NO: 55779 - RNA, 16 nt, Synthetic Construct
  source 1..16: mol_type = other RNA
aggtcatcattatctg

SEQ ID NO: 55780 - RNA, 19 nt, Synthetic Construct
  source 1..19: mol_type = other RNA
tcacagtgaaccggtctct

SEQ ID NO: 55781 - RNA, 19 nt, Synthetic Construct
  source 1..19: mol_type = other RNA
tcacagtgaaccggtctct

SEQ ID NO: 55782 - RNA, 27 nt, Synthetic Construct
  source 1..27: mol_type = other RNA
ccccccactgctaaatttgacgggctt

SEQ ID NO: 55783 - RNA, 23 nt, Synthetic Construct
  source 1..23: mol_type = other RNA
tgaggcagtaggttgtgtggttt

SEQ ID NO: 55784 - RNA, 25 nt, Synthetic Construct
  source 1..25: mol_type = other RNA
ggtaaaatagctgagtgaagcattg

SEQ ID NO: 55785 - RNA, 25 nt, Synthetic Construct
  source 1..25: mol_type = other RNA
ggtaaaatagctgagtgaagcattg

SEQ ID NO: 55786 - RNA, 29 nt, Synthetic Construct
  source 1..29: mol_type = other RNA
gcattgtggttcagtggtagaattctcgc

SEQ ID NO: 55787 - RNA, 29 nt, Synthetic Construct
  source 1..29: mol_type = other RNA
gcattgtggttcagtggtagaattctcgc

SEQ ID NO: 55788 - RNA, 35 nt, Synthetic Construct; identical to SEQ ID NO: 1497
  source 1..35: mol_type = other RNA

SEQ ID NO: 55789 - RNA, 35 nt, Synthetic Construct; identical to SEQ ID NO: 1497
  source 1..35: mol_type = other RNA

SEQ ID NO: 55790 - RNA, 22 nt, Synthetic Construct
  source 1..22: mol_type = other RNA
cattgcactcgtctcggtctga

SEQ ID NO: 55791 - RNA, 22 nt, Synthetic Construct
  source 1..22: mol_type = other RNA
cattgcactcgtctcggtctga

SEQ ID NO: 55792 - RNA, 25 nt, Synthetic Construct
  source 1..25: mol_type = other RNA
gctcagtggaaaggatgtgaatcta

SEQ ID NO: 55793 - RNA, 25 nt, Synthetic Construct
  source 1..25: mol_type = other RNA
gctcagtggaaaggatgtgaatcta

SEQ ID NO: 55794 - RNA, 22 nt, Synthetic Construct
  source 1..22: mol_type = other RNA
tattgcacctgtcccggcctgt

SEQ ID NO: 55795 - RNA, 17 nt, Synthetic Construct
  source 1..17: mol_type = other RNA
agtgacgcgcatgaatg

SEQ ID NO: 55796 - RNA, 17 nt, Synthetic Construct
  source 1..17: mol_type = other RNA
agtgacgcgcatgaatg

SEQ ID NO: 55797 - RNA, 25 nt, Synthetic Construct
  source 1..25: mol_type = other RNA
ttgaggatatgagatagagacgaca

SEQ ID NO: 55798 - RNA, 21 nt, Synthetic Construct
  source 1..21: mol_type = other RNA
tgtagtgtttcctactttatg

SEQ ID NO: 55799 - RNA, 21 nt, Synthetic Construct
  source 1..21: mol_type = other RNA
tgtagtgtttcctactttatg

SEQ ID NO: 55800 - RNA, 16 nt, Synthetic Construct
  source 1..16: mol_type = other RNA
gcggctgtagctcagt

SEQ ID NO: 55801 - RNA, 15 nt, Synthetic Construct
  source 1..15: mol_type = other RNA
aaattccttgtcggg

SEQ ID NO: 55802 - RNA, 33 nt, Synthetic Construct; identical to SEQ ID NO: 2386
  source 1..33: mol_type = other RNA

SEQ ID NO: 55803 - RNA, 21 nt, Synthetic Construct
  source 1..21: mol_type = other RNA
taactcctaagcgaatctcgc

SEQ ID NO: 55804 - RNA, 21 nt, Synthetic Construct
  source 1..21: mol_type = other RNA
taactcctaagcgaatctcgc

SEQ ID NO: 55805 - RNA, 15 nt, Synthetic Construct
  source 1..15: mol_type = other RNA
ggtgaaagcggggga

SEQ ID NO: 55806 - RNA, 15 nt, Synthetic Construct
  source 1..15: mol_type = other RNA
ggtgaaagcggggga

SEQ ID NO: 55807 - RNA, 22 nt, Synthetic Construct
  source 1..22: mol_type = other RNA
gagagcctggacacaggtgctg

SEQ ID NO: 55808 - RNA, 22 nt, Synthetic Construct
  source 1..22: mol_type = other RNA
gagagcctggacacaggtgctg

SEQ ID NO: 55809 - RNA, 31 nt, Synthetic Construct; identical to SEQ ID NO: 774
  source 1..31: mol_type = other RNA

SEQ ID NO: 55810 - RNA, 31 nt, Synthetic Construct; identical to SEQ ID NO: 774
  source 1..31: mol_type = other RNA

SEQ ID NO: 55811 - RNA, 21 nt, Synthetic Construct
  source 1..21: mol_type = other RNA
taactccttagcgaatctcgc

SEQ ID NO: 55812 - RNA, 21 nt, Synthetic Construct
  source 1..21: mol_type = other RNA
taactccttagcgaatctcgc

SEQ ID NO: 55813 - RNA, 20 nt, Synthetic Construct
  source 1..20: mol_type = other RNA
cgtaccgtgagtaataatgc

SEQ ID NO: 55814 - RNA, 20 nt, Synthetic Construct
  source 1..20: mol_type = other RNA
cgtaccgtgagtaataatgc

SEQ ID NO: 55815 - RNA, 21 nt, Synthetic Construct
  source 1..21: mol_type = other RNA
tgaggtagtaggctgtatagt

SEQ ID NO: 55816 - RNA, 21 nt, Synthetic Construct
  source 1..21: mol_type = other RNA
tgaggtagtaggctgtatagt

SEQ ID NO: 55817 - RNA, 18 nt, Synthetic Construct
  source 1..18: mol_type = other RNA
catgcaagtcgaacggta

SEQ ID NO: 55818 - RNA, 16 nt, Synthetic Construct
  source 1..16: mol_type = other RNA
gtcaacggccatacca

SEQ ID NO: 55819 - RNA, 16 nt, Synthetic Construct
  source 1..16: mol_type = other RNA
gtcaacggccatacca

SEQ ID NO: 55820 - RNA, 20 nt, Synthetic Construct
  source 1..20: mol_type = other RNA
tgaggtagtaggttgtgtag

SEQ ID NO: 55821 - RNA, 20 nt, Synthetic Construct
  source 1..20: mol_type = other RNA
tgaggtagtaggttgtgtag

SEQ ID NO: 55822 - RNA, 22 nt, Synthetic Construct
  source 1..22: mol_type = other RNA
tcgcagcacgtaaatattggcg

SEQ ID NO: 55823 - RNA, 22 nt, Synthetic Construct
  source 1..22: mol_type = other RNA
tcgcagcacgtaaatattggcg

SEQ ID NO: 55824 - RNA, 18 nt, Synthetic Construct
  source 1..18: mol_type = other RNA
atcccactcctgacacca

SEQ ID NO: 55825 - RNA, 28 nt, Synthetic Construct
  source 1..28: mol_type = other RNA
cgactcttagcggtggatcactcggctc

SEQ ID NO: 55826 - RNA, 28 nt, Synthetic Construct
  source 1..28: mol_type = other RNA
cgactcttagcggtggatcactcggctc

SEQ ID NO: 55827 - RNA, 21 nt, Synthetic Construct
  source 1..21: mol_type = other RNA
gaagaggacttggaactcgat

SEQ ID NO: 55828 - RNA, 21 nt, Synthetic Construct
  source 1..21: mol_type = other RNA
gaagaggacttggaactcgat

SEQ ID NO: 55829 - RNA, 22 nt, Synthetic Construct
  source 1..22: mol_type = other RNA
tggagagaaaggcagttcctga

SEQ ID NO: 55830 - RNA, 39 nt, Synthetic Construct; identical to SEQ ID NO: 4400
  source 1..39: mol_type = other RNA

SEQ ID NO: 55831 - RNA, 39 nt, Synthetic Construct; identical to SEQ ID NO: 4400
  source 1..39: mol_type = other RNA

SEQ ID NO: 55832 - RNA, 22 nt, Synthetic Construct
  source 1..22: mol_type = other RNA
tagcagcacgtaagtattggcg

SEQ ID NO: 55833 - RNA, 22 nt, Synthetic Construct
  source 1..22: mol_type = other RNA
tagcagcacgtaagtattggcg

SEQ ID NO: 55834 - RNA, 33 nt, Synthetic Construct; identical to SEQ ID NO: 35121
  source 1..33: mol_type = other RNA

SEQ ID NO: 55835 - RNA, 33 nt, Synthetic Construct; identical to SEQ ID NO: 35121
  source 1..33: mol_type = other RNA

SEQ ID NO: 55836 - RNA, 18 nt, Synthetic Construct
  source 1..18: mol_type = other RNA
ggctttgaagtaaggtcg

SEQ ID NO: 55837 - RNA, 18 nt, Synthetic Construct
  source 1..18: mol_type = other RNA
ggctttgaagtaaggtcg

SEQ ID NO: 55838 - RNA, 23 nt, Synthetic Construct
  source 1..23: mol_type = other RNA
ctcgtaccgtgagtaataatgcg

SEQ ID NO: 55839 - RNA, 27 nt, Synthetic Construct
  source 1..27: mol_type = other RNA
ccccccactgctagatttgactggctt

SEQ ID NO: 55840 - RNA, 22 nt, Synthetic Construct
  source 1..22: mol_type = other RNA
tcgtaccgtgagtaataacgcg

SEQ ID NO: 55841 - RNA, 22 nt, Synthetic Construct
  source 1..22: mol_type = other RNA
tgaggtagtagattgcatagtt

SEQ ID NO: 55842 - RNA, 22 nt, Synthetic Construct
  source 1..22: mol_type = other RNA
tgaggtagtagattgcatagtt

SEQ ID NO: 55843 - RNA, 23 nt, Synthetic Construct
  source 1..23: mol_type = other RNA
gtaaacatccttgactggaagct

SEQ ID NO: 55844 - RNA, 23 nt, Synthetic Construct
  source 1..23: mol_type = other RNA
tgaggtagtaggttgtgtggttt

SEQ ID NO: 55845 - RNA, 23 nt, Synthetic Construct
  source 1..23: mol_type = other RNA
tgaggtagtaggttgtgtggttt

SEQ ID NO: 55846 - RNA, 19 nt, Synthetic Construct
  source 1..19: mol_type = other RNA
cctgtctgaatatgggggg

SEQ ID NO: 55847 - RNA, 22 nt, Synthetic Construct
  source 1..22: mol_type = other RNA
tgtggtagtaggttgtatagtt

SEQ ID NO: 55848 - RNA, 22 nt, Synthetic Construct
  source 1..22: mol_type = other RNA
tgtggtagtaggttgtatagtt

SEQ ID NO: 55849 - RNA, 16 nt, Synthetic Construct
  source 1..16: mol_type = other RNA
agcaagtcgaacggta

SEQ ID NO: 55850 - RNA, 22 nt, Synthetic Construct
  source 1..22: mol_type = other RNA
tatcggaacgtgcccagtcgtg

SEQ ID NO: 55851 - RNA, 22 nt, Synthetic Construct
  source 1..22: mol_type = other RNA
tatcggaacgtgcccagtcgtg

SEQ ID NO: 55852 - RNA, 27 nt, Synthetic Construct
  source 1..27: mol_type = other RNA
ccccccactgctaaatctgactggctt

SEQ ID NO: 55853 - RNA, 27 nt, Synthetic Construct
  source 1..27: mol_type = other RNA
ccccccactgctaaatctgactggctt

SEQ ID NO: 55854 - RNA, 22 nt, Synthetic Construct
  source 1..22: mol_type = other RNA
cgcatcccctagggcattggtg

SEQ ID NO: 55855 - RNA, 22 nt, Synthetic Construct
  source 1..22: mol_type = other RNA
cgcatcccctagggcattggtg

SEQ ID NO: 55856 - RNA, 20 nt, Synthetic Construct
  source 1..20: mol_type = other RNA
aaaccgttaccattactgag

SEQ ID NO: 55857 - RNA, 20 nt, Synthetic Construct
  source 1..20: mol_type = other RNA
aaaccgttaccattactgag

SEQ ID NO: 55858 - RNA, 17 nt, Synthetic Construct
  source 1..17: mol_type = other RNA
ttggagggcaagtctgg

SEQ ID NO: 55859 - RNA, 17 nt, Synthetic Construct
  source 1..17: mol_type = other RNA
ttggagggcaagtctgg

SEQ ID NO: 55860 - RNA, 24 nt, Synthetic Construct
  source 1..24: mol_type = other RNA
ggctacattgtctgctgggtttct

SEQ ID NO: 55861 - RNA, 24 nt, Synthetic Construct
  source 1..24: mol_type = other RNA
ggctacattgtctgctgggtttct

SEQ ID NO: 55862 - RNA, 24 nt, Synthetic Construct
  source 1..24: mol_type = other RNA
actcggcgtggcgtcggtcgtggt

SEQ ID NO: 55863 - RNA, 24 nt, Synthetic Construct
  source 1..24: mol_type = other RNA
actcggcgtggcgtcggtcgtggt

SEQ ID NO: 55864 - RNA, 32 nt, Synthetic Construct; identical to SEQ ID NO: 3092
  source 1..32: mol_type = other RNA

SEQ ID NO: 55865 - RNA, 21 nt, Synthetic Construct
  source 1..21: mol_type = other RNA
cataaagtagaaagcactact

SEQ ID NO: 55866 - RNA, 22 nt, Synthetic Construct
  source 1..22: mol_type = other RNA
tcgtaccatgagtaataatgcg

SEQ ID NO: 55867 - RNA, 36 nt, Synthetic Construct; identical to SEQ ID NO: 2366
  source 1..36: mol_type = other RNA

SEQ ID NO: 55868 - RNA, 36 nt, Synthetic Construct; identical to SEQ ID NO: 2478
  source 1..36: mol_type = other RNA

SEQ ID NO: 55869 - RNA, 36 nt, Synthetic Construct; identical to SEQ ID NO: 2478
  source 1..36: mol_type = other RNA

SEQ ID NO: 55870 - RNA, 28 nt, Synthetic Construct
  source 1..28: mol_type = other RNA
gcatgggtggttcagtggtagaattctc

SEQ ID NO: 55871 - RNA, 28 nt, Synthetic Construct
  source 1..28: mol_type = other RNA
gcatgggtggttcagtggtagaattctc

SEQ ID NO: 55872 - RNA, 23 nt, Synthetic Construct
  source 1..23: mol_type = other RNA
tgagcgcctcgacgacagagccg

SEQ ID NO: 55873 - RNA, 23 nt, Synthetic Construct
  source 1..23: mol_type = other RNA
caaagtgctgttcgtgcaggtaa

SEQ ID NO: 55874 - RNA, 22 nt, Synthetic Construct
  source 1..22: mol_type = other RNA
ctagcaccatctgaaatcggtt

SEQ ID NO: 55875 - RNA, 22 nt, Synthetic Construct
  source 1..22: mol_type = other RNA
tgaggtagtagtttgtggtgtt

SEQ ID NO: 55876 - RNA, 23 nt, Synthetic Construct
  source 1..23: mol_type = other RNA
agctacattgtctgctgggttcc

SEQ ID NO: 55877 - RNA, 23 nt, Synthetic Construct
  source 1..23: mol_type = other RNA
aatgacacgatcactcccgttga

SEQ ID NO: 55878 - RNA, 23 nt, Synthetic Construct
  source 1..23: mol_type = other RNA
aatgacacgatcactcccgttga

SEQ ID NO: 55879 - RNA, 21 nt, Synthetic Construct
  source 1..21: mol_type = other RNA
tggggtagtagtttgtgctgt

SEQ ID NO: 55880 - RNA, 18 nt, Synthetic Construct
  source 1..18: mol_type = other RNA
cagcactctgcaaagacg

SEQ ID NO: 55881 - RNA, 17 nt, Synthetic Construct
  source 1..17: mol_type = other RNA
gtccggatcgtagtctg

SEQ ID NO: 55882 - RNA, 17 nt, Synthetic Construct
  source 1..17: mol_type = other RNA
gtccggatcgtagtctg

SEQ ID NO: 55883 - RNA, 23 nt, Synthetic Construct
  source 1..23: mol_type = other RNA
tgaggagcagagagcgagacttt

SEQ ID NO: 55884 - RNA, 22 nt, Synthetic Construct
  source 1..22: mol_type = other RNA
ngaggtagtaggttgtgtggtt

SEQ ID NO: 55885 - RNA, 21 nt, Synthetic Construct
  source 1..21: mol_type = other RNA
tcttggagtaggtcattgggt

SEQ ID NO: 55886 - RNA, 22 nt, Synthetic Construct
  source 1..22: mol_type = other RNA
tgaggtagcaggttgtatagtt

SEQ ID NO: 55887 - RNA, 22 nt, Synthetic Construct
  source 1..22: mol_type = other RNA
tgaggtagcaggttgtatagtt

SEQ ID NO: 55888 - RNA, 23 nt, Synthetic Construct
  source 1..23: mol_type = other RNA
caaagtgatgttcgtgcaggtag

SEQ ID NO: 55889 - RNA, 23 nt, Synthetic Construct
  source 1..23: mol_type = other RNA
caaagtgatgttcgtgcaggtag

SEQ ID NO: 55890 - RNA, 26 nt, Synthetic Construct
  source 1..26: mol_type = other RNA
aatgacacgatcactcccgttgagtt

SEQ ID NO: 55891 - RNA, 26 nt, Synthetic Construct
  source 1..26: mol_type = other RNA
aatgacacgatcactcccgttgagtt

SEQ ID NO: 55892 - RNA, 22 nt, Synthetic Construct
  source 1..22: mol_type = other RNA
tcgaatccgagtcacggcacca

SEQ ID NO: 55893 - RNA, 23 nt, Synthetic Construct
  source 1..23: mol_type = other RNA
tagtaatacgacgtacttagtgt

SEQ ID NO: 55894 - RNA, 23 nt, Synthetic Construct
  source 1..23: mol_type = other RNA
tagtaatacgacgtacttagtgt

SEQ ID NO: 55895 - RNA, 23 nt, Synthetic Construct
  source 1..23: mol_type = other RNA
caacgggatcccaaaagcagctg

SEQ ID NO: 55896 - RNA, 23 nt, Synthetic Construct
  source 1..23: mol_type = other RNA
tagcagcacataatggtttgtgg

SEQ ID NO: 55897 - RNA, 24 nt, Synthetic Construct
  source 1..24: mol_type = other RNA
tgaggtagtaggttgtgtggtttc

SEQ ID NO: 55898 - RNA, 24 nt, Synthetic Construct
  source 1..24: mol_type = other RNA
tgaggtagtaggttgtgtggtttc

SEQ ID NO: 55899 - RNA, 22 nt, Synthetic Construct
  source 1..22: mol_type = other RNA
tacgcctgtctgagcgtcgctt

SEQ ID NO: 55900 - RNA, 22 nt, Synthetic Construct
  source 1..22: mol_type = other RNA
tgagaactgaactccatgggtt

SEQ ID NO: 55901 - RNA, 22 nt, Synthetic Construct
  source 1..22: mol_type = other RNA
tgagaactgaactccatgggtt

SEQ ID NO: 55902 - RNA, 29 nt, Synthetic Construct
  source 1..29: mol_type = other RNA
tgaaggtgggttgtgaagcctgctggagg

SEQ ID NO: 55903 - RNA, 29 nt, Synthetic Construct
  source 1..29: mol_type = other RNA
tgaaggtgggttgtgaagcctgctggagg

SEQ ID NO: 55904 - RNA, 21 nt, Synthetic Construct
  source 1..21: mol_type = other RNA
cgaggtagtaggttgtatagt

SEQ ID NO: 55905 - RNA, 23 nt, Synthetic Construct
  source 1..23: mol_type = other RNA
tgcggggctagggctaacagcat

SEQ ID NO: 55906 - RNA, 23 nt, Synthetic Construct
  source 1..23: mol_type = other RNA
tgcggggctagggctaacagcat

SEQ ID NO: 55907 - RNA, 23 nt, Synthetic Construct
  source 1..23: mol_type = other RNA
caaagtgctgttcgtgcaggtaa

SEQ ID NO: 55908 - RNA, 23 nt, Synthetic Construct
  source 1..23: mol_type = other RNA
caaagtgctgttcgtgcaggtaa

SEQ ID NO: 55909 - RNA, 23 nt, Synthetic Construct
  source 1..23: mol_type = other RNA
cgcgacctcagatcagacgtggc

SEQ ID NO: 55910 - RNA, 23 nt, Synthetic Construct
  source 1..23: mol_type = other RNA
cgcgacctcagatcagacgtggc

SEQ ID NO: 55911 - RNA, 20 nt, Synthetic Construct
  source 1..20: mol_type = other RNA
ctctaatgagactgccggtg

SEQ ID NO: 55912 - RNA, 22 nt, Synthetic Construct
  source 1..22: mol_type = other RNA
tagcagcacgtagatattggcg

SEQ ID NO: 55913 - RNA, 21 nt, Synthetic Construct
  source 1..21: mol_type = other RNA
tgaggtagtaggttgtgtagt

SEQ ID NO: 55914 - RNA, 21 nt, Synthetic Construct
  source 1..21: mol_type = other RNA
tgaggggcagagagcgggact

SEQ ID NO: 55915 - RNA, 23 nt, Synthetic Construct
  source 1..23: mol_type = other RNA
atcacattgccagggatttccaa

SEQ ID NO: 55916 - RNA, 21 nt, Synthetic Construct
  source 1..21: mol_type = other RNA
tggaatgtaaagaagtatgta

SEQ ID NO: 55917 - RNA, 21 nt, Synthetic Construct
  source 1..21: mol_type = other RNA
tggaatgtaaagaagtatgta

SEQ ID NO: 55918 - RNA, 18 nt, Synthetic Construct
  source 1..18: mol_type = other RNA
tccgacatgcgagggttc

SEQ ID NO: 55919 - RNA, 22 nt, Synthetic Construct
  source 1..22: mol_type = other RNA
cattgcacttgtctcggtctgg

SEQ ID NO: 55920 - RNA, 21 nt, Synthetic Construct
  source 1..21: mol_type = other RNA
tgaggtagtagattgtatagc

SEQ ID NO: 55921 - RNA, 21 nt, Synthetic Construct
  source 1..21: mol_type = other RNA
tgaggtagtagattgtatagc

SEQ ID NO: 55922 - RNA, 22 nt, Synthetic Construct
  source 1..22: mol_type = other RNA
ttatcagaatctccaggggtac

SEQ ID NO: 55923 - RNA, 23 nt, Synthetic Construct
  source 1..23: mol_type = other RNA
tcctgtaccgagctgccccgaga

SEQ ID NO: 55924 - RNA, 23 nt, Synthetic Construct
  source 1..23: mol_type = other RNA
atgtcccacccccactcctgttt

SEQ ID NO: 55925 - RNA, 23 nt, Synthetic Construct
  source 1..23: mol_type = other RNA
atgtcccacccccactcctgttt

SEQ ID NO: 55926 - RNA, 23 nt, Synthetic Construct
  source 1..23: mol_type = other RNA
tcccgtactgagctgccccgaga

SEQ ID NO: 55927 - RNA, 22 nt, Synthetic Construct
  source 1..22: mol_type = other RNA
tttttcattattgctcctgacc

SEQ ID NO: 55928 - RNA, 22 nt, Synthetic Construct
  source 1..22: mol_type = other RNA
tttttcattattgctcctgacc

SEQ ID NO: 55929 - RNA, 22 nt, Synthetic Construct
  source 1..22: mol_type = other RNA
tagcagcacgtagatattggcg

SEQ ID NO: 55930 - RNA, 17 nt, Synthetic Construct
  source 1..17: mol_type = other RNA
aggaattgacggaaggg

SEQ ID NO: 55931 - RNA, 17 nt, Synthetic Construct
  source 1..17: mol_type = other RNA
aggaattgacggaaggg

SEQ ID NO: 55932 - RNA, 18 nt, Synthetic Construct
  source 1..18: mol_type = other RNA
gtctgcctcagcgtcggt

SEQ ID NO: 55933 - RNA, 18 nt, Synthetic Construct
  source 1..18: mol_type = other RNA
gtctgcctcagcgtcggt

SEQ ID NO: 55934 - RNA, 16 nt, Synthetic Construct
  source 1..16: mol_type = other RNA
ccctttgtacacaccg

SEQ ID NO: 55935 - RNA, 16 nt, Synthetic Construct
  source 1..16: mol_type = other RNA
ccctttgtacacaccg

SEQ ID NO: 55936 - RNA, 16 nt, Synthetic Construct
  source 1..16: mol_type = other RNA
tgcgtagatatgcgga

SEQ ID NO: 55937 - RNA, 16 nt, Synthetic Construct
  source 1..16: mol_type = other RNA
tgcgtagatatgcgga

SEQ ID NO: 55938 - RNA, 22 nt, Synthetic Construct
  source 1..22: mol_type = other RNA
tagctgcacgtaaatattggcg

SEQ ID NO: 55939 - RNA, 22 nt, Synthetic Construct
  source 1..22: mol_type = other RNA
tagctgcacgtaaatattggcg

SEQ ID NO: 55940 - RNA, 25 nt, Synthetic Construct
  source 1..25: mol_type = other RNA
ggtaaaatagctgagtgaagcattg

SEQ ID NO: 55941 - RNA, 25 nt, Synthetic Construct
  source 1..25: mol_type = other RNA
caaagtgctgttcgtgcaggtagtt

SEQ ID NO: 55942 - RNA, 25 nt, Synthetic Construct
  source 1..25: mol_type = other RNA
caaagtgctgttcgtgcaggtagtt

SEQ ID NO: 55943 - RNA, 22 nt, Synthetic Construct
  source 1..22: mol_type = other RNA
tggagagaaaggcagttcctga

SEQ ID NO: 55944 - RNA, 21 nt, Synthetic Construct
  source 1..21: mol_type = other RNA
tgaggggcagagggcgagact

SEQ ID NO: 55945 - RNA, 27 nt, Synthetic Construct
  source 1..27: mol_type = other RNA
cccccccactgctaaatttgactggct

SEQ ID NO: 55946 - RNA, 27 nt, Synthetic Construct
  source 1..27: mol_type = other RNA
cccccccactgctaaatttgactggct

SEQ ID NO: 55947 - RNA, 21 nt, Synthetic Construct
  source 1..21: mol_type = other RNA
tgaggtagtagactgtatagt

SEQ ID NO: 55948 - RNA, 21 nt, Synthetic Construct
  source 1..21: mol_type = other RNA
tgaggtagtagactgtatagt

SEQ ID NO: 55949 - RNA, 16 nt, Synthetic Construct
  source 1..16: mol_type = other RNA
gcaagaggtcagcggt

SEQ ID NO: 55950 - RNA, 27 nt, Synthetic Construct
  source 1..27: mol_type = other RNA
catgcgagagtaggacgttgccaggtt

SEQ ID NO: 55951 - RNA, 27 nt, Synthetic Construct
  source 1..27: mol_type = other RNA
catgcgagagtaggacgttgccaggtt

SEQ ID NO: 55952 - RNA, 23 nt, Synthetic Construct
  source 1..23: mol_type = other RNA
nggtaatacgacgtacttagtgt

SEQ ID NO: 55953 - RNA, 23 nt, Synthetic Construct
  source 1..23: mol_type = other RNA
nggtaatacgacgtacttagtgt

SEQ ID NO: 55954 - RNA, 29 nt, Synthetic Construct
  source 1..29: mol_type = other RNA
agtaaggtcagctaaataagctatcgggc

SEQ ID NO: 55955 - RNA, 29 nt, Synthetic Construct
  source 1..29: mol_type = other RNA
agtaaggtcagctaaataagctatcgggc

SEQ ID NO: 55956 - RNA, 20 nt, Synthetic Construct
  source 1..20: mol_type = other RNA
tgaggtggtaggttgtatag

SEQ ID NO: 55957 - RNA, 27 nt, Synthetic Construct
  source 1..27: mol_type = other RNA
ccccccactgctaaacttgactggctt

SEQ ID NO: 55958 - RNA, 27 nt, Synthetic Construct
  source 1..27: mol_type = other RNA
ccccccactgctaaacttgactggctt

SEQ ID NO: 55959 - RNA, 19 nt, Synthetic Construct
  source 1..19: mol_type = other RNA
tgaggtagtaggttgtata

SEQ ID NO: 55960 - RNA, 23 nt, Synthetic Construct
  source 1..23: mol_type = other RNA
cgctcacggaaagagaatgaagc

SEQ ID NO: 55961 - RNA, 24 nt, Synthetic Construct
  source 1..24: mol_type = other RNA
gaggtgtagaataggtgggagctt

SEQ ID NO: 55962 - RNA, 23 nt, Synthetic Construct
  source 1..23: mol_type = other RNA
cagcggaatcccaaaagcagctg

SEQ ID NO: 55963 - RNA, 23 nt, Synthetic Construct
  source 1..23: mol_type = other RNA
accattcgtagacgacctgcttc

SEQ ID NO: 55964 - RNA, 22 nt, Synthetic Construct
  source 1..22: mol_type = other RNA
gaagttgttcgtggtggattcg

SEQ ID NO: 55965 - RNA, 22 nt, Synthetic Construct
  source 1..22: mol_type = other RNA
gaagttgttcgtggtggattcg

SEQ ID NO: 55966 - RNA, 23 nt, Synthetic Construct
  source 1..23: mol_type = other RNA
caaagtgctgtacgtgcaggtag

SEQ ID NO: 55967 - RNA, 22 nt, Synthetic Construct
  source 1..22: mol_type = other RNA
tgtagtgtatcctactttatgg

SEQ ID NO: 55968 - RNA, 22 nt, Synthetic Construct
  source 1..22: mol_type = other RNA
tgtagtgtatcctactttatgg

SEQ ID NO: 55969 - RNA, 19 nt, Synthetic Construct
  source 1..19: mol_type = other RNA
aacagtcaggatgttggct

SEQ ID NO: 55970 - RNA, 30 nt, Synthetic Construct; identical to SEQ ID NO: 6405
  source 1..30: mol_type = other RNA

SEQ ID NO: 55971 - RNA, 22 nt, Synthetic Construct
  source 1..22: mol_type = other RNA
tcctgtactgagctgcctcgag

SEQ ID NO: 55972 - RNA, 22 nt, Synthetic Construct
  source 1..22: mol_type = other RNA
tcctgtactgagctgcctcgag

SEQ ID NO: 55973 - RNA, 22 nt, Synthetic Construct
  source 1..22: mol_type = other RNA
tccagtactgagctgccccgag

SEQ ID NO: 55974 - RNA, 23 nt, Synthetic Construct
  source 1..23: mol_type = other RNA
tgtagtgtttcctactttatgga

SEQ ID NO: 55975 - RNA, 21 nt, Synthetic Construct
  source 1..21: mol_type = other RNA
cgaggtagtagattgtatagt

SEQ ID NO: 55976 - RNA, 21 nt, Synthetic Construct
  source 1..21: mol_type = other RNA
cgaggtagtagattgtatagt

SEQ ID NO: 55977 - RNA, 22 nt, Synthetic Construct
  source 1..22: mol_type = other RNA
cagcagcacgtaaatattggcg

SEQ ID NO: 55978 - RNA, 22 nt, Synthetic Construct
  source 1..22: mol_type = other RNA
cagcagcacgtaaatattggcg

SEQ ID NO: 55979 - RNA, 20 nt, Synthetic Construct
  source 1..20: mol_type = other RNA
tcagtagctcgaggaaaaga

SEQ ID NO: 55980 - RNA, 27 nt, Synthetic Construct
  source 1..27: mol_type = other RNA
ccccccactgctaaatttgactgactt

SEQ ID NO: 55981 - RNA, 21 nt, Synthetic Construct
  source 1..21: mol_type = other RNA
tgaggtagtaggctgtatagt

SEQ ID NO: 55982 - RNA, 25 nt, Synthetic Construct
  source 1..25: mol_type = other RNA
tgaggtagtaggttgtgtggttatt

SEQ ID NO: 55983 - RNA, 22 nt, Synthetic Construct
  source 1..22: mol_type = other RNA
tggaatgtaaagaagtatgtaa

SEQ ID NO: 55984 - RNA, 22 nt, Synthetic Construct
  source 1..22: mol_type = other RNA
tggaatgtaaagaagtatgtaa

SEQ ID NO: 55985 - RNA, 22 nt, Synthetic Construct
  source 1..22: mol_type = other RNA
tgaggtagcaggttgtgtggtt

SEQ ID NO: 55986 - RNA, 23 nt, Synthetic Construct
  source 1..23: mol_type = other RNA
tggtaatacggcgtacttagtgt

SEQ ID NO: 55987 - RNA, 23 nt, Synthetic Construct
  source 1..23: mol_type = other RNA
tggtaatacggcgtacttagtgt

SEQ ID NO: 55988 - RNA, 22 nt, Synthetic Construct
  source 1..22: mol_type = other RNA
tcgtaccgtgagtaataatgcg

SEQ ID NO: 55989 - RNA, 22 nt, Synthetic Construct
  source 1..22: mol_type = other RNA
tgaggtagtgggttgtatagtt

SEQ ID NO: 55990 - RNA, 23 nt, Synthetic Construct
  source 1..23: mol_type = other RNA
tcctgtaccgagctgccccgaga

SEQ ID NO: 55991 - RNA, 22 nt, Synthetic Construct
  source 1..22: mol_type = other RNA
cggctctgggtctgtggggagt

SEQ ID NO: 55992 - RNA, 15 nt, Synthetic Construct
  source 1..15: mol_type = other RNA
ggccgtcgtcagctc

SEQ ID NO: 55993 - RNA, 21 nt, Synthetic Construct
  source 1..21: mol_type = other RNA
tcctgcactgagctgccccga

SEQ ID NO: 55994 - RNA, 22 nt, Synthetic Construct
  source 1..22: mol_type = other RNA
tgaggtagtaggttgtgtgatt

SEQ ID NO: 55995 - RNA, 22 nt, Synthetic Construct
  source 1..22: mol_type = other RNA
tgaggtagtaggttgtgtgatt

SEQ ID NO: 55996 - RNA, 31 nt, Synthetic Construct; identical to SEQ ID NO: 32560
  source 1..31: mol_type = other RNA

SEQ ID NO: 55997 - RNA, 23 nt, Synthetic Construct
  source 1..23: mol_type = other RNA
ggcggttatgcaagacagaggtg

SEQ ID NO: 55998 - RNA, 23 nt, Synthetic Construct
  source 1..23: mol_type = other RNA
ggcggttatgcaagacagaggtg

SEQ ID NO: 55999 - RNA, 23 nt, Synthetic Construct
  source 1..23: mol_type = other RNA
gtcagtttgtcaaataccccaat

SEQ ID NO: 56000 - RNA, 21 nt, Synthetic Construct
  source 1..21: mol_type = other RNA
tggggtagtagattgtatagt

SEQ ID NO: 56001 - RNA, 21 nt, Synthetic Construct
  source 1..21: mol_type = other RNA
tggggtagtagattgtatagt

SEQ ID NO: 56002 - RNA, 20 nt, Synthetic Construct
  source 1..20: mol_type = other RNA
ctgacctatgaattgacagc

SEQ ID NO: 56003 - RNA, 23 nt, Synthetic Construct
  source 1..23: mol_type = other RNA
caaagtgctgctcgtgcaggtag

SEQ ID NO: 56004 - RNA, 26 nt, Synthetic Construct
  source 1..26: mol_type = other RNA
caacggaatcccaaaagcagctgttt

SEQ ID NO: 56005 - RNA, 26 nt, Synthetic Construct
  source 1..26: mol_type = other RNA
caacggaatcccaaaagcagctgttt

SEQ ID NO: 56006 - RNA, 18 nt, Synthetic Construct
  source 1..18: mol_type = other RNA
gtcacggtggccgagtgg

SEQ ID NO: 56007 - RNA, 23 nt, Synthetic Construct
  source 1..23: mol_type = other RNA
tcctgtactgagctaccccgaga

SEQ ID NO: 56008 - RNA, 20 nt, Synthetic Construct
  source 1..20: mol_type = other RNA
cgtaccgtgagtaataatgc

SEQ ID NO: 56009 - RNA, 20 nt, Synthetic Construct
  source 1..20: mol_type = other RNA
cgtaccgtgagtaataatgc

SEQ ID NO: 56010 - RNA, 22 nt, Synthetic Construct
  source 1..22: mol_type = other RNA
ctttcagtcggatgtttacagt

SEQ ID NO: 56011 - RNA, 22 nt, Synthetic Construct
  source 1..22: mol_type = other RNA
ctttcagtcggatgtttacagt

SEQ ID NO: 56012 - RNA, 20 nt, Synthetic Construct
  source 1..20: mol_type = other RNA
gctattgacgaccgtaccgc

SEQ ID NO: 56013 - RNA, 22 nt, Synthetic Construct
  source 1..22: mol_type = other RNA
tagcagcacataatggtttgtg

SEQ ID NO: 56014 - RNA, 23 nt, Synthetic Construct
  source 1..23: mol_type = other RNA
ttccccttggggttgtaggacca

SEQ ID NO: 56015 - RNA, 23 nt, Synthetic Construct
  source 1..23: mol_type = other RNA
ttccccttggggttgtaggacca

SEQ ID NO: 56016 - RNA, 22 nt, Synthetic Construct
  source 1..22: mol_type = other RNA
tgtgcaaatctatgcaaaactg

SEQ ID NO: 56017 - RNA, 22 nt, Synthetic Construct
  source 1..22: mol_type = other RNA
gcagtagtctgcacattggtta

SEQ ID NO: 56018 - RNA, 22 nt, Synthetic Construct
  source 1..22: mol_type = other RNA
gcagtagtctgcacattggtta

SEQ ID NO: 56019 - RNA, 22 nt, Synthetic Construct
  source 1..22: mol_type = other RNA
aattgcacggtatccatctgta

SEQ ID NO: 56020 - RNA, 16 nt, Synthetic Construct
  source 1..16: mol_type = other RNA
gtctacggacatacca

SEQ ID NO: 56021 - RNA, 16 nt, Synthetic Construct
  source 1..16: mol_type = other RNA
gtctacggacatacca

SEQ ID NO: 56022 - RNA, 23 nt, Synthetic Construct
  source 1..23: mol_type = other RNA
caaagtgctgtccgtgcaggtag

SEQ ID NO: 56023 - RNA, 23 nt, Synthetic Construct
  source 1..23: mol_type = other RNA
tgtcggtttgtcaaataccccaa

SEQ ID NO: 56024 - RNA, 22 nt, Synthetic Construct
  source 1..22: mol_type = other RNA
tgaggtagtaggtagtgtggtt

SEQ ID NO: 56025 - RNA, 22 nt, Synthetic Construct
  source 1..22: mol_type = other RNA
tgaggtagtaggtagtgtggtt

SEQ ID NO: 56026 - RNA, 17 nt, Synthetic Construct
  source 1..17: mol_type = other RNA
gggaacgtgagctgggt

SEQ ID NO: 56027 - RNA, 17 nt, Synthetic Construct
  source 1..17: mol_type = other RNA
gggaacgtgagctgggt

SEQ ID NO: 56028 - RNA, 22 nt, Synthetic Construct
  source 1..22: mol_type = other RNA
tcctgtacagagctgccccgag

SEQ ID NO: 56029 - RNA, 20 nt, Synthetic Construct
  source 1..20: mol_type = other RNA
gccatcatttaaagaaagcg

SEQ ID NO: 56030 - RNA, 15 nt, Synthetic Construct
  source 1..15: mol_type = other RNA
acggtcctaaggtag

SEQ ID NO: 56031 - RNA, 22 nt, Synthetic Construct
  source 1..22: mol_type = other RNA
tgaagtagtagattgtatagtt

SEQ ID NO: 56032 - RNA, 22 nt, Synthetic Construct
  source 1..22: mol_type = other RNA
tgaagtagtagattgtatagtt

SEQ ID NO: 56033 - RNA, 22 nt, Synthetic Construct
  source 1..22: mol_type = other RNA
tgaggtagtagtttgtgctatt

SEQ ID NO: 56034 - RNA, 22 nt, Synthetic Construct
  source 1..22: mol_type = other RNA
tgaggtagtagtttgtgctatt

SEQ ID NO: 56035 - RNA, 20 nt, Synthetic Construct
  source 1..20: mol_type = other RNA
tgaggtagaaggttgtatag

SEQ ID NO: 56036 - RNA, 20 nt, Synthetic Construct
  source 1..20: mol_type = other RNA
tgaggtagaaggttgtatag

SEQ ID NO: 56037 - RNA, 26 nt, Synthetic Construct
  source 1..26: mol_type = other RNA
gaggaacactagtggcgtaggcgaga

SEQ ID NO: 56038 - RNA, 26 nt, Synthetic Construct
  source 1..26: mol_type = other RNA
gaggaacactagtggcgtaggcgaga

SEQ ID NO: 56039 - RNA, 27 nt, Synthetic Construct
  source 1..27: mol_type = other RNA
ccccccactgccaaatttgactggctt

SEQ ID NO: 56040 - RNA, 22 nt, Synthetic Construct
  source 1..22: mol_type = other RNA
tgaagtagtaggttgtatagtt

SEQ ID NO: 56041 - RNA, 22 nt, Synthetic Construct
  source 1..22: mol_type = other RNA
tccccttggggttgtaggacca

SEQ ID NO: 56042 - RNA, 22 nt, Synthetic Construct
  source 1..22: mol_type = other RNA
tccccttggggttgtaggacca

SEQ ID NO: 56043 - RNA, 22 nt, Synthetic Construct
  source 1..22: mol_type = other RNA
tggcagcacgtaaatattggcg

SEQ ID NO: 56044 - RNA, 22 nt, Synthetic Construct
  source 1..22: mol_type = other RNA
tggcagcacgtaaatattggcg

SEQ ID NO: 56045 - RNA, 16 nt, Synthetic Construct
  source 1..16: mol_type = other RNA
gccagcagccgcggta

SEQ ID NO: 56046 - RNA, 18 nt, Synthetic Construct
  source 1..18: mol_type = other RNA
gggagtatggtcgcaagg

SEQ ID NO: 56047 - RNA, 18 nt, Synthetic Construct
  source 1..18: mol_type = other RNA
gggagtatggtcgcaagg

SEQ ID NO: 56048 - RNA, 22 nt, Synthetic Construct
  source 1..22: mol_type = other RNA
tcctgtactgagctgccccgat

SEQ ID NO: 56049 - RNA, 22 nt, Synthetic Construct
  source 1..22: mol_type = other RNA
tcctgtactgagctgccccgat

SEQ ID NO: 56050 - RNA, 18 nt, Synthetic Construct
  source 1..18: mol_type = other RNA
cgactcttagcggtggat

SEQ ID NO: 56051 - RNA, 18 nt, Synthetic Construct
  source 1..18: mol_type = other RNA
cgactcttagcggtggat

SEQ ID NO: 56052 - RNA, 23 nt, Synthetic Construct
  source 1..23: mol_type = other RNA
tcggatccgtctgagcttggctt

SEQ ID NO: 56053 - RNA, 23 nt, Synthetic Construct
  source 1..23: mol_type = other RNA
tcggatccgtctgagcttggctt

SEQ ID NO: 56054 - RNA, 23 nt, Synthetic Construct
  source 1..23: mol_type = other RNA
tgagaggcagagagcgagacttt

SEQ ID NO: 56055 - RNA, 23 nt, Synthetic Construct
  source 1..23: mol_type = other RNA
tcctgtgctgagctgccccgagt

SEQ ID NO: 56056 - RNA, 35 nt, Synthetic Construct; identical to SEQ ID NO: 1490
  source 1..35: mol_type = other RNA

SEQ ID NO: 56057 - RNA, 15 nt, Synthetic Construct
  source 1..15: mol_type = other RNA
gtcaggatgttggct

SEQ ID NO: 56058 - RNA, 21 nt, Synthetic Construct
  source 1..21: mol_type = other RNA
tgaggtagcaggttgtgtggt

SEQ ID NO: 56059 - RNA, 22 nt, Synthetic Construct
  source 1..22: mol_type = other RNA
tcgtaccgtgagtaataatgca

SEQ ID NO: 56060 - RNA, 22 nt, Synthetic Construct
  source 1..22: mol_type = other RNA
tcgtaccgtgagtaatgatgcg

SEQ ID NO: 56061 - RNA, 22 nt, Synthetic Construct
  source 1..22: mol_type = other RNA
tatcagcacgtaaatattggcg

SEQ ID NO: 56062 - RNA, 22 nt, Synthetic Construct
  source 1..22: mol_type = other RNA
tatcagcacgtaaatattggcg

SEQ ID NO: 56063 - RNA, 20 nt, Synthetic Construct
  source 1..20: mol_type = other RNA
tgtaaacatccttgactgga

SEQ ID NO: 56064 - RNA, 20 nt, Synthetic Construct
  source 1..20: mol_type = other RNA
tgtaaacatccttgactgga

SEQ ID NO: 56065 - RNA, 16 nt, Synthetic Construct
  source 1..16: mol_type = other RNA
gtctatggccatacca

SEQ ID NO: 56066 - RNA, 16 nt, Synthetic Construct
  source 1..16: mol_type = other RNA
gtctatggccatacca

SEQ ID NO: 56067 - RNA, 15 nt, Synthetic Construct
  source 1..15: mol_type = other RNA
gtcaggatgttggct

SEQ ID NO: 56068 - RNA, 15 nt, Synthetic Construct
  source 1..15: mol_type = other RNA
gtcaggatgttggct

SEQ ID NO: 56069 - RNA, 24 nt, Synthetic Construct
  source 1..24: mol_type = other RNA
tgtaaacatccctgactggaagct

SEQ ID NO: 56070 - RNA, 22 nt, Synthetic Construct
  source 1..22: mol_type = other RNA
atgctgacatatttactagagg

SEQ ID NO: 56071 - RNA, 27 nt, Synthetic Construct
  source 1..27: mol_type = other RNA
cctcccactgctaaatttgactggctt

SEQ ID NO: 56072 - RNA, 27 nt, Synthetic Construct
  source 1..27: mol_type = other RNA
cctcccactgctaaatttgactggctt

SEQ ID NO: 56073 - RNA, 23 nt, Synthetic Construct
  source 1..23: mol_type = other RNA
cagtgcaatgttaaaagggcatt

SEQ ID NO: 56074 - RNA, 23 nt, Synthetic Construct
  source 1..23: mol_type = other RNA
cagtgcaatgttaaaagggcatt

SEQ ID NO: 56075 - RNA, 22 nt, Synthetic Construct
  source 1..22: mol_type = other RNA
tgtcagtttgccaaatacccca

SEQ ID NO: 56076 - RNA, 16 nt, Synthetic Construct
  source 1..16: mol_type = other RNA
gtccacggccatacca

SEQ ID NO: 56077 - RNA, 16 nt, Synthetic Construct
  source 1..16: mol_type = other RNA
gtccacggccatacca

SEQ ID NO: 56078 - RNA, 21 nt, Synthetic Construct
  source 1..21: mol_type = other RNA
tggagtgtgacaatggcgttt

SEQ ID NO: 56079 - RNA, 21 nt, Synthetic Construct
  source 1..21: mol_type = other RNA
tggagtgtgacaatggcgttt

SEQ ID NO: 56080 - RNA, 22 nt, Synthetic Construct
  source 1..22: mol_type = other RNA
tgaggtagtaggttgcatagtt

SEQ ID NO: 56081 - RNA, 22 nt, Synthetic Construct
  source 1..22: mol_type = other RNA
tgaggtagtaggttgcatagtt

SEQ ID NO: 56082 - RNA, 17 nt, Synthetic Construct
  source 1..17: mol_type = other RNA
ccccggcatctccacca

SEQ ID NO: 56083 - RNA, 17 nt, Synthetic Construct
  source 1..17: mol_type = other RNA
ccccggcatctccacca

SEQ ID NO: 56084 - RNA, 15 nt, Synthetic Construct
  source 1..15: mol_type = other RNA
gcaagtcgaacggta

SEQ ID NO: 56085 - RNA, 15 nt, Synthetic Construct
  source 1..15: mol_type = other RNA
gcaagtcgaacggta

SEQ ID NO: 56086 - RNA, 27 nt, Synthetic Construct
  source 1..27: mol_type = other RNA
gactcttagcggtggatcactcggctc

SEQ ID NO: 56087 - RNA, 27 nt, Synthetic Construct
  source 1..27: mol_type = other RNA
gactcttagcggtggatcactcggctc

SEQ ID NO: 56088 - RNA, 30 nt, Synthetic Construct; identical to SEQ ID NO: 19738
  source 1..30: mol_type = other RNA

SEQ ID NO: 56089 - RNA, 30 nt, Synthetic Construct; identical to SEQ ID NO: 19738
  source 1..30: mol_type = other RNA

SEQ ID NO: 56090 - RNA, 36 nt, Synthetic Construct; identical to SEQ ID NO: 2469
  source 1..36: mol_type = other RNA

SEQ ID NO: 56091 - RNA, 36 nt, Synthetic Construct; identical to SEQ ID NO: 2469
  source 1..36: mol_type = other RNA

SEQ ID NO: 56092 - RNA, 23 nt, Synthetic Construct
  source 1..23: mol_type = other RNA
ttcaagtaattcaggataggttt

SEQ ID NO: 56093 - RNA, 23 nt, Synthetic Construct
  source 1..23: mol_type = other RNA
ttcaagtaattcaggataggttt

SEQ ID NO: 56094 - RNA, 25 nt, Synthetic Construct
  source 1..25: mol_type = other RNA
ttgagggtatgagatcgagacgaca

SEQ ID NO: 56095 - RNA, 22 nt, Synthetic Construct
  source 1..22: mol_type = other RNA
tgaggtaataggttgtatagtt

SEQ ID NO: 56096 - RNA, 22 nt, Synthetic Construct
  source 1..22: mol_type = other RNA
tgtggtagtagtttgtgctgtt

SEQ ID NO: 56097 - RNA, 22 nt, Synthetic Construct
  source 1..22: mol_type = other RNA
tgtggtagtagtttgtgctgtt

SEQ ID NO: 56098 - RNA, 22 nt, Synthetic Construct
  source 1..22: mol_type = other RNA
tacagtactgtgataactgaag

SEQ ID NO: 56099 - RNA, 22 nt, Synthetic Construct
  source 1..22: mol_type = other RNA
tacagtactgtgataactgaag

SEQ ID NO: 56100 - RNA, 27 nt, Synthetic Construct
  source 1..27: mol_type = other RNA
gatttccccttggggttgtaggaccac

SEQ ID NO: 56101 - RNA, 27 nt, Synthetic Construct
  source 1..27: mol_type = other RNA
gatttccccttggggttgtaggaccac

SEQ ID NO: 56102 - RNA, 21 nt, Synthetic Construct
  source 1..21: mol_type = other RNA
tggggtagtagtttgtgctgt

SEQ ID NO: 56103 - RNA, 21 nt, Synthetic Construct
  source 1..21: mol_type = other RNA
tggggtagtagtttgtgctgt

SEQ ID NO: 56104 - RNA, 21 nt, Synthetic Construct
  source 1..21: mol_type = other RNA
cccataaagtagaaagcacta

SEQ ID NO: 56105 - RNA, 21 nt, Synthetic Construct
  source 1..21: mol_type = other RNA
cccataaagtagaaagcacta

SEQ ID NO: 56106 - RNA, 21 nt, Synthetic Construct
  source 1..21: mol_type = other RNA
caaagtgctgttcgtgcaggt

SEQ ID NO: 56107 - RNA, 22 nt, Synthetic Construct
  source 1..22: mol_type = other RNA
taactcattaagcgaatctcgc

SEQ ID NO: 56108 - RNA, 22 nt, Synthetic Construct
  source 1..22: mol_type = other RNA
taactcattaagcgaatctcgc

SEQ ID NO: 56109 - RNA, 21 nt, Synthetic Construct
  source 1..21: mol_type = other RNA
aagctgccagttgaagaactg

SEQ ID NO: 56110 - RNA, 21 nt, Synthetic Construct
  source 1..21: mol_type = other RNA
aagctgccagttgaagaactg

SEQ ID NO: 56111 - RNA, 25 nt, Synthetic Construct
  source 1..25: mol_type = other RNA
tcccacatggtctagcggttaggat

SEQ ID NO: 56112 - RNA, 25 nt, Synthetic Construct
  source 1..25: mol_type = other RNA
tcccacatggtctagcggttaggat

SEQ ID NO: 56113 - RNA, 23 nt, Synthetic Construct
  source 1..23: mol_type = other RNA
cgaagtgctgttcgtgcaggtag

SEQ ID NO: 56114 - RNA, 22 nt, Synthetic Construct
  source 1..22: mol_type = other RNA
tgaggtagtagattgtatagct

SEQ ID NO: 56115 - RNA, 22 nt, Synthetic Construct
  source 1..22: mol_type = other RNA
tgaggtagtagattgtatagct

SEQ ID NO: 56116 - RNA, 23 nt, Synthetic Construct
  source 1..23: mol_type = other RNA
tgaggtagtaggttgtgtggctt

SEQ ID NO: 56117 - RNA, 20 nt, Synthetic Construct
  source 1..20: mol_type = other RNA
gctattgacgaccgtaccgc

SEQ ID NO: 56118 - RNA, 25 nt, Synthetic Construct
  source 1..25: mol_type = other RNA
ggtaaaattgctgagtgaagcattg

SEQ ID NO: 56119 - RNA, 20 nt, Synthetic Construct
  source 1..20: mol_type = other RNA
tgaggtagtaggtcgtgtgg

SEQ ID NO: 56120 - RNA, 29 nt, Synthetic Construct
  source 1..29: mol_type = other RNA
gtaatggcgggaactctggacagactgcc

SEQ ID NO: 56121 - RNA, 29 nt, Synthetic Construct
  source 1..29: mol_type = other RNA
gtaatggcgggaactctggacagactgcc

SEQ ID NO: 56122 - RNA, 20 nt, Synthetic Construct
  source 1..20: mol_type = other RNA
agaggtagtaggttgtgtgg

SEQ ID NO: 56123 - RNA, 20 nt, Synthetic Construct
  source 1..20: mol_type = other RNA
agaggtagtaggttgtgtgg

SEQ ID NO: 56124 - RNA, 33 nt, Synthetic Construct; identical to SEQ ID NO: 3082
  source 1..33: mol_type = other RNA

SEQ ID NO: 56125 - RNA, 16 nt, Synthetic Construct
  source 1..16: mol_type = other RNA
gtctacggccacacca

SEQ ID NO: 56126 - RNA, 16 nt, Synthetic Construct
  source 1..16: mol_type = other RNA
gtctacggccacacca

SEQ ID NO: 56127 - RNA, 18 nt, Synthetic Construct
  source 1..18: mol_type = other RNA
tctaatgagactgccggt

SEQ ID NO: 56128 - RNA, 27 nt, Synthetic Construct
  source 1..27: mol_type = other RNA
cgactcttagcggtggatcactcggct

SEQ ID NO: 56129 - RNA, 21 nt, Synthetic Construct
  source 1..21: mol_type = other RNA
tgaggtagtagtttgtgctga

SEQ ID NO: 56130 - RNA, 20 nt, Synthetic Construct
  source 1..20: mol_type = other RNA
tattgcactcgtcccggcct

SEQ ID NO: 56131 - RNA, 20 nt, Synthetic Construct
  source 1..20: mol_type = other RNA
tattgcactcgtcccggcct

SEQ ID NO: 56132 - RNA, 23 nt, Synthetic Construct
  source 1..23: mol_type = other RNA
tgaggggcagagagcgagactta

SEQ ID NO: 56133 - RNA, 23 nt, Synthetic Construct
  source 1..23: mol_type = other RNA
tgaggggcagagagcgagactta

SEQ ID NO: 56134 - RNA, 23 nt, Synthetic Construct
  source 1..23: mol_type = other RNA
taaggtgcatctagtgcagatag

SEQ ID NO: 56135 - RNA, 23 nt, Synthetic Construct
  source 1..23: mol_type = other RNA
taaggtgcatctagtgcagatag

SEQ ID NO: 56136 - RNA, 24 nt, Synthetic Construct
  source 1..24: mol_type = other RNA
tcctgtactgagctgccccgagat

SEQ ID NO: 56137 - RNA, 24 nt, Synthetic Construct
  source 1..24: mol_type = other RNA
tcctgtactgagctgccccgagat

SEQ ID NO: 56138 - RNA, 21 nt, Synthetic Construct
  source 1..21: mol_type = other RNA
cgaggtagtagattgtatagt

SEQ ID NO: 56139 - RNA, 21 nt, Synthetic Construct
  source 1..21: mol_type = other RNA
cgaggtagtagattgtatagt

SEQ ID NO: 56140 - RNA, 22 nt, Synthetic Construct
  source 1..22: mol_type = other RNA
tagcagcacataatggtttgtg

SEQ ID NO: 56141 - RNA, 22 nt, Synthetic Construct
  source 1..22: mol_type = other RNA
tagcagcacataatggtttgtg

SEQ ID NO: 56142 - RNA, 22 nt, Synthetic Construct
  source 1..22: mol_type = other RNA
tattgcacttgtcccagcctgt

SEQ ID NO: 56143 - RNA, 27 nt, Synthetic Construct
  source 1..27: mol_type = other RNA
gactcttagcggtggatcactcggctc

SEQ ID NO: 56144 - RNA, 22 nt, Synthetic Construct
  source 1..22: mol_type = other RNA
tgagatagtagattgtatagtt

SEQ ID NO: 56145 - RNA, 22 nt, Synthetic Construct
  source 1..22: mol_type = other RNA
tgagatagtagattgtatagtt

SEQ ID NO: 56146 - RNA, 16 nt, Synthetic Construct
  source 1..16: mol_type = other RNA
agcaagtcgaacggta

SEQ ID NO: 56147 - RNA, 16 nt, Synthetic Construct
  source 1..16: mol_type = other RNA
agcaagtcgaacggta

SEQ ID NO: 56148 - RNA, 22 nt, Synthetic Construct
  source 1..22: mol_type = other RNA
tgaggtagcaggttgtatagtt

SEQ ID NO: 56149 - RNA, 22 nt, Synthetic Construct
  source 1..22: mol_type = other RNA
tgaggtagcaggttgtatagtt

SEQ ID NO: 56150 - RNA, 26 nt, Synthetic Construct
  source 1..26: mol_type = other RNA
gacttaccaaacctatgcaaactccg

SEQ ID NO: 56151 - RNA, 26 nt, Synthetic Construct
  source 1..26: mol_type = other RNA
gacttaccaaacctatgcaaactccg

SEQ ID NO: 56152 - RNA, 22 nt, Synthetic Construct
  source 1..22: mol_type = other RNA
ccctgtactgagctgccccgag

SEQ ID NO: 56153 - RNA, 22 nt, Synthetic Construct
  source 1..22: mol_type = other RNA
tgaggtagtagattgtatggtt

SEQ ID NO: 56154 - RNA, 22 nt, Synthetic Construct
  source 1..22: mol_type = other RNA
tgaggtagtagattgtatggtt

SEQ ID NO: 56155 - RNA, 21 nt, Synthetic Construct
  source 1..21: mol_type = other RNA
tggagcgtgacaatggtgttt

SEQ ID NO: 56156 - RNA, 21 nt, Synthetic Construct
  source 1..21: mol_type = other RNA
tggagcgtgacaatggtgttt

SEQ ID NO: 56157 - RNA, 22 nt, Synthetic Construct
  source 1..22: mol_type = other RNA
tcctgtactgagctgtcccgag

SEQ ID NO: 56158 - RNA, 22 nt, Synthetic Construct
  source 1..22: mol_type = other RNA
tcctgtactgagctgtcccgag

SEQ ID NO: 56159 - RNA, 22 nt, Synthetic Construct
  source 1..22: mol_type = other RNA
tggggtagtaggttgtgtggtt

SEQ ID NO: 56160 - RNA, 22 nt, Synthetic Construct
  source 1..22: mol_type = other RNA
tattgtacttgtcccggcctgt

SEQ ID NO: 56161 - RNA, 22 nt, Synthetic Construct
  source 1..22: mol_type = other RNA
tattgtacttgtcccggcctgt

SEQ ID NO: 56162 - RNA, 21 nt, Synthetic Construct
  source 1..21: mol_type = other RNA
tgaggggcagggagcgagact

SEQ ID NO: 56163 - RNA, 15 nt, Synthetic Construct
  source 1..15: mol_type = other RNA
gtctcgccgacggca

SEQ ID NO: 56164 - RNA, 16 nt, Synthetic Construct
  source 1..16: mol_type = other RNA
tgcaagtcgaacggta

SEQ ID NO: 56165 - RNA, 16 nt, Synthetic Construct
  source 1..16: mol_type = other RNA
tgcaagtcgaacggta

SEQ ID NO: 56166 - RNA, 21 nt, Synthetic Construct
  source 1..21: mol_type = other RNA
tgacctatgaattgacagcca

SEQ ID NO: 56167 - RNA, 21 nt, Synthetic Construct
  source 1..21: mol_type = other RNA
tgacctatgaattgacagcca

SEQ ID NO: 56168 - RNA, 22 nt, Synthetic Construct
  source 1..22: mol_type = other RNA
tcgaatccgagtcacggcacca

SEQ ID NO: 56169 - RNA, 22 nt, Synthetic Construct
  source 1..22: mol_type = other RNA
tcgaatccgagtcacggcacca

SEQ ID NO: 56170 - RNA, 20 nt, Synthetic Construct
  source 1..20: mol_type = other RNA
tggggtagtaggttgtgtgg

SEQ ID NO: 56171 - RNA, 32 nt, Synthetic Construct; identical to SEQ ID NO: 30748
  source 1..32: mol_type = other RNA

SEQ ID NO: 56172 - RNA, 23 nt, Synthetic Construct
  source 1..23: mol_type = other RNA
tgaggtagtgggttgtgtggttt

SEQ ID NO: 56173 - RNA, 23 nt, Synthetic Construct
  source 1..23: mol_type = other RNA
tgaggtagtgggttgtgtggttt

SEQ ID NO: 56174 - RNA, 32 nt, Synthetic Construct; identical to SEQ ID NO: 4509
  source 1..32: mol_type = other RNA

SEQ ID NO: 56175 - RNA, 32 nt, Synthetic Construct; identical to SEQ ID NO: 4509
  source 1..32: mol_type = other RNA

SEQ ID NO: 56176 - RNA, 23 nt, Synthetic Construct
  source 1..23: mol_type = other RNA
cgaagtgctgttcgtgcaggtag

SEQ ID NO: 56177 - RNA, 23 nt, Synthetic Construct
  source 1..23: mol_type = other RNA
agcggcattgtacagggctatga

SEQ ID NO: 56178 - RNA, 23 nt, Synthetic Construct
  source 1..23: mol_type = other RNA
agcggcattgtacagggctatga

SEQ ID NO: 56179 - RNA, 23 nt, Synthetic Construct
  source 1..23: mol_type = other RNA
agcagcattgtacagggctatgg

SEQ ID NO: 56180 - RNA, 17 nt, Synthetic Construct
  source 1..17: mol_type = other RNA
acagtcaggatgttggc

SEQ ID NO: 56181 - RNA, 20 nt, Synthetic Construct
  source 1..20: mol_type = other RNA
agaggtagtagtttgtgctg

SEQ ID NO: 56182 - RNA, 21 nt, Synthetic Construct
  source 1..21: mol_type = other RNA
tggagtgtgacaatggtgctt

SEQ ID NO: 56183 - RNA, 21 nt, Synthetic Construct
  source 1..21: mol_type = other RNA
tggagtgtgacaatggtgctt

SEQ ID NO: 56184 - RNA, 27 nt, Synthetic Construct
  source 1..27: mol_type = other RNA
ccccccgctgctaaatttgactggcta

SEQ ID NO: 56185 - RNA, 27 nt, Synthetic Construct
  source 1..27: mol_type = other RNA
ccccccgctgctaaatttgactggcta

SEQ ID NO: 56186 - RNA, 24 nt, Synthetic Construct
  source 1..24: mol_type = other RNA
gttgaattgtggtctgtggacgtg

SEQ ID NO: 56187 - RNA, 24 nt, Synthetic Construct
  source 1..24: mol_type = other RNA
gttgaattgtggtctgtggacgtg

SEQ ID NO: 56188 - RNA, 23 nt, Synthetic Construct
  source 1..23: mol_type = other RNA
caaagtgctgttcgtgcgggtag

SEQ ID NO: 56189 - RNA, 18 nt, Synthetic Construct
  source 1..18: mol_type = other RNA
tctaatgagactgccggt

SEQ ID NO: 56190 - RNA, 23 nt, Synthetic Construct
  source 1..23: mol_type = other RNA
tgaggcagtaggttgtgtggttt

SEQ ID NO: 56191 - RNA, 21 nt, Synthetic Construct
  source 1..21: mol_type = other RNA
tggagtgtgacaatggtgctt

SEQ ID NO: 56192 - RNA, 21 nt, Synthetic Construct
  source 1..21: mol_type = other RNA
tggagtgtgacaatggtgctt

SEQ ID NO: 56193 - RNA, 15 nt, Synthetic Construct
  source 1..15: mol_type = other RNA
gcaagtcgagcggta

SEQ ID NO: 56194 - RNA, 22 nt, Synthetic Construct
  source 1..22: mol_type = other RNA
tgaggtagtaggtcgtatagtt

SEQ ID NO: 56195 - RNA, 22 nt, Synthetic Construct
  source 1..22: mol_type = other RNA
tgaggtagtaggtcgtatagtt

SEQ ID NO: 56196 - RNA, 29 nt, Synthetic Construct
  source 1..29: mol_type = other RNA
gtgcatgcactctggggttgtgggacagc

SEQ ID NO: 56197 - RNA, 29 nt, Synthetic Construct
  source 1..29: mol_type = other RNA
gtgcatgcactctggggttgtgggacagc

SEQ ID NO: 56198 - RNA, 21 nt, Synthetic Construct
  source 1..21: mol_type = other RNA
tgaggtagtaggttatgtggt

SEQ ID NO: 56199 - RNA, 19 nt, Synthetic Construct
  source 1..19: mol_type = other RNA
tcagtagctcgaggaaaag

SEQ ID NO: 56200 - RNA, 21 nt, Synthetic Construct
  source 1..21: mol_type = other RNA
atcggaacgtgcccagtcgtg

SEQ ID NO: 56201 - RNA, 23 nt, Synthetic Construct
  source 1..23: mol_type = other RNA
tcctgtactgagttgccccgaga

SEQ ID NO: 56202 - RNA, 23 nt, Synthetic Construct
  source 1..23: mol_type = other RNA
tcctgtactgagttgccccgaga

SEQ ID NO: 56203 - RNA, 25 nt, Synthetic Construct
  source 1..25: mol_type = other RNA
ttgaggatatgagatagagacgaca

SEQ ID NO: 56204 - RNA, 25 nt, Synthetic Construct
  source 1..25: mol_type = other RNA
ttgaggatatgagatagagacgaca

SEQ ID NO: 56205 - RNA, 22 nt, Synthetic Construct
  source 1..22: mol_type = other RNA
tgagatagtaggttgtgtggtt

SEQ ID NO: 56206 - RNA, 23 nt, Synthetic Construct
  source 1..23: mol_type = other RNA
caaagcgctgttcgtgcaggtag

SEQ ID NO: 56207 - RNA, 23 nt, Synthetic Construct
  source 1..23: mol_type = other RNA
caaagcgctgttcgtgcaggtag

SEQ ID NO: 56208 - RNA, 23 nt, Synthetic Construct
  source 1..23: mol_type = other RNA
caacggaatcccgaaagcagctg

SEQ ID NO: 56209 - RNA, 22 nt, Synthetic Construct
  source 1..22: mol_type = other RNA
tagcagcacgcaaatattggcg

SEQ ID NO: 56210 - RNA, 22 nt, Synthetic Construct
  source 1..22: mol_type = other RNA
tagcagcacgcaaatattggcg

SEQ ID NO: 56211 - RNA, 22 nt, Synthetic Construct
  source 1..22: mol_type = other RNA
tattgtacttgtcccggcctgt

SEQ ID NO: 56212 - RNA, 22 nt, Synthetic Construct
  source 1..22: mol_type = other RNA
tattgtacttgtcccggcctgt

SEQ ID NO: 56213 - RNA, 23 nt, Synthetic Construct
  source 1..23: mol_type = other RNA
tgaggggcagagagagagacttt

SEQ ID NO: 56214 - RNA, 27 nt, Synthetic Construct
  source 1..27: mol_type = other RNA
ttcaacttaacttgaccgctctgacca

SEQ ID NO: 56215 - RNA, 27 nt, Synthetic Construct
  source 1..27: mol_type = other RNA
ttcaacttaacttgaccgctctgacca

SEQ ID NO: 56216 - RNA, 22 nt, Synthetic Construct
  source 1..22: mol_type = other RNA
tgaggtagtaggtcgtgtggtt

SEQ ID NO: 56217 - RNA, 20 nt, Synthetic Construct
  source 1..20: mol_type = other RNA
caacggaatcccaaaagcag

SEQ ID NO: 56218 - RNA, 20 nt, Synthetic Construct
  source 1..20: mol_type = other RNA
caacggaatcccaaaagcag

SEQ ID NO: 56219 - RNA, 36 nt, Synthetic Construct; identical to SEQ ID NO: 10982
  source 1..36: mol_type = other RNA

SEQ ID NO: 56220 - RNA, 22 nt, Synthetic Construct
  source 1..22: mol_type = other RNA
gcagtagtctgcacattggtta

SEQ ID NO: 56221 - RNA, 22 nt, Synthetic Construct
  source 1..22: mol_type = other RNA
tagcagcacgcaaatattggcg

SEQ ID NO: 56222 - RNA, 22 nt, Synthetic Construct
  source 1..22: mol_type = other RNA
tgaggtaggaggttgtatagtt

SEQ ID NO: 56223 - RNA, 15 nt, Synthetic Construct
  source 1..15: mol_type = other RNA
acggtcctaaggtag

SEQ ID NO: 56224 - RNA, 15 nt, Synthetic Construct
  source 1..15: mol_type = other RNA
acggtcctaaggtag

SEQ ID NO: 56225 - RNA, 21 nt, Synthetic Construct
  source 1..21: mol_type = other RNA
ttctgtactgagctgccccga

SEQ ID NO: 56226 - RNA, 22 nt, Synthetic Construct
  source 1..22: mol_type = other RNA
tggagagaaaggcagttcctga

SEQ ID NO: 56227 - RNA, 22 nt, Synthetic Construct
  source 1..22: mol_type = other RNA
tcaagagcaataacgaaaaatg

SEQ ID NO: 56228 - RNA, 22 nt, Synthetic Construct
  source 1..22: mol_type = other RNA
tcaagagcaataacgaaaaatg

SEQ ID NO: 56229 - RNA, 24 nt, Synthetic Construct
  source 1..24: mol_type = other RNA
tcttggagtaggtcattgggtgtt

SEQ ID NO: 56230 - RNA, 20 nt, Synthetic Construct
  source 1..20: mol_type = other RNA
tgaggtggtaggttgtgtgg

SEQ ID NO: 56231 - RNA, 19 nt, Synthetic Construct
  source 1..19: mol_type = other RNA
tgtaaacatccttgactgg

SEQ ID NO: 56232 - RNA, 22 nt, Synthetic Construct
  source 1..22: mol_type = other RNA
tgaggaagtagattgtatagtt

SEQ ID NO: 56233 - RNA, 21 nt, Synthetic Construct
  source 1..21: mol_type = other RNA
tgaggtagtagattgtgtagt

SEQ ID NO: 56234 - RNA, 21 nt, Synthetic Construct
  source 1..21: mol_type = other RNA
tgaggtagtagattgtgtagt

SEQ ID NO: 56235 - RNA, 27 nt, Synthetic Construct
  source 1..27: mol_type = other RNA
ccccccaccgctaaatttgactggctt

SEQ ID NO: 56236 - RNA, 27 nt, Synthetic Construct
  source 1..27: mol_type = other RNA
ccccccaccgctaaatttgactggctt

SEQ ID NO: 56237 - RNA, 22 nt, Synthetic Construct
  source 1..22: mol_type = other RNA
tgaggtagaaggttgtgtggtt

SEQ ID NO: 56238 - RNA, 22 nt, Synthetic Construct
  source 1..22: mol_type = other RNA
tgaggtagaaggttgtgtggtt

SEQ ID NO: 56239 - RNA, 23 nt, Synthetic Construct
  source 1..23: mol_type = other RNA
atatcggaacgtgcccagtcgtg

SEQ ID NO: 56240 - RNA, 23 nt, Synthetic Construct
  source 1..23: mol_type = other RNA
atatcggaacgtgcccagtcgtg

SEQ ID NO: 56241 - RNA, 17 nt, Synthetic Construct
  source 1..17: mol_type = other RNA
tggccgggacagagggc

SEQ ID NO: 56242 - RNA, 27 nt, Synthetic Construct
  source 1..27: mol_type = other RNA
ggatttccccttggggttgtaggacca

SEQ ID NO: 56243 - RNA, 27 nt, Synthetic Construct
  source 1..27: mol_type = other RNA
ggatttccccttggggttgtaggacca

SEQ ID NO: 56244 - RNA, 23 nt, Synthetic Construct
  source 1..23: mol_type = other RNA
tgaggtagtaggttgtgcggttt

SEQ ID NO: 56245 - RNA, 23 nt, Synthetic Construct
  source 1..23: mol_type = other RNA
aatgacacgatcactcccgttgt

SEQ ID NO: 56246 - RNA, 23 nt, Synthetic Construct
  source 1..23: mol_type = other RNA
aatgacacgatcactcccgttgt

SEQ ID NO: 56247 - RNA, 20 nt, Synthetic Construct
  source 1..20: mol_type = other RNA
ggaggtagtaggttgtgtgg

SEQ ID NO: 56248 - RNA, 20 nt, Synthetic Construct
  source 1..20: mol_type = other RNA
ggaggtagtaggttgtgtgg

SEQ ID NO: 56249 - RNA, 20 nt, Synthetic Construct
  source 1..20: mol_type = other RNA
tgaggtagtaggttatgtgg

SEQ ID NO: 56250 - RNA, 20 nt, Synthetic Construct
  source 1..20: mol_type = other RNA
tgaggtagtaggttatgtgg

SEQ ID NO: 56251 - RNA, 15 nt, Synthetic Construct
  source 1..15: mol_type = other RNA
gcagagcgtcggtct

SEQ ID NO: 56252 - RNA, 27 nt, Synthetic Construct
  source 1..27: mol_type = other RNA
ccccccactgctaaacttgactggctt

SEQ ID NO: 56253 - RNA, 27 nt, Synthetic Construct
  source 1..27: mol_type = other RNA
ccccccactgctaaacttgactggctt

SEQ ID NO: 56254 - RNA, 23 nt, Synthetic Construct
  source 1..23: mol_type = other RNA
tggtaaaacgacgtacttagtgt

SEQ ID NO: 56255 - RNA, 22 nt, Synthetic Construct
  source 1..22: mol_type = other RNA
tgtgcaaatccatgcaaaactg

SEQ ID NO: 56256 - RNA, 22 nt, Synthetic Construct
  source 1..22: mol_type = other RNA
tgtgcaaatccatgcaaaactg

SEQ ID NO: 56257 - RNA, 20 nt, Synthetic Construct
  source 1..20: mol_type = other RNA
tgaggtagtaggctgtatag

SEQ ID NO: 56258 - RNA, 20 nt, Synthetic Construct
  source 1..20: mol_type = other RNA
tgaggtagtaggctgtatag

SEQ ID NO: 56259 - RNA, 25 nt, Synthetic Construct
  source 1..25: mol_type = other RNA
ttgaggatatgagatcgaggcgaca

SEQ ID NO: 56260 - RNA, 33 nt, Synthetic Construct; identical to SEQ ID NO: 4947
  source 1..33: mol_type = other RNA

SEQ ID NO: 56261 - RNA, 21 nt, Synthetic Construct
  source 1..21: mol_type = other RNA
tgaggtggtaggttgtatagt

SEQ ID NO: 56262 - RNA, 16 nt, Synthetic Construct
  source 1..16: mol_type = other RNA
gtctacggccgtacca

SEQ ID NO: 56263 - RNA, 16 nt, Synthetic Construct
  source 1..16: mol_type = other RNA
gtctacggccgtacca

SEQ ID NO: 56264 - RNA, 15 nt, Synthetic Construct
  source 1..15: mol_type = other RNA
gcagagcgtcggtct

SEQ ID NO: 56265 - RNA, 31 nt, Synthetic Construct; identical to SEQ ID NO: 2333
  source 1..31: mol_type = other RNA

SEQ ID NO: 56266 - RNA, 36 nt, Synthetic Construct; identical to SEQ ID NO: 2660
  source 1..36: mol_type = other RNA

SEQ ID NO: 56267 - RNA, 36 nt, Synthetic Construct; identical to SEQ ID NO: 2660
  source 1..36: mol_type = other RNA

SEQ ID NO: 56268 - RNA, 23 nt, Synthetic Construct
  source 1..23: mol_type = other RNA
tggtaatacgacgcacttagtgt

SEQ ID NO: 56269 - RNA, 23 nt, Synthetic Construct
  source 1..23: mol_type = other RNA
tggtaatacgacgcacttagtgt

SEQ ID NO: 56270 - RNA, 22 nt, Synthetic Construct
  source 1..22: mol_type = other RNA
tgaggtagtaagttgtatagtt

SEQ ID NO: 56271 - RNA, 22 nt, Synthetic Construct
  source 1..22: mol_type = other RNA
tcctgtactgagctgctccgag

SEQ ID NO: 56272 - RNA, 21 nt, Synthetic Construct
  source 1..21: mol_type = other RNA
tgaggtagtaggttgtacagt

SEQ ID NO: 56273 - RNA, 22 nt, Synthetic Construct
  source 1..22: mol_type = other RNA
tgaggtagtaagttgtatagtt

SEQ ID NO: 56274 - RNA, 20 nt, Synthetic Construct
  source 1..20: mol_type = other RNA
tgaggtagtaggtcgtgtgg

SEQ ID NO: 56275 - RNA, 21 nt, Synthetic Construct
  source 1..21: mol_type = other RNA
gctattgacgaccgtaccgca

SEQ ID NO: 56276 - RNA, 21 nt, Synthetic Construct
  source 1..21: mol_type = other RNA
gctattgacgaccgtaccgca

SEQ ID NO: 56277 - RNA, 21 nt, Synthetic Construct
  source 1..21: mol_type = other RNA
tgagaactgaattccatgggt

SEQ ID NO: 56278 - RNA, 17 nt, Synthetic Construct
  source 1..17: mol_type = other RNA
gaagttgaccgcctggg

SEQ ID NO: 56279 - RNA, 15 nt, Synthetic Construct
  source 1..15: mol_type = other RNA
gtacgtgagctgggt

SEQ ID NO: 56280 - RNA, 15 nt, Synthetic Construct
  source 1..15: mol_type = other RNA
gtacgtgagctgggt

SEQ ID NO: 56281 - RNA, 23 nt, Synthetic Construct
  source 1..23: mol_type = other RNA
ggcagggttcgtgactggggtga

SEQ ID NO: 56282 - RNA, 23 nt, Synthetic Construct
  source 1..23: mol_type = other RNA
ggcagggttcgtgactggggtga

SEQ ID NO: 56283 - RNA, 22 nt, Synthetic Construct
  source 1..22: mol_type = other RNA
tagcagcgcgtaaatattggcg

SEQ ID NO: 56284 - RNA, 22 nt, Synthetic Construct
  source 1..22: mol_type = other RNA
tagcagcgcgtaaatattggcg

SEQ ID NO: 56285 - RNA, 19 nt, Synthetic Construct
  source 1..19: mol_type = other RNA
gggtgcaagcgttaatcgg

SEQ ID NO: 56286 - RNA, 19 nt, Synthetic Construct
  source 1..19: mol_type = other RNA
gggtgcaagcgttaatcgg

SEQ ID NO: 56287 - RNA, 22 nt, Synthetic Construct
  source 1..22: mol_type = other RNA
taaggtagtaggttgtgtggtt

SEQ ID NO: 56288 - RNA, 22 nt, Synthetic Construct
  source 1..22: mol_type = other RNA
taaggtagtaggttgtgtggtt

SEQ ID NO: 56289 - RNA, 21 nt, Synthetic Construct
  source 1..21: mol_type = other RNA
tgtcagtttgtcaaataccca

SEQ ID NO: 56290 - RNA, 16 nt, Synthetic Construct
  source 1..16: mol_type = other RNA
tgcacgaaagcgtggg

SEQ ID NO: 56291 - RNA, 16 nt, Synthetic Construct
  source 1..16: mol_type = other RNA
tgcacgaaagcgtggg

SEQ ID NO: 56292 - RNA, 23 nt, Synthetic Construct
  source 1..23: mol_type = other RNA
aaaccgttaccattactgagttt

SEQ ID NO: 56293 - RNA, 23 nt, Synthetic Construct
  source 1..23: mol_type = other RNA
aaaccgttaccattactgagttt

SEQ ID NO: 56294 - RNA, 25 nt, Synthetic Construct
  source 1..25: mol_type = other RNA
ttgaggatatgaggtcgagacgaca

SEQ ID NO: 56295 - RNA, 22 nt, Synthetic Construct
  source 1..22: mol_type = other RNA
tgaggtagtaggttgtataatt

SEQ ID NO: 56296 - RNA, 22 nt, Synthetic Construct
  source 1..22: mol_type = other RNA
tgaggtagtaggctgtgtggtt

SEQ ID NO: 56297 - RNA, 22 nt, Synthetic Construct
  source 1..22: mol_type = other RNA
ncgtaccgtgagtaataatgcg

SEQ ID NO: 56298 - RNA, 17 nt, Synthetic Construct
  source 1..17: mol_type = other RNA
ctaatgagactgccggt

SEQ ID NO: 56299 - RNA, 19 nt, Synthetic Construct
  source 1..19: mol_type = other RNA
atcccactcctgacaccat

SEQ ID NO: 56300 - RNA, 19 nt, Synthetic Construct
  source 1..19: mol_type = other RNA
atcccactcctgacaccat

SEQ ID NO: 56301 - RNA, 25 nt, Synthetic Construct
  source 1..25: mol_type = other RNA
tcgaggatatgagatcgagacgaca

SEQ ID NO: 56302 - RNA, 15 nt, Synthetic Construct
  source 1..15: mol_type = other RNA
tagagtagggcggga

SEQ ID NO: 56303 - RNA, 15 nt, Synthetic Construct
  source 1..15: mol_type = other RNA
tagagtagggcggga

SEQ ID NO: 56304 - RNA, 32 nt, Synthetic Construct; identical to SEQ ID NO: 2467
  source 1..32: mol_type = other RNA

SEQ ID NO: 56305 - RNA, 32 nt, Synthetic Construct; identical to SEQ ID NO: 2467
  source 1..32: mol_type = other RNA

SEQ ID NO: 56306 - RNA, 27 nt, Synthetic Construct
  source 1..27: mol_type = other RNA
ccccccactgctaaaattgactggctt

SEQ ID NO: 56307 - RNA, 36 nt, Synthetic Construct; identical to SEQ ID NO: 2478
  source 1..36: mol_type = other RNA

SEQ ID NO: 56308 - RNA, 36 nt, Synthetic Construct; identical to SEQ ID NO: 2478
  source 1..36: mol_type = other RNA

SEQ ID NO: 56309 - RNA, 23 nt, Synthetic Construct
  source 1..23: mol_type = other RNA
aaaagctgggttgagagggcgat

SEQ ID NO: 56310 - RNA, 23 nt, Synthetic Construct
  source 1..23: mol_type = other RNA
tgtcagcttgtcaaataccccaa

SEQ ID NO: 56311 - RNA, 35 nt, Synthetic Construct; identical to SEQ ID NO: 1490
  source 1..35: mol_type = other RNA

SEQ ID NO: 56312 - RNA, 35 nt, Synthetic Construct; identical to SEQ ID NO: 1490
  source 1..35: mol_type = other RNA

SEQ ID NO: 56313 - RNA, 21 nt, Synthetic Construct
  source 1..21: mol_type = other RNA
gtagtgtttcctactttatgg

SEQ ID NO: 56314 - RNA, 22 nt, Synthetic Construct
  source 1..22: mol_type = other RNA
tcctgtactgagctgccctgag

SEQ ID NO: 56315 - RNA, 22 nt, Synthetic Construct
  source 1..22: mol_type = other RNA
tcctgtactgagctgccctgag

SEQ ID NO: 56316 - RNA, 23 nt, Synthetic Construct
  source 1..23: mol_type = other RNA
caacggaatcccaaaggcagctg

SEQ ID NO: 56317 - RNA, 23 nt, Synthetic Construct
  source 1..23: mol_type = other RNA
caaagtgccgttcgtgcaggtag

SEQ ID NO: 56318 - RNA, 17 nt, Synthetic Construct
  source 1..17: mol_type = other RNA
cagagacgagtcgacca

SEQ ID NO: 56319 - RNA, 15 nt, Synthetic Construct
  source 1..15: mol_type = other RNA
gtccggatcgtagtc

SEQ ID NO: 56320 - RNA, 15 nt, Synthetic Construct
  source 1..15: mol_type = other RNA
gtccggatcgtagtc

SEQ ID NO: 56321 - RNA, 17 nt, Synthetic Construct
  source 1..17: mol_type = other RNA
acagtcaggatgttggc

SEQ ID NO: 56322 - RNA, 17 nt, Synthetic Construct
  source 1..17: mol_type = other RNA
acagtcaggatgttggc

SEQ ID NO: 56323 - RNA, 23 nt, Synthetic Construct
  source 1..23: mol_type = other RNA
caacggaatcccaaaagcggctg

SEQ ID NO: 56324 - RNA, 22 nt, Synthetic Construct
  source 1..22: mol_type = other RNA
tgtggtagtaggttgtgtggtt

SEQ ID NO: 56325 - RNA, 17 nt, Synthetic Construct
  source 1..17: mol_type = other RNA
caggacggtggccatgg

SEQ ID NO: 56326 - RNA, 17 nt, Synthetic Construct
  source 1..17: mol_type = other RNA
caggacggtggccatgg

SEQ ID NO: 56327 - RNA, 16 nt, Synthetic Construct
  source 1..16: mol_type = other RNA
acggcccagactccta

SEQ ID NO: 56328 - RNA, 18 nt, Synthetic Construct
  source 1..18: mol_type = other RNA
cctgaagaataagcaccg

SEQ ID NO: 56329 - RNA, 18 nt, Synthetic Construct
  source 1..18: mol_type = other RNA
cctgaagaataagcaccg

SEQ ID NO: 56330 - RNA, 17 nt, Synthetic Construct
  source 1..17: mol_type = other RNA
accaaggggtcgtgggt

SEQ ID NO: 56331 - RNA, 16 nt, Synthetic Construct
  source 1..16: mol_type = other RNA
gtctacgaccatacca

SEQ ID NO: 56332 - RNA, 16 nt, Synthetic Construct
  source 1..16: mol_type = other RNA
gtctacgaccatacca

SEQ ID NO: 56333 - RNA, 23 nt, Synthetic Construct
  source 1..23: mol_type = other RNA
tgaggtagtaggttgtgcggttt

SEQ ID NO: 56334 - RNA, 23 nt, Synthetic Construct
  source 1..23: mol_type = other RNA
tgaggtagtaggttgtgcggttt

SEQ ID NO: 56335 - RNA, 22 nt, Synthetic Construct
  source 1..22: mol_type = other RNA
taactccttaagagaatctcgc

SEQ ID NO: 56336 - RNA, 22 nt, Synthetic Construct
  source 1..22: mol_type = other RNA
taactccttaagagaatctcgc

SEQ ID NO: 56337 - RNA, 21 nt, Synthetic Construct
  source 1..21: mol_type = other RNA
tgaggaagtaggttgtatagt

SEQ ID NO: 56338 - RNA, 21 nt, Synthetic Construct
  source 1..21: mol_type = other RNA
tgaggaagtaggttgtatagt

SEQ ID NO: 56339 - RNA, 23 nt, Synthetic Construct
  source 1..23: mol_type = other RNA
ggaggggcagagagcgagacttt

SEQ ID NO: 56340 - RNA, 23 nt, Synthetic Construct
  source 1..23: mol_type = other RNA
ggaggggcagagagcgagacttt

SEQ ID NO: 56341 - RNA, 28 nt, Synthetic Construct
  source 1..28: mol_type = other RNA
ccccccgctgctaaatttgactggcttt

SEQ ID NO: 56342 - RNA, 28 nt, Synthetic Construct
  source 1..28: mol_type = other RNA
ccccccgctgctaaatttgactggcttt

SEQ ID NO: 56343 - RNA, 21 nt, Synthetic Construct
  source 1..21: mol_type = other RNA
tcctgtactgagttgccccga

SEQ ID NO: 56344 - RNA, 21 nt, Synthetic Construct
  source 1..21: mol_type = other RNA
tcctgtactgagttgccccga

SEQ ID NO: 56345 - RNA, 30 nt, Synthetic Construct; identical to SEQ ID NO: 1958
  source 1..30: mol_type = other RNA

SEQ ID NO: 56346 - RNA, 22 nt, Synthetic Construct
  source 1..22: mol_type = other RNA
tgaggcagtagtttgtgctgtt

SEQ ID NO: 56347 - RNA, 22 nt, Synthetic Construct
  source 1..22: mol_type = other RNA
tgaggcagtagtttgtgctgtt

SEQ ID NO: 56348 - RNA, 22 nt, Synthetic Construct
  source 1..22: mol_type = other RNA
tgaggtagtagattgcatagtt

SEQ ID NO: 56349 - RNA, 22 nt, Synthetic Construct
  source 1..22: mol_type = other RNA
tgaggtagtagattgcatagtt

SEQ ID NO: 56350 - RNA, 24 nt, Synthetic Construct
  source 1..24: mol_type = other RNA
tgtaaacacccccgactggaagct

SEQ ID NO: 56351 - RNA, 24 nt, Synthetic Construct
  source 1..24: mol_type = other RNA
tgtaaacacccccgactggaagct

SEQ ID NO: 56352 - RNA, 22 nt, Synthetic Construct
  source 1..22: mol_type = other RNA
tggggtagtaggttgtgtggtt

SEQ ID NO: 56353 - RNA, 22 nt, Synthetic Construct
  source 1..22: mol_type = other RNA
tgtcagtttgtcaaataccccg

SEQ ID NO: 56354 - RNA, 22 nt, Synthetic Construct
  source 1..22: mol_type = other RNA
tgtcagtttgtcaaataccccg

SEQ ID NO: 56355 - RNA, 21 nt, Synthetic Construct
  source 1..21: mol_type = other RNA
tgaggtagtagattgcatagt

SEQ ID NO: 56356 - RNA, 21 nt, Synthetic Construct
  source 1..21: mol_type = other RNA
tgaggtagtagattgcatagt

SEQ ID NO: 56357 - RNA, 18 nt, Synthetic Construct
  source 1..18: mol_type = other RNA
atcacattgccagggatt

SEQ ID NO: 56358 - RNA, 18 nt, Synthetic Construct
  source 1..18: mol_type = other RNA
atcacattgccagggatt

SEQ ID NO: 56359 - RNA, 16 nt, Synthetic Construct
  source 1..16: mol_type = other RNA
gctattgacgaccgta

SEQ ID NO: 56360 - RNA, 16 nt, Synthetic Construct
  source 1..16: mol_type = other RNA
gctattgacgaccgta

SEQ ID NO: 56361 - RNA, 16 nt, Synthetic Construct
  source 1..16: mol_type = other RNA
gatttgggagtgctcg

SEQ ID NO: 56362 - RNA, 20 nt, Synthetic Construct
  source 1..20: mol_type = other RNA
tgaggcagtaggttgtgtgg

SEQ ID NO: 56363 - RNA, 24 nt, Synthetic Construct
  source 1..24: mol_type = other RNA
tgatatgtttgatatattaggttg

SEQ ID NO: 56364 - RNA, 24 nt, Synthetic Construct
  source 1..24: mol_type = other RNA
tgatatgtttgatatattaggttg

SEQ ID NO: 56365 - RNA, 22 nt, Synthetic Construct
  source 1..22: mol_type = other RNA
gctcacggaaagagaatgaagc

SEQ ID NO: 56366 - RNA, 22 nt, Synthetic Construct
  source 1..22: mol_type = other RNA
gctcacggaaagagaatgaagc

SEQ ID NO: 56367 - RNA, 27 nt, Synthetic Construct
  source 1..27: mol_type = other RNA
ccccccacagctaaatttgactggctt

SEQ ID NO: 56368 - RNA, 18 nt, Synthetic Construct
  source 1..18: mol_type = other RNA
agtgacgcgcatgaatgg

SEQ ID NO: 56369 - RNA, 18 nt, Synthetic Construct
  source 1..18: mol_type = other RNA
agtgacgcgcatgaatgg

SEQ ID NO: 56370 - RNA, 25 nt, Synthetic Construct
  source 1..25: mol_type = other RNA
tcggatccgtctgagcttggctttt

SEQ ID NO: 56371 - RNA, 25 nt, Synthetic Construct
  source 1..25: mol_type = other RNA
tcggatccgtctgagcttggctttt

SEQ ID NO: 56372 - RNA, 28 nt, Synthetic Construct
  source 1..28: mol_type = other RNA
ccgtgtgaaagtaggtcatcgtcaggct

SEQ ID NO: 56373 - RNA, 17 nt, Synthetic Construct
  source 1..17: mol_type = other RNA
cacggcccagactccta

SEQ ID NO: 56374 - RNA, 22 nt, Synthetic Construct
  source 1..22: mol_type = other RNA
catcgcacttgtctcggtctga

SEQ ID NO: 56375 - RNA, 22 nt, Synthetic Construct
  source 1..22: mol_type = other RNA
catcgcacttgtctcggtctga

SEQ ID NO: 56376 - RNA, 24 nt, Synthetic Construct
  source 1..24: mol_type = other RNA
gaaagattaaggcaagaggttagc

SEQ ID NO: 56377 - RNA, 24 nt, Synthetic Construct
  source 1..24: mol_type = other RNA
gaaagattaaggcaagaggttagc

SEQ ID NO: 56378 - RNA, 23 nt, Synthetic Construct
  source 1..23: mol_type = other RNA
cgaagtgctgttcgtgcaggtag

SEQ ID NO: 56379 - RNA, 23 nt, Synthetic Construct
  source 1..23: mol_type = other RNA
cgaagtgctgttcgtgcaggtag

SEQ ID NO: 56380 - RNA, 22 nt, Synthetic Construct
  source 1..22: mol_type = other RNA
tgaggtggtaggttgtatagtt

SEQ ID NO: 56381 - RNA, 23 nt, Synthetic Construct
  source 1..23: mol_type = other RNA
tggagtgtgacaatggtgtttgg

SEQ ID NO: 56382 - RNA, 16 nt, Synthetic Construct
  source 1..16: mol_type = other RNA
agtcaggatgttggct

SEQ ID NO: 56383 - RNA, 23 nt, Synthetic Construct
  source 1..23: mol_type = other RNA
tcctgtaccgagctgccccgagt

SEQ ID NO: 56384 - RNA, 21 nt, Synthetic Construct
  source 1..21: mol_type = other RNA
tggagtgtggcaatggtgttt

SEQ ID NO: 56385 - RNA, 22 nt, Synthetic Construct
  source 1..22: mol_type = other RNA
ttcaagtaatccaggataggtt

SEQ ID NO: 56386 - RNA, 18 nt, Synthetic Construct
  source 1..18: mol_type = other RNA
ctaatgagactgccggtg

SEQ ID NO: 56387 - RNA, 21 nt, Synthetic Construct
  source 1..21: mol_type = other RNA
tgaggtagtagtttgtgccgt

SEQ ID NO: 56388 - RNA, 17 nt, Synthetic Construct
  source 1..17: mol_type = other RNA
tctacagtccgacgatc

SEQ ID NO: 56389 - RNA, 17 nt, Synthetic Construct
  source 1..17: mol_type = other RNA
tctacagtccgacgatc

SEQ ID NO: 56390 - RNA, 22 nt, Synthetic Construct
  source 1..22: mol_type = other RNA
tattgcacttgtcccggcccgt

SEQ ID NO: 56391 - RNA, 22 nt, Synthetic Construct
  source 1..22: mol_type = other RNA
tattgcacttgtcccggcccgt

SEQ ID NO: 56392 - RNA, 25 nt, Synthetic Construct
  source 1..25: mol_type = other RNA
ttgaggatatgagatcgagacggca

SEQ ID NO: 56393 - RNA, 25 nt, Synthetic Construct
  source 1..25: mol_type = other RNA
ttgaggatatgagatcgagacggca

SEQ ID NO: 56394 - RNA, 21 nt, Synthetic Construct
  source 1..21: mol_type = other RNA
tgaggtagtaggttgtgtgat

SEQ ID NO: 56395 - RNA, 36 nt, Synthetic Construct; identical to SEQ ID NO: 752
  source 1..36: mol_type = other RNA

SEQ ID NO: 56396 - RNA, 36 nt, Synthetic Construct; identical to SEQ ID NO: 752
  source 1..36: mol_type = other RNA

SEQ ID NO: 56397 - RNA, 26 nt, Synthetic Construct
  source 1..26: mol_type = other RNA
cgactcttagcggtggatcactcggc

SEQ ID NO: 56398 - RNA, 17 nt, Synthetic Construct
  source 1..17: mol_type = other RNA
taggtcatcgtcaggct

SEQ ID NO: 56399 - RNA, 17 nt, Synthetic Construct
  source 1..17: mol_type = other RNA
taggtcatcgtcaggct

SEQ ID NO: 56400 - RNA, 21 nt, Synthetic Construct
  source 1..21: mol_type = other RNA
ccctgtactgagctgccccga

SEQ ID NO: 56401 - RNA, 21 nt, Synthetic Construct
  source 1..21: mol_type = other RNA
ccctgtactgagctgccccga

SEQ ID NO: 56402 - RNA, 22 nt, Synthetic Construct
  source 1..22: mol_type = other RNA
tgaggtagtaaattgtatagtt

SEQ ID NO: 56403 - RNA, 22 nt, Synthetic Construct
  source 1..22: mol_type = other RNA
tgaggtagtaaattgtatagtt

SEQ ID NO: 56404 - RNA, 25 nt, Synthetic Construct
  source 1..25: mol_type = other RNA
ttgaggatatgagatcgagacgacg

SEQ ID NO: 56405 - RNA, 25 nt, Synthetic Construct
  source 1..25: mol_type = other RNA
ttgaggatatgagatcgagacgacg

SEQ ID NO: 56406 - RNA, 23 nt, Synthetic Construct
  source 1..23: mol_type = other RNA
tgaggggaagagagcgagacttt

SEQ ID NO: 56407 - RNA, 16 nt, Synthetic Construct
  source 1..16: mol_type = other RNA
gtctacggccatgcca

SEQ ID NO: 56408 - RNA, 16 nt, Synthetic Construct
  source 1..16: mol_type = other RNA
gtctacggccatgcca

SEQ ID NO: 56409 - RNA, 23 nt, Synthetic Construct
  source 1..23: mol_type = other RNA
tggtaatacgacgtacatagtgt

SEQ ID NO: 56410 - RNA, 22 nt, Synthetic Construct
  source 1..22: mol_type = other RNA
tggggtagtagtttgtgctgtt

SEQ ID NO: 56411 - RNA, 20 nt, Synthetic Construct
  source 1..20: mol_type = other RNA
tgaggtagcaggttgtgtgg

SEQ ID NO: 56412 - RNA, 24 nt, Synthetic Construct
  source 1..24: mol_type = other RNA
tgtaaacatccctgactggaagct

SEQ ID NO: 56413 - RNA, 24 nt, Synthetic Construct
  source 1..24: mol_type = other RNA
tgtaaacatccctgactggaagct

SEQ ID NO: 56414 - RNA, 22 nt, Synthetic Construct
  source 1..22: mol_type = other RNA
tgaggtagtagcttgtgctgtt

SEQ ID NO: 56415 - RNA, 23 nt, Synthetic Construct
  source 1..23: mol_type = other RNA
agcagcattgtacagggctatgg

SEQ ID NO: 56416 - RNA, 23 nt, Synthetic Construct
  source 1..23: mol_type = other RNA
agcagcattgtacagggctatgg

SEQ ID NO: 56417 - RNA, 20 nt, Synthetic Construct
  source 1..20: mol_type = other RNA
ccttggggttgtaggaccac

SEQ ID NO: 56418 - RNA, 20 nt, Synthetic Construct
  source 1..20: mol_type = other RNA
ccttggggttgtaggaccac

SEQ ID NO: 56419 - RNA, 23 nt, Synthetic Construct
  source 1..23: mol_type = other RNA
tggggtagtaggttgtgtggttt

SEQ ID NO: 56420 - RNA, 35 nt, Synthetic Construct; identical to SEQ ID NO: 1160
  source 1..35: mol_type = other RNA

SEQ ID NO: 56421 - RNA, 35 nt, Synthetic Construct; identical to SEQ ID NO: 1160
  source 1..35: mol_type = other RNA

SEQ ID NO: 56422 - RNA, 22 nt, Synthetic Construct
  source 1..22: mol_type = other RNA
cctctgggcccttcctccagtt

SEQ ID NO: 56423 - RNA, 20 nt, Synthetic Construct
  source 1..20: mol_type = other RNA
tacagtatagatgatgtact

SEQ ID NO: 56424 - RNA, 20 nt, Synthetic Construct
  source 1..20: mol_type = other RNA
tacagtatagatgatgtact

SEQ ID NO: 56425 - RNA, 20 nt, Synthetic Construct
  source 1..20: mol_type = other RNA
tggagtgtgacaatggtgtt

SEQ ID NO: 56426 - RNA, 21 nt, Synthetic Construct
  source 1..21: mol_type = other RNA
tgaggtagcaggttgtatagt

SEQ ID NO: 56427 - RNA, 17 nt, Synthetic Construct
  source 1..17: mol_type = other RNA
tgccagcagccgcggta

SEQ ID NO: 56428 - RNA, 17 nt, Synthetic Construct
  source 1..17: mol_type = other RNA
tgccagcagccgcggta

SEQ ID NO: 56429 - RNA, 23 nt, Synthetic Construct
  source 1..23: mol_type = other RNA
tcatgtactgagctgccccgaga

SEQ ID NO: 56430 - RNA, 23 nt, Synthetic Construct
  source 1..23: mol_type = other RNA
tcatgtactgagctgccccgaga

SEQ ID NO: 56431 - RNA, 22 nt, Synthetic Construct
  source 1..22: mol_type = other RNA
taactccttaagcgaatatcgc

SEQ ID NO: 56432 - RNA, 22 nt, Synthetic Construct
  source 1..22: mol_type = other RNA
taactccttaagcgaatatcgc

SEQ ID NO: 56433 - RNA, 23 nt, Synthetic Construct
  source 1..23: mol_type = other RNA
tcctgtactgagctgccctgagt

SEQ ID NO: 56434 - RNA, 32 nt, Synthetic Construct; identical to SEQ ID NO: 36665
  source 1..32: mol_type = other RNA

SEQ ID NO: 56435 - RNA, 23 nt, Synthetic Construct
  source 1..23: mol_type = other RNA
caaagcgctgttcgtgcaggtag

SEQ ID NO: 56436 - RNA, 21 nt, Synthetic Construct
  source 1..21: mol_type = other RNA
tgaggtagtaggttgcatagt

SEQ ID NO: 56437 - RNA, 21 nt, Synthetic Construct
  source 1..21: mol_type = other RNA
tgaggtagtaggttgcatagt

SEQ ID NO: 56438 - RNA, 37 nt, Synthetic Construct; identical to SEQ ID NO: 8986
  source 1..37: mol_type = other RNA

SEQ ID NO: 56439 - RNA, 37 nt, Synthetic Construct; identical to SEQ ID NO: 8986
  source 1..37: mol_type = other RNA

SEQ ID NO: 56440 - RNA, 21 nt, Synthetic Construct
  source 1..21: mol_type = other RNA
tgaggggcagagagcgaggct

SEQ ID NO: 56441 - RNA, 21 nt, Synthetic Construct
  source 1..21: mol_type = other RNA
tgaggggcagagagcgaggct

SEQ ID NO: 56442 - RNA, 22 nt, Synthetic Construct
  source 1..22: mol_type = other RNA
tgaggtagtaggttgtaaagtt

SEQ ID NO: 56443 - RNA, 22 nt, Synthetic Construct
  source 1..22: mol_type = other RNA
tgaggtagtaggttgtaaagtt

SEQ ID NO: 56444 - RNA, 38 nt, Synthetic Construct; identical to SEQ ID NO: 7148
  source 1..38: mol_type = other RNA

SEQ ID NO: 56445 - RNA, 30 nt, Synthetic Construct; identical to SEQ ID NO: 11302
  source 1..30: mol_type = other RNA

SEQ ID NO: 56446 - RNA, 25 nt, Synthetic Construct
  source 1..25: mol_type = other RNA
tgcgagagtaggacgttgccaggtt

SEQ ID NO: 56447 - RNA, 25 nt, Synthetic Construct
  source 1..25: mol_type = other RNA
tgcgagagtaggacgttgccaggtt

SEQ ID NO: 56448 - RNA, 22 nt, Synthetic Construct
  source 1..22: mol_type = other RNA
tgaggtagtaggttgtgtgatt

SEQ ID NO: 56449 - RNA, 22 nt, Synthetic Construct
  source 1..22: mol_type = other RNA
tgaggtagtaggttgtgtgatt

SEQ ID NO: 56450 - RNA, 22 nt, Synthetic Construct
  source 1..22: mol_type = other RNA
tagcaacacgtaaatattggcg

SEQ ID NO: 56451 - RNA, 23 nt, Synthetic Construct
  source 1..23: mol_type = other RNA
tcctgtactgagttgccccgaga

SEQ ID NO: 56452 - RNA, 23 nt, Synthetic Construct
  source 1..23: mol_type = other RNA
tcctgtactgagttgccccgaga

SEQ ID NO: 56453 - RNA, 22 nt, Synthetic Construct
  source 1..22: mol_type = other RNA
atataatacaacctgctaagtg

SEQ ID NO: 56454 - RNA, 22 nt, Synthetic Construct
  source 1..22: mol_type = other RNA
atataatacaacctgctaagtg

SEQ ID NO: 56455 - RNA, 22 nt, Synthetic Construct
  source 1..22: mol_type = other RNA
tgaggtaatagtttgtgctgtt

SEQ ID NO: 56456 - RNA, 22 nt, Synthetic Construct
  source 1..22: mol_type = other RNA
tgaggtaatagtttgtgctgtt

SEQ ID NO: 56457 - RNA, 22 nt, Synthetic Construct
  source 1..22: mol_type = other RNA
tgaggcagtagattgtatagtt

SEQ ID NO: 56458 - RNA, 22 nt, Synthetic Construct
  source 1..22: mol_type = other RNA
tgaggcagtagattgtatagtt

SEQ ID NO: 56459 - RNA, 22 nt, Synthetic Construct
  source 1..22: mol_type = other RNA
tgaggtagtagattgtgctgtt

SEQ ID NO: 56460 - RNA, 22 nt, Synthetic Construct
  source 1..22: mol_type = other RNA
tgaggtagtagattgtgctgtt

SEQ ID NO: 56461 - RNA, 21 nt, Synthetic Construct
  source 1..21: mol_type = other RNA
tgaggtagtagattgtataga

SEQ ID NO: 56462 - RNA, 20 nt, Synthetic Construct
  source 1..20: mol_type = other RNA
tcggaagaaggggtgcctgg

SEQ ID NO: 56463 - RNA, 20 nt, Synthetic Construct
  source 1..20: mol_type = other RNA
tcggaagaaggggtgcctgg

SEQ ID NO: 56464 - RNA, 23 nt, Synthetic Construct
  source 1..23: mol_type = other RNA
nggtaatacgacgtacttagtgt

SEQ ID NO: 56465 - RNA, 21 nt, Synthetic Construct
  source 1..21: mol_type = other RNA
tgaggtggtaggttgtgtggt

SEQ ID NO: 56466 - RNA, 18 nt, Synthetic Construct
  source 1..18: mol_type = other RNA
gtaggtcatcgtcaggct

SEQ ID NO: 56467 - RNA, 18 nt, Synthetic Construct
  source 1..18: mol_type = other RNA
gtaggtcatcgtcaggct

SEQ ID NO: 56468 - RNA, 18 nt, Synthetic Construct
  source 1..18: mol_type = other RNA
cccttgtcattagttgct

SEQ ID NO: 56469 - RNA, 22 nt, Synthetic Construct
  source 1..22: mol_type = other RNA
tgaggtagtagtttgtgctggt

SEQ ID NO: 56470 - RNA, 21 nt, Synthetic Construct
  source 1..21: mol_type = other RNA
tgaggcagtaggttgtatagt

SEQ ID NO: 56471 - RNA, 21 nt, Synthetic Construct
  source 1..21: mol_type = other RNA
tgaggcagtaggttgtatagt

SEQ ID NO: 56472 - RNA, 16 nt, Synthetic Construct
  source 1..16: mol_type = other RNA
ctctacggccatacca

SEQ ID NO: 56473 - RNA, 22 nt, Synthetic Construct
  source 1..22: mol_type = other RNA
ttataatacaacctgataagtg

SEQ ID NO: 56474 - RNA, 22 nt, Synthetic Construct
  source 1..22: mol_type = other RNA
ttataatacaacctgataagtg

SEQ ID NO: 56475 - RNA, 16 nt, Synthetic Construct
  source 1..16: mol_type = other RNA
gccagcagccgcggta

SEQ ID NO: 56476 - RNA, 23 nt, Synthetic Construct
  source 1..23: mol_type = other RNA
tcctgcactgagctgccccgaga

SEQ ID NO: 56477 - RNA, 21 nt, Synthetic Construct
  source 1..21: mol_type = other RNA
gtagtgtttcctactttatgg

SEQ ID NO: 56478 - RNA, 21 nt, Synthetic Construct
  source 1..21: mol_type = other RNA
gtagtgtttcctactttatgg

SEQ ID NO: 56479 - RNA, 22 nt, Synthetic Construct
  source 1..22: mol_type = other RNA
tattgcactcgtcccggcctgt

SEQ ID NO: 56480 - RNA, 22 nt, Synthetic Construct
  source 1..22: mol_type = other RNA
tattgcactcgtcccggcctgt

SEQ ID NO: 56481 - RNA, 18 nt, Synthetic Construct
  source 1..18: mol_type = other RNA
cctgtaccgatcaatagt

SEQ ID NO: 56482 - RNA, 22 nt, Synthetic Construct
  source 1..22: mol_type = other RNA
tgaggtagtaaattgtatagtt

SEQ ID NO: 56483 - RNA, 22 nt, Synthetic Construct
  source 1..22: mol_type = other RNA
tgaggtagtaaattgtatagtt

SEQ ID NO: 56484 - RNA, 23 nt, Synthetic Construct
  source 1..23: mol_type = other RNA
tgaggaagtaggttgtgtggttt

SEQ ID NO: 56485 - RNA, 23 nt, Synthetic Construct
  source 1..23: mol_type = other RNA
tgaggaagtaggttgtgtggttt

SEQ ID NO: 56486 - RNA, 26 nt, Synthetic Construct
  source 1..26: mol_type = other RNA
atgcgagagtaggacgttgccaggtt

SEQ ID NO: 56487 - RNA, 26 nt, Synthetic Construct
  source 1..26: mol_type = other RNA
atgcgagagtaggacgttgccaggtt

SEQ ID NO: 56488 - RNA, 22 nt, Synthetic Construct
  source 1..22: mol_type = other RNA
tagcaacacgtaaatattggcg

SEQ ID NO: 56489 - RNA, 22 nt, Synthetic Construct
  source 1..22: mol_type = other RNA
tagcaacacgtaaatattggcg

SEQ ID NO: 56490 - RNA, 23 nt, Synthetic Construct
  source 1..23: mol_type = other RNA
caaagtgctgtttgtgcaggtag

SEQ ID NO: 56491 - RNA, 23 nt, Synthetic Construct
  source 1..23: mol_type = other RNA
caaagtgctgtttgtgcaggtag

SEQ ID NO: 56492 - RNA, 26 nt, Synthetic Construct
  source 1..26: mol_type = other RNA
cgactcttagcggtggatcactcggc

SEQ ID NO: 56493 - RNA, 22 nt, Synthetic Construct
  source 1..22: mol_type = other RNA
tagcttatcagactgatgttga

SEQ ID NO: 56494 - RNA, 20 nt, Synthetic Construct
  source 1..20: mol_type = other RNA
tattgcacattactaagttg

SEQ ID NO: 56495 - RNA, 20 nt, Synthetic Construct
  source 1..20: mol_type = other RNA
tattgcacattactaagttg

SEQ ID NO: 56496 - RNA, 23 nt, Synthetic Construct
  source 1..23: mol_type = other RNA
agcagcattgtacagggctatgt

SEQ ID NO: 56497 - RNA, 23 nt, Synthetic Construct
  source 1..23: mol_type = other RNA
agcagcattgtacagggctatgt

SEQ ID NO: 56498 - RNA, 22 nt, Synthetic Construct
  source 1..22: mol_type = other RNA
ttcaagtaatccaggataggcc

SEQ ID NO: 56499 - RNA, 21 nt, Synthetic Construct
  source 1..21: mol_type = other RNA
tggagtgtgacaatggcgttt

SEQ ID NO: 56500 - RNA, 21 nt, Synthetic Construct
  source 1..21: mol_type = other RNA
tggagtgtgacaatggcgttt

SEQ ID NO: 56501 - RNA, 19 nt, Synthetic Construct
  source 1..19: mol_type = other RNA
agcagcattgtacagggct

SEQ ID NO: 56502 - RNA, 19 nt, Synthetic Construct
  source 1..19: mol_type = other RNA
agcagcattgtacagggct

SEQ ID NO: 56503 - RNA, 22 nt, Synthetic Construct
  source 1..22: mol_type = other RNA
tcctgcactgagctgccccgag

SEQ ID NO: 56504 - RNA, 33 nt, Synthetic Construct
  source 1..33: mol_type = other RNA
gcattggtggttcagtggtagaattctcgcctg

SEQ ID NO: 56505 - RNA, 33 nt, Synthetic Construct; identical to SEQ ID NO: 56504
  source 1..33: mol_type = other RNA

SEQ ID NO: 56506 - RNA, 21 nt, Synthetic Construct
  source 1..21: mol_type = other RNA
cgaggtagtaggttgtatagt

SEQ ID NO: 56507 - RNA, 21 nt, Synthetic Construct
  source 1..21: mol_type = other RNA
cgaggtagtaggttgtatagt

SEQ ID NO: 56508 - RNA, 21 nt, Synthetic Construct
  source 1..21: mol_type = other RNA
gagttctacagtccgacgatc

SEQ ID NO: 56509 - RNA, 21 nt, Synthetic Construct
  source 1..21: mol_type = other RNA
gagttctacagtccgacgatc

SEQ ID NO: 56510 - RNA, 16 nt, Synthetic Construct
  source 1..16: mol_type = other RNA
agggaacgtgagctgg

SEQ ID NO: 56511 - RNA, 16 nt, Synthetic Construct
  source 1..16: mol_type = other RNA
agggaacgtgagctgg

SEQ ID NO: 56512 - RNA, 16 nt, Synthetic Construct
  source 1..16: mol_type = other RNA
gtctatggccatacca

SEQ ID NO: 56513 - RNA, 16 nt, Synthetic Construct
  source 1..16: mol_type = other RNA
gtctatggccatacca

SEQ ID NO: 56514 - RNA, 16 nt, Synthetic Construct
  source 1..16: mol_type = other RNA
cccagaaacccggtcg

SEQ ID NO: 56515 - RNA, 22 nt, Synthetic Construct
  source 1..22: mol_type = other RNA
tgaggaagtaggttgtatagtt

SEQ ID NO: 56516 - RNA, 21 nt, Synthetic Construct
  source 1..21: mol_type = other RNA
tcctgtactgagctaccccga

SEQ ID NO: 56517 - RNA, 20 nt, Synthetic Construct
  source 1..20: mol_type = other RNA
gtcagtttgtcaaatacccc

SEQ ID NO: 56518 - RNA, 23 nt, Synthetic Construct
  source 1..23: mol_type = other RNA
caaagtgctgttcgtgcgggtag

SEQ ID NO: 56519 - RNA, 21 nt, Synthetic Construct
  source 1..21: mol_type = other RNA
tgaggtagtagattgtatggt

SEQ ID NO: 56520 - RNA, 21 nt, Synthetic Construct
  source 1..21: mol_type = other RNA
tgaggtagtagattgtatggt

SEQ ID NO: 56521 - RNA, 18 nt, Synthetic Construct
  source 1..18: mol_type = other RNA
catgcaagtcgaacggta

SEQ ID NO: 56522 - RNA, 18 nt, Synthetic Construct
  source 1..18: mol_type = other RNA
catgcaagtcgaacggta

SEQ ID NO: 56523 - RNA, 36 nt, Synthetic Construct; identical to SEQ ID NO: 10982
  source 1..36: mol_type = other RNA

SEQ ID NO: 56524 - RNA, 22 nt, Synthetic Construct
  source 1..22: mol_type = other RNA
tgtagtgcttcctactttatgg

SEQ ID NO: 56525 - RNA, 21 nt, Synthetic Construct
  source 1..21: mol_type = other RNA
tgaggtagtaggttgtgtggt

SEQ ID NO: 56526 - RNA, 21 nt, Synthetic Construct
  source 1..21: mol_type = other RNA
tgaggtagtaggttgtgtggt

SEQ ID NO: 56527 - RNA, 23 nt, Synthetic Construct
  source 1..23: mol_type = other RNA
cagagtgctgttcgtgcaggtag

SEQ ID NO: 56528 - RNA, 23 nt, Synthetic Construct
  source 1..23: mol_type = other RNA
cagagtgctgttcgtgcaggtag

SEQ ID NO: 56529 - RNA, 22 nt, Synthetic Construct
  source 1..22: mol_type = other RNA
ggaggtagtaggttgtgtggtt

SEQ ID NO: 56530 - RNA, 22 nt, Synthetic Construct
  source 1..22: mol_type = other RNA
ggaggtagtaggttgtgtggtt

SEQ ID NO: 56531 - RNA, 16 nt, Synthetic Construct
  source 1..16: mol_type = other RNA
gtgacgcgcatgaatg

SEQ ID NO: 56532 - RNA, 16 nt, Synthetic Construct
  source 1..16: mol_type = other RNA
gtgacgcgcatgaatg

SEQ ID NO: 56533 - RNA, 16 nt, Synthetic Construct
  source 1..16: mol_type = other RNA
gatctgtagctggtct

SEQ ID NO: 56534 - RNA, 16 nt, Synthetic Construct
  source 1..16: mol_type = other RNA
gatctgtagctggtct

SEQ ID NO: 56535 - RNA, 15 nt, Synthetic Construct
  source 1..15: mol_type = other RNA
gcagagcgtcggtct

SEQ ID NO: 56536 - RNA, 23 nt, Synthetic Construct
  source 1..23: mol_type = other RNA
tgtcagtttgtcaaataccccaa

SEQ ID NO: 56537 - RNA, 22 nt, Synthetic Construct
  source 1..22: mol_type = other RNA
cgttgcacttgtctcggtctga

SEQ ID NO: 56538 - RNA, 22 nt, Synthetic Construct
  source 1..22: mol_type = other RNA
cgttgcacttgtctcggtctga

SEQ ID NO: 56539 - RNA, 23 nt, Synthetic Construct
  source 1..23: mol_type = other RNA
tggtaatacgacgtacatagtgt

SEQ ID NO: 56540 - RNA, 22 nt, Synthetic Construct
  source 1..22: mol_type = other RNA
tgaggtagtagattgtatagat

SEQ ID NO: 56541 - RNA, 22 nt, Synthetic Construct
  source 1..22: mol_type = other RNA
tgaggtagtagattgtatagat

SEQ ID NO: 56542 - RNA, 23 nt, Synthetic Construct
  source 1..23: mol_type = other RNA
caaagtgctgttcgcgcaggtag

SEQ ID NO: 56543 - RNA, 35 nt, Synthetic Construct; identical to SEQ ID NO: 1095
  source 1..35: mol_type = other RNA

SEQ ID NO: 56544 - RNA, 35 nt, Synthetic Construct; identical to SEQ ID NO: 1095
  source 1..35: mol_type = other RNA

SEQ ID NO: 56545 - RNA, 22 nt, Synthetic Construct
  source 1..22: mol_type = other RNA
agctcggtctgaggcccctcag

SEQ ID NO: 56546 - RNA, 22 nt, Synthetic Construct
  source 1..22: mol_type = other RNA
agctcggtctgaggcccctcag

SEQ ID NO: 56547 - RNA, 22 nt, Synthetic Construct
  source 1..22: mol_type = other RNA
tcagtgcatcacagaactttgt

SEQ ID NO: 56548 - RNA, 22 nt, Synthetic Construct
  source 1..22: mol_type = other RNA
tcagtgcatcacagaactttgt

SEQ ID NO: 56549 - RNA, 26 nt, Synthetic Construct
  source 1..26: mol_type = other RNA
tgtaaacatccttgactggaagcttt

SEQ ID NO: 56550 - RNA, 23 nt, Synthetic Construct
  source 1..23: mol_type = other RNA
nggtaatacgacgtacttagtgt

SEQ ID NO: 56551 - RNA, 23 nt, Synthetic Construct
  source 1..23: mol_type = other RNA
nggtaatacgacgtacttagtgt

SEQ ID NO: 56552 - RNA, 35 nt, Synthetic Construct; identical to SEQ ID NO: 1095
  source 1..35: mol_type = other RNA

SEQ ID NO: 56553 - RNA, 20 nt, Synthetic Construct
  source 1..20: mol_type = other RNA
gcaataacaggtctgtgatg

SEQ ID NO: 56554 - RNA, 20 nt, Synthetic Construct
  source 1..20: mol_type = other RNA
gcaataacaggtctgtgatg

SEQ ID NO: 56555 - RNA, 18 nt, Synthetic Construct
  source 1..18: mol_type = other RNA
atcacattgccagggatt

SEQ ID NO: 56556 - RNA, 22 nt, Synthetic Construct
  source 1..22: mol_type = other RNA
tgaggtagtagttcgtgctgtt

SEQ ID NO: 56557 - RNA, 22 nt, Synthetic Construct
  source 1..22: mol_type = other RNA
tgaggtagtagttcgtgctgtt

SEQ ID NO: 56558 - RNA, 23 nt, Synthetic Construct
  source 1..23: mol_type = other RNA
tgtcagtctgtcaaataccccaa

SEQ ID NO: 56559 - RNA, 21 nt, Synthetic Construct
  source 1..21: mol_type = other RNA
cgtaccgtgagtaatagtgcg

SEQ ID NO: 56560 - RNA, 24 nt, Synthetic Construct
  source 1..24: mol_type = other RNA
tgagaactgaattccatgggttgt

SEQ ID NO: 56561 - RNA, 24 nt, Synthetic Construct
  source 1..24: mol_type = other RNA
tgagaactgaattccatgggttgt

SEQ ID NO: 56562 - RNA, 22 nt, Synthetic Construct
  source 1..22: mol_type = other RNA
tagcagcacggaaatattggcg

SEQ ID NO: 56563 - RNA, 22 nt, Synthetic Construct
  source 1..22: mol_type = other RNA
tagcagcacggaaatattggcg

SEQ ID NO: 56564 - RNA, 22 nt, Synthetic Construct
  source 1..22: mol_type = other RNA
tgaggtagtaggttgtattgtt

SEQ ID NO: 56565 - RNA, 22 nt, Synthetic Construct
  source 1..22: mol_type = other RNA
tgagatagtagattgtatagtt

SEQ ID NO: 56566 - RNA, 22 nt, Synthetic Construct
  source 1..22: mol_type = other RNA
tgagatagtagattgtatagtt

SEQ ID NO: 56567 - RNA, 23 nt, Synthetic Construct
  source 1..23: mol_type = other RNA
tgaggggcagagagcgagactat

SEQ ID NO: 56568 - RNA, 23 nt, Synthetic Construct
  source 1..23: mol_type = other RNA
tgaggggcagagagcgagactat

SEQ ID NO: 56569 - RNA, 21 nt, Synthetic Construct
  source 1..21: mol_type = other RNA
tgaggtagtaggtcgtatagt

SEQ ID NO: 56570 - RNA, 21 nt, Synthetic Construct
  source 1..21: mol_type = other RNA
agagtaggacgttgccaggtt

SEQ ID NO: 56571 - RNA, 21 nt, Synthetic Construct
  source 1..21: mol_type = other RNA
agagtaggacgttgccaggtt

SEQ ID NO: 56572 - RNA, 22 nt, Synthetic Construct
  source 1..22: mol_type = other RNA
aacggaatcccaaaagcagctg

SEQ ID NO: 56573 - RNA, 22 nt, Synthetic Construct
  source 1..22: mol_type = other RNA
aacggaatcccaaaagcagctg

SEQ ID NO: 56574 - RNA, 30 nt, Synthetic Construct; identical to SEQ ID NO: 6467
  source 1..30: mol_type = other RNA

SEQ ID NO: 56575 - RNA, 23 nt, Synthetic Construct
  source 1..23: mol_type = other RNA
caaagtactgttcgtgcaggtag

SEQ ID NO: 56576 - RNA, 23 nt, Synthetic Construct
  source 1..23: mol_type = other RNA
caaagtactgttcgtgcaggtag

SEQ ID NO: 56577 - RNA, 22 nt, Synthetic Construct
  source 1..22: mol_type = other RNA
gcactctaatgagactgccggt

SEQ ID NO: 56578 - RNA, 22 nt, Synthetic Construct
  source 1..22: mol_type = other RNA
gcactctaatgagactgccggt

SEQ ID NO: 56579 - RNA, 18 nt, Synthetic Construct
  source 1..18: mol_type = other RNA
gtaggtcatcgtcaggct

SEQ ID NO: 56580 - RNA, 18 nt, Synthetic Construct
  source 1..18: mol_type = other RNA
gtaggtcatcgtcaggct

SEQ ID NO: 56581 - RNA, 16 nt, Synthetic Construct
  source 1..16: mol_type = other RNA
tccgaaccgactagtg

SEQ ID NO: 56582 - RNA, 21 nt, Synthetic Construct
  source 1..21: mol_type = other RNA
ctagaccgaagctccttgagg

SEQ ID NO: 56583 - RNA, 21 nt, Synthetic Construct
  source 1..21: mol_type = other RNA
ctagaccgaagctccttgagg

SEQ ID NO: 56584 - RNA, 21 nt, Synthetic Construct
  source 1..21: mol_type = other RNA
caacggaatcccaaaagcagc

SEQ ID NO: 56585 - RNA, 21 nt, Synthetic Construct
  source 1..21: mol_type = other RNA
caacggaatcccaaaagcagc

SEQ ID NO: 56586 - RNA, 20 nt, Synthetic Construct
  source 1..20: mol_type = other RNA
tgaggtagtaagttgtattg

SEQ ID NO: 56587 - RNA, 20 nt, Synthetic Construct
  source 1..20: mol_type = other RNA
tgaggtagtaagttgtattg

SEQ ID NO: 56588 - RNA, 22 nt, Synthetic Construct
  source 1..22: mol_type = other RNA
tcctgtactgagttgccccgag

SEQ ID NO: 56589 - RNA, 21 nt, Synthetic Construct
  source 1..21: mol_type = other RNA
ctaggctgaagctccttgagg

SEQ ID NO: 56590 - RNA, 23 nt, Synthetic Construct
  source 1..23: mol_type = other RNA
caaggtgctgttcgtgcaggtag

SEQ ID NO: 56591 - RNA, 23 nt, Synthetic Construct
  source 1..23: mol_type = other RNA
caaagtgctgttcgcgcaggtag

SEQ ID NO: 56592 - RNA, 22 nt, Synthetic Construct
  source 1..22: mol_type = other RNA
tgaggttgtagtttgtgctgtt

SEQ ID NO: 56593 - RNA, 22 nt, Synthetic Construct
  source 1..22: mol_type = other RNA
tgaggttgtagtttgtgctgtt

SEQ ID NO: 56594 - RNA, 34 nt, Synthetic Construct; identical to SEQ ID NO: 2291
  source 1..34: mol_type = other RNA

SEQ ID NO: 56595 - RNA, 43 nt, Synthetic Construct; identical to SEQ ID NO: 6202
  source 1..43: mol_type = other RNA

SEQ ID NO: 56596 - RNA, 22 nt, Synthetic Construct
  source 1..22: mol_type = other RNA
cattgcacttgtctcggcctga

SEQ ID NO: 56597 - RNA, 22 nt, Synthetic Construct
  source 1..22: mol_type = other RNA
cattgcacttgtctcggcctga

SEQ ID NO: 56598 - RNA, 27 nt, Synthetic Construct
  source 1..27: mol_type = other RNA
cggtataccgaagctctaggtgcggca

SEQ ID NO: 56599 - RNA, 27 nt, Synthetic Construct
  source 1..27: mol_type = other RNA
cggtataccgaagctctaggtgcggca

SEQ ID NO: 56600 - RNA, 22 nt, Synthetic Construct
  source 1..22: mol_type = other RNA
ngaggtagtagtttgtgctgtt

SEQ ID NO: 56601 - RNA, 22 nt, Synthetic Construct
  source 1..22: mol_type = other RNA
tgaggcagtagtttgtgctgtt

SEQ ID NO: 56602 - RNA, 22 nt, Synthetic Construct
  source 1..22: mol_type = other RNA
tgaggcagtagtttgtgctgtt

SEQ ID NO: 56603 - RNA, 23 nt, Synthetic Construct
  source 1..23: mol_type = other RNA
aacattcattgctgtcggtgggt

SEQ ID NO: 56604 - RNA, 22 nt, Synthetic Construct
  source 1..22: mol_type = other RNA
tgaggtagtaggttgtgtggtt

SEQ ID NO: 56605 - RNA, 22 nt, Synthetic Construct
  source 1..22: mol_type = other RNA
tcaggctcagtcccctcccgat

SEQ ID NO: 56606 - RNA, 22 nt, Synthetic Construct
  source 1..22: mol_type = other RNA
tcaggctcagtcccctcccgat

SEQ ID NO: 56607 - RNA, 26 nt, Synthetic Construct
  source 1..26: mol_type = other RNA
ccccccactgctaatttgactggctt

SEQ ID NO: 56608 - RNA, 22 nt, Synthetic Construct
  source 1..22: mol_type = other RNA
tcctgtactgagctgcctcgag

SEQ ID NO: 56609 - RNA, 22 nt, Synthetic Construct
  source 1..22: mol_type = other RNA
tcctgtactgagctgcctcgag

SEQ ID NO: 56610 - RNA, 22 nt, Synthetic Construct
  source 1..22: mol_type = other RNA
tagcagcacgtgaatattggcg

SEQ ID NO: 56611 - RNA, 22 nt, Synthetic Construct
  source 1..22: mol_type = other RNA
tagcagcacgtgaatattggcg

SEQ ID NO: 56612 - RNA, 21 nt, Synthetic Construct
  source 1..21: mol_type = other RNA
ggaggagttcgaaggtacgct

SEQ ID NO: 56613 - RNA, 21 nt, Synthetic Construct
  source 1..21: mol_type = other RNA
ggaggagttcgaaggtacgct

SEQ ID NO: 56614 - RNA, 21 nt, Synthetic Construct
  source 1..21: mol_type = other RNA
tgaggaagtagattgtatagt

SEQ ID NO: 56615 - RNA, 21 nt, Synthetic Construct
  source 1..21: mol_type = other RNA
agaggtagtaggttgtgtggt

SEQ ID NO: 56616 - RNA, 21 nt, Synthetic Construct
  source 1..21: mol_type = other RNA
agaggtagtaggttgtgtggt

SEQ ID NO: 56617 - RNA, 22 nt, Synthetic Construct
  source 1..22: mol_type = other RNA
ccccccactgctaaatttgact

SEQ ID NO: 56618 - RNA, 22 nt, Synthetic Construct
  source 1..22: mol_type = other RNA
ccccccactgctaaatttgact

SEQ ID NO: 56619 - RNA, 22 nt, Synthetic Construct
  source 1..22: mol_type = other RNA
tgaggtggtaggttgtatagtt

SEQ ID NO: 56620 - RNA, 21 nt, Synthetic Construct
  source 1..21: mol_type = other RNA
tgaggtagcaggttgtatagt

SEQ ID NO: 56621 - RNA, 21 nt, Synthetic Construct
  source 1..21: mol_type = other RNA
tgaggtagcaggttgtatagt

SEQ ID NO: 56622 - RNA, 22 nt, Synthetic Construct
  source 1..22: mol_type = other RNA
tgaggtagtaggttgtgtggat

SEQ ID NO: 56623 - RNA, 22 nt, Synthetic Construct
  source 1..22: mol_type = other RNA
tgaggtagtaggttgtgtggat

SEQ ID NO: 56624 - RNA, 25 nt, Synthetic Construct
  source 1..25: mol_type = other RNA
tcgaggatatgagatcgagacgaca

SEQ ID NO: 56625 - RNA, 25 nt, Synthetic Construct
  source 1..25: mol_type = other RNA
tcgaggatatgagatcgagacgaca

SEQ ID NO: 56626 - RNA, 22 nt, Synthetic Construct
  source 1..22: mol_type = other RNA
tgaggtaataggttgtgtggtt

SEQ ID NO: 56627 - RNA, 21 nt, Synthetic Construct
  source 1..21: mol_type = other RNA
tagcagcacgtaatattggcg

SEQ ID NO: 56628 - RNA, 23 nt, Synthetic Construct
  source 1..23: mol_type = other RNA
tacagtagtctgcacattggttt

SEQ ID NO: 56629 - RNA, 23 nt, Synthetic Construct
  source 1..23: mol_type = other RNA
tacagtagtctgcacattggttt

SEQ ID NO: 56630 - RNA, 22 nt, Synthetic Construct
  source 1..22: mol_type = other RNA
tgaggtagtaagttgtgtggtt

SEQ ID NO: 56631 - RNA, 22 nt, Synthetic Construct
  source 1..22: mol_type = other RNA
tgaggtagtaagttgtgtggtt

SEQ ID NO: 56632 - RNA, 22 nt, Synthetic Construct
  source 1..22: mol_type = other RNA
tgtggtgtttcctactttatgg

SEQ ID NO: 56633 - RNA, 18 nt, Synthetic Construct
  source 1..18: mol_type = other RNA
ggtgcaagcgttaatcgg

SEQ ID NO: 56634 - RNA, 16 nt, Synthetic Construct
  source 1..16: mol_type = other RNA
ccatgccgcgtgcggg

SEQ ID NO: 56635 - RNA, 16 nt, Synthetic Construct
  source 1..16: mol_type = other RNA
ccatgccgcgtgcggg

SEQ ID NO: 56636 - RNA, 23 nt, Synthetic Construct
  source 1..23: mol_type = other RNA
tgaggggcggagagcgagacttt

SEQ ID NO: 56637 - RNA, 23 nt, Synthetic Construct
  source 1..23: mol_type = other RNA
tgaggggcggagagcgagacttt

SEQ ID NO: 56638 - RNA, 22 nt, Synthetic Construct
  source 1..22: mol_type = other RNA
tattgcacttgccccggcctgt

SEQ ID NO: 56639 - RNA, 22 nt, Synthetic Construct
  source 1..22: mol_type = other RNA
tattgcacttgccccggcctgt

SEQ ID NO: 56640 - RNA, 37 nt, Synthetic Construct; identical to SEQ ID NO: 2482
  source 1..37: mol_type = other RNA

SEQ ID NO: 56641 - RNA, 24 nt, Synthetic Construct
  source 1..24: mol_type = other RNA
agctacatctggctactgggtctc

SEQ ID NO: 56642 - RNA, 24 nt, Synthetic Construct
  source 1..24: mol_type = other RNA
agctacatctggctactgggtctc

SEQ ID NO: 56643 - RNA, 25 nt, Synthetic Construct
  source 1..25: mol_type = other RNA
caacggaatcccaaaagcagctgtt

SEQ ID NO: 56644 - RNA, 25 nt, Synthetic Construct
  source 1..25: mol_type = other RNA
caacggaatcccaaaagcagctgtt

SEQ ID NO: 56645 - RNA, 22 nt, Synthetic Construct
  source 1..22: mol_type = other RNA
gtcagtttgtcaaataccccaa

SEQ ID NO: 56646 - RNA, 22 nt, Synthetic Construct
  source 1..22: mol_type = other RNA
gtcagtttgtcaaataccccaa

SEQ ID NO: 56647 - RNA, 23 nt, Synthetic Construct
  source 1..23: mol_type = other RNA
tcgtaccgtgagtaataatgcgt

SEQ ID NO: 56648 - RNA, 23 nt, Synthetic Construct
  source 1..23: mol_type = other RNA
tcgtaccgtgagtaataatgcgt

SEQ ID NO: 56649 - RNA, 23 nt, Synthetic Construct
  source 1..23: mol_type = other RNA
tcctgtactgagctaccccgaga

SEQ ID NO: 56650 - RNA, 21 nt, Synthetic Construct
  source 1..21: mol_type = other RNA
tgaggtagtaggttgagtggt

SEQ ID NO: 56651 - RNA, 21 nt, Synthetic Construct
  source 1..21: mol_type = other RNA
tgaggtagtaggttgagtggt

SEQ ID NO: 56652 - RNA, 15 nt, Synthetic Construct
  source 1..15: mol_type = other RNA
ggtggctgtagctca

SEQ ID NO: 56653 - RNA, 15 nt, Synthetic Construct
  source 1..15: mol_type = other RNA
ggtggctgtagctca

SEQ ID NO: 56654 - RNA, 22 nt, Synthetic Construct
  source 1..22: mol_type = other RNA
cgactggtaactgggatgaagt

SEQ ID NO: 56655 - RNA, 22 nt, Synthetic Construct
  source 1..22: mol_type = other RNA
cgactggtaactgggatgaagt

SEQ ID NO: 56656 - RNA, 22 nt, Synthetic Construct
  source 1..22: mol_type = other RNA
agcaggacggtggccatggaag

SEQ ID NO: 56657 - RNA, 22 nt, Synthetic Construct
  source 1..22: mol_type = other RNA
agcaggacggtggccatggaag

SEQ ID NO: 56658 - RNA, 15 nt, Synthetic Construct
  source 1..15: mol_type = other RNA
gttcggaagattttc

SEQ ID NO: 56659 - RNA, 15 nt, Synthetic Construct
  source 1..15: mol_type = other RNA
gttcggaagattttc

SEQ ID NO: 56660 - RNA, 22 nt, Synthetic Construct
  source 1..22: mol_type = other RNA
acagtagtctgcacattggttt

SEQ ID NO: 56661 - RNA, 22 nt, Synthetic Construct
  source 1..22: mol_type = other RNA
acagtagtctgcacattggttt

SEQ ID NO: 56662 - RNA, 23 nt, Synthetic Construct
  source 1..23: mol_type = other RNA
caaagtgctgtccgtgcaggtag

SEQ ID NO: 56663 - RNA, 23 nt, Synthetic Construct
  source 1..23: mol_type = other RNA
caaagtgctgtccgtgcaggtag

SEQ ID NO: 56664 - RNA, 23 nt, Synthetic Construct
  source 1..23: mol_type = other RNA
ggcagcattgtacagggctatgt

SEQ ID NO: 56665 - RNA, 18 nt, Synthetic Construct
  source 1..18: mol_type = other RNA
gtccggatcgtagtctgc

SEQ ID NO: 56666 - RNA, 22 nt, Synthetic Construct
  source 1..22: mol_type = other RNA
tggagtgtggcaatggtgtttg

SEQ ID NO: 56667 - RNA, 22 nt, Synthetic Construct
  source 1..22: mol_type = other RNA
tggagtgtggcaatggtgtttg

SEQ ID NO: 56668 - RNA, 15 nt, Synthetic Construct
  source 1..15: mol_type = other RNA
cccagaaacccggtc

SEQ ID NO: 56669 - RNA, 15 nt, Synthetic Construct
  source 1..15: mol_type = other RNA
cccagaaacccggtc

SEQ ID NO: 56670 - RNA, 21 nt, Synthetic Construct
  source 1..21: mol_type = other RNA
tgaggtagtaggttgtacagt

SEQ ID NO: 56671 - RNA, 21 nt, Synthetic Construct
  source 1..21: mol_type = other RNA
tgaggtagtaggttgtacagt

SEQ ID NO: 56672 - RNA, 23 nt, Synthetic Construct
  source 1..23: mol_type = other RNA
tgtcagtttgtcaaataccccat

SEQ ID NO: 56673 - RNA, 22 nt, Synthetic Construct
  source 1..22: mol_type = other RNA
tgaggtagtaggatgtgtggtt

SEQ ID NO: 56674 - RNA, 22 nt, Synthetic Construct
  source 1..22: mol_type = other RNA
tgaggtagtaggatgtgtggtt

SEQ ID NO: 56675 - RNA, 22 nt, Synthetic Construct
  source 1..22: mol_type = other RNA
ccgtaccgtgagtaataatgcg

SEQ ID NO: 56676 - RNA, 22 nt, Synthetic Construct
  source 1..22: mol_type = other RNA
ccgtaccgtgagtaataatgcg

SEQ ID NO: 56677 - RNA, 21 nt, Synthetic Construct
  source 1..21: mol_type = other RNA
cgaggggcagagagcgagact

SEQ ID NO: 56678 - RNA, 22 nt, Synthetic Construct
  source 1..22: mol_type = other RNA
tacagtagtctgcacattggtt

SEQ ID NO: 56679 - RNA, 21 nt, Synthetic Construct
  source 1..21: mol_type = other RNA
tcctgtactgagctgcccgag

SEQ ID NO: 56680 - RNA, 21 nt, Synthetic Construct
  source 1..21: mol_type = other RNA
tggagtgtggcaatggtgttt

SEQ ID NO: 56681 - RNA, 18 nt, Synthetic Construct
  source 1..18: mol_type = other RNA
gcgccgatgatagtgcgg

SEQ ID NO: 56682 - RNA, 18 nt, Synthetic Construct
  source 1..18: mol_type = other RNA
gcgccgatgatagtgcgg

SEQ ID NO: 56683 - RNA, 24 nt, Synthetic Construct
  source 1..24: mol_type = other RNA
tgtaaacatccttgactggaagct

SEQ ID NO: 56684 - RNA, 23 nt, Synthetic Construct
  source 1..23: mol_type = other RNA
caacggaatcccagaagcagctg

SEQ ID NO: 56685 - RNA, 23 nt, Synthetic Construct
  source 1..23: mol_type = other RNA
caacggaatcccagaagcagctg

SEQ ID NO: 56686 - RNA, 15 nt, Synthetic Construct
  source 1..15: mol_type = other RNA
tcgagtcgtcctgcg

SEQ ID NO: 56687 - RNA, 15 nt, Synthetic Construct
  source 1..15: mol_type = other RNA
tcgagtcgtcctgcg

SEQ ID NO: 56688 - RNA, 16 nt, Synthetic Construct
  source 1..16: mol_type = other RNA
aggtcatcgtcaggct

SEQ ID NO: 56689 - RNA, 16 nt, Synthetic Construct
  source 1..16: mol_type = other RNA
aggtcatcgtcaggct

SEQ ID NO: 56690 - RNA, 23 nt, Synthetic Construct
  source 1..23: mol_type = other RNA
tcctgtgctgagctgccccgagt

SEQ ID NO: 56691 - RNA, 26 nt, Synthetic Construct
  source 1..26: mol_type = other RNA
ttaagtgacgatagcctaggagatac

SEQ ID NO: 56692 - RNA, 22 nt, Synthetic Construct
  source 1..22: mol_type = other RNA
tgaggaagtagattgtatagtt

SEQ ID NO: 56693 - RNA, 21 nt, Synthetic Construct
  source 1..21: mol_type = other RNA
agctacattgtctgctgggtt

SEQ ID NO: 56694 - RNA, 21 nt, Synthetic Construct
  source 1..21: mol_type = other RNA
agctacattgtctgctgggtt

SEQ ID NO: 56695 - RNA, 21 nt, Synthetic Construct
  source 1..21: mol_type = other RNA
tgaggtagtaggtcgtatagt

SEQ ID NO: 56696 - RNA, 21 nt, Synthetic Construct
  source 1..21: mol_type = other RNA
tgaggtagtaggtcgtatagt

SEQ ID NO: 56697 - RNA, 31 nt, Synthetic Construct; identical to SEQ ID NO: 4881
  source 1..31: mol_type = other RNA

SEQ ID NO: 56698 - RNA, 31 nt, Synthetic Construct; identical to SEQ ID NO: 4881
  source 1..31: mol_type = other RNA

SEQ ID NO: 56699 - RNA, 21 nt, Synthetic Construct
  source 1..21: mol_type = other RNA
tgaggtagtaggttgtgtgga

SEQ ID NO: 56700 - RNA, 22 nt, Synthetic Construct
  source 1..22: mol_type = other RNA
tgaggtagtaggttgtgtggat

SEQ ID NO: 56701 - RNA, 22 nt, Synthetic Construct
  source 1..22: mol_type = other RNA
tgaggtagtaggttgtgtggat

SEQ ID NO: 56702 - RNA, 20 nt, Synthetic Construct
  source 1..20: mol_type = other RNA
ttggcctcaagtcaggcagg

SEQ ID NO: 56703 - RNA, 20 nt, Synthetic Construct
  source 1..20: mol_type = other RNA
ttggcctcaagtcaggcagg

SEQ ID NO: 56704 - RNA, 22 nt, Synthetic Construct
  source 1..22: mol_type = other RNA
tgggaactgaattccatgggtt

SEQ ID NO: 56705 - RNA, 22 nt, Synthetic Construct
  source 1..22: mol_type = other RNA
tgggaactgaattccatgggtt

SEQ ID NO: 56706 - RNA, 22 nt, Synthetic Construct
  source 1..22: mol_type = other RNA
tcctgtattgagctgccccgag

SEQ ID NO: 56707 - RNA, 22 nt, Synthetic Construct
  source 1..22: mol_type = other RNA
tcctgtattgagctgccccgag

SEQ ID NO: 56708 - RNA, 21 nt, Synthetic Construct
  source 1..21: mol_type = other RNA
tcagtgcatcacagaactttg

SEQ ID NO: 56709 - RNA, 18 nt, Synthetic Construct
  source 1..18: mol_type = other RNA
ggtgcaagcgttaatcgg

SEQ ID NO: 56710 - RNA, 18 nt, Synthetic Construct
  source 1..18: mol_type = other RNA
ggtgcaagcgttaatcgg

SEQ ID NO: 56711 - RNA, 21 nt, Synthetic Construct
  source 1..21: mol_type = other RNA
tgaggtggtagattgtatagt

SEQ ID NO: 56712 - RNA, 21 nt, Synthetic Construct
  source 1..21: mol_type = other RNA
tgaggtggtagattgtatagt

SEQ ID NO: 56713 - RNA, 21 nt, Synthetic Construct
  source 1..21: mol_type = other RNA
tgaggaagtagattgtatagt

SEQ ID NO: 56714 - RNA, 21 nt, Synthetic Construct
  source 1..21: mol_type = other RNA
tgaggtagtagattgtatggt

SEQ ID NO: 56715 - RNA, 21 nt, Synthetic Construct
  source 1..21: mol_type = other RNA
tcccgtactgagctgccccga

SEQ ID NO: 56716 - RNA, 16 nt, Synthetic Construct
  source 1..16: mol_type = other RNA
gaaattccttgtcggg

SEQ ID NO: 56717 - RNA, 16 nt, Synthetic Construct
  source 1..16: mol_type = other RNA
gaaattccttgtcggg

SEQ ID NO: 56718 - RNA, 15 nt, Synthetic Construct
  source 1..15: mol_type = other RNA
tccggatcgtagtct

SEQ ID NO: 56719 - RNA, 23 nt, Synthetic Construct
  source 1..23: mol_type = other RNA
caacggaaacccaaaagcagctg

SEQ ID NO: 56720 - RNA, 23 nt, Synthetic Construct
  source 1..23: mol_type = other RNA
caacggaaacccaaaagcagctg

SEQ ID NO: 56721 - RNA, 23 nt, Synthetic Construct
  source 1..23: mol_type = other RNA
tcggatccgtctgagcttggctt

SEQ ID NO: 56722 - RNA, 23 nt, Synthetic Construct
  source 1..23: mol_type = other RNA
tcggatccgtctgagcttggctt

SEQ ID NO: 56723 - RNA, 25 nt, Synthetic Construct
  source 1..25: mol_type = other RNA
atgaggatatgagatcgagacgaca

SEQ ID NO: 56724 - RNA, 21 nt, Synthetic Construct
  source 1..21: mol_type = other RNA
tgaggtagcaggttgtatagt

SEQ ID NO: 56725 - RNA, 21 nt, Synthetic Construct
  source 1..21: mol_type = other RNA
tgaggtagcaggttgtatagt

SEQ ID NO: 56726 - RNA, 17 nt, Synthetic Construct
  source 1..17: mol_type = other RNA
gcggctgtagctcagtt

SEQ ID NO: 56727 - RNA, 17 nt, Synthetic Construct
  source 1..17: mol_type = other RNA
gcggctgtagctcagtt

SEQ ID NO: 56728 - RNA, 23 nt, Synthetic Construct
  source 1..23: mol_type = other RNA
tgaggtagtaggttgtgtggctt

SEQ ID NO: 56729 - RNA, 23 nt, Synthetic Construct
  source 1..23: mol_type = other RNA
tgaggtagtaggttgtgtggctt

SEQ ID NO: 56730 - RNA, 21 nt, Synthetic Construct
  source 1..21: mol_type = other RNA
tgaggtagtagatcgtatagt

SEQ ID NO: 56731 - RNA, 23 nt, Synthetic Construct
  source 1..23: mol_type = other RNA
attctaatttctccacgtctttg

SEQ ID NO: 56732 - RNA, 23 nt, Synthetic Construct
  source 1..23: mol_type = other RNA
attctaatttctccacgtctttg

SEQ ID NO: 56733 - RNA, 22 nt, Synthetic Construct
  source 1..22: mol_type = other RNA
tagcagcacgtaaatatcggcg

SEQ ID NO: 56734 - RNA, 22 nt, Synthetic Construct
  source 1..22: mol_type = other RNA
tagcagcacgtaaatatcggcg

SEQ ID NO: 56735 - RNA, 22 nt, Synthetic Construct
  source 1..22: mol_type = other RNA
tggggtagtagtttgtgctgtt

SEQ ID NO: 56736 - RNA, 22 nt, Synthetic Construct
  source 1..22: mol_type = other RNA
tggggtagtagtttgtgctgtt

SEQ ID NO: 56737 - RNA, 21 nt, Synthetic Construct
  source 1..21: mol_type = other RNA
tgaggtggtaggttgtatagt

SEQ ID NO: 56738 - RNA, 21 nt, Synthetic Construct
  source 1..21: mol_type = other RNA
tgaggtggtaggttgtatagt

SEQ ID NO: 56739 - RNA, 24 nt, Synthetic Construct
  source 1..24: mol_type = other RNA
tgtaaacatccccgactggaagtt

SEQ ID NO: 56740 - RNA, 32 nt, Synthetic Construct; identical to SEQ ID NO: 3541
  source 1..32: mol_type = other RNA

SEQ ID NO: 56741 - RNA, 32 nt, Synthetic Construct; identical to SEQ ID NO: 3541
  source 1..32: mol_type = other RNA

SEQ ID NO: 56742 - RNA, 23 nt, Synthetic Construct
  source 1..23: mol_type = other RNA
taaggggcagagagcgagacttt

SEQ ID NO: 56743 - RNA, 23 nt, Synthetic Construct
  source 1..23: mol_type = other RNA
taaggggcagagagcgagacttt

SEQ ID NO: 56744 - RNA, 17 nt, Synthetic Construct
  source 1..17: mol_type = other RNA
gccatgccgcgtgcggg

SEQ ID NO: 56745 - RNA, 21 nt, Synthetic Construct
  source 1..21: mol_type = other RNA
cgaggtagtaggttgtgtggt

SEQ ID NO: 56746 - RNA, 21 nt, Synthetic Construct
  source 1..21: mol_type = other RNA
tggagtgcgacaatggtgttt

SEQ ID NO: 56747 - RNA, 23 nt, Synthetic Construct
  source 1..23: mol_type = other RNA
tcctgtactgggctgccccgaga

SEQ ID NO: 56748 - RNA, 21 nt, Synthetic Construct
  source 1..21: mol_type = other RNA
tagcaccatctgaaatcggta

SEQ ID NO: 56749 - RNA, 21 nt, Synthetic Construct
  source 1..21: mol_type = other RNA
cgaggtagtaggttgtatagt

SEQ ID NO: 56750 - RNA, 21 nt, Synthetic Construct
  source 1..21: mol_type = other RNA
cgaggtagtaggttgtatagt

SEQ ID NO: 56751 - RNA, 22 nt, Synthetic Construct
  source 1..22: mol_type = other RNA
taaggtagtaggttgtgtggtt

SEQ ID NO: 56752 - RNA, 22 nt, Synthetic Construct
  source 1..22: mol_type = other RNA
tattgcacttgtcccggcctgc

SEQ ID NO: 56753 - RNA, 22 nt, Synthetic Construct
  source 1..22: mol_type = other RNA
tcgtaccgtgggtaataatgcg

SEQ ID NO: 56754 - RNA, 22 nt, Synthetic Construct
  source 1..22: mol_type = other RNA
tcttgtactgagctgccccgag

SEQ ID NO: 56755 - RNA, 22 nt, Synthetic Construct
  source 1..22: mol_type = other RNA
tcccgtactgagctgccccgag

SEQ ID NO: 56756 - RNA, 22 nt, Synthetic Construct
  source 1..22: mol_type = other RNA
tcaagagcaataacgaaaaatg

SEQ ID NO: 56757 - RNA, 22 nt, Synthetic Construct
  source 1..22: mol_type = other RNA
tcaagagcaataacgaaaaatg

SEQ ID NO: 56758 - RNA, 23 nt, Synthetic Construct
  source 1..23: mol_type = other RNA
tggtaatacgacgtactaagtgt

SEQ ID NO: 56759 - RNA, 22 nt, Synthetic Construct
  source 1..22: mol_type = other RNA
tgaggtagtagtttgtgctgat

SEQ ID NO: 56760 - RNA, 22 nt, Synthetic Construct
  source 1..22: mol_type = other RNA
tgaggtagtagtttgtgctgat

SEQ ID NO: 56761 - RNA, 22 nt, Synthetic Construct
  source 1..22: mol_type = other RNA
tcctgcactgagctgccccgag

SEQ ID NO: 56762 - RNA, 21 nt, Synthetic Construct
  source 1..21: mol_type = other RNA
ggaggtagtagattgtatagt

SEQ ID NO: 56763 - RNA, 21 nt, Synthetic Construct
  source 1..21: mol_type = other RNA
ggaggtagtagattgtatagt

SEQ ID NO: 56764 - RNA, 21 nt, Synthetic Construct
  source 1..21: mol_type = other RNA
tcctgtactgagctgccccgg

SEQ ID NO: 56765 - RNA, 18 nt, Synthetic Construct
  source 1..18: mol_type = other RNA
cgcgacctcagatcagac

SEQ ID NO: 56766 - RNA, 23 nt, Synthetic Construct
  source 1..23: mol_type = other RNA
cagagtgctgttcgtgcaggtag

SEQ ID NO: 56767 - RNA, 24 nt, Synthetic Construct
  source 1..24: mol_type = other RNA
ggctacattgtctgctgggtttct

SEQ ID NO: 56768 - RNA, 25 nt, Synthetic Construct
  source 1..25: mol_type = other RNA
ttgaggatatgaggtcgagacgaca

SEQ ID NO: 56769 - RNA, 23 nt, Synthetic Construct
  source 1..23: mol_type = other RNA
tcctgcactgagctgccccgaga

SEQ ID NO: 56770 - RNA, 23 nt, Synthetic Construct
  source 1..23: mol_type = other RNA
tcctgcactgagctgccccgaga

SEQ ID NO: 56771 - RNA, 22 nt, Synthetic Construct
  source 1..22: mol_type = other RNA
gtgccgaagctgtgggattgat

SEQ ID NO: 56772 - RNA, 22 nt, Synthetic Construct
  source 1..22: mol_type = other RNA
gtgccgaagctgtgggattgat

SEQ ID NO: 56773 - RNA, 19 nt, Synthetic Construct
  source 1..19: mol_type = other RNA
tattgcacttgtcccggcc

SEQ ID NO: 56774 - RNA, 19 nt, Synthetic Construct
  source 1..19: mol_type = other RNA
tattgcacttgtcccggcc

SEQ ID NO: 56775 - RNA, 23 nt, Synthetic Construct
  source 1..23: mol_type = other RNA
gggagccaggaagtattgatgtt

SEQ ID NO: 56776 - RNA, 23 nt, Synthetic Construct
  source 1..23: mol_type = other RNA
gggagccaggaagtattgatgtt

SEQ ID NO: 56777 - RNA, 15 nt, Synthetic Construct
  source 1..15: mol_type = other RNA
gttcggaagattttc

SEQ ID NO: 56778 - RNA, 20 nt, Synthetic Construct
  source 1..20: mol_type = other RNA
attgcacttgtcccggcctg

SEQ ID NO: 56779 - RNA, 20 nt, Synthetic Construct
  source 1..20: mol_type = other RNA
attgcacttgtcccggcctg

SEQ ID NO: 56780 - RNA, 21 nt, Synthetic Construct
  source 1..21: mol_type = other RNA
tagcagcacgtaaatattggc

SEQ ID NO: 56781 - RNA, 17 nt, Synthetic Construct
  source 1..17: mol_type = other RNA
acagtcaggatgttggc

SEQ ID NO: 56782 - RNA, 17 nt, Synthetic Construct
  source 1..17: mol_type = other RNA
acagtcaggatgttggc

SEQ ID NO: 56783 - RNA, 26 nt, Synthetic Construct
  source 1..26: mol_type = other RNA
agggctgggtcggtcgggctggggcg

SEQ ID NO: 56784 - RNA, 26 nt, Synthetic Construct
  source 1..26: mol_type = other RNA
agggctgggtcggtcgggctggggcg

SEQ ID NO: 56785 - RNA, 21 nt, Synthetic Construct
  source 1..21: mol_type = other RNA
tgtcttgcaggccgtcatgca

SEQ ID NO: 56786 - RNA, 21 nt, Synthetic Construct
  source 1..21: mol_type = other RNA
tgtcttgcaggccgtcatgca

SEQ ID NO: 56787 - RNA, 20 nt, Synthetic Construct
  source 1..20: mol_type = other RNA
tcctgtaccgatcaatagtg

SEQ ID NO: 56788 - RNA, 20 nt, Synthetic Construct
  source 1..20: mol_type = other RNA
tcctgtaccgatcaatagtg

SEQ ID NO: 56789 - RNA, 22 nt, Synthetic Construct
  source 1..22: mol_type = other RNA
tgagatagtagtttgtgctgtt

SEQ ID NO: 56790 - RNA, 18 nt, Synthetic Construct
  source 1..18: mol_type = other RNA
atcccacttctgacacca

SEQ ID NO: 56791 - RNA, 18 nt, Synthetic Construct
  source 1..18: mol_type = other RNA
atcccacttctgacacca

SEQ ID NO: 56792 - RNA, 23 nt, Synthetic Construct
  source 1..23: mol_type = other RNA
tcctgtactgagccgccccgagt

SEQ ID NO: 56793 - RNA, 23 nt, Synthetic Construct
  source 1..23: mol_type = other RNA
tcctgtactgagccgccccgagt

SEQ ID NO: 56794 - RNA, 15 nt, Synthetic Construct
  source 1..15: mol_type = other RNA
tgcctcagcgtcggt

SEQ ID NO: 56795 - RNA, 15 nt, Synthetic Construct
  source 1..15: mol_type = other RNA
tgcctcagcgtcggt

SEQ ID NO: 56796 - RNA, 21 nt, Synthetic Construct
  source 1..21: mol_type = other RNA
tcctgtactgagctgccctga

SEQ ID NO: 56797 - RNA, 21 nt, Synthetic Construct
  source 1..21: mol_type = other RNA
tcctgtactgagctgccctga

SEQ ID NO: 56798 - RNA, 23 nt, Synthetic Construct
  source 1..23: mol_type = other RNA
tctacagtgcacgtgtctccagt

SEQ ID NO: 56799 - RNA, 23 nt, Synthetic Construct
  source 1..23: mol_type = other RNA
tctacagtgcacgtgtctccagt

SEQ ID NO: 56800 - RNA, 21 nt, Synthetic Construct
  source 1..21: mol_type = other RNA
cgtgccgtgagtaataatgcg

SEQ ID NO: 56801 - RNA, 21 nt, Synthetic Construct
  source 1..21: mol_type = other RNA
cgtgccgtgagtaataatgcg

SEQ ID NO: 56802 - RNA, 21 nt, Synthetic Construct
  source 1..21: mol_type = other RNA
attgcacttgtcccggcctgt

SEQ ID NO: 56803 - RNA, 21 nt, Synthetic Construct
  source 1..21: mol_type = other RNA
attgcacttgtcccggcctgt

SEQ ID NO: 56804 - RNA, 22 nt, Synthetic Construct
  source 1..22: mol_type = other RNA
accacagggtagaaccacggac

SEQ ID NO: 56805 - RNA, 22 nt, Synthetic Construct
  source 1..22: mol_type = other RNA
accacagggtagaaccacggac

SEQ ID NO: 56806 - RNA, 23 nt, Synthetic Construct
  source 1..23: mol_type = other RNA
agctcggtctgaggcccctcagt

SEQ ID NO: 56807 - RNA, 23 nt, Synthetic Construct
  source 1..23: mol_type = other RNA
agctcggtctgaggcccctcagt

SEQ ID NO: 56808 - RNA, 23 nt, Synthetic Construct
  source 1..23: mol_type = other RNA
tgaggtagtaggttgtatagttg

SEQ ID NO: 56809 - RNA, 23 nt, Synthetic Construct
  source 1..23: mol_type = other RNA
tgaggtagtaggttgtatagttg

SEQ ID NO: 56810 - RNA, 21 nt, Synthetic Construct
  source 1..21: mol_type = other RNA
tgaggtagtgggttgtatagt

SEQ ID NO: 56811 - RNA, 21 nt, Synthetic Construct
  source 1..21: mol_type = other RNA
tgaggtagtgggttgtatagt

SEQ ID NO: 56812 - RNA, 20 nt, Synthetic Construct
  source 1..20: mol_type = other RNA
ttggcctcaagtcaggcagg

SEQ ID NO: 56813 - RNA, 20 nt, Synthetic Construct
  source 1..20: mol_type = other RNA
ttggcctcaagtcaggcagg

SEQ ID NO: 56814 - RNA, 15 nt, Synthetic Construct
  source 1..15: mol_type = other RNA
tagagtagggcggga

SEQ ID NO: 56815 - RNA, 15 nt, Synthetic Construct
  source 1..15: mol_type = other RNA
tagagtagggcggga

SEQ ID NO: 56816 - RNA, 15 nt, Synthetic Construct
  source 1..15: mol_type = other RNA
aggtgggaggctttg

SEQ ID NO: 56817 - RNA, 22 nt, Synthetic Construct
  source 1..22: mol_type = other RNA
tagcagcacgtaaatataggcg

SEQ ID NO: 56818 - RNA, 22 nt, Synthetic Construct
  source 1..22: mol_type = other RNA
cataaagtagaaagcactacta

SEQ ID NO: 56819 - RNA, 15 nt, Synthetic Construct
  source 1..15: mol_type = other RNA
agttgaccgcctggg

SEQ ID NO: 56820 - RNA, 24 nt, Synthetic Construct
  source 1..24: mol_type = other RNA
gtgaaagtaggtcatcgtcaggct

SEQ ID NO: 56821 - RNA, 24 nt, Synthetic Construct
  source 1..24: mol_type = other RNA
gtgaaagtaggtcatcgtcaggct

SEQ ID NO: 56822 - RNA, 22 nt, Synthetic Construct
  source 1..22: mol_type = other RNA
tgtggtagtagtttgtgctgtt

SEQ ID NO: 56823 - RNA, 22 nt, Synthetic Construct
  source 1..22: mol_type = other RNA
tgtggtagtagtttgtgctgtt

SEQ ID NO: 56824 - RNA, 22 nt, Synthetic Construct
  source 1..22: mol_type = other RNA
tgaggtagtaaattgtatagtt

SEQ ID NO: 56825 - RNA, 22 nt, Synthetic Construct
  source 1..22: mol_type = other RNA
tgaggtagtaaattgtatagtt

SEQ ID NO: 56826 - RNA, 17 nt, Synthetic Construct
  source 1..17: mol_type = other RNA
gggtctgtagctcagtc

SEQ ID NO: 56827 - RNA, 17 nt, Synthetic Construct
  source 1..17: mol_type = other RNA
gggtctgtagctcagtc

SEQ ID NO: 56828 - RNA, 21 nt, Synthetic Construct
  source 1..21: mol_type = other RNA
tcctgtactgagctgccacga

SEQ ID NO: 56829 - RNA, 21 nt, Synthetic Construct
  source 1..21: mol_type = other RNA
tcctgtactgagctgccacga

SEQ ID NO: 56830 - RNA, 22 nt, Synthetic Construct
  source 1..22: mol_type = other RNA
gcacattacacggtcgacctct

SEQ ID NO: 56831 - RNA, 22 nt, Synthetic Construct
  source 1..22: mol_type = other RNA
gcacattacacggtcgacctct

SEQ ID NO: 56832 - RNA, 20 nt, Synthetic Construct
  source 1..20: mol_type = other RNA
tgaggtagtaggttgtgtgg

SEQ ID NO: 56833 - RNA, 24 nt, Synthetic Construct
  source 1..24: mol_type = other RNA
acctggcatacaatgtagatttct

SEQ ID NO: 56834 - RNA, 23 nt, Synthetic Construct
  source 1..23: mol_type = other RNA
ccctgtactgagctgccccgagt

SEQ ID NO: 56835 - RNA, 23 nt, Synthetic Construct
  source 1..23: mol_type = other RNA
ccctgtactgagctgccccgagt

SEQ ID NO: 56836 - RNA, 19 nt, Synthetic Construct
  source 1..19: mol_type = other RNA
agcaggacggtggccatgg

SEQ ID NO: 56837 - RNA, 27 nt, Synthetic Construct
  source 1..27: mol_type = other RNA
ccccccgctgctaaatttgactggcta

SEQ ID NO: 56838 - RNA, 27 nt, Synthetic Construct
  source 1..27: mol_type = other RNA
ccccccgctgctaaatttgactggcta

SEQ ID NO: 56839 - RNA, 26 nt, Synthetic Construct
  source 1..26: mol_type = other RNA
gacttaccaaacctatgcaaactccg

SEQ ID NO: 56840 - RNA, 21 nt, Synthetic Construct
  source 1..21: mol_type = other RNA
tgaggtagtagtttgtgccgt

SEQ ID NO: 56841 - RNA, 22 nt, Synthetic Construct
  source 1..22: mol_type = other RNA
tcctgtgctgagctgccccgag

SEQ ID NO: 56842 - RNA, 22 nt, Synthetic Construct
  source 1..22: mol_type = other RNA
tcctgtgctgagctgccccgag

SEQ ID NO: 56843 - RNA, 27 nt, Synthetic Construct
  source 1..27: mol_type = other RNA
ccccccaccgctaaatttgactggctt

SEQ ID NO: 56844 - RNA, 22 nt, Synthetic Construct
  source 1..22: mol_type = other RNA
tgaggtagtaggttgtataatt

SEQ ID NO: 56845 - RNA, 22 nt, Synthetic Construct
  source 1..22: mol_type = other RNA
tgaggtagtaggttgtataatt

SEQ ID NO: 56846 - RNA, 23 nt, Synthetic Construct
  source 1..23: mol_type = other RNA
tgaggtagtaggttgtgtggttt

SEQ ID NO: 56847 - RNA, 23 nt, Synthetic Construct
  source 1..23: mol_type = other RNA
tgaggtagtaggttgtgtggttt

SEQ ID NO: 56848 - RNA, 23 nt, Synthetic Construct
  source 1..23: mol_type = other RNA
ttcaagtaattcaggataggttt

SEQ ID NO: 56849 - RNA, 27 nt, Synthetic Construct
  source 1..27: mol_type = other RNA
ccccccactgctaaatttggctggcta

SEQ ID NO: 56850 - RNA, 27 nt, Synthetic Construct
  source 1..27: mol_type = other RNA
ccccccactgctaaatttggctggcta

SEQ ID NO: 56851 - RNA, 18 nt, Synthetic Construct
  source 1..18: mol_type = other RNA
cctgtaccgatcaatagt

SEQ ID NO: 56852 - RNA, 18 nt, Synthetic Construct
  source 1..18: mol_type = other RNA
cctgtaccgatcaatagt

SEQ ID NO: 56853 - RNA, 21 nt, Synthetic Construct
  source 1..21: mol_type = other RNA
acagtagcctgcacattggtt

SEQ ID NO: 56854 - RNA, 21 nt, Synthetic Construct
  source 1..21: mol_type = other RNA
tgaggtagtaggttgcatagt

SEQ ID NO: 56855 - RNA, 27 nt, Synthetic Construct
  source 1..27: mol_type = other RNA
ttcaacttaacttgaccgctctgacca

SEQ ID NO: 56856 - RNA, 27 nt, Synthetic Construct
  source 1..27: mol_type = other RNA
ttcaacttaacttgaccgctctgacca

SEQ ID NO: 56857 - RNA, 21 nt, Synthetic Construct
  source 1..21: mol_type = other RNA
tgaggtagtagtttgtgctgt

SEQ ID NO: 56858 - RNA, 25 nt, Synthetic Construct
  source 1..25: mol_type = other RNA
ttgaggatgtgagatcgagacgaca

SEQ ID NO: 56859 - RNA, 25 nt, Synthetic Construct
  source 1..25: mol_type = other RNA
ttgaggatgtgagatcgagacgaca

SEQ ID NO: 56860 - RNA, 23 nt, Synthetic Construct
  source 1..23: mol_type = other RNA
tcctgtactgagccgccccgaga

SEQ ID NO: 56861 - RNA, 22 nt, Synthetic Construct
  source 1..22: mol_type = other RNA
attgcacttgtcccggcctgtt

SEQ ID NO: 56862 - RNA, 22 nt, Synthetic Construct
  source 1..22: mol_type = other RNA
tgaggtggtagtttgtgctgtt

SEQ ID NO: 56863 - RNA, 22 nt, Synthetic Construct
  source 1..22: mol_type = other RNA
tgaggtggtagtttgtgctgtt

SEQ ID NO: 56864 - RNA, 16 nt, Synthetic Construct
  source 1..16: mol_type = other RNA
gcagacgaagtgagtg

SEQ ID NO: 56865 - RNA, 25 nt, Synthetic Construct
  source 1..25: mol_type = other RNA
tttccccttggggttgtaggaccac

SEQ ID NO: 56866 - RNA, 25 nt, Synthetic Construct
  source 1..25: mol_type = other RNA
tttccccttggggttgtaggaccac

SEQ ID NO: 56867 - RNA, 27 nt, Synthetic Construct
  source 1..27: mol_type = other RNA
ccccccactgctaaatttgacaggctt

SEQ ID NO: 56868 - RNA, 35 nt, Synthetic Construct; identical to SEQ ID NO: 2452
  source 1..35: mol_type = other RNA

SEQ ID NO: 56869 - RNA, 23 nt, Synthetic Construct
  source 1..23: mol_type = other RNA
gggtaatacgacgtacttagtgt

SEQ ID NO: 56870 - RNA, 22 nt, Synthetic Construct
  source 1..22: mol_type = other RNA
tgaggtagtaggttatgtggtt

SEQ ID NO: 56871 - RNA, 22 nt, Synthetic Construct
  source 1..22: mol_type = other RNA
tgaggtagtaggttatgtggtt

SEQ ID NO: 56872 - RNA, 20 nt, Synthetic Construct
  source 1..20: mol_type = other RNA
tgaggtagtaggttgcgtgg

SEQ ID NO: 56873 - RNA, 23 nt, Synthetic Construct
  source 1..23: mol_type = other RNA
ggctacattgtctgctgggtttc

SEQ ID NO: 56874 - RNA, 23 nt, Synthetic Construct
  source 1..23: mol_type = other RNA
ggctacattgtctgctgggtttc

SEQ ID NO: 56875 - RNA, 16 nt, Synthetic Construct
  source 1..16: mol_type = other RNA
gagtttggctggggcg

SEQ ID NO: 56876 - RNA, 16 nt, Synthetic Construct
  source 1..16: mol_type = other RNA
gagtttggctggggcg

SEQ ID NO: 56877 - RNA, 23 nt, Synthetic Construct
  source 1..23: mol_type = other RNA
ccctgtactgagctgccccgaga

SEQ ID NO: 56878 - RNA, 24 nt, Synthetic Construct
  source 1..24: mol_type = other RNA
ctcactgatcgagtcgtcctgcgc

SEQ ID NO: 56879 - RNA, 21 nt, Synthetic Construct
  source 1..21: mol_type = other RNA
tgaggtagaaggttgtgtggt

SEQ ID NO: 56880 - RNA, 21 nt, Synthetic Construct
  source 1..21: mol_type = other RNA
tgaggtagaaggttgtgtggt

SEQ ID NO: 56881 - RNA, 22 nt, Synthetic Construct
  source 1..22: mol_type = other RNA
ttcaagtaatccaggataggcc

SEQ ID NO: 56882 - RNA, 22 nt, Synthetic Construct
  source 1..22: mol_type = other RNA
tgaggaagtaggttgtatagtt

SEQ ID NO: 56883 - RNA, 23 nt, Synthetic Construct
  source 1..23: mol_type = other RNA
caaagtgctattcgtgcaggtag

SEQ ID NO: 56884 - RNA, 21 nt, Synthetic Construct
  source 1..21: mol_type = other RNA
tggctcagttcagcaggaaca

SEQ ID NO: 56885 - RNA, 21 nt, Synthetic Construct
  source 1..21: mol_type = other RNA
tgaggcagtagattgtatagt

SEQ ID NO: 56886 - RNA, 21 nt, Synthetic Construct
  source 1..21: mol_type = other RNA
tgaggcagtagattgtatagt

SEQ ID NO: 56887 - RNA, 23 nt, Synthetic Construct
  source 1..23: mol_type = other RNA
cgcgacctcagatcagacgtggc

SEQ ID NO: 56888 - RNA, 15 nt, Synthetic Construct
  source 1..15: mol_type = other RNA
tcgagtcgtcctgcg

SEQ ID NO: 56889 - RNA, 15 nt, Synthetic Construct
  source 1..15: mol_type = other RNA
tcgagtcgtcctgcg

SEQ ID NO: 56890 - RNA, 25 nt, Synthetic Construct
  source 1..25: mol_type = other RNA
ggtaaaattgctgagtgaagcattg

SEQ ID NO: 56891 - RNA, 25 nt, Synthetic Construct
  source 1..25: mol_type = other RNA
ggtaaaattgctgagtgaagcattg

SEQ ID NO: 56892 - RNA, 27 nt, Synthetic Construct
  source 1..27: mol_type = other RNA
ccccccgctgctaaatttgactggctt

SEQ ID NO: 56893 - RNA, 27 nt, Synthetic Construct
  source 1..27: mol_type = other RNA
ccccccgctgctaaatttgactggctt

SEQ ID NO: 56894 - RNA, 27 nt, Synthetic Construct
  source 1..27: mol_type = other RNA
ccccccactgctaaatttgactggctc

SEQ ID NO: 56895 - RNA, 27 nt, Synthetic Construct
  source 1..27: mol_type = other RNA
ccccccactgctaaatttgactggctc

SEQ ID NO: 56896 - RNA, 23 nt, Synthetic Construct
  source 1..23: mol_type = other RNA
caaagtgcagttcgtgcaggtag

SEQ ID NO: 56897 - RNA, 21 nt, Synthetic Construct
  source 1..21: mol_type = other RNA
taactccttaagcgaactcgc

SEQ ID NO: 56898 - RNA, 21 nt, Synthetic Construct
  source 1..21: mol_type = other RNA
taactccttaagcgaactcgc

SEQ ID NO: 56899 - RNA, 15 nt, Synthetic Construct
  source 1..15: mol_type = other RNA
cgactcttagcggtg

SEQ ID NO: 56900 - RNA, 15 nt, Synthetic Construct
  source 1..15: mol_type = other RNA
cgactcttagcggtg

SEQ ID NO: 56901 - RNA, 22 nt, Synthetic Construct
  source 1..22: mol_type = other RNA
tgaggtagtaggttgtacagtt

SEQ ID NO: 56902 - RNA, 22 nt, Synthetic Construct
  source 1..22: mol_type = other RNA
tgaggtagtaggatgtgtggtt

SEQ ID NO: 56903 - RNA, 23 nt, Synthetic Construct
  source 1..23: mol_type = other RNA
tgggctaagggagatgattgggt

SEQ ID NO: 56904 - RNA, 16 nt, Synthetic Construct
  source 1..16: mol_type = other RNA
tgcacgaaagcgtggg

SEQ ID NO: 56905 - RNA, 23 nt, Synthetic Construct
  source 1..23: mol_type = other RNA
tcctgtactgagctgccctgagt

SEQ ID NO: 56906 - RNA, 21 nt, Synthetic Construct
  source 1..21: mol_type = other RNA
atcacattgccagggatttcc

SEQ ID NO: 56907 - RNA, 23 nt, Synthetic Construct
  source 1..23: mol_type = other RNA
tgaggggaagagagcgagacttt

SEQ ID NO: 56908 - RNA, 23 nt, Synthetic Construct
  source 1..23: mol_type = other RNA
tgaggggaagagagcgagacttt

SEQ ID NO: 56909 - RNA, 22 nt, Synthetic Construct
  source 1..22: mol_type = other RNA
tgaggtagtaggttatgtggtt

SEQ ID NO: 56910 - RNA, 22 nt, Synthetic Construct
  source 1..22: mol_type = other RNA
tgaggtagtaggttatgtggtt

SEQ ID NO: 56911 - RNA, 21 nt, Synthetic Construct
  source 1..21: mol_type = other RNA
tggagtgtgacaatggcgttt

SEQ ID NO: 56912 - RNA, 21 nt, Synthetic Construct
  source 1..21: mol_type = other RNA
tggagtgtgacaatggcgttt

SEQ ID NO: 56913 - RNA, 27 nt, Synthetic Construct
  source 1..27: mol_type = other RNA
ccctccactgctaaatttgactggctt

SEQ ID NO: 56914 - RNA, 22 nt, Synthetic Construct
  source 1..22: mol_type = other RNA
tatagcacttgtcccggcctgt

SEQ ID NO: 56915 - RNA, 15 nt, Synthetic Construct
  source 1..15: mol_type = other RNA
ccgcttttgtcaggg

SEQ ID NO: 56916 - RNA, 15 nt, Synthetic Construct
  source 1..15: mol_type = other RNA
ccgcttttgtcaggg

SEQ ID NO: 56917 - RNA, 19 nt, Synthetic Construct
  source 1..19: mol_type = other RNA
aggacagtgaaacgagtca

SEQ ID NO: 56918 - RNA, 21 nt, Synthetic Construct
  source 1..21: mol_type = other RNA
tagcaccatttgaaatcggtt

SEQ ID NO: 56919 - RNA, 21 nt, Synthetic Construct
  source 1..21: mol_type = other RNA
gctattgacgaccgtaccgca

SEQ ID NO: 56920 - RNA, 24 nt, Synthetic Construct
  source 1..24: mol_type = other RNA
tgtaaacatcaccgactggaagct

SEQ ID NO: 56921 - RNA, 22 nt, Synthetic Construct
  source 1..22: mol_type = other RNA
cccataaagtagaaagcactac

SEQ ID NO: 56922 - RNA, 22 nt, Synthetic Construct
  source 1..22: mol_type = other RNA
tgaagtagtaggttgtgtggtt

SEQ ID NO: 56923 - RNA, 23 nt, Synthetic Construct
  source 1..23: mol_type = other RNA
tcctatactgagctgccccgaga

SEQ ID NO: 56924 - RNA, 18 nt, Synthetic Construct
  source 1..18: mol_type = other RNA
gctgtgatggccgagtgg

SEQ ID NO: 56925 - RNA, 21 nt, Synthetic Construct
  source 1..21: mol_type = other RNA
tgaggtagtgggttgtatagt

SEQ ID NO: 56926 - RNA, 21 nt, Synthetic Construct
  source 1..21: mol_type = other RNA
tgaggtagtgggttgtatagt

SEQ ID NO: 56927 - RNA, 22 nt, Synthetic Construct
  source 1..22: mol_type = other RNA
tgaggcagtaggttgtgtggtt

SEQ ID NO: 56928 - RNA, 19 nt, Synthetic Construct
  source 1..19: mol_type = other RNA
gtccggatcgtagtctgca

SEQ ID NO: 56929 - RNA, 19 nt, Synthetic Construct
  source 1..19: mol_type = other RNA
agctacattgtctgctggg

SEQ ID NO: 56930 - RNA, 19 nt, Synthetic Construct
  source 1..19: mol_type = other RNA
agctacattgtctgctggg

SEQ ID NO: 56931 - RNA, 22 nt, Synthetic Construct
  source 1..22: mol_type = other RNA
tgaggtagtagtttgtgctgtc

SEQ ID NO: 56932 - RNA, 22 nt, Synthetic Construct
  source 1..22: mol_type = other RNA
tgaggtagtagtttgtgctgtc

SEQ ID NO: 56933 - RNA, 23 nt, Synthetic Construct
  source 1..23: mol_type = other RNA
tgaggtagtaggttgcgtggttt

SEQ ID NO: 56934 - RNA, 23 nt, Synthetic Construct
  source 1..23: mol_type = other RNA
tgaggtagtaggttgcgtggttt

SEQ ID NO: 56935 - RNA, 19 nt, Synthetic Construct
  source 1..19: mol_type = other RNA
tgtcagtttgtcaaatacc

SEQ ID NO: 56936 - RNA, 19 nt, Synthetic Construct
  source 1..19: mol_type = other RNA
tgtcagtttgtcaaatacc

SEQ ID NO: 56937 - RNA, 18 nt, Synthetic Construct
  source 1..18: mol_type = other RNA
tctaatgagactgccggt

SEQ ID NO: 56938 - RNA, 18 nt, Synthetic Construct
  source 1..18: mol_type = other RNA
tctaatgagactgccggt

SEQ ID NO: 56939 - RNA, 20 nt, Synthetic Construct
  source 1..20: mol_type = other RNA
tgaggaagtaggttgtatag

SEQ ID NO: 56940 - RNA, 19 nt, Synthetic Construct
  source 1..19: mol_type = other RNA
ggtggggagtttggctggg

SEQ ID NO: 56941 - RNA, 19 nt, Synthetic Construct
  source 1..19: mol_type = other RNA
ggtggggagtttggctggg

SEQ ID NO: 56942 - RNA, 27 nt, Synthetic Construct
  source 1..27: mol_type = other RNA
gctttacattggactttgaacagatct

SEQ ID NO: 56943 - RNA, 22 nt, Synthetic Construct
  source 1..22: mol_type = other RNA
catagcacttgtctcggtctga

SEQ ID NO: 56944 - RNA, 18 nt, Synthetic Construct
  source 1..18: mol_type = other RNA
cctgaagaataagcaccg

SEQ ID NO: 56945 - RNA, 18 nt, Synthetic Construct
  source 1..18: mol_type = other RNA
cctgaagaataagcaccg

SEQ ID NO: 56946 - RNA, 32 nt, Synthetic Construct; identical to SEQ ID NO: 14967
  source 1..32: mol_type = other RNA

SEQ ID NO: 56947 - RNA, 32 nt, Synthetic Construct; identical to SEQ ID NO: 14967
  source 1..32: mol_type = other RNA

SEQ ID NO: 56948 - RNA, 22 nt, Synthetic Construct
  source 1..22: mol_type = other RNA
cattgcacttgtctcagtctga

SEQ ID NO: 56949 - RNA, 27 nt, Synthetic Construct
  source 1..27: mol_type = other RNA
tgaggtagtaggttgtgtggttttttt

SEQ ID NO: 56950 - RNA, 32 nt, Synthetic Construct; identical to SEQ ID NO: 18425
  source 1..32: mol_type = other RNA

SEQ ID NO: 56951 - RNA, 21 nt, Synthetic Construct
  source 1..21: mol_type = other RNA
tgaggtagtagatcgtatagt

SEQ ID NO: 56952 - RNA, 21 nt, Synthetic Construct
  source 1..21: mol_type = other RNA
tgaggtagtagatcgtatagt

SEQ ID NO: 56953 - RNA, 22 nt, Synthetic Construct
  source 1..22: mol_type = other RNA
tgaggtagcaggttgtatagtt

SEQ ID NO: 56954 - RNA, 25 nt, Synthetic Construct
  source 1..25: mol_type = other RNA
ttgaggatatgagatcgagacgaca

SEQ ID NO: 56955 - RNA, 18 nt, Synthetic Construct
  source 1..18: mol_type = other RNA
ggtagcgtggccgagtgg

SEQ ID NO: 56956 - RNA, 18 nt, Synthetic Construct
  source 1..18: mol_type = other RNA
ggtagcgtggccgagtgg

SEQ ID NO: 56957 - RNA, 27 nt, Synthetic Construct
  source 1..27: mol_type = other RNA
ccccccactgctaaatttgactagctt

SEQ ID NO: 56958 - RNA, 23 nt, Synthetic Construct
  source 1..23: mol_type = other RNA
tgaggtagtaggtcgtgtggttt

SEQ ID NO: 56959 - RNA, 23 nt, Synthetic Construct
  source 1..23: mol_type = other RNA
tgaggtagtagattgtatagttc

SEQ ID NO: 56960 - RNA, 23 nt, Synthetic Construct
  source 1..23: mol_type = other RNA
caaagtgcttacagtgcaggtag

SEQ ID NO: 56961 - RNA, 23 nt, Synthetic Construct
  source 1..23: mol_type = other RNA
caaagtgcttacagtgcaggtag

SEQ ID NO: 56962 - RNA, 21 nt, Synthetic Construct
  source 1..21: mol_type = other RNA
agctacattgtctgctgggtt

SEQ ID NO: 56963 - RNA, 21 nt, Synthetic Construct
  source 1..21: mol_type = other RNA
agctacattgtctgctgggtt

SEQ ID NO: 56964 - RNA, 22 nt, Synthetic Construct
  source 1..22: mol_type = other RNA
cactgcacttgtctcggtctga

SEQ ID NO: 56965 - RNA, 22 nt, Synthetic Construct
  source 1..22: mol_type = other RNA
cactgcacttgtctcggtctga

SEQ ID NO: 56966 - RNA, 20 nt, Synthetic Construct
  source 1..20: mol_type = other RNA
tgaggtggtaggttgtgtgg

SEQ ID NO: 56967 - RNA, 22 nt, Synthetic Construct
  source 1..22: mol_type = other RNA
tgaggtagtaggttgtgtagtt

SEQ ID NO: 56968 - RNA, 21 nt, Synthetic Construct
  source 1..21: mol_type = other RNA
agaggtagtaggttgtgtggt

SEQ ID NO: 56969 - RNA, 21 nt, Synthetic Construct
  source 1..21: mol_type = other RNA
agaggtagtaggttgtgtggt

SEQ ID NO: 56970 - RNA, 25 nt, Synthetic Construct
  source 1..25: mol_type = other RNA
gactcttagcggtggatcactcggc

SEQ ID NO: 56971 - RNA, 25 nt, Synthetic Construct
  source 1..25: mol_type = other RNA
gactcttagcggtggatcactcggc

SEQ ID NO: 56972 - RNA, 22 nt, Synthetic Construct
  source 1..22: mol_type = other RNA
tcgtatcgtgagtaataatgcg

SEQ ID NO: 56973 - RNA, 22 nt, Synthetic Construct
  source 1..22: mol_type = other RNA
tcgtatcgtgagtaataatgcg

SEQ ID NO: 56974 - RNA, 22 nt, Synthetic Construct
  source 1..22: mol_type = other RNA
cagcagcacgtaaatattggcg

SEQ ID NO: 56975 - RNA, 22 nt, Synthetic Construct
  source 1..22: mol_type = other RNA
cagcagcacgtaaatattggcg

SEQ ID NO: 56976 - RNA, 22 nt, Synthetic Construct
  source 1..22: mol_type = other RNA
tgagctagtagtttgtgctgtt

SEQ ID NO: 56977 - RNA, 22 nt, Synthetic Construct
  source 1..22: mol_type = other RNA
tgggatgagggattgaagtgga

SEQ ID NO: 56978 - RNA, 34 nt, Synthetic Construct; identical to SEQ ID NO: 8274
  source 1..34: mol_type = other RNA

SEQ ID NO: 56979 - RNA, 34 nt, Synthetic Construct; identical to SEQ ID NO: 8274
  source 1..34: mol_type = other RNA

SEQ ID NO: 56980 - RNA, 22 nt, Synthetic Construct
  source 1..22: mol_type = other RNA
tcgcaccgtgagtaataatgcg

SEQ ID NO: 56981 - RNA, 22 nt, Synthetic Construct
  source 1..22: mol_type = other RNA
tagcagcacgtgaatattggcg

SEQ ID NO: 56982 - RNA, 23 nt, Synthetic Construct
  source 1..23: mol_type = other RNA
caacggaatcccaagagcagctg

SEQ ID NO: 56983 - RNA, 23 nt, Synthetic Construct
  source 1..23: mol_type = other RNA
caacggaatcccaagagcagctg

SEQ ID NO: 56984 - RNA, 19 nt, Synthetic Construct
  source 1..19: mol_type = other RNA
accaaggggtcgtgggttc

SEQ ID NO: 56985 - RNA, 19 nt, Synthetic Construct
  source 1..19: mol_type = other RNA
accaaggggtcgtgggttc

SEQ ID NO: 56986 - RNA, 35 nt, Synthetic Construct; identical to SEQ ID NO: 2518
  source 1..35: mol_type = other RNA

SEQ ID NO: 56987 - RNA, 22 nt, Synthetic Construct
  source 1..22: mol_type = other RNA
tactagactgaagctccttgag

SEQ ID NO: 56988 - RNA, 24 nt, Synthetic Construct
  source 1..24: mol_type = other RNA
tgtaaacatccttgactggaagct

SEQ ID NO: 56989 - RNA, 24 nt, Synthetic Construct
  source 1..24: mol_type = other RNA
tgtaaacatccttgactggaagct

SEQ ID NO: 56990 - RNA, 23 nt, Synthetic Construct
  source 1..23: mol_type = other RNA
agcagcattgtgcagggctatga

SEQ ID NO: 56991 - RNA, 23 nt, Synthetic Construct
  source 1..23: mol_type = other RNA
agcagcattgtgcagggctatga

SEQ ID NO: 56992 - RNA, 37 nt, Synthetic Construct; identical to SEQ ID NO: 11100
  source 1..37: mol_type = other RNA

SEQ ID NO: 56993 - RNA, 37 nt, Synthetic Construct; identical to SEQ ID NO: 11100
  source 1..37: mol_type = other RNA

SEQ ID NO: 56994 - RNA, 43 nt, Synthetic Construct; identical to SEQ ID NO: 727
  source 1..43: mol_type = other RNA

SEQ ID NO: 56995 - RNA, 23 nt, Synthetic Construct
  source 1..23: mol_type = other RNA
acctgtactgagctgccccgaga

SEQ ID NO: 56996 - RNA, 23 nt, Synthetic Construct
  source 1..23: mol_type = other RNA
acctgtactgagctgccccgaga

SEQ ID NO: 56997 - RNA, 39 nt, Synthetic Construct; identical to SEQ ID NO: 2980
  source 1..39: mol_type = other RNA

SEQ ID NO: 56998 - RNA, 39 nt, Synthetic Construct; identical to SEQ ID NO: 2980
  source 1..39: mol_type = other RNA

SEQ ID NO: 56999 - RNA, 19 nt, Synthetic Construct
  source 1..19: mol_type = other RNA
cccttgtcattagttgcta

SEQ ID NO: 57000 - RNA, 19 nt, Synthetic Construct
  source 1..19: mol_type = other RNA
tccctgttcgggcgccatt

SEQ ID NO: 57001 - RNA, 16 nt, Synthetic Construct
  source 1..16: mol_type = other RNA
ggaattgacggaaggg

SEQ ID NO: 57002 - RNA, 16 nt, Synthetic Construct
  source 1..16: mol_type = other RNA
ggaattgacggaaggg

SEQ ID NO: 57003 - RNA, 22 nt, Synthetic Construct
  source 1..22: mol_type = other RNA
attgcacttgtcccggcctgtt

SEQ ID NO: 57004 - RNA, 22 nt, Synthetic Construct
  source 1..22: mol_type = other RNA
attgcacttgtcccggcctgtt

SEQ ID NO: 57005 - RNA, 23 nt, Synthetic Construct
  source 1..23: mol_type = other RNA
tgtgcaaatccatgcaaaactga

SEQ ID NO: 57006 - RNA, 23 nt, Synthetic Construct
  source 1..23: mol_type = other RNA
tgtgcaaatccatgcaaaactga

SEQ ID NO: 57007 - RNA, 24 nt, Synthetic Construct
  source 1..24: mol_type = other RNA
cgtaaacatccccgactggaagct

SEQ ID NO: 57008 - RNA, 24 nt, Synthetic Construct
  source 1..24: mol_type = other RNA
cgtaaacatccccgactggaagct

SEQ ID NO: 57009 - RNA, 22 nt, Synthetic Construct
  source 1..22: mol_type = other RNA
aaagtgctgttcgtgcaggtag

SEQ ID NO: 57010 - RNA, 21 nt, Synthetic Construct
  source 1..21: mol_type = other RNA
tcctgtactgagctaccccga

SEQ ID NO: 57011 - RNA, 27 nt, Synthetic Construct
  source 1..27: mol_type = other RNA
catgcgagagtaggacgttgccaggtt

SEQ ID NO: 57012 - RNA, 27 nt, Synthetic Construct
  source 1..27: mol_type = other RNA
catgcgagagtaggacgttgccaggtt

SEQ ID NO: 57013 - RNA, 31 nt, Synthetic Construct; identical to SEQ ID NO: 2507
  source 1..31: mol_type = other RNA

SEQ ID NO: 57014 - RNA, 23 nt, Synthetic Construct
  source 1..23: mol_type = other RNA
tgtagtgtttcctactttatgga

SEQ ID NO: 57015 - RNA, 23 nt, Synthetic Construct
  source 1..23: mol_type = other RNA
tgtagtgtttcctactttatgga

SEQ ID NO: 57016 - RNA, 23 nt, Synthetic Construct
  source 1..23: mol_type = other RNA
caaagtgctgttcgtgcgggtag

SEQ ID NO: 57017 - RNA, 27 nt, Synthetic Construct
  source 1..27: mol_type = other RNA
ccccctactgctaaatttgactggctt

SEQ ID NO: 57018 - RNA, 22 nt, Synthetic Construct
  source 1..22: mol_type = other RNA
cattgcactagtctcggtctga

SEQ ID NO: 57019 - RNA, 21 nt, Synthetic Construct
  source 1..21: mol_type = other RNA
cgtaccgtgagtaataacgcg

SEQ ID NO: 57020 - RNA, 21 nt, Synthetic Construct
  source 1..21: mol_type = other RNA
acctgtactgagctgccccga

SEQ ID NO: 57021 - RNA, 21 nt, Synthetic Construct
  source 1..21: mol_type = other RNA
acctgtactgagctgccccga

SEQ ID NO: 57022 - RNA, 24 nt, Synthetic Construct
  source 1..24: mol_type = other RNA
tgaggtagtagattgtatagtttt

SEQ ID NO: 57023 - RNA, 24 nt, Synthetic Construct
  source 1..24: mol_type = other RNA
tgaggtagtagattgtatagtttt

SEQ ID NO: 57024 - RNA, 27 nt, Synthetic Construct
  source 1..27: mol_type = other RNA
ccccccactgctaaatttgtctggctt

SEQ ID NO: 57025 - RNA, 27 nt, Synthetic Construct
  source 1..27: mol_type = other RNA
ccccccactgctaaatttgtctggctt

SEQ ID NO: 57026 - RNA, 17 nt, Synthetic Construct
  source 1..17: mol_type = other RNA
acagtcaggatgttggc

SEQ ID NO: 57027 - RNA, 23 nt, Synthetic Construct
  source 1..23: mol_type = other RNA
caacggaatcccagaagcagctg

SEQ ID NO: 57028 - RNA, 22 nt, Synthetic Construct
  source 1..22: mol_type = other RNA
tatcgcacttgtcccggcctgt

SEQ ID NO: 57029 - RNA, 21 nt, Synthetic Construct
  source 1..21: mol_type = other RNA
tggagtgcgacaatggtgttt

SEQ ID NO: 57030 - RNA, 21 nt, Synthetic Construct
  source 1..21: mol_type = other RNA
tggagtgcgacaatggtgttt

SEQ ID NO: 57031 - RNA, 17 nt, Synthetic Construct
  source 1..17: mol_type = other RNA
ccgtgtgaaagtaggtc

SEQ ID NO: 57032 - RNA, 19 nt, Synthetic Construct
  source 1..19: mol_type = other RNA
cttggggttgtaggaccac

SEQ ID NO: 57033 - RNA, 19 nt, Synthetic Construct
  source 1..19: mol_type = other RNA
cttggggttgtaggaccac

SEQ ID NO: 57034 - RNA, 22 nt, Synthetic Construct
  source 1..22: mol_type = other RNA
tggagtgtgacaatggtgcttg

SEQ ID NO: 57035 - RNA, 22 nt, Synthetic Construct
  source 1..22: mol_type = other RNA
tggagtgtgacaatggtgcttg

SEQ ID NO: 57036 - RNA, 22 nt, Synthetic Construct
  source 1..22: mol_type = other RNA
tgaggaagtagtttgtgctgtt

SEQ ID NO: 57037 - RNA, 22 nt, Synthetic Construct
  source 1..22: mol_type = other RNA
tgaggaagtagtttgtgctgtt

SEQ ID NO: 57038 - RNA, 21 nt, Synthetic Construct
  source 1..21: mol_type = other RNA
cgtaccgtgagtaatgatgcg

SEQ ID NO: 57039 - RNA, 17 nt, Synthetic Construct
  source 1..17: mol_type = other RNA
tggccgggacagagggc

SEQ ID NO: 57040 - RNA, 17 nt, Synthetic Construct
  source 1..17: mol_type = other RNA
tggccgggacagagggc

SEQ ID NO: 57041 - RNA, 21 nt, Synthetic Construct
  source 1..21: mol_type = other RNA
tgaggtagtagattgcatagt

SEQ ID NO: 57042 - RNA, 21 nt, Synthetic Construct
  source 1..21: mol_type = other RNA
tgaggtagtagattgcatagt

SEQ ID NO: 57043 - RNA, 23 nt, Synthetic Construct
  source 1..23: mol_type = other RNA
cgaggtagtaggttgtgtggttt

SEQ ID NO: 57044 - RNA, 22 nt, Synthetic Construct
  source 1..22: mol_type = other RNA
tgaagtagtagtttgtgctgtt

SEQ ID NO: 57045 - RNA, 22 nt, Synthetic Construct
  source 1..22: mol_type = other RNA
cgaggtagtagtttgtgctgtt

SEQ ID NO: 57046 - RNA, 22 nt, Synthetic Construct
  source 1..22: mol_type = other RNA
cgaggtagtagtttgtgctgtt

SEQ ID NO: 57047 - RNA, 20 nt, Synthetic Construct
  source 1..20: mol_type = other RNA
gcaataacaggtctgtgatg

SEQ ID NO: 57048 - RNA, 20 nt, Synthetic Construct
  source 1..20: mol_type = other RNA
gcaataacaggtctgtgatg

SEQ ID NO: 57049 - RNA, 20 nt, Synthetic Construct
  source 1..20: mol_type = other RNA
tgaggtagtaggttgtgtgg

SEQ ID NO: 57050 - RNA, 20 nt, Synthetic Construct
  source 1..20: mol_type = other RNA
tgaggtagtaggttgtgtgg

SEQ ID NO: 57051 - RNA, 21 nt, Synthetic Construct
  source 1..21: mol_type = other RNA
ttcaagtaattcaggataggt

SEQ ID NO: 57052 - RNA, 24 nt, Synthetic Construct
  source 1..24: mol_type = other RNA
tgtcagtttgtcaaataccccatt

SEQ ID NO: 57053 - RNA, 24 nt, Synthetic Construct
  source 1..24: mol_type = other RNA
tgtcagtttgtcaaataccccatt

SEQ ID NO: 57054 - RNA, 23 nt, Synthetic Construct
  source 1..23: mol_type = other RNA
tgaggtagtaggttgtgtggtta

SEQ ID NO: 57055 - RNA, 18 nt, Synthetic Construct
  source 1..18: mol_type = other RNA
gcgccgatgatagtgcgg

SEQ ID NO: 57056 - RNA, 18 nt, Synthetic Construct
  source 1..18: mol_type = other RNA
gcgccgatgatagtgcgg

SEQ ID NO: 57057 - RNA, 24 nt, Synthetic Construct
  source 1..24: mol_type = other RNA
tcagtgcatcacagaactttgttt

SEQ ID NO: 57058 - RNA, 24 nt, Synthetic Construct
  source 1..24: mol_type = other RNA
tcagtgcatcacagaactttgttt

SEQ ID NO: 57059 - RNA, 23 nt, Synthetic Construct
  source 1..23: mol_type = other RNA
ccctgtactgagctgccccgaga

SEQ ID NO: 57060 - RNA, 22 nt, Synthetic Construct
  source 1..22: mol_type = other RNA
tggcagcacgtaaatattggcg

SEQ ID NO: 57061 - RNA, 22 nt, Synthetic Construct
  source 1..22: mol_type = other RNA
tggcagcacgtaaatattggcg

SEQ ID NO: 57062 - RNA, 23 nt, Synthetic Construct
  source 1..23: mol_type = other RNA
cagagtgctgttcgtgcaggtag

SEQ ID NO: 57063 - RNA, 16 nt, Synthetic Construct
  source 1..16: mol_type = other RNA
atctacggccatacca

SEQ ID NO: 57064 - RNA, 16 nt, Synthetic Construct
  source 1..16: mol_type = other RNA
atctacggccatacca

SEQ ID NO: 57065 - RNA, 24 nt, Synthetic Construct
  source 1..24: mol_type = other RNA
agcaacattgtctgctgggtttct

SEQ ID NO: 57066 - RNA, 18 nt, Synthetic Construct
  source 1..18: mol_type = other RNA
caacggaatcccaaaagc

SEQ ID NO: 57067 - RNA, 18 nt, Synthetic Construct
  source 1..18: mol_type = other RNA
gcgccgatgatagtgcgg

SEQ ID NO: 57068 - RNA, 22 nt, Synthetic Construct
  source 1..22: mol_type = other RNA
gtcagtttgtcaaataccccat

SEQ ID NO: 57069 - RNA, 22 nt, Synthetic Construct
  source 1..22: mol_type = other RNA
tgaggtagtagtttgtgccgtt

SEQ ID NO: 57070 - RNA, 22 nt, Synthetic Construct
  source 1..22: mol_type = other RNA
tgaggtagtagtttgtgccgtt

SEQ ID NO: 57071 - RNA, 21 nt, Synthetic Construct
  source 1..21: mol_type = other RNA
tcctgtactgagctaccccga

SEQ ID NO: 57072 - RNA, 21 nt, Synthetic Construct
  source 1..21: mol_type = other RNA
tcctgtactgagctaccccga

SEQ ID NO: 57073 - RNA, 28 nt, Synthetic Construct
  source 1..28: mol_type = other RNA
ccccccactgctaaatttggctggcttt

SEQ ID NO: 57074 - RNA, 27 nt, Synthetic Construct
  source 1..27: mol_type = other RNA
cctcccactgctaaatttgactggctt

SEQ ID NO: 57075 - RNA, 23 nt, Synthetic Construct
  source 1..23: mol_type = other RNA
taactccttaagcgaatctcggc

SEQ ID NO: 57076 - RNA, 23 nt, Synthetic Construct
  source 1..23: mol_type = other RNA
taactccttaagcgaatctcggc

SEQ ID NO: 57077 - RNA, 29 nt, Synthetic Construct
  source 1..29: mol_type = other RNA
cgactcttagcggtggatcactcggctcg

SEQ ID NO: 57078 - RNA, 29 nt, Synthetic Construct
  source 1..29: mol_type = other RNA
cgactcttagcggtggatcactcggctcg

SEQ ID NO: 57079 - RNA, 21 nt, Synthetic Construct
  source 1..21: mol_type = other RNA
tggagtgtgacagtggtgttt

SEQ ID NO: 57080 - RNA, 21 nt, Synthetic Construct
  source 1..21: mol_type = other RNA
tggagtgtgacagtggtgttt

SEQ ID NO: 57081 - RNA, 20 nt, Synthetic Construct
  source 1..20: mol_type = other RNA
acctgtactgagctgccccg

SEQ ID NO: 57082 - RNA, 20 nt, Synthetic Construct
  source 1..20: mol_type = other RNA
acctgtactgagctgccccg

SEQ ID NO: 57083 - RNA, 31 nt, Synthetic Construct; identical to SEQ ID NO: 13805
  source 1..31: mol_type = other RNA

SEQ ID NO: 57084 - RNA, 31 nt, Synthetic Construct; identical to SEQ ID NO: 13805
  source 1..31: mol_type = other RNA

SEQ ID NO: 57085 - RNA, 22 nt, Synthetic Construct
  source 1..22: mol_type = other RNA
tggggtagtagtttgtgctgtt

SEQ ID NO: 57086 - RNA, 22 nt, Synthetic Construct
  source 1..22: mol_type = other RNA
tggggtagtagtttgtgctgtt

SEQ ID NO: 57087 - RNA, 22 nt, Synthetic Construct
  source 1..22: mol_type = other RNA
atgtcccacccccactcctgtt

SEQ ID NO: 57088 - RNA, 22 nt, Synthetic Construct
  source 1..22: mol_type = other RNA
atgtcccacccccactcctgtt

SEQ ID NO: 57089 - RNA, 22 nt, Synthetic Construct
  source 1..22: mol_type = other RNA
ttcaagtaattcaggataggtt

SEQ ID NO: 57090 - RNA, 23 nt, Synthetic Construct
  source 1..23: mol_type = other RNA
tgtcagtttgccaaataccccaa

SEQ ID NO: 57091 - RNA, 23 nt, Synthetic Construct
  source 1..23: mol_type = other RNA
tgccagtttgtcaaataccccaa

SEQ ID NO: 57092 - RNA, 18 nt, Synthetic Construct
  source 1..18: mol_type = other RNA
agggaacgtgagctgggt

SEQ ID NO: 57093 - RNA, 18 nt, Synthetic Construct
  source 1..18: mol_type = other RNA
agggaacgtgagctgggt

SEQ ID NO: 57094 - RNA, 21 nt, Synthetic Construct
  source 1..21: mol_type = other RNA
tgaggtagtaggttgtgaggt

SEQ ID NO: 57095 - RNA, 21 nt, Synthetic Construct
  source 1..21: mol_type = other RNA
ggaggtagtagtttgtgctgt

SEQ ID NO: 57096 - RNA, 23 nt, Synthetic Construct
  source 1..23: mol_type = other RNA
agctacattgtctgctgggttcc

SEQ ID NO: 57097 - RNA, 23 nt, Synthetic Construct
  source 1..23: mol_type = other RNA
agctacattgtctgctgggttcc

SEQ ID NO: 57098 - RNA, 19 nt, Synthetic Construct
  source 1..19: mol_type = other RNA
tgaggtagtaggttgtgtg

SEQ ID NO: 57099 - RNA, 22 nt, Synthetic Construct
  source 1..22: mol_type = other RNA
tgaggtagtaggtcgtatagtt

SEQ ID NO: 57100 - RNA, 22 nt, Synthetic Construct
  source 1..22: mol_type = other RNA
tattgcacttgtctcggcctgt

SEQ ID NO: 57101 - RNA, 22 nt, Synthetic Construct
  source 1..22: mol_type = other RNA
tattgcacttgtctcggcctgt

SEQ ID NO: 57102 - RNA, 21 nt, Synthetic Construct
  source 1..21: mol_type = other RNA
agcagcacgtaaatattggcg

SEQ ID NO: 57103 - RNA, 21 nt, Synthetic Construct
  source 1..21: mol_type = other RNA
agcagcacgtaaatattggcg

SEQ ID NO: 57104 - RNA, 21 nt, Synthetic Construct
  source 1..21: mol_type = other RNA
tcctgtactgagctgctccga

SEQ ID NO: 57105 - RNA, 21 nt, Synthetic Construct
  source 1..21: mol_type = other RNA
tcctgtactgagctgctccga

SEQ ID NO: 57106 - RNA, 25 nt, Synthetic Construct
  source 1..25: mol_type = other RNA
tgaggggcagagagcgagacttttt

SEQ ID NO: 57107 - RNA, 19 nt, Synthetic Construct
  source 1..19: mol_type = other RNA
accaaggggtcgtgggttc

SEQ ID NO: 57108 - RNA, 19 nt, Synthetic Construct
  source 1..19: mol_type = other RNA
accaaggggtcgtgggttc

SEQ ID NO: 57109 - RNA, 22 nt, Synthetic Construct
  source 1..22: mol_type = other RNA
tgaggtagtaggttgtacagtt

SEQ ID NO: 57110 - RNA, 22 nt, Synthetic Construct
  source 1..22: mol_type = other RNA
tagcagcatgtaaatattggcg

SEQ ID NO: 57111 - RNA, 20 nt, Synthetic Construct
  source 1..20: mol_type = other RNA
tagcagcacataatggtttg

SEQ ID NO: 57112 - RNA, 20 nt, Synthetic Construct
  source 1..20: mol_type = other RNA
tagcagcacataatggtttg

SEQ ID NO: 57113 - RNA, 22 nt, Synthetic Construct
  source 1..22: mol_type = other RNA
tcctgtactgaactgccccgag

SEQ ID NO: 57114 - RNA, 22 nt, Synthetic Construct
  source 1..22: mol_type = other RNA
tcctgtactgaactgccccgag

SEQ ID NO: 57115 - RNA, 22 nt, Synthetic Construct
  source 1..22: mol_type = other RNA
tcggatccgtctgagcttggct

SEQ ID NO: 57116 - RNA, 22 nt, Synthetic Construct
  source 1..22: mol_type = other RNA
tcggatccgtctgagcttggct

SEQ ID NO: 57117 - RNA, 25 nt, Synthetic Construct
  source 1..25: mol_type = other RNA
ccccactgctaaatttgactggctt

SEQ ID NO: 57118 - RNA, 36 nt, Synthetic Construct; identical to SEQ ID NO: 3596
  source 1..36: mol_type = other RNA

SEQ ID NO: 57119 - RNA, 36 nt, Synthetic Construct; identical to SEQ ID NO: 3596
  source 1..36: mol_type = other RNA

SEQ ID NO: 57120 - RNA, 23 nt, Synthetic Construct
  source 1..23: mol_type = other RNA
agcaacattgtctgctgggtttc

SEQ ID NO: 57121 - RNA, 21 nt, Synthetic Construct
  source 1..21: mol_type = other RNA
ttcggaagaaggggtgcctgg

SEQ ID NO: 57122 - RNA, 21 nt, Synthetic Construct
  source 1..21: mol_type = other RNA
ttcggaagaaggggtgcctgg

SEQ ID NO: 57123 - RNA, 18 nt, Synthetic Construct
  source 1..18: mol_type = other RNA
atcacattgccagggatt

SEQ ID NO: 57124 - RNA, 22 nt, Synthetic Construct
  source 1..22: mol_type = other RNA
tattgtacttgtcccggcctgt

SEQ ID NO: 57125 - RNA, 24 nt, Synthetic Construct
  source 1..24: mol_type = other RNA
tagtgcaatattgcttatagggtt

SEQ ID NO: 57126 - RNA, 31 nt, Synthetic Construct; identical to SEQ ID NO: 14087
  source 1..31: mol_type = other RNA

SEQ ID NO: 57127 - RNA, 31 nt, Synthetic Construct; identical to SEQ ID NO: 14087
  source 1..31: mol_type = other RNA

SEQ ID NO: 57128 - RNA, 22 nt, Synthetic Construct
  source 1..22: mol_type = other RNA
ttcacagtggctaagttccgct

SEQ ID NO: 57129 - RNA, 22 nt, Synthetic Construct
  source 1..22: mol_type = other RNA
ttcacagtggctaagttccgct

SEQ ID NO: 57130 - RNA, 23 nt, Synthetic Construct
  source 1..23: mol_type = other RNA
ctcgtaccgtgagtaataatgcg

SEQ ID NO: 57131 - RNA, 23 nt, Synthetic Construct
  source 1..23: mol_type = other RNA
ctcgtaccgtgagtaataatgcg

SEQ ID NO: 57132 - RNA, 22 nt, Synthetic Construct
  source 1..22: mol_type = other RNA
tgaggtagtagtttgtgctgct

SEQ ID NO: 57133 - RNA, 22 nt, Synthetic Construct
  source 1..22: mol_type = other RNA
tgaggtagtagtttgtgctgct

SEQ ID NO: 57134 - RNA, 30 nt, Synthetic Construct; identical to SEQ ID NO: 11302
  source 1..30: mol_type = other RNA

SEQ ID NO: 57135 - RNA, 30 nt, Synthetic Construct; identical to SEQ ID NO: 11302
  source 1..30: mol_type = other RNA

SEQ ID NO: 57136 - RNA, 21 nt, Synthetic Construct
  source 1..21: mol_type = other RNA
ggaggtagtaggttgtgtggt

SEQ ID NO: 57137 - RNA, 21 nt, Synthetic Construct
  source 1..21: mol_type = other RNA
ggaggtagtaggttgtgtggt

SEQ ID NO: 57138 - RNA, 23 nt, Synthetic Construct
  source 1..23: mol_type = other RNA
gcctgtactgagctgccccgaga

SEQ ID NO: 57139 - RNA, 23 nt, Synthetic Construct
  source 1..23: mol_type = other RNA
gcctgtactgagctgccccgaga

SEQ ID NO: 57140 - RNA, 20 nt, Synthetic Construct
  source 1..20: mol_type = other RNA
agctacattgtctgctgggt

SEQ ID NO: 57141 - RNA, 20 nt, Synthetic Construct
  source 1..20: mol_type = other RNA
agctacattgtctgctgggt

SEQ ID NO: 57142 - RNA, 22 nt, Synthetic Construct
  source 1..22: mol_type = other RNA
cactgcacttgtctcggtctga

SEQ ID NO: 57143 - RNA, 22 nt, Synthetic Construct
  source 1..22: mol_type = other RNA
cactgcacttgtctcggtctga

SEQ ID NO: 57144 - RNA, 23 nt, Synthetic Construct
  source 1..23: mol_type = other RNA
agcagcattgtacagggctacga

SEQ ID NO: 57145 - RNA, 23 nt, Synthetic Construct
  source 1..23: mol_type = other RNA
agcagcattgtacagggctacga

SEQ ID NO: 57146 - RNA, 22 nt, Synthetic Construct
  source 1..22: mol_type = other RNA
tgaggtagtagtttgtgctgtg

SEQ ID NO: 57147 - RNA, 22 nt, Synthetic Construct
  source 1..22: mol_type = other RNA
tgaggtagtagtttgtgctgtg

SEQ ID NO: 57148 - RNA, 21 nt, Synthetic Construct
  source 1..21: mol_type = other RNA
tcctatactgagctgccccga

SEQ ID NO: 57149 - RNA, 21 nt, Synthetic Construct
  source 1..21: mol_type = other RNA
tcctatactgagctgccccga

SEQ ID NO: 57150 - RNA, 21 nt, Synthetic Construct
  source 1..21: mol_type = other RNA
tgaggtagtaggttgtgtggt

SEQ ID NO: 57151 - RNA, 21 nt, Synthetic Construct
  source 1..21: mol_type = other RNA
taactccttaagcgaattcgc

SEQ ID NO: 57152 - RNA, 21 nt, Synthetic Construct
  source 1..21: mol_type = other RNA
taactccttaagcgaattcgc

SEQ ID NO: 57153 - RNA, 19 nt, Synthetic Construct
  source 1..19: mol_type = other RNA
cagcactctgcaaagacga

SEQ ID NO: 57154 - RNA, 32 nt, Synthetic Construct; identical to SEQ ID NO: 14967
  source 1..32: mol_type = other RNA

SEQ ID NO: 57155 - RNA, 23 nt, Synthetic Construct
  source 1..23: mol_type = other RNA
tgaggggtagagagcgagacttt

SEQ ID NO: 57156 - RNA, 23 nt, Synthetic Construct
  source 1..23: mol_type = other RNA
tgaggggtagagagcgagacttt

SEQ ID NO: 57157 - RNA, 22 nt, Synthetic Construct
  source 1..22: mol_type = other RNA
acagtagtctgcacattggttg

SEQ ID NO: 57158 - RNA, 37 nt, Synthetic Construct; identical to SEQ ID NO: 2607
  source 1..37: mol_type = other RNA

SEQ ID NO: 57159 - RNA, 37 nt, Synthetic Construct; identical to SEQ ID NO: 2607
  source 1..37: mol_type = other RNA

SEQ ID NO: 57160 - RNA, 16 nt, Synthetic Construct
  source 1..16: mol_type = other RNA
taacaggtctgtgatg

SEQ ID NO: 57161 - RNA, 16 nt, Synthetic Construct
  source 1..16: mol_type = other RNA
taacaggtctgtgatg

SEQ ID NO: 57162 - RNA, 26 nt, Synthetic Construct
  source 1..26: mol_type = other RNA
tgtccccgcgaggggcccggggcggg

SEQ ID NO: 57163 - RNA, 23 nt, Synthetic Construct
  source 1..23: mol_type = other RNA
tcccacatggtctagcggttagg

SEQ ID NO: 57164 - RNA, 22 nt, Synthetic Construct
  source 1..22: mol_type = other RNA
tgaggtagtagattgtacagtt

SEQ ID NO: 57165 - RNA, 22 nt, Synthetic Construct
  source 1..22: mol_type = other RNA
tgaggtagtagattgtacagtt

SEQ ID NO: 57166 - RNA, 37 nt, Synthetic Construct; identical to SEQ ID NO: 7503
  source 1..37: mol_type = other RNA

SEQ ID NO: 57167 - RNA, 37 nt, Synthetic Construct; identical to SEQ ID NO: 7503
  source 1..37: mol_type = other RNA

SEQ ID NO: 57168 - RNA, 20 nt, Synthetic Construct
  source 1..20: mol_type = other RNA
ggaggtagtaggttgtgtgg

SEQ ID NO: 57169 - RNA, 20 nt, Synthetic Construct
  source 1..20: mol_type = other RNA
ggaggtagtaggttgtgtgg

SEQ ID NO: 57170 - RNA, 21 nt, Synthetic Construct
  source 1..21: mol_type = other RNA
tgaggtagtaggttgagtggt

SEQ ID NO: 57171 - RNA, 21 nt, Synthetic Construct
  source 1..21: mol_type = other RNA
tgaggtagtaggttgagtggt

SEQ ID NO: 57172 - RNA, 22 nt, Synthetic Construct
  source 1..22: mol_type = other RNA
cattgcactcgtctcggtctga

SEQ ID NO: 57173 - RNA, 22 nt, Synthetic Construct
  source 1..22: mol_type = other RNA
cattgcactcgtctcggtctga

SEQ ID NO: 57174 - RNA, 21 nt, Synthetic Construct
  source 1..21: mol_type = other RNA
tggagcgtgacaatggtgttt

SEQ ID NO: 57175 - RNA, 21 nt, Synthetic Construct
  source 1..21: mol_type = other RNA
tggggtagtaggttgtatagt

SEQ ID NO: 57176 - RNA, 21 nt, Synthetic Construct
  source 1..21: mol_type = other RNA
tcctgaactgagctgccccga

SEQ ID NO: 57177 - RNA, 21 nt, Synthetic Construct
  source 1..21: mol_type = other RNA
tcctgaactgagctgccccga

SEQ ID NO: 57178 - RNA, 16 nt, Synthetic Construct
  source 1..16: mol_type = other RNA
ttgaccgctctgacca

SEQ ID NO: 57179 - RNA, 21 nt, Synthetic Construct
  source 1..21: mol_type = other RNA
tgaggtagcagattgtatagt

SEQ ID NO: 57180 - RNA, 21 nt, Synthetic Construct
  source 1..21: mol_type = other RNA
tgaggtagcagattgtatagt

SEQ ID NO: 57181 - RNA, 22 nt, Synthetic Construct
  source 1..22: mol_type = other RNA
cattgcacttgtctcagtctga

SEQ ID NO: 57182 - RNA, 21 nt, Synthetic Construct
  source 1..21: mol_type = other RNA
gcagatcttggtggtagtagc

SEQ ID NO: 57183 - RNA, 21 nt, Synthetic Construct
  source 1..21: mol_type = other RNA
gcagatcttggtggtagtagc

SEQ ID NO: 57184 - RNA, 23 nt, Synthetic Construct
  source 1..23: mol_type = other RNA
tgaggggcagagagagagacttt

SEQ ID NO: 57185 - RNA, 22 nt, Synthetic Construct
  source 1..22: mol_type = other RNA
taactccttaagcgaacctcgc

SEQ ID NO: 57186 - RNA, 22 nt, Synthetic Construct
  source 1..22: mol_type = other RNA
taactccttaagcgaacctcgc

SEQ ID NO: 57187 - RNA, 28 nt, Synthetic Construct
  source 1..28: mol_type = other RNA
ccccccaccgctaaatttgactggcttt

SEQ ID NO: 57188 - RNA, 28 nt, Synthetic Construct
  source 1..28: mol_type = other RNA
ccccccaccgctaaatttgactggcttt

SEQ ID NO: 57189 - RNA, 22 nt, Synthetic Construct
  source 1..22: mol_type = other RNA
aggggcagagagcgagactttt

SEQ ID NO: 57190 - RNA, 22 nt, Synthetic Construct
  source 1..22: mol_type = other RNA
aggggcagagagcgagactttt

SEQ ID NO: 57191 - RNA, 24 nt, Synthetic Construct
  source 1..24: mol_type = other RNA
tcagcccgtgttcggaagattttc

SEQ ID NO: 57192 - RNA, 24 nt, Synthetic Construct
  source 1..24: mol_type = other RNA
tcagcccgtgttcggaagattttc

SEQ ID NO: 57193 - RNA, 23 nt, Synthetic Construct
  source 1..23: mol_type = other RNA
caaagtgctgatcgtgcaggtag

SEQ ID NO: 57194 - RNA, 22 nt, Synthetic Construct
  source 1..22: mol_type = other RNA
tattgcacttatcccggcctgt

SEQ ID NO: 57195 - RNA, 22 nt, Synthetic Construct
  source 1..22: mol_type = other RNA
tattgcacttatcccggcctgt

SEQ ID NO: 57196 - RNA, 22 nt, Synthetic Construct
  source 1..22: mol_type = other RNA
tgaggtggtaggttgtatagtt

SEQ ID NO: 57197 - RNA, 27 nt, Synthetic Construct
  source 1..27: mol_type = other RNA
ccccccactgctagatttgactggctt

SEQ ID NO: 57198 - RNA, 27 nt, Synthetic Construct
  source 1..27: mol_type = other RNA
ccccccactgctagatttgactggctt

SEQ ID NO: 57199 - RNA, 25 nt, Synthetic Construct
  source 1..25: mol_type = other RNA
tcggatccgtctgagcttggctttt

SEQ ID NO: 57200 - RNA, 21 nt, Synthetic Construct
  source 1..21: mol_type = other RNA
tgaggtagtagattgtacagt

SEQ ID NO: 57201 - RNA, 22 nt, Synthetic Construct
  source 1..22: mol_type = other RNA
tattgcactcgtcccggcctgt

SEQ ID NO: 57202 - RNA, 15 nt, Synthetic Construct
  source 1..15: mol_type = other RNA
cagtgaaacgagtca

SEQ ID NO: 57203 - RNA, 21 nt, Synthetic Construct
  source 1..21: mol_type = other RNA
tgaagtagtaggttgtatagt

SEQ ID NO: 57204 - RNA, 21 nt, Synthetic Construct
  source 1..21: mol_type = other RNA
tgaagtagtaggttgtatagt

SEQ ID NO: 57205 - RNA, 16 nt, Synthetic Construct
  source 1..16: mol_type = other RNA
gactacggccatacca

SEQ ID NO: 57206 - RNA, 16 nt, Synthetic Construct
  source 1..16: mol_type = other RNA
gactacggccatacca

SEQ ID NO: 57207 - RNA, 43 nt, Synthetic Construct; identical to SEQ ID NO: 3562
  source 1..43: mol_type = other RNA

SEQ ID NO: 57208 - RNA, 21 nt, Synthetic Construct
  source 1..21: mol_type = other RNA
cgaggtagtagattgtatagt

SEQ ID NO: 57209 - RNA, 21 nt, Synthetic Construct
  source 1..21: mol_type = other RNA
cgaggtagtagattgtatagt

SEQ ID NO: 57210 - RNA, 43 nt, Synthetic Construct; identical to SEQ ID NO: 2315
  source 1..43: mol_type = other RNA

SEQ ID NO: 57211 - RNA, 43 nt, Synthetic Construct; identical to SEQ ID NO: 2315
  source 1..43: mol_type = other RNA

SEQ ID NO: 57212 - RNA, 21 nt, Synthetic Construct
  source 1..21: mol_type = other RNA
tgaggtagtaggctgtatagt

SEQ ID NO: 57213 - RNA, 18 nt, Synthetic Construct
  source 1..18: mol_type = other RNA
agcaggacggtggccatg

SEQ ID NO: 57214 - RNA, 27 nt, Synthetic Construct
  source 1..27: mol_type = other RNA
ccccccactgctaaatttggctggcta

SEQ ID NO: 57215 - RNA, 27 nt, Synthetic Construct
  source 1..27: mol_type = other RNA
ccccccactgctaaatttggctggcta

SEQ ID NO: 57216 - RNA, 20 nt, Synthetic Construct
  source 1..20: mol_type = other RNA
cataaagtagaaagcactac

SEQ ID NO: 57217 - RNA, 23 nt, Synthetic Construct
  source 1..23: mol_type = other RNA
aatgacacgatcactcccgttga

SEQ ID NO: 57218 - RNA, 27 nt, Synthetic Construct
  source 1..27: mol_type = other RNA
gcccaggtggcggaattggtagacgca

SEQ ID NO: 57219 - RNA, 27 nt, Synthetic Construct
  source 1..27: mol_type = other RNA
gcccaggtggcggaattggtagacgca

SEQ ID NO: 57220 - RNA, 32 nt, Synthetic Construct; identical to SEQ ID NO: 3748
  source 1..32: mol_type = other RNA

SEQ ID NO: 57221 - RNA, 32 nt, Synthetic Construct; identical to SEQ ID NO: 3748
  source 1..32: mol_type = other RNA

SEQ ID NO: 57222 - RNA, 25 nt, Synthetic Construct
  source 1..25: mol_type = other RNA
tgagaactgaattccataggctgtt

SEQ ID NO: 57223 - RNA, 25 nt, Synthetic Construct
  source 1..25: mol_type = other RNA
tgagaactgaattccataggctgtt

SEQ ID NO: 57224 - RNA, 22 nt, Synthetic Construct
  source 1..22: mol_type = other RNA
tattgcgcttgtcccggcctgt

SEQ ID NO: 57225 - RNA, 22 nt, Synthetic Construct
  source 1..22: mol_type = other RNA
tattgcgcttgtcccggcctgt

SEQ ID NO: 57226 - RNA, 35 nt, Synthetic Construct; identical to SEQ ID NO: 1095
  source 1..35: mol_type = other RNA

SEQ ID NO: 57227 - RNA, 35 nt, Synthetic Construct; identical to SEQ ID NO: 1095
  source 1..35: mol_type = other RNA

SEQ ID NO: 57228 - RNA, 23 nt, Synthetic Construct
  source 1..23: mol_type = other RNA
tcctgcactgagctgccccgaga

SEQ ID NO: 57229 - RNA, 23 nt, Synthetic Construct
  source 1..23: mol_type = other RNA
tcctgcactgagctgccccgaga

SEQ ID NO: 57230 - RNA, 19 nt, Synthetic Construct
  source 1..19: mol_type = other RNA
ggctggtccgaaggtagtg

SEQ ID NO: 57231 - RNA, 19 nt, Synthetic Construct
  source 1..19: mol_type = other RNA
ggctggtccgaaggtagtg

SEQ ID NO: 57232 - RNA, 34 nt, Synthetic Construct; identical to SEQ ID NO: 2186
  source 1..34: mol_type = other RNA

SEQ ID NO: 57233 - RNA, 23 nt, Synthetic Construct
  source 1..23: mol_type = other RNA
aaaagtgctgttcgtgcaggtag

SEQ ID NO: 57234 - RNA, 23 nt, Synthetic Construct
  source 1..23: mol_type = other RNA
aaaagtgctgttcgtgcaggtag

SEQ ID NO: 57235 - RNA, 27 nt, Synthetic Construct
  source 1..27: mol_type = other RNA
tgaggtagtaggttgtgtggttttttt

SEQ ID NO: 57236 - RNA, 23 nt, Synthetic Construct
  source 1..23: mol_type = other RNA
tcctgtactgagctgccctgaga

SEQ ID NO: 57237 - RNA, 21 nt, Synthetic Construct
  source 1..21: mol_type = other RNA
tcctatactgagctgccccga

SEQ ID NO: 57238 - RNA, 22 nt, Synthetic Construct
  source 1..22: mol_type = other RNA
tgaggtagtagattgtgctgtt

SEQ ID NO: 57239 - RNA, 23 nt, Synthetic Construct
  source 1..23: mol_type = other RNA
gtcagtttgtcaaataccccaaa

SEQ ID NO: 57240 - RNA, 23 nt, Synthetic Construct
  source 1..23: mol_type = other RNA
gtcagtttgtcaaataccccaaa

SEQ ID NO: 57241 - RNA, 16 nt, Synthetic Construct
  source 1..16: mol_type = other RNA
ggcgggggtcgctggt

SEQ ID NO: 57242 - RNA, 16 nt, Synthetic Construct
  source 1..16: mol_type = other RNA
ggcgggggtcgctggt

SEQ ID NO: 57243 - RNA, 21 nt, Synthetic Construct
  source 1..21: mol_type = other RNA
tgaggggcagggagcgagact

SEQ ID NO: 57244 - RNA, 36 nt, Synthetic Construct; identical to SEQ ID NO: 10333
  source 1..36: mol_type = other RNA

SEQ ID NO: 57245 - RNA, 23 nt, Synthetic Construct
  source 1..23: mol_type = other RNA
tggagacgcggccctgttggagt

SEQ ID NO: 57246 - RNA, 21 nt, Synthetic Construct
  source 1..21: mol_type = other RNA
tggggtagtagattgtatagt

SEQ ID NO: 57247 - RNA, 21 nt, Synthetic Construct
  source 1..21: mol_type = other RNA
tggggtagtagattgtatagt

SEQ ID NO: 57248 - RNA, 22 nt, Synthetic Construct
  source 1..22: mol_type = other RNA
ttcacagtggctaagttccgct

SEQ ID NO: 57249 - RNA, 22 nt, Synthetic Construct
  source 1..22: mol_type = other RNA
ttcacagtggctaagttccgct

SEQ ID NO: 57250 - RNA, 35 nt, Synthetic Construct; identical to SEQ ID NO: 2505
  source 1..35: mol_type = other RNA

SEQ ID NO: 57251 - RNA, 18 nt, Synthetic Construct
  source 1..18: mol_type = other RNA
ggtagcgtggccgagtgg

SEQ ID NO: 57252 - RNA, 22 nt, Synthetic Construct
  source 1..22: mol_type = other RNA
tcataccgtgagtaataatgcg

SEQ ID NO: 57253 - RNA, 22 nt, Synthetic Construct
  source 1..22: mol_type = other RNA
tcataccgtgagtaataatgcg

SEQ ID NO: 57254 - RNA, 21 nt, Synthetic Construct
  source 1..21: mol_type = other RNA
ctttgttcgattccgttgagt

SEQ ID NO: 57255 - RNA, 23 nt, Synthetic Construct
  source 1..23: mol_type = other RNA
tgtcagtttgtcaagtaccccaa

SEQ ID NO: 57256 - RNA, 17 nt, Synthetic Construct
  source 1..17: mol_type = other RNA
cccctggacctgtactg

SEQ ID NO: 57257 - RNA, 24 nt, Synthetic Construct
  source 1..24: mol_type = other RNA
atgacacgatcactcccgttgagt

SEQ ID NO: 57258 - RNA, 22 nt, Synthetic Construct
  source 1..22: mol_type = other RNA
cattgcacttgcctcggtctga

SEQ ID NO: 57259 - RNA, 21 nt, Synthetic Construct
  source 1..21: mol_type = other RNA
tggggtgtgacaatggtgttt

SEQ ID NO: 57260 - RNA, 21 nt, Synthetic Construct
  source 1..21: mol_type = other RNA
tggggtgtgacaatggtgttt

SEQ ID NO: 57261 - RNA, 18 nt, Synthetic Construct
  source 1..18: mol_type = other RNA
caacggaatcccaaaagc

SEQ ID NO: 57262 - RNA, 22 nt, Synthetic Construct
  source 1..22: mol_type = other RNA
tagcagcacgtaaaaattggcg

SEQ ID NO: 57263 - RNA, 21 nt, Synthetic Construct
  source 1..21: mol_type = other RNA
tgtaaacatccttgactggaa

SEQ ID NO: 57264 - RNA, 21 nt, Synthetic Construct
  source 1..21: mol_type = other RNA
tgtaaacatccttgactggaa

SEQ ID NO: 57265 - RNA, 23 nt, Synthetic Construct
  source 1..23: mol_type = other RNA
tgaggggaagagagcgagacttt

SEQ ID NO: 57266 - RNA, 24 nt, Synthetic Construct
  source 1..24: mol_type = other RNA
gtcagtttgtcaaataccccaatt

SEQ ID NO: 57267 - RNA, 24 nt, Synthetic Construct
  source 1..24: mol_type = other RNA
gtcagtttgtcaaataccccaatt

SEQ ID NO: 57268 - RNA, 23 nt, Synthetic Construct
  source 1..23: mol_type = other RNA
tcggatccgtctgagcttggctt

SEQ ID NO: 57269 - RNA, 23 nt, Synthetic Construct
  source 1..23: mol_type = other RNA
tcggatccgtctgagcttggctt

SEQ ID NO: 57270 - RNA, 20 nt, Synthetic Construct
  source 1..20: mol_type = other RNA
tgaggtagtaggttgtgcgg

SEQ ID NO: 57271 - RNA, 23 nt, Synthetic Construct
  source 1..23: mol_type = other RNA
tggtaatacgacgtacttagtga

SEQ ID NO: 57272 - RNA, 23 nt, Synthetic Construct
  source 1..23: mol_type = other RNA
tggtaatacgacgtacttagtga

SEQ ID NO: 57273 - RNA, 21 nt, Synthetic Construct
  source 1..21: mol_type = other RNA
tgaggtggtaggttgtatagt

SEQ ID NO: 57274 - RNA, 23 nt, Synthetic Construct
  source 1..23: mol_type = other RNA
tcttggagtaggtcattgggtga

SEQ ID NO: 57275 - RNA, 21 nt, Synthetic Construct
  source 1..21: mol_type = other RNA
tgaggtagtagcttgtgctgt

SEQ ID NO: 57276 - RNA, 22 nt, Synthetic Construct
  source 1..22: mol_type = other RNA
tagcagcacgtaaatatcggcg

SEQ ID NO: 57277 - RNA, 22 nt, Synthetic Construct
  source 1..22: mol_type = other RNA
tagcagcacgtaaatatcggcg

SEQ ID NO: 57278 - RNA, 22 nt, Synthetic Construct
  source 1..22: mol_type = other RNA
tagcggcacgtaaatattggcg

SEQ ID NO: 57279 - RNA, 22 nt, Synthetic Construct
  source 1..22: mol_type = other RNA
tagcggcacgtaaatattggcg

SEQ ID NO: 57280 - RNA, 22 nt, Synthetic Construct
  source 1..22: mol_type = other RNA
cattgcactcgtctcggtctga

SEQ ID NO: 57281 - RNA, 18 nt, Synthetic Construct
  source 1..18: mol_type = other RNA
gtagtcgtggccgagtgg

SEQ ID NO: 57282 - RNA, 15 nt, Synthetic Construct
  source 1..15: mol_type = other RNA
gcgtagatatgcgga

SEQ ID NO: 57283 - RNA, 21 nt, Synthetic Construct
  source 1..21: mol_type = other RNA
taaggtagtaggttgtatagt

SEQ ID NO: 57284 - RNA, 21 nt, Synthetic Construct
  source 1..21: mol_type = other RNA
taaggtagtaggttgtatagt

SEQ ID NO: 57285 - RNA, 21 nt, Synthetic Construct
  source 1..21: mol_type = other RNA
tgaggtagtagtctgtgctgt

SEQ ID NO: 57286 - RNA, 21 nt, Synthetic Construct
  source 1..21: mol_type = other RNA
tgaggtagtagtctgtgctgt

SEQ ID NO: 57287 - RNA, 21 nt, Synthetic Construct
  source 1..21: mol_type = other RNA
tgaggggcggagagcgagact

SEQ ID NO: 57288 - RNA, 21 nt, Synthetic Construct
  source 1..21: mol_type = other RNA
tgaggggcggagagcgagact

SEQ ID NO: 57289 - RNA, 20 nt, Synthetic Construct
  source 1..20: mol_type = other RNA
taaggtagtaggttgtgtgg

SEQ ID NO: 57290 - RNA, 24 nt, Synthetic Construct
  source 1..24: mol_type = other RNA
cgaatgttgctcggtgaacccctt

SEQ ID NO: 57291 - RNA, 24 nt, Synthetic Construct
  source 1..24: mol_type = other RNA
cgaatgttgctcggtgaacccctt

SEQ ID NO: 57292 - RNA, 21 nt, Synthetic Construct
  source 1..21: mol_type = other RNA
ctagactgaagctccttgggg

SEQ ID NO: 57293 - RNA, 21 nt, Synthetic Construct
  source 1..21: mol_type = other RNA
ctagactgaagctccttgggg

SEQ ID NO: 57294 - RNA, 21 nt, Synthetic Construct
  source 1..21: mol_type = other RNA
tgtaacagcaactccatgtgg

SEQ ID NO: 57295 - RNA, 21 nt, Synthetic Construct
  source 1..21: mol_type = other RNA
tgtaacagcaactccatgtgg

SEQ ID NO: 57296 - RNA, 22 nt, Synthetic Construct
  source 1..22: mol_type = other RNA
tgagaactgaattccatgggta

SEQ ID NO: 57297 - RNA, 22 nt, Synthetic Construct
  source 1..22: mol_type = other RNA
tgagaactgaattccatgggta

SEQ ID NO: 57298 - RNA, 22 nt, Synthetic Construct
  source 1..22: mol_type = other RNA
tggagtgtgacaatggtgcttg

SEQ ID NO: 57299 - RNA, 22 nt, Synthetic Construct
  source 1..22: mol_type = other RNA
cattgcacttgtcccggcctgt

SEQ ID NO: 57300 - RNA, 23 nt, Synthetic Construct
  source 1..23: mol_type = other RNA
tgccagtttgtcaaataccccaa

SEQ ID NO: 57301 - RNA, 18 nt, Synthetic Construct
  source 1..18: mol_type = other RNA
gaagttgaccgcctgggg

SEQ ID NO: 57302 - RNA, 18 nt, Synthetic Construct
  source 1..18: mol_type = other RNA
gaagttgaccgcctgggg

SEQ ID NO: 57303 - RNA, 24 nt, Synthetic Construct
  source 1..24: mol_type = other RNA
tcctgtactgagctgccccgagat

SEQ ID NO: 57304 - RNA, 24 nt, Synthetic Construct
  source 1..24: mol_type = other RNA
tcctgtactgagctgccccgagat

SEQ ID NO: 57305 - RNA, 23 nt, Synthetic Construct
  source 1..23: mol_type = other RNA
tcctgtgctgagctgccccgaga

SEQ ID NO: 57306 - RNA, 15 nt, Synthetic Construct
  source 1..15: mol_type = other RNA
tcctgacggccatag

SEQ ID NO: 57307 - RNA, 27 nt, Synthetic Construct
  source 1..27: mol_type = other RNA
ccccccactgctaaatttggctggctt

SEQ ID NO: 57308 - RNA, 28 nt, Synthetic Construct
  source 1..28: mol_type = other RNA
ccccccactgctaaatttgaccggcttt

SEQ ID NO: 57309 - RNA, 28 nt, Synthetic Construct
  source 1..28: mol_type = other RNA
ccccccactgctaaatttgaccggcttt

SEQ ID NO: 57310 - RNA, 36 nt, Synthetic Construct; identical to SEQ ID NO: 2660
  source 1..36: mol_type = other RNA

SEQ ID NO: 57311 - RNA, 23 nt, Synthetic Construct
  source 1..23: mol_type = other RNA
tgacctatgaattgacagccagt

SEQ ID NO: 57312 - RNA, 23 nt, Synthetic Construct
  source 1..23: mol_type = other RNA
tgacctatgaattgacagccagt

SEQ ID NO: 57313 - RNA, 24 nt, Synthetic Construct
  source 1..24: mol_type = other RNA
tgtaaacatccccgactggaagcg

SEQ ID NO: 57314 - RNA, 37 nt, Synthetic Construct; identical to SEQ ID NO: 2482
  source 1..37: mol_type = other RNA

SEQ ID NO: 57315 - RNA, 22 nt, Synthetic Construct
  source 1..22: mol_type = other RNA
tggaatgtaaagaagtatgtac

SEQ ID NO: 57316 - RNA, 22 nt, Synthetic Construct
  source 1..22: mol_type = other RNA
tggaatgtaaagaagtatgtac

SEQ ID NO: 57317 - RNA, 35 nt, Synthetic Construct; identical to SEQ ID NO: 12948
  source 1..35: mol_type = other RNA

SEQ ID NO: 57318 - RNA, 35 nt, Synthetic Construct; identical to SEQ ID NO: 12948
  source 1..35: mol_type = other RNA

SEQ ID NO: 57319 - RNA, 22 nt, Synthetic Construct
  source 1..22: mol_type = other RNA
tcttgtactgagctgccccgag

SEQ ID NO: 57320 - RNA, 18 nt, Synthetic Construct
  source 1..18: mol_type = other RNA
gaagttgaccgcctgggg

SEQ ID NO: 57321 - RNA, 22 nt, Synthetic Construct
  source 1..22: mol_type = other RNA
tgaggcagtaggttgtatagtt

SEQ ID NO: 57322 - RNA, 22 nt, Synthetic Construct
  source 1..22: mol_type = other RNA
tgaggcagtaggttgtatagtt

SEQ ID NO: 57323 - RNA, 19 nt, Synthetic Construct
  source 1..19: mol_type = other RNA
agcgaaattccttgtcggg

SEQ ID NO: 57324 - RNA, 22 nt, Synthetic Construct
  source 1..22: mol_type = other RNA
ttgcagcacgtaaatattggcg

SEQ ID NO: 57325 - RNA, 34 nt, Synthetic Construct; identical to SEQ ID NO: 2186
  source 1..34: mol_type = other RNA

SEQ ID NO: 57326 - RNA, 15 nt, Synthetic Construct
  source 1..15: mol_type = other RNA
ggtcatcgtcaggct

SEQ ID NO: 57327 - RNA, 21 nt, Synthetic Construct
  source 1..21: mol_type = other RNA
tgaggtagtaggttgtacagt

SEQ ID NO: 57328 - RNA, 21 nt, Synthetic Construct
  source 1..21: mol_type = other RNA
tgaggtagtaggttgtacagt

SEQ ID NO: 57329 - RNA, 23 nt, Synthetic Construct
  source 1..23: mol_type = other RNA
agctacattgtctgctgggttcc

SEQ ID NO: 57330 - RNA, 25 nt, Synthetic Construct
  source 1..25: mol_type = other RNA
caaagtgctgttcgtgcaggtagtt

SEQ ID NO: 57331 - RNA, 22 nt, Synthetic Construct
  source 1..22: mol_type = other RNA
caacggaatcccaaaagcagct

SEQ ID NO: 57332 - RNA, 22 nt, Synthetic Construct
  source 1..22: mol_type = other RNA
tgtgactggttgaccagagggg

SEQ ID NO: 57333 - RNA, 22 nt, Synthetic Construct
  source 1..22: mol_type = other RNA
tgtgactggttgaccagagggg

SEQ ID NO: 57334 - RNA, 23 nt, Synthetic Construct
  source 1..23: mol_type = other RNA
tagcttatcagactgatgttgac

SEQ ID NO: 57335 - RNA, 22 nt, Synthetic Construct
  source 1..22: mol_type = other RNA
tgaggtagtaggtcgtatagtt

SEQ ID NO: 57336 - RNA, 20 nt, Synthetic Construct
  source 1..20: mol_type = other RNA
tatgtctgctgaccatcacc

SEQ ID NO: 57337 - RNA, 20 nt, Synthetic Construct
  source 1..20: mol_type = other RNA
tatgtctgctgaccatcacc

SEQ ID NO: 57338 - RNA, 22 nt, Synthetic Construct
  source 1..22: mol_type = other RNA
cattgcacttgtctcggtccga

SEQ ID NO: 57339 - RNA, 22 nt, Synthetic Construct
  source 1..22: mol_type = other RNA
cattgcacttgtctcggtccga

SEQ ID NO: 57340 - RNA, 21 nt, Synthetic Construct
  source 1..21: mol_type = other RNA
cgaggtagtagtttgtgctgt

SEQ ID NO: 57341 - RNA, 21 nt, Synthetic Construct
  source 1..21: mol_type = other RNA
cgaggtagtagtttgtgctgt

SEQ ID NO: 57342 - RNA, 22 nt, Synthetic Construct
  source 1..22: mol_type = other RNA
tgaggtagtaggttgtttagtt

SEQ ID NO: 57343 - RNA, 24 nt, Synthetic Construct
  source 1..24: mol_type = other RNA
tcagtgcatcacagaactttgttt

SEQ ID NO: 57344 - RNA, 22 nt, Synthetic Construct
  source 1..22: mol_type = other RNA
tattgcgcttgtcccggcctgt

SEQ ID NO: 57345 - RNA, 22 nt, Synthetic Construct
  source 1..22: mol_type = other RNA
tattgcgcttgtcccggcctgt

SEQ ID NO: 57346 - RNA, 25 nt, Synthetic Construct
  source 1..25: mol_type = other RNA
ttgaggatatgagatcgggacgaca

SEQ ID NO: 57347 - RNA, 25 nt, Synthetic Construct
  source 1..25: mol_type = other RNA
ttgaggatatgagatcgggacgaca

SEQ ID NO: 57348 - RNA, 20 nt, Synthetic Construct
  source 1..20: mol_type = other RNA
tagaattctcgcctgccacg

SEQ ID NO: 57349 - RNA, 22 nt, Synthetic Construct
  source 1..22: mol_type = other RNA
tcctgtactgagctaccccgag

SEQ ID NO: 57350 - RNA, 22 nt, Synthetic Construct
  source 1..22: mol_type = other RNA
tcctgtactgagctaccccgag

SEQ ID NO: 57351 - RNA, 22 nt, Synthetic Construct
  source 1..22: mol_type = other RNA
tgaggtagtagattgtatagta

SEQ ID NO: 57352 - RNA, 27 nt, Synthetic Construct
  source 1..27: mol_type = other RNA
ccccctactgctaaatttgactggctt

SEQ ID NO: 57353 - RNA, 27 nt, Synthetic Construct
  source 1..27: mol_type = other RNA
ccccctactgctaaatttgactggctt

SEQ ID NO: 57354 - RNA, 22 nt, Synthetic Construct
  source 1..22: mol_type = other RNA
tgaggtggtagattgtatagtt

SEQ ID NO: 57355 - RNA, 22 nt, Synthetic Construct
  source 1..22: mol_type = other RNA
tgaggtggtagattgtatagtt

SEQ ID NO: 57356 - RNA, 22 nt, Synthetic Construct
  source 1..22: mol_type = other RNA
tgaggttgtaggttgtatagtt

SEQ ID NO: 57357 - RNA, 22 nt, Synthetic Construct
  source 1..22: mol_type = other RNA
tcagtgcatgacagaacttggt

SEQ ID NO: 57358 - RNA, 30 nt, Synthetic Construct; identical to SEQ ID NO: 3933
  source 1..30: mol_type = other RNA

SEQ ID NO: 57359 - RNA, 30 nt, Synthetic Construct; identical to SEQ ID NO: 3933
  source 1..30: mol_type = other RNA

SEQ ID NO: 57360 - RNA, 36 nt, Synthetic Construct; identical to SEQ ID NO: 752
  source 1..36: mol_type = other RNA

SEQ ID NO: 57361 - RNA, 36 nt, Synthetic Construct; identical to SEQ ID NO: 752
  source 1..36: mol_type = other RNA

SEQ ID NO: 57362 - RNA, 22 nt, Synthetic Construct
  source 1..22: mol_type = other RNA
cattgcacttgtcccggtctga

SEQ ID NO: 57363 - RNA, 22 nt, Synthetic Construct
  source 1..22: mol_type = other RNA
cattgcacttgtcccggtctga

SEQ ID NO: 57364 - RNA, 29 nt, Synthetic Construct
  source 1..29: mol_type = other RNA
gcattggtggttcagtggtagaattctcg

SEQ ID NO: 57365 - RNA, 23 nt, Synthetic Construct
  source 1..23: mol_type = other RNA
tggaatgtaaagaagtatgtatt

SEQ ID NO: 57366 - RNA, 21 nt, Synthetic Construct
  source 1..21: mol_type = other RNA
tggcagtgtcttagctggttg

SEQ ID NO: 57367 - RNA, 21 nt, Synthetic Construct
  source 1..21: mol_type = other RNA
aagacgggaggaaagaaggga

SEQ ID NO: 57368 - RNA, 22 nt, Synthetic Construct
  source 1..22: mol_type = other RNA
acagtagtctgcacattggttt

SEQ ID NO: 57369 - RNA, 20 nt, Synthetic Construct
  source 1..20: mol_type = other RNA
tgaggtagtgggttgtgtgg

SEQ ID NO: 57370 - RNA, 22 nt, Synthetic Construct
  source 1..22: mol_type = other RNA
tcctatactgagctgccccgag

SEQ ID NO: 57371 - RNA, 22 nt, Synthetic Construct
  source 1..22: mol_type = other RNA
tcctatactgagctgccccgag

SEQ ID NO: 57372 - RNA, 20 nt, Synthetic Construct
  source 1..20: mol_type = other RNA
tgaagtagtaggttgtgtgg

SEQ ID NO: 57373 - RNA, 21 nt, Synthetic Construct
  source 1..21: mol_type = other RNA
tcctgtactgagctgcctcga

SEQ ID NO: 57374 - RNA, 21 nt, Synthetic Construct
  source 1..21: mol_type = other RNA
tcctgtactgagctgcctcga

SEQ ID NO: 57375 - RNA, 23 nt, Synthetic Construct
  source 1..23: mol_type = other RNA
tgataatacgacgtacttagtgt

SEQ ID NO: 57376 - RNA, 23 nt, Synthetic Construct
  source 1..23: mol_type = other RNA
tgataatacgacgtacttagtgt

SEQ ID NO: 57377 - RNA, 23 nt, Synthetic Construct
  source 1..23: mol_type = other RNA
tgtaaacatccttgactggaagc

SEQ ID NO: 57378 - RNA, 23 nt, Synthetic Construct
  source 1..23: mol_type = other RNA
taaggggcagagagcgagacttt

SEQ ID NO: 57379 - RNA, 20 nt, Synthetic Construct
  source 1..20: mol_type = other RNA
atcaagtaatccaggatagg

SEQ ID NO: 57380 - RNA, 16 nt, Synthetic Construct
  source 1..16: mol_type = other RNA
tgttcggaagattttc

SEQ ID NO: 57381 - RNA, 28 nt, Synthetic Construct
  source 1..28: mol_type = other RNA
ccccccaccgctaaatttgactggcttt

SEQ ID NO: 57382 - RNA, 28 nt, Synthetic Construct
  source 1..28: mol_type = other RNA
ccccccaccgctaaatttgactggcttt

SEQ ID NO: 57383 - RNA, 22 nt, Synthetic Construct
  source 1..22: mol_type = other RNA
tgaggtagtagattgtaaagtt

SEQ ID NO: 57384 - RNA, 22 nt, Synthetic Construct
  source 1..22: mol_type = other RNA
tgaggtagtagattgtaaagtt

SEQ ID NO: 57385 - RNA, 22 nt, Synthetic Construct
  source 1..22: mol_type = other RNA
tcgtaccgtgagtaataatgca

SEQ ID NO: 57386 - RNA, 22 nt, Synthetic Construct
  source 1..22: mol_type = other RNA
tcgtaccgtgagtaataatgca

SEQ ID NO: 57387 - RNA, 23 nt, Synthetic Construct
  source 1..23: mol_type = other RNA
caaagtgctgttcgtgtaggtag

SEQ ID NO: 57388 - RNA, 23 nt, Synthetic Construct
  source 1..23: mol_type = other RNA
caaagtgctgttcgtgtaggtag

SEQ ID NO: 57389 - RNA, 22 nt, Synthetic Construct
  source 1..22: mol_type = other RNA
tggagtgtgacaatggcgtttg

SEQ ID NO: 57390 - RNA, 22 nt, Synthetic Construct
  source 1..22: mol_type = other RNA
tggagtgtgacaatggcgtttg

SEQ ID NO: 57391 - RNA, 21 nt, Synthetic Construct
  source 1..21: mol_type = other RNA
tgaggtagtagatcgtatagt

SEQ ID NO: 57392 - RNA, 22 nt, Synthetic Construct
  source 1..22: mol_type = other RNA
tgaggtagtagtttgcgctgtt

SEQ ID NO: 57393 - RNA, 22 nt, Synthetic Construct
  source 1..22: mol_type = other RNA
tgaggtagtagtttgcgctgtt

SEQ ID NO: 57394 - RNA, 27 nt, Synthetic Construct
  source 1..27: mol_type = other RNA
ccccccactgctaaatttgactgactt

SEQ ID NO: 57395 - RNA, 27 nt, Synthetic Construct
  source 1..27: mol_type = other RNA
ccccccactgctaaatttgactgactt

SEQ ID NO: 57396 - RNA, 22 nt, Synthetic Construct
  source 1..22: mol_type = other RNA
tgaggaagtagattgtatagtt

SEQ ID NO: 57397 - RNA, 22 nt, Synthetic Construct
  source 1..22: mol_type = other RNA
tgaggaagtagattgtatagtt

SEQ ID NO: 57398 - RNA, 22 nt, Synthetic Construct
  source 1..22: mol_type = other RNA
tagcagcacgcaaatattggcg

SEQ ID NO: 57399 - RNA, 23 nt, Synthetic Construct
  source 1..23: mol_type = other RNA
tcctatactgagctgccccgaga

SEQ ID NO: 57400 - RNA, 21 nt, Synthetic Construct
  source 1..21: mol_type = other RNA
tgaggggcagagagcgagact

SEQ ID NO: 57401 - RNA, 24 nt, Synthetic Construct
  source 1..24: mol_type = other RNA
cgggcctggttagtacttggatgg

SEQ ID NO: 57402 - RNA, 23 nt, Synthetic Construct
  source 1..23: mol_type = other RNA
ccctgtactgagctgccccgagt

SEQ ID NO: 57403 - RNA, 22 nt, Synthetic Construct
  source 1..22: mol_type = other RNA
ttaatgctaatcgtgataggga

SEQ ID NO: 57404 - RNA, 22 nt, Synthetic Construct
  source 1..22: mol_type = other RNA
ttatggtttgcctgggactgaa

SEQ ID NO: 57405 - RNA, 22 nt, Synthetic Construct
  source 1..22: mol_type = other RNA
ttatggtttgcctgggactgaa

SEQ ID NO: 57406 - RNA, 29 nt, Synthetic Construct
  source 1..29: mol_type = other RNA
cccccccactgctaaatttgactggcttt

SEQ ID NO: 57407 - RNA, 21 nt, Synthetic Construct
  source 1..21: mol_type = other RNA
tgaggcagtaggttgtatagt

SEQ ID NO: 57408 - RNA, 21 nt, Synthetic Construct
  source 1..21: mol_type = other RNA
tgaggcagtaggttgtatagt

SEQ ID NO: 57409 - RNA, 24 nt, Synthetic Construct
  source 1..24: mol_type = other RNA
ggtaaacatccccgactggaagct

SEQ ID NO: 57410 - RNA, 23 nt, Synthetic Construct
  source 1..23: mol_type = other RNA
agctcggtctgaggcccctcagt

SEQ ID NO: 57411 - RNA, 23 nt, Synthetic Construct
  source 1..23: mol_type = other RNA
agctcggtctgaggcccctcagt

SEQ ID NO: 57412 - RNA, 34 nt, Synthetic Construct; identical to SEQ ID NO: 2019
  source 1..34: mol_type = other RNA

SEQ ID NO: 57413 - RNA, 22 nt, Synthetic Construct
  source 1..22: mol_type = other RNA
cgttgcacttgtctcggtctga

SEQ ID NO: 57414 - RNA, 22 nt, Synthetic Construct
  source 1..22: mol_type = other RNA
tcgtaccgtgagtaacaatgcg

SEQ ID NO: 57415 - RNA, 22 nt, Synthetic Construct
  source 1..22: mol_type = other RNA
tcccgtactgagctgccccgag

SEQ ID NO: 57416 - RNA, 27 nt, Synthetic Construct
  source 1..27: mol_type = other RNA
cgactcttagcggtggatcactcggct

SEQ ID NO: 57417 - RNA, 27 nt, Synthetic Construct
  source 1..27: mol_type = other RNA
cgactcttagcggtggatcactcggct

SEQ ID NO: 57418 - RNA, 23 nt, Synthetic Construct
  source 1..23: mol_type = other RNA
tgaggtagtaggttgtatagttg

SEQ ID NO: 57419 - RNA, 18 nt, Synthetic Construct
  source 1..18: mol_type = other RNA
tcagtagctcgaggaaaa

SEQ ID NO: 57420 - RNA, 18 nt, Synthetic Construct
  source 1..18: mol_type = other RNA
tcagtagctcgaggaaaa

SEQ ID NO: 57421 - RNA, 22 nt, Synthetic Construct
  source 1..22: mol_type = other RNA
cattgcacttgtctcggtctgg

SEQ ID NO: 57422 - RNA, 22 nt, Synthetic Construct
  source 1..22: mol_type = other RNA
cattgcacttgtctcggtctgg

SEQ ID NO: 57423 - RNA, 21 nt, Synthetic Construct
  source 1..21: mol_type = other RNA
tgtcagtttgtcaaataccca

SEQ ID NO: 57424 - RNA, 23 nt, Synthetic Construct
  source 1..23: mol_type = other RNA
tgaggtagtaggctgtgtggttt

SEQ ID NO: 57425 - RNA, 23 nt, Synthetic Construct
  source 1..23: mol_type = other RNA
tgtcagtttgtcaagtaccccaa

SEQ ID NO: 57426 - RNA, 17 nt, Synthetic Construct
  source 1..17: mol_type = other RNA
cgaaattccttgtcggg

SEQ ID NO: 57427 - RNA, 35 nt, Synthetic Construct; identical to SEQ ID NO: 730
  source 1..35: mol_type = other RNA

SEQ ID NO: 57428 - RNA, 35 nt, Synthetic Construct; identical to SEQ ID NO: 730
  source 1..35: mol_type = other RNA

SEQ ID NO: 57429 - RNA, 21 nt, Synthetic Construct
  source 1..21: mol_type = other RNA
atcacattgccagggatttcc

SEQ ID NO: 57430 - RNA, 21 nt, Synthetic Construct
  source 1..21: mol_type = other RNA
atcacattgccagggatttcc

SEQ ID NO: 57431 - RNA, 18 nt, Synthetic Construct
  source 1..18: mol_type = other RNA
agtgacgcgcatgaatgg

SEQ ID NO: 57432 - RNA, 18 nt, Synthetic Construct
  source 1..18: mol_type = other RNA
agtgacgcgcatgaatgg

SEQ ID NO: 57433 - RNA, 23 nt, Synthetic Construct
  source 1..23: mol_type = other RNA
tgaggagcagagagcgagacttt

SEQ ID NO: 57434 - RNA, 23 nt, Synthetic Construct
  source 1..23: mol_type = other RNA
tgaggagcagagagcgagacttt

SEQ ID NO: 57435 - RNA, 22 nt, Synthetic Construct
  source 1..22: mol_type = other RNA
tgaggttgtagtttgtgctgtt

SEQ ID NO: 57436 - RNA, 22 nt, Synthetic Construct
  source 1..22: mol_type = other RNA
tgaggttgtagtttgtgctgtt

SEQ ID NO: 57437 - RNA, 27 nt, Synthetic Construct
  source 1..27: mol_type = other RNA
atagtctttgttcgattccgttgagta

SEQ ID NO: 57438 - RNA, 22 nt, Synthetic Construct
  source 1..22: mol_type = other RNA
cgttgcacttgtctcggtctga

SEQ ID NO: 57439 - RNA, 42 nt, Synthetic Construct; identical to SEQ ID NO: 6990
  source 1..42: mol_type = other RNA

SEQ ID NO: 57440 - RNA, 42 nt, Synthetic Construct; identical to SEQ ID NO: 6990
  source 1..42: mol_type = other RNA

SEQ ID NO: 57441 - RNA, 19 nt, Synthetic Construct
  source 1..19: mol_type = other RNA
cctgtctgaatatgggggg

SEQ ID NO: 57442 - RNA, 19 nt, Synthetic Construct
  source 1..19: mol_type = other RNA
cctgtctgaatatgggggg

SEQ ID NO: 57443 - RNA, 23 nt, Synthetic Construct
  source 1..23: mol_type = other RNA
cggtaatacgacgtacttagtgt

SEQ ID NO: 57444 - RNA, 23 nt, Synthetic Construct
  source 1..23: mol_type = other RNA
cggtaatacgacgtacttagtgt

SEQ ID NO: 57445 - RNA, 21 nt, Synthetic Construct
  source 1..21: mol_type = other RNA
tggctcagttcagcaggaaca

SEQ ID NO: 57446 - RNA, 21 nt, Synthetic Construct
  source 1..21: mol_type = other RNA
tggctcagttcagcaggaaca

SEQ ID NO: 57447 - RNA, 30 nt, Synthetic Construct; identical to SEQ ID NO: 2699
  source 1..30: mol_type = other RNA

SEQ ID NO: 57448 - RNA, 30 nt, Synthetic Construct; identical to SEQ ID NO: 2699
  source 1..30: mol_type = other RNA

SEQ ID NO: 57449 - RNA, 23 nt, Synthetic Construct
  source 1..23: mol_type = other RNA
taacactgtctggtaacgatgtt

SEQ ID NO: 57450 - RNA, 23 nt, Synthetic Construct
  source 1..23: mol_type = other RNA
taacactgtctggtaacgatgtt

SEQ ID NO: 57451 - RNA, 23 nt, Synthetic Construct
  source 1..23: mol_type = other RNA
tcctgtactgagctgccctgaga

SEQ ID NO: 57452 - RNA, 23 nt, Synthetic Construct
  source 1..23: mol_type = other RNA
tcctgtactgagctgccctgaga

SEQ ID NO: 57453 - RNA, 23 nt, Synthetic Construct
  source 1..23: mol_type = other RNA
tcctgtactgagctgcctcgaga

SEQ ID NO: 57454 - RNA, 23 nt, Synthetic Construct
  source 1..23: mol_type = other RNA
tcctgtactgagctgcctcgaga

SEQ ID NO: 57455 - RNA, 16 nt, Synthetic Construct
  source 1..16: mol_type = other RNA
gtctacggacatacca

SEQ ID NO: 57456 - RNA, 16 nt, Synthetic Construct
  source 1..16: mol_type = other RNA
gtctacggacatacca

SEQ ID NO: 57457 - RNA, 23 nt, Synthetic Construct
  source 1..23: mol_type = other RNA
tgaggtagtaggttgtgtggctt

SEQ ID NO: 57458 - RNA, 15 nt, Synthetic Construct
  source 1..15: mol_type = other RNA
ggtgaaagcggggga

SEQ ID NO: 57459 - RNA, 22 nt, Synthetic Construct
  source 1..22: mol_type = other RNA
tgaggtggtagtttgtgctgtt

SEQ ID NO: 57460 - RNA, 22 nt, Synthetic Construct
  source 1..22: mol_type = other RNA
tgaggtggtagtttgtgctgtt

SEQ ID NO: 57461 - RNA, 23 nt, Synthetic Construct
  source 1..23: mol_type = other RNA
ctcactgatcgagtcgtcctgcg

SEQ ID NO: 57462 - RNA, 22 nt, Synthetic Construct
  source 1..22: mol_type = other RNA
tagcagcacgtaaatattggca

SEQ ID NO: 57463 - RNA, 22 nt, Synthetic Construct
  source 1..22: mol_type = other RNA
tagcagcacgtaaatattggca

SEQ ID NO: 57464 - RNA, 16 nt, Synthetic Construct
  source 1..16: mol_type = other RNA
gtctacggccatacca

SEQ ID NO: 57465 - RNA, 24 nt, Synthetic Construct
  source 1..24: mol_type = other RNA
tgaaaacatccccgactggaagct

SEQ ID NO: 57466 - RNA, 24 nt, Synthetic Construct
  source 1..24: mol_type = other RNA
tgaaaacatccccgactggaagct

SEQ ID NO: 57467 - RNA, 23 nt, Synthetic Construct
  source 1..23: mol_type = other RNA
tgcggggctagggctaacagcaa

SEQ ID NO: 57468 - RNA, 23 nt, Synthetic Construct
  source 1..23: mol_type = other RNA
tgcggggctagggctaacagcaa

SEQ ID NO: 57469 - RNA, 21 nt, Synthetic Construct
  source 1..21: mol_type = other RNA
tggagcgtgacaatggtgttt

SEQ ID NO: 57470 - RNA, 21 nt, Synthetic Construct
  source 1..21: mol_type = other RNA
tggagcgtgacaatggtgttt

SEQ ID NO: 57471 - RNA, 22 nt, Synthetic Construct
  source 1..22: mol_type = other RNA
tattgcatttgtcccggcctgt

SEQ ID NO: 57472 - RNA, 22 nt, Synthetic Construct
  source 1..22: mol_type = other RNA
tattgcatttgtcccggcctgt

SEQ ID NO: 57473 - RNA, 22 nt, Synthetic Construct
  source 1..22: mol_type = other RNA
gccgccggtgaaataccactac

SEQ ID NO: 57474 - RNA, 22 nt, Synthetic Construct
  source 1..22: mol_type = other RNA
gccgccggtgaaataccactac

SEQ ID NO: 57475 - RNA, 30 nt, Synthetic Construct; identical to SEQ ID NO: 2578
  source 1..30: mol_type = other RNA

SEQ ID NO: 57476 - RNA, 22 nt, Synthetic Construct
  source 1..22: mol_type = other RNA
tagcagcaagtaaatattggcg

SEQ ID NO: 57477 - RNA, 22 nt, Synthetic Construct
  source 1..22: mol_type = other RNA
tagcagcaagtaaatattggcg

SEQ ID NO: 57478 - RNA, 21 nt, Synthetic Construct
  source 1..21: mol_type = other RNA
tgaggggcggagagcgagact

SEQ ID NO: 57479 - RNA, 31 nt, Synthetic Construct; identical to SEQ ID NO: 1881
  source 1..31: mol_type = other RNA

SEQ ID NO: 57480 - RNA, 22 nt, Synthetic Construct
  source 1..22: mol_type = other RNA
tcgtaccgtgagtaataaagcg

SEQ ID NO: 57481 - RNA, 22 nt, Synthetic Construct
  source 1..22: mol_type = other RNA
tcgtaccgtgagtaataaagcg

SEQ ID NO: 57482 - RNA, 15 nt, Synthetic Construct
  source 1..15: mol_type = other RNA
ttccgaaagtagtgg

SEQ ID NO: 57483 - RNA, 15 nt, Synthetic Construct
  source 1..15: mol_type = other RNA
ttccgaaagtagtgg

SEQ ID NO: 57484 - RNA, 21 nt, Synthetic Construct
  source 1..21: mol_type = other RNA
tgaggtagcaggttgtatagt

SEQ ID NO: 57485 - RNA, 36 nt, Synthetic Construct; identical to SEQ ID NO: 6739
  source 1..36: mol_type = other RNA

SEQ ID NO: 57486 - RNA, 36 nt, Synthetic Construct; identical to SEQ ID NO: 6739
  source 1..36: mol_type = other RNA

SEQ ID NO: 57487 - RNA, 22 nt, Synthetic Construct
  source 1..22: mol_type = other RNA
tgaggtagcaggttgtatagtt

SEQ ID NO: 57488 - RNA, 21 nt, Synthetic Construct
  source 1..21: mol_type = other RNA
agagtaggacgttgccaggtt

SEQ ID NO: 57489 - RNA, 21 nt, Synthetic Construct
  source 1..21: mol_type = other RNA
agagtaggacgttgccaggtt

SEQ ID NO: 57490 - RNA, 16 nt, Synthetic Construct
  source 1..16: mol_type = other RNA
gcaagaggtcagcggt

SEQ ID NO: 57491 - RNA, 22 nt, Synthetic Construct
  source 1..22: mol_type = other RNA
tgaggtagtagttcgtgctgtt

SEQ ID NO: 57492 - RNA, 22 nt, Synthetic Construct
  source 1..22: mol_type = other RNA
tggagtgtggcaatggtgtttg

SEQ ID NO: 57493 - RNA, 35 nt, Synthetic Construct; identical to SEQ ID NO: 19298
  source 1..35: mol_type = other RNA

SEQ ID NO: 57494 - RNA, 35 nt, Synthetic Construct; identical to SEQ ID NO: 19298
  source 1..35: mol_type = other RNA

SEQ ID NO: 57495 - RNA, 25 nt, Synthetic Construct
  source 1..25: mol_type = other RNA
ttcaagtaatccaggataggctttt

SEQ ID NO: 57496 - RNA, 27 nt, Synthetic Construct
  source 1..27: mol_type = other RNA
ccccccactgctaaatttggctggctt

SEQ ID NO: 57497 - RNA, 27 nt, Synthetic Construct
  source 1..27: mol_type = other RNA
ccccccactgctaaatttggctggctt

SEQ ID NO: 57498 - RNA, 16 nt, Synthetic Construct
  source 1..16: mol_type = other RNA
gactacggccatacca

SEQ ID NO: 57499 - RNA, 16 nt, Synthetic Construct
  source 1..16: mol_type = other RNA
gactacggccatacca

SEQ ID NO: 57500 - RNA, 23 nt, Synthetic Construct
  source 1..23: mol_type = other RNA
tggtaatacgacgtacttagtga

SEQ ID NO: 57501 - RNA, 30 nt, Synthetic Construct; identical to SEQ ID NO: 6405
  source 1..30: mol_type = other RNA

SEQ ID NO: 57502 - RNA, 30 nt, Synthetic Construct; identical to SEQ ID NO: 6405
  source 1..30: mol_type = other RNA

SEQ ID NO: 57503 - RNA, 29 nt, Synthetic Construct
  source 1..29: mol_type = other RNA
ttacaggggttcgaatcccctaggggacg

SEQ ID NO: 57504 - RNA, 19 nt, Synthetic Construct
  source 1..19: mol_type = other RNA
atcacattgccagggattt

SEQ ID NO: 57505 - RNA, 15 nt, Synthetic Construct
  source 1..15: mol_type = other RNA
gtcgtcctgcgcgga

SEQ ID NO: 57506 - RNA, 25 nt, Synthetic Construct
  source 1..25: mol_type = other RNA
ggtaaaatggctgagtgaagcattg

SEQ ID NO: 57507 - RNA, 25 nt, Synthetic Construct
  source 1..25: mol_type = other RNA
gttgaattgtggtctgtggacgtgg

SEQ ID NO: 57508 - RNA, 25 nt, Synthetic Construct
  source 1..25: mol_type = other RNA
gttgaattgtggtctgtggacgtgg

SEQ ID NO: 57509 - RNA, 22 nt, Synthetic Construct
  source 1..22: mol_type = other RNA
tgaggtagtaggttatgtggtt

SEQ ID NO: 57510 - RNA, 34 nt, Synthetic Construct; identical to SEQ ID NO: 2019
  source 1..34: mol_type = other RNA

SEQ ID NO: 57511 - RNA, 20 nt, Synthetic Construct
  source 1..20: mol_type = other RNA
acagtagtctgcacattggt

SEQ ID NO: 57512 - RNA, 16 nt, Synthetic Construct
  source 1..16: mol_type = other RNA
ggccgttcttagttgg

SEQ ID NO: 57513 - RNA, 33 nt, Synthetic Construct; identical to SEQ ID NO: 15389
  source 1..33: mol_type = other RNA

SEQ ID NO: 57514 - RNA, 33 nt, Synthetic Construct; identical to SEQ ID NO: 15389
  source 1..33: mol_type = other RNA

SEQ ID NO: 57515 - RNA, 23 nt, Synthetic Construct
  source 1..23: mol_type = other RNA
tcctgtactgagttgccccgaga

SEQ ID NO: 57516 - RNA, 24 nt, Synthetic Construct
  source 1..24: mol_type = other RNA
tgcaaacatccccgactggaagct

SEQ ID NO: 57517 - RNA, 24 nt, Synthetic Construct
  source 1..24: mol_type = other RNA
tgcaaacatccccgactggaagct

SEQ ID NO: 57518 - RNA, 20 nt, Synthetic Construct
  source 1..20: mol_type = other RNA
tgaggtagtaggttgtataa

SEQ ID NO: 57519 - RNA, 20 nt, Synthetic Construct
  source 1..20: mol_type = other RNA
tgaggtagtaggttgtataa

SEQ ID NO: 57520 - RNA, 22 nt, Synthetic Construct
  source 1..22: mol_type = other RNA
tgaggtagtaggttgtatagct

SEQ ID NO: 57521 - RNA, 22 nt, Synthetic Construct
  source 1..22: mol_type = other RNA
tgaggtagtaggttgtatagct

SEQ ID NO: 57522 - RNA, 22 nt, Synthetic Construct
  source 1..22: mol_type = other RNA
tgaggtagtagattatatagtt

SEQ ID NO: 57523 - RNA, 22 nt, Synthetic Construct
  source 1..22: mol_type = other RNA
tgaggtagtagattatatagtt

SEQ ID NO: 57524 - RNA, 23 nt, Synthetic Construct
  source 1..23: mol_type = other RNA
agctacattgtctgctgggtttt

SEQ ID NO: 57525 - RNA, 23 nt, Synthetic Construct
  source 1..23: mol_type = other RNA
agctacattgtctgctgggtttt

SEQ ID NO: 57526 - RNA, 18 nt, Synthetic Construct
  source 1..18: mol_type = other RNA
gttcgattccggagaggg

SEQ ID NO: 57527 - RNA, 18 nt, Synthetic Construct
  source 1..18: mol_type = other RNA
gttcgattccggagaggg

SEQ ID NO: 57528 - RNA, 28 nt, Synthetic Construct
  source 1..28: mol_type = other RNA
ggatttccccttggggttgtaggaccac

SEQ ID NO: 57529 - RNA, 28 nt, Synthetic Construct
  source 1..28: mol_type = other RNA
ggatttccccttggggttgtaggaccac

SEQ ID NO: 57530 - RNA, 22 nt, Synthetic Construct
  source 1..22: mol_type = other RNA
tgaggtagtaggtcgtgtggtt

SEQ ID NO: 57531 - RNA, 20 nt, Synthetic Construct
  source 1..20: mol_type = other RNA
ggtcccaagggtatggctgt

SEQ ID NO: 57532 - RNA, 20 nt, Synthetic Construct
  source 1..20: mol_type = other RNA
ggtcccaagggtatggctgt

SEQ ID NO: 57533 - RNA, 23 nt, Synthetic Construct
  source 1..23: mol_type = other RNA
ctcactgatcgagtcgtcctgcg

SEQ ID NO: 57534 - RNA, 23 nt, Synthetic Construct
  source 1..23: mol_type = other RNA
ctcactgatcgagtcgtcctgcg

SEQ ID NO: 57535 - RNA, 23 nt, Synthetic Construct
  source 1..23: mol_type = other RNA
cgaggtagtaggttgtgtggttt

SEQ ID NO: 57536 - RNA, 23 nt, Synthetic Construct
  source 1..23: mol_type = other RNA
cgaggtagtaggttgtgtggttt

SEQ ID NO: 57537 - RNA, 22 nt, Synthetic Construct
  source 1..22: mol_type = other RNA
tcctgtactgggctgccccgag

SEQ ID NO: 57538 - RNA, 22 nt, Synthetic Construct
  source 1..22: mol_type = other RNA
tgaggtagtaagttgtatagtt

SEQ ID NO: 57539 - RNA, 22 nt, Synthetic Construct
  source 1..22: mol_type = other RNA
tgaggtagtaagttgtatagtt

SEQ ID NO: 57540 - RNA, 21 nt, Synthetic Construct
  source 1..21: mol_type = other RNA
tggagtgtgacaacggtgttt

SEQ ID NO: 57541 - RNA, 25 nt, Synthetic Construct
  source 1..25: mol_type = other RNA
gggttgtaaaccgcttttgtcaggg

SEQ ID NO: 57542 - RNA, 27 nt, Synthetic Construct
  source 1..27: mol_type = other RNA
ccccccactgctaaaattgactggctt

SEQ ID NO: 57543 - RNA, 22 nt, Synthetic Construct
  source 1..22: mol_type = other RNA
tgaggtagtagtttgtgctgtc

SEQ ID NO: 57544 - RNA, 22 nt, Synthetic Construct
  source 1..22: mol_type = other RNA
tgaggtagtaggtcgtatagtt

SEQ ID NO: 57545 - RNA, 23 nt, Synthetic Construct
  source 1..23: mol_type = other RNA
tgaagggcagagagcgagacttt

SEQ ID NO: 57546 - RNA, 18 nt, Synthetic Construct
  source 1..18: mol_type = other RNA
cttggggttgtaggacca

SEQ ID NO: 57547 - RNA, 18 nt, Synthetic Construct
  source 1..18: mol_type = other RNA
cttggggttgtaggacca

SEQ ID NO: 57548 - RNA, 22 nt, Synthetic Construct
  source 1..22: mol_type = other RNA
tcctgtactgagctaccccgag

SEQ ID NO: 57549 - RNA, 22 nt, Synthetic Construct
  source 1..22: mol_type = other RNA
tccagtactgagctgccccgag

SEQ ID NO: 57550 - RNA, 21 nt, Synthetic Construct
  source 1..21: mol_type = other RNA
tggagtgtgacagtggtgttt

SEQ ID NO: 57551 - RNA, 22 nt, Synthetic Construct
  source 1..22: mol_type = other RNA
tgaggtagcagattgtatagtt

SEQ ID NO: 57552 - RNA, 22 nt, Synthetic Construct
  source 1..22: mol_type = other RNA
tgaggtagcagattgtatagtt

SEQ ID NO: 57553 - RNA, 21 nt, Synthetic Construct
  source 1..21: mol_type = other RNA
tgaggtagtaggttgcatagt

SEQ ID NO: 57554 - RNA, 21 nt, Synthetic Construct
  source 1..21: mol_type = other RNA
tgaggtagtaggttgcatagt

SEQ ID NO: 57555 - RNA, 25 nt, Synthetic Construct
  source 1..25: mol_type = other RNA
gtgaggatatgagatcgagacgaca

SEQ ID NO: 57556 - RNA, 22 nt, Synthetic Construct
  source 1..22: mol_type = other RNA
caaagtgcttacagtgcaggta

SEQ ID NO: 57557 - RNA, 22 nt, Synthetic Construct
  source 1..22: mol_type = other RNA
caaagtgcttacagtgcaggta

SEQ ID NO: 57558 - RNA, 22 nt, Synthetic Construct
  source 1..22: mol_type = other RNA
tcgtaccgtgagcaataatgcg

SEQ ID NO: 57559 - RNA, 24 nt, Synthetic Construct
  source 1..24: mol_type = other RNA
gcgagagtaggacgttgccaggtt

SEQ ID NO: 57560 - RNA, 24 nt, Synthetic Construct
  source 1..24: mol_type = other RNA
gcgagagtaggacgttgccaggtt

SEQ ID NO: 57561 - RNA, 27 nt, Synthetic Construct
  source 1..27: mol_type = other RNA
ccgtgtgaaagtaggtcatcgtcaggc

SEQ ID NO: 57562 - RNA, 27 nt, Synthetic Construct
  source 1..27: mol_type = other RNA
ccgtgtgaaagtaggtcatcgtcaggc

SEQ ID NO: 57563 - RNA, 20 nt, Synthetic Construct
  source 1..20: mol_type = other RNA
tgaggaagtaggttgtgtgg

SEQ ID NO: 57564 - RNA, 21 nt, Synthetic Construct
  source 1..21: mol_type = other RNA
ggaggggcagagagcgagact

SEQ ID NO: 57565 - RNA, 24 nt, Synthetic Construct
  source 1..24: mol_type = other RNA
gaggtgtagaataggtgggagctt

SEQ ID NO: 57566 - RNA, 24 nt, Synthetic Construct
  source 1..24: mol_type = other RNA
gaggtgtagaataggtgggagctt

SEQ ID NO: 57567 - RNA, 22 nt, Synthetic Construct
  source 1..22: mol_type = other RNA
tagcagcacgtaaatatcggcg

SEQ ID NO: 57568 - RNA, 22 nt, Synthetic Construct
  source 1..22: mol_type = other RNA
ggtcggcccacggccctggcgg

SEQ ID NO: 57569 - RNA, 22 nt, Synthetic Construct
  source 1..22: mol_type = other RNA
ggtcggcccacggccctggcgg

SEQ ID NO: 57570 - RNA, 23 nt, Synthetic Construct
  source 1..23: mol_type = other RNA
ctcactgatcgagtcgtcctgcg

SEQ ID NO: 57571 - RNA, 23 nt, Synthetic Construct
  source 1..23: mol_type = other RNA
ctcactgatcgagtcgtcctgcg

SEQ ID NO: 57572 - RNA, 19 nt, Synthetic Construct
  source 1..19: mol_type = other RNA
gcgccgatgatagtgcgga

SEQ ID NO: 57573 - RNA, 19 nt, Synthetic Construct
  source 1..19: mol_type = other RNA
gcgccgatgatagtgcgga

SEQ ID NO: 57574 - RNA, 15 nt, Synthetic Construct
  source 1..15: mol_type = other RNA
gagagcctggacaca

SEQ ID NO: 57575 - RNA, 34 nt, Synthetic Construct; identical to SEQ ID NO: 6757
  source 1..34: mol_type = other RNA

SEQ ID NO: 57576 - RNA, 34 nt, Synthetic Construct; identical to SEQ ID NO: 6757
  source 1..34: mol_type = other RNA

SEQ ID NO: 57577 - RNA, 25 nt, Synthetic Construct
  source 1..25: mol_type = other RNA
cctcgcgcgattggagcggccgata

SEQ ID NO: 57578 - RNA, 21 nt, Synthetic Construct
  source 1..21: mol_type = other RNA
cgtaccgtgagtaataacgcg

SEQ ID NO: 57579 - RNA, 21 nt, Synthetic Construct
  source 1..21: mol_type = other RNA
cgtaccgtgagtaataacgcg

SEQ ID NO: 57580 - RNA, 24 nt, Synthetic Construct
  source 1..24: mol_type = other RNA
tgtaaacaaccccgactggaagct

SEQ ID NO: 57581 - RNA, 24 nt, Synthetic Construct
  source 1..24: mol_type = other RNA
tgtaaacaaccccgactggaagct

SEQ ID NO: 57582 - RNA, 21 nt, Synthetic Construct
  source 1..21: mol_type = other RNA
tgaggtagcaggttgtatagt

SEQ ID NO: 57583 - RNA, 21 nt, Synthetic Construct
  source 1..21: mol_type = other RNA
tgaggtagcaggttgtatagt

SEQ ID NO: 57584 - RNA, 21 nt, Synthetic Construct
  source 1..21: mol_type = other RNA
agcagcattgtacagggctat

SEQ ID NO: 57585 - RNA, 21 nt, Synthetic Construct
  source 1..21: mol_type = other RNA
agcagcattgtacagggctat

SEQ ID NO: 57586 - RNA, 15 nt, Synthetic Construct
  source 1..15: mol_type = other RNA
tccggatcgtagtct

SEQ ID NO: 57587 - RNA, 16 nt, Synthetic Construct
  source 1..16: mol_type = other RNA
ggaattgacggaaggg

SEQ ID NO: 57588 - RNA, 16 nt, Synthetic Construct
  source 1..16: mol_type = other RNA
ggaattgacggaaggg

SEQ ID NO: 57589 - RNA, 18 nt, Synthetic Construct
  source 1..18: mol_type = other RNA
cgtgttcggaagattttc

SEQ ID NO: 57590 - RNA, 23 nt, Synthetic Construct
  source 1..23: mol_type = other RNA
caaagtgctgtacgtgcaggtag

SEQ ID NO: 57591 - RNA, 24 nt, Synthetic Construct
  source 1..24: mol_type = other RNA
aacattcattgctgtcggtgggtt

SEQ ID NO: 57592 - RNA, 26 nt, Synthetic Construct
  source 1..26: mol_type = other RNA
tcccacatggtctagcggttaggatt

SEQ ID NO: 57593 - RNA, 26 nt, Synthetic Construct
  source 1..26: mol_type = other RNA
tcccacatggtctagcggttaggatt

SEQ ID NO: 57594 - RNA, 20 nt, Synthetic Construct
  source 1..20: mol_type = other RNA
cgaggtagtaggttgtgtgg

SEQ ID NO: 57595 - RNA, 20 nt, Synthetic Construct
  source 1..20: mol_type = other RNA
tggggtagtaggttgtgtgg

SEQ ID NO: 57596 - RNA, 19 nt, Synthetic Construct
  source 1..19: mol_type = other RNA
tcctgtaccgatcaatagt

SEQ ID NO: 57597 - RNA, 22 nt, Synthetic Construct
  source 1..22: mol_type = other RNA
cgtaccgtgagtaataatgcgt

SEQ ID NO: 57598 - RNA, 22 nt, Synthetic Construct
  source 1..22: mol_type = other RNA
cgtaccgtgagtaataatgcgt

SEQ ID NO: 57599 - RNA, 20 nt, Synthetic Construct
  source 1..20: mol_type = other RNA
acagtagtctgcacattggt

SEQ ID NO: 57600 - RNA, 20 nt, Synthetic Construct
  source 1..20: mol_type = other RNA
acagtagtctgcacattggt

SEQ ID NO: 57601 - RNA, 22 nt, Synthetic Construct
  source 1..22: mol_type = other RNA
tcctgtactgagctgccccaag

SEQ ID NO: 57602 - RNA, 22 nt, Synthetic Construct
  source 1..22: mol_type = other RNA
tgaggtagtaggttgtggggtt

SEQ ID NO: 57603 - RNA, 22 nt, Synthetic Construct
  source 1..22: mol_type = other RNA
tgaggtagtaggttgtggggtt

SEQ ID NO: 57604 - RNA, 22 nt, Synthetic Construct
  source 1..22: mol_type = other RNA
tcggatccgtctgagcttggct

SEQ ID NO: 57605 - RNA, 22 nt, Synthetic Construct
  source 1..22: mol_type = other RNA
tgaggcagtaggttgtatagtt

SEQ ID NO: 57606 - RNA, 30 nt, Synthetic Construct; identical to SEQ ID NO: 768
  source 1..30: mol_type = other RNA

SEQ ID NO: 57607 - RNA, 30 nt, Synthetic Construct; identical to SEQ ID NO: 768
  source 1..30: mol_type = other RNA

SEQ ID NO: 57608 - RNA, 22 nt, Synthetic Construct
  source 1..22: mol_type = other RNA
tagcagcacataaatattggcg

SEQ ID NO: 57609 - RNA, 32 nt, Synthetic Construct; identical to SEQ ID NO: 1238
  source 1..32: mol_type = other RNA

SEQ ID NO: 57610 - RNA, 32 nt, Synthetic Construct; identical to SEQ ID NO: 1238
  source 1..32: mol_type = other RNA

SEQ ID NO: 57611 - RNA, 23 nt, Synthetic Construct
  source 1..23: mol_type = other RNA
caaagtgctgttcgtacaggtag

SEQ ID NO: 57612 - RNA, 22 nt, Synthetic Construct
  source 1..22: mol_type = other RNA
tagcagcatgtaaatattggcg

SEQ ID NO: 57613 - RNA, 22 nt, Synthetic Construct
  source 1..22: mol_type = other RNA
tagcagcatgtaaatattggcg

SEQ ID NO: 57614 - RNA, 23 nt, Synthetic Construct
  source 1..23: mol_type = other RNA
agaggggcagagagcgagacttt

SEQ ID NO: 57615 - RNA, 23 nt, Synthetic Construct
  source 1..23: mol_type = other RNA
agaggggcagagagcgagacttt

SEQ ID NO: 57616 - RNA, 16 nt, Synthetic Construct
  source 1..16: mol_type = other RNA
cccctggacctgtact

SEQ ID NO: 57617 - RNA, 16 nt, Synthetic Construct
  source 1..16: mol_type = other RNA
cccctggacctgtact

SEQ ID NO: 57618 - RNA, 26 nt, Synthetic Construct
  source 1..26: mol_type = other RNA
atgcgagagtaggacgttgccaggtt

SEQ ID NO: 57619 - RNA, 26 nt, Synthetic Construct
  source 1..26: mol_type = other RNA
atgcgagagtaggacgttgccaggtt

SEQ ID NO: 57620 - RNA, 24 nt, Synthetic Construct
  source 1..24: mol_type = other RNA
tgtaagcatccccgactggaagct

SEQ ID NO: 57621 - RNA, 21 nt, Synthetic Construct
  source 1..21: mol_type = other RNA
ctagaccgaagctccttgagg

SEQ ID NO: 57622 - RNA, 23 nt, Synthetic Construct
  source 1..23: mol_type = other RNA
aacggaatcccaaaagcagctgt

SEQ ID NO: 57623 - RNA, 23 nt, Synthetic Construct
  source 1..23: mol_type = other RNA
tcctgtactgagctgctccgaga

SEQ ID NO: 57624 - RNA, 23 nt, Synthetic Construct
  source 1..23: mol_type = other RNA
tcctgtactgagctgctccgaga

SEQ ID NO: 57625 - RNA, 19 nt, Synthetic Construct
  source 1..19: mol_type = other RNA
cctcgtcatctaattagtg

SEQ ID NO: 57626 - RNA, 19 nt, Synthetic Construct
  source 1..19: mol_type = other RNA
cctcgtcatctaattagtg

SEQ ID NO: 57627 - RNA, 30 nt, Synthetic Construct; identical to SEQ ID NO: 2407
  source 1..30: mol_type = other RNA

SEQ ID NO: 57628 - RNA, 30 nt, Synthetic Construct; identical to SEQ ID NO: 2407
  source 1..30: mol_type = other RNA

SEQ ID NO: 57629 - RNA, 23 nt, Synthetic Construct
  source 1..23: mol_type = other RNA
cgactcttagcggtggatcactc

SEQ ID NO: 57630 - RNA, 22 nt, Synthetic Construct
  source 1..22: mol_type = other RNA
tgaggtagtaggttatatagtt

SEQ ID NO: 57631 - RNA, 22 nt, Synthetic Construct
  source 1..22: mol_type = other RNA
tgaggtagtaggttatatagtt

SEQ ID NO: 57632 - RNA, 22 nt, Synthetic Construct
  source 1..22: mol_type = other RNA
tagcagcacgtaaatactggcg

SEQ ID NO: 57633 - RNA, 22 nt, Synthetic Construct
  source 1..22: mol_type = other RNA
tagcagcacgtaaatactggcg

SEQ ID NO: 57634 - RNA, 23 nt, Synthetic Construct
  source 1..23: mol_type = other RNA
tgaggtagtaggctgtgtggttt

SEQ ID NO: 57635 - RNA, 23 nt, Synthetic Construct
  source 1..23: mol_type = other RNA
tgaggtagtaggctgtgtggttt

SEQ ID NO: 57636 - RNA, 25 nt, Synthetic Construct
  source 1..25: mol_type = other RNA
ttggggatatgagatcgagacgaca

SEQ ID NO: 57637 - RNA, 22 nt, Synthetic Construct
  source 1..22: mol_type = other RNA
tgaggtagtagactgtatagtt

SEQ ID NO: 57638 - RNA, 22 nt, Synthetic Construct
  source 1..22: mol_type = other RNA
tgaggtagtagactgtatagtt

SEQ ID NO: 57639 - RNA, 27 nt, Synthetic Construct
  source 1..27: mol_type = other RNA
ccccccactgctaaatttgacgggctt

SEQ ID NO: 57640 - RNA, 19 nt, Synthetic Construct
  source 1..19: mol_type = other RNA
tggccgtcgtcagctcgtg

SEQ ID NO: 57641 - RNA, 19 nt, Synthetic Construct
  source 1..19: mol_type = other RNA
tggccgtcgtcagctcgtg

SEQ ID NO: 57642 - RNA, 25 nt, Synthetic Construct
  source 1..25: mol_type = other RNA
aatgacacgatcactcccgttgaga

SEQ ID NO: 57643 - RNA, 25 nt, Synthetic Construct
  source 1..25: mol_type = other RNA
aatgacacgatcactcccgttgaga

SEQ ID NO: 57644 - RNA, 20 nt, Synthetic Construct
  source 1..20: mol_type = other RNA
tggctcagttcagcaggaaa

SEQ ID NO: 57645 - RNA, 20 nt, Synthetic Construct
  source 1..20: mol_type = other RNA
tggctcagttcagcaggaaa

SEQ ID NO: 57646 - RNA, 23 nt, Synthetic Construct
  source 1..23: mol_type = other RNA
naaagtgctgttcgtgcaggtag

SEQ ID NO: 57647 - RNA, 18 nt, Synthetic Construct
  source 1..18: mol_type = other RNA
ctaatgagactgccggtg

SEQ ID NO: 57648 - RNA, 18 nt, Synthetic Construct
  source 1..18: mol_type = other RNA
ctaatgagactgccggtg

SEQ ID NO: 57649 - RNA, 22 nt, Synthetic Construct
  source 1..22: mol_type = other RNA
tagcagcacgtaaatgttggcg

SEQ ID NO: 57650 - RNA, 23 nt, Synthetic Construct
  source 1..23: mol_type = other RNA
tggtaatacgacgtacttggtgt

SEQ ID NO: 57651 - RNA, 23 nt, Synthetic Construct
  source 1..23: mol_type = other RNA
tggtaatacgacgtacttggtgt

SEQ ID NO: 57652 - RNA, 22 nt, Synthetic Construct
  source 1..22: mol_type = other RNA
tattgcacttgtcccggcctgc

SEQ ID NO: 57653 - RNA, 23 nt, Synthetic Construct
  source 1..23: mol_type = other RNA
tggtaatacgacgtacttagtgc

SEQ ID NO: 57654 - RNA, 23 nt, Synthetic Construct
  source 1..23: mol_type = other RNA
tggtaatacgacgtacttagtgc

SEQ ID NO: 57655 - RNA, 22 nt, Synthetic Construct
  source 1..22: mol_type = other RNA
tgaggtagtagtatgtgctgtt

SEQ ID NO: 57656 - RNA, 20 nt, Synthetic Construct
  source 1..20: mol_type = other RNA
aatgacacgatcactcccgt

SEQ ID NO: 57657 - RNA, 20 nt, Synthetic Construct
  source 1..20: mol_type = other RNA
aatgacacgatcactcccgt

SEQ ID NO: 57658 - RNA, 25 nt, Synthetic Construct
  source 1..25: mol_type = other RNA
ttgaggatatgggatcgagacgaca

SEQ ID NO: 57659 - RNA, 21 nt, Synthetic Construct
  source 1..21: mol_type = other RNA
gggagtgtgacaatggtgttt

SEQ ID NO: 57660 - RNA, 21 nt, Synthetic Construct
  source 1..21: mol_type = other RNA
gggagtgtgacaatggtgttt

SEQ ID NO: 57661 - RNA, 21 nt, Synthetic Construct
  source 1..21: mol_type = other RNA
taacactgtctggtaaagatg

SEQ ID NO: 57662 - RNA, 21 nt, Synthetic Construct
  source 1..21: mol_type = other RNA
ggaatcgctagtaatcgcgga

SEQ ID NO: 57663 - RNA, 21 nt, Synthetic Construct
  source 1..21: mol_type = other RNA
ggaatcgctagtaatcgcgga

SEQ ID NO: 57664 - RNA, 22 nt, Synthetic Construct
  source 1..22: mol_type = other RNA
tcctatactgagctgccccgag

SEQ ID NO: 57665 - RNA, 22 nt, Synthetic Construct
  source 1..22: mol_type = other RNA
tcctgtactgagcagccccgag

SEQ ID NO: 57666 - RNA, 21 nt, Synthetic Construct
  source 1..21: mol_type = other RNA
tgaggtagtagattgtatggt

SEQ ID NO: 57667 - RNA, 21 nt, Synthetic Construct
  source 1..21: mol_type = other RNA
tgaggtagtagattgtatggt

SEQ ID NO: 57668 - RNA, 21 nt, Synthetic Construct
  source 1..21: mol_type = other RNA
tgaggtagtaggctgtgtggt

SEQ ID NO: 57669 - RNA, 23 nt, Synthetic Construct
  source 1..23: mol_type = other RNA
gtctttgttcgattccgttgagt

SEQ ID NO: 57670 - RNA, 18 nt, Synthetic Construct
  source 1..18: mol_type = other RNA
ccaaggggtcgtgggttc

SEQ ID NO: 57671 - RNA, 18 nt, Synthetic Construct
  source 1..18: mol_type = other RNA
ccaaggggtcgtgggttc

SEQ ID NO: 57672 - RNA, 23 nt, Synthetic Construct
  source 1..23: mol_type = other RNA
tggtaatacgacgtacttagtat

SEQ ID NO: 57673 - RNA, 23 nt, Synthetic Construct
  source 1..23: mol_type = other RNA
tggtaatacgacgtacttagtat

SEQ ID NO: 57674 - RNA, 21 nt, Synthetic Construct
  source 1..21: mol_type = other RNA
tgaggtagtagattgtgtggt

SEQ ID NO: 57675 - RNA, 23 nt, Synthetic Construct
  source 1..23: mol_type = other RNA
aatgacacgatcactcccgttgt

SEQ ID NO: 57676 - RNA, 22 nt, Synthetic Construct
  source 1..22: mol_type = other RNA
tgtagtgtttcctactttatgg

SEQ ID NO: 57677 - RNA, 22 nt, Synthetic Construct
  source 1..22: mol_type = other RNA
tgtagtgtttcctactttatgg

SEQ ID NO: 57678 - RNA, 23 nt, Synthetic Construct
  source 1..23: mol_type = other RNA
caaagtgccgttcgtgcaggtag

SEQ ID NO: 57679 - RNA, 22 nt, Synthetic Construct
  source 1..22: mol_type = other RNA
tcgtatcgtgagtaataatgcg

SEQ ID NO: 57680 - RNA, 39 nt, Synthetic Construct; identical to SEQ ID NO: 804
  source 1..39: mol_type = other RNA

SEQ ID NO: 57681 - RNA, 39 nt, Synthetic Construct; identical to SEQ ID NO: 804
  source 1..39: mol_type = other RNA

SEQ ID NO: 57682 - RNA, 21 nt, Synthetic Construct
  source 1..21: mol_type = other RNA
ctaatcccagaaacccggtcg

SEQ ID NO: 57683 - RNA, 22 nt, Synthetic Construct
  source 1..22: mol_type = other RNA
tcgtaccgtgagtaatgatgcg

SEQ ID NO: 57684 - RNA, 16 nt, Synthetic Construct
  source 1..16: mol_type = other RNA
ggccgttcttagttgg

SEQ ID NO: 57685 - RNA, 19 nt, Synthetic Construct
  source 1..19: mol_type = other RNA
gaagaccctgttgagcttg

SEQ ID NO: 57686 - RNA, 22 nt, Synthetic Construct
  source 1..22: mol_type = other RNA
tgaggtagtaggttgtacagtt

SEQ ID NO: 57687 - RNA, 23 nt, Synthetic Construct
  source 1..23: mol_type = other RNA
tgaggtagtagtttgtgctgttg

SEQ ID NO: 57688 - RNA, 22 nt, Synthetic Construct
  source 1..22: mol_type = other RNA
tcccgtactgagctgccccgag

SEQ ID NO: 57689 - RNA, 33 nt, Synthetic Construct; identical to SEQ ID NO: 35121
  source 1..33: mol_type = other RNA

SEQ ID NO: 57690 - RNA, 33 nt, Synthetic Construct; identical to SEQ ID NO: 35121
  source 1..33: mol_type = other RNA

SEQ ID NO: 57691 - RNA, 20 nt, Synthetic Construct
  source 1..20: mol_type = other RNA
ccgcagagtacagcttggga

SEQ ID NO: 57692 - RNA, 23 nt, Synthetic Construct
  source 1..23: mol_type = other RNA
tggtaatacgacgtacctagtgt

SEQ ID NO: 57693 - RNA, 23 nt, Synthetic Construct
  source 1..23: mol_type = other RNA
tggtaatacgacgtacctagtgt

SEQ ID NO: 57694 - RNA, 34 nt, Synthetic Construct; identical to SEQ ID NO: 2317
  source 1..34: mol_type = other RNA

SEQ ID NO: 57695 - RNA, 31 nt, Synthetic Construct; identical to SEQ ID NO: 960
  source 1..31: mol_type = other RNA

SEQ ID NO: 57696 - RNA, 31 nt, Synthetic Construct; identical to SEQ ID NO: 960
  source 1..31: mol_type = other RNA

SEQ ID NO: 57697 - RNA, 28 nt, Synthetic Construct
  source 1..28: mol_type = other RNA
ccccccgctgctaaatttgactggcttt

SEQ ID NO: 57698 - RNA, 28 nt, Synthetic Construct
  source 1..28: mol_type = other RNA
ccccccgctgctaaatttgactggcttt

SEQ ID NO: 57699 - RNA, 22 nt, Synthetic Construct
  source 1..22: mol_type = other RNA
tgaggtggtaggttgtgtggtt

SEQ ID NO: 57700 - RNA, 22 nt, Synthetic Construct
  source 1..22: mol_type = other RNA
tcctgtactgagctaccccgag

SEQ ID NO: 57701 - RNA, 22 nt, Synthetic Construct
  source 1..22: mol_type = other RNA
tcctgtactgagctaccccgag

SEQ ID NO: 57702 - RNA, 15 nt, Synthetic Construct
  source 1..15: mol_type = other RNA
gctttgatccggaga

SEQ ID NO: 57703 - RNA, 23 nt, Synthetic Construct
  source 1..23: mol_type = other RNA
tgtcagtctgtcaaataccccaa

SEQ ID NO: 57704 - RNA, 23 nt, Synthetic Construct
  source 1..23: mol_type = other RNA
tgtcagtctgtcaaataccccaa

SEQ ID NO: 57705 - RNA, 18 nt, Synthetic Construct
  source 1..18: mol_type = other RNA
atggccgggacagagggc

SEQ ID NO: 57706 - RNA, 18 nt, Synthetic Construct
  source 1..18: mol_type = other RNA
atggccgggacagagggc

SEQ ID NO: 57707 - RNA, 18 nt, Synthetic Construct
  source 1..18: mol_type = other RNA
cttggggttgtaggacca

SEQ ID NO: 57708 - RNA, 18 nt, Synthetic Construct
  source 1..18: mol_type = other RNA
cttggggttgtaggacca

SEQ ID NO: 57709 - RNA, 22 nt, Synthetic Construct
  source 1..22: mol_type = other RNA
tattgcatttgtcccggcctgt

SEQ ID NO: 57710 - RNA, 23 nt, Synthetic Construct
  source 1..23: mol_type = other RNA
caaagtgctgttcatgcaggtag

SEQ ID NO: 57711 - RNA, 15 nt, Synthetic Construct
  source 1..15: mol_type = other RNA
gcaagtcgagcggta

SEQ ID NO: 57712 - RNA, 15 nt, Synthetic Construct
  source 1..15: mol_type = other RNA
gcaagtcgagcggta

SEQ ID NO: 57713 - RNA, 22 nt, Synthetic Construct
  source 1..22: mol_type = other RNA
tggagtgtgacaatggcgtttg

SEQ ID NO: 57714 - RNA, 16 nt, Synthetic Construct
  source 1..16: mol_type = other RNA
atgcaagtcgaacggt

SEQ ID NO: 57715 - RNA, 27 nt, Synthetic Construct
  source 1..27: mol_type = other RNA
ccccccactgctaaatttgactggctc

SEQ ID NO: 57716 - RNA, 22 nt, Synthetic Construct
  source 1..22: mol_type = other RNA
tgagaactgaattccatgggtt

SEQ ID NO: 57717 - RNA, 22 nt, Synthetic Construct
  source 1..22: mol_type = other RNA
tggggtagtaggttgtatagtt

SEQ ID NO: 57718 - RNA, 22 nt, Synthetic Construct
  source 1..22: mol_type = other RNA
tggggtagtaggttgtatagtt

SEQ ID NO: 57719 - RNA, 21 nt, Synthetic Construct
  source 1..21: mol_type = other RNA
tgaggtggtagattgtatagt

SEQ ID NO: 57720 - RNA, 34 nt, Synthetic Construct; identical to SEQ ID NO: 2364
  source 1..34: mol_type = other RNA

SEQ ID NO: 57721 - RNA, 22 nt, Synthetic Construct
  source 1..22: mol_type = other RNA
tgaagtagtagattgtatagtt

SEQ ID NO: 57722 - RNA, 22 nt, Synthetic Construct
  source 1..22: mol_type = other RNA
tgaagtagtagattgtatagtt

SEQ ID NO: 57723 - RNA, 33 nt, Synthetic Construct; identical to SEQ ID NO: 7224
  source 1..33: mol_type = other RNA

SEQ ID NO: 57724 - RNA, 29 nt, Synthetic Construct
  source 1..29: mol_type = other RNA
cccccccactgctaaatttgactggctta

SEQ ID NO: 57725 - RNA, 34 nt, Synthetic Construct; identical to SEQ ID NO: 2375
  source 1..34: mol_type = other RNA

SEQ ID NO: 57726 - RNA, 34 nt, Synthetic Construct; identical to SEQ ID NO: 2375
  source 1..34: mol_type = other RNA

SEQ ID NO: 57727 - RNA, 20 nt, Synthetic Construct
  source 1..20: mol_type = other RNA
cgcgacctcagatcagacgt

SEQ ID NO: 57728 - RNA, 20 nt, Synthetic Construct
  source 1..20: mol_type = other RNA
cgcgacctcagatcagacgt

SEQ ID NO: 57729 - RNA, 31 nt, Synthetic Construct; identical to SEQ ID NO: 2507
  source 1..31: mol_type = other RNA

SEQ ID NO: 57730 - RNA, 23 nt, Synthetic Construct
  source 1..23: mol_type = other RNA
tcaggctcagtcccctcccgttt

SEQ ID NO: 57731 - RNA, 23 nt, Synthetic Construct
  source 1..23: mol_type = other RNA
tcaggctcagtcccctcccgttt

SEQ ID NO: 57732 - RNA, 22 nt, Synthetic Construct
  source 1..22: mol_type = other RNA
tagcagcacgtagatattggcg

SEQ ID NO: 57733 - RNA, 22 nt, Synthetic Construct
  source 1..22: mol_type = other RNA
tagcagcacgtagatattggcg

SEQ ID NO: 57734 - RNA, 22 nt, Synthetic Construct
  source 1..22: mol_type = other RNA
tatcgcacttgtcccggcctgt

SEQ ID NO: 57735 - RNA, 22 nt, Synthetic Construct
  source 1..22: mol_type = other RNA
tatcgcacttgtcccggcctgt

SEQ ID NO: 57736 - RNA, 22 nt, Synthetic Construct
  source 1..22: mol_type = other RNA
ggcagggttcgtgactggggtg

SEQ ID NO: 57737 - RNA, 31 nt, Synthetic Construct; identical to SEQ ID NO: 758
  source 1..31: mol_type = other RNA

SEQ ID NO: 57738 - RNA, 23 nt, Synthetic Construct
  source 1..23: mol_type = other RNA
caacggaatcccaaaagcggctg

SEQ ID NO: 57739 - RNA, 21 nt, Synthetic Construct
  source 1..21: mol_type = other RNA
cataaagtagaaagcactact

SEQ ID NO: 57740 - RNA, 23 nt, Synthetic Construct
  source 1..23: mol_type = other RNA
tccagcatcagtgattttgttga

SEQ ID NO: 57741 - RNA, 22 nt, Synthetic Construct
  source 1..22: mol_type = other RNA
tgaggtagtaagttgtatagtt

SEQ ID NO: 57742 - RNA, 22 nt, Synthetic Construct
  source 1..22: mol_type = other RNA
tggggtagtaggttgtatagtt

SEQ ID NO: 57743 - RNA, 22 nt, Synthetic Construct
  source 1..22: mol_type = other RNA
tggggtagtaggttgtatagtt

SEQ ID NO: 57744 - RNA, 23 nt, Synthetic Construct
  source 1..23: mol_type = other RNA
tggggtagtaggttgtgtggttt

SEQ ID NO: 57745 - RNA, 23 nt, Synthetic Construct
  source 1..23: mol_type = other RNA
caaagtgctgttcgcgcaggtag

SEQ ID NO: 57746 - RNA, 22 nt, Synthetic Construct
  source 1..22: mol_type = other RNA
tcgtactgtgagtaataatgcg

SEQ ID NO: 57747 - RNA, 22 nt, Synthetic Construct
  source 1..22: mol_type = other RNA
tcgtactgtgagtaataatgcg

SEQ ID NO: 57748 - RNA, 21 nt, Synthetic Construct
  source 1..21: mol_type = other RNA
agaggtagtaggttgtgtggt

SEQ ID NO: 57749 - RNA, 22 nt, Synthetic Construct
  source 1..22: mol_type = other RNA
tagcagcacgtaaatgttggcg

SEQ ID NO: 57750 - RNA, 22 nt, Synthetic Construct
  source 1..22: mol_type = other RNA
tagcagcacgtaaatgttggcg

SEQ ID NO: 57751 - RNA, 21 nt, Synthetic Construct
  source 1..21: mol_type = other RNA
caatggccgggacagagggct

SEQ ID NO: 57752 - RNA, 30 nt, Synthetic Construct; identical to SEQ ID NO: 2578
  source 1..30: mol_type = other RNA

SEQ ID NO: 57753 - RNA, 22 nt, Synthetic Construct
  source 1..22: mol_type = other RNA
tccctgagaccctaacttgtgt

SEQ ID NO: 57754 - RNA, 23 nt, Synthetic Construct
  source 1..23: mol_type = other RNA
gtcagtttgtcaaataccccaat

SEQ ID NO: 57755 - RNA, 27 nt, Synthetic Construct
  source 1..27: mol_type = other RNA
gatttccccttggggttgtaggaccac

SEQ ID NO: 57756 - RNA, 27 nt, Synthetic Construct
  source 1..27: mol_type = other RNA
gatttccccttggggttgtaggaccac

SEQ ID NO: 57757 - RNA, 21 nt, Synthetic Construct
  source 1..21: mol_type = other RNA
cattattacttttggtacgcg

SEQ ID NO: 57758 - RNA, 21 nt, Synthetic Construct
  source 1..21: mol_type = other RNA
cattattacttttggtacgcg

SEQ ID NO: 57759 - RNA, 21 nt, Synthetic Construct
  source 1..21: mol_type = other RNA
tgaggaagtagattgtatagt

SEQ ID NO: 57760 - RNA, 21 nt, Synthetic Construct
  source 1..21: mol_type = other RNA
tgaggaagtagattgtatagt

SEQ ID NO: 57761 - RNA, 17 nt, Synthetic Construct
  source 1..17: mol_type = other RNA
gaagttgaccgcctggg

SEQ ID NO: 57762 - RNA, 17 nt, Synthetic Construct
  source 1..17: mol_type = other RNA
gaagttgaccgcctggg

SEQ ID NO: 57763 - RNA, 15 nt, Synthetic Construct
  source 1..15: mol_type = other RNA
cccagaaacccggtc

SEQ ID NO: 57764 - RNA, 15 nt, Synthetic Construct
  source 1..15: mol_type = other RNA
cccagaaacccggtc

SEQ ID NO: 57765 - RNA, 26 nt, Synthetic Construct
  source 1..26: mol_type = other RNA
ttaagtgacgatagcctaggagatac

SEQ ID NO: 57766 - RNA, 22 nt, Synthetic Construct
  source 1..22: mol_type = other RNA
tgaggtagtaggttgtataatt

SEQ ID NO: 57767 - RNA, 24 nt, Synthetic Construct
  source 1..24: mol_type = other RNA
caaagtgcttacagtgcaggtagt

SEQ ID NO: 57768 - RNA, 24 nt, Synthetic Construct
  source 1..24: mol_type = other RNA
caaagtgcttacagtgcaggtagt

SEQ ID NO: 57769 - RNA, 23 nt, Synthetic Construct
  source 1..23: mol_type = other RNA
tgaggtagtaggttgtgtggtaa

SEQ ID NO: 57770 - RNA, 22 nt, Synthetic Construct
  source 1..22: mol_type = other RNA
tcctgtactaagctgccccgag

SEQ ID NO: 57771 - RNA, 22 nt, Synthetic Construct
  source 1..22: mol_type = other RNA
tcctgtactaagctgccccgag

SEQ ID NO: 57772 - RNA, 17 nt, Synthetic Construct
  source 1..17: mol_type = other RNA
cgatctgtagctggtct

SEQ ID NO: 57773 - RNA, 17 nt, Synthetic Construct
  source 1..17: mol_type = other RNA
cgatctgtagctggtct

SEQ ID NO: 57774 - RNA, 23 nt, Synthetic Construct
  source 1..23: mol_type = other RNA
tacagtagtctgcacattggtta

SEQ ID NO: 57775 - RNA, 23 nt, Synthetic Construct
  source 1..23: mol_type = other RNA
tagcttatcagactgatgttgaa

SEQ ID NO: 57776 - RNA, 20 nt, Synthetic Construct
  source 1..20: mol_type = other RNA
ggggatgtagctcagatggt

SEQ ID NO: 57777 - RNA, 20 nt, Synthetic Construct
  source 1..20: mol_type = other RNA
ggggatgtagctcagatggt

SEQ ID NO: 57778 - RNA, 21 nt, Synthetic Construct
  source 1..21: mol_type = other RNA
tgaggtagaaggttgtgtggt

SEQ ID NO: 57779 - RNA, 21 nt, Synthetic Construct
  source 1..21: mol_type = other RNA
tgaggtagaaggttgtgtggt

SEQ ID NO: 57780 - RNA, 21 nt, Synthetic Construct
  source 1..21: mol_type = other RNA
tagcaccatttgaaatcagtg

SEQ ID NO: 57781 - RNA, 21 nt, Synthetic Construct
  source 1..21: mol_type = other RNA
tagcaccatttgaaatcagtg

SEQ ID NO: 57782 - RNA, 22 nt, Synthetic Construct
  source 1..22: mol_type = other RNA
tgaggtagtagattgtattgtt

SEQ ID NO: 57783 - RNA, 22 nt, Synthetic Construct
  source 1..22: mol_type = other RNA
tgaggtagtagattgtattgtt

SEQ ID NO: 57784 - RNA, 24 nt, Synthetic Construct
  source 1..24: mol_type = other RNA
gaggtgtagaataggtgggagctt

SEQ ID NO: 57785 - RNA, 19 nt, Synthetic Construct
  source 1..19: mol_type = other RNA
tcagtagctcgaggaaaag

SEQ ID NO: 57786 - RNA, 19 nt, Synthetic Construct
  source 1..19: mol_type = other RNA
tcagtagctcgaggaaaag

SEQ ID NO: 57787 - RNA, 24 nt, Synthetic Construct
  source 1..24: mol_type = other RNA
cggagaaggttagctcagccaact

SEQ ID NO: 57788 - RNA, 24 nt, Synthetic Construct
  source 1..24: mol_type = other RNA
cggagaaggttagctcagccaact

SEQ ID NO: 57789 - RNA, 18 nt, Synthetic Construct
  source 1..18: mol_type = other RNA
atcccactcctgacacca

SEQ ID NO: 57790 - RNA, 18 nt, Synthetic Construct
  source 1..18: mol_type = other RNA
atcccactcctgacacca

SEQ ID NO: 57791 - RNA, 34 nt, Synthetic Construct; identical to SEQ ID NO: 749
  source 1..34: mol_type = other RNA

SEQ ID NO: 57792 - RNA, 22 nt, Synthetic Construct
  source 1..22: mol_type = other RNA
ttaatgctaatcgtgataggga

SEQ ID NO: 57793 - RNA, 23 nt, Synthetic Construct
  source 1..23: mol_type = other RNA
tgaggggcagagagtgagacttt

SEQ ID NO: 57794 - RNA, 18 nt, Synthetic Construct
  source 1..18: mol_type = other RNA
aagaccctgttgagcttg

SEQ ID NO: 57795 - RNA, 18 nt, Synthetic Construct
  source 1..18: mol_type = other RNA
aagaccctgttgagcttg

SEQ ID NO: 57796 - RNA, 16 nt, Synthetic Construct
  source 1..16: mol_type = other RNA
accgcttttgtcaggg

SEQ ID NO: 57797 - RNA, 22 nt, Synthetic Construct
  source 1..22: mol_type = other RNA
gaagaggacttggaactcgatc

SEQ ID NO: 57798 - RNA, 22 nt, Synthetic Construct
  source 1..22: mol_type = other RNA
gaagaggacttggaactcgatc

SEQ ID NO: 57799 - RNA, 23 nt, Synthetic Construct
  source 1..23: mol_type = other RNA
caaagtgctgttcgtgcaggcag

SEQ ID NO: 57800 - RNA, 28 nt, Synthetic Construct
  source 1..28: mol_type = other RNA
tccctgtggtctagtggttaggattcgg

SEQ ID NO: 57801 - RNA, 28 nt, Synthetic Construct
  source 1..28: mol_type = other RNA
tccctgtggtctagtggttaggattcgg

SEQ ID NO: 57802 - RNA, 22 nt, Synthetic Construct
  source 1..22: mol_type = other RNA
tcctgtgctgagctgccccgag

SEQ ID NO: 57803 - RNA, 22 nt, Synthetic Construct
  source 1..22: mol_type = other RNA
tcctgtgctgagctgccccgag

SEQ ID NO: 57804 - RNA, 21 nt, Synthetic Construct
  source 1..21: mol_type = other RNA
accctgtagatccgaatttgt

SEQ ID NO: 57805 - RNA, 21 nt, Synthetic Construct
  source 1..21: mol_type = other RNA
tgaggtagtagattgtgtagt

SEQ ID NO: 57806 - RNA, 21 nt, Synthetic Construct
  source 1..21: mol_type = other RNA
tgaggtagtagattgtgtagt

SEQ ID NO: 57807 - RNA, 20 nt, Synthetic Construct
  source 1..20: mol_type = other RNA
ttatcagaatctccaggggt

SEQ ID NO: 57808 - RNA, 20 nt, Synthetic Construct
  source 1..20: mol_type = other RNA
ttatcagaatctccaggggt

SEQ ID NO: 57809 - RNA, 22 nt, Synthetic Construct
  source 1..22: mol_type = other RNA
tactagactgaagctccttgag

SEQ ID NO: 57810 - RNA, 23 nt, Synthetic Construct
  source 1..23: mol_type = other RNA
tggtaatatgacgtacttagtgt

SEQ ID NO: 57811 - RNA, 23 nt, Synthetic Construct
  source 1..23: mol_type = other RNA
tggtaatatgacgtacttagtgt

SEQ ID NO: 57812 - RNA, 23 nt, Synthetic Construct
  source 1..23: mol_type = other RNA
agcagcattgcacagggctatga

SEQ ID NO: 57813 - RNA, 23 nt, Synthetic Construct
  source 1..23: mol_type = other RNA
agcagcattgcacagggctatga

SEQ ID NO: 57814 - RNA, 23 nt, Synthetic Construct
  source 1..23: mol_type = other RNA
ctttcagtcggatgtttacagtt

SEQ ID NO: 57815 - RNA, 23 nt, Synthetic Construct
  source 1..23: mol_type = other RNA
ctttcagtcggatgtttacagtt

SEQ ID NO: 57816 - RNA, 23 nt, Synthetic Construct
  source 1..23: mol_type = other RNA
tggaaatacgacgtacttagtgt

SEQ ID NO: 57817 - RNA, 25 nt, Synthetic Construct
  source 1..25: mol_type = other RNA
ttgaggatatgagatcgagacgaca

SEQ ID NO: 57818 - RNA, 25 nt, Synthetic Construct
  source 1..25: mol_type = other RNA
ttgaggatatgagatcgagacgaca

SEQ ID NO: 57819 - RNA, 31 nt, Synthetic Construct; identical to SEQ ID NO: 14087
  source 1..31: mol_type = other RNA

SEQ ID NO: 57820 - RNA, 31 nt, Synthetic Construct; identical to SEQ ID NO: 14087
  source 1..31: mol_type = other RNA

SEQ ID NO: 57821 - RNA, 16 nt, Synthetic Construct
  source 1..16: mol_type = other RNA
ctgcctcagcgtcggt

SEQ ID NO: 57822 - RNA, 16 nt, Synthetic Construct
  source 1..16: mol_type = other RNA
ctgcctcagcgtcggt

SEQ ID NO: 57823 - RNA, 22 nt, Synthetic Construct
  source 1..22: mol_type = other RNA
tcctgtactgggctgccccgag

SEQ ID NO: 57824 - RNA, 22 nt, Synthetic Construct
  source 1..22: mol_type = other RNA
cccagtgttcagactacctgtt

SEQ ID NO: 57825 - RNA, 22 nt, Synthetic Construct
  source 1..22: mol_type = other RNA
cccagtgttcagactacctgtt

SEQ ID NO: 57826 - RNA, 22 nt, Synthetic Construct
  source 1..22: mol_type = other RNA
tgtggtagtagattgtatagtt

SEQ ID NO: 57827 - RNA, 22 nt, Synthetic Construct
  source 1..22: mol_type = other RNA
tgtggtagtagattgtatagtt

SEQ ID NO: 57828 - RNA, 21 nt, Synthetic Construct
  source 1..21: mol_type = other RNA
tgaagtagtaggttgtgtggt

SEQ ID NO: 57829 - RNA, 31 nt, Synthetic Construct; identical to SEQ ID NO: 2442
  source 1..31: mol_type = other RNA

SEQ ID NO: 57830 - RNA, 22 nt, Synthetic Construct
  source 1..22: mol_type = other RNA
ccctgtactgagctgccccgag

SEQ ID NO: 57831 - RNA, 17 nt, Synthetic Construct
  source 1..17: mol_type = other RNA
tcccagaaacccggtcg

SEQ ID NO: 57832 - RNA, 19 nt, Synthetic Construct
  source 1..19: mol_type = other RNA
tggccgtcgtcagctcgtg

SEQ ID NO: 57833 - RNA, 19 nt, Synthetic Construct
  source 1..19: mol_type = other RNA
tggccgtcgtcagctcgtg

SEQ ID NO: 57834 - RNA, 20 nt, Synthetic Construct
  source 1..20: mol_type = other RNA
tgaggaagtaggttgtatag

SEQ ID NO: 57835 - RNA, 22 nt, Synthetic Construct
  source 1..22: mol_type = other RNA
tgaggtagaaggttgtgtggtt

SEQ ID NO: 57836 - RNA, 22 nt, Synthetic Construct
  source 1..22: mol_type = other RNA
tgaggtagtaggttgtgtggtg

SEQ ID NO: 57837 - RNA, 21 nt, Synthetic Construct
  source 1..21: mol_type = other RNA
tgaggtagtagattgtgtagt

SEQ ID NO: 57838 - RNA, 23 nt, Synthetic Construct
  source 1..23: mol_type = other RNA
tggtaatacgacgtacttagtga

SEQ ID NO: 57839 - RNA, 22 nt, Synthetic Construct
  source 1..22: mol_type = other RNA
tgaggtagaaggttgtgtggtt

SEQ ID NO: 57840 - RNA, 37 nt, Synthetic Construct; identical to SEQ ID NO: 2607
  source 1..37: mol_type = other RNA

SEQ ID NO: 57841 - RNA, 37 nt, Synthetic Construct; identical to SEQ ID NO: 2607
  source 1..37: mol_type = other RNA

SEQ ID NO: 57842 - RNA, 22 nt, Synthetic Construct
  source 1..22: mol_type = other RNA
tagcagcacgtaaatattgacg

SEQ ID NO: 57843 - RNA, 23 nt, Synthetic Construct
  source 1..23: mol_type = other RNA
tcggatccgtctgagcttggctt

SEQ ID NO: 57844 - RNA, 23 nt, Synthetic Construct
  source 1..23: mol_type = other RNA
tcggatccgtctgagcttggctt

SEQ ID NO: 57845 - RNA, 22 nt, Synthetic Construct
  source 1..22: mol_type = other RNA
tattgcacttgtcccagcctgt

SEQ ID NO: 57846 - RNA, 22 nt, Synthetic Construct
  source 1..22: mol_type = other RNA
tattgcacttgtcccagcctgt

SEQ ID NO: 57847 - RNA, 21 nt, Synthetic Construct
  source 1..21: mol_type = other RNA
tcctgtactgagctgcaccga

SEQ ID NO: 57848 - RNA, 21 nt, Synthetic Construct
  source 1..21: mol_type = other RNA
tcctgtactgagctgcaccga

SEQ ID NO: 57849 - RNA, 20 nt, Synthetic Construct
  source 1..20: mol_type = other RNA
agaggtagtaggttgtgtgg

SEQ ID NO: 57850 - RNA, 20 nt, Synthetic Construct
  source 1..20: mol_type = other RNA
agaggtagtaggttgtgtgg

SEQ ID NO: 57851 - RNA, 27 nt, Synthetic Construct
  source 1..27: mol_type = other RNA
gcatgggtggttcagtggtagaattct

SEQ ID NO: 57852 - RNA, 21 nt, Synthetic Construct
  source 1..21: mol_type = other RNA
cataattacttttggtacgcg

SEQ ID NO: 57853 - RNA, 18 nt, Synthetic Construct
  source 1..18: mol_type = other RNA
caacggaatcccaaaagc

SEQ ID NO: 57854 - RNA, 18 nt, Synthetic Construct
  source 1..18: mol_type = other RNA
caacggaatcccaaaagc

SEQ ID NO: 57855 - RNA, 37 nt, Synthetic Construct; identical to SEQ ID NO: 5125
  source 1..37: mol_type = other RNA

SEQ ID NO: 57856 - RNA, 37 nt, Synthetic Construct; identical to SEQ ID NO: 5125
  source 1..37: mol_type = other RNA

SEQ ID NO: 57857 - RNA, 27 nt, Synthetic Construct
  source 1..27: mol_type = other RNA
atagtctttgttcgattccgttgagta

SEQ ID NO: 57858 - RNA, 27 nt, Synthetic Construct
  source 1..27: mol_type = other RNA
atagtctttgttcgattccgttgagta

SEQ ID NO: 57859 - RNA, 18 nt, Synthetic Construct
  source 1..18: mol_type = other RNA
ctaatgagactgccggtg

SEQ ID NO: 57860 - RNA, 25 nt, Synthetic Construct
  source 1..25: mol_type = other RNA
caaagtgctgttcgtgcaggtagtt

SEQ ID NO: 57861 - RNA, 23 nt, Synthetic Construct
  source 1..23: mol_type = other RNA
taccctgtagaaccgaatttgtg

SEQ ID NO: 57862 - RNA, 23 nt, Synthetic Construct
  source 1..23: mol_type = other RNA
taccctgtagaaccgaatttgtg

SEQ ID NO: 57863 - RNA, 21 nt, Synthetic Construct
  source 1..21: mol_type = other RNA
cgaggtagtagattgtatagt

SEQ ID NO: 57864 - RNA, 28 nt, Synthetic Construct
  source 1..28: mol_type = other RNA
tgttggttcaagcgtgtagtcgtgctct

SEQ ID NO: 57865 - RNA, 28 nt, Synthetic Construct
  source 1..28: mol_type = other RNA
tgttggttcaagcgtgtagtcgtgctct

SEQ ID NO: 57866 - RNA, 23 nt, Synthetic Construct
  source 1..23: mol_type = other RNA
caaagcgctgttcgtgcaggtag

SEQ ID NO: 57867 - RNA, 20 nt, Synthetic Construct
  source 1..20: mol_type = other RNA
cgcgacctcagatcagacgt

SEQ ID NO: 57868 - RNA, 27 nt, Synthetic Construct
  source 1..27: mol_type = other RNA
ccccccactgctaaatttgactgactt

SEQ ID NO: 57869 - RNA, 27 nt, Synthetic Construct
  source 1..27: mol_type = other RNA
ccccccactgctaaattagactggctt

SEQ ID NO: 57870 - RNA, 16 nt, Synthetic Construct
  source 1..16: mol_type = other RNA
acggcgggagtaacta

SEQ ID NO: 57871 - RNA, 16 nt, Synthetic Construct
  source 1..16: mol_type = other RNA
acggcgggagtaacta

SEQ ID NO: 57872 - RNA, 31 nt, Synthetic Construct; identical to SEQ ID NO: 2310
  source 1..31: mol_type = other RNA

SEQ ID NO: 57873 - RNA, 22 nt, Synthetic Construct
  source 1..22: mol_type = other RNA
ngaggtagtagattgtatagtt

SEQ ID NO: 57874 - RNA, 22 nt, Synthetic Construct
  source 1..22: mol_type = other RNA
ngaggtagtagattgtatagtt

SEQ ID NO: 57875 - RNA, 23 nt, Synthetic Construct
  source 1..23: mol_type = other RNA
caaagtgctgttcatgcaggtag

SEQ ID NO: 57876 - RNA, 24 nt, Synthetic Construct
  source 1..24: mol_type = other RNA
gtctttgttcgattccgttgagta

SEQ ID NO: 57877 - RNA, 24 nt, Synthetic Construct
  source 1..24: mol_type = other RNA
gtctttgttcgattccgttgagta

SEQ ID NO: 57878 - RNA, 22 nt, Synthetic Construct
  source 1..22: mol_type = other RNA
ncgtaccgtgagtaataatgcg

SEQ ID NO: 57879 - RNA, 22 nt, Synthetic Construct
  source 1..22: mol_type = other RNA
ncgtaccgtgagtaataatgcg

SEQ ID NO: 57880 - RNA, 21 nt, Synthetic Construct
  source 1..21: mol_type = other RNA
tgaggtagtgggttgtatagt

SEQ ID NO: 57881 - RNA, 21 nt, Synthetic Construct
  source 1..21: mol_type = other RNA
tgaggtagtgggttgtatagt

SEQ ID NO: 57882 - RNA, 23 nt, Synthetic Construct
  source 1..23: mol_type = other RNA
caaagtgctgatcgtgcaggtag

SEQ ID NO: 57883 - RNA, 23 nt, Synthetic Construct
  source 1..23: mol_type = other RNA
caaagtgctgatcgtgcaggtag

SEQ ID NO: 57884 - RNA, 22 nt, Synthetic Construct
  source 1..22: mol_type = other RNA
tcctgtactgagctgccccgtg

SEQ ID NO: 57885 - RNA, 22 nt, Synthetic Construct
  source 1..22: mol_type = other RNA
tcctgtactgagctgccccgtg

SEQ ID NO: 57886 - RNA, 22 nt, Synthetic Construct
  source 1..22: mol_type = other RNA
cattgcacttgcctcggtctga

SEQ ID NO: 57887 - RNA, 19 nt, Synthetic Construct
  source 1..19: mol_type = other RNA
cttggggttgtaggaccac

SEQ ID NO: 57888 - RNA, 19 nt, Synthetic Construct
  source 1..19: mol_type = other RNA
cttggggttgtaggaccac

SEQ ID NO: 57889 - RNA, 23 nt, Synthetic Construct
  source 1..23: mol_type = other RNA
tcctgtactgagctgccctgaga

SEQ ID NO: 57890 - RNA, 23 nt, Synthetic Construct
  source 1..23: mol_type = other RNA
tcctgtactgagctgccctgaga

SEQ ID NO: 57891 - RNA, 21 nt, Synthetic Construct
  source 1..21: mol_type = other RNA
cccataaagtagaaagcacta

SEQ ID NO: 57892 - RNA, 21 nt, Synthetic Construct
  source 1..21: mol_type = other RNA
cccataaagtagaaagcacta

SEQ ID NO: 57893 - RNA, 16 nt, Synthetic Construct
  source 1..16: mol_type = other RNA
atctacggccatacca

SEQ ID NO: 57894 - RNA, 16 nt, Synthetic Construct
  source 1..16: mol_type = other RNA
atctacggccatacca

SEQ ID NO: 57895 - RNA, 27 nt, Synthetic Construct
  source 1..27: mol_type = other RNA
ccctccactgctaaatttgactggctt

SEQ ID NO: 57896 - RNA, 27 nt, Synthetic Construct
  source 1..27: mol_type = other RNA
ccctccactgctaaatttgactggctt

SEQ ID NO: 57897 - RNA, 21 nt, Synthetic Construct
  source 1..21: mol_type = other RNA
tgtagtgtttcctactttatg

SEQ ID NO: 57898 - RNA, 21 nt, Synthetic Construct
  source 1..21: mol_type = other RNA
tgtagtgtttcctactttatg

SEQ ID NO: 57899 - RNA, 22 nt, Synthetic Construct
  source 1..22: mol_type = other RNA
tatatatatatatgtacgtatg

SEQ ID NO: 57900 - RNA, 22 nt, Synthetic Construct
  source 1..22: mol_type = other RNA
tgaggtagtaggttgtatagct

SEQ ID NO: 57901 - RNA, 20 nt, Synthetic Construct
  source 1..20: mol_type = other RNA
tgaggtagtaggttgtgtgg

SEQ ID NO: 57902 - RNA, 16 nt, Synthetic Construct
  source 1..16: mol_type = other RNA
gtctacggccatacta

SEQ ID NO: 57903 - RNA, 16 nt, Synthetic Construct
  source 1..16: mol_type = other RNA
gtctacggccatacta

SEQ ID NO: 57904 - RNA, 21 nt, Synthetic Construct
  source 1..21: mol_type = other RNA
cggtcccaagggtatggctgt

SEQ ID NO: 57905 - RNA, 20 nt, Synthetic Construct
  source 1..20: mol_type = other RNA
atcacattgccagggatttc

SEQ ID NO: 57906 - RNA, 20 nt, Synthetic Construct
  source 1..20: mol_type = other RNA
atcacattgccagggatttc

SEQ ID NO: 57907 - RNA, 22 nt, Synthetic Construct
  source 1..22: mol_type = other RNA
acagtagtctgcacattggttt

SEQ ID NO: 57908 - RNA, 22 nt, Synthetic Construct
  source 1..22: mol_type = other RNA
cagagttctacagtccgacgat

SEQ ID NO: 57909 - RNA, 22 nt, Synthetic Construct
  source 1..22: mol_type = other RNA
cagagttctacagtccgacgat

SEQ ID NO: 57910 - RNA, 27 nt, Synthetic Construct
  source 1..27: mol_type = other RNA
ccccccactgctaaatttgaccggctt

SEQ ID NO: 57911 - RNA, 27 nt, Synthetic Construct
  source 1..27: mol_type = other RNA
ccccccactgctaaatttgaccggctt

SEQ ID NO: 57912 - RNA, 20 nt, Synthetic Construct
  source 1..20: mol_type = other RNA
tgaggtagaaggttgtgtgg

SEQ ID NO: 57913 - RNA, 27 nt, Synthetic Construct
  source 1..27: mol_type = other RNA
ncccccactgctaaatttgactggctt

SEQ ID NO: 57914 - RNA, 27 nt, Synthetic Construct
  source 1..27: mol_type = other RNA
ncccccactgctaaatttgactggctt

SEQ ID NO: 57915 - RNA, 22 nt, Synthetic Construct
  source 1..22: mol_type = other RNA
ggtagcgaaattccttgtcggg

SEQ ID NO: 57916 - RNA, 17 nt, Synthetic Construct
  source 1..17: mol_type = other RNA
gtgttcggaagattttc

SEQ ID NO: 57917 - RNA, 18 nt, Synthetic Construct
  source 1..18: mol_type = other RNA
aagaccctgttgagcttg

SEQ ID NO: 57918 - RNA, 18 nt, Synthetic Construct
  source 1..18: mol_type = other RNA
aagaccctgttgagcttg

SEQ ID NO: 57919 - RNA, 22 nt, Synthetic Construct
  source 1..22: mol_type = other RNA
tcctgtactgagctgctccgag

SEQ ID NO: 57920 - RNA, 24 nt, Synthetic Construct
  source 1..24: mol_type = other RNA
agcagcattgtacagggctatgag

SEQ ID NO: 57921 - RNA, 21 nt, Synthetic Construct
  source 1..21: mol_type = other RNA
tgaggtaggaggttgtatagt

SEQ ID NO: 57922 - RNA, 22 nt, Synthetic Construct
  source 1..22: mol_type = other RNA
aaaccgttaccattactgagtt

SEQ ID NO: 57923 - RNA, 22 nt, Synthetic Construct
  source 1..22: mol_type = other RNA
aaaccgttaccattactgagtt

SEQ ID NO: 57924 - RNA, 23 nt, Synthetic Construct
  source 1..23: mol_type = other RNA
tgaggggaagagagcgagacttt

SEQ ID NO: 57925 - RNA, 23 nt, Synthetic Construct
  source 1..23: mol_type = other RNA
tgaggggaagagagcgagacttt

SEQ ID NO: 57926 - RNA, 23 nt, Synthetic Construct
  source 1..23: mol_type = other RNA
tcctgtactgagctgccccggga

SEQ ID NO: 57927 - RNA, 23 nt, Synthetic Construct
  source 1..23: mol_type = other RNA
caacggaatcccgaaagcagctg

SEQ ID NO: 57928 - RNA, 15 nt, Synthetic Construct
  source 1..15: mol_type = other RNA
ggagagatggctgag

SEQ ID NO: 57929 - RNA, 15 nt, Synthetic Construct
  source 1..15: mol_type = other RNA
ggagagatggctgag

SEQ ID NO: 57930 - RNA, 24 nt, Synthetic Construct
  source 1..24: mol_type = other RNA
tttccccttggggttgtaggacca

SEQ ID NO: 57931 - RNA, 24 nt, Synthetic Construct
  source 1..24: mol_type = other RNA
tttccccttggggttgtaggacca

SEQ ID NO: 57932 - RNA, 15 nt, Synthetic Construct
  source 1..15: mol_type = other RNA
aaattccttgtcggg

SEQ ID NO: 57933 - RNA, 15 nt, Synthetic Construct
  source 1..15: mol_type = other RNA
aaattccttgtcggg

SEQ ID NO: 57934 - RNA, 16 nt, Synthetic Construct
  source 1..16: mol_type = other RNA
gcagacgaagtgagtg

SEQ ID NO: 57935 - RNA, 16 nt, Synthetic Construct
  source 1..16: mol_type = other RNA
gcagacgaagtgagtg

SEQ ID NO: 57936 - RNA, 22 nt, Synthetic Construct
  source 1..22: mol_type = other RNA
tgaggtagtagattgtgtagtt

SEQ ID NO: 57937 - RNA, 22 nt, Synthetic Construct
  source 1..22: mol_type = other RNA
tgaggtagtagattgtgtagtt

SEQ ID NO: 57938 - RNA, 18 nt, Synthetic Construct
  source 1..18: mol_type = other RNA
atggccgggacagagggc

SEQ ID NO: 57939 - RNA, 23 nt, Synthetic Construct
  source 1..23: mol_type = other RNA
caaagtgctgttcgtgtaggtag

SEQ ID NO: 57940 - RNA, 21 nt, Synthetic Construct
  source 1..21: mol_type = other RNA
tcccgtactgagctgccccga

SEQ ID NO: 57941 - RNA, 15 nt, Synthetic Construct
  source 1..15: mol_type = other RNA
tacagtccgacgatc

SEQ ID NO: 57942 - RNA, 15 nt, Synthetic Construct
  source 1..15: mol_type = other RNA
tacagtccgacgatc

SEQ ID NO: 57943 - RNA, 24 nt, Synthetic Construct
  source 1..24: mol_type = other RNA
cgaatgttgctcggtgaacccctt

SEQ ID NO: 57944 - RNA, 21 nt, Synthetic Construct
  source 1..21: mol_type = other RNA
tgaggtagcagattgtatagt

SEQ ID NO: 57945 - RNA, 21 nt, Synthetic Construct
  source 1..21: mol_type = other RNA
tgaggtagcagattgtatagt

SEQ ID NO: 57946 - RNA, 17 nt, Synthetic Construct
  source 1..17: mol_type = other RNA
ctaatgagactgccggt

SEQ ID NO: 57947 - RNA, 23 nt, Synthetic Construct
  source 1..23: mol_type = other RNA
agcagcattgtacagggctatga

SEQ ID NO: 57948 - RNA, 23 nt, Synthetic Construct
  source 1..23: mol_type = other RNA
agcagcattgtacagggctatga

SEQ ID NO: 57949 - RNA, 23 nt, Synthetic Construct
  source 1..23: mol_type = other RNA
tggtaatacgacgtactttgtgt

SEQ ID NO: 57950 - RNA, 23 nt, Synthetic Construct
  source 1..23: mol_type = other RNA
tggtaatacgacgtactttgtgt

SEQ ID NO: 57951 - RNA, 22 nt, Synthetic Construct
  source 1..22: mol_type = other RNA
acagtagcctgcacattggtta

SEQ ID NO: 57952 - RNA, 36 nt, Synthetic Construct; identical to SEQ ID NO: 744
  source 1..36: mol_type = other RNA

SEQ ID NO: 57953 - RNA, 36 nt, Synthetic Construct; identical to SEQ ID NO: 744
  source 1..36: mol_type = other RNA

SEQ ID NO: 57954 - RNA, 35 nt, Synthetic Construct; identical to SEQ ID NO: 25
  source 1..35: mol_type = other RNA

SEQ ID NO: 57955 - RNA, 23 nt, Synthetic Construct
  source 1..23: mol_type = other RNA
ttcaagtaatccaggataggcta

SEQ ID NO: 57956 - RNA, 23 nt, Synthetic Construct
  source 1..23: mol_type = other RNA
ttcaagtaatccaggataggcta

SEQ ID NO: 57957 - RNA, 24 nt, Synthetic Construct
  source 1..24: mol_type = other RNA
atcacattgccagggatttccaat

SEQ ID NO: 57958 - RNA, 15 nt, Synthetic Construct
  source 1..15: mol_type = other RNA
acctgcatcgagggt

SEQ ID NO: 57959 - RNA, 15 nt, Synthetic Construct
  source 1..15: mol_type = other RNA
acctgcatcgagggt

SEQ ID NO: 57960 - RNA, 23 nt, Synthetic Construct
  source 1..23: mol_type = other RNA
caaagtgttgttcgtgcaggtag

SEQ ID NO: 57961 - RNA, 23 nt, Synthetic Construct
  source 1..23: mol_type = other RNA
caaagtgttgttcgtgcaggtag

SEQ ID NO: 57962 - RNA, 20 nt, Synthetic Construct
  source 1..20: mol_type = other RNA
tagaattctcgcctgccacg

SEQ ID NO: 57963 - RNA, 20 nt, Synthetic Construct
  source 1..20: mol_type = other RNA
tagaattctcgcctgccacg

SEQ ID NO: 57964 - RNA, 23 nt, Synthetic Construct
  source 1..23: mol_type = other RNA
tgtcagtttgccaaataccccaa

SEQ ID NO: 57965 - RNA, 22 nt, Synthetic Construct
  source 1..22: mol_type = other RNA
tgagaactgaattccatgggtc

SEQ ID NO: 57966 - RNA, 22 nt, Synthetic Construct
  source 1..22: mol_type = other RNA
tgagaactgaattccatgggtc

SEQ ID NO: 57967 - RNA, 17 nt, Synthetic Construct
  source 1..17: mol_type = other RNA
gggaacgtgagctgggt

SEQ ID NO: 57968 - RNA, 17 nt, Synthetic Construct
  source 1..17: mol_type = other RNA
gggaacgtgagctgggt

SEQ ID NO: 57969 - RNA, 23 nt, Synthetic Construct
  source 1..23: mol_type = other RNA
tgaggtaggaggttgtatagtta

SEQ ID NO: 57970 - RNA, 22 nt, Synthetic Construct
  source 1..22: mol_type = other RNA
cataaagtagaaagcactacta

SEQ ID NO: 57971 - RNA, 22 nt, Synthetic Construct
  source 1..22: mol_type = other RNA
cataaagtagaaagcactacta

SEQ ID NO: 57972 - RNA, 23 nt, Synthetic Construct
  source 1..23: mol_type = other RNA
tggtagtacgacgtacttagtgt

SEQ ID NO: 57973 - RNA, 23 nt, Synthetic Construct
  source 1..23: mol_type = other RNA
tggtagtacgacgtacttagtgt

SEQ ID NO: 57974 - RNA, 18 nt, Synthetic Construct
  source 1..18: mol_type = other RNA
caacggaatcccaaaagc

SEQ ID NO: 57975 - RNA, 18 nt, Synthetic Construct
  source 1..18: mol_type = other RNA
agcagcattgtacagggc

SEQ ID NO: 57976 - RNA, 18 nt, Synthetic Construct
  source 1..18: mol_type = other RNA
agcagcattgtacagggc

SEQ ID NO: 57977 - RNA, 23 nt, Synthetic Construct
  source 1..23: mol_type = other RNA
caaagtgcagttcgtgcaggtag

SEQ ID NO: 57978 - RNA, 23 nt, Synthetic Construct
  source 1..23: mol_type = other RNA
caaagtgcagttcgtgcaggtag

SEQ ID NO: 57979 - RNA, 24 nt, Synthetic Construct
  source 1..24: mol_type = other RNA
acagtagtctgcacattggttatt

SEQ ID NO: 57980 - RNA, 24 nt, Synthetic Construct
  source 1..24: mol_type = other RNA
acagtagtctgcacattggttatt

SEQ ID NO: 57981 - RNA, 33 nt, Synthetic Construct; identical to SEQ ID NO: 35121
  source 1..33: mol_type = other RNA

SEQ ID NO: 57982 - RNA, 33 nt, Synthetic Construct; identical to SEQ ID NO: 35121
  source 1..33: mol_type = other RNA

SEQ ID NO: 57983 - RNA, 22 nt, Synthetic Construct
  source 1..22: mol_type = other RNA
tcgtactgtgagtaataatgcg

SEQ ID NO: 57984 - RNA, 23 nt, Synthetic Construct
  source 1..23: mol_type = other RNA
taccacagggtagaaccacggac

SEQ ID NO: 57985 - RNA, 23 nt, Synthetic Construct
  source 1..23: mol_type = other RNA
taccacagggtagaaccacggac

SEQ ID NO: 57986 - RNA, 16 nt, Synthetic Construct
  source 1..16: mol_type = other RNA
aggtcatcgtcaggct

SEQ ID NO: 57987 - RNA, 16 nt, Synthetic Construct
  source 1..16: mol_type = other RNA
aggtcatcgtcaggct

SEQ ID NO: 57988 - RNA, 20 nt, Synthetic Construct
  source 1..20: mol_type = other RNA
cacatgcaagtcgaacggta

SEQ ID NO: 57989 - RNA, 22 nt, Synthetic Construct
  source 1..22: mol_type = other RNA
tgaggtagtagcttgtgctgtt

SEQ ID NO: 57990 - RNA, 22 nt, Synthetic Construct
  source 1..22: mol_type = other RNA
tgaggtagtagcttgtgctgtt

SEQ ID NO: 57991 - RNA, 21 nt, Synthetic Construct
  source 1..21: mol_type = other RNA
tgaggtagaagattgtatagt

SEQ ID NO: 57992 - RNA, 21 nt, Synthetic Construct
  source 1..21: mol_type = other RNA
tgaggtagaagattgtatagt

SEQ ID NO: 57993 - RNA, 33 nt, Synthetic Construct; identical to SEQ ID NO: 2638
  source 1..33: mol_type = other RNA

SEQ ID NO: 57994 - RNA, 33 nt, Synthetic Construct; identical to SEQ ID NO: 2638
  source 1..33: mol_type = other RNA

SEQ ID NO: 57995 - RNA, 21 nt, Synthetic Construct
  source 1..21: mol_type = other RNA
ctatacgacctgctgcctttc

SEQ ID NO: 57996 - RNA, 21 nt, Synthetic Construct
  source 1..21: mol_type = other RNA
ctatacgacctgctgcctttc

SEQ ID NO: 57997 - RNA, 23 nt, Synthetic Construct
  source 1..23: mol_type = other RNA
caacggaatcccaaaagcagccg

SEQ ID NO: 57998 - RNA, 23 nt, Synthetic Construct
  source 1..23: mol_type = other RNA
caacggaatcccaaaagcagccg

SEQ ID NO: 57999 - RNA, 21 nt, Synthetic Construct
  source 1..21: mol_type = other RNA
cgtaccgtgagtaatgatgcg

SEQ ID NO: 58000 - RNA, 22 nt, Synthetic Construct
  source 1..22: mol_type = other RNA
tgaggtagtaggttgtgttgtt

SEQ ID NO: 58001 - RNA, 22 nt, Synthetic Construct
  source 1..22: mol_type = other RNA
tgaggtagtaggttgtgttgtt

SEQ ID NO: 58002 - RNA, 23 nt, Synthetic Construct
  source 1..23: mol_type = other RNA
caaagtgctgtacgtgcaggtag

SEQ ID NO: 58003 - RNA, 27 nt, Synthetic Construct
  source 1..27: mol_type = other RNA
cttctcactactgcacttgactagtct

SEQ ID NO: 58004 - RNA, 25 nt, Synthetic Construct
  source 1..25: mol_type = other RNA
ttgaggatatgagatcgagacggca

SEQ ID NO: 58005 - RNA, 22 nt, Synthetic Construct
  source 1..22: mol_type = other RNA
tgaggtggtagtttgtgctgtt

SEQ ID NO: 58006 - RNA, 23 nt, Synthetic Construct
  source 1..23: mol_type = other RNA
cgcgacctcagatcagacgtggc

SEQ ID NO: 58007 - RNA, 23 nt, Synthetic Construct
  source 1..23: mol_type = other RNA
cgcgacctcagatcagacgtggc

SEQ ID NO: 58008 - RNA, 22 nt, Synthetic Construct
  source 1..22: mol_type = other RNA
tggagtgtgacaatggcgtttg

SEQ ID NO: 58009 - RNA, 22 nt, Synthetic Construct
  source 1..22: mol_type = other RNA
tattgcacctgtcccggcctgt

SEQ ID NO: 58010 - RNA, 22 nt, Synthetic Construct
  source 1..22: mol_type = other RNA
tattgcacctgtcccggcctgt

SEQ ID NO: 58011 - RNA, 22 nt, Synthetic Construct
  source 1..22: mol_type = other RNA
tagcagcacgtaaatattagcg

SEQ ID NO: 58012 - RNA, 20 nt, Synthetic Construct
  source 1..20: mol_type = other RNA
gaatcgctagtaatcgcgga

SEQ ID NO: 58013 - RNA, 20 nt, Synthetic Construct
  source 1..20: mol_type = other RNA
gaatcgctagtaatcgcgga

SEQ ID NO: 58014 - RNA, 21 nt, Synthetic Construct
  source 1..21: mol_type = other RNA
tgaggtagtaggtcgtatagt

SEQ ID NO: 58015 - RNA, 20 nt, Synthetic Construct
  source 1..20: mol_type = other RNA
tcgcgccgtcgggcccgggg

SEQ ID NO: 58016 - RNA, 23 nt, Synthetic Construct
  source 1..23: mol_type = other RNA
tctttgttcgattccgttgagta

SEQ ID NO: 58017 - RNA, 21 nt, Synthetic Construct
  source 1..21: mol_type = other RNA
tgaggtagtaggttgcatagt

SEQ ID NO: 58018 - RNA, 21 nt, Synthetic Construct
  source 1..21: mol_type = other RNA
tgaggtagtaggttgcatagt

SEQ ID NO: 58019 - RNA, 22 nt, Synthetic Construct
  source 1..22: mol_type = other RNA
tagcagcacgtaaatatcggcg

SEQ ID NO: 58020 - RNA, 21 nt, Synthetic Construct
  source 1..21: mol_type = other RNA
tgaggtagtagactgtatagt

SEQ ID NO: 58021 - RNA, 23 nt, Synthetic Construct
  source 1..23: mol_type = other RNA
tgaggggcagagagagagacttt

SEQ ID NO: 58022 - RNA, 23 nt, Synthetic Construct
  source 1..23: mol_type = other RNA
cctccctcgggagggcgcgcggg

SEQ ID NO: 58023 - RNA, 23 nt, Synthetic Construct
  source 1..23: mol_type = other RNA
cctccctcgggagggcgcgcggg

SEQ ID NO: 58024 - RNA, 27 nt, Synthetic Construct
  source 1..27: mol_type = other RNA
ccccccactgctaaatttgattggctt

SEQ ID NO: 58025 - RNA, 27 nt, Synthetic Construct
  source 1..27: mol_type = other RNA
ccccccactgctaaatttgattggctt

SEQ ID NO: 58026 - RNA, 22 nt, Synthetic Construct
  source 1..22: mol_type = other RNA
tgtagtgttccctactttatgg

SEQ ID NO: 58027 - RNA, 21 nt, Synthetic Construct
  source 1..21: mol_type = other RNA
cgaggtagtagattgtatagt

SEQ ID NO: 58028 - RNA, 22 nt, Synthetic Construct
  source 1..22: mol_type = other RNA
tgaggtagtagtttgagctgtt

SEQ ID NO: 58029 - RNA, 23 nt, Synthetic Construct
  source 1..23: mol_type = other RNA
caaagtgctgttcgtacaggtag

SEQ ID NO: 58030 - RNA, 23 nt, Synthetic Construct
  source 1..23: mol_type = other RNA
aaaagctgggttgagagggcgaa

SEQ ID NO: 58031 - RNA, 23 nt, Synthetic Construct
  source 1..23: mol_type = other RNA
aaaagctgggttgagagggcgaa

SEQ ID NO: 58032 - RNA, 19 nt, Synthetic Construct
  source 1..19: mol_type = other RNA
tattgcacttgtcccggcc

SEQ ID NO: 58033 - RNA, 19 nt, Synthetic Construct
  source 1..19: mol_type = other RNA
tattgcacttgtcccggcc

SEQ ID NO: 58034 - RNA, 22 nt, Synthetic Construct
  source 1..22: mol_type = other RNA
tgaggtagtaggttgtaaagtt

SEQ ID NO: 58035 - RNA, 22 nt, Synthetic Construct
  source 1..22: mol_type = other RNA
tgaggtagtaggttgtaaagtt

SEQ ID NO: 58036 - RNA, 18 nt, Synthetic Construct
  source 1..18: mol_type = other RNA
tccgacatgcgagggttc

SEQ ID NO: 58037 - RNA, 29 nt, Synthetic Construct
  source 1..29: mol_type = other RNA
cccccccactgctaaatttgactggcttt

SEQ ID NO: 58038 - RNA, 29 nt, Synthetic Construct
  source 1..29: mol_type = other RNA
cccccccactgctaaatttgactggcttt

SEQ ID NO: 58039 - RNA, 23 nt, Synthetic Construct
  source 1..23: mol_type = other RNA
naaagtgctgttcgtgcaggtag

SEQ ID NO: 58040 - RNA, 22 nt, Synthetic Construct
  source 1..22: mol_type = other RNA
aacggaatcccaaaagcagctg

SEQ ID NO: 58041 - RNA, 21 nt, Synthetic Construct
  source 1..21: mol_type = other RNA
tagcagcacgtaatattggcg

SEQ ID NO: 58042 - RNA, 23 nt, Synthetic Construct
  source 1..23: mol_type = other RNA
atcacattgccagggattaccac

SEQ ID NO: 58043 - RNA, 23 nt, Synthetic Construct
  source 1..23: mol_type = other RNA
atcacattgccagggattaccac

SEQ ID NO: 58044 - RNA, 21 nt, Synthetic Construct
  source 1..21: mol_type = other RNA
gtagcgaaattccttgtcggg

SEQ ID NO: 58045 - RNA, 21 nt, Synthetic Construct
  source 1..21: mol_type = other RNA
gtagcgaaattccttgtcggg

SEQ ID NO: 58046 - RNA, 23 nt, Synthetic Construct
  source 1..23: mol_type = other RNA
tggtaatgcgacgtacttagtgt

SEQ ID NO: 58047 - RNA, 23 nt, Synthetic Construct
  source 1..23: mol_type = other RNA
tggtaatgcgacgtacttagtgt

SEQ ID NO: 58048 - RNA, 21 nt, Synthetic Construct
  source 1..21: mol_type = other RNA
cccttggggttgtaggaccac

SEQ ID NO: 58049 - RNA, 21 nt, Synthetic Construct
  source 1..21: mol_type = other RNA
cccttggggttgtaggaccac

SEQ ID NO: 58050 - RNA, 22 nt, Synthetic Construct
  source 1..22: mol_type = other RNA
tgaggtagcaggttgtatagtt

SEQ ID NO: 58051 - RNA, 22 nt, Synthetic Construct
  source 1..22: mol_type = other RNA
acagtagtctgcgcattggtta

SEQ ID NO: 58052 - RNA, 22 nt, Synthetic Construct
  source 1..22: mol_type = other RNA
acagtagtctgcgcattggtta

SEQ ID NO: 58053 - RNA, 23 nt, Synthetic Construct
  source 1..23: mol_type = other RNA
agcagcattgtacagggctatgg

SEQ ID NO: 58054 - RNA, 22 nt, Synthetic Construct
  source 1..22: mol_type = other RNA
tgaggtagtagtttgtggtgtt

SEQ ID NO: 58055 - RNA, 22 nt, Synthetic Construct
  source 1..22: mol_type = other RNA
tgaggtagtagcttgtgctgtt

SEQ ID NO: 58056 - RNA, 22 nt, Synthetic Construct
  source 1..22: mol_type = other RNA
tgaggtagtagcttgtgctgtt

SEQ ID NO: 58057 - RNA, 18 nt, Synthetic Construct
  source 1..18: mol_type = other RNA
ccaaggggtcgtgggttc

SEQ ID NO: 58058 - RNA, 18 nt, Synthetic Construct
  source 1..18: mol_type = other RNA
ccaaggggtcgtgggttc

SEQ ID NO: 58059 - RNA, 21 nt, Synthetic Construct
  source 1..21: mol_type = other RNA
tcctgtactgagctgccctga

SEQ ID NO: 58060 - RNA, 21 nt, Synthetic Construct
  source 1..21: mol_type = other RNA
tcctgtactgagctgccctga

SEQ ID NO: 58061 - RNA, 43 nt, Synthetic Construct; identical to SEQ ID NO: 2315
  source 1..43: mol_type = other RNA

SEQ ID NO: 58062 - RNA, 21 nt, Synthetic Construct
  source 1..21: mol_type = other RNA
cgcatcccctagggcattggt

SEQ ID NO: 58063 - RNA, 21 nt, Synthetic Construct
  source 1..21: mol_type = other RNA
cgcatcccctagggcattggt

SEQ ID NO: 58064 - RNA, 21 nt, Synthetic Construct
  source 1..21: mol_type = other RNA
tgaggggcagagagcgggact

SEQ ID NO: 58065 - RNA, 21 nt, Synthetic Construct
  source 1..21: mol_type = other RNA
tgaggggcagagagcgggact

SEQ ID NO: 58066 - RNA, 22 nt, Synthetic Construct
  source 1..22: mol_type = other RNA
ttcaagtaatccgggataggct

SEQ ID NO: 58067 - RNA, 22 nt, Synthetic Construct
  source 1..22: mol_type = other RNA
ttcaagtaatccgggataggct

SEQ ID NO: 58068 - RNA, 19 nt, Synthetic Construct
  source 1..19: mol_type = other RNA
gggtgcaagcgttaatcgg

SEQ ID NO: 58069 - RNA, 19 nt, Synthetic Construct
  source 1..19: mol_type = other RNA
gggtgcaagcgttaatcgg

SEQ ID NO: 58070 - RNA, 19 nt, Synthetic Construct
  source 1..19: mol_type = other RNA
aacagtcaggatgttggct

SEQ ID NO: 58071 - RNA, 19 nt, Synthetic Construct
  source 1..19: mol_type = other RNA
aacagtcaggatgttggct

SEQ ID NO: 58072 - RNA, 26 nt, Synthetic Construct
  source 1..26: mol_type = other RNA
aaaccgttaccattactgagtttagt

SEQ ID NO: 58073 - RNA, 26 nt, Synthetic Construct
  source 1..26: mol_type = other RNA
aaaccgttaccattactgagtttagt

SEQ ID NO: 58074 - RNA, 17 nt, Synthetic Construct
  source 1..17: mol_type = other RNA
tcccggacgagccccca

SEQ ID NO: 58075 - RNA, 17 nt, Synthetic Construct
  source 1..17: mol_type = other RNA
tcccggacgagccccca

SEQ ID NO: 58076 - RNA, 22 nt, Synthetic Construct
  source 1..22: mol_type = other RNA
tgaggtagtagtttgtgcagtt

SEQ ID NO: 58077 - RNA, 22 nt, Synthetic Construct
  source 1..22: mol_type = other RNA
tagcagcacgcaaatattggcg

SEQ ID NO: 58078 - RNA, 23 nt, Synthetic Construct
  source 1..23: mol_type = other RNA
tgggtttacgttgggagaactta

SEQ ID NO: 58079 - RNA, 17 nt, Synthetic Construct
  source 1..17: mol_type = other RNA
accaaggggtcgtgggt

SEQ ID NO: 58080 - RNA, 17 nt, Synthetic Construct
  source 1..17: mol_type = other RNA
accaaggggtcgtgggt

SEQ ID NO: 58081 - RNA, 25 nt, Synthetic Construct
  source 1..25: mol_type = other RNA
ttgaggatatgagatcgagacggca

SEQ ID NO: 58082 - RNA, 25 nt, Synthetic Construct
  source 1..25: mol_type = other RNA
ttgaggatatgagatcgagacggca

SEQ ID NO: 58083 - RNA, 21 nt, Synthetic Construct
  source 1..21: mol_type = other RNA
tggagtgtgacaatggtgtct

SEQ ID NO: 58084 - RNA, 22 nt, Synthetic Construct
  source 1..22: mol_type = other RNA
tgaggcagtaggttgtatagtt

SEQ ID NO: 58085 - RNA, 22 nt, Synthetic Construct
  source 1..22: mol_type = other RNA
acagtagtctgcacattggtta

SEQ ID NO: 58086 - RNA, 22 nt, Synthetic Construct
  source 1..22: mol_type = other RNA
acagtagtctgcacattggtta

SEQ ID NO: 58087 - RNA, 27 nt, Synthetic Construct
  source 1..27: mol_type = other RNA
gttggttcaagcgtgtagtcgtgctct

SEQ ID NO: 58088 - RNA, 27 nt, Synthetic Construct
  source 1..27: mol_type = other RNA
gttggttcaagcgtgtagtcgtgctct

SEQ ID NO: 58089 - RNA, 22 nt, Synthetic Construct
  source 1..22: mol_type = other RNA
cattgcacttgtctcagtctga

SEQ ID NO: 58090 - RNA, 22 nt, Synthetic Construct
  source 1..22: mol_type = other RNA
cattgcacttgtctcagtctga

SEQ ID NO: 58091 - RNA, 18 nt, Synthetic Construct
  source 1..18: mol_type = other RNA
agcagcattgtacagggc

SEQ ID NO: 58092 - RNA, 18 nt, Synthetic Construct
  source 1..18: mol_type = other RNA
agcagcattgtacagggc

SEQ ID NO: 58093 - RNA, 21 nt, Synthetic Construct
  source 1..21: mol_type = other RNA
tgaggtagtaggtcgtatagt

SEQ ID NO: 58094 - RNA, 21 nt, Synthetic Construct
  source 1..21: mol_type = other RNA
tgaggtagtaggtcgtatagt

SEQ ID NO: 58095 - RNA, 20 nt, Synthetic Construct
  source 1..20: mol_type = other RNA
ccgcagagtacagcttggga

SEQ ID NO: 58096 - RNA, 20 nt, Synthetic Construct
  source 1..20: mol_type = other RNA
ccgcagagtacagcttggga

SEQ ID NO: 58097 - RNA, 22 nt, Synthetic Construct
  source 1..22: mol_type = other RNA
tatcggaacgtgcccagtcgtg

SEQ ID NO: 58098 - RNA, 22 nt, Synthetic Construct
  source 1..22: mol_type = other RNA
tgaggtagtggattgtatagtt

SEQ ID NO: 58099 - RNA, 22 nt, Synthetic Construct
  source 1..22: mol_type = other RNA
tgaggtagtggattgtatagtt

SEQ ID NO: 58100 - RNA, 32 nt, Synthetic Construct; identical to SEQ ID NO: 10937
  source 1..32: mol_type = other RNA

SEQ ID NO: 58101 - RNA, 25 nt, Synthetic Construct
  source 1..25: mol_type = other RNA
ttgaggatgtgagatcgagacgaca

SEQ ID NO: 58102 - RNA, 25 nt, Synthetic Construct
  source 1..25: mol_type = other RNA
ttgaggatgtgagatcgagacgaca

SEQ ID NO: 58103 - RNA, 21 nt, Synthetic Construct
  source 1..21: mol_type = other RNA
ggaggggcagagagcgagact

SEQ ID NO: 58104 - RNA, 23 nt, Synthetic Construct
  source 1..23: mol_type = other RNA
attctaatttctccacgtctttg

SEQ ID NO: 58105 - RNA, 23 nt, Synthetic Construct
  source 1..23: mol_type = other RNA
attctaatttctccacgtctttg

SEQ ID NO: 58106 - RNA, 19 nt, Synthetic Construct
  source 1..19: mol_type = other RNA
atcccactcctgacaccat

SEQ ID NO: 58107 - RNA, 19 nt, Synthetic Construct
  source 1..19: mol_type = other RNA
atcccactcctgacaccat

SEQ ID NO: 58108 - RNA, 22 nt, Synthetic Construct
  source 1..22: mol_type = other RNA
ttcgagtaattcaggataggtt

SEQ ID NO: 58109 - RNA, 22 nt, Synthetic Construct
  source 1..22: mol_type = other RNA
ttcgagtaattcaggataggtt

SEQ ID NO: 58110 - RNA, 21 nt, Synthetic Construct
  source 1..21: mol_type = other RNA
tgaggtagtaggctgtatagt

SEQ ID NO: 58111 - RNA, 21 nt, Synthetic Construct
  source 1..21: mol_type = other RNA
tgaggtagtaggctgtatagt

SEQ ID NO: 58112 - RNA, 21 nt, Synthetic Construct
  source 1..21: mol_type = other RNA
tggagtgtgacaatggcgttt

SEQ ID NO: 58113 - RNA, 22 nt, Synthetic Construct
  source 1..22: mol_type = other RNA
tgaggtagtaggttgtatagct

SEQ ID NO: 58114 - RNA, 23 nt, Synthetic Construct
  source 1..23: mol_type = other RNA
tggtaatacgacgtactaagtgt

SEQ ID NO: 58115 - RNA, 18 nt, Synthetic Construct
  source 1..18: mol_type = other RNA
cgcgacctcagatcagac

SEQ ID NO: 58116 - RNA, 18 nt, Synthetic Construct
  source 1..18: mol_type = other RNA
cgcgacctcagatcagac

SEQ ID NO: 58117 - RNA, 21 nt, Synthetic Construct
  source 1..21: mol_type = other RNA
tcaggctcagtcccctcccga

SEQ ID NO: 58118 - RNA, 21 nt, Synthetic Construct
  source 1..21: mol_type = other RNA
tcaggctcagtcccctcccga

SEQ ID NO: 58119 - RNA, 22 nt, Synthetic Construct
  source 1..22: mol_type = other RNA
acagtagcctgcacattggtta

SEQ ID NO: 58120 - RNA, 23 nt, Synthetic Construct
  source 1..23: mol_type = other RNA
tggaatgtaaagaagtatgtata

SEQ ID NO: 58121 - RNA, 19 nt, Synthetic Construct
  source 1..19: mol_type = other RNA
ccttggggttgtaggacca

SEQ ID NO: 58122 - RNA, 19 nt, Synthetic Construct
  source 1..19: mol_type = other RNA
ccttggggttgtaggacca

SEQ ID NO: 58123 - RNA, 22 nt, Synthetic Construct
  source 1..22: mol_type = other RNA
tgaggtagtaggttgtattgtt

SEQ ID NO: 58124 - RNA, 22 nt, Synthetic Construct
  source 1..22: mol_type = other RNA
cgcatcccctagggcattggtg

SEQ ID NO: 58125 - RNA, 22 nt, Synthetic Construct
  source 1..22: mol_type = other RNA
cgcatcccctagggcattggtg

SEQ ID NO: 58126 - RNA, 17 nt, Synthetic Construct
  source 1..17: mol_type = other RNA
tggccgtcgtcagctcg

SEQ ID NO: 58127 - RNA, 17 nt, Synthetic Construct
  source 1..17: mol_type = other RNA
tggccgtcgtcagctcg

SEQ ID NO: 58128 - RNA, 23 nt, Synthetic Construct
  source 1..23: mol_type = other RNA
tgaggtggtaggttgtgtggttt

SEQ ID NO: 58129 - RNA, 23 nt, Synthetic Construct
  source 1..23: mol_type = other RNA
tgaggtggtaggttgtgtggttt

SEQ ID NO: 58130 - RNA, 27 nt, Synthetic Construct
  source 1..27: mol_type = other RNA
tgaggtagtaggttgtgtggttttttt

SEQ ID NO: 58131 - RNA, 21 nt, Synthetic Construct
  source 1..21: mol_type = other RNA
taactccttaagcaatctcgc

SEQ ID NO: 58132 - RNA, 21 nt, Synthetic Construct
  source 1..21: mol_type = other RNA
taactccttaagcaatctcgc

SEQ ID NO: 58133 - RNA, 22 nt, Synthetic Construct
  source 1..22: mol_type = other RNA
tgacgtagtagtttgtgctgtt

SEQ ID NO: 58134 - RNA, 22 nt, Synthetic Construct
  source 1..22: mol_type = other RNA
tgacgtagtagtttgtgctgtt

SEQ ID NO: 58135 - RNA, 22 nt, Synthetic Construct
  source 1..22: mol_type = other RNA
tattgcacttgtctcggcctgt

SEQ ID NO: 58136 - RNA, 22 nt, Synthetic Construct
  source 1..22: mol_type = other RNA
tattgcacttgtctcggcctgt

SEQ ID NO: 58137 - RNA, 22 nt, Synthetic Construct
  source 1..22: mol_type = other RNA
tgaggtagtagactgtatagtt

SEQ ID NO: 58138 - RNA, 22 nt, Synthetic Construct
  source 1..22: mol_type = other RNA
tgaggtagtagactgtatagtt

SEQ ID NO: 58139 - RNA, 22 nt, Synthetic Construct
  source 1..22: mol_type = other RNA
tcgtaccgagagtaataatgcg

SEQ ID NO: 58140 - RNA, 22 nt, Synthetic Construct
  source 1..22: mol_type = other RNA
tcgtaccgagagtaataatgcg

SEQ ID NO: 58141 - RNA, 16 nt, Synthetic Construct
  source 1..16: mol_type = other RNA
cgactcttagcggtgg

SEQ ID NO: 58142 - RNA, 16 nt, Synthetic Construct
  source 1..16: mol_type = other RNA
cgactcttagcggtgg

SEQ ID NO: 58143 - RNA, 17 nt, Synthetic Construct
  source 1..17: mol_type = other RNA
tagggaacgtgagctgg

SEQ ID NO: 58144 - RNA, 18 nt, Synthetic Construct
  source 1..18: mol_type = other RNA
cctcgcgcgattggagcg

SEQ ID NO: 58145 - RNA, 21 nt, Synthetic Construct
  source 1..21: mol_type = other RNA
tgaggtagtagtttgtgccgt

SEQ ID NO: 58146 - RNA, 21 nt, Synthetic Construct
  source 1..21: mol_type = other RNA
tgaggtagtagtttgtgccgt

SEQ ID NO: 58147 - RNA, 22 nt, Synthetic Construct
  source 1..22: mol_type = other RNA
cgaggtagtagtttgtgctgtt

SEQ ID NO: 58148 - RNA, 27 nt, Synthetic Construct
  source 1..27: mol_type = other RNA
ggggagctaatcccagaaacccggtcg

SEQ ID NO: 58149 - RNA, 23 nt, Synthetic Construct
  source 1..23: mol_type = other RNA
tgaggtggtaggttgtgtggttt

SEQ ID NO: 58150 - RNA, 27 nt, Synthetic Construct
  source 1..27: mol_type = other RNA
ccccccactgctaaatttgattggctt

SEQ ID NO: 58151 - RNA, 27 nt, Synthetic Construct
  source 1..27: mol_type = other RNA
ccccccactgctaaatttgattggctt

SEQ ID NO: 58152 - RNA, 22 nt, Synthetic Construct
  source 1..22: mol_type = other RNA
taaggtagtaggttgtatagtt

SEQ ID NO: 58153 - RNA, 22 nt, Synthetic Construct
  source 1..22: mol_type = other RNA
taaggtagtaggttgtatagtt

SEQ ID NO: 58154 - RNA, 17 nt, Synthetic Construct
  source 1..17: mol_type = other RNA
tcagtagctcgaggaaa

SEQ ID NO: 58155 - RNA, 21 nt, Synthetic Construct
  source 1..21: mol_type = other RNA
aggttccggataagtagagcc

SEQ ID NO: 58156 - RNA, 21 nt, Synthetic Construct
  source 1..21: mol_type = other RNA
aggttccggataagtagagcc

SEQ ID NO: 58157 - RNA, 22 nt, Synthetic Construct
  source 1..22: mol_type = other RNA
cgcatcccctagggcattggtg

SEQ ID NO: 58158 - RNA, 22 nt, Synthetic Construct
  source 1..22: mol_type = other RNA
cgcatcccctagggcattggtg

SEQ ID NO: 58159 - RNA, 22 nt, Synthetic Construct
  source 1..22: mol_type = other RNA
tagcagcacgtacatattggcg

SEQ ID NO: 58160 - RNA, 22 nt, Synthetic Construct
  source 1..22: mol_type = other RNA
tagcagcacgtacatattggcg

SEQ ID NO: 58161 - RNA, 24 nt, Synthetic Construct
  source 1..24: mol_type = other RNA
gtctttgttcgattccgttgagta

SEQ ID NO: 58162 - RNA, 22 nt, Synthetic Construct
  source 1..22: mol_type = other RNA
tgagaaccgaattccatgggtt

SEQ ID NO: 58163 - RNA, 20 nt, Synthetic Construct
  source 1..20: mol_type = other RNA
tcgcgccgtcgggcccgggg

SEQ ID NO: 58164 - RNA, 21 nt, Synthetic Construct
  source 1..21: mol_type = other RNA
tggggtagtaggttgtgtggt

SEQ ID NO: 58165 - RNA, 20 nt, Synthetic Construct
  source 1..20: mol_type = other RNA
tcctgtaccgatcaatagtg

SEQ ID NO: 58166 - RNA, 23 nt, Synthetic Construct
  source 1..23: mol_type = other RNA
tcctgcactgagctgccccgagt

SEQ ID NO: 58167 - RNA, 23 nt, Synthetic Construct
  source 1..23: mol_type = other RNA
tgtgcaaatccatgcaaaactga

SEQ ID NO: 58168 - RNA, 23 nt, Synthetic Construct
  source 1..23: mol_type = other RNA
tgtgcaaatccatgcaaaactga

SEQ ID NO: 58169 - RNA, 21 nt, Synthetic Construct
  source 1..21: mol_type = other RNA
cgcatcccctagggcattggt

SEQ ID NO: 58170 - RNA, 21 nt, Synthetic Construct
  source 1..21: mol_type = other RNA
cgcatcccctagggcattggt

SEQ ID NO: 58171 - RNA, 21 nt, Synthetic Construct
  source 1..21: mol_type = other RNA
tcctgtactgagctgccacga

SEQ ID NO: 58172 - RNA, 21 nt, Synthetic Construct
  source 1..21: mol_type = other RNA
tcctgtactgagctgccacga

SEQ ID NO: 58173 - RNA, 19 nt, Synthetic Construct
  source 1..19: mol_type = other RNA
gggataactggcttgtggc

SEQ ID NO: 58174 - RNA, 19 nt, Synthetic Construct
  source 1..19: mol_type = other RNA
gggataactggcttgtggc

SEQ ID NO: 58175 - RNA, 26 nt, Synthetic Construct
  source 1..26: mol_type = other RNA
cgactcttagcggtggatcactcggc

SEQ ID NO: 58176 - RNA, 26 nt, Synthetic Construct
  source 1..26: mol_type = other RNA
cgactcttagcggtggatcactcggc

SEQ ID NO: 58177 - RNA, 24 nt, Synthetic Construct
  source 1..24: mol_type = other RNA
tgggtaatacgacgtacttagtgt

SEQ ID NO: 58178 - RNA, 22 nt, Synthetic Construct
  source 1..22: mol_type = other RNA
tgaggtagtagtttgtgctgtt

SEQ ID NO: 58179 - RNA, 21 nt, Synthetic Construct
  source 1..21: mol_type = other RNA
ggaggtagtagtttgtgctgt

SEQ ID NO: 58180 - RNA, 23 nt, Synthetic Construct
  source 1..23: mol_type = other RNA
caaagtgctgtccgtgcaggtag

SEQ ID NO: 58181 - RNA, 23 nt, Synthetic Construct
  source 1..23: mol_type = other RNA
caaagtgctgtccgtgcaggtag

SEQ ID NO: 58182 - RNA, 22 nt, Synthetic Construct
  source 1..22: mol_type = other RNA
tgaggtagtaggttgtacagtt

SEQ ID NO: 58183 - RNA, 22 nt, Synthetic Construct
  source 1..22: mol_type = other RNA
tgaggtagtaggttgtacagtt

SEQ ID NO: 58184 - RNA, 22 nt, Synthetic Construct
  source 1..22: mol_type = other RNA
tgaggcagtaggttgtgtggtt

SEQ ID NO: 58185 - RNA, 21 nt, Synthetic Construct
  source 1..21: mol_type = other RNA
ctatacgacctgctgcctttc

SEQ ID NO: 58186 - RNA, 21 nt, Synthetic Construct
  source 1..21: mol_type = other RNA
ctatacgacctgctgcctttc

SEQ ID NO: 58187 - RNA, 16 nt, Synthetic Construct
  source 1..16: mol_type = other RNA
cacaccgcccgtcgct

SEQ ID NO: 58188 - RNA, 16 nt, Synthetic Construct
  source 1..16: mol_type = other RNA
cacaccgcccgtcgct

SEQ ID NO: 58189 - RNA, 24 nt, Synthetic Construct
  source 1..24: mol_type = other RNA
tcctgtactgagctgccccgagat

SEQ ID NO: 58190 - RNA, 22 nt, Synthetic Construct
  source 1..22: mol_type = other RNA
tagcagcacgtaaatgttggcg

SEQ ID NO: 58191 - RNA, 22 nt, Synthetic Construct
  source 1..22: mol_type = other RNA
tagcagcacgtaaatgttggcg

SEQ ID NO: 58192 - RNA, 21 nt, Synthetic Construct
  source 1..21: mol_type = other RNA
attagtgacgcgcatgaatgg

SEQ ID NO: 58193 - RNA, 21 nt, Synthetic Construct
  source 1..21: mol_type = other RNA
attagtgacgcgcatgaatgg

SEQ ID NO: 58194 - RNA, 22 nt, Synthetic Construct
  source 1..22: mol_type = other RNA
nagcagcacgtaaatattggcg

SEQ ID NO: 58195 - RNA, 22 nt, Synthetic Construct
  source 1..22: mol_type = other RNA
acaatgtaggtaagggaagtcg

SEQ ID NO: 58196 - RNA, 22 nt, Synthetic Construct
  source 1..22: mol_type = other RNA
acaatgtaggtaagggaagtcg

SEQ ID NO: 58197 - RNA, 22 nt, Synthetic Construct
  source 1..22: mol_type = other RNA
caacggaatcccaaaagcagct

SEQ ID NO: 58198 - RNA, 22 nt, Synthetic Construct
  source 1..22: mol_type = other RNA
caacggaatcccaaaagcagct

SEQ ID NO: 58199 - RNA, 25 nt, Synthetic Construct
  source 1..25: mol_type = other RNA
aaaccgttaccattactgagtttag

SEQ ID NO: 58200 - RNA, 25 nt, Synthetic Construct
  source 1..25: mol_type = other RNA
aaaccgttaccattactgagtttag

SEQ ID NO: 58201 - RNA, 16 nt, Synthetic Construct
  source 1..16: mol_type = other RNA
ccggaggaaggtgggg

SEQ ID NO: 58202 - RNA, 20 nt, Synthetic Construct
  source 1..20: mol_type = other RNA
tatgtctgctgaccatcacc

SEQ ID NO: 58203 - RNA, 20 nt, Synthetic Construct
  source 1..20: mol_type = other RNA
tatgtctgctgaccatcacc

SEQ ID NO: 58204 - RNA, 22 nt, Synthetic Construct
  source 1..22: mol_type = other RNA
taggtagtttcctgttgttggg

SEQ ID NO: 58205 - RNA, 22 nt, Synthetic Construct
  source 1..22: mol_type = other RNA
taggtagtttcctgttgttggg

SEQ ID NO: 58206 - RNA, 21 nt, Synthetic Construct
  source 1..21: mol_type = other RNA
tgagaactgaattccatgggt

SEQ ID NO: 58207 - RNA, 23 nt, Synthetic Construct
  source 1..23: mol_type = other RNA
caaagcgctgttcgtgcaggtag

SEQ ID NO: 58208 - RNA, 23 nt, Synthetic Construct
  source 1..23: mol_type = other RNA
caaagcgctgttcgtgcaggtag

SEQ ID NO: 58209 - RNA, 34 nt, Synthetic Construct; identical to SEQ ID NO: 1526
  source 1..34: mol_type = other RNA

SEQ ID NO: 58210 - RNA, 23 nt, Synthetic Construct
  source 1..23: mol_type = other RNA
gttctacagtccgacgatcgatc

SEQ ID NO: 58211 - RNA, 23 nt, Synthetic Construct
  source 1..23: mol_type = other RNA
gttctacagtccgacgatcgatc

SEQ ID NO: 58212 - RNA, 22 nt, Synthetic Construct
  source 1..22: mol_type = other RNA
agctcggtctgaggcccctcag

SEQ ID NO: 58213 - RNA, 22 nt, Synthetic Construct
  source 1..22: mol_type = other RNA
agctcggtctgaggcccctcag

SEQ ID NO: 58214 - RNA, 20 nt, Synthetic Construct
  source 1..20: mol_type = other RNA
tgaggtaggaggttgtatag

SEQ ID NO: 58215 - RNA, 20 nt, Synthetic Construct
  source 1..20: mol_type = other RNA
tgaggtaggaggttgtatag

SEQ ID NO: 58216 - RNA, 18 nt, Synthetic Construct
  source 1..18: mol_type = other RNA
tctaatgagactgccggt

SEQ ID NO: 58217 - RNA, 20 nt, Synthetic Construct
  source 1..20: mol_type = other RNA
agcagcattgtacagggcta

SEQ ID NO: 58218 - RNA, 20 nt, Synthetic Construct
  source 1..20: mol_type = other RNA
agcagcattgtacagggcta

SEQ ID NO: 58219 - RNA, 31 nt, Synthetic Construct; identical to SEQ ID NO: 5506
  source 1..31: mol_type = other RNA

SEQ ID NO: 58220 - RNA, 31 nt, Synthetic Construct; identical to SEQ ID NO: 5506
  source 1..31: mol_type = other RNA

SEQ ID NO: 58221 - RNA, 21 nt, Synthetic Construct
  source 1..21: mol_type = other RNA
tccctgtcctccaggagctct

SEQ ID NO: 58222 - RNA, 21 nt, Synthetic Construct
  source 1..21: mol_type = other RNA
gctattgacgaccgtaccgca

SEQ ID NO: 58223 - RNA, 22 nt, Synthetic Construct
  source 1..22: mol_type = other RNA
tgaggtagtagtttgtgcggtt

SEQ ID NO: 58224 - RNA, 24 nt, Synthetic Construct
  source 1..24: mol_type = other RNA
ggtaaacatccccgactggaagct

SEQ ID NO: 58225 - RNA, 24 nt, Synthetic Construct
  source 1..24: mol_type = other RNA
ggtaaacatccccgactggaagct

SEQ ID NO: 58226 - RNA, 32 nt, Synthetic Construct; identical to SEQ ID NO: 4279
  source 1..32: mol_type = other RNA

SEQ ID NO: 58227 - RNA, 32 nt, Synthetic Construct; identical to SEQ ID NO: 4279
  source 1..32: mol_type = other RNA

SEQ ID NO: 58228 - RNA, 22 nt, Synthetic Construct
  source 1..22: mol_type = other RNA
ccccttggggttgtaggaccac

SEQ ID NO: 58229 - RNA, 22 nt, Synthetic Construct
  source 1..22: mol_type = other RNA
ccccttggggttgtaggaccac

SEQ ID NO: 58230 - RNA, 23 nt, Synthetic Construct
  source 1..23: mol_type = other RNA
tgtcagtctgtcaaataccccaa

SEQ ID NO: 58231 - RNA, 23 nt, Synthetic Construct
  source 1..23: mol_type = other RNA
tgtcagtctgtcaaataccccaa

SEQ ID NO: 58232 - RNA, 21 nt, Synthetic Construct
  source 1..21: mol_type = other RNA
tgaggtagtagatcgtatagt

SEQ ID NO: 58233 - RNA, 21 nt, Synthetic Construct
  source 1..21: mol_type = other RNA
tgaggtagtagatcgtatagt

SEQ ID NO: 58234 - RNA, 22 nt, Synthetic Construct
  source 1..22: mol_type = other RNA
tgaggtagaagattgtatagtt

SEQ ID NO: 58235 - RNA, 22 nt, Synthetic Construct
  source 1..22: mol_type = other RNA
tgaggtagaagattgtatagtt

SEQ ID NO: 58236 - RNA, 23 nt, Synthetic Construct
  source 1..23: mol_type = other RNA
ccctgtactgagctgccccgagt

SEQ ID NO: 58237 - RNA, 17 nt, Synthetic Construct
  source 1..17: mol_type = other RNA
cttgaccgctctgacca

SEQ ID NO: 58238 - RNA, 23 nt, Synthetic Construct
  source 1..23: mol_type = other RNA
caaagtgctgttcgcgcaggtag

SEQ ID NO: 58239 - RNA, 23 nt, Synthetic Construct
  source 1..23: mol_type = other RNA
caaagtgctgttcgcgcaggtag

SEQ ID NO: 58240 - RNA, 23 nt, Synthetic Construct
  source 1..23: mol_type = other RNA
cctcgcgcgattggagcggccga

SEQ ID NO: 58241 - RNA, 21 nt, Synthetic Construct
  source 1..21: mol_type = other RNA
ttcggaagaaggggtgcctgg

SEQ ID NO: 58242 - RNA, 21 nt, Synthetic Construct
  source 1..21: mol_type = other RNA
ttcggaagaaggggtgcctgg

SEQ ID NO: 58243 - RNA, 21 nt, Synthetic Construct
  source 1..21: mol_type = other RNA
tggagtgtgacaatggtgtct

SEQ ID NO: 58244 - RNA, 21 nt, Synthetic Construct
  source 1..21: mol_type = other RNA
tggagtgtgacaatggtgtct

SEQ ID NO: 58245 - RNA, 21 nt, Synthetic Construct
  source 1..21: mol_type = other RNA
cgtaccgtgagtaataacgcg

SEQ ID NO: 58246 - RNA, 27 nt, Synthetic Construct
  source 1..27: mol_type = other RNA
gacttaccaaacctatgcaaactccga

SEQ ID NO: 58247 - RNA, 20 nt, Synthetic Construct
  source 1..20: mol_type = other RNA
tggaatgtaaagaagtatgt

SEQ ID NO: 58248 - RNA, 20 nt, Synthetic Construct
  source 1..20: mol_type = other RNA
tggaatgtaaagaagtatgt

SEQ ID NO: 58249 - RNA, 28 nt, Synthetic Construct
  source 1..28: mol_type = other RNA
cccccccactgctaaatttgactggctt

SEQ ID NO: 58250 - RNA, 19 nt, Synthetic Construct
  source 1..19: mol_type = other RNA
ctgatcgagtcgtcctgcg

SEQ ID NO: 58251 - RNA, 19 nt, Synthetic Construct
  source 1..19: mol_type = other RNA
ctgatcgagtcgtcctgcg

SEQ ID NO: 58252 - RNA, 18 nt, Synthetic Construct
  source 1..18: mol_type = other RNA
gctgtgatggccgagtgg

SEQ ID NO: 58253 - RNA, 18 nt, Synthetic Construct
  source 1..18: mol_type = other RNA
gctgtgatggccgagtgg

SEQ ID NO: 58254 - RNA, 23 nt, Synthetic Construct
  source 1..23: mol_type = other RNA
gtaaacatccttgactggaagct

SEQ ID NO: 58255 - RNA, 24 nt, Synthetic Construct
  source 1..24: mol_type = other RNA
tgggtaatacgacgtacttagtgt

SEQ ID NO: 58256 - RNA, 24 nt, Synthetic Construct
  source 1..24: mol_type = other RNA
tgggtaatacgacgtacttagtgt

SEQ ID NO: 58257 - RNA, 20 nt, Synthetic Construct
  source 1..20: mol_type = other RNA
taaggtagtaggttgtgtgg

SEQ ID NO: 58258 - RNA, 20 nt, Synthetic Construct
  source 1..20: mol_type = other RNA
taaggtagtaggttgtgtgg

SEQ ID NO: 58259 - RNA, 20 nt, Synthetic Construct
  source 1..20: mol_type = other RNA
taaggtagtaggttgtatag

SEQ ID NO: 58260 - RNA, 21 nt, Synthetic Construct
  source 1..21: mol_type = other RNA
ggagtatgcagagcaagatca

SEQ ID NO: 58261 - RNA, 22 nt, Synthetic Construct
  source 1..22: mol_type = other RNA
tgaggtagtagtttgtactgtt

SEQ ID NO: 58262 - RNA, 22 nt, Synthetic Construct
  source 1..22: mol_type = other RNA
tgaggtagtagtttgtactgtt

SEQ ID NO: 58263 - RNA, 22 nt, Synthetic Construct
  source 1..22: mol_type = other RNA
acagtagcctgcacattggtta

SEQ ID NO: 58264 - RNA, 21 nt, Synthetic Construct
  source 1..21: mol_type = other RNA
cgtgccgtgagtaataatgcg

SEQ ID NO: 58265 - RNA, 21 nt, Synthetic Construct
  source 1..21: mol_type = other RNA
cgtgccgtgagtaataatgcg

SEQ ID NO: 58266 - RNA, 21 nt, Synthetic Construct
  source 1..21: mol_type = other RNA
tggagtgtgacgatggtgttt

SEQ ID NO: 58267 - RNA, 21 nt, Synthetic Construct
  source 1..21: mol_type = other RNA
cgaggtagtagattgtatagt

SEQ ID NO: 58268 - RNA, 15 nt, Synthetic Construct
  source 1..15: mol_type = other RNA
tcagtagctcgagga

SEQ ID NO: 58269 - RNA, 21 nt, Synthetic Construct
  source 1..21: mol_type = other RNA
tggagtgtgacaacggtgttt

SEQ ID NO: 58270 - RNA, 21 nt, Synthetic Construct
  source 1..21: mol_type = other RNA
tggagtgtgacaacggtgttt

SEQ ID NO: 58271 - RNA, 22 nt, Synthetic Construct
  source 1..22: mol_type = other RNA
tgaggtagtaggttgcatagtt

SEQ ID NO: 58272 - RNA, 22 nt, Synthetic Construct
  source 1..22: mol_type = other RNA
tgaggtagtaggttgcatagtt

SEQ ID NO: 58273 - RNA, 25 nt, Synthetic Construct
  source 1..25: mol_type = other RNA
ggtaaaatagctgagtgaagcattg

SEQ ID NO: 58274 - RNA, 20 nt, Synthetic Construct
  source 1..20: mol_type = other RNA
taaggtagtaggttgtatag

SEQ ID NO: 58275 - RNA, 20 nt, Synthetic Construct
  source 1..20: mol_type = other RNA
taaggtagtaggttgtatag

SEQ ID NO: 58276 - RNA, 23 nt, Synthetic Construct
  source 1..23: mol_type = other RNA
caaagaattctccttttgggctt

SEQ ID NO: 58277 - RNA, 23 nt, Synthetic Construct
  source 1..23: mol_type = other RNA
caaagaattctccttttgggctt

SEQ ID NO: 58278 - RNA, 19 nt, Synthetic Construct
  source 1..19: mol_type = other RNA
tagcttatcagactgatgt

SEQ ID NO: 58279 - RNA, 22 nt, Synthetic Construct
  source 1..22: mol_type = other RNA
gtaaacggcgggagtaactatg

SEQ ID NO: 58280 - RNA, 23 nt, Synthetic Construct
  source 1..23: mol_type = other RNA
gactatagaactttccccctcat

SEQ ID NO: 58281 - RNA, 23 nt, Synthetic Construct
  source 1..23: mol_type = other RNA
gactatagaactttccccctcat

SEQ ID NO: 58282 - RNA, 25 nt, Synthetic Construct
  source 1..25: mol_type = other RNA
gttgaattgtggtctgtggacgtgg

SEQ ID NO: 58283 - RNA, 25 nt, Synthetic Construct
  source 1..25: mol_type = other RNA
gttgaattgtggtctgtggacgtgg

SEQ ID NO: 58284 - RNA, 23 nt, Synthetic Construct
  source 1..23: mol_type = other RNA
agcagcattgtacggggctatga

SEQ ID NO: 58285 - RNA, 23 nt, Synthetic Construct
  source 1..23: mol_type = other RNA
agcagcattgtacggggctatga

SEQ ID NO: 58286 - RNA, 23 nt, Synthetic Construct
  source 1..23: mol_type = other RNA
tcctgtactgagctgccctgaga

SEQ ID NO: 58287 - RNA, 19 nt, Synthetic Construct
  source 1..19: mol_type = other RNA
tctaatgagactgccggtg

SEQ ID NO: 58288 - RNA, 19 nt, Synthetic Construct
  source 1..19: mol_type = other RNA
tctaatgagactgccggtg

SEQ ID NO: 58289 - RNA, 22 nt, Synthetic Construct
  source 1..22: mol_type = other RNA
tcgtaccgtgagtaataatgcg

SEQ ID NO: 58290 - RNA, 22 nt, Synthetic Construct
  source 1..22: mol_type = other RNA
tcgtaccgtgagtaataatgcg

SEQ ID NO: 58291 - RNA, 18 nt, Synthetic Construct
  source 1..18: mol_type = other RNA
atcccactcctgacacca

SEQ ID NO: 58292 - RNA, 18 nt, Synthetic Construct
  source 1..18: mol_type = other RNA
atcccactcctgacacca

SEQ ID NO: 58293 - RNA, 32 nt, Synthetic Construct; identical to SEQ ID NO: 1675
  source 1..32: mol_type = other RNA

SEQ ID NO: 58294 - RNA, 32 nt, Synthetic Construct; identical to SEQ ID NO: 1675
  source 1..32: mol_type = other RNA

SEQ ID NO: 58295 - RNA, 19 nt, Synthetic Construct
  source 1..19: mol_type = other RNA
ctgatcgagtcgtcctgcg

SEQ ID NO: 58296 - RNA, 19 nt, Synthetic Construct
  source 1..19: mol_type = other RNA
ctgatcgagtcgtcctgcg

SEQ ID NO: 58297 - RNA, 26 nt, Synthetic Construct
  source 1..26: mol_type = other RNA
ttaagtgacgatagcctaggagatac

SEQ ID NO: 58298 - RNA, 23 nt, Synthetic Construct
  source 1..23: mol_type = other RNA
tggtaatacgacgtactcagtgt

SEQ ID NO: 58299 - RNA, 23 nt, Synthetic Construct
  source 1..23: mol_type = other RNA
tggtaatacgacgtactcagtgt

SEQ ID NO: 58300 - RNA, 23 nt, Synthetic Construct
  source 1..23: mol_type = other RNA
caacggaaacccaaaagcagctg

SEQ ID NO: 58301 - RNA, 21 nt, Synthetic Construct
  source 1..21: mol_type = other RNA
agaggggcagagagcgagact

SEQ ID NO: 58302 - RNA, 20 nt, Synthetic Construct
  source 1..20: mol_type = other RNA
gagtaggacgttgccaggtt

SEQ ID NO: 58303 - RNA, 20 nt, Synthetic Construct
  source 1..20: mol_type = other RNA
gagtaggacgttgccaggtt

SEQ ID NO: 58304 - RNA, 30 nt, Synthetic Construct; identical to SEQ ID NO: 11302
  source 1..30: mol_type = other RNA

SEQ ID NO: 58305 - RNA, 30 nt, Synthetic Construct; identical to SEQ ID NO: 11302
  source 1..30: mol_type = other RNA

SEQ ID NO: 58306 - RNA, 23 nt, Synthetic Construct
  source 1..23: mol_type = other RNA
tcctgtactgagttgccccgaga

SEQ ID NO: 58307 - RNA, 23 nt, Synthetic Construct
  source 1..23: mol_type = other RNA
tcctgtactgagttgccccgaga

SEQ ID NO: 58308 - RNA, 23 nt, Synthetic Construct
  source 1..23: mol_type = other RNA
tgaggtagtgggttgtgtggttt

SEQ ID NO: 58309 - RNA, 15 nt, Synthetic Construct
  source 1..15: mol_type = other RNA
gctatgggatttgtt

SEQ ID NO: 58310 - RNA, 15 nt, Synthetic Construct
  source 1..15: mol_type = other RNA
gctatgggatttgtt

SEQ ID NO: 58311 - RNA, 21 nt, Synthetic Construct
  source 1..21: mol_type = other RNA
taaggtagtaggttgtatagt

SEQ ID NO: 58312 - RNA, 21 nt, Synthetic Construct
  source 1..21: mol_type = other RNA
taaggtagtaggttgtatagt

SEQ ID NO: 58313 - RNA, 22 nt, Synthetic Construct
  source 1..22: mol_type = other RNA
tgaggtagtagtttgtgctgct

SEQ ID NO: 58314 - RNA, 18 nt, Synthetic Construct
  source 1..18: mol_type = other RNA
atcccactcctgacacca

SEQ ID NO: 58315 - RNA, 18 nt, Synthetic Construct
  source 1..18: mol_type = other RNA
atcccactcctgacacca

SEQ ID NO: 58316 - RNA, 21 nt, Synthetic Construct
  source 1..21: mol_type = other RNA
tggagtgtgacaatggtgttc

SEQ ID NO: 58317 - RNA, 17 nt, Synthetic Construct
  source 1..17: mol_type = other RNA
tggccgtcgtcagctcg

SEQ ID NO: 58318 - RNA, 17 nt, Synthetic Construct
  source 1..17: mol_type = other RNA
tggccgtcgtcagctcg

SEQ ID NO: 58319 - RNA, 22 nt, Synthetic Construct
  source 1..22: mol_type = other RNA
tgaggtagaaggttgtgtggtt

SEQ ID NO: 58320 - RNA, 22 nt, Synthetic Construct
  source 1..22: mol_type = other RNA
tgaggtagaaggttgtgtggtt

SEQ ID NO: 58321 - RNA, 21 nt, Synthetic Construct
  source 1..21: mol_type = other RNA
tggagtgtgacaatggtgtta

SEQ ID NO: 58322 - RNA, 21 nt, Synthetic Construct
  source 1..21: mol_type = other RNA
tggagtgtgacaatggtgtta

SEQ ID NO: 58323 - RNA, 22 nt, Synthetic Construct
  source 1..22: mol_type = other RNA
tgaggtagtgggttgtatagtt

SEQ ID NO: 58324 - RNA, 28 nt, Synthetic Construct
  source 1..28: mol_type = other RNA
ccccccaccgctaaatttgactggcttt

SEQ ID NO: 58325 - RNA, 28 nt, Synthetic Construct
  source 1..28: mol_type = other RNA
ccccccaccgctaaatttgactggcttt

SEQ ID NO: 58326 - RNA, 22 nt, Synthetic Construct
  source 1..22: mol_type = other RNA
taaatccttaagcgaatctcgc

SEQ ID NO: 58327 - RNA, 22 nt, Synthetic Construct
  source 1..22: mol_type = other RNA
taaatccttaagcgaatctcgc

SEQ ID NO: 58328 - RNA, 20 nt, Synthetic Construct
  source 1..20: mol_type = other RNA
cgaggtagtaggttgtatag

SEQ ID NO: 58329 - RNA, 20 nt, Synthetic Construct
  source 1..20: mol_type = other RNA
cgaggtagtaggttgtatag

SEQ ID NO: 58330 - RNA, 23 nt, Synthetic Construct
  source 1..23: mol_type = other RNA
tgacctatgaattgacagccaga

SEQ ID NO: 58331 - RNA, 23 nt, Synthetic Construct
  source 1..23: mol_type = other RNA
tgacctatgaattgacagccaga

SEQ ID NO: 58332 - RNA, 25 nt, Synthetic Construct
  source 1..25: mol_type = other RNA
ttcaagtaatccaggataggctttt

SEQ ID NO: 58333 - RNA, 25 nt, Synthetic Construct
  source 1..25: mol_type = other RNA
ttcaagtaatccaggataggctttt

SEQ ID NO: 58334 - RNA, 26 nt, Synthetic Construct
  source 1..26: mol_type = other RNA
gaggaacactagtggcgtaggcgaga

SEQ ID NO: 58335 - RNA, 26 nt, Synthetic Construct
  source 1..26: mol_type = other RNA
gaggaacactagtggcgtaggcgaga

SEQ ID NO: 58336 - RNA, 23 nt, Synthetic Construct
  source 1..23: mol_type = other RNA
tgggtttacgttgggagaactta

SEQ ID NO: 58337 - RNA, 23 nt, Synthetic Construct
  source 1..23: mol_type = other RNA
agaggtagtaggttgtgtggttt

SEQ ID NO: 58338 - RNA, 21 nt, Synthetic Construct
  source 1..21: mol_type = other RNA
cgaggtagtaggttgtgtggt

SEQ ID NO: 58339 - RNA, 22 nt, Synthetic Construct
  source 1..22: mol_type = other RNA
tgaggtagtaggttgtagagtt

SEQ ID NO: 58340 - RNA, 22 nt, Synthetic Construct
  source 1..22: mol_type = other RNA
tgaggtagtaggttgtagagtt

SEQ ID NO: 58341 - RNA, 28 nt, Synthetic Construct
  source 1..28: mol_type = other RNA
gcatgggtggttcagtggtagaattctc

SEQ ID NO: 58342 - RNA, 22 nt, Synthetic Construct
  source 1..22: mol_type = other RNA
cgaggtagtaggttgtatagtt

SEQ ID NO: 58343 - RNA, 22 nt, Synthetic Construct
  source 1..22: mol_type = other RNA
cgaggtagtaggttgtatagtt

SEQ ID NO: 58344 - RNA, 22 nt, Synthetic Construct
  source 1..22: mol_type = other RNA
tgtagtgtctcctactttatgg

SEQ ID NO: 58345 - RNA, 22 nt, Synthetic Construct
  source 1..22: mol_type = other RNA
tgaggaagtaggttgtatagtt

SEQ ID NO: 58346 - RNA, 22 nt, Synthetic Construct
  source 1..22: mol_type = other RNA
tgaggaagtaggttgtatagtt

SEQ ID NO: 58347 - RNA, 22 nt, Synthetic Construct
  source 1..22: mol_type = other RNA
ggtcggcccacggccctggcgg

SEQ ID NO: 58348 - RNA, 22 nt, Synthetic Construct
  source 1..22: mol_type = other RNA
ggtcggcccacggccctggcgg

SEQ ID NO: 58349 - RNA, 25 nt, Synthetic Construct
  source 1..25: mol_type = other RNA
tattgcacttgtcccggcctgtttt

SEQ ID NO: 58350 - RNA, 25 nt, Synthetic Construct
  source 1..25: mol_type = other RNA
tattgcacttgtcccggcctgtttt

SEQ ID NO: 58351 - RNA, 20 nt, Synthetic Construct
  source 1..20: mol_type = other RNA
tgaggtagtaagttgtattg

SEQ ID NO: 58352 - RNA, 17 nt, Synthetic Construct
  source 1..17: mol_type = other RNA
cgactcttagcggtgga

SEQ ID NO: 58353 - RNA, 17 nt, Synthetic Construct
  source 1..17: mol_type = other RNA
cgactcttagcggtgga

SEQ ID NO: 58354 - RNA, 22 nt, Synthetic Construct
  source 1..22: mol_type = other RNA
caaagaattctccttttgggct

SEQ ID NO: 58355 - RNA, 22 nt, Synthetic Construct
  source 1..22: mol_type = other RNA
cgactggtaactgggatgaagt

SEQ ID NO: 58356 - RNA, 22 nt, Synthetic Construct
  source 1..22: mol_type = other RNA
cgactggtaactgggatgaagt

SEQ ID NO: 58357 - RNA, 20 nt, Synthetic Construct
  source 1..20: mol_type = other RNA
agaggtagtaggttgtgtgg

SEQ ID NO: 58358 - RNA, 19 nt, Synthetic Construct
  source 1..19: mol_type = other RNA
cctgtaccgatcaatagtg

SEQ ID NO: 58359 - RNA, 19 nt, Synthetic Construct
  source 1..19: mol_type = other RNA
cctgtaccgatcaatagtg

SEQ ID NO: 58360 - RNA, 35 nt, Synthetic Construct; identical to SEQ ID NO: 2402
  source 1..35: mol_type = other RNA

SEQ ID NO: 58361 - RNA, 35 nt, Synthetic Construct; identical to SEQ ID NO: 2402
  source 1..35: mol_type = other RNA

SEQ ID NO: 58362 - RNA, 21 nt, Synthetic Construct
  source 1..21: mol_type = other RNA
tggagtgtggcaatggtgttt

SEQ ID NO: 58363 - RNA, 21 nt, Synthetic Construct
  source 1..21: mol_type = other RNA
tggagtgtggcaatggtgttt

SEQ ID NO: 58364 - RNA, 37 nt, Synthetic Construct; identical to SEQ ID NO: 7503
  source 1..37: mol_type = other RNA

SEQ ID NO: 58365 - RNA, 37 nt, Synthetic Construct; identical to SEQ ID NO: 7503
  source 1..37: mol_type = other RNA

SEQ ID NO: 58366 - RNA, 22 nt, Synthetic Construct
  source 1..22: mol_type = other RNA
ccccttggggttgtaggaccac

SEQ ID NO: 58367 - RNA, 22 nt, Synthetic Construct
  source 1..22: mol_type = other RNA
ccccttggggttgtaggaccac

SEQ ID NO: 58368 - RNA, 24 nt, Synthetic Construct
  source 1..24: mol_type = other RNA
tgaggtagtaggttgtgtggttaa

SEQ ID NO: 58369 - RNA, 24 nt, Synthetic Construct
  source 1..24: mol_type = other RNA
tgaggtagtaggttgtgtggttaa

SEQ ID NO: 58370 - RNA, 43 nt, Synthetic Construct; identical to SEQ ID NO: 727
  source 1..43: mol_type = other RNA

SEQ ID NO: 58371 - RNA, 19 nt, Synthetic Construct
  source 1..19: mol_type = other RNA
gagaaagctcacaagaact

SEQ ID NO: 58372 - RNA, 19 nt, Synthetic Construct
  source 1..19: mol_type = other RNA
gagaaagctcacaagaact

SEQ ID NO: 58373 - RNA, 21 nt, Synthetic Construct
  source 1..21: mol_type = other RNA
gtagcgaaattccttgtcggg

SEQ ID NO: 58374 - RNA, 42 nt, Synthetic Construct; identical to SEQ ID NO: 8009
  source 1..42: mol_type = other RNA

SEQ ID NO: 58375 - RNA, 27 nt, Synthetic Construct
  source 1..27: mol_type = other RNA
ccccccactgctaaatttgactggctc

SEQ ID NO: 58376 - RNA, 27 nt, Synthetic Construct
  source 1..27: mol_type = other RNA
ccccccactgctaaatttgactggctc

SEQ ID NO: 58377 - RNA, 22 nt, Synthetic Construct
  source 1..22: mol_type = other RNA
tcctatactgagctgccccgag

SEQ ID NO: 58378 - RNA, 23 nt, Synthetic Construct
  source 1..23: mol_type = other RNA
caaagtgttgttcgtgcaggtag

SEQ ID NO: 58379 - RNA, 23 nt, Synthetic Construct
  source 1..23: mol_type = other RNA
caaagtgttgttcgtgcaggtag

SEQ ID NO: 58380 - RNA, 25 nt, Synthetic Construct
  source 1..25: mol_type = other RNA
ggtaaaatcgctgagtgaagcattg

SEQ ID NO: 58381 - RNA, 25 nt, Synthetic Construct
  source 1..25: mol_type = other RNA
ggtaaaatcgctgagtgaagcattg

SEQ ID NO: 58382 - RNA, 16 nt, Synthetic Construct
  source 1..16: mol_type = other RNA
gcagacgaagtgagtg

SEQ ID NO: 58383 - RNA, 16 nt, Synthetic Construct
  source 1..16: mol_type = other RNA
gcagacgaagtgagtg

SEQ ID NO: 58384 - RNA, 23 nt, Synthetic Construct
  source 1..23: mol_type = other RNA
ttccccttggggttgtaggacca

SEQ ID NO: 58385 - RNA, 22 nt, Synthetic Construct
  source 1..22: mol_type = other RNA
taaccccttaagcgaatctcgc

SEQ ID NO: 58386 - RNA, 22 nt, Synthetic Construct
  source 1..22: mol_type = other RNA
taaccccttaagcgaatctcgc

SEQ ID NO: 58387 - RNA, 21 nt, Synthetic Construct
  source 1..21: mol_type = other RNA
gggagtgtgacaatggtgttt

SEQ ID NO: 58388 - RNA, 21 nt, Synthetic Construct
  source 1..21: mol_type = other RNA
gggagtgtgacaatggtgttt

SEQ ID NO: 58389 - RNA, 39 nt, Synthetic Construct; identical to SEQ ID NO: 2398
  source 1..39: mol_type = other RNA

SEQ ID NO: 58390 - RNA, 23 nt, Synthetic Construct
  source 1..23: mol_type = other RNA
ggcagcattgtacagggctatga

SEQ ID NO: 58391 - RNA, 23 nt, Synthetic Construct
  source 1..23: mol_type = other RNA
ggcagcattgtacagggctatga

SEQ ID NO: 58392 - RNA, 21 nt, Synthetic Construct
  source 1..21: mol_type = other RNA
tgaggtagtaggttgcatagt

SEQ ID NO: 58393 - RNA, 21 nt, Synthetic Construct
  source 1..21: mol_type = other RNA
tgaggtagtaggttgcatagt

SEQ ID NO: 58394 - RNA, 22 nt, Synthetic Construct
  source 1..22: mol_type = other RNA
tagcagcacgtaaatatcggcg

SEQ ID NO: 58395 - RNA, 22 nt, Synthetic Construct
  source 1..22: mol_type = other RNA
tagcagcacgtaaatatcggcg

SEQ ID NO: 58396 - RNA, 22 nt, Synthetic Construct
  source 1..22: mol_type = other RNA
tggctcagttcagcaggaacag

SEQ ID NO: 58397 - RNA, 22 nt, Synthetic Construct
  source 1..22: mol_type = other RNA
ccctgtactgagctgccccgag

SEQ ID NO: 58398 - RNA, 22 nt, Synthetic Construct
  source 1..22: mol_type = other RNA
tgaggtagtagattgtatggtt

SEQ ID NO: 58399 - RNA, 22 nt, Synthetic Construct
  source 1..22: mol_type = other RNA
tgaggtagtagattgtatggtt

SEQ ID NO: 58400 - RNA, 23 nt, Synthetic Construct
  source 1..23: mol_type = other RNA
caacgggatcccaaaagcagctg

SEQ ID NO: 58401 - RNA, 23 nt, Synthetic Construct
  source 1..23: mol_type = other RNA
caacgggatcccaaaagcagctg

SEQ ID NO: 58402 - RNA, 22 nt, Synthetic Construct
  source 1..22: mol_type = other RNA
ggaggtagtaggttgtgtggtt

SEQ ID NO: 58403 - RNA, 22 nt, Synthetic Construct
  source 1..22: mol_type = other RNA
ggaggtagtaggttgtgtggtt

SEQ ID NO: 58404 - RNA, 32 nt, Synthetic Construct; identical to SEQ ID NO: 770
  source 1..32: mol_type = other RNA

SEQ ID NO: 58405 - RNA, 32 nt, Synthetic Construct; identical to SEQ ID NO: 770
  source 1..32: mol_type = other RNA

SEQ ID NO: 58406 - RNA, 18 nt, Synthetic Construct
  source 1..18: mol_type = other RNA
atcccactcctgacacca

SEQ ID NO: 58407 - RNA, 22 nt, Synthetic Construct
  source 1..22: mol_type = other RNA
tcctgtactgggctgccccgag

SEQ ID NO: 58408 - RNA, 20 nt, Synthetic Construct
  source 1..20: mol_type = other RNA
gtgccgaagctgtgggattg

SEQ ID NO: 58409 - RNA, 37 nt, Synthetic Construct; identical to SEQ ID NO: 2365
  source 1..37: mol_type = other RNA

SEQ ID NO: 58410 - RNA, 16 nt, Synthetic Construct
  source 1..16: mol_type = other RNA
tcgtgacgatagtgca

SEQ ID NO: 58411 - RNA, 22 nt, Synthetic Construct
  source 1..22: mol_type = other RNA
tgaggtagtaggttgcatagtt

SEQ ID NO: 58412 - RNA, 21 nt, Synthetic Construct
  source 1..21: mol_type = other RNA
tagcagcacgtaatattggcg

SEQ ID NO: 58413 - RNA, 21 nt, Synthetic Construct
  source 1..21: mol_type = other RNA
tagcagcacgtaatattggcg

SEQ ID NO: 58414 - RNA, 22 nt, Synthetic Construct
  source 1..22: mol_type = other RNA
tgaggtagtagtttgtgctggt

SEQ ID NO: 58415 - RNA, 22 nt, Synthetic Construct
  source 1..22: mol_type = other RNA
tgaggtagtagtttgtgctggt

SEQ ID NO: 58416 - RNA, 23 nt, Synthetic Construct
  source 1..23: mol_type = other RNA
tcttggagtaggtcattgggtga

SEQ ID NO: 58417 - RNA, 23 nt, Synthetic Construct
  source 1..23: mol_type = other RNA
tcttggagtaggtcattgggtga

SEQ ID NO: 58418 - RNA, 22 nt, Synthetic Construct
  source 1..22: mol_type = other RNA
tcgtaccgtgagtaataacgcg

SEQ ID NO: 58419 - RNA, 15 nt, Synthetic Construct
  source 1..15: mol_type = other RNA
tagagtagggcggga

SEQ ID NO: 58420 - RNA, 19 nt, Synthetic Construct
  source 1..19: mol_type = other RNA
cgcctgtctgagcgtcgct

SEQ ID NO: 58421 - RNA, 24 nt, Synthetic Construct
  source 1..24: mol_type = other RNA
tgaggtagtaggttgtgtggttgt

SEQ ID NO: 58422 - RNA, 20 nt, Synthetic Construct
  source 1..20: mol_type = other RNA
ggggatgtagctcagatggt

SEQ ID NO: 58423 - RNA, 20 nt, Synthetic Construct
  source 1..20: mol_type = other RNA
ggggatgtagctcagatggt

SEQ ID NO: 58424 - RNA, 22 nt, Synthetic Construct
  source 1..22: mol_type = other RNA
tagcagcacgtaaatattgacg

SEQ ID NO: 58425 - RNA, 22 nt, Synthetic Construct
  source 1..22: mol_type = other RNA
tagcagcacgtaaatattgacg

SEQ ID NO: 58426 - RNA, 37 nt, Synthetic Construct; identical to SEQ ID NO: 2607
  source 1..37: mol_type = other RNA

SEQ ID NO: 58427 - RNA, 22 nt, Synthetic Construct
  source 1..22: mol_type = other RNA
tgaggtagtaggttgtatagat

SEQ ID NO: 58428 - RNA, 23 nt, Synthetic Construct
  source 1..23: mol_type = other RNA
atgtcccacccccactcctgtta

SEQ ID NO: 58429 - RNA, 23 nt, Synthetic Construct
  source 1..23: mol_type = other RNA
atgtcccacccccactcctgtta

SEQ ID NO: 58430 - RNA, 37 nt, Synthetic Construct; identical to SEQ ID NO: 2447
  source 1..37: mol_type = other RNA

SEQ ID NO: 58431 - RNA, 22 nt, Synthetic Construct
  source 1..22: mol_type = other RNA
tcgtaccgtgagtagtaatgcg

SEQ ID NO: 58432 - RNA, 22 nt, Synthetic Construct
  source 1..22: mol_type = other RNA
tcgtaccgtgagtagtaatgcg

SEQ ID NO: 58433 - RNA, 23 nt, Synthetic Construct
  source 1..23: mol_type = other RNA
tcctgaactgagctgccccgaga

SEQ ID NO: 58434 - RNA, 23 nt, Synthetic Construct
  source 1..23: mol_type = other RNA
tcctgaactgagctgccccgaga

SEQ ID NO: 58435 - RNA, 21 nt, Synthetic Construct
  source 1..21: mol_type = other RNA
cgaggtagtagattgtatagt

SEQ ID NO: 58436 - RNA, 22 nt, Synthetic Construct
  source 1..22: mol_type = other RNA
tgaggtagtagattgtatagtc

SEQ ID NO: 58437 - RNA, 22 nt, Synthetic Construct
  source 1..22: mol_type = other RNA
tgaggtagtaggttgtatggtt

SEQ ID NO: 58438 - RNA, 20 nt, Synthetic Construct
  source 1..20: mol_type = other RNA
actgatcgagtcgtcctgcg

SEQ ID NO: 58439 - RNA, 20 nt, Synthetic Construct
  source 1..20: mol_type = other RNA
actgatcgagtcgtcctgcg

SEQ ID NO: 58440 - RNA, 23 nt, Synthetic Construct
  source 1..23: mol_type = other RNA
tggtaatacggcgtacttagtgt

SEQ ID NO: 58441 - RNA, 21 nt, Synthetic Construct
  source 1..21: mol_type = other RNA
tgaggtagtaggttgtgtggc

SEQ ID NO: 58442 - RNA, 19 nt, Synthetic Construct
  source 1..19: mol_type = other RNA
cacatgcaagtcgaacggt

SEQ ID NO: 58443 - RNA, 19 nt, Synthetic Construct
  source 1..19: mol_type = other RNA
cacatgcaagtcgaacggt

SEQ ID NO: 58444 - RNA, 18 nt, Synthetic Construct
  source 1..18: mol_type = other RNA
gttcgattccggagaggg

SEQ ID NO: 58445 - RNA, 18 nt, Synthetic Construct
  source 1..18: mol_type = other RNA
gttcgattccggagaggg

SEQ ID NO: 58446 - RNA, 21 nt, Synthetic Construct
  source 1..21: mol_type = other RNA
gttggttcaagcgtgtagtcg

SEQ ID NO: 58447 - RNA, 21 nt, Synthetic Construct
  source 1..21: mol_type = other RNA
gttggttcaagcgtgtagtcg

SEQ ID NO: 58448 - RNA, 22 nt, Synthetic Construct
  source 1..22: mol_type = other RNA
actggacttggagtcagaagga

SEQ ID NO: 58449 - RNA, 21 nt, Synthetic Construct
  source 1..21: mol_type = other RNA
tgagatagtaggttgtgtggt

SEQ ID NO: 58450 - RNA, 23 nt, Synthetic Construct
  source 1..23: mol_type = other RNA
tcccgtactgagctgccccgaga

SEQ ID NO: 58451 - RNA, 20 nt, Synthetic Construct
  source 1..20: mol_type = other RNA
tgaggtagtgggttgtgtgg

SEQ ID NO: 58452 - RNA, 21 nt, Synthetic Construct
  source 1..21: mol_type = other RNA
tggggtagtagattgtatagt

SEQ ID NO: 58453 - RNA, 23 nt, Synthetic Construct
  source 1..23: mol_type = other RNA
caaagtgttgttcgtgcaggtag

SEQ ID NO: 58454 - RNA, 35 nt, Synthetic Construct; identical to SEQ ID NO: 14082
  source 1..35: mol_type = other RNA

SEQ ID NO: 58455 - RNA, 35 nt, Synthetic Construct; identical to SEQ ID NO: 14082
  source 1..35: mol_type = other RNA

SEQ ID NO: 58456 - RNA, 22 nt, Synthetic Construct
  source 1..22: mol_type = other RNA
ttctgtactgagctgccccgag

SEQ ID NO: 58457 - RNA, 22 nt, Synthetic Construct
  source 1..22: mol_type = other RNA
ttctgtactgagctgccccgag

SEQ ID NO: 58458 - RNA, 22 nt, Synthetic Construct
  source 1..22: mol_type = other RNA
cgttgcacttgtctcggtctga

SEQ ID NO: 58459 - RNA, 19 nt, Synthetic Construct
  source 1..19: mol_type = other RNA
gctattgacgaccgtaccg

SEQ ID NO: 58460 - RNA, 21 nt, Synthetic Construct
  source 1..21: mol_type = other RNA
tgaggtagtaggttgtacagt

SEQ ID NO: 58461 - RNA, 24 nt, Synthetic Construct
  source 1..24: mol_type = other RNA
tgggtaatacgacgtacttagtgt

SEQ ID NO: 58462 - RNA, 22 nt, Synthetic Construct
  source 1..22: mol_type = other RNA
cattgcactagtctcggtctga

SEQ ID NO: 58463 - RNA, 22 nt, Synthetic Construct
  source 1..22: mol_type = other RNA
cattgcactagtctcggtctga

SEQ ID NO: 58464 - RNA, 22 nt, Synthetic Construct
  source 1..22: mol_type = other RNA
tactgcacttgtcccggcctgt

SEQ ID NO: 58465 - RNA, 22 nt, Synthetic Construct
  source 1..22: mol_type = other RNA
tactgcacttgtcccggcctgt

SEQ ID NO: 58466 - RNA, 22 nt, Synthetic Construct
  source 1..22: mol_type = other RNA
tcgtaccgtgggtaataatgcg

SEQ ID NO: 58467 - RNA, 20 nt, Synthetic Construct
  source 1..20: mol_type = other RNA
gtaccgtgagtaataatgcg

SEQ ID NO: 58468 - RNA, 21 nt, Synthetic Construct
  source 1..21: mol_type = other RNA
gtagtgtttcctactttatgg

SEQ ID NO: 58469 - RNA, 21 nt, Synthetic Construct
  source 1..21: mol_type = other RNA
gtagtgtttcctactttatgg

SEQ ID NO: 58470 - RNA, 26 nt, Synthetic Construct
  source 1..26: mol_type = other RNA
aaaagctgggttgagagggcgaattt

SEQ ID NO: 58471 - RNA, 26 nt, Synthetic Construct
  source 1..26: mol_type = other RNA
aaaagctgggttgagagggcgaattt

SEQ ID NO: 58472 - RNA, 22 nt, Synthetic Construct
  source 1..22: mol_type = other RNA
ccagtgcactacagaactttgt

SEQ ID NO: 58473 - RNA, 16 nt, Synthetic Construct
  source 1..16: mol_type = other RNA
cagtcaggatgttggc

SEQ ID NO: 58474 - RNA, 26 nt, Synthetic Construct
  source 1..26: mol_type = other RNA
gatgcgtggtaggagagcgttctgta

SEQ ID NO: 58475 - RNA, 23 nt, Synthetic Construct
  source 1..23: mol_type = other RNA
ttaatgctaatcgtgataggggt

SEQ ID NO: 58476 - RNA, 22 nt, Synthetic Construct
  source 1..22: mol_type = other RNA
tagcagcacataaatattggcg

SEQ ID NO: 58477 - RNA, 22 nt, Synthetic Construct
  source 1..22: mol_type = other RNA
tagcagcacataaatattggcg

SEQ ID NO: 58478 - RNA, 22 nt, Synthetic Construct
  source 1..22: mol_type = other RNA
tagcagcacgtaagtattggcg

SEQ ID NO: 58479 - RNA, 21 nt, Synthetic Construct
  source 1..21: mol_type = other RNA
ctggacttggagtcagaaggc

SEQ ID NO: 58480 - RNA, 21 nt, Synthetic Construct
  source 1..21: mol_type = other RNA
tggggtagtaggttgtatagt

SEQ ID NO: 58481 - RNA, 21 nt, Synthetic Construct
  source 1..21: mol_type = other RNA
tggggtagtaggttgtatagt

SEQ ID NO: 58482 - RNA, 22 nt, Synthetic Construct
  source 1..22: mol_type = other RNA
cataaagtagaaagcactacta

SEQ ID NO: 58483 - RNA, 22 nt, Synthetic Construct
  source 1..22: mol_type = other RNA
cataaagtagaaagcactacta

SEQ ID NO: 58484 - RNA, 19 nt, Synthetic Construct
  source 1..19: mol_type = other RNA
agtcgacgtatagggtgtg

SEQ ID NO: 58485 - RNA, 28 nt, Synthetic Construct
  source 1..28: mol_type = other RNA
ccccccactgctaaatttggctggcttt

SEQ ID NO: 58486 - RNA, 28 nt, Synthetic Construct
  source 1..28: mol_type = other RNA
ccccccactgctaaatttggctggcttt

SEQ ID NO: 58487 - RNA, 19 nt, Synthetic Construct
  source 1..19: mol_type = other RNA
tagcagcacgtaaatattg

SEQ ID NO: 58488 - RNA, 19 nt, Synthetic Construct
  source 1..19: mol_type = other RNA
tagcagcacgtaaatattg

SEQ ID NO: 58489 - RNA, 21 nt, Synthetic Construct
  source 1..21: mol_type = other RNA
agggctgggtcggtcgggctg

SEQ ID NO: 58490 - RNA, 21 nt, Synthetic Construct
  source 1..21: mol_type = other RNA
agggctgggtcggtcgggctg

SEQ ID NO: 58491 - RNA, 22 nt, Synthetic Construct
  source 1..22: mol_type = other RNA
tgtcaactggttgttgggaggg

SEQ ID NO: 58492 - RNA, 22 nt, Synthetic Construct
  source 1..22: mol_type = other RNA
tgtcaactggttgttgggaggg

SEQ ID NO: 58493 - RNA, 19 nt, Synthetic Construct
  source 1..19: mol_type = other RNA
gttctacagtccgacgatc

SEQ ID NO: 58494 - RNA, 19 nt, Synthetic Construct
  source 1..19: mol_type = other RNA
gttctacagtccgacgatc

SEQ ID NO: 58495 - RNA, 22 nt, Synthetic Construct
  source 1..22: mol_type = other RNA
tcgtaccatgagtaataatgcg

SEQ ID NO: 58496 - RNA, 21 nt, Synthetic Construct
  source 1..21: mol_type = other RNA
tgaagtagtaggttgtatagt

SEQ ID NO: 58497 - RNA, 23 nt, Synthetic Construct
  source 1..23: mol_type = other RNA
tagcttatcagactgatgttgac

SEQ ID NO: 58498 - RNA, 22 nt, Synthetic Construct
  source 1..22: mol_type = other RNA
tgaggtaataggttgtgtggtt

SEQ ID NO: 58499 - RNA, 22 nt, Synthetic Construct
  source 1..22: mol_type = other RNA
tgaggtaataggttgtgtggtt

SEQ ID NO: 58500 - RNA, 21 nt, Synthetic Construct
  source 1..21: mol_type = other RNA
tgaggtagtaggttgtataga

SEQ ID NO: 58501 - RNA, 21 nt, Synthetic Construct
  source 1..21: mol_type = other RNA
tgaggtagtaggttgtataga

SEQ ID NO: 58502 - RNA, 22 nt, Synthetic Construct
  source 1..22: mol_type = other RNA
tagcagcacgtaaatattggtg

SEQ ID NO: 58503 - RNA, 22 nt, Synthetic Construct
  source 1..22: mol_type = other RNA
tagcagcacgtaaatattggtg

SEQ ID NO: 58504 - RNA, 23 nt, Synthetic Construct
  source 1..23: mol_type = other RNA
agcggcattgtacagggctatga

SEQ ID NO: 58505 - RNA, 23 nt, Synthetic Construct
  source 1..23: mol_type = other RNA
agcggcattgtacagggctatga

SEQ ID NO: 58506 - RNA, 22 nt, Synthetic Construct
  source 1..22: mol_type = other RNA
tgaggtagtagattgtatagct

SEQ ID NO: 58507 - RNA, 22 nt, Synthetic Construct
  source 1..22: mol_type = other RNA
tgaggtagtagattgtatagct

SEQ ID NO: 58508 - RNA, 20 nt, Synthetic Construct
  source 1..20: mol_type = other RNA
tgaggaagtaggttgtgtgg

SEQ ID NO: 58509 - RNA, 20 nt, Synthetic Construct
  source 1..20: mol_type = other RNA
caggacagtgaaacgagtca

SEQ ID NO: 58510 - RNA, 20 nt, Synthetic Construct
  source 1..20: mol_type = other RNA
caggacagtgaaacgagtca

SEQ ID NO: 58511 - RNA, 19 nt, Synthetic Construct
  source 1..19: mol_type = other RNA
tctaatgagactgccggtg

SEQ ID NO: 58512 - RNA, 22 nt, Synthetic Construct
  source 1..22: mol_type = other RNA
tgaggtagcagtttgtgctgtt

SEQ ID NO: 58513 - RNA, 22 nt, Synthetic Construct
  source 1..22: mol_type = other RNA
tgaggtagcagtttgtgctgtt

SEQ ID NO: 58514 - RNA, 36 nt, Synthetic Construct; identical to SEQ ID NO: 2660
  source 1..36: mol_type = other RNA

SEQ ID NO: 58515 - RNA, 22 nt, Synthetic Construct
  source 1..22: mol_type = other RNA
cattgcacttgtcccggtctga

SEQ ID NO: 58516 - RNA, 22 nt, Synthetic Construct
  source 1..22: mol_type = other RNA
cattgcacttgtcccggtctga

SEQ ID NO: 58517 - RNA, 23 nt, Synthetic Construct
  source 1..23: mol_type = other RNA
cgaagtgctgttcgtgcaggtag

SEQ ID NO: 58518 - RNA, 22 nt, Synthetic Construct
  source 1..22: mol_type = other RNA
tgaggtggtaggttgtatagtt

SEQ ID NO: 58519 - RNA, 22 nt, Synthetic Construct
  source 1..22: mol_type = other RNA
tgaggtggtaggttgtatagtt

SEQ ID NO: 58520 - RNA, 22 nt, Synthetic Construct
  source 1..22: mol_type = other RNA
tgaggtagtaggtagtgtggtt

SEQ ID NO: 58521 - RNA, 22 nt, Synthetic Construct
  source 1..22: mol_type = other RNA
tgaggtagtaggtagtgtggtt

SEQ ID NO: 58522 - RNA, 21 nt, Synthetic Construct
  source 1..21: mol_type = other RNA
tgaggtagtagatcgtatagt

SEQ ID NO: 58523 - RNA, 20 nt, Synthetic Construct
  source 1..20: mol_type = other RNA
cgaggtagtaggttgtatag

SEQ ID NO: 58524 - RNA, 22 nt, Synthetic Construct
  source 1..22: mol_type = other RNA
ggtagcgaaattccttgtcggg

SEQ ID NO: 58525 - RNA, 23 nt, Synthetic Construct
  source 1..23: mol_type = other RNA
tgtcagtttgccaaataccccaa

SEQ ID NO: 58526 - RNA, 22 nt, Synthetic Construct
  source 1..22: mol_type = other RNA
tgaggtagtaggttgtgaggtt

SEQ ID NO: 58527 - RNA, 22 nt, Synthetic Construct
  source 1..22: mol_type = other RNA
tgaggtagtaggttgtgaggtt

SEQ ID NO: 58528 - RNA, 17 nt, Synthetic Construct
  source 1..17: mol_type = other RNA
accaaggggtcgtgggt

SEQ ID NO: 58529 - RNA, 17 nt, Synthetic Construct
  source 1..17: mol_type = other RNA
accaaggggtcgtgggt

SEQ ID NO: 58530 - RNA, 24 nt, Synthetic Construct
  source 1..24: mol_type = other RNA
agctcggtctgaggcccctcagtt

SEQ ID NO: 58531 - RNA, 24 nt, Synthetic Construct
  source 1..24: mol_type = other RNA
agctcggtctgaggcccctcagtt

SEQ ID NO: 58532 - RNA, 23 nt, Synthetic Construct
  source 1..23: mol_type = other RNA
tgacctatgaattgacagccaga

SEQ ID NO: 58533 - RNA, 23 nt, Synthetic Construct
  source 1..23: mol_type = other RNA
tgacctatgaattgacagccaga

SEQ ID NO: 58534 - RNA, 22 nt, Synthetic Construct
  source 1..22: mol_type = other RNA
tagcagcacgtaaacattggcg

SEQ ID NO: 58535 - RNA, 22 nt, Synthetic Construct
  source 1..22: mol_type = other RNA
tagcagcacgtaaacattggcg

SEQ ID NO: 58536 - RNA, 21 nt, Synthetic Construct
  source 1..21: mol_type = other RNA
cggagtgtgacaatggtgttt

SEQ ID NO: 58537 - RNA, 21 nt, Synthetic Construct
  source 1..21: mol_type = other RNA
cggagtgtgacaatggtgttt

SEQ ID NO: 58538 - RNA, 24 nt, Synthetic Construct
  source 1..24: mol_type = other RNA
tagcttatcagactgatgttgaca

SEQ ID NO: 58539 - RNA, 15 nt, Synthetic Construct
  source 1..15: mol_type = other RNA
ccagaaacccggtcg

SEQ ID NO: 58540 - RNA, 21 nt, Synthetic Construct
  source 1..21: mol_type = other RNA
tggggtagtaggttgtatagt

SEQ ID NO: 58541 - RNA, 21 nt, Synthetic Construct
  source 1..21: mol_type = other RNA
tggggtagtaggttgtatagt

SEQ ID NO: 58542 - RNA, 25 nt, Synthetic Construct
  source 1..25: mol_type = other RNA
gctcagtggaaaggatgtgaatcta

SEQ ID NO: 58543 - RNA, 25 nt, Synthetic Construct
  source 1..25: mol_type = other RNA
gctcagtggaaaggatgtgaatcta

SEQ ID NO: 58544 - RNA, 23 nt, Synthetic Construct
  source 1..23: mol_type = other RNA
caaagtgctgttcgtgcgggtag

SEQ ID NO: 58545 - RNA, 23 nt, Synthetic Construct
  source 1..23: mol_type = other RNA
caaagtgctgttcgtgcgggtag

SEQ ID NO: 58546 - RNA, 22 nt, Synthetic Construct
  source 1..22: mol_type = other RNA
tgaggtagtaggttgtatagtc

SEQ ID NO: 58547 - RNA, 22 nt, Synthetic Construct
  source 1..22: mol_type = other RNA
tgaggtagtaggttgtatagtc

SEQ ID NO: 58548 - RNA, 21 nt, Synthetic Construct
  source 1..21: mol_type = other RNA
tcatgtactgagctgccccga

SEQ ID NO: 58549 - RNA, 21 nt, Synthetic Construct
  source 1..21: mol_type = other RNA
tcatgtactgagctgccccga

SEQ ID NO: 58550 - RNA, 20 nt, Synthetic Construct
  source 1..20: mol_type = other RNA
tcgcgccgtcgggcccgggg

SEQ ID NO: 58551 - RNA, 17 nt, Synthetic Construct
  source 1..17: mol_type = other RNA
cggcgggagtaactatg
